United States Patent Application Publication US 2007/0009899 A1 - sequence listing, part 8

SEQ ID NO: 167019 - DNA, 25 bp, Canis familiaris
tggaagttattcagagtcctctctt

SEQ ID NO: 167020 - DNA, 25 bp, Canis familiaris
tggaagtatttctgttgctcctgga

SEQ ID NO: 167021 - DNA, 25 bp, Canis familiaris
tggaatgtcagttcaggatccccag

SEQ ID NO: 167022 - DNA, 25 bp, Canis familiaris
tggaatgtgaagtgactccccaacc

SEQ ID NO: 167023 - DNA, 25 bp, Canis familiaris
tggaaggaaattgcatccccgagcc

SEQ ID NO: 167024 - DNA, 25 bp, Canis familiaris
tggaaggaaggtggcaccccgagca

SEQ ID NO: 167025 - DNA, 25 bp, Canis familiaris
tggaagaccaggagaccctctgagt

SEQ ID NO: 167026 - DNA, 25 bp, Canis familiaris
tggaaagccttgtgttcctcgagga

SEQ ID NO: 167027 - DNA, 25 bp, Canis familiaris
tggaagaacgctgtgtggctgccga

SEQ ID NO: 167028 - DNA, 25 bp, Canis familiaris
tggaggaacgcctgatttccaggaa

SEQ ID NO: 167029 - DNA, 25 bp, Canis familiaris
tggagcacaaccgttttctccaggg

SEQ ID NO: 167030 - DNA, 25 bp, Canis familiaris
tggagacaagccttttttgcccaag

SEQ ID NO: 167031 - DNA, 25 bp, Canis familiaris
tggaccaggcccattgggaccaatg

SEQ ID NO: 167032 - DNA, 25 bp, Canis familiaris
tggaatgggcccagtggagcatcct

SEQ ID NO: 167033 - DNA, 25 bp, Canis familiaris
tggagggagcccctgtggatttcta

SEQ ID NO: 167034 - DNA, 25 bp, Canis familiaris
tggagaaatgccggggcgtcttccc

SEQ ID NO: 167035 - DNA, 25 bp, Canis familiaris
tggagtaacttctccagcttcagct

SEQ ID NO: 167036 - DNA, 25 bp, Canis familiaris
tggagaacgcatttttcactctcgc

SEQ ID NO: 167037 - DNA, 25 bp, Canis familiaris
tggaaggcgatggctcttcttccca

SEQ ID NO: 167038 - DNA, 25 bp, Canis familiaris
tggaaggcagaggcatccctgcccc

SEQ ID NO: 167039 - DNA, 25 bp, Canis familiaris
tggaagagcatggttaacccacccc

SEQ ID NO: 167040 - DNA, 25 bp, Canis familiaris
tggaaagtgatgatacccgggccgc

SEQ ID NO: 167041 - DNA, 25 bp, Canis familiaris
tggagggtgatcattccacaccccc

SEQ ID NO: 167042 - DNA, 25 bp, Canis familiaris
tggacggagatagcactcaacccct

SEQ ID NO: 167043 - DNA, 25 bp, Canis familiaris
tggacagagagctacagcattcaaa

SEQ ID NO: 167044 - DNA, 25 bp, Canis familiaris
tggacatgagcagcatcacacccaa

SEQ ID NO: 167045 - DNA, 25 bp, Canis familiaris
tggtatgaggccatcacctgaagat

SEQ ID NO: 167046 - DNA, 25 bp, Canis familiaris
tggttgaaagaggcacagtgaagat

SEQ ID NO: 167047 - DNA, 25 bp, Canis familiaris
tggatataagattcccaggggaggc

SEQ ID NO: 167048 - DNA, 25 bp, Canis familiaris
tggatcatgaaacctccggacgaca

SEQ ID NO: 167049 - DNA, 25 bp, Canis familiaris
tggagagaacacttggctcgaggaa

SEQ ID NO: 167050 - DNA, 25 bp, Canis familiaris
tggagagtgacttgctgagcccaga

SEQ ID NO: 167051 - DNA, 25 bp, Canis familiaris
tggatgagctccagctgaggcacca

SEQ ID NO: 167052 - DNA, 25 bp, Canis familiaris
tggagaatgccaacgtgctggcccg

SEQ ID NO: 167053 - DNA, 25 bp, Canis familiaris
tggaacaccatacctatggcgccat

SEQ ID NO: 167054 - DNA, 25 bp, Canis familiaris
tggaagcatccatgagccaggctgc

SEQ ID NO: 167055 - DNA, 25 bp, Canis familiaris
tggaagcagctttgattcagccgcc

SEQ ID NO: 167056 - DNA, 25 bp, Canis familiaris
tggaagcactattacctgctccaca

SEQ ID NO: 167057 - DNA, 25 bp, Canis familiaris
tggaagcagtctctcacattcctga

SEQ ID NO: 167058 - DNA, 25 bp, Canis familiaris
tggaggaggctgctacactaaaaca

SEQ ID NO: 167059 - DNA, 25 bp, Canis familiaris
tggagtcggcgcgcaaagcgaaagc

SEQ ID NO: 167060 - DNA, 25 bp, Canis familiaris
tggtctcggggcacaatggcaactc

SEQ ID NO: 167061 - DNA, 25 bp, Canis familiaris
tggtccatggggaaaccagcctgct

SEQ ID NO: 167062 - DNA, 25 bp, Canis familiaris
tggtccatggggaaaccagcctgct

SEQ ID NO: 167063 - DNA, 25 bp, Canis familiaris
tggtccatggggaaaccagcctgct

SEQ ID NO: 167064 - DNA, 25 bp, Canis familiaris
tggtccatggggaaaccagcctgct

SEQ ID NO: 167065 - DNA, 25 bp, Canis familiaris
tggtctgatgggtttatgaattctc

SEQ ID NO: 167066 - DNA, 25 bp, Canis familiaris
tggagcatggggtctttcgtttccc

SEQ ID NO: 167067 - DNA, 25 bp, Canis familiaris
tggactgaaggacctctagttcccc

SEQ ID NO: 167068 - DNA, 25 bp, Canis familiaris
tggactgaaggggccatcccttccc

SEQ ID NO: 167069 - DNA, 25 bp, Canis familiaris
tggaggaaggccacctccagtacct

SEQ ID NO: 167070 - DNA, 25 bp, Canis familiaris
tggagaagaagggcccccaggtcag

SEQ ID NO: 167071 - DNA, 25 bp, Canis familiaris
tggagaaaaacagcaccccttctga

SEQ ID NO: 167072 - DNA, 25 bp, Canis familiaris
tggaaattaaagtccctccatcctt

SEQ ID NO: 167073 - DNA, 25 bp, Canis familiaris
tggacaggtagaggcatctgcccca

SEQ ID NO: 167074 - DNA, 25 bp, Canis familiaris
tggagagggaccgtctgacctctga

SEQ ID NO: 167075 - DNA, 25 bp, Canis familiaris
tggaggtggagcccagtgacaccat

SEQ ID NO: 167076 - DNA, 25 bp, Canis familiaris
tggaggttgggctggatcctcatcc

SEQ ID NO: 167077 - DNA, 25 bp, Canis familiaris
tggagtaataggtcgggccttgccg

SEQ ID NO: 167078 - DNA, 25 bp, Canis familiaris
tggagtccttggtggagctgttggc

SEQ ID NO: 167079 - DNA, 25 bp, Canis familiaris
tggaccaccaggctggttcaggtgc

SEQ ID NO: 167080 - DNA, 25 bp, Canis familiaris
tggactcccagatggtctgtgcaga

SEQ ID NO: 167081 - DNA, 25 bp, Canis familiaris
tggaccagccaacgcagactgtggt

SEQ ID NO: 167082 - DNA, 25 bp, Canis familiaris
tggaccagcacaaggatgaccggcc

SEQ ID NO: 167083 - DNA, 25 bp, Canis familiaris
tggagcattccaggaagaccccact

SEQ ID NO: 167084 - DNA, 25 bp, Canis familiaris
tggagcattgtcacaacggcaccaa

SEQ ID NO: 167085 - DNA, 25 bp, Canis familiaris
tgctggcttactttatcggcctcaa

SEQ ID NO: 167086 - DNA, 25 bp, Canis familiaris
tggagtgatagctttgaaggttcat

SEQ ID NO: 167087 - DNA, 25 bp, Canis familiaris
tggagccatccaagtatcgtgttat

SEQ ID NO: 167088 - DNA, 25 bp, Canis familiaris
tggagccataacctgatggagggca

SEQ ID NO: 167089 - DNA, 25 bp, Canis familiaris
tggacctcaactctgatggcagcgt

SEQ ID NO: 167090 - DNA, 25 bp, Canis familiaris
tggagcccacagtcattgatgaagt

SEQ ID NO: 167091 - DNA, 25 bp, Canis familiaris
tggagctccagagactgagacatca

SEQ ID NO: 167092 - DNA, 25 bp, Canis familiaris
tggaaccagatggacaagacatact

SEQ ID NO: 167093 - DNA, 25 bp, Canis familiaris
tggaaacagtgtgcaatgatgtcct

SEQ ID NO: 167094 - DNA, 25 bp, Canis familiaris
tggaaacttcattaagatgcactta

SEQ ID NO: 167095 - DNA, 25 bp, Canis familiaris
tggagatatcttgataacagacttc

SEQ ID NO: 167096 - DNA, 25 bp, Canis familiaris
tggagtcctgctgtgtgacaagccc

SEQ ID NO: 167097 - DNA, 25 bp, Canis familiaris
tggagactcctcttgagaaggccct

SEQ ID NO: 167098 - DNA, 25 bp, Canis familiaris
tggaaacctgctggtgaatgtcccc

SEQ ID NO: 167099 - DNA, 25 bp, Canis familiaris
tggagaacacggggtaatccctgcc

SEQ ID NO: 167100 - DNA, 25 bp, Canis familiaris
tggagatcccgggatcgagtcccac

SEQ ID NO: 167101 - DNA, 25 bp, Canis familiaris
tggagatctacgggtccgtgtccag

SEQ ID NO: 167102 - DNA, 25 bp, Canis familiaris
tgtgaaaactgccctgggttccagg

SEQ ID NO: 167103 - DNA, 25 bp, Canis familiaris
tggaaagagctggggggcttctcgg

SEQ ID NO: 167104 - DNA, 25 bp, Canis familiaris
tggaggagacttgcgggttcatcgg

SEQ ID NO: 167105 - DNA, 25 bp, Canis familiaris
tggaggagacccggggctggtagag

SEQ ID NO: 167106 - DNA, 25 bp, Canis familiaris
tggagggacggaggagggcggtggc

SEQ ID NO: 167107 - DNA, 25 bp, Canis familiaris
tggagaggtaggtgggtggaggggg

SEQ ID NO: 167108 - DNA, 25 bp, Canis familiaris
tggagcaaggggggtgtgggtggtt

SEQ ID NO: 167109 - DNA, 25 bp, Canis familiaris
tggtcagagggggggttggtaagat

SEQ ID NO: 167110 - DNA, 25 bp, Canis familiaris
tgggccattggccaacctttgtaaa

SEQ ID NO: 167111 - DNA, 25 bp, Canis familiaris
tggagccagcttcagactattttat

SEQ ID NO: 167112 - DNA, 25 bp, Canis familiaris
tggacccctgtattgctagagtgta

SEQ ID NO: 167113 - DNA, 25 bp, Canis familiaris
tggagcccagctgcctaagaagtaa

SEQ ID NO: 167114 - DNA, 25 bp, Canis familiaris
tggatgcccctaactcacggggcaa

SEQ ID NO: 167115 - DNA, 25 bp, Canis familiaris
tggacatccgcaaagacctgtacgc

SEQ ID NO: 167116 - DNA, 25 bp, Canis familiaris
tggacatccgtaaggacctgtatgc

SEQ ID NO: 167117 - DNA, 25 bp, Canis familiaris
tggacatgccttgatggacactggg

SEQ ID NO: 167118 - DNA, 25 bp, Canis familiaris
tggacatcaccttttacagcatcgg

SEQ ID NO: 167119 - DNA, 25 bp, Canis familiaris
tggactgatcctattcacagcttcc

SEQ ID NO: 167120 - DNA, 25 bp, Canis familiaris
tggaccatcttcaaatcccatgttt

SEQ ID NO: 167121 - DNA, 25 bp, Canis familiaris
tggacctgttgtacaacctctttcc

SEQ ID NO: 167122 - DNA, 25 bp, Canis familiaris
tggacacttctttatactctcttcc

SEQ ID NO: 167123 - DNA, 25 bp, Canis familiaris
tggacactcactacatgtgacctcc

SEQ ID NO: 167124 - DNA, 25 bp, Canis familiaris
tggactccatcttatgaggcctcca

SEQ ID NO: 167125 - DNA, 25 bp, Canis familiaris
tggagtcagctttcaggatgcacct

SEQ ID NO: 167126 - DNA, 25 bp, Canis familiaris
tggaccagtgggtcgagcagctcaa

SEQ ID NO: 167127 - DNA, 25 bp, Canis familiaris
tggacctggctggatgagccgccac

SEQ ID NO: 167128 - DNA, 25 bp, Canis familiaris
tggagcctgggcgtgatgctctaca

SEQ ID NO: 167129 - DNA, 25 bp, Canis familiaris
tggacgctaagcctgactttcgtac

SEQ ID NO: 167130 - DNA, 25 bp, Canis familiaris
tggaggcagccagggcttacctgta

SEQ ID NO: 167131 - DNA, 25 bp, Canis familiaris
tggaggaagatctcctacctgttct

SEQ ID NO: 167132 - DNA, 25 bp, Canis familiaris
tgggggaatgcagcctttttttcct

SEQ ID NO: 167133 - DNA, 25 bp, Canis familiaris
tggagggcattgcctagctcttttt

SEQ ID NO: 167134 - DNA, 25 bp, Canis familiaris
tggagtcacaattaagctttttctt

SEQ ID NO: 167135 - DNA, 25 bp, Canis familiaris
tggagataaccaaagttttctcctt

SEQ ID NO: 167136 - DNA, 25 bp, Canis familiaris
tggaaacacctgagtttacttctgc

SEQ ID NO: 167137 - DNA, 25 bp, Canis familiaris
tggaaaagttgaaggcttctcttag

SEQ ID NO: 167138 - DNA, 25 bp, Canis familiaris
tggaaagggtgaatgtttgccctgg

SEQ ID NO: 167139 - DNA, 25 bp, Canis familiaris
tggaaagagtctctgacttccctcg

SEQ ID NO: 167140 - DNA, 25 bp, Canis familiaris
tggaaatgagttcatctcgtaccct

SEQ ID NO: 167141 - DNA, 25 bp, Canis familiaris
tggagaaagcttcactgggtccaca

SEQ ID NO: 167142 - DNA, 25 bp, Canis familiaris
tggaaaagcgtctgcacgctgtccc

SEQ ID NO: 167143 - DNA, 25 bp, Canis familiaris
tggaaaaggcactcaactctccgtt

SEQ ID NO: 167144 - DNA, 25 bp, Canis familiaris
tggaaatgaacctcatcacctgacc

SEQ ID NO: 167145 - DNA, 25 bp, Canis familiaris
tggaaaaggccaagaatcctgtcac

SEQ ID NO: 167146 - DNA, 25 bp, Canis familiaris
tggattaacgccagcaactcggcct

SEQ ID NO: 167147 - DNA, 25 bp, Canis familiaris
tggatgtcacgacaacaacctggcc

SEQ ID NO: 167148 - DNA, 25 bp, Canis familiaris
tggatgctcccaaatataatatcgg

SEQ ID NO: 167149 - DNA, 25 bp, Canis familiaris
tggattctgcgaggctaaaatagga

SEQ ID NO: 167150 - DNA, 25 bp, Canis familiaris
tggatcctctgggcatcacaaatca

SEQ ID NO: 167151 - DNA, 25 bp, Canis familiaris
tggacctctggaacctcaacaatga

SEQ ID NO: 167152 - DNA, 25 bp, Canis familiaris
tggatcctcatccatgaccgaagag

SEQ ID NO: 167153 - DNA, 25 bp, Canis familiaris
tggacactccacaactggaacacta

SEQ ID NO: 167154 - DNA, 25 bp, Canis familiaris
tggtcatcttcaaaatggggactcc

SEQ ID NO: 167155 - DNA, 25 bp, Canis familiaris
tggaccttacgccatggtgtagttc

SEQ ID NO: 167156 - DNA, 25 bp, Canis familiaris
tggagctctggctgtgatggtgggt

SEQ ID NO: 167157 - DNA, 25 bp, Canis familiaris
tggagcttcctcaagatggtgccac

SEQ ID NO: 167158 - DNA, 25 bp, Canis familiaris
tggacttcgagcaagagatggccac

SEQ ID NO: 167159 - DNA, 25 bp, Canis familiaris
tggacaacgatgggcaggctccacc

SEQ ID NO: 167160 - DNA, 25 bp, Canis familiaris
tggaacagccaggagatctgtcccc

SEQ ID NO: 167161 - DNA, 25 bp, Canis familiaris
tggacagcatcttcgtatcaatccc

SEQ ID NO: 167162 - DNA, 25 bp, Canis familiaris
tggaccatgacacttatgaatcctc

SEQ ID NO: 167163 - DNA, 25 bp, Canis familiaris
tggactcaacaccggattggctcat

SEQ ID NO: 167164 - DNA, 25 bp, Canis familiaris
tggagaccataactggttgccgctc

SEQ ID NO: 167165 - DNA, 25 bp, Canis familiaris
tggacaccgaatccagagtgccacc

SEQ ID NO: 167166 - DNA, 25 bp, Canis familiaris
tggacagcctgtcacagagtgctct

SEQ ID NO: 167167 - DNA, 25 bp, Canis familiaris
tggtagacggcatcgattgtctccc

SEQ ID NO: 167168 - DNA, 25 bp, Canis familiaris
tggagaggggtgtgttgttcccttt

SEQ ID NO: 167169 - DNA, 25 bp, Canis familiaris
tggacggtcagggtgtctgttccac

SEQ ID NO: 167170 - DNA, 25 bp, Canis familiaris
tggacgtacaggtgtctgttccact

SEQ ID NO: 167171 - DNA, 25 bp, Canis familiaris
tggaccccagtgttaatataccctt

SEQ ID NO: 167172 - DNA, 25 bp, Canis familiaris
tggagccccaaactttgatcctcca

SEQ ID NO: 167173 - DNA, 25 bp, Canis familiaris
tggagactggaaagaattaccggat

SEQ ID NO: 167174 - DNA, 25 bp, Canis familiaris
tggagagctcgatgcagaactaccc

SEQ ID NO: 167175 - DNA, 25 bp, Canis familiaris
tggagagccgaacgtgacgacgcgg

SEQ ID NO: 167176 - DNA, 25 bp, Canis familiaris
tggaggccgagaagttcgacctgca

SEQ ID NO: 167177 - DNA, 25 bp, Canis familiaris
tggagggccagaaggtggtcccacg

SEQ ID NO: 167178 - DNA, 25 bp, Canis familiaris
tggacggccagtactctggctccaa

SEQ ID NO: 167179 - DNA, 25 bp, Canis familiaris
tggacaacatcatcaactcagccaa

SEQ ID NO: 167180 - DNA, 25 bp, Canis familiaris
tggatgcaacacttgcatcgctccc

SEQ ID NO: 167181 - DNA, 25 bp, Canis familiaris
tggatgcagacattatcttggcagc

SEQ ID NO: 167182 - DNA, 25 bp, Canis familiaris
tggacaacatgaccttgatgcggcc

SEQ ID NO: 167183 - DNA, 25 bp, Canis familiaris
tggacctcatggcctacatggcctc

SEQ ID NO: 167184 - DNA, 25 bp, Canis familiaris
tggacctcatggtccacatggcctc

SEQ ID NO: 167185 - DNA, 25 bp, Canis familiaris
tggacctcatggtccacatggcctc

SEQ ID NO: 167186 - DNA, 25 bp, Canis familiaris
tggacctcatggcccacatggcctc

SEQ ID NO: 167187 - DNA, 25 bp, Canis familiaris
tggacacttggccaactgagctacc

SEQ ID NO: 167188 - DNA, 25 bp, Canis familiaris
tggacacctggcagtcaagtatcat

SEQ ID NO: 167189 - DNA, 25 bp, Canis familiaris
tggaaactgactagtgccgttaata

SEQ ID NO: 167190 - DNA, 25 bp, Canis familiaris
tggacaacatgtccccacgttacat

SEQ ID NO: 167191 - DNA, 25 bp, Canis familiaris
tggagcccagtgacaccatcgaaaa

SEQ ID NO: 167192 - DNA, 25 bp, Canis familiaris
tggagcgcaagttccgccagaaaca

SEQ ID NO: 167193 - DNA, 25 bp, Canis familiaris
tggagctggacttccaaagcaccca

SEQ ID NO: 167194 - DNA, 25 bp, Canis familiaris
tggatgggagaaccactgagcaaac

SEQ ID NO: 167195 - DNA, 25 bp, Canis familiaris
tggagcgagagcagacgggcaagcc

SEQ ID NO: 167196 - DNA, 25 bp, Canis familiaris
tggagaggaggcaggggccaggctg

SEQ ID NO: 167197 - DNA, 25 bp, Canis familiaris
tggagagcgtgagtgggcccaaggc

SEQ ID NO: 167198 - DNA, 25 bp, Canis familiaris
tggagcaggggtattccagggccta

SEQ ID NO: 167199 - DNA, 25 bp, Canis familiaris
tggagttgggtaatcctagccccta

SEQ ID NO: 167200 - DNA, 25 bp, Canis familiaris
tggagcttggtgaactcctttccgc

SEQ ID NO: 167201 - DNA, 25 bp, Canis familiaris
tggagcaggattctccagctttccg

SEQ ID NO: 167202 - DNA, 25 bp, Canis familiaris
tggaggtgaagtgcttgctctgggg

SEQ ID NO: 167203 - DNA, 25 bp, Canis familiaris
tggacacagaggtacccctggagcg

SEQ ID NO: 167204 - DNA, 25 bp, Canis familiaris
tggacacaaggatgccacgcagcac

SEQ ID NO: 167205 - DNA, 25 bp, Canis familiaris
tggacacagaggtgcccatggagcg

SEQ ID NO: 167206 - DNA, 25 bp, Canis familiaris
tggaccagagagagagccccagggg

SEQ ID NO: 167207 - DNA, 25 bp, Canis familiaris
tggaccataaacacccgatgggcgg

SEQ ID NO: 167208 - DNA, 25 bp, Canis familiaris
tggacccagaaaaccctgaggtgca

SEQ ID NO: 167209 - DNA, 25 bp, Canis familiaris
tggacaccaaaaactacaagcaaac

SEQ ID NO: 167210 - DNA, 25 bp, Canis familiaris
tggacacatatttggacttcgacac

SEQ ID NO: 167211 - DNA, 25 bp, Canis familiaris
tggagactgtggtgacttcgcccat

SEQ ID NO: 167212 - DNA, 25 bp, Canis familiaris
tggagtctgtcttcagttttgaccc

SEQ ID NO: 167213 - DNA, 25 bp, Canis familiaris
tggagtcatggaacagtttctgtaa

SEQ ID NO: 167214 - DNA, 25 bp, Canis familiaris
tggagacgggtctttcctataaact

SEQ ID NO: 167215 - DNA, 25 bp, Canis familiaris
tggaccttcctttgtctctaaaact

SEQ ID NO: 167216 - DNA, 25 bp, Canis familiaris
tggagcctttcattatttttagata

SEQ ID NO: 167217 - DNA, 25 bp, Canis familiaris
tggagatacttatttttttgcatgt

SEQ ID NO: 167218 - DNA, 25 bp, Canis familiaris
tggagatgtttcttttctctctttt

SEQ ID NO: 167219 - DNA, 25 bp, Canis familiaris
tggagagtctaggtcttctccctga

SEQ ID NO: 167220 - DNA, 25 bp, Canis familiaris
tggacagactcagaattatgaacga

SEQ ID NO: 167221 - DNA, 25 bp, Canis familiaris
tggtcagtacacagttaaaagaaga

SEQ ID NO: 167222 - DNA, 25 bp, Canis familiaris
tggttgtaaaggcttccaatgaaga

SEQ ID NO: 167223 - DNA, 25 bp, Canis familiaris
tggaggtaaagttgttccctcaaga

SEQ ID NO: 167224 - DNA, 25 bp, Canis familiaris
tggttgcatatttttgtggccccaa

SEQ ID NO: 167225 - DNA, 25 bp, Canis familiaris
tggtcaattttgtagtccccacgaa

SEQ ID NO: 167226 - DNA, 25 bp, Canis familiaris
tggtagttcttatgaatctcccaag

SEQ ID NO: 167227 - DNA, 25 bp, Canis familiaris
tgtggggtcaaatacatccctaatc

SEQ ID NO: 167228 - DNA, 25 bp, Canis familiaris
tggaggggcaaacccctcctactgc

SEQ ID NO: 167229 - DNA, 25 bp, Canis familiaris
tggagagggtaacccaggccatgcc

SEQ ID NO: 167230 - DNA, 25 bp, Canis familiaris
tggaggaggcagcagccaaggctct

SEQ ID NO: 167231 - DNA, 25 bp, Canis familiaris
tggagagaaggccagccggggggag

SEQ ID NO: 167232 - DNA, 25 bp, Canis familiaris
tggagcagaagcgggccgcggtgga

SEQ ID NO: 167233 - DNA, 25 bp, Canis familiaris
tggatcgagagggtggtcggctggc

SEQ ID NO: 167234 - DNA, 25 bp, Canis familiaris
tggacacagtgcccgtgtcggagcc

SEQ ID NO: 167235 - DNA, 25 bp, Canis familiaris
tggacgcatgtcacgtgacggacca

SEQ ID NO: 167236 - DNA, 25 bp, Canis familiaris
tggacgatgtcatcggcctgtaggc

SEQ ID NO: 167237 - DNA, 25 bp, Canis familiaris
tggagctgcaaaatccggtgtaggc

SEQ ID NO: 167238 - DNA, 25 bp, Canis familiaris
tggagtctagatttcctgtgttccc

SEQ ID NO: 167239 - DNA, 25 bp, Canis familiaris
tggagaaggaatccctgctgttccg

SEQ ID NO: 167240 - DNA, 25 bp, Canis familiaris
tggaaaggttccaagagtcttcgtg

SEQ ID NO: 167241 - DNA, 25 bp, Canis familiaris
tggtacaaggtccaaagtttgccga

SEQ ID NO: 167242 - DNA, 25 bp, Canis familiaris
tggttaatctttcaaatttcctcaa

SEQ ID NO: 167243 - DNA, 25 bp, Canis familiaris
tggttttaacttgcattttcctaat

SEQ ID NO: 167244 - DNA, 25 bp, Canis familiaris
tggagtttttctatcttacccaaat

SEQ ID NO: 167245 - DNA, 25 bp, Canis familiaris
tggagctgtttttattcctgaccac

SEQ ID NO: 167246 - DNA, 25 bp, Canis familiaris
tggatgctctctatttagcggagaa

SEQ ID NO: 167247 - DNA, 25 bp, Canis familiaris
tggatctctgtcacttaagcattaa

SEQ ID NO: 167248 - DNA, 25 bp, Canis familiaris
tggatcccgctggtcatgaagcagt

SEQ ID NO: 167249 - DNA, 25 bp, Canis familiaris
tggacacccatgcgcataggcgctt

SEQ ID NO: 167250 - DNA, 25 bp, Canis familiaris
tggagcatatcccggaggaggcttc

SEQ ID NO: 167251 - DNA, 25 bp, Canis familiaris
tggagaatccggagtacctggcacc

SEQ ID NO: 167252 - DNA, 25 bp, Canis familiaris
tggtcaccctggaaaacctggacga

SEQ ID NO: 167253 - DNA, 25 bp, Canis familiaris
tggtcccaagggtaacagcggtgaa

SEQ ID NO: 167254 - DNA, 25 bp, Canis familiaris
tgttacatagcatcagaaacgggtc

SEQ ID NO: 167255 - DNA, 25 bp, Canis familiaris
tgttcaggagattagtaagtcagag

SEQ ID NO: 167256 - DNA, 25 bp, Canis familiaris
tggtcgcgagattaactattcaagc

SEQ ID NO: 167257 - DNA, 25 bp, Canis familiaris
tggactggttccaagctcattcaca

SEQ ID NO: 167258 - DNA, 25 bp, Canis familiaris
tggagggcttctcagacactccagg

SEQ ID NO: 167259 - DNA, 25 bp, Canis familiaris
tggagggaggctcagcctacgggga

SEQ ID NO: 167260 - DNA, 25 bp, Canis familiaris
tggagtgggtgacacccctgggcat

SEQ ID NO: 167261 - DNA, 25 bp, Canis familiaris
tggaggactgtaagaccccttaaag

SEQ ID NO: 167262 - DNA, 25 bp, Canis familiaris
tggagcagagggggagccactcctg

SEQ ID NO: 167263 - DNA, 25 bp, Canis familiaris
tggacgatgggcgaggacgctcagc

SEQ ID NO: 167264 - DNA, 25 bp, Canis familiaris
tggacgtgggctggaaactacaaaa

SEQ ID NO: 167265 - DNA, 25 bp, Canis familiaris
tggagggtgactggaaggtacccaa

SEQ ID NO: 167266 - DNA, 25 bp, Canis familiaris
tggaggaaacctctgtaacccaagt

SEQ ID NO: 167267 - DNA, 25 bp, Canis familiaris
tggtaaagccctcagtaacccaaat

SEQ ID NO: 167268 - DNA, 25 bp, Canis familiaris
tggtccaaacgctgggaacgtccaa

SEQ ID NO: 167269 - DNA, 25 bp, Canis familiaris
tggtccaacagttccaggtacccaa

SEQ ID NO: 167270 - DNA, 25 bp, Canis familiaris
tggattgctccgtttcggtacacca

SEQ ID NO: 167271 - DNA, 25 bp, Canis familiaris
tggagtgtcgcttgtatctttcgca

SEQ ID NO: 167272 - DNA, 25 bp, Canis familiaris
tggagctgcccgtaatttgtgccaa

SEQ ID NO: 167273 - DNA, 25 bp, Canis familiaris
tggacttcctgatattgttgataca

SEQ ID NO: 167274 - DNA, 25 bp, Canis familiaris
tggacttcctgatattgttgataca

SEQ ID NO: 167275 - DNA, 25 bp, Canis familiaris
tggactctaaatttggtgctgacac

SEQ ID NO: 167276 - DNA, 25 bp, Canis familiaris
tggacctaacattcgatctcattca

SEQ ID NO: 167277 - DNA, 25 bp, Canis familiaris
tggactctcaaagcgacttgcagca

SEQ ID NO: 167278 - DNA, 25 bp, Canis familiaris
tggactctcagcgaggggctgtcat

SEQ ID NO: 167279 - DNA, 25 bp, Canis familiaris
tggatccacccagagatcgacaacc

SEQ ID NO: 167280 - DNA, 25 bp, Canis familiaris
tggacccttcacttgggagcaacca

SEQ ID NO: 167281 - DNA, 25 bp, Canis familiaris
tggaccactccatgtggttccacac

SEQ ID NO: 167282 - DNA, 25 bp, Canis familiaris
tggatccttgaattgggttccctgc

SEQ ID NO: 167283 - DNA, 25 bp, Canis familiaris
tggtttcgacgtcttttcaatctac

SEQ ID NO: 167284 - DNA, 25 bp, Canis familiaris
tgagttccaaagctttttccaggtc

SEQ ID NO: 167285 - DNA, 25 bp, Canis familiaris
tggtcaaaccgggttttcttggcat

SEQ ID NO: 167286 - DNA, 25 bp, Canis familiaris
tgtacattactccctttttttggca

SEQ ID NO: 167287 - DNA, 25 bp, Canis familiaris
tggtttactcccgctttttggagag

SEQ ID NO: 167288 - DNA, 25 bp, Canis familiaris
tggtttttctcctcttaattcatgg

SEQ ID NO: 167289 - DNA, 25 bp, Canis familiaris
tggttttgtcgtcacttattctagt

SEQ ID NO: 167290 - DNA, 25 bp, Canis familiaris
tggtctttttgttcctttgtaactg

SEQ ID NO: 167291 - DNA, 25 bp, Canis familiaris
tggtacttcttttgatttgttaact

SEQ ID NO: 167292 - DNA, 25 bp, Canis familiaris
tgttaaagcttttgtttccgaaatg

SEQ ID NO: 167293 - DNA, 25 bp, Canis familiaris
tggactaagtttttttctctatcta

SEQ ID NO: 167294 - DNA, 25 bp, Canis familiaris
tggacatgacagactttgtttttca

SEQ ID NO: 167295 - DNA, 25 bp, Canis familiaris
tggaccccacagagtatttcatcac

SEQ ID NO: 167296 - DNA, 25 bp, Canis familiaris
tggaccttagacagttttacacaag

SEQ ID NO: 167297 - DNA, 25 bp, Canis familiaris
tggattcttgggtgtgtttgccaca

SEQ ID NO: 167298 - DNA, 25 bp, Canis familiaris
tgtgatttggggattcccccaccca

SEQ ID NO: 167299 - DNA, 25 bp, Canis familiaris
tggttcagggagaggatccgcgccc

SEQ ID NO: 167300 - DNA, 25 bp, Canis familiaris
tggttacgtggctggcactgagccc

SEQ ID NO: 167301 - DNA, 25 bp, Canis familiaris
tggtatggactgctgggactcaggc

SEQ ID NO: 167302 - DNA, 25 bp, Canis familiaris
tgtggtgggggatacctcaggctac

SEQ ID NO: 167303 - DNA, 25 bp, Canis familiaris
tgggggtgggaaccctcaaggatgg

SEQ ID NO: 167304 - DNA, 25 bp, Canis familiaris
tggggcttggctccaagttcaagga

SEQ ID NO: 167305 - DNA, 25 bp, Canis familiaris
tggggcttggctccaagttcaagga

SEQ ID NO: 167306 - DNA, 25 bp, Canis familiaris
tggtaggtgtgctcaggtccaaaca

SEQ ID NO: 167307 - DNA, 25 bp, Canis familiaris
tggtcgggtcgacatgtcgtctgac

SEQ ID NO: 167308 - DNA, 25 bp, Canis familiaris
tggtagggccaaagcctcttcagac

SEQ ID NO: 167309 - DNA, 25 bp, Canis familiaris
tggactggaacaaagctctgcctaa

SEQ ID NO: 167310 - DNA, 25 bp, Canis familiaris
tggatctggatgaaccactttctaa

SEQ ID NO: 167311 - DNA, 25 bp, Canis familiaris
tggatctggagcccactgtgattga

SEQ ID NO: 167312 - DNA, 25 bp, Canis familiaris
tggagcgggtgcacgtgattcagag

SEQ ID NO: 167313 - DNA, 25 bp, Canis familiaris
tggagacgtgtccgggttagacctc

SEQ ID NO: 167314 - DNA, 25 bp, Canis familiaris
tggacggatgtgagggtttggcctc

SEQ ID NO: 167315 - DNA, 25 bp, Canis familiaris
tggacggatggacggcgtggtttcg

SEQ ID NO: 167316 - DNA, 25 bp, Canis familiaris
tggatcggattgtgtctgtgcctta

SEQ ID NO: 167317 - DNA, 25 bp, Canis familiaris
tggacagggtgtctgtgtgcccctg

SEQ ID NO: 167318 - DNA, 25 bp, Canis familiaris
tggacagtggtctcatttctcacac

SEQ ID NO: 167319 - DNA, 25 bp, Canis familiaris
tggacatggccctgaaatcaataca

SEQ ID NO: 167320 - DNA, 25 bp, Canis familiaris
tggactcgaacataatgaacataat

SEQ ID NO: 167321 - DNA, 25 bp, Canis familiaris
tggaccctgcaacaatacactgaac

SEQ ID NO: 167322 - DNA, 25 bp, Canis familiaris
tggaccgccaacagtacacaactgc

SEQ ID NO: 167323 - DNA, 25 bp, Canis familiaris
tggacccaaaatgtggccatactga

SEQ ID NO: 167324 - DNA, 25 bp, Canis familiaris
tggacccaaaaatgtgctccactgg

SEQ ID NO: 167325 - DNA, 25 bp, Canis familiaris
tggacatgccaataaatgtatgaac

SEQ ID NO: 167326 - DNA, 25 bp, Canis familiaris
tggactgaaataaaacatgctgaga

SEQ ID NO: 167327 - DNA, 25 bp, Canis familiaris
tggactgaacttccatttctggaac

SEQ ID NO: 167328 - DNA, 25 bp, Canis familiaris
tgtgttaattatcttctaggggaaa

SEQ ID NO: 167329 - DNA, 25 bp, Canis familiaris
tggttactgtgtctcttacggcagg

SEQ ID NO: 167330 - DNA, 25 bp, Canis familiaris
tggtttcaacatagatcatttaata

SEQ ID NO: 167331 - DNA, 25 bp, Canis familiaris
tggtttgtctctctaatttttccca

SEQ ID NO: 167332 - DNA, 25 bp, Canis familiaris
tggttggactttgaaacacttcctg

SEQ ID NO: 167333 - DNA, 25 bp, Canis familiaris
tggaggtgacttctactactctgtc

SEQ ID NO: 167334 - DNA, 25 bp, Canis familiaris
tggtctagagttcatactacctgtg

SEQ ID NO: 167335 - DNA, 25 bp, Canis familiaris
tggtcggtaggcgtttacgtgggag

SEQ ID NO: 167336 - DNA, 25 bp, Canis familiaris
tggttttaacctttagctgcagcgg

SEQ ID NO: 167337 - DNA, 25 bp, Canis familiaris
tggtttacccccttgcagatgaggg

SEQ ID NO: 167338 - DNA, 25 bp, Canis familiaris
tggattctgacattcccttagaggg

SEQ ID NO: 167339 - DNA, 25 bp, Canis familiaris
tcgtttagcttctctgttaggtttt

SEQ ID NO: 167340 - DNA, 25 bp, Canis familiaris
tgtaaccgcaccgcgtgcaaggttt

SEQ ID NO: 167341 - DNA, 25 bp, Canis familiaris
tgtttccgacccactaagtgaccta

SEQ ID NO: 167342 - DNA, 25 bp, Canis familiaris
tggttcctaccctgcactggaacct

SEQ ID NO: 167343 - DNA, 25 bp, Canis familiaris
tggttcctggccctaacttgggcca

SEQ ID NO: 167344 - DNA, 25 bp, Canis familiaris
tggtccccccattcaaaagggcagc

SEQ ID NO: 167345 - DNA, 25 bp, Canis familiaris
tggtccctccaatcttaggctggga

SEQ ID NO: 167346 - DNA, 25 bp, Canis familiaris
tggataccctaatcttatgggggaa

SEQ ID NO: 167347 - DNA, 25 bp, Canis familiaris
tggtatcccttcactgcttagggga

SEQ ID NO: 167348 - DNA, 25 bp, Canis familiaris
tggtttggccctgggcttcagggga

SEQ ID NO: 167349 - DNA, 25 bp, Canis familiaris
tggtttggcactggaagcaccgacg

SEQ ID NO: 167350 - DNA, 25 bp, Canis familiaris
tggttcttgacggactggttgccgc

SEQ ID NO: 167351 - DNA, 25 bp, Canis familiaris
tggagatcttactgggtattgcacc

SEQ ID NO: 167352 - DNA, 25 bp, Canis familiaris
tggatactctatcaggatgaatgta

SEQ ID NO: 167353 - DNA, 25 bp, Canis familiaris
tggatcacattaccacgtgccagaa

SEQ ID NO: 167354 - DNA, 25 bp, Canis familiaris
tggtccctacctggacatcatcaag

SEQ ID NO: 167355 - DNA, 25 bp, Canis familiaris
tggtcctgctcggggaatctgcagt

SEQ ID NO: 167356 - DNA, 25 bp, Canis familiaris
tggatccatttttaaaccgtgaaat

SEQ ID NO: 167357 - DNA, 25 bp, Canis familiaris
tggactatttctttattccgtgttt

SEQ ID NO: 167358 - DNA, 25 bp, Canis familiaris
tggagcctttcctttgtgcaaggtt

SEQ ID NO: 167359 - DNA, 25 bp, Canis familiaris
tggaccttgtttactgtgaactcta

SEQ ID NO: 167360 - DNA, 25 bp, Canis familiaris
tggacgttgctttacgggtgtcgtg

SEQ ID NO: 167361 - DNA, 25 bp, Canis familiaris
tggactttgccctcagcaagatgcc

SEQ ID NO: 167362 - DNA, 25 bp, Canis familiaris
tggagctggtgggctccgaagccat

SEQ ID NO: 167363 - DNA, 25 bp, Canis familiaris
tggagggctggtgctgccagatgga

SEQ ID NO: 167364 - DNA, 25 bp, Canis familiaris
tggaggacatcgacaagaatgggat

SEQ ID NO: 167365 - DNA, 25 bp, Canis familiaris
tggaggacctgtactggatggctga

SEQ ID NO: 167366 - DNA, 25 bp, Canis familiaris
tggaggagcacgagtgcctgtcgga

SEQ ID NO: 167367 - DNA, 25 bp, Canis familiaris
tggagtgagaactgtgtttctggaa

SEQ ID NO: 167368 - DNA, 25 bp, Canis familiaris
tggtatgaaccatttagtttggaga

SEQ ID NO: 167369 - DNA, 25 bp, Canis familiaris
tggtattgtccataagcgttaaaaa

SEQ ID NO: 167370 - DNA, 25 bp, Canis familiaris
tcgtttcctcggtggaaataaagag

SEQ ID NO: 167371 - DNA, 25 bp, Canis familiaris
tcagtttccccatccacaaaaataa

SEQ ID NO: 167372 - DNA, 25 bp, Canis familiaris
tggatacccactggactccaaaaaa

SEQ ID NO: 167373 - DNA, 25 bp, Canis familiaris
tggttatgcggcggatccgaaaaga

SEQ ID NO: 167374 - DNA, 25 bp, Canis familiaris
tggattagggcccactccaaagacc

SEQ ID NO: 167375 - DNA, 25 bp, Canis familiaris
tggttgaggaccctatgccaaagcc

SEQ ID NO: 167376 - DNA, 25 bp, Canis familiaris
tggaggcaggagagctacgcacaca

SEQ ID NO: 167377 - DNA, 25 bp, Canis familiaris
tggaggtctggacatcatcaccaca

SEQ ID NO: 167378 - DNA, 25 bp, Canis familiaris
tggagggctggacaacatctgctct

SEQ ID NO: 167379 - DNA, 25 bp, Canis familiaris
tggatgggtggacataacacctaaa

SEQ ID NO: 167380 - DNA, 25 bp, Canis familiaris
tggataggtacatataacttctcta

SEQ ID NO: 167381 - DNA, 25 bp, Canis familiaris
tggatcggctacagagtacaccttc

SEQ ID NO: 167382 - DNA, 25 bp, Canis familiaris
tggacccatctatagttgccacttc

SEQ ID NO: 167383 - DNA, 25 bp, Canis familiaris
tggagaccacagtgagtcagccctt

SEQ ID NO: 167384 - DNA, 25 bp, Canis familiaris
tggagaactgcgtggcgcaggcctc

SEQ ID NO: 167385 - DNA, 25 bp, Canis familiaris
tggagaaccttccaggcgtggatcc

SEQ ID NO: 167386 - DNA, 25 bp, Canis familiaris
tggtccccattggttggttatccca

SEQ ID NO: 167387 - DNA, 25 bp, Canis familiaris
tggtcagcagccttggtaggggatc

SEQ ID NO: 167388 - DNA, 25 bp, Canis familiaris
tggacgcgtttgcacagtggcgact

SEQ ID NO: 167389 - DNA, 25 bp, Canis familiaris
tggagggtgttctcagtcaggcctc

SEQ ID NO: 167390 - DNA, 25 bp, Canis familiaris
tggaccagggtctcactagagcgca

SEQ ID NO: 167391 - DNA, 25 bp, Canis familiaris
tggataactagtgcccgaaccaacc

SEQ ID NO: 167392 - DNA, 25 bp, Canis familiaris
tggagaagaagcacagcgccgacca

SEQ ID NO: 167393 - DNA, 25 bp, Canis familiaris
tggagaaagagacccacatcgcacc

SEQ ID NO: 167394 - DNA, 25 bp, Canis familiaris
tggagagcagtagctcccatcatgc

SEQ ID NO: 167395 - DNA, 25 bp, Canis familiaris
tggagatactagacctcctctctaa

SEQ ID NO: 167396 - DNA, 25 bp, Canis familiaris
tggagctgcacaagagatcccttgc

SEQ ID NO: 167397 - DNA, 25 bp, Canis familiaris
tggagcgcacgaagtcacctggctc

SEQ ID NO: 167398 - DNA, 25 bp, Canis familiaris
tggacgacatgaaccactgctactc

SEQ ID NO: 167399 - DNA, 25 bp, Canis familiaris
tggagcatgacgtgaacatccagtt

SEQ ID NO: 167400 - DNA, 25 bp, Canis familiaris
tggagcgacgcttcaagcaacagaa

SEQ ID NO: 167401 - DNA, 25 bp, Canis familiaris
tcgagtaccttaatgccctgaatga

SEQ ID NO: 167402 - DNA, 25 bp, Canis familiaris
tggagtgcacctaatttcttgaata

SEQ ID NO: 167403 - DNA, 25 bp, Canis familiaris
tggagagattcatattcatttgtat

SEQ ID NO: 167404 - DNA, 25 bp, Canis familiaris
tggagagcttcaaggtcagcctgct

SEQ ID NO: 167405 - DNA, 25 bp, Canis familiaris
tggagtgcaacaagctgctagccgc

SEQ ID NO: 167406 - DNA, 25 bp, Canis familiaris
tggagctgctagacgtgggctctgc

SEQ ID NO: 167407 - DNA, 25 bp, Canis familiaris
tggagtagaggcctggagctcgcag

SEQ ID NO: 167408 - DNA, 25 bp, Canis familiaris
tggagtgggagcctcaggctcgcgg

SEQ ID NO: 167409 - DNA, 25 bp, Canis familiaris
tggagctggagagtattgcgccttc

SEQ ID NO: 167410 - DNA, 25 bp, Canis familiaris
tggagctggatgagcatctccagta

SEQ ID NO: 167411 - DNA, 25 bp, Canis familiaris
tggagcttgagcagtcatcttggac

SEQ ID NO: 167412 - DNA, 25 bp, Canis familiaris
tggagtcttccgtctctatggagat

SEQ ID NO: 167413 - DNA, 25 bp, Canis familiaris
tggagttctccgggctgaacagcaa

SEQ ID NO: 167414 - DNA, 25 bp, Canis familiaris
tggagttctcaccttgtgatttggt

SEQ ID NO: 167415 - DNA, 25 bp, Canis familiaris
tggagacctgaccttaaatttttgt

SEQ ID NO: 167416 - DNA, 25 bp, Canis familiaris
tgggcttcagcccttaaatttattt

SEQ ID NO: 167417 - DNA, 25 bp, Canis familiaris
tggggccacatcctaaacattctat

SEQ ID NO: 167418 - DNA, 25 bp, Canis familiaris
tggtgaccactgccaaaaacctttc

SEQ ID NO: 167419 - DNA, 25 bp, Canis familiaris
tggtgaccctggaaactaccatcgg

SEQ ID NO: 167420 - DNA, 25 bp, Canis familiaris
tggagaccctgttaactactacgtt

SEQ ID NO: 167421 - DNA, 25 bp, Canis familiaris
tggagaccctgttaactactacgtt

SEQ ID NO: 167422 - DNA, 25 bp, Canis familiaris
tggagaccctgttaactactacgtt

SEQ ID NO: 167423 - DNA, 25 bp, Canis familiaris
tggagcacccagaatacactcactc

SEQ ID NO: 167424 - DNA, 25 bp, Canis familiaris
tggagtcatcacctatatcctcctg

SEQ ID NO: 167425 - DNA, 25 bp, Canis familiaris
tggagtgctcagcctgagacccagg

SEQ ID NO: 167426 - DNA, 25 bp, Canis familiaris
tggagccgcagcttgggctccacga

SEQ ID NO: 167427 - DNA, 25 bp, Canis familiaris
tggagcaccagatggagtccctaac

SEQ ID NO: 167428 - DNA, 25 bp, Canis familiaris
tggagcacgagttgtagaccccatc

SEQ ID NO: 167429 - DNA, 25 bp, Canis familiaris
tggagctggagatgtacttccgacc

SEQ ID NO: 167430 - DNA, 25 bp, Canis familiaris
tggagtgtcaagtttctctcctgac

SEQ ID NO: 167431 - DNA, 25 bp, Canis familiaris
tggagatgctattcattcttcccat

SEQ ID NO: 167432 - DNA, 25 bp, Canis familiaris
tggagctgccaattttgttcctctt

SEQ ID NO: 167433 - DNA, 25 bp, Canis familiaris
tggagagccagagcttttgcacctt

SEQ ID NO: 167434 - DNA, 25 bp, Canis familiaris
tggaggccaaccagatgctgggcga

SEQ ID NO: 167435 - DNA, 25 bp, Canis familiaris
tggagtactacatgggcttagctga

SEQ ID NO: 167436 - DNA, 25 bp, Canis familiaris
tggagtactacatgggcttagctga

SEQ ID NO: 167437 - DNA, 25 bp, Canis familiaris
tggagggctaagtggcccagctcag

SEQ ID NO: 167438 - DNA, 25 bp, Canis familiaris
tggagtttgacagatggcaccccag

SEQ ID NO: 167439 - DNA, 25 bp, Canis familiaris
tggattttgcagctgcagtcaccac

SEQ ID NO: 167440 - DNA, 25 bp, Canis familiaris
tggtttcagagattcgtccaccgtt

SEQ ID NO: 167441 - DNA, 25 bp, Canis familiaris
tggtttatgaaggcgtccctggcct

SEQ ID NO: 167442 - DNA, 25 bp, Canis familiaris
tggaccataggaggggcccgagcca

SEQ ID NO: 167443 - DNA, 25 bp, Canis familiaris
tggaccaatggagggctctccactc

SEQ ID NO: 167444 - DNA, 25 bp, Canis familiaris
tggatccaagtcagagggccatctc

SEQ ID NO: 167445 - DNA, 25 bp, Canis familiaris
tggagcccgctgatgagggcaccta

SEQ ID NO: 167446 - DNA, 25 bp, Canis familiaris
tggagtgccctgataatgtgaccct

SEQ ID NO: 167447 - DNA, 25 bp, Canis familiaris
tggagtccactggcgtcttcaccac

SEQ ID NO: 167448 - DNA, 25 bp, Canis familiaris
tggagccataatgcaatcccacctc

SEQ ID NO: 167449 - DNA, 25 bp, Canis familiaris
tggagctttccaagatcaccatgcc

SEQ ID NO: 167450 - DNA, 25 bp, Canis familiaris
tggagattcactccaatcacgctgc

SEQ ID NO: 167451 - DNA, 25 bp, Canis familiaris
tggagcttattgcgatcaggccacc

SEQ ID NO: 167452 - DNA, 25 bp, Canis familiaris
tggagctactaccagatgcagccca

SEQ ID NO: 167453 - DNA, 25 bp, Canis familiaris
tggagcagatgcaccggagcttcat

SEQ ID NO: 167454 - DNA, 25 bp, Canis familiaris
tggagcagtgtggctccatggccct

SEQ ID NO: 167455 - DNA, 25 bp, Canis familiaris
tggagcatgtgtattatgtggccat

SEQ ID NO: 167456 - DNA, 25 bp, Canis familiaris
tggagatggatcctgtgtggcagcc

SEQ ID NO: 167457 - DNA, 25 bp, Canis familiaris
tggagaagactgcagctgcacgcct

SEQ ID NO: 167458 - DNA, 25 bp, Canis familiaris
tggagaaggtgcagcgcacgtggcc

SEQ ID NO: 167459 - DNA, 25 bp, Canis familiaris
tggagccacctgatgacacggagct

SEQ ID NO: 167460 - DNA, 25 bp, Canis familiaris
tggatgccaccgagattctgggctt

SEQ ID NO: 167461 - DNA, 25 bp, Canis familiaris
tggatgatccctgtttctgagttcc

SEQ ID NO: 167462 - DNA, 25 bp, Canis familiaris
tgggaccgccgttgacggatttttg

SEQ ID NO: 167463 - DNA, 25 bp, Canis familiaris
tgggaccagggtaagtgacactaga

SEQ ID NO: 167464 - DNA, 25 bp, Canis familiaris
tggagaccatggcttgatggacaaa

SEQ ID NO: 167465 - DNA, 25 bp, Canis familiaris
tggagatcctggccttggccagctg

SEQ ID NO: 167466 - DNA, 25 bp, Canis familiaris
tggagccctgagtcgggctccgtgc

SEQ ID NO: 167467 - DNA, 25 bp, Canis familiaris
tggagccccatggtgggctctctgt

SEQ ID NO: 167468 - DNA, 25 bp, Canis familiaris
tggagcctctcggacgagcatttcc

SEQ ID NO: 167469 - DNA, 25 bp, Canis familiaris
tggagctcctggagcccattgacca

SEQ ID NO: 167470 - DNA, 25 bp, Canis familiaris
tggagatgcctaaagcccatggaga

SEQ ID NO: 167471 - DNA, 25 bp, Canis familiaris
tggagtgtgcacttacacttggaaa

SEQ ID NO: 167472 - DNA, 25 bp, Canis familiaris
tggagatgctccgaacacagttgaa

SEQ ID NO: 167473 - DNA, 25 bp, Canis familiaris
tggatgctgcatctgaacacactga

SEQ ID NO: 167474 - DNA, 25 bp, Canis familiaris
tggtgtctggattcatcatcgcaca

SEQ ID NO: 167475 - DNA, 25 bp, Canis familiaris
tggatctgctgtttgaagcgcagca

SEQ ID NO: 167476 - DNA, 25 bp, Canis familiaris
tggagcttgctattggtggagttct

SEQ ID NO: 167477 - DNA, 25 bp, Canis familiaris
tggagcctgctcaggattctttctc

SEQ ID NO: 167478 - DNA, 25 bp, Canis familiaris
tggaggctggatttgtacgcttcct

SEQ ID NO: 167479 - DNA, 25 bp, Canis familiaris
tggagggtatgaggggccttcccac

SEQ ID NO: 167480 - DNA, 25 bp, Canis familiaris
tgggggttggggaacccaattgctg

SEQ ID NO: 167481 - DNA, 25 bp, Canis familiaris
tgggacgttggtggaacctcgtgga

SEQ ID NO: 167482 - DNA, 25 bp, Canis familiaris
tggagattggggagaaccgcctggt

SEQ ID NO: 167483 - DNA, 25 bp, Canis familiaris
tggagattggggacgactctccccc

SEQ ID NO: 167484 - DNA, 25 bp, Canis familiaris
tggagctagagggcaccagttcctc

SEQ ID NO: 167485 - DNA, 25 bp, Canis familiaris
tggagaaggcagactcggtgtcctc

SEQ ID NO: 167486 - DNA, 25 bp, Canis familiaris
tggagccgagagctgcggtgctcct

SEQ ID NO: 167487 - DNA, 25 bp, Canis familiaris
tggagccagagccggggctgatggc

SEQ ID NO: 167488 - DNA, 25 bp, Canis familiaris
tggagacgcagggcgagtgctggtc

SEQ ID NO: 167489 - DNA, 25 bp, Canis familiaris
tggagaggcagccctagtgtctgtc

SEQ ID NO: 167490 - DNA, 25 bp, Canis familiaris
tggtatccatgctcatgggctcggc

SEQ ID NO: 167491 - DNA, 25 bp, Canis familiaris
tggtaccagtaaggcagctggagct

SEQ ID NO: 167492 - DNA, 25 bp, Canis familiaris
tggtactagggagcgtgggctggcc

SEQ ID NO: 167493 - DNA, 25 bp, Canis familiaris
tggtacactggtgacctggggagcc

SEQ ID NO: 167494 - DNA, 25 bp, Canis familiaris
tggtaccagtaccactctttggacg

SEQ ID NO: 167495 - DNA, 25 bp, Canis familiaris
tggtttcgagaagccttctgccatc

SEQ ID NO: 167496 - DNA, 25 bp, Canis familiaris
tggtttctgaagtgccttgtctgca

SEQ ID NO: 167497 - DNA, 25 bp, Canis familiaris
tggtttctgtagttctggttgtgta

SEQ ID NO: 167498 - DNA, 25 bp, Canis familiaris
tggtctttcttgtttgtttggtggt

SEQ ID NO: 167499 - DNA, 25 bp, Canis familiaris
tggttttttttgttttagctgatgt

SEQ ID NO: 167500 - DNA, 25 bp, Canis familiaris
tggttgtttgttggaactttcttcg

SEQ ID NO: 167501 - DNA, 25 bp, Canis familiaris
tggagtgtttttggccatttctgtg

SEQ ID NO: 167502 - DNA, 25 bp, Canis familiaris
tggagatgatctcttcgtggttctt

SEQ ID NO: 167503 - DNA, 25 bp, Canis familiaris
tgggaattgatcccgggtttccaag

SEQ ID NO: 167504 - DNA, 25 bp, Canis familiaris
tggtgaagtgcacacggaacctcca

SEQ ID NO: 167505 - DNA, 25 bp, Canis familiaris
tggagaggatgacacgtgaacgcag

SEQ ID NO: 167506 - DNA, 25 bp, Canis familiaris
tggataggagaccagcctaccgcaa

SEQ ID NO: 167507 - DNA, 25 bp, Canis familiaris
tggagggaggcctctactatgcacc

SEQ ID NO: 167508 - DNA, 25 bp, Canis familiaris
tggaggggtacttcaaccatcacag

SEQ ID NO: 167509 - DNA, 25 bp, Canis familiaris
tggagaagtgtacacgcccatcagc

SEQ ID NO: 167510 - DNA, 25 bp, Canis familiaris
tggagagagtggatggccccaagca

SEQ ID NO: 167511 - DNA, 25 bp, Canis familiaris
tggagagatgcaagacgaggcccca

SEQ ID NO: 167512 - DNA, 25 bp, Canis familiaris
tggagagcgacatccatgggctccg

SEQ ID NO: 167513 - DNA, 25 bp, Canis familiaris
tggagcggagcctacagatggccct

SEQ ID NO: 167514 - DNA, 25 bp, Canis familiaris
tggagggagacatctgggccctgca

SEQ ID NO: 167515 - DNA, 25 bp, Canis familiaris
tggagcgggatgtggaggacctgca

SEQ ID NO: 167516 - DNA, 25 bp, Canis familiaris
tggggggattctgaaacctcgaact

SEQ ID NO: 167517 - DNA, 25 bp, Canis familiaris
tggagtagaaatgtaaacccggaat

SEQ ID NO: 167518 - DNA, 25 bp, Canis familiaris
tggagaaccattgtcatatacccgg

SEQ ID NO: 167519 - DNA, 25 bp, Canis familiaris
tggagcagacctggcgtatggaccc

SEQ ID NO: 167520 - DNA, 25 bp, Canis familiaris
tggagcagcccttgggagaaagcca

SEQ ID NO: 167521 - DNA, 25 bp, Canis familiaris
tggaggtccgtgggagttcatgcca

SEQ ID NO: 167522 - DNA, 25 bp, Canis familiaris
tggggacaggttcggatttccaaag

SEQ ID NO: 167523 - DNA, 25 bp, Canis familiaris
tggtccccgtgaaggtgtatccgat

SEQ ID NO: 167524 - DNA, 25 bp, Canis familiaris
tggtccccaggtcttggatctgggg

SEQ ID NO: 167525 - DNA, 25 bp, Canis familiaris
tggtccccaagttcttggaatctgg

SEQ ID NO: 167526 - DNA, 25 bp, Canis familiaris
tgggcgccgaattcctgggaatacc

SEQ ID NO: 167527 - DNA, 25 bp, Canis familiaris
tgagagcccgaggaaagggaagccc

SEQ ID NO: 167528 - DNA, 25 bp, Canis familiaris
tgccccacctaacagggaagcctgc

SEQ ID NO: 167529 - DNA, 25 bp, Canis familiaris
tggtcccctaagagggctacctctg

SEQ ID NO: 167530 - DNA, 25 bp, Canis familiaris
tggttccctctgaggtggacacctc

SEQ ID NO: 167531 - DNA, 25 bp, Canis familiaris
tggtttcctggggaggagtcctgct

SEQ ID NO: 167532 - DNA, 25 bp, Canis familiaris
tggtttccgtgcctgtgaatacttc

SEQ ID NO: 167533 - DNA, 25 bp, Canis familiaris
tggagcttccggcttgcaagctcac

SEQ ID NO: 167534 - DNA, 25 bp, Canis familiaris
tggatcccgaggtcattgcacagga

SEQ ID NO: 167535 - DNA, 25 bp, Canis familiaris
tggatccctaggtggaccagactgc

SEQ ID NO: 167536 - DNA, 25 bp, Canis familiaris
tggataccgcagctaggaataatgg

SEQ ID NO: 167537 - DNA, 25 bp, Canis familiaris
tggataccgcagctaggaataatgg

SEQ ID NO: 167538 - DNA, 25 bp, Canis familiaris
tggataccgcagctaggaataatgg

SEQ ID NO: 167539 - DNA, 25 bp, Canis familiaris
tggttcccagcagtcggcagtaata

SEQ ID NO: 167540 - DNA, 25 bp, Canis familiaris
tggattcctggcaggcgaggagacc

SEQ ID NO: 167541 - DNA, 25 bp, Canis familiaris
tggatatcgatgtgtgtcagagaga

SEQ ID NO: 167542 - DNA, 25 bp, Canis familiaris
tggtgcttgagctgtgctgcaacga

SEQ ID NO: 167543 - DNA, 25 bp, Canis familiaris
tggatgcgtggctggtgcacagcgt

SEQ ID NO: 167544 - DNA, 25 bp, Canis familiaris
tggagcaggtgaggggcagcagcag

SEQ ID NO: 167545 - DNA, 25 bp, Canis familiaris
tggagcagcggctggagcagggcca

SEQ ID NO: 167546 - DNA, 25 bp, Canis familiaris
tggagcagcggcagacggcagctcc

SEQ ID NO: 167547 - DNA, 25 bp, Canis familiaris
tggagacgatgcacccgtgcatgca

SEQ ID NO: 167548 - DNA, 25 bp, Canis familiaris
tggagacgatgcacccatgcatgca

SEQ ID NO: 167549 - DNA, 25 bp, Canis familiaris
tggagacgatgcagccctgcatgca

SEQ ID NO: 167550 - DNA, 25 bp, Canis familiaris
tggagaagatgctgcagccttgcgg

SEQ ID NO: 167551 - DNA, 25 bp, Canis familiaris
tggatcaatggggcagtcattagat

SEQ ID NO: 167552 - DNA, 25 bp, Canis familiaris
tggagcaatctcgcagtgcagtggt

SEQ ID NO: 167553 - DNA, 25 bp, Canis familiaris
tggtcacatttctgctggtggtagg

SEQ ID NO: 167554 - DNA, 25 bp, Canis familiaris
tggatccagaactcgcgtgaatgca

SEQ ID NO: 167555 - DNA, 25 bp, Canis familiaris
tggatcaaagacagtgctgcgacga

SEQ ID NO: 167556 - DNA, 25 bp, Canis familiaris
tggtccggagcagtggctggtctgc

SEQ ID NO: 167557 - DNA, 25 bp, Canis familiaris
tggattcgtggttggggttgggtct

SEQ ID NO: 167558 - DNA, 25 bp, Canis familiaris
tggagctagggttggaagccgggtc

SEQ ID NO: 167559 - DNA, 25 bp, Canis familiaris
tggagcttcggttgggtgggggagc

SEQ ID NO: 167560 - DNA, 25 bp, Canis familiaris
tggagattctcgtggtggtggtgga

SEQ ID NO: 167561 - DNA, 25 bp, Canis familiaris
tggatctggtggtggaagtggtgga

SEQ ID NO: 167562 - DNA, 25 bp, Canis familiaris
tggatcggttggtgccactgaatgg

SEQ ID NO: 167563 - DNA, 25 bp, Canis familiaris
tggatcttcttggtcgcaaataatg

SEQ ID NO: 167564 - DNA, 25 bp, Canis familiaris
tggtattaatggacacaaagttgga

SEQ ID NO: 167565 - DNA, 25 bp, Canis familiaris
tggtattcctgaccaaactttggaa

SEQ ID NO: 167566 - DNA, 25 bp, Canis familiaris
tggattcctctaacaacgtcattgg

SEQ ID NO: 167567 - DNA, 25 bp, Canis familiaris
tggatgtcagccttagcaacatatt

SEQ ID NO: 167568 - DNA, 25 bp, Canis familiaris
tggtctcagccacaggaacatttcc

SEQ ID NO: 167569 - DNA, 25 bp, Canis familiaris
tggtaagcccgggatactgctagcc

SEQ ID NO: 167570 - DNA, 25 bp, Canis familiaris
tggtcaacgcgttgtagacccgtcc

SEQ ID NO: 167571 - DNA, 25 bp, Canis familiaris
tggagaaatcctttcagacccttgg

SEQ ID NO: 167572 - DNA, 25 bp, Canis familiaris
tggagaaacttttacacagcttgtg

SEQ ID NO: 167573 - DNA, 25 bp, Canis familiaris
tgcgaaagtgctctaaacagtcaaa

SEQ ID NO: 167574 - DNA, 25 bp, Canis familiaris
tggtcaagtctattaatccactcca

SEQ ID NO: 167575 - DNA, 25 bp, Canis familiaris
tggtcaaccactttaccactagcag

SEQ ID NO: 167576 - DNA, 25 bp, Canis familiaris
tggtcaaccctcttggaaaggagtt

SEQ ID NO: 167577 - DNA, 25 bp, Canis familiaris
tggatggcccctctggaaagctgtg

SEQ ID NO: 167578 - DNA, 25 bp, Canis familiaris
tggaggctcccttgggacaagcagt

SEQ ID NO: 167579 - DNA, 25 bp, Canis familiaris
tgtaggtccttgtctggaaatgagt

SEQ ID NO: 167580 - DNA, 25 bp, Canis familiaris
tggagggcactatccgaaaggttca

SEQ ID NO: 167581 - DNA, 25 bp, Canis familiaris
tggatggccacttacctgaatgacc

SEQ ID NO: 167582 - DNA, 25 bp, Canis familiaris
tggggccacggctggaattctgccc

SEQ ID NO: 167583 - DNA, 25 bp, Canis familiaris
tggaggtacgggtaacatttgttct

SEQ ID NO: 167584 - DNA, 25 bp, Canis familiaris
tggaggtactggtaacacattttct

SEQ ID NO: 167585 - DNA, 25 bp, Canis familiaris
tggaggccctgttcataagctttca

SEQ ID NO: 167586 - DNA, 25 bp, Canis familiaris
tggagatttcttgataagcttaaag

SEQ ID NO: 167587 - DNA, 25 bp, Canis familiaris
tggaggcttcttgagaacttaaatg

SEQ ID NO: 167588 - DNA, 25 bp, Canis familiaris
tggaggcctcttgtggacatagagc

SEQ ID NO: 167589 - DNA, 25 bp, Canis familiaris
tggaggcctcttgtgcaagcagacc

SEQ ID NO: 167590 - DNA, 25 bp, Canis familiaris
tggagtaccttggcagctttgacca

SEQ ID NO: 167591 - DNA, 25 bp, Canis familiaris
tggttacctggaggctatattgcca

SEQ ID NO: 167592 - DNA, 25 bp, Canis familiaris
tggtttctggtacctatagtgcaaa

SEQ ID NO: 167593 - DNA, 25 bp, Canis familiaris
tggtttctcacatgtcactagtaaa

SEQ ID NO: 167594 - DNA, 25 bp, Canis familiaris
tggagtttccatctactgagcggaa

SEQ ID NO: 167595 - DNA, 25 bp, Canis familiaris
tggagtttcactctgactctctgaa

SEQ ID NO: 167596 - DNA, 25 bp, Canis familiaris
tggattttcatctcggctttgagac

SEQ ID NO: 167597 - DNA, 25 bp, Canis familiaris
tggataatatacacagccttcattg

SEQ ID NO: 167598 - DNA, 25 bp, Canis familiaris
tggagaaataaacgcctctttgcct

SEQ ID NO: 167599 - DNA, 25 bp, Canis familiaris
tggtcataaaacctccttaagcctg

SEQ ID NO: 167600 - DNA, 25 bp, Canis familiaris
tggatagataaaccttcgtaacttc

SEQ ID NO: 167601 - DNA, 25 bp, Canis familiaris
tggagagagcaaaacttctgtccct

SEQ ID NO: 167602 - DNA, 25 bp, Canis familiaris
tggagaacaaattcctgctgcccag

SEQ ID NO: 167603 - DNA, 25 bp, Canis familiaris
tggagagccaactactctgttccaa

SEQ ID NO: 167604 - DNA, 25 bp, Canis familiaris
tggagagccatatcaatcttcccaa

SEQ ID NO: 167605 - DNA, 25 bp, Canis familiaris
tggatgcagccttgaaacccacaca

SEQ ID NO: 167606 - DNA, 25 bp, Canis familiaris
tggatactcttgtagctccttcaaa

SEQ ID NO: 167607 - DNA, 25 bp, Canis familiaris
tggataatgcttccgccttccaagg

SEQ ID NO: 167608 - DNA, 25 bp, Canis familiaris
tggtcaatgactcggacttccaggg

SEQ ID NO: 167609 - DNA, 25 bp, Canis familiaris
tggtcattggccacttgacggggga

SEQ ID NO: 167610 - DNA, 25 bp, Canis familiaris
tggtattggacatcctgacgggctc

SEQ ID NO: 167611 - DNA, 25 bp, Canis familiaris
tggtattgagaaacctcaccggcct

SEQ ID NO: 167612 - DNA, 25 bp, Canis familiaris
tggtttgtgaaccagccaccattgc

SEQ ID NO: 167613 - DNA, 25 bp, Canis familiaris
tggtcttggaaggaccaagacatgc

SEQ ID NO: 167614 - DNA, 25 bp, Canis familiaris
tggtttgcgaagaagacggagtgcg

SEQ ID NO: 167615 - DNA, 25 bp, Canis familiaris
tggtttccgagttgcactgtgagcc

SEQ ID NO: 167616 - DNA, 25 bp, Canis familiaris
tggtttcttacgtagttgactctcc

SEQ ID NO: 167617 - DNA, 25 bp, Canis familiaris
tggtcattcttcagatattggctct

SEQ ID NO: 167618 - DNA, 25 bp, Canis familiaris
tggttgtcactaaatttccgcttac

SEQ ID NO: 167619 - DNA, 25 bp, Canis familiaris
tggtctgaattcaacccaacgtttc

SEQ ID NO: 167620 - DNA, 25 bp, Canis familiaris
tggatctttctcacaaccaggttcc

SEQ ID NO: 167621 - DNA, 25 bp, Canis familiaris
tggatttcctctacgatacggaccc

SEQ ID NO: 167622 - DNA, 25 bp, Canis familiaris
tggattaccttttgtcaaagcatct

SEQ ID NO: 167623 - DNA, 25 bp, Canis familiaris
tggattacgctttctatatacaact

SEQ ID NO: 167624 - DNA, 25 bp, Canis familiaris
tggaggacagttgctaatatcttct

SEQ ID NO: 167625 - DNA, 25 bp, Canis familiaris
tggatgaacagacaccactctctac

SEQ ID NO: 167626 - DNA, 25 bp, Canis familiaris
tggaggacagggaccacctctacaa

SEQ ID NO: 167627 - DNA, 25 bp, Canis familiaris
tggagtgaatggagccaccctatcc

SEQ ID NO: 167628 - DNA, 25 bp, Canis familiaris
tggaggacggtggcacaggcctccc

SEQ ID NO: 167629 - DNA, 25 bp, Canis familiaris
tggaggactggtgcaacacttgccc

SEQ ID NO: 167630 - DNA, 25 bp, Canis familiaris
tggaggcgcggtgaccaaagccaca

SEQ ID NO: 167631 - DNA, 25 bp, Canis familiaris
tggagatggagggcacacacacaca

SEQ ID NO: 167632 - DNA, 25 bp, Canis familiaris
tggagtggtgcgggcacacagctcc

SEQ ID NO: 167633 - DNA, 25 bp, Canis familiaris
tggaggagatgcagcgaaggctgac

SEQ ID NO: 167634 - DNA, 25 bp, Canis familiaris
tggaggccagcgtcagaagtctagt

SEQ ID NO: 167635 - DNA, 25 bp, Canis familiaris
tggagagcctgcgcatgaagcttcc

SEQ ID NO: 167636 - DNA, 25 bp, Canis familiaris
tggagtgctgctgccaaagatgccc

SEQ ID NO: 167637 - DNA, 25 bp, Canis familiaris
tggaggctcagagccgcagaggccg

SEQ ID NO: 167638 - DNA, 25 bp, Canis familiaris
tggaggtaggcggcgggagccggga

SEQ ID NO: 167639 - DNA, 25 bp, Canis familiaris
tggagggagttggtgggtgacgggc

SEQ ID NO: 167640 - DNA, 25 bp, Canis familiaris
tggaggaggtctcctgggtgacaca

SEQ ID NO: 167641 - DNA, 25 bp, Canis familiaris
tggagtggggctctcatggtgacat

SEQ ID NO: 167642 - DNA, 25 bp, Canis familiaris
tggaggggtgtggtgcatggagtct

SEQ ID NO: 167643 - DNA, 25 bp, Canis familiaris
tggagagggtgggcaggtgtggcgg

SEQ ID NO: 167644 - DNA, 25 bp, Canis familiaris
tggagaggctggccgagtggggccc

SEQ ID NO: 167645 - DNA, 25 bp, Canis familiaris
tggagagcaggtccatgaggcgcag

SEQ ID NO: 167646 - DNA, 25 bp, Canis familiaris
tggaggcagtctcattggcctccct

SEQ ID NO: 167647 - DNA, 25 bp, Canis familiaris
tggagtgcagtgtgggttctccctt

SEQ ID NO: 167648 - DNA, 25 bp, Canis familiaris
tggagtcatgagtgggcctgtgctg

SEQ ID NO: 167649 - DNA, 25 bp, Canis familiaris
tggagtcacagagaggcctgccaca

SEQ ID NO: 167650 - DNA, 25 bp, Canis familiaris
tggagtcagcaaaacagccctcagc

SEQ ID NO: 167651 - DNA, 25 bp, Canis familiaris
tggatctcgcaaattcgtcgccaaa

SEQ ID NO: 167652 - DNA, 25 bp, Canis familiaris
tggttctaattccatgtcccaagtg

SEQ ID NO: 167653 - DNA, 25 bp, Canis familiaris
tggtccatgatgttcaggtcccagt

SEQ ID NO: 167654 - DNA, 25 bp, Canis familiaris
tggatgccaatctcagtgttctcaa

SEQ ID NO: 167655 - DNA, 25 bp, Canis familiaris
tggatgtcaatctgtttatctcttc

SEQ ID NO: 167656 - DNA, 25 bp, Canis familiaris
tggattctgtattgcttttcctctg

SEQ ID NO: 167657 - DNA, 25 bp, Canis familiaris
tggtccttattgctttctatgctct

SEQ ID NO: 167658 - DNA, 25 bp, Canis familiaris
tggattgtctttctttgtctgttga

SEQ ID NO: 167659 - DNA, 25 bp, Canis familiaris
tggtttgcatttctgttttaaataa

SEQ ID NO: 167660 - DNA, 25 bp, Canis familiaris
tggtgggacttcagttttattattt

SEQ ID NO: 167661 - DNA, 25 bp, Canis familiaris
tggaggtggttcatgtattcaattt

SEQ ID NO: 167662 - DNA, 25 bp, Canis familiaris
tggagttgaggtgtctttctttctt

SEQ ID NO: 167663 - DNA, 25 bp, Canis familiaris
tggagtgatggggtgccttttggtg

SEQ ID NO: 167664 - DNA, 25 bp, Canis familiaris
tggatccaggggaatttttggggat

SEQ ID NO: 167665 - DNA, 25 bp, Canis familiaris
tggattgccggcgtgatttctggag

SEQ ID NO: 167666 - DNA, 25 bp, Canis familiaris
tggtctccccttaaactgaagccaa

SEQ ID NO: 167667 - DNA, 25 bp, Canis familiaris
tgtgccccccttaacttgaggaaag

SEQ ID NO: 167668 - DNA, 25 bp, Canis familiaris
tggagagaccctgaactgtactgaa

SEQ ID NO: 167669 - DNA, 25 bp, Canis familiaris
tggagagagaccttatcagtgtaaa

SEQ ID NO: 167670 - DNA, 25 bp, Canis familiaris
tggagagcagaggccctcaggacct

SEQ ID NO: 167671 - DNA, 25 bp, Canis familiaris
tggagagagaggccttatcccagtc

SEQ ID NO: 167672 - DNA, 25 bp, Canis familiaris
tggagatgaaggccgtgtgcgtgtt

SEQ ID NO: 167673 - DNA, 25 bp, Canis familiaris
tggagtacaggtcgtctgagctgcc

SEQ ID NO: 167674 - DNA, 25 bp, Canis familiaris
tggatggtgcagcagttctagcgcc

SEQ ID NO: 167675 - DNA, 25 bp, Canis familiaris
tggatgtggcagctgattccatgtc

SEQ ID NO: 167676 - DNA, 25 bp, Canis familiaris
tggagggcagtgacattgcctgttt

SEQ ID NO: 167677 - DNA, 25 bp, Canis familiaris
tggagggcgttattgactctgctgc

SEQ ID NO: 167678 - DNA, 25 bp, Canis familiaris
tggaggtggtgtaagctgcctgctt

SEQ ID NO: 167679 - DNA, 25 bp, Canis familiaris
tggatggggagtaacccgtctcgtc

SEQ ID NO: 167680 - DNA, 25 bp, Canis familiaris
tggataggaaaaacccgcctcgtct

SEQ ID NO: 167681 - DNA, 25 bp, Canis familiaris
tggtatgggacaagaccgccctttc

SEQ ID NO: 167682 - DNA, 25 bp, Canis familiaris
tggttggaaccaatgggccaccttc

SEQ ID NO: 167683 - DNA, 25 bp, Canis familiaris
tggtaagcaacctttggatccgtcc

SEQ ID NO: 167684 - DNA, 25 bp, Canis familiaris
tggtaagaaaccataggcacccacc

SEQ ID NO: 167685 - DNA, 25 bp, Canis familiaris
tggtatgagaccacctatgggccca

SEQ ID NO: 167686 - DNA, 25 bp, Canis familiaris
tggtacaactgtccttagacccaca

SEQ ID NO: 167687 - DNA, 25 bp, Canis familiaris
tggtacaacttgtcttagcacgaga

SEQ ID NO: 167688 - DNA, 25 bp, Canis familiaris
tggtacatcagttgctctggatccg

SEQ ID NO: 167689 - DNA, 25 bp, Canis familiaris
tggtcagcatctggcagtcattgaa

SEQ ID NO: 167690 - DNA, 25 bp, Canis familiaris
tggatcagcttctcctctgaagctc

SEQ ID NO: 167691 - DNA, 25 bp, Canis familiaris
tggatcctgctgttcctgtggtgcc

SEQ ID NO: 167692 - DNA, 25 bp, Canis familiaris
tggatccgtgaaatctgagggcagc

SEQ ID NO: 167693 - DNA, 25 bp, Canis familiaris
tggatggcgctgaagctcgtggcca

SEQ ID NO: 167694 - DNA, 25 bp, Canis familiaris
tggaggctgctgagggtgctgacat

SEQ ID NO: 167695 - DNA, 25 bp, Canis familiaris
tggagggtcatcagcagcattgagc

SEQ ID NO: 167696 - DNA, 25 bp, Canis familiaris
tggagggtgcacgaacatctgactg

SEQ ID NO: 167697 - DNA, 25 bp, Canis familiaris
tggagggtccaagattgcacacgaa

SEQ ID NO: 167698 - DNA, 25 bp, Canis familiaris
tggtgttgccgcgccatctgccacc

SEQ ID NO: 167699 - DNA, 25 bp, Canis familiaris
tggttttcagcagcatcttacacca

SEQ ID NO: 167700 - DNA, 25 bp, Canis familiaris
tggattttacacccttagcacatgc

SEQ ID NO: 167701 - DNA, 25 bp, Canis familiaris
tggatttacagtggtttcagcagtg

SEQ ID NO: 167702 - DNA, 25 bp, Canis familiaris
tggtttaaggagtagctgcagcata

SEQ ID NO: 167703 - DNA, 25 bp, Canis familiaris
tggtttggggtatgtaaatagccta

SEQ ID NO: 167704 - DNA, 25 bp, Canis familiaris
tggttttggtttttgaatgttcaat

SEQ ID NO: 167705 - DNA, 25 bp, Canis familiaris
tggttcgggctttgtcgaatcgtaa

SEQ ID NO: 167706 - DNA, 25 bp, Canis familiaris
tggtatcgggtcttttcgttgtcta

SEQ ID NO: 167707 - DNA, 25 bp, Canis familiaris
tggtaaagttcgagtgccatttcac

SEQ ID NO: 167708 - DNA, 25 bp, Canis familiaris
tggtaaagttcgagtgccatttcac

SEQ ID NO: 167709 - DNA, 25 bp, Canis familiaris
tggtcacaaagtagtcctccaattc

SEQ ID NO: 167710 - DNA, 25 bp, Canis familiaris
tggatcatttggagacctccaccct

SEQ ID NO: 167711 - DNA, 25 bp, Canis familiaris
tggatcggggttactcctatgacct

SEQ ID NO: 167712 - DNA, 25 bp, Canis familiaris
tggaggaggtgtctcagcctcaagc

SEQ ID NO: 167713 - DNA, 25 bp, Canis familiaris
tggagttggaacctgagcctgtgag

SEQ ID NO: 167714 - DNA, 25 bp, Canis familiaris
tggagtcttggatctggccttgagt

SEQ ID NO: 167715 - DNA, 25 bp, Canis familiaris
tggagatcggcggcctggagttcag

SEQ ID NO: 167716 - DNA, 25 bp, Canis familiaris
tggagtcctgggatcgagttctgca

SEQ ID NO: 167717 - DNA, 25 bp, Canis familiaris
tggtgccctgagggtcagagtcggc

SEQ ID NO: 167718 - DNA, 25 bp, Canis familiaris
tggtcacctcagggaacttcttgca

SEQ ID NO: 167719 - DNA, 25 bp, Canis familiaris
tggtcctccactggagactttagag

SEQ ID NO: 167720 - DNA, 25 bp, Canis familiaris
tggatcgcatccagcgcatatctca

SEQ ID NO: 167721 - DNA, 25 bp, Canis familiaris
tggatgccatccaggaagccctgag

SEQ ID NO: 167722 - DNA, 25 bp, Canis familiaris
tggatgccctcaagtagcagtccca

SEQ ID NO: 167723 - DNA, 25 bp, Canis familiaris
tggtgccagccaatgtactaccacg

SEQ ID NO: 167724 - DNA, 25 bp, Canis familiaris
tggaggcagccaaggacgactcatc

SEQ ID NO: 167725 - DNA, 25 bp, Canis familiaris
tggaggtgtcgggacccatatcttc

SEQ ID NO: 167726 - DNA, 25 bp, Canis familiaris
tggaggattccgggactgatgatct

SEQ ID NO: 167727 - DNA, 25 bp, Canis familiaris
tggaggcttccatgaggctcagatt

SEQ ID NO: 167728 - DNA, 25 bp, Canis familiaris
tggaggttccaatgtgaagtgctgc

SEQ ID NO: 167729 - DNA, 25 bp, Canis familiaris
tggatggacccagagggcatcgtgc

SEQ ID NO: 167730 - DNA, 25 bp, Canis familiaris
tggaggagggaccaggctcatgagc

SEQ ID NO: 167731 - DNA, 25 bp, Canis familiaris
tggaggcaggggcatctttgcagct

SEQ ID NO: 167732 - DNA, 25 bp, Canis familiaris
tggatggactggtcccttggcattt

SEQ ID NO: 167733 - DNA, 25 bp, Canis familiaris
tggagtgactggtaacatatcgttc

SEQ ID NO: 167734 - DNA, 25 bp, Canis familiaris
tggtcacacggttcacacaagttca

SEQ ID NO: 167735 - DNA, 25 bp, Canis familiaris
tgggccacgtcatcaacatagtcca

SEQ ID NO: 167736 - DNA, 25 bp, Canis familiaris
tggatgccgagttccgacatgactc

SEQ ID NO: 167737 - DNA, 25 bp, Canis familiaris
tggaggcgaggagcgcctacctgag

SEQ ID NO: 167738 - DNA, 25 bp, Canis familiaris
tggaggaagggagtgccaggcctcg

SEQ ID NO: 167739 - DNA, 25 bp, Canis familiaris
tggaggcaaggggcctaggtcctgc

SEQ ID NO: 167740 - DNA, 25 bp, Canis familiaris
tggaggacaaggagctggttgccgg

SEQ ID NO: 167741 - DNA, 25 bp, Canis familiaris
tggaggacaaggagcggctgcggct

SEQ ID NO: 167742 - DNA, 25 bp, Canis familiaris
tggaggtatctgggagaggccggcc

SEQ ID NO: 167743 - DNA, 25 bp, Canis familiaris
tggaggtcctcactgaggtgccagg

SEQ ID NO: 167744 - DNA, 25 bp, Canis familiaris
tggatggacctgctgggatgggggc

SEQ ID NO: 167745 - DNA, 25 bp, Canis familiaris
tggaggggagggaggtggggctatg

SEQ ID NO: 167746 - DNA, 25 bp, Canis familiaris
tggatgggggagagggggccccgag

SEQ ID NO: 167747 - DNA, 25 bp, Canis familiaris
tggatagggggtgcggggcacacgg

SEQ ID NO: 167748 - DNA, 25 bp, Canis familiaris
tggtttggggtccagtgggtcagca

SEQ ID NO: 167749 - DNA, 25 bp, Canis familiaris
tggtcctgttgggcacattgggtgc

SEQ ID NO: 167750 - DNA, 25 bp, Canis familiaris
tgggcccttcctattgggctggatt

SEQ ID NO: 167751 - DNA, 25 bp, Canis familiaris
tggtcccatttcctagagtggggag

SEQ ID NO: 167752 - DNA, 25 bp, Canis familiaris
tggttgccctttcaggtgggacagt

SEQ ID NO: 167753 - DNA, 25 bp, Canis familiaris
tgtgttcacgtgatgccggtggcaa

SEQ ID NO: 167754 - DNA, 25 bp, Canis familiaris
tggttacggggtccctggatgacct

SEQ ID NO: 167755 - DNA, 25 bp, Canis familiaris
tggttatttgcgtaccctggatact

SEQ ID NO: 167756 - DNA, 25 bp, Canis familiaris
tggtcatttgtggtcaacctggtca

SEQ ID NO: 167757 - DNA, 25 bp, Canis familiaris
tggtgtttgctattcatgaccgccc

SEQ ID NO: 167758 - DNA, 25 bp, Canis familiaris
tggtttgttctagtacctgctaccg

SEQ ID NO: 167759 - DNA, 25 bp, Canis familiaris
tggttcctttggtcgctcgctcctc

SEQ ID NO: 167760 - DNA, 25 bp, Canis familiaris
tggagtctgcttaggacactctctc

SEQ ID NO: 167761 - DNA, 25 bp, Canis familiaris
tggatttgcctcagaagctctagcc

SEQ ID NO: 167762 - DNA, 25 bp, Canis familiaris
tggatgtatcttctgttgtctagca

SEQ ID NO: 167763 - DNA, 25 bp, Canis familiaris
tggatgtacttgatggctgacatta

SEQ ID NO: 167764 - DNA, 25 bp, Canis familiaris
tggtatgcagggaggtcagcttcaa

SEQ ID NO: 167765 - DNA, 25 bp, Canis familiaris
tggtacatgtcgaatggtcagcgct

SEQ ID NO: 167766 - DNA, 25 bp, Canis familiaris
tggtcctgtcagagcaccagtcaaa

SEQ ID NO: 167767 - DNA, 25 bp, Canis familiaris
tggtcgtgatcgtgactattcagat

SEQ ID NO: 167768 - DNA, 25 bp, Canis familiaris
tggaggtggcactgatctttctgtg

SEQ ID NO: 167769 - DNA, 25 bp, Canis familiaris
tggaggtagcctcttttgtgttcca

SEQ ID NO: 167770 - DNA, 25 bp, Canis familiaris
tggaggaggaggctgtttgtttaca

SEQ ID NO: 167771 - DNA, 25 bp, Canis familiaris
tggaggccgcggctgtgatttttaa

SEQ ID NO: 167772 - DNA, 25 bp, Canis familiaris
tggagtgcggcaaaggttttcgtca

SEQ ID NO: 167773 - DNA, 25 bp, Canis familiaris
tgggacgacatcaggttttccccaa

SEQ ID NO: 167774 - DNA, 25 bp, Canis familiaris
tgggaagacaagagtttttcttaat

SEQ ID NO: 167775 - DNA, 25 bp, Canis familiaris
tggatcacaccaggcatggttttct

SEQ ID NO: 167776 - DNA, 25 bp, Canis familiaris
tggatacacaaccactttcttcact

SEQ ID NO: 167777 - DNA, 25 bp, Canis familiaris
tggtacaacaaagtgcttggtcctg

SEQ ID NO: 167778 - DNA, 25 bp, Canis familiaris
tgggcaagacaaaaattggcatggt

SEQ ID NO: 167779 - DNA, 25 bp, Canis familiaris
tggtaaagctcaaacaaggcttcca

SEQ ID NO: 167780 - DNA, 25 bp, Canis familiaris
tggtaaaatattcaactgttctaga

SEQ ID NO: 167781 - DNA, 25 bp, Canis familiaris
tggtaaaattcacaagcctttttct

SEQ ID NO: 167782 - DNA, 25 bp, Canis familiaris
tggtaaaattccaacacctctctcc

SEQ ID NO: 167783 - DNA, 25 bp, Canis familiaris
tggtacaaaaccactcaccagagct

SEQ ID NO: 167784 - DNA, 25 bp, Canis familiaris
tggtttaaactttcgcccagatgcc

SEQ ID NO: 167785 - DNA, 25 bp, Canis familiaris
tggttaatacgtatcccacagctcc

SEQ ID NO: 167786 - DNA, 25 bp, Canis familiaris
tggttactactttggagcctcagct

SEQ ID NO: 167787 - DNA, 25 bp, Canis familiaris
tggttttgaccttcaggacacacta

SEQ ID NO: 167788 - DNA, 25 bp, Canis familiaris
tggttttgaccccatgggatctgct

SEQ ID NO: 167789 - DNA, 25 bp, Canis familiaris
tgtgtttagaaccctgggcctgtgc

SEQ ID NO: 167790 - DNA, 25 bp, Canis familiaris
tggtactaagacccgtaactgtaat

SEQ ID NO: 167791 - DNA, 25 bp, Canis familiaris
tggtgactaagctccagaacacgga

SEQ ID NO: 167792 - DNA, 25 bp, Canis familiaris
tggtacatttgcttcacaggtcaca

SEQ ID NO: 167793 - DNA, 25 bp, Canis familiaris
tggtccttcctgggcagtgtaattc

SEQ ID NO: 167794 - DNA, 25 bp, Canis familiaris
tgggacttcaaggggggagattttg

SEQ ID NO: 167795 - DNA, 25 bp, Canis familiaris
tgggtcttcagggtggcggaatcaa

SEQ ID NO: 167796 - DNA, 25 bp, Canis familiaris
tggtgcctccggggggcacacaaat

SEQ ID NO: 167797 - DNA, 25 bp, Canis familiaris
tggatgcaacctcggaggagcccac

SEQ ID NO: 167798 - DNA, 25 bp, Canis familiaris
tggatgggtctctgattggcccagc

SEQ ID NO: 167799 - DNA, 25 bp, Canis familiaris
tggaggcgttcctatgatgttccac

SEQ ID NO: 167800 - DNA, 25 bp, Canis familiaris
tggattcagtcccagagtacctcaa

SEQ ID NO: 167801 - DNA, 25 bp, Canis familiaris
tggtccaacctgaagtatcgctgca

SEQ ID NO: 167802 - DNA, 25 bp, Canis familiaris
tggatgaccaccaaagatacctgcc

SEQ ID NO: 167803 - DNA, 25 bp, Canis familiaris
tggtcaccactaccatgtagcattc

SEQ ID NO: 167804 - DNA, 25 bp, Canis familiaris
tggtcatctcattaggttggcatta

SEQ ID NO: 167805 - DNA, 25 bp, Canis familiaris
tggtctccttaacttgtctgtttta

SEQ ID NO: 167806 - DNA, 25 bp, Canis familiaris
tggtattattgatctttttcttttt

SEQ ID NO: 167807 - DNA, 25 bp, Canis familiaris
tggtattggcgtgttctttttttct

SEQ ID NO: 167808 - DNA, 25 bp, Canis familiaris
tggttttgctggatttttacatttt

SEQ ID NO: 167809 - DNA, 25 bp, Canis familiaris
tggtccttcaggatgctttttcctt

SEQ ID NO: 167810 - DNA, 25 bp, Canis familiaris
tggtcccaaaagtcttgtttcgaat

SEQ ID NO: 167811 - DNA, 25 bp, Canis familiaris
tggtctacaaaaatgttgtttgtgc

SEQ ID NO: 167812 - DNA, 25 bp, Canis familiaris
tggtcttcaaaatatgcatgtactt

SEQ ID NO: 167813 - DNA, 25 bp, Canis familiaris
tggttccaaccacgatcattcacca

SEQ ID NO: 167814 - DNA, 25 bp, Canis familiaris
tggtatcctatggagtgatcccctc

SEQ ID NO: 167815 - DNA, 25 bp, Canis familiaris
tggattgggatgtaggatttcctaa

SEQ ID NO: 167816 - DNA, 25 bp, Canis familiaris
tggaggcggcatgttctgattccta

SEQ ID NO: 167817 - DNA, 25 bp, Canis familiaris
tggaggcaggctggcaacatttccc

SEQ ID NO: 167818 - DNA, 25 bp, Canis familiaris
tggatggcaagcatgacacacaccc

SEQ ID NO: 167819 - DNA, 25 bp, Canis familiaris
tggataggccataccacacacacag

SEQ ID NO: 167820 - DNA, 25 bp, Canis familiaris
tggatcaactctacagatcccgctg

SEQ ID NO: 167821 - DNA, 25 bp, Canis familiaris
tggatcaacctgtagcttccattgt

SEQ ID NO: 167822 - DNA, 25 bp, Canis familiaris
tggatgaggacgggcttcctctcat

SEQ ID NO: 167823 - DNA, 25 bp, Canis familiaris
tggaggagagtgagcttcctgcctc

SEQ ID NO: 167824 - DNA, 25 bp, Canis familiaris
tggagggggcaggcttgcgctgccc

SEQ ID NO: 167825 - DNA, 25 bp, Canis familiaris
tggaggagtgtggcctcgagctgca

SEQ ID NO: 167826 - DNA, 25 bp, Canis familiaris
tggaggcactgaggcagtctcgtca

SEQ ID NO: 167827 - DNA, 25 bp, Canis familiaris
tggaggaggactggtgcctgtccgt

SEQ ID NO: 167828 - DNA, 25 bp, Canis familiaris
tggaggaaagtcctccgtgccattt

SEQ ID NO: 167829 - DNA, 25 bp, Canis familiaris
tggaggaccagatcatccaggccaa

SEQ ID NO: 167830 - DNA, 25 bp, Canis familiaris
tggaggacacaatcaacagaacgaa

SEQ ID NO: 167831 - DNA, 25 bp, Canis familiaris
tggaggagactataaacactggaga

SEQ ID NO: 167832 - DNA, 25 bp, Canis familiaris
tggggcaggctttccatagaagtgg

SEQ ID NO: 167833 - DNA, 25 bp, Canis familiaris
tggaggcggctagtcttggaaggca

SEQ ID NO: 167834 - DNA, 25 bp, Canis familiaris
tggaggcaagcctcttctgaagcct

SEQ ID NO: 167835 - DNA, 25 bp, Canis familiaris
tggaggaagatcagctcgctacggc

SEQ ID NO: 167836 - DNA, 25 bp, Canis familiaris
tggaggaagtgcttccactccaggc

SEQ ID NO: 167837 - DNA, 25 bp, Canis familiaris
tggaggaatgtgttcctctctccgc

SEQ ID NO: 167838 - DNA, 25 bp, Canis familiaris
tggaggtgattgtgccatctccacc

SEQ ID NO: 167839 - DNA, 25 bp, Canis familiaris
tggaggtgatggcctctcagtttcc

SEQ ID NO: 167840 - DNA, 25 bp, Canis familiaris
tggaggatgctggacctggtttggg

SEQ ID NO: 167841 - DNA, 25 bp, Canis familiaris
tggaggcgtggaacatcgctggggc

SEQ ID NO: 167842 - DNA, 25 bp, Canis familiaris
tggaggctctggattcagctagaga

SEQ ID NO: 167843 - DNA, 25 bp, Canis familiaris
tggatggaggtgatccgcagcgcga

SEQ ID NO: 167844 - DNA, 25 bp, Canis familiaris
tggatggagaagagcctgcacctgt

SEQ ID NO: 167845 - DNA, 25 bp, Canis familiaris
tggatgaaaaggccttccgctggct

SEQ ID NO: 167846 - DNA, 25 bp, Canis familiaris
tggtagaaaaagtccagcgctggga

SEQ ID NO: 167847 - DNA, 25 bp, Canis familiaris
tggtccccaaagtcgcagcaggaaa

SEQ ID NO: 167848 - DNA, 25 bp, Canis familiaris
tggtctccaagcatgaatagcaggg

SEQ ID NO: 167849 - DNA, 25 bp, Canis familiaris
tggtctccaagcagacctgggcaat

SEQ ID NO: 167850 - DNA, 25 bp, Canis familiaris
tggttcgaggtgcttcgtggcaatc

SEQ ID NO: 167851 - DNA, 25 bp, Canis familiaris
tggtctcgtagggtggcatgggcta

SEQ ID NO: 167852 - DNA, 25 bp, Canis familiaris
tggtttgtacgcaattcaatttcaa

SEQ ID NO: 167853 - DNA, 25 bp, Canis familiaris
tggtttttacttaaatacgcataat

SEQ ID NO: 167854 - DNA, 25 bp, Canis familiaris
tggttttattcctttacccatagat

SEQ ID NO: 167855 - DNA, 25 bp, Canis familiaris
tttgtaattccctttaccagtagca

SEQ ID NO: 167856 - DNA, 25 bp, Canis familiaris
tggtagaatccggttttgccagtac

SEQ ID NO: 167857 - DNA, 25 bp, Canis familiaris
tggtgaggtcacctgttttccatgt

SEQ ID NO: 167858 - DNA, 25 bp, Canis familiaris
tgtctgggtctcagtttggacaact

SEQ ID NO: 167859 - DNA, 25 bp, Canis familiaris
tggggagaccatttttggaaagata

SEQ ID NO: 167860 - DNA, 25 bp, Canis familiaris
tggataaggcccggttgaaaagcaa

SEQ ID NO: 167861 - DNA, 25 bp, Canis familiaris
tggtgggtcccaagtataaccgaag

SEQ ID NO: 167862 - DNA, 25 bp, Canis familiaris
tggtggttcccactgtttaaaattg

SEQ ID NO: 167863 - DNA, 25 bp, Canis familiaris
tgctgggattccaaggttccaacgt

SEQ ID NO: 167864 - DNA, 25 bp, Canis familiaris
tggatgtgttccaagggtccagcac

SEQ ID NO: 167865 - DNA, 25 bp, Canis familiaris
tggatggagtctgagaggccctctc

SEQ ID NO: 167866 - DNA, 25 bp, Canis familiaris
tggaggagcctgagaagccacctga

SEQ ID NO: 167867 - DNA, 25 bp, Canis familiaris
tggaggacagttgactccacctgca

SEQ ID NO: 167868 - DNA, 25 bp, Canis familiaris
tggaggccgtgagtgacaccggctc

SEQ ID NO: 167869 - DNA, 25 bp, Canis familiaris
tggatggtcggggacagccggtgga

SEQ ID NO: 167870 - DNA, 25 bp, Canis familiaris
tggaggcagagccggaatccgtggg

SEQ ID NO: 167871 - DNA, 25 bp, Canis familiaris
tggatggggcggggagtgcgctgga

SEQ ID NO: 167872 - DNA, 25 bp, Canis familiaris
tggaggcggcacaggtggcagtgta

SEQ ID NO: 167873 - DNA, 25 bp, Canis familiaris
tggaggctgccacaggacagaggcc

SEQ ID NO: 167874 - DNA, 25 bp, Canis familiaris
tggattctgtgcccgtgcaagggtc

SEQ ID NO: 167875 - DNA, 25 bp, Canis familiaris
tgtgccacaggtccgtgtagtagtg

SEQ ID NO: 167876 - DNA, 25 bp, Canis familiaris
tgtgaactggaccctgttgctaagc

SEQ ID NO: 167877 - DNA, 25 bp, Canis familiaris
tgtccacatgagagggctgccgtac

SEQ ID NO: 167878 - DNA, 25 bp, Canis familiaris
tggtaatgaaagctgccctggcact

SEQ ID NO: 167879 - DNA, 25 bp, Canis familiaris
tggtaataaatgctccctgttgtct

SEQ ID NO: 167880 - DNA, 25 bp, Canis familiaris
tggttaaatgtgcccacctgtgttc

SEQ ID NO: 167881 - DNA, 25 bp, Canis familiaris
tggttgtaatgtccatctccatctt

SEQ ID NO: 167882 - DNA, 25 bp, Canis familiaris
tggtttaatatccaaacatctgctg

SEQ ID NO: 167883 - DNA, 25 bp, Canis familiaris
tggttgtgtcttgcagtactgttgt

SEQ ID NO: 167884 - DNA, 25 bp, Canis familiaris
tggatctttttcccacatgatttat

SEQ ID NO: 167885 - DNA, 25 bp, Canis familiaris
tggatctttttcccacatgatttat

SEQ ID NO: 167886 - DNA, 25 bp, Canis familiaris
tggtcttcagttttacgcagttcgg

SEQ ID NO: 167887 - DNA, 25 bp, Canis familiaris
tggtctacgtggtctacgtgttcgg

SEQ ID NO: 167888 - DNA, 25 bp, Canis familiaris
tgggcccgtggtgcagggtatcggg

SEQ ID NO: 167889 - DNA, 25 bp, Canis familiaris
tgggacccctgtgcagggtcacagc

SEQ ID NO: 167890 - DNA, 25 bp, Canis familiaris
tgggactcgcttgggggagggacta

SEQ ID NO: 167891 - DNA, 25 bp, Canis familiaris
tggtcaccgcaggggggacggtcaa

SEQ ID NO: 167892 - DNA, 25 bp, Canis familiaris
tggtcacactgtatgggtgcctttc

SEQ ID NO: 167893 - DNA, 25 bp, Canis familiaris
tggtccaagaaagtatgatgccttt

SEQ ID NO: 167894 - DNA, 25 bp, Canis familiaris
tggatccaagaatatgtgtgtgtgt

SEQ ID NO: 167895 - DNA, 25 bp, Canis familiaris
tggatcccaatccttggagctggat

SEQ ID NO: 167896 - DNA, 25 bp, Canis familiaris
tggaggacaatcactggcctgagca

SEQ ID NO: 167897 - DNA, 25 bp, Canis familiaris
tggaggaaagtgtgtcactggcaga

SEQ ID NO: 167898 - DNA, 25 bp, Canis familiaris
tgtgggaaaggtctcctggggtagg

SEQ ID NO: 167899 - DNA, 25 bp, Canis familiaris
tggggaatacttgtccttccaaagg

SEQ ID NO: 167900 - DNA, 25 bp, Canis familiaris
tggggaaggagagccccccaagagc

SEQ ID NO: 167901 - DNA, 25 bp, Canis familiaris
tggtcgaactaaacccattccaagg

SEQ ID NO: 167902 - DNA, 25 bp, Canis familiaris
tggttaacccaaagcaagcccaagg

SEQ ID NO: 167903 - DNA, 25 bp, Canis familiaris
tggttggttccatgggggccaagga

SEQ ID NO: 167904 - DNA, 25 bp, Canis familiaris
tggtcggtccacggagggggaagag

SEQ ID NO: 167905 - DNA, 25 bp, Canis familiaris
tggttgggcccggggctgaagaaga

SEQ ID NO: 167906 - DNA, 25 bp, Canis familiaris
tggttgtcccgcaggggcaaatgaa

SEQ ID NO: 167907 - DNA, 25 bp, Canis familiaris
tggttttcgcctctgggacaagtaa

SEQ ID NO: 167908 - DNA, 25 bp, Canis familiaris
tggttcttcctcagtgaggacaatt

SEQ ID NO: 167909 - DNA, 25 bp, Canis familiaris
tggttttcggaactgaggccatgat

SEQ ID NO: 167910 - DNA, 25 bp, Canis familiaris
tggttttcggaactgaggccatgat

SEQ ID NO: 167911 - DNA, 25 bp, Canis familiaris
tggatttccgtctctggtgtagctg

SEQ ID NO: 167912 - DNA, 25 bp, Canis familiaris
tggtttcggtcagttggtgtgtctg

SEQ ID NO: 167913 - DNA, 25 bp, Canis familiaris
tggtttcagaccatttttcctggca

SEQ ID NO: 167914 - DNA, 25 bp, Canis familiaris
tgggattacccactactgattccta

SEQ ID NO: 167915 - DNA, 25 bp, Canis familiaris
tggtatcagaccccaagcgtaccat

SEQ ID NO: 167916 - DNA, 25 bp, Canis familiaris
tggtctcagagcggctggagctttc

SEQ ID NO: 167917 - DNA, 25 bp, Canis familiaris
tggttgaagcacctgggcttcctcc

SEQ ID NO: 167918 - DNA, 25 bp, Canis familiaris
tggttagcgactcgtgggactcatc

SEQ ID NO: 167919 - DNA, 25 bp, Canis familiaris
tggtcttggcctcaggtgacaacca

SEQ ID NO: 167920 - DNA, 25 bp, Canis familiaris
tggtccttgactttggtgacagccc

SEQ ID NO: 167921 - DNA, 25 bp, Canis familiaris
tggtgtcctactttggtaacctgct

SEQ ID NO: 167922 - DNA, 25 bp, Canis familiaris
tggttcctactgacttttcaccaga

SEQ ID NO: 167923 - DNA, 25 bp, Canis familiaris
tggtctgggttgtcttttcggagaa

SEQ ID NO: 167924 - DNA, 25 bp, Canis familiaris
tggttgtggttgccttgttgcagga

SEQ ID NO: 167925 - DNA, 25 bp, Canis familiaris
tggttctgtctattacgtctgagta

SEQ ID NO: 167926 - DNA, 25 bp, Canis familiaris
tggatttttcattaggtcttctgct

SEQ ID NO: 167927 - DNA, 25 bp, Canis familiaris
tggtctttgtcttaagttcctctac

SEQ ID NO: 167928 - DNA, 25 bp, Canis familiaris
tggtcttccatttacagtgtcacta

SEQ ID NO: 167929 - DNA, 25 bp, Canis familiaris
tggtttatctattaatttcaaatta

SEQ ID NO: 167930 - DNA, 25 bp, Canis familiaris
tggttaatgctttcgtttagctttc

SEQ ID NO: 167931 - DNA, 25 bp, Canis familiaris
tcgttcaaattgtggtcatcttttc

SEQ ID NO: 167932 - DNA, 25 bp, Canis familiaris
tggttacagtctttttcttatcttc

SEQ ID NO: 167933 - DNA, 25 bp, Canis familiaris
tggttggcagttttttttcttcatc

SEQ ID NO: 167934 - DNA, 25 bp, Canis familiaris
tggtctgttaatttttttcatcact

SEQ ID NO: 167935 - DNA, 25 bp, Canis familiaris
tggttgttttcaatattttgccctt

SEQ ID NO: 167936 - DNA, 25 bp, Canis familiaris
tggattaagttctttccaacccgat

SEQ ID NO: 167937 - DNA, 25 bp, Canis familiaris
tggatctagagtgtctctgccggtc

SEQ ID NO: 167938 - DNA, 25 bp, Canis familiaris
tggtcgagcgatggatttccgtctc

SEQ ID NO: 167939 - DNA, 25 bp, Canis familiaris
tggtcaccaatggtttcctctgtca

SEQ ID NO: 167940 - DNA, 25 bp, Canis familiaris
tggtccgaaaggtatctctcttcac

SEQ ID NO: 167941 - DNA, 25 bp, Canis familiaris
tggtcccaggagtgttcatcttcca

SEQ ID NO: 167942 - DNA, 25 bp, Canis familiaris
tggtccaaggtgtactgtttcattt

SEQ ID NO: 167943 - DNA, 25 bp, Canis familiaris
tgtggatcagatggatgcagacatt

SEQ ID NO: 167944 - DNA, 25 bp, Canis familiaris
tgggatgagcatgcaggaagtccat

SEQ ID NO: 167945 - DNA, 25 bp, Canis familiaris
tggtgggtacaggaatctgccatct

SEQ ID NO: 167946 - DNA, 25 bp, Canis familiaris
tggtggggacataagtagctctctg

SEQ ID NO: 167947 - DNA, 25 bp, Canis familiaris
tggatggtctctacaattcctcttc

SEQ ID NO: 167948 - DNA, 25 bp, Canis familiaris
tggatttcagctaccattttcgtca

SEQ ID NO: 167949 - DNA, 25 bp, Canis familiaris
tggttgccaggtctgttgtcagtcc

SEQ ID NO: 167950 - DNA, 25 bp, Canis familiaris
tggattggcgcgtgctgtatgtcag

SEQ ID NO: 167951 - DNA, 25 bp, Canis familiaris
tggtatatgctgcctgttgtttctg

SEQ ID NO: 167952 - DNA, 25 bp, Canis familiaris
tggttggctctggttgagtgtctgc

SEQ ID NO: 167953 - DNA, 25 bp, Canis familiaris
tggtaggattggctggtgctttctc

SEQ ID NO: 167954 - DNA, 25 bp, Canis familiaris
tggtagagacgccagtgcttctgtc

SEQ ID NO: 167955 - DNA, 25 bp, Canis familiaris
tggtgaaggggacctttgcccagga

SEQ ID NO: 167956 - DNA, 25 bp, Canis familiaris
tggtaataaaatctgttcccaggcc

SEQ ID NO: 167957 - DNA, 25 bp, Canis familiaris
tgggaagaaaatctaatatcgcagc

SEQ ID NO: 167958 - DNA, 25 bp, Canis familiaris
tgggcggattaacacaatccaggaa

SEQ ID NO: 167959 - DNA, 25 bp, Canis familiaris
tggtctggacaacaaacttcgtgaa

SEQ ID NO: 167960 - DNA, 25 bp, Canis familiaris
tggtagcttcaacaaccatctcgta

SEQ ID NO: 167961 - DNA, 25 bp, Canis familiaris
tggtcagttcccaacaaatcctgta

SEQ ID NO: 167962 - DNA, 25 bp, Canis familiaris
tggtattgcatcccaaaatctcctt

SEQ ID NO: 167963 - DNA, 25 bp, Canis familiaris
tggtcaacatcacctacaactaccc

SEQ ID NO: 167964 - DNA, 25 bp, Canis familiaris
tggtcaaattgtgtaactgctctaa

SEQ ID NO: 167965 - DNA, 25 bp, Canis familiaris
tggtcaacaatttctattctgctta

SEQ ID NO: 167966 - DNA, 25 bp, Canis familiaris
tggtaacagcttactgttgtggtca

SEQ ID NO: 167967 - DNA, 25 bp, Canis familiaris
tggtatcagcagttcctctatatgg

SEQ ID NO: 167968 - DNA, 25 bp, Canis familiaris
tggtctcccagatgcacaattcaat

SEQ ID NO: 167969 - DNA, 25 bp, Canis familiaris
tggtctctccgagttaattcttgga

SEQ ID NO: 167970 - DNA, 25 bp, Canis familiaris
tggtcctgggtttaagtcctggctt

SEQ ID NO: 167971 - DNA, 25 bp, Canis familiaris
tggtgcctggttttgtattccttta

SEQ ID NO: 167972 - DNA, 25 bp, Canis familiaris
tggtgcctggttttgtattccttta

SEQ ID NO: 167973 - DNA, 25 bp, Canis familiaris
tggtgcctggttttgtattccttta

SEQ ID NO: 167974 - DNA, 25 bp, Canis familiaris
tggtgcctggttttgtattccttta

SEQ ID NO: 167975 - DNA, 25 bp, Canis familiaris
tggtttgggttggtttgcactttat

SEQ ID NO: 167976 - DNA, 25 bp, Canis familiaris
tggatttaggtccctttggctattt

SEQ ID NO: 167977 - DNA, 25 bp, Canis familiaris
tggatttagttccttttggctattt

SEQ ID NO: 167978 - DNA, 25 bp, Canis familiaris
tggtttagttccagtctaagtccta

SEQ ID NO: 167979 - DNA, 25 bp, Canis familiaris
tggtttagtttctgttttcatcctc

SEQ ID NO: 167980 - DNA, 25 bp, Canis familiaris
tggtttataacgcgtgcttctcacc

SEQ ID NO: 167981 - DNA, 25 bp, Canis familiaris
tggttaattccgggtgctatgctat

SEQ ID NO: 167982 - DNA, 25 bp, Canis familiaris
tggttagcaccgcaggtgtagagaa

SEQ ID NO: 167983 - DNA, 25 bp, Canis familiaris
tggttgcagcccctggacaggaaca

SEQ ID NO: 167984 - DNA, 25 bp, Canis familiaris
tggattgccctcatgacaattgtca

SEQ ID NO: 167985 - DNA, 25 bp, Canis familiaris
tggattgacctctttatcatttctg

SEQ ID NO: 167986 - DNA, 25 bp, Canis familiaris
tggattccccgtttatgtctcaggg

SEQ ID NO: 167987 - DNA, 25 bp, Canis familiaris
tggttttcctcttatagcaccatcg

SEQ ID NO: 167988 - DNA, 25 bp, Canis familiaris
tggtttccaccagataatcctccac

SEQ ID NO: 167989 - DNA, 25 bp, Canis familiaris
tggtgtttctaagggtgaccccatc

SEQ ID NO: 167990 - DNA, 25 bp, Canis familiaris
tggttgtttgtcggtggcagaccca

SEQ ID NO: 167991 - DNA, 25 bp, Canis familiaris
tggtgtctagttctgtgtcaaacac

SEQ ID NO: 167992 - DNA, 25 bp, Canis familiaris
tggtcccagtcacgtgtacaaacac

SEQ ID NO: 167993 - DNA, 25 bp, Canis familiaris
tggtcccctccaggatataaacttc

SEQ ID NO: 167994 - DNA, 25 bp, Canis familiaris
tggtcttgccaaaatgaaagaaatt

SEQ ID NO: 167995 - DNA, 25 bp, Canis familiaris
tgggttaactaacaaatatttggct

SEQ ID NO: 167996 - DNA, 25 bp, Canis familiaris
tgggttaagccaagcccaagtttcg

SEQ ID NO: 167997 - DNA, 25 bp, Canis familiaris
tgcgagtctattgctacgtgacgtt

SEQ ID NO: 167998 - DNA, 25 bp, Canis familiaris
tggggcttttgcaacggaagtcttt

SEQ ID NO: 167999 - DNA, 25 bp, Canis familiaris
tggtttgtgcctcacagggagcttt

SEQ ID NO: 168000 - DNA, 25 bp, Canis familiaris
tggttttgggttggggatctttctg

SEQ ID NO: 168001 - DNA, 25 bp, Canis familiaris
tggtttcgttttggtagaatctttg

SEQ ID NO: 168002 - DNA, 25 bp, Canis familiaris
tggtcttgtttagggtaggagttcg

SEQ ID NO: 168003 - DNA, 25 bp, Canis familiaris
tggttttttcctggtgtgggtactg

SEQ ID NO: 168004 - DNA, 25 bp, Canis familiaris
tggttttcttttgctgtggggtatt

SEQ ID NO: 168005 - DNA, 25 bp, Canis familiaris
tggtttcctcttggctttggggata

SEQ ID NO: 168006 - DNA, 25 bp, Canis familiaris
tggtttgttcttggtgtttgggcaa

SEQ ID NO: 168007 - DNA, 25 bp, Canis familiaris
tggttcgtcccaccatttggaggaa

SEQ ID NO: 168008 - DNA, 25 bp, Canis familiaris
tggttctctccctcagtgaggaaca

SEQ ID NO: 168009 - DNA, 25 bp, Canis familiaris
tggtccctcccatgctgggaaaaaa

SEQ ID NO: 168010 - DNA, 25 bp, Canis familiaris
tggttactactcagatgggaaaaaa

SEQ ID NO: 168011 - DNA, 25 bp, Canis familiaris
tggttagctaacactggggcaggca

SEQ ID NO: 168012 - DNA, 25 bp, Canis familiaris
tggtctttgtaaccatcctggaggt

SEQ ID NO: 168013 - DNA, 25 bp, Canis familiaris
tggttagtgtaacttcctctggcca

SEQ ID NO: 168014 - DNA, 25 bp, Canis familiaris
tggttgggtgatactccctcaagcc

SEQ ID NO: 168015 - DNA, 25 bp, Canis familiaris
tggatatgttgcaggtcacgctccc

SEQ ID NO: 168016 - DNA, 25 bp, Canis familiaris
tggtacgagattggtcagcgtcccc

SEQ ID NO: 168017 - DNA, 25 bp, Canis familiaris
tggtaggagaatgctatgcccccac

SEQ ID NO: 168018 - DNA, 25 bp, Canis familiaris
tggtcaggggatcaagcacgcgtcc

SEQ ID NO: 168019 - DNA, 25 bp, Canis familiaris
tgaggctagtagtaacccagcgtcc

SEQ ID NO: 168020 - DNA, 25 bp, Canis familiaris
tggttcagttgctaagttccctgcc

SEQ ID NO: 168021 - DNA, 25 bp, Canis familiaris
tggttcactatgttcagcatctgcc

SEQ ID NO: 168022 - DNA, 25 bp, Canis familiaris
tggttgactgtgatcgccatgtctt

SEQ ID NO: 168023 - DNA, 25 bp, Canis familiaris
tggatagacctaagcccagtcgtcc

SEQ ID NO: 168024 - DNA, 25 bp, Canis familiaris
tggataacctggcatcactgacttc

SEQ ID NO: 168025 - DNA, 25 bp, Canis familiaris
tggatacaatgcgggtcctggcttt

SEQ ID NO: 168026 - DNA, 25 bp, Canis familiaris
tggatcaggattggggcatctgggt

SEQ ID NO: 168027 - DNA, 25 bp, Canis familiaris
tggtacgatgtctccatctacgcat

SEQ ID NO: 168028 - DNA, 25 bp, Canis familiaris
tggtaagaggctctcactactgccc

SEQ ID NO: 168029 - DNA, 25 bp, Canis familiaris
tggtaagtgtgccctttaatgccca

SEQ ID NO: 168030 - DNA, 25 bp, Canis familiaris
tggtcaaggtgctagctttcctgca

SEQ ID NO: 168031 - DNA, 25 bp, Canis familiaris
tggtcaaagtcattgcccacggcaa

SEQ ID NO: 168032 - DNA, 25 bp, Canis familiaris
tggtagagcagaacttcccagccat

SEQ ID NO: 168033 - DNA, 25 bp, Canis familiaris
tggatcaggaggtcctggctgccca

SEQ ID NO: 168034 - DNA, 25 bp, Canis familiaris
tggatcatggaaccacgctgtccat

SEQ ID NO: 168035 - DNA, 25 bp, Canis familiaris
tggtagatgcagaccactgtgccgt

SEQ ID NO: 168036 - DNA, 25 bp, Canis familiaris
tggtatgtcatgtccactcatgtcc

SEQ ID NO: 168037 - DNA, 25 bp, Canis familiaris
tggttgatctgattggctcttcgat

SEQ ID NO: 168038 - DNA, 25 bp, Canis familiaris
tggttgatgccatcagctccatact

SEQ ID NO: 168039 - DNA, 25 bp, Canis familiaris
tggttgatcctgccagtagcatatg

SEQ ID NO: 168040 - DNA, 25 bp, Canis familiaris
tggttcatttcttgctcagcatcag

SEQ ID NO: 168041 - DNA, 25 bp, Canis familiaris
tggtagagttcatttcccaggtctc

SEQ ID NO: 168042 - DNA, 25 bp, Canis familiaris
tggtaacttatttgtccggttcaag

SEQ ID NO: 168043 - DNA, 25 bp, Canis familiaris
tgggaatatctaaataccggtacgg

SEQ ID NO: 168044 - DNA, 25 bp, Canis familiaris
tggggatctttggagagcacgagta

SEQ ID NO: 168045 - DNA, 25 bp, Canis familiaris
tctggggtattaaggacgaggacca

SEQ ID NO: 168046 - DNA, 25 bp, Canis familiaris
tacgggaacggggacggcgatcgat

SEQ ID NO: 168047 - DNA, 25 bp, Canis familiaris
tgaggggaacgtgcccaaagctcgt

SEQ ID NO: 168048 - DNA, 25 bp, Canis familiaris
tggtgggcaacggcgtaggcaactc

SEQ ID NO: 168049 - DNA, 25 bp, Canis familiaris
tgtgatggtcaaccctcttggaaag

SEQ ID NO: 168050 - DNA, 25 bp, Canis familiaris
tggttatcaaccacctagagaagtt

SEQ ID NO: 168051 - DNA, 25 bp, Canis familiaris
tggtctacccgcacgaagaggaggt

SEQ ID NO: 168052 - DNA, 25 bp, Canis familiaris
tgtttaccctgggttctgaggggtg

SEQ ID NO: 168053 - DNA, 25 bp, Canis familiaris
tgtttggccctggggttggagggct

SEQ ID NO: 168054 - DNA, 25 bp, Canis familiaris
tgtttcccattgatcggtcggtggc

SEQ ID NO: 168055 - DNA, 25 bp, Canis familiaris
tgtggtgacgttcacgagtcggtgc

SEQ ID NO: 168056 - DNA, 25 bp, Canis familiaris
tggtgagccgtataccgacgtgctc

SEQ ID NO: 168057 - DNA, 25 bp, Canis familiaris
tggtgctgccaaggaaaccaccgcc

SEQ ID NO: 168058 - DNA, 25 bp, Canis familiaris
tgggtccaatgggaaccacttgcca

SEQ ID NO: 168059 - DNA, 25 bp, Canis familiaris
tgggcttcaggggaacccttggcac

SEQ ID NO: 168060 - DNA, 25 bp, Canis familiaris
tgggagggttcagacccttggcagt

SEQ ID NO: 168061 - DNA, 25 bp, Canis familiaris
tctaaagggtcagcagccctctaga

SEQ ID NO: 168062 - DNA, 25 bp, Canis familiaris
taaggtgggtcaccaccccaaatca

SEQ ID NO: 168063 - DNA, 25 bp, Canis familiaris
taaggtcagggggtcctacacagaa

SEQ ID NO: 168064 - DNA, 25 bp, Canis familiaris
tggtggatcctggggtcctaaagcc

SEQ ID NO: 168065 - DNA, 25 bp, Canis familiaris
tggtcgacgcgaccgtgggaaacct

SEQ ID NO: 168066 - DNA, 25 bp, Canis familiaris
tgggagaagtactaggggaatacct

SEQ ID NO: 168067 - DNA, 25 bp, Canis familiaris
tggtgacacagaaatggtggggaac

SEQ ID NO: 168068 - DNA, 25 bp, Canis familiaris
tggtcagccagaagcttcttgcgag

SEQ ID NO: 168069 - DNA, 25 bp, Canis familiaris
tggtagctgctgcatctgctattgc

SEQ ID NO: 168070 - DNA, 25 bp, Canis familiaris
tggtagcatgctctgttgattcaca

SEQ ID NO: 168071 - DNA, 25 bp, Canis familiaris
tggtcgcagctgtgctgttcatcac

SEQ ID NO: 168072 - DNA, 25 bp, Canis familiaris
tggtccctgtacaagcatcaagagc

SEQ ID NO: 168073 - DNA, 25 bp, Canis familiaris
tggattccttacacatttcatcacc

SEQ ID NO: 168074 - DNA, 25 bp, Canis familiaris
tggttccattaaccagggctctgcc

SEQ ID NO: 168075 - DNA, 25 bp, Canis familiaris
tggttacattaacctggcagccgca

SEQ ID NO: 168076 - DNA, 25 bp, Canis familiaris
tggtacctatacctgtgttgccgag

SEQ ID NO: 168077 - DNA, 25 bp, Canis familiaris
tggttggatattgctgtctctggga

SEQ ID NO: 168078 - DNA, 25 bp, Canis familiaris
tgggctgattttattctcgggttcc

SEQ ID NO: 168079 - DNA, 25 bp, Canis familiaris
tgggtttctcagagcttcgggagtc

SEQ ID NO: 168080 - DNA, 25 bp, Canis familiaris
tggtgttcgtcaaagtccggcagga

SEQ ID NO: 168081 - DNA, 25 bp, Canis familiaris
tggtttagtcaccagatcccagcat

SEQ ID NO: 168082 - DNA, 25 bp, Canis familiaris
tggttccactagaaatctccatgat

SEQ ID NO: 168083 - DNA, 25 bp, Canis familiaris
tggattccattacaggctctcacat

SEQ ID NO: 168084 - DNA, 25 bp, Canis familiaris
tggattctctcatcaaggctaccat

SEQ ID NO: 168085 - DNA, 25 bp, Canis familiaris
tggattctaaactgactgcaccacc

SEQ ID NO: 168086 - DNA, 25 bp, Canis familiaris
tggtatctaaccagtgccaacatcc

SEQ ID NO: 168087 - DNA, 25 bp, Canis familiaris
tggtgtgtagaagtacccaaccctt

SEQ ID NO: 168088 - DNA, 25 bp, Canis familiaris
tggttgctaatgatcaccgatgacc

SEQ ID NO: 168089 - DNA, 25 bp, Canis familiaris
tggtagcttatgtcgatcttgatga

SEQ ID NO: 168090 - DNA, 25 bp, Canis familiaris
tggtggcaccaccagatgcgtgata

SEQ ID NO: 168091 - DNA, 25 bp, Canis familiaris
tggtgccacctgactgcagaagaat

SEQ ID NO: 168092 - DNA, 25 bp, Canis familiaris
tggtgctgccatggtcgcaaaaatg

SEQ ID NO: 168093 - DNA, 25 bp, Canis familiaris
tggtcattgctttctccaagagatg

SEQ ID NO: 168094 - DNA, 25 bp, Canis familiaris
tggtatgtggctttgctgagcgcaa

SEQ ID NO: 168095 - DNA, 25 bp, Canis familiaris
tggtatgtggtagtgctgcagttgg

SEQ ID NO: 168096 - DNA, 25 bp, Canis familiaris
tggtatttgtcatctctttctgact

SEQ ID NO: 168097 - DNA, 25 bp, Canis familiaris
tggttgtagagcttctcgtgactga

SEQ ID NO: 168098 - DNA, 25 bp, Canis familiaris
tggtcttcacagtgctcgctgagaa

SEQ ID NO: 168099 - DNA, 25 bp, Canis familiaris
tggtctgtcccttattgctgagaat

SEQ ID NO: 168100 - DNA, 25 bp, Canis familiaris
tgaggttcccctaacgtgaaatttg

SEQ ID NO: 168101 - DNA, 25 bp, Canis familiaris
tggttccccaaaaagctaaatatag

SEQ ID NO: 168102 - DNA, 25 bp, Canis familiaris
tggattccctcatcaaggctacaat

SEQ ID NO: 168103 - DNA, 25 bp, Canis familiaris
tgggtccctcagcaaggcaatgact

SEQ ID NO: 168104 - DNA, 25 bp, Canis familiaris
tggttcccgaggaagagccagctgc

SEQ ID NO: 168105 - DNA, 25 bp, Canis familiaris
tggggcgcctgagaacattcggcag

SEQ ID NO: 168106 - DNA, 25 bp, Canis familiaris
tggtgaccctgcttaagcattccca

SEQ ID NO: 168107 - DNA, 25 bp, Canis familiaris
tggtgagccctgctagtgactacca

SEQ ID NO: 168108 - DNA, 25 bp, Canis familiaris
tggggcctatgggacttcggaaagg

SEQ ID NO: 168109 - DNA, 25 bp, Canis familiaris
tggggtccagcagacctgggaccag

SEQ ID NO: 168110 - DNA, 25 bp, Canis familiaris
tggtgaggccgagcagcacggtgac

SEQ ID NO: 168111 - DNA, 25 bp, Canis familiaris
tggtcgtattgggcgcctggtcacc

SEQ ID NO: 168112 - DNA, 25 bp, Canis familiaris
tggtctctattgccaggctgctagt

SEQ ID NO: 168113 - DNA, 25 bp, Canis familiaris
tggtcttcttgtggtgcacagatta

SEQ ID NO: 168114 - DNA, 25 bp, Canis familiaris
tggtcttctgtagagaggaatcaca

SEQ ID NO: 168115 - DNA, 25 bp, Canis familiaris
tggtcagctctttggaagtttccat

SEQ ID NO: 168116 - DNA, 25 bp, Canis familiaris
tggtcatccttaccaactttctttt

SEQ ID NO: 168117 - DNA, 25 bp, Canis familiaris
tgggcacgttacgtgaccttcctga

SEQ ID NO: 168118 - DNA, 25 bp, Canis familiaris
tgtccggtgtccggactttcctaat

SEQ ID NO: 168119 - DNA, 25 bp, Canis familiaris
tgtctgggtgggggacgttcgagaa

SEQ ID NO: 168120 - DNA, 25 bp, Canis familiaris
tgtccaggcggggagtccccggaca

SEQ ID NO: 168121 - DNA, 25 bp, Canis familiaris
tgggggctggaggaggccccgtatc

SEQ ID NO: 168122 - DNA, 25 bp, Canis familiaris
tggtcggaggttggaacccagcttc

SEQ ID NO: 168123 - DNA, 25 bp, Canis familiaris
tggtaggaggtgagccagtcccctc

SEQ ID NO: 168124 - DNA, 25 bp, Canis familiaris
tggtgacgtggtccctggtcaccat

SEQ ID NO: 168125 - DNA, 25 bp, Canis familiaris
tgggacgtggggaggtgacctcgcc

SEQ ID NO: 168126 - DNA, 25 bp, Canis familiaris
tgaggacggctatgactggggcccg

SEQ ID NO: 168127 - DNA, 25 bp, Canis familiaris
tggtaggagctccgactggctgagc

SEQ ID NO: 168128 - DNA, 25 bp, Canis familiaris
tggtcagtcaggttgcctggctggt

SEQ ID NO: 168129 - DNA, 25 bp, Canis familiaris
tggtcaccaggaatcccaggttcca

SEQ ID NO: 168130 - DNA, 25 bp, Canis familiaris
tggtctaagcagatcccattgtccc

SEQ ID NO: 168131 - DNA, 25 bp, Canis familiaris
tggtcatctgggtggccattgtggc

SEQ ID NO: 168132 - DNA, 25 bp, Canis familiaris
tggtcaccagggctgccatttgcag

SEQ ID NO: 168133 - DNA, 25 bp, Canis familiaris
tggtcaccagggctgccatttgcag

SEQ ID NO: 168134 - DNA, 25 bp, Canis familiaris
tgtgtcccgggttggactgtcgatc

SEQ ID NO: 168135 - DNA, 25 bp, Canis familiaris
tggtctcccaggtgaggcttgagtc

SEQ ID NO: 168136 - DNA, 25 bp, Canis familiaris
tggtttctcagtttgactctgggcc

SEQ ID NO: 168137 - DNA, 25 bp, Canis familiaris
tgggttctgattctaccttgtgctt

SEQ ID NO: 168138 - DNA, 25 bp, Canis familiaris
tggttctctagtttcacactttttc

SEQ ID NO: 168139 - DNA, 25 bp, Canis familiaris
tggtcgtcaatgtttccacgtttcc

SEQ ID NO: 168140 - DNA, 25 bp, Canis familiaris
tggtatgtctatgttggccgtttcc

SEQ ID NO: 168141 - DNA, 25 bp, Canis familiaris
tgagtttccaggaggccttttcact

SEQ ID NO: 168142 - DNA, 25 bp, Canis familiaris
tggtaaccagggggcccttggagct

SEQ ID NO: 168143 - DNA, 25 bp, Canis familiaris
tgtgaaaacaggtctctcggggggc

SEQ ID NO: 168144 - DNA, 25 bp, Canis familiaris
tggtaacacctgttcctgtggacag

SEQ ID NO: 168145 - DNA, 25 bp, Canis familiaris
ttgggaacccaatctgggaaggtca

SEQ ID NO: 168146 - DNA, 25 bp, Canis familiaris
tctggaaacccaaaccctcaaggat

SEQ ID NO: 168147 - DNA, 25 bp, Canis familiaris
tctggaaacccaaaccctcaaggat

SEQ ID NO: 168148 - DNA, 25 bp, Canis familiaris
tcatgaaaaaaataaccgaaggctt

SEQ ID NO: 168149 - DNA, 25 bp, Canis familiaris
tctgggcacaaaaaacccacaaggc

SEQ ID NO: 168150 - DNA, 25 bp, Canis familiaris
tgtccagcaaaaaataagtccaatg

SEQ ID NO: 168151 - DNA, 25 bp, Canis familiaris
tgtgcccaaggaacaaggaccaggg

SEQ ID NO: 168152 - DNA, 25 bp, Canis familiaris
tggggtgagcactcagaggcccaag

SEQ ID NO: 168153 - DNA, 25 bp, Canis familiaris
tggtgcgcatgggccagaaggactc

SEQ ID NO: 168154 - DNA, 25 bp, Canis familiaris
tgtggctgaggagcagacgggccgg

SEQ ID NO: 168155 - DNA, 25 bp, Canis familiaris
ttggggtattcagagtgggccgggc

SEQ ID NO: 168156 - DNA, 25 bp, Canis familiaris
tgggaggtattttggtggacgggtg

SEQ ID NO: 168157 - DNA, 25 bp, Canis familiaris
tgggccccatccaggggacagttag

SEQ ID NO: 168158 - DNA, 25 bp, Canis familiaris
tgggcccagccgaggttgaagggtg

SEQ ID NO: 168159 - DNA, 25 bp, Canis familiaris
tgggtcttcgacaggttacaggggt

SEQ ID NO: 168160 - DNA, 25 bp, Canis familiaris
tgggacaatggacgggttttgggag

SEQ ID NO: 168161 - DNA, 25 bp, Canis familiaris
tgggtggaggacagggttctggggg

SEQ ID NO: 168162 - DNA, 25 bp, Canis familiaris
tgggggaggagtcagtagggggtct

SEQ ID NO: 168163 - DNA, 25 bp, Canis familiaris
tggggccaaagtctgtgaggtcggt

SEQ ID NO: 168164 - DNA, 25 bp, Canis familiaris
tgggccaaaaggctgttgagtcttg

SEQ ID NO: 168165 - DNA, 25 bp, Canis familiaris
tgggcccaagggatttggctacggc

SEQ ID NO: 168166 - DNA, 25 bp, Canis familiaris
tgggtcccagggaaactggacttgg

SEQ ID NO: 168167 - DNA, 25 bp, Canis familiaris
tgtgttaccataagccaacggaccc

SEQ ID NO: 168168 - DNA, 25 bp, Canis familiaris
tggttacctatcctacaaagcacaa

SEQ ID NO: 168169 - DNA, 25 bp, Canis familiaris
tggtttccctccttaatgatgcacc

SEQ ID NO: 168170 - DNA, 25 bp, Canis familiaris
tggtttctcgatattactcaccgcc

SEQ ID NO: 168171 - DNA, 25 bp, Canis familiaris
tggtttctcggagttttgcaccgta

SEQ ID NO: 168172 - DNA, 25 bp, Canis familiaris
tgtgtaacccgagttggaaccatta

SEQ ID NO: 168173 - DNA, 25 bp, Canis familiaris
tggtcaacaacggccggaatccgca

SEQ ID NO: 168174 - DNA, 25 bp, Canis familiaris
tggtcacccaaggacgggtcgtcag

SEQ ID NO: 168175 - DNA, 25 bp, Canis familiaris
tgtgtagcccaacacgagcatttcc

SEQ ID NO: 168176 - DNA, 25 bp, Canis familiaris
tggtgcgccccaaaggcgtggtcgc

SEQ ID NO: 168177 - DNA, 25 bp, Canis familiaris
tggtcgtaccacgggcattgtgatg

SEQ ID NO: 168178 - DNA, 25 bp, Canis familiaris
tggtgcctaccatggtgtctgagaa

SEQ ID NO: 168179 - DNA, 25 bp, Canis familiaris
tggtgtccttcattgctggtttaac

SEQ ID NO: 168180 - DNA, 25 bp, Canis familiaris
tgggactcttgcactgggcagatca

SEQ ID NO: 168181 - DNA, 25 bp, Canis familiaris
tggtcagcctcgatcagggcgacaa

SEQ ID NO: 168182 - DNA, 25 bp, Canis familiaris
tggtcatcgtctggaggcgggagca

SEQ ID NO: 168183 - DNA, 25 bp, Canis familiaris
tggttcctgctgcagcgaggggagg

SEQ ID NO: 168184 - DNA, 25 bp, Canis familiaris
tgggcttccggacagagaggcgtga

SEQ ID NO: 168185 - DNA, 25 bp, Canis familiaris
tggggtccgaagcctgagtgaggag

SEQ ID NO: 168186 - DNA, 25 bp, Canis familiaris
tgggtcgacccacggggatcgacca

SEQ ID NO: 168187 - DNA, 25 bp, Canis familiaris
tggtgatcgacatcccggagtgacc

SEQ ID NO: 168188 - DNA, 25 bp, Canis familiaris
tggtgaaaagggccggaggatccgg

SEQ ID NO: 168189 - DNA, 25 bp, Canis familiaris
tggtggaagaagctcgggcagtccc

SEQ ID NO: 168190 - DNA, 25 bp, Canis familiaris
tggtgcgaaatcattggtggcaatg

SEQ ID NO: 168191 - DNA, 25 bp, Canis familiaris
tggtgccaggacaggatgctccaag

SEQ ID NO: 168192 - DNA, 25 bp, Canis familiaris
tggtccaacagcaagtgcagcgcct

SEQ ID NO: 168193 - DNA, 25 bp, Canis familiaris
tggtagctagcaccagtgccagctc

SEQ ID NO: 168194 - DNA, 25 bp, Canis familiaris
tggtcctggcacaattctcagggtt

SEQ ID NO: 168195 - DNA, 25 bp, Canis familiaris
tggtcagtgtgattatacctgggga

SEQ ID NO: 168196 - DNA, 25 bp, Canis familiaris
tggtcgtggtgattgtacggccgtg

SEQ ID NO: 168197 - DNA, 25 bp, Canis familiaris
tggtcgggtgattcggattgcgggg

SEQ ID NO: 168198 - DNA, 25 bp, Canis familiaris
tggtcagggctattcatgggtgggg

SEQ ID NO: 168199 - DNA, 25 bp, Canis familiaris
tggtcgtggctcccagggagtgagg

SEQ ID NO: 168200 - DNA, 25 bp, Canis familiaris
tggtgctgtattggccgagaggtga

SEQ ID NO: 168201 - DNA, 25 bp, Canis familiaris
tgggctttatggtaggccttcaggt

SEQ ID NO: 168202 - DNA, 25 bp, Canis familiaris
tggtttttagatgggcctttgggag

SEQ ID NO: 168203 - DNA, 25 bp, Canis familiaris
tggtggttcttgggtgactttttga

SEQ ID NO: 168204 - DNA, 25 bp, Canis familiaris
tggtttgtttgtttggtttgtgtgt

SEQ ID NO: 168205 - DNA, 25 bp, Canis familiaris
tggttcatgtttcctttgtttgtta

SEQ ID NO: 168206 - DNA, 25 bp, Canis familiaris
tggttatcctgtcttggttctcatt

SEQ ID NO: 168207 - DNA, 25 bp, Canis familiaris
tggtaaccctggtggttgctgcatc

SEQ ID NO: 168208 - DNA, 25 bp, Canis familiaris
tggtaccgccggtagtgccggcgcc

SEQ ID NO: 168209 - DNA, 25 bp, Canis familiaris
tggtaccaccatgtacccaggcatt

SEQ ID NO: 168210 - DNA, 25 bp, Canis familiaris
tgggaaaacatccaaaacggcattt

SEQ ID NO: 168211 - DNA, 25 bp, Canis familiaris
tgggaaatcctttaccactaattct

SEQ ID NO: 168212 - DNA, 25 bp, Canis familiaris
tggtagaatctttgttccaaccttt

SEQ ID NO: 168213 - DNA, 25 bp, Canis familiaris
tgcgggaactggctccaagaacgtt

SEQ ID NO: 168214 - DNA, 25 bp, Canis familiaris
tggggaagtccgttaaggtgagttg

SEQ ID NO: 168215 - DNA, 25 bp, Canis familiaris
ttaggaggtctacaacgggaatatg

SEQ ID NO: 168216 - DNA, 25 bp, Canis familiaris
tggggggcctcactaacggaggaca

SEQ ID NO: 168217 - DNA, 25 bp, Canis familiaris
tgtttgggcctctttgaaggtgaga

SEQ ID NO: 168218 - DNA, 25 bp, Canis familiaris
tgtggtgtggttttcggggtaatgg

SEQ ID NO: 168219 - DNA, 25 bp, Canis familiaris
tggggtgagttccctgggactaacg

SEQ ID NO: 168220 - DNA, 25 bp, Canis familiaris
tgtggggccattgacgttaccaccc

SEQ ID NO: 168221 - DNA, 25 bp, Canis familiaris
tgaaggttaaagcgtatacccctcg

SEQ ID NO: 168222 - DNA, 25 bp, Canis familiaris
tggggtgaaaactgcccattcccca

SEQ ID NO: 168223 - DNA, 25 bp, Canis familiaris
tggggtcaaatacatccctaatcgt

SEQ ID NO: 168224 - DNA, 25 bp, Canis familiaris
tggggatgtaaaaatacctttcctg

SEQ ID NO: 168225 - DNA, 25 bp, Canis familiaris
tgggccacttaaaaccagttactgt

SEQ ID NO: 168226 - DNA, 25 bp, Canis familiaris
tgggaacctccaaactcaattatct

SEQ ID NO: 168227 - DNA, 25 bp, Canis familiaris
tgggaggttccaaaccaattctaag

SEQ ID NO: 168228 - DNA, 25 bp, Canis familiaris
tggggttgtccttatccaagtaata

SEQ ID NO: 168229 - DNA, 25 bp, Canis familiaris
tggtggatttcctattttcctattg

SEQ ID NO: 168230 - DNA, 25 bp, Canis familiaris
tggtagatctctgttcttttccata

SEQ ID NO: 168231 - DNA, 25 bp, Canis familiaris
tggttttagatttctgttttcatac

SEQ ID NO: 168232 - DNA, 25 bp, Canis familiaris
tggttttaatcatctgctggggccc

SEQ ID NO: 168233 - DNA, 25 bp, Canis familiaris
tggtttggagtctgcctgaggttcc

SEQ ID NO: 168234 - DNA, 25 bp, Canis familiaris
tggtttctagacttgtgctgatcgt

SEQ ID NO: 168235 - DNA, 25 bp, Canis familiaris
tggtttgggatagtgtctgacattc

SEQ ID NO: 168236 - DNA, 25 bp, Canis familiaris
tggtttgtgaattgcgacgtctgtg

SEQ ID NO: 168237 - DNA, 25 bp, Canis familiaris
tggtacagtacttgatgacattcct

SEQ ID NO: 168238 - DNA, 25 bp, Canis familiaris
tggtatggaaccctgacagtcctgc

SEQ ID NO: 168239 - DNA, 25 bp, Canis familiaris
tggtgaagacatccgtaagccccag

SEQ ID NO: 168240 - DNA, 25 bp, Canis familiaris
tgtgtccaaatgtgtaatgcaccta

SEQ ID NO: 168241 - DNA, 25 bp, Canis familiaris
tggtcacataatctgcacctgatcc

SEQ ID NO: 168242 - DNA, 25 bp, Canis familiaris
tggtaatatgcatttgcctcctcca

SEQ ID NO: 168243 - DNA, 25 bp, Canis familiaris
tggtgaacattttgcacacccaccc

SEQ ID NO: 168244 - DNA, 25 bp, Canis familiaris
tcgtggatgagtacgaccccaccat

SEQ ID NO: 168245 - DNA, 25 bp, Canis familiaris
tggtgggtgctgtcaaccaccacca

SEQ ID NO: 168246 - DNA, 25 bp, Canis familiaris
tggtccagtggagagcctcaagcca

SEQ ID NO: 168247 - DNA, 25 bp, Canis familiaris
tggtcagagggagtggggctgccca

SEQ ID NO: 168248 - DNA, 25 bp, Canis familiaris
tggtagcagcttctttggcagctcc

SEQ ID NO: 168249 - DNA, 25 bp, Canis familiaris
tggtacagcagttctcttggaatcc

SEQ ID NO: 168250 - DNA, 25 bp, Canis familiaris
tggtgccagcagacacctggaaccc

SEQ ID NO: 168251 - DNA, 25 bp, Canis familiaris
tggtcagagagcaggcaggtccgcc

SEQ ID NO: 168252 - DNA, 25 bp, Canis familiaris
tggtctgaaggcgtgcaggtgccct

SEQ ID NO: 168253 - DNA, 25 bp, Canis familiaris
tggtctgaaggcgtgcaggtgccct

SEQ ID NO: 168254 - DNA, 25 bp, Canis familiaris
tggtctgaatgtttgtgttctcccc

SEQ ID NO: 168255 - DNA, 25 bp, Canis familiaris
tggtcttgcattttttctcctttat

SEQ ID NO: 168256 - DNA, 25 bp, Canis familiaris
tggtttgagctcttatttccgtgca

SEQ ID NO: 168257 - DNA, 25 bp, Canis familiaris
tggtttggtgcattttacctccatt

SEQ ID NO: 168258 - DNA, 25 bp, Canis familiaris
tggtttgtcccttggacacttcttc

SEQ ID NO: 168259 - DNA, 25 bp, Canis familiaris
tggttttcacattgggatagctgtc

SEQ ID NO: 168260 - DNA, 25 bp, Canis familiaris
tgggtctttctataaacgtcggtca

SEQ ID NO: 168261 - DNA, 25 bp, Canis familiaris
tgggtggttcttcaaattttttcat

SEQ ID NO: 168262 - DNA, 25 bp, Canis familiaris
tgggcggctcatttcaaaagttttg

SEQ ID NO: 168263 - DNA, 25 bp, Canis familiaris
tgggcccttttctcagagattattc

SEQ ID NO: 168264 - DNA, 25 bp, Canis familiaris
tgggtcctatttcccgaattggacg

SEQ ID NO: 168265 - DNA, 25 bp, Canis familiaris
tgggtccggttgagcaaggctgggc

SEQ ID NO: 168266 - DNA, 25 bp, Canis familiaris
tggtcctgggttgtccaggggccag

SEQ ID NO: 168267 - DNA, 25 bp, Canis familiaris
tggtgtttggtcgggacaagggaag

SEQ ID NO: 168268 - DNA, 25 bp, Canis familiaris
tgggcccggtcagggagaagacgat

SEQ ID NO: 168269 - DNA, 25 bp, Canis familiaris
tgggcccggggctgaagaagaaagc

SEQ ID NO: 168270 - DNA, 25 bp, Canis familiaris
tggggttgggtctcaggggatggag

SEQ ID NO: 168271 - DNA, 25 bp, Canis familiaris
tgggggtaggtgtagggaatgggag

SEQ ID NO: 168272 - DNA, 25 bp, Canis familiaris
tgggccggttcttcgggaatgtgga

SEQ ID NO: 168273 - DNA, 25 bp, Canis familiaris
tgggaaggtccgtaaggtgacgtga

SEQ ID NO: 168274 - DNA, 25 bp, Canis familiaris
tgagggaggtccacaagcaaacggt

SEQ ID NO: 168275 - DNA, 25 bp, Canis familiaris
tggggactggactaaatgtaacggt

SEQ ID NO: 168276 - DNA, 25 bp, Canis familiaris
tggggccttgaacagagcaccccgt

SEQ ID NO: 168277 - DNA, 25 bp, Canis familiaris
tggtgcccctgatgtaagcgaagcc

SEQ ID NO: 168278 - DNA, 25 bp, Canis familiaris
tgggccttcttgggcaacaaaccct

SEQ ID NO: 168279 - DNA, 25 bp, Canis familiaris
tggtccggttctgaaaggagccctc

SEQ ID NO: 168280 - DNA, 25 bp, Canis familiaris
tggtctcctgtgacttcaacagtga

SEQ ID NO: 168281 - DNA, 25 bp, Canis familiaris
tgggcacctttgttgcaaatggacg

SEQ ID NO: 168282 - DNA, 25 bp, Canis familiaris
tggtcagcgctgattaagttggcac

SEQ ID NO: 168283 - DNA, 25 bp, Canis familiaris
tggtcacgtgggtagagtgcgccag

SEQ ID NO: 168284 - DNA, 25 bp, Canis familiaris
tggtcagcagtgtggacgtgcagtc

SEQ ID NO: 168285 - DNA, 25 bp, Canis familiaris
tggtagcagtgacgcggctggagca

SEQ ID NO: 168286 - DNA, 25 bp, Canis familiaris
tggtctagtgacgaggacgagcccc

SEQ ID NO: 168287 - DNA, 25 bp, Canis familiaris
tggtccagtgcattcagaacaagcc

SEQ ID NO: 168288 - DNA, 25 bp, Canis familiaris
tggtccagcagatgcaaagcccagc

SEQ ID NO: 168289 - DNA, 25 bp, Canis familiaris
tggtcagagcagtgccaggcctgac

SEQ ID NO: 168290 - DNA, 25 bp, Canis familiaris
tggtaaagtgccaagcctctcacag

SEQ ID NO: 168291 - DNA, 25 bp, Canis familiaris
tggtatatactggtgagacttctca

SEQ ID NO: 168292 - DNA, 25 bp, Canis familiaris
tggtctgtactctatggatttgcat

SEQ ID NO: 168293 - DNA, 25 bp, Canis familiaris
tggtgcctagctccatggaagtcac

SEQ ID NO: 168294 - DNA, 25 bp, Canis familiaris
tggtcgtgcactcgggagtgtcctc

SEQ ID NO: 168295 - DNA, 25 bp, Canis familiaris
tggtcccaatcgatggttctcacac

SEQ ID NO: 168296 - DNA, 25 bp, Canis familiaris
tggtctgctctgtgaatggtttcta

SEQ ID NO: 168297 - DNA, 25 bp, Canis familiaris
tggtcgctcgtggtttgttgatatc

SEQ ID NO: 168298 - DNA, 25 bp, Canis familiaris
tgtgtagtcgagcctttttgtaccc

SEQ ID NO: 168299 - DNA, 25 bp, Canis familiaris
tggggtctagctgtttttgattccc

SEQ ID NO: 168300 - DNA, 25 bp, Canis familiaris
tgaggttttgctctttttaccagct

SEQ ID NO: 168301 - DNA, 25 bp, Canis familiaris
tgggttgtaccctatttgtccaact

SEQ ID NO: 168302 - DNA, 25 bp, Canis familiaris
tgggcaagtgacctgatttttccga

SEQ ID NO: 168303 - DNA, 25 bp, Canis familiaris
tgaccgaagagacattttgggcaat

SEQ ID NO: 168304 - DNA, 25 bp, Canis familiaris
tggtctcagcagcacgttttgggaa

SEQ ID NO: 168305 - DNA, 25 bp, Canis familiaris
tggtcccatgtctattactttggat

SEQ ID NO: 168306 - DNA, 25 bp, Canis familiaris
tggtacacctctttacgtatatgat

SEQ ID NO: 168307 - DNA, 25 bp, Canis familiaris
tggtacacctctttacgtatatgat

SEQ ID NO: 168308 - DNA, 25 bp, Canis familiaris
tggtacatcacactttcaaatcatc

SEQ ID NO: 168309 - DNA, 25 bp, Canis familiaris
tggtacacacaaatccatccacact

SEQ ID NO: 168310 - DNA, 25 bp, Canis familiaris
tggtgagcacagcaagctctccttt

SEQ ID NO: 168311 - DNA, 25 bp, Canis familiaris
tggtgaaagaaacctgcctccaccc

SEQ ID NO: 168312 - DNA, 25 bp, Canis familiaris
tggggccaaagcccggatccaaact

SEQ ID NO: 168313 - DNA, 25 bp, Canis familiaris
tggtggtaaatcctagagctaataa

SEQ ID NO: 168314 - DNA, 25 bp, Canis familiaris
tgtgagaaaaagttgcgagcttaaa

SEQ ID NO: 168315 - DNA, 25 bp, Canis familiaris
tgtgctagaagaattaagccttaca

SEQ ID NO: 168316 - DNA, 25 bp, Canis familiaris
tggtgaagaagcatgaggccaagaa

SEQ ID NO: 168317 - DNA, 25 bp, Canis familiaris
tggtgaaggtcgtggcgcagcacca

SEQ ID NO: 168318 - DNA, 25 bp, Canis familiaris
tggtagaagctccacagagccaccc

SEQ ID NO: 168319 - DNA, 25 bp, Canis familiaris
tggtaaggtctttgatctcacccgg

SEQ ID NO: 168320 - DNA, 25 bp, Canis familiaris
tggtaacacctttgatctccaacct

SEQ ID NO: 168321 - DNA, 25 bp, Canis familiaris
tggtgcaaacctggagtcttcctgc

SEQ ID NO: 168322 - DNA, 25 bp, Canis familiaris
tggtaacacagtcagcttagggcta

SEQ ID NO: 168323 - DNA, 25 bp, Canis familiaris
tggtgaaccaggtgtttgggcaaga

SEQ ID NO: 168324 - DNA, 25 bp, Canis familiaris
tggtgaaaccactgattattagaaa

SEQ ID NO: 168325 - DNA, 25 bp, Canis familiaris
tgctggaagaaccctttaataaaat

SEQ ID NO: 168326 - DNA, 25 bp, Canis familiaris
tggtaatgcaaccctggtgtctaaa

SEQ ID NO: 168327 - DNA, 25 bp, Canis familiaris
tggtaatgccagctctgctgactca

SEQ ID NO: 168328 - DNA, 25 bp, Canis familiaris
acccagctccacctgatggtgagag

SEQ ID NO: 168329 - DNA, 25 bp, Canis familiaris
tggtcatcagtatcatccaggccgt

SEQ ID NO: 168330 - DNA, 25 bp, Canis familiaris
tggtcaaggacacccaggccatgaa

SEQ ID NO: 168331 - DNA, 25 bp, Canis familiaris
tggtagagacccgggagctgcagaa

SEQ ID NO: 168332 - DNA, 25 bp, Canis familiaris
tggtgagatggctcagtgggtaaga

SEQ ID NO: 168333 - DNA, 25 bp, Canis familiaris
tggtggtgaccgcgacagtgaagtc

SEQ ID NO: 168334 - DNA, 25 bp, Canis familiaris
tgggggaccgcagaatgtctaccag

SEQ ID NO: 168335 - DNA, 25 bp, Canis familiaris
tggtgggacccagagtagcactcac

SEQ ID NO: 168336 - DNA, 25 bp, Canis familiaris
tggtgggcgtctacaacggcaagac

SEQ ID NO: 168337 - DNA, 25 bp, Canis familiaris
tggggggtggatcaaccacaaccct

SEQ ID NO: 168338 - DNA, 25 bp, Canis familiaris
tgggttgtgggagaccccactgtcc

SEQ ID NO: 168339 - DNA, 25 bp, Canis familiaris
tggtgttggggagatcctcgtcacc

SEQ ID NO: 168340 - DNA, 25 bp, Canis familiaris
tggtgttgggaaaagcgcactgaca

SEQ ID NO: 168341 - DNA, 25 bp, Canis familiaris
tgttctcttgggaaacagcaaggac

SEQ ID NO: 168342 - DNA, 25 bp, Canis familiaris
tggtcctctggggcaacgaaagctt

SEQ ID NO: 168343 - DNA, 25 bp, Canis familiaris
tggtacctggtgggtctggtgagct

SEQ ID NO: 168344 - DNA, 25 bp, Canis familiaris
tggtatcgtcggcgttgagtggtcc

SEQ ID NO: 168345 - DNA, 25 bp, Canis familiaris
tggtctctgtccctttaaaggtcct

SEQ ID NO: 168346 - DNA, 25 bp, Canis familiaris
tggtctccctattttaaagttcagc

SEQ ID NO: 168347 - DNA, 25 bp, Canis familiaris
tggtcatcccaatttattttttcct

SEQ ID NO: 168348 - DNA, 25 bp, Canis familiaris
tggtcattccagtgttttgctttct

SEQ ID NO: 168349 - DNA, 25 bp, Canis familiaris
tggtaacctgttttcatttgtaatg

SEQ ID NO: 168350 - DNA, 25 bp, Canis familiaris
tgggaacctgttccagttaagaagg

SEQ ID NO: 168351 - DNA, 25 bp, Canis familiaris
tgggcttccagttgccttaatagaa

SEQ ID NO: 168352 - DNA, 25 bp, Canis familiaris
tggtgcttccgatttcccagaagac

SEQ ID NO: 168353 - DNA, 25 bp, Canis familiaris
tggtgcgctgccagttacaggacaa

SEQ ID NO: 168354 - DNA, 25 bp, Canis familiaris
tgtctggtgtttgtcatggtgaaat

SEQ ID NO: 168355 - DNA, 25 bp, Canis familiaris
tgtctggcttttcttggtgaaaaaa

SEQ ID NO: 168356 - DNA, 25 bp, Canis familiaris
tggtggttgttggttgttggataaa

SEQ ID NO: 168357 - DNA, 25 bp, Canis familiaris
tggtcttctggtctccttggagaaa

SEQ ID NO: 168358 - DNA, 25 bp, Canis familiaris
tggtctaatagggtccatctggaga

SEQ ID NO: 168359 - DNA, 25 bp, Canis familiaris
tgtgtcgaattgtccgccacaatgg

SEQ ID NO: 168360 - DNA, 25 bp, Canis familiaris
tggtgcaacttgtcagcagccattt

SEQ ID NO: 168361 - DNA, 25 bp, Canis familiaris
tggtgccaatcaccatcaccagtta

SEQ ID NO: 168362 - DNA, 25 bp, Canis familiaris
tggtgccaggcatggatcctgtcca

SEQ ID NO: 168363 - DNA, 25 bp, Canis familiaris
tggtgctcagtggggactcttggag

SEQ ID NO: 168364 - DNA, 25 bp, Canis familiaris
tggtcgggcagccgcacactatgag

SEQ ID NO: 168365 - DNA, 25 bp, Canis familiaris
tggtggaggatcctcagccaaggtg

SEQ ID NO: 168366 - DNA, 25 bp, Canis familiaris
tggggacccaatggccaatgtggct

SEQ ID NO: 168367 - DNA, 25 bp, Canis familiaris
tggtggacctcatggcccacatggc

SEQ ID NO: 168368 - DNA, 25 bp, Canis familiaris
tggtggacctcatggcctacatggc

SEQ ID NO: 168369 - DNA, 25 bp, Canis familiaris
tggggcaccattgtgccttcagtgc

SEQ ID NO: 168370 - DNA, 25 bp, Canis familiaris
tggggaccaatctatattatactgt

SEQ ID NO: 168371 - DNA, 25 bp, Canis familiaris
tggggacccacaagtattgcccttt

SEQ ID NO: 168372 - DNA, 25 bp, Canis familiaris
tgggtaccaccttgcaatgtcccaa

SEQ ID NO: 168373 - DNA, 25 bp, Canis familiaris
tgggacaggaccgaattggcccaaa

SEQ ID NO: 168374 - DNA, 25 bp, Canis familiaris
tggtgtcggaactagtcgagaccca

SEQ ID NO: 168375 - DNA, 25 bp, Canis familiaris
tggtgctcggaacttgctcaaatct

SEQ ID NO: 168376 - DNA, 25 bp, Canis familiaris
tggtcctgcgtgactattcagattc

SEQ ID NO: 168377 - DNA, 25 bp, Canis familiaris
tggtcccgaacgactcggtctatta

SEQ ID NO: 168378 - DNA, 25 bp, Canis familiaris
tggtcctggagaccctgggttgagt

SEQ ID NO: 168379 - DNA, 25 bp, Canis familiaris
tggtcgggaggttgcgggtggagaa

SEQ ID NO: 168380 - DNA, 25 bp, Canis familiaris
tgggcaggggggtcggaatgtggag

SEQ ID NO: 168381 - DNA, 25 bp, Canis familiaris
tgggccggaggctgcaggaaggaag

SEQ ID NO: 168382 - DNA, 25 bp, Canis familiaris
tggggaagggcatggagaaggacaa

SEQ ID NO: 168383 - DNA, 25 bp, Canis familiaris
tccagaaaggaggggggaggactga

SEQ ID NO: 168384 - DNA, 25 bp, Canis familiaris
tgaatcaagggggggggtgccctgg

SEQ ID NO: 168385 - DNA, 25 bp, Canis familiaris
tggtaagccggtagcgtggtggcct

SEQ ID NO: 168386 - DNA, 25 bp, Canis familiaris
tggtaagccggtagcgtggtggcct

SEQ ID NO: 168387 - DNA, 25 bp, Canis familiaris
tggtcagggtggagctgggatgtcc

SEQ ID NO: 168388 - DNA, 25 bp, Canis familiaris
tggtcctcttccatgtggaggctgc

SEQ ID NO: 168389 - DNA, 25 bp, Canis familiaris
tggggccttccctggatgaggccaa

SEQ ID NO: 168390 - DNA, 25 bp, Canis familiaris
tgggccagttccacggtgggaagca

SEQ ID NO: 168391 - DNA, 25 bp, Canis familiaris
tggtcaatggtccggggtggcaaac

SEQ ID NO: 168392 - DNA, 25 bp, Canis familiaris
tggtgaagggctccgtttggcaaca

SEQ ID NO: 168393 - DNA, 25 bp, Canis familiaris
tggtgaagcggcctaatcctgacat

SEQ ID NO: 168394 - DNA, 25 bp, Canis familiaris
tggtgatgacggctccacttattat

SEQ ID NO: 168395 - DNA, 25 bp, Canis familiaris
tggtgtggcttgagtacttgctact

SEQ ID NO: 168396 - DNA, 25 bp, Canis familiaris
tggtgtcagactattaccctacctg

SEQ ID NO: 168397 - DNA, 25 bp, Canis familiaris
tggtgttcctttaggccagtactct

SEQ ID NO: 168398 - DNA, 25 bp, Canis familiaris
tggtggctctttaatggccttctcc

SEQ ID NO: 168399 - DNA, 25 bp, Canis familiaris
tggtgtggtttttagtcttgcagcc

SEQ ID NO: 168400 - DNA, 25 bp, Canis familiaris
tggtcggttgcattgctttgttggc

SEQ ID NO: 168401 - DNA, 25 bp, Canis familiaris
tggtgcatggccgttcttagttggt

SEQ ID NO: 168402 - DNA, 25 bp, Canis familiaris
tggtgatcctcgtttgggtgatggt

SEQ ID NO: 168403 - DNA, 25 bp, Canis familiaris
tggtggcttcagagtgtgggtgagt

SEQ ID NO: 168404 - DNA, 25 bp, Canis familiaris
tggtgccttcctggagggaaggatg

SEQ ID NO: 168405 - DNA, 25 bp, Canis familiaris
tggtgctttccagaataaaggttgt

SEQ ID NO: 168406 - DNA, 25 bp, Canis familiaris
tgggctcttcaaataacggtgggtt

SEQ ID NO: 168407 - DNA, 25 bp, Canis familiaris
tgtggtctacaaaaatgttgtttgt

SEQ ID NO: 168408 - DNA, 25 bp, Canis familiaris
tggtgtggaatctcagtgtatgttt

SEQ ID NO: 168409 - DNA, 25 bp, Canis familiaris
tggggctgctattttgtgttgttat

SEQ ID NO: 168410 - DNA, 25 bp, Canis familiaris
tgggcgctaagcctttttttaagat

SEQ ID NO: 168411 - DNA, 25 bp, Canis familiaris
tgggacatacctgctttttttagac

SEQ ID NO: 168412 - DNA, 25 bp, Canis familiaris
tgggaaaaatttgttctgcttaaca

SEQ ID NO: 168413 - DNA, 25 bp, Canis familiaris
tgggaccaaaagctgtttcttaaca

SEQ ID NO: 168414 - DNA, 25 bp, Canis familiaris
tgggtccaaaacattcttatcacta

SEQ ID NO: 168415 - DNA, 25 bp, Canis familiaris
tgggacccaaaagttttcacagctt

SEQ ID NO: 168416 - DNA, 25 bp, Canis familiaris
tgggacccaatttgatcatcctcaa

SEQ ID NO: 168417 - DNA, 25 bp, Canis familiaris
tgggagtcctattcatactagcaat

SEQ ID NO: 168418 - DNA, 25 bp, Canis familiaris
tgggattccatatttcctaggaaaa

SEQ ID NO: 168419 - DNA, 25 bp, Canis familiaris
tggtgttaatttcccatcgcacaaa

SEQ ID NO: 168420 - DNA, 25 bp, Canis familiaris
tggtgaatgtttcgtcaatcccaac

SEQ ID NO: 168421 - DNA, 25 bp, Canis familiaris
tggtaattcatctttccatcttccc

SEQ ID NO: 168422 - DNA, 25 bp, Canis familiaris
tggtcatgaacaatttcctctccag

SEQ ID NO: 168423 - DNA, 25 bp, Canis familiaris
tggtgctagattattgctcgcccag

SEQ ID NO: 168424 - DNA, 25 bp, Canis familiaris
tggtgctaatgtactttcactttaa

SEQ ID NO: 168425 - DNA, 25 bp, Canis familiaris
tggtgctctattctgttgttttcga

SEQ ID NO: 168426 - DNA, 25 bp, Canis familiaris
tggtgcttagtccagttctgtttcc

SEQ ID NO: 168427 - DNA, 25 bp, Canis familiaris
tgagttcaagtcccacttgtgctcc

SEQ ID NO: 168428 - DNA, 25 bp, Canis familiaris
tggtaatgagtcctgatgggtcccc

SEQ ID NO: 168429 - DNA, 25 bp, Canis familiaris
tggtgaatgttcctaaaacccgccg

SEQ ID NO: 168430 - DNA, 25 bp, Canis familiaris
tggtgatgtgttctacctacactcc

SEQ ID NO: 168431 - DNA, 25 bp, Canis familiaris
tggtaatgattagctcacgacgtgg

SEQ ID NO: 168432 - DNA, 25 bp, Canis familiaris
tgggaacttaactgccaagtggatc

SEQ ID NO: 168433 - DNA, 25 bp, Canis familiaris
tgggaactaccactccaaactataa

SEQ ID NO: 168434 - DNA, 25 bp, Canis familiaris
tgggattcccccggaatgaataaca

SEQ ID NO: 168435 - DNA, 25 bp, Canis familiaris
tgggatatcccagcctcattaaagg

SEQ ID NO: 168436 - DNA, 25 bp, Canis familiaris
tggggagcccaggtgatgttgagcc

SEQ ID NO: 168437 - DNA, 25 bp, Canis familiaris
tggggcaggtcagttcatttgctcc

SEQ ID NO: 168438 - DNA, 25 bp, Canis familiaris
tgggaaggtggctgctgcatttcac

SEQ ID NO: 168439 - DNA, 25 bp, Canis familiaris
tggggaaggactgggtcctgtcctc

SEQ ID NO: 168440 - DNA, 25 bp, Canis familiaris
tgggggaagaattgtccctgccccg

SEQ ID NO: 168441 - DNA, 25 bp, Canis familiaris
tggtggtgaagacggtgccagtccc

SEQ ID NO: 168442 - DNA, 25 bp, Canis familiaris
tggtggagaagcggctggcagcctg

SEQ ID NO: 168443 - DNA, 25 bp, Canis familiaris
tggtgctaggaggcagaggccctgc

SEQ ID NO: 168444 - DNA, 25 bp, Canis familiaris
tggtctacataccaaggcagcccag

SEQ ID NO: 168445 - DNA, 25 bp, Canis familiaris
tggtctggaaccaggcaccgagtac

SEQ ID NO: 168446 - DNA, 25 bp, Canis familiaris
tgtgtctgttaccggtccggaattc

SEQ ID NO: 168447 - DNA, 25 bp, Canis familiaris
tggtggttggtgcagtcctagtttt

SEQ ID NO: 168448 - DNA, 25 bp, Canis familiaris
tggtgacctggtgactcgccaggtg

SEQ ID NO: 168449 - DNA, 25 bp, Canis familiaris
tggtgaccaaggctgtggccacgtc

SEQ ID NO: 168450 - DNA, 25 bp, Canis familiaris
tggtgtgacaagaatggtggtaccc

SEQ ID NO: 168451 - DNA, 25 bp, Canis familiaris
tggtgctccaccaggtggtcagccc

SEQ ID NO: 168452 - DNA, 25 bp, Canis familiaris
tggtccactctgagtgaggccaccg

SEQ ID NO: 168453 - DNA, 25 bp, Canis familiaris
tggtctggctgtatgaggaccccca

SEQ ID NO: 168454 - DNA, 25 bp, Canis familiaris
tggtcaggtgctctgactgcagcca

SEQ ID NO: 168455 - DNA, 25 bp, Canis familiaris
tggtcaggctggatgccatgttccg

SEQ ID NO: 168456 - DNA, 25 bp, Canis familiaris
tggtgacacggggcacagttggccc

SEQ ID NO: 168457 - DNA, 25 bp, Canis familiaris
tggtgaacctggtcaaactggtcca

SEQ ID NO: 168458 - DNA, 25 bp, Canis familiaris
tggtgtacctggttccagttttaat

SEQ ID NO: 168459 - DNA, 25 bp, Canis familiaris
tgggtcaacttaaccaaggtttatg

SEQ ID NO: 168460 - DNA, 25 bp, Canis familiaris
tggggaacatttgccacgggctaca

SEQ ID NO: 168461 - DNA, 25 bp, Canis familiaris
tggggaaattttgggaggtcatcta

SEQ ID NO: 168462 - DNA, 25 bp, Canis familiaris
tggggaacgtccaggagctgtctga

SEQ ID NO: 168463 - DNA, 25 bp, Canis familiaris
tggggacagagttcataggctggtc

SEQ ID NO: 168464 - DNA, 25 bp, Canis familiaris
tggggcacgatggactgaggtctct

SEQ ID NO: 168465 - DNA, 25 bp, Canis familiaris
tgggtcgtcaagatggagtcctgca

SEQ ID NO: 168466 - DNA, 25 bp, Canis familiaris
tgggtcagccaacgccaggtaaaga

SEQ ID NO: 168467 - DNA, 25 bp, Canis familiaris
tgggttcccgccaggcttgaagaaa

SEQ ID NO: 168468 - DNA, 25 bp, Canis familiaris
tggtggaccgggacggcttgtacaa

SEQ ID NO: 168469 - DNA, 25 bp, Canis familiaris
tggtggtcctagtcaacgattgtaa

SEQ ID NO: 168470 - DNA, 25 bp, Canis familiaris
tggggccctaactattttgtgcaat

SEQ ID NO: 168471 - DNA, 25 bp, Canis familiaris
tgtggggtccaacattcttgaagtt

SEQ ID NO: 168472 - DNA, 25 bp, Canis familiaris
tgtgggggccaatataagggatttt

SEQ ID NO: 168473 - DNA, 25 bp, Canis familiaris
tggggggctaaggtagacgaccgct

SEQ ID NO: 168474 - DNA, 25 bp, Canis familiaris
tgggaggactttgcaagtcccccaa

SEQ ID NO: 168475 - DNA, 25 bp, Canis familiaris
tggggtgacggagcaacatccccgg

SEQ ID NO: 168476 - DNA, 25 bp, Canis familiaris
tggggtatagtagcatttatctccc

SEQ ID NO: 168477 - DNA, 25 bp, Canis familiaris
tggggacatccgagctgattttcag

SEQ ID NO: 168478 - DNA, 25 bp, Canis familiaris
tggggtgtccagagtgactgcttat

SEQ ID NO: 168479 - DNA, 25 bp, Canis familiaris
tggggcgcttcgagctaagcggcat

SEQ ID NO: 168480 - DNA, 25 bp, Canis familiaris
tggggccgtctgtgactcagagaga

SEQ ID NO: 168481 - DNA, 25 bp, Canis familiaris
tggtggcctggtggggcaccagacc

SEQ ID NO: 168482 - DNA, 25 bp, Canis familiaris
tggtgtggggtggggacctgacagc

SEQ ID NO: 168483 - DNA, 25 bp, Canis familiaris
tggtgaagccgggaatgccctacct

SEQ ID NO: 168484 - DNA, 25 bp, Canis familiaris
tgggaatactcagaactcctcagtc

SEQ ID NO: 168485 - DNA, 25 bp, Canis familiaris
tggtcttacatcaaagcctttaatc

SEQ ID NO: 168486 - DNA, 25 bp, Canis familiaris
tggtgttaacattcctctcattagt

SEQ ID NO: 168487 - DNA, 25 bp, Canis familiaris
tgccgttaggctgttctttgaggta

SEQ ID NO: 168488 - DNA, 25 bp, Canis familiaris
tggtgttcaggcgtttcgtggaggt

SEQ ID NO: 168489 - DNA, 25 bp, Canis familiaris
tggtgcttctagactttgcagggaa

SEQ ID NO: 168490 - DNA, 25 bp, Canis familiaris
tgggatttaggatttgaaggtagca

SEQ ID NO: 168491 - DNA, 25 bp, Canis familiaris
tgggagcctaaatttgaaaagcaca

SEQ ID NO: 168492 - DNA, 25 bp, Canis familiaris
tggtggccgacgaactcaacaagaa

SEQ ID NO: 168493 - DNA, 25 bp, Canis familiaris
tgggcccttctcaactaaatcaagg

SEQ ID NO: 168494 - DNA, 25 bp, Canis familiaris
tgggcttgcagcttctactagaaaa

SEQ ID NO: 168495 - DNA, 25 bp, Canis familiaris
tggggccacattttccatctaatac

SEQ ID NO: 168496 - DNA, 25 bp, Canis familiaris
tgaggggctactctatcccaaagcc

SEQ ID NO: 168497 - DNA, 25 bp, Canis familiaris
tgggagggacatccatttccagggt

SEQ ID NO: 168498 - DNA, 25 bp, Canis familiaris
tggtggaggccacagtgaccgaggc

SEQ ID NO: 168499 - DNA, 25 bp, Canis familiaris
tggtggtaccaccatgtacccaggc

SEQ ID NO: 168500 - DNA, 25 bp, Canis familiaris
tggtggtacgccttgtgcacaaaac

SEQ ID NO: 168501 - DNA, 25 bp, Canis familiaris
tggggctaaccatgtatcgtccaca

SEQ ID NO: 168502 - DNA, 25 bp, Canis familiaris
tggggaccctaagatcaagccctgc

SEQ ID NO: 168503 - DNA, 25 bp, Canis familiaris
tgggaaccactgtgaccatgacggg

SEQ ID NO: 168504 - DNA, 25 bp, Canis familiaris
tggggaccagtgtccccacgagtgg

SEQ ID NO: 168505 - DNA, 25 bp, Canis familiaris
tggggatccaatatgaccccagcat

SEQ ID NO: 168506 - DNA, 25 bp, Canis familiaris
tggggcatccagaagaaccggccag

SEQ ID NO: 168507 - DNA, 25 bp, Canis familiaris
tggggctgggtgcataccaagcctc

SEQ ID NO: 168508 - DNA, 25 bp, Canis familiaris
tggggggatgggattgcaacgtgca

SEQ ID NO: 168509 - DNA, 25 bp, Canis familiaris
tgggggacggagattggagcttttt

SEQ ID NO: 168510 - DNA, 25 bp, Canis familiaris
tggggtggggaggtgagggatttca

SEQ ID NO: 168511 - DNA, 25 bp, Canis familiaris
tggggtggggactgatgggccctaa

SEQ ID NO: 168512 - DNA, 25 bp, Canis familiaris
tggggctgggtctgtaggtgcccta

SEQ ID NO: 168513 - DNA, 25 bp, Canis familiaris
tgggtgcatggggccgtagtatgga

SEQ ID NO: 168514 - DNA, 25 bp, Canis familiaris
tgggacttgagcacgtaataggtat

SEQ ID NO: 168515 - DNA, 25 bp, Canis familiaris
tgggactggtcggggaaaggcttca

SEQ ID NO: 168516 - DNA, 25 bp, Canis familiaris
tgaggattttgggggccacctttca

SEQ ID NO: 168517 - DNA, 25 bp, Canis familiaris
tgtggtcatttgtggtcaacctggt

SEQ ID NO: 168518 - DNA, 25 bp, Canis familiaris
tgggtcttttggcacagagcctggc

SEQ ID NO: 168519 - DNA, 25 bp, Canis familiaris
tgtattctgtttcactaatcctggg

SEQ ID NO: 168520 - DNA, 25 bp, Canis familiaris
tgttactctccatgactaactgtgt

SEQ ID NO: 168521 - DNA, 25 bp, Canis familiaris
tgtttttccccagtaacttgtctga

SEQ ID NO: 168522 - DNA, 25 bp, Canis familiaris
tgggttttcccactaatatgtactt

SEQ ID NO: 168523 - DNA, 25 bp, Canis familiaris
tggtgtcttttcctctgaatatctt

SEQ ID NO: 168524 - DNA, 25 bp, Canis familiaris
tggtctttcctggcatagaactctc

SEQ ID NO: 168525 - DNA, 25 bp, Canis familiaris
tggtctcatcccgaagagaacctcc

SEQ ID NO: 168526 - DNA, 25 bp, Canis familiaris
tggtgccactctgcatagggatgcc

SEQ ID NO: 168527 - DNA, 25 bp, Canis familiaris
tggggcagccagttcatggggcccc

SEQ ID NO: 168528 - DNA, 25 bp, Canis familiaris
tggggcagccaccgaggcggtggtc

SEQ ID NO: 168529 - DNA, 25 bp, Canis familiaris
tggtgagcggcgcggaggatgggtc

SEQ ID NO: 168530 - DNA, 25 bp, Canis familiaris
tgggtgcggctcatggagtaacgtg

SEQ ID NO: 168531 - DNA, 25 bp, Canis familiaris
tggtgtcagatggtaacagcttact

SEQ ID NO: 168532 - DNA, 25 bp, Canis familiaris
tggtgtcatggaaatgtacattatt

SEQ ID NO: 168533 - DNA, 25 bp, Canis familiaris
tgatgtcctagaaatggaatttgac

SEQ ID NO: 168534 - DNA, 25 bp, Canis familiaris
tgtgtcctagattaccatgattgag

SEQ ID NO: 168535 - DNA, 25 bp, Canis familiaris
tggtcctcaagagccatctcaggag

SEQ ID NO: 168536 - DNA, 25 bp, Canis familiaris
tgggcctaacaggtcagcctggggt

SEQ ID NO: 168537 - DNA, 25 bp, Canis familiaris
tgaggataaactagtcccttagggt

SEQ ID NO: 168538 - DNA, 25 bp, Canis familiaris
tgggagaaagccattctcccggggc

SEQ ID NO: 168539 - DNA, 25 bp, Canis familiaris
tggggaaatccagacccaagtggag

SEQ ID NO: 168540 - DNA, 25 bp, Canis familiaris
tggggaaaaggcccccagggcacag

SEQ ID NO: 168541 - DNA, 25 bp, Canis familiaris
tgggaggaaaagggggcgggagctg

SEQ ID NO: 168542 - DNA, 25 bp, Canis familiaris
tggtgtggaaaagggaggtatggaa

SEQ ID NO: 168543 - DNA, 25 bp, Canis familiaris
tggtcgggacaagggaagaggtgat

SEQ ID NO: 168544 - DNA, 25 bp, Canis familiaris
tggtgcgtaaagccggggaggtcta

SEQ ID NO: 168545 - DNA, 25 bp, Canis familiaris
tgacatggttaataagggcaggact

SEQ ID NO: 168546 - DNA, 25 bp, Canis familiaris
tgagattttaaacaggggaccattg

SEQ ID NO: 168547 - DNA, 25 bp, Canis familiaris
tgttgtttaacctgaaagcctattt

SEQ ID NO: 168548 - DNA, 25 bp, Canis familiaris
tgtctggttagcacgtgaagggtca

SEQ ID NO: 168549 - DNA, 25 bp, Canis familiaris
tgtgagggtgactacgggggcccac

SEQ ID NO: 168550 - DNA, 25 bp, Canis familiaris
tgggaggtaaacgggtatgactgta

SEQ ID NO: 168551 - DNA, 25 bp, Canis familiaris
tggggatgggaatgggtacacagga

SEQ ID NO: 168552 - DNA, 25 bp, Canis familiaris
tgtgcggaaaaattaccattccgga

SEQ ID NO: 168553 - DNA, 25 bp, Canis familiaris
tggggaaaataaacactaactgctg

SEQ ID NO: 168554 - DNA, 25 bp, Canis familiaris
tggggagaattccgtcctaatctat

SEQ ID NO: 168555 - DNA, 25 bp, Canis familiaris
tggtgggacacccgatttggtccaa

SEQ ID NO: 168556 - DNA, 25 bp, Canis familiaris
tggtggaggcactcagggtttcaca

SEQ ID NO: 168557 - DNA, 25 bp, Canis familiaris
tggtggcaggttgatggtgtgtgtc

SEQ ID NO: 168558 - DNA, 25 bp, Canis familiaris
tggtggcagtgctggtgtccaggac

SEQ ID NO: 168559 - DNA, 25 bp, Canis familiaris
tgtgtgcgttcatggggctaggacc

SEQ ID NO: 168560 - DNA, 25 bp, Canis familiaris
tggtgagtctgcagtaccttgacgc

SEQ ID NO: 168561 - DNA, 25 bp, Canis familiaris
tggtgggcgttttccttaggattgc

SEQ ID NO: 168562 - DNA, 25 bp, Canis familiaris
tggtgcggtcttatctggtcggacc

SEQ ID NO: 168563 - DNA, 25 bp, Canis familiaris
tgggcaggttaatccctgggaactt

SEQ ID NO: 168564 - DNA, 25 bp, Canis familiaris
tgggggttgaaatggtggtattctt

SEQ ID NO: 168565 - DNA, 25 bp, Canis familiaris
tggggtttctaaaggcgcgtgtaca

SEQ ID NO: 168566 - DNA, 25 bp, Canis familiaris
tgggggttgtaaattggcatggaaa

SEQ ID NO: 168567 - DNA, 25 bp, Canis familiaris
tggtgggatgtggcagagcttgtca

SEQ ID NO: 168568 - DNA, 25 bp, Canis familiaris
tggtgggtgggcactgctgattgcc

SEQ ID NO: 168569 - DNA, 25 bp, Canis familiaris
tggtgggttgtgaatgcgctgactt

SEQ ID NO: 168570 - DNA, 25 bp, Canis familiaris
tggggcgtatggacacgtactttga

SEQ ID NO: 168571 - DNA, 25 bp, Canis familiaris
tgtgggggttaaggtagtcctatga

SEQ ID NO: 168572 - DNA, 25 bp, Canis familiaris
tgtagagtttctaaggtagtccttg

SEQ ID NO: 168573 - DNA, 25 bp, Canis familiaris
tcgggtttttgaagttagccttgct

SEQ ID NO: 168574 - DNA, 25 bp, Canis familiaris
tggggtactttgttttcccatctgt

SEQ ID NO: 168575 - DNA, 25 bp, Canis familiaris
tggggaaatttgacttttgactttg

SEQ ID NO: 168576 - DNA, 25 bp, Canis familiaris
tggggaggatttgtctttcttgtct

SEQ ID NO: 168577 - DNA, 25 bp, Canis familiaris
tgggggagatctataccccgagtac

SEQ ID NO: 168578 - DNA, 25 bp, Canis familiaris
tgtggggggtgtcacccccgtagtg

SEQ ID NO: 168579 - DNA, 25 bp, Canis familiaris
tgtgggggtggggggccccacaatg

SEQ ID NO: 168580 - DNA, 25 bp, Canis familiaris
tggggaggtgtaacggtctccacca

SEQ ID NO: 168581 - DNA, 25 bp, Canis familiaris
tgggggagagacacggacaccacac

SEQ ID NO: 168582 - DNA, 25 bp, Canis familiaris
tggtgtgtgggagtggggagcaaac

SEQ ID NO: 168583 - DNA, 25 bp, Canis familiaris
tggtggtgggactctgagaatacag

SEQ ID NO: 168584 - DNA, 25 bp, Canis familiaris
tgtgctgggggattttagacttgag

SEQ ID NO: 168585 - DNA, 25 bp, Canis familiaris
tgaggggttagttacagagttgagt

SEQ ID NO: 168586 - DNA, 25 bp, Canis familiaris
tggtgtggccttctacagaggtgca

SEQ ID NO: 168587 - DNA, 25 bp, Canis familiaris
tgggggcctcatctgacagtagaaa

SEQ ID NO: 168588 - DNA, 25 bp, Canis familiaris
tggggcggtgaactgactctcagaa

SEQ ID NO: 168589 - DNA, 25 bp, Canis familiaris
tggtgctgaggtgtgtgacacacag

SEQ ID NO: 168590 - DNA, 25 bp, Canis familiaris
tggtctggcctccgagagccaggat

SEQ ID NO: 168591 - DNA, 25 bp, Canis familiaris
tggtgttgcgtctggaggatggtcc

SEQ ID NO: 168592 - DNA, 25 bp, Canis familiaris
tggtgtaccagctggatggggttcc

SEQ ID NO: 168593 - DNA, 25 bp, Canis familiaris
tgcgtgaaccggtggtgggttccca

SEQ ID NO: 168594 - DNA, 25 bp, Canis familiaris
tggtgaacacggtggtggccaaccc

SEQ ID NO: 168595 - DNA, 25 bp, Canis familiaris
tggtgaagcactgtgggcaaccggc

SEQ ID NO: 168596 - DNA, 25 bp, Canis familiaris
tgggagagcttaaagccccacggag

SEQ ID NO: 168597 - DNA, 25 bp, Canis familiaris
tgcggaagcctgaggaccgggtgga

SEQ ID NO: 168598 - DNA, 25 bp, Canis familiaris
tgggacccctggtagagcaggaggg

SEQ ID NO: 168599 - DNA, 25 bp, Canis familiaris
tggtgaagtcctggcaagaagctgg

SEQ ID NO: 168600 - DNA, 25 bp, Canis familiaris
tggtgtctgaccccagcagacagag

SEQ ID NO: 168601 - DNA, 25 bp, Canis familiaris
tggtgcacatacgactacacacaca

SEQ ID NO: 168602 - DNA, 25 bp, Canis familiaris
tggtgagcaactggtctgcactggc

SEQ ID NO: 168603 - DNA, 25 bp, Canis familiaris
tggtggcaacgcaagctggtgcagc

SEQ ID NO: 168604 - DNA, 25 bp, Canis familiaris
tggtgccatcaagtacattggtgaa

SEQ ID NO: 168605 - DNA, 25 bp, Canis familiaris
tggtggcaatagatctcttgtgaga

SEQ ID NO: 168606 - DNA, 25 bp, Canis familiaris
tggtgacaaaccccaatgtacagaa

SEQ ID NO: 168607 - DNA, 25 bp, Canis familiaris
tgggaaataacaggcaatggctcag

SEQ ID NO: 168608 - DNA, 25 bp, Canis familiaris
tggggatttagctcagtggtagagc

SEQ ID NO: 168609 - DNA, 25 bp, Canis familiaris
tgggggttctctacctggtatgagg

SEQ ID NO: 168610 - DNA, 25 bp, Canis familiaris
tgggagagtcctcatcactttatca

SEQ ID NO: 168611 - DNA, 25 bp, Canis familiaris
tggggcttgtctcatcagttttaga

SEQ ID NO: 168612 - DNA, 25 bp, Canis familiaris
tggtggctcgattctagcatctttg

SEQ ID NO: 168613 - DNA, 25 bp, Canis familiaris
tggtgcagtggagctactccttggc

SEQ ID NO: 168614 - DNA, 25 bp, Canis familiaris
tggtgagtgaggttgtctcctgggc

SEQ ID NO: 168615 - DNA, 25 bp, Canis familiaris
tggtgttgatagttgttttgggttt

SEQ ID NO: 168616 - DNA, 25 bp, Canis familiaris
tggtgttggtgaattggttttgttt

SEQ ID NO: 168617 - DNA, 25 bp, Canis familiaris
tgggatttgtcttctgggttatttt

SEQ ID NO: 168618 - DNA, 25 bp, Canis familiaris
tgggtgtatctctctgggttttgaa

SEQ ID NO: 168619 - DNA, 25 bp, Canis familiaris
tggtgttgaatctctggtgtatgga

SEQ ID NO: 168620 - DNA, 25 bp, Canis familiaris
tggtgtggtccatgtggtgctcaat

SEQ ID NO: 168621 - DNA, 25 bp, Canis familiaris
tggtgtgccctctgatggggcaaag

SEQ ID NO: 168622 - DNA, 25 bp, Canis familiaris
tgggtgctccatcgttcgagaaaag

SEQ ID NO: 168623 - DNA, 25 bp, Canis familiaris
tgtggtgcccgagttctagaacaac

SEQ ID NO: 168624 - DNA, 25 bp, Canis familiaris
tgggtgccccaatttatcaatgcat

SEQ ID NO: 168625 - DNA, 25 bp, Canis familiaris
tgggtgtaacaattgtgatcctcat

SEQ ID NO: 168626 - DNA, 25 bp, Canis familiaris
tgggttcaagtgtatatattcctat

SEQ ID NO: 168627 - DNA, 25 bp, Canis familiaris
tggtgcttttgtactataatgccta

SEQ ID NO: 168628 - DNA, 25 bp, Canis familiaris
tggtgttgatagccctgatccagcc

SEQ ID NO: 168629 - DNA, 25 bp, Canis familiaris
tggtgatctcaacctttctgacagc

SEQ ID NO: 168630 - DNA, 25 bp, Canis familiaris
tggtgaccacatatcttggaagcaa

SEQ ID NO: 168631 - DNA, 25 bp, Canis familiaris
tgggacccatcactcggagaagttc

SEQ ID NO: 168632 - DNA, 25 bp, Canis familiaris
tggggcccaagccgaagaaatcctg

SEQ ID NO: 168633 - DNA, 25 bp, Canis familiaris
tggggtcaacgacccgagacatcct

SEQ ID NO: 168634 - DNA, 25 bp, Canis familiaris
tggggaaagctcactcggattatat

SEQ ID NO: 168635 - DNA, 25 bp, Canis familiaris
tggtgggaacttcctctgtggttta

SEQ ID NO: 168636 - DNA, 25 bp, Canis familiaris
tggtgagaggttaactcggagtttt

SEQ ID NO: 168637 - DNA, 25 bp, Canis familiaris
tgggaagcgaataacctgggacagt

SEQ ID NO: 168638 - DNA, 25 bp, Canis familiaris
tgggaacaggtgacccgtacacgcc

SEQ ID NO: 168639 - DNA, 25 bp, Canis familiaris
tgggagaatggccttctagggcacc

SEQ ID NO: 168640 - DNA, 25 bp, Canis familiaris
tggggaggggtaatagagggcgtcg

SEQ ID NO: 168641 - DNA, 25 bp, Canis familiaris
tgggagagggggctagagcaggtct

SEQ ID NO: 168642 - DNA, 25 bp, Canis familiaris
tgggcaggggacgttatggggttct

SEQ ID NO: 168643 - DNA, 25 bp, Canis familiaris
tgggaaggcaaggtttccgtttcat

SEQ ID NO: 168644 - DNA, 25 bp, Canis familiaris
tgggaagttagtcggtctcgttcca

SEQ ID NO: 168645 - DNA, 25 bp, Canis familiaris
tgggggttaatcaatttggttgtga

SEQ ID NO: 168646 - DNA, 25 bp, Canis familiaris
tgggatggtgtacgtcgttggtcgg

SEQ ID NO: 168647 - DNA, 25 bp, Canis familiaris
tggtgatggtgatcgatctgttgta

SEQ ID NO: 168648 - DNA, 25 bp, Canis familiaris
tggtggagcgatttgtctggttaat

SEQ ID NO: 168649 - DNA, 25 bp, Canis familiaris
tggggaggaagttctgggctagcgc

SEQ ID NO: 168650 - DNA, 25 bp, Canis familiaris
tggtggggagaagcagcgtgtcgcc

SEQ ID NO: 168651 - DNA, 25 bp, Canis familiaris
tggtgtggggagggcaggtttccct

SEQ ID NO: 168652 - DNA, 25 bp, Canis familiaris
tgggtggcttggtccggtaagcctc

SEQ ID NO: 168653 - DNA, 25 bp, Canis familiaris
tgggtggctcggtttgttaagcgtc

SEQ ID NO: 168654 - DNA, 25 bp, Canis familiaris
tggtgggttgatgttggttagggtt

SEQ ID NO: 168655 - DNA, 25 bp, Canis familiaris
tggggaattcatgtgggttaccgtt

SEQ ID NO: 168656 - DNA, 25 bp, Canis familiaris
tgggaaattatcgggccttatccct

SEQ ID NO: 168657 - DNA, 25 bp, Canis familiaris
tgggctaataaatccttttccctct

SEQ ID NO: 168658 - DNA, 25 bp, Canis familiaris
tgggtaaagagatccggcccaccta

SEQ ID NO: 168659 - DNA, 25 bp, Canis familiaris
tgggaagaatggttcgggcctaggc

SEQ ID NO: 168660 - DNA, 25 bp, Canis familiaris
tggggagaatgttatgggttttggc

SEQ ID NO: 168661 - DNA, 25 bp, Canis familiaris
tggggagaatattggccgcatggtt

SEQ ID NO: 168662 - DNA, 25 bp, Canis familiaris
tgggtcacaacaggtgctcgcattt

SEQ ID NO: 168663 - DNA, 25 bp, Canis familiaris
tgggactattgctgtgatcgtcttt

SEQ ID NO: 168664 - DNA, 25 bp, Canis familiaris
tggggtattgttgcatctgtctgga

SEQ ID NO: 168665 - DNA, 25 bp, Canis familiaris
tggggtgttcttcacgctggtgaag

SEQ ID NO: 168666 - DNA, 25 bp, Canis familiaris
tggtggtgatttacccgttgtcaag

SEQ ID NO: 168667 - DNA, 25 bp, Canis familiaris
tggtgaggatgtacacccgtttccc

SEQ ID NO: 168668 - DNA, 25 bp, Canis familiaris
tggtgaagaggagccacccttctcc

SEQ ID NO: 168669 - DNA, 25 bp, Canis familiaris
tggtgaactggaggccccagctaga

SEQ ID NO: 168670 - DNA, 25 bp, Canis familiaris
tggtgaactaaggagcaccagcgca

SEQ ID NO: 168671 - DNA, 25 bp, Canis familiaris
tggtgaattggagagccctcctcgg

SEQ ID NO: 168672 - DNA, 25 bp, Canis familiaris
tggtgtgattaacagcgtcctctca

SEQ ID NO: 168673 - DNA, 25 bp, Canis familiaris
tggtgtgattctaggctgttcttct

SEQ ID NO: 168674 - DNA, 25 bp, Canis familiaris
tggtggatcttaggctaggccctgc

SEQ ID NO: 168675 - DNA, 25 bp, Canis familiaris
tggtgagactggtgctgcaggaccc

SEQ ID NO: 168676 - DNA, 25 bp, Canis familiaris
tggtgagaccgtgtcagaacccttt

SEQ ID NO: 168677 - DNA, 25 bp, Canis familiaris
tggtgatcactcttcgtaaaacttg

SEQ ID NO: 168678 - DNA, 25 bp, Canis familiaris
tggtgtactcctagataatcctcgg

SEQ ID NO: 168679 - DNA, 25 bp, Canis familiaris
tgaggtactcctagtactttcccgt

SEQ ID NO: 168680 - DNA, 25 bp, Canis familiaris
tgggtagccctcaaattactgtcca

SEQ ID NO: 168681 - DNA, 25 bp, Canis familiaris
tggggaccctcttgtgtcaggtcca

SEQ ID NO: 168682 - DNA, 25 bp, Canis familiaris
tgggaaacgtttggcacttgctaca

SEQ ID NO: 168683 - DNA, 25 bp, Canis familiaris
tgggagaccctgtccaaaagtacaa

SEQ ID NO: 168684 - DNA, 25 bp, Canis familiaris
tggggtgcacgatccaagggtaaca

SEQ ID NO: 168685 - DNA, 25 bp, Canis familiaris
tggggtctagaaccacaggggtact

SEQ ID NO: 168686 - DNA, 25 bp, Canis familiaris
tggggttgaagcccaacagcccaat

SEQ ID NO: 168687 - DNA, 25 bp, Canis familiaris
tgggcgtaggagccaagggccacaa

SEQ ID NO: 168688 - DNA, 25 bp, Canis familiaris
tggtggtgaaggtcgtggcgcagca

SEQ ID NO: 168689 - DNA, 25 bp, Canis familiaris
tggtgcggaaggcattggcgcccag

SEQ ID NO: 168690 - DNA, 25 bp, Canis familiaris
tgggccggaagaattgggccgacgg

SEQ ID NO: 168691 - DNA, 25 bp, Canis familiaris
tggggccggagaagggtggggcttg

SEQ ID NO: 168692 - DNA, 25 bp, Canis familiaris
tggtgttcggagaggggcgggacct

SEQ ID NO: 168693 - DNA, 25 bp, Canis familiaris
tggtggtcagggaggagcgggagca

SEQ ID NO: 168694 - DNA, 25 bp, Canis familiaris
tggtggtcagtcaggttgcctggct

SEQ ID NO: 168695 - DNA, 25 bp, Canis familiaris
tggtgcttcagcaagcagccattcc

SEQ ID NO: 168696 - DNA, 25 bp, Canis familiaris
tggtggctcagggatgctcatggcc

SEQ ID NO: 168697 - DNA, 25 bp, Canis familiaris
tggtgagcatctggacaatcgcgct

SEQ ID NO: 168698 - DNA, 25 bp, Canis familiaris
tggtgcgagctggcactcacatcct

SEQ ID NO: 168699 - DNA, 25 bp, Canis familiaris
tggtgcgagctggcacccacatcct

SEQ ID NO: 168700 - DNA, 25 bp, Canis familiaris
tgagtgcgggggctcaatcttacga

SEQ ID NO: 168701 - DNA, 25 bp, Canis familiaris
tgtggggggtggtccactttctata

SEQ ID NO: 168702 - DNA, 25 bp, Canis familiaris
tggggaggggggagcttccattaat

SEQ ID NO: 168703 - DNA, 25 bp, Canis familiaris
tggggaagggctgaagttccctttg

SEQ ID NO: 168704 - DNA, 25 bp, Canis familiaris
tgcggataaaccaggtggtcccttt

SEQ ID NO: 168705 - DNA, 25 bp, Canis familiaris
tgggtagaaggcggggctgacccct

SEQ ID NO: 168706 - DNA, 25 bp, Canis familiaris
tgggggaagcctggaggaggcgcgg

SEQ ID NO: 168707 - DNA, 25 bp, Canis familiaris
tgcggcgcgagttcgggtaggccga

SEQ ID NO: 168708 - DNA, 25 bp, Canis familiaris
tggggctgacttggaggctcatgtc

SEQ ID NO: 168709 - DNA, 25 bp, Canis familiaris
tggtgcaggagcagctgctggccat

SEQ ID NO: 168710 - DNA, 25 bp, Canis familiaris
tggtgcaggcagtgctgcagggcca

SEQ ID NO: 168711 - DNA, 25 bp, Canis familiaris
tggtgagcctgttctctaggcacat

SEQ ID NO: 168712 - DNA, 25 bp, Canis familiaris
tgtgtcaccgtcgtaaggccaagaa

SEQ ID NO: 168713 - DNA, 25 bp, Canis familiaris
tgtggaacattcataaggcctctga

SEQ ID NO: 168714 - DNA, 25 bp, Canis familiaris
tgggaactgtaatgaggtctcttgg

SEQ ID NO: 168715 - DNA, 25 bp, Canis familiaris
tgggaactataccttgggctgggga

SEQ ID NO: 168716 - DNA, 25 bp, Canis familiaris
tgaggaactttccttacctggttga

SEQ ID NO: 168717 - DNA, 25 bp, Canis familiaris
tgggtactatttttatgcccgtgta

SEQ ID NO: 168718 - DNA, 25 bp, Canis familiaris
tgggtcctgtaacttctgtacctga

SEQ ID NO: 168719 - DNA, 25 bp, Canis familiaris
tggtgtttgtagcatttttatcata

SEQ ID NO: 168720 - DNA, 25 bp, Canis familiaris
tggtgtcttttccatttctggatca

SEQ ID NO: 168721 - DNA, 25 bp, Canis familiaris
tgggtctgctaccagtatcctggat

SEQ ID NO: 168722 - DNA, 25 bp, Canis familiaris
tgtgggtccccagggcctggaaagt

SEQ ID NO: 168723 - DNA, 25 bp, Canis familiaris
tggggtaccaataagccggaccagg

SEQ ID NO: 168724 - DNA, 25 bp, Canis familiaris
tgggttaagctgtttggggatccgg

SEQ ID NO: 168725 - DNA, 25 bp, Canis familiaris
tggtgttcgaggtcgtggaggtcct

SEQ ID NO: 168726 - DNA, 25 bp, Canis familiaris
tgcaggtaccggtccggaattcccg

SEQ ID NO: 168727 - DNA, 25 bp, Canis familiaris
tggtggaccaggccctggacatcca

SEQ ID NO: 168728 - DNA, 25 bp, Canis familiaris
tggtgtggtcagccaggccaaacga

SEQ ID NO: 168729 - DNA, 25 bp, Canis familiaris
tgggtgggcatgcctttccaaatga

SEQ ID NO: 168730 - DNA, 25 bp, Canis familiaris
tgggtggctatgccacctgccaaga

SEQ ID NO: 168731 - DNA, 25 bp, Canis familiaris
tggtgtccttgaccgcatgatgaag

SEQ ID NO: 168732 - DNA, 25 bp, Canis familiaris
tggtgtccttgaccgcatgatgaag

SEQ ID NO: 168733 - DNA, 25 bp, Canis familiaris
tggtgtccgtgaccgcagtgatgaa

SEQ ID NO: 168734 - DNA, 25 bp, Canis familiaris
tggtgtttgatgtcacctctggaaa

SEQ ID NO: 168735 - DNA, 25 bp, Canis familiaris
tggtgtgtgtgtatgactatgggga

SEQ ID NO: 168736 - DNA, 25 bp, Canis familiaris
tggtgtggccttgagtgcaggggtc

SEQ ID NO: 168737 - DNA, 25 bp, Canis familiaris
tggtggatccttgttctggactgag

SEQ ID NO: 168738 - DNA, 25 bp, Canis familiaris
tggggacctcacatcatctgaaagg

SEQ ID NO: 168739 - DNA, 25 bp, Canis familiaris
tggggacccatctctaaagcaggat

SEQ ID NO: 168740 - DNA, 25 bp, Canis familiaris
tggggagcccaatgtggaacttgat

SEQ ID NO: 168741 - DNA, 25 bp, Canis familiaris
tgggggccaagttctgagcaacgga

SEQ ID NO: 168742 - DNA, 25 bp, Canis familiaris
tggggaacacagatctggcaagccc

SEQ ID NO: 168743 - DNA, 25 bp, Canis familiaris
tggggaaacagttagcaccagccac

SEQ ID NO: 168744 - DNA, 25 bp, Canis familiaris
tggtggggatgactgaagcccacca

SEQ ID NO: 168745 - DNA, 25 bp, Canis familiaris
tggtggctgaagctgaggcccatcc

SEQ ID NO: 168746 - DNA, 25 bp, Canis familiaris
tggggctgagcagtgctggtaccca

SEQ ID NO: 168747 - DNA, 25 bp, Canis familiaris
tggtggctcacgcctgtaatcccag

SEQ ID NO: 168748 - DNA, 25 bp, Canis familiaris
tggtgtccactgctggagactctga

SEQ ID NO: 168749 - DNA, 25 bp, Canis familiaris
tggtggtgactccgggacattactg

SEQ ID NO: 168750 - DNA, 25 bp, Canis familiaris
tggtgtgaaactcggctgtattaat

SEQ ID NO: 168751 - DNA, 25 bp, Canis familiaris
tgggctgaatatgctgccagtgtta

SEQ ID NO: 168752 - DNA, 25 bp, Canis familiaris
tggtgtgctagtatcctgagtgtat

SEQ ID NO: 168753 - DNA, 25 bp, Canis familiaris
tggtgatgccttatcagccattgtc

SEQ ID NO: 168754 - DNA, 25 bp, Canis familiaris
tggtggacttttacacatgtgccca

SEQ ID NO: 168755 - DNA, 25 bp, Canis familiaris
tggtgacagtttagtgcctctgccc

SEQ ID NO: 168756 - DNA, 25 bp, Canis familiaris
tggtggctgtgaaggccctgatgcc

SEQ ID NO: 168757 - DNA, 25 bp, Canis familiaris
tggggcattgaccgtttagcactac

SEQ ID NO: 168758 - DNA, 25 bp, Canis familiaris
tggtggcctgagccaggtgtagccc

SEQ ID NO: 168759 - DNA, 25 bp, Canis familiaris
tgggggggacagatatcactcagct

SEQ ID NO: 168760 - DNA, 25 bp, Canis familiaris
tggggtgaggaaaatgttctaaaat

SEQ ID NO: 168761 - DNA, 25 bp, Canis familiaris
tggggctgggttagtggttaccact

SEQ ID NO: 168762 - DNA, 25 bp, Canis familiaris
tggggcatggggagggtctggccac

SEQ ID NO: 168763 - DNA, 25 bp, Canis familiaris
tggggtgggaaggaggctccccatc

SEQ ID NO: 168764 - DNA, 25 bp, Canis familiaris
tgggtggaaaatggcaggcccctcc

SEQ ID NO: 168765 - DNA, 25 bp, Canis familiaris
tggggagaaagagctggccccacct

SEQ ID NO: 168766 - DNA, 25 bp, Canis familiaris
tgggggagaaaggctggccagctgc

SEQ ID NO: 168767 - DNA, 25 bp, Canis familiaris
tggggaagaacaccctgctcattgc

SEQ ID NO: 168768 - DNA, 25 bp, Canis familiaris
tgggagagagaccccctgtttaagc

SEQ ID NO: 168769 - DNA, 25 bp, Canis familiaris
tgggcagcagggggtggcctttaag

SEQ ID NO: 168770 - DNA, 25 bp, Canis familiaris
tgggagcctggctgggattggtgaa

SEQ ID NO: 168771 - DNA, 25 bp, Canis familiaris
tggggggaggagggcattggtggtt

SEQ ID NO: 168772 - DNA, 25 bp, Canis familiaris
tggtggtggttatggatctggtggt

SEQ ID NO: 168773 - DNA, 25 bp, Canis familiaris
tggtgtatggggaggtgtgtgtgtg

SEQ ID NO: 168774 - DNA, 25 bp, Canis familiaris
tggtgtttgaggatcctgggctgtc

SEQ ID NO: 168775 - DNA, 25 bp, Canis familiaris
tggtgtcatgggtttcctggtccca

SEQ ID NO: 168776 - DNA, 25 bp, Canis familiaris
tggtgtcagggcttgtattccttcc

SEQ ID NO: 168777 - DNA, 25 bp, Canis familiaris
tgggtaagagcgctgactcggttct

SEQ ID NO: 168778 - DNA, 25 bp, Canis familiaris
tgggtaagagcccaactctcgtatc

SEQ ID NO: 168779 - DNA, 25 bp, Canis familiaris
tgtgtgtaaaaccagatcccttata

SEQ ID NO: 168780 - DNA, 25 bp, Canis familiaris
tgtgtaattagtgcccaccttaatg

SEQ ID NO: 168781 - DNA, 25 bp, Canis familiaris
tgttaaggggacccacgtaccagtg

SEQ ID NO: 168782 - DNA, 25 bp, Canis familiaris
tgggaaggggactcacggacaatgg

SEQ ID NO: 168783 - DNA, 25 bp, Canis familiaris
tgggagaagtagaaaacgaacacgg

SEQ ID NO: 168784 - DNA, 25 bp, Canis familiaris
tgggaaattgggaacccaatctggg

SEQ ID NO: 168785 - DNA, 25 bp, Canis familiaris
tgggaagagggttgtcccagccggg

SEQ ID NO: 168786 - DNA, 25 bp, Canis familiaris
tgggggcagaggaattcaaagggag

SEQ ID NO: 168787 - DNA, 25 bp, Canis familiaris
tgggcgccaacagaggcaaagaggg

SEQ ID NO: 168788 - DNA, 25 bp, Canis familiaris
tgggtcaacaagaaagaaagtgggt

SEQ ID NO: 168789 - DNA, 25 bp, Canis familiaris
tgggctaatggaaaaaggggggatg

SEQ ID NO: 168790 - DNA, 25 bp, Canis familiaris
tgtggtggtgtggaaaagggaggta

SEQ ID NO: 168791 - DNA, 25 bp, Canis familiaris
tggggtggggaactgagggagaaag

SEQ ID NO: 168792 - DNA, 25 bp, Canis familiaris
tgggtgggggaaggcgaggtacaag

SEQ ID NO: 168793 - DNA, 25 bp, Canis familiaris
tggggggtaggggctgaagtagaag

SEQ ID NO: 168794 - DNA, 25 bp, Canis familiaris
tggggtaattgtgggtggagggaag

SEQ ID NO: 168795 - DNA, 25 bp, Canis familiaris
tgagggtagatttgtgggaaaaata

SEQ ID NO: 168796 - DNA, 25 bp, Canis familiaris
tgaggtaatgtcaacgtggtaaaaa

SEQ ID NO: 168797 - DNA, 25 bp, Canis familiaris
tgggtcaaggaaagggccgaagaag

SEQ ID NO: 168798 - DNA, 25 bp, Canis familiaris
tggggaacacaaagggctttagtca

SEQ ID NO: 168799 - DNA, 25 bp, Canis familiaris
tgggctcagcacgaaagggctttca

SEQ ID NO: 168800 - DNA, 25 bp, Canis familiaris
tgggctattgaaaaggcgcagttgt

SEQ ID NO: 168801 - DNA, 25 bp, Canis familiaris
tgggctttaaaattctcacttgcag

SEQ ID NO: 168802 - DNA, 25 bp, Canis familiaris
tgggctccaaatcttgcttcttgag

SEQ ID NO: 168803 - DNA, 25 bp, Canis familiaris
tggggccagaaccttgggcttgagt

SEQ ID NO: 168804 - DNA, 25 bp, Canis familiaris
tggggccagcagtgttagcaggggt

SEQ ID NO: 168805 - DNA, 25 bp, Canis familiaris
tggtgggcagtaacttccaggccct

SEQ ID NO: 168806 - DNA, 25 bp, Canis familiaris
tgggggagttagctcgagaccacag

SEQ ID NO: 168807 - DNA, 25 bp, Canis familiaris
tgggaggagttctctgggatcccgg

SEQ ID NO: 168808 - DNA, 25 bp, Canis familiaris
tggggatggttccactagaaatctc

SEQ ID NO: 168809 - DNA, 25 bp, Canis familiaris
tggggatgtgcagggcctaaaactg

SEQ ID NO: 168810 - DNA, 25 bp, Canis familiaris
tgggaatgtctaacttaaatagctt

SEQ ID NO: 168811 - DNA, 25 bp, Canis familiaris
tgggcgtctacaacggcaagacctt

SEQ ID NO: 168812 - DNA, 25 bp, Canis familiaris
tgggacgtcaaccagcgagagacct

SEQ ID NO: 168813 - DNA, 25 bp, Canis familiaris
tggggcctcaacaacagatacatcc

SEQ ID NO: 168814 - DNA, 25 bp, Canis familiaris
tggtggccgaaaagcggctcatccc

SEQ ID NO: 168815 - DNA, 25 bp, Canis familiaris
tgggggcgatagccagggcttgccc

SEQ ID NO: 168816 - DNA, 25 bp, Canis familiaris
tggtggctgcagcagccgggctgga

SEQ ID NO: 168817 - DNA, 25 bp, Canis familiaris
tgggtgctcggaactgacgtggacc

SEQ ID NO: 168818 - DNA, 25 bp, Canis familiaris
tggtggctcgagagctgcagcagcg

SEQ ID NO: 168819 - DNA, 25 bp, Canis familiaris
tggtggccgagcatgctgccaaaca

SEQ ID NO: 168820 - DNA, 25 bp, Canis familiaris
tggtggcggcaagtgatcagtgaag

SEQ ID NO: 168821 - DNA, 25 bp, Canis familiaris
tggtgggctcaggcaatagatgggg

SEQ ID NO: 168822 - DNA, 25 bp, Canis familiaris
tggtgggctcatgccatgatggggg

SEQ ID NO: 168823 - DNA, 25 bp, Canis familiaris
tgggggctctaaggatggtcggaag

SEQ ID NO: 168824 - DNA, 25 bp, Canis familiaris
tggggccccaaggtgagagggaacg

SEQ ID NO: 168825 - DNA, 25 bp, Canis familiaris
tgggggaccaatcgctggagggaca

SEQ ID NO: 168826 - DNA, 25 bp, Canis familiaris
tggggaagccaaggcgtgggggcgc

SEQ ID NO: 168827 - DNA, 25 bp, Canis familiaris
tggggaggatgtagttgcggggggc

SEQ ID NO: 168828 - DNA, 25 bp, Canis familiaris
tgggtgtagaccattctgtgggagg

SEQ ID NO: 168829 - DNA, 25 bp, Canis familiaris
tggggaaatgactggcttcggggca

SEQ ID NO: 168830 - DNA, 25 bp, Canis familiaris
tggtggagcaggaggatgttcgcgg

SEQ ID NO: 168831 - DNA, 25 bp, Canis familiaris
tggtggagagcggggacgtcgagct

SEQ ID NO: 168832 - DNA, 25 bp, Canis familiaris
tggtggaggcagtgtcctggtagct

SEQ ID NO: 168833 - DNA, 25 bp, Canis familiaris
tggtggatatggtgacagtggggat

SEQ ID NO: 168834 - DNA, 25 bp, Canis familiaris
tggtggtgtggaaaagggaggtatg

SEQ ID NO: 168835 - DNA, 25 bp, Canis familiaris
tggtggtgggtgtatgggtcagcct

SEQ ID NO: 168836 - DNA, 25 bp, Canis familiaris
tggtgtggtggatgcatggaccctc

SEQ ID NO: 168837 - DNA, 25 bp, Canis familiaris
tggtgtgtgtggtacatgtgtatgc

SEQ ID NO: 168838 - DNA, 25 bp, Canis familiaris
tggtgtgtgctttggctgatggtgc

SEQ ID NO: 168839 - DNA, 25 bp, Canis familiaris
tggtgtgtatgatggcttgcggccc

SEQ ID NO: 168840 - DNA, 25 bp, Canis familiaris
tggtgtgttatagcgtcgcgtctct

SEQ ID NO: 168841 - DNA, 25 bp, Canis familiaris
tggtgggtatgatcgccagcttcta

SEQ ID NO: 168842 - DNA, 25 bp, Canis familiaris
tggtggagtctgtatcccttttgta

SEQ ID NO: 168843 - DNA, 25 bp, Canis familiaris
tgggcacagacgttcacgttttctt

SEQ ID NO: 168844 - DNA, 25 bp, Canis familiaris
tggggcaacgtttatgctttcctcc

SEQ ID NO: 168845 - DNA, 25 bp, Canis familiaris
tgggacccgtgtttgtttgtccagc

SEQ ID NO: 168846 - DNA, 25 bp, Canis familiaris
tggggccacctgaacttttgggccg

SEQ ID NO: 168847 - DNA, 25 bp, Canis familiaris
tggggccagcctcatatttaattgc

SEQ ID NO: 168848 - DNA, 25 bp, Canis familiaris
tgggacaacccgttattgaactgcc

SEQ ID NO: 168849 - DNA, 25 bp, Canis familiaris
tgggaaccctctacaattgctaccc

SEQ ID NO: 168850 - DNA, 25 bp, Canis familiaris
tgggaaggtctaatataagcagagc

SEQ ID NO: 168851 - DNA, 25 bp, Canis familiaris
tgggaaggctgttttgaacccagaa

SEQ ID NO: 168852 - DNA, 25 bp, Canis familiaris
tgggggagtctacttaatcccctat

SEQ ID NO: 168853 - DNA, 25 bp, Canis familiaris
tgggtgggcttcacgaaccacctgt

SEQ ID NO: 168854 - DNA, 25 bp, Canis familiaris
tgggtgggaccaagtagatgccccc

SEQ ID NO: 168855 - DNA, 25 bp, Canis familiaris
tggtgtggggcttttggaggcccgc

SEQ ID NO: 168856 - DNA, 25 bp, Canis familiaris
tggtgggtgagtgttggagccccgg

SEQ ID NO: 168857 - DNA, 25 bp, Canis familiaris
tggtgggcaagtccttggaccccac

SEQ ID NO: 168858 - DNA, 25 bp, Canis familiaris
tggggtcaatatcttgttccacgca

SEQ ID NO: 168859 - DNA, 25 bp, Canis familiaris
tggggctttaatggtttcgcatcgc

SEQ ID NO: 168860 - DNA, 25 bp, Canis familiaris
tggggttgggatgtttgcactcccc

SEQ ID NO: 168861 - DNA, 25 bp, Canis familiaris
tggggttgaggttcatcgtcttctc

SEQ ID NO: 168862 - DNA, 25 bp, Canis familiaris
tggtggttggttttattctcctgct

SEQ ID NO: 168863 - DNA, 25 bp, Canis familiaris
tggggtttgtctgagacttcctcat

SEQ ID NO: 168864 - DNA, 25 bp, Canis familiaris
tggggaatatttgaatcgtgtctca

SEQ ID NO: 168865 - DNA, 25 bp, Canis familiaris
tggggagtgttcttgagactgtgtt

SEQ ID NO: 168866 - DNA, 25 bp, Canis familiaris
tggggaatgatttgagacactttca

SEQ ID NO: 168867 - DNA, 25 bp, Canis familiaris
tgggcgaataatcgaggcctccctt

SEQ ID NO: 168868 - DNA, 25 bp, Canis familiaris
tggggaatgattttgctcctccctg

SEQ ID NO: 168869 - DNA, 25 bp, Canis familiaris
tggggactgtgatcacttatccact

SEQ ID NO: 168870 - DNA, 25 bp, Canis familiaris
tggggagcaggatggctttgacctc

SEQ ID NO: 168871 - DNA, 25 bp, Canis familiaris
tggggagcggacaggtgtgcctcca

SEQ ID NO: 168872 - DNA, 25 bp, Canis familiaris
tgggtagagagagatggattcttcc

SEQ ID NO: 168873 - DNA, 25 bp, Canis familiaris
tgggtgcgaagatctgtgtttggcc

SEQ ID NO: 168874 - DNA, 25 bp, Canis familiaris
tgtgaattcaaatctcgtgttgggc

SEQ ID NO: 168875 - DNA, 25 bp, Canis familiaris
tgtgacttcaagtttggaccctggg

SEQ ID NO: 168876 - DNA, 25 bp, Canis familiaris
tggggtgagagtttggcccctgtgc

SEQ ID NO: 168877 - DNA, 25 bp, Canis familiaris
tggggtgaggggtagcccctttgca

SEQ ID NO: 168878 - DNA, 25 bp, Canis familiaris
tggggaaggggagctaccgtacact

SEQ ID NO: 168879 - DNA, 25 bp, Canis familiaris
tgggaagggggagctcccgagaagc

SEQ ID NO: 168880 - DNA, 25 bp, Canis familiaris
ttggaaggccgccttccccaagaag

SEQ ID NO: 168881 - DNA, 25 bp, Canis familiaris
tgtggaagtgccagggcccaaacac

SEQ ID NO: 168882 - DNA, 25 bp, Canis familiaris
tgggaagtcgtctgacaaccgatcc

SEQ ID NO: 168883 - DNA, 25 bp, Canis familiaris
tggggagtgcccagagcaattccat

SEQ ID NO: 168884 - DNA, 25 bp, Canis familiaris
tggggagctgacaggaccaaccaca

SEQ ID NO: 168885 - DNA, 25 bp, Canis familiaris
tggggagctgacagggaccagccac

SEQ ID NO: 168886 - DNA, 25 bp, Canis familiaris
tggggagtgatcatgttgataatgc

SEQ ID NO: 168887 - DNA, 25 bp, Canis familiaris
tggggagactcaactgtacacatgc

SEQ ID NO: 168888 - DNA, 25 bp, Canis familiaris
tgggtggacatcagtgatcaactcc

SEQ ID NO: 168889 - DNA, 25 bp, Canis familiaris
tgggtcagtggctctatgaactctc

SEQ ID NO: 168890 - DNA, 25 bp, Canis familiaris
tgggtcagttctacaacagctcccc

SEQ ID NO: 168891 - DNA, 25 bp, Canis familiaris
tggtgggttttggaagccagctcct

SEQ ID NO: 168892 - DNA, 25 bp, Canis familiaris
tgtggggttattgggtccacctcag

SEQ ID NO: 168893 - DNA, 25 bp, Canis familiaris
tgggggttttcaacatacaaatcat

SEQ ID NO: 168894 - DNA, 25 bp, Canis familiaris
tggggatgtgctctatttcctaaca

SEQ ID NO: 168895 - DNA, 25 bp, Canis familiaris
tggtggtggcatttcttgatagtaa

SEQ ID NO: 168896 - DNA, 25 bp, Canis familiaris
tggggtgtctgactctttattctca

SEQ ID NO: 168897 - DNA, 25 bp, Canis familiaris
tgggctgtttatagctcgaactcca

SEQ ID NO: 168898 - DNA, 25 bp, Canis familiaris
tgggtatatgttaccgacacccctc

SEQ ID NO: 168899 - DNA, 25 bp, Canis familiaris
tgggtattacttgctagacccctca

SEQ ID NO: 168900 - DNA, 25 bp, Canis familiaris
tggggttactatggtagatccccca

SEQ ID NO: 168901 - DNA, 25 bp, Canis familiaris
tgggatttcatttttggttccacca

SEQ ID NO: 168902 - DNA, 25 bp, Canis familiaris
tgggtggctcacgcttggttaaagc

SEQ ID NO: 168903 - DNA, 25 bp, Canis familiaris
tggggtgccggtaggggtagtagcg

SEQ ID NO: 168904 - DNA, 25 bp, Canis familiaris
tgggggggagtcccgagtagttgca

SEQ ID NO: 168905 - DNA, 25 bp, Canis familiaris
tggggagggatctcccctagtctca

SEQ ID NO: 168906 - DNA, 25 bp, Canis familiaris
tggggggtgaccaccacaaactcac

SEQ ID NO: 168907 - DNA, 25 bp, Canis familiaris
tgggtacgggacacaacaccagtcg

SEQ ID NO: 168908 - DNA, 25 bp, Canis familiaris
tggggtcgagggatcaagctccagt

SEQ ID NO: 168909 - DNA, 25 bp, Canis familiaris
tggggtcgagagcacgagagccgag

SEQ ID NO: 168910 - DNA, 25 bp, Canis familiaris
tggggctaatatcacgaggcacaga

SEQ ID NO: 168911 - DNA, 25 bp, Canis familiaris
tggggtattctcaaagtggcatcaa

SEQ ID NO: 168912 - DNA, 25 bp, Canis familiaris
tgtgtggtatacctcaagaggaatg

SEQ ID NO: 168913 - DNA, 25 bp, Canis familiaris
tggtggactgcagccaagcaggcca

SEQ ID NO: 168914 - DNA, 25 bp, Canis familiaris
tggggactctaccaaagccccagga

SEQ ID NO: 168915 - DNA, 25 bp, Canis familiaris
tggtggactctagataacctcggcc

SEQ ID NO: 168916 - DNA, 25 bp, Canis familiaris
tctggggctcttctaaactagttcc

SEQ ID NO: 168917 - DNA, 25 bp, Canis familiaris
tcagggggttgttaaactagaggca

SEQ ID NO: 168918 - DNA, 25 bp, Canis familiaris
tgggaggggtcttccaactggagaa

SEQ ID NO: 168919 - DNA, 25 bp, Canis familiaris
tgtggaacgttttgtcagactgaga

SEQ ID NO: 168920 - DNA, 25 bp, Canis familiaris
tgggatccagttacttctgcagctt

SEQ ID NO: 168921 - DNA, 25 bp, Canis familiaris
tgggatgccatgcgaatcccacact

SEQ ID NO: 168922 - DNA, 25 bp, Canis familiaris
tgggacgcacgagatcctagatcct

SEQ ID NO: 168923 - DNA, 25 bp, Canis familiaris
tgggaagctgggggcccagatcgct

SEQ ID NO: 168924 - DNA, 25 bp, Canis familiaris
tggggtgaggtgagccaagccctga

SEQ ID NO: 168925 - DNA, 25 bp, Canis familiaris
tgggcgagaggtttcaacaccactc

SEQ ID NO: 168926 - DNA, 25 bp, Canis familiaris
tgggacaggggagaacacccaccac

SEQ ID NO: 168927 - DNA, 25 bp, Canis familiaris
tgggagggggacaggacgcctcctc

SEQ ID NO: 168928 - DNA, 25 bp, Canis familiaris
tgtgtaggtgtgcatttgccctggt

SEQ ID NO: 168929 - DNA, 25 bp, Canis familiaris
tgtgtaatgggcccaattccggttt

SEQ ID NO: 168930 - DNA, 25 bp, Canis familiaris
tgtcggatcctgccgagatttccgt

SEQ ID NO: 168931 - DNA, 25 bp, Canis familiaris
tggggatccggggagtgtacgtcgg

SEQ ID NO: 168932 - DNA, 25 bp, Canis familiaris
tgggcagcagctggtggccaggaac

SEQ ID NO: 168933 - DNA, 25 bp, Canis familiaris
tggggcagcaggggtggtacacacc

SEQ ID NO: 168934 - DNA, 25 bp, Canis familiaris
tgggggtgggcagggttgcagagca

SEQ ID NO: 168935 - DNA, 25 bp, Canis familiaris
tggggggtaggggcctgagcagccc

SEQ ID NO: 168936 - DNA, 25 bp, Canis familiaris
tggggggcttgggttctgagcccct

SEQ ID NO: 168937 - DNA, 25 bp, Canis familiaris
tgggtgggagtgggaacttccagcc

SEQ ID NO: 168938 - DNA, 25 bp, Canis familiaris
tgggtaggaggggaccttcctccag

SEQ ID NO: 168939 - DNA, 25 bp, Canis familiaris
tgggtggagggacaccatcccacct

SEQ ID NO: 168940 - DNA, 25 bp, Canis familiaris
tgggcagaaaggctaccatcaccgc

SEQ ID NO: 168941 - DNA, 25 bp, Canis familiaris
tgggcgaaggggttctcatcagcca

SEQ ID NO: 168942 - DNA, 25 bp, Canis familiaris
tgggtagagagggacttcgcactga

SEQ ID NO: 168943 - DNA, 25 bp, Canis familiaris
tgggggaagactccttggtgatgca

SEQ ID NO: 168944 - DNA, 25 bp, Canis familiaris
tggggagaagccctgctaggtgtga

SEQ ID NO: 168945 - DNA, 25 bp, Canis familiaris
tggggaccaccactaagtttgatct

SEQ ID NO: 168946 - DNA, 25 bp, Canis familiaris
tgggaaccagtccttacgattactc

SEQ ID NO: 168947 - DNA, 25 bp, Canis familiaris
tgggagaccaacactctagagtacc

SEQ ID NO: 168948 - DNA, 25 bp, Canis familiaris
tgggagaccaacatcacacaagctg

SEQ ID NO: 168949 - DNA, 25 bp, Canis familiaris
tgggatacatcaatccccacttctc

SEQ ID NO: 168950 - DNA, 25 bp, Canis familiaris
tgggaaatcagaaacgagtgctcct

SEQ ID NO: 168951 - DNA, 25 bp, Canis familiaris
tgggtaagagcacccgactgctctt

SEQ ID NO: 168952 - DNA, 25 bp, Canis familiaris
tgggttcaaggcaatcaggctcttc

SEQ ID NO: 168953 - DNA, 25 bp, Canis familiaris
tgggttcaatcgaacactttagcag

SEQ ID NO: 168954 - DNA, 25 bp, Canis familiaris
tgggttgagatttatgcctactaca

SEQ ID NO: 168955 - DNA, 25 bp, Canis familiaris
tgggttgaatggaagtctagcccag

SEQ ID NO: 168956 - DNA, 25 bp, Canis familiaris
tgggatgatgacagggacccccagg

SEQ ID NO: 168957 - DNA, 25 bp, Canis familiaris
tgggattggaattcgtcaccccagt

SEQ ID NO: 168958 - DNA, 25 bp, Canis familiaris
tggggtaagcactgtcacccacatt

SEQ ID NO: 168959 - DNA, 25 bp, Canis familiaris
tggggcaatacaggcgtcatcccgc

SEQ ID NO: 168960 - DNA, 25 bp, Canis familiaris
tggggacagatgccgcttgtcccgc

SEQ ID NO: 168961 - DNA, 25 bp, Canis familiaris
tgggaggcagaggctgctgctctgt

SEQ ID NO: 168962 - DNA, 25 bp, Canis familiaris
tgggaacaaggctgatctggagaca

SEQ ID NO: 168963 - DNA, 25 bp, Canis familiaris
tggggaagacgcgtatcgccatgaa

SEQ ID NO: 168964 - DNA, 25 bp, Canis familiaris
tgggaaggacgtagtggcagtaatc

SEQ ID NO: 168965 - DNA, 25 bp, Canis familiaris
tgcgggtggcggtggtgcaatacag

SEQ ID NO: 168966 - DNA, 25 bp, Canis familiaris
tgggggctgcggacagctgtcaaaa

SEQ ID NO: 168967 - DNA, 25 bp, Canis familiaris
tggggtggggacctgacagcagaag

SEQ ID NO: 168968 - DNA, 25 bp, Canis familiaris
tgggcgacgagggccaaagcaaaga

SEQ ID NO: 168969 - DNA, 25 bp, Canis familiaris
tgggtgacgaggcccagagcaagag

SEQ ID NO: 168970 - DNA, 25 bp, Canis familiaris
tgggtgctggatgattattgtaatg

SEQ ID NO: 168971 - DNA, 25 bp, Canis familiaris
tgggagctggtgcaaaggatgaatt

SEQ ID NO: 168972 - DNA, 25 bp, Canis familiaris
tgggacgagctggcacagtgaggcg

SEQ ID NO: 168973 - DNA, 25 bp, Canis familiaris
tgggtgtgactccaaagcgagctct

SEQ ID NO: 168974 - DNA, 25 bp, Canis familiaris
tggggagactcctaactgaggccct

SEQ ID NO: 168975 - DNA, 25 bp, Canis familiaris
tgggggactcgctgtcaggaacccc

SEQ ID NO: 168976 - DNA, 25 bp, Canis familiaris
tcgggtcgtccctcaggaacgacca

SEQ ID NO: 168977 - DNA, 25 bp, Canis familiaris
tggggttccctagagggaccaccat

SEQ ID NO: 168978 - DNA, 25 bp, Canis familiaris
tgggggacctcatcaaggtgacacc

SEQ ID NO: 168979 - DNA, 25 bp, Canis familiaris
tggggtccactgtgtaggatgtgac

SEQ ID NO: 168980 - DNA, 25 bp, Canis familiaris
tgggtgtctacgtgtgtgcgaacct

SEQ ID NO: 168981 - DNA, 25 bp, Canis familiaris
tgggatgtccggtgttcgaagctta

SEQ ID NO: 168982 - DNA, 25 bp, Canis familiaris
tgtgtgtgggggggttctgtactaa

SEQ ID NO: 168983 - DNA, 25 bp, Canis familiaris
tgggtggggagaagatccaggaatt

SEQ ID NO: 168984 - DNA, 25 bp, Canis familiaris
tgggcggctgtgtgactcaataaat

SEQ ID NO: 168985 - DNA, 25 bp, Canis familiaris
tgggcttgggaccctcaaacattcc

SEQ ID NO: 168986 - DNA, 25 bp, Canis familiaris
tgggtctgggcatgttttacttctc

SEQ ID NO: 168987 - DNA, 25 bp, Canis familiaris
tgggcctgtggtttgtttagtaagc

SEQ ID NO: 168988 - DNA, 25 bp, Canis familiaris
tgggagggtttttcttagataggct

SEQ ID NO: 168989 - DNA, 25 bp, Canis familiaris
tgggattttttttctcataacgact

SEQ ID NO: 168990 - DNA, 25 bp, Canis familiaris
tgggtcttttatgcctctgaatgga

SEQ ID NO: 168991 - DNA, 25 bp, Canis familiaris
tgggcagccactaattccctattgt

SEQ ID NO: 168992 - DNA, 25 bp, Canis familiaris
tgggtccatcttttccacaatatat

SEQ ID NO: 168993 - DNA, 25 bp, Canis familiaris
tgtggttatttttccaattattaag

SEQ ID NO: 168994 - DNA, 25 bp, Canis familiaris
tgggttaaagtataatgtattagac

SEQ ID NO: 168995 - DNA, 25 bp, Canis familiaris
tgggctgtaaatgaaaagtggctaa

SEQ ID NO: 168996 - DNA, 25 bp, Canis familiaris
tgggcttaaagcctccagagaagta

SEQ ID NO: 168997 - DNA, 25 bp, Canis familiaris
tgggtccataagccccgggaaatgg

SEQ ID NO: 168998 - DNA, 25 bp, Canis familiaris
tgggtccccagagccggggagatgg

SEQ ID NO: 168999 - DNA, 25 bp, Canis familiaris
tgggccaacggaaccagggtgcaag

SEQ ID NO: 169000 - DNA, 25 bp, Canis familiaris
tggggagactggagcctgtgttcat

SEQ ID NO: 169001 - DNA, 25 bp, Canis familiaris
tggggaggaggcggcctggtttagt

SEQ ID NO: 169002 - DNA, 25 bp, Canis familiaris
tggggcactggggtcacatgtgact

SEQ ID NO: 169003 - DNA, 25 bp, Canis familiaris
tgggataatgtcagccactggagct

SEQ ID NO: 169004 - DNA, 25 bp, Canis familiaris
tgggtgaatgttaccagccggcagc

SEQ ID NO: 169005 - DNA, 25 bp, Canis familiaris
tggggaagaaggcctgccagccaga

SEQ ID NO: 169006 - DNA, 25 bp, Canis familiaris
tggggagaaggctgcgctcagccca

SEQ ID NO: 169007 - DNA, 25 bp, Canis familiaris
tggggagacattgcagaccacacgc

SEQ ID NO: 169008 - DNA, 25 bp, Canis familiaris
tggggagacacccatgagtaccgcc

SEQ ID NO: 169009 - DNA, 25 bp, Canis familiaris
tggggagacactccatgagtaccgc

SEQ ID NO: 169010 - DNA, 25 bp, Canis familiaris
tggggacaagctgcgagtactgccc

SEQ ID NO: 169011 - DNA, 25 bp, Canis familiaris
tgggtagcaaggccaagttcgccgg

SEQ ID NO: 169012 - DNA, 25 bp, Canis familiaris
tgggtcagggcccaattctggggcg

SEQ ID NO: 169013 - DNA, 25 bp, Canis familiaris
tgggtcaggaccctgtcatgaggca

SEQ ID NO: 169014 - DNA, 25 bp, Canis familiaris
tggggtgaggtcctatcagagcgct

SEQ ID NO: 169015 - DNA, 25 bp, Canis familiaris
tgggcctgaagtggtacggcctccc

SEQ ID NO: 169016 - DNA, 25 bp, Canis familiaris
tgggcctccaaggaaggccctcgtc

SEQ ID NO: 169017 - DNA, 25 bp, Canis familiaris
tgggccccacagtgggcccagcaga

SEQ ID NO: 169018 - DNA, 25 bp, Canis familiaris
tggggggacagataggcccagcgac

SEQ ID NO: 169019 - DNA, 25 bp, Canis familiaris
tggggagagaagggacgcccaggga

SEQ ID NO: 169020 - DNA, 25 bp, Canis familiaris
tggggaatgaagggatcgctgctgg

SEQ ID NO: 169021 - DNA, 25 bp, Canis familiaris
tgggagaatagagagggcgggagat

SEQ ID NO: 169022 - DNA, 25 bp, Canis familiaris
tgggggaggagctgggaggctggct

SEQ ID NO: 169023 - DNA, 25 bp, Canis familiaris
tggggacagtgagtgtgcggggtgg

SEQ ID NO: 169024 - DNA, 25 bp, Canis familiaris
tggggaggtggttgagtggtgtggc

SEQ ID NO: 169025 - DNA, 25 bp, Canis familiaris
tgtgttgggtggtactgggtctgcc

SEQ ID NO: 169026 - DNA, 25 bp, Canis familiaris
tgtgtttggttggagcacggtcctc

SEQ ID NO: 169027 - DNA, 25 bp, Canis familiaris
tgggattctttgacacttggtggta

SEQ ID NO: 169028 - DNA, 25 bp, Canis familiaris
tgggcatggtctttacaggtgtgga

SEQ ID NO: 169029 - DNA, 25 bp, Canis familiaris
tgggagcgtcttttcaggtggatac

SEQ ID NO: 169030 - DNA, 25 bp, Canis familiaris
tgggtcctgtttttgctgtggtgac

SEQ ID NO: 169031 - DNA, 25 bp, Canis familiaris
tgggcaccccagcactgctgggtga

SEQ ID NO: 169032 - DNA, 25 bp, Canis familiaris
tggggacataagtagctctctggta

SEQ ID NO: 169033 - DNA, 25 bp, Canis familiaris
tggggactactttgacatctgtgtg

SEQ ID NO: 169034 - DNA, 25 bp, Canis familiaris
tgggtcccaatctaagcatctgtgt

SEQ ID NO: 169035 - DNA, 25 bp, Canis familiaris
tgggttcactttgagtcgtgcgggc

SEQ ID NO: 169036 - DNA, 25 bp, Canis familiaris
tggggtcacttttaatcactgcact

SEQ ID NO: 169037 - DNA, 25 bp, Canis familiaris
tgcgaggttctagttaaccggcccg

SEQ ID NO: 169038 - DNA, 25 bp, Canis familiaris
tcgaggatttccacaacacgttcat

SEQ ID NO: 169039 - DNA, 25 bp, Canis familiaris
tgggttttccatcattacgtgtcta

SEQ ID NO: 169040 - DNA, 25 bp, Canis familiaris
tgtggtgctttccagaataaaggtt

SEQ ID NO: 169041 - DNA, 25 bp, Canis familiaris
tgtgggttaccgttaagaattcata

SEQ ID NO: 169042 - DNA, 25 bp, Canis familiaris
tggggttcccagtggtgtgtttaga

SEQ ID NO: 169043 - DNA, 25 bp, Canis familiaris
tgggctttccactaaggtggtttga

SEQ ID NO: 169044 - DNA, 25 bp, Canis familiaris
tgggtttccactggggaatgatttg

SEQ ID NO: 169045 - DNA, 25 bp, Canis familiaris
tgggttctcctcagtgagggcttcc

SEQ ID NO: 169046 - DNA, 25 bp, Canis familiaris
tgggtatcgtcggtgtcatgggtgt

SEQ ID NO: 169047 - DNA, 25 bp, Canis familiaris
tgggtcgtatgtggtgtttggtgct

SEQ ID NO: 169048 - DNA, 25 bp, Canis familiaris
tgtgtaagaatgttgtgttaagtta

SEQ ID NO: 169049 - DNA, 25 bp, Canis familiaris
tgggaaaatctccatttagttctaa

SEQ ID NO: 169050 - DNA, 25 bp, Canis familiaris
tgggaaaactccatggtccttgtct

SEQ ID NO: 169051 - DNA, 25 bp, Canis familiaris
tggggacagtctggggtccctttct

SEQ ID NO: 169052 - DNA, 25 bp, Canis familiaris
tggggactgatgtgggtcctgggcc

SEQ ID NO: 169053 - DNA, 25 bp, Canis familiaris
tggggactgagacggttctctggcc

SEQ ID NO: 169054 - DNA, 25 bp, Canis familiaris
tgggagacgggggttctctaacaca

SEQ ID NO: 169055 - DNA, 25 bp, Canis familiaris
tgggaacctacggattcttgaaaag

SEQ ID NO: 169056 - DNA, 25 bp, Canis familiaris
tgcggtgtcctagggttttgtcaga

SEQ ID NO: 169057 - DNA, 25 bp, Canis familiaris
tgggcttcctttgttggagtcgact

SEQ ID NO: 169058 - DNA, 25 bp, Canis familiaris
tgggcctttcttgaatggccttacc

SEQ ID NO: 169059 - DNA, 25 bp, Canis familiaris
tgggtccttcttcagatgcatttta

SEQ ID NO: 169060 - DNA, 25 bp, Canis familiaris
tgggccaagtttgcgatgctatttc

SEQ ID NO: 169061 - DNA, 25 bp, Canis familiaris
tgggcctggatcttgggacttcagg

SEQ ID NO: 169062 - DNA, 25 bp, Canis familiaris
tgggccatgaactgaggcactgtgg

SEQ ID NO: 169063 - DNA, 25 bp, Canis familiaris
tgggaatgacagggcagcccaggtg

SEQ ID NO: 169064 - DNA, 25 bp, Canis familiaris
tgggttgaagcacgacccagtgtcc

SEQ ID NO: 169065 - DNA, 25 bp, Canis familiaris
tgggtctgaggacacttggctgttc

SEQ ID NO: 169066 - DNA, 25 bp, Canis familiaris
tgggttgggcatcaacggctgaccc

SEQ ID NO: 169067 - DNA, 25 bp, Canis familiaris
tgggtggtgtggcaccgaccacccg

SEQ ID NO: 169068 - DNA, 25 bp, Canis familiaris
tgggttgttggttcacagacctcac

SEQ ID NO: 169069 - DNA, 25 bp, Canis familiaris
tgggttgttgatcaagcatgtcttg

SEQ ID NO: 169070 - DNA, 25 bp, Canis familiaris
tgggatctagttccaacagccaggg

SEQ ID NO: 169071 - DNA, 25 bp, Canis familiaris
tgggacttgatttcacaaccctgag

SEQ ID NO: 169072 - DNA, 25 bp, Canis familiaris
tgtgggtggtcatccaaagccagtg

SEQ ID NO: 169073 - DNA, 25 bp, Canis familiaris
tgtggattttccccacaaacggagt

SEQ ID NO: 169074 - DNA, 25 bp, Canis familiaris
tgggactgttctttctaaacccgag

SEQ ID NO: 169075 - DNA, 25 bp, Canis familiaris
tgggaggtttaccatcaaacccttg

SEQ ID NO: 169076 - DNA, 25 bp, Canis familiaris
tggggggtctgaggtcatgttccct

SEQ ID NO: 169077 - DNA, 25 bp, Canis familiaris
tgggggtgtctgtgagtgtgtccac

SEQ ID NO: 169078 - DNA, 25 bp, Canis familiaris
tggggaggacgtagcagtcttcgcc

SEQ ID NO: 169079 - DNA, 25 bp, Canis familiaris
tggggagggagagtcccttgctgcc

SEQ ID NO: 169080 - DNA, 25 bp, Canis familiaris
tgggtgaccgaggaggcctcgtgcc

SEQ ID NO: 169081 - DNA, 25 bp, Canis familiaris
tgggggccagattaggcccttggcc

SEQ ID NO: 169082 - DNA, 25 bp, Canis familiaris
tgtggtggaaaaaggacacttgggc

SEQ ID NO: 169083 - DNA, 25 bp, Canis familiaris
tgtgtttagtaatttacacttggac

SEQ ID NO: 169084 - DNA, 25 bp, Canis familiaris
tgtgtttcgaagggtacacgggcgc

SEQ ID NO: 169085 - DNA, 25 bp, Canis familiaris
tgtgtgggtggggagttcacggggg

SEQ ID NO: 169086 - DNA, 25 bp, Canis familiaris
tgtggtgactcctggttgcaagggc

SEQ ID NO: 169087 - DNA, 25 bp, Canis familiaris
tgggtggctcagtggtttagcgtct

SEQ ID NO: 169088 - DNA, 25 bp, Canis familiaris
tgggtggctcagtggtttagcgtct

SEQ ID NO: 169089 - DNA, 25 bp, Canis familiaris
tgggtggctcaacggttgggcaact

SEQ ID NO: 169090 - DNA, 25 bp, Canis familiaris
tgggggctctgctgtgtggagagaa

SEQ ID NO: 169091 - DNA, 25 bp, Canis familiaris
tgggatgagtcctgcatggggagcc

SEQ ID NO: 169092 - DNA, 25 bp, Canis familiaris
tgggattgcctctgcacgagaacat

SEQ ID NO: 169093 - DNA, 25 bp, Canis familiaris
tgggatatgcttgtcctgaacctgg

SEQ ID NO: 169094 - DNA, 25 bp, Canis familiaris
tgggtgatcgctgtacataggcctg

SEQ ID NO: 169095 - DNA, 25 bp, Canis familiaris
tgggcagattctggagagaaggcca

SEQ ID NO: 169096 - DNA, 25 bp, Canis familiaris
tgggtgtgcttggggtagtccatcc

SEQ ID NO: 169097 - DNA, 25 bp, Canis familiaris
tgggtggctattgtccagtgcctac

SEQ ID NO: 169098 - DNA, 25 bp, Canis familiaris
tgggaggaatttctcctgccatgac

SEQ ID NO: 169099 - DNA, 25 bp, Canis familiaris
tgtgtggacagtttctttcccaggg

SEQ ID NO: 169100 - DNA, 25 bp, Canis familiaris
tgtgggaaggttccagttcctgggt

SEQ ID NO: 169101 - DNA, 25 bp, Canis familiaris
tgggagacgtttccagggccaaagt

SEQ ID NO: 169102 - DNA, 25 bp, Canis familiaris
tgtcggacgtttcgaggacgctccg

SEQ ID NO: 169103 - DNA, 25 bp, Canis familiaris
tgtccttgttttcggacactctgcc

SEQ ID NO: 169104 - DNA, 25 bp, Canis familiaris
tgtctctggtcacgggggacacagg

SEQ ID NO: 169105 - DNA, 25 bp, Canis familiaris
tgtggcttgctaccgagggttgagg

SEQ ID NO: 169106 - DNA, 25 bp, Canis familiaris
tgggattggagggagctgagcttga

SEQ ID NO: 169107 - DNA, 25 bp, Canis familiaris
tgggtggatggggagatggatggat

SEQ ID NO: 169108 - DNA, 25 bp, Canis familiaris
tgggcggcatggtgcaagttgaata

SEQ ID NO: 169109 - DNA, 25 bp, Canis familiaris
tgtgctgggggctgaagatgttata

SEQ ID NO: 169110 - DNA, 25 bp, Canis familiaris
tgtgggttgtcatcaagcagttgga

SEQ ID NO: 169111 - DNA, 25 bp, Canis familiaris
tgggcaaggtcatcccagagctgaa

SEQ ID NO: 169112 - DNA, 25 bp, Canis familiaris
tgggcaaggtcttgccgagtggccg

SEQ ID NO: 169113 - DNA, 25 bp, Canis familiaris
tgggtatgtgtgcacccatctggcc

SEQ ID NO: 169114 - DNA, 25 bp, Canis familiaris
tgggtatgtgtctaccattctgcct

SEQ ID NO: 169115 - DNA, 25 bp, Canis familiaris
tgggattgctcctatccattttata

SEQ ID NO: 169116 - DNA, 25 bp, Canis familiaris
tgtgttggcttccatgagcatcgtc

SEQ ID NO: 169117 - DNA, 25 bp, Canis familiaris
tgggggctacgtggcatcattggcc

SEQ ID NO: 169118 - DNA, 25 bp, Canis familiaris
tgggggtgacgatgccatcttgcaa

SEQ ID NO: 169119 - DNA, 25 bp, Canis familiaris
tgtgggatatgagaggacacctata

SEQ ID NO: 169120 - DNA, 25 bp, Canis familiaris
tgggctggcagggcaggaacccatg

SEQ ID NO: 169121 - DNA, 25 bp, Canis familiaris
tggggatgcagggctaacaccaggc

SEQ ID NO: 169122 - DNA, 25 bp, Canis familiaris
tggggatagcaggctactctccagg

SEQ ID NO: 169123 - DNA, 25 bp, Canis familiaris
tgggctgctagctctaatgcctcaa

SEQ ID NO: 169124 - DNA, 25 bp, Canis familiaris
tgggatgggcccaagcatggcatca

SEQ ID NO: 169125 - DNA, 25 bp, Canis familiaris
tgggagggcagccacagatgctagc

SEQ ID NO: 169126 - DNA, 25 bp, Canis familiaris
tgagagagggatcatctaccgggat

SEQ ID NO: 169127 - DNA, 25 bp, Canis familiaris
tgggctgctagtctctgaacaggga

SEQ ID NO: 169128 - DNA, 25 bp, Canis familiaris
tgggtgtgcctgggttgcaagggca

SEQ ID NO: 169129 - DNA, 25 bp, Canis familiaris
tgggtgccagtgtgtgtgccaaagc

SEQ ID NO: 169130 - DNA, 25 bp, Canis familiaris
tgggcccatgggcctggcccaaaaa

SEQ ID NO: 169131 - DNA, 25 bp, Canis familiaris
tgggcctgaagcccgagaccacata

SEQ ID NO: 169132 - DNA, 25 bp, Canis familiaris
tgggcctgacgacactagccaaagt

SEQ ID NO: 169133 - DNA, 25 bp, Canis familiaris
tgggccgatctaacccgaaaagcac

SEQ ID NO: 169134 - DNA, 25 bp, Canis familiaris
tgggggtctgaaccacaaccaaggc

SEQ ID NO: 169135 - DNA, 25 bp, Canis familiaris
tgggaggaccaacccaaaccgagtg

SEQ ID NO: 169136 - DNA, 25 bp, Canis familiaris
tgggaggaccaagaaccagcctcag

SEQ ID NO: 169137 - DNA, 25 bp, Canis familiaris
tggggtttgccaaagagcacgcgct

SEQ ID NO: 169138 - DNA, 25 bp, Canis familiaris
tggggttatccaatggccatcccac

SEQ ID NO: 169139 - DNA, 25 bp, Canis familiaris
tgggtgtgaaccaaggcaccaccgc

SEQ ID NO: 169140 - DNA, 25 bp, Canis familiaris
tgggtgaaagcaacacccacaccca

SEQ ID NO: 169141 - DNA, 25 bp, Canis familiaris
tgggtgaccatgtaaccaacctgcg

SEQ ID NO: 169142 - DNA, 25 bp, Canis familiaris
tgggtgaccatgtaaccaacctgcg

SEQ ID NO: 169143 - DNA, 25 bp, Canis familiaris
tgggtgaccatgtaaccaacctgcg

SEQ ID NO: 169144 - DNA, 25 bp, Canis familiaris
tgggtgagccgttgacataccactc

SEQ ID NO: 169145 - DNA, 25 bp, Canis familiaris
tgggcgagtctgatgactccatcct

SEQ ID NO: 169146 - DNA, 25 bp, Canis familiaris
tgggaggacatttgacccacctcga

SEQ ID NO: 169147 - DNA, 25 bp, Canis familiaris
tgtggggacttgaagcccaaccccg

SEQ ID NO: 169148 - DNA, 25 bp, Canis familiaris
tgtgtggtccaaaatgtccagcccc

SEQ ID NO: 169149 - DNA, 25 bp, Canis familiaris
tggggtctctatttgtcaaccccga

SEQ ID NO: 169150 - DNA, 25 bp, Canis familiaris
tgggcttcttgtttgattatgcccc

SEQ ID NO: 169151 - DNA, 25 bp, Canis familiaris
tgggctgtcttcgttatcattgtaa

SEQ ID NO: 169152 - DNA, 25 bp, Canis familiaris
tgggaccttgcagtaataatgatgt

SEQ ID NO: 169153 - DNA, 25 bp, Canis familiaris
tgggcactcctggtcacaattgaga

SEQ ID NO: 169154 - DNA, 25 bp, Canis familiaris
tgggacttgctgggcagctgaagga

SEQ ID NO: 169155 - DNA, 25 bp, Canis familiaris
tgggctcatcatagtggctgtgacg

SEQ ID NO: 169156 - DNA, 25 bp, Canis familiaris
tgggcttaatgtgctgcccacgggc

SEQ ID NO: 169157 - DNA, 25 bp, Canis familiaris
tgtgaattatttatccatctcgggc

SEQ ID NO: 169158 - DNA, 25 bp, Canis familiaris
tgggaattcttcatcactacttggc

SEQ ID NO: 169159 - DNA, 25 bp, Canis familiaris
tgggttatttcaaccttttggctat

SEQ ID NO: 169160 - DNA, 25 bp, Canis familiaris
tgggtattttcggtctctttgacta

SEQ ID NO: 169161 - DNA, 25 bp, Canis familiaris
tgtggtatgtttgtccctattatct

SEQ ID NO: 169162 - DNA, 25 bp, Canis familiaris
tgggtggctttattcagcccattcc

SEQ ID NO: 169163 - DNA, 25 bp, Canis familiaris
tgggttctttcattagcatcctccc

SEQ ID NO: 169164 - DNA, 25 bp, Canis familiaris
tgggattttcctgcagcaactccca

SEQ ID NO: 169165 - DNA, 25 bp, Canis familiaris
tgggcattatctccgatggcaaccc

SEQ ID NO: 169166 - DNA, 25 bp, Canis familiaris
tgggaggtctggaaggatctgccgc

SEQ ID NO: 169167 - DNA, 25 bp, Canis familiaris
tgggggacgcaaagcgacagctcga

SEQ ID NO: 169168 - DNA, 25 bp, Canis familiaris
tgggggactctattggagcagccgt

SEQ ID NO: 169169 - DNA, 25 bp, Canis familiaris
tgacgggatcctgtacgacacgtac

SEQ ID NO: 169170 - DNA, 25 bp, Canis familiaris
tgtgcccgatttcatacgactttaa

SEQ ID NO: 169171 - DNA, 25 bp, Canis familiaris
tgtgcccgtcatcgtgaacaatttt

SEQ ID NO: 169172 - DNA, 25 bp, Canis familiaris
tgtcctgctagatggaacatagatt

SEQ ID NO: 169173 - DNA, 25 bp, Canis familiaris
tgtgcgcgtcaaaggaagtcagttt

SEQ ID NO: 169174 - DNA, 25 bp, Canis familiaris
tgtggctgtgagcatgctaaccggt

SEQ ID NO: 169175 - DNA, 25 bp, Canis familiaris
tgggcatacatgccttacaccgtgc

SEQ ID NO: 169176 - DNA, 25 bp, Canis familiaris
tgggatatgatgcttgatcgcccgt

SEQ ID NO: 169177 - DNA, 25 bp, Canis familiaris
tgggtcagatgagctcatcagcccg

SEQ ID NO: 169178 - DNA, 25 bp, Canis familiaris
tgggtgatgagagccagcgcccaga

SEQ ID NO: 169179 - DNA, 25 bp, Canis familiaris
tgggtgtggcaggagccaaccgacc

SEQ ID NO: 169180 - DNA, 25 bp, Canis familiaris
tgtcgtgtgagggtccagactggac

SEQ ID NO: 169181 - DNA, 25 bp, Canis familiaris
tgtctctggaactcgctaccaagga

SEQ ID NO: 169182 - DNA, 25 bp, Canis familiaris
tgttcagagaactcagttggcaggg

SEQ ID NO: 169183 - DNA, 25 bp, Canis familiaris
tgctcaaactcctcagggtgcagga

SEQ ID NO: 169184 - DNA, 25 bp, Canis familiaris
tgaattttgcaaacaggggaggaaa

SEQ ID NO: 169185 - DNA, 25 bp, Canis familiaris
tgtctcttctaaaagcggaagcgct

SEQ ID NO: 169186 - DNA, 25 bp, Canis familiaris
tgtgcttcttacttgaaggggcgat

SEQ ID NO: 169187 - DNA, 25 bp, Canis familiaris
tgggtcctgagcatgagctgtggcc

SEQ ID NO: 169188 - DNA, 25 bp, Canis familiaris
tgggtcggaggggcgtggtacttat

SEQ ID NO: 169189 - DNA, 25 bp, Canis familiaris
tgggtcggaagggggggacatcaag

SEQ ID NO: 169190 - DNA, 25 bp, Canis familiaris
tgggggtggaggcgcaaggacaaag

SEQ ID NO: 169191 - DNA, 25 bp, Canis familiaris
tgggcaggggaggttactaaaagat

SEQ ID NO: 169192 - DNA, 25 bp, Canis familiaris
tgggagggaggggtcctgaacacct

SEQ ID NO: 169193 - DNA, 25 bp, Canis familiaris
tgggcgtggatacggtttgactcac

SEQ ID NO: 169194 - DNA, 25 bp, Canis familiaris
tgggcgtggataccgtttagactca

SEQ ID NO: 169195 - DNA, 25 bp, Canis familiaris
tgggcgtggatagcggtttgactca

SEQ ID NO: 169196 - DNA, 25 bp, Canis familiaris
tgggcgtggatagcggtttgactca

SEQ ID NO: 169197 - DNA, 25 bp, Canis familiaris
tgggcgtggatagcggtttgactca

SEQ ID NO: 169198 - DNA, 25 bp, Canis familiaris
tgggagggctgagttcctttgaccc

SEQ ID NO: 169199 - DNA, 25 bp, Canis familiaris
tgggagggctgagttcctttgaccc

SEQ ID NO: 169200 - DNA, 25 bp, Canis familiaris
tgggagggctgagttcctttgaccc

SEQ ID NO: 169201 - DNA, 25 bp, Canis familiaris
tgggagggctgagttcctttgaccc

SEQ ID NO: 169202 - DNA, 25 bp, Canis familiaris
tgggaggtctgagttccctgtgatc

SEQ ID NO: 169203 - DNA, 25 bp, Canis familiaris
tgaggaggtctacttgccttgggta

SEQ ID NO: 169204 - DNA, 25 bp, Canis familiaris
tgggcggtttctgcttagatggtca

SEQ ID NO: 169205 - DNA, 25 bp, Canis familiaris
tgtggaggttttgttggattgtgat

SEQ ID NO: 169206 - DNA, 25 bp, Canis familiaris
tgggagttgttgttttagcctgctg

SEQ ID NO: 169207 - DNA, 25 bp, Canis familiaris
tgggattgtgactttcttatccgcc

SEQ ID NO: 169208 - DNA, 25 bp, Canis familiaris
tgggacattagcgtctacttcctga

SEQ ID NO: 169209 - DNA, 25 bp, Canis familiaris
tgggagctctgagacttctttcttc

SEQ ID NO: 169210 - DNA, 25 bp, Canis familiaris
tgtaacttggttgtattttatatta

SEQ ID NO: 169211 - DNA, 25 bp, Canis familiaris
tgtggtctttttgttttttacatag

SEQ ID NO: 169212 - DNA, 25 bp, Canis familiaris
tgggtgctttttggtttgttctaca

SEQ ID NO: 169213 - DNA, 25 bp, Canis familiaris
tgggtgattattttttctttttgct

SEQ ID NO: 169214 - DNA, 25 bp, Canis familiaris
tgggtaactttatttttttcatgct

SEQ ID NO: 169215 - DNA, 25 bp, Canis familiaris
tgggtattcttttatgtatttgcat

SEQ ID NO: 169216 - DNA, 25 bp, Canis familiaris
tgggttgtggtttcagtctagctca

SEQ ID NO: 169217 - DNA, 25 bp, Canis familiaris
tgggtgtgggttgtgctgtcaccta

SEQ ID NO: 169218 - DNA, 25 bp, Canis familiaris
tgggagtggaggcgggtactgctca

SEQ ID NO: 169219 - DNA, 25 bp, Canis familiaris
tgggaagacattccgggatcacctc

SEQ ID NO: 169220 - DNA, 25 bp, Canis familiaris
tgggataagctgtgcgtgtggcctc

SEQ ID NO: 169221 - DNA, 25 bp, Canis familiaris
tgggtgacctgggtgttgagcacgc

SEQ ID NO: 169222 - DNA, 25 bp, Canis familiaris
tgggtggcgcaggtttggcgcctgc

SEQ ID NO: 169223 - DNA, 25 bp, Canis familiaris
tgggtggagtggtacatgcgcgccc

SEQ ID NO: 169224 - DNA, 25 bp, Canis familiaris
tgggagggggaagctgctggcatca

SEQ ID NO: 169225 - DNA, 25 bp, Canis familiaris
tgggagggagaggggctgtcagcaa

SEQ ID NO: 169226 - DNA, 25 bp, Canis familiaris
tgggaatgtgtgccggaatatcagc

SEQ ID NO: 169227 - DNA, 25 bp, Canis familiaris
tgggtagagctgcggcacatgcaca

SEQ ID NO: 169228 - DNA, 25 bp, Canis familiaris
tgggtgagactgcactgacccatct

SEQ ID NO: 169229 - DNA, 25 bp, Canis familiaris
tagtcacagactcaggaccaattgc

SEQ ID NO: 169230 - DNA, 25 bp, Canis familiaris
tctgaacagcctctgaaggtaatgc

SEQ ID NO: 169231 - DNA, 25 bp, Canis familiaris
tgtgagcaaaatctgggccataatg

SEQ ID NO: 169232 - DNA, 25 bp, Canis familiaris
tgtgtgaagcactggggctcaccat

SEQ ID NO: 169233 - DNA, 25 bp, Canis familiaris
tgggcaacacaaggggacacctagc

SEQ ID NO: 169234 - DNA, 25 bp, Canis familiaris
tgggagagctgaaggggacgccggc

SEQ ID NO: 169235 - DNA, 25 bp, Canis familiaris
tgtggagagctttggggaccgggag

SEQ ID NO: 169236 - DNA, 25 bp, Canis familiaris
tgtggagagctttggggaccgggag

SEQ ID NO: 169237 - DNA, 25 bp, Canis familiaris
tgggaagcttgtcatcaacgggaag

SEQ ID NO: 169238 - DNA, 25 bp, Canis familiaris
tgggaattgtgggtcaacaagaaag

SEQ ID NO: 169239 - DNA, 25 bp, Canis familiaris
tgggctattctagaccacaacagaa

SEQ ID NO: 169240 - DNA, 25 bp, Canis familiaris
tgggatatatccactcacacacaca

SEQ ID NO: 169241 - DNA, 25 bp, Canis familiaris
tgggtgtacgtgactgctcacacac

SEQ ID NO: 169242 - DNA, 25 bp, Canis familiaris
tgggtatgcagactgactcctgccc

SEQ ID NO: 169243 - DNA, 25 bp, Canis familiaris
tgggtagagagtactatttccaagt

SEQ ID NO: 169244 - DNA, 25 bp, Canis familiaris
tgggtctatgagtacacagtgtttg

SEQ ID NO: 169245 - DNA, 25 bp, Canis familiaris
tgggtgtctcagtcaagtgtctgcc

SEQ ID NO: 169246 - DNA, 25 bp, Canis familiaris
tgggttccagcacagagtcatactc

SEQ ID NO: 169247 - DNA, 25 bp, Canis familiaris
tgggtgttcagttatagcttattca

SEQ ID NO: 169248 - DNA, 25 bp, Canis familiaris
tgggtgttcttttcatgcatctaaa

SEQ ID NO: 169249 - DNA, 25 bp, Canis familiaris
tgtggttttctttgccttatgaagt

SEQ ID NO: 169250 - DNA, 25 bp, Canis familiaris
tgggtatgtgtctttgctcactcat

SEQ ID NO: 169251 - DNA, 25 bp, Canis familiaris
tgggatgaggtctctgcagcactag

SEQ ID NO: 169252 - DNA, 25 bp, Canis familiaris
tgggagagatcccctggcttgcaga

SEQ ID NO: 169253 - DNA, 25 bp, Canis familiaris
tgggtatatcagtgtgtcttgcaga

SEQ ID NO: 169254 - DNA, 25 bp, Canis familiaris
tgggtcatgaattgggctttgagga

SEQ ID NO: 169255 - DNA, 25 bp, Canis familiaris
tgggcatcaagttattccatggggg

SEQ ID NO: 169256 - DNA, 25 bp, Canis familiaris
tgggctcaaagatctccgttgggag

SEQ ID NO: 169257 - DNA, 25 bp, Canis familiaris
tgggtacaatcatctaggctctggc

SEQ ID NO: 169258 - DNA, 25 bp, Canis familiaris
tgggaagaacatgtgtggcctggcc

SEQ ID NO: 169259 - DNA, 25 bp, Canis familiaris
tgggaggatctctatgggtgccgag

SEQ ID NO: 169260 - DNA, 25 bp, Canis familiaris
tgtggacgtctctgtttggaaggga

SEQ ID NO: 169261 - DNA, 25 bp, Canis familiaris
tgtgggtgtctacgtgtgtgcgaac

SEQ ID NO: 169262 - DNA, 25 bp, Canis familiaris
tgggtttcgactttgatggcacgcc

SEQ ID NO: 169263 - DNA, 25 bp, Canis familiaris
tgggttctcagacttctgactgccc

SEQ ID NO: 169264 - DNA, 25 bp, Canis familiaris
tgggttctcagacttctgactccaa

SEQ ID NO: 169265 - DNA, 25 bp, Canis familiaris
tgggttctcagacttctgactccaa

SEQ ID NO: 169266 - DNA, 25 bp, Canis familiaris
tgggtgtgcgagagctctgcaccca

SEQ ID NO: 169267 - DNA, 25 bp, Canis familiaris
tgggttgcctgaatgttgtcaccaa

SEQ ID NO: 169268 - DNA, 25 bp, Canis familiaris
tgggttacgtctcgatgtaccacat

SEQ ID NO: 169269 - DNA, 25 bp, Canis familiaris
tgggtatcacgctctgatctacccg

SEQ ID NO: 169270 - DNA, 25 bp, Canis familiaris
tgggttcctctcggaatgacgcaag

SEQ ID NO: 169271 - DNA, 25 bp, Canis familiaris
tgggtgtcatccaagcagtggacga

SEQ ID NO: 169272 - DNA, 25 bp, Canis familiaris
tgggtgtcacagctgcactggaatc

SEQ ID NO: 169273 - DNA, 25 bp, Canis familiaris
tgtggtgtcccgtccatgatggacg

SEQ ID NO: 169274 - DNA, 25 bp, Canis familiaris
tgtggtggctgttgtccgatgacac

SEQ ID NO: 169275 - DNA, 25 bp, Canis familiaris
tgggtgagcgagatcctggacatga

SEQ ID NO: 169276 - DNA, 25 bp, Canis familiaris
tgggtacgagtggccgcgagagcca

SEQ ID NO: 169277 - DNA, 25 bp, Canis familiaris
tgggtcacagggtccaggagaccct

SEQ ID NO: 169278 - DNA, 25 bp, Canis familiaris
tgtgggacttgatcctggaactcct

SEQ ID NO: 169279 - DNA, 25 bp, Canis familiaris
tgggaatgttcttccttaactcctt

SEQ ID NO: 169280 - DNA, 25 bp, Canis familiaris
tgggagatggcttttttggaccctc

SEQ ID NO: 169281 - DNA, 25 bp, Canis familiaris
tgaggacaggtacttagggacagca

SEQ ID NO: 169282 - DNA, 25 bp, Canis familiaris
tgggacatgatgagcttagcctagg

SEQ ID NO: 169283 - DNA, 25 bp, Canis familiaris
tgggcaatggttactactcagatgg

SEQ ID NO: 169284 - DNA, 25 bp, Canis familiaris
tgggcagtggaatctcaggcattgt

SEQ ID NO: 169285 - DNA, 25 bp, Canis familiaris
tgggctgagggaattcgacattgtc

SEQ ID NO: 169286 - DNA, 25 bp, Canis familiaris
tgggtacaggaatctgccatctacg

SEQ ID NO: 169287 - DNA, 25 bp, Canis familiaris
tgggacacaggacacggacatacgt

SEQ ID NO: 169288 - DNA, 25 bp, Canis familiaris
tgcgaaacaagacactgcctaacct

SEQ ID NO: 169289 - DNA, 25 bp, Canis familiaris
tgtggcccaaagcagagccttgacc

SEQ ID NO: 169290 - DNA, 25 bp, Canis familiaris
tgtggaaaccggtacctagagcctt

SEQ ID NO: 169291 - DNA, 25 bp, Canis familiaris
tgggaagaccgactctcgaagacct

SEQ ID NO: 169292 - DNA, 25 bp, Canis familiaris
tgggaaacgctacttcgaatgccag

SEQ ID NO: 169293 - DNA, 25 bp, Canis familiaris
tgtaagccatcctaaatccttccag

SEQ ID NO: 169294 - DNA, 25 bp, Canis familiaris
tgtgtaagcccatgagcaacttccg

SEQ ID NO: 169295 - DNA, 25 bp, Canis familiaris
tgtggccccacaaggaaattccttt

SEQ ID NO: 169296 - DNA, 25 bp, Canis familiaris
tgtgagtctcaacaaaagtacctat

SEQ ID NO: 169297 - DNA, 25 bp, Canis familiaris
tgggtctacatgccaatcgagtgac

SEQ ID NO: 169298 - DNA, 25 bp, Canis familiaris
tgggatatgatctacactggttgtc

SEQ ID NO: 169299 - DNA, 25 bp, Canis familiaris
tgggagcagacatatctggccaggc

SEQ ID NO: 169300 - DNA, 25 bp, Canis familiaris
tgggacaacatctacaacagcaggt

SEQ ID NO: 169301 - DNA, 25 bp, Canis familiaris
tgggaagaatgcaaccagctgcctg

SEQ ID NO: 169302 - DNA, 25 bp, Canis familiaris
tgggaatatactcaagctgtctgct

SEQ ID NO: 169303 - DNA, 25 bp, Canis familiaris
tgggattgattcccatatcaggctc

SEQ ID NO: 169304 - DNA, 25 bp, Canis familiaris
tgggatcgagctctgtgtcaggctc

SEQ ID NO: 169305 - DNA, 25 bp, Canis familiaris
tgggatcaagtccctgcatcaggct

SEQ ID NO: 169306 - DNA, 25 bp, Canis familiaris
tgggatcaagtccctgcatcaggct

SEQ ID NO: 169307 - DNA, 25 bp, Canis familiaris
tgggctcaaggcactcacaggagtc

SEQ ID NO: 169308 - DNA, 25 bp, Canis familiaris
tgggctccatgccggacacggagcc

SEQ ID NO: 169309 - DNA, 25 bp, Canis familiaris
tgggcaaccagatacacttggcctc

SEQ ID NO: 169310 - DNA, 25 bp, Canis familiaris
tgggtaacacaggactttcctctgc

SEQ ID NO: 169311 - DNA, 25 bp, Canis familiaris
tgggctaaattggatcttacctgga

SEQ ID NO: 169312 - DNA, 25 bp, Canis familiaris
tgggcagaagacagattcccctgga

SEQ ID NO: 169313 - DNA, 25 bp, Canis familiaris
tgggcagtcgtcacaatgaccacgg

SEQ ID NO: 169314 - DNA, 25 bp, Canis familiaris
tgggagaagcctgtgcatgacccgg

SEQ ID NO: 169315 - DNA, 25 bp, Canis familiaris
tgggaacagcctgtctacacacagc

SEQ ID NO: 169316 - DNA, 25 bp, Canis familiaris
tgtggcataacctctgtacacaggc

SEQ ID NO: 169317 - DNA, 25 bp, Canis familiaris
tgtggataacctgtattaccgccgt

SEQ ID NO: 169318 - DNA, 25 bp, Canis familiaris
tgggaggaccatgggttaccaccta

SEQ ID NO: 169319 - DNA, 25 bp, Canis familiaris
tgggactgaccctggtatggatcct

SEQ ID NO: 169320 - DNA, 25 bp, Canis familiaris
tgtggacgacgtctggctgatgttc

SEQ ID NO: 169321 - DNA, 25 bp, Canis familiaris
tgtggaccccagatcttggtgtccc

SEQ ID NO: 169322 - DNA, 25 bp, Canis familiaris
tgggcaattccgagcttggtgtgca

SEQ ID NO: 169323 - DNA, 25 bp, Canis familiaris
tgggccactcggagatcgtggtgca

SEQ ID NO: 169324 - DNA, 25 bp, Canis familiaris
tgggccctgggagagtgctggccag

SEQ ID NO: 169325 - DNA, 25 bp, Canis familiaris
tgatccccggggaagacggacgaca

SEQ ID NO: 169326 - DNA, 25 bp, Canis familiaris
tgtcccgctagaacctacggtggaa

SEQ ID NO: 169327 - DNA, 25 bp, Canis familiaris
tgtggcccaagagcctggggctcag

SEQ ID NO: 169328 - DNA, 25 bp, Canis familiaris
tgggccgagaggcgttgggctggcc

SEQ ID NO: 169329 - DNA, 25 bp, Canis familiaris
tgggcccggaggaccgggctgggca

SEQ ID NO: 169330 - DNA, 25 bp, Canis familiaris
tgggccaagcaagggtgggtggtgg

SEQ ID NO: 169331 - DNA, 25 bp, Canis familiaris
tgggccataggagggggctgggcac

SEQ ID NO: 169332 - DNA, 25 bp, Canis familiaris
tgggacatcagtgaggctggcgggc

SEQ ID NO: 169333 - DNA, 25 bp, Canis familiaris
tgggtatagctccaggctgacccag

SEQ ID NO: 169334 - DNA, 25 bp, Canis familiaris
tgggcctatctggggtgagcccgag

SEQ ID NO: 169335 - DNA, 25 bp, Canis familiaris
tgggactctatgctgggcagctggc

SEQ ID NO: 169336 - DNA, 25 bp, Canis familiaris
tgggagcctgagatgccgatgtgtc

SEQ ID NO: 169337 - DNA, 25 bp, Canis familiaris
tgggcaactggcttctcagatgtgt

SEQ ID NO: 169338 - DNA, 25 bp, Canis familiaris
tgggccctgccaattaatgttaaag

SEQ ID NO: 169339 - DNA, 25 bp, Canis familiaris
tgggccggccggaagttgtagtaga

SEQ ID NO: 169340 - DNA, 25 bp, Canis familiaris
tgggttgggcgtcattgtgtcgcat

SEQ ID NO: 169341 - DNA, 25 bp, Canis familiaris
tgggttgggcttcaatgtttcgcat

SEQ ID NO: 169342 - DNA, 25 bp, Canis familiaris
tgggcttaaattcaatcctgccccc

SEQ ID NO: 169343 - DNA, 25 bp, Canis familiaris
tgggcttcaaacctaagcctcccaa

SEQ ID NO: 169344 - DNA, 25 bp, Canis familiaris
tgggcttcatcaacatgctgaggcc

SEQ ID NO: 169345 - DNA, 25 bp, Canis familiaris
tgggcatgccattactgggggcttt

SEQ ID NO: 169346 - DNA, 25 bp, Canis familiaris
tgggcaccatgatctgtggctggga

SEQ ID NO: 169347 - DNA, 25 bp, Canis familiaris
tgggcacagccaccatgggaaggga

SEQ ID NO: 169348 - DNA, 25 bp, Canis familiaris
tgggagcacacattctgggaccagg

SEQ ID NO: 169349 - DNA, 25 bp, Canis familiaris
tgtgggacatctctgctcaaacagg

SEQ ID NO: 169350 - DNA, 25 bp, Canis familiaris
tgggcctctctgattcaggcagcag

SEQ ID NO: 169351 - DNA, 25 bp, Canis familiaris
tgggactctctgcgaatgtgacata

SEQ ID NO: 169352 - DNA, 25 bp, Canis familiaris
tgggactgcacctggatggatctca

SEQ ID NO: 169353 - DNA, 25 bp, Canis familiaris
tgggacaggcactgagtggtctcct

SEQ ID NO: 169354 - DNA, 25 bp, Canis familiaris
tgggatctgtgatcgagtcccacgt

SEQ ID NO: 169355 - DNA, 25 bp, Canis familiaris
tgtgtgatttgttaaccacccgtgc

SEQ ID NO: 169356 - DNA, 25 bp, Canis familiaris
tgtggtggttacaccactcccttac

SEQ ID NO: 169357 - DNA, 25 bp, Canis familiaris
tgggtagactaggtctcactccagc

SEQ ID NO: 169358 - DNA, 25 bp, Canis familiaris
tgggttatctcatgatctcccgact

SEQ ID NO: 169359 - DNA, 25 bp, Canis familiaris
tgggttgattcatgtctgcacaggg

SEQ ID NO: 169360 - DNA, 25 bp, Canis familiaris
tgggtttcctgagatgcacatggca

SEQ ID NO: 169361 - DNA, 25 bp, Canis familiaris
tgggtattcctctgatgacatcgac

SEQ ID NO: 169362 - DNA, 25 bp, Canis familiaris
tgggtttgcctctagtgtttcacca

SEQ ID NO: 169363 - DNA, 25 bp, Canis familiaris
tgtctttaagtctgggcttgcccaa

SEQ ID NO: 169364 - DNA, 25 bp, Canis familiaris
tgtcgattaagaccggagcttgtcc

SEQ ID NO: 169365 - DNA, 25 bp, Canis familiaris
tgggctaagaaggcgggcacatgac

SEQ ID NO: 169366 - DNA, 25 bp, Canis familiaris
tgggctacaaggccggcatgactca

SEQ ID NO: 169367 - DNA, 25 bp, Canis familiaris
tgggctcatcattgtgggtgtaaca

SEQ ID NO: 169368 - DNA, 25 bp, Canis familiaris
tgggctcctggcccagttatagcag

SEQ ID NO: 169369 - DNA, 25 bp, Canis familiaris
tgggatctcagggtcatgtgttcga

SEQ ID NO: 169370 - DNA, 25 bp, Canis familiaris
tgggactagctgtcttcttgtcaca

SEQ ID NO: 169371 - DNA, 25 bp, Canis familiaris
tgagtgatcaggcaattcggtcaat

SEQ ID NO: 169372 - DNA, 25 bp, Canis familiaris
tgggcatcattggtacctggtgact

SEQ ID NO: 169373 - DNA, 25 bp, Canis familiaris
tgggattgggcttcagtgtgagaac

SEQ ID NO: 169374 - DNA, 25 bp, Canis familiaris
tgggactctggttcagtggggagcc

SEQ ID NO: 169375 - DNA, 25 bp, Canis familiaris
tgggcagtctctttatcgggacagc

SEQ ID NO: 169376 - DNA, 25 bp, Canis familiaris
tgggcaatttctatatcaggacagc

SEQ ID NO: 169377 - DNA, 25 bp, Canis familiaris
tgtctgcacagctcctaaaggacag

SEQ ID NO: 169378 - DNA, 25 bp, Canis familiaris
tgtctgaagacagctacagtgtact

SEQ ID NO: 169379 - DNA, 25 bp, Canis familiaris
tgtggaagccacatctcagtgttct

SEQ ID NO: 169380 - DNA, 25 bp, Canis familiaris
tgtgtactctacatgcacactttcc

SEQ ID NO: 169381 - DNA, 25 bp, Canis familiaris
tgggactgtgaagtgaagccctccg

SEQ ID NO: 169382 - DNA, 25 bp, Canis familiaris
tgggatccagagagaagcacccccc

SEQ ID NO: 169383 - DNA, 25 bp, Canis familiaris
tgggaggaggatggcaggcccaccc

SEQ ID NO: 169384 - DNA, 25 bp, Canis familiaris
tgggaggagcggcactgccgcttcc

SEQ ID NO: 169385 - DNA, 25 bp, Canis familiaris
tgggatggagccgggagactgcttc

SEQ ID NO: 169386 - DNA, 25 bp, Canis familiaris
tgggcatccgcctggataatgcttc

SEQ ID NO: 169387 - DNA, 25 bp, Canis familiaris
tgggcatccgcctggacaacgcctc

SEQ ID NO: 169388 - DNA, 25 bp, Canis familiaris
tgggcaaggacgggactttgcgccc

SEQ ID NO: 169389 - DNA, 25 bp, Canis familiaris
tgggcaaggagccggggctctggtc

SEQ ID NO: 169390 - DNA, 25 bp, Canis familiaris
tgggactggatttgggggctgagct

SEQ ID NO: 169391 - DNA, 25 bp, Canis familiaris
tgggctcatgccatgatggggggca

SEQ ID NO: 169392 - DNA, 25 bp, Canis familiaris
tgggctgactcttatggggtgacac

SEQ ID NO: 169393 - DNA, 25 bp, Canis familiaris
tgggctgagctctttgtggatgatg

SEQ ID NO: 169394 - DNA, 25 bp, Canis familiaris
tgggagatgcagtgtgtggtgtgtg

SEQ ID NO: 169395 - DNA, 25 bp, Canis familiaris
tgtggaatcatctggtctttctgga

SEQ ID NO: 169396 - DNA, 25 bp, Canis familiaris
tgggataccaacggctgtactcaga

SEQ ID NO: 169397 - DNA, 25 bp, Canis familiaris
tgggaacgaggcttcttcctcagtg

SEQ ID NO: 169398 - DNA, 25 bp, Canis familiaris
tgggagtgcgggttgattccacagc

SEQ ID NO: 169399 - DNA, 25 bp, Canis familiaris
tgtggcggggagtgcagatcccact

SEQ ID NO: 169400 - DNA, 25 bp, Canis familiaris
tgggcaggggatttgggctccatta

SEQ ID NO: 169401 - DNA, 25 bp, Canis familiaris
tgggagaggggaggggtcctgtgtc

SEQ ID NO: 169402 - DNA, 25 bp, Canis familiaris
tgggaagagggtgggctcctttctc

SEQ ID NO: 169403 - DNA, 25 bp, Canis familiaris
tgggcgagagggaccctacgttgct

SEQ ID NO: 169404 - DNA, 25 bp, Canis familiaris
tgggactgaaggaccccgaggagct

SEQ ID NO: 169405 - DNA, 25 bp, Canis familiaris
tgggcacagaagtgccctccaggcc

SEQ ID NO: 169406 - DNA, 25 bp, Canis familiaris
tgggaagcagactgccttcttctcg

SEQ ID NO: 169407 - DNA, 25 bp, Canis familiaris
tgggacagcacacacactacctgca

SEQ ID NO: 169408 - DNA, 25 bp, Canis familiaris
tgtggaccaagcccagagaccatga

SEQ ID NO: 169409 - DNA, 25 bp, Canis familiaris
tgggccctccagaaagaacatgatg

SEQ ID NO: 169410 - DNA, 25 bp, Canis familiaris
tgggcacccacagagagacgagatg

SEQ ID NO: 169411 - DNA, 25 bp, Canis familiaris
tgggcagacctcaaaacactgttgt

SEQ ID NO: 169412 - DNA, 25 bp, Canis familiaris
tgggatacccaatcccaggtgacca

SEQ ID NO: 169413 - DNA, 25 bp, Canis familiaris
tgggatacttgatgtctctccgtga

SEQ ID NO: 169414 - DNA, 25 bp, Canis familiaris
tgggactttgaattgttccccagca

SEQ ID NO: 169415 - DNA, 25 bp, Canis familiaris
tgggatgcattaaaatttgctttca

SEQ ID NO: 169416 - DNA, 25 bp, Canis familiaris
tgtgtgtcataaaaagcacttttaa

SEQ ID NO: 169417 - DNA, 25 bp, Canis familiaris
tgtgtggcccacaaactctttaaca

SEQ ID NO: 169418 - DNA, 25 bp, Canis familiaris
tgtgtgggctcagaagccgctttca

SEQ ID NO: 169419 - DNA, 25 bp, Canis familiaris
tgggagacgcaggcacaactcttta

SEQ ID NO: 169420 - DNA, 25 bp, Canis familiaris
tgggagatcgaggaccagctggccc

SEQ ID NO: 169421 - DNA, 25 bp, Canis familiaris
tgggcaacctggtccagatggcccc

SEQ ID NO: 169422 - DNA, 25 bp, Canis familiaris
tgggacacttggttacagaccctct

SEQ ID NO: 169423 - DNA, 25 bp, Canis familiaris
tgtggaacttaggggcaccagcctc

SEQ ID NO: 169424 - DNA, 25 bp, Canis familiaris
tgggaacgtggtgaaccaggccaac

SEQ ID NO: 169425 - DNA, 25 bp, Canis familiaris
tgggccaactggtcaacaacggccg

SEQ ID NO: 169426 - DNA, 25 bp, Canis familiaris
tgggcctactagtcgacaacgaggg

SEQ ID NO: 169427 - DNA, 25 bp, Canis familiaris
tgggcctcactcgttaaactgggag

SEQ ID NO: 169428 - DNA, 25 bp, Canis familiaris
tgggctgtgcccttataaagctggg

SEQ ID NO: 169429 - DNA, 25 bp, Canis familiaris
tgggatgtcaacttcatcacctctg

SEQ ID NO: 169430 - DNA, 25 bp, Canis familiaris
tgggcattaattaccagcctcccac

SEQ ID NO: 169431 - DNA, 25 bp, Canis familiaris
tgggaggagttgtccacactttcac

SEQ ID NO: 169432 - DNA, 25 bp, Canis familiaris
tgggcaggattttcccctagaatac

SEQ ID NO: 169433 - DNA, 25 bp, Canis familiaris
tgggagatctctttgtccccaaatt

SEQ ID NO: 169434 - DNA, 25 bp, Canis familiaris
tgggagaccttgttggccaaaagaa

SEQ ID NO: 169435 - DNA, 25 bp, Canis familiaris
tgtgaggatcctgattggcccaaag

SEQ ID NO: 169436 - DNA, 25 bp, Canis familiaris
tgtgtagacactgcatcgtcagcct

SEQ ID NO: 169437 - DNA, 25 bp, Canis familiaris
tgggaacagacgagtgcagccactc

SEQ ID NO: 169438 - DNA, 25 bp, Canis familiaris
tgggcagacgatgtggatcgccggg

SEQ ID NO: 169439 - DNA, 25 bp, Canis familiaris
tgggctacactgaggaccaggtggt

SEQ ID NO: 169440 - DNA, 25 bp, Canis familiaris
tgggctacactgaggaccaggttgt

SEQ ID NO: 169441 - DNA, 25 bp, Canis familiaris
tgggctacactgaggaccaggttgt

SEQ ID NO: 169442 - DNA, 25 bp, Canis familiaris
tgggctacactgagcaccaggtggt

SEQ ID NO: 169443 - DNA, 25 bp, Canis familiaris
tgggaggcacttgcactcatggtgc

SEQ ID NO: 169444 - DNA, 25 bp, Canis familiaris
tgggaggagctttcagtttctgccc

SEQ ID NO: 169445 - DNA, 25 bp, Canis familiaris
tgggaggcagcttatttctgccccc

SEQ ID NO: 169446 - DNA, 25 bp, Canis familiaris
tgtgggatgcagagttctcccgttc

SEQ ID NO: 169447 - DNA, 25 bp, Canis familiaris
tgggaattgaagttcccacctttga

SEQ ID NO: 169448 - DNA, 25 bp, Canis familiaris
taggaatttagattataacctttcg

SEQ ID NO: 169449 - DNA, 25 bp, Canis familiaris
tgggaaatttatagcaaagcctttt

SEQ ID NO: 169450 - DNA, 25 bp, Canis familiaris
tgggaccatctttaaaactctctct

SEQ ID NO: 169451 - DNA, 25 bp, Canis familiaris
tgggacctgctaaatagtcctgtcc

SEQ ID NO: 169452 - DNA, 25 bp, Canis familiaris
tgggagcctcatcattggttatgcc

SEQ ID NO: 169453 - DNA, 25 bp, Canis familiaris
tgggacctgctcagggtcttgcaaa

SEQ ID NO: 169454 - DNA, 25 bp, Canis familiaris
tgggaccatgagccggtcacggcaa

SEQ ID NO: 169455 - DNA, 25 bp, Canis familiaris
tgggaccatggaccattcactgtgc

SEQ ID NO: 169456 - DNA, 25 bp, Canis familiaris
tgggcacacatgtgtcattctgttg

SEQ ID NO: 169457 - DNA, 25 bp, Canis familiaris
tgggagacagagctgcttcaactga

SEQ ID NO: 169458 - DNA, 25 bp, Canis familiaris
tgggaaggcagtggcttgcgatcca

SEQ ID NO: 169459 - DNA, 25 bp, Canis familiaris
tgggaggctcagtgctgtgcctcat

SEQ ID NO: 169460 - DNA, 25 bp, Canis familiaris
tgggagctgctatttctatgaccta

SEQ ID NO: 169461 - DNA, 25 bp, Canis familiaris
tgggagctgctgctgtctttgaata

SEQ ID NO: 169462 - DNA, 25 bp, Canis familiaris
tgtgttcctgtttcctctgaaaaaa

SEQ ID NO: 169463 - DNA, 25 bp, Canis familiaris
tcgggtcgtcttccctaaggagaag

SEQ ID NO: 169464 - DNA, 25 bp, Canis familiaris
tgcgacgtggacatccgtaaggacc

SEQ ID NO: 169465 - DNA, 25 bp, Canis familiaris
tgtgacgtggacatccggaaggacc

SEQ ID NO: 169466 - DNA, 25 bp, Canis familiaris
ttgggggactctcattgtaggaccg

SEQ ID NO: 169467 - DNA, 25 bp, Canis familiaris
tgggcgggattctgacttagaggcg

SEQ ID NO: 169468 - DNA, 25 bp, Canis familiaris
tgaggaaaatcctccttcatgggcc

SEQ ID NO: 169469 - DNA, 25 bp, Canis familiaris
tgaggaaagggctccttgggtggtc

SEQ ID NO: 169470 - DNA, 25 bp, Canis familiaris
tgggaagggggatgtctgggtggct

SEQ ID NO: 169471 - DNA, 25 bp, Canis familiaris
tgtggagttgggggggggagtggct

SEQ ID NO: 169472 - DNA, 25 bp, Canis familiaris
tgtgggtgggacgtggggaggtgac

SEQ ID NO: 169473 - DNA, 25 bp, Canis familiaris
tgtgggcgtgtgggcgggaaggtaa

SEQ ID NO: 169474 - DNA, 25 bp, Canis familiaris
tgtgtgtcagtgacagagagtgcga

SEQ ID NO: 169475 - DNA, 25 bp, Canis familiaris
tgtggtcaggaaacagctgggaaag

SEQ ID NO: 169476 - DNA, 25 bp, Canis familiaris
tgtgattgcggaaccacggggagct

SEQ ID NO: 169477 - DNA, 25 bp, Canis familiaris
tgtgtcctgtaacccagctggaatt

SEQ ID NO: 169478 - DNA, 25 bp, Canis familiaris
tgagtgacgtaatcccaatgctttg

SEQ ID NO: 169479 - DNA, 25 bp, Canis familiaris
tgggcagcatgcaaaatactcattt

SEQ ID NO: 169480 - DNA, 25 bp, Canis familiaris
tgggcgcaatcagagcacctctgtg

SEQ ID NO: 169481 - DNA, 25 bp, Canis familiaris
tgggagcatcacgggagctgtctta

SEQ ID NO: 169482 - DNA, 25 bp, Canis familiaris
tgggacatccgtcgtggagttgacc

SEQ ID NO: 169483 - DNA, 25 bp, Canis familiaris
tgggctctccgtggatgtagcatat

SEQ ID NO: 169484 - DNA, 25 bp, Canis familiaris
tgggcttgccctggagttggaggct

SEQ ID NO: 169485 - DNA, 25 bp, Canis familiaris
tgggctctccactgggtgtgaagcc

SEQ ID NO: 169486 - DNA, 25 bp, Canis familiaris
tgggcctcatcctgcagaatgtgga

SEQ ID NO: 169487 - DNA, 25 bp, Canis familiaris
tgggcctcatcgctgtaattgcgtg

SEQ ID NO: 169488 - DNA, 25 bp, Canis familiaris
tgggcacaaagccaatatattgcga

SEQ ID NO: 169489 - DNA, 25 bp, Canis familiaris
tgggccagcctggcatttatggcta

SEQ ID NO: 169490 - DNA, 25 bp, Canis familiaris
tgggcggctctgacagttgaacatc

SEQ ID NO: 169491 - DNA, 25 bp, Canis familiaris
tgggctggtgcatcttcatatacaa

SEQ ID NO: 169492 - DNA, 25 bp, Canis familiaris
tgggcaggctgctgattgtctaccc

SEQ ID NO: 169493 - DNA, 25 bp, Canis familiaris
tgggccatgcagggagtggccaccc

SEQ ID NO: 169494 - DNA, 25 bp, Canis familiaris
tgggccgagcttagagtggccccct

SEQ ID NO: 169495 - DNA, 25 bp, Canis familiaris
tgggagtcggtcaagtggtcccttc

SEQ ID NO: 169496 - DNA, 25 bp, Canis familiaris
tgggcgtccagtgtggtgtagcccc

SEQ ID NO: 169497 - DNA, 25 bp, Canis familiaris
tgggcgatctcatcaaggtgacgcc

SEQ ID NO: 169498 - DNA, 25 bp, Canis familiaris
tgggcgagtcagctggtgtccgccc

SEQ ID NO: 169499 - DNA, 25 bp, Canis familiaris
tgggcagtgtagcaacgttcgcctc

SEQ ID NO: 169500 - DNA, 25 bp, Canis familiaris
tgttgcagtctacaagaggtcccgg

SEQ ID NO: 169501 - DNA, 25 bp, Canis familiaris
tgtgtgcgctcgagaaaagccccat

SEQ ID NO: 169502 - DNA, 25 bp, Canis familiaris
tgtgggctcaaacaaaggtgccatc

SEQ ID NO: 169503 - DNA, 25 bp, Canis familiaris
tgggagccgagacaggggctcctcc

SEQ ID NO: 169504 - DNA, 25 bp, Canis familiaris
tgggagggcacagagccatggcttc

SEQ ID NO: 169505 - DNA, 25 bp, Canis familiaris
tgggagaaagcagtgaccagcctct

SEQ ID NO: 169506 - DNA, 25 bp, Canis familiaris
tgggaaagtgcagtagccccacttc

SEQ ID NO: 169507 - DNA, 25 bp, Canis familiaris
tgggagaatggagatgccctgcctc

SEQ ID NO: 169508 - DNA, 25 bp, Canis familiaris
tgggagaatggggggctcgtcacca

SEQ ID NO: 169509 - DNA, 25 bp, Canis familiaris
tgtggacctgggtgactgggagcca

SEQ ID NO: 169510 - DNA, 25 bp, Canis familiaris
tgggcaccgggctggaggtgtgcga

SEQ ID NO: 169511 - DNA, 25 bp, Canis familiaris
tgggcttcggggcctgagttggaga

SEQ ID NO: 169512 - DNA, 25 bp, Canis familiaris
tgtggttctgggacactgggtgggg

SEQ ID NO: 169513 - DNA, 25 bp, Canis familiaris
tgatgttttagcgatcccggtcgga

SEQ ID NO: 169514 - DNA, 25 bp, Canis familiaris
tgtggtatcaactttcagcggtctc

SEQ ID NO: 169515 - DNA, 25 bp, Canis familiaris
tgggactcaactttgagcctcctca

SEQ ID NO: 169516 - DNA, 25 bp, Canis familiaris
tgggaccaaggatttgtctccccta

SEQ ID NO: 169517 - DNA, 25 bp, Canis familiaris
tgggacccagtgtatattcctgccc

SEQ ID NO: 169518 - DNA, 25 bp, Canis familiaris
tgggacgagcggcatttccagtgcc

SEQ ID NO: 169519 - DNA, 25 bp, Canis familiaris
tgtggacaggccggttatcggtgcc

SEQ ID NO: 169520 - DNA, 25 bp, Canis familiaris
tgtggaaacccaaatgagccggcct

SEQ ID NO: 169521 - DNA, 25 bp, Canis familiaris
tgtgggaactcctgggcaggcgttt

SEQ ID NO: 169522 - DNA, 25 bp, Canis familiaris
tgtgggataccctgtggtgtgccca

SEQ ID NO: 169523 - DNA, 25 bp, Canis familiaris
tgggctctagcacgggtgggtgccc

SEQ ID NO: 169524 - DNA, 25 bp, Canis familiaris
tgggctctgtggtgttagtgctccc

SEQ ID NO: 169525 - DNA, 25 bp, Canis familiaris
tgggactgtggcttgcagatcctga

SEQ ID NO: 169526 - DNA, 25 bp, Canis familiaris
tgggagctcgcacagagatccagca

SEQ ID NO: 169527 - DNA, 25 bp, Canis familiaris
tgggcgcggcagaggatggcgacga

SEQ ID NO: 169528 - DNA, 25 bp, Canis familiaris
tgggctggtggctgccatgcagccc

SEQ ID NO: 169529 - DNA, 25 bp, Canis familiaris
tgggctggatttgttaccctgaccg

SEQ ID NO: 169530 - DNA, 25 bp, Canis familiaris
tgtgagggttagttccacccagacc

SEQ ID NO: 169531 - DNA, 25 bp, Canis familiaris
tgtgtgggtttttccagaaggagcc

SEQ ID NO: 169532 - DNA, 25 bp, Canis familiaris
tgtgtgggtgctttagtaaaaaacg

SEQ ID NO: 169533 - DNA, 25 bp, Canis familiaris
tgtgtggtgacctgcagtttgaaaa

SEQ ID NO: 169534 - DNA, 25 bp, Canis familiaris
tgtcggtgaccgtctttgtgtggac

SEQ ID NO: 169535 - DNA, 25 bp, Canis familiaris
tgtgtgggacgttctcattcagtta

SEQ ID NO: 169536 - DNA, 25 bp, Canis familiaris
tgtggactgactttgccttacatta

SEQ ID NO: 169537 - DNA, 25 bp, Canis familiaris
tgtgcaactgttggtcctttcaata

SEQ ID NO: 169538 - DNA, 25 bp, Canis familiaris
tgtggacttttgtcttaatccgcaa

SEQ ID NO: 169539 - DNA, 25 bp, Canis familiaris
tgggcatttttctctggattcaaac

SEQ ID NO: 169540 - DNA, 25 bp, Canis familiaris
tgggcttctttccctaggtgaaaca

SEQ ID NO: 169541 - DNA, 25 bp, Canis familiaris
tgtggcgtctttctcttttgaaata

SEQ ID NO: 169542 - DNA, 25 bp, Canis familiaris
tgtgagggtgtctactttttacttc

SEQ ID NO: 169543 - DNA, 25 bp, Canis familiaris
tgtggagtggttccttctgttagtc

SEQ ID NO: 169544 - DNA, 25 bp, Canis familiaris
tgaggtctggtacatttcaatttca

SEQ ID NO: 169545 - DNA, 25 bp, Canis familiaris
tgtggttggtgtcctttcacttaaa

SEQ ID NO: 169546 - DNA, 25 bp, Canis familiaris
tgggcatttcttctattctgttata

SEQ ID NO: 169547 - DNA, 25 bp, Canis familiaris
tgggcttccataccaatcacattga

SEQ ID NO: 169548 - DNA, 25 bp, Canis familiaris
tgtggattcttacctacccagagac

SEQ ID NO: 169549 - DNA, 25 bp, Canis familiaris
tgtgcacttttacaagccgcaaagg

SEQ ID NO: 169550 - DNA, 25 bp, Canis familiaris
tgtgtgttttgtccacgcacgagaa

SEQ ID NO: 169551 - DNA, 25 bp, Canis familiaris
tgtgtgatttcaccgaggaccagac

SEQ ID NO: 169552 - DNA, 25 bp, Canis familiaris
tgtgagggtactcaggaccccaggg

SEQ ID NO: 169553 - DNA, 25 bp, Canis familiaris
tgtagggaccactgaaccctggggc

SEQ ID NO: 169554 - DNA, 25 bp, Canis familiaris
tgtagggagcctggagaaaccgggc

SEQ ID NO: 169555 - DNA, 25 bp, Canis familiaris
tgtgtggggtctggaaacccgcgac

SEQ ID NO: 169556 - DNA, 25 bp, Canis familiaris
tgtggaggggccccaaactgtggac

SEQ ID NO: 169557 - DNA, 25 bp, Canis familiaris
tgtggacgaggcctccaagaaggag

SEQ ID NO: 169558 - DNA, 25 bp, Canis familiaris
tgggaccattttcatcatcaagggc

SEQ ID NO: 169559 - DNA, 25 bp, Canis familiaris
tgggaccagttagttgctcacaagc

SEQ ID NO: 169560 - DNA, 25 bp, Canis familiaris
tgggaccgtatagcgcataggcaga

SEQ ID NO: 169561 - DNA, 25 bp, Canis familiaris
tgggacagtgtttggcacatagtag

SEQ ID NO: 169562 - DNA, 25 bp, Canis familiaris
tgggacaggagttggcactagccac

SEQ ID NO: 169563 - DNA, 25 bp, Canis familiaris
tgggacaaggccgcactcaggtccc

SEQ ID NO: 169564 - DNA, 25 bp, Canis familiaris
tgtggacaaggtgacctacggctcc

SEQ ID NO: 169565 - DNA, 25 bp, Canis familiaris
tgggcaagggctgagggaggcctcc

SEQ ID NO: 169566 - DNA, 25 bp, Canis familiaris
tgtgcccgggcgagaggggagcttt

SEQ ID NO: 169567 - DNA, 25 bp, Canis familiaris
tgtgacctggggcaagtggcgtgac

SEQ ID NO: 169568 - DNA, 25 bp, Canis familiaris
tgttttggggggctccagagaccag

SEQ ID NO: 169569 - DNA, 25 bp, Canis familiaris
tgtcctttgggggaggtcaaggccg

SEQ ID NO: 169570 - DNA, 25 bp, Canis familiaris
tgtggcacttggggcgaggacaaag

SEQ ID NO: 169571 - DNA, 25 bp, Canis familiaris
tgtccagttggctggcgtacaacca

SEQ ID NO: 169572 - DNA, 25 bp, Canis familiaris
tgtccaggatggttatggtatacaa

SEQ ID NO: 169573 - DNA, 25 bp, Canis familiaris
tgtccaggtgaaacgttgtaagagc

SEQ ID NO: 169574 - DNA, 25 bp, Canis familiaris
tgggcaggtcgatccttgtagcaga

SEQ ID NO: 169575 - DNA, 25 bp, Canis familiaris
tgtggaagtctattcgattttcgaa

SEQ ID NO: 169576 - DNA, 25 bp, Canis familiaris
tgggaaattcttgcactgtatccaa

SEQ ID NO: 169577 - DNA, 25 bp, Canis familiaris
tgggaatatggaatgccctccacca

SEQ ID NO: 169578 - DNA, 25 bp, Canis familiaris
tgggaactggttttgtccacatcca

SEQ ID NO: 169579 - DNA, 25 bp, Canis familiaris
tgtggcagattgcctttttccttca

SEQ ID NO: 169580 - DNA, 25 bp, Canis familiaris
tgggaagatcctgacttcctccaag

SEQ ID NO: 169581 - DNA, 25 bp, Canis familiaris
tgggaagcaggtgctgctgtcctcc

SEQ ID NO: 169582 - DNA, 25 bp, Canis familiaris
tgggaatctgaggcctgttggctcc

SEQ ID NO: 169583 - DNA, 25 bp, Canis familiaris
tgggaagcagcagccgaaagcacct

SEQ ID NO: 169584 - DNA, 25 bp, Canis familiaris
tgggaagaggctccgacaagcacac

SEQ ID NO: 169585 - DNA, 25 bp, Canis familiaris
tgggcacaaggtcctacatgtcgcc

SEQ ID NO: 169586 - DNA, 25 bp, Canis familiaris
tgggaacagaacgtccagggccagc

SEQ ID NO: 169587 - DNA, 25 bp, Canis familiaris
tgggaaatatcagctccaattctcc

SEQ ID NO: 169588 - DNA, 25 bp, Canis familiaris
tgggaaaagctggcccaaactgccc

SEQ ID NO: 169589 - DNA, 25 bp, Canis familiaris
tgggacaaagcagcacacacagcct

SEQ ID NO: 169590 - DNA, 25 bp, Canis familiaris
tgggcaacaagcacagatccccatc

SEQ ID NO: 169591 - DNA, 25 bp, Canis familiaris
tgggaatagcctcagcagctcccaa

SEQ ID NO: 169592 - DNA, 25 bp, Canis familiaris
tgggcatcaagcccgagagtgcacc

SEQ ID NO: 169593 - DNA, 25 bp, Canis familiaris
tgggctctacgggaaggaccagcag

SEQ ID NO: 169594 - DNA, 25 bp, Canis familiaris
tgggcttcaccggaatagacccgca

SEQ ID NO: 169595 - DNA, 25 bp, Canis familiaris
tgggcacccagcagttcaagcccaa

SEQ ID NO: 169596 - DNA, 25 bp, Canis familiaris
tgggcaccacaaagcttcaaaccac

SEQ ID NO: 169597 - DNA, 25 bp, Canis familiaris
tgggcacgcagctattttagccacc

SEQ ID NO: 169598 - DNA, 25 bp, Canis familiaris
tgggcacaacatagcctcaggccac

SEQ ID NO: 169599 - DNA, 25 bp, Canis familiaris
tgggaagaactcctgtgtgccacta

SEQ ID NO: 169600 - DNA, 25 bp, Canis familiaris
tgggaagaactcctgtgtgccacta

SEQ ID NO: 169601 - DNA, 25 bp, Canis familiaris
tgggaagaactcctgtgtgccacta

SEQ ID NO: 169602 - DNA, 25 bp, Canis familiaris
tgggaagaactcctgtgtgcccact

SEQ ID NO: 169603 - DNA, 25 bp, Canis familiaris
tgtggaaagggcgtgtgctgcccct

SEQ ID NO: 169604 - DNA, 25 bp, Canis familiaris
tgggcaagcagggctttgtgtcccg

SEQ ID NO: 169605 - DNA, 25 bp, Canis familiaris
tgggaagagggcacatgtccccagg

SEQ ID NO: 169606 - DNA, 25 bp, Canis familiaris
tgggaaagaggcccagagccacgga

SEQ ID NO: 169607 - DNA, 25 bp, Canis familiaris
tgggcgacgaggcccagagcaagcg

SEQ ID NO: 169608 - DNA, 25 bp, Canis familiaris
tgggctgatcaatcccaagcaggtg

SEQ ID NO: 169609 - DNA, 25 bp, Canis familiaris
tgggcgtcagcagccaagagatggt

SEQ ID NO: 169610 - DNA, 25 bp, Canis familiaris
tgggccaagcccagaagtggtccgc

SEQ ID NO: 169611 - DNA, 25 bp, Canis familiaris
tgaggggatccgagaagcggcggcg

SEQ ID NO: 169612 - DNA, 25 bp, Canis familiaris
tgaggaggaacaggaacgcgggggt

SEQ ID NO: 169613 - DNA, 25 bp, Canis familiaris
tgggctggaacagcaaccgagcgct

SEQ ID NO: 169614 - DNA, 25 bp, Canis familiaris
tgggcgcgggcggcaacaagagccg

SEQ ID NO: 169615 - DNA, 25 bp, Canis familiaris
tgtgggtggccactgacacaaggac

SEQ ID NO: 169616 - DNA, 25 bp, Canis familiaris
tgtcggtggccacacaagacgaggt

SEQ ID NO: 169617 - DNA, 25 bp, Canis familiaris
tgtcgggtccaagaaaatgagtcat

SEQ ID NO: 169618 - DNA, 25 bp, Canis familiaris
tgtcttccccaagcttcaatgaatc

SEQ ID NO: 169619 - DNA, 25 bp, Canis familiaris
tgtcccccctgggttaatggtagca

SEQ ID NO: 169620 - DNA, 25 bp, Canis familiaris
tgttccggggggttagggctgagca

SEQ ID NO: 169621 - DNA, 25 bp, Canis familiaris
tgtttggggagggaaaggagcgaga

SEQ ID NO: 169622 - DNA, 25 bp, Canis familiaris
tcctctgggtggggaaaggaaggtg

SEQ ID NO: 169623 - DNA, 25 bp, Canis familiaris
tccttggggccaatgttaaatccgg

SEQ ID NO: 169624 - DNA, 25 bp, Canis familiaris
tcttcggggaagaatttgaatgccg

SEQ ID NO: 169625 - DNA, 25 bp, Canis familiaris
tttccgtggaatcatttaagccctt

SEQ ID NO: 169626 - DNA, 25 bp, Canis familiaris
tgttccggaagaccttctcggacct

SEQ ID NO: 169627 - DNA, 25 bp, Canis familiaris
tgttcctggaaatcttttgggcgct

SEQ ID NO: 169628 - DNA, 25 bp, Canis familiaris
tgaccctttaaccctgttggaggat

SEQ ID NO: 169629 - DNA, 25 bp, Canis familiaris
tgaccctcgtaagcacttacctggt

SEQ ID NO: 169630 - DNA, 25 bp, Canis familiaris
tgtccccttacaaccaaactgggtg

SEQ ID NO: 169631 - DNA, 25 bp, Canis familiaris
tgtgtccaaaaaacctacccgtatg

SEQ ID NO: 169632 - DNA, 25 bp, Canis familiaris
tgttccaataaagcttttacctatt

SEQ ID NO: 169633 - DNA, 25 bp, Canis familiaris
tgtaccaaaaacaggctgtacccgt

SEQ ID NO: 169634 - DNA, 25 bp, Canis familiaris
tgtccggagaatgccgaggtcaccc

SEQ ID NO: 169635 - DNA, 25 bp, Canis familiaris
tgcccgaggtgctccgggatgggga

SEQ ID NO: 169636 - DNA, 25 bp, Canis familiaris
tgccggatttgaacctccgtaggga

SEQ ID NO: 169637 - DNA, 25 bp, Canis familiaris
tgtccagaaccagactccggaggga

SEQ ID NO: 169638 - DNA, 25 bp, Canis familiaris
tgtccgggccctatgagggactgga

SEQ ID NO: 169639 - DNA, 25 bp, Canis familiaris
tgggcagaggctgccttctgggact

SEQ ID NO: 169640 - DNA, 25 bp, Canis familiaris
tgggccaactggcatcttgggcaat

SEQ ID NO: 169641 - DNA, 25 bp, Canis familiaris
tgtgtgtattccccattatgggaat

SEQ ID NO: 169642 - DNA, 25 bp, Canis familiaris
tgtggtattttgtcatggcagccct

SEQ ID NO: 169643 - DNA, 25 bp, Canis familiaris
tgggctcctggtgcatggagcctgc

SEQ ID NO: 169644 - DNA, 25 bp, Canis familiaris
tgggcatcagcatggccaggagcgc

SEQ ID NO: 169645 - DNA, 25 bp, Canis familiaris
tgggcatcacaagtgaatgcgagat

SEQ ID NO: 169646 - DNA, 25 bp, Canis familiaris
tgggctgccatgttgatggccgtca

SEQ ID NO: 169647 - DNA, 25 bp, Canis familiaris
tgggcagccagactgtgctgacggc

SEQ ID NO: 169648 - DNA, 25 bp, Canis familiaris
tgggccgcaggattgcagagctgga

SEQ ID NO: 169649 - DNA, 25 bp, Canis familiaris
tgggccagctgcgagcagcaggggg

SEQ ID NO: 169650 - DNA, 25 bp, Canis familiaris
tgggccactttctagttctgagtta

SEQ ID NO: 169651 - DNA, 25 bp, Canis familiaris
tgggctacattcagagtgctgggtt

SEQ ID NO: 169652 - DNA, 25 bp, Canis familiaris
tgggctacaatcagagtgccggttc

SEQ ID NO: 169653 - DNA, 25 bp, Canis familiaris
tgggctgacaacggtgtgcaggcct

SEQ ID NO: 169654 - DNA, 25 bp, Canis familiaris
tgtgtgaacacagagggaggagcct

SEQ ID NO: 169655 - DNA, 25 bp, Canis familiaris
tgtgagaataaatgaggtaacgcgt

SEQ ID NO: 169656 - DNA, 25 bp, Canis familiaris
tgtggaaaacaaaggccaaacttct

SEQ ID NO: 169657 - DNA, 25 bp, Canis familiaris
tgtgggaaaactcgactgcataatt

SEQ ID NO: 169658 - DNA, 25 bp, Canis familiaris
tttgaaaaaccgttgctggatctgc

SEQ ID NO: 169659 - DNA, 25 bp, Canis familiaris
tgtggacacaatgccctactggaat

SEQ ID NO: 169660 - DNA, 25 bp, Canis familiaris
tgtggaacagatgagccgacatact

SEQ ID NO: 169661 - DNA, 25 bp, Canis familiaris
tgtggaacagggagcagggatcatg

SEQ ID NO: 169662 - DNA, 25 bp, Canis familiaris
tgtgggagatgggctctggggagca

SEQ ID NO: 169663 - DNA, 25 bp, Canis familiaris
tgtgtgggggtgactggacgtgatt

SEQ ID NO: 169664 - DNA, 25 bp, Canis familiaris
tgtgtggggggccgatgggtattgc

SEQ ID NO: 169665 - DNA, 25 bp, Canis familiaris
tgtggctttgggtggggtcttaagt

SEQ ID NO: 169666 - DNA, 25 bp, Canis familiaris
tgtggtattggataagtggccttaa

SEQ ID NO: 169667 - DNA, 25 bp, Canis familiaris
tgtggtttgttttagctgggtgctc

SEQ ID NO: 169668 - DNA, 25 bp, Canis familiaris
tgtccatttcatgctttgggggctc

SEQ ID NO: 169669 - DNA, 25 bp, Canis familiaris
tgtggtctacatcctcattgggagg

SEQ ID NO: 169670 - DNA, 25 bp, Canis familiaris
tgtggcgctctcacaacgtggagaa

SEQ ID NO: 169671 - DNA, 25 bp, Canis familiaris
tgtggcggcatcactgagcctagac

SEQ ID NO: 169672 - DNA, 25 bp, Canis familiaris
tgggcccagcacctgagtatatgtg

SEQ ID NO: 169673 - DNA, 25 bp, Canis familiaris
tgtggcccagctgtgggctttggca

SEQ ID NO: 169674 - DNA, 25 bp, Canis familiaris
tgtgtggtcctttgggattctgctc

SEQ ID NO: 169675 - DNA, 25 bp, Canis familiaris
tgtgtgagtagtttcgaatcctgac

SEQ ID NO: 169676 - DNA, 25 bp, Canis familiaris
tgtgggtgactccctaatgtctgac

SEQ ID NO: 169677 - DNA, 25 bp, Canis familiaris
tgtggtgtgaccctgttcaattata

SEQ ID NO: 169678 - DNA, 25 bp, Canis familiaris
tgtggtgtacctggttccagtttta

SEQ ID NO: 169679 - DNA, 25 bp, Canis familiaris
tgtggttcaactggactttgtttta

SEQ ID NO: 169680 - DNA, 25 bp, Canis familiaris
tgtttaaactgttcacttggcttta

SEQ ID NO: 169681 - DNA, 25 bp, Canis familiaris
taatttgggttcttccgactcttga

SEQ ID NO: 169682 - DNA, 25 bp, Canis familiaris
tgttttgggttcacaaggcttcgaa

SEQ ID NO: 169683 - DNA, 25 bp, Canis familiaris
tgttcttgggtctcaaaggcttcga

SEQ ID NO: 169684 - DNA, 25 bp, Canis familiaris
tgtgtttggggctttaatggtttcg

SEQ ID NO: 169685 - DNA, 25 bp, Canis familiaris
tgtgaactggggtgctttggtctcc

SEQ ID NO: 169686 - DNA, 25 bp, Canis familiaris
tgtgaaaggagtggtgtttgatgtc

SEQ ID NO: 169687 - DNA, 25 bp, Canis familiaris
tgtgataaagaattattttttccca

SEQ ID NO: 169688 - DNA, 25 bp, Canis familiaris
tgtgatacaaaatatttccccgttt

SEQ ID NO: 169689 - DNA, 25 bp, Canis familiaris
tgtgaaaaacacaattttgcctttt

SEQ ID NO: 169690 - DNA, 25 bp, Canis familiaris
tgtcaaaaatccactttttactcta

SEQ ID NO: 169691 - DNA, 25 bp, Canis familiaris
tgtcacccaaccaccatttggaatt

SEQ ID NO: 169692 - DNA, 25 bp, Canis familiaris
tgtgacccaaacgttctttgttttg

SEQ ID NO: 169693 - DNA, 25 bp, Canis familiaris
tgggccccaacagacttatttatac

SEQ ID NO: 169694 - DNA, 25 bp, Canis familiaris
tgggccaccgactcaatgattacta

SEQ ID NO: 169695 - DNA, 25 bp, Canis familiaris
tgggcacacacgatacttgtttcca

SEQ ID NO: 169696 - DNA, 25 bp, Canis familiaris
tgggcactaggtacgcttgatttta

SEQ ID NO: 169697 - DNA, 25 bp, Canis familiaris
tgggcacggtgtagagccatgcatt

SEQ ID NO: 169698 - DNA, 25 bp, Canis familiaris
tgggccaggcttagctggctgctca

SEQ ID NO: 169699 - DNA, 25 bp, Canis familiaris
tgtggatcgggatgcggtgtcaggc

SEQ ID NO: 169700 - DNA, 25 bp, Canis familiaris
tgtggtcaggcctggatgtggccgc

SEQ ID NO: 169701 - DNA, 25 bp, Canis familiaris
tgtggtctggaccaggcagttggcc

SEQ ID NO: 169702 - DNA, 25 bp, Canis familiaris
tgggcatcaggagaggcctctgtcc

SEQ ID NO: 169703 - DNA, 25 bp, Canis familiaris
tgggcaggaaggagctctggccagc

SEQ ID NO: 169704 - DNA, 25 bp, Canis familiaris
tgtggccgaacgtcgcatcggcctc

SEQ ID NO: 169705 - DNA, 25 bp, Canis familiaris
tgtgtgggtaaggccagcagtgccc

SEQ ID NO: 169706 - DNA, 25 bp, Canis familiaris
tgagggatttagccaccatgttcct

SEQ ID NO: 169707 - DNA, 25 bp, Canis familiaris
tgtggctgttaagcacctggtgctt

SEQ ID NO: 169708 - DNA, 25 bp, Canis familiaris
tgtggagtttagaagcttcgtgcta

SEQ ID NO: 169709 - DNA, 25 bp, Canis familiaris
tgtggacatttgctgatgcccagtt

SEQ ID NO: 169710 - DNA, 25 bp, Canis familiaris
tgtctaggactgagcatgcccagaa

SEQ ID NO: 169711 - DNA, 25 bp, Canis familiaris
tgtgtagtttcaagctgccagcaaa

SEQ ID NO: 169712 - DNA, 25 bp, Canis familiaris
tgtggatgttcttgtcagctcagga

SEQ ID NO: 169713 - DNA, 25 bp, Canis familiaris
tgtggctgcttttgcactacagtga

SEQ ID NO: 169714 - DNA, 25 bp, Canis familiaris
tgtgggcatcttcctggactataag

SEQ ID NO: 169715 - DNA, 25 bp, Canis familiaris
tgtgtggtgctttccagaataaagg

SEQ ID NO: 169716 - DNA, 25 bp, Canis familiaris
tgtggtcatcttttcacaatatata

SEQ ID NO: 169717 - DNA, 25 bp, Canis familiaris
tgtggactttgctgccaactatctc

SEQ ID NO: 169718 - DNA, 25 bp, Canis familiaris
tgtggactttgactgccaccttgat

SEQ ID NO: 169719 - DNA, 25 bp, Canis familiaris
tgtgtgacatcttggtctaccctga

SEQ ID NO: 169720 - DNA, 25 bp, Canis familiaris
tgtgaacattgcttgctccgaaata

SEQ ID NO: 169721 - DNA, 25 bp, Canis familiaris
tgtgaggctgactgcttcaagcaat

SEQ ID NO: 169722 - DNA, 25 bp, Canis familiaris
tgtgagtgctcctagcagacagcca

SEQ ID NO: 169723 - DNA, 25 bp, Canis familiaris
tgtgggtgctgtgggatgagccggc

SEQ ID NO: 169724 - DNA, 25 bp, Canis familiaris
tgtggctgtgtgtgtgagccgggct

SEQ ID NO: 169725 - DNA, 25 bp, Canis familiaris
tgtgacagtgtcagaaccgctggct

SEQ ID NO: 169726 - DNA, 25 bp, Canis familiaris
tgtgaggcctcagggaccagagtca

SEQ ID NO: 169727 - DNA, 25 bp, Canis familiaris
tgtgttgagccaggtcagctcggtc

SEQ ID NO: 169728 - DNA, 25 bp, Canis familiaris
tgtgtgggccaagtttgcgatgcta

SEQ ID NO: 169729 - DNA, 25 bp, Canis familiaris
tgtggtgtccacagtgattgctgct

SEQ ID NO: 169730 - DNA, 25 bp, Canis familiaris
tgggctgtccttagttgtgtgccta

SEQ ID NO: 169731 - DNA, 25 bp, Canis familiaris
tgtgtgtaccatgagttgtgtgact

SEQ ID NO: 169732 - DNA, 25 bp, Canis familiaris
tgtgtgccccctaatgtagtactat

SEQ ID NO: 169733 - DNA, 25 bp, Canis familiaris
tgtgtgtctctcctgaataaataca

SEQ ID NO: 169734 - DNA, 25 bp, Canis familiaris
tgtggatatttcagaatgttagcct

SEQ ID NO: 169735 - DNA, 25 bp, Canis familiaris
tgtgtattggtctgtggcttcaccc

SEQ ID NO: 169736 - DNA, 25 bp, Canis familiaris
tgtgtagtgactttacctatcctcc

SEQ ID NO: 169737 - DNA, 25 bp, Canis familiaris
tgggcatgagttttcaggttcctgc

SEQ ID NO: 169738 - DNA, 25 bp, Canis familiaris
tgtgggactttccacaggtctctgc

SEQ ID NO: 169739 - DNA, 25 bp, Canis familiaris
tgtggagccttttcagcaaacccag

SEQ ID NO: 169740 - DNA, 25 bp, Canis familiaris
tgtgcgggttgttgtgatggacgac

SEQ ID NO: 169741 - DNA, 25 bp, Canis familiaris
tgggctgcgttgtttgggacgctgc

SEQ ID NO: 169742 - DNA, 25 bp, Canis familiaris
tgtgtctgtgttttcttggaggctc

SEQ ID NO: 169743 - DNA, 25 bp, Canis familiaris
tgtgggtgtaacaattgtgatcctc

SEQ ID NO: 169744 - DNA, 25 bp, Canis familiaris
tgtggtgtcaatgcatctggtatcg

SEQ ID NO: 169745 - DNA, 25 bp, Canis familiaris
tgtgtgcttttgtctaagtatgtga

SEQ ID NO: 169746 - DNA, 25 bp, Canis familiaris
tgtgtgctgtcattgcctactatat

SEQ ID NO: 169747 - DNA, 25 bp, Canis familiaris
tgtgtggtcatgcctcagactgagt

SEQ ID NO: 169748 - DNA, 25 bp, Canis familiaris
tgtcatggatagtcccctgcatgtt

SEQ ID NO: 169749 - DNA, 25 bp, Canis familiaris
tgtcagggcagggcccacgtgtaca

SEQ ID NO: 169750 - DNA, 25 bp, Canis familiaris
tgtgtgtagcgtgagcccgagaacc

SEQ ID NO: 169751 - DNA, 25 bp, Canis familiaris
tgggctagcgctgtgcattcataaa

SEQ ID NO: 169752 - DNA, 25 bp, Canis familiaris
tgggctctgcgtgacagtaccatat

SEQ ID NO: 169753 - DNA, 25 bp, Canis familiaris
tgggcatcatcttcaattctacctt

SEQ ID NO: 169754 - DNA, 25 bp, Canis familiaris
tgggctcctaaaagcatcaactttc

SEQ ID NO: 169755 - DNA, 25 bp, Canis familiaris
tgggcctcaagatcacctattttgc

SEQ ID NO: 169756 - DNA, 25 bp, Canis familiaris
tgggccacattgtacagcccattcc

SEQ ID NO: 169757 - DNA, 25 bp, Canis familiaris
tgggccagcaagtctgctgacctgt

SEQ ID NO: 169758 - DNA, 25 bp, Canis familiaris
tgggccacaagccattggcacttgc

SEQ ID NO: 169759 - DNA, 25 bp, Canis familiaris
tgggctccagagtactgacagtgtg

SEQ ID NO: 169760 - DNA, 25 bp, Canis familiaris
tgtggccacaggagtgtatgtgtgt

SEQ ID NO: 169761 - DNA, 25 bp, Canis familiaris
tgtggccgaggactttgattgcaca

SEQ ID NO: 169762 - DNA, 25 bp, Canis familiaris
tgtggacagagccagttgctcccac

SEQ ID NO: 169763 - DNA, 25 bp, Canis familiaris
tgtggagagggggctgcatcatcag

SEQ ID NO: 169764 - DNA, 25 bp, Canis familiaris
tgtggcagggagaagccctcagtcg

SEQ ID NO: 169765 - DNA, 25 bp, Canis familiaris
tgtgtgagtagggtcgcccagagcg

SEQ ID NO: 169766 - DNA, 25 bp, Canis familiaris
tgtggttaagcaggcctcgagagcg

SEQ ID NO: 169767 - DNA, 25 bp, Canis familiaris
tgtgtgtgaaagatcctctagagtc

SEQ ID NO: 169768 - DNA, 25 bp, Canis familiaris
tgtggataccatagtcttcccaaca

SEQ ID NO: 169769 - DNA, 25 bp, Canis familiaris
tgtgtgatggcattgctgccttccc

SEQ ID NO: 169770 - DNA, 25 bp, Canis familiaris
tgtggctatgaattgtgttcgccag

SEQ ID NO: 169771 - DNA, 25 bp, Canis familiaris
tgtgtgcttcacatgaccttgacag

SEQ ID NO: 169772 - DNA, 25 bp, Canis familiaris
tgtgttacacttatgcattgccaaa

SEQ ID NO: 169773 - DNA, 25 bp, Canis familiaris
tgtgttgagcccaactgcagatcga

SEQ ID NO: 169774 - DNA, 25 bp, Canis familiaris
tgtggaggcccaaggaagccaaccg

SEQ ID NO: 169775 - DNA, 25 bp, Canis familiaris
tgtggggcctcaggggaaccaaaag

SEQ ID NO: 169776 - DNA, 25 bp, Canis familiaris
tgtgggccaacaaggtgaacctcca

SEQ ID NO: 169777 - DNA, 25 bp, Canis familiaris
tgtggacaaagccgaggacacgccc

SEQ ID NO: 169778 - DNA, 25 bp, Canis familiaris
tgtgtgtaaccatatgtgtcctgcc

SEQ ID NO: 169779 - DNA, 25 bp, Canis familiaris
tgtgtgtaaaaccagcgtcttccgt

SEQ ID NO: 169780 - DNA, 25 bp, Canis familiaris
tgtgtgatgtaaaaccttcctccgt

SEQ ID NO: 169781 - DNA, 25 bp, Canis familiaris
tgtgttgaaatgtcaccttctctct

SEQ ID NO: 169782 - DNA, 25 bp, Canis familiaris
tgtggatgacaagctcctaagcctc

SEQ ID NO: 169783 - DNA, 25 bp, Canis familiaris
tgtggacaaggctcctgagtgcttc

SEQ ID NO: 169784 - DNA, 25 bp, Canis familiaris
tgtggaatagttgatctcaccttca

SEQ ID NO: 169785 - DNA, 25 bp, Canis familiaris
tgtggaaactgattacacccttccc

SEQ ID NO: 169786 - DNA, 25 bp, Canis familiaris
tgtgtgaacctacaacaccctgacc

SEQ ID NO: 169787 - DNA, 25 bp, Canis familiaris
tgtgtagaccccttttctacgacga

SEQ ID NO: 169788 - DNA, 25 bp, Canis familiaris
tgtgtcatgaccctcagttactcac

SEQ ID NO: 169789 - DNA, 25 bp, Canis familiaris
tgtgtcagacctctctatactgacc

SEQ ID NO: 169790 - DNA, 25 bp, Canis familiaris
tgtgtaactaatcctgctagctgat

SEQ ID NO: 169791 - DNA, 25 bp, Canis familiaris
tgtgttatgtaatgcacttctgata

SEQ ID NO: 169792 - DNA, 25 bp, Canis familiaris
tgtgatctttctacagcagcttcag

SEQ ID NO: 169793 - DNA, 25 bp, Canis familiaris
tgtgcacatatattccgctttcaga

SEQ ID NO: 169794 - DNA, 25 bp, Canis familiaris
tgtgtctctgatccttttataagca

SEQ ID NO: 169795 - DNA, 25 bp, Canis familiaris
tgtggctttgcctattctatgtatc

SEQ ID NO: 169796 - DNA, 25 bp, Canis familiaris
tgggctattttctctagttctttcc

SEQ ID NO: 169797 - DNA, 25 bp, Canis familiaris
tgtggtttttcatctggttgtcttt

SEQ ID NO: 169798 - DNA, 25 bp, Canis familiaris
tgtgtttttgtaactggttgtgttt

SEQ ID NO: 169799 - DNA, 25 bp, Canis familiaris
tgtgttttctgagcgagccttggaa

SEQ ID NO: 169800 - DNA, 25 bp, Canis familiaris
tgtgttagggagtcaggacctgaac

SEQ ID NO: 169801 - DNA, 25 bp, Canis familiaris
tgtgtggaggacctactacctgacc

SEQ ID NO: 169802 - DNA, 25 bp, Canis familiaris
tgtggtgacaggctggcgacctggc

SEQ ID NO: 169803 - DNA, 25 bp, Canis familiaris
tgggctacacgcctgaggaactcca

SEQ ID NO: 169804 - DNA, 25 bp, Canis familiaris
tgggctgggctggccagcagaaccc

SEQ ID NO: 169805 - DNA, 25 bp, Canis familiaris
tgtgacgggccaacacagggccaca

SEQ ID NO: 169806 - DNA, 25 bp, Canis familiaris
tgtgccggagcctcacggaacaaag

SEQ ID NO: 169807 - DNA, 25 bp, Canis familiaris
tgtgaaggaccgccttgggggaagg

SEQ ID NO: 169808 - DNA, 25 bp, Canis familiaris
tgtgtcggacccaccgggataaagt

SEQ ID NO: 169809 - DNA, 25 bp, Canis familiaris
tgtgtcggaaccaacaggccaattg

SEQ ID NO: 169810 - DNA, 25 bp, Canis familiaris
tgtgttgggactgaaggccttcttc

SEQ ID NO: 169811 - DNA, 25 bp, Canis familiaris
tgtggctgggccagccagtcttttt

SEQ ID NO: 169812 - DNA, 25 bp, Canis familiaris
tgtggctatggcctatggcagctcc

SEQ ID NO: 169813 - DNA, 25 bp, Canis familiaris
tgtggggtgcaatgagcagccctca

SEQ ID NO: 169814 - DNA, 25 bp, Canis familiaris
tgtggggagaatttcagccgcatct

SEQ ID NO: 169815 - DNA, 25 bp, Canis familiaris
tgtgtgggtggctacatcgccagca

SEQ ID NO: 169816 - DNA, 25 bp, Canis familiaris
tgtgtggggatgccactcaggctca

SEQ ID NO: 169817 - DNA, 25 bp, Canis familiaris
tgtgtgtgggagccccatgtggagc

SEQ ID NO: 169818 - DNA, 25 bp, Canis familiaris
tgtggatcggtggctccatcttggc

SEQ ID NO: 169819 - DNA, 25 bp, Canis familiaris
tgtgtgatggtcaaccctcttggaa

SEQ ID NO: 169820 - DNA, 25 bp, Canis familiaris
tgtgtgacgtgcaataccacctggg

SEQ ID NO: 169821 - DNA, 25 bp, Canis familiaris
tgtggaagcctctgtcagtcatggg

SEQ ID NO: 169822 - DNA, 25 bp, Canis familiaris
tgtgatgaacttttccagtggggaa

SEQ ID NO: 169823 - DNA, 25 bp, Canis familiaris
tgtttacattcaggggtgggagcta

SEQ ID NO: 169824 - DNA, 25 bp, Canis familiaris
tgtatttaacagggaggggaggagg

SEQ ID NO: 169825 - DNA, 25 bp, Canis familiaris
tgtagctactaaatggtgggggggg

SEQ ID NO: 169826 - DNA, 25 bp, Canis familiaris
tgtgtgtattagactgggggggaat

SEQ ID NO: 169827 - DNA, 25 bp, Canis familiaris
tgtgtgtttagatgtggggaggtaa

SEQ ID NO: 169828 - DNA, 25 bp, Canis familiaris
tgtggtgtgtgggagtggggagcaa

SEQ ID NO: 169829 - DNA, 25 bp, Canis familiaris
tgggctgcgtggcaggcgacgaaaa

SEQ ID NO: 169830 - DNA, 25 bp, Canis familiaris
tgggcgatctgggggccaggtacga

SEQ ID NO: 169831 - DNA, 25 bp, Canis familiaris
tcggcaatcgcggggccgagtgggc

SEQ ID NO: 169832 - DNA, 25 bp, Canis familiaris
tgggcctccgggtccggagggcata

SEQ ID NO: 169833 - DNA, 25 bp, Canis familiaris
tgggccccagtgattcggatgaaga

SEQ ID NO: 169834 - DNA, 25 bp, Canis familiaris
tgggccatccagttgacttttaaaa

SEQ ID NO: 169835 - DNA, 25 bp, Canis familiaris
tgtggccttacaattctttctggaa

SEQ ID NO: 169836 - DNA, 25 bp, Canis familiaris
tgggccagctaaacatgcttcatcg

SEQ ID NO: 169837 - DNA, 25 bp, Canis familiaris
tgtgtgggtgtcactgttcatgcag

SEQ ID NO: 169838 - DNA, 25 bp, Canis familiaris
tgtgagggtgcgcagctggagagca

SEQ ID NO: 169839 - DNA, 25 bp, Canis familiaris
tgtgatggggcccatgcttcacagg

SEQ ID NO: 169840 - DNA, 25 bp, Canis familiaris
tgtagactgctgcgcagtcccaggt

SEQ ID NO: 169841 - DNA, 25 bp, Canis familiaris
tgtggatcctgctgttcctgtggtg

SEQ ID NO: 169842 - DNA, 25 bp, Canis familiaris
tgtgtacctttcttggcttgggatt

SEQ ID NO: 169843 - DNA, 25 bp, Canis familiaris
tgtggtccatttttgggcggcatgt

SEQ ID NO: 169844 - DNA, 25 bp, Canis familiaris
tgtggatgctctctatttagcggag

SEQ ID NO: 169845 - DNA, 25 bp, Canis familiaris
tgtggcattctacatcttcacccac

SEQ ID NO: 169846 - DNA, 25 bp, Canis familiaris
tgtggacctgcacatttccaacagc

SEQ ID NO: 169847 - DNA, 25 bp, Canis familiaris
tgtggacctgacagtttgtccctgc

SEQ ID NO: 169848 - DNA, 25 bp, Canis familiaris
tgtgggttgagaaggtcctccagct

SEQ ID NO: 169849 - DNA, 25 bp, Canis familiaris
tgtgttgttgccatggtaatcctgc

SEQ ID NO: 169850 - DNA, 25 bp, Canis familiaris
tgtgttgtgtgtatggactctcctc

SEQ ID NO: 169851 - DNA, 25 bp, Canis familiaris
tgtgttatggtagttactccccttt

SEQ ID NO: 169852 - DNA, 25 bp, Canis familiaris
tgcgtttttaaaatctaactttctg

SEQ ID NO: 169853 - DNA, 25 bp, Canis familiaris
tcggctttctcttactgtaactttt

SEQ ID NO: 169854 - DNA, 25 bp, Canis familiaris
tgtggctttggcaaactgcccactt

SEQ ID NO: 169855 - DNA, 25 bp, Canis familiaris
tgtggctttgggcaagtgctcactc

SEQ ID NO: 169856 - DNA, 25 bp, Canis familiaris
tgggcctctaggcaagatgtcctgc

SEQ ID NO: 169857 - DNA, 25 bp, Canis familiaris
tgggccgctatcaggaggtcaatcc

SEQ ID NO: 169858 - DNA, 25 bp, Canis familiaris
tgggcccgatgcagagagtgacacc

SEQ ID NO: 169859 - DNA, 25 bp, Canis familiaris
tgggcccagcagagggcgacacagc

SEQ ID NO: 169860 - DNA, 25 bp, Canis familiaris
tgtgtgccctagagggcagccaccg

SEQ ID NO: 169861 - DNA, 25 bp, Canis familiaris
tgtgtggttatgtgtgtgcgcgcac

SEQ ID NO: 169862 - DNA, 25 bp, Canis familiaris
tgtgtgttaaagctggctgccagca

SEQ ID NO: 169863 - DNA, 25 bp, Canis familiaris
tgtgactccaaagcgagctctcagc

SEQ ID NO: 169864 - DNA, 25 bp, Canis familiaris
tgtgacccggaccgacattcaatgc

SEQ ID NO: 169865 - DNA, 25 bp, Canis familiaris
tgtgaccaacgagcagtcctttgcc

SEQ ID NO: 169866 - DNA, 25 bp, Canis familiaris
tgtggcccctgaggagcaccctgtg

SEQ ID NO: 169867 - DNA, 25 bp, Canis familiaris
tgtgggtgacctggtgatcccgagc

SEQ ID NO: 169868 - DNA, 25 bp, Canis familiaris
tgtggtccacctggaacagccagac

SEQ ID NO: 169869 - DNA, 25 bp, Canis familiaris
tgtggctcaagcacatacacccaac

SEQ ID NO: 169870 - DNA, 25 bp, Canis familiaris
tgtgcgctatgccaaaaacctctac

SEQ ID NO: 169871 - DNA, 25 bp, Canis familiaris
tgtggagaccatcagtaccttcatc

SEQ ID NO: 169872 - DNA, 25 bp, Canis familiaris
tgtgatagcccactggatggcattt

SEQ ID NO: 169873 - DNA, 25 bp, Canis familiaris
tgtgtgacttcattgagactcatta

SEQ ID NO: 169874 - DNA, 25 bp, Canis familiaris
tgtgaacctgcatgatattatctga

SEQ ID NO: 169875 - DNA, 25 bp, Canis familiaris
tgtgatggcctatgatcgctacatg

SEQ ID NO: 169876 - DNA, 25 bp, Canis familiaris
tgtccatgcctgtggcctacaagga

SEQ ID NO: 169877 - DNA, 25 bp, Canis familiaris
tgtcctgggcaagcccaagcctgaa

SEQ ID NO: 169878 - DNA, 25 bp, Canis familiaris
tgtgccttaaaccccaatgtcaata

SEQ ID NO: 169879 - DNA, 25 bp, Canis familiaris
tcatgactaaaaggtccaaccaaac

SEQ ID NO: 169880 - DNA, 25 bp, Canis familiaris
tccgtaaagacctctatgccaacac

SEQ ID NO: 169881 - DNA, 25 bp, Canis familiaris
tccgtaaggacctgtatgccaacac

SEQ ID NO: 169882 - DNA, 25 bp, Canis familiaris
tgtggcctagaaaagctcttcgaga

SEQ ID NO: 169883 - DNA, 25 bp, Canis familiaris
tgtcgccttcacacaggttaactcg

SEQ ID NO: 169884 - DNA, 25 bp, Canis familiaris
tgtcgccttcacacaggttaactcg

SEQ ID NO: 169885 - DNA, 25 bp, Canis familiaris
tgtcgccttcacacaggttaactcg

SEQ ID NO: 169886 - DNA, 25 bp, Canis familiaris
tgtcgccttcacacaggttaactcg

SEQ ID NO: 169887 - DNA, 25 bp, Canis familiaris
tgtcgccttcacacaggttaactcg

SEQ ID NO: 169888 - DNA, 25 bp, Canis familiaris
tgtggctccctcatatggtaacacc

SEQ ID NO: 169889 - DNA, 25 bp, Canis familiaris
tgtgtcccgtgcacggaaaatacag

SEQ ID NO: 169890 - DNA, 25 bp, Canis familiaris
tgtgagctgctctcccgaaaaaaaa

SEQ ID NO: 169891 - DNA, 25 bp, Canis familiaris
tgtgtcttttcatggaatagataga

SEQ ID NO: 169892 - DNA, 25 bp, Canis familiaris
tgtgtgtcaccaagggaaagaagat

SEQ ID NO: 169893 - DNA, 25 bp, Canis familiaris
tgtgttcaggacccaggaagacaat

SEQ ID NO: 169894 - DNA, 25 bp, Canis familiaris
tgtggatcaacacacaccaagaaca

SEQ ID NO: 169895 - DNA, 25 bp, Canis familiaris
tgtggttaccataagccaggacagg

SEQ ID NO: 169896 - DNA, 25 bp, Canis familiaris
tgtgaataaaccaagcatcgcgaag

SEQ ID NO: 169897 - DNA, 25 bp, Canis familiaris
tgtggggaacacagatctggcaagc

SEQ ID NO: 169898 - DNA, 25 bp, Canis familiaris
tgatggagggtcgtcgtcgtgaagc

SEQ ID NO: 169899 - DNA, 25 bp, Canis familiaris
tgtggggtgtcgtagtcgagaacgg

SEQ ID NO: 169900 - DNA, 25 bp, Canis familiaris
tgggcccatgtcgtagtcgagaaac

SEQ ID NO: 169901 - DNA, 25 bp, Canis familiaris
tgtggatcctgtggatggccggaca

SEQ ID NO: 169902 - DNA, 25 bp, Canis familiaris
tgtgtgaagttcgtggcgcagcaac

SEQ ID NO: 169903 - DNA, 25 bp, Canis familiaris
tgtgtgacgtcacttggccatacaa

SEQ ID NO: 169904 - DNA, 25 bp, Canis familiaris
tgtggaggcacagttcccaacacag

SEQ ID NO: 169905 - DNA, 25 bp, Canis familiaris
tgtgggagacgcttgcggcaagaag

SEQ ID NO: 169906 - DNA, 25 bp, Canis familiaris
tgtgtgtgtatgactatggggaaag

SEQ ID NO: 169907 - DNA, 25 bp, Canis familiaris
tgtgggccagaccactgcagtgaaa

SEQ ID NO: 169908 - DNA, 25 bp, Canis familiaris
tgtgcaggaccagctccaggtagaa

SEQ ID NO: 169909 - DNA, 25 bp, Canis familiaris
tgtgggacgcacttggacgatcaga

SEQ ID NO: 169910 - DNA, 25 bp, Canis familiaris
tgtgagggtcaggctcagatcgtcg

SEQ ID NO: 169911 - DNA, 25 bp, Canis familiaris
tgtgaggttccagtgcacctgacac

SEQ ID NO: 169912 - DNA, 25 bp, Canis familiaris
tgtatgtggtcaagcccctgactat

SEQ ID NO: 169913 - DNA, 25 bp, Canis familiaris
tgtggtggtgcatcaccttgacctt

SEQ ID NO: 169914 - DNA, 25 bp, Canis familiaris
tgtggtgagacacgagcccacacct

SEQ ID NO: 169915 - DNA, 25 bp, Canis familiaris
tgtggaaaccaacatcagatccttg

SEQ ID NO: 169916 - DNA, 25 bp, Canis familiaris
tgtgggcaacaatccagagtccggt

SEQ ID NO: 169917 - DNA, 25 bp, Canis familiaris
tgtgggcaagactccagttcactta

SEQ ID NO: 169918 - DNA, 25 bp, Canis familiaris
tgtggagaggttggcttgcttcctt

SEQ ID NO: 169919 - DNA, 25 bp, Canis familiaris
tgtggacagtttggttgcctactca

SEQ ID NO: 169920 - DNA, 25 bp, Canis familiaris
tgtggccacatgtggcttctctacc

SEQ ID NO: 169921 - DNA, 25 bp, Canis familiaris
tgtggccaatgttgtctgacctatt

SEQ ID NO: 169922 - DNA, 25 bp, Canis familiaris
tgtgacacaatgcagcaagaacttc

SEQ ID NO: 169923 - DNA, 25 bp, Canis familiaris
tgtgaccaaggacatgacactggaa

SEQ ID NO: 169924 - DNA, 25 bp, Canis familiaris
tgtgaaactggctgaaacggaggag

SEQ ID NO: 169925 - DNA, 25 bp, Canis familiaris
tgataagaccgggaagaccaagtgg

SEQ ID NO: 169926 - DNA, 25 bp, Canis familiaris
tgctaagcccaggaaagttaacggc

SEQ ID NO: 169927 - DNA, 25 bp, Canis familiaris
tgtcaagcccaaggaggttaagccc

SEQ ID NO: 169928 - DNA, 25 bp, Canis familiaris
tgtcgccccaaaagctgttgaacca

SEQ ID NO: 169929 - DNA, 25 bp, Canis familiaris
tgtgcaccccaaagatcctagatac

SEQ ID NO: 169930 - DNA, 25 bp, Canis familiaris
tgtacacacccaagtcatcgaggca

SEQ ID NO: 169931 - DNA, 25 bp, Canis familiaris
tgtgaagcatccggttactgggcaa

SEQ ID NO: 169932 - DNA, 25 bp, Canis familiaris
tgtgaccagcgcccatagacatggg

SEQ ID NO: 169933 - DNA, 25 bp, Canis familiaris
tgtgactgagccctgggagtggcct

SEQ ID NO: 169934 - DNA, 25 bp, Canis familiaris
tgtgtggcatctggatggaagggac

SEQ ID NO: 169935 - DNA, 25 bp, Canis familiaris
tgtgtgtgctcagtgccatgaagat

SEQ ID NO: 169936 - DNA, 25 bp, Canis familiaris
tgtgtggatcaccatcatcaagctg

SEQ ID NO: 169937 - DNA, 25 bp, Canis familiaris
tgtgtcatgaaccatcatcttgcag

SEQ ID NO: 169938 - DNA, 25 bp, Canis familiaris
tgtggcatcaacttcacaggcagcg

SEQ ID NO: 169939 - DNA, 25 bp, Canis familiaris
tgtgagccaataggaagtgcagcag

SEQ ID NO: 169940 - DNA, 25 bp, Canis familiaris
tgtgcaggagaaggatgatgatggc

SEQ ID NO: 169941 - DNA, 25 bp, Canis familiaris
tgtgcaacatagccggatatggagg

SEQ ID NO: 169942 - DNA, 25 bp, Canis familiaris
tgtgacaccacaccgtagcggaatt

SEQ ID NO: 169943 - DNA, 25 bp, Canis familiaris
tgtgatcaagactcgcatgcagggc

SEQ ID NO: 169944 - DNA, 25 bp, Canis familiaris
tgtgacattcactgtgctgccaagc

SEQ ID NO: 169945 - DNA, 25 bp, Canis familiaris
tgtgatgcccttagatgtccggggc

SEQ ID NO: 169946 - DNA, 25 bp, Canis familiaris
tgtgatgcccttagatgtccggggc

SEQ ID NO: 169947 - DNA, 25 bp, Canis familiaris
tgtggccatcctgatgggggggctc

SEQ ID NO: 169948 - DNA, 25 bp, Canis familiaris
tgtgcccatctacgaggggtacgcc

SEQ ID NO: 169949 - DNA, 25 bp, Canis familiaris
tgtgcagcccatcaagttggccagg

SEQ ID NO: 169950 - DNA, 25 bp, Canis familiaris
tgatgccattcacaaggtccacgtg

SEQ ID NO: 169951 - DNA, 25 bp, Canis familiaris
tgtggcatctgcggcaagtgcttca

SEQ ID NO: 169952 - DNA, 25 bp, Canis familiaris
tgtggcagccatgctggcctgtgca

SEQ ID NO: 169953 - DNA, 25 bp, Canis familiaris
tgtggccactgccagaggctgacac

SEQ ID NO: 169954 - DNA, 25 bp, Canis familiaris
tgtgactcacctggagatgctgcct

SEQ ID NO: 169955 - DNA, 25 bp, Canis familiaris
tgtgagaaccagccaatgcttccca

SEQ ID NO: 169956 - DNA, 25 bp, Canis familiaris
tgtgcgtctccagcagagttgcacc

SEQ ID NO: 169957 - DNA, 25 bp, Canis familiaris
tgtggttgtaccagtctcagactct

SEQ ID NO: 169958 - DNA, 25 bp, Canis familiaris
tgtggctcagatgccttgactaatt

SEQ ID NO: 169959 - DNA, 25 bp, Canis familiaris
tgggccagactggtgctgtttattt

SEQ ID NO: 169960 - DNA, 25 bp, Canis familiaris
tgtgtccaactctgtgtgtgtttta

SEQ ID NO: 169961 - DNA, 25 bp, Canis familiaris
tgtgtccaagcagtacgtgttccat

SEQ ID NO: 169962 - DNA, 25 bp, Canis familiaris
tgtgacccagcgaatctttcaccat

SEQ ID NO: 169963 - DNA, 25 bp, Canis familiaris
tgtacccggtacctgtaagaccaag

SEQ ID NO: 169964 - DNA, 25 bp, Canis familiaris
tgtaatcaaggacccttccgagcca

SEQ ID NO: 169965 - DNA, 25 bp, Canis familiaris
tgtcctaaagactgctagccagagc

SEQ ID NO: 169966 - DNA, 25 bp, Canis familiaris
tgtgcccaagcggggctcaggcaag

SEQ ID NO: 169967 - DNA, 25 bp, Canis familiaris
tgtgctgccacggcaggcccaggcc

SEQ ID NO: 169968 - DNA, 25 bp, Canis familiaris
tgtgtgcacacagactctcctgtgc

SEQ ID NO: 169969 - DNA, 25 bp, Canis familiaris
tgtgtgagaagcaccttctgctgcg

SEQ ID NO: 169970 - DNA, 25 bp, Canis familiaris
tgtggatcaattctctttgctcagc

SEQ ID NO: 169971 - DNA, 25 bp, Canis familiaris
tgtggacatattcatggttccccaa

SEQ ID NO: 169972 - DNA, 25 bp, Canis familiaris
tgtggacagttcatggatctcccca

SEQ ID NO: 169973 - DNA, 25 bp, Canis familiaris
tgcgagaacgacatcgacatcctgc

SEQ ID NO: 169974 - DNA, 25 bp, Canis familiaris
tgtggaactgactctacacctttcc

SEQ ID NO: 169975 - DNA, 25 bp, Canis familiaris
tgtggcaccgtctttaatttcttgg

SEQ ID NO: 169976 - DNA, 25 bp, Canis familiaris
tgtggaccggcttttgtttataaag

SEQ ID NO: 169977 - DNA, 25 bp, Canis familiaris
tgttgaccaggttgtagtttttact

SEQ ID NO: 169978 - DNA, 25 bp, Canis familiaris
tgtggcgctcggatatggttttttc

SEQ ID NO: 169979 - DNA, 25 bp, Canis familiaris
tgtgggctggtttaggttttgtgtt

SEQ ID NO: 169980 - DNA, 25 bp, Canis familiaris
tgtgtggattttagggtttttgtgt

SEQ ID NO: 169981 - DNA, 25 bp, Canis familiaris
tgtgctgtcctaaaggggtttccta

SEQ ID NO: 169982 - DNA, 25 bp, Canis familiaris
tgtggtgtctattagggggctatca

SEQ ID NO: 169983 - DNA, 25 bp, Canis familiaris
tgtgggctcatcattgtgggtgtaa

SEQ ID NO: 169984 - DNA, 25 bp, Canis familiaris
tgtgggctcatcatagtggctgtga

SEQ ID NO: 169985 - DNA, 25 bp, Canis familiaris
tgtggctcctcgtagtgacagtgag

SEQ ID NO: 169986 - DNA, 25 bp, Canis familiaris
tgtgccactccgactggaagagcgg

SEQ ID NO: 169987 - DNA, 25 bp, Canis familiaris
ttccgccctgtctgaagtcgggggc

SEQ ID NO: 169988 - DNA, 25 bp, Canis familiaris
tgtccccattccagaacctggtggg

SEQ ID NO: 169989 - DNA, 25 bp, Canis familiaris
tgtccttccctagagaccagatgga

SEQ ID NO: 169990 - DNA, 25 bp, Canis familiaris
tgtcaattgccctggaactgctgaa

SEQ ID NO: 169991 - DNA, 25 bp, Canis familiaris
tgtgcgtagcgccttggaagtgaga

SEQ ID NO: 169992 - DNA, 25 bp, Canis familiaris
tgtgtgttgcgcacgcgcacatgta

SEQ ID NO: 169993 - DNA, 25 bp, Canis familiaris
tgtctggaggtaccaccatgtaccc

SEQ ID NO: 169994 - DNA, 25 bp, Canis familiaris
tgtctggtggaaccaccatgtaccc

SEQ ID NO: 169995 - DNA, 25 bp, Canis familiaris
tgtcggcggaggaccacatggacga

SEQ ID NO: 169996 - DNA, 25 bp, Canis familiaris
tgtgtggcaggtgaccatcggcacc

SEQ ID NO: 169997 - DNA, 25 bp, Canis familiaris
tgtggctcaggctaagacacggccc

SEQ ID NO: 169998 - DNA, 25 bp, Canis familiaris
tgtgattcgcggaagtcctgccgcc

SEQ ID NO: 169999 - DNA, 25 bp, Canis familiaris
tgtggatctgggacagggtcacccg

SEQ ID NO: 170000 - DNA, 25 bp, Canis familiaris
tgtggatctgacccagggccatatc

SEQ ID NO: 170001 - DNA, 25 bp, Canis familiaris
tgtgtgctgcgaaggacgcgacttc

SEQ ID NO: 170002 - DNA, 25 bp, Canis familiaris
tgtactggaaggacctgccgtcctg

SEQ ID NO: 170003 - DNA, 25 bp, Canis familiaris
tgtacaaggagcctccgaggtcctg

SEQ ID NO: 170004 - DNA, 25 bp, Canis familiaris
tgtacaacgggatcgggctgccgac

SEQ ID NO: 170005 - DNA, 25 bp, Canis familiaris
tgtccagtcaggtattcttcctgcc

SEQ ID NO: 170006 - DNA, 25 bp, Canis familiaris
tgtgccaacagttaagttccctctt

SEQ ID NO: 170007 - DNA, 25 bp, Canis familiaris
tgtggcaccattggacgttggcgcc

SEQ ID NO: 170008 - DNA, 25 bp, Canis familiaris
tgtggctctgttccaagtactgccc

SEQ ID NO: 170009 - DNA, 25 bp, Canis familiaris
tgtgttcagtgctcattctgacgcc

SEQ ID NO: 170010 - DNA, 25 bp, Canis familiaris
tgtgatctcagtggtgcttccaggg

SEQ ID NO: 170011 - DNA, 25 bp, Canis familiaris
tgtgattatgtggctgctcttcggg

SEQ ID NO: 170012 - DNA, 25 bp, Canis familiaris
tgtgatatatatcgtgacttgggga

SEQ ID NO: 170013 - DNA, 25 bp, Canis familiaris
tgtgtgcatgttgtgtgtctgggtg

SEQ ID NO: 170014 - DNA, 25 bp, Canis familiaris
tgtggcatgtttgtatatctggctg

SEQ ID NO: 170015 - DNA, 25 bp, Canis familiaris
tgtgtctcttgtgtacacagactct

SEQ ID NO: 170016 - DNA, 25 bp, Canis familiaris
tgtgctttactttccacatacctgt

SEQ ID NO: 170017 - DNA, 25 bp, Canis familiaris
tgtgcatcagctctaacatcgtacc

SEQ ID NO: 170018 - DNA, 25 bp, Canis familiaris
tgtgtcactttgtacattttccctg

SEQ ID NO: 170019 - DNA, 25 bp, Canis familiaris
tgtggcactttgtaaaccacgcccc

SEQ ID NO: 170020 - DNA, 25 bp, Canis familiaris
tgtgagcacagcttgatacaccacc

SEQ ID NO: 170021 - DNA, 25 bp, Canis familiaris
tgtgtgacagggtgcagccaaccac

SEQ ID NO: 170022 - DNA, 25 bp, Canis familiaris
tgtgtgaagaggagaccaccgcgct

SEQ ID NO: 170023 - DNA, 25 bp, Canis familiaris
tgtgaggcgaggcgcagaccctcgc

SEQ ID NO: 170024 - DNA, 25 bp, Canis familiaris
tgtgtggcagggttagaccagcccc

SEQ ID NO: 170025 - DNA, 25 bp, Canis familiaris
tgtggcatgaggctccaagccaccc

SEQ ID NO: 170026 - DNA, 25 bp, Canis familiaris
tgtggagtggaggctctgaccaccc

SEQ ID NO: 170027 - DNA, 25 bp, Canis familiaris
tgtggatggtgaggactggctccgc

SEQ ID NO: 170028 - DNA, 25 bp, Canis familiaris
tgtggtgtgtgagatgtgggacgtc

SEQ ID NO: 170029 - DNA, 25 bp, Canis familiaris
tgtgtgtatgtgcagtggggaactc

SEQ ID NO: 170030 - DNA, 25 bp, Canis familiaris
tgtgtgagcagtgagggggccctca

SEQ ID NO: 170031 - DNA, 25 bp, Canis familiaris
tgtggagatctctgggggtctgcag

SEQ ID NO: 170032 - DNA, 25 bp, Canis familiaris
tgtgcggaatcaccaggggctgctg

SEQ ID NO: 170033 - DNA, 25 bp, Canis familiaris
tgtgagaaatcaccgattgcccttg

SEQ ID NO: 170034 - DNA, 25 bp, Canis familiaris
tgtggaaataatgcctgcctgctgc

SEQ ID NO: 170035 - DNA, 25 bp, Canis familiaris
tgtggaacaggtgcttcgccatgga

SEQ ID NO: 170036 - DNA, 25 bp, Canis familiaris
tgtggttcggatgttcttgcatgca

SEQ ID NO: 170037 - DNA, 25 bp, Canis familiaris
tgtagctggggtgtctttcataggt

SEQ ID NO: 170038 - DNA, 25 bp, Canis familiaris
tgtgtgggggtgcagtttgccatgg

SEQ ID NO: 170039 - DNA, 25 bp, Canis familiaris
tgtgtgggggtgttcagtgtccagc

SEQ ID NO: 170040 - DNA, 25 bp, Canis familiaris
tgtgctgggggggggttcatcacac

SEQ ID NO: 170041 - DNA, 25 bp, Canis familiaris
tgtgaggggagggtccgacactaca

SEQ ID NO: 170042 - DNA, 25 bp, Canis familiaris
tgtgaatgcggtccaacccaagaac

SEQ ID NO: 170043 - DNA, 25 bp, Canis familiaris
tgtgatctcgagaggcacatccaag

SEQ ID NO: 170044 - DNA, 25 bp, Canis familiaris
tgtgatctcgagaaggcacaattct

SEQ ID NO: 170045 - DNA, 25 bp, Canis familiaris
tgtgatcatcagaaaatcattaaca

SEQ ID NO: 170046 - DNA, 25 bp, Canis familiaris
tgtgttgaataaatctatagccaga

SEQ ID NO: 170047 - DNA, 25 bp, Canis familiaris
tgtgctctacatgactcgaatccag

SEQ ID NO: 170048 - DNA, 25 bp, Canis familiaris
tgtgtgcttgctccactagaacgaa

SEQ ID NO: 170049 - DNA, 25 bp, Canis familiaris
tttcgtccccataaaccatagttca

SEQ ID NO: 170050 - DNA, 25 bp, Canis familiaris
tgtgttttcccaaacccaagttcat

SEQ ID NO: 170051 - DNA, 25 bp, Canis familiaris
tgtgtatagtccatttcccaggtct

SEQ ID NO: 170052 - DNA, 25 bp, Canis familiaris
tgtgtccatttcattgttctacgtc

SEQ ID NO: 170053 - DNA, 25 bp, Canis familiaris
tgtgtgtgtttgctttgttacctct

SEQ ID NO: 170054 - DNA, 25 bp, Canis familiaris
tgtgtgtataccatgtctttaccca

SEQ ID NO: 170055 - DNA, 25 bp, Canis familiaris
tgtgtgtatcacggcttctttatcc

SEQ ID NO: 170056 - DNA, 25 bp, Canis familiaris
tgtgtgactcactttactgtttctc

SEQ ID NO: 170057 - DNA, 25 bp, Canis familiaris
tgtgtgtcacgctcaagtatttgtc

SEQ ID NO: 170058 - DNA, 25 bp, Canis familiaris
tgtgctggcctgtgaagcaatttgt

SEQ ID NO: 170059 - DNA, 25 bp, Canis familiaris
tgtgtgttttaaatcaattgctgtt

SEQ ID NO: 170060 - DNA, 25 bp, Canis familiaris
tgtggttattgccttaattcttttt

SEQ ID NO: 170061 - DNA, 25 bp, Canis familiaris
tgtggttttgatttacattttcctt

SEQ ID NO: 170062 - DNA, 25 bp, Canis familiaris
tgtgtgtattttttaaccgtcccat

SEQ ID NO: 170063 - DNA, 25 bp, Canis familiaris
tgtgtgtatttactaacccttccct

SEQ ID NO: 170064 - DNA, 25 bp, Canis familiaris
tgtggtttctaggattacctcccaa

SEQ ID NO: 170065 - DNA, 25 bp, Canis familiaris
tgtgtctttcttgttcagttaccga

SEQ ID NO: 170066 - DNA, 25 bp, Canis familiaris
tgtgtcttcagtatttcagggtccg

SEQ ID NO: 170067 - DNA, 25 bp, Canis familiaris
tgtgtctgtcacagtcattgatgtg

SEQ ID NO: 170068 - DNA, 25 bp, Canis familiaris
tgtgtggtacatgtgtatgcatgca

SEQ ID NO: 170069 - DNA, 25 bp, Canis familiaris
tgtgttgtagcagtgatgtcagtcc

SEQ ID NO: 170070 - DNA, 25 bp, Canis familiaris
tgtgtgcagtgggctatccaactca

SEQ ID NO: 170071 - DNA, 25 bp, Canis familiaris
tgtgtgaggtgacctcccatgcaca

SEQ ID NO: 170072 - DNA, 25 bp, Canis familiaris
tgtgtgaatacatccccacatcatc

SEQ ID NO: 170073 - DNA, 25 bp, Canis familiaris
tgtgtattccattccgctcgccaca

SEQ ID NO: 170074 - DNA, 25 bp, Canis familiaris
tgtgtttctcaaatgcgtggccatc

SEQ ID NO: 170075 - DNA, 25 bp, Canis familiaris
tgtgaaatctacatctgggcacccc

SEQ ID NO: 170076 - DNA, 25 bp, Canis familiaris
tgtgagcagtctgctttgttgcgcc

SEQ ID NO: 170077 - DNA, 25 bp, Canis familiaris
tgtggagtctgctcgtgattctccc

SEQ ID NO: 170078 - DNA, 25 bp, Canis familiaris
tgtgggtgccagtgtttcggcatcc

SEQ ID NO: 170079 - DNA, 25 bp, Canis familiaris
tgtgggtgtcagttggttccagtct

SEQ ID NO: 170080 - DNA, 25 bp, Canis familiaris
tgtggtggttgtagagcttctcgtg

SEQ ID NO: 170081 - DNA, 25 bp, Canis familiaris
tgtgtgtgtttgtgtctttttgtga

SEQ ID NO: 170082 - DNA, 25 bp, Canis familiaris
tgtgttggtcctaagtgtttttgca

SEQ ID NO: 170083 - DNA, 25 bp, Canis familiaris
tgtgggtcccttagttttgaccgtg

SEQ ID NO: 170084 - DNA, 25 bp, Canis familiaris
tgtgggtacctattattcttatcta

SEQ ID NO: 170085 - DNA, 25 bp, Canis familiaris
tgtgttttacatcttccttatctat

SEQ ID NO: 170086 - DNA, 25 bp, Canis familiaris
tgtggtattaatattctttttcatc

SEQ ID NO: 170087 - DNA, 25 bp, Canis familiaris
tgtgtgtgtatatgcccttttttct

SEQ ID NO: 170088 - DNA, 25 bp, Canis familiaris
tgtgtgttatgtgtcacttttttta

SEQ ID NO: 170089 - DNA, 25 bp, Canis familiaris
tgtggtttgttttgtttgctttgta

SEQ ID NO: 170090 - DNA, 25 bp, Canis familiaris
tgtgtgtttttgttgttgttgtttt

SEQ ID NO: 170091 - DNA, 25 bp, Canis familiaris
tgtgtgttccctatttttatccatt

SEQ ID NO: 170092 - DNA, 25 bp, Canis familiaris
tgtgttcttcaaatttttcccagcg

SEQ ID NO: 170093 - DNA, 25 bp, Canis familiaris
tgtgtgttttaattttctttatgga

SEQ ID NO: 170094 - DNA, 25 bp, Canis familiaris
tgtgtgtgtgtatgacattccttta

SEQ ID NO: 170095 - DNA, 25 bp, Canis familiaris
tgtggtctatgtggacatgtcccta

SEQ ID NO: 170096 - DNA, 25 bp, Canis familiaris
tgtgtgtttgtggtgtgtactcgaa

SEQ ID NO: 170097 - DNA, 25 bp, Canis familiaris
tgtgtgtgtgtgtttgttgttccga

SEQ ID NO: 170098 - DNA, 25 bp, Canis familiaris
tgtgtggtgttgtctgtatatgcta

SEQ ID NO: 170099 - DNA, 25 bp, Canis familiaris
tgtgtaggcttgttcttctcatatc

SEQ ID NO: 170100 - DNA, 25 bp, Canis familiaris
tgtggtgccttgttttctgcattaa

SEQ ID NO: 170101 - DNA, 25 bp, Canis familiaris
tgtggttgtgtgttttctgagcgag

SEQ ID NO: 170102 - DNA, 25 bp, Canis familiaris
tgtggtgtgttgtttgggggagtta

SEQ ID NO: 170103 - DNA, 25 bp, Canis familiaris
tgtggtctgacgttgtggggggtcc

SEQ ID NO: 170104 - DNA, 25 bp, Canis familiaris
tgtgggctgaagcaggggctgggca

SEQ ID NO: 170105 - DNA, 25 bp, Canis familiaris
tgtggtgatgcgtgcagtggcgctg

SEQ ID NO: 170106 - DNA, 25 bp, Canis familiaris
tgtgcgtgatgagcgcagcgtccat

SEQ ID NO: 170107 - DNA, 25 bp, Canis familiaris
tgtcgtcaaccagggcttctttgaa

SEQ ID NO: 170108 - DNA, 25 bp, Canis familiaris
tgtgcgaaacgtgaacattttgagg

SEQ ID NO: 170109 - DNA, 25 bp, Canis familiaris
tgtgggattgctcctatccatttta

SEQ ID NO: 170110 - DNA, 25 bp, Canis familiaris
tgataggttaccatagtttaattac

SEQ ID NO: 170111 - DNA, 25 bp, Canis familiaris
tgtaggtggaccccgtgtggaaata

SEQ ID NO: 170112 - DNA, 25 bp, Canis familiaris
tgtggtgggacagcggctttctaaa

SEQ ID NO: 170113 - DNA, 25 bp, Canis familiaris
tgacgcgctgagatccgggtttaac

SEQ ID NO: 170114 - DNA, 25 bp, Canis familiaris
tgatcgagcggaaccaggcgctgtc

SEQ ID NO: 170115 - DNA, 25 bp, Canis familiaris
tgtgtcgctggagacgagcgcgcta

SEQ ID NO: 170116 - DNA, 25 bp, Canis familiaris
tgtgtcactgtaaacaccgccttta

SEQ ID NO: 170117 - DNA, 25 bp, Canis familiaris
tgctccaagtaaacctccaatctta

SEQ ID NO: 170118 - DNA, 25 bp, Canis familiaris
tgtccgactacaacagtccagaatg

SEQ ID NO: 170119 - DNA, 25 bp, Canis familiaris
tgcccaggctacagcctttgtactg

SEQ ID NO: 170120 - DNA, 25 bp, Canis familiaris
tgtacacactacagccagatgttaa

SEQ ID NO: 170121 - DNA, 25 bp, Canis familiaris
tgtcgccagttgtgcacttttacaa

SEQ ID NO: 170122 - DNA, 25 bp, Canis familiaris
tgtccacaacttcatattttaccaa

SEQ ID NO: 170123 - DNA, 25 bp, Canis familiaris
tgtcctattcctcgtgtttctgaca

SEQ ID NO: 170124 - DNA, 25 bp, Canis familiaris
tgtcctagtcacactgttatccgat

SEQ ID NO: 170125 - DNA, 25 bp, Canis familiaris
tgttcaggtcagtgatgtagatttg

SEQ ID NO: 170126 - DNA, 25 bp, Canis familiaris
tgtccagggcattgcagatgattat

SEQ ID NO: 170127 - DNA, 25 bp, Canis familiaris
tgtccactgtgttgcatttgctgat

SEQ ID NO: 170128 - DNA, 25 bp, Canis familiaris
tgtgcagccgcttacatgtctgaag

SEQ ID NO: 170129 - DNA, 25 bp, Canis familiaris
tgtgcaccatgtgcacactctgtct

SEQ ID NO: 170130 - DNA, 25 bp, Canis familiaris
tgtgaactgcatgctgacatttcat

SEQ ID NO: 170131 - DNA, 25 bp, Canis familiaris
tgtgatgcccatggatggcatttta

SEQ ID NO: 170132 - DNA, 25 bp, Canis familiaris
tgtgatgcctgttgagtcagatgct

SEQ ID NO: 170133 - DNA, 25 bp, Canis familiaris
tgtgtcactgtgatgtcagtcctcc

SEQ ID NO: 170134 - DNA, 25 bp, Canis familiaris
tgtgtcatttgaggttgggccgctg

SEQ ID NO: 170135 - DNA, 25 bp, Canis familiaris
tgtgttttcggaagggtgccagttt

SEQ ID NO: 170136 - DNA, 25 bp, Canis familiaris
tgtgtcttcatcggtgtgggtgccg

SEQ ID NO: 170137 - DNA, 25 bp, Canis familiaris
tgtgtcactggtggtctgggatgcc

SEQ ID NO: 170138 - DNA, 25 bp, Canis familiaris
tgtgtcacctatttctatggctcgc

SEQ ID NO: 170139 - DNA, 25 bp, Canis familiaris
tgtgtgcctctttagaatcagcttc

SEQ ID NO: 170140 - DNA, 25 bp, Canis familiaris
tgtgtgcctctgagggacagctctg

SEQ ID NO: 170141 - DNA, 25 bp, Canis familiaris
tgtgggccaggaggtggcagctctc

SEQ ID NO: 170142 - DNA, 25 bp, Canis familiaris
tgtgggcagactctggtcaggcatc

SEQ ID NO: 170143 - DNA, 25 bp, Canis familiaris
tgtgtggcaccatgggatcaggagt

SEQ ID NO: 170144 - DNA, 25 bp, Canis familiaris
tgtctggctggcttggtgccagggt

SEQ ID NO: 170145 - DNA, 25 bp, Canis familiaris
tgtgaaggagacctgtgcctggttc

SEQ ID NO: 170146 - DNA, 25 bp, Canis familiaris
tgtgacaggagccgtggcgtgtgtc

SEQ ID NO: 170147 - DNA, 25 bp, Canis familiaris
tgtgaagctcactgtgagcaatgtg

SEQ ID NO: 170148 - DNA, 25 bp, Canis familiaris
tgtgcacctgccttgaagttgtgtt

SEQ ID NO: 170149 - DNA, 25 bp, Canis familiaris
tgtgccccccaatctctatggggac

SEQ ID NO: 170150 - DNA, 25 bp, Canis familiaris
tgtgtcctgtcctccatggagggga

SEQ ID NO: 170151 - DNA, 25 bp, Canis familiaris
tgtgttttcccaccatcgatgtggg

SEQ ID NO: 170152 - DNA, 25 bp, Canis familiaris
tgtgtttatccgtccacagtgtgcc

SEQ ID NO: 170153 - DNA, 25 bp, Canis familiaris
tgtgaactcatgcaaccacagggcc

SEQ ID NO: 170154 - DNA, 25 bp, Canis familiaris
tgtgttccaagtaaccagtgcctgc

SEQ ID NO: 170155 - DNA, 25 bp, Canis familiaris
tgtgacccaggtgacacattctcca

SEQ ID NO: 170156 - DNA, 25 bp, Canis familiaris
tgtgataacagtggccatccttctt

SEQ ID NO: 170157 - DNA, 25 bp, Canis familiaris
tgtgagacggtcttcaatcttctgt

SEQ ID NO: 170158 - DNA, 25 bp, Canis familiaris
tgtgcaaacaatctcaagagctgct

SEQ ID NO: 170159 - DNA, 25 bp, Canis familiaris
tgtgtacaattcctcgtgatgctgc

SEQ ID NO: 170160 - DNA, 25 bp, Canis familiaris
tgtgtgtgatattcctgctgtgagg

SEQ ID NO: 170161 - DNA, 25 bp, Canis familiaris
tgtgtatattgggcctgatgatgcg

SEQ ID NO: 170162 - DNA, 25 bp, Canis familiaris
tgtgctgcttggggcctatagtgat

SEQ ID NO: 170163 - DNA, 25 bp, Canis familiaris
tgtgagttggagaatcttggcagat

SEQ ID NO: 170164 - DNA, 25 bp, Canis familiaris
tgtgagctgctcaagaacttcgcca

SEQ ID NO: 170165 - DNA, 25 bp, Canis familiaris
tgtgggctaagctgcttgccgaagc

SEQ ID NO: 170166 - DNA, 25 bp, Canis familiaris
tgtgcgctgctatgatcgcacgccg

SEQ ID NO: 170167 - DNA, 25 bp, Canis familiaris
tgtgtctctcattgtccagcagacc

SEQ ID NO: 170168 - DNA, 25 bp, Canis familiaris
tgtgtcttctttgcgcataatctca

SEQ ID NO: 170169 - DNA, 25 bp, Canis familiaris
tgtgtttcttcctcagagcactgaa

SEQ ID NO: 170170 - DNA, 25 bp, Canis familiaris
tgtgtgttcctttaatgtactgtac

SEQ ID NO: 170171 - DNA, 25 bp, Canis familiaris
tgtgtgttcctttcagattttaaaa

SEQ ID NO: 170172 - DNA, 25 bp, Canis familiaris
tgtgtttcagcactactattgttga

SEQ ID NO: 170173 - DNA, 25 bp, Canis familiaris
tgtgccaacaagtaccatggttgaa

SEQ ID NO: 170174 - DNA, 25 bp, Canis familiaris
tgtgccaaagaggtcttggttggac

SEQ ID NO: 170175 - DNA, 25 bp, Canis familiaris
tgtccagcgggtgcttcttggagag

SEQ ID NO: 170176 - DNA, 25 bp, Canis familiaris
tgtcaaccagggactgcttggcgga

SEQ ID NO: 170177 - DNA, 25 bp, Canis familiaris
tgtccctgaggggtgcttagcctat

SEQ ID NO: 170178 - DNA, 25 bp, Canis familiaris
tgtactctagtatagcttggtctta

SEQ ID NO: 170179 - DNA, 25 bp, Canis familiaris
tgtgagctcctttcaactgtggtta

SEQ ID NO: 170180 - DNA, 25 bp, Canis familiaris
tgtgtgttctgatgacctggttata

SEQ ID NO: 170181 - DNA, 25 bp, Canis familiaris
tgtgtgtttatctcgtgtgtgtgtg

SEQ ID NO: 170182 - DNA, 25 bp, Canis familiaris
tgtgtgtttctctcagtatgataaa

SEQ ID NO: 170183 - DNA, 25 bp, Canis familiaris
tgtgtgtctacttgctcatttacta

SEQ ID NO: 170184 - DNA, 25 bp, Canis familiaris
tgtgtgtccacttgtgtatttttaa

SEQ ID NO: 170185 - DNA, 25 bp, Canis familiaris
tgtgtgctcccttgtgtttataaca

SEQ ID NO: 170186 - DNA, 25 bp, Canis familiaris
tgtgtgtatctctgtgtgcatctat

SEQ ID NO: 170187 - DNA, 25 bp, Canis familiaris
tgtgtctctctgtgtgatccataaa

SEQ ID NO: 170188 - DNA, 25 bp, Canis familiaris
tgtgtgtctctgtgtatcacatctt

SEQ ID NO: 170189 - DNA, 25 bp, Canis familiaris
tgtgtgtgctttgctctacacttac

SEQ ID NO: 170190 - DNA, 25 bp, Canis familiaris
tgtgggctttattatcatgacctaa

SEQ ID NO: 170191 - DNA, 25 bp, Canis familiaris
tgtgggtcatgttatgcctcaccta

SEQ ID NO: 170192 - DNA, 25 bp, Canis familiaris
tgtgttgccatgtcatcagcaccac

SEQ ID NO: 170193 - DNA, 25 bp, Canis familiaris
tgtgtatccgttccacaaaggctcc

SEQ ID NO: 170194 - DNA, 25 bp, Canis familiaris
tgtgtgcagccgagccataaagagc

SEQ ID NO: 170195 - DNA, 25 bp, Canis familiaris
tgtgtgcccgtggccaacaagaggg

SEQ ID NO: 170196 - DNA, 25 bp, Canis familiaris
tgtatgcctctggtcgtaccacggg

SEQ ID NO: 170197 - DNA, 25 bp, Canis familiaris
tgtgtttgtgttcatacccgggtaa

SEQ ID NO: 170198 - DNA, 25 bp, Canis familiaris
tgtgctttgtttcacagcggcagcg

SEQ ID NO: 170199 - DNA, 25 bp, Canis familiaris
tgtgcgacgtgtcaactgctggagc

SEQ ID NO: 170200 - DNA, 25 bp, Canis familiaris
tgtgaaactgcgcaacagtcaccgc

SEQ ID NO: 170201 - DNA, 25 bp, Canis familiaris
tgtcatcaacgggaagcccatcacc

SEQ ID NO: 170202 - DNA, 25 bp, Canis familiaris
tgtgtagacggaaaggctcaaaccc

SEQ ID NO: 170203 - DNA, 25 bp, Canis familiaris
tgttagagttcttaagcaaaaccct

SEQ ID NO: 170204 - DNA, 25 bp, Canis familiaris
tgtccgcgtttaaggggagatccct

SEQ ID NO: 170205 - DNA, 25 bp, Canis familiaris
tgtgagcgggtgtggttgggtccca

SEQ ID NO: 170206 - DNA, 25 bp, Canis familiaris
tgtgaggtgggacgggagggcccca

SEQ ID NO: 170207 - DNA, 25 bp, Canis familiaris
tgtcacgttggagtcggaagcgcct

SEQ ID NO: 170208 - DNA, 25 bp, Canis familiaris
tgtcctcaatgccttcgtgaaatcc

SEQ ID NO: 170209 - DNA, 25 bp, Canis familiaris
tgtgcccctgggagagaaacggaaa

SEQ ID NO: 170210 - DNA, 25 bp, Canis familiaris
tgtcccggggcacatgccccaaaaa

SEQ ID NO: 170211 - DNA, 25 bp, Canis familiaris
tgtcccgggagcccatttaaacaat

SEQ ID NO: 170212 - DNA, 25 bp, Canis familiaris
tgtccacgtggaagtttttaaatga

SEQ ID NO: 170213 - DNA, 25 bp, Canis familiaris
tgtgccccaagaaagtctgttaaaa

SEQ ID NO: 170214 - DNA, 25 bp, Canis familiaris
tgtgctctcaaaccaaatcttaaaa

SEQ ID NO: 170215 - DNA, 25 bp, Canis familiaris
tgtgtgttacgtttatctctcagaa

SEQ ID NO: 170216 - DNA, 25 bp, Canis familiaris
tgtgaacaatggcttctcccaaata

SEQ ID NO: 170217 - DNA, 25 bp, Canis familiaris
tgtgaacatttgctttctccaaata

SEQ ID NO: 170218 - DNA, 25 bp, Canis familiaris
tgtgaggattttccgtccaaccaga

SEQ ID NO: 170219 - DNA, 25 bp, Canis familiaris
tgtgcttatttgtgctgtccaactc

SEQ ID NO: 170220 - DNA, 25 bp, Canis familiaris
tgtgttaatgatgtgtgctccctct

SEQ ID NO: 170221 - DNA, 25 bp, Canis familiaris
tgtgcttaacgacagcaccctcatc

SEQ ID NO: 170222 - DNA, 25 bp, Canis familiaris
tgtctgaaacggagcgccagtccat

SEQ ID NO: 170223 - DNA, 25 bp, Canis familiaris
tgttgcagaagccggtagtacccat

SEQ ID NO: 170224 - DNA, 25 bp, Canis familiaris
tgtgtgcaaagcacccaaacccagc

SEQ ID NO: 170225 - DNA, 25 bp, Canis familiaris
tgttgcaagaccctcctaacaacac

SEQ ID NO: 170226 - DNA, 25 bp, Canis familiaris
tgtgtcacacaggttcctaacaccc

SEQ ID NO: 170227 - DNA, 25 bp, Canis familiaris
tgtgtccaaagccatcactgatccc

SEQ ID NO: 170228 - DNA, 25 bp, Canis familiaris
tgtgtccaaagccatcactgatccc

SEQ ID NO: 170229 - DNA, 25 bp, Canis familiaris
tgtgtgtacacgcatgcactgtgca

SEQ ID NO: 170230 - DNA, 25 bp, Canis familiaris
tgtgtgatagcccactggatggcat

SEQ ID NO: 170231 - DNA, 25 bp, Canis familiaris
tgtgtgatattcctgctgtgaggaa

SEQ ID NO: 170232 - DNA, 25 bp, Canis familiaris
tgtgtgtatctccgtatatgtgaaa

SEQ ID NO: 170233 - DNA, 25 bp, Canis familiaris
tgtgtgtctctcagtatgacaaaac

SEQ ID NO: 170234 - DNA, 25 bp, Canis familiaris
tgtgtgacacacagacagacagaca

SEQ ID NO: 170235 - DNA, 25 bp, Canis familiaris
tgtgtcaacgcacgctgcgtcaaca

SEQ ID NO: 170236 - DNA, 25 bp, Canis familiaris
tgtgtcagagcactgagctccaccc

SEQ ID NO: 170237 - DNA, 25 bp, Canis familiaris
tgtgtgatctgcctagattaccctt

SEQ ID NO: 170238 - DNA, 25 bp, Canis familiaris
tgtgtaccaccagtggacccactag

SEQ ID NO: 170239 - DNA, 25 bp, Canis familiaris
tgtgatttcaccgaggaccagaccg

SEQ ID NO: 170240 - DNA, 25 bp, Canis familiaris
tgtgacttacacaggagcgactccc

SEQ ID NO: 170241 - DNA, 25 bp, Canis familiaris
tgtgaatttccaaagaggcctccag

SEQ ID NO: 170242 - DNA, 25 bp, Canis familiaris
tgtgcattttctcctgaggtttcca

SEQ ID NO: 170243 - DNA, 25 bp, Canis familiaris
tgtgtttgagcgcgagagtctccca

SEQ ID NO: 170244 - DNA, 25 bp, Canis familiaris
tgtgagtgtgggcagacagtccccg

SEQ ID NO: 170245 - DNA, 25 bp, Canis familiaris
tgtgcagtcaggggaacctccctgc

SEQ ID NO: 170246 - DNA, 25 bp, Canis familiaris
tgtgcagacatttctgaaccccgca

SEQ ID NO: 170247 - DNA, 25 bp, Canis familiaris
tgtgagcaatgtgctgaaagagata

SEQ ID NO: 170248 - DNA, 25 bp, Canis familiaris
tgtgtgccatctgcctggatgagta

SEQ ID NO: 170249 - DNA, 25 bp, Canis familiaris
tgtgtgctcagcgccatgaagatgg

SEQ ID NO: 170250 - DNA, 25 bp, Canis familiaris
tgtgctgcaacgacgagagcggcga

SEQ ID NO: 170251 - DNA, 25 bp, Canis familiaris
tgtcacagagccaaggcagttcgag

SEQ ID NO: 170252 - DNA, 25 bp, Canis familiaris
tgtccggcgcctggagtataagccc

SEQ ID NO: 170253 - DNA, 25 bp, Canis familiaris
tgtcctgaggtctgcggactgaccc

SEQ ID NO: 170254 - DNA, 25 bp, Canis familiaris
tgtgccgggtcaggggaggaaccat

SEQ ID NO: 170255 - DNA, 25 bp, Canis familiaris
tgtccaggccctgaggagggagcct

SEQ ID NO: 170256 - DNA, 25 bp, Canis familiaris
tgtgccacctccacagtgaggagcc

SEQ ID NO: 170257 - DNA, 25 bp, Canis familiaris
tgtccatccgaatcacgtgagtgtc

SEQ ID NO: 170258 - DNA, 25 bp, Canis familiaris
tgtcctgggtccgaagtcagtggct

SEQ ID NO: 170259 - DNA, 25 bp, Canis familiaris
tgtcctgggtccgaagtcagtggct

SEQ ID NO: 170260 - DNA, 25 bp, Canis familiaris
tgtcctgggtccgaagtcagtggct

SEQ ID NO: 170261 - DNA, 25 bp, Canis familiaris
tgtcctgggtccgaagtcagtggct

SEQ ID NO: 170262 - DNA, 25 bp, Canis familiaris
tgtcctgggtccgaagtcagtggct

SEQ ID NO: 170263 - DNA, 25 bp, Canis familiaris
tgtactcggccatggggtatggctc

SEQ ID NO: 170264 - DNA, 25 bp, Canis familiaris
tgtccgggcgagggtgggaggtcgg

SEQ ID NO: 170265 - DNA, 25 bp, Canis familiaris
tgtagttggggtttggggactctgg

SEQ ID NO: 170266 - DNA, 25 bp, Canis familiaris
tctccctttggttgtcggaacctgg

SEQ ID NO: 170267 - DNA, 25 bp, Canis familiaris
tgccccttttggtgggaagcttgac

SEQ ID NO: 170268 - DNA, 25 bp, Canis familiaris
tgccccctttggggtagaccttgag

SEQ ID NO: 170269 - DNA, 25 bp, Canis familiaris
tctcccaaattcgtccttacctggg

SEQ ID NO: 170270 - DNA, 25 bp, Canis familiaris
tgtcccaaactgggcctaacctcaa

SEQ ID NO: 170271 - DNA, 25 bp, Canis familiaris
tgtcccaggaacatacctacccaaa

SEQ ID NO: 170272 - DNA, 25 bp, Canis familiaris
tgtccgtagaatgtaccttccacca

SEQ ID NO: 170273 - DNA, 25 bp, Canis familiaris
tgtcactgtagtgtgtaagcccccc

SEQ ID NO: 170274 - DNA, 25 bp, Canis familiaris
tgtcctgtcattctgttcaggccaa

SEQ ID NO: 170275 - DNA, 25 bp, Canis familiaris
tgtccactagctctttgctcagaaa

SEQ ID NO: 170276 - DNA, 25 bp, Canis familiaris
tgtccctggctgttgttgcaatgga

SEQ ID NO: 170277 - DNA, 25 bp, Canis familiaris
tgtccactggcctggtcagagaaag

SEQ ID NO: 170278 - DNA, 25 bp, Canis familiaris
tgtccaaatctctggctggggagac

SEQ ID NO: 170279 - DNA, 25 bp, Canis familiaris
tgtccaagttcccttaggcgtattg

SEQ ID NO: 170280 - DNA, 25 bp, Canis familiaris
tgtcccagttcgacttaccgaaatg

SEQ ID NO: 170281 - DNA, 25 bp, Canis familiaris
ttcccgtttcttaacgccaaatgcg

SEQ ID NO: 170282 - DNA, 25 bp, Canis familiaris
tgtccccagttataacaccaattca

SEQ ID NO: 170283 - DNA, 25 bp, Canis familiaris
tgtccccggtactcaatcggtgtag

SEQ ID NO: 170284 - DNA, 25 bp, Canis familiaris
tgtccccaatgtctccagacgaaga

SEQ ID NO: 170285 - DNA, 25 bp, Canis familiaris
tgtgcgccccaaggctggaggggag

SEQ ID NO: 170286 - DNA, 25 bp, Canis familiaris
tgtgctcagcgccatgaagatggag

SEQ ID NO: 170287 - DNA, 25 bp, Canis familiaris
tgtccgcagtgctgcagcaggagca

SEQ ID NO: 170288 - DNA, 25 bp, Canis familiaris
tgtgtcgcagttggcagagtacggg

SEQ ID NO: 170289 - DNA, 25 bp, Canis familiaris
tgtgctctggaaacaggccacgggc

SEQ ID NO: 170290 - DNA, 25 bp, Canis familiaris
tgtctcggataagcagggcggccaa

SEQ ID NO: 170291 - DNA, 25 bp, Canis familiaris
tgtcctagaaagttgctggctggct

SEQ ID NO: 170292 - DNA, 25 bp, Canis familiaris
tgtgcggaaccacccggggctgctg

SEQ ID NO: 170293 - DNA, 25 bp, Canis familiaris
tgtgcggcaaccgcaagaagcccgg

SEQ ID NO: 170294 - DNA, 25 bp, Canis familiaris
tgaggaccccgagaaacagacgctg

SEQ ID NO: 170295 - DNA, 25 bp, Canis familiaris
tgaagaaccccgggaatcccgctgt

SEQ ID NO: 170296 - DNA, 25 bp, Canis familiaris
tgaccaaaaatccggacacctccat

SEQ ID NO: 170297 - DNA, 25 bp, Canis familiaris
tgatcaagaaattacaatatacgtc

SEQ ID NO: 170298 - DNA, 25 bp, Canis familiaris
tgtaagtgatgatcaccaaatccta

SEQ ID NO: 170299 - DNA, 25 bp, Canis familiaris
tgtgttccatgagcctcaaattcat

SEQ ID NO: 170300 - DNA, 25 bp, Canis familiaris
tgtgtacgaatgctcatgaaagtat

SEQ ID NO: 170301 - DNA, 25 bp, Canis familiaris
tgtgtcacgagtcctctagaggtat

SEQ ID NO: 170302 - DNA, 25 bp, Canis familiaris
tgtgtccgggatcttggttcattct

SEQ ID NO: 170303 - DNA, 25 bp, Canis familiaris
tgtgtcaatggaactatttggtttc

SEQ ID NO: 170304 - DNA, 25 bp, Canis familiaris
tgtgagcttgctgacttttgttttc

SEQ ID NO: 170305 - DNA, 25 bp, Canis familiaris
tgtacagatctgccactaattgtga

SEQ ID NO: 170306 - DNA, 25 bp, Canis familiaris
tgtgcacaggctacacttgggtctt

SEQ ID NO: 170307 - DNA, 25 bp, Canis familiaris
tgtgcaaccattgctttggccttga

SEQ ID NO: 170308 - DNA, 25 bp, Canis familiaris
tgtgatggcccagctgtttgactaa

SEQ ID NO: 170309 - DNA, 25 bp, Canis familiaris
tgtgatggtcctgttgtgtaataaa

SEQ ID NO: 170310 - DNA, 25 bp, Canis familiaris
tgtgacggccatgctggtggggaaa

SEQ ID NO: 170311 - DNA, 25 bp, Canis familiaris
tgtgaggcttgtttgcgttgggaga

SEQ ID NO: 170312 - DNA, 25 bp, Canis familiaris
tgtgaggtgagttggggggacgatg

SEQ ID NO: 170313 - DNA, 25 bp, Canis familiaris
tgtgcaggtggtcgtcggtgaacgc

SEQ ID NO: 170314 - DNA, 25 bp, Canis familiaris
tgtgctggtttggttggcacacccc

SEQ ID NO: 170315 - DNA, 25 bp, Canis familiaris
tgtgtatgtgtgcgtaatcccaccc

SEQ ID NO: 170316 - DNA, 25 bp, Canis familiaris
tgtgatcttgtttcatattcccaac

SEQ ID NO: 170317 - DNA, 25 bp, Canis familiaris
tgtgttctattatcattcaccccct

SEQ ID NO: 170318 - DNA, 25 bp, Canis familiaris
tgtgttacattattatccattcatc

SEQ ID NO: 170319 - DNA, 25 bp, Canis familiaris
tgtgtttatttttccttatgtactc

SEQ ID NO: 170320 - DNA, 25 bp, Canis familiaris
tgtgtttatttgccttttctttgtt

SEQ ID NO: 170321 - DNA, 25 bp, Canis familiaris
tgtgttgtgtgttccctatttttat

SEQ ID NO: 170322 - DNA, 25 bp, Canis familiaris
tgtgtttgttgttccgactttttat

SEQ ID NO: 170323 - DNA, 25 bp, Canis familiaris
tgtccaggttttccaaagtctctta

SEQ ID NO: 170324 - DNA, 25 bp, Canis familiaris
tgtcctctgttctgtaaagttctgt

SEQ ID NO: 170325 - DNA, 25 bp, Canis familiaris
tgtaattttgtcctaaggttccact

SEQ ID NO: 170326 - DNA, 25 bp, Canis familiaris
tgtacatttttacaggggtgcccct

SEQ ID NO: 170327 - DNA, 25 bp, Canis familiaris
tgtgccaaggcttaaagggtttcct

SEQ ID NO: 170328 - DNA, 25 bp, Canis familiaris
tgtccaagcctaaaggtttctttct

SEQ ID NO: 170329 - DNA, 25 bp, Canis familiaris
tgtcccaccgaaacgttgtcaacgt

SEQ ID NO: 170330 - DNA, 25 bp, Canis familiaris
tgtcaccccaagacaagtttaccct

SEQ ID NO: 170331 - DNA, 25 bp, Canis familiaris
tgtcctcccaaggaattgtttccca

SEQ ID NO: 170332 - DNA, 25 bp, Canis familiaris
tgtcctcccaaatcaaatcttcata

SEQ ID NO: 170333 - DNA, 25 bp, Canis familiaris
tgtcccccaagatcagacttaaagt

SEQ ID NO: 170334 - DNA, 25 bp, Canis familiaris
tgtcccgccggatcgttaagagaac

SEQ ID NO: 170335 - DNA, 25 bp, Canis familiaris
tgtcccaggcggaggcttttggacc

SEQ ID NO: 170336 - DNA, 25 bp, Canis familiaris
tgtccgcatggcccagcggtttatc

SEQ ID NO: 170337 - DNA, 25 bp, Canis familiaris
tgtccagcagtgctactcggtgtac

SEQ ID NO: 170338 - DNA, 25 bp, Canis familiaris
tgtccacaggtccactcaagttacc

SEQ ID NO: 170339 - DNA, 25 bp, Canis familiaris
tgtccctggtcgttcagatctattc

SEQ ID NO: 170340 - DNA, 25 bp, Canis familiaris
tgtgcagactgagcgtgtgccacta

SEQ ID NO: 170341 - DNA, 25 bp, Canis familiaris
tgtgatgactagggccagcctctga

SEQ ID NO: 170342 - DNA, 25 bp, Canis familiaris
tgtgagaatagttgctcctcctgct

SEQ ID NO: 170343 - DNA, 25 bp, Canis familiaris
tgtgaggtagggtctcacctgccat

SEQ ID NO: 170344 - DNA, 25 bp, Canis familiaris
tgtgagtgaacatacgccactgcct

SEQ ID NO: 170345 - DNA, 25 bp, Canis familiaris
tgtgacatggtctacctggatccac

SEQ ID NO: 170346 - DNA, 25 bp, Canis familiaris
tgtgaaggttaattgctgtgctgca

SEQ ID NO: 170347 - DNA, 25 bp, Canis familiaris
tgtgagcagctgtttgttggcctgg

SEQ ID NO: 170348 - DNA, 25 bp, Canis familiaris
tgtgagcagctgtttgttggcctgg

SEQ ID NO: 170349 - DNA, 25 bp, Canis familiaris
tgtgcacgtgtgtgtgcgaccagag

SEQ ID NO: 170350 - DNA, 25 bp, Canis familiaris
tgtgatcgtgttttcaagacagact

SEQ ID NO: 170351 - DNA, 25 bp, Canis familiaris
tgtcagcagttttcacaagcaggaa

SEQ ID NO: 170352 - DNA, 25 bp, Canis familiaris
tgtgcagcgcttcaacagtgccaat

SEQ ID NO: 170353 - DNA, 25 bp, Canis familiaris
tgtgctgcctggaacatagtgtgaa

SEQ ID NO: 170354 - DNA, 25 bp, Canis familiaris
tgtgctgcatctgatttagttacta

SEQ ID NO: 170355 - DNA, 25 bp, Canis familiaris
tgtgtctacttgctcatttactact

SEQ ID NO: 170356 - DNA, 25 bp, Canis familiaris
tgtgtacactgacattcattactgt

SEQ ID NO: 170357 - DNA, 25 bp, Canis familiaris
tgtgtactcatgttactcatcccta

SEQ ID NO: 170358 - DNA, 25 bp, Canis familiaris
tgtgtcaccctgtagctacacacat

SEQ ID NO: 170359 - DNA, 25 bp, Canis familiaris
ctaaccacccattcttaactaagag

SEQ ID NO: 170360 - DNA, 25 bp, Canis familiaris
tgtgtatcccaattcaaataacctg

SEQ ID NO: 170361 - DNA, 25 bp, Canis familiaris
tgtgtatactccggaaaaccctctc

SEQ ID NO: 170362 - DNA, 25 bp, Canis familiaris
tgtgtatgggcctaaaaggtcccta

SEQ ID NO: 170363 - DNA, 25 bp, Canis familiaris
tgtgaattgccccaaataggtctgg

SEQ ID NO: 170364 - DNA, 25 bp, Canis familiaris
tgtgacattccacagagctactgtc

SEQ ID NO: 170365 - DNA, 25 bp, Canis familiaris
tgtcaactccaggatgctctacttc

SEQ ID NO: 170366 - DNA, 25 bp, Canis familiaris
tgtcatagcccagagctttctctgt

SEQ ID NO: 170367 - DNA, 25 bp, Canis familiaris
tgtgttccaagccagcttttcttac

SEQ ID NO: 170368 - DNA, 25 bp, Canis familiaris
tgtgtatctatcacctcttctttat

SEQ ID NO: 170369 - DNA, 25 bp, Canis familiaris
tgtgtatgtgcagccattcttcttt

SEQ ID NO: 170370 - DNA, 25 bp, Canis familiaris
tgtgttgtcccaaatgcctgtttag

SEQ ID NO: 170371 - DNA, 25 bp, Canis familiaris
tgtgtctctcctgaataaatacata

SEQ ID NO: 170372 - DNA, 25 bp, Canis familiaris
tgtgtcctctctctgaaaaactgtc

SEQ ID NO: 170373 - DNA, 25 bp, Canis familiaris
tgtgtactttaataaaactctgcaa

SEQ ID NO: 170374 - DNA, 25 bp, Canis familiaris
tgtgatagtttagaaatatccccac

SEQ ID NO: 170375 - DNA, 25 bp, Canis familiaris
tgtccaggtgtaaacttgtccccac

SEQ ID NO: 170376 - DNA, 25 bp, Canis familiaris
tgtgaagactctacaacttgttcca

SEQ ID NO: 170377 - DNA, 25 bp, Canis familiaris
tgtagagccattgcaatgcatcaat

SEQ ID NO: 170378 - DNA, 25 bp, Canis familiaris
tgtgaggccttccttaacattgtcc

SEQ ID NO: 170379 - DNA, 25 bp, Canis familiaris
tgtgttcacttccttggcaagagtc

SEQ ID NO: 170380 - DNA, 25 bp, Canis familiaris
tgtgtagcactaggttgtcgagggc

SEQ ID NO: 170381 - DNA, 25 bp, Canis familiaris
tgtacaggtacccattcgaaggggg

SEQ ID NO: 170382 - DNA, 25 bp, Canis familiaris
tctaagtaacctcttttggggctgt

SEQ ID NO: 170383 - DNA, 25 bp, Canis familiaris
tgtaaaggccctgttttgaggttgt

SEQ ID NO: 170384 - DNA, 25 bp, Canis familiaris
tgtaaataggcctctagttggtttt

SEQ ID NO: 170385 - DNA, 25 bp, Canis familiaris
tgtgatatcaaagccctgagttggg

SEQ ID NO: 170386 - DNA, 25 bp, Canis familiaris
tgagttcaaaccccacgttgggtgt

SEQ ID NO: 170387 - DNA, 25 bp, Canis familiaris
tctagtcaaaccctactttaactgt

SEQ ID NO: 170388 - DNA, 25 bp, Canis familiaris
tgtaaacgaccttacgattcaacct

SEQ ID NO: 170389 - DNA, 25 bp, Canis familiaris
tgtcaagaacacttatactggtata

SEQ ID NO: 170390 - DNA, 25 bp, Canis familiaris
tgtacaccaattcgaatccgtcata

SEQ ID NO: 170391 - DNA, 25 bp, Canis familiaris
tgtgcaacctcaaggacatccctaa

SEQ ID NO: 170392 - DNA, 25 bp, Canis familiaris
tgtccagcaccaagataatcccata

SEQ ID NO: 170393 - DNA, 25 bp, Canis familiaris
tgtcatgccccaaataatcctaagg

SEQ ID NO: 170394 - DNA, 25 bp, Canis familiaris
tgtagcacccttaaggcctactgag

SEQ ID NO: 170395 - DNA, 25 bp, Canis familiaris
tgtcgtccaattttgcacctactgg

SEQ ID NO: 170396 - DNA, 25 bp, Canis familiaris
tgtctgtgccaagaagcccaggctc

SEQ ID NO: 170397 - DNA, 25 bp, Canis familiaris
tgtctgtccaaggccaggctttgtc

SEQ ID NO: 170398 - DNA, 25 bp, Canis familiaris
tgtgcttccacgattgtgcaaggtg

SEQ ID NO: 170399 - DNA, 25 bp, Canis familiaris
tgtgcttccaaaattgccaatgaga

SEQ ID NO: 170400 - DNA, 25 bp, Canis familiaris
tgtgatacccatagcttccatgaga

SEQ ID NO: 170401 - DNA, 25 bp, Canis familiaris
tgtgcaagtggcttttcctgagact

SEQ ID NO: 170402 - DNA, 25 bp, Canis familiaris
tgtgaagtggatggcccctgagagc

SEQ ID NO: 170403 - DNA, 25 bp, Canis familiaris
tgtgtatgagtgtgtccctgttgca

SEQ ID NO: 170404 - DNA, 25 bp, Canis familiaris
tgtgttggatgattctgcccgaaaa

SEQ ID NO: 170405 - DNA, 25 bp, Canis familiaris
tgtgtttgatagttcctgctgtgag

SEQ ID NO: 170406 - DNA, 25 bp, Canis familiaris
tgtgtttgtatcttccattcccaca

SEQ ID NO: 170407 - DNA, 25 bp, Canis familiaris
tgtgtttggagctcttgtctctcaa

SEQ ID NO: 170408 - DNA, 25 bp, Canis familiaris
tgtctggctgggtttgatgtcctca

SEQ ID NO: 170409 - DNA, 25 bp, Canis familiaris
tgtcagttggtgctgtgtctacgcc

SEQ ID NO: 170410 - DNA, 25 bp, Canis familiaris
tgtgcactaggcgcattgtgtagca

SEQ ID NO: 170411 - DNA, 25 bp, Canis familiaris
tgtgcactgagggtgtctgtgggcc

SEQ ID NO: 170412 - DNA, 25 bp, Canis familiaris
tgtgctgctggaggcttggacaggc

SEQ ID NO: 170413 - DNA, 25 bp, Canis familiaris
tgtgctgtggcgccatctgagaaca

SEQ ID NO: 170414 - DNA, 25 bp, Canis familiaris
tgtgtagcgcagctctgacaaaccc

SEQ ID NO: 170415 - DNA, 25 bp, Canis familiaris
tgattgccgaagtgaagaaagcatc

SEQ ID NO: 170416 - DNA, 25 bp, Canis familiaris
tgtccctaataaaagatccagcact

SEQ ID NO: 170417 - DNA, 25 bp, Canis familiaris
tgtcctgtagcatcacaggctccca

SEQ ID NO: 170418 - DNA, 25 bp, Canis familiaris
tgtcctgttaagcagatgctcctcc

SEQ ID NO: 170419 - DNA, 25 bp, Canis familiaris
tgtcctatgtagaccagttctcctc

SEQ ID NO: 170420 - DNA, 25 bp, Canis familiaris
tgtcagctttagttccttggtcatg

SEQ ID NO: 170421 - DNA, 25 bp, Canis familiaris
tgtctgtaaagtgctctgaggtctc

SEQ ID NO: 170422 - DNA, 25 bp, Canis familiaris
tgtttgcaaagtgttcaactgtctt

SEQ ID NO: 170423 - DNA, 25 bp, Canis familiaris
tcgttaaagtttaccagctgttctt

SEQ ID NO: 170424 - DNA, 25 bp, Canis familiaris
tcgtaactgattgtacaccgtccgc

SEQ ID NO: 170425 - DNA, 25 bp, Canis familiaris
tgtgtaactctcttttatcacctcc

SEQ ID NO: 170426 - DNA, 25 bp, Canis familiaris
tgtctgattcctttttacattgccc

SEQ ID NO: 170427 - DNA, 25 bp, Canis familiaris
tgtcgaatcactcttgtgacgtccc

SEQ ID NO: 170428 - DNA, 25 bp, Canis familiaris
tgtgagaacactcttctgaactccg

SEQ ID NO: 170429 - DNA, 25 bp, Canis familiaris
tgtgacaagtctttctctggattcc

SEQ ID NO: 170430 - DNA, 25 bp, Canis familiaris
tgtgaaatattctcctcgttatctc

SEQ ID NO: 170431 - DNA, 25 bp, Canis familiaris
tgtgcatttaactgcctacctagct

SEQ ID NO: 170432 - DNA, 25 bp, Canis familiaris
tgtgatttcaactcaggacctgtcc

SEQ ID NO: 170433 - DNA, 25 bp, Canis familiaris
tgtgttgtcagatttcagtactatg

SEQ ID NO: 170434 - DNA, 25 bp, Canis familiaris
tgtgattttatgatatgtagtaatt

SEQ ID NO: 170435 - DNA, 25 bp, Canis familiaris
tgtgtttcttttaaattgaatgttt

SEQ ID NO: 170436 - DNA, 25 bp, Canis familiaris
tgtgttttgtttatttgtgtttgtc

SEQ ID NO: 170437 - DNA, 25 bp, Canis familiaris
tgtgatttttttgggtctttgggtg

SEQ ID NO: 170438 - DNA, 25 bp, Canis familiaris
tgtgattattttatgctgctctgta

SEQ ID NO: 170439 - DNA, 25 bp, Canis familiaris
tgtgaggattccctctgttgctgta

SEQ ID NO: 170440 - DNA, 25 bp, Canis familiaris
tgtaggaaccgattccgcgtgagct

SEQ ID NO: 170441 - DNA, 25 bp, Canis familiaris
tgtaaacaccagtctcgcaggctgg

SEQ ID NO: 170442 - DNA, 25 bp, Canis familiaris
tgtgaaaagctgccctcgagcaatg

SEQ ID NO: 170443 - DNA, 25 bp, Canis familiaris
tgtgcaagaagaccccagtactgag

SEQ ID NO: 170444 - DNA, 25 bp, Canis familiaris
tgtgcaaggagcccccttacaaagt

SEQ ID NO: 170445 - DNA, 25 bp, Canis familiaris
tgtgaaggacccatcataccacgtt

SEQ ID NO: 170446 - DNA, 25 bp, Canis familiaris
tgtgacagagagcccattctccaca

SEQ ID NO: 170447 - DNA, 25 bp, Canis familiaris
tgtgatatggagccgtctcccatca

SEQ ID NO: 170448 - DNA, 25 bp, Canis familiaris
tgtgttgtgggcaacattcctcctc

SEQ ID NO: 170449 - DNA, 25 bp, Canis familiaris
tgttttgggaaacctctcctgattc

SEQ ID NO: 170450 - DNA, 25 bp, Canis familiaris
tgtgaattggaatgaccccagtgtc

SEQ ID NO: 170451 - DNA, 25 bp, Canis familiaris
tgtgagcatttatcttcctccagtt

SEQ ID NO: 170452 - DNA, 25 bp, Canis familiaris
tgtagtagtagtatgtgtcgcagat

SEQ ID NO: 170453 - DNA, 25 bp, Canis familiaris
tgtcgaagccttggtctgtcataga

SEQ ID NO: 170454 - DNA, 25 bp, Canis familiaris
tgtcttaccctcgggtcacaactga

SEQ ID NO: 170455 - DNA, 25 bp, Canis familiaris
tgtctgatcctatccgagtcttagg

SEQ ID NO: 170456 - DNA, 25 bp, Canis familiaris
tgtcagatcactttccggttggatg

SEQ ID NO: 170457 - DNA, 25 bp, Canis familiaris
tgtgcagacacaactacgggaggga

SEQ ID NO: 170458 - DNA, 25 bp, Canis familiaris
tgtcagtcgggatcacgggggagtc

SEQ ID NO: 170459 - DNA, 25 bp, Canis familiaris
tgtgcaggggtgtgtcgggggcact

SEQ ID NO: 170460 - DNA, 25 bp, Canis familiaris
tgtgatggggtgtgggtggggaagc

SEQ ID NO: 170461 - DNA, 25 bp, Canis familiaris
tgtagttatgtgggaggggttaagc

SEQ ID NO: 170462 - DNA, 25 bp, Canis familiaris
tgaagttttgggtggggagaagatc

SEQ ID NO: 170463 - DNA, 25 bp, Canis familiaris
taagcttccccctggaggggagcat

SEQ ID NO: 170464 - DNA, 25 bp, Canis familiaris
taagtcccagggttatgggttgaga

SEQ ID NO: 170465 - DNA, 25 bp, Canis familiaris
ttttcccatgggttactgcggacga

SEQ ID NO: 170466 - DNA, 25 bp, Canis familiaris
tgtaatccccgggtcctgggattga

SEQ ID NO: 170467 - DNA, 25 bp, Canis familiaris
tcatgttccgggggtcctaggattg

SEQ ID NO: 170468 - DNA, 25 bp, Canis familiaris
tgtgttccacggggtacaaattctt

SEQ ID NO: 170469 - DNA, 25 bp, Canis familiaris
tgtgtttcacgacggtcaaacgccc

SEQ ID NO: 170470 - DNA, 25 bp, Canis familiaris
tgtctttcaggaggaccaaaccacc

SEQ ID NO: 170471 - DNA, 25 bp, Canis familiaris
tgtccccggaggtgaagagaaccca

SEQ ID NO: 170472 - DNA, 25 bp, Canis familiaris
tcccatccgagacaccaaaaacacc

SEQ ID NO: 170473 - DNA, 25 bp, Canis familiaris
tccgccaaaatttctgccaaaaatc

SEQ ID NO: 170474 - DNA, 25 bp, Canis familiaris
tccaccaaaaatcctctaagtactt

SEQ ID NO: 170475 - DNA, 25 bp, Canis familiaris
tgtccccaacttctgttagtacttg

SEQ ID NO: 170476 - DNA, 25 bp, Canis familiaris
tgtccccgtgttgtaaagtacttgg

SEQ ID NO: 170477 - DNA, 25 bp, Canis familiaris
tgttccctgtttttaaggaattcat

SEQ ID NO: 170478 - DNA, 25 bp, Canis familiaris
tgtcccttttccttcacaagaatgt

SEQ ID NO: 170479 - DNA, 25 bp, Canis familiaris
tgtcctctatggtcttgccaaaatg

SEQ ID NO: 170480 - DNA, 25 bp, Canis familiaris
tgtctccctgagacttggccaaagt

SEQ ID NO: 170481 - DNA, 25 bp, Canis familiaris
tgtccctgtatgcctctggtcgtac

SEQ ID NO: 170482 - DNA, 25 bp, Canis familiaris
tgtcctccattgccatgtttgggtc

SEQ ID NO: 170483 - DNA, 25 bp, Canis familiaris
tgtcctctctgagagcttctacctc

SEQ ID NO: 170484 - DNA, 25 bp, Canis familiaris
tgtcccctgaaacttctgaactgtt

SEQ ID NO: 170485 - DNA, 25 bp, Canis familiaris
tgtcccactgagcaggtctggaccc

SEQ ID NO: 170486 - DNA, 25 bp, Canis familiaris
tgtaccctgagtcttcttaactggg

SEQ ID NO: 170487 - DNA, 25 bp, Canis familiaris
tgtgaccagctggttgttctttcct

SEQ ID NO: 170488 - DNA, 25 bp, Canis familiaris
tgtgaatcctttttcatttctcctt

SEQ ID NO: 170489 - DNA, 25 bp, Canis familiaris
tgtgttcagctcttattttccttgc

SEQ ID NO: 170490 - DNA, 25 bp, Canis familiaris
tgtgttcccagtttttattttccat

SEQ ID NO: 170491 - DNA, 25 bp, Canis familiaris
tgtgttccctatttttatccattac

SEQ ID NO: 170492 - DNA, 25 bp, Canis familiaris
tgtgattctgccctgctttttaaaa

SEQ ID NO: 170493 - DNA, 25 bp, Canis familiaris
tgtattttgcacgtggtttaagaaa

SEQ ID NO: 170494 - DNA, 25 bp, Canis familiaris
tgtcttttgcattgggaaatgggca

SEQ ID NO: 170495 - DNA, 25 bp, Canis familiaris
tgtccttccagccaaggactgggac

SEQ ID NO: 170496 - DNA, 25 bp, Canis familiaris
tgtccttgtcagcctcaggagtgag

SEQ ID NO: 170497 - DNA, 25 bp, Canis familiaris
tgtgactggtgacctggtgactcgc

SEQ ID NO: 170498 - DNA, 25 bp, Canis familiaris
tgtgcaccgtgacctgtggacataa

SEQ ID NO: 170499 - DNA, 25 bp, Canis familiaris
tgtgctctgctttccatgggaagac

SEQ ID NO: 170500 - DNA, 25 bp, Canis familiaris
tgtgacattcccaatggcagacaac

SEQ ID NO: 170501 - DNA, 25 bp, Canis familiaris
tgtgacactctggagagagcaaaac

SEQ ID NO: 170502 - DNA, 25 bp, Canis familiaris
tgtgacccatgagaagcaacgagag

SEQ ID NO: 170503 - DNA, 25 bp, Canis familiaris
tgtgaccctggtcacatgcacggga

SEQ ID NO: 170504 - DNA, 25 bp, Canis familiaris
tgtgacctctggacaacatcacctt

SEQ ID NO: 170505 - DNA, 25 bp, Canis familiaris
tgtgatccatccactcaatcacagc

SEQ ID NO: 170506 - DNA, 25 bp, Canis familiaris
tgtgaccagccagccagatatgcag

SEQ ID NO: 170507 - DNA, 25 bp, Canis familiaris
tgtgacccatatgacaccatgcacc

SEQ ID NO: 170508 - DNA, 25 bp, Canis familiaris
tgtccactcagaaacatccagcttc

SEQ ID NO: 170509 - DNA, 25 bp, Canis familiaris
tgtacaggcgatgagccacctggcg

SEQ ID NO: 170510 - DNA, 25 bp, Canis familiaris
tgtgagcggacagtacttctctgcc

SEQ ID NO: 170511 - DNA, 25 bp, Canis familiaris
tgtgaggggtcaagtctgcctctgc

SEQ ID NO: 170512 - DNA, 25 bp, Canis familiaris
tgtgaggttgtacctgctgagctcc

SEQ ID NO: 170513 - DNA, 25 bp, Canis familiaris
tgtgaagctctttgattctgacccc

SEQ ID NO: 170514 - DNA, 25 bp, Canis familiaris
tgtgaagctctgtgattctgacccc

SEQ ID NO: 170515 - DNA, 25 bp, Canis familiaris
tgtgaagcaggatcttatcttccca

SEQ ID NO: 170516 - DNA, 25 bp, Canis familiaris
tgtgaaggcgaacaaaatcaccaag

SEQ ID NO: 170517 - DNA, 25 bp, Canis familiaris
tgtatccaccaataaaacacgcgtg

SEQ ID NO: 170518 - DNA, 25 bp, Canis familiaris
tgtgatacaaaccccaggacaccca

SEQ ID NO: 170519 - DNA, 25 bp, Canis familiaris
tgtctgtaaaagtccgtggccacca

SEQ ID NO: 170520 - DNA, 25 bp, Canis familiaris
tgtgcctgaagggactccttccgac

SEQ ID NO: 170521 - DNA, 25 bp, Canis familiaris
tgagccaagaagggccctaccgtaa

SEQ ID NO: 170522 - DNA, 25 bp, Canis familiaris
tgtccaaaagcagcacctgcccaat

SEQ ID NO: 170523 - DNA, 25 bp, Canis familiaris
tgtccccaagctgtgctcttgaaat

SEQ ID NO: 170524 - DNA, 25 bp, Canis familiaris
tgtcacccaccctggtggaaaccag

SEQ ID NO: 170525 - DNA, 25 bp, Canis familiaris
tgtcccacctaccggtgaaaagtga

SEQ ID NO: 170526 - DNA, 25 bp, Canis familiaris
tgtccctccagctgcaggatgaaga

SEQ ID NO: 170527 - DNA, 25 bp, Canis familiaris
tgtcggcccagcacaggattagaaa

SEQ ID NO: 170528 - DNA, 25 bp, Canis familiaris
tgtcatccccacccagaaaaggaat

SEQ ID NO: 170529 - DNA, 25 bp, Canis familiaris
tgtccaccctcggcgagaagagtgg

SEQ ID NO: 170530 - DNA, 25 bp, Canis familiaris
tgtccacctgccgtgggaggaatag

SEQ ID NO: 170531 - DNA, 25 bp, Canis familiaris
tgtccccagcccaggcaagaagatc

SEQ ID NO: 170532 - DNA, 25 bp, Canis familiaris
tgtccccagcccaggcaagaagatc

SEQ ID NO: 170533 - DNA, 25 bp, Canis familiaris
tgtccccagcccaggcaagaagatc

SEQ ID NO: 170534 - DNA, 25 bp, Canis familiaris
tgtccccagcccaggcaagaagatc

SEQ ID NO: 170535 - DNA, 25 bp, Canis familiaris
tgtccccagcccaggcaagaagatc

SEQ ID NO: 170536 - DNA, 25 bp, Canis familiaris
tgtccccagcccaggcaagaagatc

SEQ ID NO: 170537 - DNA, 25 bp, Canis familiaris
tgtccccagcccaggcaagaagatc

SEQ ID NO: 170538 - DNA, 25 bp, Canis familiaris
tgtccccagcccaggcaagaagatc

SEQ ID NO: 170539 - DNA, 25 bp, Canis familiaris
tgtccccagcccaggcaagaagatc

SEQ ID NO: 170540 - DNA, 25 bp, Canis familiaris
tgtccccagcccaggcaagaagatc

SEQ ID NO: 170541 - DNA, 25 bp, Canis familiaris
tgtccccagcccaggcaagaagatc

SEQ ID NO: 170542 - DNA, 25 bp, Canis familiaris
tgtccccagcccaggcaagaagatc

SEQ ID NO: 170543 - DNA, 25 bp, Canis familiaris
tgtcaccaaccctgtcaagaggaca

SEQ ID NO: 170544 - DNA, 25 bp, Canis familiaris
tgtagtaaactgtgtgctgaaggaa

SEQ ID NO: 170545 - DNA, 25 bp, Canis familiaris
tgtagttcaaccgtggaaagatgcc

SEQ ID NO: 170546 - DNA, 25 bp, Canis familiaris
tgtagtccagagccttgggccaggt

SEQ ID NO: 170547 - DNA, 25 bp, Canis familiaris
tgtgatgcaccagagtgtggcccga

SEQ ID NO: 170548 - DNA, 25 bp, Canis familiaris
tgtgatgacacccagtgctgatccc

SEQ ID NO: 170549 - DNA, 25 bp, Canis familiaris
tgtgagatcaagccaggctcacgcc

SEQ ID NO: 170550 - DNA, 25 bp, Canis familiaris
tgtgcagctcttcagagctcctttc

SEQ ID NO: 170551 - DNA, 25 bp, Canis familiaris
tgtcagctgtctaagacccatctcc

SEQ ID NO: 170552 - DNA, 25 bp, Canis familiaris
tgtcatgagctcacaactccattcc

SEQ ID NO: 170553 - DNA, 25 bp, Canis familiaris
tgtcatggacccaacactattcttg

SEQ ID NO: 170554 - DNA, 25 bp, Canis familiaris
tgtccgacgcatcaacatttggtga

SEQ ID NO: 170555 - DNA, 25 bp, Canis familiaris
tgtccccgatgccaagaattcgcat

SEQ ID NO: 170556 - DNA, 25 bp, Canis familiaris
tgtccaccttccagcagatgtggat

SEQ ID NO: 170557 - DNA, 25 bp, Canis familiaris
tgtgccccttcgatggctgtaataa

SEQ ID NO: 170558 - DNA, 25 bp, Canis familiaris
tgtgactgacttcttacgctagcat

SEQ ID NO: 170559 - DNA, 25 bp, Canis familiaris
tgtgacgttgtggcctaagctagga

SEQ ID NO: 170560 - DNA, 25 bp, Canis familiaris
tgtgacttgcatgatcctaacgagg

SEQ ID NO: 170561 - DNA, 25 bp, Canis familiaris
tgtgactgtcacaacctacaacgat

SEQ ID NO: 170562 - DNA, 25 bp, Canis familiaris
tgtgacttcaacagtgacacccact

SEQ ID NO: 170563 - DNA, 25 bp, Canis familiaris
tgtgcagaagtacggctacacccac

SEQ ID NO: 170564 - DNA, 25 bp, Canis familiaris
tgtgaataataggctcccactgccc

SEQ ID NO: 170565 - DNA, 25 bp, Canis familiaris
tgtgaacatggaatccccacgatcc

SEQ ID NO: 170566 - DNA, 25 bp, Canis familiaris
tgtaacatcagaacccgacgtgacc

SEQ ID NO: 170567 - DNA, 25 bp, Canis familiaris
tgtaatgtcgcttccctatggtgac

SEQ ID NO: 170568 - DNA, 25 bp, Canis familiaris
tgtgcaagtgtgctcgcacttgggt

SEQ ID NO: 170569 - DNA, 25 bp, Canis familiaris
tgtgcaatgttccgttcatctgagg

SEQ ID NO: 170570 - DNA, 25 bp, Canis familiaris
tgtgccagcagcgggtacagtgaga

SEQ ID NO: 170571 - DNA, 25 bp, Canis familiaris
tgtgcccaggtacggagtgagatct

SEQ ID NO: 170572 - DNA, 25 bp, Canis familiaris
tgtccatcagctggggtggggcatc

SEQ ID NO: 170573 - DNA, 25 bp, Canis familiaris
tgtcgtccatgcacggggacatgcc

SEQ ID NO: 170574 - DNA, 25 bp, Canis familiaris
tgtctgtcatacactgagggccaat

SEQ ID NO: 170575 - DNA, 25 bp, Canis familiaris
tgtgctgacaaggcgctggtgacca

SEQ ID NO: 170576 - DNA, 25 bp, Canis familiaris
tgtccacgatggacgctgtgcacca

SEQ ID NO: 170577 - DNA, 25 bp, Canis familiaris
tgtccctcgtgaggctggatctcaa

SEQ ID NO: 170578 - DNA, 25 bp, Canis familiaris
tgtccctggaggactgtgactgcgc

SEQ ID NO: 170579 - DNA, 25 bp, Canis familiaris
tgtgctccgggccaatgctgaggcc

SEQ ID NO: 170580 - DNA, 25 bp, Canis familiaris
tgtgctcccacaggaagcgggcaag

SEQ ID NO: 170581 - DNA, 25 bp, Canis familiaris
tgtgctcattacagaagcggtccat

SEQ ID NO: 170582 - DNA, 25 bp, Canis familiaris
tgtgcacattacaccagggacccat

SEQ ID NO: 170583 - DNA, 25 bp, Canis familiaris
tgtgacagtgacacgtggggccagc

SEQ ID NO: 170584 - DNA, 25 bp, Canis familiaris
tgtgactttggggtcagcgggcagc

SEQ ID NO: 170585 - DNA, 25 bp, Canis familiaris
tgtccactcgggttcatgggagccc

SEQ ID NO: 170586 - DNA, 25 bp, Canis familiaris
tgcccttagagggtcacgtacccgg

SEQ ID NO: 170587 - DNA, 25 bp, Canis familiaris
tgtccttagatgggtagctgtgcag

SEQ ID NO: 170588 - DNA, 25 bp, Canis familiaris
tgtccattcagattgggcacgatgt

SEQ ID NO: 170589 - DNA, 25 bp, Canis familiaris
tgtgacatctcttctggtatcaggt

SEQ ID NO: 170590 - DNA, 25 bp, Canis familiaris
tgtgagatctctggtgtcttcgcag

SEQ ID NO: 170591 - DNA, 25 bp, Canis familiaris
tgtgagacagtggtggctgctcgac

SEQ ID NO: 170592 - DNA, 25 bp, Canis familiaris
tgtgaccatgtcattgatgcccagc

SEQ ID NO: 170593 - DNA, 25 bp, Canis familiaris
tgtgacactatgagtgctgtcccct

SEQ ID NO: 170594 - DNA, 25 bp, Canis familiaris
tgtgagcactgtctgggtgtgcctc

SEQ ID NO: 170595 - DNA, 25 bp, Canis familiaris
tgtgacattgtgcctctggtgggcc

SEQ ID NO: 170596 - DNA, 25 bp, Canis familiaris
tgtgacaggcatgccaggagcggcc

SEQ ID NO: 170597 - DNA, 25 bp, Canis familiaris
tgtgcaacatgtaccaggatggaca

SEQ ID NO: 170598 - DNA, 25 bp, Canis familiaris
tgtgctttttcctgtggacaccaaa

SEQ ID NO: 170599 - DNA, 25 bp, Canis familiaris
ttgactttaatctcaaggcactaaa

SEQ ID NO: 170600 - DNA, 25 bp, Canis familiaris
tgtgactgtaattttaaagcccaaa

SEQ ID NO: 170601 - DNA, 25 bp, Canis familiaris
tgtgaccatagaggatttaaaaaaa

SEQ ID NO: 170602 - DNA, 25 bp, Canis familiaris
tgtgaacaagaatttttaaactatt

SEQ ID NO: 170603 - DNA, 25 bp, Canis familiaris
tgtgctaacgaagttctgtacgact

SEQ ID NO: 170604 - DNA, 25 bp, Canis familiaris
tgtgcaaatcaccaattctgtaaga

SEQ ID NO: 170605 - DNA, 25 bp, Canis familiaris
tgtgaacaccatcatgcctctataa

SEQ ID NO: 170606 - DNA, 25 bp, Canis familiaris
tgtaaactctgcacctgtaaacctc

SEQ ID NO: 170607 - DNA, 25 bp, Canis familiaris
tgtccaactgttcatctgtactacc

SEQ ID NO: 170608 - DNA, 25 bp, Canis familiaris
tgtccaggcttttgtctgaacaccc

SEQ ID NO: 170609 - DNA, 25 bp, Canis familiaris
tgtccatggcttcaggaagcccccc

SEQ ID NO: 170610 - DNA, 25 bp, Canis familiaris
tgtcacatagcgcgggtgaagcccc

SEQ ID NO: 170611 - DNA, 25 bp, Canis familiaris
tgtaaaggcaatgggagaacccctc

SEQ ID NO: 170612 - DNA, 25 bp, Canis familiaris
tgtccaattcacagaaaacgccccc

SEQ ID NO: 170613 - DNA, 25 bp, Canis familiaris
tgtcaactccgagaaaaccttccca

SEQ ID NO: 170614 - DNA, 25 bp, Canis familiaris
tgtgaattcctgtaagttcccttcc

SEQ ID NO: 170615 - DNA, 25 bp, Canis familiaris
tgtgacccaagttaattttcttcct

SEQ ID NO: 170616 - DNA, 25 bp, Canis familiaris
tgtgccctacagttttatttttcct

SEQ ID NO: 170617 - DNA, 25 bp, Canis familiaris
tgataccgaggtgtttcttttcgtt

SEQ ID NO: 170618 - DNA, 25 bp, Canis familiaris
tgtcgttgtcgttttgtcttttcgt

SEQ ID NO: 170619 - DNA, 25 bp, Canis familiaris
tgtgcctctgttaatttctcattta

SEQ ID NO: 170620 - DNA, 25 bp, Canis familiaris
tgtgcttagttatcatgtctcttta

SEQ ID NO: 170621 - DNA, 25 bp, Canis familiaris
tgtgcatctactagagtgcatatat

SEQ ID NO: 170622 - DNA, 25 bp, Canis familiaris
tgtgcatgtcacagcaggcagagtg

SEQ ID NO: 170623 - DNA, 25 bp, Canis familiaris
tgtgctctctcgccagaggagcatt

SEQ ID NO: 170624 - DNA, 25 bp, Canis familiaris
tgtgctctgtctcaatgcagctgat

SEQ ID NO: 170625 - DNA, 25 bp, Canis familiaris
tgtgcacctctgctgatcatgtgaa

SEQ ID NO: 170626 - DNA, 25 bp, Canis familiaris
tgtccctatcctcatggaactggtg

SEQ ID NO: 170627 - DNA, 25 bp, Canis familiaris
tgtctcctctcccgaggaacagttt

SEQ ID NO: 170628 - DNA, 25 bp, Canis familiaris
tgtcaaccccaggaggactctggct

SEQ ID NO: 170629 - DNA, 25 bp, Canis familiaris
tgtgctatccctgtacgcctctggc

SEQ ID NO: 170630 - DNA, 25 bp, Canis familiaris
tgtgctgtccctgtatgcctctggt

SEQ ID NO: 170631 - DNA, 25 bp, Canis familiaris
tgatctggacctgtatccccagtaa

SEQ ID NO: 170632 - DNA, 25 bp, Canis familiaris
tgtctgggctccaaagccccagtac

SEQ ID NO: 170633 - DNA, 25 bp, Canis familiaris
tgtcgggcacgtgtgacccagagac

SEQ ID NO: 170634 - DNA, 25 bp, Canis familiaris
tgtcgggacagccacaaagccaaac

SEQ ID NO: 170635 - DNA, 25 bp, Canis familiaris
tgtcgcgggagccaatcaaccaaac

SEQ ID NO: 170636 - DNA, 25 bp, Canis familiaris
tgtccggggctgcacgcgcgctaca

SEQ ID NO: 170637 - DNA, 25 bp, Canis familiaris
tgtcaagggttccgtgcattgctga

SEQ ID NO: 170638 - DNA, 25 bp, Canis familiaris
tgtcgagtggcttcggtgtcatcga

SEQ ID NO: 170639 - DNA, 25 bp, Canis familiaris
tgtctgtctgtaatcggtttgcgtc

SEQ ID NO: 170640 - DNA, 25 bp, Canis familiaris
tgtcctcccaggggtttggtcagca

SEQ ID NO: 170641 - DNA, 25 bp, Canis familiaris
tgtccatccctgtggtggtttcagg

SEQ ID NO: 170642 - DNA, 25 bp, Canis familiaris
tgtcctgcccgtaagggttggggag

SEQ ID NO: 170643 - DNA, 25 bp, Canis familiaris
tgtccctcggcaggggtgttgggga

SEQ ID NO: 170644 - DNA, 25 bp, Canis familiaris
tgtccccggacgaattgcttccgaa

SEQ ID NO: 170645 - DNA, 25 bp, Canis familiaris
tgtccctgcagtgcccataggcccg

SEQ ID NO: 170646 - DNA, 25 bp, Canis familiaris
tgtccctgcagtgattctgaggcac

SEQ ID NO: 170647 - DNA, 25 bp, Canis familiaris
tgtcggatgcggggtctacgacggg

SEQ ID NO: 170648 - DNA, 25 bp, Canis familiaris
tgtcaggtgtggggtgcgcccacag

SEQ ID NO: 170649 - DNA, 25 bp, Canis familiaris
tgtgctggttggtgtctcaggccag

SEQ ID NO: 170650 - DNA, 25 bp, Canis familiaris
tgtgctgcgatttgggattaggtga

SEQ ID NO: 170651 - DNA, 25 bp, Canis familiaris
tgtgcactgattttagaccggagac

SEQ ID NO: 170652 - DNA, 25 bp, Canis familiaris
tgtgcatcttgctttaacttggaaa

SEQ ID NO: 170653 - DNA, 25 bp, Canis familiaris
tgtgcgccattttcaactatgtgct

SEQ ID NO: 170654 - DNA, 25 bp, Canis familiaris
tgtccatttctggaaaattctctgg

SEQ ID NO: 170655 - DNA, 25 bp, Canis familiaris
tgtgaactattgaagaatgatctct

SEQ ID NO: 170656 - DNA, 25 bp, Canis familiaris
tgtaacatatggcaagatttccttc

SEQ ID NO: 170657 - DNA, 25 bp, Canis familiaris
tgtaacattaggtatccctccggca

SEQ ID NO: 170658 - DNA, 25 bp, Canis familiaris
tgtgaaaccgagaatcccattggag

SEQ ID NO: 170659 - DNA, 25 bp, Canis familiaris
tgtaaactgtgaatccctttggggg

SEQ ID NO: 170660 - DNA, 25 bp, Canis familiaris
tgtaggacgtgtagcaactcccggt

SEQ ID NO: 170661 - DNA, 25 bp, Canis familiaris
tgtaaacggttcttcctctgtgaat

SEQ ID NO: 170662 - DNA, 25 bp, Canis familiaris
tgtcccatcgggacttccgtgggac

SEQ ID NO: 170663 - DNA, 25 bp, Canis familiaris
tgtccccgaggagatgccattttgc

SEQ ID NO: 170664 - DNA, 25 bp, Canis familiaris
tgtgcacagaggaggccaccttttc

SEQ ID NO: 170665 - DNA, 25 bp, Canis familiaris
tgtgaagaagttgcccactgctctt

SEQ ID NO: 170666 - DNA, 25 bp, Canis familiaris
tgtgaagggttcaggcacctgctct

SEQ ID NO: 170667 - DNA, 25 bp, Canis familiaris
tgtaaggtgtgtgggagccggtcct

SEQ ID NO: 170668 - DNA, 25 bp, Canis familiaris
tgtgaaggtgctgcgggggcacacg

SEQ ID NO: 170669 - DNA, 25 bp, Canis familiaris
tgtgaagttcgtggcgcagcaacca

SEQ ID NO: 170670 - DNA, 25 bp, Canis familiaris
tgtgaatgtacggcggcagcagcat

SEQ ID NO: 170671 - DNA, 25 bp, Canis familiaris
tgtgaagcagacgtgcggctgccag

SEQ ID NO: 170672 - DNA, 25 bp, Canis familiaris
tgtgaaagatcactccatgctgcca

SEQ ID NO: 170673 - DNA, 25 bp, Canis familiaris
tgtgccaatgattgtcctggctttg

SEQ ID NO: 170674 - DNA, 25 bp, Canis familiaris
tgtctctctgaaacctggcaaatga

SEQ ID NO: 170675 - DNA, 25 bp, Canis familiaris
tgtcctctggatgccttgatactga

SEQ ID NO: 170676 - DNA, 25 bp, Canis familiaris
tgtccgtgaggtccagtgagtctgt

SEQ ID NO: 170677 - DNA, 25 bp, Canis familiaris
tgtgaaggggtttggtgctctgttc

SEQ ID NO: 170678 - DNA, 25 bp, Canis familiaris
tgtttgggaacttgggatccccacg

SEQ ID NO: 170679 - DNA, 25 bp, Canis familiaris
tgtaggagggagcgggtcccctcac

SEQ ID NO: 170680 - DNA, 25 bp, Canis familiaris
tgtgaagggcctccagaggtaccct

SEQ ID NO: 170681 - DNA, 25 bp, Canis familiaris
tgtaataggcacagcctgggcaccc

SEQ ID NO: 170682 - DNA, 25 bp, Canis familiaris
tgtactgggatcaagccatgattac

SEQ ID NO: 170683 - DNA, 25 bp, Canis familiaris
tgtgcactgtctacttccagagaga

SEQ ID NO: 170684 - DNA, 25 bp, Canis familiaris
tgtccgtctatcaccagggggactc

SEQ ID NO: 170685 - DNA, 25 bp, Canis familiaris
tgtccttcattcaccaaaagtaacc

SEQ ID NO: 170686 - DNA, 25 bp, Canis familiaris
tgtgcatcttcttcctctaaaaaaa

SEQ ID NO: 170687 - DNA, 25 bp, Canis familiaris
tgtgcattcaagtcgtccattaaaa

SEQ ID NO: 170688 - DNA, 25 bp, Canis familiaris
tgtcattatacccttcccaagaaat

SEQ ID NO: 170689 - DNA, 25 bp, Canis familiaris
tgtgcttagcacagagtctgcctga

SEQ ID NO: 170690 - DNA, 25 bp, Canis familiaris
tgtgcttagcatgtatgtggccccg

SEQ ID NO: 170691 - DNA, 25 bp, Canis familiaris
tgtgcttgcagctgtgctgttgctc

SEQ ID NO: 170692 - DNA, 25 bp, Canis familiaris
tgtcagccaatggcagctcttctcg

SEQ ID NO: 170693 - DNA, 25 bp, Canis familiaris
tgtgcacgaatgactgctctttccc

SEQ ID NO: 170694 - DNA, 25 bp, Canis familiaris
tgtgaaggcatcaacctttctgccc

SEQ ID NO: 170695 - DNA, 25 bp, Canis familiaris
tgtcaacgcacatgcgacttccacc

SEQ ID NO: 170696 - DNA, 25 bp, Canis familiaris
tgtgcgggaagggcacttctgccat

SEQ ID NO: 170697 - DNA, 25 bp, Canis familiaris
tgtgcgctagcgtggacatttgcca

SEQ ID NO: 170698 - DNA, 25 bp, Canis familiaris
tgtgcgaccacatcgaacttcgaca

SEQ ID NO: 170699 - DNA, 25 bp, Canis familiaris
tgagtccccgaggtatctacgagac

SEQ ID NO: 170700 - DNA, 25 bp, Canis familiaris
tgtctcctcctaagtactcggatca

SEQ ID NO: 170701 - DNA, 25 bp, Canis familiaris
tgtgccgcctctaaagagccgtaca

SEQ ID NO: 170702 - DNA, 25 bp, Canis familiaris
tgtgcttcccattccaatggcgtaa

SEQ ID NO: 170703 - DNA, 25 bp, Canis familiaris
tgtgcttctcaaagctctacctgtt

SEQ ID NO: 170704 - DNA, 25 bp, Canis familiaris
tgtgcatttagtgtgttccttttac

SEQ ID NO: 170705 - DNA, 25 bp, Canis familiaris
tgtgcctttgatttgttagctttaa

SEQ ID NO: 170706 - DNA, 25 bp, Canis familiaris
tgtgccttggtcagattcactcttt

SEQ ID NO: 170707 - DNA, 25 bp, Canis familiaris
tgtgcacatgtgctcttgtgtgccc

SEQ ID NO: 170708 - DNA, 25 bp, Canis familiaris
tgtccatgtgtgtcattctcattcc

SEQ ID NO: 170709 - DNA, 25 bp, Canis familiaris
tgtgctgttggatatcactcccatg

SEQ ID NO: 170710 - DNA, 25 bp, Canis familiaris
tgtgcatggggatactctcctcccc

SEQ ID NO: 170711 - DNA, 25 bp, Canis familiaris
tgtcaggagtcaaactcccacacct

SEQ ID NO: 170712 - DNA, 25 bp, Canis familiaris
tgtcactatatcacaattcccacca

SEQ ID NO: 170713 - DNA, 25 bp, Canis familiaris
tgtgcaccaacccaattcacatacc

SEQ ID NO: 170714 - DNA, 25 bp, Canis familiaris
tgtgcagcacaaccgattttatcat

SEQ ID NO: 170715 - DNA, 25 bp, Canis familiaris
tgtctgcacagctccagatggttct

SEQ ID NO: 170716 - DNA, 25 bp, Canis familiaris
tgtcgcaagtcacagaattatttga

SEQ ID NO: 170717 - DNA, 25 bp, Canis familiaris
tgtgccaggtcaccatggtttcatt

SEQ ID NO: 170718 - DNA, 25 bp, Canis familiaris
tgtccatagtagcctgctcttgtca

SEQ ID NO: 170719 - DNA, 25 bp, Canis familiaris
tgtcctctgctatctttttatttag

SEQ ID NO: 170720 - DNA, 25 bp, Canis familiaris
tgtcctggcaactttttttttgagg

SEQ ID NO: 170721 - DNA, 25 bp, Canis familiaris
tgtcccctttttatttattgggcag

SEQ ID NO: 170722 - DNA, 25 bp, Canis familiaris
tgtcccctcagtaattcgttttaag

SEQ ID NO: 170723 - DNA, 25 bp, Canis familiaris
tgtccttctaatcttgctggtttca

SEQ ID NO: 170724 - DNA, 25 bp, Canis familiaris
tgtgctctttaaacttcttcaactc

SEQ ID NO: 170725 - DNA, 25 bp, Canis familiaris
tgtcctttgtgaacttttcacttta

SEQ ID NO: 170726 - DNA, 25 bp, Canis familiaris
tgtcgtttggtagtgtacttggtaa

SEQ ID NO: 170727 - DNA, 25 bp, Canis familiaris
tgtgcgttttcttttatcttcttaa

SEQ ID NO: 170728 - DNA, 25 bp, Canis familiaris
tgtgcatggcttttttttttgttgt

SEQ ID NO: 170729 - DNA, 25 bp, Canis familiaris
tgtgcttgtgctcatttattctttc

SEQ ID NO: 170730 - DNA, 25 bp, Canis familiaris
tgtgcttctacttttattacttcaa

SEQ ID NO: 170731 - DNA, 25 bp, Canis familiaris
tgtgcttctacttcattttggtgga

SEQ ID NO: 170732 - DNA, 25 bp, Canis familiaris
tgtgcttatgtgaactccttggtga

SEQ ID NO: 170733 - DNA, 25 bp, Canis familiaris
tgtccttgggagtctgatttgtcag

SEQ ID NO: 170734 - DNA, 25 bp, Canis familiaris
tgtctcaatgggctctgcttggcca

SEQ ID NO: 170735 - DNA, 25 bp, Canis familiaris
tgtgctcagcatggagtttccttgc

SEQ ID NO: 170736 - DNA, 25 bp, Canis familiaris
tgtgctcatctttgtgtttatgtga

SEQ ID NO: 170737 - DNA, 25 bp, Canis familiaris
tgtgcacatgttagttttctataca

SEQ ID NO: 170738 - DNA, 25 bp, Canis familiaris
tgtgctatgtttctcatgcatctat

SEQ ID NO: 170739 - DNA, 25 bp, Canis familiaris
tgtgctatgttgctctagacttcga

SEQ ID NO: 170740 - DNA, 25 bp, Canis familiaris
tgtgcttcttttgcagactgggaac

SEQ ID NO: 170741 - DNA, 25 bp, Canis familiaris
tgtgccttaattgtgggggagagcc

SEQ ID NO: 170742 - DNA, 25 bp, Canis familiaris
tgtgcccatagatggggggggcccc

SEQ ID NO: 170743 - DNA, 25 bp, Canis familiaris
tgtgcagcaccaagggggggggagc

SEQ ID NO: 170744 - DNA, 25 bp, Canis familiaris
tgatgcaagtatgggggtcttagca

SEQ ID NO: 170745 - DNA, 25 bp, Canis familiaris
tgtgcagtcaattggggcctctagc

SEQ ID NO: 170746 - DNA, 25 bp, Canis familiaris
tgtgcgagaacattgctggccatct

SEQ ID NO: 170747 - DNA, 25 bp, Canis familiaris
tgtgcatggcaacatctgatccttc

SEQ ID NO: 170748 - DNA, 25 bp, Canis familiaris
tgtgcggtgcacgatctgattttct

SEQ ID NO: 170749 - DNA, 25 bp, Canis familiaris
tgtagagtacccgtgttggctctaa

SEQ ID NO: 170750 - DNA, 25 bp, Canis familiaris
tgtaaagtccccacagtgctctaat

SEQ ID NO: 170751 - DNA, 25 bp, Canis familiaris
tgtcaaagccccaggaggttaagcc

SEQ ID NO: 170752 - DNA, 25 bp, Canis familiaris
tgtcaaacgccccaggggttcctga

SEQ ID NO: 170753 - DNA, 25 bp, Canis familiaris
tgtacaatcgtccgatggggtatac

SEQ ID NO: 170754 - DNA, 25 bp, Canis familiaris
tgtccaatggccggaccggctgtcc

SEQ ID NO: 170755 - DNA, 25 bp, Canis familiaris
tgtcctaggcctggtggcctggttc

SEQ ID NO: 170756 - DNA, 25 bp, Canis familiaris
tgtccaacccctaggccagagttgg

SEQ ID NO: 170757 - DNA, 25 bp, Canis familiaris
ttccaagtccttacccgaattactg

SEQ ID NO: 170758 - DNA, 25 bp, Canis familiaris
tgtccaactctctctacacagaaaa

SEQ ID NO: 170759 - DNA, 25 bp, Canis familiaris
tgtccacacttccctttattataag

SEQ ID NO: 170760 - DNA, 25 bp, Canis familiaris
tgtccaattttttattaccatagtt

SEQ ID NO: 170761 - DNA, 25 bp, Canis familiaris
tgtcaaatctttgtatttcctcctt

SEQ ID NO: 170762 - DNA, 25 bp, Canis familiaris
tgtcatataggtccctgtttcccaa

SEQ ID NO: 170763 - DNA, 25 bp, Canis familiaris
tgtctgtaggcatcatagttgtcat

SEQ ID NO: 170764 - DNA, 25 bp, Canis familiaris
tgatctgaatggacatctttctgta

SEQ ID NO: 170765 - DNA, 25 bp, Canis familiaris
tgtgctgattgtgcctttgctgagc

SEQ ID NO: 170766 - DNA, 25 bp, Canis familiaris
tgtgcaggcagttacttgagctagc

SEQ ID NO: 170767 - DNA, 25 bp, Canis familiaris
tgtgcaggccagtcctgctggtagt

SEQ ID NO: 170768 - DNA, 25 bp, Canis familiaris
tgtgcaggccagtcctgctggtagt

SEQ ID NO: 170769 - DNA, 25 bp, Canis familiaris
tgtgcaggccagtcctgctggtagt

SEQ ID NO: 170770 - DNA, 25 bp, Canis familiaris
tgtgcatggccagggtcgtgtagtc

SEQ ID NO: 170771 - DNA, 25 bp, Canis familiaris
tgtgcagacttgggtctgtgtgtcc

SEQ ID NO: 170772 - DNA, 25 bp, Canis familiaris
tgtgccattcagtgtcgggtcacca

SEQ ID NO: 170773 - DNA, 25 bp, Canis familiaris
tgtctgttccttgctgggtactagg

SEQ ID NO: 170774 - DNA, 25 bp, Canis familiaris
tgtctgttccagcagctgcaggtct

SEQ ID NO: 170775 - DNA, 25 bp, Canis familiaris
tgtcctgatccacgactgagcagtg

SEQ ID NO: 170776 - DNA, 25 bp, Canis familiaris
tgtcctacgagcagctcatgcagct

SEQ ID NO: 170777 - DNA, 25 bp, Canis familiaris
tgtccaaagagcggctgctggcctg

SEQ ID NO: 170778 - DNA, 25 bp, Canis familiaris
tgtccaagagttgtggctcctgacc

SEQ ID NO: 170779 - DNA, 25 bp, Canis familiaris
tgtgcgaagggcatttgcctctgcc

SEQ ID NO: 170780 - DNA, 25 bp, Canis familiaris
tgtgctgacagccttttttgtctcc

SEQ ID NO: 170781 - DNA, 25 bp, Canis familiaris
tgtgcatacagccttgtgtgtgtgt

SEQ ID NO: 170782 - DNA, 25 bp, Canis familiaris
tgtctcagtgccagctgtgctgtgc

SEQ ID NO: 170783 - DNA, 25 bp, Canis familiaris
tgtccagatggcccagtgtgtgtct

SEQ ID NO: 170784 - DNA, 25 bp, Canis familiaris
tgtcctgattgttgctgctggtgtt

SEQ ID NO: 170785 - DNA, 25 bp, Canis familiaris
tgtcctcatctgcgtgattgttttt

SEQ ID NO: 170786 - DNA, 25 bp, Canis familiaris
tgtgccatctgcctggatgagtatg

SEQ ID NO: 170787 - DNA, 25 bp, Canis familiaris
tgtgcctctcctgatgagcatttca

SEQ ID NO: 170788 - DNA, 25 bp, Canis familiaris
tgtcctgtgttcctgagctatgaaa

SEQ ID NO: 170789 - DNA, 25 bp, Canis familiaris
tgtcgtggcttcgtgagcgagggca

SEQ ID NO: 170790 - DNA, 25 bp, Canis familiaris
tgtagatggctaagctctcggggcg

SEQ ID NO: 170791 - DNA, 25 bp, Canis familiaris
tgtacatacttaccccagcagggag

SEQ ID NO: 170792 - DNA, 25 bp, Canis familiaris
tgtaaacccttagcatcatgccggc

SEQ ID NO: 170793 - DNA, 25 bp, Canis familiaris
tgtaaacgcctcagcaatccaggtc

SEQ ID NO: 170794 - DNA, 25 bp, Canis familiaris
tgtaaacccaggccacatttgtgta

SEQ ID NO: 170795 - DNA, 25 bp, Canis familiaris
tgtaaagttactaatatatcgtgta

SEQ ID NO: 170796 - DNA, 25 bp, Canis familiaris
tgtcgtcgcttgctaaacatcgttc

SEQ ID NO: 170797 - DNA, 25 bp, Canis familiaris
tctggatgcgtaccaagcagctgcc

SEQ ID NO: 170798 - DNA, 25 bp, Canis familiaris
tgtagtaggagcccagagagacgct

SEQ ID NO: 170799 - DNA, 25 bp, Canis familiaris
tgtctgcacctggcaccatgagaga

SEQ ID NO: 170800 - DNA, 25 bp, Canis familiaris
tgtctcaccggcacttagaggaaat

SEQ ID NO: 170801 - DNA, 25 bp, Canis familiaris
tcgaacttgactatctagaggaagt

SEQ ID NO: 170802 - DNA, 25 bp, Canis familiaris
tgtaccttactatctaggaatagac

SEQ ID NO: 170803 - DNA, 25 bp, Canis familiaris
tgtcccttacccttggaaaagagcg

SEQ ID NO: 170804 - DNA, 25 bp, Canis familiaris
tgtccgtccaagccgaggagcaaaa

SEQ ID NO: 170805 - DNA, 25 bp, Canis familiaris
tgtccatgtctaagcacagggaaga

SEQ ID NO: 170806 - DNA, 25 bp, Canis familiaris
tgtgccatctccagcagctataaat

SEQ ID NO: 170807 - DNA, 25 bp, Canis familiaris
tgtgctcactttcctctataataaa

SEQ ID NO: 170808 - DNA, 25 bp, Canis familiaris
tgtccgactgctccttatatttaaa

SEQ ID NO: 170809 - DNA, 25 bp, Canis familiaris
tgtcctatggacaacttatttaaaa

SEQ ID NO: 170810 - DNA, 25 bp, Canis familiaris
tgtgccataggcatgacttcatttt

SEQ ID NO: 170811 - DNA, 25 bp, Canis familiaris
tgtccaaggcaagtccatctgttcc

SEQ ID NO: 170812 - DNA, 25 bp, Canis familiaris
tgtgccaaagacgttccttgtctcc

SEQ ID NO: 170813 - DNA, 25 bp, Canis familiaris
tgtgcccaagagtcgttttgtgcta

SEQ ID NO: 170814 - DNA, 25 bp, Canis familiaris
tgtgccgtgagtgtgtgtgttgttt

SEQ ID NO: 170815 - DNA, 25 bp, Canis familiaris
tgtcccaaatgcctgtttagttttt

SEQ ID NO: 170816 - DNA, 25 bp, Canis familiaris
tgtgcctcagagaattttttttttt

SEQ ID NO: 170817 - DNA, 25 bp, Canis familiaris
tgtcctccagttatgctgttgttgt

SEQ ID NO: 170818 - DNA, 25 bp, Canis familiaris
tgtgcctggcagaaaagagtgtgtt

SEQ ID NO: 170819 - DNA, 25 bp, Canis familiaris
tgtcgtggagtctactggtgtcttc

SEQ ID NO: 170820 - DNA, 25 bp, Canis familiaris
tgtcgtccgtcaactgtaccgatat

SEQ ID NO: 170821 - DNA, 25 bp, Canis familiaris
tgtctgtcctgttggttccacaaga

SEQ ID NO: 170822 - DNA, 25 bp, Canis familiaris
tgtcccctgtactatttcaccagaa

SEQ ID NO: 170823 - DNA, 25 bp, Canis familiaris
tgtcccttgtagttctcaactgcat

SEQ ID NO: 170824 - DNA, 25 bp, Canis familiaris
tgtcccaggaatgtgcatcacaccc

SEQ ID NO: 170825 - DNA, 25 bp, Canis familiaris
tgtgcccacaggttgtgtgcacacc

SEQ ID NO: 170826 - DNA, 25 bp, Canis familiaris
tgtgcctgatgccttctttgcacac

SEQ ID NO: 170827 - DNA, 25 bp, Canis familiaris
tgtcagtgcatgttcacgtagcgcc

SEQ ID NO: 170828 - DNA, 25 bp, Canis familiaris
tgtcaggatcctacagtccagtcat

SEQ ID NO: 170829 - DNA, 25 bp, Canis familiaris
tgtcggacatgtacgtccacctgac

SEQ ID NO: 170830 - DNA, 25 bp, Canis familiaris
tgtcaggacatggccatggcctcct

SEQ ID NO: 170831 - DNA, 25 bp, Canis familiaris
tgtagggcaggcttacccagcagtt

SEQ ID NO: 170832 - DNA, 25 bp, Canis familiaris
tgtaggggccatagaccatacatac

SEQ ID NO: 170833 - DNA, 25 bp, Canis familiaris
tgtctgcggccctgattatgagatt

SEQ ID NO: 170834 - DNA, 25 bp, Canis familiaris
tgtccttgcgttcgttagcaggtca

SEQ ID NO: 170835 - DNA, 25 bp, Canis familiaris
tgtgccttggttatgacagtggtgc

SEQ ID NO: 170836 - DNA, 25 bp, Canis familiaris
tgtcgattttgtatgagtgtgtgtg

SEQ ID NO: 170837 - DNA, 25 bp, Canis familiaris
tgtctgtctgttctaagtgtggtgt

SEQ ID NO: 170838 - DNA, 25 bp, Canis familiaris
tgttttgcggaatattgagggttaa

SEQ ID NO: 170839 - DNA, 25 bp, Canis familiaris
tgttattcctaatatctgaagggtc

SEQ ID NO: 170840 - DNA, 25 bp, Canis familiaris
tgtaaatgcactaagatatctcaat

SEQ ID NO: 170841 - DNA, 25 bp, Canis familiaris
tgtctgctcacactcacatatacta

SEQ ID NO: 170842 - DNA, 25 bp, Canis familiaris
tgtcctacatcttcacagagtgggt

SEQ ID NO: 170843 - DNA, 25 bp, Canis familiaris
tgtagatgactccacagggcagggt

SEQ ID NO: 170844 - DNA, 25 bp, Canis familiaris
tgtgcggctcagcacagccgagagg

SEQ ID NO: 170845 - DNA, 25 bp, Canis familiaris
tgtgcggtgcaggagatcatcgaag

SEQ ID NO: 170846 - DNA, 25 bp, Canis familiaris
tgtgctgggcatggagtctgctgaa

SEQ ID NO: 170847 - DNA, 25 bp, Canis familiaris
tgtgcgtgcacatgcatgtgtgtgt

SEQ ID NO: 170848 - DNA, 25 bp, Canis familiaris
tgtcactgctcatgcgtgctgatac

SEQ ID NO: 170849 - DNA, 25 bp, Canis familiaris
tgtacttgcctactgtatactacag

SEQ ID NO: 170850 - DNA, 25 bp, Canis familiaris
tgtctttgccaacgtaattactgaa

SEQ ID NO: 170851 - DNA, 25 bp, Canis familiaris
tgtcccccagcggatatcattaggg

SEQ ID NO: 170852 - DNA, 25 bp, Canis familiaris
tgtcctcccagggttcattacaaca

SEQ ID NO: 170853 - DNA, 25 bp, Canis familiaris
tgtgccttccgttttcgtgaaaaag

SEQ ID NO: 170854 - DNA, 25 bp, Canis familiaris
tgtcctcttcctttttgggtaagag

SEQ ID NO: 170855 - DNA, 25 bp, Canis familiaris
tgtaacattccccttgtagcgtaaa

SEQ ID NO: 170856 - DNA, 25 bp, Canis familiaris
tgtaaagtccttttggcattgtaaa

SEQ ID NO: 170857 - DNA, 25 bp, Canis familiaris
tgtcctagatctcttatcccttaaa

SEQ ID NO: 170858 - DNA, 25 bp, Canis familiaris
tgtcccatagctaggtcattgccca

SEQ ID NO: 170859 - DNA, 25 bp, Canis familiaris
tgtcctctactggcgtgccagacca

SEQ ID NO: 170860 - DNA, 25 bp, Canis familiaris
tgtccccactgcgtatgaaatctaa

SEQ ID NO: 170861 - DNA, 25 bp, Canis familiaris
tgtccctcctggtatgtgaaaaaga

SEQ ID NO: 170862 - DNA, 25 bp, Canis familiaris
tgtccctcctgtatgtgaaaagaaa

SEQ ID NO: 170863 - DNA, 25 bp, Canis familiaris
tgtcaaccctttactacacaatcta

SEQ ID NO: 170864 - DNA, 25 bp, Canis familiaris
tgtagtcacctggtactaaagccca

SEQ ID NO: 170865 - DNA, 25 bp, Canis familiaris
tgtttctccctgtacttaaccaagg

SEQ ID NO: 170866 - DNA, 25 bp, Canis familiaris
tgtcatcccccgtagtataaaccag

SEQ ID NO: 170867 - DNA, 25 bp, Canis familiaris
tgtctgccccaggaggtaggtacgc

SEQ ID NO: 170868 - DNA, 25 bp, Canis familiaris
tgtctccgccgaagcgagcagagat

SEQ ID NO: 170869 - DNA, 25 bp, Canis familiaris
tgtcttagccacatgagaggagaaa

SEQ ID NO: 170870 - DNA, 25 bp, Canis familiaris
tgtctttgctgccgtcaaggacacc

SEQ ID NO: 170871 - DNA, 25 bp, Canis familiaris
tgtctcctgcgacttcaacagcaac

SEQ ID NO: 170872 - DNA, 25 bp, Canis familiaris
tgtcgcaccagatgtcgaggcaggc

SEQ ID NO: 170873 - DNA, 25 bp, Canis familiaris
tgtcccacatgatgttgataatagc

SEQ ID NO: 170874 - DNA, 25 bp, Canis familiaris
tgtccagcgcgatgtctgctgcaaa

SEQ ID NO: 170875 - DNA, 25 bp, Canis familiaris
tgtaagctggaactttcacagaatc

SEQ ID NO: 170876 - DNA, 25 bp, Canis familiaris
tgtacacggagggctaccaggtccc

SEQ ID NO: 170877 - DNA, 25 bp, Canis familiaris
tgtgccctggagcaaagccagtccc

SEQ ID NO: 170878 - DNA, 25 bp, Canis familiaris
tgtgccctgccacaaagtgcatggc

SEQ ID NO: 170879 - DNA, 25 bp, Canis familiaris
tgtccctgctccacaaatgagccat

SEQ ID NO: 170880 - DNA, 25 bp, Canis familiaris
tgtccattctacacaaattgtctac

SEQ ID NO: 170881 - DNA, 25 bp, Canis familiaris
tgtgccatttcctacagagttgtcc

SEQ ID NO: 170882 - DNA, 25 bp, Canis familiaris
tgtgccatctgaaccaagcagtccc

SEQ ID NO: 170883 - DNA, 25 bp, Canis familiaris
tgtgcgcactgtctaagcacaccct

SEQ ID NO: 170884 - DNA, 25 bp, Canis familiaris
tgtcaccattgcctcaaacacggca

SEQ ID NO: 170885 - DNA, 25 bp, Canis familiaris
tgtccgcatctcctgactaaaaggc

SEQ ID NO: 170886 - DNA, 25 bp, Canis familiaris
tgtcccttctgttctcaggatgaag

SEQ ID NO: 170887 - DNA, 25 bp, Canis familiaris
tgtcccccttccatgatggagaggg

SEQ ID NO: 170888 - DNA, 25 bp, Canis familiaris
tgtccctctgttggcaggggtggga

SEQ ID NO: 170889 - DNA, 25 bp, Canis familiaris
tgtcacctctggactgatgggggga

SEQ ID NO: 170890 - DNA, 25 bp, Canis familiaris
tgtacttctgtgccgacacgaggga

SEQ ID NO: 170891 - DNA, 25 bp, Canis familiaris
tgtactttcacacgagacggaaaga

SEQ ID NO: 170892 - DNA, 25 bp, Canis familiaris
tgtaatttgcctcggggcctaagcg

SEQ ID NO: 170893 - DNA, 25 bp, Canis familiaris
tgtaccttcccgtggattagagcga

SEQ ID NO: 170894 - DNA, 25 bp, Canis familiaris
tgtcccttccccagagagtgaggag

SEQ ID NO: 170895 - DNA, 25 bp, Canis familiaris
tgtcccagacacttcacgaatctat

SEQ ID NO: 170896 - DNA, 25 bp, Canis familiaris
tgtcccaggaccgcagcaaggtcat

SEQ ID NO: 170897 - DNA, 25 bp, Canis familiaris
tgtcctgcagggcagccgaggtgga

SEQ ID NO: 170898 - DNA, 25 bp, Canis familiaris
tgatcctggggacccgggatggagt

SEQ ID NO: 170899 - DNA, 25 bp, Canis familiaris
tgtccttgggaccctcttgaaggtc

SEQ ID NO: 170900 - DNA, 25 bp, Canis familiaris
tgtcgcttggaacacatctcggacc

SEQ ID NO: 170901 - DNA, 25 bp, Canis familiaris
tgtcctggtacaaccacccaggcac

SEQ ID NO: 170902 - DNA, 25 bp, Canis familiaris
tgtaacgaacatgcctcgcggagac

SEQ ID NO: 170903 - DNA, 25 bp, Canis familiaris
tgtaacggtctccaccaaggatcac

SEQ ID NO: 170904 - DNA, 25 bp, Canis familiaris
tgtaacggttgtccacaatcgcact

SEQ ID NO: 170905 - DNA, 25 bp, Canis familiaris
tgtccaccttttcccaaagagttct

SEQ ID NO: 170906 - DNA, 25 bp, Canis familiaris
tgtccaccttttcccaaagattcta

SEQ ID NO: 170907 - DNA, 25 bp, Canis familiaris
tgtccaccttttcccaaagattcta

SEQ ID NO: 170908 - DNA, 25 bp, Canis familiaris
tgtccacctttgtatcctcaaatgc

SEQ ID NO: 170909 - DNA, 25 bp, Canis familiaris
tgtcccgtactgcatcctatatgac

SEQ ID NO: 170910 - DNA, 25 bp, Canis familiaris
tgtcccaggacgctttctatgagca

SEQ ID NO: 170911 - DNA, 25 bp, Canis familiaris
tgtcaccaggatcttctttgagcca

SEQ ID NO: 170912 - DNA, 25 bp, Canis familiaris
tgtcaccctatgtatctccaagaga

SEQ ID NO: 170913 - DNA, 25 bp, Canis familiaris
tgtccttctttaccctacatgaaaa

SEQ ID NO: 170914 - DNA, 25 bp, Canis familiaris
tgtccttcttcaaacgctgtggaaa

SEQ ID NO: 170915 - DNA, 25 bp, Canis familiaris
tgtccctctccacatcaagataaat

SEQ ID NO: 170916 - DNA, 25 bp, Canis familiaris
tgtcccactccaagtgccagagaaa

SEQ ID NO: 170917 - DNA, 25 bp, Canis familiaris
tgtcctgatccctggccaaaaatta

SEQ ID NO: 170918 - DNA, 25 bp, Canis familiaris
tgtctctatccctgggagccaaaga

SEQ ID NO: 170919 - DNA, 25 bp, Canis familiaris
tgtcatccttctttggaacccaaca

SEQ ID NO: 170920 - DNA, 25 bp, Canis familiaris
tgtccctttttgtcagtttcaacac

SEQ ID NO: 170921 - DNA, 25 bp, Canis familiaris
tgtcgaccgattaaactttgaatgt

SEQ ID NO: 170922 - DNA, 25 bp, Canis familiaris
tgtccaccaaggcacctttgcaagg

SEQ ID NO: 170923 - DNA, 25 bp, Canis familiaris
tgtccatcgaaagacgagtggatag

SEQ ID NO: 170924 - DNA, 25 bp, Canis familiaris
tgtccctgaagatccagacgctgaa

SEQ ID NO: 170925 - DNA, 25 bp, Canis familiaris
tgtccctgagacatccagagccaga

SEQ ID NO: 170926 - DNA, 25 bp, Canis familiaris
tgtccctgtgatgctcagcaacgga

SEQ ID NO: 170927 - DNA, 25 bp, Canis familiaris
tgtccgagaatggcatgaccgccct

SEQ ID NO: 170928 - DNA, 25 bp, Canis familiaris
tgtccaggaacaggagcgcgcagca

SEQ ID NO: 170929 - DNA, 25 bp, Canis familiaris
tgtccaagaacctgctgcgcatgaa

SEQ ID NO: 170930 - DNA, 25 bp, Canis familiaris
tgtccaagatcagcctgggcgacgc

SEQ ID NO: 170931 - DNA, 25 bp, Canis familiaris
tgtccaccacgacttggaagacccg

SEQ ID NO: 170932 - DNA, 25 bp, Canis familiaris
tgtccaccacgacttggaagacccg

SEQ ID NO: 170933 - DNA, 25 bp, Canis familiaris
tgtacaaaccacttggcaaggcccc

SEQ ID NO: 170934 - DNA, 25 bp, Canis familiaris
tgtataaaacctcggacccacgacg

SEQ ID NO: 170935 - DNA, 25 bp, Canis familiaris
tgtagaaataccaggatgcccgcgc

SEQ ID NO: 170936 - DNA, 25 bp, Canis familiaris
tgtacaagtaccaggtggctctccc

SEQ ID NO: 170937 - DNA, 25 bp, Canis familiaris
tgtaccgtaacctaatggtagcccg

SEQ ID NO: 170938 - DNA, 25 bp, Canis familiaris
tgttacgttaactattggttccact

SEQ ID NO: 170939 - DNA, 25 bp, Canis familiaris
tgttacggttgggaaggtctaatat

SEQ ID NO: 170940 - DNA, 25 bp, Canis familiaris
tgtctaaggttgcctttgtgtcttt

SEQ ID NO: 170941 - DNA, 25 bp, Canis familiaris
tgtctacctggggtctagctgtttt

SEQ ID NO: 170942 - DNA, 25 bp, Canis familiaris
tgtccgtgttggtttagtacttttg

SEQ ID NO: 170943 - DNA, 25 bp, Canis familiaris
tgtccagtttttaatcagtgactta

SEQ ID NO: 170944 - DNA, 25 bp, Canis familiaris
tgtacagtaatattttcactttcta

SEQ ID NO: 170945 - DNA, 25 bp, Canis familiaris
tgtccaagattctgtttcttctctt

SEQ ID NO: 170946 - DNA, 25 bp, Canis familiaris
tgtccagtgtcctggttttccttac

SEQ ID NO: 170947 - DNA, 25 bp, Canis familiaris
tgtccgtcccgtttatgtaagcaat

SEQ ID NO: 170948 - DNA, 25 bp, Canis familiaris
tgtccctcccagttgtgtgagaaca

SEQ ID NO: 170949 - DNA, 25 bp, Canis familiaris
tgtcccttgccaccatggtggggca

SEQ ID NO: 170950 - DNA, 25 bp, Canis familiaris
tgtcccttgctacaaggaaccacac

SEQ ID NO: 170951 - DNA, 25 bp, Canis familiaris
tgtcaggtcgctaaggggaacccca

SEQ ID NO: 170952 - DNA, 25 bp, Canis familiaris
tgtcagagccctgacgaggagccac

SEQ ID NO: 170953 - DNA, 25 bp, Canis familiaris
tgtacgcggccttcgactgcacggc

SEQ ID NO: 170954 - DNA, 25 bp, Canis familiaris
tgtactcagaccgggaccggacctt

SEQ ID NO: 170955 - DNA, 25 bp, Canis familiaris
tgtaatggaaacgccccaactgctt

SEQ ID NO: 170956 - DNA, 25 bp, Canis familiaris
tgataattcaaaaatccccaaccgg

SEQ ID NO: 170957 - DNA, 25 bp, Canis familiaris
tgtagtaagattaagccctaacccg

SEQ ID NO: 170958 - DNA, 25 bp, Canis familiaris
tgtcagtagatatttcagactcaag

SEQ ID NO: 170959 - DNA, 25 bp, Canis familiaris
tgtagtaatacaccccaatagttgg

SEQ ID NO: 170960 - DNA, 25 bp, Canis familiaris
tgtagtgttaacccgcctaattgtg

SEQ ID NO: 170961 - DNA, 25 bp, Canis familiaris
tgtagtttaaccctgcctattgttt

SEQ ID NO: 170962 - DNA, 25 bp, Canis familiaris
tgtcctattaaagggcctgttttct

SEQ ID NO: 170963 - DNA, 25 bp, Canis familiaris
ttaccaaaacacgcggctttttcag

SEQ ID NO: 170964 - DNA, 25 bp, Canis familiaris
tgtaataaactcaccgggtttcctg

SEQ ID NO: 170965 - DNA, 25 bp, Canis familiaris
tgtaataagacataacgtttttcct

SEQ ID NO: 170966 - DNA, 25 bp, Canis familiaris
tgtaggatggaaaaactgttttgtt

SEQ ID NO: 170967 - DNA, 25 bp, Canis familiaris
tgtctggctccagaaccttttttgt

SEQ ID NO: 170968 - DNA, 25 bp, Canis familiaris
tgtctccccacatatcagatttatt

SEQ ID NO: 170969 - DNA, 25 bp, Canis familiaris
tgtctcccccaaatgcatatgttga

SEQ ID NO: 170970 - DNA, 25 bp, Canis familiaris
tgtcccctgctggaagagcgattcc

SEQ ID NO: 170971 - DNA, 25 bp, Canis familiaris
tgtcccttcatttcatacagttcct

SEQ ID NO: 170972 - DNA, 25 bp, Canis familiaris
tgtccctttttaatacttgaccaag

SEQ ID NO: 170973 - DNA, 25 bp, Canis familiaris
tgtcccttattttctagttttcctg

SEQ ID NO: 170974 - DNA, 25 bp, Canis familiaris
tgtcctttttctgtgatgtgttccc

SEQ ID NO: 170975 - DNA, 25 bp, Canis familiaris
tgtacacctttgggtctgagtaccc

SEQ ID NO: 170976 - DNA, 25 bp, Canis familiaris
tgtagacacttgctaccttgtaccc

SEQ ID NO: 170977 - DNA, 25 bp, Canis familiaris
tgtaatagttctatccttttgcctg

SEQ ID NO: 170978 - DNA, 25 bp, Canis familiaris
tgtctgaggttttctcttttagccc

SEQ ID NO: 170979 - DNA, 25 bp, Canis familiaris
tgtcgagttttgcgtttgtctcacc

SEQ ID NO: 170980 - DNA, 25 bp, Canis familiaris
tgtcagggtattgtgcttggtttgc

SEQ ID NO: 170981 - DNA, 25 bp, Canis familiaris
tgtagggacgtgttgcctggtcctg

SEQ ID NO: 170982 - DNA, 25 bp, Canis familiaris
tgtaggaacgcatcacgcaggtccc

SEQ ID NO: 170983 - DNA, 25 bp, Canis familiaris
tgtaagtgacgcacgctcatggttc

SEQ ID NO: 170984 - DNA, 25 bp, Canis familiaris
tgtaagagactgtccatctctgcct

SEQ ID NO: 170985 - DNA, 25 bp, Canis familiaris
tgtcaagagcacaggctatccccaa

SEQ ID NO: 170986 - DNA, 25 bp, Canis familiaris
tgtccatggacaaggtgtgcctccg

SEQ ID NO: 170987 - DNA, 25 bp, Canis familiaris
tgtcagtggacactgaggctcctcc

SEQ ID NO: 170988 - DNA, 25 bp, Canis familiaris
tgtcatggtgaatggccctaccact

SEQ ID NO: 170989 - DNA, 25 bp, Canis familiaris
tgtctgcagtgatacccctaataaa

SEQ ID NO: 170990 - DNA, 25 bp, Canis familiaris
tgtcgctgctcagagccaccaaaaa

SEQ ID NO: 170991 - DNA, 25 bp, Canis familiaris
tgactggtcagttgctacaatcaga

SEQ ID NO: 170992 - DNA, 25 bp, Canis familiaris
tgtccgtcctgtgcatgaatcagat

SEQ ID NO: 170993 - DNA, 25 bp, Canis familiaris
tgtcctgttctgatacctacattcc

SEQ ID NO: 170994 - DNA, 25 bp, Canis familiaris
tgtcgatgttagacaagactacatt

SEQ ID NO: 170995 - DNA, 25 bp, Canis familiaris
tgtctgcattctaatcctgactcca

SEQ ID NO: 170996 - DNA, 25 bp, Canis familiaris
tgtctcgtcagttcatgtacttctc

SEQ ID NO: 170997 - DNA, 25 bp, Canis familiaris
tgtctgtgttcatctgtatgttagt

SEQ ID NO: 170998 - DNA, 25 bp, Canis familiaris
tgtctgtgtctctcatgaataaata

SEQ ID NO: 170999 - DNA, 25 bp, Canis familiaris
tgtcatgtaccatcaataaagtacc

SEQ ID NO: 171000 - DNA, 25 bp, Canis familiaris
tgtcaataaaccaaaaagtcttctt

SEQ ID NO: 171001 - DNA, 25 bp, Canis familiaris
tgtaaaaaccgtactaatgttcatt

SEQ ID NO: 171002 - DNA, 25 bp, Canis familiaris
tgtcaaaacagtcccttaatttcct

SEQ ID NO: 171003 - DNA, 25 bp, Canis familiaris
tgtaacagaagtccgattaaccccg

SEQ ID NO: 171004 - DNA, 25 bp, Canis familiaris
tgataaccaagcatctgttaaaccc

SEQ ID NO: 171005 - DNA, 25 bp, Canis familiaris
tgtaatccataggcagtctgtgaat

SEQ ID NO: 171006 - DNA, 25 bp, Canis familiaris
tgtacattcatctgctcacgtgaca

SEQ ID NO: 171007 - DNA, 25 bp, Canis familiaris
tgtagatgtgcctcgcatagctgtt

SEQ ID NO: 171008 - DNA, 25 bp, Canis familiaris
tgtcgttcttaccatggctgtatgg

SEQ ID NO: 171009 - DNA, 25 bp, Canis familiaris
tgtcctgtttcatgtggcctaggca

SEQ ID NO: 171010 - DNA, 25 bp, Canis familiaris
tgtacagttttgcatggcctaggtg

SEQ ID NO: 171011 - DNA, 25 bp, Canis familiaris
tgtcacgtttcgaaggttgtgggaa

SEQ ID NO: 171012 - DNA, 25 bp, Canis familiaris
tgataaaatatcacaggtactggga

SEQ ID NO: 171013 - DNA, 25 bp, Canis familiaris
tgtaaaatttactttgatatggtca

SEQ ID NO: 171014 - DNA, 25 bp, Canis familiaris
tgtaaatcttgttaattgtaaatca

SEQ ID NO: 171015 - DNA, 25 bp, Canis familiaris
tgtcctcctgtgctatttgtacaaa

SEQ ID NO: 171016 - DNA, 25 bp, Canis familiaris
tgtactccttgacagttgatagatt

SEQ ID NO: 171017 - DNA, 25 bp, Canis familiaris
tgtcctccttgcatagtggtagttt

SEQ ID NO: 171018 - DNA, 25 bp, Canis familiaris
tgtaacatcttggttgtggtagtcc

SEQ ID NO: 171019 - DNA, 25 bp, Canis familiaris
tgtaagcttcgctgtgtcggagctt

SEQ ID NO: 171020 - DNA, 25 bp, Canis familiaris
tgtctaatacactgtgcatccggct

SEQ ID NO: 171021 - DNA, 25 bp, Canis familiaris
tgtctattactttggatctcgatga

SEQ ID NO: 171022 - DNA, 25 bp, Canis familiaris
tgttataaagttgaattgtgaaatt

SEQ ID NO: 171023 - DNA, 25 bp, Canis familiaris
tgatttaaagtcagagagttcataa

SEQ ID NO: 171024 - DNA, 25 bp, Canis familiaris
tgagtaaataacagcatacgtgata

SEQ ID NO: 171025 - DNA, 25 bp, Canis familiaris
ttggacaaaccaactacttgaattg

SEQ ID NO: 171026 - DNA, 25 bp, Canis familiaris
tgaggccaaagccagaccgttcaac

SEQ ID NO: 171027 - DNA, 25 bp, Canis familiaris
tgtagcctacagcctacctttatac

SEQ ID NO: 171028 - DNA, 25 bp, Canis familiaris
tgtacgctacagacagatgttttca

SEQ ID NO: 171029 - DNA, 25 bp, Canis familiaris
tgtccgtcacaatgtcacttgtctc

SEQ ID NO: 171030 - DNA, 25 bp, Canis familiaris
tgtctgactactgtgtacttgcctc

SEQ ID NO: 171031 - DNA, 25 bp, Canis familiaris
tgtagagtgcaaactgtccttccct

SEQ ID NO: 171032 - DNA, 25 bp, Canis familiaris
tgtagcagtcaaaattccctctctt

SEQ ID NO: 171033 - DNA, 25 bp, Canis familiaris
tgtagccctaagggcctttctgttc

SEQ ID NO: 171034 - DNA, 25 bp, Canis familiaris
tgtcatgcccaaggggtcgttgcgt

SEQ ID NO: 171035 - DNA, 25 bp, Canis familiaris
tgtacgccaacacagtgctgtctgg

SEQ ID NO: 171036 - DNA, 25 bp, Canis familiaris
tgatacccaacctggtttggggaca

SEQ ID NO: 171037 - DNA, 25 bp, Canis familiaris
tgtattccaccctgggtgggcctga

SEQ ID NO: 171038 - DNA, 25 bp, Canis familiaris
tgtaatcccagctactcgggaggct

SEQ ID NO: 171039 - DNA, 25 bp, Canis familiaris
tgtaatcccagcactttgggaggcc

SEQ ID NO: 171040 - DNA, 25 bp, Canis familiaris
tgtacgccacactctacatgggtgg

SEQ ID NO: 171041 - DNA, 25 bp, Canis familiaris
tgtacgcaaatagccctgtcctggc

SEQ ID NO: 171042 - DNA, 25 bp, Canis familiaris
tgtatgccaagtacacccgtacagg

SEQ ID NO: 171043 - DNA, 25 bp, Canis familiaris
tgtcagagaagagctcccctgaggc

SEQ ID NO: 171044 - DNA, 25 bp, Canis familiaris
tgtctgggatgacctcacagccaag

SEQ ID NO: 171045 - DNA, 25 bp, Canis familiaris
tgtctgggatgacttcacagcccag

SEQ ID NO: 171046 - DNA, 25 bp, Canis familiaris
tgtcttggtgaaggcatcgcccgca

SEQ ID NO: 171047 - DNA, 25 bp, Canis familiaris
tgtctgtggggagtctcctcacgac

SEQ ID NO: 171048 - DNA, 25 bp, Canis familiaris
tgtcttggggtgtcacgctcaacat

SEQ ID NO: 171049 - DNA, 25 bp, Canis familiaris
tgtctttgaggttcattgccagcac

SEQ ID NO: 171050 - DNA, 25 bp, Canis familiaris
tgtcttggaggttttgctgtcattc

SEQ ID NO: 171051 - DNA, 25 bp, Canis familiaris
tgtctgtgccaggcgggtgtggact

SEQ ID NO: 171052 - DNA, 25 bp, Canis familiaris
tgtcttgccaggcgacacatggacc

SEQ ID NO: 171053 - DNA, 25 bp, Canis familiaris
tgtctgcccaggagactctctatac

SEQ ID NO: 171054 - DNA, 25 bp, Canis familiaris
tgtcccacatggagttgataataca

SEQ ID NO: 171055 - DNA, 25 bp, Canis familiaris
tgtcccaaggcccaatatccaagcc

SEQ ID NO: 171056 - DNA, 25 bp, Canis familiaris
tgtccgaatgaggcacctctctcaa

SEQ ID NO: 171057 - DNA, 25 bp, Canis familiaris
tgtccggatctggcaagtctccagg

SEQ ID NO: 171058 - DNA, 25 bp, Canis familiaris
tgtcccattcaggtagtctctaatc

SEQ ID NO: 171059 - DNA, 25 bp, Canis familiaris
tgtcctgttcattatgcgtttaatt

SEQ ID NO: 171060 - DNA, 25 bp, Canis familiaris
tgtactttcttttgttcgatctttc

SEQ ID NO: 171061 - DNA, 25 bp, Canis familiaris
tgtcctgaattttagtccagttctg

SEQ ID NO: 171062 - DNA, 25 bp, Canis familiaris
tccacgacttttgtcacgtttcgaa

SEQ ID NO: 171063 - DNA, 25 bp, Canis familiaris
tgtcatcgactctagtttacgtagt

SEQ ID NO: 171064 - DNA, 25 bp, Canis familiaris
tgtatgagattcagactttcagtca

SEQ ID NO: 171065 - DNA, 25 bp, Canis familiaris
tgtagagaatcaccccaggagcaca

SEQ ID NO: 171066 - DNA, 25 bp, Canis familiaris
tgtagaactcagggccagtgaccac

SEQ ID NO: 171067 - DNA, 25 bp, Canis familiaris
tgttaactccctccatggagcacac

SEQ ID NO: 171068 - DNA, 25 bp, Canis familiaris
tgttagtctctcaccagggtatctt

SEQ ID NO: 171069 - DNA, 25 bp, Canis familiaris
tgttcatcttccaccagggtggtta

SEQ ID NO: 171070 - DNA, 25 bp, Canis familiaris
tgtctattccctcccagattatgga

SEQ ID NO: 171071 - DNA, 25 bp, Canis familiaris
tgtctgtctctgcttacatgattta

SEQ ID NO: 171072 - DNA, 25 bp, Canis familiaris
tgtctgctcctgctgcagagcagca

SEQ ID NO: 171073 - DNA, 25 bp, Canis familiaris
tgtctgtcactttccatgcataaag

SEQ ID NO: 171074 - DNA, 25 bp, Canis familiaris
tgtttgcacttacagcttttttgta

SEQ ID NO: 171075 - DNA, 25 bp, Canis familiaris
tgtctgtaactttagtaatttttca

SEQ ID NO: 171076 - DNA, 25 bp, Canis familiaris
tgtctgcttttttattccatttaaa

SEQ ID NO: 171077 - DNA, 25 bp, Canis familiaris
tgtctgtgtttcttggggttttttg

SEQ ID NO: 171078 - DNA, 25 bp, Canis familiaris
tgtctgtgttgtttgttagtttttt

SEQ ID NO: 171079 - DNA, 25 bp, Canis familiaris
tgtagttcggatagcttagttttaa

SEQ ID NO: 171080 - DNA, 25 bp, Canis familiaris
tgtagcgggctgttttaatatttta

SEQ ID NO: 171081 - DNA, 25 bp, Canis familiaris
tgtacagggctaggttggttggttt

SEQ ID NO: 171082 - DNA, 25 bp, Canis familiaris
tgtacggctctctgttgtattactt

SEQ ID NO: 171083 - DNA, 25 bp, Canis familiaris
tgtaggcctctgcagtttttgactg

SEQ ID NO: 171084 - DNA, 25 bp, Canis familiaris
tgtagaccattgctgtaccctactg

SEQ ID NO: 171085 - DNA, 25 bp, Canis familiaris
tgtaaagatctgcttccacttgttc

SEQ ID NO: 171086 - DNA, 25 bp, Canis familiaris
tgtaattggctgacttccactggct

SEQ ID NO: 171087 - DNA, 25 bp, Canis familiaris
tccacttgggtatccctggtcagta

SEQ ID NO: 171088 - DNA, 25 bp, Canis familiaris
tcttttgggcgctcccttgtaatag

SEQ ID NO: 171089 - DNA, 25 bp, Canis familiaris
tgtatttcggactactcccgttaag

SEQ ID NO: 171090 - DNA, 25 bp, Canis familiaris
tgtaatatctagctgagtccccttt

SEQ ID NO: 171091 - DNA, 25 bp, Canis familiaris
tgtaatactttctatgtgacatttc

SEQ ID NO: 171092 - DNA, 25 bp, Canis familiaris
tgtaatagtgttctggagacaatct

SEQ ID NO: 171093 - DNA, 25 bp, Canis familiaris
tccaacaggttcctcgggcaattgt

SEQ ID NO: 171094 - DNA, 25 bp, Canis familiaris
tgtcaaagatgttcgtcgtggcaat

SEQ ID NO: 171095 - DNA, 25 bp, Canis familiaris
tgtcagagagatcctctcctgtgcc

SEQ ID NO: 171096 - DNA, 25 bp, Canis familiaris
tgtcacagatgccatctcatccgga

SEQ ID NO: 171097 - DNA, 25 bp, Canis familiaris
tgtcgcgagctgctgatacggaaga

SEQ ID NO: 171098 - DNA, 25 bp, Canis familiaris
tgtcgtgcactttgtcagggtcaga

SEQ ID NO: 171099 - DNA, 25 bp, Canis familiaris
tgtagtggtgtttagaagctgagac

SEQ ID NO: 171100 - DNA, 25 bp, Canis familiaris
tgtagttggattttgggaagccggg

SEQ ID NO: 171101 - DNA, 25 bp, Canis familiaris
tgtaggtgggctgcagggatagggg

SEQ ID NO: 171102 - DNA, 25 bp, Canis familiaris
tgtaggggtcgggggaggcggagca

SEQ ID NO: 171103 - DNA, 25 bp, Canis familiaris
tgtctggggtgggatgggggggcag

SEQ ID NO: 171104 - DNA, 25 bp, Canis familiaris
tgtttgaggtggcgggcagggtgtc

SEQ ID NO: 171105 - DNA, 25 bp, Canis familiaris
tcgttgtttgaccggacaccgactg

SEQ ID NO: 171106 - DNA, 25 bp, Canis familiaris
tgatttatttacagaaaccagtttt

SEQ ID NO: 171107 - DNA, 25 bp, Canis familiaris
tgtacttttcacacgaacgagagac

SEQ ID NO: 171108 - DNA, 25 bp, Canis familiaris
ttacttcactaacggaacctaatcg

SEQ ID NO: 171109 - DNA, 25 bp, Canis familiaris
tgtacttccaagtgctgagtcctgg

SEQ ID NO: 171110 - DNA, 25 bp, Canis familiaris
tgtcccccaagtacctgtacagaga

SEQ ID NO: 171111 - DNA, 25 bp, Canis familiaris
tgtcaccccaggaactgctgagaag

SEQ ID NO: 171112 - DNA, 25 bp, Canis familiaris
tgttccaaaagatcgtggatcagtc

SEQ ID NO: 171113 - DNA, 25 bp, Canis familiaris
tgttccaaatttccgaagccagttg

SEQ ID NO: 171114 - DNA, 25 bp, Canis familiaris
tgtaccacgtttccggagagtttgc

SEQ ID NO: 171115 - DNA, 25 bp, Canis familiaris
tgttctccctttcaggaaacttatt

SEQ ID NO: 171116 - DNA, 25 bp, Canis familiaris
tgtccccacttacctagaaagcatt

SEQ ID NO: 171117 - DNA, 25 bp, Canis familiaris
tgtcccgatttctcttttatgattt

SEQ ID NO: 171118 - DNA, 25 bp, Canis familiaris
tgtcccaatttctcttgtatgagtt

SEQ ID NO: 171119 - DNA, 25 bp, Canis familiaris
tgtccctattggcacgcttatgatg

SEQ ID NO: 171120 - DNA, 25 bp, Canis familiaris
tgtccccttgtcaagcctgtgatat

SEQ ID NO: 171121 - DNA, 25 bp, Canis familiaris
tgtcccttgtgtctcactgtgatat

SEQ ID NO: 171122 - DNA, 25 bp, Canis familiaris
tgtccctaactttactgctgtattt

SEQ ID NO: 171123 - DNA, 25 bp, Canis familiaris
tgtcccaccctagaatgtgacttcc

SEQ ID NO: 171124 - DNA, 25 bp, Canis familiaris
tgtccccttctagttttgagaaact

SEQ ID NO: 171125 - DNA, 25 bp, Canis familiaris
tgtactctttcttcttttagggctt

SEQ ID NO: 171126 - DNA, 25 bp, Canis familiaris
tgtacattttgcactaactctgggt

SEQ ID NO: 171127 - DNA, 25 bp, Canis familiaris
tgtacattatctgttctacctcggt

SEQ ID NO: 171128 - DNA, 25 bp, Canis familiaris
tgtactcttaaacttatcaccgtga

SEQ ID NO: 171129 - DNA, 25 bp, Canis familiaris
tgtacatcctccaagttgattccaa

SEQ ID NO: 171130 - DNA, 25 bp, Canis familiaris
tgtctcatgcctctcagtttaaaag

SEQ ID NO: 171131 - DNA, 25 bp, Canis familiaris
tgtagattctgtattttgaaaaggc

SEQ ID NO: 171132 - DNA, 25 bp, Canis familiaris
tgtctgtcttgttttatttaggggc

SEQ ID NO: 171133 - DNA, 25 bp, Canis familiaris
tgtctgtccatttgtgttttctgcg

SEQ ID NO: 171134 - DNA, 25 bp, Canis familiaris
tgtccccatttggtggcagtgtgcc

SEQ ID NO: 171135 - DNA, 25 bp, Canis familiaris
tgtccctaatctgatgtgcactctc

SEQ ID NO: 171136 - DNA, 25 bp, Canis familiaris
tgtcccgacactgatgtgctctaca

SEQ ID NO: 171137 - DNA, 25 bp, Canis familiaris
tgtcccacaacttctgctgtaacaa

SEQ ID NO: 171138 - DNA, 25 bp, Canis familiaris
tgatacaaccctttgctttagcatg

SEQ ID NO: 171139 - DNA, 25 bp, Canis familiaris
tgtacaacatccaccttatgctgtc

SEQ ID NO: 171140 - DNA, 25 bp, Canis familiaris
tgtacattgcacatacccttggatc

SEQ ID NO: 171141 - DNA, 25 bp, Canis familiaris
tgtacttgagtttcactgcattgta

SEQ ID NO: 171142 - DNA, 25 bp, Canis familiaris
tgtcacaggtgtttcagctatttga

SEQ ID NO: 171143 - DNA, 25 bp, Canis familiaris
tgtctcgccgtattgctgtggaata

SEQ ID NO: 171144 - DNA, 25 bp, Canis familiaris
tgtcgcagccgaatctcgtgatgaa

SEQ ID NO: 171145 - DNA, 25 bp, Canis familiaris
tgtcacagccgcttgacaatgcaga

SEQ ID NO: 171146 - DNA, 25 bp, Canis familiaris
tgtctcctagcctaaatccattggt

SEQ ID NO: 171147 - DNA, 25 bp, Canis familiaris
tgtacctggctctcaaccagtgcag

SEQ ID NO: 171148 - DNA, 25 bp, Canis familiaris
tgttgcactacctcggccatgtcat

SEQ ID NO: 171149 - DNA, 25 bp, Canis familiaris
tgtacagcagggtgcaggccacctt

SEQ ID NO: 171150 - DNA, 25 bp, Canis familiaris
tgtacacaggggcctgggagccagg

SEQ ID NO: 171151 - DNA, 25 bp, Canis familiaris
tgtacacaacttttgggagccgggg

SEQ ID NO: 171152 - DNA, 25 bp, Canis familiaris
tgtagatgagatgtttgggcccggg

SEQ ID NO: 171153 - DNA, 25 bp, Canis familiaris
tgtaggggcttcttagggccgtcag

SEQ ID NO: 171154 - DNA, 25 bp, Canis familiaris
tgtatgggcctaaaaggtccctagt

SEQ ID NO: 171155 - DNA, 25 bp, Canis familiaris
tgtatccccagtaactgttccctgg

SEQ ID NO: 171156 - DNA, 25 bp, Canis familiaris
tgtaccctaggtgatgagccacgcc

SEQ ID NO: 171157 - DNA, 25 bp, Canis familiaris
tgtcgcatactacatttgtgccccc

SEQ ID NO: 171158 - DNA, 25 bp, Canis familiaris
tgtcatcaatggaaatcccatcacc

SEQ ID NO: 171159 - DNA, 25 bp, Canis familiaris
tgtctcatagaggacacacacacac

SEQ ID NO: 171160 - DNA, 25 bp, Canis familiaris
tgtctgagagaaaataccagcatct

SEQ ID NO: 171161 - DNA, 25 bp, Canis familiaris
tgtctcaaagattaagccatgcatg

SEQ ID NO: 171162 - DNA, 25 bp, Canis familiaris
tgtcaagcacagtccaggcgctata

SEQ ID NO: 171163 - DNA, 25 bp, Canis familiaris
tgtctggccagctcagtcagtagag

SEQ ID NO: 171164 - DNA, 25 bp, Canis familiaris
tgtatgagtcgcgctgtgcagaagg

SEQ ID NO: 171165 - DNA, 25 bp, Canis familiaris
tgtctggcccagcttcagcaagggc

SEQ ID NO: 171166 - DNA, 25 bp, Canis familiaris
tgtctaccagacaacgagcaagggg

SEQ ID NO: 171167 - DNA, 25 bp, Canis familiaris
tgtcttcaccaccatggagaaggcc

SEQ ID NO: 171168 - DNA, 25 bp, Canis familiaris
tgtctacatctaacatggggctgga

SEQ ID NO: 171169 - DNA, 25 bp, Canis familiaris
tgtcccacaaactctggcatcatga

SEQ ID NO: 171170 - DNA, 25 bp, Canis familiaris
tgtcccacagttgtctggctgggct

SEQ ID NO: 171171 - DNA, 25 bp, Canis familiaris
tgtcttgagtttggtcggtggcgcc

SEQ ID NO: 171172 - DNA, 25 bp, Canis familiaris
tgtctacctttggctcagagatgtg

SEQ ID NO: 171173 - DNA, 25 bp, Canis familiaris
tgtccctctctatgtctgagtgtta

SEQ ID NO: 171174 - DNA, 25 bp, Canis familiaris
tgtctactctgtgagcctggttttg

SEQ ID NO: 171175 - DNA, 25 bp, Canis familiaris
tgtctgtccagtgtcctggttttcc

SEQ ID NO: 171176 - DNA, 25 bp, Canis familiaris
tgtttgcacactctcgcgtgttaac

SEQ ID NO: 171177 - DNA, 25 bp, Canis familiaris
tgtttccagtggacacgtttcaagc

SEQ ID NO: 171178 - DNA, 25 bp, Canis familiaris
tgtcttttgggtgcttggccatatg

SEQ ID NO: 171179 - DNA, 25 bp, Canis familiaris
tgtctttaggcagcagcttttaata

SEQ ID NO: 171180 - DNA, 25 bp, Canis familiaris
tgtcgttcaatcacttcttcttaag

SEQ ID NO: 171181 - DNA, 25 bp, Canis familiaris
tgtttccaccttatcttcgtaaaca

SEQ ID NO: 171182 - DNA, 25 bp, Canis familiaris
tgtttgtaacttatctgtaaaaggt

SEQ ID NO: 171183 - DNA, 25 bp, Canis familiaris
tgttttggccccacaatcaacggga

SEQ ID NO: 171184 - DNA, 25 bp, Canis familiaris
tgtttggaggccacaagacaacccc

SEQ ID NO: 171185 - DNA, 25 bp, Canis familiaris
tgtttgggagcctcaggcaccatca

SEQ ID NO: 171186 - DNA, 25 bp, Canis familiaris
tgtacggacgacttacacacacaca

SEQ ID NO: 171187 - DNA, 25 bp, Canis familiaris
tgtagtaggcaagttaccccaacac

SEQ ID NO: 171188 - DNA, 25 bp, Canis familiaris
tgtttcagcaagccttacctacaac

SEQ ID NO: 171189 - DNA, 25 bp, Canis familiaris
tgtcagtaccccagacaatcacaca

SEQ ID NO: 171190 - DNA, 25 bp, Canis familiaris
tgtcgacacatctcactaaaccaag

SEQ ID NO: 171191 - DNA, 25 bp, Canis familiaris
tgtctgcaactctccatagaccaga

SEQ ID NO: 171192 - DNA, 25 bp, Canis familiaris
tgtctccatcactcaacaacagaat

SEQ ID NO: 171193 - DNA, 25 bp, Canis familiaris
tgatctctgcacactaactagctaa

SEQ ID NO: 171194 - DNA, 25 bp, Canis familiaris
tgtctctcctgaataaatacataaa

SEQ ID NO: 171195 - DNA, 25 bp, Canis familiaris
tgtctctcttcttctcaagaataaa

SEQ ID NO: 171196 - DNA, 25 bp, Canis familiaris
tgtcacacctgctctaaagtaatca

SEQ ID NO: 171197 - DNA, 25 bp, Canis familiaris
tgtacagcgcctgcttgaagtcttc

SEQ ID NO: 171198 - DNA, 25 bp, Canis familiaris
tgtaaacacgcacctgaagctttgg

SEQ ID NO: 171199 - DNA, 25 bp, Canis familiaris
tgttttcacgaccaacacttatgga

SEQ ID NO: 171200 - DNA, 25 bp, Canis familiaris
tgtttctggctgtcctgaaccatac

SEQ ID NO: 171201 - DNA, 25 bp, Canis familiaris
tgtctttggcctgcttaccaaatgt

SEQ ID NO: 171202 - DNA, 25 bp, Canis familiaris
tgttttgtccttcaactcacattaa

SEQ ID NO: 171203 - DNA, 25 bp, Canis familiaris
tgtagtagagccctacaactccatc

SEQ ID NO: 171204 - DNA, 25 bp, Canis familiaris
tgtagctgatgatccgaataactac

SEQ ID NO: 171205 - DNA, 25 bp, Canis familiaris
tgtcattcatgctgtcccacaaata

SEQ ID NO: 171206 - DNA, 25 bp, Canis familiaris
tgtcattgctgctgtgaccagcgcc

SEQ ID NO: 171207 - DNA, 25 bp, Canis familiaris
tgtcaagcgccgcatctcagagact

SEQ ID NO: 171208 - DNA, 25 bp, Canis familiaris
tgtcaacaccagctctgatgccaat

SEQ ID NO: 171209 - DNA, 25 bp, Canis familiaris
tgctcaacaaaccaggaggagttga

SEQ ID NO: 171210 - DNA, 25 bp, Canis familiaris
tgtaatcacagggcagggggttggg

SEQ ID NO: 171211 - DNA, 25 bp, Canis familiaris
tgtaatttgtacaggggccgtgccc

SEQ ID NO: 171212 - DNA, 25 bp, Canis familiaris
tgtatttttacatctacgtcacgcc

SEQ ID NO: 171213 - DNA, 25 bp, Canis familiaris
tgtctataatggcatcccacgatga

SEQ ID NO: 171214 - DNA, 25 bp, Canis familiaris
tgtctcacttggtctgggacttgca

SEQ ID NO: 171215 - DNA, 25 bp, Canis familiaris
tgtctccttgcttcagggatgtcca

SEQ ID NO: 171216 - DNA, 25 bp, Canis familiaris
tgtctcttgtgtacacagactctcc

SEQ ID NO: 171217 - DNA, 25 bp, Canis familiaris
tgtctccggagaagagcatcctgcc

SEQ ID NO: 171218 - DNA, 25 bp, Canis familiaris
tgtatccatgggccagactggtgct

SEQ ID NO: 171219 - DNA, 25 bp, Canis familiaris
tgtcatccaggtggacgtggctcca

SEQ ID NO: 171220 - DNA, 25 bp, Canis familiaris
tgtctcctacatggatcgtgtaccc

SEQ ID NO: 171221 - DNA, 25 bp, Canis familiaris
tgtcacctagcatggctgggtgccc

SEQ ID NO: 171222 - DNA, 25 bp, Canis familiaris
tgtcaccgatattttcagcttccac

SEQ ID NO: 171223 - DNA, 25 bp, Canis familiaris
tgtacctgggaaatctcagtcccct

SEQ ID NO: 171224 - DNA, 25 bp, Canis familiaris
tgtaatgtgcgggtgactcgtcccc

SEQ ID NO: 171225 - DNA, 25 bp, Canis familiaris
tgtaattgcgtggttgacgtcccct

SEQ ID NO: 171226 - DNA, 25 bp, Canis familiaris
tgtcaattctgttttacgactgcag

SEQ ID NO: 171227 - DNA, 25 bp, Canis familiaris
tgtcattcctttttatgaagtgctg

SEQ ID NO: 171228 - DNA, 25 bp, Canis familiaris
tgtaatgttttctttatgagctgga

SEQ ID NO: 171229 - DNA, 25 bp, Canis familiaris
tctaaggcctttgactactgagacc

SEQ ID NO: 171230 - DNA, 25 bp, Canis familiaris
tgtaagtgccttgacctactcagca

SEQ ID NO: 171231 - DNA, 25 bp, Canis familiaris
tgtacacggattgacactcctctgc

SEQ ID NO: 171232 - DNA, 25 bp, Canis familiaris
tgtacgcgtattacagcgcgcctct

SEQ ID NO: 171233 - DNA, 25 bp, Canis familiaris
tgtactccttgaacgtggtgctcga

SEQ ID NO: 171234 - DNA, 25 bp, Canis familiaris
tgtacaccattgaagccggtgcaaa

SEQ ID NO: 171235 - DNA, 25 bp, Canis familiaris
tgtacgacttacccactggcaagaa

SEQ ID NO: 171236 - DNA, 25 bp, Canis familiaris
tgtattacttacagattgcccagag

SEQ ID NO: 171237 - DNA, 25 bp, Canis familiaris
tgtttttgtatctgacccattgggg

SEQ ID NO: 171238 - DNA, 25 bp, Canis familiaris
tgttcctaaatcttaggacttgggg

SEQ ID NO: 171239 - DNA, 25 bp, Canis familiaris
tgttcctaaagctttctagacccgg

SEQ ID NO: 171240 - DNA, 25 bp, Canis familiaris
tgttcccaaatcccttagcaaaagg

SEQ ID NO: 171241 - DNA, 25 bp, Canis familiaris
tgtctcctccaaagcatttgcatca

SEQ ID NO: 171242 - DNA, 25 bp, Canis familiaris
tgtcaagtctcagctgatttgcaga

SEQ ID NO: 171243 - DNA, 25 bp, Canis familiaris
tgtacagtatcatctcagttggagt

SEQ ID NO: 171244 - DNA, 25 bp, Canis familiaris
tgtataactcatttgcagtctgaaa

SEQ ID NO: 171245 - DNA, 25 bp, Canis familiaris
tgtctcagcttctttacctgaaaaa

SEQ ID NO: 171246 - DNA, 25 bp, Canis familiaris
tgtctgcgtcttatcaccacaaaga

SEQ ID NO: 171247 - DNA, 25 bp, Canis familiaris
tgtctgcttcttgtaaaaacccgaa

SEQ ID NO: 171248 - DNA, 25 bp, Canis familiaris
tgtctgcttcgtgtaaaacccgacc

SEQ ID NO: 171249 - DNA, 25 bp, Canis familiaris
tgtcttcacgctgggtacaacccag

SEQ ID NO: 171250 - DNA, 25 bp, Canis familiaris
tgtcttgcttcttgtgaaaacccgt

SEQ ID NO: 171251 - DNA, 25 bp, Canis familiaris
tgtcttgcttcttgtaaaagcccga

SEQ ID NO: 171252 - DNA, 25 bp, Canis familiaris
tgtcgagtcccgacatgaacagccc

SEQ ID NO: 171253 - DNA, 25 bp, Canis familiaris
tgtcagcagtcatcaaaggccctac

SEQ ID NO: 171254 - DNA, 25 bp, Canis familiaris
tgtcagagtatacatcggctccttc

SEQ ID NO: 171255 - DNA, 25 bp, Canis familiaris
tgtcatggttgattacgtcccttca

SEQ ID NO: 171256 - DNA, 25 bp, Canis familiaris
tgtctgggaggtggcactccgttgc

SEQ ID NO: 171257 - DNA, 25 bp, Canis familiaris
tgtctgtatatgctaactccgttgc

SEQ ID NO: 171258 - DNA, 25 bp, Canis familiaris
tgtctgttgaaatcactgccgtgct

SEQ ID NO: 171259 - DNA, 25 bp, Canis familiaris
tgttttgaagatgcacagctggttg

SEQ ID NO: 171260 - DNA, 25 bp, Canis familiaris
tgtcttcatgaacggcttgtggctg

SEQ ID NO: 171261 - DNA, 25 bp, Canis familiaris
tgtcttgctagaccaggtttgctgt

SEQ ID NO: 171262 - DNA, 25 bp, Canis familiaris
tgtctttggcaccacactgatcatg

SEQ ID NO: 171263 - DNA, 25 bp, Canis familiaris
tgtctgttgtgcggatcagcgtcac

SEQ ID NO: 171264 - DNA, 25 bp, Canis familiaris
tgtctgggtgaggatcaggctccct

SEQ ID NO: 171265 - DNA, 25 bp, Canis familiaris
tgtctgcagctcgtggtactgcacc

SEQ ID NO: 171266 - DNA, 25 bp, Canis familiaris
tgtagagcttctcgtgactgatcct

SEQ ID NO: 171267 - DNA, 25 bp, Canis familiaris
tgtcaagcattcctggccatgagac

SEQ ID NO: 171268 - DNA, 25 bp, Canis familiaris
tgtcacactgctcattgcctgagat

SEQ ID NO: 171269 - DNA, 25 bp, Canis familiaris
tgtagcatctccattgtcgagctgg

SEQ ID NO: 171270 - DNA, 25 bp, Canis familiaris
tgtcagatctacctgtgtggcacca

SEQ ID NO: 171271 - DNA, 25 bp, Canis familiaris
tgtagacttcgtcatccagacactc

SEQ ID NO: 171272 - DNA, 25 bp, Canis familiaris
tgtatgacttaacatccaagccccc

SEQ ID NO: 171273 - DNA, 25 bp, Canis familiaris
tgtagggaagtgtattcccccctgc

SEQ ID NO: 171274 - DNA, 25 bp, Canis familiaris
tgtagggggtggaacagcctccctg

SEQ ID NO: 171275 - DNA, 25 bp, Canis familiaris
tgtagtggaggggggagcggctcac

SEQ ID NO: 171276 - DNA, 25 bp, Canis familiaris
tgtcagcgctgagtaggagggaggc

SEQ ID NO: 171277 - DNA, 25 bp, Canis familiaris
tgtcatggtgtggtggcctgtaggc

SEQ ID NO: 171278 - DNA, 25 bp, Canis familiaris
tgtcttgtagtgctcacttcggggt

SEQ ID NO: 171279 - DNA, 25 bp, Canis familiaris
tgtctgtcaggtgtgtcttcctggg

SEQ ID NO: 171280 - DNA, 25 bp, Canis familiaris
tgtctcgtggtgctttgtactggaa

SEQ ID NO: 171281 - DNA, 25 bp, Canis familiaris
tgttctggggctctagttctcccag

SEQ ID NO: 171282 - DNA, 25 bp, Canis familiaris
tgtctctacctgacttagttttcct

SEQ ID NO: 171283 - DNA, 25 bp, Canis familiaris
tgtctcccatggacttgttttctgg

SEQ ID NO: 171284 - DNA, 25 bp, Canis familiaris
tgtctcctcatcgttagtagactgt

SEQ ID NO: 171285 - DNA, 25 bp, Canis familiaris
tgatcacctgcattccggataggca

SEQ ID NO: 171286 - DNA, 25 bp, Canis familiaris
tgtacaatgatgaccgccaagtgaa

SEQ ID NO: 171287 - DNA, 25 bp, Canis familiaris
tgttgcaaagtcgcctcatgtgaag

SEQ ID NO: 171288 - DNA, 25 bp, Canis familiaris
tgtctcctagaggccccaggaggaa

SEQ ID NO: 171289 - DNA, 25 bp, Canis familiaris
tgtctccatgtagccctaagggcct

SEQ ID NO: 171290 - DNA, 25 bp, Canis familiaris
tgtcttctattgtaactcatgtgga

SEQ ID NO: 171291 - DNA, 25 bp, Canis familiaris
tgtctgcttttaaatgtcattgatc

SEQ ID NO: 171292 - DNA, 25 bp, Canis familiaris
tgtctgtttttcataattgctcttt

SEQ ID NO: 171293 - DNA, 25 bp, Canis familiaris
tgtctgtgtttctgcatattctcca

SEQ ID NO: 171294 - DNA, 25 bp, Canis familiaris
tgtctgttttgttaattgctcccca

SEQ ID NO: 171295 - DNA, 25 bp, Canis familiaris
tgtctgtttgaggttctctctttcc

SEQ ID NO: 171296 - DNA, 25 bp, Canis familiaris
tgtagttcatgggcattcctttctc

SEQ ID NO: 171297 - DNA, 25 bp, Canis familiaris
tgtcactactggtctgtactctatg

SEQ ID NO: 171298 - DNA, 25 bp, Canis familiaris
tgtagaatctggtttaccggccctt

SEQ ID NO: 171299 - DNA, 25 bp, Canis familiaris
tgagaagactggttttactcccccg

SEQ ID NO: 171300 - DNA, 25 bp, Canis familiaris
tgtcaaacggagatctccttgcccc

SEQ ID NO: 171301 - DNA, 25 bp, Canis familiaris
tgtctgaaaggtaattgtttgcctg

SEQ ID NO: 171302 - DNA, 25 bp, Canis familiaris
tgtctgatacagtttttgccttact

SEQ ID NO: 171303 - DNA, 25 bp, Canis familiaris
tgtcattacacagttcatcacctcc

SEQ ID NO: 171304 - DNA, 25 bp, Canis familiaris
tgatccgaaatcatagccactcacc

SEQ ID NO: 171305 - DNA, 25 bp, Canis familiaris
tgtcactgaattatggatcctccca

SEQ ID NO: 171306 - DNA, 25 bp, Canis familiaris
tgtcactgacctactggttgtccat

SEQ ID NO: 171307 - DNA, 25 bp, Canis familiaris
tgtcactaagtgaagtttgtgcctt

SEQ ID NO: 171308 - DNA, 25 bp, Canis familiaris
tgtactaggttcataccccttttgt

SEQ ID NO: 171309 - DNA, 25 bp, Canis familiaris
tgttaatggggacttcccctttgtg

SEQ ID NO: 171310 - DNA, 25 bp, Canis familiaris
tgttaagtcagaatctttacctttt

SEQ ID NO: 171311 - DNA, 25 bp, Canis familiaris
tgagccaagattcacgttaccaatt

SEQ ID NO: 171312 - DNA, 25 bp, Canis familiaris
tgaccaagcttcccgattaactgaa

SEQ ID NO: 171313 - DNA, 25 bp, Canis familiaris
tgccctagcttccctagtatagtct

SEQ ID NO: 171314 - DNA, 25 bp, Canis familiaris
tgatcccagggtcctaggatgagtt

SEQ ID NO: 171315 - DNA, 25 bp, Canis familiaris
tgttagggcgtgttaggctgtttgt

SEQ ID NO: 171316 - DNA, 25 bp, Canis familiaris
tgttcaagggttccggcatttctga

SEQ ID NO: 171317 - DNA, 25 bp, Canis familiaris
tgttgaaaggtaagcggtactccca

SEQ ID NO: 171318 - DNA, 25 bp, Canis familiaris
tgttaacactggaaaggtactccca

SEQ ID NO: 171319 - DNA, 25 bp, Canis familiaris
tgtttaactttctgaggagccgcca

SEQ ID NO: 171320 - DNA, 25 bp, Canis familiaris
tgatttagagctctccagtgggccg

SEQ ID NO: 171321 - DNA, 25 bp, Canis familiaris
tgtttggtgattcccagtgggactt

SEQ ID NO: 171322 - DNA, 25 bp, Canis familiaris
tgttctttgttcccctggaagttca

SEQ ID NO: 171323 - DNA, 25 bp, Canis familiaris
tgtcttttgtctctacccatagtaa

SEQ ID NO: 171324 - DNA, 25 bp, Canis familiaris
tgtattttgtccggcgccaataaaa

SEQ ID NO: 171325 - DNA, 25 bp, Canis familiaris
tgtttaatgaaggcccccaaatata

SEQ ID NO: 171326 - DNA, 25 bp, Canis familiaris
tgtcatctcaagggcattccccaaa

SEQ ID NO: 171327 - DNA, 25 bp, Canis familiaris
tgtcatacacactgcatttcttagg

SEQ ID NO: 171328 - DNA, 25 bp, Canis familiaris
tgtctgaactctagcattttcccaa

SEQ ID NO: 171329 - DNA, 25 bp, Canis familiaris
tgtcttgcactgttgtgatttccag

SEQ ID NO: 171330 - DNA, 25 bp, Canis familiaris
tgtcttcaagatacaaggcccagca

SEQ ID NO: 171331 - DNA, 25 bp, Canis familiaris
tgtcttaaacacctggctccaattc

SEQ ID NO: 171332 - DNA, 25 bp, Canis familiaris
tgtttacaacagcttgtccctgtcg

SEQ ID NO: 171333 - DNA, 25 bp, Canis familiaris
tgtcattcagtgaacttctgtcccc

SEQ ID NO: 171334 - DNA, 25 bp, Canis familiaris
tgtactcagtgttgtattttgccgt

SEQ ID NO: 171335 - DNA, 25 bp, Canis familiaris
tgtctgctattctgttcatgttgtc

SEQ ID NO: 171336 - DNA, 25 bp, Canis familiaris
tgttggcccaaaaatttgcccacca

SEQ ID NO: 171337 - DNA, 25 bp, Canis familiaris
tgtttggccgagaggtgagcccagc

SEQ ID NO: 171338 - DNA, 25 bp, Canis familiaris
tgtttggccgagaggtgagcccagc

SEQ ID NO: 171339 - DNA, 25 bp, Canis familiaris
tgtttagctgtgacaaggggcgccc

SEQ ID NO: 171340 - DNA, 25 bp, Canis familiaris
tgtttatctgttaagcgggtaccca

SEQ ID NO: 171341 - DNA, 25 bp, Canis familiaris
tgttttttttaatgtgctaccaata

SEQ ID NO: 171342 - DNA, 25 bp, Canis familiaris
tgtctttttttgtatagttaacaca

SEQ ID NO: 171343 - DNA, 25 bp, Canis familiaris
tgttaattgtttggaactaaaccat

SEQ ID NO: 171344 - DNA, 25 bp, Canis familiaris
tgttggtttttacttaaatacgcat

SEQ ID NO: 171345 - DNA, 25 bp, Canis familiaris
tgtaggtttttaatacggagcccat

SEQ ID NO: 171346 - DNA, 25 bp, Canis familiaris
tgtaagttgactttctgacgggccc

SEQ ID NO: 171347 - DNA, 25 bp, Canis familiaris
tgttagtgggctttttctgggggct

SEQ ID NO: 171348 - DNA, 25 bp, Canis familiaris
tgttatttggtagttctctgtacgt

SEQ ID NO: 171349 - DNA, 25 bp, Canis familiaris
tgttaagtcaatttcctttactaca

SEQ ID NO: 171350 - DNA, 25 bp, Canis familiaris
tgttacaaaaataacgcaaacttca

SEQ ID NO: 171351 - DNA, 25 bp, Canis familiaris
tgttacaaacccactgaggccttca

SEQ ID NO: 171352 - DNA, 25 bp, Canis familiaris
tgtagaaaaccctttgcgtggtcct

SEQ ID NO: 171353 - DNA, 25 bp, Canis familiaris
tgtagaacgtcaccttgttctagta

SEQ ID NO: 171354 - DNA, 25 bp, Canis familiaris
tgtcagatctcactcaggttttaag

SEQ ID NO: 171355 - DNA, 25 bp, Canis familiaris
tgtctcacacctgtgctctttaaac

SEQ ID NO: 171356 - DNA, 25 bp, Canis familiaris
tgtcatccacctggtcactattaca

SEQ ID NO: 171357 - DNA, 25 bp, Canis familiaris
tgtatcagacacccatgacttttcc

SEQ ID NO: 171358 - DNA, 25 bp, Canis familiaris
tgtaaacacctccagttttgctctt

SEQ ID NO: 171359 - DNA, 25 bp, Canis familiaris
tgttaaccttctgttacttctgggg

SEQ ID NO: 171360 - DNA, 25 bp, Canis familiaris
tgttacgccgttattacttttccag

SEQ ID NO: 171361 - DNA, 25 bp, Canis familiaris
tgtcttctacgtatttccatttctc

SEQ ID NO: 171362 - DNA, 25 bp, Canis familiaris
tgtcatttttcttttccagtttctc

SEQ ID NO: 171363 - DNA, 25 bp, Canis familiaris
tgtattttttccttagcaacctctc

SEQ ID NO: 171364 - DNA, 25 bp, Canis familiaris
tgtattttttactgtgacttgttca

SEQ ID NO: 171365 - DNA, 25 bp, Canis familiaris
tgtcttttcttggtctgtttggtcc

SEQ ID NO: 171366 - DNA, 25 bp, Canis familiaris
tgtcttgtttgtctgtttcggttta

SEQ ID NO: 171367 - DNA, 25 bp, Canis familiaris
tgtcttgtttttaattaggctcttt

SEQ ID NO: 171368 - DNA, 25 bp, Canis familiaris
tgtcttctatttcactgtatttttt

SEQ ID NO: 171369 - DNA, 25 bp, Canis familiaris
tgtcttctattactcacatatgtga

SEQ ID NO: 171370 - DNA, 25 bp, Canis familiaris
tgtcttcagcattcatctacttcta

SEQ ID NO: 171371 - DNA, 25 bp, Canis familiaris
tgtctctgccattgcacatctatgt

SEQ ID NO: 171372 - DNA, 25 bp, Canis familiaris
tgtctctggctgaccttctatataa

SEQ ID NO: 171373 - DNA, 25 bp, Canis familiaris
tgtcatctatgttctgttcacaatc

SEQ ID NO: 171374 - DNA, 25 bp, Canis familiaris
tgtcttttagttacacacacacaca

SEQ ID NO: 171375 - DNA, 25 bp, Canis familiaris
tgtctctctgtacatatccaaacga

SEQ ID NO: 171376 - DNA, 25 bp, Canis familiaris
tgtcttcgagagatatcccctgtga

SEQ ID NO: 171377 - DNA, 25 bp, Canis familiaris
tgtttagtaatttacacttggacag

SEQ ID NO: 171378 - DNA, 25 bp, Canis familiaris
tgattttgccaaataactaggaccc

SEQ ID NO: 171379 - DNA, 25 bp, Canis familiaris
tgttttcctgagggactgggactcc

SEQ ID NO: 171380 - DNA, 25 bp, Canis familiaris
tgtacctactcagagactggggccc

SEQ ID NO: 171381 - DNA, 25 bp, Canis familiaris
tgtatccctccaggaaaggggacca

SEQ ID NO: 171382 - DNA, 25 bp, Canis familiaris
tgtctcccatcgggagccggatgga

SEQ ID NO: 171383 - DNA, 25 bp, Canis familiaris
tgtcatgcccttgtagcttggtggg

SEQ ID NO: 171384 - DNA, 25 bp, Canis familiaris
tgtcttcctatattggctattctgg

SEQ ID NO: 171385 - DNA, 25 bp, Canis familiaris
tgtctctccatggcagtgtgttgtc

SEQ ID NO: 171386 - DNA, 25 bp, Canis familiaris
tgtcatcactatccattgtctttct

SEQ ID NO: 171387 - DNA, 25 bp, Canis familiaris
tgtatactgcatcctatagctttag

SEQ ID NO: 171388 - DNA, 25 bp, Canis familiaris
tgtcatcctgcatccaatgtttgta

SEQ ID NO: 171389 - DNA, 25 bp, Canis familiaris
tgtcttctcacagctctttagtatg

SEQ ID NO: 171390 - DNA, 25 bp, Canis familiaris
tgtcttctctgctttttgggtatat

SEQ ID NO: 171391 - DNA, 25 bp, Canis familiaris
tgaatccttttgtttagttaatgta

SEQ ID NO: 171392 - DNA, 25 bp, Canis familiaris
tgttcctttttgacaagggaagtga

SEQ ID NO: 171393 - DNA, 25 bp, Canis familiaris
tgtactttttattgcatggtgtgaa

SEQ ID NO: 171394 - DNA, 25 bp, Canis familiaris
tgtcactgatatacttaagccttgt

SEQ ID NO: 171395 - DNA, 25 bp, Canis familiaris
tgtctagaatgcatcttccctgctt

SEQ ID NO: 171396 - DNA, 25 bp, Canis familiaris
tgtcttatctcgagtgccacagtta

SEQ ID NO: 171397 - DNA, 25 bp, Canis familiaris
tgtctagtcttgaagccctcattta

SEQ ID NO: 171398 - DNA, 25 bp, Canis familiaris
tgtctagatcttttggcttctccaa

SEQ ID NO: 171399 - DNA, 25 bp, Canis familiaris
tgtctcagactttcggttgtttacc

SEQ ID NO: 171400 - DNA, 25 bp, Canis familiaris
tgtctttgttgtccgatttttcacc

SEQ ID NO: 171401 - DNA, 25 bp, Canis familiaris
tgtcttttttgctgtttctctgaaa

SEQ ID NO: 171402 - DNA, 25 bp, Canis familiaris
tgtctagtttttatttcattctcaa

SEQ ID NO: 171403 - DNA, 25 bp, Canis familiaris
tgtctttgtcttcttctgttttaga

SEQ ID NO: 171404 - DNA, 25 bp, Canis familiaris
tcctacattttaattcggtcttcgg

SEQ ID NO: 171405 - DNA, 25 bp, Canis familiaris
tgtctacttcttatgttgtgtccct

SEQ ID NO: 171406 - DNA, 25 bp, Canis familiaris
tgtcaagccgttattcattaccatc

SEQ ID NO: 171407 - DNA, 25 bp, Canis familiaris
tgtcaagctcatttcctggtatgac

SEQ ID NO: 171408 - DNA, 25 bp, Canis familiaris
tgtcaagctcatttcctggtatgac

SEQ ID NO: 171409 - DNA, 25 bp, Canis familiaris
tgtcaagctcatttcctggtatgac

SEQ ID NO: 171410 - DNA, 25 bp, Canis familiaris
tgtcacctgcacattctggaatacc

SEQ ID NO: 171411 - DNA, 25 bp, Canis familiaris
tgtagaatgcagcctccggcaaacc

SEQ ID NO: 171412 - DNA, 25 bp, Canis familiaris
tgtaagagccgctagccagcaaacc

SEQ ID NO: 171413 - DNA, 25 bp, Canis familiaris
tgtcaagaccgctgtctgcgatatc

SEQ ID NO: 171414 - DNA, 25 bp, Canis familiaris
tgtcaggacctggtgtctgtgcaca

SEQ ID NO: 171415 - DNA, 25 bp, Canis familiaris
tgtagcgacaagctgtctgccacag

SEQ ID NO: 171416 - DNA, 25 bp, Canis familiaris
tgtaagaaataccttgccacacctg

SEQ ID NO: 171417 - DNA, 25 bp, Canis familiaris
tgatcaaaaacagttttcccgcttc

SEQ ID NO: 171418 - DNA, 25 bp, Canis familiaris
tgtaatatgtccttctttaccctac

SEQ ID NO: 171419 - DNA, 25 bp, Canis familiaris
tgtagaagcttcttgcttctgcccc

SEQ ID NO: 171420 - DNA, 25 bp, Canis familiaris
tgtcagattcttgtctctcatgctg

SEQ ID NO: 171421 - DNA, 25 bp, Canis familiaris
tgtacagtatctgtgctgtgacatg

SEQ ID NO: 171422 - DNA, 25 bp, Canis familiaris
tgtaaattctccctgttgcatgttt

SEQ ID NO: 171423 - DNA, 25 bp, Canis familiaris
tgtcttctttccctgattattttgc

SEQ ID NO: 171424 - DNA, 25 bp, Canis familiaris
tgtctttgttccaaaattcacctcc

SEQ ID NO: 171425 - DNA, 25 bp, Canis familiaris
tgtcttgctttccatgacatttccc

SEQ ID NO: 171426 - DNA, 25 bp, Canis familiaris
tgtaatatttgccacaactcctcca

SEQ ID NO: 171427 - DNA, 25 bp, Canis familiaris
tgtcagttttctcatactgcgcgtc

SEQ ID NO: 171428 - DNA, 25 bp, Canis familiaris
tgtctttctcatttacagctcgggc

SEQ ID NO: 171429 - DNA, 25 bp, Canis familiaris
tgtctttttatgggcatgccagagg

SEQ ID NO: 171430 - DNA, 25 bp, Canis familiaris
tgtctttctccatgtaccagagctt

SEQ ID NO: 171431 - DNA, 25 bp, Canis familiaris
tgtagtctctcctttgactacctct

SEQ ID NO: 171432 - DNA, 25 bp, Canis familiaris
tgtaatcattcctttcacaactgct

SEQ ID NO: 171433 - DNA, 25 bp, Canis familiaris
tgtagtttcccttcaaagcacttca

SEQ ID NO: 171434 - DNA, 25 bp, Canis familiaris
tgtaggtttccttaaatgctgtttt

SEQ ID NO: 171435 - DNA, 25 bp, Canis familiaris
tgtatgtggttccttgaagctcctc

SEQ ID NO: 171436 - DNA, 25 bp, Canis familiaris
tgtagtagtgtccctgtgaatcctc

SEQ ID NO: 171437 - DNA, 25 bp, Canis familiaris
tgtcttaatggcccttaacactcca

SEQ ID NO: 171438 - DNA, 25 bp, Canis familiaris
tgttcaaggagctctttgaccccat

SEQ ID NO: 171439 - DNA, 25 bp, Canis familiaris
tgtttcaggcccttttactgcaaac

SEQ ID NO: 171440 - DNA, 25 bp, Canis familiaris
tgtcttttcctcttctgtttgaaag

SEQ ID NO: 171441 - DNA, 25 bp, Canis familiaris
tgtttttccccctgataatcacagt

SEQ ID NO: 171442 - DNA, 25 bp, Canis familiaris
tgttcttcaccagcaacgaaactca

SEQ ID NO: 171443 - DNA, 25 bp, Canis familiaris
tgtctttcacattaaaagaaacacc

SEQ ID NO: 171444 - DNA, 25 bp, Canis familiaris
tgtcatattctctgttaaaaaccaa

SEQ ID NO: 171445 - DNA, 25 bp, Canis familiaris
tgtactttcactttaaaaactccag

SEQ ID NO: 171446 - DNA, 25 bp, Canis familiaris
tgtacttccttttccattaactaat

SEQ ID NO: 171447 - DNA, 25 bp, Canis familiaris
tgattattcccaattccttaagttt

SEQ ID NO: 171448 - DNA, 25 bp, Canis familiaris
tgtaattccctgatcgtttacttaa

SEQ ID NO: 171449 - DNA, 25 bp, Canis familiaris
tgttaataccagctttttcccataa

SEQ ID NO: 171450 - DNA, 25 bp, Canis familiaris
tgtataaaactgctgtttaccaaac

SEQ ID NO: 171451 - DNA, 25 bp, Canis familiaris
tgtatcaaaggtttatttactagga

SEQ ID NO: 171452 - DNA, 25 bp, Canis familiaris
tgtaaaagtgtttctcttaattgag

SEQ ID NO: 171453 - DNA, 25 bp, Canis familiaris
tgataaaaattatttctttactgtt

SEQ ID NO: 171454 - DNA, 25 bp, Canis familiaris
tgataaaaacttacttgtacttgtt

SEQ ID NO: 171455 - DNA, 25 bp, Canis familiaris
tgtaaaagctctctcttgtcactgt

SEQ ID NO: 171456 - DNA, 25 bp, Canis familiaris
tgtaaacagctgacctttgcttctg

SEQ ID NO: 171457 - DNA, 25 bp, Canis familiaris
tgtacatgaagtaccctttcctgcc

SEQ ID NO: 171458 - DNA, 25 bp, Canis familiaris
tgtaagacagctatactctcccatt

SEQ ID NO: 171459 - DNA, 25 bp, Canis familiaris
tgtagtccagtaaaatctccctctt

SEQ ID NO: 171460 - DNA, 25 bp, Canis familiaris
tgtcaatctcttacaaacttccctt

SEQ ID NO: 171461 - DNA, 25 bp, Canis familiaris
tgtaatttgtcacactgcttcctat

SEQ ID NO: 171462 - DNA, 25 bp, Canis familiaris
tgtaagttacaaacatccccactct

SEQ ID NO: 171463 - DNA, 25 bp, Canis familiaris
tgtaaatgtagatttccctccatcc

SEQ ID NO: 171464 - DNA, 25 bp, Canis familiaris
tgtcaaatcttgtatttctccttta

SEQ ID NO: 171465 - DNA, 25 bp, Canis familiaris
tgtaatgagaatgatttctcacttg

SEQ ID NO: 171466 - DNA, 25 bp, Canis familiaris
tgtagtggtatcatttgcgctcttc

SEQ ID NO: 171467 - DNA, 25 bp, Canis familiaris
tgtaggagaatatggtgtcctctcg

SEQ ID NO: 171468 - DNA, 25 bp, Canis familiaris
tgtaggagagattggtgtccctctt

SEQ ID NO: 171469 - DNA, 25 bp, Canis familiaris
tgtcagggagtgagctcaccgtctt

SEQ ID NO: 171470 - DNA, 25 bp, Canis familiaris
tgtaggcggttaccccagttatgtc

SEQ ID NO: 171471 - DNA, 25 bp, Canis familiaris
tgtagagcaccataaccatagatta

SEQ ID NO: 171472 - DNA, 25 bp, Canis familiaris
tgtagaaccagatcactatgttgta

SEQ ID NO: 171473 - DNA, 25 bp, Canis familiaris
tgtaaatgccaagaaagatgctgtg

SEQ ID NO: 171474 - DNA, 25 bp, Canis familiaris
tgtaaatctccgcgacagagatgga

SEQ ID NO: 171475 - DNA, 25 bp, Canis familiaris
tgtatattctccgcaacagaggatg

SEQ ID NO: 171476 - DNA, 25 bp, Canis familiaris
tgtcatcattctgaaccacaataaa

SEQ ID NO: 171477 - DNA, 25 bp, Canis familiaris
tgtatcattcccttccaaataaagt

SEQ ID NO: 171478 - DNA, 25 bp, Canis familiaris
tgtatcattccttcaaataaagtaa

SEQ ID NO: 171479 - DNA, 25 bp, Canis familiaris
tgtatctaactattgctaaaactgc

SEQ ID NO: 171480 - DNA, 25 bp, Canis familiaris
tgtcatcttcatctttaaggactgt

SEQ ID NO: 171481 - DNA, 25 bp, Canis familiaris
tgtatcgatctctttttgggcagct

SEQ ID NO: 171482 - DNA, 25 bp, Canis familiaris
tgtcatagaatctctcttgggcctg

SEQ ID NO: 171483 - DNA, 25 bp, Canis familiaris
tgtattaatcacgcgatgttgactg

SEQ ID NO: 171484 - DNA, 25 bp, Canis familiaris
tgtttgactacagtgagtactggga

SEQ ID NO: 171485 - DNA, 25 bp, Canis familiaris
tgtttgactacagtgagtactggga

SEQ ID NO: 171486 - DNA, 25 bp, Canis familiaris
tgtcatctgcctgcagggtcagggc

SEQ ID NO: 171487 - DNA, 25 bp, Canis familiaris
tgctcatcgtatcagaagtagtggt

SEQ ID NO: 171488 - DNA, 25 bp, Canis familiaris
tgctttgtcctaagttatggaaata

SEQ ID NO: 171489 - DNA, 25 bp, Canis familiaris
tgtattctactcttttatgtaaaaa

SEQ ID NO: 171490 - DNA, 25 bp, Canis familiaris
tgtagttgcacatggttcagtaaaa

SEQ ID NO: 171491 - DNA, 25 bp, Canis familiaris
tgtatcttgccatggttgtctaata

SEQ ID NO: 171492 - DNA, 25 bp, Canis familiaris
tgtacttctgcacacttgccgaaga

SEQ ID NO: 171493 - DNA, 25 bp, Canis familiaris
tgtactgtcagccaaaatgccaaaa

SEQ ID NO: 171494 - DNA, 25 bp, Canis familiaris
tgtagttcaccttcaatgtcaattt

SEQ ID NO: 171495 - DNA, 25 bp, Canis familiaris
tgtatgtaaacttcaacccattaaa

SEQ ID NO: 171496 - DNA, 25 bp, Canis familiaris
tgataaaagacttctacccacctga

SEQ ID NO: 171497 - DNA, 25 bp, Canis familiaris
tgtaaatgagacttcacatcccacc

SEQ ID NO: 171498 - DNA, 25 bp, Canis familiaris
tgtaagtagaattcaatcacctgga

SEQ ID NO: 171499 - DNA, 25 bp, Canis familiaris
tgtagattggcagtcacccacacat

SEQ ID NO: 171500 - DNA, 25 bp, Canis familiaris
tgtactgctgggaccttgcacaatc

SEQ ID NO: 171501 - DNA, 25 bp, Canis familiaris
tgtatttcacggacttccaacttta

SEQ ID NO: 171502 - DNA, 25 bp, Canis familiaris
tgtatttccccagttaaacttagat

SEQ ID NO: 171503 - DNA, 25 bp, Canis familiaris
tgttcttcctccaggtctgattata

SEQ ID NO: 171504 - DNA, 25 bp, Canis familiaris
tgttcccccgtgtgtcattaataaa

SEQ ID NO: 171505 - DNA, 25 bp, Canis familiaris
tgtttccgagggtacagtgctaaaa

SEQ ID NO: 171506 - DNA, 25 bp, Canis familiaris
tgctttccagaataaaggttgtgta

SEQ ID NO: 171507 - DNA, 25 bp, Canis familiaris
tgttgtccctaaagtaggttaatag

SEQ ID NO: 171508 - DNA, 25 bp, Canis familiaris
tgtttccccccttgtgagattagaa

SEQ ID NO: 171509 - DNA, 25 bp, Canis familiaris
tgtttctactttatggcaattatga

SEQ ID NO: 171510 - DNA, 25 bp, Canis familiaris
tgttgttaactcgctgggcattcca

SEQ ID NO: 171511 - DNA, 25 bp, Canis familiaris
tgtttctgtacggtatcgtcctcac

SEQ ID NO: 171512 - DNA, 25 bp, Canis familiaris
tgattccttactgtacccaacatct

SEQ ID NO: 171513 - DNA, 25 bp, Canis familiaris
tgtttcctgactttatccaagagca

SEQ ID NO: 171514 - DNA, 25 bp, Canis familiaris
tgtttcctgaaggtactctggctgc

SEQ ID NO: 171515 - DNA, 25 bp, Canis familiaris
tgtactcctagataatcctcgggct

SEQ ID NO: 171516 - DNA, 25 bp, Canis familiaris
tgtacccactgttaagttggtggct

SEQ ID NO: 171517 - DNA, 25 bp, Canis familiaris
tgtaccgcaggttataacgtttctt

SEQ ID NO: 171518 - DNA, 25 bp, Canis familiaris
tgtagccctacttttacagtttgtt

SEQ ID NO: 171519 - DNA, 25 bp, Canis familiaris
tgtaactcttattttccttcttgta

SEQ ID NO: 171520 - DNA, 25 bp, Canis familiaris
tgtcagatattttatacttttttta

SEQ ID NO: 171521 - DNA, 25 bp, Canis familiaris
tgtcatgatttgcttttttgttttc

SEQ ID NO: 171522 - DNA, 25 bp, Canis familiaris
tgtaatttgttttattctgggccgc

SEQ ID NO: 171523 - DNA, 25 bp, Canis familiaris
tgtacaatcgtttcatcattcggcg

SEQ ID NO: 171524 - DNA, 25 bp, Canis familiaris
tgtacgtagctgttacatgtagggc

SEQ ID NO: 171525 - DNA, 25 bp, Canis familiaris
tgtaggtcctacccatgatagatgg

SEQ ID NO: 171526 - DNA, 25 bp, Canis familiaris
tgtagaccccaccaatttgtgcgag

SEQ ID NO: 171527 - DNA, 25 bp, Canis familiaris
tgtttccagcactgacattgtggga

SEQ ID NO: 171528 - DNA, 25 bp, Canis familiaris
tgttccatctgctggggcttaggac

SEQ ID NO: 171529 - DNA, 25 bp, Canis familiaris
ttagcctggcctggaccttaggaac

SEQ ID NO: 171530 - DNA, 25 bp, Canis familiaris
tgtagccgtcgcggttctttggaag

SEQ ID NO: 171531 - DNA, 25 bp, Canis familiaris
tgtaccgtcccgaattctcggatgc

SEQ ID NO: 171532 - DNA, 25 bp, Canis familiaris
tgtacctgtcccttatgagctgggg

SEQ ID NO: 171533 - DNA, 25 bp, Canis familiaris
tgtagccatgtccctgcatggacca

SEQ ID NO: 171534 - DNA, 25 bp, Canis familiaris
tgtatgccaggtactgctcagcact

SEQ ID NO: 171535 - DNA, 25 bp, Canis familiaris
tgttgagaggtagcacaatcttgaa

SEQ ID NO: 171536 - DNA, 25 bp, Canis familiaris
tgtaagagcggagccaccgtgcaga

SEQ ID NO: 171537 - DNA, 25 bp, Canis familiaris
tgtaaggtgaactccctgtcagtgt

SEQ ID NO: 171538 - DNA, 25 bp, Canis familiaris
tgtaggtgtaactgtcactggactg

SEQ ID NO: 171539 - DNA, 25 bp, Canis familiaris
tgttcttgtaactttcaggggctct

SEQ ID NO: 171540 - DNA, 25 bp, Canis familiaris
tgtttgtgtctgtttttcgggagct

SEQ ID NO: 171541 - DNA, 25 bp, Canis familiaris
tgtatcaggtcgtgtaccggtgcgt

SEQ ID NO: 171542 - DNA, 25 bp, Canis familiaris
tgtatagcgtcttgggcacctgaca

SEQ ID NO: 171543 - DNA, 25 bp, Canis familiaris
tgtactggtcacaggcagcctgcat

SEQ ID NO: 171544 - DNA, 25 bp, Canis familiaris
tgtttgggacaagtgccctatcccc

SEQ ID NO: 171545 - DNA, 25 bp, Canis familiaris
tgttctggttcaaccctggatcttc

SEQ ID NO: 171546 - DNA, 25 bp, Canis familiaris
tgtttgtgttcagcccagagtcagc

SEQ ID NO: 171547 - DNA, 25 bp, Canis familiaris
tgttattggcagggactcggtcaga

SEQ ID NO: 171548 - DNA, 25 bp, Canis familiaris
tgttgttgaagcccagccggatgaa

SEQ ID NO: 171549 - DNA, 25 bp, Canis familiaris
tgtttagcaagaacctgtggatgcc

SEQ ID NO: 171550 - DNA, 25 bp, Canis familiaris
tgttcctgtcaaagccatgctggca

SEQ ID NO: 171551 - DNA, 25 bp, Canis familiaris
tgcttctttaacacctacaactgga

SEQ ID NO: 171552 - DNA, 25 bp, Canis familiaris
tgtttattaactaccttgggggctg

SEQ ID NO: 171553 - DNA, 25 bp, Canis familiaris
tgttttcatacctccctggaagatt

SEQ ID NO: 171554 - DNA, 25 bp, Canis familiaris
tgtttcacatacctttccgaggagt

SEQ ID NO: 171555 - DNA, 25 bp, Canis familiaris
tgtttgcctaactctcaaactgttg

SEQ ID NO: 171556 - DNA, 25 bp, Canis familiaris
tgttctttaaaagtaataccataga

SEQ ID NO: 171557 - DNA, 25 bp, Canis familiaris
tgttttcattaatcaagaacgaaag

SEQ ID NO: 171558 - DNA, 25 bp, Canis familiaris
tgtttctttatttcggagcccaacg

SEQ ID NO: 171559 - DNA, 25 bp, Canis familiaris
tgtttcattagttaagttccaagac

SEQ ID NO: 171560 - DNA, 25 bp, Canis familiaris
tgtatcccgacgtaatttatgaaga

SEQ ID NO: 171561 - DNA, 25 bp, Canis familiaris
tgttcccgccctgtattgagataaa

SEQ ID NO: 171562 - DNA, 25 bp, Canis familiaris
tgttcccctcagcctgatggtaaag

SEQ ID NO: 171563 - DNA, 25 bp, Canis familiaris
tgtcacgcgttccggaactagaagg

SEQ ID NO: 171564 - DNA, 25 bp, Canis familiaris
tgtcactcgttcatgcataacttga

SEQ ID NO: 171565 - DNA, 25 bp, Canis familiaris
tgtttctgcttcaataaatctttgg

SEQ ID NO: 171566 - DNA, 25 bp, Canis familiaris
tgtatcctattccaaagtcttattt

SEQ ID NO: 171567 - DNA, 25 bp, Canis familiaris
tgtcacgtattgccaagagcttgaa

SEQ ID NO: 171568 - DNA, 25 bp, Canis familiaris
tgtcacggacaaccaagcctgagac

SEQ ID NO: 171569 - DNA, 25 bp, Canis familiaris
tgtcacgaacaaccacgtcaaccac

SEQ ID NO: 171570 - DNA, 25 bp, Canis familiaris
tgtacatgaaaagctctgccaaaca

SEQ ID NO: 171571 - DNA, 25 bp, Canis familiaris
tgtagacgaccgatgctgccagaaa

SEQ ID NO: 171572 - DNA, 25 bp, Canis familiaris
tgtagaggagtggttggcccgagca

SEQ ID NO: 171573 - DNA, 25 bp, Canis familiaris
tgtaagaccattgaggcctcggcac

SEQ ID NO: 171574 - DNA, 25 bp, Canis familiaris
tgtaaaccactccattgttcttcac

SEQ ID NO: 171575 - DNA, 25 bp, Canis familiaris
tgtacaacccacctgtgttctaacc

SEQ ID NO: 171576 - DNA, 25 bp, Canis familiaris
tgtaaaaccaactttgctctaccaa

SEQ ID NO: 171577 - DNA, 25 bp, Canis familiaris
tgtacaaacttgtctatagtgtcac

SEQ ID NO: 171578 - DNA, 25 bp, Canis familiaris
tgtaccaattctgtcatcactgtga

SEQ ID NO: 171579 - DNA, 25 bp, Canis familiaris
tgtaacactttgctctactgatcct

SEQ ID NO: 171580 - DNA, 25 bp, Canis familiaris
tgaacccaacagcttactacctgac

SEQ ID NO: 171581 - DNA, 25 bp, Canis familiaris
tgtacccaacatcttagtgacccat

SEQ ID NO: 171582 - DNA, 25 bp, Canis familiaris
tgtacagtaatcaggtcatgtgacc

SEQ ID NO: 171583 - DNA, 25 bp, Canis familiaris
tgtcacagttaccatggtctttccc

SEQ ID NO: 171584 - DNA, 25 bp, Canis familiaris
tgtacagttgactggttttcctccc

SEQ ID NO: 171585 - DNA, 25 bp, Canis familiaris
tgtacttgatacttggttttccatg

SEQ ID NO: 171586 - DNA, 25 bp, Canis familiaris
tgtacatttaggaagtttatcactg

SEQ ID NO: 171587 - DNA, 25 bp, Canis familiaris
tgtacatgttaggagcagctgtctt

SEQ ID NO: 171588 - DNA, 25 bp, Canis familiaris
tgtcaacttggaggcactgcctggc

SEQ ID NO: 171589 - DNA, 25 bp, Canis familiaris
tgtaggcacaggggacacagctact

SEQ ID NO: 171590 - DNA, 25 bp, Canis familiaris
tgtagcagcaaccggcggcagctgc

SEQ ID NO: 171591 - DNA, 25 bp, Canis familiaris
tgtaggcgagctaagcggctgcgga

SEQ ID NO: 171592 - DNA, 25 bp, Canis familiaris
tgtaccgcagcagcagcgagcggcg

SEQ ID NO: 171593 - DNA, 25 bp, Canis familiaris
tgtacagccaggtccagaagagcag

SEQ ID NO: 171594 - DNA, 25 bp, Canis familiaris
tgtacaggagcactccagcgatcca

SEQ ID NO: 171595 - DNA, 25 bp, Canis familiaris
tgtactgcgcagctctagaatctct

SEQ ID NO: 171596 - DNA, 25 bp, Canis familiaris
tgtacagcagcatgtccgactgcct

SEQ ID NO: 171597 - DNA, 25 bp, Canis familiaris
tgtacgagctggagcgacgcttcaa

SEQ ID NO: 171598 - DNA, 25 bp, Canis familiaris
tgtaacagtggaagcgcatccgcta

SEQ ID NO: 171599 - DNA, 25 bp, Canis familiaris
tgtacctggacaacagctccgttga

SEQ ID NO: 171600 - DNA, 25 bp, Canis familiaris
tgtagtgcttacactgccttgtcta

SEQ ID NO: 171601 - DNA, 25 bp, Canis familiaris
tgtacatgcatttcaatccgttttt

SEQ ID NO: 171602 - DNA, 25 bp, Canis familiaris
tgtactattcaaccctttgtttatt

SEQ ID NO: 171603 - DNA, 25 bp, Canis familiaris
tgtacacatttgactactttttttt

SEQ ID NO: 171604 - DNA, 25 bp, Canis familiaris
tgtaattgtctcttaccttttttct

SEQ ID NO: 171605 - DNA, 25 bp, Canis familiaris
tgtacgtgacacttttttgttgttt

SEQ ID NO: 171606 - DNA, 25 bp, Canis familiaris
ttacgtcccaatcttcaggtttaca

SEQ ID NO: 171607 - DNA, 25 bp, Canis familiaris
tgttccccacaatgttcggttacaa

SEQ ID NO: 171608 - DNA, 25 bp, Canis familiaris
tgttttccacaatgtttgtccccaa

SEQ ID NO: 171609 - DNA, 25 bp, Canis familiaris
tgttccttcacgtctaatttgcacc

SEQ ID NO: 171610 - DNA, 25 bp, Canis familiaris
tgttggcctcctttaaattgtactt

SEQ ID NO: 171611 - DNA, 25 bp, Canis familiaris
tgatccccctcatccaagagtgata

SEQ ID NO: 171612 - DNA, 25 bp, Canis familiaris
tgtttcctctgatctcaggctgtta

SEQ ID NO: 171613 - DNA, 25 bp, Canis familiaris
tgttttaatgagttcgttcttgccc

SEQ ID NO: 171614 - DNA, 25 bp, Canis familiaris
tgtatttcaaagtacctttccctgt

SEQ ID NO: 171615 - DNA, 25 bp, Canis familiaris
tgtaatttaaatttcttctcacctt

SEQ ID NO: 171616 - DNA, 25 bp, Canis familiaris
tgttatttatccatttttcccacgt

SEQ ID NO: 171617 - DNA, 25 bp, Canis familiaris
tgtcaagcttagactgtttttcccc

SEQ ID NO: 171618 - DNA, 25 bp, Canis familiaris
tgtcaagatttacagcttttccccc

SEQ ID NO: 171619 - DNA, 25 bp, Canis familiaris
tgtaaggttgtccagctttttccct

SEQ ID NO: 171620 - DNA, 25 bp, Canis familiaris
tgtaaggtggaacccttgtggccca

SEQ ID NO: 171621 - DNA, 25 bp, Canis familiaris
tgttaggtggggccttggctggaac

SEQ ID NO: 171622 - DNA, 25 bp, Canis familiaris
tgtatgctggggcaccttggtaggc

SEQ ID NO: 171623 - DNA, 25 bp, Canis familiaris
tgtattggggcatccattgctgctc

SEQ ID NO: 171624 - DNA, 25 bp, Canis familiaris
tgtacgtagccatccaggctgtgct

SEQ ID NO: 171625 - DNA, 25 bp, Canis familiaris
tgtaattactcatcgtggctgtcca

SEQ ID NO: 171626 - DNA, 25 bp, Canis familiaris
tgttaggactgcaactctggcttcc

SEQ ID NO: 171627 - DNA, 25 bp, Canis familiaris
tgtttgggatgaccatcctcttcct

SEQ ID NO: 171628 - DNA, 25 bp, Canis familiaris
tgtttcgaaagccacacctacacat

SEQ ID NO: 171629 - DNA, 25 bp, Canis familiaris
tgtttctgcatgtgcgcacacacga

SEQ ID NO: 171630 - DNA, 25 bp, Canis familiaris
tgtagtgtgcttccagagaactgat

SEQ ID NO: 171631 - DNA, 25 bp, Canis familiaris
tgtagtgtgcttcagaggtaacgac

SEQ ID NO: 171632 - DNA, 25 bp, Canis familiaris
tgttgggtctcacaggtcaactgcc

SEQ ID NO: 171633 - DNA, 25 bp, Canis familiaris
tgttgatttctataggtccacggga

SEQ ID NO: 171634 - DNA, 25 bp, Canis familiaris
tgagtggtttcaattgatccccggg

SEQ ID NO: 171635 - DNA, 25 bp, Canis familiaris
tgttggtgttaatttcccatcgcac

SEQ ID NO: 171636 - DNA, 25 bp, Canis familiaris
tgataggtgtttaataccacccgtt

SEQ ID NO: 171637 - DNA, 25 bp, Canis familiaris
tgatagtttagaaatatccccacgt

SEQ ID NO: 171638 - DNA, 25 bp, Canis familiaris
tgtagatgtaaataacctcctctgc

SEQ ID NO: 171639 - DNA, 25 bp, Canis familiaris
tgtaagaagcaacaacctctcctct

SEQ ID NO: 171640 - DNA, 25 bp, Canis familiaris
tctaaaagccataaaccccttcctg

SEQ ID NO: 171641 - DNA, 25 bp, Canis familiaris
tgtaaaagcatctagaactcccccc

SEQ ID NO: 171642 - DNA, 25 bp, Canis familiaris
tgtaaacaagcttgtgtctcctccc

SEQ ID NO: 171643 - DNA, 25 bp, Canis familiaris
tgtaaactgccttttgtgccatacc

SEQ ID NO: 171644 - DNA, 25 bp, Canis familiaris
tgtaaatctgcaatccctgttcaca

SEQ ID NO: 171645 - DNA, 25 bp, Canis familiaris
tgtaaactgccttgcacatgcttca

SEQ ID NO: 171646 - DNA, 25 bp, Canis familiaris
tgtacaactgttagctcatcttctt

SEQ ID NO: 171647 - DNA, 25 bp, Canis familiaris
tgtactattgtcactagctctatat

SEQ ID NO: 171648 - DNA, 25 bp, Canis familiaris
tgtactatttcaactggcttattat

SEQ ID NO: 171649 - DNA, 25 bp, Canis familiaris
tgtacgtacattgtggttatttttc

SEQ ID NO: 171650 - DNA, 25 bp, Canis familiaris
tgtaggaatttttggcctttgtatt

SEQ ID NO: 171651 - DNA, 25 bp, Canis familiaris
tgtagtttattgagccaatttattt

SEQ ID NO: 171652 - DNA, 25 bp, Canis familiaris
tgtaatgttttatccctcttagcat

SEQ ID NO: 171653 - DNA, 25 bp, Canis familiaris
tgttctgttttctagttccttgacg

SEQ ID NO: 171654 - DNA, 25 bp, Canis familiaris
tgttgcctactttatttctcggaga

SEQ ID NO: 171655 - DNA, 25 bp, Canis familiaris
tgtttcccttttttgctcagggatg

SEQ ID NO: 171656 - DNA, 25 bp, Canis familiaris
tgtttccttttttggtcagttagat

SEQ ID NO: 171657 - DNA, 25 bp, Canis familiaris
tgttccctttttggttgggtagatg

SEQ ID NO: 171658 - DNA, 25 bp, Canis familiaris
tgtttccctctcattcggggtagat

SEQ ID NO: 171659 - DNA, 25 bp, Canis familiaris
tgttcctcacctatgtgctgggagt

SEQ ID NO: 171660 - DNA, 25 bp, Canis familiaris
tgtacacacaaatcttgctctaagt

SEQ ID NO: 171661 - DNA, 25 bp, Canis familiaris
tgtttaaagatcattctgctgaaga

SEQ ID NO: 171662 - DNA, 25 bp, Canis familiaris
tgttccaggtacagtgtgcataaga

SEQ ID NO: 171663 - DNA, 25 bp, Canis familiaris
tgttccagggccacatatttgcagt

SEQ ID NO: 171664 - DNA, 25 bp, Canis familiaris
tgttctctgagggctgtctttgaca

SEQ ID NO: 171665 - DNA, 25 bp, Canis familiaris
tgtattcgagcacctgtttcttgac

SEQ ID NO: 171666 - DNA, 25 bp, Canis familiaris
tgtagacatacgctcgttcttcagc

SEQ ID NO: 171667 - DNA, 25 bp, Canis familiaris
tgctaactacccagacactattgcc

SEQ ID NO: 171668 - DNA, 25 bp, Canis familiaris
tctaacccacttgaatatactttta

SEQ ID NO: 171669 - DNA, 25 bp, Canis familiaris
ttaacccattagaaggggctctact

SEQ ID NO: 171670 - DNA, 25 bp, Canis familiaris
tgtaccccttagtaagtgcctctag

SEQ ID NO: 171671 - DNA, 25 bp, Canis familiaris
tgtagcacccagcagatcaactttt

SEQ ID NO: 171672 - DNA, 25 bp, Canis familiaris
tgtaaccaggcactgcatcctgtcc

SEQ ID NO: 171673 - DNA, 25 bp, Canis familiaris
tgtagaccaaagccactttcactca

SEQ ID NO: 171674 - DNA, 25 bp, Canis familiaris
tgtacatcctgatccagctttgacc

SEQ ID NO: 171675 - DNA, 25 bp, Canis familiaris
tgttctccatcgaccagagttggcc

SEQ ID NO: 171676 - DNA, 25 bp, Canis familiaris
tgtacccacggagtgagtctgcacc

SEQ ID NO: 171677 - DNA, 25 bp, Canis familiaris
tgtagaccacggggtatctcacacc

SEQ ID NO: 171678 - DNA, 25 bp, Canis familiaris
tgtagaccacttgtgtcatcccaag

SEQ ID NO: 171679 - DNA, 25 bp, Canis familiaris
tgttaaagtgctctgcttcccaagc

SEQ ID NO: 171680 - DNA, 25 bp, Canis familiaris
tgtatccaagattacttccccacaa

SEQ ID NO: 171681 - DNA, 25 bp, Canis familiaris
tgtagatcaagcaaacttcctcccc

SEQ ID NO: 171682 - DNA, 25 bp, Canis familiaris
tgttatacctgttttcagtcccaca

SEQ ID NO: 171683 - DNA, 25 bp, Canis familiaris
tgttaatttttaccatgtcgcttcc

SEQ ID NO: 171684 - DNA, 25 bp, Canis familiaris
ctttctttgttggcgtgcctggttt

SEQ ID NO: 171685 - DNA, 25 bp, Canis familiaris
tgtatttattactcatttcctccca

SEQ ID NO: 171686 - DNA, 25 bp, Canis familiaris
tgtattttttatacctccacttcca

SEQ ID NO: 171687 - DNA, 25 bp, Canis familiaris
tgttttttgtttgcccatttggtct

SEQ ID NO: 171688 - DNA, 25 bp, Canis familiaris
tgttttgtttctaacgtttgctctt

SEQ ID NO: 171689 - DNA, 25 bp, Canis familiaris
tgtattttcttgtgaaccgtgttta

SEQ ID NO: 171690 - DNA, 25 bp, Canis familiaris
tgattgattcatctgtaaaagggtc

SEQ ID NO: 171691 - DNA, 25 bp, Canis familiaris
tgatatgacatctggctaaaaacaa

SEQ ID NO: 171692 - DNA, 25 bp, Canis familiaris
tgttccattcccaataaagataagg

SEQ ID NO: 171693 - DNA, 25 bp, Canis familiaris
tgttcacatgcgtaaaatataatat

SEQ ID NO: 171694 - DNA, 25 bp, Canis familiaris
ttcccggctaaatataaatggtatt

SEQ ID NO: 171695 - DNA, 25 bp, Canis familiaris
tgatgcccgttaaaattccaggtta

SEQ ID NO: 171696 - DNA, 25 bp, Canis familiaris
tgagtccactttaaaactcctttca

SEQ ID NO: 171697 - DNA, 25 bp, Canis familiaris
tgtttatttatatacctcctctcta

SEQ ID NO: 171698 - DNA, 25 bp, Canis familiaris
tgtatttttaaaccccacttatatg

SEQ ID NO: 171699 - DNA, 25 bp, Canis familiaris
tgttttgtttaacccacatttatcg

SEQ ID NO: 171700 - DNA, 25 bp, Canis familiaris
tgtttatttttaccaccttttcatg

SEQ ID NO: 171701 - DNA, 25 bp, Canis familiaris
tgttcgattttggtccctttttatg

SEQ ID NO: 171702 - DNA, 25 bp, Canis familiaris
tgttctgtttttttcctttataatg

SEQ ID NO: 171703 - DNA, 25 bp, Canis familiaris
tgtttgtaccctttatattttattg

SEQ ID NO: 171704 - DNA, 25 bp, Canis familiaris
tgtttgccccaagatgagttttatt

SEQ ID NO: 171705 - DNA, 25 bp, Canis familiaris
tgtttgcacccaatcaacggacttt

SEQ ID NO: 171706 - DNA, 25 bp, Canis familiaris
tgtttactccagacccagagcaggt

SEQ ID NO: 171707 - DNA, 25 bp, Canis familiaris
tgtactacatcctcccagaggtaaa

SEQ ID NO: 171708 - DNA, 25 bp, Canis familiaris
tgttcatgaaccttcctccaggaaa

SEQ ID NO: 171709 - DNA, 25 bp, Canis familiaris
tgttctgaaggatggctgctcggta

SEQ ID NO: 171710 - DNA, 25 bp, Canis familiaris
tgttctgaaggatgcctgcacggaa

SEQ ID NO: 171711 - DNA, 25 bp, Canis familiaris
tgtttaattacaccagcatcgcgaa

SEQ ID NO: 171712 - DNA, 25 bp, Canis familiaris
tgttttttagaagcctggacaaagc

SEQ ID NO: 171713 - DNA, 25 bp, Canis familiaris
tgtttttctcaaataaagttcaaag

SEQ ID NO: 171714 - DNA, 25 bp, Canis familiaris
tgttcttcccaaattaaataaatag

SEQ ID NO: 171715 - DNA, 25 bp, Canis familiaris
tgtatgcctcctatctttaaaaata

SEQ ID NO: 171716 - DNA, 25 bp, Canis familiaris
tgtatttcctccttttacaaaattg

SEQ ID NO: 171717 - DNA, 25 bp, Canis familiaris
tgaattctccgggtttcccaaatct

SEQ ID NO: 171718 - DNA, 25 bp, Canis familiaris
tgatatgttccgtcggttaccttac

SEQ ID NO: 171719 - DNA, 25 bp, Canis familiaris
tgattattccttgtctgtactttag

SEQ ID NO: 171720 - DNA, 25 bp, Canis familiaris
tgttctcttcttggtgataaactta

SEQ ID NO: 171721 - DNA, 25 bp, Canis familiaris
tgtatttatattagagtacccttaa

SEQ ID NO: 171722 - DNA, 25 bp, Canis familiaris
tgtatcctaatttgtgagtccctcc

SEQ ID NO: 171723 - DNA, 25 bp, Canis familiaris
tgcttagaaagtctggaccctccag

SEQ ID NO: 171724 - DNA, 25 bp, Canis familiaris
tgtacatgtataacctggaccccca

SEQ ID NO: 171725 - DNA, 25 bp, Canis familiaris
tgatactgttggtgctgaaccctcc

SEQ ID NO: 171726 - DNA, 25 bp, Canis familiaris
tgtactctatggcgtgttcctgtat

SEQ ID NO: 171727 - DNA, 25 bp, Canis familiaris
tgctcactacggaggtctccttcta

SEQ ID NO: 171728 - DNA, 25 bp, Canis familiaris
tgtatctccaagagagtctcctttc

SEQ ID NO: 171729 - DNA, 25 bp, Canis familiaris
tgttatctcaagagaccccgagcca

SEQ ID NO: 171730 - DNA, 25 bp, Canis familiaris
tgtttagccaaagctcccttgcaac

SEQ ID NO: 171731 - DNA, 25 bp, Canis familiaris
tgagttactatacactggccttacc

SEQ ID NO: 171732 - DNA, 25 bp, Canis familiaris
tgagtaccttacacgggactcttcc

SEQ ID NO: 171733 - DNA, 25 bp, Canis familiaris
tgttacaaccacacggcgttcgatc

SEQ ID NO: 171734 - DNA, 25 bp, Canis familiaris
tgtacacaaaacagctggtaccgtc

SEQ ID NO: 171735 - DNA, 25 bp, Canis familiaris
tgttcagaaaagcagctggtaccgg

SEQ ID NO: 171736 - DNA, 25 bp, Canis familiaris
tgttgggaattgtgggtcaacaaga

SEQ ID NO: 171737 - DNA, 25 bp, Canis familiaris
tgttggggatttaagtgagaaacac

SEQ ID NO: 171738 - DNA, 25 bp, Canis familiaris
tgttcggcttttgaggagacctgac

SEQ ID NO: 171739 - DNA, 25 bp, Canis familiaris
tgttgcggctttacaagcgggcgct

SEQ ID NO: 171740 - DNA, 25 bp, Canis familiaris
tgaatcgacttcagggcgaggccag

SEQ ID NO: 171741 - DNA, 25 bp, Canis familiaris
tgactcgaccccagggttgtcaggc

SEQ ID NO: 171742 - DNA, 25 bp, Canis familiaris
tgttggagtcccaggtgtcggagtc

SEQ ID NO: 171743 - DNA, 25 bp, Canis familiaris
tgttccagtccctgggaccgagtgc

SEQ ID NO: 171744 - DNA, 25 bp, Canis familiaris
tgttcaattccctaagtaccaggtt

SEQ ID NO: 171745 - DNA, 25 bp, Canis familiaris
tgtaccatccccgacgtgaaaggtt

SEQ ID NO: 171746 - DNA, 25 bp, Canis familiaris
tgtactgtcccggccgggacttgtc

SEQ ID NO: 171747 - DNA, 25 bp, Canis familiaris
tgagaattcccggccaagggtcgtc

SEQ ID NO: 171748 - DNA, 25 bp, Canis familiaris
taaacacccggatggggcggtcaag

SEQ ID NO: 171749 - DNA, 25 bp, Canis familiaris
tgaaaccccgggcggaggaggagcg

SEQ ID NO: 171750 - DNA, 25 bp, Canis familiaris
tgagacccccggagggaaggcagtc

SEQ ID NO: 171751 - DNA, 25 bp, Canis familiaris
tgtagccccgggatgtggtcgaaat

SEQ ID NO: 171752 - DNA, 25 bp, Canis familiaris
tgtacccctgtgcttggtgagtgca

SEQ ID NO: 171753 - DNA, 25 bp, Canis familiaris
tgtttccctgtggttgggaacaagt

SEQ ID NO: 171754 - DNA, 25 bp, Canis familiaris
tgtttccctgtgctctgggagaata

SEQ ID NO: 171755 - DNA, 25 bp, Canis familiaris
tgtttgcaccttgtcttgtgtctga

SEQ ID NO: 171756 - DNA, 25 bp, Canis familiaris
tgttctgcccttattttttgaaaat

SEQ ID NO: 171757 - DNA, 25 bp, Canis familiaris
tgtttccccataatccattttcaca

SEQ ID NO: 171758 - DNA, 25 bp, Canis familiaris
tgtttcggactattgcgctttgttc

SEQ ID NO: 171759 - DNA, 25 bp, Canis familiaris
tgttcacggtcgtggctgtgttttc

SEQ ID NO: 171760 - DNA, 25 bp, Canis familiaris
tgtacaccgatcatgaactcgtttt

SEQ ID NO: 171761 - DNA, 25 bp, Canis familiaris
tgtacagtcctcttaaatggtgtta

SEQ ID NO: 171762 - DNA, 25 bp, Canis familiaris
tgtacagtcgtcttttatttttaat

SEQ ID NO: 171763 - DNA, 25 bp, Canis familiaris
tgagacattttactttaatctttaa

SEQ ID NO: 171764 - DNA, 25 bp, Canis familiaris
tgctaatgttatttttttcctttgg

SEQ ID NO: 171765 - DNA, 25 bp, Canis familiaris
tgccatagcataatcttccttagcc

SEQ ID NO: 171766 - DNA, 25 bp, Canis familiaris
tgacttttatcttcctacaggggca

SEQ ID NO: 171767 - DNA, 25 bp, Canis familiaris
tgtattgttgcctcctgtgaaggaa

SEQ ID NO: 171768 - DNA, 25 bp, Canis familiaris
tgtatagcactggcgcccaatataa

SEQ ID NO: 171769 - DNA, 25 bp, Canis familiaris
tgtagtggctgtggctgccttagca

SEQ ID NO: 171770 - DNA, 25 bp, Canis familiaris
tgtagtctgctgtggtttaggcctg

SEQ ID NO: 171771 - DNA, 25 bp, Canis familiaris
tgtagcctgcttggtgtttctggcc

SEQ ID NO: 171772 - DNA, 25 bp, Canis familiaris
tgtagccgtgtgcttggcaggtgcg

SEQ ID NO: 171773 - DNA, 25 bp, Canis familiaris
tgtacgcgctgcacgtgaagcggcg

SEQ ID NO: 171774 - DNA, 25 bp, Canis familiaris
tgtacgcagccttcgattgcacggc

SEQ ID NO: 171775 - DNA, 25 bp, Canis familiaris
tgtacgcagaccttatgagacccac

SEQ ID NO: 171776 - DNA, 25 bp, Canis familiaris
tgtactgaagtcttgtggtccacct

SEQ ID NO: 171777 - DNA, 25 bp, Canis familiaris
tgtacatattgttaggggtcagcca

SEQ ID NO: 171778 - DNA, 25 bp, Canis familiaris
tgtacatattgttaggggtcagcca

SEQ ID NO: 171779 - DNA, 25 bp, Canis familiaris
tgtacatttgatcagattgttagct

SEQ ID NO: 171780 - DNA, 25 bp, Canis familiaris
tgtataattgtcccagctttctgtc

SEQ ID NO: 171781 - DNA, 25 bp, Canis familiaris
tgttcagactgtagccgtttctgcc

SEQ ID NO: 171782 - DNA, 25 bp, Canis familiaris
tgttcatgctgctttgcaaggtaca

SEQ ID NO: 171783 - DNA, 25 bp, Canis familiaris
tgtatgctgccacggcacactgaaa

SEQ ID NO: 171784 - DNA, 25 bp, Canis familiaris
tgtagcatccatcgacaactttcat

SEQ ID NO: 171785 - DNA, 25 bp, Canis familiaris
tgtatactcatgcatccactcattt

SEQ ID NO: 171786 - DNA, 25 bp, Canis familiaris
tgtataccattctgcccatgtttac

SEQ ID NO: 171787 - DNA, 25 bp, Canis familiaris
tgtagcacctgtttacacgttttcc

SEQ ID NO: 171788 - DNA, 25 bp, Canis familiaris
tgtacagccgtataagcgtgacccc

SEQ ID NO: 171789 - DNA, 25 bp, Canis familiaris
tgtaccctgtatcagggtggccatc

SEQ ID NO: 171790 - DNA, 25 bp, Canis familiaris
tgtagtactggtatgggctcccatg

SEQ ID NO: 171791 - DNA, 25 bp, Canis familiaris
tgtatgaaggcttttggtctccctg

SEQ ID NO: 171792 - DNA, 25 bp, Canis familiaris
tgtagagggctatcatcttcccctt

SEQ ID NO: 171793 - DNA, 25 bp, Canis familiaris
tgtacgcttgtatatatgttccctc

SEQ ID NO: 171794 - DNA, 25 bp, Canis familiaris
tgtacgcctgtgcaaagttcgtctc

SEQ ID NO: 171795 - DNA, 25 bp, Canis familiaris
tctagctactatgaacgtgccggcc

SEQ ID NO: 171796 - DNA, 25 bp, Canis familiaris
tgtagagtttattcaggtcaagcct

SEQ ID NO: 171797 - DNA, 25 bp, Canis familiaris
tgttgagaatcttcgacgccaagcc

SEQ ID NO: 171798 - DNA, 25 bp, Canis familiaris
tgttcagaaagagacctaaggccca

SEQ ID NO: 171799 - DNA, 25 bp, Canis familiaris
tgttagaaatgaggacttggggatc

SEQ ID NO: 171800 - DNA, 25 bp, Canis familiaris
tgttgaaaagattccagttgggtca

SEQ ID NO: 171801 - DNA, 25 bp, Canis familiaris
tgttaataaatggcctttgggtagc

SEQ ID NO: 171802 - DNA, 25 bp, Canis familiaris
tgttagtcggtggtctgccgaggtc

SEQ ID NO: 171803 - DNA, 25 bp, Canis familiaris
tgttagactggtgccaccactgggc

SEQ ID NO: 171804 - DNA, 25 bp, Canis familiaris
tgttaccaactgggacgacatggag

SEQ ID NO: 171805 - DNA, 25 bp, Canis familiaris
tgttaccaactgggacgacatggag

SEQ ID NO: 171806 - DNA, 25 bp, Canis familiaris
tgttcaccccctggaccacagggga

SEQ ID NO: 171807 - DNA, 25 bp, Canis familiaris
tgttccacccacagaagcgcatggg

SEQ ID NO: 171808 - DNA, 25 bp, Canis familiaris
tgtaccaccacaatctgggcgtgac

SEQ ID NO: 171809 - DNA, 25 bp, Canis familiaris
tgtaccagtactttgtgggtgcccc

SEQ ID NO: 171810 - DNA, 25 bp, Canis familiaris
tgctaaccttttctgggtccatact

SEQ ID NO: 171811 - DNA, 25 bp, Canis familiaris
tgtactgtttttatgtttccaacct

SEQ ID NO: 171812 - DNA, 25 bp, Canis familiaris
tgtagctcttttatttattcccttc

SEQ ID NO: 171813 - DNA, 25 bp, Canis familiaris
tgtactctttttctttattccatca

SEQ ID NO: 171814 - DNA, 25 bp, Canis familiaris
tgtattccctttgttctattatcca

SEQ ID NO: 171815 - DNA, 25 bp, Canis familiaris
tgtttccgtttcaaattctgcttct

SEQ ID NO: 171816 - DNA, 25 bp, Canis familiaris
tgtttttgtgttccaagccagcttt

SEQ ID NO: 171817 - DNA, 25 bp, Canis familiaris
tgtatttatctaccacaagtgggtt

SEQ ID NO: 171818 - DNA, 25 bp, Canis familiaris
tgtatattatattcaccattgtggt

SEQ ID NO: 171819 - DNA, 25 bp, Canis familiaris
tgtttctcattctcgcattgggatg

SEQ ID NO: 171820 - DNA, 25 bp, Canis familiaris
tgttttcagttttcatttcgacaaa

SEQ ID NO: 171821 - DNA, 25 bp, Canis familiaris
tgttttcgttcactccagactacga

SEQ ID NO: 171822 - DNA, 25 bp, Canis familiaris
tgcttttgcttagacctgactgggc

SEQ ID NO: 171823 - DNA, 25 bp, Canis familiaris
tgttgtggtatagacctcacgtcac

SEQ ID NO: 171824 - DNA, 25 bp, Canis familiaris
tgttgggtaccccagcaagcagaac

SEQ ID NO: 171825 - DNA, 25 bp, Canis familiaris
tgttcggtatcgtcaagcccaaaca

SEQ ID NO: 171826 - DNA, 25 bp, Canis familiaris
tgttcaagctgcagtgtaccacaaa

SEQ ID NO: 171827 - DNA, 25 bp, Canis familiaris
tgctgtaaccaacttatctaataaa

SEQ ID NO: 171828 - DNA, 25 bp, Canis familiaris
tgtatagatcagtgtttcttaacag

SEQ ID NO: 171829 - DNA, 25 bp, Canis familiaris
tgttgaactcttgattttagctcag

SEQ ID NO: 171830 - DNA, 25 bp, Canis familiaris
tgtacccaatctgacacattactcc

SEQ ID NO: 171831 - DNA, 25 bp, Canis familiaris
tgataccctttcacaatttgccata

SEQ ID NO: 171832 - DNA, 25 bp, Canis familiaris
tgtatcctgtttccaactttgctaa

SEQ ID NO: 171833 - DNA, 25 bp, Canis familiaris
tgttcattttgctgaaattcattaa

SEQ ID NO: 171834 - DNA, 25 bp, Canis familiaris
tgttctctatggtcaaaagtctgtt

SEQ ID NO: 171835 - DNA, 25 bp, Canis familiaris
tgttcctgcaggttcaaatttatcc

SEQ ID NO: 171836 - DNA, 25 bp, Canis familiaris
tgttcaagaggattcagaacccttc

SEQ ID NO: 171837 - DNA, 25 bp, Canis familiaris
tgttataactggggacacactatgt

SEQ ID NO: 171838 - DNA, 25 bp, Canis familiaris
tgttatagtcgacaccacactttgt

SEQ ID NO: 171839 - DNA, 25 bp, Canis familiaris
tgtttagtcacagtcttaccttttg

SEQ ID NO: 171840 - DNA, 25 bp, Canis familiaris
tgtttttgccgtttgacctacatca

SEQ ID NO: 171841 - DNA, 25 bp, Canis familiaris
tgtatgttgtgcttgtactttcccc

SEQ ID NO: 171842 - DNA, 25 bp, Canis familiaris
tgtaggcagagcctgtgactttccc

SEQ ID NO: 171843 - DNA, 25 bp, Canis familiaris
tgtagccatgaagtgccatcttgcc

SEQ ID NO: 171844 - DNA, 25 bp, Canis familiaris
tgtagtagtgagaccagcctgctcc

SEQ ID NO: 171845 - DNA, 25 bp, Canis familiaris
tgtatctgtctggtccagcacgcat

SEQ ID NO: 171846 - DNA, 25 bp, Canis familiaris
tgttactccagtgccactgcattcc

SEQ ID NO: 171847 - DNA, 25 bp, Canis familiaris
tgtttccaggtcagcaggcatgtcc

SEQ ID NO: 171848 - DNA, 25 bp, Canis familiaris
tgttgtcgggccacatggagttcgt

SEQ ID NO: 171849 - DNA, 25 bp, Canis familiaris
tgtttttggacattcgtgagttttt

SEQ ID NO: 171850 - DNA, 25 bp, Canis familiaris
tgtatttttacattcttggtccctt

SEQ ID NO: 171851 - DNA, 25 bp, Canis familiaris
tgttttgtgcggtcatcctggaacc

SEQ ID NO: 171852 - DNA, 25 bp, Canis familiaris
tgttaagttggtggctcagggatgc

SEQ ID NO: 171853 - DNA, 25 bp, Canis familiaris
tgttatcaggtgctggtagctccag

SEQ ID NO: 171854 - DNA, 25 bp, Canis familiaris
tgttcatcgagttggcctagcggca

SEQ ID NO: 171855 - DNA, 25 bp, Canis familiaris
tgattcctggtttgcactactgtgc

SEQ ID NO: 171856 - DNA, 25 bp, Canis familiaris
tgttcctgctgagagtccagatgtg

SEQ ID NO: 171857 - DNA, 25 bp, Canis familiaris
tgttgaaggcaccagcaccagagtc

SEQ ID NO: 171858 - DNA, 25 bp, Canis familiaris
ttttcatggaagtatggaagctgac

SEQ ID NO: 171859 - DNA, 25 bp, Canis familiaris
tgtttcatagcaaggaggataaagc

SEQ ID NO: 171860 - DNA, 25 bp, Canis familiaris
tgattttatgatatgtagtaattga

SEQ ID NO: 171861 - DNA, 25 bp, Canis familiaris
tgttccttaaatgttctttatacca

SEQ ID NO: 171862 - DNA, 25 bp, Canis familiaris
tgttcctgtcaaatagcgactttta

SEQ ID NO: 171863 - DNA, 25 bp, Canis familiaris
tgtttgctgtatatgctgaaatttt

SEQ ID NO: 171864 - DNA, 25 bp, Canis familiaris
tgttttatgtttggggagctattgc

SEQ ID NO: 171865 - DNA, 25 bp, Canis familiaris
tgttttaattctcagacactttccc

SEQ ID NO: 171866 - DNA, 25 bp, Canis familiaris
tgttttgtttcagcaagccttacct

SEQ ID NO: 171867 - DNA, 25 bp, Canis familiaris
tgtattcttttgtccatcagcttaa

SEQ ID NO: 171868 - DNA, 25 bp, Canis familiaris
tgtttatttgctttgggcttccacc

SEQ ID NO: 171869 - DNA, 25 bp, Canis familiaris
tgttaagacgtctggagctcttcct

SEQ ID NO: 171870 - DNA, 25 bp, Canis familiaris
tgttagacagttcctgggccttttc

SEQ ID NO: 171871 - DNA, 25 bp, Canis familiaris
tgcgtacacgttattagccttttta

SEQ ID NO: 171872 - DNA, 25 bp, Canis familiaris
tgtttcacagtctcttaggcattat

SEQ ID NO: 171873 - DNA, 25 bp, Canis familiaris
tgttaacagtactttcaccattgaa

SEQ ID NO: 171874 - DNA, 25 bp, Canis familiaris
tgtttacagtgtttattgccttaat

SEQ ID NO: 171875 - DNA, 25 bp, Canis familiaris
tgttttctggttttgcatcttgtga

SEQ ID NO: 171876 - DNA, 25 bp, Canis familiaris
tgtttccggtgtgccaagtgtggga

SEQ ID NO: 171877 - DNA, 25 bp, Canis familiaris
tgttcccaggtagccaatggtggcg

SEQ ID NO: 171878 - DNA, 25 bp, Canis familiaris
tgttgcccaaaccctcaaggatggc

SEQ ID NO: 171879 - DNA, 25 bp, Canis familiaris
tgtatcctgcaaaccattccaatct

SEQ ID NO: 171880 - DNA, 25 bp, Canis familiaris
tgttgcctgccatgtttccagaatt

SEQ ID NO: 171881 - DNA, 25 bp, Canis familiaris
tgttactgtgatagtttagaaatat

SEQ ID NO: 171882 - DNA, 25 bp, Canis familiaris
tgttacagtatttcttcaatggcaa

SEQ ID NO: 171883 - DNA, 25 bp, Canis familiaris
tgatccacgttgatcctcaacctac

SEQ ID NO: 171884 - DNA, 25 bp, Canis familiaris
tgttccaatatgattccacccatgg

SEQ ID NO: 171885 - DNA, 25 bp, Canis familiaris
tgttccagtatgattctacccacgg

SEQ ID NO: 171886 - DNA, 25 bp, Canis familiaris
tgtacctgatgactgtccaacaccc

SEQ ID NO: 171887 - DNA, 25 bp, Canis familiaris
tgtacctagtctacaacatcacccc

SEQ ID NO: 171888 - DNA, 25 bp, Canis familiaris
tgttgttgacttcaacaccctccag

SEQ ID NO: 171889 - DNA, 25 bp, Canis familiaris
tgtttgagaccttcaacaccccagc

SEQ ID NO: 171890 - DNA, 25 bp, Canis familiaris
tgttgatagctccttcaaccaaccc

SEQ ID NO: 171891 - DNA, 25 bp, Canis familiaris
tgtagcatgaccaccatacacacac

SEQ ID NO: 171892 - DNA, 25 bp, Canis familiaris
tgtagtagtcatgccaggccaacta

SEQ ID NO: 171893 - DNA, 25 bp, Canis familiaris
tgtagagattgagacctgcccttat

SEQ ID NO: 171894 - DNA, 25 bp, Canis familiaris
tgtatgatattaccaagccccttct

SEQ ID NO: 171895 - DNA, 25 bp, Canis familiaris
tgtttataaggaccacccttctgga

SEQ ID NO: 171896 - DNA, 25 bp, Canis familiaris
tgtttcatttgccaccatccgtttt

SEQ ID NO: 171897 - DNA, 25 bp, Canis familiaris
tgttttctacattcccgtttgtata

SEQ ID NO: 171898 - DNA, 25 bp, Canis familiaris
tgttcccaagcatcccgttaggaag

SEQ ID NO: 171899 - DNA, 25 bp, Canis familiaris
tgtttccagaattcgttgttgttga

SEQ ID NO: 171900 - DNA, 25 bp, Canis familiaris
tgtatatccagaagcttttgtactt

SEQ ID NO: 171901 - DNA, 25 bp, Canis familiaris
tgtatgatgccctgatgtgtttcct

SEQ ID NO: 171902 - DNA, 25 bp, Canis familiaris
tgtatggccaagctgctggctcacc

SEQ ID NO: 171903 - DNA, 25 bp, Canis familiaris
tgtatggagacgatcgagctgcgcc

SEQ ID NO: 171904 - DNA, 25 bp, Canis familiaris
tgtatctatgaccttggtgcaccct

SEQ ID NO: 171905 - DNA, 25 bp, Canis familiaris
tgtatgtatatcctgtgcactggca

SEQ ID NO: 171906 - DNA, 25 bp, Canis familiaris
tgtatgatattgactagcactagac

SEQ ID NO: 171907 - DNA, 25 bp, Canis familiaris
tgttcatactaattgcaaagctgcc

SEQ ID NO: 171908 - DNA, 25 bp, Canis familiaris
tgtagcattcaatgtccacacccat

SEQ ID NO: 171909 - DNA, 25 bp, Canis familiaris
tgtatgagccaatgctccacagagc

SEQ ID NO: 171910 - DNA, 25 bp, Canis familiaris
tgtaggcctatcacactcagagccc

SEQ ID NO: 171911 - DNA, 25 bp, Canis familiaris
tgatatggtcaaaaagcaaacagcc

SEQ ID NO: 171912 - DNA, 25 bp, Canis familiaris
tgttggtacagtttgaaggtctcac

SEQ ID NO: 171913 - DNA, 25 bp, Canis familiaris
tgttgaccgaggtggggtgctgcac

SEQ ID NO: 171914 - DNA, 25 bp, Canis familiaris
tgttggcaggggtgggatggcgccg

SEQ ID NO: 171915 - DNA, 25 bp, Canis familiaris
tgttggctttgggccaggggccacg

SEQ ID NO: 171916 - DNA, 25 bp, Canis familiaris
tgtttgtttggccctggggttggag

SEQ ID NO: 171917 - DNA, 25 bp, Canis familiaris
tgtttctttgttgtggttgggtttg

SEQ ID NO: 171918 - DNA, 25 bp, Canis familiaris
tgtatcgttttgttgtgtttgggtt

SEQ ID NO: 171919 - DNA, 25 bp, Canis familiaris
tgtagcgttggtttgtggttgttga

SEQ ID NO: 171920 - DNA, 25 bp, Canis familiaris
tgtagccagtcgcttggttagtcca

SEQ ID NO: 171921 - DNA, 25 bp, Canis familiaris
tgttcaagacgtctggctttgtccc

SEQ ID NO: 171922 - DNA, 25 bp, Canis familiaris
tgttaataccttcttattgctctcc

SEQ ID NO: 171923 - DNA, 25 bp, Canis familiaris
tgttaagaccgggataagggcttct

SEQ ID NO: 171924 - DNA, 25 bp, Canis familiaris
tgttcaggacccctgaacaggcccc

SEQ ID NO: 171925 - DNA, 25 bp, Canis familiaris
tgttcaacacacccggtgaggtccc

SEQ ID NO: 171926 - DNA, 25 bp, Canis familiaris
tgttcagcaacccctgggagaggcc

SEQ ID NO: 171927 - DNA, 25 bp, Canis familiaris
tgaccaattctcccttaagggccgg

SEQ ID NO: 171928 - DNA, 25 bp, Canis familiaris
tgactcctttgctgggaagggccac

SEQ ID NO: 171929 - DNA, 25 bp, Canis familiaris
tgttggttttcggaactgaggccat

SEQ ID NO: 171930 - DNA, 25 bp, Canis familiaris
tgttggttttcggaactgaggccat

SEQ ID NO: 171931 - DNA, 25 bp, Canis familiaris
tgtttggtcttcggcaaatacgccc

SEQ ID NO: 171932 - DNA, 25 bp, Canis familiaris
tgttcttcgttcggaatgttcaccc

SEQ ID NO: 171933 - DNA, 25 bp, Canis familiaris
tgttcttctggacccaagtagctcc

SEQ ID NO: 171934 - DNA, 25 bp, Canis familiaris
tgttgcttctgacactcgattgagt

SEQ ID NO: 171935 - DNA, 25 bp, Canis familiaris
tgttctgattgcacagtctgtagct

SEQ ID NO: 171936 - DNA, 25 bp, Canis familiaris
tgtatagattgcatttcttaggtgt

SEQ ID NO: 171937 - DNA, 25 bp, Canis familiaris
tgttcagagtttctcttcagggccc

SEQ ID NO: 171938 - DNA, 25 bp, Canis familiaris
tgactcagactgaggttaaggatcc

SEQ ID NO: 171939 - DNA, 25 bp, Canis familiaris
tgcagtgaactatttttaaggtcta

SEQ ID NO: 171940 - DNA, 25 bp, Canis familiaris
tgtatcaaataactttacttgccta

SEQ ID NO: 171941 - DNA, 25 bp, Canis familiaris
tgtatacatacatcctgtgccttcc

SEQ ID NO: 171942 - DNA, 25 bp, Canis familiaris
tgattggcatactccgtcagttagt

SEQ ID NO: 171943 - DNA, 25 bp, Canis familiaris
tgtatgcctcagtcaggctgtcgtc

SEQ ID NO: 171944 - DNA, 25 bp, Canis familiaris
tgtagttcatctgatgctcctgtgc

SEQ ID NO: 171945 - DNA, 25 bp, Canis familiaris
tgtatccaactccatgcttagcatg

SEQ ID NO: 171946 - DNA, 25 bp, Canis familiaris
tgtatcatatggcccagttacgccc

SEQ ID NO: 171947 - DNA, 25 bp, Canis familiaris
tgtatagatgcagccgttgcaggcg

SEQ ID NO: 171948 - DNA, 25 bp, Canis familiaris
tgtatagcagcatcatcttacccgc

SEQ ID NO: 171949 - DNA, 25 bp, Canis familiaris
tgttatgcacatgcaccaacccaca

SEQ ID NO: 171950 - DNA, 25 bp, Canis familiaris
tgtttctgactcgacaatccaccag

SEQ ID NO: 171951 - DNA, 25 bp, Canis familiaris
tgttctctgactctaagtagcacag

SEQ ID NO: 171952 - DNA, 25 bp, Canis familiaris
tgttccagtctgccgcaagtacaaa

SEQ ID NO: 171953 - DNA, 25 bp, Canis familiaris
tgctgtgcgcagtgggaagtacaaa

SEQ ID NO: 171954 - DNA, 25 bp, Canis familiaris
tactgcagcggcggtgggtaattag

SEQ ID NO: 171955 - DNA, 25 bp, Canis familiaris
tgtaggcagcgtgtggggtctctga

SEQ ID NO: 171956 - DNA, 25 bp, Canis familiaris
tgtagagcgcagtgctgcctggtct

SEQ ID NO: 171957 - DNA, 25 bp, Canis familiaris
tgttaccacagaggcctggctctgc

SEQ ID NO: 171958 - DNA, 25 bp, Canis familiaris
tgttcaaagcaggcccgagccgcct

SEQ ID NO: 171959 - DNA, 25 bp, Canis familiaris
tgttctgaagaggaaaggtcacagc

SEQ ID NO: 171960 - DNA, 25 bp, Canis familiaris
tgtttggcgagggccacggcaagct

SEQ ID NO: 171961 - DNA, 25 bp, Canis familiaris
tgtttggcgggggactagcagcagc

SEQ ID NO: 171962 - DNA, 25 bp, Canis familiaris
tgtttctcagggcccattacaatgc

SEQ ID NO: 171963 - DNA, 25 bp, Canis familiaris
tgttttaagagcccttcgaattcat

SEQ ID NO: 171964 - DNA, 25 bp, Canis familiaris
tgttcttcacggcttctggaatttc

SEQ ID NO: 171965 - DNA, 25 bp, Canis familiaris
tgttttgcacggtattccaagtctc

SEQ ID NO: 171966 - DNA, 25 bp, Canis familiaris
tgttgtaactggtttctccgttcta

SEQ ID NO: 171967 - DNA, 25 bp, Canis familiaris
tgtttactctggttattctcatgcc

SEQ ID NO: 171968 - DNA, 25 bp, Canis familiaris
tgttctgacctccgaagtcttgcaa

SEQ ID NO: 171969 - DNA, 25 bp, Canis familiaris
tgtttgcacccttatatctatcgag

SEQ ID NO: 171970 - DNA, 25 bp, Canis familiaris
tgttctacaccattattatcccagt

SEQ ID NO: 171971 - DNA, 25 bp, Canis familiaris
tgatgtctcagagcatgtctttccg

SEQ ID NO: 171972 - DNA, 25 bp, Canis familiaris
tgatttgcagcttagttattactta

SEQ ID NO: 171973 - DNA, 25 bp, Canis familiaris
tgtattcattcatgttcattcattc

SEQ ID NO: 171974 - DNA, 25 bp, Canis familiaris
tgtagtctctaccattctcatatga

SEQ ID NO: 171975 - DNA, 25 bp, Canis familiaris
tgtatgatgagccacaagttcataa

SEQ ID NO: 171976 - DNA, 25 bp, Canis familiaris
tgttagagcctgccacttcatgaga

SEQ ID NO: 171977 - DNA, 25 bp, Canis familiaris
tgtatgacgctgggcacgttgagtg

SEQ ID NO: 171978 - DNA, 25 bp, Canis familiaris
tgtatgacgctgggcacgttgagtg

SEQ ID NO: 171979 - DNA, 25 bp, Canis familiaris
tgcaaacctttctcttggtacctag

SEQ ID NO: 171980 - DNA, 25 bp, Canis familiaris
tgttactgtttcacctgtctaaaag

SEQ ID NO: 171981 - DNA, 25 bp, Canis familiaris
tgtttttttctcacttcctaacagg

SEQ ID NO: 171982 - DNA, 25 bp, Canis familiaris
tgtttttttctcccttgaattcagt

SEQ ID NO: 171983 - DNA, 25 bp, Canis familiaris
tgtttttgtaacctttgtagctact

SEQ ID NO: 171984 - DNA, 25 bp, Canis familiaris
tgatttttgtaacgggcggagccct

SEQ ID NO: 171985 - DNA, 25 bp, Canis familiaris
tgtttccttaactttggaggctgcc

SEQ ID NO: 171986 - DNA, 25 bp, Canis familiaris
tgtttctttaaatttgccatacttc

SEQ ID NO: 171987 - DNA, 25 bp, Canis familiaris
tgttttgtacacatttgactacttt

SEQ ID NO: 171988 - DNA, 25 bp, Canis familiaris
tgtattcccacctagttgactactt

SEQ ID NO: 171989 - DNA, 25 bp, Canis familiaris
tgttcccagcacctagcttagtgac

SEQ ID NO: 171990 - DNA, 25 bp, Canis familiaris
ttctaccaacctcttaggcctttat

SEQ ID NO: 171991 - DNA, 25 bp, Canis familiaris
tgtttccaaactcttaccactataa

SEQ ID NO: 171992 - DNA, 25 bp, Canis familiaris
tgtagtccccacgaattaacagtta

SEQ ID NO: 171993 - DNA, 25 bp, Canis familiaris
tgtttcctaacccattaaatggtat

SEQ ID NO: 171994 - DNA, 25 bp, Canis familiaris
tgattccctacaccactaaaattta

SEQ ID NO: 171995 - DNA, 25 bp, Canis familiaris
tgttccaaaacagggataattttgt

SEQ ID NO: 171996 - DNA, 25 bp, Canis familiaris
tgttcccctacaggtttagtgtgtt

SEQ ID NO: 171997 - DNA, 25 bp, Canis familiaris
tgttcctcctactcagttggattct

SEQ ID NO: 171998 - DNA, 25 bp, Canis familiaris
tgtttccctatctcatttaatcttt

SEQ ID NO: 171999 - DNA, 25 bp, Canis familiaris
tgttctccggatttctcttatatgt

SEQ ID NO: 172000 - DNA, 25 bp, Canis familiaris
tgttcctgggagttaccttctttat

SEQ ID NO: 172001 - DNA, 25 bp, Canis familiaris
tgttctgttgggtaaggttctcttt

SEQ ID NO: 172002 - DNA, 25 bp, Canis familiaris
tgtattttagctcagtggtttttaa

SEQ ID NO: 172003 - DNA, 25 bp, Canis familiaris
tgtttttactggtttgtgtttatat

SEQ ID NO: 172004 - DNA, 25 bp, Canis familiaris
tgatttttactcttgttttccactt

SEQ ID NO: 172005 - DNA, 25 bp, Canis familiaris
tgtattttttgcttgttaaccattt

SEQ ID NO: 172006 - DNA, 25 bp, Canis familiaris
tgtagtgttttgtatatttatttat

SEQ ID NO: 172007 - DNA, 25 bp, Canis familiaris
tgttggctttttaattctaatttgt

SEQ ID NO: 172008 - DNA, 25 bp, Canis familiaris
tgttgtgtttgtctttctcagaggc

SEQ ID NO: 172009 - DNA, 25 bp, Canis familiaris
tgttgtgttagcactactctcggga

SEQ ID NO: 172010 - DNA, 25 bp, Canis familiaris
tgttgtgttaagttaattagagtag

SEQ ID NO: 172011 - DNA, 25 bp, Canis familiaris
tgttgtttacagtctcttatcagat

SEQ ID NO: 172012 - DNA, 25 bp, Canis familiaris
tgttgtctttgggtctgatgtcaat

SEQ ID NO: 172013 - DNA, 25 bp, Canis familiaris
tgatttccttgccacttgaactcaa

SEQ ID NO: 172014 - DNA, 25 bp, Canis familiaris
tgttatgctttgttcttcaacttta

SEQ ID NO: 172015 - DNA, 25 bp, Canis familiaris
tgtttggttttcagcagcatcttac

SEQ ID NO: 172016 - DNA, 25 bp, Canis familiaris
tgtatggcggttacaccgtgcctga

SEQ ID NO: 172017 - DNA, 25 bp, Canis familiaris
tgttcccgttgtccctggcacagat

SEQ ID NO: 172018 - DNA, 25 bp, Canis familiaris
tgttccatcagccgtaccgggcgat

SEQ ID NO: 172019 - DNA, 25 bp, Canis familiaris
tgttcaacccagacacgtgaggctg

SEQ ID NO: 172020 - DNA, 25 bp, Canis familiaris
tgttcagaccaaccacagtggctgt

SEQ ID NO: 172021 - DNA, 25 bp, Canis familiaris
tgttccccacaggcaggtggctgac

SEQ ID NO: 172022 - DNA, 25 bp, Canis familiaris
tctatatcttcaggcgcgcggtctg

SEQ ID NO: 172023 - DNA, 25 bp, Canis familiaris
tgtatatgttccttgctggtcttgg

SEQ ID NO: 172024 - DNA, 25 bp, Canis familiaris
tgtatcaggcccagtgttcttggtc

SEQ ID NO: 172025 - DNA, 25 bp, Canis familiaris
tgtatctggcagtctttgtcgttgt

SEQ ID NO: 172026 - DNA, 25 bp, Canis familiaris
tgtttgtgctgttgtcattcgttac

SEQ ID NO: 172027 - DNA, 25 bp, Canis familiaris
tgttggctctaaccttggtctacta

SEQ ID NO: 172028 - DNA, 25 bp, Canis familiaris
tgtttgctctctacctgtgttaaca

SEQ ID NO: 172029 - DNA, 25 bp, Canis familiaris
tgttcctcttcgatggactgcaagc

SEQ ID NO: 172030 - DNA, 25 bp, Canis familiaris
tgttcgtcttctctccaagaagatg

SEQ ID NO: 172031 - DNA, 25 bp, Canis familiaris
tgttcctatcttatccatatgggaa

SEQ ID NO: 172032 - DNA, 25 bp, Canis familiaris
tgttcttttcattctactaggtcat

SEQ ID NO: 172033 - DNA, 25 bp, Canis familiaris
tgttcgaggtcatttctacggtcat

SEQ ID NO: 172034 - DNA, 25 bp, Canis familiaris
tgttaagagtttttatcggtgcttt

SEQ ID NO: 172035 - DNA, 25 bp, Canis familiaris
tgttagagctgtgatttttgttttg

SEQ ID NO: 172036 - DNA, 25 bp, Canis familiaris
tgtatataatcatatttctgtttat

SEQ ID NO: 172037 - DNA, 25 bp, Canis familiaris
tgtatctcaatatcttctctttcta

SEQ ID NO: 172038 - DNA, 25 bp, Canis familiaris
tgtatgtaattgtctatgcatttta

SEQ ID NO: 172039 - DNA, 25 bp, Canis familiaris
tgttatctattgtcatctatgttct

SEQ ID NO: 172040 - DNA, 25 bp, Canis familiaris
tgttagtattgtacaacttctttac

SEQ ID NO: 172041 - DNA, 25 bp, Canis familiaris
tgtttgtactgttcacatcgtcctt

SEQ ID NO: 172042 - DNA, 25 bp, Canis familiaris
tgtttgcacattctctctcagtgcc

SEQ ID NO: 172043 - DNA, 25 bp, Canis familiaris
tgtttcaatttcttgctcatacccc

SEQ ID NO: 172044 - DNA, 25 bp, Canis familiaris
tgtattatattttttcttccctgga

SEQ ID NO: 172045 - DNA, 25 bp, Canis familiaris
tgtttgtatttttttcccagtgtat

SEQ ID NO: 172046 - DNA, 25 bp, Canis familiaris
tgtttggtttggtttcacaattgga

SEQ ID NO: 172047 - DNA, 25 bp, Canis familiaris
tgttttgtttggttttcacattggg

SEQ ID NO: 172048 - DNA, 25 bp, Canis familiaris
tgtttgtggtttttttcatctgtac

SEQ ID NO: 172049 - DNA, 25 bp, Canis familiaris
tgttttggttcggtatttttatcat

SEQ ID NO: 172050 - DNA, 25 bp, Canis familiaris
tgtttggtttctcggagttttgcac

SEQ ID NO: 172051 - DNA, 25 bp, Canis familiaris
tgtttggtggtcctggaatcaaaga

SEQ ID NO: 172052 - DNA, 25 bp, Canis familiaris
tgtttgatgtcacctctggaaagga

SEQ ID NO: 172053 - DNA, 25 bp, Canis familiaris
tgtttgagaacctgtgccagaggat

SEQ ID NO: 172054 - DNA, 25 bp, Canis familiaris
tgttcggaaccagtgtcaagccagc

SEQ ID NO: 172055 - DNA, 25 bp, Canis familiaris
tgttaggagtcacatgtctcgccag

SEQ ID NO: 172056 - DNA, 25 bp, Canis familiaris
tgttcaggttcactgtgggggcaca

SEQ ID NO: 172057 - DNA, 25 bp, Canis familiaris
tgttaattctcacggtgggccttgc

SEQ ID NO: 172058 - DNA, 25 bp, Canis familiaris
tgtttatttcctcttgcagttgtgc

SEQ ID NO: 172059 - DNA, 25 bp, Canis familiaris
tgtttgatttcctgtgtgtgttgcc

SEQ ID NO: 172060 - DNA, 25 bp, Canis familiaris
tgtttgtatatctggctgtgtgtgt

SEQ ID NO: 172061 - DNA, 25 bp, Canis familiaris
tgtattgtgtctccattgtctttgt

SEQ ID NO: 172062 - DNA, 25 bp, Canis familiaris
tgtatatgtgtggcctcgtggttcg

SEQ ID NO: 172063 - DNA, 25 bp, Canis familiaris
tgtatcatgctaaccatcctgtttc

SEQ ID NO: 172064 - DNA, 25 bp, Canis familiaris
tgtatcattgttggattctgacctg

SEQ ID NO: 172065 - DNA, 25 bp, Canis familiaris
tgtattttttatcctggctctgtct

SEQ ID NO: 172066 - DNA, 25 bp, Canis familiaris
tgtatttataaatcatgcccttttt

SEQ ID NO: 172067 - DNA, 25 bp, Canis familiaris
tgtttattaacattgctgctgccgt

SEQ ID NO: 172068 - DNA, 25 bp, Canis familiaris
tgttcatttagattgtcccctgtac

SEQ ID NO: 172069 - DNA, 25 bp, Canis familiaris
tgtattattacatttcccttttctt

SEQ ID NO: 172070 - DNA, 25 bp, Canis familiaris
tgttctttcagatttccattgtttg

SEQ ID NO: 172071 - DNA, 25 bp, Canis familiaris
tgtatgctttcagaataaattattt

SEQ ID NO: 172072 - DNA, 25 bp, Canis familiaris
tgttgtttagtcttggaacttcttt

SEQ ID NO: 172073 - DNA, 25 bp, Canis familiaris
tgttttaaccttgactcttcttttg

SEQ ID NO: 172074 - DNA, 25 bp, Canis familiaris
tgttttcccagcattcaacttcatt

SEQ ID NO: 172075 - DNA, 25 bp, Canis familiaris
tgttttcaaaatactcacacttccc

SEQ ID NO: 172076 - DNA, 25 bp, Canis familiaris
tgttcaccgtaaatcaagcagcccc

SEQ ID NO: 172077 - DNA, 25 bp, Canis familiaris
tgttacaggaagtcccttgccatcc

SEQ ID NO: 172078 - DNA, 25 bp, Canis familiaris
tgttactgggatcaccttcctatca

SEQ ID NO: 172079 - DNA, 25 bp, Canis familiaris
tgttgttgggacccctatcaattca

SEQ ID NO: 172080 - DNA, 25 bp, Canis familiaris
tgttcttagtggccccaaaaccaga

SEQ ID NO: 172081 - DNA, 25 bp, Canis familiaris
tatctcttagggacccagaccccta

SEQ ID NO: 172082 - DNA, 25 bp, Canis familiaris
tgatattaaggggcccaaggcctcc

SEQ ID NO: 172083 - DNA, 25 bp, Canis familiaris
tgaatctggggggaaagacgttcgg

SEQ ID NO: 172084 - DNA, 25 bp, Canis familiaris
tgttctgggggttaaaggaatccat

SEQ ID NO: 172085 - DNA, 25 bp, Canis familiaris
tcttccttgggttccaatggacgtt

SEQ ID NO: 172086 - DNA, 25 bp, Canis familiaris
tattcctacggtttctcttcacgta

SEQ ID NO: 172087 - DNA, 25 bp, Canis familiaris
tgttccgtcggttaccttacatgaa

SEQ ID NO: 172088 - DNA, 25 bp, Canis familiaris
tgttggttcgtttcacctgacacaa

SEQ ID NO: 172089 - DNA, 25 bp, Canis familiaris
tgttatgtgggccgtcatcctaaaa

SEQ ID NO: 172090 - DNA, 25 bp, Canis familiaris
tgttagctgtcggtgcatctcacta

SEQ ID NO: 172091 - DNA, 25 bp, Canis familiaris
tgttagatatcctctcatcaccata

SEQ ID NO: 172092 - DNA, 25 bp, Canis familiaris
tgtttgtatcattccttcaaataaa

SEQ ID NO: 172093 - DNA, 25 bp, Canis familiaris
tgtttgtcagttcttaatagcccac

SEQ ID NO: 172094 - DNA, 25 bp, Canis familiaris
tgttgtgaagttattacctccctct

SEQ ID NO: 172095 - DNA, 25 bp, Canis familiaris
tgtttgaatgttatcccttgcacca

SEQ ID NO: 172096 - DNA, 25 bp, Canis familiaris
tgtttttcttttcccattgctgaaa

SEQ ID NO: 172097 - DNA, 25 bp, Canis familiaris
tgtattttcttttctctctctagaa

SEQ ID NO: 172098 - DNA, 25 bp, Canis familiaris
tgtttttttccagtcctcaaatgca

SEQ ID NO: 172099 - DNA, 25 bp, Canis familiaris
tgttatcttgttggccctatgaaat

SEQ ID NO: 172100 - DNA, 25 bp, Canis familiaris
tgttatgttgtcaccctgacctatt

SEQ ID NO: 172101 - DNA, 25 bp, Canis familiaris
tgtatttgtgatgttctctgtcctt

SEQ ID NO: 172102 - DNA, 25 bp, Canis familiaris
tgtataatgctgacgttcttgcttt

SEQ ID NO: 172103 - DNA, 25 bp, Canis familiaris
tgtatagcagccatcttcttcattt

SEQ ID NO: 172104 - DNA, 25 bp, Canis familiaris
tgtatagtgacacttgtcccttctc

SEQ ID NO: 172105 - DNA, 25 bp, Canis familiaris
tgtatagtagtttctcctcttttcc

SEQ ID NO: 172106 - DNA, 25 bp, Canis familiaris
tgtataggagaatctccccccacac

SEQ ID NO: 172107 - DNA, 25 bp, Canis familiaris
tgattgagtggagacctccagcccc

SEQ ID NO: 172108 - DNA, 25 bp, Canis familiaris
tgttgggaacaagcgcacaggggcc

SEQ ID NO: 172109 - DNA, 25 bp, Canis familiaris
tgttggtgaaaggacccatgaaggc

SEQ ID NO: 172110 - DNA, 25 bp, Canis familiaris
tgttggagaagaacagccctccgcc

SEQ ID NO: 172111 - DNA, 25 bp, Canis familiaris
tgtttgaccaaaagtcctccagcca

SEQ ID NO: 172112 - DNA, 25 bp, Canis familiaris
tgttagacctgcagagtccttcacc

SEQ ID NO: 172113 - DNA, 25 bp, Canis familiaris
tgttaacctactacggcttgagcac

SEQ ID NO: 172114 - DNA, 25 bp, Canis familiaris
tgttaaacttctacaactttgcaaa

SEQ ID NO: 172115 - DNA, 25 bp, Canis familiaris
tgttacctcgtcttcaactttaata

SEQ ID NO: 172116 - DNA, 25 bp, Canis familiaris
tgttcatctcactcctaatttttaa

SEQ ID NO: 172117 - DNA, 25 bp, Canis familiaris
tgttccaatcaccctcaagatattt

SEQ ID NO: 172118 - DNA, 25 bp, Canis familiaris
tgttccaacccagtcatagcatttt

SEQ ID NO: 172119 - DNA, 25 bp, Canis familiaris
tgttccaaccagctctgcagttgat

SEQ ID NO: 172120 - DNA, 25 bp, Canis familiaris
tgtatcacaagctccattggtcaga

SEQ ID NO: 172121 - DNA, 25 bp, Canis familiaris
tgttccaagactccattttcctggt

SEQ ID NO: 172122 - DNA, 25 bp, Canis familiaris
tgttttagcagcagcttcttcggct

SEQ ID NO: 172123 - DNA, 25 bp, Canis familiaris
tgtttgaagcgcagcaggtgcatcg

SEQ ID NO: 172124 - DNA, 25 bp, Canis familiaris
tgtttgtgcagcgatgaggatggag

SEQ ID NO: 172125 - DNA, 25 bp, Canis familiaris
tgttgctgaagattgatgagtagag

SEQ ID NO: 172126 - DNA, 25 bp, Canis familiaris
tgttctgaggtagagctatggacta

SEQ ID NO: 172127 - DNA, 25 bp, Canis familiaris
tgtttatggctatctgtatgtaata

SEQ ID NO: 172128 - DNA, 25 bp, Canis familiaris
tgttttgacctcctgtagtagacgc

SEQ ID NO: 172129 - DNA, 25 bp, Canis familiaris
tgtttgtcacctcctggagctcaac

SEQ ID NO: 172130 - DNA, 25 bp, Canis familiaris
tgtttgtcacctatgagcagctcaa

SEQ ID NO: 172131 - DNA, 25 bp, Canis familiaris
tgtattgtacatgtcagtgctctca

SEQ ID NO: 172132 - DNA, 25 bp, Canis familiaris
tgtatatgctaactccgttgctctt

SEQ ID NO: 172133 - DNA, 25 bp, Canis familiaris
tgtatatgctaactccgttgctctt

SEQ ID NO: 172134 - DNA, 25 bp, Canis familiaris
tgtattcatgtaccgagtgctcctt

SEQ ID NO: 172135 - DNA, 25 bp, Canis familiaris
tgttcatcctggagaatgcccttcc

SEQ ID NO: 172136 - DNA, 25 bp, Canis familiaris
tgatttccaggaaagtcccctgagc

SEQ ID NO: 172137 - DNA, 25 bp, Canis familiaris
tgtttctggcctaaggacacctcag

SEQ ID NO: 172138 - DNA, 25 bp, Canis familiaris
tgttcctggccaaaggcaacatccc

SEQ ID NO: 172139 - DNA, 25 bp, Canis familiaris
tgtttgctcccagtggggaaccctg

SEQ ID NO: 172140 - DNA, 25 bp, Canis familiaris
tgttttgccctacaagaacccagag

SEQ ID NO: 172141 - DNA, 25 bp, Canis familiaris
tgttttcctcttccagtcaacaaaa

SEQ ID NO: 172142 - DNA, 25 bp, Canis familiaris
tgtttcccctctcatgtggaacaaa

SEQ ID NO: 172143 - DNA, 25 bp, Canis familiaris
tgtattgcccgatgcaatgagaaaa

SEQ ID NO: 172144 - DNA, 25 bp, Canis familiaris
tgttcatcaccctgaagaagtatga

SEQ ID NO: 172145 - DNA, 25 bp, Canis familiaris
tgttagcctatttaaaggtctgaaa

SEQ ID NO: 172146 - DNA, 25 bp, Canis familiaris
tgttaggcctatttaaagctctgaa

SEQ ID NO: 172147 - DNA, 25 bp, Canis familiaris
tgttcttactgttgtggaagctgta

SEQ ID NO: 172148 - DNA, 25 bp, Canis familiaris
tgtttctgactctgctctgaactat

SEQ ID NO: 172149 - DNA, 25 bp, Canis familiaris
tgtttctgcttctgtctcatgaata

SEQ ID NO: 172150 - DNA, 25 bp, Canis familiaris
tgtttctgcttctgtctcatgaata

SEQ ID NO: 172151 - DNA, 25 bp, Canis familiaris
tgttccagcttcggcctgcacagaa

SEQ ID NO: 172152 - DNA, 25 bp, Canis familiaris
tgtttatcttctgggcacctgagtc

SEQ ID NO: 172153 - DNA, 25 bp, Canis familiaris
tgtttaccatctggacagctctggg

SEQ ID NO: 172154 - DNA, 25 bp, Canis familiaris
tgtattacgattcgcacgatgagtg

SEQ ID NO: 172155 - DNA, 25 bp, Canis familiaris
tgtattcacccagatgcagagattg

SEQ ID NO: 172156 - DNA, 25 bp, Canis familiaris
tgtttttcacatttgcgaatggttc

SEQ ID NO: 172157 - DNA, 25 bp, Canis familiaris
tgttatgcttttttggccaggtgtg

SEQ ID NO: 172158 - DNA, 25 bp, Canis familiaris
tgttatgtttctattgcttttgtat

SEQ ID NO: 172159 - DNA, 25 bp, Canis familiaris
tgtttgtggttttgtgcgttttagg

SEQ ID NO: 172160 - DNA, 25 bp, Canis familiaris
tgttttgttttattggaggctgtgg

SEQ ID NO: 172161 - DNA, 25 bp, Canis familiaris
tgtttttgctggaatatgaagtctg

SEQ ID NO: 172162 - DNA, 25 bp, Canis familiaris
tgttttctgctgcaaagtctgcgtc

SEQ ID NO: 172163 - DNA, 25 bp, Canis familiaris
tgtttctacggacgagtcgctgggc

SEQ ID NO: 172164 - DNA, 25 bp, Canis familiaris
tgtttctacggggattggctggcaa

SEQ ID NO: 172165 - DNA, 25 bp, Canis familiaris
tgttctacagccggcgattggccgc

SEQ ID NO: 172166 - DNA, 25 bp, Canis familiaris
tgttctccatcctggaggatgactg

SEQ ID NO: 172167 - DNA, 25 bp, Canis familiaris
tgtttccactcttgggtgccatata

SEQ ID NO: 172168 - DNA, 25 bp, Canis familiaris
tgtttggagccctggtggatcacat

SEQ ID NO: 172169 - DNA, 25 bp, Canis familiaris
tgttgggacaccgtcgggacaggtc

SEQ ID NO: 172170 - DNA, 25 bp, Canis familiaris
tgttaggcccagctctgggcacggc

SEQ ID NO: 172171 - DNA, 25 bp, Canis familiaris
tgttgaggtccacctgatgctaaag

SEQ ID NO: 172172 - DNA, 25 bp, Canis familiaris
tgttgcctgctgcactgatcatgaa

SEQ ID NO: 172173 - DNA, 25 bp, Canis familiaris
tgttctcagaggtcaatcagctaat

SEQ ID NO: 172174 - DNA, 25 bp, Canis familiaris
tgttccagggatagttctaaccggt

SEQ ID NO: 172175 - DNA, 25 bp, Canis familiaris
tgatgctcggggagaccaacccggc

SEQ ID NO: 172176 - DNA, 25 bp, Canis familiaris
tgatgccggtgaacgtgcaaaacag

SEQ ID NO: 172177 - DNA, 25 bp, Canis familiaris
tgagtcggttcactccacaacaagt

SEQ ID NO: 172178 - DNA, 25 bp, Canis familiaris
tgttcagcttggcatccctaaagat

SEQ ID NO: 172179 - DNA, 25 bp, Canis familiaris
tgattggttggctgccccagaaggc

SEQ ID NO: 172180 - DNA, 25 bp, Canis familiaris
tgttcgtgacactgagaccgagcgg

SEQ ID NO: 172181 - DNA, 25 bp, Canis familiaris
tgttccttgcactgaacctgaaggg

SEQ ID NO: 172182 - DNA, 25 bp, Canis familiaris
tgttcagttgacagcacacagccag

SEQ ID NO: 172183 - DNA, 25 bp, Canis familiaris
tgttcagactatagcccagatccag

SEQ ID NO: 172184 - DNA, 25 bp, Canis familiaris
tgttaatgtctcacggcatcctgaa

SEQ ID NO: 172185 - DNA, 25 bp, Canis familiaris
tgttgtctgttcacattcacctaaa

SEQ ID NO: 172186 - DNA, 25 bp, Canis familiaris
tgttgtctggtggtaccaccatgta

SEQ ID NO: 172187 - DNA, 25 bp, Canis familiaris
tgtttctcactggtgacttccatgc

SEQ ID NO: 172188 - DNA, 25 bp, Canis familiaris
tgttcctgcattatgatctcctcag

SEQ ID NO: 172189 - DNA, 25 bp, Canis familiaris
tgttcagctcttattcaacatcaga

SEQ ID NO: 172190 - DNA, 25 bp, Canis familiaris
tgttttgttttttacacagagagag

SEQ ID NO: 172191 - DNA, 25 bp, Canis familiaris
tgttttttttattgccctaagtgat

SEQ ID NO: 172192 - DNA, 25 bp, Canis familiaris
tgttaactgtttttcccatctagga

SEQ ID NO: 172193 - DNA, 25 bp, Canis familiaris
tgttagactttacctacccatcagg

SEQ ID NO: 172194 - DNA, 25 bp, Canis familiaris
tgttaaattgtacagtcctgctcat

SEQ ID NO: 172195 - DNA, 25 bp, Canis familiaris
tgtttttgcgtgaaagacctgcctc

SEQ ID NO: 172196 - DNA, 25 bp, Canis familiaris
tgttttcgttgcaaaacacccctgc

SEQ ID NO: 172197 - DNA, 25 bp, Canis familiaris
tgtttttgtgccaacacaatccccc

SEQ ID NO: 172198 - DNA, 25 bp, Canis familiaris
tgttccttgatgcccaaaatgcacc

SEQ ID NO: 172199 - DNA, 25 bp, Canis familiaris
tgttgcccagtcttccataatacta

SEQ ID NO: 172200 - DNA, 25 bp, Canis familiaris
tgttgccaagtcttccatattacta

SEQ ID NO: 172201 - DNA, 25 bp, Canis familiaris
tgttccaacctgtatcatttaaaaa

SEQ ID NO: 172202 - DNA, 25 bp, Canis familiaris
tgttcacaaagttgcatattatcaa

SEQ ID NO: 172203 - DNA, 25 bp, Canis familiaris
tgttcaccaagttgcatattatcca

SEQ ID NO: 172204 - DNA, 25 bp, Canis familiaris
tgttcccaagtggctagttgagaag

SEQ ID NO: 172205 - DNA, 25 bp, Canis familiaris
tgttcaccaaggacacaggatgaga

SEQ ID NO: 172206 - DNA, 25 bp, Canis familiaris
tgttcatgacaaggccagtgtgtaa

SEQ ID NO: 172207 - DNA, 25 bp, Canis familiaris
tgatgcctaatctctacggtaacat

SEQ ID NO: 172208 - DNA, 25 bp, Canis familiaris
tgaccacaacctttcctaaaattat

SEQ ID NO: 172209 - DNA, 25 bp, Canis familiaris
tgatcccaaacctcctcaaggggag

SEQ ID NO: 172210 - DNA, 25 bp, Canis familiaris
tgacggaagggcaccaccaggagtg

SEQ ID NO: 172211 - DNA, 25 bp, Canis familiaris
tgacggaagggcaccaccaggagtg

SEQ ID NO: 172212 - DNA, 25 bp, Canis familiaris
tgatcagggcaacacctcggaaagg

SEQ ID NO: 172213 - DNA, 25 bp, Canis familiaris
tgataaccacaatgcattcgtaaaa

SEQ ID NO: 172214 - DNA, 25 bp, Canis familiaris
tgataaaaacaaagctggcaacaac

SEQ ID NO: 172215 - DNA, 25 bp, Canis familiaris
tgacaaaattcatggctagccaata

SEQ ID NO: 172216 - DNA, 25 bp, Canis familiaris
tgaccaatttcatagcatacccctt

SEQ ID NO: 172217 - DNA, 25 bp, Canis familiaris
tgataagtttataagcaacttcccc

SEQ ID NO: 172218 - DNA, 25 bp, Canis familiaris
tgtttgcttcttactgtatttcccc

SEQ ID NO: 172219 - DNA, 25 bp, Canis familiaris
tgttccttgttgtgtcatttcccac

SEQ ID NO: 172220 - DNA, 25 bp, Canis familiaris
tgttgtttgttatgtatctttacca

SEQ ID NO: 172221 - DNA, 25 bp, Canis familiaris
tgtttttgctttattctgtttcttt

SEQ ID NO: 172222 - DNA, 25 bp, Canis familiaris
tgtttgcatcctttatttatttttt

SEQ ID NO: 172223 - DNA, 25 bp, Canis familiaris
tgtttctcagagcttatttttttgt

SEQ ID NO: 172224 - DNA, 25 bp, Canis familiaris
tgttcattaaatgtttatttttgta

SEQ ID NO: 172225 - DNA, 25 bp, Canis familiaris
tgatatacttaagccttgttgattt

SEQ ID NO: 172226 - DNA, 25 bp, Canis familiaris
tgttcctctagacatttctgtgcat

SEQ ID NO: 172227 - DNA, 25 bp, Canis familiaris
tgttgctgccagaggttctgcttgc

SEQ ID NO: 172228 - DNA, 25 bp, Canis familiaris
tttgagcctcggtttctgtatgggg

SEQ ID NO: 172229 - DNA, 25 bp, Canis familiaris
tgttggcctaggtcgtgttgcggaa

SEQ ID NO: 172230 - DNA, 25 bp, Canis familiaris
tgttggccctggaggctatgctgta

SEQ ID NO: 172231 - DNA, 25 bp, Canis familiaris
tgttgtccaggactcagtgctgagc

SEQ ID NO: 172232 - DNA, 25 bp, Canis familiaris
tgttgtcgaggtcatctgcgagcgt

SEQ ID NO: 172233 - DNA, 25 bp, Canis familiaris
tgttcccaggtgatgctgatgccag

SEQ ID NO: 172234 - DNA, 25 bp, Canis familiaris
tgttgcctggtgacagggctcctga

SEQ ID NO: 172235 - DNA, 25 bp, Canis familiaris
tgttctgctggagtaggtcccgaca

SEQ ID NO: 172236 - DNA, 25 bp, Canis familiaris
tgtttctggacattggtatcactaa

SEQ ID NO: 172237 - DNA, 25 bp, Canis familiaris
tgttcacttactgagtatcctaaca

SEQ ID NO: 172238 - DNA, 25 bp, Canis familiaris
tgttacttttgctgtcttctgatac

SEQ ID NO: 172239 - DNA, 25 bp, Canis familiaris
tgttcacttttgttttcatctgttt

SEQ ID NO: 172240 - DNA, 25 bp, Canis familiaris
tgtttatttgtgtttgtctgtgttg

SEQ ID NO: 172241 - DNA, 25 bp, Canis familiaris
tgttctcattttcctttttcatata

SEQ ID NO: 172242 - DNA, 25 bp, Canis familiaris
tgttgtgtgttccctatttttatcc

SEQ ID NO: 172243 - DNA, 25 bp, Canis familiaris
tgtttttgtctgcttttttattcca

SEQ ID NO: 172244 - DNA, 25 bp, Canis familiaris
tgtttttcatcgtgttctttgttcc

SEQ ID NO: 172245 - DNA, 25 bp, Canis familiaris
tgtttttgccagtgtcttttcaact

SEQ ID NO: 172246 - DNA, 25 bp, Canis familiaris
tgtttttccatgagtgctgtgtcca

SEQ ID NO: 172247 - DNA, 25 bp, Canis familiaris
tgttatctaccagttgtatgtgtgt

SEQ ID NO: 172248 - DNA, 25 bp, Canis familiaris
tgtttccatcctagtattcgtgtac

SEQ ID NO: 172249 - DNA, 25 bp, Canis familiaris
tgtttcctcagaagtgactcgtata

SEQ ID NO: 172250 - DNA, 25 bp, Canis familiaris
tgtttgcctcgaattgatgcccttt

SEQ ID NO: 172251 - DNA, 25 bp, Canis familiaris
tgttttctctgaaatatcccttttt

SEQ ID NO: 172252 - DNA, 25 bp, Canis familiaris
tgttttatctaattactttggttgt

SEQ ID NO: 172253 - DNA, 25 bp, Canis familiaris
tgtttttcttcatccttcatagggt

SEQ ID NO: 172254 - DNA, 25 bp, Canis familiaris
tgttctttgtttggtttctcggagt

SEQ ID NO: 172255 - DNA, 25 bp, Canis familiaris
tgtttttttatgccttcttgccaga

SEQ ID NO: 172256 - DNA, 25 bp, Canis familiaris
tgtttgctgtttacagttcctccca

SEQ ID NO: 172257 - DNA, 25 bp, Canis familiaris
tgttggagtcctagctttgctccca

SEQ ID NO: 172258 - DNA, 25 bp, Canis familiaris
tgttaggtgccttttgttgtctgct

SEQ ID NO: 172259 - DNA, 25 bp, Canis familiaris
tgttagtgtgagattgtgtgtgtgt

SEQ ID NO: 172260 - DNA, 25 bp, Canis familiaris
tgttaatgtgctgttcttgtcttct

SEQ ID NO: 172261 - DNA, 25 bp, Canis familiaris
tgtttatgcctgttgtcttgggtcc

SEQ ID NO: 172262 - DNA, 25 bp, Canis familiaris
tgttatatgtctcttatgggcctcc

SEQ ID NO: 172263 - DNA, 25 bp, Canis familiaris
tgttcattgtctaggctgttgccct

SEQ ID NO: 172264 - DNA, 25 bp, Canis familiaris
tgttcagtatcccgcttatgtgact

SEQ ID NO: 172265 - DNA, 25 bp, Canis familiaris
tgattcttacgaggcctttgtctga

SEQ ID NO: 172266 - DNA, 25 bp, Canis familiaris
tgattctgaactgtcccttatctat

SEQ ID NO: 172267 - DNA, 25 bp, Canis familiaris
tgttgcctgacagacatcctacact

SEQ ID NO: 172268 - DNA, 25 bp, Canis familiaris
tgttgctgttacgcaggcatcactc

SEQ ID NO: 172269 - DNA, 25 bp, Canis familiaris
tgttcgtgaactgcaggtcatcctt

SEQ ID NO: 172270 - DNA, 25 bp, Canis familiaris
tgttatgcgcagacttgggtctccc

SEQ ID NO: 172271 - DNA, 25 bp, Canis familiaris
tgttgacgcgatgtgatggtctgcc

SEQ ID NO: 172272 - DNA, 25 bp, Canis familiaris
tgttgagccagtgctgtgttgtcca

SEQ ID NO: 172273 - DNA, 25 bp, Canis familiaris
tgttaggggtcattctggtgccagc

SEQ ID NO: 172274 - DNA, 25 bp, Canis familiaris
tgttttccgtcattctggcatacca

SEQ ID NO: 172275 - DNA, 25 bp, Canis familiaris
tgttttctctgttacatgtaccgca

SEQ ID NO: 172276 - DNA, 25 bp, Canis familiaris
tgttttctgtgttacatctacttcc

SEQ ID NO: 172277 - DNA, 25 bp, Canis familiaris
tgtttacattgtgacatccagcccc

SEQ ID NO: 172278 - DNA, 25 bp, Canis familiaris
tgtttatatgtgttagacgcccccc

SEQ ID NO: 172279 - DNA, 25 bp, Canis familiaris
tgttatatacatttattacccaccc

SEQ ID NO: 172280 - DNA, 25 bp, Canis familiaris
tgttaaatctaagtgcttcctctcc

SEQ ID NO: 172281 - DNA, 25 bp, Canis familiaris
tgttagcctataaatttcctcttgc

SEQ ID NO: 172282 - DNA, 25 bp, Canis familiaris
tgttatgcatataaatattttactt

SEQ ID NO: 172283 - DNA, 25 bp, Canis familiaris
tgttatgccacaagtatttctactc

SEQ ID NO: 172284 - DNA, 25 bp, Canis familiaris
tgatctactaggtcttttccatctc

SEQ ID NO: 172285 - DNA, 25 bp, Canis familiaris
tgttagctttggttggtcactctcc

SEQ ID NO: 172286 - DNA, 25 bp, Canis familiaris
tgttcctttgtgactggttgctttc

SEQ ID NO: 172287 - DNA, 25 bp, Canis familiaris
tgttcctgattcttcggtggttgtt

SEQ ID NO: 172288 - DNA, 25 bp, Canis familiaris
tgatgactacttttggtggagttga

SEQ ID NO: 172289 - DNA, 25 bp, Canis familiaris
tgataaggctattgggcaggtttgg

SEQ ID NO: 172290 - DNA, 25 bp, Canis familiaris
tacaaggtagtgcaaggtttatttt

SEQ ID NO: 172291 - DNA, 25 bp, Canis familiaris
tcagaagtttagcgggcttttttct

SEQ ID NO: 172292 - DNA, 25 bp, Canis familiaris
tctgtactttctgaaacttttttct

SEQ ID NO: 172293 - DNA, 25 bp, Canis familiaris
tgagttcttttataatttcctttct

SEQ ID NO: 172294 - DNA, 25 bp, Canis familiaris
tgacattcctttaaggtttgtttgt

SEQ ID NO: 172295 - DNA, 25 bp, Canis familiaris
tgttcctctacttgggtttgtttga

SEQ ID NO: 172296 - DNA, 25 bp, Canis familiaris
tgtttcactccttgttattttttca

SEQ ID NO: 172297 - DNA, 25 bp, Canis familiaris
tgttaccacacttatttatagttta

SEQ ID NO: 172298 - DNA, 25 bp, Canis familiaris
tgttcacacaacttcatctttttct

SEQ ID NO: 172299 - DNA, 25 bp, Canis familiaris
tgatcctccaacttcatttgatgct

SEQ ID NO: 172300 - DNA, 25 bp, Canis familiaris
tgatcagccacttcatttggtctgc

SEQ ID NO: 172301 - DNA, 25 bp, Canis familiaris
tgatcagcaacgtccactcgaattc

SEQ ID NO: 172302 - DNA, 25 bp, Canis familiaris
tgatcagattcttcctactttaacc

SEQ ID NO: 172303 - DNA, 25 bp, Canis familiaris
tgatcatttggtcctatctatttag

SEQ ID NO: 172304 - DNA, 25 bp, Canis familiaris
tgattttgagggcttcatcttcagc

SEQ ID NO: 172305 - DNA, 25 bp, Canis familiaris
tgttttgacccttgacatctagctc

SEQ ID NO: 172306 - DNA, 25 bp, Canis familiaris
tgtttctacccttcaattagctgcc

SEQ ID NO: 172307 - DNA, 25 bp, Canis familiaris
tgttctctagccgggaggacagccc

SEQ ID NO: 172308 - DNA, 25 bp, Canis familiaris
tgctctctccgcaggaaagaacccc

SEQ ID NO: 172309 - DNA, 25 bp, Canis familiaris
tgttcccctgggtatatagtttcaa

SEQ ID NO: 172310 - DNA, 25 bp, Canis familiaris
tgttctccactgggtaatgtggaaa

SEQ ID NO: 172311 - DNA, 25 bp, Canis familiaris
tgttctcctatggttcaagtcgcta

SEQ ID NO: 172312 - DNA, 25 bp, Canis familiaris
tgttctcccatggaatgctttccca

SEQ ID NO: 172313 - DNA, 25 bp, Canis familiaris
tgttctccctactagcaaagcagcc

SEQ ID NO: 172314 - DNA, 25 bp, Canis familiaris
tgttacccatcgcagaacacacaca

SEQ ID NO: 172315 - DNA, 25 bp, Canis familiaris
tgttagcaccttgggctgtccataa

SEQ ID NO: 172316 - DNA, 25 bp, Canis familiaris
tgataaacgctaatggtcaccaaac

SEQ ID NO: 172317 - DNA, 25 bp, Canis familiaris
tgattctcacgtgcaggtacctaag

SEQ ID NO: 172318 - DNA, 25 bp, Canis familiaris
tgacttgcattagagtgtacttgga

SEQ ID NO: 172319 - DNA, 25 bp, Canis familiaris
tgtttcataatttgctctccatttg

SEQ ID NO: 172320 - DNA, 25 bp, Canis familiaris
tgttcacatactattctcttcctga

SEQ ID NO: 172321 - DNA, 25 bp, Canis familiaris
tgttaatactgtttacttcctctcg

SEQ ID NO: 172322 - DNA, 25 bp, Canis familiaris
tgttagtcctgttttttgcactgcc

SEQ ID NO: 172323 - DNA, 25 bp, Canis familiaris
tgttttccttttagttgcctcgaat

SEQ ID NO: 172324 - DNA, 25 bp, Canis familiaris
tgttttcctatttctattactgtaa

SEQ ID NO: 172325 - DNA, 25 bp, Canis familiaris
tgttgttttgtttgcttacttttag

SEQ ID NO: 172326 - DNA, 25 bp, Canis familiaris
tgttgatagttgttttgggttttgg

SEQ ID NO: 172327 - DNA, 25 bp, Canis familiaris
tgattatggttggtttagccttttt

SEQ ID NO: 172328 - DNA, 25 bp, Canis familiaris
tgattatgtgatggagtgaaagatt

SEQ ID NO: 172329 - DNA, 25 bp, Canis familiaris
tgagtagcaagcgaaaacagtaggc

SEQ ID NO: 172330 - DNA, 25 bp, Canis familiaris
tgagcttcatgtcaaaacggaaggc

SEQ ID NO: 172331 - DNA, 25 bp, Canis familiaris
tgatgctggcaaaatagaacacgat

SEQ ID NO: 172332 - DNA, 25 bp, Canis familiaris
tgacctccatgctatcaagccaagt

SEQ ID NO: 172333 - DNA, 25 bp, Canis familiaris
tgatcccgcagattcccagaactgc

SEQ ID NO: 172334 - DNA, 25 bp, Canis familiaris
tgactacctgacttgctaacactgt

SEQ ID NO: 172335 - DNA, 25 bp, Canis familiaris
tgttttctgtcatctgaatcatttt

SEQ ID NO: 172336 - DNA, 25 bp, Canis familiaris
tgatattgtttcggcaaattttttt

SEQ ID NO: 172337 - DNA, 25 bp, Canis familiaris
tgatttttatgagcacagactttca

SEQ ID NO: 172338 - DNA, 25 bp, Canis familiaris
tgttttttgtcttagaatatccaaa

SEQ ID NO: 172339 - DNA, 25 bp, Canis familiaris
tgttttttatcttttctacagcaaa

SEQ ID NO: 172340 - DNA, 25 bp, Canis familiaris
tgttttttcctcttgctgcaaaata

SEQ ID NO: 172341 - DNA, 25 bp, Canis familiaris
tgattattttttttctcggtttctg

SEQ ID NO: 172342 - DNA, 25 bp, Canis familiaris
tgttttcctcttttcattgtttttg

SEQ ID NO: 172343 - DNA, 25 bp, Canis familiaris
tgtttatttcttttttcattttgtg

SEQ ID NO: 172344 - DNA, 25 bp, Canis familiaris
tgtttatttgccttttctttgtttg

SEQ ID NO: 172345 - DNA, 25 bp, Canis familiaris
tgtttattggcctgtttctttggtt

SEQ ID NO: 172346 - DNA, 25 bp, Canis familiaris
tgttccatttcctgctttgatttgc

SEQ ID NO: 172347 - DNA, 25 bp, Canis familiaris
tgttctgatgttaacctttaggcca

SEQ ID NO: 172348 - DNA, 25 bp, Canis familiaris
tgttcgatgttattcttattagacc

SEQ ID NO: 172349 - DNA, 25 bp, Canis familiaris
tgtttttttgaggctgattgagacc

SEQ ID NO: 172350 - DNA, 25 bp, Canis familiaris
tgttctctgtattgggcttcttacc

SEQ ID NO: 172351 - DNA, 25 bp, Canis familiaris
tgttccattaatttcttcagtacct

SEQ ID NO: 172352 - DNA, 25 bp, Canis familiaris
tgttgttcttattctttcaaaccat

SEQ ID NO: 172353 - DNA, 25 bp, Canis familiaris
tgttttcatatttctttcctttctg

SEQ ID NO: 172354 - DNA, 25 bp, Canis familiaris
tgttttatcatttttgtctcatatt

SEQ ID NO: 172355 - DNA, 25 bp, Canis familiaris
tgttttcacttctttttattgttct

SEQ ID NO: 172356 - DNA, 25 bp, Canis familiaris
tgttttcttaccaaattctctttct

SEQ ID NO: 172357 - DNA, 25 bp, Canis familiaris
tgttttctttcttcaaatgcttttc

SEQ ID NO: 172358 - DNA, 25 bp, Canis familiaris
tgttctattttttaagtcattccat

SEQ ID NO: 172359 - DNA, 25 bp, Canis familiaris
tgttccctatttttatccattacaa

SEQ ID NO: 172360 - DNA, 25 bp, Canis familiaris
tgttgtcctcttggaaatgccttcg

SEQ ID NO: 172361 - DNA, 25 bp, Canis familiaris
tactggcctctgtcttaagcaattc

SEQ ID NO: 172362 - DNA, 25 bp, Canis familiaris
tgatcttgtttgccatgtaacagaa

SEQ ID NO: 172363 - DNA, 25 bp, Canis familiaris
tgatctatttcacagctacacaaca

SEQ ID NO: 172364 - DNA, 25 bp, Canis familiaris
tgttccttcatgagagacacataga

SEQ ID NO: 172365 - DNA, 25 bp, Canis familiaris
tgttccctctgcttaaaacatttcc

SEQ ID NO: 172366 - DNA, 25 bp, Canis familiaris
tgttccccattaaagacctgtgatc

SEQ ID NO: 172367 - DNA, 25 bp, Canis familiaris
tgttcccaatgataaccactgtcac

SEQ ID NO: 172368 - DNA, 25 bp, Canis familiaris
tgatttcgcttgttagaccctgtgc

SEQ ID NO: 172369 - DNA, 25 bp, Canis familiaris
tgagttcccataataccctgtgtaa

SEQ ID NO: 172370 - DNA, 25 bp, Canis familiaris
tgacttactgctctacctagggtag

SEQ ID NO: 172371 - DNA, 25 bp, Canis familiaris
tgaattgagcccctacgcaagggcc

SEQ ID NO: 172372 - DNA, 25 bp, Canis familiaris
tgattctgtcacagtcccagagggc

SEQ ID NO: 172373 - DNA, 25 bp, Canis familiaris
tgattctgccagcagctcctaaacc

SEQ ID NO: 172374 - DNA, 25 bp, Canis familiaris
tgatatcccaagactctacgacacc

SEQ ID NO: 172375 - DNA, 25 bp, Canis familiaris
tgattgatccagacccagactatcc

SEQ ID NO: 172376 - DNA, 25 bp, Canis familiaris
tgttgattctgacctgtgactcacg

SEQ ID NO: 172377 - DNA, 25 bp, Canis familiaris
tgttgagaggcctatgtaccacgcg

SEQ ID NO: 172378 - DNA, 25 bp, Canis familiaris
tgataaagtctctgtgtcctggggc

SEQ ID NO: 172379 - DNA, 25 bp, Canis familiaris
tgaaaactttgctgttctgggctta

SEQ ID NO: 172380 - DNA, 25 bp, Canis familiaris
tgaagccctttgggtttggccggat

SEQ ID NO: 172381 - DNA, 25 bp, Canis familiaris
tgacaacttttgtaggaagcccgga

SEQ ID NO: 172382 - DNA, 25 bp, Canis familiaris
tgagggattcctaagtgggcccgga

SEQ ID NO: 172383 - DNA, 25 bp, Canis familiaris
tgaggtgttcccagagggaaggggc

SEQ ID NO: 172384 - DNA, 25 bp, Canis familiaris
tgagcgggctcgggaacggaaggtg

SEQ ID NO: 172385 - DNA, 25 bp, Canis familiaris
tgaaggagccgctgtcaaggaccgt

SEQ ID NO: 172386 - DNA, 25 bp, Canis familiaris
tgaaggggccggtgagccaggccct

SEQ ID NO: 172387 - DNA, 25 bp, Canis familiaris
tgaagggcccttgggcccagagacc

SEQ ID NO: 172388 - DNA, 25 bp, Canis familiaris
tgaaaaccctaaccggcaagaccat

SEQ ID NO: 172389 - DNA, 25 bp, Canis familiaris
tgataaaccaccaggggccacaaca

SEQ ID NO: 172390 - DNA, 25 bp, Canis familiaris
tgatcaaaccctgggggcacttcag

SEQ ID NO: 172391 - DNA, 25 bp, Canis familiaris
tgattacccactagtgcgtactctc

SEQ ID NO: 172392 - DNA, 25 bp, Canis familiaris
tgacttcagcccggtgcgtgaagct

SEQ ID NO: 172393 - DNA, 25 bp, Canis familiaris
tgattctcaccggggcaaacagctt

SEQ ID NO: 172394 - DNA, 25 bp, Canis familiaris
tgatatctccctgtggaaattcgag

SEQ ID NO: 172395 - DNA, 25 bp, Canis familiaris
tgattccacccatggcaaattccat

SEQ ID NO: 172396 - DNA, 25 bp, Canis familiaris
tgattccacccatggcaaattccat

SEQ ID NO: 172397 - DNA, 25 bp, Canis familiaris
tgttcaaagccaaggcctgttcctt

SEQ ID NO: 172398 - DNA, 25 bp, Canis familiaris
tgttaaggcacttggccttcctttg

SEQ ID NO: 172399 - DNA, 25 bp, Canis familiaris
tgcggattcccttggaattccattt

SEQ ID NO: 172400 - DNA, 25 bp, Canis familiaris
tcggtatccctacttcattagattc

SEQ ID NO: 172401 - DNA, 25 bp, Canis familiaris
tgagggattcctgttactaattatg

SEQ ID NO: 172402 - DNA, 25 bp, Canis familiaris
tacggttacaccttaccttgtatgg

SEQ ID NO: 172403 - DNA, 25 bp, Canis familiaris
tacggaattacacctaactgcttag

SEQ ID NO: 172404 - DNA, 25 bp, Canis familiaris
tgatctggtttcacctaaggttacc

SEQ ID NO: 172405 - DNA, 25 bp, Canis familiaris
tgttggtcttcatccttagagtcat

SEQ ID NO: 172406 - DNA, 25 bp, Canis familiaris
tgattagcttttactctttcaccat

SEQ ID NO: 172407 - DNA, 25 bp, Canis familiaris
tgttagctgtattgcattttgatca

SEQ ID NO: 172408 - DNA, 25 bp, Canis familiaris
tgattagcttgttgcatttgttgcc

SEQ ID NO: 172409 - DNA, 25 bp, Canis familiaris
tgttagcgtttggtgtgcatctgcc

SEQ ID NO: 172410 - DNA, 25 bp, Canis familiaris
tgttgtagtttggggcagtgcagga

SEQ ID NO: 172411 - DNA, 25 bp, Canis familiaris
tgttgtccttcactgtccaggggac

SEQ ID NO: 172412 - DNA, 25 bp, Canis familiaris
tgttggtcttcaggcatggcagggc

SEQ ID NO: 172413 - DNA, 25 bp, Canis familiaris
tgttgggactcatcaggaagctgca

SEQ ID NO: 172414 - DNA, 25 bp, Canis familiaris
tgttcagcaggctgttggaagccaa

SEQ ID NO: 172415 - DNA, 25 bp, Canis familiaris
tgttagctggccgtggtcaatgaca

SEQ ID NO: 172416 - DNA, 25 bp, Canis familiaris
tgttcactgtcctgtgtcagagcac

SEQ ID NO: 172417 - DNA, 25 bp, Canis familiaris
tgatctccttcatgatgttggccag

SEQ ID NO: 172418 - DNA, 25 bp, Canis familiaris
tgatctcaactacatggtgtacatg

SEQ ID NO: 172419 - DNA, 25 bp, Canis familiaris
tgttagagctctctggttgtcttcc

SEQ ID NO: 172420 - DNA, 25 bp, Canis familiaris
tgattagatttgcaggggtttccag

SEQ ID NO: 172421 - DNA, 25 bp, Canis familiaris
tgattctgtggatacccgtattccg

SEQ ID NO: 172422 - DNA, 25 bp, Canis familiaris
tgatgtcatgagctccaagcacctt

SEQ ID NO: 172423 - DNA, 25 bp, Canis familiaris
tgattgagggctccatcaactctgt

SEQ ID NO: 172424 - DNA, 25 bp, Canis familiaris
tgttcactctgccaggaactctgtt

SEQ ID NO: 172425 - DNA, 25 bp, Canis familiaris
tgttccccaacatgacggttcaatt

SEQ ID NO: 172426 - DNA, 25 bp, Canis familiaris
tgttccgcggagtgcatcggtactt

SEQ ID NO: 172427 - DNA, 25 bp, Canis familiaris
tgattcctcgggtgacttggcacct

SEQ ID NO: 172428 - DNA, 25 bp, Canis familiaris
tgatatcgccgcgctcgtcgtcgac

SEQ ID NO: 172429 - DNA, 25 bp, Canis familiaris
tgaaccacgacctgtcgactttcac

SEQ ID NO: 172430 - DNA, 25 bp, Canis familiaris
tcgaaaggacccggcgactttatat

SEQ ID NO: 172431 - DNA, 25 bp, Canis familiaris
taggtcggaggggggactgttaatg

SEQ ID NO: 172432 - DNA, 25 bp, Canis familiaris
tgacgtccgtgggggaacgttatct

SEQ ID NO: 172433 - DNA, 25 bp, Canis familiaris
tgatcgcccgtgtggcggacgggct

SEQ ID NO: 172434 - DNA, 25 bp, Canis familiaris
tgagaagatttgtgggtagaggtga

SEQ ID NO: 172435 - DNA, 25 bp, Canis familiaris
tgagagagtacaagcagggggaggg

SEQ ID NO: 172436 - DNA, 25 bp, Canis familiaris
tgagggtcaaacccagcgaggtctc

SEQ ID NO: 172437 - DNA, 25 bp, Canis familiaris
tgagacggcaacacactggagcggt

SEQ ID NO: 172438 - DNA, 25 bp, Canis familiaris
tgagtacatcaacccgttactgctg

SEQ ID NO: 172439 - DNA, 25 bp, Canis familiaris
tgatgttataaccccttaatcttgg

SEQ ID NO: 172440 - DNA, 25 bp, Canis familiaris
tgttgtatttgcctcctaaatcttc

SEQ ID NO: 172441 - DNA, 25 bp, Canis familiaris
tgttgatatctagttgctccaatac

SEQ ID NO: 172442 - DNA, 25 bp, Canis familiaris
tgttatgtgagcttttcccattctt

SEQ ID NO: 172443 - DNA, 25 bp, Canis familiaris
tgattagaggcttttcccctctgtc

SEQ ID NO: 172444 - DNA, 25 bp, Canis familiaris
tgattctcaggttgttcccagtttc

SEQ ID NO: 172445 - DNA, 25 bp, Canis familiaris
tgttgctgcagcatcagttcaccag

SEQ ID NO: 172446 - DNA, 25 bp, Canis familiaris
tgttgctcatgacccttggacagca

SEQ ID NO: 172447 - DNA, 25 bp, Canis familiaris
tgttcctgaagccactggagcagtg

SEQ ID NO: 172448 - DNA, 25 bp, Canis familiaris
tgttcccacagctctggggtcttat

SEQ ID NO: 172449 - DNA, 25 bp, Canis familiaris
tgttctcccattccttgggatctaa

SEQ ID NO: 172450 - DNA, 25 bp, Canis familiaris
tgttctctggctcttttgcaattaa

SEQ ID NO: 172451 - DNA, 25 bp, Canis familiaris
tgttacatttttattgcaattccaa

SEQ ID NO: 172452 - DNA, 25 bp, Canis familiaris
tgttactccatttatctctcaattc

SEQ ID NO: 172453 - DNA, 25 bp, Canis familiaris
tgatttccttttacctacagcattc

SEQ ID NO: 172454 - DNA, 25 bp, Canis familiaris
tgttctctctgtttggccagaagca

SEQ ID NO: 172455 - DNA, 25 bp, Canis familiaris
tgttcgcttctttagttgacagcag

SEQ ID NO: 172456 - DNA, 25 bp, Canis familiaris
tgttgccaattaaagctctgagcga

SEQ ID NO: 172457 - DNA, 25 bp, Canis familiaris
tgttcttattcagcactctggcaca

SEQ ID NO: 172458 - DNA, 25 bp, Canis familiaris
tgttgattattggttcctggcaaaa

SEQ ID NO: 172459 - DNA, 25 bp, Canis familiaris
tgacatttagggatccatggaaaaa

SEQ ID NO: 172460 - DNA, 25 bp, Canis familiaris
tgactttggtgtataagtgcaggaa

SEQ ID NO: 172461 - DNA, 25 bp, Canis familiaris
tgagtttgaattctcctgtcggagc

SEQ ID NO: 172462 - DNA, 25 bp, Canis familiaris
tgttctgtgaaatccgctgagcgga

SEQ ID NO: 172463 - DNA, 25 bp, Canis familiaris
tgttctggaacatactgctgcactt

SEQ ID NO: 172464 - DNA, 25 bp, Canis familiaris
tgttcattaccgcatcattcacaat

SEQ ID NO: 172465 - DNA, 25 bp, Canis familiaris
tgttcaatcatctctcatatctcaa

SEQ ID NO: 172466 - DNA, 25 bp, Canis familiaris
tgttcaatgtcaatgataactctga

SEQ ID NO: 172467 - DNA, 25 bp, Canis familiaris
tgttaagtcttcttactctagctcc

SEQ ID NO: 172468 - DNA, 25 bp, Canis familiaris
tgttgacgttctttgcatcttactc

SEQ ID NO: 172469 - DNA, 25 bp, Canis familiaris
tgttgactatctggcttcatctttg

SEQ ID NO: 172470 - DNA, 25 bp, Canis familiaris
tgttgcacaagcatccgatctttcc

SEQ ID NO: 172471 - DNA, 25 bp, Canis familiaris
tgttacagcggtgggtcattactcc

SEQ ID NO: 172472 - DNA, 25 bp, Canis familiaris
tgttccagagggaagagtgtcctca

SEQ ID NO: 172473 - DNA, 25 bp, Canis familiaris
tgttctcaacaaccagcagttcctg

SEQ ID NO: 172474 - DNA, 25 bp, Canis familiaris
tgttccagacaactgccaacatcac

SEQ ID NO: 172475 - DNA, 25 bp, Canis familiaris
tgattccaacaaagtccacactgct

SEQ ID NO: 172476 - DNA, 25 bp, Canis familiaris
tgatgatccgaataactacctgttt

SEQ ID NO: 172477 - DNA, 25 bp, Canis familiaris
tgattcgggacgtcttgaactcttg

SEQ ID NO: 172478 - DNA, 25 bp, Canis familiaris
tgattggggccggagtgaccctaca

SEQ ID NO: 172479 - DNA, 25 bp, Canis familiaris
tgttggggcaggaggtgcccccacc

SEQ ID NO: 172480 - DNA, 25 bp, Canis familiaris
tgttgttgcagcttgacggttccac

SEQ ID NO: 172481 - DNA, 25 bp, Canis familiaris
tgttgtctgcaatttctttcaccaa

SEQ ID NO: 172482 - DNA, 25 bp, Canis familiaris
tgttgtccaagccaggttcacacac

SEQ ID NO: 172483 - DNA, 25 bp, Canis familiaris
tgttgttcagtttggatgatgcact

SEQ ID NO: 172484 - DNA, 25 bp, Canis familiaris
tgttcatttgattttgagtgcagta

SEQ ID NO: 172485 - DNA, 25 bp, Canis familiaris
tgttcatgctttcttcagctgcagt

SEQ ID NO: 172486 - DNA, 25 bp, Canis familiaris
tgttcttttctgttcatgtgctgtt

SEQ ID NO: 172487 - DNA, 25 bp, Canis familiaris
tgttgttttcattttggctttttat

SEQ ID NO: 172488 - DNA, 25 bp, Canis familiaris
tgttgttttgagttccgttctactt

SEQ ID NO: 172489 - DNA, 25 bp, Canis familiaris
tgattgttttggtttctgttcccta

SEQ ID NO: 172490 - DNA, 25 bp, Canis familiaris
tgattgttttggtttctgttcccta

SEQ ID NO: 172491 - DNA, 25 bp, Canis familiaris
tgttgattgttttctttgctgtgca

SEQ ID NO: 172492 - DNA, 25 bp, Canis familiaris
tgttgtgtttgttccgctagtcact

SEQ ID NO: 172493 - DNA, 25 bp, Canis familiaris
tgttgctcattttaccagaagacca

SEQ ID NO: 172494 - DNA, 25 bp, Canis familiaris
tgttgccatggtaatcctgctcagt

SEQ ID NO: 172495 - DNA, 25 bp, Canis familiaris
tgatgtgagcagtggatcctccagt

SEQ ID NO: 172496 - DNA, 25 bp, Canis familiaris
tgatggtgcgcatgggccagaagga

SEQ ID NO: 172497 - DNA, 25 bp, Canis familiaris
tgatcctgccaattggctaaaaata

SEQ ID NO: 172498 - DNA, 25 bp, Canis familiaris
tgattttcataatgctgagaaaaca

SEQ ID NO: 172499 - DNA, 25 bp, Canis familiaris
tgattttcataatgctgagaaaaca

SEQ ID NO: 172500 - DNA, 25 bp, Canis familiaris
tgattaacatcaatagccgactaca

SEQ ID NO: 172501 - DNA, 25 bp, Canis familiaris
tgattctgaatcattccaacattat

SEQ ID NO: 172502 - DNA, 25 bp, Canis familiaris
tgttggctgttttccagacctatgg

SEQ ID NO: 172503 - DNA, 25 bp, Canis familiaris
tgattacttgtttctcagacctctc

SEQ ID NO: 172504 - DNA, 25 bp, Canis familiaris
tgattttctgtttgccagcaccatc

SEQ ID NO: 172505 - DNA, 25 bp, Canis familiaris
tgatatttcttctgcacaactacaa

SEQ ID NO: 172506 - DNA, 25 bp, Canis familiaris
tgattttcttcatctcatagctaaa

SEQ ID NO: 172507 - DNA, 25 bp, Canis familiaris
tgatctaacccaacttacttatatt

SEQ ID NO: 172508 - DNA, 25 bp, Canis familiaris
tgattaactactggtttcctttgtt

SEQ ID NO: 172509 - DNA, 25 bp, Canis familiaris
tgttaaaatctatcttcctttcttt

SEQ ID NO: 172510 - DNA, 25 bp, Canis familiaris
tgttgaaacagcaagatttccttct

SEQ ID NO: 172511 - DNA, 25 bp, Canis familiaris
tgttgaatatacatgtctcccttat

SEQ ID NO: 172512 - DNA, 25 bp, Canis familiaris
tgttgaacatactccatagcctcta

SEQ ID NO: 172513 - DNA, 25 bp, Canis familiaris
tgatggaacgtctctctgtcgatta

SEQ ID NO: 172514 - DNA, 25 bp, Canis familiaris
tgattgccgcgtgtttagtgttaag

SEQ ID NO: 172515 - DNA, 25 bp, Canis familiaris
tgatgaggcgggtatagtgagttta

SEQ ID NO: 172516 - DNA, 25 bp, Canis familiaris
tgttggggggcaggtgagtggtgtc

SEQ ID NO: 172517 - DNA, 25 bp, Canis familiaris
tgttggcgtgtgcacggaggatccc

SEQ ID NO: 172518 - DNA, 25 bp, Canis familiaris
tgttcgggtgcgtgtgtgtgcatgc

SEQ ID NO: 172519 - DNA, 25 bp, Canis familiaris
tgttctggcggcattgtgggcttag

SEQ ID NO: 172520 - DNA, 25 bp, Canis familiaris
tgttctggggcttttcattgtgtag

SEQ ID NO: 172521 - DNA, 25 bp, Canis familiaris
tgttcggtctgttttcattttcact

SEQ ID NO: 172522 - DNA, 25 bp, Canis familiaris
tgttcggacgcaagttcttatcccc

SEQ ID NO: 172523 - DNA, 25 bp, Canis familiaris
tgttctaattaatttattgtcttcc

SEQ ID NO: 172524 - DNA, 25 bp, Canis familiaris
tgttcaaagttattcttagttaccg

SEQ ID NO: 172525 - DNA, 25 bp, Canis familiaris
tgttctccgtctactcttaggatac

SEQ ID NO: 172526 - DNA, 25 bp, Canis familiaris
tgttgtccccgaacctgaggaaggg

SEQ ID NO: 172527 - DNA, 25 bp, Canis familiaris
tgcttaccaccagtacaaggccaag

SEQ ID NO: 172528 - DNA, 25 bp, Canis familiaris
tgattacccacttagaagatcaaag

SEQ ID NO: 172529 - DNA, 25 bp, Canis familiaris
tgatccagccaacagaaggcatcat

SEQ ID NO: 172530 - DNA, 25 bp, Canis familiaris
tgattccaccattagcagagccaac

SEQ ID NO: 172531 - DNA, 25 bp, Canis familiaris
tgttctgtccactagagtccagtta

SEQ ID NO: 172532 - DNA, 25 bp, Canis familiaris
tgttcttgagaaatggagccatgtt

SEQ ID NO: 172533 - DNA, 25 bp, Canis familiaris
tgttctatcagattgcatcggccgt

SEQ ID NO: 172534 - DNA, 25 bp, Canis familiaris
tgttgccatcaacgaccccttcatt

SEQ ID NO: 172535 - DNA, 25 bp, Canis familiaris
tgttggccactaatacaccttattc

SEQ ID NO: 172536 - DNA, 25 bp, Canis familiaris
tgttccagcatctaacacatcctta

SEQ ID NO: 172537 - DNA, 25 bp, Canis familiaris
tgttgtagctgctcacagcatcctc

SEQ ID NO: 172538 - DNA, 25 bp, Canis familiaris
tgttgtgcagtgtgcctgtcactac

SEQ ID NO: 172539 - DNA, 25 bp, Canis familiaris
tgttgtgcactaatgacttttatct

SEQ ID NO: 172540 - DNA, 25 bp, Canis familiaris
tgttgtctccagcacagtttttcta

SEQ ID NO: 172541 - DNA, 25 bp, Canis familiaris
tgttgttgccggaccagttgaacca

SEQ ID NO: 172542 - DNA, 25 bp, Canis familiaris
tttaatacgtgagcgtgctaaaagc

SEQ ID NO: 172543 - DNA, 25 bp, Canis familiaris
tattaagtttctgcagttaaaagct

SEQ ID NO: 172544 - DNA, 25 bp, Canis familiaris
tcattaatgtttggccggtcagggg

SEQ ID NO: 172545 - DNA, 25 bp, Canis familiaris
tgcagtatattgttcccaagtggct

SEQ ID NO: 172546 - DNA, 25 bp, Canis familiaris
tgcagtatgacctccactactggct

SEQ ID NO: 172547 - DNA, 25 bp, Canis familiaris
tgagggaccacctctagaggcctta

SEQ ID NO: 172548 - DNA, 25 bp, Canis familiaris
tgaggacccagtgacttgaaccatc

SEQ ID NO: 172549 - DNA, 25 bp, Canis familiaris
tgaggaacaattgcagcaacaacct

SEQ ID NO: 172550 - DNA, 25 bp, Canis familiaris
tgagagaagcatttcccaaaatttt

SEQ ID NO: 172551 - DNA, 25 bp, Canis familiaris
tgaaacgcaggtcaaattttttgga

SEQ ID NO: 172552 - DNA, 25 bp, Canis familiaris
tcaggttgggtatactttgtttggg

SEQ ID NO: 172553 - DNA, 25 bp, Canis familiaris
tactgttggtaagccttcgggggtg

SEQ ID NO: 172554 - DNA, 25 bp, Canis familiaris
tgatctttttaagctagtggggggg

SEQ ID NO: 172555 - DNA, 25 bp, Canis familiaris
tgattcttttgaacccagctgtggc

SEQ ID NO: 172556 - DNA, 25 bp, Canis familiaris
tgatagtttctgggagcctgcttgg

SEQ ID NO: 172557 - DNA, 25 bp, Canis familiaris
tgttgcttccttcgagcttgatttt

SEQ ID NO: 172558 - DNA, 25 bp, Canis familiaris
tgttcttcccttagcgttactggaa

SEQ ID NO: 172559 - DNA, 25 bp, Canis familiaris
tgttgccaccactttggcttttgga

SEQ ID NO: 172560 - DNA, 25 bp, Canis familiaris
tgttcatagcctttgtagcttggtg

SEQ ID NO: 172561 - DNA, 25 bp, Canis familiaris
tgatgccaacctcttacgtgcgcct

SEQ ID NO: 172562 - DNA, 25 bp, Canis familiaris
tgagtatgacctctttagcctgctc

SEQ ID NO: 172563 - DNA, 25 bp, Canis familiaris
tgagtatgatcctctactaacctct

SEQ ID NO: 172564 - DNA, 25 bp, Canis familiaris
tgatggaatcccataggaacgcccc

SEQ ID NO: 172565 - DNA, 25 bp, Canis familiaris
tgaggacaaccccatggtagtgccg

SEQ ID NO: 172566 - DNA, 25 bp, Canis familiaris
tgaccacccttccgagtaggatgtc

SEQ ID NO: 172567 - DNA, 25 bp, Canis familiaris
tgatctgacacagtccggttggggt

SEQ ID NO: 172568 - DNA, 25 bp, Canis familiaris
tgatctaatcctgggctaatgaagg

SEQ ID NO: 172569 - DNA, 25 bp, Canis familiaris
tgcatttagcgagtctagaagaagg

SEQ ID NO: 172570 - DNA, 25 bp, Canis familiaris
tgatcttcaggctccagaactatga

SEQ ID NO: 172571 - DNA, 25 bp, Canis familiaris
tgatattatgtctccaggatgttgg

SEQ ID NO: 172572 - DNA, 25 bp, Canis familiaris
tgatggtttatctcatggattcatg

SEQ ID NO: 172573 - DNA, 25 bp, Canis familiaris
tgatgaccgtactgtgcgtatctgg

SEQ ID NO: 172574 - DNA, 25 bp, Canis familiaris
tgagagcgactactatcgcctacgg

SEQ ID NO: 172575 - DNA, 25 bp, Canis familiaris
tgagtggacgttccacctgacggac

SEQ ID NO: 172576 - DNA, 25 bp, Canis familiaris
tgagggaagcttcaccttggacaac

SEQ ID NO: 172577 - DNA, 25 bp, Canis familiaris
tgatgggaaagttacctatggtcag

SEQ ID NO: 172578 - DNA, 25 bp, Canis familiaris
tgatgggaaaataacggattggtga

SEQ ID NO: 172579 - DNA, 25 bp, Canis familiaris
tgatggaaaagttgaaggcttctct

SEQ ID NO: 172580 - DNA, 25 bp, Canis familiaris
tgatcgacatagatatggggttgag

SEQ ID NO: 172581 - DNA, 25 bp, Canis familiaris
tgatgacatcaagaaggtggtgaag

SEQ ID NO: 172582 - DNA, 25 bp, Canis familiaris
tgatagtctcctcagtcttagcaag

SEQ ID NO: 172583 - DNA, 25 bp, Canis familiaris
tgttgatccctggacttagatgcag

SEQ ID NO: 172584 - DNA, 25 bp, Canis familiaris
tgttcttgcctggacctgaggggaa

SEQ ID NO: 172585 - DNA, 25 bp, Canis familiaris
tgttctgtggctcccacgggagtga

SEQ ID NO: 172586 - DNA, 25 bp, Canis familiaris
tgttcgtgagcccgagcagcgggga

SEQ ID NO: 172587 - DNA, 25 bp, Canis familiaris
tgttcaggcacgccagaaggatgcc

SEQ ID NO: 172588 - DNA, 25 bp, Canis familiaris
tgattcagcgacccaaggcggatga

SEQ ID NO: 172589 - DNA, 25 bp, Canis familiaris
tgttgcatggtcgcgagggatcagg

SEQ ID NO: 172590 - DNA, 25 bp, Canis familiaris
tgttgctgcagtgcccaggaagggc

SEQ ID NO: 172591 - DNA, 25 bp, Canis familiaris
tgttgctgacatccactgcgagaac

SEQ ID NO: 172592 - DNA, 25 bp, Canis familiaris
tgattgctgcctccctgggaaattc

SEQ ID NO: 172593 - DNA, 25 bp, Canis familiaris
tgatcctgggttctggagctcattc

SEQ ID NO: 172594 - DNA, 25 bp, Canis familiaris
tgttcagggacctcgagcctgtgac

SEQ ID NO: 172595 - DNA, 25 bp, Canis familiaris
tgatataaatgacccccacttgtgc

SEQ ID NO: 172596 - DNA, 25 bp, Canis familiaris
tgataaaatcacacaagcctcccac

SEQ ID NO: 172597 - DNA, 25 bp, Canis familiaris
tgatcattaaactgaagcccccaaa

SEQ ID NO: 172598 - DNA, 25 bp, Canis familiaris
tgatatataaaatccaccccaccct

SEQ ID NO: 172599 - DNA, 25 bp, Canis familiaris
tgttgtaaaatgcccactccatcag

SEQ ID NO: 172600 - DNA, 25 bp, Canis familiaris
tgatcgaaggagcgccactgactag

SEQ ID NO: 172601 - DNA, 25 bp, Canis familiaris
tgatcggggagcacacggactacaa

SEQ ID NO: 172602 - DNA, 25 bp, Canis familiaris
tgatcctgggagggacggtttttcg

SEQ ID NO: 172603 - DNA, 25 bp, Canis familiaris
tgattctggaagcaacgttctttcc

SEQ ID NO: 172604 - DNA, 25 bp, Canis familiaris
tgatgttgagaagggaaattttttt

SEQ ID NO: 172605 - DNA, 25 bp, Canis familiaris
tgattggagccagaagagcttcctg

SEQ ID NO: 172606 - DNA, 25 bp, Canis familiaris
tgattgctacacccaatagcttctc

SEQ ID NO: 172607 - DNA, 25 bp, Canis familiaris
tgattgctgccacttacaactttgc

SEQ ID NO: 172608 - DNA, 25 bp, Canis familiaris
tgatgccgtttgaaacacttctcct

SEQ ID NO: 172609 - DNA, 25 bp, Canis familiaris
tgatgccctgatcgtaacatgcttc

SEQ ID NO: 172610 - DNA, 25 bp, Canis familiaris
tgatccctaacatactgtagtagta

SEQ ID NO: 172611 - DNA, 25 bp, Canis familiaris
tgactacttaactcatttattaatg

SEQ ID NO: 172612 - DNA, 25 bp, Canis familiaris
tgttgactatatccagggcttattg

SEQ ID NO: 172613 - DNA, 25 bp, Canis familiaris
tgttgactgtcatcgtgtttccagc

SEQ ID NO: 172614 - DNA, 25 bp, Canis familiaris
tgttggtgacaactgtgccattccc

SEQ ID NO: 172615 - DNA, 25 bp, Canis familiaris
tgttgagctgaaagcgtgcgtccca

SEQ ID NO: 172616 - DNA, 25 bp, Canis familiaris
tgatagaggcagcgcctgagtccca

SEQ ID NO: 172617 - DNA, 25 bp, Canis familiaris
tgaagaactcgggggtcgtcaacgg

SEQ ID NO: 172618 - DNA, 25 bp, Canis familiaris
tgatacacccgtgtggtggccaagc

SEQ ID NO: 172619 - DNA, 25 bp, Canis familiaris
tgatattcccgtttgggaccaagaa

SEQ ID NO: 172620 - DNA, 25 bp, Canis familiaris
tgatttgctactttgggtacaccag

SEQ ID NO: 172621 - DNA, 25 bp, Canis familiaris
tgttgtgggctgtgctggttgccca

SEQ ID NO: 172622 - DNA, 25 bp, Canis familiaris
tgttggttgcaaggctgggctgccc

SEQ ID NO: 172623 - DNA, 25 bp, Canis familiaris
tgttctgttcagagggggcacttcc

SEQ ID NO: 172624 - DNA, 25 bp, Canis familiaris
tgatttctctttgaggggcacttgt

SEQ ID NO: 172625 - DNA, 25 bp, Canis familiaris
tagttacatttgaagtggacctgga

SEQ ID NO: 172626 - DNA, 25 bp, Canis familiaris
tgatttaacttgatgttttctccaa

SEQ ID NO: 172627 - DNA, 25 bp, Canis familiaris
tgttctcagtgctttgtgtgtttcc

SEQ ID NO: 172628 - DNA, 25 bp, Canis familiaris
tgatctccagactgctgtggtcatt

SEQ ID NO: 172629 - DNA, 25 bp, Canis familiaris
tgatgtctcaaaactggaccagtgg

SEQ ID NO: 172630 - DNA, 25 bp, Canis familiaris
tgagactcattacctgaacgagcag

SEQ ID NO: 172631 - DNA, 25 bp, Canis familiaris
tgagactcattacctgaacgagcag

SEQ ID NO: 172632 - DNA, 25 bp, Canis familiaris
tgattcgttacccaagcagtcagct

SEQ ID NO: 172633 - DNA, 25 bp, Canis familiaris
tgattcgatgcaactccggagacag

SEQ ID NO: 172634 - DNA, 25 bp, Canis familiaris
tgattttgcccaccgaagacattgt

SEQ ID NO: 172635 - DNA, 25 bp, Canis familiaris
tgttcttctcccatatattctttat

SEQ ID NO: 172636 - DNA, 25 bp, Canis familiaris
tgattctgcttccagttgtttcttc

SEQ ID NO: 172637 - DNA, 25 bp, Canis familiaris
tgttctgctcaacattgttcatttt

SEQ ID NO: 172638 - DNA, 25 bp, Canis familiaris
tgttccaaaggatttcattgtttta

SEQ ID NO: 172639 - DNA, 25 bp, Canis familiaris
tgttcccagcgttttttgtgtttgt

SEQ ID NO: 172640 - DNA, 25 bp, Canis familiaris
tgttccgtggttagcttttgtattc

SEQ ID NO: 172641 - DNA, 25 bp, Canis familiaris
tgattccaggttgagtttttttaat

SEQ ID NO: 172642 - DNA, 25 bp, Canis familiaris
tgatttcggtataggttctttttat

SEQ ID NO: 172643 - DNA, 25 bp, Canis familiaris
tgattttggcttaggtcctgtcctc

SEQ ID NO: 172644 - DNA, 25 bp, Canis familiaris
tgttgtgtggaagggtcttattgct

SEQ ID NO: 172645 - DNA, 25 bp, Canis familiaris
tgttggtgaattggttttgttttgt

SEQ ID NO: 172646 - DNA, 25 bp, Canis familiaris
tgttgttgaaggttttctgttgatg

SEQ ID NO: 172647 - DNA, 25 bp, Canis familiaris
tgattttgtaaattgaccttgtatt

SEQ ID NO: 172648 - DNA, 25 bp, Canis familiaris
tgattcatctgtaaaagggtctaga

SEQ ID NO: 172649 - DNA, 25 bp, Canis familiaris
tgattacagctaaaatgggcattat

SEQ ID NO: 172650 - DNA, 25 bp, Canis familiaris
tgttgactccatgaatgctctgcac

SEQ ID NO: 172651 - DNA, 25 bp, Canis familiaris
tgattcccttgaagatgctgctcct

SEQ ID NO: 172652 - DNA, 25 bp, Canis familiaris
tgatttctttgtatggctccattat

SEQ ID NO: 172653 - DNA, 25 bp, Canis familiaris
tgagttgttggtcttcatccttaga

SEQ ID NO: 172654 - DNA, 25 bp, Canis familiaris
tgagtgtggggccttttgccattga

SEQ ID NO: 172655 - DNA, 25 bp, Canis familiaris
tgattctgaaggctgtacccactgt

SEQ ID NO: 172656 - DNA, 25 bp, Canis familiaris
tgttgctcaagggtcaactctctct

SEQ ID NO: 172657 - DNA, 25 bp, Canis familiaris
tgttgtcaggcagttgcacagccct

SEQ ID NO: 172658 - DNA, 25 bp, Canis familiaris
tgttgtcagtcagtgtcagtggcct

SEQ ID NO: 172659 - DNA, 25 bp, Canis familiaris
tgttgtcgtgcacttcaggatgcgc

SEQ ID NO: 172660 - DNA, 25 bp, Canis familiaris
tgatgttcgccacttggcggctgag

SEQ ID NO: 172661 - DNA, 25 bp, Canis familiaris
tgttctgcgtgcctgttgtggcaag

SEQ ID NO: 172662 - DNA, 25 bp, Canis familiaris
tgttctggggaggtgtggccaggcc

SEQ ID NO: 172663 - DNA, 25 bp, Canis familiaris
tgttctgtcaggaggtggtggactc

SEQ ID NO: 172664 - DNA, 25 bp, Canis familiaris
tgttctgtggacaccatgtggtacc

SEQ ID NO: 172665 - DNA, 25 bp, Canis familiaris
tgttcgtcagacgtcaatgttcccc

SEQ ID NO: 172666 - DNA, 25 bp, Canis familiaris
tgttgtgttggctacactgttccca

SEQ ID NO: 172667 - DNA, 25 bp, Canis familiaris
tgttggatctgtgccagcgttgggc

SEQ ID NO: 172668 - DNA, 25 bp, Canis familiaris
tgttgagattttgtgcagttgacgc

SEQ ID NO: 172669 - DNA, 25 bp, Canis familiaris
tgttccattctttctgcgtggacca

SEQ ID NO: 172670 - DNA, 25 bp, Canis familiaris
tgttccgttcatctgaggagtccaa

SEQ ID NO: 172671 - DNA, 25 bp, Canis familiaris
tgttccagtgtaaggccgagtgcta

SEQ ID NO: 172672 - DNA, 25 bp, Canis familiaris
tgttgaagtgtggcgagtccgtgct

SEQ ID NO: 172673 - DNA, 25 bp, Canis familiaris
tgttgacagctgtctgggctcaggg

SEQ ID NO: 172674 - DNA, 25 bp, Canis familiaris
tgttgcaggctgcgcaggacaagct

SEQ ID NO: 172675 - DNA, 25 bp, Canis familiaris
tgttggacatcaagcggaaggcccc

SEQ ID NO: 172676 - DNA, 25 bp, Canis familiaris
tgttgtgacattagcctgagaggaa

SEQ ID NO: 172677 - DNA, 25 bp, Canis familiaris
tgttctgagctgtaccttgatgtgt

SEQ ID NO: 172678 - DNA, 25 bp, Canis familiaris
tgttgctgatctggacctgtatccc

SEQ ID NO: 172679 - DNA, 25 bp, Canis familiaris
tgttgttttgacaatgctctcaccc

SEQ ID NO: 172680 - DNA, 25 bp, Canis familiaris
tgttgtctattgccagatcctcaag

SEQ ID NO: 172681 - DNA, 25 bp, Canis familiaris
tgattgtaatggcctctcacatgca

SEQ ID NO: 172682 - DNA, 25 bp, Canis familiaris
tgatatctcaatctgcagccattct

SEQ ID NO: 172683 - DNA, 25 bp, Canis familiaris
tgatcactcatttctcagccaatac

SEQ ID NO: 172684 - DNA, 25 bp, Canis familiaris
tgatcatataatgctcggaatattt

SEQ ID NO: 172685 - DNA, 25 bp, Canis familiaris
tgatcttcagatggccagcttttta

SEQ ID NO: 172686 - DNA, 25 bp, Canis familiaris
tgatttgggcccctttcatgtttac

SEQ ID NO: 172687 - DNA, 25 bp, Canis familiaris
tgatttggggtccctattctgtttc

SEQ ID NO: 172688 - DNA, 25 bp, Canis familiaris
tgaactgggtttactacctgaaccg

SEQ ID NO: 172689 - DNA, 25 bp, Canis familiaris
tgaggaggtctttttacctactgcc

SEQ ID NO: 172690 - DNA, 25 bp, Canis familiaris
tgaggaggatcttacttggccacaa

SEQ ID NO: 172691 - DNA, 25 bp, Canis familiaris
tgatccaggatcatccttcccaaat

SEQ ID NO: 172692 - DNA, 25 bp, Canis familiaris
tgattcgaggcctcgatccacacaa

SEQ ID NO: 172693 - DNA, 25 bp, Canis familiaris
tgttcgggagatgctgaccacacag

SEQ ID NO: 172694 - DNA, 25 bp, Canis familiaris
tgttggccgagaggtgagcccagcc

SEQ ID NO: 172695 - DNA, 25 bp, Canis familiaris
tgttggccttgccaggagagcctgc

SEQ ID NO: 172696 - DNA, 25 bp, Canis familiaris
tgttggcattatcagttgaactgta

SEQ ID NO: 172697 - DNA, 25 bp, Canis familiaris
tgttgctgtcttctttggatctgct

SEQ ID NO: 172698 - DNA, 25 bp, Canis familiaris
tgttgcgttatcattcttttgtaaa

SEQ ID NO: 172699 - DNA, 25 bp, Canis familiaris
tgatacgtttacttttttgtagcga

SEQ ID NO: 172700 - DNA, 25 bp, Canis familiaris
tgataggtgttttatgcttttaatc

SEQ ID NO: 172701 - DNA, 25 bp, Canis familiaris
tgatatggctgctcagattgctgat

SEQ ID NO: 172702 - DNA, 25 bp, Canis familiaris
tgatcattctatcacatctgcatga

SEQ ID NO: 172703 - DNA, 25 bp, Canis familiaris
tgatcatgttgataatgctcggaat

SEQ ID NO: 172704 - DNA, 25 bp, Canis familiaris
tgatctgatatgaaatactgtggca

SEQ ID NO: 172705 - DNA, 25 bp, Canis familiaris
tgatctatgaccctagttggcacca

SEQ ID NO: 172706 - DNA, 25 bp, Canis familiaris
tgataaggcctgtgtttctctgacc

SEQ ID NO: 172707 - DNA, 25 bp, Canis familiaris
tgataaactctctttgttctcttcc

SEQ ID NO: 172708 - DNA, 25 bp, Canis familiaris
tgataatcctcatttctcatgatcc

SEQ ID NO: 172709 - DNA, 25 bp, Canis familiaris
tgatccattcatctattcacagctc

SEQ ID NO: 172710 - DNA, 25 bp, Canis familiaris
tgattcatgttggcttctccagcct

SEQ ID NO: 172711 - DNA, 25 bp, Canis familiaris
tgattgacatcagcttcgcagactc

SEQ ID NO: 172712 - DNA, 25 bp, Canis familiaris
tgatatgattcatcgtcgtacgccc

SEQ ID NO: 172713 - DNA, 25 bp, Canis familiaris
tgattttcagggtcttcacgcctgc

SEQ ID NO: 172714 - DNA, 25 bp, Canis familiaris
tgattttcagtgcttccagcaggcc

SEQ ID NO: 172715 - DNA, 25 bp, Canis familiaris
tgattacacgatgtgctctccaggc

SEQ ID NO: 172716 - DNA, 25 bp, Canis familiaris
tgattaagcagtgctttccctccgt

SEQ ID NO: 172717 - DNA, 25 bp, Canis familiaris
tgattatctggctcttttagcccca

SEQ ID NO: 172718 - DNA, 25 bp, Canis familiaris
tgatttcgagatgtcttctgtcccc

SEQ ID NO: 172719 - DNA, 25 bp, Canis familiaris
tgatagtaggagatgcccagtcccg

SEQ ID NO: 172720 - DNA, 25 bp, Canis familiaris
tgttggagggcaccctgcagtgccc

SEQ ID NO: 172721 - DNA, 25 bp, Canis familiaris
tgatatggagagccagcccctgatt

SEQ ID NO: 172722 - DNA, 25 bp, Canis familiaris
tgcatgttggggttacctttacctt

SEQ ID NO: 172723 - DNA, 25 bp, Canis familiaris
tgcatgttggggttacctttacctt

SEQ ID NO: 172724 - DNA, 25 bp, Canis familiaris
tgcatgttggggttacctttacctt

SEQ ID NO: 172725 - DNA, 25 bp, Canis familiaris
tgcatgttggggttacctttacctt

SEQ ID NO: 172726 - DNA, 25 bp, Canis familiaris
tgcatgttggggttacctttacctt

SEQ ID NO: 172727 - DNA, 25 bp, Canis familiaris
tgcatgttggggttacctttacctt

SEQ ID NO: 172728 - DNA, 25 bp, Canis familiaris
tgatttggttggctccttaacacct

SEQ ID NO: 172729 - DNA, 25 bp, Canis familiaris
tgatggggaaagccctttgaaccct

SEQ ID NO: 172730 - DNA, 25 bp, Canis familiaris
tgagggtacccccttgtgatcaaac

SEQ ID NO: 172731 - DNA, 25 bp, Canis familiaris
tgatggttgaccgtccttcggaaca

SEQ ID NO: 172732 - DNA, 25 bp, Canis familiaris
tgataattgacgattcttgccgcac

SEQ ID NO: 172733 - DNA, 25 bp, Canis familiaris
tgatcaatagtcagttccctctgcc

SEQ ID NO: 172734 - DNA, 25 bp, Canis familiaris
tgatcttctgtcatgtaaccaccac

SEQ ID NO: 172735 - DNA, 25 bp, Canis familiaris
tgatatgtttcattggcaagccaca

SEQ ID NO: 172736 - DNA, 25 bp, Canis familiaris
tgatcataatctctgacatctgccc

SEQ ID NO: 172737 - DNA, 25 bp, Canis familiaris
tgatgctactctgaaatccctcaac

SEQ ID NO: 172738 - DNA, 25 bp, Canis familiaris
tgatctgttatggcattcactccca

SEQ ID NO: 172739 - DNA, 25 bp, Canis familiaris
tgattttgcattttgcacttcctcc

SEQ ID NO: 172740 - DNA, 25 bp, Canis familiaris
tgattttattttatttccctactct

SEQ ID NO: 172741 - DNA, 25 bp, Canis familiaris
tgatacttgattttttattttccct

SEQ ID NO: 172742 - DNA, 25 bp, Canis familiaris
tgatacttcaacttatcttttgtga

SEQ ID NO: 172743 - DNA, 25 bp, Canis familiaris
tgatctcccatttttcttttatgat

SEQ ID NO: 172744 - DNA, 25 bp, Canis familiaris
tgattcctgattatctcttccttta

SEQ ID NO: 172745 - DNA, 25 bp, Canis familiaris
tgattcgtgatgactgcctttcgtc

SEQ ID NO: 172746 - DNA, 25 bp, Canis familiaris
tgatacagatgaggctccttctccc

SEQ ID NO: 172747 - DNA, 25 bp, Canis familiaris
tgatccgagaaggcacattccaagg

SEQ ID NO: 172748 - DNA, 25 bp, Canis familiaris
tgatccaggagtgagctctcgcagg

SEQ ID NO: 172749 - DNA, 25 bp, Canis familiaris
tgttgtgtcactgcagattccatgg

SEQ ID NO: 172750 - DNA, 25 bp, Canis familiaris
tgttgattcgtgatgactgcctttc

SEQ ID NO: 172751 - DNA, 25 bp, Canis familiaris
tgatattttctgattcgcctatgtc

SEQ ID NO: 172752 - DNA, 25 bp, Canis familiaris
tgatcagttgttttacctcttgtcc

SEQ ID NO: 172753 - DNA, 25 bp, Canis familiaris
tgaaatcttttcacctttttccact

SEQ ID NO: 172754 - DNA, 25 bp, Canis familiaris
tgaacttctttttcctgtttttcat

SEQ ID NO: 172755 - DNA, 25 bp, Canis familiaris
tgaaatgacgtgtttagggttttct

SEQ ID NO: 172756 - DNA, 25 bp, Canis familiaris
tgacttgaggttttcgtgtttttgt

SEQ ID NO: 172757 - DNA, 25 bp, Canis familiaris
tgatttgacgttatccttttatgac

SEQ ID NO: 172758 - DNA, 25 bp, Canis familiaris
tgattccacagcacagtgccttttc

SEQ ID NO: 172759 - DNA, 25 bp, Canis familiaris
tgttccaagaacctctctttgctga

SEQ ID NO: 172760 - DNA, 25 bp, Canis familiaris
tgttccaagccagcttttcttactc

SEQ ID NO: 172761 - DNA, 25 bp, Canis familiaris
tgatttaagccatctctcttcatta

SEQ ID NO: 172762 - DNA, 25 bp, Canis familiaris
tgatcttatatcagagtctcccatc

SEQ ID NO: 172763 - DNA, 25 bp, Canis familiaris
tgatcttgaacaccagcagtacctt

SEQ ID NO: 172764 - DNA, 25 bp, Canis familiaris
tgatctataaatcccactctctttc

SEQ ID NO: 172765 - DNA, 25 bp, Canis familiaris
tgatctataaattctagtcctttca

SEQ ID NO: 172766 - DNA, 25 bp, Canis familiaris
tgatatgattcatctctacccttta

SEQ ID NO: 172767 - DNA, 25 bp, Canis familiaris
tgatatgattcatctctaccctagc

SEQ ID NO: 172768 - DNA, 25 bp, Canis familiaris
tgatatgattcatctctaccctagc

SEQ ID NO: 172769 - DNA, 25 bp, Canis familiaris
tgatatgattcatctctaccctagc

SEQ ID NO: 172770 - DNA, 25 bp, Canis familiaris
tgttgatgtgagtcttctcctttcc

SEQ ID NO: 172771 - DNA, 25 bp, Canis familiaris
tgttgagtttgctccagtcatctcc

SEQ ID NO: 172772 - DNA, 25 bp, Canis familiaris
taagactttgacccgtctattccat

SEQ ID NO: 172773 - DNA, 25 bp, Canis familiaris
tgaggttatttctcgtcttctctga

SEQ ID NO: 172774 - DNA, 25 bp, Canis familiaris
tgaggttaggttattcctcctgccc

SEQ ID NO: 172775 - DNA, 25 bp, Canis familiaris
tgattgtgctaacttatttccccta

SEQ ID NO: 172776 - DNA, 25 bp, Canis familiaris
tgttgttagattcagtagcgccact

SEQ ID NO: 172777 - DNA, 25 bp, Canis familiaris
tccttgtaacttctgagctgaccct

SEQ ID NO: 172778 - DNA, 25 bp, Canis familiaris
tccttgtaccttggaagattccccg

SEQ ID NO: 172779 - DNA, 25 bp, Canis familiaris
tcctttaccttagaagaacccagcg

SEQ ID NO: 172780 - DNA, 25 bp, Canis familiaris
tactttctccctagaaacaaaccat

SEQ ID NO: 172781 - DNA, 25 bp, Canis familiaris
tgatctatacgcaaccggaaccaca

SEQ ID NO: 172782 - DNA, 25 bp, Canis familiaris
tgatagctcaccgacgtggataccc

SEQ ID NO: 172783 - DNA, 25 bp, Canis familiaris
tgataaccactgtcactgttagcct

SEQ ID NO: 172784 - DNA, 25 bp, Canis familiaris
tgatgtcacgccatattgtctacct

SEQ ID NO: 172785 - DNA, 25 bp, Canis familiaris
tgatgtgcagctggcagctctggct

SEQ ID NO: 172786 - DNA, 25 bp, Canis familiaris
tgatgagatgtgtctgcctgggcaa

SEQ ID NO: 172787 - DNA, 25 bp, Canis familiaris
tgatgactgcttcgtgctggacaat

SEQ ID NO: 172788 - DNA, 25 bp, Canis familiaris
tgagcatcttgctgggctgaatatg

SEQ ID NO: 172789 - DNA, 25 bp, Canis familiaris
tgagcactgagcaggcacctaatcc

SEQ ID NO: 172790 - DNA, 25 bp, Canis familiaris
tgatactagtgtgctcctgacaggg

SEQ ID NO: 172791 - DNA, 25 bp, Canis familiaris
tgatgattagcttcccacttaggtc

SEQ ID NO: 172792 - DNA, 25 bp, Canis familiaris
tgatattactgcttcctttaagttt

SEQ ID NO: 172793 - DNA, 25 bp, Canis familiaris
tgataaacctatccatatatgaatt

SEQ ID NO: 172794 - DNA, 25 bp, Canis familiaris
tgattaagccaacctgatgacaggt

SEQ ID NO: 172795 - DNA, 25 bp, Canis familiaris
tgagtcacggacacgagctcaggtc

SEQ ID NO: 172796 - DNA, 25 bp, Canis familiaris
tgatgtaggggcagctggctcagtg

SEQ ID NO: 172797 - DNA, 25 bp, Canis familiaris
tgatgtcggaagcctgttgcgcttg

SEQ ID NO: 172798 - DNA, 25 bp, Canis familiaris
tttgctggaatattttgggggttga

SEQ ID NO: 172799 - DNA, 25 bp, Canis familiaris
tgttgtctgaccttttgggggtagg

SEQ ID NO: 172800 - DNA, 25 bp, Canis familiaris
tgatcgtctacgtgttgtgctgggc

SEQ ID NO: 172801 - DNA, 25 bp, Canis familiaris
tgatcgtctgccgagatacttgtgc

SEQ ID NO: 172802 - DNA, 25 bp, Canis familiaris
tgatcatgttccagttgcttggccc

SEQ ID NO: 172803 - DNA, 25 bp, Canis familiaris
tgataggacactctgagcttgcccc

SEQ ID NO: 172804 - DNA, 25 bp, Canis familiaris
tgatatcccaccagagcctggactc

SEQ ID NO: 172805 - DNA, 25 bp, Canis familiaris
tgatttctgcccaggacttgatctc

SEQ ID NO: 172806 - DNA, 25 bp, Canis familiaris
tgattcctagccaccagtgattcca

SEQ ID NO: 172807 - DNA, 25 bp, Canis familiaris
tgttgggcaccagccatgtagtctg

SEQ ID NO: 172808 - DNA, 25 bp, Canis familiaris
tgattgatggcacaactctgggttg

SEQ ID NO: 172809 - DNA, 25 bp, Canis familiaris
tgttgggctccattctgggtataga

SEQ ID NO: 172810 - DNA, 25 bp, Canis familiaris
tgttgggctccatgcttagagtgga

SEQ ID NO: 172811 - DNA, 25 bp, Canis familiaris
tgttgacctgccactcagtgaggga

SEQ ID NO: 172812 - DNA, 25 bp, Canis familiaris
tgatctacactggttgtcatggata

SEQ ID NO: 172813 - DNA, 25 bp, Canis familiaris
tgatccagcagggtcggcagagcaa

SEQ ID NO: 172814 - DNA, 25 bp, Canis familiaris
tgatctcgagaggcacatccaagga

SEQ ID NO: 172815 - DNA, 25 bp, Canis familiaris
tgatcggtggtggcatccagagcct

SEQ ID NO: 172816 - DNA, 25 bp, Canis familiaris
tgatctcagctgtggcctgagtcct

SEQ ID NO: 172817 - DNA, 25 bp, Canis familiaris
tgatctgatgcttggagaccagccc

SEQ ID NO: 172818 - DNA, 25 bp, Canis familiaris
tgattgctgcttgggctcagaggca

SEQ ID NO: 172819 - DNA, 25 bp, Canis familiaris
tgatcccttcacttagacgcatagg

SEQ ID NO: 172820 - DNA, 25 bp, Canis familiaris
tgccgcttcgattttaccaaggggt

SEQ ID NO: 172821 - DNA, 25 bp, Canis familiaris
tgattccgcgattgatctcatccaa

SEQ ID NO: 172822 - DNA, 25 bp, Canis familiaris
tgattcctgttatctgctgcatcta

SEQ ID NO: 172823 - DNA, 25 bp, Canis familiaris
tgattcctgtgtagcacctgcaagc

SEQ ID NO: 172824 - DNA, 25 bp, Canis familiaris
tgattccctgtttcactgagagcga

SEQ ID NO: 172825 - DNA, 25 bp, Canis familiaris
tgttgcccagtttctctgttgatac

SEQ ID NO: 172826 - DNA, 25 bp, Canis familiaris
tgttgccctttgttttagatgccac

SEQ ID NO: 172827 - DNA, 25 bp, Canis familiaris
tgttgacgctttttctcatcaagac

SEQ ID NO: 172828 - DNA, 25 bp, Canis familiaris
tgatcttggttttgtctcacggtca

SEQ ID NO: 172829 - DNA, 25 bp, Canis familiaris
tgattgtggtctcaggcagccaggt

SEQ ID NO: 172830 - DNA, 25 bp, Canis familiaris
tgattggtctctcgacgacacgaat

SEQ ID NO: 172831 - DNA, 25 bp, Canis familiaris
tgattcagtctgccagaagcacccc

SEQ ID NO: 172832 - DNA, 25 bp, Canis familiaris
tgatgaaacttgcagaacccacgag

SEQ ID NO: 172833 - DNA, 25 bp, Canis familiaris
tgagaagacggtcgaacttgactat

SEQ ID NO: 172834 - DNA, 25 bp, Canis familiaris
tgagaagacggtcgaacttgactat

SEQ ID NO: 172835 - DNA, 25 bp, Canis familiaris
tgagaagacggtcgaacttgactat

SEQ ID NO: 172836 - DNA, 25 bp, Canis familiaris
tgagggggattccaacattgcctgc

SEQ ID NO: 172837 - DNA, 25 bp, Canis familiaris
tgaggggggatatgtgttgcctgcc

SEQ ID NO: 172838 - DNA, 25 bp, Canis familiaris
tgaggaggttcacactttccagcac

SEQ ID NO: 172839 - DNA, 25 bp, Canis familiaris
tgagacagggtcggtttttggaaag

SEQ ID NO: 172840 - DNA, 25 bp, Canis familiaris
tgaggcactctgagcgggtttggac

SEQ ID NO: 172841 - DNA, 25 bp, Canis familiaris
tgaggcagccgcagcaaggtaatcg

SEQ ID NO: 172842 - DNA, 25 bp, Canis familiaris
tgatcgaactgcacaccttgaaatg

SEQ ID NO: 172843 - DNA, 25 bp, Canis familiaris
tgatcgaaatcacctctcggacgac

SEQ ID NO: 172844 - DNA, 25 bp, Canis familiaris
tgagtcataatcagcatcacggaca

SEQ ID NO: 172845 - DNA, 25 bp, Canis familiaris
tgatgcccatataactaccgatccc

SEQ ID NO: 172846 - DNA, 25 bp, Canis familiaris
tgatcatccagtacttcatcctgca

SEQ ID NO: 172847 - DNA, 25 bp, Canis familiaris
tgattagcaaactacagcctgcatc

SEQ ID NO: 172848 - DNA, 25 bp, Canis familiaris
tgttgacaagatttgcctctgcaca

SEQ ID NO: 172849 - DNA, 25 bp, Canis familiaris
tgatcaggcaggaagtcccatccca

SEQ ID NO: 172850 - DNA, 25 bp, Canis familiaris
tgatcagggcagacacaacacactc

SEQ ID NO: 172851 - DNA, 25 bp, Canis familiaris
tgatgctggtcatcacagcttcagc

SEQ ID NO: 172852 - DNA, 25 bp, Canis familiaris
tgacgagtcagctaggctctgcagt

SEQ ID NO: 172853 - DNA, 25 bp, Canis familiaris
tgagagtgagcacatggttgcatga

SEQ ID NO: 172854 - DNA, 25 bp, Canis familiaris
tgatagatcatactagtcgctgcta

SEQ ID NO: 172855 - DNA, 25 bp, Canis familiaris
tgatgaagcttgcagtactctactg

SEQ ID NO: 172856 - DNA, 25 bp, Canis familiaris
tgatcaatgtcttttcagcactttg

SEQ ID NO: 172857 - DNA, 25 bp, Canis familiaris
tgatcaattccctaagccaatctac

SEQ ID NO: 172858 - DNA, 25 bp, Canis familiaris
tgatgacttccataagaactccgcc

SEQ ID NO: 172859 - DNA, 25 bp, Canis familiaris
tgatgactttttaaaacttggtctt

SEQ ID NO: 172860 - DNA, 25 bp, Canis familiaris
tgagtcttgtctataaccgtcgttc

SEQ ID NO: 172861 - DNA, 25 bp, Canis familiaris
tgagtccttgtcctaattttttcct

SEQ ID NO: 172862 - DNA, 25 bp, Canis familiaris
tgatacatttaccttttgtttttct

SEQ ID NO: 172863 - DNA, 25 bp, Canis familiaris
tgatgattttacttttttttgcttt

SEQ ID NO: 172864 - DNA, 25 bp, Canis familiaris
tgatgacttccatttcttgtttcac

SEQ ID NO: 172865 - DNA, 25 bp, Canis familiaris
tgatacgtggctgacgtgctttatc

SEQ ID NO: 172866 - DNA, 25 bp, Canis familiaris
tgatagcccactggatggcatttta

SEQ ID NO: 172867 - DNA, 25 bp, Canis familiaris
tgatgtcccagccatgttgacttta

SEQ ID NO: 172868 - DNA, 25 bp, Canis familiaris
tgatcagacctgctgtgtgaccttg

SEQ ID NO: 172869 - DNA, 25 bp, Canis familiaris
tgatcggcctgcatgaggatgacga

SEQ ID NO: 172870 - DNA, 25 bp, Canis familiaris
tgatcatgatcggctctgaggtgca

SEQ ID NO: 172871 - DNA, 25 bp, Canis familiaris
tgattgctccatagctgtggctcag

SEQ ID NO: 172872 - DNA, 25 bp, Canis familiaris
tgattgctacagatgtggcctccag

SEQ ID NO: 172873 - DNA, 25 bp, Canis familiaris
tgatatctacttggagtgttcacgg

SEQ ID NO: 172874 - DNA, 25 bp, Canis familiaris
tgctacaaagccaggtctcacggcc

SEQ ID NO: 172875 - DNA, 25 bp, Canis familiaris
tgaacctgaccaaggtggccgactc

SEQ ID NO: 172876 - DNA, 25 bp, Canis familiaris
tgagacgaaagtaggcggcgcgacc

SEQ ID NO: 172877 - DNA, 25 bp, Canis familiaris
tgagtccagaggtggcttggtacca

SEQ ID NO: 172878 - DNA, 25 bp, Canis familiaris
tgaggctcaacggggttgggtcacc

SEQ ID NO: 172879 - DNA, 25 bp, Canis familiaris
tgagggtagctcactttgggtcatt

SEQ ID NO: 172880 - DNA, 25 bp, Canis familiaris
tgattggtgatttactttttgtcgt

SEQ ID NO: 172881 - DNA, 25 bp, Canis familiaris
tgattgggattatttgtgtgtgtgt

SEQ ID NO: 172882 - DNA, 25 bp, Canis familiaris
tgatctgggattgctcttcttttgt

SEQ ID NO: 172883 - DNA, 25 bp, Canis familiaris
tgattgtacattgttcttttttttt

SEQ ID NO: 172884 - DNA, 25 bp, Canis familiaris
tgatcggctacggtttgtttccttt

SEQ ID NO: 172885 - DNA, 25 bp, Canis familiaris
tgaggactacatttttttgtcccta

SEQ ID NO: 172886 - DNA, 25 bp, Canis familiaris
tgaggcctacttcgttttagaccaa

SEQ ID NO: 172887 - DNA, 25 bp, Canis familiaris
tgaggccatacccaagtccaagaaa

SEQ ID NO: 172888 - DNA, 25 bp, Canis familiaris
tgaggtgagcactggagggatagga

SEQ ID NO: 172889 - DNA, 25 bp, Canis familiaris
tgatcgtgaccgggggtggcttatt

SEQ ID NO: 172890 - DNA, 25 bp, Canis familiaris
tgatggtctcaagggtcgggttttt

SEQ ID NO: 172891 - DNA, 25 bp, Canis familiaris
tgatcaggggggcatcgggtattgg

SEQ ID NO: 172892 - DNA, 25 bp, Canis familiaris
tgagacggggtggggggaatgggag

SEQ ID NO: 172893 - DNA, 25 bp, Canis familiaris
tgatactggtagttggtgtgaaact

SEQ ID NO: 172894 - DNA, 25 bp, Canis familiaris
tgatcgtggttgtgagtttagcctc

SEQ ID NO: 172895 - DNA, 25 bp, Canis familiaris
tgatctggggagtgcagtctccacc

SEQ ID NO: 172896 - DNA, 25 bp, Canis familiaris
tgttggtagaattcgctgctccatc

SEQ ID NO: 172897 - DNA, 25 bp, Canis familiaris
tgattggctagaactgctgccgcct

SEQ ID NO: 172898 - DNA, 25 bp, Canis familiaris
tgatgttcgagatggcatcctcctt

SEQ ID NO: 172899 - DNA, 25 bp, Canis familiaris
tgattttcagatgtcatcccactcc

SEQ ID NO: 172900 - DNA, 25 bp, Canis familiaris
tgattataactttcatctccacccc

SEQ ID NO: 172901 - DNA, 25 bp, Canis familiaris
tgattgggacttgattccacacccc

SEQ ID NO: 172902 - DNA, 25 bp, Canis familiaris
tgattgaaccctgtatccaactcca

SEQ ID NO: 172903 - DNA, 25 bp, Canis familiaris
tgagggagacccgtcttaactcaca

SEQ ID NO: 172904 - DNA, 25 bp, Canis familiaris
tgaggcacaacggtccgggactaca

SEQ ID NO: 172905 - DNA, 25 bp, Canis familiaris
tgatgcccagactccctgggcactt

SEQ ID NO: 172906 - DNA, 25 bp, Canis familiaris
tgatgcctgggacctctaaggcctt

SEQ ID NO: 172907 - DNA, 25 bp, Canis familiaris
tgttgtggtgagtctctacttgcct

SEQ ID NO: 172908 - DNA, 25 bp, Canis familiaris
tgttggagatgccctttgcatgtcc

SEQ ID NO: 172909 - DNA, 25 bp, Canis familiaris
tgagtgaaatgcttctttgggcctg

SEQ ID NO: 172910 - DNA, 25 bp, Canis familiaris
tgatgctaaattactggttaccagc

SEQ ID NO: 172911 - DNA, 25 bp, Canis familiaris
tgagatagaaaaagacgtgtccagc

SEQ ID NO: 172912 - DNA, 25 bp, Canis familiaris
tgagtcagaaaaacaccctccgaac

SEQ ID NO: 172913 - DNA, 25 bp, Canis familiaris
tgatgcggaaaaccacaccagtcta

SEQ ID NO: 172914 - DNA, 25 bp, Canis familiaris
tgagggaagggcccaaggtataaag

SEQ ID NO: 172915 - DNA, 25 bp, Canis familiaris
tgaggaacagggcccaggcctaaac

SEQ ID NO: 172916 - DNA, 25 bp, Canis familiaris
tgaggaacagagccggaaccgtcca

SEQ ID NO: 172917 - DNA, 25 bp, Canis familiaris
tgcggtcaaggggaacacccatccc

SEQ ID NO: 172918 - DNA, 25 bp, Canis familiaris
tgatttcaatggctacaacttcccc

SEQ ID NO: 172919 - DNA, 25 bp, Canis familiaris
tgatttcctgggtaacatctgccgt

SEQ ID NO: 172920 - DNA, 25 bp, Canis familiaris
tgatttgcttagcgaactctcctgt

SEQ ID NO: 172921 - DNA, 25 bp, Canis familiaris
tgagtctcctacagaactctcactc

SEQ ID NO: 172922 - DNA, 25 bp, Canis familiaris
tgaactccatagagtttgctgacac

SEQ ID NO: 172923 - DNA, 25 bp, Canis familiaris
tgagactttatgggtggctcagtca

SEQ ID NO: 172924 - DNA, 25 bp, Canis familiaris
tgagggtatcaggtggcgtggccat

SEQ ID NO: 172925 - DNA, 25 bp, Canis familiaris
tgaggactgagctctgggtggcgtt

SEQ ID NO: 172926 - DNA, 25 bp, Canis familiaris
tgatggcaaatttctggctcgggtt

SEQ ID NO: 172927 - DNA, 25 bp, Canis familiaris
tatgtaattaagttcacgggggtcg

SEQ ID NO: 172928 - DNA, 25 bp, Canis familiaris
tgatgcccttagatgtccggggctg

SEQ ID NO: 172929 - DNA, 25 bp, Canis familiaris
tagtgccttagggtacagtgggtaa

SEQ ID NO: 172930 - DNA, 25 bp, Canis familiaris
tgagtgtcttactttaccctggtaa

SEQ ID NO: 172931 - DNA, 25 bp, Canis familiaris
tgagttcttcccaaaacactatgta

SEQ ID NO: 172932 - DNA, 25 bp, Canis familiaris
tgaggtcctgccttactgaactatt

SEQ ID NO: 172933 - DNA, 25 bp, Canis familiaris
tgaggactcccattagcttttggct

SEQ ID NO: 172934 - DNA, 25 bp, Canis familiaris
tgatggtattaatggtcttttgcag

SEQ ID NO: 172935 - DNA, 25 bp, Canis familiaris
tgattgatttcaaaaccttttagga

SEQ ID NO: 172936 - DNA, 25 bp, Canis familiaris
tgaggacaattttatttttctagga

SEQ ID NO: 172937 - DNA, 25 bp, Canis familiaris
tgatggccagatgtttttgtactga

SEQ ID NO: 172938 - DNA, 25 bp, Canis familiaris
tgatcggaagccgttgcgcttgagc

SEQ ID NO: 172939 - DNA, 25 bp, Canis familiaris
tgatcaggcaattcggtcaattgtc

SEQ ID NO: 172940 - DNA, 25 bp, Canis familiaris
tgatcaggcaattcggtcaattgtc

SEQ ID NO: 172941 - DNA, 25 bp, Canis familiaris
tgatatggaatcttgcttatattta

SEQ ID NO: 172942 - DNA, 25 bp, Canis familiaris
tgataaatcagattgtgcctcttta

SEQ ID NO: 172943 - DNA, 25 bp, Canis familiaris
tgattgttcatctataccactttat

SEQ ID NO: 172944 - DNA, 25 bp, Canis familiaris
tgattttaaagcttccttcttctcc

SEQ ID NO: 172945 - DNA, 25 bp, Canis familiaris
tgagttttaaccagcattctccgct

SEQ ID NO: 172946 - DNA, 25 bp, Canis familiaris
tgagtctcctgaagaaccatacccg

SEQ ID NO: 172947 - DNA, 25 bp, Canis familiaris
tgagtgctcacttaaacactacccc

SEQ ID NO: 172948 - DNA, 25 bp, Canis familiaris
tgacctgccttacaggctacggatc

SEQ ID NO: 172949 - DNA, 25 bp, Canis familiaris
tgatccagctcttaaaatttttaca

SEQ ID NO: 172950 - DNA, 25 bp, Canis familiaris
tgatcacccgagaatattgttttac

SEQ ID NO: 172951 - DNA, 25 bp, Canis familiaris
tgatcaatccacccaaggtgtttga

SEQ ID NO: 172952 - DNA, 25 bp, Canis familiaris
tgatcagaccgcccaaaagatccca

SEQ ID NO: 172953 - DNA, 25 bp, Canis familiaris
tgatctacacaccctatgagtaccc

SEQ ID NO: 172954 - DNA, 25 bp, Canis familiaris
tgattataccaactgatgacatgag

SEQ ID NO: 172955 - DNA, 25 bp, Canis familiaris
tgatcctatccctgtgatgcagcag

SEQ ID NO: 172956 - DNA, 25 bp, Canis familiaris
tgatcttgctccaggcgagcagctc

SEQ ID NO: 172957 - DNA, 25 bp, Canis familiaris
tgatttgctccacgaggacgtttcc

SEQ ID NO: 172958 - DNA, 25 bp, Canis familiaris
tgattggctcagcggtggctgcttt

SEQ ID NO: 172959 - DNA, 25 bp, Canis familiaris
tgattgtgctactggtcatctttct

SEQ ID NO: 172960 - DNA, 25 bp, Canis familiaris
tgattggttctacgttttactgaaa

SEQ ID NO: 172961 - DNA, 25 bp, Canis familiaris
tgattggttctacgttttactgaaa

SEQ ID NO: 172962 - DNA, 25 bp, Canis familiaris
tgattggttctacgttttactgaaa

SEQ ID NO: 172963 - DNA, 25 bp, Canis familiaris
tttgttttttgtcttagaatatcca

SEQ ID NO: 172964 - DNA, 25 bp, Canis familiaris
tctttagtttttttcaagacagact

SEQ ID NO: 172965 - DNA, 25 bp, Canis familiaris
tccaaactttttttgcctgaacctg

SEQ ID NO: 172966 - DNA, 25 bp, Canis familiaris
tgaaatctatttttaggcctaactt

SEQ ID NO: 172967 - DNA, 25 bp, Canis familiaris
tgatgtgcactgattttagaccgga

SEQ ID NO: 172968 - DNA, 25 bp, Canis familiaris
tgatctctctgaatcctaagggctg

SEQ ID NO: 172969 - DNA, 25 bp, Canis familiaris
tgatcgtatatcactatagcaggat

SEQ ID NO: 172970 - DNA, 25 bp, Canis familiaris
tgatcctgtctcaccatggcaggtg

SEQ ID NO: 172971 - DNA, 25 bp, Canis familiaris
tgatccagcctggagcctagagtct

SEQ ID NO: 172972 - DNA, 25 bp, Canis familiaris
tgatccacatggcaggccaagcctc

SEQ ID NO: 172973 - DNA, 25 bp, Canis familiaris
tgatcgacactgtggccaagcagct

SEQ ID NO: 172974 - DNA, 25 bp, Canis familiaris
tgatgatgacttcacgcttcaggct

SEQ ID NO: 172975 - DNA, 25 bp, Canis familiaris
tgatggacttccactacctgatttt

SEQ ID NO: 172976 - DNA, 25 bp, Canis familiaris
tgatacacttcaaaaacactgataa

SEQ ID NO: 172977 - DNA, 25 bp, Canis familiaris
tgatgacattcctggcaatttaaga

SEQ ID NO: 172978 - DNA, 25 bp, Canis familiaris
tgatggcttctacccaaatgcaaag

SEQ ID NO: 172979 - DNA, 25 bp, Canis familiaris
tgatggctactacctataactatgc

SEQ ID NO: 172980 - DNA, 25 bp, Canis familiaris
tgatttactccactttttatgcctt

SEQ ID NO: 172981 - DNA, 25 bp, Canis familiaris
tgatgttgaacctctttgtggccgt

SEQ ID NO: 172982 - DNA, 25 bp, Canis familiaris
tgagtcggatcgcagcttggatggc

SEQ ID NO: 172983 - DNA, 25 bp, Canis familiaris
tgatgccgatgatgaagttggttct

SEQ ID NO: 172984 - DNA, 25 bp, Canis familiaris
tgatcctatgttccagtgtttcact

SEQ ID NO: 172985 - DNA, 25 bp, Canis familiaris
tgatgtctaggccacagtgattcca

SEQ ID NO: 172986 - DNA, 25 bp, Canis familiaris
tgatgtcgagtcgacgggtcctctc

SEQ ID NO: 172987 - DNA, 25 bp, Canis familiaris
tgattagagccgggggcacgcgatc

SEQ ID NO: 172988 - DNA, 25 bp, Canis familiaris
tgattgagagcttcgcggtgcagcg

SEQ ID NO: 172989 - DNA, 25 bp, Canis familiaris
tgatgctgaagctatccttgcgtgc

SEQ ID NO: 172990 - DNA, 25 bp, Canis familiaris
tgagctgcaagcttccatgctctag

SEQ ID NO: 172991 - DNA, 25 bp, Canis familiaris
tgatgcctgagcatgctctgtctgg

SEQ ID NO: 172992 - DNA, 25 bp, Canis familiaris
tgatcctgatcactgactcttggtc

SEQ ID NO: 172993 - DNA, 25 bp, Canis familiaris
tgatcctatacttcttgctttcagc

SEQ ID NO: 172994 - DNA, 25 bp, Canis familiaris
tgatcttttcttctgcatttagtta

SEQ ID NO: 172995 - DNA, 25 bp, Canis familiaris
tgatcttttttctacatttacttta

SEQ ID NO: 172996 - DNA, 25 bp, Canis familiaris
tgatttttttgctcattactgccct

SEQ ID NO: 172997 - DNA, 25 bp, Canis familiaris
tgattccttacttacatataacccc

SEQ ID NO: 172998 - DNA, 25 bp, Canis familiaris
tgatggccttaccaaattcttcacc

SEQ ID NO: 172999 - DNA, 25 bp, Canis familiaris
tgatgcgcaccttcagaaaacttcc

SEQ ID NO: 173000 - DNA, 25 bp, Canis familiaris
tgacgctctttaaaaaatatcccaa

SEQ ID NO: 173001 - DNA, 25 bp, Canis familiaris
tgaccttttccagtgcagcaaatgc

SEQ ID NO: 173002 - DNA, 25 bp, Canis familiaris
tgatgcccatttgaggacctgagtc

SEQ ID NO: 173003 - DNA, 25 bp, Canis familiaris
tgatccctcgtcaaatggccgagct

SEQ ID NO: 173004 - DNA, 25 bp, Canis familiaris
tgatgccgttgtagtaggcccgctt

SEQ ID NO: 173005 - DNA, 25 bp, Canis familiaris
tgatgcattgtgattgaaggccctt

SEQ ID NO: 173006 - DNA, 25 bp, Canis familiaris
tgatttctcattaaagtccctttct

SEQ ID NO: 173007 - DNA, 25 bp, Canis familiaris
tgatggtccgtttaccggtttctca

SEQ ID NO: 173008 - DNA, 25 bp, Canis familiaris
tgaggaccctaaacccatgaattct

SEQ ID NO: 173009 - DNA, 25 bp, Canis familiaris
tgaggtcacctgtagaccacaaaac

SEQ ID NO: 173010 - DNA, 25 bp, Canis familiaris
tgaggccaagctgatgaacgcagaa

SEQ ID NO: 173011 - DNA, 25 bp, Canis familiaris
tgatgggacagctgatgccaccgag

SEQ ID NO: 173012 - DNA, 25 bp, Canis familiaris
tgatgaaccgcttcatgccactgaa

SEQ ID NO: 173013 - DNA, 25 bp, Canis familiaris
tgaaacccaaatcactgtcagcgtc

SEQ ID NO: 173014 - DNA, 25 bp, Canis familiaris
tgagcaactccattctgtacttcag

SEQ ID NO: 173015 - DNA, 25 bp, Canis familiaris
tgatcaggtcctagcatctaccatc

SEQ ID NO: 173016 - DNA, 25 bp, Canis familiaris
tgatgatctgtgactatctatacca

SEQ ID NO: 173017 - DNA, 25 bp, Canis familiaris
tgatacttgcatgtttcctagaccc

SEQ ID NO: 173018 - DNA, 25 bp, Canis familiaris
tgattccatgatgtctgtcctcgac

SEQ ID NO: 173019 - DNA, 25 bp, Canis familiaris
tgatttctgttggctcacgtggaca

SEQ ID NO: 173020 - DNA, 25 bp, Canis familiaris
tgatctttgctcttgtcctgaggaa

SEQ ID NO: 173021 - DNA, 25 bp, Canis familiaris
tgagtcagattcttccctgggaaca

SEQ ID NO: 173022 - DNA, 25 bp, Canis familiaris
tgaggagagccagccgcataggaaa

SEQ ID NO: 173023 - DNA, 25 bp, Canis familiaris
tgaaaaggcccccaaggtagtgatc

SEQ ID NO: 173024 - DNA, 25 bp, Canis familiaris
tgaggaagatccctacttggtagtt

SEQ ID NO: 173025 - DNA, 25 bp, Canis familiaris
tgaggacgtcccacgtggtatgagc

SEQ ID NO: 173026 - DNA, 25 bp, Canis familiaris
tgagcaacttccgttttggggagaa

SEQ ID NO: 173027 - DNA, 25 bp, Canis familiaris
tgatcaattctcactttgtttcgaa

SEQ ID NO: 173028 - DNA, 25 bp, Canis familiaris
tgatacaatgccatttactggataa

SEQ ID NO: 173029 - DNA, 25 bp, Canis familiaris
tgagaaatgtcttttagctactgaa

SEQ ID NO: 173030 - DNA, 25 bp, Canis familiaris
tgagggggcttgtcatagtacgtga

SEQ ID NO: 173031 - DNA, 25 bp, Canis familiaris
tgaggtagtcttaacagcattcttg

SEQ ID NO: 173032 - DNA, 25 bp, Canis familiaris
tgaggtctggtaacaagcttttccc

SEQ ID NO: 173033 - DNA, 25 bp, Canis familiaris
tgaggtcgtgttcaactatcccact

SEQ ID NO: 173034 - DNA, 25 bp, Canis familiaris
tgaggctctgtgaatgctcacctat

SEQ ID NO: 173035 - DNA, 25 bp, Canis familiaris
tgattccatgccaagcaagccactg

SEQ ID NO: 173036 - DNA, 25 bp, Canis familiaris
tgatccaagccaagtgagccacggg

SEQ ID NO: 173037 - DNA, 25 bp, Canis familiaris
tgagatcaagccagtaaacccgcct

SEQ ID NO: 173038 - DNA, 25 bp, Canis familiaris
tcgatcaggcacatcaagaagtacg

SEQ ID NO: 173039 - DNA, 25 bp, Canis familiaris
tgagatcagtgctccaagataataa

SEQ ID NO: 173040 - DNA, 25 bp, Canis familiaris
tgagatgaggctgctccctaatgca

SEQ ID NO: 173041 - DNA, 25 bp, Canis familiaris
tgaggaagtgctacacccaacagca

SEQ ID NO: 173042 - DNA, 25 bp, Canis familiaris
tgagaggcagtgagagcccagccag

SEQ ID NO: 173043 - DNA, 25 bp, Canis familiaris
tgagaggctcttaactccgggaaac

SEQ ID NO: 173044 - DNA, 25 bp, Canis familiaris
tgagttgcaatttccctcgggatgg

SEQ ID NO: 173045 - DNA, 25 bp, Canis familiaris
tgagggcacttctgtcacaggtgat

SEQ ID NO: 173046 - DNA, 25 bp, Canis familiaris
tgaggccacatccattctagggtgc

SEQ ID NO: 173047 - DNA, 25 bp, Canis familiaris
tgagctgtgacagttcctgggggca

SEQ ID NO: 173048 - DNA, 25 bp, Canis familiaris
tgagtgtacacctttgggtctgagt

SEQ ID NO: 173049 - DNA, 25 bp, Canis familiaris
tgaggcaacccctcaggatctggac

SEQ ID NO: 173050 - DNA, 25 bp, Canis familiaris
tgagccgacgcccgagaaaaggtgc

SEQ ID NO: 173051 - DNA, 25 bp, Canis familiaris
tgacggggctcccagagaacgtgga

SEQ ID NO: 173052 - DNA, 25 bp, Canis familiaris
tgaggcggccgacggagaacgtggc

SEQ ID NO: 173053 - DNA, 25 bp, Canis familiaris
tgaacgagccggtgaaatccctcca

SEQ ID NO: 173054 - DNA, 25 bp, Canis familiaris
tgatacgagcccggtgaagatccct

SEQ ID NO: 173055 - DNA, 25 bp, Canis familiaris
tgatcaccaaccgagagagacaccc

SEQ ID NO: 173056 - DNA, 25 bp, Canis familiaris
tgatcccagcatcccgggatcacac

SEQ ID NO: 173057 - DNA, 25 bp, Canis familiaris
tgatagccgtcgtggggcagatctc

SEQ ID NO: 173058 - DNA, 25 bp, Canis familiaris
tgatggaattctgggcgctgggacc

SEQ ID NO: 173059 - DNA, 25 bp, Canis familiaris
tgatggcatttgtggccgggcttac

SEQ ID NO: 173060 - DNA, 25 bp, Canis familiaris
tgaggctttctgggccatgtggtct

SEQ ID NO: 173061 - DNA, 25 bp, Canis familiaris
tgaggattggtgggctactgggttg

SEQ ID NO: 173062 - DNA, 25 bp, Canis familiaris
tgatgaagctccgggtactggtggt

SEQ ID NO: 173063 - DNA, 25 bp, Canis familiaris
tgatgtcacctctggaaaggagttt

SEQ ID NO: 173064 - DNA, 25 bp, Canis familiaris
tgatgcccccgacagagaggatgtg

SEQ ID NO: 173065 - DNA, 25 bp, Canis familiaris
tgatgctcgccagggggaaggggcc

SEQ ID NO: 173066 - DNA, 25 bp, Canis familiaris
tgatgaagccagcagtgggccgggc

SEQ ID NO: 173067 - DNA, 25 bp, Canis familiaris
tgaggctgcaggcttgaggccaggg

SEQ ID NO: 173068 - DNA, 25 bp, Canis familiaris
tgatgcctcaggccaacagtgctat

SEQ ID NO: 173069 - DNA, 25 bp, Canis familiaris
tgatattcaaggaacagcgtctgtt

SEQ ID NO: 173070 - DNA, 25 bp, Canis familiaris
tgacttccagggacagctctcgaat

SEQ ID NO: 173071 - DNA, 25 bp, Canis familiaris
tgatcttccggcaacagctggaaga

SEQ ID NO: 173072 - DNA, 25 bp, Canis familiaris
tgaggccatgattaagagggacggc

SEQ ID NO: 173073 - DNA, 25 bp, Canis familiaris
tgaggactttgtggaggggctgcgt

SEQ ID NO: 173074 - DNA, 25 bp, Canis familiaris
tgaggagtggttaaagggccgtgcc

SEQ ID NO: 173075 - DNA, 25 bp, Canis familiaris
tgatggtgtggttaccgggggtgtt

SEQ ID NO: 173076 - DNA, 25 bp, Canis familiaris
tgatgggctggtaaccctggggact

SEQ ID NO: 173077 - DNA, 25 bp, Canis familiaris
tgatagcctggggacctctaaggcc

SEQ ID NO: 173078 - DNA, 25 bp, Canis familiaris
tgaggccttggagcctccagacact

SEQ ID NO: 173079 - DNA, 25 bp, Canis familiaris
tgaggccatgtgcacctaaatacac

SEQ ID NO: 173080 - DNA, 25 bp, Canis familiaris
tgagggcactagtctccaggaacat

SEQ ID NO: 173081 - DNA, 25 bp, Canis familiaris
tgaggagcactcaaacacctaaccc

SEQ ID NO: 173082 - DNA, 25 bp, Canis familiaris
tgagggccgctgaacaacaaacgct

SEQ ID NO: 173083 - DNA, 25 bp, Canis familiaris
tgaggtcatcggaatcccaaccgct

SEQ ID NO: 173084 - DNA, 25 bp, Canis familiaris
tgagttcagggaatcctcacagccc

SEQ ID NO: 173085 - DNA, 25 bp, Canis familiaris
tgatttctgggtggcacacagcccc

SEQ ID NO: 173086 - DNA, 25 bp, Canis familiaris
tgatatgctcgtgtccacaaggggc

SEQ ID NO: 173087 - DNA, 25 bp, Canis familiaris
tgatatctcggatacaatagaggca

SEQ ID NO: 173088 - DNA, 25 bp, Canis familiaris
tgatttctgatgtaactttgactaa

SEQ ID NO: 173089 - DNA, 25 bp, Canis familiaris
tgatgtttgcattttatttcagtaa

SEQ ID NO: 173090 - DNA, 25 bp, Canis familiaris
tgatttttcctattctgccagtagc

SEQ ID NO: 173091 - DNA, 25 bp, Canis familiaris
tgatggttatctagttcccagtcct

SEQ ID NO: 173092 - DNA, 25 bp, Canis familiaris
tgatcattttctattgtccaaccat

SEQ ID NO: 173093 - DNA, 25 bp, Canis familiaris
tgatcttcttggacagtttaacctg

SEQ ID NO: 173094 - DNA, 25 bp, Canis familiaris
tgatagtctctgctcacatttacca

SEQ ID NO: 173095 - DNA, 25 bp, Canis familiaris
tgatatgattttccaatctctaccc

SEQ ID NO: 173096 - DNA, 25 bp, Canis familiaris
tgatctatgtatttctttctgacta

SEQ ID NO: 173097 - DNA, 25 bp, Canis familiaris
tgatttgttgtcctttgctactgta

SEQ ID NO: 173098 - DNA, 25 bp, Canis familiaris
tgatgtttgtgtctgtgttctgctt

SEQ ID NO: 173099 - DNA, 25 bp, Canis familiaris
tgatgctgtcaggtttgtgtcctct

SEQ ID NO: 173100 - DNA, 25 bp, Canis familiaris
tgatgccaaggactttctccacatt

SEQ ID NO: 173101 - DNA, 25 bp, Canis familiaris
tgatcaataggacctcctctgcact

SEQ ID NO: 173102 - DNA, 25 bp, Canis familiaris
tgatcacatggatccagcacctgat

SEQ ID NO: 173103 - DNA, 25 bp, Canis familiaris
tgatacacagtattgccacctgaac

SEQ ID NO: 173104 - DNA, 25 bp, Canis familiaris
tgatacaagtattgccaccctgaac

SEQ ID NO: 173105 - DNA, 25 bp, Canis familiaris
tgatcaaagataatgcacccagcag

SEQ ID NO: 173106 - DNA, 25 bp, Canis familiaris
tgatagaagacattgcattccagaa

SEQ ID NO: 173107 - DNA, 25 bp, Canis familiaris
tgatgaacagaccgctgtccggtgc

SEQ ID NO: 173108 - DNA, 25 bp, Canis familiaris
tgataactacttcaactctgctgcc

SEQ ID NO: 173109 - DNA, 25 bp, Canis familiaris
tgataacgggtcgaactctccccgt

SEQ ID NO: 173110 - DNA, 25 bp, Canis familiaris
tgataacgtgggcaacctgcacttc

SEQ ID NO: 173111 - DNA, 25 bp, Canis familiaris
tgataatcagtttccaaggcacact

SEQ ID NO: 173112 - DNA, 25 bp, Canis familiaris
tgagaggtgttaccaaagccctttt

SEQ ID NO: 173113 - DNA, 25 bp, Canis familiaris
tgagtgaagttgatgaacacctttc

SEQ ID NO: 173114 - DNA, 25 bp, Canis familiaris
tgaggcttttaaatctcaccctctc

SEQ ID NO: 173115 - DNA, 25 bp, Canis familiaris
tgatgtgcttgtgaccattacctgc

SEQ ID NO: 173116 - DNA, 25 bp, Canis familiaris
tgaggagttgcggccattaccggtg

SEQ ID NO: 173117 - DNA, 25 bp, Canis familiaris
tgatgggtcgggggacaccgagtcc

SEQ ID NO: 173118 - DNA, 25 bp, Canis familiaris
tgagggctagaagggagaccccgac

SEQ ID NO: 173119 - DNA, 25 bp, Canis familiaris
tgagggctcaagtgtggagcccggg

SEQ ID NO: 173120 - DNA, 25 bp, Canis familiaris
tgagtggctcaacggtttggcaccc

SEQ ID NO: 173121 - DNA, 25 bp, Canis familiaris
tgagagtgccatgtgaggggccccc

SEQ ID NO: 173122 - DNA, 25 bp, Canis familiaris
tgatggtactacaaggtggggccct

SEQ ID NO: 173123 - DNA, 25 bp, Canis familiaris
tgatttcctacagtgttggttcctc

SEQ ID NO: 173124 - DNA, 25 bp, Canis familiaris
tgatttcctatagtctcatccttgc

SEQ ID NO: 173125 - DNA, 25 bp, Canis familiaris
tgatgttgctcttcatgtttctttg

SEQ ID NO: 173126 - DNA, 25 bp, Canis familiaris
tgatgtgtgcttttgtctaagtatg

SEQ ID NO: 173127 - DNA, 25 bp, Canis familiaris
tgatgattcattattcccgtacgtc

SEQ ID NO: 173128 - DNA, 25 bp, Canis familiaris
tgatatgttgtagtctctcactttc

SEQ ID NO: 173129 - DNA, 25 bp, Canis familiaris
tgagatgcctgtgttctctttgtcg

SEQ ID NO: 173130 - DNA, 25 bp, Canis familiaris
tgatagctcattagttctgtgctgg

SEQ ID NO: 173131 - DNA, 25 bp, Canis familiaris
tgatggtcagttaactatgaagagt

SEQ ID NO: 173132 - DNA, 25 bp, Canis familiaris
tgaggacattctatgctctaacatg

SEQ ID NO: 173133 - DNA, 25 bp, Canis familiaris
tgatgggatcatccttcctggcaaa

SEQ ID NO: 173134 - DNA, 25 bp, Canis familiaris
tgatgggatcatccttcctggcaaa

SEQ ID NO: 173135 - DNA, 25 bp, Canis familiaris
tgatgggatcatccttcctggcaaa

SEQ ID NO: 173136 - DNA, 25 bp, Canis familiaris
tgatgggatcatccttcctggcaaa

SEQ ID NO: 173137 - DNA, 25 bp, Canis familiaris
tgatttgctgctccatctcaaggaa

SEQ ID NO: 173138 - DNA, 25 bp, Canis familiaris
tgatatatgtgccaatgcccactcc

SEQ ID NO: 173139 - DNA, 25 bp, Canis familiaris
tgataatggacaagctgctgcccgc

SEQ ID NO: 173140 - DNA, 25 bp, Canis familiaris
tgatgacaggccatgcctgctacct

SEQ ID NO: 173141 - DNA, 25 bp, Canis familiaris
tgatagcattgctttcgtgtaaatt

SEQ ID NO: 173142 - DNA, 25 bp, Canis familiaris
tgatcacttctctgctcattaatat

SEQ ID NO: 173143 - DNA, 25 bp, Canis familiaris
tgatgctgctttgcctgatgtaaat

SEQ ID NO: 173144 - DNA, 25 bp, Canis familiaris
tgatgtttgccccatatgctattct

SEQ ID NO: 173145 - DNA, 25 bp, Canis familiaris
tgaggatatgcccgattctgactgt

SEQ ID NO: 173146 - DNA, 25 bp, Canis familiaris
tgaggacgcggccaagctggccgtc

SEQ ID NO: 173147 - DNA, 25 bp, Canis familiaris
tgaggcagctgtgggcaactgtgca

SEQ ID NO: 173148 - DNA, 25 bp, Canis familiaris
tgatgagcacttgggctacttccac

SEQ ID NO: 173149 - DNA, 25 bp, Canis familiaris
tgatgagccgaccagaactgcacca

SEQ ID NO: 173150 - DNA, 25 bp, Canis familiaris
tgatagaccacacacaatgctccat

SEQ ID NO: 173151 - DNA, 25 bp, Canis familiaris
tgatgaggctcagcaactctgtcca

SEQ ID NO: 173152 - DNA, 25 bp, Canis familiaris
tgatgctgaccagatccttgtcttt

SEQ ID NO: 173153 - DNA, 25 bp, Canis familiaris
tgatgccccaggacacagagacttt

SEQ ID NO: 173154 - DNA, 25 bp, Canis familiaris
tgatgggggggtgggacttgttttg

SEQ ID NO: 173155 - DNA, 25 bp, Canis familiaris
tgatgtgggggcagggaggttatct

SEQ ID NO: 173156 - DNA, 25 bp, Canis familiaris
tgatggggttggtgctgagggttct

SEQ ID NO: 173157 - DNA, 25 bp, Canis familiaris
tgatgcgggtctgggactggggtat

SEQ ID NO: 173158 - DNA, 25 bp, Canis familiaris
tgacaaaacgggcctggtggaattt

SEQ ID NO: 173159 - DNA, 25 bp, Canis familiaris
tgaagggtcggtccggtgtacaact

SEQ ID NO: 173160 - DNA, 25 bp, Canis familiaris
tgaagggtaacgtgccgtcacaacc

SEQ ID NO: 173161 - DNA, 25 bp, Canis familiaris
tgaggcggtataaggcatgcacgtg

SEQ ID NO: 173162 - DNA, 25 bp, Canis familiaris
tgaggccaagtggcaggctcctgat

SEQ ID NO: 173163 - DNA, 25 bp, Canis familiaris
tgaggccaagttgttaatatatttc

SEQ ID NO: 173164 - DNA, 25 bp, Canis familiaris
tgaggccccttcacttagtaaatgg

SEQ ID NO: 173165 - DNA, 25 bp, Canis familiaris
tgccccccttaacttgaggaaagag

SEQ ID NO: 173166 - DNA, 25 bp, Canis familiaris
tgatcccctcatcaaaggggaatga

SEQ ID NO: 173167 - DNA, 25 bp, Canis familiaris
tgatccacccaccggaggaggaaaa

SEQ ID NO: 173168 - DNA, 25 bp, Canis familiaris
tgatccgcgccatggagacgctaaa

SEQ ID NO: 173169 - DNA, 25 bp, Canis familiaris
tgatcatcgccacttggatgctctc

SEQ ID NO: 173170 - DNA, 25 bp, Canis familiaris
tgatgtgtgctactatgccagccgc

SEQ ID NO: 173171 - DNA, 25 bp, Canis familiaris
tgatggtgcactctgcacatgcgca

SEQ ID NO: 173172 - DNA, 25 bp, Canis familiaris
tgatggcgactggccagtcagcctt

SEQ ID NO: 173173 - DNA, 25 bp, Canis familiaris
tgatgggacggattgctacactcgc

SEQ ID NO: 173174 - DNA, 25 bp, Canis familiaris
tgatgagtagccgacctgagaccgt

SEQ ID NO: 173175 - DNA, 25 bp, Canis familiaris
tgatggatgagggaccgcgacgttc

SEQ ID NO: 173176 - DNA, 25 bp, Canis familiaris
tgatgcgtgagatgtcctgagcctt

SEQ ID NO: 173177 - DNA, 25 bp, Canis familiaris
tgatggccagattgtctgctgcctt

SEQ ID NO: 173178 - DNA, 25 bp, Canis familiaris
tgatgcgtgcagtggcgctgtttgt

SEQ ID NO: 173179 - DNA, 25 bp, Canis familiaris
tgatatgtcagcaggccgtgtttcc

SEQ ID NO: 173180 - DNA, 25 bp, Canis familiaris
tgatctgtgactcgtacgtgcgttc

SEQ ID NO: 173181 - DNA, 25 bp, Canis familiaris
tgatcctgaggactgaccactgttc

SEQ ID NO: 173182 - DNA, 25 bp, Canis familiaris
tgatgcaggaggctcgctcctgtcc

SEQ ID NO: 173183 - DNA, 25 bp, Canis familiaris
tgagagagaggccacacacagttcg

SEQ ID NO: 173184 - DNA, 25 bp, Canis familiaris
tgagtgaagcttgcccagattcggt

SEQ ID NO: 173185 - DNA, 25 bp, Canis familiaris
tgaggagagctagccctagcctggc

SEQ ID NO: 173186 - DNA, 25 bp, Canis familiaris
tgaggcaggcactcagactatccga

SEQ ID NO: 173187 - DNA, 25 bp, Canis familiaris
tgaggtggcacacagacctttcttt

SEQ ID NO: 173188 - DNA, 25 bp, Canis familiaris
tgaggggccattggaccccctaaat

SEQ ID NO: 173189 - DNA, 25 bp, Canis familiaris
tgagggatgcgattggacaaccatt

SEQ ID NO: 173190 - DNA, 25 bp, Canis familiaris
tgatgtgcctctgtggaactcttta

SEQ ID NO: 173191 - DNA, 25 bp, Canis familiaris
tgatgtcctcgtagaagcactgctt

SEQ ID NO: 173192 - DNA, 25 bp, Canis familiaris
tgatgacacatggtaactgcacttg

SEQ ID NO: 173193 - DNA, 25 bp, Canis familiaris
tgagcagcactcatagaccaggtat

SEQ ID NO: 173194 - DNA, 25 bp, Canis familiaris
tgagagacgctaagtgacacagtat

SEQ ID NO: 173195 - DNA, 25 bp, Canis familiaris
tgatgtgatgcctgttgagtcagat

SEQ ID NO: 173196 - DNA, 25 bp, Canis familiaris
tgatggcatgctcagctaaggctgt

SEQ ID NO: 173197 - DNA, 25 bp, Canis familiaris
tgatgccagctggagcagcacggcc

SEQ ID NO: 173198 - DNA, 25 bp, Canis familiaris
tgaccagtgtcaacgggcaaccgaa

SEQ ID NO: 173199 - DNA, 25 bp, Canis familiaris
tgacgagttctcttaggattgccga

SEQ ID NO: 173200 - DNA, 25 bp, Canis familiaris
tgaggagtttcttaaaagttcataa

SEQ ID NO: 173201 - DNA, 25 bp, Canis familiaris
tgaggttgcccttgaactactttaa

SEQ ID NO: 173202 - DNA, 25 bp, Canis familiaris
tgaggtgctcccttgaaagtcttgc

SEQ ID NO: 173203 - DNA, 25 bp, Canis familiaris
tgagtgacctcccgagatggttctc

SEQ ID NO: 173204 - DNA, 25 bp, Canis familiaris
tgatctcagcccttggacatttttc

SEQ ID NO: 173205 - DNA, 25 bp, Canis familiaris
tgatgccagtcccttgtttatggtt

SEQ ID NO: 173206 - DNA, 25 bp, Canis familiaris
tgatgccagctatcttgcttctgaa

SEQ ID NO: 173207 - DNA, 25 bp, Canis familiaris
tgatgaccatgcactcgttagaacc

SEQ ID NO: 173208 - DNA, 25 bp, Canis familiaris
tgatgacccagagcacttaggcgcc

SEQ ID NO: 173209 - DNA, 25 bp, Canis familiaris
tgatgaccaagggcctcgatgacca

SEQ ID NO: 173210 - DNA, 25 bp, Canis familiaris
tgatgacatgaacctctccgagtcc

SEQ ID NO: 173211 - DNA, 25 bp, Canis familiaris
tgatgacatacatctgcctgcgtgt

SEQ ID NO: 173212 - DNA, 25 bp, Canis familiaris
tgatgtgatccatccactcaatcac

SEQ ID NO: 173213 - DNA, 25 bp, Canis familiaris
tgatgtacaaattgcactgaacaat

SEQ ID NO: 173214 - DNA, 25 bp, Canis familiaris
tgatgtggaatcacagctgcagtga

SEQ ID NO: 173215 - DNA, 25 bp, Canis familiaris
tgatctggagacacagcgccaggtc

SEQ ID NO: 173216 - DNA, 25 bp, Canis familiaris
tgatgtggagatccgggctgagggc

SEQ ID NO: 173217 - DNA, 25 bp, Canis familiaris
tgatgcggatgaacggccagccgcc

SEQ ID NO: 173218 - DNA, 25 bp, Canis familiaris
tgatgctggatagggacgtcctgcg

SEQ ID NO: 173219 - DNA, 25 bp, Canis familiaris
tgatgggcaacgtggtcctgtggaa

SEQ ID NO: 173220 - DNA, 25 bp, Canis familiaris
tgagggcagaagttgttctaaggaa

SEQ ID NO: 173221 - DNA, 25 bp, Canis familiaris
tgagtggaaagctatgtcggaagta

SEQ ID NO: 173222 - DNA, 25 bp, Canis familiaris
tgagggagcctgatgttgcggttac

SEQ ID NO: 173223 - DNA, 25 bp, Canis familiaris
tgaggttgcctgatgatccggggaa

SEQ ID NO: 173224 - DNA, 25 bp, Canis familiaris
tgaggtggagcggctgacctgtgag

SEQ ID NO: 173225 - DNA, 25 bp, Canis familiaris
tgaggggccgagatgcggtgaccca

SEQ ID NO: 173226 - DNA, 25 bp, Canis familiaris
tgaggggccaacatgcctggagacc

SEQ ID NO: 173227 - DNA, 25 bp, Canis familiaris
tgagggtccagactggacggaagcc

SEQ ID NO: 173228 - DNA, 25 bp, Canis familiaris
tgaggcagtctcgtcaaacggtacc

SEQ ID NO: 173229 - DNA, 25 bp, Canis familiaris
tgactggtgccttatggaccgtacc

SEQ ID NO: 173230 - DNA, 25 bp, Canis familiaris
tgatgtgggtcctgggccagaaccc

SEQ ID NO: 173231 - DNA, 25 bp, Canis familiaris
tgaggcagggcctgggcttcatatc

SEQ ID NO: 173232 - DNA, 25 bp, Canis familiaris
tgaggagtgggctggtggtcttccc

SEQ ID NO: 173233 - DNA, 25 bp, Canis familiaris
tgatggaaggggccctgttcttcct

SEQ ID NO: 173234 - DNA, 25 bp, Canis familiaris
tgagggggacgacgtatcctgacca

SEQ ID NO: 173235 - DNA, 25 bp, Canis familiaris
tgagggatagacaggcctccgtcca

SEQ ID NO: 173236 - DNA, 25 bp, Canis familiaris
tgaggagaaacaaagccccctgcag

SEQ ID NO: 173237 - DNA, 25 bp, Canis familiaris
tgagggacaaagcagccacccatgg

SEQ ID NO: 173238 - DNA, 25 bp, Canis familiaris
tgatgggaaatgccgacgacgcccc

SEQ ID NO: 173239 - DNA, 25 bp, Canis familiaris
tgaggcaggaaccaacgattcccca

SEQ ID NO: 173240 - DNA, 25 bp, Canis familiaris
tgaggctgcgaaggcagatgcgatt

SEQ ID NO: 173241 - DNA, 25 bp, Canis familiaris
tgaggccgaagtggagcagctgttg

SEQ ID NO: 173242 - DNA, 25 bp, Canis familiaris
tgaggcgagaaggtgcaatcattat

SEQ ID NO: 173243 - DNA, 25 bp, Canis familiaris
tgagggaacacttcattcaaatgat

SEQ ID NO: 173244 - DNA, 25 bp, Canis familiaris
tgatgagccacaagttcataagaat

SEQ ID NO: 173245 - DNA, 25 bp, Canis familiaris
tgaggcccaggtccatacagagtga

SEQ ID NO: 173246 - DNA, 25 bp, Canis familiaris
tgaggccttggtgtcacagcttaca

SEQ ID NO: 173247 - DNA, 25 bp, Canis familiaris
tgaggccttgggcaagccacttaac

SEQ ID NO: 173248 - DNA, 25 bp, Canis familiaris
tgatgcccttctcaaagccaaagaa

SEQ ID NO: 173249 - DNA, 25 bp, Canis familiaris
tgactcacattaaaccaccaaaaaa

SEQ ID NO: 173250 - DNA, 25 bp, Canis familiaris
tgactacattacaacgggccaggaa

SEQ ID NO: 173251 - DNA, 25 bp, Canis familiaris
tgaggaatcccaagggcccggaaag

SEQ ID NO: 173252 - DNA, 25 bp, Canis familiaris
tgaggaacatccagaggccacgtgg

SEQ ID NO: 173253 - DNA, 25 bp, Canis familiaris
tgaggacgacacagatggctccgag

SEQ ID NO: 173254 - DNA, 25 bp, Canis familiaris
tgaggagtagccagtgcctaccagg

SEQ ID NO: 173255 - DNA, 25 bp, Canis familiaris
tgaggagattgagagcgccttccgg

SEQ ID NO: 173256 - DNA, 25 bp, Canis familiaris
tgagcgtgtcatgtagggcgttcgg

SEQ ID NO: 173257 - DNA, 25 bp, Canis familiaris
tgaggtgtctttgtgggaggggtgg

SEQ ID NO: 173258 - DNA, 25 bp, Canis familiaris
tgagggtttttttggagaggcagga

SEQ ID NO: 173259 - DNA, 25 bp, Canis familiaris
tgatgttttttttgtgggcaccaga

SEQ ID NO: 173260 - DNA, 25 bp, Canis familiaris
tgatgtgagtggtttcgtggacccg

SEQ ID NO: 173261 - DNA, 25 bp, Canis familiaris
tgatgtttgatgaccgcgtggacgc

SEQ ID NO: 173262 - DNA, 25 bp, Canis familiaris
tgaatctggtaggcggggaccctta

SEQ ID NO: 173263 - DNA, 25 bp, Canis familiaris
tgactctgaaccgggtggcaccggc

SEQ ID NO: 173264 - DNA, 25 bp, Canis familiaris
tgcggctaaccgggggccaaatgaa

SEQ ID NO: 173265 - DNA, 25 bp, Canis familiaris
tccgtaatcggagttggctaagcag

SEQ ID NO: 173266 - DNA, 25 bp, Canis familiaris
tttggagccgggttggtacagcagt

SEQ ID NO: 173267 - DNA, 25 bp, Canis familiaris
tccagaacccgggtttggcagcgac

SEQ ID NO: 173268 - DNA, 25 bp, Canis familiaris
tgacacatacccggattttccaggg

SEQ ID NO: 173269 - DNA, 25 bp, Canis familiaris
tgaactcaacctagtttccaactgg

SEQ ID NO: 173270 - DNA, 25 bp, Canis familiaris
tgagactaaaccattcctcactgct

SEQ ID NO: 173271 - DNA, 25 bp, Canis familiaris
tgatgctcttaattccattactccg

SEQ ID NO: 173272 - DNA, 25 bp, Canis familiaris
tgatgtttcaacgcaaaccgctggg

SEQ ID NO: 173273 - DNA, 25 bp, Canis familiaris
tgactctttaccctacctagtgggc

SEQ ID NO: 173274 - DNA, 25 bp, Canis familiaris
tgacctctcgacagtttccgtgagg

SEQ ID NO: 173275 - DNA, 25 bp, Canis familiaris
tgatccttcaactgtaaatggtgca

SEQ ID NO: 173276 - DNA, 25 bp, Canis familiaris
tgacctttaggtaaatgtggatgac

SEQ ID NO: 173277 - DNA, 25 bp, Canis familiaris
tgaatctcttctcttaagggtcctg

SEQ ID NO: 173278 - DNA, 25 bp, Canis familiaris
tgagtccttttgtgaatacgtcttg

SEQ ID NO: 173279 - DNA, 25 bp, Canis familiaris
tgagtcctttttcgaggatcccttg

SEQ ID NO: 173280 - DNA, 25 bp, Canis familiaris
tgagtagggtttcattgcccacctg

SEQ ID NO: 173281 - DNA, 25 bp, Canis familiaris
tgagtagggcatcaggtttctccac

SEQ ID NO: 173282 - DNA, 25 bp, Canis familiaris
tgaggcgggatactggactcttctt

SEQ ID NO: 173283 - DNA, 25 bp, Canis familiaris
tgaggggtttctcatgtcattccag

SEQ ID NO: 173284 - DNA, 25 bp, Canis familiaris
tgaggggcacttgttgatctactgg

SEQ ID NO: 173285 - DNA, 25 bp, Canis familiaris
tgagggcctcttgttgcatttgtat

SEQ ID NO: 173286 - DNA, 25 bp, Canis familiaris
tgaggttctcttctggttgatatga

SEQ ID NO: 173287 - DNA, 25 bp, Canis familiaris
tgaggaacttggccggacgtagcgg

SEQ ID NO: 173288 - DNA, 25 bp, Canis familiaris
tgaggaacaatgcgcttggccaagg

SEQ ID NO: 173289 - DNA, 25 bp, Canis familiaris
tgatggagagcttgcggctgaggcc

SEQ ID NO: 173290 - DNA, 25 bp, Canis familiaris
tgatgacacagctgcggcgtgtcca

SEQ ID NO: 173291 - DNA, 25 bp, Canis familiaris
tgatgactgctgagcgggttgcacc

SEQ ID NO: 173292 - DNA, 25 bp, Canis familiaris
tgatgactctgagcgggtggcacgg

SEQ ID NO: 173293 - DNA, 25 bp, Canis familiaris
tgatggcctgggcagtttcacgtgt

SEQ ID NO: 173294 - DNA, 25 bp, Canis familiaris
tgatggtccagggatgggtccggtt

SEQ ID NO: 173295 - DNA, 25 bp, Canis familiaris
tgatggggagggtggatgcggggtc

SEQ ID NO: 173296 - DNA, 25 bp, Canis familiaris
tgaggggagtggtgggggaggggct

SEQ ID NO: 173297 - DNA, 25 bp, Canis familiaris
tgagtggggtggggatgggggaagt

SEQ ID NO: 173298 - DNA, 25 bp, Canis familiaris
tgagatgggcggtgtggctgggagt

SEQ ID NO: 173299 - DNA, 25 bp, Canis familiaris
tgatctcggggccttgggatggagc

SEQ ID NO: 173300 - DNA, 25 bp, Canis familiaris
tgatctccgggtcctgggatcaaac

SEQ ID NO: 173301 - DNA, 25 bp, Canis familiaris
tgatccccatggcagcggtgaaaca

SEQ ID NO: 173302 - DNA, 25 bp, Canis familiaris
tgaacttatgtccaccgtaaaccac

SEQ ID NO: 173303 - DNA, 25 bp, Canis familiaris
tgagagttaacccacggattagccc

SEQ ID NO: 173304 - DNA, 25 bp, Canis familiaris
tgaggattgaaccctctgcgtttca

SEQ ID NO: 173305 - DNA, 25 bp, Canis familiaris
tgatgatattatgccctgacagttc

SEQ ID NO: 173306 - DNA, 25 bp, Canis familiaris
tgatgtgattgggtgcctgggttca

SEQ ID NO: 173307 - DNA, 25 bp, Canis familiaris
tgatgtgttgttgccatggtaatcc

SEQ ID NO: 173308 - DNA, 25 bp, Canis familiaris
tgatctgttttctgtgagctacctc

SEQ ID NO: 173309 - DNA, 25 bp, Canis familiaris
tgatctgaggtgtggtgcctacttc

SEQ ID NO: 173310 - DNA, 25 bp, Canis familiaris
tgatcgagcctgtttacctggtgtc

SEQ ID NO: 173311 - DNA, 25 bp, Canis familiaris
tgatgcagagcctcatgggcctggt

SEQ ID NO: 173312 - DNA, 25 bp, Canis familiaris
tgatgctgccactcagcaactcttg

SEQ ID NO: 173313 - DNA, 25 bp, Canis familiaris
tgatctgccagcttggcaacttctc

SEQ ID NO: 173314 - DNA, 25 bp, Canis familiaris
tgatctccaatttcaaatgttcaga

SEQ ID NO: 173315 - DNA, 25 bp, Canis familiaris
tgatcctcagattaccatggtctga

SEQ ID NO: 173316 - DNA, 25 bp, Canis familiaris
tgatgttcaacaatgcctggctcta

SEQ ID NO: 173317 - DNA, 25 bp, Canis familiaris
tgatgatccctgagcttcagctcga

SEQ ID NO: 173318 - DNA, 25 bp, Canis familiaris
tgatgatcccagaagcagtctccag

SEQ ID NO: 173319 - DNA, 25 bp, Canis familiaris
tgatgatatccagaccaagcgcagc

SEQ ID NO: 173320 - DNA, 25 bp, Canis familiaris
tgatgagagccaggcccagagctcc

SEQ ID NO: 173321 - DNA, 25 bp, Canis familiaris
tgatgagccaaggcaccagcacagc

SEQ ID NO: 173322 - DNA, 25 bp, Canis familiaris
tgatgatgacacgtcacgcatggaa

SEQ ID NO: 173323 - DNA, 25 bp, Canis familiaris
tgagaacatgcctcagctgtgagag

SEQ ID NO: 173324 - DNA, 25 bp, Canis familiaris
tgatgaagcggattcagcggggccc

SEQ ID NO: 173325 - DNA, 25 bp, Canis familiaris
tgatgttgggcttaggcctggccac

SEQ ID NO: 173326 - DNA, 25 bp, Canis familiaris
tgatgatctggggtcaggccatggc

SEQ ID NO: 173327 - DNA, 25 bp, Canis familiaris
tgatctgcaggggtgtgttcatcgc

SEQ ID NO: 173328 - DNA, 25 bp, Canis familiaris
tgagtcgtgtgattgtgatttccca

SEQ ID NO: 173329 - DNA, 25 bp, Canis familiaris
tgatgccttgtattgctgttgcacc

SEQ ID NO: 173330 - DNA, 25 bp, Canis familiaris
tgatgccgagtttgctttgctcatt

SEQ ID NO: 173331 - DNA, 25 bp, Canis familiaris
tgatgcacgtgttagctaatgctat

SEQ ID NO: 173332 - DNA, 25 bp, Canis familiaris
tgatcctggctgcagcgcagatgcc

SEQ ID NO: 173333 - DNA, 25 bp, Canis familiaris
tgaggctggcaccagcaggcagcct

SEQ ID NO: 173334 - DNA, 25 bp, Canis familiaris
tgatggcgatgccgaaggactatag

SEQ ID NO: 173335 - DNA, 25 bp, Canis familiaris
tgatgcctgtctagaggttcgtagg

SEQ ID NO: 173336 - DNA, 25 bp, Canis familiaris
tgatgcggtcgcaggagtccgaggt

SEQ ID NO: 173337 - DNA, 25 bp, Canis familiaris
tgatgggatcagggggtcttggggt

SEQ ID NO: 173338 - DNA, 25 bp, Canis familiaris
tgatgggtcattttcacctgtgggg

SEQ ID NO: 173339 - DNA, 25 bp, Canis familiaris
tgatgggtctcaactgcatccatgt

SEQ ID NO: 173340 - DNA, 25 bp, Canis familiaris
tgatgggccagctgagaccagctct

SEQ ID NO: 173341 - DNA, 25 bp, Canis familiaris
tgaggtgctcatcctgaactcgatt

SEQ ID NO: 173342 - DNA, 25 bp, Canis familiaris
tgaggtctctgggaagctgctcacg

SEQ ID NO: 173343 - DNA, 25 bp, Canis familiaris
tgagttacaagcaaactgctacgag

SEQ ID NO: 173344 - DNA, 25 bp, Canis familiaris
tgagttaaagagcccagcatcaaga

SEQ ID NO: 173345 - DNA, 25 bp, Canis familiaris
tgaggtagcccagctcctaaatggc

SEQ ID NO: 173346 - DNA, 25 bp, Canis familiaris
tgaggggctcaaggcattctacaag

SEQ ID NO: 173347 - DNA, 25 bp, Canis familiaris
tgagtggtgaaagctcccatcaacc

SEQ ID NO: 173348 - DNA, 25 bp, Canis familiaris
tgatgtaggagacgctctctctctc

SEQ ID NO: 173349 - DNA, 25 bp, Canis familiaris
tgatcgtaagagccatctcctcaca

SEQ ID NO: 173350 - DNA, 25 bp, Canis familiaris
tgaggcatcataagcgcttccaaac

SEQ ID NO: 173351 - DNA, 25 bp, Canis familiaris
tgaggcccacgagttctccaacacc

SEQ ID NO: 173352 - DNA, 25 bp, Canis familiaris
tgagggccaaacatgctgcaaacca

SEQ ID NO: 173353 - DNA, 25 bp, Canis familiaris
tgagggctcagatctttgcaagtgc

SEQ ID NO: 173354 - DNA, 25 bp, Canis familiaris
tgaggacagcagttcttgagccact

SEQ ID NO: 173355 - DNA, 25 bp, Canis familiaris
tgaccacaggggaggccagctcccc

SEQ ID NO: 173356 - DNA, 25 bp, Canis familiaris
tgagtaaggggcattcctgctaccg

SEQ ID NO: 173357 - DNA, 25 bp, Canis familiaris
tgaggaaggcagtgagccctctacc

SEQ ID NO: 173358 - DNA, 25 bp, Canis familiaris
tgaggataaggctgaccttctccct

SEQ ID NO: 173359 - DNA, 25 bp, Canis familiaris
tgaggaaagagaccctctctgtcct

SEQ ID NO: 173360 - DNA, 25 bp, Canis familiaris
tgaggtaacattcggcagctcgtcc

SEQ ID NO: 173361 - DNA, 25 bp, Canis familiaris
tgatgtgtattccattccgctcgcc

SEQ ID NO: 173362 - DNA, 25 bp, Canis familiaris
tgatgtgtattccattccgctcgcc

SEQ ID NO: 173363 - DNA, 25 bp, Canis familiaris
tgatgatgtattgattccaggggcc

SEQ ID NO: 173364 - DNA, 25 bp, Canis familiaris
tgagtgtatctcgatccacgttggc

SEQ ID NO: 173365 - DNA, 25 bp, Canis familiaris
tgatgttacatgcaagactgttgcc

SEQ ID NO: 173366 - DNA, 25 bp, Canis familiaris
tgatgatcccacgaagcacgttctc

SEQ ID NO: 173367 - DNA, 25 bp, Canis familiaris
tgatgacaataccagatcccttcca

SEQ ID NO: 173368 - DNA, 25 bp, Canis familiaris
tgatgaaatcaccagcatcgcccag

SEQ ID NO: 173369 - DNA, 25 bp, Canis familiaris
tgaggaggcagccagctacatccag

SEQ ID NO: 173370 - DNA, 25 bp, Canis familiaris
tgagggagatcgtgcacatccaggc

SEQ ID NO: 173371 - DNA, 25 bp, Canis familiaris
tgaggaatacgagcgcatcgccggc

SEQ ID NO: 173372 - DNA, 25 bp, Canis familiaris
tgatgacatttgaaccagacccggc

SEQ ID NO: 173373 - DNA, 25 bp, Canis familiaris
tgatgaagttgcagcagcaggccca

SEQ ID NO: 173374 - DNA, 25 bp, Canis familiaris
tgatgacgattcagacagtccccca

SEQ ID NO: 173375 - DNA, 25 bp, Canis familiaris
tgatggagctcctgaagtccacacc

SEQ ID NO: 173376 - DNA, 25 bp, Canis familiaris
tgaggactactctcagtcactgcac

SEQ ID NO: 173377 - DNA, 25 bp, Canis familiaris
tgagtgactacatggatgtccccct

SEQ ID NO: 173378 - DNA, 25 bp, Canis familiaris
tgagtgactacatggatgtccccct

SEQ ID NO: 173379 - DNA, 25 bp, Canis familiaris
tgatgagttatctgaattcttccta

SEQ ID NO: 173380 - DNA, 25 bp, Canis familiaris
tgagggtaggtgaactctccctttt

SEQ ID NO: 173381 - DNA, 25 bp, Canis familiaris
tgaggggcagtaccccttaatgttc

SEQ ID NO: 173382 - DNA, 25 bp, Canis familiaris
tgagtggaattagcaacctgtattt

SEQ ID NO: 173383 - DNA, 25 bp, Canis familiaris
tgacgttgaattgaacctggactat

SEQ ID NO: 173384 - DNA, 25 bp, Canis familiaris
tgacagttgtcagtgcgaactcttg

SEQ ID NO: 173385 - DNA, 25 bp, Canis familiaris
tgaggagttcaacatcaccatgcag

SEQ ID NO: 173386 - DNA, 25 bp, Canis familiaris
tgaggaggtgacacattgcctgcag

SEQ ID NO: 173387 - DNA, 25 bp, Canis familiaris
tgaggcagggcacaattccatgacc

SEQ ID NO: 173388 - DNA, 25 bp, Canis familiaris
tgatgtagggctccaactcaggact

SEQ ID NO: 173389 - DNA, 25 bp, Canis familiaris
tgagttgggttctatgctggagcct

SEQ ID NO: 173390 - DNA, 25 bp, Canis familiaris
tgagttgggaactcttgactcccca

SEQ ID NO: 173391 - DNA, 25 bp, Canis familiaris
tgaattcggaatttagtaacaacca

SEQ ID NO: 173392 - DNA, 25 bp, Canis familiaris
tgaactccgaattttgggactccct

SEQ ID NO: 173393 - DNA, 25 bp, Canis familiaris
tgaggacacgtatttataggccccc

SEQ ID NO: 173394 - DNA, 25 bp, Canis familiaris
tgaggtgacagttttggggccttcc

SEQ ID NO: 173395 - DNA, 25 bp, Canis familiaris
tgaggtggcatttgtttcggtttcc

SEQ ID NO: 173396 - DNA, 25 bp, Canis familiaris
tgaggcgggtggacgccgagtttcc

SEQ ID NO: 173397 - DNA, 25 bp, Canis familiaris
tgaggcaggcgtgagcgctgtggtt

SEQ ID NO: 173398 - DNA, 25 bp, Canis familiaris
tgagaagcctggcatcgtttctgtt

SEQ ID NO: 173399 - DNA, 25 bp, Canis familiaris
tgagctttagggttatttcttattt

SEQ ID NO: 173400 - DNA, 25 bp, Canis familiaris
tagctttgaaggttcataactttat

SEQ ID NO: 173401 - DNA, 25 bp, Canis familiaris
tgaccttgaaaggtaacacttaagc

SEQ ID NO: 173402 - DNA, 25 bp, Canis familiaris
tgacctaaacccaaaccataaactg

SEQ ID NO: 173403 - DNA, 25 bp, Canis familiaris
tgactgaggacgggttaaataaacg

SEQ ID NO: 173404 - DNA, 25 bp, Canis familiaris
tgacttgagaccagttgaataaaag

SEQ ID NO: 173405 - DNA, 25 bp, Canis familiaris
tgagactacaccaaaataaaaaact

SEQ ID NO: 173406 - DNA, 25 bp, Canis familiaris
tgagacattcaccataacctaataa

SEQ ID NO: 173407 - DNA, 25 bp, Canis familiaris
tgacagaaaccgtacctgcaccaag

SEQ ID NO: 173408 - DNA, 25 bp, Canis familiaris
tgaaataaacgttcctattccaggt

SEQ ID NO: 173409 - DNA, 25 bp, Canis familiaris
tgagaaaaacggccgtacccacaat

SEQ ID NO: 173410 - DNA, 25 bp, Canis familiaris
tgagaactatataacctttccccaa

SEQ ID NO: 173411 - DNA, 25 bp, Canis familiaris
tgaggatcttttctgttccagtcca

SEQ ID NO: 173412 - DNA, 25 bp, Canis familiaris
tgaggtctttcttcataaccgagcc

SEQ ID NO: 173413 - DNA, 25 bp, Canis familiaris
tgaggctctttggaataggccccca

SEQ ID NO: 173414 - DNA, 25 bp, Canis familiaris
tgaggttacttgcaagtgcccatct

SEQ ID NO: 173415 - DNA, 25 bp, Canis familiaris
tgatgtttaaatcaacagcctgcct

SEQ ID NO: 173416 - DNA, 25 bp, Canis familiaris
tgactttgacctctacacctgagtc

SEQ ID NO: 173417 - DNA, 25 bp, Canis familiaris
tgactttacctttaataccatacgc

SEQ ID NO: 173418 - DNA, 25 bp, Canis familiaris
tactattatccacataaaccccctg

SEQ ID NO: 173419 - DNA, 25 bp, Canis familiaris
tactttcccaataaagaccacttca

SEQ ID NO: 173420 - DNA, 25 bp, Canis familiaris
tgacgtccacgagaaagaccccgag

SEQ ID NO: 173421 - DNA, 25 bp, Canis familiaris
tgagggctacgggaacaggcccgga

SEQ ID NO: 173422 - DNA, 25 bp, Canis familiaris
tgaggtctacggatacatggctcgt

SEQ ID NO: 173423 - DNA, 25 bp, Canis familiaris
tgagtcctgagttggtagctgctgc

SEQ ID NO: 173424 - DNA, 25 bp, Canis familiaris
tgatgtccatgctttttggcctagc

SEQ ID NO: 173425 - DNA, 25 bp, Canis familiaris
tgatgcattgctcattattcccaag

SEQ ID NO: 173426 - DNA, 25 bp, Canis familiaris
tgatgcactggccttatgcctttga

SEQ ID NO: 173427 - DNA, 25 bp, Canis familiaris
tgatgccttctggtacctttgacaa

SEQ ID NO: 173428 - DNA, 25 bp, Canis familiaris
tgagcctggctgatacctctaaaaa

SEQ ID NO: 173429 - DNA, 25 bp, Canis familiaris
tgagtgcggggaggcccatactaac

SEQ ID NO: 173430 - DNA, 25 bp, Canis familiaris
tgagtggaatggtgccctagcgaac

SEQ ID NO: 173431 - DNA, 25 bp, Canis familiaris
tgaggggattgaggccctggaccac

SEQ ID NO: 173432 - DNA, 25 bp, Canis familiaris
tgatggggaggggtcatggggccac

SEQ ID NO: 173433 - DNA, 25 bp, Canis familiaris
tgagggagggctgatgggggctctg

SEQ ID NO: 173434 - DNA, 25 bp, Canis familiaris
tgagtaggggcccagtggggcttcc

SEQ ID NO: 173435 - DNA, 25 bp, Canis familiaris
tgatgtaggggcggcctgagcttgc

SEQ ID NO: 173436 - DNA, 25 bp, Canis familiaris
tgatgatgtggggggcctactggac

SEQ ID NO: 173437 - DNA, 25 bp, Canis familiaris
tgatgctgattgggcgggggtgggc

SEQ ID NO: 173438 - DNA, 25 bp, Canis familiaris
tgagctgagtgggcaaggggggggg

SEQ ID NO: 173439 - DNA, 25 bp, Canis familiaris
tgaggcagttgcgcgaggtgatcgg

SEQ ID NO: 173440 - DNA, 25 bp, Canis familiaris
tgaggcgtatctggctgaaggcagg

SEQ ID NO: 173441 - DNA, 25 bp, Canis familiaris
tgaggccttcgactatgggcagctc

SEQ ID NO: 173442 - DNA, 25 bp, Canis familiaris
tgagtccggtgacagtgcggtcggg

SEQ ID NO: 173443 - DNA, 25 bp, Canis familiaris
tgagtactggagagaagggattcgg

SEQ ID NO: 173444 - DNA, 25 bp, Canis familiaris
tgagttcaaggctccagggattccc

SEQ ID NO: 173445 - DNA, 25 bp, Canis familiaris
tgagcgtccagtctctggaggtctc

SEQ ID NO: 173446 - DNA, 25 bp, Canis familiaris
tgaggatcgagtcttgcatcaggct

SEQ ID NO: 173447 - DNA, 25 bp, Canis familiaris
tgaggccaggcgagtgccagagctg

SEQ ID NO: 173448 - DNA, 25 bp, Canis familiaris
tgagtctcgtggaacgccagatgcg

SEQ ID NO: 173449 - DNA, 25 bp, Canis familiaris
tgatgaccttgccaacctggtggaa

SEQ ID NO: 173450 - DNA, 25 bp, Canis familiaris
tgagtggctggacatcctggggaat

SEQ ID NO: 173451 - DNA, 25 bp, Canis familiaris
tgagcttctgaagcacctggcagag

SEQ ID NO: 173452 - DNA, 25 bp, Canis familiaris
tgagtcttgaacctcagcaggctgc

SEQ ID NO: 173453 - DNA, 25 bp, Canis familiaris
tgatgacttgggccatgccagtgcc

SEQ ID NO: 173454 - DNA, 25 bp, Canis familiaris
tgatgatcgtgcccggcacgctcac

SEQ ID NO: 173455 - DNA, 25 bp, Canis familiaris
tgatgtcatgtggcacggcatccca

SEQ ID NO: 173456 - DNA, 25 bp, Canis familiaris
tgatgttggccaggcgcacaggcag

SEQ ID NO: 173457 - DNA, 25 bp, Canis familiaris
tgatgtctgggccccaagtgcatga

SEQ ID NO: 173458 - DNA, 25 bp, Canis familiaris
tcgccgggggctgaggctaggggga

SEQ ID NO: 173459 - DNA, 25 bp, Canis familiaris
tcgccggggagcacgtacaagggcc

SEQ ID NO: 173460 - DNA, 25 bp, Canis familiaris
ttgccttccaaacagtcctggggcc

SEQ ID NO: 173461 - DNA, 25 bp, Canis familiaris
tgaccgccgaaacagcctggagggc

SEQ ID NO: 173462 - DNA, 25 bp, Canis familiaris
tgagccgactgacgacggccttgag

SEQ ID NO: 173463 - DNA, 25 bp, Canis familiaris
tgacctggcggtttgttttgggttg

SEQ ID NO: 173464 - DNA, 25 bp, Canis familiaris
tgagctccctggagtttgcttggtt

SEQ ID NO: 173465 - DNA, 25 bp, Canis familiaris
tgatgcactccatgtttttgactgg

SEQ ID NO: 173466 - DNA, 25 bp, Canis familiaris
tgatgcacgctggtttttgataagg

SEQ ID NO: 173467 - DNA, 25 bp, Canis familiaris
tgatgtctcggtctctggtaaataa

SEQ ID NO: 173468 - DNA, 25 bp, Canis familiaris
tgagtcttgctctttcggggaaaag

SEQ ID NO: 173469 - DNA, 25 bp, Canis familiaris
tgagtcgtgtgcgagtcggggtcaa

SEQ ID NO: 173470 - DNA, 25 bp, Canis familiaris
tgatgatcgtttgtgctgcggctta

SEQ ID NO: 173471 - DNA, 25 bp, Canis familiaris
tgatgagttttgccttatgccttga

SEQ ID NO: 173472 - DNA, 25 bp, Canis familiaris
tgatgactatctggcgttatccttt

SEQ ID NO: 173473 - DNA, 25 bp, Canis familiaris
tgagtctgacggggatgctcacttg

SEQ ID NO: 173474 - DNA, 25 bp, Canis familiaris
tgaggatatcgaggccctcatcggt

SEQ ID NO: 173475 - DNA, 25 bp, Canis familiaris
tgagtatgtcgtggagtctactggt

SEQ ID NO: 173476 - DNA, 25 bp, Canis familiaris
tgagggtgtatgcagatcttctgaa

SEQ ID NO: 173477 - DNA, 25 bp, Canis familiaris
tgaggggctgagccagcatcttggg

SEQ ID NO: 173478 - DNA, 25 bp, Canis familiaris
tgatggggctggcagcagctggggc

SEQ ID NO: 173479 - DNA, 25 bp, Canis familiaris
tgaggcaggcggcctgactggaggc

SEQ ID NO: 173480 - DNA, 25 bp, Canis familiaris
tgaggagcctgctgcaactgagagg

SEQ ID NO: 173481 - DNA, 25 bp, Canis familiaris
tgagctgacgtctgaactggacggt

SEQ ID NO: 173482 - DNA, 25 bp, Canis familiaris
tgagctgacgtttgaactggaaccg

SEQ ID NO: 173483 - DNA, 25 bp, Canis familiaris
tgagtgcctgttagtacgctggccc

SEQ ID NO: 173484 - DNA, 25 bp, Canis familiaris
tgaggccttgtttatcgctggctgc

SEQ ID NO: 173485 - DNA, 25 bp, Canis familiaris
tgaggcagcttttacagctctggct

SEQ ID NO: 173486 - DNA, 25 bp, Canis familiaris
tgaggcaccatatatcctctcactc

SEQ ID NO: 173487 - DNA, 25 bp, Canis familiaris
tgatgagatccgaaatggcccctac

SEQ ID NO: 173488 - DNA, 25 bp, Canis familiaris
tgagagcatccgtcagagctgacac

SEQ ID NO: 173489 - DNA, 25 bp, Canis familiaris
tgatgtgctccacggatgttgcagg

SEQ ID NO: 173490 - DNA, 25 bp, Canis familiaris
tgagcagctccatgggattcacgtc

SEQ ID NO: 173491 - DNA, 25 bp, Canis familiaris
tgatgagagcctgctggcttccagt

SEQ ID NO: 173492 - DNA, 25 bp, Canis familiaris
tgatggagctctgcaggctctacca

SEQ ID NO: 173493 - DNA, 25 bp, Canis familiaris
tgatggcacatctgatggctcctcc

SEQ ID NO: 173494 - DNA, 25 bp, Canis familiaris
tgatgagctcatctgctaggcactc

SEQ ID NO: 173495 - DNA, 25 bp, Canis familiaris
tgatgactatctactgagcaaccag

SEQ ID NO: 173496 - DNA, 25 bp, Canis familiaris
tgatgactatttagccaagccctca

SEQ ID NO: 173497 - DNA, 25 bp, Canis familiaris
tgatgacgtggcacagtacctcaca

SEQ ID NO: 173498 - DNA, 25 bp, Canis familiaris
tgatgtgcgcggagagcaaccgccg

SEQ ID NO: 173499 - DNA, 25 bp, Canis familiaris
tgagttcgagagccaaaccaccagt

SEQ ID NO: 173500 - DNA, 25 bp, Canis familiaris
tagcctataaaataccacccttgga

SEQ ID NO: 173501 - DNA, 25 bp, Canis familiaris
tgaggaatgtaaattacccccttat

SEQ ID NO: 173502 - DNA, 25 bp, Canis familiaris
tgagaggggaatctctcaccccttc

SEQ ID NO: 173503 - DNA, 25 bp, Canis familiaris
tgagaggggtccaattcgtttcact

SEQ ID NO: 173504 - DNA, 25 bp, Canis familiaris
tgagaggtgtcgcatattgtttaac

SEQ ID NO: 173505 - DNA, 25 bp, Canis familiaris
tgatgggagtatattctctttaact

SEQ ID NO: 173506 - DNA, 25 bp, Canis familiaris
tgatgatgcggtatgttccctctat

SEQ ID NO: 173507 - DNA, 25 bp, Canis familiaris
tgatgtgcggcttatgttctccaac

SEQ ID NO: 173508 - DNA, 25 bp, Canis familiaris
tgaggctcagcttggtgttctaatc

SEQ ID NO: 173509 - DNA, 25 bp, Canis familiaris
tgagtctacttcctgtgtcatgacc

SEQ ID NO: 173510 - DNA, 25 bp, Canis familiaris
tgaggtagattcatggtctcccact

SEQ ID NO: 173511 - DNA, 25 bp, Canis familiaris
tgagagtaattccagtcacccagac

SEQ ID NO: 173512 - DNA, 25 bp, Canis familiaris
tgagagaagaaccagtaccccgaag

SEQ ID NO: 173513 - DNA, 25 bp, Canis familiaris
tgagtaagacttttgccgtccgcaa

SEQ ID NO: 173514 - DNA, 25 bp, Canis familiaris
tgagttagcaactgggcgtcctgct

SEQ ID NO: 173515 - DNA, 25 bp, Canis familiaris
tgatgttagacctggaacccctagg

SEQ ID NO: 173516 - DNA, 25 bp, Canis familiaris
tgatgttccacctgataagacccga

SEQ ID NO: 173517 - DNA, 25 bp, Canis familiaris
tgaggtctccctggtggaacccagg

SEQ ID NO: 173518 - DNA, 25 bp, Canis familiaris
tgagttcccacggtggatacccact

SEQ ID NO: 173519 - DNA, 25 bp, Canis familiaris
tgatgggcactaccgtggagacccc

SEQ ID NO: 173520 - DNA, 25 bp, Canis familiaris
tgagagtgacattccggcaacaccc

SEQ ID NO: 173521 - DNA, 25 bp, Canis familiaris
tgaggcagacttctgtgctacaccc

SEQ ID NO: 173522 - DNA, 25 bp, Canis familiaris
tgagtggccatctgttgtccaactc

SEQ ID NO: 173523 - DNA, 25 bp, Canis familiaris
tgagggctgtgcaacttgcccaact

SEQ ID NO: 173524 - DNA, 25 bp, Canis familiaris
tgagtgtctgacgatttccaaaaat

SEQ ID NO: 173525 - DNA, 25 bp, Canis familiaris
tgaggtccacctgatgctaaagaaa

SEQ ID NO: 173526 - DNA, 25 bp, Canis familiaris
tgagggccagacggtcggaagccag

SEQ ID NO: 173527 - DNA, 25 bp, Canis familiaris
tgaggagccacctggggaatcctga

SEQ ID NO: 173528 - DNA, 25 bp, Canis familiaris
tgatggaccatgaggggggcacttg

SEQ ID NO: 173529 - DNA, 25 bp, Canis familiaris
tgaggcccaggggaggatgcgcttt

SEQ ID NO: 173530 - DNA, 25 bp, Canis familiaris
tgagggtcgggcaggaggtgttgga

SEQ ID NO: 173531 - DNA, 25 bp, Canis familiaris
tgagccggagggagggaagtctgga

SEQ ID NO: 173532 - DNA, 25 bp, Canis familiaris
tgagactgggggcaggggtggctga

SEQ ID NO: 173533 - DNA, 25 bp, Canis familiaris
tgaggtgggggggcaggtgagggag

SEQ ID NO: 173534 - DNA, 25 bp, Canis familiaris
tgaggtgtgaaagccactgctaggg

SEQ ID NO: 173535 - DNA, 25 bp, Canis familiaris
tgaggtctgaggaccatcacctgga

SEQ ID NO: 173536 - DNA, 25 bp, Canis familiaris
tgatggtgagagctccatcagcccc

SEQ ID NO: 173537 - DNA, 25 bp, Canis familiaris
tgatggtgagagctccatcacgccc

SEQ ID NO: 173538 - DNA, 25 bp, Canis familiaris
tgatggtgagagctccatcaccctg

SEQ ID NO: 173539 - DNA, 25 bp, Canis familiaris
tgatggtgagagctccatcaccctt

SEQ ID NO: 173540 - DNA, 25 bp, Canis familiaris
tgatggtgagagctccatcacccct

SEQ ID NO: 173541 - DNA, 25 bp, Canis familiaris
tgatggtgagagctccatcacccct

SEQ ID NO: 173542 - DNA, 25 bp, Canis familiaris
tgatggtgagagctccatcacccct

SEQ ID NO: 173543 - DNA, 25 bp, Canis familiaris
tgatggtgagagctccatcacccct

SEQ ID NO: 173544 - DNA, 25 bp, Canis familiaris
tgatggtgagagctccatcacccct

SEQ ID NO: 173545 - DNA, 25 bp, Canis familiaris
tgatggtgagagctccatcacccct

SEQ ID NO: 173546 - DNA, 25 bp, Canis familiaris
tgatggtgagagctccatcacccct

SEQ ID NO: 173547 - DNA, 25 bp, Canis familiaris
tgatggtgatagctccatcacccct

SEQ ID NO: 173548 - DNA, 25 bp, Canis familiaris
tgatggagaatgttccttcccactc

SEQ ID NO: 173549 - DNA, 25 bp, Canis familiaris
tgaggaatatgttgccctcatcccc

SEQ ID NO: 173550 - DNA, 25 bp, Canis familiaris
tgagtatttgttggcacttcacctg

SEQ ID NO: 173551 - DNA, 25 bp, Canis familiaris
tgatgtttatttacatgcctgcccc

SEQ ID NO: 173552 - DNA, 25 bp, Canis familiaris
tgagtttcttttggcatctggctcc

SEQ ID NO: 173553 - DNA, 25 bp, Canis familiaris
tgatgtttctggttgacactgctgc

SEQ ID NO: 173554 - DNA, 25 bp, Canis familiaris
tgatgtgtttggctgagagcgcccc

SEQ ID NO: 173555 - DNA, 25 bp, Canis familiaris
tgatgggtgaggccgaaggcccctc

SEQ ID NO: 173556 - DNA, 25 bp, Canis familiaris
tgaggaggtggacaacactcccctc

SEQ ID NO: 173557 - DNA, 25 bp, Canis familiaris
tgaggaggtgggcagactggctccc

SEQ ID NO: 173558 - DNA, 25 bp, Canis familiaris
tgaggagttcgttgcagcacatccc

SEQ ID NO: 173559 - DNA, 25 bp, Canis familiaris
tgaggacttctttgcaggactgagg

SEQ ID NO: 173560 - DNA, 25 bp, Canis familiaris
tgaggctcgttttgcaggtgctgaa

SEQ ID NO: 173561 - DNA, 25 bp, Canis familiaris
tgagcgctttctcagtgggacaaag

SEQ ID NO: 173562 - DNA, 25 bp, Canis familiaris
tgatggccccatgcgttgtgaagaa

SEQ ID NO: 173563 - DNA, 25 bp, Canis familiaris
tgaggcctcatctctgggtgaagtc

SEQ ID NO: 173564 - DNA, 25 bp, Canis familiaris
tgaggtcacatgtgtggtggtggat

SEQ ID NO: 173565 - DNA, 25 bp, Canis familiaris
tgaggaccgggtggaggcggtgggg

SEQ ID NO: 173566 - DNA, 25 bp, Canis familiaris
tgaggacgagggtcgagtcgctggg

SEQ ID NO: 173567 - DNA, 25 bp, Canis familiaris
tgatgggcaggtggccgtgtttggc

SEQ ID NO: 173568 - DNA, 25 bp, Canis familiaris
tgagggcaggtccaaagccttcagc

SEQ ID NO: 173569 - DNA, 25 bp, Canis familiaris
tgagggatggctgtcaagatttatc

SEQ ID NO: 173570 - DNA, 25 bp, Canis familiaris
tgaggcctggccacaatgttttatc

SEQ ID NO: 173571 - DNA, 25 bp, Canis familiaris
tgaggagccgccaaactgttttcct

SEQ ID NO: 173572 - DNA, 25 bp, Canis familiaris
tgaggacaagcccgactttgttggc

SEQ ID NO: 173573 - DNA, 25 bp, Canis familiaris
tgagcgcaactgcgtacctgttatg

SEQ ID NO: 173574 - DNA, 25 bp, Canis familiaris
tgaggccactgctagttactgtact

SEQ ID NO: 173575 - DNA, 25 bp, Canis familiaris
tgaggcctgctcagtcatttctaat

SEQ ID NO: 173576 - DNA, 25 bp, Canis familiaris
tgatggtgatccattcatctattca

SEQ ID NO: 173577 - DNA, 25 bp, Canis familiaris
tgaggagtctcactgatggctgttc

SEQ ID NO: 173578 - DNA, 25 bp, Canis familiaris
tgatgtgcatttactgtgagctttt

SEQ ID NO: 173579 - DNA, 25 bp, Canis familiaris
tgatgtgaacatcttgggacttaag

SEQ ID NO: 173580 - DNA, 25 bp, Canis familiaris
tgaggcagatcagattccgatttga

SEQ ID NO: 173581 - DNA, 25 bp, Canis familiaris
tgaggactctggatgcccatttatt

SEQ ID NO: 173582 - DNA, 25 bp, Canis familiaris
tgaggacatcataggcctccttcta

SEQ ID NO: 173583 - DNA, 25 bp, Canis familiaris
tgaggacacgaaccttgcttcgagc

SEQ ID NO: 173584 - DNA, 25 bp, Canis familiaris
tgaggccaagaagctggcccacgcc

SEQ ID NO: 173585 - DNA, 25 bp, Canis familiaris
tgaggccctgaagatgcggcaccac

SEQ ID NO: 173586 - DNA, 25 bp, Canis familiaris
tgactgtccggagaggacaccgccc

SEQ ID NO: 173587 - DNA, 25 bp, Canis familiaris
tgagactccccgagataaagctccc

SEQ ID NO: 173588 - DNA, 25 bp, Canis familiaris
tgagacccctcgtgaggttacctag

SEQ ID NO: 173589 - DNA, 25 bp, Canis familiaris
tgagacccctcgtgaggttacctag

SEQ ID NO: 173590 - DNA, 25 bp, Canis familiaris
tgagacccctcgaaggagtctaagg

SEQ ID NO: 173591 - DNA, 25 bp, Canis familiaris
tgaaatcggcttgaggtgcccacgt

SEQ ID NO: 173592 - DNA, 25 bp, Canis familiaris
tgatggaccccagagagatgcccag

SEQ ID NO: 173593 - DNA, 25 bp, Canis familiaris
tgatggcagtctccagttagatccc

SEQ ID NO: 173594 - DNA, 25 bp, Canis familiaris
tgagccagttccaactagctccagc

SEQ ID NO: 173595 - DNA, 25 bp, Canis familiaris
tgagaaatccagaactacctacccc

SEQ ID NO: 173596 - DNA, 25 bp, Canis familiaris
tgaggaacccaggtaccatttctac

SEQ ID NO: 173597 - DNA, 25 bp, Canis familiaris
tgcagggacagcgagggacttttct

SEQ ID NO: 173598 - DNA, 25 bp, Canis familiaris
tgagggtcagggggcattttcttgc

SEQ ID NO: 173599 - DNA, 25 bp, Canis familiaris
tgaatagtccgagggttggtcttga

SEQ ID NO: 173600 - DNA, 25 bp, Canis familiaris
tgaccgtcgggggttggtcggacag

SEQ ID NO: 173601 - DNA, 25 bp, Canis familiaris
taccgttggggtgtggaaagaggag

SEQ ID NO: 173602 - DNA, 25 bp, Canis familiaris
tgaacgttttttgatggaaaagttg

SEQ ID NO: 173603 - DNA, 25 bp, Canis familiaris
tgacaaccttttacctgccaaaagt

SEQ ID NO: 173604 - DNA, 25 bp, Canis familiaris
tgaccaacctttgttcctaaatctt

SEQ ID NO: 173605 - DNA, 25 bp, Canis familiaris
tgagctcaaaatttctttccctacc

SEQ ID NO: 173606 - DNA, 25 bp, Canis familiaris
tgaccagatatatttccggcgttac

SEQ ID NO: 173607 - DNA, 25 bp, Canis familiaris
tgaccagataacacattggattgct

SEQ ID NO: 173608 - DNA, 25 bp, Canis familiaris
tgacctttacatgagggcaatgact

SEQ ID NO: 173609 - DNA, 25 bp, Canis familiaris
tgacaattacctgaggaggttgttc

SEQ ID NO: 173610 - DNA, 25 bp, Canis familiaris
tgaaacccgccctagggcttgttca

SEQ ID NO: 173611 - DNA, 25 bp, Canis familiaris
tgaaatcactaggccacagacctcg

SEQ ID NO: 173612 - DNA, 25 bp, Canis familiaris
tgagacgccggtggccaagcgtctg

SEQ ID NO: 173613 - DNA, 25 bp, Canis familiaris
tgaggaccgggggacagcagagctt

SEQ ID NO: 173614 - DNA, 25 bp, Canis familiaris
tgagagactggcaggaaccgagtct

SEQ ID NO: 173615 - DNA, 25 bp, Canis familiaris
tgacgaagatgaaggaaattgcaga

SEQ ID NO: 173616 - DNA, 25 bp, Canis familiaris
tgaggaagaggggaacatgctggag

SEQ ID NO: 173617 - DNA, 25 bp, Canis familiaris
tgaggaacactgccttactctgagc

SEQ ID NO: 173618 - DNA, 25 bp, Canis familiaris
tgagaaacaccactgcttcttacct

SEQ ID NO: 173619 - DNA, 25 bp, Canis familiaris
tgagaaacctcaatgcttctgtccg

SEQ ID NO: 173620 - DNA, 25 bp, Canis familiaris
tgagaaaagcctggctttcccggcc

SEQ ID NO: 173621 - DNA, 25 bp, Canis familiaris
tgagggagaggacgtcttcccgcac

SEQ ID NO: 173622 - DNA, 25 bp, Canis familiaris
tgagggtgggcaccttatccaccca

SEQ ID NO: 173623 - DNA, 25 bp, Canis familiaris
tgaggactgggcagtcttccatccc

SEQ ID NO: 173624 - DNA, 25 bp, Canis familiaris
tgaggtgttggcattcttcgctgat

SEQ ID NO: 173625 - DNA, 25 bp, Canis familiaris
tgaggtggtcgaatcgtgccttcag

SEQ ID NO: 173626 - DNA, 25 bp, Canis familiaris
tgaggcgagacttacgtgcatttcc

SEQ ID NO: 173627 - DNA, 25 bp, Canis familiaris
tgaggctggttagctggtagcccct

SEQ ID NO: 173628 - DNA, 25 bp, Canis familiaris
tgagtgtgtgttgtctgcagaagct

SEQ ID NO: 173629 - DNA, 25 bp, Canis familiaris
tgagatttaatgcttgagacccctc

SEQ ID NO: 173630 - DNA, 25 bp, Canis familiaris
tgaggcttagtgttctggagtccgt

SEQ ID NO: 173631 - DNA, 25 bp, Canis familiaris
tgaggctgtagagcttgctcactcg

SEQ ID NO: 173632 - DNA, 25 bp, Canis familiaris
tgagatgcctaaccattgctacact

SEQ ID NO: 173633 - DNA, 25 bp, Canis familiaris
tgagcaggctccctatgatctgaag

SEQ ID NO: 173634 - DNA, 25 bp, Canis familiaris
tgagctgctgctgtctgatgactgc

SEQ ID NO: 173635 - DNA, 25 bp, Canis familiaris
tgagctgctctcccgaaaaaaaaaa

SEQ ID NO: 173636 - DNA, 25 bp, Canis familiaris
tgagtcccagtccaaaaatgagatt

SEQ ID NO: 173637 - DNA, 25 bp, Canis familiaris
tgaggcccaggccaacagagtgatg

SEQ ID NO: 173638 - DNA, 25 bp, Canis familiaris
tgaggatcactccagaaaagagatc

SEQ ID NO: 173639 - DNA, 25 bp, Canis familiaris
tgaggtgtgtgacacacagacagac

SEQ ID NO: 173640 - DNA, 25 bp, Canis familiaris
tgaggagaagatcacacacagcccc

SEQ ID NO: 173641 - DNA, 25 bp, Canis familiaris
tgaggaggagccagcaagaggcccc

SEQ ID NO: 173642 - DNA, 25 bp, Canis familiaris
tgagggtgtgagagcaagccccgca

SEQ ID NO: 173643 - DNA, 25 bp, Canis familiaris
tgagggctgttgacagaactcccca

SEQ ID NO: 173644 - DNA, 25 bp, Canis familiaris
tgagtgagctttgcaggcactccca

SEQ ID NO: 173645 - DNA, 25 bp, Canis familiaris
tgagtgtgccgtgcgtgagcggctc

SEQ ID NO: 173646 - DNA, 25 bp, Canis familiaris
tgagattgtccatcaggagcctggc

SEQ ID NO: 173647 - DNA, 25 bp, Canis familiaris
tgatggtcggaggaggcgcacgagc

SEQ ID NO: 173648 - DNA, 25 bp, Canis familiaris
tgaggtcgggaggtgcacactgcac

SEQ ID NO: 173649 - DNA, 25 bp, Canis familiaris
tgaggatgaggagcgtgccacgatt

SEQ ID NO: 173650 - DNA, 25 bp, Canis familiaris
tgaggagagggggctgtctgcaagt

SEQ ID NO: 173651 - DNA, 25 bp, Canis familiaris
tgaggaggaagacctgctctccagc

SEQ ID NO: 173652 - DNA, 25 bp, Canis familiaris
tgaggattccaactgacctccacag

SEQ ID NO: 173653 - DNA, 25 bp, Canis familiaris
tgagagcatacctcatacctcacaa

SEQ ID NO: 173654 - DNA, 25 bp, Canis familiaris
tgaggatggcacttcacacactgat

SEQ ID NO: 173655 - DNA, 25 bp, Canis familiaris
tgaggcattgactcagaaagttcct

SEQ ID NO: 173656 - DNA, 25 bp, Canis familiaris
tgaggcctgacttgcagttttcctc

SEQ ID NO: 173657 - DNA, 25 bp, Canis familiaris
tgaggccagtgctggtgttgtccag

SEQ ID NO: 173658 - DNA, 25 bp, Canis familiaris
tgaggggctgcaggggtgagtccag

SEQ ID NO: 173659 - DNA, 25 bp, Canis familiaris
tgagcagggctggtgggcttggagc

SEQ ID NO: 173660 - DNA, 25 bp, Canis familiaris
tgaggcggctccagggtgtgagcac

SEQ ID NO: 173661 - DNA, 25 bp, Canis familiaris
tgagcacaagcgctccgttgtggac

SEQ ID NO: 173662 - DNA, 25 bp, Canis familiaris
tgaggaacacctgcagcgtgtgggc

SEQ ID NO: 173663 - DNA, 25 bp, Canis familiaris
tgaggtaccacacgaaggtgcggcc

SEQ ID NO: 173664 - DNA, 25 bp, Canis familiaris
tgagttccccacttaatgtgggcca

SEQ ID NO: 173665 - DNA, 25 bp, Canis familiaris
tgagtaggtccctttgttgttgtca

SEQ ID NO: 173666 - DNA, 25 bp, Canis familiaris
tgaggtcaatccctttttgtagtga

SEQ ID NO: 173667 - DNA, 25 bp, Canis familiaris
tgaaatactcatttttttggaatgt

SEQ ID NO: 173668 - DNA, 25 bp, Canis familiaris
tgaggcagaccttgcactctttgga

SEQ ID NO: 173669 - DNA, 25 bp, Canis familiaris
tgagtggacctattccttttgtttc

SEQ ID NO: 173670 - DNA, 25 bp, Canis familiaris
tgaggtttgctttggttcttgtttc

SEQ ID NO: 173671 - DNA, 25 bp, Canis familiaris
tgaggcttttttccattctcttatt

SEQ ID NO: 173672 - DNA, 25 bp, Canis familiaris
tgagagttgttggcttctttttttt

SEQ ID NO: 173673 - DNA, 25 bp, Canis familiaris
tgaggtcagcttttgtgttttacat

SEQ ID NO: 173674 - DNA, 25 bp, Canis familiaris
tgaggagcagcttgttggtcttgga

SEQ ID NO: 173675 - DNA, 25 bp, Canis familiaris
tgaggagcacttatcgtacgcctgt

SEQ ID NO: 173676 - DNA, 25 bp, Canis familiaris
tgagtggtctgtttgcgaacccttc

SEQ ID NO: 173677 - DNA, 25 bp, Canis familiaris
tgagcggctggtcctggaagccaat

SEQ ID NO: 173678 - DNA, 25 bp, Canis familiaris
tgagtgacttgacctgtgacctcaa

SEQ ID NO: 173679 - DNA, 25 bp, Canis familiaris
tgaggaatgtgagcgtcacctccag

SEQ ID NO: 173680 - DNA, 25 bp, Canis familiaris
tgaggagcgtgaggcagatgccccc

SEQ ID NO: 173681 - DNA, 25 bp, Canis familiaris
tgagggtgtgaggtcatcccctgca

SEQ ID NO: 173682 - DNA, 25 bp, Canis familiaris
tgaggaatgaatgctccctcctagt

SEQ ID NO: 173683 - DNA, 25 bp, Canis familiaris
tgagaggatcaagcccctgaggcag

SEQ ID NO: 173684 - DNA, 25 bp, Canis familiaris
tgagggcacagagaccagctcaggg

SEQ ID NO: 173685 - DNA, 25 bp, Canis familiaris
tgagggacattggacgcagtctccg

SEQ ID NO: 173686 - DNA, 25 bp, Canis familiaris
tgaggcttcattcagcaggatgccc

SEQ ID NO: 173687 - DNA, 25 bp, Canis familiaris
tgaggcttcttccagtggaggcttc

SEQ ID NO: 173688 - DNA, 25 bp, Canis familiaris
tgaggtgacctccggagatggttcc

SEQ ID NO: 173689 - DNA, 25 bp, Canis familiaris
tgaggtgacctccggagatggttcg

SEQ ID NO: 173690 - DNA, 25 bp, Canis familiaris
tgaggtgacctccggagatggttcg

SEQ ID NO: 173691 - DNA, 25 bp, Canis familiaris
tgaggaggttgcctgggtggcttgg

SEQ ID NO: 173692 - DNA, 25 bp, Canis familiaris
tgagaggggctgcttggtgaggggg

SEQ ID NO: 173693 - DNA, 25 bp, Canis familiaris
tgaggcctgagtctgtgcggatggc

SEQ ID NO: 173694 - DNA, 25 bp, Canis familiaris
tgactgaccattccgtgtggcatga

SEQ ID NO: 173695 - DNA, 25 bp, Canis familiaris
tgactgtgcttgtgggggcagatcc

SEQ ID NO: 173696 - DNA, 25 bp, Canis familiaris
tgaggtcttgttggctgcaggtgca

SEQ ID NO: 173697 - DNA, 25 bp, Canis familiaris
tgagtgctccttagcagctggattc

SEQ ID NO: 173698 - DNA, 25 bp, Canis familiaris
tgaggcctgctgtgagctgtgtggc

SEQ ID NO: 173699 - DNA, 25 bp, Canis familiaris
tgaggactccagcagcatggctgac

SEQ ID NO: 173700 - DNA, 25 bp, Canis familiaris
tgaggcagccctggagaagcaggca

SEQ ID NO: 173701 - DNA, 25 bp, Canis familiaris
tgaggcccagcaggtgagccaggcc

SEQ ID NO: 173702 - DNA, 25 bp, Canis familiaris
tgcagcccatcaagttggccagggg

SEQ ID NO: 173703 - DNA, 25 bp, Canis familiaris
tgagtactatgggaggccacggcgg

SEQ ID NO: 173704 - DNA, 25 bp, Canis familiaris
tgagaataaggcggcagccctggcc

SEQ ID NO: 173705 - DNA, 25 bp, Canis familiaris
tgagcagtgggggcagcccctgtgg

SEQ ID NO: 173706 - DNA, 25 bp, Canis familiaris
tgagggcatgggcatccgcctggac

SEQ ID NO: 173707 - DNA, 25 bp, Canis familiaris
tgagggctgtgttaccagttgcgca

SEQ ID NO: 173708 - DNA, 25 bp, Canis familiaris
tgagctttgtgttagccatttgccc

SEQ ID NO: 173709 - DNA, 25 bp, Canis familiaris
tgacttcgtgtgggagcgtgtgcgg

SEQ ID NO: 173710 - DNA, 25 bp, Canis familiaris
tgagacctggaaactctgggacagc

SEQ ID NO: 173711 - DNA, 25 bp, Canis familiaris
tgaggctttggctccgggagcagcc

SEQ ID NO: 173712 - DNA, 25 bp, Canis familiaris
tgaggtttgcagtcaccaggtggca

SEQ ID NO: 173713 - DNA, 25 bp, Canis familiaris
tgaggctctgggtccagcagggaca

SEQ ID NO: 173714 - DNA, 25 bp, Canis familiaris
tacgtcgggtgcgctggaatcagag

SEQ ID NO: 173715 - DNA, 25 bp, Canis familiaris
tgaccccggcgggatggaagcgtgc

SEQ ID NO: 173716 - DNA, 25 bp, Canis familiaris
tgaccctagtggctaccaagcctga

SEQ ID NO: 173717 - DNA, 25 bp, Canis familiaris
tgagaccaagggcttccatcagatt

SEQ ID NO: 173718 - DNA, 25 bp, Canis familiaris
tgagggcagggcccttggtcatgtt

SEQ ID NO: 173719 - DNA, 25 bp, Canis familiaris
tgaggaagggcccttgatgctgtcc

SEQ ID NO: 173720 - DNA, 25 bp, Canis familiaris
tgaggaagggcccttgatgctgtcc

SEQ ID NO: 173721 - DNA, 25 bp, Canis familiaris
tgaggaagggcccttgatgctgtcc

SEQ ID NO: 173722 - DNA, 25 bp, Canis familiaris
tgaggacagcgtcctcttttgctcc

SEQ ID NO: 173723 - DNA, 25 bp, Canis familiaris
tgaggtcagagtccgattcgggcct

SEQ ID NO: 173724 - DNA, 25 bp, Canis familiaris
tgagtgtctgcctcagttcagggca

SEQ ID NO: 173725 - DNA, 25 bp, Canis familiaris
tgaggcttgccattacctcaggagc

SEQ ID NO: 173726 - DNA, 25 bp, Canis familiaris
tgaggtagccactacctctggccat

SEQ ID NO: 173727 - DNA, 25 bp, Canis familiaris
tgaggttaccatttatctcccattc

SEQ ID NO: 173728 - DNA, 25 bp, Canis familiaris
tgaggttctacaaatcatctcccac

SEQ ID NO: 173729 - DNA, 25 bp, Canis familiaris
tgaggtttcctgggattgctcctca

SEQ ID NO: 173730 - DNA, 25 bp, Canis familiaris
tgagatgacgtcatggtttctccca

SEQ ID NO: 173731 - DNA, 25 bp, Canis familiaris
tgaggatgctgtatcttttcccgtg

SEQ ID NO: 173732 - DNA, 25 bp, Canis familiaris
tgaggactttcttttggcctccaga

SEQ ID NO: 173733 - DNA, 25 bp, Canis familiaris
tgagcagcctttgagattgtgacct

SEQ ID NO: 173734 - DNA, 25 bp, Canis familiaris
tgaggctctatcactgttgtcctct

SEQ ID NO: 173735 - DNA, 25 bp, Canis familiaris
tgacttattcatcatgcttggcctg

SEQ ID NO: 173736 - DNA, 25 bp, Canis familiaris
tgagttcgagctccatgttgggcat

SEQ ID NO: 173737 - DNA, 25 bp, Canis familiaris
tgagttgcaggcatctggcttctca

SEQ ID NO: 173738 - DNA, 25 bp, Canis familiaris
tgagtagaggaccaggtgtccactg

SEQ ID NO: 173739 - DNA, 25 bp, Canis familiaris
tgagaaagagaattggtgccctgga

SEQ ID NO: 173740 - DNA, 25 bp, Canis familiaris
tgagacaggacacagggctgccgta

SEQ ID NO: 173741 - DNA, 25 bp, Canis familiaris
tgaggagagacgggtggcccgccat

SEQ ID NO: 173742 - DNA, 25 bp, Canis familiaris
tgagggagacacgcgatgcctcttc

SEQ ID NO: 173743 - DNA, 25 bp, Canis familiaris
tgaggacagcaacggctgcatcaac

SEQ ID NO: 173744 - DNA, 25 bp, Canis familiaris
tgaccacagcacagactgcagcgaa

SEQ ID NO: 173745 - DNA, 25 bp, Canis familiaris
tgaggaccagcagattccggatgcc

SEQ ID NO: 173746 - DNA, 25 bp, Canis familiaris
tgaggaccaggtggtctcctgtgac

SEQ ID NO: 173747 - DNA, 25 bp, Canis familiaris
tgaggaccaggttgtctcctgcgac

SEQ ID NO: 173748 - DNA, 25 bp, Canis familiaris
tgaggagctgaggttagccctgcgt

SEQ ID NO: 173749 - DNA, 25 bp, Canis familiaris
tgaggatggaggacaaggagcggct

SEQ ID NO: 173750 - DNA, 25 bp, Canis familiaris
tgagtgtggtggcccagaagcccat

SEQ ID NO: 173751 - DNA, 25 bp, Canis familiaris
tgaggtggtgctgctcaacagcctg

SEQ ID NO: 173752 - DNA, 25 bp, Canis familiaris
tgaggtagtgtgtatcccacctgct

SEQ ID NO: 173753 - DNA, 25 bp, Canis familiaris
tgaggttgtggatactcccttctta

SEQ ID NO: 173754 - DNA, 25 bp, Canis familiaris
tgagggtggtcatgaacctctcctg

SEQ ID NO: 173755 - DNA, 25 bp, Canis familiaris
tgagggtgcgacaggacgagctcag

SEQ ID NO: 173756 - DNA, 25 bp, Canis familiaris
tgagggctcgccaggagggtggcat

SEQ ID NO: 173757 - DNA, 25 bp, Canis familiaris
tgagggctctggagttcggatccac

SEQ ID NO: 173758 - DNA, 25 bp, Canis familiaris
tgaggtgcttttggttgtggtctcc

SEQ ID NO: 173759 - DNA, 25 bp, Canis familiaris
tgaggatggtttgctggtggctccc

SEQ ID NO: 173760 - DNA, 25 bp, Canis familiaris
tgagagtggttggcgggggagcacc

SEQ ID NO: 173761 - DNA, 25 bp, Canis familiaris
tgagatgtttgggcccgggcccact

SEQ ID NO: 173762 - DNA, 25 bp, Canis familiaris
tgagttattttcccaggttccatct

SEQ ID NO: 173763 - DNA, 25 bp, Canis familiaris
tgagttatattactggcgttactat

SEQ ID NO: 173764 - DNA, 25 bp, Canis familiaris
tgagtttatttttgtgtgtgatgta

SEQ ID NO: 173765 - DNA, 25 bp, Canis familiaris
tgagtcttttctcctgggatggttc

SEQ ID NO: 173766 - DNA, 25 bp, Canis familiaris
tgagtgttctcaagtctgggggttg

SEQ ID NO: 173767 - DNA, 25 bp, Canis familiaris
tgagtgtgcttccagtcttgaggtg

SEQ ID NO: 173768 - DNA, 25 bp, Canis familiaris
tgagtgctattccattgtgtgtgtg

SEQ ID NO: 173769 - DNA, 25 bp, Canis familiaris
tgaggtatttattctgtgcacattt

SEQ ID NO: 173770 - DNA, 25 bp, Canis familiaris
tgaggatttatcttgctgccatttt

SEQ ID NO: 173771 - DNA, 25 bp, Canis familiaris
tgagctgattgtccagctgctgctc

SEQ ID NO: 173772 - DNA, 25 bp, Canis familiaris
tgagtgttctcatctgtgatccctc

SEQ ID NO: 173773 - DNA, 25 bp, Canis familiaris
tgagtttctgccatggatgtcacac

SEQ ID NO: 173774 - DNA, 25 bp, Canis familiaris
tgaggtgacaccatctgctgtacca

SEQ ID NO: 173775 - DNA, 25 bp, Canis familiaris
tgagttgagcccacaggagaccact

SEQ ID NO: 173776 - DNA, 25 bp, Canis familiaris
tgagtatgctcagcttcagaagagc

SEQ ID NO: 173777 - DNA, 25 bp, Canis familiaris
tgaggatgctgatctctcgaagcct

SEQ ID NO: 173778 - DNA, 25 bp, Canis familiaris
tgaccatgcactcgttagaaccttc

SEQ ID NO: 173779 - DNA, 25 bp, Canis familiaris
tgagaagccagactctttaccttgc

SEQ ID NO: 173780 - DNA, 25 bp, Canis familiaris
tgagaggccatcattcaatccacta

SEQ ID NO: 173781 - DNA, 25 bp, Canis familiaris
tgagagtttcttcaatccagcacgg

SEQ ID NO: 173782 - DNA, 25 bp, Canis familiaris
tgagggtcttctctgatccgagaat

SEQ ID NO: 173783 - DNA, 25 bp, Canis familiaris
tgaggtgtcttgggatgtgcctgct

SEQ ID NO: 173784 - DNA, 25 bp, Canis familiaris
tgaggtgcaggggtggctgttgctc

SEQ ID NO: 173785 - DNA, 25 bp, Canis familiaris
tgagggcagggggcatttctgctcc

SEQ ID NO: 173786 - DNA, 25 bp, Canis familiaris
tgagggcagggggcatttctgctcc

SEQ ID NO: 173787 - DNA, 25 bp, Canis familiaris
tgaggagcaaggccaagttcccagt

SEQ ID NO: 173788 - DNA, 25 bp, Canis familiaris
tgagtatgaatctgcaaattcgcac

SEQ ID NO: 173789 - DNA, 25 bp, Canis familiaris
tgagatcagttccgagagatcatcg

SEQ ID NO: 173790 - DNA, 25 bp, Canis familiaris
tgagtcactatgcagccatttcgtt

SEQ ID NO: 173791 - DNA, 25 bp, Canis familiaris
tgagtcactcaggcatccaagtttc

SEQ ID NO: 173792 - DNA, 25 bp, Canis familiaris
tgacttgcgcagggtctagttgcac

SEQ ID NO: 173793 - DNA, 25 bp, Canis familiaris
tgaccggccagggcaagggcaggca

SEQ ID NO: 173794 - DNA, 25 bp, Canis familiaris
tgagtcgcgctgtgcagaaggaccc

SEQ ID NO: 173795 - DNA, 25 bp, Canis familiaris
tgagcatggccctggaaagacccac

SEQ ID NO: 173796 - DNA, 25 bp, Canis familiaris
tgagcagagccctggccgagttccg

SEQ ID NO: 173797 - DNA, 25 bp, Canis familiaris
tgagcagggcccttgcggagttccg

SEQ ID NO: 173798 - DNA, 25 bp, Canis familiaris
tgagagggctcattcgaggacttcc

SEQ ID NO: 173799 - DNA, 25 bp, Canis familiaris
tgagaaggtcaacagctgcagcttg

SEQ ID NO: 173800 - DNA, 25 bp, Canis familiaris
tgagtagaattccggtgcagcagtt

SEQ ID NO: 173801 - DNA, 25 bp, Canis familiaris
tgagttaagtctcgggcagcagcct

SEQ ID NO: 173802 - DNA, 25 bp, Canis familiaris
tgacttcaagctttggcggacgcta

SEQ ID NO: 173803 - DNA, 25 bp, Canis familiaris
tgagccctactattgagttccacga

SEQ ID NO: 173804 - DNA, 25 bp, Canis familiaris
tgacctctgacggtggacggacgaa

SEQ ID NO: 173805 - DNA, 25 bp, Canis familiaris
tgacctcccatctggggaaagaaac

SEQ ID NO: 173806 - DNA, 25 bp, Canis familiaris
tgacccaccaaatggaagcaagctg

SEQ ID NO: 173807 - DNA, 25 bp, Canis familiaris
tgagcccaccagcgaggattactga

SEQ ID NO: 173808 - DNA, 25 bp, Canis familiaris
tgaggtcacagatccaggtcatatc

SEQ ID NO: 173809 - DNA, 25 bp, Canis familiaris
tgaggagccagaggccagagtccca

SEQ ID NO: 173810 - DNA, 25 bp, Canis familiaris
tgaggagatgcagctgccattgccc

SEQ ID NO: 173811 - DNA, 25 bp, Canis familiaris
tgagggagcagaccagtgtgcctgg

SEQ ID NO: 173812 - DNA, 25 bp, Canis familiaris
tgaggagacagccaaggtgcctgcc

SEQ ID NO: 173813 - DNA, 25 bp, Canis familiaris
tgaggagaaggtacgcatagctgct

SEQ ID NO: 173814 - DNA, 25 bp, Canis familiaris
tgagggccagagactcagctagtca

SEQ ID NO: 173815 - DNA, 25 bp, Canis familiaris
tgaggagctcagcctcttcattgtc

SEQ ID NO: 173816 - DNA, 25 bp, Canis familiaris
tgaggtgtcagcacatccagtgtct

SEQ ID NO: 173817 - DNA, 25 bp, Canis familiaris
tgagttgtcctgacatccttcttga

SEQ ID NO: 173818 - DNA, 25 bp, Canis familiaris
tgagtgtgtcatgaccctcagttac

SEQ ID NO: 173819 - DNA, 25 bp, Canis familiaris
tgacgctgtcctggacgctaggaac

SEQ ID NO: 173820 - DNA, 25 bp, Canis familiaris
tgaggtgtgcagggcagcccggaca

SEQ ID NO: 173821 - DNA, 25 bp, Canis familiaris
tgaggagtgcaggagcttcaccaca

SEQ ID NO: 173822 - DNA, 25 bp, Canis familiaris
tgaggagctgctgatgcctcctgat

SEQ ID NO: 173823 - DNA, 25 bp, Canis familiaris
tgaggagcgcaattgtcctctcttc

SEQ ID NO: 173824 - DNA, 25 bp, Canis familiaris
tgaggaggagctgtgcactctccca

SEQ ID NO: 173825 - DNA, 25 bp, Canis familiaris
tgagatgtggacggtgccaccacta

SEQ ID NO: 173826 - DNA, 25 bp, Canis familiaris
tgaggggcacaggggcacaatctgc

SEQ ID NO: 173827 - DNA, 25 bp, Canis familiaris
tgagggtgcgcagctggagagcagg

SEQ ID NO: 173828 - DNA, 25 bp, Canis familiaris
tgagcaaggcctatgggcagcagga

SEQ ID NO: 173829 - DNA, 25 bp, Canis familiaris
tgagacgacctgaagaacgcagccc

SEQ ID NO: 173830 - DNA, 25 bp, Canis familiaris
tgagacgatcctgagtcttcagccc

SEQ ID NO: 173831 - DNA, 25 bp, Canis familiaris
tgagataatctccgagcctgtggcc

SEQ ID NO: 173832 - DNA, 25 bp, Canis familiaris
tgagtgaatctcaggcgcagcgcct

SEQ ID NO: 173833 - DNA, 25 bp, Canis familiaris
tgagtgacagccagagcgagcgagc

SEQ ID NO: 173834 - DNA, 25 bp, Canis familiaris
tgagtgtgtgctactggcagagccc

SEQ ID NO: 173835 - DNA, 25 bp, Canis familiaris
tgagtattgctcaatgcacgtcctc

SEQ ID NO: 173836 - DNA, 25 bp, Canis familiaris
tgagtcattgtttctaggctctcac

SEQ ID NO: 173837 - DNA, 25 bp, Canis familiaris
tgagctcagtttagtaagctgctcc

SEQ ID NO: 173838 - DNA, 25 bp, Canis familiaris
tgaccgtctttgaaagcgacaaatg

SEQ ID NO: 173839 - DNA, 25 bp, Canis familiaris
tgaccgtctttgaaagcgacaaatg

SEQ ID NO: 173840 - DNA, 25 bp, Canis familiaris
tgaccactcttcagagatcggatac

SEQ ID NO: 173841 - DNA, 25 bp, Canis familiaris
tgagccattccctgagttgtgattc

SEQ ID NO: 173842 - DNA, 25 bp, Canis familiaris
tgagccattcacaggacttgaccca

SEQ ID NO: 173843 - DNA, 25 bp, Canis familiaris
tgaccttaatgggacttttcctact

SEQ ID NO: 173844 - DNA, 25 bp, Canis familiaris
tgacctgaacacgtcactttacctc

SEQ ID NO: 173845 - DNA, 25 bp, Canis familiaris
tgagcctttcacttgttacaaccac

SEQ ID NO: 173846 - DNA, 25 bp, Canis familiaris
tgagtcttaacccagttcataccac

SEQ ID NO: 173847 - DNA, 25 bp, Canis familiaris
tgagacattcgagcctttcaaccat

SEQ ID NO: 173848 - DNA, 25 bp, Canis familiaris
tgagcatcttaagtcctaaacccaa

SEQ ID NO: 173849 - DNA, 25 bp, Canis familiaris
tgagacttgaagccaatccgtccca

SEQ ID NO: 173850 - DNA, 25 bp, Canis familiaris
tgagcaccgatacaatgcctatccc

SEQ ID NO: 173851 - DNA, 25 bp, Canis familiaris
tgacccgaaatgcctgacacattcc

SEQ ID NO: 173852 - DNA, 25 bp, Canis familiaris
tgagcctggtggagctgacatcact

SEQ ID NO: 173853 - DNA, 25 bp, Canis familiaris
tgagctcacgtcctcaggacgcact

SEQ ID NO: 173854 - DNA, 25 bp, Canis familiaris
tgagtcaagtggtggatccctcgtg

SEQ ID NO: 173855 - DNA, 25 bp, Canis familiaris
tgagctaaagtgcaggagccccgtg

SEQ ID NO: 173856 - DNA, 25 bp, Canis familiaris
tgagtaaatggggccacgccgtggc

SEQ ID NO: 173857 - DNA, 25 bp, Canis familiaris
tgagggagagtgggcggcccgtgac

SEQ ID NO: 173858 - DNA, 25 bp, Canis familiaris
tgagtcgaaggaaggcccacgttcc

SEQ ID NO: 173859 - DNA, 25 bp, Canis familiaris
tgagctggaacgtgtgcgccaagtc

SEQ ID NO: 173860 - DNA, 25 bp, Canis familiaris
tgagggaactgtgtcccaagcccat

SEQ ID NO: 173861 - DNA, 25 bp, Canis familiaris
tgagttgatttgattcccaagccct

SEQ ID NO: 173862 - DNA, 25 bp, Canis familiaris
tgagttcagatgcctatgatcccgg

SEQ ID NO: 173863 - DNA, 25 bp, Canis familiaris
tgagactcagccgctgtctcgccgt

SEQ ID NO: 173864 - DNA, 25 bp, Canis familiaris
tgagagtcagactggtctcactcct

SEQ ID NO: 173865 - DNA, 25 bp, Canis familiaris
tgagattctactgtgttccttcatc

SEQ ID NO: 173866 - DNA, 25 bp, Canis familiaris
tgagatcttcctcagaagccgctac

SEQ ID NO: 173867 - DNA, 25 bp, Canis familiaris
taatattgcacccaatcagccctat

SEQ ID NO: 173868 - DNA, 25 bp, Canis familiaris
tgagaattgccccacagagacacaa

SEQ ID NO: 173869 - DNA, 25 bp, Canis familiaris
tgaccatagcccccaggaataaatg

SEQ ID NO: 173870 - DNA, 25 bp, Canis familiaris
tgaccaagtgcccgggtctttaagg

SEQ ID NO: 173871 - DNA, 25 bp, Canis familiaris
tacgaaggcgcttcgatttttaatt

SEQ ID NO: 173872 - DNA, 25 bp, Canis familiaris
tgacgaaggccttcgatgtcctcgt

SEQ ID NO: 173873 - DNA, 25 bp, Canis familiaris
tgaccaaggtctcagtgtgcacgat

SEQ ID NO: 173874 - DNA, 25 bp, Canis familiaris
tgaccattgaccatattcaccgata

SEQ ID NO: 173875 - DNA, 25 bp, Canis familiaris
tgagctacgtccatgagtcaaccat

SEQ ID NO: 173876 - DNA, 25 bp, Canis familiaris
tgagtccaacacgagagctgcaggc

SEQ ID NO: 173877 - DNA, 25 bp, Canis familiaris
tgagtgccacgcacaagtgcctcat

SEQ ID NO: 173878 - DNA, 25 bp, Canis familiaris
tgagtgccacctacataatacctac

SEQ ID NO: 173879 - DNA, 25 bp, Canis familiaris
tgagggccattgaaagcaatctttc

SEQ ID NO: 173880 - DNA, 25 bp, Canis familiaris
tgagggcggagatcagcacccttca

SEQ ID NO: 173881 - DNA, 25 bp, Canis familiaris
tgaggtgtacaatcaccacactata

SEQ ID NO: 173882 - DNA, 25 bp, Canis familiaris
tgagtttaattatcccatgttatct

SEQ ID NO: 173883 - DNA, 25 bp, Canis familiaris
tgaccctgaagtaccccattgaaca

SEQ ID NO: 173884 - DNA, 25 bp, Canis familiaris
tgaggttggagtcccctcattactg

SEQ ID NO: 173885 - DNA, 25 bp, Canis familiaris
tgagtggctggatgcccagctcttc

SEQ ID NO: 173886 - DNA, 25 bp, Canis familiaris
tgagttgctgagtgaactgctgccc

SEQ ID NO: 173887 - DNA, 25 bp, Canis familiaris
tgagactcatcttggactggtgcct

SEQ ID NO: 173888 - DNA, 25 bp, Canis familiaris
tgaggtcatcattgtagtgtggcca

SEQ ID NO: 173889 - DNA, 25 bp, Canis familiaris
tgaggtctgcatttcctgtaatcag

SEQ ID NO: 173890 - DNA, 25 bp, Canis familiaris
tgagagttgttcactgtttcagtaa

SEQ ID NO: 173891 - DNA, 25 bp, Canis familiaris
tgagactttctcaggttttgggaaa

SEQ ID NO: 173892 - DNA, 25 bp, Canis familiaris
tgaggatttttccttcttgtggtaa

SEQ ID NO: 173893 - DNA, 25 bp, Canis familiaris
tgagatattttatgaccttgtcaga

SEQ ID NO: 173894 - DNA, 25 bp, Canis familiaris
tgagatgtttgctcagacccttcag

SEQ ID NO: 173895 - DNA, 25 bp, Canis familiaris
tgaggttctgattgagacccttccc

SEQ ID NO: 173896 - DNA, 25 bp, Canis familiaris
tgagcgttggattgtacaggtaccc

SEQ ID NO: 173897 - DNA, 25 bp, Canis familiaris
tgagtcttggtgtctggggaactcc

SEQ ID NO: 173898 - DNA, 25 bp, Canis familiaris
tgagattgtgagaccggggcatccc

SEQ ID NO: 173899 - DNA, 25 bp, Canis familiaris
tgagattgtgagaccggggcatccc

SEQ ID NO: 173900 - DNA, 25 bp, Canis familiaris
tgagattgtgagaccggggcatccc

SEQ ID NO: 173901 - DNA, 25 bp, Canis familiaris
tgagattgtgagaccggggcatccc

SEQ ID NO: 173902 - DNA, 25 bp, Canis familiaris
tgagttgtactcctgtgagatcact

SEQ ID NO: 173903 - DNA, 25 bp, Canis familiaris
tgagcttccaggctgtatcatcaca

SEQ ID NO: 173904 - DNA, 25 bp, Canis familiaris
tgagcttcccgttggtgaaacactc

SEQ ID NO: 173905 - DNA, 25 bp, Canis familiaris
tccattatcggaagaagaaacagct

SEQ ID NO: 173906 - DNA, 25 bp, Canis familiaris
tgcacctacgtgagctcgataacct

SEQ ID NO: 173907 - DNA, 25 bp, Canis familiaris
tgagcccaaatcaccgtcaatatgt

SEQ ID NO: 173908 - DNA, 25 bp, Canis familiaris
tgagcacaaaagcgccaaggatatt

SEQ ID NO: 173909 - DNA, 25 bp, Canis familiaris
tgaccaaaatgtaccaacgacttaa

SEQ ID NO: 173910 - DNA, 25 bp, Canis familiaris
tgacttttattaaagtcgcgcttga

SEQ ID NO: 173911 - DNA, 25 bp, Canis familiaris
tccgtcctattcagcagtcgtatag

SEQ ID NO: 173912 - DNA, 25 bp, Canis familiaris
tacgtcctatcctgtttagtgaggt

SEQ ID NO: 173913 - DNA, 25 bp, Canis familiaris
tgacccccacccttatctagggtga

SEQ ID NO: 173914 - DNA, 25 bp, Canis familiaris
tgaccccaaaccttcagggtgttga

SEQ ID NO: 173915 - DNA, 25 bp, Canis familiaris
tgacccttctacaactcgggtttga

SEQ ID NO: 173916 - DNA, 25 bp, Canis familiaris
tgaccctgttgaacccttggttcca

SEQ ID NO: 173917 - DNA, 25 bp, Canis familiaris
tgccatccgtgtgttccgggcctgc

SEQ ID NO: 173918 - DNA, 25 bp, Canis familiaris
tgacccaggtttagaaggtgcctgc

SEQ ID NO: 173919 - DNA, 25 bp, Canis familiaris
tgaccaagtgtgtgtttcttcctgc

SEQ ID NO: 173920 - DNA, 25 bp, Canis familiaris
tgagccagctggaggtcttacctct

SEQ ID NO: 173921 - DNA, 25 bp, Canis familiaris
tgagcacgtgaatagacatttttcc

SEQ ID NO: 173922 - DNA, 25 bp, Canis familiaris
tgagcctctgattaaacatatgttt

SEQ ID NO: 173923 - DNA, 25 bp, Canis familiaris
tgagcctcacctgcaaatgttgact

SEQ ID NO: 173924 - DNA, 25 bp, Canis familiaris
tgagcactcaacttacatatttata

SEQ ID NO: 173925 - DNA, 25 bp, Canis familiaris
tgagcagccaacttggagaccagta

SEQ ID NO: 173926 - DNA, 25 bp, Canis familiaris
tgagagcaaagctgcgagtccgctt

SEQ ID NO: 173927 - DNA, 25 bp, Canis familiaris
tgagaaaagattgtgtcctgccata

SEQ ID NO: 173928 - DNA, 25 bp, Canis familiaris
tgagaatagagcatacttaccaaat

SEQ ID NO: 173929 - DNA, 25 bp, Canis familiaris
tgagaaacgccgtttccgcaagttc

SEQ ID NO: 173930 - DNA, 25 bp, Canis familiaris
tgcagaacccggttgaccaggcagt

SEQ ID NO: 173931 - DNA, 25 bp, Canis familiaris
tgcgcaccctcataaacgagctggt

SEQ ID NO: 173932 - DNA, 25 bp, Canis familiaris
tgagattcccagggaccatgcgcgg

SEQ ID NO: 173933 - DNA, 25 bp, Canis familiaris
tgagtactatagaccaccagcagcc

SEQ ID NO: 173934 - DNA, 25 bp, Canis familiaris
tgagtcaggtggaccagctgggcca

SEQ ID NO: 173935 - DNA, 25 bp, Canis familiaris
tgagtcgggggcagagcagctgccg

SEQ ID NO: 173936 - DNA, 25 bp, Canis familiaris
tgagttgggaggaggcaggcggcct

SEQ ID NO: 173937 - DNA, 25 bp, Canis familiaris
tgagtttggggaggtggcggcccga

SEQ ID NO: 173938 - DNA, 25 bp, Canis familiaris
tgaccatttgggatttcgagacctt

SEQ ID NO: 173939 - DNA, 25 bp, Canis familiaris
tgacccttaaacttttacatctctt

SEQ ID NO: 173940 - DNA, 25 bp, Canis familiaris
tgagacacatttccacttcattaac

SEQ ID NO: 173941 - DNA, 25 bp, Canis familiaris
tgagagatggttctttcttagcccc

SEQ ID NO: 173942 - DNA, 25 bp, Canis familiaris
tgagtgataactggtctctcttccc

SEQ ID NO: 173943 - DNA, 25 bp, Canis familiaris
tgagtatcagactgcctcatttccc

SEQ ID NO: 173944 - DNA, 25 bp, Canis familiaris
tgagcttcatggcacctattgacca

SEQ ID NO: 173945 - DNA, 25 bp, Canis familiaris
tgagttctggaacttactgcaccgc

SEQ ID NO: 173946 - DNA, 25 bp, Canis familiaris
tgagttcttgatgctcatagtcccc

SEQ ID NO: 173947 - DNA, 25 bp, Canis familiaris
tgagggggatgcctctgaggacacc

SEQ ID NO: 173948 - DNA, 25 bp, Canis familiaris
tgagcagtgggacttgcaggggact

SEQ ID NO: 173949 - DNA, 25 bp, Canis familiaris
tgagagatgggttcactggtgtgag

SEQ ID NO: 173950 - DNA, 25 bp, Canis familiaris
tgagcagtaggcgccgagagctgac

SEQ ID NO: 173951 - DNA, 25 bp, Canis familiaris
tgactgtgacttacacaggagcgac

SEQ ID NO: 173952 - DNA, 25 bp, Canis familiaris
tgcactgaacctgaagggtaaacca

SEQ ID NO: 173953 - DNA, 25 bp, Canis familiaris
tgacgtccacccagaggctaataca

SEQ ID NO: 173954 - DNA, 25 bp, Canis familiaris
tgactgctccacgcaggggtaggaa

SEQ ID NO: 173955 - DNA, 25 bp, Canis familiaris
tgagccccagggctgttgtaggaca

SEQ ID NO: 173956 - DNA, 25 bp, Canis familiaris
tgagatcccagggggccagtacacc

SEQ ID NO: 173957 - DNA, 25 bp, Canis familiaris
tgagtcatctcaggtgagaccccca

SEQ ID NO: 173958 - DNA, 25 bp, Canis familiaris
tgagatcactcacaagagcctgccc

SEQ ID NO: 173959 - DNA, 25 bp, Canis familiaris
tgaagcctaccaagagcaatgtcag

SEQ ID NO: 173960 - DNA, 25 bp, Canis familiaris
tgagtgactaccactggatgtcccc

SEQ ID NO: 173961 - DNA, 25 bp, Canis familiaris
tgcaggactaccacttgcagtgaag

SEQ ID NO: 173962 - DNA, 25 bp, Canis familiaris
tgagaggtcaaaacatacagtgcat

SEQ ID NO: 173963 - DNA, 25 bp, Canis familiaris
tgcgggcctcagactctaagagcat

SEQ ID NO: 173964 - DNA, 25 bp, Canis familiaris
tgagtctgcaccccttaagagcaaa

SEQ ID NO: 173965 - DNA, 25 bp, Canis familiaris
tgagcccatccggggaaagcgacat

SEQ ID NO: 173966 - DNA, 25 bp, Canis familiaris
tgagaaaccggggctacaccatgat

SEQ ID NO: 173967 - DNA, 25 bp, Canis familiaris
tgagagaacgcggtgtgcacacccg

SEQ ID NO: 173968 - DNA, 25 bp, Canis familiaris
tgagagagaggaccatgagccaatg

SEQ ID NO: 173969 - DNA, 25 bp, Canis familiaris
tgagcaagagagagcagagcacaag

SEQ ID NO: 173970 - DNA, 25 bp, Canis familiaris
tgagacggagctggccatgcgccag

SEQ ID NO: 173971 - DNA, 25 bp, Canis familiaris
tgagatcttggcgaggctgcaggcc

SEQ ID NO: 173972 - DNA, 25 bp, Canis familiaris
tgagtctgtgcggggtgtgtgtcag

SEQ ID NO: 173973 - DNA, 25 bp, Canis familiaris
tgagctactgcggcgcgttggatga

SEQ ID NO: 173974 - DNA, 25 bp, Canis familiaris
tgaccagtgcacgggtcttcagggc

SEQ ID NO: 173975 - DNA, 25 bp, Canis familiaris
tgaccagtgcacgggtcttcagggc

SEQ ID NO: 173976 - DNA, 25 bp, Canis familiaris
tgagggtctctggtgtcttgggaga

SEQ ID NO: 173977 - DNA, 25 bp, Canis familiaris
tgagttggctctatgtccttggaca

SEQ ID NO: 173978 - DNA, 25 bp, Canis familiaris
tgagtggtcttaagctgctcttcca

SEQ ID NO: 173979 - DNA, 25 bp, Canis familiaris
tgagtggtcttaagctgctcttcca

SEQ ID NO: 173980 - DNA, 25 bp, Canis familiaris
tgagggttacagttgctctgcatcc

SEQ ID NO: 173981 - DNA, 25 bp, Canis familiaris
tgagagtttcacatgtgttcaccat

SEQ ID NO: 173982 - DNA, 25 bp, Canis familiaris
tgagattttcacatgtatacaagat

SEQ ID NO: 173983 - DNA, 25 bp, Canis familiaris
tgagtttctcactatgtccatcaac

SEQ ID NO: 173984 - DNA, 25 bp, Canis familiaris
tgagtagcttcatgctgtccatctc

SEQ ID NO: 173985 - DNA, 25 bp, Canis familiaris
tgagtgcagattcactgatccccac

SEQ ID NO: 173986 - DNA, 25 bp, Canis familiaris
tgagtggacccaggttgctccactg

SEQ ID NO: 173987 - DNA, 25 bp, Canis familiaris
tgagtgaggcacacagtcctccact

SEQ ID NO: 173988 - DNA, 25 bp, Canis familiaris
tgagagcaggaaccatgttatccct

SEQ ID NO: 173989 - DNA, 25 bp, Canis familiaris
tgaagcagcccgcatattaggcgca

SEQ ID NO: 173990 - DNA, 25 bp, Canis familiaris
tgacccccagagtgtagatgctatg

SEQ ID NO: 173991 - DNA, 25 bp, Canis familiaris
tgagccacccaacctaaatgtactt

SEQ ID NO: 173992 - DNA, 25 bp, Canis familiaris
tgagccacccaacctaaatgtactt

SEQ ID NO: 173993 - DNA, 25 bp, Canis familiaris
tgaccagtcgccctataagagctac

SEQ ID NO: 173994 - DNA, 25 bp, Canis familiaris
tgagctattcctcttaccatgtaac

SEQ ID NO: 173995 - DNA, 25 bp, Canis familiaris
tgagtgatgcctggcctttctttaa

SEQ ID NO: 173996 - DNA, 25 bp, Canis familiaris
tgagagtgtatgcctcctatcttta

SEQ ID NO: 173997 - DNA, 25 bp, Canis familiaris
tgagggaaggccctatctctaagtc

SEQ ID NO: 173998 - DNA, 25 bp, Canis familiaris
tgagggccagacggtactgttagcc

SEQ ID NO: 173999 - DNA, 25 bp, Canis familiaris
tgacattcaatgaggtactgttacc

SEQ ID NO: 174000 - DNA, 25 bp, Canis familiaris
tgagagtctctggcaggtcactgtc

SEQ ID NO: 174001 - DNA, 25 bp, Canis familiaris
tgagcaggactgccaagctcacgtg

SEQ ID NO: 174002 - DNA, 25 bp, Canis familiaris
tgagcaggactgcactgatgtggaa

SEQ ID NO: 174003 - DNA, 25 bp, Canis familiaris
tgagcactgcagcccaggatggaaa

SEQ ID NO: 174004 - DNA, 25 bp, Canis familiaris
tgcaacatgtaccaggatggacatc

SEQ ID NO: 174005 - DNA, 25 bp, Canis familiaris
tgagcacagctaccaggtgggcagc

SEQ ID NO: 174006 - DNA, 25 bp, Canis familiaris
tgagcaaccaggagctgatccagcg

SEQ ID NO: 174007 - DNA, 25 bp, Canis familiaris
tgagccaaagtcagatgcccagcag

SEQ ID NO: 174008 - DNA, 25 bp, Canis familiaris
tgagacggaggctgagctccagcgg

SEQ ID NO: 174009 - DNA, 25 bp, Canis familiaris
tgagaaggttgtcagcatctcccag

SEQ ID NO: 174010 - DNA, 25 bp, Canis familiaris
tgagctaggtaacatgctcctccct

SEQ ID NO: 174011 - DNA, 25 bp, Canis familiaris
tgagtaggcaagtgttctgctcccc

SEQ ID NO: 174012 - DNA, 25 bp, Canis familiaris
tgagtgagtgcattgtccttcctct

SEQ ID NO: 174013 - DNA, 25 bp, Canis familiaris
tgagtgagctgatatccgtctcgcc

SEQ ID NO: 174014 - DNA, 25 bp, Canis familiaris
tgagaggctgactaggctgctctcc

SEQ ID NO: 174015 - DNA, 25 bp, Canis familiaris
tgagaagttcaagctctacctcacc

SEQ ID NO: 174016 - DNA, 25 bp, Canis familiaris
tgagttctctaaggcctaacacatt

SEQ ID NO: 174017 - DNA, 25 bp, Canis familiaris
tgcatgttttaagcctttccttttc

SEQ ID NO: 174018 - DNA, 25 bp, Canis familiaris
tgagcttttggagactttgccttct

SEQ ID NO: 174019 - DNA, 25 bp, Canis familiaris
tgacttgtcgtgtcccttaaatcct

SEQ ID NO: 174020 - DNA, 25 bp, Canis familiaris
tgacttttgtatcccctaatacctc

SEQ ID NO: 174021 - DNA, 25 bp, Canis familiaris
tgagatttctttccgtaactagact

SEQ ID NO: 174022 - DNA, 25 bp, Canis familiaris
tgacatttgtcaccggtaagtaacc

SEQ ID NO: 174023 - DNA, 25 bp, Canis familiaris
tgacgttgacatccgtaaagacctc

SEQ ID NO: 174024 - DNA, 25 bp, Canis familiaris
tgagatgagggcacagtacaattcc

SEQ ID NO: 174025 - DNA, 25 bp, Canis familiaris
tgagctggtggacgctcttcagttc

SEQ ID NO: 174026 - DNA, 25 bp, Canis familiaris
tgagcaggggagccccaatggacga

SEQ ID NO: 174027 - DNA, 25 bp, Canis familiaris
tgagagtggaggtctccggccaaac

SEQ ID NO: 174028 - DNA, 25 bp, Canis familiaris
tgagaatcggtgaccacggacctat

SEQ ID NO: 174029 - DNA, 25 bp, Canis familiaris
tgaagacggtttaggaacactattt

SEQ ID NO: 174030 - DNA, 25 bp, Canis familiaris
tgaagcctaagtttaagaactactt

SEQ ID NO: 174031 - DNA, 25 bp, Canis familiaris
tgaacctgaagggtaaaccaacctg

SEQ ID NO: 174032 - DNA, 25 bp, Canis familiaris
tgaatccgagaacgtatcaacccct

SEQ ID NO: 174033 - DNA, 25 bp, Canis familiaris
tgagaacggtcatgtgctaggccct

SEQ ID NO: 174034 - DNA, 25 bp, Canis familiaris
tgaatatgggtgtgcttaggaagct

SEQ ID NO: 174035 - DNA, 25 bp, Canis familiaris
tgagtaggtggctgctcaacgttct

SEQ ID NO: 174036 - DNA, 25 bp, Canis familiaris
tgagaacgcggtactacctgtctct

SEQ ID NO: 174037 - DNA, 25 bp, Canis familiaris
tgagacaccgattaaaccttcctgc

SEQ ID NO: 174038 - DNA, 25 bp, Canis familiaris
tgagacagtggtcaccaccttcttc

SEQ ID NO: 174039 - DNA, 25 bp, Canis familiaris
tgaccgagggcctcaactacatggc

SEQ ID NO: 174040 - DNA, 25 bp, Canis familiaris
tgacctagaccttcacaaccaggca

SEQ ID NO: 174041 - DNA, 25 bp, Canis familiaris
tgacttaacctgtaattagggctta

SEQ ID NO: 174042 - DNA, 25 bp, Canis familiaris
tgaattgaacctggactatgagatg

SEQ ID NO: 174043 - DNA, 25 bp, Canis familiaris
tgaattgaacctggactatgagatg

SEQ ID NO: 174044 - DNA, 25 bp, Canis familiaris
tgagaacatcacttggaccaaatgg

SEQ ID NO: 174045 - DNA, 25 bp, Canis familiaris
tgagaacattccagagctcaccggc

SEQ ID NO: 174046 - DNA, 25 bp, Canis familiaris
tgagaacttctcacaagccatggcc

SEQ ID NO: 174047 - DNA, 25 bp, Canis familiaris
tgagaaccttcaagctgaaaccact

SEQ ID NO: 174048 - DNA, 25 bp, Canis familiaris
tgagcacaccaacacatataaccca

SEQ ID NO: 174049 - DNA, 25 bp, Canis familiaris
tgagggccaatctcattgctgcccc

SEQ ID NO: 174050 - DNA, 25 bp, Canis familiaris
tgagtgacactacacattgtgccat

SEQ ID NO: 174051 - DNA, 25 bp, Canis familiaris
tgagtgttcgagcagctgatggccc

SEQ ID NO: 174052 - DNA, 25 bp, Canis familiaris
tgagtggacagggtgcctggcctca

SEQ ID NO: 174053 - DNA, 25 bp, Canis familiaris
tgagggccagtgagcagggcctcac

SEQ ID NO: 174054 - DNA, 25 bp, Canis familiaris
tgagaggccattagaaccacccagc

SEQ ID NO: 174055 - DNA, 25 bp, Canis familiaris
tgagaggcagccaaggaccataccc

SEQ ID NO: 174056 - DNA, 25 bp, Canis familiaris
tgagaagcaaaatgcccaacccgct

SEQ ID NO: 174057 - DNA, 25 bp, Canis familiaris
tgaaatgccgaaagtacaccccgtg

SEQ ID NO: 174058 - DNA, 25 bp, Canis familiaris
tgaaggcctggaaataaacctaaag

SEQ ID NO: 174059 - DNA, 25 bp, Canis familiaris
tgaaggccggagaggacccttacag

SEQ ID NO: 174060 - DNA, 25 bp, Canis familiaris
tgaacccgggattaaggctcttgac

SEQ ID NO: 174061 - DNA, 25 bp, Canis familiaris
tgaccctggggcatgacaggcctat

SEQ ID NO: 174062 - DNA, 25 bp, Canis familiaris
tgagccctggttgtacaagacttga

SEQ ID NO: 174063 - DNA, 25 bp, Canis familiaris
tgaccttgtatttaacaaacttgta

SEQ ID NO: 174064 - DNA, 25 bp, Canis familiaris
tgactctttattctcacgggttgtt

SEQ ID NO: 174065 - DNA, 25 bp, Canis familiaris
tgacctttgtctcccagggtgaagg

SEQ ID NO: 174066 - DNA, 25 bp, Canis familiaris
tgaccatggtttcctcggaggacat

SEQ ID NO: 174067 - DNA, 25 bp, Canis familiaris
tgactctagataacctcgggccgat

SEQ ID NO: 174068 - DNA, 25 bp, Canis familiaris
tgactctagataacctcgggccgat

SEQ ID NO: 174069 - DNA, 25 bp, Canis familiaris
tgacctgaacacaccggagcaaatg

SEQ ID NO: 174070 - DNA, 25 bp, Canis familiaris
tgcatcgtaaaccctcagaaggaaa

SEQ ID NO: 174071 - DNA, 25 bp, Canis familiaris
tgacctgagggccccagtgggaaag

SEQ ID NO: 174072 - DNA, 25 bp, Canis familiaris
tgacgcaggggacacactgggggga

SEQ ID NO: 174073 - DNA, 25 bp, Canis familiaris
tgacatggtgggcaacaaggggtgg

SEQ ID NO: 174074 - DNA, 25 bp, Canis familiaris
tgagctggtggccgacagcaacgtg

SEQ ID NO: 174075 - DNA, 25 bp, Canis familiaris
tgagctggtggccgacagcaacgtg

SEQ ID NO: 174076 - DNA, 25 bp, Canis familiaris
tgagctggtggccgacagcaacgtg

SEQ ID NO: 174077 - DNA, 25 bp, Canis familiaris
tgagctggtggccgacagcaacgtg

SEQ ID NO: 174078 - DNA, 25 bp, Canis familiaris
tgagctggtggccgacagcaacggt

SEQ ID NO: 174079 - DNA, 25 bp, Canis familiaris
tgagcacctgtcccgatgaggggat

SEQ ID NO: 174080 - DNA, 25 bp, Canis familiaris
tgagaccttgagagagcagccgtgc

SEQ ID NO: 174081 - DNA, 25 bp, Canis familiaris
tgagtcttgtagtgacgctcggtcg

SEQ ID NO: 174082 - DNA, 25 bp, Canis familiaris
tgagtcttgggctctttgaggtccc

SEQ ID NO: 174083 - DNA, 25 bp, Canis familiaris
tgagtatggggttttctgagtgtta

SEQ ID NO: 174084 - DNA, 25 bp, Canis familiaris
tgagttgggagagtttttgtgtgta

SEQ ID NO: 174085 - DNA, 25 bp, Canis familiaris
tgcagtctaggatcaataagtttta

SEQ ID NO: 174086 - DNA, 25 bp, Canis familiaris
tgcagttagtgctcaaccagttctc

SEQ ID NO: 174087 - DNA, 25 bp, Canis familiaris
tgagattcagactcacccagaactc

SEQ ID NO: 174088 - DNA, 25 bp, Canis familiaris
tgagtgtgagaaaacccgctgacct

SEQ ID NO: 174089 - DNA, 25 bp, Canis familiaris
tgagttgtacggcgctggatgaccc

SEQ ID NO: 174090 - DNA, 25 bp, Canis familiaris
tgagagttaccaccactggataccc

SEQ ID NO: 174091 - DNA, 25 bp, Canis familiaris
tgagcagctgtcttcagctcagggt

SEQ ID NO: 174092 - DNA, 25 bp, Canis familiaris
tgagctcatcaatgcagccagggct

SEQ ID NO: 174093 - DNA, 25 bp, Canis familiaris
tgactgatcacttgatgccaccagc

SEQ ID NO: 174094 - DNA, 25 bp, Canis familiaris
tgagttcactgctactcagcctgaa

SEQ ID NO: 174095 - DNA, 25 bp, Canis familiaris
tgagtctacgcagcgcagtggcaca

SEQ ID NO: 174096 - DNA, 25 bp, Canis familiaris
tgagctcacctggtggcaatgtgaa

SEQ ID NO: 174097 - DNA, 25 bp, Canis familiaris
tgagccacgtgggtcaagtgacaca

SEQ ID NO: 174098 - DNA, 25 bp, Canis familiaris
tatgcaacagtgtggaagttcctta

SEQ ID NO: 174099 - DNA, 25 bp, Canis familiaris
tgagccacgggggaagtgtccttca

SEQ ID NO: 174100 - DNA, 25 bp, Canis familiaris
tgagccccgggaggaggtgggccag

SEQ ID NO: 174101 - DNA, 25 bp, Canis familiaris
tgaccatccgcaggactggagggga

SEQ ID NO: 174102 - DNA, 25 bp, Canis familiaris
tgacccctgggccggagagggaggg

SEQ ID NO: 174103 - DNA, 25 bp, Canis familiaris
tgacctcagggcctggggagggggc

SEQ ID NO: 174104 - DNA, 25 bp, Canis familiaris
tgaccctcgtctgtggtggggtgtc

SEQ ID NO: 174105 - DNA, 25 bp, Canis familiaris
tgagccatgcgcatgctgcttggct

SEQ ID NO: 174106 - DNA, 25 bp, Canis familiaris
tgagatcatggcagtgctcgccttg

SEQ ID NO: 174107 - DNA, 25 bp, Canis familiaris
tgagatcaggccctgtgctgggctc

SEQ ID NO: 174108 - DNA, 25 bp, Canis familiaris
tgagatcagggacatgctgctggcc

SEQ ID NO: 174109 - DNA, 25 bp, Canis familiaris
tgagatgttggtctcttgtccttct

SEQ ID NO: 174110 - DNA, 25 bp, Canis familiaris
tgagatcttccaaatttcccataat

SEQ ID NO: 174111 - DNA, 25 bp, Canis familiaris
tgagtcttccagcagttcaactgta

SEQ ID NO: 174112 - DNA, 25 bp, Canis familiaris
tgaccatttcagccaccaaagctta

SEQ ID NO: 174113 - DNA, 25 bp, Canis familiaris
tgagaatgcttacctccaaggttgg

SEQ ID NO: 174114 - DNA, 25 bp, Canis familiaris
tgagcactgttgacacccacaggag

SEQ ID NO: 174115 - DNA, 25 bp, Canis familiaris
tgagcacggggttcgacgtggtcgc

SEQ ID NO: 174116 - DNA, 25 bp, Canis familiaris
tgagacgctggtgttggttggtgac

SEQ ID NO: 174117 - DNA, 25 bp, Canis familiaris
tgagacgtgggtgtgcgatgggcag

SEQ ID NO: 174118 - DNA, 25 bp, Canis familiaris
tgagacggtttcatgcttgggaggc

SEQ ID NO: 174119 - DNA, 25 bp, Canis familiaris
tacagttgtttcacttggggacggt

SEQ ID NO: 174120 - DNA, 25 bp, Canis familiaris
tgaccttgatttatttggagcggag

SEQ ID NO: 174121 - DNA, 25 bp, Canis familiaris
tgacctagtgttcctgcattgtgag

SEQ ID NO: 174122 - DNA, 25 bp, Canis familiaris
tgacttatcttttctgagcctcagt

SEQ ID NO: 174123 - DNA, 25 bp, Canis familiaris
tgactattctattgttggctcggta

SEQ ID NO: 174124 - DNA, 25 bp, Canis familiaris
tgacgagctctatgtatgtccctgg

SEQ ID NO: 174125 - DNA, 25 bp, Canis familiaris
tgacaatcggaaaagatcagccgga

SEQ ID NO: 174126 - DNA, 25 bp, Canis familiaris
tgaccacctgaagggacagctgcgg

SEQ ID NO: 174127 - DNA, 25 bp, Canis familiaris
tgagacacgcggttgaggcaggctg

SEQ ID NO: 174128 - DNA, 25 bp, Canis familiaris
tgagagcccgatcgtggtggtgctc

SEQ ID NO: 174129 - DNA, 25 bp, Canis familiaris
tgagaacttgatggtggtcctgcac

SEQ ID NO: 174130 - DNA, 25 bp, Canis familiaris
tgagaatcattttgtgccacctgca

SEQ ID NO: 174131 - DNA, 25 bp, Canis familiaris
tgagacatcttttaccatctccgat

SEQ ID NO: 174132 - DNA, 25 bp, Canis familiaris
tgagacatcttttaccatctccgat

SEQ ID NO: 174133 - DNA, 25 bp, Canis familiaris
tgagacatcttttaccatctccgat

SEQ ID NO: 174134 - DNA, 25 bp, Canis familiaris
tgagacatcttttaccatctccgat

SEQ ID NO: 174135 - DNA, 25 bp, Canis familiaris
tgagactgttcctagtctcacccag

SEQ ID NO: 174136 - DNA, 25 bp, Canis familiaris
tgagattgtagcggagaccacccac

SEQ ID NO: 174137 - DNA, 25 bp, Canis familiaris
taatatccgggaacccacacaccgg

SEQ ID NO: 174138 - DNA, 25 bp, Canis familiaris
tgaaaaagggagaccccccatgcgg

SEQ ID NO: 174139 - DNA, 25 bp, Canis familiaris
tgaaacaaacgagaccacccatcaa

SEQ ID NO: 174140 - DNA, 25 bp, Canis familiaris
tgagaaaagaaaacatcccctctaa

SEQ ID NO: 174141 - DNA, 25 bp, Canis familiaris
tgagaaaggtatccctcttcttctg

SEQ ID NO: 174142 - DNA, 25 bp, Canis familiaris
tgagaactttgaagccacttttttt

SEQ ID NO: 174143 - DNA, 25 bp, Canis familiaris
tgagaacgttcacacctgacttttc

SEQ ID NO: 174144 - DNA, 25 bp, Canis familiaris
tgagaaccatttcatcgtgacgttg

SEQ ID NO: 174145 - DNA, 25 bp, Canis familiaris
tgagaagtttctcactggcacgctc

SEQ ID NO: 174146 - DNA, 25 bp, Canis familiaris
tgagatatttaatgatcttgaaccc

SEQ ID NO: 174147 - DNA, 25 bp, Canis familiaris
tgagaattctcacaattgtgccccc

SEQ ID NO: 174148 - DNA, 25 bp, Canis familiaris
tgacgttcttgcttttggcgcccac

SEQ ID NO: 174149 - DNA, 25 bp, Canis familiaris
tgagctgttgttgttcatcaccctc

SEQ ID NO: 174150 - DNA, 25 bp, Canis familiaris
tgacgattgggcaggcacccacaga

SEQ ID NO: 174151 - DNA, 25 bp, Canis familiaris
tgagagagggtgaggcccagcacca

SEQ ID NO: 174152 - DNA, 25 bp, Canis familiaris
tgagagaagagccaggggccaccct

SEQ ID NO: 174153 - DNA, 25 bp, Canis familiaris
tgagagaagagccaggggccaccct

SEQ ID NO: 174154 - DNA, 25 bp, Canis familiaris
tgagcctagactatggagcctccac

SEQ ID NO: 174155 - DNA, 25 bp, Canis familiaris
tgagcacacgaaagctgggtctcac

SEQ ID NO: 174156 - DNA, 25 bp, Canis familiaris
tgagccccagtcctgtggatcctgc

SEQ ID NO: 174157 - DNA, 25 bp, Canis familiaris
tgagagccacagacctatggatgca

SEQ ID NO: 174158 - DNA, 25 bp, Canis familiaris
tgagacatcaggagtcatgagaccc

SEQ ID NO: 174159 - DNA, 25 bp, Canis familiaris
tgagaacatctgtcttctgcagacc

SEQ ID NO: 174160 - DNA, 25 bp, Canis familiaris
tgagaactcggtaggcgaccaatcc

SEQ ID NO: 174161 - DNA, 25 bp, Canis familiaris
tgagagagctttacttgcgaccaaa

SEQ ID NO: 174162 - DNA, 25 bp, Canis familiaris
tgcagagagcccccttcaaaaaaaa

SEQ ID NO: 174163 - DNA, 25 bp, Canis familiaris
taattcccctcctcaacagaaaagg

SEQ ID NO: 174164 - DNA, 25 bp, Canis familiaris
taattgcctaccgatgtaaagaaat

SEQ ID NO: 174165 - DNA, 25 bp, Canis familiaris
tgagcacccttcgctgtgaatataa

SEQ ID NO: 174166 - DNA, 25 bp, Canis familiaris
tgagactcacttacctgtgacgcag

SEQ ID NO: 174167 - DNA, 25 bp, Canis familiaris
tgacactcactgcttgtggacggac

SEQ ID NO: 174168 - DNA, 25 bp, Canis familiaris
tgagcgccacggaggaggagcttca

SEQ ID NO: 174169 - DNA, 25 bp, Canis familiaris
tgagcccggtgcaggagagacgatt

SEQ ID NO: 174170 - DNA, 25 bp, Canis familiaris
tgagcaccggtgggtgtggacgctc

SEQ ID NO: 174171 - DNA, 25 bp, Canis familiaris
tgagccctggtgggttggtgggggt

SEQ ID NO: 174172 - DNA, 25 bp, Canis familiaris
tgagccattttgggtccctgaggga

SEQ ID NO: 174173 - DNA, 25 bp, Canis familiaris
tgaccttttgatggatcctctctga

SEQ ID NO: 174174 - DNA, 25 bp, Canis familiaris
tgaccagagccgactgacttctctg

SEQ ID NO: 174175 - DNA, 25 bp, Canis familiaris
tgaaacccgttgcttgcttggaagc

SEQ ID NO: 174176 - DNA, 25 bp, Canis familiaris
tgaagttccgttggtgttctgggga

SEQ ID NO: 174177 - DNA, 25 bp, Canis familiaris
tgacttgtcccccaattttgaggga

SEQ ID NO: 174178 - DNA, 25 bp, Canis familiaris
tgacctgtagctgccacattttaaa

SEQ ID NO: 174179 - DNA, 25 bp, Canis familiaris
tgacctgtagtcagcattccactca

SEQ ID NO: 174180 - DNA, 25 bp, Canis familiaris
tgagcagatggacctagcacttccc

SEQ ID NO: 174181 - DNA, 25 bp, Canis familiaris
tgagatgcagggcttgcactcttcc

SEQ ID NO: 174182 - DNA, 25 bp, Canis familiaris
tgagagcaaggatctcctgcttcgc

SEQ ID NO: 174183 - DNA, 25 bp, Canis familiaris
tgagcagaaggtgctcacctcaccc

SEQ ID NO: 174184 - DNA, 25 bp, Canis familiaris
tgagagcagaagacccacatctccc

SEQ ID NO: 174185 - DNA, 25 bp, Canis familiaris
tgagcagcagtagctgggctgcccc

SEQ ID NO: 174186 - DNA, 25 bp, Canis familiaris
tgagcagcttgtgctgggtgcctca

SEQ ID NO: 174187 - DNA, 25 bp, Canis familiaris
tgactgcctgtctgtgccagacaca

SEQ ID NO: 174188 - DNA, 25 bp, Canis familiaris
tgagctgggctgtggccaacatcac

SEQ ID NO: 174189 - DNA, 25 bp, Canis familiaris
tgagatcttctgtgttcaacatcaa

SEQ ID NO: 174190 - DNA, 25 bp, Canis familiaris
tgagatttctgaagcttcctctaac

SEQ ID NO: 174191 - DNA, 25 bp, Canis familiaris
tgagtttctgttgatttgctacccc

SEQ ID NO: 174192 - DNA, 25 bp, Canis familiaris
tgagcttcattctttttttacccag

SEQ ID NO: 174193 - DNA, 25 bp, Canis familiaris
tgagcggatgaggttacttggcccc

SEQ ID NO: 174194 - DNA, 25 bp, Canis familiaris
tgactggggttcaaatctccactcc

SEQ ID NO: 174195 - DNA, 25 bp, Canis familiaris
tgactggcgggttggactggcctag

SEQ ID NO: 174196 - DNA, 25 bp, Canis familiaris
tgagctggctgctgcagaggcacgg

SEQ ID NO: 174197 - DNA, 25 bp, Canis familiaris
tgagctgccagacctgagagcggga

SEQ ID NO: 174198 - DNA, 25 bp, Canis familiaris
tgagcccacattgcaggccgatgaa

SEQ ID NO: 174199 - DNA, 25 bp, Canis familiaris
tgagctcctcattggcaacgtagaa

SEQ ID NO: 174200 - DNA, 25 bp, Canis familiaris
tgagctcctatttgcctcttaaact

SEQ ID NO: 174201 - DNA, 25 bp, Canis familiaris
tgaccgcatctgtaggcatcttaag

SEQ ID NO: 174202 - DNA, 25 bp, Canis familiaris
tgagaacactgaaggcacttgccaa

SEQ ID NO: 174203 - DNA, 25 bp, Canis familiaris
tgagaaactggaccaccatcctgaa

SEQ ID NO: 174204 - DNA, 25 bp, Canis familiaris
tgagaaacggctaccacatccaagg

SEQ ID NO: 174205 - DNA, 25 bp, Canis familiaris
tgagaagaaggcccagaagcccgcg

SEQ ID NO: 174206 - DNA, 25 bp, Canis familiaris
tgagcaggaaccccaagggcttcta

SEQ ID NO: 174207 - DNA, 25 bp, Canis familiaris
tgagagctaacccttaggctgtctt

SEQ ID NO: 174208 - DNA, 25 bp, Canis familiaris
tgagatataccccttagctttttcc

SEQ ID NO: 174209 - DNA, 25 bp, Canis familiaris
tctcaaacccgtgcagtttcattgc

SEQ ID NO: 174210 - DNA, 25 bp, Canis familiaris
tctcaacccaccgcagttgttgtta

SEQ ID NO: 174211 - DNA, 25 bp, Canis familiaris
tgacaacccacccaatttatttgtt

SEQ ID NO: 174212 - DNA, 25 bp, Canis familiaris
tgagccacgctccagagtatttcat

SEQ ID NO: 174213 - DNA, 25 bp, Canis familiaris
tgagcccactcatagatttaaatag

SEQ ID NO: 174214 - DNA, 25 bp, Canis familiaris
tgagcaagacttttatttatacgag

SEQ ID NO: 174215 - DNA, 25 bp, Canis familiaris
tgactaactgtgtaagtgcttataa

SEQ ID NO: 174216 - DNA, 25 bp, Canis familiaris
tgacctcaggtctatagttcttaaa

SEQ ID NO: 174217 - DNA, 25 bp, Canis familiaris
tgaccacaatccttgtgttcttcaa

SEQ ID NO: 174218 - DNA, 25 bp, Canis familiaris
tgagcgatgcaagatgtgttcacat

SEQ ID NO: 174219 - DNA, 25 bp, Canis familiaris
tgagctgtgacgggtggctcacttc

SEQ ID NO: 174220 - DNA, 25 bp, Canis familiaris
tgagattacagtgtggcctgctctc

SEQ ID NO: 174221 - DNA, 25 bp, Canis familiaris
tgagagcgacgtgtggagcttcggc

SEQ ID NO: 174222 - DNA, 25 bp, Canis familiaris
tgagagccaggtgttctgttcctgc

SEQ ID NO: 174223 - DNA, 25 bp, Canis familiaris
tgagaggcaggggtgcatcgttcct

SEQ ID NO: 174224 - DNA, 25 bp, Canis familiaris
tgacgtcagggtcagagctcagcct

SEQ ID NO: 174225 - DNA, 25 bp, Canis familiaris
tgaccccaagatgagtgctaggccc

SEQ ID NO: 174226 - DNA, 25 bp, Canis familiaris
tgaccccaagatgagtgctaggccc

SEQ ID NO: 174227 - DNA, 25 bp, Canis familiaris
tgaaatgccccagcaggcttggacc

SEQ ID NO: 174228 - DNA, 25 bp, Canis familiaris
tgaaagccccccggtatggataggg

SEQ ID NO: 174229 - DNA, 25 bp, Canis familiaris
tgacaaggccccacggaggtcgtgg

SEQ ID NO: 174230 - DNA, 25 bp, Canis familiaris
tgacaacccttctgcggagtgggga

SEQ ID NO: 174231 - DNA, 25 bp, Canis familiaris
tgaaaatccctgtggccagtttgaa

SEQ ID NO: 174232 - DNA, 25 bp, Canis familiaris
tgagaaatcaccgattgcccttgtc

SEQ ID NO: 174233 - DNA, 25 bp, Canis familiaris
tgagaaacactcctttccattatcc

SEQ ID NO: 174234 - DNA, 25 bp, Canis familiaris
tgagaagagcccactcactcttatc

SEQ ID NO: 174235 - DNA, 25 bp, Canis familiaris
tgagacggtggggtactgcttatcc

SEQ ID NO: 174236 - DNA, 25 bp, Canis familiaris
tgagacgggagggtcctcggctaaa

SEQ ID NO: 174237 - DNA, 25 bp, Canis familiaris
tgagaaggcgtggcctctctgaggt

SEQ ID NO: 174238 - DNA, 25 bp, Canis familiaris
tgagaaggcgtggcctctctgaggt

SEQ ID NO: 174239 - DNA, 25 bp, Canis familiaris
tgagaaggcgtggcctctctgaggt

SEQ ID NO: 174240 - DNA, 25 bp, Canis familiaris
tgaaacgcatccgataccatggcag

SEQ ID NO: 174241 - DNA, 25 bp, Canis familiaris
tgacaaacccaatctcatgggctaa

SEQ ID NO: 174242 - DNA, 25 bp, Canis familiaris
tgacttacccacatgtgtcctggaa

SEQ ID NO: 174243 - DNA, 25 bp, Canis familiaris
tgacctacttacatcttcaatgtgg

SEQ ID NO: 174244 - DNA, 25 bp, Canis familiaris
tgacctcacctacagctgggatgta

SEQ ID NO: 174245 - DNA, 25 bp, Canis familiaris
tgacccaaactctatgctggtggta

SEQ ID NO: 174246 - DNA, 25 bp, Canis familiaris
tgactccaacctcagtgggtgtcca

SEQ ID NO: 174247 - DNA, 25 bp, Canis familiaris
tgactccagaacctggtcctttttt

SEQ ID NO: 174248 - DNA, 25 bp, Canis familiaris
tgaaccaaaccaagcccttttgcta

SEQ ID NO: 174249 - DNA, 25 bp, Canis familiaris
tgaaattttccatcccattttgctt

SEQ ID NO: 174250 - DNA, 25 bp, Canis familiaris
tgaacttttccagaacctattgtat

SEQ ID NO: 174251 - DNA, 25 bp, Canis familiaris
tgacaaatttacttaacacatctta

SEQ ID NO: 174252 - DNA, 25 bp, Canis familiaris
tgagctgtctttaggtaaccgttat

SEQ ID NO: 174253 - DNA, 25 bp, Canis familiaris
tgcaacctcgtcagtaaccagatta

SEQ ID NO: 174254 - DNA, 25 bp, Canis familiaris
tgagaactggttctacacgcgagct

SEQ ID NO: 174255 - DNA, 25 bp, Canis familiaris
tgaagaaggtttaaccaggaccaga

SEQ ID NO: 174256 - DNA, 25 bp, Canis familiaris
tgagaaaggttttctgcccgaacgc

SEQ ID NO: 174257 - DNA, 25 bp, Canis familiaris
tgagaaaaagttgcgagcttaaagc

SEQ ID NO: 174258 - DNA, 25 bp, Canis familiaris
tgagcacaaacacttgcatccctca

SEQ ID NO: 174259 - DNA, 25 bp, Canis familiaris
tgagcaaggacaactgatccctccc

SEQ ID NO: 174260 - DNA, 25 bp, Canis familiaris
tgagcagattgacctcttctggctt

SEQ ID NO: 174261 - DNA, 25 bp, Canis familiaris
tgagaatcgcacctttgctgacttc

SEQ ID NO: 174262 - DNA, 25 bp, Canis familiaris
tgagagttaccatttctgtccatct

SEQ ID NO: 174263 - DNA, 25 bp, Canis familiaris
tgagagctaaccttagctgcttcca

SEQ ID NO: 174264 - DNA, 25 bp, Canis familiaris
tgagatgtgaacatttgctttctcc

SEQ ID NO: 174265 - DNA, 25 bp, Canis familiaris
tgagcagtgagctggtttcttgccc

SEQ ID NO: 174266 - DNA, 25 bp, Canis familiaris
tgacgtagttggttctgtagcttct

SEQ ID NO: 174267 - DNA, 25 bp, Canis familiaris
tgactggtttggggtgattctcctt

SEQ ID NO: 174268 - DNA, 25 bp, Canis familiaris
tgagcctgtttgagtggattcccat

SEQ ID NO: 174269 - DNA, 25 bp, Canis familiaris
tgacctgttatatttgtttcctgca

SEQ ID NO: 174270 - DNA, 25 bp, Canis familiaris
tgagccttaattttcttgactatga

SEQ ID NO: 174271 - DNA, 25 bp, Canis familiaris
tgactgttaatttggctgctgaaaa

SEQ ID NO: 174272 - DNA, 25 bp, Canis familiaris
tgactgtgtcccgtgcacggaaaat

SEQ ID NO: 174273 - DNA, 25 bp, Canis familiaris
tgactgattcctgagccgggatcaa

SEQ ID NO: 174274 - DNA, 25 bp, Canis familiaris
tgaccactcctttcctgagatgaaa

SEQ ID NO: 174275 - DNA, 25 bp, Canis familiaris
tgaccctccctagtcagatggcaat

SEQ ID NO: 174276 - DNA, 25 bp, Canis familiaris
tgagcaaccctgagtcaaggcctta

SEQ ID NO: 174277 - DNA, 25 bp, Canis familiaris
tgagcacccggaaccaggagactta

SEQ ID NO: 174278 - DNA, 25 bp, Canis familiaris
tgagacactcggaccaaaaccatct

SEQ ID NO: 174279 - DNA, 25 bp, Canis familiaris
tgagagcccaggctcagaaccaccc

SEQ ID NO: 174280 - DNA, 25 bp, Canis familiaris
tgagatccctgggacagaaccccac

SEQ ID NO: 174281 - DNA, 25 bp, Canis familiaris
tgagaccctgcaaatgggaccgccc

SEQ ID NO: 174282 - DNA, 25 bp, Canis familiaris
tgagatccctcaaatggagcctcct

SEQ ID NO: 174283 - DNA, 25 bp, Canis familiaris
tgagatcctcgcacagagatgggcc

SEQ ID NO: 174284 - DNA, 25 bp, Canis familiaris
tgagatctgtccacaaggggctgca

SEQ ID NO: 174285 - DNA, 25 bp, Canis familiaris
tgagatgtgtctggccagggggcca

SEQ ID NO: 174286 - DNA, 25 bp, Canis familiaris
tgagagtcctcgacgtgtggagcac

SEQ ID NO: 174287 - DNA, 25 bp, Canis familiaris
tgagagaacacactttgtcgcgcac

SEQ ID NO: 174288 - DNA, 25 bp, Canis familiaris
tgagaagaaggccgtgtcgccagct

SEQ ID NO: 174289 - DNA, 25 bp, Canis familiaris
tgagaagaacaggcctgcctccagg

SEQ ID NO: 174290 - DNA, 25 bp, Canis familiaris
tgagcaataacaggtctgtgatgcc

SEQ ID NO: 174291 - DNA, 25 bp, Canis familiaris
tgagcaaccacagctctattcccat

SEQ ID NO: 174292 - DNA, 25 bp, Canis familiaris
tgagagagccaggaccagaacccat

SEQ ID NO: 174293 - DNA, 25 bp, Canis familiaris
tgcagtgccgatgacgacaacttcc

SEQ ID NO: 174294 - DNA, 25 bp, Canis familiaris
tgagcgcactgtgcacagccataca

SEQ ID NO: 174295 - DNA, 25 bp, Canis familiaris
tgagctgagggcacacgctcaacca

SEQ ID NO: 174296 - DNA, 25 bp, Canis familiaris
tgagctcgacatattcctcagacca

SEQ ID NO: 174297 - DNA, 25 bp, Canis familiaris
tgagccgacatactggcacggcgaa

SEQ ID NO: 174298 - DNA, 25 bp, Canis familiaris
tgagcctgacgcctgacaagtggaa

SEQ ID NO: 174299 - DNA, 25 bp, Canis familiaris
tgagccagagcacgtgacctgtgga

SEQ ID NO: 174300 - DNA, 25 bp, Canis familiaris
tgagcacaacatcacaccgttgcac

SEQ ID NO: 174301 - DNA, 25 bp, Canis familiaris
tgaccaaaccaaccgtgatcatcgg

SEQ ID NO: 174302 - DNA, 25 bp, Canis familiaris
tgagccaaacccagagtacagcgcc

SEQ ID NO: 174303 - DNA, 25 bp, Canis familiaris
tgaccagtatctgcggtgtttccac

SEQ ID NO: 174304 - DNA, 25 bp, Canis familiaris
tgacctttccttgtttgtccaattc

SEQ ID NO: 174305 - DNA, 25 bp, Canis familiaris
tgacctattccgactttttggattt

SEQ ID NO: 174306 - DNA, 25 bp, Canis familiaris
tgactccattcagccttttgttgac

SEQ ID NO: 174307 - DNA, 25 bp, Canis familiaris
tgacttcttaactgtcttctttccc

SEQ ID NO: 174308 - DNA, 25 bp, Canis familiaris
tgactttttgaatttcttttacttg

SEQ ID NO: 174309 - DNA, 25 bp, Canis familiaris
tgacttttactttgctttttatctt

SEQ ID NO: 174310 - DNA, 25 bp, Canis familiaris
tgagcagtcttacttttgtagtttt

SEQ ID NO: 174311 - DNA, 25 bp, Canis familiaris
tgagaacttcctggttcctgttttc

SEQ ID NO: 174312 - DNA, 25 bp, Canis familiaris
tgagaacatggcacgggctcttagt

SEQ ID NO: 174313 - DNA, 25 bp, Canis familiaris
tgagaactggctctgtggacattat

SEQ ID NO: 174314 - DNA, 25 bp, Canis familiaris
tgagcagtttctttggggctttctc

SEQ ID NO: 174315 - DNA, 25 bp, Canis familiaris
tgacgttccttatagcgtgcttcta

SEQ ID NO: 174316 - DNA, 25 bp, Canis familiaris
tgacacttcagccttgaacctttgc

SEQ ID NO: 174317 - DNA, 25 bp, Canis familiaris
tgagcatttcatccatcttatcact

SEQ ID NO: 174318 - DNA, 25 bp, Canis familiaris
tgagcatttctgccaagcatgtccc

SEQ ID NO: 174319 - DNA, 25 bp, Canis familiaris
tgagcattgctggctcaataccctc

SEQ ID NO: 174320 - DNA, 25 bp, Canis familiaris
tgagctctgtgccatcaattaaccc

SEQ ID NO: 174321 - DNA, 25 bp, Canis familiaris
tgagcgtgtgcacatgttcaccatc

SEQ ID NO: 174322 - DNA, 25 bp, Canis familiaris
tgagagtgacatcttctccatcagg

SEQ ID NO: 174323 - DNA, 25 bp, Canis familiaris
tgagcaggacacgggccagatgcac

SEQ ID NO: 174324 - DNA, 25 bp, Canis familiaris
tgagagaatctcttgcccatgacat

SEQ ID NO: 174325 - DNA, 25 bp, Canis familiaris
tgagcagaattgtgcagcgctccat

SEQ ID NO: 174326 - DNA, 25 bp, Canis familiaris
tgcttggattgatgccgtcctatgt

SEQ ID NO: 174327 - DNA, 25 bp, Canis familiaris
tgcagtggcattcagcaggcttctg

SEQ ID NO: 174328 - DNA, 25 bp, Canis familiaris
tgagctgctaggcacggattctgct

SEQ ID NO: 174329 - DNA, 25 bp, Canis familiaris
tgagccgagagcctggggttgctcc

SEQ ID NO: 174330 - DNA, 25 bp, Canis familiaris
tgagcagggcgcctgatgtgggctt

SEQ ID NO: 174331 - DNA, 25 bp, Canis familiaris
tgagcatgagtggggtgcgcgagcg

SEQ ID NO: 174332 - DNA, 25 bp, Canis familiaris
tgacagcagtcggttggagcgagca

SEQ ID NO: 174333 - DNA, 25 bp, Canis familiaris
tgacagcgccagagacgggagcatg

SEQ ID NO: 174334 - DNA, 25 bp, Canis familiaris
tgagcgctgccgaggtgcaggagca

SEQ ID NO: 174335 - DNA, 25 bp, Canis familiaris
tgaactccggcgctgaagacaacac

SEQ ID NO: 174336 - DNA, 25 bp, Canis familiaris
tgaccccgaccagtgaagtccaatg

SEQ ID NO: 174337 - DNA, 25 bp, Canis familiaris
tgacctagcacacactgacagacgc

SEQ ID NO: 174338 - DNA, 25 bp, Canis familiaris
tgacctgcacaccaagatacagatc

SEQ ID NO: 174339 - DNA, 25 bp, Canis familiaris
tgacctccagcactaacacgatgca

SEQ ID NO: 174340 - DNA, 25 bp, Canis familiaris
tgaccctagactggatcacgaagga

SEQ ID NO: 174341 - DNA, 25 bp, Canis familiaris
tgactcccagagtgtcccgggagcc

SEQ ID NO: 174342 - DNA, 25 bp, Canis familiaris
tgagcatccaaatgaccccatgggt

SEQ ID NO: 174343 - DNA, 25 bp, Canis familiaris
tgagcacggtatagaccccagtggc

SEQ ID NO: 174344 - DNA, 25 bp, Canis familiaris
tgagcgagcggacttcgcccaggcc

SEQ ID NO: 174345 - DNA, 25 bp, Canis familiaris
tgagcgagtggatcaagcaccggcc

SEQ ID NO: 174346 - DNA, 25 bp, Canis familiaris
tgagctcagggacagtcacggccca

SEQ ID NO: 174347 - DNA, 25 bp, Canis familiaris
tgacgaagcgtgaagtgcctggccc

SEQ ID NO: 174348 - DNA, 25 bp, Canis familiaris
tgaccaaggacatgacactggaagg

SEQ ID NO: 174349 - DNA, 25 bp, Canis familiaris
tgacaccgtcactggacggattcag

SEQ ID NO: 174350 - DNA, 25 bp, Canis familiaris
taaatgcgtagatggaaggaaaagt

SEQ ID NO: 174351 - DNA, 25 bp, Canis familiaris
tgaaatcgttgaagcgagagaaaag

SEQ ID NO: 174352 - DNA, 25 bp, Canis familiaris
tgaccacgccgaatccggaagaaga

SEQ ID NO: 174353 - DNA, 25 bp, Canis familiaris
tgactccccgagatacgagaaggca

SEQ ID NO: 174354 - DNA, 25 bp, Canis familiaris
tgagcccccaaggttcgaaaggtgt

SEQ ID NO: 174355 - DNA, 25 bp, Canis familiaris
tgcaccctccttcttcagagggttt

SEQ ID NO: 174356 - DNA, 25 bp, Canis familiaris
tgagccgcttcgaacttcgggaatc

SEQ ID NO: 174357 - DNA, 25 bp, Canis familiaris
tgacgcgttctcatttctgggagtg

SEQ ID NO: 174358 - DNA, 25 bp, Canis familiaris
tgagccgcttctgcttcttaaagta

SEQ ID NO: 174359 - DNA, 25 bp, Canis familiaris
tgcaccagtgactctttaaatccga

SEQ ID NO: 174360 - DNA, 25 bp, Canis familiaris
tgagccaatgagctctttccacatc

SEQ ID NO: 174361 - DNA, 25 bp, Canis familiaris
tgagctaaagctgacctcctactga

SEQ ID NO: 174362 - DNA, 25 bp, Canis familiaris
tgagctgaatcagcatctcctcctg

SEQ ID NO: 174363 - DNA, 25 bp, Canis familiaris
tgagcataataagacacttcatgtc

SEQ ID NO: 174364 - DNA, 25 bp, Canis familiaris
tgagaaatgtaccctcgatcatgcc

SEQ ID NO: 174365 - DNA, 25 bp, Canis familiaris
tgagaatttgaaccattatgtcctg

SEQ ID NO: 174366 - DNA, 25 bp, Canis familiaris
tgagaattctgcagccagctcatcc

SEQ ID NO: 174367 - DNA, 25 bp, Canis familiaris
tgagcagtagtgccctagtcatcca

SEQ ID NO: 174368 - DNA, 25 bp, Canis familiaris
tgagcaggatgtctcctgtctgtcg

SEQ ID NO: 174369 - DNA, 25 bp, Canis familiaris
tgactgtgctgtcctgattgttgct

SEQ ID NO: 174370 - DNA, 25 bp, Canis familiaris
tgcactactgtcttttctggttaca

SEQ ID NO: 174371 - DNA, 25 bp, Canis familiaris
tgacgccttcacgatgttggttgac

SEQ ID NO: 174372 - DNA, 25 bp, Canis familiaris
tgagccctcactcatttgtgtgtgt

SEQ ID NO: 174373 - DNA, 25 bp, Canis familiaris
tgaccgcccttgaatttgctgtgac

SEQ ID NO: 174374 - DNA, 25 bp, Canis familiaris
tgaccccagttgctgggctctgtag

SEQ ID NO: 174375 - DNA, 25 bp, Canis familiaris
tgagaagccgttcctgtggcttgct

SEQ ID NO: 174376 - DNA, 25 bp, Canis familiaris
tgagaagggagcactgtgcctctcg

SEQ ID NO: 174377 - DNA, 25 bp, Canis familiaris
tgagaaggcgtacctggcagccaag

SEQ ID NO: 174378 - DNA, 25 bp, Canis familiaris
tgacgaggcagtgactgaggccctg

SEQ ID NO: 174379 - DNA, 25 bp, Canis familiaris
tgagcgtggagctggtgggctccga

SEQ ID NO: 174380 - DNA, 25 bp, Canis familiaris
tgacgtgagacccgggtctccagga

SEQ ID NO: 174381 - DNA, 25 bp, Canis familiaris
tgaccgacacagcaggagtctccag

SEQ ID NO: 174382 - DNA, 25 bp, Canis familiaris
tgaccaacatctcggctgtgaacta

SEQ ID NO: 174383 - DNA, 25 bp, Canis familiaris
tgaccaacaccagcacagaagtatc

SEQ ID NO: 174384 - DNA, 25 bp, Canis familiaris
tgacgacatcagcaaaagtcatgta

SEQ ID NO: 174385 - DNA, 25 bp, Canis familiaris
tgagcgatcacatcataacccttga

SEQ ID NO: 174386 - DNA, 25 bp, Canis familiaris
tgagcaataaaagcacccatctgat

SEQ ID NO: 174387 - DNA, 25 bp, Canis familiaris
tgaaggaacgaccaggccttgacgg

SEQ ID NO: 174388 - DNA, 25 bp, Canis familiaris
tgaaggtacaagggtgcgggcgggc

SEQ ID NO: 174389 - DNA, 25 bp, Canis familiaris
tgacgtttcaggtggagcaggcggg

SEQ ID NO: 174390 - DNA, 25 bp, Canis familiaris
tgacgtttgaactggaaccggtcct

SEQ ID NO: 174391 - DNA, 25 bp, Canis familiaris
tgaccttctggagacggaccgtgtc

SEQ ID NO: 174392 - DNA, 25 bp, Canis familiaris
tgaccttttgaaacaccagctcttt

SEQ ID NO: 174393 - DNA, 25 bp, Canis familiaris
tgacgcaggtggcaggcaccgtgta

SEQ ID NO: 174394 - DNA, 25 bp, Canis familiaris
tgagcatcaaggcgggcacggtgga

SEQ ID NO: 174395 - DNA, 25 bp, Canis familiaris
tgagcacaaccacggtccgaggtgc

SEQ ID NO: 174396 - DNA, 25 bp, Canis familiaris
tgcagtgcaccctggctacgggttc

SEQ ID NO: 174397 - DNA, 25 bp, Canis familiaris
tgcagtaacccccttgggtttcatc

SEQ ID NO: 174398 - DNA, 25 bp, Canis familiaris
tgactgttaccccttggaatggctc

SEQ ID NO: 174399 - DNA, 25 bp, Canis familiaris
tgacgttaccagctcatgggaccat

SEQ ID NO: 174400 - DNA, 25 bp, Canis familiaris
tgacgacgacgacgtagggtatctc

SEQ ID NO: 174401 - DNA, 25 bp, Canis familiaris
tgacggagacggcgagtgcgacttc

SEQ ID NO: 174402 - DNA, 25 bp, Canis familiaris
tgcggaattcggaaagtgggctgac

SEQ ID NO: 174403 - DNA, 25 bp, Canis familiaris
tgaaacttggtgaaaggaggttcct

SEQ ID NO: 174404 - DNA, 25 bp, Canis familiaris
tgaaactttggttcggggctgtcag

SEQ ID NO: 174405 - DNA, 25 bp, Canis familiaris
tgacaactttggtatcgtggaagga

SEQ ID NO: 174406 - DNA, 25 bp, Canis familiaris
tgaccacttcggcatcgtggagggc

SEQ ID NO: 174407 - DNA, 25 bp, Canis familiaris
tgaatgagttccccacttaatgtgg

SEQ ID NO: 174408 - DNA, 25 bp, Canis familiaris
tgacagtttcgcacctttcaattgc

SEQ ID NO: 174409 - DNA, 25 bp, Canis familiaris
tgagcgtatttcatctgctgcttca

SEQ ID NO: 174410 - DNA, 25 bp, Canis familiaris
tgactgttttcacctcattctatga

SEQ ID NO: 174411 - DNA, 25 bp, Canis familiaris
tgacttggtccattctatccacaga

SEQ ID NO: 174412 - DNA, 25 bp, Canis familiaris
tgagcgtttgccttcaactcaagtc

SEQ ID NO: 174413 - DNA, 25 bp, Canis familiaris
tgaccttggctctcttctaatgtca

SEQ ID NO: 174414 - DNA, 25 bp, Canis familiaris
tgaccttggcactcatgttcttgcc

SEQ ID NO: 174415 - DNA, 25 bp, Canis familiaris
tgagccttgaactttgacctctgca

SEQ ID NO: 174416 - DNA, 25 bp, Canis familiaris
tgaccgtcaagatggacctctaccg

SEQ ID NO: 174417 - DNA, 25 bp, Canis familiaris
tgaaaggaagttggcccctgacctt

SEQ ID NO: 174418 - DNA, 25 bp, Canis familiaris
tgaacatggcattgttaccaactgg

SEQ ID NO: 174419 - DNA, 25 bp, Canis familiaris
tgagcagctgtttttgaataaggga

SEQ ID NO: 174420 - DNA, 25 bp, Canis familiaris
tgacagtgtctttgtaatccggtga

SEQ ID NO: 174421 - DNA, 25 bp, Canis familiaris
tgagcctgttgtttagagcctggtg

SEQ ID NO: 174422 - DNA, 25 bp, Canis familiaris
tgacctttttgggatcactgtagga

SEQ ID NO: 174423 - DNA, 25 bp, Canis familiaris
tgaccttagttgccattaatgtagt

SEQ ID NO: 174424 - DNA, 25 bp, Canis familiaris
tgagcctttgttccattttcataaa

SEQ ID NO: 174425 - DNA, 25 bp, Canis familiaris
tgacccattgggattctgcttataa

SEQ ID NO: 174426 - DNA, 25 bp, Canis familiaris
tgaaataaaggcattcttggatgaa

SEQ ID NO: 174427 - DNA, 25 bp, Canis familiaris
tgaacattacggaattctttgggtt

SEQ ID NO: 174428 - DNA, 25 bp, Canis familiaris
tgaccccacgggaatcctgtgtggt

SEQ ID NO: 174429 - DNA, 25 bp, Canis familiaris
tgactgaccactttaagcctttgtg

SEQ ID NO: 174430 - DNA, 25 bp, Canis familiaris
tgacctccagcttttacctgtgagt

SEQ ID NO: 174431 - DNA, 25 bp, Canis familiaris
tgacccctctgtgtaccagatgaga

SEQ ID NO: 174432 - DNA, 25 bp, Canis familiaris
tgcactcaggctaggccaaccgaga

SEQ ID NO: 174433 - DNA, 25 bp, Canis familiaris
tgacatggctgcctaccaactggag

SEQ ID NO: 174434 - DNA, 25 bp, Canis familiaris
tgactgcaggagtccgccagcagga

SEQ ID NO: 174435 - DNA, 25 bp, Canis familiaris
tgagctgcaaaagctgccaggattg

SEQ ID NO: 174436 - DNA, 25 bp, Canis familiaris
tgagaaggaagccccatgtgcttgc

SEQ ID NO: 174437 - DNA, 25 bp, Canis familiaris
tgagaaggcccagcagatgcgcttc

SEQ ID NO: 174438 - DNA, 25 bp, Canis familiaris
tgaataacgccattaatcagattcg

SEQ ID NO: 174439 - DNA, 25 bp, Canis familiaris
tgcttaacccattgagccaacccaa

SEQ ID NO: 174440 - DNA, 25 bp, Canis familiaris
tgacttacccaaggccaaacataaa

SEQ ID NO: 174441 - DNA, 25 bp, Canis familiaris
tgagctcgataccaaaggagacact

SEQ ID NO: 174442 - DNA, 25 bp, Canis familiaris
tgacacgtcacgcatggaagaagtc

SEQ ID NO: 174443 - DNA, 25 bp, Canis familiaris
tgaccccactcacgggtgaatgatc

SEQ ID NO: 174444 - DNA, 25 bp, Canis familiaris
tgacctcaactacatggtttacatg

SEQ ID NO: 174445 - DNA, 25 bp, Canis familiaris
tgacctcaactacatggtctacatg

SEQ ID NO: 174446 - DNA, 25 bp, Canis familiaris
tgacctcaactacatggtctacatg

SEQ ID NO: 174447 - DNA, 25 bp, Canis familiaris
tgacctcacacttggcaggatgccc

SEQ ID NO: 174448 - DNA, 25 bp, Canis familiaris
tgagctatgcagtcttccaaaaccc

SEQ ID NO: 174449 - DNA, 25 bp, Canis familiaris
tgagcttcagccgggaacggcgctc

SEQ ID NO: 174450 - DNA, 25 bp, Canis familiaris
tgagcctcagcgggagaatgcctcc

SEQ ID NO: 174451 - DNA, 25 bp, Canis familiaris
tgagcctcacctggacatgatgact

SEQ ID NO: 174452 - DNA, 25 bp, Canis familiaris
tgagctcaccgatacatgcaatctt

SEQ ID NO: 174453 - DNA, 25 bp, Canis familiaris
tgactatccagtaactcgtgctcta

SEQ ID NO: 174454 - DNA, 25 bp, Canis familiaris
tgactattattatcagcactgctat

SEQ ID NO: 174455 - DNA, 25 bp, Canis familiaris
tgacttttcatcttaaccatattta

SEQ ID NO: 174456 - DNA, 25 bp, Canis familiaris
tgactttcttatcaatcatcttatt

SEQ ID NO: 174457 - DNA, 25 bp, Canis familiaris
tgacatgttgccttacccattatca

SEQ ID NO: 174458 - DNA, 25 bp, Canis familiaris
tgacatgttgccttacccattatca

SEQ ID NO: 174459 - DNA, 25 bp, Canis familiaris
tgacttcagcctagatctccaagag

SEQ ID NO: 174460 - DNA, 25 bp, Canis familiaris
tgacatctagctcaacccaatggta

SEQ ID NO: 174461 - DNA, 25 bp, Canis familiaris
tgagcatctggacaatcgcgctgtt

SEQ ID NO: 174462 - DNA, 25 bp, Canis familiaris
tgagcatctgaacatgtgccctcta

SEQ ID NO: 174463 - DNA, 25 bp, Canis familiaris
tgagcctgggcaagtgcacaagtct

SEQ ID NO: 174464 - DNA, 25 bp, Canis familiaris
tgagcttggacatgagcaccaggcc

SEQ ID NO: 174465 - DNA, 25 bp, Canis familiaris
tgagctgtggactcagactcccagc

SEQ ID NO: 174466 - DNA, 25 bp, Canis familiaris
tgagcagggcctgatgagccgacca

SEQ ID NO: 174467 - DNA, 25 bp, Canis familiaris
tgagaatctcctcagagcctagctc

SEQ ID NO: 174468 - DNA, 25 bp, Canis familiaris
tgactctcacctcaggctgtagtca

SEQ ID NO: 174469 - DNA, 25 bp, Canis familiaris
tgaaccacctgtaggactaggcccc

SEQ ID NO: 174470 - DNA, 25 bp, Canis familiaris
tgagcccctctgttgggctaggcac

SEQ ID NO: 174471 - DNA, 25 bp, Canis familiaris
tgaccacgcacttcatggacgaggc

SEQ ID NO: 174472 - DNA, 25 bp, Canis familiaris
tgacgtcgtgattcaggagcgcaag

SEQ ID NO: 174473 - DNA, 25 bp, Canis familiaris
tgaccatcgtctacaagagcagcat

SEQ ID NO: 174474 - DNA, 25 bp, Canis familiaris
tgactgcttctcccagagagcacat

SEQ ID NO: 174475 - DNA, 25 bp, Canis familiaris
tgactgtcagtcctctgtatcacta

SEQ ID NO: 174476 - DNA, 25 bp, Canis familiaris
tgacatatcctacttgaagcttgta

SEQ ID NO: 174477 - DNA, 25 bp, Canis familiaris
tgactcctcttgatcatagcaatta

SEQ ID NO: 174478 - DNA, 25 bp, Canis familiaris
tgactgccctggctaagctcattac

SEQ ID NO: 174479 - DNA, 25 bp, Canis familiaris
tgaccacctgggtgccagttacagg

SEQ ID NO: 174480 - DNA, 25 bp, Canis familiaris
tgacccctggtatccatggtacagt

SEQ ID NO: 174481 - DNA, 25 bp, Canis familiaris
tgacccctgaaatccatgttatcca

SEQ ID NO: 174482 - DNA, 25 bp, Canis familiaris
tgactgcagttactgacccttttcc

SEQ ID NO: 174483 - DNA, 25 bp, Canis familiaris
tgagcagtggtcttttacttttccc

SEQ ID NO: 174484 - DNA, 25 bp, Canis familiaris
tgacttggggctcttcatgtttccc

SEQ ID NO: 174485 - DNA, 25 bp, Canis familiaris
tgacttttggtcttttgattacaca

SEQ ID NO: 174486 - DNA, 25 bp, Canis familiaris
tgactttctaccttaatgattccac

SEQ ID NO: 174487 - DNA, 25 bp, Canis familiaris
tgacccctagccatgatcatgattc

SEQ ID NO: 174488 - DNA, 25 bp, Canis familiaris
tgacccgctaggccatgatatgatt

SEQ ID NO: 174489 - DNA, 25 bp, Canis familiaris
tgacccggtgtctatgattcatcat

SEQ ID NO: 174490 - DNA, 25 bp, Canis familiaris
tgagcccagtggtttatatgatgac

SEQ ID NO: 174491 - DNA, 25 bp, Canis familiaris
tgagctgcccggtttgcagtgagaa

SEQ ID NO: 174492 - DNA, 25 bp, Canis familiaris
tgagcaacacggataggctggacta

SEQ ID NO: 174493 - DNA, 25 bp, Canis familiaris
tgacataccgtcgtaggctgtccta

SEQ ID NO: 174494 - DNA, 25 bp, Canis familiaris
tgcagtccctgtgggtgaagtcctg

SEQ ID NO: 174495 - DNA, 25 bp, Canis familiaris
tgcagggagctgtgggaagtccagg

SEQ ID NO: 174496 - DNA, 25 bp, Canis familiaris
tgacaggactggggagaattccgtc

SEQ ID NO: 174497 - DNA, 25 bp, Canis familiaris
tgacggccaaggccagaggtgcccc

SEQ ID NO: 174498 - DNA, 25 bp, Canis familiaris
tgacttcatccgggagagggccacc

SEQ ID NO: 174499 - DNA, 25 bp, Canis familiaris
tgactatgattcgtgtaccggtccc

SEQ ID NO: 174500 - DNA, 25 bp, Canis familiaris
tgactatctggcgttatcctttggc

SEQ ID NO: 174501 - DNA, 25 bp, Canis familiaris
tgcacttctggcatagtcctattaa

SEQ ID NO: 174502 - DNA, 25 bp, Canis familiaris
tgagcttctcaggtgagtcctgtcc

SEQ ID NO: 174503 - DNA, 25 bp, Canis familiaris
tgagcattctaatgctgccttcctc

SEQ ID NO: 174504 - DNA, 25 bp, Canis familiaris
tgagctggtacatggcactgtcgtc

SEQ ID NO: 174505 - DNA, 25 bp, Canis familiaris
tgacatgcctccagaagtggcctca

SEQ ID NO: 174506 - DNA, 25 bp, Canis familiaris
tgaccatctccgacagagggaccag

SEQ ID NO: 174507 - DNA, 25 bp, Canis familiaris
tgaccagctcacccaggaaatgaag

SEQ ID NO: 174508 - DNA, 25 bp, Canis familiaris
tgaccagatctaccgggcatcaata

SEQ ID NO: 174509 - DNA, 25 bp, Canis familiaris
tgaccagagaggccacaggctcaag

SEQ ID NO: 174510 - DNA, 25 bp, Canis familiaris
tgaccagaagcttgacgcaccaagc

SEQ ID NO: 174511 - DNA, 25 bp, Canis familiaris
tgacaccaagtcaacagcccaagtt

SEQ ID NO: 174512 - DNA, 25 bp, Canis familiaris
tgaccagcgtgtatcctccaggtca

SEQ ID NO: 174513 - DNA, 25 bp, Canis familiaris
tgacaccggtttcgtctcaaatcga

SEQ ID NO: 174514 - DNA, 25 bp, Canis familiaris
tgacgcccacgcaggtcaaaatctg

SEQ ID NO: 174515 - DNA, 25 bp, Canis familiaris
tgagcccatcccagaaagcaatgat

SEQ ID NO: 174516 - DNA, 25 bp, Canis familiaris
tgagcctcaaattcatgataacaag

SEQ ID NO: 174517 - DNA, 25 bp, Canis familiaris
tgagccacaagttcataagaatatg

SEQ ID NO: 174518 - DNA, 25 bp, Canis familiaris
tgagcccatggcaaaaaacctgttc

SEQ ID NO: 174519 - DNA, 25 bp, Canis familiaris
tgagcgcttgagaagccaacccgtc

SEQ ID NO: 174520 - DNA, 25 bp, Canis familiaris
tgagctattaaaacccttcttcata

SEQ ID NO: 174521 - DNA, 25 bp, Canis familiaris
tgaccttcaacacttccatttaata

SEQ ID NO: 174522 - DNA, 25 bp, Canis familiaris
tccttgtaagaatcctttactataa

SEQ ID NO: 174523 - DNA, 25 bp, Canis familiaris
tctttctaaacctcttcttctgtaa

SEQ ID NO: 174524 - DNA, 25 bp, Canis familiaris
tattttgaaaaacatcccactggaa

SEQ ID NO: 174525 - DNA, 25 bp, Canis familiaris
tattttaaaaatcttggaggcacta

SEQ ID NO: 174526 - DNA, 25 bp, Canis familiaris
tgcactttaaaattttcccaggact

SEQ ID NO: 174527 - DNA, 25 bp, Canis familiaris
tgacagttaacttatttaccgacct

SEQ ID NO: 174528 - DNA, 25 bp, Canis familiaris
tgacgttatccttttatgacaaaca

SEQ ID NO: 174529 - DNA, 25 bp, Canis familiaris
tgcaggttacctttcattgtttaaa

SEQ ID NO: 174530 - DNA, 25 bp, Canis familiaris
tgccgttgacctctatgtgttacta

SEQ ID NO: 174531 - DNA, 25 bp, Canis familiaris
tgaccttggcctctctggtcaaaac

SEQ ID NO: 174532 - DNA, 25 bp, Canis familiaris
tgaccttgcctcatgttttcataaa

SEQ ID NO: 174533 - DNA, 25 bp, Canis familiaris
tgacctccagtcagatgttatcaga

SEQ ID NO: 174534 - DNA, 25 bp, Canis familiaris
tgaccttgaggcggtgcttgtacca

SEQ ID NO: 174535 - DNA, 25 bp, Canis familiaris
tgaccttggggtccatgtggatggc

SEQ ID NO: 174536 - DNA, 25 bp, Canis familiaris
tgaccgggggatcatcatgcaacag

SEQ ID NO: 174537 - DNA, 25 bp, Canis familiaris
tgaccgggatggcaccatcaacctc

SEQ ID NO: 174538 - DNA, 25 bp, Canis familiaris
tgactctggggtcaccatagacacc

SEQ ID NO: 174539 - DNA, 25 bp, Canis familiaris
tgacgggagtgtcatcgtctgccac

SEQ ID NO: 174540 - DNA, 25 bp, Canis familiaris
tgacgtgcaaatcggtcgtccgacc

SEQ ID NO: 174541 - DNA, 25 bp, Canis familiaris
tgaccatgcagaggcggctctgctt

SEQ ID NO: 174542 - DNA, 25 bp, Canis familiaris
tgacctgaggtgcacctggtacaga

SEQ ID NO: 174543 - DNA, 25 bp, Canis familiaris
tgacccagactgagccgggacagca

SEQ ID NO: 174544 - DNA, 25 bp, Canis familiaris
tgacccagactgagccgggacagca

SEQ ID NO: 174545 - DNA, 25 bp, Canis familiaris
tgacccagactgagccgggacagca

SEQ ID NO: 174546 - DNA, 25 bp, Canis familiaris
tgacccagactgagccgggacagca

SEQ ID NO: 174547 - DNA, 25 bp, Canis familiaris
tgacccagactgagccgggacagca

SEQ ID NO: 174548 - DNA, 25 bp, Canis familiaris
tgacccattcagaaccagacaggcc

SEQ ID NO: 174549 - DNA, 25 bp, Canis familiaris
tgacggactacctcatgaagatcct

SEQ ID NO: 174550 - DNA, 25 bp, Canis familiaris
tgacccctagccactgatatgattc

SEQ ID NO: 174551 - DNA, 25 bp, Canis familiaris
tgacccctcaagacctgtacttgat

SEQ ID NO: 174552 - DNA, 25 bp, Canis familiaris
tgactccccaatacctttgtgttgg

SEQ ID NO: 174553 - DNA, 25 bp, Canis familiaris
tgaccataccaaacctctcttattg

SEQ ID NO: 174554 - DNA, 25 bp, Canis familiaris
tgaccaaaaatagcacatcttttca

SEQ ID NO: 174555 - DNA, 25 bp, Canis familiaris
tgactccaattattccagactttcc

SEQ ID NO: 174556 - DNA, 25 bp, Canis familiaris
tgacctcaaatttatccgtctgccc

SEQ ID NO: 174557 - DNA, 25 bp, Canis familiaris
tgaccctgagatgttcccttatctc

SEQ ID NO: 174558 - DNA, 25 bp, Canis familiaris
tgaccagtggcgggtcactcttagc

SEQ ID NO: 174559 - DNA, 25 bp, Canis familiaris
tatccagggccagacaccttaggaa

SEQ ID NO: 174560 - DNA, 25 bp, Canis familiaris
tgaccgtgaaacccttcttgaggaa

SEQ ID NO: 174561 - DNA, 25 bp, Canis familiaris
tgacccatgtactcggttgtaggaa

SEQ ID NO: 174562 - DNA, 25 bp, Canis familiaris
tgaacaacgtttctgtttgggaact

SEQ ID NO: 174563 - DNA, 25 bp, Canis familiaris
tgaccagcacgctttttgtttggga

SEQ ID NO: 174564 - DNA, 25 bp, Canis familiaris
tgagccagccgaagtgtgtgtgtgt

SEQ ID NO: 174565 - DNA, 25 bp, Canis familiaris
tgagctgggagaaggctgcctgtta

SEQ ID NO: 174566 - DNA, 25 bp, Canis familiaris
tgagctggggctgaagttgtgaact

SEQ ID NO: 174567 - DNA, 25 bp, Canis familiaris
tgagcctgggctcgaagaaagaggt

SEQ ID NO: 174568 - DNA, 25 bp, Canis familiaris
tgagccgcccggaagccaaggcggc

SEQ ID NO: 174569 - DNA, 25 bp, Canis familiaris
tgagcccccgagaacacaaggtgct

SEQ ID NO: 174570 - DNA, 25 bp, Canis familiaris
tgaccacccatagaccagagcagtg

SEQ ID NO: 174571 - DNA, 25 bp, Canis familiaris
tgaccaatacattccaccacaaatg

SEQ ID NO: 174572 - DNA, 25 bp, Canis familiaris
tgacctattgcttcaaccaaccaga

SEQ ID NO: 174573 - DNA, 25 bp, Canis familiaris
tgacacttctcgaataccccgagac

SEQ ID NO: 174574 - DNA, 25 bp, Canis familiaris
tgacctctctgggatcacctgagga

SEQ ID NO: 174575 - DNA, 25 bp, Canis familiaris
tgagcttatgtgggacactcggcca

SEQ ID NO: 174576 - DNA, 25 bp, Canis familiaris
tgagcttaggggttgttggccagcc

SEQ ID NO: 174577 - DNA, 25 bp, Canis familiaris
tgacccagtgggtggtgtacgccat

SEQ ID NO: 174578 - DNA, 25 bp, Canis familiaris
tgacccagctgggccttgaggatag

SEQ ID NO: 174579 - DNA, 25 bp, Canis familiaris
tgcaggcggtggactttggagaacc

SEQ ID NO: 174580 - DNA, 25 bp, Canis familiaris
tgcagctcgggagcttggacgacac

SEQ ID NO: 174581 - DNA, 25 bp, Canis familiaris
tgacatccggcaggactggaccaac

SEQ ID NO: 174582 - DNA, 25 bp, Canis familiaris
tgagcccagagggcagtgtggcccc

SEQ ID NO: 174583 - DNA, 25 bp, Canis familiaris
tgagccactggggaggatggcccct

SEQ ID NO: 174584 - DNA, 25 bp, Canis familiaris
tgacctgcggctcaatgagccccgc

SEQ ID NO: 174585 - DNA, 25 bp, Canis familiaris
tgacggcgctgatggatgagacccc

SEQ ID NO: 174586 - DNA, 25 bp, Canis familiaris
tgagccctgtgtggtgatggagccc

SEQ ID NO: 174587 - DNA, 25 bp, Canis familiaris
tgacctctgtgtcagcatggctgca

SEQ ID NO: 174588 - DNA, 25 bp, Canis familiaris
tgaccttgctggccatctatgcagc

SEQ ID NO: 174589 - DNA, 25 bp, Canis familiaris
tgactccagctactgtctgagcagc

SEQ ID NO: 174590 - DNA, 25 bp, Canis familiaris
tgactgcacatgctctcacatggac

SEQ ID NO: 174591 - DNA, 25 bp, Canis familiaris
tgaccagcagcctttcacagaggca

SEQ ID NO: 174592 - DNA, 25 bp, Canis familiaris
tgacgcagagcctctggtggccaac

SEQ ID NO: 174593 - DNA, 25 bp, Canis familiaris
tgacgaggcgggcagtgtgtacgca

SEQ ID NO: 174594 - DNA, 25 bp, Canis familiaris
tgacgcaccggcagacgttgacgtc

SEQ ID NO: 174595 - DNA, 25 bp, Canis familiaris
tgagcgcccagtgagacgggcctgc

SEQ ID NO: 174596 - DNA, 25 bp, Canis familiaris
tgagccctcagagaacagcatgccc

SEQ ID NO: 174597 - DNA, 25 bp, Canis familiaris
tgacccacacatgagaacactggtg

SEQ ID NO: 174598 - DNA, 25 bp, Canis familiaris
tgaccccctccgtcaggaggatgga

SEQ ID NO: 174599 - DNA, 25 bp, Canis familiaris
tgacccatcctcggtgtttgtagga

SEQ ID NO: 174600 - DNA, 25 bp, Canis familiaris
tgaccctccacttggagttctggcc

SEQ ID NO: 174601 - DNA, 25 bp, Canis familiaris
tgacctcttcaacttaggctcttgc

SEQ ID NO: 174602 - DNA, 25 bp, Canis familiaris
tgagcccattcatcgtaagtctaaa

SEQ ID NO: 174603 - DNA, 25 bp, Canis familiaris
tgagcctctgtctgtgaaaaaaaaa

SEQ ID NO: 174604 - DNA, 25 bp, Canis familiaris
taatccttcctgaaaacccgaagag

SEQ ID NO: 174605 - DNA, 25 bp, Canis familiaris
tgaaaccgactgaacgacccgacgg

SEQ ID NO: 174606 - DNA, 25 bp, Canis familiaris
tgaagattctgatacctagctccga

SEQ ID NO: 174607 - DNA, 25 bp, Canis familiaris
tgaagcgtctgaagatactctacca

SEQ ID NO: 174608 - DNA, 25 bp, Canis familiaris
tgagcctgtcaggagcaactctcat

SEQ ID NO: 174609 - DNA, 25 bp, Canis familiaris
tgacctgtgatgctgcagacaccac

SEQ ID NO: 174610 - DNA, 25 bp, Canis familiaris
tgagccagctagcctgtggctcacc

SEQ ID NO: 174611 - DNA, 25 bp, Canis familiaris
tgactacatcgcctgctgtgtcaaa

SEQ ID NO: 174612 - DNA, 25 bp, Canis familiaris
tgacctcatcgttgtgtgtgcacag

SEQ ID NO: 174613 - DNA, 25 bp, Canis familiaris
tgaccattgctgcttgtgtgcacac

SEQ ID NO: 174614 - DNA, 25 bp, Canis familiaris
tgagcccgcagagttgcttgtgcaa

SEQ ID NO: 174615 - DNA, 25 bp, Canis familiaris
tgagccaggcatttctgttgctgcg

SEQ ID NO: 174616 - DNA, 25 bp, Canis familiaris
tgaccaggtcatattgctgcgggca

SEQ ID NO: 174617 - DNA, 25 bp, Canis familiaris
tgacctgggcaatctgtgtgggcat

SEQ ID NO: 174618 - DNA, 25 bp, Canis familiaris
tgaccatttaaactgtgtgtgtgtg

SEQ ID NO: 174619 - DNA, 25 bp, Canis familiaris
tgactctttcaccctggtgtgggtg

SEQ ID NO: 174620 - DNA, 25 bp, Canis familiaris
tgacttgtaccggctgttatgagat

SEQ ID NO: 174621 - DNA, 25 bp, Canis familiaris
tgactcgtatactctctgaagcgtg

SEQ ID NO: 174622 - DNA, 25 bp, Canis familiaris
tgacttgtattggccaccaactgta

SEQ ID NO: 174623 - DNA, 25 bp, Canis familiaris
tttggttgtgcagttccttggctac

SEQ ID NO: 174624 - DNA, 25 bp, Canis familiaris
tcaggaggaagagttcccgcctggc

SEQ ID NO: 174625 - DNA, 25 bp, Canis familiaris
tgacgggtaaatggcccgcctggca

SEQ ID NO: 174626 - DNA, 25 bp, Canis familiaris
tgacgggcaaaactatcacccttga

SEQ ID NO: 174627 - DNA, 25 bp, Canis familiaris
tgagcgggcaagggctctgagggct

SEQ ID NO: 174628 - DNA, 25 bp, Canis familiaris
tgacggtggacgaatctgggcagct

SEQ ID NO: 174629 - DNA, 25 bp, Canis familiaris
tgaccctgaattaattgggaaccgg

SEQ ID NO: 174630 - DNA, 25 bp, Canis familiaris
tgactccgaaaggaaggtggacccg

SEQ ID NO: 174631 - DNA, 25 bp, Canis familiaris
tgaccctcgacacataggctggaaa

SEQ ID NO: 174632 - DNA, 25 bp, Canis familiaris
tgaccttcgcaccaaactgtatgaa

SEQ ID NO: 174633 - DNA, 25 bp, Canis familiaris
tgacctcatgcctgaagtcctgtaa

SEQ ID NO: 174634 - DNA, 25 bp, Canis familiaris
tgacctgagtattgaattcttgaca

SEQ ID NO: 174635 - DNA, 25 bp, Canis familiaris
tgacctgaattctgcatgtttaaca

SEQ ID NO: 174636 - DNA, 25 bp, Canis familiaris
tgaccaaatttgccttctgtgtata

SEQ ID NO: 174637 - DNA, 25 bp, Canis familiaris
tgaccaaaatagcacatctgtttca

SEQ ID NO: 174638 - DNA, 25 bp, Canis familiaris
tgagccctgtattggactctgctca

SEQ ID NO: 174639 - DNA, 25 bp, Canis familiaris
tgagcctcggaaagcagctctgctc

SEQ ID NO: 174640 - DNA, 25 bp, Canis familiaris
tgagccccagaatgcagctggtgcc

SEQ ID NO: 174641 - DNA, 25 bp, Canis familiaris
tgacctcacagccaagcatgggggc

SEQ ID NO: 174642 - DNA, 25 bp, Canis familiaris
tgacctgcatcatggtctgcggggt

SEQ ID NO: 174643 - DNA, 25 bp, Canis familiaris
tgaccgtgcaggctctggagcagtt

SEQ ID NO: 174644 - DNA, 25 bp, Canis familiaris
tgacgacgcggccatgtgtgaagtt

SEQ ID NO: 174645 - DNA, 25 bp, Canis familiaris
tgacgccagcggcatggtcatcgtc

SEQ ID NO: 174646 - DNA, 25 bp, Canis familiaris
tgacccaggagcaggcttctgctgc

SEQ ID NO: 174647 - DNA, 25 bp, Canis familiaris
tgaccaggaagcgggtctctgccag

SEQ ID NO: 174648 - DNA, 25 bp, Canis familiaris
tgagcgctgagaatccgagtccgcc

SEQ ID NO: 174649 - DNA, 25 bp, Canis familiaris
tgactgtgagcaacctgagcctcga

SEQ ID NO: 174650 - DNA, 25 bp, Canis familiaris
tgagcgagaggtgctgagcgcgcga

SEQ ID NO: 174651 - DNA, 25 bp, Canis familiaris
tgacgagcaggcgacagggctggag

SEQ ID NO: 174652 - DNA, 25 bp, Canis familiaris
tgacgcagctgaccacggtgtgcga

SEQ ID NO: 174653 - DNA, 25 bp, Canis familiaris
tgagccgtcataacctgttgctgtc

SEQ ID NO: 174654 - DNA, 25 bp, Canis familiaris
tgagcctatcattcgggcttgtctc

SEQ ID NO: 174655 - DNA, 25 bp, Canis familiaris
tgacctatcttcacagtcttctgtc

SEQ ID NO: 174656 - DNA, 25 bp, Canis familiaris
tgaaatttgccccagtttctggcca

SEQ ID NO: 174657 - DNA, 25 bp, Canis familiaris
tgaaactatgggccaacttcgctcg

SEQ ID NO: 174658 - DNA, 25 bp, Canis familiaris
tgaaactcggctgtattaatcacgc

SEQ ID NO: 174659 - DNA, 25 bp, Canis familiaris
tgaattcacgagatctattaccgtt

SEQ ID NO: 174660 - DNA, 25 bp, Canis familiaris
tgaactcttggtccttaactcgttt

SEQ ID NO: 174661 - DNA, 25 bp, Canis familiaris
tgacctcttctccttgaaattcttt

SEQ ID NO: 174662 - DNA, 25 bp, Canis familiaris
tgaccacgagctcttggaattcgtg

SEQ ID NO: 174663 - DNA, 25 bp, Canis familiaris
tgacgcctagggacccagattcggc

SEQ ID NO: 174664 - DNA, 25 bp, Canis familiaris
tgagccactcaaggcatcccataac

SEQ ID NO: 174665 - DNA, 25 bp, Canis familiaris
tgagccatccagggatcccataaat

SEQ ID NO: 174666 - DNA, 25 bp, Canis familiaris
tgagccactcaggtgttcttagttt

SEQ ID NO: 174667 - DNA, 25 bp, Canis familiaris
tgacagccacggatattaacttttg

SEQ ID NO: 174668 - DNA, 25 bp, Canis familiaris
tgaaccaatgtttactatacggggg

SEQ ID NO: 174669 - DNA, 25 bp, Canis familiaris
tgaactaaacactctgaactgggca

SEQ ID NO: 174670 - DNA, 25 bp, Canis familiaris
tgaactaaagacacttaccgccagt

SEQ ID NO: 174671 - DNA, 25 bp, Canis familiaris
tgaacgaagaacttcctgacccctt

SEQ ID NO: 174672 - DNA, 25 bp, Canis familiaris
tgaagcgggaagtctccgagggccg

SEQ ID NO: 174673 - DNA, 25 bp, Canis familiaris
tgacacgggacttgatcctgggtct

SEQ ID NO: 174674 - DNA, 25 bp, Canis familiaris
tgaccacggaaatcggggcctttca

SEQ ID NO: 174675 - DNA, 25 bp, Canis familiaris
tgaacgggataatggtggtcttaaa

SEQ ID NO: 174676 - DNA, 25 bp, Canis familiaris
tgaaagggaaaccgcctatttcaca

SEQ ID NO: 174677 - DNA, 25 bp, Canis familiaris
tgactggggatgcacccctatcgtc

SEQ ID NO: 174678 - DNA, 25 bp, Canis familiaris
tgacgtttatgcgaccaacgactcc

SEQ ID NO: 174679 - DNA, 25 bp, Canis familiaris
tgacggtgtcgcgtccattcaattc

SEQ ID NO: 174680 - DNA, 25 bp, Canis familiaris
tgaagggttagctgctcccttctcc

SEQ ID NO: 174681 - DNA, 25 bp, Canis familiaris
tgaaatgcagtttcccattctctgt

SEQ ID NO: 174682 - DNA, 25 bp, Canis familiaris
tgaaacagcttgtgcctttctttct

SEQ ID NO: 174683 - DNA, 25 bp, Canis familiaris
tgctaaagccttgccaaccttatca

SEQ ID NO: 174684 - DNA, 25 bp, Canis familiaris
tgctaaactttataccggcaccacc

SEQ ID NO: 174685 - DNA, 25 bp, Canis familiaris
tgcacaacactttaaaaaggcctac

SEQ ID NO: 174686 - DNA, 25 bp, Canis familiaris
tgacaatcctagttaattagaccat

SEQ ID NO: 174687 - DNA, 25 bp, Canis familiaris
tgacgatccggaatcatttcaaaca

SEQ ID NO: 174688 - DNA, 25 bp, Canis familiaris
tgacattccggaaatttggatcgaa

SEQ ID NO: 174689 - DNA, 25 bp, Canis familiaris
tgacttccgcaaggatctgggctgg

SEQ ID NO: 174690 - DNA, 25 bp, Canis familiaris
tgacttcctgggcccaggagctggc

SEQ ID NO: 174691 - DNA, 25 bp, Canis familiaris
tgacgtccctgggcaaggactggca

SEQ ID NO: 174692 - DNA, 25 bp, Canis familiaris
tgacggtcctgggacgcgttgaggg

SEQ ID NO: 174693 - DNA, 25 bp, Canis familiaris
tgaccccactggaacactttgagaa

SEQ ID NO: 174694 - DNA, 25 bp, Canis familiaris
tgagccagaatacatacactcctcg

SEQ ID NO: 174695 - DNA, 25 bp, Canis familiaris
tgaccgaagaaatcctctccgagga

SEQ ID NO: 174696 - DNA, 25 bp, Canis familiaris
tgacctgcaagtaaaaacctctgag

SEQ ID NO: 174697 - DNA, 25 bp, Canis familiaris
tgagcctcaagaagaaccagcccta

SEQ ID NO: 174698 - DNA, 25 bp, Canis familiaris
tgacccatgagaagcaacgagagct

SEQ ID NO: 174699 - DNA, 25 bp, Canis familiaris
tgacacctgtctggctatgcgaggt

SEQ ID NO: 174700 - DNA, 25 bp, Canis familiaris
tgaccttggcgtcatgctgaggctc

SEQ ID NO: 174701 - DNA, 25 bp, Canis familiaris
tgaccttgtgggcatcatcagcctc

SEQ ID NO: 174702 - DNA, 25 bp, Canis familiaris
tgaccatcatgtatgttaacccagt

SEQ ID NO: 174703 - DNA, 25 bp, Canis familiaris
tgaaatagtggctctcaacccagct

SEQ ID NO: 174704 - DNA, 25 bp, Canis familiaris
tgactagggattgccataccccacc

SEQ ID NO: 174705 - DNA, 25 bp, Canis familiaris
tgaccgaagattaccaggcacaccc

SEQ ID NO: 174706 - DNA, 25 bp, Canis familiaris
tgaccgagagatcaccaggcagcaa

SEQ ID NO: 174707 - DNA, 25 bp, Canis familiaris
tgacttatgaatcacctgaccacaa

SEQ ID NO: 174708 - DNA, 25 bp, Canis familiaris
tgaatgtgagaacaccgaaccccgc

SEQ ID NO: 174709 - DNA, 25 bp, Canis familiaris
tgaattacaccaactggtaccccgg

SEQ ID NO: 174710 - DNA, 25 bp, Canis familiaris
tgacaaaaagcagctggtacggtcc

SEQ ID NO: 174711 - DNA, 25 bp, Canis familiaris
tgaaatcgaacagtcgctgaacggc

SEQ ID NO: 174712 - DNA, 25 bp, Canis familiaris
tgaaactgcccaggccatcaagggt

SEQ ID NO: 174713 - DNA, 25 bp, Canis familiaris
tgaaactgcccaggccatcaagggt

SEQ ID NO: 174714 - DNA, 25 bp, Canis familiaris
tgaaactgcccaggccatcaagggt

SEQ ID NO: 174715 - DNA, 25 bp, Canis familiaris
tgaaactgcccaggccatcaagggt

SEQ ID NO: 174716 - DNA, 25 bp, Canis familiaris
tgacgaggcccagagcaagagaggt

SEQ ID NO: 174717 - DNA, 25 bp, Canis familiaris
tgacggtgctgcgcaagaagggccc

SEQ ID NO: 174718 - DNA, 25 bp, Canis familiaris
tgactctggtcagagatacctggcc

SEQ ID NO: 174719 - DNA, 25 bp, Canis familiaris
tgacatccgtaaagacctctatgcc

SEQ ID NO: 174720 - DNA, 25 bp, Canis familiaris
tgacatccgtaaagacctctatgcc

SEQ ID NO: 174721 - DNA, 25 bp, Canis familiaris
tgacatgggctttggtctctttgac

SEQ ID NO: 174722 - DNA, 25 bp, Canis familiaris
tgactgctggcttgaatgtttcttg

SEQ ID NO: 174723 - DNA, 25 bp, Canis familiaris
tgactctgctcattttttctttgga

SEQ ID NO: 174724 - DNA, 25 bp, Canis familiaris
tgaatgttcaattcttttttggggg

SEQ ID NO: 174725 - DNA, 25 bp, Canis familiaris
tgaatgtccaaagtaccttctgtcc

SEQ ID NO: 174726 - DNA, 25 bp, Canis familiaris
tgactgtagaaagcctcctgctcac

SEQ ID NO: 174727 - DNA, 25 bp, Canis familiaris
tgcctgtgaaggctccttctgttct

SEQ ID NO: 174728 - DNA, 25 bp, Canis familiaris
tgcttgggaagcaccattattttta

SEQ ID NO: 174729 - DNA, 25 bp, Canis familiaris
tccagacaaagcaaccaagaccttg

SEQ ID NO: 174730 - DNA, 25 bp, Canis familiaris
tgactggcaaacaccaaacttcatg

SEQ ID NO: 174731 - DNA, 25 bp, Canis familiaris
tgactgtccaacacccatgggtgtg

SEQ ID NO: 174732 - DNA, 25 bp, Canis familiaris
tgcaattccaaaccccaatggttaa

SEQ ID NO: 174733 - DNA, 25 bp, Canis familiaris
tgaacgaccaagtcctcttcgttaa

SEQ ID NO: 174734 - DNA, 25 bp, Canis familiaris
tgacattgatacttacctcttcgct

SEQ ID NO: 174735 - DNA, 25 bp, Canis familiaris
tgacttcggagtccagtttccatct

SEQ ID NO: 174736 - DNA, 25 bp, Canis familiaris
tgacttcgaaggcacgttccaacgt

SEQ ID NO: 174737 - DNA, 25 bp, Canis familiaris
tgacgtcagagagcgagggtcccca

SEQ ID NO: 174738 - DNA, 25 bp, Canis familiaris
tgacgggagagcaggcgggctccca

SEQ ID NO: 174739 - DNA, 25 bp, Canis familiaris
tgactgggaatcctaggggctcagc

SEQ ID NO: 174740 - DNA, 25 bp, Canis familiaris
tgacggaggtcctggtgctggagag

SEQ ID NO: 174741 - DNA, 25 bp, Canis familiaris
tgactgtagggcccgggtgtgtggc

SEQ ID NO: 174742 - DNA, 25 bp, Canis familiaris
tgaccggaggccgatgtcggggtgc

SEQ ID NO: 174743 - DNA, 25 bp, Canis familiaris
tgaccaggggctattccatcgggtc

SEQ ID NO: 174744 - DNA, 25 bp, Canis familiaris
tgacacggtggtgttctcgggttca

SEQ ID NO: 174745 - DNA, 25 bp, Canis familiaris
tgacatctggggctttgaccctttc

SEQ ID NO: 174746 - DNA, 25 bp, Canis familiaris
tgcactgagggacttttggcccctg

SEQ ID NO: 174747 - DNA, 25 bp, Canis familiaris
tgactggggaaccttggccttatta

SEQ ID NO: 174748 - DNA, 25 bp, Canis familiaris
tgaccaggacactttttgacttatt

SEQ ID NO: 174749 - DNA, 25 bp, Canis familiaris
tgaccaggtacagcttctcatctgt

SEQ ID NO: 174750 - DNA, 25 bp, Canis familiaris
tgaccatggccaagacctttcagtc

SEQ ID NO: 174751 - DNA, 25 bp, Canis familiaris
tgaccatgttcagttccttatctac

SEQ ID NO: 174752 - DNA, 25 bp, Canis familiaris
tgaactgttcacacaatgatcccct

SEQ ID NO: 174753 - DNA, 25 bp, Canis familiaris
tgacaagtttgcaacaaccagccct

SEQ ID NO: 174754 - DNA, 25 bp, Canis familiaris
tgaccactttgtcaagctcatttcc

SEQ ID NO: 174755 - DNA, 25 bp, Canis familiaris
tgaccgtctcttcggatggatcttt

SEQ ID NO: 174756 - DNA, 25 bp, Canis familiaris
tgactcgttctgtaggagagattgg

SEQ ID NO: 174757 - DNA, 25 bp, Canis familiaris
tgacaggtgtcgtcagctgggggga

SEQ ID NO: 174758 - DNA, 25 bp, Canis familiaris
tgacgcttgatctcgggttgtgagt

SEQ ID NO: 174759 - DNA, 25 bp, Canis familiaris
tgactgtgtggcctggggattggag

SEQ ID NO: 174760 - DNA, 25 bp, Canis familiaris
tgcactggtggaagaagcgatcttt

SEQ ID NO: 174761 - DNA, 25 bp, Canis familiaris
tgactgctgtggagcagcccatcgt

SEQ ID NO: 174762 - DNA, 25 bp, Canis familiaris
tgacgtgctgcagcagacagccacc

SEQ ID NO: 174763 - DNA, 25 bp, Canis familiaris
tgacgctcgagtggctcagaactcc

SEQ ID NO: 174764 - DNA, 25 bp, Canis familiaris
tgactctcggctacagctgaacttc

SEQ ID NO: 174765 - DNA, 25 bp, Canis familiaris
tgactcacagagtacctatcacctc

SEQ ID NO: 174766 - DNA, 25 bp, Canis familiaris
tgactccaaagcgagctctcagcac

SEQ ID NO: 174767 - DNA, 25 bp, Canis familiaris
tgaccagcacagaaagctctcgcca

SEQ ID NO: 174768 - DNA, 25 bp, Canis familiaris
tgacatcatgctcatcaagctctcc

SEQ ID NO: 174769 - DNA, 25 bp, Canis familiaris
tgacatcagcgttatcactctcatt

SEQ ID NO: 174770 - DNA, 25 bp, Canis familiaris
tgacacactgatacagctctctctt

SEQ ID NO: 174771 - DNA, 25 bp, Canis familiaris
tgaaagcatgatgatccatctgtgt

SEQ ID NO: 174772 - DNA, 25 bp, Canis familiaris
tgaaagcgtcaagctcactgcggtg

SEQ ID NO: 174773 - DNA, 25 bp, Canis familiaris
tgaaagttaacttccctgggcaagg

SEQ ID NO: 174774 - DNA, 25 bp, Canis familiaris
tgaaagggaagaacccatccaaagg

SEQ ID NO: 174775 - DNA, 25 bp, Canis familiaris
tgaaaggagcatttaccccttaatg

SEQ ID NO: 174776 - DNA, 25 bp, Canis familiaris
tgaaaaagatttggccctggtaagg

SEQ ID NO: 174777 - DNA, 25 bp, Canis familiaris
tgaaataaataccccccagaaatgg

SEQ ID NO: 174778 - DNA, 25 bp, Canis familiaris
tgaaatacaatttccccctgaaaga

SEQ ID NO: 174779 - DNA, 25 bp, Canis familiaris
tgaacataatttgctacttccttag

SEQ ID NO: 174780 - DNA, 25 bp, Canis familiaris
tgacaaaattatctactcccacttc

SEQ ID NO: 174781 - DNA, 25 bp, Canis familiaris
tgaaaaattcatgtggttacgttaa

SEQ ID NO: 174782 - DNA, 25 bp, Canis familiaris
tgaaaaattcttactgacaacttgt

SEQ ID NO: 174783 - DNA, 25 bp, Canis familiaris
tgaacaagttttttggccctgcagt

SEQ ID NO: 174784 - DNA, 25 bp, Canis familiaris
tgaaaagttgttttttaatctgcaa

SEQ ID NO: 174785 - DNA, 25 bp, Canis familiaris
tgactacttcttgttgtctcactct

SEQ ID NO: 174786 - DNA, 25 bp, Canis familiaris
tgaccctttagaaatgtccccagcc

SEQ ID NO: 174787 - DNA, 25 bp, Canis familiaris
tgacctttttatcatgattcctccc

SEQ ID NO: 174788 - DNA, 25 bp, Canis familiaris
tgaccttgttgtcagtgtttctcct

SEQ ID NO: 174789 - DNA, 25 bp, Canis familiaris
tgaccttggtgttcttctattcatc

SEQ ID NO: 174790 - DNA, 25 bp, Canis familiaris
tgacttgtgggttttgctgacctcc

SEQ ID NO: 174791 - DNA, 25 bp, Canis familiaris
tgacggatgccggatttgaacctcc

SEQ ID NO: 174792 - DNA, 25 bp, Canis familiaris
tgacccagatcatgtttgagacctt

SEQ ID NO: 174793 - DNA, 25 bp, Canis familiaris
tgacccagatcatgtttgagacctt

SEQ ID NO: 174794 - DNA, 25 bp, Canis familiaris
tgacccagatggctttgtgtcctca

SEQ ID NO: 174795 - DNA, 25 bp, Canis familiaris
tgaccgaatgtccagtttagcctct

SEQ ID NO: 174796 - DNA, 25 bp, Canis familiaris
tgacctacatctgcatttcacagcc

SEQ ID NO: 174797 - DNA, 25 bp, Canis familiaris
tgacccaccaccttgataaacatca

SEQ ID NO: 174798 - DNA, 25 bp, Canis familiaris
tgacccaccttctgctaaagcagct

SEQ ID NO: 174799 - DNA, 25 bp, Canis familiaris
tgactcccctgttgagtaccagaga

SEQ ID NO: 174800 - DNA, 25 bp, Canis familiaris
tgaagatccgcgactggtaccagaa

SEQ ID NO: 174801 - DNA, 25 bp, Canis familiaris
tgccagatggccactttgacgggat

SEQ ID NO: 174802 - DNA, 25 bp, Canis familiaris
tgaagctgaccgtctttgaaagcga

SEQ ID NO: 174803 - DNA, 25 bp, Canis familiaris
tgaacttcccttttagaactgtgtt

SEQ ID NO: 174804 - DNA, 25 bp, Canis familiaris
tgaactactttaattagagttggtt

SEQ ID NO: 174805 - DNA, 25 bp, Canis familiaris
tgaactacttgtcgcattggggtcc

SEQ ID NO: 174806 - DNA, 25 bp, Canis familiaris
tgacactcctttcctgatacaggtc

SEQ ID NO: 174807 - DNA, 25 bp, Canis familiaris
tgacagccagtttttaaacatctcc

SEQ ID NO: 174808 - DNA, 25 bp, Canis familiaris
tgaccctgttcaattataatctcca

SEQ ID NO: 174809 - DNA, 25 bp, Canis familiaris
tgacacgctttcttctaggtttaca

SEQ ID NO: 174810 - DNA, 25 bp, Canis familiaris
tgacctgtgttggtgtcggtttctc

SEQ ID NO: 174811 - DNA, 25 bp, Canis familiaris
tgacctgtgtcgggacaagttctcc

SEQ ID NO: 174812 - DNA, 25 bp, Canis familiaris
tgaccggaccggatagttttgctga

SEQ ID NO: 174813 - DNA, 25 bp, Canis familiaris
tgaccccatcggtcggtgtgtttcg

SEQ ID NO: 174814 - DNA, 25 bp, Canis familiaris
tgacccctctggtgtgcggtgaggg

SEQ ID NO: 174815 - DNA, 25 bp, Canis familiaris
tgaccttcatctctgaggctgtgga

SEQ ID NO: 174816 - DNA, 25 bp, Canis familiaris
tgaccttctcccgaacattggaaga

SEQ ID NO: 174817 - DNA, 25 bp, Canis familiaris
tgacctgttcctgaacctggagggc

SEQ ID NO: 174818 - DNA, 25 bp, Canis familiaris
tgacttttcctgaaatccagcctgg

SEQ ID NO: 174819 - DNA, 25 bp, Canis familiaris
tgacgtcctcttaaacgagccttct

SEQ ID NO: 174820 - DNA, 25 bp, Canis familiaris
tgacggccttttaagcttccattta

SEQ ID NO: 174821 - DNA, 25 bp, Canis familiaris
tgacgctcgctattctacagcagtc

SEQ ID NO: 174822 - DNA, 25 bp, Canis familiaris
tgacctgatgtatgccacagcgtgc

SEQ ID NO: 174823 - DNA, 25 bp, Canis familiaris
tgaccgttatcatcagcatgggccc

SEQ ID NO: 174824 - DNA, 25 bp, Canis familiaris
tgaccttatctatcagtggctgagc

SEQ ID NO: 174825 - DNA, 25 bp, Canis familiaris
tgactcttgattttcttgtctcgct

SEQ ID NO: 174826 - DNA, 25 bp, Canis familiaris
tgacgtttatggacttggcttgcta

SEQ ID NO: 174827 - DNA, 25 bp, Canis familiaris
tgactttcgtggatgaggttcatgc

SEQ ID NO: 174828 - DNA, 25 bp, Canis familiaris
tgactttcgtcgtatgtgttttcgt

SEQ ID NO: 174829 - DNA, 25 bp, Canis familiaris
tgactattctgtcttcatcttttgg

SEQ ID NO: 174830 - DNA, 25 bp, Canis familiaris
tgactatatcgtttttttttccgcg

SEQ ID NO: 174831 - DNA, 25 bp, Canis familiaris
tgacctaagtttttttctgtgtctc

SEQ ID NO: 174832 - DNA, 25 bp, Canis familiaris
tgactaaactttttttctgtaccag

SEQ ID NO: 174833 - DNA, 25 bp, Canis familiaris
tgactaaaattttatttctctcaaa

SEQ ID NO: 174834 - DNA, 25 bp, Canis familiaris
tgacggatatatatctattggatct

SEQ ID NO: 174835 - DNA, 25 bp, Canis familiaris
tgacgacatgaacaccgtggaccac

SEQ ID NO: 174836 - DNA, 25 bp, Canis familiaris
tgactaagacaccataccttgacca

SEQ ID NO: 174837 - DNA, 25 bp, Canis familiaris
tgacctagaacactgtcctctgagc

SEQ ID NO: 174838 - DNA, 25 bp, Canis familiaris
tgactttgcttcctgtcactaagcc

SEQ ID NO: 174839 - DNA, 25 bp, Canis familiaris
tgaatcctgtcccttgattaagcaa

SEQ ID NO: 174840 - DNA, 25 bp, Canis familiaris
tgaaacgtccgtttataccaccact

SEQ ID NO: 174841 - DNA, 25 bp, Canis familiaris
taaacctcggaatagcaatccccct

SEQ ID NO: 174842 - DNA, 25 bp, Canis familiaris
tgaaccccggatgttcaaacagccc

SEQ ID NO: 174843 - DNA, 25 bp, Canis familiaris
tgaccgtcggtgaggtccaacgtcc

SEQ ID NO: 174844 - DNA, 25 bp, Canis familiaris
tgacacgtggggacggtcacggggc

SEQ ID NO: 174845 - DNA, 25 bp, Canis familiaris
tgacaaccagggggcggcactgggc

SEQ ID NO: 174846 - DNA, 25 bp, Canis familiaris
tgaaattaagaaacggcatctttgc

SEQ ID NO: 174847 - DNA, 25 bp, Canis familiaris
tgaataataaacacagccttcattg

SEQ ID NO: 174848 - DNA, 25 bp, Canis familiaris
tgaaaagtaagcagcggttatgtgt

SEQ ID NO: 174849 - DNA, 25 bp, Canis familiaris
tgaaaagtgacccaatgactttgtg

SEQ ID NO: 174850 - DNA, 25 bp, Canis familiaris
tgaaacctgtccacaactctatgtc

SEQ ID NO: 174851 - DNA, 25 bp, Canis familiaris
tgaaacctaaggacacacccattac

SEQ ID NO: 174852 - DNA, 25 bp, Canis familiaris
tgaaaactgaagattatgataatta

SEQ ID NO: 174853 - DNA, 25 bp, Canis familiaris
tgaaactgcgaatggctcattaaat

SEQ ID NO: 174854 - DNA, 25 bp, Canis familiaris
tgaacaattcaactggtattacaca

SEQ ID NO: 174855 - DNA, 25 bp, Canis familiaris
tgaaatctcccactggtcttacaca

SEQ ID NO: 174856 - DNA, 25 bp, Canis familiaris
tgacttccactttggtttctgcatc

SEQ ID NO: 174857 - DNA, 25 bp, Canis familiaris
tgactgtgacacagggcacttctct

SEQ ID NO: 174858 - DNA, 25 bp, Canis familiaris
tgacctgacctgatgtccagtcatc

SEQ ID NO: 174859 - DNA, 25 bp, Canis familiaris
tgacctgacctgatgtccattcatc

SEQ ID NO: 174860 - DNA, 25 bp, Canis familiaris
tgacctgacctgatgtccattcatc

SEQ ID NO: 174861 - DNA, 25 bp, Canis familiaris
tgaccgcaggtcatgcatcagttca

SEQ ID NO: 174862 - DNA, 25 bp, Canis familiaris
tgaccgagcgtggctacagcttcac

SEQ ID NO: 174863 - DNA, 25 bp, Canis familiaris
tgacccacgctggaaatgtatctgc

SEQ ID NO: 174864 - DNA, 25 bp, Canis familiaris
tgacctcagctcaggacttgatctc

SEQ ID NO: 174865 - DNA, 25 bp, Canis familiaris
tgaccctgctcagagctcttgtatc

SEQ ID NO: 174866 - DNA, 25 bp, Canis familiaris
tgacccggcatggggcatctgtatc

SEQ ID NO: 174867 - DNA, 25 bp, Canis familiaris
tgaccgagactggtcctatgtccca

SEQ ID NO: 174868 - DNA, 25 bp, Canis familiaris
tgacacaggtctttcctaaggccac

SEQ ID NO: 174869 - DNA, 25 bp, Canis familiaris
tgaaaggtgctctctataaactcga

SEQ ID NO: 174870 - DNA, 25 bp, Canis familiaris
tgacggggtcccaaattggcatcgc

SEQ ID NO: 174871 - DNA, 25 bp, Canis familiaris
tgacggaggtccggtatctagtcca

SEQ ID NO: 174872 - DNA, 25 bp, Canis familiaris
tgaaatgacgtctcgtctttcccac

SEQ ID NO: 174873 - DNA, 25 bp, Canis familiaris
tgaaaacgtccagactttacccact

SEQ ID NO: 174874 - DNA, 25 bp, Canis familiaris
tgaaaactaccatcctttctataac

SEQ ID NO: 174875 - DNA, 25 bp, Canis familiaris
tgacaaggtggggtcctttttcata

SEQ ID NO: 174876 - DNA, 25 bp, Canis familiaris
tgaacgaggggtccgctgttgactt

SEQ ID NO: 174877 - DNA, 25 bp, Canis familiaris
tgcaatagggtcaccgcgattgtcc

SEQ ID NO: 174878 - DNA, 25 bp, Canis familiaris
tctaagagtgattaaccgtagcccc

SEQ ID NO: 174879 - DNA, 25 bp, Canis familiaris
tccaaaagaacaaccgtgacgtcct

SEQ ID NO: 174880 - DNA, 25 bp, Canis familiaris
tccaagggaactttcgtcttcacct

SEQ ID NO: 174881 - DNA, 25 bp, Canis familiaris
tgacaagggttttttgccttcctct

SEQ ID NO: 174882 - DNA, 25 bp, Canis familiaris
tgcaaccggttaggttgccatttta

SEQ ID NO: 174883 - DNA, 25 bp, Canis familiaris
tgcttcctgtggaaagggccgttta

SEQ ID NO: 174884 - DNA, 25 bp, Canis familiaris
tgcactactaggttagggaggactt

SEQ ID NO: 174885 - DNA, 25 bp, Canis familiaris
tgcatccctaagactctaaaggttt

SEQ ID NO: 174886 - DNA, 25 bp, Canis familiaris
tgactcctaaactgatgaaggttgt

SEQ ID NO: 174887 - DNA, 25 bp, Canis familiaris
tgaatttaaactcagcaaagtctgg

SEQ ID NO: 174888 - DNA, 25 bp, Canis familiaris
tgaaatttcccctagaaacacgtct

SEQ ID NO: 174889 - DNA, 25 bp, Canis familiaris
tgaaacctcccttataattctttct

SEQ ID NO: 174890 - DNA, 25 bp, Canis familiaris
tgaccctttcttttcattgtcttta

SEQ ID NO: 174891 - DNA, 25 bp, Canis familiaris
tgaaactagttttgtatcccttgcc

SEQ ID NO: 174892 - DNA, 25 bp, Canis familiaris
tgaaacctgttattttctcggtcct

SEQ ID NO: 174893 - DNA, 25 bp, Canis familiaris
tgaaaattctttctcctagactcct

SEQ ID NO: 174894 - DNA, 25 bp, Canis familiaris
tgacatttttttttacttgaagcct

SEQ ID NO: 174895 - DNA, 25 bp, Canis familiaris
tgaaattttttttatcattaacact

SEQ ID NO: 174896 - DNA, 25 bp, Canis familiaris
tgaaacgacttttacactccaacac

SEQ ID NO: 174897 - DNA, 25 bp, Canis familiaris
tgaaacgacttttacactccaacac

SEQ ID NO: 174898 - DNA, 25 bp, Canis familiaris
tgaaacgacttttacactccaacac

SEQ ID NO: 174899 - DNA, 25 bp, Canis familiaris
tgaaacgacttttacactccaacac

SEQ ID NO: 174900 - DNA, 25 bp, Canis familiaris
tgacaacagcccattagcccaaaac

SEQ ID NO: 174901 - DNA, 25 bp, Canis familiaris
tgaactaccaaaaagtccctgaact

SEQ ID NO: 174902 - DNA, 25 bp, Canis familiaris
tgaactacctggtggctcttcataa

SEQ ID NO: 174903 - DNA, 25 bp, Canis familiaris
tgaaaaacatgatttgtgtctccaa

SEQ ID NO: 174904 - DNA, 25 bp, Canis familiaris
tgaaaaacacaattttgcctttttg

SEQ ID NO: 174905 - DNA, 25 bp, Canis familiaris
tgaaataaaagattttgccctttga

SEQ ID NO: 174906 - DNA, 25 bp, Canis familiaris
tgaaattgaaggtcttttacccaga

SEQ ID NO: 174907 - DNA, 25 bp, Canis familiaris
tgaaattaagactttccttccaagc

SEQ ID NO: 174908 - DNA, 25 bp, Canis familiaris
tgaagttaagtttccactacccagg

SEQ ID NO: 174909 - DNA, 25 bp, Canis familiaris
tgaatgtaaagtaaacccaccacca

SEQ ID NO: 174910 - DNA, 25 bp, Canis familiaris
tgacttcaacagtgacacccactct

SEQ ID NO: 174911 - DNA, 25 bp, Canis familiaris
tgaacagggcagtgtcctccaatgt

SEQ ID NO: 174912 - DNA, 25 bp, Canis familiaris
tgaccccgagagggtgcacacacat

SEQ ID NO: 174913 - DNA, 25 bp, Canis familiaris
tgaccccgcaatcaagagtcacatg

SEQ ID NO: 174914 - DNA, 25 bp, Canis familiaris
tgaccccacttctaaaacctgatga

SEQ ID NO: 174915 - DNA, 25 bp, Canis familiaris
tgacccacagtcacaaaggggagaa

SEQ ID NO: 174916 - DNA, 25 bp, Canis familiaris
tgaacccagttcccacagggtgaca

SEQ ID NO: 174917 - DNA, 25 bp, Canis familiaris
tgaattcttttcccgagaggctgac

SEQ ID NO: 174918 - DNA, 25 bp, Canis familiaris
tgacattttgactccagaactcatg

SEQ ID NO: 174919 - DNA, 25 bp, Canis familiaris
tgacatttgtggttctgaaatccag

SEQ ID NO: 174920 - DNA, 25 bp, Canis familiaris
tgacagtgtgaccttggcaacatcc

SEQ ID NO: 174921 - DNA, 25 bp, Canis familiaris
tgacgttcaactagtgacacccagc

SEQ ID NO: 174922 - DNA, 25 bp, Canis familiaris
tgacgttaactcttgactgatctag

SEQ ID NO: 174923 - DNA, 25 bp, Canis familiaris
tgacgttttcgattactgaccagta

SEQ ID NO: 174924 - DNA, 25 bp, Canis familiaris
tgacgttcccagagagctgacacca

SEQ ID NO: 174925 - DNA, 25 bp, Canis familiaris
tgaaattatctgctgggtgacacca

SEQ ID NO: 174926 - DNA, 25 bp, Canis familiaris
tgacatttgttggggctgttacacc

SEQ ID NO: 174927 - DNA, 25 bp, Canis familiaris
tgactttggtccagcgctacaagca

SEQ ID NO: 174928 - DNA, 25 bp, Canis familiaris
tgactgggcctaatcgcgtacaagc

SEQ ID NO: 174929 - DNA, 25 bp, Canis familiaris
tgactgggcaatggccgctgtacca

SEQ ID NO: 174930 - DNA, 25 bp, Canis familiaris
tgacagagatacagccagcttccca

SEQ ID NO: 174931 - DNA, 25 bp, Canis familiaris
tgacgagctcatcatcgacttcgac

SEQ ID NO: 174932 - DNA, 25 bp, Canis familiaris
tgacgagcagctcaagatcctcaac

SEQ ID NO: 174933 - DNA, 25 bp, Canis familiaris
tgactgaagcagcaattccaaattc

SEQ ID NO: 174934 - DNA, 25 bp, Canis familiaris
tgactgcaacctcttgccaaaactc

SEQ ID NO: 174935 - DNA, 25 bp, Canis familiaris
tgacagaagcctgccttaaccagtc

SEQ ID NO: 174936 - DNA, 25 bp, Canis familiaris
tgaaaacctctcctggggaagctca

SEQ ID NO: 174937 - DNA, 25 bp, Canis familiaris
tgaaaagctcaccggttggggatcc

SEQ ID NO: 174938 - DNA, 25 bp, Canis familiaris
tagaattgaacctcttggggcacct

SEQ ID NO: 174939 - DNA, 25 bp, Canis familiaris
taacattaagccaggggaggcccca

SEQ ID NO: 174940 - DNA, 25 bp, Canis familiaris
tgaaagaaagccaggcccagcgcca

SEQ ID NO: 174941 - DNA, 25 bp, Canis familiaris
tgcaaaagagcctgggcccaagcca

SEQ ID NO: 174942 - DNA, 25 bp, Canis familiaris
tgacaaattgccttagtgacagtag

SEQ ID NO: 174943 - DNA, 25 bp, Canis familiaris
tgacactttcacttttgcagattgg

SEQ ID NO: 174944 - DNA, 25 bp, Canis familiaris
tgacactttcacttttgcagattgg

SEQ ID NO: 174945 - DNA, 25 bp, Canis familiaris
tgaaccttagattcctcgacgggta

SEQ ID NO: 174946 - DNA, 25 bp, Canis familiaris
tgaccctttgttttgtccggtgaat

SEQ ID NO: 174947 - DNA, 25 bp, Canis familiaris
tgactttttgtttttctagccataa

SEQ ID NO: 174948 - DNA, 25 bp, Canis familiaris
tgactttatttcctttcttctgaaa

SEQ ID NO: 174949 - DNA, 25 bp, Canis familiaris
tgaatttttcactttttcttgtaat

SEQ ID NO: 174950 - DNA, 25 bp, Canis familiaris
tgaaatgttttcctttagcttcttt

SEQ ID NO: 174951 - DNA, 25 bp, Canis familiaris
tgaaatgtgtgtttggcctaccttg

SEQ ID NO: 174952 - DNA, 25 bp, Canis familiaris
tgaacgtgtctttggcctttgttcg

SEQ ID NO: 174953 - DNA, 25 bp, Canis familiaris
tgactaattctttacctatggttct

SEQ ID NO: 174954 - DNA, 25 bp, Canis familiaris
tgactagtctcttaaccctgaggcc

SEQ ID NO: 174955 - DNA, 25 bp, Canis familiaris
tgaatagttggaaaccactggggtt

SEQ ID NO: 174956 - DNA, 25 bp, Canis familiaris
tgaacctggacaagtaccggggctt

SEQ ID NO: 174957 - DNA, 25 bp, Canis familiaris
tgaacgaggagcagccctcgggcgt

SEQ ID NO: 174958 - DNA, 25 bp, Canis familiaris
tgacttggggcaatgtcccgtggcc

SEQ ID NO: 174959 - DNA, 25 bp, Canis familiaris
tgactgaggaggggtgcccgtgggc

SEQ ID NO: 174960 - DNA, 25 bp, Canis familiaris
tgaagcggagtgagtaccaggtgtc

SEQ ID NO: 174961 - DNA, 25 bp, Canis familiaris
tgaagtgcgacgtggacatccgtaa

SEQ ID NO: 174962 - DNA, 25 bp, Canis familiaris
tgaagtcgacagtgcccattttaac

SEQ ID NO: 174963 - DNA, 25 bp, Canis familiaris
tgaaggagaccggttcctttattcg

SEQ ID NO: 174964 - DNA, 25 bp, Canis familiaris
tgccggaggaaggttcctttgcccg

SEQ ID NO: 174965 - DNA, 25 bp, Canis familiaris
tgacaggtggaaaactttttgtcct

SEQ ID NO: 174966 - DNA, 25 bp, Canis familiaris
tacccaggataaccatttggcccac

SEQ ID NO: 174967 - DNA, 25 bp, Canis familiaris
tgacccaggatgacgatcgtttccc

SEQ ID NO: 174968 - DNA, 25 bp, Canis familiaris
tgactgcggcagatcgacgtgtttc

SEQ ID NO: 174969 - DNA, 25 bp, Canis familiaris
tgacatgtggcagctgcagcagcgg

SEQ ID NO: 174970 - DNA, 25 bp, Canis familiaris
tgacgtgcagcagctgtgcgaggcc

SEQ ID NO: 174971 - DNA, 25 bp, Canis familiaris
tgacagtgcaacgctgcggtggctg

SEQ ID NO: 174972 - DNA, 25 bp, Canis familiaris
tgacaggcacctagcgggacagtgg

SEQ ID NO: 174973 - DNA, 25 bp, Canis familiaris
tgacagccacaggcatgcggcgaga

SEQ ID NO: 174974 - DNA, 25 bp, Canis familiaris
tgaagcccaggcctagggtggtatg

SEQ ID NO: 174975 - DNA, 25 bp, Canis familiaris
tgaaacccgggaaggtggtgctggt

SEQ ID NO: 174976 - DNA, 25 bp, Canis familiaris
tgaacgcccgggtggaggaggtggg

SEQ ID NO: 174977 - DNA, 25 bp, Canis familiaris
tgacaccgacctgacacgggagggg

SEQ ID NO: 174978 - DNA, 25 bp, Canis familiaris
tgaagaagaattgaccgggaggaag

SEQ ID NO: 174979 - DNA, 25 bp, Canis familiaris
tgaacaaggaactaccggtacacca

SEQ ID NO: 174980 - DNA, 25 bp, Canis familiaris
tgaacagtcaaaccccgagttagtc

SEQ ID NO: 174981 - DNA, 25 bp, Canis familiaris
tgaaactccgaaccccagtggaatt

SEQ ID NO: 174982 - DNA, 25 bp, Canis familiaris
tgaaactggctgaaacggaggagac

SEQ ID NO: 174983 - DNA, 25 bp, Canis familiaris
tgaaacggctggccaagtcggaccc

SEQ ID NO: 174984 - DNA, 25 bp, Canis familiaris
tgacaaaggggcttcctctggaacc

SEQ ID NO: 174985 - DNA, 25 bp, Canis familiaris
tgacttacaggaactcttccgaccc

SEQ ID NO: 174986 - DNA, 25 bp, Canis familiaris
tgacggggatgctcacttgtcattg

SEQ ID NO: 174987 - DNA, 25 bp, Canis familiaris
tgaacgggaagctcactggcatggc

SEQ ID NO: 174988 - DNA, 25 bp, Canis familiaris
tgaaaacaaacccaacctgtgccag

SEQ ID NO: 174989 - DNA, 25 bp, Canis familiaris
tgaaaagaacacggaagcggcccgg

SEQ ID NO: 174990 - DNA, 25 bp, Canis familiaris
tgaaaaaaacccgtatggctccgcg

SEQ ID NO: 174991 - DNA, 25 bp, Canis familiaris
tgaaaaccagacactcgatcctgcc

SEQ ID NO: 174992 - DNA, 25 bp, Canis familiaris
tgaaaaccaagcccagctaaccttt

SEQ ID NO: 174993 - DNA, 25 bp, Canis familiaris
tgaaaacacaatagtccaaaacctt

SEQ ID NO: 174994 - DNA, 25 bp, Canis familiaris
tgaattcttcagtgtaaaaatcctt

SEQ ID NO: 174995 - DNA, 25 bp, Canis familiaris
tgaactgttcactttaaaattgttt

SEQ ID NO: 174996 - DNA, 25 bp, Canis familiaris
tgcacacgttcctcttaaaattcgg

SEQ ID NO: 174997 - DNA, 25 bp, Canis familiaris
tgcacatcggctgttcctaaactgc

SEQ ID NO: 174998 - DNA, 25 bp, Canis familiaris
tgactcaggcatgtttccagccaca

SEQ ID NO: 174999 - DNA, 25 bp, Canis familiaris
tgactaaatcctgccaccagacatc

SEQ ID NO: 175000 - DNA, 25 bp, Canis familiaris
tgacataaacctcctcagcttgtcc

SEQ ID NO: 175001 - DNA, 25 bp, Canis familiaris
tgactgaaatcctgttcttggccac

SEQ ID NO: 175002 - DNA, 25 bp, Canis familiaris
tgacgacgacaagcgtttgtgccgc

SEQ ID NO: 175003 - DNA, 25 bp, Canis familiaris
tgacagtccgcaaccagttgtagcc

SEQ ID NO: 175004 - DNA, 25 bp, Canis familiaris
tgacaggcctgctgaagctcattgg

SEQ ID NO: 175005 - DNA, 25 bp, Canis familiaris
tgacagggctgacgcaagctcttca

SEQ ID NO: 175006 - DNA, 25 bp, Canis familiaris
tgacagcgtgggcaatgcctgtcgc

SEQ ID NO: 175007 - DNA, 25 bp, Canis familiaris
tgacgctgggcacgttgagtgaatc

SEQ ID NO: 175008 - DNA, 25 bp, Canis familiaris
tgaagtggacccttcggtatccaga

SEQ ID NO: 175009 - DNA, 25 bp, Canis familiaris
tgaagttcagccattttgtatccaa

SEQ ID NO: 175010 - DNA, 25 bp, Canis familiaris
tgacgcccaactatttgataataaa

SEQ ID NO: 175011 - DNA, 25 bp, Canis familiaris
tgacagcttccattctattttagat

SEQ ID NO: 175012 - DNA, 25 bp, Canis familiaris
tgacgctagcctactgtatttctgt

SEQ ID NO: 175013 - DNA, 25 bp, Canis familiaris
tgcaagccaggctgtctactgtgtg

SEQ ID NO: 175014 - DNA, 25 bp, Canis familiaris
tgaacctgccaaccttcagtgttcg

SEQ ID NO: 175015 - DNA, 25 bp, Canis familiaris
tgaacctgccaaccttcagtgttcg

SEQ ID NO: 175016 - DNA, 25 bp, Canis familiaris
tgaaacttctcatcttaggcgctca

SEQ ID NO: 175017 - DNA, 25 bp, Canis familiaris
tgaaacttactgtggacctgctgca

SEQ ID NO: 175018 - DNA, 25 bp, Canis familiaris
tgaacgcattggcgtcgaccatcgt

SEQ ID NO: 175019 - DNA, 25 bp, Canis familiaris
tgaacgaaagtcgtcagacccgtcc

SEQ ID NO: 175020 - DNA, 25 bp, Canis familiaris
tgaaccaaagggagacgctcggcca

SEQ ID NO: 175021 - DNA, 25 bp, Canis familiaris
tgaacagaaatacgtaaccttagcc

SEQ ID NO: 175022 - DNA, 25 bp, Canis familiaris
tgaacaaagaaacaacaccaaccca

SEQ ID NO: 175023 - DNA, 25 bp, Canis familiaris
tgacacagaagtgacaaccccacct

SEQ ID NO: 175024 - DNA, 25 bp, Canis familiaris
tgactataagtcaaacccctcagcc

SEQ ID NO: 175025 - DNA, 25 bp, Canis familiaris
tgacgaaagaagaagcccctagagc

SEQ ID NO: 175026 - DNA, 25 bp, Canis familiaris
tgcaaagaaactaaaccccagggat

SEQ ID NO: 175027 - DNA, 25 bp, Canis familiaris
tgaaagaaactatcatgaaccagga

SEQ ID NO: 175028 - DNA, 25 bp, Canis familiaris
tgaacagagccacagaaggaccgtg

SEQ ID NO: 175029 - DNA, 25 bp, Canis familiaris
tgaactggtcgtggtccgaccgtgc

SEQ ID NO: 175030 - DNA, 25 bp, Canis familiaris
tgaacttcctgaagtcgcggctttc

SEQ ID NO: 175031 - DNA, 25 bp, Canis familiaris
tgaagcccttaattccggattcttg

SEQ ID NO: 175032 - DNA, 25 bp, Canis familiaris
tgaagctactaatctcctggtttgg

SEQ ID NO: 175033 - DNA, 25 bp, Canis familiaris
tgaacagaaagtcctcctggtttgg

SEQ ID NO: 175034 - DNA, 25 bp, Canis familiaris
tgacatcactgtaggactccggttt

SEQ ID NO: 175035 - DNA, 25 bp, Canis familiaris
tccatcccctggatcgggtattttc

SEQ ID NO: 175036 - DNA, 25 bp, Canis familiaris
tgcacccgccagcgggtgttttttc

SEQ ID NO: 175037 - DNA, 25 bp, Canis familiaris
tgcccttccaaagggtggtccttgt

SEQ ID NO: 175038 - DNA, 25 bp, Canis familiaris
tccacattgccagaggtggttccta

SEQ ID NO: 175039 - DNA, 25 bp, Canis familiaris
tccacatgggccatggagccttcct

SEQ ID NO: 175040 - DNA, 25 bp, Canis familiaris
tgccataggtcggggtgccaagtca

SEQ ID NO: 175041 - DNA, 25 bp, Canis familiaris
tgacatcaagaaggtggtgaagcag

SEQ ID NO: 175042 - DNA, 25 bp, Canis familiaris
tgacatcacccgtgtgctgaagcac

SEQ ID NO: 175043 - DNA, 25 bp, Canis familiaris
tgactcccttggatgtgaagcatgg

SEQ ID NO: 175044 - DNA, 25 bp, Canis familiaris
tgaaccctccgcgggaaagggccat

SEQ ID NO: 175045 - DNA, 25 bp, Canis familiaris
tgaagccacccccggaagagagggt

SEQ ID NO: 175046 - DNA, 25 bp, Canis familiaris
tgaactacctccccttggaaagagc

SEQ ID NO: 175047 - DNA, 25 bp, Canis familiaris
tgaatgtagttcaaccgtggaaaga

SEQ ID NO: 175048 - DNA, 25 bp, Canis familiaris
tgaagtagtacaactccctgaaccg

SEQ ID NO: 175049 - DNA, 25 bp, Canis familiaris
tgaactttataatcctcgaatccag

SEQ ID NO: 175050 - DNA, 25 bp, Canis familiaris
tgacactttgactttagcccagatc

SEQ ID NO: 175051 - DNA, 25 bp, Canis familiaris
tgaactatatccgtaacctggatag

SEQ ID NO: 175052 - DNA, 25 bp, Canis familiaris
tgaagctttgacataatctataaat

SEQ ID NO: 175053 - DNA, 25 bp, Canis familiaris
tgaagtcttcaagtgaacgtcacaa

SEQ ID NO: 175054 - DNA, 25 bp, Canis familiaris
tgacatgtttgaactggacctgccc

SEQ ID NO: 175055 - DNA, 25 bp, Canis familiaris
tgacttgattatgtcatcctcccac

SEQ ID NO: 175056 - DNA, 25 bp, Canis familiaris
tgacatgaatgtgtcttcctcccag

SEQ ID NO: 175057 - DNA, 25 bp, Canis familiaris
tgaaatgatgtgttctccccaagca

SEQ ID NO: 175058 - DNA, 25 bp, Canis familiaris
tgacactgactgattccctagacaa

SEQ ID NO: 175059 - DNA, 25 bp, Canis familiaris
tgacggactatttagcactctggcc

SEQ ID NO: 175060 - DNA, 25 bp, Canis familiaris
tgaagtagtatttggccggggctga

SEQ ID NO: 175061 - DNA, 25 bp, Canis familiaris
taagtttactacacaggagctgctg

SEQ ID NO: 175062 - DNA, 25 bp, Canis familiaris
tgaagcttttgctcctcagtactta

SEQ ID NO: 175063 - DNA, 25 bp, Canis familiaris
tgaagctattcggatcctggctgca

SEQ ID NO: 175064 - DNA, 25 bp, Canis familiaris
tgacagatggacagttcgtgctgca

SEQ ID NO: 175065 - DNA, 25 bp, Canis familiaris
tgaagattgatcagcttgtgtatgg

SEQ ID NO: 175066 - DNA, 25 bp, Canis familiaris
tgaattagttagatgtttgtgggtt

SEQ ID NO: 175067 - DNA, 25 bp, Canis familiaris
tgacatttgttaattactttggggt

SEQ ID NO: 175068 - DNA, 25 bp, Canis familiaris
tgaatagccattattaaccagtggt

SEQ ID NO: 175069 - DNA, 25 bp, Canis familiaris
tgaacagcctttgccaatcgtgggt

SEQ ID NO: 175070 - DNA, 25 bp, Canis familiaris
tgaaacgcaatatcagattcgggag

SEQ ID NO: 175071 - DNA, 25 bp, Canis familiaris
tgacatcaccagtgccgagtcggaa

SEQ ID NO: 175072 - DNA, 25 bp, Canis familiaris
tgacagctccagcagggagcatgtg

SEQ ID NO: 175073 - DNA, 25 bp, Canis familiaris
tgacacgccacacctgtagaggtcg

SEQ ID NO: 175074 - DNA, 25 bp, Canis familiaris
tgaaatccatcatcccagtggtcat

SEQ ID NO: 175075 - DNA, 25 bp, Canis familiaris
tgactaatctgatctccacagcgtc

SEQ ID NO: 175076 - DNA, 25 bp, Canis familiaris
tgactagaccaactccaataatccc

SEQ ID NO: 175077 - DNA, 25 bp, Canis familiaris
tgactaaccacatccacaaagcaca

SEQ ID NO: 175078 - DNA, 25 bp, Canis familiaris
tgacttctctcctacaaaaagccaa

SEQ ID NO: 175079 - DNA, 25 bp, Canis familiaris
tgactggctcacccaaacaagacca

SEQ ID NO: 175080 - DNA, 25 bp, Canis familiaris
tgacggccacagcctaaagcacaca

SEQ ID NO: 175081 - DNA, 25 bp, Canis familiaris
tgcacgtgcatcccagctaagatga

SEQ ID NO: 175082 - DNA, 25 bp, Canis familiaris
tgacatgtcttgcagcttcgtgtag

SEQ ID NO: 175083 - DNA, 25 bp, Canis familiaris
tgacttctggcttctaggctgtaga

SEQ ID NO: 175084 - DNA, 25 bp, Canis familiaris
tgacatcttggcacgagccttcagc

SEQ ID NO: 175085 - DNA, 25 bp, Canis familiaris
tgaactacgttgggcctgtgcagcc

SEQ ID NO: 175086 - DNA, 25 bp, Canis familiaris
tgaaatgacgttgccgattcaccag

SEQ ID NO: 175087 - DNA, 25 bp, Canis familiaris
tgaaatggcgcgtcccaagacgcca

SEQ ID NO: 175088 - DNA, 25 bp, Canis familiaris
tgaaatcgcccaatgcaaaactccc

SEQ ID NO: 175089 - DNA, 25 bp, Canis familiaris
tgaaacctggcaaatgacacttccc

SEQ ID NO: 175090 - DNA, 25 bp, Canis familiaris
tgaaatccttcacgcatatcagctg

SEQ ID NO: 175091 - DNA, 25 bp, Canis familiaris
tgaaatccatttcctaactgcttag

SEQ ID NO: 175092 - DNA, 25 bp, Canis familiaris
tgaaattcattatctgttccttgca

SEQ ID NO: 175093 - DNA, 25 bp, Canis familiaris
tgaactatcaaaacaactccttttt

SEQ ID NO: 175094 - DNA, 25 bp, Canis familiaris
tgaacttcgaatttaatcatttttt

SEQ ID NO: 175095 - DNA, 25 bp, Canis familiaris
tgaaattccttaactacttctcttt

SEQ ID NO: 175096 - DNA, 25 bp, Canis familiaris
tgaacttaggtacctgtttcccatt

SEQ ID NO: 175097 - DNA, 25 bp, Canis familiaris
tgaatttaggtgtccacgtttccct

SEQ ID NO: 175098 - DNA, 25 bp, Canis familiaris
tgacactataggaaccaggtgtgta

SEQ ID NO: 175099 - DNA, 25 bp, Canis familiaris
tgacagaaatatccactcagagtgg

SEQ ID NO: 175100 - DNA, 25 bp, Canis familiaris
tgacatgtacattcatctgctcacg

SEQ ID NO: 175101 - DNA, 25 bp, Canis familiaris
tgacactagattgcgctcactgagt

SEQ ID NO: 175102 - DNA, 25 bp, Canis familiaris
tgacaatgaatacggctacagcaac

SEQ ID NO: 175103 - DNA, 25 bp, Canis familiaris
tgactatggacacagatggcgcaca

SEQ ID NO: 175104 - DNA, 25 bp, Canis familiaris
tgaacatggacatcagagaccagta

SEQ ID NO: 175105 - DNA, 25 bp, Canis familiaris
tgactgtgccactcaggcaccacta

SEQ ID NO: 175106 - DNA, 25 bp, Canis familiaris
tgactgtcccagccaggcaagatct

SEQ ID NO: 175107 - DNA, 25 bp, Canis familiaris
tgaaaccacagccaggaggcctcaa

SEQ ID NO: 175108 - DNA, 25 bp, Canis familiaris
taatcagctccaaaggggtagccaa

SEQ ID NO: 175109 - DNA, 25 bp, Canis familiaris
tgaacagcctctgaaggtaatgcca

SEQ ID NO: 175110 - DNA, 25 bp, Canis familiaris
tgaagtcttgctgggagggttgcct

SEQ ID NO: 175111 - DNA, 25 bp, Canis familiaris
tgacttcctggcccaggagctggcc

SEQ ID NO: 175112 - DNA, 25 bp, Canis familiaris
tgacttcacagcccagcatgggggc

SEQ ID NO: 175113 - DNA, 25 bp, Canis familiaris
tgacttgatgcgcttcattcaggag

SEQ ID NO: 175114 - DNA, 25 bp, Canis familiaris
tgacttctgtggccatctatcaggg

SEQ ID NO: 175115 - DNA, 25 bp, Canis familiaris
tgactacatgtgtccagctaccaac

SEQ ID NO: 175116 - DNA, 25 bp, Canis familiaris
tgactgaggtaccaaagcccagcct

SEQ ID NO: 175117 - DNA, 25 bp, Canis familiaris
tgactagagcttgggacacccacct

SEQ ID NO: 175118 - DNA, 25 bp, Canis familiaris
tgacttgacctaaatacaccctgct

SEQ ID NO: 175119 - DNA, 25 bp, Canis familiaris
tgcacgctgaccaaaaacgccatta

SEQ ID NO: 175120 - DNA, 25 bp, Canis familiaris
tgactgcatgcatggaaccaatcca

SEQ ID NO: 175121 - DNA, 25 bp, Canis familiaris
tgacttgaatgcaaacacactccaa

SEQ ID NO: 175122 - DNA, 25 bp, Canis familiaris
tgacttgagctgaaacccaggcaga

SEQ ID NO: 175123 - DNA, 25 bp, Canis familiaris
tgactatgtgcccaaactctgtgaa

SEQ ID NO: 175124 - DNA, 25 bp, Canis familiaris
tgcatcctacccacacatatgtgaa

SEQ ID NO: 175125 - DNA, 25 bp, Canis familiaris
tgcataccagtcttaccaattataa

SEQ ID NO: 175126 - DNA, 25 bp, Canis familiaris
tgaacacagtaggcattaattaaag

SEQ ID NO: 175127 - DNA, 25 bp, Canis familiaris
tgaaccggagacaatgccaatacat

SEQ ID NO: 175128 - DNA, 25 bp, Canis familiaris
tgacacctcgagactgtccagtgac

SEQ ID NO: 175129 - DNA, 25 bp, Canis familiaris
tgacaccctgagactgagcctggga

SEQ ID NO: 175130 - DNA, 25 bp, Canis familiaris
tgaaaccttgtccatggctttgagt

SEQ ID NO: 175131 - DNA, 25 bp, Canis familiaris
tgaaatgcctttcaccttctgtgat

SEQ ID NO: 175132 - DNA, 25 bp, Canis familiaris
tgaaagcctttgttccatgtctcaa

SEQ ID NO: 175133 - DNA, 25 bp, Canis familiaris
tgaaaatcttgcgttgtatgttgaa

SEQ ID NO: 175134 - DNA, 25 bp, Canis familiaris
tgaaaatcttgagctgaatgtacag

SEQ ID NO: 175135 - DNA, 25 bp, Canis familiaris
tgacaagtccgggctgggaatcgct

SEQ ID NO: 175136 - DNA, 25 bp, Canis familiaris
tgaaagtccccgagatgagactccc

SEQ ID NO: 175137 - DNA, 25 bp, Canis familiaris
tgaacattcccttggtatcagaccc

SEQ ID NO: 175138 - DNA, 25 bp, Canis familiaris
tgaacacacccatggaatcaccacc

SEQ ID NO: 175139 - DNA, 25 bp, Canis familiaris
tgactcctgttttggtcatacctcc

SEQ ID NO: 175140 - DNA, 25 bp, Canis familiaris
tgactctgctgtgtatttctgtgcc

SEQ ID NO: 175141 - DNA, 25 bp, Canis familiaris
tgacttgctgtcactgtgcttgttt

SEQ ID NO: 175142 - DNA, 25 bp, Canis familiaris
tgacttgctatagggcctcgttcta

SEQ ID NO: 175143 - DNA, 25 bp, Canis familiaris
tgacattgtaaagtctcgcgctctc

SEQ ID NO: 175144 - DNA, 25 bp, Canis familiaris
tgacatggactctatctcgggtctc

SEQ ID NO: 175145 - DNA, 25 bp, Canis familiaris
tgacagagaccatctccacagtgca

SEQ ID NO: 175146 - DNA, 25 bp, Canis familiaris
tgacaagtcatatacatacaccata

SEQ ID NO: 175147 - DNA, 25 bp, Canis familiaris
tgacaccagcacgaaaaaccagcag

SEQ ID NO: 175148 - DNA, 25 bp, Canis familiaris
tgaaccaaccaataacccagaagga

SEQ ID NO: 175149 - DNA, 25 bp, Canis familiaris
tgaaccaacccaaaccacaagaagg

SEQ ID NO: 175150 - DNA, 25 bp, Canis familiaris
tgaacccggtttcccaagagagagc

SEQ ID NO: 175151 - DNA, 25 bp, Canis familiaris
tgaagcccgtgttcccaagaaaatc

SEQ ID NO: 175152 - DNA, 25 bp, Canis familiaris
tgaagtccctgtcggccaataaaag

SEQ ID NO: 175153 - DNA, 25 bp, Canis familiaris
tgaaaagccgtccctgagcaaaaat

SEQ ID NO: 175154 - DNA, 25 bp, Canis familiaris
tgaaaatttttggctgacacaggaa

SEQ ID NO: 175155 - DNA, 25 bp, Canis familiaris
tgaaacaatgtttgaccaagaccaa

SEQ ID NO: 175156 - DNA, 25 bp, Canis familiaris
tgaacacaatcttatctaacgccca

SEQ ID NO: 175157 - DNA, 25 bp, Canis familiaris
tgaagtcaactcatctaaccgttta

SEQ ID NO: 175158 - DNA, 25 bp, Canis familiaris
tgaaatctacatagtcttaatttgt

SEQ ID NO: 175159 - DNA, 25 bp, Canis familiaris
tgaaattgggcactttaattcatct

SEQ ID NO: 175160 - DNA, 25 bp, Canis familiaris
tgaaacctggcctttcatgttcact

SEQ ID NO: 175161 - DNA, 25 bp, Canis familiaris
tgacaagccagttcattgttttctc

SEQ ID NO: 175162 - DNA, 25 bp, Canis familiaris
tgacattccagcaacccaattattc

SEQ ID NO: 175163 - DNA, 25 bp, Canis familiaris
tgacttcctcatacctactttgtca

SEQ ID NO: 175164 - DNA, 25 bp, Canis familiaris
tgaattatctcaacaattcgttggc

SEQ ID NO: 175165 - DNA, 25 bp, Canis familiaris
tgaatccgctcaataaaagtgtcga

SEQ ID NO: 175166 - DNA, 25 bp, Canis familiaris
tgaatctcccttacgtattgacgac

SEQ ID NO: 175167 - DNA, 25 bp, Canis familiaris
tgaagcttctttgaattctgacccc

SEQ ID NO: 175168 - DNA, 25 bp, Canis familiaris
tgaaattccgtttatgtctaccgtc

SEQ ID NO: 175169 - DNA, 25 bp, Canis familiaris
tgacaatctccacttctcatggtca

SEQ ID NO: 175170 - DNA, 25 bp, Canis familiaris
tgcaaactcagcccctgggtaaaaa

SEQ ID NO: 175171 - DNA, 25 bp, Canis familiaris
tgaactgccgtccgggttcaaagaa

SEQ ID NO: 175172 - DNA, 25 bp, Canis familiaris
tgaactggctaccaggtttcttgaa

SEQ ID NO: 175173 - DNA, 25 bp, Canis familiaris
tgacactgtctatcagtacgtcggc

SEQ ID NO: 175174 - DNA, 25 bp, Canis familiaris
tgaactgtcttaggtctcaacgagt

SEQ ID NO: 175175 - DNA, 25 bp, Canis familiaris
tgacacttcttaggttctggtcctt

SEQ ID NO: 175176 - DNA, 25 bp, Canis familiaris
tgactcttgactgcagactcaggtc

SEQ ID NO: 175177 - DNA, 25 bp, Canis familiaris
tgcaccctgaagtgactgaagctat

SEQ ID NO: 175178 - DNA, 25 bp, Canis familiaris
tgactctggaaggcgacgacctcat

SEQ ID NO: 175179 - DNA, 25 bp, Canis familiaris
tgactcaggttcagatcgcatcctc

SEQ ID NO: 175180 - DNA, 25 bp, Canis familiaris
tgacacagttgagggctccatcttc

SEQ ID NO: 175181 - DNA, 25 bp, Canis familiaris
tgacacgattatgtgcgcgtcaaca

SEQ ID NO: 175182 - DNA, 25 bp, Canis familiaris
tgacacagaaatggtggggaacccg

SEQ ID NO: 175183 - DNA, 25 bp, Canis familiaris
tgacatcgaacgcttggcgagccgc

SEQ ID NO: 175184 - DNA, 25 bp, Canis familiaris
tgaatccagatctgtcttcggacca

SEQ ID NO: 175185 - DNA, 25 bp, Canis familiaris
tgaacccaaggacctgggatccagt

SEQ ID NO: 175186 - DNA, 25 bp, Canis familiaris
tgaaccactaggaccggaaccacaa

SEQ ID NO: 175187 - DNA, 25 bp, Canis familiaris
tcgaggcacgaggcacggaaactaa

SEQ ID NO: 175188 - DNA, 25 bp, Canis familiaris
tgcgggtcggacgggaagagtattc

SEQ ID NO: 175189 - DNA, 25 bp, Canis familiaris
tgaaggttgtaagagaaggattttt

SEQ ID NO: 175190 - DNA, 25 bp, Canis familiaris
tgaaggtcttactaatcgggttttg

SEQ ID NO: 175191 - DNA, 25 bp, Canis familiaris
tgaaggatttagccaccgtgtatgt

SEQ ID NO: 175192 - DNA, 25 bp, Canis familiaris
tgacaggactttgcccttttgtacc

SEQ ID NO: 175193 - DNA, 25 bp, Canis familiaris
tgacagacaattacatcccttcact

SEQ ID NO: 175194 - DNA, 25 bp, Canis familiaris
tgacagaaataaactccgaccccaa

SEQ ID NO: 175195 - DNA, 25 bp, Canis familiaris
tgaaataaagagtctcgccctctcc

SEQ ID NO: 175196 - DNA, 25 bp, Canis familiaris
tgaaataaaggttcccgcctgctgt

SEQ ID NO: 175197 - DNA, 25 bp, Canis familiaris
tgaaattgaactcactccttctgct

SEQ ID NO: 175198 - DNA, 25 bp, Canis familiaris
tgaacttgaagcacacgtttcgtca

SEQ ID NO: 175199 - DNA, 25 bp, Canis familiaris
tgccccataacagacctttcgtgca

SEQ ID NO: 175200 - DNA, 25 bp, Canis familiaris
tgcacacccggaaaccatttttgag

SEQ ID NO: 175201 - DNA, 25 bp, Canis familiaris
tcggtccggtttgctatttatgagg

SEQ ID NO: 175202 - DNA, 25 bp, Canis familiaris
tccgtggcttgttggggatttaagt

SEQ ID NO: 175203 - DNA, 25 bp, Canis familiaris
tgcctggggtgggagggttaaggtg

SEQ ID NO: 175204 - DNA, 25 bp, Canis familiaris
tcttgggggaaactggtaacttatg

SEQ ID NO: 175205 - DNA, 25 bp, Canis familiaris
tgctaaggggaatcatggttcttta

SEQ ID NO: 175206 - DNA, 25 bp, Canis familiaris
tgctaaaggccagggcaacccctta

SEQ ID NO: 175207 - DNA, 25 bp, Canis familiaris
tgcgaaacgaagcggaacctctcca

SEQ ID NO: 175208 - DNA, 25 bp, Canis familiaris
tgaagaccggggagcagacgcctcc

SEQ ID NO: 175209 - DNA, 25 bp, Canis familiaris
tgacagatacgatgagatccgccgc

SEQ ID NO: 175210 - DNA, 25 bp, Canis familiaris
tgacagatacgatgagatccgccgc

SEQ ID NO: 175211 - DNA, 25 bp, Canis familiaris
tgacagatacgatgagatccgccgc

SEQ ID NO: 175212 - DNA, 25 bp, Canis familiaris
tgacacacactattacatccaggcc

SEQ ID NO: 175213 - DNA, 25 bp, Canis familiaris
tgaacagagttcaacaccgtctccc

SEQ ID NO: 175214 - DNA, 25 bp, Canis familiaris
tgaagtagtaaaactggtcccggag

SEQ ID NO: 175215 - DNA, 25 bp, Canis familiaris
tgaaaagtacaaagagggatccctg

SEQ ID NO: 175216 - DNA, 25 bp, Canis familiaris
tgaaagactagctgacgggatccct

SEQ ID NO: 175217 - DNA, 25 bp, Canis familiaris
tgaaagacgcgaagactgggcccgc

SEQ ID NO: 175218 - DNA, 25 bp, Canis familiaris
tgaaagtcgtgaactctaccaccgg

SEQ ID NO: 175219 - DNA, 25 bp, Canis familiaris
tgacaacattgtcagctcttcctac

SEQ ID NO: 175220 - DNA, 25 bp, Canis familiaris
tgacatacatctgcctgcgtgtgtc

SEQ ID NO: 175221 - DNA, 25 bp, Canis familiaris
tgacacctgctggctagcgaggttc

SEQ ID NO: 175222 - DNA, 25 bp, Canis familiaris
tgaacgcgtggacggaggtctgcgc

SEQ ID NO: 175223 - DNA, 25 bp, Canis familiaris
tgaacgcctctaagtcagaatcccg

SEQ ID NO: 175224 - DNA, 25 bp, Canis familiaris
tgaacgcattctcatatcaggtcct

SEQ ID NO: 175225 - DNA, 25 bp, Canis familiaris
tgacaccattgtcaaggtacattcc

SEQ ID NO: 175226 - DNA, 25 bp, Canis familiaris
tgacacctgaggaaaggcatccccc

SEQ ID NO: 175227 - DNA, 25 bp, Canis familiaris
tgacagactgcaggattcgctgccc

SEQ ID NO: 175228 - DNA, 25 bp, Canis familiaris
tgacagacataactcatcattcccc

SEQ ID NO: 175229 - DNA, 25 bp, Canis familiaris
tgaaatgcaggctgctcaatcgccc

SEQ ID NO: 175230 - DNA, 25 bp, Canis familiaris
tgaaagagccagatgcagtccccac

SEQ ID NO: 175231 - DNA, 25 bp, Canis familiaris
tgaaaaggagggcctcacgcagcca

SEQ ID NO: 175232 - DNA, 25 bp, Canis familiaris
tgaaagggatgaggacaacaacctt

SEQ ID NO: 175233 - DNA, 25 bp, Canis familiaris
tgacagacggacagacagacatgca

SEQ ID NO: 175234 - DNA, 25 bp, Canis familiaris
tgacaacacagacagacacacacac

SEQ ID NO: 175235 - DNA, 25 bp, Canis familiaris
tgacactccaatcaactcatcattc

SEQ ID NO: 175236 - DNA, 25 bp, Canis familiaris
tgacacccactgcaacagtgctgga

SEQ ID NO: 175237 - DNA, 25 bp, Canis familiaris
tgacaccatcctccaagattgtggg

SEQ ID NO: 175238 - DNA, 25 bp, Canis familiaris
tgacaacgcccaacgaggtcgtgga

SEQ ID NO: 175239 - DNA, 25 bp, Canis familiaris
tgacaccggcaaccagaggtctgtg

SEQ ID NO: 175240 - DNA, 25 bp, Canis familiaris
tgacacaccaaacatgggcctgcag

SEQ ID NO: 175241 - DNA, 25 bp, Canis familiaris
tgcacactcgccagtagggcacagg

SEQ ID NO: 175242 - DNA, 25 bp, Canis familiaris
tgacatccggcgccggggcaaaaac

SEQ ID NO: 175243 - DNA, 25 bp, Canis familiaris
tgacaagggggtcgggactaacctg

SEQ ID NO: 175244 - DNA, 25 bp, Canis familiaris
tgaaaggcggaccaggagcccgagc

SEQ ID NO: 175245 - DNA, 25 bp, Canis familiaris
tgaaagggattggccttgcaccgga

SEQ ID NO: 175246 - DNA, 25 bp, Canis familiaris
tgaactaggtcaggcctgtgccacc

SEQ ID NO: 175247 - DNA, 25 bp, Canis familiaris
tgaacttcgaggcgctgatcatcac

SEQ ID NO: 175248 - DNA, 25 bp, Canis familiaris
tgaagttcgtggcgcagcaaccaga

SEQ ID NO: 175249 - DNA, 25 bp, Canis familiaris
tgacagttagctgtggccaactcgg

SEQ ID NO: 175250 - DNA, 25 bp, Canis familiaris
tgacagactactgatgtccaccgtg

SEQ ID NO: 175251 - DNA, 25 bp, Canis familiaris
tgacagatgttctcattcaccacag

SEQ ID NO: 175252 - DNA, 25 bp, Canis familiaris
tgacagtgaggaatcagtaccagag

SEQ ID NO: 175253 - DNA, 25 bp, Canis familiaris
tgaagtagaggtcgaagccgccgta

SEQ ID NO: 175254 - DNA, 25 bp, Canis familiaris
tgaagtggatggtgaagagcagaca

SEQ ID NO: 175255 - DNA, 25 bp, Canis familiaris
tgaagggatggccccaaggcctgtt

SEQ ID NO: 175256 - DNA, 25 bp, Canis familiaris
tgaaggtataccacagcaggacatg

SEQ ID NO: 175257 - DNA, 25 bp, Canis familiaris
tgacatcgttgaccttcgtgggtgc

SEQ ID NO: 175258 - DNA, 25 bp, Canis familiaris
tgacatctggaaccctgctgggaac

SEQ ID NO: 175259 - DNA, 25 bp, Canis familiaris
tgacatctggaaccctgctgggaac

SEQ ID NO: 175260 - DNA, 25 bp, Canis familiaris
tgacttgataggcccttgcggttct

SEQ ID NO: 175261 - DNA, 25 bp, Canis familiaris
tgaatggttggcacttcgtgttctg

SEQ ID NO: 175262 - DNA, 25 bp, Canis familiaris
tgaagagttgacacgtccctgttgt

SEQ ID NO: 175263 - DNA, 25 bp, Canis familiaris
tgaaggtccacgtgtagcgctgtta

SEQ ID NO: 175264 - DNA, 25 bp, Canis familiaris
tgaagggaagaaaatcatggctgat

SEQ ID NO: 175265 - DNA, 25 bp, Canis familiaris
tgaaggagatgattaagtctggaat

SEQ ID NO: 175266 - DNA, 25 bp, Canis familiaris
tgaaagggcatcaatcagattgggt

SEQ ID NO: 175267 - DNA, 25 bp, Canis familiaris
tgaaggtttccttgatgggcagccc

SEQ ID NO: 175268 - DNA, 25 bp, Canis familiaris
tgaaacagttcctggagtgtgccca

SEQ ID NO: 175269 - DNA, 25 bp, Canis familiaris
tgaaaagctgccctcgagcaatggc

SEQ ID NO: 175270 - DNA, 25 bp, Canis familiaris
tgaataacgcagcccatgccgggaa

SEQ ID NO: 175271 - DNA, 25 bp, Canis familiaris
tgaaaagcctgtcagcctgggacac

SEQ ID NO: 175272 - DNA, 25 bp, Canis familiaris
tgaattttctgggacctgggacctc

SEQ ID NO: 175273 - DNA, 25 bp, Canis familiaris
tgaataatttctgaggttccccttt

SEQ ID NO: 175274 - DNA, 25 bp, Canis familiaris
tgaaataaaccctgtttgcaccttt

SEQ ID NO: 175275 - DNA, 25 bp, Canis familiaris
tgaaagaaacccctgtattaacact

SEQ ID NO: 175276 - DNA, 25 bp, Canis familiaris
tgaaagagcaacgcttttaagcccc

SEQ ID NO: 175277 - DNA, 25 bp, Canis familiaris
tgaaacagaacaaccacttaccctc

SEQ ID NO: 175278 - DNA, 25 bp, Canis familiaris
tgcccactaactccaataaaaccgc

SEQ ID NO: 175279 - DNA, 25 bp, Canis familiaris
tgctcctcaaaatcaattttcaccc

SEQ ID NO: 175280 - DNA, 25 bp, Canis familiaris
tgctacggaattactgttttgggcc

SEQ ID NO: 175281 - DNA, 25 bp, Canis familiaris
tgaacggatttggccgtattgggcg

SEQ ID NO: 175282 - DNA, 25 bp, Canis familiaris
tgaactttcctggccagtactggaa

SEQ ID NO: 175283 - DNA, 25 bp, Canis familiaris
tgaagccattcttaccgtagtctaa

SEQ ID NO: 175284 - DNA, 25 bp, Canis familiaris
tgacagacttctttctctgttctca

SEQ ID NO: 175285 - DNA, 25 bp, Canis familiaris
tgaagagttctgtattttcccttta

SEQ ID NO: 175286 - DNA, 25 bp, Canis familiaris
tgacaggaatcctatttacccctct

SEQ ID NO: 175287 - DNA, 25 bp, Canis familiaris
tgacaggaatgcttttctccaggcc

SEQ ID NO: 175288 - DNA, 25 bp, Canis familiaris
tgacaagaagcaggcgtaccggtcc

SEQ ID NO: 175289 - DNA, 25 bp, Canis familiaris
tgacaccatcaagcagctgagccag

SEQ ID NO: 175290 - DNA, 25 bp, Canis familiaris
tgacagcagtggtccagcgtgtcac

SEQ ID NO: 175291 - DNA, 25 bp, Canis familiaris
tgaaagtggaacctggtctgccgta

SEQ ID NO: 175292 - DNA, 25 bp, Canis familiaris
tgaaatgcttaagactgctgcccgt

SEQ ID NO: 175293 - DNA, 25 bp, Canis familiaris
tgacaactttcacatgtgctcgctc

SEQ ID NO: 175294 - DNA, 25 bp, Canis familiaris
tgaaatttctgactgttctctgctc

SEQ ID NO: 175295 - DNA, 25 bp, Canis familiaris
tgaaatcttagactcagcctctcac

SEQ ID NO: 175296 - DNA, 25 bp, Canis familiaris
tgacaactttgtcgcgttcatactg

SEQ ID NO: 175297 - DNA, 25 bp, Canis familiaris
tgaaactatggtgctgtgtccactt

SEQ ID NO: 175298 - DNA, 25 bp, Canis familiaris
tgacacttagccgctgtctcgccgt

SEQ ID NO: 175299 - DNA, 25 bp, Canis familiaris
tgaacctcaccgtgttctgtttgtc

SEQ ID NO: 175300 - DNA, 25 bp, Canis familiaris
tgacatcctggccgtggtttttggc

SEQ ID NO: 175301 - DNA, 25 bp, Canis familiaris
tgcaatacccggtgtttcttggggg

SEQ ID NO: 175302 - DNA, 25 bp, Canis familiaris
tgaaccccttggttctgtcttggga

SEQ ID NO: 175303 - DNA, 25 bp, Canis familiaris
tgaaccaatcctgggtcatttttaa

SEQ ID NO: 175304 - DNA, 25 bp, Canis familiaris
tgacaaccactttttcattatttga

SEQ ID NO: 175305 - DNA, 25 bp, Canis familiaris
tgaaaacactcctttataatttaag

SEQ ID NO: 175306 - DNA, 25 bp, Canis familiaris
tgaatgggttcttttaaacttagag

SEQ ID NO: 175307 - DNA, 25 bp, Canis familiaris
tgccgtaggtcccctagaggttaag

SEQ ID NO: 175308 - DNA, 25 bp, Canis familiaris
tgaaatatgtttgcctagagttgta

SEQ ID NO: 175309 - DNA, 25 bp, Canis familiaris
tgaaaatgtcagagcccggattcca

SEQ ID NO: 175310 - DNA, 25 bp, Canis familiaris
tgaagaatggccaccgggtttcaaa

SEQ ID NO: 175311 - DNA, 25 bp, Canis familiaris
tgaaggaggccatcggggctgtcat

SEQ ID NO: 175312 - DNA, 25 bp, Canis familiaris
tgaaaaggaagaacaggctgctgct

SEQ ID NO: 175313 - DNA, 25 bp, Canis familiaris
tgaaacaggacactcactgcgggca

SEQ ID NO: 175314 - DNA, 25 bp, Canis familiaris
tgaagagcaggaatacatcgaaact

SEQ ID NO: 175315 - DNA, 25 bp, Canis familiaris
tgaaagcaggattgcaccctcttcc

SEQ ID NO: 175316 - DNA, 25 bp, Canis familiaris
tgaagtgacagttcaacccagtccc

SEQ ID NO: 175317 - DNA, 25 bp, Canis familiaris
tgaagtgaagtccaccatccaattc

SEQ ID NO: 175318 - DNA, 25 bp, Canis familiaris
tgacaggtgtgtccacacccgttcg

SEQ ID NO: 175319 - DNA, 25 bp, Canis familiaris
tgaaggctgctgctaaactcgttcc

SEQ ID NO: 175320 - DNA, 25 bp, Canis familiaris
tgacagaggttttcttctttctccc

SEQ ID NO: 175321 - DNA, 25 bp, Canis familiaris
tgaagaactttcccatattttctcc

SEQ ID NO: 175322 - DNA, 25 bp, Canis familiaris
tgaaaacactagccccatgcttttc

SEQ ID NO: 175323 - DNA, 25 bp, Canis familiaris
tgaaaaactacccaactgtctcatc

SEQ ID NO: 175324 - DNA, 25 bp, Canis familiaris
tgaagaacctgacccagatcggctc

SEQ ID NO: 175325 - DNA, 25 bp, Canis familiaris
tgacagacatgggtaccaccaggcc

SEQ ID NO: 175326 - DNA, 25 bp, Canis familiaris
tgacagtgctggctgtctgtccagt

SEQ ID NO: 175327 - DNA, 25 bp, Canis familiaris
tgacaggctgtgatgctttcgagga

SEQ ID NO: 175328 - DNA, 25 bp, Canis familiaris
tgacaggcctgtgatctacgatgga

SEQ ID NO: 175329 - DNA, 25 bp, Canis familiaris
tgacaggcctgtgatgcatcagcgt

SEQ ID NO: 175330 - DNA, 25 bp, Canis familiaris
tgacaggccagtgtacgtgtcacgc

SEQ ID NO: 175331 - DNA, 25 bp, Canis familiaris
tgacaaccagtgttactcttggaga

SEQ ID NO: 175332 - DNA, 25 bp, Canis familiaris
tgacaaccaggcttggctttcggtc

SEQ ID NO: 175333 - DNA, 25 bp, Canis familiaris
tgacaacatacctgtctattccctc

SEQ ID NO: 175334 - DNA, 25 bp, Canis familiaris
tgacaaggagcctgtgtcctccaag

SEQ ID NO: 175335 - DNA, 25 bp, Canis familiaris
tgacaagggtgaggtgtctgcccgc

SEQ ID NO: 175336 - DNA, 25 bp, Canis familiaris
tgacacggggcacagttggcccgag

SEQ ID NO: 175337 - DNA, 25 bp, Canis familiaris
tgcccggggaggagtggccggcaag

SEQ ID NO: 175338 - DNA, 25 bp, Canis familiaris
tgcgaggggagggaagggccgggat

SEQ ID NO: 175339 - DNA, 25 bp, Canis familiaris
tgaagttgggggaaggcctcacttt

SEQ ID NO: 175340 - DNA, 25 bp, Canis familiaris
tgacagactgggtgctagagcccct

SEQ ID NO: 175341 - DNA, 25 bp, Canis familiaris
tgacacaagcggtgcttactccagc

SEQ ID NO: 175342 - DNA, 25 bp, Canis familiaris
tgctcaacagggacccttctttgcc

SEQ ID NO: 175343 - DNA, 25 bp, Canis familiaris
tgctaaatgaggctttcctccttcc

SEQ ID NO: 175344 - DNA, 25 bp, Canis familiaris
tgaaaatgcagggaggaccccttca

SEQ ID NO: 175345 - DNA, 25 bp, Canis familiaris
tgaatgaagaggaaactccccattt

SEQ ID NO: 175346 - DNA, 25 bp, Canis familiaris
tgaagaagggcaagaccccaccagt

SEQ ID NO: 175347 - DNA, 25 bp, Canis familiaris
tgaagaagccgcactacttcacctg

SEQ ID NO: 175348 - DNA, 25 bp, Canis familiaris
tgaagaagccgcactacttcacctg

SEQ ID NO: 175349 - DNA, 25 bp, Canis familiaris
tgaaagaggagcaccactcacacct

SEQ ID NO: 175350 - DNA, 25 bp, Canis familiaris
tgaaaatgggcggccctactcgccc

SEQ ID NO: 175351 - DNA, 25 bp, Canis familiaris
tgaaaaggtccaggccttcttggct

SEQ ID NO: 175352 - DNA, 25 bp, Canis familiaris
tgaaatacagtccttacgtcctgcc

SEQ ID NO: 175353 - DNA, 25 bp, Canis familiaris
tgacaaatacccagaggtcctccag

SEQ ID NO: 175354 - DNA, 25 bp, Canis familiaris
tgaagggcctccagaggtaccctgt

SEQ ID NO: 175355 - DNA, 25 bp, Canis familiaris
tgaagggccccagagggaaccctgc

SEQ ID NO: 175356 - DNA, 25 bp, Canis familiaris
tgaagggtccccaggtggacctgga

SEQ ID NO: 175357 - DNA, 25 bp, Canis familiaris
taagggttactaggagttgccgtag

SEQ ID NO: 175358 - DNA, 25 bp, Canis familiaris
tcttgggtcaaggaaagggccgaag

SEQ ID NO: 175359 - DNA, 25 bp, Canis familiaris
tcctgaggccaataaatgggggaca

SEQ ID NO: 175360 - DNA, 25 bp, Canis familiaris
tagctgtggagcaggcacttggggg

SEQ ID NO: 175361 - DNA, 25 bp, Canis familiaris
tgaatgtgtgcgacaacctggggga

SEQ ID NO: 175362 - DNA, 25 bp, Canis familiaris
tgaatgcttagagacctttagggaa

SEQ ID NO: 175363 - DNA, 25 bp, Canis familiaris
tgaagggaaccactctttcgttgaa

SEQ ID NO: 175364 - DNA, 25 bp, Canis familiaris
tgaagggaaccactctttcgttgaa

SEQ ID NO: 175365 - DNA, 25 bp, Canis familiaris
tgaagggaaccactctttcgttgaa

SEQ ID NO: 175366 - DNA, 25 bp, Canis familiaris
tgaagggaaccactctttcgttgaa

SEQ ID NO: 175367 - DNA, 25 bp, Canis familiaris
tgaagggaaccactctttcgttgaa

SEQ ID NO: 175368 - DNA, 25 bp, Canis familiaris
tgaagggaaccactctttcgttgaa

SEQ ID NO: 175369 - DNA, 25 bp, Canis familiaris
tgaagggaaccactctttcgttgaa

SEQ ID NO: 175370 - DNA, 25 bp, Canis familiaris
tgaagggaaccactctttcgttgaa

SEQ ID NO: 175371 - DNA, 25 bp, Canis familiaris
tgaagggaaccactctttcgttgaa

SEQ ID NO: 175372 - DNA, 25 bp, Canis familiaris
tgaagggaaccactctttcgttgaa

SEQ ID NO: 175373 - DNA, 25 bp, Canis familiaris
tgaagggaccacgactttcaactgg

SEQ ID NO: 175374 - DNA, 25 bp, Canis familiaris
tgaaatggaaatgtctttagttttt

SEQ ID NO: 175375 - DNA, 25 bp, Canis familiaris
tgaaaggacaaagaatttggtgttc

SEQ ID NO: 175376 - DNA, 25 bp, Canis familiaris
tgaagggcacagaacctatttggtt

SEQ ID NO: 175377 - DNA, 25 bp, Canis familiaris
tgaatgggaaggacgtagtggcagt

SEQ ID NO: 175378 - DNA, 25 bp, Canis familiaris
tgaaggtgagtgtccggaggtgctg

SEQ ID NO: 175379 - DNA, 25 bp, Canis familiaris
tgaagctgagaggcccggattgggg

SEQ ID NO: 175380 - DNA, 25 bp, Canis familiaris
tgaactggggccagtgctgggcagc

SEQ ID NO: 175381 - DNA, 25 bp, Canis familiaris
tgaagctcgtggcttgttgcaggct

SEQ ID NO: 175382 - DNA, 25 bp, Canis familiaris
tgacactgtttccttgtcttgtttc

SEQ ID NO: 175383 - DNA, 25 bp, Canis familiaris
tgacactggcctgattgttgctttg

SEQ ID NO: 175384 - DNA, 25 bp, Canis familiaris
tgacacagtgcctgatttggctccc

SEQ ID NO: 175385 - DNA, 25 bp, Canis familiaris
tgacaagtgccaaaggacgctctcc

SEQ ID NO: 175386 - DNA, 25 bp, Canis familiaris
tgacaagtagcaagagtcctcctcc

SEQ ID NO: 175387 - DNA, 25 bp, Canis familiaris
tgaaatcgatgacgagtcggcctcc

SEQ ID NO: 175388 - DNA, 25 bp, Canis familiaris
tgaaatggcatgcacactcggccac

SEQ ID NO: 175389 - DNA, 25 bp, Canis familiaris
tgaaattcatcaccatcctgtgcac

SEQ ID NO: 175390 - DNA, 25 bp, Canis familiaris
tgaaatatccaggctccatgacagc

SEQ ID NO: 175391 - DNA, 25 bp, Canis familiaris
tgaaattgtctggacctcatcaccc

SEQ ID NO: 175392 - DNA, 25 bp, Canis familiaris
tgaacacttctggaagacccgtgcc

SEQ ID NO: 175393 - DNA, 25 bp, Canis familiaris
tgaaccttgctggttcaacctctcc

SEQ ID NO: 175394 - DNA, 25 bp, Canis familiaris
tgaagcgattctttaagaccttccg

SEQ ID NO: 175395 - DNA, 25 bp, Canis familiaris
tgaagcgtgtctgccaagaaccttc

SEQ ID NO: 175396 - DNA, 25 bp, Canis familiaris
tgaagctggtgtgccgacaagccaa

SEQ ID NO: 175397 - DNA, 25 bp, Canis familiaris
tgaaggagttcttcgccaaggcacg

SEQ ID NO: 175398 - DNA, 25 bp, Canis familiaris
tgaatgggttctgcttgcacgttgg

SEQ ID NO: 175399 - DNA, 25 bp, Canis familiaris
tgaaggatggtctctgtccctttaa

SEQ ID NO: 175400 - DNA, 25 bp, Canis familiaris
tgaaggggagccttccacctttgga

SEQ ID NO: 175401 - DNA, 25 bp, Canis familiaris
tgcacagtaggaccataccccttat

SEQ ID NO: 175402 - DNA, 25 bp, Canis familiaris
tgaaccaggatccagacccctgaga

SEQ ID NO: 175403 - DNA, 25 bp, Canis familiaris
tgaatacagtcatggacctcctacc

SEQ ID NO: 175404 - DNA, 25 bp, Canis familiaris
tgaacagcagtatgttccgcctgcc

SEQ ID NO: 175405 - DNA, 25 bp, Canis familiaris
tgaagctgatgttgagtttgccact

SEQ ID NO: 175406 - DNA, 25 bp, Canis familiaris
tgaaatccttgagtgatggccagct

SEQ ID NO: 175407 - DNA, 25 bp, Canis familiaris
tgacaacagcctcaagatcatcagc

SEQ ID NO: 175408 - DNA, 25 bp, Canis familiaris
tgaaaagatgctcagggcagccccg

SEQ ID NO: 175409 - DNA, 25 bp, Canis familiaris
tgaaaatgatgtccgtgcgtgccac

SEQ ID NO: 175410 - DNA, 25 bp, Canis familiaris
tgaaaattgctttgatcgcgcatga

SEQ ID NO: 175411 - DNA, 25 bp, Canis familiaris
tgaaaattgctttgatcgcgcatga

SEQ ID NO: 175412 - DNA, 25 bp, Canis familiaris
tgaaaagtgtgcttgctctctgatg

SEQ ID NO: 175413 - DNA, 25 bp, Canis familiaris
tgaaatagtttttcctatgtttgtt

SEQ ID NO: 175414 - DNA, 25 bp, Canis familiaris
tgaagaacttttgcccaataatttt

SEQ ID NO: 175415 - DNA, 25 bp, Canis familiaris
tgaaccctttactccacaaatgata

SEQ ID NO: 175416 - DNA, 25 bp, Canis familiaris
tgaaaggattgtttacccaacacaa

SEQ ID NO: 175417 - DNA, 25 bp, Canis familiaris
tgaaatgattttttactacacccta

SEQ ID NO: 175418 - DNA, 25 bp, Canis familiaris
tgaaatacattagtttccaacccgg

SEQ ID NO: 175419 - DNA, 25 bp, Canis familiaris
tgaaattatttttgtgccaacccaa

SEQ ID NO: 175420 - DNA, 25 bp, Canis familiaris
tgaaaggttcttctggaacccctgc

SEQ ID NO: 175421 - DNA, 25 bp, Canis familiaris
tgaaaccctcttcagaaaccagttg

SEQ ID NO: 175422 - DNA, 25 bp, Canis familiaris
tgaaaccctcttattaaccatctgc

SEQ ID NO: 175423 - DNA, 25 bp, Canis familiaris
tgaaactcaccttagtctacctgta

SEQ ID NO: 175424 - DNA, 25 bp, Canis familiaris
tgaaactacgtacgtctgactctcc

SEQ ID NO: 175425 - DNA, 25 bp, Canis familiaris
tgaaacgttgtaagagctacctcca

SEQ ID NO: 175426 - DNA, 25 bp, Canis familiaris
tgacaactttgtcaagctcatttcc

SEQ ID NO: 175427 - DNA, 25 bp, Canis familiaris
tgacacaaagtcccaagcttcttcc

SEQ ID NO: 175428 - DNA, 25 bp, Canis familiaris
tgacaagggctcttaagctcctctc

SEQ ID NO: 175429 - DNA, 25 bp, Canis familiaris
tgaaagagccttatcacactgcctc

SEQ ID NO: 175430 - DNA, 25 bp, Canis familiaris
tgaaataacctccatgctcaacact

SEQ ID NO: 175431 - DNA, 25 bp, Canis familiaris
tgaagtgaaccttgtgtgccacctc

SEQ ID NO: 175432 - DNA, 25 bp, Canis familiaris
tgaaggaagccatgtgttcacccac

SEQ ID NO: 175433 - DNA, 25 bp, Canis familiaris
tgaacgagactggggcccattccac

SEQ ID NO: 175434 - DNA, 25 bp, Canis familiaris
tgaacaagactgactgtccacagcc

SEQ ID NO: 175435 - DNA, 25 bp, Canis familiaris
tgaaaatttgtgctgcacacagcgc

SEQ ID NO: 175436 - DNA, 25 bp, Canis familiaris
tgaagaaatcttcccatgctgtcga

SEQ ID NO: 175437 - DNA, 25 bp, Canis familiaris
tgaagcaaacttccctgcaaatgta

SEQ ID NO: 175438 - DNA, 25 bp, Canis familiaris
tgaaaacgctctccgtgactcaata

SEQ ID NO: 175439 - DNA, 25 bp, Canis familiaris
tgaaaagctccgccacatgttacta

SEQ ID NO: 175440 - DNA, 25 bp, Canis familiaris
tgaaatgcaccatgaagctttgagt

SEQ ID NO: 175441 - DNA, 25 bp, Canis familiaris
tgaagagcccacacctgttgaggta

SEQ ID NO: 175442 - DNA, 25 bp, Canis familiaris
tgaagagtctactgttgggtctgta

SEQ ID NO: 175443 - DNA, 25 bp, Canis familiaris
tgaacagctttctctgggggtctca

SEQ ID NO: 175444 - DNA, 25 bp, Canis familiaris
tgaactgctgtttgcctgatgggta

SEQ ID NO: 175445 - DNA, 25 bp, Canis familiaris
tgaacctgtttcggtaagtcacttt

SEQ ID NO: 175446 - DNA, 25 bp, Canis familiaris
tgaaactgttctccgttttcacatt

SEQ ID NO: 175447 - DNA, 25 bp, Canis familiaris
tgcacaaattccaccattttcacct

SEQ ID NO: 175448 - DNA, 25 bp, Canis familiaris
tgaaactaccaagtattttattgta

SEQ ID NO: 175449 - DNA, 25 bp, Canis familiaris
tgaagtctaccaactcgatttttta

SEQ ID NO: 175450 - DNA, 25 bp, Canis familiaris
tgaagatggacccctttgtgttttg

SEQ ID NO: 175451 - DNA, 25 bp, Canis familiaris
tgaaagtgttccttttgtgttccgt

SEQ ID NO: 175452 - DNA, 25 bp, Canis familiaris
tgaaagccttcctttggatttctgg

SEQ ID NO: 175453 - DNA, 25 bp, Canis familiaris
tgaatagcacttttttggtactcgt

SEQ ID NO: 175454 - DNA, 25 bp, Canis familiaris
tgaaatccagcttttcgttacccat

SEQ ID NO: 175455 - DNA, 25 bp, Canis familiaris
tgaaatcccactttgccctaaggat

SEQ ID NO: 175456 - DNA, 25 bp, Canis familiaris
tgaaatcccactttgccctaaggat

SEQ ID NO: 175457 - DNA, 25 bp, Canis familiaris
tgaaacccattctatgtcacataca

SEQ ID NO: 175458 - DNA, 25 bp, Canis familiaris
tgaaagcctatttttccttgcaaaa

SEQ ID NO: 175459 - DNA, 25 bp, Canis familiaris
tgaaacatctttcttgcctggaatc

SEQ ID NO: 175460 - DNA, 25 bp, Canis familiaris
tgaaaccgtcagatcgcctggagac

SEQ ID NO: 175461 - DNA, 25 bp, Canis familiaris
tgaaagacggcaaaccctgccaggc

SEQ ID NO: 175462 - DNA, 25 bp, Canis familiaris
tgaacattggccaaacacctgccga

SEQ ID NO: 175463 - DNA, 25 bp, Canis familiaris
tgaaattgtgccactgccaatccta

SEQ ID NO: 175464 - DNA, 25 bp, Canis familiaris
tgaaatattcgaacccaccatctga

SEQ ID NO: 175465 - DNA, 25 bp, Canis familiaris
tgaaatatgtagcttccctctctag

SEQ ID NO: 175466 - DNA, 25 bp, Canis familiaris
tgaaatatgtacggctgctcgcttt

SEQ ID NO: 175467 - DNA, 25 bp, Canis familiaris
tgaaatttaacacctcttgtcctca

SEQ ID NO: 175468 - DNA, 25 bp, Canis familiaris
tgaaatccaaaccagctgtttcctc

SEQ ID NO: 175469 - DNA, 25 bp, Canis familiaris
tgaaaaagagcccactgagtctgcc

SEQ ID NO: 175470 - DNA, 25 bp, Canis familiaris
tgaaaaaggttttgtcttgccccag

SEQ ID NO: 175471 - DNA, 25 bp, Canis familiaris
tgaattaagcactttttttcccctg

SEQ ID NO: 175472 - DNA, 25 bp, Canis familiaris
taaggtaacagttattcttcccttg

SEQ ID NO: 175473 - DNA, 25 bp, Canis familiaris
tgaaggtaaagcgtattacccctcg

SEQ ID NO: 175474 - DNA, 25 bp, Canis familiaris
tgaaggaagacagcaacctcaccct

SEQ ID NO: 175475 - DNA, 25 bp, Canis familiaris
tgaagaattgaagcccggcgccatc

SEQ ID NO: 175476 - DNA, 25 bp, Canis familiaris
tgaaaattgtcggccacgagccacc

SEQ ID NO: 175477 - DNA, 25 bp, Canis familiaris
tgaaaagtcctgtccagtgacctcc

SEQ ID NO: 175478 - DNA, 25 bp, Canis familiaris
tgaagaattccgtcgcagacacgcc

SEQ ID NO: 175479 - DNA, 25 bp, Canis familiaris
tgaaatttccacatagacacgtcta

SEQ ID NO: 175480 - DNA, 25 bp, Canis familiaris
tgaacatttctctattctctcaagt

SEQ ID NO: 175481 - DNA, 25 bp, Canis familiaris
tgaaaattcatatgtccctcgtgag

SEQ ID NO: 175482 - DNA, 25 bp, Canis familiaris
tgaaagatgtcaggagcccctcagg

SEQ ID NO: 175483 - DNA, 25 bp, Canis familiaris
tgaaaggcatcggtgccacgcatct

SEQ ID NO: 175484 - DNA, 25 bp, Canis familiaris
tgaaaggtgcgctatccctgtttga

SEQ ID NO: 175485 - DNA, 25 bp, Canis familiaris
tgaaagtgtgctctgcctttctcga

SEQ ID NO: 175486 - DNA, 25 bp, Canis familiaris
tgaacgtgcccagttgttcttctga

SEQ ID NO: 175487 - DNA, 25 bp, Canis familiaris
tgaacctgtctcctaggtgcttatg

SEQ ID NO: 175488 - DNA, 25 bp, Canis familiaris
tgaaacctcttcaaagtcctcagcc

SEQ ID NO: 175489 - DNA, 25 bp, Canis familiaris
tgaaaccgacacgaagtccttctaa

SEQ ID NO: 175490 - DNA, 25 bp, Canis familiaris
tgaaacttaatgaaactctttataa

SEQ ID NO: 175491 - DNA, 25 bp, Canis familiaris
tgaaactggaataagcgctttgaaa

SEQ ID NO: 175492 - DNA, 25 bp, Canis familiaris
tgaaaagaaatttgtccttgaagct

SEQ ID NO: 175493 - DNA, 25 bp, Canis familiaris
tgaaataaacgtggttttcgtctgg

SEQ ID NO: 175494 - DNA, 25 bp, Canis familiaris
tgaaaaaatttgttgttctcttctt

SEQ ID NO: 175495 - DNA, 25 bp, Canis familiaris
tgaagcaaaatctggttggtttatt

SEQ ID NO: 175496 - DNA, 25 bp, Canis familiaris
tgaagcaatttggggttttactatt

SEQ ID NO: 175497 - DNA, 25 bp, Canis familiaris
tgaacatactgttgggctttttttt

SEQ ID NO: 175498 - DNA, 25 bp, Canis familiaris
tgaaattttaagtcactttcttttg

SEQ ID NO: 175499 - DNA, 25 bp, Canis familiaris
tgaaatctcttacttactttctttt

SEQ ID NO: 175500 - DNA, 25 bp, Canis familiaris
tgaaatacctagttgactccttttt

SEQ ID NO: 175501 - DNA, 25 bp, Canis familiaris
tgaacgagcgggtagacccttcttt

SEQ ID NO: 175502 - DNA, 25 bp, Canis familiaris
tgaacaagcccttggaccacttgtt

SEQ ID NO: 175503 - DNA, 25 bp, Canis familiaris
tgaaaagcccaacgatcgcctgggg

SEQ ID NO: 175504 - DNA, 25 bp, Canis familiaris
tgaacagccctcgaggatcgacatg

SEQ ID NO: 175505 - DNA, 25 bp, Canis familiaris
tgaaagacactcttgcgctcatgac

SEQ ID NO: 175506 - DNA, 25 bp, Canis familiaris
tgaaaggactcacgctgctgatcca

SEQ ID NO: 175507 - DNA, 25 bp, Canis familiaris
tgaaagatattcccttatcatcatt

SEQ ID NO: 175508 - DNA, 25 bp, Canis familiaris
tgaaagtgattcccattggctcctc

SEQ ID NO: 175509 - DNA, 25 bp, Canis familiaris
tgaagggttgaccgtgatgtcctct

SEQ ID NO: 175510 - DNA, 25 bp, Canis familiaris
tgaaatggttcccagtatgtcaggc

SEQ ID NO: 175511 - DNA, 25 bp, Canis familiaris
tgaacaggtgtcctcgtttaccaac

SEQ ID NO: 175512 - DNA, 25 bp, Canis familiaris
tgaaagggaccaattgttcccaatt

SEQ ID NO: 175513 - DNA, 25 bp, Canis familiaris
tgaaaggggccactattttcgcctt

SEQ ID NO: 175514 - DNA, 25 bp, Canis familiaris
tgaaaggctggggttgtctggccct

SEQ ID NO: 175515 - DNA, 25 bp, Canis familiaris
tgaaaggagccctcttcggggctgc

SEQ ID NO: 175516 - DNA, 25 bp, Canis familiaris
tgaagaaaatcctctattggcccta

SEQ ID NO: 175517 - DNA, 25 bp, Canis familiaris
tgaaaaaagtgcttcttttctcttc

SEQ ID NO: 175518 - DNA, 25 bp, Canis familiaris
tgaagaaatagctttttttttgcct

SEQ ID NO: 175519 - DNA, 25 bp, Canis familiaris
tccgaagagtgtatttttttctctc

SEQ ID NO: 175520 - DNA, 25 bp, Canis familiaris
tccttcaggttgccttgttcttggc

SEQ ID NO: 175521 - DNA, 25 bp, Canis familiaris
tccttgggttccaatggacgttgct

SEQ ID NO: 175522 - DNA, 25 bp, Canis familiaris
tccttctgggtcagggcccagtcat

SEQ ID NO: 175523 - DNA, 25 bp, Canis familiaris
tccttcaggaggaggggtcgtcggg

SEQ ID NO: 175524 - DNA, 25 bp, Canis familiaris
tccttcagacccagggactcctggt

SEQ ID NO: 175525 - DNA, 25 bp, Canis familiaris
tccttaaccctggccgcaggttgga

SEQ ID NO: 175526 - DNA, 25 bp, Canis familiaris
tccttgccccccagaaggcaatgtt

SEQ ID NO: 175527 - DNA, 25 bp, Canis familiaris
tgcttaactcccaggcacagaagtc

SEQ ID NO: 175528 - DNA, 25 bp, Canis familiaris
ttcctcgtcaccagacacgacgtaa

SEQ ID NO: 175529 - DNA, 25 bp, Canis familiaris
tgaaccttgcccagattctgacttc

SEQ ID NO: 175530 - DNA, 25 bp, Canis familiaris
tgaacacttccttatgttctggccc

SEQ ID NO: 175531 - DNA, 25 bp, Canis familiaris
tgaaagctttcttcgttaggcgtcc

SEQ ID NO: 175532 - DNA, 25 bp, Canis familiaris
tgaaagcttgggttgccttgggtgt

SEQ ID NO: 175533 - DNA, 25 bp, Canis familiaris
tgaaagtctggggctgcagctgtcg

SEQ ID NO: 175534 - DNA, 25 bp, Canis familiaris
tgaaagctgtgggactagcctgggc

SEQ ID NO: 175535 - DNA, 25 bp, Canis familiaris
tgaaagctgttggtctctatttgtc

SEQ ID NO: 175536 - DNA, 25 bp, Canis familiaris
tgaaatgtggatctctcttctctac

SEQ ID NO: 175537 - DNA, 25 bp, Canis familiaris
tgaaatgctgtctatttctcccttc

SEQ ID NO: 175538 - DNA, 25 bp, Canis familiaris
tgaaatgttttcttacctcattccc

SEQ ID NO: 175539 - DNA, 25 bp, Canis familiaris
tgaattgtccatcaccaaccatttc

SEQ ID NO: 175540 - DNA, 25 bp, Canis familiaris
tgaaaaccagtgaccttccattctc

SEQ ID NO: 175541 - DNA, 25 bp, Canis familiaris
tgaaaaccagtgaacagcacctccc

SEQ ID NO: 175542 - DNA, 25 bp, Canis familiaris
tgaaaaccagtggatcaagccccca

SEQ ID NO: 175543 - DNA, 25 bp, Canis familiaris
tcatagaactaaaaccaccacccaa

SEQ ID NO: 175544 - DNA, 25 bp, Canis familiaris
tgaagaataaaatccccacctctga

SEQ ID NO: 175545 - DNA, 25 bp, Canis familiaris
tgaaaatttaaaacctcctctctgt

SEQ ID NO: 175546 - DNA, 25 bp, Canis familiaris
tgaaagtgtaaatccacatcccctc

SEQ ID NO: 175547 - DNA, 25 bp, Canis familiaris
tgaaagagcaaatacccagcccatc

SEQ ID NO: 175548 - DNA, 25 bp, Canis familiaris
tgaagtaaaacagcccatcctctgc

SEQ ID NO: 175549 - DNA, 25 bp, Canis familiaris
tgaagcatgagaaaccaccccaata

SEQ ID NO: 175550 - DNA, 25 bp, Canis familiaris
tgaagtccaagaggccaccgaatcg

SEQ ID NO: 175551 - DNA, 25 bp, Canis familiaris
tgcggtccagttggtacctaagcac

SEQ ID NO: 175552 - DNA, 25 bp, Canis familiaris
ttccccacttggaggccaagatcca

SEQ ID NO: 175553 - DNA, 25 bp, Canis familiaris
tgaacccctggggggctactatcca

SEQ ID NO: 175554 - DNA, 25 bp, Canis familiaris
tgaacccctggggggctactatcca

SEQ ID NO: 175555 - DNA, 25 bp, Canis familiaris
tgaacccctgggtctggaagcagac

SEQ ID NO: 175556 - DNA, 25 bp, Canis familiaris
tgaaaccctgagtcacgctgggcag

SEQ ID NO: 175557 - DNA, 25 bp, Canis familiaris
tgaaatccttcagcctgtacagcag

SEQ ID NO: 175558 - DNA, 25 bp, Canis familiaris
tgaaagttctgaggcctggcacaca

SEQ ID NO: 175559 - DNA, 25 bp, Canis familiaris
tgaacattttgagggtggcgcgcga

SEQ ID NO: 175560 - DNA, 25 bp, Canis familiaris
tgaacttcttaccgaggcagcacta

SEQ ID NO: 175561 - DNA, 25 bp, Canis familiaris
tgaactttgttcacaccaacttgcg

SEQ ID NO: 175562 - DNA, 25 bp, Canis familiaris
tgaacctgtttcagaccacacagcc

SEQ ID NO: 175563 - DNA, 25 bp, Canis familiaris
tgaactatgattccggttcaccacc

SEQ ID NO: 175564 - DNA, 25 bp, Canis familiaris
tgaatccaattgggcgtggccccca

SEQ ID NO: 175565 - DNA, 25 bp, Canis familiaris
tgaaacgatatgaacttccagcccc

SEQ ID NO: 175566 - DNA, 25 bp, Canis familiaris
tgaagacgaggaccctgtagaccca

SEQ ID NO: 175567 - DNA, 25 bp, Canis familiaris
tgaaaggcaggtcctttagcgccac

SEQ ID NO: 175568 - DNA, 25 bp, Canis familiaris
tgaaagccagtggccacttcacgct

SEQ ID NO: 175569 - DNA, 25 bp, Canis familiaris
tgaaatggcagagccaccatcctct

SEQ ID NO: 175570 - DNA, 25 bp, Canis familiaris
tgaaagatacacacatctctcctgc

SEQ ID NO: 175571 - DNA, 25 bp, Canis familiaris
tgaaacagaacaatcgctgccctct

SEQ ID NO: 175572 - DNA, 25 bp, Canis familiaris
tgaatcaaaataccctccaacctca

SEQ ID NO: 175573 - DNA, 25 bp, Canis familiaris
tgcaaacaggaactttccaccctgc

SEQ ID NO: 175574 - DNA, 25 bp, Canis familiaris
tgaagacccaaggttaaacctcaag

SEQ ID NO: 175575 - DNA, 25 bp, Canis familiaris
tgaactcccaggatctgcaaaggcc

SEQ ID NO: 175576 - DNA, 25 bp, Canis familiaris
tgaactccacggagctgagcgtagc

SEQ ID NO: 175577 - DNA, 25 bp, Canis familiaris
tgaactccagaggccgggcctgagc

SEQ ID NO: 175578 - DNA, 25 bp, Canis familiaris
tgaacatggggtgcagaggccttcc

SEQ ID NO: 175579 - DNA, 25 bp, Canis familiaris
tgaaaaggtgtgggtgcccgtgccc

SEQ ID NO: 175580 - DNA, 25 bp, Canis familiaris
tgaaaatggtgcggcgtggctgggc

SEQ ID NO: 175581 - DNA, 25 bp, Canis familiaris
tgaacactgtgtgccctgagcagat

SEQ ID NO: 175582 - DNA, 25 bp, Canis familiaris
tgaatcacttcatctctctgggatg

SEQ ID NO: 175583 - DNA, 25 bp, Canis familiaris
tgaatcgttcaactcagcctgaggc

SEQ ID NO: 175584 - DNA, 25 bp, Canis familiaris
tgaagccctcatttagacagaggtc

SEQ ID NO: 175585 - DNA, 25 bp, Canis familiaris
tgaagactccatgaaaccaggccct

SEQ ID NO: 175586 - DNA, 25 bp, Canis familiaris
tgaagaccactggaagatccccggg

SEQ ID NO: 175587 - DNA, 25 bp, Canis familiaris
tgaagcctactaaggtctcagctcg

SEQ ID NO: 175588 - DNA, 25 bp, Canis familiaris
tgaagcctgttcagtatctactcgc

SEQ ID NO: 175589 - DNA, 25 bp, Canis familiaris
tgaagttgatccaggccaaccaccg

SEQ ID NO: 175590 - DNA, 25 bp, Canis familiaris
tgaacagcgaccagcaccaaatgca

SEQ ID NO: 175591 - DNA, 25 bp, Canis familiaris
tgcaccaaatccaacccgaatggaa

SEQ ID NO: 175592 - DNA, 25 bp, Canis familiaris
tgcacttttacaagccgcaaaggca

SEQ ID NO: 175593 - DNA, 25 bp, Canis familiaris
tgaattcttaagtgccaatgatggc

SEQ ID NO: 175594 - DNA, 25 bp, Canis familiaris
tgaatgcgctttattgcccatggga

SEQ ID NO: 175595 - DNA, 25 bp, Canis familiaris
tgaaggtatttagtccctgtcctct

SEQ ID NO: 175596 - DNA, 25 bp, Canis familiaris
tgaagtcaaatgtgtcccgttctcc

SEQ ID NO: 175597 - DNA, 25 bp, Canis familiaris
tgaagtcaaatgtgtcccgttctcc

SEQ ID NO: 175598 - DNA, 25 bp, Canis familiaris
tgaagtcaaatgtgtcccgttctcc

SEQ ID NO: 175599 - DNA, 25 bp, Canis familiaris
tgaaccaatcagagtcctcgtgact

SEQ ID NO: 175600 - DNA, 25 bp, Canis familiaris
tgaaccttcaatctcctttgagggc

SEQ ID NO: 175601 - DNA, 25 bp, Canis familiaris
tgaagccattttcacctttgtagcc

SEQ ID NO: 175602 - DNA, 25 bp, Canis familiaris
tgaagtgttttgctttttctggcac

SEQ ID NO: 175603 - DNA, 25 bp, Canis familiaris
tgaagtgtaaatattttttcccagt

SEQ ID NO: 175604 - DNA, 25 bp, Canis familiaris
tgaagtttgaaactttctcgctccc

SEQ ID NO: 175605 - DNA, 25 bp, Canis familiaris
tgaagcctgtgaaggtttccgcacc

SEQ ID NO: 175606 - DNA, 25 bp, Canis familiaris
tgaagcgccagatcgtgaagcccac

SEQ ID NO: 175607 - DNA, 25 bp, Canis familiaris
tgaaggcatcaacctttctgcccat

SEQ ID NO: 175608 - DNA, 25 bp, Canis familiaris
tgctaggcacattgcactaattaaa

SEQ ID NO: 175609 - DNA, 25 bp, Canis familiaris
tgcaagtgcttctacgaattaacat

SEQ ID NO: 175610 - DNA, 25 bp, Canis familiaris
tgaagtcattcttcgtgctcaagct

SEQ ID NO: 175611 - DNA, 25 bp, Canis familiaris
tgaagccaatgcatgcgatccacca

SEQ ID NO: 175612 - DNA, 25 bp, Canis familiaris
tgaagctgccagggaattcccagcc

SEQ ID NO: 175613 - DNA, 25 bp, Canis familiaris
tgaagtccggtgatccagtggctga

SEQ ID NO: 175614 - DNA, 25 bp, Canis familiaris
tgaagtaccgggaccgtgcagctga

SEQ ID NO: 175615 - DNA, 25 bp, Canis familiaris
tgaagtacctggcccaaggccacac

SEQ ID NO: 175616 - DNA, 25 bp, Canis familiaris
tgaagagggtgtccgcaaggctcag

SEQ ID NO: 175617 - DNA, 25 bp, Canis familiaris
tgaacatggtgtccccagggcatga

SEQ ID NO: 175618 - DNA, 25 bp, Canis familiaris
tgaacagacgacaccagctgcgtac

SEQ ID NO: 175619 - DNA, 25 bp, Canis familiaris
tgcacaaccaacactcacagggagc

SEQ ID NO: 175620 - DNA, 25 bp, Canis familiaris
tgcaacgccattgcccagggtggcg

SEQ ID NO: 175621 - DNA, 25 bp, Canis familiaris
tgaaagagagctgccacaccgtgag

SEQ ID NO: 175622 - DNA, 25 bp, Canis familiaris
tgaagaagtggcgctcactcggaac

SEQ ID NO: 175623 - DNA, 25 bp, Canis familiaris
tgaagaataggcactcagtcacaga

SEQ ID NO: 175624 - DNA, 25 bp, Canis familiaris
tgaagtcagcagtgaacttgtcagc

SEQ ID NO: 175625 - DNA, 25 bp, Canis familiaris
tgaaggcggacacctactgtgcata

SEQ ID NO: 175626 - DNA, 25 bp, Canis familiaris
tgaatgggaagccttactttgggga

SEQ ID NO: 175627 - DNA, 25 bp, Canis familiaris
tgaaggtagtctctggtctggggga

SEQ ID NO: 175628 - DNA, 25 bp, Canis familiaris
tgcaaagtgtttctccttggtggag

SEQ ID NO: 175629 - DNA, 25 bp, Canis familiaris
tgaacaagttctcggccagatggtg

SEQ ID NO: 175630 - DNA, 25 bp, Canis familiaris
tgaacacgcttctgtcctaatgttt

SEQ ID NO: 175631 - DNA, 25 bp, Canis familiaris
tgaaccgcttcatgccactgaatac

SEQ ID NO: 175632 - DNA, 25 bp, Canis familiaris
tgaaccgcttcatgccactgaatac

SEQ ID NO: 175633 - DNA, 25 bp, Canis familiaris
tgaactcggccattgtcactggttg

SEQ ID NO: 175634 - DNA, 25 bp, Canis familiaris
tgcaaccttctctgatactgtagag

SEQ ID NO: 175635 - DNA, 25 bp, Canis familiaris
tgaactgtgttctgctatctgtgac

SEQ ID NO: 175636 - DNA, 25 bp, Canis familiaris
tgaacatgtgttttgcttggccagc

SEQ ID NO: 175637 - DNA, 25 bp, Canis familiaris
tgaacagggctctgttggcagcgct

SEQ ID NO: 175638 - DNA, 25 bp, Canis familiaris
tgaaaacagcttagttcctcctgct

SEQ ID NO: 175639 - DNA, 25 bp, Canis familiaris
tgaaaacagtctcattcttcgcaca

SEQ ID NO: 175640 - DNA, 25 bp, Canis familiaris
tgaagaaagtctctttcctctccac

SEQ ID NO: 175641 - DNA, 25 bp, Canis familiaris
tgaagacaagactgtgtctccccct

SEQ ID NO: 175642 - DNA, 25 bp, Canis familiaris
tgaagcaaccacatgattttccctc

SEQ ID NO: 175643 - DNA, 25 bp, Canis familiaris
tgaagccactggctgtactgtcctt

SEQ ID NO: 175644 - DNA, 25 bp, Canis familiaris
tgaagcactgggcattcatttcctc

SEQ ID NO: 175645 - DNA, 25 bp, Canis familiaris
tgaacttggggtttctgacctccta

SEQ ID NO: 175646 - DNA, 25 bp, Canis familiaris
tgaaggggggcttcgtgtccttcta

SEQ ID NO: 175647 - DNA, 25 bp, Canis familiaris
tgaagggtcgtttttttactctgag

SEQ ID NO: 175648 - DNA, 25 bp, Canis familiaris
tgaagccctcgttgtttataacctg

SEQ ID NO: 175649 - DNA, 25 bp, Canis familiaris
tgaacactgctcctcattttcatta

SEQ ID NO: 175650 - DNA, 25 bp, Canis familiaris
tgaacacatgcaactttttacgtaa

SEQ ID NO: 175651 - DNA, 25 bp, Canis familiaris
tgaactcagcctttgtttatctgta

SEQ ID NO: 175652 - DNA, 25 bp, Canis familiaris
tgaattccctcagcttttgtgtatc

SEQ ID NO: 175653 - DNA, 25 bp, Canis familiaris
tgaattacctccctgtagctttatg

SEQ ID NO: 175654 - DNA, 25 bp, Canis familiaris
tgaagcttcactgcacagtaccttc

SEQ ID NO: 175655 - DNA, 25 bp, Canis familiaris
tgaagagctactacacggacctgga

SEQ ID NO: 175656 - DNA, 25 bp, Canis familiaris
tgaagtctcagaacatccgatgcca

SEQ ID NO: 175657 - DNA, 25 bp, Canis familiaris
tgaactcacacaatctcactcttca

SEQ ID NO: 175658 - DNA, 25 bp, Canis familiaris
tgaaccaccacaatctgctggtctg

SEQ ID NO: 175659 - DNA, 25 bp, Canis familiaris
tgaacgacgcacagctggtgctcca

SEQ ID NO: 175660 - DNA, 25 bp, Canis familiaris
tgaaaacgcagacggcagcttccag

SEQ ID NO: 175661 - DNA, 25 bp, Canis familiaris
tgaaaatagaggcccagcctgccga

SEQ ID NO: 175662 - DNA, 25 bp, Canis familiaris
tgcacaataaaaccaagcctctgga

SEQ ID NO: 175663 - DNA, 25 bp, Canis familiaris
tgcaagaacaaagcagtcaccttga

SEQ ID NO: 175664 - DNA, 25 bp, Canis familiaris
tgaagagaaccagcggcatcaccag

SEQ ID NO: 175665 - DNA, 25 bp, Canis familiaris
tgaagagctccagtggcggaagccg

SEQ ID NO: 175666 - DNA, 25 bp, Canis familiaris
tgaagaggccagcgggcaagccatg

SEQ ID NO: 175667 - DNA, 25 bp, Canis familiaris
tgaagaggcggcgctcgaacagcac

SEQ ID NO: 175668 - DNA, 25 bp, Canis familiaris
tgaagaggggcattccagtccaaag

SEQ ID NO: 175669 - DNA, 25 bp, Canis familiaris
tgaagaacggcttccaggcgcaaga

SEQ ID NO: 175670 - DNA, 25 bp, Canis familiaris
taggaacggctacggggaggaagca

SEQ ID NO: 175671 - DNA, 25 bp, Canis familiaris
tagaaacgtgtactgggggtacctg

SEQ ID NO: 175672 - DNA, 25 bp, Canis familiaris
tagtaccaggggccccaggtacttg

SEQ ID NO: 175673 - DNA, 25 bp, Canis familiaris
tccaaccagggggccaaggcacagt

SEQ ID NO: 175674 - DNA, 25 bp, Canis familiaris
tccaagccacgggaccaaggaactt

SEQ ID NO: 175675 - DNA, 25 bp, Canis familiaris
tcccaccccgtatgaagtaacttct

SEQ ID NO: 175676 - DNA, 25 bp, Canis familiaris
tcccagtcccttcaagggaactttg

SEQ ID NO: 175677 - DNA, 25 bp, Canis familiaris
tcccgtggccttcaacttaaggtgg

SEQ ID NO: 175678 - DNA, 25 bp, Canis familiaris
tgcccggggcttctcaaataaagtc

SEQ ID NO: 175679 - DNA, 25 bp, Canis familiaris
tgaaccgggcattgttaatattaac

SEQ ID NO: 175680 - DNA, 25 bp, Canis familiaris
tgaaccctgttaatctaatcataaa

SEQ ID NO: 175681 - DNA, 25 bp, Canis familiaris
tgaacccattggtctctcagttcat

SEQ ID NO: 175682 - DNA, 25 bp, Canis familiaris
tgaacctcaagggccaagtactttt

SEQ ID NO: 175683 - DNA, 25 bp, Canis familiaris
tgaacaccacgggtaatcatagttc

SEQ ID NO: 175684 - DNA, 25 bp, Canis familiaris
tgaacaccctgtaatctcgtaattc

SEQ ID NO: 175685 - DNA, 25 bp, Canis familiaris
tgaaccggatgtctcggcattaatc

SEQ ID NO: 175686 - DNA, 25 bp, Canis familiaris
tgaacttggactctagccttggatc

SEQ ID NO: 175687 - DNA, 25 bp, Canis familiaris
tgaacttggaacaaatgccttacca

SEQ ID NO: 175688 - DNA, 25 bp, Canis familiaris
tgaacatagttagccatcctctgac

SEQ ID NO: 175689 - DNA, 25 bp, Canis familiaris
tgaactatgttgtgcccactgctgt

SEQ ID NO: 175690 - DNA, 25 bp, Canis familiaris
tgaacatcttattgtctccactggt

SEQ ID NO: 175691 - DNA, 25 bp, Canis familiaris
tgaatcactgtgagtaacatctact

SEQ ID NO: 175692 - DNA, 25 bp, Canis familiaris
tgaagattgatgagtagagccccaa

SEQ ID NO: 175693 - DNA, 25 bp, Canis familiaris
tgaatgtttgtgttctccccaaatc

SEQ ID NO: 175694 - DNA, 25 bp, Canis familiaris
tgaattctttggctgcccaagccac

SEQ ID NO: 175695 - DNA, 25 bp, Canis familiaris
tgaagcttggttggcccgaaccagc

SEQ ID NO: 175696 - DNA, 25 bp, Canis familiaris
tgaagataggtttccacgtgatccc

SEQ ID NO: 175697 - DNA, 25 bp, Canis familiaris
tgaaggacttactgcacttgacacc

SEQ ID NO: 175698 - DNA, 25 bp, Canis familiaris
tgaagggtgttctgagtagggcccc

SEQ ID NO: 175699 - DNA, 25 bp, Canis familiaris
tgaagggttttctctgagtggcctc

SEQ ID NO: 175700 - DNA, 25 bp, Canis familiaris
tgaactggttgtacccatagttgct

SEQ ID NO: 175701 - DNA, 25 bp, Canis familiaris
tgaatttgtctgaagcccatagttc

SEQ ID NO: 175702 - DNA, 25 bp, Canis familiaris
tgaagatctggtgtcgccatgggtc

SEQ ID NO: 175703 - DNA, 25 bp, Canis familiaris
tgaagtctggcaactcggacgtgta

SEQ ID NO: 175704 - DNA, 25 bp, Canis familiaris
tgcacagtttgcaacctttcgttga

SEQ ID NO: 175705 - DNA, 25 bp, Canis familiaris
tgcacgttttctcctttttggaggc

SEQ ID NO: 175706 - DNA, 25 bp, Canis familiaris
tgcatgtttaactcctaatttaggc

SEQ ID NO: 175707 - DNA, 25 bp, Canis familiaris
tgcagtaaaatatcatcttctgtta

SEQ ID NO: 175708 - DNA, 25 bp, Canis familiaris
tgaaaataatcatctgtcctaacag

SEQ ID NO: 175709 - DNA, 25 bp, Canis familiaris
tgaacactagtgaactgacccgacg

SEQ ID NO: 175710 - DNA, 25 bp, Canis familiaris
tgaacaccagtggcagctactcggg

SEQ ID NO: 175711 - DNA, 25 bp, Canis familiaris
tgaaccgagctggctgctacaggtc

SEQ ID NO: 175712 - DNA, 25 bp, Canis familiaris
tgaacctccagaggccatctgggca

SEQ ID NO: 175713 - DNA, 25 bp, Canis familiaris
tgcagcacgtcattacctactggtc

SEQ ID NO: 175714 - DNA, 25 bp, Canis familiaris
tgcaccctctaagccagcaagattt

SEQ ID NO: 175715 - DNA, 25 bp, Canis familiaris
tgcacctccgaatccgcattatatt

SEQ ID NO: 175716 - DNA, 25 bp, Canis familiaris
tgaactcacagccaacaacactata

SEQ ID NO: 175717 - DNA, 25 bp, Canis familiaris
tgcttcctcccaacaaacaatggcc

SEQ ID NO: 175718 - DNA, 25 bp, Canis familiaris
tgcttcccaccctaagaaactaaag

SEQ ID NO: 175719 - DNA, 25 bp, Canis familiaris
tgcccctcctctctaaaattaataa

SEQ ID NO: 175720 - DNA, 25 bp, Canis familiaris
tgctcccttgggcaaccaatgggaa

SEQ ID NO: 175721 - DNA, 25 bp, Canis familiaris
tgaacctaggcaccagaccagggta

SEQ ID NO: 175722 - DNA, 25 bp, Canis familiaris
tgaacctcaaaccaggtctcctgat

SEQ ID NO: 175723 - DNA, 25 bp, Canis familiaris
tgaacacatggatccaggccatctc

SEQ ID NO: 175724 - DNA, 25 bp, Canis familiaris
tgaacactgtagaccaggctctcac

SEQ ID NO: 175725 - DNA, 25 bp, Canis familiaris
tgaacagctgcttgaccatgaggcc

SEQ ID NO: 175726 - DNA, 25 bp, Canis familiaris
tgaacatctctctgtctggattctc

SEQ ID NO: 175727 - DNA, 25 bp, Canis familiaris
tgaacaccttcagtgtggtgccctc

SEQ ID NO: 175728 - DNA, 25 bp, Canis familiaris
tgaacacgttctggaggaccccgtg

SEQ ID NO: 175729 - DNA, 25 bp, Canis familiaris
tgaatatcctttgtgtgaccctgtt

SEQ ID NO: 175730 - DNA, 25 bp, Canis familiaris
tgaacattcttatctgtgcaccgtg

SEQ ID NO: 175731 - DNA, 25 bp, Canis familiaris
tgcaacttttaacttgccctgtgat

SEQ ID NO: 175732 - DNA, 25 bp, Canis familiaris
tgaacttttgagccttgactctcct

SEQ ID NO: 175733 - DNA, 25 bp, Canis familiaris
tgaatcttgtagcttcggcttcttt

SEQ ID NO: 175734 - DNA, 25 bp, Canis familiaris
tgaattcaagggttggcttctccgt

SEQ ID NO: 175735 - DNA, 25 bp, Canis familiaris
tgaagcgaaggttctgaccctcgcg

SEQ ID NO: 175736 - DNA, 25 bp, Canis familiaris
tgaagtgaaggttctcctctgctgc

SEQ ID NO: 175737 - DNA, 25 bp, Canis familiaris
tgaagctataggctctctttgggat

SEQ ID NO: 175738 - DNA, 25 bp, Canis familiaris
tgaacttgcagctcttgtctgggga

SEQ ID NO: 175739 - DNA, 25 bp, Canis familiaris
tgaactatgcgggcttcatctttgg

SEQ ID NO: 175740 - DNA, 25 bp, Canis familiaris
tgaaccagcgaggtggccttgatct

SEQ ID NO: 175741 - DNA, 25 bp, Canis familiaris
tgaatacgcggtaggactgcctcac

SEQ ID NO: 175742 - DNA, 25 bp, Canis familiaris
tgaacaggggctaggagctctccac

SEQ ID NO: 175743 - DNA, 25 bp, Canis familiaris
tgaacagggatgccaggcactctcc

SEQ ID NO: 175744 - DNA, 25 bp, Canis familiaris
tgaagatggtcaccagtgccttctc

SEQ ID NO: 175745 - DNA, 25 bp, Canis familiaris
tgaagacaacacggtgccgtctccg

SEQ ID NO: 175746 - DNA, 25 bp, Canis familiaris
tgaagccaatcacacctggttaccc

SEQ ID NO: 175747 - DNA, 25 bp, Canis familiaris
tgaaccccaccatatggatttctcc

SEQ ID NO: 175748 - DNA, 25 bp, Canis familiaris
tgaagagccagtctttgcgtttctc

SEQ ID NO: 175749 - DNA, 25 bp, Canis familiaris
tgaagacggccacctgtggtggtcc

SEQ ID NO: 175750 - DNA, 25 bp, Canis familiaris
tgaagacggcgaggctgggggccgc

SEQ ID NO: 175751 - DNA, 25 bp, Canis familiaris
tgaagacctggagctcgaggagccg

SEQ ID NO: 175752 - DNA, 25 bp, Canis familiaris
tgaagtcctggttctgatggctgtc

SEQ ID NO: 175753 - DNA, 25 bp, Canis familiaris
tgaactcaatgggcagcttcgatcc

SEQ ID NO: 175754 - DNA, 25 bp, Canis familiaris
tgaagagccatagggcttccacctt

SEQ ID NO: 175755 - DNA, 25 bp, Canis familiaris
tgaagaggcagatgcagtccccagt

SEQ ID NO: 175756 - DNA, 25 bp, Canis familiaris
tgaaggtccgatttcaggccagcat

SEQ ID NO: 175757 - DNA, 25 bp, Canis familiaris
tgaagggcccagcacatggactgat

SEQ ID NO: 175758 - DNA, 25 bp, Canis familiaris
tgaagggcgcgacccgcgaatatta

SEQ ID NO: 175759 - DNA, 25 bp, Canis familiaris
tgaaggagttgacccggagaaccac

SEQ ID NO: 175760 - DNA, 25 bp, Canis familiaris
tgaaggatgtctgcccgggtacatc

SEQ ID NO: 175761 - DNA, 25 bp, Canis familiaris
tgaagagatcgggccacgttgtcct

SEQ ID NO: 175762 - DNA, 25 bp, Canis familiaris
tgaagacacggcccagtttgtccag

SEQ ID NO: 175763 - DNA, 25 bp, Canis familiaris
tgaagccaagcaccctttagtacac

SEQ ID NO: 175764 - DNA, 25 bp, Canis familiaris
tgcaaccaacgccctatctagataa

SEQ ID NO: 175765 - DNA, 25 bp, Canis familiaris
tgaaccaactgcaagtctctataat

SEQ ID NO: 175766 - DNA, 25 bp, Canis familiaris
tgaaccaacttccatcgtgaatctt

SEQ ID NO: 175767 - DNA, 25 bp, Canis familiaris
tgaagacccattcgatcgtgcaggt

SEQ ID NO: 175768 - DNA, 25 bp, Canis familiaris
tgaattcaccttcttggagctcaca

SEQ ID NO: 175769 - DNA, 25 bp, Canis familiaris
tgaatagcacaactctttaacttga

SEQ ID NO: 175770 - DNA, 25 bp, Canis familiaris
tgaacaaaagctagcccaactaacc

SEQ ID NO: 175771 - DNA, 25 bp, Canis familiaris
tgaatccaaggcatggccaacccac

SEQ ID NO: 175772 - DNA, 25 bp, Canis familiaris
tgaaaatcagtgagcgcacaccctc

SEQ ID NO: 175773 - DNA, 25 bp, Canis familiaris
tgaacaactgtgggctgcaggccgg

SEQ ID NO: 175774 - DNA, 25 bp, Canis familiaris
tgaacgcacatgcccggggcagggc

SEQ ID NO: 175775 - DNA, 25 bp, Canis familiaris
tgaaccagcacccagatggggggcc

SEQ ID NO: 175776 - DNA, 25 bp, Canis familiaris
tgaagcccccagggagggctcagcc

SEQ ID NO: 175777 - DNA, 25 bp, Canis familiaris
tgaacctattcgagatctgtgccac

SEQ ID NO: 175778 - DNA, 25 bp, Canis familiaris
tgaacatcaagtgctcttttgcccc

SEQ ID NO: 175779 - DNA, 25 bp, Canis familiaris
tgaatactttgctgctgcttttctg

SEQ ID NO: 175780 - DNA, 25 bp, Canis familiaris
tgaatccttagatgcctcattccgt

SEQ ID NO: 175781 - DNA, 25 bp, Canis familiaris
tgctacctggaatcctcgtgctaga

SEQ ID NO: 175782 - DNA, 25 bp, Canis familiaris
tgcgagggtaaaccgagtctcacca

SEQ ID NO: 175783 - DNA, 25 bp, Canis familiaris
tgcagagtgcccaagacctggttac

SEQ ID NO: 175784 - DNA, 25 bp, Canis familiaris
tcgatggactgcaagccattggaat

SEQ ID NO: 175785 - DNA, 25 bp, Canis familiaris
tgcttctaaaaggcattgtgcatat

SEQ ID NO: 175786 - DNA, 25 bp, Canis familiaris
tgcttgaccacctcaagctgcattc

SEQ ID NO: 175787 - DNA, 25 bp, Canis familiaris
tctagttacccatactgcagtcgtg

SEQ ID NO: 175788 - DNA, 25 bp, Canis familiaris
tgaagtgtaccctaactagccgggg

SEQ ID NO: 175789 - DNA, 25 bp, Canis familiaris
tgcaggtacaccgaagactagaaaa

SEQ ID NO: 175790 - DNA, 25 bp, Canis familiaris
tgaagttgcattaccaacaaataaa

SEQ ID NO: 175791 - DNA, 25 bp, Canis familiaris
tgaacattgcttgctccgaaatatg

SEQ ID NO: 175792 - DNA, 25 bp, Canis familiaris
tgaagatgtattgcccgatgcaatg

SEQ ID NO: 175793 - DNA, 25 bp, Canis familiaris
tgaaggctattgtcaaccactgagc

SEQ ID NO: 175794 - DNA, 25 bp, Canis familiaris
tgaagcctactgaacaacctagccc

SEQ ID NO: 175795 - DNA, 25 bp, Canis familiaris
tgaaggtgacgttcaactcggctct

SEQ ID NO: 175796 - DNA, 25 bp, Canis familiaris
tgaagttgtcggtcaatgctcgtgc

SEQ ID NO: 175797 - DNA, 25 bp, Canis familiaris
tgaatatcggggtcattgccaatga

SEQ ID NO: 175798 - DNA, 25 bp, Canis familiaris
tgcagataagtgtggcatttaccag

SEQ ID NO: 175799 - DNA, 25 bp, Canis familiaris
tgcagacatgggtttatttttcaat

SEQ ID NO: 175800 - DNA, 25 bp, Canis familiaris
tgaacgcgtgctttttattccattt

SEQ ID NO: 175801 - DNA, 25 bp, Canis familiaris
tgaatacctctgttttcatttcctg

SEQ ID NO: 175802 - DNA, 25 bp, Canis familiaris
tgaatactgctttttctctttctgg

SEQ ID NO: 175803 - DNA, 25 bp, Canis familiaris
tgaattcctctatttccctttaagt

SEQ ID NO: 175804 - DNA, 25 bp, Canis familiaris
tgaatctcatttttcatcccttgga

SEQ ID NO: 175805 - DNA, 25 bp, Canis familiaris
tgaactctgtatttatcacctccag

SEQ ID NO: 175806 - DNA, 25 bp, Canis familiaris
tgaacatgcttgttttcacactccc

SEQ ID NO: 175807 - DNA, 25 bp, Canis familiaris
tgcaaatgttgccttgtcaggcccg

SEQ ID NO: 175808 - DNA, 25 bp, Canis familiaris
tgaatgtttgccctggggccctaaa

SEQ ID NO: 175809 - DNA, 25 bp, Canis familiaris
tgaatgtcatgggcggggtacctgc

SEQ ID NO: 175810 - DNA, 25 bp, Canis familiaris
tgaactgcagcagctggggcttccc

SEQ ID NO: 175811 - DNA, 25 bp, Canis familiaris
tgaagtgcttccagtgacttggcca

SEQ ID NO: 175812 - DNA, 25 bp, Canis familiaris
tgaagcttgcccagattcggtgcag

SEQ ID NO: 175813 - DNA, 25 bp, Canis familiaris
tgaagcttgcccagattcggtgcag

SEQ ID NO: 175814 - DNA, 25 bp, Canis familiaris
tgaagcttgcccagattcggtgcag

SEQ ID NO: 175815 - DNA, 25 bp, Canis familiaris
tgcgacttgccggagatacacgtgg

SEQ ID NO: 175816 - DNA, 25 bp, Canis familiaris
tgctgggggagctagaacactttgg

SEQ ID NO: 175817 - DNA, 25 bp, Canis familiaris
tgctggaggcaatagtcccttgggg

SEQ ID NO: 175818 - DNA, 25 bp, Canis familiaris
tgcaggggagaagctcacctacgtg

SEQ ID NO: 175819 - DNA, 25 bp, Canis familiaris
tgaagggagaagtcctgcccctcat

SEQ ID NO: 175820 - DNA, 25 bp, Canis familiaris
tgaagcggaacagctcggacgcctt

SEQ ID NO: 175821 - DNA, 25 bp, Canis familiaris
tgaagcggaacagctcggacgcctt

SEQ ID NO: 175822 - DNA, 25 bp, Canis familiaris
tgaatggctaaacctggggcactgc

SEQ ID NO: 175823 - DNA, 25 bp, Canis familiaris
tgaatgaggtagtctccgggcttgc

SEQ ID NO: 175824 - DNA, 25 bp, Canis familiaris
tgaatgccgaagttactgacgagcc

SEQ ID NO: 175825 - DNA, 25 bp, Canis familiaris
tgaaccgaggaaccgacgagtccgt

SEQ ID NO: 175826 - DNA, 25 bp, Canis familiaris
tgaaccccgacagcgacaagatcat

SEQ ID NO: 175827 - DNA, 25 bp, Canis familiaris
tgaagaaccgtagccacaaatccca

SEQ ID NO: 175828 - DNA, 25 bp, Canis familiaris
tgaagcgaccgtctcacaaaactct

SEQ ID NO: 175829 - DNA, 25 bp, Canis familiaris
tgaagaacctgtgtccaaatattgt

SEQ ID NO: 175830 - DNA, 25 bp, Canis familiaris
tgaagaacttggccccaatatgttt

SEQ ID NO: 175831 - DNA, 25 bp, Canis familiaris
tgaagaactttgccccatatttgtc

SEQ ID NO: 175832 - DNA, 25 bp, Canis familiaris
tgaagaagcttctcctatattccgc

SEQ ID NO: 175833 - DNA, 25 bp, Canis familiaris
taagagacttttgcttaacccaagt

SEQ ID NO: 175834 - DNA, 25 bp, Canis familiaris
taaggtctaagtgttaactggtcaa

SEQ ID NO: 175835 - DNA, 25 bp, Canis familiaris
ttcaaactactcccttaagctggtc

SEQ ID NO: 175836 - DNA, 25 bp, Canis familiaris
tgcaaaactaaccactatgtacttt

SEQ ID NO: 175837 - DNA, 25 bp, Canis familiaris
tgcccaatccagaaacttgttttat

SEQ ID NO: 175838 - DNA, 25 bp, Canis familiaris
tgcacaaattctaaacctgttttgt

SEQ ID NO: 175839 - DNA, 25 bp, Canis familiaris
ttgaggttcggatccttcttagtcc

SEQ ID NO: 175840 - DNA, 25 bp, Canis familiaris
tcaggggacggatcctattttagcc

SEQ ID NO: 175841 - DNA, 25 bp, Canis familiaris
tcacggggcatttacctggtttggt

SEQ ID NO: 175842 - DNA, 25 bp, Canis familiaris
tgctcggcggtcaagacctgggttc

SEQ ID NO: 175843 - DNA, 25 bp, Canis familiaris
tgcttggggtcagacctgggttccc

SEQ ID NO: 175844 - DNA, 25 bp, Canis familiaris
tgctacaaggtagaggtgagcctcc

SEQ ID NO: 175845 - DNA, 25 bp, Canis familiaris
tgaagtcaggaagggaggaccccca

SEQ ID NO: 175846 - DNA, 25 bp, Canis familiaris
tgaagtcaggaagggaggaccccca

SEQ ID NO: 175847 - DNA, 25 bp, Canis familiaris
tgaagtcaggaagggaggaccccca

SEQ ID NO: 175848 - DNA, 25 bp, Canis familiaris
tgaagcgcggaaggaccgaacaccc

SEQ ID NO: 175849 - DNA, 25 bp, Canis familiaris
tgcaagctgaattaagaccggagac

SEQ ID NO: 175850 - DNA, 25 bp, Canis familiaris
tgcaaccactggttatcctggcaaa

SEQ ID NO: 175851 - DNA, 25 bp, Canis familiaris
tgaactcaggcttgttcctgacacc

SEQ ID NO: 175852 - DNA, 25 bp, Canis familiaris
tgaagctgcgtttgattcgtgaccc

SEQ ID NO: 175853 - DNA, 25 bp, Canis familiaris
tgaagcaggttcttctcatttgccc

SEQ ID NO: 175854 - DNA, 25 bp, Canis familiaris
tgaagcagcagcttgagttattccc

SEQ ID NO: 175855 - DNA, 25 bp, Canis familiaris
tgcaacagacagcttatttccctaa

SEQ ID NO: 175856 - DNA, 25 bp, Canis familiaris
tgaagagatctggttctctccctta

SEQ ID NO: 175857 - DNA, 25 bp, Canis familiaris
tgaagacattgagctgcttccctcc

SEQ ID NO: 175858 - DNA, 25 bp, Canis familiaris
tgaatcctctagctttagcacacct

SEQ ID NO: 175859 - DNA, 25 bp, Canis familiaris
tgaacccaagtgtgcaggcatccct

SEQ ID NO: 175860 - DNA, 25 bp, Canis familiaris
tgaacctggagggggagctgcgtca

SEQ ID NO: 175861 - DNA, 25 bp, Canis familiaris
tgaaccttgaatggggcagctcttt

SEQ ID NO: 175862 - DNA, 25 bp, Canis familiaris
tgaaggctctaggtgtgggctttgc

SEQ ID NO: 175863 - DNA, 25 bp, Canis familiaris
tgaatcgcggatgaatgtggctttg

SEQ ID NO: 175864 - DNA, 25 bp, Canis familiaris
tgaacctgaggttctggtctgctgt

SEQ ID NO: 175865 - DNA, 25 bp, Canis familiaris
tgaatcctaagggctggtctctgct

SEQ ID NO: 175866 - DNA, 25 bp, Canis familiaris
tgaaccatacagtgaagccctcttc

SEQ ID NO: 175867 - DNA, 25 bp, Canis familiaris
tgaaggcaaagatagatcgtccttc

SEQ ID NO: 175868 - DNA, 25 bp, Canis familiaris
tgaaccaagaagtcagtcctcactg

SEQ ID NO: 175869 - DNA, 25 bp, Canis familiaris
tgaaccgcagggtgtgtctcctgct

SEQ ID NO: 175870 - DNA, 25 bp, Canis familiaris
tgcaagccgcggtaaattcccagct

SEQ ID NO: 175871 - DNA, 25 bp, Canis familiaris
tgaattccatacttgacttctccag

SEQ ID NO: 175872 - DNA, 25 bp, Canis familiaris
tgaataccatttaacttccacttta

SEQ ID NO: 175873 - DNA, 25 bp, Canis familiaris
tgaagaacattaaccttcctctcct

SEQ ID NO: 175874 - DNA, 25 bp, Canis familiaris
tgaaggacttcaacctgttgcgctg

SEQ ID NO: 175875 - DNA, 25 bp, Canis familiaris
tgcaaactcttgccacgatgtgggg

SEQ ID NO: 175876 - DNA, 25 bp, Canis familiaris
tgcaaactcttgccacgatgtgggg

SEQ ID NO: 175877 - DNA, 25 bp, Canis familiaris
tcaacctgtccctgggggtagtctg

SEQ ID NO: 175878 - DNA, 25 bp, Canis familiaris
tccaccctcacctggggggaggtag

SEQ ID NO: 175879 - DNA, 25 bp, Canis familiaris
tgcttccccctgtggggcaggagga

SEQ ID NO: 175880 - DNA, 25 bp, Canis familiaris
tgcgtcctgtcctggtgacgggaaa

SEQ ID NO: 175881 - DNA, 25 bp, Canis familiaris
tgcagtggtgaagggggaaggaaaa

SEQ ID NO: 175882 - DNA, 25 bp, Canis familiaris
tgcaagaggaggagagagaaaggag

SEQ ID NO: 175883 - DNA, 25 bp, Canis familiaris
tgcaaagggagactggggcattgag

SEQ ID NO: 175884 - DNA, 25 bp, Canis familiaris
tgaagagcgtgtctggcgtgctcgg

SEQ ID NO: 175885 - DNA, 25 bp, Canis familiaris
tgaagagacgtgcaaagtccgggat

SEQ ID NO: 175886 - DNA, 25 bp, Canis familiaris
tgaatactcagtcaacactcctggc

SEQ ID NO: 175887 - DNA, 25 bp, Canis familiaris
tgcaaagctttcaaaccagcccagc

SEQ ID NO: 175888 - DNA, 25 bp, Canis familiaris
tgaagagcagatccgagacctggcc

SEQ ID NO: 175889 - DNA, 25 bp, Canis familiaris
tgaagatgctaccgaacggcgccgt

SEQ ID NO: 175890 - DNA, 25 bp, Canis familiaris
tgaagtgctgacaagagacgcgaga

SEQ ID NO: 175891 - DNA, 25 bp, Canis familiaris
tgaagcctgaccgtgacatcgaact

SEQ ID NO: 175892 - DNA, 25 bp, Canis familiaris
tgaagcccatccagagaacaatcct

SEQ ID NO: 175893 - DNA, 25 bp, Canis familiaris
tgaacggctcaagcaggaaatcgag

SEQ ID NO: 175894 - DNA, 25 bp, Canis familiaris
tgaagtggtgagcccggaacctgag

SEQ ID NO: 175895 - DNA, 25 bp, Canis familiaris
tgaactggagagccctgtgctgagc

SEQ ID NO: 175896 - DNA, 25 bp, Canis familiaris
tgcacttccaggcccatagcatggg

SEQ ID NO: 175897 - DNA, 25 bp, Canis familiaris
tgcactggtactgcgctgaagggaa

SEQ ID NO: 175898 - DNA, 25 bp, Canis familiaris
tgcacagtggatttagggagggaga

SEQ ID NO: 175899 - DNA, 25 bp, Canis familiaris
tgaaggtgtgcacgcgggggcaaaa

SEQ ID NO: 175900 - DNA, 25 bp, Canis familiaris
tgaaggaatccgggtacccacaatt

SEQ ID NO: 175901 - DNA, 25 bp, Canis familiaris
tgaaggaccctgagctaagccacat

SEQ ID NO: 175902 - DNA, 25 bp, Canis familiaris
tgaaggactcctcagcatattgctg

SEQ ID NO: 175903 - DNA, 25 bp, Canis familiaris
tgaaggacagtttagcattgcattt

SEQ ID NO: 175904 - DNA, 25 bp, Canis familiaris
tgaagaagcgcttaggctctgcctg

SEQ ID NO: 175905 - DNA, 25 bp, Canis familiaris
tgaagagagctattctgtgtcccca

SEQ ID NO: 175906 - DNA, 25 bp, Canis familiaris
tgaagaagctctccgtatatccgca

SEQ ID NO: 175907 - DNA, 25 bp, Canis familiaris
tgaagaagctctcctatatccgcat

SEQ ID NO: 175908 - DNA, 25 bp, Canis familiaris
tgaagaatctctccagtactcattt

SEQ ID NO: 175909 - DNA, 25 bp, Canis familiaris
tgaagcatccctgagatcgctgatt

SEQ ID NO: 175910 - DNA, 25 bp, Canis familiaris
tgaagcttctctggaacctggctac

SEQ ID NO: 175911 - DNA, 25 bp, Canis familiaris
tgaagcttgctttggccagttcatc

SEQ ID NO: 175912 - DNA, 25 bp, Canis familiaris
tgaattgttttgtccagtccatcac

SEQ ID NO: 175913 - DNA, 25 bp, Canis familiaris
taattgaattctgcactgacctgtc

SEQ ID NO: 175914 - DNA, 25 bp, Canis familiaris
tgaatctgagcaacctggcgttttc

SEQ ID NO: 175915 - DNA, 25 bp, Canis familiaris
tgaatctgcaaattcgcacctttcc

SEQ ID NO: 175916 - DNA, 25 bp, Canis familiaris
tgcatgctacaaattaaactttact

SEQ ID NO: 175917 - DNA, 25 bp, Canis familiaris
tgctcaacacaataaacttttcctt

SEQ ID NO: 175918 - DNA, 25 bp, Canis familiaris
tgcaaaaaagttagactcgttcctt

SEQ ID NO: 175919 - DNA, 25 bp, Canis familiaris
tgcaaaaacgggggcttcttcctgc

SEQ ID NO: 175920 - DNA, 25 bp, Canis familiaris
tgaagctattcgagcggttctctgc

SEQ ID NO: 175921 - DNA, 25 bp, Canis familiaris
tgaagccacttgagcacgtggcttg

SEQ ID NO: 175922 - DNA, 25 bp, Canis familiaris
tgaagcccatttccagggagctgcg

SEQ ID NO: 175923 - DNA, 25 bp, Canis familiaris
tgaagcggcataagtggtcggtcct

SEQ ID NO: 175924 - DNA, 25 bp, Canis familiaris
tgaacctgaagacttgctccttcct

SEQ ID NO: 175925 - DNA, 25 bp, Canis familiaris
tgaacctgacactttgtcctttcac

SEQ ID NO: 175926 - DNA, 25 bp, Canis familiaris
tgaagcaataccgtgttcctcttga

SEQ ID NO: 175927 - DNA, 25 bp, Canis familiaris
tgaagacatacaccgggccacaaga

SEQ ID NO: 175928 - DNA, 25 bp, Canis familiaris
tgaagcacaagaccggatgacccgt

SEQ ID NO: 175929 - DNA, 25 bp, Canis familiaris
tgaagacgcagaccgtggatcccag

SEQ ID NO: 175930 - DNA, 25 bp, Canis familiaris
tgaagatcctgaccgagcgtggcta

SEQ ID NO: 175931 - DNA, 25 bp, Canis familiaris
tgaatgatcggcttcggtgtttgct

SEQ ID NO: 175932 - DNA, 25 bp, Canis familiaris
tgaatgtttttcttgttatatgttg

SEQ ID NO: 175933 - DNA, 25 bp, Canis familiaris
tgaatgttgttccacagtcttcaca

SEQ ID NO: 175934 - DNA, 25 bp, Canis familiaris
tgaagatttgtcccaggctgctgag

SEQ ID NO: 175935 - DNA, 25 bp, Canis familiaris
tgaagctcttgttctagttgccatg

SEQ ID NO: 175936 - DNA, 25 bp, Canis familiaris
tgaagctttgtgtttggctgcaccc

SEQ ID NO: 175937 - DNA, 25 bp, Canis familiaris
tgaagcctttgacctgttgcatgca

SEQ ID NO: 175938 - DNA, 25 bp, Canis familiaris
tgctcccttctaccagtttgtagtc

SEQ ID NO: 175939 - DNA, 25 bp, Canis familiaris
tgcaccacaatccaccagatttttt

SEQ ID NO: 175940 - DNA, 25 bp, Canis familiaris
tgcaatcccttaccaattatttttg

SEQ ID NO: 175941 - DNA, 25 bp, Canis familiaris
tgcaaggcccttcagttttagtcta

SEQ ID NO: 175942 - DNA, 25 bp, Canis familiaris
tgcattccccttgagtttttgttga

SEQ ID NO: 175943 - DNA, 25 bp, Canis familiaris
tgcagtctactcatttttttttaag

SEQ ID NO: 175944 - DNA, 25 bp, Canis familiaris
tgcgtcggtcttatttttgtgttgg

SEQ ID NO: 175945 - DNA, 25 bp, Canis familiaris
tgctctcggggtctgttgttttaga

SEQ ID NO: 175946 - DNA, 25 bp, Canis familiaris
tgcttcggtgttcgtcaacgtgact

SEQ ID NO: 175947 - DNA, 25 bp, Canis familiaris
tgctatggggacagtgggagcaact

SEQ ID NO: 175948 - DNA, 25 bp, Canis familiaris
tgcaagcccgtctagtggtgggact

SEQ ID NO: 175949 - DNA, 25 bp, Canis familiaris
tgaagcagggtccagggtgggtcca

SEQ ID NO: 175950 - DNA, 25 bp, Canis familiaris
tgaagaggggctatctggggctcct

SEQ ID NO: 175951 - DNA, 25 bp, Canis familiaris
tgcaaagtgaggcttctgggtgcat

SEQ ID NO: 175952 - DNA, 25 bp, Canis familiaris
tgaaggaggcagcagctctgggttc

SEQ ID NO: 175953 - DNA, 25 bp, Canis familiaris
tgaaccaggcggacatcgggcctgt

SEQ ID NO: 175954 - DNA, 25 bp, Canis familiaris
tgaaccaggtggacactgcacgtct

SEQ ID NO: 175955 - DNA, 25 bp, Canis familiaris
tgaagctaggtcgagatctctccct

SEQ ID NO: 175956 - DNA, 25 bp, Canis familiaris
tgaagcgggtagccaacatccttat

SEQ ID NO: 175957 - DNA, 25 bp, Canis familiaris
tgaagagagggaacaacacagttta

SEQ ID NO: 175958 - DNA, 25 bp, Canis familiaris
tgaagagtgggtttcacaagtgaaa

SEQ ID NO: 175959 - DNA, 25 bp, Canis familiaris
tgaagagctgggccgtctaagctgg

SEQ ID NO: 175960 - DNA, 25 bp, Canis familiaris
tgcagcgaagggctgaccaactggc

SEQ ID NO: 175961 - DNA, 25 bp, Canis familiaris
tgcagctgcataactggatcgacaa

SEQ ID NO: 175962 - DNA, 25 bp, Canis familiaris
tgcaggaattcggcacgagcagcgg

SEQ ID NO: 175963 - DNA, 25 bp, Canis familiaris
tgcaggaagtgggcccaaggacccc

SEQ ID NO: 175964 - DNA, 25 bp, Canis familiaris
tgcagggaaggaggtccagggcccc

SEQ ID NO: 175965 - DNA, 25 bp, Canis familiaris
tgcagctggctgtgggtccaggagc

SEQ ID NO: 175966 - DNA, 25 bp, Canis familiaris
tgaatgtggggggcatcgtggcagc

SEQ ID NO: 175967 - DNA, 25 bp, Canis familiaris
tgaatggaaggcggctgcggacacc

SEQ ID NO: 175968 - DNA, 25 bp, Canis familiaris
tgaagggcagctgggtcaggtcatc

SEQ ID NO: 175969 - DNA, 25 bp, Canis familiaris
tgaagcaggtgctggatgggtccca

SEQ ID NO: 175970 - DNA, 25 bp, Canis familiaris
tgaagagcggctgggtgttgtccct

SEQ ID NO: 175971 - DNA, 25 bp, Canis familiaris
tgaagacagaaccgacttctcctct

SEQ ID NO: 175972 - DNA, 25 bp, Canis familiaris
tgaagaccaacatcgccttcctgca

SEQ ID NO: 175973 - DNA, 25 bp, Canis familiaris
tgaagaccaagctgtggggcctgca

SEQ ID NO: 175974 - DNA, 25 bp, Canis familiaris
tgcgaagccagagcctggggttcct

SEQ ID NO: 175975 - DNA, 25 bp, Canis familiaris
tgcggagcccgatgggggattcggc

SEQ ID NO: 175976 - DNA, 25 bp, Canis familiaris
tgctggagggtatgggggtcgggac

SEQ ID NO: 175977 - DNA, 25 bp, Canis familiaris
tcgacgggttcggggatgtctgggg

SEQ ID NO: 175978 - DNA, 25 bp, Canis familiaris
tccaccggtacgcggctgggtgggg

SEQ ID NO: 175979 - DNA, 25 bp, Canis familiaris
tccccgggatagcaagctgaacgag

SEQ ID NO: 175980 - DNA, 25 bp, Canis familiaris
tgctcccgtggaagctacagcttaa

SEQ ID NO: 175981 - DNA, 25 bp, Canis familiaris
tgctgagagggggccttcacttgaa

SEQ ID NO: 175982 - DNA, 25 bp, Canis familiaris
tgaagatgtggggcagcctccactg

SEQ ID NO: 175983 - DNA, 25 bp, Canis familiaris
tgaagatgttctggcagagcgcgcc

SEQ ID NO: 175984 - DNA, 25 bp, Canis familiaris
tgaagcattcagcagcagcagcctc

SEQ ID NO: 175985 - DNA, 25 bp, Canis familiaris
tgaagcgctcagagccagatgcctg

SEQ ID NO: 175986 - DNA, 25 bp, Canis familiaris
tgaagctctggccttgagatgcttg

SEQ ID NO: 175987 - DNA, 25 bp, Canis familiaris
tgaagttggccgccaacatctccgg

SEQ ID NO: 175988 - DNA, 25 bp, Canis familiaris
tgaagacttgccacatcctcttcag

SEQ ID NO: 175989 - DNA, 25 bp, Canis familiaris
tgcaaagtgagctcaacctctctca

SEQ ID NO: 175990 - DNA, 25 bp, Canis familiaris
tgcactgttcagtaaatcactatac

SEQ ID NO: 175991 - DNA, 25 bp, Canis familiaris
tgcactttaaaaatgctgcgtccta

SEQ ID NO: 175992 - DNA, 25 bp, Canis familiaris
tgcagttacaatggtagcatgtgat

SEQ ID NO: 175993 - DNA, 25 bp, Canis familiaris
tgcagatctacagcgccagagtgct

SEQ ID NO: 175994 - DNA, 25 bp, Canis familiaris
tgaatgcaagctctccagaggtgaa

SEQ ID NO: 175995 - DNA, 25 bp, Canis familiaris
tgaatccagctctccaagaggtgat

SEQ ID NO: 175996 - DNA, 25 bp, Canis familiaris
tgcactccgcactccaaaggggagc

SEQ ID NO: 175997 - DNA, 25 bp, Canis familiaris
tgcactccgcactccaaaggggagc

SEQ ID NO: 175998 - DNA, 25 bp, Canis familiaris
tgcactccgcactccaaaggggagc

SEQ ID NO: 175999 - DNA, 25 bp, Canis familiaris
tgcactccgcactccaaaggggagc

SEQ ID NO: 176000 - DNA, 25 bp, Canis familiaris
tgcactccgcactccaaaggggagc

SEQ ID NO: 176001 - DNA, 25 bp, Canis familiaris
tgcactccgcactccaaaggggagc

SEQ ID NO: 176002 - DNA, 25 bp, Canis familiaris
tgcactccgcactccaaaggggagc

SEQ ID NO: 176003 - DNA, 25 bp, Canis familiaris
tgcactccgcactccaaaggggagc

SEQ ID NO: 176004 - DNA, 25 bp, Canis familiaris
tgcactccgcactccaaaggggagc

SEQ ID NO: 176005 - DNA, 25 bp, Canis familiaris
tgcactccgcactccaaaggggagc

SEQ ID NO: 176006 - DNA, 25 bp, Canis familiaris
tgcagcccaacttccaacaggataa

SEQ ID NO: 176007 - DNA, 25 bp, Canis familiaris
tgcagcccgtgctaacatgaaatgc

SEQ ID NO: 176008 - DNA, 25 bp, Canis familiaris
tgcacgccactctaaaaacagctac

SEQ ID NO: 176009 - DNA, 25 bp, Canis familiaris
tgaagcgatctctaacatgcaacgg

SEQ ID NO: 176010 - DNA, 25 bp, Canis familiaris
tgaaggatgctctaacgcggtcagt

SEQ ID NO: 176011 - DNA, 25 bp, Canis familiaris
tgaaggatgcctgcacggaacacac

SEQ ID NO: 176012 - DNA, 25 bp, Canis familiaris
tgaatgtggccagccgcatggacag

SEQ ID NO: 176013 - DNA, 25 bp, Canis familiaris
tgaagggtcataggcctggacactc

SEQ ID NO: 176014 - DNA, 25 bp, Canis familiaris
tgaagggcacaaggccaggaaggcc

SEQ ID NO: 176015 - DNA, 25 bp, Canis familiaris
tgaagtcgccaggtgcacggaagtg

SEQ ID NO: 176016 - DNA, 25 bp, Canis familiaris
tgaagtcaggtggctccggaatggc

SEQ ID NO: 176017 - DNA, 25 bp, Canis familiaris
tgaagtcaggtggctccggaatggc

SEQ ID NO: 176018 - DNA, 25 bp, Canis familiaris
tgaagtcaggtggctccggaatggc

SEQ ID NO: 176019 - DNA, 25 bp, Canis familiaris
tgaagctagtgtgtctgctggccaa

SEQ ID NO: 176020 - DNA, 25 bp, Canis familiaris
tgaagctctttgattctgatcccat

SEQ ID NO: 176021 - DNA, 25 bp, Canis familiaris
tgaagtctgcttaatattctcgccc

SEQ ID NO: 176022 - DNA, 25 bp, Canis familiaris
tgaaggaccacaaattcatcgcccg

SEQ ID NO: 176023 - DNA, 25 bp, Canis familiaris
tgaaggagcctagattctctccctg

SEQ ID NO: 176024 - DNA, 25 bp, Canis familiaris
tgaaggcaactatcatcttcctcct

SEQ ID NO: 176025 - DNA, 25 bp, Canis familiaris
tgaagagaacatggccacccacttc

SEQ ID NO: 176026 - DNA, 25 bp, Canis familiaris
tgcaaaggaagcctcacctcattcc

SEQ ID NO: 176027 - DNA, 25 bp, Canis familiaris
tgaagagcgctagttcatcctgagc

SEQ ID NO: 176028 - DNA, 25 bp, Canis familiaris
tgcacagacgccggtgctcaaagca

SEQ ID NO: 176029 - DNA, 25 bp, Canis familiaris
tgcaactggcctggccgcaacagca

SEQ ID NO: 176030 - DNA, 25 bp, Canis familiaris
tgaatacggctacagcaacagggtg

SEQ ID NO: 176031 - DNA, 25 bp, Canis familiaris
tgcagtccggttcggatgtcggggc

SEQ ID NO: 176032 - DNA, 25 bp, Canis familiaris
tgcatggccgttcttagttggtgga

SEQ ID NO: 176033 - DNA, 25 bp, Canis familiaris
tgcagcgccgcgcacaaagttttga

SEQ ID NO: 176034 - DNA, 25 bp, Canis familiaris
tgcagcgcttgcggacagtcgattc

SEQ ID NO: 176035 - DNA, 25 bp, Canis familiaris
tgcgcctgactttagtctaagccca

SEQ ID NO: 176036 - DNA, 25 bp, Canis familiaris
tgcaccgagtgtgggttcaaggcca

SEQ ID NO: 176037 - DNA, 25 bp, Canis familiaris
tgaagcagggatctaaccaggccat

SEQ ID NO: 176038 - DNA, 25 bp, Canis familiaris
tgaagggcgcatatggaacggctct

SEQ ID NO: 176039 - DNA, 25 bp, Canis familiaris
tgaagtcgtcatatgaacccaggtc

SEQ ID NO: 176040 - DNA, 25 bp, Canis familiaris
tgaagttgtgccaaagccaccagtg

SEQ ID NO: 176041 - DNA, 25 bp, Canis familiaris
tgaaggaagcacaggccctgcgtgc

SEQ ID NO: 176042 - DNA, 25 bp, Canis familiaris
tgaaggatagagacaggcgcctccg

SEQ ID NO: 176043 - DNA, 25 bp, Canis familiaris
tgaaggacgagtggtctgcccaagg

SEQ ID NO: 176044 - DNA, 25 bp, Canis familiaris
tgaagtgactgtcctgattgcccga

SEQ ID NO: 176045 - DNA, 25 bp, Canis familiaris
tgaatatgactcttcctgatgccag

SEQ ID NO: 176046 - DNA, 25 bp, Canis familiaris
tgcacactagcctttgatgaccatg

SEQ ID NO: 176047 - DNA, 25 bp, Canis familiaris
tgcaacttgctattcgtggagatga

SEQ ID NO: 176048 - DNA, 25 bp, Canis familiaris
tgcacaaactcttcagccaggaaca

SEQ ID NO: 176049 - DNA, 25 bp, Canis familiaris
tgcaaactgctgaccacgccgaatc

SEQ ID NO: 176050 - DNA, 25 bp, Canis familiaris
tgcaaagcgcaggcaacctcgattc

SEQ ID NO: 176051 - DNA, 25 bp, Canis familiaris
tccgggctacaattcctgatcccgt

SEQ ID NO: 176052 - DNA, 25 bp, Canis familiaris
tttgggtccaactctgacccgtttg

SEQ ID NO: 176053 - DNA, 25 bp, Canis familiaris
tattacctttactctaccaagtttg

SEQ ID NO: 176054 - DNA, 25 bp, Canis familiaris
tcttactttttttctaacaggctct

SEQ ID NO: 176055 - DNA, 25 bp, Canis familiaris
tgctctctttttttaccccagagcc

SEQ ID NO: 176056 - DNA, 25 bp, Canis familiaris
tccttccttttagacctatactgcc

SEQ ID NO: 176057 - DNA, 25 bp, Canis familiaris
tccttccttttagaaaccacagtca

SEQ ID NO: 176058 - DNA, 25 bp, Canis familiaris
tgcactctccttgttggtgaacacc

SEQ ID NO: 176059 - DNA, 25 bp, Canis familiaris
tgcatccccagttttattcagacaa

SEQ ID NO: 176060 - DNA, 25 bp, Canis familiaris
tgcactggtaactttttagagatca

SEQ ID NO: 176061 - DNA, 25 bp, Canis familiaris
tgcactggctaactttgactttctt

SEQ ID NO: 176062 - DNA, 25 bp, Canis familiaris
tgaatggcgatcgtatcgactccct

SEQ ID NO: 176063 - DNA, 25 bp, Canis familiaris
tgaaggggctgttctgcaatcacct

SEQ ID NO: 176064 - DNA, 25 bp, Canis familiaris
tgcacgggacttggcgagtgactct

SEQ ID NO: 176065 - DNA, 25 bp, Canis familiaris
tgcacgaaggcttttggcttcctac

SEQ ID NO: 176066 - DNA, 25 bp, Canis familiaris
tgcaccgaggcttttacgtgcctta

SEQ ID NO: 176067 - DNA, 25 bp, Canis familiaris
tgaagcttggcttttacaggcccaa

SEQ ID NO: 176068 - DNA, 25 bp, Canis familiaris
tgaagcttgactttgtagccccagc

SEQ ID NO: 176069 - DNA, 25 bp, Canis familiaris
tgaaggtgtgctttggcatccagct

SEQ ID NO: 176070 - DNA, 25 bp, Canis familiaris
tgaatccattgctaagccagccaca

SEQ ID NO: 176071 - DNA, 25 bp, Canis familiaris
tgaatctcaggcgcagcgcctcgcg

SEQ ID NO: 176072 - DNA, 25 bp, Canis familiaris
tgaagcacgtggcaggagccgcagc

SEQ ID NO: 176073 - DNA, 25 bp, Canis familiaris
tgaagactggagcgctcagccagcc

SEQ ID NO: 176074 - DNA, 25 bp, Canis familiaris
tgaagactggagcgctcagccagcc

SEQ ID NO: 176075 - DNA, 25 bp, Canis familiaris
tgaagcaggacgcagtcagctcact

SEQ ID NO: 176076 - DNA, 25 bp, Canis familiaris
tgaagaaactgccagtgctgcctac

SEQ ID NO: 176077 - DNA, 25 bp, Canis familiaris
tgaagaagagctcgggctgctgctg

SEQ ID NO: 176078 - DNA, 25 bp, Canis familiaris
tgaagacatgacactgagcctctgc

SEQ ID NO: 176079 - DNA, 25 bp, Canis familiaris
tgaagacagcatgcctttctctggg

SEQ ID NO: 176080 - DNA, 25 bp, Canis familiaris
tgaagtgctcatccgtttcggggtc

SEQ ID NO: 176081 - DNA, 25 bp, Canis familiaris
tgaagtgctttcctttggtggttgg

SEQ ID NO: 176082 - DNA, 25 bp, Canis familiaris
tgaaggcgtcccagggggtgtgcaa

SEQ ID NO: 176083 - DNA, 25 bp, Canis familiaris
tcaaggtttgcctggggctgtggaa

SEQ ID NO: 176084 - DNA, 25 bp, Canis familiaris
tgaaggattacctggtggtggccca

SEQ ID NO: 176085 - DNA, 25 bp, Canis familiaris
tgaagagttaccgcctgtgtgatcc

SEQ ID NO: 176086 - DNA, 25 bp, Canis familiaris
tgaagcagctgttcgagccgtttta

SEQ ID NO: 176087 - DNA, 25 bp, Canis familiaris
tgaatgcatctgatcgagcctgttt

SEQ ID NO: 176088 - DNA, 25 bp, Canis familiaris
tgaatggctgacctgacctgatgtc

SEQ ID NO: 176089 - DNA, 25 bp, Canis familiaris
tgcactggtctcttgatcgattgtc

SEQ ID NO: 176090 - DNA, 25 bp, Canis familiaris
tgaaggctcatctgtcaggcttctg

SEQ ID NO: 176091 - DNA, 25 bp, Canis familiaris
tgaagtccatatagtattgtggctg

SEQ ID NO: 176092 - DNA, 25 bp, Canis familiaris
tgcaagcacacacagatttgtagtg

SEQ ID NO: 176093 - DNA, 25 bp, Canis familiaris
tgaagatgacatcacttactggctg

SEQ ID NO: 176094 - DNA, 25 bp, Canis familiaris
tgaagacatcagccacattacacct

SEQ ID NO: 176095 - DNA, 25 bp, Canis familiaris
tgaaggcatgccccaacaacattca

SEQ ID NO: 176096 - DNA, 25 bp, Canis familiaris
tgaaggcagcactaaaccgctgagc

SEQ ID NO: 176097 - DNA, 25 bp, Canis familiaris
tgaaggcagatgcccaaacgctgag

SEQ ID NO: 176098 - DNA, 25 bp, Canis familiaris
tgaagggacccctacagcagagaac

SEQ ID NO: 176099 - DNA, 25 bp, Canis familiaris
tgcaaaggccctggccaacgtgaac

SEQ ID NO: 176100 - DNA, 25 bp, Canis familiaris
tgcaactgttccgcaaactggggct

SEQ ID NO: 176101 - DNA, 25 bp, Canis familiaris
tgcaattattccccatgaacgagga

SEQ ID NO: 176102 - DNA, 25 bp, Canis familiaris
tgcaattattccccatgaacgagga

SEQ ID NO: 176103 - DNA, 25 bp, Canis familiaris
tgaataatattcccataggtacata

SEQ ID NO: 176104 - DNA, 25 bp, Canis familiaris
tgaataaataccctgctctgtgaat

SEQ ID NO: 176105 - DNA, 25 bp, Canis familiaris
tgcagaacaaccggcgtctgtttga

SEQ ID NO: 176106 - DNA, 25 bp, Canis familiaris
tgcaaaccacacgggccatttaaat

SEQ ID NO: 176107 - DNA, 25 bp, Canis familiaris
tgcaaacccagcgggaagactccac

SEQ ID NO: 176108 - DNA, 25 bp, Canis familiaris
tgaagacccggtacatgaactcgcc

SEQ ID NO: 176109 - DNA, 25 bp, Canis familiaris
tgaagaccccaaagcaagcaacgcc

SEQ ID NO: 176110 - DNA, 25 bp, Canis familiaris
tgaaggccccactcaaggaggctgc

SEQ ID NO: 176111 - DNA, 25 bp, Canis familiaris
tgaattgtcccacgaaaacacggct

SEQ ID NO: 176112 - DNA, 25 bp, Canis familiaris
tgaaggtcaacaccaaagtcacgac

SEQ ID NO: 176113 - DNA, 25 bp, Canis familiaris
tgaagtgttagccctagagccacct

SEQ ID NO: 176114 - DNA, 25 bp, Canis familiaris
tgaatgttgtatccccgactaacca

SEQ ID NO: 176115 - DNA, 25 bp, Canis familiaris
tgaagatagtggcgcctactgaccc

SEQ ID NO: 176116 - DNA, 25 bp, Canis familiaris
tgaagaactcccagctactgagcac

SEQ ID NO: 176117 - DNA, 25 bp, Canis familiaris
tgaagtaccccattgaacatggcat

SEQ ID NO: 176118 - DNA, 25 bp, Canis familiaris
tgaagtacccactgatgatatatat

SEQ ID NO: 176119 - DNA, 25 bp, Canis familiaris
tgaagtatcccctttattttcacaa

SEQ ID NO: 176120 - DNA, 25 bp, Canis familiaris
tgaagttcccaagttcctcttataa

SEQ ID NO: 176121 - DNA, 25 bp, Canis familiaris
tgaagtgtccactcttgactcttga

SEQ ID NO: 176122 - DNA, 25 bp, Canis familiaris
tcatagttcctctgccaagtctgga

SEQ ID NO: 176123 - DNA, 25 bp, Canis familiaris
tgaagagctcctttggaattctgga

SEQ ID NO: 176124 - DNA, 25 bp, Canis familiaris
tgcacacgtccctggatgtggtgga

SEQ ID NO: 176125 - DNA, 25 bp, Canis familiaris
tgctgggttcactttgagtcgtgcg

SEQ ID NO: 176126 - DNA, 25 bp, Canis familiaris
tcgatggcctttttgagtcccgaaa

SEQ ID NO: 176127 - DNA, 25 bp, Canis familiaris
tccgggattcaatggatccgtgaaa

SEQ ID NO: 176128 - DNA, 25 bp, Canis familiaris
tccgggataagaatactggcctgaa

SEQ ID NO: 176129 - DNA, 25 bp, Canis familiaris
tgccgggtaagcttccaggtgaaga

SEQ ID NO: 176130 - DNA, 25 bp, Canis familiaris
tgccgggaaactggtcgcggattgt

SEQ ID NO: 176131 - DNA, 25 bp, Canis familiaris
tgccgggacacagtccctgtagctg

SEQ ID NO: 176132 - DNA, 25 bp, Canis familiaris
tgcttgtaacctttacttactgcca

SEQ ID NO: 176133 - DNA, 25 bp, Canis familiaris
tcatatctagccccaaatttcctgt

SEQ ID NO: 176134 - DNA, 25 bp, Canis familiaris
tgctcattattcccaaggttcttgc

SEQ ID NO: 176135 - DNA, 25 bp, Canis familiaris
tgcgtatacttatagttgtcttgca

SEQ ID NO: 176136 - DNA, 25 bp, Canis familiaris
tgcaaattctagcaagtgtgtcttc

SEQ ID NO: 176137 - DNA, 25 bp, Canis familiaris
tgcaatggctttgaactttcttcct

SEQ ID NO: 176138 - DNA, 25 bp, Canis familiaris
tgaagattctctgaagattccccct

SEQ ID NO: 176139 - DNA, 25 bp, Canis familiaris
tgaagagccttgggagtcacctccc

SEQ ID NO: 176140 - DNA, 25 bp, Canis familiaris
tgcaagaagcctgggagctccttct

SEQ ID NO: 176141 - DNA, 25 bp, Canis familiaris
tgcacagaaccaagcagtcaccttg

SEQ ID NO: 176142 - DNA, 25 bp, Canis familiaris
tgcaaagcaccaacaacacctaaca

SEQ ID NO: 176143 - DNA, 25 bp, Canis familiaris
tgaaggagcactacattgacctgaa

SEQ ID NO: 176144 - DNA, 25 bp, Canis familiaris
tgcagaggagctcggcttacatcca

SEQ ID NO: 176145 - DNA, 25 bp, Canis familiaris
tgcaacaggatgccgttgactgcgc

SEQ ID NO: 176146 - DNA, 25 bp, Canis familiaris
tgcaaacaatctcaagagctgctgc

SEQ ID NO: 176147 - DNA, 25 bp, Canis familiaris
tgaagagctgattccccagtgtcac

SEQ ID NO: 176148 - DNA, 25 bp, Canis familiaris
tgaagagcgcattcccacatatgaa

SEQ ID NO: 176149 - DNA, 25 bp, Canis familiaris
tgaagaccattctcagcaatcagac

SEQ ID NO: 176150 - DNA, 25 bp, Canis familiaris
tgaagagccgatgaggcctcaggcc

SEQ ID NO: 176151 - DNA, 25 bp, Canis familiaris
tgaagagccgtgttgcttctgtggc

SEQ ID NO: 176152 - DNA, 25 bp, Canis familiaris
tgaaggccaatggcttctctgctgg

SEQ ID NO: 176153 - DNA, 25 bp, Canis familiaris
tgaaggtgcagatcattctccggga

SEQ ID NO: 176154 - DNA, 25 bp, Canis familiaris
tgaagtgctcgatgtacttgggcgc

SEQ ID NO: 176155 - DNA, 25 bp, Canis familiaris
tgaagattcgaggttctctggccag

SEQ ID NO: 176156 - DNA, 25 bp, Canis familiaris
tgcatttcttaggctactcgttcct

SEQ ID NO: 176157 - DNA, 25 bp, Canis familiaris
tgcatttcttaggtgttttaatttt

SEQ ID NO: 176158 - DNA, 25 bp, Canis familiaris
tgcatcctctccaggctttgaaatt

SEQ ID NO: 176159 - DNA, 25 bp, Canis familiaris
tgcattcccaaacctttgtctttgc

SEQ ID NO: 176160 - DNA, 25 bp, Canis familiaris
tgcttccgaaggagtttccatatgc

SEQ ID NO: 176161 - DNA, 25 bp, Canis familiaris
tgcttcttgaagaggtaggcgtgac

SEQ ID NO: 176162 - DNA, 25 bp, Canis familiaris
tgctatttcaccaacgggacggagc

SEQ ID NO: 176163 - DNA, 25 bp, Canis familiaris
tctttttccttccggaggtgaagat

SEQ ID NO: 176164 - DNA, 25 bp, Canis familiaris
tcctttcccttcttaaggctgggat

SEQ ID NO: 176165 - DNA, 25 bp, Canis familiaris
tcctttaccctgttagaggggctgg

SEQ ID NO: 176166 - DNA, 25 bp, Canis familiaris
tgcccgaaaccttccaagcaggtgg

SEQ ID NO: 176167 - DNA, 25 bp, Canis familiaris
tcctcgaagcccttacaagttttct

SEQ ID NO: 176168 - DNA, 25 bp, Canis familiaris
tgccgggtcccaataaattttcact

SEQ ID NO: 176169 - DNA, 25 bp, Canis familiaris
tgcaggggtttccagttattttact

SEQ ID NO: 176170 - DNA, 25 bp, Canis familiaris
tgccagggtgtttcttctttttgaa

SEQ ID NO: 176171 - DNA, 25 bp, Canis familiaris
tgcacaggtggagttctagctccgt

SEQ ID NO: 176172 - DNA, 25 bp, Canis familiaris
tgcacagtggcgacttctccactgc

SEQ ID NO: 176173 - DNA, 25 bp, Canis familiaris
tgcacagagctgggtatccgcacag

SEQ ID NO: 176174 - DNA, 25 bp, Canis familiaris
tgcaatggtcgagtaccctggtacc

SEQ ID NO: 176175 - DNA, 25 bp, Canis familiaris
tgcagggtagacattcccttaccct

SEQ ID NO: 176176 - DNA, 25 bp, Canis familiaris
tgcacggtattaattcccttttcac

SEQ ID NO: 176177 - DNA, 25 bp, Canis familiaris
tgcactcgtttgatccaggttttca

SEQ ID NO: 176178 - DNA, 25 bp, Canis familiaris
tgaatcagttccaggtcgtttctca

SEQ ID NO: 176179 - DNA, 25 bp, Canis familiaris
tgcaacagttggacagggaccccca

SEQ ID NO: 176180 - DNA, 25 bp, Canis familiaris
tcgacggggtcagagtgcccggcaa

SEQ ID NO: 176181 - DNA, 25 bp, Canis familiaris
tcgacgtgacgtgccacgtccgtca

SEQ ID NO: 176182 - DNA, 25 bp, Canis familiaris
taattggacggcgcagccaccgtcc

SEQ ID NO: 176183 - DNA, 25 bp, Canis familiaris
taaaagttggagtcatccccgacct

SEQ ID NO: 176184 - DNA, 25 bp, Canis familiaris
tgcacaaagtgaacaggtcccctac

SEQ ID NO: 176185 - DNA, 25 bp, Canis familiaris
tgcacaaagagaagagccccccaat

SEQ ID NO: 176186 - DNA, 25 bp, Canis familiaris
tgcaacaaagggccccagatccacc

SEQ ID NO: 176187 - DNA, 25 bp, Canis familiaris
tgcaacaatcagtgcgcctgcaaca

SEQ ID NO: 176188 - DNA, 25 bp, Canis familiaris
tgaaggatcacaggccctgcagaca

SEQ ID NO: 176189 - DNA, 25 bp, Canis familiaris
tgctgcagtacagggctcttcaaac

SEQ ID NO: 176190 - DNA, 25 bp, Canis familiaris
ttgaaagcatcccagttaaactaga

SEQ ID NO: 176191 - DNA, 25 bp, Canis familiaris
tcgaatccctgccgttagcgactgc

SEQ ID NO: 176192 - DNA, 25 bp, Canis familiaris
tgcacttccctcagtctgagcaagc

SEQ ID NO: 176193 - DNA, 25 bp, Canis familiaris
tgcactcccacctggtggactactt

SEQ ID NO: 176194 - DNA, 25 bp, Canis familiaris
tgcaccactcaagcgagggcagcta

SEQ ID NO: 176195 - DNA, 25 bp, Canis familiaris
tgcacgacagcatgcctagtgagac

SEQ ID NO: 176196 - DNA, 25 bp, Canis familiaris
tgcacaaggcaactcatggtcagga

SEQ ID NO: 176197 - DNA, 25 bp, Canis familiaris
tgcaaagcttatacagtgtctgaag

SEQ ID NO: 176198 - DNA, 25 bp, Canis familiaris
tgcaatttcgaggcgctgactggca

SEQ ID NO: 176199 - DNA, 25 bp, Canis familiaris
tgcagaatagcatcgcgtacatgga

SEQ ID NO: 176200 - DNA, 25 bp, Canis familiaris
tgcagcccagcatcaatgaaagaat

SEQ ID NO: 176201 - DNA, 25 bp, Canis familiaris
tgcacctgaaggaagaatacatgtc

SEQ ID NO: 176202 - DNA, 25 bp, Canis familiaris
tgcacaccaaggcacagtggccact

SEQ ID NO: 176203 - DNA, 25 bp, Canis familiaris
tgcacagcaaaggatacagtcaaca

SEQ ID NO: 176204 - DNA, 25 bp, Canis familiaris
tgcacaccggcctgcagtatagaca

SEQ ID NO: 176205 - DNA, 25 bp, Canis familiaris
tgcagccgagactgagccttgggca

SEQ ID NO: 176206 - DNA, 25 bp, Canis familiaris
tgcagctggaaagagacctcccacc

SEQ ID NO: 176207 - DNA, 25 bp, Canis familiaris
tgcagattgaaaggaccttttcccc

SEQ ID NO: 176208 - DNA, 25 bp, Canis familiaris
tgcagaataagaaacctaccaccgg

SEQ ID NO: 176209 - DNA, 25 bp, Canis familiaris
tgaataaagtcattctctcgcctcc

SEQ ID NO: 176210 - DNA, 25 bp, Canis familiaris
tgaatcaaactcatctcatcaccct

SEQ ID NO: 176211 - DNA, 25 bp, Canis familiaris
tgaataatgactctttcactccccg

SEQ ID NO: 176212 - DNA, 25 bp, Canis familiaris
tgcaaaaacggtttattatcccagg

SEQ ID NO: 176213 - DNA, 25 bp, Canis familiaris
tgcacagaaaccctatttgctaccc

SEQ ID NO: 176214 - DNA, 25 bp, Canis familiaris
tgcaaaacatcacgattttcccgct

SEQ ID NO: 176215 - DNA, 25 bp, Canis familiaris
tgaatactcactcttgtaagccagt

SEQ ID NO: 176216 - DNA, 25 bp, Canis familiaris
tgaatagctccctttggtgatctca

SEQ ID NO: 176217 - DNA, 25 bp, Canis familiaris
tgcaaatggccctttgtcagtctgc

SEQ ID NO: 176218 - DNA, 25 bp, Canis familiaris
tgaatgttggcgttttgctgcttgg

SEQ ID NO: 176219 - DNA, 25 bp, Canis familiaris
tgaaggctgtcgcagttgctgttgc

SEQ ID NO: 176220 - DNA, 25 bp, Canis familiaris
tgaaggagtgcgtgcctgctatgag

SEQ ID NO: 176221 - DNA, 25 bp, Canis familiaris
tgaaggcctggaagccctgtgggga

SEQ ID NO: 176222 - DNA, 25 bp, Canis familiaris
tgaaggccgtgacggagcagggcgc

SEQ ID NO: 176223 - DNA, 25 bp, Canis familiaris
tgaaggccaggactgagcaccaggc

SEQ ID NO: 176224 - DNA, 25 bp, Canis familiaris
tgaatggatcggctatgccctggct

SEQ ID NO: 176225 - DNA, 25 bp, Canis familiaris
tgaaggatgggctttctcttgtcca

SEQ ID NO: 176226 - DNA, 25 bp, Canis familiaris
tgaagtctgggcttatgcctgtgcc

SEQ ID NO: 176227 - DNA, 25 bp, Canis familiaris
tgcaagtttccattggccttctaac

SEQ ID NO: 176228 - DNA, 25 bp, Canis familiaris
tgcacgtggtcctggacgacgaacc

SEQ ID NO: 176229 - DNA, 25 bp, Canis familiaris
tgcacgtgtcccgggtcgaccagca

SEQ ID NO: 176230 - DNA, 25 bp, Canis familiaris
tgcatggtcccctgtgtaacaagca

SEQ ID NO: 176231 - DNA, 25 bp, Canis familiaris
tgcagttctccctggagcaacgacc

SEQ ID NO: 176232 - DNA, 25 bp, Canis familiaris
tgaatctctccatgtctagaaaaca

SEQ ID NO: 176233 - DNA, 25 bp, Canis familiaris
tgaatctgtgtgtgtgcatatgaat

SEQ ID NO: 176234 - DNA, 25 bp, Canis familiaris
tgaatgctcctcttctgaacatgat

SEQ ID NO: 176235 - DNA, 25 bp, Canis familiaris
tgaatggcctgctatgtgcctcaag

SEQ ID NO: 176236 - DNA, 25 bp, Canis familiaris
tgaatacctggcagctcctagggat

SEQ ID NO: 176237 - DNA, 25 bp, Canis familiaris
tgcagaccctgagactggctttgga

SEQ ID NO: 176238 - DNA, 25 bp, Canis familiaris
tgcagtccttacccgtgtttaagta

SEQ ID NO: 176239 - DNA, 25 bp, Canis familiaris
tgcaccctttttctccttaagagaa

SEQ ID NO: 176240 - DNA, 25 bp, Canis familiaris
tgcacctatttatatttttgaaaac

SEQ ID NO: 176241 - DNA, 25 bp, Canis familiaris
tgcagcctttaatctctttcatata

SEQ ID NO: 176242 - DNA, 25 bp, Canis familiaris
tgcacctttatttgtttgctgaaaa

SEQ ID NO: 176243 - DNA, 25 bp, Canis familiaris
tgcaagctgttacactttggccaca

SEQ ID NO: 176244 - DNA, 25 bp, Canis familiaris
tgaaggcacaacttgtcttggccca

SEQ ID NO: 176245 - DNA, 25 bp, Canis familiaris
tgaaggccatactcattttgtccct

SEQ ID NO: 176246 - DNA, 25 bp, Canis familiaris
tgaaggcgacaatcctctatggctc

SEQ ID NO: 176247 - DNA, 25 bp, Canis familiaris
tgaagtgcatgtattcctttgaatc

SEQ ID NO: 176248 - DNA, 25 bp, Canis familiaris
tgaagtcttataatcactcctgcaa

SEQ ID NO: 176249 - DNA, 25 bp, Canis familiaris
tgaaggcacttatcgctctcatgca

SEQ ID NO: 176250 - DNA, 25 bp, Canis familiaris
tgaaggcacagcctgtggtcactcc

SEQ ID NO: 176251 - DNA, 25 bp, Canis familiaris
tgaatcccacggcgtaacatctcat

SEQ ID NO: 176252 - DNA, 25 bp, Canis familiaris
tgaatcccgcagaggtggtgcagcc

SEQ ID NO: 176253 - DNA, 25 bp, Canis familiaris
tgaatctaccgatcttgtctcgacc

SEQ ID NO: 176254 - DNA, 25 bp, Canis familiaris
tgaatctgaccgtttggtgccacag

SEQ ID NO: 176255 - DNA, 25 bp, Canis familiaris
tgaagtgagcacaactcggggcagc

SEQ ID NO: 176256 - DNA, 25 bp, Canis familiaris
tgaagtggactttctgcagggcgac

SEQ ID NO: 176257 - DNA, 25 bp, Canis familiaris
tgcaaggcagacacctcgatgggac

SEQ ID NO: 176258 - DNA, 25 bp, Canis familiaris
tgcactgggagaagcccgtggggcg

SEQ ID NO: 176259 - DNA, 25 bp, Canis familiaris
tgcaatgggagctgaccgtgggtcg

SEQ ID NO: 176260 - DNA, 25 bp, Canis familiaris
tgcaagccagggtacaccggcgatc

SEQ ID NO: 176261 - DNA, 25 bp, Canis familiaris
tgcactcctggactaccgtgaggac

SEQ ID NO: 176262 - DNA, 25 bp, Canis familiaris
tgcaaggcacaagacacctacggct

SEQ ID NO: 176263 - DNA, 25 bp, Canis familiaris
tgcagcagagctaaggaatccttca

SEQ ID NO: 176264 - DNA, 25 bp, Canis familiaris
tgcaaggccagacgacagcactaac

SEQ ID NO: 176265 - DNA, 25 bp, Canis familiaris
tgcacgccgagactgaacaactaca

SEQ ID NO: 176266 - DNA, 25 bp, Canis familiaris
tgcactgcctggttgataccgtgcc

SEQ ID NO: 176267 - DNA, 25 bp, Canis familiaris
tgcaagctggtggctggaccaatgt

SEQ ID NO: 176268 - DNA, 25 bp, Canis familiaris
tgcagcctcctgggaacccagtgta

SEQ ID NO: 176269 - DNA, 25 bp, Canis familiaris
tgcagccaccggtaacacagcaatg

SEQ ID NO: 176270 - DNA, 25 bp, Canis familiaris
tgcactcatcctgaatccactgcaa

SEQ ID NO: 176271 - DNA, 25 bp, Canis familiaris
tgcaggcatcgtgtcattcctgtgc

SEQ ID NO: 176272 - DNA, 25 bp, Canis familiaris
tgcaatcacgtcctagacactctga

SEQ ID NO: 176273 - DNA, 25 bp, Canis familiaris
tgcacatccatacccatgatacatc

SEQ ID NO: 176274 - DNA, 25 bp, Canis familiaris
tgcacacaaagcccatgacatcttt

SEQ ID NO: 176275 - DNA, 25 bp, Canis familiaris
tgcagcacgtcgcttatattgggat

SEQ ID NO: 176276 - DNA, 25 bp, Canis familiaris
tgcagaacctgcttttcttgggcac

SEQ ID NO: 176277 - DNA, 25 bp, Canis familiaris
tgaatacgagttccctctgtcagac

SEQ ID NO: 176278 - DNA, 25 bp, Canis familiaris
tgaatgaagctgctgctcctttttc

SEQ ID NO: 176279 - DNA, 25 bp, Canis familiaris
tgaatgcaactgacctctgcttact

SEQ ID NO: 176280 - DNA, 25 bp, Canis familiaris
tgaatcattctcactgcacttaatc

SEQ ID NO: 176281 - DNA, 25 bp, Canis familiaris
tgcaatcctctagtgtccatgtaca

SEQ ID NO: 176282 - DNA, 25 bp, Canis familiaris
tgcaagacttgttgccaatatgatc

SEQ ID NO: 176283 - DNA, 25 bp, Canis familiaris
tgaatgtcgttcttaccatggctgt

SEQ ID NO: 176284 - DNA, 25 bp, Canis familiaris
tgcacttgaggggttcttgagctgt

SEQ ID NO: 176285 - DNA, 25 bp, Canis familiaris
tgcacatgggtgtggttctcgctgt

SEQ ID NO: 176286 - DNA, 25 bp, Canis familiaris
tgaatggctgctttgagtcttctct

SEQ ID NO: 176287 - DNA, 25 bp, Canis familiaris
tgaatcctgttttgtttcctgacgt

SEQ ID NO: 176288 - DNA, 25 bp, Canis familiaris
tgaatttgttattgttttctacttt

SEQ ID NO: 176289 - DNA, 25 bp, Canis familiaris
tgcaaaagttcttctttctcttcct

SEQ ID NO: 176290 - DNA, 25 bp, Canis familiaris
tgaataaggttcttttctccctctg

SEQ ID NO: 176291 - DNA, 25 bp, Canis familiaris
tgaataacctacttgttctctcgac

SEQ ID NO: 176292 - DNA, 25 bp, Canis familiaris
tgaattccctcatgagctaccgggc

SEQ ID NO: 176293 - DNA, 25 bp, Canis familiaris
tgaattccctcccagaattgcggga

SEQ ID NO: 176294 - DNA, 25 bp, Canis familiaris
tgcagcattcacgcccaaataagga

SEQ ID NO: 176295 - DNA, 25 bp, Canis familiaris
tgcactccaccatccagtaatagag

SEQ ID NO: 176296 - DNA, 25 bp, Canis familiaris
tgcacccccaaccctaggaggggat

SEQ ID NO: 176297 - DNA, 25 bp, Canis familiaris
tgcataaagccaccggggggggcca

SEQ ID NO: 176298 - DNA, 25 bp, Canis familiaris
tgctcaaagcactatgggggggtta

SEQ ID NO: 176299 - DNA, 25 bp, Canis familiaris
tgcacataacagttgggggttttgt

SEQ ID NO: 176300 - DNA, 25 bp, Canis familiaris
tgcactaaacctgtgactttttttt

SEQ ID NO: 176301 - DNA, 25 bp, Canis familiaris
tgaataatatccatcttttttttcc

SEQ ID NO: 176302 - DNA, 25 bp, Canis familiaris
tgaatggataccatcactcttttct

SEQ ID NO: 176303 - DNA, 25 bp, Canis familiaris
tgaaggctcccttcagtgaatggtc

SEQ ID NO: 176304 - DNA, 25 bp, Canis familiaris
tgaaggcatctcgttcaggggcctc

SEQ ID NO: 176305 - DNA, 25 bp, Canis familiaris
tgaaggccctggcaaaggcctcgtc

SEQ ID NO: 176306 - DNA, 25 bp, Canis familiaris
tgaaggccgccggagcaagtgcagt

SEQ ID NO: 176307 - DNA, 25 bp, Canis familiaris
tgaaggtggcccgggagatgcacag

SEQ ID NO: 176308 - DNA, 25 bp, Canis familiaris
tgcagaggggtccggggtgagggaa

SEQ ID NO: 176309 - DNA, 25 bp, Canis familiaris
tgcagagggtggccgggtggaggca

SEQ ID NO: 176310 - DNA, 25 bp, Canis familiaris
tgcaggccgaggtggacgaggtcat

SEQ ID NO: 176311 - DNA, 25 bp, Canis familiaris
tgcagccatcgagaggggcggtgcc

SEQ ID NO: 176312 - DNA, 25 bp, Canis familiaris
tgcagcgttgcgtgggcatgctggg

SEQ ID NO: 176313 - DNA, 25 bp, Canis familiaris
tgcaccctggacacctgggagttga

SEQ ID NO: 176314 - DNA, 25 bp, Canis familiaris
tgcaccgtgtccacaggaggttgga

SEQ ID NO: 176315 - DNA, 25 bp, Canis familiaris
tcaccggcacttagaggaaatttga

SEQ ID NO: 176316 - DNA, 25 bp, Canis familiaris
tgcaccccctgctgcaggaaatcta

SEQ ID NO: 176317 - DNA, 25 bp, Canis familiaris
tgcagcccaccaattggagaatact

SEQ ID NO: 176318 - DNA, 25 bp, Canis familiaris
tgcagacgcccttcgggattagaaa

SEQ ID NO: 176319 - DNA, 25 bp, Canis familiaris
tgcagcacgctcgatatggaccagt

SEQ ID NO: 176320 - DNA, 25 bp, Canis familiaris
tgcaacgtcatcctggtcaagctta

SEQ ID NO: 176321 - DNA, 25 bp, Canis familiaris
tgctcaaattgcgggtcaacataat

SEQ ID NO: 176322 - DNA, 25 bp, Canis familiaris
tgccacctacgtttccacataggat

SEQ ID NO: 176323 - DNA, 25 bp, Canis familiaris
tgcaaccttcgttacctgatttcaa

SEQ ID NO: 176324 - DNA, 25 bp, Canis familiaris
tgcaatcctctcttgtattttttct

SEQ ID NO: 176325 - DNA, 25 bp, Canis familiaris
tgcacatctattgagtttttttcta

SEQ ID NO: 176326 - DNA, 25 bp, Canis familiaris
tgaatttttatgagtgtctttccac

SEQ ID NO: 176327 - DNA, 25 bp, Canis familiaris
tgcactttgtacttaagtccttcca

SEQ ID NO: 176328 - DNA, 25 bp, Canis familiaris
tgcagctattttggtacctcgttcc

SEQ ID NO: 176329 - DNA, 25 bp, Canis familiaris
tgcagtatttggtgacctcagtccc

SEQ ID NO: 176330 - DNA, 25 bp, Canis familiaris
tgcagtttagtaaaatcctcccact

SEQ ID NO: 176331 - DNA, 25 bp, Canis familiaris
tgcagtttaagataattgcgctaca

SEQ ID NO: 176332 - DNA, 25 bp, Canis familiaris
tgaatgttaagatgtctctcggaca

SEQ ID NO: 176333 - DNA, 25 bp, Canis familiaris
tgaatgttaagatggctctcgacat

SEQ ID NO: 176334 - DNA, 25 bp, Canis familiaris
tgaatttagatctctgcttcgcatc

SEQ ID NO: 176335 - DNA, 25 bp, Canis familiaris
tgaatttatcagtgtgcctgtcccc

SEQ ID NO: 176336 - DNA, 25 bp, Canis familiaris
tgaatgggtcaagtggacttccacc

SEQ ID NO: 176337 - DNA, 25 bp, Canis familiaris
tgaatggcagcttctgtaaccccac

SEQ ID NO: 176338 - DNA, 25 bp, Canis familiaris
tgaatctccacgatagatgcctccc

SEQ ID NO: 176339 - DNA, 25 bp, Canis familiaris
tgaattcccttttgtgccagatggc

SEQ ID NO: 176340 - DNA, 25 bp, Canis familiaris
tgcaactcccaaatcgtcatcaggg

SEQ ID NO: 176341 - DNA, 25 bp, Canis familiaris
tgcaaatcccaacatctgctgcact

SEQ ID NO: 176342 - DNA, 25 bp, Canis familiaris
tgcacagccccacagatgttactga

SEQ ID NO: 176343 - DNA, 25 bp, Canis familiaris
tgcagtcgctccttaagtacctgga

SEQ ID NO: 176344 - DNA, 25 bp, Canis familiaris
tgctgtcttcaactagaaaacttaa

SEQ ID NO: 176345 - DNA, 25 bp, Canis familiaris
tgctggcttaatccactactaattg

SEQ ID NO: 176346 - DNA, 25 bp, Canis familiaris
tgcagtttgcactcgtacttacgag

SEQ ID NO: 176347 - DNA, 25 bp, Canis familiaris
tgcatttatcatgtctttccatccg

SEQ ID NO: 176348 - DNA, 25 bp, Canis familiaris
tgaatgatgtctgcctttccagtca

SEQ ID NO: 176349 - DNA, 25 bp, Canis familiaris
tgaatgagcacttcctgtacacctc

SEQ ID NO: 176350 - DNA, 25 bp, Canis familiaris
tgaatacacaagccacagatctccc

SEQ ID NO: 176351 - DNA, 25 bp, Canis familiaris
tgcaaagccacaccagtgatccttc

SEQ ID NO: 176352 - DNA, 25 bp, Canis familiaris
tgcaaccgcagcactaatgcctgtt

SEQ ID NO: 176353 - DNA, 25 bp, Canis familiaris
tgcacacctggcagagaaatcttgt

SEQ ID NO: 176354 - DNA, 25 bp, Canis familiaris
tgcacacctgtggagcacaaccgtt

SEQ ID NO: 176355 - DNA, 25 bp, Canis familiaris
tgcacactctgtctccaaaagtaaa

SEQ ID NO: 176356 - DNA, 25 bp, Canis familiaris
tgcaccctgccttgccaaaaaaaaa

SEQ ID NO: 176357 - DNA, 25 bp, Canis familiaris
tgcagcccttcatctctaaaaaaaa

SEQ ID NO: 176358 - DNA, 25 bp, Canis familiaris
tgcactcgcttgtcaccaaagaaga

SEQ ID NO: 176359 - DNA, 25 bp, Canis familiaris
tgcaccgctagggcgcagaaagagt

SEQ ID NO: 176360 - DNA, 25 bp, Canis familiaris
tgcagtcctatcagggagaagatgt

SEQ ID NO: 176361 - DNA, 25 bp, Canis familiaris
tgcatgtcctgccagggggacacta

SEQ ID NO: 176362 - DNA, 25 bp, Canis familiaris
tgcagctagctctgacgtgtgacct

SEQ ID NO: 176363 - DNA, 25 bp, Canis familiaris
tgcaaccctggacatgtgtcctcca

SEQ ID NO: 176364 - DNA, 25 bp, Canis familiaris
tgcagtacctgtcccaggttctcaa

SEQ ID NO: 176365 - DNA, 25 bp, Canis familiaris
tgctggacttttcaggactactcaa

SEQ ID NO: 176366 - DNA, 25 bp, Canis familiaris
tgcttaattttcaagatgacccaca

SEQ ID NO: 176367 - DNA, 25 bp, Canis familiaris
tgcttactcttgtgaaatgccccag

SEQ ID NO: 176368 - DNA, 25 bp, Canis familiaris
tgcttttttatagaacccgaactct

SEQ ID NO: 176369 - DNA, 25 bp, Canis familiaris
tgcaagttttaagctaccagtccct

SEQ ID NO: 176370 - DNA, 25 bp, Canis familiaris
tgcaattttgtaacctactcttttc

SEQ ID NO: 176371 - DNA, 25 bp, Canis familiaris
tgaatctttgttgtcttgttcttta

SEQ ID NO: 176372 - DNA, 25 bp, Canis familiaris
tgaattgtgtttgtttgtgtcccgg

SEQ ID NO: 176373 - DNA, 25 bp, Canis familiaris
tgcaatggtgggatcttttgtccca

SEQ ID NO: 176374 - DNA, 25 bp, Canis familiaris
tgaattgtgggctcttggtcatctc

SEQ ID NO: 176375 - DNA, 25 bp, Canis familiaris
tgaatcttaggcgtcttatctcctc

SEQ ID NO: 176376 - DNA, 25 bp, Canis familiaris
tgaattctatgaacccaatgccctc

SEQ ID NO: 176377 - DNA, 25 bp, Canis familiaris
tgaatgtcaagaccacctctgcttc

SEQ ID NO: 176378 - DNA, 25 bp, Canis familiaris
tgaattcaggacgccatgctatgac

SEQ ID NO: 176379 - DNA, 25 bp, Canis familiaris
tccattcaggaccagccagattcca

SEQ ID NO: 176380 - DNA, 25 bp, Canis familiaris
tcgttgaggcagccgcagcaaggta

SEQ ID NO: 176381 - DNA, 25 bp, Canis familiaris
taactgacggtgcaaaggtaaactt

SEQ ID NO: 176382 - DNA, 25 bp, Canis familiaris
tctcctgacggtctggggacatacc

SEQ ID NO: 176383 - DNA, 25 bp, Canis familiaris
tctgaaaacgctctccgtgactcaa

SEQ ID NO: 176384 - DNA, 25 bp, Canis familiaris
tgctgaacaagtgcctgcaggtccc

SEQ ID NO: 176385 - DNA, 25 bp, Canis familiaris
tgcgaccagggacctaggtatttcc

SEQ ID NO: 176386 - DNA, 25 bp, Canis familiaris
tgcacacccgggtctagtgtttttt

SEQ ID NO: 176387 - DNA, 25 bp, Canis familiaris
tgcacacacacggagtccgcgtttc

SEQ ID NO: 176388 - DNA, 25 bp, Canis familiaris
tgcagacaccaggtctccaggtgtg

SEQ ID NO: 176389 - DNA, 25 bp, Canis familiaris
tgcacagctcctgtcctcaggagat

SEQ ID NO: 176390 - DNA, 25 bp, Canis familiaris
tgaatctgcctggtcagtctgggtc

SEQ ID NO: 176391 - DNA, 25 bp, Canis familiaris
tgcaactccagggctgatctcaggt

SEQ ID NO: 176392 - DNA, 25 bp, Canis familiaris
tgcaactggctaggtgcctgcgact

SEQ ID NO: 176393 - DNA, 25 bp, Canis familiaris
tgaatctgagcaaccagtctcccat

SEQ ID NO: 176394 - DNA, 25 bp, Canis familiaris
tgaatgtggctgccaagctgaccca

SEQ ID NO: 176395 - DNA, 25 bp, Canis familiaris
tgaatgatgggccgtgtgcccctca

SEQ ID NO: 176396 - DNA, 25 bp, Canis familiaris
tgaatggagtccactggccatgcta

SEQ ID NO: 176397 - DNA, 25 bp, Canis familiaris
tgcaggaagtccatcctggctcttg

SEQ ID NO: 176398 - DNA, 25 bp, Canis familiaris
tgcgtacagtgcactgcctggttga

SEQ ID NO: 176399 - DNA, 25 bp, Canis familiaris
tgcactatttgcacgccatattcta

SEQ ID NO: 176400 - DNA, 25 bp, Canis familiaris
tgcacaaactggccactgatataaa

SEQ ID NO: 176401 - DNA, 25 bp, Canis familiaris
tgcagcgcaagcgccactataccag

SEQ ID NO: 176402 - DNA, 25 bp, Canis familiaris
tgcagcacaacccaggctaactagc

SEQ ID NO: 176403 - DNA, 25 bp, Canis familiaris
tgcagacaacctcttactttctttt

SEQ ID NO: 176404 - DNA, 25 bp, Canis familiaris
tgcggaacctgctgttttatctatt

SEQ ID NO: 176405 - DNA, 25 bp, Canis familiaris
tgcaggagcccgtgtttgagtttgt

SEQ ID NO: 176406 - DNA, 25 bp, Canis familiaris
tgcttggccctgtgtatgggtcact

SEQ ID NO: 176407 - DNA, 25 bp, Canis familiaris
tgcagtggccacaggttggtgtcgt

SEQ ID NO: 176408 - DNA, 25 bp, Canis familiaris
tgcaggcagcacatcggactagtta

SEQ ID NO: 176409 - DNA, 25 bp, Canis familiaris
tgcgtccaggtcagaccacctgacc

SEQ ID NO: 176410 - DNA, 25 bp, Canis familiaris
tgcagaaataggaggcgccctgacc

SEQ ID NO: 176411 - DNA, 25 bp, Canis familiaris
tgcagacaaggctggtgctcctgga

SEQ ID NO: 176412 - DNA, 25 bp, Canis familiaris
tgcacacacaggagcggcacgtgga

SEQ ID NO: 176413 - DNA, 25 bp, Canis familiaris
tgcaaccaaccgggagcttggcacc

SEQ ID NO: 176414 - DNA, 25 bp, Canis familiaris
tgcaaccaaccgggagcttggcacc

SEQ ID NO: 176415 - DNA, 25 bp, Canis familiaris
tgcaaccaaccgggagcttggcacc

SEQ ID NO: 176416 - DNA, 25 bp, Canis familiaris
tgcaacaaaggccctggcttgaccc

SEQ ID NO: 176417 - DNA, 25 bp, Canis familiaris
tgcaacacagggccgtgctggagac

SEQ ID NO: 176418 - DNA, 25 bp, Canis familiaris
tgaatcctgagctctgtggtgacac

SEQ ID NO: 176419 - DNA, 25 bp, Canis familiaris
tgctacctggaagctgactgacagc

SEQ ID NO: 176420 - DNA, 25 bp, Canis familiaris
tgcaactggcaaacctgccgacgcc

SEQ ID NO: 176421 - DNA, 25 bp, Canis familiaris
tgcaactggagcacgctgggcgtgt

SEQ ID NO: 176422 - DNA, 25 bp, Canis familiaris
tgaatgtttgcttcgttggcaggaa

SEQ ID NO: 176423 - DNA, 25 bp, Canis familiaris
tgcaggctttgactccttgacagcc

SEQ ID NO: 176424 - DNA, 25 bp, Canis familiaris
tgcagtttgatgaaccagaggccac

SEQ ID NO: 176425 - DNA, 25 bp, Canis familiaris
tgcactgttgagtcacccaggtgcc

SEQ ID NO: 176426 - DNA, 25 bp, Canis familiaris
tgcacagtatgagtccaaggaagcc

SEQ ID NO: 176427 - DNA, 25 bp, Canis familiaris
tgcacgtatccttaaaaagcctcta

SEQ ID NO: 176428 - DNA, 25 bp, Canis familiaris
tgcacttaacatatcagaataccat

SEQ ID NO: 176429 - DNA, 25 bp, Canis familiaris
tgcactttaattgcagcactaaatt

SEQ ID NO: 176430 - DNA, 25 bp, Canis familiaris
tgcatcaataaacgtggcctcataa

SEQ ID NO: 176431 - DNA, 25 bp, Canis familiaris
tgcacaaaaaccttccactgcacac

SEQ ID NO: 176432 - DNA, 25 bp, Canis familiaris
tgctgacaataacacaaaggccaat

SEQ ID NO: 176433 - DNA, 25 bp, Canis familiaris
tgcgacttcaacagcaactcccact

SEQ ID NO: 176434 - DNA, 25 bp, Canis familiaris
tgcgacttcaacagcaactcccact

SEQ ID NO: 176435 - DNA, 25 bp, Canis familiaris
tgcagaatgtgctcaacaaccagca

SEQ ID NO: 176436 - DNA, 25 bp, Canis familiaris
tgcatgtggcgtccaatttccagca

SEQ ID NO: 176437 - DNA, 25 bp, Canis familiaris
tgctgctgtgcacacttttctagaa

SEQ ID NO: 176438 - DNA, 25 bp, Canis familiaris
tgcacatgtgcggctctttgtatag

SEQ ID NO: 176439 - DNA, 25 bp, Canis familiaris
tgcactattgcacgccatattctat

SEQ ID NO: 176440 - DNA, 25 bp, Canis familiaris
tgcactattgcacgccatattctat

SEQ ID NO: 176441 - DNA, 25 bp, Canis familiaris
tgcactattgcacgccatattctat

SEQ ID NO: 176442 - DNA, 25 bp, Canis familiaris
tgcactgatcgctgccaatgcactc

SEQ ID NO: 176443 - DNA, 25 bp, Canis familiaris
tgcactgatcgctgccaatgcactc

SEQ ID NO: 176444 - DNA, 25 bp, Canis familiaris
tgcagagtgctgaagcctgatgccc

SEQ ID NO: 176445 - DNA, 25 bp, Canis familiaris
tgcaagtgtgcatgcacgcacacac

SEQ ID NO: 176446 - DNA, 25 bp, Canis familiaris
tgcaagcttatcgagctgcacttcc

SEQ ID NO: 176447 - DNA, 25 bp, Canis familiaris
tgcagatgttcactacagcggctga

SEQ ID NO: 176448 - DNA, 25 bp, Canis familiaris
tgcaagtatcaccagagaggctatg

SEQ ID NO: 176449 - DNA, 25 bp, Canis familiaris
tgcaagctgtacctgagcgaggagg

SEQ ID NO: 176450 - DNA, 25 bp, Canis familiaris
tgcaagttcatcgagacgtcggccg

SEQ ID NO: 176451 - DNA, 25 bp, Canis familiaris
tgcaaatgaatccagacgtcctctt

SEQ ID NO: 176452 - DNA, 25 bp, Canis familiaris
tgcaacagaaatcccttcttctctt

SEQ ID NO: 176453 - DNA, 25 bp, Canis familiaris
tgcacactaacctgtatgctctttt

SEQ ID NO: 176454 - DNA, 25 bp, Canis familiaris
tgcaccaaaaccctaccttatatgg

SEQ ID NO: 176455 - DNA, 25 bp, Canis familiaris
tgcacgagacaacacccgttaatgg

SEQ ID NO: 176456 - DNA, 25 bp, Canis familiaris
tgcactggaagaaggcccgctatca

SEQ ID NO: 176457 - DNA, 25 bp, Canis familiaris
tgcaatgtgaaaagcaaccccacgt

SEQ ID NO: 176458 - DNA, 25 bp, Canis familiaris
tgcacaggtaatacaacacgccgga

SEQ ID NO: 176459 - DNA, 25 bp, Canis familiaris
tgcaagagaaaaacccgcacagcct

SEQ ID NO: 176460 - DNA, 25 bp, Canis familiaris
tgcagggatcgttacccgaactgca

SEQ ID NO: 176461 - DNA, 25 bp, Canis familiaris
tgcaggaggttttccctgactcaca

SEQ ID NO: 176462 - DNA, 25 bp, Canis familiaris
tgcagggcgactgctccaaagcgaa

SEQ ID NO: 176463 - DNA, 25 bp, Canis familiaris
tgcaggctggaagagctgagaagca

SEQ ID NO: 176464 - DNA, 25 bp, Canis familiaris
tgcaccggcagaaagcagatgaagc

SEQ ID NO: 176465 - DNA, 25 bp, Canis familiaris
tgcactgggcagatctagaccgcgt

SEQ ID NO: 176466 - DNA, 25 bp, Canis familiaris
tgcacagctctacatgattgaccca

SEQ ID NO: 176467 - DNA, 25 bp, Canis familiaris
tgcacaactcatcacatgcttccaa

SEQ ID NO: 176468 - DNA, 25 bp, Canis familiaris
tgcacataatgcacattttccaatg

SEQ ID NO: 176469 - DNA, 25 bp, Canis familiaris
tgcacatacatacattgacccacag

SEQ ID NO: 176470 - DNA, 25 bp, Canis familiaris
tgcactaactcgtctgactatccgc

SEQ ID NO: 176471 - DNA, 25 bp, Canis familiaris
tgcacaaacttttggcttcagtccc

SEQ ID NO: 176472 - DNA, 25 bp, Canis familiaris
tgctcggaatttttttcaacgtcca

SEQ ID NO: 176473 - DNA, 25 bp, Canis familiaris
tgctcggaatattttgttcaacgtc

SEQ ID NO: 176474 - DNA, 25 bp, Canis familiaris
tgctaaagcaattcttttcccgttt

SEQ ID NO: 176475 - DNA, 25 bp, Canis familiaris
tgcatttgaacttctttttcctgtt

SEQ ID NO: 176476 - DNA, 25 bp, Canis familiaris
tgaattagctctttttttccctcat

SEQ ID NO: 176477 - DNA, 25 bp, Canis familiaris
tgcggtttgtgggttttccactcac

SEQ ID NO: 176478 - DNA, 25 bp, Canis familiaris
tcggtcatcgggattccattcaccc

SEQ ID NO: 176479 - DNA, 25 bp, Canis familiaris
ttggacttcgaagcacgttgcacgt

SEQ ID NO: 176480 - DNA, 25 bp, Canis familiaris
tgcgtgacttcgaaggcacgttcca

SEQ ID NO: 176481 - DNA, 25 bp, Canis familiaris
tgcctggttctagagactggtccac

SEQ ID NO: 176482 - DNA, 25 bp, Canis familiaris
tgctttggtctaagtacatggttcc

SEQ ID NO: 176483 - DNA, 25 bp, Canis familiaris
tgcggtgtgtgtgagtacgggccaa

SEQ ID NO: 176484 - DNA, 25 bp, Canis familiaris
tgctgagtttggtgatccgggctcc

SEQ ID NO: 176485 - DNA, 25 bp, Canis familiaris
tgaattcctgaatgacatccgagcc

SEQ ID NO: 176486 - DNA, 25 bp, Canis familiaris
tgcagaccctgaaagacgcgtgtcc

SEQ ID NO: 176487 - DNA, 25 bp, Canis familiaris
tgcaggccagcagaaatcggtgacc

SEQ ID NO: 176488 - DNA, 25 bp, Canis familiaris
tgcacgcggttattatcaggccaga

SEQ ID NO: 176489 - DNA, 25 bp, Canis familiaris
tgcagaggactattgtcatccgccg

SEQ ID NO: 176490 - DNA, 25 bp, Canis familiaris
tgcagaggactattgtcatccgccg

SEQ ID NO: 176491 - DNA, 25 bp, Canis familiaris
tgcaagaggatgcatgcctccctgg

SEQ ID NO: 176492 - DNA, 25 bp, Canis familiaris
tgcaggggcatggactatcccaggc

SEQ ID NO: 176493 - DNA, 25 bp, Canis familiaris
tgcagaaggcagaactgggctcccc

SEQ ID NO: 176494 - DNA, 25 bp, Canis familiaris
tgctgaaggctccactggacgagat

SEQ ID NO: 176495 - DNA, 25 bp, Canis familiaris
tgcatagacttccagtgaaccctgc

SEQ ID NO: 176496 - DNA, 25 bp, Canis familiaris
tgcaagccattggaatacccatccc

SEQ ID NO: 176497 - DNA, 25 bp, Canis familiaris
tgcacaccacatgtgagaccacacc

SEQ ID NO: 176498 - DNA, 25 bp, Canis familiaris
tgcaccttgcagagatggacacacc

SEQ ID NO: 176499 - DNA, 25 bp, Canis familiaris
tgcaacattggtccaggtgctgccc

SEQ ID NO: 176500 - DNA, 25 bp, Canis familiaris
tgcaatctgctgcaactggtgtgct

SEQ ID NO: 176501 - DNA, 25 bp, Canis familiaris
tgcttcctggatctatgggcttgag

SEQ ID NO: 176502 - DNA, 25 bp, Canis familiaris
tgctttttgttttgggtccaactct

SEQ ID NO: 176503 - DNA, 25 bp, Canis familiaris
tgcttttggttgtggtctccaggtc

SEQ ID NO: 176504 - DNA, 25 bp, Canis familiaris
tgcttttgttttaaggtctgggagg

SEQ ID NO: 176505 - DNA, 25 bp, Canis familiaris
tgctttttgaattaacgttctcgga

SEQ ID NO: 176506 - DNA, 25 bp, Canis familiaris
tgcttcactcgaaaatacaccctgc

SEQ ID NO: 176507 - DNA, 25 bp, Canis familiaris
tgcttcctaatggactagattccag

SEQ ID NO: 176508 - DNA, 25 bp, Canis familiaris
tcaggcctagggatggtcccactgg

SEQ ID NO: 176509 - DNA, 25 bp, Canis familiaris
tgcagacccaggatagagtcccacg

SEQ ID NO: 176510 - DNA, 25 bp, Canis familiaris
tgcagatcctcatgattcgttaccc

SEQ ID NO: 176511 - DNA, 25 bp, Canis familiaris
tgcatatgacactgttgccttaccc

SEQ ID NO: 176512 - DNA, 25 bp, Canis familiaris
tgcagatagactgtggccttctcgc

SEQ ID NO: 176513 - DNA, 25 bp, Canis familiaris
tgcagagtgattttcccctctggca

SEQ ID NO: 176514 - DNA, 25 bp, Canis familiaris
tgcaaagatctatcctcagtctggc

SEQ ID NO: 176515 - DNA, 25 bp, Canis familiaris
tgcagaatatgctaaacttttggcc

SEQ ID NO: 176516 - DNA, 25 bp, Canis familiaris
tgcagatactaacccttggtggacg

SEQ ID NO: 176517 - DNA, 25 bp, Canis familiaris
tgcagacacaactaccgggtgggcg

SEQ ID NO: 176518 - DNA, 25 bp, Canis familiaris
tgcagagcttccccagggggtggtg

SEQ ID NO: 176519 - DNA, 25 bp, Canis familiaris
tgcaagctctccagaggtgaaaggc

SEQ ID NO: 176520 - DNA, 25 bp, Canis familiaris
tccaggctacgtcgggatcaaggcc

SEQ ID NO: 176521 - DNA, 25 bp, Canis familiaris
tcaatggaagcgcgggtatacggcg

SEQ ID NO: 176522 - DNA, 25 bp, Canis familiaris
tgctgtcggatgcggggtctacgac

SEQ ID NO: 176523 - DNA, 25 bp, Canis familiaris
tgcttgaaggccgaggagaccagga

SEQ ID NO: 176524 - DNA, 25 bp, Canis familiaris
tgctcaattacagaaaaccaggtcc

SEQ ID NO: 176525 - DNA, 25 bp, Canis familiaris
tgctcattttaccagaagaccaggg

SEQ ID NO: 176526 - DNA, 25 bp, Canis familiaris
tctcatatgctctcgaaagatcctt

SEQ ID NO: 176527 - DNA, 25 bp, Canis familiaris
tgcttagtaccgcggtcgatttgcc

SEQ ID NO: 176528 - DNA, 25 bp, Canis familiaris
tgcttagatctccggtccggtttcc

SEQ ID NO: 176529 - DNA, 25 bp, Canis familiaris
tgctcaggagtccgtggccaggact

SEQ ID NO: 176530 - DNA, 25 bp, Canis familiaris
tgcacagcggtccggaagacgacct

SEQ ID NO: 176531 - DNA, 25 bp, Canis familiaris
tgcaccggtgcatggagagaaacgt

SEQ ID NO: 176532 - DNA, 25 bp, Canis familiaris
tgcacggtgcgctgggagaacaaga

SEQ ID NO: 176533 - DNA, 25 bp, Canis familiaris
tgcacagggctggtggctgagccac

SEQ ID NO: 176534 - DNA, 25 bp, Canis familiaris
tgcacgtcgtggagcatcatgccac

SEQ ID NO: 176535 - DNA, 25 bp, Canis familiaris
tgcacctcgtcgagctcaggaggaa

SEQ ID NO: 176536 - DNA, 25 bp, Canis familiaris
tgcagccttgatattcagggtggat

SEQ ID NO: 176537 - DNA, 25 bp, Canis familiaris
tgcacgcactgtattccagggaata

SEQ ID NO: 176538 - DNA, 25 bp, Canis familiaris
tgcccctgttggttccgtaaagaat

SEQ ID NO: 176539 - DNA, 25 bp, Canis familiaris
tgcccctgttcctcaaaaattattt

SEQ ID NO: 176540 - DNA, 25 bp, Canis familiaris
tgcacccgtggatacataatcaagt

SEQ ID NO: 176541 - DNA, 25 bp, Canis familiaris
tgcccagcgagttaactacaaagga

SEQ ID NO: 176542 - DNA, 25 bp, Canis familiaris
tgcaccaagagtaaactccgtagga

SEQ ID NO: 176543 - DNA, 25 bp, Canis familiaris
tgcagcccaaatatacccgtaatca

SEQ ID NO: 176544 - DNA, 25 bp, Canis familiaris
tgctcctaaatgatacgcctgaagt

SEQ ID NO: 176545 - DNA, 25 bp, Canis familiaris
tgctgaataaatatttgttgaatga

SEQ ID NO: 176546 - DNA, 25 bp, Canis familiaris
tgcttgaataatgttttttggagga

SEQ ID NO: 176547 - DNA, 25 bp, Canis familiaris
tgctatttccctttttcttggggag

SEQ ID NO: 176548 - DNA, 25 bp, Canis familiaris
tgcactttcccaaatttacttaaat

SEQ ID NO: 176549 - DNA, 25 bp, Canis familiaris
tgcacttctttcaagatgttatcat

SEQ ID NO: 176550 - DNA, 25 bp, Canis familiaris
tgcagttttctcacatagtcacata

SEQ ID NO: 176551 - DNA, 25 bp, Canis familiaris
tgcactgtgtttgaatagaccatgt

SEQ ID NO: 176552 - DNA, 25 bp, Canis familiaris
tgccttgagtcttcagaaacgtctg

SEQ ID NO: 176553 - DNA, 25 bp, Canis familiaris
tgcagtgctgcagtctatcatgaac

SEQ ID NO: 176554 - DNA, 25 bp, Canis familiaris
tgcagctgcagcagcaacaacagca

SEQ ID NO: 176555 - DNA, 25 bp, Canis familiaris
tgcaccatacactatccacagatat

SEQ ID NO: 176556 - DNA, 25 bp, Canis familiaris
tgcagcctaaattcccaataccaga

SEQ ID NO: 176557 - DNA, 25 bp, Canis familiaris
tgcaccaaacgatccagcatgaccc

SEQ ID NO: 176558 - DNA, 25 bp, Canis familiaris
tgcaccgggcagtagtgcactaccc

SEQ ID NO: 176559 - DNA, 25 bp, Canis familiaris
tgcacgaggcggttgtgcggactcc

SEQ ID NO: 176560 - DNA, 25 bp, Canis familiaris
tgcacgcccattttggggcagcatc

SEQ ID NO: 176561 - DNA, 25 bp, Canis familiaris
tgcaccctatgatgttggtggtcct

SEQ ID NO: 176562 - DNA, 25 bp, Canis familiaris
tgcaccctatgatgttggtggtcct

SEQ ID NO: 176563 - DNA, 25 bp, Canis familiaris
tgcacaccttgaaatgttgctcttg

SEQ ID NO: 176564 - DNA, 25 bp, Canis familiaris
tgcaacttgtacgattttccatgat

SEQ ID NO: 176565 - DNA, 25 bp, Canis familiaris
tgcggttgtagcgagggtcctgagc

SEQ ID NO: 176566 - DNA, 25 bp, Canis familiaris
tgcaggtagggccagggttctgtgc

SEQ ID NO: 176567 - DNA, 25 bp, Canis familiaris
tgcagcccagcgtccagtggggctg

SEQ ID NO: 176568 - DNA, 25 bp, Canis familiaris
tgcaactcagcaggccagcctgggc

SEQ ID NO: 176569 - DNA, 25 bp, Canis familiaris
tgcagagacactgctcagcgctgga

SEQ ID NO: 176570 - DNA, 25 bp, Canis familiaris
tgcatggctattaccactgcttgta

SEQ ID NO: 176571 - DNA, 25 bp, Canis familiaris
tgcagcacctgtacaactcatttga

SEQ ID NO: 176572 - DNA, 25 bp, Canis familiaris
tgcacaatctttctcatcatcgtga

SEQ ID NO: 176573 - DNA, 25 bp, Canis familiaris
tgcagaattcttccctgatgcagtc

SEQ ID NO: 176574 - DNA, 25 bp, Canis familiaris
tgcactgcatacttcacttgtgaat

SEQ ID NO: 176575 - DNA, 25 bp, Canis familiaris
tgcacgctgcgggtgtctgtgaata

SEQ ID NO: 176576 - DNA, 25 bp, Canis familiaris
tgcacatctgcatttattgctaaat

SEQ ID NO: 176577 - DNA, 25 bp, Canis familiaris
tgcagcctgcaaatttctgccctgc

SEQ ID NO: 176578 - DNA, 25 bp, Canis familiaris
tgcacatctgccatattaactctga

SEQ ID NO: 176579 - DNA, 25 bp, Canis familiaris
tgctctgcagcttccttaagcttgg

SEQ ID NO: 176580 - DNA, 25 bp, Canis familiaris
tgcattcattcattttacagttgtg

SEQ ID NO: 176581 - DNA, 25 bp, Canis familiaris
tgctgacattgacgtagtcgttgtc

SEQ ID NO: 176582 - DNA, 25 bp, Canis familiaris
tgcttctgaggtcggttgttgtctt

SEQ ID NO: 176583 - DNA, 25 bp, Canis familiaris
tgcttctgaggtcggttgttgtctt

SEQ ID NO: 176584 - DNA, 25 bp, Canis familiaris
tgcttctgaggtcggttgttgtctt

SEQ ID NO: 176585 - DNA, 25 bp, Canis familiaris
tgcttctgaggtcggttgttgtctt

SEQ ID NO: 176586 - DNA, 25 bp, Canis familiaris
tgcttctgaggtcggttgttgtctt

SEQ ID NO: 176587 - DNA, 25 bp, Canis familiaris
tgcttctgaggtcggttgttgtctt

SEQ ID NO: 176588 - DNA, 25 bp, Canis familiaris
tgcttctgaggtcggttgttgtctt

SEQ ID NO: 176589 - DNA, 25 bp, Canis familiaris
tgcttctgaggtcggttgttgtctt

SEQ ID NO: 176590 - DNA, 25 bp, Canis familiaris
tgcttctgaggtcggttgttgtctt

SEQ ID NO: 176591 - DNA, 25 bp, Canis familiaris
tgcttctgaggtcggttgttgtctt

SEQ ID NO: 176592 - DNA, 25 bp, Canis familiaris
tgcttctgaggtcggttgttgtctt

SEQ ID NO: 176593 - DNA, 25 bp, Canis familiaris
tgcttctgaggtcggttgttgtctt

SEQ ID NO: 176594 - DNA, 25 bp, Canis familiaris
tgcttctgaggtcggttgttgtctt

SEQ ID NO: 176595 - DNA, 25 bp, Canis familiaris
tgcatttggaggtgtcaatcttctt

SEQ ID NO: 176596 - DNA, 25 bp, Canis familiaris
tgcattgaggggtgtttcctcccct

SEQ ID NO: 176597 - DNA, 25 bp, Canis familiaris
tgcaagagatgcagtgcctttcccc

SEQ ID NO: 176598 - DNA, 25 bp, Canis familiaris
tgcaagaagctggtgtctccattcc

SEQ ID NO: 176599 - DNA, 25 bp, Canis familiaris
tgcaagcaatcagtgtgaccctctc

SEQ ID NO: 176600 - DNA, 25 bp, Canis familiaris
tgcagcagcacaagagcgaccgcac

SEQ ID NO: 176601 - DNA, 25 bp, Canis familiaris
tgcacacacagagtggcatcggcca

SEQ ID NO: 176602 - DNA, 25 bp, Canis familiaris
tgcagccagtacggaaggctcccgt

SEQ ID NO: 176603 - DNA, 25 bp, Canis familiaris
tgcagctggtgaacagggttcccgc

SEQ ID NO: 176604 - DNA, 25 bp, Canis familiaris
tgcggggaacgggcttggagcccta

SEQ ID NO: 176605 - DNA, 25 bp, Canis familiaris
tgcaggggagcctgttgtggaccct

SEQ ID NO: 176606 - DNA, 25 bp, Canis familiaris
tgcaggagagacgattgtcattagg

SEQ ID NO: 176607 - DNA, 25 bp, Canis familiaris
tgcagctgctggccgagatgtgcat

SEQ ID NO: 176608 - DNA, 25 bp, Canis familiaris
tgcagtcagggcctgtggttgccat

SEQ ID NO: 176609 - DNA, 25 bp, Canis familiaris
tgcatgtattggctgtggtcctgtc

SEQ ID NO: 176610 - DNA, 25 bp, Canis familiaris
tgcagcccatggctatggtgctttc

SEQ ID NO: 176611 - DNA, 25 bp, Canis familiaris
ttcccgggataggtgacctccggag

SEQ ID NO: 176612 - DNA, 25 bp, Canis familiaris
ttccccatgaacgaggaattcccag

SEQ ID NO: 176613 - DNA, 25 bp, Canis familiaris
tctcccttaacgtggttgcgtcggg

SEQ ID NO: 176614 - DNA, 25 bp, Canis familiaris
tccgtttaacgagggatccacttgg

SEQ ID NO: 176615 - DNA, 25 bp, Canis familiaris
tccgtttcaacgaaggactccaggt

SEQ ID NO: 176616 - DNA, 25 bp, Canis familiaris
tcccttgtgtaccagaacgtcctgg

SEQ ID NO: 176617 - DNA, 25 bp, Canis familiaris
tgcaccttgttatgaactttccttg

SEQ ID NO: 176618 - DNA, 25 bp, Canis familiaris
tgcacattttcttagtatctttcca

SEQ ID NO: 176619 - DNA, 25 bp, Canis familiaris
tgctcagcggtttagcgctgccttc

SEQ ID NO: 176620 - DNA, 25 bp, Canis familiaris
tgcaagcggcgagagcagcgccttc

SEQ ID NO: 176621 - DNA, 25 bp, Canis familiaris
tgcaacagggtgggatgcgccttgc

SEQ ID NO: 176622 - DNA, 25 bp, Canis familiaris
tgcacaacaggggcgagcgcactca

SEQ ID NO: 176623 - DNA, 25 bp, Canis familiaris
tgcaccgcctgaggctgaggcagga

SEQ ID NO: 176624 - DNA, 25 bp, Canis familiaris
tgcactcgtgtggttaggcaggcta

SEQ ID NO: 176625 - DNA, 25 bp, Canis familiaris
tgcacagcttgtgttaggcacctct

SEQ ID NO: 176626 - DNA, 25 bp, Canis familiaris
tgcacactttttgcacctcttgtgc

SEQ ID NO: 176627 - DNA, 25 bp, Canis familiaris
tgcacaagtgtttcaacctgtcctg

SEQ ID NO: 176628 - DNA, 25 bp, Canis familiaris
tgcacatagtttcctgtcttgtcca

SEQ ID NO: 176629 - DNA, 25 bp, Canis familiaris
tgcacgagtttgactttgcgctggc

SEQ ID NO: 176630 - DNA, 25 bp, Canis familiaris
tgcacagtgcttaattatctgcctg

SEQ ID NO: 176631 - DNA, 25 bp, Canis familiaris
tgcacgcgcgctacactgactggct

SEQ ID NO: 176632 - DNA, 25 bp, Canis familiaris
tgcatgggctgcacaggacgagctg

SEQ ID NO: 176633 - DNA, 25 bp, Canis familiaris
tgcagaacgcgcaaggacggctgag

SEQ ID NO: 176634 - DNA, 25 bp, Canis familiaris
tgcacagacggcagtgtcgcggatg

SEQ ID NO: 176635 - DNA, 25 bp, Canis familiaris
tgcagagcgggcagtggccgaactc

SEQ ID NO: 176636 - DNA, 25 bp, Canis familiaris
tgcagaattgtggggccccaaccca

SEQ ID NO: 176637 - DNA, 25 bp, Canis familiaris
tgcaggaagggatctggccacaccc

SEQ ID NO: 176638 - DNA, 25 bp, Canis familiaris
tgcaggaaggcggtgaactcctccc

SEQ ID NO: 176639 - DNA, 25 bp, Canis familiaris
tgctggaaggttaattctccgccct

SEQ ID NO: 176640 - DNA, 25 bp, Canis familiaris
tgcttgcaaggtttgtaggccgcct

SEQ ID NO: 176641 - DNA, 25 bp, Canis familiaris
tgctaccaaggctgtgggcctcatc

SEQ ID NO: 176642 - DNA, 25 bp, Canis familiaris
tgcactccaaggacttaggctctct

SEQ ID NO: 176643 - DNA, 25 bp, Canis familiaris
tgcatcccggatccggggactcagg

SEQ ID NO: 176644 - DNA, 25 bp, Canis familiaris
tgcacctctggatccggatgaaaca

SEQ ID NO: 176645 - DNA, 25 bp, Canis familiaris
tgcactcttggcacacaggggacac

SEQ ID NO: 176646 - DNA, 25 bp, Canis familiaris
tgcactctggcacaacaggggacac

SEQ ID NO: 176647 - DNA, 25 bp, Canis familiaris
tgcatatgctaaaaactggggccag

SEQ ID NO: 176648 - DNA, 25 bp, Canis familiaris
tgcagagctgacttaaggggccaca

SEQ ID NO: 176649 - DNA, 25 bp, Canis familiaris
tgcagagccacttttggtccaagca

SEQ ID NO: 176650 - DNA, 25 bp, Canis familiaris
tgcagagactgcatcttttcccaga

SEQ ID NO: 176651 - DNA, 25 bp, Canis familiaris
tgcaacaccattttttgctccagca

SEQ ID NO: 176652 - DNA, 25 bp, Canis familiaris
tgcaaagccagtttctctttcactc

SEQ ID NO: 176653 - DNA, 25 bp, Canis familiaris
tgcacatactatatcttctttatcc

SEQ ID NO: 176654 - DNA, 25 bp, Canis familiaris
tgcactgcagcattttcttccagta

SEQ ID NO: 176655 - DNA, 25 bp, Canis familiaris
tgcactcacagtggcctttcagtag

SEQ ID NO: 176656 - DNA, 25 bp, Canis familiaris
tgcacccggagggcttgcaaaggct

SEQ ID NO: 176657 - DNA, 25 bp, Canis familiaris
tgcacccaggactatcttccaaaga

SEQ ID NO: 176658 - DNA, 25 bp, Canis familiaris
tgcatcgacctagtgacttcctaaa

SEQ ID NO: 176659 - DNA, 25 bp, Canis familiaris
tgcttgtccgagatcattcctatta

SEQ ID NO: 176660 - DNA, 25 bp, Canis familiaris
tgctaggccagatctcattgatctg

SEQ ID NO: 176661 - DNA, 25 bp, Canis familiaris
tgcataacactgtccatctttgctt

SEQ ID NO: 176662 - DNA, 25 bp, Canis familiaris
tgcagaggcatcacctctttctgct

SEQ ID NO: 176663 - DNA, 25 bp, Canis familiaris
tgcagggcaaacgtttctcatgtct

SEQ ID NO: 176664 - DNA, 25 bp, Canis familiaris
tgctaatcaaacgttgctgccttcc

SEQ ID NO: 176665 - DNA, 25 bp, Canis familiaris
tgcagagtgagaactttccctaccg

SEQ ID NO: 176666 - DNA, 25 bp, Canis familiaris
tgcagagtgagaactttccctaccg

SEQ ID NO: 176667 - DNA, 25 bp, Canis familiaris
tgcagcaatggatcacctactcata

SEQ ID NO: 176668 - DNA, 25 bp, Canis familiaris
tgcagagcatggcatctgcccaaca

SEQ ID NO: 176669 - DNA, 25 bp, Canis familiaris
tgcagcagcgagctgccctgatggg

SEQ ID NO: 176670 - DNA, 25 bp, Canis familiaris
tgcatgcactgtgaccttgggggga

SEQ ID NO: 176671 - DNA, 25 bp, Canis familiaris
tgcagcaggctggacacttggactg

SEQ ID NO: 176672 - DNA, 25 bp, Canis familiaris
tgcactgtcttactgctgtggactc

SEQ ID NO: 176673 - DNA, 25 bp, Canis familiaris
tgcacgtgcacgtgtgtggacgcgc

SEQ ID NO: 176674 - DNA, 25 bp, Canis familiaris
tgcactccagcctgggcgacagagc

SEQ ID NO: 176675 - DNA, 25 bp, Canis familiaris
tgcatctcacgctgggagcggggga

SEQ ID NO: 176676 - DNA, 25 bp, Canis familiaris
tgcattaccggtcgatgcaacgagt

SEQ ID NO: 176677 - DNA, 25 bp, Canis familiaris
tgcagctcctggctcgacaaggagt

SEQ ID NO: 176678 - DNA, 25 bp, Canis familiaris
tgcagtgtttgccttgtacggagtt

SEQ ID NO: 176679 - DNA, 25 bp, Canis familiaris
tgcagctgtggtgtagagggggtct

SEQ ID NO: 176680 - DNA, 25 bp, Canis familiaris
tgcagtggacatgtcgggcgggacg

SEQ ID NO: 176681 - DNA, 25 bp, Canis familiaris
tgcaggtgacggaggacgcggtgcg

SEQ ID NO: 176682 - DNA, 25 bp, Canis familiaris
tgcacctggcggagaacgccgagcc

SEQ ID NO: 176683 - DNA, 25 bp, Canis familiaris
tgcacctgtgtactggtgtcccaac

SEQ ID NO: 176684 - DNA, 25 bp, Canis familiaris
tgcacatctcagaactgggggccaa

SEQ ID NO: 176685 - DNA, 25 bp, Canis familiaris
tgcactctggctacatcaggggaca

SEQ ID NO: 176686 - DNA, 25 bp, Canis familiaris
tgcactctggcacacaggggacaca

SEQ ID NO: 176687 - DNA, 25 bp, Canis familiaris
tgcactctggcacacaggggacaca

SEQ ID NO: 176688 - DNA, 25 bp, Canis familiaris
tgcactagcgcacgaaggtgggctc

SEQ ID NO: 176689 - DNA, 25 bp, Canis familiaris
tgcagaagccccaggcagggctctt

SEQ ID NO: 176690 - DNA, 25 bp, Canis familiaris
tgcagggcccagaaagcagcaccct

SEQ ID NO: 176691 - DNA, 25 bp, Canis familiaris
tgcagtggtccatgggatcagcctc

SEQ ID NO: 176692 - DNA, 25 bp, Canis familiaris
tgcatttgtcaattgtgtaacccga

SEQ ID NO: 176693 - DNA, 25 bp, Canis familiaris
tgctgtttaattactaaccctttat

SEQ ID NO: 176694 - DNA, 25 bp, Canis familiaris
tgcagttacaaacctaagacctttt

SEQ ID NO: 176695 - DNA, 25 bp, Canis familiaris
tcctgttctgacactaaacctactg

SEQ ID NO: 176696 - DNA, 25 bp, Canis familiaris
tcccttttaacatgacacctatttg

SEQ ID NO: 176697 - DNA, 25 bp, Canis familiaris
tgcagactcttttaattttcctatc

SEQ ID NO: 176698 - DNA, 25 bp, Canis familiaris
tgcacaggcattttcatttttagat

SEQ ID NO: 176699 - DNA, 25 bp, Canis familiaris
tgcacgccatattctattttttacc

SEQ ID NO: 176700 - DNA, 25 bp, Canis familiaris
tccttaaatgttctttataccaatt

SEQ ID NO: 176701 - DNA, 25 bp, Canis familiaris
tccgtgaaagtcgtgaactctacca

SEQ ID NO: 176702 - DNA, 25 bp, Canis familiaris
tgcaggggaattctcagactcctcc

SEQ ID NO: 176703 - DNA, 25 bp, Canis familiaris
tgcagcgggaaggttcacacacccc

SEQ ID NO: 176704 - DNA, 25 bp, Canis familiaris
tgcaggggtgctgttaccctgccct

SEQ ID NO: 176705 - DNA, 25 bp, Canis familiaris
tgcggggtggcttaatatcggctcc

SEQ ID NO: 176706 - DNA, 25 bp, Canis familiaris
tgctggtggaccataatcccacacc

SEQ ID NO: 176707 - DNA, 25 bp, Canis familiaris
tgcatcgggtacaatagtcccaacc

SEQ ID NO: 176708 - DNA, 25 bp, Canis familiaris
tgcatttgagtgacgtaatcccaat

SEQ ID NO: 176709 - DNA, 25 bp, Canis familiaris
tgcagttagcatctgtatcctccag

SEQ ID NO: 176710 - DNA, 25 bp, Canis familiaris
tgcatattatgaattgagtccacaa

SEQ ID NO: 176711 - DNA, 25 bp, Canis familiaris
tgcagccttgtcagaacacacacac

SEQ ID NO: 176712 - DNA, 25 bp, Canis familiaris
tgcactctttgcaagagcacacaac

SEQ ID NO: 176713 - DNA, 25 bp, Canis familiaris
tgcacacctggcgagacaccagaca

SEQ ID NO: 176714 - DNA, 25 bp, Canis familiaris
tgcacacctagctcaacatcaaaga

SEQ ID NO: 176715 - DNA, 25 bp, Canis familiaris
tgcacaccaagatacagatcatcaa

SEQ ID NO: 176716 - DNA, 25 bp, Canis familiaris
tgcacacctgatttcacagcttcac

SEQ ID NO: 176717 - DNA, 25 bp, Canis familiaris
tgcagaagctgacctgggcctcagc

SEQ ID NO: 176718 - DNA, 25 bp, Canis familiaris
tgcagggctgagctgctgtggcatc

SEQ ID NO: 176719 - DNA, 25 bp, Canis familiaris
tgcagaggcctgctggtggatgtgc

SEQ ID NO: 176720 - DNA, 25 bp, Canis familiaris
tgcacatggtctctgtgggtgagca

SEQ ID NO: 176721 - DNA, 25 bp, Canis familiaris
tgcacaggatggcagcagtggggca

SEQ ID NO: 176722 - DNA, 25 bp, Canis familiaris
tgcacagagcagtgccctggggcag

SEQ ID NO: 176723 - DNA, 25 bp, Canis familiaris
tgcacagaagagtcccaagcctcgt

SEQ ID NO: 176724 - DNA, 25 bp, Canis familiaris
tgcacgcaggagtacctgagcctcg

SEQ ID NO: 176725 - DNA, 25 bp, Canis familiaris
tgcaggatgggagctcacgactctg

SEQ ID NO: 176726 - DNA, 25 bp, Canis familiaris
tgcaggaggggttcacagaccactc

SEQ ID NO: 176727 - DNA, 25 bp, Canis familiaris
tgcactgcagggcttcaagatcacc

SEQ ID NO: 176728 - DNA, 25 bp, Canis familiaris
tgcactcaacaactctcaaacagat

SEQ ID NO: 176729 - DNA, 25 bp, Canis familiaris
tgcacatgcccagtccaataaagtc

SEQ ID NO: 176730 - DNA, 25 bp, Canis familiaris
tgcacatgcccagtccaataaagtc

SEQ ID NO: 176731 - DNA, 25 bp, Canis familiaris
tgcacatgcccagtccaataaagtc

SEQ ID NO: 176732 - DNA, 25 bp, Canis familiaris
tgcacatgcccagtccaataaagtc

SEQ ID NO: 176733 - DNA, 25 bp, Canis familiaris
tgcagcatccccgcagataaattat

SEQ ID NO: 176734 - DNA, 25 bp, Canis familiaris
tgcagctccacctcaagagtgacaa

SEQ ID NO: 176735 - DNA, 25 bp, Canis familiaris
tgcagcgtctgggtcaatgagtaac

SEQ ID NO: 176736 - DNA, 25 bp, Canis familiaris
tgcaggactgggccacacagatcaa

SEQ ID NO: 176737 - DNA, 25 bp, Canis familiaris
tgcaggacgcagctcaccaatgagc

SEQ ID NO: 176738 - DNA, 25 bp, Canis familiaris
tgcagtatggccctacacaggcagt

SEQ ID NO: 176739 - DNA, 25 bp, Canis familiaris
tgcatatgggcacttgatccccgac

SEQ ID NO: 176740 - DNA, 25 bp, Canis familiaris
tgcacatgggaccatgacacaccaa

SEQ ID NO: 176741 - DNA, 25 bp, Canis familiaris
tgcatgcatggaaccaatccaggac

SEQ ID NO: 176742 - DNA, 25 bp, Canis familiaris
tgcagctggattacgcaacagtaaa

SEQ ID NO: 176743 - DNA, 25 bp, Canis familiaris
tgcacttgagctaccacgagattta

SEQ ID NO: 176744 - DNA, 25 bp, Canis familiaris
tccttgcctaacgggtttgagtcac

SEQ ID NO: 176745 - DNA, 25 bp, Canis familiaris
tgctcttaccctggggtcttggaca

SEQ ID NO: 176746 - DNA, 25 bp, Canis familiaris
tgcactttccgatggcagtttgggg

SEQ ID NO: 176747 - DNA, 25 bp, Canis familiaris
tgcacgtccccttaagagtctgagg

SEQ ID NO: 176748 - DNA, 25 bp, Canis familiaris
tgcaggctgcccagaacaagacggg

SEQ ID NO: 176749 - DNA, 25 bp, Canis familiaris
tgctaggcccctaaaagaagaagct

SEQ ID NO: 176750 - DNA, 25 bp, Canis familiaris
tgcgggtcccgcaatgaaaatgaga

SEQ ID NO: 176751 - DNA, 25 bp, Canis familiaris
tgcaggttcggtgctgaaaatgcag

SEQ ID NO: 176752 - DNA, 25 bp, Canis familiaris
tgcatttctttgtcactgtaacgat

SEQ ID NO: 176753 - DNA, 25 bp, Canis familiaris
tgctttcgtgtaaattatgtaatgc

SEQ ID NO: 176754 - DNA, 25 bp, Canis familiaris
tgctttagaggtaactttaggccga

SEQ ID NO: 176755 - DNA, 25 bp, Canis familiaris
tgctttgggggcagctgtctagacg

SEQ ID NO: 176756 - DNA, 25 bp, Canis familiaris
tgctttcccggcaagttaagacgaa

SEQ ID NO: 176757 - DNA, 25 bp, Canis familiaris
tgcttccccgggttttaatcggcat

SEQ ID NO: 176758 - DNA, 25 bp, Canis familiaris
tgcctgtactcccgttttaactggc

SEQ ID NO: 176759 - DNA, 25 bp, Canis familiaris
tgctgtgttcggctgttattaattg

SEQ ID NO: 176760 - DNA, 25 bp, Canis familiaris
tgcagtgttcgatattattgtttta

SEQ ID NO: 176761 - DNA, 25 bp, Canis familiaris
tgcagtgttcgatatgattgtttaa

SEQ ID NO: 176762 - DNA, 25 bp, Canis familiaris
tgcaggttctgctttgagtatttaa

SEQ ID NO: 176763 - DNA, 25 bp, Canis familiaris
tgcaggcttcttctgagccttttac

SEQ ID NO: 176764 - DNA, 25 bp, Canis familiaris
tgcaggcttttttggctctttaaaa

SEQ ID NO: 176765 - DNA, 25 bp, Canis familiaris
tgctgaacctttggcctttttcaaa

SEQ ID NO: 176766 - DNA, 25 bp, Canis familiaris
tgctttgccattctccattttataa

SEQ ID NO: 176767 - DNA, 25 bp, Canis familiaris
tgcttcggcttctcattatgttgca

SEQ ID NO: 176768 - DNA, 25 bp, Canis familiaris
tgcttgggattctctgtctgaagta

SEQ ID NO: 176769 - DNA, 25 bp, Canis familiaris
tgctcttggttgctctggctagagg

SEQ ID NO: 176770 - DNA, 25 bp, Canis familiaris
tgctcttagtccttggcctcaaggc

SEQ ID NO: 176771 - DNA, 25 bp, Canis familiaris
tgctttggtccaagacccacaagcc

SEQ ID NO: 176772 - DNA, 25 bp, Canis familiaris
tgcattgtgattgaaggcccttacc

SEQ ID NO: 176773 - DNA, 25 bp, Canis familiaris
tgcacctttcaaagagtctgcttta

SEQ ID NO: 176774 - DNA, 25 bp, Canis familiaris
tgcatgcctttaaagacgtcagctt

SEQ ID NO: 176775 - DNA, 25 bp, Canis familiaris
tgcatccctttgtgacctaatttac

SEQ ID NO: 176776 - DNA, 25 bp, Canis familiaris
tgcactttttgctgggtagttgttc

SEQ ID NO: 176777 - DNA, 25 bp, Canis familiaris
tgcgtttttgccgggattggttttg

SEQ ID NO: 176778 - DNA, 25 bp, Canis familiaris
tgcttttttcctctatttcttttgg

SEQ ID NO: 176779 - DNA, 25 bp, Canis familiaris
tctagatagcttcaccttttttttt

SEQ ID NO: 176780 - DNA, 25 bp, Canis familiaris
tctaaagccatgccaaacccttttt

SEQ ID NO: 176781 - DNA, 25 bp, Canis familiaris
tgctaaagcctggataagcccccac

SEQ ID NO: 176782 - DNA, 25 bp, Canis familiaris
tgctaaagcctggataagcccccac

SEQ ID NO: 176783 - DNA, 25 bp, Canis familiaris
tgctaaagcctggataagcccccac

SEQ ID NO: 176784 - DNA, 25 bp, Canis familiaris
tgctaaagcctggataagcccccac

SEQ ID NO: 176785 - DNA, 25 bp, Canis familiaris
tgctaaagcctggataagcccccac

SEQ ID NO: 176786 - DNA, 25 bp, Canis familiaris
tgctaaatctcttttcagcggcacc

SEQ ID NO: 176787 - DNA, 25 bp, Canis familiaris
tgcataagccttgtccacttgacca

SEQ ID NO: 176788 - DNA, 25 bp, Canis familiaris
tgctgaaccttctgggcttgcaaca

SEQ ID NO: 176789 - DNA, 25 bp, Canis familiaris
tgctgaaccttctgggcttgcaaca

SEQ ID NO: 176790 - DNA, 25 bp, Canis familiaris
tgctcaaagcctgggtcgcttggaa

SEQ ID NO: 176791 - DNA, 25 bp, Canis familiaris
tgctaaagctggctggcccgtgaag

SEQ ID NO: 176792 - DNA, 25 bp, Canis familiaris
tgctacgtcgccctggacttcgagc

SEQ ID NO: 176793 - DNA, 25 bp, Canis familiaris
tgctcacttcggcattcacgaggag

SEQ ID NO: 176794 - DNA, 25 bp, Canis familiaris
tgcttgttcaggcacgccagaagga

SEQ ID NO: 176795 - DNA, 25 bp, Canis familiaris
tgcttgttcaggcaggtgctctggt

SEQ ID NO: 176796 - DNA, 25 bp, Canis familiaris
tgctatgttgctctagacttcgagc

SEQ ID NO: 176797 - DNA, 25 bp, Canis familiaris
tgctcattccactataactttacta

SEQ ID NO: 176798 - DNA, 25 bp, Canis familiaris
tgcatttcaagtcccacgtgtacta

SEQ ID NO: 176799 - DNA, 25 bp, Canis familiaris
tgcagtttactgtccctggtttaca

SEQ ID NO: 176800 - DNA, 25 bp, Canis familiaris
tgcagtttcattgcacgggttaatg

SEQ ID NO: 176801 - DNA, 25 bp, Canis familiaris
tgcagtttctcagcagggtcttcac

SEQ ID NO: 176802 - DNA, 25 bp, Canis familiaris
tgcgatctttgagagatgtccattt

SEQ ID NO: 176803 - DNA, 25 bp, Canis familiaris
tgcagcttttgggatgagtacataa

SEQ ID NO: 176804 - DNA, 25 bp, Canis familiaris
tgcactcttgttcctgagtcaacca

SEQ ID NO: 176805 - DNA, 25 bp, Canis familiaris
tgcactctcttctctgatgtgcttt

SEQ ID NO: 176806 - DNA, 25 bp, Canis familiaris
tgcactccctccagtggttttaaat

SEQ ID NO: 176807 - DNA, 25 bp, Canis familiaris
tgcccccctaccatgtagttgaaca

SEQ ID NO: 176808 - DNA, 25 bp, Canis familiaris
tgctcacccctacctggtaatttaa

SEQ ID NO: 176809 - DNA, 25 bp, Canis familiaris
tgcaccctctttctgggaattctga

SEQ ID NO: 176810 - DNA, 25 bp, Canis familiaris
tgcatccatgcctcttttggacatt

SEQ ID NO: 176811 - DNA, 25 bp, Canis familiaris
tgcatccatcttttcttgctgagag

SEQ ID NO: 176812 - DNA, 25 bp, Canis familiaris
tgcatttcctttctgagctagctag

SEQ ID NO: 176813 - DNA, 25 bp, Canis familiaris
tgcttttatcttttcaattctatgc

SEQ ID NO: 176814 - DNA, 25 bp, Canis familiaris
tgctgggtattttccagttttttca

SEQ ID NO: 176815 - DNA, 25 bp, Canis familiaris
tgcagttttttatggtttttacact

SEQ ID NO: 176816 - DNA, 25 bp, Canis familiaris
tgcgtatattttattggttattccc

SEQ ID NO: 176817 - DNA, 25 bp, Canis familiaris
tgcataaattcctgtttttccccat

SEQ ID NO: 176818 - DNA, 25 bp, Canis familiaris
tgctaaggtgggggctctttaccca

SEQ ID NO: 176819 - DNA, 25 bp, Canis familiaris
tgctaaggaggagcccgtctgagcc

SEQ ID NO: 176820 - DNA, 25 bp, Canis familiaris
tgcttcggggaggtccgtctggaac

SEQ ID NO: 176821 - DNA, 25 bp, Canis familiaris
tttcgagggggcacaggcgtacatg

SEQ ID NO: 176822 - DNA, 25 bp, Canis familiaris
ttaacgtagagtatgcagcaggtcc

SEQ ID NO: 176823 - DNA, 25 bp, Canis familiaris
taaccagtaagcaatccatcggaac

SEQ ID NO: 176824 - DNA, 25 bp, Canis familiaris
tgcccacgtgaacacttctggaaga

SEQ ID NO: 176825 - DNA, 25 bp, Canis familiaris
tgcagtactgaaaacagcttttaaa

SEQ ID NO: 176826 - DNA, 25 bp, Canis familiaris
tgcattttagcaacatcactctggt

SEQ ID NO: 176827 - DNA, 25 bp, Canis familiaris
tgctttctgagagctcagcccgttc

SEQ ID NO: 176828 - DNA, 25 bp, Canis familiaris
tgctttcagatagggatgctaagtt

SEQ ID NO: 176829 - DNA, 25 bp, Canis familiaris
tgctaacccttgcatgctaagcctt

SEQ ID NO: 176830 - DNA, 25 bp, Canis familiaris
tgcagcatacccttggatctagacc

SEQ ID NO: 176831 - DNA, 25 bp, Canis familiaris
tgcagctcaacctgctgcagctgga

SEQ ID NO: 176832 - DNA, 25 bp, Canis familiaris
tgcatccagtaacgctgcctggcat

SEQ ID NO: 176833 - DNA, 25 bp, Canis familiaris
tgcatctgcagtcacgggcacgata

SEQ ID NO: 176834 - DNA, 25 bp, Canis familiaris
tgctcaagaccaaggtgcacagtaa

SEQ ID NO: 176835 - DNA, 25 bp, Canis familiaris
tgcagaagtcctagctgtgtctcta

SEQ ID NO: 176836 - DNA, 25 bp, Canis familiaris
tgcaggactcgactgcaggtctcca

SEQ ID NO: 176837 - DNA, 25 bp, Canis familiaris
tgcaggagccgatgtggactcgacc

SEQ ID NO: 176838 - DNA, 25 bp, Canis familiaris
tgcaggcaggagtagatagacagct

SEQ ID NO: 176839 - DNA, 25 bp, Canis familiaris
tgcagcggaagcttgcagagcccag

SEQ ID NO: 176840 - DNA, 25 bp, Canis familiaris
tgcactggacagtaacagccacaca

SEQ ID NO: 176841 - DNA, 25 bp, Canis familiaris
tgcatgtaaaacccagccacagcag

SEQ ID NO: 176842 - DNA, 25 bp, Canis familiaris
tgcattcctaacaacagtacatcag

SEQ ID NO: 176843 - DNA, 25 bp, Canis familiaris
tgcattcgtaaaacctctcacgaag

SEQ ID NO: 176844 - DNA, 25 bp, Canis familiaris
tgcgctttcaaagttctgtccgaca

SEQ ID NO: 176845 - DNA, 25 bp, Canis familiaris
tgcgttgtgaagaaattgtccagac

SEQ ID NO: 176846 - DNA, 25 bp, Canis familiaris
tgcttcttggatcaatggggcagtc

SEQ ID NO: 176847 - DNA, 25 bp, Canis familiaris
tgctccctgggttattaggcctgga

SEQ ID NO: 176848 - DNA, 25 bp, Canis familiaris
tgcttcgctgaatatatacaggtat

SEQ ID NO: 176849 - DNA, 25 bp, Canis familiaris
tgcttccagattttagaccccatta

SEQ ID NO: 176850 - DNA, 25 bp, Canis familiaris
tgcttccagccttaggattcaccat

SEQ ID NO: 176851 - DNA, 25 bp, Canis familiaris
tgcaccacagctcatgggatgttca

SEQ ID NO: 176852 - DNA, 25 bp, Canis familiaris
tgcatcgaacatcctgggtcattct

SEQ ID NO: 176853 - DNA, 25 bp, Canis familiaris
tgcagcagaacctggtgtattacca

SEQ ID NO: 176854 - DNA, 25 bp, Canis familiaris
tgcaggaatcccagtgtgcctgtcc

SEQ ID NO: 176855 - DNA, 25 bp, Canis familiaris
tgcggaggggcaatttgccttcgcc

SEQ ID NO: 176856 - DNA, 25 bp, Canis familiaris
tgcaggagaaggatgatgatggctt

SEQ ID NO: 176857 - DNA, 25 bp, Canis familiaris
tgcaggtcagcacgttgctgtcgat

SEQ ID NO: 176858 - DNA, 25 bp, Canis familiaris
tgcagtgccagagggccattctgtt

SEQ ID NO: 176859 - DNA, 25 bp, Canis familiaris
tgcagtctcagctgacaccttgatt

SEQ ID NO: 176860 - DNA, 25 bp, Canis familiaris
tgcagacacacaggagcccaaaatc

SEQ ID NO: 176861 - DNA, 25 bp, Canis familiaris
tgcagagagcagccaagccgaagaa

SEQ ID NO: 176862 - DNA, 25 bp, Canis familiaris
tgcagaggatgcacagctcccagaa

SEQ ID NO: 176863 - DNA, 25 bp, Canis familiaris
tgctgcaggtgcagcacgccagcaa

SEQ ID NO: 176864 - DNA, 25 bp, Canis familiaris
tgcagcagattgtgcaccaggccag

SEQ ID NO: 176865 - DNA, 25 bp, Canis familiaris
tgcagcaagtgaggccactgccctg

SEQ ID NO: 176866 - DNA, 25 bp, Canis familiaris
tgcagaaggagatcactgccctggc

SEQ ID NO: 176867 - DNA, 25 bp, Canis familiaris
tgcagacggagctacactcattgcc

SEQ ID NO: 176868 - DNA, 25 bp, Canis familiaris
tgcagagaggcactccatctcagtg

SEQ ID NO: 176869 - DNA, 25 bp, Canis familiaris
tgcagtgcgtgcactcacacacatg

SEQ ID NO: 176870 - DNA, 25 bp, Canis familiaris
tgcagtcgtgcagtcacctatacat

SEQ ID NO: 176871 - DNA, 25 bp, Canis familiaris
tgcagtgtgctattggcttcaacat

SEQ ID NO: 176872 - DNA, 25 bp, Canis familiaris
tgcagtgtcccagcatttcactaca

SEQ ID NO: 176873 - DNA, 25 bp, Canis familiaris
tgcagtccctcaacatggtcaagta

SEQ ID NO: 176874 - DNA, 25 bp, Canis familiaris
tgcagtcctccagggttcaaggaga

SEQ ID NO: 176875 - DNA, 25 bp, Canis familiaris
tgcagtccatcctggtggcaggtga

SEQ ID NO: 176876 - DNA, 25 bp, Canis familiaris
tgcagccagccgtggggactggaag

SEQ ID NO: 176877 - DNA, 25 bp, Canis familiaris
tgcatgtgaccgtgctgggttggaa

SEQ ID NO: 176878 - DNA, 25 bp, Canis familiaris
tgcaccacgtgctgctggaggtgga

SEQ ID NO: 176879 - DNA, 25 bp, Canis familiaris
tgcagcgcgggctgcaggtggtgta

SEQ ID NO: 176880 - DNA, 25 bp, Canis familiaris
tgcagggtagatcagttgtatggaa

SEQ ID NO: 176881 - DNA, 25 bp, Canis familiaris
tgcagggctccagacacttagaaca

SEQ ID NO: 176882 - DNA, 25 bp, Canis familiaris
tgcattggccaagcctccatagtat

SEQ ID NO: 176883 - DNA, 25 bp, Canis familiaris
tgcatgtgaccatccacttattgaa

SEQ ID NO: 176884 - DNA, 25 bp, Canis familiaris
tgcatggaggaacgcctgatttcca

SEQ ID NO: 176885 - DNA, 25 bp, Canis familiaris
tgcatagatttctgtcctttccaaa

SEQ ID NO: 176886 - DNA, 25 bp, Canis familiaris
tgctaatttctctccattccaagga

SEQ ID NO: 176887 - DNA, 25 bp, Canis familiaris
tgctccaagttaacttttcaaggaa

SEQ ID NO: 176888 - DNA, 25 bp, Canis familiaris
tgcatcgccagcatttcgatcctcg

SEQ ID NO: 176889 - DNA, 25 bp, Canis familiaris
tgcatgcccagcaagtggagtccac

SEQ ID NO: 176890 - DNA, 25 bp, Canis familiaris
tgcagacggcagaggagtccagctc

SEQ ID NO: 176891 - DNA, 25 bp, Canis familiaris
tgcagacggtgcagcgaatcctggc

SEQ ID NO: 176892 - DNA, 25 bp, Canis familiaris
tgcacctactgcaggtactctgctc

SEQ ID NO: 176893 - DNA, 25 bp, Canis familiaris
tgcagaatacacatgggagccctca

SEQ ID NO: 176894 - DNA, 25 bp, Canis familiaris
tgcagactggccatagctggcccgc

SEQ ID NO: 176895 - DNA, 25 bp, Canis familiaris
tgcagcagtagtctatctggcctcg

SEQ ID NO: 176896 - DNA, 25 bp, Canis familiaris
tgcagatgtagttcgcacttgccgc

SEQ ID NO: 176897 - DNA, 25 bp, Canis familiaris
tgcagcatgggtctcacctggctgc

SEQ ID NO: 176898 - DNA, 25 bp, Canis familiaris
tgcagggatgtgctactttgctcct

SEQ ID NO: 176899 - DNA, 25 bp, Canis familiaris
tgcaggttgctgctactctttggga

SEQ ID NO: 176900 - DNA, 25 bp, Canis familiaris
tgcaggggccttaaagttcccagcc

SEQ ID NO: 176901 - DNA, 25 bp, Canis familiaris
tgcagggtcttggtagagttccccc

SEQ ID NO: 176902 - DNA, 25 bp, Canis familiaris
tgcagggcatttctcagtgtgatcc

SEQ ID NO: 176903 - DNA, 25 bp, Canis familiaris
tgcagtgcagcagtaattatggtgc

SEQ ID NO: 176904 - DNA, 25 bp, Canis familiaris
tgcagctccagcgacagctaggatg

SEQ ID NO: 176905 - DNA, 25 bp, Canis familiaris
tgcagctgccctgctgctaggagga

SEQ ID NO: 176906 - DNA, 25 bp, Canis familiaris
tgcaggccctgcgagaagagtgaag

SEQ ID NO: 176907 - DNA, 25 bp, Canis familiaris
tgcacctcctgcaagaagagctgct

SEQ ID NO: 176908 - DNA, 25 bp, Canis familiaris
tgcagcacatcccagataccagctg

SEQ ID NO: 176909 - DNA, 25 bp, Canis familiaris
tgcagacatggccactgtcctgcag

SEQ ID NO: 176910 - DNA, 25 bp, Canis familiaris
tgcatgtcattctctacctgcaatt

SEQ ID NO: 176911 - DNA, 25 bp, Canis familiaris
tgcagctattgcactagtcattttc

SEQ ID NO: 176912 - DNA, 25 bp, Canis familiaris
tgcaccactattgatgtcatctatt

SEQ ID NO: 176913 - DNA, 25 bp, Canis familiaris
tgcagacctctttgatgttgtaatt

SEQ ID NO: 176914 - DNA, 25 bp, Canis familiaris
tgcaggcctggtcgtgtttgaagac

SEQ ID NO: 176915 - DNA, 25 bp, Canis familiaris
tgcagtgtgggctgttcctggaagc

SEQ ID NO: 176916 - DNA, 25 bp, Canis familiaris
tgcagttgtcacggtacctggatac

SEQ ID NO: 176917 - DNA, 25 bp, Canis familiaris
tgcagttacttccttcttggatgcc

SEQ ID NO: 176918 - DNA, 25 bp, Canis familiaris
tgcagtatactcttggtgcttaata

SEQ ID NO: 176919 - DNA, 25 bp, Canis familiaris
tgcatgtatcctctggctcgaatgc

SEQ ID NO: 176920 - DNA, 25 bp, Canis familiaris
tgcagctacctgtggccatatgact

SEQ ID NO: 176921 - DNA, 25 bp, Canis familiaris
tgcagcttctgtcagtactctgtct

SEQ ID NO: 176922 - DNA, 25 bp, Canis familiaris
tgcagcctcttggcgatgtttctca

SEQ ID NO: 176923 - DNA, 25 bp, Canis familiaris
tgcagagtctgtgggagtctcctgg

SEQ ID NO: 176924 - DNA, 25 bp, Canis familiaris
tgcatgagtcctggggttctgttgg

SEQ ID NO: 176925 - DNA, 25 bp, Canis familiaris
tgcatagtcgcgtgggtggttgttc

SEQ ID NO: 176926 - DNA, 25 bp, Canis familiaris
tgctattgagctttagggttatttc

SEQ ID NO: 176927 - DNA, 25 bp, Canis familiaris
tgcttctgtgttgagtggttttcct

SEQ ID NO: 176928 - DNA, 25 bp, Canis familiaris
tgcttcaggttattttctttccttc

SEQ ID NO: 176929 - DNA, 25 bp, Canis familiaris
tgcattcagattttttttttccctt

SEQ ID NO: 176930 - DNA, 25 bp, Canis familiaris
tgcattaccttcattgttattacat

SEQ ID NO: 176931 - DNA, 25 bp, Canis familiaris
tgcatttccgatgtggtttcgctct

SEQ ID NO: 176932 - DNA, 25 bp, Canis familiaris
tgccgtcacaaccggatttgccagt

SEQ ID NO: 176933 - DNA, 25 bp, Canis familiaris
tgccctccaaggtcgtgtataagta

SEQ ID NO: 176934 - DNA, 25 bp, Canis familiaris
tgcagccccacaggcaggtaaaggt

SEQ ID NO: 176935 - DNA, 25 bp, Canis familiaris
tgcaggccttcaccagggaatgagt

SEQ ID NO: 176936 - DNA, 25 bp, Canis familiaris
tgcttgtaccagccagggaaatgct

SEQ ID NO: 176937 - DNA, 25 bp, Canis familiaris
tgccttacttgcggggaaccttaag

SEQ ID NO: 176938 - DNA, 25 bp, Canis familiaris
tgccttaattgtgggggagagcctt

SEQ ID NO: 176939 - DNA, 25 bp, Canis familiaris
tgctttattatttggggggcttcag

SEQ ID NO: 176940 - DNA, 25 bp, Canis familiaris
tgcttataatttagccagggtttct

SEQ ID NO: 176941 - DNA, 25 bp, Canis familiaris
tgctttctattctccagtggtttcc

SEQ ID NO: 176942 - DNA, 25 bp, Canis familiaris
tgcttcctatcctgcaagggcttat

SEQ ID NO: 176943 - DNA, 25 bp, Canis familiaris
tgcaggcctccgtgaaagtgttcag

SEQ ID NO: 176944 - DNA, 25 bp, Canis familiaris
tgcagagacccatcccaagtgggac

SEQ ID NO: 176945 - DNA, 25 bp, Canis familiaris
tgcagcaatcggccccaaagtgggc

SEQ ID NO: 176946 - DNA, 25 bp, Canis familiaris
tgcatgcagggtcctccaatatggc

SEQ ID NO: 176947 - DNA, 25 bp, Canis familiaris
tgcagcgggctcgcgcaaaggagcc

SEQ ID NO: 176948 - DNA, 25 bp, Canis familiaris
tgcagggaccgcagacagaggcgcg

SEQ ID NO: 176949 - DNA, 25 bp, Canis familiaris
tgcgggcacctacagtggaggcaac

SEQ ID NO: 176950 - DNA, 25 bp, Canis familiaris
tgcaggagccgcaagcggtgctggg

SEQ ID NO: 176951 - DNA, 25 bp, Canis familiaris
tgcaggacctgaatgaccgcctggc

SEQ ID NO: 176952 - DNA, 25 bp, Canis familiaris
tgcgggtcataagcttgcgttgatt

SEQ ID NO: 176953 - DNA, 25 bp, Canis familiaris
tgccggtgatactggtagttggtgt

SEQ ID NO: 176954 - DNA, 25 bp, Canis familiaris
tgctaggctttggggtgagggtggt

SEQ ID NO: 176955 - DNA, 25 bp, Canis familiaris
tgctaccttcttagggattccggga

SEQ ID NO: 176956 - DNA, 25 bp, Canis familiaris
tgctgcacgttctggggttttgtgg

SEQ ID NO: 176957 - DNA, 25 bp, Canis familiaris
tgctcaggcttctgttgcctagtac

SEQ ID NO: 176958 - DNA, 25 bp, Canis familiaris
tgctttctctcaagttcactttcac

SEQ ID NO: 176959 - DNA, 25 bp, Canis familiaris
tgcttctcttgcaaggctaattatc

SEQ ID NO: 176960 - DNA, 25 bp, Canis familiaris
tgcttccttggtataaatatcccgt

SEQ ID NO: 176961 - DNA, 25 bp, Canis familiaris
tgcccctgtagtacatttctacccc

SEQ ID NO: 176962 - DNA, 25 bp, Canis familiaris
tcgttttagtccttttactactcat

SEQ ID NO: 176963 - DNA, 25 bp, Canis familiaris
tgcctttatatttcctttcctagaa

SEQ ID NO: 176964 - DNA, 25 bp, Canis familiaris
tgccatttttcctcttggtttgcaa

SEQ ID NO: 176965 - DNA, 25 bp, Canis familiaris
tgcagacttttcatttggagtttga

SEQ ID NO: 176966 - DNA, 25 bp, Canis familiaris
tgcagactttgtagctcacggagag

SEQ ID NO: 176967 - DNA, 25 bp, Canis familiaris
tgcagacattatcttggcagcgaat

SEQ ID NO: 176968 - DNA, 25 bp, Canis familiaris
tgctactctcagctcggagcatgaa

SEQ ID NO: 176969 - DNA, 25 bp, Canis familiaris
tgctttgtctggtggaggaaccgca

SEQ ID NO: 176970 - DNA, 25 bp, Canis familiaris
tgcatctgatttggaggggctaccc

SEQ ID NO: 176971 - DNA, 25 bp, Canis familiaris
tgctcatcttccgggagattcactc

SEQ ID NO: 176972 - DNA, 25 bp, Canis familiaris
tgctcattttagaccagattccatc

SEQ ID NO: 176973 - DNA, 25 bp, Canis familiaris
tgctgatttgtgaacccattcctca

SEQ ID NO: 176974 - DNA, 25 bp, Canis familiaris
tgcatagtctgacactggatcccca

SEQ ID NO: 176975 - DNA, 25 bp, Canis familiaris
tgcagagatctctcttagacctccc

SEQ ID NO: 176976 - DNA, 25 bp, Canis familiaris
tgcagacttgcagctggagtcctcc

SEQ ID NO: 176977 - DNA, 25 bp, Canis familiaris
tgcattcatctagctgacagtccgc

SEQ ID NO: 176978 - DNA, 25 bp, Canis familiaris
tgcatcaaccacaacatcatgtccc

SEQ ID NO: 176979 - DNA, 25 bp, Canis familiaris
tgcatgaacaaccaaatctccacag

SEQ ID NO: 176980 - DNA, 25 bp, Canis familiaris
tgcataccaaagccgactacactga

SEQ ID NO: 176981 - DNA, 25 bp, Canis familiaris
tgcataagctacagccaggacctct

SEQ ID NO: 176982 - DNA, 25 bp, Canis familiaris
tgcttcagctacacagcgagcagct

SEQ ID NO: 176983 - DNA, 25 bp, Canis familiaris
tgcatacaatactcacaagctttat

SEQ ID NO: 176984 - DNA, 25 bp, Canis familiaris
tgctacagtctctgcagaacttact

SEQ ID NO: 176985 - DNA, 25 bp, Canis familiaris
tgctcacaggtctcttaatcacact

SEQ ID NO: 176986 - DNA, 25 bp, Canis familiaris
tgctagagtttccacttgcacacac

SEQ ID NO: 176987 - DNA, 25 bp, Canis familiaris
tgctcaagtattccagtgtcacctc

SEQ ID NO: 176988 - DNA, 25 bp, Canis familiaris
tgcatcaggcttcaagctgttccct

SEQ ID NO: 176989 - DNA, 25 bp, Canis familiaris
tgctgagacctcaagagtttccctc

SEQ ID NO: 176990 - DNA, 25 bp, Canis familiaris
tgctgaaccccattgaatatccttt

SEQ ID NO: 176991 - DNA, 25 bp, Canis familiaris
tgctctactgtcgactcaagatcca

SEQ ID NO: 176992 - DNA, 25 bp, Canis familiaris
tgcatgtttgtccatgctccaatcc

SEQ ID NO: 176993 - DNA, 25 bp, Canis familiaris
tgcatggtgttggagaacattgctc

SEQ ID NO: 176994 - DNA, 25 bp, Canis familiaris
tgcatgcgtgttcagttctttgttt

SEQ ID NO: 176995 - DNA, 25 bp, Canis familiaris
tgcatcagcttacagttactatcat

SEQ ID NO: 176996 - DNA, 25 bp, Canis familiaris
tgcatggcgcgcgatagttacccat

SEQ ID NO: 176997 - DNA, 25 bp, Canis familiaris
tgcagtgcgccgaggacatcgcgca

SEQ ID NO: 176998 - DNA, 25 bp, Canis familiaris
tgcagagctcggtgtgaccaagcgg

SEQ ID NO: 176999 - DNA, 25 bp, Canis familiaris
tgcaggcctggctgtgtgtaggcgc

SEQ ID NO: 177000 - DNA, 25 bp, Canis familiaris
tgcatccactggtgctgccaaggct

SEQ ID NO: 177001 - DNA, 25 bp, Canis familiaris
tgcatcacctggtgctcatcatgac

SEQ ID NO: 177002 - DNA, 25 bp, Canis familiaris
tgcatccctgtgtcctcaggaaaga

SEQ ID NO: 177003 - DNA, 25 bp, Canis familiaris
tgcattgcctgcttttctcagaaaa

SEQ ID NO: 177004 - DNA, 25 bp, Canis familiaris
tgctgatgtatgatgttgccaacca

SEQ ID NO: 177005 - DNA, 25 bp, Canis familiaris
tgctgtttgtccatgaaaccaccta

SEQ ID NO: 177006 - DNA, 25 bp, Canis familiaris
tgctttttacaaacaagcccgccaa

SEQ ID NO: 177007 - DNA, 25 bp, Canis familiaris
tgcttgttagaaaacaaccttctcc

SEQ ID NO: 177008 - DNA, 25 bp, Canis familiaris
tgcttttaatgaaaccctcttcaga

SEQ ID NO: 177009 - DNA, 25 bp, Canis familiaris
tgctggttcactaaatctctcttcc

SEQ ID NO: 177010 - DNA, 25 bp, Canis familiaris
tgcatgtgatgtgttcttctagccc

SEQ ID NO: 177011 - DNA, 25 bp, Canis familiaris
tgcattgttgtttctttccaaaaaa

SEQ ID NO: 177012 - DNA, 25 bp, Canis familiaris
tgcatagtttattttctcgacccaa

SEQ ID NO: 177013 - DNA, 25 bp, Canis familiaris
tgcttgttgtgtctagggactccaa

SEQ ID NO: 177014 - DNA, 25 bp, Canis familiaris
tgctttttgtttgtatgcacctaaa

SEQ ID NO: 177015 - DNA, 25 bp, Canis familiaris
tgcttctaagtaattgtatcacgat

SEQ ID NO: 177016 - DNA, 25 bp, Canis familiaris
tgctttgagcagatccaggaatttg

SEQ ID NO: 177017 - DNA, 25 bp, Canis familiaris
tgctttacacacagccatgtatttc

SEQ ID NO: 177018 - DNA, 25 bp, Canis familiaris
tgctatgtaaacaccagtcgtcctg

SEQ ID NO: 177019 - DNA, 25 bp, Canis familiaris
tccaggaagcctggccaagctgtcc

SEQ ID NO: 177020 - DNA, 25 bp, Canis familiaris
tgctcaggacatggtggacagggtc

SEQ ID NO: 177021 - DNA, 25 bp, Canis familiaris
tgctaggactccgaagcgcgtgagc

SEQ ID NO: 177022 - DNA, 25 bp, Canis familiaris
tgctatgagcgctccaacgagtacc

SEQ ID NO: 177023 - DNA, 25 bp, Canis familiaris
tgctcaagcagctacacaccaaggc

SEQ ID NO: 177024 - DNA, 25 bp, Canis familiaris
tgcatcatcaaaaccagcagcagat

SEQ ID NO: 177025 - DNA, 25 bp, Canis familiaris
tgcatctgaagacatcagccacatt

SEQ ID NO: 177026 - DNA, 25 bp, Canis familiaris
tgctcatcagagagtctgcttctct

SEQ ID NO: 177027 - DNA, 25 bp, Canis familiaris
tgctcatcatgggcgtcacatacac

SEQ ID NO: 177028 - DNA, 25 bp, Canis familiaris
tgcatcatcatgtgcttcaagcccc

SEQ ID NO: 177029 - DNA, 25 bp, Canis familiaris
tgctcatcatcacgtcttatgcacg

SEQ ID NO: 177030 - DNA, 25 bp, Canis familiaris
tgcatgcagctgactgacttcatcc

SEQ ID NO: 177031 - DNA, 25 bp, Canis familiaris
tgcatgtgctgttgtgccgatgctc

SEQ ID NO: 177032 - DNA, 25 bp, Canis familiaris
tgcagtgctgggcatcgtgatgctg

SEQ ID NO: 177033 - DNA, 25 bp, Canis familiaris
tgcagatcggggactgtgctgcgcc

SEQ ID NO: 177034 - DNA, 25 bp, Canis familiaris
tgcagatgggtgctatcagagcctc

SEQ ID NO: 177035 - DNA, 25 bp, Canis familiaris
tgcagggaggctttcaggccgggaa

SEQ ID NO: 177036 - DNA, 25 bp, Canis familiaris
tgcaggaagagcacagcggtccgag

SEQ ID NO: 177037 - DNA, 25 bp, Canis familiaris
tgcagtggggttcgcgagatgttac

SEQ ID NO: 177038 - DNA, 25 bp, Canis familiaris
tgcagtgagaggagagccagattga

SEQ ID NO: 177039 - DNA, 25 bp, Canis familiaris
tgctggatgaagggccaaatggaat

SEQ ID NO: 177040 - DNA, 25 bp, Canis familiaris
tgctccagactgtgcccaaggaaca

SEQ ID NO: 177041 - DNA, 25 bp, Canis familiaris
tgccaaacggtcacaagtatgccaa

SEQ ID NO: 177042 - DNA, 25 bp, Canis familiaris
tgcgaaaagttcagaatgtatgtga

SEQ ID NO: 177043 - DNA, 25 bp, Canis familiaris
tgcatgtacaagttatttagtcgtg

SEQ ID NO: 177044 - DNA, 25 bp, Canis familiaris
tgcatgtgaccacttttgttggcct

SEQ ID NO: 177045 - DNA, 25 bp, Canis familiaris
tgctgtggccctttagttgccagca

SEQ ID NO: 177046 - DNA, 25 bp, Canis familiaris
tgcaggccctgttgatagtagccaa

SEQ ID NO: 177047 - DNA, 25 bp, Canis familiaris
tgcagtcttcagttgtagctacctc

SEQ ID NO: 177048 - DNA, 25 bp, Canis familiaris
tgcagatcttcgtgaagaccctgac

SEQ ID NO: 177049 - DNA, 25 bp, Canis familiaris
tgcagatcttcgtgaagaccctgac

SEQ ID NO: 177050 - DNA, 25 bp, Canis familiaris
tgcagtcaccgaaagagagcgccta

SEQ ID NO: 177051 - DNA, 25 bp, Canis familiaris
tgcagtcctaagtagagcccctgtc

SEQ ID NO: 177052 - DNA, 25 bp, Canis familiaris
tgcttgcctaagtgattcttttcct

SEQ ID NO: 177053 - DNA, 25 bp, Canis familiaris
tgcagtcctaagccttgacttctct

SEQ ID NO: 177054 - DNA, 25 bp, Canis familiaris
tgcagtccaaggttgtggctgtttg

SEQ ID NO: 177055 - DNA, 25 bp, Canis familiaris
tgcagtccaagtttggtgctgtatt

SEQ ID NO: 177056 - DNA, 25 bp, Canis familiaris
tgcagtccatagaagatcgtgagaa

SEQ ID NO: 177057 - DNA, 25 bp, Canis familiaris
tgcagtccaagtacatcggcacggg

SEQ ID NO: 177058 - DNA, 25 bp, Canis familiaris
tgcatgtctaagtacgcacggccgg

SEQ ID NO: 177059 - DNA, 25 bp, Canis familiaris
tgcatgtctaagtacgcacggccgg

SEQ ID NO: 177060 - DNA, 25 bp, Canis familiaris
tgcagtgttagcttggctctgcgcc

SEQ ID NO: 177061 - DNA, 25 bp, Canis familiaris
tgcaggtcactgttactctgcccaa

SEQ ID NO: 177062 - DNA, 25 bp, Canis familiaris
tgcaggctagatttccagctgggaa

SEQ ID NO: 177063 - DNA, 25 bp, Canis familiaris
tgcatgtgtacatgcatccctggtg

SEQ ID NO: 177064 - DNA, 25 bp, Canis familiaris
tgcatgtgtgaagcatcttccggcc

SEQ ID NO: 177065 - DNA, 25 bp, Canis familiaris
tgctggtaaccactattctactctc

SEQ ID NO: 177066 - DNA, 25 bp, Canis familiaris
tgcttagtacaagcttctcacttcc

SEQ ID NO: 177067 - DNA, 25 bp, Canis familiaris
tgctctttaaacttcttcaactctt

SEQ ID NO: 177068 - DNA, 25 bp, Canis familiaris
tgcatattataatcctcctacacac

SEQ ID NO: 177069 - DNA, 25 bp, Canis familiaris
tgctagaaacaacccccatgcagac

SEQ ID NO: 177070 - DNA, 25 bp, Canis familiaris
tgctagaaacacacagcctatccaa

SEQ ID NO: 177071 - DNA, 25 bp, Canis familiaris
tgcttaactgacacgagctacccac

SEQ ID NO: 177072 - DNA, 25 bp, Canis familiaris
tgctgttactactcaaatcacccac

SEQ ID NO: 177073 - DNA, 25 bp, Canis familiaris
tgcgttaggaggaacctgcagccca

SEQ ID NO: 177074 - DNA, 25 bp, Canis familiaris
tgcttctggggaaccacgtgcccag

SEQ ID NO: 177075 - DNA, 25 bp, Canis familiaris
tgctctctggggtagactcaagtgc

SEQ ID NO: 177076 - DNA, 25 bp, Canis familiaris
tgcttatggccctggttagctggag

SEQ ID NO: 177077 - DNA, 25 bp, Canis familiaris
tgcttcatggcctacacgtttgaga

SEQ ID NO: 177078 - DNA, 25 bp, Canis familiaris
tgcttcatggcctacacgtttgaga

SEQ ID NO: 177079 - DNA, 25 bp, Canis familiaris
tgcttcatggcctacacgtttgaga

SEQ ID NO: 177080 - DNA, 25 bp, Canis familiaris
tgcttcatggcctacacgtttgaga

SEQ ID NO: 177081 - DNA, 25 bp, Canis familiaris
tgctgtgtggttgcaggctttgggt

SEQ ID NO: 177082 - DNA, 25 bp, Canis familiaris
tgcttgtgcagatgtatagccttgc

SEQ ID NO: 177083 - DNA, 25 bp, Canis familiaris
tgcttgctgaatcactgatcctcgc

SEQ ID NO: 177084 - DNA, 25 bp, Canis familiaris
tgcatatgcagattccacagcaccc

SEQ ID NO: 177085 - DNA, 25 bp, Canis familiaris
tgcagtgggcacaatcgcagccctc

SEQ ID NO: 177086 - DNA, 25 bp, Canis familiaris
tgcagggaactcaaggcgcctgccc

SEQ ID NO: 177087 - DNA, 25 bp, Canis familiaris
tgcagggcagaggctggaggggcgt

SEQ ID NO: 177088 - DNA, 25 bp, Canis familiaris
tgcagggtgaggggcgtctggctgc

SEQ ID NO: 177089 - DNA, 25 bp, Canis familiaris
tgcatgggaaggaggttggcagcat

SEQ ID NO: 177090 - DNA, 25 bp, Canis familiaris
tgctgggacaaggttgctggccctg

SEQ ID NO: 177091 - DNA, 25 bp, Canis familiaris
tgctctgtgataactctttcccact

SEQ ID NO: 177092 - DNA, 25 bp, Canis familiaris
tgctcagtgttaattactccccatt

SEQ ID NO: 177093 - DNA, 25 bp, Canis familiaris
tgctcggctcagattactcagcttt

SEQ ID NO: 177094 - DNA, 25 bp, Canis familiaris
tgctcagggcaggggatctcagcca

SEQ ID NO: 177095 - DNA, 25 bp, Canis familiaris
tgctggtgatcctggactcccaggt

SEQ ID NO: 177096 - DNA, 25 bp, Canis familiaris
tgcaggagtgcctttacatcctcag

SEQ ID NO: 177097 - DNA, 25 bp, Canis familiaris
tgctgagaagcccatttccaccagc

SEQ ID NO: 177098 - DNA, 25 bp, Canis familiaris
tgcaggtggctgtatgttccccagc

SEQ ID NO: 177099 - DNA, 25 bp, Canis familiaris
tgcaggtggagttatcagcctcccg

SEQ ID NO: 177100 - DNA, 25 bp, Canis familiaris
tgcaggtggagttcatcaaccccat

SEQ ID NO: 177101 - DNA, 25 bp, Canis familiaris
tgcatggtccagaccatcgaccacc

SEQ ID NO: 177102 - DNA, 25 bp, Canis familiaris
tgcaggcccagattcaggaccagca

SEQ ID NO: 177103 - DNA, 25 bp, Canis familiaris
tgcattggaagcttcggcagccagc

SEQ ID NO: 177104 - DNA, 25 bp, Canis familiaris
tgcttgatgaagcttgtgagcttgc

SEQ ID NO: 177105 - DNA, 25 bp, Canis familiaris
tgcttgacattttgctgtggctgcc

SEQ ID NO: 177106 - DNA, 25 bp, Canis familiaris
tgcttggattgagctgggcagccgc

SEQ ID NO: 177107 - DNA, 25 bp, Canis familiaris
tgctacgcatagcttgggcacgtgg

SEQ ID NO: 177108 - DNA, 25 bp, Canis familiaris
tgcttagagacggtggagccctgcc

SEQ ID NO: 177109 - DNA, 25 bp, Canis familiaris
tgcttcaagttgggacactctgctc

SEQ ID NO: 177110 - DNA, 25 bp, Canis familiaris
tgcttcagagtcaggaccatccacc

SEQ ID NO: 177111 - DNA, 25 bp, Canis familiaris
tgcttgcgtgtgagtgcacctcact

SEQ ID NO: 177112 - DNA, 25 bp, Canis familiaris
tgcatgggaggtagtgcagcctgcc

SEQ ID NO: 177113 - DNA, 25 bp, Canis familiaris
tgcatcggaagctgtgcttatcccc

SEQ ID NO: 177114 - DNA, 25 bp, Canis familiaris
tgcatctgaatgctttttatcccct

SEQ ID NO: 177115 - DNA, 25 bp, Canis familiaris
tgcagtgttgcagcttttattccct

SEQ ID NO: 177116 - DNA, 25 bp, Canis familiaris
tgctggcttgcagtcttttttacca

SEQ ID NO: 177117 - DNA, 25 bp, Canis familiaris
tgctcgcaaattatgtctttaccac

SEQ ID NO: 177118 - DNA, 25 bp, Canis familiaris
tgccgggatcaaagtctgttctggc

SEQ ID NO: 177119 - DNA, 25 bp, Canis familiaris
tgccgggatcaaagtctgttctggc

SEQ ID NO: 177120 - DNA, 25 bp, Canis familiaris
tgctatgggactattgctgtgatcg

SEQ ID NO: 177121 - DNA, 25 bp, Canis familiaris
tgcttgggatccacagggctggtag

SEQ ID NO: 177122 - DNA, 25 bp, Canis familiaris
tgctgtgggtagggagggggcttgc

SEQ ID NO: 177123 - DNA, 25 bp, Canis familiaris
tgcttgggctgagcggtggaggcct

SEQ ID NO: 177124 - DNA, 25 bp, Canis familiaris
tgcattgagctccccgggtggagcc

SEQ ID NO: 177125 - DNA, 25 bp, Canis familiaris
tgcaggccatcctcgagcatgagga

SEQ ID NO: 177126 - DNA, 25 bp, Canis familiaris
tgcatgtgccatttcctacagagtt

SEQ ID NO: 177127 - DNA, 25 bp, Canis familiaris
tgcatgtgccaattgttaccgtagt

SEQ ID NO: 177128 - DNA, 25 bp, Canis familiaris
tgcttgtcacaggatatcccgggat

SEQ ID NO: 177129 - DNA, 25 bp, Canis familiaris
tgctgatgacagtgtttgccgggag

SEQ ID NO: 177130 - DNA, 25 bp, Canis familiaris
tgcatggacagacagcttgccctga

SEQ ID NO: 177131 - DNA, 25 bp, Canis familiaris
tgctgtatggagtcagctggcccgc

SEQ ID NO: 177132 - DNA, 25 bp, Canis familiaris
tgctgttgtgaccacgagtcgcatg

SEQ ID NO: 177133 - DNA, 25 bp, Canis familiaris
tgctgcaggctgccgcagaagtcga

SEQ ID NO: 177134 - DNA, 25 bp, Canis familiaris
tgctgcaaatctccaaaggccgcta

SEQ ID NO: 177135 - DNA, 25 bp, Canis familiaris
tgctgatcgatccgcaaacactgcg

SEQ ID NO: 177136 - DNA, 25 bp, Canis familiaris
tgctcacccagccagatgcaattat

SEQ ID NO: 177137 - DNA, 25 bp, Canis familiaris
tgctcatcatcggctggtacatatt

SEQ ID NO: 177138 - DNA, 25 bp, Canis familiaris
tgctccagcagcgagactactgtgc

SEQ ID NO: 177139 - DNA, 25 bp, Canis familiaris
tgctgaagcggaggctgctcttgcc

SEQ ID NO: 177140 - DNA, 25 bp, Canis familiaris
tgctcaaggtggggctgcagccctg

SEQ ID NO: 177141 - DNA, 25 bp, Canis familiaris
tgctactggctggctagtggccacc

SEQ ID NO: 177142 - DNA, 25 bp, Canis familiaris
tgctactttggttgtagccactccc

SEQ ID NO: 177143 - DNA, 25 bp, Canis familiaris
tgctagttatgagtactcccttccc

SEQ ID NO: 177144 - DNA, 25 bp, Canis familiaris
tgcttgtataattgaccacctcgcc

SEQ ID NO: 177145 - DNA, 25 bp, Canis familiaris
tgctttgtaagtggccagcctggcc

SEQ ID NO: 177146 - DNA, 25 bp, Canis familiaris
tgcttttgatggtgtcacctgcccc

SEQ ID NO: 177147 - DNA, 25 bp, Canis familiaris
tgctttgaggtgtctgtgtttcccc

SEQ ID NO: 177148 - DNA, 25 bp, Canis familiaris
tgcatctaagggtctctgtttctcc

SEQ ID NO: 177149 - DNA, 25 bp, Canis familiaris
tgctcagcagagagccaagtttctc

SEQ ID NO: 177150 - DNA, 25 bp, Canis familiaris
tgcccagatgttccggttgcatctg

SEQ ID NO: 177151 - DNA, 25 bp, Canis familiaris
tgctccaggtgcagcagagtctggg

SEQ ID NO: 177152 - DNA, 25 bp, Canis familiaris
tgcatgcaagggaccactgtgtggc

SEQ ID NO: 177153 - DNA, 25 bp, Canis familiaris
tgctgcaatctgctgcaactggtgt

SEQ ID NO: 177154 - DNA, 25 bp, Canis familiaris
tgctaataaagcccgcgtttgtgcc

SEQ ID NO: 177155 - DNA, 25 bp, Canis familiaris
tgctaaaaccccatgttggctgctg

SEQ ID NO: 177156 - DNA, 25 bp, Canis familiaris
tgcttaactctcctgttgttttgtg

SEQ ID NO: 177157 - DNA, 25 bp, Canis familiaris
tgcttactctgtcttggttaatggg

SEQ ID NO: 177158 - DNA, 25 bp, Canis familiaris
tgctctcctctattttcgttattgg

SEQ ID NO: 177159 - DNA, 25 bp, Canis familiaris
tgctctgtgcattggtcctggttat

SEQ ID NO: 177160 - DNA, 25 bp, Canis familiaris
tgctctggctgagctggtggcttaa

SEQ ID NO: 177161 - DNA, 25 bp, Canis familiaris
tgcttgcatggcgcgcgatagttac

SEQ ID NO: 177162 - DNA, 25 bp, Canis familiaris
tgcttgtgcctgagctgtcaaaagt

SEQ ID NO: 177163 - DNA, 25 bp, Canis familiaris
tgcttgtctcaaagattaagccatg

SEQ ID NO: 177164 - DNA, 25 bp, Canis familiaris
tgcttgtctcaaagattaagccatg

SEQ ID NO: 177165 - DNA, 25 bp, Canis familiaris
tgctttctgccatacttaccatggt

SEQ ID NO: 177166 - DNA, 25 bp, Canis familiaris
tgcttttgctcagacctggtcatta

SEQ ID NO: 177167 - DNA, 25 bp, Canis familiaris
tgcattttatcaccctctgggcaat

SEQ ID NO: 177168 - DNA, 25 bp, Canis familiaris
tgcttttgcatctcctcaggcaaaa

SEQ ID NO: 177169 - DNA, 25 bp, Canis familiaris
tgctttgtgtcaattctaagaaaca

SEQ ID NO: 177170 - DNA, 25 bp, Canis familiaris
tgctgttcttttccttaggcacaga

SEQ ID NO: 177171 - DNA, 25 bp, Canis familiaris
tgcttacatgttcatctcttgccaa

SEQ ID NO: 177172 - DNA, 25 bp, Canis familiaris
tgctatagctgatctgttgctgtgc

SEQ ID NO: 177173 - DNA, 25 bp, Canis familiaris
tgctattctgatcgcgttatgggtg

SEQ ID NO: 177174 - DNA, 25 bp, Canis familiaris
tgcgtttgaagcaatttggggtttt

SEQ ID NO: 177175 - DNA, 25 bp, Canis familiaris
tgcgtttggtgttcctggggacacg

SEQ ID NO: 177176 - DNA, 25 bp, Canis familiaris
tgctttggtttgtcccttggacact

SEQ ID NO: 177177 - DNA, 25 bp, Canis familiaris
tgcttcttgtttctttccagtacat

SEQ ID NO: 177178 - DNA, 25 bp, Canis familiaris
tgctgtctttttcggttaccgtata

SEQ ID NO: 177179 - DNA, 25 bp, Canis familiaris
tgcttcccaactctgttatacgtta

SEQ ID NO: 177180 - DNA, 25 bp, Canis familiaris
tgcttccccgtgttttaatcggttg

SEQ ID NO: 177181 - DNA, 25 bp, Canis familiaris
tgcattccctttgtatttcacgtgt

SEQ ID NO: 177182 - DNA, 25 bp, Canis familiaris
tgcttccctagttctgatttcaaag

SEQ ID NO: 177183 - DNA, 25 bp, Canis familiaris
tgcttcctctcctgtgtattaatga

SEQ ID NO: 177184 - DNA, 25 bp, Canis familiaris
tgcttttttcacatgttttatggaa

SEQ ID NO: 177185 - DNA, 25 bp, Canis familiaris
tgctcattttcctgtttctttggca

SEQ ID NO: 177186 - DNA, 25 bp, Canis familiaris
tgctttattctgtttctttttagta

SEQ ID NO: 177187 - DNA, 25 bp, Canis familiaris
tgctatttcacttttcattgcttta

SEQ ID NO: 177188 - DNA, 25 bp, Canis familiaris
tgcatgtttcatttgttctttcgta

SEQ ID NO: 177189 - DNA, 25 bp, Canis familiaris
tgctctggcttttaattttctgtac

SEQ ID NO: 177190 - DNA, 25 bp, Canis familiaris
tgcatttgcttttagaccatttctt

SEQ ID NO: 177191 - DNA, 25 bp, Canis familiaris
tgctctgtctctcaagcatgcacat

SEQ ID NO: 177192 - DNA, 25 bp, Canis familiaris
tgcgtgcatttatcagatcaaaacc

SEQ ID NO: 177193 - DNA, 25 bp, Canis familiaris
tgcgtgcatttatcagatcaaaacc

SEQ ID NO: 177194 - DNA, 25 bp, Canis familiaris
tgcgtgcatttatcatgtctttcca

SEQ ID NO: 177195 - DNA, 25 bp, Canis familiaris
tgcttgacttgatggtcacttcccg

SEQ ID NO: 177196 - DNA, 25 bp, Canis familiaris
tgcttggcagaagggcccatgtcct

SEQ ID NO: 177197 - DNA, 25 bp, Canis familiaris
tgcattagagcacggagtccgtcca

SEQ ID NO: 177198 - DNA, 25 bp, Canis familiaris
tcttagccagagccagtgggaccca

SEQ ID NO: 177199 - DNA, 25 bp, Canis familiaris
tgcttggtagagccgtggtgtctcc

SEQ ID NO: 177200 - DNA, 25 bp, Canis familiaris
tgcttgcacagagacctggtggccc

SEQ ID NO: 177201 - DNA, 25 bp, Canis familiaris
tgcttcctgatgtatcgttgtggcc

SEQ ID NO: 177202 - DNA, 25 bp, Canis familiaris
tgcttttgcaggtctttctggcttt

SEQ ID NO: 177203 - DNA, 25 bp, Canis familiaris
tgcgttatgagacccatcacttgct

SEQ ID NO: 177204 - DNA, 25 bp, Canis familiaris
tgctgttatgaacacctcttgcgtc

SEQ ID NO: 177205 - DNA, 25 bp, Canis familiaris
tgcatgtttaacaagcttttgctat

SEQ ID NO: 177206 - DNA, 25 bp, Canis familiaris
tgcatttgtaactagtcatatcact

SEQ ID NO: 177207 - DNA, 25 bp, Canis familiaris
tgctatagttcccagctgctgtaat

SEQ ID NO: 177208 - DNA, 25 bp, Canis familiaris
tctaagtctacagtggctgtattcc

SEQ ID NO: 177209 - DNA, 25 bp, Canis familiaris
tgctcacagtggtaggacttttctc

SEQ ID NO: 177210 - DNA, 25 bp, Canis familiaris
tgcttcagtgaatggctcttgttat

SEQ ID NO: 177211 - DNA, 25 bp, Canis familiaris
tgctatagctattaccttgtgttat

SEQ ID NO: 177212 - DNA, 25 bp, Canis familiaris
tgcttttttactctggttctgctta

SEQ ID NO: 177213 - DNA, 25 bp, Canis familiaris
tgctgttgggtatctgggttctgct

SEQ ID NO: 177214 - DNA, 25 bp, Canis familiaris
tgctaacagttatctcaggggtgcc

SEQ ID NO: 177215 - DNA, 25 bp, Canis familiaris
tgctcccgatgtcacatagcgcggg

SEQ ID NO: 177216 - DNA, 25 bp, Canis familiaris
tgctcctcgttgtccagatgtggca

SEQ ID NO: 177217 - DNA, 25 bp, Canis familiaris
tgcttccagctttctagagcttaat

SEQ ID NO: 177218 - DNA, 25 bp, Canis familiaris
tgctttcatgctgtataactgtaaa

SEQ ID NO: 177219 - DNA, 25 bp, Canis familiaris
tgcttctcttccaattccattgaaa

SEQ ID NO: 177220 - DNA, 25 bp, Canis familiaris
tgctagcttttttctccatggcaaa

SEQ ID NO: 177221 - DNA, 25 bp, Canis familiaris
tgctaccttttgttctctggttcaa

SEQ ID NO: 177222 - DNA, 25 bp, Canis familiaris
tgcatacttttaattcctttggcta

SEQ ID NO: 177223 - DNA, 25 bp, Canis familiaris
tgctacatttgttatctttttccta

SEQ ID NO: 177224 - DNA, 25 bp, Canis familiaris
tgctgataatttgtcttctctcttt

SEQ ID NO: 177225 - DNA, 25 bp, Canis familiaris
tgcttcttgattgtgcttccacgat

SEQ ID NO: 177226 - DNA, 25 bp, Canis familiaris
tgctttcgatctctgcttatcgttc

SEQ ID NO: 177227 - DNA, 25 bp, Canis familiaris
tgcttggccactcagtgtcactgag

SEQ ID NO: 177228 - DNA, 25 bp, Canis familiaris
tgcttacaagcaccgttcacaatga

SEQ ID NO: 177229 - DNA, 25 bp, Canis familiaris
tgcttacaattgcctattacaactt

SEQ ID NO: 177230 - DNA, 25 bp, Canis familiaris
tgctatctccctggcttatgagcaa

SEQ ID NO: 177231 - DNA, 25 bp, Canis familiaris
tgctattcctgcagccatattgtat

SEQ ID NO: 177232 - DNA, 25 bp, Canis familiaris
tgctcttgcctgctggatttttaaa

SEQ ID NO: 177233 - DNA, 25 bp, Canis familiaris
tgcttctgcgggacttttcttaaat

SEQ ID NO: 177234 - DNA, 25 bp, Canis familiaris
tgcttgccctggagtcattcattta

SEQ ID NO: 177235 - DNA, 25 bp, Canis familiaris
tgcttggcatatgtggtcttcgttc

SEQ ID NO: 177236 - DNA, 25 bp, Canis familiaris
tgctagccatgaactgaccttcagt

SEQ ID NO: 177237 - DNA, 25 bp, Canis familiaris
tgctgaaagatattcccttatcatc

SEQ ID NO: 177238 - DNA, 25 bp, Canis familiaris
tgctgaaacatcagctctcgctcac

SEQ ID NO: 177239 - DNA, 25 bp, Canis familiaris
tgctcatggccagtggtctcagcca

SEQ ID NO: 177240 - DNA, 25 bp, Canis familiaris
tgctagctgcccagtagcagccagc

SEQ ID NO: 177241 - DNA, 25 bp, Canis familiaris
tgctaggccagcaggagagacccca

SEQ ID NO: 177242 - DNA, 25 bp, Canis familiaris
tgcgcatgggccagaaggactccta

SEQ ID NO: 177243 - DNA, 25 bp, Canis familiaris
tctgtggtactataggttgccttgc

SEQ ID NO: 177244 - DNA, 25 bp, Canis familiaris
tgcgggtgactttgagtattttctc

SEQ ID NO: 177245 - DNA, 25 bp, Canis familiaris
tgctggtgggctatggtactgactc

SEQ ID NO: 177246 - DNA, 25 bp, Canis familiaris
tgcgggctgagctgtttgagtcccc

SEQ ID NO: 177247 - DNA, 25 bp, Canis familiaris
tgctgtggggacttttgttcccctc

SEQ ID NO: 177248 - DNA, 25 bp, Canis familiaris
tgctgctggtggcatctttttgcct

SEQ ID NO: 177249 - DNA, 25 bp, Canis familiaris
tgctctggctgaggtccttatggcc

SEQ ID NO: 177250 - DNA, 25 bp, Canis familiaris
tgcttatctaagtcaaaatcatgcc

SEQ ID NO: 177251 - DNA, 25 bp, Canis familiaris
tgctttcatttacacagatatccat

SEQ ID NO: 177252 - DNA, 25 bp, Canis familiaris
tgctttcatttacacagatatccat

SEQ ID NO: 177253 - DNA, 25 bp, Canis familiaris
tgctttcccaactacgtatctgaca

SEQ ID NO: 177254 - DNA, 25 bp, Canis familiaris
tgctacttctagactaacaactgat

SEQ ID NO: 177255 - DNA, 25 bp, Canis familiaris
tgctacttctagactaacaactgat

SEQ ID NO: 177256 - DNA, 25 bp, Canis familiaris
tgcttcttctcacctataaaccaag

SEQ ID NO: 177257 - DNA, 25 bp, Canis familiaris
tgcttttctaactacaataccgggc

SEQ ID NO: 177258 - DNA, 25 bp, Canis familiaris
tgcttttctacctcacatgattggg

SEQ ID NO: 177259 - DNA, 25 bp, Canis familiaris
tgctatctgtggcccaccacatagt

SEQ ID NO: 177260 - DNA, 25 bp, Canis familiaris
tgctggtagagggacgcgctacatc

SEQ ID NO: 177261 - DNA, 25 bp, Canis familiaris
tgcggaagctggggcagctctcagc

SEQ ID NO: 177262 - DNA, 25 bp, Canis familiaris
tgctgagtatgtcgtggagtctact

SEQ ID NO: 177263 - DNA, 25 bp, Canis familiaris
tgctcgtttgtgtcgagtcagatcc

SEQ ID NO: 177264 - DNA, 25 bp, Canis familiaris
tgctatttctggtccaacagttcca

SEQ ID NO: 177265 - DNA, 25 bp, Canis familiaris
tgcttctgcttggacaatacctacc

SEQ ID NO: 177266 - DNA, 25 bp, Canis familiaris
tgcttcagcttttcataatctctcc

SEQ ID NO: 177267 - DNA, 25 bp, Canis familiaris
tgctctccatatctaactgtgaccc

SEQ ID NO: 177268 - DNA, 25 bp, Canis familiaris
tgctcttcatcttgacatccatgga

SEQ ID NO: 177269 - DNA, 25 bp, Canis familiaris
tgctttccttgctccatggaatgcc

SEQ ID NO: 177270 - DNA, 25 bp, Canis familiaris
tgctttgcctataccgtgggcagcc

SEQ ID NO: 177271 - DNA, 25 bp, Canis familiaris
tgctgggcctatctggggtgagccc

SEQ ID NO: 177272 - DNA, 25 bp, Canis familiaris
tgctgatgaccgtgtgaagaagtgc

SEQ ID NO: 177273 - DNA, 25 bp, Canis familiaris
tgctgaagcaggccgtgcggaagcc

SEQ ID NO: 177274 - DNA, 25 bp, Canis familiaris
tgctgcagaaggaggccagcctgcc

SEQ ID NO: 177275 - DNA, 25 bp, Canis familiaris
tgcatgctgaggcaacaccaccagc

SEQ ID NO: 177276 - DNA, 25 bp, Canis familiaris
tgcatgcagggattcacagccctcc

SEQ ID NO: 177277 - DNA, 25 bp, Canis familiaris
tgctgagggatgtgacccctctgcg

SEQ ID NO: 177278 - DNA, 25 bp, Canis familiaris
tgcttcactgagtaagccagcccgg

SEQ ID NO: 177279 - DNA, 25 bp, Canis familiaris
tgcttccaagcatatgtgacttcaa

SEQ ID NO: 177280 - DNA, 25 bp, Canis familiaris
tgcatcctaaggtttcactgtctca

SEQ ID NO: 177281 - DNA, 25 bp, Canis familiaris
tgctgcccaagggtgtttgcctaac

SEQ ID NO: 177282 - DNA, 25 bp, Canis familiaris
tgctggtccgagggtgttgtctgac

SEQ ID NO: 177283 - DNA, 25 bp, Canis familiaris
tgctgttccggttggttgagccatt

SEQ ID NO: 177284 - DNA, 25 bp, Canis familiaris
tgctgttgacagcgggattcacctt

SEQ ID NO: 177285 - DNA, 25 bp, Canis familiaris
tgctgtttcatccggattagcaccc

SEQ ID NO: 177286 - DNA, 25 bp, Canis familiaris
tgctgttatgcctgagcgaggaccc

SEQ ID NO: 177287 - DNA, 25 bp, Canis familiaris
tgcttctcagccagcatgggagcca

SEQ ID NO: 177288 - DNA, 25 bp, Canis familiaris
tgctttcagccttctcggggctgaa

SEQ ID NO: 177289 - DNA, 25 bp, Canis familiaris
tgcattgtcatcatcccgaacggaa

SEQ ID NO: 177290 - DNA, 25 bp, Canis familiaris
tgcatatattcaacaccgcaacccc

SEQ ID NO: 177291 - DNA, 25 bp, Canis familiaris
tgcattgatgaaaacccttcccagc

SEQ ID NO: 177292 - DNA, 25 bp, Canis familiaris
tgcttgaaatagcccagtctccgca

SEQ ID NO: 177293 - DNA, 25 bp, Canis familiaris
tgcttgaaatagcccagtctccgca

SEQ ID NO: 177294 - DNA, 25 bp, Canis familiaris
tgctgtaatggagccgcctccaact

SEQ ID NO: 177295 - DNA, 25 bp, Canis familiaris
tgcttcaaggcaaaggcaccaaact

SEQ ID NO: 177296 - DNA, 25 bp, Canis familiaris
tgcattacaggcacactcacacaca

SEQ ID NO: 177297 - DNA, 25 bp, Canis familiaris
tgcattatcaacatcatattcagcc

SEQ ID NO: 177298 - DNA, 25 bp, Canis familiaris
tgctttcaaagtcatcatcccagcc

SEQ ID NO: 177299 - DNA, 25 bp, Canis familiaris
tgcttctgcaaagtggtacgatcga

SEQ ID NO: 177300 - DNA, 25 bp, Canis familiaris
tgctgctctgaatcttgtacgttcc

SEQ ID NO: 177301 - DNA, 25 bp, Canis familiaris
tgcccgatacccaatactttgtcga

SEQ ID NO: 177302 - DNA, 25 bp, Canis familiaris
tgctcgcaagaccttttctttgtca

SEQ ID NO: 177303 - DNA, 25 bp, Canis familiaris
tgctaaagattcattctccctctgc

SEQ ID NO: 177304 - DNA, 25 bp, Canis familiaris
tgcttcaaatttttgccctttgcct

SEQ ID NO: 177305 - DNA, 25 bp, Canis familiaris
tgcttagaatcattttcactcttat

SEQ ID NO: 177306 - DNA, 25 bp, Canis familiaris
tgcgtgtgacagtttcgcacctttc

SEQ ID NO: 177307 - DNA, 25 bp, Canis familiaris
tgcgagcaaagcattctcatcagtc

SEQ ID NO: 177308 - DNA, 25 bp, Canis familiaris
tgctcagactaccttctgcatggac

SEQ ID NO: 177309 - DNA, 25 bp, Canis familiaris
tgctcaacacaactgctctggatag

SEQ ID NO: 177310 - DNA, 25 bp, Canis familiaris
tgcatctgcaagggcgcatcggaca

SEQ ID NO: 177311 - DNA, 25 bp, Canis familiaris
tgctcatcatgccacggcatcggag

SEQ ID NO: 177312 - DNA, 25 bp, Canis familiaris
tgctccatcctcagcacctggagca

SEQ ID NO: 177313 - DNA, 25 bp, Canis familiaris
tgctgttccatggtgagcctggcac

SEQ ID NO: 177314 - DNA, 25 bp, Canis familiaris
tgctgctctcagcagtgggctcagc

SEQ ID NO: 177315 - DNA, 25 bp, Canis familiaris
tgctgtccagcttctagtgcatgtc

SEQ ID NO: 177316 - DNA, 25 bp, Canis familiaris
tgcttcgcaggcttgtgctgagtga

SEQ ID NO: 177317 - DNA, 25 bp, Canis familiaris
tgcttccacgcatgctgggtggttc

SEQ ID NO: 177318 - DNA, 25 bp, Canis familiaris
tgcttccagctgggcttgggagtga

SEQ ID NO: 177319 - DNA, 25 bp, Canis familiaris
tgcttggagagggtctaggagtgaa

SEQ ID NO: 177320 - DNA, 25 bp, Canis familiaris
tgcttgggagcgtgtggcgctggac

SEQ ID NO: 177321 - DNA, 25 bp, Canis familiaris
tgcttggagcagctcttgtgccgag

SEQ ID NO: 177322 - DNA, 25 bp, Canis familiaris
tgctatagagctgaccttgctccac

SEQ ID NO: 177323 - DNA, 25 bp, Canis familiaris
tgctgtatcctggtctttatccact

SEQ ID NO: 177324 - DNA, 25 bp, Canis familiaris
tgctgattgccttactactagccat

SEQ ID NO: 177325 - DNA, 25 bp, Canis familiaris
tgctctgaacattgaaacggccatc

SEQ ID NO: 177326 - DNA, 25 bp, Canis familiaris
tgctaaactgggaactggccacctc

SEQ ID NO: 177327 - DNA, 25 bp, Canis familiaris
tgctaacctcgaagatgcaggcccc

SEQ ID NO: 177328 - DNA, 25 bp, Canis familiaris
tgctgacaccatcaagcagctgagc

SEQ ID NO: 177329 - DNA, 25 bp, Canis familiaris
tgctgagaccaagcacgctgaccag

SEQ ID NO: 177330 - DNA, 25 bp, Canis familiaris
tgctggaggccagcaactacggcgt

SEQ ID NO: 177331 - DNA, 25 bp, Canis familiaris
tgctggatgcccagaaccaacgctt

SEQ ID NO: 177332 - DNA, 25 bp, Canis familiaris
tgctgggaccatgttgacaacgttc

SEQ ID NO: 177333 - DNA, 25 bp, Canis familiaris
tgctcgggcgattcggaaacctgtg

SEQ ID NO: 177334 - DNA, 25 bp, Canis familiaris
tcgcgaccgtacaaaaaccacgttg

SEQ ID NO: 177335 - DNA, 25 bp, Canis familiaris
tgcgccacgcctaaaatgtaccggg

SEQ ID NO: 177336 - DNA, 25 bp, Canis familiaris
tgcggaatggctttaattattgagg

SEQ ID NO: 177337 - DNA, 25 bp, Canis familiaris
tgcccaaactttttatattcagagg

SEQ ID NO: 177338 - DNA, 25 bp, Canis familiaris
tcgcctacctttctctataaaattt

SEQ ID NO: 177339 - DNA, 25 bp, Canis familiaris
tccctaatttatcaagagaaacttc

SEQ ID NO: 177340 - DNA, 25 bp, Canis familiaris
tgccccaacaataaaacaaaacaca

SEQ ID NO: 177341 - DNA, 25 bp, Canis familiaris
tgcattaccaacaaataaataagaa

SEQ ID NO: 177342 - DNA, 25 bp, Canis familiaris
tgctttccctcttttaatacattac

SEQ ID NO: 177343 - DNA, 25 bp, Canis familiaris
tgctttggtccttagtactgtcatt

SEQ ID NO: 177344 - DNA, 25 bp, Canis familiaris
tgctttggtttttcttcatgctgat

SEQ ID NO: 177345 - DNA, 25 bp, Canis familiaris
tgctctatcgcttttgactttgctg

SEQ ID NO: 177346 - DNA, 25 bp, Canis familiaris
tgcttgatgcaggatctgaactttt

SEQ ID NO: 177347 - DNA, 25 bp, Canis familiaris
tgctgggcagcaatagcaccgtgtc

SEQ ID NO: 177348 - DNA, 25 bp, Canis familiaris
tgctggtcatgtgcatcacctacta

SEQ ID NO: 177349 - DNA, 25 bp, Canis familiaris
tgcttcctgtgccatacctaggcat

SEQ ID NO: 177350 - DNA, 25 bp, Canis familiaris
tgcttctcagtggcagggcttgaat

SEQ ID NO: 177351 - DNA, 25 bp, Canis familiaris
tgctctagcatgctgagggccggat

SEQ ID NO: 177352 - DNA, 25 bp, Canis familiaris
tgctctagcccatggagacgttcat

SEQ ID NO: 177353 - DNA, 25 bp, Canis familiaris
tgctgacacccatccagaatgtggt

SEQ ID NO: 177354 - DNA, 25 bp, Canis familiaris
tgcgaccatacattctcagaagatg

SEQ ID NO: 177355 - DNA, 25 bp, Canis familiaris
tgcggcgctagttgtagataacggc

SEQ ID NO: 177356 - DNA, 25 bp, Canis familiaris
tgccccaagttgcttgaccggagaa

SEQ ID NO: 177357 - DNA, 25 bp, Canis familiaris
tgcccgacggggactacgaggagaa

SEQ ID NO: 177358 - DNA, 25 bp, Canis familiaris
tgctcacgtctggggtctaggaggg

SEQ ID NO: 177359 - DNA, 25 bp, Canis familiaris
tcccccggggatgaggagaaggtgg

SEQ ID NO: 177360 - DNA, 25 bp, Canis familiaris
tgccccgaggggtaaggaagagtct

SEQ ID NO: 177361 - DNA, 25 bp, Canis familiaris
tgctcccgatggtgtcctggaagag

SEQ ID NO: 177362 - DNA, 25 bp, Canis familiaris
tgcccacgaggatcgcctgaaggac

SEQ ID NO: 177363 - DNA, 25 bp, Canis familiaris
tgccagatctggaatcccctagggc

SEQ ID NO: 177364 - DNA, 25 bp, Canis familiaris
tgctgcaactggcaaacctgccgac

SEQ ID NO: 177365 - DNA, 25 bp, Canis familiaris
tgctataggcggtacagcctggccc

SEQ ID NO: 177366 - DNA, 25 bp, Canis familiaris
tgcttaggcagttactcttccatgt

SEQ ID NO: 177367 - DNA, 25 bp, Canis familiaris
tgctctgcaggcttaactttttatg

SEQ ID NO: 177368 - DNA, 25 bp, Canis familiaris
tgctctgggtttttttcatttgctt

SEQ ID NO: 177369 - DNA, 25 bp, Canis familiaris
tgctctagcctctattttttttttt

SEQ ID NO: 177370 - DNA, 25 bp, Canis familiaris
tgctccgtccagttgtgtagtttta

SEQ ID NO: 177371 - DNA, 25 bp, Canis familiaris
tgctgctcgaccatttatttttcaa

SEQ ID NO: 177372 - DNA, 25 bp, Canis familiaris
tgctgcttacctgctggatttttca

SEQ ID NO: 177373 - DNA, 25 bp, Canis familiaris
tgctcttactgctctagctatttgg

SEQ ID NO: 177374 - DNA, 25 bp, Canis familiaris
tgctctggcccaggcatgagtacct

SEQ ID NO: 177375 - DNA, 25 bp, Canis familiaris
tgctcggtcatagtgcacagccggc

SEQ ID NO: 177376 - DNA, 25 bp, Canis familiaris
tgcttgcatgacagctccagcaggg

SEQ ID NO: 177377 - DNA, 25 bp, Canis familiaris
tgctgtgcaacaggacccaggtcag

SEQ ID NO: 177378 - DNA, 25 bp, Canis familiaris
tgctgctgacctgggacaatggacg

SEQ ID NO: 177379 - DNA, 25 bp, Canis familiaris
tgctgcgatccgtaactatggcatc

SEQ ID NO: 177380 - DNA, 25 bp, Canis familiaris
tgcggaacgacatgaatgctgctaa

SEQ ID NO: 177381 - DNA, 25 bp, Canis familiaris
tgctgtggacccttgacagtcttac

SEQ ID NO: 177382 - DNA, 25 bp, Canis familiaris
tgctttggcccagacagtgttaact

SEQ ID NO: 177383 - DNA, 25 bp, Canis familiaris
tgcttccgcccagaagtattgtccc

SEQ ID NO: 177384 - DNA, 25 bp, Canis familiaris
tgctgttttccagaatgtttgtctg

SEQ ID NO: 177385 - DNA, 25 bp, Canis familiaris
tgcgttctcctcagatggtgtctgc

SEQ ID NO: 177386 - DNA, 25 bp, Canis familiaris
tgctgttgcatggtcgcgagggatc

SEQ ID NO: 177387 - DNA, 25 bp, Canis familiaris
tgcttctgcatcctcctgaaaaaaa

SEQ ID NO: 177388 - DNA, 25 bp, Canis familiaris
tgcttgtgctcgctctttgaaataa

SEQ ID NO: 177389 - DNA, 25 bp, Canis familiaris
tgcttgttcggtgacatgagacaga

SEQ ID NO: 177390 - DNA, 25 bp, Canis familiaris
tgctttccgtggcactgcatacaat

SEQ ID NO: 177391 - DNA, 25 bp, Canis familiaris
tgctttgcctgtgggtctgtaggaa

SEQ ID NO: 177392 - DNA, 25 bp, Canis familiaris
tgcgtcacgcacatgtggtgtagga

SEQ ID NO: 177393 - DNA, 25 bp, Canis familiaris
tgctgctcagagtccttggtgaaca

SEQ ID NO: 177394 - DNA, 25 bp, Canis familiaris
tgctgctcaactgccttatgtacaa

SEQ ID NO: 177395 - DNA, 25 bp, Canis familiaris
tgctcaacacgggctttttacaaac

SEQ ID NO: 177396 - DNA, 25 bp, Canis familiaris
tgcgctcccggagctggggaaagac

SEQ ID NO: 177397 - DNA, 25 bp, Canis familiaris
tgctggaccagggccttgggatagg

SEQ ID NO: 177398 - DNA, 25 bp, Canis familiaris
tgctgagcaaacccccggagaaggg

SEQ ID NO: 177399 - DNA, 25 bp, Canis familiaris
tgctgagaagtttgccgaggaagac

SEQ ID NO: 177400 - DNA, 25 bp, Canis familiaris
tgcttgaacttgaccagtgtgaaaa

SEQ ID NO: 177401 - DNA, 25 bp, Canis familiaris
tgctgggtttgtccgcatgttgtaa

SEQ ID NO: 177402 - DNA, 25 bp, Canis familiaris
tgctgggtttgtccgcatgttgtaa

SEQ ID NO: 177403 - DNA, 25 bp, Canis familiaris
tgctgagtgctcagtactctgcttt

SEQ ID NO: 177404 - DNA, 25 bp, Canis familiaris
tgctatttacgttcttgctttttta

SEQ ID NO: 177405 - DNA, 25 bp, Canis familiaris
tgctttttagtccattttgttttca

SEQ ID NO: 177406 - DNA, 25 bp, Canis familiaris
tgcttgctttttctgtatcttattt

SEQ ID NO: 177407 - DNA, 25 bp, Canis familiaris
tgctgtttttgtttcttgtttttgt

SEQ ID NO: 177408 - DNA, 25 bp, Canis familiaris
tgcttctttgttttttatgtccctt

SEQ ID NO: 177409 - DNA, 25 bp, Canis familiaris
tgcttcttgtaaaagcccgatccct

SEQ ID NO: 177410 - DNA, 25 bp, Canis familiaris
tgcttgcttgtaacatacccgtgac

SEQ ID NO: 177411 - DNA, 25 bp, Canis familiaris
tgcttttgtcagcctgagtccggaa

SEQ ID NO: 177412 - DNA, 25 bp, Canis familiaris
tgctgtctagtccctgggctaggga

SEQ ID NO: 177413 - DNA, 25 bp, Canis familiaris
tgctgtctctgatttctaggctagt

SEQ ID NO: 177414 - DNA, 25 bp, Canis familiaris
tgctgtttgttttctgccatgagtt

SEQ ID NO: 177415 - DNA, 25 bp, Canis familiaris
tgctgtcttttttgctctcagcttt

SEQ ID NO: 177416 - DNA, 25 bp, Canis familiaris
tgctttgtgctttgtgtttgttttg

SEQ ID NO: 177417 - DNA, 25 bp, Canis familiaris
tgctttatctgggtctgtttttttt

SEQ ID NO: 177418 - DNA, 25 bp, Canis familiaris
tgcttttctgtgttttctaattttt

SEQ ID NO: 177419 - DNA, 25 bp, Canis familiaris
tgcttctgtcatcgtttatctgtga

SEQ ID NO: 177420 - DNA, 25 bp, Canis familiaris
tgcgtatgctctctgtccaaatgag

SEQ ID NO: 177421 - DNA, 25 bp, Canis familiaris
tgctgttgacagctgtgccaggaag

SEQ ID NO: 177422 - DNA, 25 bp, Canis familiaris
tgcttctgacctgtccagcgaagag

SEQ ID NO: 177423 - DNA, 25 bp, Canis familiaris
tgcttctttcatgtcaggcgttaaa

SEQ ID NO: 177424 - DNA, 25 bp, Canis familiaris
tgcttctttgcatctgtggggttag

SEQ ID NO: 177425 - DNA, 25 bp, Canis familiaris
tgcttcctttcagtgtattcagtaa

SEQ ID NO: 177426 - DNA, 25 bp, Canis familiaris
tgctgatcgtgctaaattttcagta

SEQ ID NO: 177427 - DNA, 25 bp, Canis familiaris
tgctatgcggcttgaatatcctcga

SEQ ID NO: 177428 - DNA, 25 bp, Canis familiaris
tgctttgagctttatatccccaaca

SEQ ID NO: 177429 - DNA, 25 bp, Canis familiaris
tgctcttagctgagtgtcccgcggg

SEQ ID NO: 177430 - DNA, 25 bp, Canis familiaris
tgctttactcaaggctgacctgcgg

SEQ ID NO: 177431 - DNA, 25 bp, Canis familiaris
tgctttatggcaggcgcaaactcga

SEQ ID NO: 177432 - DNA, 25 bp, Canis familiaris
tgctttgagccagccaaccagatgg

SEQ ID NO: 177433 - DNA, 25 bp, Canis familiaris
tgcttctcacccaaatatctcagag

SEQ ID NO: 177434 - DNA, 25 bp, Canis familiaris
tgctgctcaactgctacaaccaagc

SEQ ID NO: 177435 - DNA, 25 bp, Canis familiaris
tgctctaacacagtaaccacacacc

SEQ ID NO: 177436 - DNA, 25 bp, Canis familiaris
tgcttatacaatggcacctaaagtc

SEQ ID NO: 177437 - DNA, 25 bp, Canis familiaris
tgctgctatacactcaccaataaga

SEQ ID NO: 177438 - DNA, 25 bp, Canis familiaris
tgctctatccgccccaaaaaggggt

SEQ ID NO: 177439 - DNA, 25 bp, Canis familiaris
tgcttcatcctacccagaaaacagc

SEQ ID NO: 177440 - DNA, 25 bp, Canis familiaris
tgctttgctttcacaaaaccactcc

SEQ ID NO: 177441 - DNA, 25 bp, Canis familiaris
tgctctggttacctaaaaatacccg

SEQ ID NO: 177442 - DNA, 25 bp, Canis familiaris
tgcttcctgtaccttgacatgcaaa

SEQ ID NO: 177443 - DNA, 25 bp, Canis familiaris
tgcttctttacccagtcagtgcatt

SEQ ID NO: 177444 - DNA, 25 bp, Canis familiaris
tgcttctctctacaggatggttgtg

SEQ ID NO: 177445 - DNA, 25 bp, Canis familiaris
tgctatcctcttctgggtagtggta

SEQ ID NO: 177446 - DNA, 25 bp, Canis familiaris
tgctgttccttttgcaggaaaggtc

SEQ ID NO: 177447 - DNA, 25 bp, Canis familiaris
tgctcaccaccctgggagagaggat

SEQ ID NO: 177448 - DNA, 25 bp, Canis familiaris
tgctaccgcctgtgggaatgtggca

SEQ ID NO: 177449 - DNA, 25 bp, Canis familiaris
tgctccactgtgcctaggaagagct

SEQ ID NO: 177450 - DNA, 25 bp, Canis familiaris
tgctctcctgctgtggcatggaagt

SEQ ID NO: 177451 - DNA, 25 bp, Canis familiaris
tgctctctatttagcggagaaatat

SEQ ID NO: 177452 - DNA, 25 bp, Canis familiaris
tgcttctttttggcggtatgttttt

SEQ ID NO: 177453 - DNA, 25 bp, Canis familiaris
tgctttctcttttttgctttttaat

SEQ ID NO: 177454 - DNA, 25 bp, Canis familiaris
tgcttttctttctttgatgttatac

SEQ ID NO: 177455 - DNA, 25 bp, Canis familiaris
tgctttttatcttttagttacacct

SEQ ID NO: 177456 - DNA, 25 bp, Canis familiaris
tgccggaatacctttggcttaccct

SEQ ID NO: 177457 - DNA, 25 bp, Canis familiaris
tgccgggaacaactgggccaaggcc

SEQ ID NO: 177458 - DNA, 25 bp, Canis familiaris
tgccgtgggggccagggacgaggcc

SEQ ID NO: 177459 - DNA, 25 bp, Canis familiaris
tgcctgtgacggggcaacgggggcg

SEQ ID NO: 177460 - DNA, 25 bp, Canis familiaris
tccaggactacgccttgtaggtcgc

SEQ ID NO: 177461 - DNA, 25 bp, Canis familiaris
tcaagacctacgctatctgcggggc

SEQ ID NO: 177462 - DNA, 25 bp, Canis familiaris
tccagccttgacctgtttctgggag

SEQ ID NO: 177463 - DNA, 25 bp, Canis familiaris
tgcgcccttatcactatttggagaa

SEQ ID NO: 177464 - DNA, 25 bp, Canis familiaris
tgctccctttgacctattcgagaac

SEQ ID NO: 177465 - DNA, 25 bp, Canis familiaris
tgctctcctttccttttggaagcaa

SEQ ID NO: 177466 - DNA, 25 bp, Canis familiaris
tgctcccacttcgtagcatttttgc

SEQ ID NO: 177467 - DNA, 25 bp, Canis familiaris
tgctcctcgcttgttgtaactacga

SEQ ID NO: 177468 - DNA, 25 bp, Canis familiaris
tgctgacatgcctgggatgtacgca

SEQ ID NO: 177469 - DNA, 25 bp, Canis familiaris
tgcgagcatgtctactgagcttgac

SEQ ID NO: 177470 - DNA, 25 bp, Canis familiaris
tgctgatgctgattgacatcccggc

SEQ ID NO: 177471 - DNA, 25 bp, Canis familiaris
tgctgcatgagctcacattccaggc

SEQ ID NO: 177472 - DNA, 25 bp, Canis familiaris
tgctcaagtccatgtgtgctggcca

SEQ ID NO: 177473 - DNA, 25 bp, Canis familiaris
tgctctaatccagggctctgtgtgc

SEQ ID NO: 177474 - DNA, 25 bp, Canis familiaris
tgctgctaccgggagtccttggtag

SEQ ID NO: 177475 - DNA, 25 bp, Canis familiaris
tgctggaccctggcagttttgtgga

SEQ ID NO: 177476 - DNA, 25 bp, Canis familiaris
tgctggagcgtcacataactttgga

SEQ ID NO: 177477 - DNA, 25 bp, Canis familiaris
tgctgggcgatctcatcaaggtgac

SEQ ID NO: 177478 - DNA, 25 bp, Canis familiaris
tgcctggcgtcattaccagaccaca

SEQ ID NO: 177479 - DNA, 25 bp, Canis familiaris
tgcggggacattacggacacactat

SEQ ID NO: 177480 - DNA, 25 bp, Canis familiaris
tgctggtggagcaccaggcccacga

SEQ ID NO: 177481 - DNA, 25 bp, Canis familiaris
tgctgtggcagacagccactgccca

SEQ ID NO: 177482 - DNA, 25 bp, Canis familiaris
tgctttgcagactgccttgcagcca

SEQ ID NO: 177483 - DNA, 25 bp, Canis familiaris
tgcttttgatcggcctgatgcccaa

SEQ ID NO: 177484 - DNA, 25 bp, Canis familiaris
tgctttttgcccattgaccagataa

SEQ ID NO: 177485 - DNA, 25 bp, Canis familiaris
tgccttctcggctcttgacacttag

SEQ ID NO: 177486 - DNA, 25 bp, Canis familiaris
tgcgttgtcaaatctgtaagctgta

SEQ ID NO: 177487 - DNA, 25 bp, Canis familiaris
tgccagttaaaatgtaatgcttcca

SEQ ID NO: 177488 - DNA, 25 bp, Canis familiaris
tgctcgcggaaaaggtcaccgtcca

SEQ ID NO: 177489 - DNA, 25 bp, Canis familiaris
tgctgctcgggaaggcctgagggaa

SEQ ID NO: 177490 - DNA, 25 bp, Canis familiaris
tgcccaagagacgggtgggctaaag

SEQ ID NO: 177491 - DNA, 25 bp, Canis familiaris
tgctcagcaacctggaggaagccaa

SEQ ID NO: 177492 - DNA, 25 bp, Canis familiaris
tgctggaggctttcgggaatgccaa

SEQ ID NO: 177493 - DNA, 25 bp, Canis familiaris
tgcgggagttctgggtggacaacac

SEQ ID NO: 177494 - DNA, 25 bp, Canis familiaris
tgcgggactttgtgaggagccacct

SEQ ID NO: 177495 - DNA, 25 bp, Canis familiaris
tgcgggaaggtgacggtgacccaca

SEQ ID NO: 177496 - DNA, 25 bp, Canis familiaris
tgcgtgagcagatgtcctcggagtc

SEQ ID NO: 177497 - DNA, 25 bp, Canis familiaris
tgctgtagaacgtcaccttgttcta

SEQ ID NO: 177498 - DNA, 25 bp, Canis familiaris
tgctgctagcaagactgtttttttc

SEQ ID NO: 177499 - DNA, 25 bp, Canis familiaris
tgctgcaaaagccatctgtgaccat

SEQ ID NO: 177500 - DNA, 25 bp, Canis familiaris
tgctgataacaattctgggcacagt

SEQ ID NO: 177501 - DNA, 25 bp, Canis familiaris
tgctgagagctcggtctgaggcatg

SEQ ID NO: 177502 - DNA, 25 bp, Canis familiaris
tgctgagaggcctttgcatggctat

SEQ ID NO: 177503 - DNA, 25 bp, Canis familiaris
tgctgcagatggacctgatcgacgc

SEQ ID NO: 177504 - DNA, 25 bp, Canis familiaris
tgctgcagtgtggctcagctttcgc

SEQ ID NO: 177505 - DNA, 25 bp, Canis familiaris
tgctcacatgtgtcacacgtcacgc

SEQ ID NO: 177506 - DNA, 25 bp, Canis familiaris
tgctagatgctgaacaagtgcctgc

SEQ ID NO: 177507 - DNA, 25 bp, Canis familiaris
tgctgagaagcttcatgaggccatg

SEQ ID NO: 177508 - DNA, 25 bp, Canis familiaris
tgctggaatgcactcttggcacaca

SEQ ID NO: 177509 - DNA, 25 bp, Canis familiaris
tgctggtgatcagtgcttctgcaac

SEQ ID NO: 177510 - DNA, 25 bp, Canis familiaris
tgctcgtcaaggtcattgcacacgg

SEQ ID NO: 177511 - DNA, 25 bp, Canis familiaris
tgctcctgcaagaatctataactgt

SEQ ID NO: 177512 - DNA, 25 bp, Canis familiaris
tgctgctcccataataaacctgtcc

SEQ ID NO: 177513 - DNA, 25 bp, Canis familiaris
tgctgctacctcatgtgtacttgga

SEQ ID NO: 177514 - DNA, 25 bp, Canis familiaris
tgctgaccctcttgtgtatgtctga

SEQ ID NO: 177515 - DNA, 25 bp, Canis familiaris
tgctgcaacctttctgtgtgtgtag

SEQ ID NO: 177516 - DNA, 25 bp, Canis familiaris
tgctcctctttgtctgttgtgggat

SEQ ID NO: 177517 - DNA, 25 bp, Canis familiaris
tgctccggtggggttgggtgacggc

SEQ ID NO: 177518 - DNA, 25 bp, Canis familiaris
tgctgggtgggagcttgtggcgaag

SEQ ID NO: 177519 - DNA, 25 bp, Canis familiaris
tgctggggaccagacttggggagtc

SEQ ID NO: 177520 - DNA, 25 bp, Canis familiaris
tgctgctgatggaatcccacttggc

SEQ ID NO: 177521 - DNA, 25 bp, Canis familiaris
tgctctatgtgggtgccatcttgga

SEQ ID NO: 177522 - DNA, 25 bp, Canis familiaris
tgctccatgatctgtgcctatgtga

SEQ ID NO: 177523 - DNA, 25 bp, Canis familiaris
tgctcctgaatctatcctttcaaaa

SEQ ID NO: 177524 - DNA, 25 bp, Canis familiaris
tgctgcttgatacgccctttaaaag

SEQ ID NO: 177525 - DNA, 25 bp, Canis familiaris
tgctctcaatgacaactttgtcaag

SEQ ID NO: 177526 - DNA, 25 bp, Canis familiaris
tgctcacaaattccactctcagtgc

SEQ ID NO: 177527 - DNA, 25 bp, Canis familiaris
tgctgacgacttccgcgtcaagtat

SEQ ID NO: 177528 - DNA, 25 bp, Canis familiaris
tgctcgcgtctcaaccgatgaagat

SEQ ID NO: 177529 - DNA, 25 bp, Canis familiaris
tgctgggttcttggcctgaagatgc

SEQ ID NO: 177530 - DNA, 25 bp, Canis familiaris
tgctttgcttctcttcagcaagctc

SEQ ID NO: 177531 - DNA, 25 bp, Canis familiaris
tgcttatttgtgctgtccaactcca

SEQ ID NO: 177532 - DNA, 25 bp, Canis familiaris
tgctgtaatttctgaccacatccca

SEQ ID NO: 177533 - DNA, 25 bp, Canis familiaris
tgctgaacagaatagacccactcct

SEQ ID NO: 177534 - DNA, 25 bp, Canis familiaris
tgctgaaaaaggtcaagcgccttct

SEQ ID NO: 177535 - DNA, 25 bp, Canis familiaris
tgctgcaaaattcactaggaccctc

SEQ ID NO: 177536 - DNA, 25 bp, Canis familiaris
tgcgcagaaattctgccggctcggc

SEQ ID NO: 177537 - DNA, 25 bp, Canis familiaris
tgcggaactggttccttgctggagg

SEQ ID NO: 177538 - DNA, 25 bp, Canis familiaris
tgctgctgttggtcccattgaacaa

SEQ ID NO: 177539 - DNA, 25 bp, Canis familiaris
tgctgctggttctcaagtggactag

SEQ ID NO: 177540 - DNA, 25 bp, Canis familiaris
tgctggcgcttctctcgtcggcgga

SEQ ID NO: 177541 - DNA, 25 bp, Canis familiaris
tgctgggcttcatcattggccaagc

SEQ ID NO: 177542 - DNA, 25 bp, Canis familiaris
tgctgggctagccacctgaggaaga

SEQ ID NO: 177543 - DNA, 25 bp, Canis familiaris
tgctggtgccagtcatttgaagaaa

SEQ ID NO: 177544 - DNA, 25 bp, Canis familiaris
tgctcagtgccatgaagatggagac

SEQ ID NO: 177545 - DNA, 25 bp, Canis familiaris
tgctcgcactcttgatggtgagagt

SEQ ID NO: 177546 - DNA, 25 bp, Canis familiaris
tgctcacctctggatggaggatgat

SEQ ID NO: 177547 - DNA, 25 bp, Canis familiaris
tgctgcacgctcgctggaagtgaag

SEQ ID NO: 177548 - DNA, 25 bp, Canis familiaris
tgctccctccccagaggaagtggga

SEQ ID NO: 177549 - DNA, 25 bp, Canis familiaris
tccagcaaccctgtcagtaacggca

SEQ ID NO: 177550 - DNA, 25 bp, Canis familiaris
tccacagttctaggccactgcaacg

SEQ ID NO: 177551 - DNA, 25 bp, Canis familiaris
tgccacgtttactgagctaaccggc

SEQ ID NO: 177552 - DNA, 25 bp, Canis familiaris
tgcctggtttacattttcacactgg

SEQ ID NO: 177553 - DNA, 25 bp, Canis familiaris
tgctgtttttccattctacaccatg

SEQ ID NO: 177554 - DNA, 25 bp, Canis familiaris
tgcttttccgccaagttagacgatc

SEQ ID NO: 177555 - DNA, 25 bp, Canis familiaris
tctttcacccctattgagacgttaa

SEQ ID NO: 177556 - DNA, 25 bp, Canis familiaris
tgcgttatctcagcttcttcaggcg

SEQ ID NO: 177557 - DNA, 25 bp, Canis familiaris
tgctggtctcgaatttccacaggga

SEQ ID NO: 177558 - DNA, 25 bp, Canis familiaris
tgctgggcatcgaagctgctctaga

SEQ ID NO: 177559 - DNA, 25 bp, Canis familiaris
tgctgttcactggagttctctgcag

SEQ ID NO: 177560 - DNA, 25 bp, Canis familiaris
tgctgttctctgtcactgttcccgg

SEQ ID NO: 177561 - DNA, 25 bp, Canis familiaris
tgctgttctctgtcactgttcccgg

SEQ ID NO: 177562 - DNA, 25 bp, Canis familiaris
tgctgcttcttgtttatacccgaac

SEQ ID NO: 177563 - DNA, 25 bp, Canis familiaris
tgctttcttgttaaacctcgtatcc

SEQ ID NO: 177564 - DNA, 25 bp, Canis familiaris
tgcgtttgtgttcaaccaactctca

SEQ ID NO: 177565 - DNA, 25 bp, Canis familiaris
tgctggattttgcacaaccgttctc

SEQ ID NO: 177566 - DNA, 25 bp, Canis familiaris
tgctgtgtgttttagaatccctccc

SEQ ID NO: 177567 - DNA, 25 bp, Canis familiaris
tgctcttgttgtttgtaactctccc

SEQ ID NO: 177568 - DNA, 25 bp, Canis familiaris
tgctacctatgtttttatctcttcc

SEQ ID NO: 177569 - DNA, 25 bp, Canis familiaris
tgctaccactacattttgctgtctc

SEQ ID NO: 177570 - DNA, 25 bp, Canis familiaris
tgctaccacaactatattatcatgc

SEQ ID NO: 177571 - DNA, 25 bp, Canis familiaris
tgctcagctccattctgaattccat

SEQ ID NO: 177572 - DNA, 25 bp, Canis familiaris
tgctcagctggccactgcaaattat

SEQ ID NO: 177573 - DNA, 25 bp, Canis familiaris
tgctcgctgcagtcagctggcaatg

SEQ ID NO: 177574 - DNA, 25 bp, Canis familiaris
tgctctgcaagaggtcgaaggccta

SEQ ID NO: 177575 - DNA, 25 bp, Canis familiaris
tgctctctgaaggatcacaggccct

SEQ ID NO: 177576 - DNA, 25 bp, Canis familiaris
tgctcttcaaccaacatggccatga

SEQ ID NO: 177577 - DNA, 25 bp, Canis familiaris
tgctctgtcacccaatgatgtgcca

SEQ ID NO: 177578 - DNA, 25 bp, Canis familiaris
tgctctgccactcgagagctggcac

SEQ ID NO: 177579 - DNA, 25 bp, Canis familiaris
tgctcccacggacgctggatgaatt

SEQ ID NO: 177580 - DNA, 25 bp, Canis familiaris
tgctcccacgccagagtgtggtttc

SEQ ID NO: 177581 - DNA, 25 bp, Canis familiaris
tgctccctccataggaatgtgtgtt

SEQ ID NO: 177582 - DNA, 25 bp, Canis familiaris
tgcccactaccagtgaacttgcttg

SEQ ID NO: 177583 - DNA, 25 bp, Canis familiaris
tgcgccgctagaggtgaaattcttg

SEQ ID NO: 177584 - DNA, 25 bp, Canis familiaris
tgctgcccttgacggtgaatttcag

SEQ ID NO: 177585 - DNA, 25 bp, Canis familiaris
tgctgcccactttgcggaatttgca

SEQ ID NO: 177586 - DNA, 25 bp, Canis familiaris
tgctgtgacacccatgggaaagtgg

SEQ ID NO: 177587 - DNA, 25 bp, Canis familiaris
tgcgtgtgcacgtccgtgtagagtt

SEQ ID NO: 177588 - DNA, 25 bp, Canis familiaris
tgcgtggctcagcgggtgagcgtct

SEQ ID NO: 177589 - DNA, 25 bp, Canis familiaris
tcgtgactctgatgaccgacggttg

SEQ ID NO: 177590 - DNA, 25 bp, Canis familiaris
tgcggaactttgttcgagttttgga

SEQ ID NO: 177591 - DNA, 25 bp, Canis familiaris
tgctggagactttggatcggttggt

SEQ ID NO: 177592 - DNA, 25 bp, Canis familiaris
tgctaggcccttggcaggggtggtc

SEQ ID NO: 177593 - DNA, 25 bp, Canis familiaris
tgcgaggcacctggggagctggtga

SEQ ID NO: 177594 - DNA, 25 bp, Canis familiaris
tgctgagggccatggtggcttctgg

SEQ ID NO: 177595 - DNA, 25 bp, Canis familiaris
tgctggggccacaggctggaagggt

SEQ ID NO: 177596 - DNA, 25 bp, Canis familiaris
tgctgtgcttcccaaggttaacgag

SEQ ID NO: 177597 - DNA, 25 bp, Canis familiaris
tgctgtttggagaggtatatacccg

SEQ ID NO: 177598 - DNA, 25 bp, Canis familiaris
tcctgttgggtctgaaaacctggct

SEQ ID NO: 177599 - DNA, 25 bp, Canis familiaris
tccagtttggttgagaaacttccta

SEQ ID NO: 177600 - DNA, 25 bp, Canis familiaris
tccttttggtttcaggagccctgta

SEQ ID NO: 177601 - DNA, 25 bp, Canis familiaris
tgcctttttgtaaaagaccagccga

SEQ ID NO: 177602 - DNA, 25 bp, Canis familiaris
tgccgttttggacagagaatcacca

SEQ ID NO: 177603 - DNA, 25 bp, Canis familiaris
tcctgccttttacatcggtatccag

SEQ ID NO: 177604 - DNA, 25 bp, Canis familiaris
tcctcctctgtaaaacggggacagt

SEQ ID NO: 177605 - DNA, 25 bp, Canis familiaris
tccgatctttgacaagcggggtcga

SEQ ID NO: 177606 - DNA, 25 bp, Canis familiaris
tgccctcttggagagggagggggaa

SEQ ID NO: 177607 - DNA, 25 bp, Canis familiaris
tgctctcttggggccggagaagggt

SEQ ID NO: 177608 - DNA, 25 bp, Canis familiaris
tgctctctttaggccccatgaggcc

SEQ ID NO: 177609 - DNA, 25 bp, Canis familiaris
tgctctcttaagaaccagtggtctc

SEQ ID NO: 177610 - DNA, 25 bp, Canis familiaris
tgctcgcttcatttaccagtttagc

SEQ ID NO: 177611 - DNA, 25 bp, Canis familiaris
tgctgcttgtcatattccactttga

SEQ ID NO: 177612 - DNA, 25 bp, Canis familiaris
tgctattgtctgtagatcctcttcc

SEQ ID NO: 177613 - DNA, 25 bp, Canis familiaris
tgctcatgtgtccaagttactgtca

SEQ ID NO: 177614 - DNA, 25 bp, Canis familiaris
tgcgcattgtccaagcaatgccttc

SEQ ID NO: 177615 - DNA, 25 bp, Canis familiaris
tgctgatgctgctgtggaacctatt

SEQ ID NO: 177616 - DNA, 25 bp, Canis familiaris
tgctgagtccagggctagccgattg

SEQ ID NO: 177617 - DNA, 25 bp, Canis familiaris
tgctgaaaagcaaggactctgactt

SEQ ID NO: 177618 - DNA, 25 bp, Canis familiaris
tgctaccagacaaggactgccgcta

SEQ ID NO: 177619 - DNA, 25 bp, Canis familiaris
tgctatccaggctgtgctatccctg

SEQ ID NO: 177620 - DNA, 25 bp, Canis familiaris
tgctgatcaaactgagctctcctgc

SEQ ID NO: 177621 - DNA, 25 bp, Canis familiaris
tgctatgacccaaactctatgctgg

SEQ ID NO: 177622 - DNA, 25 bp, Canis familiaris
tgctatggcccaagactctgcagca

SEQ ID NO: 177623 - DNA, 25 bp, Canis familiaris
tgctgagagtccagatgtgccagcc

SEQ ID NO: 177624 - DNA, 25 bp, Canis familiaris
tgctgcatggccttagcagtgccca

SEQ ID NO: 177625 - DNA, 25 bp, Canis familiaris
tgctgcacgcgatgacaatgcccag

SEQ ID NO: 177626 - DNA, 25 bp, Canis familiaris
tgctcagggggtgatcccaaggtcc

SEQ ID NO: 177627 - DNA, 25 bp, Canis familiaris
tcgaggcggtgggactcaccgttct

SEQ ID NO: 177628 - DNA, 25 bp, Canis familiaris
tgcggtggcaggctgaggaccgtct

SEQ ID NO: 177629 - DNA, 25 bp, Canis familiaris
tgcctggctgggttagagtccttgc

SEQ ID NO: 177630 - DNA, 25 bp, Canis familiaris
tgctatcctgcgcagtcagaagcct

SEQ ID NO: 177631 - DNA, 25 bp, Canis familiaris
tgctactctgctcatctggaagctc

SEQ ID NO: 177632 - DNA, 25 bp, Canis familiaris
tgctgagcttgcccttaacgtaatt

SEQ ID NO: 177633 - DNA, 25 bp, Canis familiaris
tgctcacttgctctatcaactaaag

SEQ ID NO: 177634 - DNA, 25 bp, Canis familiaris
tgctacctcatcaactaaccagaag

SEQ ID NO: 177635 - DNA, 25 bp, Canis familiaris
tgctcaacctgctgatgaacctgca

SEQ ID NO: 177636 - DNA, 25 bp, Canis familiaris
tgctgcacaccagtttgcaacacca

SEQ ID NO: 177637 - DNA, 25 bp, Canis familiaris
tgctgacccacacatgagaacactg

SEQ ID NO: 177638 - DNA, 25 bp, Canis familiaris
tgctgcctacatcccatggaaacat

SEQ ID NO: 177639 - DNA, 25 bp, Canis familiaris
tgctcctgcacaagctccatgaaaa

SEQ ID NO: 177640 - DNA, 25 bp, Canis familiaris
tgctcccacacacacaatcaataat

SEQ ID NO: 177641 - DNA, 25 bp, Canis familiaris
tgctcccatagctttgccataggaa

SEQ ID NO: 177642 - DNA, 25 bp, Canis familiaris
tgctacatcacctttgccattgaaa

SEQ ID NO: 177643 - DNA, 25 bp, Canis familiaris
tgctccataatctctcacattgaca

SEQ ID NO: 177644 - DNA, 25 bp, Canis familiaris
tgctccttataactgctctgtggca

SEQ ID NO: 177645 - DNA, 25 bp, Canis familiaris
tgcgttcttaagcccatgtgcacat

SEQ ID NO: 177646 - DNA, 25 bp, Canis familiaris
tgctggtttatctcctgtacttcag

SEQ ID NO: 177647 - DNA, 25 bp, Canis familiaris
tgctgcgtttattcctattttccat

SEQ ID NO: 177648 - DNA, 25 bp, Canis familiaris
tgccgatttattgcatttgcctact

SEQ ID NO: 177649 - DNA, 25 bp, Canis familiaris
tgctgcgtcctagttcatttgaata

SEQ ID NO: 177650 - DNA, 25 bp, Canis familiaris
tgctcgtcctccaacttaaatgata

SEQ ID NO: 177651 - DNA, 25 bp, Canis familiaris
tgctcccctggaatattaactgctt

SEQ ID NO: 177652 - DNA, 25 bp, Canis familiaris
tgctccgaagtattcagtaccgctc

SEQ ID NO: 177653 - DNA, 25 bp, Canis familiaris
tgctccgaagtattcagtaccgctc

SEQ ID NO: 177654 - DNA, 25 bp, Canis familiaris
tgctccgaagtattcagtaccgctc

SEQ ID NO: 177655 - DNA, 25 bp, Canis familiaris
tgctccgaagtattcagtaccgctc

SEQ ID NO: 177656 - DNA, 25 bp, Canis familiaris
tgctccaaagtctacaaacccctgg

SEQ ID NO: 177657 - DNA, 25 bp, Canis familiaris
tgctcagaaatggcccacaacctgc

SEQ ID NO: 177658 - DNA, 25 bp, Canis familiaris
tgctcgaacatcacaatcataccca

SEQ ID NO: 177659 - DNA, 25 bp, Canis familiaris
tgctcaaccatctgcttcaaattga

SEQ ID NO: 177660 - DNA, 25 bp, Canis familiaris
tgctagggcatctctctatagttat

SEQ ID NO: 177661 - DNA, 25 bp, Canis familiaris
tgctagcacgcaatcactttgggga

SEQ ID NO: 177662 - DNA, 25 bp, Canis familiaris
tgctgcagaaaagctgtttgggaat

SEQ ID NO: 177663 - DNA, 25 bp, Canis familiaris
tgctctgaagtgacctgtccgggat

SEQ ID NO: 177664 - DNA, 25 bp, Canis familiaris
tgctggaagatggcaccactcgtgg

SEQ ID NO: 177665 - DNA, 25 bp, Canis familiaris
tgctgccaagtgccaggctcttggg

SEQ ID NO: 177666 - DNA, 25 bp, Canis familiaris
tgctctaagtgacgcagctcgatgc

SEQ ID NO: 177667 - DNA, 25 bp, Canis familiaris
tgctcatacagggaagcctgagaag

SEQ ID NO: 177668 - DNA, 25 bp, Canis familiaris
tgctcatcgtggcgagctcggtagc

SEQ ID NO: 177669 - DNA, 25 bp, Canis familiaris
tgccatctgtaccgaccgaatatgg

SEQ ID NO: 177670 - DNA, 25 bp, Canis familiaris
tgctccttactgaattccaaatggg

SEQ ID NO: 177671 - DNA, 25 bp, Canis familiaris
tgctgtctgttctctgtccagaaga

SEQ ID NO: 177672 - DNA, 25 bp, Canis familiaris
tgcgcatcgacgtggaccacatcga

SEQ ID NO: 177673 - DNA, 25 bp, Canis familiaris
tgcgggactgtacaccatcaggaat

SEQ ID NO: 177674 - DNA, 25 bp, Canis familiaris
tgcgggacatgatcatcctgcccga

SEQ ID NO: 177675 - DNA, 25 bp, Canis familiaris
tgcgggaggtggacctggacgagct

SEQ ID NO: 177676 - DNA, 25 bp, Canis familiaris
tgcgggaggggagcatgttcgtggc

SEQ ID NO: 177677 - DNA, 25 bp, Canis familiaris
tgcgggacgtgatcgaatctcagga

SEQ ID NO: 177678 - DNA, 25 bp, Canis familiaris
tcgggagcttggacgacacgggatc

SEQ ID NO: 177679 - DNA, 25 bp, Canis familiaris
tgcgaggggataccaaccgggacat

SEQ ID NO: 177680 - DNA, 25 bp, Canis familiaris
tgctgagagacatctataaccggga

SEQ ID NO: 177681 - DNA, 25 bp, Canis familiaris
tgcctaaatacttcacccagtgtga

SEQ ID NO: 177682 - DNA, 25 bp, Canis familiaris
tgctgtgaaaacctatcgtcgagta

SEQ ID NO: 177683 - DNA, 25 bp, Canis familiaris
tgctggccaacatcttctgtgcaga

SEQ ID NO: 177684 - DNA, 25 bp, Canis familiaris
tgctggctgcacaggtgcgggcaga

SEQ ID NO: 177685 - DNA, 25 bp, Canis familiaris
tgcgtcgcacagtaatcagggaata

SEQ ID NO: 177686 - DNA, 25 bp, Canis familiaris
tgcggaccatgtgattgcggaacca

SEQ ID NO: 177687 - DNA, 25 bp, Canis familiaris
tgcccatcctgcagattggtaccga

SEQ ID NO: 177688 - DNA, 25 bp, Canis familiaris
tgcgactgccatgcattgggttcca

SEQ ID NO: 177689 - DNA, 25 bp, Canis familiaris
tgctcagcttcagaagagccttgcc

SEQ ID NO: 177690 - DNA, 25 bp, Canis familiaris
tgctcagcccaggaggaggtttctc

SEQ ID NO: 177691 - DNA, 25 bp, Canis familiaris
tgctcagctctcactggaggttatt

SEQ ID NO: 177692 - DNA, 25 bp, Canis familiaris
tgctcacttgagcctgctatggttg

SEQ ID NO: 177693 - DNA, 25 bp, Canis familiaris
tgctgcactatacgccttggcatat

SEQ ID NO: 177694 - DNA, 25 bp, Canis familiaris
tgctgcaataaacataggagtggaa

SEQ ID NO: 177695 - DNA, 25 bp, Canis familiaris
tgctctaagcaacttcgggtgtgga

SEQ ID NO: 177696 - DNA, 25 bp, Canis familiaris
tgctcttaagcaagctgcggttgtg

SEQ ID NO: 177697 - DNA, 25 bp, Canis familiaris
tgctctggtatgaacatgtagtttg

SEQ ID NO: 177698 - DNA, 25 bp, Canis familiaris
tgctctagttctacagatagtcctg

SEQ ID NO: 177699 - DNA, 25 bp, Canis familiaris
tgctggtggtgttcagacagtcact

SEQ ID NO: 177700 - DNA, 25 bp, Canis familiaris
tgctgagtgagataagtcagtcaga

SEQ ID NO: 177701 - DNA, 25 bp, Canis familiaris
tgctggctgatgaagatggtcctgg

SEQ ID NO: 177702 - DNA, 25 bp, Canis familiaris
tgctgatggcgatgagtgccctgta

SEQ ID NO: 177703 - DNA, 25 bp, Canis familiaris
tgctgatgtagatgcaggccccact

SEQ ID NO: 177704 - DNA, 25 bp, Canis familiaris
tgctgcataatgaaaggccctactt

SEQ ID NO: 177705 - DNA, 25 bp, Canis familiaris
tgcctgacatatatcttcctacttt

SEQ ID NO: 177706 - DNA, 25 bp, Canis familiaris
tgctcgtctgtatcattggaaccct

SEQ ID NO: 177707 - DNA, 25 bp, Canis familiaris
tgctcagtttcacagcggacaggcc

SEQ ID NO: 177708 - DNA, 25 bp, Canis familiaris
tgctcagttccagctagagacaaac

SEQ ID NO: 177709 - DNA, 25 bp, Canis familiaris
tgctcatgttcaacctacacaacca

SEQ ID NO: 177710 - DNA, 25 bp, Canis familiaris
tgctctggagcaaggtgcccaagcc

SEQ ID NO: 177711 - DNA, 25 bp, Canis familiaris
tgctgtgggtggtcatccaaagcca

SEQ ID NO: 177712 - DNA, 25 bp, Canis familiaris
tgctgtctggtggaaccaccatgta

SEQ ID NO: 177713 - DNA, 25 bp, Canis familiaris
tgctgtctggaggtaccaccatgta

SEQ ID NO: 177714 - DNA, 25 bp, Canis familiaris
tgctggagggcataccacggttgca

SEQ ID NO: 177715 - DNA, 25 bp, Canis familiaris
tgctgggagagatcccctggcttgc

SEQ ID NO: 177716 - DNA, 25 bp, Canis familiaris
tgctgggagagatcccctggcttgc

SEQ ID NO: 177717 - DNA, 25 bp, Canis familiaris
tgctgtgggactactcccaggactc

SEQ ID NO: 177718 - DNA, 25 bp, Canis familiaris
tgctgggggcaaagcctcaggcaca

SEQ ID NO: 177719 - DNA, 25 bp, Canis familiaris
tgctgggagtggagcctgcttgaga

SEQ ID NO: 177720 - DNA, 25 bp, Canis familiaris
tgctggagtgtgagacctgctcgac

SEQ ID NO: 177721 - DNA, 25 bp, Canis familiaris
tgctcggtgatgtaatcctcctgca

SEQ ID NO: 177722 - DNA, 25 bp, Canis familiaris
tgctctgtgagattaatcagccctc

SEQ ID NO: 177723 - DNA, 25 bp, Canis familiaris
tgctgcgagaacgacatcgacatcc

SEQ ID NO: 177724 - DNA, 25 bp, Canis familiaris
tgctggagcaacttcatcagcccgc

SEQ ID NO: 177725 - DNA, 25 bp, Canis familiaris
tgcgctgagcttgtatgagcagccc

SEQ ID NO: 177726 - DNA, 25 bp, Canis familiaris
tgctgcagcagctgggggcagatgc

SEQ ID NO: 177727 - DNA, 25 bp, Canis familiaris
tgctgcagcgaggggagggtggaac

SEQ ID NO: 177728 - DNA, 25 bp, Canis familiaris
tgctcaggccgggtgaggggctagg

SEQ ID NO: 177729 - DNA, 25 bp, Canis familiaris
tgctctagacgtgtgcgggcgaacg

SEQ ID NO: 177730 - DNA, 25 bp, Canis familiaris
tgctcggaagtgttcggggcatctc

SEQ ID NO: 177731 - DNA, 25 bp, Canis familiaris
tgctcaggagagatgtcaggcttcc

SEQ ID NO: 177732 - DNA, 25 bp, Canis familiaris
tgctgtggaggcgagtctggctgta

SEQ ID NO: 177733 - DNA, 25 bp, Canis familiaris
tgcgctcagtgccatgcgttcgctg

SEQ ID NO: 177734 - DNA, 25 bp, Canis familiaris
tgctgtgtgctgccatggtaccaga

SEQ ID NO: 177735 - DNA, 25 bp, Canis familiaris
tgctgctgttgcctggttgccaggc

SEQ ID NO: 177736 - DNA, 25 bp, Canis familiaris
tgctggatctgctgtttgaagcgca

SEQ ID NO: 177737 - DNA, 25 bp, Canis familiaris
tgctgtgatgtgtctgctttgggga

SEQ ID NO: 177738 - DNA, 25 bp, Canis familiaris
tgctgctgttttccctgagggaaca

SEQ ID NO: 177739 - DNA, 25 bp, Canis familiaris
tgctgcatccatgtcccgaatggac

SEQ ID NO: 177740 - DNA, 25 bp, Canis familiaris
tgctcccagaagccctgtgaggaca

SEQ ID NO: 177741 - DNA, 25 bp, Canis familiaris
tgctcgccaacctctgtgagaggcc

SEQ ID NO: 177742 - DNA, 25 bp, Canis familiaris
tgctggagaaactggatgaagctgc

SEQ ID NO: 177743 - DNA, 25 bp, Canis familiaris
tgctggtgttagtggtgctggctgt

SEQ ID NO: 177744 - DNA, 25 bp, Canis familiaris
tgctgggcttggcccagggcagtgc

SEQ ID NO: 177745 - DNA, 25 bp, Canis familiaris
tgccgcgtcggtggcagggagtgac

SEQ ID NO: 177746 - DNA, 25 bp, Canis familiaris
tgctcgtttggccgcagaaggtgag

SEQ ID NO: 177747 - DNA, 25 bp, Canis familiaris
tgctccttggcgaggtagctctgat

SEQ ID NO: 177748 - DNA, 25 bp, Canis familiaris
tgctcactctggtggttagttgctg

SEQ ID NO: 177749 - DNA, 25 bp, Canis familiaris
tgcgcaactggagggtcctgacgct

SEQ ID NO: 177750 - DNA, 25 bp, Canis familiaris
tgcgccagcaggaggtcctgctcct

SEQ ID NO: 177751 - DNA, 25 bp, Canis familiaris
tgctcccaggcatatgttatatact

SEQ ID NO: 177752 - DNA, 25 bp, Canis familiaris
tgctcagccagggagtctgtttctc

SEQ ID NO: 177753 - DNA, 25 bp, Canis familiaris
tgctcctccagaagactgctgattt

SEQ ID NO: 177754 - DNA, 25 bp, Canis familiaris
tgctccccgaaagcttttctgaaga

SEQ ID NO: 177755 - DNA, 25 bp, Canis familiaris
tgctccccgtaatcatttatcataa

SEQ ID NO: 177756 - DNA, 25 bp, Canis familiaris
tgcgtgctgaccaaaccgattaaaa

SEQ ID NO: 177757 - DNA, 25 bp, Canis familiaris
tgcggagaggcgtagcacgttgaaa

SEQ ID NO: 177758 - DNA, 25 bp, Canis familiaris
tgctgggggctgtccagcagtgcta

SEQ ID NO: 177759 - DNA, 25 bp, Canis familiaris
tgctgtgcttgaatgccacgcggta

SEQ ID NO: 177760 - DNA, 25 bp, Canis familiaris
tgcggctagaggccaccgaggagat

SEQ ID NO: 177761 - DNA, 25 bp, Canis familiaris
tgctcttgaaggccgccggagcaag

SEQ ID NO: 177762 - DNA, 25 bp, Canis familiaris
tgctctggcaggtccaggcggaagg

SEQ ID NO: 177763 - DNA, 25 bp, Canis familiaris
tgctgcgccggctggaggcagcaag

SEQ ID NO: 177764 - DNA, 25 bp, Canis familiaris
tgcggcctgaatctgaagcagcgcg

SEQ ID NO: 177765 - DNA, 25 bp, Canis familiaris
tgcggcctgcacagaaccgggccca

SEQ ID NO: 177766 - DNA, 25 bp, Canis familiaris
tgccgtccttaaactcatgggccga

SEQ ID NO: 177767 - DNA, 25 bp, Canis familiaris
tgctcagaccttcaacctggagggc

SEQ ID NO: 177768 - DNA, 25 bp, Canis familiaris
tccaactacccagcactgctgaggg

SEQ ID NO: 177769 - DNA, 25 bp, Canis familiaris
tgcccctaccaattcttctgggggg

SEQ ID NO: 177770 - DNA, 25 bp, Canis familiaris
tgctcttctccacactgttgggagg

SEQ ID NO: 177771 - DNA, 25 bp, Canis familiaris
tgctctgtcacagggaactctgggg

SEQ ID NO: 177772 - DNA, 25 bp, Canis familiaris
tgcgtacacattctagcttcgggta

SEQ ID NO: 177773 - DNA, 25 bp, Canis familiaris
tgcgatcgaggtctactgtggggaa

SEQ ID NO: 177774 - DNA, 25 bp, Canis familiaris
tgctgacctctgcggactgaggggc

SEQ ID NO: 177775 - DNA, 25 bp, Canis familiaris
tgctgccccagccagggaagtgggc

SEQ ID NO: 177776 - DNA, 25 bp, Canis familiaris
tgctgccgccagtacgagatggggg

SEQ ID NO: 177777 - DNA, 25 bp, Canis familiaris
tgctgcctccagggtcagcatggag

SEQ ID NO: 177778 - DNA, 25 bp, Canis familiaris
tgctgcctttggcttctggaagcct

SEQ ID NO: 177779 - DNA, 25 bp, Canis familiaris
tgctgcctatgtaggctctttccca

SEQ ID NO: 177780 - DNA, 25 bp, Canis familiaris
tgctcccattactgcaatgtgcacc

SEQ ID NO: 177781 - DNA, 25 bp, Canis familiaris
tgctccccagacttgcagttgagac

SEQ ID NO: 177782 - DNA, 25 bp, Canis familiaris
tgcctaccagcctgctaataaccag

SEQ ID NO: 177783 - DNA, 25 bp, Canis familiaris
tgcctaccaaaagcagccaaccatc

SEQ ID NO: 177784 - DNA, 25 bp, Canis familiaris
tgcctacaaggatttcatccccttc

SEQ ID NO: 177785 - DNA, 25 bp, Canis familiaris
tgcgccaaaggggttagccacggtc

SEQ ID NO: 177786 - DNA, 25 bp, Canis familiaris
tgccaaagggcagtggggcccggtt

SEQ ID NO: 177787 - DNA, 25 bp, Canis familiaris
tgccgaagtgtcgaagtgtcgccgc

SEQ ID NO: 177788 - DNA, 25 bp, Canis familiaris
tgccataaggtggaggttcgcccgg

SEQ ID NO: 177789 - DNA, 25 bp, Canis familiaris
tgctcatagggctcaggtttgctgc

SEQ ID NO: 177790 - DNA, 25 bp, Canis familiaris
tgctgctggaggtggatgtgttgga

SEQ ID NO: 177791 - DNA, 25 bp, Canis familiaris
tgctctgtctggtagtctgtggtag

SEQ ID NO: 177792 - DNA, 25 bp, Canis familiaris
tgctcttccagctggcattggtagc

SEQ ID NO: 177793 - DNA, 25 bp, Canis familiaris
tgctcctccacgtcagatagttagc

SEQ ID NO: 177794 - DNA, 25 bp, Canis familiaris
tgctccccacttggtcattatattg

SEQ ID NO: 177795 - DNA, 25 bp, Canis familiaris
tgctccacctgtggcttttcattat

SEQ ID NO: 177796 - DNA, 25 bp, Canis familiaris
tgcgcgcaccatagtttcttatgta

SEQ ID NO: 177797 - DNA, 25 bp, Canis familiaris
tgctgcagacctctttgatgttgta

SEQ ID NO: 177798 - DNA, 25 bp, Canis familiaris
tgctgcaggcaccgtgtgtgtttat

SEQ ID NO: 177799 - DNA, 25 bp, Canis familiaris
tgctgatggccacgggttgtgttcc

SEQ ID NO: 177800 - DNA, 25 bp, Canis familiaris
tgcgtggtcttgcagttggcattgc

SEQ ID NO: 177801 - DNA, 25 bp, Canis familiaris
tgctgctcctctagggagctggcct

SEQ ID NO: 177802 - DNA, 25 bp, Canis familiaris
tgctccgctgcaaaaagctggccac

SEQ ID NO: 177803 - DNA, 25 bp, Canis familiaris
tgcccacatgataacaacagccata

SEQ ID NO: 177804 - DNA, 25 bp, Canis familiaris
tgctccctctaaaacccagacagag

SEQ ID NO: 177805 - DNA, 25 bp, Canis familiaris
tgctcccctaacaagatgccaatag

SEQ ID NO: 177806 - DNA, 25 bp, Canis familiaris
tgctcccttcctaattgcagcaata

SEQ ID NO: 177807 - DNA, 25 bp, Canis familiaris
tgctgcctggtctttattcaacaat

SEQ ID NO: 177808 - DNA, 25 bp, Canis familiaris
tgctcctggctctgttgttggaaat

SEQ ID NO: 177809 - DNA, 25 bp, Canis familiaris
tgctctattctgttgttttcgaaga

SEQ ID NO: 177810 - DNA, 25 bp, Canis familiaris
tgctctcattcatctttttgtaaag

SEQ ID NO: 177811 - DNA, 25 bp, Canis familiaris
tgctgcctcacatcgatattggtag

SEQ ID NO: 177812 - DNA, 25 bp, Canis familiaris
tgctcctatgatccgcaattgctga

SEQ ID NO: 177813 - DNA, 25 bp, Canis familiaris
tgctgcctgaggtgagttgcgtgcc

SEQ ID NO: 177814 - DNA, 25 bp, Canis familiaris
tgctcctgactgtgaggccagtgga

SEQ ID NO: 177815 - DNA, 25 bp, Canis familiaris
tgctcctgtctctgaattctgtgga

SEQ ID NO: 177816 - DNA, 25 bp, Canis familiaris
tgctgccttccttggatgtggtaga

SEQ ID NO: 177817 - DNA, 25 bp, Canis familiaris
tgctccctccaggaatgtgggacag

SEQ ID NO: 177818 - DNA, 25 bp, Canis familiaris
tgctcctcccaggaaagcatgcacc

SEQ ID NO: 177819 - DNA, 25 bp, Canis familiaris
tgctcctcctgagcgcaagtactct

SEQ ID NO: 177820 - DNA, 25 bp, Canis familiaris
tgctcctcctgagcgcaagtactct

SEQ ID NO: 177821 - DNA, 25 bp, Canis familiaris
tgctcctcagtaccgatgttaatgc

SEQ ID NO: 177822 - DNA, 25 bp, Canis familiaris
tgctcctctggagcttgtacgttca

SEQ ID NO: 177823 - DNA, 25 bp, Canis familiaris
tgcctcttgaggttattcactttcc

SEQ ID NO: 177824 - DNA, 25 bp, Canis familiaris
tgcccatagacgcttcaactttgac

SEQ ID NO: 177825 - DNA, 25 bp, Canis familiaris
tgcctaggacttgtcagagccctga

SEQ ID NO: 177826 - DNA, 25 bp, Canis familiaris
tagtttaattttcaccctgacctat

SEQ ID NO: 177827 - DNA, 25 bp, Canis familiaris
tccttttatttacacttaagcctag

SEQ ID NO: 177828 - DNA, 25 bp, Canis familiaris
tgccaacttatttaccattttccct

SEQ ID NO: 177829 - DNA, 25 bp, Canis familiaris
tgctccctttgcaaacatcatcttg

SEQ ID NO: 177830 - DNA, 25 bp, Canis familiaris
tgctgtgcctcttgccaaagcagct

SEQ ID NO: 177831 - DNA, 25 bp, Canis familiaris
tgctggcttgttgcgaaggtcttgc

SEQ ID NO: 177832 - DNA, 25 bp, Canis familiaris
tgctggcactgtcccagtagttctt

SEQ ID NO: 177833 - DNA, 25 bp, Canis familiaris
tgcggacattggacgcggttctcag

SEQ ID NO: 177834 - DNA, 25 bp, Canis familiaris
tgcggatatatagcgcccattctcc

SEQ ID NO: 177835 - DNA, 25 bp, Canis familiaris
tgctggattagcaggccctgtccga

SEQ ID NO: 177836 - DNA, 25 bp, Canis familiaris
tgctggttcacttgagtcgtggcgg

SEQ ID NO: 177837 - DNA, 25 bp, Canis familiaris
tgctgagtgtgggtggggtgtgggc

SEQ ID NO: 177838 - DNA, 25 bp, Canis familiaris
tgctgtggcggcgggtgttggccgc

SEQ ID NO: 177839 - DNA, 25 bp, Canis familiaris
tgctgcgggtgcagcagctggcggc

SEQ ID NO: 177840 - DNA, 25 bp, Canis familiaris
tgctgcgggtctgctgttatggcag

SEQ ID NO: 177841 - DNA, 25 bp, Canis familiaris
tgctgcggaggcgactgtgtgtgcc

SEQ ID NO: 177842 - DNA, 25 bp, Canis familiaris
tgctggccaatggcctgttggctgc

SEQ ID NO: 177843 - DNA, 25 bp, Canis familiaris
tgctggccaagccctttatgatgtc

SEQ ID NO: 177844 - DNA, 25 bp, Canis familiaris
tgcgctgctgaaaacgattcatatt

SEQ ID NO: 177845 - DNA, 25 bp, Canis familiaris
tgctgtcttgaagagtctatcactc

SEQ ID NO: 177846 - DNA, 25 bp, Canis familiaris
tgctcctgtaagacttctagcctcc

SEQ ID NO: 177847 - DNA, 25 bp, Canis familiaris
tgcgcacagtcatgagcttcttgcc

SEQ ID NO: 177848 - DNA, 25 bp, Canis familiaris
tgctgtcagcaatatcctcattgct

SEQ ID NO: 177849 - DNA, 25 bp, Canis familiaris
tgcggcagcatatgcagcccgtgct

SEQ ID NO: 177850 - DNA, 25 bp, Canis familiaris
tgcgggtaaacccagtgacggctct

SEQ ID NO: 177851 - DNA, 25 bp, Canis familiaris
tgccgtggtgaaacgggaccgctct

SEQ ID NO: 177852 - DNA, 25 bp, Canis familiaris
tgcgcggcctgaaggccggggtgct

SEQ ID NO: 177853 - DNA, 25 bp, Canis familiaris
tgctgcgtatcgtggtgtgggggat

SEQ ID NO: 177854 - DNA, 25 bp, Canis familiaris
tgctgcttatggcggcgctggagag

SEQ ID NO: 177855 - DNA, 25 bp, Canis familiaris
tgctgctgtatcggcggaggccaga

SEQ ID NO: 177856 - DNA, 25 bp, Canis familiaris
tgctggtgcttccggagactatgca

SEQ ID NO: 177857 - DNA, 25 bp, Canis familiaris
tgctgcctgtgaggctggagaccca

SEQ ID NO: 177858 - DNA, 25 bp, Canis familiaris
tgctgtgctgtatgagaagaaccaa

SEQ ID NO: 177859 - DNA, 25 bp, Canis familiaris
tgctgtgcttatttgtgctgtccaa

SEQ ID NO: 177860 - DNA, 25 bp, Canis familiaris
tgctgtgttttctatgctgacatta

SEQ ID NO: 177861 - DNA, 25 bp, Canis familiaris
tgctgagtttttactgcacatgctt

SEQ ID NO: 177862 - DNA, 25 bp, Canis familiaris
tgctggtgtttcatctccatttgaa

SEQ ID NO: 177863 - DNA, 25 bp, Canis familiaris
tgctgctttgttatctctaatctca

SEQ ID NO: 177864 - DNA, 25 bp, Canis familiaris
tgcgttcttcacatttttgtcactc

SEQ ID NO: 177865 - DNA, 25 bp, Canis familiaris
tgcgtgcctgtccaatgtatattgt

SEQ ID NO: 177866 - DNA, 25 bp, Canis familiaris
tgctgtactctcgcatgaacatcaa

SEQ ID NO: 177867 - DNA, 25 bp, Canis familiaris
tgctgtagactggccagactccata

SEQ ID NO: 177868 - DNA, 25 bp, Canis familiaris
tgctgtatgagccctgtactcagga

SEQ ID NO: 177869 - DNA, 25 bp, Canis familiaris
tgctgcttgatccttgattcttggc

SEQ ID NO: 177870 - DNA, 25 bp, Canis familiaris
tgctgtggcatctttatttctctcc

SEQ ID NO: 177871 - DNA, 25 bp, Canis familiaris
tgctgtgagctggggttttgctgcc

SEQ ID NO: 177872 - DNA, 25 bp, Canis familiaris
tgctggacattgcttgttgttggga

SEQ ID NO: 177873 - DNA, 25 bp, Canis familiaris
tgcggccatctgctgcagaggttcg

SEQ ID NO: 177874 - DNA, 25 bp, Canis familiaris
tgctgacgatctcatggaagtatgg

SEQ ID NO: 177875 - DNA, 25 bp, Canis familiaris
tgctgacaggatgcagaaggagatt

SEQ ID NO: 177876 - DNA, 25 bp, Canis familiaris
tgctgatcagaatcaaagctgatgt

SEQ ID NO: 177877 - DNA, 25 bp, Canis familiaris
tgctgtgcagagtaaatgggtgata

SEQ ID NO: 177878 - DNA, 25 bp, Canis familiaris
tgctgctggagctcaaggggctgca

SEQ ID NO: 177879 - DNA, 25 bp, Canis familiaris
tgctgctgggcacaggcaggagccc

SEQ ID NO: 177880 - DNA, 25 bp, Canis familiaris
tgctgaggagctctgagggtgccca

SEQ ID NO: 177881 - DNA, 25 bp, Canis familiaris
tgctgggagattcggggagcctcac

SEQ ID NO: 177882 - DNA, 25 bp, Canis familiaris
tgctgagggtgctcagggagcccca

SEQ ID NO: 177883 - DNA, 25 bp, Canis familiaris
tgctgggggtgtggggagcacatcc

SEQ ID NO: 177884 - DNA, 25 bp, Canis familiaris
tgctgtgccggagtttggaccatgc

SEQ ID NO: 177885 - DNA, 25 bp, Canis familiaris
tgcggcttggcagctctgatagccc

SEQ ID NO: 177886 - DNA, 25 bp, Canis familiaris
tgcgacgtggcccacgatgtgctgc

SEQ ID NO: 177887 - DNA, 25 bp, Canis familiaris
tgcgctcggtgcgatactgatgatg

SEQ ID NO: 177888 - DNA, 25 bp, Canis familiaris
tgcgtctctgccgtcagatatgcat

SEQ ID NO: 177889 - DNA, 25 bp, Canis familiaris
tgctgtctcttggctgcagaataaa

SEQ ID NO: 177890 - DNA, 25 bp, Canis familiaris
tgctcctctctggatgagacagata

SEQ ID NO: 177891 - DNA, 25 bp, Canis familiaris
tgctcccctctatgactgtaatgca

SEQ ID NO: 177892 - DNA, 25 bp, Canis familiaris
tgcccacatttatccttacatggaa

SEQ ID NO: 177893 - DNA, 25 bp, Canis familiaris
tgcgcccatttatctccaattgcgt

SEQ ID NO: 177894 - DNA, 25 bp, Canis familiaris
tgctgccatttttgactgcaccagt

SEQ ID NO: 177895 - DNA, 25 bp, Canis familiaris
tgctggatttaaaccaccacctctt

SEQ ID NO: 177896 - DNA, 25 bp, Canis familiaris
tgctgttttcacgaccaacacttat

SEQ ID NO: 177897 - DNA, 25 bp, Canis familiaris
tgctgaagttctgaccaaagctgaa

SEQ ID NO: 177898 - DNA, 25 bp, Canis familiaris
tgctgccgtactaaccacaggtgat

SEQ ID NO: 177899 - DNA, 25 bp, Canis familiaris
tgctgccagggcacaccaatggtgc

SEQ ID NO: 177900 - DNA, 25 bp, Canis familiaris
tgctgcctagtgatcaccgatgacc

SEQ ID NO: 177901 - DNA, 25 bp, Canis familiaris
tgctcctggtgtgacccatgagctc

SEQ ID NO: 177902 - DNA, 25 bp, Canis familiaris
tgcccttgtggaaaccaacatcaga

SEQ ID NO: 177903 - DNA, 25 bp, Canis familiaris
tgctccacatgtgtaatatccccaa

SEQ ID NO: 177904 - DNA, 25 bp, Canis familiaris
tgctccacttgcagaaactccatca

SEQ ID NO: 177905 - DNA, 25 bp, Canis familiaris
tgctgcccttgtcaaaagtcaccat

SEQ ID NO: 177906 - DNA, 25 bp, Canis familiaris
tgctccaccttgctatatggtcgga

SEQ ID NO: 177907 - DNA, 25 bp, Canis familiaris
tgctgccccttgcttgggaagaagc

SEQ ID NO: 177908 - DNA, 25 bp, Canis familiaris
tgctgcccccaggattggtgagaca

SEQ ID NO: 177909 - DNA, 25 bp, Canis familiaris
tgctgccctcctggatggttgagaa

SEQ ID NO: 177910 - DNA, 25 bp, Canis familiaris
tgctgcctctagggctggactgagg

SEQ ID NO: 177911 - DNA, 25 bp, Canis familiaris
tgctgcgctgtagtgaggggcaagt

SEQ ID NO: 177912 - DNA, 25 bp, Canis familiaris
tgctgcctgccagtggagctgagca

SEQ ID NO: 177913 - DNA, 25 bp, Canis familiaris
tgctggagcgagactgagccagcac

SEQ ID NO: 177914 - DNA, 25 bp, Canis familiaris
tgctgagcgggtcgaccgcatcatc

SEQ ID NO: 177915 - DNA, 25 bp, Canis familiaris
tgctgagcaggtgcaaccaccacgc

SEQ ID NO: 177916 - DNA, 25 bp, Canis familiaris
tgctgcacagggcaacgcagcccac

SEQ ID NO: 177917 - DNA, 25 bp, Canis familiaris
tgcccaaggcacaaaagcccagagc

SEQ ID NO: 177918 - DNA, 25 bp, Canis familiaris
tgcccaaagatgacagccacccggg

SEQ ID NO: 177919 - DNA, 25 bp, Canis familiaris
tgcccagcaagtggagtccaccgcc

SEQ ID NO: 177920 - DNA, 25 bp, Canis familiaris
tgctccatctgcagggttctaggac

SEQ ID NO: 177921 - DNA, 25 bp, Canis familiaris
tgctgtgcagctcatgggttaaaga

SEQ ID NO: 177922 - DNA, 25 bp, Canis familiaris
tgctggagtcagtcggtgttgaaca

SEQ ID NO: 177923 - DNA, 25 bp, Canis familiaris
tgctggcagccaacgagagggagga

SEQ ID NO: 177924 - DNA, 25 bp, Canis familiaris
tgcgtgcaggcaaggggggagcggg

SEQ ID NO: 177925 - DNA, 25 bp, Canis familiaris
tgcgaccagagggagggcctgggcc

SEQ ID NO: 177926 - DNA, 25 bp, Canis familiaris
tgcgatcccgacaggagccagaggg

SEQ ID NO: 177927 - DNA, 25 bp, Canis familiaris
tgcgtccttgtgcagccagaaggag

SEQ ID NO: 177928 - DNA, 25 bp, Canis familiaris
tgcggtctcttgccatgtgataagg

SEQ ID NO: 177929 - DNA, 25 bp, Canis familiaris
tgcggttgttctcgtctgagggaga

SEQ ID NO: 177930 - DNA, 25 bp, Canis familiaris
tgctggttctgtacgacgagctgaa

SEQ ID NO: 177931 - DNA, 25 bp, Canis familiaris
tgctgggccataaccagctggtaag

SEQ ID NO: 177932 - DNA, 25 bp, Canis familiaris
tgctggacttcaacaccttgtatca

SEQ ID NO: 177933 - DNA, 25 bp, Canis familiaris
tgctggatcccacagccaagcaaga

SEQ ID NO: 177934 - DNA, 25 bp, Canis familiaris
tcataccattcacacctaaagactg

SEQ ID NO: 177935 - DNA, 25 bp, Canis familiaris
tcattccaaccctgtaaccattaga

SEQ ID NO: 177936 - DNA, 25 bp, Canis familiaris
tcctctacaccgtgtactccacggt

SEQ ID NO: 177937 - DNA, 25 bp, Canis familiaris
tgcgatctaaccaacttacacacac

SEQ ID NO: 177938 - DNA, 25 bp, Canis familiaris
tgcgtctcacacatattctacaata

SEQ ID NO: 177939 - DNA, 25 bp, Canis familiaris
tgcgtgccacagctgttacaatttc

SEQ ID NO: 177940 - DNA, 25 bp, Canis familiaris
tgctgtccaaggtgtaaatattcaa

SEQ ID NO: 177941 - DNA, 25 bp, Canis familiaris
tgctccaaatggtgtaggtgttctg

SEQ ID NO: 177942 - DNA, 25 bp, Canis familiaris
tgcccaaatcagccacgtttttctg

SEQ ID NO: 177943 - DNA, 25 bp, Canis familiaris
tgctccaattaaccccagtttttat

SEQ ID NO: 177944 - DNA, 25 bp, Canis familiaris
tgccctgtaaatccgtggtttttgc

SEQ ID NO: 177945 - DNA, 25 bp, Canis familiaris
tgcccttagatctccatttttatca

SEQ ID NO: 177946 - DNA, 25 bp, Canis familiaris
tgctccactagagaccaaaccacca

SEQ ID NO: 177947 - DNA, 25 bp, Canis familiaris
tgcctcaatagaggatcgggccccc

SEQ ID NO: 177948 - DNA, 25 bp, Canis familiaris
tgctccaaggaggtagccactgcca

SEQ ID NO: 177949 - DNA, 25 bp, Canis familiaris
tgctgccagaggcagctcgccaggc

SEQ ID NO: 177950 - DNA, 25 bp, Canis familiaris
tgcccatcgccatgagcatcaaggc

SEQ ID NO: 177951 - DNA, 25 bp, Canis familiaris
tgccctggcagatgacacgtgatgt

SEQ ID NO: 177952 - DNA, 25 bp, Canis familiaris
tgcgcctgctggaagatgccgatta

SEQ ID NO: 177953 - DNA, 25 bp, Canis familiaris
tgcgactgtgcaaatgatgtgcaaa

SEQ ID NO: 177954 - DNA, 25 bp, Canis familiaris
tgcggcggcaatcgtgcgcaatgaa

SEQ ID NO: 177955 - DNA, 25 bp, Canis familiaris
tgcgggcagcacaatgggccattca

SEQ ID NO: 177956 - DNA, 25 bp, Canis familiaris
tgctggcgccgcaggcgccaggcag

SEQ ID NO: 177957 - DNA, 25 bp, Canis familiaris
tgctggagtcggcgcgcaaagcgaa

SEQ ID NO: 177958 - DNA, 25 bp, Canis familiaris
tgctgggagcagccaaagcaaagga

SEQ ID NO: 177959 - DNA, 25 bp, Canis familiaris
tgcgggcagcttgcaagaaaggtgc

SEQ ID NO: 177960 - DNA, 25 bp, Canis familiaris
tgccgcgatgtcgcacagtaccggc

SEQ ID NO: 177961 - DNA, 25 bp, Canis familiaris
tgccctggctcacaagtaccattga

SEQ ID NO: 177962 - DNA, 25 bp, Canis familiaris
tgccctgcctaagaaaccttgtgtt

SEQ ID NO: 177963 - DNA, 25 bp, Canis familiaris
tgccctcttgcgcaaaacgtttttg

SEQ ID NO: 177964 - DNA, 25 bp, Canis familiaris
tgccgcttccggtagaagcccttat

SEQ ID NO: 177965 - DNA, 25 bp, Canis familiaris
tgcggcttcaagaccagaagctgcc

SEQ ID NO: 177966 - DNA, 25 bp, Canis familiaris
tgcgctgcattcagacacgggacac

SEQ ID NO: 177967 - DNA, 25 bp, Canis familiaris
tgcgtgtgtccaaactgcgagaccc

SEQ ID NO: 177968 - DNA, 25 bp, Canis familiaris
tgcgtgtggcccctgaggagcaccc

SEQ ID NO: 177969 - DNA, 25 bp, Canis familiaris
tgcggtgtgtgcgggacacaagccc

SEQ ID NO: 177970 - DNA, 25 bp, Canis familiaris
tgctggggccttgaacagagcaccc

SEQ ID NO: 177971 - DNA, 25 bp, Canis familiaris
tgcggagggcaacaaggacagcttc

SEQ ID NO: 177972 - DNA, 25 bp, Canis familiaris
tccagagggacgccaagtacctttc

SEQ ID NO: 177973 - DNA, 25 bp, Canis familiaris
tccacgaggactccacagtactttg

SEQ ID NO: 177974 - DNA, 25 bp, Canis familiaris
tccagtacgtctcaacaattctagg

SEQ ID NO: 177975 - DNA, 25 bp, Canis familiaris
tgccctactctggtccaaatggtag

SEQ ID NO: 177976 - DNA, 25 bp, Canis familiaris
tgccctattctttctaccagagtac

SEQ ID NO: 177977 - DNA, 25 bp, Canis familiaris
tgccctgacttgtcgtaacgcagta

SEQ ID NO: 177978 - DNA, 25 bp, Canis familiaris
tgcccacctaacctaacttgaatca

SEQ ID NO: 177979 - DNA, 25 bp, Canis familiaris
tgctgctacctatcccaaataaaat

SEQ ID NO: 177980 - DNA, 25 bp, Canis familiaris
tgctgcttccaatcaccaaaatata

SEQ ID NO: 177981 - DNA, 25 bp, Canis familiaris
tgctggcatccatgaaacaacttat

SEQ ID NO: 177982 - DNA, 25 bp, Canis familiaris
tgcggcttctgactaaatacatcta

SEQ ID NO: 177983 - DNA, 25 bp, Canis familiaris
tgcgttttggcttcacatggtttaa

SEQ ID NO: 177984 - DNA, 25 bp, Canis familiaris
tgctgtatatgctgaaatttttgta

SEQ ID NO: 177985 - DNA, 25 bp, Canis familiaris
tgcgcttcatcttacaacttgtggt

SEQ ID NO: 177986 - DNA, 25 bp, Canis familiaris
tgcgctgctctttctgtaatgtgcg

SEQ ID NO: 177987 - DNA, 25 bp, Canis familiaris
tgctggcactgctgtgtgccttggc

SEQ ID NO: 177988 - DNA, 25 bp, Canis familiaris
tgctgtccctgtatgcctctggtcg

SEQ ID NO: 177989 - DNA, 25 bp, Canis familiaris
tgcgttcgctgaaaggcatcggtgc

SEQ ID NO: 177990 - DNA, 25 bp, Canis familiaris
tgcgacggcgaggggtcgtgtctga

SEQ ID NO: 177991 - DNA, 25 bp, Canis familiaris
tgccaccaacagggtgtccttctta

SEQ ID NO: 177992 - DNA, 25 bp, Canis familiaris
tgcccatccaagactagatcctact

SEQ ID NO: 177993 - DNA, 25 bp, Canis familiaris
tgctgctcaccatagttgatacccc

SEQ ID NO: 177994 - DNA, 25 bp, Canis familiaris
tgctgctaccaaggctgtgggcctc

SEQ ID NO: 177995 - DNA, 25 bp, Canis familiaris
tgctgtccccaggggcaaggcacac

SEQ ID NO: 177996 - DNA, 25 bp, Canis familiaris
tgctgtcctccacttacaaacaagg

SEQ ID NO: 177997 - DNA, 25 bp, Canis familiaris
tgctgctcccgtcgtagcaagaaga

SEQ ID NO: 177998 - DNA, 25 bp, Canis familiaris
tgcctctgccttctggattaaagcc

SEQ ID NO: 177999 - DNA, 25 bp, Canis familiaris
tgcctttttggggtctgtgaagcct

SEQ ID NO: 178000 - DNA, 25 bp, Canis familiaris
tgcctttaatggttccctgtggcct

SEQ ID NO: 178001 - DNA, 25 bp, Canis familiaris
tcctttaatttacctggtgacctca

SEQ ID NO: 178002 - DNA, 25 bp, Canis familiaris
tgccttctactgataccggagcacc

SEQ ID NO: 178003 - DNA, 25 bp, Canis familiaris
tccatacccatgatacatcaggggc

SEQ ID NO: 178004 - DNA, 25 bp, Canis familiaris
tccttcgccaaggacttcctggcgg

SEQ ID NO: 178005 - DNA, 25 bp, Canis familiaris
tccgacctcaaagcccagctgaggg

SEQ ID NO: 178006 - DNA, 25 bp, Canis familiaris
tgccgaccccactgtacagtaagta

SEQ ID NO: 178007 - DNA, 25 bp, Canis familiaris
tgccccccatagttgggccgaagct

SEQ ID NO: 178008 - DNA, 25 bp, Canis familiaris
tgccctcccaacttgggttgtactc

SEQ ID NO: 178009 - DNA, 25 bp, Canis familiaris
tgcctccctcaaatttagaaatact

SEQ ID NO: 178010 - DNA, 25 bp, Canis familiaris
tgcccaggccccgattagaagatga

SEQ ID NO: 178011 - DNA, 25 bp, Canis familiaris
tgcccaactcacccagtgaattgga

SEQ ID NO: 178012 - DNA, 25 bp, Canis familiaris
tgccccctactgaagtgacgtgaga

SEQ ID NO: 178013 - DNA, 25 bp, Canis familiaris
tgcccaccaacgtggggtccgaagc

SEQ ID NO: 178014 - DNA, 25 bp, Canis familiaris
tgccctccaacagggaaggtgcact

SEQ ID NO: 178015 - DNA, 25 bp, Canis familiaris
tgcctcccaccaccaaagtgggtgc

SEQ ID NO: 178016 - DNA, 25 bp, Canis familiaris
tgcccccacccatgtgaagggttca

SEQ ID NO: 178017 - DNA, 25 bp, Canis familiaris
tgctggccgcgcttcaaggaagctg

SEQ ID NO: 178018 - DNA, 25 bp, Canis familiaris
tgcggcaagcagttcaaccacagca

SEQ ID NO: 178019 - DNA, 25 bp, Canis familiaris
tgcgaggagcaggtggtcagccagc

SEQ ID NO: 178020 - DNA, 25 bp, Canis familiaris
tgcgcagtccagttgcgacaggcac

SEQ ID NO: 178021 - DNA, 25 bp, Canis familiaris
tgcggctgccaaggcaacagcccag

SEQ ID NO: 178022 - DNA, 25 bp, Canis familiaris
tgctggtgttgcggcgaagtccagt

SEQ ID NO: 178023 - DNA, 25 bp, Canis familiaris
tgcgtgatttggccttggcttcagc

SEQ ID NO: 178024 - DNA, 25 bp, Canis familiaris
tgcgagaacggcgtgtgcgtgtgcc

SEQ ID NO: 178025 - DNA, 25 bp, Canis familiaris
tgcgaaacgcccatgcgaagctcaa

SEQ ID NO: 178026 - DNA, 25 bp, Canis familiaris
tgcgaacaccccggagaaaaggctc

SEQ ID NO: 178027 - DNA, 25 bp, Canis familiaris
tgctgaccactcgacgacgaaaggg

SEQ ID NO: 178028 - DNA, 25 bp, Canis familiaris
tgcgtcctccgagactgagcaagag

SEQ ID NO: 178029 - DNA, 25 bp, Canis familiaris
tgctgtgcctctgtggtctgaaaag

SEQ ID NO: 178030 - DNA, 25 bp, Canis familiaris
tgctggcctctgtgtggtgaagaaa

SEQ ID NO: 178031 - DNA, 25 bp, Canis familiaris
tgctgttgcctcctgttgtgaaaaa

SEQ ID NO: 178032 - DNA, 25 bp, Canis familiaris
tgctgtgtgagcacttttgtaaaac

SEQ ID NO: 178033 - DNA, 25 bp, Canis familiaris
tgccggagcaacctttgctaacctc

SEQ ID NO: 178034 - DNA, 25 bp, Canis familiaris
tgcgcggtaccactttgaggacgtg

SEQ ID NO: 178035 - DNA, 25 bp, Canis familiaris
tgcgggatgggagttcgggagcggc

SEQ ID NO: 178036 - DNA, 25 bp, Canis familiaris
tgcgcggggacagacgaggacggag

SEQ ID NO: 178037 - DNA, 25 bp, Canis familiaris
tcccgaggaagtgcgagtcgccggc

SEQ ID NO: 178038 - DNA, 25 bp, Canis familiaris
tcagtaaggacaccaggcgggccag

SEQ ID NO: 178039 - DNA, 25 bp, Canis familiaris
tgctgtgacagctaaggcaggggtg

SEQ ID NO: 178040 - DNA, 25 bp, Canis familiaris
tgcgaacgtccggcaggtggatgtc

SEQ ID NO: 178041 - DNA, 25 bp, Canis familiaris
tgcgcacactgtgtccgggtgtgtg

SEQ ID NO: 178042 - DNA, 25 bp, Canis familiaris
tgcgcacacttgatgaaggtgtttt

SEQ ID NO: 178043 - DNA, 25 bp, Canis familiaris
tcgaatcttaatcacttttttttct

SEQ ID NO: 178044 - DNA, 25 bp, Canis familiaris
tcgactcttttgcaccattttattt

SEQ ID NO: 178045 - DNA, 25 bp, Canis familiaris
tgcccttgtttgcatcctttattta

SEQ ID NO: 178046 - DNA, 25 bp, Canis familiaris
tgcctctcctttgtatattgtttct

SEQ ID NO: 178047 - DNA, 25 bp, Canis familiaris
tgccgttactttcacattcatttgt

SEQ ID NO: 178048 - DNA, 25 bp, Canis familiaris
tgcctgttagcatatcaaattctta

SEQ ID NO: 178049 - DNA, 25 bp, Canis familiaris
tgctgtttgagctgcaaaagctgcc

SEQ ID NO: 178050 - DNA, 25 bp, Canis familiaris
tgctgttagatctcagccactgccg

SEQ ID NO: 178051 - DNA, 25 bp, Canis familiaris
tgctgggcaagctcagcaacccgat

SEQ ID NO: 178052 - DNA, 25 bp, Canis familiaris
tgctgatggcagacctacaatcctc

SEQ ID NO: 178053 - DNA, 25 bp, Canis familiaris
tgctggtgatgttctggcaatccct

SEQ ID NO: 178054 - DNA, 25 bp, Canis familiaris
tgctgtggagcttggtgaatcttta

SEQ ID NO: 178055 - DNA, 25 bp, Canis familiaris
tgctgtgggctgggttattttttta

SEQ ID NO: 178056 - DNA, 25 bp, Canis familiaris
tgctggatggtgtttttgttttttt

SEQ ID NO: 178057 - DNA, 25 bp, Canis familiaris
tgctgtgtgctttttagctgttagt

SEQ ID NO: 178058 - DNA, 25 bp, Canis familiaris
tgcgcttgcgtgtttagctttgcac

SEQ ID NO: 178059 - DNA, 25 bp, Canis familiaris
tgcctatgcctgctgttgcttaaac

SEQ ID NO: 178060 - DNA, 25 bp, Canis familiaris
tgcctgtagctccttcaggtcaaag

SEQ ID NO: 178061 - DNA, 25 bp, Canis familiaris
tcacttactactcaggggaaaaaga

SEQ ID NO: 178062 - DNA, 25 bp, Canis familiaris
tcctttctaatttggggctaataag

SEQ ID NO: 178063 - DNA, 25 bp, Canis familiaris
tgctgtgttcccttaggggccacaa

SEQ ID NO: 178064 - DNA, 25 bp, Canis familiaris
tgcgtttccaagagatgtggccagg

SEQ ID NO: 178065 - DNA, 25 bp, Canis familiaris
tgcgtgtctccatcacagagtcgca

SEQ ID NO: 178066 - DNA, 25 bp, Canis familiaris
tgctgttctgctgagacatggccca

SEQ ID NO: 178067 - DNA, 25 bp, Canis familiaris
tgctgtccagcttaactggcctgca

SEQ ID NO: 178068 - DNA, 25 bp, Canis familiaris
tgctgttcatcaacatagtgtcctg

SEQ ID NO: 178069 - DNA, 25 bp, Canis familiaris
tgctgttctgcaactggagcacgct

SEQ ID NO: 178070 - DNA, 25 bp, Canis familiaris
tgctgaagcctgccgcctgcaccat

SEQ ID NO: 178071 - DNA, 25 bp, Canis familiaris
tgctgagggtggccaagcccaagtc

SEQ ID NO: 178072 - DNA, 25 bp, Canis familiaris
tccgagggagcctcccaagtttctt

SEQ ID NO: 178073 - DNA, 25 bp, Canis familiaris
tccacggaaccatcctaaatttagt

SEQ ID NO: 178074 - DNA, 25 bp, Canis familiaris
tccaggggactagcctgaaacccgc

SEQ ID NO: 178075 - DNA, 25 bp, Canis familiaris
tccaggaagagtaccaaaaagccca

SEQ ID NO: 178076 - DNA, 25 bp, Canis familiaris
tcctaacaaatccacaaaagagccc

SEQ ID NO: 178077 - DNA, 25 bp, Canis familiaris
tcctccttaaacaaaaactgcccat

SEQ ID NO: 178078 - DNA, 25 bp, Canis familiaris
tcctacgtaaacaaaatctttccat

SEQ ID NO: 178079 - DNA, 25 bp, Canis familiaris
tcctaggtccacccagaattatccc

SEQ ID NO: 178080 - DNA, 25 bp, Canis familiaris
tcctgcggtcactgtaatcaacccc

SEQ ID NO: 178081 - DNA, 25 bp, Canis familiaris
tgcccgggaccctatcatggtcccc

SEQ ID NO: 178082 - DNA, 25 bp, Canis familiaris
tgcctccggacgagatctcgttcac

SEQ ID NO: 178083 - DNA, 25 bp, Canis familiaris
tgcggccggtctatgactagtggtc

SEQ ID NO: 178084 - DNA, 25 bp, Canis familiaris
tcgcgtccgttagactcagggtcga

SEQ ID NO: 178085 - DNA, 25 bp, Canis familiaris
tgccggcctttcggaacgggacata

SEQ ID NO: 178086 - DNA, 25 bp, Canis familiaris
tcccccgttcgggaatgtggaccag

SEQ ID NO: 178087 - DNA, 25 bp, Canis familiaris
tcccggtttcagtgaagtaaacagt

SEQ ID NO: 178088 - DNA, 25 bp, Canis familiaris
tctccccatttccggaagtaaatcg

SEQ ID NO: 178089 - DNA, 25 bp, Canis familiaris
tctccccatttccggaagtaaatcg

SEQ ID NO: 178090 - DNA, 25 bp, Canis familiaris
tctccccatttccggaagtaaatcg

SEQ ID NO: 178091 - DNA, 25 bp, Canis familiaris
tcctccttttggggttttaatgctg

SEQ ID NO: 178092 - DNA, 25 bp, Canis familiaris
tccacttatttagggtttatccaca

SEQ ID NO: 178093 - DNA, 25 bp, Canis familiaris
tgccctctctactgaggcttgtcac

SEQ ID NO: 178094 - DNA, 25 bp, Canis familiaris
tgcccttctaccaacacatttaaaa

SEQ ID NO: 178095 - DNA, 25 bp, Canis familiaris
tgccttcccactactcgtggtgaaa

SEQ ID NO: 178096 - DNA, 25 bp, Canis familiaris
tgccggccaactgaagggggaacct

SEQ ID NO: 178097 - DNA, 25 bp, Canis familiaris
tgccggacgcgcagaagcgggagat

SEQ ID NO: 178098 - DNA, 25 bp, Canis familiaris
tgcggaggggcaggaacggggctcc

SEQ ID NO: 178099 - DNA, 25 bp, Canis familiaris
tgcggacggggtggacgcagggcaa

SEQ ID NO: 178100 - DNA, 25 bp, Canis familiaris
tgccgtcggggtgacagtcgacacc

SEQ ID NO: 178101 - DNA, 25 bp, Canis familiaris
tgccgggtgggtttgctggcaggac

SEQ ID NO: 178102 - DNA, 25 bp, Canis familiaris
tgcgcaacgttggtcttggaaggac

SEQ ID NO: 178103 - DNA, 25 bp, Canis familiaris
tgcgcccgcttcgtatttagagaga

SEQ ID NO: 178104 - DNA, 25 bp, Canis familiaris
tcaaccagttcctttatatgggttt

SEQ ID NO: 178105 - DNA, 25 bp, Canis familiaris
tgccaccagcttcctttaattagat

SEQ ID NO: 178106 - DNA, 25 bp, Canis familiaris
tgccccgaaggcatataattcagat

SEQ ID NO: 178107 - DNA, 25 bp, Canis familiaris
tgccccgcaagccgtgcaaaataaa

SEQ ID NO: 178108 - DNA, 25 bp, Canis familiaris
tgccggccatagcgccagagaatag

SEQ ID NO: 178109 - DNA, 25 bp, Canis familiaris
tgcgcgtgatctgcaagctcaggca

SEQ ID NO: 178110 - DNA, 25 bp, Canis familiaris
tgccctgtgccaaaggcaggcactg

SEQ ID NO: 178111 - DNA, 25 bp, Canis familiaris
tgcgctttgccaagatgccagatga

SEQ ID NO: 178112 - DNA, 25 bp, Canis familiaris
tgcgcttggccaaggaagcccaaca

SEQ ID NO: 178113 - DNA, 25 bp, Canis familiaris
tgctgtctggccaggaacgtcagga

SEQ ID NO: 178114 - DNA, 25 bp, Canis familiaris
tgctgtcgtctgaggtactgtcgta

SEQ ID NO: 178115 - DNA, 25 bp, Canis familiaris
tgctggcggctggtttacgccgctt

SEQ ID NO: 178116 - DNA, 25 bp, Canis familiaris
tgctggggctgagtgtctccagcgc

SEQ ID NO: 178117 - DNA, 25 bp, Canis familiaris
tgctgaggtgtgtgacacacagaca

SEQ ID NO: 178118 - DNA, 25 bp, Canis familiaris
tgctggcggtagagaccagcccggc

SEQ ID NO: 178119 - DNA, 25 bp, Canis familiaris
tgctggggcgaaaggcccaccagga

SEQ ID NO: 178120 - DNA, 25 bp, Canis familiaris
tgctggaaggaaggtggcaccccga

SEQ ID NO: 178121 - DNA, 25 bp, Canis familiaris
tgctgtgatggggagggagcccact

SEQ ID NO: 178122 - DNA, 25 bp, Canis familiaris
tgctgtctggggcaggagaccacag

SEQ ID NO: 178123 - DNA, 25 bp, Canis familiaris
tgcgaccggtcccggacaatcagga

SEQ ID NO: 178124 - DNA, 25 bp, Canis familiaris
tgcgatcctgcaggcccaggatacc

SEQ ID NO: 178125 - DNA, 25 bp, Canis familiaris
tgcgatggctgcaagtaagtccccc

SEQ ID NO: 178126 - DNA, 25 bp, Canis familiaris
tgcggggcaataaagtcctcctccc

SEQ ID NO: 178127 - DNA, 25 bp, Canis familiaris
tgcggcggaatcacaggctgattac

SEQ ID NO: 178128 - DNA, 25 bp, Canis familiaris
tgcctcaggcaacctggggcttaca

SEQ ID NO: 178129 - DNA, 25 bp, Canis familiaris
tgcccagagacatcaggaggcctcc

SEQ ID NO: 178130 - DNA, 25 bp, Canis familiaris
tgccggaaccactgagatggcccca

SEQ ID NO: 178131 - DNA, 25 bp, Canis familiaris
tgcccaacctcacaaaggcatcctc

SEQ ID NO: 178132 - DNA, 25 bp, Canis familiaris
tgccctacgttatcagagacttctc

SEQ ID NO: 178133 - DNA, 25 bp, Canis familiaris
tgcccgacaggaaagaggaccccgc

SEQ ID NO: 178134 - DNA, 25 bp, Canis familiaris
tgccgagaaggtgacgtccctgggc

SEQ ID NO: 178135 - DNA, 25 bp, Canis familiaris
tgccggcaaggagctgttttctgag

SEQ ID NO: 178136 - DNA, 25 bp, Canis familiaris
tgccgacaagccaacgtggttctgg

SEQ ID NO: 178137 - DNA, 25 bp, Canis familiaris
tgcggaatcaccaggggctgctgtt

SEQ ID NO: 178138 - DNA, 25 bp, Canis familiaris
tgcggaacatccagcggagccggaa

SEQ ID NO: 178139 - DNA, 25 bp, Canis familiaris
tgcggggcaactgcgagagcatccg

SEQ ID NO: 178140 - DNA, 25 bp, Canis familiaris
tgcggtggcaacgactgagctgtga

SEQ ID NO: 178141 - DNA, 25 bp, Canis familiaris
tgcgggctaaatactggctctgacc

SEQ ID NO: 178142 - DNA, 25 bp, Canis familiaris
tgcgcgagtacaaccgggcgagcaa

SEQ ID NO: 178143 - DNA, 25 bp, Canis familiaris
tgcgcagttccagctgcggacagga

SEQ ID NO: 178144 - DNA, 25 bp, Canis familiaris
tgcggttcacatcctgtggacgagt

SEQ ID NO: 178145 - DNA, 25 bp, Canis familiaris
tgcggctccatctggtgggggagaa

SEQ ID NO: 178146 - DNA, 25 bp, Canis familiaris
tgcggcccccgagagaggagaagag

SEQ ID NO: 178147 - DNA, 25 bp, Canis familiaris
tgcccttcccttgtgagttaatgca

SEQ ID NO: 178148 - DNA, 25 bp, Canis familiaris
tgcccactgcctgtttgagggactc

SEQ ID NO: 178149 - DNA, 25 bp, Canis familiaris
tgcccttgcctgtctatagcaggtt

SEQ ID NO: 178150 - DNA, 25 bp, Canis familiaris
tgcgccggttgaaaacaggtgtcga

SEQ ID NO: 178151 - DNA, 25 bp, Canis familiaris
tgcgccaagttctcaatcagcggcc

SEQ ID NO: 178152 - DNA, 25 bp, Canis familiaris
tgcccggctttttggcatcagggcc

SEQ ID NO: 178153 - DNA, 25 bp, Canis familiaris
tgccctgcccaatttgtctgggacc

SEQ ID NO: 178154 - DNA, 25 bp, Canis familiaris
tgccttttctcattcagtggggacc

SEQ ID NO: 178155 - DNA, 25 bp, Canis familiaris
tgcctgtttgtaccgtggtgtacgt

SEQ ID NO: 178156 - DNA, 25 bp, Canis familiaris
tgccctgttgtaccgtgggtgacgt

SEQ ID NO: 178157 - DNA, 25 bp, Canis familiaris
tgcccgggccgatgtggagaaggtc

SEQ ID NO: 178158 - DNA, 25 bp, Canis familiaris
tgccctgggtccttgtgtattagag

SEQ ID NO: 178159 - DNA, 25 bp, Canis familiaris
tgccctggttcgggctttgtcgaat

SEQ ID NO: 178160 - DNA, 25 bp, Canis familiaris
tgcccatggaacccagtgttgtcga

SEQ ID NO: 178161 - DNA, 25 bp, Canis familiaris
tgccttctgaacccgttagcagtca

SEQ ID NO: 178162 - DNA, 25 bp, Canis familiaris
tgcgctctgctgaaggccggaaaaa

SEQ ID NO: 178163 - DNA, 25 bp, Canis familiaris
tgcccctgaagagccgtgtagcaag

SEQ ID NO: 178164 - DNA, 25 bp, Canis familiaris
tgccctcaacgaccactttgtcaag

SEQ ID NO: 178165 - DNA, 25 bp, Canis familiaris
tgcccaggacgtcggttgagtcacg

SEQ ID NO: 178166 - DNA, 25 bp, Canis familiaris
tgccgggtagcactggtgtgactcc

SEQ ID NO: 178167 - DNA, 25 bp, Canis familiaris
tgccgaggtgatccggctcatggcc

SEQ ID NO: 178168 - DNA, 25 bp, Canis familiaris
tgccagcatggttcacgtccaaggc

SEQ ID NO: 178169 - DNA, 25 bp, Canis familiaris
tgccgcagtttgtctgagctgaagg

SEQ ID NO: 178170 - DNA, 25 bp, Canis familiaris
tgcgtgagcctggtggagctgacat

SEQ ID NO: 178171 - DNA, 25 bp, Canis familiaris
tgcggcagcacctggaggatatcct

SEQ ID NO: 178172 - DNA, 25 bp, Canis familiaris
tgctgggcaacaggtcaggagacct

SEQ ID NO: 178173 - DNA, 25 bp, Canis familiaris
tgcgggcaaaggccaagtcccggtc

SEQ ID NO: 178174 - DNA, 25 bp, Canis familiaris
tgcctgaagaagcacaagtccggcg

SEQ ID NO: 178175 - DNA, 25 bp, Canis familiaris
tgcctgacggtgtcaacgtccggga

SEQ ID NO: 178176 - DNA, 25 bp, Canis familiaris
tgccttaggtcctgggcacggaggt

SEQ ID NO: 178177 - DNA, 25 bp, Canis familiaris
tgcgtctgatggtctcaagggtcgg

SEQ ID NO: 178178 - DNA, 25 bp, Canis familiaris
tgcgtgagggaggcagcggggggac

SEQ ID NO: 178179 - DNA, 25 bp, Canis familiaris
tgcgtgagcggctcagtcggaagcg

SEQ ID NO: 178180 - DNA, 25 bp, Canis familiaris
tgcggacgcgcgagagcgaggagca

SEQ ID NO: 178181 - DNA, 25 bp, Canis familiaris
tgcggcagggcctgggagtggatcc

SEQ ID NO: 178182 - DNA, 25 bp, Canis familiaris
tgcccggcagtcagggcagggaccc

SEQ ID NO: 178183 - DNA, 25 bp, Canis familiaris
tgccctggacccaaaagttgcactc

SEQ ID NO: 178184 - DNA, 25 bp, Canis familiaris
tgcccaggacccaatatggacttct

SEQ ID NO: 178185 - DNA, 25 bp, Canis familiaris
tgcccagttggtgaagagacttaca

SEQ ID NO: 178186 - DNA, 25 bp, Canis familiaris
tgcccctgggtctcaggacagtgga

SEQ ID NO: 178187 - DNA, 25 bp, Canis familiaris
tgcctcccggtttcagtgaagtaaa

SEQ ID NO: 178188 - DNA, 25 bp, Canis familiaris
tccaccgcggtccagggaagtgaaa

SEQ ID NO: 178189 - DNA, 25 bp, Canis familiaris
tgcccggtttgcagtgagaagtgaa

SEQ ID NO: 178190 - DNA, 25 bp, Canis familiaris
tgcctggtgctttcctgtgtacagg

SEQ ID NO: 178191 - DNA, 25 bp, Canis familiaris
tgccgagttttcctttgaggcgagg

SEQ ID NO: 178192 - DNA, 25 bp, Canis familiaris
tgccggatttctccatttagccaga

SEQ ID NO: 178193 - DNA, 25 bp, Canis familiaris
tgcggtcatcttcccattagagaag

SEQ ID NO: 178194 - DNA, 25 bp, Canis familiaris
tgctggtatctcctctcagtaagga

SEQ ID NO: 178195 - DNA, 25 bp, Canis familiaris
tgcgggtcgtgcatagctatgagga

SEQ ID NO: 178196 - DNA, 25 bp, Canis familiaris
tgcggtatcgtatggtagcatggat

SEQ ID NO: 178197 - DNA, 25 bp, Canis familiaris
tgcggatgctctcaggttcctgagt

SEQ ID NO: 178198 - DNA, 25 bp, Canis familiaris
tgccttgcttcatggttgccagaat

SEQ ID NO: 178199 - DNA, 25 bp, Canis familiaris
tgccttcttcagagttccgaattca

SEQ ID NO: 178200 - DNA, 25 bp, Canis familiaris
tgccttcttgtgaggctctctggat

SEQ ID NO: 178201 - DNA, 25 bp, Canis familiaris
tgcctccctattcgaaatcatggtg

SEQ ID NO: 178202 - DNA, 25 bp, Canis familiaris
tgcccctgtttcaacccatgaggga

SEQ ID NO: 178203 - DNA, 25 bp, Canis familiaris
tgccctctttctacaaccattgagc

SEQ ID NO: 178204 - DNA, 25 bp, Canis familiaris
tgcccaccttttagagtcttagggt

SEQ ID NO: 178205 - DNA, 25 bp, Canis familiaris
tccccacgaattaacagttactagt

SEQ ID NO: 178206 - DNA, 25 bp, Canis familiaris
tccacccgacaattatttttacgat

SEQ ID NO: 178207 - DNA, 25 bp, Canis familiaris
tgcccacaccaggttttgtttaacg

SEQ ID NO: 178208 - DNA, 25 bp, Canis familiaris
tgcctaacatcgcatttcatttaaa

SEQ ID NO: 178209 - DNA, 25 bp, Canis familiaris
tgcgacagcccactatattcatatt

SEQ ID NO: 178210 - DNA, 25 bp, Canis familiaris
tgcccgcgccacaatagtgatactc

SEQ ID NO: 178211 - DNA, 25 bp, Canis familiaris
tgccctggaatggccaggaatgcct

SEQ ID NO: 178212 - DNA, 25 bp, Canis familiaris
tgcccgagggcagcaaggacagctt

SEQ ID NO: 178213 - DNA, 25 bp, Canis familiaris
tgcgttagagcagccacaggacact

SEQ ID NO: 178214 - DNA, 25 bp, Canis familiaris
tgcgtgtagccagcaactcgacaca

SEQ ID NO: 178215 - DNA, 25 bp, Canis familiaris
tgcgcttacgtggacattggccatc

SEQ ID NO: 178216 - DNA, 25 bp, Canis familiaris
tgcgcttaggtcactgtagctcaca

SEQ ID NO: 178217 - DNA, 25 bp, Canis familiaris
tgcgcacacggttgtcttagtcatc

SEQ ID NO: 178218 - DNA, 25 bp, Canis familiaris
tgcgccatccagtggttggtgcagg

SEQ ID NO: 178219 - DNA, 25 bp, Canis familiaris
tgcgcgcacgtgggagttggcgtgg

SEQ ID NO: 178220 - DNA, 25 bp, Canis familiaris
tgcgcccatggacaatagggagggc

SEQ ID NO: 178221 - DNA, 25 bp, Canis familiaris
tgcgcgccaggacagaagcgggcac

SEQ ID NO: 178222 - DNA, 25 bp, Canis familiaris
tgccccaggaccagacggggaaggt

SEQ ID NO: 178223 - DNA, 25 bp, Canis familiaris
tgccccgaacaccgactggtgaaaa

SEQ ID NO: 178224 - DNA, 25 bp, Canis familiaris
tgcctgcctaccaggagctggtgga

SEQ ID NO: 178225 - DNA, 25 bp, Canis familiaris
tgcctgcagtaccatgggaagcgcc

SEQ ID NO: 178226 - DNA, 25 bp, Canis familiaris
tccaggatcacgctaaaccgctgag

SEQ ID NO: 178227 - DNA, 25 bp, Canis familiaris
tccatcagtatccccaaacggtaac

SEQ ID NO: 178228 - DNA, 25 bp, Canis familiaris
tccttccaggcgagaacggtaacac

SEQ ID NO: 178229 - DNA, 25 bp, Canis familiaris
tcctaccgggttcgagcggtggact

SEQ ID NO: 178230 - DNA, 25 bp, Canis familiaris
tgcccaccgtggtggccgtgggcag

SEQ ID NO: 178231 - DNA, 25 bp, Canis familiaris
tgcccaccgtgcgggtgtcggtggt

SEQ ID NO: 178232 - DNA, 25 bp, Canis familiaris
tgcctggcccgggtggcataagtgg

SEQ ID NO: 178233 - DNA, 25 bp, Canis familiaris
tgccgtcccctgtggagaatgtgta

SEQ ID NO: 178234 - DNA, 25 bp, Canis familiaris
tgccctttcaggtgggacagtgttg

SEQ ID NO: 178235 - DNA, 25 bp, Canis familiaris
tgcccttggggatgttgtcgtatct

SEQ ID NO: 178236 - DNA, 25 bp, Canis familiaris
tgcccaggggagcgttctaggtcgc

SEQ ID NO: 178237 - DNA, 25 bp, Canis familiaris
tccaagttggactgggcggcgtcct

SEQ ID NO: 178238 - DNA, 25 bp, Canis familiaris
tcctaggcggacttggggaaacctg

SEQ ID NO: 178239 - DNA, 25 bp, Canis familiaris
tccatccgggactcgggaacgtgca

SEQ ID NO: 178240 - DNA, 25 bp, Canis familiaris
tcctctttagccacagggaacctcc

SEQ ID NO: 178241 - DNA, 25 bp, Canis familiaris
tcccatttcaacaccaggaaacagc

SEQ ID NO: 178242 - DNA, 25 bp, Canis familiaris
tcccttccaggaaccaggaaccagg

SEQ ID NO: 178243 - DNA, 25 bp, Canis familiaris
tcccttcctgtaacgggggccaatg

SEQ ID NO: 178244 - DNA, 25 bp, Canis familiaris
tgcccattcggtaccagtggtggct

SEQ ID NO: 178245 - DNA, 25 bp, Canis familiaris
tgccctccaggaaccagggggcggc

SEQ ID NO: 178246 - DNA, 25 bp, Canis familiaris
tgcgctttcagagaccgaggggaga

SEQ ID NO: 178247 - DNA, 25 bp, Canis familiaris
tgccgtagtgccaccagaggcggaa

SEQ ID NO: 178248 - DNA, 25 bp, Canis familiaris
tgccattggtcctccaggggaaaag

SEQ ID NO: 178249 - DNA, 25 bp, Canis familiaris
tgcctctggtcgtaccacgggcatt

SEQ ID NO: 178250 - DNA, 25 bp, Canis familiaris
tgcccagtgttgtcacccagatggg

SEQ ID NO: 178251 - DNA, 25 bp, Canis familiaris
tgcccagtctttcccataattacta

SEQ ID NO: 178252 - DNA, 25 bp, Canis familiaris
tgcccctcttagcagtcagatttta

SEQ ID NO: 178253 - DNA, 25 bp, Canis familiaris
tgcccctgctgaagaacacgtgtta

SEQ ID NO: 178254 - DNA, 25 bp, Canis familiaris
tgctggcctgtgcacaagcaggggc

SEQ ID NO: 178255 - DNA, 25 bp, Canis familiaris
tgcgagcctgtgcaggtggcggtca

SEQ ID NO: 178256 - DNA, 25 bp, Canis familiaris
tgcggccatgcaggagtctgctgcg

SEQ ID NO: 178257 - DNA, 25 bp, Canis familiaris
tgctggcgcatcagagtctgtccac

SEQ ID NO: 178258 - DNA, 25 bp, Canis familiaris
tgcgagatcattcgagtctgtcctc

SEQ ID NO: 178259 - DNA, 25 bp, Canis familiaris
tgctggtcttcagtgatcttgctcc

SEQ ID NO: 178260 - DNA, 25 bp, Canis familiaris
tgctggtgcccatgcatctatgcac

SEQ ID NO: 178261 - DNA, 25 bp, Canis familiaris
tgcgggctccaccatggagcatgca

SEQ ID NO: 178262 - DNA, 25 bp, Canis familiaris
tgcgcagcctgcaacagctggagca

SEQ ID NO: 178263 - DNA, 25 bp, Canis familiaris
tgcgcatcagagaaaatgtggcaca

SEQ ID NO: 178264 - DNA, 25 bp, Canis familiaris
tgcgcatcagagaactccatctcca

SEQ ID NO: 178265 - DNA, 25 bp, Canis familiaris
tgcgaggagattgccatcatcccca

SEQ ID NO: 178266 - DNA, 25 bp, Canis familiaris
tgcgaggaataggcctgtacctcct

SEQ ID NO: 178267 - DNA, 25 bp, Canis familiaris
tgcggggagagacctcaatcctcct

SEQ ID NO: 178268 - DNA, 25 bp, Canis familiaris
tgctggaggggttgctcaagctctc

SEQ ID NO: 178269 - DNA, 25 bp, Canis familiaris
tgctggcagttatcgccaagctctc

SEQ ID NO: 178270 - DNA, 25 bp, Canis familiaris
tgctggaggccaatccacaggccac

SEQ ID NO: 178271 - DNA, 25 bp, Canis familiaris
tgccgggcaggtcacaggtgcaaag

SEQ ID NO: 178272 - DNA, 25 bp, Canis familiaris
tgcgttccaggacatgagccagaag

SEQ ID NO: 178273 - DNA, 25 bp, Canis familiaris
tgcgctaccaggagatcgccaagcg

SEQ ID NO: 178274 - DNA, 25 bp, Canis familiaris
tgcctaccatggtgaccacgggtga

SEQ ID NO: 178275 - DNA, 25 bp, Canis familiaris
tgccttccaggacgacgacgtcatt

SEQ ID NO: 178276 - DNA, 25 bp, Canis familiaris
tgccctcaagactgggagcagctct

SEQ ID NO: 178277 - DNA, 25 bp, Canis familiaris
tgccgctcacaagtccggtagacaa

SEQ ID NO: 178278 - DNA, 25 bp, Canis familiaris
tgcccgcaaagctcgcgctacaaaa

SEQ ID NO: 178279 - DNA, 25 bp, Canis familiaris
tgcccaaagacatccagctagcacg

SEQ ID NO: 178280 - DNA, 25 bp, Canis familiaris
tgccccaagcatatcaagtaccacc

SEQ ID NO: 178281 - DNA, 25 bp, Canis familiaris
tgcgctccaacaagatgaaagaaac

SEQ ID NO: 178282 - DNA, 25 bp, Canis familiaris
tgcgcttcgacaagcctatcaagca

SEQ ID NO: 178283 - DNA, 25 bp, Canis familiaris
tgcctatctgcatggcccaaacaca

SEQ ID NO: 178284 - DNA, 25 bp, Canis familiaris
tgcctttttggcttcagaatctctg

SEQ ID NO: 178285 - DNA, 25 bp, Canis familiaris
tgcctttttggcttcagaatctctg

SEQ ID NO: 178286 - DNA, 25 bp, Canis familiaris
tgcctcttatttctcaacttgcttt

SEQ ID NO: 178287 - DNA, 25 bp, Canis familiaris
tgcctggtactttccaatctggtgg

SEQ ID NO: 178288 - DNA, 25 bp, Canis familiaris
tgcccattcccttcagctatttgtc

SEQ ID NO: 178289 - DNA, 25 bp, Canis familiaris
tgccctcctggctcagttttgggca

SEQ ID NO: 178290 - DNA, 25 bp, Canis familiaris
tgccaccctggggaactttggccaa

SEQ ID NO: 178291 - DNA, 25 bp, Canis familiaris
tgcccagcactggggaatttttgct

SEQ ID NO: 178292 - DNA, 25 bp, Canis familiaris
tgcctacagcacccgaattatattc

SEQ ID NO: 178293 - DNA, 25 bp, Canis familiaris
tgcccacaactacactctgtatttc

SEQ ID NO: 178294 - DNA, 25 bp, Canis familiaris
tgccaagaagtagcacctttttccc

SEQ ID NO: 178295 - DNA, 25 bp, Canis familiaris
tctcaataaatagacccgcctttcc

SEQ ID NO: 178296 - DNA, 25 bp, Canis familiaris
tgccaaaaataaatctccggtgttc

SEQ ID NO: 178297 - DNA, 25 bp, Canis familiaris
tgccaaaatttttatcaggtttctt

SEQ ID NO: 178298 - DNA, 25 bp, Canis familiaris
tgccaggaatatttttaagttctcc

SEQ ID NO: 178299 - DNA, 25 bp, Canis familiaris
tgcccaggctacttttgaagcgatt

SEQ ID NO: 178300 - DNA, 25 bp, Canis familiaris
tccaaggccaacagaaatgagatct

SEQ ID NO: 178301 - DNA, 25 bp, Canis familiaris
tgccgaggcccaggggcaggaactt

SEQ ID NO: 178302 - DNA, 25 bp, Canis familiaris
tgctggaggccagcgtggcggagat

SEQ ID NO: 178303 - DNA, 25 bp, Canis familiaris
tgctggagggcagcggcctagagtc

SEQ ID NO: 178304 - DNA, 25 bp, Canis familiaris
tgcggaaggcagcgagccagacggc

SEQ ID NO: 178305 - DNA, 25 bp, Canis familiaris
tgcggaagtggtacagccaacggcc

SEQ ID NO: 178306 - DNA, 25 bp, Canis familiaris
tgcccaatgggtgcgaagatctgtg

SEQ ID NO: 178307 - DNA, 25 bp, Canis familiaris
tgccctacggcgacgagaagctgag

SEQ ID NO: 178308 - DNA, 25 bp, Canis familiaris
tgccctttggtttacagactgcctt

SEQ ID NO: 178309 - DNA, 25 bp, Canis familiaris
tgcccatgttgcatctaacagacaa

SEQ ID NO: 178310 - DNA, 25 bp, Canis familiaris
tgccctgtgtttcgatcaagccgat

SEQ ID NO: 178311 - DNA, 25 bp, Canis familiaris
tgcccttgtcctgtcagaagcgatt

SEQ ID NO: 178312 - DNA, 25 bp, Canis familiaris
tgccctttgactgtctccataatta

SEQ ID NO: 178313 - DNA, 25 bp, Canis familiaris
tgccgttctgagcgtctggctaagt

SEQ ID NO: 178314 - DNA, 25 bp, Canis familiaris
tgcccttctagggcctgtttcaggc

SEQ ID NO: 178315 - DNA, 25 bp, Canis familiaris
tgcctccctcggggaatttgcagga

SEQ ID NO: 178316 - DNA, 25 bp, Canis familiaris
tgcgagcccggggctacattgggga

SEQ ID NO: 178317 - DNA, 25 bp, Canis familiaris
tgcgggcggaggtccaaaggcagga

SEQ ID NO: 178318 - DNA, 25 bp, Canis familiaris
tgcggcgagaactccacaagtggcc

SEQ ID NO: 178319 - DNA, 25 bp, Canis familiaris
tgcccagtagactctcaaggtggcc

SEQ ID NO: 178320 - DNA, 25 bp, Canis familiaris
tgcgccaacacctagtagcaggggc

SEQ ID NO: 178321 - DNA, 25 bp, Canis familiaris
tgccagacaacctttgggggggtct

SEQ ID NO: 178322 - DNA, 25 bp, Canis familiaris
tgccccatcccctgggcaggggatt

SEQ ID NO: 178323 - DNA, 25 bp, Canis familiaris
tgcccgccagccctaggagaaggga

SEQ ID NO: 178324 - DNA, 25 bp, Canis familiaris
tgcgcccaaggcctaggaggggccg

SEQ ID NO: 178325 - DNA, 25 bp, Canis familiaris
tgccccaggaggtaggtacgctgcc

SEQ ID NO: 178326 - DNA, 25 bp, Canis familiaris
tgccctaaggattcggttcctgcca

SEQ ID NO: 178327 - DNA, 25 bp, Canis familiaris
tgccctgaaagcacgtttgacccaa

SEQ ID NO: 178328 - DNA, 25 bp, Canis familiaris
tgcccatcaaccatcagatcatcta

SEQ ID NO: 178329 - DNA, 25 bp, Canis familiaris
tgccctcggccataggatctatgaa

SEQ ID NO: 178330 - DNA, 25 bp, Canis familiaris
tgccctccgctcagggacatgaaca

SEQ ID NO: 178331 - DNA, 25 bp, Canis familiaris
tgccccaaccactgtgcatagaaca

SEQ ID NO: 178332 - DNA, 25 bp, Canis familiaris
tgcccaaacacggggatcgaaaccg

SEQ ID NO: 178333 - DNA, 25 bp, Canis familiaris
tcctcaaaacgtctccggaacatcc

SEQ ID NO: 178334 - DNA, 25 bp, Canis familiaris
tgcctcaacagggtcagtccgaaca

SEQ ID NO: 178335 - DNA, 25 bp, Canis familiaris
tgcgtcatagagccgacacaccgga

SEQ ID NO: 178336 - DNA, 25 bp, Canis familiaris
tgcgctgcagaacccaaagttggca

SEQ ID NO: 178337 - DNA, 25 bp, Canis familiaris
tgcctgagatactgatgaagcttgc

SEQ ID NO: 178338 - DNA, 25 bp, Canis familiaris
tgcctgtgcagattgcaatagacta

SEQ ID NO: 178339 - DNA, 25 bp, Canis familiaris
tgcgcgtgcatgtctgaatctgcct

SEQ ID NO: 178340 - DNA, 25 bp, Canis familiaris
tgcgagctggcactcacatcctgtg

SEQ ID NO: 178341 - DNA, 25 bp, Canis familiaris
tgcgagctggcacccacatcctgtg

SEQ ID NO: 178342 - DNA, 25 bp, Canis familiaris
tgcgagtgaggacgcctccaagttc

SEQ ID NO: 178343 - DNA, 25 bp, Canis familiaris
tgccagcataggttacccgacttgt

SEQ ID NO: 178344 - DNA, 25 bp, Canis familiaris
tgccactcagtgtaaccggttttta

SEQ ID NO: 178345 - DNA, 25 bp, Canis familiaris
tgccaatattaatctcggtgttcta

SEQ ID NO: 178346 - DNA, 25 bp, Canis familiaris
tgccttttgcacatccagtgctggt

SEQ ID NO: 178347 - DNA, 25 bp, Canis familiaris
tgcctttcctgcattaggtctgatt

SEQ ID NO: 178348 - DNA, 25 bp, Canis familiaris
tgccttcgcactgttgacggtattc

SEQ ID NO: 178349 - DNA, 25 bp, Canis familiaris
tgccctccagtgccttaaagtatgc

SEQ ID NO: 178350 - DNA, 25 bp, Canis familiaris
tgccctgcgaggtcagctgaaaggt

SEQ ID NO: 178351 - DNA, 25 bp, Canis familiaris
tgcgcctggagagccgcatccagga

SEQ ID NO: 178352 - DNA, 25 bp, Canis familiaris
tgcggctgcggaacaagtccagtga

SEQ ID NO: 178353 - DNA, 25 bp, Canis familiaris
tgcgagtgcgtgtgtgagtgcgtgt

SEQ ID NO: 178354 - DNA, 25 bp, Canis familiaris
tgcgtgggtgtagaccattctgtgg

SEQ ID NO: 178355 - DNA, 25 bp, Canis familiaris
tgcggacgtgttgccagagaattgg

SEQ ID NO: 178356 - DNA, 25 bp, Canis familiaris
tgccgagctgacaccaaaaactgga

SEQ ID NO: 178357 - DNA, 25 bp, Canis familiaris
tgcgcggtgcaggaccagtcaaagt

SEQ ID NO: 178358 - DNA, 25 bp, Canis familiaris
tgcgggctgggacgagcccgtgttc

SEQ ID NO: 178359 - DNA, 25 bp, Canis familiaris
tgcgggatgagatgcgagccttggc

SEQ ID NO: 178360 - DNA, 25 bp, Canis familiaris
tgccgaaggacaggcaccttgcaga

SEQ ID NO: 178361 - DNA, 25 bp, Canis familiaris
tgccatatgaactggcacctccatc

SEQ ID NO: 178362 - DNA, 25 bp, Canis familiaris
tccataaactctaacaccacaactg

SEQ ID NO: 178363 - DNA, 25 bp, Canis familiaris
tgccaaataactaggacccaaattt

SEQ ID NO: 178364 - DNA, 25 bp, Canis familiaris
tccaaaggttgaagaattgaatttt

SEQ ID NO: 178365 - DNA, 25 bp, Canis familiaris
tccgagggtttggttagactctttg

SEQ ID NO: 178366 - DNA, 25 bp, Canis familiaris
tctttgggtttgggattcacacgtg

SEQ ID NO: 178367 - DNA, 25 bp, Canis familiaris
tcctatgggtttctgcttccagtgt

SEQ ID NO: 178368 - DNA, 25 bp, Canis familiaris
tgccctgcaagtgtggggtccttgt

SEQ ID NO: 178369 - DNA, 25 bp, Canis familiaris
tgcccgcatcgtggctgaggagttc

SEQ ID NO: 178370 - DNA, 25 bp, Canis familiaris
tgccggcagctgtgcttgcagctgt

SEQ ID NO: 178371 - DNA, 25 bp, Canis familiaris
tgcgcgcagagaccgctttggtgac

SEQ ID NO: 178372 - DNA, 25 bp, Canis familiaris
tgccgctgggtcctctgataggact

SEQ ID NO: 178373 - DNA, 25 bp, Canis familiaris
tgccctgtggggactgagcgatgca

SEQ ID NO: 178374 - DNA, 25 bp, Canis familiaris
tgccctatgagacactgatcagtag

SEQ ID NO: 178375 - DNA, 25 bp, Canis familiaris
tgcgctttgcaaatttgtcgaaggc

SEQ ID NO: 178376 - DNA, 25 bp, Canis familiaris
tgcgcttaaaacagcggaaatgatt

SEQ ID NO: 178377 - DNA, 25 bp, Canis familiaris
tgcgtaataaccggaagcatacatg

SEQ ID NO: 178378 - DNA, 25 bp, Canis familiaris
tgccttaaaccccaatgtcaatagc

SEQ ID NO: 178379 - DNA, 25 bp, Canis familiaris
tgccggaaaccccggtgctgatgga

SEQ ID NO: 178380 - DNA, 25 bp, Canis familiaris
tgccggaatatcagcaggcggctat

SEQ ID NO: 178381 - DNA, 25 bp, Canis familiaris
tgccggaatatcagcaggcggctat

SEQ ID NO: 178382 - DNA, 25 bp, Canis familiaris
tccggaattccgcgggatgctcgga

SEQ ID NO: 178383 - DNA, 25 bp, Canis familiaris
tccggaagttcccgggatgcggcca

SEQ ID NO: 178384 - DNA, 25 bp, Canis familiaris
tccggatggcctgatgggtggcgtc

SEQ ID NO: 178385 - DNA, 25 bp, Canis familiaris
tgccctgtgggtgttgtctaggtca

SEQ ID NO: 178386 - DNA, 25 bp, Canis familiaris
tgccctgtgggtgttgtctaggtca

SEQ ID NO: 178387 - DNA, 25 bp, Canis familiaris
tgccctgtgggtgttgtctaggtca

SEQ ID NO: 178388 - DNA, 25 bp, Canis familiaris
tgccctgaggctcttttccagcctt

SEQ ID NO: 178389 - DNA, 25 bp, Canis familiaris
tgccctgaggctcttttccagcctt

SEQ ID NO: 178390 - DNA, 25 bp, Canis familiaris
tgcccaaagccaatgctgtggcccc

SEQ ID NO: 178391 - DNA, 25 bp, Canis familiaris
tgccgcaagcaggctggtgttgcca

SEQ ID NO: 178392 - DNA, 25 bp, Canis familiaris
tgcccacgctggagatttgatcatt

SEQ ID NO: 178393 - DNA, 25 bp, Canis familiaris
tgcccccttttactttgcattgaac

SEQ ID NO: 178394 - DNA, 25 bp, Canis familiaris
tgcctgcaccgtcacgtttaatgta

SEQ ID NO: 178395 - DNA, 25 bp, Canis familiaris
tgcgatgaccggactcgttggcaaa

SEQ ID NO: 178396 - DNA, 25 bp, Canis familiaris
tgcgcatgtcgggactgggctgcga

SEQ ID NO: 178397 - DNA, 25 bp, Canis familiaris
tgcgcgtctatcgcaggagtgctga

SEQ ID NO: 178398 - DNA, 25 bp, Canis familiaris
tgcgcgtctatcgcaggagtgctga

SEQ ID NO: 178399 - DNA, 25 bp, Canis familiaris
tgcgcttcgacagcgacgtggggga

SEQ ID NO: 178400 - DNA, 25 bp, Canis familiaris
tgcgcttcgacagcgacgtggggga

SEQ ID NO: 178401 - DNA, 25 bp, Canis familiaris
tgcgcttcgacagcgacgtggggga

SEQ ID NO: 178402 - DNA, 25 bp, Canis familiaris
tgcgcttcgacagcgacgtggggga

SEQ ID NO: 178403 - DNA, 25 bp, Canis familiaris
tgcgcttcgacagcgacgtggggga

SEQ ID NO: 178404 - DNA, 25 bp, Canis familiaris
tgcgcttcgacagcgacgtggggga

SEQ ID NO: 178405 - DNA, 25 bp, Canis familiaris
tgcgcttcgacagcgacgtggggga

SEQ ID NO: 178406 - DNA, 25 bp, Canis familiaris
tgcgcttcgacagcgacgtggggga

SEQ ID NO: 178407 - DNA, 25 bp, Canis familiaris
tgcgcttcgacagcgacgtggggga

SEQ ID NO: 178408 - DNA, 25 bp, Canis familiaris
tgcgcttcgacagcgacgtggggga

SEQ ID NO: 178409 - DNA, 25 bp, Canis familiaris
tgcgcttcgacagcgacgtggggga

SEQ ID NO: 178410 - DNA, 25 bp, Canis familiaris
tgcgcttcgacagcgacgtggggga

SEQ ID NO: 178411 - DNA, 25 bp, Canis familiaris
tgcgcttcgacagcgacgtggggga

SEQ ID NO: 178412 - DNA, 25 bp, Canis familiaris
tgcgcttcgacagcgacgtggggga

SEQ ID NO: 178413 - DNA, 25 bp, Canis familiaris
tgcgcttcgacagcgacgtggggga

SEQ ID NO: 178414 - DNA, 25 bp, Canis familiaris
tgcgcttgctggtgcgcagcagggg

SEQ ID NO: 178415 - DNA, 25 bp, Canis familiaris
tgcctgtatagctgccactggagga

SEQ ID NO: 178416 - DNA, 25 bp, Canis familiaris
tgcgctgttagtggcttctgcggag

SEQ ID NO: 178417 - DNA, 25 bp, Canis familiaris
tgcctgtgtggtgctttccagaata

SEQ ID NO: 178418 - DNA, 25 bp, Canis familiaris
tgcctggctggttcagttggagcat

SEQ ID NO: 178419 - DNA, 25 bp, Canis familiaris
tgcgccagctcaggaagcctggaga

SEQ ID NO: 178420 - DNA, 25 bp, Canis familiaris
tgcctcagtcagtagcgcatgcgaa

SEQ ID NO: 178421 - DNA, 25 bp, Canis familiaris
tgcgctcaccagggtgctcagtaag

SEQ ID NO: 178422 - DNA, 25 bp, Canis familiaris
tgcctacagatggcgtctcagccac

SEQ ID NO: 178423 - DNA, 25 bp, Canis familiaris
tgccaagtgaggccatctaccacat

SEQ ID NO: 178424 - DNA, 25 bp, Canis familiaris
tgccaatggagcagcagtacccacc

SEQ ID NO: 178425 - DNA, 25 bp, Canis familiaris
tgcgaagagccgtagcaacatccca

SEQ ID NO: 178426 - DNA, 25 bp, Canis familiaris
tgcgataagtcttggttcctcatca

SEQ ID NO: 178427 - DNA, 25 bp, Canis familiaris
tgcctagactgctagggtcctgctc

SEQ ID NO: 178428 - DNA, 25 bp, Canis familiaris
tgcctgtgaggctgtggtactggaa

SEQ ID NO: 178429 - DNA, 25 bp, Canis familiaris
tgccttgtcctactgggatgctgaa

SEQ ID NO: 178430 - DNA, 25 bp, Canis familiaris
tgccttcccatctgatgtgtgcaca

SEQ ID NO: 178431 - DNA, 25 bp, Canis familiaris
tgccttccaccattgatgtacatac

SEQ ID NO: 178432 - DNA, 25 bp, Canis familiaris
tgcctgctgccacctggaatatata

SEQ ID NO: 178433 - DNA, 25 bp, Canis familiaris
tgccatgagcaggcctcttatacat

SEQ ID NO: 178434 - DNA, 25 bp, Canis familiaris
tgccattcatctgtttctccaatgg

SEQ ID NO: 178435 - DNA, 25 bp, Canis familiaris
tgccatatgtcttttctgagtgaat

SEQ ID NO: 178436 - DNA, 25 bp, Canis familiaris
tgccttgttttctgcattaactcct

SEQ ID NO: 178437 - DNA, 25 bp, Canis familiaris
tgcctttcttgttgtatttattctc

SEQ ID NO: 178438 - DNA, 25 bp, Canis familiaris
tgccgttctctggatgctttataca

SEQ ID NO: 178439 - DNA, 25 bp, Canis familiaris
tgccgactctctgaggcttgcttaa

SEQ ID NO: 178440 - DNA, 25 bp, Canis familiaris
tgcccctgcattgtagcttgcttaa

SEQ ID NO: 178441 - DNA, 25 bp, Canis familiaris
tgcccccatctacacagaatttgat

SEQ ID NO: 178442 - DNA, 25 bp, Canis familiaris
tgcccttcattatagcaggagaaat

SEQ ID NO: 178443 - DNA, 25 bp, Canis familiaris
tgcccacttcgaccagactagaata

SEQ ID NO: 178444 - DNA, 25 bp, Canis familiaris
tgcgcccttgttgcagtctacaaga

SEQ ID NO: 178445 - DNA, 25 bp, Canis familiaris
tgccctcttgtttcagtgagacatc

SEQ ID NO: 178446 - DNA, 25 bp, Canis familiaris
tgcctgcgacttcatcgtagtcatc

SEQ ID NO: 178447 - DNA, 25 bp, Canis familiaris
tgcctggcccatcatgtcatagcca

SEQ ID NO: 178448 - DNA, 25 bp, Canis familiaris
tgcctgtgtcaaccattcatgtaag

SEQ ID NO: 178449 - DNA, 25 bp, Canis familiaris
tgcctttctcaccattttggctgga

SEQ ID NO: 178450 - DNA, 25 bp, Canis familiaris
tgcccttattgccagcttgctggct

SEQ ID NO: 178451 - DNA, 25 bp, Canis familiaris
tgcccttctgtgcagctatgcacgg

SEQ ID NO: 178452 - DNA, 25 bp, Canis familiaris
tgccctctagaggtgcttggcggca

SEQ ID NO: 178453 - DNA, 25 bp, Canis familiaris
tgccctggaagcacttgtgtctgca

SEQ ID NO: 178454 - DNA, 25 bp, Canis familiaris
tgcccacccagcaggatgtgctgcg

SEQ ID NO: 178455 - DNA, 25 bp, Canis familiaris
tgccccctcagcacaaagtcaagac

SEQ ID NO: 178456 - DNA, 25 bp, Canis familiaris
tgcccctccctagagtattaacgct

SEQ ID NO: 178457 - DNA, 25 bp, Canis familiaris
tccccacccaagtaggcttaacagt

SEQ ID NO: 178458 - DNA, 25 bp, Canis familiaris
tccccttcacggtgtcaacatacaa

SEQ ID NO: 178459 - DNA, 25 bp, Canis familiaris
tgcctccctcaaggagttaactaac

SEQ ID NO: 178460 - DNA, 25 bp, Canis familiaris
tgccttcgtaagctgtctaactacc

SEQ ID NO: 178461 - DNA, 25 bp, Canis familiaris
tgccctcggatacgtttggactagc

SEQ ID NO: 178462 - DNA, 25 bp, Canis familiaris
tgcccatggagcgcgtgtttgacta

SEQ ID NO: 178463 - DNA, 25 bp, Canis familiaris
tccaaggactgtctggccatgactt

SEQ ID NO: 178464 - DNA, 25 bp, Canis familiaris
tccatagtacttattaccacctaaa

SEQ ID NO: 178465 - DNA, 25 bp, Canis familiaris
tcgaactccaaaaataccccagaca

SEQ ID NO: 178466 - DNA, 25 bp, Canis familiaris
tccaagtctaaaaatgattccccca

SEQ ID NO: 178467 - DNA, 25 bp, Canis familiaris
tgcccagtttcattaaaccaaccca

SEQ ID NO: 178468 - DNA, 25 bp, Canis familiaris
tgcccagtcttccataatactagaa

SEQ ID NO: 178469 - DNA, 25 bp, Canis familiaris
tgcccctttatctatatcattcgaa

SEQ ID NO: 178470 - DNA, 25 bp, Canis familiaris
tgcccatgctttgcagctacatgtc

SEQ ID NO: 178471 - DNA, 25 bp, Canis familiaris
tgccagcaattagcgccagtgtaga

SEQ ID NO: 178472 - DNA, 25 bp, Canis familiaris
tgcgagatatgaggacccagttaca

SEQ ID NO: 178473 - DNA, 25 bp, Canis familiaris
tccagtatgactccactcacggcaa

SEQ ID NO: 178474 - DNA, 25 bp, Canis familiaris
tccagtatgactccactcacggcaa

SEQ ID NO: 178475 - DNA, 25 bp, Canis familiaris
tgcgaggtgcccttctattggcaac

SEQ ID NO: 178476 - DNA, 25 bp, Canis familiaris
tgcgaggcttcctgcaaatagctcc

SEQ ID NO: 178477 - DNA, 25 bp, Canis familiaris
tgcgagcaggactaaaaccagcccc

SEQ ID NO: 178478 - DNA, 25 bp, Canis familiaris
tgcccacgactctatcaaccagagt

SEQ ID NO: 178479 - DNA, 25 bp, Canis familiaris
tgcccacggcctagcagaggatgaa

SEQ ID NO: 178480 - DNA, 25 bp, Canis familiaris
tgccccggccagggaggatgacgaa

SEQ ID NO: 178481 - DNA, 25 bp, Canis familiaris
tgccgccagagcgagctggagggcc

SEQ ID NO: 178482 - DNA, 25 bp, Canis familiaris
tgcccacacactacgggcatcatcc

SEQ ID NO: 178483 - DNA, 25 bp, Canis familiaris
tgcccatctacgagggctatgctct

SEQ ID NO: 178484 - DNA, 25 bp, Canis familiaris
tgcccatctgatcttttgattcctg

SEQ ID NO: 178485 - DNA, 25 bp, Canis familiaris
tgcccattattcattatcaccttgt

SEQ ID NO: 178486 - DNA, 25 bp, Canis familiaris
tgcccaaaaccaaatcactgcttcc

SEQ ID NO: 178487 - DNA, 25 bp, Canis familiaris
tgccccacaacgtgagcagctattc

SEQ ID NO: 178488 - DNA, 25 bp, Canis familiaris
tgccccaaatgggagggtttcttct

SEQ ID NO: 178489 - DNA, 25 bp, Canis familiaris
tgccgcagggagtgggttttttgtt

SEQ ID NO: 178490 - DNA, 25 bp, Canis familiaris
tgccccctaagtcagtttcttattt

SEQ ID NO: 178491 - DNA, 25 bp, Canis familiaris
tgcccctctagactggtttggcttc

SEQ ID NO: 178492 - DNA, 25 bp, Canis familiaris
tgcccttgtccactgggatggcagc

SEQ ID NO: 178493 - DNA, 25 bp, Canis familiaris
tgccctcagcccatgacagatgaga

SEQ ID NO: 178494 - DNA, 25 bp, Canis familiaris
tgccctcctgccagaaagtgacttc

SEQ ID NO: 178495 - DNA, 25 bp, Canis familiaris
tgcgccttgccctacaaagagagca

SEQ ID NO: 178496 - DNA, 25 bp, Canis familiaris
tgcccgatgcaatgagaaaaacatt

SEQ ID NO: 178497 - DNA, 25 bp, Canis familiaris
tgcccttccaatgccagaaacactt

SEQ ID NO: 178498 - DNA, 25 bp, Canis familiaris
tgcccttcctgctggagagacatgc

SEQ ID NO: 178499 - DNA, 25 bp, Canis familiaris
tgcgcctttctgccggacgcgagca

SEQ ID NO: 178500 - DNA, 25 bp, Canis familiaris
tgccttgattcgttggacctatgca

SEQ ID NO: 178501 - DNA, 25 bp, Canis familiaris
tgccttagtcgtatgacctccaaag

SEQ ID NO: 178502 - DNA, 25 bp, Canis familiaris
tgccttcaggcaattacatttccaa

SEQ ID NO: 178503 - DNA, 25 bp, Canis familiaris
tgcctgtctggccattgtattttta

SEQ ID NO: 178504 - DNA, 25 bp, Canis familiaris
tgcctgacggccaagtcatcactat

SEQ ID NO: 178505 - DNA, 25 bp, Canis familiaris
tgcccgatggccaagtcatcactat

SEQ ID NO: 178506 - DNA, 25 bp, Canis familiaris
tgcctcagagatgaagcagctcatt

SEQ ID NO: 178507 - DNA, 25 bp, Canis familiaris
tgcccaggcagacatcactaatcga

SEQ ID NO: 178508 - DNA, 25 bp, Canis familiaris
tgcctacagcaacataatagtcaca

SEQ ID NO: 178509 - DNA, 25 bp, Canis familiaris
tgccttgcagccatgattttgtcac

SEQ ID NO: 178510 - DNA, 25 bp, Canis familiaris
tgccctgactgccatatttatctag

SEQ ID NO: 178511 - DNA, 25 bp, Canis familiaris
tgcccacctgagtactgctttatgg

SEQ ID NO: 178512 - DNA, 25 bp, Canis familiaris
tgccctctctggtgacatttggaat

SEQ ID NO: 178513 - DNA, 25 bp, Canis familiaris
tgccctgtggagaaggtctgtgaga

SEQ ID NO: 178514 - DNA, 25 bp, Canis familiaris
tgcccagtgtagaatggtctagggt

SEQ ID NO: 178515 - DNA, 25 bp, Canis familiaris
tgcccgtgctggagagcttcaaggt

SEQ ID NO: 178516 - DNA, 25 bp, Canis familiaris
tgccttggggtagcccacaggtgca

SEQ ID NO: 178517 - DNA, 25 bp, Canis familiaris
tgccttggaggcaatgaccgacaca

SEQ ID NO: 178518 - DNA, 25 bp, Canis familiaris
tgcgctttggtgagctcagctacta

SEQ ID NO: 178519 - DNA, 25 bp, Canis familiaris
tgccttgtgagatggcctgcaacga

SEQ ID NO: 178520 - DNA, 25 bp, Canis familiaris
tgccctgtggacagcctggaggtga

SEQ ID NO: 178521 - DNA, 25 bp, Canis familiaris
tgcccgtggcaatgcgtggcaggct

SEQ ID NO: 178522 - DNA, 25 bp, Canis familiaris
tgcccctcagactgcagaggcgact

SEQ ID NO: 178523 - DNA, 25 bp, Canis familiaris
tgccgcctggactactgcggcggcg

SEQ ID NO: 178524 - DNA, 25 bp, Canis familiaris
tgcccacatggggactgctggggcc

SEQ ID NO: 178525 - DNA, 25 bp, Canis familiaris
tgcgcccactggacacttggagggc

SEQ ID NO: 178526 - DNA, 25 bp, Canis familiaris
tgcgcccatgggacatagggagggc

SEQ ID NO: 178527 - DNA, 25 bp, Canis familiaris
tgcccctgggcccaaagaggagact

SEQ ID NO: 178528 - DNA, 25 bp, Canis familiaris
tgcccctgtccccagaagagggcac

SEQ ID NO: 178529 - DNA, 25 bp, Canis familiaris
tgcccctatcgcggagaagagacac

SEQ ID NO: 178530 - DNA, 25 bp, Canis familiaris
tgcgcccaattgcttgcacagagac

SEQ ID NO: 178531 - DNA, 25 bp, Canis familiaris
tgcccacaatagccctgcacagggc

SEQ ID NO: 178532 - DNA, 25 bp, Canis familiaris
tgcccattaatgcccgcaagatgaa

SEQ ID NO: 178533 - DNA, 25 bp, Canis familiaris
tgcccacataataccaccagttatc

SEQ ID NO: 178534 - DNA, 25 bp, Canis familiaris
tgcccagctaaagcttgacatttaa

SEQ ID NO: 178535 - DNA, 25 bp, Canis familiaris
tccagatgtgaaataccgaccttaa

SEQ ID NO: 178536 - DNA, 25 bp, Canis familiaris
tgcccatgataataccgacactgtc

SEQ ID NO: 178537 - DNA, 25 bp, Canis familiaris
tgccctacaaaacccaagtgttccg

SEQ ID NO: 178538 - DNA, 25 bp, Canis familiaris
tgccctccaaactctaaactatgag

SEQ ID NO: 178539 - DNA, 25 bp, Canis familiaris
tgccctcgagaacatctgcaacacc

SEQ ID NO: 178540 - DNA, 25 bp, Canis familiaris
tgccacttgggagaccaacactcta

SEQ ID NO: 178541 - DNA, 25 bp, Canis familiaris
tgccccatggtgttaacattcctct

SEQ ID NO: 178542 - DNA, 25 bp, Canis familiaris
tgcccctttatttaatgctctctat

SEQ ID NO: 178543 - DNA, 25 bp, Canis familiaris
tgcgcagcccctaataaacgatcca

SEQ ID NO: 178544 - DNA, 25 bp, Canis familiaris
tgcgcataccttaaatagaacctca

SEQ ID NO: 178545 - DNA, 25 bp, Canis familiaris
tgcctaccattgctctgtgtaacac

SEQ ID NO: 178546 - DNA, 25 bp, Canis familiaris
tgcctaccattgctctgtgtaacac

SEQ ID NO: 178547 - DNA, 25 bp, Canis familiaris
tgcccccatatttgtctgtaaacgg

SEQ ID NO: 178548 - DNA, 25 bp, Canis familiaris
tgccacccaaagctctttaactcaa

SEQ ID NO: 178549 - DNA, 25 bp, Canis familiaris
tccacccaccggagaggagaccaac

SEQ ID NO: 178550 - DNA, 25 bp, Canis familiaris
tcccgacccggtggaggtagtgacg

SEQ ID NO: 178551 - DNA, 25 bp, Canis familiaris
tgcccagccctgtgggaggtgggta

SEQ ID NO: 178552 - DNA, 25 bp, Canis familiaris
tgcgcctgagggtcgggcaggaggt

SEQ ID NO: 178553 - DNA, 25 bp, Canis familiaris
tgcgccttggagttggcagcagcca

SEQ ID NO: 178554 - DNA, 25 bp, Canis familiaris
tgccctgtgggatgccagcatccct

SEQ ID NO: 178555 - DNA, 25 bp, Canis familiaris
tgcccagtgggttgaacatcctgcc

SEQ ID NO: 178556 - DNA, 25 bp, Canis familiaris
tgcccaggaggtggcaagcccaggc

SEQ ID NO: 178557 - DNA, 25 bp, Canis familiaris
tgcccagagcgttggctaaccacgc

SEQ ID NO: 178558 - DNA, 25 bp, Canis familiaris
tgccgcaagccagggtacagcaacc

SEQ ID NO: 178559 - DNA, 25 bp, Canis familiaris
tgccctgagcctgggtcgtgggcag

SEQ ID NO: 178560 - DNA, 25 bp, Canis familiaris
tgccggatcttctgtatctggacag

SEQ ID NO: 178561 - DNA, 25 bp, Canis familiaris
tgccgcgactgtctggggagacagg

SEQ ID NO: 178562 - DNA, 25 bp, Canis familiaris
tgccgagcagtacagggcgacgagg

SEQ ID NO: 178563 - DNA, 25 bp, Canis familiaris
tgcctgccagtgtgaggacggaagg

SEQ ID NO: 178564 - DNA, 25 bp, Canis familiaris
tgccctgcaggtggggcccagaagg

SEQ ID NO: 178565 - DNA, 25 bp, Canis familiaris
tgccctagatggggtctcagaaagg

SEQ ID NO: 178566 - DNA, 25 bp, Canis familiaris
tgccctggtctggagtgtctgaaga

SEQ ID NO: 178567 - DNA, 25 bp, Canis familiaris
tgcctgctgttaccgtttgcaaaaa

SEQ ID NO: 178568 - DNA, 25 bp, Canis familiaris
tgcctttttctgctgcgacaataaa

SEQ ID NO: 178569 - DNA, 25 bp, Canis familiaris
tgccctttattctgctgcatcgaaa

SEQ ID NO: 178570 - DNA, 25 bp, Canis familiaris
tgccacttagcatcattttaaaagc

SEQ ID NO: 178571 - DNA, 25 bp, Canis familiaris
tgccagtccagcacgtctgtaaatg

SEQ ID NO: 178572 - DNA, 25 bp, Canis familiaris
tgccgccaccaaagttgataagatg

SEQ ID NO: 178573 - DNA, 25 bp, Canis familiaris
tgccctcagccaccagaagaaagtg

SEQ ID NO: 178574 - DNA, 25 bp, Canis familiaris
tgccctcagcctccataataaagaa

SEQ ID NO: 178575 - DNA, 25 bp, Canis familiaris
tgccctgcaaatgctcaataaagga

SEQ ID NO: 178576 - DNA, 25 bp, Canis familiaris
tgcctgtaagctctctcataaataa

SEQ ID NO: 178577 - DNA, 25 bp, Canis familiaris
tgcctctacacttacctggaatata

SEQ ID NO: 178578 - DNA, 25 bp, Canis familiaris
tgcctctcactgttacttgtggtta

SEQ ID NO: 178579 - DNA, 25 bp, Canis familiaris
tgcctttgtctgaactatgggtctc

SEQ ID NO: 178580 - DNA, 25 bp, Canis familiaris
tgccctttctgcaacttttttcagg

SEQ ID NO: 178581 - DNA, 25 bp, Canis familiaris
tgcccttttcagaattcttttttga

SEQ ID NO: 178582 - DNA, 25 bp, Canis familiaris
tgccctgtttagagtttattcttcc

SEQ ID NO: 178583 - DNA, 25 bp, Canis familiaris
tgcctttatctatccttatttttcc

SEQ ID NO: 178584 - DNA, 25 bp, Canis familiaris
tgcccttacactttatttttattct

SEQ ID NO: 178585 - DNA, 25 bp, Canis familiaris
tccacttaacgtttgttctctttcg

SEQ ID NO: 178586 - DNA, 25 bp, Canis familiaris
tcccaaaccagttcggtccattttg

SEQ ID NO: 178587 - DNA, 25 bp, Canis familiaris
tgcgccaactgcgagtacgagctgc

SEQ ID NO: 178588 - DNA, 25 bp, Canis familiaris
tgcctctacatcgagatcccaggcg

SEQ ID NO: 178589 - DNA, 25 bp, Canis familiaris
tgcctctacatcgagatcccaggcg

SEQ ID NO: 178590 - DNA, 25 bp, Canis familiaris
tgccctcacatggacacagcggggt

SEQ ID NO: 178591 - DNA, 25 bp, Canis familiaris
tgccctgtgcagggatctctggggt

SEQ ID NO: 178592 - DNA, 25 bp, Canis familiaris
tgcccttcagcagtgcacagttggg

SEQ ID NO: 178593 - DNA, 25 bp, Canis familiaris
tgcgcctcagagctgctagtatgtg

SEQ ID NO: 178594 - DNA, 25 bp, Canis familiaris
tgccgccgagcaactttatgtgtga

SEQ ID NO: 178595 - DNA, 25 bp, Canis familiaris
tgcccaggcagctgtctttgaataa

SEQ ID NO: 178596 - DNA, 25 bp, Canis familiaris
tgcccagcaaccactcttaaaatca

SEQ ID NO: 178597 - DNA, 25 bp, Canis familiaris
tgccccattccgactcgagaaatct

SEQ ID NO: 178598 - DNA, 25 bp, Canis familiaris
tgcccgcattcccgtggaaattgaa

SEQ ID NO: 178599 - DNA, 25 bp, Canis familiaris
tgcccgcattcccgtggaaattgaa

SEQ ID NO: 178600 - DNA, 25 bp, Canis familiaris
tgcccgcattcccgtggaaattgaa

SEQ ID NO: 178601 - DNA, 25 bp, Canis familiaris
tgccctgctccggggagagtttatg

SEQ ID NO: 178602 - DNA, 25 bp, Canis familiaris
tgcccatcaccgctggaattttgat

SEQ ID NO: 178603 - DNA, 25 bp, Canis familiaris
tgccgtcaccgatcagaatttcttt

SEQ ID NO: 178604 - DNA, 25 bp, Canis familiaris
tgcgcgatgccgggatcaaagtctg

SEQ ID NO: 178605 - DNA, 25 bp, Canis familiaris
tgccgactccatgcagcagtagtct

SEQ ID NO: 178606 - DNA, 25 bp, Canis familiaris
tccagcatgaccaactgacatgact

SEQ ID NO: 178607 - DNA, 25 bp, Canis familiaris
tgccacgaccaagtgacagcaatgc

SEQ ID NO: 178608 - DNA, 25 bp, Canis familiaris
tgccagccaatgtactaccacgcaa

SEQ ID NO: 178609 - DNA, 25 bp, Canis familiaris
tgccaaaatggttaacccgacctgg

SEQ ID NO: 178610 - DNA, 25 bp, Canis familiaris
tccaaaatgtcgtaacaactccgcc

SEQ ID NO: 178611 - DNA, 25 bp, Canis familiaris
tccaaaatgtcgtaacaactccgcc

SEQ ID NO: 178612 - DNA, 25 bp, Canis familiaris
tccaaaatgtcgtaacaactccgcc

SEQ ID NO: 178613 - DNA, 25 bp, Canis familiaris
tccaaagtgtccgtaacaactccgc

SEQ ID NO: 178614 - DNA, 25 bp, Canis familiaris
tccaaaatgttcgtaacaacttccg

SEQ ID NO: 178615 - DNA, 25 bp, Canis familiaris
tgccataaatttcttcatcgacatt

SEQ ID NO: 178616 - DNA, 25 bp, Canis familiaris
tgcctgacacattccgttacaaagt

SEQ ID NO: 178617 - DNA, 25 bp, Canis familiaris
tgcctgacacattccttacagaata

SEQ ID NO: 178618 - DNA, 25 bp, Canis familiaris
tgcccacacatactctctaagaaat

SEQ ID NO: 178619 - DNA, 25 bp, Canis familiaris
tgccgcccagacttcaataaaacgt

SEQ ID NO: 178620 - DNA, 25 bp, Canis familiaris
tgccgcccagacttcaataaaacgt

SEQ ID NO: 178621 - DNA, 25 bp, Canis familiaris
tgcctgcgttggtacacatcacaat

SEQ ID NO: 178622 - DNA, 25 bp, Canis familiaris
tgcgcctgtgggcacaccacagatg

SEQ ID NO: 178623 - DNA, 25 bp, Canis familiaris
tgccctctatgacgcaacctatgag

SEQ ID NO: 178624 - DNA, 25 bp, Canis familiaris
tgccatgctctattctcaaagctgg

SEQ ID NO: 178625 - DNA, 25 bp, Canis familiaris
tgccatcctgcgtctggacctggct

SEQ ID NO: 178626 - DNA, 25 bp, Canis familiaris
tgccatcctgcgtctggacctggct

SEQ ID NO: 178627 - DNA, 25 bp, Canis familiaris
tgccattttgtctggctgtggtccc

SEQ ID NO: 178628 - DNA, 25 bp, Canis familiaris
tgccctagttgctggtgttgtctac

SEQ ID NO: 178629 - DNA, 25 bp, Canis familiaris
tgccctagtctgctgggatcttatt

SEQ ID NO: 178630 - DNA, 25 bp, Canis familiaris
tgcccatttcatctcggttatataa

SEQ ID NO: 178631 - DNA, 25 bp, Canis familiaris
tgcccacctcaccttgagtttaata

SEQ ID NO: 178632 - DNA, 25 bp, Canis familiaris
tgcccgcactacgtatgagtttcaa

SEQ ID NO: 178633 - DNA, 25 bp, Canis familiaris
tgccccagcctagctgaggcataca

SEQ ID NO: 178634 - DNA, 25 bp, Canis familiaris
tgcgccccacttctgaggatgaagg

SEQ ID NO: 178635 - DNA, 25 bp, Canis familiaris
tgccctcaagctccttaagtgaagt

SEQ ID NO: 178636 - DNA, 25 bp, Canis familiaris
tgccctcaggctggtttaatcacag

SEQ ID NO: 178637 - DNA, 25 bp, Canis familiaris
tgccctagatccccttagatcagca

SEQ ID NO: 178638 - DNA, 25 bp, Canis familiaris
tgccctatgaccccatttatatgaa

SEQ ID NO: 178639 - DNA, 25 bp, Canis familiaris
tgccctatgctaaccaccaggagaa

SEQ ID NO: 178640 - DNA, 25 bp, Canis familiaris
tgcctctccatttatcaccgggaga

SEQ ID NO: 178641 - DNA, 25 bp, Canis familiaris
tccaaccttctttcctggggatgga

SEQ ID NO: 178642 - DNA, 25 bp, Canis familiaris
tccaaccattaatcttattcggaga

SEQ ID NO: 178643 - DNA, 25 bp, Canis familiaris
tccaacctttccagcaaacgtgagg

SEQ ID NO: 178644 - DNA, 25 bp, Canis familiaris
tccgacccgacgacgaaggttagtg

SEQ ID NO: 178645 - DNA, 25 bp, Canis familiaris
tcccactccgggtgaggttaagtcg

SEQ ID NO: 178646 - DNA, 25 bp, Canis familiaris
tcacgacccgggtgggttctcagac

SEQ ID NO: 178647 - DNA, 25 bp, Canis familiaris
tgccgacttcgtcgttggttgtcac

SEQ ID NO: 178648 - DNA, 25 bp, Canis familiaris
tgccgacgccgccggaaagcgtgcc

SEQ ID NO: 178649 - DNA, 25 bp, Canis familiaris
tgccccgtccggagaagcagggcgt

SEQ ID NO: 178650 - DNA, 25 bp, Canis familiaris
tgcccggtccagtcctgaaagggaa

SEQ ID NO: 178651 - DNA, 25 bp, Canis familiaris
tgcctcggtccaggggagggggagg

SEQ ID NO: 178652 - DNA, 25 bp, Canis familiaris
tgccctccaccaggggatggggtgg

SEQ ID NO: 178653 - DNA, 25 bp, Canis familiaris
tgcccaccccagtgccaggtgggag

SEQ ID NO: 178654 - DNA, 25 bp, Canis familiaris
tccactccaccgtgtcaggagggtc

SEQ ID NO: 178655 - DNA, 25 bp, Canis familiaris
tccacccccaaggtcaagaaggctg

SEQ ID NO: 178656 - DNA, 25 bp, Canis familiaris
tgccaccccccaccaaagtggtggc

SEQ ID NO: 178657 - DNA, 25 bp, Canis familiaris
tgcccccacactggccaaagatggg

SEQ ID NO: 178658 - DNA, 25 bp, Canis familiaris
tgccccttcatgggacagggggggg

SEQ ID NO: 178659 - DNA, 25 bp, Canis familiaris
tgccgagccctagacgggagggatg

SEQ ID NO: 178660 - DNA, 25 bp, Canis familiaris
tgccggccgctagcaaggtggattt

SEQ ID NO: 178661 - DNA, 25 bp, Canis familiaris
tgcctctgcctttgcaaatggtaat

SEQ ID NO: 178662 - DNA, 25 bp, Canis familiaris
tgcccatgcgcagacagaagttgca

SEQ ID NO: 178663 - DNA, 25 bp, Canis familiaris
tgcccaggcagctcgagaattcatc

SEQ ID NO: 178664 - DNA, 25 bp, Canis familiaris
tgcccgagctgtgcggaatcaccag

SEQ ID NO: 178665 - DNA, 25 bp, Canis familiaris
tgccgcgagggccaggtgcataaag

SEQ ID NO: 178666 - DNA, 25 bp, Canis familiaris
tgcctgagatccccaatggctggaa

SEQ ID NO: 178667 - DNA, 25 bp, Canis familiaris
tgccgcagaccattatctggcggga

SEQ ID NO: 178668 - DNA, 25 bp, Canis familiaris
tgccgcagctgtgcaacgtcggcaa

SEQ ID NO: 178669 - DNA, 25 bp, Canis familiaris
tgccgtgctgctgccatagtgaggc

SEQ ID NO: 178670 - DNA, 25 bp, Canis familiaris
tgccggactctcttattcaggcgac

SEQ ID NO: 178671 - DNA, 25 bp, Canis familiaris
tccaatacatccctaatcgtggccc

SEQ ID NO: 178672 - DNA, 25 bp, Canis familiaris
tccagaccatttaatgggtgaccca

SEQ ID NO: 178673 - DNA, 25 bp, Canis familiaris
tgcctgaacctgagggggaacccca

SEQ ID NO: 178674 - DNA, 25 bp, Canis familiaris
tgcctggacctgaggggaaccaacc

SEQ ID NO: 178675 - DNA, 25 bp, Canis familiaris
tactgggtgtactgggtcccaactc

SEQ ID NO: 178676 - DNA, 25 bp, Canis familiaris
tcctaaggtcagggggtcctacaca

SEQ ID NO: 178677 - DNA, 25 bp, Canis familiaris
tcctcaaggtagtctatgcccttaa

SEQ ID NO: 178678 - DNA, 25 bp, Canis familiaris
tgcccagggctttcaagatcagatt

SEQ ID NO: 178679 - DNA, 25 bp, Canis familiaris
tgccgcctcgtttacaattgacatt

SEQ ID NO: 178680 - DNA, 25 bp, Canis familiaris
tgcccatctcagtcataaacttcct

SEQ ID NO: 178681 - DNA, 25 bp, Canis familiaris
tgcccatcatcaaccagaatatttt

SEQ ID NO: 178682 - DNA, 25 bp, Canis familiaris
tgcccatctcaagacattccgattg

SEQ ID NO: 178683 - DNA, 25 bp, Canis familiaris
tgcccttgcaactttgcatcctgaa

SEQ ID NO: 178684 - DNA, 25 bp, Canis familiaris
tgccctatctaacatttctgaatgg

SEQ ID NO: 178685 - DNA, 25 bp, Canis familiaris
tgcctttctacactaatgcccaagg

SEQ ID NO: 178686 - DNA, 25 bp, Canis familiaris
tgccgttcaccaagaaccctgagaa

SEQ ID NO: 178687 - DNA, 25 bp, Canis familiaris
tgccttgtgagatggaaccgtaata

SEQ ID NO: 178688 - DNA, 25 bp, Canis familiaris
tgccttaacacggacacctggagta

SEQ ID NO: 178689 - DNA, 25 bp, Canis familiaris
tccaggaaccaggaaccagggtggc

SEQ ID NO: 178690 - DNA, 25 bp, Canis familiaris
tccaagacccaaccacggggaggca

SEQ ID NO: 178691 - DNA, 25 bp, Canis familiaris
tccaaggaatgctaactgggggggc

SEQ ID NO: 178692 - DNA, 25 bp, Canis familiaris
tccaatggatgagaaccggaagttc

SEQ ID NO: 178693 - DNA, 25 bp, Canis familiaris
tccaagggccaagccggcccttaca

SEQ ID NO: 178694 - DNA, 25 bp, Canis familiaris
tccgagggaagagccagtccaccta

SEQ ID NO: 178695 - DNA, 25 bp, Canis familiaris
tccaagaaggacagcgcagccactc

SEQ ID NO: 178696 - DNA, 25 bp, Canis familiaris
tgccagggggacactaggcactttg

SEQ ID NO: 178697 - DNA, 25 bp, Canis familiaris
tgcctgtgtgggtcccttagttttg

SEQ ID NO: 178698 - DNA, 25 bp, Canis familiaris
tgccgtctgggtaccgtagtgatgt

SEQ ID NO: 178699 - DNA, 25 bp, Canis familiaris
tgccttctggtgtactggggtgagt

SEQ ID NO: 178700 - DNA, 25 bp, Canis familiaris
tgcctctgcttttatcagggtgcta

SEQ ID NO: 178701 - DNA, 25 bp, Canis familiaris
tgccttgctttggacagtggtccaa

SEQ ID NO: 178702 - DNA, 25 bp, Canis familiaris
tgccttgtctgaagctatgggtctc

SEQ ID NO: 178703 - DNA, 25 bp, Canis familiaris
tgcccgtgctgaagcagctgggccc

SEQ ID NO: 178704 - DNA, 25 bp, Canis familiaris
tgccccctgacagggagcagacctg

SEQ ID NO: 178705 - DNA, 25 bp, Canis familiaris
tgccaccctacagggaactgctgga

SEQ ID NO: 178706 - DNA, 25 bp, Canis familiaris
tgcccaccatccgggatatctgtgg

SEQ ID NO: 178707 - DNA, 25 bp, Canis familiaris
tgccatcactcaacgtgaacacttg

SEQ ID NO: 178708 - DNA, 25 bp, Canis familiaris
tgccatagctatttgtggaccttag

SEQ ID NO: 178709 - DNA, 25 bp, Canis familiaris
tcctgagtgatcctgtgtacctaac

SEQ ID NO: 178710 - DNA, 25 bp, Canis familiaris
tgcctgggtcctgaagtctgaagcc

SEQ ID NO: 178711 - DNA, 25 bp, Canis familiaris
tgcctggaaaccaaacttgaaccaa

SEQ ID NO: 178712 - DNA, 25 bp, Canis familiaris
tcctggctcaaagacctctaccaag

SEQ ID NO: 178713 - DNA, 25 bp, Canis familiaris
tgcctggcaacataaactatcccac

SEQ ID NO: 178714 - DNA, 25 bp, Canis familiaris
tgccttacaacacaaatcaccactc

SEQ ID NO: 178715 - DNA, 25 bp, Canis familiaris
tgcctgaccggaggaaacacccagc

SEQ ID NO: 178716 - DNA, 25 bp, Canis familiaris
tcctacctggaatttaaccctgact

SEQ ID NO: 178717 - DNA, 25 bp, Canis familiaris
tccttacccaaaataattcactact

SEQ ID NO: 178718 - DNA, 25 bp, Canis familiaris
tccgtgtccacataaaaaaccagct

SEQ ID NO: 178719 - DNA, 25 bp, Canis familiaris
tcctatttgccttagtaaacaccct

SEQ ID NO: 178720 - DNA, 25 bp, Canis familiaris
tgccttttgacatagtcctatccgc

SEQ ID NO: 178721 - DNA, 25 bp, Canis familiaris
tgccatctttactaaacaccttctc

SEQ ID NO: 178722 - DNA, 25 bp, Canis familiaris
tccatttaaaactctcacctgctgc

SEQ ID NO: 178723 - DNA, 25 bp, Canis familiaris
tccagaccaggatcttcctcctggc

SEQ ID NO: 178724 - DNA, 25 bp, Canis familiaris
tccagaccaggatcttcctcctggc

SEQ ID NO: 178725 - DNA, 25 bp, Canis familiaris
tccggacatgggattcccccggaat

SEQ ID NO: 178726 - DNA, 25 bp, Canis familiaris
tccggcctggaagatctcccgggaa

SEQ ID NO: 178727 - DNA, 25 bp, Canis familiaris
tccttccaggaagaattctcccgaa

SEQ ID NO: 178728 - DNA, 25 bp, Canis familiaris
tccaaccaggaaggaaattccctgt

SEQ ID NO: 178729 - DNA, 25 bp, Canis familiaris
tccagaatcagggggaatttccgta

SEQ ID NO: 178730 - DNA, 25 bp, Canis familiaris
tccaaataggtccgaatctttcccg

SEQ ID NO: 178731 - DNA, 25 bp, Canis familiaris
tccaaataatttgaatttcccctga

SEQ ID NO: 178732 - DNA, 25 bp, Canis familiaris
tccaagatcctttaacagttaacct

SEQ ID NO: 178733 - DNA, 25 bp, Canis familiaris
tccaagtcctcatcaaggcagctaa

SEQ ID NO: 178734 - DNA, 25 bp, Canis familiaris
tccaactgacctccacagggataca

SEQ ID NO: 178735 - DNA, 25 bp, Canis familiaris
tccgacttccagaagcagggaacgc

SEQ ID NO: 178736 - DNA, 25 bp, Canis familiaris
tccagacctccacccaggaaaggag

SEQ ID NO: 178737 - DNA, 25 bp, Canis familiaris
tccagccctggactcagaggataac

SEQ ID NO: 178738 - DNA, 25 bp, Canis familiaris
tccagacactgggtacctgccagtc

SEQ ID NO: 178739 - DNA, 25 bp, Canis familiaris
tgccagagggggtagccccagtggc

SEQ ID NO: 178740 - DNA, 25 bp, Canis familiaris
tgccagggtagttactgcctacggc

SEQ ID NO: 178741 - DNA, 25 bp, Canis familiaris
tccaaggttcactctgtctacctga

SEQ ID NO: 178742 - DNA, 25 bp, Canis familiaris
tccacaggttcctgtcatcaaccct

SEQ ID NO: 178743 - DNA, 25 bp, Canis familiaris
tccaaatgttccactcaatctcgac

SEQ ID NO: 178744 - DNA, 25 bp, Canis familiaris
tccagttttctttccaagtcagagg

SEQ ID NO: 178745 - DNA, 25 bp, Canis familiaris
tccagttcttgtgctcccaaaagag

SEQ ID NO: 178746 - DNA, 25 bp, Canis familiaris
tccagttcaacgtccgcgacataaa

SEQ ID NO: 178747 - DNA, 25 bp, Canis familiaris
tgcctttccctggcccagataaata

SEQ ID NO: 178748 - DNA, 25 bp, Canis familiaris
tgcctttccagggaccagagcaggg

SEQ ID NO: 178749 - DNA, 25 bp, Canis familiaris
tgcctttccagggaccagagcaggg

SEQ ID NO: 178750 - DNA, 25 bp, Canis familiaris
tgccagttctgagaaacagtcaggg

SEQ ID NO: 178751 - DNA, 25 bp, Canis familiaris
tgccctggcagacatcaacactggg

SEQ ID NO: 178752 - DNA, 25 bp, Canis familiaris
tgcccttgtgattctatagccggta

SEQ ID NO: 178753 - DNA, 25 bp, Canis familiaris
tgccccactgtctttagggagaaca

SEQ ID NO: 178754 - DNA, 25 bp, Canis familiaris
tgccccacttgtttaacgataaaag

SEQ ID NO: 178755 - DNA, 25 bp, Canis familiaris
tccacctttggaccaaccaataaag

SEQ ID NO: 178756 - DNA, 25 bp, Canis familiaris
tgcccctttgtgggcaaactatacc

SEQ ID NO: 178757 - DNA, 25 bp, Canis familiaris
tgccgccctttgagcaagactgtgc

SEQ ID NO: 178758 - DNA, 25 bp, Canis familiaris
tccgcgactactgtgacaactctcg

SEQ ID NO: 178759 - DNA, 25 bp, Canis familiaris
tctgggttccagggacttcctggcc

SEQ ID NO: 178760 - DNA, 25 bp, Canis familiaris
ttaggttccagcagtacccagactt

SEQ ID NO: 178761 - DNA, 25 bp, Canis familiaris
tccaggcttccaggtgtacaacaga

SEQ ID NO: 178762 - DNA, 25 bp, Canis familiaris
tgcccctgaccagattaacaccatt

SEQ ID NO: 178763 - DNA, 25 bp, Canis familiaris
tgcccctgaccagataacacattgg

SEQ ID NO: 178764 - DNA, 25 bp, Canis familiaris
tgccaccgactacgagaactacgcc

SEQ ID NO: 178765 - DNA, 25 bp, Canis familiaris
tgccccaaatcccaagatcattcgc

SEQ ID NO: 178766 - DNA, 25 bp, Canis familiaris
tgccccaaaccctaaatgaagcaaa

SEQ ID NO: 178767 - DNA, 25 bp, Canis familiaris
tgccccaaaccttacagcgacaaat

SEQ ID NO: 178768 - DNA, 25 bp, Canis familiaris
tccacaataaccttcaggccacaaa

SEQ ID NO: 178769 - DNA, 25 bp, Canis familiaris
tccacaacaagcgaaccacacgaca

SEQ ID NO: 178770 - DNA, 25 bp, Canis familiaris
tgcccctgcacagaaccaagtgcca

SEQ ID NO: 178771 - DNA, 25 bp, Canis familiaris
tgcccgctgcaagtacagtcacaag

SEQ ID NO: 178772 - DNA, 25 bp, Canis familiaris
tgcccgtgcatgacttcaatgccac

SEQ ID NO: 178773 - DNA, 25 bp, Canis familiaris
tgcctggtgcatacctgcagagcat

SEQ ID NO: 178774 - DNA, 25 bp, Canis familiaris
tgcctggatgtggccatcgtgtttg

SEQ ID NO: 178775 - DNA, 25 bp, Canis familiaris
tgcctctttctgtcatggtgtttga

SEQ ID NO: 178776 - DNA, 25 bp, Canis familiaris
tgccgtaatcatccaggggctggtg

SEQ ID NO: 178777 - DNA, 25 bp, Canis familiaris
tgccctcagcacccatgggagggga

SEQ ID NO: 178778 - DNA, 25 bp, Canis familiaris
tgccctcagccattctggggcgatc

SEQ ID NO: 178779 - DNA, 25 bp, Canis familiaris
tgccttccaactcggggcatgatcc

SEQ ID NO: 178780 - DNA, 25 bp, Canis familiaris
tgcctttgaaggccgagcctggacg

SEQ ID NO: 178781 - DNA, 25 bp, Canis familiaris
tgcctttgctggcctgggccagaga

SEQ ID NO: 178782 - DNA, 25 bp, Canis familiaris
tgccttcagcacactgggcacatga

SEQ ID NO: 178783 - DNA, 25 bp, Canis familiaris
tgcctcctacagcctgctggaagag

SEQ ID NO: 178784 - DNA, 25 bp, Canis familiaris
tgccgcctccgccgcggaggaagac

SEQ ID NO: 178785 - DNA, 25 bp, Canis familiaris
tgccccagccgcagcggaggaaaag

SEQ ID NO: 178786 - DNA, 25 bp, Canis familiaris
tgcccccacagcatcggggcgtaca

SEQ ID NO: 178787 - DNA, 25 bp, Canis familiaris
tgccccacaagaccaagcgaggcca

SEQ ID NO: 178788 - DNA, 25 bp, Canis familiaris
tgccccacaagaccaagcgaggcca

SEQ ID NO: 178789 - DNA, 25 bp, Canis familiaris
tgccccacaagaccaagcgaggcca

SEQ ID NO: 178790 - DNA, 25 bp, Canis familiaris
tgcccgcattggaccgggcaggcgc

SEQ ID NO: 178791 - DNA, 25 bp, Canis familiaris
tgccggcgctggacaaggtgctggc

SEQ ID NO: 178792 - DNA, 25 bp, Canis familiaris
tgcccctctggactcatggggagca

SEQ ID NO: 178793 - DNA, 25 bp, Canis familiaris
tgcccctttgagcaggactgccaag

SEQ ID NO: 178794 - DNA, 25 bp, Canis familiaris
tgcccctttgaactctgttaacagc

SEQ ID NO: 178795 - DNA, 25 bp, Canis familiaris
tgccccttaaaattgtgtccacagc

SEQ ID NO: 178796 - DNA, 25 bp, Canis familiaris
tgccccgtaatttggtgccatcaag

SEQ ID NO: 178797 - DNA, 25 bp, Canis familiaris
tgcccgcagtagtgggctctcatca

SEQ ID NO: 178798 - DNA, 25 bp, Canis familiaris
tgccccagatcctgagggtcacaga

SEQ ID NO: 178799 - DNA, 25 bp, Canis familiaris
tgccccgtcacgacaggggaccagg

SEQ ID NO: 178800 - DNA, 25 bp, Canis familiaris
tgccctctggcacacaggggacaca

SEQ ID NO: 178801 - DNA, 25 bp, Canis familiaris
tgccccgatgagcccagaagagaat

SEQ ID NO: 178802 - DNA, 25 bp, Canis familiaris
tgccctcaactcccagaagaaatac

SEQ ID NO: 178803 - DNA, 25 bp, Canis familiaris
tgccccaagctattgcagaagaaaa

SEQ ID NO: 178804 - DNA, 25 bp, Canis familiaris
tgccccaagctattggcagaagtta

SEQ ID NO: 178805 - DNA, 25 bp, Canis familiaris
tgccccagcagaccagacagaagct

SEQ ID NO: 178806 - DNA, 25 bp, Canis familiaris
tgcctgcggacaccaacaaagcttt

SEQ ID NO: 178807 - DNA, 25 bp, Canis familiaris
tgcctgcggtctacaccaaagtgat

SEQ ID NO: 178808 - DNA, 25 bp, Canis familiaris
tgcctcagccttacatccaggcagt

SEQ ID NO: 178809 - DNA, 25 bp, Canis familiaris
tgcctctgccctatgaacagcttaa

SEQ ID NO: 178810 - DNA, 25 bp, Canis familiaris
tgcctctgcagcctggtgcataagg

SEQ ID NO: 178811 - DNA, 25 bp, Canis familiaris
tgccctgcacatatcgcatgatgag

SEQ ID NO: 178812 - DNA, 25 bp, Canis familiaris
tgccctcagcatcacacatgcagat

SEQ ID NO: 178813 - DNA, 25 bp, Canis familiaris
tgcctctcaatgctcaactgtgcac

SEQ ID NO: 178814 - DNA, 25 bp, Canis familiaris
tgccttcattgtgccttgtcaggga

SEQ ID NO: 178815 - DNA, 25 bp, Canis familiaris
tgccctgatggagctctagttgtgg

SEQ ID NO: 178816 - DNA, 25 bp, Canis familiaris
tgcctctgaccagaccgttgtggca

SEQ ID NO: 178817 - DNA, 25 bp, Canis familiaris
tgcccgagcgagggccgaagtgcga

SEQ ID NO: 178818 - DNA, 25 bp, Canis familiaris
tgccccagagcggtgggcaaagcca

SEQ ID NO: 178819 - DNA, 25 bp, Canis familiaris
tgccccagcagcaggtggaaggcca

SEQ ID NO: 178820 - DNA, 25 bp, Canis familiaris
tgcctcggcagctggtgcgaaaatc

SEQ ID NO: 178821 - DNA, 25 bp, Canis familiaris
tgccagggcagccgtgacaaactac

SEQ ID NO: 178822 - DNA, 25 bp, Canis familiaris
tccagggaccctggatcaacttcca

SEQ ID NO: 178823 - DNA, 25 bp, Canis familiaris
tccacggaccttggggactgttaag

SEQ ID NO: 178824 - DNA, 25 bp, Canis familiaris
tgccctggagcctgggtgactttga

SEQ ID NO: 178825 - DNA, 25 bp, Canis familiaris
tgcctctggagttggggaccttagt

SEQ ID NO: 178826 - DNA, 25 bp, Canis familiaris
tgccgtgggttggtgagtccctgaa

SEQ ID NO: 178827 - DNA, 25 bp, Canis familiaris
tgccttgaagttgtgttgcggttac

SEQ ID NO: 178828 - DNA, 25 bp, Canis familiaris
tgcccgtggattgctgtctcgggtg

SEQ ID NO: 178829 - DNA, 25 bp, Canis familiaris
tgcccgagtcttggctgttgtgttt

SEQ ID NO: 178830 - DNA, 25 bp, Canis familiaris
tgcctaatttcgcctgtttattgca

SEQ ID NO: 178831 - DNA, 25 bp, Canis familiaris
tgccataatttaacctgctttgctg

SEQ ID NO: 178832 - DNA, 25 bp, Canis familiaris
tctcaaagtctttccttttggctcc

SEQ ID NO: 178833 - DNA, 25 bp, Canis familiaris
tccaaaaggccaacattttactcct

SEQ ID NO: 178834 - DNA, 25 bp, Canis familiaris
tgccaataggctgaagttttacttt

SEQ ID NO: 178835 - DNA, 25 bp, Canis familiaris
tccaaatggctaaagttcccagtaa

SEQ ID NO: 178836 - DNA, 25 bp, Canis familiaris
tgcctgaatggttagaatttcctgt

SEQ ID NO: 178837 - DNA, 25 bp, Canis familiaris
tgcctaagtttaagtttctctatca

SEQ ID NO: 178838 - DNA, 25 bp, Canis familiaris
tgcctattgtttaggtcctttgtaa

SEQ ID NO: 178839 - DNA, 25 bp, Canis familiaris
tgccttatttttggtttttgagtca

SEQ ID NO: 178840 - DNA, 25 bp, Canis familiaris
tgccaaatttttagttcgttgacca

SEQ ID NO: 178841 - DNA, 25 bp, Canis familiaris
tccaattttttccttgttgtgcacc

SEQ ID NO: 178842 - DNA, 25 bp, Canis familiaris
tccagaccttttcctttttggacat

SEQ ID NO: 178843 - DNA, 25 bp, Canis familiaris
tccacgcacattatttttttctact

SEQ ID NO: 178844 - DNA, 25 bp, Canis familiaris
tccacgccttaattatttacccaag

SEQ ID NO: 178845 - DNA, 25 bp, Canis familiaris
tccacaccaaagttttggtcccatt

SEQ ID NO: 178846 - DNA, 25 bp, Canis familiaris
tccatactacaagtttctgttcccc

SEQ ID NO: 178847 - DNA, 25 bp, Canis familiaris
tgccaatctgatcttttaattcctg

SEQ ID NO: 178848 - DNA, 25 bp, Canis familiaris
tgcctccgtgctatatgtgaactgt

SEQ ID NO: 178849 - DNA, 25 bp, Canis familiaris
tgccccgagcacagctgtgatgagc

SEQ ID NO: 178850 - DNA, 25 bp, Canis familiaris
tgccccagagacacgtgtgcgagta

SEQ ID NO: 178851 - DNA, 25 bp, Canis familiaris
tgcccgacacacagcaagtgctaaa

SEQ ID NO: 178852 - DNA, 25 bp, Canis familiaris
tgccccacctcaagacatttgacaa

SEQ ID NO: 178853 - DNA, 25 bp, Canis familiaris
tgccccgctggaaaatcttgacgta

SEQ ID NO: 178854 - DNA, 25 bp, Canis familiaris
tgccccctggtattgtcttgccagg

SEQ ID NO: 178855 - DNA, 25 bp, Canis familiaris
tgcccctcaggcaaattctgatctc

SEQ ID NO: 178856 - DNA, 25 bp, Canis familiaris
tgcccctgggcagatgtgatgctga

SEQ ID NO: 178857 - DNA, 25 bp, Canis familiaris
tgcccctggaggacttgatgctgga

SEQ ID NO: 178858 - DNA, 25 bp, Canis familiaris
tgcccctgagggactctatgctggc

SEQ ID NO: 178859 - DNA, 25 bp, Canis familiaris
tgcccgagagggatctctgggcccg

SEQ ID NO: 178860 - DNA, 25 bp, Canis familiaris
tgcccgaagccactgcatctcgggc

SEQ ID NO: 178861 - DNA, 25 bp, Canis familiaris
tgccagctgctgaacagtatgcctg

SEQ ID NO: 178862 - DNA, 25 bp, Canis familiaris
tgccgttgcaaagtgcatgcagctg

SEQ ID NO: 178863 - DNA, 25 bp, Canis familiaris
tgccgtgtcagctatgtgctacgaa

SEQ ID NO: 178864 - DNA, 25 bp, Canis familiaris
tgccgttagctggatgccactacac

SEQ ID NO: 178865 - DNA, 25 bp, Canis familiaris
tgccacttattttccagatcacacc

SEQ ID NO: 178866 - DNA, 25 bp, Canis familiaris
tccacttgtactttagtccctagtg

SEQ ID NO: 178867 - DNA, 25 bp, Canis familiaris
tccaatggacgttgctttacgggtg

SEQ ID NO: 178868 - DNA, 25 bp, Canis familiaris
tccccagacgattgcgagtccgagg

SEQ ID NO: 178869 - DNA, 25 bp, Canis familiaris
tccacatcagggttggttcgcggag

SEQ ID NO: 178870 - DNA, 25 bp, Canis familiaris
tccatccagacgtcgtttcggggga

SEQ ID NO: 178871 - DNA, 25 bp, Canis familiaris
tgccaacaacgtgctatccggaggt

SEQ ID NO: 178872 - DNA, 25 bp, Canis familiaris
tccaaagctcgtcagccgggagtat

SEQ ID NO: 178873 - DNA, 25 bp, Canis familiaris
tgccaaggaggtgaccgtggtcatt

SEQ ID NO: 178874 - DNA, 25 bp, Canis familiaris
tgccaaggaagtgccactttggagg

SEQ ID NO: 178875 - DNA, 25 bp, Canis familiaris
tgccaaagaaacagcccgcaggagg

SEQ ID NO: 178876 - DNA, 25 bp, Canis familiaris
tccaagaaagacgggccctgggtct

SEQ ID NO: 178877 - DNA, 25 bp, Canis familiaris
tgcctagcaagcgcaaggccctggg

SEQ ID NO: 178878 - DNA, 25 bp, Canis familiaris
tccatagctagggcgggggctggcc

SEQ ID NO: 178879 - DNA, 25 bp, Canis familiaris
tctaaggagctcgcggaggcgtccg

SEQ ID NO: 178880 - DNA, 25 bp, Canis familiaris
tccaaaggtggtcctgagggtcctg

SEQ ID NO: 178881 - DNA, 25 bp, Canis familiaris
tgccccaggggtttggtggtggttg

SEQ ID NO: 178882 - DNA, 25 bp, Canis familiaris
tgccccagccggttgtggttatggg

SEQ ID NO: 178883 - DNA, 25 bp, Canis familiaris
tgccccggggcccaagttatgagga

SEQ ID NO: 178884 - DNA, 25 bp, Canis familiaris
tccacctgcaggctccaatggtaga

SEQ ID NO: 178885 - DNA, 25 bp, Canis familiaris
tccacctggcctcccaggagtatag

SEQ ID NO: 178886 - DNA, 25 bp, Canis familiaris
tccaggggcagccccgtcagaaagc

SEQ ID NO: 178887 - DNA, 25 bp, Canis familiaris
tgccactgggcgtcatccagagaga

SEQ ID NO: 178888 - DNA, 25 bp, Canis familiaris
tccatctgctggcagcccagtgaac

SEQ ID NO: 178889 - DNA, 25 bp, Canis familiaris
tccacattggaacccttgaggctta

SEQ ID NO: 178890 - DNA, 25 bp, Canis familiaris
tccacctggaagcatttgtttctac

SEQ ID NO: 178891 - DNA, 25 bp, Canis familiaris
tgcccctggaagtactgtgttttta

SEQ ID NO: 178892 - DNA, 25 bp, Canis familiaris
tgcccctggaagtactgtgttctta

SEQ ID NO: 178893 - DNA, 25 bp, Canis familiaris
tgcccctggaagtactgtgttctta

SEQ ID NO: 178894 - DNA, 25 bp, Canis familiaris
tgcccgaagagagactggtcctctg

SEQ ID NO: 178895 - DNA, 25 bp, Canis familiaris
tcctgggagatagtaccctcctctg

SEQ ID NO: 178896 - DNA, 25 bp, Canis familiaris
tgccgagggacagtatcccttgctc

SEQ ID NO: 178897 - DNA, 25 bp, Canis familiaris
tgccacaaggtcttcaggctcttgc

SEQ ID NO: 178898 - DNA, 25 bp, Canis familiaris
tgccaacaggaaccagcagactttg

SEQ ID NO: 178899 - DNA, 25 bp, Canis familiaris
tgccattcccaaaaggaccttttat

SEQ ID NO: 178900 - DNA, 25 bp, Canis familiaris
tgccaatcccagagggacccaagta

SEQ ID NO: 178901 - DNA, 25 bp, Canis familiaris
tccaatcccatgacagttggcccag

SEQ ID NO: 178902 - DNA, 25 bp, Canis familiaris
tcctcattggcacatttgcggctca

SEQ ID NO: 178903 - DNA, 25 bp, Canis familiaris
tcctacgtcgtgtttgggtcagttg

SEQ ID NO: 178904 - DNA, 25 bp, Canis familiaris
tcctaattggagtttgaggccccta

SEQ ID NO: 178905 - DNA, 25 bp, Canis familiaris
tccgatgtttacgttgggaccctga

SEQ ID NO: 178906 - DNA, 25 bp, Canis familiaris
tccacatgtttgacgtgggtggcca

SEQ ID NO: 178907 - DNA, 25 bp, Canis familiaris
tccactgtttttggcagctgctgcc

SEQ ID NO: 178908 - DNA, 25 bp, Canis familiaris
tccaatggtcattacacagcctcca

SEQ ID NO: 178909 - DNA, 25 bp, Canis familiaris
tgccaaggctgtgggcaaggtcatc

SEQ ID NO: 178910 - DNA, 25 bp, Canis familiaris
tgccaaggctgtgggcaaggtcatc

SEQ ID NO: 178911 - DNA, 25 bp, Canis familiaris
tgccatgaggaggcaggccccattg

SEQ ID NO: 178912 - DNA, 25 bp, Canis familiaris
tccagggaccaatccctagaattta

SEQ ID NO: 178913 - DNA, 25 bp, Canis familiaris
tccagggactcatacccctagtgtc

SEQ ID NO: 178914 - DNA, 25 bp, Canis familiaris
tccagctaatccagaaccactttgt

SEQ ID NO: 178915 - DNA, 25 bp, Canis familiaris
tccaagaaccattccaccagtttgt

SEQ ID NO: 178916 - DNA, 25 bp, Canis familiaris
tccaaaattcatactcagatagtag

SEQ ID NO: 178917 - DNA, 25 bp, Canis familiaris
tgccaaagatccagccagtggtcgc

SEQ ID NO: 178918 - DNA, 25 bp, Canis familiaris
tgccaccattcaaggaccgagtcgc

SEQ ID NO: 178919 - DNA, 25 bp, Canis familiaris
tccaccctctgggaccagagacctc

SEQ ID NO: 178920 - DNA, 25 bp, Canis familiaris
tccaaccatgttggtcatactgacc

SEQ ID NO: 178921 - DNA, 25 bp, Canis familiaris
tccaacctctatggcatctcagcca

SEQ ID NO: 178922 - DNA, 25 bp, Canis familiaris
tgccttctgcttttgcatgcaacca

SEQ ID NO: 178923 - DNA, 25 bp, Canis familiaris
tgcctccattatttcatgacaccct

SEQ ID NO: 178924 - DNA, 25 bp, Canis familiaris
tcctctcatttctctaaatccgtga

SEQ ID NO: 178925 - DNA, 25 bp, Canis familiaris
tccttatattgctttcgtctcgggt

SEQ ID NO: 178926 - DNA, 25 bp, Canis familiaris
tcctcaattcaattcaattccgggt

SEQ ID NO: 178927 - DNA, 25 bp, Canis familiaris
tgcctcctgtcagctcaatatacga

SEQ ID NO: 178928 - DNA, 25 bp, Canis familiaris
tgcctgccatgtttccagaattcgt

SEQ ID NO: 178929 - DNA, 25 bp, Canis familiaris
tgcctgccttgtaccaaagctcagg

SEQ ID NO: 178930 - DNA, 25 bp, Canis familiaris
tgccttccatgaactcaaagagatg

SEQ ID NO: 178931 - DNA, 25 bp, Canis familiaris
tgccttcagctaatcactttcagag

SEQ ID NO: 178932 - DNA, 25 bp, Canis familiaris
tgcctacactgaaacgcttctcatt

SEQ ID NO: 178933 - DNA, 25 bp, Canis familiaris
tgccatcacctgtacggcttgtatt

SEQ ID NO: 178934 - DNA, 25 bp, Canis familiaris
tccaaagatgaagggcttcctcttc

SEQ ID NO: 178935 - DNA, 25 bp, Canis familiaris
tcctacgtatagagttgccttgtac

SEQ ID NO: 178936 - DNA, 25 bp, Canis familiaris
tccgaagtataaatttgccctggca

SEQ ID NO: 178937 - DNA, 25 bp, Canis familiaris
tccaaactaccttcgtgacctggac

SEQ ID NO: 178938 - DNA, 25 bp, Canis familiaris
tccaaagccaccaatccattttgtg

SEQ ID NO: 178939 - DNA, 25 bp, Canis familiaris
tccaaagcccctaggtgcatctagc

SEQ ID NO: 178940 - DNA, 25 bp, Canis familiaris
tccaaaagcagcacgctggcctgac

SEQ ID NO: 178941 - DNA, 25 bp, Canis familiaris
tccaagaagccgccggccaaactgc

SEQ ID NO: 178942 - DNA, 25 bp, Canis familiaris
tccaaacacctttgcgcaaacagcc

SEQ ID NO: 178943 - DNA, 25 bp, Canis familiaris
tcgaaacggttcgacaatccaccac

SEQ ID NO: 178944 - DNA, 25 bp, Canis familiaris
tgccaagacggtccggaacgacaac

SEQ ID NO: 178945 - DNA, 25 bp, Canis familiaris
tgccggacgcgagcagatgaacgaa

SEQ ID NO: 178946 - DNA, 25 bp, Canis familiaris
tcctgctactgctccagaaattgcg

SEQ ID NO: 178947 - DNA, 25 bp, Canis familiaris
tgcctttctcacccaggaaatcaac

SEQ ID NO: 178948 - DNA, 25 bp, Canis familiaris
tgcctttcctctccaagaggacaat

SEQ ID NO: 178949 - DNA, 25 bp, Canis familiaris
tgccacttccctcactgagaatcat

SEQ ID NO: 178950 - DNA, 25 bp, Canis familiaris
tgcctgttccctccagtggaataaa

SEQ ID NO: 178951 - DNA, 25 bp, Canis familiaris
tgccagctttccactctggcttaaa

SEQ ID NO: 178952 - DNA, 25 bp, Canis familiaris
tgccgaattccggcgcgtcttaaat

SEQ ID NO: 178953 - DNA, 25 bp, Canis familiaris
tcatcagaaaccccggtcactaaga

SEQ ID NO: 178954 - DNA, 25 bp, Canis familiaris
tccagaatcaggccctgggccgaag

SEQ ID NO: 178955 - DNA, 25 bp, Canis familiaris
tccaaggaaggcagcaggcgcgcaa

SEQ ID NO: 178956 - DNA, 25 bp, Canis familiaris
tccaaggaaggcagcaggcgcgcaa

SEQ ID NO: 178957 - DNA, 25 bp, Canis familiaris
tgccaagtggcatgtcgagggggtt

SEQ ID NO: 178958 - DNA, 25 bp, Canis familiaris
tccaaggtaaggcagcaggctgcgc

SEQ ID NO: 178959 - DNA, 25 bp, Canis familiaris
tccaaggaaagctaaaggggctctc

SEQ ID NO: 178960 - DNA, 25 bp, Canis familiaris
tcccagaaaaccgaaggaccctgct

SEQ ID NO: 178961 - DNA, 25 bp, Canis familiaris
tcccgctacggtgaaggacctggtg

SEQ ID NO: 178962 - DNA, 25 bp, Canis familiaris
tccacggagggggaagaggccggag

SEQ ID NO: 178963 - DNA, 25 bp, Canis familiaris
tccaaggggctgcacaaggccgtgc

SEQ ID NO: 178964 - DNA, 25 bp, Canis familiaris
tcctggtcggtgaccaagaccctca

SEQ ID NO: 178965 - DNA, 25 bp, Canis familiaris
tgcctggaagagtgccttatcccca

SEQ ID NO: 178966 - DNA, 25 bp, Canis familiaris
tgcctggatgaacctgccattatca

SEQ ID NO: 178967 - DNA, 25 bp, Canis familiaris
tgcctggagcacccttttatataat

SEQ ID NO: 178968 - DNA, 25 bp, Canis familiaris
tgcctggccagctcagttggtagaa

SEQ ID NO: 178969 - DNA, 25 bp, Canis familiaris
tgcctggacagctcctggagaagag

SEQ ID NO: 178970 - DNA, 25 bp, Canis familiaris
tgcctaaagcccatggagaggatca

SEQ ID NO: 178971 - DNA, 25 bp, Canis familiaris
tgcctacacagaccccaaaggacaa

SEQ ID NO: 178972 - DNA, 25 bp, Canis familiaris
tgccatcaacgaccccttcattgac

SEQ ID NO: 178973 - DNA, 25 bp, Canis familiaris
tgccacaacctggcatgctgttctc

SEQ ID NO: 178974 - DNA, 25 bp, Canis familiaris
tgccagcagagggcacagcttctct

SEQ ID NO: 178975 - DNA, 25 bp, Canis familiaris
tccagcagatgtggatcagcaagca

SEQ ID NO: 178976 - DNA, 25 bp, Canis familiaris
tccaggatgtggtctgctacatgag

SEQ ID NO: 178977 - DNA, 25 bp, Canis familiaris
tgccaggtgttgatgtcacggccac

SEQ ID NO: 178978 - DNA, 25 bp, Canis familiaris
tgccagggcttgttcatcttggtgc

SEQ ID NO: 178979 - DNA, 25 bp, Canis familiaris
tgccaggagcctcatcaggttggcc

SEQ ID NO: 178980 - DNA, 25 bp, Canis familiaris
tgccaggaactggtctccttggctc

SEQ ID NO: 178981 - DNA, 25 bp, Canis familiaris
tgccagaggagccctcctttatcat

SEQ ID NO: 178982 - DNA, 25 bp, Canis familiaris
tgccaagggcttcctgtagttctat

SEQ ID NO: 178983 - DNA, 25 bp, Canis familiaris
tgccaagagttatctgttctttctt

SEQ ID NO: 178984 - DNA, 25 bp, Canis familiaris
tgccttgagtgtgtctgcgtgttta

SEQ ID NO: 178985 - DNA, 25 bp, Canis familiaris
tgccttcactgagcttgaggttgaa

SEQ ID NO: 178986 - DNA, 25 bp, Canis familiaris
tgccttccgtccggaggtatctact

SEQ ID NO: 178987 - DNA, 25 bp, Canis familiaris
tgccacccgtctggagaagttccaa

SEQ ID NO: 178988 - DNA, 25 bp, Canis familiaris
tccaagccgttggaggacttccgcg

SEQ ID NO: 178989 - DNA, 25 bp, Canis familiaris
tcgcagcccagtcagatgtacagtc

SEQ ID NO: 178990 - DNA, 25 bp, Canis familiaris
tccacatccagcagcaggaccagtg

SEQ ID NO: 178991 - DNA, 25 bp, Canis familiaris
tgccagcatcctattgaggccagct

SEQ ID NO: 178992 - DNA, 25 bp, Canis familiaris
tgccgatgccgtaaaagcaagtgct

SEQ ID NO: 178993 - DNA, 25 bp, Canis familiaris
tgccgaaggttccgagcacaggcgt

SEQ ID NO: 178994 - DNA, 25 bp, Canis familiaris
tgccaggctggtcccagagaagcct

SEQ ID NO: 178995 - DNA, 25 bp, Canis familiaris
tgccatgagttccaccagaaagccg

SEQ ID NO: 178996 - DNA, 25 bp, Canis familiaris
tgcctggtatggccactgcccaggc

SEQ ID NO: 178997 - DNA, 25 bp, Canis familiaris
tgcctgcgtaaggcacagcaccttc

SEQ ID NO: 178998 - DNA, 25 bp, Canis familiaris
tgcctgcacggaacacaccggtaaa

SEQ ID NO: 178999 - DNA, 25 bp, Canis familiaris
tgccatgcaggcaaaaccctacaaa

SEQ ID NO: 179000 - DNA, 25 bp, Canis familiaris
tgccatgcaagtgatgacctctcca

SEQ ID NO: 179001 - DNA, 25 bp, Canis familiaris
tgccagaagacagtcaccatctcca

SEQ ID NO: 179002 - DNA, 25 bp, Canis familiaris
tgccaaaacagtgaaatctccgcaa

SEQ ID NO: 179003 - DNA, 25 bp, Canis familiaris
tccaaggacgatcataacccctatt

SEQ ID NO: 179004 - DNA, 25 bp, Canis familiaris
tgccaggagggagaacacccccttc

SEQ ID NO: 179005 - DNA, 25 bp, Canis familiaris
tccaggggtgtagacatctgcccgc

SEQ ID NO: 179006 - DNA, 25 bp, Canis familiaris
tccagcgcagtgggacggttttcca

SEQ ID NO: 179007 - DNA, 25 bp, Canis familiaris
tcctcgagtacctggtttttccaag

SEQ ID NO: 179008 - DNA, 25 bp, Canis familiaris
tccccagtgacctgcgatttttttt

SEQ ID NO: 179009 - DNA, 25 bp, Canis familiaris
tccaccagaccctcgggtttttgat

SEQ ID NO: 179010 - DNA, 25 bp, Canis familiaris
tccaggagaccctgggcgtctgttg

SEQ ID NO: 179011 - DNA, 25 bp, Canis familiaris
tccagagaaccctggcgtttgctcc

SEQ ID NO: 179012 - DNA, 25 bp, Canis familiaris
tcgcaaaaagtacgagcttgggccc

SEQ ID NO: 179013 - DNA, 25 bp, Canis familiaris
tcgcgccaaattttgcgctcggtgc

SEQ ID NO: 179014 - DNA, 25 bp, Canis familiaris
tccaccaaagaatgctccggttcag

SEQ ID NO: 179015 - DNA, 25 bp, Canis familiaris
tgccaccatcaataaagcctgagtt

SEQ ID NO: 179016 - DNA, 25 bp, Canis familiaris
tgccatcaacaacaccaagtctttt

SEQ ID NO: 179017 - DNA, 25 bp, Canis familiaris
tgcctatacaacaagctagctatta

SEQ ID NO: 179018 - DNA, 25 bp, Canis familiaris
tgccattacccaaggagctgaccgg

SEQ ID NO: 179019 - DNA, 25 bp, Canis familiaris
tgcctggacacgtgggcgtgtggcc

SEQ ID NO: 179020 - DNA, 25 bp, Canis familiaris
tgccggagcacctggaggagtctcc

SEQ ID NO: 179021 - DNA, 25 bp, Canis familiaris
tccagtagcaccccggggtacagga

SEQ ID NO: 179022 - DNA, 25 bp, Canis familiaris
tgccttaggccctggtggtcaggga

SEQ ID NO: 179023 - DNA, 25 bp, Canis familiaris
tgccttcggcccaagggtgtcaatt

SEQ ID NO: 179024 - DNA, 25 bp, Canis familiaris
tgcctttggtccacgagtgtgttcc

SEQ ID NO: 179025 - DNA, 25 bp, Canis familiaris
tcccttgactgaaccgttggttccg

SEQ ID NO: 179026 - DNA, 25 bp, Canis familiaris
tgccacgtgactaacctggtggctt

SEQ ID NO: 179027 - DNA, 25 bp, Canis familiaris
tgccacgggctacatctttgagtag

SEQ ID NO: 179028 - DNA, 25 bp, Canis familiaris
tgcctcgctagctagattcttgtag

SEQ ID NO: 179029 - DNA, 25 bp, Canis familiaris
tccaagtcacagctgtcttgctcac

SEQ ID NO: 179030 - DNA, 25 bp, Canis familiaris
tccaagctgccaatatttatctctg

SEQ ID NO: 179031 - DNA, 25 bp, Canis familiaris
tccaagcccttaatttccattgacc

SEQ ID NO: 179032 - DNA, 25 bp, Canis familiaris
tgccaacctcttacgtgcgcctttc

SEQ ID NO: 179033 - DNA, 25 bp, Canis familiaris
tccatgaaatttcttgcccttttgc

SEQ ID NO: 179034 - DNA, 25 bp, Canis familiaris
tgccagctttttctgagccttttac

SEQ ID NO: 179035 - DNA, 25 bp, Canis familiaris
tgccatcacttctatgcttgagtcc

SEQ ID NO: 179036 - DNA, 25 bp, Canis familiaris
tgccacgctctccatgcgtggttct

SEQ ID NO: 179037 - DNA, 25 bp, Canis familiaris
tgccagtgactcttgcaggattcct

SEQ ID NO: 179038 - DNA, 25 bp, Canis familiaris
tgccagtaccagaccgttttgatta

SEQ ID NO: 179039 - DNA, 25 bp, Canis familiaris
tccactatccaacccacttatgtga

SEQ ID NO: 179040 - DNA, 25 bp, Canis familiaris
tccacgccatcaagaccctgtggga

SEQ ID NO: 179041 - DNA, 25 bp, Canis familiaris
tgccaacccaagccagtgcttgtgg

SEQ ID NO: 179042 - DNA, 25 bp, Canis familiaris
tcccctcctagctgtctttgggaaa

SEQ ID NO: 179043 - DNA, 25 bp, Canis familiaris
tcccctcctagctgtctttgggaaa

SEQ ID NO: 179044 - DNA, 25 bp, Canis familiaris
tcctttccgacatatcttctggggc

SEQ ID NO: 179045 - DNA, 25 bp, Canis familiaris
tgccttttggaatctctatctgccc

SEQ ID NO: 179046 - DNA, 25 bp, Canis familiaris
tgccttttgatggtgaccccagact

SEQ ID NO: 179047 - DNA, 25 bp, Canis familiaris
tccacttttggttttcacagactga

SEQ ID NO: 179048 - DNA, 25 bp, Canis familiaris
tccactccaggaccatttacgacgt

SEQ ID NO: 179049 - DNA, 25 bp, Canis familiaris
tgccagctccagggtctgggacaga

SEQ ID NO: 179050 - DNA, 25 bp, Canis familiaris
tgccattgccatgtccaggtgagga

SEQ ID NO: 179051 - DNA, 25 bp, Canis familiaris
tgccttgccccatgactgcatggga

SEQ ID NO: 179052 - DNA, 25 bp, Canis familiaris
tgccttctgcccagagcatgatgct

SEQ ID NO: 179053 - DNA, 25 bp, Canis familiaris
tgcctgtgtgccctgggcatcagca

SEQ ID NO: 179054 - DNA, 25 bp, Canis familiaris
tgcctgtgggcgtgagctcgaggaa

SEQ ID NO: 179055 - DNA, 25 bp, Canis familiaris
tgcctggtgggttggctgcagggca

SEQ ID NO: 179056 - DNA, 25 bp, Canis familiaris
tgcctgacaggttactggcagcagg

SEQ ID NO: 179057 - DNA, 25 bp, Canis familiaris
tgcctgagcagcttggactctggga

SEQ ID NO: 179058 - DNA, 25 bp, Canis familiaris
tgcctgcgctgtgagcgctgtggga

SEQ ID NO: 179059 - DNA, 25 bp, Canis familiaris
tgcctgctgcttggagacatgtgtg

SEQ ID NO: 179060 - DNA, 25 bp, Canis familiaris
tgcctggcactcagcagatgcttaa

SEQ ID NO: 179061 - DNA, 25 bp, Canis familiaris
tccaagagtcttcgtgcattaattc

SEQ ID NO: 179062 - DNA, 25 bp, Canis familiaris
tccacagcgtcttcagatacttctt

SEQ ID NO: 179063 - DNA, 25 bp, Canis familiaris
tccacacacccaatgaactcacgtg

SEQ ID NO: 179064 - DNA, 25 bp, Canis familiaris
tccagaccatccaagaaggacagcg

SEQ ID NO: 179065 - DNA, 25 bp, Canis familiaris
tgccactgaatggctagagggatac

SEQ ID NO: 179066 - DNA, 25 bp, Canis familiaris
tgccatctagatgtgggatatgaga

SEQ ID NO: 179067 - DNA, 25 bp, Canis familiaris
tgccatgctggcccggagaaggaaa

SEQ ID NO: 179068 - DNA, 25 bp, Canis familiaris
tgcctgaggcgctggaggagctgca

SEQ ID NO: 179069 - DNA, 25 bp, Canis familiaris
tgcctggtgggcggtgagcagatca

SEQ ID NO: 179070 - DNA, 25 bp, Canis familiaris
tgccgggctggcggtcagagatgtc

SEQ ID NO: 179071 - DNA, 25 bp, Canis familiaris
tgccacaggcggcctctaagacata

SEQ ID NO: 179072 - DNA, 25 bp, Canis familiaris
tgccactatgggctgtctacactgc

SEQ ID NO: 179073 - DNA, 25 bp, Canis familiaris
tgccagtattcctctgttatctgcc

SEQ ID NO: 179074 - DNA, 25 bp, Canis familiaris
tgccttcttggctcatgttatcagc

SEQ ID NO: 179075 - DNA, 25 bp, Canis familiaris
tgcctgtttggatctgttcttgcac

SEQ ID NO: 179076 - DNA, 25 bp, Canis familiaris
tgcctgttctgacacttttatcaat

SEQ ID NO: 179077 - DNA, 25 bp, Canis familiaris
tgcctgttgagtcagatgctttcat

SEQ ID NO: 179078 - DNA, 25 bp, Canis familiaris
tgccaggtgcattccaacttcctga

SEQ ID NO: 179079 - DNA, 25 bp, Canis familiaris
tgccactgttgagaactactggagt

SEQ ID NO: 179080 - DNA, 25 bp, Canis familiaris
tgccacttctggcacacatggggac

SEQ ID NO: 179081 - DNA, 25 bp, Canis familiaris
tgccatcctctcgtgacaagggagc

SEQ ID NO: 179082 - DNA, 25 bp, Canis familiaris
tgcctccccactacaaggaagcaga

SEQ ID NO: 179083 - DNA, 25 bp, Canis familiaris
tgcctcatcccagccagaagagaga

SEQ ID NO: 179084 - DNA, 25 bp, Canis familiaris
tgcctctgccctgattatcaaagcc

SEQ ID NO: 179085 - DNA, 25 bp, Canis familiaris
tgcctctgccctgattatcaaagcc

SEQ ID NO: 179086 - DNA, 25 bp, Canis familiaris
tgcctctgccctgattatcaaagcc

SEQ ID NO: 179087 - DNA, 25 bp, Canis familiaris
tgcctctgccctgattatcaaagcc

SEQ ID NO: 179088 - DNA, 25 bp, Canis familiaris
tgcctctgccctgattatcaaagcc

SEQ ID NO: 179089 - DNA, 25 bp, Canis familiaris
tgccatcgccctgatgtggagaggg

SEQ ID NO: 179090 - DNA, 25 bp, Canis familiaris
tgcctggcccagaatcttgtgagtg

SEQ ID NO: 179091 - DNA, 25 bp, Canis familiaris
tgccagggccagcacttgatgtgaa

SEQ ID NO: 179092 - DNA, 25 bp, Canis familiaris
tgccaggcccagctgatgggtgaga

SEQ ID NO: 179093 - DNA, 25 bp, Canis familiaris
tgccaggcccaggtgagggcccagc

SEQ ID NO: 179094 - DNA, 25 bp, Canis familiaris
tcctgccccagggcagggcctttca

SEQ ID NO: 179095 - DNA, 25 bp, Canis familiaris
tccagacgagcgcgaagtccttgtc

SEQ ID NO: 179096 - DNA, 25 bp, Canis familiaris
tccaaggagacccagactcctctgg

SEQ ID NO: 179097 - DNA, 25 bp, Canis familiaris
tccaaggggagccttgtgccctaga

SEQ ID NO: 179098 - DNA, 25 bp, Canis familiaris
tgccaggcaggtgcgtttggcagct

SEQ ID NO: 179099 - DNA, 25 bp, Canis familiaris
tgccatgccctgttttcttggcaac

SEQ ID NO: 179100 - DNA, 25 bp, Canis familiaris
tgccaactcgttccatgtagtgcac

SEQ ID NO: 179101 - DNA, 25 bp, Canis familiaris
tgccaatgctgttatccgtgagtac

SEQ ID NO: 179102 - DNA, 25 bp, Canis familiaris
tgccactgcagtacttgttattatc

SEQ ID NO: 179103 - DNA, 25 bp, Canis familiaris
tgccagtgtggcattctacatcttc

SEQ ID NO: 179104 - DNA, 25 bp, Canis familiaris
tccagtgttcgcattattctcctgc

SEQ ID NO: 179105 - DNA, 25 bp, Canis familiaris
tgccagtgttttaacttctcttcca

SEQ ID NO: 179106 - DNA, 25 bp, Canis familiaris
tgcctctgtattacatgatcttttt

SEQ ID NO: 179107 - DNA, 25 bp, Canis familiaris
tgcctgcttccttgtactttaagat

SEQ ID NO: 179108 - DNA, 25 bp, Canis familiaris
tgccactgtccctaaattgtcaaat

SEQ ID NO: 179109 - DNA, 25 bp, Canis familiaris
tgccaggaccctaagattatgacct

SEQ ID NO: 179110 - DNA, 25 bp, Canis familiaris
tccaagatgcacactccatttacct

SEQ ID NO: 179111 - DNA, 25 bp, Canis familiaris
tccacaatgccgactgccagaagac

SEQ ID NO: 179112 - DNA, 25 bp, Canis familiaris
tccaattgcccaatcccaagaggga

SEQ ID NO: 179113 - DNA, 25 bp, Canis familiaris
tccgggtccaactcaagcaggaaga

SEQ ID NO: 179114 - DNA, 25 bp, Canis familiaris
tccagggtccaacaattggccaagt

SEQ ID NO: 179115 - DNA, 25 bp, Canis familiaris
tccatggggaaatccagacccaagt

SEQ ID NO: 179116 - DNA, 25 bp, Canis familiaris
tccagagttcaaatcccagcaacca

SEQ ID NO: 179117 - DNA, 25 bp, Canis familiaris
tgccagaatccaaatctgccagccc

SEQ ID NO: 179118 - DNA, 25 bp, Canis familiaris
tccaactgcgcaagatccggcagcc

SEQ ID NO: 179119 - DNA, 25 bp, Canis familiaris
tccaactgcagcctgtgctagggcc

SEQ ID NO: 179120 - DNA, 25 bp, Canis familiaris
tccagagctagcaggtgagtgtcac

SEQ ID NO: 179121 - DNA, 25 bp, Canis familiaris
tccagaataaaggttgtgtattcga

SEQ ID NO: 179122 - DNA, 25 bp, Canis familiaris
tccaactgcaacccttgatgtttca

SEQ ID NO: 179123 - DNA, 25 bp, Canis familiaris
tccaactgaatcccttaatctctgc

SEQ ID NO: 179124 - DNA, 25 bp, Canis familiaris
tccagacttgtagctcaaatccccg

SEQ ID NO: 179125 - DNA, 25 bp, Canis familiaris
tccaccttatgacacaggtcttcca

SEQ ID NO: 179126 - DNA, 25 bp, Canis familiaris
tccacctgttgcacggagtttctac

SEQ ID NO: 179127 - DNA, 25 bp, Canis familiaris
tccagccaaggactgggaccttcta

SEQ ID NO: 179128 - DNA, 25 bp, Canis familiaris
tccaacgaggagcgcaacctgctct

SEQ ID NO: 179129 - DNA, 25 bp, Canis familiaris
tccaacgcttggtgaattctgcttc

SEQ ID NO: 179130 - DNA, 25 bp, Canis familiaris
tccaccggtgagtgagattccccag

SEQ ID NO: 179131 - DNA, 25 bp, Canis familiaris
tccaccacggaggtcgttgttccgg

SEQ ID NO: 179132 - DNA, 25 bp, Canis familiaris
ttccgccctgggtaattgttcttgg

SEQ ID NO: 179133 - DNA, 25 bp, Canis familiaris
tctccctccgaacaattgaatctta

SEQ ID NO: 179134 - DNA, 25 bp, Canis familiaris
tccacaactaaacaactcattttca

SEQ ID NO: 179135 - DNA, 25 bp, Canis familiaris
tccacaatctaatccaaaactgcta

SEQ ID NO: 179136 - DNA, 25 bp, Canis familiaris
tccacttctaaccggaaagctgctt

SEQ ID NO: 179137 - DNA, 25 bp, Canis familiaris
tcgattgatttacggcgctaaggat

SEQ ID NO: 179138 - DNA, 25 bp, Canis familiaris
tgcctttttaaaactcatcagagat

SEQ ID NO: 179139 - DNA, 25 bp, Canis familiaris
tgcctactgttacctactcacaaaa

SEQ ID NO: 179140 - DNA, 25 bp, Canis familiaris
tgccttcttttctataccacaaaca

SEQ ID NO: 179141 - DNA, 25 bp, Canis familiaris
tgccttctgttttagcactttaagt

SEQ ID NO: 179142 - DNA, 25 bp, Canis familiaris
tgcctttgtgtttcatgacaatgtt

SEQ ID NO: 179143 - DNA, 25 bp, Canis familiaris
tgcctctgtggtaacacagactctc

SEQ ID NO: 179144 - DNA, 25 bp, Canis familiaris
tcctcacgtcgaagcaagactcctc

SEQ ID NO: 179145 - DNA, 25 bp, Canis familiaris
tccacctgacagttgattgactcct

SEQ ID NO: 179146 - DNA, 25 bp, Canis familiaris
tccagcccaaggatttctcctaacc

SEQ ID NO: 179147 - DNA, 25 bp, Canis familiaris
tccactcctgcaggactttatgcct

SEQ ID NO: 179148 - DNA, 25 bp, Canis familiaris
tgccactcgccaagattcattcata

SEQ ID NO: 179149 - DNA, 25 bp, Canis familiaris
tccaaccatgcaaattatttaagat

SEQ ID NO: 179150 - DNA, 25 bp, Canis familiaris
tccacacactgtataatttaggttt

SEQ ID NO: 179151 - DNA, 25 bp, Canis familiaris
tcccggctaaatataaatggtattt

SEQ ID NO: 179152 - DNA, 25 bp, Canis familiaris
tcctcggtgaaataaagagatcttg

SEQ ID NO: 179153 - DNA, 25 bp, Canis familiaris
tcgccgtcttgtgaacaagaatttt

SEQ ID NO: 179154 - DNA, 25 bp, Canis familiaris
tccctgttttaccaaaaatgtcatg

SEQ ID NO: 179155 - DNA, 25 bp, Canis familiaris
tccaagtttctaatcccgacatgtc

SEQ ID NO: 179156 - DNA, 25 bp, Canis familiaris
tccaggagtgttcatcacctacgtg

SEQ ID NO: 179157 - DNA, 25 bp, Canis familiaris
tccagcgaggaaactgtgcccgggg

SEQ ID NO: 179158 - DNA, 25 bp, Canis familiaris
tccagccggacaccggccgcattga

SEQ ID NO: 179159 - DNA, 25 bp, Canis familiaris
tgccacctgggaacggccgaagaaa

SEQ ID NO: 179160 - DNA, 25 bp, Canis familiaris
tccacccaggaaaccatcgacaaga

SEQ ID NO: 179161 - DNA, 25 bp, Canis familiaris
tccacacacaggttcaccaggagcc

SEQ ID NO: 179162 - DNA, 25 bp, Canis familiaris
tccaagaggagcgctcgcatgcggc

SEQ ID NO: 179163 - DNA, 25 bp, Canis familiaris
tccacacgggccttcagagaggcct

SEQ ID NO: 179164 - DNA, 25 bp, Canis familiaris
tgcctccagggtcagcatggaggcc

SEQ ID NO: 179165 - DNA, 25 bp, Canis familiaris
tgccatcgcggtgctcagtgtggca

SEQ ID NO: 179166 - DNA, 25 bp, Canis familiaris
tgccagtggagcttccagttctgca

SEQ ID NO: 179167 - DNA, 25 bp, Canis familiaris
tgccagtgtgggccagaccactgca

SEQ ID NO: 179168 - DNA, 25 bp, Canis familiaris
tgccaggtctagccaaccatgctag

SEQ ID NO: 179169 - DNA, 25 bp, Canis familiaris
tgccaggctctggggaggcatctgg

SEQ ID NO: 179170 - DNA, 25 bp, Canis familiaris
tgcctcgctcaggggagcaggctga

SEQ ID NO: 179171 - DNA, 25 bp, Canis familiaris
tgccatcatctacggcaacacgctg

SEQ ID NO: 179172 - DNA, 25 bp, Canis familiaris
tgccagctgcaacacaataaccgtc

SEQ ID NO: 179173 - DNA, 25 bp, Canis familiaris
tccagctgcggcctgcacagaaccg

SEQ ID NO: 179174 - DNA, 25 bp, Canis familiaris
tccagctgcggacaggaactttgtg

SEQ ID NO: 179175 - DNA, 25 bp, Canis familiaris
tccactggaaaaggacagtctcttc

SEQ ID NO: 179176 - DNA, 25 bp, Canis familiaris
tccacaggaaaaaatacccttggtg

SEQ ID NO: 179177 - DNA, 25 bp, Canis familiaris
tccaagagaaaaattcactcatttg

SEQ ID NO: 179178 - DNA, 25 bp, Canis familiaris
tccacacagggacactatcacaccg

SEQ ID NO: 179179 - DNA, 25 bp, Canis familiaris
tgccacactggggaacatttgccac

SEQ ID NO: 179180 - DNA, 25 bp, Canis familiaris
tgcctcctgtgacaacaggtcgcaa

SEQ ID NO: 179181 - DNA, 25 bp, Canis familiaris
tgccatcctatgtgaaaagaccaaa

SEQ ID NO: 179182 - DNA, 25 bp, Canis familiaris
tgccacctgtttccataaggcctaa

SEQ ID NO: 179183 - DNA, 25 bp, Canis familiaris
tccacctgtggacctggatgggtat

SEQ ID NO: 179184 - DNA, 25 bp, Canis familiaris
tgccacctgtggccattggtgctac

SEQ ID NO: 179185 - DNA, 25 bp, Canis familiaris
tgccaccgttcatgtcatctgtgac

SEQ ID NO: 179186 - DNA, 25 bp, Canis familiaris
tgccaccatcatgaagatccgctca

SEQ ID NO: 179187 - DNA, 25 bp, Canis familiaris
tccagcaacatttgggccagctaaa

SEQ ID NO: 179188 - DNA, 25 bp, Canis familiaris
tccacaactcggctcgagactcagg

SEQ ID NO: 179189 - DNA, 25 bp, Canis familiaris
tcctcctcctgtctagaaaaggttt

SEQ ID NO: 179190 - DNA, 25 bp, Canis familiaris
tgccatcccgtggcgaacaacaagg

SEQ ID NO: 179191 - DNA, 25 bp, Canis familiaris
tgcctcccttgggtggccaagatgg

SEQ ID NO: 179192 - DNA, 25 bp, Canis familiaris
tccagccacttaggggccatggagg

SEQ ID NO: 179193 - DNA, 25 bp, Canis familiaris
tccagtcattggtgataccgggggc

SEQ ID NO: 179194 - DNA, 25 bp, Canis familiaris
tgccatgactccctggaaccagggg

SEQ ID NO: 179195 - DNA, 25 bp, Canis familiaris
tccagactggacggaagccaagggt

SEQ ID NO: 179196 - DNA, 25 bp, Canis familiaris
tgccacacggcaggaaaccaagctc

SEQ ID NO: 179197 - DNA, 25 bp, Canis familiaris
tgccagccgatcgggtcaggcaagt

SEQ ID NO: 179198 - DNA, 25 bp, Canis familiaris
tgccagagatgcttcgaaaggcaag

SEQ ID NO: 179199 - DNA, 25 bp, Canis familiaris
tccatcaagttgcaagaggaggaga

SEQ ID NO: 179200 - DNA, 25 bp, Canis familiaris
tccaaggtgctgaatcttggaggag

SEQ ID NO: 179201 - DNA, 25 bp, Canis familiaris
tccagaattcgttgttgttgaaggt

SEQ ID NO: 179202 - DNA, 25 bp, Canis familiaris
tccactaaagtggttttgaagctct

SEQ ID NO: 179203 - DNA, 25 bp, Canis familiaris
tccactaaggtggtttgaaagctct

SEQ ID NO: 179204 - DNA, 25 bp, Canis familiaris
tgccatcccgtgtagctttgcaaaa

SEQ ID NO: 179205 - DNA, 25 bp, Canis familiaris
tgcctcgtagtcgcttctaaaaagg

SEQ ID NO: 179206 - DNA, 25 bp, Canis familiaris
tgcctcagtttcccgtgcattaaaa

SEQ ID NO: 179207 - DNA, 25 bp, Canis familiaris
tccactttctcctggcatggacaag

SEQ ID NO: 179208 - DNA, 25 bp, Canis familiaris
tccacttctcccgaggatagagggc

SEQ ID NO: 179209 - DNA, 25 bp, Canis familiaris
tccactcattgccaccagggagttg

SEQ ID NO: 179210 - DNA, 25 bp, Canis familiaris
tgccacctacaagctgggagtgcaa

SEQ ID NO: 179211 - DNA, 25 bp, Canis familiaris
tgccacctacaagctcatggaccac

SEQ ID NO: 179212 - DNA, 25 bp, Canis familiaris
tgccaccttacggccatgatatcca

SEQ ID NO: 179213 - DNA, 25 bp, Canis familiaris
tgccacctaatcccataaatccatg

SEQ ID NO: 179214 - DNA, 25 bp, Canis familiaris
tgccatctccagcagctataaatcc

SEQ ID NO: 179215 - DNA, 25 bp, Canis familiaris
tgccattcacacagccatattaacc

SEQ ID NO: 179216 - DNA, 25 bp, Canis familiaris
tgccttcagctcacacatgttttaa

SEQ ID NO: 179217 - DNA, 25 bp, Canis familiaris
tgccttgcaaattcctggttgtcta

SEQ ID NO: 179218 - DNA, 25 bp, Canis familiaris
tccactgcaaccccaggattttaga

SEQ ID NO: 179219 - DNA, 25 bp, Canis familiaris
tccaccgtccacaggattttcaagt

SEQ ID NO: 179220 - DNA, 25 bp, Canis familiaris
tccaccttcaacatttttttatatt

SEQ ID NO: 179221 - DNA, 25 bp, Canis familiaris
tgccattttgcagaattcgtttttt

SEQ ID NO: 179222 - DNA, 25 bp, Canis familiaris
tgccatgtttccagaattcgttgtt

SEQ ID NO: 179223 - DNA, 25 bp, Canis familiaris
tgccttcttccaaacttgtgttctt

SEQ ID NO: 179224 - DNA, 25 bp, Canis familiaris
tccaccctgccaaactagtttttgc

SEQ ID NO: 179225 - DNA, 25 bp, Canis familiaris
tccacagttgtaaatgctagttttt

SEQ ID NO: 179226 - DNA, 25 bp, Canis familiaris
tccacagtgtgtccagatgaatgat

SEQ ID NO: 179227 - DNA, 25 bp, Canis familiaris
tgccacagtctgccatcaggaagct

SEQ ID NO: 179228 - DNA, 25 bp, Canis familiaris
tgccaatgcactcgatcttgtcatt

SEQ ID NO: 179229 - DNA, 25 bp, Canis familiaris
tgccatagtctgaatgtgtgtgtgt

SEQ ID NO: 179230 - DNA, 25 bp, Canis familiaris
tccacagtgcgagtgcgtgtgtgag

SEQ ID NO: 179231 - DNA, 25 bp, Canis familiaris
tccacgtggttcctgtgaagcctga

SEQ ID NO: 179232 - DNA, 25 bp, Canis familiaris
tccacggagttctgtggtcgccatc

SEQ ID NO: 179233 - DNA, 25 bp, Canis familiaris
tccaaaggcttgttgttgggcccct

SEQ ID NO: 179234 - DNA, 25 bp, Canis familiaris
tcctaggacttgttgttaaatcgcc

SEQ ID NO: 179235 - DNA, 25 bp, Canis familiaris
tccaacggctggcagtgggaatccc

SEQ ID NO: 179236 - DNA, 25 bp, Canis familiaris
tccagacccagagcaggtgaacccc

SEQ ID NO: 179237 - DNA, 25 bp, Canis familiaris
tccaagactcgcgcagagatgaact

SEQ ID NO: 179238 - DNA, 25 bp, Canis familiaris
tccacagcaccctcatgaaacgtgc

SEQ ID NO: 179239 - DNA, 25 bp, Canis familiaris
tgccaagacctcacagaaactctcc

SEQ ID NO: 179240 - DNA, 25 bp, Canis familiaris
tcccaaccatcaccaaaaatatttt

SEQ ID NO: 179241 - DNA, 25 bp, Canis familiaris
tccaaccatccgccaaaatattttt

SEQ ID NO: 179242 - DNA, 25 bp, Canis familiaris
tcgcaaccagctcctcaaaagtttt

SEQ ID NO: 179243 - DNA, 25 bp, Canis familiaris
tccaatctctctccacagaatggct

SEQ ID NO: 179244 - DNA, 25 bp, Canis familiaris
tccaagctgcttgccaacatggtgt

SEQ ID NO: 179245 - DNA, 25 bp, Canis familiaris
tccaggcacagaggagcaaaggtgt

SEQ ID NO: 179246 - DNA, 25 bp, Canis familiaris
tccagcgacagaacacagcctttga

SEQ ID NO: 179247 - DNA, 25 bp, Canis familiaris
tgccatcgagaagctcgccgtggaa

SEQ ID NO: 179248 - DNA, 25 bp, Canis familiaris
tgccatcgacgaggccaccaagaag

SEQ ID NO: 179249 - DNA, 25 bp, Canis familiaris
tgccaccaacacacagccatagaaa

SEQ ID NO: 179250 - DNA, 25 bp, Canis familiaris
tccactcaaccatcccaaaatgaag

SEQ ID NO: 179251 - DNA, 25 bp, Canis familiaris
tccaccacaacatcagtcaccgatg

SEQ ID NO: 179252 - DNA, 25 bp, Canis familiaris
tccaccgagagctcttcacgaatat

SEQ ID NO: 179253 - DNA, 25 bp, Canis familiaris
tgccacaaagcacttgtcagaggaa

SEQ ID NO: 179254 - DNA, 25 bp, Canis familiaris
tccagccatagattgtgtacgtaag

SEQ ID NO: 179255 - DNA, 25 bp, Canis familiaris
tgccagccattggttcttcgatatt

SEQ ID NO: 179256 - DNA, 25 bp, Canis familiaris
tccaccttcgtattacagtattttt

SEQ ID NO: 179257 - DNA, 25 bp, Canis familiaris
tccaccctcaaaagcacgttctgtg

SEQ ID NO: 179258 - DNA, 25 bp, Canis familiaris
tccatcccgaaacacagaacctgac

SEQ ID NO: 179259 - DNA, 25 bp, Canis familiaris
tccacccggagcaggagaagcctga

SEQ ID NO: 179260 - DNA, 25 bp, Canis familiaris
tccatgggggccaaggacagggttg

SEQ ID NO: 179261 - DNA, 25 bp, Canis familiaris
tccaccggaggccatggaaggaggt

SEQ ID NO: 179262 - DNA, 25 bp, Canis familiaris
tccagccccgagcagggagaaggca

SEQ ID NO: 179263 - DNA, 25 bp, Canis familiaris
tccacgccaccgaggagctgaagga

SEQ ID NO: 179264 - DNA, 25 bp, Canis familiaris
tccaccacaagggccgacgaggtgt

SEQ ID NO: 179265 - DNA, 25 bp, Canis familiaris
tccacaagaagggcgcggggagctc

SEQ ID NO: 179266 - DNA, 25 bp, Canis familiaris
tccaacagtcgagtccggaggaccc

SEQ ID NO: 179267 - DNA, 25 bp, Canis familiaris
tgccaagatgctggagtccggttca

SEQ ID NO: 179268 - DNA, 25 bp, Canis familiaris
tccaagtccagatccaggtctgcct

SEQ ID NO: 179269 - DNA, 25 bp, Canis familiaris
tgccaatgctccctgaaagagtccc

SEQ ID NO: 179270 - DNA, 25 bp, Canis familiaris
tcctgtggctagcttaggtccaccc

SEQ ID NO: 179271 - DNA, 25 bp, Canis familiaris
tgccttggctctgggctgagcagtg

SEQ ID NO: 179272 - DNA, 25 bp, Canis familiaris
tgcctttgcctttctgaggctgggg

SEQ ID NO: 179273 - DNA, 25 bp, Canis familiaris
tccattctcctttcatggggggttc

SEQ ID NO: 179274 - DNA, 25 bp, Canis familiaris
tccacttgcccatgatggcctgggt

SEQ ID NO: 179275 - DNA, 25 bp, Canis familiaris
tgcctttgcctctgtttctgaggat

SEQ ID NO: 179276 - DNA, 25 bp, Canis familiaris
tccttgatgccctcttttagaaagc

SEQ ID NO: 179277 - DNA, 25 bp, Canis familiaris
tccttggcttcaccctgggaaaacg

SEQ ID NO: 179278 - DNA, 25 bp, Canis familiaris
tccttggctttgtctcgtgggaaac

SEQ ID NO: 179279 - DNA, 25 bp, Canis familiaris
tcctagctcgttctttgggagaaac

SEQ ID NO: 179280 - DNA, 25 bp, Canis familiaris
tccaacctgtatcatttaaaaaaat

SEQ ID NO: 179281 - DNA, 25 bp, Canis familiaris
tgccactcctttctttcaaggacag

SEQ ID NO: 179282 - DNA, 25 bp, Canis familiaris
tgccagtcccttgtttatggttgga

SEQ ID NO: 179283 - DNA, 25 bp, Canis familiaris
tccagtgccgttcagttttttgggg

SEQ ID NO: 179284 - DNA, 25 bp, Canis familiaris
tccagtgccggtcagcggttttgat

SEQ ID NO: 179285 - DNA, 25 bp, Canis familiaris
tccagagcctggtgcctggttttgt

SEQ ID NO: 179286 - DNA, 25 bp, Canis familiaris
tccaagcccagctcctggagattga

SEQ ID NO: 179287 - DNA, 25 bp, Canis familiaris
tgccaacgctgtgtccgaaggtgtc

SEQ ID NO: 179288 - DNA, 25 bp, Canis familiaris
tgccaaggctgcgctcttgatgagg

SEQ ID NO: 179289 - DNA, 25 bp, Canis familiaris
tccacaactgctctgccagtgagtg

SEQ ID NO: 179290 - DNA, 25 bp, Canis familiaris
tccaccatcctgccactatgatgag

SEQ ID NO: 179291 - DNA, 25 bp, Canis familiaris
tcgaactgtgtgcgctgctatgatc

SEQ ID NO: 179292 - DNA, 25 bp, Canis familiaris
tgccagagcgttcgtctcttacaag

SEQ ID NO: 179293 - DNA, 25 bp, Canis familiaris
tccagagtctctccgttctaaagtt

SEQ ID NO: 179294 - DNA, 25 bp, Canis familiaris
tccagaccgcggcctaataatgagt

SEQ ID NO: 179295 - DNA, 25 bp, Canis familiaris
tccacccatcttcctaacaagacta

SEQ ID NO: 179296 - DNA, 25 bp, Canis familiaris
tgccacctctgcttctgaaataaga

SEQ ID NO: 179297 - DNA, 25 bp, Canis familiaris
tccagactgtgcgaatacttagaga

SEQ ID NO: 179298 - DNA, 25 bp, Canis familiaris
tccagagcagcgcaaagtccttcag

SEQ ID NO: 179299 - DNA, 25 bp, Canis familiaris
tccagccgctctaaagtggccatca

SEQ ID NO: 179300 - DNA, 25 bp, Canis familiaris
tgccatccacgctaagagagtcacc

SEQ ID NO: 179301 - DNA, 25 bp, Canis familiaris
tccacagtcaggaagagcactccct

SEQ ID NO: 179302 - DNA, 25 bp, Canis familiaris
tgccaccataggagagccacactgc

SEQ ID NO: 179303 - DNA, 25 bp, Canis familiaris
tccaccagcagggggcgcaagatga

SEQ ID NO: 179304 - DNA, 25 bp, Canis familiaris
tgccatcaagagcccttgccaaagg

SEQ ID NO: 179305 - DNA, 25 bp, Canis familiaris
tgccacaagcactgttccagaggga

SEQ ID NO: 179306 - DNA, 25 bp, Canis familiaris
tccacaagatccctgtctcgatgtg

SEQ ID NO: 179307 - DNA, 25 bp, Canis familiaris
tcaagcataatcgctgactaggctt

SEQ ID NO: 179308 - DNA, 25 bp, Canis familiaris
tgccaggagagcgacgactcggctc

SEQ ID NO: 179309 - DNA, 25 bp, Canis familiaris
tgccagtgcaaggaccgtctgggcc

SEQ ID NO: 179310 - DNA, 25 bp, Canis familiaris
tccagaccaggatctgtcggtccct

SEQ ID NO: 179311 - DNA, 25 bp, Canis familiaris
tccaccggatcgtcgtgggacacag

SEQ ID NO: 179312 - DNA, 25 bp, Canis familiaris
tgccacccgttgtctgtgtggacac

SEQ ID NO: 179313 - DNA, 25 bp, Canis familiaris
tgccagtccctgacacgggggacag

SEQ ID NO: 179314 - DNA, 25 bp, Canis familiaris
tccagatgtccttggggggtgtcac

SEQ ID NO: 179315 - DNA, 25 bp, Canis familiaris
tccaaagcgcttgttgcctattaca

SEQ ID NO: 179316 - DNA, 25 bp, Canis familiaris
tccagcacccttgcattgtcaatta

SEQ ID NO: 179317 - DNA, 25 bp, Canis familiaris
tccacacccttgacatctgtatttt

SEQ ID NO: 179318 - DNA, 25 bp, Canis familiaris
tccacaccactagtccagagtgcct

SEQ ID NO: 179319 - DNA, 25 bp, Canis familiaris
tccacaagcctagccaactttgggg

SEQ ID NO: 179320 - DNA, 25 bp, Canis familiaris
tccagcaaccaaatccaactgttga

SEQ ID NO: 179321 - DNA, 25 bp, Canis familiaris
taataaccaattggcccttataggt

SEQ ID NO: 179322 - DNA, 25 bp, Canis familiaris
tccattaccaatcttccttaggcgt

SEQ ID NO: 179323 - DNA, 25 bp, Canis familiaris
tccaccaagacaccttcctaagggc

SEQ ID NO: 179324 - DNA, 25 bp, Canis familiaris
tccccaaaactgatcctctagagtc

SEQ ID NO: 179325 - DNA, 25 bp, Canis familiaris
tcctcttaaacgagccttctgcaga

SEQ ID NO: 179326 - DNA, 25 bp, Canis familiaris
tccattaaagaaaccctgtgccaaa

SEQ ID NO: 179327 - DNA, 25 bp, Canis familiaris
tcctgaagacttgacaccttcccaa

SEQ ID NO: 179328 - DNA, 25 bp, Canis familiaris
tcctaagaacctacaggatccccca

SEQ ID NO: 179329 - DNA, 25 bp, Canis familiaris
tccaagaggacaatcatctgggcca

SEQ ID NO: 179330 - DNA, 25 bp, Canis familiaris
tccagtgaggaagcctccgcagcat

SEQ ID NO: 179331 - DNA, 25 bp, Canis familiaris
tcctgtggcaaatccccggattaaa

SEQ ID NO: 179332 - DNA, 25 bp, Canis familiaris
tcctgggaataccccgggatcgaat

SEQ ID NO: 179333 - DNA, 25 bp, Canis familiaris
tccttgggtacctgcgggctaaata

SEQ ID NO: 179334 - DNA, 25 bp, Canis familiaris
tccttgggaacctacggattcttga

SEQ ID NO: 179335 - DNA, 25 bp, Canis familiaris
tgccttgggggtgaccgatttcaac

SEQ ID NO: 179336 - DNA, 25 bp, Canis familiaris
tccttggggccagcctcatatttaa

SEQ ID NO: 179337 - DNA, 25 bp, Canis familiaris
tccttaggcgaatttctttctaaag

SEQ ID NO: 179338 - DNA, 25 bp, Canis familiaris
tccttttgggaatccaatgctaatg

SEQ ID NO: 179339 - DNA, 25 bp, Canis familiaris
tccttctttggaacccaacaacagc

SEQ ID NO: 179340 - DNA, 25 bp, Canis familiaris
tccaatcatttgtcttgcccaaaaa

SEQ ID NO: 179341 - DNA, 25 bp, Canis familiaris
tccacgtctgcatctgtgcagccaa

SEQ ID NO: 179342 - DNA, 25 bp, Canis familiaris
tgccatggtaatcctgctcagtacg

SEQ ID NO: 179343 - DNA, 25 bp, Canis familiaris
tgccatcttcgtctgtagtcacaga

SEQ ID NO: 179344 - DNA, 25 bp, Canis familiaris
tccacgtatgctcggtagtcttgta

SEQ ID NO: 179345 - DNA, 25 bp, Canis familiaris
tccaagtctggccattaacttgcca

SEQ ID NO: 179346 - DNA, 25 bp, Canis familiaris
tccaatgtgccctttaccatggcca

SEQ ID NO: 179347 - DNA, 25 bp, Canis familiaris
tccaagatgcccttacagcctggag

SEQ ID NO: 179348 - DNA, 25 bp, Canis familiaris
tccaacgttcctgaactgagaggac

SEQ ID NO: 179349 - DNA, 25 bp, Canis familiaris
tccaaggttccaagaccaaaggaat

SEQ ID NO: 179350 - DNA, 25 bp, Canis familiaris
tctcacggttaaactctctaacgag

SEQ ID NO: 179351 - DNA, 25 bp, Canis familiaris
tccatctagtttaattttcaccctg

SEQ ID NO: 179352 - DNA, 25 bp, Canis familiaris
tccactaccattaaaactcacttct

SEQ ID NO: 179353 - DNA, 25 bp, Canis familiaris
tgccattaaatccacaaacagaaaa

SEQ ID NO: 179354 - DNA, 25 bp, Canis familiaris
tccataacttcctacaaaataaact

SEQ ID NO: 179355 - DNA, 25 bp, Canis familiaris
tccaacctctcataacacaaacatt

SEQ ID NO: 179356 - DNA, 25 bp, Canis familiaris
tgccatgtcccgaaaagccatcgac

SEQ ID NO: 179357 - DNA, 25 bp, Canis familiaris
tccagtgaccgcgggaggacaaccc

SEQ ID NO: 179358 - DNA, 25 bp, Canis familiaris
tccttgcatttggggaaaatacctc

SEQ ID NO: 179359 - DNA, 25 bp, Canis familiaris
tccttattcttggccatccaattcc

SEQ ID NO: 179360 - DNA, 25 bp, Canis familiaris
tccagattttagaccccattatccc

SEQ ID NO: 179361 - DNA, 25 bp, Canis familiaris
tccaaaactggaccccttatctacg

SEQ ID NO: 179362 - DNA, 25 bp, Canis familiaris
tccagaaggggggcccgtttgcatc

SEQ ID NO: 179363 - DNA, 25 bp, Canis familiaris
tccagaacacggggaccccagtctc

SEQ ID NO: 179364 - DNA, 25 bp, Canis familiaris
tccatacctgggggatccccaaggc

SEQ ID NO: 179365 - DNA, 25 bp, Canis familiaris
tccatagaagtcccaatccccaggg

SEQ ID NO: 179366 - DNA, 25 bp, Canis familiaris
tgccaagacagttaaatgctccgca

SEQ ID NO: 179367 - DNA, 25 bp, Canis familiaris
tcctagatcaggtcacagtgctccc

SEQ ID NO: 179368 - DNA, 25 bp, Canis familiaris
tccttgagcatgctcagccgtaccc

SEQ ID NO: 179369 - DNA, 25 bp, Canis familiaris
tccgtagtatttcagtaccgctcca

SEQ ID NO: 179370 - DNA, 25 bp, Canis familiaris
tcctgtggctatttcattcaacccc

SEQ ID NO: 179371 - DNA, 25 bp, Canis familiaris
tcctgcttgcttgtaacatacccgt

SEQ ID NO: 179372 - DNA, 25 bp, Canis familiaris
tccatgcctgttttacagaaacaca

SEQ ID NO: 179373 - DNA, 25 bp, Canis familiaris
tccagctgcttctttccgaagataa

SEQ ID NO: 179374 - DNA, 25 bp, Canis familiaris
tccagcgtgctctctcggaataaga

SEQ ID NO: 179375 - DNA, 25 bp, Canis familiaris
tccagcttccagcctgcaaagatct

SEQ ID NO: 179376 - DNA, 25 bp, Canis familiaris
tccagcgagtagcgaaccatctccg

SEQ ID NO: 179377 - DNA, 25 bp, Canis familiaris
tccagggaatggcagaagctctccc

SEQ ID NO: 179378 - DNA, 25 bp, Canis familiaris
tccaaagaattgtaatcctccccac

SEQ ID NO: 179379 - DNA, 25 bp, Canis familiaris
tccaaagaattgcacctcctggcaa

SEQ ID NO: 179380 - DNA, 25 bp, Canis familiaris
tccaataggttcccctcggaacacg

SEQ ID NO: 179381 - DNA, 25 bp, Canis familiaris
tccaagagagctgccttccggaaac

SEQ ID NO: 179382 - DNA, 25 bp, Canis familiaris
tccagagaactgatgatactaaaaa

SEQ ID NO: 179383 - DNA, 25 bp, Canis familiaris
tccagaatttggaacccgaatgaat

SEQ ID NO: 179384 - DNA, 25 bp, Canis familiaris
tccagcaaatttaaacgcgaactaa

SEQ ID NO: 179385 - DNA, 25 bp, Canis familiaris
tccagctcctttatgacctcaagct

SEQ ID NO: 179386 - DNA, 25 bp, Canis familiaris
tccacgtctatgattgccccgtgta

SEQ ID NO: 179387 - DNA, 25 bp, Canis familiaris
tccactgactatggctacagccctg

SEQ ID NO: 179388 - DNA, 25 bp, Canis familiaris
tccagctgaccacaaagcccatggt

SEQ ID NO: 179389 - DNA, 25 bp, Canis familiaris
tccatggggaaaccagcctgctgga

SEQ ID NO: 179390 - DNA, 25 bp, Canis familiaris
tccatggggaaaccagcctgctgga

SEQ ID NO: 179391 - DNA, 25 bp, Canis familiaris
tcctacggggacacctgcgagaagt

SEQ ID NO: 179392 - DNA, 25 bp, Canis familiaris
tcctaaggggacaaactggactcca

SEQ ID NO: 179393 - DNA, 25 bp, Canis familiaris
tccgcaaaagtacaacagtaaccac

SEQ ID NO: 179394 - DNA, 25 bp, Canis familiaris
tccctataaagataacctaaatcca

SEQ ID NO: 179395 - DNA, 25 bp, Canis familiaris
tcccttcaacgctcaaagcttaaca

SEQ ID NO: 179396 - DNA, 25 bp, Canis familiaris
tccgcttcaaggcagagcaaatgtg

SEQ ID NO: 179397 - DNA, 25 bp, Canis familiaris
tccacttccaggtctggcgatctgg

SEQ ID NO: 179398 - DNA, 25 bp, Canis familiaris
tccaagcctccgtggagttcgtctt

SEQ ID NO: 179399 - DNA, 25 bp, Canis familiaris
tccaacttccgtgtggatcacgatt

SEQ ID NO: 179400 - DNA, 25 bp, Canis familiaris
tccaaattccgactgacaaccgatt

SEQ ID NO: 179401 - DNA, 25 bp, Canis familiaris
tgccaacatccccagtgaaacttta

SEQ ID NO: 179402 - DNA, 25 bp, Canis familiaris
tgccacccacccaagaagggctgta

SEQ ID NO: 179403 - DNA, 25 bp, Canis familiaris
tccacctcaacctggacaggcgtac

SEQ ID NO: 179404 - DNA, 25 bp, Canis familiaris
tccacctcaatggccggaacggggc

SEQ ID NO: 179405 - DNA, 25 bp, Canis familiaris
tccaccagaaccaccacaagggggt

SEQ ID NO: 179406 - DNA, 25 bp, Canis familiaris
tccaccaacaccacgggagatgcga

SEQ ID NO: 179407 - DNA, 25 bp, Canis familiaris
tccaaaacccacagctgggctgcac

SEQ ID NO: 179408 - DNA, 25 bp, Canis familiaris
tccaaagatcctctctctagggcag

SEQ ID NO: 179409 - DNA, 25 bp, Canis familiaris
tccagctatgctatgaccttaggta

SEQ ID NO: 179410 - DNA, 25 bp, Canis familiaris
tcggttatttaggtccagcagctac

SEQ ID NO: 179411 - DNA, 25 bp, Canis familiaris
tccagttgatgtccaggttcgtcta

SEQ ID NO: 179412 - DNA, 25 bp, Canis familiaris
tccacttgcatactcaggtgtcctc

SEQ ID NO: 179413 - DNA, 25 bp, Canis familiaris
tccagcgcatatctcatggtgtccc

SEQ ID NO: 179414 - DNA, 25 bp, Canis familiaris
tgccatggttgatatgggtcctggc

SEQ ID NO: 179415 - DNA, 25 bp, Canis familiaris
tgccaggctctacaaggggctgtga

SEQ ID NO: 179416 - DNA, 25 bp, Canis familiaris
tgccacgcatcttcatgaagggcgc

SEQ ID NO: 179417 - DNA, 25 bp, Canis familiaris
tccacatcatgcacggagcgagcgt

SEQ ID NO: 179418 - DNA, 25 bp, Canis familiaris
tccaatctgtcccggagaaggcatc

SEQ ID NO: 179419 - DNA, 25 bp, Canis familiaris
tccaatctgtctccggagaagagca

SEQ ID NO: 179420 - DNA, 25 bp, Canis familiaris
tgccaacctgctcctgggaggaggg

SEQ ID NO: 179421 - DNA, 25 bp, Canis familiaris
tgccaatcaacatgctggtgaaggt

SEQ ID NO: 179422 - DNA, 25 bp, Canis familiaris
tgccacatcctctgcaggtggagtt

SEQ ID NO: 179423 - DNA, 25 bp, Canis familiaris
tgccacccctgaagtgctgaggtat

SEQ ID NO: 179424 - DNA, 25 bp, Canis familiaris
tgccacccctctgtggggtgcatcc

SEQ ID NO: 179425 - DNA, 25 bp, Canis familiaris
tgccagcccctggttggagggctac

SEQ ID NO: 179426 - DNA, 25 bp, Canis familiaris
tcatagaccccgttggtcggctagc

SEQ ID NO: 179427 - DNA, 25 bp, Canis familiaris
tctcgacccgaaatagtcggtcagt

SEQ ID NO: 179428 - DNA, 25 bp, Canis familiaris
tccggcccgtacgaggggccatatg

SEQ ID NO: 179429 - DNA, 25 bp, Canis familiaris
tccaggtgcacgtacggtgggttct

SEQ ID NO: 179430 - DNA, 25 bp, Canis familiaris
tccagtggctagtgggggagcttca

SEQ ID NO: 179431 - DNA, 25 bp, Canis familiaris
tccagtgagtgggggaggggcggcg

SEQ ID NO: 179432 - DNA, 25 bp, Canis familiaris
tgccagtgggtggggggtcaggggc

SEQ ID NO: 179433 - DNA, 25 bp, Canis familiaris
tgccagggggcgattttcagcgaac

SEQ ID NO: 179434 - DNA, 25 bp, Canis familiaris
tgccagcggggcctggtttggcaaa

SEQ ID NO: 179435 - DNA, 25 bp, Canis familiaris
tgccagcagtggagtggttacccgc

SEQ ID NO: 179436 - DNA, 25 bp, Canis familiaris
tccacaggatggagcagggacccgc

SEQ ID NO: 179437 - DNA, 25 bp, Canis familiaris
tccgaggtagataaggggccccctg

SEQ ID NO: 179438 - DNA, 25 bp, Canis familiaris
tccagcttgtagtactggtgccccc

SEQ ID NO: 179439 - DNA, 25 bp, Canis familiaris
tccacagtgtgaggacgctgaccac

SEQ ID NO: 179440 - DNA, 25 bp, Canis familiaris
tgccacttgacaggtcctgatccca

SEQ ID NO: 179441 - DNA, 25 bp, Canis familiaris
tgccactatagggctcccatgtgcc

SEQ ID NO: 179442 - DNA, 25 bp, Canis familiaris
tgccagtgatagtgatctgcacatt

SEQ ID NO: 179443 - DNA, 25 bp, Canis familiaris
tgccaatacatgtgatatctccgca

SEQ ID NO: 179444 - DNA, 25 bp, Canis familiaris
tgccaaggctgaggctgagtcccgt

SEQ ID NO: 179445 - DNA, 25 bp, Canis familiaris
tgccaatggcttgcatgcctcatgc

SEQ ID NO: 179446 - DNA, 25 bp, Canis familiaris
tccaatccatattcccatctgaact

SEQ ID NO: 179447 - DNA, 25 bp, Canis familiaris
tccaaggccaaccactctgatgtaa

SEQ ID NO: 179448 - DNA, 25 bp, Canis familiaris
tccaaccagctctgcagttgatgga

SEQ ID NO: 179449 - DNA, 25 bp, Canis familiaris
tccaagccatgtctcagcctaggaa

SEQ ID NO: 179450 - DNA, 25 bp, Canis familiaris
tccaagcactggaactcctactgca

SEQ ID NO: 179451 - DNA, 25 bp, Canis familiaris
tccagtcacgtatcgcgtgatctcc

SEQ ID NO: 179452 - DNA, 25 bp, Canis familiaris
tcctaaacctttagtagcgactacg

SEQ ID NO: 179453 - DNA, 25 bp, Canis familiaris
tccaaaatgctgctttgtccaggta

SEQ ID NO: 179454 - DNA, 25 bp, Canis familiaris
tccaacctctggactttgtgggtga

SEQ ID NO: 179455 - DNA, 25 bp, Canis familiaris
tcctcattctgtcacttacttggtg

SEQ ID NO: 179456 - DNA, 25 bp, Canis familiaris
tcctcacacggctctgaacaagggt

SEQ ID NO: 179457 - DNA, 25 bp, Canis familiaris
tccagcacggtgtttaaccagtgtt

SEQ ID NO: 179458 - DNA, 25 bp, Canis familiaris
tccacgggaatttctaccgctgttc

SEQ ID NO: 179459 - DNA, 25 bp, Canis familiaris
tccacagtgagactttctgagccgg

SEQ ID NO: 179460 - DNA, 25 bp, Canis familiaris
tccagattcaaggctttccctgggg

SEQ ID NO: 179461 - DNA, 25 bp, Canis familiaris
tccaattaaagaaaccctgtgccaa

SEQ ID NO: 179462 - DNA, 25 bp, Canis familiaris
tgccacttacaagaaacacatttca

SEQ ID NO: 179463 - DNA, 25 bp, Canis familiaris
tgccacttcagcttggaaacttata

SEQ ID NO: 179464 - DNA, 25 bp, Canis familiaris
tgccagctggactgcaggcgacttt

SEQ ID NO: 179465 - DNA, 25 bp, Canis familiaris
tccagtggagctccggaggcgtgga

SEQ ID NO: 179466 - DNA, 25 bp, Canis familiaris
tccactggtgctgccaaggctgtgg

SEQ ID NO: 179467 - DNA, 25 bp, Canis familiaris
tccactggttctcggtgtttggttc

SEQ ID NO: 179468 - DNA, 25 bp, Canis familiaris
tccccttgttgcctggtataaattc

SEQ ID NO: 179469 - DNA, 25 bp, Canis familiaris
tccagcctcatttcctgtgttatag

SEQ ID NO: 179470 - DNA, 25 bp, Canis familiaris
tccactccattctccattctggaga

SEQ ID NO: 179471 - DNA, 25 bp, Canis familiaris
tccactaatgcctcctcatggatac

SEQ ID NO: 179472 - DNA, 25 bp, Canis familiaris
tccaaaagagctcatctctggtgat

SEQ ID NO: 179473 - DNA, 25 bp, Canis familiaris
tccaatatgaccccagcattggtat

SEQ ID NO: 179474 - DNA, 25 bp, Canis familiaris
tccaaggactggccatgtaattatg

SEQ ID NO: 179475 - DNA, 25 bp, Canis familiaris
tccaaggaccagccttacctgtgac

SEQ ID NO: 179476 - DNA, 25 bp, Canis familiaris
tccagcaagactgtttaccttccta

SEQ ID NO: 179477 - DNA, 25 bp, Canis familiaris
tccacaagattggtggcccgttccc

SEQ ID NO: 179478 - DNA, 25 bp, Canis familiaris
tccaactgtagcctgggacgtgtcc

SEQ ID NO: 179479 - DNA, 25 bp, Canis familiaris
tccaggttagcccgtgagtggtcac

SEQ ID NO: 179480 - DNA, 25 bp, Canis familiaris
tcctggttctgctggtagttacctt

SEQ ID NO: 179481 - DNA, 25 bp, Canis familiaris
tccagtgttctccgaattcttacca

SEQ ID NO: 179482 - DNA, 25 bp, Canis familiaris
tccatttagtgacatttcttcccat

SEQ ID NO: 179483 - DNA, 25 bp, Canis familiaris
tccatttctctgtttactttaccta

SEQ ID NO: 179484 - DNA, 25 bp, Canis familiaris
tccatatatgtttattactttcctg

SEQ ID NO: 179485 - DNA, 25 bp, Canis familiaris
tccacactgtttttttttcctgatg

SEQ ID NO: 179486 - DNA, 25 bp, Canis familiaris
tcccaagtctgttttccttttggat

SEQ ID NO: 179487 - DNA, 25 bp, Canis familiaris
tccaaggacattttttctctttctt

SEQ ID NO: 179488 - DNA, 25 bp, Canis familiaris
tccaaggaactccagctgtcttttt

SEQ ID NO: 179489 - DNA, 25 bp, Canis familiaris
tccacgaaactttgctgattttttg

SEQ ID NO: 179490 - DNA, 25 bp, Canis familiaris
tccactgaaccatactatacttact

SEQ ID NO: 179491 - DNA, 25 bp, Canis familiaris
tccaagagagtctcctttccgacat

SEQ ID NO: 179492 - DNA, 25 bp, Canis familiaris
tccaaagagctagccatcttccatc

SEQ ID NO: 179493 - DNA, 25 bp, Canis familiaris
tgccaaagcaggagtctcttccaca

SEQ ID NO: 179494 - DNA, 25 bp, Canis familiaris
tgccaacaacggatctgttctccag

SEQ ID NO: 179495 - DNA, 25 bp, Canis familiaris
tgccaacaatgtctcctgtttcacc

SEQ ID NO: 179496 - DNA, 25 bp, Canis familiaris
tccaaaatgttttttcatatcactt

SEQ ID NO: 179497 - DNA, 25 bp, Canis familiaris
tccaaactgattttcctctgtgcat

SEQ ID NO: 179498 - DNA, 25 bp, Canis familiaris
tccaaaagatcttcatccctggcct

SEQ ID NO: 179499 - DNA, 25 bp, Canis familiaris
tccaaaagacattccacgtacagat

SEQ ID NO: 179500 - DNA, 25 bp, Canis familiaris
tactgtacaaaagacctacgatacg

SEQ ID NO: 179501 - DNA, 25 bp, Canis familiaris
tcacgtaaaaaccacacgaggatta

SEQ ID NO: 179502 - DNA, 25 bp, Canis familiaris
tccagtaaactatatcacaacaaat

SEQ ID NO: 179503 - DNA, 25 bp, Canis familiaris
tgccaattaactaatcttacacgca

SEQ ID NO: 179504 - DNA, 25 bp, Canis familiaris
tccaatcctactaattctcgcaaat

SEQ ID NO: 179505 - DNA, 25 bp, Canis familiaris
tccacaaccacagcttttcagaatt

SEQ ID NO: 179506 - DNA, 25 bp, Canis familiaris
tccaaacacgagttgtttgctgaat

SEQ ID NO: 179507 - DNA, 25 bp, Canis familiaris
tccagagccacggttttctagtcat

SEQ ID NO: 179508 - DNA, 25 bp, Canis familiaris
tccacacctgagttctcttctagta

SEQ ID NO: 179509 - DNA, 25 bp, Canis familiaris
tccacacagcaacttctgtccttgt

SEQ ID NO: 179510 - DNA, 25 bp, Canis familiaris
tgccaacacagtgttgtctggtggt

SEQ ID NO: 179511 - DNA, 25 bp, Canis familiaris
tccacacacagggcgtcctgggaga

SEQ ID NO: 179512 - DNA, 25 bp, Canis familiaris
tccaccggaggctcactcagtgtgg

SEQ ID NO: 179513 - DNA, 25 bp, Canis familiaris
tccacagggccctcagccctgtgtg

SEQ ID NO: 179514 - DNA, 25 bp, Canis familiaris
tccaagggcatcatacccctatggg

SEQ ID NO: 179515 - DNA, 25 bp, Canis familiaris
tccaagttcaagaactccctggggg

SEQ ID NO: 179516 - DNA, 25 bp, Canis familiaris
tccactgttttgattccgcggggga

SEQ ID NO: 179517 - DNA, 25 bp, Canis familiaris
tgccaagtttcgctgtccagcgggg

SEQ ID NO: 179518 - DNA, 25 bp, Canis familiaris
tccaaggttctgtgtctagtgtggg

SEQ ID NO: 179519 - DNA, 25 bp, Canis familiaris
tccaagaggtggtggcacagcggga

SEQ ID NO: 179520 - DNA, 25 bp, Canis familiaris
tccaagcggctggagggcatctcgg

SEQ ID NO: 179521 - DNA, 25 bp, Canis familiaris
tccacggagctggaggagcctctgg

SEQ ID NO: 179522 - DNA, 25 bp, Canis familiaris
tccactgacagggtggtggtggtgt

SEQ ID NO: 179523 - DNA, 25 bp, Canis familiaris
tccactgtcggggagctcgtgggca

SEQ ID NO: 179524 - DNA, 25 bp, Canis familiaris
tccaggaccaggggtgtgctgggca

SEQ ID NO: 179525 - DNA, 25 bp, Canis familiaris
tccagagaccacccgagtatgaggc

SEQ ID NO: 179526 - DNA, 25 bp, Canis familiaris
tccacagcctcccttagtgatggga

SEQ ID NO: 179527 - DNA, 25 bp, Canis familiaris
tccaatgtctccgtctcagatagga

SEQ ID NO: 179528 - DNA, 25 bp, Canis familiaris
tccagggccagggccgagcgagact

SEQ ID NO: 179529 - DNA, 25 bp, Canis familiaris
tccaggagcgagaccccactaacat

SEQ ID NO: 179530 - DNA, 25 bp, Canis familiaris
tccaaaggagattcccctttctcct

SEQ ID NO: 179531 - DNA, 25 bp, Canis familiaris
tccttggtgaaggtcccattttcct

SEQ ID NO: 179532 - DNA, 25 bp, Canis familiaris
tccatatgggaacatccttcctacc

SEQ ID NO: 179533 - DNA, 25 bp, Canis familiaris
tccactggtgaagaggttgccatgc

SEQ ID NO: 179534 - DNA, 25 bp, Canis familiaris
tccaaggtgaacagcctctggcatg

SEQ ID NO: 179535 - DNA, 25 bp, Canis familiaris
tgccaaaggaacccctctgtgagca

SEQ ID NO: 179536 - DNA, 25 bp, Canis familiaris
tgccaaaatgaaagaaattgcagag

SEQ ID NO: 179537 - DNA, 25 bp, Canis familiaris
tgccaactattttgaggatgttgag

SEQ ID NO: 179538 - DNA, 25 bp, Canis familiaris
tgccaactattttgaggatgttgag

SEQ ID NO: 179539 - DNA, 25 bp, Canis familiaris
tccaacttcatttgatgctaaatag

SEQ ID NO: 179540 - DNA, 25 bp, Canis familiaris
tccattctacaccatggtaaaagaa

SEQ ID NO: 179541 - DNA, 25 bp, Canis familiaris
tcgtagttccgaccataaacgatgc

SEQ ID NO: 179542 - DNA, 25 bp, Canis familiaris
tcgtagttccgaccataaacgatgc

SEQ ID NO: 179543 - DNA, 25 bp, Canis familiaris
tcggcactttcccaataaactgacc

SEQ ID NO: 179544 - DNA, 25 bp, Canis familiaris
tccacagttttgccttaaaggacct

SEQ ID NO: 179545 - DNA, 25 bp, Canis familiaris
tccactgttttcctttatgagcagg

SEQ ID NO: 179546 - DNA, 25 bp, Canis familiaris
tccaagtctttacatttgactggat

SEQ ID NO: 179547 - DNA, 25 bp, Canis familiaris
tccacacttttgcaagggttgaatc

SEQ ID NO: 179548 - DNA, 25 bp, Canis familiaris
tctcagcagcaggttggaagggtct

SEQ ID NO: 179549 - DNA, 25 bp, Canis familiaris
tccagcaagctgtggcacactctgt

SEQ ID NO: 179550 - DNA, 25 bp, Canis familiaris
tccagaagcacatttgcacttctta

SEQ ID NO: 179551 - DNA, 25 bp, Canis familiaris
tccgacagctatactaccatcttca

SEQ ID NO: 179552 - DNA, 25 bp, Canis familiaris
tccgccactatattatcgctaatcc

SEQ ID NO: 179553 - DNA, 25 bp, Canis familiaris
tccaccaactgtaagcctagtctcg

SEQ ID NO: 179554 - DNA, 25 bp, Canis familiaris
tccacaaacttttcgttgccctgaa

SEQ ID NO: 179555 - DNA, 25 bp, Canis familiaris
tcaaaatatttacagtgtcttcttg

SEQ ID NO: 179556 - DNA, 25 bp, Canis familiaris
tccaaatatttaccgtgtcttcttg

SEQ ID NO: 179557 - DNA, 25 bp, Canis familiaris
tccaaactctaaactatgaggtttt

SEQ ID NO: 179558 - DNA, 25 bp, Canis familiaris
tccaacctaagattccagacgtaat

SEQ ID NO: 179559 - DNA, 25 bp, Canis familiaris
tccacacagttagcccacacggata

SEQ ID NO: 179560 - DNA, 25 bp, Canis familiaris
tccaccaggtacgaacagccgaaat

SEQ ID NO: 179561 - DNA, 25 bp, Canis familiaris
tccacaaggctcagaagagtcagaa

SEQ ID NO: 179562 - DNA, 25 bp, Canis familiaris
tccacaagttcagtccagtgtccaa

SEQ ID NO: 179563 - DNA, 25 bp, Canis familiaris
tccatgaaggtagtctctggtctgg

SEQ ID NO: 179564 - DNA, 25 bp, Canis familiaris
tccacacaggaagcccgacatggga

SEQ ID NO: 179565 - DNA, 25 bp, Canis familiaris
tccagagaggcatggcccgaagacc

SEQ ID NO: 179566 - DNA, 25 bp, Canis familiaris
tccagcgggcttgcccttatgaacc

SEQ ID NO: 179567 - DNA, 25 bp, Canis familiaris
tccaggctgtgctgtccctgtatgc

SEQ ID NO: 179568 - DNA, 25 bp, Canis familiaris
tccaagctctgctgtcaccagatgg

SEQ ID NO: 179569 - DNA, 25 bp, Canis familiaris
tccactcttgcacatcctcaagtgc

SEQ ID NO: 179570 - DNA, 25 bp, Canis familiaris
tccactcaatcacagccatttctgg

SEQ ID NO: 179571 - DNA, 25 bp, Canis familiaris
tccacatttctgaagtctctttgca

SEQ ID NO: 179572 - DNA, 25 bp, Canis familiaris
tccagagattcacagctcctttgct

SEQ ID NO: 179573 - DNA, 25 bp, Canis familiaris
tccagagaggatcctttccttgctg

SEQ ID NO: 179574 - DNA, 25 bp, Canis familiaris
tccaggattggagtcttccactctg

SEQ ID NO: 179575 - DNA, 25 bp, Canis familiaris
tccagaactggcacctcatacttta

SEQ ID NO: 179576 - DNA, 25 bp, Canis familiaris
tcctaactccactgccaactgtgga

SEQ ID NO: 179577 - DNA, 25 bp, Canis familiaris
tcctacagccgacgggacactggtg

SEQ ID NO: 179578 - DNA, 25 bp, Canis familiaris
tccattagccatctcggaccatgag

SEQ ID NO: 179579 - DNA, 25 bp, Canis familiaris
tccttgcacaatcgtcgtgcagcaa

SEQ ID NO: 179580 - DNA, 25 bp, Canis familiaris
tccacatgaacacctctagcacaaa

SEQ ID NO: 179581 - DNA, 25 bp, Canis familiaris
tccacagtgcagaccatctacacca

SEQ ID NO: 179582 - DNA, 25 bp, Canis familiaris
tccactgacagtgtctgctagccac

SEQ ID NO: 179583 - DNA, 25 bp, Canis familiaris
tccagtgaagatgcctcagtcacca

SEQ ID NO: 179584 - DNA, 25 bp, Canis familiaris
tccagctatcagaccaacaaagcca

SEQ ID NO: 179585 - DNA, 25 bp, Canis familiaris
tccatgtccacatcaaaacctcaga

SEQ ID NO: 179586 - DNA, 25 bp, Canis familiaris
tccttgccctcaataaagcctagag

SEQ ID NO: 179587 - DNA, 25 bp, Canis familiaris
tccaagtgccctatgtcacctatga

SEQ ID NO: 179588 - DNA, 25 bp, Canis familiaris
tccagttcagttcttagcctcagaa

SEQ ID NO: 179589 - DNA, 25 bp, Canis familiaris
tccactatattaattttgcccaaag

SEQ ID NO: 179590 - DNA, 25 bp, Canis familiaris
tccagtatatttgtttccacgagaa

SEQ ID NO: 179591 - DNA, 25 bp, Canis familiaris
tccaacttctgatctttctcggaga

SEQ ID NO: 179592 - DNA, 25 bp, Canis familiaris
tccaatctcctttttggctggtggc

SEQ ID NO: 179593 - DNA, 25 bp, Canis familiaris
tccagtactgctttgcctggggtgg

SEQ ID NO: 179594 - DNA, 25 bp, Canis familiaris
tccatgaggcgcagcggcgagggtg

SEQ ID NO: 179595 - DNA, 25 bp, Canis familiaris
tccaggggtgggcttgggggaggca

SEQ ID NO: 179596 - DNA, 25 bp, Canis familiaris
tccaaaggggagcattggccccgga

SEQ ID NO: 179597 - DNA, 25 bp, Canis familiaris
tccaaaggggagcattggccccgga

SEQ ID NO: 179598 - DNA, 25 bp, Canis familiaris
tccaaaggggagcattggccccgga

SEQ ID NO: 179599 - DNA, 25 bp, Canis familiaris
tccaaaggggagcattggccccgga

SEQ ID NO: 179600 - DNA, 25 bp, Canis familiaris
tccaaaggggagcattggccccgga

SEQ ID NO: 179601 - DNA, 25 bp, Canis familiaris
tccaaaggggagcattggccccgga

SEQ ID NO: 179602 - DNA, 25 bp, Canis familiaris
tccaaaggggagcattggccccgga

SEQ ID NO: 179603 - DNA, 25 bp, Canis familiaris
tccaaaggggagcattggccccgga

SEQ ID NO: 179604 - DNA, 25 bp, Canis familiaris
taagaaaggccccttaggccgctgg

SEQ ID NO: 179605 - DNA, 25 bp, Canis familiaris
tcccaaaggcttgtttcccaggagg

SEQ ID NO: 179606 - DNA, 25 bp, Canis familiaris
tccccaaggtttccgtaagcgtgag

SEQ ID NO: 179607 - DNA, 25 bp, Canis familiaris
tcctcgtgggacatggcggggggag

SEQ ID NO: 179608 - DNA, 25 bp, Canis familiaris
tccatcggggcccgggggatgagga

SEQ ID NO: 179609 - DNA, 25 bp, Canis familiaris
tccattcagtgacccgtgcggggaa

SEQ ID NO: 179610 - DNA, 25 bp, Canis familiaris
tccatccagaagtccctgcatgtgt

SEQ ID NO: 179611 - DNA, 25 bp, Canis familiaris
tccagcggaagcccgtctgtttaat

SEQ ID NO: 179612 - DNA, 25 bp, Canis familiaris
tccaggggactcggtttgctaaaga

SEQ ID NO: 179613 - DNA, 25 bp, Canis familiaris
tccacgggactctctatgtttgata

SEQ ID NO: 179614 - DNA, 25 bp, Canis familiaris
tccaggagggatgggcctttcttga

SEQ ID NO: 179615 - DNA, 25 bp, Canis familiaris
tccaaggttgtggctgtttggccga

SEQ ID NO: 179616 - DNA, 25 bp, Canis familiaris
tccagaggcctgacgtcgttggccg

SEQ ID NO: 179617 - DNA, 25 bp, Canis familiaris
tccaggcacttactgtcgtttgcca

SEQ ID NO: 179618 - DNA, 25 bp, Canis familiaris
tccaggatcttggtgccagctgttt

SEQ ID NO: 179619 - DNA, 25 bp, Canis familiaris
tccagatcaaacctggagcttttac

SEQ ID NO: 179620 - DNA, 25 bp, Canis familiaris
tcgcaagcgtagcggatcctttatc

SEQ ID NO: 179621 - DNA, 25 bp, Canis familiaris
tcgcaagcgtagcggatcctttatc

SEQ ID NO: 179622 - DNA, 25 bp, Canis familiaris
tccatagcgtggattacctttgtat

SEQ ID NO: 179623 - DNA, 25 bp, Canis familiaris
tcgttcgtttttgtctatgttattt

SEQ ID NO: 179624 - DNA, 25 bp, Canis familiaris
tccttggttttgtgggtctttctcg

SEQ ID NO: 179625 - DNA, 25 bp, Canis familiaris
tccttgggttgttggttttccatct

SEQ ID NO: 179626 - DNA, 25 bp, Canis familiaris
tctcttgacctttacgaatttccgc

SEQ ID NO: 179627 - DNA, 25 bp, Canis familiaris
tccaggaccatttacgacgttgctt

SEQ ID NO: 179628 - DNA, 25 bp, Canis familiaris
tccaccaggctcaagaggccgtttt

SEQ ID NO: 179629 - DNA, 25 bp, Canis familiaris
tccgtcagactttaggccgaggtgt

SEQ ID NO: 179630 - DNA, 25 bp, Canis familiaris
tccgtcacaacgcaggcttagtttc

SEQ ID NO: 179631 - DNA, 25 bp, Canis familiaris
tcctgaagcacacagggcctggcat

SEQ ID NO: 179632 - DNA, 25 bp, Canis familiaris
tccagaagaggcgagtggcccgccc

SEQ ID NO: 179633 - DNA, 25 bp, Canis familiaris
tccagacaatggagggcatcccgcc

SEQ ID NO: 179634 - DNA, 25 bp, Canis familiaris
tccatgcggaggacagggccagacg

SEQ ID NO: 179635 - DNA, 25 bp, Canis familiaris
tccagctgtaggccaggcacacggg

SEQ ID NO: 179636 - DNA, 25 bp, Canis familiaris
tccagctgtgggccagacactgggg

SEQ ID NO: 179637 - DNA, 25 bp, Canis familiaris
tccacgcggagaggagcaccgtagt

SEQ ID NO: 179638 - DNA, 25 bp, Canis familiaris
tccacacaggagagacaccctatct

SEQ ID NO: 179639 - DNA, 25 bp, Canis familiaris
tccagaaggagtccactctgcacct

SEQ ID NO: 179640 - DNA, 25 bp, Canis familiaris
tccagaaagagtccaccttgcactt

SEQ ID NO: 179641 - DNA, 25 bp, Canis familiaris
tccaagagaggtaccctctgtcccc

SEQ ID NO: 179642 - DNA, 25 bp, Canis familiaris
tccaaatgtcgtaacaactccgccc

SEQ ID NO: 179643 - DNA, 25 bp, Canis familiaris
tccaaaggtctgataactccactcc

SEQ ID NO: 179644 - DNA, 25 bp, Canis familiaris
tccaagtggccgaggacttcatctc

SEQ ID NO: 179645 - DNA, 25 bp, Canis familiaris
tccaagtggcccagggaacatgtga

SEQ ID NO: 179646 - DNA, 25 bp, Canis familiaris
tacaggggcttctgggaaagtttat

SEQ ID NO: 179647 - DNA, 25 bp, Canis familiaris
tccacctccttctgggaaattttct

SEQ ID NO: 179648 - DNA, 25 bp, Canis familiaris
tccaccccccaacaatcaaatgttt

SEQ ID NO: 179649 - DNA, 25 bp, Canis familiaris
tccacagcccccaagttaagaattc

SEQ ID NO: 179650 - DNA, 25 bp, Canis familiaris
tccaccaccacgaagactcaggaca

SEQ ID NO: 179651 - DNA, 25 bp, Canis familiaris
tccacacctcaggacagagtcgggt

SEQ ID NO: 179652 - DNA, 25 bp, Canis familiaris
tccacactccagtacagatgtcgtg

SEQ ID NO: 179653 - DNA, 25 bp, Canis familiaris
tccacacatccacaaatctctgatt

SEQ ID NO: 179654 - DNA, 25 bp, Canis familiaris
tccatccatctactaaaattttttc

SEQ ID NO: 179655 - DNA, 25 bp, Canis familiaris
tccataaccactttaattttagcat

SEQ ID NO: 179656 - DNA, 25 bp, Canis familiaris
tccatcgaccctttgaggaccgaga

SEQ ID NO: 179657 - DNA, 25 bp, Canis familiaris
tccatgtcacccaggaggactttga

SEQ ID NO: 179658 - DNA, 25 bp, Canis familiaris
tccacagacctcatggaagccattc

SEQ ID NO: 179659 - DNA, 25 bp, Canis familiaris
tccaccagcctcaaagacactgcat

SEQ ID NO: 179660 - DNA, 25 bp, Canis familiaris
tccacatgagcccacacagggtgat

SEQ ID NO: 179661 - DNA, 25 bp, Canis familiaris
tccacagtggctgcatcagtttgca

SEQ ID NO: 179662 - DNA, 25 bp, Canis familiaris
tccacatgggcttcttgtttgatta

SEQ ID NO: 179663 - DNA, 25 bp, Canis familiaris
tccacgccttacagttgtgctatgc

SEQ ID NO: 179664 - DNA, 25 bp, Canis familiaris
tccatcgatttatgcagtcggctag

SEQ ID NO: 179665 - DNA, 25 bp, Canis familiaris
tcccgttctagatctcgttcaaagt

SEQ ID NO: 179666 - DNA, 25 bp, Canis familiaris
tcccttacttgacccttaaaggcag

SEQ ID NO: 179667 - DNA, 25 bp, Canis familiaris
tccacttctcttgtctcttaaaaaa

SEQ ID NO: 179668 - DNA, 25 bp, Canis familiaris
tccagcttccgatctttgacaagcg

SEQ ID NO: 179669 - DNA, 25 bp, Canis familiaris
tccagcttcccttgtttggaatcca

SEQ ID NO: 179670 - DNA, 25 bp, Canis familiaris
tccacctctccttttgaggcttatc

SEQ ID NO: 179671 - DNA, 25 bp, Canis familiaris
tccatggccattttttgtggtactt

SEQ ID NO: 179672 - DNA, 25 bp, Canis familiaris
tccagcccttttttgagtgttcata

SEQ ID NO: 179673 - DNA, 25 bp, Canis familiaris
tccacattttaatctgagccttgca

SEQ ID NO: 179674 - DNA, 25 bp, Canis familiaris
tccagcagctttataatatccttat

SEQ ID NO: 179675 - DNA, 25 bp, Canis familiaris
tccactttttcaacttctctgttac

SEQ ID NO: 179676 - DNA, 25 bp, Canis familiaris
tccactttctggtcgttttgttgtt

SEQ ID NO: 179677 - DNA, 25 bp, Canis familiaris
tccagctttacgttggttattggaa

SEQ ID NO: 179678 - DNA, 25 bp, Canis familiaris
tccagccttcatcttgggtttgatg

SEQ ID NO: 179679 - DNA, 25 bp, Canis familiaris
tccagcctccacttggggtgagaag

SEQ ID NO: 179680 - DNA, 25 bp, Canis familiaris
tccacctccacacttagttgacagg

SEQ ID NO: 179681 - DNA, 25 bp, Canis familiaris
tccactcccctttgtgtgtgaatgt

SEQ ID NO: 179682 - DNA, 25 bp, Canis familiaris
tccatgcttacagaactgttcagat

SEQ ID NO: 179683 - DNA, 25 bp, Canis familiaris
tccacttgtgccttactgtatcatg

SEQ ID NO: 179684 - DNA, 25 bp, Canis familiaris
tccacttgtgacatagggcctttcc

SEQ ID NO: 179685 - DNA, 25 bp, Canis familiaris
tcctcaaggcttaagttccatttcc

SEQ ID NO: 179686 - DNA, 25 bp, Canis familiaris
tccatccaccttgtgttcacagact

SEQ ID NO: 179687 - DNA, 25 bp, Canis familiaris
tccacacagcctgcctgttggcaaa

SEQ ID NO: 179688 - DNA, 25 bp, Canis familiaris
tcgacaacggctccggcatgtgcaa

SEQ ID NO: 179689 - DNA, 25 bp, Canis familiaris
tccagcaacggaacggcagaaagac

SEQ ID NO: 179690 - DNA, 25 bp, Canis familiaris
tccagactctgtcccaggaggaaga

SEQ ID NO: 179691 - DNA, 25 bp, Canis familiaris
tccagccatctgggccagagcacga

SEQ ID NO: 179692 - DNA, 25 bp, Canis familiaris
tccagcctgggcgacagagcgagac

SEQ ID NO: 179693 - DNA, 25 bp, Canis familiaris
tccagcggggtggacacgcacccca

SEQ ID NO: 179694 - DNA, 25 bp, Canis familiaris
tccaggcggggagtccccggacagg

SEQ ID NO: 179695 - DNA, 25 bp, Canis familiaris
tccagtgccgggtcaccaccgagga

SEQ ID NO: 179696 - DNA, 25 bp, Canis familiaris
tccaggctgggaaacggccgagggt

SEQ ID NO: 179697 - DNA, 25 bp, Canis familiaris
tccacctccgagaactgggggcggg

SEQ ID NO: 179698 - DNA, 25 bp, Canis familiaris
tccagcccgcctgaggggagggggc

SEQ ID NO: 179699 - DNA, 25 bp, Canis familiaris
tccacccagtctcatgatggagagg

SEQ ID NO: 179700 - DNA, 25 bp, Canis familiaris
tccacggcagctatatatctggaag

SEQ ID NO: 179701 - DNA, 25 bp, Canis familiaris
tccacggcacagtcaaggctgagaa

SEQ ID NO: 179702 - DNA, 25 bp, Canis familiaris
tccacaccagcaccaagcgatgaag

SEQ ID NO: 179703 - DNA, 25 bp, Canis familiaris
tccacccatgctcatgaggaagagg

SEQ ID NO: 179704 - DNA, 25 bp, Canis familiaris
tccaccaatctcatgaggagaggga

SEQ ID NO: 179705 - DNA, 25 bp, Canis familiaris
tccagccaccacctaggagggcaga

SEQ ID NO: 179706 - DNA, 25 bp, Canis familiaris
tccatggcaaccctgggacttgcag

SEQ ID NO: 179707 - DNA, 25 bp, Canis familiaris
tccatgtcagtggccgtggagttcc

SEQ ID NO: 179708 - DNA, 25 bp, Canis familiaris
tccgttctcgcttggcagagtgtca

SEQ ID NO: 179709 - DNA, 25 bp, Canis familiaris
tccaccacgagtgagcagagtgcca

SEQ ID NO: 179710 - DNA, 25 bp, Canis familiaris
tccaaagccagagggcaagcccatc

SEQ ID NO: 179711 - DNA, 25 bp, Canis familiaris
tccagagccgaggcggcatagccct

SEQ ID NO: 179712 - DNA, 25 bp, Canis familiaris
tccagccctgagcgacatacaagaa

SEQ ID NO: 179713 - DNA, 25 bp, Canis familiaris
tccagcttctgggtcagcttcaagg

SEQ ID NO: 179714 - DNA, 25 bp, Canis familiaris
tccatcttctgggaaccttacggat

SEQ ID NO: 179715 - DNA, 25 bp, Canis familiaris
tccatttggcttgaccttcagccgt

SEQ ID NO: 179716 - DNA, 25 bp, Canis familiaris
tccattttctccactttgtgatcgg

SEQ ID NO: 179717 - DNA, 25 bp, Canis familiaris
tcctatctttcaaccttctggaggt

SEQ ID NO: 179718 - DNA, 25 bp, Canis familiaris
tcctctgtttaatctaagtcgtgta

SEQ ID NO: 179719 - DNA, 25 bp, Canis familiaris
tcccctgctttataagagacgtgaa

SEQ ID NO: 179720 - DNA, 25 bp, Canis familiaris
tcccctccaggatataaacttcaca

SEQ ID NO: 179721 - DNA, 25 bp, Canis familiaris
tccacactccaccaaaaacatttaa

SEQ ID NO: 179722 - DNA, 25 bp, Canis familiaris
tccagccaaacctcaaaatatttac

SEQ ID NO: 179723 - DNA, 25 bp, Canis familiaris
tccatgccaaacggtcacaagtatg

SEQ ID NO: 179724 - DNA, 25 bp, Canis familiaris
tccagcgggtcggtctcaagctgta

SEQ ID NO: 179725 - DNA, 25 bp, Canis familiaris
tccacgtgtagcgctgttagctgta

SEQ ID NO: 179726 - DNA, 25 bp, Canis familiaris
tccactgtgttgacactgtctcctt

SEQ ID NO: 179727 - DNA, 25 bp, Canis familiaris
tccactgtgcctccaattcatgcac

SEQ ID NO: 179728 - DNA, 25 bp, Canis familiaris
tccactgctgccttatattcatgtt

SEQ ID NO: 179729 - DNA, 25 bp, Canis familiaris
tccactgcaccttcaactgaggatg

SEQ ID NO: 179730 - DNA, 25 bp, Canis familiaris
tccagcatccacatcatcggaggag

SEQ ID NO: 179731 - DNA, 25 bp, Canis familiaris
tccagcaccacacatcagctgggag

SEQ ID NO: 179732 - DNA, 25 bp, Canis familiaris
tccagcacccaggccagtattgaga

SEQ ID NO: 179733 - DNA, 25 bp, Canis familiaris
tccagacaacgtgggagattggctc

SEQ ID NO: 179734 - DNA, 25 bp, Canis familiaris
tccagagctaagcgcagcttcttcc

SEQ ID NO: 179735 - DNA, 25 bp, Canis familiaris
tccatgaggaacccatctttcccaa

SEQ ID NO: 179736 - DNA, 25 bp, Canis familiaris
tccagagaaagccttttggcccaag

SEQ ID NO: 179737 - DNA, 25 bp, Canis familiaris
tccagcaactcaggcttcttgggac

SEQ ID NO: 179738 - DNA, 25 bp, Canis familiaris
tccacttcctcactgcttaggagac

SEQ ID NO: 179739 - DNA, 25 bp, Canis familiaris
tccagctttaatagcctgagggctc

SEQ ID NO: 179740 - DNA, 25 bp, Canis familiaris
tccagttgttctagacggtgagcca

SEQ ID NO: 179741 - DNA, 25 bp, Canis familiaris
tccagtgtttctcatcagctgttcc

SEQ ID NO: 179742 - DNA, 25 bp, Canis familiaris
tccagttttctgttacattttcctt

SEQ ID NO: 179743 - DNA, 25 bp, Canis familiaris
tccaggtatatttttaccctcgcgt

SEQ ID NO: 179744 - DNA, 25 bp, Canis familiaris
tccactgtaagttttattctcccct

SEQ ID NO: 179745 - DNA, 25 bp, Canis familiaris
tccattgctaagttttttgaccaca

SEQ ID NO: 179746 - DNA, 25 bp, Canis familiaris
tcccttacaaggtttggagtcacaa

SEQ ID NO: 179747 - DNA, 25 bp, Canis familiaris
tccactacaccataattctgagtat

SEQ ID NO: 179748 - DNA, 25 bp, Canis familiaris
tccactgagaccgaagccttggctt

SEQ ID NO: 179749 - DNA, 25 bp, Canis familiaris
tccacggactgccacagttgcaggc

SEQ ID NO: 179750 - DNA, 25 bp, Canis familiaris
tccactgtgaccatctgatcgaggc

SEQ ID NO: 179751 - DNA, 25 bp, Canis familiaris
tccacattgcccacagaagcgtgaa

SEQ ID NO: 179752 - DNA, 25 bp, Canis familiaris
tccgatcctgcctcaaagctggaaa

SEQ ID NO: 179753 - DNA, 25 bp, Canis familiaris
tcctgagaccacccaaagtaaaaat

SEQ ID NO: 179754 - DNA, 25 bp, Canis familiaris
tccatgacagccttgccacagaaat

SEQ ID NO: 179755 - DNA, 25 bp, Canis familiaris
tccatgatactgtctctgaggggtg

SEQ ID NO: 179756 - DNA, 25 bp, Canis familiaris
tccagttctgcagtgtgggctgttc

SEQ ID NO: 179757 - DNA, 25 bp, Canis familiaris
tcctgcgtctggacttggctggccg

SEQ ID NO: 179758 - DNA, 25 bp, Canis familiaris
tcctgcgtctggacctggctggccg

SEQ ID NO: 179759 - DNA, 25 bp, Canis familiaris
tccagctgcacagcagccaggggcc

SEQ ID NO: 179760 - DNA, 25 bp, Canis familiaris
tccaggcccacagcatggggcttgg

SEQ ID NO: 179761 - DNA, 25 bp, Canis familiaris
tccaggctttctgtagatgtgcttg

SEQ ID NO: 179762 - DNA, 25 bp, Canis familiaris
tccagactttccgtgaagacagtgg

SEQ ID NO: 179763 - DNA, 25 bp, Canis familiaris
tccagctctctgaacctcacagaga

SEQ ID NO: 179764 - DNA, 25 bp, Canis familiaris
tccaccctgtatcctatcatgtgtc

SEQ ID NO: 179765 - DNA, 25 bp, Canis familiaris
tccagtccgactctgatcagttgca

SEQ ID NO: 179766 - DNA, 25 bp, Canis familiaris
tccacccagagtctaagctctgccc

SEQ ID NO: 179767 - DNA, 25 bp, Canis familiaris
tcccacctggtagaggctctgtacc

SEQ ID NO: 179768 - DNA, 25 bp, Canis familiaris
tccacactggggagaagccgtacca

SEQ ID NO: 179769 - DNA, 25 bp, Canis familiaris
tccacaccggagagaagccatacca

SEQ ID NO: 179770 - DNA, 25 bp, Canis familiaris
tccaaatcctggatgagaccacacc

SEQ ID NO: 179771 - DNA, 25 bp, Canis familiaris
tccacatctcctagattagtaactc

SEQ ID NO: 179772 - DNA, 25 bp, Canis familiaris
tccacatccgattagtattacagta

SEQ ID NO: 179773 - DNA, 25 bp, Canis familiaris
tccaccccgtaggttacgtgttatg

SEQ ID NO: 179774 - DNA, 25 bp, Canis familiaris
tccaccccagtatggctgacgagtt

SEQ ID NO: 179775 - DNA, 25 bp, Canis familiaris
tccaggcctcggtggtgaaggtctt

SEQ ID NO: 179776 - DNA, 25 bp, Canis familiaris
tccaggccccgaaggaaatggtcag

SEQ ID NO: 179777 - DNA, 25 bp, Canis familiaris
tccaggaccccagagaagagaacag

SEQ ID NO: 179778 - DNA, 25 bp, Canis familiaris
tccaggtggctcgaaacagcagaga

SEQ ID NO: 179779 - DNA, 25 bp, Canis familiaris
tccagtgtgtgtaaatccatgaaaa

SEQ ID NO: 179780 - DNA, 25 bp, Canis familiaris
tccaccttgatctaatcctgggcta

SEQ ID NO: 179781 - DNA, 25 bp, Canis familiaris
tccatccatggattaccagcgggtt

SEQ ID NO: 179782 - DNA, 25 bp, Canis familiaris
tccaccattatctgctagattggtt

SEQ ID NO: 179783 - DNA, 25 bp, Canis familiaris
tccaccaatctcatcatcagcattg

SEQ ID NO: 179784 - DNA, 25 bp, Canis familiaris
tccactcacagcactacagctttta

SEQ ID NO: 179785 - DNA, 25 bp, Canis familiaris
tccacatccactgaaccatactata

SEQ ID NO: 179786 - DNA, 25 bp, Canis familiaris
tccagactcacagaacacagaatac

SEQ ID NO: 179787 - DNA, 25 bp, Canis familiaris
tccacccatgacggactcgaaaccg

SEQ ID NO: 179788 - DNA, 25 bp, Canis familiaris
tcccccatggttctggaaagggtga

SEQ ID NO: 179789 - DNA, 25 bp, Canis familiaris
tccccctgtcctctacaaagggaag

SEQ ID NO: 179790 - DNA, 25 bp, Canis familiaris
tccccagcttttcaaaagtttgtag

SEQ ID NO: 179791 - DNA, 25 bp, Canis familiaris
tccatccgttttcaaagccttgtgt

SEQ ID NO: 179792 - DNA, 25 bp, Canis familiaris
tccaccgtgttccgaagattctagt

SEQ ID NO: 179793 - DNA, 25 bp, Canis familiaris
tccacctgtttctcaaatgctgttt

SEQ ID NO: 179794 - DNA, 25 bp, Canis familiaris
tccagtggttcttccaattgggtta

SEQ ID NO: 179795 - DNA, 25 bp, Canis familiaris
tcacattggaacaaccttatgggtt

SEQ ID NO: 179796 - DNA, 25 bp, Canis familiaris
tccatatgtcccacgcggatgggtt

SEQ ID NO: 179797 - DNA, 25 bp, Canis familiaris
tccatggctcccatcgtgggagcga

SEQ ID NO: 179798 - DNA, 25 bp, Canis familiaris
tccacccggaatgctgggatcgagg

SEQ ID NO: 179799 - DNA, 25 bp, Canis familiaris
tccacccggaatgctgggatcgagg

SEQ ID NO: 179800 - DNA, 25 bp, Canis familiaris
tccataccgagggccagggactggg

SEQ ID NO: 179801 - DNA, 25 bp, Canis familiaris
tccattaaaggttcaggctgaaggg

SEQ ID NO: 179802 - DNA, 25 bp, Canis familiaris
tccttcaactgtgactgcctgacag

SEQ ID NO: 179803 - DNA, 25 bp, Canis familiaris
tccttcactctgccgacagggaaac

SEQ ID NO: 179804 - DNA, 25 bp, Canis familiaris
tcctgtacctggccagattggggaa

SEQ ID NO: 179805 - DNA, 25 bp, Canis familiaris
tcctgttccgagtgatccaaagacc

SEQ ID NO: 179806 - DNA, 25 bp, Canis familiaris
tcctggcccaacagcaccaggaacc

SEQ ID NO: 179807 - DNA, 25 bp, Canis familiaris
tccttccgcaacacgggcgagatca

SEQ ID NO: 179808 - DNA, 25 bp, Canis familiaris
tccttcctgggcttcagggggacac

SEQ ID NO: 179809 - DNA, 25 bp, Canis familiaris
tcctttggccacttcacgtgggagc

SEQ ID NO: 179810 - DNA, 25 bp, Canis familiaris
tccattaagtccttactgatagggg

SEQ ID NO: 179811 - DNA, 25 bp, Canis familiaris
tccagggaccactgacggagggggg

SEQ ID NO: 179812 - DNA, 25 bp, Canis familiaris
tccagggaccagagcagggacaggg

SEQ ID NO: 179813 - DNA, 25 bp, Canis familiaris
tccacggcctccaggcggccgtggc

SEQ ID NO: 179814 - DNA, 25 bp, Canis familiaris
tccacaggtaccatgtcccaaatgg

SEQ ID NO: 179815 - DNA, 25 bp, Canis familiaris
tccacggatcaggatttcccatttg

SEQ ID NO: 179816 - DNA, 25 bp, Canis familiaris
tccaccagctgaggtcttacctgtt

SEQ ID NO: 179817 - DNA, 25 bp, Canis familiaris
tccaccgtgaagtttaccagtctat

SEQ ID NO: 179818 - DNA, 25 bp, Canis familiaris
tccaccgtgaacttatgtccaccgt

SEQ ID NO: 179819 - DNA, 25 bp, Canis familiaris
tccaccgctaagtattacccacaga

SEQ ID NO: 179820 - DNA, 25 bp, Canis familiaris
tccccgttagactagtcccaagaga

SEQ ID NO: 179821 - DNA, 25 bp, Canis familiaris
tccccgtgagagacgagtcccaacg

SEQ ID NO: 179822 - DNA, 25 bp, Canis familiaris
tccagtgggggcaggtcccacatct

SEQ ID NO: 179823 - DNA, 25 bp, Canis familiaris
tccactggggaatgatttgagacac

SEQ ID NO: 179824 - DNA, 25 bp, Canis familiaris
tccacctcttgagggtgcttggacc

SEQ ID NO: 179825 - DNA, 25 bp, Canis familiaris
tccacctgcttgaggccattaggat

SEQ ID NO: 179826 - DNA, 25 bp, Canis familiaris
tccacagtcttcagtccaatcatgg

SEQ ID NO: 179827 - DNA, 25 bp, Canis familiaris
tccacagtcctctggcacagaaggg

SEQ ID NO: 179828 - DNA, 25 bp, Canis familiaris
tccaggcttctctggccaaagtctg

SEQ ID NO: 179829 - DNA, 25 bp, Canis familiaris
tccacgctctaaaccaccaagtgat

SEQ ID NO: 179830 - DNA, 25 bp, Canis familiaris
tccacccgaaagcgcactgagtgtc

SEQ ID NO: 179831 - DNA, 25 bp, Canis familiaris
tccacttggagagggtgccatggtt

SEQ ID NO: 179832 - DNA, 25 bp, Canis familiaris
tccactctgtggtctggaccaggca

SEQ ID NO: 179833 - DNA, 25 bp, Canis familiaris
tccatacgtgcacctgggacaggca

SEQ ID NO: 179834 - DNA, 25 bp, Canis familiaris
tccagccagacaccggccgcattga

SEQ ID NO: 179835 - DNA, 25 bp, Canis familiaris
tccagccagatgtttctgctccaag

SEQ ID NO: 179836 - DNA, 25 bp, Canis familiaris
tccagctggatttttctccatagta

SEQ ID NO: 179837 - DNA, 25 bp, Canis familiaris
tccactggttggacctccatggaga

SEQ ID NO: 179838 - DNA, 25 bp, Canis familiaris
tccagactgggtgcggctcatggag

SEQ ID NO: 179839 - DNA, 25 bp, Canis familiaris
tccataccagcggcgcggctatgga

SEQ ID NO: 179840 - DNA, 25 bp, Canis familiaris
tccaccgagcggcgtgtaggagtgc

SEQ ID NO: 179841 - DNA, 25 bp, Canis familiaris
tccaccgagcggcgtgtaagagtgc

SEQ ID NO: 179842 - DNA, 25 bp, Canis familiaris
tcctccggctggcaatgccaagcat

SEQ ID NO: 179843 - DNA, 25 bp, Canis familiaris
tccatccgacttcacttccaaatgg

SEQ ID NO: 179844 - DNA, 25 bp, Canis familiaris
tccatccaatcttgtcctttattat

SEQ ID NO: 179845 - DNA, 25 bp, Canis familiaris
tccaccacatcttggttctctgtgt

SEQ ID NO: 179846 - DNA, 25 bp, Canis familiaris
tccacattcatttttttctttcctg

SEQ ID NO: 179847 - DNA, 25 bp, Canis familiaris
tccactcattattttttctttgctt

SEQ ID NO: 179848 - DNA, 25 bp, Canis familiaris
tccactcccatgcatgttttttgtt

SEQ ID NO: 179849 - DNA, 25 bp, Canis familiaris
tccagcctcctgagtttcttgtgta

SEQ ID NO: 179850 - DNA, 25 bp, Canis familiaris
tccacctccagacgactgtcttaat

SEQ ID NO: 179851 - DNA, 25 bp, Canis familiaris
tccacttacaagcgcagactacaga

SEQ ID NO: 179852 - DNA, 25 bp, Canis familiaris
tccacttcaccaaggaaccactgat

SEQ ID NO: 179853 - DNA, 25 bp, Canis familiaris
tccatcttcccagagaatactcatc

SEQ ID NO: 179854 - DNA, 25 bp, Canis familiaris
tccattactaagcatgtcatactga

SEQ ID NO: 179855 - DNA, 25 bp, Canis familiaris
tcctttatagagctgttttgagaat

SEQ ID NO: 179856 - DNA, 25 bp, Canis familiaris
tccttgaatctacttgtggggtaat

SEQ ID NO: 179857 - DNA, 25 bp, Canis familiaris
tccatctgtttcctttagtcttaaa

SEQ ID NO: 179858 - DNA, 25 bp, Canis familiaris
tccttgtttcctctgggttttatag

SEQ ID NO: 179859 - DNA, 25 bp, Canis familiaris
tcctttcaggctctttggttttatg

SEQ ID NO: 179860 - DNA, 25 bp, Canis familiaris
tccttatagcccttttggatgcttg

SEQ ID NO: 179861 - DNA, 25 bp, Canis familiaris
tccttagagtcattggtacctgttc

SEQ ID NO: 179862 - DNA, 25 bp, Canis familiaris
tctcagctaggttcggtacctggcc

SEQ ID NO: 179863 - DNA, 25 bp, Canis familiaris
tccacggcgtctcaggacgtggcca

SEQ ID NO: 179864 - DNA, 25 bp, Canis familiaris
tccacgttgtccgagccaatgggga

SEQ ID NO: 179865 - DNA, 25 bp, Canis familiaris
tccacgaagtctcacactgggtgct

SEQ ID NO: 179866 - DNA, 25 bp, Canis familiaris
tccactagaaatctccatgatttgt

SEQ ID NO: 179867 - DNA, 25 bp, Canis familiaris
tccactgatgatctttccttttctg

SEQ ID NO: 179868 - DNA, 25 bp, Canis familiaris
tccactgaaggtatgctttgtctgg

SEQ ID NO: 179869 - DNA, 25 bp, Canis familiaris
tccactgaaggtagcttgggctggg

SEQ ID NO: 179870 - DNA, 25 bp, Canis familiaris
tccattggaggaagttggggcccca

SEQ ID NO: 179871 - DNA, 25 bp, Canis familiaris
tccttcgaggggtcctgagacccct

SEQ ID NO: 179872 - DNA, 25 bp, Canis familiaris
tccttggacgggacctttgacaccg

SEQ ID NO: 179873 - DNA, 25 bp, Canis familiaris
tcctttttggagatcatggtgtcac

SEQ ID NO: 179874 - DNA, 25 bp, Canis familiaris
tccttattctgaaaccatctgtccc

SEQ ID NO: 179875 - DNA, 25 bp, Canis familiaris
tccttgtcctaaatggttgacctgc

SEQ ID NO: 179876 - DNA, 25 bp, Canis familiaris
tcctttcacatatgttatgttccta

SEQ ID NO: 179877 - DNA, 25 bp, Canis familiaris
tcctgagtcagctcgttagacctct

SEQ ID NO: 179878 - DNA, 25 bp, Canis familiaris
tcctgagtcagctcgttagacctct

SEQ ID NO: 179879 - DNA, 25 bp, Canis familiaris
tcctgagtcagctcgttagacctct

SEQ ID NO: 179880 - DNA, 25 bp, Canis familiaris
tcctgagtcagctcgttagacctct

SEQ ID NO: 179881 - DNA, 25 bp, Canis familiaris
tccatgactaactgtgtaagtgctt

SEQ ID NO: 179882 - DNA, 25 bp, Canis familiaris
tccaggtgcttctttaacaggctct

SEQ ID NO: 179883 - DNA, 25 bp, Canis familiaris
tccatggtccactctgaagggcact

SEQ ID NO: 179884 - DNA, 25 bp, Canis familiaris
tccaggagcaaattctgccagagga

SEQ ID NO: 179885 - DNA, 25 bp, Canis familiaris
tccagcttggaggtcagccagggca

SEQ ID NO: 179886 - DNA, 25 bp, Canis familiaris
tccagcgatctgagctcagccagga

SEQ ID NO: 179887 - DNA, 25 bp, Canis familiaris
tccagtcatcttagcatggcccaca

SEQ ID NO: 179888 - DNA, 25 bp, Canis familiaris
tccagctctttaatgcgctctgacc

SEQ ID NO: 179889 - DNA, 25 bp, Canis familiaris
tccatgctcctatatgcgtatactt

SEQ ID NO: 179890 - DNA, 25 bp, Canis familiaris
tccagcctctacagcttcaaggaat

SEQ ID NO: 179891 - DNA, 25 bp, Canis familiaris
tccagcctggacagctccagagcta

SEQ ID NO: 179892 - DNA, 25 bp, Canis familiaris
tccactctggagaatgatctgcgac

SEQ ID NO: 179893 - DNA, 25 bp, Canis familiaris
tccagctcggagtaatttgctcaat

SEQ ID NO: 179894 - DNA, 25 bp, Canis familiaris
tccagccccagtcaagctgtcagat

SEQ ID NO: 179895 - DNA, 25 bp, Canis familiaris
tccatgccctccatgggctacatga

SEQ ID NO: 179896 - DNA, 25 bp, Canis familiaris
tccagcccatccattggcaaagcca

SEQ ID NO: 179897 - DNA, 25 bp, Canis familiaris
tccagtccaaagggaaaagcctata

SEQ ID NO: 179898 - DNA, 25 bp, Canis familiaris
tccaggcgagaacggtaacactttt

SEQ ID NO: 179899 - DNA, 25 bp, Canis familiaris
tcgaggcagaggccggaaacttact

SEQ ID NO: 179900 - DNA, 25 bp, Canis familiaris
tccaggaaggccccagacacctgga

SEQ ID NO: 179901 - DNA, 25 bp, Canis familiaris
tccagaatcaggccccgactgaagg

SEQ ID NO: 179902 - DNA, 25 bp, Canis familiaris
tccaggacgtgcttgcctttgaagg

SEQ ID NO: 179903 - DNA, 25 bp, Canis familiaris
tccggactgcacaccttggaatgtt

SEQ ID NO: 179904 - DNA, 25 bp, Canis familiaris
tccaggacccatccctgatggagat

SEQ ID NO: 179905 - DNA, 25 bp, Canis familiaris
tccaggaccttggtcagcctgagct

SEQ ID NO: 179906 - DNA, 25 bp, Canis familiaris
tccagtgacttagccagttgagccc

SEQ ID NO: 179907 - DNA, 25 bp, Canis familiaris
tccagataccattaaagagtgaccc

SEQ ID NO: 179908 - DNA, 25 bp, Canis familiaris
tccatgtactcaagaaagggcccct

SEQ ID NO: 179909 - DNA, 25 bp, Canis familiaris
tccattagctcatcaagggtttctt

SEQ ID NO: 179910 - DNA, 25 bp, Canis familiaris
tccttgactctataactttctctct

SEQ ID NO: 179911 - DNA, 25 bp, Canis familiaris
tcctagacctagcactgtaacttta

SEQ ID NO: 179912 - DNA, 25 bp, Canis familiaris
tcctagatgcctaaggcttcccgtc

SEQ ID NO: 179913 - DNA, 25 bp, Canis familiaris
tccatacacacctggctttccttct

SEQ ID NO: 179914 - DNA, 25 bp, Canis familiaris
tcctcaagagccttggttttcccac

SEQ ID NO: 179915 - DNA, 25 bp, Canis familiaris
tcctaaactcttctggtttctgcat

SEQ ID NO: 179916 - DNA, 25 bp, Canis familiaris
tcgtttcacttgacacggttcactc

SEQ ID NO: 179917 - DNA, 25 bp, Canis familiaris
tccttcccttactgagattgacatc

SEQ ID NO: 179918 - DNA, 25 bp, Canis familiaris
tccagctccctatacgcgtatatta

SEQ ID NO: 179919 - DNA, 25 bp, Canis familiaris
tccccacttttatcttagttaggat

SEQ ID NO: 179920 - DNA, 25 bp, Canis familiaris
tccaccctttacttcctagtatatt

SEQ ID NO: 179921 - DNA, 25 bp, Canis familiaris
tccatcccttttacacttttcagat

SEQ ID NO: 179922 - DNA, 25 bp, Canis familiaris
tcgtcccttaagacatcgttcttca

SEQ ID NO: 179923 - DNA, 25 bp, Canis familiaris
tcccccagtaaagtgcggcttgtca

SEQ ID NO: 179924 - DNA, 25 bp, Canis familiaris
tcctaccacatcacagtctacttga

SEQ ID NO: 179925 - DNA, 25 bp, Canis familiaris
tcgcttcgctacacacttaactgta

SEQ ID NO: 179926 - DNA, 25 bp, Canis familiaris
tccttcaccatcctatcttagggct

SEQ ID NO: 179927 - DNA, 25 bp, Canis familiaris
tccaccacctcgtggtaggtcttga

SEQ ID NO: 179928 - DNA, 25 bp, Canis familiaris
tccaccacgtcagcgatgaagttgt

SEQ ID NO: 179929 - DNA, 25 bp, Canis familiaris
tccaccataggagctgacttttttt

SEQ ID NO: 179930 - DNA, 25 bp, Canis familiaris
tccacgcttggcgtctttaattttt

SEQ ID NO: 179931 - DNA, 25 bp, Canis familiaris
tccagctttggcctgctttgaagaa

SEQ ID NO: 179932 - DNA, 25 bp, Canis familiaris
tccatatattggccctgctaaaata

SEQ ID NO: 179933 - DNA, 25 bp, Canis familiaris
tccatgtcttgactgttgcaaataa

SEQ ID NO: 179934 - DNA, 25 bp, Canis familiaris
tccagctcctgcctgtagatttatg

SEQ ID NO: 179935 - DNA, 25 bp, Canis familiaris
tccagcacctgcattgtcattagag

SEQ ID NO: 179936 - DNA, 25 bp, Canis familiaris
tccagccacgtgtcatcagcattaa

SEQ ID NO: 179937 - DNA, 25 bp, Canis familiaris
tccagccagctgtcatcatcaatgg

SEQ ID NO: 179938 - DNA, 25 bp, Canis familiaris
tccaccagctgatggcagatcagac

SEQ ID NO: 179939 - DNA, 25 bp, Canis familiaris
tccagccaacaccagagatcatgcc

SEQ ID NO: 179940 - DNA, 25 bp, Canis familiaris
tccagcaaacagcaggccatggcgc

SEQ ID NO: 179941 - DNA, 25 bp, Canis familiaris
tccagcaaacagcaggccatggcgc

SEQ ID NO: 179942 - DNA, 25 bp, Canis familiaris
tccagcaaacagcaggccatggcgc

SEQ ID NO: 179943 - DNA, 25 bp, Canis familiaris
tccagcaaacagcaggccatggcgc

SEQ ID NO: 179944 - DNA, 25 bp, Canis familiaris
tccagcaaacagcaggccatggcgc

SEQ ID NO: 179945 - DNA, 25 bp, Canis familiaris
tccagcaaacagcaggccatggcgc

SEQ ID NO: 179946 - DNA, 25 bp, Canis familiaris
tccagcaaacagcaggccatggcgc

SEQ ID NO: 179947 - DNA, 25 bp, Canis familiaris
tccagagaacaaagagccagaggct

SEQ ID NO: 179948 - DNA, 25 bp, Canis familiaris
tccagtccaagaaagacgggccctg

SEQ ID NO: 179949 - DNA, 25 bp, Canis familiaris
tccttccagccaaggactgggacct

SEQ ID NO: 179950 - DNA, 25 bp, Canis familiaris
tccttcccttattgtcttgaaccat

SEQ ID NO: 179951 - DNA, 25 bp, Canis familiaris
tccttcgctcagtttgttgggagcg

SEQ ID NO: 179952 - DNA, 25 bp, Canis familiaris
tccttcgccatcaggggggatcatg

SEQ ID NO: 179953 - DNA, 25 bp, Canis familiaris
tccttcgcctcgagggtggtgtaga

SEQ ID NO: 179954 - DNA, 25 bp, Canis familiaris
tccttcccctgtgaggtctttagac

SEQ ID NO: 179955 - DNA, 25 bp, Canis familiaris
tcctactcccatcaattttgttcga

SEQ ID NO: 179956 - DNA, 25 bp, Canis familiaris
tcctaccaatcacacaacctgtaca

SEQ ID NO: 179957 - DNA, 25 bp, Canis familiaris
tccttcactgtacacttccttaaaa

SEQ ID NO: 179958 - DNA, 25 bp, Canis familiaris
tcctatgcattaatcccttcgttaa

SEQ ID NO: 179959 - DNA, 25 bp, Canis familiaris
tccttacgactcactccttaaagaa

SEQ ID NO: 179960 - DNA, 25 bp, Canis familiaris
tccttcatacccacccttaggtgaa

SEQ ID NO: 179961 - DNA, 25 bp, Canis familiaris
tccttaacccactgactctgaggca

SEQ ID NO: 179962 - DNA, 25 bp, Canis familiaris
tcctagtaaccaggttcctgggcaa

SEQ ID NO: 179963 - DNA, 25 bp, Canis familiaris
tcctttttcgaggatcccttggagg

SEQ ID NO: 179964 - DNA, 25 bp, Canis familiaris
tccttatttgaatccccttacagag

SEQ ID NO: 179965 - DNA, 25 bp, Canis familiaris
tccctaggtgaaacacaaccccgag

SEQ ID NO: 179966 - DNA, 25 bp, Canis familiaris
tccttacttacatataacccccagt

SEQ ID NO: 179967 - DNA, 25 bp, Canis familiaris
tccttggctgttttaacccaagcca

SEQ ID NO: 179968 - DNA, 25 bp, Canis familiaris
tcctcttggctttctcaacccaagg

SEQ ID NO: 179969 - DNA, 25 bp, Canis familiaris
tcctctggatccttctaatgcccag

SEQ ID NO: 179970 - DNA, 25 bp, Canis familiaris
tccttagagacatttactcctcccc

SEQ ID NO: 179971 - DNA, 25 bp, Canis familiaris
tccttcaggtcaaagacgtcttccc

SEQ ID NO: 179972 - DNA, 25 bp, Canis familiaris
tccatctcccaaaagaagtcgttcc

SEQ ID NO: 179973 - DNA, 25 bp, Canis familiaris
tcctcacccagtccagaagggctta

SEQ ID NO: 179974 - DNA, 25 bp, Canis familiaris
tcctcacagccgtgagccagttctt

SEQ ID NO: 179975 - DNA, 25 bp, Canis familiaris
tcctcacagccgtgagccagttctt

SEQ ID NO: 179976 - DNA, 25 bp, Canis familiaris
tcgtgacagggctgaaccttatttc

SEQ ID NO: 179977 - DNA, 25 bp, Canis familiaris
tcctaataggaattgaccttaccat

SEQ ID NO: 179978 - DNA, 25 bp, Canis familiaris
tcctgaaataaatgtccgaaagcaa

SEQ ID NO: 179979 - DNA, 25 bp, Canis familiaris
tccaggagtaacttctgcccaacac

SEQ ID NO: 179980 - DNA, 25 bp, Canis familiaris
tccataaatacaccatcggccacgc

SEQ ID NO: 179981 - DNA, 25 bp, Canis familiaris
tcctttaaaggctgtccaagcattt

SEQ ID NO: 179982 - DNA, 25 bp, Canis familiaris
tcctttatataatggggctagaatt

SEQ ID NO: 179983 - DNA, 25 bp, Canis familiaris
tcctttatattatggaccgaaatta

SEQ ID NO: 179984 - DNA, 25 bp, Canis familiaris
tcctctccttctctaaccagaaaaa

SEQ ID NO: 179985 - DNA, 25 bp, Canis familiaris
tccttgacttcatatccccagaaag

SEQ ID NO: 179986 - DNA, 25 bp, Canis familiaris
tccttactatccttcgccagaaggg

SEQ ID NO: 179987 - DNA, 25 bp, Canis familiaris
tccttttcttgctcaccagaaggga

SEQ ID NO: 179988 - DNA, 25 bp, Canis familiaris
tccatttatttctcccataaagaga

SEQ ID NO: 179989 - DNA, 25 bp, Canis familiaris
tcctttcttatcttgaccatactaa

SEQ ID NO: 179990 - DNA, 25 bp, Canis familiaris
tccagttctaattaatcccacttcc

SEQ ID NO: 179991 - DNA, 25 bp, Canis familiaris
tccagttcttccaaaatccacttat

SEQ ID NO: 179992 - DNA, 25 bp, Canis familiaris
tccattccttccaacaacaatttaa

SEQ ID NO: 179993 - DNA, 25 bp, Canis familiaris
tccttctttcaatcatactcagttt

SEQ ID NO: 179994 - DNA, 25 bp, Canis familiaris
tccttcaaaatatagcacagcagtc

SEQ ID NO: 179995 - DNA, 25 bp, Canis familiaris
tcctaacaagactatggctgacaac

SEQ ID NO: 179996 - DNA, 25 bp, Canis familiaris
tcctgttataactgggcaaacccgt

SEQ ID NO: 179997 - DNA, 25 bp, Canis familiaris
tcctagtgtaactgcccaaactgcc

SEQ ID NO: 179998 - DNA, 25 bp, Canis familiaris
tcctattgaaacttgcccagatgtt

SEQ ID NO: 179999 - DNA, 25 bp, Canis familiaris
tccagataactgaaatgctccaatt

SEQ ID NO: 180000 - DNA, 25 bp, Canis familiaris
tccagaaggtggaactccaacttcc

SEQ ID NO: 180001 - DNA, 25 bp, Canis familiaris
tccaggttggacaccagcagtttcc

SEQ ID NO: 180002 - DNA, 25 bp, Canis familiaris
tccttttgggggtacagtttgctct

SEQ ID NO: 180003 - DNA, 25 bp, Canis familiaris
tctcttaaggggcttcaggtcagtc

SEQ ID NO: 180004 - DNA, 25 bp, Canis familiaris
tcacctaagggcctttacagccagt

SEQ ID NO: 180005 - DNA, 25 bp, Canis familiaris
tcccacaaggtgggcttcaccggaa

SEQ ID NO: 180006 - DNA, 25 bp, Canis familiaris
tctccccaagtagggtcctcggtga

SEQ ID NO: 180007 - DNA, 25 bp, Canis familiaris
tcccctaaatccagtatccgttgat

SEQ ID NO: 180008 - DNA, 25 bp, Canis familiaris
tcctccttaaccagtatccgaaaca

SEQ ID NO: 180009 - DNA, 25 bp, Canis familiaris
tcctccttaatgctcattacccagt

SEQ ID NO: 180010 - DNA, 25 bp, Canis familiaris
tcctcgtaagagctaaacatccaga

SEQ ID NO: 180011 - DNA, 25 bp, Canis familiaris
tccatggtacagttggaaacagcca

SEQ ID NO: 180012 - DNA, 25 bp, Canis familiaris
tccaggtgcacatcgcgacaatcga

SEQ ID NO: 180013 - DNA, 25 bp, Canis familiaris
tccagcctgcaaagatctatcctca

SEQ ID NO: 180014 - DNA, 25 bp, Canis familiaris
tccaggctgcaagactctggcatat

SEQ ID NO: 180015 - DNA, 25 bp, Canis familiaris
tccagctggccagatctcaagcaga

SEQ ID NO: 180016 - DNA, 25 bp, Canis familiaris
tccagctggccattgagatcaccac

SEQ ID NO: 180017 - DNA, 25 bp, Canis familiaris
tccagggcgctgtcatatcgcccca

SEQ ID NO: 180018 - DNA, 25 bp, Canis familiaris
ttaggacctgtaatccctccaaagg

SEQ ID NO: 180019 - DNA, 25 bp, Canis familiaris
ttcggaacgtatctctcccgaagct

SEQ ID NO: 180020 - DNA, 25 bp, Canis familiaris
tccggaacgtttggattctggggct

SEQ ID NO: 180021 - DNA, 25 bp, Canis familiaris
tccggtttggtgcctacttggtggc

SEQ ID NO: 180022 - DNA, 25 bp, Canis familiaris
tccagggtttgtcgtcacgtacatg

SEQ ID NO: 180023 - DNA, 25 bp, Canis familiaris
tcctgtttttgtctccgtagtattt

SEQ ID NO: 180024 - DNA, 25 bp, Canis familiaris
tccttttttgccttccgagggcagt

SEQ ID NO: 180025 - DNA, 25 bp, Canis familiaris
tccttttttgctaagcccaggaaag

SEQ ID NO: 180026 - DNA, 25 bp, Canis familiaris
tcctgtgattattttacccagtgat

SEQ ID NO: 180027 - DNA, 25 bp, Canis familiaris
tccaggacagattcttcacccggga

SEQ ID NO: 180028 - DNA, 25 bp, Canis familiaris
tcctagccacattatgtacccggga

SEQ ID NO: 180029 - DNA, 25 bp, Canis familiaris
tcctgagcttctgaggagccccagg

SEQ ID NO: 180030 - DNA, 25 bp, Canis familiaris
tcctgaccctgaagtaccccattga

SEQ ID NO: 180031 - DNA, 25 bp, Canis familiaris
tcgtgaacactgagacagacggttg

SEQ ID NO: 180032 - DNA, 25 bp, Canis familiaris
tccttatcactgacacaaaaagtag

SEQ ID NO: 180033 - DNA, 25 bp, Canis familiaris
tcactttgcaggaaaccaagcttca

SEQ ID NO: 180034 - DNA, 25 bp, Canis familiaris
tccatttgatggggccgcacaggtc

SEQ ID NO: 180035 - DNA, 25 bp, Canis familiaris
tccatcttcaagggcttccaggagc

SEQ ID NO: 180036 - DNA, 25 bp, Canis familiaris
tccatcttgtgggagtccccgagtc

SEQ ID NO: 180037 - DNA, 25 bp, Canis familiaris
tcctattggggacgactgctagagt

SEQ ID NO: 180038 - DNA, 25 bp, Canis familiaris
tccttcggtaagccacatccaataa

SEQ ID NO: 180039 - DNA, 25 bp, Canis familiaris
tccttccgggagaccatgacttaat

SEQ ID NO: 180040 - DNA, 25 bp, Canis familiaris
tccttcctggggaactgccccaagg

SEQ ID NO: 180041 - DNA, 25 bp, Canis familiaris
tcctttcatggggggttcctaatgg

SEQ ID NO: 180042 - DNA, 25 bp, Canis familiaris
tccattctattgaggtgtacctgga

SEQ ID NO: 180043 - DNA, 25 bp, Canis familiaris
tccattctgaagggtttaccaagga

SEQ ID NO: 180044 - DNA, 25 bp, Canis familiaris
tccttgagaacacttttaccagaaa

SEQ ID NO: 180045 - DNA, 25 bp, Canis familiaris
tcctagaaacatcttgctcaccgca

SEQ ID NO: 180046 - DNA, 25 bp, Canis familiaris
tcctacaatcctgatgtcatcctgc

SEQ ID NO: 180047 - DNA, 25 bp, Canis familiaris
tccatttatcctactttatctgcca

SEQ ID NO: 180048 - DNA, 25 bp, Canis familiaris
tccaggaattctagctatttcatgc

SEQ ID NO: 180049 - DNA, 25 bp, Canis familiaris
tccaggttgtctaccgtcatagcac

SEQ ID NO: 180050 - DNA, 25 bp, Canis familiaris
tcctttgatttgacggctcttcacg

SEQ ID NO: 180051 - DNA, 25 bp, Canis familiaris
tccagttattctccagtgatcctac

SEQ ID NO: 180052 - DNA, 25 bp, Canis familiaris
tccatgttttctggactgacctcca

SEQ ID NO: 180053 - DNA, 25 bp, Canis familiaris
tccagtccttctggttgtcgctgga

SEQ ID NO: 180054 - DNA, 25 bp, Canis familiaris
tccaggttggctactcttcctgaga

SEQ ID NO: 180055 - DNA, 25 bp, Canis familiaris
tccagctgtcttcagatcttttaca

SEQ ID NO: 180056 - DNA, 25 bp, Canis familiaris
tccagtgacctgctgttttttccta

SEQ ID NO: 180057 - DNA, 25 bp, Canis familiaris
tccaggaagctccaggtttcaatct

SEQ ID NO: 180058 - DNA, 25 bp, Canis familiaris
tccagggcagccctggtggtctctg

SEQ ID NO: 180059 - DNA, 25 bp, Canis familiaris
tcctaggatgccctgggttcttggt

SEQ ID NO: 180060 - DNA, 25 bp, Canis familiaris
tccattgtctccctgtgggtttgga

SEQ ID NO: 180061 - DNA, 25 bp, Canis familiaris
tccattgtaccatttctttctttga

SEQ ID NO: 180062 - DNA, 25 bp, Canis familiaris
tcctgtttccttgttactttattca

SEQ ID NO: 180063 - DNA, 25 bp, Canis familiaris
tcctttgatcctttttgggtcctgt

SEQ ID NO: 180064 - DNA, 25 bp, Canis familiaris
tcctgtggtccttgtttgggtactg

SEQ ID NO: 180065 - DNA, 25 bp, Canis familiaris
tcctaggtagccttctgtcggtagg

SEQ ID NO: 180066 - DNA, 25 bp, Canis familiaris
tcctatcgaaccgctttgagccagg

SEQ ID NO: 180067 - DNA, 25 bp, Canis familiaris
tcctctgagcaaacctttgggccag

SEQ ID NO: 180068 - DNA, 25 bp, Canis familiaris
tcctctgtcaaatcattgggcccat

SEQ ID NO: 180069 - DNA, 25 bp, Canis familiaris
tccttggcagattactggttccact

SEQ ID NO: 180070 - DNA, 25 bp, Canis familiaris
tcctatagggaaagctgttcgcctg

SEQ ID NO: 180071 - DNA, 25 bp, Canis familiaris
tcctaatcgggaagctttgactcaa

SEQ ID NO: 180072 - DNA, 25 bp, Canis familiaris
tcctatggtgggtgctttgtcccca

SEQ ID NO: 180073 - DNA, 25 bp, Canis familiaris
tccagagtgggttccttggtgtccc

SEQ ID NO: 180074 - DNA, 25 bp, Canis familiaris
tccagagggtgctggtgtcgctgtc

SEQ ID NO: 180075 - DNA, 25 bp, Canis familiaris
tccagcatggggaggtgggccaccc

SEQ ID NO: 180076 - DNA, 25 bp, Canis familiaris
tccagattggatacgtgtttcaacc

SEQ ID NO: 180077 - DNA, 25 bp, Canis familiaris
tccagatcaggtaggcgtgcttcat

SEQ ID NO: 180078 - DNA, 25 bp, Canis familiaris
tccatgacacctcgagactgtccag

SEQ ID NO: 180079 - DNA, 25 bp, Canis familiaris
tccatcagcatcgatgctggccctc

SEQ ID NO: 180080 - DNA, 25 bp, Canis familiaris
tccatgtgcatttgtggctgctgct

SEQ ID NO: 180081 - DNA, 25 bp, Canis familiaris
tccatgatcagtgcagagtctgcta

SEQ ID NO: 180082 - DNA, 25 bp, Canis familiaris
tccatcgagctgtagaggctccagc

SEQ ID NO: 180083 - DNA, 25 bp, Canis familiaris
tccatatgcctgtccagttccagga

SEQ ID NO: 180084 - DNA, 25 bp, Canis familiaris
tccattgccatatcggctcgcaaat

SEQ ID NO: 180085 - DNA, 25 bp, Canis familiaris
tccatgaccacttcggcatcgtgga

SEQ ID NO: 180086 - DNA, 25 bp, Canis familiaris
tccatgacaactttggcattgtgga

SEQ ID NO: 180087 - DNA, 25 bp, Canis familiaris
tccagacacctcagcgcttgtggtg

SEQ ID NO: 180088 - DNA, 25 bp, Canis familiaris
tccagacagctggatcccttgaggc

SEQ ID NO: 180089 - DNA, 25 bp, Canis familiaris
tccagtcctgagagccttgagagaa

SEQ ID NO: 180090 - DNA, 25 bp, Canis familiaris
tcactaaggttgttggtgaagctct

SEQ ID NO: 180091 - DNA, 25 bp, Canis familiaris
tcctaagccactctggtcccttagg

SEQ ID NO: 180092 - DNA, 25 bp, Canis familiaris
tcctcaaacaggcctggtttattga

SEQ ID NO: 180093 - DNA, 25 bp, Canis familiaris
tcctcagacaggatcttccgtactg

SEQ ID NO: 180094 - DNA, 25 bp, Canis familiaris
tccttgactggaccttagtttccgg

SEQ ID NO: 180095 - DNA, 25 bp, Canis familiaris
tccggagcgtgatattactgcttcc

SEQ ID NO: 180096 - DNA, 25 bp, Canis familiaris
tccggaggtatctactgaccttccc

SEQ ID NO: 180097 - DNA, 25 bp, Canis familiaris
tccaggctgagttctatctgacccc

SEQ ID NO: 180098 - DNA, 25 bp, Canis familiaris
tccagatgctcccaatatcataccc

SEQ ID NO: 180099 - DNA, 25 bp, Canis familiaris
tccagttcccaagcatagcgcgaga

SEQ ID NO: 180100 - DNA, 25 bp, Canis familiaris
tccatttcaaaagtcaaggcaagcc

SEQ ID NO: 180101 - DNA, 25 bp, Canis familiaris
tccattccacagttgtaaatgctag

SEQ ID NO: 180102 - DNA, 25 bp, Canis familiaris
tccagttccatccatgtcgaatcaa

SEQ ID NO: 180103 - DNA, 25 bp, Canis familiaris
tcgtggtcgtcgcgctgagaaagtt

SEQ ID NO: 180104 - DNA, 25 bp, Canis familiaris
tcctcttggctccaggaagaaggat

SEQ ID NO: 180105 - DNA, 25 bp, Canis familiaris
tccatcttgttccggttgatagtgc

SEQ ID NO: 180106 - DNA, 25 bp, Canis familiaris
tccatttttccgggctgtacatatt

SEQ ID NO: 180107 - DNA, 25 bp, Canis familiaris
tcctttcttcccccttgaagtatat

SEQ ID NO: 180108 - DNA, 25 bp, Canis familiaris
tcctttctggaccacaccttaggaa

SEQ ID NO: 180109 - DNA, 25 bp, Canis familiaris
tccttccggcaccacgtgtataaga

SEQ ID NO: 180110 - DNA, 25 bp, Canis familiaris
tccttatgctacgccttgttattga

SEQ ID NO: 180111 - DNA, 25 bp, Canis familiaris
tccattaggccagcaatgcttgtag

SEQ ID NO: 180112 - DNA, 25 bp, Canis familiaris
tcctgctagatggaacatagattct

SEQ ID NO: 180113 - DNA, 25 bp, Canis familiaris
tccttgagtcatgagcttattgctg

SEQ ID NO: 180114 - DNA, 25 bp, Canis familiaris
tccatggagtctgagtctagctctc

SEQ ID NO: 180115 - DNA, 25 bp, Canis familiaris
tccattagcatttcagtgcccttca

SEQ ID NO: 180116 - DNA, 25 bp, Canis familiaris
tcctaatgcatcaacatgggccctc

SEQ ID NO: 180117 - DNA, 25 bp, Canis familiaris
tccagcactgagacacacaggcctc

SEQ ID NO: 180118 - DNA, 25 bp, Canis familiaris
tccaggctcaatcataggccatcta

SEQ ID NO: 180119 - DNA, 25 bp, Canis familiaris
tccatggaaatgccacgtctgctct

SEQ ID NO: 180120 - DNA, 25 bp, Canis familiaris
tccttgcaagaagagattgcctttt

SEQ ID NO: 180121 - DNA, 25 bp, Canis familiaris
tccttcattttgtcaggtgccattt

SEQ ID NO: 180122 - DNA, 25 bp, Canis familiaris
tcctttttctggcattgcctttttt

SEQ ID NO: 180123 - DNA, 25 bp, Canis familiaris
tcctcttttctacactacagttgct

SEQ ID NO: 180124 - DNA, 25 bp, Canis familiaris
tcacgtttcttaaaggcattttggt

SEQ ID NO: 180125 - DNA, 25 bp, Canis familiaris
tccagacccttcagtacttgttgtt

SEQ ID NO: 180126 - DNA, 25 bp, Canis familiaris
tcctagccctccgggagtattttat

SEQ ID NO: 180127 - DNA, 25 bp, Canis familiaris
tcctagactacctgcaagtatttct

SEQ ID NO: 180128 - DNA, 25 bp, Canis familiaris
tccttgaccccaggaagctttctgg

SEQ ID NO: 180129 - DNA, 25 bp, Canis familiaris
tccgtgaggtccggagaaccccagg

SEQ ID NO: 180130 - DNA, 25 bp, Canis familiaris
tccaggaggtcctgccaaatccact

SEQ ID NO: 180131 - DNA, 25 bp, Canis familiaris
tccaggagtgctgcttctaaaccca

SEQ ID NO: 180132 - DNA, 25 bp, Canis familiaris
tccagaagaatgggtttttcccagg

SEQ ID NO: 180133 - DNA, 25 bp, Canis familiaris
tccagaagcaggggtttcattacct

SEQ ID NO: 180134 - DNA, 25 bp, Canis familiaris
tccagaacaggggtttcatcacctt

SEQ ID NO: 180135 - DNA, 25 bp, Canis familiaris
tccgagaaagtctctgtccatctcc

SEQ ID NO: 180136 - DNA, 25 bp, Canis familiaris
tccagaagtcctttctgtatcctcc

SEQ ID NO: 180137 - DNA, 25 bp, Canis familiaris
tccagaacccctgtgctatactgac

SEQ ID NO: 180138 - DNA, 25 bp, Canis familiaris
tccagaaccaccgctacaagatgaa

SEQ ID NO: 180139 - DNA, 25 bp, Canis familiaris
tcctgaactaacccaaagagctgag

SEQ ID NO: 180140 - DNA, 25 bp, Canis familiaris
tcctggtctaccccaaaggaataag

SEQ ID NO: 180141 - DNA, 25 bp, Canis familiaris
tcctcatttacctccaagggaactg

SEQ ID NO: 180142 - DNA, 25 bp, Canis familiaris
tccttcttccctggccatagggatg

SEQ ID NO: 180143 - DNA, 25 bp, Canis familiaris
tccttgtgtcccggcttgatggaca

SEQ ID NO: 180144 - DNA, 25 bp, Canis familiaris
tccttttctggcctgtggatggaaa

SEQ ID NO: 180145 - DNA, 25 bp, Canis familiaris
tccttggtgggccatggaatcagaa

SEQ ID NO: 180146 - DNA, 25 bp, Canis familiaris
tcctcaaggaccctgtgtcacagaa

SEQ ID NO: 180147 - DNA, 25 bp, Canis familiaris
tcctcacagctgagcgttcttcagc

SEQ ID NO: 180148 - DNA, 25 bp, Canis familiaris
tcctaacgtccatattgttgccaat

SEQ ID NO: 180149 - DNA, 25 bp, Canis familiaris
tcctgaacgtccttttcctatgact

SEQ ID NO: 180150 - DNA, 25 bp, Canis familiaris
tccatctactgtggcttttcagtta

SEQ ID NO: 180151 - DNA, 25 bp, Canis familiaris
tccatcagattgtgttcctcagttc

SEQ ID NO: 180152 - DNA, 25 bp, Canis familiaris
tcctgagatgtctcttcctctttaa

SEQ ID NO: 180153 - DNA, 25 bp, Canis familiaris
tcctcatgcattaggcttgcctgct

SEQ ID NO: 180154 - DNA, 25 bp, Canis familiaris
tccatgatgctggggctcttcatct

SEQ ID NO: 180155 - DNA, 25 bp, Canis familiaris
tccaggctgagggctcatgtctgct

SEQ ID NO: 180156 - DNA, 25 bp, Canis familiaris
tccattgtgaggtcaagtctgtgtg

SEQ ID NO: 180157 - DNA, 25 bp, Canis familiaris
tccatcgtgtgatcaaggacttcat

SEQ ID NO: 180158 - DNA, 25 bp, Canis familiaris
tcctcagtgtgatttgggagccagt

SEQ ID NO: 180159 - DNA, 25 bp, Canis familiaris
tcctcattgacactggagaaccagc

SEQ ID NO: 180160 - DNA, 25 bp, Canis familiaris
tcctttgccttgggaaccagttaag

SEQ ID NO: 180161 - DNA, 25 bp, Canis familiaris
tcctccagccctgaaaaggtcaaag

SEQ ID NO: 180162 - DNA, 25 bp, Canis familiaris
tccatcctgcccagagggggtgaca

SEQ ID NO: 180163 - DNA, 25 bp, Canis familiaris
tccatcctggccaagcagagggagc

SEQ ID NO: 180164 - DNA, 25 bp, Canis familiaris
tcctcacctgccattcagggactag

SEQ ID NO: 180165 - DNA, 25 bp, Canis familiaris
tccatctgttccattctgaagtctc

SEQ ID NO: 180166 - DNA, 25 bp, Canis familiaris
tccatcttctggaacctacgatctg

SEQ ID NO: 180167 - DNA, 25 bp, Canis familiaris
tccatcccatggcaaccacagaatt

SEQ ID NO: 180168 - DNA, 25 bp, Canis familiaris
tcctatacacaggaaccctaatttt

SEQ ID NO: 180169 - DNA, 25 bp, Canis familiaris
tcctctagggagtcacgttcaattt

SEQ ID NO: 180170 - DNA, 25 bp, Canis familiaris
tcctcttggacttgacgttggttcg

SEQ ID NO: 180171 - DNA, 25 bp, Canis familiaris
tcctctttccggtgttgattgttca

SEQ ID NO: 180172 - DNA, 25 bp, Canis familiaris
tccgtcttccgaggtttgttcaact

SEQ ID NO: 180173 - DNA, 25 bp, Canis familiaris
tccaggttccaagttcattgtgtaa

SEQ ID NO: 180174 - DNA, 25 bp, Canis familiaris
tccggattcccggaatgtgcgtaca

SEQ ID NO: 180175 - DNA, 25 bp, Canis familiaris
tcctcggctcggcgaatggagtgac

SEQ ID NO: 180176 - DNA, 25 bp, Canis familiaris
tccattcctcggcagccttagtgaa

SEQ ID NO: 180177 - DNA, 25 bp, Canis familiaris
tccattcccgtaggctattgagaaa

SEQ ID NO: 180178 - DNA, 25 bp, Canis familiaris
tccattccacctggttttataaata

SEQ ID NO: 180179 - DNA, 25 bp, Canis familiaris
tccatatccaccttggaattttaaa

SEQ ID NO: 180180 - DNA, 25 bp, Canis familiaris
tccttgttactgtgatatttaaaat

SEQ ID NO: 180181 - DNA, 25 bp, Canis familiaris
tcctggttttaaaattccagaccat

SEQ ID NO: 180182 - DNA, 25 bp, Canis familiaris
tctcaagttttcgtttttaggccat

SEQ ID NO: 180183 - DNA, 25 bp, Canis familiaris
tctgtagtttttgtttctgcacgga

SEQ ID NO: 180184 - DNA, 25 bp, Canis familiaris
tcctagttcttttctttgagctcag

SEQ ID NO: 180185 - DNA, 25 bp, Canis familiaris
tcctcagttctgtgggttatctcat

SEQ ID NO: 180186 - DNA, 25 bp, Canis familiaris
tcgtcctggctataagttcactttg

SEQ ID NO: 180187 - DNA, 25 bp, Canis familiaris
tcctgcccctaaaagtctcttttgt

SEQ ID NO: 180188 - DNA, 25 bp, Canis familiaris
tccagtccacgactaagtcctctgt

SEQ ID NO: 180189 - DNA, 25 bp, Canis familiaris
tccagtctcctcctaaattctgtgc

SEQ ID NO: 180190 - DNA, 25 bp, Canis familiaris
tcctgactccatgtgacgttctggc

SEQ ID NO: 180191 - DNA, 25 bp, Canis familiaris
tcctgaatcactatactgtacatct

SEQ ID NO: 180192 - DNA, 25 bp, Canis familiaris
tcctcgatactattcgcttagccca

SEQ ID NO: 180193 - DNA, 25 bp, Canis familiaris
tcctcagattcttcttgtcaggccc

SEQ ID NO: 180194 - DNA, 25 bp, Canis familiaris
tcctaatatttcacgatggcctacc

SEQ ID NO: 180195 - DNA, 25 bp, Canis familiaris
tcctagagtcccaggatggagtccc

SEQ ID NO: 180196 - DNA, 25 bp, Canis familiaris
tccttctcctacaaggcagggttcc

SEQ ID NO: 180197 - DNA, 25 bp, Canis familiaris
tccttccgctacaacggtctgattc

SEQ ID NO: 180198 - DNA, 25 bp, Canis familiaris
tccattccagcttattcggcgtgac

SEQ ID NO: 180199 - DNA, 25 bp, Canis familiaris
tccatccatccttagtcgtgtagaa

SEQ ID NO: 180200 - DNA, 25 bp, Canis familiaris
tccgtaccaatgtctgcagttacaa

SEQ ID NO: 180201 - DNA, 25 bp, Canis familiaris
tccttccacaatttagtgtctagca

SEQ ID NO: 180202 - DNA, 25 bp, Canis familiaris
tccatctccagcacctaaatcaaga

SEQ ID NO: 180203 - DNA, 25 bp, Canis familiaris
tccatctctggaacctacgatctga

SEQ ID NO: 180204 - DNA, 25 bp, Canis familiaris
tcctagctgcgagcctagcgtatga

SEQ ID NO: 180205 - DNA, 25 bp, Canis familiaris
tcctcctccagagtctaagctacac

SEQ ID NO: 180206 - DNA, 25 bp, Canis familiaris
tccatcctgccaaacacaatgtcaa

SEQ ID NO: 180207 - DNA, 25 bp, Canis familiaris
tcctcttcgatggactgcaagccat

SEQ ID NO: 180208 - DNA, 25 bp, Canis familiaris
tcctcgtgactggagcagctggtca

SEQ ID NO: 180209 - DNA, 25 bp, Canis familiaris
tcctagttcatgtacatccgaatgc

SEQ ID NO: 180210 - DNA, 25 bp, Canis familiaris
tcctgaattttagtccagttctgga

SEQ ID NO: 180211 - DNA, 25 bp, Canis familiaris
tccgagattttactcaacttgagaa

SEQ ID NO: 180212 - DNA, 25 bp, Canis familiaris
tccagtattttatttcacatttaga

SEQ ID NO: 180213 - DNA, 25 bp, Canis familiaris
tccattaattcttattccagttcat

SEQ ID NO: 180214 - DNA, 25 bp, Canis familiaris
tccttacttgtttcactcagtgtca

SEQ ID NO: 180215 - DNA, 25 bp, Canis familiaris
tcctcaactttcgttccatggtgaa

SEQ ID NO: 180216 - DNA, 25 bp, Canis familiaris
tccatataccttactgtcgatccag

SEQ ID NO: 180217 - DNA, 25 bp, Canis familiaris
tccatatccctagttacagtcacat

SEQ ID NO: 180218 - DNA, 25 bp, Canis familiaris
tccatcacaactgtctcacattacc

SEQ ID NO: 180219 - DNA, 25 bp, Canis familiaris
tccatatgaactcatgccagttacc

SEQ ID NO: 180220 - DNA, 25 bp, Canis familiaris
tccatcatgaagtgtgacgtggaca

SEQ ID NO: 180221 - DNA, 25 bp, Canis familiaris
tccagtgaatctcagcaggtggtca

SEQ ID NO: 180222 - DNA, 25 bp, Canis familiaris
tccagtggtgtcaatgagcgtttaa

SEQ ID NO: 180223 - DNA, 25 bp, Canis familiaris
tccttcatggtcattgctttctcca

SEQ ID NO: 180224 - DNA, 25 bp, Canis familiaris
tccttaggtcttaatagcatcccag

SEQ ID NO: 180225 - DNA, 25 bp, Canis familiaris
tcctttgttttttcagtctaatttg

SEQ ID NO: 180226 - DNA, 25 bp, Canis familiaris
tcctttttgtcttgccagttcaata

SEQ ID NO: 180227 - DNA, 25 bp, Canis familiaris
tcctttgtcttcaagtccctaacag

SEQ ID NO: 180228 - DNA, 25 bp, Canis familiaris
tcctattattctcacacctcaaaat

SEQ ID NO: 180229 - DNA, 25 bp, Canis familiaris
tccttgcatattataatcctcctac

SEQ ID NO: 180230 - DNA, 25 bp, Canis familiaris
tccttagaatctaatgtccatcatt

SEQ ID NO: 180231 - DNA, 25 bp, Canis familiaris
tccatgtacatatttatctctcctt

SEQ ID NO: 180232 - DNA, 25 bp, Canis familiaris
tccatggagcaagctgagccacctt

SEQ ID NO: 180233 - DNA, 25 bp, Canis familiaris
tccagtgacacggcaggctcatgca

SEQ ID NO: 180234 - DNA, 25 bp, Canis familiaris
tccatggcaccgtcaaggctgagaa

SEQ ID NO: 180235 - DNA, 25 bp, Canis familiaris
tccaggccacgaaagttaagggaga

SEQ ID NO: 180236 - DNA, 25 bp, Canis familiaris
tccagggtctcaaacttaggggtgc

SEQ ID NO: 180237 - DNA, 25 bp, Canis familiaris
tcctggcggtaaaagtcaatgggtc

SEQ ID NO: 180238 - DNA, 25 bp, Canis familiaris
tcctactgagtatacgatgcatgtc

SEQ ID NO: 180239 - DNA, 25 bp, Canis familiaris
tcctactgaacacaggtcttccctg

SEQ ID NO: 180240 - DNA, 25 bp, Canis familiaris
tcctttacacgtctgtttgcccaga

SEQ ID NO: 180241 - DNA, 25 bp, Canis familiaris
tcgtgtaaaagggttgtctcccagg

SEQ ID NO: 180242 - DNA, 25 bp, Canis familiaris
tacgaaagaagacgttggtcccagg

SEQ ID NO: 180243 - DNA, 25 bp, Canis familiaris
tccgaaagagtaaactggtccggtg

SEQ ID NO: 180244 - DNA, 25 bp, Canis familiaris
tcccaaaagtttggcggtcctggtg

SEQ ID NO: 180245 - DNA, 25 bp, Canis familiaris
tcctcaaaacttcctcggtcagtaa

SEQ ID NO: 180246 - DNA, 25 bp, Canis familiaris
tcctaagggcttgcccggagctaca

SEQ ID NO: 180247 - DNA, 25 bp, Canis familiaris
tcctcaaggagacagcaacgggcta

SEQ ID NO: 180248 - DNA, 25 bp, Canis familiaris
tccatccaggaaccaccacgaagaa

SEQ ID NO: 180249 - DNA, 25 bp, Canis familiaris
tccatcgtaatccccatcaagaaac

SEQ ID NO: 180250 - DNA, 25 bp, Canis familiaris
tcctcgggtcgctctaagaacatgg

SEQ ID NO: 180251 - DNA, 25 bp, Canis familiaris
tccatcgggcctgcctaattcagat

SEQ ID NO: 180252 - DNA, 25 bp, Canis familiaris
tccaggatggcctcacctattgaaa

SEQ ID NO: 180253 - DNA, 25 bp, Canis familiaris
tccaggatggagttcacgttattaa

SEQ ID NO: 180254 - DNA, 25 bp, Canis familiaris
tccaggtcggtttctatctattata

SEQ ID NO: 180255 - DNA, 25 bp, Canis familiaris
tccaggtattggttttctttgctta

SEQ ID NO: 180256 - DNA, 25 bp, Canis familiaris
tccatgtgtcattagaactctcttt

SEQ ID NO: 180257 - DNA, 25 bp, Canis familiaris
tccatgtctgagggtactgctatct

SEQ ID NO: 180258 - DNA, 25 bp, Canis familiaris
tccatgtcggggtggctatatcggc

SEQ ID NO: 180259 - DNA, 25 bp, Canis familiaris
tccttctgggactggtcatttgcca

SEQ ID NO: 180260 - DNA, 25 bp, Canis familiaris
tccattcctgagactcgttttgtta

SEQ ID NO: 180261 - DNA, 25 bp, Canis familiaris
tccattcttgcatttttgttttcat

SEQ ID NO: 180262 - DNA, 25 bp, Canis familiaris
tccatctttggtaacaggctttctg

SEQ ID NO: 180263 - DNA, 25 bp, Canis familiaris
tccatctttggtaacaggctttctg

SEQ ID NO: 180264 - DNA, 25 bp, Canis familiaris
tccatctctctggtaacaggctttc

SEQ ID NO: 180265 - DNA, 25 bp, Canis familiaris
tccttgtctgttaaagtgagttctt

SEQ ID NO: 180266 - DNA, 25 bp, Canis familiaris
tccctatatttgaaaacgtcacttc

SEQ ID NO: 180267 - DNA, 25 bp, Canis familiaris
tcctccaaatccaaagggacgcctc

SEQ ID NO: 180268 - DNA, 25 bp, Canis familiaris
tcctattaatccagagaaacttcca

SEQ ID NO: 180269 - DNA, 25 bp, Canis familiaris
tccttccactcctgagagtgactat

SEQ ID NO: 180270 - DNA, 25 bp, Canis familiaris
tcctgccacattcacggtgtacgaa

SEQ ID NO: 180271 - DNA, 25 bp, Canis familiaris
tcctgccaaagttcttgcattcacg

SEQ ID NO: 180272 - DNA, 25 bp, Canis familiaris
tctcatcgcagtttccaatcattac

SEQ ID NO: 180273 - DNA, 25 bp, Canis familiaris
tccttgcatgcttcgaaactctgac

SEQ ID NO: 180274 - DNA, 25 bp, Canis familiaris
tcctgttgctctggaatcctgtgta

SEQ ID NO: 180275 - DNA, 25 bp, Canis familiaris
tcctgccctgctgtaacagctgtac

SEQ ID NO: 180276 - DNA, 25 bp, Canis familiaris
tcctacgtggtcaacatcacctaca

SEQ ID NO: 180277 - DNA, 25 bp, Canis familiaris
tcctaccggggagcacattgagcag

SEQ ID NO: 180278 - DNA, 25 bp, Canis familiaris
tcctaccagggtaccctcagtgtgt

SEQ ID NO: 180279 - DNA, 25 bp, Canis familiaris
tcctaggctgggacccgcaaatggt

SEQ ID NO: 180280 - DNA, 25 bp, Canis familiaris
tccagggggttgactcgaaaggttg

SEQ ID NO: 180281 - DNA, 25 bp, Canis familiaris
tccaggggtgatctgctcagcacca

SEQ ID NO: 180282 - DNA, 25 bp, Canis familiaris
tccttggcgcagaacttcgcactga

SEQ ID NO: 180283 - DNA, 25 bp, Canis familiaris
tccttggctgcaaagttggaccagt

SEQ ID NO: 180284 - DNA, 25 bp, Canis familiaris
tccatggcaccatccttggaacagt

SEQ ID NO: 180285 - DNA, 25 bp, Canis familiaris
tcctgccccaacgtttgaacgtatc

SEQ ID NO: 180286 - DNA, 25 bp, Canis familiaris
tcctccctttggaactaacacttct

SEQ ID NO: 180287 - DNA, 25 bp, Canis familiaris
tcccgccgctctgaagttaactagc

SEQ ID NO: 180288 - DNA, 25 bp, Canis familiaris
tctcctgcaggctgaaagtattaat

SEQ ID NO: 180289 - DNA, 25 bp, Canis familiaris
tctctcgctacacagaagtaacaat

SEQ ID NO: 180290 - DNA, 25 bp, Canis familiaris
tcctcagctcaaccaaatggttcgt

SEQ ID NO: 180291 - DNA, 25 bp, Canis familiaris
tcctcagtcaacggcaactgtgtct

SEQ ID NO: 180292 - DNA, 25 bp, Canis familiaris
tcctttaacttaacttctgtgactt

SEQ ID NO: 180293 - DNA, 25 bp, Canis familiaris
tcctttctttttatctcattgagct

SEQ ID NO: 180294 - DNA, 25 bp, Canis familiaris
tcctcttccctattattccattaag

SEQ ID NO: 180295 - DNA, 25 bp, Canis familiaris
tccttaccctttagatgtatttgag

SEQ ID NO: 180296 - DNA, 25 bp, Canis familiaris
tccttaactcgcgtgagtgtatctc

SEQ ID NO: 180297 - DNA, 25 bp, Canis familiaris
tcctctcacacctttgcgaggaccc

SEQ ID NO: 180298 - DNA, 25 bp, Canis familiaris
tccatgctaccctgaggagctgagc

SEQ ID NO: 180299 - DNA, 25 bp, Canis familiaris
tccatttgccctgagctgactggga

SEQ ID NO: 180300 - DNA, 25 bp, Canis familiaris
tccatgaggtccgttgtctcgtgga

SEQ ID NO: 180301 - DNA, 25 bp, Canis familiaris
tcctgggtatggagtcctgcggcat

SEQ ID NO: 180302 - DNA, 25 bp, Canis familiaris
tccatctgagaacaggtcctgccag

SEQ ID NO: 180303 - DNA, 25 bp, Canis familiaris
tcctctgcctaaaagcctttcatgg

SEQ ID NO: 180304 - DNA, 25 bp, Canis familiaris
tcctctcccaagtgcctagaagggg

SEQ ID NO: 180305 - DNA, 25 bp, Canis familiaris
tccatcttccaacttctttaaaaat

SEQ ID NO: 180306 - DNA, 25 bp, Canis familiaris
tcctcaacctactacttgtccaaaa

SEQ ID NO: 180307 - DNA, 25 bp, Canis familiaris
tcctaagccttatttgaaccataca

SEQ ID NO: 180308 - DNA, 25 bp, Canis familiaris
tccttaggcccatttgagacattaa

SEQ ID NO: 180309 - DNA, 25 bp, Canis familiaris
tcctatagctgtcctttgtgaactt

SEQ ID NO: 180310 - DNA, 25 bp, Canis familiaris
tcctgccttgtggtctttaacctaa

SEQ ID NO: 180311 - DNA, 25 bp, Canis familiaris
tcctcattttgcttcctatcaagcc

SEQ ID NO: 180312 - DNA, 25 bp, Canis familiaris
tccatcgatgttcttcttcggatca

SEQ ID NO: 180313 - DNA, 25 bp, Canis familiaris
tccatccatgttatttattctgtga

SEQ ID NO: 180314 - DNA, 25 bp, Canis familiaris
tccatcgtgtctgctttatttgtca

SEQ ID NO: 180315 - DNA, 25 bp, Canis familiaris
tccatctggttctttctgatcttga

SEQ ID NO: 180316 - DNA, 25 bp, Canis familiaris
tcctttgctcctttctgatgttgaa

SEQ ID NO: 180317 - DNA, 25 bp, Canis familiaris
tcctctatcttttctagtccagcaa

SEQ ID NO: 180318 - DNA, 25 bp, Canis familiaris
tccttgtcctttcagtcttgagacg

SEQ ID NO: 180319 - DNA, 25 bp, Canis familiaris
tccatctgccttcctaattttaagg

SEQ ID NO: 180320 - DNA, 25 bp, Canis familiaris
tccattcactccctattttctgaag

SEQ ID NO: 180321 - DNA, 25 bp, Canis familiaris
tccgtttccctaacttatgaaggca

SEQ ID NO: 180322 - DNA, 25 bp, Canis familiaris
tccgtttccgtaaggttgttgacat

SEQ ID NO: 180323 - DNA, 25 bp, Canis familiaris
tccatttttctgaggtgttttccat

SEQ ID NO: 180324 - DNA, 25 bp, Canis familiaris
tcctcttcttgctgggtttattcgt

SEQ ID NO: 180325 - DNA, 25 bp, Canis familiaris
tcctgttcctgcagccttttaaaga

SEQ ID NO: 180326 - DNA, 25 bp, Canis familiaris
tcctgttttgtgcccatcattgata

SEQ ID NO: 180327 - DNA, 25 bp, Canis familiaris
tcctagtttgtcccacctgataggc

SEQ ID NO: 180328 - DNA, 25 bp, Canis familiaris
tccatcctttgggtgtcctgatagg

SEQ ID NO: 180329 - DNA, 25 bp, Canis familiaris
tcctacttgtagatgtgcctcgcat

SEQ ID NO: 180330 - DNA, 25 bp, Canis familiaris
tcctatcttatccatatgggaacat

SEQ ID NO: 180331 - DNA, 25 bp, Canis familiaris
tcctctttgagggaatggaacacaa

SEQ ID NO: 180332 - DNA, 25 bp, Canis familiaris
tcctcggcatggcgtacggagccaa

SEQ ID NO: 180333 - DNA, 25 bp, Canis familiaris
tccttggggaggacacggcaaataa

SEQ ID NO: 180334 - DNA, 25 bp, Canis familiaris
tccttggggggacccgcacaagaga

SEQ ID NO: 180335 - DNA, 25 bp, Canis familiaris
tcctggtcagggcagtccggtagga

SEQ ID NO: 180336 - DNA, 25 bp, Canis familiaris
tccggcacgggtagaccgttgtcgg

SEQ ID NO: 180337 - DNA, 25 bp, Canis familiaris
tcctggccggcgagatccgtagaga

SEQ ID NO: 180338 - DNA, 25 bp, Canis familiaris
tccaggccagtgcgttctcaaatgg

SEQ ID NO: 180339 - DNA, 25 bp, Canis familiaris
tccaggccatcctgtctctaataac

SEQ ID NO: 180340 - DNA, 25 bp, Canis familiaris
tcgcagacctattactccagtataa

SEQ ID NO: 180341 - DNA, 25 bp, Canis familiaris
tcctaccaaatccccagtgataata

SEQ ID NO: 180342 - DNA, 25 bp, Canis familiaris
tccatacttgacttgaccaggtaaa

SEQ ID NO: 180343 - DNA, 25 bp, Canis familiaris
tccatccctgagcttcgcaggtaga

SEQ ID NO: 180344 - DNA, 25 bp, Canis familiaris
tcctatccggtgtctcgacgtagat

SEQ ID NO: 180345 - DNA, 25 bp, Canis familiaris
tcctctcctggtgctggaatgtgct

SEQ ID NO: 180346 - DNA, 25 bp, Canis familiaris
tcctctctttctggtgggagtgcat

SEQ ID NO: 180347 - DNA, 25 bp, Canis familiaris
tccttcagtggcagggcgtgcagca

SEQ ID NO: 180348 - DNA, 25 bp, Canis familiaris
tccttactggcaaggctgcctgcca

SEQ ID NO: 180349 - DNA, 25 bp, Canis familiaris
tcctgtggctggaggaatctgccca

SEQ ID NO: 180350 - DNA, 25 bp, Canis familiaris
tcctgctggctgtgggcaaggacct

SEQ ID NO: 180351 - DNA, 25 bp, Canis familiaris
tcctcagtgatgtctgagcccagga

SEQ ID NO: 180352 - DNA, 25 bp, Canis familiaris
tccattcatggtggactccaggatg

SEQ ID NO: 180353 - DNA, 25 bp, Canis familiaris
tccttctgagggcccacaggggcct

SEQ ID NO: 180354 - DNA, 25 bp, Canis familiaris
tcctcacttgggcatcattggtacc

SEQ ID NO: 180355 - DNA, 25 bp, Canis familiaris
tcctcgttggtgtccttgttaggtg

SEQ ID NO: 180356 - DNA, 25 bp, Canis familiaris
tctgtagttcgtagggtgttaggtc

SEQ ID NO: 180357 - DNA, 25 bp, Canis familiaris
tcgaagtcggttcgggttcggtcag

SEQ ID NO: 180358 - DNA, 25 bp, Canis familiaris
tcaaactagggggggttcagcccag

SEQ ID NO: 180359 - DNA, 25 bp, Canis familiaris
tagagttagccgtgacacttaccca

SEQ ID NO: 180360 - DNA, 25 bp, Canis familiaris
tcgacttaccgaaatgccttacaca

SEQ ID NO: 180361 - DNA, 25 bp, Canis familiaris
tcctttaacgataaccttgagcaca

SEQ ID NO: 180362 - DNA, 25 bp, Canis familiaris
tcctctagagtgctgtcccgtagaa

SEQ ID NO: 180363 - DNA, 25 bp, Canis familiaris
tcctctatggtcttgccaaaatgaa

SEQ ID NO: 180364 - DNA, 25 bp, Canis familiaris
tccatctttctttgccatctaataa

SEQ ID NO: 180365 - DNA, 25 bp, Canis familiaris
tccttttagttgcctcgaatattca

SEQ ID NO: 180366 - DNA, 25 bp, Canis familiaris
tccatttgtgcagatgtccagaaat

SEQ ID NO: 180367 - DNA, 25 bp, Canis familiaris
tccttggtctctggtctcaaataga

SEQ ID NO: 180368 - DNA, 25 bp, Canis familiaris
tcctcttggatcagtgctattgaaa

SEQ ID NO: 180369 - DNA, 25 bp, Canis familiaris
tccatctctggaacatactttatac

SEQ ID NO: 180370 - DNA, 25 bp, Canis familiaris
tccatgctaggcaccctgatctaga

SEQ ID NO: 180371 - DNA, 25 bp, Canis familiaris
tccatccagagtcccgtgaagagtc

SEQ ID NO: 180372 - DNA, 25 bp, Canis familiaris
tcctccaacaagcctgtgacaagtc

SEQ ID NO: 180373 - DNA, 25 bp, Canis familiaris
tccatcctacattcatctgtgatca

SEQ ID NO: 180374 - DNA, 25 bp, Canis familiaris
tcctgccataattatctttgcctgc

SEQ ID NO: 180375 - DNA, 25 bp, Canis familiaris
tccatcgcaaatgcttctagatcga

SEQ ID NO: 180376 - DNA, 25 bp, Canis familiaris
tcctccctatcagttctaacacaat

SEQ ID NO: 180377 - DNA, 25 bp, Canis familiaris
tccttccgacactcatgaacaggct

SEQ ID NO: 180378 - DNA, 25 bp, Canis familiaris
tccttcgtgtaccctgtatcagggt

SEQ ID NO: 180379 - DNA, 25 bp, Canis familiaris
tcctgtgttgaagggcctaacggtt

SEQ ID NO: 180380 - DNA, 25 bp, Canis familiaris
tcacgtttgaagaccgaagattttt

SEQ ID NO: 180381 - DNA, 25 bp, Canis familiaris
tccgctatataaacccaagcatcct

SEQ ID NO: 180382 - DNA, 25 bp, Canis familiaris
tcctgaataaatacataaaatctct

SEQ ID NO: 180383 - DNA, 25 bp, Canis familiaris
ttgcttgaaaagacaaaggacctaa

SEQ ID NO: 180384 - DNA, 25 bp, Canis familiaris
tctgcttaacaagaactggaataaa

SEQ ID NO: 180385 - DNA, 25 bp, Canis familiaris
tccttacaccgctaaccgagataag

SEQ ID NO: 180386 - DNA, 25 bp, Canis familiaris
tcctcttacccagacacgtgatagg

SEQ ID NO: 180387 - DNA, 25 bp, Canis familiaris
tccttgtcccaagttctctggtagg

SEQ ID NO: 180388 - DNA, 25 bp, Canis familiaris
tccttggcctcaaggctctggagct

SEQ ID NO: 180389 - DNA, 25 bp, Canis familiaris
tccttgaacgtggtgctcgagctgt

SEQ ID NO: 180390 - DNA, 25 bp, Canis familiaris
tccttgataggggaatctggcttaa

SEQ ID NO: 180391 - DNA, 25 bp, Canis familiaris
tcctgtgaacgggcaaataacaaca

SEQ ID NO: 180392 - DNA, 25 bp, Canis familiaris
tcctatctaccagcaatgaacacat

SEQ ID NO: 180393 - DNA, 25 bp, Canis familiaris
tcctcatccatgaccgaagagacat

SEQ ID NO: 180394 - DNA, 25 bp, Canis familiaris
tcctcatactcaccgactgagtctc

SEQ ID NO: 180395 - DNA, 25 bp, Canis familiaris
tccatgcttgtccctgagtgggcaa

SEQ ID NO: 180396 - DNA, 25 bp, Canis familiaris
tccgtgtttacttgcctggcaatcg

SEQ ID NO: 180397 - DNA, 25 bp, Canis familiaris
tctgccttccaagagtcgtgcaacc

SEQ ID NO: 180398 - DNA, 25 bp, Canis familiaris
tcctcatcaccatccatgatcggaa

SEQ ID NO: 180399 - DNA, 25 bp, Canis familiaris
tccatcacctcagtcctacaggtat

SEQ ID NO: 180400 - DNA, 25 bp, Canis familiaris
tccatacctttggctaagcaagcta

SEQ ID NO: 180401 - DNA, 25 bp, Canis familiaris
tcctcccgtggctgaagcaagctga

SEQ ID NO: 180402 - DNA, 25 bp, Canis familiaris
tcctcccagtgttggaactgcggcg

SEQ ID NO: 180403 - DNA, 25 bp, Canis familiaris
tcctgccacagcttatggattccgc

SEQ ID NO: 180404 - DNA, 25 bp, Canis familiaris
tccattcatcagctgatggatattt

SEQ ID NO: 180405 - DNA, 25 bp, Canis familiaris
tccttctatgcctatcagcatttgt

SEQ ID NO: 180406 - DNA, 25 bp, Canis familiaris
tccttctatgcctatgggtttaact

SEQ ID NO: 180407 - DNA, 25 bp, Canis familiaris
tccttcttcagagggttttaagcca

SEQ ID NO: 180408 - DNA, 25 bp, Canis familiaris
tccttatgtcagttgagttctctca

SEQ ID NO: 180409 - DNA, 25 bp, Canis familiaris
tcctattcctgattaattcgctatt

SEQ ID NO: 180410 - DNA, 25 bp, Canis familiaris
tccattccctgactgaattacatct

SEQ ID NO: 180411 - DNA, 25 bp, Canis familiaris
tcctctccttgaccaataaagtctg

SEQ ID NO: 180412 - DNA, 25 bp, Canis familiaris
tcctcccgctggtaataaaatctgt

SEQ ID NO: 180413 - DNA, 25 bp, Canis familiaris
tcgtccgacggttgaataaatggta

SEQ ID NO: 180414 - DNA, 25 bp, Canis familiaris
tcctccaacgcgtgaagaaaattga

SEQ ID NO: 180415 - DNA, 25 bp, Canis familiaris
tcctccacaccgtgaagaaaattga

SEQ ID NO: 180416 - DNA, 25 bp, Canis familiaris
tccttacccggcactgaaaatctga

SEQ ID NO: 180417 - DNA, 25 bp, Canis familiaris
tccatttctgaccactcctgaaaat

SEQ ID NO: 180418 - DNA, 25 bp, Canis familiaris
tccatcatgtatgccaagcctgaca

SEQ ID NO: 180419 - DNA, 25 bp, Canis familiaris
tcctgctctgtgaacaatgctgctg

SEQ ID NO: 180420 - DNA, 25 bp, Canis familiaris
tccattcatctattcacagctctgt

SEQ ID NO: 180421 - DNA, 25 bp, Canis familiaris
tccatctccatatttactctgtgct

SEQ ID NO: 180422 - DNA, 25 bp, Canis familiaris
tccatcttctgctttgatccttgga

SEQ ID NO: 180423 - DNA, 25 bp, Canis familiaris
tccatatcctctaggcttcctggaa

SEQ ID NO: 180424 - DNA, 25 bp, Canis familiaris
tccataccacaccgttcgaagaacc

SEQ ID NO: 180425 - DNA, 25 bp, Canis familiaris
tccttctcacagccttctggaaaac

SEQ ID NO: 180426 - DNA, 25 bp, Canis familiaris
tccattctcgctgctgtctgaagaa

SEQ ID NO: 180427 - DNA, 25 bp, Canis familiaris
tcctagctcctgactggtggcaagg

SEQ ID NO: 180428 - DNA, 25 bp, Canis familiaris
tccttgtccatgtctaagcacaggg

SEQ ID NO: 180429 - DNA, 25 bp, Canis familiaris
tccattttgctcttagacacaggca

SEQ ID NO: 180430 - DNA, 25 bp, Canis familiaris
tcctcattgtgtgcaagatcctggc

SEQ ID NO: 180431 - DNA, 25 bp, Canis familiaris
tcctgccggttcagtgcactggcaa

SEQ ID NO: 180432 - DNA, 25 bp, Canis familiaris
tccatcagaggttgatcttccggca

SEQ ID NO: 180433 - DNA, 25 bp, Canis familiaris
tcctcatgaatttgtttgcctgggc

SEQ ID NO: 180434 - DNA, 25 bp, Canis familiaris
tcctaggtcatttatctgtgctggg

SEQ ID NO: 180435 - DNA, 25 bp, Canis familiaris
tcctcgttatctcctattgctggag

SEQ ID NO: 180436 - DNA, 25 bp, Canis familiaris
tcctcttgttctcctagggtgggaa

SEQ ID NO: 180437 - DNA, 25 bp, Canis familiaris
tccttcctatggcccagggtgggag

SEQ ID NO: 180438 - DNA, 25 bp, Canis familiaris
tccttcctcagtagcacgggggaga

SEQ ID NO: 180439 - DNA, 25 bp, Canis familiaris
tccttgcactagcgcacgaaggtgg

SEQ ID NO: 180440 - DNA, 25 bp, Canis familiaris
tccttgccttgcctagtgaagttgc

SEQ ID NO: 180441 - DNA, 25 bp, Canis familiaris
tccttcaccggcaagtgagagcccc

SEQ ID NO: 180442 - DNA, 25 bp, Canis familiaris
tccatctcatcctggcaggggcagc

SEQ ID NO: 180443 - DNA, 25 bp, Canis familiaris
tcctctctccactacgtgaggcagg

SEQ ID NO: 180444 - DNA, 25 bp, Canis familiaris
tcctttccagcaccgcaggaagagg

SEQ ID NO: 180445 - DNA, 25 bp, Canis familiaris
tccttcccagaagcacgggggtttg

SEQ ID NO: 180446 - DNA, 25 bp, Canis familiaris
tctttgcctaggatacggttttatt

SEQ ID NO: 180447 - DNA, 25 bp, Canis familiaris
tccttcctaggacttgttgttaaat

SEQ ID NO: 180448 - DNA, 25 bp, Canis familiaris
tccttcacttcccattttgtggaat

SEQ ID NO: 180449 - DNA, 25 bp, Canis familiaris
tccttgacattccttggcttgtgga

SEQ ID NO: 180450 - DNA, 25 bp, Canis familiaris
tcctgtgtacacctgacctttggag

SEQ ID NO: 180451 - DNA, 25 bp, Canis familiaris
tccttgggcaccaacctggtgcgcg

SEQ ID NO: 180452 - DNA, 25 bp, Canis familiaris
tcctctggtaaatgtctgtatgtct

SEQ ID NO: 180453 - DNA, 25 bp, Canis familiaris
tccttggtagtacagttcttgtgca

SEQ ID NO: 180454 - DNA, 25 bp, Canis familiaris
tcctttgtggaaccgtggtcttcaa

SEQ ID NO: 180455 - DNA, 25 bp, Canis familiaris
tccattggtggacatctgggctctt

SEQ ID NO: 180456 - DNA, 25 bp, Canis familiaris
tccataggggagcattggccccgga

SEQ ID NO: 180457 - DNA, 25 bp, Canis familiaris
tccttaggggcctgagcccagcgag

SEQ ID NO: 180458 - DNA, 25 bp, Canis familiaris
tcctacgtgggcgacgaggcccaga

SEQ ID NO: 180459 - DNA, 25 bp, Canis familiaris
tccataggggaggcacagccaccca

SEQ ID NO: 180460 - DNA, 25 bp, Canis familiaris
tccataggggagcacaggcacccac

SEQ ID NO: 180461 - DNA, 25 bp, Canis familiaris
tcctctggggcacaaatgttcctca

SEQ ID NO: 180462 - DNA, 25 bp, Canis familiaris
tcctctaggaagtgcctttcctgca

SEQ ID NO: 180463 - DNA, 25 bp, Canis familiaris
tcctttgtatagttgtctttcctcc

SEQ ID NO: 180464 - DNA, 25 bp, Canis familiaris
tcctttatatactgccgtcacgttg

SEQ ID NO: 180465 - DNA, 25 bp, Canis familiaris
tcctgtttaccatccgtagtttaag

SEQ ID NO: 180466 - DNA, 25 bp, Canis familiaris
tcttggcttcccaccttaattgggc

SEQ ID NO: 180467 - DNA, 25 bp, Canis familiaris
tcctcagtctactaatccttaatta

SEQ ID NO: 180468 - DNA, 25 bp, Canis familiaris
tcctttctgagcccaacactaatta

SEQ ID NO: 180469 - DNA, 25 bp, Canis familiaris
tccttttcactccatgtcactaagt

SEQ ID NO: 180470 - DNA, 25 bp, Canis familiaris
tccttgttacctatagcatcagaaa

SEQ ID NO: 180471 - DNA, 25 bp, Canis familiaris
tcctttgtcaaccactacatcagcg

SEQ ID NO: 180472 - DNA, 25 bp, Canis familiaris
tccttataatgacacaaatctgcaa

SEQ ID NO: 180473 - DNA, 25 bp, Canis familiaris
tccttataatgacaccaatctgcca

SEQ ID NO: 180474 - DNA, 25 bp, Canis familiaris
tcctttcttggatccacatcatctt

SEQ ID NO: 180475 - DNA, 25 bp, Canis familiaris
tccttgggtggtcccaatctctgag

SEQ ID NO: 180476 - DNA, 25 bp, Canis familiaris
tcctatggagtgatcccctcattac

SEQ ID NO: 180477 - DNA, 25 bp, Canis familiaris
tcctcagtagtggtttctctcttaa

SEQ ID NO: 180478 - DNA, 25 bp, Canis familiaris
tccattgtgaagtgttctctctcta

SEQ ID NO: 180479 - DNA, 25 bp, Canis familiaris
tccctggaaaggggtcttcttctca

SEQ ID NO: 180480 - DNA, 25 bp, Canis familiaris
tcctcctgaaagggccctagcttaa

SEQ ID NO: 180481 - DNA, 25 bp, Canis familiaris
tcctcctgaaagggccctagcttaa

SEQ ID NO: 180482 - DNA, 25 bp, Canis familiaris
tcctcctgaaagggccctagcttaa

SEQ ID NO: 180483 - DNA, 25 bp, Canis familiaris
tcctcgccaaagggtgcctttcatg

SEQ ID NO: 180484 - DNA, 25 bp, Canis familiaris
tcctggccacaatgggaccccaggc

SEQ ID NO: 180485 - DNA, 25 bp, Canis familiaris
tcccccaaaaggcgaagcacgactt

SEQ ID NO: 180486 - DNA, 25 bp, Canis familiaris
tcctcccaagaagtctagggcatgg

SEQ ID NO: 180487 - DNA, 25 bp, Canis familiaris
tccccaccgatatttttaggtgtgc

SEQ ID NO: 180488 - DNA, 25 bp, Canis familiaris
tcgcacccactgttaattgtcgttg

SEQ ID NO: 180489 - DNA, 25 bp, Canis familiaris
tcctccatactgtttaggtgtctgg

SEQ ID NO: 180490 - DNA, 25 bp, Canis familiaris
tcctgccaactttgtaccttcgcag

SEQ ID NO: 180491 - DNA, 25 bp, Canis familiaris
tcctcgagaacttaactcttccatg

SEQ ID NO: 180492 - DNA, 25 bp, Canis familiaris
tccttccaactgttcactatttctg

SEQ ID NO: 180493 - DNA, 25 bp, Canis familiaris
tccttcgtagtgttagcccttgaac

SEQ ID NO: 180494 - DNA, 25 bp, Canis familiaris
tccttgcgttcgttagcaggtcaaa

SEQ ID NO: 180495 - DNA, 25 bp, Canis familiaris
tccttcttacgttacatggaaaagt

SEQ ID NO: 180496 - DNA, 25 bp, Canis familiaris
tccttttcccattaatgacgaaact

SEQ ID NO: 180497 - DNA, 25 bp, Canis familiaris
tcctttctcccaaagtggcaaaatt

SEQ ID NO: 180498 - DNA, 25 bp, Canis familiaris
tccttcttccctcctgaggaatcaa

SEQ ID NO: 180499 - DNA, 25 bp, Canis familiaris
tcctttttcatctctgggaatatat

SEQ ID NO: 180500 - DNA, 25 bp, Canis familiaris
tcctttagtctctctgagcctgaat

SEQ ID NO: 180501 - DNA, 25 bp, Canis familiaris
tcctcggagtcctagggtcgagctc

SEQ ID NO: 180502 - DNA, 25 bp, Canis familiaris
tcctcggtgtcctggcagatgggat

SEQ ID NO: 180503 - DNA, 25 bp, Canis familiaris
tccttccgtcttcactgagggattc

SEQ ID NO: 180504 - DNA, 25 bp, Canis familiaris
tcctatcaagccttccctgaggagt

SEQ ID NO: 180505 - DNA, 25 bp, Canis familiaris
tcctcatcgctaattccctgaatga

SEQ ID NO: 180506 - DNA, 25 bp, Canis familiaris
tcctctcctacattcattctagtga

SEQ ID NO: 180507 - DNA, 25 bp, Canis familiaris
tccttcgccagatcactgtcaatga

SEQ ID NO: 180508 - DNA, 25 bp, Canis familiaris
tcctttgacatgtcgatcttccatg

SEQ ID NO: 180509 - DNA, 25 bp, Canis familiaris
tccttgtgaggctgactgcttcaag

SEQ ID NO: 180510 - DNA, 25 bp, Canis familiaris
tccttgtctagcagcacgttcaaca

SEQ ID NO: 180511 - DNA, 25 bp, Canis familiaris
tccttgtctgtgcaacctgtgcaac

SEQ ID NO: 180512 - DNA, 25 bp, Canis familiaris
tccttgtcgcgccgcgaccagaaca

SEQ ID NO: 180513 - DNA, 25 bp, Canis familiaris
tccttgttccacagactgcaatcca

SEQ ID NO: 180514 - DNA, 25 bp, Canis familiaris
tcctccattccctgactgaattaca

SEQ ID NO: 180515 - DNA, 25 bp, Canis familiaris
tccccattccattcaacaggcacat

SEQ ID NO: 180516 - DNA, 25 bp, Canis familiaris
tcctacacgcgcatcaagaggccac

SEQ ID NO: 180517 - DNA, 25 bp, Canis familiaris
tcctacacacacagcattcattcta

SEQ ID NO: 180518 - DNA, 25 bp, Canis familiaris
tcctacatcatctcgcttatattgg

SEQ ID NO: 180519 - DNA, 25 bp, Canis familiaris
tcctactcctctgttatatgtgggg

SEQ ID NO: 180520 - DNA, 25 bp, Canis familiaris
tcctttgcttctctctacaggatgg

SEQ ID NO: 180521 - DNA, 25 bp, Canis familiaris
tccattgtgctcttcctcaataaga

SEQ ID NO: 180522 - DNA, 25 bp, Canis familiaris
tccattgcgccaattccgagaggag

SEQ ID NO: 180523 - DNA, 25 bp, Canis familiaris
tccattcgggcttcccagagagagc

SEQ ID NO: 180524 - DNA, 25 bp, Canis familiaris
tcctcctggcctagcgccagggaca

SEQ ID NO: 180525 - DNA, 25 bp, Canis familiaris
tcctcttcaccttggcacagaaatc

SEQ ID NO: 180526 - DNA, 25 bp, Canis familiaris
tcctctcctacttggataactgtgg

SEQ ID NO: 180527 - DNA, 25 bp, Canis familiaris
tcctctcctacttggataactgtgg

SEQ ID NO: 180528 - DNA, 25 bp, Canis familiaris
tccttcctgcagggattatgccgcg

SEQ ID NO: 180529 - DNA, 25 bp, Canis familiaris
tcctgctctaggggatgctatccaa

SEQ ID NO: 180530 - DNA, 25 bp, Canis familiaris
tccattcacaggttgcagctggccc

SEQ ID NO: 180531 - DNA, 25 bp, Canis familiaris
tcctacagtggattgcagtgctctc

SEQ ID NO: 180532 - DNA, 25 bp, Canis familiaris
tcctgacggcagttagagctctatc

SEQ ID NO: 180533 - DNA, 25 bp, Canis familiaris
tcctagaggcagtacagactattgt

SEQ ID NO: 180534 - DNA, 25 bp, Canis familiaris
tcctacacacactatatgcacatat

SEQ ID NO: 180535 - DNA, 25 bp, Canis familiaris
tcctccaaacaataataactttcca

SEQ ID NO: 180536 - DNA, 25 bp, Canis familiaris
tcaggccacaaataaaagagctttt

SEQ ID NO: 180537 - DNA, 25 bp, Canis familiaris
ttgggctgacaagacaaagtttttt

SEQ ID NO: 180538 - DNA, 25 bp, Canis familiaris
tctaggagaccctcaatttcttttt

SEQ ID NO: 180539 - DNA, 25 bp, Canis familiaris
tccgagaaacgcacctcttcgtttt

SEQ ID NO: 180540 - DNA, 25 bp, Canis familiaris
tcctgaaaacttccctttcgttgtg

SEQ ID NO: 180541 - DNA, 25 bp, Canis familiaris
tcctcataacaaaccctttctggtt

SEQ ID NO: 180542 - DNA, 25 bp, Canis familiaris
tcctaaacacagaccactggatgtg

SEQ ID NO: 180543 - DNA, 25 bp, Canis familiaris
tcctgatgaaattgatcccttcatt

SEQ ID NO: 180544 - DNA, 25 bp, Canis familiaris
tccattggacaattgcgccccatgg

SEQ ID NO: 180545 - DNA, 25 bp, Canis familiaris
tccattgggaactcagcaccatgaa

SEQ ID NO: 180546 - DNA, 25 bp, Canis familiaris
tccttggtgaagtccagctgccagg

SEQ ID NO: 180547 - DNA, 25 bp, Canis familiaris
tcctccgcgaagaccgtctaggaat

SEQ ID NO: 180548 - DNA, 25 bp, Canis familiaris
tcctctgacgaatgggtatattgaa

SEQ ID NO: 180549 - DNA, 25 bp, Canis familiaris
tccttcccaaatggctgtatttata

SEQ ID NO: 180550 - DNA, 25 bp, Canis familiaris
tccttcccagtatgattttctcttg

SEQ ID NO: 180551 - DNA, 25 bp, Canis familiaris
tccattgtgccactttgttttcttt

SEQ ID NO: 180552 - DNA, 25 bp, Canis familiaris
tcctattacgtccgtacttctttct

SEQ ID NO: 180553 - DNA, 25 bp, Canis familiaris
tcctcctagcctccggagtatttat

SEQ ID NO: 180554 - DNA, 25 bp, Canis familiaris
tcctctgcataattgaaatagtatt

SEQ ID NO: 180555 - DNA, 25 bp, Canis familiaris
tccttcacactatccatacttatca

SEQ ID NO: 180556 - DNA, 25 bp, Canis familiaris
tccttccctagcgctagtatcataa

SEQ ID NO: 180557 - DNA, 25 bp, Canis familiaris
tcctcatccttaccctttagatgta

SEQ ID NO: 180558 - DNA, 25 bp, Canis familiaris
tcctcatcctttacctttagatgtt

SEQ ID NO: 180559 - DNA, 25 bp, Canis familiaris
tccttcctgtattctgtcttcagat

SEQ ID NO: 180560 - DNA, 25 bp, Canis familiaris
tccttcctgctttctatttttatga

SEQ ID NO: 180561 - DNA, 25 bp, Canis familiaris
tccttcctttacctcagtttgtagt

SEQ ID NO: 180562 - DNA, 25 bp, Canis familiaris
tccttccatttgacctaatttaact

SEQ ID NO: 180563 - DNA, 25 bp, Canis familiaris
tccttggctttcctctttttgaagc

SEQ ID NO: 180564 - DNA, 25 bp, Canis familiaris
tccttgatctttgtcttttgtcatg

SEQ ID NO: 180565 - DNA, 25 bp, Canis familiaris
tccttgactgcctgtttttgtttgt

SEQ ID NO: 180566 - DNA, 25 bp, Canis familiaris
tccttacttaagctgtattgtttta

SEQ ID NO: 180567 - DNA, 25 bp, Canis familiaris
tccttactctaccttgggttttgtg

SEQ ID NO: 180568 - DNA, 25 bp, Canis familiaris
tcctatagttccctgatactttttt

SEQ ID NO: 180569 - DNA, 25 bp, Canis familiaris
tcctttttgacatttcctttttctg

SEQ ID NO: 180570 - DNA, 25 bp, Canis familiaris
tcctgtttgatttttgttatttttg

SEQ ID NO: 180571 - DNA, 25 bp, Canis familiaris
tcctatgctggagttgttttgattt

SEQ ID NO: 180572 - DNA, 25 bp, Canis familiaris
tccttgcttgtgttgttgctgtggc

SEQ ID NO: 180573 - DNA, 25 bp, Canis familiaris
tccttgctgttgttttttggcttaa

SEQ ID NO: 180574 - DNA, 25 bp, Canis familiaris
tcctacctctttcttgcggttagat

SEQ ID NO: 180575 - DNA, 25 bp, Canis familiaris
tcctcacctgattttttggggggca

SEQ ID NO: 180576 - DNA, 25 bp, Canis familiaris
tcccagcactggggtttggggggag

SEQ ID NO: 180577 - DNA, 25 bp, Canis familiaris
tcctacctggggcctatgggtttga

SEQ ID NO: 180578 - DNA, 25 bp, Canis familiaris
tccttcctggggcgcagggagtgga

SEQ ID NO: 180579 - DNA, 25 bp, Canis familiaris
tccttcctgggcatggagtcctgtg

SEQ ID NO: 180580 - DNA, 25 bp, Canis familiaris
tccttctgtgggaagtgcacgcctg

SEQ ID NO: 180581 - DNA, 25 bp, Canis familiaris
tccttagatgggtagctgtgcagac

SEQ ID NO: 180582 - DNA, 25 bp, Canis familiaris
tcctgcgacatgtgtgagctggcac

SEQ ID NO: 180583 - DNA, 25 bp, Canis familiaris
tcctgcggtgatgtggtaactcgtg

SEQ ID NO: 180584 - DNA, 25 bp, Canis familiaris
tactcaggtatggtgaggccaacgg

SEQ ID NO: 180585 - DNA, 25 bp, Canis familiaris
tcctccgtcatatggcccagacggc

SEQ ID NO: 180586 - DNA, 25 bp, Canis familiaris
tccttctgttgaaggcccagaccgg

SEQ ID NO: 180587 - DNA, 25 bp, Canis familiaris
tccttctcaataagtcccagccaaa

SEQ ID NO: 180588 - DNA, 25 bp, Canis familiaris
tccttctcagcttttcccataaaga

SEQ ID NO: 180589 - DNA, 25 bp, Canis familiaris
tccttcccttttccagaacatgaga

SEQ ID NO: 180590 - DNA, 25 bp, Canis familiaris
tccttcacctctttggaattctgga

SEQ ID NO: 180591 - DNA, 25 bp, Canis familiaris
tcctacccactcttgtatgtatcat

SEQ ID NO: 180592 - DNA, 25 bp, Canis familiaris
tccttcctctctttttgtattgtat

SEQ ID NO: 180593 - DNA, 25 bp, Canis familiaris
tccttccttgcttttttgtgttaag

SEQ ID NO: 180594 - DNA, 25 bp, Canis familiaris
tcctatgcctttttttctgtgtaat

SEQ ID NO: 180595 - DNA, 25 bp, Canis familiaris
tcctatctctttgtgtctgtgttaa

SEQ ID NO: 180596 - DNA, 25 bp, Canis familiaris
tcctatcttttcttcttgctgaaaa

SEQ ID NO: 180597 - DNA, 25 bp, Canis familiaris
tccttctttaccctacatgaaaaag

SEQ ID NO: 180598 - DNA, 25 bp, Canis familiaris
tccttcttatcccttacattaaaag

SEQ ID NO: 180599 - DNA, 25 bp, Canis familiaris
tccttattatccctgatcatctgta

SEQ ID NO: 180600 - DNA, 25 bp, Canis familiaris
tcctaattaccatgaatttgctgag

SEQ ID NO: 180601 - DNA, 25 bp, Canis familiaris
tcctttgtctctaaaactttgcatg

SEQ ID NO: 180602 - DNA, 25 bp, Canis familiaris
tccttcttcctgactccaccatgtg

SEQ ID NO: 180603 - DNA, 25 bp, Canis familiaris
tcctttgcccagaccacaaatggca

SEQ ID NO: 180604 - DNA, 25 bp, Canis familiaris
tcctgttcctaggaagaagctccat

SEQ ID NO: 180605 - DNA, 25 bp, Canis familiaris
tcctattcctgacagcagtggtcca

SEQ ID NO: 180606 - DNA, 25 bp, Canis familiaris
tcctttctgctactcacttgagaca

SEQ ID NO: 180607 - DNA, 25 bp, Canis familiaris
tccttttgctcagtctccaagtgca

SEQ ID NO: 180608 - DNA, 25 bp, Canis familiaris
tccttgcattcactctctacagagg

SEQ ID NO: 180609 - DNA, 25 bp, Canis familiaris
tcctatgcagtccccatgactgtga

SEQ ID NO: 180610 - DNA, 25 bp, Canis familiaris
tcctcatcgttagtagactgtagtg

SEQ ID NO: 180611 - DNA, 25 bp, Canis familiaris
tccttcacttagtagtagctaggcc

SEQ ID NO: 180612 - DNA, 25 bp, Canis familiaris
tccttcccagcagaggctctgggcc

SEQ ID NO: 180613 - DNA, 25 bp, Canis familiaris
tccttccagagaggcatggcccgaa

SEQ ID NO: 180614 - DNA, 25 bp, Canis familiaris
tcctcaccggcagtgagagcccgat

SEQ ID NO: 180615 - DNA, 25 bp, Canis familiaris
tcctcaacgtcaagatggccctgga

SEQ ID NO: 180616 - DNA, 25 bp, Canis familiaris
tcctgaatttcaagatgctacactg

SEQ ID NO: 180617 - DNA, 25 bp, Canis familiaris
tcctgaattcccaattgcacctgaa

SEQ ID NO: 180618 - DNA, 25 bp, Canis familiaris
tcctaaacacgcatcagaccttgca

SEQ ID NO: 180619 - DNA, 25 bp, Canis familiaris
tccttagaaccgtgaccatagcagt

SEQ ID NO: 180620 - DNA, 25 bp, Canis familiaris
tccttcaggacccggacacgggtgg

SEQ ID NO: 180621 - DNA, 25 bp, Canis familiaris
tccttactgataggggcacctgggt

SEQ ID NO: 180622 - DNA, 25 bp, Canis familiaris
tccttcctgaagcgcagcaagctgg

SEQ ID NO: 180623 - DNA, 25 bp, Canis familiaris
tcctctcggaatgacgcaagcatgg

SEQ ID NO: 180624 - DNA, 25 bp, Canis familiaris
tcctctcccagtgacagagcctggg

SEQ ID NO: 180625 - DNA, 25 bp, Canis familiaris
tccttccctctggacagtgttacag

SEQ ID NO: 180626 - DNA, 25 bp, Canis familiaris
tccttccttccatcagtatatacgt

SEQ ID NO: 180627 - DNA, 25 bp, Canis familiaris
tcctgccgttactgagttacctgga

SEQ ID NO: 180628 - DNA, 25 bp, Canis familiaris
tccttagctaaaatacttatcttgg

SEQ ID NO: 180629 - DNA, 25 bp, Canis familiaris
tccttacaataaaggctgtctcttt

SEQ ID NO: 180630 - DNA, 25 bp, Canis familiaris
tccttcacaaccaactctgtttcta

SEQ ID NO: 180631 - DNA, 25 bp, Canis familiaris
tcctctctacccaaatcagatttct

SEQ ID NO: 180632 - DNA, 25 bp, Canis familiaris
tcctcatcaaccaatacatcgcaga

SEQ ID NO: 180633 - DNA, 25 bp, Canis familiaris
tcctatattcacatcatctctgcca

SEQ ID NO: 180634 - DNA, 25 bp, Canis familiaris
tcctattgatcatggcagctctgct

SEQ ID NO: 180635 - DNA, 25 bp, Canis familiaris
tcctttgccaaggagccatgcggga

SEQ ID NO: 180636 - DNA, 25 bp, Canis familiaris
tcctagtaaaagtccgcagctgtga

SEQ ID NO: 180637 - DNA, 25 bp, Canis familiaris
tcctatggaatgtaatcccggtcat

SEQ ID NO: 180638 - DNA, 25 bp, Canis familiaris
tcctggagagcaggtacccggtcat

SEQ ID NO: 180639 - DNA, 25 bp, Canis familiaris
tccggatcagcgtttaccaggtgct

SEQ ID NO: 180640 - DNA, 25 bp, Canis familiaris
tcctggaacgacatgcatccatcct

SEQ ID NO: 180641 - DNA, 25 bp, Canis familiaris
tccggacacaggatgccgttcgcag

SEQ ID NO: 180642 - DNA, 25 bp, Canis familiaris
tccgcaaactggggctaaatccgca

SEQ ID NO: 180643 - DNA, 25 bp, Canis familiaris
tcgccaaagtgggccagatattcgc

SEQ ID NO: 180644 - DNA, 25 bp, Canis familiaris
tctctcaaaggcgccctatacgaaa

SEQ ID NO: 180645 - DNA, 25 bp, Canis familiaris
tcctaatcggggcccttggcaaaag

SEQ ID NO: 180646 - DNA, 25 bp, Canis familiaris
tccttttgggagctttccagaacac

SEQ ID NO: 180647 - DNA, 25 bp, Canis familiaris
tcctttctgacagcgtttgccgtaa

SEQ ID NO: 180648 - DNA, 25 bp, Canis familiaris
tcctcattgtccacgtattcatcgt

SEQ ID NO: 180649 - DNA, 25 bp, Canis familiaris
tcctctgtacctgggaaatctcagt

SEQ ID NO: 180650 - DNA, 25 bp, Canis familiaris
tcctggtgaccactggaagaccctg

SEQ ID NO: 180651 - DNA, 25 bp, Canis familiaris
tccgtgtacatactggatccaccgc

SEQ ID NO: 180652 - DNA, 25 bp, Canis familiaris
tccggaactcgtgatctccaacgac

SEQ ID NO: 180653 - DNA, 25 bp, Canis familiaris
tcccaaatccgtctctaaactcgtt

SEQ ID NO: 180654 - DNA, 25 bp, Canis familiaris
tcccgggaagtctcgaaactcacgt

SEQ ID NO: 180655 - DNA, 25 bp, Canis familiaris
tccgggggattctctaggactaact

SEQ ID NO: 180656 - DNA, 25 bp, Canis familiaris
tccggagggattgttctggttcaac

SEQ ID NO: 180657 - DNA, 25 bp, Canis familiaris
tccggaagcttctctcttgtagtaa

SEQ ID NO: 180658 - DNA, 25 bp, Canis familiaris
tccgagaactagttttctggagttt

SEQ ID NO: 180659 - DNA, 25 bp, Canis familiaris
tccggaactagttcttctgggaatt

SEQ ID NO: 180660 - DNA, 25 bp, Canis familiaris
tcctgggtttctttcgtgggatttg

SEQ ID NO: 180661 - DNA, 25 bp, Canis familiaris
tcctcggtgtttttctctggttatt

SEQ ID NO: 180662 - DNA, 25 bp, Canis familiaris
tcctacgtgtttattgctgttgcta

SEQ ID NO: 180663 - DNA, 25 bp, Canis familiaris
tccttcgtgtattttctcgctggga

SEQ ID NO: 180664 - DNA, 25 bp, Canis familiaris
tccggcctgataacttccggccaga

SEQ ID NO: 180665 - DNA, 25 bp, Canis familiaris
tcctgtccgtcaatttccggcgaat

SEQ ID NO: 180666 - DNA, 25 bp, Canis familiaris
tccttctcctatgttccagagcaga

SEQ ID NO: 180667 - DNA, 25 bp, Canis familiaris
tccttctctcttgcttgcagtagaa

SEQ ID NO: 180668 - DNA, 25 bp, Canis familiaris
tccttcccttccttgggcagaataa

SEQ ID NO: 180669 - DNA, 25 bp, Canis familiaris
tcctggaccttttctggggattaat

SEQ ID NO: 180670 - DNA, 25 bp, Canis familiaris
tccgcgccactggtgaatagggatt

SEQ ID NO: 180671 - DNA, 25 bp, Canis familiaris
tccgcctgcctggtaaactgagttc

SEQ ID NO: 180672 - DNA, 25 bp, Canis familiaris
tcctctgctgcatttataaacgaga

SEQ ID NO: 180673 - DNA, 25 bp, Canis familiaris
tcctgctgctaacctagctccagga

SEQ ID NO: 180674 - DNA, 25 bp, Canis familiaris
tcctcctagagtatgcccaatcaat

SEQ ID NO: 180675 - DNA, 25 bp, Canis familiaris
tcctctcataggtggcccaaggcat

SEQ ID NO: 180676 - DNA, 25 bp, Canis familiaris
tcctctcatgaggaaggcacacaca

SEQ ID NO: 180677 - DNA, 25 bp, Canis familiaris
tccttctgcgagaagggccagaggg

SEQ ID NO: 180678 - DNA, 25 bp, Canis familiaris
tccttctgagagcccttggaggctg

SEQ ID NO: 180679 - DNA, 25 bp, Canis familiaris
tccttctcagagcctccaggatgag

SEQ ID NO: 180680 - DNA, 25 bp, Canis familiaris
tcctcactgaggtgccaggtgttga

SEQ ID NO: 180681 - DNA, 25 bp, Canis familiaris
tcgtcagcgggctttagggttaggg

SEQ ID NO: 180682 - DNA, 25 bp, Canis familiaris
tcctcaggcacctttcagggtgtag

SEQ ID NO: 180683 - DNA, 25 bp, Canis familiaris
tcctagcaaaatatgtgtggtggtt

SEQ ID NO: 180684 - DNA, 25 bp, Canis familiaris
tcctcaccaaatatgctgagcagct

SEQ ID NO: 180685 - DNA, 25 bp, Canis familiaris
tccttcacaactggctcatagactt

SEQ ID NO: 180686 - DNA, 25 bp, Canis familiaris
tccttcacaactagccttcagagat

SEQ ID NO: 180687 - DNA, 25 bp, Canis familiaris
tcctgtcagaatctgcctgccaaga

SEQ ID NO: 180688 - DNA, 25 bp, Canis familiaris
tcctgataaatgttgccttcctagt

SEQ ID NO: 180689 - DNA, 25 bp, Canis familiaris
tcctcaaggtaccacattcctcagg

SEQ ID NO: 180690 - DNA, 25 bp, Canis familiaris
tccttctgggagctcattcccatga

SEQ ID NO: 180691 - DNA, 25 bp, Canis familiaris
tccgttgtgtgccttattcctggaa

SEQ ID NO: 180692 - DNA, 25 bp, Canis familiaris
tcctcctgtgtggattcattccgga

SEQ ID NO: 180693 - DNA, 25 bp, Canis familiaris
tcctctttctggaatttatcctagg

SEQ ID NO: 180694 - DNA, 25 bp, Canis familiaris
tcctgtttctgggtgtttggtcggg

SEQ ID NO: 180695 - DNA, 25 bp, Canis familiaris
tcctctaagctgagttctagttgcg

SEQ ID NO: 180696 - DNA, 25 bp, Canis familiaris
tcctccaactggctgttagagtggc

SEQ ID NO: 180697 - DNA, 25 bp, Canis familiaris
tcctccctgctggggttttgtggta

SEQ ID NO: 180698 - DNA, 25 bp, Canis familiaris
tcctcttctgctggtgttttgtgag

SEQ ID NO: 180699 - DNA, 25 bp, Canis familiaris
tcctctttctacgatttttatgata

SEQ ID NO: 180700 - DNA, 25 bp, Canis familiaris
tcccctttctccatatttttaacag

SEQ ID NO: 180701 - DNA, 25 bp, Canis familiaris
tcccctttgggatgataatttgata

SEQ ID NO: 180702 - DNA, 25 bp, Canis familiaris
tcccctttgtggtgtgcttttgtga

SEQ ID NO: 180703 - DNA, 25 bp, Canis familiaris
tcccacttaggtttttcagttcctg

SEQ ID NO: 180704 - DNA, 25 bp, Canis familiaris
tcctcacctagacttggttggcctc

SEQ ID NO: 180705 - DNA, 25 bp, Canis familiaris
tcctgacccagactggtgcctgggt

SEQ ID NO: 180706 - DNA, 25 bp, Canis familiaris
tccgaccataaacgatgccgactgg

SEQ ID NO: 180707 - DNA, 25 bp, Canis familiaris
tccggggacaagctggtgtcgctgg

SEQ ID NO: 180708 - DNA, 25 bp, Canis familiaris
tccggaggagtacctagtgagctta

SEQ ID NO: 180709 - DNA, 25 bp, Canis familiaris
tccggagaaggatgtatgatggctt

SEQ ID NO: 180710 - DNA, 25 bp, Canis familiaris
tcctggggatggacatgtacatggt

SEQ ID NO: 180711 - DNA, 25 bp, Canis familiaris
tcctggtaagcatcttcatcttcct

SEQ ID NO: 180712 - DNA, 25 bp, Canis familiaris
tcctgaaaacaggccatctctctct

SEQ ID NO: 180713 - DNA, 25 bp, Canis familiaris
tccgaaggatgctgccatcttggcc

SEQ ID NO: 180714 - DNA, 25 bp, Canis familiaris
tcctgagtggagtccacctctgcac

SEQ ID NO: 180715 - DNA, 25 bp, Canis familiaris
tccgatgggaggcagctttgcacca

SEQ ID NO: 180716 - DNA, 25 bp, Canis familiaris
tcctggagggaggactctgtcccac

SEQ ID NO: 180717 - DNA, 25 bp, Canis familiaris
tcctagggctaggactcttctgttc

SEQ ID NO: 180718 - DNA, 25 bp, Canis familiaris
tccggaaccagttcctgtctttctc

SEQ ID NO: 180719 - DNA, 25 bp, Canis familiaris
tccgaggtccagagcctttagtcac

SEQ ID NO: 180720 - DNA, 25 bp, Canis familiaris
tcctcaggtaggagctctttgatgt

SEQ ID NO: 180721 - DNA, 25 bp, Canis familiaris
tcctcgcgttctgagcattcttgaa

SEQ ID NO: 180722 - DNA, 25 bp, Canis familiaris
tcctctggattccttcatcgatgtc

SEQ ID NO: 180723 - DNA, 25 bp, Canis familiaris
tcctctagccaaagtcatccatgac

SEQ ID NO: 180724 - DNA, 25 bp, Canis familiaris
tcctcataccacagtcttctggaaa

SEQ ID NO: 180725 - DNA, 25 bp, Canis familiaris
tcctcacaccagtgacgcttgtgaa

SEQ ID NO: 180726 - DNA, 25 bp, Canis familiaris
tcctcaccagggccacctgggaagt

SEQ ID NO: 180727 - DNA, 25 bp, Canis familiaris
tcctacatcagactccctgtgagaa

SEQ ID NO: 180728 - DNA, 25 bp, Canis familiaris
tccttcacgcctatagtattctcat

SEQ ID NO: 180729 - DNA, 25 bp, Canis familiaris
tccttcaccctgggggactcatgat

SEQ ID NO: 180730 - DNA, 25 bp, Canis familiaris
tcctcatcaccactgtcggggtggt

SEQ ID NO: 180731 - DNA, 25 bp, Canis familiaris
tcctcaaccgcgtcaacgacgaggt

SEQ ID NO: 180732 - DNA, 25 bp, Canis familiaris
tcctcaacttggtggctgactttgc

SEQ ID NO: 180733 - DNA, 25 bp, Canis familiaris
tcctgtacttggtgacaaaccccaa

SEQ ID NO: 180734 - DNA, 25 bp, Canis familiaris
tccgttgctttggtccaagacccac

SEQ ID NO: 180735 - DNA, 25 bp, Canis familiaris
tcgcatggggtgagtcccaacgcca

SEQ ID NO: 180736 - DNA, 25 bp, Canis familiaris
tcctgaatgggaaccccagacctgc

SEQ ID NO: 180737 - DNA, 25 bp, Canis familiaris
tcctgaatttcaaccactggacccc

SEQ ID NO: 180738 - DNA, 25 bp, Canis familiaris
tcctggctcttgtggacggacagcc

SEQ ID NO: 180739 - DNA, 25 bp, Canis familiaris
tcctcacagccagcgtcaaggaagc

SEQ ID NO: 180740 - DNA, 25 bp, Canis familiaris
tcccgatccaggtctcggagcaaag

SEQ ID NO: 180741 - DNA, 25 bp, Canis familiaris
tcccagacctcacccggaaactggg

SEQ ID NO: 180742 - DNA, 25 bp, Canis familiaris
tcctaaccccggaaaaggctgtgtg

SEQ ID NO: 180743 - DNA, 25 bp, Canis familiaris
tcctgaactcctgtgaagaagactt

SEQ ID NO: 180744 - DNA, 25 bp, Canis familiaris
tcctcaaccttcctgaagaaggtgt

SEQ ID NO: 180745 - DNA, 25 bp, Canis familiaris
tcctcccctgacctgaagaaaagta

SEQ ID NO: 180746 - DNA, 25 bp, Canis familiaris
tcctcccaccacgaaagtaatcaat

SEQ ID NO: 180747 - DNA, 25 bp, Canis familiaris
tcctacccagcgttacgtcaatcaa

SEQ ID NO: 180748 - DNA, 25 bp, Canis familiaris
tccttaccacgctcatttagacatc

SEQ ID NO: 180749 - DNA, 25 bp, Canis familiaris
tcctttcgccacttatgtaaagctt

SEQ ID NO: 180750 - DNA, 25 bp, Canis familiaris
tcctgtatcccatttcgttgcatac

SEQ ID NO: 180751 - DNA, 25 bp, Canis familiaris
tcctgtttgccatcctgaggatcca

SEQ ID NO: 180752 - DNA, 25 bp, Canis familiaris
tccgtgggcagctacatctacgaca

SEQ ID NO: 180753 - DNA, 25 bp, Canis familiaris
tcctgatggagattaatcccttcat

SEQ ID NO: 180754 - DNA, 25 bp, Canis familiaris
tcctagtgaattaatgcccttcatt

SEQ ID NO: 180755 - DNA, 25 bp, Canis familiaris
tcctaggaatagcatgccgatttaa

SEQ ID NO: 180756 - DNA, 25 bp, Canis familiaris
tccggtgagtagatgcagcctatta

SEQ ID NO: 180757 - DNA, 25 bp, Canis familiaris
tcctgggaaggaatgagagctttca

SEQ ID NO: 180758 - DNA, 25 bp, Canis familiaris
tcctgccgaggattattagcttcta

SEQ ID NO: 180759 - DNA, 25 bp, Canis familiaris
tcctctcggtgtacttcataattac

SEQ ID NO: 180760 - DNA, 25 bp, Canis familiaris
tcctttggctttgtcatactttctg

SEQ ID NO: 180761 - DNA, 25 bp, Canis familiaris
tcctcctttcttgactacttttgga

SEQ ID NO: 180762 - DNA, 25 bp, Canis familiaris
tcctctttgtttcaaactctggggc

SEQ ID NO: 180763 - DNA, 25 bp, Canis familiaris
tccttttttttttatctgcatgtct

SEQ ID NO: 180764 - DNA, 25 bp, Canis familiaris
tccttttttttgcagctgacagctt

SEQ ID NO: 180765 - DNA, 25 bp, Canis familiaris
tcctttttccttcagctatctatgg

SEQ ID NO: 180766 - DNA, 25 bp, Canis familiaris
tcctagtcttcccaaatgtttctgg

SEQ ID NO: 180767 - DNA, 25 bp, Canis familiaris
tccggctttccctaatggaattcgg

SEQ ID NO: 180768 - DNA, 25 bp, Canis familiaris
tcctggcctgtccttcagggaattc

SEQ ID NO: 180769 - DNA, 25 bp, Canis familiaris
tcctggcgtgtcctcttatagaagg

SEQ ID NO: 180770 - DNA, 25 bp, Canis familiaris
tcctgaccgtagctatgaatgatcg

SEQ ID NO: 180771 - DNA, 25 bp, Canis familiaris
tcctagtcctggaaatgacaactgt

SEQ ID NO: 180772 - DNA, 25 bp, Canis familiaris
tcctaccgtggaatattctacagtc

SEQ ID NO: 180773 - DNA, 25 bp, Canis familiaris
tcctaacgggatacagtctctctgt

SEQ ID NO: 180774 - DNA, 25 bp, Canis familiaris
tcctgtgacgggaactgtgtcttca

SEQ ID NO: 180775 - DNA, 25 bp, Canis familiaris
tcctcatactaccaccttgtttgaa

SEQ ID NO: 180776 - DNA, 25 bp, Canis familiaris
tcctcaaccacgacatctttttatt

SEQ ID NO: 180777 - DNA, 25 bp, Canis familiaris
tcctaacgatcttctgctttgttca

SEQ ID NO: 180778 - DNA, 25 bp, Canis familiaris
tcctgaaccacttccaacatttatg

SEQ ID NO: 180779 - DNA, 25 bp, Canis familiaris
tcctgcctgccaagagctcaaatgt

SEQ ID NO: 180780 - DNA, 25 bp, Canis familiaris
tcctggcctgcaagcacgagcagca

SEQ ID NO: 180781 - DNA, 25 bp, Canis familiaris
tcctcgagctcaacatgcgacgtga

SEQ ID NO: 180782 - DNA, 25 bp, Canis familiaris
tcctgccacttgacaggtcctgatc

SEQ ID NO: 180783 - DNA, 25 bp, Canis familiaris
tcctgccactgcggcagttcactga

SEQ ID NO: 180784 - DNA, 25 bp, Canis familiaris
tcctgcgcctgaggggtggtatgca

SEQ ID NO: 180785 - DNA, 25 bp, Canis familiaris
tcctgcaggctgaaagtattaatga

SEQ ID NO: 180786 - DNA, 25 bp, Canis familiaris
tcctgcctctgacagctatctttaa

SEQ ID NO: 180787 - DNA, 25 bp, Canis familiaris
tcctccacatggtactacttaacac

SEQ ID NO: 180788 - DNA, 25 bp, Canis familiaris
tcctcccagcgcttctacaaggaga

SEQ ID NO: 180789 - DNA, 25 bp, Canis familiaris
tcctttcatgctccttcagaaacag

SEQ ID NO: 180790 - DNA, 25 bp, Canis familiaris
tcctactcttgacttgccattgaaa

SEQ ID NO: 180791 - DNA, 25 bp, Canis familiaris
tcctcactgctttttccttgggagg

SEQ ID NO: 180792 - DNA, 25 bp, Canis familiaris
tcctactgtatgccttcagcttggg

SEQ ID NO: 180793 - DNA, 25 bp, Canis familiaris
tccgacattcatgttctgtcaggag

SEQ ID NO: 180794 - DNA, 25 bp, Canis familiaris
tccgatgctttgtatcattcttgag

SEQ ID NO: 180795 - DNA, 25 bp, Canis familiaris
tccgagtctggaactctcagctcat

SEQ ID NO: 180796 - DNA, 25 bp, Canis familiaris
tcctggcctggaacatgcaagcatt

SEQ ID NO: 180797 - DNA, 25 bp, Canis familiaris
tcctgggcagacttcaacaatgttg

SEQ ID NO: 180798 - DNA, 25 bp, Canis familiaris
tcctctgagcatttccatgacactt

SEQ ID NO: 180799 - DNA, 25 bp, Canis familiaris
tcctctgagaacatgcacacacaca

SEQ ID NO: 180800 - DNA, 25 bp, Canis familiaris
tctatgctggcatcagagctgaagc

SEQ ID NO: 180801 - DNA, 25 bp, Canis familiaris
tcctcatctgctccaagctgaaggc

SEQ ID NO: 180802 - DNA, 25 bp, Canis familiaris
tcctcatcatcgccatggtcaagat

SEQ ID NO: 180803 - DNA, 25 bp, Canis familiaris
tcctctgctcagccatgatgtcagt

SEQ ID NO: 180804 - DNA, 25 bp, Canis familiaris
tcctctccggttgcagtagtcaggt

SEQ ID NO: 180805 - DNA, 25 bp, Canis familiaris
tcctcaccggctgctcggaataggg

SEQ ID NO: 180806 - DNA, 25 bp, Canis familiaris
tcctactccgtgatcgctgatatca

SEQ ID NO: 180807 - DNA, 25 bp, Canis familiaris
tcctcacccgaaactgctaactcgg

SEQ ID NO: 180808 - DNA, 25 bp, Canis familiaris
tcctctcccaaaacgttgacctgag

SEQ ID NO: 180809 - DNA, 25 bp, Canis familiaris
tcctgtcctccacagtggtgacttc

SEQ ID NO: 180810 - DNA, 25 bp, Canis familiaris
tcctctagcccacagtatgtactta

SEQ ID NO: 180811 - DNA, 25 bp, Canis familiaris
tcctagcctccggagtatctattta

SEQ ID NO: 180812 - DNA, 25 bp, Canis familiaris
tcctagcctccggagtatctattac

SEQ ID NO: 180813 - DNA, 25 bp, Canis familiaris
tcctagcctccggagtatctattac

SEQ ID NO: 180814 - DNA, 25 bp, Canis familiaris
tcctagcctccggagtatctattac

SEQ ID NO: 180815 - DNA, 25 bp, Canis familiaris
tcctagcctccggagtatctattac

SEQ ID NO: 180816 - DNA, 25 bp, Canis familiaris
tcctagcctccggagtatctattac

SEQ ID NO: 180817 - DNA, 25 bp, Canis familiaris
tcctagcctccggagtatctattac

SEQ ID NO: 180818 - DNA, 25 bp, Canis familiaris
tcctagcctccggagtatctattac

SEQ ID NO: 180819 - DNA, 25 bp, Canis familiaris
tcctacttcttggaaactttacttg

SEQ ID NO: 180820 - DNA, 25 bp, Canis familiaris
tcctaatctcttgttacttattttg

SEQ ID NO: 180821 - DNA, 25 bp, Canis familiaris
tcctaatttttcttctgtttttctg

SEQ ID NO: 180822 - DNA, 25 bp, Canis familiaris
tcctaagtcttttgtctattctttt

SEQ ID NO: 180823 - DNA, 25 bp, Canis familiaris
tcctaagatttttgtcttgtctcat

SEQ ID NO: 180824 - DNA, 25 bp, Canis familiaris
tcctactgagtttgagtcttctctc

SEQ ID NO: 180825 - DNA, 25 bp, Canis familiaris
tcctgtgtagtatgtgcttttcttt

SEQ ID NO: 180826 - DNA, 25 bp, Canis familiaris
tcctggtcacaattgagaatttctt

SEQ ID NO: 180827 - DNA, 25 bp, Canis familiaris
tcctcagcctcatgggacatactgc

SEQ ID NO: 180828 - DNA, 25 bp, Canis familiaris
tcctcagctctcacagggaagcatg

SEQ ID NO: 180829 - DNA, 25 bp, Canis familiaris
tcctagcaccatgaagatcaagatc

SEQ ID NO: 180830 - DNA, 25 bp, Canis familiaris
tcctagcaccatgaagatcaagatc

SEQ ID NO: 180831 - DNA, 25 bp, Canis familiaris
tcctactcctcctagaatgaaccgg

SEQ ID NO: 180832 - DNA, 25 bp, Canis familiaris
tcctcctcttcctcggagaacaagg

SEQ ID NO: 180833 - DNA, 25 bp, Canis familiaris
tccgaattctccccgagaaacgaga

SEQ ID NO: 180834 - DNA, 25 bp, Canis familiaris
tcctgacttccctggaggttctaga

SEQ ID NO: 180835 - DNA, 25 bp, Canis familiaris
tcctggtgcccctggtaatgttggc

SEQ ID NO: 180836 - DNA, 25 bp, Canis familiaris
tcctgtctacccatggtgttggtgt

SEQ ID NO: 180837 - DNA, 25 bp, Canis familiaris
tcctcgtcacccttgtggtatggag

SEQ ID NO: 180838 - DNA, 25 bp, Canis familiaris
tcctcagacccgacttgtcgaggga

SEQ ID NO: 180839 - DNA, 25 bp, Canis familiaris
tcctagacgccgacgtgtgtagaga

SEQ ID NO: 180840 - DNA, 25 bp, Canis familiaris
tcctatgagagggcccggctggaga

SEQ ID NO: 180841 - DNA, 25 bp, Canis familiaris
tcctagagaggtccgggctgggagc

SEQ ID NO: 180842 - DNA, 25 bp, Canis familiaris
tcctagagagggccgggctggagct

SEQ ID NO: 180843 - DNA, 25 bp, Canis familiaris
tcctcggggaggggacggagcctca

SEQ ID NO: 180844 - DNA, 25 bp, Canis familiaris
tcctcgtggggaacaagtgtgacct

SEQ ID NO: 180845 - DNA, 25 bp, Canis familiaris
tcctcgtgctggccaacaagcagga

SEQ ID NO: 180846 - DNA, 25 bp, Canis familiaris
tcctcgtcacgcgcagcatggagga

SEQ ID NO: 180847 - DNA, 25 bp, Canis familiaris
tcctactcactgcacatgctggagg

SEQ ID NO: 180848 - DNA, 25 bp, Canis familiaris
tcctacacctgccagtcagtgtgga

SEQ ID NO: 180849 - DNA, 25 bp, Canis familiaris
tccgatcatccacgcaggtgtttga

SEQ ID NO: 180850 - DNA, 25 bp, Canis familiaris
tccgtgatatcactagttgttatgt

SEQ ID NO: 180851 - DNA, 25 bp, Canis familiaris
tcctggattccttttattttctctc

SEQ ID NO: 180852 - DNA, 25 bp, Canis familiaris
tcctggaattctttcattacccttc

SEQ ID NO: 180853 - DNA, 25 bp, Canis familiaris
tcctgataatttcttttgcggttcc

SEQ ID NO: 180854 - DNA, 25 bp, Canis familiaris
tcctagacgtctctctttggtggat

SEQ ID NO: 180855 - DNA, 25 bp, Canis familiaris
tcctatgcccttcatttgctggggt

SEQ ID NO: 180856 - DNA, 25 bp, Canis familiaris
tcctcagtcccggactcgtgaggtt

SEQ ID NO: 180857 - DNA, 25 bp, Canis familiaris
tcctcatggtcctgagccttgatgg

SEQ ID NO: 180858 - DNA, 25 bp, Canis familiaris
tcctcatgagctgcgtggcttgtga

SEQ ID NO: 180859 - DNA, 25 bp, Canis familiaris
tcctgagacttgcccagctttgaga

SEQ ID NO: 180860 - DNA, 25 bp, Canis familiaris
tccggtggtgctgactttagacaac

SEQ ID NO: 180861 - DNA, 25 bp, Canis familiaris
tcacggtcggttgtggctcagtaga

SEQ ID NO: 180862 - DNA, 25 bp, Canis familiaris
tccggaggagatgcttaccatgtag

SEQ ID NO: 180863 - DNA, 25 bp, Canis familiaris
tccgcaagtagttcagtaccgctca

SEQ ID NO: 180864 - DNA, 25 bp, Canis familiaris
tccgaagtggtgtcacccagtgcca

SEQ ID NO: 180865 - DNA, 25 bp, Canis familiaris
tcctgaggtgttcagtccacgcgaa

SEQ ID NO: 180866 - DNA, 25 bp, Canis familiaris
tcctgcagaatgttctcaacaacca

SEQ ID NO: 180867 - DNA, 25 bp, Canis familiaris
tcctgcagcttggttcataccacac

SEQ ID NO: 180868 - DNA, 25 bp, Canis familiaris
tcctcattgctgcgatcatgtccaa

SEQ ID NO: 180869 - DNA, 25 bp, Canis familiaris
tcctcatggcttctgcaatgcatca

SEQ ID NO: 180870 - DNA, 25 bp, Canis familiaris
tcctgcaggcaccactggatgatgc

SEQ ID NO: 180871 - DNA, 25 bp, Canis familiaris
tcctgtggaccacgcagcatatggg

SEQ ID NO: 180872 - DNA, 25 bp, Canis familiaris
tcctgggcaagcccagcttcagcct

SEQ ID NO: 180873 - DNA, 25 bp, Canis familiaris
tcctgggccaagtcaggctaccagc

SEQ ID NO: 180874 - DNA, 25 bp, Canis familiaris
tccgtgcccagtggcatgtcgaggg

SEQ ID NO: 180875 - DNA, 25 bp, Canis familiaris
tccggaccagggctccaagtggtcc

SEQ ID NO: 180876 - DNA, 25 bp, Canis familiaris
tcctgggcgcggaggccagagtgag

SEQ ID NO: 180877 - DNA, 25 bp, Canis familiaris
tcctggcgaccgtgagggcggagtg

SEQ ID NO: 180878 - DNA, 25 bp, Canis familiaris
tcctgaggcccctggggcatgcagg

SEQ ID NO: 180879 - DNA, 25 bp, Canis familiaris
tcctgggcacccagaggacttacca

SEQ ID NO: 180880 - DNA, 25 bp, Canis familiaris
tccggtaccagcaaggcgttgtgac

SEQ ID NO: 180881 - DNA, 25 bp, Canis familiaris
tccggtcctgagggggctttgatga

SEQ ID NO: 180882 - DNA, 25 bp, Canis familiaris
tccgtgtccaagagcacgcagtttg

SEQ ID NO: 180883 - DNA, 25 bp, Canis familiaris
tccgatttcagatacttgcatgttg

SEQ ID NO: 180884 - DNA, 25 bp, Canis familiaris
tccgttgtctgctgcctaaggagga

SEQ ID NO: 180885 - DNA, 25 bp, Canis familiaris
tccgtctgacgctgaggaccaagga

SEQ ID NO: 180886 - DNA, 25 bp, Canis familiaris
tccgactgtgaataaaccaagcatc

SEQ ID NO: 180887 - DNA, 25 bp, Canis familiaris
tcctgagctctgaggaccccaggac

SEQ ID NO: 180888 - DNA, 25 bp, Canis familiaris
tcctagagtggggagcctccctggc

SEQ ID NO: 180889 - DNA, 25 bp, Canis familiaris
tcctaggtggggctcaatccttgcc

SEQ ID NO: 180890 - DNA, 25 bp, Canis familiaris
tccggtgggggtcagacacttccgg

SEQ ID NO: 180891 - DNA, 25 bp, Canis familiaris
tccgggggtggaaggaacctctgca

SEQ ID NO: 180892 - DNA, 25 bp, Canis familiaris
tcccgtgcggtccaggagaactttc

SEQ ID NO: 180893 - DNA, 25 bp, Canis familiaris
tcccgttggtcgcgatgattttcta

SEQ ID NO: 180894 - DNA, 25 bp, Canis familiaris
tcctcgttcgtgggcgagttcttca

SEQ ID NO: 180895 - DNA, 25 bp, Canis familiaris
tcctcgtactgagccaggattccca

SEQ ID NO: 180896 - DNA, 25 bp, Canis familiaris
tccggaatcgaaccctgattccccg

SEQ ID NO: 180897 - DNA, 25 bp, Canis familiaris
tccgacgacgaagctttttcctcga

SEQ ID NO: 180898 - DNA, 25 bp, Canis familiaris
tcctgacgacacccactttgtgtcc

SEQ ID NO: 180899 - DNA, 25 bp, Canis familiaris
tcctgcataacatctccttttggca

SEQ ID NO: 180900 - DNA, 25 bp, Canis familiaris
tccgtgaatttcaaagttagacatt

SEQ ID NO: 180901 - DNA, 25 bp, Canis familiaris
tcctccaacttttattgcaaacatt

SEQ ID NO: 180902 - DNA, 25 bp, Canis familiaris
tcctctccatgcatgttcatacata

SEQ ID NO: 180903 - DNA, 25 bp, Canis familiaris
tcctcatccagatttaagacattct

SEQ ID NO: 180904 - DNA, 25 bp, Canis familiaris
tcctgcacaaattctaaacctgttt

SEQ ID NO: 180905 - DNA, 25 bp, Canis familiaris
tcctcgacaatattaaacctctttc

SEQ ID NO: 180906 - DNA, 25 bp, Canis familiaris
tcctctagttttataccctttcgat

SEQ ID NO: 180907 - DNA, 25 bp, Canis familiaris
tcctctttttctgaagctactttct

SEQ ID NO: 180908 - DNA, 25 bp, Canis familiaris
tcctgcttttcttcgaagttttctc

SEQ ID NO: 180909 - DNA, 25 bp, Canis familiaris
tcctgttttgctccggaaagtaatc

SEQ ID NO: 180910 - DNA, 25 bp, Canis familiaris
tcctcttttgctccaggcacagagg

SEQ ID NO: 180911 - DNA, 25 bp, Canis familiaris
tcctcactggtccagaccacagggg

SEQ ID NO: 180912 - DNA, 25 bp, Canis familiaris
tcctcagggtgccagattcctgttc

SEQ ID NO: 180913 - DNA, 25 bp, Canis familiaris
tcctgggggccattgcccattatgc

SEQ ID NO: 180914 - DNA, 25 bp, Canis familiaris
tcctggggtgtgtgcacactgtccc

SEQ ID NO: 180915 - DNA, 25 bp, Canis familiaris
tcctggcttatggaggacctgttcc

SEQ ID NO: 180916 - DNA, 25 bp, Canis familiaris
tcctgaccgagcgtggctacagctt

SEQ ID NO: 180917 - DNA, 25 bp, Canis familiaris
tcctgaagctggcctgtgcagacac

SEQ ID NO: 180918 - DNA, 25 bp, Canis familiaris
tcctgaagctggtgtgccgacaagc

SEQ ID NO: 180919 - DNA, 25 bp, Canis familiaris
tcctgagactggtggccgacagcaa

SEQ ID NO: 180920 - DNA, 25 bp, Canis familiaris
tccgagaagtgttgaccagaccagg

SEQ ID NO: 180921 - DNA, 25 bp, Canis familiaris
tcctgcagggattatgccgcgaccc

SEQ ID NO: 180922 - DNA, 25 bp, Canis familiaris
tcctctgcggctgaacagctggcac

SEQ ID NO: 180923 - DNA, 25 bp, Canis familiaris
tcctgtccctaaccattgacactac

SEQ ID NO: 180924 - DNA, 25 bp, Canis familiaris
tcctacccacggccatgtgaaaaag

SEQ ID NO: 180925 - DNA, 25 bp, Canis familiaris
tcctacccagtgctcattacaacac

SEQ ID NO: 180926 - DNA, 25 bp, Canis familiaris
tcctcccagggttcattacaacacc

SEQ ID NO: 180927 - DNA, 25 bp, Canis familiaris
tccccgagaagccaaataaaccgtg

SEQ ID NO: 180928 - DNA, 25 bp, Canis familiaris
tccgccgaagcccaataaatacctt

SEQ ID NO: 180929 - DNA, 25 bp, Canis familiaris
tccgcagccaaggcctaactatgct

SEQ ID NO: 180930 - DNA, 25 bp, Canis familiaris
tccgactacctcctagttatctaac

SEQ ID NO: 180931 - DNA, 25 bp, Canis familiaris
tcctgtcctcctatattgtactaac

SEQ ID NO: 180932 - DNA, 25 bp, Canis familiaris
tcctctttccagtcttttatctaga

SEQ ID NO: 180933 - DNA, 25 bp, Canis familiaris
tcctctcttgtattttttctttgaa

SEQ ID NO: 180934 - DNA, 25 bp, Canis familiaris
tcctctgtagtgtatctatttattg

SEQ ID NO: 180935 - DNA, 25 bp, Canis familiaris
tcctctgcaagtccatctatgttgt

SEQ ID NO: 180936 - DNA, 25 bp, Canis familiaris
tcctctgaactctacattatatggc

SEQ ID NO: 180937 - DNA, 25 bp, Canis familiaris
tcctcttgaacatcactatcatgac

SEQ ID NO: 180938 - DNA, 25 bp, Canis familiaris
tcctctggctcctgagtacaggcac

SEQ ID NO: 180939 - DNA, 25 bp, Canis familiaris
tcctgggattctggaatcacgccct

SEQ ID NO: 180940 - DNA, 25 bp, Canis familiaris
tttctggcactggagttagcccgct

SEQ ID NO: 180941 - DNA, 25 bp, Canis familiaris
tttcccagcaccaagtaggccaggt

SEQ ID NO: 180942 - DNA, 25 bp, Canis familiaris
tcctcccgcaatgatgccagggcag

SEQ ID NO: 180943 - DNA, 25 bp, Canis familiaris
tcctgccctcaagactgggagcagc

SEQ ID NO: 180944 - DNA, 25 bp, Canis familiaris
tcctccaatccacactgaacaaact

SEQ ID NO: 180945 - DNA, 25 bp, Canis familiaris
tcctccaaacatcactcagttcaac

SEQ ID NO: 180946 - DNA, 25 bp, Canis familiaris
tcctcccggacatctagtcaatgac

SEQ ID NO: 180947 - DNA, 25 bp, Canis familiaris
tcctcccactgtttgctggataata

SEQ ID NO: 180948 - DNA, 25 bp, Canis familiaris
tcctctctccttacgtgaattacat

SEQ ID NO: 180949 - DNA, 25 bp, Canis familiaris
tcctctccttgaagcttattgtcac

SEQ ID NO: 180950 - DNA, 25 bp, Canis familiaris
tcctcttgttatcttgctcagacac

SEQ ID NO: 180951 - DNA, 25 bp, Canis familiaris
tcctcttttgatcgtatgccatata

SEQ ID NO: 180952 - DNA, 25 bp, Canis familiaris
tcctctctgtggcagtttcatattt

SEQ ID NO: 180953 - DNA, 25 bp, Canis familiaris
tcctcattgcttccagggtcatttt

SEQ ID NO: 180954 - DNA, 25 bp, Canis familiaris
tcctcattgctaccagagtgtgtaa

SEQ ID NO: 180955 - DNA, 25 bp, Canis familiaris
tcctcttcacattcgctgtgtgttc

SEQ ID NO: 180956 - DNA, 25 bp, Canis familiaris
tcctcattccatgctggggattcag

SEQ ID NO: 180957 - DNA, 25 bp, Canis familiaris
tcctcattgtatattggctgttagt

SEQ ID NO: 180958 - DNA, 25 bp, Canis familiaris
tcctctttactttgtcttctaacac

SEQ ID NO: 180959 - DNA, 25 bp, Canis familiaris
tcctctttagttttctccttaatgc

SEQ ID NO: 180960 - DNA, 25 bp, Canis familiaris
tcctcttttttttgatactgtctac

SEQ ID NO: 180961 - DNA, 25 bp, Canis familiaris
tcctctttttctcatgatcagtctt

SEQ ID NO: 180962 - DNA, 25 bp, Canis familiaris
tcccttttatgctggatcccattta

SEQ ID NO: 180963 - DNA, 25 bp, Canis familiaris
tccctgttcctaaggtcccaaatgc

SEQ ID NO: 180964 - DNA, 25 bp, Canis familiaris
tcctgctgttcctgtggtgcccata

SEQ ID NO: 180965 - DNA, 25 bp, Canis familiaris
tcctggcttaacctggctccagata

SEQ ID NO: 180966 - DNA, 25 bp, Canis familiaris
tcctcctttcacatgtgtccatgat

SEQ ID NO: 180967 - DNA, 25 bp, Canis familiaris
tcctctcttgacttttccaaatcaa

SEQ ID NO: 180968 - DNA, 25 bp, Canis familiaris
tcctcattgtgtccttctagaacat

SEQ ID NO: 180969 - DNA, 25 bp, Canis familiaris
tcctgcagctatacccggagaactc

SEQ ID NO: 180970 - DNA, 25 bp, Canis familiaris
tcctgcatcagctttcctgggaaga

SEQ ID NO: 180971 - DNA, 25 bp, Canis familiaris
tccgtcgttttctctgacgttttca

SEQ ID NO: 180972 - DNA, 25 bp, Canis familiaris
tccggggttgacactgtatttttca

SEQ ID NO: 180973 - DNA, 25 bp, Canis familiaris
tccgggcggtggatccaatttttca

SEQ ID NO: 180974 - DNA, 25 bp, Canis familiaris
tccggaggagggaaccctcacctct

SEQ ID NO: 180975 - DNA, 25 bp, Canis familiaris
tccggacgggaaagaccacgagctc

SEQ ID NO: 180976 - DNA, 25 bp, Canis familiaris
tccggatctgggtgtgccgacagaa

SEQ ID NO: 180977 - DNA, 25 bp, Canis familiaris
tcctggcttggcctgggctaataga

SEQ ID NO: 180978 - DNA, 25 bp, Canis familiaris
tcctgccattatacttgccgaaaga

SEQ ID NO: 180979 - DNA, 25 bp, Canis familiaris
tcctgtcctcaagctccttataaaa

SEQ ID NO: 180980 - DNA, 25 bp, Canis familiaris
tcctgatcccaaagccctggaatga

SEQ ID NO: 180981 - DNA, 25 bp, Canis familiaris
tcctgcacacaggaagtcctgccct

SEQ ID NO: 180982 - DNA, 25 bp, Canis familiaris
tcctgacagcagtggtccagcgtgt

SEQ ID NO: 180983 - DNA, 25 bp, Canis familiaris
tcctcctcgagtcctcgagctgtga

SEQ ID NO: 180984 - DNA, 25 bp, Canis familiaris
tcctctcgtatgcctctcggaggat

SEQ ID NO: 180985 - DNA, 25 bp, Canis familiaris
tcctctcactgaaagcgggggtcac

SEQ ID NO: 180986 - DNA, 25 bp, Canis familiaris
tcctctcctgaatcggggatgacag

SEQ ID NO: 180987 - DNA, 25 bp, Canis familiaris
tcctctcctgagtcatggtgggttc

SEQ ID NO: 180988 - DNA, 25 bp, Canis familiaris
tccccacggcctgtgagagattcta

SEQ ID NO: 180989 - DNA, 25 bp, Canis familiaris
tcctcagcaggggcccgaggtacaa

SEQ ID NO: 180990 - DNA, 25 bp, Canis familiaris
tcctccaggaggccctcaggaggcc

SEQ ID NO: 180991 - DNA, 25 bp, Canis familiaris
tcctctcaggggtcagctcaggaga

SEQ ID NO: 180992 - DNA, 25 bp, Canis familiaris
tcctctcaggggcatgatcaggggg

SEQ ID NO: 180993 - DNA, 25 bp, Canis familiaris
tcctctcctggacgttaggttggtc

SEQ ID NO: 180994 - DNA, 25 bp, Canis familiaris
tcacccctggggaggtttgagacct

SEQ ID NO: 180995 - DNA, 25 bp, Canis familiaris
tccggtggaaggcgttttgagacca

SEQ ID NO: 180996 - DNA, 25 bp, Canis familiaris
tcggtttacaggcggccatcggatc

SEQ ID NO: 180997 - DNA, 25 bp, Canis familiaris
tcgttttaagagtcacccaaggtgc

SEQ ID NO: 180998 - DNA, 25 bp, Canis familiaris
tcctctgtcccagggacccaaggtc

SEQ ID NO: 180999 - DNA, 25 bp, Canis familiaris
tcctgttctccgagacgctgagaga

SEQ ID NO: 181000 - DNA, 25 bp, Canis familiaris
tcctctacataccttggcctgaagg

SEQ ID NO: 181001 - DNA, 25 bp, Canis familiaris
tcctcttattcacttgctactagca

SEQ ID NO: 181002 - DNA, 25 bp, Canis familiaris
tcctcttctatcttctgttatacat

SEQ ID NO: 181003 - DNA, 25 bp, Canis familiaris
tcctctgtctgaaatgctgttccct

SEQ ID NO: 181004 - DNA, 25 bp, Canis familiaris
tcctctgtggagctttccaactggc

SEQ ID NO: 181005 - DNA, 25 bp, Canis familiaris
tcctctgggagaccttcagcttagg

SEQ ID NO: 181006 - DNA, 25 bp, Canis familiaris
tcctctgaatagtcctctctggtag

SEQ ID NO: 181007 - DNA, 25 bp, Canis familiaris
tcctctgtcataactcagctctgga

SEQ ID NO: 181008 - DNA, 25 bp, Canis familiaris
tcctctggctacacatcagtctgaa

SEQ ID NO: 181009 - DNA, 25 bp, Canis familiaris
tcctcttcatggctatcagtctagg

SEQ ID NO: 181010 - DNA, 25 bp, Canis familiaris
tcctctgtctcgcattgagttgggc

SEQ ID NO: 181011 - DNA, 25 bp, Canis familiaris
tcctctggctgaccattgagctagc

SEQ ID NO: 181012 - DNA, 25 bp, Canis familiaris
tcctgggcatgaacatgtgaccctg

SEQ ID NO: 181013 - DNA, 25 bp, Canis familiaris
tcctggcaggcactgtggacaccca

SEQ ID NO: 181014 - DNA, 25 bp, Canis familiaris
tcctccagtgcaccagtgcataccc

SEQ ID NO: 181015 - DNA, 25 bp, Canis familiaris
tcctggcaggcacagtggacaccca

SEQ ID NO: 181016 - DNA, 25 bp, Canis familiaris
tcctgtcggagctgctggaatcggg

SEQ ID NO: 181017 - DNA, 25 bp, Canis familiaris
tcctggccattgagcggtacgtggg

SEQ ID NO: 181018 - DNA, 25 bp, Canis familiaris
tcctggcaccgagcacgtagaggtg

SEQ ID NO: 181019 - DNA, 25 bp, Canis familiaris
tcctgggatcgagttctgcatcggg

SEQ ID NO: 181020 - DNA, 25 bp, Canis familiaris
tcctcaggccatattctcacaaggg

SEQ ID NO: 181021 - DNA, 25 bp, Canis familiaris
tcctcaggctgatttttgagaagaa

SEQ ID NO: 181022 - DNA, 25 bp, Canis familiaris
tcctcaggcctgaccttgggaaaag

SEQ ID NO: 181023 - DNA, 25 bp, Canis familiaris
tccgaagccttcggtgtttacaagg

SEQ ID NO: 181024 - DNA, 25 bp, Canis familiaris
tccgaagacctacgttcttaaggtg

SEQ ID NO: 181025 - DNA, 25 bp, Canis familiaris
tccgaaaacaacgtgtcttccaggg

SEQ ID NO: 181026 - DNA, 25 bp, Canis familiaris
tcctgaggaacatgcgctttgccaa

SEQ ID NO: 181027 - DNA, 25 bp, Canis familiaris
tcctggagaccatggcttgatggac

SEQ ID NO: 181028 - DNA, 25 bp, Canis familiaris
tcctggaactcctagatcatgatct

SEQ ID NO: 181029 - DNA, 25 bp, Canis familiaris
tcctggaacagtgagctagagctaa

SEQ ID NO: 181030 - DNA, 25 bp, Canis familiaris
tcctgagcacactgccacagaacaa

SEQ ID NO: 181031 - DNA, 25 bp, Canis familiaris
tccgagcacatgtagccactgagat

SEQ ID NO: 181032 - DNA, 25 bp, Canis familiaris
tcctgacatctgcaatgacatggat

SEQ ID NO: 181033 - DNA, 25 bp, Canis familiaris
tccgtcatgtggtctgaaggagcat

SEQ ID NO: 181034 - DNA, 25 bp, Canis familiaris
tcctgaatttacaaacggcatcttt

SEQ ID NO: 181035 - DNA, 25 bp, Canis familiaris
tcctctattaacacacctgatcatt

SEQ ID NO: 181036 - DNA, 25 bp, Canis familiaris
tcctctttaacatcctcaatgttta

SEQ ID NO: 181037 - DNA, 25 bp, Canis familiaris
tcctgctttacatacctgtttctta

SEQ ID NO: 181038 - DNA, 25 bp, Canis familiaris
tcctgtttcagctactcgctgttta

SEQ ID NO: 181039 - DNA, 25 bp, Canis familiaris
tcctctttctggtgctgggttatgc

SEQ ID NO: 181040 - DNA, 25 bp, Canis familiaris
tcctcctggtttggtgggggatggc

SEQ ID NO: 181041 - DNA, 25 bp, Canis familiaris
tcctcctcgtccgaggtgtcggagg

SEQ ID NO: 181042 - DNA, 25 bp, Canis familiaris
tcccccgtcgatgtcgtcaagacga

SEQ ID NO: 181043 - DNA, 25 bp, Canis familiaris
tcctccgagtcaagggaccgagacg

SEQ ID NO: 181044 - DNA, 25 bp, Canis familiaris
tcctctcgatgacagtggtccactg

SEQ ID NO: 181045 - DNA, 25 bp, Canis familiaris
tcctcatcgtggctgttttcacaac

SEQ ID NO: 181046 - DNA, 25 bp, Canis familiaris
tcctcctgtgtgatggtaccacgca

SEQ ID NO: 181047 - DNA, 25 bp, Canis familiaris
tcctctgttgtgttggatcacccta

SEQ ID NO: 181048 - DNA, 25 bp, Canis familiaris
tccgtgtttttgaattcctctttgt

SEQ ID NO: 181049 - DNA, 25 bp, Canis familiaris
tccgtggtgttttaatctcaacttg

SEQ ID NO: 181050 - DNA, 25 bp, Canis familiaris
tccgcgaagtatttaattaacctga

SEQ ID NO: 181051 - DNA, 25 bp, Canis familiaris
tcctgggaggattctattgtggacc

SEQ ID NO: 181052 - DNA, 25 bp, Canis familiaris
tcctggcccagtttcctgggaaaag

SEQ ID NO: 181053 - DNA, 25 bp, Canis familiaris
tccctcccagatgtccgggaaggaa

SEQ ID NO: 181054 - DNA, 25 bp, Canis familiaris
tcctccccgaggatctcaggaagga

SEQ ID NO: 181055 - DNA, 25 bp, Canis familiaris
tcctccctaaggtgtccaggtggca

SEQ ID NO: 181056 - DNA, 25 bp, Canis familiaris
tcctcgtgacaacatactccaggcc

SEQ ID NO: 181057 - DNA, 25 bp, Canis familiaris
tcctcctgatcagctgatggtccag

SEQ ID NO: 181058 - DNA, 25 bp, Canis familiaris
tcctgcctagcatgcagagtgccca

SEQ ID NO: 181059 - DNA, 25 bp, Canis familiaris
tcctcctgcagcagctgaggctgat

SEQ ID NO: 181060 - DNA, 25 bp, Canis familiaris
tcctgcctgccatctagatgcattg

SEQ ID NO: 181061 - DNA, 25 bp, Canis familiaris
tcctccccattcttatcattgtagg

SEQ ID NO: 181062 - DNA, 25 bp, Canis familiaris
tcctccgaattccgatcattatgca

SEQ ID NO: 181063 - DNA, 25 bp, Canis familiaris
tcctgggaattctgtgatcatcaga

SEQ ID NO: 181064 - DNA, 25 bp, Canis familiaris
tcctggtgcccctgatgatgaagca

SEQ ID NO: 181065 - DNA, 25 bp, Canis familiaris
tccggacgccgctgatgtagatgga

SEQ ID NO: 181066 - DNA, 25 bp, Canis familiaris
tccggatcgccagcctggaagtgga

SEQ ID NO: 181067 - DNA, 25 bp, Canis familiaris
tcctgtagcgccgtacgggggaagc

SEQ ID NO: 181068 - DNA, 25 bp, Canis familiaris
tcctgtgagcggcctgaaggcggcg

SEQ ID NO: 181069 - DNA, 25 bp, Canis familiaris
tcctctgcacagcactggaggccga

SEQ ID NO: 181070 - DNA, 25 bp, Canis familiaris
tcctctcagcagcagaagaacccac

SEQ ID NO: 181071 - DNA, 25 bp, Canis familiaris
tcctgccagattgcaagaccaccac

SEQ ID NO: 181072 - DNA, 25 bp, Canis familiaris
tcctgccacacagcaagggagccac

SEQ ID NO: 181073 - DNA, 25 bp, Canis familiaris
tcctgcccctcatagagcagcagca

SEQ ID NO: 181074 - DNA, 25 bp, Canis familiaris
tcctctgctccttggaacatgactc

SEQ ID NO: 181075 - DNA, 25 bp, Canis familiaris
tcctctgctcctgtgaagctactaa

SEQ ID NO: 181076 - DNA, 25 bp, Canis familiaris
tcctgctcaacgggaagtcctaccc

SEQ ID NO: 181077 - DNA, 25 bp, Canis familiaris
tcggctcacggtgaagtccgaggcc

SEQ ID NO: 181078 - DNA, 25 bp, Canis familiaris
tcctccctgtgagaagtcacgggcc

SEQ ID NO: 181079 - DNA, 25 bp, Canis familiaris
tcctccctggagaagagctacgagc

SEQ ID NO: 181080 - DNA, 25 bp, Canis familiaris
tcctccctggagaacactgtggacc

SEQ ID NO: 181081 - DNA, 25 bp, Canis familiaris
tcccctttagaacatgtagacactt

SEQ ID NO: 181082 - DNA, 25 bp, Canis familiaris
tcctccttctagtgagatggacaac

SEQ ID NO: 181083 - DNA, 25 bp, Canis familiaris
tcctccccaaggcactgatgagcag

SEQ ID NO: 181084 - DNA, 25 bp, Canis familiaris
tcctcctcgcagggtacgatgactt

SEQ ID NO: 181085 - DNA, 25 bp, Canis familiaris
tcctcctcgctggcgtagttgatgt

SEQ ID NO: 181086 - DNA, 25 bp, Canis familiaris
tcctcctcctgcggggtagaagaga

SEQ ID NO: 181087 - DNA, 25 bp, Canis familiaris
tcctctccagagccagggtcagtaa

SEQ ID NO: 181088 - DNA, 25 bp, Canis familiaris
tccgcacgaaggagcagatcgtgga

SEQ ID NO: 181089 - DNA, 25 bp, Canis familiaris
tccgaaggacctcttcgtggagccc

SEQ ID NO: 181090 - DNA, 25 bp, Canis familiaris
tcctgcggaacagagtccggcggcc

SEQ ID NO: 181091 - DNA, 25 bp, Canis familiaris
tccgggaaactgtggcgtgatggcc

SEQ ID NO: 181092 - DNA, 25 bp, Canis familiaris
tccggaggccacactgagttatggt

SEQ ID NO: 181093 - DNA, 25 bp, Canis familiaris
tcgcaagtggccgtactgatcttac

SEQ ID NO: 181094 - DNA, 25 bp, Canis familiaris
tcctggtggcatgtgactgtcaata

SEQ ID NO: 181095 - DNA, 25 bp, Canis familiaris
tcctcgtgtgcggtgcacgatctga

SEQ ID NO: 181096 - DNA, 25 bp, Canis familiaris
tcctgaggatgcgctcaggagctgg

SEQ ID NO: 181097 - DNA, 25 bp, Canis familiaris
tcctgatggaggggctgggtcccag

SEQ ID NO: 181098 - DNA, 25 bp, Canis familiaris
tcctgaagaggccagcgggcaagcc

SEQ ID NO: 181099 - DNA, 25 bp, Canis familiaris
tcagcctagaggtacaaaaaccctt

SEQ ID NO: 181100 - DNA, 25 bp, Canis familiaris
tccccagtggagcttaaacccttct

SEQ ID NO: 181101 - DNA, 25 bp, Canis familiaris
tccccaactgaaattttgtcctcct

SEQ ID NO: 181102 - DNA, 25 bp, Canis familiaris
tcctgtacaaagaattttgccccca

SEQ ID NO: 181103 - DNA, 25 bp, Canis familiaris
tccgttgcaaaggactttcagcttt

SEQ ID NO: 181104 - DNA, 25 bp, Canis familiaris
tccggtaagcctttttaatctgtcg

SEQ ID NO: 181105 - DNA, 25 bp, Canis familiaris
tcctggttacctttattttctgaat

SEQ ID NO: 181106 - DNA, 25 bp, Canis familiaris
tcctggtacccacatatttttatct

SEQ ID NO: 181107 - DNA, 25 bp, Canis familiaris
tcctggaataccctttctaattctt

SEQ ID NO: 181108 - DNA, 25 bp, Canis familiaris
tccggagaacacctgtatctcgtat

SEQ ID NO: 181109 - DNA, 25 bp, Canis familiaris
tccgttactgaccgtatctctggac

SEQ ID NO: 181110 - DNA, 25 bp, Canis familiaris
tccgattacggacgaatccatagcc

SEQ ID NO: 181111 - DNA, 25 bp, Canis familiaris
tccgataacgaacgagactctggca

SEQ ID NO: 181112 - DNA, 25 bp, Canis familiaris
tcctgaaatgtgggggcgcctgtgc

SEQ ID NO: 181113 - DNA, 25 bp, Canis familiaris
tcctggagagtgggaggccttccgg

SEQ ID NO: 181114 - DNA, 25 bp, Canis familiaris
tccgtgtggatcggcggctccatcc

SEQ ID NO: 181115 - DNA, 25 bp, Canis familiaris
tccggatcagtgacgatggtcccca

SEQ ID NO: 181116 - DNA, 25 bp, Canis familiaris
tccgggaggcaggtgagctggccca

SEQ ID NO: 181117 - DNA, 25 bp, Canis familiaris
tccggcagaggctgcttgtggccgt

SEQ ID NO: 181118 - DNA, 25 bp, Canis familiaris
tccgagggcggattttgtctggtgt

SEQ ID NO: 181119 - DNA, 25 bp, Canis familiaris
tccgagggcggattttgtctggtgt

SEQ ID NO: 181120 - DNA, 25 bp, Canis familiaris
tcctgcagggggctcctgcaacgtg

SEQ ID NO: 181121 - DNA, 25 bp, Canis familiaris
tcctcggggaggaattgcccttggg

SEQ ID NO: 181122 - DNA, 25 bp, Canis familiaris
tcaccgaaacggaggccacgtgggg

SEQ ID NO: 181123 - DNA, 25 bp, Canis familiaris
tcccggaccaggcggacctgggagt

SEQ ID NO: 181124 - DNA, 25 bp, Canis familiaris
tccccgataaggtcgaaggatgggt

SEQ ID NO: 181125 - DNA, 25 bp, Canis familiaris
tcccccgagggggaatcctggtgct

SEQ ID NO: 181126 - DNA, 25 bp, Canis familiaris
tccccacgtaaagctttctctggct

SEQ ID NO: 181127 - DNA, 25 bp, Canis familiaris
tcccccttaaatgccagttctacat

SEQ ID NO: 181128 - DNA, 25 bp, Canis familiaris
tcccccatactgaaaccaattcttt

SEQ ID NO: 181129 - DNA, 25 bp, Canis familiaris
tcctgtaccacgaaacacttttctt

SEQ ID NO: 181130 - DNA, 25 bp, Canis familiaris
tcctctacacacacccatttttgtg

SEQ ID NO: 181131 - DNA, 25 bp, Canis familiaris
tcctctcaaaaacaccttgtatgtg

SEQ ID NO: 181132 - DNA, 25 bp, Canis familiaris
tccctcgttagaccccatttatgag

SEQ ID NO: 181133 - DNA, 25 bp, Canis familiaris
tccccgttagcacatagccttaatg

SEQ ID NO: 181134 - DNA, 25 bp, Canis familiaris
tccccattacaacatacctcagaag

SEQ ID NO: 181135 - DNA, 25 bp, Canis familiaris
tcccttcacccaaatatctcgagat

SEQ ID NO: 181136 - DNA, 25 bp, Canis familiaris
tcccttggccccagaacgaagatcc

SEQ ID NO: 181137 - DNA, 25 bp, Canis familiaris
tcctcctggtcccaagggtaacagc

SEQ ID NO: 181138 - DNA, 25 bp, Canis familiaris
tcccctagagcctcagggcgactac

SEQ ID NO: 181139 - DNA, 25 bp, Canis familiaris
tcctgcgctaatgttcggggtcatt

SEQ ID NO: 181140 - DNA, 25 bp, Canis familiaris
tcctcggaatctgtcggtgtgtgac

SEQ ID NO: 181141 - DNA, 25 bp, Canis familiaris
tcccggacctggtggtgtggaactc

SEQ ID NO: 181142 - DNA, 25 bp, Canis familiaris
tccccgaccgtgagagctgggtgga

SEQ ID NO: 181143 - DNA, 25 bp, Canis familiaris
tcctccctgaccgtggatcgggtaa

SEQ ID NO: 181144 - DNA, 25 bp, Canis familiaris
tcctccactaccacttcgaagtgag

SEQ ID NO: 181145 - DNA, 25 bp, Canis familiaris
tcctccaccctcaacatattaagga

SEQ ID NO: 181146 - DNA, 25 bp, Canis familiaris
tcctccacactcagataatctcagt

SEQ ID NO: 181147 - DNA, 25 bp, Canis familiaris
tcctccagcaataggaacattctgg

SEQ ID NO: 181148 - DNA, 25 bp, Canis familiaris
tcctcgaattgcagcccatgtcata

SEQ ID NO: 181149 - DNA, 25 bp, Canis familiaris
tcctctgcatgcgggttccatgtaa

SEQ ID NO: 181150 - DNA, 25 bp, Canis familiaris
tcctccatggtgggctgtgctgaaa

SEQ ID NO: 181151 - DNA, 25 bp, Canis familiaris
tcctccaggccttgctgttaataaa

SEQ ID NO: 181152 - DNA, 25 bp, Canis familiaris
tcctccagacctcgtcatttattaa

SEQ ID NO: 181153 - DNA, 25 bp, Canis familiaris
tcctgcctacctacttgagaacgaa

SEQ ID NO: 181154 - DNA, 25 bp, Canis familiaris
tcctctcctgccttctagagagacc

SEQ ID NO: 181155 - DNA, 25 bp, Canis familiaris
tcctctgtctgcattttctagattc

SEQ ID NO: 181156 - DNA, 25 bp, Canis familiaris
tcctgagctctgctatgttccagtg

SEQ ID NO: 181157 - DNA, 25 bp, Canis familiaris
tcctgacttcctattcaagtctttg

SEQ ID NO: 181158 - DNA, 25 bp, Canis familiaris
tccgtttcctttcacatatgttatg

SEQ ID NO: 181159 - DNA, 25 bp, Canis familiaris
tcctgtgtgcctctctataaagtta

SEQ ID NO: 181160 - DNA, 25 bp, Canis familiaris
tcctgcttcctgtctgtcaaaaaaa

SEQ ID NO: 181161 - DNA, 25 bp, Canis familiaris
tcctctctgtggtctacaaaaatgt

SEQ ID NO: 181162 - DNA, 25 bp, Canis familiaris
tcctctgtctgttctaccaagtatt

SEQ ID NO: 181163 - DNA, 25 bp, Canis familiaris
tcctgctgtccttaggcgacaactt

SEQ ID NO: 181164 - DNA, 25 bp, Canis familiaris
tcctgtctcccgatgaaaacatatc

SEQ ID NO: 181165 - DNA, 25 bp, Canis familiaris
tcctgcctcttccacataaaattag

SEQ ID NO: 181166 - DNA, 25 bp, Canis familiaris
tcctgccttccaaatagacgtgggg

SEQ ID NO: 181167 - DNA, 25 bp, Canis familiaris
tcctgccttccagacagacctggag

SEQ ID NO: 181168 - DNA, 25 bp, Canis familiaris
tccccactacaccacaaggcgggaa

SEQ ID NO: 181169 - DNA, 25 bp, Canis familiaris
tcctgccactaggggtcaggaggtg

SEQ ID NO: 181170 - DNA, 25 bp, Canis familiaris
tcctccacataggttcccaaggagt

SEQ ID NO: 181171 - DNA, 25 bp, Canis familiaris
tcctccgcaagaatcacatccaagg

SEQ ID NO: 181172 - DNA, 25 bp, Canis familiaris
tcctggcgcaggaacatcatcaacg

SEQ ID NO: 181173 - DNA, 25 bp, Canis familiaris
tcctggcgcggaacatcatcaacgc

SEQ ID NO: 181174 - DNA, 25 bp, Canis familiaris
tccggcgcataaagtcagcaaggtt

SEQ ID NO: 181175 - DNA, 25 bp, Canis familiaris
tccgggcacgattacgcagatggtc

SEQ ID NO: 181176 - DNA, 25 bp, Canis familiaris
tcctgggaagcatcgggtggctctt

SEQ ID NO: 181177 - DNA, 25 bp, Canis familiaris
tcctgccagaacaccgtgggtggtt

SEQ ID NO: 181178 - DNA, 25 bp, Canis familiaris
tcctcgtgaactcccgtggggagat

SEQ ID NO: 181179 - DNA, 25 bp, Canis familiaris
tcctcggtacgagccagtggctgag

SEQ ID NO: 181180 - DNA, 25 bp, Canis familiaris
taacctaccagagccatgggtgcca

SEQ ID NO: 181181 - DNA, 25 bp, Canis familiaris
tcaacagataaataccttggtgcca

SEQ ID NO: 181182 - DNA, 25 bp, Canis familiaris
tctccagaatcatacccctgggcca

SEQ ID NO: 181183 - DNA, 25 bp, Canis familiaris
tccccttgaggactggccggggcag

SEQ ID NO: 181184 - DNA, 25 bp, Canis familiaris
tcctcgctgtgatgggtcgggggac

SEQ ID NO: 181185 - DNA, 25 bp, Canis familiaris
tcccgaggaacgtctgcggcggaaa

SEQ ID NO: 181186 - DNA, 25 bp, Canis familiaris
tcctcgaggacacggtgcttggtga

SEQ ID NO: 181187 - DNA, 25 bp, Canis familiaris
tcctcccagtcaaggtggtggctga

SEQ ID NO: 181188 - DNA, 25 bp, Canis familiaris
tcctcccacctatgtaacgtgcatt

SEQ ID NO: 181189 - DNA, 25 bp, Canis familiaris
tcctcctacttttatagacttgaat

SEQ ID NO: 181190 - DNA, 25 bp, Canis familiaris
tcccctacgtcatttactggtacag

SEQ ID NO: 181191 - DNA, 25 bp, Canis familiaris
tccccttgcgtgtagtactttggtg

SEQ ID NO: 181192 - DNA, 25 bp, Canis familiaris
tcctcctgagcgcaagtactctgtg

SEQ ID NO: 181193 - DNA, 25 bp, Canis familiaris
tcctcctagggcactccttaaagtt

SEQ ID NO: 181194 - DNA, 25 bp, Canis familiaris
tcctcccagggtacattgttaaaat

SEQ ID NO: 181195 - DNA, 25 bp, Canis familiaris
tcctcctcggtgagcattttcagtc

SEQ ID NO: 181196 - DNA, 25 bp, Canis familiaris
tcctccgcaggtcatgcattttcat

SEQ ID NO: 181197 - DNA, 25 bp, Canis familiaris
tcctccgatggtcctggtttatgta

SEQ ID NO: 181198 - DNA, 25 bp, Canis familiaris
tcctcccatagtcttgtttttgcgt

SEQ ID NO: 181199 - DNA, 25 bp, Canis familiaris
tcctcccaataagttttgtttgtct

SEQ ID NO: 181200 - DNA, 25 bp, Canis familiaris
tcctcgccaacatttctagtttctt

SEQ ID NO: 181201 - DNA, 25 bp, Canis familiaris
tccctggcctagaattagtttttct

SEQ ID NO: 181202 - DNA, 25 bp, Canis familiaris
tccgtgcagttacctttcattttta

SEQ ID NO: 181203 - DNA, 25 bp, Canis familiaris
tccgtgcagttacctttcattttta

SEQ ID NO: 181204 - DNA, 25 bp, Canis familiaris
tccgtgcagttacctttcattttta

SEQ ID NO: 181205 - DNA, 25 bp, Canis familiaris
tccgtgcagttacctttcattttta

SEQ ID NO: 181206 - DNA, 25 bp, Canis familiaris
tccgtgcagttacctttcattttta

SEQ ID NO: 181207 - DNA, 25 bp, Canis familiaris
tccgtgcagttacctttcattttta

SEQ ID NO: 181208 - DNA, 25 bp, Canis familiaris
tccgtgcagttacctttcattttta

SEQ ID NO: 181209 - DNA, 25 bp, Canis familiaris
tccgtgcagttacctttcattttta

SEQ ID NO: 181210 - DNA, 25 bp, Canis familiaris
tccgtgcagttacctttcattttta

SEQ ID NO: 181211 - DNA, 25 bp, Canis familiaris
tccgtgcagttacctttcattttta

SEQ ID NO: 181212 - DNA, 25 bp, Canis familiaris
tccgtgcagttacctttcattttta

SEQ ID NO: 181213 - DNA, 25 bp, Canis familiaris
tccgtgcagttacctttcattttta

SEQ ID NO: 181214 - DNA, 25 bp, Canis familiaris
tccggcatgtgcaaggccggcttcg

SEQ ID NO: 181215 - DNA, 25 bp, Canis familiaris
tcgcatggatgtgtgggccggtggt

SEQ ID NO: 181216 - DNA, 25 bp, Canis familiaris
tcctggcagctgctgtgggtggggt

SEQ ID NO: 181217 - DNA, 25 bp, Canis familiaris
tcctgacaatgccggaggagaactg

SEQ ID NO: 181218 - DNA, 25 bp, Canis familiaris
tcctgctcagtacgagaggaaccgc

SEQ ID NO: 181219 - DNA, 25 bp, Canis familiaris
tcctgctcagtacctgctgatggag

SEQ ID NO: 181220 - DNA, 25 bp, Canis familiaris
tcctgctctgtgctggatgtggagt

SEQ ID NO: 181221 - DNA, 25 bp, Canis familiaris
tcctgctcctgtggacagcgatggg

SEQ ID NO: 181222 - DNA, 25 bp, Canis familiaris
tcctcctctgctggtgcaggcaaga

SEQ ID NO: 181223 - DNA, 25 bp, Canis familiaris
tcctcctccatgctatgcaagcagg

SEQ ID NO: 181224 - DNA, 25 bp, Canis familiaris
tcctccgctcagcgtcaacgaggag

SEQ ID NO: 181225 - DNA, 25 bp, Canis familiaris
tcctccgcacgggtcgaccagcaga

SEQ ID NO: 181226 - DNA, 25 bp, Canis familiaris
tcctgcccatcatgtttgaccagca

SEQ ID NO: 181227 - DNA, 25 bp, Canis familiaris
tcctgccctctatttaaaagcgtgc

SEQ ID NO: 181228 - DNA, 25 bp, Canis familiaris
tcctcccccatctgaaaactgaaat

SEQ ID NO: 181229 - DNA, 25 bp, Canis familiaris
tcctccctcacctgataactcaggg

SEQ ID NO: 181230 - DNA, 25 bp, Canis familiaris
tcctcctccacttttgagacttggc

SEQ ID NO: 181231 - DNA, 25 bp, Canis familiaris
tcctcctgcgggtagctgagagccg

SEQ ID NO: 181232 - DNA, 25 bp, Canis familiaris
tcctcctgcccgaagagagactggt

SEQ ID NO: 181233 - DNA, 25 bp, Canis familiaris
tccccagccctgaagaaggccgaca

SEQ ID NO: 181234 - DNA, 25 bp, Canis familiaris
tcctccacttttagactgtctcaac

SEQ ID NO: 181235 - DNA, 25 bp, Canis familiaris
tccgccattttgcagcactttaacc

SEQ ID NO: 181236 - DNA, 25 bp, Canis familiaris
tcccctttctgggcttctataacac

SEQ ID NO: 181237 - DNA, 25 bp, Canis familiaris
tcctcctctatctggtgtctgtaaa

SEQ ID NO: 181238 - DNA, 25 bp, Canis familiaris
tcctcctcttccgagagattcttaa

SEQ ID NO: 181239 - DNA, 25 bp, Canis familiaris
tcctcgtcttcatcactatttcgag

SEQ ID NO: 181240 - DNA, 25 bp, Canis familiaris
tcctgttctatcttcctaatatcgt

SEQ ID NO: 181241 - DNA, 25 bp, Canis familiaris
tcctgttcccttcaaattctgtatc

SEQ ID NO: 181242 - DNA, 25 bp, Canis familiaris
tccgattccgctgtaatgttttcac

SEQ ID NO: 181243 - DNA, 25 bp, Canis familiaris
tccgttcatctgagtaatgagttgt

SEQ ID NO: 181244 - DNA, 25 bp, Canis familiaris
tcctggtctgctctgtgaatggttt

SEQ ID NO: 181245 - DNA, 25 bp, Canis familiaris
tcctggtctgctctgtgaatggttt

SEQ ID NO: 181246 - DNA, 25 bp, Canis familiaris
tcctggtctgctctgtgaatggttt

SEQ ID NO: 181247 - DNA, 25 bp, Canis familiaris
tcctgggctcccctgaatgaggtag

SEQ ID NO: 181248 - DNA, 25 bp, Canis familiaris
tcctgatggctggcggggtgatggt

SEQ ID NO: 181249 - DNA, 25 bp, Canis familiaris
tcctcgcagctgtctggggatgttt

SEQ ID NO: 181250 - DNA, 25 bp, Canis familiaris
tcctgccgccatcgcgggatgagat

SEQ ID NO: 181251 - DNA, 25 bp, Canis familiaris
tcctgccgcaccagcaggtggacaa

SEQ ID NO: 181252 - DNA, 25 bp, Canis familiaris
tcctgcccccatgctgtaataaaac

SEQ ID NO: 181253 - DNA, 25 bp, Canis familiaris
tcctcccctcatcctagaaataaat

SEQ ID NO: 181254 - DNA, 25 bp, Canis familiaris
tcctccctctcatctggagagtcta

SEQ ID NO: 181255 - DNA, 25 bp, Canis familiaris
tcctgcgtcttcttgatctagagtc

SEQ ID NO: 181256 - DNA, 25 bp, Canis familiaris
tcctggatacattcagtctgagaga

SEQ ID NO: 181257 - DNA, 25 bp, Canis familiaris
tccgtcatacttggactgataaaag

SEQ ID NO: 181258 - DNA, 25 bp, Canis familiaris
tccgtctgcccgtagctaaacgaga

SEQ ID NO: 181259 - DNA, 25 bp, Canis familiaris
tccgattccggatcgcaacatgggt

SEQ ID NO: 181260 - DNA, 25 bp, Canis familiaris
tcctgaccctgaatcttgccaaggg

SEQ ID NO: 181261 - DNA, 25 bp, Canis familiaris
tcctcctgtctgatctatctatatg

SEQ ID NO: 181262 - DNA, 25 bp, Canis familiaris
tcctccgtgcttaacaatctcatga

SEQ ID NO: 181263 - DNA, 25 bp, Canis familiaris
tcctgcagattggtaccgattcaag

SEQ ID NO: 181264 - DNA, 25 bp, Canis familiaris
tcctgcacattgtacagccgtataa

SEQ ID NO: 181265 - DNA, 25 bp, Canis familiaris
tcctggcctgtaagccagcttcacc

SEQ ID NO: 181266 - DNA, 25 bp, Canis familiaris
tcctggcaatggtttcagcctcacc

SEQ ID NO: 181267 - DNA, 25 bp, Canis familiaris
tcgctggacaagtttatgcctgcct

SEQ ID NO: 181268 - DNA, 25 bp, Canis familiaris
tcctggagatcgtgtatgcctcgct

SEQ ID NO: 181269 - DNA, 25 bp, Canis familiaris
tcctggcattcgctgatttctagtg

SEQ ID NO: 181270 - DNA, 25 bp, Canis familiaris
tcctgccattctcaatatctcataa

SEQ ID NO: 181271 - DNA, 25 bp, Canis familiaris
tccgtgcttatccgaatgtcatcaa

SEQ ID NO: 181272 - DNA, 25 bp, Canis familiaris
tcctgtgcattaaggacatggcggg

SEQ ID NO: 181273 - DNA, 25 bp, Canis familiaris
tcctggcatgctacgcgagcaatgc

SEQ ID NO: 181274 - DNA, 25 bp, Canis familiaris
tccggatgtagggagcctggagaaa

SEQ ID NO: 181275 - DNA, 25 bp, Canis familiaris
tccccagaagggtcctggagccaac

SEQ ID NO: 181276 - DNA, 25 bp, Canis familiaris
tccggcaaaggccccaggcaaagat

SEQ ID NO: 181277 - DNA, 25 bp, Canis familiaris
tccgaaacagagcatccagcgcaac

SEQ ID NO: 181278 - DNA, 25 bp, Canis familiaris
tccggatccagacttgtagctcaaa

SEQ ID NO: 181279 - DNA, 25 bp, Canis familiaris
tccggatcgcaacatgggttaaggc

SEQ ID NO: 181280 - DNA, 25 bp, Canis familiaris
tccggattagcaccctgagggaagg

SEQ ID NO: 181281 - DNA, 25 bp, Canis familiaris
tccggagtaacctgagcgcgacggt

SEQ ID NO: 181282 - DNA, 25 bp, Canis familiaris
tcctggcagagtcctctagagtcga

SEQ ID NO: 181283 - DNA, 25 bp, Canis familiaris
tcctgggagggcatcacactgcgaa

SEQ ID NO: 181284 - DNA, 25 bp, Canis familiaris
tcctggaggaggaccggctcagaga

SEQ ID NO: 181285 - DNA, 25 bp, Canis familiaris
tcctggaggaccagggtcagcgcgg

SEQ ID NO: 181286 - DNA, 25 bp, Canis familiaris
tccgacggaccaagaagtgatagtg

SEQ ID NO: 181287 - DNA, 25 bp, Canis familiaris
tccgctgggcaaaagaagtctggtt

SEQ ID NO: 181288 - DNA, 25 bp, Canis familiaris
tcctgtgccccaagaaagtctgtta

SEQ ID NO: 181289 - DNA, 25 bp, Canis familiaris
tccggccctcaataaatgcttctgc

SEQ ID NO: 181290 - DNA, 25 bp, Canis familiaris
tcgctggcaaccgaaacggtctccc

SEQ ID NO: 181291 - DNA, 25 bp, Canis familiaris
tcctggagatccgggatcgaatccc

SEQ ID NO: 181292 - DNA, 25 bp, Canis familiaris
tcctggaaacgacatgcatcaatcc

SEQ ID NO: 181293 - DNA, 25 bp, Canis familiaris
tcctggtatgacaacgaatttggct

SEQ ID NO: 181294 - DNA, 25 bp, Canis familiaris
tcctggtaactacagcctctgttct

SEQ ID NO: 181295 - DNA, 25 bp, Canis familiaris
tcctggtaaataccctcatcctgtc

SEQ ID NO: 181296 - DNA, 25 bp, Canis familiaris
tccgaacgactactacatctccgtg

SEQ ID NO: 181297 - DNA, 25 bp, Canis familiaris
tccggacagatcacaatttacgtga

SEQ ID NO: 181298 - DNA, 25 bp, Canis familiaris
tccggatagtctccagagttgtctt

SEQ ID NO: 181299 - DNA, 25 bp, Canis familiaris
tccgtatcctctcacatggtggttt

SEQ ID NO: 181300 - DNA, 25 bp, Canis familiaris
tccgtcatgcctagggtcgaagtct

SEQ ID NO: 181301 - DNA, 25 bp, Canis familiaris
tcctgtctcctagctgtggacgagg

SEQ ID NO: 181302 - DNA, 25 bp, Canis familiaris
tcctgttctttgtctgtggaactga

SEQ ID NO: 181303 - DNA, 25 bp, Canis familiaris
tcctgttttctgcttgctacacagt

SEQ ID NO: 181304 - DNA, 25 bp, Canis familiaris
tccggtgacttcttagccacagagt

SEQ ID NO: 181305 - DNA, 25 bp, Canis familiaris
tccgttgactacaacaccgcagagc

SEQ ID NO: 181306 - DNA, 25 bp, Canis familiaris
tccgctgggctttactccagcagat

SEQ ID NO: 181307 - DNA, 25 bp, Canis familiaris
tccgctgggctttactccagcagat

SEQ ID NO: 181308 - DNA, 25 bp, Canis familiaris
tcccgtgagtgttttccgaatgttc

SEQ ID NO: 181309 - DNA, 25 bp, Canis familiaris
tcccggcaagttaagacgaatctgt

SEQ ID NO: 181310 - DNA, 25 bp, Canis familiaris
tcctggtcagtttcagtacggacgt

SEQ ID NO: 181311 - DNA, 25 bp, Canis familiaris
tcctggtcccttgtgcaagtgacgc

SEQ ID NO: 181312 - DNA, 25 bp, Canis familiaris
tcctgcgtcgccatgatgtgcaatg

SEQ ID NO: 181313 - DNA, 25 bp, Canis familiaris
tcctgctgagagtccagatgtgcca

SEQ ID NO: 181314 - DNA, 25 bp, Canis familiaris
tcctgctgcagatcgacaatgcccg

SEQ ID NO: 181315 - DNA, 25 bp, Canis familiaris
tcctgtgcatcaaggacatggccgg

SEQ ID NO: 181316 - DNA, 25 bp, Canis familiaris
tcctgtagcaagtatcattcatggg

SEQ ID NO: 181317 - DNA, 25 bp, Canis familiaris
tcctgtatcagactccctgcaggga

SEQ ID NO: 181318 - DNA, 25 bp, Canis familiaris
tcctgtgtggaggccgcgaggccaa

SEQ ID NO: 181319 - DNA, 25 bp, Canis familiaris
tcctgagggcagtttagaggctcta

SEQ ID NO: 181320 - DNA, 25 bp, Canis familiaris
tcctgggggacttagagatctgtga

SEQ ID NO: 181321 - DNA, 25 bp, Canis familiaris
tcctggaaggaatcgagagctttca

SEQ ID NO: 181322 - DNA, 25 bp, Canis familiaris
tcctccagagtatacgagagctttc

SEQ ID NO: 181323 - DNA, 25 bp, Canis familiaris
tcctccaagtggccactggtgtcat

SEQ ID NO: 181324 - DNA, 25 bp, Canis familiaris
tcctccagtattcccatgtgttact

SEQ ID NO: 181325 - DNA, 25 bp, Canis familiaris
tcctgccagctataccagaggtcag

SEQ ID NO: 181326 - DNA, 25 bp, Canis familiaris
tcgcgcggatcatgatgccaacctc

SEQ ID NO: 181327 - DNA, 25 bp, Canis familiaris
tcccagggacagtcaaacccgggtg

SEQ ID NO: 181328 - DNA, 25 bp, Canis familiaris
tccgaagtgaagaagatccccgagt

SEQ ID NO: 181329 - DNA, 25 bp, Canis familiaris
tccgtctttatgaaactgcacttga

SEQ ID NO: 181330 - DNA, 25 bp, Canis familiaris
tcctgttttctatcaggcctgctga

SEQ ID NO: 181331 - DNA, 25 bp, Canis familiaris
tccgtttctctgtatattgggctca

SEQ ID NO: 181332 - DNA, 25 bp, Canis familiaris
tcctgttcacttgtgcatggggcta

SEQ ID NO: 181333 - DNA, 25 bp, Canis familiaris
tcctgtcccttatcatgctggtgga

SEQ ID NO: 181334 - DNA, 25 bp, Canis familiaris
tccgtcctctgtgtctgtgtgaggt

SEQ ID NO: 181335 - DNA, 25 bp, Canis familiaris
tcctgcccaatttatttgctgcggg

SEQ ID NO: 181336 - DNA, 25 bp, Canis familiaris
tcctgcttgcacaagtttcctgggc

SEQ ID NO: 181337 - DNA, 25 bp, Canis familiaris
tcccctgatcaaacatcccgaggta

SEQ ID NO: 181338 - DNA, 25 bp, Canis familiaris
tccccgatatccctcatttggagat

SEQ ID NO: 181339 - DNA, 25 bp, Canis familiaris
tcctccttgtcatttctttgtggtg

SEQ ID NO: 181340 - DNA, 25 bp, Canis familiaris
tcctccttctctgtttcggttggag

SEQ ID NO: 181341 - DNA, 25 bp, Canis familiaris
tctccatttaccaggtcggttcgga

SEQ ID NO: 181342 - DNA, 25 bp, Canis familiaris
tccctcctacgtaggtcggtatcta

SEQ ID NO: 181343 - DNA, 25 bp, Canis familiaris
tcccaacccgtcaacttggtttcag

SEQ ID NO: 181344 - DNA, 25 bp, Canis familiaris
tccgacactccgaaatccaggttgg

SEQ ID NO: 181345 - DNA, 25 bp, Canis familiaris
tcctgcccccagaagaggggccggc

SEQ ID NO: 181346 - DNA, 25 bp, Canis familiaris
tcctgcccgaagagagactggtcct

SEQ ID NO: 181347 - DNA, 25 bp, Canis familiaris
tcctgcctggcatgtggaggtggct

SEQ ID NO: 181348 - DNA, 25 bp, Canis familiaris
tcctggctggaggttgggctggatc

SEQ ID NO: 181349 - DNA, 25 bp, Canis familiaris
tcctgttatcagattggttgtgact

SEQ ID NO: 181350 - DNA, 25 bp, Canis familiaris
tcctgttcatacatttgtgctgccc

SEQ ID NO: 181351 - DNA, 25 bp, Canis familiaris
tcctgtgtgcgtcatttttgctgac

SEQ ID NO: 181352 - DNA, 25 bp, Canis familiaris
tccggctctgtgctattaactggtg

SEQ ID NO: 181353 - DNA, 25 bp, Canis familiaris
tccgctcactggctatttatccgag

SEQ ID NO: 181354 - DNA, 25 bp, Canis familiaris
tcctgatccttgcttttcttggagc

SEQ ID NO: 181355 - DNA, 25 bp, Canis familiaris
tcctggccttggctttgattcttgc

SEQ ID NO: 181356 - DNA, 25 bp, Canis familiaris
tccgtggttagcttttgtattcaga

SEQ ID NO: 181357 - DNA, 25 bp, Canis familiaris
tccgggatcttggttcattcttcca

SEQ ID NO: 181358 - DNA, 25 bp, Canis familiaris
tccgggttgtgtacatcagtttctc

SEQ ID NO: 181359 - DNA, 25 bp, Canis familiaris
tcctgggatttcactgtattgattc

SEQ ID NO: 181360 - DNA, 25 bp, Canis familiaris
tccgctggcaatacaccttgatggt

SEQ ID NO: 181361 - DNA, 25 bp, Canis familiaris
tcccggcagaaaccttgttggggtg

SEQ ID NO: 181362 - DNA, 25 bp, Canis familiaris
tcccttcggagcactttgggaagct

SEQ ID NO: 181363 - DNA, 25 bp, Canis familiaris
tccctccggatgggttatggaacct

SEQ ID NO: 181364 - DNA, 25 bp, Canis familiaris
tccccaagtggcccaagtggaacgt

SEQ ID NO: 181365 - DNA, 25 bp, Canis familiaris
tcctccaagggcccagtggctgaga

SEQ ID NO: 181366 - DNA, 25 bp, Canis familiaris
tcctgacactttacacacatctaac

SEQ ID NO: 181367 - DNA, 25 bp, Canis familiaris
tcgcgtactttcatcactttttagt

SEQ ID NO: 181368 - DNA, 25 bp, Canis familiaris
tccgaactagtctctcggatttaga

SEQ ID NO: 181369 - DNA, 25 bp, Canis familiaris
tcccaagctaggtacacggcttaga

SEQ ID NO: 181370 - DNA, 25 bp, Canis familiaris
tcccaacttactgcctgtgcttgga

SEQ ID NO: 181371 - DNA, 25 bp, Canis familiaris
tcccatacctacaaggcagggaggc

SEQ ID NO: 181372 - DNA, 25 bp, Canis familiaris
tcctgctggccttgttgggggaagt

SEQ ID NO: 181373 - DNA, 25 bp, Canis familiaris
tcctgcaggggttggggaggccagc

SEQ ID NO: 181374 - DNA, 25 bp, Canis familiaris
tccgtgggtatgtgggagctcgcag

SEQ ID NO: 181375 - DNA, 25 bp, Canis familiaris
tccggttgatagtgcagggtcgccc

SEQ ID NO: 181376 - DNA, 25 bp, Canis familiaris
tccggctctgggtgcacaaatggcc

SEQ ID NO: 181377 - DNA, 25 bp, Canis familiaris
tcctgcagccaactcagtgcacaaa

SEQ ID NO: 181378 - DNA, 25 bp, Canis familiaris
tcctggctcatccagcatgtcagta

SEQ ID NO: 181379 - DNA, 25 bp, Canis familiaris
tcctggccccactgcagtaaacagg

SEQ ID NO: 181380 - DNA, 25 bp, Canis familiaris
tcctgccccccagatcaataagcag

SEQ ID NO: 181381 - DNA, 25 bp, Canis familiaris
tcctgccccccagatcaataagcag

SEQ ID NO: 181382 - DNA, 25 bp, Canis familiaris
tcctgccccccagatcaataagcag

SEQ ID NO: 181383 - DNA, 25 bp, Canis familiaris
tcctgccccccagatcaataagcag

SEQ ID NO: 181384 - DNA, 25 bp, Canis familiaris
tcctgccccccagatcaataagcag

SEQ ID NO: 181385 - DNA, 25 bp, Canis familiaris
tcctgccccccagatcaataagcag

SEQ ID NO: 181386 - DNA, 25 bp, Canis familiaris
tcctgccccccagatcaataagcag

SEQ ID NO: 181387 - DNA, 25 bp, Canis familiaris
tcctgccccccagatcaataagcag

SEQ ID NO: 181388 - DNA, 25 bp, Canis familiaris
tcctgccatcctctgcttaaaagag

SEQ ID NO: 181389 - DNA, 25 bp, Canis familiaris
tccgtgtcacatcccttaagaagac

SEQ ID NO: 181390 - DNA, 25 bp, Canis familiaris
tcctgagcgacaccactatggagaa

SEQ ID NO: 181391 - DNA, 25 bp, Canis familiaris
tcctgacatggacgcctatccagat

SEQ ID NO: 181392 - DNA, 25 bp, Canis familiaris
tccccaaagcagccatgatccatgt

SEQ ID NO: 181393 - DNA, 25 bp, Canis familiaris
tctcccaaagtggcaaaatttagct

SEQ ID NO: 181394 - DNA, 25 bp, Canis familiaris
ttccaaaacagggataattttgtgc

SEQ ID NO: 181395 - DNA, 25 bp, Canis familiaris
tcccagtcccgtgaaattgttgtct

SEQ ID NO: 181396 - DNA, 25 bp, Canis familiaris
tcccacctgggaaaatgtttattct

SEQ ID NO: 181397 - DNA, 25 bp, Canis familiaris
tcccaccggtcttagagattccgtc

SEQ ID NO: 181398 - DNA, 25 bp, Canis familiaris
tccccgtctatttggaatcttcttc

SEQ ID NO: 181399 - DNA, 25 bp, Canis familiaris
tcccgtgtttttcaaattcctcaga

SEQ ID NO: 181400 - DNA, 25 bp, Canis familiaris
tcctggtttcttggaaacttccgag

SEQ ID NO: 181401 - DNA, 25 bp, Canis familiaris
tccggtatttaattaactccaccag

SEQ ID NO: 181402 - DNA, 25 bp, Canis familiaris
tccgatgactttttaaacgcctcca

SEQ ID NO: 181403 - DNA, 25 bp, Canis familiaris
tccggacgtttttacaagccttgat

SEQ ID NO: 181404 - DNA, 25 bp, Canis familiaris
tccggaggtgtcgtagtggggtgga

SEQ ID NO: 181405 - DNA, 25 bp, Canis familiaris
tccggggactcggagatcgagctgg

SEQ ID NO: 181406 - DNA, 25 bp, Canis familiaris
tccggggttcatgcagagggtggcc

SEQ ID NO: 181407 - DNA, 25 bp, Canis familiaris
tccgggcttccagtagaggcgagca

SEQ ID NO: 181408 - DNA, 25 bp, Canis familiaris
tcctgagccccagctataggcaggc

SEQ ID NO: 181409 - DNA, 25 bp, Canis familiaris
tcctgcagtcctgggatcaagtacc

SEQ ID NO: 181410 - DNA, 25 bp, Canis familiaris
tcctgcattccagtcttcaatgcta

SEQ ID NO: 181411 - DNA, 25 bp, Canis familiaris
tcctgcttcgagaactcaatcgatt

SEQ ID NO: 181412 - DNA, 25 bp, Canis familiaris
tcctgtgtcaggaatttgatcactt

SEQ ID NO: 181413 - DNA, 25 bp, Canis familiaris
tccgtgatcaatttttgtctttctg

SEQ ID NO: 181414 - DNA, 25 bp, Canis familiaris
tccgtgcacctatttatatttttga

SEQ ID NO: 181415 - DNA, 25 bp, Canis familiaris
tccgatgccctgaggctcttttcca

SEQ ID NO: 181416 - DNA, 25 bp, Canis familiaris
tccggaacatcaagagctacttgtc

SEQ ID NO: 181417 - DNA, 25 bp, Canis familiaris
tcctggcaactctgcagcgaatttg

SEQ ID NO: 181418 - DNA, 25 bp, Canis familiaris
tcctgggtccaggcctgaataaagc

SEQ ID NO: 181419 - DNA, 25 bp, Canis familiaris
tccgctggtatgccagcctgcagaa

SEQ ID NO: 181420 - DNA, 25 bp, Canis familiaris
tcctgagcgctgccgaggtgcagga

SEQ ID NO: 181421 - DNA, 25 bp, Canis familiaris
tcctgagcctgccgaagtgtcgaag

SEQ ID NO: 181422 - DNA, 25 bp, Canis familiaris
tcctgacgctcctgggacagatgag

SEQ ID NO: 181423 - DNA, 25 bp, Canis familiaris
tccgacgcgctgctggagaagaaga

SEQ ID NO: 181424 - DNA, 25 bp, Canis familiaris
tcctggctggctactagaaaagaat

SEQ ID NO: 181425 - DNA, 25 bp, Canis familiaris
tcctgcccagtgaataaaataaatt

SEQ ID NO: 181426 - DNA, 25 bp, Canis familiaris
tcctgctcaaggactctgaaacaag

SEQ ID NO: 181427 - DNA, 25 bp, Canis familiaris
tcctgctgacggcctctaaagacag

SEQ ID NO: 181428 - DNA, 25 bp, Canis familiaris
tcctgtatctgtcctgtgtgtaaac

SEQ ID NO: 181429 - DNA, 25 bp, Canis familiaris
tcctgaatctatcctttcaaaagga

SEQ ID NO: 181430 - DNA, 25 bp, Canis familiaris
tccgaatttccatgactgaaatgta

SEQ ID NO: 181431 - DNA, 25 bp, Canis familiaris
tccgaattcccggatctgcacaagc

SEQ ID NO: 181432 - DNA, 25 bp, Canis familiaris
tccgcacatctctcgcattatgcga

SEQ ID NO: 181433 - DNA, 25 bp, Canis familiaris
tcctgcagctgcataactggatcga

SEQ ID NO: 181434 - DNA, 25 bp, Canis familiaris
tccgcagcgcttgaggcagagctca

SEQ ID NO: 181435 - DNA, 25 bp, Canis familiaris
tccggtgcagatggaccaagtgcct

SEQ ID NO: 181436 - DNA, 25 bp, Canis familiaris
tcctgcgtgagttccacaagtggat

SEQ ID NO: 181437 - DNA, 25 bp, Canis familiaris
tcctgcttgaacttgaccagtgtga

SEQ ID NO: 181438 - DNA, 25 bp, Canis familiaris
tcctgctccaaccatgacaagttaa

SEQ ID NO: 181439 - DNA, 25 bp, Canis familiaris
tcctgtccaaattggcaggtgctaa

SEQ ID NO: 181440 - DNA, 25 bp, Canis familiaris
tcctgtgctgaataaagtgtgtttg

SEQ ID NO: 181441 - DNA, 25 bp, Canis familiaris
tcccctcaaataaagtcttttcctg

SEQ ID NO: 181442 - DNA, 25 bp, Canis familiaris
tcccccatttccaagcttaatttag

SEQ ID NO: 181443 - DNA, 25 bp, Canis familiaris
tcccaccttacctgttaattgtttg

SEQ ID NO: 181444 - DNA, 25 bp, Canis familiaris
tcccccccatttgttaattgtatat

SEQ ID NO: 181445 - DNA, 25 bp, Canis familiaris
tccccccatttgtggtattttgtca

SEQ ID NO: 181446 - DNA, 25 bp, Canis familiaris
tcccggtcaattttattacgttgat

SEQ ID NO: 181447 - DNA, 25 bp, Canis familiaris
tcccgactacaaactattccgtgca

SEQ ID NO: 181448 - DNA, 25 bp, Canis familiaris
tctactggaaaagctactcactgga

SEQ ID NO: 181449 - DNA, 25 bp, Canis familiaris
tccctaaaaccctgagcagctggca

SEQ ID NO: 181450 - DNA, 25 bp, Canis familiaris
tcccgaaaatctactgcgaggagtg

SEQ ID NO: 181451 - DNA, 25 bp, Canis familiaris
tccgtaaagccttctggtgccaggc

SEQ ID NO: 181452 - DNA, 25 bp, Canis familiaris
tccgtgtttggtttgcgtgcgagag

SEQ ID NO: 181453 - DNA, 25 bp, Canis familiaris
tcctgtgaatctgggttgcatgtgg

SEQ ID NO: 181454 - DNA, 25 bp, Canis familiaris
tccgctacttgcagggcatgctaga

SEQ ID NO: 181455 - DNA, 25 bp, Canis familiaris
tcctgcttcctcaacaagaaagacc

SEQ ID NO: 181456 - DNA, 25 bp, Canis familiaris
tcctgcaccctccaagacaggagac

SEQ ID NO: 181457 - DNA, 25 bp, Canis familiaris
tcctgcatcccaggcaagcgatgtg

SEQ ID NO: 181458 - DNA, 25 bp, Canis familiaris
tccgccatctcagtcatcagggttg

SEQ ID NO: 181459 - DNA, 25 bp, Canis familiaris
tccgactcctgccatctgcaggatt

SEQ ID NO: 181460 - DNA, 25 bp, Canis familiaris
tccgagggagcactgcatgggagct

SEQ ID NO: 181461 - DNA, 25 bp, Canis familiaris
tccggaggacacctgttatctcgta

SEQ ID NO: 181462 - DNA, 25 bp, Canis familiaris
tccgactgagatgcctgtgttctct

SEQ ID NO: 181463 - DNA, 25 bp, Canis familiaris
tccgagctagtgggttgtttgtttt

SEQ ID NO: 181464 - DNA, 25 bp, Canis familiaris
tccggcataattttggtttgtttat

SEQ ID NO: 181465 - DNA, 25 bp, Canis familiaris
tccccatcaattttgtctcactttt

SEQ ID NO: 181466 - DNA, 25 bp, Canis familiaris
tccgccacaattcgggaacaagatg

SEQ ID NO: 181467 - DNA, 25 bp, Canis familiaris
tccgctcagcccagggacagatcaa

SEQ ID NO: 181468 - DNA, 25 bp, Canis familiaris
tcctgtcccatgggacagcacacac

SEQ ID NO: 181469 - DNA, 25 bp, Canis familiaris
tcctgtctcacagcaagatccacaa

SEQ ID NO: 181470 - DNA, 25 bp, Canis familiaris
tcctgtcttcctacagtgccagaag

SEQ ID NO: 181471 - DNA, 25 bp, Canis familiaris
tccggtctcctatatccaaaactaa

SEQ ID NO: 181472 - DNA, 25 bp, Canis familiaris
tccggtctccaagagaaaaattcac

SEQ ID NO: 181473 - DNA, 25 bp, Canis familiaris
tccgtgggcacctggcaaaaatcta

SEQ ID NO: 181474 - DNA, 25 bp, Canis familiaris
tcctgagacccctcgaaggagtcta

SEQ ID NO: 181475 - DNA, 25 bp, Canis familiaris
tcctggccccctgggaacaatggta

SEQ ID NO: 181476 - DNA, 25 bp, Canis familiaris
tcctggctctctgcctggaaatggg

SEQ ID NO: 181477 - DNA, 25 bp, Canis familiaris
tcctggtcctggccatgtggaaggg

SEQ ID NO: 181478 - DNA, 25 bp, Canis familiaris
tccgtgtccttgctgtggaagcttg

SEQ ID NO: 181479 - DNA, 25 bp, Canis familiaris
tccgattccctggagtgtgaagctg

SEQ ID NO: 181480 - DNA, 25 bp, Canis familiaris
tccgatatgcatcccgcaggaaggg

SEQ ID NO: 181481 - DNA, 25 bp, Canis familiaris
tccgattgatcgccgggagcgtgag

SEQ ID NO: 181482 - DNA, 25 bp, Canis familiaris
tccgcctgatgccacgtcaaggtgg

SEQ ID NO: 181483 - DNA, 25 bp, Canis familiaris
tcccacccgctcacaagtgtggact

SEQ ID NO: 181484 - DNA, 25 bp, Canis familiaris
tccgagccaagtctctcgttgtggt

SEQ ID NO: 181485 - DNA, 25 bp, Canis familiaris
tcctgagcgcaagtactccgtgtgg

SEQ ID NO: 181486 - DNA, 25 bp, Canis familiaris
tcctgagcgcaagtactctgtgtgg

SEQ ID NO: 181487 - DNA, 25 bp, Canis familiaris
tccgcagtggaggacctggagagga

SEQ ID NO: 181488 - DNA, 25 bp, Canis familiaris
tccggatgacctcccgaggatggat

SEQ ID NO: 181489 - DNA, 25 bp, Canis familiaris
tccggatgactccccgagatacgag

SEQ ID NO: 181490 - DNA, 25 bp, Canis familiaris
tccggaattcccgggatcctgggtg

SEQ ID NO: 181491 - DNA, 25 bp, Canis familiaris
tccggaattcccgggatctggcctg

SEQ ID NO: 181492 - DNA, 25 bp, Canis familiaris
tccggaattcccgggatgggagccg

SEQ ID NO: 181493 - DNA, 25 bp, Canis familiaris
tcggaccttccctggtggagggagg

SEQ ID NO: 181494 - DNA, 25 bp, Canis familiaris
tccgagtccatcctcggggagggga

SEQ ID NO: 181495 - DNA, 25 bp, Canis familiaris
tcctggctccacacagctgaggaga

SEQ ID NO: 181496 - DNA, 25 bp, Canis familiaris
tcctggactcacacactgtatgtac

SEQ ID NO: 181497 - DNA, 25 bp, Canis familiaris
tcctgggcatagtccacttctggac

SEQ ID NO: 181498 - DNA, 25 bp, Canis familiaris
tcctggcctaggctctttggacaga

SEQ ID NO: 181499 - DNA, 25 bp, Canis familiaris
tcctggcttcgtgggtttgcgaaat

SEQ ID NO: 181500 - DNA, 25 bp, Canis familiaris
tcctggcctcgtgggatacgtgatg

SEQ ID NO: 181501 - DNA, 25 bp, Canis familiaris
tcctgactctggggtcagacctgct

SEQ ID NO: 181502 - DNA, 25 bp, Canis familiaris
tccgaccgggaggatgacactgcca

SEQ ID NO: 181503 - DNA, 25 bp, Canis familiaris
tccgacgtggcggcgtgacaggata

SEQ ID NO: 181504 - DNA, 25 bp, Canis familiaris
tccgacgtgtccgtgacacactgaa

SEQ ID NO: 181505 - DNA, 25 bp, Canis familiaris
tcctgagctggtggccgaccagcca

SEQ ID NO: 181506 - DNA, 25 bp, Canis familiaris
tcctgagctggtggccgacagcaac

SEQ ID NO: 181507 - DNA, 25 bp, Canis familiaris
tcctgagctggtggccgacagccac

SEQ ID NO: 181508 - DNA, 25 bp, Canis familiaris
tcctgagctcagactgcggtactgc

SEQ ID NO: 181509 - DNA, 25 bp, Canis familiaris
tccgagctgacctgtgttcgggacc

SEQ ID NO: 181510 - DNA, 25 bp, Canis familiaris
tcctgtgtgcaggggtgtgtcgggg

SEQ ID NO: 181511 - DNA, 25 bp, Canis familiaris
tcctggtgaaagactcgccacgggc

SEQ ID NO: 181512 - DNA, 25 bp, Canis familiaris
tcctggccaaagtttgcacaaggga

SEQ ID NO: 181513 - DNA, 25 bp, Canis familiaris
tccggccaactgggagccaagggaa

SEQ ID NO: 181514 - DNA, 25 bp, Canis familiaris
tcctggcccccgagacaggggaggt

SEQ ID NO: 181515 - DNA, 25 bp, Canis familiaris
tcctgtccccacacgagatggaggg

SEQ ID NO: 181516 - DNA, 25 bp, Canis familiaris
tccgtcccccaaggaggatcatgat

SEQ ID NO: 181517 - DNA, 25 bp, Canis familiaris
tccgtgcccctcaggacatattaaa

SEQ ID NO: 181518 - DNA, 25 bp, Canis familiaris
tccgtcttccctttcagtattataa

SEQ ID NO: 181519 - DNA, 25 bp, Canis familiaris
tccctattccaatttcagttccata

SEQ ID NO: 181520 - DNA, 25 bp, Canis familiaris
tccctttccaatcatcagcatttac

SEQ ID NO: 181521 - DNA, 25 bp, Canis familiaris
tcggtttcacaaatggcagacttga

SEQ ID NO: 181522 - DNA, 25 bp, Canis familiaris
tccgatttcactaaggaactgagag

SEQ ID NO: 181523 - DNA, 25 bp, Canis familiaris
tccgtctatcccacagaactcggtt

SEQ ID NO: 181524 - DNA, 25 bp, Canis familiaris
tccgtctggcccaatcaggaacagg

SEQ ID NO: 181525 - DNA, 25 bp, Canis familiaris
tccggcgtgccgatcggcaagggtg

SEQ ID NO: 181526 - DNA, 25 bp, Canis familiaris
tcctgaggtcctatcggtgttgggt

SEQ ID NO: 181527 - DNA, 25 bp, Canis familiaris
tcctggggctcgtgagtgtttgtac

SEQ ID NO: 181528 - DNA, 25 bp, Canis familiaris
tccgagtggtggtggcgttggctcg

SEQ ID NO: 181529 - DNA, 25 bp, Canis familiaris
tccgcagggagggggcttgggatcc

SEQ ID NO: 181530 - DNA, 25 bp, Canis familiaris
tcccttggtgtggggtggggacctg

SEQ ID NO: 181531 - DNA, 25 bp, Canis familiaris
tcccctgcgggatgggggcgaccaa

SEQ ID NO: 181532 - DNA, 25 bp, Canis familiaris
tcccacgggactgggaggggccagc

SEQ ID NO: 181533 - DNA, 25 bp, Canis familiaris
tcgcccggtgacaccaggtggtcaa

SEQ ID NO: 181534 - DNA, 25 bp, Canis familiaris
tccccagaggacactcatcctgggc

SEQ ID NO: 181535 - DNA, 25 bp, Canis familiaris
tccgacaaggacatgtacctggaca

SEQ ID NO: 181536 - DNA, 25 bp, Canis familiaris
tccgactcggacaactactgtgtga

SEQ ID NO: 181537 - DNA, 25 bp, Canis familiaris
tccgacaagccctacttatgtgtga

SEQ ID NO: 181538 - DNA, 25 bp, Canis familiaris
tccggcaactcctactgtatgtagt

SEQ ID NO: 181539 - DNA, 25 bp, Canis familiaris
tccccaaccactagttgataagttt

SEQ ID NO: 181540 - DNA, 25 bp, Canis familiaris
tccccatacttctctttaaatcact

SEQ ID NO: 181541 - DNA, 25 bp, Canis familiaris
tccccacaatgttcggttacaactc

SEQ ID NO: 181542 - DNA, 25 bp, Canis familiaris
tccccacaggtacctatggccaaat

SEQ ID NO: 181543 - DNA, 25 bp, Canis familiaris
tccccacggtggagattgccattcg

SEQ ID NO: 181544 - DNA, 25 bp, Canis familiaris
tcccgacggaggtagttcctcgtag

SEQ ID NO: 181545 - DNA, 25 bp, Canis familiaris
tccctatggaaattaatccccttca

SEQ ID NO: 181546 - DNA, 25 bp, Canis familiaris
tccctcaggagtttatttcccttca

SEQ ID NO: 181547 - DNA, 25 bp, Canis familiaris
tccccatgggctagtttacctgtgt

SEQ ID NO: 181548 - DNA, 25 bp, Canis familiaris
tcccctattgccattaaactgttaa

SEQ ID NO: 181549 - DNA, 25 bp, Canis familiaris
tcccctattcctgctaagccaggga

SEQ ID NO: 181550 - DNA, 25 bp, Canis familiaris
tcccctttgcaggccataggactgg

SEQ ID NO: 181551 - DNA, 25 bp, Canis familiaris
tcccccctgagaacgcagcataagg

SEQ ID NO: 181552 - DNA, 25 bp, Canis familiaris
tcccgccgttgaacaactagtgccc

SEQ ID NO: 181553 - DNA, 25 bp, Canis familiaris
tcctggtctttatccactagacacc

SEQ ID NO: 181554 - DNA, 25 bp, Canis familiaris
tcctgtgttttttcccttatggtag

SEQ ID NO: 181555 - DNA, 25 bp, Canis familiaris
tccctatttttatccattacaataa

SEQ ID NO: 181556 - DNA, 25 bp, Canis familiaris
tccgcaattgctgataccgatataa

SEQ ID NO: 181557 - DNA, 25 bp, Canis familiaris
tccgcatggcttgataccagatatg

SEQ ID NO: 181558 - DNA, 25 bp, Canis familiaris
tccgatccattgccattccagagga

SEQ ID NO: 181559 - DNA, 25 bp, Canis familiaris
tccgcatccagaagttccgggtcac

SEQ ID NO: 181560 - DNA, 25 bp, Canis familiaris
tccgtccagatcaaacctggagctt

SEQ ID NO: 181561 - DNA, 25 bp, Canis familiaris
tccgtgccttcaaatctcttgacaa

SEQ ID NO: 181562 - DNA, 25 bp, Canis familiaris
tcctgtgccttagcagcatctatga

SEQ ID NO: 181563 - DNA, 25 bp, Canis familiaris
tccgtgctgcctttggcatcagtga

SEQ ID NO: 181564 - DNA, 25 bp, Canis familiaris
tcctgtgccgtggtggcatatcagg

SEQ ID NO: 181565 - DNA, 25 bp, Canis familiaris
tccggccatgtggtggctgtggacc

SEQ ID NO: 181566 - DNA, 25 bp, Canis familiaris
tccgcaccaagcctgagttagcaac

SEQ ID NO: 181567 - DNA, 25 bp, Canis familiaris
tccgagccagtccgtttatagaatg

SEQ ID NO: 181568 - DNA, 25 bp, Canis familiaris
tcctggcaacctcgtttgatatcaa

SEQ ID NO: 181569 - DNA, 25 bp, Canis familiaris
tcctgtcagcacctctgtatgttaa

SEQ ID NO: 181570 - DNA, 25 bp, Canis familiaris
tcctgtctgctccttgagttttgta

SEQ ID NO: 181571 - DNA, 25 bp, Canis familiaris
tccgtcttctttcatttctgtaaca

SEQ ID NO: 181572 - DNA, 25 bp, Canis familiaris
tccgtcttctttcatttctgtaaca

SEQ ID NO: 181573 - DNA, 25 bp, Canis familiaris
tccgcctagttacctatctttgaaa

SEQ ID NO: 181574 - DNA, 25 bp, Canis familiaris
tccgcgctaataaagccttctggaa

SEQ ID NO: 181575 - DNA, 25 bp, Canis familiaris
tccgcctggacaacgcctctgcatt

SEQ ID NO: 181576 - DNA, 25 bp, Canis familiaris
tccccgatgccaagaattcgcatct

SEQ ID NO: 181577 - DNA, 25 bp, Canis familiaris
tccgggagcccggatgatctgctcc

SEQ ID NO: 181578 - DNA, 25 bp, Canis familiaris
tcctggagagctgggctgtcatccc

SEQ ID NO: 181579 - DNA, 25 bp, Canis familiaris
tcctgtccagctgctggtacccagt

SEQ ID NO: 181580 - DNA, 25 bp, Canis familiaris
tcctggtcacctagtggactgccag

SEQ ID NO: 181581 - DNA, 25 bp, Canis familiaris
tcctgggccagctggggatgagcag

SEQ ID NO: 181582 - DNA, 25 bp, Canis familiaris
tcctgtgtccgggaggcacatgcac

SEQ ID NO: 181583 - DNA, 25 bp, Canis familiaris
tccggcaacgaggagtcctgacacc

SEQ ID NO: 181584 - DNA, 25 bp, Canis familiaris
tccgcacaaggagagtactcgcacg

SEQ ID NO: 181585 - DNA, 25 bp, Canis familiaris
tcccaacaggacatctacatctaag

SEQ ID NO: 181586 - DNA, 25 bp, Canis familiaris
tcccccactatctctacatttagtt

SEQ ID NO: 181587 - DNA, 25 bp, Canis familiaris
tcccccctatgccataacatttaaa

SEQ ID NO: 181588 - DNA, 25 bp, Canis familiaris
tccccgactagccagtacaagtaca

SEQ ID NO: 181589 - DNA, 25 bp, Canis familiaris
tcccctgctgtagggacccaattgc

SEQ ID NO: 181590 - DNA, 25 bp, Canis familiaris
tccccactggtgttacccagacatc

SEQ ID NO: 181591 - DNA, 25 bp, Canis familiaris
tcccaactgggacttgcgagcaact

SEQ ID NO: 181592 - DNA, 25 bp, Canis familiaris
tcccggtggacagttctacaactcc

SEQ ID NO: 181593 - DNA, 25 bp, Canis familiaris
tcccgaaaagccatcgacaagcttc

SEQ ID NO: 181594 - DNA, 25 bp, Canis familiaris
tcccgtaaccttgcacacaagcttc

SEQ ID NO: 181595 - DNA, 25 bp, Canis familiaris
tcccttgcagatgttccagcgaagt

SEQ ID NO: 181596 - DNA, 25 bp, Canis familiaris
tcccttcagtgaatggtccagaaca

SEQ ID NO: 181597 - DNA, 25 bp, Canis familiaris
tcccttaagatcagcccaaacatgg

SEQ ID NO: 181598 - DNA, 25 bp, Canis familiaris
tcccttatcctatccgcaaacagat

SEQ ID NO: 181599 - DNA, 25 bp, Canis familiaris
tcccttcatttctctctgaaacact

SEQ ID NO: 181600 - DNA, 25 bp, Canis familiaris
tcccttgggctctcagtaatatcct

SEQ ID NO: 181601 - DNA, 25 bp, Canis familiaris
tcccctacgatcacgtatacaccta

SEQ ID NO: 181602 - DNA, 25 bp, Canis familiaris
tcccccactgtcatttccaaaggaa

SEQ ID NO: 181603 - DNA, 25 bp, Canis familiaris
tccccctttcttgacacaacacggg

SEQ ID NO: 181604 - DNA, 25 bp, Canis familiaris
tcccccttttttgctgctataaatt

SEQ ID NO: 181605 - DNA, 25 bp, Canis familiaris
tcccctttattctcctgaaaatcat

SEQ ID NO: 181606 - DNA, 25 bp, Canis familiaris
tcccttttactctcatgccagaaat

SEQ ID NO: 181607 - DNA, 25 bp, Canis familiaris
tcccgttgtccctggcacagatgcc

SEQ ID NO: 181608 - DNA, 25 bp, Canis familiaris
tccgcaagtgcccctgggcaagaga

SEQ ID NO: 181609 - DNA, 25 bp, Canis familiaris
tcctgtgattcccctggcagaaagt

SEQ ID NO: 181610 - DNA, 25 bp, Canis familiaris
tccgctgttggaccatggccaactt

SEQ ID NO: 181611 - DNA, 25 bp, Canis familiaris
tccgtgtctgtatctgttcatatgt

SEQ ID NO: 181612 - DNA, 25 bp, Canis familiaris
tcctggatttatcattctcactgcc

SEQ ID NO: 181613 - DNA, 25 bp, Canis familiaris
tcctgtgacttcaacagtgacaccc

SEQ ID NO: 181614 - DNA, 25 bp, Canis familiaris
tccggcatttctgagtgcagcagca

SEQ ID NO: 181615 - DNA, 25 bp, Canis familiaris
tcctggccttctgtgtgctgaagtg

SEQ ID NO: 181616 - DNA, 25 bp, Canis familiaris
tcctggcttctggttgccgaaggat

SEQ ID NO: 181617 - DNA, 25 bp, Canis familiaris
tcctggtgtccttgctccagaagaa

SEQ ID NO: 181618 - DNA, 25 bp, Canis familiaris
tcctgggatcctgtccggagagaaa

SEQ ID NO: 181619 - DNA, 25 bp, Canis familiaris
tcctgggatggggtcctgggatgga

SEQ ID NO: 181620 - DNA, 25 bp, Canis familiaris
tcctggggaggagtcctgctgggga

SEQ ID NO: 181621 - DNA, 25 bp, Canis familiaris
tcctggggaggagtcctgctgggga

SEQ ID NO: 181622 - DNA, 25 bp, Canis familiaris
tccgtggaggagttcaccagggtgg

SEQ ID NO: 181623 - DNA, 25 bp, Canis familiaris
tcctggggtaggaccaagtggtata

SEQ ID NO: 181624 - DNA, 25 bp, Canis familiaris
tcctgggtgtcagcggccaatggta

SEQ ID NO: 181625 - DNA, 25 bp, Canis familiaris
tcctgtggctgtgccaggccaagaa

SEQ ID NO: 181626 - DNA, 25 bp, Canis familiaris
tccgtggggcccaagccgaagaaat

SEQ ID NO: 181627 - DNA, 25 bp, Canis familiaris
tccggagggcccaacaggacatgga

SEQ ID NO: 181628 - DNA, 25 bp, Canis familiaris
tccgctgggtccccaaggacaagaa

SEQ ID NO: 181629 - DNA, 25 bp, Canis familiaris
tcccagcggggcgccggaagagtaa

SEQ ID NO: 181630 - DNA, 25 bp, Canis familiaris
tcccggggggaatgcggcaattaat

SEQ ID NO: 181631 - DNA, 25 bp, Canis familiaris
tcccaggggggcaggaggagcttcc

SEQ ID NO: 181632 - DNA, 25 bp, Canis familiaris
tccgcggggaggtgaggcgggactc

SEQ ID NO: 181633 - DNA, 25 bp, Canis familiaris
tcgagaagggggtgcccctgtaccg

SEQ ID NO: 181634 - DNA, 25 bp, Canis familiaris
tcgaactggggttaaccactgtcac

SEQ ID NO: 181635 - DNA, 25 bp, Canis familiaris
tcccagttactttacccagtgacac

SEQ ID NO: 181636 - DNA, 25 bp, Canis familiaris
tctctcaggtaccagaacccggtag

SEQ ID NO: 181637 - DNA, 25 bp, Canis familiaris
tcctggagtacctcaccgcagaggt

SEQ ID NO: 181638 - DNA, 25 bp, Canis familiaris
tccggagtcatagttacctgagggc

SEQ ID NO: 181639 - DNA, 25 bp, Canis familiaris
tcctgggatcaagtccctgcatcag

SEQ ID NO: 181640 - DNA, 25 bp, Canis familiaris
tcctgggatcaagtccctgcatcag

SEQ ID NO: 181641 - DNA, 25 bp, Canis familiaris
tccgctggatgatgtcttgatgctc

SEQ ID NO: 181642 - DNA, 25 bp, Canis familiaris
tcgtgcagttaagtcatatgtcact

SEQ ID NO: 181643 - DNA, 25 bp, Canis familiaris
tccgcatgctgataccatataacta

SEQ ID NO: 181644 - DNA, 25 bp, Canis familiaris
tccgcatgctaatcgctttttaccg

SEQ ID NO: 181645 - DNA, 25 bp, Canis familiaris
tctcgagtcacatccctttataatt

SEQ ID NO: 181646 - DNA, 25 bp, Canis familiaris
tccgagccacacagcctttgaatgg

SEQ ID NO: 181647 - DNA, 25 bp, Canis familiaris
tccgagccaacttctactgtgaact

SEQ ID NO: 181648 - DNA, 25 bp, Canis familiaris
tccgtgcccatcagtactgtggaat

SEQ ID NO: 181649 - DNA, 25 bp, Canis familiaris
tccgcatgtctgaggatgactggga

SEQ ID NO: 181650 - DNA, 25 bp, Canis familiaris
tccgcagccatggccaagacggtga

SEQ ID NO: 181651 - DNA, 25 bp, Canis familiaris
tccgcaggagccgagagatggtcta

SEQ ID NO: 181652 - DNA, 25 bp, Canis familiaris
tccgcatggtggcagtgctggtgtc

SEQ ID NO: 181653 - DNA, 25 bp, Canis familiaris
tcctgggctgtgaactgtggtctgc

SEQ ID NO: 181654 - DNA, 25 bp, Canis familiaris
tccggatgctacacgtggaccggcg

SEQ ID NO: 181655 - DNA, 25 bp, Canis familiaris
tccggtctcagggccggacggacga

SEQ ID NO: 181656 - DNA, 25 bp, Canis familiaris
tccggtccggcccaatgggataggc

SEQ ID NO: 181657 - DNA, 25 bp, Canis familiaris
tcgaggtcctagcatcgtcggaaac

SEQ ID NO: 181658 - DNA, 25 bp, Canis familiaris
tccggtacacagttcctccgaagac

SEQ ID NO: 181659 - DNA, 25 bp, Canis familiaris
tccggtgtctggttcgactggaaac

SEQ ID NO: 181660 - DNA, 25 bp, Canis familiaris
tccgagtactggttctgagggccca

SEQ ID NO: 181661 - DNA, 25 bp, Canis familiaris
tccgggacgtgatgcagaaccacct

SEQ ID NO: 181662 - DNA, 25 bp, Canis familiaris
tccgggacatgattcgcagggccca

SEQ ID NO: 181663 - DNA, 25 bp, Canis familiaris
tctcaaggaatcaccgtctccaagt

SEQ ID NO: 181664 - DNA, 25 bp, Canis familiaris
tcccggactacctgtgtggcaagat

SEQ ID NO: 181665 - DNA, 25 bp, Canis familiaris
tccgggatctgaacaaggatgggaa

SEQ ID NO: 181666 - DNA, 25 bp, Canis familiaris
tccggagatggcacaagcgctgcgt

SEQ ID NO: 181667 - DNA, 25 bp, Canis familiaris
tccggggcgctgcatagagtgctgt

SEQ ID NO: 181668 - DNA, 25 bp, Canis familiaris
tccggggcgctgcatagagtgctgt

SEQ ID NO: 181669 - DNA, 25 bp, Canis familiaris
tcctggggactgacgggtctggtcc

SEQ ID NO: 181670 - DNA, 25 bp, Canis familiaris
tccgggtgccgaacaggttgagtcc

SEQ ID NO: 181671 - DNA, 25 bp, Canis familiaris
tccgggctggcactccagtttaatt

SEQ ID NO: 181672 - DNA, 25 bp, Canis familiaris
tcggggtagtgtgagcttttaatgt

SEQ ID NO: 181673 - DNA, 25 bp, Canis familiaris
tcgttgggggtgaacttgtcgttgg

SEQ ID NO: 181674 - DNA, 25 bp, Canis familiaris
tcacttagggttcactggtttttgt

SEQ ID NO: 181675 - DNA, 25 bp, Canis familiaris
tccgggggtgatcactggttttctg

SEQ ID NO: 181676 - DNA, 25 bp, Canis familiaris
tccggttcaaaccacttggtgtttg

SEQ ID NO: 181677 - DNA, 25 bp, Canis familiaris
tcccgttcaggacttttgttttgtg

SEQ ID NO: 181678 - DNA, 25 bp, Canis familiaris
tcccgtctttgtcagttgtacttgt

SEQ ID NO: 181679 - DNA, 25 bp, Canis familiaris
tcccaattttgtcagttacgtgtgt

SEQ ID NO: 181680 - DNA, 25 bp, Canis familiaris
tcccgttttgtcttcttaaggtgtg

SEQ ID NO: 181681 - DNA, 25 bp, Canis familiaris
tccccggtctactgcacaaagggtt

SEQ ID NO: 181682 - DNA, 25 bp, Canis familiaris
tccctcttgtcatctggcccaagag

SEQ ID NO: 181683 - DNA, 25 bp, Canis familiaris
tccctcgtgaggctggatctcaaaa

SEQ ID NO: 181684 - DNA, 25 bp, Canis familiaris
tcccgtggggccaggtcaataaacg

SEQ ID NO: 181685 - DNA, 25 bp, Canis familiaris
tcccttggggataaactcttattag

SEQ ID NO: 181686 - DNA, 25 bp, Canis familiaris
tccgctctggggatttccattttat

SEQ ID NO: 181687 - DNA, 25 bp, Canis familiaris
tccgtctgttgtttctttattctta

SEQ ID NO: 181688 - DNA, 25 bp, Canis familiaris
tccccatttgtcaacttttgtccgt

SEQ ID NO: 181689 - DNA, 25 bp, Canis familiaris
tccccgaggttcatgttgtgggctg

SEQ ID NO: 181690 - DNA, 25 bp, Canis familiaris
tccccagggttcacctgtgtacaag

SEQ ID NO: 181691 - DNA, 25 bp, Canis familiaris
tccccaaagtctcacctggttgagg

SEQ ID NO: 181692 - DNA, 25 bp, Canis familiaris
tccgcccacagagaccctggtgggt

SEQ ID NO: 181693 - DNA, 25 bp, Canis familiaris
tccgccctaacgagactgtggggga

SEQ ID NO: 181694 - DNA, 25 bp, Canis familiaris
tcccggctaactgcaacttggacag

SEQ ID NO: 181695 - DNA, 25 bp, Canis familiaris
tccccggacctcagcaggatggaag

SEQ ID NO: 181696 - DNA, 25 bp, Canis familiaris
tccccagggacagggcgcaggaagg

SEQ ID NO: 181697 - DNA, 25 bp, Canis familiaris
tccccaggaacccctgggaatcgtg

SEQ ID NO: 181698 - DNA, 25 bp, Canis familiaris
tccccacccccattcttagaatggg

SEQ ID NO: 181699 - DNA, 25 bp, Canis familiaris
tccccttgtacctatctttgaaggc

SEQ ID NO: 181700 - DNA, 25 bp, Canis familiaris
tccgacctgtatcaatttaaagaaa

SEQ ID NO: 181701 - DNA, 25 bp, Canis familiaris
tccccgcgcttcgaattcaaaaaat

SEQ ID NO: 181702 - DNA, 25 bp, Canis familiaris
tcccccgcatttttatataaacaca

SEQ ID NO: 181703 - DNA, 25 bp, Canis familiaris
tccccccattattggcttggtaaag

SEQ ID NO: 181704 - DNA, 25 bp, Canis familiaris
tccgccccagatcggggatcgctga

SEQ ID NO: 181705 - DNA, 25 bp, Canis familiaris
tccgccaggtgtctgacgtacagaa

SEQ ID NO: 181706 - DNA, 25 bp, Canis familiaris
tccgtcgtggatctgacgtgccgcc

SEQ ID NO: 181707 - DNA, 25 bp, Canis familiaris
tccgtccgtgagtctgataggcttg

SEQ ID NO: 181708 - DNA, 25 bp, Canis familiaris
tcccccgtatgcttgtactgtatgt

SEQ ID NO: 181709 - DNA, 25 bp, Canis familiaris
tccccactagtcttatcctgatagg

SEQ ID NO: 181710 - DNA, 25 bp, Canis familiaris
tccccgcacacctgtggtctagggg

SEQ ID NO: 181711 - DNA, 25 bp, Canis familiaris
tccccaccagccagggttttgggat

SEQ ID NO: 181712 - DNA, 25 bp, Canis familiaris
tccctaacgtccaggattcttggtt

SEQ ID NO: 181713 - DNA, 25 bp, Canis familiaris
tccctaatttccatctagtttaatt

SEQ ID NO: 181714 - DNA, 25 bp, Canis familiaris
tccgctaaacccatcttgatgtctg

SEQ ID NO: 181715 - DNA, 25 bp, Canis familiaris
tccgacacaaccgtggttgagccac

SEQ ID NO: 181716 - DNA, 25 bp, Canis familiaris
tcccttcaacacaggatggaccatc

SEQ ID NO: 181717 - DNA, 25 bp, Canis familiaris
tccccatcctcaaaggtgtggctct

SEQ ID NO: 181718 - DNA, 25 bp, Canis familiaris
tccccaaggcatcatgggtggcccc

SEQ ID NO: 181719 - DNA, 25 bp, Canis familiaris
tcccccgcagagcggggtgtccgcg

SEQ ID NO: 181720 - DNA, 25 bp, Canis familiaris
tcccccatcgagaggactatctcca

SEQ ID NO: 181721 - DNA, 25 bp, Canis familiaris
tcccgcctaaattgagcctttgagc

SEQ ID NO: 181722 - DNA, 25 bp, Canis familiaris
tcccccagacagatgaccttgtaca

SEQ ID NO: 181723 - DNA, 25 bp, Canis familiaris
tcccctcgggattaactgtacaaat

SEQ ID NO: 181724 - DNA, 25 bp, Canis familiaris
tcacccacggggagaagtagcacag

SEQ ID NO: 181725 - DNA, 25 bp, Canis familiaris
tcccaccaggggaggggcatcacac

SEQ ID NO: 181726 - DNA, 25 bp, Canis familiaris
tccgacacaggggccgagggagacc

SEQ ID NO: 181727 - DNA, 25 bp, Canis familiaris
tcgctaacagcctgggacggtagcc

SEQ ID NO: 181728 - DNA, 25 bp, Canis familiaris
tcctggagacccgggatcgaatccc

SEQ ID NO: 181729 - DNA, 25 bp, Canis familiaris
tcctggagacccgggatcgaatccc

SEQ ID NO: 181730 - DNA, 25 bp, Canis familiaris
tcctggagacccgggatcgaatccc

SEQ ID NO: 181731 - DNA, 25 bp, Canis familiaris
tcctggagacccgggatcgaatccc

SEQ ID NO: 181732 - DNA, 25 bp, Canis familiaris
tcctggagacccgggatcgaatccc

SEQ ID NO: 181733 - DNA, 25 bp, Canis familiaris
tccgcggagcccgagggcgaagtac

SEQ ID NO: 181734 - DNA, 25 bp, Canis familiaris
tccgaggagcgcccgtgggagaatg

SEQ ID NO: 181735 - DNA, 25 bp, Canis familiaris
tccggagagctgggcgggtgggagt

SEQ ID NO: 181736 - DNA, 25 bp, Canis familiaris
tccgaggaggtggcagcggtggccg

SEQ ID NO: 181737 - DNA, 25 bp, Canis familiaris
tcgcgacgggacaaggggtccggag

SEQ ID NO: 181738 - DNA, 25 bp, Canis familiaris
tccccgcggagctggagaaccggat

SEQ ID NO: 181739 - DNA, 25 bp, Canis familiaris
tcccccaggaagtcagaaaccagtt

SEQ ID NO: 181740 - DNA, 25 bp, Canis familiaris
tcccacaccgaagttacgacacgta

SEQ ID NO: 181741 - DNA, 25 bp, Canis familiaris
tccctacccacagcttctgaattaa

SEQ ID NO: 181742 - DNA, 25 bp, Canis familiaris
tcccaccccactgttctaaataaat

SEQ ID NO: 181743 - DNA, 25 bp, Canis familiaris
tcccagcccccagatttatagtaat

SEQ ID NO: 181744 - DNA, 25 bp, Canis familiaris
tcccacccccaattatggttgttgt

SEQ ID NO: 181745 - DNA, 25 bp, Canis familiaris
tcccaaacccaagttcatttgttga

SEQ ID NO: 181746 - DNA, 25 bp, Canis familiaris
tcccaacgcacgtgttcataatttg

SEQ ID NO: 181747 - DNA, 25 bp, Canis familiaris
tccccactctagagttccaagatat

SEQ ID NO: 181748 - DNA, 25 bp, Canis familiaris
tccccatcccagaacttacagaaat

SEQ ID NO: 181749 - DNA, 25 bp, Canis familiaris
tccccacccatatcacttagtgaac

SEQ ID NO: 181750 - DNA, 25 bp, Canis familiaris
tcgaccacatcctcaacctagagga

SEQ ID NO: 181751 - DNA, 25 bp, Canis familiaris
tcccacaatcatctcatacctaagc

SEQ ID NO: 181752 - DNA, 25 bp, Canis familiaris
tccccacatcatctcagagacgcat

SEQ ID NO: 181753 - DNA, 25 bp, Canis familiaris
tccgatgatccttaaatgagctgca

SEQ ID NO: 181754 - DNA, 25 bp, Canis familiaris
tccgtgagttaaaatgcgtgcccca

SEQ ID NO: 181755 - DNA, 25 bp, Canis familiaris
tccggagctgtccagaatgctggcc

SEQ ID NO: 181756 - DNA, 25 bp, Canis familiaris
tccggatcacggcaatgcggctgca

SEQ ID NO: 181757 - DNA, 25 bp, Canis familiaris
tccggatcacggcaatgcggctgca

SEQ ID NO: 181758 - DNA, 25 bp, Canis familiaris
tcccgtgcacggaaaatacagcgtt

SEQ ID NO: 181759 - DNA, 25 bp, Canis familiaris
tcccgagaaggcaacattccacgaa

SEQ ID NO: 181760 - DNA, 25 bp, Canis familiaris
tcccggagggcaataccccgggctg

SEQ ID NO: 181761 - DNA, 25 bp, Canis familiaris
tcccgtggcctcgggccacggggct

SEQ ID NO: 181762 - DNA, 25 bp, Canis familiaris
tcccgtggcctcgggccacggggct

SEQ ID NO: 181763 - DNA, 25 bp, Canis familiaris
tcccgtggcctcgggccacggggct

SEQ ID NO: 181764 - DNA, 25 bp, Canis familiaris
tccccgtgcgacgaggctactgggg

SEQ ID NO: 181765 - DNA, 25 bp, Canis familiaris
tccgccagggaaggcgccctggtac

SEQ ID NO: 181766 - DNA, 25 bp, Canis familiaris
tccccggagaagtatcctatggtat

SEQ ID NO: 181767 - DNA, 25 bp, Canis familiaris
tccctccagggaaatctattgctta

SEQ ID NO: 181768 - DNA, 25 bp, Canis familiaris
tcccttcaaaagccctttgttatag

SEQ ID NO: 181769 - DNA, 25 bp, Canis familiaris
tcccccaacagctgcctaatttagg

SEQ ID NO: 181770 - DNA, 25 bp, Canis familiaris
tcccccaaatgcagccgagttgaat

SEQ ID NO: 181771 - DNA, 25 bp, Canis familiaris
tcccctctcaagcccgggcttgagg

SEQ ID NO: 181772 - DNA, 25 bp, Canis familiaris
tcccctcccaggaatggccaagagg

SEQ ID NO: 181773 - DNA, 25 bp, Canis familiaris
tcccttcaccagcatttgtacagag

SEQ ID NO: 181774 - DNA, 25 bp, Canis familiaris
tccctggaccagcttcgagctgaac

SEQ ID NO: 181775 - DNA, 25 bp, Canis familiaris
tccctgtgtctctacgttggtaatc

SEQ ID NO: 181776 - DNA, 25 bp, Canis familiaris
tcccctggccaaccattgagatgat

SEQ ID NO: 181777 - DNA, 25 bp, Canis familiaris
tcgctcggatccatccactaaggag

SEQ ID NO: 181778 - DNA, 25 bp, Canis familiaris
tccccagaccttgccatttgggaac

SEQ ID NO: 181779 - DNA, 25 bp, Canis familiaris
tccccagaccttgccatttggaaac

SEQ ID NO: 181780 - DNA, 25 bp, Canis familiaris
tccccagaccttgccatttggaaac

SEQ ID NO: 181781 - DNA, 25 bp, Canis familiaris
tccccagaccttgccatttggaaac

SEQ ID NO: 181782 - DNA, 25 bp, Canis familiaris
tccccagaccttgccatttggaaac

SEQ ID NO: 181783 - DNA, 25 bp, Canis familiaris
tccccagaccttgccatttggaaac

SEQ ID NO: 181784 - DNA, 25 bp, Canis familiaris
tccccagaccttgccatttggaaac

SEQ ID NO: 181785 - DNA, 25 bp, Canis familiaris
tccccagaccttgccatttggaaac

SEQ ID NO: 181786 - DNA, 25 bp, Canis familiaris
tccccagaccttgccatttggaaac

SEQ ID NO: 181787 - DNA, 25 bp, Canis familiaris
tccccagaccttgccatttggaaac

SEQ ID NO: 181788 - DNA, 25 bp, Canis familiaris
tccccagaccttgccatttggaaac

SEQ ID NO: 181789 - DNA, 25 bp, Canis familiaris
tccccagaccttgccatttggaaac

SEQ ID NO: 181790 - DNA, 25 bp, Canis familiaris
tccccagaccttgccatttggaaac

SEQ ID NO: 181791 - DNA, 25 bp, Canis familiaris
tccccagacctttcatcttatctga

SEQ ID NO: 181792 - DNA, 25 bp, Canis familiaris
tccccacccttgtcagatggacaga

SEQ ID NO: 181793 - DNA, 25 bp, Canis familiaris
tcccttccgcttgcttaaatattcc

SEQ ID NO: 181794 - DNA, 25 bp, Canis familiaris
tcccattccgtcgctacaatggtgg

SEQ ID NO: 181795 - DNA, 25 bp, Canis familiaris
tcccattccgtcgctacaatggtgg

SEQ ID NO: 181796 - DNA, 25 bp, Canis familiaris
tcccattccgtcgctacaatggtgg

SEQ ID NO: 181797 - DNA, 25 bp, Canis familiaris
tcccattccgtcgctacaatggtgg

SEQ ID NO: 181798 - DNA, 25 bp, Canis familiaris
tcccattccgtcgctacaatggtgg

SEQ ID NO: 181799 - DNA, 25 bp, Canis familiaris
tccctgctctggtaacccaatagtt

SEQ ID NO: 181800 - DNA, 25 bp, Canis familiaris
tcccctctggtgaccatcaatgtat

SEQ ID NO: 181801 - DNA, 25 bp, Canis familiaris
tccccttgacagagcagcacagact

SEQ ID NO: 181802 - DNA, 25 bp, Canis familiaris
tccccttccagttgacctgagttag

SEQ ID NO: 181803 - DNA, 25 bp, Canis familiaris
tcccctcaccagaaacctttctagg

SEQ ID NO: 181804 - DNA, 25 bp, Canis familiaris
tcccctccaagtaacactcagtttg

SEQ ID NO: 181805 - DNA, 25 bp, Canis familiaris
tccccttggactaccagtagcctga

SEQ ID NO: 181806 - DNA, 25 bp, Canis familiaris
tccccctgaaagaccattcagtaga

SEQ ID NO: 181807 - DNA, 25 bp, Canis familiaris
tcgcccctaaacacagccgaagaga

SEQ ID NO: 181808 - DNA, 25 bp, Canis familiaris
tcccccctgacaattacctgaggag

SEQ ID NO: 181809 - DNA, 25 bp, Canis familiaris
tcccccggaatgaataacatgagct

SEQ ID NO: 181810 - DNA, 25 bp, Canis familiaris
tccgtccggaggtatctactgacct

SEQ ID NO: 181811 - DNA, 25 bp, Canis familiaris
tccgtgcatcgggtacaatagtccc

SEQ ID NO: 181812 - DNA, 25 bp, Canis familiaris
tccccacgtgggacaataagccctg

SEQ ID NO: 181813 - DNA, 25 bp, Canis familiaris
tcccccgtggtgcgaatagatcgtg

SEQ ID NO: 181814 - DNA, 25 bp, Canis familiaris
tccggggggagggcaatcatgacgt

SEQ ID NO: 181815 - DNA, 25 bp, Canis familiaris
tccggggggagggcaatcatgacgt

SEQ ID NO: 181816 - DNA, 25 bp, Canis familiaris
tccgtgtgggggacctggtgattgt

SEQ ID NO: 181817 - DNA, 25 bp, Canis familiaris
tccggtggacaggaccatgttggtg

SEQ ID NO: 181818 - DNA, 25 bp, Canis familiaris
tcccgttaagctggtctgctcggtg

SEQ ID NO: 181819 - DNA, 25 bp, Canis familiaris
tccctctaagacggacctgggtgct

SEQ ID NO: 181820 - DNA, 25 bp, Canis familiaris
tcccatataaacgccctttgcatgc

SEQ ID NO: 181821 - DNA, 25 bp, Canis familiaris
tcccttggatgagaacttttgagat

SEQ ID NO: 181822 - DNA, 25 bp, Canis familiaris
tcccgggattaattattttggtcat

SEQ ID NO: 181823 - DNA, 25 bp, Canis familiaris
tcccggacaaacatttactgagtat

SEQ ID NO: 181824 - DNA, 25 bp, Canis familiaris
tcccggaaagccaatttccaaggca

SEQ ID NO: 181825 - DNA, 25 bp, Canis familiaris
tccccgagaaccatgttctccacgg

SEQ ID NO: 181826 - DNA, 25 bp, Canis familiaris
tccctccgaacaattgaatcttatc

SEQ ID NO: 181827 - DNA, 25 bp, Canis familiaris
tccctccaacccagagacttttagg

SEQ ID NO: 181828 - DNA, 25 bp, Canis familiaris
tccccaaaaacttaactgctaatag

SEQ ID NO: 181829 - DNA, 25 bp, Canis familiaris
tccccataggaataaccatctcgaa

SEQ ID NO: 181830 - DNA, 25 bp, Canis familiaris
tcccctaccagatgtaccttggaag

SEQ ID NO: 181831 - DNA, 25 bp, Canis familiaris
tcccctaagagggctacctctgtgg

SEQ ID NO: 181832 - DNA, 25 bp, Canis familiaris
tcccttggagggtcaagtctgtgtg

SEQ ID NO: 181833 - DNA, 25 bp, Canis familiaris
tccccgtgagacctaggtcggtggg

SEQ ID NO: 181834 - DNA, 25 bp, Canis familiaris
tccctcgttgacccaggtttagaag

SEQ ID NO: 181835 - DNA, 25 bp, Canis familiaris
tcccccttgatttggcttctaagaa

SEQ ID NO: 181836 - DNA, 25 bp, Canis familiaris
tccctcctttttgcatcttattaaa

SEQ ID NO: 181837 - DNA, 25 bp, Canis familiaris
tccccagtcttattggctcttttat

SEQ ID NO: 181838 - DNA, 25 bp, Canis familiaris
tccgccctcacaagatggccattaa

SEQ ID NO: 181839 - DNA, 25 bp, Canis familiaris
tccgcgtcccgaatgctgacattga

SEQ ID NO: 181840 - DNA, 25 bp, Canis familiaris
tccctgacccgtaatcacttagagt

SEQ ID NO: 181841 - DNA, 25 bp, Canis familiaris
tccctacccctcatgaatatacagt

SEQ ID NO: 181842 - DNA, 25 bp, Canis familiaris
tcccaacccttgttgttcaactgta

SEQ ID NO: 181843 - DNA, 25 bp, Canis familiaris
tcccctagactttgtttcacctaat

SEQ ID NO: 181844 - DNA, 25 bp, Canis familiaris
tcccctgcaagcatgttttccacaa

SEQ ID NO: 181845 - DNA, 25 bp, Canis familiaris
tccctccatagagctttctccaaga

SEQ ID NO: 181846 - DNA, 25 bp, Canis familiaris
tcccttgaagtgccttctctgtgac

SEQ ID NO: 181847 - DNA, 25 bp, Canis familiaris
tcccttaggggctatatatttacgc

SEQ ID NO: 181848 - DNA, 25 bp, Canis familiaris
tcccacttgcctcctttatttaggc

SEQ ID NO: 181849 - DNA, 25 bp, Canis familiaris
tcccatcttcatccttaattttaac

SEQ ID NO: 181850 - DNA, 25 bp, Canis familiaris
tcccattatatacccatttttttca

SEQ ID NO: 181851 - DNA, 25 bp, Canis familiaris
tcccccagtaggtattttagcttca

SEQ ID NO: 181852 - DNA, 25 bp, Canis familiaris
tcgaccggggagtcgtgtttgtcca

SEQ ID NO: 181853 - DNA, 25 bp, Canis familiaris
tccccaggcggagcgtgatgttgac

SEQ ID NO: 181854 - DNA, 25 bp, Canis familiaris
tccccaatcggtgccagatggcgtt

SEQ ID NO: 181855 - DNA, 25 bp, Canis familiaris
tccccttccggagagcagggcttgc

SEQ ID NO: 181856 - DNA, 25 bp, Canis familiaris
tccccttccggagagcagggcttgc

SEQ ID NO: 181857 - DNA, 25 bp, Canis familiaris
tccccttccggagagcagggcttgc

SEQ ID NO: 181858 - DNA, 25 bp, Canis familiaris
tccccttccggagagcagggcttgc

SEQ ID NO: 181859 - DNA, 25 bp, Canis familiaris
tccccttccggagagcagggcttgc

SEQ ID NO: 181860 - DNA, 25 bp, Canis familiaris
tccccttccggagagcagggcttgc

SEQ ID NO: 181861 - DNA, 25 bp, Canis familiaris
tcccctcccaggacctgaggggctt

SEQ ID NO: 181862 - DNA, 25 bp, Canis familiaris
tcccattcctgggaactcgggactt

SEQ ID NO: 181863 - DNA, 25 bp, Canis familiaris
tcaccttcggggagatccaggacct

SEQ ID NO: 181864 - DNA, 25 bp, Canis familiaris
tccccccagaaggtgatccaaacca

SEQ ID NO: 181865 - DNA, 25 bp, Canis familiaris
tacccccaaagtagtctgcacgggc

SEQ ID NO: 181866 - DNA, 25 bp, Canis familiaris
tcccccccaggtggtcaactgggca

SEQ ID NO: 181867 - DNA, 25 bp, Canis familiaris
tccccctcctaggaaactgggcgat

SEQ ID NO: 181868 - DNA, 25 bp, Canis familiaris
tccctcctcctttggaactgagtgg

SEQ ID NO: 181869 - DNA, 25 bp, Canis familiaris
tccccgtactgtcgcaggactaaaa

SEQ ID NO: 181870 - DNA, 25 bp, Canis familiaris
tccccgtcactgtcgaaggattcca

SEQ ID NO: 181871 - DNA, 25 bp, Canis familiaris
tcccctcccaataaaggcttctcaa

SEQ ID NO: 181872 - DNA, 25 bp, Canis familiaris
tcgcatcgcccaggaaattggtttc

SEQ ID NO: 181873 - DNA, 25 bp, Canis familiaris
tccccccaagctgattgtgtttcat

SEQ ID NO: 181874 - DNA, 25 bp, Canis familiaris
tccccatccacattgtacttttatt

SEQ ID NO: 181875 - DNA, 25 bp, Canis familiaris
tccgccaggcacttgggttttgcca

SEQ ID NO: 181876 - DNA, 25 bp, Canis familiaris
tccccaacctctagtgtatttcaca

SEQ ID NO: 181877 - DNA, 25 bp, Canis familiaris
tccccttccttgatgagactgtagt

SEQ ID NO: 181878 - DNA, 25 bp, Canis familiaris
tccgcctttcttgctcagaattgga

SEQ ID NO: 181879 - DNA, 25 bp, Canis familiaris
tccgcgtcttttgttgactctagat

SEQ ID NO: 181880 - DNA, 25 bp, Canis familiaris
tccgccttttcaatttactcacaag

SEQ ID NO: 181881 - DNA, 25 bp, Canis familiaris
tccgtctgtttaattacaccagcat

SEQ ID NO: 181882 - DNA, 25 bp, Canis familiaris
tccgttgctttaggtatccgtgatc

SEQ ID NO: 181883 - DNA, 25 bp, Canis familiaris
tcccgtgcgttagtaatcctgtatc

SEQ ID NO: 181884 - DNA, 25 bp, Canis familiaris
tcccgtagactaggaatacttttag

SEQ ID NO: 181885 - DNA, 25 bp, Canis familiaris
tccctggaactcccataacttacta

SEQ ID NO: 181886 - DNA, 25 bp, Canis familiaris
tcccatggtgaccccattggttaca

SEQ ID NO: 181887 - DNA, 25 bp, Canis familiaris
tccgctgggcacgcagctattttag

SEQ ID NO: 181888 - DNA, 25 bp, Canis familiaris
tccgcgagacacgtctggagttgta

SEQ ID NO: 181889 - DNA, 25 bp, Canis familiaris
tccgctggcaacgtaggggtgaagg

SEQ ID NO: 181890 - DNA, 25 bp, Canis familiaris
tccgctccaccagcagggaggaggg

SEQ ID NO: 181891 - DNA, 25 bp, Canis familiaris
tccgtgccccccaagcaaaaagaga

SEQ ID NO: 181892 - DNA, 25 bp, Canis familiaris
tccccactccccatgaagaataaaa

SEQ ID NO: 181893 - DNA, 25 bp, Canis familiaris
tccccactttctactataaatctgt

SEQ ID NO: 181894 - DNA, 25 bp, Canis familiaris
tccccacagtccctctgataaatat

SEQ ID NO: 181895 - DNA, 25 bp, Canis familiaris
tccccaccatgctgtctaaagaatg

SEQ ID NO: 181896 - DNA, 25 bp, Canis familiaris
tccgtaccctggctcaaacagatgc

SEQ ID NO: 181897 - DNA, 25 bp, Canis familiaris
tccgtttccagccctgaacacaggg

SEQ ID NO: 181898 - DNA, 25 bp, Canis familiaris
tccccttctattcctgaaacagtgg

SEQ ID NO: 181899 - DNA, 25 bp, Canis familiaris
tcccctacggtccatataagcacat

SEQ ID NO: 181900 - DNA, 25 bp, Canis familiaris
tccccgagcaagtcctacaataaag

SEQ ID NO: 181901 - DNA, 25 bp, Canis familiaris
tcccctagaataccacagaataact

SEQ ID NO: 181902 - DNA, 25 bp, Canis familiaris
tccccataataaccgcagtctacac

SEQ ID NO: 181903 - DNA, 25 bp, Canis familiaris
tccccttgatttgctgatgcctaac

SEQ ID NO: 181904 - DNA, 25 bp, Canis familiaris
tcccttggaattttgagccgagctc

SEQ ID NO: 181905 - DNA, 25 bp, Canis familiaris
tccgctgggctgagtaggcgaggcc

SEQ ID NO: 181906 - DNA, 25 bp, Canis familiaris
tccgtggtgctgacgtcacacaaca

SEQ ID NO: 181907 - DNA, 25 bp, Canis familiaris
tccgctgagcggagatcgactacgt

SEQ ID NO: 181908 - DNA, 25 bp, Canis familiaris
tccctctggtgtgacaactcacgtc

SEQ ID NO: 181909 - DNA, 25 bp, Canis familiaris
tccccagccagtggacaactcaaat

SEQ ID NO: 181910 - DNA, 25 bp, Canis familiaris
tccctcaaagctgccacatctaaca

SEQ ID NO: 181911 - DNA, 25 bp, Canis familiaris
tccccagtactggaccatgctacat

SEQ ID NO: 181912 - DNA, 25 bp, Canis familiaris
tcccctgaagtgtacctcattgcta

SEQ ID NO: 181913 - DNA, 25 bp, Canis familiaris
tctccctaagggtgctcagtgcatc

SEQ ID NO: 181914 - DNA, 25 bp, Canis familiaris
tcccctgactggatccagctggatc

SEQ ID NO: 181915 - DNA, 25 bp, Canis familiaris
tccgcccaaggaatcggctgctgat

SEQ ID NO: 181916 - DNA, 25 bp, Canis familiaris
tccccacagaagacttctgctgcta

SEQ ID NO: 181917 - DNA, 25 bp, Canis familiaris
tcccctagaaggctgtgtatagtcc

SEQ ID NO: 181918 - DNA, 25 bp, Canis familiaris
tcccaataaaggcttctcaaactgc

SEQ ID NO: 181919 - DNA, 25 bp, Canis familiaris
tcccggaaaggccggccagaggctg

SEQ ID NO: 181920 - DNA, 25 bp, Canis familiaris
tcccggaaaggccggccagaggctg

SEQ ID NO: 181921 - DNA, 25 bp, Canis familiaris
tccctggacgagctgcggggacagg

SEQ ID NO: 181922 - DNA, 25 bp, Canis familiaris
tccgtcagaagacccaggaggaagg

SEQ ID NO: 181923 - DNA, 25 bp, Canis familiaris
tccctcagaatccccctggaaaggg

SEQ ID NO: 181924 - DNA, 25 bp, Canis familiaris
tcccttgcacatctcgacttaaatg

SEQ ID NO: 181925 - DNA, 25 bp, Canis familiaris
tcccccaagatcagacttaaagtat

SEQ ID NO: 181926 - DNA, 25 bp, Canis familiaris
tccccgagcaccaaggcattttagt

SEQ ID NO: 181927 - DNA, 25 bp, Canis familiaris
tcccccatcccatgaattgtgtagc

SEQ ID NO: 181928 - DNA, 25 bp, Canis familiaris
tcccgcagaacctgaagatgttcgc

SEQ ID NO: 181929 - DNA, 25 bp, Canis familiaris
tccccaaacccgagttctcagatgt

SEQ ID NO: 181930 - DNA, 25 bp, Canis familiaris
tccccaaactctgaggccatctaga

SEQ ID NO: 181931 - DNA, 25 bp, Canis familiaris
tcccgagaacttcaagctcctgggc

SEQ ID NO: 181932 - DNA, 25 bp, Canis familiaris
tcccagagaaaaaccaccttggact

SEQ ID NO: 181933 - DNA, 25 bp, Canis familiaris
tcccggcaagaaacctccaggtatc

SEQ ID NO: 181934 - DNA, 25 bp, Canis familiaris
tctgccggcaaaacttctccgttag

SEQ ID NO: 181935 - DNA, 25 bp, Canis familiaris
tcgcgctgagaaagttttccgcctc

SEQ ID NO: 181936 - DNA, 25 bp, Canis familiaris
tccctgaaatagcgagtctcccgac

SEQ ID NO: 181937 - DNA, 25 bp, Canis familiaris
tctcctactacgtcgaggtccgaga

SEQ ID NO: 181938 - DNA, 25 bp, Canis familiaris
tccctaccacagtgatcggcagcta

SEQ ID NO: 181939 - DNA, 25 bp, Canis familiaris
tccccccagagctttagtggctcag

SEQ ID NO: 181940 - DNA, 25 bp, Canis familiaris
tccccccatgtgtgtaagctcatga

SEQ ID NO: 181941 - DNA, 25 bp, Canis familiaris
tcccctcttctggatggaaccatgg

SEQ ID NO: 181942 - DNA, 25 bp, Canis familiaris
tcccctcaactgaaggtcaccgatc

SEQ ID NO: 181943 - DNA, 25 bp, Canis familiaris
tccccatgaaagcaagtcactccct

SEQ ID NO: 181944 - DNA, 25 bp, Canis familiaris
tccctgtgaaaccgagaatcccatt

SEQ ID NO: 181945 - DNA, 25 bp, Canis familiaris
tccctgtagctgttcgacaacactt

SEQ ID NO: 181946 - DNA, 25 bp, Canis familiaris
tccctgtcagtgtctctctgaaacc

SEQ ID NO: 181947 - DNA, 25 bp, Canis familiaris
tcccgatgattggctttgaagaact

SEQ ID NO: 181948 - DNA, 25 bp, Canis familiaris
tcccggcgctactctaaggagtttg

SEQ ID NO: 181949 - DNA, 25 bp, Canis familiaris
tccctggcctgatggccaactgggt

SEQ ID NO: 181950 - DNA, 25 bp, Canis familiaris
tcccgtgtccattgcacacacacgg

SEQ ID NO: 181951 - DNA, 25 bp, Canis familiaris
tcccatgattgctacacccaatagc

SEQ ID NO: 181952 - DNA, 25 bp, Canis familiaris
tcccttgcagcaagcactacaatga

SEQ ID NO: 181953 - DNA, 25 bp, Canis familiaris
tcccttgctgcttgagctgcagaag

SEQ ID NO: 181954 - DNA, 25 bp, Canis familiaris
tccctgagactgtactgtgtggcct

SEQ ID NO: 181955 - DNA, 25 bp, Canis familiaris
tccctgaacagccacaatggtgcgc

SEQ ID NO: 181956 - DNA, 25 bp, Canis familiaris
tcccgaggagcaccccgtgctgctg

SEQ ID NO: 181957 - DNA, 25 bp, Canis familiaris
tcccgggcacagaaccatggagcga

SEQ ID NO: 181958 - DNA, 25 bp, Canis familiaris
tcccgggatggcaaacagacaaata

SEQ ID NO: 181959 - DNA, 25 bp, Canis familiaris
tcccgggataagaagccaaaagtgg

SEQ ID NO: 181960 - DNA, 25 bp, Canis familiaris
tccccggtgaagaagacagagatgg

SEQ ID NO: 181961 - DNA, 25 bp, Canis familiaris
tcccgggctgggatgcacatgtgat

SEQ ID NO: 181962 - DNA, 25 bp, Canis familiaris
tcccgagccgggcagtgcagtaggg

SEQ ID NO: 181963 - DNA, 25 bp, Canis familiaris
tcgacggtagagtccaagagtcagg

SEQ ID NO: 181964 - DNA, 25 bp, Canis familiaris
tcgacgacttagagaagcacctgcg

SEQ ID NO: 181965 - DNA, 25 bp, Canis familiaris
tctaagagcgccatcgaacagcctg

SEQ ID NO: 181966 - DNA, 25 bp, Canis familiaris
tccgcaagcgcgatgaaacacctac

SEQ ID NO: 181967 - DNA, 25 bp, Canis familiaris
tccccagcatgcttgtgatggcaca

SEQ ID NO: 181968 - DNA, 25 bp, Canis familiaris
tccccagcatcatggatggaccttg

SEQ ID NO: 181969 - DNA, 25 bp, Canis familiaris
tccccagtgcattcaggaagccctg

SEQ ID NO: 181970 - DNA, 25 bp, Canis familiaris
tccccctgtacactgagggtcggtt

SEQ ID NO: 181971 - DNA, 25 bp, Canis familiaris
tccccttgttgcctgaggtttggcc

SEQ ID NO: 181972 - DNA, 25 bp, Canis familiaris
tccctcttggtcctagttttgtgca

SEQ ID NO: 181973 - DNA, 25 bp, Canis familiaris
tccgctgttattctttctttggcag

SEQ ID NO: 181974 - DNA, 25 bp, Canis familiaris
tccctggccatcatttcctgggaga

SEQ ID NO: 181975 - DNA, 25 bp, Canis familiaris
tccccgccagatcttccaggggaag

SEQ ID NO: 181976 - DNA, 25 bp, Canis familiaris
tccccggagatccgtgccgggggca

SEQ ID NO: 181977 - DNA, 25 bp, Canis familiaris
tccccgtaattacgctggggaggag

SEQ ID NO: 181978 - DNA, 25 bp, Canis familiaris
tcccgcgtttgcacactgtggggga

SEQ ID NO: 181979 - DNA, 25 bp, Canis familiaris
tccgccctgtctgaagtcgggggcc

SEQ ID NO: 181980 - DNA, 25 bp, Canis familiaris
tccccctgtgtgtgacgggagggcc

SEQ ID NO: 181981 - DNA, 25 bp, Canis familiaris
tcccaaggcctgtgtctggaggggc

SEQ ID NO: 181982 - DNA, 25 bp, Canis familiaris
tcccaggttctgtgtctaggtgggg

SEQ ID NO: 181983 - DNA, 25 bp, Canis familiaris
tccccgtgacgtcccagaggtgggg

SEQ ID NO: 181984 - DNA, 25 bp, Canis familiaris
tccgctcctaccaggcagagcgtgg

SEQ ID NO: 181985 - DNA, 25 bp, Canis familiaris
tccgctcagctgtcaacgagggagt

SEQ ID NO: 181986 - DNA, 25 bp, Canis familiaris
tccgcacgcataaccgagtgcacct

SEQ ID NO: 181987 - DNA, 25 bp, Canis familiaris
tccgacaatgacactggtccgcatc

SEQ ID NO: 181988 - DNA, 25 bp, Canis familiaris
tccgtatatattgtgcttctctgcc

SEQ ID NO: 181989 - DNA, 25 bp, Canis familiaris
tccgatactaatttgctttgctgac

SEQ ID NO: 181990 - DNA, 25 bp, Canis familiaris
tccgaactgttgtttctttgactca

SEQ ID NO: 181991 - DNA, 25 bp, Canis familiaris
tctccaacattttttcattggccaa

SEQ ID NO: 181992 - DNA, 25 bp, Canis familiaris
tcccaccattttatttgtccagcac

SEQ ID NO: 181993 - DNA, 25 bp, Canis familiaris
tccccctttatgaattgtactggct

SEQ ID NO: 181994 - DNA, 25 bp, Canis familiaris
tcccctttatttacttactgtcact

SEQ ID NO: 181995 - DNA, 25 bp, Canis familiaris
tcccttttactgtcagctggtctga

SEQ ID NO: 181996 - DNA, 25 bp, Canis familiaris
tccgccttataatcagctggtctcc

SEQ ID NO: 181997 - DNA, 25 bp, Canis familiaris
tccgctctggattgttgagtttgct

SEQ ID NO: 181998 - DNA, 25 bp, Canis familiaris
tcccttggttttctttgaacgctca

SEQ ID NO: 181999 - DNA, 25 bp, Canis familiaris
tccccggtttggtttctaatcagtg

SEQ ID NO: 182000 - DNA, 25 bp, Canis familiaris
tcccctggttttgatgtccggatgt

SEQ ID NO: 182001 - DNA, 25 bp, Canis familiaris
tcccctggttttgatatctgtaact

SEQ ID NO: 182002 - DNA, 25 bp, Canis familiaris
tcccctgtgtctcataggtctgtaa

SEQ ID NO: 182003 - DNA, 25 bp, Canis familiaris
tcgcaccgggtcatcgtgacgataa

SEQ ID NO: 182004 - DNA, 25 bp, Canis familiaris
tccctacccgtgacttcaagaaaat

SEQ ID NO: 182005 - DNA, 25 bp, Canis familiaris
tcccttcccgttactggagttacat

SEQ ID NO: 182006 - DNA, 25 bp, Canis familiaris
tccctaccacgtacctggtgtatga

SEQ ID NO: 182007 - DNA, 25 bp, Canis familiaris
tccccacctctaagcctgtggagga

SEQ ID NO: 182008 - DNA, 25 bp, Canis familiaris
tccccacctctaagcctgtggagga

SEQ ID NO: 182009 - DNA, 25 bp, Canis familiaris
tccccaccttttcagctgctgtggg

SEQ ID NO: 182010 - DNA, 25 bp, Canis familiaris
tccccacctcattctggggctaggg

SEQ ID NO: 182011 - DNA, 25 bp, Canis familiaris
tccgagggtctggctgggagtcggg

SEQ ID NO: 182012 - DNA, 25 bp, Canis familiaris
tcccggagtctgctgctggagaagg

SEQ ID NO: 182013 - DNA, 25 bp, Canis familiaris
tcccgggattgagcaggaggcgcca

SEQ ID NO: 182014 - DNA, 25 bp, Canis familiaris
tctcgcgggaggaagcggaaggccg

SEQ ID NO: 182015 - DNA, 25 bp, Canis familiaris
tccgcaggacagccacagcaggaag

SEQ ID NO: 182016 - DNA, 25 bp, Canis familiaris
tccgaggtcgggtcgtggaggtgaa

SEQ ID NO: 182017 - DNA, 25 bp, Canis familiaris
tcccaggtcagagagggcctcggaa

SEQ ID NO: 182018 - DNA, 25 bp, Canis familiaris
tcccgtgctctggagcaggagccgg

SEQ ID NO: 182019 - DNA, 25 bp, Canis familiaris
tcgcctgagtgtgggcctgatcggg

SEQ ID NO: 182020 - DNA, 25 bp, Canis familiaris
tagcgtcgtgctcacacgagggggc

SEQ ID NO: 182021 - DNA, 25 bp, Canis familiaris
tccgccgatctgcacaacaggggcg

SEQ ID NO: 182022 - DNA, 25 bp, Canis familiaris
tccccagcatgcaggaactcgtggc

SEQ ID NO: 182023 - DNA, 25 bp, Canis familiaris
tccctgggctgactaacatcgtggc

SEQ ID NO: 182024 - DNA, 25 bp, Canis familiaris
tccccagccagacacaatcattgaa

SEQ ID NO: 182025 - DNA, 25 bp, Canis familiaris
tcccctgagcaaccaagcactggaa

SEQ ID NO: 182026 - DNA, 25 bp, Canis familiaris
tccccatcaccaccagaaaataaca

SEQ ID NO: 182027 - DNA, 25 bp, Canis familiaris
tccgcgtacgagtcaggtaatacac

SEQ ID NO: 182028 - DNA, 25 bp, Canis familiaris
tccgcgtccgaggtgtgaagaccaa

SEQ ID NO: 182029 - DNA, 25 bp, Canis familiaris
tcccctggctgggggtagacttaat

SEQ ID NO: 182030 - DNA, 25 bp, Canis familiaris
tccccagacttgcagttgagacgta

SEQ ID NO: 182031 - DNA, 25 bp, Canis familiaris
tccccatgtagtggccttggatctt

SEQ ID NO: 182032 - DNA, 25 bp, Canis familiaris
tccccctttggcttaagtcttgatc

SEQ ID NO: 182033 - DNA, 25 bp, Canis familiaris
tcccgccttttcttacggattgtgt

SEQ ID NO: 182034 - DNA, 25 bp, Canis familiaris
tccctcctacttcaacatggtgttg

SEQ ID NO: 182035 - DNA, 25 bp, Canis familiaris
tcccctctcctacagaatagtcagt

SEQ ID NO: 182036 - DNA, 25 bp, Canis familiaris
tccccttcttggccatggaagccag

SEQ ID NO: 182037 - DNA, 25 bp, Canis familiaris
tcccctggcttgcagaaaatccaga

SEQ ID NO: 182038 - DNA, 25 bp, Canis familiaris
tcccctcgatctggtgaaaagccat

SEQ ID NO: 182039 - DNA, 25 bp, Canis familiaris
tcccctagtctcaataaacccgtga

SEQ ID NO: 182040 - DNA, 25 bp, Canis familiaris
tccccaaacttatgaacccaatgtg

SEQ ID NO: 182041 - DNA, 25 bp, Canis familiaris
tcttcccgtttcttaacgccaaatg

SEQ ID NO: 182042 - DNA, 25 bp, Canis familiaris
tcacccggctttgtcaagtgccgcg

SEQ ID NO: 182043 - DNA, 25 bp, Canis familiaris
tccccaggccttggcaatgacgacc

SEQ ID NO: 182044 - DNA, 25 bp, Canis familiaris
tccccaggcctgactaaggagcacc

SEQ ID NO: 182045 - DNA, 25 bp, Canis familiaris
tccgctgaggcctctgagtgtgaga

SEQ ID NO: 182046 - DNA, 25 bp, Canis familiaris
tccgacctgccagctggatggatga

SEQ ID NO: 182047 - DNA, 25 bp, Canis familiaris
tccgacctgctggtgagcgtgagca

SEQ ID NO: 182048 - DNA, 25 bp, Canis familiaris
tccccacagctggtggcctgaattc

SEQ ID NO: 182049 - DNA, 25 bp, Canis familiaris
tcccaacagtggtatcaccagttcc

SEQ ID NO: 182050 - DNA, 25 bp, Canis familiaris
tccccacagtgcttataacattgcc

SEQ ID NO: 182051 - DNA, 25 bp, Canis familiaris
tccccctgactttatgacttccagg

SEQ ID NO: 182052 - DNA, 25 bp, Canis familiaris
tccccctagtatgatgagtcttctg

SEQ ID NO: 182053 - DNA, 25 bp, Canis familiaris
tccgcccttggggtgtgtcatgtta

SEQ ID NO: 182054 - DNA, 25 bp, Canis familiaris
tccgcccattgtcgacaagatcttt

SEQ ID NO: 182055 - DNA, 25 bp, Canis familiaris
tccccaactgcatgccatgaacttg

SEQ ID NO: 182056 - DNA, 25 bp, Canis familiaris
tccccgatcgcatcttgaaatcaca

SEQ ID NO: 182057 - DNA, 25 bp, Canis familiaris
tccctcgtcgtctctaaatacaagt

SEQ ID NO: 182058 - DNA, 25 bp, Canis familiaris
tccccttctgcctcttgaggaaatg

SEQ ID NO: 182059 - DNA, 25 bp, Canis familiaris
tcccctgccggactgttaggaaatg

SEQ ID NO: 182060 - DNA, 25 bp, Canis familiaris
tcccctccagaattgtcggagaaag

SEQ ID NO: 182061 - DNA, 25 bp, Canis familiaris
tccccccatggattctccagaaaat

SEQ ID NO: 182062 - DNA, 25 bp, Canis familiaris
tccccccgagaggtccaagtaatcg

SEQ ID NO: 182063 - DNA, 25 bp, Canis familiaris
tcccccttggtttcctgagtcaagg

SEQ ID NO: 182064 - DNA, 25 bp, Canis familiaris
tccctccttggtggagccatagcga

SEQ ID NO: 182065 - DNA, 25 bp, Canis familiaris
tcccaccgggtctacactagaggat

SEQ ID NO: 182066 - DNA, 25 bp, Canis familiaris
tccccctgaggatattgctagagcc

SEQ ID NO: 182067 - DNA, 25 bp, Canis familiaris
tccccagctggattagtgtctaagg

SEQ ID NO: 182068 - DNA, 25 bp, Canis familiaris
tccccggtgctgttggtgctaaggg

SEQ ID NO: 182069 - DNA, 25 bp, Canis familiaris
tccccaagtctgatgtctgcaaagg

SEQ ID NO: 182070 - DNA, 25 bp, Canis familiaris
tccccagagattattgaggcaaggc

SEQ ID NO: 182071 - DNA, 25 bp, Canis familiaris
tccgcaaggttcatgtgaccaagga

SEQ ID NO: 182072 - DNA, 25 bp, Canis familiaris
tccgcaagttccagattcctcagga

SEQ ID NO: 182073 - DNA, 25 bp, Canis familiaris
tccgcaaagacctgtacgccaacac

SEQ ID NO: 182074 - DNA, 25 bp, Canis familiaris
tccgcgaagaccgtctaggaattca

SEQ ID NO: 182075 - DNA, 25 bp, Canis familiaris
tcccggaagctctggatccagttca

SEQ ID NO: 182076 - DNA, 25 bp, Canis familiaris
tagctcccaactttggtccgagtga

SEQ ID NO: 182077 - DNA, 25 bp, Canis familiaris
tcagtcccaaaggtccgcttaggaa

SEQ ID NO: 182078 - DNA, 25 bp, Canis familiaris
tctcttccagaagaccgtttggcca

SEQ ID NO: 182079 - DNA, 25 bp, Canis familiaris
tcgcttacaggacccagttttggcc

SEQ ID NO: 182080 - DNA, 25 bp, Canis familiaris
tcgtctaagagacctaggctttcct

SEQ ID NO: 182081 - DNA, 25 bp, Canis familiaris
taatttaaggccaggccttctaatt

SEQ ID NO: 182082 - DNA, 25 bp, Canis familiaris
tttttagccctcaggttactaagat

SEQ ID NO: 182083 - DNA, 25 bp, Canis familiaris
tctttgtcccttgtggttttaactg

SEQ ID NO: 182084 - DNA, 25 bp, Canis familiaris
tcccttcccttgatttttgttgaca

SEQ ID NO: 182085 - DNA, 25 bp, Canis familiaris
tcccttcctcacctgattttttggg

SEQ ID NO: 182086 - DNA, 25 bp, Canis familiaris
tccctgaaccacatgccattttgtt

SEQ ID NO: 182087 - DNA, 25 bp, Canis familiaris
tcccgaaactccgcattgcattgta

SEQ ID NO: 182088 - DNA, 25 bp, Canis familiaris
tcccgaaggtgcccgcagtagtggg

SEQ ID NO: 182089 - DNA, 25 bp, Canis familiaris
tcccgaagtgcgcggtgacgtggtg

SEQ ID NO: 182090 - DNA, 25 bp, Canis familiaris
tccctgaagtcctggttctgatggc

SEQ ID NO: 182091 - DNA, 25 bp, Canis familiaris
tccctgaattctttttctgcttcag

SEQ ID NO: 182092 - DNA, 25 bp, Canis familiaris
tccctacatctcttgtttctaacgt

SEQ ID NO: 182093 - DNA, 25 bp, Canis familiaris
tccctacttcattagattcacaacc

SEQ ID NO: 182094 - DNA, 25 bp, Canis familiaris
tccctgccttcgaagaactcaatcg

SEQ ID NO: 182095 - DNA, 25 bp, Canis familiaris
tccgccccattgacgcaaatggtcg

SEQ ID NO: 182096 - DNA, 25 bp, Canis familiaris
tccgccccattgacgcaaatggtcg

SEQ ID NO: 182097 - DNA, 25 bp, Canis familiaris
tcccctcctcagagcaaagtgcagc

SEQ ID NO: 182098 - DNA, 25 bp, Canis familiaris
tccccacgcagcatagacagagtcc

SEQ ID NO: 182099 - DNA, 25 bp, Canis familiaris
tccccagggcctggaaagtcccagg

SEQ ID NO: 182100 - DNA, 25 bp, Canis familiaris
tccccaggactcagagaaccaccat

SEQ ID NO: 182101 - DNA, 25 bp, Canis familiaris
tcccctggacacagaggtgcccatg

SEQ ID NO: 182102 - DNA, 25 bp, Canis familiaris
tcccacttacacatgataggccctt

SEQ ID NO: 182103 - DNA, 25 bp, Canis familiaris
tcccaaatgaatatttggcctatat

SEQ ID NO: 182104 - DNA, 25 bp, Canis familiaris
tccccatcacttaattttcctatta

SEQ ID NO: 182105 - DNA, 25 bp, Canis familiaris
tcgcccaccttttgtcaaactattc

SEQ ID NO: 182106 - DNA, 25 bp, Canis familiaris
tccccaccatgtacacaatacacta

SEQ ID NO: 182107 - DNA, 25 bp, Canis familiaris
tccctaccatgtacctcaaacagta

SEQ ID NO: 182108 - DNA, 25 bp, Canis familiaris
tccctccagctttttcacaaagtga

SEQ ID NO: 182109 - DNA, 25 bp, Canis familiaris
tccctaccctcacaaaaatggccac

SEQ ID NO: 182110 - DNA, 25 bp, Canis familiaris
tcccttcgcccacaaaattagccaa

SEQ ID NO: 182111 - DNA, 25 bp, Canis familiaris
tccctgtccccattaagcaaaagta

SEQ ID NO: 182112 - DNA, 25 bp, Canis familiaris
tcccgacccagccatagaagaaatc

SEQ ID NO: 182113 - DNA, 25 bp, Canis familiaris
tccctggcccagataaataatttca

SEQ ID NO: 182114 - DNA, 25 bp, Canis familiaris
tcccatagcccgttacttataattc

SEQ ID NO: 182115 - DNA, 25 bp, Canis familiaris
tcccatgttccgtctactatatttt

SEQ ID NO: 182116 - DNA, 25 bp, Canis familiaris
tcccagaattctactactatacttt

SEQ ID NO: 182117 - DNA, 25 bp, Canis familiaris
tcccaatttcgaaagctgtacccct

SEQ ID NO: 182118 - DNA, 25 bp, Canis familiaris
tcccagatttacaacatcgacccct

SEQ ID NO: 182119 - DNA, 25 bp, Canis familiaris
tcccagtgttgtccaacgaccaggc

SEQ ID NO: 182120 - DNA, 25 bp, Canis familiaris
tcccgtggctgaagcaagctgaacg

SEQ ID NO: 182121 - DNA, 25 bp, Canis familiaris
tcccctgcggatcaactctgaggag

SEQ ID NO: 182122 - DNA, 25 bp, Canis familiaris
tcccctgcaagtccatgttcgagga

SEQ ID NO: 182123 - DNA, 25 bp, Canis familiaris
tccctctgatttccagctttgggtc

SEQ ID NO: 182124 - DNA, 25 bp, Canis familiaris
tccgcctcattatactctgctgagc

SEQ ID NO: 182125 - DNA, 25 bp, Canis familiaris
tccgcctgctataagcctggtgagg

SEQ ID NO: 182126 - DNA, 25 bp, Canis familiaris
tccccgcatctggggcgtgggtggt

SEQ ID NO: 182127 - DNA, 25 bp, Canis familiaris
tccccatctcctgggagctggggtg

SEQ ID NO: 182128 - DNA, 25 bp, Canis familiaris
tcccatttgccaagaggggggtaag

SEQ ID NO: 182129 - DNA, 25 bp, Canis familiaris
tccctgtctcctggttggggtgtaa

SEQ ID NO: 182130 - DNA, 25 bp, Canis familiaris
tcccttatccgacttcgggtggtag

SEQ ID NO: 182131 - DNA, 25 bp, Canis familiaris
tccctttcccctcagggtgggagag

SEQ ID NO: 182132 - DNA, 25 bp, Canis familiaris
tccctttcccttggaggggagacag

SEQ ID NO: 182133 - DNA, 25 bp, Canis familiaris
tccccatgtccccaggaagggaaag

SEQ ID NO: 182134 - DNA, 25 bp, Canis familiaris
tccccatctcactcaggtatggtga

SEQ ID NO: 182135 - DNA, 25 bp, Canis familiaris
tcccctctgagagcaggaagtgaca

SEQ ID NO: 182136 - DNA, 25 bp, Canis familiaris
tccccttcatgtgcactgctttaaa

SEQ ID NO: 182137 - DNA, 25 bp, Canis familiaris
tccccttctgctgacagcattgctg

SEQ ID NO: 182138 - DNA, 25 bp, Canis familiaris
tccccattctgtgagatctctggtg

SEQ ID NO: 182139 - DNA, 25 bp, Canis familiaris
tccccatcctgggcagaattcagag

SEQ ID NO: 182140 - DNA, 25 bp, Canis familiaris
tccctacctggacatcatcaaggca

SEQ ID NO: 182141 - DNA, 25 bp, Canis familiaris
tccccatctctgcaactacaggaga

SEQ ID NO: 182142 - DNA, 25 bp, Canis familiaris
tcccctctccatgcactagaatgga

SEQ ID NO: 182143 - DNA, 25 bp, Canis familiaris
tcccggtgccatgccagagagagag

SEQ ID NO: 182144 - DNA, 25 bp, Canis familiaris
tcggctctggcctcaaagaagaatt

SEQ ID NO: 182145 - DNA, 25 bp, Canis familiaris
tcgtcctggctgtggaagtcggtga

SEQ ID NO: 182146 - DNA, 25 bp, Canis familiaris
tcgtgacctgggctgaaatcgggag

SEQ ID NO: 182147 - DNA, 25 bp, Canis familiaris
tcgtacaccccgctaagtggggcca

SEQ ID NO: 182148 - DNA, 25 bp, Canis familiaris
tcgttgacccaggtttagaaggtgc

SEQ ID NO: 182149 - DNA, 25 bp, Canis familiaris
tcgccgacgaagtttatatggaggt

SEQ ID NO: 182150 - DNA, 25 bp, Canis familiaris
tcgccccaaagcctggatatggggc

SEQ ID NO: 182151 - DNA, 25 bp, Canis familiaris
tccccagagacgctgaggaggtgga

SEQ ID NO: 182152 - DNA, 25 bp, Canis familiaris
tcccccagctcgggaaggagcgggc

SEQ ID NO: 182153 - DNA, 25 bp, Canis familiaris
tcccctcctgctccagaagggggtg

SEQ ID NO: 182154 - DNA, 25 bp, Canis familiaris
tcccatgccagcctgcaaagcaggg

SEQ ID NO: 182155 - DNA, 25 bp, Canis familiaris
tcccatggcatcctcattacatata

SEQ ID NO: 182156 - DNA, 25 bp, Canis familiaris
tcccaggcactgactatatataatt

SEQ ID NO: 182157 - DNA, 25 bp, Canis familiaris
tcccagtgacttcagtattttcttt

SEQ ID NO: 182158 - DNA, 25 bp, Canis familiaris
tccccagatttcgagtacctttctg

SEQ ID NO: 182159 - DNA, 25 bp, Canis familiaris
tcccaagtttctggtatttttggca

SEQ ID NO: 182160 - DNA, 25 bp, Canis familiaris
tcccggtttgcgctgagttgagtgg

SEQ ID NO: 182161 - DNA, 25 bp, Canis familiaris
tccctttcttcccaatgttaggagg

SEQ ID NO: 182162 - DNA, 25 bp, Canis familiaris
tcccctgcctctgaaagctgtagag

SEQ ID NO: 182163 - DNA, 25 bp, Canis familiaris
tccccgccttccttgagcggggcag

SEQ ID NO: 182164 - DNA, 25 bp, Canis familiaris
tccccgacgttctgaggttgaggtg

SEQ ID NO: 182165 - DNA, 25 bp, Canis familiaris
tcccaggcccttcagggttggtgca

SEQ ID NO: 182166 - DNA, 25 bp, Canis familiaris
tcccagcccctggttgggtaggtag

SEQ ID NO: 182167 - DNA, 25 bp, Canis familiaris
tcccagtcccgggaggggagagtca

SEQ ID NO: 182168 - DNA, 25 bp, Canis familiaris
tcccagtcccagggaggccgtgaga

SEQ ID NO: 182169 - DNA, 25 bp, Canis familiaris
tcccacatacccgggagaccgagaa

SEQ ID NO: 182170 - DNA, 25 bp, Canis familiaris
tccccttcccatgggtaatccgtga

SEQ ID NO: 182171 - DNA, 25 bp, Canis familiaris
tccccttccccaagggatactgcag

SEQ ID NO: 182172 - DNA, 25 bp, Canis familiaris
tcccctctgaccgcatggaaacggc

SEQ ID NO: 182173 - DNA, 25 bp, Canis familiaris
tccccggaacattctggaatcctac

SEQ ID NO: 182174 - DNA, 25 bp, Canis familiaris
tccctcggtacatatctgcatttgc

SEQ ID NO: 182175 - DNA, 25 bp, Canis familiaris
tcccacctgtaagcttatgtctgct

SEQ ID NO: 182176 - DNA, 25 bp, Canis familiaris
tccccactgccaacgtgtcagtggt

SEQ ID NO: 182177 - DNA, 25 bp, Canis familiaris
tccgccaagactctgtgtcactgag

SEQ ID NO: 182178 - DNA, 25 bp, Canis familiaris
tccccacacacgcttgtgtagagcc

SEQ ID NO: 182179 - DNA, 25 bp, Canis familiaris
tccccagcctccagggcatagatga

SEQ ID NO: 182180 - DNA, 25 bp, Canis familiaris
tcccccagcgccaaggatatcaaga

SEQ ID NO: 182181 - DNA, 25 bp, Canis familiaris
tccccgcttgctaagtgatacttat

SEQ ID NO: 182182 - DNA, 25 bp, Canis familiaris
tccccagcttgcttttgtgtttcgg

SEQ ID NO: 182183 - DNA, 25 bp, Canis familiaris
tccccatgtctgtcaggtgtgtctt

SEQ ID NO: 182184 - DNA, 25 bp, Canis familiaris
tcccttgtctctagcaatttctgct

SEQ ID NO: 182185 - DNA, 25 bp, Canis familiaris
tcccctgtgcttactaatacatccc

SEQ ID NO: 182186 - DNA, 25 bp, Canis familiaris
tccccgtgatgttctcaaagcttcc

SEQ ID NO: 182187 - DNA, 25 bp, Canis familiaris
tccccgtgatgttctcaaagcttcc

SEQ ID NO: 182188 - DNA, 25 bp, Canis familiaris
tccccgtgatgttctcaaagcttcc

SEQ ID NO: 182189 - DNA, 25 bp, Canis familiaris
tcccataatatcatgctccaaatat

SEQ ID NO: 182190 - DNA, 25 bp, Canis familiaris
tcccgacttcattccacacaaatgt

SEQ ID NO: 182191 - DNA, 25 bp, Canis familiaris
tcccaactctttcccactagagatg

SEQ ID NO: 182192 - DNA, 25 bp, Canis familiaris
tccctttctgtttgcccaaagagta

SEQ ID NO: 182193 - DNA, 25 bp, Canis familiaris
tcccttttgttttccaagagggatg

SEQ ID NO: 182194 - DNA, 25 bp, Canis familiaris
tccctctgtgggttcccaagtgggt

SEQ ID NO: 182195 - DNA, 25 bp, Canis familiaris
tccctggtgatgcctatttgcaagg

SEQ ID NO: 182196 - DNA, 25 bp, Canis familiaris
tcccgggatggcgttcagaatggtt

SEQ ID NO: 182197 - DNA, 25 bp, Canis familiaris
tcccgcccatgggagtcggatgagg

SEQ ID NO: 182198 - DNA, 25 bp, Canis familiaris
tccccagcgaggggccagagctggg

SEQ ID NO: 182199 - DNA, 25 bp, Canis familiaris
tcccccgcagtgggcacatagtgaa

SEQ ID NO: 182200 - DNA, 25 bp, Canis familiaris
tcccagcccagggcatcctagagta

SEQ ID NO: 182201 - DNA, 25 bp, Canis familiaris
tcccatcaccatcttccaggagcga

SEQ ID NO: 182202 - DNA, 25 bp, Canis familiaris
tccccagcccttagcacagagaggg

SEQ ID NO: 182203 - DNA, 25 bp, Canis familiaris
tcccaacttcttacctgtaggcaga

SEQ ID NO: 182204 - DNA, 25 bp, Canis familiaris
tcccacatcaggctacctacatgga

SEQ ID NO: 182205 - DNA, 25 bp, Canis familiaris
tcccacatcgggcttcgatcatgga

SEQ ID NO: 182206 - DNA, 25 bp, Canis familiaris
tccccatcactgtcgattcgatcaa

SEQ ID NO: 182207 - DNA, 25 bp, Canis familiaris
tccctcagccgatgttcatcatcta

SEQ ID NO: 182208 - DNA, 25 bp, Canis familiaris
tccccagctctgcagttttctggaa

SEQ ID NO: 182209 - DNA, 25 bp, Canis familiaris
tccccagtaaagcttcctgctgagc

SEQ ID NO: 182210 - DNA, 25 bp, Canis familiaris
tccccagtaactgttccctggtata

SEQ ID NO: 182211 - DNA, 25 bp, Canis familiaris
tcccctgcgacaattttcctaggtt

SEQ ID NO: 182212 - DNA, 25 bp, Canis familiaris
tcccctggtcagatgtcctctgggg

SEQ ID NO: 182213 - DNA, 25 bp, Canis familiaris
tcccgggatcaagtctcgcatcggg

SEQ ID NO: 182214 - DNA, 25 bp, Canis familiaris
tccctggagcctagtctagcacagc

SEQ ID NO: 182215 - DNA, 25 bp, Canis familiaris
tccctggagaagagctatgagctgc

SEQ ID NO: 182216 - DNA, 25 bp, Canis familiaris
tcgcctgaacattgccgtagagtgc

SEQ ID NO: 182217 - DNA, 25 bp, Canis familiaris
tcccatcgcatttcctgtaatctgc

SEQ ID NO: 182218 - DNA, 25 bp, Canis familiaris
tcccatgccactgtgtggttctgca

SEQ ID NO: 182219 - DNA, 25 bp, Canis familiaris
tccctgagtctgacggggatgctca

SEQ ID NO: 182220 - DNA, 25 bp, Canis familiaris
tccctcacctgcgaagtggatgcac

SEQ ID NO: 182221 - DNA, 25 bp, Canis familiaris
tccctcacctgcgaagtggatgcac

SEQ ID NO: 182222 - DNA, 25 bp, Canis familiaris
tccccactgactctgatggatgcac

SEQ ID NO: 182223 - DNA, 25 bp, Canis familiaris
tccccacatacccaatggagcagtg

SEQ ID NO: 182224 - DNA, 25 bp, Canis familiaris
tccccgcaattcggatgggcctgga

SEQ ID NO: 182225 - DNA, 25 bp, Canis familiaris
tccccgagatacgagaaggcaggaa

SEQ ID NO: 182226 - DNA, 25 bp, Canis familiaris
tccccgcagatacgctataagcagt

SEQ ID NO: 182227 - DNA, 25 bp, Canis familiaris
tccccagagaagcttcaccagtatc

SEQ ID NO: 182228 - DNA, 25 bp, Canis familiaris
tccccgggctgggtcagacagtatg

SEQ ID NO: 182229 - DNA, 25 bp, Canis familiaris
tccccagggcagctcactgaagtta

SEQ ID NO: 182230 - DNA, 25 bp, Canis familiaris
tccctcagggcgacagctctgaagt

SEQ ID NO: 182231 - DNA, 25 bp, Canis familiaris
tccccttgagcttctgctcatatca

SEQ ID NO: 182232 - DNA, 25 bp, Canis familiaris
tcccctgtagctgtcaatcatcgac

SEQ ID NO: 182233 - DNA, 25 bp, Canis familiaris
tccccgtatctctttatactggaaa

SEQ ID NO: 182234 - DNA, 25 bp, Canis familiaris
tccccagcagatccttttaaaagaa

SEQ ID NO: 182235 - DNA, 25 bp, Canis familiaris
tcccccgatgtcctgtaaataaaat

SEQ ID NO: 182236 - DNA, 25 bp, Canis familiaris
tccccggtgtacgtgaaccaagtca

SEQ ID NO: 182237 - DNA, 25 bp, Canis familiaris
tccccgtgtgtactgtgagaaccag

SEQ ID NO: 182238 - DNA, 25 bp, Canis familiaris
tccccgagtgtccaggtgaaacgtt

SEQ ID NO: 182239 - DNA, 25 bp, Canis familiaris
tcccctaattgctggtaaccactat

SEQ ID NO: 182240 - DNA, 25 bp, Canis familiaris
tcccctcaattcttttaacaccata

SEQ ID NO: 182241 - DNA, 25 bp, Canis familiaris
tcccctttgtctttcaaaatccaag

SEQ ID NO: 182242 - DNA, 25 bp, Canis familiaris
tcccctattgttttccataatagat

SEQ ID NO: 182243 - DNA, 25 bp, Canis familiaris
tcccctatttgtttctgttttatgt

SEQ ID NO: 182244 - DNA, 25 bp, Canis familiaris
tccctttattttccttttatcatga

SEQ ID NO: 182245 - DNA, 25 bp, Canis familiaris
tccctttattctagctttcttgaca

SEQ ID NO: 182246 - DNA, 25 bp, Canis familiaris
tccctgttgattggtctggcatttc

SEQ ID NO: 182247 - DNA, 25 bp, Canis familiaris
tccctgtctactgcctcagaaatgt

SEQ ID NO: 182248 - DNA, 25 bp, Canis familiaris
tccctgtctgaagcagcctgaacga

SEQ ID NO: 182249 - DNA, 25 bp, Canis familiaris
tcccatgtctattactttggatctc

SEQ ID NO: 182250 - DNA, 25 bp, Canis familiaris
tcccttatttactttccatctgata

SEQ ID NO: 182251 - DNA, 25 bp, Canis familiaris
tcccgttctttcttacctatgagat

SEQ ID NO: 182252 - DNA, 25 bp, Canis familiaris
tccccttttactaccatgctgaagt

SEQ ID NO: 182253 - DNA, 25 bp, Canis familiaris
tccccttgaaactgctgcagctgtg

SEQ ID NO: 182254 - DNA, 25 bp, Canis familiaris
tcccctcattcatctcagcataggg

SEQ ID NO: 182255 - DNA, 25 bp, Canis familiaris
tcccctcatctctgtactaatagta

SEQ ID NO: 182256 - DNA, 25 bp, Canis familiaris
tcccgatctctcttttctaataaaa

SEQ ID NO: 182257 - DNA, 25 bp, Canis familiaris
tcccttcctcatttttgactaaaga

SEQ ID NO: 182258 - DNA, 25 bp, Canis familiaris
tccctcctcaaagcatctacaaaag

SEQ ID NO: 182259 - DNA, 25 bp, Canis familiaris
tctacccaagaacatttcacgaatg

SEQ ID NO: 182260 - DNA, 25 bp, Canis familiaris
tctagggaaaacacctgacgaatgg

SEQ ID NO: 182261 - DNA, 25 bp, Canis familiaris
tctaggggaaaacactgacgaatgg

SEQ ID NO: 182262 - DNA, 25 bp, Canis familiaris
tcaaaggactaataactggcgggga

SEQ ID NO: 182263 - DNA, 25 bp, Canis familiaris
tcataaggcagatggaacccccgga

SEQ ID NO: 182264 - DNA, 25 bp, Canis familiaris
tcccacggtggatacccactggtga

SEQ ID NO: 182265 - DNA, 25 bp, Canis familiaris
tcccgctggtaataaaatctgttcc

SEQ ID NO: 182266 - DNA, 25 bp, Canis familiaris
tccctgggccaatccaaatctgttt

SEQ ID NO: 182267 - DNA, 25 bp, Canis familiaris
tcccgtgggggtccaagatctgaga

SEQ ID NO: 182268 - DNA, 25 bp, Canis familiaris
tcccttggggggtcacaagcgacga

SEQ ID NO: 182269 - DNA, 25 bp, Canis familiaris
tcccttgggggcttgcaccagggac

SEQ ID NO: 182270 - DNA, 25 bp, Canis familiaris
tcccgagggtccagcaccgggaagc

SEQ ID NO: 182271 - DNA, 25 bp, Canis familiaris
tactatggggtatttacttgtggaa

SEQ ID NO: 182272 - DNA, 25 bp, Canis familiaris
tctaattgggtatagcctgggcgca

SEQ ID NO: 182273 - DNA, 25 bp, Canis familiaris
tcacaagttggtgttccgtgggacc

SEQ ID NO: 182274 - DNA, 25 bp, Canis familiaris
tcgaagttggagcataccacggagg

SEQ ID NO: 182275 - DNA, 25 bp, Canis familiaris
tcgccagacggtcaatccacgtggc

SEQ ID NO: 182276 - DNA, 25 bp, Canis familiaris
tcccgaatgcccatacgaggaggcc

SEQ ID NO: 182277 - DNA, 25 bp, Canis familiaris
tcccagatacccttaaagagtgacc

SEQ ID NO: 182278 - DNA, 25 bp, Canis familiaris
tcccggactcccatcaatgatgcta

SEQ ID NO: 182279 - DNA, 25 bp, Canis familiaris
tcccgggatctcgatgtgatttctg

SEQ ID NO: 182280 - DNA, 25 bp, Canis familiaris
tcccgcctacacgtggctgattata

SEQ ID NO: 182281 - DNA, 25 bp, Canis familiaris
tcccgacaacacctgatgtttcaca

SEQ ID NO: 182282 - DNA, 25 bp, Canis familiaris
tcccttcataacctgttttcctagg

SEQ ID NO: 182283 - DNA, 25 bp, Canis familiaris
tcccctgaatacctctcattattta

SEQ ID NO: 182284 - DNA, 25 bp, Canis familiaris
tccccttatgagcgctatatattta

SEQ ID NO: 182285 - DNA, 25 bp, Canis familiaris
tccccttctagactcatttcaagta

SEQ ID NO: 182286 - DNA, 25 bp, Canis familiaris
tcccctgaccaatttttatagatac

SEQ ID NO: 182287 - DNA, 25 bp, Canis familiaris
tccccatggagattatctttgataa

SEQ ID NO: 182288 - DNA, 25 bp, Canis familiaris
tccccggagcacaagcttcatgaaa

SEQ ID NO: 182289 - DNA, 25 bp, Canis familiaris
tccccttgagatcagtgctccaaga

SEQ ID NO: 182290 - DNA, 25 bp, Canis familiaris
tcccctgtggtattgtcttgtcagg

SEQ ID NO: 182291 - DNA, 25 bp, Canis familiaris
tccccctggtgattgtcttgtccag

SEQ ID NO: 182292 - DNA, 25 bp, Canis familiaris
tccccctggtattgttcttgtccag

SEQ ID NO: 182293 - DNA, 25 bp, Canis familiaris
tccccctcagtcaaagtaggtccgc

SEQ ID NO: 182294 - DNA, 25 bp, Canis familiaris
tcccctccgaagaagatcggttgcc

SEQ ID NO: 182295 - DNA, 25 bp, Canis familiaris
tcgcacctccgatgattcacggttg

SEQ ID NO: 182296 - DNA, 25 bp, Canis familiaris
tccccttgaagagttcagcggattg

SEQ ID NO: 182297 - DNA, 25 bp, Canis familiaris
tcgtcgttaagagctccgcgtatat

SEQ ID NO: 182298 - DNA, 25 bp, Canis familiaris
tcagtactaaagtttcagccagtca

SEQ ID NO: 182299 - DNA, 25 bp, Canis familiaris
tcgttgtacggtaacccagtgcact

SEQ ID NO: 182300 - DNA, 25 bp, Canis familiaris
tcgtagctactgtttgaccggacac

SEQ ID NO: 182301 - DNA, 25 bp, Canis familiaris
tctcaactacttcgccattgcggag

SEQ ID NO: 182302 - DNA, 25 bp, Canis familiaris
tcccctgatctacgccatgaagcgg

SEQ ID NO: 182303 - DNA, 25 bp, Canis familiaris
tcccctattcaatctagtgtgtgtt

SEQ ID NO: 182304 - DNA, 25 bp, Canis familiaris
tccctagattcctcaagttgctctt

SEQ ID NO: 182305 - DNA, 25 bp, Canis familiaris
tcccacagatgtgatgaccgtctct

SEQ ID NO: 182306 - DNA, 25 bp, Canis familiaris
tccccatcaggcttgctattgtgct

SEQ ID NO: 182307 - DNA, 25 bp, Canis familiaris
tccctgcacgaggcgcatgagttct

SEQ ID NO: 182308 - DNA, 25 bp, Canis familiaris
tccctggatggtgcagcagttctag

SEQ ID NO: 182309 - DNA, 25 bp, Canis familiaris
tcccataatagatcacgttcaagac

SEQ ID NO: 182310 - DNA, 25 bp, Canis familiaris
tcgctgaatatatacaggtatgtaa

SEQ ID NO: 182311 - DNA, 25 bp, Canis familiaris
tcgtaatttggaatgtgccttaaac

SEQ ID NO: 182312 - DNA, 25 bp, Canis familiaris
tcacggttgctgggttctcttaacc

SEQ ID NO: 182313 - DNA, 25 bp, Canis familiaris
tcccgtgttttgttgcttgtaaact

SEQ ID NO: 182314 - DNA, 25 bp, Canis familiaris
tcccgtgtccttctgtgatgtataa

SEQ ID NO: 182315 - DNA, 25 bp, Canis familiaris
tcccgttcttacctgtgatgtgttt

SEQ ID NO: 182316 - DNA, 25 bp, Canis familiaris
tcccgttctacagatgttgctgaca

SEQ ID NO: 182317 - DNA, 25 bp, Canis familiaris
tcccttctcgaagtttttgcacaga

SEQ ID NO: 182318 - DNA, 25 bp, Canis familiaris
tccctgttctgatctccttaagaga

SEQ ID NO: 182319 - DNA, 25 bp, Canis familiaris
tcccattcctatgctatccagaaga

SEQ ID NO: 182320 - DNA, 25 bp, Canis familiaris
tcccattcctatgctatccagaaga

SEQ ID NO: 182321 - DNA, 25 bp, Canis familiaris
tccctcgctgcgatctattgaaagt

SEQ ID NO: 182322 - DNA, 25 bp, Canis familiaris
tcccctgcatgttctcttggagaga

SEQ ID NO: 182323 - DNA, 25 bp, Canis familiaris
tcccattgcatcccacttgtcaatg

SEQ ID NO: 182324 - DNA, 25 bp, Canis familiaris
tcccatctgacagatattgtcataa

SEQ ID NO: 182325 - DNA, 25 bp, Canis familiaris
tccctgctggatttttttaattgag

SEQ ID NO: 182326 - DNA, 25 bp, Canis familiaris
tcccctggtggtagttgtcgtccag

SEQ ID NO: 182327 - DNA, 25 bp, Canis familiaris
tcgccaggtgggtgtggtcgtggct

SEQ ID NO: 182328 - DNA, 25 bp, Canis familiaris
tcccaggggtgcctggcagtcgggt

SEQ ID NO: 182329 - DNA, 25 bp, Canis familiaris
tcccagtaagtgcggcttcgggaga

SEQ ID NO: 182330 - DNA, 25 bp, Canis familiaris
tcccctgaagggccctgtgggagga

SEQ ID NO: 182331 - DNA, 25 bp, Canis familiaris
tcccgtgtcagggtccctgtaggga

SEQ ID NO: 182332 - DNA, 25 bp, Canis familiaris
tcccttctcacggctaactgtaata

SEQ ID NO: 182333 - DNA, 25 bp, Canis familiaris
tccccttgcccctaagatgtagaat

SEQ ID NO: 182334 - DNA, 25 bp, Canis familiaris
tcccgtctcgtccgacggttgaata

SEQ ID NO: 182335 - DNA, 25 bp, Canis familiaris
tcccgtatggaccagaccgtggacg

SEQ ID NO: 182336 - DNA, 25 bp, Canis familiaris
tcccctaggacctatctttggaggc

SEQ ID NO: 182337 - DNA, 25 bp, Canis familiaris
tcccactatagatcctttaggggca

SEQ ID NO: 182338 - DNA, 25 bp, Canis familiaris
tccccgaagcaacctgtttgggaca

SEQ ID NO: 182339 - DNA, 25 bp, Canis familiaris
tcccggccacaacctgttagaggag

SEQ ID NO: 182340 - DNA, 25 bp, Canis familiaris
tcccctcctcaagctgttggaagca

SEQ ID NO: 182341 - DNA, 25 bp, Canis familiaris
tccccccagccagggtgggagaagg

SEQ ID NO: 182342 - DNA, 25 bp, Canis familiaris
tccccccaatgcaggcatggcagga

SEQ ID NO: 182343 - DNA, 25 bp, Canis familiaris
tccccccagattagtgcatgtgtgt

SEQ ID NO: 182344 - DNA, 25 bp, Canis familiaris
tcccgctcgaatctgatgctgtgga

SEQ ID NO: 182345 - DNA, 25 bp, Canis familiaris
tcccccaagctcctgagctgaggag

SEQ ID NO: 182346 - DNA, 25 bp, Canis familiaris
tccctccataatctttagagagatg

SEQ ID NO: 182347 - DNA, 25 bp, Canis familiaris
tccctcctcagtctttgggtgatta

SEQ ID NO: 182348 - DNA, 25 bp, Canis familiaris
tccctaactgtgctgttctgtttta

SEQ ID NO: 182349 - DNA, 25 bp, Canis familiaris
tccctaacagcaactggtttatttt

SEQ ID NO: 182350 - DNA, 25 bp, Canis familiaris
tccctaaaatccggcttgttttcag

SEQ ID NO: 182351 - DNA, 25 bp, Canis familiaris
tcgcattaataatcccttgttctat

SEQ ID NO: 182352 - DNA, 25 bp, Canis familiaris
tctggtaagacatgcccttctatta

SEQ ID NO: 182353 - DNA, 25 bp, Canis familiaris
tccctagagacaccctgttcataaa

SEQ ID NO: 182354 - DNA, 25 bp, Canis familiaris
tccctagaacacggttgttgaatag

SEQ ID NO: 182355 - DNA, 25 bp, Canis familiaris
tccctcacatactctgttgtctgaa

SEQ ID NO: 182356 - DNA, 25 bp, Canis familiaris
tctcaccactacagtgggtgcaact

SEQ ID NO: 182357 - DNA, 25 bp, Canis familiaris
tcccgccatcgcaaggaggtggact

SEQ ID NO: 182358 - DNA, 25 bp, Canis familiaris
tcccgcctcttcttgagagtgtcac

SEQ ID NO: 182359 - DNA, 25 bp, Canis familiaris
tcccgctccctaatacgtgtaaaat

SEQ ID NO: 182360 - DNA, 25 bp, Canis familiaris
tcccccagctccatacactggaaga

SEQ ID NO: 182361 - DNA, 25 bp, Canis familiaris
tcgcgacccccacatattgtgaaga

SEQ ID NO: 182362 - DNA, 25 bp, Canis familiaris
tcccattcgacccgatatcgtgaac

SEQ ID NO: 182363 - DNA, 25 bp, Canis familiaris
tcccacctcccgaatgcatcgggac

SEQ ID NO: 182364 - DNA, 25 bp, Canis familiaris
tcccctctccctttgagatgagaac

SEQ ID NO: 182365 - DNA, 25 bp, Canis familiaris
tcccgccttgcagttggtgaggtac

SEQ ID NO: 182366 - DNA, 25 bp, Canis familiaris
tcccgcctacacttgtgtgcagaga

SEQ ID NO: 182367 - DNA, 25 bp, Canis familiaris
tcccgcctttgcttggactatgaga

SEQ ID NO: 182368 - DNA, 25 bp, Canis familiaris
tcccgccgttctctgagtagcggca

SEQ ID NO: 182369 - DNA, 25 bp, Canis familiaris
tccccccattctgcggagcagagga

SEQ ID NO: 182370 - DNA, 25 bp, Canis familiaris
tcccccacattccagctgggagaca

SEQ ID NO: 182371 - DNA, 25 bp, Canis familiaris
tcccccacactccagggttttgaag

SEQ ID NO: 182372 - DNA, 25 bp, Canis familiaris
tcccccacctcctggttaatgtgga

SEQ ID NO: 182373 - DNA, 25 bp, Canis familiaris
tcccgtaccacctgagtaagatgtg

SEQ ID NO: 182374 - DNA, 25 bp, Canis familiaris
tcccgaagcctcgctgagtgaaagc

SEQ ID NO: 182375 - DNA, 25 bp, Canis familiaris
tcgctgagaagcgtcccggaaaggc

SEQ ID NO: 182376 - DNA, 25 bp, Canis familiaris
tcgagtgatcttgccccagaccggc

SEQ ID NO: 182377 - DNA, 25 bp, Canis familiaris
tcccgctttaccagcagaacgctgc

SEQ ID NO: 182378 - DNA, 25 bp, Canis familiaris
tcccctcgtgacgggaggacggctc

SEQ ID NO: 182379 - DNA, 25 bp, Canis familiaris
tcccccactgacagcgaggacagag

SEQ ID NO: 182380 - DNA, 25 bp, Canis familiaris
tcccaaatcgtcatcagggccaagt

SEQ ID NO: 182381 - DNA, 25 bp, Canis familiaris
tcccagcatacttcttaacccaaga

SEQ ID NO: 182382 - DNA, 25 bp, Canis familiaris
tcccgagtcttttagagcacctagg

SEQ ID NO: 182383 - DNA, 25 bp, Canis familiaris
tcaccaaatttttcaaagctgtagt

SEQ ID NO: 182384 - DNA, 25 bp, Canis familiaris
tcccaacttcaaagccacagctgtt

SEQ ID NO: 182385 - DNA, 25 bp, Canis familiaris
tccctgactccatcactacagattc

SEQ ID NO: 182386 - DNA, 25 bp, Canis familiaris
tcccgactctcaggagcaacgttca

SEQ ID NO: 182387 - DNA, 25 bp, Canis familiaris
tcccgacttctggagcatgtgctgc

SEQ ID NO: 182388 - DNA, 25 bp, Canis familiaris
tcccccagtctggacgactgggcgc

SEQ ID NO: 182389 - DNA, 25 bp, Canis familiaris
tccccctgttgccacagaagcaggg

SEQ ID NO: 182390 - DNA, 25 bp, Canis familiaris
tcccacactcgttcaaaatccaggt

SEQ ID NO: 182391 - DNA, 25 bp, Canis familiaris
tcccagactcagtgactatcatccc

SEQ ID NO: 182392 - DNA, 25 bp, Canis familiaris
tcccagcatctgttgagggtctccc

SEQ ID NO: 182393 - DNA, 25 bp, Canis familiaris
tcccaggatgtttggactcagcgcc

SEQ ID NO: 182394 - DNA, 25 bp, Canis familiaris
tccctggatctttgagtctggtgtc

SEQ ID NO: 182395 - DNA, 25 bp, Canis familiaris
tccctggatctgtcagactcggctg

SEQ ID NO: 182396 - DNA, 25 bp, Canis familiaris
tccctagactgggacattccacttg

SEQ ID NO: 182397 - DNA, 25 bp, Canis familiaris
tccctacaatacgtgcttccaatgt

SEQ ID NO: 182398 - DNA, 25 bp, Canis familiaris
tcgccttaatacttgttctttttgt

SEQ ID NO: 182399 - DNA, 25 bp, Canis familiaris
ttgccattaaactgttaatactacc

SEQ ID NO: 182400 - DNA, 25 bp, Canis familiaris
tctccgtataagtgggaacccacct

SEQ ID NO: 182401 - DNA, 25 bp, Canis familiaris
tcccgttacacaagggacacaccgc

SEQ ID NO: 182402 - DNA, 25 bp, Canis familiaris
taccggctcgaacaagactcgccag

SEQ ID NO: 182403 - DNA, 25 bp, Canis familiaris
tcccgtggcgaacaacaagggagct

SEQ ID NO: 182404 - DNA, 25 bp, Canis familiaris
tcccggggacacttagccagagagg

SEQ ID NO: 182405 - DNA, 25 bp, Canis familiaris
tccctggaggagttcatccgcggag

SEQ ID NO: 182406 - DNA, 25 bp, Canis familiaris
tcaacggggatttgcccgtgggtcg

SEQ ID NO: 182407 - DNA, 25 bp, Canis familiaris
tcccggtatgtcaaccggttccatc

SEQ ID NO: 182408 - DNA, 25 bp, Canis familiaris
tcgccggggccatccggtaaatggt

SEQ ID NO: 182409 - DNA, 25 bp, Canis familiaris
tccccgtggccatcagagttgtagg

SEQ ID NO: 182410 - DNA, 25 bp, Canis familiaris
tcccctgtctgctagttggttgtag

SEQ ID NO: 182411 - DNA, 25 bp, Canis familiaris
tccctcactagctgtgtggctttgg

SEQ ID NO: 182412 - DNA, 25 bp, Canis familiaris
tccctcatcttctgaatggactgac

SEQ ID NO: 182413 - DNA, 25 bp, Canis familiaris
tcccatgttgtcagcgagcgtctga

SEQ ID NO: 182414 - DNA, 25 bp, Canis familiaris
tcccatctactcagccaaggctata

SEQ ID NO: 182415 - DNA, 25 bp, Canis familiaris
tcccatttgcgctccaacaagatga

SEQ ID NO: 182416 - DNA, 25 bp, Canis familiaris
tcccacactgccccaaataggtaac

SEQ ID NO: 182417 - DNA, 25 bp, Canis familiaris
tctacagcacccctaaaaacaaact

SEQ ID NO: 182418 - DNA, 25 bp, Canis familiaris
tcccagcctggccgaaaagacaaaa

SEQ ID NO: 182419 - DNA, 25 bp, Canis familiaris
tcccagtttccctgaagctcagaga

SEQ ID NO: 182420 - DNA, 25 bp, Canis familiaris
tcccactttcaccgtgggcttggca

SEQ ID NO: 182421 - DNA, 25 bp, Canis familiaris
tcccactttgccctaaggattcggt

SEQ ID NO: 182422 - DNA, 25 bp, Canis familiaris
tcccactttgccctaaggattcggt

SEQ ID NO: 182423 - DNA, 25 bp, Canis familiaris
tccctctgtatcattaagttattgg

SEQ ID NO: 182424 - DNA, 25 bp, Canis familiaris
tcccctgtccaactaagattcatgt

SEQ ID NO: 182425 - DNA, 25 bp, Canis familiaris
tcccctgtcctgcatcaggagtctg

SEQ ID NO: 182426 - DNA, 25 bp, Canis familiaris
tcccctgtgtctctgcaaagacatc

SEQ ID NO: 182427 - DNA, 25 bp, Canis familiaris
tctcctactggccctgaaaagccca

SEQ ID NO: 182428 - DNA, 25 bp, Canis familiaris
tccctcaggtgcttgctggaatcag

SEQ ID NO: 182429 - DNA, 25 bp, Canis familiaris
tccctcgaatgcttgatgaagcttg

SEQ ID NO: 182430 - DNA, 25 bp, Canis familiaris
tcccagtcctgctgtagagctgtca

SEQ ID NO: 182431 - DNA, 25 bp, Canis familiaris
tcccactcctaactcaatttaactc

SEQ ID NO: 182432 - DNA, 25 bp, Canis familiaris
tcggctctcttatttagttaaccag

SEQ ID NO: 182433 - DNA, 25 bp, Canis familiaris
tccctgccatgtaatccgtatcaac

SEQ ID NO: 182434 - DNA, 25 bp, Canis familiaris
tccctgcacactaacctgtatgctc

SEQ ID NO: 182435 - DNA, 25 bp, Canis familiaris
tccctcaagcagacatccttctgtg

SEQ ID NO: 182436 - DNA, 25 bp, Canis familiaris
tcgccatcaatgaccccttcattga

SEQ ID NO: 182437 - DNA, 25 bp, Canis familiaris
tccctcagattacatccatctatga

SEQ ID NO: 182438 - DNA, 25 bp, Canis familiaris
tcccatgcaggctatttctattgta

SEQ ID NO: 182439 - DNA, 25 bp, Canis familiaris
tcccaagtgttttcagtcgtgcacc

SEQ ID NO: 182440 - DNA, 25 bp, Canis familiaris
tcccaattggcaataccttggcctt

SEQ ID NO: 182441 - DNA, 25 bp, Canis familiaris
tcccatacaggtatcgcatgccgtc

SEQ ID NO: 182442 - DNA, 25 bp, Canis familiaris
tcccattcacggtcagacatcacgt

SEQ ID NO: 182443 - DNA, 25 bp, Canis familiaris
tcccattatcgtccagaataccacc

SEQ ID NO: 182444 - DNA, 25 bp, Canis familiaris
tccctaaagtcttagcatgaccctc

SEQ ID NO: 182445 - DNA, 25 bp, Canis familiaris
tccctcaaaatatccgactccaaca

SEQ ID NO: 182446 - DNA, 25 bp, Canis familiaris
tcccaaccatataaccaacctaaca

SEQ ID NO: 182447 - DNA, 25 bp, Canis familiaris
tcccgacgtagaacatcccggaaca

SEQ ID NO: 182448 - DNA, 25 bp, Canis familiaris
tccctgactgaattacatctttgaa

SEQ ID NO: 182449 - DNA, 25 bp, Canis familiaris
tccctgcactaaccagctttgagga

SEQ ID NO: 182450 - DNA, 25 bp, Canis familiaris
tccctgcaaggagactgatgtggga

SEQ ID NO: 182451 - DNA, 25 bp, Canis familiaris
tcccccggggcccagatgggataag

SEQ ID NO: 182452 - DNA, 25 bp, Canis familiaris
tccctgcggggagccagatggagga

SEQ ID NO: 182453 - DNA, 25 bp, Canis familiaris
tcccgggatggaagccagtgtcagg

SEQ ID NO: 182454 - DNA, 25 bp, Canis familiaris
tcccgggatgaagaatgttaagatg

SEQ ID NO: 182455 - DNA, 25 bp, Canis familiaris
tcccgggatgaagaagattcgagcc

SEQ ID NO: 182456 - DNA, 25 bp, Canis familiaris
tcccgggatcagagaagacatccgc

SEQ ID NO: 182457 - DNA, 25 bp, Canis familiaris
tccctatgtacgatacaccatccgc

SEQ ID NO: 182458 - DNA, 25 bp, Canis familiaris
tccctaaattgcatactccttcagt

SEQ ID NO: 182459 - DNA, 25 bp, Canis familiaris
tcccaaggtgacatactcatttagg

SEQ ID NO: 182460 - DNA, 25 bp, Canis familiaris
tcccaatggcctggctttctttagt

SEQ ID NO: 182461 - DNA, 25 bp, Canis familiaris
tcaccgatgaccgctttttacgtgc

SEQ ID NO: 182462 - DNA, 25 bp, Canis familiaris
tctccgtacagtggccttactacgt

SEQ ID NO: 182463 - DNA, 25 bp, Canis familiaris
tccctgagaagtgctcttggctgac

SEQ ID NO: 182464 - DNA, 25 bp, Canis familiaris
tcccgaggagctcatgtctcctggc

SEQ ID NO: 182465 - DNA, 25 bp, Canis familiaris
tcccgagagatgcccatcgctctcg

SEQ ID NO: 182466 - DNA, 25 bp, Canis familiaris
tccctgcaatattccacactactgg

SEQ ID NO: 182467 - DNA, 25 bp, Canis familiaris
tcccgcggagcagacactcagaggg

SEQ ID NO: 182468 - DNA, 25 bp, Canis familiaris
tctcccccaccttaatcgaggggtg

SEQ ID NO: 182469 - DNA, 25 bp, Canis familiaris
tccccccatggcgcaattcttgggg

SEQ ID NO: 182470 - DNA, 25 bp, Canis familiaris
tccccctcagggacacttcgtgggg

SEQ ID NO: 182471 - DNA, 25 bp, Canis familiaris
tccctgggcagggtggtttctgggg

SEQ ID NO: 182472 - DNA, 25 bp, Canis familiaris
tcccgggagacttcaggttctccgg

SEQ ID NO: 182473 - DNA, 25 bp, Canis familiaris
tcccggggagcttcggtttgtgaga

SEQ ID NO: 182474 - DNA, 25 bp, Canis familiaris
tcccacggtttccagctttttagag

SEQ ID NO: 182475 - DNA, 25 bp, Canis familiaris
tcccacaggccgaggtcttttatta

SEQ ID NO: 182476 - DNA, 25 bp, Canis familiaris
tccctgggcctggggcttggaatat

SEQ ID NO: 182477 - DNA, 25 bp, Canis familiaris
tccctgaggccgtggttgagacgca

SEQ ID NO: 182478 - DNA, 25 bp, Canis familiaris
tccctgaggccttcgactatgggca

SEQ ID NO: 182479 - DNA, 25 bp, Canis familiaris
tcccgaagccattcaggccagatgg

SEQ ID NO: 182480 - DNA, 25 bp, Canis familiaris
tcccatcagaccagggcactgtggc

SEQ ID NO: 182481 - DNA, 25 bp, Canis familiaris
tccctgcaaggcagacacctcgatg

SEQ ID NO: 182482 - DNA, 25 bp, Canis familiaris
tccctcagaagctgatcttcccagg

SEQ ID NO: 182483 - DNA, 25 bp, Canis familiaris
tccctagcatcgagtttcccaggat

SEQ ID NO: 182484 - DNA, 25 bp, Canis familiaris
tcccttacgctgacttacccagcga

SEQ ID NO: 182485 - DNA, 25 bp, Canis familiaris
tcgcctctacctgggatatcccagc

SEQ ID NO: 182486 - DNA, 25 bp, Canis familiaris
tcccatcattacgaagctataccag

SEQ ID NO: 182487 - DNA, 25 bp, Canis familiaris
tcccacagtacctgctatttctggt

SEQ ID NO: 182488 - DNA, 25 bp, Canis familiaris
tcccacgctaactacatatatatat

SEQ ID NO: 182489 - DNA, 25 bp, Canis familiaris
tcccacgccactgagtgcatttact

SEQ ID NO: 182490 - DNA, 25 bp, Canis familiaris
tcccacgtatctgaaggcttcttct

SEQ ID NO: 182491 - DNA, 25 bp, Canis familiaris
tccccgctgagggacaggtcctgat

SEQ ID NO: 182492 - DNA, 25 bp, Canis familiaris
tcccccttggctccatgggattgat

SEQ ID NO: 182493 - DNA, 25 bp, Canis familiaris
tcccccctgatccatcagaggttga

SEQ ID NO: 182494 - DNA, 25 bp, Canis familiaris
tcccccctgtaaacatggtgctgtg

SEQ ID NO: 182495 - DNA, 25 bp, Canis familiaris
tcccagcacttgaacgtcgagttgt

SEQ ID NO: 182496 - DNA, 25 bp, Canis familiaris
tcccagccctgatgggcctttggat

SEQ ID NO: 182497 - DNA, 25 bp, Canis familiaris
tcccagtgctccaaaaccaacggca

SEQ ID NO: 182498 - DNA, 25 bp, Canis familiaris
tcccatctgttccaaatccaggcac

SEQ ID NO: 182499 - DNA, 25 bp, Canis familiaris
tcccttctccactaaccagagagct

SEQ ID NO: 182500 - DNA, 25 bp, Canis familiaris
tccctttcagatgacccagcagatg

SEQ ID NO: 182501 - DNA, 25 bp, Canis familiaris
tcccattaatgtggccaccatggtg

SEQ ID NO: 182502 - DNA, 25 bp, Canis familiaris
tcccatggaagagcccctggtaata

SEQ ID NO: 182503 - DNA, 25 bp, Canis familiaris
tcccatggaatggtttttggttaag

SEQ ID NO: 182504 - DNA, 25 bp, Canis familiaris
tccctagaacaggttgttgaatgtc

SEQ ID NO: 182505 - DNA, 25 bp, Canis familiaris
tccctagccgctgtcagttaagtgg

SEQ ID NO: 182506 - DNA, 25 bp, Canis familiaris
tcccataccccaggagactataggc

SEQ ID NO: 182507 - DNA, 25 bp, Canis familiaris
tccctaaccactgaaattacccaag

SEQ ID NO: 182508 - DNA, 25 bp, Canis familiaris
tctcctcaaccttgtaacagttccc

SEQ ID NO: 182509 - DNA, 25 bp, Canis familiaris
tcccccaaaatgtaacttctcctgg

SEQ ID NO: 182510 - DNA, 25 bp, Canis familiaris
tccctcccacaattatatcttatcg

SEQ ID NO: 182511 - DNA, 25 bp, Canis familiaris
tccctccaaccattaatcttattcg

SEQ ID NO: 182512 - DNA, 25 bp, Canis familiaris
tcccccacatccttcagaatgtatt

SEQ ID NO: 182513 - DNA, 25 bp, Canis familiaris
tcgaactgcacaccttgaaatgttg

SEQ ID NO: 182514 - DNA, 25 bp, Canis familiaris
tcgcaagaacctgatggacatgttc

SEQ ID NO: 182515 - DNA, 25 bp, Canis familiaris
tcgaacacaagctgggatcattatg

SEQ ID NO: 182516 - DNA, 25 bp, Canis familiaris
tcgaacctatgctctcgaaatcttc

SEQ ID NO: 182517 - DNA, 25 bp, Canis familiaris
tcgaacactttagcagaaactgatt

SEQ ID NO: 182518 - DNA, 25 bp, Canis familiaris
tcgaacagttccgttgactactttt

SEQ ID NO: 182519 - DNA, 25 bp, Canis familiaris
tcgaccggatcttgcttagtactta

SEQ ID NO: 182520 - DNA, 25 bp, Canis familiaris
tcaaacggtccccttggacaaagag

SEQ ID NO: 182521 - DNA, 25 bp, Canis familiaris
taaacggtttggaggccgcaagtgc

SEQ ID NO: 182522 - DNA, 25 bp, Canis familiaris
taattggagtttgaggcccctaagc

SEQ ID NO: 182523 - DNA, 25 bp, Canis familiaris
tagttgtagtgttaacccgcctaat

SEQ ID NO: 182524 - DNA, 25 bp, Canis familiaris
tcgtagtttgtttcccagagttaag

SEQ ID NO: 182525 - DNA, 25 bp, Canis familiaris
tctgaagggtttaccaaggattaag

SEQ ID NO: 182526 - DNA, 25 bp, Canis familiaris
tctaccaaattctccgaggtctcaa

SEQ ID NO: 182527 - DNA, 25 bp, Canis familiaris
tcggccaggatcgtggggaggttag

SEQ ID NO: 182528 - DNA, 25 bp, Canis familiaris
tcgccgccagaatgagggaggatag

SEQ ID NO: 182529 - DNA, 25 bp, Canis familiaris
tcccccgaacgagggccagaatgga

SEQ ID NO: 182530 - DNA, 25 bp, Canis familiaris
tcccccgaacactgacgaatcaaat

SEQ ID NO: 182531 - DNA, 25 bp, Canis familiaris
tcccccataacctaagcatactcag

SEQ ID NO: 182532 - DNA, 25 bp, Canis familiaris
tcccccaacacactgagagaatctc

SEQ ID NO: 182533 - DNA, 25 bp, Canis familiaris
tcccccagcccaggcaagaagatct

SEQ ID NO: 182534 - DNA, 25 bp, Canis familiaris
tccctgccgccttcagtaaaactaa

SEQ ID NO: 182535 - DNA, 25 bp, Canis familiaris
tccctcgcgaatccgtgtaaagtaa

SEQ ID NO: 182536 - DNA, 25 bp, Canis familiaris
tccctccagacatcgctgtaacagg

SEQ ID NO: 182537 - DNA, 25 bp, Canis familiaris
tcccccaacaatctggagcagcgct

SEQ ID NO: 182538 - DNA, 25 bp, Canis familiaris
tccctctcaaagacttgcacaggcc

SEQ ID NO: 182539 - DNA, 25 bp, Canis familiaris
tcgccgccaatgcttgttcaggcac

SEQ ID NO: 182540 - DNA, 25 bp, Canis familiaris
tccctgcacagtctggtggaggcac

SEQ ID NO: 182541 - DNA, 25 bp, Canis familiaris
tccctgcctggttgctgtggggatt

SEQ ID NO: 182542 - DNA, 25 bp, Canis familiaris
tccctcatgtcacttgttggcgtga

SEQ ID NO: 182543 - DNA, 25 bp, Canis familiaris
tcccttctgctgaagtctggctgtg

SEQ ID NO: 182544 - DNA, 25 bp, Canis familiaris
tcgcctcttgcgattgctacatgta

SEQ ID NO: 182545 - DNA, 25 bp, Canis familiaris
tccctggtggtttgctcacatgtgt

SEQ ID NO: 182546 - DNA, 25 bp, Canis familiaris
tccctgtgggtgaagtcctgcaact

SEQ ID NO: 182547 - DNA, 25 bp, Canis familiaris
tccctggtgttttatgcccagttta

SEQ ID NO: 182548 - DNA, 25 bp, Canis familiaris
tccctggtttcttacgtagttgact

SEQ ID NO: 182549 - DNA, 25 bp, Canis familiaris
tcccggctgtgcttaaaggagctgt

SEQ ID NO: 182550 - DNA, 25 bp, Canis familiaris
tcccgccctgctgcaggaggagtgg

SEQ ID NO: 182551 - DNA, 25 bp, Canis familiaris
tccctgcccacggatggaagtgtgt

SEQ ID NO: 182552 - DNA, 25 bp, Canis familiaris
tccctgcacctccagtaggagtgtg

SEQ ID NO: 182553 - DNA, 25 bp, Canis familiaris
tcccatcccccattgaggagatcat

SEQ ID NO: 182554 - DNA, 25 bp, Canis familiaris
tcccccagccagcctggagagatga

SEQ ID NO: 182555 - DNA, 25 bp, Canis familiaris
tcgcgcccaccactgaagtatgtga

SEQ ID NO: 182556 - DNA, 25 bp, Canis familiaris
tcgacttacatcttgggtcctggac

SEQ ID NO: 182557 - DNA, 25 bp, Canis familiaris
tccctgctgacatctggggctttga

SEQ ID NO: 182558 - DNA, 25 bp, Canis familiaris
tccctgctgaaaggcagctggtacg

SEQ ID NO: 182559 - DNA, 25 bp, Canis familiaris
tccctgtgagaagtcacgggccgct

SEQ ID NO: 182560 - DNA, 25 bp, Canis familiaris
tccctaggacattacagcagcgccg

SEQ ID NO: 182561 - DNA, 25 bp, Canis familiaris
tccctcaaggatgagacaggacagg

SEQ ID NO: 182562 - DNA, 25 bp, Canis familiaris
tccctccaggaccgagaggcacttg

SEQ ID NO: 182563 - DNA, 25 bp, Canis familiaris
tcccccaagccttgattggacctgg

SEQ ID NO: 182564 - DNA, 25 bp, Canis familiaris
tcccccagaccttgttggatcagaa

SEQ ID NO: 182565 - DNA, 25 bp, Canis familiaris
tcccttcgccctcatgtggaaagag

SEQ ID NO: 182566 - DNA, 25 bp, Canis familiaris
tcccttcaccctgtcgaatgtggat

SEQ ID NO: 182567 - DNA, 25 bp, Canis familiaris
tcccggctacctgatgggtgtgcga

SEQ ID NO: 182568 - DNA, 25 bp, Canis familiaris
tcccccatatcctaggggctgctgc

SEQ ID NO: 182569 - DNA, 25 bp, Canis familiaris
tcccaccattttgatgggcctcttg

SEQ ID NO: 182570 - DNA, 25 bp, Canis familiaris
tcccactcttttcacagttttgtga

SEQ ID NO: 182571 - DNA, 25 bp, Canis familiaris
tcccgctttattcaccttgatggtg

SEQ ID NO: 182572 - DNA, 25 bp, Canis familiaris
tcccggttattttccttgcatttgg

SEQ ID NO: 182573 - DNA, 25 bp, Canis familiaris
tcccgggattgggtcccgcattggg

SEQ ID NO: 182574 - DNA, 25 bp, Canis familiaris
tcccgggatcatggctgtggccaca

SEQ ID NO: 182575 - DNA, 25 bp, Canis familiaris
tcccgggatctccgatatgcatccc

SEQ ID NO: 182576 - DNA, 25 bp, Canis familiaris
tcccagaacatcacgtatcacctgc

SEQ ID NO: 182577 - DNA, 25 bp, Canis familiaris
tcccactacaaactgttgccgtgca

SEQ ID NO: 182578 - DNA, 25 bp, Canis familiaris
tcccactagcagtttgtccactgta

SEQ ID NO: 182579 - DNA, 25 bp, Canis familiaris
tcccactacttgtgtgcaccatgtg

SEQ ID NO: 182580 - DNA, 25 bp, Canis familiaris
tcccacttcatcctggtgaactgag

SEQ ID NO: 182581 - DNA, 25 bp, Canis familiaris
tcccagagctgaacgggaagctcac

SEQ ID NO: 182582 - DNA, 25 bp, Canis familiaris
tcgccggcgaaagatgaaccatcac

SEQ ID NO: 182583 - DNA, 25 bp, Canis familiaris
tcgccctgaaggagaaacacatcac

SEQ ID NO: 182584 - DNA, 25 bp, Canis familiaris
tcccactgatatcacgggcacgctc

SEQ ID NO: 182585 - DNA, 25 bp, Canis familiaris
tcccagtgagcaccctgggagccca

SEQ ID NO: 182586 - DNA, 25 bp, Canis familiaris
tcccagtggaccagcatgctgcaga

SEQ ID NO: 182587 - DNA, 25 bp, Canis familiaris
tccctgctcagtcctgagcactggc

SEQ ID NO: 182588 - DNA, 25 bp, Canis familiaris
tccctctgcatcccatgatgatcac

SEQ ID NO: 182589 - DNA, 25 bp, Canis familiaris
tcgctgccatctaccatgcagccaa

SEQ ID NO: 182590 - DNA, 25 bp, Canis familiaris
tcgccgcacatcatcagcgcgcaag

SEQ ID NO: 182591 - DNA, 25 bp, Canis familiaris
tccctcatcagaaagccagctcaga

SEQ ID NO: 182592 - DNA, 25 bp, Canis familiaris
tccctgcagcagctacacagctgga

SEQ ID NO: 182593 - DNA, 25 bp, Canis familiaris
tccctgcagcaggctgtatcctgga

SEQ ID NO: 182594 - DNA, 25 bp, Canis familiaris
tcccgcaaccatgaacgcggcgtgt

SEQ ID NO: 182595 - DNA, 25 bp, Canis familiaris
tcccgccagcctgagatcttggcga

SEQ ID NO: 182596 - DNA, 25 bp, Canis familiaris
tcccggagttctggcacagttgcga

SEQ ID NO: 182597 - DNA, 25 bp, Canis familiaris
tcccgggatcctggagagcaattca

SEQ ID NO: 182598 - DNA, 25 bp, Canis familiaris
tcccgggatggcgagagcagagagt

SEQ ID NO: 182599 - DNA, 25 bp, Canis familiaris
tcccgggatagcagctgcaaggact

SEQ ID NO: 182600 - DNA, 25 bp, Canis familiaris
tcccgggggcaggatgtcaggactg

SEQ ID NO: 182601 - DNA, 25 bp, Canis familiaris
tccctggtggggctgtagggctcag

SEQ ID NO: 182602 - DNA, 25 bp, Canis familiaris
tcacggttttgggttcagaccctgc

SEQ ID NO: 182603 - DNA, 25 bp, Canis familiaris
tcggaatattttgttcaacgtcgca

SEQ ID NO: 182604 - DNA, 25 bp, Canis familiaris
tcggaagaccttgtaacggttcagc

SEQ ID NO: 182605 - DNA, 25 bp, Canis familiaris
tcccaaaccctcctacatgggtggg

SEQ ID NO: 182606 - DNA, 25 bp, Canis familiaris
tcccaagcccctttaagctgggttg

SEQ ID NO: 182607 - DNA, 25 bp, Canis familiaris
tcccaaccccagtaacactgctggg

SEQ ID NO: 182608 - DNA, 25 bp, Canis familiaris
tccctaacctgatacacactcgaat

SEQ ID NO: 182609 - DNA, 25 bp, Canis familiaris
tcccttggcctggaaacctcagaat

SEQ ID NO: 182610 - DNA, 25 bp, Canis familiaris
tccctttcttgtaaacttatggaca

SEQ ID NO: 182611 - DNA, 25 bp, Canis familiaris
tcggggtctttattactttggcagg

SEQ ID NO: 182612 - DNA, 25 bp, Canis familiaris
tcgtcggttatctttatttcgtcgg

SEQ ID NO: 182613 - DNA, 25 bp, Canis familiaris
tcgaatggtttctttaaacaccctg

SEQ ID NO: 182614 - DNA, 25 bp, Canis familiaris
tcgaaggttgtgggaaaatgccggg

SEQ ID NO: 182615 - DNA, 25 bp, Canis familiaris
tcccaggggctgcaacaaggccgtg

SEQ ID NO: 182616 - DNA, 25 bp, Canis familiaris
tcccggaggggaaagagtgctggtg

SEQ ID NO: 182617 - DNA, 25 bp, Canis familiaris
tccctctgttggcaggggtgggatg

SEQ ID NO: 182618 - DNA, 25 bp, Canis familiaris
tccctcgtctggacggggggagtgt

SEQ ID NO: 182619 - DNA, 25 bp, Canis familiaris
tcccatcgcttccacgggaaaggct

SEQ ID NO: 182620 - DNA, 25 bp, Canis familiaris
tcagtaagttcctggccaaagtttg

SEQ ID NO: 182621 - DNA, 25 bp, Canis familiaris
tcgaactggtcctggacggggtcgg

SEQ ID NO: 182622 - DNA, 25 bp, Canis familiaris
tcaagcccccaagagaaggggtcgg

SEQ ID NO: 182623 - DNA, 25 bp, Canis familiaris
taagccctccaggtcaggggtctgt

SEQ ID NO: 182624 - DNA, 25 bp, Canis familiaris
tcgagatcgcatccactatcaggcg

SEQ ID NO: 182625 - DNA, 25 bp, Canis familiaris
tcgatatcttggatacagctgggca

SEQ ID NO: 182626 - DNA, 25 bp, Canis familiaris
tccctctcatgtatcacacctggaa

SEQ ID NO: 182627 - DNA, 25 bp, Canis familiaris
tccctcactgttatgcacactggtg

SEQ ID NO: 182628 - DNA, 25 bp, Canis familiaris
tccctactaatgaagagtctgagtc

SEQ ID NO: 182629 - DNA, 25 bp, Canis familiaris
tccctgagctgcggtgaggtcagtt

SEQ ID NO: 182630 - DNA, 25 bp, Canis familiaris
tccctgatgcagtccttgttatgtt

SEQ ID NO: 182631 - DNA, 25 bp, Canis familiaris
tcccgatttctcttttatgatttcc

SEQ ID NO: 182632 - DNA, 25 bp, Canis familiaris
tcccgtttctattgttttcttcaca

SEQ ID NO: 182633 - DNA, 25 bp, Canis familiaris
tcccattctttaaatttttctacag

SEQ ID NO: 182634 - DNA, 25 bp, Canis familiaris
tcccgtctttgaacatctatcttcc

SEQ ID NO: 182635 - DNA, 25 bp, Canis familiaris
tccctgctcagtggagagtcttctt

SEQ ID NO: 182636 - DNA, 25 bp, Canis familiaris
tcccagctctgtcatggtgctatgt

SEQ ID NO: 182637 - DNA, 25 bp, Canis familiaris
tccctgctggccaatggcctgttgg

SEQ ID NO: 182638 - DNA, 25 bp, Canis familiaris
tcccagttgcacagcacctgctggg

SEQ ID NO: 182639 - DNA, 25 bp, Canis familiaris
tcgtgcgttgccacactgtgttata

SEQ ID NO: 182640 - DNA, 25 bp, Canis familiaris
tccctgtttcattgcactgtggctt

SEQ ID NO: 182641 - DNA, 25 bp, Canis familiaris
tccctcatttgttcctggacgtgat

SEQ ID NO: 182642 - DNA, 25 bp, Canis familiaris
tctcgtattcggaccgacactgggt

SEQ ID NO: 182643 - DNA, 25 bp, Canis familiaris
tcccgttcactggggagctctggga

SEQ ID NO: 182644 - DNA, 25 bp, Canis familiaris
tccctgtgagcactgtctgggtgtg

SEQ ID NO: 182645 - DNA, 25 bp, Canis familiaris
tccctctggcctggctgagggtggt

SEQ ID NO: 182646 - DNA, 25 bp, Canis familiaris
tcccttgtgcctgtggctggtgata

SEQ ID NO: 182647 - DNA, 25 bp, Canis familiaris
tccctcatgtcccaatggctggatt

SEQ ID NO: 182648 - DNA, 25 bp, Canis familiaris
tcccacgtctctatggcaggtttgt

SEQ ID NO: 182649 - DNA, 25 bp, Canis familiaris
tcccggtcatccagggcaacattgg

SEQ ID NO: 182650 - DNA, 25 bp, Canis familiaris
tcgccgtgtgccgtggtgaaacggg

SEQ ID NO: 182651 - DNA, 25 bp, Canis familiaris
tccctggacctgagtgaaacccacc

SEQ ID NO: 182652 - DNA, 25 bp, Canis familiaris
tcccgggactttagctaagcccgcg

SEQ ID NO: 182653 - DNA, 25 bp, Canis familiaris
tcccaggccaagcctggctaacccg

SEQ ID NO: 182654 - DNA, 25 bp, Canis familiaris
tcccagtgccaagtgacgtggcggg

SEQ ID NO: 182655 - DNA, 25 bp, Canis familiaris
tcccaggtagccaatggtggcggca

SEQ ID NO: 182656 - DNA, 25 bp, Canis familiaris
tcccagagcttgtcgatgttgtcgt

SEQ ID NO: 182657 - DNA, 25 bp, Canis familiaris
tccctgagcttctgttgttggctgt

SEQ ID NO: 182658 - DNA, 25 bp, Canis familiaris
tcgccatgtttcttgcttgttttgg

SEQ ID NO: 182659 - DNA, 25 bp, Canis familiaris
tccctctttagtcattgctgtgcgg

SEQ ID NO: 182660 - DNA, 25 bp, Canis familiaris
tcccatcgagtgtaccttgggccgg

SEQ ID NO: 182661 - DNA, 25 bp, Canis familiaris
tccctagagtacatcatctgggccc

SEQ ID NO: 182662 - DNA, 25 bp, Canis familiaris
tccctctgggagcccaacatggacc

SEQ ID NO: 182663 - DNA, 25 bp, Canis familiaris
tcccttggagaggcccacatggcaa

SEQ ID NO: 182664 - DNA, 25 bp, Canis familiaris
tccctctgcgggtcccgcaatgaaa

SEQ ID NO: 182665 - DNA, 25 bp, Canis familiaris
tcccttggggatggaatgcataata

SEQ ID NO: 182666 - DNA, 25 bp, Canis familiaris
tccctgtggggtctgagcagccaca

SEQ ID NO: 182667 - DNA, 25 bp, Canis familiaris
tcccaatggtggcgtgatggcccag

SEQ ID NO: 182668 - DNA, 25 bp, Canis familiaris
tcaggccggtgtcggttggcggcca

SEQ ID NO: 182669 - DNA, 25 bp, Canis familiaris
tccctgcggagctggcttgtgggta

SEQ ID NO: 182670 - DNA, 25 bp, Canis familiaris
tccctcggcaggggtgttggggagt

SEQ ID NO: 182671 - DNA, 25 bp, Canis familiaris
tccctgccgtctgttcttagggtgt

SEQ ID NO: 182672 - DNA, 25 bp, Canis familiaris
tcacgtcctcctggaacttagggta

SEQ ID NO: 182673 - DNA, 25 bp, Canis familiaris
tccctcctctcttggacgagggcgt

SEQ ID NO: 182674 - DNA, 25 bp, Canis familiaris
tccctctgcttttggcaagaccagc

SEQ ID NO: 182675 - DNA, 25 bp, Canis familiaris
tcccgtgtgttgttcaaccgtgcgt

SEQ ID NO: 182676 - DNA, 25 bp, Canis familiaris
tcgccagtcgagtagatcaaccctg

SEQ ID NO: 182677 - DNA, 25 bp, Canis familiaris
tcccgtgaggcatttggaccctgaa

SEQ ID NO: 182678 - DNA, 25 bp, Canis familiaris
tctgaaataggatttggaccctaaa

SEQ ID NO: 182679 - DNA, 25 bp, Canis familiaris
tctgaaagagtattccgaacccaaa

SEQ ID NO: 182680 - DNA, 25 bp, Canis familiaris
tcgaacaacacttcttaaccccaga

SEQ ID NO: 182681 - DNA, 25 bp, Canis familiaris
tcgaccacaaattttacgaccgcct

SEQ ID NO: 182682 - DNA, 25 bp, Canis familiaris
tcgaccaccattttaactcgtcgcc

SEQ ID NO: 182683 - DNA, 25 bp, Canis familiaris
tcgacggaaatattagactcatgat

SEQ ID NO: 182684 - DNA, 25 bp, Canis familiaris
tctaaaataaactgcctctgacccc

SEQ ID NO: 182685 - DNA, 25 bp, Canis familiaris
tcttagaataacggaccacgaccct

SEQ ID NO: 182686 - DNA, 25 bp, Canis familiaris
tttaaaacttcgcaaaattgcctag

SEQ ID NO: 182687 - DNA, 25 bp, Canis familiaris
tcttgaaaattttaaggcaaacctg

SEQ ID NO: 182688 - DNA, 25 bp, Canis familiaris
tcttaagttaattaattgccaccct

SEQ ID NO: 182689 - DNA, 25 bp, Canis familiaris
ttggtttacaatgaagtcccctgtg

SEQ ID NO: 182690 - DNA, 25 bp, Canis familiaris
tcaggtttcaagccttagtttccgg

SEQ ID NO: 182691 - DNA, 25 bp, Canis familiaris
tcggttatctgaggatcccttgtcc

SEQ ID NO: 182692 - DNA, 25 bp, Canis familiaris
tcgaggacattgtggctccttccac

SEQ ID NO: 182693 - DNA, 25 bp, Canis familiaris
tcgcagaacttgtgtatcccttgcc

SEQ ID NO: 182694 - DNA, 25 bp, Canis familiaris
tctgaacgttgctgttccacgtgtc

SEQ ID NO: 182695 - DNA, 25 bp, Canis familiaris
tcgaacgtctgccctatcaactttc

SEQ ID NO: 182696 - DNA, 25 bp, Canis familiaris
tcagaatctgtcggccaaaagcggt

SEQ ID NO: 182697 - DNA, 25 bp, Canis familiaris
tcggccatgtcatggtaaacggtcc

SEQ ID NO: 182698 - DNA, 25 bp, Canis familiaris
tcggttccacagggacacgttttcg

SEQ ID NO: 182699 - DNA, 25 bp, Canis familiaris
tcgctgtcccgctaagtatcggttt

SEQ ID NO: 182700 - DNA, 25 bp, Canis familiaris
tcgtttccgctaggttagtttgttg

SEQ ID NO: 182701 - DNA, 25 bp, Canis familiaris
tccctttagcacgtttagagttttg

SEQ ID NO: 182702 - DNA, 25 bp, Canis familiaris
tcccacctctgctctttaaggtttt

SEQ ID NO: 182703 - DNA, 25 bp, Canis familiaris
tcccagcccagctcattgagtagga

SEQ ID NO: 182704 - DNA, 25 bp, Canis familiaris
tcccatgctcttctgactgagtcag

SEQ ID NO: 182705 - DNA, 25 bp, Canis familiaris
tcccatcatcttggtactactagat

SEQ ID NO: 182706 - DNA, 25 bp, Canis familiaris
tcccatcatttggacttatgtacaa

SEQ ID NO: 182707 - DNA, 25 bp, Canis familiaris
tcgccttgcattcacagtctgtata

SEQ ID NO: 182708 - DNA, 25 bp, Canis familiaris
tcgcgaacatttgcgatgtgtcaat

SEQ ID NO: 182709 - DNA, 25 bp, Canis familiaris
tcgagaaattccagtgtccttgtcc

SEQ ID NO: 182710 - DNA, 25 bp, Canis familiaris
tcgagaaattccagtgtccttgtcc

SEQ ID NO: 182711 - DNA, 25 bp, Canis familiaris
tcgagaaattccagtgtccttgtcc

SEQ ID NO: 182712 - DNA, 25 bp, Canis familiaris
tcgcagaaccccagttggcattgtc

SEQ ID NO: 182713 - DNA, 25 bp, Canis familiaris
tcggccaagcccagtggacattgta

SEQ ID NO: 182714 - DNA, 25 bp, Canis familiaris
tcgccctcaaccaggtggatgtgtg

SEQ ID NO: 182715 - DNA, 25 bp, Canis familiaris
tcgccccacagagctgggcagattc

SEQ ID NO: 182716 - DNA, 25 bp, Canis familiaris
tcagttccacaagggtacgttccta

SEQ ID NO: 182717 - DNA, 25 bp, Canis familiaris
tcgcttctaaaaaggacctgtccca

SEQ ID NO: 182718 - DNA, 25 bp, Canis familiaris
tctgggtaacacaggactttcctct

SEQ ID NO: 182719 - DNA, 25 bp, Canis familiaris
tcccagtaactgaggttttcaaccg

SEQ ID NO: 182720 - DNA, 25 bp, Canis familiaris
tcccagtcacctctggatgtttcca

SEQ ID NO: 182721 - DNA, 25 bp, Canis familiaris
tcgtcgtcacccaatgggttcttcc

SEQ ID NO: 182722 - DNA, 25 bp, Canis familiaris
tcgctttcaccctaagattgtctta

SEQ ID NO: 182723 - DNA, 25 bp, Canis familiaris
tcccttattccttatgtttgctata

SEQ ID NO: 182724 - DNA, 25 bp, Canis familiaris
tccctttgtcctttgatgtcattgt

SEQ ID NO: 182725 - DNA, 25 bp, Canis familiaris
tccctttggtgtttcattgctttac

SEQ ID NO: 182726 - DNA, 25 bp, Canis familiaris
tcaaagtttggtttcgatcttcata

SEQ ID NO: 182727 - DNA, 25 bp, Canis familiaris
tcagacggatagctactcgtgcctc

SEQ ID NO: 182728 - DNA, 25 bp, Canis familiaris
tcagtcggatatcaacgtccctcag

SEQ ID NO: 182729 - DNA, 25 bp, Canis familiaris
tcgctgtgaatataaactccccgtt

SEQ ID NO: 182730 - DNA, 25 bp, Canis familiaris
tccctaataaaagatccagcacttt

SEQ ID NO: 182731 - DNA, 25 bp, Canis familiaris
tccctaatgcaccaactctggcaga

SEQ ID NO: 182732 - DNA, 25 bp, Canis familiaris
tccctacttccaacatcagtcaatc

SEQ ID NO: 182733 - DNA, 25 bp, Canis familiaris
tccctccccacaacagagaagacca

SEQ ID NO: 182734 - DNA, 25 bp, Canis familiaris
tccctcgccaccagaaatgcagaaa

SEQ ID NO: 182735 - DNA, 25 bp, Canis familiaris
tcccttgccatcctaaaagccaccc

SEQ ID NO: 182736 - DNA, 25 bp, Canis familiaris
tcgcctctggcagcgaaaagacccc

SEQ ID NO: 182737 - DNA, 25 bp, Canis familiaris
tcgccttggaccgacaaagtttgac

SEQ ID NO: 182738 - DNA, 25 bp, Canis familiaris
tcgttcagggcctcttagtcattga

SEQ ID NO: 182739 - DNA, 25 bp, Canis familiaris
tcgtatcaagtgcttttgtaactca

SEQ ID NO: 182740 - DNA, 25 bp, Canis familiaris
tcgtatattgtttattcggaagcat

SEQ ID NO: 182741 - DNA, 25 bp, Canis familiaris
tcgccaattttttatgagctacaga

SEQ ID NO: 182742 - DNA, 25 bp, Canis familiaris
tcccattccttctgtatggcactga

SEQ ID NO: 182743 - DNA, 25 bp, Canis familiaris
tccctgtccttgtttctgagactga

SEQ ID NO: 182744 - DNA, 25 bp, Canis familiaris
tcccttcctcttaactgaatgccac

SEQ ID NO: 182745 - DNA, 25 bp, Canis familiaris
tccctccccttatcatgaatgataa

SEQ ID NO: 182746 - DNA, 25 bp, Canis familiaris
tccctccctaatttatcaagagaaa

SEQ ID NO: 182747 - DNA, 25 bp, Canis familiaris
tctcgtccccggtgaagaagacaga

SEQ ID NO: 182748 - DNA, 25 bp, Canis familiaris
tccctgcccccgaggaagagaggac

SEQ ID NO: 182749 - DNA, 25 bp, Canis familiaris
tccctggccagccaacgaagggggt

SEQ ID NO: 182750 - DNA, 25 bp, Canis familiaris
tcccggccagatcacgtagacaggg

SEQ ID NO: 182751 - DNA, 25 bp, Canis familiaris
tcccggccagatcacgtagacaggg

SEQ ID NO: 182752 - DNA, 25 bp, Canis familiaris
tcccggccagatcacgtagacaggg

SEQ ID NO: 182753 - DNA, 25 bp, Canis familiaris
tccctggccgactacataacagcag

SEQ ID NO: 182754 - DNA, 25 bp, Canis familiaris
tccctggcatccttaatccacatga

SEQ ID NO: 182755 - DNA, 25 bp, Canis familiaris
tccctgatcatctgtaactactcac

SEQ ID NO: 182756 - DNA, 25 bp, Canis familiaris
tccctttctggaagcagtctctcac

SEQ ID NO: 182757 - DNA, 25 bp, Canis familiaris
tccctcttctgctaacagttatctc

SEQ ID NO: 182758 - DNA, 25 bp, Canis familiaris
tcccatgtttgctcactgctatatc

SEQ ID NO: 182759 - DNA, 25 bp, Canis familiaris
tccctgtggctgtgagcatgctaac

SEQ ID NO: 182760 - DNA, 25 bp, Canis familiaris
tccctgcatccactggtgctgccaa

SEQ ID NO: 182761 - DNA, 25 bp, Canis familiaris
tccctcttcagggtgctgacagagc

SEQ ID NO: 182762 - DNA, 25 bp, Canis familiaris
tcccactatgcatgcactggtctga

SEQ ID NO: 182763 - DNA, 25 bp, Canis familiaris
tcgcgcacttcttaatcatgtctga

SEQ ID NO: 182764 - DNA, 25 bp, Canis familiaris
tcccactgctgttcagtcttctggg

SEQ ID NO: 182765 - DNA, 25 bp, Canis familiaris
tcccatcatgctgcatctggctgag

SEQ ID NO: 182766 - DNA, 25 bp, Canis familiaris
tcccacatgctgcaatctgctgcaa

SEQ ID NO: 182767 - DNA, 25 bp, Canis familiaris
tcccatgcagagccatgtggcccag

SEQ ID NO: 182768 - DNA, 25 bp, Canis familiaris
tcccatgctgcacagggcaacgcag

SEQ ID NO: 182769 - DNA, 25 bp, Canis familiaris
tccctgcagccagatggagaggcgg

SEQ ID NO: 182770 - DNA, 25 bp, Canis familiaris
tccctcgctcagcctgggagtgagc

SEQ ID NO: 182771 - DNA, 25 bp, Canis familiaris
tctgcactggtactgcgctgaaggg

SEQ ID NO: 182772 - DNA, 25 bp, Canis familiaris
tccctggtcagctctgaggagggct

SEQ ID NO: 182773 - DNA, 25 bp, Canis familiaris
tcccttctgagaccagactgggcct

SEQ ID NO: 182774 - DNA, 25 bp, Canis familiaris
tcccatctccaagctattgtggcct

SEQ ID NO: 182775 - DNA, 25 bp, Canis familiaris
tcccattcctgatctgcaggggtgt

SEQ ID NO: 182776 - DNA, 25 bp, Canis familiaris
tcccttcctgtgcctgcagagaggg

SEQ ID NO: 182777 - DNA, 25 bp, Canis familiaris
tcgcctacgtggccgagagggagga

SEQ ID NO: 182778 - DNA, 25 bp, Canis familiaris
tcgccgtcgtgacgctgtgacggga

SEQ ID NO: 182779 - DNA, 25 bp, Canis familiaris
tcgcctcttgtatagccacagggag

SEQ ID NO: 182780 - DNA, 25 bp, Canis familiaris
tccctgcctggtgcagccaagtaga

SEQ ID NO: 182781 - DNA, 25 bp, Canis familiaris
tccctcctcgatgccaaagcaaagc

SEQ ID NO: 182782 - DNA, 25 bp, Canis familiaris
tcgacccgcgatgccaagaagaagc

SEQ ID NO: 182783 - DNA, 25 bp, Canis familiaris
tcgtcaccgacatcctagtagaatg

SEQ ID NO: 182784 - DNA, 25 bp, Canis familiaris
tctgtcaccgactccaaacggtcaa

SEQ ID NO: 182785 - DNA, 25 bp, Canis familiaris
tcgtgaccctgagcccaaaggtaga

SEQ ID NO: 182786 - DNA, 25 bp, Canis familiaris
tcgaatccgtcatattgaaaggtga

SEQ ID NO: 182787 - DNA, 25 bp, Canis familiaris
tcagttcctctaccttaaagcgatg

SEQ ID NO: 182788 - DNA, 25 bp, Canis familiaris
tcgttccctgagccttgagaagtgg

SEQ ID NO: 182789 - DNA, 25 bp, Canis familiaris
tctcttctggcacggaggggaatgg

SEQ ID NO: 182790 - DNA, 25 bp, Canis familiaris
tcccactggcatctacggtgaaggc

SEQ ID NO: 182791 - DNA, 25 bp, Canis familiaris
tcccagcttggctcaggggctgagg

SEQ ID NO: 182792 - DNA, 25 bp, Canis familiaris
tcccaggtggctggcggatggcagt

SEQ ID NO: 182793 - DNA, 25 bp, Canis familiaris
tcccagggtcatgggatagagcccc

SEQ ID NO: 182794 - DNA, 25 bp, Canis familiaris
tcccagggtcctaggatgagttcca

SEQ ID NO: 182795 - DNA, 25 bp, Canis familiaris
tcccaggtccccagatagagtctgc

SEQ ID NO: 182796 - DNA, 25 bp, Canis familiaris
tcccttgtaaccagtaagcaatcca

SEQ ID NO: 182797 - DNA, 25 bp, Canis familiaris
tccctcgtttttggctaagctacca

SEQ ID NO: 182798 - DNA, 25 bp, Canis familiaris
tcccatgggttgttggattcagcca

SEQ ID NO: 182799 - DNA, 25 bp, Canis familiaris
tcccatggttatccgttatcacaaa

SEQ ID NO: 182800 - DNA, 25 bp, Canis familiaris
tcccacgtctctctaggatcaacaa

SEQ ID NO: 182801 - DNA, 25 bp, Canis familiaris
tcccacttcttcctcattgagaaca

SEQ ID NO: 182802 - DNA, 25 bp, Canis familiaris
tcccttagctgtgcatctaggagat

SEQ ID NO: 182803 - DNA, 25 bp, Canis familiaris
tcccttggcttgtctatgctggact

SEQ ID NO: 182804 - DNA, 25 bp, Canis familiaris
tcgcctctggctacatcttgaaggc

SEQ ID NO: 182805 - DNA, 25 bp, Canis familiaris
tcgaccccgtagggagaggccatga

SEQ ID NO: 182806 - DNA, 25 bp, Canis familiaris
tcgcatcgctccgggggagaccgga

SEQ ID NO: 182807 - DNA, 25 bp, Canis familiaris
tcgtgcctaccgaggatggccggag

SEQ ID NO: 182808 - DNA, 25 bp, Canis familiaris
tcccagctaccgaggggacctgtgt

SEQ ID NO: 182809 - DNA, 25 bp, Canis familiaris
tcgccacatctccaaaggggaccat

SEQ ID NO: 182810 - DNA, 25 bp, Canis familiaris
tcgctcctctcctacttggataact

SEQ ID NO: 182811 - DNA, 25 bp, Canis familiaris
tcgcgaacgccgggctggattacta

SEQ ID NO: 182812 - DNA, 25 bp, Canis familiaris
tcgccaggcgctatggggatttctt

SEQ ID NO: 182813 - DNA, 25 bp, Canis familiaris
tcccatgggttgggcgtcattgtgt

SEQ ID NO: 182814 - DNA, 25 bp, Canis familiaris
tccctagggctggggtgctgtggtg

SEQ ID NO: 182815 - DNA, 25 bp, Canis familiaris
tccctcaggggcctgtgatgcgtga

SEQ ID NO: 182816 - DNA, 25 bp, Canis familiaris
tccctcgcagatcggtgtgatcctg

SEQ ID NO: 182817 - DNA, 25 bp, Canis familiaris
tccctcatgaagcctgggtccaggc

SEQ ID NO: 182818 - DNA, 25 bp, Canis familiaris
tccctcatcaacctggcttcaagag

SEQ ID NO: 182819 - DNA, 25 bp, Canis familiaris
tccctgctcaattgtgcgttactgg

SEQ ID NO: 182820 - DNA, 25 bp, Canis familiaris
tccctgcatctttgctgtgtgttca

SEQ ID NO: 182821 - DNA, 25 bp, Canis familiaris
tccctcatttggtctgtgttcattt

SEQ ID NO: 182822 - DNA, 25 bp, Canis familiaris
tcggttggtcgtgtttctttagtag

SEQ ID NO: 182823 - DNA, 25 bp, Canis familiaris
ttgcgtcggtttctttaagaagaat

SEQ ID NO: 182824 - DNA, 25 bp, Canis familiaris
tcgcctcaggatatctcttttaaaa

SEQ ID NO: 182825 - DNA, 25 bp, Canis familiaris
tcggccggtgattttgggtcaaatg

SEQ ID NO: 182826 - DNA, 25 bp, Canis familiaris
tcccacggtgaatagggctccctgt

SEQ ID NO: 182827 - DNA, 25 bp, Canis familiaris
tcccatgggtaatccgtgatcacac

SEQ ID NO: 182828 - DNA, 25 bp, Canis familiaris
tctcctgaggtagatccctaccctg

SEQ ID NO: 182829 - DNA, 25 bp, Canis familiaris
tcccagaggtagctgccctagaggg

SEQ ID NO: 182830 - DNA, 25 bp, Canis familiaris
tcccagaggtagctgccctagaggg

SEQ ID NO: 182831 - DNA, 25 bp, Canis familiaris
tcccagaggtagctgccctagaggg

SEQ ID NO: 182832 - DNA, 25 bp, Canis familiaris
tcccagaggtagctgccctagaggg

SEQ ID NO: 182833 - DNA, 25 bp, Canis familiaris
tcccagaggtagctgccctagaggg

SEQ ID NO: 182834 - DNA, 25 bp, Canis familiaris
tcccagaggtagctgccctagaggg

SEQ ID NO: 182835 - DNA, 25 bp, Canis familiaris
tcccagcgcttacgagacgctacgg

SEQ ID NO: 182836 - DNA, 25 bp, Canis familiaris
tcccagcactttgggaggccgaggt

SEQ ID NO: 182837 - DNA, 25 bp, Canis familiaris
tcgccagctctaatacgactcacta

SEQ ID NO: 182838 - DNA, 25 bp, Canis familiaris
tcccacccaacactggctgagtaga

SEQ ID NO: 182839 - DNA, 25 bp, Canis familiaris
tcccaccacagaagctgagaaaaga

SEQ ID NO: 182840 - DNA, 25 bp, Canis familiaris
tcccacagacaccccagagagagga

SEQ ID NO: 182841 - DNA, 25 bp, Canis familiaris
tcccagaacactcccaggcttggag

SEQ ID NO: 182842 - DNA, 25 bp, Canis familiaris
tcccaccagccactggggttgtaga

SEQ ID NO: 182843 - DNA, 25 bp, Canis familiaris
tcccattcggagtgcggtcatttga

SEQ ID NO: 182844 - DNA, 25 bp, Canis familiaris
tcccatagccgacagggtgacttac

SEQ ID NO: 182845 - DNA, 25 bp, Canis familiaris
tcgcaattgccgtgtttttttcagc

SEQ ID NO: 182846 - DNA, 25 bp, Canis familiaris
tcccttccattaattcttattccag

SEQ ID NO: 182847 - DNA, 25 bp, Canis familiaris
tccctcccaatccattttgatttct

SEQ ID NO: 182848 - DNA, 25 bp, Canis familiaris
tcgacttccaaccttttgtttatat

SEQ ID NO: 182849 - DNA, 25 bp, Canis familiaris
tctactccaaatgtttccttttcga

SEQ ID NO: 182850 - DNA, 25 bp, Canis familiaris
tctaaccagaatgttgtcctgtgct

SEQ ID NO: 182851 - DNA, 25 bp, Canis familiaris
tcgcaaccgaatgtcatctccgagc

SEQ ID NO: 182852 - DNA, 25 bp, Canis familiaris
tccctcacaatttccatcccagacc

SEQ ID NO: 182853 - DNA, 25 bp, Canis familiaris
tccctagagattttcataaagccac

SEQ ID NO: 182854 - DNA, 25 bp, Canis familiaris
tccctagcgctagtatcataaagct

SEQ ID NO: 182855 - DNA, 25 bp, Canis familiaris
tcgcgctggcgtttccaaaggatgc

SEQ ID NO: 182856 - DNA, 25 bp, Canis familiaris
tcccaggcttcttccagaaagcatc

SEQ ID NO: 182857 - DNA, 25 bp, Canis familiaris
tcgccaggcgttttctgagcatacc

SEQ ID NO: 182858 - DNA, 25 bp, Canis familiaris
tcgctacggttcttaaatcccacgg

SEQ ID NO: 182859 - DNA, 25 bp, Canis familiaris
tcgctcacagacttggactaatccc

SEQ ID NO: 182860 - DNA, 25 bp, Canis familiaris
tcccaagaccatgagatcacaacct

SEQ ID NO: 182861 - DNA, 25 bp, Canis familiaris
tcccaccacagcgcaaagaacttcg

SEQ ID NO: 182862 - DNA, 25 bp, Canis familiaris
tcccacatcaaggccaaagccctac

SEQ ID NO: 182863 - DNA, 25 bp, Canis familiaris
tcccactcagattccaaagcactta

SEQ ID NO: 182864 - DNA, 25 bp, Canis familiaris
tcccacagcacaatagcagaagact

SEQ ID NO: 182865 - DNA, 25 bp, Canis familiaris
tcccacgaattacattacatttctg

SEQ ID NO: 182866 - DNA, 25 bp, Canis familiaris
tcccaggttggagattacttcatag

SEQ ID NO: 182867 - DNA, 25 bp, Canis familiaris
tcccagtgtggggccttacaaataa

SEQ ID NO: 182868 - DNA, 25 bp, Canis familiaris
tcccagcagtggcttcttcgaaatg

SEQ ID NO: 182869 - DNA, 25 bp, Canis familiaris
tcgccagttgtgcacttttacaagc

SEQ ID NO: 182870 - DNA, 25 bp, Canis familiaris
tcccacttggctcctggtaaagcag

SEQ ID NO: 182871 - DNA, 25 bp, Canis familiaris
tcccacttgatgccacatgttacag

SEQ ID NO: 182872 - DNA, 25 bp, Canis familiaris
tcccatccgaccaatgtctgtaaag

SEQ ID NO: 182873 - DNA, 25 bp, Canis familiaris
tcccacaagacccctcattaaagga

SEQ ID NO: 182874 - DNA, 25 bp, Canis familiaris
tcccacaagacttcctcctggaaaa

SEQ ID NO: 182875 - DNA, 25 bp, Canis familiaris
tcccacagagtcacggtcgacacga

SEQ ID NO: 182876 - DNA, 25 bp, Canis familiaris
tcggcaccaatcagggtagaccgag

SEQ ID NO: 182877 - DNA, 25 bp, Canis familiaris
tcgccacaaatatgggtactgcgga

SEQ ID NO: 182878 - DNA, 25 bp, Canis familiaris
tcccaccatcatccaggacatacgg

SEQ ID NO: 182879 - DNA, 25 bp, Canis familiaris
tcgccaccatgcccaagagaaaggc

SEQ ID NO: 182880 - DNA, 25 bp, Canis familiaris
tcgcctctatgactgccaggaagaa

SEQ ID NO: 182881 - DNA, 25 bp, Canis familiaris
tcgccccatgcttgtaggatatcac

SEQ ID NO: 182882 - DNA, 25 bp, Canis familiaris
tccctctcatgttgtggttttctac

SEQ ID NO: 182883 - DNA, 25 bp, Canis familiaris
tccctctctgatttcgatttgtttt

SEQ ID NO: 182884 - DNA, 25 bp, Canis familiaris
tccctctctgatttcatcttatttc

SEQ ID NO: 182885 - DNA, 25 bp, Canis familiaris
tccctctctgcatccatttatgaaa

SEQ ID NO: 182886 - DNA, 25 bp, Canis familiaris
tcccttctcacacctggtatacagt

SEQ ID NO: 182887 - DNA, 25 bp, Canis familiaris
tccctatcttcaccttcatcagggt

SEQ ID NO: 182888 - DNA, 25 bp, Canis familiaris
tccctttcatctccatgtgcataag

SEQ ID NO: 182889 - DNA, 25 bp, Canis familiaris
tcccatttcatttcttcattcaagt

SEQ ID NO: 182890 - DNA, 25 bp, Canis familiaris
tcccaatttcatctcatcatatcta

SEQ ID NO: 182891 - DNA, 25 bp, Canis familiaris
tcgcgagattaactattcaagctat

SEQ ID NO: 182892 - DNA, 25 bp, Canis familiaris
tcgctggttagcctgaagccgtggc

SEQ ID NO: 182893 - DNA, 25 bp, Canis familiaris
tcgcgagtcatggagatgaaggccg

SEQ ID NO: 182894 - DNA, 25 bp, Canis familiaris
tcgagagtctgcccagatacacaca

SEQ ID NO: 182895 - DNA, 25 bp, Canis familiaris
tcggatgatgccttcaataccacct

SEQ ID NO: 182896 - DNA, 25 bp, Canis familiaris
tcggtcttagctcacacgagcctta

SEQ ID NO: 182897 - DNA, 25 bp, Canis familiaris
tcgagcctccattaaacgactttat

SEQ ID NO: 182898 - DNA, 25 bp, Canis familiaris
tcgaccccacgagatccaagtcgtg

SEQ ID NO: 182899 - DNA, 25 bp, Canis familiaris
tcaacggccaggaacccgaatctcg

SEQ ID NO: 182900 - DNA, 25 bp, Canis familiaris
tcgaagtacaggaccaccggatcgg

SEQ ID NO: 182901 - DNA, 25 bp, Canis familiaris
tcgaagtgaggggcagtctccccgg

SEQ ID NO: 182902 - DNA, 25 bp, Canis familiaris
tcccaggcattaaaggcccccctgg

SEQ ID NO: 182903 - DNA, 25 bp, Canis familiaris
tcccaggtgaaaatggagcccccgg

SEQ ID NO: 182904 - DNA, 25 bp, Canis familiaris
tctccagggaaaaccaccttccgag

SEQ ID NO: 182905 - DNA, 25 bp, Canis familiaris
tcccatgggacagcacacacactac

SEQ ID NO: 182906 - DNA, 25 bp, Canis familiaris
tcccagggcagctgctgccacagga

SEQ ID NO: 182907 - DNA, 25 bp, Canis familiaris
tcccaggtgctgggaccaggtggcc

SEQ ID NO: 182908 - DNA, 25 bp, Canis familiaris
tcccaggtggctttccagggggaat

SEQ ID NO: 182909 - DNA, 25 bp, Canis familiaris
tactcagtaggctttccggggtatg

SEQ ID NO: 182910 - DNA, 25 bp, Canis familiaris
taacgtgggcctaacgtgcggcctg

SEQ ID NO: 182911 - DNA, 25 bp, Canis familiaris
taaagtgggcccaacgtgatcctgg

SEQ ID NO: 182912 - DNA, 25 bp, Canis familiaris
tcgagaacggctgctacttgcgccg

SEQ ID NO: 182913 - DNA, 25 bp, Canis familiaris
tcgatgatacgggtttcctggtgcc

SEQ ID NO: 182914 - DNA, 25 bp, Canis familiaris
tcacaggaagttccttaagggccgt

SEQ ID NO: 182915 - DNA, 25 bp, Canis familiaris
tcccagaagcttcttaaggccactc

SEQ ID NO: 182916 - DNA, 25 bp, Canis familiaris
tccctaacatccattaacgcacaac

SEQ ID NO: 182917 - DNA, 25 bp, Canis familiaris
tcccataaatccatgctgtttcaca

SEQ ID NO: 182918 - DNA, 25 bp, Canis familiaris
tcccaacaagctttgctgctgtctc

SEQ ID NO: 182919 - DNA, 25 bp, Canis familiaris
tcccagaagcacatcgacttctccc

SEQ ID NO: 182920 - DNA, 25 bp, Canis familiaris
tcccaaatatcatgttcttctccac

SEQ ID NO: 182921 - DNA, 25 bp, Canis familiaris
tcccaggttcacctgccatatttct

SEQ ID NO: 182922 - DNA, 25 bp, Canis familiaris
tcccagctttatgctgccaataaat

SEQ ID NO: 182923 - DNA, 25 bp, Canis familiaris
tcccttctatctgtgctctataaat

SEQ ID NO: 182924 - DNA, 25 bp, Canis familiaris
tcccttctgtcccatatttaaatct

SEQ ID NO: 182925 - DNA, 25 bp, Canis familiaris
tccctttgctgctgatctttatcag

SEQ ID NO: 182926 - DNA, 25 bp, Canis familiaris
tcccttagatatcacttgctcataa

SEQ ID NO: 182927 - DNA, 25 bp, Canis familiaris
tcccattaatatcatggctctaaaa

SEQ ID NO: 182928 - DNA, 25 bp, Canis familiaris
tcccagtcacttctcgctttgagaa

SEQ ID NO: 182929 - DNA, 25 bp, Canis familiaris
tcccagctccttaattctgcgtgaa

SEQ ID NO: 182930 - DNA, 25 bp, Canis familiaris
tcccacgtctgcgtgagttgcttgc

SEQ ID NO: 182931 - DNA, 25 bp, Canis familiaris
tcgccacggatgtccagactgttgc

SEQ ID NO: 182932 - DNA, 25 bp, Canis familiaris
tcgccacaggtactcatgtgccttc

SEQ ID NO: 182933 - DNA, 25 bp, Canis familiaris
tcggactggaactttctcgtctttc

SEQ ID NO: 182934 - DNA, 25 bp, Canis familiaris
tcgtaatggataggattccccttcc

SEQ ID NO: 182935 - DNA, 25 bp, Canis familiaris
tcgaaggtcttggagtcctccttgc

SEQ ID NO: 182936 - DNA, 25 bp, Canis familiaris
tcgtagaatcattgttgtaccacct

SEQ ID NO: 182937 - DNA, 25 bp, Canis familiaris
tcgacaagacttttacctagcactt

SEQ ID NO: 182938 - DNA, 25 bp, Canis familiaris
tcgacaagactgctaaccaggcctc

SEQ ID NO: 182939 - DNA, 25 bp, Canis familiaris
tcgaaaggcttgaccaggcggccca

SEQ ID NO: 182940 - DNA, 25 bp, Canis familiaris
tcgaagagcaaggcgccagggggcc

SEQ ID NO: 182941 - DNA, 25 bp, Canis familiaris
tcccaagagatgtgccaggggctgc

SEQ ID NO: 182942 - DNA, 25 bp, Canis familiaris
tcccacaggctgtggcaaggtcatc

SEQ ID NO: 182943 - DNA, 25 bp, Canis familiaris
tcccaagtgctcctggcacaaggca

SEQ ID NO: 182944 - DNA, 25 bp, Canis familiaris
tcccaagctgcaactcctggatgga

SEQ ID NO: 182945 - DNA, 25 bp, Canis familiaris
tcccagagcccaggactggatccaa

SEQ ID NO: 182946 - DNA, 25 bp, Canis familiaris
tcccaggcctcagagcagagctgaa

SEQ ID NO: 182947 - DNA, 25 bp, Canis familiaris
tcgccttcctgcagaatgtgctcaa

SEQ ID NO: 182948 - DNA, 25 bp, Canis familiaris
tcgcttatattgggcagacctcaaa

SEQ ID NO: 182949 - DNA, 25 bp, Canis familiaris
tcgcttatattgggatgacctgaag

SEQ ID NO: 182950 - DNA, 25 bp, Canis familiaris
tcgcgtggtctggtatacatgctgc

SEQ ID NO: 182951 - DNA, 25 bp, Canis familiaris
tcccaggctctgggcagacaggcag

SEQ ID NO: 182952 - DNA, 25 bp, Canis familiaris
tcccaggctctcctggagctggaga

SEQ ID NO: 182953 - DNA, 25 bp, Canis familiaris
tcgactggcacccggagctaggtgc

SEQ ID NO: 182954 - DNA, 25 bp, Canis familiaris
tcgccggccctagggatatggggga

SEQ ID NO: 182955 - DNA, 25 bp, Canis familiaris
tcccttcctctccttaatgtgggga

SEQ ID NO: 182956 - DNA, 25 bp, Canis familiaris
tccctttcctgactctttgatttgg

SEQ ID NO: 182957 - DNA, 25 bp, Canis familiaris
tcccttctcttctctatttatggtt

SEQ ID NO: 182958 - DNA, 25 bp, Canis familiaris
tcccttctcttgctttttagagttg

SEQ ID NO: 182959 - DNA, 25 bp, Canis familiaris
tcccttgtcttttactttatttctg

SEQ ID NO: 182960 - DNA, 25 bp, Canis familiaris
tcccttctgtttttggtttttgatg

SEQ ID NO: 182961 - DNA, 25 bp, Canis familiaris
tccctttgtcaattctgttttacga

SEQ ID NO: 182962 - DNA, 25 bp, Canis familiaris
tcccatggatgtcaatctgtttatc

SEQ ID NO: 182963 - DNA, 25 bp, Canis familiaris
tcgccacgtgtcacactgttcaatt

SEQ ID NO: 182964 - DNA, 25 bp, Canis familiaris
tcccacgtctcattacaactcgact

SEQ ID NO: 182965 - DNA, 25 bp, Canis familiaris
tcccactgtgccaaaaacagataat

SEQ ID NO: 182966 - DNA, 25 bp, Canis familiaris
tcccagctctccagaaccataggat

SEQ ID NO: 182967 - DNA, 25 bp, Canis familiaris
tcccagtgctcggtggacctggagt

SEQ ID NO: 182968 - DNA, 25 bp, Canis familiaris
tcccttctcacgagacgctcgtggg

SEQ ID NO: 182969 - DNA, 25 bp, Canis familiaris
tcgccgtggacggcgagcctttggg

SEQ ID NO: 182970 - DNA, 25 bp, Canis familiaris
tctgacttggacgggcaccccgtcc

SEQ ID NO: 182971 - DNA, 25 bp, Canis familiaris
tcgacgttgacccgaaatgcctgac

SEQ ID NO: 182972 - DNA, 25 bp, Canis familiaris
tcgatcttcataacggacaaactga

SEQ ID NO: 182973 - DNA, 25 bp, Canis familiaris
tcgatcttcataacggacaaactga

SEQ ID NO: 182974 - DNA, 25 bp, Canis familiaris
tcgccttcttcccaggaatgagtga

SEQ ID NO: 182975 - DNA, 25 bp, Canis familiaris
tcgcccacttcctggaggagatcaa

SEQ ID NO: 182976 - DNA, 25 bp, Canis familiaris
tcgggcacgtccaggttgaacagac

SEQ ID NO: 182977 - DNA, 25 bp, Canis familiaris
tcgggcacgtccaggttgaacagac

SEQ ID NO: 182978 - DNA, 25 bp, Canis familiaris
tcgggcacgtccaggttgaacagac

SEQ ID NO: 182979 - DNA, 25 bp, Canis familiaris
tcgcagtccttgaccggttggactt

SEQ ID NO: 182980 - DNA, 25 bp, Canis familiaris
tcgtctcgtcgttcggggtaatgta

SEQ ID NO: 182981 - DNA, 25 bp, Canis familiaris
tcgccctgtctttggtgggtacagt

SEQ ID NO: 182982 - DNA, 25 bp, Canis familiaris
tcgcctcttgcgcaggatggggagc

SEQ ID NO: 182983 - DNA, 25 bp, Canis familiaris
tcccacattggacggatgtgagggt

SEQ ID NO: 182984 - DNA, 25 bp, Canis familiaris
tccctttgaagtcgagaaccatgta

SEQ ID NO: 182985 - DNA, 25 bp, Canis familiaris
tcgtctcctgattttaaacctctat

SEQ ID NO: 182986 - DNA, 25 bp, Canis familiaris
tcgtccggttacaattatcctctaa

SEQ ID NO: 182987 - DNA, 25 bp, Canis familiaris
tcgtcccgaatccgggttcatccga

SEQ ID NO: 182988 - DNA, 25 bp, Canis familiaris
tcgtcccgaatccgggttcatccga

SEQ ID NO: 182989 - DNA, 25 bp, Canis familiaris
tcggaccgacactgggtcgcttaga

SEQ ID NO: 182990 - DNA, 25 bp, Canis familiaris
tcgtaccgacccattgtcgttcaca

SEQ ID NO: 182991 - DNA, 25 bp, Canis familiaris
tcttttcaacccttgtggaggtcac

SEQ ID NO: 182992 - DNA, 25 bp, Canis familiaris
tcggggataccctgggtggtgcagc

SEQ ID NO: 182993 - DNA, 25 bp, Canis familiaris
tcagtggagaacacccggggccaca

SEQ ID NO: 182994 - DNA, 25 bp, Canis familiaris
tcattgccaatgaggtcggcggccc

SEQ ID NO: 182995 - DNA, 25 bp, Canis familiaris
ttgaccttgcaaaggggcaggccct

SEQ ID NO: 182996 - DNA, 25 bp, Canis familiaris
tcgaccccatagcagcaggaggcac

SEQ ID NO: 182997 - DNA, 25 bp, Canis familiaris
tcgaccatccacattgacgagatca

SEQ ID NO: 182998 - DNA, 25 bp, Canis familiaris
tcgatcctcgtcaggtgcaggtcag

SEQ ID NO: 182999 - DNA, 25 bp, Canis familiaris
tcgatcctcgtcaggtgcaggtcag

SEQ ID NO: 183000 - DNA, 25 bp, Canis familiaris
tcgcagcctctaacaagtcacttag

SEQ ID NO: 183001 - DNA, 25 bp, Canis familiaris
tcgacgcttcccaaagcatcgaagc

SEQ ID NO: 183002 - DNA, 25 bp, Canis familiaris
tcgacgctctgctctgcagaagggg

SEQ ID NO: 183003 - DNA, 25 bp, Canis familiaris
tctagagctaatacatgccgacggg

SEQ ID NO: 183004 - DNA, 25 bp, Canis familiaris
tctcaggccaacgacggtcgggaaa

SEQ ID NO: 183005 - DNA, 25 bp, Canis familiaris
tcgccgccgacgaggtcgtcgaaac

SEQ ID NO: 183006 - DNA, 25 bp, Canis familiaris
tcgtgcccgacggggactacgagga

SEQ ID NO: 183007 - DNA, 25 bp, Canis familiaris
tcgtcctcgtcggaagggggagaag

SEQ ID NO: 183008 - DNA, 25 bp, Canis familiaris
tcgtacgacctggacggcgaggaga

SEQ ID NO: 183009 - DNA, 25 bp, Canis familiaris
tcgataagacctcacatgttcttgt

SEQ ID NO: 183010 - DNA, 25 bp, Canis familiaris
tcgtgacatgagaccgaccgtttct

SEQ ID NO: 183011 - DNA, 25 bp, Canis familiaris
tcgtgagattgagccccatgttact

SEQ ID NO: 183012 - DNA, 25 bp, Canis familiaris
tcgctggaaggtggccgcaattgac

SEQ ID NO: 183013 - DNA, 25 bp, Canis familiaris
tcgctggaagagtgcctcgagttca

SEQ ID NO: 183014 - DNA, 25 bp, Canis familiaris
tcgtggagacactctccatgcgtcc

SEQ ID NO: 183015 - DNA, 25 bp, Canis familiaris
tcgtggagactacttccgtgctact

SEQ ID NO: 183016 - DNA, 25 bp, Canis familiaris
tcgtgttctgtactatgctttccgt

SEQ ID NO: 183017 - DNA, 25 bp, Canis familiaris
tcgagttctgtggttcgttgaccca

SEQ ID NO: 183018 - DNA, 25 bp, Canis familiaris
tcacatttttatttcgtttccgtag

SEQ ID NO: 183019 - DNA, 25 bp, Canis familiaris
tcactttagtagttagctaggccgg

SEQ ID NO: 183020 - DNA, 25 bp, Canis familiaris
tcgatttgggggaagtagggcaggg

SEQ ID NO: 183021 - DNA, 25 bp, Canis familiaris
tcgggtaggccgagatgggtgcgta

SEQ ID NO: 183022 - DNA, 25 bp, Canis familiaris
tcggtatcggccaggatcgtgggga

SEQ ID NO: 183023 - DNA, 25 bp, Canis familiaris
tcgagttcgcggaggagcagctgca

SEQ ID NO: 183024 - DNA, 25 bp, Canis familiaris
tcgcgacatctctgggagagcgccg

SEQ ID NO: 183025 - DNA, 25 bp, Canis familiaris
tcgccaggtgcacggaagtgcgcca

SEQ ID NO: 183026 - DNA, 25 bp, Canis familiaris
tcccactcatcacagacgcagggca

SEQ ID NO: 183027 - DNA, 25 bp, Canis familiaris
tcgctcctctgcaacagactgaagg

SEQ ID NO: 183028 - DNA, 25 bp, Canis familiaris
tcgcatcacttcaacaacgcaacca

SEQ ID NO: 183029 - DNA, 25 bp, Canis familiaris
tcgcaactgttgaccatggccaaga

SEQ ID NO: 183030 - DNA, 25 bp, Canis familiaris
tctgcaactgtgaccgcagtgctgc

SEQ ID NO: 183031 - DNA, 25 bp, Canis familiaris
tcgcaccatggcaactgagcagctg

SEQ ID NO: 183032 - DNA, 25 bp, Canis familiaris
tctgcactcatttatgacagcactg

SEQ ID NO: 183033 - DNA, 25 bp, Canis familiaris
tcgcctgctgtgtcaaactgcgagc

SEQ ID NO: 183034 - DNA, 25 bp, Canis familiaris
tcgcgcgtgtgcggcaaccgcaaga

SEQ ID NO: 183035 - DNA, 25 bp, Canis familiaris
tcgcgagagctcgcgacggcagcga

SEQ ID NO: 183036 - DNA, 25 bp, Canis familiaris
tcgtagagctaacatcagagatggt

SEQ ID NO: 183037 - DNA, 25 bp, Canis familiaris
tctggaaaacgcccagagatttaat

SEQ ID NO: 183038 - DNA, 25 bp, Canis familiaris
tcgtggtttcccgaggattccaatc

SEQ ID NO: 183039 - DNA, 25 bp, Canis familiaris
tcgtccttacctgtgggatccaagg

SEQ ID NO: 183040 - DNA, 25 bp, Canis familiaris
tcgttttatcaataggactcctagg

SEQ ID NO: 183041 - DNA, 25 bp, Canis familiaris
tcgtgatttagacaaagaccctgga

SEQ ID NO: 183042 - DNA, 25 bp, Canis familiaris
tcgggtgctcaacaaaccaggagga

SEQ ID NO: 183043 - DNA, 25 bp, Canis familiaris
tcgggtccggacaaaccagtggtat

SEQ ID NO: 183044 - DNA, 25 bp, Canis familiaris
tcgagggggttcaacaccaggggca

SEQ ID NO: 183045 - DNA, 25 bp, Canis familiaris
tcgaggggttcaacaccaggggcac

SEQ ID NO: 183046 - DNA, 25 bp, Canis familiaris
tctgaagggttaacacggatagggt

SEQ ID NO: 183047 - DNA, 25 bp, Canis familiaris
tctgaccgttaaccaaggtttgtgt

SEQ ID NO: 183048 - DNA, 25 bp, Canis familiaris
tctgcccgtcaatcttactttttga

SEQ ID NO: 183049 - DNA, 25 bp, Canis familiaris
tctgcccgaaaaggtacttcttgga

SEQ ID NO: 183050 - DNA, 25 bp, Canis familiaris
tcgccctgtatatgtgtggcctcgt

SEQ ID NO: 183051 - DNA, 25 bp, Canis familiaris
tcccacattggatgatggagctcac

SEQ ID NO: 183052 - DNA, 25 bp, Canis familiaris
tcgcactcttgatggtgagagtctc

SEQ ID NO: 183053 - DNA, 25 bp, Canis familiaris
tcgttcttgaagcccaagtgccagt

SEQ ID NO: 183054 - DNA, 25 bp, Canis familiaris
tcgattctgctacgaccaactaata

SEQ ID NO: 183055 - DNA, 25 bp, Canis familiaris
tctgatatcgggggagtactcaata

SEQ ID NO: 183056 - DNA, 25 bp, Canis familiaris
tctgactgaggacgggttaaataaa

SEQ ID NO: 183057 - DNA, 25 bp, Canis familiaris
taggagggtgggctttactgaacca

SEQ ID NO: 183058 - DNA, 25 bp, Canis familiaris
tcgggggctaggggttacattgcac

SEQ ID NO: 183059 - DNA, 25 bp, Canis familiaris
tcgcggaggcaaggcggaggacaag

SEQ ID NO: 183060 - DNA, 25 bp, Canis familiaris
tctgcaggaccaccctgaaggactc

SEQ ID NO: 183061 - DNA, 25 bp, Canis familiaris
tcgactgacactccgtagacgactt

SEQ ID NO: 183062 - DNA, 25 bp, Canis familiaris
tcgacgtccccgatgtcaacgtcgg

SEQ ID NO: 183063 - DNA, 25 bp, Canis familiaris
tcgatcgctcgcgcgattgtctaat

SEQ ID NO: 183064 - DNA, 25 bp, Canis familiaris
tcgaccccaccagtctgaagactgg

SEQ ID NO: 183065 - DNA, 25 bp, Canis familiaris
tcgaccctcacgttcaaaatctaga

SEQ ID NO: 183066 - DNA, 25 bp, Canis familiaris
tcgaccagtagctcaaacagtctca

SEQ ID NO: 183067 - DNA, 25 bp, Canis familiaris
tcgcaccaggacatgcaactcagct

SEQ ID NO: 183068 - DNA, 25 bp, Canis familiaris
tcgacgacgccaaggatgccatgat

SEQ ID NO: 183069 - DNA, 25 bp, Canis familiaris
tcgccacacccaactgtgtttaaac

SEQ ID NO: 183070 - DNA, 25 bp, Canis familiaris
tcgacctatccacctggtgttacaa

SEQ ID NO: 183071 - DNA, 25 bp, Canis familiaris
tcgcatcgcttcacttaggtcgagc

SEQ ID NO: 183072 - DNA, 25 bp, Canis familiaris
tcgatcgttcagtctctagagtctg

SEQ ID NO: 183073 - DNA, 25 bp, Canis familiaris
tcccagttgctgtcatcaaaggagt

SEQ ID NO: 183074 - DNA, 25 bp, Canis familiaris
tcccagttgctgtcaccaatggatg

SEQ ID NO: 183075 - DNA, 25 bp, Canis familiaris
tcccagctcattgccatcaagttga

SEQ ID NO: 183076 - DNA, 25 bp, Canis familiaris
tcccatctatagttcacaagttgag

SEQ ID NO: 183077 - DNA, 25 bp, Canis familiaris
tcccacttaataatcagtgctctca

SEQ ID NO: 183078 - DNA, 25 bp, Canis familiaris
tcccaattaaaccagtatccactct

SEQ ID NO: 183079 - DNA, 25 bp, Canis familiaris
tcccaaaagaagtcgttccccatca

SEQ ID NO: 183080 - DNA, 25 bp, Canis familiaris
tcccaataaaagtgattccgcctgc

SEQ ID NO: 183081 - DNA, 25 bp, Canis familiaris
tcccaatgaattggaagtccccgcc

SEQ ID NO: 183082 - DNA, 25 bp, Canis familiaris
tcccaaatgtcgtaacaactccgcc

SEQ ID NO: 183083 - DNA, 25 bp, Canis familiaris
tcttttagtctttaaaatcctgcct

SEQ ID NO: 183084 - DNA, 25 bp, Canis familiaris
tttcattagttccggcaactcctac

SEQ ID NO: 183085 - DNA, 25 bp, Canis familiaris
tttcagaaggtgtgccaacgccaac

SEQ ID NO: 183086 - DNA, 25 bp, Canis familiaris
tcgccgagggcttcagcgatactgc

SEQ ID NO: 183087 - DNA, 25 bp, Canis familiaris
tcgcccagcgagggccgagaacaca

SEQ ID NO: 183088 - DNA, 25 bp, Canis familiaris
tcgctctacagggccctggtgaaga

SEQ ID NO: 183089 - DNA, 25 bp, Canis familiaris
tcgctcgacggtccggtgtgtcgag

SEQ ID NO: 183090 - DNA, 25 bp, Canis familiaris
tcgccaggggctggtcctggtcaga

SEQ ID NO: 183091 - DNA, 25 bp, Canis familiaris
tcgccaggagggtggcattggcagc

SEQ ID NO: 183092 - DNA, 25 bp, Canis familiaris
tcccaggtcaagagcctctgcgaga

SEQ ID NO: 183093 - DNA, 25 bp, Canis familiaris
tcccagtggaccaccatctggcaga

SEQ ID NO: 183094 - DNA, 25 bp, Canis familiaris
tcgcggatgaatgtggctttgaaga

SEQ ID NO: 183095 - DNA, 25 bp, Canis familiaris
tcggttaatcgtccatcctgaagta

SEQ ID NO: 183096 - DNA, 25 bp, Canis familiaris
tcgtcaaaattgcgaccttcgtgca

SEQ ID NO: 183097 - DNA, 25 bp, Canis familiaris
tcgtaaacatactgagcctctgtct

SEQ ID NO: 183098 - DNA, 25 bp, Canis familiaris
tcgtcaataccttaataccttcttt

SEQ ID NO: 183099 - DNA, 25 bp, Canis familiaris
tctgtagaaccctaatacaccttcc

SEQ ID NO: 183100 - DNA, 25 bp, Canis familiaris
tcgatgcagaactacccatccacaa

SEQ ID NO: 183101 - DNA, 25 bp, Canis familiaris
tcgtcatcaacattatccaacacat

SEQ ID NO: 183102 - DNA, 25 bp, Canis familiaris
tcgtctatacaatcgacagccacgt

SEQ ID NO: 183103 - DNA, 25 bp, Canis familiaris
tcgattatagcaacaatgcccccct

SEQ ID NO: 183104 - DNA, 25 bp, Canis familiaris
tcgagtacatcttcaagccatcctg

SEQ ID NO: 183105 - DNA, 25 bp, Canis familiaris
tcgagggccagagagccagagcagt

SEQ ID NO: 183106 - DNA, 25 bp, Canis familiaris
tcgggctccacactgagcgaggagt

SEQ ID NO: 183107 - DNA, 25 bp, Canis familiaris
tcgcttgctcctcgagggcaggagg

SEQ ID NO: 183108 - DNA, 25 bp, Canis familiaris
tcgctccgccagaggcacatggagg

SEQ ID NO: 183109 - DNA, 25 bp, Canis familiaris
tcccaggtcaggcgctctggatgga

SEQ ID NO: 183110 - DNA, 25 bp, Canis familiaris
tcccagggcaggcagcattgcaatt

SEQ ID NO: 183111 - DNA, 25 bp, Canis familiaris
tcccatgggggctccagacattgta

SEQ ID NO: 183112 - DNA, 25 bp, Canis familiaris
tcccacgggagtgagtgcctgtgta

SEQ ID NO: 183113 - DNA, 25 bp, Canis familiaris
tcccaaggggtttgtgtctttgtca

SEQ ID NO: 183114 - DNA, 25 bp, Canis familiaris
tcccaatgccggatagtaattttgt

SEQ ID NO: 183115 - DNA, 25 bp, Canis familiaris
tcccagtgtctgaaaggtaattgtt

SEQ ID NO: 183116 - DNA, 25 bp, Canis familiaris
tcccagatgctcccgggttatctga

SEQ ID NO: 183117 - DNA, 25 bp, Canis familiaris
tcccagagcccactggtgctgaagc

SEQ ID NO: 183118 - DNA, 25 bp, Canis familiaris
tcccaggcaccacgggtgtgagtct

SEQ ID NO: 183119 - DNA, 25 bp, Canis familiaris
tcccagctactcgggaggctgaggc

SEQ ID NO: 183120 - DNA, 25 bp, Canis familiaris
tcagcaactaccaggtccagggctt

SEQ ID NO: 183121 - DNA, 25 bp, Canis familiaris
ttcaagatatccagttccgttccta

SEQ ID NO: 183122 - DNA, 25 bp, Canis familiaris
tcccaattccatgttcttgtttcgc

SEQ ID NO: 183123 - DNA, 25 bp, Canis familiaris
tcccactcccagaatttctgtctca

SEQ ID NO: 183124 - DNA, 25 bp, Canis familiaris
tcccacaccacacatttgtatgctt

SEQ ID NO: 183125 - DNA, 25 bp, Canis familiaris
tcccaagcatcctcacagtttgcat

SEQ ID NO: 183126 - DNA, 25 bp, Canis familiaris
tcccaatgataaccactgtcactgt

SEQ ID NO: 183127 - DNA, 25 bp, Canis familiaris
tcccactggaagccttgtccaaatt

SEQ ID NO: 183128 - DNA, 25 bp, Canis familiaris
tcccacctgacatcaaggccaagtt

SEQ ID NO: 183129 - DNA, 25 bp, Canis familiaris
tcccacctgagaaatatgcccaatg

SEQ ID NO: 183130 - DNA, 25 bp, Canis familiaris
tcccacctgcgtgatcatggtcaag

SEQ ID NO: 183131 - DNA, 25 bp, Canis familiaris
tcccaaccatgggtatgcgttatac

SEQ ID NO: 183132 - DNA, 25 bp, Canis familiaris
tcgccacccggagatcggtgtggga

SEQ ID NO: 183133 - DNA, 25 bp, Canis familiaris
tcgtcaaccaggacttcgtggtgtg

SEQ ID NO: 183134 - DNA, 25 bp, Canis familiaris
tcgtgaacctagatggcatttggga

SEQ ID NO: 183135 - DNA, 25 bp, Canis familiaris
tcgtacctcttttgactttgggact

SEQ ID NO: 183136 - DNA, 25 bp, Canis familiaris
tcgtatcccttaaactatgagtgta

SEQ ID NO: 183137 - DNA, 25 bp, Canis familiaris
tcgcttgcgctacaaacgtggtgtg

SEQ ID NO: 183138 - DNA, 25 bp, Canis familiaris
tcgcttggctcaaaacacggcaggt

SEQ ID NO: 183139 - DNA, 25 bp, Canis familiaris
tcgccatgtgatgacaaacctggga

SEQ ID NO: 183140 - DNA, 25 bp, Canis familiaris
tcgcgatgtgtgatttcaccgagga

SEQ ID NO: 183141 - DNA, 25 bp, Canis familiaris
tcggatgttgtcttataattgatgg

SEQ ID NO: 183142 - DNA, 25 bp, Canis familiaris
tctgcttgttaactaatatctgggg

SEQ ID NO: 183143 - DNA, 25 bp, Canis familiaris
tcgctctgttcgtcctgaattgaga

SEQ ID NO: 183144 - DNA, 25 bp, Canis familiaris
tcgtgcgtgtttcgtgagttacaac

SEQ ID NO: 183145 - DNA, 25 bp, Canis familiaris
tcgtctctactttataattatcaca

SEQ ID NO: 183146 - DNA, 25 bp, Canis familiaris
tcggcctacctaatacaagacccaa

SEQ ID NO: 183147 - DNA, 25 bp, Canis familiaris
tcggcctgcacagaaccgggcccag

SEQ ID NO: 183148 - DNA, 25 bp, Canis familiaris
taggtttcataatcctggaccgatc

SEQ ID NO: 183149 - DNA, 25 bp, Canis familiaris
tcaggttacaaatccgagtcattct

SEQ ID NO: 183150 - DNA, 25 bp, Canis familiaris
tctccttcaacaaagccataccttc

SEQ ID NO: 183151 - DNA, 25 bp, Canis familiaris
tcgcctctgcaagcagcatccatat

SEQ ID NO: 183152 - DNA, 25 bp, Canis familiaris
tcgctcaatgagttcaatcctatgg

SEQ ID NO: 183153 - DNA, 25 bp, Canis familiaris
tcgtcacatgggccctggatatggg

SEQ ID NO: 183154 - DNA, 25 bp, Canis familiaris
tcggaatggcgctcagcagatattt

SEQ ID NO: 183155 - DNA, 25 bp, Canis familiaris
tcggaatggcgctcagcagatattt

SEQ ID NO: 183156 - DNA, 25 bp, Canis familiaris
tcggttggtaacaaggttgttcaat

SEQ ID NO: 183157 - DNA, 25 bp, Canis familiaris
tttggggggacatagttcattcagt

SEQ ID NO: 183158 - DNA, 25 bp, Canis familiaris
tttccgggccaatatttttagctct

SEQ ID NO: 183159 - DNA, 25 bp, Canis familiaris
ttcccgggataagctatttccgctc

SEQ ID NO: 183160 - DNA, 25 bp, Canis familiaris
tataccgggttcactttaccactat

SEQ ID NO: 183161 - DNA, 25 bp, Canis familiaris
tacgggggtgacacattgtccccaa

SEQ ID NO: 183162 - DNA, 25 bp, Canis familiaris
tcaaaggggtcacttttgtccatcc

SEQ ID NO: 183163 - DNA, 25 bp, Canis familiaris
tctaaaggtgtctgtttggaccaaa

SEQ ID NO: 183164 - DNA, 25 bp, Canis familiaris
tcaaaaggattctactgggcgacga

SEQ ID NO: 183165 - DNA, 25 bp, Canis familiaris
tcgagaaggacttcagggacggcgc

SEQ ID NO: 183166 - DNA, 25 bp, Canis familiaris
tcgaagcggacgaagcggacgccgg

SEQ ID NO: 183167 - DNA, 25 bp, Canis familiaris
tcgaagcgaaagctgggccgccatg

SEQ ID NO: 183168 - DNA, 25 bp, Canis familiaris
tctacacgaaaccggatccaacaac

SEQ ID NO: 183169 - DNA, 25 bp, Canis familiaris
tctgagcctgaaaccttgaaaacag

SEQ ID NO: 183170 - DNA, 25 bp, Canis familiaris
tcgtcctaactacgtgaaagaacct

SEQ ID NO: 183171 - DNA, 25 bp, Canis familiaris
tcgtcgtacgcccgtagcagagaac

SEQ ID NO: 183172 - DNA, 25 bp, Canis familiaris
tcgctccatgaggccaagggctgag

SEQ ID NO: 183173 - DNA, 25 bp, Canis familiaris
tcgctgcccgacgacagcggcagca

SEQ ID NO: 183174 - DNA, 25 bp, Canis familiaris
tcgcagtacgactacactgaccacc

SEQ ID NO: 183175 - DNA, 25 bp, Canis familiaris
tcgcgttcatactgcactggtaact

SEQ ID NO: 183176 - DNA, 25 bp, Canis familiaris
tcggattagaagtttggtgagagaa

SEQ ID NO: 183177 - DNA, 25 bp, Canis familiaris
tcgagttaaagcttctggggtggtt

SEQ ID NO: 183178 - DNA, 25 bp, Canis familiaris
tcgcatgctccaagggtcagggtgg

SEQ ID NO: 183179 - DNA, 25 bp, Canis familiaris
tcgagatcacactggctgcagggga

SEQ ID NO: 183180 - DNA, 25 bp, Canis familiaris
tcgcagatacactcttgggggatcc

SEQ ID NO: 183181 - DNA, 25 bp, Canis familiaris
tcggaacttccttctggggatactg

SEQ ID NO: 183182 - DNA, 25 bp, Canis familiaris
tcggtacttttagtggggaggctca

SEQ ID NO: 183183 - DNA, 25 bp, Canis familiaris
tcggtcggtttaccactggacagta

SEQ ID NO: 183184 - DNA, 25 bp, Canis familiaris
tcgtgttggttttggcctgccaacc

SEQ ID NO: 183185 - DNA, 25 bp, Canis familiaris
tcggttgagtttgggtgtcgcatac

SEQ ID NO: 183186 - DNA, 25 bp, Canis familiaris
tcgggatggttgggacgtagtcgtc

SEQ ID NO: 183187 - DNA, 25 bp, Canis familiaris
tctggggtggctgaccagtgaccgt

SEQ ID NO: 183188 - DNA, 25 bp, Canis familiaris
tcatggggggttcctaatggggtcg

SEQ ID NO: 183189 - DNA, 25 bp, Canis familiaris
tcggcggttttcctcaaggtcgccg

SEQ ID NO: 183190 - DNA, 25 bp, Canis familiaris
tcgcatcggcctcttgtaaggcccc

SEQ ID NO: 183191 - DNA, 25 bp, Canis familiaris
tctgtaccccttagtaagtgcctct

SEQ ID NO: 183192 - DNA, 25 bp, Canis familiaris
tcgcccctcctggagtgaaggcttc

SEQ ID NO: 183193 - DNA, 25 bp, Canis familiaris
tcgctgccctccagagaacagagat

SEQ ID NO: 183194 - DNA, 25 bp, Canis familiaris
tcgcagtcctccaaggattccatga

SEQ ID NO: 183195 - DNA, 25 bp, Canis familiaris
tcagggctgcccaggaagccaaaaa

SEQ ID NO: 183196 - DNA, 25 bp, Canis familiaris
tcccagctgcccaggaaggcagcac

SEQ ID NO: 183197 - DNA, 25 bp, Canis familiaris
tcccagtgacgatacatcagggcac

SEQ ID NO: 183198 - DNA, 25 bp, Canis familiaris
tcccagtgcaaatccacaggccatc

SEQ ID NO: 183199 - DNA, 25 bp, Canis familiaris
tcgagaggcagttccacaaggccct

SEQ ID NO: 183200 - DNA, 25 bp, Canis familiaris
tcgacaagcctatcaagcaggcctt

SEQ ID NO: 183201 - DNA, 25 bp, Canis familiaris
tcgactccctgttcgagggcatcga

SEQ ID NO: 183202 - DNA, 25 bp, Canis familiaris
tcgcccaagggctggcggcaggagg

SEQ ID NO: 183203 - DNA, 25 bp, Canis familiaris
tcgccgggagcgtgagtgaggaagg

SEQ ID NO: 183204 - DNA, 25 bp, Canis familiaris
tcgccctggacttcgagcaagagat

SEQ ID NO: 183205 - DNA, 25 bp, Canis familiaris
tcgggggattaccagaagattctgc

SEQ ID NO: 183206 - DNA, 25 bp, Canis familiaris
tctggggaactacaggagcctcagc

SEQ ID NO: 183207 - DNA, 25 bp, Canis familiaris
tcggcggacttgtgatcggcctgca

SEQ ID NO: 183208 - DNA, 25 bp, Canis familiaris
tcgccatcgactaccagttgtcgga

SEQ ID NO: 183209 - DNA, 25 bp, Canis familiaris
tcgacgagcactacgagtaccggca

SEQ ID NO: 183210 - DNA, 25 bp, Canis familiaris
tcgcggacatctatgagtccggaga

SEQ ID NO: 183211 - DNA, 25 bp, Canis familiaris
tcgtggggcactagcaacctggaat

SEQ ID NO: 183212 - DNA, 25 bp, Canis familiaris
tcgtggatctgacgtgccgcctgga

SEQ ID NO: 183213 - DNA, 25 bp, Canis familiaris
tcgtctgtagagctgggcaccaatc

SEQ ID NO: 183214 - DNA, 25 bp, Canis familiaris
tcgtctgtaagcctgcaggtcaatc

SEQ ID NO: 183215 - DNA, 25 bp, Canis familiaris
tcgtcatatgaacccaggtcctcac

SEQ ID NO: 183216 - DNA, 25 bp, Canis familiaris
tcgtcgctaagcaaaatgtcctatc

SEQ ID NO: 183217 - DNA, 25 bp, Canis familiaris
tcgtcgcttcttgaagacctatgta

SEQ ID NO: 183218 - DNA, 25 bp, Canis familiaris
tcgatcactttcctgaaaccttgct

SEQ ID NO: 183219 - DNA, 25 bp, Canis familiaris
tcgacatctttcttgtacatcctca

SEQ ID NO: 183220 - DNA, 25 bp, Canis familiaris
tcgcacacctaattgttatggccat

SEQ ID NO: 183221 - DNA, 25 bp, Canis familiaris
tcgcccatatcttgtcttcaaacat

SEQ ID NO: 183222 - DNA, 25 bp, Canis familiaris
tcgcaccattgcggtcgcgcggatc

SEQ ID NO: 183223 - DNA, 25 bp, Canis familiaris
tcgcaatgattcagctcgctgagga

SEQ ID NO: 183224 - DNA, 25 bp, Canis familiaris
tcgcaatgattcagctcgctgagga

SEQ ID NO: 183225 - DNA, 25 bp, Canis familiaris
tcgaatgcttgatgaagcttgtgag

SEQ ID NO: 183226 - DNA, 25 bp, Canis familiaris
tcgactctttgatagcatgggatgt

SEQ ID NO: 183227 - DNA, 25 bp, Canis familiaris
tcgcctgtcttcgaggctgggattt

SEQ ID NO: 183228 - DNA, 25 bp, Canis familiaris
tcgtctccctctttgcggagatgtg

SEQ ID NO: 183229 - DNA, 25 bp, Canis familiaris
tcgttggccatcagtcaggaacacc

SEQ ID NO: 183230 - DNA, 25 bp, Canis familiaris
tcgcggacatctatgtgcaggagaa

SEQ ID NO: 183231 - DNA, 25 bp, Canis familiaris
tcccagacatcacgtatcactgcaa

SEQ ID NO: 183232 - DNA, 25 bp, Canis familiaris
tcccagaactgctgcagactccagc

SEQ ID NO: 183233 - DNA, 25 bp, Canis familiaris
tcgccagcaaccggagcctggcaga

SEQ ID NO: 183234 - DNA, 25 bp, Canis familiaris
tcgcctgacacttcaagactgggtg

SEQ ID NO: 183235 - DNA, 25 bp, Canis familiaris
tcgcacttcttcaagcaactcggta

SEQ ID NO: 183236 - DNA, 25 bp, Canis familiaris
tcgcagcttatgatgcgcacccgga

SEQ ID NO: 183237 - DNA, 25 bp, Canis familiaris
tcgagctgctagtgaccgtcaggac

SEQ ID NO: 183238 - DNA, 25 bp, Canis familiaris
tcgagcgcatggtgcaggaggccga

SEQ ID NO: 183239 - DNA, 25 bp, Canis familiaris
tcgagcgggaagaggggggtgggtg

SEQ ID NO: 183240 - DNA, 25 bp, Canis familiaris
tcggaggtgaagaggggggccggca

SEQ ID NO: 183241 - DNA, 25 bp, Canis familiaris
tcggggatgacgaggacgactccgg

SEQ ID NO: 183242 - DNA, 25 bp, Canis familiaris
tcaggggacccaagtaacagggcgg

SEQ ID NO: 183243 - DNA, 25 bp, Canis familiaris
tcggggcgccccacaagatgtgggg

SEQ ID NO: 183244 - DNA, 25 bp, Canis familiaris
tcggaggccccggtaattgggaatg

SEQ ID NO: 183245 - DNA, 25 bp, Canis familiaris
tcaggaagtccccggtctattggaa

SEQ ID NO: 183246 - DNA, 25 bp, Canis familiaris
tcggaatgtggcccaagcccaagta

SEQ ID NO: 183247 - DNA, 25 bp, Canis familiaris
tcgcattttggtgtactcctagata

SEQ ID NO: 183248 - DNA, 25 bp, Canis familiaris
tcgttttgcatcattcactcgttta

SEQ ID NO: 183249 - DNA, 25 bp, Canis familiaris
tcgtcgtgtcaggcttttcgttata

SEQ ID NO: 183250 - DNA, 25 bp, Canis familiaris
tcgtcctccgttgacacttgtataa

SEQ ID NO: 183251 - DNA, 25 bp, Canis familiaris
tcgacgttcctttcaaatttctagt

SEQ ID NO: 183252 - DNA, 25 bp, Canis familiaris
tcgagcgttcgtttaatattgggtg

SEQ ID NO: 183253 - DNA, 25 bp, Canis familiaris
tcgtggttcctgtgaatctgggttg

SEQ ID NO: 183254 - DNA, 25 bp, Canis familiaris
tcgggggaatgagaaccgggtggct

SEQ ID NO: 183255 - DNA, 25 bp, Canis familiaris
tagttggggggatacctgggtggct

SEQ ID NO: 183256 - DNA, 25 bp, Canis familiaris
tcgtttgtgtggtagggcctggagg

SEQ ID NO: 183257 - DNA, 25 bp, Canis familiaris
tcgttcgttgtgaagggcccaagac

SEQ ID NO: 183258 - DNA, 25 bp, Canis familiaris
tcgtaagctgtctaactacccaaga

SEQ ID NO: 183259 - DNA, 25 bp, Canis familiaris
tcgtaagagctaaacatccagaaga

SEQ ID NO: 183260 - DNA, 25 bp, Canis familiaris
tcgagacttcgacacatcactgaaa

SEQ ID NO: 183261 - DNA, 25 bp, Canis familiaris
tcgaccctggaattccaggaatctt

SEQ ID NO: 183262 - DNA, 25 bp, Canis familiaris
tcgacgcctgtaaaggggactctgg

SEQ ID NO: 183263 - DNA, 25 bp, Canis familiaris
tcgattccggatgtagggagcctgg

SEQ ID NO: 183264 - DNA, 25 bp, Canis familiaris
tcgattccgagatggagcctgagta

SEQ ID NO: 183265 - DNA, 25 bp, Canis familiaris
tcgcgatcccgttggagcttattgc

SEQ ID NO: 183266 - DNA, 25 bp, Canis familiaris
tcgagtcctgtattgggctttctgc

SEQ ID NO: 183267 - DNA, 25 bp, Canis familiaris
tcagagctacctcggaggtttcccc

SEQ ID NO: 183268 - DNA, 25 bp, Canis familiaris
tcgttgacagcttgtaggcgttccc

SEQ ID NO: 183269 - DNA, 25 bp, Canis familiaris
tcgacgtccattgatgtgtgtgtgt

SEQ ID NO: 183270 - DNA, 25 bp, Canis familiaris
tcgcagctgtcctggagtggtttgc

SEQ ID NO: 183271 - DNA, 25 bp, Canis familiaris
tcgagctctctctcgagtttgtctc

SEQ ID NO: 183272 - DNA, 25 bp, Canis familiaris
tcgcttctgtatttgacgtttccct

SEQ ID NO: 183273 - DNA, 25 bp, Canis familiaris
tcgcttctttgaggagtgtgacccc

SEQ ID NO: 183274 - DNA, 25 bp, Canis familiaris
tcccacactgtggcgcagtgtcacc

SEQ ID NO: 183275 - DNA, 25 bp, Canis familiaris
tcccacacagtggatggtgctcctc

SEQ ID NO: 183276 - DNA, 25 bp, Canis familiaris
tcgccactcaggaagtgctgtccgg

SEQ ID NO: 183277 - DNA, 25 bp, Canis familiaris
tcgacgcacaggaaccggtttgggc

SEQ ID NO: 183278 - DNA, 25 bp, Canis familiaris
tcgcgctacaaaaccgggctggaag

SEQ ID NO: 183279 - DNA, 25 bp, Canis familiaris
tctcggcaacgtaccaggtctggta

SEQ ID NO: 183280 - DNA, 25 bp, Canis familiaris
tcggtccgaggaccgtgtgcggttc

SEQ ID NO: 183281 - DNA, 25 bp, Canis familiaris
tcgagttccgcgtacgagtcaggta

SEQ ID NO: 183282 - DNA, 25 bp, Canis familiaris
tcgacttccggatgagggagcctga

SEQ ID NO: 183283 - DNA, 25 bp, Canis familiaris
tcgccctctcctttaatggacttaa

SEQ ID NO: 183284 - DNA, 25 bp, Canis familiaris
tcggtccttttctattggtttagag

SEQ ID NO: 183285 - DNA, 25 bp, Canis familiaris
taagtctcccttttgggttctattg

SEQ ID NO: 183286 - DNA, 25 bp, Canis familiaris
tctcttcctcctgaagggttctttt

SEQ ID NO: 183287 - DNA, 25 bp, Canis familiaris
tctcttaccccgtggaacagggtat

SEQ ID NO: 183288 - DNA, 25 bp, Canis familiaris
tctttttcccaagaaacgggctatg

SEQ ID NO: 183289 - DNA, 25 bp, Canis familiaris
tcttttccccaaataaagccgctgc

SEQ ID NO: 183290 - DNA, 25 bp, Canis familiaris
tcaaattcccaagcgtaagcccttt

SEQ ID NO: 183291 - DNA, 25 bp, Canis familiaris
taaatacccaggtgctaacccttgc

SEQ ID NO: 183292 - DNA, 25 bp, Canis familiaris
taattacaccagcatcgcgaaggcc

SEQ ID NO: 183293 - DNA, 25 bp, Canis familiaris
tcttctagacctcatgagcgacgcc

SEQ ID NO: 183294 - DNA, 25 bp, Canis familiaris
tctctggagtcattgccatggccac

SEQ ID NO: 183295 - DNA, 25 bp, Canis familiaris
tcgtgggtctccgatggtctcggag

SEQ ID NO: 183296 - DNA, 25 bp, Canis familiaris
tcggttatctccggttcctagagga

SEQ ID NO: 183297 - DNA, 25 bp, Canis familiaris
tcgtttctctccggattgagggggc

SEQ ID NO: 183298 - DNA, 25 bp, Canis familiaris
tcgctgtgttctctcgttgaggcga

SEQ ID NO: 183299 - DNA, 25 bp, Canis familiaris
tcgagagaactactccttgaggccc

SEQ ID NO: 183300 - DNA, 25 bp, Canis familiaris
tcgaggaacgaggactatccccgca

SEQ ID NO: 183301 - DNA, 25 bp, Canis familiaris
tcgcgtagacgaggagctcgctccg

SEQ ID NO: 183302 - DNA, 25 bp, Canis familiaris
tcgatcttgcatggagcaatctcgc

SEQ ID NO: 183303 - DNA, 25 bp, Canis familiaris
tcgcacttgcggtgagcacagcata

SEQ ID NO: 183304 - DNA, 25 bp, Canis familiaris
tcgccatcaggggggatcatgcaag

SEQ ID NO: 183305 - DNA, 25 bp, Canis familiaris
tcgccacttgtcggagaatgagagc

SEQ ID NO: 183306 - DNA, 25 bp, Canis familiaris
tcgcgacggtccggagatggcacaa

SEQ ID NO: 183307 - DNA, 25 bp, Canis familiaris
tcgcctgcggacggggtggacgcag

SEQ ID NO: 183308 - DNA, 25 bp, Canis familiaris
tcgctctctggcagtgaggtggggc

SEQ ID NO: 183309 - DNA, 25 bp, Canis familiaris
tcgcccgccgctggagcgggcgggc

SEQ ID NO: 183310 - DNA, 25 bp, Canis familiaris
tcgagcccttgcttcaggtggaggg

SEQ ID NO: 183311 - DNA, 25 bp, Canis familiaris
tcgcccgttccggagagcagggctt

SEQ ID NO: 183312 - DNA, 25 bp, Canis familiaris
tcgaccggtcgcggaaagtcgcact

SEQ ID NO: 183313 - DNA, 25 bp, Canis familiaris
tcgggtttcgagggaagctccgttg

SEQ ID NO: 183314 - DNA, 25 bp, Canis familiaris
tcgtggtcattgcacagctgaaccc

SEQ ID NO: 183315 - DNA, 25 bp, Canis familiaris
tcgagcgccaagatcgtgaagccca

SEQ ID NO: 183316 - DNA, 25 bp, Canis familiaris
tctgcggaaagcacggtaccacacc

SEQ ID NO: 183317 - DNA, 25 bp, Canis familiaris
tcatgggaaaggtggtgaaccccac

SEQ ID NO: 183318 - DNA, 25 bp, Canis familiaris
tcatgggaaaggtggtgaaccccac

SEQ ID NO: 183319 - DNA, 25 bp, Canis familiaris
tcaggccaaacctccaaataccatc

SEQ ID NO: 183320 - DNA, 25 bp, Canis familiaris
tcggccaaaccataattaccttcca

SEQ ID NO: 183321 - DNA, 25 bp, Canis familiaris
tcggcggcaagatcgacttacatct

SEQ ID NO: 183322 - DNA, 25 bp, Canis familiaris
tcggaagccaggaggcattcccttt

SEQ ID NO: 183323 - DNA, 25 bp, Canis familiaris
tcgaaagtgttcggagcatctcccc

SEQ ID NO: 183324 - DNA, 25 bp, Canis familiaris
tcgtaagacttatgtgaccctccga

SEQ ID NO: 183325 - DNA, 25 bp, Canis familiaris
tcgataaccttttgcttgccaaaaa

SEQ ID NO: 183326 - DNA, 25 bp, Canis familiaris
tcttaaccttaatatgcccaaccag

SEQ ID NO: 183327 - DNA, 25 bp, Canis familiaris
tctggaaccctttaaccacttccag

SEQ ID NO: 183328 - DNA, 25 bp, Canis familiaris
tctgagaactacctttaacctcccg

SEQ ID NO: 183329 - DNA, 25 bp, Canis familiaris
tctgaaaatatcccttttacccgca

SEQ ID NO: 183330 - DNA, 25 bp, Canis familiaris
tctggaaaacccttgtgtaccctga

SEQ ID NO: 183331 - DNA, 25 bp, Canis familiaris
tcgcgaaaagcctaggtataatcct

SEQ ID NO: 183332 - DNA, 25 bp, Canis familiaris
tcgaggcaaccgcagggcaaatcac

SEQ ID NO: 183333 - DNA, 25 bp, Canis familiaris
tcgaggcaaccgcagggcaaatcac

SEQ ID NO: 183334 - DNA, 25 bp, Canis familiaris
tcgagtccacacgggggagaggccc

SEQ ID NO: 183335 - DNA, 25 bp, Canis familiaris
tcggcctgagccgccaaacaggccc

SEQ ID NO: 183336 - DNA, 25 bp, Canis familiaris
tcgtttggccgcagaaggtgagccc

SEQ ID NO: 183337 - DNA, 25 bp, Canis familiaris
tcgtattgcgccgctagaggtgaaa

SEQ ID NO: 183338 - DNA, 25 bp, Canis familiaris
tcgtattgcgccgctagaggtgaaa

SEQ ID NO: 183339 - DNA, 25 bp, Canis familiaris
tcgttattccacggagtcctggaat

SEQ ID NO: 183340 - DNA, 25 bp, Canis familiaris
tcgaattctccccgagtacgagata

SEQ ID NO: 183341 - DNA, 25 bp, Canis familiaris
tcgtacctactccaagttcaagaac

SEQ ID NO: 183342 - DNA, 25 bp, Canis familiaris
tcgttcttaccatggctgtatggaa

SEQ ID NO: 183343 - DNA, 25 bp, Canis familiaris
tcgtgtagtcccttgtatctaggta

SEQ ID NO: 183344 - DNA, 25 bp, Canis familiaris
taattttgactattgtagataccta

SEQ ID NO: 183345 - DNA, 25 bp, Canis familiaris
tcgatttatgcagtcggctagatac

SEQ ID NO: 183346 - DNA, 25 bp, Canis familiaris
tcgcagcggatgtctcgagctggct

SEQ ID NO: 183347 - DNA, 25 bp, Canis familiaris
tcgcagcgagggagctgctctgcta

SEQ ID NO: 183348 - DNA, 25 bp, Canis familiaris
tcgcatgcagggcttggaggcgcac

SEQ ID NO: 183349 - DNA, 25 bp, Canis familiaris
tcgacagcgacgtgggggagttccg

SEQ ID NO: 183350 - DNA, 25 bp, Canis familiaris
tcgacagcgacgtgggggagttccg

SEQ ID NO: 183351 - DNA, 25 bp, Canis familiaris
tcgacagcgacgtgggggagttccg

SEQ ID NO: 183352 - DNA, 25 bp, Canis familiaris
tcgacagcgacgtgggggagttccg

SEQ ID NO: 183353 - DNA, 25 bp, Canis familiaris
tcgacagcgacgtgggggagttccg

SEQ ID NO: 183354 - DNA, 25 bp, Canis familiaris
tcgacagcgacgtgggggagttccg

SEQ ID NO: 183355 - DNA, 25 bp, Canis familiaris
tcggctgagacgtggggtagtcctc

SEQ ID NO: 183356 - DNA, 25 bp, Canis familiaris
tcgtgtacaccaagggtgtcttccc

SEQ ID NO: 183357 - DNA, 25 bp, Canis familiaris
tcactaattcgtctgagttcttccc

SEQ ID NO: 183358 - DNA, 25 bp, Canis familiaris
tcacgtgttaagcgatgtttccccc

SEQ ID NO: 183359 - DNA, 25 bp, Canis familiaris
ttagctgtacaacggagttgtccca

SEQ ID NO: 183360 - DNA, 25 bp, Canis familiaris
tctgcagttacaatggtagcatgtg

SEQ ID NO: 183361 - DNA, 25 bp, Canis familiaris
tcgatgatctactgagtcacttccc

SEQ ID NO: 183362 - DNA, 25 bp, Canis familiaris
tcgagtctctgattgctgttttcca

SEQ ID NO: 183363 - DNA, 25 bp, Canis familiaris
tcgagtctctgattgctgttttcca

SEQ ID NO: 183364 - DNA, 25 bp, Canis familiaris
tcgagtctctgattgctgttttcca

SEQ ID NO: 183365 - DNA, 25 bp, Canis familiaris
tcgagtctagtttgcttggatcaca

SEQ ID NO: 183366 - DNA, 25 bp, Canis familiaris
tctgagctccttaatttgaccctga

SEQ ID NO: 183367 - DNA, 25 bp, Canis familiaris
tcgagccctaagattcaccagcttg

SEQ ID NO: 183368 - DNA, 25 bp, Canis familiaris
tctgaaataaaaatccataaggctg

SEQ ID NO: 183369 - DNA, 25 bp, Canis familiaris
tcgcaccaaaaatctctgtcaggac

SEQ ID NO: 183370 - DNA, 25 bp, Canis familiaris
tcgccagcatttcgatcctcgtcag

SEQ ID NO: 183371 - DNA, 25 bp, Canis familiaris
tcccaattgtcctcacgttgttaac

SEQ ID NO: 183372 - DNA, 25 bp, Canis familiaris
tcccaatggtcctcaatttgcttga

SEQ ID NO: 183373 - DNA, 25 bp, Canis familiaris
tcccaatggacccactttgttccaa

SEQ ID NO: 183374 - DNA, 25 bp, Canis familiaris
tcgccagtaacctactgtagtccca

SEQ ID NO: 183375 - DNA, 25 bp, Canis familiaris
tcgacgttgtcctctgtgagtttca

SEQ ID NO: 183376 - DNA, 25 bp, Canis familiaris
tctgaagggaactctggagacttct

SEQ ID NO: 183377 - DNA, 25 bp, Canis familiaris
tcaggggggagctcgtggcaaatca

SEQ ID NO: 183378 - DNA, 25 bp, Canis familiaris
tcgcggggggaattgcgtgcattaa

SEQ ID NO: 183379 - DNA, 25 bp, Canis familiaris
tcggtgagtgggaaaggcttaaatg

SEQ ID NO: 183380 - DNA, 25 bp, Canis familiaris
tctgtgggtcccaaaggttctggcg

SEQ ID NO: 183381 - DNA, 25 bp, Canis familiaris
tctaggggccttctgggtgtggcct

SEQ ID NO: 183382 - DNA, 25 bp, Canis familiaris
tctactgggccttttggaattaccg

SEQ ID NO: 183383 - DNA, 25 bp, Canis familiaris
tcgactgggctcatccgaagtagaa

SEQ ID NO: 183384 - DNA, 25 bp, Canis familiaris
tcgagcctggccatagttagaaaga

SEQ ID NO: 183385 - DNA, 25 bp, Canis familiaris
tctggcccccaaagtgggaagaagt

SEQ ID NO: 183386 - DNA, 25 bp, Canis familiaris
tcggccccgacacaggaggagaagg

SEQ ID NO: 183387 - DNA, 25 bp, Canis familiaris
tcagggccctggagcgggacaagga

SEQ ID NO: 183388 - DNA, 25 bp, Canis familiaris
tcaggcccctcgaggaaccaaaggg

SEQ ID NO: 183389 - DNA, 25 bp, Canis familiaris
tcgggcattctgctgcaaaaccata

SEQ ID NO: 183390 - DNA, 25 bp, Canis familiaris
tcgggctcctgtgcacacaaaaaaa

SEQ ID NO: 183391 - DNA, 25 bp, Canis familiaris
tcgctgagccctacctgaaattaga

SEQ ID NO: 183392 - DNA, 25 bp, Canis familiaris
tcgcatcgccaagctggaaaaagca

SEQ ID NO: 183393 - DNA, 25 bp, Canis familiaris
tcgtcgacaattaggaacaatagaa

SEQ ID NO: 183394 - DNA, 25 bp, Canis familiaris
tcgtcgacaattagggacaatagga

SEQ ID NO: 183395 - DNA, 25 bp, Canis familiaris
tcgtttaaaaagccacagtagaggg

SEQ ID NO: 183396 - DNA, 25 bp, Canis familiaris
tcgcttcttgaagacctatgtaaag

SEQ ID NO: 183397 - DNA, 25 bp, Canis familiaris
tcgtgcgtttgagacctatgttggg

SEQ ID NO: 183398 - DNA, 25 bp, Canis familiaris
tctgtctggttgtgttccgattggg

SEQ ID NO: 183399 - DNA, 25 bp, Canis familiaris
tcgttcgttgatgggcccagacgga

SEQ ID NO: 183400 - DNA, 25 bp, Canis familiaris
tcgtccgttgatgttccgtaggacc

SEQ ID NO: 183401 - DNA, 25 bp, Canis familiaris
tctgtccgtaatccttccaggaaga

SEQ ID NO: 183402 - DNA, 25 bp, Canis familiaris
tcgacgggtatatttctgctggtaa

SEQ ID NO: 183403 - DNA, 25 bp, Canis familiaris
tcgctctggtgaatgcatgttctgt

SEQ ID NO: 183404 - DNA, 25 bp, Canis familiaris
tcgtcatatctggctgattgtcaac

SEQ ID NO: 183405 - DNA, 25 bp, Canis familiaris
tcgatgccactggttgtcatcacat

SEQ ID NO: 183406 - DNA, 25 bp, Canis familiaris
tcgatgactgcatgcatggaaccaa

SEQ ID NO: 183407 - DNA, 25 bp, Canis familiaris
tcgcagccgctatgagtgagcctca

SEQ ID NO: 183408 - DNA, 25 bp, Canis familiaris
tcgcccgctatcgggtgtcgagcaa

SEQ ID NO: 183409 - DNA, 25 bp, Canis familiaris
tcgcagcaggctacggggatgggca

SEQ ID NO: 183410 - DNA, 25 bp, Canis familiaris
tcgcacagagctaaaggagggaact

SEQ ID NO: 183411 - DNA, 25 bp, Canis familiaris
tcgacgacgaaagggagctgaagct

SEQ ID NO: 183412 - DNA, 25 bp, Canis familiaris
tcgggaccaacatgttctgaactcc

SEQ ID NO: 183413 - DNA, 25 bp, Canis familiaris
tctgggacccgtgtttgtttgtcca

SEQ ID NO: 183414 - DNA, 25 bp, Canis familiaris
tctgtggaccggcttttgtttataa

SEQ ID NO: 183415 - DNA, 25 bp, Canis familiaris
tcgggaccagtctttcggggataat

SEQ ID NO: 183416 - DNA, 25 bp, Canis familiaris
tcgttggccatcagttcagggagaa

SEQ ID NO: 183417 - DNA, 25 bp, Canis familiaris
tctgtgatgcccttagatgtccggg

SEQ ID NO: 183418 - DNA, 25 bp, Canis familiaris
tcgtggccccttggacaatggaggg

SEQ ID NO: 183419 - DNA, 25 bp, Canis familiaris
tcgctggccaagatctacacggagg

SEQ ID NO: 183420 - DNA, 25 bp, Canis familiaris
tcgctcggagaaacccactgagggt

SEQ ID NO: 183421 - DNA, 25 bp, Canis familiaris
tcgctcgggatcacaatcacatgag

SEQ ID NO: 183422 - DNA, 25 bp, Canis familiaris
tcgccggcagaagcttcagaaaccc

SEQ ID NO: 183423 - DNA, 25 bp, Canis familiaris
tcgtgggggaccgcagaatgtctac

SEQ ID NO: 183424 - DNA, 25 bp, Canis familiaris
tcgattgcacggctaccatgaagtc

SEQ ID NO: 183425 - DNA, 25 bp, Canis familiaris
tcgaatccaggagatccaagtgatc

SEQ ID NO: 183426 - DNA, 25 bp, Canis familiaris
tcggtccaggcagtgttcaaggcta

SEQ ID NO: 183427 - DNA, 25 bp, Canis familiaris
tcgagggcatggagtgccacggctc

SEQ ID NO: 183428 - DNA, 25 bp, Canis familiaris
tcggaagcagagatctcgcggaccc

SEQ ID NO: 183429 - DNA, 25 bp, Canis familiaris
tcggcacgagcaagaacgggcacct

SEQ ID NO: 183430 - DNA, 25 bp, Canis familiaris
tcggcacgaggtcccgaggacattt

SEQ ID NO: 183431 - DNA, 25 bp, Canis familiaris
tcggcacgaggtgaaaaccaccgct

SEQ ID NO: 183432 - DNA, 25 bp, Canis familiaris
tcgcaccggtctcaaggaatcaccg

SEQ ID NO: 183433 - DNA, 25 bp, Canis familiaris
tcgaccagtttatcggagccatcgc

SEQ ID NO: 183434 - DNA, 25 bp, Canis familiaris
tctacacgtttatcggcaaaacctc

SEQ ID NO: 183435 - DNA, 25 bp, Canis familiaris
tcggcctgtttggaccgaaacaccg

SEQ ID NO: 183436 - DNA, 25 bp, Canis familiaris
tcgcttcgtttggatctctgtaaac

SEQ ID NO: 183437 - DNA, 25 bp, Canis familiaris
tcgcttgagcgtctgactcttgatt

SEQ ID NO: 183438 - DNA, 25 bp, Canis familiaris
tcgtcgtgttcgcatcttgcaatta

SEQ ID NO: 183439 - DNA, 25 bp, Canis familiaris
tcgccctattctttctagcagagta

SEQ ID NO: 183440 - DNA, 25 bp, Canis familiaris
tcgccctattctttctagcagagta

SEQ ID NO: 183441 - DNA, 25 bp, Canis familiaris
tcgcgccggattattgctgcaactg

SEQ ID NO: 183442 - DNA, 25 bp, Canis familiaris
tcgcccgatgttcctgtggaggcgt

SEQ ID NO: 183443 - DNA, 25 bp, Canis familiaris
tcgatcctgggtcgccaggatggcg

SEQ ID NO: 183444 - DNA, 25 bp, Canis familiaris
tcgccctgtgctgaccaaggagcag

SEQ ID NO: 183445 - DNA, 25 bp, Canis familiaris
tcgcagttggcagagtacgggcgtg

SEQ ID NO: 183446 - DNA, 25 bp, Canis familiaris
tcgcggtcgcagggtgagtggacgt

SEQ ID NO: 183447 - DNA, 25 bp, Canis familiaris
tcgatggtctcgtttgtggtactgt

SEQ ID NO: 183448 - DNA, 25 bp, Canis familiaris
tcgattctctaccagctgggtggtg

SEQ ID NO: 183449 - DNA, 25 bp, Canis familiaris
tcgactcctactcagctggtggata

SEQ ID NO: 183450 - DNA, 25 bp, Canis familiaris
tctgtatcctttccagctggatttt

SEQ ID NO: 183451 - DNA, 25 bp, Canis familiaris
tctttcacgtaatggagtttttgct

SEQ ID NO: 183452 - DNA, 25 bp, Canis familiaris
tcgtcaggcgtgatgagggttttct

SEQ ID NO: 183453 - DNA, 25 bp, Canis familiaris
tcgctcaggcttgcagatgggtcag

SEQ ID NO: 183454 - DNA, 25 bp, Canis familiaris
tcgccgtgctctacagtgtgatgac

SEQ ID NO: 183455 - DNA, 25 bp, Canis familiaris
tctgctcatggagtacttggcaacg

SEQ ID NO: 183456 - DNA, 25 bp, Canis familiaris
tcgctctcagatgccttacaaagtc

SEQ ID NO: 183457 - DNA, 25 bp, Canis familiaris
tcgttcatgcataacttgaaagagc

SEQ ID NO: 183458 - DNA, 25 bp, Canis familiaris
tcgcttctttagttgacagcagtac

SEQ ID NO: 183459 - DNA, 25 bp, Canis familiaris
tcgttcatgttaggctgtcttgtac

SEQ ID NO: 183460 - DNA, 25 bp, Canis familiaris
tcggtcagtcctgcattctttttga

SEQ ID NO: 183461 - DNA, 25 bp, Canis familiaris
tcggttgttgtctttccaattaaag

SEQ ID NO: 183462 - DNA, 25 bp, Canis familiaris
tcggttgttgtctttccaattaaag

SEQ ID NO: 183463 - DNA, 25 bp, Canis familiaris
tcggtgtttgtaggaacttctcgac

SEQ ID NO: 183464 - DNA, 25 bp, Canis familiaris
tctcgtcttggtctaactttcgtat

SEQ ID NO: 183465 - DNA, 25 bp, Canis familiaris
tctggtcgcgagattaactattcaa

SEQ ID NO: 183466 - DNA, 25 bp, Canis familiaris
tctggtggcggtgaaatcttgccga

SEQ ID NO: 183467 - DNA, 25 bp, Canis familiaris
tcgaggtcgtggagttcctggcaga

SEQ ID NO: 183468 - DNA, 25 bp, Canis familiaris
tcgttctagataccgttcgcgtcaa

SEQ ID NO: 183469 - DNA, 25 bp, Canis familiaris
tcgctttagtgaaccgtccagatcg

SEQ ID NO: 183470 - DNA, 25 bp, Canis familiaris
tctgttctaggtcccgggagtggag

SEQ ID NO: 183471 - DNA, 25 bp, Canis familiaris
tctgtggagggggcccggagggaga

SEQ ID NO: 183472 - DNA, 25 bp, Canis familiaris
tcgggcgtaatggccttggaaggaa

SEQ ID NO: 183473 - DNA, 25 bp, Canis familiaris
tcggggttgtctgtcagcgaagtga

SEQ ID NO: 183474 - DNA, 25 bp, Canis familiaris
tcggaggttctttggagcccaggat

SEQ ID NO: 183475 - DNA, 25 bp, Canis familiaris
tcagagaggttttgaccacccgaca

SEQ ID NO: 183476 - DNA, 25 bp, Canis familiaris
tcgatgaggatctgaaccaccctga

SEQ ID NO: 183477 - DNA, 25 bp, Canis familiaris
tcggaggaagaatgatcgcaccaaa

SEQ ID NO: 183478 - DNA, 25 bp, Canis familiaris
tcggacaacgtctaattcaccaaag

SEQ ID NO: 183479 - DNA, 25 bp, Canis familiaris
tcggaaacttcccattgctacaata

SEQ ID NO: 183480 - DNA, 25 bp, Canis familiaris
tctggagccccacacattgtaataa

SEQ ID NO: 183481 - DNA, 25 bp, Canis familiaris
tcgtagccccctactgtgatttaga

SEQ ID NO: 183482 - DNA, 25 bp, Canis familiaris
tcgtacgcccgtagcagagaactaa

SEQ ID NO: 183483 - DNA, 25 bp, Canis familiaris
tcgacacgcccgatgaaaccattcg

SEQ ID NO: 183484 - DNA, 25 bp, Canis familiaris
tcgactccctgctggagaacgaccg

SEQ ID NO: 183485 - DNA, 25 bp, Canis familiaris
tctggccccagcttggaattctaag

SEQ ID NO: 183486 - DNA, 25 bp, Canis familiaris
tcggcttccggggagatccgtagat

SEQ ID NO: 183487 - DNA, 25 bp, Canis familiaris
tcggctcaccaaagggtacgcttca

SEQ ID NO: 183488 - DNA, 25 bp, Canis familiaris
tcggtgccatcaaggaggtccgctg

SEQ ID NO: 183489 - DNA, 25 bp, Canis familiaris
tcgaggccatcaacgtggccactgc

SEQ ID NO: 183490 - DNA, 25 bp, Canis familiaris
tcgagcactaatgcgtctcacacat

SEQ ID NO: 183491 - DNA, 25 bp, Canis familiaris
tcgacacatatatcttctagccctt

SEQ ID NO: 183492 - DNA, 25 bp, Canis familiaris
tcgtgcattaattctaataaagctt

SEQ ID NO: 183493 - DNA, 25 bp, Canis familiaris
tcgtgcgtgacatcaaagagaagct

SEQ ID NO: 183494 - DNA, 25 bp, Canis familiaris
tcttctggggccctaaacactttat

SEQ ID NO: 183495 - DNA, 25 bp, Canis familiaris
tcgctctgggagggctaagcctctt

SEQ ID NO: 183496 - DNA, 25 bp, Canis familiaris
tcgtcattggcttccataagaccgt

SEQ ID NO: 183497 - DNA, 25 bp, Canis familiaris
tatgaatatggcgcccaatacccgg

SEQ ID NO: 183498 - DNA, 25 bp, Canis familiaris
tcggattacccggtgcatactccgg

SEQ ID NO: 183499 - DNA, 25 bp, Canis familiaris
tcgtatccacccagtgaatccggac

SEQ ID NO: 183500 - DNA, 25 bp, Canis familiaris
tcgtcgccctcgagatgattatcgg

SEQ ID NO: 183501 - DNA, 25 bp, Canis familiaris
tcgtcactcgtaataattttctgga

SEQ ID NO: 183502 - DNA, 25 bp, Canis familiaris
tctgtaccagttaatttttccaact

SEQ ID NO: 183503 - DNA, 25 bp, Canis familiaris
tctgacccgttactcttaaaatctc

SEQ ID NO: 183504 - DNA, 25 bp, Canis familiaris
tcggtccatttactttaactcttat

SEQ ID NO: 183505 - DNA, 25 bp, Canis familiaris
tctggggcttctttcttaaacttag

SEQ ID NO: 183506 - DNA, 25 bp, Canis familiaris
tctggcagggagggtctgtaaactc

SEQ ID NO: 183507 - DNA, 25 bp, Canis familiaris
tcggaactgaggccatgattaagag

SEQ ID NO: 183508 - DNA, 25 bp, Canis familiaris
tcggaactgaggccatgattaagag

SEQ ID NO: 183509 - DNA, 25 bp, Canis familiaris
tcggaactgaggccatgattaagag

SEQ ID NO: 183510 - DNA, 25 bp, Canis familiaris
tctggcggtctgcactgttgaaaac

SEQ ID NO: 183511 - DNA, 25 bp, Canis familiaris
tcgggaaccgacgatctgaaaagcg

SEQ ID NO: 183512 - DNA, 25 bp, Canis familiaris
tcggaacaccgacctggtagagacc

SEQ ID NO: 183513 - DNA, 25 bp, Canis familiaris
tcggagaacctgcaccgtgtggaga

SEQ ID NO: 183514 - DNA, 25 bp, Canis familiaris
tcgggaggcttggacggttggtcag

SEQ ID NO: 183515 - DNA, 25 bp, Canis familiaris
tcggtcaagcgggggtgttgggaca

SEQ ID NO: 183516 - DNA, 25 bp, Canis familiaris
tcgaatcagaggaggtgtgtgtgtg

SEQ ID NO: 183517 - DNA, 25 bp, Canis familiaris
tcgaattcggcacgagctgggtggc

SEQ ID NO: 183518 - DNA, 25 bp, Canis familiaris
tcgagtctctggtggctttgatatg

SEQ ID NO: 183519 - DNA, 25 bp, Canis familiaris
tcgcagactctgcttagtgtcctga

SEQ ID NO: 183520 - DNA, 25 bp, Canis familiaris
tcgaactcatcgtcttgtgaactga

SEQ ID NO: 183521 - DNA, 25 bp, Canis familiaris
tctgaactagcttttttactggggg

SEQ ID NO: 183522 - DNA, 25 bp, Canis familiaris
ttacccagttctcttattgggtgaa

SEQ ID NO: 183523 - DNA, 25 bp, Canis familiaris
taagacctttccttttagggcatgg

SEQ ID NO: 183524 - DNA, 25 bp, Canis familiaris
taactcctctccctggttagggaag

SEQ ID NO: 183525 - DNA, 25 bp, Canis familiaris
tcgactccttccgtttttgtgagaa

SEQ ID NO: 183526 - DNA, 25 bp, Canis familiaris
tcgcttcttcttgtcatgtttgtga

SEQ ID NO: 183527 - DNA, 25 bp, Canis familiaris
tcgctcttgacttgtttctttgttg

SEQ ID NO: 183528 - DNA, 25 bp, Canis familiaris
tcgactattcttcttctactatatg

SEQ ID NO: 183529 - DNA, 25 bp, Canis familiaris
tcgacatagtcatgatttccactga

SEQ ID NO: 183530 - DNA, 25 bp, Canis familiaris
tcgtcggtccgggctgccacgacca

SEQ ID NO: 183531 - DNA, 25 bp, Canis familiaris
tcggtggaacgggggcgccacaaag

SEQ ID NO: 183532 - DNA, 25 bp, Canis familiaris
tcggggccaatgagggtccagacaa

SEQ ID NO: 183533 - DNA, 25 bp, Canis familiaris
tcgtgggccaggaagggccgcgtga

SEQ ID NO: 183534 - DNA, 25 bp, Canis familiaris
tcgtgttggaccaaccagacgggcc

SEQ ID NO: 183535 - DNA, 25 bp, Canis familiaris
tcggagggacaaagaccacggactc

SEQ ID NO: 183536 - DNA, 25 bp, Canis familiaris
tcgaagggccagacttcgcacgaca

SEQ ID NO: 183537 - DNA, 25 bp, Canis familiaris
tcgtcaggtgcaggtcagcacgttg

SEQ ID NO: 183538 - DNA, 25 bp, Canis familiaris
tcgagaggctcagtgtgtccgtagt

SEQ ID NO: 183539 - DNA, 25 bp, Canis familiaris
tcgaagtgagggccttgcctacttc

SEQ ID NO: 183540 - DNA, 25 bp, Canis familiaris
tcgaagtgggagaccccttctatct

SEQ ID NO: 183541 - DNA, 25 bp, Canis familiaris
tctaaggggcaaaagtcttcctttg

SEQ ID NO: 183542 - DNA, 25 bp, Canis familiaris
tctggggggacaacgtccatctttc

SEQ ID NO: 183543 - DNA, 25 bp, Canis familiaris
tctggggggctcaaaacacactccc

SEQ ID NO: 183544 - DNA, 25 bp, Canis familiaris
tcggagagtgagaccgcaaccacac

SEQ ID NO: 183545 - DNA, 25 bp, Canis familiaris
tctggtagttccccataacatgcca

SEQ ID NO: 183546 - DNA, 25 bp, Canis familiaris
tctggggaccctcctgaggtggagg

SEQ ID NO: 183547 - DNA, 25 bp, Canis familiaris
tcgggtaaagcggccaggggcaggg

SEQ ID NO: 183548 - DNA, 25 bp, Canis familiaris
tcagggtaacagttcagggtggcag

SEQ ID NO: 183549 - DNA, 25 bp, Canis familiaris
tctgggtaacactttcgtggcgctg

SEQ ID NO: 183550 - DNA, 25 bp, Canis familiaris
tcgggaacgcatttcatcgtggtcc

SEQ ID NO: 183551 - DNA, 25 bp, Canis familiaris
tcggaacaggcaaaccctttccgca

SEQ ID NO: 183552 - DNA, 25 bp, Canis familiaris
tcgtagagacggtctccttttccca

SEQ ID NO: 183553 - DNA, 25 bp, Canis familiaris
tcgagaggccaagtcctttattccc

SEQ ID NO: 183554 - DNA, 25 bp, Canis familiaris
tcgtgggaaactgatttacaccctt

SEQ ID NO: 183555 - DNA, 25 bp, Canis familiaris
tcgatgcggaaggctcaagtgtccc

SEQ ID NO: 183556 - DNA, 25 bp, Canis familiaris
tcgagcagagcaaggccgacttctc

SEQ ID NO: 183557 - DNA, 25 bp, Canis familiaris
tctctaagaaggtgatttcccctac

SEQ ID NO: 183558 - DNA, 25 bp, Canis familiaris
tctcccaaaagaagtcgttccccat

SEQ ID NO: 183559 - DNA, 25 bp, Canis familiaris
tcacccaaaactggaccgatcaccc

SEQ ID NO: 183560 - DNA, 25 bp, Canis familiaris
tcggccaataaaggcaccgactccc

SEQ ID NO: 183561 - DNA, 25 bp, Canis familiaris
tcgtccaacagatcgacgcggactc

SEQ ID NO: 183562 - DNA, 25 bp, Canis familiaris
tcgtcttagcctcataccgagactc

SEQ ID NO: 183563 - DNA, 25 bp, Canis familiaris
tcgtcattttcatcatcttcgggtc

SEQ ID NO: 183564 - DNA, 25 bp, Canis familiaris
tcgacttcctcatcatctacatcga

SEQ ID NO: 183565 - DNA, 25 bp, Canis familiaris
tcgtcttcctgatcattctgtatga

SEQ ID NO: 183566 - DNA, 25 bp, Canis familiaris
tcgactctccagctcttttaaaata

SEQ ID NO: 183567 - DNA, 25 bp, Canis familiaris
tcgacctccatcctgtttggaaaag

SEQ ID NO: 183568 - DNA, 25 bp, Canis familiaris
tcgaaatgccatgggctctctggcc

SEQ ID NO: 183569 - DNA, 25 bp, Canis familiaris
tcgtccgcgaggacatgctgtgcgc

SEQ ID NO: 183570 - DNA, 25 bp, Canis familiaris
tcgacctggaagttctgtcgccgca

SEQ ID NO: 183571 - DNA, 25 bp, Canis familiaris
tcgttcgtgaagtggtggccgcagc

SEQ ID NO: 183572 - DNA, 25 bp, Canis familiaris
tcgtgtttgaagacgtagcccgacc

SEQ ID NO: 183573 - DNA, 25 bp, Canis familiaris
tcgtttgtgtcgagtcagatcctta

SEQ ID NO: 183574 - DNA, 25 bp, Canis familiaris
tcgttccgacagagtagacagcttc

SEQ ID NO: 183575 - DNA, 25 bp, Canis familiaris
tcgtggacccatcaaagaagttcag

SEQ ID NO: 183576 - DNA, 25 bp, Canis familiaris
tcgaggagtccgccaaagtggattc

SEQ ID NO: 183577 - DNA, 25 bp, Canis familiaris
tcgagatgagtcctgagcattggtg

SEQ ID NO: 183578 - DNA, 25 bp, Canis familiaris
tcggggtctgtggcatactgaggca

SEQ ID NO: 183579 - DNA, 25 bp, Canis familiaris
tcgcaggcggtggggaggggagctg

SEQ ID NO: 183580 - DNA, 25 bp, Canis familiaris
tctcggacgcggtgctagcgaagct

SEQ ID NO: 183581 - DNA, 25 bp, Canis familiaris
tcgggcagccaggatggctcagcgg

SEQ ID NO: 183582 - DNA, 25 bp, Canis familiaris
tcgtggcagacgcttcatgatggga

SEQ ID NO: 183583 - DNA, 25 bp, Canis familiaris
tcgtggcacacttggacatgggaag

SEQ ID NO: 183584 - DNA, 25 bp, Canis familiaris
tcgtgggccactggacagggaaggt

SEQ ID NO: 183585 - DNA, 25 bp, Canis familiaris
tcgtttcatcattcggcgtgcgaat

SEQ ID NO: 183586 - DNA, 25 bp, Canis familiaris
tcgatgttcacatctgcgatgggca

SEQ ID NO: 183587 - DNA, 25 bp, Canis familiaris
tcgtgtctgctctctgtacagatgc

SEQ ID NO: 183588 - DNA, 25 bp, Canis familiaris
tcgtgttctgcggcagtaagccccg

SEQ ID NO: 183589 - DNA, 25 bp, Canis familiaris
tcgggcagcttcgagtcaagctccg

SEQ ID NO: 183590 - DNA, 25 bp, Canis familiaris
tcggagagtccatgtagagcctgct

SEQ ID NO: 183591 - DNA, 25 bp, Canis familiaris
tcgaggagccgctggaggacagccc

SEQ ID NO: 183592 - DNA, 25 bp, Canis familiaris
tcgggagcccagtgtgggcggatcc

SEQ ID NO: 183593 - DNA, 25 bp, Canis familiaris
tcgtgtaccctgtatcagggtggcc

SEQ ID NO: 183594 - DNA, 25 bp, Canis familiaris
tcgtcttgccctaatcaacgtttcg

SEQ ID NO: 183595 - DNA, 25 bp, Canis familiaris
tcgtcttccttgactacttgatctt

SEQ ID NO: 183596 - DNA, 25 bp, Canis familiaris
tcgtttcctttttgttgatcgtcat

SEQ ID NO: 183597 - DNA, 25 bp, Canis familiaris
tcgttttgtttttcttggagttgtg

SEQ ID NO: 183598 - DNA, 25 bp, Canis familiaris
tctttactttctctctttactttag

SEQ ID NO: 183599 - DNA, 25 bp, Canis familiaris
tctcctttcctcatttattactaaa

SEQ ID NO: 183600 - DNA, 25 bp, Canis familiaris
tctactggtcccatgtctattactt

SEQ ID NO: 183601 - DNA, 25 bp, Canis familiaris
tcgaccagtccgagtttgaaggttt

SEQ ID NO: 183602 - DNA, 25 bp, Canis familiaris
tcgacacagtgccacatggctttga

SEQ ID NO: 183603 - DNA, 25 bp, Canis familiaris
tcataaagatgctcagtgtactgga

SEQ ID NO: 183604 - DNA, 25 bp, Canis familiaris
tcatgaaaactatcagggctggcga

SEQ ID NO: 183605 - DNA, 25 bp, Canis familiaris
tcgataatcttgatcagagcctggg

SEQ ID NO: 183606 - DNA, 25 bp, Canis familiaris
tcgcaaatgcttctagatcgactgc

SEQ ID NO: 183607 - DNA, 25 bp, Canis familiaris
tcgcacagtgttccaagaccctgcg

SEQ ID NO: 183608 - DNA, 25 bp, Canis familiaris
tcgagcaggtgaagaaggcgccatc

SEQ ID NO: 183609 - DNA, 25 bp, Canis familiaris
tcgaccgtgacgatgtggctctgga

SEQ ID NO: 183610 - DNA, 25 bp, Canis familiaris
tcggctcttgacacttagccgctgt

SEQ ID NO: 183611 - DNA, 25 bp, Canis familiaris
tcgatttcatatgtctttccacttt

SEQ ID NO: 183612 - DNA, 25 bp, Canis familiaris
tcgatgacagcaatccctttctgac

SEQ ID NO: 183613 - DNA, 25 bp, Canis familiaris
tcggacaagtacttcgacgagcact

SEQ ID NO: 183614 - DNA, 25 bp, Canis familiaris
tcgagtcaagtgttctctcacaggc

SEQ ID NO: 183615 - DNA, 25 bp, Canis familiaris
tcgagttcattgccatcatctacgg

SEQ ID NO: 183616 - DNA, 25 bp, Canis familiaris
tcggtctcgatgcccagtttgggaa

SEQ ID NO: 183617 - DNA, 25 bp, Canis familiaris
tctggtcctacctaattgtgcgaat

SEQ ID NO: 183618 - DNA, 25 bp, Canis familiaris
tcgagggccctgtaaattggaatga

SEQ ID NO: 183619 - DNA, 25 bp, Canis familiaris
tcgaccctccattaacattgctata

SEQ ID NO: 183620 - DNA, 25 bp, Canis familiaris
tctgaccacccatgtccatgatggt

SEQ ID NO: 183621 - DNA, 25 bp, Canis familiaris
tctgacacagtccggttggggttaa

SEQ ID NO: 183622 - DNA, 25 bp, Canis familiaris
tctgaatagtccgagggttggtctt

SEQ ID NO: 183623 - DNA, 25 bp, Canis familiaris
tcgaatacccatttatttgcccatt

SEQ ID NO: 183624 - DNA, 25 bp, Canis familiaris
tcgaaaggcttggtttctcccatta

SEQ ID NO: 183625 - DNA, 25 bp, Canis familiaris
tcggcagttgttattacatccttgt

SEQ ID NO: 183626 - DNA, 25 bp, Canis familiaris
tcgagagttgttcgaatcccttctt

SEQ ID NO: 183627 - DNA, 25 bp, Canis familiaris
tcatggagggtcctaaaacttcttt

SEQ ID NO: 183628 - DNA, 25 bp, Canis familiaris
tcatatacgtctgtcaactacttca

SEQ ID NO: 183629 - DNA, 25 bp, Canis familiaris
tcttatcgtctaacaaccctctacg

SEQ ID NO: 183630 - DNA, 25 bp, Canis familiaris
tcgtttgatttaaacccttagcaca

SEQ ID NO: 183631 - DNA, 25 bp, Canis familiaris
tcgatttattttctccgggtgacaa

SEQ ID NO: 183632 - DNA, 25 bp, Canis familiaris
tcgttattttttaagagtggcaccg

SEQ ID NO: 183633 - DNA, 25 bp, Canis familiaris
tctgtctattctgtttgacggcccc

SEQ ID NO: 183634 - DNA, 25 bp, Canis familiaris
tcgatccattctggttaaagacacc

SEQ ID NO: 183635 - DNA, 25 bp, Canis familiaris
tctacgtatttttatccagcaccct

SEQ ID NO: 183636 - DNA, 25 bp, Canis familiaris
tctgaccaagtactattgccagcct

SEQ ID NO: 183637 - DNA, 25 bp, Canis familiaris
tcgatccaggaccttggtcagcctg

SEQ ID NO: 183638 - DNA, 25 bp, Canis familiaris
tcgatgctcttagctgagtgtcccg

SEQ ID NO: 183639 - DNA, 25 bp, Canis familiaris
tcgatgctcttagctgagtgtcccg

SEQ ID NO: 183640 - DNA, 25 bp, Canis familiaris
tcgatgctcttagctgagtgtcccg

SEQ ID NO: 183641 - DNA, 25 bp, Canis familiaris
tcgatgctcttagctgagtgtcccg

SEQ ID NO: 183642 - DNA, 25 bp, Canis familiaris
tcgatgctcttagctgagtgtcccg

SEQ ID NO: 183643 - DNA, 25 bp, Canis familiaris
tctgtgggtaccaggtcccaagggc

SEQ ID NO: 183644 - DNA, 25 bp, Canis familiaris
tctgggttccccgagtaacacaggg

SEQ ID NO: 183645 - DNA, 25 bp, Canis familiaris
tctggccttccctcagggaacagca

SEQ ID NO: 183646 - DNA, 25 bp, Canis familiaris
tcgagacaaccccctgaggaagaag

SEQ ID NO: 183647 - DNA, 25 bp, Canis familiaris
tcgaatgcaaactccatgtcccgga

SEQ ID NO: 183648 - DNA, 25 bp, Canis familiaris
tctggagaaattcctctttccgtga

SEQ ID NO: 183649 - DNA, 25 bp, Canis familiaris
tctgggaaagtttatgcttttctga

SEQ ID NO: 183650 - DNA, 25 bp, Canis familiaris
tctgggaggtttcatctttcttggt

SEQ ID NO: 183651 - DNA, 25 bp, Canis familiaris
tcggggggtagttctggtgattggt

SEQ ID NO: 183652 - DNA, 25 bp, Canis familiaris
ttagaggggatttgtcgttgacgga

SEQ ID NO: 183653 - DNA, 25 bp, Canis familiaris
tcgagaggaggttagcttgtgtagc

SEQ ID NO: 183654 - DNA, 25 bp, Canis familiaris
tcgagagtaggcatatccttccctg

SEQ ID NO: 183655 - DNA, 25 bp, Canis familiaris
tcggattctagcattcctacttgcc

SEQ ID NO: 183656 - DNA, 25 bp, Canis familiaris
tcggctttaattctgttttgcctga

SEQ ID NO: 183657 - DNA, 25 bp, Canis familiaris
tcgttttctaatctgtatgcttcac

SEQ ID NO: 183658 - DNA, 25 bp, Canis familiaris
tcgttcatgttagcctgtttgtacc

SEQ ID NO: 183659 - DNA, 25 bp, Canis familiaris
tcgtgttgtcgaggccggaagtggc

SEQ ID NO: 183660 - DNA, 25 bp, Canis familiaris
tcggtatgggacggggtagcggcgc

SEQ ID NO: 183661 - DNA, 25 bp, Canis familiaris
tcgagtatggtggccagggctccga

SEQ ID NO: 183662 - DNA, 25 bp, Canis familiaris
tcgagtcaatgggccaggctgcccc

SEQ ID NO: 183663 - DNA, 25 bp, Canis familiaris
tcgaggcagggaccagctgtcccaa

SEQ ID NO: 183664 - DNA, 25 bp, Canis familiaris
tcggacaggagacatcgccgcgata

SEQ ID NO: 183665 - DNA, 25 bp, Canis familiaris
tcgaaatgaaatccacccggtacct

SEQ ID NO: 183666 - DNA, 25 bp, Canis familiaris
tcagatcaaaaccaacccggtgagc

SEQ ID NO: 183667 - DNA, 25 bp, Canis familiaris
tcagatcaaaaccaacccggtcagc

SEQ ID NO: 183668 - DNA, 25 bp, Canis familiaris
tctgtcaaacctaatcttcggtccc

SEQ ID NO: 183669 - DNA, 25 bp, Canis familiaris
tctaaatccctaacttgcatactcc

SEQ ID NO: 183670 - DNA, 25 bp, Canis familiaris
tctacattcccattcacctgaaagc

SEQ ID NO: 183671 - DNA, 25 bp, Canis familiaris
tcgacttgtgttgcatcctgagcaa

SEQ ID NO: 183672 - DNA, 25 bp, Canis familiaris
tcgacctgtttggcagcgatgagga

SEQ ID NO: 183673 - DNA, 25 bp, Canis familiaris
tcgggcttgttgagcctgaggagtt

SEQ ID NO: 183674 - DNA, 25 bp, Canis familiaris
tcggaactatagtgcctgcagcggt

SEQ ID NO: 183675 - DNA, 25 bp, Canis familiaris
tcggaggctccagacactagggcct

SEQ ID NO: 183676 - DNA, 25 bp, Canis familiaris
tcggaacactctgtaagagcccctc

SEQ ID NO: 183677 - DNA, 25 bp, Canis familiaris
tcggaatccctctaaggaacccaag

SEQ ID NO: 183678 - DNA, 25 bp, Canis familiaris
tcgggtcctatgcggaaacctcaaa

SEQ ID NO: 183679 - DNA, 25 bp, Canis familiaris
tcgggctatttccgggagaactaga

SEQ ID NO: 183680 - DNA, 25 bp, Canis familiaris
tcgaggtctactgtggggaacacag

SEQ ID NO: 183681 - DNA, 25 bp, Canis familiaris
tcgggtcagcctgtggaccaggagc

SEQ ID NO: 183682 - DNA, 25 bp, Canis familiaris
tcgagattcgtccgagagcaccggg

SEQ ID NO: 183683 - DNA, 25 bp, Canis familiaris
tcgagtgttgtcacatacaccctcg

SEQ ID NO: 183684 - DNA, 25 bp, Canis familiaris
tcggatgttgcgattgactcccagt

SEQ ID NO: 183685 - DNA, 25 bp, Canis familiaris
tctggtctggtggatccaccccaac

SEQ ID NO: 183686 - DNA, 25 bp, Canis familiaris
tctgagttaccgacttcccaaagga

SEQ ID NO: 183687 - DNA, 25 bp, Canis familiaris
tcggattggaagacccccattggga

SEQ ID NO: 183688 - DNA, 25 bp, Canis familiaris
tcgtatatacatgacccgctttggg

SEQ ID NO: 183689 - DNA, 25 bp, Canis familiaris
tcgagatcatttgcacaacacttta

SEQ ID NO: 183690 - DNA, 25 bp, Canis familiaris
tcgatgctgcatatgagcacccctc

SEQ ID NO: 183691 - DNA, 25 bp, Canis familiaris
tcgagtgattcatgagcgcaccctc

SEQ ID NO: 183692 - DNA, 25 bp, Canis familiaris
tcgatgtgtgtcagagagatcctct

SEQ ID NO: 183693 - DNA, 25 bp, Canis familiaris
tcgatggtggctcgagtctcatcta

SEQ ID NO: 183694 - DNA, 25 bp, Canis familiaris
tcgagtggcttcggtgtcatcgagc

SEQ ID NO: 183695 - DNA, 25 bp, Canis familiaris
tcggatgtctatgcgtgtcgggcga

SEQ ID NO: 183696 - DNA, 25 bp, Canis familiaris
tctggttttgaccttcaggacacac

SEQ ID NO: 183697 - DNA, 25 bp, Canis familiaris
tcggtcctgcgtcttcaggatcaag

SEQ ID NO: 183698 - DNA, 25 bp, Canis familiaris
tcggtcaccaccatgtctggaaagt

SEQ ID NO: 183699 - DNA, 25 bp, Canis familiaris
tcggtcacctggctgtggatcaaca

SEQ ID NO: 183700 - DNA, 25 bp, Canis familiaris
tcggtcaccgagtgtgtcaagcaga

SEQ ID NO: 183701 - DNA, 25 bp, Canis familiaris
tcgtccaccgcaaatgcttctaaat

SEQ ID NO: 183702 - DNA, 25 bp, Canis familiaris
tcgtccaccacaaatgcttctagat

SEQ ID NO: 183703 - DNA, 25 bp, Canis familiaris
tcgtcccaatcgataatcttgatca

SEQ ID NO: 183704 - DNA, 25 bp, Canis familiaris
tcgttcgattcgttattctgattga

SEQ ID NO: 183705 - DNA, 25 bp, Canis familiaris
tcgacgcgagatgtagattctgtaa

SEQ ID NO: 183706 - DNA, 25 bp, Canis familiaris
tcgacgataatatagactcatgatt

SEQ ID NO: 183707 - DNA, 25 bp, Canis familiaris
tcgactgcataatttgtggtagtgg

SEQ ID NO: 183708 - DNA, 25 bp, Canis familiaris
tcgatccatgattttgtgtttcttt

SEQ ID NO: 183709 - DNA, 25 bp, Canis familiaris
tcgattgatttgacgttatcctttt

SEQ ID NO: 183710 - DNA, 25 bp, Canis familiaris
tctgttttgctgtgtattttcctta

SEQ ID NO: 183711 - DNA, 25 bp, Canis familiaris
tcgttttggtagaatctttgttcca

SEQ ID NO: 183712 - DNA, 25 bp, Canis familiaris
tcgttgctctgataccatttgttta

SEQ ID NO: 183713 - DNA, 25 bp, Canis familiaris
tcggggctgagattccaagtgggtg

SEQ ID NO: 183714 - DNA, 25 bp, Canis familiaris
tcggtatctgaatccaagatgggct

SEQ ID NO: 183715 - DNA, 25 bp, Canis familiaris
tcgtgctaaattttcagtaggccta

SEQ ID NO: 183716 - DNA, 25 bp, Canis familiaris
tcgtcatgatcatctaccgggacct

SEQ ID NO: 183717 - DNA, 25 bp, Canis familiaris
tcgagcgatcataccctcgagttcc

SEQ ID NO: 183718 - DNA, 25 bp, Canis familiaris
tctgggaataccctcggttcgatac

SEQ ID NO: 183719 - DNA, 25 bp, Canis familiaris
tcgggataaacgtggttcgtgcccg

SEQ ID NO: 183720 - DNA, 25 bp, Canis familiaris
tcgggaagagggtgagtctccccct

SEQ ID NO: 183721 - DNA, 25 bp, Canis familiaris
tcggaaagaaggacgaatgtcccgc

SEQ ID NO: 183722 - DNA, 25 bp, Canis familiaris
tctgtaaaacggggacagtccctgc

SEQ ID NO: 183723 - DNA, 25 bp, Canis familiaris
tctgtcggaaggaagcgaagtcccc

SEQ ID NO: 183724 - DNA, 25 bp, Canis familiaris
tcgacgaggaggagcttttgccgcc

SEQ ID NO: 183725 - DNA, 25 bp, Canis familiaris
tcgactgggaggagcactacagcca

SEQ ID NO: 183726 - DNA, 25 bp, Canis familiaris
tcgtcttggaggggtctgtccagca

SEQ ID NO: 183727 - DNA, 25 bp, Canis familiaris
tcgtccaagaggacttgctttccat

SEQ ID NO: 183728 - DNA, 25 bp, Canis familiaris
tcgatccagggatcatccttccaaa

SEQ ID NO: 183729 - DNA, 25 bp, Canis familiaris
tcgaccagggaattcagcattgcgg

SEQ ID NO: 183730 - DNA, 25 bp, Canis familiaris
tcgaccggacaaacgacgaggtgga

SEQ ID NO: 183731 - DNA, 25 bp, Canis familiaris
tcgaggggagcaataccacggagga

SEQ ID NO: 183732 - DNA, 25 bp, Canis familiaris
tcgaggtggagcatatcccggagga

SEQ ID NO: 183733 - DNA, 25 bp, Canis familiaris
tcgagcgtgcgagggtctcgcggga

SEQ ID NO: 183734 - DNA, 25 bp, Canis familiaris
tcgatctacggggcaaccgctggta

SEQ ID NO: 183735 - DNA, 25 bp, Canis familiaris
tcgatccacagaaggcaacccgacc

SEQ ID NO: 183736 - DNA, 25 bp, Canis familiaris
tctacaaaactggcataccgatgat

SEQ ID NO: 183737 - DNA, 25 bp, Canis familiaris
tcatgtcaaaacggaaggcgtcaat

SEQ ID NO: 183738 - DNA, 25 bp, Canis familiaris
tctctctaaggagaatggcccagtc

SEQ ID NO: 183739 - DNA, 25 bp, Canis familiaris
tcggaaacgatccgtgagcccagtc

SEQ ID NO: 183740 - DNA, 25 bp, Canis familiaris
tcggaaaggagacgatgtcccgccc

SEQ ID NO: 183741 - DNA, 25 bp, Canis familiaris
tcgatgagggatgactggtcccccc

SEQ ID NO: 183742 - DNA, 25 bp, Canis familiaris
tcgagagagctctaacggatcccac

SEQ ID NO: 183743 - DNA, 25 bp, Canis familiaris
tcgtggagtctactggtgtcttcac

SEQ ID NO: 183744 - DNA, 25 bp, Canis familiaris
tcggggctgcagactgctggattct

SEQ ID NO: 183745 - DNA, 25 bp, Canis familiaris
tcgagtcctcgagctgtgaggctcc

SEQ ID NO: 183746 - DNA, 25 bp, Canis familiaris
tcgagtccatcgagctgtagaggct

SEQ ID NO: 183747 - DNA, 25 bp, Canis familiaris
tcgagaagctcgccgtggaagctct

SEQ ID NO: 183748 - DNA, 25 bp, Canis familiaris
tcggaatgacgcaagcatggaagta

SEQ ID NO: 183749 - DNA, 25 bp, Canis familiaris
tcgtgcatggagctgactgtcaagg

SEQ ID NO: 183750 - DNA, 25 bp, Canis familiaris
tcgttgtcaacgtcttcatcacggc

SEQ ID NO: 183751 - DNA, 25 bp, Canis familiaris
tcgggaggtcagtttctccatgtct

SEQ ID NO: 183752 - DNA, 25 bp, Canis familiaris
tctggttgggggtttgctagtctaa

SEQ ID NO: 183753 - DNA, 25 bp, Canis familiaris
tcggttgggggggttcatgtggaca

SEQ ID NO: 183754 - DNA, 25 bp, Canis familiaris
tctgtgatcttggggggtttctggg

SEQ ID NO: 183755 - DNA, 25 bp, Canis familiaris
tcgatgcattgtctgtcctgtttgc

SEQ ID NO: 183756 - DNA, 25 bp, Canis familiaris
tcggcatggatattggccctgtctg

SEQ ID NO: 183757 - DNA, 25 bp, Canis familiaris
tctgtatggatctcggcacttagct

SEQ ID NO: 183758 - DNA, 25 bp, Canis familiaris
tctgataggactcagcgcctgtggc

SEQ ID NO: 183759 - DNA, 25 bp, Canis familiaris
tctagggtcagatggcctgggtcct

SEQ ID NO: 183760 - DNA, 25 bp, Canis familiaris
tcgggtgtcagatcctgggttcccg

SEQ ID NO: 183761 - DNA, 25 bp, Canis familiaris
tcggattacatgtgcttggcgatta

SEQ ID NO: 183762 - DNA, 25 bp, Canis familiaris
tcggcacccagcatcttggtgatct

SEQ ID NO: 183763 - DNA, 25 bp, Canis familiaris
tcggatacaagcacaggggcattta

SEQ ID NO: 183764 - DNA, 25 bp, Canis familiaris
tcgagaacaagcgcagcgccgcgtt

SEQ ID NO: 183765 - DNA, 25 bp, Canis familiaris
tcggcaacaacggcggctcgttgaa

SEQ ID NO: 183766 - DNA, 25 bp, Canis familiaris
tctggacccaggaagagcctttact

SEQ ID NO: 183767 - DNA, 25 bp, Canis familiaris
tctggagccctacaacctgaaagct

SEQ ID NO: 183768 - DNA, 25 bp, Canis familiaris
tcgggctttgtcgaatcgtaaacat

SEQ ID NO: 183769 - DNA, 25 bp, Canis familiaris
tcggactattgcgctttgttcaact

SEQ ID NO: 183770 - DNA, 25 bp, Canis familiaris
tcggatctatctttctatctgtctc

SEQ ID NO: 183771 - DNA, 25 bp, Canis familiaris
tcggttgtcaagtctttgtgctcgg

SEQ ID NO: 183772 - DNA, 25 bp, Canis familiaris
tcgggctgctaatattcttgtagga

SEQ ID NO: 183773 - DNA, 25 bp, Canis familiaris
tctggccttaagttttttgtcatga

SEQ ID NO: 183774 - DNA, 25 bp, Canis familiaris
tctgtccctgttcgttatacgtcat

SEQ ID NO: 183775 - DNA, 25 bp, Canis familiaris
tcggtcgtttggtcaaccgtcacgg

SEQ ID NO: 183776 - DNA, 25 bp, Canis familiaris
tcggtagtttggacagttcctccgg

SEQ ID NO: 183777 - DNA, 25 bp, Canis familiaris
tcgggagtgggtaatttgcgcgcct

SEQ ID NO: 183778 - DNA, 25 bp, Canis familiaris
tcggggtgtttcatgtggcactggt

SEQ ID NO: 183779 - DNA, 25 bp, Canis familiaris
tcggggtttgtcatttggcatctgt

SEQ ID NO: 183780 - DNA, 25 bp, Canis familiaris
tcgtgtcagtcattgtagctttgga

SEQ ID NO: 183781 - DNA, 25 bp, Canis familiaris
tcgtgtaatctgtgctgcgcttgga

SEQ ID NO: 183782 - DNA, 25 bp, Canis familiaris
tcgtggcaatctgagtgttgtgaat

SEQ ID NO: 183783 - DNA, 25 bp, Canis familiaris
tcgtggccactggacatgggaagta

SEQ ID NO: 183784 - DNA, 25 bp, Canis familiaris
tcggcacgagctcagatttgacagt

SEQ ID NO: 183785 - DNA, 25 bp, Canis familiaris
tcggcacgagcctgtatcaaagtca

SEQ ID NO: 183786 - DNA, 25 bp, Canis familiaris
tcgagaggactatctccaaagccag

SEQ ID NO: 183787 - DNA, 25 bp, Canis familiaris
tcgggtacaatagtcccaacctgcg

SEQ ID NO: 183788 - DNA, 25 bp, Canis familiaris
tctggggagcactccccacaatctc

SEQ ID NO: 183789 - DNA, 25 bp, Canis familiaris
tctggcaaagacgatcccaaattta

SEQ ID NO: 183790 - DNA, 25 bp, Canis familiaris
tcgtaaaacctctcacgaaggaaag

SEQ ID NO: 183791 - DNA, 25 bp, Canis familiaris
tctgtaaaaccctccagaaggaaag

SEQ ID NO: 183792 - DNA, 25 bp, Canis familiaris
tctggaagagacccaactgcaaaga

SEQ ID NO: 183793 - DNA, 25 bp, Canis familiaris
tctgagaagagcccattgagctaaa

SEQ ID NO: 183794 - DNA, 25 bp, Canis familiaris
tcgagaaggacgtgagctgatgctc

SEQ ID NO: 183795 - DNA, 25 bp, Canis familiaris
tcggcaacgatgggctgcacgagcc

SEQ ID NO: 183796 - DNA, 25 bp, Canis familiaris
tcgagactcgtgggccacacagatt

SEQ ID NO: 183797 - DNA, 25 bp, Canis familiaris
tcggactttaaccctagattctaca

SEQ ID NO: 183798 - DNA, 25 bp, Canis familiaris
tcgggtcttattttttgatttcact

SEQ ID NO: 183799 - DNA, 25 bp, Canis familiaris
tcggggtagttattttgtcctctct

SEQ ID NO: 183800 - DNA, 25 bp, Canis familiaris
tctgggtctagttttcagcctttct

SEQ ID NO: 183801 - DNA, 25 bp, Canis familiaris
tctgggtctttatgtcactcatccc

SEQ ID NO: 183802 - DNA, 25 bp, Canis familiaris
tcgagggccttaggccctacagccc

SEQ ID NO: 183803 - DNA, 25 bp, Canis familiaris
gcagaaaggtagttacttccccagc

SEQ ID NO: 183804 - DNA, 25 bp, Canis familiaris
tcgtgggcccagacgcaagtggcca

SEQ ID NO: 183805 - DNA, 25 bp, Canis familiaris
tcggaggccgagatcaaggtcgaga

SEQ ID NO: 183806 - DNA, 25 bp, Canis familiaris
tctgggggcaacaccaggtcccagg

SEQ ID NO: 183807 - DNA, 25 bp, Canis familiaris
tcgggtgcaaacgtacggtcaccgc

SEQ ID NO: 183808 - DNA, 25 bp, Canis familiaris
tcggggtcaagggattggctcccca

SEQ ID NO: 183809 - DNA, 25 bp, Canis familiaris
tcgtgggtgctaaggttgcgttaaa

SEQ ID NO: 183810 - DNA, 25 bp, Canis familiaris
tcgtgggatgtatgagtcgcgctgt

SEQ ID NO: 183811 - DNA, 25 bp, Canis familiaris
tcgagggtgtggcagctggagctgg

SEQ ID NO: 183812 - DNA, 25 bp, Canis familiaris
tcgagggggtctcctgagactcgtg

SEQ ID NO: 183813 - DNA, 25 bp, Canis familiaris
tcggggatgacccactgtgaatcct

SEQ ID NO: 183814 - DNA, 25 bp, Canis familiaris
tcagtgtaaaccttctgggatccct

SEQ ID NO: 183815 - DNA, 25 bp, Canis familiaris
tcgtgtgtagaccattcattgatat

SEQ ID NO: 183816 - DNA, 25 bp, Canis familiaris
tctgttccagaccagcacaatagag

SEQ ID NO: 183817 - DNA, 25 bp, Canis familiaris
tctgttccgaccccaaggacaagag

SEQ ID NO: 183818 - DNA, 25 bp, Canis familiaris
tctgttctccattcctaaggaccta

SEQ ID NO: 183819 - DNA, 25 bp, Canis familiaris
tcgtattccttccgggagaccatga

SEQ ID NO: 183820 - DNA, 25 bp, Canis familiaris
tcggttgtctttcgggaggagctga

SEQ ID NO: 183821 - DNA, 25 bp, Canis familiaris
tcggtcatttttcgggcaggagcca

SEQ ID NO: 183822 - DNA, 25 bp, Canis familiaris
tcggcgtgttggtggagcaggagga

SEQ ID NO: 183823 - DNA, 25 bp, Canis familiaris
tcgaggtgttggtggatatggtgac

SEQ ID NO: 183824 - DNA, 25 bp, Canis familiaris
tcgaggtttcgtcaggatctgcaca

SEQ ID NO: 183825 - DNA, 25 bp, Canis familiaris
tctgaggtttcctgggattgctcct

SEQ ID NO: 183826 - DNA, 25 bp, Canis familiaris
tctgaggtttcctgggattgctcct

SEQ ID NO: 183827 - DNA, 25 bp, Canis familiaris
tcttggtttcactttcagttggcct

SEQ ID NO: 183828 - DNA, 25 bp, Canis familiaris
tcattgactttttcttgggggcgtc

SEQ ID NO: 183829 - DNA, 25 bp, Canis familiaris
tcattaccttggtcttgtaaaccca

SEQ ID NO: 183830 - DNA, 25 bp, Canis familiaris
tcttttttgtactattactgaccct

SEQ ID NO: 183831 - DNA, 25 bp, Canis familiaris
tctcgactttgtccagttggctggc

SEQ ID NO: 183832 - DNA, 25 bp, Canis familiaris
tcggcagccattcacgttggcttgc

SEQ ID NO: 183833 - DNA, 25 bp, Canis familiaris
tcggcagctcctcaggtaatactga

SEQ ID NO: 183834 - DNA, 25 bp, Canis familiaris
tcggttgctccctgaaatagcgagt

SEQ ID NO: 183835 - DNA, 25 bp, Canis familiaris
tcggtattccgttgcccaagataga

SEQ ID NO: 183836 - DNA, 25 bp, Canis familiaris
tctggcctctaagagcccggatgag

SEQ ID NO: 183837 - DNA, 25 bp, Canis familiaris
tctgggccttcatatggactttgtg

SEQ ID NO: 183838 - DNA, 25 bp, Canis familiaris
tcgagggccaagtctggcgctttgt

SEQ ID NO: 183839 - DNA, 25 bp, Canis familiaris
tcgggcagccaaactgaacacttga

SEQ ID NO: 183840 - DNA, 25 bp, Canis familiaris
tcggagacggagacctacacggagg

SEQ ID NO: 183841 - DNA, 25 bp, Canis familiaris
tcggagggtgcggaaacgggtggtg

SEQ ID NO: 183842 - DNA, 25 bp, Canis familiaris
tcgtgcaccggccaaagactgagtg

SEQ ID NO: 183843 - DNA, 25 bp, Canis familiaris
tcggcgggactctgcagttgaagaa

SEQ ID NO: 183844 - DNA, 25 bp, Canis familiaris
tcggggaggatctgcagtggagctg

SEQ ID NO: 183845 - DNA, 25 bp, Canis familiaris
tcggggacattgtcacagtgggtga

SEQ ID NO: 183846 - DNA, 25 bp, Canis familiaris
tcggaacacattcagctgctgggtg

SEQ ID NO: 183847 - DNA, 25 bp, Canis familiaris
tcggagactcctcagtgtaggcgac

SEQ ID NO: 183848 - DNA, 25 bp, Canis familiaris
tctgggagttcttgagctttgccga

SEQ ID NO: 183849 - DNA, 25 bp, Canis familiaris
tcgaggagtccaagaggtcgcacta

SEQ ID NO: 183850 - DNA, 25 bp, Canis familiaris
tcggagtctgcgtagacgtctgcac

SEQ ID NO: 183851 - DNA, 25 bp, Canis familiaris
tcgatgagtcccgagactgaaccag

SEQ ID NO: 183852 - DNA, 25 bp, Canis familiaris
tcgtttctcattcgactgaagacag

SEQ ID NO: 183853 - DNA, 25 bp, Canis familiaris
tctgtttaattacaccagcatcgcg

SEQ ID NO: 183854 - DNA, 25 bp, Canis familiaris
tcgttttgtgctatagccactccac

SEQ ID NO: 183855 - DNA, 25 bp, Canis familiaris
tcgtatacttgtcctagccacatta

SEQ ID NO: 183856 - DNA, 25 bp, Canis familiaris
tcgtcaaatgtctatcttccactta

SEQ ID NO: 183857 - DNA, 25 bp, Canis familiaris
tcgtgacttaattctcccacttgag

SEQ ID NO: 183858 - DNA, 25 bp, Canis familiaris
tcgatacctaatattcatgccccag

SEQ ID NO: 183859 - DNA, 25 bp, Canis familiaris
tcgtacttatagtcttgatccccgc

SEQ ID NO: 183860 - DNA, 25 bp, Canis familiaris
tctgttccttaactctgatcgtcac

SEQ ID NO: 183861 - DNA, 25 bp, Canis familiaris
tcgtctgccttcggcttaagtcatg

SEQ ID NO: 183862 - DNA, 25 bp, Canis familiaris
tcgatctccatcacctgtagagcta

SEQ ID NO: 183863 - DNA, 25 bp, Canis familiaris
tcgttctcatacggtgctagagctt

SEQ ID NO: 183864 - DNA, 25 bp, Canis familiaris
tcgtgtctgcttcgaagcataggta

SEQ ID NO: 183865 - DNA, 25 bp, Canis familiaris
tcggtgtgtgtccagtcgggtaaga

SEQ ID NO: 183866 - DNA, 25 bp, Canis familiaris
ttggctgactgtcttcggagtcgga

SEQ ID NO: 183867 - DNA, 25 bp, Canis familiaris
ttggctgactgtcttcggagtcgga

SEQ ID NO: 183868 - DNA, 25 bp, Canis familiaris
tctgggatctcacaacgggtaccat

SEQ ID NO: 183869 - DNA, 25 bp, Canis familiaris
tctgaggcacaacggtccgggacta

SEQ ID NO: 183870 - DNA, 25 bp, Canis familiaris
tcgggagaagggccctggagctccc

SEQ ID NO: 183871 - DNA, 25 bp, Canis familiaris
tcggatgaagactgacctgtggccc

SEQ ID NO: 183872 - DNA, 25 bp, Canis familiaris
tcgttaaccagcacctgtgtggctc

SEQ ID NO: 183873 - DNA, 25 bp, Canis familiaris
tcacttccaactatccttagtcacc

SEQ ID NO: 183874 - DNA, 25 bp, Canis familiaris
tcgtctggcaacttttcctgaggac

SEQ ID NO: 183875 - DNA, 25 bp, Canis familiaris
tcgttggacacatttctctctcgag

SEQ ID NO: 183876 - DNA, 25 bp, Canis familiaris
tcgtagtgagcttgtgctatcccca

SEQ ID NO: 183877 - DNA, 25 bp, Canis familiaris
tcgtagtggggtggacagcgcagac

SEQ ID NO: 183878 - DNA, 25 bp, Canis familiaris
tctcgactagaaccgacaccagacc

SEQ ID NO: 183879 - DNA, 25 bp, Canis familiaris
tctggaataaagcccccatgtcacc

SEQ ID NO: 183880 - DNA, 25 bp, Canis familiaris
tctgaggtacaacccgtttatccca

SEQ ID NO: 183881 - DNA, 25 bp, Canis familiaris
tctagagtactacccttttattgcc

SEQ ID NO: 183882 - DNA, 25 bp, Canis familiaris
tcggaggccatggggcttttttgcc

SEQ ID NO: 183883 - DNA, 25 bp, Canis familiaris
tcaggggccggtggctgtttttgaa

SEQ ID NO: 183884 - DNA, 25 bp, Canis familiaris
tcggaggggcgtggtacttattatt

SEQ ID NO: 183885 - DNA, 25 bp, Canis familiaris
tctgcagggagggtataatttataa

SEQ ID NO: 183886 - DNA, 25 bp, Canis familiaris
tctggtgatgaacatatattttgta

SEQ ID NO: 183887 - DNA, 25 bp, Canis familiaris
tctgcttctgaacagctttttataa

SEQ ID NO: 183888 - DNA, 25 bp, Canis familiaris
tctgggctaagcttttcatttctaa

SEQ ID NO: 183889 - DNA, 25 bp, Canis familiaris
tctgtggcctactgtccatttattt

SEQ ID NO: 183890 - DNA, 25 bp, Canis familiaris
tctgtggtctacaaaaatgttgttt

SEQ ID NO: 183891 - DNA, 25 bp, Canis familiaris
tcgtcttctctccaagaagatgggt

SEQ ID NO: 183892 - DNA, 25 bp, Canis familiaris
tcgttcactcatggaaaatagcgat

SEQ ID NO: 183893 - DNA, 25 bp, Canis familiaris
accttgtcagtcaatgttcactacc

SEQ ID NO: 183894 - DNA, 25 bp, Canis familiaris
tcgttcccagaaaaaccaagagcca

SEQ ID NO: 183895 - DNA, 25 bp, Canis familiaris
tcttatcctgaaaaaccccaagcca

SEQ ID NO: 183896 - DNA, 25 bp, Canis familiaris
tctgcttcgtgtaaaacccgaccca

SEQ ID NO: 183897 - DNA, 25 bp, Canis familiaris
tctttctggctaaaaccggaaatca

SEQ ID NO: 183898 - DNA, 25 bp, Canis familiaris
tctgtgactgggagcaaccttgcaa

SEQ ID NO: 183899 - DNA, 25 bp, Canis familiaris
tattgacggggagacgtgcctgctg

SEQ ID NO: 183900 - DNA, 25 bp, Canis familiaris
tctggacggggggagtgtcccgtgt

SEQ ID NO: 183901 - DNA, 25 bp, Canis familiaris
tctgaaccagggcccagggcccgca

SEQ ID NO: 183902 - DNA, 25 bp, Canis familiaris
tcgttccaagagcagagagcgcccc

SEQ ID NO: 183903 - DNA, 25 bp, Canis familiaris
tcgtgtccacaaggggcttgcaaca

SEQ ID NO: 183904 - DNA, 25 bp, Canis familiaris
tctggtcggacagggacgtcaccac

SEQ ID NO: 183905 - DNA, 25 bp, Canis familiaris
tcggatcaggctccggagtggacgc

SEQ ID NO: 183906 - DNA, 25 bp, Canis familiaris
tcgggcaagctgaaggcgctgttcc

SEQ ID NO: 183907 - DNA, 25 bp, Canis familiaris
tcgggcatgtgtacaagcgctgcta

SEQ ID NO: 183908 - DNA, 25 bp, Canis familiaris
tcggctgctctgaaaggatgctgct

SEQ ID NO: 183909 - DNA, 25 bp, Canis familiaris
tctggcttctgagcagtctcatctg

SEQ ID NO: 183910 - DNA, 25 bp, Canis familiaris
tctggttctgcatagtcctatgcca

SEQ ID NO: 183911 - DNA, 25 bp, Canis familiaris
tctggtactggactgtcactacccg

SEQ ID NO: 183912 - DNA, 25 bp, Canis familiaris
tctggtgccagccaatgtactacca

SEQ ID NO: 183913 - DNA, 25 bp, Canis familiaris
tcggctcggcgaatggagtgactcg

SEQ ID NO: 183914 - DNA, 25 bp, Canis familiaris
tcggcctgcaggtaggtgtcagccg

SEQ ID NO: 183915 - DNA, 25 bp, Canis familiaris
tcggcgtcgagaacctgtaccgcca

SEQ ID NO: 183916 - DNA, 25 bp, Canis familiaris
tcggagctgcagaaaccggacgccc

SEQ ID NO: 183917 - DNA, 25 bp, Canis familiaris
tctggacacagtgcccgtgtcggag

SEQ ID NO: 183918 - DNA, 25 bp, Canis familiaris
tcggtcaattgtcactgtcatcaga

SEQ ID NO: 183919 - DNA, 25 bp, Canis familiaris
tctggtttctggaagtcacttgctt

SEQ ID NO: 183920 - DNA, 25 bp, Canis familiaris
tctgcttttcggccagtggtagccg

SEQ ID NO: 183921 - DNA, 25 bp, Canis familiaris
tctctgttctcgtgtgggagcatct

SEQ ID NO: 183922 - DNA, 25 bp, Canis familiaris
tcgttctcttctttgggatgctatt

SEQ ID NO: 183923 - DNA, 25 bp, Canis familiaris
tcgtcctccttgtatgggtttcaga

SEQ ID NO: 183924 - DNA, 25 bp, Canis familiaris
tcgtccccctgtaaggattgtctgt

SEQ ID NO: 183925 - DNA, 25 bp, Canis familiaris
tcgtgacggccaattcggattgttg

SEQ ID NO: 183926 - DNA, 25 bp, Canis familiaris
tcggtcggtgtgatctgtactgtgt

SEQ ID NO: 183927 - DNA, 25 bp, Canis familiaris
tctggtccgtgtattctttgggtcc

SEQ ID NO: 183928 - DNA, 25 bp, Canis familiaris
tctgagttttttttatttaagtcat

SEQ ID NO: 183929 - DNA, 25 bp, Canis familiaris
tctggtgtccttaattttccaatgc

SEQ ID NO: 183930 - DNA, 25 bp, Canis familiaris
tcttgttctactccattacctggac

SEQ ID NO: 183931 - DNA, 25 bp, Canis familiaris
tctcgtagtatcggagttcactgga

SEQ ID NO: 183932 - DNA, 25 bp, Canis familiaris
tctcctagtttggctttccgaggag

SEQ ID NO: 183933 - DNA, 25 bp, Canis familiaris
tctggctttcttcctatttcaggga

SEQ ID NO: 183934 - DNA, 25 bp, Canis familiaris
tctgcggttctatctggattctggg

SEQ ID NO: 183935 - DNA, 25 bp, Canis familiaris
tctgggttgcatgtgggtacgttgg

SEQ ID NO: 183936 - DNA, 25 bp, Canis familiaris
tcggcctagcatgtcggaagcgggt

SEQ ID NO: 183937 - DNA, 25 bp, Canis familiaris
tcggcacgagcgctgccgtaaggaa

SEQ ID NO: 183938 - DNA, 25 bp, Canis familiaris
taggaaggccatacacttaccggaa

SEQ ID NO: 183939 - DNA, 25 bp, Canis familiaris
tagctggaccagagcacgtagccgt

SEQ ID NO: 183940 - DNA, 25 bp, Canis familiaris
tcgtgtaccagaacatcttcaccgc

SEQ ID NO: 183941 - DNA, 25 bp, Canis familiaris
tctggttcaagaggccttcgccgac

SEQ ID NO: 183942 - DNA, 25 bp, Canis familiaris
tctgtgtccaaagccatcactgatc

SEQ ID NO: 183943 - DNA, 25 bp, Canis familiaris
tcgtgcgctaacgcgtgcacatgag

SEQ ID NO: 183944 - DNA, 25 bp, Canis familiaris
tcgtcaccatcacccgatgtgagac

SEQ ID NO: 183945 - DNA, 25 bp, Canis familiaris
tcgtccccaccatgtgtggagtggt

SEQ ID NO: 183946 - DNA, 25 bp, Canis familiaris
tctggcccctggtatggtgggggtt

SEQ ID NO: 183947 - DNA, 25 bp, Canis familiaris
tctggcccctggtatggtgggggtt

SEQ ID NO: 183948 - DNA, 25 bp, Canis familiaris
tctggcccctggtatggtgggggtt

SEQ ID NO: 183949 - DNA, 25 bp, Canis familiaris
tctggcccctggtatggtgggggtt

SEQ ID NO: 183950 - DNA, 25 bp, Canis familiaris
tctggcccggcattctggaatgggc

SEQ ID NO: 183951 - DNA, 25 bp, Canis familiaris
tcggcgcgcaaagcgaaagcggcag

SEQ ID NO: 183952 - DNA, 25 bp, Canis familiaris
tcgtggtcaattgtgataagcgccg

SEQ ID NO: 183953 - DNA, 25 bp, Canis familiaris
tcgtggatccgtgagatctggctcc

SEQ ID NO: 183954 - DNA, 25 bp, Canis familiaris
tcggagacggacaagcaggcagccc

SEQ ID NO: 183955 - DNA, 25 bp, Canis familiaris
tcgggcaggaggaagagccgcaccc

SEQ ID NO: 183956 - DNA, 25 bp, Canis familiaris
tctggcgggagggagcagttcccca

SEQ ID NO: 183957 - DNA, 25 bp, Canis familiaris
tctcggtggagcgccagattcacaa

SEQ ID NO: 183958 - DNA, 25 bp, Canis familiaris
tctggagtaactgccattctacctt

SEQ ID NO: 183959 - DNA, 25 bp, Canis familiaris
tcggattaagtccttttatcgtatc

SEQ ID NO: 183960 - DNA, 25 bp, Canis familiaris
tctggaaacaggcctgtcgttcctt

SEQ ID NO: 183961 - DNA, 25 bp, Canis familiaris
tctgtaaagtgctctgaggtctccc

SEQ ID NO: 183962 - DNA, 25 bp, Canis familiaris
tcgtgaaaatgctcgatggccccag

SEQ ID NO: 183963 - DNA, 25 bp, Canis familiaris
tcggagggcaagccaggtgccccag

SEQ ID NO: 183964 - DNA, 25 bp, Canis familiaris
tcggaggcgctgagaagtgctcccg

SEQ ID NO: 183965 - DNA, 25 bp, Canis familiaris
tcggagagcagcacggcgtgctcct

SEQ ID NO: 183966 - DNA, 25 bp, Canis familiaris
tcggagagcagcacggcgtgctcct

SEQ ID NO: 183967 - DNA, 25 bp, Canis familiaris
tcgtagagcctcgtgggctctgcgc

SEQ ID NO: 183968 - DNA, 25 bp, Canis familiaris
tcggaagccatccaggacatcatcc

SEQ ID NO: 183969 - DNA, 25 bp, Canis familiaris
tcggagaaacgagggcacaccaatc

SEQ ID NO: 183970 - DNA, 25 bp, Canis familiaris
tcgggaagacgctgagccccgagca

SEQ ID NO: 183971 - DNA, 25 bp, Canis familiaris
tctgggacgacgtgggcaacctgat

SEQ ID NO: 183972 - DNA, 25 bp, Canis familiaris
tctgggatcccctgaggaagggccc

SEQ ID NO: 183973 - DNA, 25 bp, Canis familiaris
tctgggcccccagaagacagatggg

SEQ ID NO: 183974 - DNA, 25 bp, Canis familiaris
tcggtggccccagaagagtgctgag

SEQ ID NO: 183975 - DNA, 25 bp, Canis familiaris
tcggcagcctcatgctttagagtgt

SEQ ID NO: 183976 - DNA, 25 bp, Canis familiaris
tcgtcatggcgatgtttgagcagat

SEQ ID NO: 183977 - DNA, 25 bp, Canis familiaris
tcgtctcctatactctcatgagcgt

SEQ ID NO: 183978 - DNA, 25 bp, Canis familiaris
tcgtctgccatgcacacatcataag

SEQ ID NO: 183979 - DNA, 25 bp, Canis familiaris
tcgtcatcctgtcaaatatagcaag

SEQ ID NO: 183980 - DNA, 25 bp, Canis familiaris
tctgtcattcatcccaaacttgcat

SEQ ID NO: 183981 - DNA, 25 bp, Canis familiaris
tctgtctttcaccaacattccaagt

SEQ ID NO: 183982 - DNA, 25 bp, Canis familiaris
tcttggtcgcaataatgtactcagt

SEQ ID NO: 183983 - DNA, 25 bp, Canis familiaris
tctaggactcaatcagccaaatcag

SEQ ID NO: 183984 - DNA, 25 bp, Canis familiaris
tcggagccatcatcgcgccaaattt

SEQ ID NO: 183985 - DNA, 25 bp, Canis familiaris
tcggtgcactgatcgctgccaatgc

SEQ ID NO: 183986 - DNA, 25 bp, Canis familiaris
tcgtggcaatgtggctgtgacagca

SEQ ID NO: 183987 - DNA, 25 bp, Canis familiaris
tcgtggagcagtgctgcaccagcat

SEQ ID NO: 183988 - DNA, 25 bp, Canis familiaris
tcgtcgtgcagcaagctgacccatc

SEQ ID NO: 183989 - DNA, 25 bp, Canis familiaris
tcgtggtgagctggatgatcgcccg

SEQ ID NO: 183990 - DNA, 25 bp, Canis familiaris
tctgagtgtcacgggtccctcagta

SEQ ID NO: 183991 - DNA, 25 bp, Canis familiaris
tctggtccatgtggggaccttggca

SEQ ID NO: 183992 - DNA, 25 bp, Canis familiaris
tcggcccagggcctgatcctgggga

SEQ ID NO: 183993 - DNA, 25 bp, Canis familiaris
tcggacagtggcgatcatgaccggg

SEQ ID NO: 183994 - DNA, 25 bp, Canis familiaris
tctggacgtccagtcggggagcgtc

SEQ ID NO: 183995 - DNA, 25 bp, Canis familiaris
tcggactacctggtggtgtacctgc

SEQ ID NO: 183996 - DNA, 25 bp, Canis familiaris
tctggagctcaatggtgttgggccc

SEQ ID NO: 183997 - DNA, 25 bp, Canis familiaris
tctgggccaaacgtgtcttccagtc

SEQ ID NO: 183998 - DNA, 25 bp, Canis familiaris
tctggcgccacaggagtgccatgtc

SEQ ID NO: 183999 - DNA, 25 bp, Canis familiaris
tctggagcccaggatggcagcgtcc

SEQ ID NO: 184000 - DNA, 25 bp, Canis familiaris
tctgggcatccggatgtgggaccgt

SEQ ID NO: 184001 - DNA, 25 bp, Canis familiaris
tctgacgtgccgcctggagaaacct

SEQ ID NO: 184002 - DNA, 25 bp, Canis familiaris
tctggtgatccgtctggtgtggacc

SEQ ID NO: 184003 - DNA, 25 bp, Canis familiaris
tcggcatctactttggcttgaacat

SEQ ID NO: 184004 - DNA, 25 bp, Canis familiaris
tcgtgatccactgtggtctagctgc

SEQ ID NO: 184005 - DNA, 25 bp, Canis familiaris
tcgtgcaccgcaagtgcttctaggc

SEQ ID NO: 184006 - DNA, 25 bp, Canis familiaris
tcgtccatcgcaaatgcttctagat

SEQ ID NO: 184007 - DNA, 25 bp, Canis familiaris
tcgtccaccatcacattcagtgtta

SEQ ID NO: 184008 - DNA, 25 bp, Canis familiaris
tcgtccacctcatcactggtgagaa

SEQ ID NO: 184009 - DNA, 25 bp, Canis familiaris
tcgtgaagcctatcctggtgatgtg

SEQ ID NO: 184010 - DNA, 25 bp, Canis familiaris
tcagatcaagggtacctgttaggga

SEQ ID NO: 184011 - DNA, 25 bp, Canis familiaris
tcttagctgggtgactttggggcaa

SEQ ID NO: 184012 - DNA, 25 bp, Canis familiaris
tctgctacggttgaatttctgtgcg

SEQ ID NO: 184013 - DNA, 25 bp, Canis familiaris
tctgcccgggtggactttttatttg

SEQ ID NO: 184014 - DNA, 25 bp, Canis familiaris
tctgcaaccggggagtaaattaatt

SEQ ID NO: 184015 - DNA, 25 bp, Canis familiaris
ttaaaagggatgtggacagttttca

SEQ ID NO: 184016 - DNA, 25 bp, Canis familiaris
tctctacaaaggaatatggacgtta

SEQ ID NO: 184017 - DNA, 25 bp, Canis familiaris
tttgtttggggatggactgaatgag

SEQ ID NO: 184018 - DNA, 25 bp, Canis familiaris
tctttttgggtattggagtcctggg

SEQ ID NO: 184019 - DNA, 25 bp, Canis familiaris
tctgatttccagctttgggtcgggc

SEQ ID NO: 184020 - DNA, 25 bp, Canis familiaris
tctttggtcagcttttaaagggcgg

SEQ ID NO: 184021 - DNA, 25 bp, Canis familiaris
ttgttgggagcgtgaaaggaggagg

SEQ ID NO: 184022 - DNA, 25 bp, Canis familiaris
tcggtggggcgtgttgaggggcgca

SEQ ID NO: 184023 - DNA, 25 bp, Canis familiaris
tcggctcgggggagcgagggggacg

SEQ ID NO: 184024 - DNA, 25 bp, Canis familiaris
tcggccgcagtggagctaggggggc

SEQ ID NO: 184025 - DNA, 25 bp, Canis familiaris
tcggcggccatggagttgggcgagc

SEQ ID NO: 184026 - DNA, 25 bp, Canis familiaris
tctggccgcctcgtttgggcggcaa

SEQ ID NO: 184027 - DNA, 25 bp, Canis familiaris
tctggccaatccctttgggcctata

SEQ ID NO: 184028 - DNA, 25 bp, Canis familiaris
tctggacaacttcccaaggccatga

SEQ ID NO: 184029 - DNA, 25 bp, Canis familiaris
tctggaccagcctctgaaggttatt

SEQ ID NO: 184030 - DNA, 25 bp, Canis familiaris
tctctcaacagggtaattggttttc

SEQ ID NO: 184031 - DNA, 25 bp, Canis familiaris
tctgtcaacgtgggacctccattac

SEQ ID NO: 184032 - DNA, 25 bp, Canis familiaris
tcgtcaccgtgggtcgtcaaatcga

SEQ ID NO: 184033 - DNA, 25 bp, Canis familiaris
tcgtccgcggggaaatcgacacggc

SEQ ID NO: 184034 - DNA, 25 bp, Canis familiaris
tcgtcccgcggagactgcagggaac

SEQ ID NO: 184035 - DNA, 25 bp, Canis familiaris
tcgtccccaggcactgagtgggaac

SEQ ID NO: 184036 - DNA, 25 bp, Canis familiaris
tcgtccagggaccactgacggaggg

SEQ ID NO: 184037 - DNA, 25 bp, Canis familiaris
tcgtccgggctccagaggaggggga

SEQ ID NO: 184038 - DNA, 25 bp, Canis familiaris
tcgtccgacctgggtataggggcga

SEQ ID NO: 184039 - DNA, 25 bp, Canis familiaris
tctgtccgtttgccggtcgtgggcg

SEQ ID NO: 184040 - DNA, 25 bp, Canis familiaris
tctgtccggttgagtcttgtagtga

SEQ ID NO: 184041 - DNA, 25 bp, Canis familiaris
tcgtcatcgagccttttgctgttag

SEQ ID NO: 184042 - DNA, 25 bp, Canis familiaris
tcggtgccacgcatcttcatgaagg

SEQ ID NO: 184043 - DNA, 25 bp, Canis familiaris
tctgtggagcagccttctatctaag

SEQ ID NO: 184044 - DNA, 25 bp, Canis familiaris
tctgtagcatgcatcattccttggc

SEQ ID NO: 184045 - DNA, 25 bp, Canis familiaris
tctggcagtgctaatatcgcctccc

SEQ ID NO: 184046 - DNA, 25 bp, Canis familiaris
tctgggtcagaattcagttccccct

SEQ ID NO: 184047 - DNA, 25 bp, Canis familiaris
tcttgggagcaagatttcccccagc

SEQ ID NO: 184048 - DNA, 25 bp, Canis familiaris
tcttggggcaagattcggcccaccg

SEQ ID NO: 184049 - DNA, 25 bp, Canis familiaris
tcgtggggatgtattcgctctgcca

SEQ ID NO: 184050 - DNA, 25 bp, Canis familiaris
tcgggggatgtcagtcccatgtgtc

SEQ ID NO: 184051 - DNA, 25 bp, Canis familiaris
tcggggagtttcttcacagtgtgac

SEQ ID NO: 184052 - DNA, 25 bp, Canis familiaris
tctctggtttttttaagttgatctg

SEQ ID NO: 184053 - DNA, 25 bp, Canis familiaris
tcgtgcgtttgtgttgtgtgttgtt

SEQ ID NO: 184054 - DNA, 25 bp, Canis familiaris
tcggcattaatccgtttatgtgatg

SEQ ID NO: 184055 - DNA, 25 bp, Canis familiaris
tctgagatgatgctccggtccagga

SEQ ID NO: 184056 - DNA, 25 bp, Canis familiaris
tctggatatagggctttggaggaag

SEQ ID NO: 184057 - DNA, 25 bp, Canis familiaris
tctgacagtaggtcccatgggctga

SEQ ID NO: 184058 - DNA, 25 bp, Canis familiaris
tctgacggggatgctcacttgtcat

SEQ ID NO: 184059 - DNA, 25 bp, Canis familiaris
tcgtcgagagtgcccttcagatgaa

SEQ ID NO: 184060 - DNA, 25 bp, Canis familiaris
tcgtcgagagtgcccttcagatgaa

SEQ ID NO: 184061 - DNA, 25 bp, Canis familiaris
tcgtcgagagtgcccttcagatgaa

SEQ ID NO: 184062 - DNA, 25 bp, Canis familiaris
tcgtcctggttccccataagaaggt

SEQ ID NO: 184063 - DNA, 25 bp, Canis familiaris
tcgtcctggagcggatgcgctacga

SEQ ID NO: 184064 - DNA, 25 bp, Canis familiaris
tcgtctctgtgaccgggacatcaga

SEQ ID NO: 184065 - DNA, 25 bp, Canis familiaris
tcggcatcgtggagggcctcatgac

SEQ ID NO: 184066 - DNA, 25 bp, Canis familiaris
tcggccagatggtgaccaagaccat

SEQ ID NO: 184067 - DNA, 25 bp, Canis familiaris
tcggcacgaggaaatatcaaaacta

SEQ ID NO: 184068 - DNA, 25 bp, Canis familiaris
tcggcacgagggaatctgaaactgt

SEQ ID NO: 184069 - DNA, 25 bp, Canis familiaris
tcgtggcaggggaaacagcaacatg

SEQ ID NO: 184070 - DNA, 25 bp, Canis familiaris
tcgtcgcagagcctcttacagacta

SEQ ID NO: 184071 - DNA, 25 bp, Canis familiaris
tcgtccaataaatacgatctcacga

SEQ ID NO: 184072 - DNA, 25 bp, Canis familiaris
tctgtccctaataaaagatccagca

SEQ ID NO: 184073 - DNA, 25 bp, Canis familiaris
tcgtcctcttcatacaatgcctgac

SEQ ID NO: 184074 - DNA, 25 bp, Canis familiaris
tcgtccgatttctcactgtgatgat

SEQ ID NO: 184075 - DNA, 25 bp, Canis familiaris
tcgtgtaggtgattcccttgttcca

SEQ ID NO: 184076 - DNA, 25 bp, Canis familiaris
tcggtgatggtattgctctggattt

SEQ ID NO: 184077 - DNA, 25 bp, Canis familiaris
tcggctgtattaatcacgcgatgtt

SEQ ID NO: 184078 - DNA, 25 bp, Canis familiaris
tctggttcttcaactctgcgaagta

SEQ ID NO: 184079 - DNA, 25 bp, Canis familiaris
tctgtcctctacttcgacgacagct

SEQ ID NO: 184080 - DNA, 25 bp, Canis familiaris
tctggcctgtgtttcaagggctgct

SEQ ID NO: 184081 - DNA, 25 bp, Canis familiaris
tcggccttggtctcaggatgtttcc

SEQ ID NO: 184082 - DNA, 25 bp, Canis familiaris
tcattccacgtttccagaggtttcc

SEQ ID NO: 184083 - DNA, 25 bp, Canis familiaris
tctcggaggacctcgagggttccgc

SEQ ID NO: 184084 - DNA, 25 bp, Canis familiaris
tctgggggaagagcggggctctccc

SEQ ID NO: 184085 - DNA, 25 bp, Canis familiaris
tctagcggggagtgtagtcctttcc

SEQ ID NO: 184086 - DNA, 25 bp, Canis familiaris
tctacctggggtctagctgtttttg

SEQ ID NO: 184087 - DNA, 25 bp, Canis familiaris
tctgcacttgggtcggtaggtatgt

SEQ ID NO: 184088 - DNA, 25 bp, Canis familiaris
tctgatttgttgcccgattgaagtg

SEQ ID NO: 184089 - DNA, 25 bp, Canis familiaris
tctttccggacccattcaagtttga

SEQ ID NO: 184090 - DNA, 25 bp, Canis familiaris
tcttgttcgggtcttgacgtttcgg

SEQ ID NO: 184091 - DNA, 25 bp, Canis familiaris
tctggtcacgacatatttaattttc

SEQ ID NO: 184092 - DNA, 25 bp, Canis familiaris
tctggcattgccttttttgacattt

SEQ ID NO: 184093 - DNA, 25 bp, Canis familiaris
tctgtgtatcacatctttatccatt

SEQ ID NO: 184094 - DNA, 25 bp, Canis familiaris
tctgtgggattgctcctatccattt

SEQ ID NO: 184095 - DNA, 25 bp, Canis familiaris
tcggacatcctgctccaatagattt

SEQ ID NO: 184096 - DNA, 25 bp, Canis familiaris
tctggttgcctcatccagtagtctc

SEQ ID NO: 184097 - DNA, 25 bp, Canis familiaris
tctgtcttcggaccaggtagattcg

SEQ ID NO: 184098 - DNA, 25 bp, Canis familiaris
tctgcgtcgtcccggagaaattcga

SEQ ID NO: 184099 - DNA, 25 bp, Canis familiaris
tcggtgcgatactgatgatgaaatt

SEQ ID NO: 184100 - DNA, 25 bp, Canis familiaris
tcggtctgtagctgctgtagcactg

SEQ ID NO: 184101 - DNA, 25 bp, Canis familiaris
tcggctcttcactgcagaatgcgta

SEQ ID NO: 184102 - DNA, 25 bp, Canis familiaris
tctggcactatctttgacaacttcc

SEQ ID NO: 184103 - DNA, 25 bp, Canis familiaris
tctgtagcacactttgcacacctgt

SEQ ID NO: 184104 - DNA, 25 bp, Canis familiaris
tctagagaacagttcaagccttgaa

SEQ ID NO: 184105 - DNA, 25 bp, Canis familiaris
tcggagacctgctctggtctgtgaa

SEQ ID NO: 184106 - DNA, 25 bp, Canis familiaris
tcgtgagattcttgtctgtgtctgg

SEQ ID NO: 184107 - DNA, 25 bp, Canis familiaris
tcgtgtgattgggtctgctgtcaaa

SEQ ID NO: 184108 - DNA, 25 bp, Canis familiaris
tcgtgttgggctccatgcttagagt

SEQ ID NO: 184109 - DNA, 25 bp, Canis familiaris
tcgtgtgagggtccagactggacgg

SEQ ID NO: 184110 - DNA, 25 bp, Canis familiaris
tcggtggggctgtggctgaaggaga

SEQ ID NO: 184111 - DNA, 25 bp, Canis familiaris
tcggcaggggtgttggggagtggca

SEQ ID NO: 184112 - DNA, 25 bp, Canis familiaris
tcggaggaggtacggcctcctggcc

SEQ ID NO: 184113 - DNA, 25 bp, Canis familiaris
tctggagggtgtgggccacttcttc

SEQ ID NO: 184114 - DNA, 25 bp, Canis familiaris
tctgataggccaaggtgcccttctt

SEQ ID NO: 184115 - DNA, 25 bp, Canis familiaris
tctgatccgagaatggctactcctc

SEQ ID NO: 184116 - DNA, 25 bp, Canis familiaris
tctgtcctacttctgactttacttg

SEQ ID NO: 184117 - DNA, 25 bp, Canis familiaris
tctgtcctacttctgactttacttg

SEQ ID NO: 184118 - DNA, 25 bp, Canis familiaris
tctgtcctacttcttggaaacttta

SEQ ID NO: 184119 - DNA, 25 bp, Canis familiaris
tctgtcccctgtgtctgtgacacat

SEQ ID NO: 184120 - DNA, 25 bp, Canis familiaris
tctggctggctcgtgggtagaacat

SEQ ID NO: 184121 - DNA, 25 bp, Canis familiaris
tctggctgttcgcaggaatgttatt

SEQ ID NO: 184122 - DNA, 25 bp, Canis familiaris
tctggctttccggaagagacttctc

SEQ ID NO: 184123 - DNA, 25 bp, Canis familiaris
tctggcttctactgaagaactgtat

SEQ ID NO: 184124 - DNA, 25 bp, Canis familiaris
tctggtgtcttgggagaaactccga

SEQ ID NO: 184125 - DNA, 25 bp, Canis familiaris
tctggagtcttccgagggattcctg

SEQ ID NO: 184126 - DNA, 25 bp, Canis familiaris
tctggtttccggttgtgaacgttga

SEQ ID NO: 184127 - DNA, 25 bp, Canis familiaris
tctggtattactcgtgcgtacacgt

SEQ ID NO: 184128 - DNA, 25 bp, Canis familiaris
tctgttctatacactcgcctacagt

SEQ ID NO: 184129 - DNA, 25 bp, Canis familiaris
tctgatgatccaattctacggcccg

SEQ ID NO: 184130 - DNA, 25 bp, Canis familiaris
tctggatccagacttgggtgcctgc

SEQ ID NO: 184131 - DNA, 25 bp, Canis familiaris
tcgggatgagcactagggcagccac

SEQ ID NO: 184132 - DNA, 25 bp, Canis familiaris
tcgtgtgatgaatctgtgctggcca

SEQ ID NO: 184133 - DNA, 25 bp, Canis familiaris
tcgtggaagagggctcagtgcccaa

SEQ ID NO: 184134 - DNA, 25 bp, Canis familiaris
tcggctgaggacactaggcccagag

SEQ ID NO: 184135 - DNA, 25 bp, Canis familiaris
tcggccaggacttccacatggccac

SEQ ID NO: 184136 - DNA, 25 bp, Canis familiaris
tcggcacatggagcccagagagccc

SEQ ID NO: 184137 - DNA, 25 bp, Canis familiaris
tcgtgaatcacagccactgtgaccc

SEQ ID NO: 184138 - DNA, 25 bp, Canis familiaris
tctgaagacatcagccacattacac

SEQ ID NO: 184139 - DNA, 25 bp, Canis familiaris
tctgaattcacgagatctattaccg

SEQ ID NO: 184140 - DNA, 25 bp, Canis familiaris
tctgcatttccgatgtggtttcgct

SEQ ID NO: 184141 - DNA, 25 bp, Canis familiaris
tctgcaccccgttttgttttcagat

SEQ ID NO: 184142 - DNA, 25 bp, Canis familiaris
tctgaggtcggttgttgtctttcca

SEQ ID NO: 184143 - DNA, 25 bp, Canis familiaris
tctgaggtcggttgttgtctttcca

SEQ ID NO: 184144 - DNA, 25 bp, Canis familiaris
tctgaggtcggttgttgtctttcca

SEQ ID NO: 184145 - DNA, 25 bp, Canis familiaris
tctgaggtcggttgttgtctttcca

SEQ ID NO: 184146 - DNA, 25 bp, Canis familiaris
tctgggactgagaagtttggtttag

SEQ ID NO: 184147 - DNA, 25 bp, Canis familiaris
tctggccactgagagaatctgaggt

SEQ ID NO: 184148 - DNA, 25 bp, Canis familiaris
tctgtccctgcagacagttgaggtc

SEQ ID NO: 184149 - DNA, 25 bp, Canis familiaris
tctgtggaccggtcggtgggttggg

SEQ ID NO: 184150 - DNA, 25 bp, Canis familiaris
tcgggactaggtcggggagacttcg

SEQ ID NO: 184151 - DNA, 25 bp, Canis familiaris
tcgggacgacgacgggtgagggtgg

SEQ ID NO: 184152 - DNA, 25 bp, Canis familiaris
tcggggcccgggggatgaggaagag

SEQ ID NO: 184153 - DNA, 25 bp, Canis familiaris
tcgggcccggggcgagagagaaacg

SEQ ID NO: 184154 - DNA, 25 bp, Canis familiaris
tcgggcccgggagtgtatggacatg

SEQ ID NO: 184155 - DNA, 25 bp, Canis familiaris
tcgggtcggaggctgagaggctgca

SEQ ID NO: 184156 - DNA, 25 bp, Canis familiaris
tcgggctctgagtgactggagagga

SEQ ID NO: 184157 - DNA, 25 bp, Canis familiaris
tctggtcctgagctgactggtttgg

SEQ ID NO: 184158 - DNA, 25 bp, Canis familiaris
tctggtcctcatcccaggatgtatt

SEQ ID NO: 184159 - DNA, 25 bp, Canis familiaris
tctgggctcttggtgctcagttatt

SEQ ID NO: 184160 - DNA, 25 bp, Canis familiaris
tctgggctatgtctggcttttgtgg

SEQ ID NO: 184161 - DNA, 25 bp, Canis familiaris
tctgggccgtgatggtgtttgaggt

SEQ ID NO: 184162 - DNA, 25 bp, Canis familiaris
tctgtgtacctgtgcgttttgggca

SEQ ID NO: 184163 - DNA, 25 bp, Canis familiaris
tctagtgtttgctggtgttggtgaa

SEQ ID NO: 184164 - DNA, 25 bp, Canis familiaris
tctggctgtctttgagttttgttga

SEQ ID NO: 184165 - DNA, 25 bp, Canis familiaris
tcggttgtgtcgttgttcttctacc

SEQ ID NO: 184166 - DNA, 25 bp, Canis familiaris
tcggttgatgttttttccaccagtc

SEQ ID NO: 184167 - DNA, 25 bp, Canis familiaris
tctggtagtaactttctcccagcgt

SEQ ID NO: 184168 - DNA, 25 bp, Canis familiaris
ttggtcgctcgctcctctcctactt

SEQ ID NO: 184169 - DNA, 25 bp, Canis familiaris
tcggtggctccatcttggcctcact

SEQ ID NO: 184170 - DNA, 25 bp, Canis familiaris
tcggagtgtggatcctggccgacag

SEQ ID NO: 184171 - DNA, 25 bp, Canis familiaris
tcggagggcaggtgctggccaggat

SEQ ID NO: 184172 - DNA, 25 bp, Canis familiaris
tcggagggacccctcaaaggcatcc

SEQ ID NO: 184173 - DNA, 25 bp, Canis familiaris
tcggagggacccctccaaggcattc

SEQ ID NO: 184174 - DNA, 25 bp, Canis familiaris
tctggagggacagttcccacaggca

SEQ ID NO: 184175 - DNA, 25 bp, Canis familiaris
tctggaggtcacgtgacccagactg

SEQ ID NO: 184176 - DNA, 25 bp, Canis familiaris
tctggaggtcacgtgacccagactg

SEQ ID NO: 184177 - DNA, 25 bp, Canis familiaris
tcggaacacacggacccatatcgag

SEQ ID NO: 184178 - DNA, 25 bp, Canis familiaris
tcggaacacaaggagctcctctcaa

SEQ ID NO: 184179 - DNA, 25 bp, Canis familiaris
tcggggatgacaggatgctacttcc

SEQ ID NO: 184180 - DNA, 25 bp, Canis familiaris
tctgggtggacaacaccacctcggt

SEQ ID NO: 184181 - DNA, 25 bp, Canis familiaris
tctggaggggcactcacttctccag

SEQ ID NO: 184182 - DNA, 25 bp, Canis familiaris
tcgggattgtgcgcacattcccgct

SEQ ID NO: 184183 - DNA, 25 bp, Canis familiaris
tcgggtgtctcggtcatcatcaccc

SEQ ID NO: 184184 - DNA, 25 bp, Canis familiaris
tcggggcacgtggtcaacaggactc

SEQ ID NO: 184185 - DNA, 25 bp, Canis familiaris
tctgtggtgcacatgagatcaatca

SEQ ID NO: 184186 - DNA, 25 bp, Canis familiaris
tctggagagagcaaaacttctgtcc

SEQ ID NO: 184187 - DNA, 25 bp, Canis familiaris
tctctgcacaaaaaccttccactgc

SEQ ID NO: 184188 - DNA, 25 bp, Canis familiaris
tctggccaaaccccattgtctggcc

SEQ ID NO: 184189 - DNA, 25 bp, Canis familiaris
tctactacaacctcacagtttccag

SEQ ID NO: 184190 - DNA, 25 bp, Canis familiaris
tctactgaactcaacctagtttcca

SEQ ID NO: 184191 - DNA, 25 bp, Canis familiaris
tctgcagtaactacacctacttaaa

SEQ ID NO: 184192 - DNA, 25 bp, Canis familiaris
tctcaggagcaaagccgctatccca

SEQ ID NO: 184193 - DNA, 25 bp, Canis familiaris
tctgttgatgccaggccatgaccct

SEQ ID NO: 184194 - DNA, 25 bp, Canis familiaris
tctgattgactggaggccatcccac

SEQ ID NO: 184195 - DNA, 25 bp, Canis familiaris
tctgaacacagcgtggacatcctcc

SEQ ID NO: 184196 - DNA, 25 bp, Canis familiaris
tctggaacagctggagactcccttg

SEQ ID NO: 184197 - DNA, 25 bp, Canis familiaris
tctggacagtcggaagtcccctttg

SEQ ID NO: 184198 - DNA, 25 bp, Canis familiaris
tctggacaaggacagtggccaccca

SEQ ID NO: 184199 - DNA, 25 bp, Canis familiaris
tcggtacaaagccattagccacccc

SEQ ID NO: 184200 - DNA, 25 bp, Canis familiaris
tctggacccagagatactccaaccc

SEQ ID NO: 184201 - DNA, 25 bp, Canis familiaris
tctgttcccaatgataaccactgtc

SEQ ID NO: 184202 - DNA, 25 bp, Canis familiaris
tctgttttatagcacaagcccactc

SEQ ID NO: 184203 - DNA, 25 bp, Canis familiaris
tctgtttaatgatacgtgaccacta

SEQ ID NO: 184204 - DNA, 25 bp, Canis familiaris
tcagttaaatattgttgtaccatta

SEQ ID NO: 184205 - DNA, 25 bp, Canis familiaris
tctgtttcctattgttgtcacctaa

SEQ ID NO: 184206 - DNA, 25 bp, Canis familiaris
tctgcaattcgcacgtttcctgaaa

SEQ ID NO: 184207 - DNA, 25 bp, Canis familiaris
tctgtgacttgaaaactgttctgaa

SEQ ID NO: 184208 - DNA, 25 bp, Canis familiaris
tctggccttgagtgactgtccacaa

SEQ ID NO: 184209 - DNA, 25 bp, Canis familiaris
tctgggcgtgacagaatgtccctct

SEQ ID NO: 184210 - DNA, 25 bp, Canis familiaris
tctggtggaggtgggtatcccctgc

SEQ ID NO: 184211 - DNA, 25 bp, Canis familiaris
tctgttgcggacgggtgtcgccgtc

SEQ ID NO: 184212 - DNA, 25 bp, Canis familiaris
tctgttggcgagacggttgccctgt

SEQ ID NO: 184213 - DNA, 25 bp, Canis familiaris
tctggagacgcgaggttcccaggca

SEQ ID NO: 184214 - DNA, 25 bp, Canis familiaris
tcgggagagcgtggaggggccagtg

SEQ ID NO: 184215 - DNA, 25 bp, Canis familiaris
tcgggcaggctgagcatctggagga

SEQ ID NO: 184216 - DNA, 25 bp, Canis familiaris
tcggacgacgtgacacttgcaggca

SEQ ID NO: 184217 - DNA, 25 bp, Canis familiaris
tcggcacgaggggaattcggcacga

SEQ ID NO: 184218 - DNA, 25 bp, Canis familiaris
tcggaaagtgggctgacgacatcag

SEQ ID NO: 184219 - DNA, 25 bp, Canis familiaris
tcggagagagcgccgcgcttagacc

SEQ ID NO: 184220 - DNA, 25 bp, Canis familiaris
tctgggagaccaggctgtctcagac

SEQ ID NO: 184221 - DNA, 25 bp, Canis familiaris
tctgtgggaccattccattcaggaa

SEQ ID NO: 184222 - DNA, 25 bp, Canis familiaris
tctgtgggtcactaagctctggaaa

SEQ ID NO: 184223 - DNA, 25 bp, Canis familiaris
tctggaattctcaaggctgggaaac

SEQ ID NO: 184224 - DNA, 25 bp, Canis familiaris
tcggaggcttaaggagggcaggaca

SEQ ID NO: 184225 - DNA, 25 bp, Canis familiaris
tcggcacctagtcccatgggaggaa

SEQ ID NO: 184226 - DNA, 25 bp, Canis familiaris
tcggcacctgcgacagtcaggggtg

SEQ ID NO: 184227 - DNA, 25 bp, Canis familiaris
tcggaagccagaagcacgagtggga

SEQ ID NO: 184228 - DNA, 25 bp, Canis familiaris
tctggaagcccaagcggacaagtat

SEQ ID NO: 184229 - DNA, 25 bp, Canis familiaris
tctgggggccagaggatgaagctgc

SEQ ID NO: 184230 - DNA, 25 bp, Canis familiaris
tctggtgggccgtggtcaccatgac

SEQ ID NO: 184231 - DNA, 25 bp, Canis familiaris
tctggtggccggcggaatgctggcc

SEQ ID NO: 184232 - DNA, 25 bp, Canis familiaris
tctgtggaccccttggagagggccg

SEQ ID NO: 184233 - DNA, 25 bp, Canis familiaris
tctcgtgaccctcctctagggagga

SEQ ID NO: 184234 - DNA, 25 bp, Canis familiaris
tctggtcccatttcctagagtgggg

SEQ ID NO: 184235 - DNA, 25 bp, Canis familiaris
tctggttacttatgtagttgagatt

SEQ ID NO: 184236 - DNA, 25 bp, Canis familiaris
tctcctaacttagctgcacgtggtt

SEQ ID NO: 184237 - DNA, 25 bp, Canis familiaris
tctcgtaattcgggaccgacacttg

SEQ ID NO: 184238 - DNA, 25 bp, Canis familiaris
tctccatggaccggtacctgaacta

SEQ ID NO: 184239 - DNA, 25 bp, Canis familiaris
tctccagcaatgcgcagtccattaa

SEQ ID NO: 184240 - DNA, 25 bp, Canis familiaris
tctggcagatagctcacccatctga

SEQ ID NO: 184241 - DNA, 25 bp, Canis familiaris
tctggaatgatgttcagccacctga

SEQ ID NO: 184242 - DNA, 25 bp, Canis familiaris
tctggaggagccaagctgagcctgg

SEQ ID NO: 184243 - DNA, 25 bp, Canis familiaris
tctgaagaagccacaagtccgcggc

SEQ ID NO: 184244 - DNA, 25 bp, Canis familiaris
tctgaaggacacactaggcctcggc

SEQ ID NO: 184245 - DNA, 25 bp, Canis familiaris
tctggagagagtcccgaagcttctg

SEQ ID NO: 184246 - DNA, 25 bp, Canis familiaris
tcggagcggtggacgggtgtcagtc

SEQ ID NO: 184247 - DNA, 25 bp, Canis familiaris
tctgtgtcggggttggtgtgtggat

SEQ ID NO: 184248 - DNA, 25 bp, Canis familiaris
tctgtggcggtttctataggtgtat

SEQ ID NO: 184249 - DNA, 25 bp, Canis familiaris
tcggttgcattttctttggcagtat

SEQ ID NO: 184250 - DNA, 25 bp, Canis familiaris
tctgagtggcatctcctttgtcaaa

SEQ ID NO: 184251 - DNA, 25 bp, Canis familiaris
tctggatgaaccactttctaagcat

SEQ ID NO: 184252 - DNA, 25 bp, Canis familiaris
tctggagctcatgctttttctacac

SEQ ID NO: 184253 - DNA, 25 bp, Canis familiaris
tctggcgtcatcgtcattttcaagc

SEQ ID NO: 184254 - DNA, 25 bp, Canis familiaris
tctgtgccatacgtactcttcaagg

SEQ ID NO: 184255 - DNA, 25 bp, Canis familiaris
tctgtgtctcccctatcattaagag

SEQ ID NO: 184256 - DNA, 25 bp, Canis familiaris
tctggttcctctgacatattggcaa

SEQ ID NO: 184257 - DNA, 25 bp, Canis familiaris
tctgttcccctccagagatctggat

SEQ ID NO: 184258 - DNA, 25 bp, Canis familiaris
tctgttcatcccacggcgtggcaac

SEQ ID NO: 184259 - DNA, 25 bp, Canis familiaris
tcatgttaccaacttccgggttctc

SEQ ID NO: 184260 - DNA, 25 bp, Canis familiaris
tctgcttataatttagccagggttt

SEQ ID NO: 184261 - DNA, 25 bp, Canis familiaris
tctgttgatattgtttcggcaaatt

SEQ ID NO: 184262 - DNA, 25 bp, Canis familiaris
tctgcaggaagtgtttcttgcccac

SEQ ID NO: 184263 - DNA, 25 bp, Canis familiaris
tctggcgacagttttccttctcatc

SEQ ID NO: 184264 - DNA, 25 bp, Canis familiaris
tcggcgatggttttcctttattttg

SEQ ID NO: 184265 - DNA, 25 bp, Canis familiaris
tctgggaggttctttctctttttat

SEQ ID NO: 184266 - DNA, 25 bp, Canis familiaris
tctgagagacgtgtttccttttttt

SEQ ID NO: 184267 - DNA, 25 bp, Canis familiaris
tttcccgttttcactttgtgtgttg

SEQ ID NO: 184268 - DNA, 25 bp, Canis familiaris
tcactttggtttgcccattagggtt

SEQ ID NO: 184269 - DNA, 25 bp, Canis familiaris
tcacttttttgtgtccttggaaaat

SEQ ID NO: 184270 - DNA, 25 bp, Canis familiaris
tcagtttcttttgctccagaggaat

SEQ ID NO: 184271 - DNA, 25 bp, Canis familiaris
tctgttgttttgccctacaagaacc

SEQ ID NO: 184272 - DNA, 25 bp, Canis familiaris
tctgttgtttgccctacaaaaccca

SEQ ID NO: 184273 - DNA, 25 bp, Canis familiaris
tcttcccttgtttacaaaaccatag

SEQ ID NO: 184274 - DNA, 25 bp, Canis familiaris
tctctcctatttaccagaaaacccg

SEQ ID NO: 184275 - DNA, 25 bp, Canis familiaris
tctgtcactgttcccggaagcacag

SEQ ID NO: 184276 - DNA, 25 bp, Canis familiaris
tctggcctgttctctgaatctgcca

SEQ ID NO: 184277 - DNA, 25 bp, Canis familiaris
tcggccttctcttgataatcagcac

SEQ ID NO: 184278 - DNA, 25 bp, Canis familiaris
tctggcatgctaactagttacgcga

SEQ ID NO: 184279 - DNA, 25 bp, Canis familiaris
tctggctcttcacagtttggcaacc

SEQ ID NO: 184280 - DNA, 25 bp, Canis familiaris
tcaaccttgagccaggggccaaacc

SEQ ID NO: 184281 - DNA, 25 bp, Canis familiaris
tcaagccattgattcgggggaacag

SEQ ID NO: 184282 - DNA, 25 bp, Canis familiaris
tcaaccttagccaccatggacatcg

SEQ ID NO: 184283 - DNA, 25 bp, Canis familiaris
tcggccttgaccaccagtggaagat

SEQ ID NO: 184284 - DNA, 25 bp, Canis familiaris
tctgcccattccagccttgggaaat

SEQ ID NO: 184285 - DNA, 25 bp, Canis familiaris
tctgcccttggcattcttaggtggt

SEQ ID NO: 184286 - DNA, 25 bp, Canis familiaris
tctgacactttcacttttgcagatt

SEQ ID NO: 184287 - DNA, 25 bp, Canis familiaris
tctgtacatttgggtcctctagagt

SEQ ID NO: 184288 - DNA, 25 bp, Canis familiaris
tctggacttggttgtccctgggtgt

SEQ ID NO: 184289 - DNA, 25 bp, Canis familiaris
tcggagctggaggtgttcctggagc

SEQ ID NO: 184290 - DNA, 25 bp, Canis familiaris
tctggcagtgggctttctggtgccc

SEQ ID NO: 184291 - DNA, 25 bp, Canis familiaris
tcggcacgaggcaagactctggtcc

SEQ ID NO: 184292 - DNA, 25 bp, Canis familiaris
tctggaaaggcttgatcgtcctcac

SEQ ID NO: 184293 - DNA, 25 bp, Canis familiaris
tctggaagggctggatcctactccc

SEQ ID NO: 184294 - DNA, 25 bp, Canis familiaris
tctggcagagtgacatcgttctccc

SEQ ID NO: 184295 - DNA, 25 bp, Canis familiaris
tctgcagctggacacattttcctcg

SEQ ID NO: 184296 - DNA, 25 bp, Canis familiaris
tctggttttactttgtcttcatgaa

SEQ ID NO: 184297 - DNA, 25 bp, Canis familiaris
tctgggtatagagcctacattagaa

SEQ ID NO: 184298 - DNA, 25 bp, Canis familiaris
tctgggggtgatgcccgagtagacc

SEQ ID NO: 184299 - DNA, 25 bp, Canis familiaris
tctgggcggttgcagccgtgtatga

SEQ ID NO: 184300 - DNA, 25 bp, Canis familiaris
tcggccagaggtccagcagtggtat

SEQ ID NO: 184301 - DNA, 25 bp, Canis familiaris
tcggccagaggtccagcagtggtat

SEQ ID NO: 184302 - DNA, 25 bp, Canis familiaris
tcggccagaggtccagcagtggtat

SEQ ID NO: 184303 - DNA, 25 bp, Canis familiaris
tcggccagaggtccagcagtggtat

SEQ ID NO: 184304 - DNA, 25 bp, Canis familiaris
tctgtccagggtgcacagtgtccag

SEQ ID NO: 184305 - DNA, 25 bp, Canis familiaris
tctgggcaagaagcacagttggcag

SEQ ID NO: 184306 - DNA, 25 bp, Canis familiaris
tctggtatgacatttagtttgagag

SEQ ID NO: 184307 - DNA, 25 bp, Canis familiaris
tctggcttgacaatctacatggaat

SEQ ID NO: 184308 - DNA, 25 bp, Canis familiaris
tctgacaatccactcatactctcaa

SEQ ID NO: 184309 - DNA, 25 bp, Canis familiaris
tctgatatatgccattgctctcgct

SEQ ID NO: 184310 - DNA, 25 bp, Canis familiaris
tctgtatatgctaactccgttgctc

SEQ ID NO: 184311 - DNA, 25 bp, Canis familiaris
tctgtagcttctacccgtggtatga

SEQ ID NO: 184312 - DNA, 25 bp, Canis familiaris
tctgtgagattaatcagccctcggg

SEQ ID NO: 184313 - DNA, 25 bp, Canis familiaris
tctggatgagtctcctctccaggga

SEQ ID NO: 184314 - DNA, 25 bp, Canis familiaris
tctgtgaatgtctccgtcaaggatg

SEQ ID NO: 184315 - DNA, 25 bp, Canis familiaris
tctgtgaatgtctccttcatgaatg

SEQ ID NO: 184316 - DNA, 25 bp, Canis familiaris
tctgtgtatctctcacgaatgaata

SEQ ID NO: 184317 - DNA, 25 bp, Canis familiaris
tctgtgtgtctctcctgaataaata

SEQ ID NO: 184318 - DNA, 25 bp, Canis familiaris
tctgtagttactctgatgatagcca

SEQ ID NO: 184319 - DNA, 25 bp, Canis familiaris
tctgtggttccatggtatccagcct

SEQ ID NO: 184320 - DNA, 25 bp, Canis familiaris
tctgggatccgctgagaatccacga

SEQ ID NO: 184321 - DNA, 25 bp, Canis familiaris
tctgcaggtccctgatgaacccagg

SEQ ID NO: 184322 - DNA, 25 bp, Canis familiaris
tctggggatccaatatgaccccagc

SEQ ID NO: 184323 - DNA, 25 bp, Canis familiaris
tctggctgggctatatcaactcccc

SEQ ID NO: 184324 - DNA, 25 bp, Canis familiaris
tctgtgctggtcttttttaccccag

SEQ ID NO: 184325 - DNA, 25 bp, Canis familiaris
tctgtgtgtgactttattttcctaa

SEQ ID NO: 184326 - DNA, 25 bp, Canis familiaris
tctgtctgtgacatttggactgttg

SEQ ID NO: 184327 - DNA, 25 bp, Canis familiaris
tctgtcttactgttgaaatcttatg

SEQ ID NO: 184328 - DNA, 25 bp, Canis familiaris
tctgaggaacgagacattcatagtg

SEQ ID NO: 184329 - DNA, 25 bp, Canis familiaris
tctgcagtcaggcccgaattcaaat

SEQ ID NO: 184330 - DNA, 25 bp, Canis familiaris
tctgcaaattgctggtggtcatgaa

SEQ ID NO: 184331 - DNA, 25 bp, Canis familiaris
tctgagaattcttattgccctgaag

SEQ ID NO: 184332 - DNA, 25 bp, Canis familiaris
tctgatgaatcttaactcctgtttt

SEQ ID NO: 184333 - DNA, 25 bp, Canis familiaris
tctgatgaatcttaactcctgtttt

SEQ ID NO: 184334 - DNA, 25 bp, Canis familiaris
tctgatggtcgggaattctggatta

SEQ ID NO: 184335 - DNA, 25 bp, Canis familiaris
tcatgttgttggaaatggcacgatt

SEQ ID NO: 184336 - DNA, 25 bp, Canis familiaris
tctgtgtttgaaatatgtgcatatg

SEQ ID NO: 184337 - DNA, 25 bp, Canis familiaris
tctggtcacagatggcttgataaca

SEQ ID NO: 184338 - DNA, 25 bp, Canis familiaris
tctggtctttcggcttgtcaagagc

SEQ ID NO: 184339 - DNA, 25 bp, Canis familiaris
tcggttctacgagggtcctgagctg

SEQ ID NO: 184340 - DNA, 25 bp, Canis familiaris
tctgttcctacggggactcatgcac

SEQ ID NO: 184341 - DNA, 25 bp, Canis familiaris
tctgtctccaagccacggagtcagt

SEQ ID NO: 184342 - DNA, 25 bp, Canis familiaris
tctgtgccgacaccaggatgagtga

SEQ ID NO: 184343 - DNA, 25 bp, Canis familiaris
tctgagcccaagcctatgaccatag

SEQ ID NO: 184344 - DNA, 25 bp, Canis familiaris
tctgagccaaagcctatgacaatag

SEQ ID NO: 184345 - DNA, 25 bp, Canis familiaris
tctgacctatacttaaattactggc

SEQ ID NO: 184346 - DNA, 25 bp, Canis familiaris
tctgacacgtacttagagcactcct

SEQ ID NO: 184347 - DNA, 25 bp, Canis familiaris
tctgcttagttcttagtatctgcct

SEQ ID NO: 184348 - DNA, 25 bp, Canis familiaris
tctgtattggtccaggctcattcct

SEQ ID NO: 184349 - DNA, 25 bp, Canis familiaris
tctgattttgtgcagcttttcctcc

SEQ ID NO: 184350 - DNA, 25 bp, Canis familiaris
tctgtttctgagtaactgatttctc

SEQ ID NO: 184351 - DNA, 25 bp, Canis familiaris
tctgtttctgggacctaaacccaat

SEQ ID NO: 184352 - DNA, 25 bp, Canis familiaris
tctggccatctgcagacccaaggcc

SEQ ID NO: 184353 - DNA, 25 bp, Canis familiaris
tcttgccatttgcaacgacatggtt

SEQ ID NO: 184354 - DNA, 25 bp, Canis familiaris
tctctctgaatcctaagggctggtc

SEQ ID NO: 184355 - DNA, 25 bp, Canis familiaris
tcggctacagccaaagggcaggcca

SEQ ID NO: 184356 - DNA, 25 bp, Canis familiaris
tcggcaagctgccttttgagcaggc

SEQ ID NO: 184357 - DNA, 25 bp, Canis familiaris
tcggcagagctccttaattctctcc

SEQ ID NO: 184358 - DNA, 25 bp, Canis familiaris
tcggagaggcctcagtatcgcagcc

SEQ ID NO: 184359 - DNA, 25 bp, Canis familiaris
tcggagcaggacacagggcagatgc

SEQ ID NO: 184360 - DNA, 25 bp, Canis familiaris
tcggatcaggccagggacaggctcg

SEQ ID NO: 184361 - DNA, 25 bp, Canis familiaris
tctgggcaggtgtgggcagcaggcc

SEQ ID NO: 184362 - DNA, 25 bp, Canis familiaris
tcggagcggctggcgggaaagcctc

SEQ ID NO: 184363 - DNA, 25 bp, Canis familiaris
tcggcacgagctggaggagtcaagc

SEQ ID NO: 184364 - DNA, 25 bp, Canis familiaris
tcggcacgagcagcggtttagcgcc

SEQ ID NO: 184365 - DNA, 25 bp, Canis familiaris
tctggccaagcatctgtgatttcat

SEQ ID NO: 184366 - DNA, 25 bp, Canis familiaris
tctggctcaggaagttgtccatcac

SEQ ID NO: 184367 - DNA, 25 bp, Canis familiaris
tctgagccagaacacgaccatcgga

SEQ ID NO: 184368 - DNA, 25 bp, Canis familiaris
tctggtcagagatacctggcctggt

SEQ ID NO: 184369 - DNA, 25 bp, Canis familiaris
tctggtctgtgaagagtcggccggg

SEQ ID NO: 184370 - DNA, 25 bp, Canis familiaris
tctgtcgtgtgagggtccagactgg

SEQ ID NO: 184371 - DNA, 25 bp, Canis familiaris
tctgtggggacagtgtgctcagagc

SEQ ID NO: 184372 - DNA, 25 bp, Canis familiaris
tctgattggccccagagccagagct

SEQ ID NO: 184373 - DNA, 25 bp, Canis familiaris
tctgtcccgatcttaccagatgcta

SEQ ID NO: 184374 - DNA, 25 bp, Canis familiaris
tctggcctccagttaccaatgtaga

SEQ ID NO: 184375 - DNA, 25 bp, Canis familiaris
tctgtgtcccgcatgaacaaataaa

SEQ ID NO: 184376 - DNA, 25 bp, Canis familiaris
tctgtcccctcactaagacactgat

SEQ ID NO: 184377 - DNA, 25 bp, Canis familiaris
tctgtcacgatatgctctagaccgt

SEQ ID NO: 184378 - DNA, 25 bp, Canis familiaris
tctgtacgacgagctgaaggcgccc

SEQ ID NO: 184379 - DNA, 25 bp, Canis familiaris
tctggacgaccagagtgctgggccc

SEQ ID NO: 184380 - DNA, 25 bp, Canis familiaris
tctggaagatccacaggctgactct

SEQ ID NO: 184381 - DNA, 25 bp, Canis familiaris
tctgctgggtccagcaggctttccc

SEQ ID NO: 184382 - DNA, 25 bp, Canis familiaris
tctggggtcaggccatggcttggcc

SEQ ID NO: 184383 - DNA, 25 bp, Canis familiaris
tctggaggcatgggcctgggaggcc

SEQ ID NO: 184384 - DNA, 25 bp, Canis familiaris
tctgttggcaggggtgggatggcgc

SEQ ID NO: 184385 - DNA, 25 bp, Canis familiaris
tcggcgtgtctgggtggagagagcc

SEQ ID NO: 184386 - DNA, 25 bp, Canis familiaris
tcggctgtgagcgggctgtgacaga

SEQ ID NO: 184387 - DNA, 25 bp, Canis familiaris
tctggcagtgaggtggggcgcaagg

SEQ ID NO: 184388 - DNA, 25 bp, Canis familiaris
tctggctgctggaggctttgacagg

SEQ ID NO: 184389 - DNA, 25 bp, Canis familiaris
tctggcgcagtgtgacgtttctggc

SEQ ID NO: 184390 - DNA, 25 bp, Canis familiaris
tctgggatggatggaggttctcttg

SEQ ID NO: 184391 - DNA, 25 bp, Canis familiaris
tctgggaggagctgtgttctctggg

SEQ ID NO: 184392 - DNA, 25 bp, Canis familiaris
tctggactgggcttgggaactggag

SEQ ID NO: 184393 - DNA, 25 bp, Canis familiaris
tcggagctgaggttgcttgcacgtg

SEQ ID NO: 184394 - DNA, 25 bp, Canis familiaris
tcggcaggcgagactgcctgaccca

SEQ ID NO: 184395 - DNA, 25 bp, Canis familiaris
tcggagggactggctgcagaccagc

SEQ ID NO: 184396 - DNA, 25 bp, Canis familiaris
tctgtgagggacgccaggatcgcgg

SEQ ID NO: 184397 - DNA, 25 bp, Canis familiaris
tctggaggaggcgcagcaggtcgtg

SEQ ID NO: 184398 - DNA, 25 bp, Canis familiaris
tctggggatggagggctggtctctg

SEQ ID NO: 184399 - DNA, 25 bp, Canis familiaris
tctggggagcgatggctggggctag

SEQ ID NO: 184400 - DNA, 25 bp, Canis familiaris
tctggggagctctttgttggggcag

SEQ ID NO: 184401 - DNA, 25 bp, Canis familiaris
tctcaggggcatgatcaggggggca

SEQ ID NO: 184402 - DNA, 25 bp, Canis familiaris
tctcgcgtggcacccaagcgaggtg

SEQ ID NO: 184403 - DNA, 25 bp, Canis familiaris
tctggctggacaacctgagctgcag

SEQ ID NO: 184404 - DNA, 25 bp, Canis familiaris
tctgggcagccagtgctcaaggcag

SEQ ID NO: 184405 - DNA, 25 bp, Canis familiaris
tctggagcctgctgagaagtgctga

SEQ ID NO: 184406 - DNA, 25 bp, Canis familiaris
tctggagccttgttatcttgtgacc

SEQ ID NO: 184407 - DNA, 25 bp, Canis familiaris
tctggctccactgtgttttactgcc

SEQ ID NO: 184408 - DNA, 25 bp, Canis familiaris
tctggccaaatgcttttttctccat

SEQ ID NO: 184409 - DNA, 25 bp, Canis familiaris
tctggccaggtgcttttctgtcaat

SEQ ID NO: 184410 - DNA, 25 bp, Canis familiaris
tcggcacgagctgatttattataat

SEQ ID NO: 184411 - DNA, 25 bp, Canis familiaris
tctgtgcctggggagcgttttttgt

SEQ ID NO: 184412 - DNA, 25 bp, Canis familiaris
tctgtgtctggggagcatttttgga

SEQ ID NO: 184413 - DNA, 25 bp, Canis familiaris
tctgttctgggtgcatttgcttgtt

SEQ ID NO: 184414 - DNA, 25 bp, Canis familiaris
tctgttttgagtgcttgtctccttc

SEQ ID NO: 184415 - DNA, 25 bp, Canis familiaris
tctgtatttgctcgcttatgtgtcc

SEQ ID NO: 184416 - DNA, 25 bp, Canis familiaris
tctgtacttgctctaatttactagt

SEQ ID NO: 184417 - DNA, 25 bp, Canis familiaris
tctggacttctggttacttatgtag

SEQ ID NO: 184418 - DNA, 25 bp, Canis familiaris
tctggtctccaggttttgtgtgttg

SEQ ID NO: 184419 - DNA, 25 bp, Canis familiaris
tctgcgttgttccttgttagtgttt

SEQ ID NO: 184420 - DNA, 25 bp, Canis familiaris
tctgtgttcatctgtatgttagtaa

SEQ ID NO: 184421 - DNA, 25 bp, Canis familiaris
tctgcttctatctgatgctgcgtag

SEQ ID NO: 184422 - DNA, 25 bp, Canis familiaris
tctggagctgtctgtgtgctgcagc

SEQ ID NO: 184423 - DNA, 25 bp, Canis familiaris
tctggagctgtggatgcagttgcac

SEQ ID NO: 184424 - DNA, 25 bp, Canis familiaris
tctggagctaggtatgtctcacagt

SEQ ID NO: 184425 - DNA, 25 bp, Canis familiaris
tctggagctgtgcattgccatcaac

SEQ ID NO: 184426 - DNA, 25 bp, Canis familiaris
tctgggcgtcaagtgctccaaggag

SEQ ID NO: 184427 - DNA, 25 bp, Canis familiaris
tctggacagacggactcaaaggatt

SEQ ID NO: 184428 - DNA, 25 bp, Canis familiaris
tcggcacgagcagccatgcaaaaga

SEQ ID NO: 184429 - DNA, 25 bp, Canis familiaris
tctggcaccacaccttctacaatga

SEQ ID NO: 184430 - DNA, 25 bp, Canis familiaris
tctacacggcattcctgtggcaatg

SEQ ID NO: 184431 - DNA, 25 bp, Canis familiaris
tctggcacctgcaacatcgaggaat

SEQ ID NO: 184432 - DNA, 25 bp, Canis familiaris
tctggacactgcaccagagctgcca

SEQ ID NO: 184433 - DNA, 25 bp, Canis familiaris
tctggcacgagtcccatggtgccac

SEQ ID NO: 184434 - DNA, 25 bp, Canis familiaris
tctggcaccagtgccagccacagcc

SEQ ID NO: 184435 - DNA, 25 bp, Canis familiaris
tctggcactagtgacccacagtcac

SEQ ID NO: 184436 - DNA, 25 bp, Canis familiaris
tctggacctgtatccccagtaactg

SEQ ID NO: 184437 - DNA, 25 bp, Canis familiaris
tctgggcgattttacccgtgaactc

SEQ ID NO: 184438 - DNA, 25 bp, Canis familiaris
tctggggttgtacccacctaacatt

SEQ ID NO: 184439 - DNA, 25 bp, Canis familiaris
tctgggggtgggaaccctcaaggat

SEQ ID NO: 184440 - DNA, 25 bp, Canis familiaris
tctgagtggcttttacatccccaag

SEQ ID NO: 184441 - DNA, 25 bp, Canis familiaris
tctgcaggatcttgaggaaccacca

SEQ ID NO: 184442 - DNA, 25 bp, Canis familiaris
tctgggtcttgggccatcatggcca

SEQ ID NO: 184443 - DNA, 25 bp, Canis familiaris
tctggaggcctgaccaccaggccat

SEQ ID NO: 184444 - DNA, 25 bp, Canis familiaris
tctggagagcctacacatacaccgc

SEQ ID NO: 184445 - DNA, 25 bp, Canis familiaris
tctggatgcgcaagcacacacacac

SEQ ID NO: 184446 - DNA, 25 bp, Canis familiaris
gagagagggagggaggactgcagga

SEQ ID NO: 184447 - DNA, 25 bp, Canis familiaris
tctggagcaggagccacagctgcca

SEQ ID NO: 184448 - DNA, 25 bp, Canis familiaris
tctggagagttaggctcgctgccca

SEQ ID NO: 184449 - DNA, 25 bp, Canis familiaris
tctgaagacttagtgaggctgcccc

SEQ ID NO: 184450 - DNA, 25 bp, Canis familiaris
tctgtagagtgtttgggtcctccgc

SEQ ID NO: 184451 - DNA, 25 bp, Canis familiaris
tctgtgtggattgggggctccatcc

SEQ ID NO: 184452 - DNA, 25 bp, Canis familiaris
tctgtgctggaagctttggccacca

SEQ ID NO: 184453 - DNA, 25 bp, Canis familiaris
tctgtgcaggaagtctgatgtggga

SEQ ID NO: 184454 - DNA, 25 bp, Canis familiaris
tctgtgaaccactgggggggctact

SEQ ID NO: 184455 - DNA, 25 bp, Canis familiaris
tctgtgcagcaccaaggggggggga

SEQ ID NO: 184456 - DNA, 25 bp, Canis familiaris
tctgtgcagccgcgcaggagagagg

SEQ ID NO: 184457 - DNA, 25 bp, Canis familiaris
tctgatcacccttgcatggacagca

SEQ ID NO: 184458 - DNA, 25 bp, Canis familiaris
tctgagcctcagggctgcagacacc

SEQ ID NO: 184459 - DNA, 25 bp, Canis familiaris
tctggccatcagagccagagcccgc

SEQ ID NO: 184460 - DNA, 25 bp, Canis familiaris
tctgtgctacagagccagtggctgc

SEQ ID NO: 184461 - DNA, 25 bp, Canis familiaris
tctacgacgggacggagctgcagga

SEQ ID NO: 184462 - DNA, 25 bp, Canis familiaris
tcacacgtcggggctggatgttgtc

SEQ ID NO: 184463 - DNA, 25 bp, Canis familiaris
tcacggttgagtggcggacgtccgg

SEQ ID NO: 184464 - DNA, 25 bp, Canis familiaris
tctcggttattagagggtcccctag

SEQ ID NO: 184465 - DNA, 25 bp, Canis familiaris
tctgggtacttgggtgaggtcctcc

SEQ ID NO: 184466 - DNA, 25 bp, Canis familiaris
tcttggttgcttgaaggacccggcc

SEQ ID NO: 184467 - DNA, 25 bp, Canis familiaris
tctgggtctcgtgaagtatccccca

SEQ ID NO: 184468 - DNA, 25 bp, Canis familiaris
tctcaagacggtcaagttcgccctc

SEQ ID NO: 184469 - DNA, 25 bp, Canis familiaris
tctcaagtctgggggttgtccccct

SEQ ID NO: 184470 - DNA, 25 bp, Canis familiaris
tctactgtctggtgagttggtgccc

SEQ ID NO: 184471 - DNA, 25 bp, Canis familiaris
tctgcactgtcggaaggcctgttga

SEQ ID NO: 184472 - DNA, 25 bp, Canis familiaris
tctagttctcccaggcgttaggatc

SEQ ID NO: 184473 - DNA, 25 bp, Canis familiaris
tcattgtttccctgtggttgggaac

SEQ ID NO: 184474 - DNA, 25 bp, Canis familiaris
tctctccttaactgcgggaggggtc

SEQ ID NO: 184475 - DNA, 25 bp, Canis familiaris
tcatctccaaacagtcgtcggggtg

SEQ ID NO: 184476 - DNA, 25 bp, Canis familiaris
tctctgacaaaacgggcctggtgga

SEQ ID NO: 184477 - DNA, 25 bp, Canis familiaris
tctgctacccactcggacatgggag

SEQ ID NO: 184478 - DNA, 25 bp, Canis familiaris
tctggaacctcaacaatgacacgga

SEQ ID NO: 184479 - DNA, 25 bp, Canis familiaris
tctggcgagttcgacagaacaaggt

SEQ ID NO: 184480 - DNA, 25 bp, Canis familiaris
tcggcacgctgcggagagtacaagg

SEQ ID NO: 184481 - DNA, 25 bp, Canis familiaris
tcggcaccagccaggtcagaaggga

SEQ ID NO: 184482 - DNA, 25 bp, Canis familiaris
tctggcaacaccccgtggaagggaa

SEQ ID NO: 184483 - DNA, 25 bp, Canis familiaris
tctgcagccaaccccagggggagga

SEQ ID NO: 184484 - DNA, 25 bp, Canis familiaris
tctgagccatgcacgtaggcggggt

SEQ ID NO: 184485 - DNA, 25 bp, Canis familiaris
tctggccagccctgagcagctggcc

SEQ ID NO: 184486 - DNA, 25 bp, Canis familiaris
tctgtccagcacagggcctggagca

SEQ ID NO: 184487 - DNA, 25 bp, Canis familiaris
tctgtcctgaccagagagctgccac

SEQ ID NO: 184488 - DNA, 25 bp, Canis familiaris
tctgtcgcttccagaagtgcctggc

SEQ ID NO: 184489 - DNA, 25 bp, Canis familiaris
tctgcacccaccatgaggaatctgg

SEQ ID NO: 184490 - DNA, 25 bp, Canis familiaris
tctgtcctcccaggatgctggagag

SEQ ID NO: 184491 - DNA, 25 bp, Canis familiaris
tctgtccatcgtgggccaggaaggg

SEQ ID NO: 184492 - DNA, 25 bp, Canis familiaris
tctgttgggggagatggagacagac

SEQ ID NO: 184493 - DNA, 25 bp, Canis familiaris
tctggtggccggtctggtagacaga

SEQ ID NO: 184494 - DNA, 25 bp, Canis familiaris
tctggcgccagtgtctaccagacaa

SEQ ID NO: 184495 - DNA, 25 bp, Canis familiaris
tctgtggcctggacacaaccagcac

SEQ ID NO: 184496 - DNA, 25 bp, Canis familiaris
tctgtacctgggaaatctcagtccc

SEQ ID NO: 184497 - DNA, 25 bp, Canis familiaris
tctgttccttggaacgctttgcctc

SEQ ID NO: 184498 - DNA, 25 bp, Canis familiaris
tctgcttccttggtataaatatccc

SEQ ID NO: 184499 - DNA, 25 bp, Canis familiaris
tctgcttcctatgaattcgagcatc

SEQ ID NO: 184500 - DNA, 25 bp, Canis familiaris
tctgttctctctcaatctgtgacta

SEQ ID NO: 184501 - DNA, 25 bp, Canis familiaris
tctgtttgctgtatatgctgaaatt

SEQ ID NO: 184502 - DNA, 25 bp, Canis familiaris
tctgatgtgatgcctgttgagtcag

SEQ ID NO: 184503 - DNA, 25 bp, Canis familiaris
tctgaggagtctgatgatgacatgg

SEQ ID NO: 184504 - DNA, 25 bp, Canis familiaris
tctggccctcatgtcagacatggag

SEQ ID NO: 184505 - DNA, 25 bp, Canis familiaris
tctggctggcttagtcggtggagcg

SEQ ID NO: 184506 - DNA, 25 bp, Canis familiaris
tctgcgggctcaatccggggagaga

SEQ ID NO: 184507 - DNA, 25 bp, Canis familiaris
tctgggctccatactgtcaggtgaa

SEQ ID NO: 184508 - DNA, 25 bp, Canis familiaris
tctgggtggcgcagtcacttaagca

SEQ ID NO: 184509 - DNA, 25 bp, Canis familiaris
tctcctgagggcagtttagaggctc

SEQ ID NO: 184510 - DNA, 25 bp, Canis familiaris
tctatctagggacacctgagtggct

SEQ ID NO: 184511 - DNA, 25 bp, Canis familiaris
tctctccggacacagactattactt

SEQ ID NO: 184512 - DNA, 25 bp, Canis familiaris
tctccacggaaccatcctaaattta

SEQ ID NO: 184513 - DNA, 25 bp, Canis familiaris
ttccagggaccatcctaaaatttat

SEQ ID NO: 184514 - DNA, 25 bp, Canis familiaris
ttccaggggacacatcctagaattt

SEQ ID NO: 184515 - DNA, 25 bp, Canis familiaris
tctccggggtatctccgtgaagcga

SEQ ID NO: 184516 - DNA, 25 bp, Canis familiaris
tctgcccgggtacatcaccgggtca

SEQ ID NO: 184517 - DNA, 25 bp, Canis familiaris
tctcctcacggtgtctactaacgac

SEQ ID NO: 184518 - DNA, 25 bp, Canis familiaris
tctgcctccagtgaattccttcact

SEQ ID NO: 184519 - DNA, 25 bp, Canis familiaris
tctggctctagttcacagtgctctt

SEQ ID NO: 184520 - DNA, 25 bp, Canis familiaris
tctggcactcagaatccatatgcta

SEQ ID NO: 184521 - DNA, 25 bp, Canis familiaris
tctgcacagccagtatgctgctctc

SEQ ID NO: 184522 - DNA, 25 bp, Canis familiaris
tctgcacagtgtgcgctgtgctccc

SEQ ID NO: 184523 - DNA, 25 bp, Canis familiaris
tctgcacaggtggcagcacacctcg

SEQ ID NO: 184524 - DNA, 25 bp, Canis familiaris
tctgcaacgtggtcatcatccgcag

SEQ ID NO: 184525 - DNA, 25 bp, Canis familiaris
tctgtgacgtcgtcactcccattac

SEQ ID NO: 184526 - DNA, 25 bp, Canis familiaris
tctggacttcctctacaattccaac

SEQ ID NO: 184527 - DNA, 25 bp, Canis familiaris
tctgggcttctataacacattacat

SEQ ID NO: 184528 - DNA, 25 bp, Canis familiaris
tctgggcttcatggaaactcttttg

SEQ ID NO: 184529 - DNA, 25 bp, Canis familiaris
tcggccatcactagaattacttttg

SEQ ID NO: 184530 - DNA, 25 bp, Canis familiaris
taagccccggatatagcacgtttat

SEQ ID NO: 184531 - DNA, 25 bp, Canis familiaris
taaccgggaggagaacgtgcgcttc

SEQ ID NO: 184532 - DNA, 25 bp, Canis familiaris
tacaaccgggcgagcaacgacgcct

SEQ ID NO: 184533 - DNA, 25 bp, Canis familiaris
taactacgagtagactactgagccc

SEQ ID NO: 184534 - DNA, 25 bp, Canis familiaris
tcaatttccgtagacgaaggccctc

SEQ ID NO: 184535 - DNA, 25 bp, Canis familiaris
tcattttaccagaagaccagggtcc

SEQ ID NO: 184536 - DNA, 25 bp, Canis familiaris
tctgtttagcaagaacctgtggatg

SEQ ID NO: 184537 - DNA, 25 bp, Canis familiaris
tctggggacaaggaccagctgacgg

SEQ ID NO: 184538 - DNA, 25 bp, Canis familiaris
tctgagaaggaaaacgagctggcgg

SEQ ID NO: 184539 - DNA, 25 bp, Canis familiaris
tctggtacgatagacaatgtgcccg

SEQ ID NO: 184540 - DNA, 25 bp, Canis familiaris
tctggaccagaagaagagaggcccc

SEQ ID NO: 184541 - DNA, 25 bp, Canis familiaris
tctgaggccgaagctggtgtgaccc

SEQ ID NO: 184542 - DNA, 25 bp, Canis familiaris
tctggatcccagagctgtggggccc

SEQ ID NO: 184543 - DNA, 25 bp, Canis familiaris
tctggctccctcccatgtgggagcc

SEQ ID NO: 184544 - DNA, 25 bp, Canis familiaris
tctggcccaccaactagtgacagca

SEQ ID NO: 184545 - DNA, 25 bp, Canis familiaris
tctggctctgccgtattggttcaga

SEQ ID NO: 184546 - DNA, 25 bp, Canis familiaris
tctgtcttgctttctgaggttcaat

SEQ ID NO: 184547 - DNA, 25 bp, Canis familiaris
tctgtctctctctgtgtgactatca

SEQ ID NO: 184548 - DNA, 25 bp, Canis familiaris
tctgtttctgcttgtagcctgtagt

SEQ ID NO: 184549 - DNA, 25 bp, Canis familiaris
tctgtgtatcttactgtgactccgt

SEQ ID NO: 184550 - DNA, 25 bp, Canis familiaris
tctggactctattctgtttcactga

SEQ ID NO: 184551 - DNA, 25 bp, Canis familiaris
tctggggctatctctttgcagtgaa

SEQ ID NO: 184552 - DNA, 25 bp, Canis familiaris
tctgcggcctattccagttcaagga

SEQ ID NO: 184553 - DNA, 25 bp, Canis familiaris
tctggtgactgtccttttgcacagg

SEQ ID NO: 184554 - DNA, 25 bp, Canis familiaris
tctggagatcgatcagtctggacag

SEQ ID NO: 184555 - DNA, 25 bp, Canis familiaris
tctgggaagatgtggcgtgacggcc

SEQ ID NO: 184556 - DNA, 25 bp, Canis familiaris
tctggtttgtgcctcacagggagct

SEQ ID NO: 184557 - DNA, 25 bp, Canis familiaris
tctggctggcttggtgccagggtct

SEQ ID NO: 184558 - DNA, 25 bp, Canis familiaris
tctgccttgctttggacagtggtcc

SEQ ID NO: 184559 - DNA, 25 bp, Canis familiaris
tctgcgtttccaagagatgtggcca

SEQ ID NO: 184560 - DNA, 25 bp, Canis familiaris
tctgtcagctgtgttgggggccaaa

SEQ ID NO: 184561 - DNA, 25 bp, Canis familiaris
tctctacctggtatgagggaaatga

SEQ ID NO: 184562 - DNA, 25 bp, Canis familiaris
tcttgacacagggtctggggtccgg

SEQ ID NO: 184563 - DNA, 25 bp, Canis familiaris
tctggagcacagctgtctgctggag

SEQ ID NO: 184564 - DNA, 25 bp, Canis familiaris
tctgggctgcagtttctctatatga

SEQ ID NO: 184565 - DNA, 25 bp, Canis familiaris
tctgagtctgcattttcccagtagc

SEQ ID NO: 184566 - DNA, 25 bp, Canis familiaris
tctgagatgctgtttcgtttatacg

SEQ ID NO: 184567 - DNA, 25 bp, Canis familiaris
tctgatgtgtgccttttgttcaaca

SEQ ID NO: 184568 - DNA, 25 bp, Canis familiaris
tctgagttgctcatttgttcactaa

SEQ ID NO: 184569 - DNA, 25 bp, Canis familiaris
tctgagtaccagactatcccactaa

SEQ ID NO: 184570 - DNA, 25 bp, Canis familiaris
tctgcattaggaccctaccctatga

SEQ ID NO: 184571 - DNA, 25 bp, Canis familiaris
tctgcagaaacctcttccctgaggt

SEQ ID NO: 184572 - DNA, 25 bp, Canis familiaris
tctggctattcctctgtagtgtatc

SEQ ID NO: 184573 - DNA, 25 bp, Canis familiaris
tctggtgcttcctgcggcaggagac

SEQ ID NO: 184574 - DNA, 25 bp, Canis familiaris
tctggtctcatggcctgtggaagac

SEQ ID NO: 184575 - DNA, 25 bp, Canis familiaris
tctggatgcggcgctgtcagtagca

SEQ ID NO: 184576 - DNA, 25 bp, Canis familiaris
tctggatcatggccctgatcaacct

SEQ ID NO: 184577 - DNA, 25 bp, Canis familiaris
tctgcgctaccggtgcaatgacacc

SEQ ID NO: 184578 - DNA, 25 bp, Canis familiaris
tctgcgctaccggtgcaatgacacc

SEQ ID NO: 184579 - DNA, 25 bp, Canis familiaris
tctgcgctaccggtgcaatgacacc

SEQ ID NO: 184580 - DNA, 25 bp, Canis familiaris
tctgcgctaccggtgcaatgacacc

SEQ ID NO: 184581 - DNA, 25 bp, Canis familiaris
tctgccggacgcgagcagatgaacg

SEQ ID NO: 184582 - DNA, 25 bp, Canis familiaris
tctgcagctggactgcatccgatcc

SEQ ID NO: 184583 - DNA, 25 bp, Canis familiaris
tctgagcttgagcctcacacattct

SEQ ID NO: 184584 - DNA, 25 bp, Canis familiaris
tctgatatcagtctcacgcattctt

SEQ ID NO: 184585 - DNA, 25 bp, Canis familiaris
tctgtccgggtcagcattgctgtga

SEQ ID NO: 184586 - DNA, 25 bp, Canis familiaris
tctgtccgcggtgcgaggagtgtgc

SEQ ID NO: 184587 - DNA, 25 bp, Canis familiaris
tctggctcccggagcagcaggtgtc

SEQ ID NO: 184588 - DNA, 25 bp, Canis familiaris
tctggctcctagcaccatgaagatc

SEQ ID NO: 184589 - DNA, 25 bp, Canis familiaris
tctgtgccccagcattcagggacga

SEQ ID NO: 184590 - DNA, 25 bp, Canis familiaris
tctggcacccagcctatgggggaag

SEQ ID NO: 184591 - DNA, 25 bp, Canis familiaris
tctgtccacccgcaggcggtagaga

SEQ ID NO: 184592 - DNA, 25 bp, Canis familiaris
tctgtgacactctggagagagcaaa

SEQ ID NO: 184593 - DNA, 25 bp, Canis familiaris
tctggcacaccaggggacacagcat

SEQ ID NO: 184594 - DNA, 25 bp, Canis familiaris
tctcccccgatgagaccagcaggga

SEQ ID NO: 184595 - DNA, 25 bp, Canis familiaris
tctccccgagaaacgagaagcagga

SEQ ID NO: 184596 - DNA, 25 bp, Canis familiaris
tctccccaacactgcatggaacgga

SEQ ID NO: 184597 - DNA, 25 bp, Canis familiaris
tctcccgaatccgggttcatcggac

SEQ ID NO: 184598 - DNA, 25 bp, Canis familiaris
tctcctttcatggggggttcctaat

SEQ ID NO: 184599 - DNA, 25 bp, Canis familiaris
tctggcttgttggtgtggtgcatcc

SEQ ID NO: 184600 - DNA, 25 bp, Canis familiaris
tctggtcataatctcttagcatccc

SEQ ID NO: 184601 - DNA, 25 bp, Canis familiaris
tctggtcaacgccattttccaccag

SEQ ID NO: 184602 - DNA, 25 bp, Canis familiaris
tctgggacaccttctgtaacaccaa

SEQ ID NO: 184603 - DNA, 25 bp, Canis familiaris
tctggagaggttcctggaccatgcc

SEQ ID NO: 184604 - DNA, 25 bp, Canis familiaris
tctgaagagggccgggacttgccac

SEQ ID NO: 184605 - DNA, 25 bp, Canis familiaris
tctgaagggacgggctgcgtgtgcc

SEQ ID NO: 184606 - DNA, 25 bp, Canis familiaris
tctgagcatcgtcctggagcggatg

SEQ ID NO: 184607 - DNA, 25 bp, Canis familiaris
tctgcagagctccctgagggtcagg

SEQ ID NO: 184608 - DNA, 25 bp, Canis familiaris
tctgagcagccggctgagggtctct

SEQ ID NO: 184609 - DNA, 25 bp, Canis familiaris
tctggcagagctggggtgaggcctc

SEQ ID NO: 184610 - DNA, 25 bp, Canis familiaris
tctgggcatctgtgcactgggccca

SEQ ID NO: 184611 - DNA, 25 bp, Canis familiaris
tctgagcgctttctcagtgggacaa

SEQ ID NO: 184612 - DNA, 25 bp, Canis familiaris
tctagtggtctcgcctggaggcaag

SEQ ID NO: 184613 - DNA, 25 bp, Canis familiaris
tctcaagtgttctccactgggtaat

SEQ ID NO: 184614 - DNA, 25 bp, Canis familiaris
tctgaaggctgtacccactgtgatt

SEQ ID NO: 184615 - DNA, 25 bp, Canis familiaris
tctgaatgttgtgtgccagcatcct

SEQ ID NO: 184616 - DNA, 25 bp, Canis familiaris
tctgtcttatgtgtcagccaccatc

SEQ ID NO: 184617 - DNA, 25 bp, Canis familiaris
tctgctatttgtgtcagcttcacac

SEQ ID NO: 184618 - DNA, 25 bp, Canis familiaris
tctgttatcaatttagcatctaccc

SEQ ID NO: 184619 - DNA, 25 bp, Canis familiaris
tctgtgttacatctacttccatggc

SEQ ID NO: 184620 - DNA, 25 bp, Canis familiaris
tctggtgtgacaactcacgtccaaa

SEQ ID NO: 184621 - DNA, 25 bp, Canis familiaris
tctgcgtggtacccacttacaagag

SEQ ID NO: 184622 - DNA, 25 bp, Canis familiaris
tctcctggtctaccccaaaggaata

SEQ ID NO: 184623 - DNA, 25 bp, Canis familiaris
tctccagggactccatccagaagtc

SEQ ID NO: 184624 - DNA, 25 bp, Canis familiaris
tcatccgtgaggcctacaagaagta

SEQ ID NO: 184625 - DNA, 25 bp, Canis familiaris
tctgacctgacacccagcaagaagg

SEQ ID NO: 184626 - DNA, 25 bp, Canis familiaris
tctgccctcaggttcaccttgagga

SEQ ID NO: 184627 - DNA, 25 bp, Canis familiaris
tctccagctatgctatgaccttagg

SEQ ID NO: 184628 - DNA, 25 bp, Canis familiaris
tctcacaccatccagtggacttcgg

SEQ ID NO: 184629 - DNA, 25 bp, Canis familiaris
tctgacatccacagagtgtcccgtg

SEQ ID NO: 184630 - DNA, 25 bp, Canis familiaris
tctgaacaagggtttccacgagccg

SEQ ID NO: 184631 - DNA, 25 bp, Canis familiaris
tctggaccttgtcctatttcgaccg

SEQ ID NO: 184632 - DNA, 25 bp, Canis familiaris
tctgaacctctgctctagattggag

SEQ ID NO: 184633 - DNA, 25 bp, Canis familiaris
tctgagactttgtcccagtgtacag

SEQ ID NO: 184634 - DNA, 25 bp, Canis familiaris
tctggactcttacctcagtggaagt

SEQ ID NO: 184635 - DNA, 25 bp, Canis familiaris
tctcggcctgtagctagcttaagtc

SEQ ID NO: 184636 - DNA, 25 bp, Canis familiaris
tctgcagtgacgacacctacttgta

SEQ ID NO: 184637 - DNA, 25 bp, Canis familiaris
tctgcagatccgaacacacatttgg

SEQ ID NO: 184638 - DNA, 25 bp, Canis familiaris
tctgagatctcgacttttcttgggg

SEQ ID NO: 184639 - DNA, 25 bp, Canis familiaris
tctgagctgcccggtttgcagtgag

SEQ ID NO: 184640 - DNA, 25 bp, Canis familiaris
tctgaggcctccatgttgatgctgg

SEQ ID NO: 184641 - DNA, 25 bp, Canis familiaris
tctgctgtaaccttgtgctgtgtag

SEQ ID NO: 184642 - DNA, 25 bp, Canis familiaris
tctgatgtgaacttctgctctgtga

SEQ ID NO: 184643 - DNA, 25 bp, Canis familiaris
tctgttcacacattcctgtgctgaa

SEQ ID NO: 184644 - DNA, 25 bp, Canis familiaris
tctgcttcatcgacgactgcatgga

SEQ ID NO: 184645 - DNA, 25 bp, Canis familiaris
tctgtgtgctcagcgccatgaagat

SEQ ID NO: 184646 - DNA, 25 bp, Canis familiaris
tctgtggtctggaccaggcagttgg

SEQ ID NO: 184647 - DNA, 25 bp, Canis familiaris
tctgtgtggggaaccgactgctgga

SEQ ID NO: 184648 - DNA, 25 bp, Canis familiaris
tctgatcagagccgacaccagacgt

SEQ ID NO: 184649 - DNA, 25 bp, Canis familiaris
tcttagagggacaagtggcgttcag

SEQ ID NO: 184650 - DNA, 25 bp, Canis familiaris
tctccaggggacaggaccgtgggtt

SEQ ID NO: 184651 - DNA, 25 bp, Canis familiaris
tctccccggatcgtgcgaacgggtg

SEQ ID NO: 184652 - DNA, 25 bp, Canis familiaris
tctcccactggcacctaaaaatcgt

SEQ ID NO: 184653 - DNA, 25 bp, Canis familiaris
tctccaccgagcggcgtgtaagagt

SEQ ID NO: 184654 - DNA, 25 bp, Canis familiaris
tctccaccgagcggcgtgtaggagt

SEQ ID NO: 184655 - DNA, 25 bp, Canis familiaris
tctccgccgatggccggtagtaaag

SEQ ID NO: 184656 - DNA, 25 bp, Canis familiaris
tctcctccgaggtgagctggtcgaa

SEQ ID NO: 184657 - DNA, 25 bp, Canis familiaris
tctcctcccaggtcgtggaacgaca

SEQ ID NO: 184658 - DNA, 25 bp, Canis familiaris
tctcttccaaggcgtgacacgggca

SEQ ID NO: 184659 - DNA, 25 bp, Canis familiaris
tctccccgagtacgagatagcaggg

SEQ ID NO: 184660 - DNA, 25 bp, Canis familiaris
tctccctcgtttctggagcaggggc

SEQ ID NO: 184661 - DNA, 25 bp, Canis familiaris
tcttcccgttcgtggagcaggagga

SEQ ID NO: 184662 - DNA, 25 bp, Canis familiaris
tctaagcccttgctctgggaggtaa

SEQ ID NO: 184663 - DNA, 25 bp, Canis familiaris
tctgagaccttcctgtgctgggaag

SEQ ID NO: 184664 - DNA, 25 bp, Canis familiaris
tctggaggctcccttgggacaagca

SEQ ID NO: 184665 - DNA, 25 bp, Canis familiaris
tctcgggaccgttggtgaccacggt

SEQ ID NO: 184666 - DNA, 25 bp, Canis familiaris
tctggggcacctctgagatggccat

SEQ ID NO: 184667 - DNA, 25 bp, Canis familiaris
tctgggccccgcgtagagggagatt

SEQ ID NO: 184668 - DNA, 25 bp, Canis familiaris
tctgctggcacttctttaggggtag

SEQ ID NO: 184669 - DNA, 25 bp, Canis familiaris
tctgcccacttgcttcaggggatat

SEQ ID NO: 184670 - DNA, 25 bp, Canis familiaris
tctgcattagggtttctcaagagaa

SEQ ID NO: 184671 - DNA, 25 bp, Canis familiaris
tctgtgcgacggtcgtccatcgaaa

SEQ ID NO: 184672 - DNA, 25 bp, Canis familiaris
tctgtctacggcaggctccggaaga

SEQ ID NO: 184673 - DNA, 25 bp, Canis familiaris
tctgtttccctgtgctctgggagaa

SEQ ID NO: 184674 - DNA, 25 bp, Canis familiaris
tctgttgaacctcggctttggcagt

SEQ ID NO: 184675 - DNA, 25 bp, Canis familiaris
tctgtcttgcctgagagctttgggt

SEQ ID NO: 184676 - DNA, 25 bp, Canis familiaris
tctggggccttttgctttgaggtgt

SEQ ID NO: 184677 - DNA, 25 bp, Canis familiaris
tctggtgcgcatatgtgatgagtgt

SEQ ID NO: 184678 - DNA, 25 bp, Canis familiaris
tctgtcctgttcatgatgtgtgtgt

SEQ ID NO: 184679 - DNA, 25 bp, Canis familiaris
tctgtcttgtcacctgtgtgtttgg

SEQ ID NO: 184680 - DNA, 25 bp, Canis familiaris
tctgtgtgggaccttatgcttgctg

SEQ ID NO: 184681 - DNA, 25 bp, Canis familiaris
tctggtcagaggcctttgctgtgaa

SEQ ID NO: 184682 - DNA, 25 bp, Canis familiaris
tctgttgaggtccacctgatgctaa

SEQ ID NO: 184683 - DNA, 25 bp, Canis familiaris
tctgttttgctttcctgatgctgga

SEQ ID NO: 184684 - DNA, 25 bp, Canis familiaris
tctgttttctcattagcatatctag

SEQ ID NO: 184685 - DNA, 25 bp, Canis familiaris
tctgtttacatatttgattctctga

SEQ ID NO: 184686 - DNA, 25 bp, Canis familiaris
tctggttgactatttattccaagac

SEQ ID NO: 184687 - DNA, 25 bp, Canis familiaris
tctggggagtgtttgctctccacat

SEQ ID NO: 184688 - DNA, 25 bp, Canis familiaris
tctgtgtgggttttccccgatttga

SEQ ID NO: 184689 - DNA, 25 bp, Canis familiaris
tctgggggattcttccacttgttga

SEQ ID NO: 184690 - DNA, 25 bp, Canis familiaris
tctgctgcagggtttattacgttta

SEQ ID NO: 184691 - DNA, 25 bp, Canis familiaris
tctgctggttgttgttttctttgtt

SEQ ID NO: 184692 - DNA, 25 bp, Canis familiaris
tctggtctttaggatttcttttatt

SEQ ID NO: 184693 - DNA, 25 bp, Canis familiaris
tctcgaatgttctgattacttgttt

SEQ ID NO: 184694 - DNA, 25 bp, Canis familiaris
tctgcagaatctgacagttcctctg

SEQ ID NO: 184695 - DNA, 25 bp, Canis familiaris
ttcaagttgttctgtggcctgtttg

SEQ ID NO: 184696 - DNA, 25 bp, Canis familiaris
tctaagtggttcctggttccatttt

SEQ ID NO: 184697 - DNA, 25 bp, Canis familiaris
tctctcgtttaccggttcaattgtt

SEQ ID NO: 184698 - DNA, 25 bp, Canis familiaris
tctgctcgtttgtgtcgagtcagat

SEQ ID NO: 184699 - DNA, 25 bp, Canis familiaris
tctgctcagatgatgaactaggatc

SEQ ID NO: 184700 - DNA, 25 bp, Canis familiaris
tctgcatccatgagtaataaataaa

SEQ ID NO: 184701 - DNA, 25 bp, Canis familiaris
tctgtgtcttttcatggaatagata

SEQ ID NO: 184702 - DNA, 25 bp, Canis familiaris
tctgtatttttggcaggcagctcaa

SEQ ID NO: 184703 - DNA, 25 bp, Canis familiaris
tctggatccttttcatggcaccatg

SEQ ID NO: 184704 - DNA, 25 bp, Canis familiaris
tctggtcatttttcaagccatgttt

SEQ ID NO: 184705 - DNA, 25 bp, Canis familiaris
tctgctacacttattagccttttta

SEQ ID NO: 184706 - DNA, 25 bp, Canis familiaris
tctgtcactcgttttagattttttt

SEQ ID NO: 184707 - DNA, 25 bp, Canis familiaris
tctgtcccgatttatagataacatg

SEQ ID NO: 184708 - DNA, 25 bp, Canis familiaris
tctgagcccccttctgagaaaataa

SEQ ID NO: 184709 - DNA, 25 bp, Canis familiaris
tctgtcgccccatctgagaagcaga

SEQ ID NO: 184710 - DNA, 25 bp, Canis familiaris
tctgtcacagccgcttgacaatgca

SEQ ID NO: 184711 - DNA, 25 bp, Canis familiaris
tctgtcccccaaatgacatctgcaa

SEQ ID NO: 184712 - DNA, 25 bp, Canis familiaris
tctgtctcctcttactactggaatt

SEQ ID NO: 184713 - DNA, 25 bp, Canis familiaris
tctgcttcctaatggactagattcc

SEQ ID NO: 184714 - DNA, 25 bp, Canis familiaris
tctgtctactaattggctctaaccc

SEQ ID NO: 184715 - DNA, 25 bp, Canis familiaris
tctgtctccaagtgccctatatcag

SEQ ID NO: 184716 - DNA, 25 bp, Canis familiaris
tctgttctgttgtgccctgaagaga

SEQ ID NO: 184717 - DNA, 25 bp, Canis familiaris
tctgtgtgcgttctcgccaagagga

SEQ ID NO: 184718 - DNA, 25 bp, Canis familiaris
tctgtgtggtatacctcaagaggaa

SEQ ID NO: 184719 - DNA, 25 bp, Canis familiaris
tctgtgatgcgtggtcctaaagtgt

SEQ ID NO: 184720 - DNA, 25 bp, Canis familiaris
tctgatatgctcgtgtccacaaggg

SEQ ID NO: 184721 - DNA, 25 bp, Canis familiaris
tctgctactgggccagccagaggac

SEQ ID NO: 184722 - DNA, 25 bp, Canis familiaris
ttcttagagggacaagtggcgttca

SEQ ID NO: 184723 - DNA, 25 bp, Canis familiaris
tcttccgagggttacagtggcttaa

SEQ ID NO: 184724 - DNA, 25 bp, Canis familiaris
tcttccgagggcacgagactttccc

SEQ ID NO: 184725 - DNA, 25 bp, Canis familiaris
tctcctctagggcgtatatttgtac

SEQ ID NO: 184726 - DNA, 25 bp, Canis familiaris
tctcctcttagggcgtataatttta

SEQ ID NO: 184727 - DNA, 25 bp, Canis familiaris
tcttcaattgggactgttaatttta

SEQ ID NO: 184728 - DNA, 25 bp, Canis familiaris
tcttcgtggggttttcgcagtttag

SEQ ID NO: 184729 - DNA, 25 bp, Canis familiaris
tctacctttatttttcctgtttgat

SEQ ID NO: 184730 - DNA, 25 bp, Canis familiaris
tctcctctttattgacttttgtttg

SEQ ID NO: 184731 - DNA, 25 bp, Canis familiaris
tctgtccaattgtgactgtaatttt

SEQ ID NO: 184732 - DNA, 25 bp, Canis familiaris
tctgtccagatttctcctttttatg

SEQ ID NO: 184733 - DNA, 25 bp, Canis familiaris
tctgccacaatcactccttttggct

SEQ ID NO: 184734 - DNA, 25 bp, Canis familiaris
tctgcccagcaatctcagcattttc

SEQ ID NO: 184735 - DNA, 25 bp, Canis familiaris
tctgctctccagtaatagttatgaa

SEQ ID NO: 184736 - DNA, 25 bp, Canis familiaris
tctgtccccttctgttattgaatca

SEQ ID NO: 184737 - DNA, 25 bp, Canis familiaris
tctgtcctcccagggttcattacaa

SEQ ID NO: 184738 - DNA, 25 bp, Canis familiaris
tctgctcctttcaggtgcctataaa

SEQ ID NO: 184739 - DNA, 25 bp, Canis familiaris
tctgtgcgttaaagtggctgtctac

SEQ ID NO: 184740 - DNA, 25 bp, Canis familiaris
tctgtgggtattcgaatctgctgct

SEQ ID NO: 184741 - DNA, 25 bp, Canis familiaris
tctgattcgatcggtggtctgtctt

SEQ ID NO: 184742 - DNA, 25 bp, Canis familiaris
tctacacaatcaagcggtcgacatt

SEQ ID NO: 184743 - DNA, 25 bp, Canis familiaris
tctccagcaagctgactccgactta

SEQ ID NO: 184744 - DNA, 25 bp, Canis familiaris
tctctgcgaatgtgacataactatt

SEQ ID NO: 184745 - DNA, 25 bp, Canis familiaris
tctgctgcgagaacgacatcgacat

SEQ ID NO: 184746 - DNA, 25 bp, Canis familiaris
tctgtgtgtgtgactatcataaata

SEQ ID NO: 184747 - DNA, 25 bp, Canis familiaris
tctggtgaggtctcaagcagaaatg

SEQ ID NO: 184748 - DNA, 25 bp, Canis familiaris
tctgctgggagcagccaaagcaaag

SEQ ID NO: 184749 - DNA, 25 bp, Canis familiaris
tctgcaagggcttacgggccaggtc

SEQ ID NO: 184750 - DNA, 25 bp, Canis familiaris
tctgaagaggaaggcggcccgggcc

SEQ ID NO: 184751 - DNA, 25 bp, Canis familiaris
tctgcagggcaaagggcccctggct

SEQ ID NO: 184752 - DNA, 25 bp, Canis familiaris
tctctgggaccagtggcccactaga

SEQ ID NO: 184753 - DNA, 25 bp, Canis familiaris
tctgcgggaatcttgtcgtcagcca

SEQ ID NO: 184754 - DNA, 25 bp, Canis familiaris
tctgcagcgcatctcaggttgtaca

SEQ ID NO: 184755 - DNA, 25 bp, Canis familiaris
tctgcatgcgaccataggcttggcc

SEQ ID NO: 184756 - DNA, 25 bp, Canis familiaris
tctgctgccagcattagcctggctc

SEQ ID NO: 184757 - DNA, 25 bp, Canis familiaris
tctgctgccagcattagcctggctc

SEQ ID NO: 184758 - DNA, 25 bp, Canis familiaris
tctgcccagcatctaagctgctcta

SEQ ID NO: 184759 - DNA, 25 bp, Canis familiaris
tctccaagatgcagcagaatggcta

SEQ ID NO: 184760 - DNA, 25 bp, Canis familiaris
tctctcacatatcccagactgggtc

SEQ ID NO: 184761 - DNA, 25 bp, Canis familiaris
tctgctccaaccagatcatgggctg

SEQ ID NO: 184762 - DNA, 25 bp, Canis familiaris
tctgctcagctctctaatatggcct

SEQ ID NO: 184763 - DNA, 25 bp, Canis familiaris
tctgtcagcctttggatgggccacc

SEQ ID NO: 184764 - DNA, 25 bp, Canis familiaris
tctgtgccctcttggagagcgtatc

SEQ ID NO: 184765 - DNA, 25 bp, Canis familiaris
tctgcattttcttggagaaatttaa

SEQ ID NO: 184766 - DNA, 25 bp, Canis familiaris
tctgattattcactgggaccttact

SEQ ID NO: 184767 - DNA, 25 bp, Canis familiaris
tctgcatgtattggctgtggtcctg

SEQ ID NO: 184768 - DNA, 25 bp, Canis familiaris
tctgtgctcactgtgtggtctgcac

SEQ ID NO: 184769 - DNA, 25 bp, Canis familiaris
tctgatgccgccatctgggatgaca

SEQ ID NO: 184770 - DNA, 25 bp, Canis familiaris
tctgattgtgccttcatggtagaca

SEQ ID NO: 184771 - DNA, 25 bp, Canis familiaris
tctgtggggcagacataccattccc

SEQ ID NO: 184772 - DNA, 25 bp, Canis familiaris
tctgtgtgaggcttaccctaccaga

SEQ ID NO: 184773 - DNA, 25 bp, Canis familiaris
tctgtggctgtgatcaccctacaat

SEQ ID NO: 184774 - DNA, 25 bp, Canis familiaris
tctgactgtgaggtcaccctgacct

SEQ ID NO: 184775 - DNA, 25 bp, Canis familiaris
tctgagaggagaaagcacccacccc

SEQ ID NO: 184776 - DNA, 25 bp, Canis familiaris
tctgaggagagcaaggcagccttcc

SEQ ID NO: 184777 - DNA, 25 bp, Canis familiaris
tctgcagcgaggatgaagctttctc

SEQ ID NO: 184778 - DNA, 25 bp, Canis familiaris
tcatcatcgtgccagcgaacgttgc

SEQ ID NO: 184779 - DNA, 25 bp, Canis familiaris
tctccgtgggctggagctgttgggg

SEQ ID NO: 184780 - DNA, 25 bp, Canis familiaris
tctccagaggtgaaaggctattggc

SEQ ID NO: 184781 - DNA, 25 bp, Canis familiaris
tctgccgagtgatggtggcttccca

SEQ ID NO: 184782 - DNA, 25 bp, Canis familiaris
tctgcacggctatcttgggtgtcac

SEQ ID NO: 184783 - DNA, 25 bp, Canis familiaris
tctgactcctgttttggtcatacct

SEQ ID NO: 184784 - DNA, 25 bp, Canis familiaris
tctgcctccggtgtgtgtgcagacc

SEQ ID NO: 184785 - DNA, 25 bp, Canis familiaris
tctccaccaggccctggggatgtct

SEQ ID NO: 184786 - DNA, 25 bp, Canis familiaris
tctcccacgacgtcgtggggctccg

SEQ ID NO: 184787 - DNA, 25 bp, Canis familiaris
tctcccctgggggggtggtcatcga

SEQ ID NO: 184788 - DNA, 25 bp, Canis familiaris
tcttcgagctgggggagggttccta

SEQ ID NO: 184789 - DNA, 25 bp, Canis familiaris
tctgttggctgggcaggcagtgtgc

SEQ ID NO: 184790 - DNA, 25 bp, Canis familiaris
tctgtgtgcccagggccaggtgagg

SEQ ID NO: 184791 - DNA, 25 bp, Canis familiaris
tctgctcgcccaggggatcggaagt

SEQ ID NO: 184792 - DNA, 25 bp, Canis familiaris
tctgtccccaggcacactgaatggg

SEQ ID NO: 184793 - DNA, 25 bp, Canis familiaris
tctttctaagagaccatcgaagctg

SEQ ID NO: 184794 - DNA, 25 bp, Canis familiaris
tctgcgttagagacccacgagaggg

SEQ ID NO: 184795 - DNA, 25 bp, Canis familiaris
tctgcctcaacatcttccgagaagg

SEQ ID NO: 184796 - DNA, 25 bp, Canis familiaris
tctgtctcaccaacctgacacagaa

SEQ ID NO: 184797 - DNA, 25 bp, Canis familiaris
tctgttctccatgctgtggcagaga

SEQ ID NO: 184798 - DNA, 25 bp, Canis familiaris
tctgggccactgttgcatggccgta

SEQ ID NO: 184799 - DNA, 25 bp, Canis familiaris
tctgggccactcgtagagccagcat

SEQ ID NO: 184800 - DNA, 25 bp, Canis familiaris
tctgggacctaaacccaattcgaca

SEQ ID NO: 184801 - DNA, 25 bp, Canis familiaris
tctgggaaccttacggattctggaa

SEQ ID NO: 184802 - DNA, 25 bp, Canis familiaris
tctgaaatactcatttttttggaat

SEQ ID NO: 184803 - DNA, 25 bp, Canis familiaris
tctgattgattattttttttctcgg

SEQ ID NO: 184804 - DNA, 25 bp, Canis familiaris
tctgcatcttaatttttctgccccc

SEQ ID NO: 184805 - DNA, 25 bp, Canis familiaris
tctgctcttaaagagtcccccagct

SEQ ID NO: 184806 - DNA, 25 bp, Canis familiaris
tctgcattttaacgagtccactcca

SEQ ID NO: 184807 - DNA, 25 bp, Canis familiaris
tctcaacttccacatttcattcgat

SEQ ID NO: 184808 - DNA, 25 bp, Canis familiaris
tctcagagttccaacacgtcatctc

SEQ ID NO: 184809 - DNA, 25 bp, Canis familiaris
tctgagagcttctgttcttctctgc

SEQ ID NO: 184810 - DNA, 25 bp, Canis familiaris
tctgcaggcttaactttttatgctg

SEQ ID NO: 184811 - DNA, 25 bp, Canis familiaris
tctgagccctaattttttcatctgt

SEQ ID NO: 184812 - DNA, 25 bp, Canis familiaris
tctcccctacagacttggtctttaa

SEQ ID NO: 184813 - DNA, 25 bp, Canis familiaris
tctccagcactaatgtttccatcct

SEQ ID NO: 184814 - DNA, 25 bp, Canis familiaris
tctgacaatccgatttccagctgcg

SEQ ID NO: 184815 - DNA, 25 bp, Canis familiaris
tctgtgaaccagaattccatcagga

SEQ ID NO: 184816 - DNA, 25 bp, Canis familiaris
tctgcagacacaagacatgtccatc

SEQ ID NO: 184817 - DNA, 25 bp, Canis familiaris
tctcgacactgagagtgccacttac

SEQ ID NO: 184818 - DNA, 25 bp, Canis familiaris
tctgtggagggctttgccactctac

SEQ ID NO: 184819 - DNA, 25 bp, Canis familiaris
tctgtggctgggctatgccaactcg

SEQ ID NO: 184820 - DNA, 25 bp, Canis familiaris
tctctgcactgggggacgcaaagcg

SEQ ID NO: 184821 - DNA, 25 bp, Canis familiaris
tctcagacatggttcgctcagacac

SEQ ID NO: 184822 - DNA, 25 bp, Canis familiaris
tctcggctggcactagctatacaga

SEQ ID NO: 184823 - DNA, 25 bp, Canis familiaris
tctgtcctctgcttcatcataaagt

SEQ ID NO: 184824 - DNA, 25 bp, Canis familiaris
tcatccttcctggcacaattattcc

SEQ ID NO: 184825 - DNA, 25 bp, Canis familiaris
tctccttgcactgtaatctcaacga

SEQ ID NO: 184826 - DNA, 25 bp, Canis familiaris
tctgcctctcacatcgaatgtctag

SEQ ID NO: 184827 - DNA, 25 bp, Canis familiaris
tctgccccaagcttgcattgtttgt

SEQ ID NO: 184828 - DNA, 25 bp, Canis familiaris
tctgcccgcagacgagttgattttg

SEQ ID NO: 184829 - DNA, 25 bp, Canis familiaris
tctgcccacaatcagcggcacgtta

SEQ ID NO: 184830 - DNA, 25 bp, Canis familiaris
tctgacgcacaatccgtccgtgaac

SEQ ID NO: 184831 - DNA, 25 bp, Canis familiaris
tctgtcccttgggggctgcggacag

SEQ ID NO: 184832 - DNA, 25 bp, Canis familiaris
tctgtctccatgagggtccagggca

SEQ ID NO: 184833 - DNA, 25 bp, Canis familiaris
tctgttccatggaggtcagcgccag

SEQ ID NO: 184834 - DNA, 25 bp, Canis familiaris
tctgtggccagccaagcagtaccca

SEQ ID NO: 184835 - DNA, 25 bp, Canis familiaris
tctgtgacgtcacactgtaacgttg

SEQ ID NO: 184836 - DNA, 25 bp, Canis familiaris
tctataaccagtacgtacgcttcga

SEQ ID NO: 184837 - DNA, 25 bp, Canis familiaris
tctgaaaaagtccttcactctccca

SEQ ID NO: 184838 - DNA, 25 bp, Canis familiaris
tcagaaaaagaccaataccatatta

SEQ ID NO: 184839 - DNA, 25 bp, Canis familiaris
tacgccaatgagactgaaactattt

SEQ ID NO: 184840 - DNA, 25 bp, Canis familiaris
tctcccgatgaaaacatatcttttg

SEQ ID NO: 184841 - DNA, 25 bp, Canis familiaris
tcatccaaaaatattagctcttcag

SEQ ID NO: 184842 - DNA, 25 bp, Canis familiaris
tctccaacaaagtgtccctgtcaag

SEQ ID NO: 184843 - DNA, 25 bp, Canis familiaris
tctaagaccaaggaggcccgcaagc

SEQ ID NO: 184844 - DNA, 25 bp, Canis familiaris
tctaatacccgttatcccaagactc

SEQ ID NO: 184845 - DNA, 25 bp, Canis familiaris
tctaacatgaaccttgaccctaacc

SEQ ID NO: 184846 - DNA, 25 bp, Canis familiaris
tctccacagacagaggttcctaacc

SEQ ID NO: 184847 - DNA, 25 bp, Canis familiaris
tctccggaatcatgcagtgggccca

SEQ ID NO: 184848 - DNA, 25 bp, Canis familiaris
tctccggcacttgggtgggaccaag

SEQ ID NO: 184849 - DNA, 25 bp, Canis familiaris
tctccggcccttgtgtggggaagag

SEQ ID NO: 184850 - DNA, 25 bp, Canis familiaris
tctcctggcctctgtttagaatggg

SEQ ID NO: 184851 - DNA, 25 bp, Canis familiaris
tctccaggcctttttgctaggtggc

SEQ ID NO: 184852 - DNA, 25 bp, Canis familiaris
tctcgaggcaggtgctgggagcggg

SEQ ID NO: 184853 - DNA, 25 bp, Canis familiaris
tctccatgagggtccagggcacgag

SEQ ID NO: 184854 - DNA, 25 bp, Canis familiaris
tctccatcaagttgcaagaggagga

SEQ ID NO: 184855 - DNA, 25 bp, Canis familiaris
tctgcctctgcgtgaaagcgggatt

SEQ ID NO: 184856 - DNA, 25 bp, Canis familiaris
tctgcctgccagtgtgaggacggaa

SEQ ID NO: 184857 - DNA, 25 bp, Canis familiaris
tctgctcggagctgaatggccgcta

SEQ ID NO: 184858 - DNA, 25 bp, Canis familiaris
tctgcggatacttgcacaggtccca

SEQ ID NO: 184859 - DNA, 25 bp, Canis familiaris
tctctggtcaaaacagcctcccagt

SEQ ID NO: 184860 - DNA, 25 bp, Canis familiaris
tcttgctaataaaatcgtggccatt

SEQ ID NO: 184861 - DNA, 25 bp, Canis familiaris
tctagaaatttcgagcctggccata

SEQ ID NO: 184862 - DNA, 25 bp, Canis familiaris
tctaagactttccgacggaccaaga

SEQ ID NO: 184863 - DNA, 25 bp, Canis familiaris
ttcaccacgttctgtaaacgagaaa

SEQ ID NO: 184864 - DNA, 25 bp, Canis familiaris
tctcccacgttcacaacaactgacg

SEQ ID NO: 184865 - DNA, 25 bp, Canis familiaris
tctccaaccttgacctactaatgac

SEQ ID NO: 184866 - DNA, 25 bp, Canis familiaris
tctccaagcctggactgtgcctaat

SEQ ID NO: 184867 - DNA, 25 bp, Canis familiaris
tctccagagcctcaggtggcacaca

SEQ ID NO: 184868 - DNA, 25 bp, Canis familiaris
tctccgatgatgcgagcgtgtcgtc

SEQ ID NO: 184869 - DNA, 25 bp, Canis familiaris
tctcctgtgcgctagcgtggacatt

SEQ ID NO: 184870 - DNA, 25 bp, Canis familiaris
tcttctgggaagctggggctgtcca

SEQ ID NO: 184871 - DNA, 25 bp, Canis familiaris
tctctccggaagcccggagggcgca

SEQ ID NO: 184872 - DNA, 25 bp, Canis familiaris
tctcttctagaacgactggagggcg

SEQ ID NO: 184873 - DNA, 25 bp, Canis familiaris
tctctgttagtccatgattaagggt

SEQ ID NO: 184874 - DNA, 25 bp, Canis familiaris
tctccttacccacgtgcaatgtgaa

SEQ ID NO: 184875 - DNA, 25 bp, Canis familiaris
tctccctttccacatcaaggcaaat

SEQ ID NO: 184876 - DNA, 25 bp, Canis familiaris
tctcgcttcttcagcgaccggagaa

SEQ ID NO: 184877 - DNA, 25 bp, Canis familiaris
tctccttctgagagcccttggaggc

SEQ ID NO: 184878 - DNA, 25 bp, Canis familiaris
tctctgttctggaaaccttggcacc

SEQ ID NO: 184879 - DNA, 25 bp, Canis familiaris
tctcttatctggtgacattgtggtc

SEQ ID NO: 184880 - DNA, 25 bp, Canis familiaris
tctgctgctggtctaacatgtgggt

SEQ ID NO: 184881 - DNA, 25 bp, Canis familiaris
tctgcacttcatcaacgctgaggga

SEQ ID NO: 184882 - DNA, 25 bp, Canis familiaris
tctgcctggctaaactctggcgtgg

SEQ ID NO: 184883 - DNA, 25 bp, Canis familiaris
tctgccatggttgatatgggtcctg

SEQ ID NO: 184884 - DNA, 25 bp, Canis familiaris
tctgaatggttttatgtgtgtcgca

SEQ ID NO: 184885 - DNA, 25 bp, Canis familiaris
tctgagatcggggctggccattctg

SEQ ID NO: 184886 - DNA, 25 bp, Canis familiaris
tctgcgtgggtgtagaccattctgt

SEQ ID NO: 184887 - DNA, 25 bp, Canis familiaris
tctcgtagagtttgcccatgtgttg

SEQ ID NO: 184888 - DNA, 25 bp, Canis familiaris
tctacttgattttcccatgtgcttc

SEQ ID NO: 184889 - DNA, 25 bp, Canis familiaris
tctactcagttttctactatgcccg

SEQ ID NO: 184890 - DNA, 25 bp, Canis familiaris
tcattcaagtttctacggtgcggct

SEQ ID NO: 184891 - DNA, 25 bp, Canis familiaris
tctctactgacccctacgtggggat

SEQ ID NO: 184892 - DNA, 25 bp, Canis familiaris
tctattcggcctatccagacgaggt

SEQ ID NO: 184893 - DNA, 25 bp, Canis familiaris
tcaccctggcctgtcacaaaggctt

SEQ ID NO: 184894 - DNA, 25 bp, Canis familiaris
tctccctgatttttccacataattt

SEQ ID NO: 184895 - DNA, 25 bp, Canis familiaris
tctccacgttatcatcgtagcagaa

SEQ ID NO: 184896 - DNA, 25 bp, Canis familiaris
tctccaagtcgttgcggcagtcgaa

SEQ ID NO: 184897 - DNA, 25 bp, Canis familiaris
tctgtcaagtcctggtggtctttca

SEQ ID NO: 184898 - DNA, 25 bp, Canis familiaris
tcttgattccctgggtcgtgttttt

SEQ ID NO: 184899 - DNA, 25 bp, Canis familiaris
tcttttttcttgatgcgggcttggt

SEQ ID NO: 184900 - DNA, 25 bp, Canis familiaris
tctcttttatattttgtgggccatc

SEQ ID NO: 184901 - DNA, 25 bp, Canis familiaris
tctgcctttaattcttttgttccca

SEQ ID NO: 184902 - DNA, 25 bp, Canis familiaris
tctgcctgttcaccgattttgattc

SEQ ID NO: 184903 - DNA, 25 bp, Canis familiaris
tctgaatttgcagtcttctaccatt

SEQ ID NO: 184904 - DNA, 25 bp, Canis familiaris
tctgaaatttcagtttcctcctgcc

SEQ ID NO: 184905 - DNA, 25 bp, Canis familiaris
tctgaactcattgtattcctcctga

SEQ ID NO: 184906 - DNA, 25 bp, Canis familiaris
tctgaactctgaattagacatttta

SEQ ID NO: 184907 - DNA, 25 bp, Canis familiaris
tctcgccctgtgataccatttaaaa

SEQ ID NO: 184908 - DNA, 25 bp, Canis familiaris
tctcccctgtgcttactaatacatc

SEQ ID NO: 184909 - DNA, 25 bp, Canis familiaris
tctccccttaaactagatctcttcc

SEQ ID NO: 184910 - DNA, 25 bp, Canis familiaris
tctgttaatctaacaatagactatt

SEQ ID NO: 184911 - DNA, 25 bp, Canis familiaris
tctgctttttcttccaaacattgtt

SEQ ID NO: 184912 - DNA, 25 bp, Canis familiaris
tctgcccacttttccaggaatttct

SEQ ID NO: 184913 - DNA, 25 bp, Canis familiaris
tctgcctctgcttatacgggatatt

SEQ ID NO: 184914 - DNA, 25 bp, Canis familiaris
tctgcacctgcaaaatcgaggaata

SEQ ID NO: 184915 - DNA, 25 bp, Canis familiaris
tctgcccctgattatcaaaaaaaaa

SEQ ID NO: 184916 - DNA, 25 bp, Canis familiaris
tctgcctgtctcttttcaaaaaaaa

SEQ ID NO: 184917 - DNA, 25 bp, Canis familiaris
tctgtctgtgtctctcatgaataaa

SEQ ID NO: 184918 - DNA, 25 bp, Canis familiaris
tctgtgctgctggaggcttggacag

SEQ ID NO: 184919 - DNA, 25 bp, Canis familiaris
tctgctcctgtgatcttcgatagat

SEQ ID NO: 184920 - DNA, 25 bp, Canis familiaris
tctgccctgagtgcttgcagctgga

SEQ ID NO: 184921 - DNA, 25 bp, Canis familiaris
tctgccgtgtgaggcttcggcggac

SEQ ID NO: 184922 - DNA, 25 bp, Canis familiaris
tctgccctgaaggcctggggtggaa

SEQ ID NO: 184923 - DNA, 25 bp, Canis familiaris
tctgccctcaacatctgttggggga

SEQ ID NO: 184924 - DNA, 25 bp, Canis familiaris
tctctcacccagctgtgtttggagg

SEQ ID NO: 184925 - DNA, 25 bp, Canis familiaris
tctgtaaccagtcctagtttgggga

SEQ ID NO: 184926 - DNA, 25 bp, Canis familiaris
tctgtaactaggcttgtgtgtgtgt

SEQ ID NO: 184927 - DNA, 25 bp, Canis familiaris
tctctaggtgggcttgtgctgggta

SEQ ID NO: 184928 - DNA, 25 bp, Canis familiaris
tcttcaccggggagctgggggtgcg

SEQ ID NO: 184929 - DNA, 25 bp, Canis familiaris
tcttacgaggggagcttgggcggcg

SEQ ID NO: 184930 - DNA, 25 bp, Canis familiaris
tctgtacgggggactgtccctcgtc

SEQ ID NO: 184931 - DNA, 25 bp, Canis familiaris
tctgtcacagggacagtccctccca

SEQ ID NO: 184932 - DNA, 25 bp, Canis familiaris
tctgcacaggattacagtcgcctcc

SEQ ID NO: 184933 - DNA, 25 bp, Canis familiaris
tctgccaggagctcgaggcgttcag

SEQ ID NO: 184934 - DNA, 25 bp, Canis familiaris
tctccagtgggccgactggcttagc

SEQ ID NO: 184935 - DNA, 25 bp, Canis familiaris
tctccgtctgaggggtggctgttaa

SEQ ID NO: 184936 - DNA, 25 bp, Canis familiaris
tctgttctcgtgtgggagcatctta

SEQ ID NO: 184937 - DNA, 25 bp, Canis familiaris
tctgttccctgggagcgactcttga

SEQ ID NO: 184938 - DNA, 25 bp, Canis familiaris
tctgttgcccttaagatgaccatgc

SEQ ID NO: 184939 - DNA, 25 bp, Canis familiaris
tctgttgtgcggatcagcgtcactg

SEQ ID NO: 184940 - DNA, 25 bp, Canis familiaris
tctgtttctggtgactgtccttttg

SEQ ID NO: 184941 - DNA, 25 bp, Canis familiaris
tctgttctacctgacttttttagga

SEQ ID NO: 184942 - DNA, 25 bp, Canis familiaris
tctgccgaaacccctttggttagag

SEQ ID NO: 184943 - DNA, 25 bp, Canis familiaris
tctcccaaggcctgtgtctggaggg

SEQ ID NO: 184944 - DNA, 25 bp, Canis familiaris
tctccccaccagtgtgctcatgggg

SEQ ID NO: 184945 - DNA, 25 bp, Canis familiaris
tctgcctcaacatctgtgtggggga

SEQ ID NO: 184946 - DNA, 25 bp, Canis familiaris
tctgaaggacaactttgctgggcaa

SEQ ID NO: 184947 - DNA, 25 bp, Canis familiaris
tctgtctggccatgtttctggtgaa

SEQ ID NO: 184948 - DNA, 25 bp, Canis familiaris
tctgtctagcagtttttctttaaag

SEQ ID NO: 184949 - DNA, 25 bp, Canis familiaris
tctgtcccgatttctcttttatgat

SEQ ID NO: 184950 - DNA, 25 bp, Canis familiaris
tctgtcccaatttctcttgtatgag

SEQ ID NO: 184951 - DNA, 25 bp, Canis familiaris
tctgagccacaaaacacagtgaagg

SEQ ID NO: 184952 - DNA, 25 bp, Canis familiaris
tctgaccctaagcctggtcacagcg

SEQ ID NO: 184953 - DNA, 25 bp, Canis familiaris
tctgaccccatatttcaggccagca

SEQ ID NO: 184954 - DNA, 25 bp, Canis familiaris
tctgcaatcccatcattacgaagct

SEQ ID NO: 184955 - DNA, 25 bp, Canis familiaris
tctgcttcctagcttgcacaaagtg

SEQ ID NO: 184956 - DNA, 25 bp, Canis familiaris
tctgatatcttatgttaaaaagcaa

SEQ ID NO: 184957 - DNA, 25 bp, Canis familiaris
tctgatatgcatttagtctaaagaa

SEQ ID NO: 184958 - DNA, 25 bp, Canis familiaris
tctatattgtaactccatgggaacg

SEQ ID NO: 184959 - DNA, 25 bp, Canis familiaris
tctctttctacactcttggtcagac

SEQ ID NO: 184960 - DNA, 25 bp, Canis familiaris
tctctggtattactcgtgcgtacac

SEQ ID NO: 184961 - DNA, 25 bp, Canis familiaris
tctcgagtagcctaccatggtccag

SEQ ID NO: 184962 - DNA, 25 bp, Canis familiaris
tctgcggtgagcacagtctgggcgc

SEQ ID NO: 184963 - DNA, 25 bp, Canis familiaris
tctgctggctggaccaaccaatgcc

SEQ ID NO: 184964 - DNA, 25 bp, Canis familiaris
ttgctgctgctgccatcaatgaagc

SEQ ID NO: 184965 - DNA, 25 bp, Canis familiaris
tctgtctctcacaaatgaacaaata

SEQ ID NO: 184966 - DNA, 25 bp, Canis familiaris
tctgcactctaaactgcacaacaga

SEQ ID NO: 184967 - DNA, 25 bp, Canis familiaris
tctgctccaaagcctgcaagacaca

SEQ ID NO: 184968 - DNA, 25 bp, Canis familiaris
tctgctcgtcaaggtcattgcacac

SEQ ID NO: 184969 - DNA, 25 bp, Canis familiaris
tctgcatactatttgtatgtcactg

SEQ ID NO: 184970 - DNA, 25 bp, Canis familiaris
tctgaagcatagactttgcctctgt

SEQ ID NO: 184971 - DNA, 25 bp, Canis familiaris
tctgatcgattatctctccacgtta

SEQ ID NO: 184972 - DNA, 25 bp, Canis familiaris
tctgattcatttatctctccacgta

SEQ ID NO: 184973 - DNA, 25 bp, Canis familiaris
tctgatttgctagttcttccttgta

SEQ ID NO: 184974 - DNA, 25 bp, Canis familiaris
tctgctgtgctgtaatatcttcaat

SEQ ID NO: 184975 - DNA, 25 bp, Canis familiaris
tctgcgtggacaagacctcagccaa

SEQ ID NO: 184976 - DNA, 25 bp, Canis familiaris
tctgctgtgttaagactctgcccaa

SEQ ID NO: 184977 - DNA, 25 bp, Canis familiaris
tctgattcattgacaagctttccaa

SEQ ID NO: 184978 - DNA, 25 bp, Canis familiaris
tctgttttgccttgtgctcacaaat

SEQ ID NO: 184979 - DNA, 25 bp, Canis familiaris
tctgcctttctcgagtggcacagat

SEQ ID NO: 184980 - DNA, 25 bp, Canis familiaris
tctgccgtgacaacaggccactgaa

SEQ ID NO: 184981 - DNA, 25 bp, Canis familiaris
tctccaaacacaagcagccagcaaa

SEQ ID NO: 184982 - DNA, 25 bp, Canis familiaris
tcaccaaagaagcctacacagaagt

SEQ ID NO: 184983 - DNA, 25 bp, Canis familiaris
tcaccaaggaagctccagatccagt

SEQ ID NO: 184984 - DNA, 25 bp, Canis familiaris
tcagcacaagggacgacgagaactt

SEQ ID NO: 184985 - DNA, 25 bp, Canis familiaris
tctcataaatggagggcagtgacat

SEQ ID NO: 184986 - DNA, 25 bp, Canis familiaris
tctgtaaaggcaatgggagaacccc

SEQ ID NO: 184987 - DNA, 25 bp, Canis familiaris
tctgtagaaggccgtgttgaccctc

SEQ ID NO: 184988 - DNA, 25 bp, Canis familiaris
tctgtaggagagattggtgtccctc

SEQ ID NO: 184989 - DNA, 25 bp, Canis familiaris
tctaaggaaggtcgcgaacatcccc

SEQ ID NO: 184990 - DNA, 25 bp, Canis familiaris
tctcctgggggccgagaatcacccc

SEQ ID NO: 184991 - DNA, 25 bp, Canis familiaris
tctcccgctgggccaagaagaggcc

SEQ ID NO: 184992 - DNA, 25 bp, Canis familiaris
tctgcgccgaggcgcggagcgaggc

SEQ ID NO: 184993 - DNA, 25 bp, Canis familiaris
tctcgccgagtctcgggctattcac

SEQ ID NO: 184994 - DNA, 25 bp, Canis familiaris
tctccacggtcttcgtggctgtggc

SEQ ID NO: 184995 - DNA, 25 bp, Canis familiaris
tctgcacaagtgtttcaacctgtcc

SEQ ID NO: 184996 - DNA, 25 bp, Canis familiaris
tctgcaaagctgttgccagtcgctc

SEQ ID NO: 184997 - DNA, 25 bp, Canis familiaris
tctgaaggctgggcctggccagcac

SEQ ID NO: 184998 - DNA, 25 bp, Canis familiaris
tctgcaagggccaggcctcagcagc

SEQ ID NO: 184999 - DNA, 25 bp, Canis familiaris
tctgagagcccagtttccaagcagc

SEQ ID NO: 185000 - DNA, 25 bp, Canis familiaris
tctgaggccgcacttggccatgcaa

SEQ ID NO: 185001 - DNA, 25 bp, Canis familiaris
tctgcagcgccagcttggacagatt

SEQ ID NO: 185002 - DNA, 25 bp, Canis familiaris
tctgaagcagcagcttgagttattc

SEQ ID NO: 185003 - DNA, 25 bp, Canis familiaris
tctgcaaagccagctggttctctgc

SEQ ID NO: 185004 - DNA, 25 bp, Canis familiaris
tctgctgaaggatctctgtctccat

SEQ ID NO: 185005 - DNA, 25 bp, Canis familiaris
tctgatccaggatcatccttcccaa

SEQ ID NO: 185006 - DNA, 25 bp, Canis familiaris
tctgccgcaggaactgctctgagct

SEQ ID NO: 185007 - DNA, 25 bp, Canis familiaris
tctgccatattgtgctgtcaggcct

SEQ ID NO: 185008 - DNA, 25 bp, Canis familiaris
tctgctatattctgtgatagacgga

SEQ ID NO: 185009 - DNA, 25 bp, Canis familiaris
tctgcgtatatttgtgatatgagga

SEQ ID NO: 185010 - DNA, 25 bp, Canis familiaris
tctctgtcaccgcaagcagcaggaa

SEQ ID NO: 185011 - DNA, 25 bp, Canis familiaris
tctcgtcccagggccaggagtacat

SEQ ID NO: 185012 - DNA, 25 bp, Canis familiaris
tctgcccccagtgcacagaaggaat

SEQ ID NO: 185013 - DNA, 25 bp, Canis familiaris
tctgagtcccagtccaaaaatgaga

SEQ ID NO: 185014 - DNA, 25 bp, Canis familiaris
tctccgtccagatcaaacctggagc

SEQ ID NO: 185015 - DNA, 25 bp, Canis familiaris
tctgcggcccaagaagacacgtgcc

SEQ ID NO: 185016 - DNA, 25 bp, Canis familiaris
tctcctcgccaacaaatcagcttac

SEQ ID NO: 185017 - DNA, 25 bp, Canis familiaris
tctgcttcccaaagatttggttcac

SEQ ID NO: 185018 - DNA, 25 bp, Canis familiaris
tctgcttctgtcctggttattggta

SEQ ID NO: 185019 - DNA, 25 bp, Canis familiaris
tctgctactgattttggtatcctat

SEQ ID NO: 185020 - DNA, 25 bp, Canis familiaris
tctgtagcaatcttttggtcctgat

SEQ ID NO: 185021 - DNA, 25 bp, Canis familiaris
tctgaatgattctatgttggggtga

SEQ ID NO: 185022 - DNA, 25 bp, Canis familiaris
tctgtatgtctttggtgtgtgtgtg

SEQ ID NO: 185023 - DNA, 25 bp, Canis familiaris
tctgctgctgtgatggggtgtgggt

SEQ ID NO: 185024 - DNA, 25 bp, Canis familiaris
tctgctctggtgcaaggtgggctgg

SEQ ID NO: 185025 - DNA, 25 bp, Canis familiaris
tctgctcagtggcgcacagtggagg

SEQ ID NO: 185026 - DNA, 25 bp, Canis familiaris
tctgccagcgagggctcatgtggga

SEQ ID NO: 185027 - DNA, 25 bp, Canis familiaris
tctccagggcacgtctgcagggagc

SEQ ID NO: 185028 - DNA, 25 bp, Canis familiaris
tctccgggcacactgtgtagcgaca

SEQ ID NO: 185029 - DNA, 25 bp, Canis familiaris
tctcgggtcagcctgtggaccagga

SEQ ID NO: 185030 - DNA, 25 bp, Canis familiaris
tctcggatgcctgcttggaattgga

SEQ ID NO: 185031 - DNA, 25 bp, Canis familiaris
tctcgactcctagtagtgcacagtg

SEQ ID NO: 185032 - DNA, 25 bp, Canis familiaris
tctcgcagccctgctggatgcaaag

SEQ ID NO: 185033 - DNA, 25 bp, Canis familiaris
tctccagcaccggtggaacaaccac

SEQ ID NO: 185034 - DNA, 25 bp, Canis familiaris
tctccatgccgcacggcgagaacca

SEQ ID NO: 185035 - DNA, 25 bp, Canis familiaris
tctctcgcctgcacagaggagtcgt

SEQ ID NO: 185036 - DNA, 25 bp, Canis familiaris
tcatgctccccacttagtagtacta

SEQ ID NO: 185037 - DNA, 25 bp, Canis familiaris
tctgacccgccgagattgtactaac

SEQ ID NO: 185038 - DNA, 25 bp, Canis familiaris
tctgacccagcgcacgttggagtaa

SEQ ID NO: 185039 - DNA, 25 bp, Canis familiaris
tctgatccagggcccaggagggtaa

SEQ ID NO: 185040 - DNA, 25 bp, Canis familiaris
tcttccgttgtccaaggggtgaaat

SEQ ID NO: 185041 - DNA, 25 bp, Canis familiaris
tcttcccatttgccaagaggggggt

SEQ ID NO: 185042 - DNA, 25 bp, Canis familiaris
tctacacgctaggccagggctgggg

SEQ ID NO: 185043 - DNA, 25 bp, Canis familiaris
tctgagccctgagcacaagcggctg

SEQ ID NO: 185044 - DNA, 25 bp, Canis familiaris
tctgcctcctgtgacaacaggtcgc

SEQ ID NO: 185045 - DNA, 25 bp, Canis familiaris
tctccatccgcaaccagaagggcga

SEQ ID NO: 185046 - DNA, 25 bp, Canis familiaris
tctcccacgaccaaaaggccttatg

SEQ ID NO: 185047 - DNA, 25 bp, Canis familiaris
tctcccttacctgaatggctttacc

SEQ ID NO: 185048 - DNA, 25 bp, Canis familiaris
tctcgccgactcctgtaatgtattt

SEQ ID NO: 185049 - DNA, 25 bp, Canis familiaris
tctccaatccacctgttttatttgt

SEQ ID NO: 185050 - DNA, 25 bp, Canis familiaris
tctgacttccctcgtttagtttgga

SEQ ID NO: 185051 - DNA, 25 bp, Canis familiaris
tctgcctagcacatctgtttacgta

SEQ ID NO: 185052 - DNA, 25 bp, Canis familiaris
tctgctttcatcacttttacactgg

SEQ ID NO: 185053 - DNA, 25 bp, Canis familiaris
tctgccttgcttattttcatacttc

SEQ ID NO: 185054 - DNA, 25 bp, Canis familiaris
tctgatctttctattacttctcttc

SEQ ID NO: 185055 - DNA, 25 bp, Canis familiaris
tctgagtttctctattatattttta

SEQ ID NO: 185056 - DNA, 25 bp, Canis familiaris
tctgttctttcatttttttcatcat

SEQ ID NO: 185057 - DNA, 25 bp, Canis familiaris
tctgttctttgatgtttttcttttc

SEQ ID NO: 185058 - DNA, 25 bp, Canis familiaris
tctttcctaggggctttgtttgtat

SEQ ID NO: 185059 - DNA, 25 bp, Canis familiaris
tctcttacactagccttttttctga

SEQ ID NO: 185060 - DNA, 25 bp, Canis familiaris
tctcgtacctagtgtcttctttgta

SEQ ID NO: 185061 - DNA, 25 bp, Canis familiaris
tcaggaaccctgtcccaattttgga

SEQ ID NO: 185062 - DNA, 25 bp, Canis familiaris
tcttggagggtgtctcgcaacgttg

SEQ ID NO: 185063 - DNA, 25 bp, Canis familiaris
tcataagtttgagcccaacgttggg

SEQ ID NO: 185064 - DNA, 25 bp, Canis familiaris
tctagagctttacatgccgacggcg

SEQ ID NO: 185065 - DNA, 25 bp, Canis familiaris
tctaagcctcttcacctgaggtaga

SEQ ID NO: 185066 - DNA, 25 bp, Canis familiaris
tctccaccacgtcagcgatgaagtt

SEQ ID NO: 185067 - DNA, 25 bp, Canis familiaris
tctcccaggcgttaggatcagatca

SEQ ID NO: 185068 - DNA, 25 bp, Canis familiaris
tctcccaggccttaggacagttggg

SEQ ID NO: 185069 - DNA, 25 bp, Canis familiaris
ctccccttttgttgttgattctgac

SEQ ID NO: 185070 - DNA, 25 bp, Canis familiaris
tctccaaggttctgtgtctagtgtg

SEQ ID NO: 185071 - DNA, 25 bp, Canis familiaris
tctcccaggttctgtgtctaggtgg

SEQ ID NO: 185072 - DNA, 25 bp, Canis familiaris
tctgctcacgagagggtgtctatga

SEQ ID NO: 185073 - DNA, 25 bp, Canis familiaris
tctgctcaaattgcgggtcaacata

SEQ ID NO: 185074 - DNA, 25 bp, Canis familiaris
tctctcaaatcccgaggctacgtaa

SEQ ID NO: 185075 - DNA, 25 bp, Canis familiaris
tctctcgacctcggggtgaggtagt

SEQ ID NO: 185076 - DNA, 25 bp, Canis familiaris
tctccggcctgtggggcaaggtgaa

SEQ ID NO: 185077 - DNA, 25 bp, Canis familiaris
tctcgggcgggggccagagtgaagg

SEQ ID NO: 185078 - DNA, 25 bp, Canis familiaris
tcaccggttgcagacccgtgaaggt

SEQ ID NO: 185079 - DNA, 25 bp, Canis familiaris
tcatccggattagcaccctgaggga

SEQ ID NO: 185080 - DNA, 25 bp, Canis familiaris
tctccaggttcagttgacccaggga

SEQ ID NO: 185081 - DNA, 25 bp, Canis familiaris
tctctgaggcttgcttaaccgggaa

SEQ ID NO: 185082 - DNA, 25 bp, Canis familiaris
tctctggaggagtttaccgggccca

SEQ ID NO: 185083 - DNA, 25 bp, Canis familiaris
tctgttggggatatcccatcacccc

SEQ ID NO: 185084 - DNA, 25 bp, Canis familiaris
tctgttggaggccaaagacaacccc

SEQ ID NO: 185085 - DNA, 25 bp, Canis familiaris
tctccacgggcaacaagtgcaaacc

SEQ ID NO: 185086 - DNA, 25 bp, Canis familiaris
tctgccaggggaacagcacatgcaa

SEQ ID NO: 185087 - DNA, 25 bp, Canis familiaris
tctgccatgcagttaaactatgaac

SEQ ID NO: 185088 - DNA, 25 bp, Canis familiaris
tctccatagctgtagaagcatcata

SEQ ID NO: 185089 - DNA, 25 bp, Canis familiaris
tctctcttgctatcaggtctactgc

SEQ ID NO: 185090 - DNA, 25 bp, Canis familiaris
tctgctcattaatatctgttgcctg

SEQ ID NO: 185091 - DNA, 25 bp, Canis familiaris
tctgcacattaaatttgctgttcat

SEQ ID NO: 185092 - DNA, 25 bp, Canis familiaris
tctgaacacataatttgcttccatg

SEQ ID NO: 185093 - DNA, 25 bp, Canis familiaris
tctgcaagacatttctccttagaga

SEQ ID NO: 185094 - DNA, 25 bp, Canis familiaris
tctgcatgtgccatttcctacagag

SEQ ID NO: 185095 - DNA, 25 bp, Canis familiaris
tctgcagtctcacttgatggtcaag

SEQ ID NO: 185096 - DNA, 25 bp, Canis familiaris
tctgcagccctgtgagagctcgaga

SEQ ID NO: 185097 - DNA, 25 bp, Canis familiaris
tctgaccctgtagtagtcatgccag

SEQ ID NO: 185098 - DNA, 25 bp, Canis familiaris
tctgatctcttgtcaggagctcccg

SEQ ID NO: 185099 - DNA, 25 bp, Canis familiaris
tcttctttgcaaggcctgacgatgg

SEQ ID NO: 185100 - DNA, 25 bp, Canis familiaris
tctcctgtatgtccggcgaattgag

SEQ ID NO: 185101 - DNA, 25 bp, Canis familiaris
tctcgcttatattgggcagacctca

SEQ ID NO: 185102 - DNA, 25 bp, Canis familiaris
tctcgcgtcaactctcagagcttga

SEQ ID NO: 185103 - DNA, 25 bp, Canis familiaris
tctcgcagtgcatcattttcaggaa

SEQ ID NO: 185104 - DNA, 25 bp, Canis familiaris
tctccagttgccactccaggaaagt

SEQ ID NO: 185105 - DNA, 25 bp, Canis familiaris
tctctctttgcggctcaaaaaaatg

SEQ ID NO: 185106 - DNA, 25 bp, Canis familiaris
tctcctttgggctgatcatccagca

SEQ ID NO: 185107 - DNA, 25 bp, Canis familiaris
tctgcccttggggcagcctccaaaa

SEQ ID NO: 185108 - DNA, 25 bp, Canis familiaris
tctgctttgggggcagctgtctaga

SEQ ID NO: 185109 - DNA, 25 bp, Canis familiaris
ttccttggccgaggcctttgcagga

SEQ ID NO: 185110 - DNA, 25 bp, Canis familiaris
tctctttgaccatgcagccttggag

SEQ ID NO: 185111 - DNA, 25 bp, Canis familiaris
tctgagttgaccccagtgtgtgtgg

SEQ ID NO: 185112 - DNA, 25 bp, Canis familiaris
tctaccatgtccccttggttggggt

SEQ ID NO: 185113 - DNA, 25 bp, Canis familiaris
tctcccaatcctctctggttggggg

SEQ ID NO: 185114 - DNA, 25 bp, Canis familiaris
tctaggcgacctgtcggtggggcag

SEQ ID NO: 185115 - DNA, 25 bp, Canis familiaris
tctctggcccctatgggtgtggagt

SEQ ID NO: 185116 - DNA, 25 bp, Canis familiaris
tctcaaactcctctgggtggggaaa

SEQ ID NO: 185117 - DNA, 25 bp, Canis familiaris
tctcctaccatacctgggtgggtaa

SEQ ID NO: 185118 - DNA, 25 bp, Canis familiaris
tctccttcccagatgtggcgggtca

SEQ ID NO: 185119 - DNA, 25 bp, Canis familiaris
tctcctttcaaaggtcctgagttca

SEQ ID NO: 185120 - DNA, 25 bp, Canis familiaris
tctccttagactgatgtcccattta

SEQ ID NO: 185121 - DNA, 25 bp, Canis familiaris
tctccttaccttggatgttagttac

SEQ ID NO: 185122 - DNA, 25 bp, Canis familiaris
tctgcctttgcctcaggttgagatt

SEQ ID NO: 185123 - DNA, 25 bp, Canis familiaris
tctcccgctggagcaggttgagctg

SEQ ID NO: 185124 - DNA, 25 bp, Canis familiaris
tctccctgaaggggcttctgagctc

SEQ ID NO: 185125 - DNA, 25 bp, Canis familiaris
tctcccagtctgtgtgctatctgag

SEQ ID NO: 185126 - DNA, 25 bp, Canis familiaris
tctcctcagtcctggcaacagggct

SEQ ID NO: 185127 - DNA, 25 bp, Canis familiaris
tctccacagcccttggaacaggcag

SEQ ID NO: 185128 - DNA, 25 bp, Canis familiaris
tctcccagccaccgacagtaggagg

SEQ ID NO: 185129 - DNA, 25 bp, Canis familiaris
tctccaatcgtctgccatatagagg

SEQ ID NO: 185130 - DNA, 25 bp, Canis familiaris
tctccacacgggccttcagagaggc

SEQ ID NO: 185131 - DNA, 25 bp, Canis familiaris
tctcgttccaggtcttctagaaggt

SEQ ID NO: 185132 - DNA, 25 bp, Canis familiaris
tctcgtctcggttcttgtacataat

SEQ ID NO: 185133 - DNA, 25 bp, Canis familiaris
tctgcagtctgagctactatctagc

SEQ ID NO: 185134 - DNA, 25 bp, Canis familiaris
tctctgagtgcagctgacgtcctgc

SEQ ID NO: 185135 - DNA, 25 bp, Canis familiaris
tctgcttgtgacctcagattcctgc

SEQ ID NO: 185136 - DNA, 25 bp, Canis familiaris
tctgcttgtgtcttcacatcgggac

SEQ ID NO: 185137 - DNA, 25 bp, Canis familiaris
tctgcttgtgttaatgagtctggtc

SEQ ID NO: 185138 - DNA, 25 bp, Canis familiaris
tctgcttctgtctcatgaataaata

SEQ ID NO: 185139 - DNA, 25 bp, Canis familiaris
tctgcttctgtctcatgaataaata

SEQ ID NO: 185140 - DNA, 25 bp, Canis familiaris
tctctgtggtctacaaaaatgttgt

SEQ ID NO: 185141 - DNA, 25 bp, Canis familiaris
tctctgggatctcacaacgggtacc

SEQ ID NO: 185142 - DNA, 25 bp, Canis familiaris
tctcggtctttgccaacggagtcat

SEQ ID NO: 185143 - DNA, 25 bp, Canis familiaris
tctcgagttttcttgtcagggtcaa

SEQ ID NO: 185144 - DNA, 25 bp, Canis familiaris
tctcgtggcttgtctttctgaggga

SEQ ID NO: 185145 - DNA, 25 bp, Canis familiaris
tctctggctccttttccgaaagagt

SEQ ID NO: 185146 - DNA, 25 bp, Canis familiaris
tctgctgggccgtggactgaagaga

SEQ ID NO: 185147 - DNA, 25 bp, Canis familiaris
tctctggggctgggaacattgcggc

SEQ ID NO: 185148 - DNA, 25 bp, Canis familiaris
tctgcaggggtgtgttcatcgctgg

SEQ ID NO: 185149 - DNA, 25 bp, Canis familiaris
tctaagggagcatctgtcccaggcc

SEQ ID NO: 185150 - DNA, 25 bp, Canis familiaris
tctcctgggagatagtaccctcctc

SEQ ID NO: 185151 - DNA, 25 bp, Canis familiaris
tcatccggaaggtgttcctcgtgct

SEQ ID NO: 185152 - DNA, 25 bp, Canis familiaris
tctccggatcaatggtctccacgat

SEQ ID NO: 185153 - DNA, 25 bp, Canis familiaris
tctcctggccagtgttactcacaat

SEQ ID NO: 185154 - DNA, 25 bp, Canis familiaris
tctcctgcgcggtgtcataccgcgg

SEQ ID NO: 185155 - DNA, 25 bp, Canis familiaris
tctctccacgtgtggcaacttgctc

SEQ ID NO: 185156 - DNA, 25 bp, Canis familiaris
tctcctcatcgttagtagactgtag

SEQ ID NO: 185157 - DNA, 25 bp, Canis familiaris
tctccctgcaggcgctgaagtgtag

SEQ ID NO: 185158 - DNA, 25 bp, Canis familiaris
tctctcctgcagtatgagtgatggg

SEQ ID NO: 185159 - DNA, 25 bp, Canis familiaris
tctcatcactgaccaagtcatcctg

SEQ ID NO: 185160 - DNA, 25 bp, Canis familiaris
tctgcacctgaatggctgacctgac

SEQ ID NO: 185161 - DNA, 25 bp, Canis familiaris
ttgacggaagggcaccaccaggagt

SEQ ID NO: 185162 - DNA, 25 bp, Canis familiaris
tctgacagggggtctcagccctaat

SEQ ID NO: 185163 - DNA, 25 bp, Canis familiaris
ttaccgtgggatcagcgactagcag

SEQ ID NO: 185164 - DNA, 25 bp, Canis familiaris
tctcaacttgggaaaccctcactgg

SEQ ID NO: 185165 - DNA, 25 bp, Canis familiaris
tctgactctatgagatacaccagta

SEQ ID NO: 185166 - DNA, 25 bp, Canis familiaris
tctgcccagattagtatcaccctat

SEQ ID NO: 185167 - DNA, 25 bp, Canis familiaris
tctgccacagagtctaaatcacctt

SEQ ID NO: 185168 - DNA, 25 bp, Canis familiaris
tcagaccctttacacacactgttca

SEQ ID NO: 185169 - DNA, 25 bp, Canis familiaris
tcataccctttggagaacgcagttc

SEQ ID NO: 185170 - DNA, 25 bp, Canis familiaris
tctacccaggaggaggaaacttcac

SEQ ID NO: 185171 - DNA, 25 bp, Canis familiaris
ttacccgtaaagtgacatgtaccat

SEQ ID NO: 185172 - DNA, 25 bp, Canis familiaris
ttacttcgaaaaccgcaaggccctg

SEQ ID NO: 185173 - DNA, 25 bp, Canis familiaris
tctttgggagaaacccacggaactg

SEQ ID NO: 185174 - DNA, 25 bp, Canis familiaris
tcttttcaggacacaccgggacctg

SEQ ID NO: 185175 - DNA, 25 bp, Canis familiaris
tctttagatgtcgtatccggaggag

SEQ ID NO: 185176 - DNA, 25 bp, Canis familiaris
tctctgatatggagtaccccaggct

SEQ ID NO: 185177 - DNA, 25 bp, Canis familiaris
tctctgttggaggaacactcagccc

SEQ ID NO: 185178 - DNA, 25 bp, Canis familiaris
tcttttgggaaacgacaggactggg

SEQ ID NO: 185179 - DNA, 25 bp, Canis familiaris
tctttgtgcggatccggattcactg

SEQ ID NO: 185180 - DNA, 25 bp, Canis familiaris
tctcttgcggactcggagttcactg

SEQ ID NO: 185181 - DNA, 25 bp, Canis familiaris
tctcttgccacctcaggaggttcca

SEQ ID NO: 185182 - DNA, 25 bp, Canis familiaris
tctgctgtccatggcttcaggaagc

SEQ ID NO: 185183 - DNA, 25 bp, Canis familiaris
tctgccctgcatggtgacatggacc

SEQ ID NO: 185184 - DNA, 25 bp, Canis familiaris
tctccagatctgtttctggcctcgg

SEQ ID NO: 185185 - DNA, 25 bp, Canis familiaris
tctccgtctgatctctacctgacgg

SEQ ID NO: 185186 - DNA, 25 bp, Canis familiaris
tctcttgaggatctcccgtagtgtg

SEQ ID NO: 185187 - DNA, 25 bp, Canis familiaris
tctctgggatatttccacttgtgtt

SEQ ID NO: 185188 - DNA, 25 bp, Canis familiaris
tctcggcattaatccgtttatgtga

SEQ ID NO: 185189 - DNA, 25 bp, Canis familiaris
tctaagtgcgaaatcctgtttggga

SEQ ID NO: 185190 - DNA, 25 bp, Canis familiaris
tcattggttaatactttcttggaaa

SEQ ID NO: 185191 - DNA, 25 bp, Canis familiaris
tctcccctagctcagctttaggaaa

SEQ ID NO: 185192 - DNA, 25 bp, Canis familiaris
tctccaccgtatctcattacaggga

SEQ ID NO: 185193 - DNA, 25 bp, Canis familiaris
tctcggacagataaattaacgtgaa

SEQ ID NO: 185194 - DNA, 25 bp, Canis familiaris
tctcgtgccgggaacactgactact

SEQ ID NO: 185195 - DNA, 25 bp, Canis familiaris
tctagtctctgcgggaacaggccct

SEQ ID NO: 185196 - DNA, 25 bp, Canis familiaris
tctagtatctgtgggcagcagcgac

SEQ ID NO: 185197 - DNA, 25 bp, Canis familiaris
tctgctgtttgaagcgcagcaggtg

SEQ ID NO: 185198 - DNA, 25 bp, Canis familiaris
tctgctttctgcactgggaggtggt

SEQ ID NO: 185199 - DNA, 25 bp, Canis familiaris
tctgcttcctcagctggaaaggagg

SEQ ID NO: 185200 - DNA, 25 bp, Canis familiaris
tctgctgtcacaggactggagggta

SEQ ID NO: 185201 - DNA, 25 bp, Canis familiaris
tctgcgtcaatccagtggccaagga

SEQ ID NO: 185202 - DNA, 25 bp, Canis familiaris
tctgctctgcaatgatggacacaag

SEQ ID NO: 185203 - DNA, 25 bp, Canis familiaris
tctgcttctacactggagccagcta

SEQ ID NO: 185204 - DNA, 25 bp, Canis familiaris
tctgctccgactcggacaactactg

SEQ ID NO: 185205 - DNA, 25 bp, Canis familiaris
tctctccaaggctgccaactgacag

SEQ ID NO: 185206 - DNA, 25 bp, Canis familiaris
tctctttcgagctgtttgcagacaa

SEQ ID NO: 185207 - DNA, 25 bp, Canis familiaris
tctccttgggattttcctgcagcaa

SEQ ID NO: 185208 - DNA, 25 bp, Canis familiaris
tctcctattgaaacttgcccagatg

SEQ ID NO: 185209 - DNA, 25 bp, Canis familiaris
tctccataggacactcctcactgag

SEQ ID NO: 185210 - DNA, 25 bp, Canis familiaris
tctcctgggcaagcccagcttcagc

SEQ ID NO: 185211 - DNA, 25 bp, Canis familiaris
tctcctgggcaagcgccatggtgac

SEQ ID NO: 185212 - DNA, 25 bp, Canis familiaris
tctccattggcgtgcccaagagcca

SEQ ID NO: 185213 - DNA, 25 bp, Canis familiaris
tctccattgcgccaattccgagagg

SEQ ID NO: 185214 - DNA, 25 bp, Canis familiaris
tctccatagtggcattcctgtcatc

SEQ ID NO: 185215 - DNA, 25 bp, Canis familiaris
tctcctagatggcacggcgtgatct

SEQ ID NO: 185216 - DNA, 25 bp, Canis familiaris
tctccaagcagacctgggcaatgtc

SEQ ID NO: 185217 - DNA, 25 bp, Canis familiaris
tctccatgactaactgtgtaagtgc

SEQ ID NO: 185218 - DNA, 25 bp, Canis familiaris
tctgccagcccactgttgtatacgc

SEQ ID NO: 185219 - DNA, 25 bp, Canis familiaris
tctgctgacccacacatgagaacac

SEQ ID NO: 185220 - DNA, 25 bp, Canis familiaris
tctgctggaactccatctcagaaca

SEQ ID NO: 185221 - DNA, 25 bp, Canis familiaris
tctgcattaactcctcagctagcac

SEQ ID NO: 185222 - DNA, 25 bp, Canis familiaris
tctgcaaatagtggccagccccagg

SEQ ID NO: 185223 - DNA, 25 bp, Canis familiaris
tctgcacagatacttctaccttcga

SEQ ID NO: 185224 - DNA, 25 bp, Canis familiaris
tctgcagcacgtcattacctactgg

SEQ ID NO: 185225 - DNA, 25 bp, Canis familiaris
tctacacgctggttacctacgtacc

SEQ ID NO: 185226 - DNA, 25 bp, Canis familiaris
tctcaaccggagacattggaccata

SEQ ID NO: 185227 - DNA, 25 bp, Canis familiaris
tctccacccggaatgctgggatcga

SEQ ID NO: 185228 - DNA, 25 bp, Canis familiaris
tctccacccggaatgctgggatcga

SEQ ID NO: 185229 - DNA, 25 bp, Canis familiaris
tctcctcccgcgaggggtgagaggg

SEQ ID NO: 185230 - DNA, 25 bp, Canis familiaris
tctccattgcagaggggggtaaggg

SEQ ID NO: 185231 - DNA, 25 bp, Canis familiaris
tctcctctgcacagcggagggcgaa

SEQ ID NO: 185232 - DNA, 25 bp, Canis familiaris
tctcctctccggtggatgtggtaaa

SEQ ID NO: 185233 - DNA, 25 bp, Canis familiaris
tctcccatctctaccggaaggtaaa

SEQ ID NO: 185234 - DNA, 25 bp, Canis familiaris
tctgccacttcagcttggaaactta

SEQ ID NO: 185235 - DNA, 25 bp, Canis familiaris
tctgcccggaccaaggatacagcct

SEQ ID NO: 185236 - DNA, 25 bp, Canis familiaris
tctccactttccaaggtgactgcct

SEQ ID NO: 185237 - DNA, 25 bp, Canis familiaris
tctacatccttctgcggaacggtgt

SEQ ID NO: 185238 - DNA, 25 bp, Canis familiaris
tctcaacctagagcggatccggcat

SEQ ID NO: 185239 - DNA, 25 bp, Canis familiaris
tctcaacaaccagcagttcctggca

SEQ ID NO: 185240 - DNA, 25 bp, Canis familiaris
tctaacaaccttttctacataccaa

SEQ ID NO: 185241 - DNA, 25 bp, Canis familiaris
tctacaacaatcttttgaccgtcca

SEQ ID NO: 185242 - DNA, 25 bp, Canis familiaris
tctccatagtacttattaccaccta

SEQ ID NO: 185243 - DNA, 25 bp, Canis familiaris
tctaagagtactacctcacctctct

SEQ ID NO: 185244 - DNA, 25 bp, Canis familiaris
tctgcactgaatggctgacctgacc

SEQ ID NO: 185245 - DNA, 25 bp, Canis familiaris
tctgcactgaatggctgacctgacc

SEQ ID NO: 185246 - DNA, 25 bp, Canis familiaris
tctgcactgaatggctgacctgacc

SEQ ID NO: 185247 - DNA, 25 bp, Canis familiaris
tctgcactgaatggctgacctgacc

SEQ ID NO: 185248 - DNA, 25 bp, Canis familiaris
tctgcaggagctgggacttgtgcct

SEQ ID NO: 185249 - DNA, 25 bp, Canis familiaris
tctcaacacatgggacttcgtctca

SEQ ID NO: 185250 - DNA, 25 bp, Canis familiaris
tctagaggatcccatctatagttca

SEQ ID NO: 185251 - DNA, 25 bp, Canis familiaris
tctagaggatccatcccataaaaaa

SEQ ID NO: 185252 - DNA, 25 bp, Canis familiaris
tctaaggtcccctctagatcagaac

SEQ ID NO: 185253 - DNA, 25 bp, Canis familiaris
tctagggtctctgccactgaatggc

SEQ ID NO: 185254 - DNA, 25 bp, Canis familiaris
tctagaggttgctcagacgaccgcg

SEQ ID NO: 185255 - DNA, 25 bp, Canis familiaris
tctctggggtctacagcacccccag

SEQ ID NO: 185256 - DNA, 25 bp, Canis familiaris
tctgctgcgacaataaaacctccca

SEQ ID NO: 185257 - DNA, 25 bp, Canis familiaris
tctgctggaactcaacttcttgcca

SEQ ID NO: 185258 - DNA, 25 bp, Canis familiaris
tctgcgatgtacatatactagttta

SEQ ID NO: 185259 - DNA, 25 bp, Canis familiaris
tctgcgatgtacataactatttaat

SEQ ID NO: 185260 - DNA, 25 bp, Canis familiaris
tctctctgtgaatacaccaaaaaaa

SEQ ID NO: 185261 - DNA, 25 bp, Canis familiaris
tctcctgtgtgtgtatccaccaata

SEQ ID NO: 185262 - DNA, 25 bp, Canis familiaris
tctgccatctgtgaatccagaccag

SEQ ID NO: 185263 - DNA, 25 bp, Canis familiaris
tctgcctctgataaccacaagtctg

SEQ ID NO: 185264 - DNA, 25 bp, Canis familiaris
tctgccttatttcctcatgtgattg

SEQ ID NO: 185265 - DNA, 25 bp, Canis familiaris
tctccttttgagaagcagctcttgg

SEQ ID NO: 185266 - DNA, 25 bp, Canis familiaris
tctgcccatctcgggacactatagc

SEQ ID NO: 185267 - DNA, 25 bp, Canis familiaris
tctgcccagctcaagtgatgaccta

SEQ ID NO: 185268 - DNA, 25 bp, Canis familiaris
tctgctctcaggaagaatgatgcct

SEQ ID NO: 185269 - DNA, 25 bp, Canis familiaris
tctgctgtaattagaatgccagtcg

SEQ ID NO: 185270 - DNA, 25 bp, Canis familiaris
tctgctgataccttgattcctttgg

SEQ ID NO: 185271 - DNA, 25 bp, Canis familiaris
tctctgatactattttcccgtggga

SEQ ID NO: 185272 - DNA, 25 bp, Canis familiaris
tctcttactacatcccataaggggt

SEQ ID NO: 185273 - DNA, 25 bp, Canis familiaris
tctctggcactaaccccaaatgacg

SEQ ID NO: 185274 - DNA, 25 bp, Canis familiaris
tctctgtcactgttcccggaagcac

SEQ ID NO: 185275 - DNA, 25 bp, Canis familiaris
tctctgaattgttccgtaggcacct

SEQ ID NO: 185276 - DNA, 25 bp, Canis familiaris
tctctacattgcttcgctgctatta

SEQ ID NO: 185277 - DNA, 25 bp, Canis familiaris
tctccatgcgtggttctgctcatgg

SEQ ID NO: 185278 - DNA, 25 bp, Canis familiaris
tctccacagctgccttagtagtgcg

SEQ ID NO: 185279 - DNA, 25 bp, Canis familiaris
tctctgccagctgcttcattgagga

SEQ ID NO: 185280 - DNA, 25 bp, Canis familiaris
tctgctctctgctatattctgtgat

SEQ ID NO: 185281 - DNA, 25 bp, Canis familiaris
tctgcttgtcacatctctgatgctg

SEQ ID NO: 185282 - DNA, 25 bp, Canis familiaris
tctctgtctcacacagatgcactga

SEQ ID NO: 185283 - DNA, 25 bp, Canis familiaris
tctgctggtgcacgacgatgtctga

SEQ ID NO: 185284 - DNA, 25 bp, Canis familiaris
tctgctgggcatgcattctgcacta

SEQ ID NO: 185285 - DNA, 25 bp, Canis familiaris
tctgctggagcggcttccagccatg

SEQ ID NO: 185286 - DNA, 25 bp, Canis familiaris
tctgctggaggccaatccacaggcc

SEQ ID NO: 185287 - DNA, 25 bp, Canis familiaris
tctctggtgggaccatacagcatgt

SEQ ID NO: 185288 - DNA, 25 bp, Canis familiaris
tcttgctggtggcccatatagctgc

SEQ ID NO: 185289 - DNA, 25 bp, Canis familiaris
tctgcttggtggacctcgagacagg

SEQ ID NO: 185290 - DNA, 25 bp, Canis familiaris
tctgcttgagctgggtcctggatat

SEQ ID NO: 185291 - DNA, 25 bp, Canis familiaris
tctctatggcatcgctgtcacagga

SEQ ID NO: 185292 - DNA, 25 bp, Canis familiaris
tctgctatctgcttgctgaatcact

SEQ ID NO: 185293 - DNA, 25 bp, Canis familiaris
tctgctttgctgtctcatgacttga

SEQ ID NO: 185294 - DNA, 25 bp, Canis familiaris
tctgctattctgttcatgttgtccc

SEQ ID NO: 185295 - DNA, 25 bp, Canis familiaris
tctgctttcagctcagctcatgatc

SEQ ID NO: 185296 - DNA, 25 bp, Canis familiaris
tctctttagaacgtatgactccccc

SEQ ID NO: 185297 - DNA, 25 bp, Canis familiaris
tctcctgagtttctagatctacacc

SEQ ID NO: 185298 - DNA, 25 bp, Canis familiaris
tctcccagtttacatgttcacacgt

SEQ ID NO: 185299 - DNA, 25 bp, Canis familiaris
tctgcccccttcaaaggtaccagat

SEQ ID NO: 185300 - DNA, 25 bp, Canis familiaris
tctccacctcttgagggtgcttgga

SEQ ID NO: 185301 - DNA, 25 bp, Canis familiaris
tctccactccatcggagctggtggg

SEQ ID NO: 185302 - DNA, 25 bp, Canis familiaris
tctccacccatgctcatgaggaaga

SEQ ID NO: 185303 - DNA, 25 bp, Canis familiaris
tctcaccggcacttagaggaaattt

SEQ ID NO: 185304 - DNA, 25 bp, Canis familiaris
tctcacccaccgtggggcaatctct

SEQ ID NO: 185305 - DNA, 25 bp, Canis familiaris
tctccccaccgcaggagggagcacc

SEQ ID NO: 185306 - DNA, 25 bp, Canis familiaris
tctcgtccatccgttgacggtgatc

SEQ ID NO: 185307 - DNA, 25 bp, Canis familiaris
tctcccacagccgttgaggtgtgtt

SEQ ID NO: 185308 - DNA, 25 bp, Canis familiaris
tctcccttccattctgcaggagttt

SEQ ID NO: 185309 - DNA, 25 bp, Canis familiaris
tctccctccgatctggatagtttag

SEQ ID NO: 185310 - DNA, 25 bp, Canis familiaris
tctcctcggaatctgtcggtgtgtg

SEQ ID NO: 185311 - DNA, 25 bp, Canis familiaris
tctccctgtgagcactgtctgggtg

SEQ ID NO: 185312 - DNA, 25 bp, Canis familiaris
tctccggatgagtgcctctggatgg

SEQ ID NO: 185313 - DNA, 25 bp, Canis familiaris
tctccggcttcttcactcggaggat

SEQ ID NO: 185314 - DNA, 25 bp, Canis familiaris
tctcctggccttccagtttgggatg

SEQ ID NO: 185315 - DNA, 25 bp, Canis familiaris
tctcctggtttttgatgttcggctc

SEQ ID NO: 185316 - DNA, 25 bp, Canis familiaris
tctccggtctattctcatttcggga

SEQ ID NO: 185317 - DNA, 25 bp, Canis familiaris
tctctggtgttctttgttgttggga

SEQ ID NO: 185318 - DNA, 25 bp, Canis familiaris
tctgctgtgtgtattgtcttttggt

SEQ ID NO: 185319 - DNA, 25 bp, Canis familiaris
tctgctgttttggccttttgtagta

SEQ ID NO: 185320 - DNA, 25 bp, Canis familiaris
tctgctcttcttggcactgtagagt

SEQ ID NO: 185321 - DNA, 25 bp, Canis familiaris
tctctcctgcttgcacgtagtgtac

SEQ ID NO: 185322 - DNA, 25 bp, Canis familiaris
tctccaccttggctgtacatgtgca

SEQ ID NO: 185323 - DNA, 25 bp, Canis familiaris
tctccctcatttgagttctgctgca

SEQ ID NO: 185324 - DNA, 25 bp, Canis familiaris
tctgccctatctaacatttctgaat

SEQ ID NO: 185325 - DNA, 25 bp, Canis familiaris
tctgcttctcattgaatctcttctt

SEQ ID NO: 185326 - DNA, 25 bp, Canis familiaris
tctgcttttcagatatcgtctctat

SEQ ID NO: 185327 - DNA, 25 bp, Canis familiaris
tctgcttctaagaaacctccatctt

SEQ ID NO: 185328 - DNA, 25 bp, Canis familiaris
tctgctcaaaacatactcttctctt

SEQ ID NO: 185329 - DNA, 25 bp, Canis familiaris
tctgctataaccgttacacctttgc

SEQ ID NO: 185330 - DNA, 25 bp, Canis familiaris
tcaggtcaagccttttccttttcat

SEQ ID NO: 185331 - DNA, 25 bp, Canis familiaris
tcttagataggcttttatttttcat

SEQ ID NO: 185332 - DNA, 25 bp, Canis familiaris
tctcaagactgcccagtttttttac

SEQ ID NO: 185333 - DNA, 25 bp, Canis familiaris
taataacttgcccactggtttaaca

SEQ ID NO: 185334 - DNA, 25 bp, Canis familiaris
tcacaaaggtaccaaagtttcatta

SEQ ID NO: 185335 - DNA, 25 bp, Canis familiaris
ttcagccaagtaccaaaatttaaag

SEQ ID NO: 185336 - DNA, 25 bp, Canis familiaris
tacggggtggcctaaatacaaacag

SEQ ID NO: 185337 - DNA, 25 bp, Canis familiaris
tagggttgggcagttgaaccaaagt

SEQ ID NO: 185338 - DNA, 25 bp, Canis familiaris
tctccctgtgggtttggaacaaagt

SEQ ID NO: 185339 - DNA, 25 bp, Canis familiaris
tctccactgggtaatgtggaaaaaa

SEQ ID NO: 185340 - DNA, 25 bp, Canis familiaris
tctgcccatagactttggttcaaaa

SEQ ID NO: 185341 - DNA, 25 bp, Canis familiaris
tctcctcttaattcatggacccaaa

SEQ ID NO: 185342 - DNA, 25 bp, Canis familiaris
tctcctcctatttattgactttgac

SEQ ID NO: 185343 - DNA, 25 bp, Canis familiaris
ttccttttcctctgaatttcgggag

SEQ ID NO: 185344 - DNA, 25 bp, Canis familiaris
ttccctttccttgcgtattctggaa

SEQ ID NO: 185345 - DNA, 25 bp, Canis familiaris
tctcccctttctatcttgatattgg

SEQ ID NO: 185346 - DNA, 25 bp, Canis familiaris
tctccccgtgtcttttcgaaaagat

SEQ ID NO: 185347 - DNA, 25 bp, Canis familiaris
tctcccctctgttttaagagacctg

SEQ ID NO: 185348 - DNA, 25 bp, Canis familiaris
tctccccttgtcttgctaaatatag

SEQ ID NO: 185349 - DNA, 25 bp, Canis familiaris
tctcctccttcctttactaacagga

SEQ ID NO: 185350 - DNA, 25 bp, Canis familiaris
tctccccttaccccagggaatggag

SEQ ID NO: 185351 - DNA, 25 bp, Canis familiaris
tctcccttaactccctagtataggg

SEQ ID NO: 185352 - DNA, 25 bp, Canis familiaris
tctcctttaccgtcttagtacattc

SEQ ID NO: 185353 - DNA, 25 bp, Canis familiaris
ttcctttgacgctcctagtagttat

SEQ ID NO: 185354 - DNA, 25 bp, Canis familiaris
tctcccatttcctcctggaggattt

SEQ ID NO: 185355 - DNA, 25 bp, Canis familiaris
tctccctctacctgcaagacaggaa

SEQ ID NO: 185356 - DNA, 25 bp, Canis familiaris
tctctcccatacctacaaggcaggg

SEQ ID NO: 185357 - DNA, 25 bp, Canis familiaris
tcactgacttctcaccaaggcaagg

SEQ ID NO: 185358 - DNA, 25 bp, Canis familiaris
tctgctgagttttcccaatgggagg

SEQ ID NO: 185359 - DNA, 25 bp, Canis familiaris
tctctgagtatggttgtcacggcga

SEQ ID NO: 185360 - DNA, 25 bp, Canis familiaris
tctctgctgaaggttgtaagtggtc

SEQ ID NO: 185361 - DNA, 25 bp, Canis familiaris
tctcttcaggccgtgtcaagctggc

SEQ ID NO: 185362 - DNA, 25 bp, Canis familiaris
tctcttcaggggctcaggttgtagt

SEQ ID NO: 185363 - DNA, 25 bp, Canis familiaris
tctctccgcgggcatcagagtttat

SEQ ID NO: 185364 - DNA, 25 bp, Canis familiaris
tctctcccaggagttagttttttgg

SEQ ID NO: 185365 - DNA, 25 bp, Canis familiaris
tctccgtagtatttcagtaccgctc

SEQ ID NO: 185366 - DNA, 25 bp, Canis familiaris
tctccagggaagttctgtagcctca

SEQ ID NO: 185367 - DNA, 25 bp, Canis familiaris
tctcctgaggaggttcctggcctcc

SEQ ID NO: 185368 - DNA, 25 bp, Canis familiaris
tctcagtgaaagttgtctcgtccct

SEQ ID NO: 185369 - DNA, 25 bp, Canis familiaris
tctcgtcaaatgtctatcttccact

SEQ ID NO: 185370 - DNA, 25 bp, Canis familiaris
tctgcccattgtccatgatttacac

SEQ ID NO: 185371 - DNA, 25 bp, Canis familiaris
tctgcccaggctgctgacttaaagg

SEQ ID NO: 185372 - DNA, 25 bp, Canis familiaris
tctccacaggctaccacattcaata

SEQ ID NO: 185373 - DNA, 25 bp, Canis familiaris
tctctctagagcaacccttacaaca

SEQ ID NO: 185374 - DNA, 25 bp, Canis familiaris
tctcctagctctaaccttcaagatc

SEQ ID NO: 185375 - DNA, 25 bp, Canis familiaris
tctcagaccttaaccatccaatgac

SEQ ID NO: 185376 - DNA, 25 bp, Canis familiaris
tctaccgctgtctggtccaagaagg

SEQ ID NO: 185377 - DNA, 25 bp, Canis familiaris
tctacggatacatggctcgtttagt

SEQ ID NO: 185378 - DNA, 25 bp, Canis familiaris
tctctgggtcaatacaagtcttcac

SEQ ID NO: 185379 - DNA, 25 bp, Canis familiaris
tctctgggtccctcagaactgatct

SEQ ID NO: 185380 - DNA, 25 bp, Canis familiaris
ttcccagtcccgtgaaattgttgtc

SEQ ID NO: 185381 - DNA, 25 bp, Canis familiaris
tctcccagtcccaggaagcttttaa

SEQ ID NO: 185382 - DNA, 25 bp, Canis familiaris
tctcaccaacgctttcaaacgattt

SEQ ID NO: 185383 - DNA, 25 bp, Canis familiaris
tctcccaaactactaatacggtctt

SEQ ID NO: 185384 - DNA, 25 bp, Canis familiaris
tctgcccatttctacagaaaccagt

SEQ ID NO: 185385 - DNA, 25 bp, Canis familiaris
tctgctccacctaacaaaccaagag

SEQ ID NO: 185386 - DNA, 25 bp, Canis familiaris
tctccccactctgaaagctaaggtc

SEQ ID NO: 185387 - DNA, 25 bp, Canis familiaris
tctgccctccttataacatcgggtc

SEQ ID NO: 185388 - DNA, 25 bp, Canis familiaris
tctgccgtggccatggtccacgggc

SEQ ID NO: 185389 - DNA, 25 bp, Canis familiaris
tctacgtagccgtcgtcaacgtgca

SEQ ID NO: 185390 - DNA, 25 bp, Canis familiaris
tctccagtactcatttgcaactatc

SEQ ID NO: 185391 - DNA, 25 bp, Canis familiaris
tctctggaactccctggatatctat

SEQ ID NO: 185392 - DNA, 25 bp, Canis familiaris
tctctggaactcccttcagttaatt

SEQ ID NO: 185393 - DNA, 25 bp, Canis familiaris
tctgcgggcagctgtgcttagttaa

SEQ ID NO: 185394 - DNA, 25 bp, Canis familiaris
tctgcgtcctattgctgtgtcagtt

SEQ ID NO: 185395 - DNA, 25 bp, Canis familiaris
tctgccttcagcttgtggatgtgtt

SEQ ID NO: 185396 - DNA, 25 bp, Canis familiaris
tctccctcagcttctgagcaggttc

SEQ ID NO: 185397 - DNA, 25 bp, Canis familiaris
tctccccatccaggaggagctctca

SEQ ID NO: 185398 - DNA, 25 bp, Canis familiaris
tctctccacacccatggggctaaag

SEQ ID NO: 185399 - DNA, 25 bp, Canis familiaris
tctgcccaacaccagtagtgccaac

SEQ ID NO: 185400 - DNA, 25 bp, Canis familiaris
tctccaccatcctaaagatccagtc

SEQ ID NO: 185401 - DNA, 25 bp, Canis familiaris
tctccatctctgctagaagaccaac

SEQ ID NO: 185402 - DNA, 25 bp, Canis familiaris
tctccctctctaagcaacaggcagg

SEQ ID NO: 185403 - DNA, 25 bp, Canis familiaris
tctcgctctcgccttgagaaggctg

SEQ ID NO: 185404 - DNA, 25 bp, Canis familiaris
tctctgctcctggttagcatcttgt

SEQ ID NO: 185405 - DNA, 25 bp, Canis familiaris
tctctctgcactgctggacatggtg

SEQ ID NO: 185406 - DNA, 25 bp, Canis familiaris
tctcctgacatcatggaccacagca

SEQ ID NO: 185407 - DNA, 25 bp, Canis familiaris
tctgcctcactcatgggcactgtga

SEQ ID NO: 185408 - DNA, 25 bp, Canis familiaris
tctgcctatccactcaggtcatgat

SEQ ID NO: 185409 - DNA, 25 bp, Canis familiaris
tctgccttcagctcagggcatgatc

SEQ ID NO: 185410 - DNA, 25 bp, Canis familiaris
tctgccttcagctcagggcatgatc

SEQ ID NO: 185411 - DNA, 25 bp, Canis familiaris
tctgcctttgcttcagaacatgagc

SEQ ID NO: 185412 - DNA, 25 bp, Canis familiaris
tctcctgcgacttcaacagcaactc

SEQ ID NO: 185413 - DNA, 25 bp, Canis familiaris
tctcctctgacttcaacagcgacac

SEQ ID NO: 185414 - DNA, 25 bp, Canis familiaris
tctcatatgcccttcaacagctgaa

SEQ ID NO: 185415 - DNA, 25 bp, Canis familiaris
tctcatatgaagttacgcgtagcga

SEQ ID NO: 185416 - DNA, 25 bp, Canis familiaris
tctcctgagcagccgaggcgtgagg

SEQ ID NO: 185417 - DNA, 25 bp, Canis familiaris
tctcacaggcagcaaactggatgga

SEQ ID NO: 185418 - DNA, 25 bp, Canis familiaris
tctcctagagagtatacggtgcgac

SEQ ID NO: 185419 - DNA, 25 bp, Canis familiaris
tctccgagctggattcagagtctga

SEQ ID NO: 185420 - DNA, 25 bp, Canis familiaris
tctccccatgctacttaggactgag

SEQ ID NO: 185421 - DNA, 25 bp, Canis familiaris
tctcctcctctaattggtgcattag

SEQ ID NO: 185422 - DNA, 25 bp, Canis familiaris
tctgccttgcttgtttgagcttcag

SEQ ID NO: 185423 - DNA, 25 bp, Canis familiaris
tctgccttggtgggtgagcctggca

SEQ ID NO: 185424 - DNA, 25 bp, Canis familiaris
tctcctatggtgggtgctttgtccc

SEQ ID NO: 185425 - DNA, 25 bp, Canis familiaris
tctcctcatggtgggcatctgtgga

SEQ ID NO: 185426 - DNA, 25 bp, Canis familiaris
tctccttgtgtcttcagtgtggctt

SEQ ID NO: 185427 - DNA, 25 bp, Canis familiaris
tctccagagcgtgtcagcttggctc

SEQ ID NO: 185428 - DNA, 25 bp, Canis familiaris
tctccagccctatccatattgctgc

SEQ ID NO: 185429 - DNA, 25 bp, Canis familiaris
tctccacccagtctcatgatggaga

SEQ ID NO: 185430 - DNA, 25 bp, Canis familiaris
tctcccctctgtggtcaatgaagat

SEQ ID NO: 185431 - DNA, 25 bp, Canis familiaris
tctctgacctcttcatctttgataa

SEQ ID NO: 185432 - DNA, 25 bp, Canis familiaris
tctctgcacttttcttctggggaga

SEQ ID NO: 185433 - DNA, 25 bp, Canis familiaris
tctccatctttcctgcctggaaagg

SEQ ID NO: 185434 - DNA, 25 bp, Canis familiaris
tctctacttctcttcctcatagaag

SEQ ID NO: 185435 - DNA, 25 bp, Canis familiaris
tctccacttctcatggtcaaatgta

SEQ ID NO: 185436 - DNA, 25 bp, Canis familiaris
tctgccctatgccaagttcacagtt

SEQ ID NO: 185437 - DNA, 25 bp, Canis familiaris
tctcactcaactcaatgtcacactt

SEQ ID NO: 185438 - DNA, 25 bp, Canis familiaris
tctccagcaacatatttccagttcc

SEQ ID NO: 185439 - DNA, 25 bp, Canis familiaris
tctcgcacaacttttctccgattac

SEQ ID NO: 185440 - DNA, 25 bp, Canis familiaris
tctccaaagcgcttgttgcctatta

SEQ ID NO: 185441 - DNA, 25 bp, Canis familiaris
tctccctagagctttgccgtttggg

SEQ ID NO: 185442 - DNA, 25 bp, Canis familiaris
tctgccctagaacttcctcattagg

SEQ ID NO: 185443 - DNA, 25 bp, Canis familiaris
tctgccccagaaagtctccagatag

SEQ ID NO: 185444 - DNA, 25 bp, Canis familiaris
tcttacctgcactgttcagactcag

SEQ ID NO: 185445 - DNA, 25 bp, Canis familiaris
tctacacctacggctttatgctgca

SEQ ID NO: 185446 - DNA, 25 bp, Canis familiaris
tctaacctaaatccttcatgctgca

SEQ ID NO: 185447 - DNA, 25 bp, Canis familiaris
tctaactttaatcttttctcttcct

SEQ ID NO: 185448 - DNA, 25 bp, Canis familiaris
tctaacgttattcatttcctttcag

SEQ ID NO: 185449 - DNA, 25 bp, Canis familiaris
tctaccctctttattgttccttagg

SEQ ID NO: 185450 - DNA, 25 bp, Canis familiaris
tctcgccctttggcttgtttcaatt

SEQ ID NO: 185451 - DNA, 25 bp, Canis familiaris
tctcccacttgggcttgatggccca

SEQ ID NO: 185452 - DNA, 25 bp, Canis familiaris
tctcccaatggtggcgtgatggccc

SEQ ID NO: 185453 - DNA, 25 bp, Canis familiaris
tctcgccgcagccttgtggtgcggc

SEQ ID NO: 185454 - DNA, 25 bp, Canis familiaris
tctcccagctgccagtgggtgcaag

SEQ ID NO: 185455 - DNA, 25 bp, Canis familiaris
tctccacattccactggtcagagca

SEQ ID NO: 185456 - DNA, 25 bp, Canis familiaris
tctccaatttcaaatgttcagattt

SEQ ID NO: 185457 - DNA, 25 bp, Canis familiaris
tctctgacttactttgcttagcatt

SEQ ID NO: 185458 - DNA, 25 bp, Canis familiaris
tctctgccttagttgtctcacaact

SEQ ID NO: 185459 - DNA, 25 bp, Canis familiaris
tctccatttacacttctcagcaaat

SEQ ID NO: 185460 - DNA, 25 bp, Canis familiaris
tctccacgtatgcatcttagcagaa

SEQ ID NO: 185461 - DNA, 25 bp, Canis familiaris
tctctgccctgcagactatccagag

SEQ ID NO: 185462 - DNA, 25 bp, Canis familiaris
tctccccatatcactatctacagtt

SEQ ID NO: 185463 - DNA, 25 bp, Canis familiaris
tctccatcgaccgctacataggtgt

SEQ ID NO: 185464 - DNA, 25 bp, Canis familiaris
tctccaaagctcgctatgccatggg

SEQ ID NO: 185465 - DNA, 25 bp, Canis familiaris
tctccaaaagagctcatctctggtg

SEQ ID NO: 185466 - DNA, 25 bp, Canis familiaris
tctccaagaggacaatcatctgggc

SEQ ID NO: 185467 - DNA, 25 bp, Canis familiaris
tctccaagaggacccctgctagaat

SEQ ID NO: 185468 - DNA, 25 bp, Canis familiaris
tctccagccaaacactcctaaaagg

SEQ ID NO: 185469 - DNA, 25 bp, Canis familiaris
tctacccaaggtcctgcagctaata

SEQ ID NO: 185470 - DNA, 25 bp, Canis familiaris
tctacagcgagtcgggcatgcctac

SEQ ID NO: 185471 - DNA, 25 bp, Canis familiaris
tctacagcgccagagtgctgacgcc

SEQ ID NO: 185472 - DNA, 25 bp, Canis familiaris
tctagcaccacaggagactgcaccc

SEQ ID NO: 185473 - DNA, 25 bp, Canis familiaris
tctccatcgtcagacgtcagctcac

SEQ ID NO: 185474 - DNA, 25 bp, Canis familiaris
tctccagcagtagatcgcttcacca

SEQ ID NO: 185475 - DNA, 25 bp, Canis familiaris
tctgcctgccaagatggtgttccac

SEQ ID NO: 185476 - DNA, 25 bp, Canis familiaris
tctgccaccaaggtgaagctgccca

SEQ ID NO: 185477 - DNA, 25 bp, Canis familiaris
tctccctgatcggtgacagtcacta

SEQ ID NO: 185478 - DNA, 25 bp, Canis familiaris
tctccctgactggtgtcagcttcat

SEQ ID NO: 185479 - DNA, 25 bp, Canis familiaris
tctcgcttacagggtgatgcttata

SEQ ID NO: 185480 - DNA, 25 bp, Canis familiaris
tctccctacagaggttctctttcaa

SEQ ID NO: 185481 - DNA, 25 bp, Canis familiaris
tctccccgcagaggatttcgtgtac

SEQ ID NO: 185482 - DNA, 25 bp, Canis familiaris
tctcactccagctaattttctttga

SEQ ID NO: 185483 - DNA, 25 bp, Canis familiaris
tctccttgcacttgcttctttaaca

SEQ ID NO: 185484 - DNA, 25 bp, Canis familiaris
tctccacatgccagttttcctgaaa

SEQ ID NO: 185485 - DNA, 25 bp, Canis familiaris
tctcccatcttgcttttctgcaaaa

SEQ ID NO: 185486 - DNA, 25 bp, Canis familiaris
tctctccacttcctacttaataaac

SEQ ID NO: 185487 - DNA, 25 bp, Canis familiaris
tctcccctccattttagaataaaca

SEQ ID NO: 185488 - DNA, 25 bp, Canis familiaris
tctccctcactttttgtcattaaat

SEQ ID NO: 185489 - DNA, 25 bp, Canis familiaris
tctcctccctcttattcttaggaaa

SEQ ID NO: 185490 - DNA, 25 bp, Canis familiaris
tctcgccgccaatgcttgttcaggc

SEQ ID NO: 185491 - DNA, 25 bp, Canis familiaris
tctctcgccgccaatgcttgttcag

SEQ ID NO: 185492 - DNA, 25 bp, Canis familiaris
tctccgtgactcaatatgggcatca

SEQ ID NO: 185493 - DNA, 25 bp, Canis familiaris
tctcctggctctctagaggccaagg

SEQ ID NO: 185494 - DNA, 25 bp, Canis familiaris
tctactgggcgacgagggccaaagc

SEQ ID NO: 185495 - DNA, 25 bp, Canis familiaris
tctactgtggcgcttgaggctacaa

SEQ ID NO: 185496 - DNA, 25 bp, Canis familiaris
tctcagtgcggcccacatgggcata

SEQ ID NO: 185497 - DNA, 25 bp, Canis familiaris
tctcaggcgcagcgcctcgcgaacg

SEQ ID NO: 185498 - DNA, 25 bp, Canis familiaris
tctcgatgctgctaatgtctgccta

SEQ ID NO: 185499 - DNA, 25 bp, Canis familiaris
tctcagtggctatattcctcctaat

SEQ ID NO: 185500 - DNA, 25 bp, Canis familiaris
tctcggagttttgcaccgtaatagc

SEQ ID NO: 185501 - DNA, 25 bp, Canis familiaris
tctcgacgttggagcccagtttatc

SEQ ID NO: 185502 - DNA, 25 bp, Canis familiaris
tctaaatttggcaccctgtgtcctg

SEQ ID NO: 185503 - DNA, 25 bp, Canis familiaris
tctaagtatctgtcaccccttgact

SEQ ID NO: 185504 - DNA, 25 bp, Canis familiaris
tctacaggcgcgtcatccagcctgt

SEQ ID NO: 185505 - DNA, 25 bp, Canis familiaris
tctccagtcacgtatcgcgtgatct

SEQ ID NO: 185506 - DNA, 25 bp, Canis familiaris
tctcgcagtgcagtggtgcggtaat

SEQ ID NO: 185507 - DNA, 25 bp, Canis familiaris
tctctgcagtgccctgtggttaaaa

SEQ ID NO: 185508 - DNA, 25 bp, Canis familiaris
tctctgcaccccaagtgattcaata

SEQ ID NO: 185509 - DNA, 25 bp, Canis familiaris
tctctccgctccaaggtggatgaag

SEQ ID NO: 185510 - DNA, 25 bp, Canis familiaris
tctctctcgcctatggtgaaagccc

SEQ ID NO: 185511 - DNA, 25 bp, Canis familiaris
tctcttccagcaaatttaaacgcga

SEQ ID NO: 185512 - DNA, 25 bp, Canis familiaris
tctctgcttcctcaaataatccggg

SEQ ID NO: 185513 - DNA, 25 bp, Canis familiaris
tctcgctggcccttgaaaatccggg

SEQ ID NO: 185514 - DNA, 25 bp, Canis familiaris
tctctgttcccaatgataaccactg

SEQ ID NO: 185515 - DNA, 25 bp, Canis familiaris
tctctgttcccatactatgtactac

SEQ ID NO: 185516 - DNA, 25 bp, Canis familiaris
tctcatgtcttcgaaaatctttcat

SEQ ID NO: 185517 - DNA, 25 bp, Canis familiaris
tctcaacttgattacacattttatg

SEQ ID NO: 185518 - DNA, 25 bp, Canis familiaris
tctctgatacgttagatatgttttg

SEQ ID NO: 185519 - DNA, 25 bp, Canis familiaris
tctcgttcatgttaggctgtcttgt

SEQ ID NO: 185520 - DNA, 25 bp, Canis familiaris
tctcgttcatgttagcctgtttgta

SEQ ID NO: 185521 - DNA, 25 bp, Canis familiaris
tctcgttgctctttattgttcgctt

SEQ ID NO: 185522 - DNA, 25 bp, Canis familiaris
tctcgtggtttgaattggtcagccg

SEQ ID NO: 185523 - DNA, 25 bp, Canis familiaris
tctcagggccctcgaggaagagcac

SEQ ID NO: 185524 - DNA, 25 bp, Canis familiaris
tctagggctggactgaggcctgagc

SEQ ID NO: 185525 - DNA, 25 bp, Canis familiaris
tctttgagtgcagtttggcctggcc

SEQ ID NO: 185526 - DNA, 25 bp, Canis familiaris
tctcacaagtgagaataccgcgccc

SEQ ID NO: 185527 - DNA, 25 bp, Canis familiaris
tctcaaagggaaaaccactccctga

SEQ ID NO: 185528 - DNA, 25 bp, Canis familiaris
tcttgagagggcagaacccccctag

SEQ ID NO: 185529 - DNA, 25 bp, Canis familiaris
tcttcagagccgagtacttcctggt

SEQ ID NO: 185530 - DNA, 25 bp, Canis familiaris
tttgcaggcgcaatttaccgaagtt

SEQ ID NO: 185531 - DNA, 25 bp, Canis familiaris
tctccgtggcttttatcctgaagtt

SEQ ID NO: 185532 - DNA, 25 bp, Canis familiaris
tctcctgtgtctttttccaatattg

SEQ ID NO: 185533 - DNA, 25 bp, Canis familiaris
tctcctattctagttcctacataac

SEQ ID NO: 185534 - DNA, 25 bp, Canis familiaris
tctccaggttatactcctttaacga

SEQ ID NO: 185535 - DNA, 25 bp, Canis familiaris
tctccagagtctattttttcaacga

SEQ ID NO: 185536 - DNA, 25 bp, Canis familiaris
tctccaactctttttctgttttcaa

SEQ ID NO: 185537 - DNA, 25 bp, Canis familiaris
tctagtactgtatttggctttttct

SEQ ID NO: 185538 - DNA, 25 bp, Canis familiaris
tctacttcgttttgggctttcatcc

SEQ ID NO: 185539 - DNA, 25 bp, Canis familiaris
tctcagttgagacattggggttatt

SEQ ID NO: 185540 - DNA, 25 bp, Canis familiaris
tctcgctctacatagtcgtggttca

SEQ ID NO: 185541 - DNA, 25 bp, Canis familiaris
tctccttataccacgatagcattca

SEQ ID NO: 185542 - DNA, 25 bp, Canis familiaris
tctcgttattccaggagccctgaaa

SEQ ID NO: 185543 - DNA, 25 bp, Canis familiaris
tctagattatttttttcccgagaat

SEQ ID NO: 185544 - DNA, 25 bp, Canis familiaris
tctaatttttagatcgccctgtatt

SEQ ID NO: 185545 - DNA, 25 bp, Canis familiaris
tctcaccttttggagtaccactgga

SEQ ID NO: 185546 - DNA, 25 bp, Canis familiaris
tctcaggctttaggcattaccatct

SEQ ID NO: 185547 - DNA, 25 bp, Canis familiaris
tctcggctcttgacacttagccgct

SEQ ID NO: 185548 - DNA, 25 bp, Canis familiaris
tctcctgccttccaaatagacgtgg

SEQ ID NO: 185549 - DNA, 25 bp, Canis familiaris
tctctctgcgctaccaaaacaaggc

SEQ ID NO: 185550 - DNA, 25 bp, Canis familiaris
tctctcctgattccaagtcaaatac

SEQ ID NO: 185551 - DNA, 25 bp, Canis familiaris
tctcctctacacgacgtctatatat

SEQ ID NO: 185552 - DNA, 25 bp, Canis familiaris
tctcctctactaaccatctgtatgt

SEQ ID NO: 185553 - DNA, 25 bp, Canis familiaris
tctccctctctatcttttaatacag

SEQ ID NO: 185554 - DNA, 25 bp, Canis familiaris
tctcgtcccatatataaagaacaac

SEQ ID NO: 185555 - DNA, 25 bp, Canis familiaris
tctctggcagtcacgataaaaaaaa

SEQ ID NO: 185556 - DNA, 25 bp, Canis familiaris
tctctgtgactcgcttagctcaaac

SEQ ID NO: 185557 - DNA, 25 bp, Canis familiaris
tctctgctgatagccttgacccagc

SEQ ID NO: 185558 - DNA, 25 bp, Canis familiaris
tctcttgtgactccttagcctggag

SEQ ID NO: 185559 - DNA, 25 bp, Canis familiaris
tctactgggcttggtcggtggcagt

SEQ ID NO: 185560 - DNA, 25 bp, Canis familiaris
tctacttcatgcacccggggtgctg

SEQ ID NO: 185561 - DNA, 25 bp, Canis familiaris
tctccttcctgtgccaaggggcagt

SEQ ID NO: 185562 - DNA, 25 bp, Canis familiaris
tctctccacggtgtgaatgggggtc

SEQ ID NO: 185563 - DNA, 25 bp, Canis familiaris
tctacgagggtcctgagctggtggc

SEQ ID NO: 185564 - DNA, 25 bp, Canis familiaris
tctacgagggtcctgagctggtggc

SEQ ID NO: 185565 - DNA, 25 bp, Canis familiaris
tctcctggggctcgtgagtgtttgt

SEQ ID NO: 185566 - DNA, 25 bp, Canis familiaris
tctcaggggagccgtgagcttcctg

SEQ ID NO: 185567 - DNA, 25 bp, Canis familiaris
tctcaatggggagtttcttcctttc

SEQ ID NO: 185568 - DNA, 25 bp, Canis familiaris
tctctttctaactttaagcctttct

SEQ ID NO: 185569 - DNA, 25 bp, Canis familiaris
tcattttttaaatccacctaacaat

SEQ ID NO: 185570 - DNA, 25 bp, Canis familiaris
tcatatttttacccccaaaaatcag

SEQ ID NO: 185571 - DNA, 25 bp, Canis familiaris
tctagtaaagaccacccattccaac

SEQ ID NO: 185572 - DNA, 25 bp, Canis familiaris
tctaggacccaggacaccttacaga

SEQ ID NO: 185573 - DNA, 25 bp, Canis familiaris
tctaggtaaccgatgccttaatgaa

SEQ ID NO: 185574 - DNA, 25 bp, Canis familiaris
tctcccaaattccaggcctgtaatg

SEQ ID NO: 185575 - DNA, 25 bp, Canis familiaris
tctctcccaagttaggcctgtggaa

SEQ ID NO: 185576 - DNA, 25 bp, Canis familiaris
tctctggcacttaataggcactctg

SEQ ID NO: 185577 - DNA, 25 bp, Canis familiaris
tctcgtgatcgtctagtccttgtag

SEQ ID NO: 185578 - DNA, 25 bp, Canis familiaris
tctctgtaccctgagtcttcttaac

SEQ ID NO: 185579 - DNA, 25 bp, Canis familiaris
tctctggcccccagtgttttataaa

SEQ ID NO: 185580 - DNA, 25 bp, Canis familiaris
tctcctcaacccatcatttttataa

SEQ ID NO: 185581 - DNA, 25 bp, Canis familiaris
tctcccactcctagatttttgtata

SEQ ID NO: 185582 - DNA, 25 bp, Canis familiaris
tctcccctccagagtttgttttgtg

SEQ ID NO: 185583 - DNA, 25 bp, Canis familiaris
tctccatttccacctttgtgtttat

SEQ ID NO: 185584 - DNA, 25 bp, Canis familiaris
tctcctatacctctttctttggtga

SEQ ID NO: 185585 - DNA, 25 bp, Canis familiaris
tctcttgtaccttttggcagttttg

SEQ ID NO: 185586 - DNA, 25 bp, Canis familiaris
tcttcagtaccttctctgtgttgga

SEQ ID NO: 185587 - DNA, 25 bp, Canis familiaris
tctacagctcaagactgcagtgccg

SEQ ID NO: 185588 - DNA, 25 bp, Canis familiaris
tctaagccaataactcgatgcgagc

SEQ ID NO: 185589 - DNA, 25 bp, Canis familiaris
tctcaattcatcaaactcgtggctg

SEQ ID NO: 185590 - DNA, 25 bp, Canis familiaris
tctcagtcctaaccttgtggctggt

SEQ ID NO: 185591 - DNA, 25 bp, Canis familiaris
tctcctcctaaattctgtgcctgag

SEQ ID NO: 185592 - DNA, 25 bp, Canis familiaris
tctcctccgaatttccatgactgaa

SEQ ID NO: 185593 - DNA, 25 bp, Canis familiaris
tctcttgccacattatcccaattgg

SEQ ID NO: 185594 - DNA, 25 bp, Canis familiaris
tctttccagaaaatccaagtgcggc

SEQ ID NO: 185595 - DNA, 25 bp, Canis familiaris
tctatgctcacactcatcttcaaag

SEQ ID NO: 185596 - DNA, 25 bp, Canis familiaris
tctcattagctgcctcttaaggtgt

SEQ ID NO: 185597 - DNA, 25 bp, Canis familiaris
tctctgtcctgtctgtcatgggagt

SEQ ID NO: 185598 - DNA, 25 bp, Canis familiaris
tctctttgcttggtccttggcaatc

SEQ ID NO: 185599 - DNA, 25 bp, Canis familiaris
tctcgcgtgttaactgcattccaac

SEQ ID NO: 185600 - DNA, 25 bp, Canis familiaris
tctcggatgtgttggccatgtcgaa

SEQ ID NO: 185601 - DNA, 25 bp, Canis familiaris
tctctgtgtgtgtgactatcataaa

SEQ ID NO: 185602 - DNA, 25 bp, Canis familiaris
tctctgtgtgtgactatcataaata

SEQ ID NO: 185603 - DNA, 25 bp, Canis familiaris
tctctctgtttccatctaaactaga

SEQ ID NO: 185604 - DNA, 25 bp, Canis familiaris
tctctcagctttagtggagaacttg

SEQ ID NO: 185605 - DNA, 25 bp, Canis familiaris
tctctcagctttagtggagaacttg

SEQ ID NO: 185606 - DNA, 25 bp, Canis familiaris
tctctcagctcttggtgctagctag

SEQ ID NO: 185607 - DNA, 25 bp, Canis familiaris
tctctatatcattggtgcctgcagg

SEQ ID NO: 185608 - DNA, 25 bp, Canis familiaris
tctcccatagtgcctggctcatggg

SEQ ID NO: 185609 - DNA, 25 bp, Canis familiaris
tctctccatgtcagtggccgtggag

SEQ ID NO: 185610 - DNA, 25 bp, Canis familiaris
tctctccatgtaaccctcctagaga

SEQ ID NO: 185611 - DNA, 25 bp, Canis familiaris
tctctcattgtgattccaccatagg

SEQ ID NO: 185612 - DNA, 25 bp, Canis familiaris
tctctgattcatagtatctctgcca

SEQ ID NO: 185613 - DNA, 25 bp, Canis familiaris
tctcgtacattgaaagcctgcagct

SEQ ID NO: 185614 - DNA, 25 bp, Canis familiaris
tctcatgctagcatgtcaggccctc

SEQ ID NO: 185615 - DNA, 25 bp, Canis familiaris
tctattagctgtgagccccatcaat

SEQ ID NO: 185616 - DNA, 25 bp, Canis familiaris
tctctctactgtgaccgagcacaca

SEQ ID NO: 185617 - DNA, 25 bp, Canis familiaris
tctcctttgctgtagctcacaaaca

SEQ ID NO: 185618 - DNA, 25 bp, Canis familiaris
tctctctttctgtgtcgcgaataaa

SEQ ID NO: 185619 - DNA, 25 bp, Canis familiaris
tctccctcctgagcggtgagaactt

SEQ ID NO: 185620 - DNA, 25 bp, Canis familiaris
tctccctctgtgactctttgagaac

SEQ ID NO: 185621 - DNA, 25 bp, Canis familiaris
tctcactcgggagctcgctgaagat

SEQ ID NO: 185622 - DNA, 25 bp, Canis familiaris
tctcactcgggcctatgccaaggat

SEQ ID NO: 185623 - DNA, 25 bp, Canis familiaris
tctcaacagaagctgtgcagccagg

SEQ ID NO: 185624 - DNA, 25 bp, Canis familiaris
tctaacagggttgggaaggtccgag

SEQ ID NO: 185625 - DNA, 25 bp, Canis familiaris
tctaacagggttggagggcttctca

SEQ ID NO: 185626 - DNA, 25 bp, Canis familiaris
tcttagagggctttgggaggcttaa

SEQ ID NO: 185627 - DNA, 25 bp, Canis familiaris
tctctcaggggttaggggcctttct

SEQ ID NO: 185628 - DNA, 25 bp, Canis familiaris
tctctcgtgggttgtaggactttct

SEQ ID NO: 185629 - DNA, 25 bp, Canis familiaris
tctctgcgtgggtgtagaccattct

SEQ ID NO: 185630 - DNA, 25 bp, Canis familiaris
tctactgcgaggagtgagaccattc

SEQ ID NO: 185631 - DNA, 25 bp, Canis familiaris
tctactgcgagtgaggacgcctcca

SEQ ID NO: 185632 - DNA, 25 bp, Canis familiaris
tctagagtggtgctacaggcctggc

SEQ ID NO: 185633 - DNA, 25 bp, Canis familiaris
tcattgacgtgtttaagccctggcc

SEQ ID NO: 185634 - DNA, 25 bp, Canis familiaris
tcaggaggctgcagaaggccctgcg

SEQ ID NO: 185635 - DNA, 25 bp, Canis familiaris
tctagaaggaagacgcgccagctgc

SEQ ID NO: 185636 - DNA, 25 bp, Canis familiaris
tctagaacgactggagggcgcgtgg

SEQ ID NO: 185637 - DNA, 25 bp, Canis familiaris
tctcgtacgacactggacgcgcgag

SEQ ID NO: 185638 - DNA, 25 bp, Canis familiaris
tctcgatgactgcatgcatggaacc

SEQ ID NO: 185639 - DNA, 25 bp, Canis familiaris
tctctcatggccgtgcggaacacgt

SEQ ID NO: 185640 - DNA, 25 bp, Canis familiaris
tctctatgccccgagcagaagacca

SEQ ID NO: 185641 - DNA, 25 bp, Canis familiaris
tctatatagccaaactgaatgtcca

SEQ ID NO: 185642 - DNA, 25 bp, Canis familiaris
tctcgagaggcacatccaaggacat

SEQ ID NO: 185643 - DNA, 25 bp, Canis familiaris
tctagtctggcacttccttggacta

SEQ ID NO: 185644 - DNA, 25 bp, Canis familiaris
tctagagggcatactcccagctgac

SEQ ID NO: 185645 - DNA, 25 bp, Canis familiaris
tctctggggcatatgacgcctgtcc

SEQ ID NO: 185646 - DNA, 25 bp, Canis familiaris
tctctgtggtatttgactgcctaga

SEQ ID NO: 185647 - DNA, 25 bp, Canis familiaris
tctcagtatgtctactacagagcat

SEQ ID NO: 185648 - DNA, 25 bp, Canis familiaris
tctcaccatgacagccacaggctgg

SEQ ID NO: 185649 - DNA, 25 bp, Canis familiaris
tctcccttcagaccaaggcaggcag

SEQ ID NO: 185650 - DNA, 25 bp, Canis familiaris
tctcccctagcacgaaggacagcat

SEQ ID NO: 185651 - DNA, 25 bp, Canis familiaris
tctcccctacaccagatgctaaatg

SEQ ID NO: 185652 - DNA, 25 bp, Canis familiaris
tctccgccgacagagattggaagga

SEQ ID NO: 185653 - DNA, 25 bp, Canis familiaris
tcatgggccctcagagttggttgga

SEQ ID NO: 185654 - DNA, 25 bp, Canis familiaris
tcatcgtccccgtgttgatgttgac

SEQ ID NO: 185655 - DNA, 25 bp, Canis familiaris
tctctgcccccaggtttggcagtga

SEQ ID NO: 185656 - DNA, 25 bp, Canis familiaris
tctttccgccgcattgtggagtaat

SEQ ID NO: 185657 - DNA, 25 bp, Canis familiaris
tcagaaccccctttgttggattagg

SEQ ID NO: 185658 - DNA, 25 bp, Canis familiaris
tcaggaaccctctatggtttttagt

SEQ ID NO: 185659 - DNA, 25 bp, Canis familiaris
tcatggatacccattttccctttta

SEQ ID NO: 185660 - DNA, 25 bp, Canis familiaris
tctcttcagccgattttgccatttg

SEQ ID NO: 185661 - DNA, 25 bp, Canis familiaris
tctctactgtccaatgatgttgcca

SEQ ID NO: 185662 - DNA, 25 bp, Canis familiaris
tctctctgttccaagtgtgtgtgca

SEQ ID NO: 185663 - DNA, 25 bp, Canis familiaris
tctctttgctaccagatttgatcag

SEQ ID NO: 185664 - DNA, 25 bp, Canis familiaris
tctcttcatttcccttttaggtttg

SEQ ID NO: 185665 - DNA, 25 bp, Canis familiaris
tctactcttgtctctacttaggtta

SEQ ID NO: 185666 - DNA, 25 bp, Canis familiaris
tctcctctttaacatcctcaatgtt

SEQ ID NO: 185667 - DNA, 25 bp, Canis familiaris
tctcctcttctgtctatatcgtaag

SEQ ID NO: 185668 - DNA, 25 bp, Canis familiaris
tctcctctttgcctagattgtatag

SEQ ID NO: 185669 - DNA, 25 bp, Canis familiaris
tctccgctgtgtgtcaatctgtgac

SEQ ID NO: 185670 - DNA, 25 bp, Canis familiaris
tctccctgagatgctccacgagatt

SEQ ID NO: 185671 - DNA, 25 bp, Canis familiaris
tctccggaggccacactgagttatg

SEQ ID NO: 185672 - DNA, 25 bp, Canis familiaris
tctccgcacattgcagtccaagttt

SEQ ID NO: 185673 - DNA, 25 bp, Canis familiaris
tctccgcacagttgcagtccaagtt

SEQ ID NO: 185674 - DNA, 25 bp, Canis familiaris
tctctgtgcagagtaggtccattac

SEQ ID NO: 185675 - DNA, 25 bp, Canis familiaris
tcttcatcgatgaggtggattccct

SEQ ID NO: 185676 - DNA, 25 bp, Canis familiaris
tctttcctggtggggttgcacctac

SEQ ID NO: 185677 - DNA, 25 bp, Canis familiaris
ttttcctcaggcctactgggccaag

SEQ ID NO: 185678 - DNA, 25 bp, Canis familiaris
tttacgccacccgcagcggtagaga

SEQ ID NO: 185679 - DNA, 25 bp, Canis familiaris
tcttacgcttcctcaaggccaagga

SEQ ID NO: 185680 - DNA, 25 bp, Canis familiaris
tcttacttacctacaacctgactaa

SEQ ID NO: 185681 - DNA, 25 bp, Canis familiaris
tcttacttcctcatcaccggaggaa

SEQ ID NO: 185682 - DNA, 25 bp, Canis familiaris
tctctcccttttgacctggggaagg

SEQ ID NO: 185683 - DNA, 25 bp, Canis familiaris
tcttctccttttctcctgggaataa

SEQ ID NO: 185684 - DNA, 25 bp, Canis familiaris
tcttacccttttcaatgggaaagct

SEQ ID NO: 185685 - DNA, 25 bp, Canis familiaris
tctctacctttcactaacttctaag

SEQ ID NO: 185686 - DNA, 25 bp, Canis familiaris
tctctatactttttaaccatttaca

SEQ ID NO: 185687 - DNA, 25 bp, Canis familiaris
tctaatgatctggtagtaaattttg

SEQ ID NO: 185688 - DNA, 25 bp, Canis familiaris
tctactttcggaccattttttgacg

SEQ ID NO: 185689 - DNA, 25 bp, Canis familiaris
tcttttgcccgagatttttggtcca

SEQ ID NO: 185690 - DNA, 25 bp, Canis familiaris
tctctttccccatctaaattgtgta

SEQ ID NO: 185691 - DNA, 25 bp, Canis familiaris
tctcttgacccttagctgaaatgtt

SEQ ID NO: 185692 - DNA, 25 bp, Canis familiaris
tctcttccaccattatctgctagat

SEQ ID NO: 185693 - DNA, 25 bp, Canis familiaris
tctctgtccacctgttgattgatta

SEQ ID NO: 185694 - DNA, 25 bp, Canis familiaris
tctctgttcctcagggttttgcaga

SEQ ID NO: 185695 - DNA, 25 bp, Canis familiaris
tcttcatccctctgtttttttgaac

SEQ ID NO: 185696 - DNA, 25 bp, Canis familiaris
tcttcccctaggacctactttgaag

SEQ ID NO: 185697 - DNA, 25 bp, Canis familiaris
tcttcccctagaacctactttgaag

SEQ ID NO: 185698 - DNA, 25 bp, Canis familiaris
tcttcccctagaacctactttgaag

SEQ ID NO: 185699 - DNA, 25 bp, Canis familiaris
tcttcccctagaacctactttgaag

SEQ ID NO: 185700 - DNA, 25 bp, Canis familiaris
tcttcccctagaacctactttgaag

SEQ ID NO: 185701 - DNA, 25 bp, Canis familiaris
tcttcccctagaacctactttgaag

SEQ ID NO: 185702 - DNA, 25 bp, Canis familiaris
tcttcccctagaacctactttgaag

SEQ ID NO: 185703 - DNA, 25 bp, Canis familiaris
tcttcccctagaacctactttgaag

SEQ ID NO: 185704 - DNA, 25 bp, Canis familiaris
tcttcccctagtacctactttgaag

SEQ ID NO: 185705 - DNA, 25 bp, Canis familiaris
tctcttgctccaagttaacttttca

SEQ ID NO: 185706 - DNA, 25 bp, Canis familiaris
tctctttccaggactcaacttctga

SEQ ID NO: 185707 - DNA, 25 bp, Canis familiaris
tctcttcttcctgtaactgtctaga

SEQ ID NO: 185708 - DNA, 25 bp, Canis familiaris
tctcttctccctctagaaggggctt

SEQ ID NO: 185709 - DNA, 25 bp, Canis familiaris
tctcttatttacacgtagcgggtta

SEQ ID NO: 185710 - DNA, 25 bp, Canis familiaris
tcttaaagtacgtctgtagcgggat

SEQ ID NO: 185711 - DNA, 25 bp, Canis familiaris
tctcttagagtctgttgcatgccct

SEQ ID NO: 185712 - DNA, 25 bp, Canis familiaris
tctcttaagccgaagtgagcgcctc

SEQ ID NO: 185713 - DNA, 25 bp, Canis familiaris
tcttctagaacgactggagggcgcg

SEQ ID NO: 185714 - DNA, 25 bp, Canis familiaris
tctcctggacacctggagagggata

SEQ ID NO: 185715 - DNA, 25 bp, Canis familiaris
tctctccgaggcatgctggagggta

SEQ ID NO: 185716 - DNA, 25 bp, Canis familiaris
tctttggggcacgatggactgaggt

SEQ ID NO: 185717 - DNA, 25 bp, Canis familiaris
tcttggaaccacattgacgagcctg

SEQ ID NO: 185718 - DNA, 25 bp, Canis familiaris
tcttgtaaatcagctgctaccccgt

SEQ ID NO: 185719 - DNA, 25 bp, Canis familiaris
tcttgacaaaacctaacttgcgcag

SEQ ID NO: 185720 - DNA, 25 bp, Canis familiaris
tcttgacaaaacctaacttgcgcag

SEQ ID NO: 185721 - DNA, 25 bp, Canis familiaris
tctctgaaaataaaccacttggctc

SEQ ID NO: 185722 - DNA, 25 bp, Canis familiaris
tttaaagtgaaaaccaagcccagct

SEQ ID NO: 185723 - DNA, 25 bp, Canis familiaris
tttccacggaggatgccaaggcccg

SEQ ID NO: 185724 - DNA, 25 bp, Canis familiaris
tcttctgccgtagctcttacggccg

SEQ ID NO: 185725 - DNA, 25 bp, Canis familiaris
tctctccacgtatgcatcttagcag

SEQ ID NO: 185726 - DNA, 25 bp, Canis familiaris
tctccgctctgcctaatcttaggag

SEQ ID NO: 185727 - DNA, 25 bp, Canis familiaris
tctctccatcttgtgagcccaggag

SEQ ID NO: 185728 - DNA, 25 bp, Canis familiaris
tctctttcttgctaagccagcgggg

SEQ ID NO: 185729 - DNA, 25 bp, Canis familiaris
tctcttccgtcatctgcaagggagg

SEQ ID NO: 185730 - DNA, 25 bp, Canis familiaris
tctcccaccacatctcatgaggaga

SEQ ID NO: 185731 - DNA, 25 bp, Canis familiaris
tctcccaccagctctgtaacaagag

SEQ ID NO: 185732 - DNA, 25 bp, Canis familiaris
tctcttcctcgtacgtgcaagggat

SEQ ID NO: 185733 - DNA, 25 bp, Canis familiaris
tctcttcctccttggacagagtctt

SEQ ID NO: 185734 - DNA, 25 bp, Canis familiaris
tctcccctgcactgtaaaatgttgg

SEQ ID NO: 185735 - DNA, 25 bp, Canis familiaris
tctacccgtgcaggttactctgggg

SEQ ID NO: 185736 - DNA, 25 bp, Canis familiaris
tctacatctctgtgggctacgtgga

SEQ ID NO: 185737 - DNA, 25 bp, Canis familiaris
tctcccacatgaagccctacgtgga

SEQ ID NO: 185738 - DNA, 25 bp, Canis familiaris
tctcccatcatttcccttaatggtg

SEQ ID NO: 185739 - DNA, 25 bp, Canis familiaris
tctcagcccattcccagtaactgag

SEQ ID NO: 185740 - DNA, 25 bp, Canis familiaris
tctcagcctcatctccaggagggaa

SEQ ID NO: 185741 - DNA, 25 bp, Canis familiaris
tctcatgggcacaaccgagattgga

SEQ ID NO: 185742 - DNA, 25 bp, Canis familiaris
tctctggtgccttcctggagggaag

SEQ ID NO: 185743 - DNA, 25 bp, Canis familiaris
tctcgagtgtcttcctaggcgaaga

SEQ ID NO: 185744 - DNA, 25 bp, Canis familiaris
tctcgacttctggccaagttgcgaa

SEQ ID NO: 185745 - DNA, 25 bp, Canis familiaris
cactgcctacagatggcgtctcagc

SEQ ID NO: 185746 - DNA, 25 bp, Canis familiaris
tctcttttgggccggatcttacagc

SEQ ID NO: 185747 - DNA, 25 bp, Canis familiaris
tctctttgttctccaaatgtttcag

SEQ ID NO: 185748 - DNA, 25 bp, Canis familiaris
tctctggtttctggccacttttaaa

SEQ ID NO: 185749 - DNA, 25 bp, Canis familiaris
tctctgtgtatgtctgtccacactt

SEQ ID NO: 185750 - DNA, 25 bp, Canis familiaris
tctagattagattgtctccagtttt

SEQ ID NO: 185751 - DNA, 25 bp, Canis familiaris
tctagaatataacaccgcttctgtg

SEQ ID NO: 185752 - DNA, 25 bp, Canis familiaris
tctaggtgtagggtcggttcgtcca

SEQ ID NO: 185753 - DNA, 25 bp, Canis familiaris
tctaggtcaagagttcgtgtgggtt

SEQ ID NO: 185754 - DNA, 25 bp, Canis familiaris
tctcacctctaggtctcgggtgggt

SEQ ID NO: 185755 - DNA, 25 bp, Canis familiaris
tctcccatatgtgtctcagtgtgta

SEQ ID NO: 185756 - DNA, 25 bp, Canis familiaris
tctcccatttcttcctggatgattt

SEQ ID NO: 185757 - DNA, 25 bp, Canis familiaris
tctctatttgtcaaccccgatttag

SEQ ID NO: 185758 - DNA, 25 bp, Canis familiaris
tctcttttgtctcttcgatgttgat

SEQ ID NO: 185759 - DNA, 25 bp, Canis familiaris
tctctttggcttccatcgtgaggtt

SEQ ID NO: 185760 - DNA, 25 bp, Canis familiaris
tctctttgtgtctcgctgtgataga

SEQ ID NO: 185761 - DNA, 25 bp, Canis familiaris
tctctgcctgtagtccgtggaaggg

SEQ ID NO: 185762 - DNA, 25 bp, Canis familiaris
tctctccttggaacctgtgaatttg

SEQ ID NO: 185763 - DNA, 25 bp, Canis familiaris
tctcgccgggtgaactgcacatatt

SEQ ID NO: 185764 - DNA, 25 bp, Canis familiaris
tctcccaggtgccagacctaaaggt

SEQ ID NO: 185765 - DNA, 25 bp, Canis familiaris
tctcccagagactacatactacaca

SEQ ID NO: 185766 - DNA, 25 bp, Canis familiaris
tctcccacagcacagaccataataa

SEQ ID NO: 185767 - DNA, 25 bp, Canis familiaris
tctaccatccacttgtccatatgaa

SEQ ID NO: 185768 - DNA, 25 bp, Canis familiaris
tctcagacaccgagctccaggaaat

SEQ ID NO: 185769 - DNA, 25 bp, Canis familiaris
tctacaagcctgaagtgctttgaca

SEQ ID NO: 185770 - DNA, 25 bp, Canis familiaris
tctaaccctgccttttgacatagtc

SEQ ID NO: 185771 - DNA, 25 bp, Canis familiaris
tctaggcccgtattttactcttgtt

SEQ ID NO: 185772 - DNA, 25 bp, Canis familiaris
tcttgggaggtttttaccatcagtt

SEQ ID NO: 185773 - DNA, 25 bp, Canis familiaris
tctctgggactgtttttccatcata

SEQ ID NO: 185774 - DNA, 25 bp, Canis familiaris
tctctgggacatgctcacttgacca

SEQ ID NO: 185775 - DNA, 25 bp, Canis familiaris
tctctggatgacttgcatgcactgg

SEQ ID NO: 185776 - DNA, 25 bp, Canis familiaris
tctctcgatgactgcatgcatggaa

SEQ ID NO: 185777 - DNA, 25 bp, Canis familiaris
tctctgcctctctgatgggcaaata

SEQ ID NO: 185778 - DNA, 25 bp, Canis familiaris
tctcgctctctctctatagatagat

SEQ ID NO: 185779 - DNA, 25 bp, Canis familiaris
tctctgtctctcacaaatgaacaaa

SEQ ID NO: 185780 - DNA, 25 bp, Canis familiaris
tctctgtctctcatgaataaataaa

SEQ ID NO: 185781 - DNA, 25 bp, Canis familiaris
tctcgttgctcagtttacagaaaca

SEQ ID NO: 185782 - DNA, 25 bp, Canis familiaris
tctctgtgtgtctctaacgaataga

SEQ ID NO: 185783 - DNA, 25 bp, Canis familiaris
tctatggtcttgccaaaatgaaaga

SEQ ID NO: 185784 - DNA, 25 bp, Canis familiaris
tctcatggcttctggtggtagagag

SEQ ID NO: 185785 - DNA, 25 bp, Canis familiaris
tctcagagcttcgggagtccgaagg

SEQ ID NO: 185786 - DNA, 25 bp, Canis familiaris
tctcagggctctggtgaccacagaa

SEQ ID NO: 185787 - DNA, 25 bp, Canis familiaris
tcatgaagggcgcgacccgcgaata

SEQ ID NO: 185788 - DNA, 25 bp, Canis familiaris
tctcagaggaggagatccgccccta

SEQ ID NO: 185789 - DNA, 25 bp, Canis familiaris
tctacagtgaggttaaccccttcaa

SEQ ID NO: 185790 - DNA, 25 bp, Canis familiaris
tctccctagggtgagccccataaac

SEQ ID NO: 185791 - DNA, 25 bp, Canis familiaris
tcttcacgctgggtacaacccagaa

SEQ ID NO: 185792 - DNA, 25 bp, Canis familiaris
tctacgcctcggagaatcaccagga

SEQ ID NO: 185793 - DNA, 25 bp, Canis familiaris
tctacttcgtggatgaccggctggt

SEQ ID NO: 185794 - DNA, 25 bp, Canis familiaris
tcaccttcgggagtaccaggacctg

SEQ ID NO: 185795 - DNA, 25 bp, Canis familiaris
tcaccttcgggagtaccaggacctg

SEQ ID NO: 185796 - DNA, 25 bp, Canis familiaris
tctactctggggttaggagggcctc

SEQ ID NO: 185797 - DNA, 25 bp, Canis familiaris
tcatacttggaatttaaggggtagg

SEQ ID NO: 185798 - DNA, 25 bp, Canis familiaris
tctacctgacagatggacagttcgt

SEQ ID NO: 185799 - DNA, 25 bp, Canis familiaris
ttcaccgacagtgggaccttcgagg

SEQ ID NO: 185800 - DNA, 25 bp, Canis familiaris
tctagccccagttaacctacagagt

SEQ ID NO: 185801 - DNA, 25 bp, Canis familiaris
tctacccaggattgacaccctatgg

SEQ ID NO: 185802 - DNA, 25 bp, Canis familiaris
tctaactacgagtagactactgagc

SEQ ID NO: 185803 - DNA, 25 bp, Canis familiaris
tcttacatgatgctggaactcctga

SEQ ID NO: 185804 - DNA, 25 bp, Canis familiaris
tcttacacagtgtgaacctcagaga

SEQ ID NO: 185805 - DNA, 25 bp, Canis familiaris
tctctccagcctctgagaaccagaa

SEQ ID NO: 185806 - DNA, 25 bp, Canis familiaris
tctcccaagctcgggaacaccagct

SEQ ID NO: 185807 - DNA, 25 bp, Canis familiaris
tctcccaggtgctggacaccctggg

SEQ ID NO: 185808 - DNA, 25 bp, Canis familiaris
tctaccagcaggggggtccactggt

SEQ ID NO: 185809 - DNA, 25 bp, Canis familiaris
tcaagcctcgggcggtcaaggtgga

SEQ ID NO: 185810 - DNA, 25 bp, Canis familiaris
ttggcaatcggggggccattcggga

SEQ ID NO: 185811 - DNA, 25 bp, Canis familiaris
tttacatcggcggggacgggaggct

SEQ ID NO: 185812 - DNA, 25 bp, Canis familiaris
tttttagggtcgccagggaggcact

SEQ ID NO: 185813 - DNA, 25 bp, Canis familiaris
tcttagctgagtgtcccgcggggcc

SEQ ID NO: 185814 - DNA, 25 bp, Canis familiaris
tcttgacggtgattcccgaacgccc

SEQ ID NO: 185815 - DNA, 25 bp, Canis familiaris
tctctaaggagaatggcccagtcct

SEQ ID NO: 185816 - DNA, 25 bp, Canis familiaris
tctcaacggaagggcctcaaccttc

SEQ ID NO: 185817 - DNA, 25 bp, Canis familiaris
tctaacagggactggctcccagctt

SEQ ID NO: 185818 - DNA, 25 bp, Canis familiaris
tctcggggctgaaggggcccgattt

SEQ ID NO: 185819 - DNA, 25 bp, Canis familiaris
tctaggagcgaaaaggacccattat

SEQ ID NO: 185820 - DNA, 25 bp, Canis familiaris
tcaggaggaaattacagagaccatt

SEQ ID NO: 185821 - DNA, 25 bp, Canis familiaris
tcaggtctgtgctatgaaaggccca

SEQ ID NO: 185822 - DNA, 25 bp, Canis familiaris
taagtttagagtaagccccacagta

SEQ ID NO: 185823 - DNA, 25 bp, Canis familiaris
tcatactttagactcaaccttcggt

SEQ ID NO: 185824 - DNA, 25 bp, Canis familiaris
tcatacctaagccttacctgtggtc

SEQ ID NO: 185825 - DNA, 25 bp, Canis familiaris
tctctcccaaagccaactgctgggt

SEQ ID NO: 185826 - DNA, 25 bp, Canis familiaris
tctctacacaaaacacactcttcgt

SEQ ID NO: 185827 - DNA, 25 bp, Canis familiaris
tcttgaacaatcaggtttctcagta

SEQ ID NO: 185828 - DNA, 25 bp, Canis familiaris
tttgaatgaacttttccttagctaa

SEQ ID NO: 185829 - DNA, 25 bp, Canis familiaris
tttggattaggaattactcgttata

SEQ ID NO: 185830 - DNA, 25 bp, Canis familiaris
tctcggctttggatcattccttgga

SEQ ID NO: 185831 - DNA, 25 bp, Canis familiaris
tctcggaagtgtacagcttcctgtg

SEQ ID NO: 185832 - DNA, 25 bp, Canis familiaris
tctctagcgtgtctcttgggaaaac

SEQ ID NO: 185833 - DNA, 25 bp, Canis familiaris
tctaactttcttcttggaaaactgg

SEQ ID NO: 185834 - DNA, 25 bp, Canis familiaris
tcattttttcttctggaaaccctgg

SEQ ID NO: 185835 - DNA, 25 bp, Canis familiaris
tcttttttttccagatttcccatat

SEQ ID NO: 185836 - DNA, 25 bp, Canis familiaris
tctttttcttccgacgggatcgtct

SEQ ID NO: 185837 - DNA, 25 bp, Canis familiaris
tttaatcctgtcggaaagaaggacg

SEQ ID NO: 185838 - DNA, 25 bp, Canis familiaris
tcattaatcaagaacgaaagtcgga

SEQ ID NO: 185839 - DNA, 25 bp, Canis familiaris
tctataataagcaggagctcgttta

SEQ ID NO: 185840 - DNA, 25 bp, Canis familiaris
tcttcaaaatggggactccttaaca

SEQ ID NO: 185841 - DNA, 25 bp, Canis familiaris
tctctagaaatgaacccccgattaa

SEQ ID NO: 185842 - DNA, 25 bp, Canis familiaris
tctctagaaatgaaacccgaataag

SEQ ID NO: 185843 - DNA, 25 bp, Canis familiaris
tctctggaagagacccaactgcaaa

SEQ ID NO: 185844 - DNA, 25 bp, Canis familiaris
tctctcaaagagcccttagcatgca

SEQ ID NO: 185845 - DNA, 25 bp, Canis familiaris
tctcactcgagggccttactagacc

SEQ ID NO: 185846 - DNA, 25 bp, Canis familiaris
tctcaccaacagtctctctactgtg

SEQ ID NO: 185847 - DNA, 25 bp, Canis familiaris
tctctccaaaagagctcatctctgg

SEQ ID NO: 185848 - DNA, 25 bp, Canis familiaris
tctctctcacaacaactattcatag

SEQ ID NO: 185849 - DNA, 25 bp, Canis familiaris
tctctctgaagaccaggctctttct

SEQ ID NO: 185850 - DNA, 25 bp, Canis familiaris
tctcttggacgttgactctcgactg

SEQ ID NO: 185851 - DNA, 25 bp, Canis familiaris
tctcgtgctgcacgatcaacgccga

SEQ ID NO: 185852 - DNA, 25 bp, Canis familiaris
tcatccgcaaggaaatcccagccca

SEQ ID NO: 185853 - DNA, 25 bp, Canis familiaris
tcatcactggatcagaatcctcccc

SEQ ID NO: 185854 - DNA, 25 bp, Canis familiaris
tcatcacgggcttcaatgtcattgt

SEQ ID NO: 185855 - DNA, 25 bp, Canis familiaris
tctaagggctccaagtccgatgcct

SEQ ID NO: 185856 - DNA, 25 bp, Canis familiaris
tctacagtggctgtattccgctcgt

SEQ ID NO: 185857 - DNA, 25 bp, Canis familiaris
tctacagtggctgtattccgctcgt

SEQ ID NO: 185858 - DNA, 25 bp, Canis familiaris
tctttgtgtgcttttccaagccttc

SEQ ID NO: 185859 - DNA, 25 bp, Canis familiaris
tctatgtatagctccctagaccttt

SEQ ID NO: 185860 - DNA, 25 bp, Canis familiaris
tctagaattgtgactgcctcatccc

SEQ ID NO: 185861 - DNA, 25 bp, Canis familiaris
tctacgatatcgacttcttgtgcaa

SEQ ID NO: 185862 - DNA, 25 bp, Canis familiaris
tctaaaacgatctagcattgctcta

SEQ ID NO: 185863 - DNA, 25 bp, Canis familiaris
tctaccagggattcagcgtctctgt

SEQ ID NO: 185864 - DNA, 25 bp, Canis familiaris
tctacactgggcttgcagcctactt

SEQ ID NO: 185865 - DNA, 25 bp, Canis familiaris
tctacagcgtgagcatcatgccagc

SEQ ID NO: 185866 - DNA, 25 bp, Canis familiaris
tctacacctgagtctgctgagggcc

SEQ ID NO: 185867 - DNA, 25 bp, Canis familiaris
tctcgatcctgagtccgagaccacc

SEQ ID NO: 185868 - DNA, 25 bp, Canis familiaris
tctaagtctgagtcccagtccaaaa

SEQ ID NO: 185869 - DNA, 25 bp, Canis familiaris
tctacaacaatccctcaaccaaaga

SEQ ID NO: 185870 - DNA, 25 bp, Canis familiaris
tctcaaatctcccctgacattaaaa

SEQ ID NO: 185871 - DNA, 25 bp, Canis familiaris
tctcgaattctccccgagtacgaga

SEQ ID NO: 185872 - DNA, 25 bp, Canis familiaris
agcctcgtccgggaacagggctgag

SEQ ID NO: 185873 - DNA, 25 bp, Canis familiaris
tttactttcccagatgaatcccagg

SEQ ID NO: 185874 - DNA, 25 bp, Canis familiaris
tcttagccttcctattagtccttag

SEQ ID NO: 185875 - DNA, 25 bp, Canis familiaris
tcttgacacttcagtaaaccttgct

SEQ ID NO: 185876 - DNA, 25 bp, Canis familiaris
tcttaatcccagcaaaagcgtcccc

SEQ ID NO: 185877 - DNA, 25 bp, Canis familiaris
tctataatcccactcactataggga

SEQ ID NO: 185878 - DNA, 25 bp, Canis familiaris
tctacaaccctgtcatctatatcat

SEQ ID NO: 185879 - DNA, 25 bp, Canis familiaris
tctacaacttgttccatgtgtctcc

SEQ ID NO: 185880 - DNA, 25 bp, Canis familiaris
tctaatgacttcaactatgaacccc

SEQ ID NO: 185881 - DNA, 25 bp, Canis familiaris
tctaaggcttctataactctctcca

SEQ ID NO: 185882 - DNA, 25 bp, Canis familiaris
tctaactttttctaacctcttctag

SEQ ID NO: 185883 - DNA, 25 bp, Canis familiaris
tctagatttattgcccaccttttaa

SEQ ID NO: 185884 - DNA, 25 bp, Canis familiaris
tcttttaatctatcccttttaacat

SEQ ID NO: 185885 - DNA, 25 bp, Canis familiaris
tctttgaatcctgtcccttgattaa

SEQ ID NO: 185886 - DNA, 25 bp, Canis familiaris
tctattactcgtgcccggtttgaag

SEQ ID NO: 185887 - DNA, 25 bp, Canis familiaris
tctaataacttgcccactggtttaa

SEQ ID NO: 185888 - DNA, 25 bp, Canis familiaris
tctcaagagactcaccacgagtatg

SEQ ID NO: 185889 - DNA, 25 bp, Canis familiaris
tctctagagccctgtcctgagattc

SEQ ID NO: 185890 - DNA, 25 bp, Canis familiaris
tctttgcagccatcctacggattaa

SEQ ID NO: 185891 - DNA, 25 bp, Canis familiaris
ttagtgccctgctgtcactgaatta

SEQ ID NO: 185892 - DNA, 25 bp, Canis familiaris
tctaatgacctatttcacttagcat

SEQ ID NO: 185893 - DNA, 25 bp, Canis familiaris
tctacacgactgctcatcacttaaa

SEQ ID NO: 185894 - DNA, 25 bp, Canis familiaris
tctcactaattgctctgtcttacag

SEQ ID NO: 185895 - DNA, 25 bp, Canis familiaris
tctaccaattggagtctgtgcatga

SEQ ID NO: 185896 - DNA, 25 bp, Canis familiaris
tctctccatatttatgagtcttttt

SEQ ID NO: 185897 - DNA, 25 bp, Canis familiaris
tctctcattttctaacttttcctgg

SEQ ID NO: 185898 - DNA, 25 bp, Canis familiaris
tctctttttcaccacacagttttaa

SEQ ID NO: 185899 - DNA, 25 bp, Canis familiaris
tctctctttttggacctttatctaa

SEQ ID NO: 185900 - DNA, 25 bp, Canis familiaris
tcattctttttatggcttagtaata

SEQ ID NO: 185901 - DNA, 25 bp, Canis familiaris
tctctcattttttgtaggtctgtaa

SEQ ID NO: 185902 - DNA, 25 bp, Canis familiaris
tcagccatttttttaattggatctc

SEQ ID NO: 185903 - DNA, 25 bp, Canis familiaris
tcaagcttttaataatttttcgtca

SEQ ID NO: 185904 - DNA, 25 bp, Canis familiaris
tctcacttcttcgtaactttttccg

SEQ ID NO: 185905 - DNA, 25 bp, Canis familiaris
tctctcttcttctatggactttatc

SEQ ID NO: 185906 - DNA, 25 bp, Canis familiaris
tctctgcttggtgtagaccattctt

SEQ ID NO: 185907 - DNA, 25 bp, Canis familiaris
tctcttctggctgtagggtggttca

SEQ ID NO: 185908 - DNA, 25 bp, Canis familiaris
tctcttctagatgcctgggtactgt

SEQ ID NO: 185909 - DNA, 25 bp, Canis familiaris
tctcttcaaggtgtgtggcttcggc

SEQ ID NO: 185910 - DNA, 25 bp, Canis familiaris
tctctgccaacgtcgggggtgggca

SEQ ID NO: 185911 - DNA, 25 bp, Canis familiaris
tctcatgccacctttgtggggtgtt

SEQ ID NO: 185912 - DNA, 25 bp, Canis familiaris
tctctcccgattctgggtgtcttgt

SEQ ID NO: 185913 - DNA, 25 bp, Canis familiaris
tctcttgtcgttgttggtcttattc

SEQ ID NO: 185914 - DNA, 25 bp, Canis familiaris
tctctatgtatactcctggtgtctc

SEQ ID NO: 185915 - DNA, 25 bp, Canis familiaris
tctcatagctacttctgtgtgtgtg

SEQ ID NO: 185916 - DNA, 25 bp, Canis familiaris
tctcatcgcaacgcatgtctgtgac

SEQ ID NO: 185917 - DNA, 25 bp, Canis familiaris
tctcatctcattcgtctcattggaa

SEQ ID NO: 185918 - DNA, 25 bp, Canis familiaris
tctctgccaagccatcctggatgaa

SEQ ID NO: 185919 - DNA, 25 bp, Canis familiaris
tctctgcgcatactgcccaagagaa

SEQ ID NO: 185920 - DNA, 25 bp, Canis familiaris
tctctgcagatcggcccaatgtgca

SEQ ID NO: 185921 - DNA, 25 bp, Canis familiaris
tcttggaatgtgaccatcatggagg

SEQ ID NO: 185922 - DNA, 25 bp, Canis familiaris
tctcaggactgcatcctcagtgatg

SEQ ID NO: 185923 - DNA, 25 bp, Canis familiaris
tctctggcacgagtcccatggtgcc

SEQ ID NO: 185924 - DNA, 25 bp, Canis familiaris
tctctgatcacgaagccctgatggc

SEQ ID NO: 185925 - DNA, 25 bp, Canis familiaris
tctcagtcaggcaatgcgtggctcc

SEQ ID NO: 185926 - DNA, 25 bp, Canis familiaris
tctctgctcgtcaaggtcattgcac

SEQ ID NO: 185927 - DNA, 25 bp, Canis familiaris
tctctgctcgtttgtgtcgagtcag

SEQ ID NO: 185928 - DNA, 25 bp, Canis familiaris
tctctcaagctttttagatgccaaa

SEQ ID NO: 185929 - DNA, 25 bp, Canis familiaris
tctacaggctgtggttatgcccaag

SEQ ID NO: 185930 - DNA, 25 bp, Canis familiaris
tctagatgcatcaaggttacccaat

SEQ ID NO: 185931 - DNA, 25 bp, Canis familiaris
tctagtcttgagatgcaacgcacaa

SEQ ID NO: 185932 - DNA, 25 bp, Canis familiaris
tctctccttgggactcacccaaaac

SEQ ID NO: 185933 - DNA, 25 bp, Canis familiaris
tcttccttgtaagaatcctttacta

SEQ ID NO: 185934 - DNA, 25 bp, Canis familiaris
tctttttgtaccaaaccttacacag

SEQ ID NO: 185935 - DNA, 25 bp, Canis familiaris
tctactgttgtaggtcaaccctcaa

SEQ ID NO: 185936 - DNA, 25 bp, Canis familiaris
tctactggttatgctccagcctcat

SEQ ID NO: 185937 - DNA, 25 bp, Canis familiaris
tctactccgtttacagagcccagca

SEQ ID NO: 185938 - DNA, 25 bp, Canis familiaris
tctcaccccttgtcaggtgccaaaa

SEQ ID NO: 185939 - DNA, 25 bp, Canis familiaris
tctcacacccgggagctgggagaaa

SEQ ID NO: 185940 - DNA, 25 bp, Canis familiaris
tctcagaccccaacaactggcagaa

SEQ ID NO: 185941 - DNA, 25 bp, Canis familiaris
tctctgaccccaagaagaccaaacc

SEQ ID NO: 185942 - DNA, 25 bp, Canis familiaris
tctctacccctagcaagaaaactaa

SEQ ID NO: 185943 - DNA, 25 bp, Canis familiaris
tctctcacgaccaccaagaacagac

SEQ ID NO: 185944 - DNA, 25 bp, Canis familiaris
tctctagcccacactgaagcagaag

SEQ ID NO: 185945 - DNA, 25 bp, Canis familiaris
tctctactccccctgagatagatgt

SEQ ID NO: 185946 - DNA, 25 bp, Canis familiaris
tctcaacaccccctggtgagtgtta

SEQ ID NO: 185947 - DNA, 25 bp, Canis familiaris
tctcaagtgcccacagttactttgg

SEQ ID NO: 185948 - DNA, 25 bp, Canis familiaris
tctcatacctaagccttacctgtgg

SEQ ID NO: 185949 - DNA, 25 bp, Canis familiaris
tctctcccaagagcttaacctcaga

SEQ ID NO: 185950 - DNA, 25 bp, Canis familiaris
tctctgcccatagactttggttcaa

SEQ ID NO: 185951 - DNA, 25 bp, Canis familiaris
tctctgtctctctttttaggagtaa

SEQ ID NO: 185952 - DNA, 25 bp, Canis familiaris
tctctgctgcctcattattggggta

SEQ ID NO: 185953 - DNA, 25 bp, Canis familiaris
tctctctgctgtcatttgctgggga

SEQ ID NO: 185954 - DNA, 25 bp, Canis familiaris
tctctgctggagctgttctttggac

SEQ ID NO: 185955 - DNA, 25 bp, Canis familiaris
tctcttgtatgagtttccttgggag

SEQ ID NO: 185956 - DNA, 25 bp, Canis familiaris
tctcttttatgatttccttgggagc

SEQ ID NO: 185957 - DNA, 25 bp, Canis familiaris
tctttttcagattgttttgtaacct

SEQ ID NO: 185958 - DNA, 25 bp, Canis familiaris
tcttttcctttttgggtacagctgt

SEQ ID NO: 185959 - DNA, 25 bp, Canis familiaris
tctctctctggttttcttttataat

SEQ ID NO: 185960 - DNA, 25 bp, Canis familiaris
tctctccaggtgttcttccaataag

SEQ ID NO: 185961 - DNA, 25 bp, Canis familiaris
tctctcctggtggtatatcgacatc

SEQ ID NO: 185962 - DNA, 25 bp, Canis familiaris
tctctcctggctgccaatgtctata

SEQ ID NO: 185963 - DNA, 25 bp, Canis familiaris
tctcttctcctggtcaatgtcttta

SEQ ID NO: 185964 - DNA, 25 bp, Canis familiaris
tctcttcccatggcaatgtccattt

SEQ ID NO: 185965 - DNA, 25 bp, Canis familiaris
tctctcaccaacaaattctattctt

SEQ ID NO: 185966 - DNA, 25 bp, Canis familiaris
tctctcaccactatttcatattctc

SEQ ID NO: 185967 - DNA, 25 bp, Canis familiaris
tctctgaattttcttcacttctctc

SEQ ID NO: 185968 - DNA, 25 bp, Canis familiaris
tctctataagtttttccctttggtg

SEQ ID NO: 185969 - DNA, 25 bp, Canis familiaris
tctctctccagtgatttcaccttta

SEQ ID NO: 185970 - DNA, 25 bp, Canis familiaris
tctctccacttggattgaccttctt

SEQ ID NO: 185971 - DNA, 25 bp, Canis familiaris
tctctccactatcctgaaggctatt

SEQ ID NO: 185972 - DNA, 25 bp, Canis familiaris
tcttcaagctcttctggcagcgatt

SEQ ID NO: 185973 - DNA, 25 bp, Canis familiaris
tcttagcacatttcttaggattaaa

SEQ ID NO: 185974 - DNA, 25 bp, Canis familiaris
tcactactttactggagttaaacaa

SEQ ID NO: 185975 - DNA, 25 bp, Canis familiaris
tcacggttcccggcaggttaaaatg

SEQ ID NO: 185976 - DNA, 25 bp, Canis familiaris
tcttcgttccgtaatggcttaaaat

SEQ ID NO: 185977 - DNA, 25 bp, Canis familiaris
tcatctgggcttagtttttaaaaat

SEQ ID NO: 185978 - DNA, 25 bp, Canis familiaris
ttctcgaggatttttttcctgaaat

SEQ ID NO: 185979 - DNA, 25 bp, Canis familiaris
tctctcggtagattgtgttccccag

SEQ ID NO: 185980 - DNA, 25 bp, Canis familiaris
tctctccagtactcatttgcaacta

SEQ ID NO: 185981 - DNA, 25 bp, Canis familiaris
tctctctgcagtgcttttgtaccta

SEQ ID NO: 185982 - DNA, 25 bp, Canis familiaris
tctctctcgtccgttctatatattt

SEQ ID NO: 185983 - DNA, 25 bp, Canis familiaris
tctcatctcagtccacattgtttat

SEQ ID NO: 185984 - DNA, 25 bp, Canis familiaris
tctctgcttggctcattttccataa

SEQ ID NO: 185985 - DNA, 25 bp, Canis familiaris
tctctgttgctcattttaccagaag

SEQ ID NO: 185986 - DNA, 25 bp, Canis familiaris
tctctttttctaatgacaccagtca

SEQ ID NO: 185987 - DNA, 25 bp, Canis familiaris
tctttttcttgatgacactaccagg

SEQ ID NO: 185988 - DNA, 25 bp, Canis familiaris
tctctgcatttataagccactccaa

SEQ ID NO: 185989 - DNA, 25 bp, Canis familiaris
tctagtttatacgaccgtcctaggc

SEQ ID NO: 185990 - DNA, 25 bp, Canis familiaris
tctatttgtcaaccccgatttagtc

SEQ ID NO: 185991 - DNA, 25 bp, Canis familiaris
tctagtcttgaagccctcatttaga

SEQ ID NO: 185992 - DNA, 25 bp, Canis familiaris
tctagctctgtgttaatccctgtta

SEQ ID NO: 185993 - DNA, 25 bp, Canis familiaris
tctcttctatgtccaaacctgattc

SEQ ID NO: 185994 - DNA, 25 bp, Canis familiaris
tctttccattcaccagaccattccg

SEQ ID NO: 185995 - DNA, 25 bp, Canis familiaris
tctcttccatttagaaacactgcac

SEQ ID NO: 185996 - DNA, 25 bp, Canis familiaris
tctctttgattcataaatgcactga

SEQ ID NO: 185997 - DNA, 25 bp, Canis familiaris
tctctttttttattgtgccatagtc

SEQ ID NO: 185998 - DNA, 25 bp, Canis familiaris
tctctctttttttattgtgccatag

SEQ ID NO: 185999 - DNA, 25 bp, Canis familiaris
tctctctatttgtgtatgtgtctca

SEQ ID NO: 186000 - DNA, 25 bp, Canis familiaris
tctcttctcttgtgtatttttgtgc

SEQ ID NO: 186001 - DNA, 25 bp, Canis familiaris
tctctcctatggtgggtgctttgtc

SEQ ID NO: 186002 - DNA, 25 bp, Canis familiaris
tctcacctcaggctgtagtcacttt

SEQ ID NO: 186003 - DNA, 25 bp, Canis familiaris
tctcactctcactaggataaacttc

SEQ ID NO: 186004 - DNA, 25 bp, Canis familiaris
tctcagcgtaaagcaatccatgctt

SEQ ID NO: 186005 - DNA, 25 bp, Canis familiaris
tctaccataagagacgccagctccc

SEQ ID NO: 186006 - DNA, 25 bp, Canis familiaris
tctacttcaagaatatttcccccgg

SEQ ID NO: 186007 - DNA, 25 bp, Canis familiaris
tctcagttctagaattttcccccag

SEQ ID NO: 186008 - DNA, 25 bp, Canis familiaris
tctcagtgttttttcctgaccacgc

SEQ ID NO: 186009 - DNA, 25 bp, Canis familiaris
tctagatgctctgtagcctctgacc

SEQ ID NO: 186010 - DNA, 25 bp, Canis familiaris
tctatgatgacttcttccactacca

SEQ ID NO: 186011 - DNA, 25 bp, Canis familiaris
tctttgatcccattccactcaagaa

SEQ ID NO: 186012 - DNA, 25 bp, Canis familiaris
tctcagtggcctctccattgaagaa

SEQ ID NO: 186013 - DNA, 25 bp, Canis familiaris
tctcagccaccttacacttgaaaga

SEQ ID NO: 186014 - DNA, 25 bp, Canis familiaris
tctacccttctagtgctctgaaaac

SEQ ID NO: 186015 - DNA, 25 bp, Canis familiaris
tctacccttctagtgctctgaaaac

SEQ ID NO: 186016 - DNA, 25 bp, Canis familiaris
tctacggttgcaaactgctgaccac

SEQ ID NO: 186017 - DNA, 25 bp, Canis familiaris
tcttctggtccacactgaattcact

SEQ ID NO: 186018 - DNA, 25 bp, Canis familiaris
tctctccttcctccaggaattattg

SEQ ID NO: 186019 - DNA, 25 bp, Canis familiaris
tctctccttcctcaggaagcattgg

SEQ ID NO: 186020 - DNA, 25 bp, Canis familiaris
tctcacctccctgaagaacttgtat

SEQ ID NO: 186021 - DNA, 25 bp, Canis familiaris
tctctctgacaggtggaaaactttt

SEQ ID NO: 186022 - DNA, 25 bp, Canis familiaris
tctctcttaggtcagcatcaatgcc

SEQ ID NO: 186023 - DNA, 25 bp, Canis familiaris
tctctcctaagattcacacacacac

SEQ ID NO: 186024 - DNA, 25 bp, Canis familiaris
tctcacctacatttatgcaacagcc

SEQ ID NO: 186025 - DNA, 25 bp, Canis familiaris
tctcacctacatttagcaacacctc

SEQ ID NO: 186026 - DNA, 25 bp, Canis familiaris
tctcaccacctgtaacctcacaggt

SEQ ID NO: 186027 - DNA, 25 bp, Canis familiaris
tctacaatactaagtcctcacgaga

SEQ ID NO: 186028 - DNA, 25 bp, Canis familiaris
tctacactacttctcaccaaatatt

SEQ ID NO: 186029 - DNA, 25 bp, Canis familiaris
tctagtccacttttcactaagccac

SEQ ID NO: 186030 - DNA, 25 bp, Canis familiaris
tctagtccgcattttggtggtccaa

SEQ ID NO: 186031 - DNA, 25 bp, Canis familiaris
tctagatcagcctttttgtttcaat

SEQ ID NO: 186032 - DNA, 25 bp, Canis familiaris
tctcagtcgtcatcatttatttccc

SEQ ID NO: 186033 - DNA, 25 bp, Canis familiaris
tctagctaccattcattttcttcac

SEQ ID NO: 186034 - DNA, 25 bp, Canis familiaris
tctagccatagcatttccttctgcc

SEQ ID NO: 186035 - DNA, 25 bp, Canis familiaris
tctcagtcaacttctaccttcatga

SEQ ID NO: 186036 - DNA, 25 bp, Canis familiaris
tctatgctgggcagctggccttgaa

SEQ ID NO: 186037 - DNA, 25 bp, Canis familiaris
tctctctctagaacagtccttaaat

SEQ ID NO: 186038 - DNA, 25 bp, Canis familiaris
tctctcctgaataaatacataaaat

SEQ ID NO: 186039 - DNA, 25 bp, Canis familiaris
tctctctctgtgactatcataaaaa

SEQ ID NO: 186040 - DNA, 25 bp, Canis familiaris
tctctctctgtctctcatgaataaa

SEQ ID NO: 186041 - DNA, 25 bp, Canis familiaris
tctctctgtgactatcataaaaaaa

SEQ ID NO: 186042 - DNA, 25 bp, Canis familiaris
tctctctgtctctcatgaataaata

SEQ ID NO: 186043 - DNA, 25 bp, Canis familiaris
tctctcttctctgtgactatcataa

SEQ ID NO: 186044 - DNA, 25 bp, Canis familiaris
tctctctgtgtgtgtgactatcata

SEQ ID NO: 186045 - DNA, 25 bp, Canis familiaris
tctctctctgtgtgtgactatcata

SEQ ID NO: 186046 - DNA, 25 bp, Canis familiaris
tctctctctgtgtgtgtgactatca

SEQ ID NO: 186047 - DNA, 25 bp, Canis familiaris
tctctctctatgtgactatcataaa

SEQ ID NO: 186048 - DNA, 25 bp, Canis familiaris
tctctctctctgtgactatcataaa

SEQ ID NO: 186049 - DNA, 25 bp, Canis familiaris
tctctctctctgtgactatcataaa

SEQ ID NO: 186050 - DNA, 25 bp, Canis familiaris
tctcttgcacgctgaccaaaaacgc

SEQ ID NO: 186051 - DNA, 25 bp, Canis familiaris
tctctcgcgccataacaaataacca

SEQ ID NO: 186052 - DNA, 25 bp, Canis familiaris
tctctcctcacagtcaacaacaaac

SEQ ID NO: 186053 - DNA, 25 bp, Canis familiaris
tctcatctccacacacctggagaac

SEQ ID NO: 186054 - DNA, 25 bp, Canis familiaris
tctctcccagattcatcctcaggga

SEQ ID NO: 186055 - DNA, 25 bp, Canis familiaris
tctctcttagattgctcactctggt

SEQ ID NO: 186056 - DNA, 25 bp, Canis familiaris
tctcttgatgcacacacacttggat

SEQ ID NO: 186057 - DNA, 25 bp, Canis familiaris
tctcttcagcatctcaacacatttt

SEQ ID NO: 186058 - DNA, 25 bp, Canis familiaris
tctcttgacctgaattctgcatgtt

SEQ ID NO: 186059 - DNA, 25 bp, Canis familiaris
tctcttcatcctttgtcatgtgttc

SEQ ID NO: 186060 - DNA, 25 bp, Canis familiaris
tctctctctgccatcttaggttggc

SEQ ID NO: 186061 - DNA, 25 bp, Canis familiaris
tctctctctctttttgtggtctgag

SEQ ID NO: 186062 - DNA, 25 bp, Canis familiaris
tctctctctctttgtggtctgagtg

SEQ ID NO: 186063 - DNA, 25 bp, Canis familiaris
tctctctgctcgtttgtgtcgagtc

SEQ ID NO: 186064 - DNA, 25 bp, Canis familiaris
tctcttcctgtttaccgagtcatca

SEQ ID NO: 186065 - DNA, 25 bp, Canis familiaris
tctcttcactgatgacctctagtta

SEQ ID NO: 186066 - DNA, 25 bp, Canis familiaris
tctcttgatctgtatacctctttaa

SEQ ID NO: 186067 - DNA, 25 bp, Canis familiaris
tctctacactcatttccttgttgaa

SEQ ID NO: 186068 - DNA, 25 bp, Canis familiaris
tctcttcactctctctcaatgaatg

SEQ ID NO: 186069 - DNA, 25 bp, Canis familiaris
tctcatatctctgcttctcattgaa

SEQ ID NO: 186070 - DNA, 25 bp, Canis familiaris
tctactattccattctattgaggtg

SEQ ID NO: 186071 - DNA, 25 bp, Canis familiaris
tctcactttcccttctgagtggtgg

SEQ ID NO: 186072 - DNA, 25 bp, Canis familiaris
tctctcttccacattctttggtttg

SEQ ID NO: 186073 - DNA, 25 bp, Canis familiaris
tctatcttccacttaaatacgttta

SEQ ID NO: 186074 - DNA, 25 bp, Canis familiaris
tctttcttcccaaactaggttatag

SEQ ID NO: 186075 - DNA, 25 bp, Canis familiaris
tctcttttccgaattcttttataag

SEQ ID NO: 186076 - DNA, 25 bp, Canis familiaris
tctagtttactactttggctttcaa

SEQ ID NO: 186077 - DNA, 25 bp, Canis familiaris
tctaaaaactcacttatttatccca

SEQ ID NO: 186078 - DNA, 25 bp, Canis familiaris
tctatcaaaacaccttattttacct

SEQ ID NO: 186079 - DNA, 25 bp, Canis familiaris
tctcaaacaagaagttcttttccct

SEQ ID NO: 186080 - DNA, 25 bp, Canis familiaris
tctcaccaacaaattctattctttc

SEQ ID NO: 186081 - DNA, 25 bp, Canis familiaris
tcttcgaaaaattctcccttgcgcg

SEQ ID NO: 186082 - DNA, 25 bp, Canis familiaris
tctttgggaaatccccaccaagcca

SEQ ID NO: 186083 - DNA, 25 bp, Canis familiaris
tcttgagagagtaagccccaccacg

SEQ ID NO: 186084 - DNA, 25 bp, Canis familiaris
tcttgagacctgcatggtcctccag

SEQ ID NO: 186085 - DNA, 25 bp, Canis familiaris
tctatgaacttgctattctctgcca

SEQ ID NO: 186086 - DNA, 25 bp, Canis familiaris
tctatagtttgtcatgcactctcct

SEQ ID NO: 186087 - DNA, 25 bp, Canis familiaris
tctagaccttatgtgactcttcctt

SEQ ID NO: 186088 - DNA, 25 bp, Canis familiaris
tctctacctcaagggcattcttccc

SEQ ID NO: 186089 - DNA, 25 bp, Canis familiaris
tctacacagaaggggcttcctgccc

SEQ ID NO: 186090 - DNA, 25 bp, Canis familiaris
tctatgacatgatggtgcctttccc

SEQ ID NO: 186091 - DNA, 25 bp, Canis familiaris
tctcaacagaggccagtttctcctt

SEQ ID NO: 186092 - DNA, 25 bp, Canis familiaris
tctacaatgagctgcgtgtggcccc

SEQ ID NO: 186093 - DNA, 25 bp, Canis familiaris
tctaaaatgcccgttgtggccctaa

SEQ ID NO: 186094 - DNA, 25 bp, Canis familiaris
tctagagcgtttctttggcacctca

SEQ ID NO: 186095 - DNA, 25 bp, Canis familiaris
tcttgcacgattaggttaacccgac

SEQ ID NO: 186096 - DNA, 25 bp, Canis familiaris
tctagacaattcctttaacccgtga

SEQ ID NO: 186097 - DNA, 25 bp, Canis familiaris
tcttgaaaacctctccaaccagtac

SEQ ID NO: 186098 - DNA, 25 bp, Canis familiaris
tctctcaccaacgctttcaaacgat

SEQ ID NO: 186099 - DNA, 25 bp, Canis familiaris
tctcagcatccatccatgttgtcaa

SEQ ID NO: 186100 - DNA, 25 bp, Canis familiaris
tctcagggcatgtcttttgcatagc

SEQ ID NO: 186101 - DNA, 25 bp, Canis familiaris
tctcaatgacaactttgtcaagctc

SEQ ID NO: 186102 - DNA, 25 bp, Canis familiaris
tctcagaacagtcagatgctaagct

SEQ ID NO: 186103 - DNA, 25 bp, Canis familiaris
tctcagcccagaaagcagcctagtg

SEQ ID NO: 186104 - DNA, 25 bp, Canis familiaris
tcttcagccaggaacacctagtgat

SEQ ID NO: 186105 - DNA, 25 bp, Canis familiaris
tctagaaatgaaacccgaataagga

SEQ ID NO: 186106 - DNA, 25 bp, Canis familiaris
tctacagaagaaagccccaaaaggg

SEQ ID NO: 186107 - DNA, 25 bp, Canis familiaris
ttagccaaaatacccagtacttcgg

SEQ ID NO: 186108 - DNA, 25 bp, Canis familiaris
tcaaggcaaaggcaccaaacttagg

SEQ ID NO: 186109 - DNA, 25 bp, Canis familiaris
tctagaggaatggaacaccaaggta

SEQ ID NO: 186110 - DNA, 25 bp, Canis familiaris
tctacagtatagcacaatccccaaa

SEQ ID NO: 186111 - DNA, 25 bp, Canis familiaris
tctaattaacttcatctctcatcta

SEQ ID NO: 186112 - DNA, 25 bp, Canis familiaris
tctctaataaattccctctgctcaa

SEQ ID NO: 186113 - DNA, 25 bp, Canis familiaris
tctctacatcatgatttcctttcag

SEQ ID NO: 186114 - DNA, 25 bp, Canis familiaris
tctaattcaataaactctgtatcac

SEQ ID NO: 186115 - DNA, 25 bp, Canis familiaris
tctttctaacatcaatgcttagcag

SEQ ID NO: 186116 - DNA, 25 bp, Canis familiaris
tcttttgtaccttactatctaggaa

SEQ ID NO: 186117 - DNA, 25 bp, Canis familiaris
tctttctttccctctgcattagggt

SEQ ID NO: 186118 - DNA, 25 bp, Canis familiaris
tcttttccccgatcggctagaagaa

SEQ ID NO: 186119 - DNA, 25 bp, Canis familiaris
tcttgtcccacctaccggtgaaaag

SEQ ID NO: 186120 - DNA, 25 bp, Canis familiaris
tctactccaatttcctccgtggaaa

SEQ ID NO: 186121 - DNA, 25 bp, Canis familiaris
tctacatcctttttcacctgaagaa

SEQ ID NO: 186122 - DNA, 25 bp, Canis familiaris
tctaacacttttctacatacaaaac

SEQ ID NO: 186123 - DNA, 25 bp, Canis familiaris
tctaccacctttcttctcaagaatc

SEQ ID NO: 186124 - DNA, 25 bp, Canis familiaris
tctcattccccaatggttccagaaa

SEQ ID NO: 186125 - DNA, 25 bp, Canis familiaris
tctcttctcccttgtattaaaaact

SEQ ID NO: 186126 - DNA, 25 bp, Canis familiaris
tctcttctctgctcttttcaataaa

SEQ ID NO: 186127 - DNA, 25 bp, Canis familiaris
tctctttcctccgttcttaaatgaa

SEQ ID NO: 186128 - DNA, 25 bp, Canis familiaris
tctctttctcccactgattgaatta

SEQ ID NO: 186129 - DNA, 25 bp, Canis familiaris
tctctcttacctgcattgtgtgaca

SEQ ID NO: 186130 - DNA, 25 bp, Canis familiaris
tctagctctaccacaagttgcacaa

SEQ ID NO: 186131 - DNA, 25 bp, Canis familiaris
tctacttcacaagacatggacaata

SEQ ID NO: 186132 - DNA, 25 bp, Canis familiaris
tctactccaatctgtctggccagaa

SEQ ID NO: 186133 - DNA, 25 bp, Canis familiaris
tctagctccatcagtgttgtggcaa

SEQ ID NO: 186134 - DNA, 25 bp, Canis familiaris
tctagtccagcaagtttctataact

SEQ ID NO: 186135 - DNA, 25 bp, Canis familiaris
tctcagtcatcagggttgcctaata

SEQ ID NO: 186136 - DNA, 25 bp, Canis familiaris
tctagatccatccatgttgttacaa

SEQ ID NO: 186137 - DNA, 25 bp, Canis familiaris
tctagatccatccatattgtcataa

SEQ ID NO: 186138 - DNA, 25 bp, Canis familiaris
tctcagagactgtttgtgtcacaat

SEQ ID NO: 186139 - DNA, 25 bp, Canis familiaris
tctcagcagtgttttctgctgcaaa

SEQ ID NO: 186140 - DNA, 25 bp, Canis familiaris
tctcacaatgtcccgtgtgcacaga

SEQ ID NO: 186141 - DNA, 25 bp, Canis familiaris
tctcacattgtcttgcttaacatgg

SEQ ID NO: 186142 - DNA, 25 bp, Canis familiaris
tctacaatgctctgatacatgaagg

SEQ ID NO: 186143 - DNA, 25 bp, Canis familiaris
tctacgatgccgctgacgtcagcac

SEQ ID NO: 186144 - DNA, 25 bp, Canis familiaris
tcatctgtaggctttgacgtagcac

SEQ ID NO: 186145 - DNA, 25 bp, Canis familiaris
tcagtgttggcgatgacgattaaat

SEQ ID NO: 186146 - DNA, 25 bp, Canis familiaris
tctatttgccgttatagctcgaaat

SEQ ID NO: 186147 - DNA, 25 bp, Canis familiaris
tctctttccaatgaacctgcataca

SEQ ID NO: 186148 - DNA, 25 bp, Canis familiaris
tctctttcctgtgaagcctaagcaa

SEQ ID NO: 186149 - DNA, 25 bp, Canis familiaris
tctcttccctattacagaaaagtat

SEQ ID NO: 186150 - DNA, 25 bp, Canis familiaris
tcttttgctcaattacagaaaacca

SEQ ID NO: 186151 - DNA, 25 bp, Canis familiaris
tctctttgcccataaagactcccgt

SEQ ID NO: 186152 - DNA, 25 bp, Canis familiaris
tctattggcccagagacatacccca

SEQ ID NO: 186153 - DNA, 25 bp, Canis familiaris
tctcaggaccctgggatcatgacct

SEQ ID NO: 186154 - DNA, 25 bp, Canis familiaris
tctcatggggtcaggcatagacctg

SEQ ID NO: 186155 - DNA, 25 bp, Canis familiaris
tcttggggtagaccttaactctcct

SEQ ID NO: 186156 - DNA, 25 bp, Canis familiaris
tctaggaaataattcctttcttcct

SEQ ID NO: 186157 - DNA, 25 bp, Canis familiaris
tctattaagttttcctttcctccat

SEQ ID NO: 186158 - DNA, 25 bp, Canis familiaris
tctttattgtaactcctttcctaat

SEQ ID NO: 186159 - DNA, 25 bp, Canis familiaris
tctttacttaagaactttcttggca

SEQ ID NO: 186160 - DNA, 25 bp, Canis familiaris
tctttggtttgtaacttatcgtgta

SEQ ID NO: 186161 - DNA, 25 bp, Canis familiaris
tctttggttttgccctacagccaag

SEQ ID NO: 186162 - DNA, 25 bp, Canis familiaris
tctttcgttttggtcccatccaaag

SEQ ID NO: 186163 - DNA, 25 bp, Canis familiaris
tctttactgtttggaacgtccaaat

SEQ ID NO: 186164 - DNA, 25 bp, Canis familiaris
tctactgaggtggtcgaatcgtgcc

SEQ ID NO: 186165 - DNA, 25 bp, Canis familiaris
tcttctgaggctgtctaaccgggaa

SEQ ID NO: 186166 - DNA, 25 bp, Canis familiaris
tcttctaggggaaaacactgacgaa

SEQ ID NO: 186167 - DNA, 25 bp, Canis familiaris
tcttcgaggggagcaataccacgga

SEQ ID NO: 186168 - DNA, 25 bp, Canis familiaris
tcttccaggcttaggcattaccact

SEQ ID NO: 186169 - DNA, 25 bp, Canis familiaris
tctttaggcttgttgcactagtcag

SEQ ID NO: 186170 - DNA, 25 bp, Canis familiaris
tctacttggatttcttctactctgc

SEQ ID NO: 186171 - DNA, 25 bp, Canis familiaris
tctacattcttttccctaatatcaa

SEQ ID NO: 186172 - DNA, 25 bp, Canis familiaris
tctacgtttttcttctattaatcaa

SEQ ID NO: 186173 - DNA, 25 bp, Canis familiaris
tctacagttcctactattttaaaat

SEQ ID NO: 186174 - DNA, 25 bp, Canis familiaris
tctaccttcccagatttttacaaat

SEQ ID NO: 186175 - DNA, 25 bp, Canis familiaris
tcttctttccctgattattttgccg

SEQ ID NO: 186176 - DNA, 25 bp, Canis familiaris
tcttttgaacctgaaccgtatcccg

SEQ ID NO: 186177 - DNA, 25 bp, Canis familiaris
tcttttaggcacagaacccttccaa

SEQ ID NO: 186178 - DNA, 25 bp, Canis familiaris
tcttggtaatccaagggtcctccca

SEQ ID NO: 186179 - DNA, 25 bp, Canis familiaris
tcttatttaacttggaggccccaat

SEQ ID NO: 186180 - DNA, 25 bp, Canis familiaris
tcttagtgtatctctgagggcccca

SEQ ID NO: 186181 - DNA, 25 bp, Canis familiaris
tctttgtgtaaacaccgcacaccac

SEQ ID NO: 186182 - DNA, 25 bp, Canis familiaris
tctagagttccaagatatccgccgc

SEQ ID NO: 186183 - DNA, 25 bp, Canis familiaris
tctaggcattggcaagatctcccct

SEQ ID NO: 186184 - DNA, 25 bp, Canis familiaris
tctcagtgcttttgagtgagccccc

SEQ ID NO: 186185 - DNA, 25 bp, Canis familiaris
tctcagtgtgttacaccagtccacc

SEQ ID NO: 186186 - DNA, 25 bp, Canis familiaris
tctatgcttgtcaaacgatatgcaa

SEQ ID NO: 186187 - DNA, 25 bp, Canis familiaris
tctagctgttgcatcaagaaaagat

SEQ ID NO: 186188 - DNA, 25 bp, Canis familiaris
tctcattcagtcatcatagtcaaaa

SEQ ID NO: 186189 - DNA, 25 bp, Canis familiaris
tctcttgctatcttgctcagtcaaa

SEQ ID NO: 186190 - DNA, 25 bp, Canis familiaris
tctacgctatgcaatcccatcaaac

SEQ ID NO: 186191 - DNA, 25 bp, Canis familiaris
tctaccttcatgaccaccatataat

SEQ ID NO: 186192 - DNA, 25 bp, Canis familiaris
tctaccttctgtaaaaataaaatcg

SEQ ID NO: 186193 - DNA, 25 bp, Canis familiaris
tcttcacttcttccataaaaaatca

SEQ ID NO: 186194 - DNA, 25 bp, Canis familiaris
tctctttctctccgtcaaacaaata

SEQ ID NO: 186195 - DNA, 25 bp, Canis familiaris
tctcttgtctttggtgccacacaaa

SEQ ID NO: 186196 - DNA, 25 bp, Canis familiaris
tctcttggatattctcgacacagca

SEQ ID NO: 186197 - DNA, 25 bp, Canis familiaris
tctttgtgattcttggactgaccgt

SEQ ID NO: 186198 - DNA, 25 bp, Canis familiaris
tctctttatctcttcgtgtcatagg

SEQ ID NO: 186199 - DNA, 25 bp, Canis familiaris
tctctttcacgcttcatttgctagg

SEQ ID NO: 186200 - DNA, 25 bp, Canis familiaris
tctctttctcctcatttgtcaaagg

SEQ ID NO: 186201 - DNA, 25 bp, Canis familiaris
tttcttctactttagtggcaagggt

SEQ ID NO: 186202 - DNA, 25 bp, Canis familiaris
tctttcctcctgaaggtgggagggc

SEQ ID NO: 186203 - DNA, 25 bp, Canis familiaris
tctatgaccacctgggtttggggcc

SEQ ID NO: 186204 - DNA, 25 bp, Canis familiaris
tctagagggcccgaggcttctgggc

SEQ ID NO: 186205 - DNA, 25 bp, Canis familiaris
tctcaaccgccttattttgctggtt

SEQ ID NO: 186206 - DNA, 25 bp, Canis familiaris
tctcttaaccctttttgcttgttgt

SEQ ID NO: 186207 - DNA, 25 bp, Canis familiaris
tatttattcaactgtttttgttttg

SEQ ID NO: 186208 - DNA, 25 bp, Canis familiaris
taaatttttctgctttaggttcttg

SEQ ID NO: 186209 - DNA, 25 bp, Canis familiaris
taataatttttgctgaattccttta

SEQ ID NO: 186210 - DNA, 25 bp, Canis familiaris
tctcatgtatttctttgccattcct

SEQ ID NO: 186211 - DNA, 25 bp, Canis familiaris
tctagttatatttttgccattttgc

SEQ ID NO: 186212 - DNA, 25 bp, Canis familiaris
tctcatgtctgaataatagtcctta

SEQ ID NO: 186213 - DNA, 25 bp, Canis familiaris
tctttgcaataattagaacttaaat

SEQ ID NO: 186214 - DNA, 25 bp, Canis familiaris
tcttggttgatattcagaacttcct

SEQ ID NO: 186215 - DNA, 25 bp, Canis familiaris
tctttgtagtactgaaattgccaga

SEQ ID NO: 186216 - DNA, 25 bp, Canis familiaris
tctattggttcctgttttccagtgt

SEQ ID NO: 186217 - DNA, 25 bp, Canis familiaris
tctcttgtttcctgttttctatcag

SEQ ID NO: 186218 - DNA, 25 bp, Canis familiaris
tctcattgttctctcgtttttatta

SEQ ID NO: 186219 - DNA, 25 bp, Canis familiaris
tctcttgcttcttctagttttgtga

SEQ ID NO: 186220 - DNA, 25 bp, Canis familiaris
tctcttgcctaagtattcttttcct

SEQ ID NO: 186221 - DNA, 25 bp, Canis familiaris
tctcttcctagagtcttttgaaatt

SEQ ID NO: 186222 - DNA, 25 bp, Canis familiaris
tctttacactgattttttaaattat

SEQ ID NO: 186223 - DNA, 25 bp, Canis familiaris
tctcttctcacctctttggaaatta

SEQ ID NO: 186224 - DNA, 25 bp, Canis familiaris
tcttaaacccctcttataatatggc

SEQ ID NO: 186225 - DNA, 25 bp, Canis familiaris
tctttaccccgtgcaccaaaatggt

SEQ ID NO: 186226 - DNA, 25 bp, Canis familiaris
tctatgtgacgcgggtccacggaga

SEQ ID NO: 186227 - DNA, 25 bp, Canis familiaris
tctcagagacctgtgtctcctggga

SEQ ID NO: 186228 - DNA, 25 bp, Canis familiaris
tctacagcacctggtgcccgggtga

SEQ ID NO: 186229 - DNA, 25 bp, Canis familiaris
tctacccctggggcatcgtggaagt

SEQ ID NO: 186230 - DNA, 25 bp, Canis familiaris
tctcagctccggggagccgtggaca

SEQ ID NO: 186231 - DNA, 25 bp, Canis familiaris
tctttccaggctacgtcgggatcaa

SEQ ID NO: 186232 - DNA, 25 bp, Canis familiaris
ttttccggtctatctgagtaaatta

SEQ ID NO: 186233 - DNA, 25 bp, Canis familiaris
tctttgggttctttgtaatttaatg

SEQ ID NO: 186234 - DNA, 25 bp, Canis familiaris
tcttgtgggttttgggggtctccag

SEQ ID NO: 186235 - DNA, 25 bp, Canis familiaris
tcttgttgtgtttttgggggaccag

SEQ ID NO: 186236 - DNA, 25 bp, Canis familiaris
tctatttgcgtttgttagggtgata

SEQ ID NO: 186237 - DNA, 25 bp, Canis familiaris
tctcacttgtgatttggtttgggat

SEQ ID NO: 186238 - DNA, 25 bp, Canis familiaris
tctcacttgtgatttggtttgggat

SEQ ID NO: 186239 - DNA, 25 bp, Canis familiaris
tctcacttgtgatttggtttgggat

SEQ ID NO: 186240 - DNA, 25 bp, Canis familiaris
tctcacttgtgatttggtttgggat

SEQ ID NO: 186241 - DNA, 25 bp, Canis familiaris
tctcacttgtgatttggtttgggat

SEQ ID NO: 186242 - DNA, 25 bp, Canis familiaris
tctcacttgtgatttggtttgggat

SEQ ID NO: 186243 - DNA, 25 bp, Canis familiaris
tctcactctgtgtgtcgcatgttgg

SEQ ID NO: 186244 - DNA, 25 bp, Canis familiaris
tctactaatgaggtccatatctgaa

SEQ ID NO: 186245 - DNA, 25 bp, Canis familiaris
tcttcttcataggcatgcccatcat

SEQ ID NO: 186246 - DNA, 25 bp, Canis familiaris
tctatcctctggtcatctctatgac

SEQ ID NO: 186247 - DNA, 25 bp, Canis familiaris
tctttccttatctctagcattctaa

SEQ ID NO: 186248 - DNA, 25 bp, Canis familiaris
tctttctttatcccaaaccaatgaa

SEQ ID NO: 186249 - DNA, 25 bp, Canis familiaris
tcttcttttattccatttaagggca

SEQ ID NO: 186250 - DNA, 25 bp, Canis familiaris
tctcattttggatcctactactagg

SEQ ID NO: 186251 - DNA, 25 bp, Canis familiaris
tctttttttcctccagctaatttgc

SEQ ID NO: 186252 - DNA, 25 bp, Canis familiaris
tcactacttttctccaaattttggg

SEQ ID NO: 186253 - DNA, 25 bp, Canis familiaris
tcactttctttaccccaattttgtg

SEQ ID NO: 186254 - DNA, 25 bp, Canis familiaris
tcttttcttatccttacaaattttg

SEQ ID NO: 186255 - DNA, 25 bp, Canis familiaris
tcttttactaccctcaaaatgaagt

SEQ ID NO: 186256 - DNA, 25 bp, Canis familiaris
tctttattcaactttgccaattaac

SEQ ID NO: 186257 - DNA, 25 bp, Canis familiaris
tcttcacttaaatcccagagtcccc

SEQ ID NO: 186258 - DNA, 25 bp, Canis familiaris
tctacctttaattttggagtgcacc

SEQ ID NO: 186259 - DNA, 25 bp, Canis familiaris
tctacctgtctgactacctggacga

SEQ ID NO: 186260 - DNA, 25 bp, Canis familiaris
tctcacttttgagtaccatggatta

SEQ ID NO: 186261 - DNA, 25 bp, Canis familiaris
tctcatcctgttcttcagctggatt

SEQ ID NO: 186262 - DNA, 25 bp, Canis familiaris
tctaagcttctcgtcatatgtggta

SEQ ID NO: 186263 - DNA, 25 bp, Canis familiaris
tctagagctttgtctcagcttgcgg

SEQ ID NO: 186264 - DNA, 25 bp, Canis familiaris
tttggtttgtcccttggacacttct

SEQ ID NO: 186265 - DNA, 25 bp, Canis familiaris
tcttagttttccttttgctctgatt

SEQ ID NO: 186266 - DNA, 25 bp, Canis familiaris
tcttagtgctaataccttgcctctt

SEQ ID NO: 186267 - DNA, 25 bp, Canis familiaris
tctcttgtgtacacagactctcctc

SEQ ID NO: 186268 - DNA, 25 bp, Canis familiaris
tcttcgacaatcagagccacattcc

SEQ ID NO: 186269 - DNA, 25 bp, Canis familiaris
tcatcccagaaccggaacttgctct

SEQ ID NO: 186270 - DNA, 25 bp, Canis familiaris
tcttcctggacctggacattcagct

SEQ ID NO: 186271 - DNA, 25 bp, Canis familiaris
tcttcggttactgggacattcgcgg

SEQ ID NO: 186272 - DNA, 25 bp, Canis familiaris
tcttgggtctacaccatcattctgc

SEQ ID NO: 186273 - DNA, 25 bp, Canis familiaris
tctagggtgcattttccatcactcc

SEQ ID NO: 186274 - DNA, 25 bp, Canis familiaris
tctagagggtttacaccctcccgag

SEQ ID NO: 186275 - DNA, 25 bp, Canis familiaris
tctagggtgttgggtcagcccacgg

SEQ ID NO: 186276 - DNA, 25 bp, Canis familiaris
tctttgaaggagggtcagcgccggg

SEQ ID NO: 186277 - DNA, 25 bp, Canis familiaris
tctcagtgaaggtgcggatgccccg

SEQ ID NO: 186278 - DNA, 25 bp, Canis familiaris
tctaagaacagtagctgggcccgcc

SEQ ID NO: 186279 - DNA, 25 bp, Canis familiaris
tctaataacagtactgcacctcccg

SEQ ID NO: 186280 - DNA, 25 bp, Canis familiaris
tctaacacacagacctccttggtcc

SEQ ID NO: 186281 - DNA, 25 bp, Canis familiaris
tcataaccggtctctttgtgtcagg

SEQ ID NO: 186282 - DNA, 25 bp, Canis familiaris
tctattacgagtgacattggtatgc

SEQ ID NO: 186283 - DNA, 25 bp, Canis familiaris
tctataaccagagatcctgcttcga

SEQ ID NO: 186284 - DNA, 25 bp, Canis familiaris
tctttacgagcacaccctaattagt

SEQ ID NO: 186285 - DNA, 25 bp, Canis familiaris
tcttattcacaacaccactgaagtt

SEQ ID NO: 186286 - DNA, 25 bp, Canis familiaris
tcttttgcaaagacttactggagtt

SEQ ID NO: 186287 - DNA, 25 bp, Canis familiaris
tctactgtgcaatgaatcactgtga

SEQ ID NO: 186288 - DNA, 25 bp, Canis familiaris
tctactgtccaatgatgttgccaag

SEQ ID NO: 186289 - DNA, 25 bp, Canis familiaris
tctcactgtccatttcatatgttcc

SEQ ID NO: 186290 - DNA, 25 bp, Canis familiaris
tctacttctgcatctgctggatgtc

SEQ ID NO: 186291 - DNA, 25 bp, Canis familiaris
tcttttctgctattgaggtggcttt

SEQ ID NO: 186292 - DNA, 25 bp, Canis familiaris
tctttccctcttagaatggcattga

SEQ ID NO: 186293 - DNA, 25 bp, Canis familiaris
tctcactcctccgttgaggtcatta

SEQ ID NO: 186294 - DNA, 25 bp, Canis familiaris
tctcaatccattctctggggcatat

SEQ ID NO: 186295 - DNA, 25 bp, Canis familiaris
tcttatccattgctcgttggctagc

SEQ ID NO: 186296 - DNA, 25 bp, Canis familiaris
tctaataattgcccagtgggttgaa

SEQ ID NO: 186297 - DNA, 25 bp, Canis familiaris
tctagataacctcgggccgatcgca

SEQ ID NO: 186298 - DNA, 25 bp, Canis familiaris
tctaataacctccgtgttcatcctg

SEQ ID NO: 186299 - DNA, 25 bp, Canis familiaris
tctaattaccatgtgttgttccgga

SEQ ID NO: 186300 - DNA, 25 bp, Canis familiaris
tctttaatcctggttatcttctggg

SEQ ID NO: 186301 - DNA, 25 bp, Canis familiaris
tctttggtagtgcttcttttgccgc

SEQ ID NO: 186302 - DNA, 25 bp, Canis familiaris
tctaatctgtgtgtcttcttttggc

SEQ ID NO: 186303 - DNA, 25 bp, Canis familiaris
tctactttgttgacttgcttttcta

SEQ ID NO: 186304 - DNA, 25 bp, Canis familiaris
tctaattttttggtgtctctctctc

SEQ ID NO: 186305 - DNA, 25 bp, Canis familiaris
tctaattaatttattgtcttccccg

SEQ ID NO: 186306 - DNA, 25 bp, Canis familiaris
tctaatgctaatgttatttcttata

SEQ ID NO: 186307 - DNA, 25 bp, Canis familiaris
tctacatgtatatcttaccctctaa

SEQ ID NO: 186308 - DNA, 25 bp, Canis familiaris
tctacttatccagttatacctttga

SEQ ID NO: 186309 - DNA, 25 bp, Canis familiaris
tctacgttgacccaaatctctttga

SEQ ID NO: 186310 - DNA, 25 bp, Canis familiaris
tctagccttagaaaatctctcctta

SEQ ID NO: 186311 - DNA, 25 bp, Canis familiaris
tctaccatatataaaacccttctaa

SEQ ID NO: 186312 - DNA, 25 bp, Canis familiaris
tcatccgaagtaaatcctctttcta

SEQ ID NO: 186313 - DNA, 25 bp, Canis familiaris
tcattcgagggtgatgcccctttca

SEQ ID NO: 186314 - DNA, 25 bp, Canis familiaris
tcttagaagagagagccctccctca

SEQ ID NO: 186315 - DNA, 25 bp, Canis familiaris
tcttaacgagagaggctcccgctgg

SEQ ID NO: 186316 - DNA, 25 bp, Canis familiaris
tcttcacaggggcggagcccaggga

SEQ ID NO: 186317 - DNA, 25 bp, Canis familiaris
tcttcgagacggcaggggtcgggca

SEQ ID NO: 186318 - DNA, 25 bp, Canis familiaris
tcttctcaacggaagggcctcaacc

SEQ ID NO: 186319 - DNA, 25 bp, Canis familiaris
tctttcttcggtactgtcctaaccg

SEQ ID NO: 186320 - DNA, 25 bp, Canis familiaris
tctttccttgagaacacttttacca

SEQ ID NO: 186321 - DNA, 25 bp, Canis familiaris
tcttttctttggtcagcttttaaag

SEQ ID NO: 186322 - DNA, 25 bp, Canis familiaris
tttttcacatctcttaatttaaaat

SEQ ID NO: 186323 - DNA, 25 bp, Canis familiaris
tcttgttcctctcttccaaaaatca

SEQ ID NO: 186324 - DNA, 25 bp, Canis familiaris
tcttcttcctctctaagactactaa

SEQ ID NO: 186325 - DNA, 25 bp, Canis familiaris
tctttaccgtgaataaaccatttag

SEQ ID NO: 186326 - DNA, 25 bp, Canis familiaris
taattctccgggtatacttcttacg

SEQ ID NO: 186327 - DNA, 25 bp, Canis familiaris
tcatttttcggccacaactttttcg

SEQ ID NO: 186328 - DNA, 25 bp, Canis familiaris
tcttgtttacctatcactttttcga

SEQ ID NO: 186329 - DNA, 25 bp, Canis familiaris
tctttttccagattgctcacttttt

SEQ ID NO: 186330 - DNA, 25 bp, Canis familiaris
tctttttcagagatctcccttctct

SEQ ID NO: 186331 - DNA, 25 bp, Canis familiaris
tctagttcacagtgctctttttcct

SEQ ID NO: 186332 - DNA, 25 bp, Canis familiaris
tctagttccttggttttcagctcag

SEQ ID NO: 186333 - DNA, 25 bp, Canis familiaris
tctacttttctctttatgcacagat

SEQ ID NO: 186334 - DNA, 25 bp, Canis familiaris
tcttttgagccttttaccagctcca

SEQ ID NO: 186335 - DNA, 25 bp, Canis familiaris
tctttctgacttatttcacctggcc

SEQ ID NO: 186336 - DNA, 25 bp, Canis familiaris
tcttcccacttattttagcttgtgg

SEQ ID NO: 186337 - DNA, 25 bp, Canis familiaris
tctagcggactgttacttagttgcg

SEQ ID NO: 186338 - DNA, 25 bp, Canis familiaris
tctagggagtttgtttctgtctgac

SEQ ID NO: 186339 - DNA, 25 bp, Canis familiaris
tctagcagggccctttgctttttga

SEQ ID NO: 186340 - DNA, 25 bp, Canis familiaris
tctagcagtgaggctttccacctgt

SEQ ID NO: 186341 - DNA, 25 bp, Canis familiaris
tctatcaaactgcattccacatatt

SEQ ID NO: 186342 - DNA, 25 bp, Canis familiaris
tcttccaactgctttccaaatttaa

SEQ ID NO: 186343 - DNA, 25 bp, Canis familiaris
tcttgttcactttctctaacttaaa

SEQ ID NO: 186344 - DNA, 25 bp, Canis familiaris
tcttttccctcagtagtagctctaa

SEQ ID NO: 186345 - DNA, 25 bp, Canis familiaris
tctttacccatgttaccatgtctga

SEQ ID NO: 186346 - DNA, 25 bp, Canis familiaris
tctttgccaccttacatcttggctg

SEQ ID NO: 186347 - DNA, 25 bp, Canis familiaris
tctttgccccttttcaacaggctat

SEQ ID NO: 186348 - DNA, 25 bp, Canis familiaris
tcttatacggtcgcctacaggtgat

SEQ ID NO: 186349 - DNA, 25 bp, Canis familiaris
tcttctaagggtgtctcctgggatc

SEQ ID NO: 186350 - DNA, 25 bp, Canis familiaris
tctttagggtgtgttgtgcgtcgtg

SEQ ID NO: 186351 - DNA, 25 bp, Canis familiaris
tcttgtagtgacgctcggtcgtagt

SEQ ID NO: 186352 - DNA, 25 bp, Canis familiaris
tcttgtgggacgtctcgagtctgta

SEQ ID NO: 186353 - DNA, 25 bp, Canis familiaris
tctttgtgaagaatctcgaggtgta

SEQ ID NO: 186354 - DNA, 25 bp, Canis familiaris
tcttttgagtgtagttcacgctgaa

SEQ ID NO: 186355 - DNA, 25 bp, Canis familiaris
tctaatgtaggagtttcacgctcta

SEQ ID NO: 186356 - DNA, 25 bp, Canis familiaris
tcttatgcaagggatttaccccacc

SEQ ID NO: 186357 - DNA, 25 bp, Canis familiaris
tctattcaacagatttactatcgac

SEQ ID NO: 186358 - DNA, 25 bp, Canis familiaris
tctttgcaacatgcaacccttggcc

SEQ ID NO: 186359 - DNA, 25 bp, Canis familiaris
tcttaagccattcacctcttggcca

SEQ ID NO: 186360 - DNA, 25 bp, Canis familiaris
tcttgagtccttcacttaacctgaa

SEQ ID NO: 186361 - DNA, 25 bp, Canis familiaris
tcttggctgcgaaggttctcaaccg

SEQ ID NO: 186362 - DNA, 25 bp, Canis familiaris
tttggcagccagagcagttaacccc

SEQ ID NO: 186363 - DNA, 25 bp, Canis familiaris
tcttccccaaacttatgaacccaat

SEQ ID NO: 186364 - DNA, 25 bp, Canis familiaris
tctacctctagtattgtaactccaa

SEQ ID NO: 186365 - DNA, 25 bp, Canis familiaris
tctaccacttttatgtacatctgga

SEQ ID NO: 186366 - DNA, 25 bp, Canis familiaris
tctaccctctatattgttcaatagg

SEQ ID NO: 186367 - DNA, 25 bp, Canis familiaris
tctcacccctgatctctggaaagag

SEQ ID NO: 186368 - DNA, 25 bp, Canis familiaris
tctcacccctgatctctggaaagag

SEQ ID NO: 186369 - DNA, 25 bp, Canis familiaris
tcatacccctactgtacaaaagacc

SEQ ID NO: 186370 - DNA, 25 bp, Canis familiaris
tctatacccaactgtatcagtaaag

SEQ ID NO: 186371 - DNA, 25 bp, Canis familiaris
tctaactccaaatatatcgtctcta

SEQ ID NO: 186372 - DNA, 25 bp, Canis familiaris
tctacaccccaacatagggttcaga

SEQ ID NO: 186373 - DNA, 25 bp, Canis familiaris
tctaaccccaagtatagggggatat

SEQ ID NO: 186374 - DNA, 25 bp, Canis familiaris
tctatccccactttctagagggttt

SEQ ID NO: 186375 - DNA, 25 bp, Canis familiaris
tctactacctcctctaagttttggt

SEQ ID NO: 186376 - DNA, 25 bp, Canis familiaris
tctcactaccccttgtgttatagtt

SEQ ID NO: 186377 - DNA, 25 bp, Canis familiaris
tctagctcaacccaatggtaaattt

SEQ ID NO: 186378 - DNA, 25 bp, Canis familiaris
tctagcctacagcccagttgaaaga

SEQ ID NO: 186379 - DNA, 25 bp, Canis familiaris
tctagaccaatggccctggaacagc

SEQ ID NO: 186380 - DNA, 25 bp, Canis familiaris
tctaacatgccctctctggaaagca

SEQ ID NO: 186381 - DNA, 25 bp, Canis familiaris
tctagagctgccacctctaggacca

SEQ ID NO: 186382 - DNA, 25 bp, Canis familiaris
tctagttcccagtcctactgaacac

SEQ ID NO: 186383 - DNA, 25 bp, Canis familiaris
tcttcctgtgggtccgagctaacag

SEQ ID NO: 186384 - DNA, 25 bp, Canis familiaris
tcttttgttgtcccatgtctaactg

SEQ ID NO: 186385 - DNA, 25 bp, Canis familiaris
tctatctttttcaacgtctttttat

SEQ ID NO: 186386 - DNA, 25 bp, Canis familiaris
tcttagcttccgaacgtttctttat

SEQ ID NO: 186387 - DNA, 25 bp, Canis familiaris
tcttagttggtggagcgatttgtct

SEQ ID NO: 186388 - DNA, 25 bp, Canis familiaris
tctttgtcttctcgaggattttttt

SEQ ID NO: 186389 - DNA, 25 bp, Canis familiaris
taaggagtccatcgacggctttgtt

SEQ ID NO: 186390 - DNA, 25 bp, Canis familiaris
tcttggttccagcccagagtttggg

SEQ ID NO: 186391 - DNA, 25 bp, Canis familiaris
tcttagtttctgctcacgttgtgat

SEQ ID NO: 186392 - DNA, 25 bp, Canis familiaris
tctaactttctgtctccaatggaga

SEQ ID NO: 186393 - DNA, 25 bp, Canis familiaris
tctaactattcttgctctcatgctc

SEQ ID NO: 186394 - DNA, 25 bp, Canis familiaris
tcttacatctgtcactgccatgtga

SEQ ID NO: 186395 - DNA, 25 bp, Canis familiaris
tcttagctctatattgcctggattt

SEQ ID NO: 186396 - DNA, 25 bp, Canis familiaris
tctttctcttttgcgtaatcttact

SEQ ID NO: 186397 - DNA, 25 bp, Canis familiaris
tctttctgtttttggtacctttgtg

SEQ ID NO: 186398 - DNA, 25 bp, Canis familiaris
tcttttgtttttggtaactggtcag

SEQ ID NO: 186399 - DNA, 25 bp, Canis familiaris
tcttttgttacctgaaactggaact

SEQ ID NO: 186400 - DNA, 25 bp, Canis familiaris
tcttctttggcacccgacaaatggg

SEQ ID NO: 186401 - DNA, 25 bp, Canis familiaris
tcttccagtggttcttccaattggg

SEQ ID NO: 186402 - DNA, 25 bp, Canis familiaris
tcatcaccggtgatggaccaatctg

SEQ ID NO: 186403 - DNA, 25 bp, Canis familiaris
tcatcaacgggaagcccatcaccat

SEQ ID NO: 186404 - DNA, 25 bp, Canis familiaris
tctcaacctgtgagggtcccatcaa

SEQ ID NO: 186405 - DNA, 25 bp, Canis familiaris
tctacaacggcaagaccttcaacca

SEQ ID NO: 186406 - DNA, 25 bp, Canis familiaris
tctatcactacgtggccgtcaacaa

SEQ ID NO: 186407 - DNA, 25 bp, Canis familiaris
tctatcagtacgtcggcaatggaag

SEQ ID NO: 186408 - DNA, 25 bp, Canis familiaris
tctaagccacccgaatctggacagc

SEQ ID NO: 186409 - DNA, 25 bp, Canis familiaris
tcataaccaccaatatatctgcagt

SEQ ID NO: 186410 - DNA, 25 bp, Canis familiaris
tcttacgacctcaagatcatgactt

SEQ ID NO: 186411 - DNA, 25 bp, Canis familiaris
tcttagggcaccaatgaaatcttga

SEQ ID NO: 186412 - DNA, 25 bp, Canis familiaris
tctatagtgtcacctaaataggcta

SEQ ID NO: 186413 - DNA, 25 bp, Canis familiaris
tctatcgcaggagtgctgaaacagg

SEQ ID NO: 186414 - DNA, 25 bp, Canis familiaris
taattgcagagatggcattatagca

SEQ ID NO: 186415 - DNA, 25 bp, Canis familiaris
tctatgtgcaggagaaggatgatga

SEQ ID NO: 186416 - DNA, 25 bp, Canis familiaris
tcatttgatgctaaataggagatac

SEQ ID NO: 186417 - DNA, 25 bp, Canis familiaris
tctttcgttgaaaggtgataaaagt

SEQ ID NO: 186418 - DNA, 25 bp, Canis familiaris
tcagtttgttgggagcgtgaaagga

SEQ ID NO: 186419 - DNA, 25 bp, Canis familiaris
tctttgtgttgggagcagagaacca

SEQ ID NO: 186420 - DNA, 25 bp, Canis familiaris
tcttgtgggggccaaggaaacgtgc

SEQ ID NO: 186421 - DNA, 25 bp, Canis familiaris
tcttggggtcccaaagagaaggtcg

SEQ ID NO: 186422 - DNA, 25 bp, Canis familiaris
tcttggcccctcttaaaaagcggtg

SEQ ID NO: 186423 - DNA, 25 bp, Canis familiaris
tcttggcccttcctacacaaaaggt

SEQ ID NO: 186424 - DNA, 25 bp, Canis familiaris
tcttgggccttagacacaaatcagg

SEQ ID NO: 186425 - DNA, 25 bp, Canis familiaris
tctacggcctctcgggaatcgaaga

SEQ ID NO: 186426 - DNA, 25 bp, Canis familiaris
tctagcctagtccgcgggacggata

SEQ ID NO: 186427 - DNA, 25 bp, Canis familiaris
tctagctaggccgcgggacggataa

SEQ ID NO: 186428 - DNA, 25 bp, Canis familiaris
tctagcctagccgcgggacggataa

SEQ ID NO: 186429 - DNA, 25 bp, Canis familiaris
tctagcctagccgcgggacggataa

SEQ ID NO: 186430 - DNA, 25 bp, Canis familiaris
tctacgcccatcggagggacctgag

SEQ ID NO: 186431 - DNA, 25 bp, Canis familiaris
tctacaccctgacagggaccagcag

SEQ ID NO: 186432 - DNA, 25 bp, Canis familiaris
tctacctcctgctctgaagaacaga

SEQ ID NO: 186433 - DNA, 25 bp, Canis familiaris
tcttcccactgtgccaaaaacagat

SEQ ID NO: 186434 - DNA, 25 bp, Canis familiaris
tcttcatctacgaaccaaaccgcga

SEQ ID NO: 186435 - DNA, 25 bp, Canis familiaris
tcttttggcaaattcagggcctgga

SEQ ID NO: 186436 - DNA, 25 bp, Canis familiaris
tctttgggtgtttcaggtgcctggg

SEQ ID NO: 186437 - DNA, 25 bp, Canis familiaris
tcttgccggtctaacagggttggga

SEQ ID NO: 186438 - DNA, 25 bp, Canis familiaris
tcaatccggttaaccagttcctgtc

SEQ ID NO: 186439 - DNA, 25 bp, Canis familiaris
tcttccgtgttaaaactgttctctg

SEQ ID NO: 186440 - DNA, 25 bp, Canis familiaris
tcttaccctctaaaacatgtttctc

SEQ ID NO: 186441 - DNA, 25 bp, Canis familiaris
tcttgtcccggaaaatttaatcttg

SEQ ID NO: 186442 - DNA, 25 bp, Canis familiaris
tctttccctagtcaatctgctgaac

SEQ ID NO: 186443 - DNA, 25 bp, Canis familiaris
tctttgactccacaactcttgaaca

SEQ ID NO: 186444 - DNA, 25 bp, Canis familiaris
tcttcttctcaccgaacacggacaa

SEQ ID NO: 186445 - DNA, 25 bp, Canis familiaris
tctatccctcacagtaccaaacgat

SEQ ID NO: 186446 - DNA, 25 bp, Canis familiaris
tcttcccagccaaaaccagcaaggc

SEQ ID NO: 186447 - DNA, 25 bp, Canis familiaris
tctacacccccaagaccaagagggc

SEQ ID NO: 186448 - DNA, 25 bp, Canis familiaris
tctactaccgcctggccaaggagaa

SEQ ID NO: 186449 - DNA, 25 bp, Canis familiaris
tcataccaccacagggccgaaaagc

SEQ ID NO: 186450 - DNA, 25 bp, Canis familiaris
taacccgatctgtgcaatggaaata

SEQ ID NO: 186451 - DNA, 25 bp, Canis familiaris
tagaacaagttgtactataaaagca

SEQ ID NO: 186452 - DNA, 25 bp, Canis familiaris
taatccctgttatcctaaaggcctt

SEQ ID NO: 186453 - DNA, 25 bp, Canis familiaris
tttccgtttgtgtcactaaaaggtg

SEQ ID NO: 186454 - DNA, 25 bp, Canis familiaris
tcttccgcccgttactaaaatgtat

SEQ ID NO: 186455 - DNA, 25 bp, Canis familiaris
tcttccagggaccatcctaaaattt

SEQ ID NO: 186456 - DNA, 25 bp, Canis familiaris
tattccaggcttttaccctaattat

SEQ ID NO: 186457 - DNA, 25 bp, Canis familiaris
tcttagggtctaatagtccgattta

SEQ ID NO: 186458 - DNA, 25 bp, Canis familiaris
tcttctcgtttgataggccctttaa

SEQ ID NO: 186459 - DNA, 25 bp, Canis familiaris
tctttcttgtctgtaagccctttta

SEQ ID NO: 186460 - DNA, 25 bp, Canis familiaris
tcttttctgtatttaacctccttct

SEQ ID NO: 186461 - DNA, 25 bp, Canis familiaris
tcttttggtatgttaccctccttca

SEQ ID NO: 186462 - DNA, 25 bp, Canis familiaris
tctttctgagcattttaccactgca

SEQ ID NO: 186463 - DNA, 25 bp, Canis familiaris
tctttcagaagagtgtcacccccgt

SEQ ID NO: 186464 - DNA, 25 bp, Canis familiaris
tcttccagcaaaaggcaccacactt

SEQ ID NO: 186465 - DNA, 25 bp, Canis familiaris
tcttcaaaacattggacttccctga

SEQ ID NO: 186466 - DNA, 25 bp, Canis familiaris
tcttagtgacactggtctttactga

SEQ ID NO: 186467 - DNA, 25 bp, Canis familiaris
tttggtatacgtctctactttgata

SEQ ID NO: 186468 - DNA, 25 bp, Canis familiaris
tcttttaccagtccttacgttgaat

SEQ ID NO: 186469 - DNA, 25 bp, Canis familiaris
tcttggcaagggcccttaagggaat

SEQ ID NO: 186470 - DNA, 25 bp, Canis familiaris
tctttgctggttttcttggccacag

SEQ ID NO: 186471 - DNA, 25 bp, Canis familiaris
tctaggtgtgggctttgccaccagg

SEQ ID NO: 186472 - DNA, 25 bp, Canis familiaris
tctacctgtagcagttggtcctctg

SEQ ID NO: 186473 - DNA, 25 bp, Canis familiaris
tctacactttcccttggatttcact

SEQ ID NO: 186474 - DNA, 25 bp, Canis familiaris
taattctttccactaggtaatccta

SEQ ID NO: 186475 - DNA, 25 bp, Canis familiaris
taattgttgaccatagagaagtttc

SEQ ID NO: 186476 - DNA, 25 bp, Canis familiaris
taatatttcccacagaaagccctcg

SEQ ID NO: 186477 - DNA, 25 bp, Canis familiaris
taatcgataaccccgataacctcac

SEQ ID NO: 186478 - DNA, 25 bp, Canis familiaris
tcttcctaaccgtagcatgaacccc

SEQ ID NO: 186479 - DNA, 25 bp, Canis familiaris
tcattactactagaactgccccaca

SEQ ID NO: 186480 - DNA, 25 bp, Canis familiaris
tcttacaactacgaccgggaccaca

SEQ ID NO: 186481 - DNA, 25 bp, Canis familiaris
tcttcagaacttggccctgggagcc

SEQ ID NO: 186482 - DNA, 25 bp, Canis familiaris
tctatgaaatcgtcgcttcttgaag

SEQ ID NO: 186483 - DNA, 25 bp, Canis familiaris
tcttacagatggacctcttttgaga

SEQ ID NO: 186484 - DNA, 25 bp, Canis familiaris
tcttcacgatggcccttggcattta

SEQ ID NO: 186485 - DNA, 25 bp, Canis familiaris
tctatgcctatgaaacttcgctgtt

SEQ ID NO: 186486 - DNA, 25 bp, Canis familiaris
tctatgcctatgaaaactttgctgt

SEQ ID NO: 186487 - DNA, 25 bp, Canis familiaris
tctacatcaccatagccatttgctt

SEQ ID NO: 186488 - DNA, 25 bp, Canis familiaris
tctactgcagccggacacatatcga

SEQ ID NO: 186489 - DNA, 25 bp, Canis familiaris
tctttgccagctggactgcaggcga

SEQ ID NO: 186490 - DNA, 25 bp, Canis familiaris
tctttggggatgatgctgcgagcag

SEQ ID NO: 186491 - DNA, 25 bp, Canis familiaris
tctacgagggctatgctctccctca

SEQ ID NO: 186492 - DNA, 25 bp, Canis familiaris
tcttgctgggaaaagctctcctctc

SEQ ID NO: 186493 - DNA, 25 bp, Canis familiaris
tcttaaggaattcctgccactcctg

SEQ ID NO: 186494 - DNA, 25 bp, Canis familiaris
tctacaagatgtattctccctactg

SEQ ID NO: 186495 - DNA, 25 bp, Canis familiaris
tctacatcctgtttttcaagtcaag

SEQ ID NO: 186496 - DNA, 25 bp, Canis familiaris
tctactgactcctctataagccaat

SEQ ID NO: 186497 - DNA, 25 bp, Canis familiaris
tctatatttcccacatgagaccaat

SEQ ID NO: 186498 - DNA, 25 bp, Canis familiaris
tctatagtttcctcatatctccagg

SEQ ID NO: 186499 - DNA, 25 bp, Canis familiaris
tcatagactttcctccatagtacag

SEQ ID NO: 186500 - DNA, 25 bp, Canis familiaris
tctagaattaccttgcattgctgaa

SEQ ID NO: 186501 - DNA, 25 bp, Canis familiaris
tcttgtttcacatacttgctaatgt

SEQ ID NO: 186502 - DNA, 25 bp, Canis familiaris
tctttttgaagtagcttattctgat

SEQ ID NO: 186503 - DNA, 25 bp, Canis familiaris
tctatgctttgattttgtttactga

SEQ ID NO: 186504 - DNA, 25 bp, Canis familiaris
tctagccctgaccttatttgacaaa

SEQ ID NO: 186505 - DNA, 25 bp, Canis familiaris
tctagcacctccctggagactagca

SEQ ID NO: 186506 - DNA, 25 bp, Canis familiaris
tctacattctccaaggcagactata

SEQ ID NO: 186507 - DNA, 25 bp, Canis familiaris
tctacatgttccagtatgactccac

SEQ ID NO: 186508 - DNA, 25 bp, Canis familiaris
tctagctatttcatgcaataccaaa

SEQ ID NO: 186509 - DNA, 25 bp, Canis familiaris
tctagcttttgagtctcaactaaag

SEQ ID NO: 186510 - DNA, 25 bp, Canis familiaris
tctactgttctcgcccattgaaata

SEQ ID NO: 186511 - DNA, 25 bp, Canis familiaris
tctttgttccccacatggatgttag

SEQ ID NO: 186512 - DNA, 25 bp, Canis familiaris
tcttccctccccaaagaagttctgt

SEQ ID NO: 186513 - DNA, 25 bp, Canis familiaris
tcttcaactccttccagggattttt

SEQ ID NO: 186514 - DNA, 25 bp, Canis familiaris
tcttcaacccacacaacagattttg

SEQ ID NO: 186515 - DNA, 25 bp, Canis familiaris
tcttcaacctacccgtatgacttag

SEQ ID NO: 186516 - DNA, 25 bp, Canis familiaris
tcttaatcctcaaccgtaattccca

SEQ ID NO: 186517 - DNA, 25 bp, Canis familiaris
tctatacatactaaccaataacccc

SEQ ID NO: 186518 - DNA, 25 bp, Canis familiaris
tctaccaatccgtcagacaaacccc

SEQ ID NO: 186519 - DNA, 25 bp, Canis familiaris
tctactagttggatacagaacacac

SEQ ID NO: 186520 - DNA, 25 bp, Canis familiaris
tctactcttctggtataagaccacc

SEQ ID NO: 186521 - DNA, 25 bp, Canis familiaris
tctagcttctctgcattaaacacac

SEQ ID NO: 186522 - DNA, 25 bp, Canis familiaris
tctttgtataccaagaacccagaaa

SEQ ID NO: 186523 - DNA, 25 bp, Canis familiaris
tctttggctacagaacagctccagg

SEQ ID NO: 186524 - DNA, 25 bp, Canis familiaris
tcttctcgaaccccaagtgacaagc

SEQ ID NO: 186525 - DNA, 25 bp, Canis familiaris
tctatcccatagctgccaaggctaa

SEQ ID NO: 186526 - DNA, 25 bp, Canis familiaris
tctattcgatcgtgctcaagctgcc

SEQ ID NO: 186527 - DNA, 25 bp, Canis familiaris
tctattgtgttcaccaagctcacgc

SEQ ID NO: 186528 - DNA, 25 bp, Canis familiaris
tcttctgcattgtcacccaagtgac

SEQ ID NO: 186529 - DNA, 25 bp, Canis familiaris
tctttgctgttcaccacgatgtaat

SEQ ID NO: 186530 - DNA, 25 bp, Canis familiaris
tctactgtgttccttcatctttgaa

SEQ ID NO: 186531 - DNA, 25 bp, Canis familiaris
tctacatttcgccacaatcgttgat

SEQ ID NO: 186532 - DNA, 25 bp, Canis familiaris
tctacatttagcttctatccatggc

SEQ ID NO: 186533 - DNA, 25 bp, Canis familiaris
tctactattagcatcttctatggga

SEQ ID NO: 186534 - DNA, 25 bp, Canis familiaris
tctacatatataaattgtcttgctg

SEQ ID NO: 186535 - DNA, 25 bp, Canis familiaris
tctacatttgcaaagtgtttctcct

SEQ ID NO: 186536 - DNA, 25 bp, Canis familiaris
tctactgtactttgatctttttttc

SEQ ID NO: 186537 - DNA, 25 bp, Canis familiaris
tctactgtgacgttgactttctcta

SEQ ID NO: 186538 - DNA, 25 bp, Canis familiaris
tcttctatacccaactgtatcagta

SEQ ID NO: 186539 - DNA, 25 bp, Canis familiaris
tcttcacttcccacgtatatgtaac

SEQ ID NO: 186540 - DNA, 25 bp, Canis familiaris
taatagttcccctcctaggtatcta

SEQ ID NO: 186541 - DNA, 25 bp, Canis familiaris
taatagttgaaataccctgttttag

SEQ ID NO: 186542 - DNA, 25 bp, Canis familiaris
taatctttacgaagatcccgtccct

SEQ ID NO: 186543 - DNA, 25 bp, Canis familiaris
tcacttttattgagtcaccgatccc

SEQ ID NO: 186544 - DNA, 25 bp, Canis familiaris
tcttattttggtggatcctgcctcc

SEQ ID NO: 186545 - DNA, 25 bp, Canis familiaris
tctttttatactgtcgacttccacc

SEQ ID NO: 186546 - DNA, 25 bp, Canis familiaris
tctttttaatggctggcttttaccg

SEQ ID NO: 186547 - DNA, 25 bp, Canis familiaris
tctttctccaacctatggcttttga

SEQ ID NO: 186548 - DNA, 25 bp, Canis familiaris
tcttccccaaagtgatgttttacca

SEQ ID NO: 186549 - DNA, 25 bp, Canis familiaris
tcttccaacaagtgaacttttgaaa

SEQ ID NO: 186550 - DNA, 25 bp, Canis familiaris
tcttcccaccagtgaacttttgaaa

SEQ ID NO: 186551 - DNA, 25 bp, Canis familiaris
tcttcttcctactggactttcagtc

SEQ ID NO: 186552 - DNA, 25 bp, Canis familiaris
tctttccctagctggatcatcttca

SEQ ID NO: 186553 - DNA, 25 bp, Canis familiaris
tctacccagctatggtgatacttga

SEQ ID NO: 186554 - DNA, 25 bp, Canis familiaris
tctacctaccctgcagatactatag

SEQ ID NO: 186555 - DNA, 25 bp, Canis familiaris
tctaccatctgctctccagtaatag

SEQ ID NO: 186556 - DNA, 25 bp, Canis familiaris
tctaccattcatccggcttttagtt

SEQ ID NO: 186557 - DNA, 25 bp, Canis familiaris
tctaccttcagccatagcttagtca

SEQ ID NO: 186558 - DNA, 25 bp, Canis familiaris
tcttacctacctggattcagtctcc

SEQ ID NO: 186559 - DNA, 25 bp, Canis familiaris
tcttagtctgatgcccaatctgttc

SEQ ID NO: 186560 - DNA, 25 bp, Canis familiaris
tcttaccttgccacgattttctgtg

SEQ ID NO: 186561 - DNA, 25 bp, Canis familiaris
tcttcccttgtcaggcattttgtga

SEQ ID NO: 186562 - DNA, 25 bp, Canis familiaris
tcttatccctgaacgtgtctttggc

SEQ ID NO: 186563 - DNA, 25 bp, Canis familiaris
tcttacgtctacttggtccaatgtc

SEQ ID NO: 186564 - DNA, 25 bp, Canis familiaris
tcttacagtcgatggacttcctgat

SEQ ID NO: 186565 - DNA, 25 bp, Canis familiaris
tctatactgttatgctatgtgtcca

SEQ ID NO: 186566 - DNA, 25 bp, Canis familiaris
tcttattctctgtgtatgtgtacgc

SEQ ID NO: 186567 - DNA, 25 bp, Canis familiaris
tctataccctgcttgtttgcacagc

SEQ ID NO: 186568 - DNA, 25 bp, Canis familiaris
tcttactggcaggtagttgctcaca

SEQ ID NO: 186569 - DNA, 25 bp, Canis familiaris
tcataactggttttgactgctgcaa

SEQ ID NO: 186570 - DNA, 25 bp, Canis familiaris
tctacctagcgttctacagcagagg

SEQ ID NO: 186571 - DNA, 25 bp, Canis familiaris
tctatcactaccacgaagagctgtg

SEQ ID NO: 186572 - DNA, 25 bp, Canis familiaris
tctatcatccctgacaaagcctgat

SEQ ID NO: 186573 - DNA, 25 bp, Canis familiaris
tctttgtcctcctagagagcctgag

SEQ ID NO: 186574 - DNA, 25 bp, Canis familiaris
tcttctgtgtcttcaaactcctgat

SEQ ID NO: 186575 - DNA, 25 bp, Canis familiaris
tcttgcttggattgatgccgtccta

SEQ ID NO: 186576 - DNA, 25 bp, Canis familiaris
tctactatgtgatgtcggggccaac

SEQ ID NO: 186577 - DNA, 25 bp, Canis familiaris
tctacgtggtggcgcagagagcccc

SEQ ID NO: 186578 - DNA, 25 bp, Canis familiaris
tctagctgtggcccaggctggggcc

SEQ ID NO: 186579 - DNA, 25 bp, Canis familiaris
tctagcctgagcccggtgcaggaga

SEQ ID NO: 186580 - DNA, 25 bp, Canis familiaris
tctactctgagggctgcgtggagaa

SEQ ID NO: 186581 - DNA, 25 bp, Canis familiaris
tcttcccagagaggcccgacaagga

SEQ ID NO: 186582 - DNA, 25 bp, Canis familiaris
tcttcgccgagaacgagggcctgga

SEQ ID NO: 186583 - DNA, 25 bp, Canis familiaris
tctttgaccgggctgggcattgtga

SEQ ID NO: 186584 - DNA, 25 bp, Canis familiaris
tctttcaccgcggtggtgtcttgtt

SEQ ID NO: 186585 - DNA, 25 bp, Canis familiaris
tcttgtacatccggggctacttatt

SEQ ID NO: 186586 - DNA, 25 bp, Canis familiaris
tcttgttaagactgttatgtttcta

SEQ ID NO: 186587 - DNA, 25 bp, Canis familiaris
tcatattccaagttttctttttcag

SEQ ID NO: 186588 - DNA, 25 bp, Canis familiaris
tcttgctccaagttaacttttcaag

SEQ ID NO: 186589 - DNA, 25 bp, Canis familiaris
tcttcttccatgagacactttacca

SEQ ID NO: 186590 - DNA, 25 bp, Canis familiaris
tttcatttggaggataggtcaggtg

SEQ ID NO: 186591 - DNA, 25 bp, Canis familiaris
tcttcattgccatgccttggttaac

SEQ ID NO: 186592 - DNA, 25 bp, Canis familiaris
tcttcggccaagttctgtgttaatc

SEQ ID NO: 186593 - DNA, 25 bp, Canis familiaris
tctttcagctaatttattttactct

SEQ ID NO: 186594 - DNA, 25 bp, Canis familiaris
tctttcgcatttttttcttagctga

SEQ ID NO: 186595 - DNA, 25 bp, Canis familiaris
tcttttcatttttttttcagacatg

SEQ ID NO: 186596 - DNA, 25 bp, Canis familiaris
tctttttcctttagccttagcagtg

SEQ ID NO: 186597 - DNA, 25 bp, Canis familiaris
tcttggttcgctgttatttaatgat

SEQ ID NO: 186598 - DNA, 25 bp, Canis familiaris
tcttgtctatggagtgtaattaaac

SEQ ID NO: 186599 - DNA, 25 bp, Canis familiaris
tctttctgggggacttgattttcct

SEQ ID NO: 186600 - DNA, 25 bp, Canis familiaris
tctttcgtggggaattttttctctg

SEQ ID NO: 186601 - DNA, 25 bp, Canis familiaris
tctttttgggggaatcttttgcagg

SEQ ID NO: 186602 - DNA, 25 bp, Canis familiaris
tctatttctgggctttctgttctgc

SEQ ID NO: 186603 - DNA, 25 bp, Canis familiaris
tctatattgctggcttttccttgct

SEQ ID NO: 186604 - DNA, 25 bp, Canis familiaris
tctatgaatccttttgtgagcagtt

SEQ ID NO: 186605 - DNA, 25 bp, Canis familiaris
tctagatatttctttttcatggata

SEQ ID NO: 186606 - DNA, 25 bp, Canis familiaris
tctatgagaatttttgttccatgat

SEQ ID NO: 186607 - DNA, 25 bp, Canis familiaris
tctttgaaattacttcccatgccta

SEQ ID NO: 186608 - DNA, 25 bp, Canis familiaris
tctttaattacgtcccaatcttcag

SEQ ID NO: 186609 - DNA, 25 bp, Canis familiaris
tcttatcactggtgtggccgtgttc

SEQ ID NO: 186610 - DNA, 25 bp, Canis familiaris
tcttcacctctgttctggggtttga

SEQ ID NO: 186611 - DNA, 25 bp, Canis familiaris
tactcgctcttgttcggggttaagc

SEQ ID NO: 186612 - DNA, 25 bp, Canis familiaris
tcaccagtttccctaggtttaatct

SEQ ID NO: 186613 - DNA, 25 bp, Canis familiaris
tcttatgtttccccggtgatctaaa

SEQ ID NO: 186614 - DNA, 25 bp, Canis familiaris
tctttttcccaatgtgctgttaaat

SEQ ID NO: 186615 - DNA, 25 bp, Canis familiaris
tctttgttcttttagtcttcctaat

SEQ ID NO: 186616 - DNA, 25 bp, Canis familiaris
tctttggttttttgtctactctaag

SEQ ID NO: 186617 - DNA, 25 bp, Canis familiaris
tcttaggttgttttgtccaccagca

SEQ ID NO: 186618 - DNA, 25 bp, Canis familiaris
tcttgcggtcctattttagaagccc

SEQ ID NO: 186619 - DNA, 25 bp, Canis familiaris
tcttgggtctgctctcttgtaaagc

SEQ ID NO: 186620 - DNA, 25 bp, Canis familiaris
tctatgctagctcttctgcttggaa

SEQ ID NO: 186621 - DNA, 25 bp, Canis familiaris
tctatgctgcaggcttttttggctc

SEQ ID NO: 186622 - DNA, 25 bp, Canis familiaris
tcttctgaccttagtttggtgcatc

SEQ ID NO: 186623 - DNA, 25 bp, Canis familiaris
tcttttcctgctttttaggcctggg

SEQ ID NO: 186624 - DNA, 25 bp, Canis familiaris
tctttctcacgttttcttgggtggt

SEQ ID NO: 186625 - DNA, 25 bp, Canis familiaris
tcttctactctttttctctagggag

SEQ ID NO: 186626 - DNA, 25 bp, Canis familiaris
tcatccatcctcatagttctttaag

SEQ ID NO: 186627 - DNA, 25 bp, Canis familiaris
ttcccactatagatcctttaggggc

SEQ ID NO: 186628 - DNA, 25 bp, Canis familiaris
taccccttggtccctaatggaggag

SEQ ID NO: 186629 - DNA, 25 bp, Canis familiaris
tcaactgtattaccccgaatgtagg

SEQ ID NO: 186630 - DNA, 25 bp, Canis familiaris
tctagtgtatcatatggcccagtta

SEQ ID NO: 186631 - DNA, 25 bp, Canis familiaris
tctattaataaaagcatccatgagt

SEQ ID NO: 186632 - DNA, 25 bp, Canis familiaris
tctatttatacatctgcatccatga

SEQ ID NO: 186633 - DNA, 25 bp, Canis familiaris
tctattaacacacctgatcatttgt

SEQ ID NO: 186634 - DNA, 25 bp, Canis familiaris
tctttgaacactccaggtttctcca

SEQ ID NO: 186635 - DNA, 25 bp, Canis familiaris
tctttcaatcatactcagtttccgc

SEQ ID NO: 186636 - DNA, 25 bp, Canis familiaris
tctttcgtcatgcacagatgtcatc

SEQ ID NO: 186637 - DNA, 25 bp, Canis familiaris
tctttgttctggactaatatcgtgt

SEQ ID NO: 186638 - DNA, 25 bp, Canis familiaris
tcttttcttgatatggaatcttgct

SEQ ID NO: 186639 - DNA, 25 bp, Canis familiaris
tcttactgatttacggactcctgtc

SEQ ID NO: 186640 - DNA, 25 bp, Canis familiaris
tctatactatatatcagagatcata

SEQ ID NO: 186641 - DNA, 25 bp, Canis familiaris
tctacctctaagtctgagtccagtc

SEQ ID NO: 186642 - DNA, 25 bp, Canis familiaris
tctaggcctcaaccaggtctggtga

SEQ ID NO: 186643 - DNA, 25 bp, Canis familiaris
tctagatgcacaacagccaggtccc

SEQ ID NO: 186644 - DNA, 25 bp, Canis familiaris
tctattgtccaaccatttcagcacc

SEQ ID NO: 186645 - DNA, 25 bp, Canis familiaris
tctttgttacaaatttccgcatggg

SEQ ID NO: 186646 - DNA, 25 bp, Canis familiaris
tctatgtttacataccccagtcagg

SEQ ID NO: 186647 - DNA, 25 bp, Canis familiaris
tctagtttaattttcaccctgacct

SEQ ID NO: 186648 - DNA, 25 bp, Canis familiaris
tctagtgttttttatcaccgcccga

SEQ ID NO: 186649 - DNA, 25 bp, Canis familiaris
tctttctttttatacacatgcacac

SEQ ID NO: 186650 - DNA, 25 bp, Canis familiaris
tcttgtgccttgtgaattccatacc

SEQ ID NO: 186651 - DNA, 25 bp, Canis familiaris
tctagtgacttgtgattcttatgag

SEQ ID NO: 186652 - DNA, 25 bp, Canis familiaris
tctattactttggatctcgatgatg

SEQ ID NO: 186653 - DNA, 25 bp, Canis familiaris
tctttcactatcacatctccaagca

SEQ ID NO: 186654 - DNA, 25 bp, Canis familiaris
tctttctctcattgtgattccacca

SEQ ID NO: 186655 - DNA, 25 bp, Canis familiaris
tctttgatccttcatgatccaccca

SEQ ID NO: 186656 - DNA, 25 bp, Canis familiaris
tcttagtcagctctttcaacaaata

SEQ ID NO: 186657 - DNA, 25 bp, Canis familiaris
tcttcagtctggccaaggaacaaat

SEQ ID NO: 186658 - DNA, 25 bp, Canis familiaris
tcttccactgagcccaagcaaaatt

SEQ ID NO: 186659 - DNA, 25 bp, Canis familiaris
tcttccacagcccctagaagtcatt

SEQ ID NO: 186660 - DNA, 25 bp, Canis familiaris
tcttcacacagctcctgcagaatgg

SEQ ID NO: 186661 - DNA, 25 bp, Canis familiaris
tcattctacaatgctctgatacatg

SEQ ID NO: 186662 - DNA, 25 bp, Canis familiaris
tcttcaacactttggctcaatgcct

SEQ ID NO: 186663 - DNA, 25 bp, Canis familiaris
tcttaatacatcttcagccaacctc

SEQ ID NO: 186664 - DNA, 25 bp, Canis familiaris
tctttgtccctaagccaacatgctg

SEQ ID NO: 186665 - DNA, 25 bp, Canis familiaris
tctttgtacctaacaccaactgata

SEQ ID NO: 186666 - DNA, 25 bp, Canis familiaris
tcttcctacctatctccaaataaat

SEQ ID NO: 186667 - DNA, 25 bp, Canis familiaris
tcttccgacctattactcgaaccag

SEQ ID NO: 186668 - DNA, 25 bp, Canis familiaris
tcttaccttttttctctgagaccag

SEQ ID NO: 186669 - DNA, 25 bp, Canis familiaris
tcttactcctttccctgggataagc

SEQ ID NO: 186670 - DNA, 25 bp, Canis familiaris
tctatgccattcgtacccaggagta

SEQ ID NO: 186671 - DNA, 25 bp, Canis familiaris
tctagccactcacagctctttttaa

SEQ ID NO: 186672 - DNA, 25 bp, Canis familiaris
tctatgccaacacagtgttgtctgg

SEQ ID NO: 186673 - DNA, 25 bp, Canis familiaris
tctatgccacactaaatgttctcat

SEQ ID NO: 186674 - DNA, 25 bp, Canis familiaris
tctaggacaccaggattctctcaga

SEQ ID NO: 186675 - DNA, 25 bp, Canis familiaris
tctaggccaaaggctcctcttgtca

SEQ ID NO: 186676 - DNA, 25 bp, Canis familiaris
tctaggcctattactagctccagct

SEQ ID NO: 186677 - DNA, 25 bp, Canis familiaris
tctatgttctttgctatgttctttg

SEQ ID NO: 186678 - DNA, 25 bp, Canis familiaris
tctagctttctttatgatgtttctg

SEQ ID NO: 186679 - DNA, 25 bp, Canis familiaris
tctatcttgttttatatgtatgtta

SEQ ID NO: 186680 - DNA, 25 bp, Canis familiaris
tctttctgtcttcaattttctacta

SEQ ID NO: 186681 - DNA, 25 bp, Canis familiaris
tcttacttttgtagttttatattat

SEQ ID NO: 186682 - DNA, 25 bp, Canis familiaris
tcttactttcatctcctttaatttg

SEQ ID NO: 186683 - DNA, 25 bp, Canis familiaris
ttagccttatcatacctttgggtct

SEQ ID NO: 186684 - DNA, 25 bp, Canis familiaris
tctattattatatgcaactttgggt

SEQ ID NO: 186685 - DNA, 25 bp, Canis familiaris
tcttcgatggactgcaagccattgg

SEQ ID NO: 186686 - DNA, 25 bp, Canis familiaris
tcttcagatcttttacaacattggg

SEQ ID NO: 186687 - DNA, 25 bp, Canis familiaris
tcttagagcttcgccaaaaatggaa

SEQ ID NO: 186688 - DNA, 25 bp, Canis familiaris
tcattcggtgtctccacaaactgga

SEQ ID NO: 186689 - DNA, 25 bp, Canis familiaris
tcttcgacagtgcacaaaaacgcca

SEQ ID NO: 186690 - DNA, 25 bp, Canis familiaris
tcatccgaaagcccaagaaacccaa

SEQ ID NO: 186691 - DNA, 25 bp, Canis familiaris
tcatcctgaaagcacacacgggcct

SEQ ID NO: 186692 - DNA, 25 bp, Canis familiaris
tcattggccaaggcaaccaaccctg

SEQ ID NO: 186693 - DNA, 25 bp, Canis familiaris
tcatcgtgccgggcccaataagggg

SEQ ID NO: 186694 - DNA, 25 bp, Canis familiaris
tctagatgtgagccccaccttagga

SEQ ID NO: 186695 - DNA, 25 bp, Canis familiaris
tctagattgatgcccacagcactgt

SEQ ID NO: 186696 - DNA, 25 bp, Canis familiaris
tctatgcgtgcaggtcacgatcggt

SEQ ID NO: 186697 - DNA, 25 bp, Canis familiaris
tcttgactaggttcagatggcatct

SEQ ID NO: 186698 - DNA, 25 bp, Canis familiaris
tcttgattggattcatgagtggcta

SEQ ID NO: 186699 - DNA, 25 bp, Canis familiaris
tcttattgtcattgtcattgcctag

SEQ ID NO: 186700 - DNA, 25 bp, Canis familiaris
tctttatgtatattctatctatgga

SEQ ID NO: 186701 - DNA, 25 bp, Canis familiaris
tcttcttggatgcttgttaggactt

SEQ ID NO: 186702 - DNA, 25 bp, Canis familiaris
tcactggtggcgtggttgtggactt

SEQ ID NO: 186703 - DNA, 25 bp, Canis familiaris
tgttttaatctaagcatttccccct

SEQ ID NO: 186704 - DNA, 25 bp, Canis familiaris
tcttataaccgtgcttctttcatgt

SEQ ID NO: 186705 - DNA, 25 bp, Canis familiaris
tcttcaccccttgctgtttatagtg

SEQ ID NO: 186706 - DNA, 25 bp, Canis familiaris
tcttgccccctttttttaaatgatg

SEQ ID NO: 186707 - DNA, 25 bp, Canis familiaris
tctttctcccttttttattgacttg

SEQ ID NO: 186708 - DNA, 25 bp, Canis familiaris
tcttttcccctttttgttgcaggag

SEQ ID NO: 186709 - DNA, 25 bp, Canis familiaris
tcttttgtgcccttttggggtggag

SEQ ID NO: 186710 - DNA, 25 bp, Canis familiaris
tctttttccattcatctgtgggtgg

SEQ ID NO: 186711 - DNA, 25 bp, Canis familiaris
tcttttctcttgtaattgggtttgc

SEQ ID NO: 186712 - DNA, 25 bp, Canis familiaris
tctattttctttattcctgtttgcc

SEQ ID NO: 186713 - DNA, 25 bp, Canis familiaris
tctattttctctgttttctgtttct

SEQ ID NO: 186714 - DNA, 25 bp, Canis familiaris
tctattttctctgttttctgtttct

SEQ ID NO: 186715 - DNA, 25 bp, Canis familiaris
tctattttctctgttttctgtttct

SEQ ID NO: 186716 - DNA, 25 bp, Canis familiaris
tctattttctctgttttctgtttct

SEQ ID NO: 186717 - DNA, 25 bp, Canis familiaris
tctattatttatttgcatttttccc

SEQ ID NO: 186718 - DNA, 25 bp, Canis familiaris
tctttcaaacatttcagttttccgg

SEQ ID NO: 186719 - DNA, 25 bp, Canis familiaris
tcttccaaacttgtgttcttgcctg

SEQ ID NO: 186720 - DNA, 25 bp, Canis familiaris
tcttcgaaacacgcttcttcggctt

SEQ ID NO: 186721 - DNA, 25 bp, Canis familiaris
tcagggaaccaagcaccttcccttg

SEQ ID NO: 186722 - DNA, 25 bp, Canis familiaris
tagccgacagggtgacttaccctgg

SEQ ID NO: 186723 - DNA, 25 bp, Canis familiaris
tagccgccagggtgacttccctggt

SEQ ID NO: 186724 - DNA, 25 bp, Canis familiaris
tcagtcggggggaacttcctctgag

SEQ ID NO: 186725 - DNA, 25 bp, Canis familiaris
tcttcccggacaaacatttactgag

SEQ ID NO: 186726 - DNA, 25 bp, Canis familiaris
tcttccctggaataatcttgacgat

SEQ ID NO: 186727 - DNA, 25 bp, Canis familiaris
tcttcccaagtatggattgctccca

SEQ ID NO: 186728 - DNA, 25 bp, Canis familiaris
tctttcgaaatatctcttctccaga

SEQ ID NO: 186729 - DNA, 25 bp, Canis familiaris
tctttgcaggcaaaatctcttccct

SEQ ID NO: 186730 - DNA, 25 bp, Canis familiaris
tctttcaggcaacttgtcctccaga

SEQ ID NO: 186731 - DNA, 25 bp, Canis familiaris
tcttacgtgcgcctttctgccggac

SEQ ID NO: 186732 - DNA, 25 bp, Canis familiaris
tctatgggctcacctttggccagaa

SEQ ID NO: 186733 - DNA, 25 bp, Canis familiaris
tctatgggatcgcttgtgaccacgg

SEQ ID NO: 186734 - DNA, 25 bp, Canis familiaris
tcttgaagtcctcattaaacagagg

SEQ ID NO: 186735 - DNA, 25 bp, Canis familiaris
tcttgaagccctcatttagacagag

SEQ ID NO: 186736 - DNA, 25 bp, Canis familiaris
tcttaaagcactcttataatatggc

SEQ ID NO: 186737 - DNA, 25 bp, Canis familiaris
tcataaaaagcacttttaattacgg

SEQ ID NO: 186738 - DNA, 25 bp, Canis familiaris
tcttagaagaccttcttatttccgg

SEQ ID NO: 186739 - DNA, 25 bp, Canis familiaris
tcatttaagcccttttagtgaccgt

SEQ ID NO: 186740 - DNA, 25 bp, Canis familiaris
tcattacaagctttagttgggcacc

SEQ ID NO: 186741 - DNA, 25 bp, Canis familiaris
tcttctccagtatcacgtggaacac

SEQ ID NO: 186742 - DNA, 25 bp, Canis familiaris
tcttcttcagtcacatcctgggatc

SEQ ID NO: 186743 - DNA, 25 bp, Canis familiaris
tcttttcagtaaactctaggaggtg

SEQ ID NO: 186744 - DNA, 25 bp, Canis familiaris
tcttttagaatacctgtaactagtt

SEQ ID NO: 186745 - DNA, 25 bp, Canis familiaris
tctttttgactgttcttcaacttta

SEQ ID NO: 186746 - DNA, 25 bp, Canis familiaris
tcttgtaaactgtatctaagtccta

SEQ ID NO: 186747 - DNA, 25 bp, Canis familiaris
tcttgtggaatggtactaatttgga

SEQ ID NO: 186748 - DNA, 25 bp, Canis familiaris
tctttgtctgtggaactgactctac

SEQ ID NO: 186749 - DNA, 25 bp, Canis familiaris
tctttctcgatcctattgtctcgta

SEQ ID NO: 186750 - DNA, 25 bp, Canis familiaris
tcttttcaattctagcttctctgca

SEQ ID NO: 186751 - DNA, 25 bp, Canis familiaris
tcttcaccatttttgctttcatcaa

SEQ ID NO: 186752 - DNA, 25 bp, Canis familiaris
tcttaccctgccactgttatcagac

SEQ ID NO: 186753 - DNA, 25 bp, Canis familiaris
tcttcttttgctccagtgttacagg

SEQ ID NO: 186754 - DNA, 25 bp, Canis familiaris
tcttccgtggcgaatctgttactgg

SEQ ID NO: 186755 - DNA, 25 bp, Canis familiaris
tcttcctttgcgagcttgccaaggg

SEQ ID NO: 186756 - DNA, 25 bp, Canis familiaris
tcttcctcccctcgggaagagggtg

SEQ ID NO: 186757 - DNA, 25 bp, Canis familiaris
tcttcttccccaacaggttgcagtg

SEQ ID NO: 186758 - DNA, 25 bp, Canis familiaris
tctatcccaaccacagcctgggagg

SEQ ID NO: 186759 - DNA, 25 bp, Canis familiaris
tcttcccaccacagaagctgagaaa

SEQ ID NO: 186760 - DNA, 25 bp, Canis familiaris
tcttccacatccagcctttgaaaac

SEQ ID NO: 186761 - DNA, 25 bp, Canis familiaris
tcttccctatttcttgttaaccaag

SEQ ID NO: 186762 - DNA, 25 bp, Canis familiaris
tcttcccctttcatggttaaagaca

SEQ ID NO: 186763 - DNA, 25 bp, Canis familiaris
tcttcccatttccttgtcgtgaaaa

SEQ ID NO: 186764 - DNA, 25 bp, Canis familiaris
tcatatttctttcctttctgtgaaa

SEQ ID NO: 186765 - DNA, 25 bp, Canis familiaris
tcttcagttcctcctggtcatataa

SEQ ID NO: 186766 - DNA, 25 bp, Canis familiaris
tcttcatgggccctcggttgaaatg

SEQ ID NO: 186767 - DNA, 25 bp, Canis familiaris
tcttcagaggctgccaggggccata

SEQ ID NO: 186768 - DNA, 25 bp, Canis familiaris
tcttaagggcaccaagtctgctcaa

SEQ ID NO: 186769 - DNA, 25 bp, Canis familiaris
tcttggaaggaccaagacatgccta

SEQ ID NO: 186770 - DNA, 25 bp, Canis familiaris
tctttgactggcctgaagcgcccaa

SEQ ID NO: 186771 - DNA, 25 bp, Canis familiaris
tctattgaggagcctgcgggccagc

SEQ ID NO: 186772 - DNA, 25 bp, Canis familiaris
tcttggaagagccacaggtgccacc

SEQ ID NO: 186773 - DNA, 25 bp, Canis familiaris
tcttacacaagctacagcctcaata

SEQ ID NO: 186774 - DNA, 25 bp, Canis familiaris
tcttcaccctgagcagctcatcaca

SEQ ID NO: 186775 - DNA, 25 bp, Canis familiaris
tctttccaatgaacctgcatacaat

SEQ ID NO: 186776 - DNA, 25 bp, Canis familiaris
tctttcacattaaaagaaacacctg

SEQ ID NO: 186777 - DNA, 25 bp, Canis familiaris
tcttgtgccttgtcaaagaaagact

SEQ ID NO: 186778 - DNA, 25 bp, Canis familiaris
tcattcagtttctatatagccaaac

SEQ ID NO: 186779 - DNA, 25 bp, Canis familiaris
tctatgcaatctacaagtgacacaa

SEQ ID NO: 186780 - DNA, 25 bp, Canis familiaris
tctatgcgtccccattgcagagaag

SEQ ID NO: 186781 - DNA, 25 bp, Canis familiaris
tcttgccttccctgatagatcacag

SEQ ID NO: 186782 - DNA, 25 bp, Canis familiaris
tctttgcttcgctgaatatatacag

SEQ ID NO: 186783 - DNA, 25 bp, Canis familiaris
tcttgtgttcagttgatatgataac

SEQ ID NO: 186784 - DNA, 25 bp, Canis familiaris
tctatgtgtcatcgtatcttgccca

SEQ ID NO: 186785 - DNA, 25 bp, Canis familiaris
tctatgttctgttcacaatctctcc

SEQ ID NO: 186786 - DNA, 25 bp, Canis familiaris
tctatgcctttttgaactcttgtaa

SEQ ID NO: 186787 - DNA, 25 bp, Canis familiaris
tctatcccctcttggactttaaact

SEQ ID NO: 186788 - DNA, 25 bp, Canis familiaris
tctataccttttagagctttccaac

SEQ ID NO: 186789 - DNA, 25 bp, Canis familiaris
tctatcccttttaacatgacaccta

SEQ ID NO: 186790 - DNA, 25 bp, Canis familiaris
tcttccttctttaagcagacccaca

SEQ ID NO: 186791 - DNA, 25 bp, Canis familiaris
tctatcgtttttccagagatcctag

SEQ ID NO: 186792 - DNA, 25 bp, Canis familiaris
tcttcgtgttctgcctatggcgtag

SEQ ID NO: 186793 - DNA, 25 bp, Canis familiaris
tcttctggtatgaaccatttagttt

SEQ ID NO: 186794 - DNA, 25 bp, Canis familiaris
tcttctggttggcccatctttgata

SEQ ID NO: 186795 - DNA, 25 bp, Canis familiaris
tctttgggctggtgcatcttcatat

SEQ ID NO: 186796 - DNA, 25 bp, Canis familiaris
tctttgtgctgtcttctcttatata

SEQ ID NO: 186797 - DNA, 25 bp, Canis familiaris
tctttatctgggttctcttcattcc

SEQ ID NO: 186798 - DNA, 25 bp, Canis familiaris
tctatgtgtctgtgttcatctgtat

SEQ ID NO: 186799 - DNA, 25 bp, Canis familiaris
tcttttctgttcatgtgctgttgca

SEQ ID NO: 186800 - DNA, 25 bp, Canis familiaris
tctttctagctctatgttcatgatt

SEQ ID NO: 186801 - DNA, 25 bp, Canis familiaris
tctttccatcgttgctgactaatct

SEQ ID NO: 186802 - DNA, 25 bp, Canis familiaris
tcataatcccacagatggtaagctt

SEQ ID NO: 186803 - DNA, 25 bp, Canis familiaris
tcttgtgcccctggggtcagagcag

SEQ ID NO: 186804 - DNA, 25 bp, Canis familiaris
tcttagcccagtgcctgctaggaag

SEQ ID NO: 186805 - DNA, 25 bp, Canis familiaris
tctttcccagtcccgtgaaattgtt

SEQ ID NO: 186806 - DNA, 25 bp, Canis familiaris
tctttccctttggcagctgcaatac

SEQ ID NO: 186807 - DNA, 25 bp, Canis familiaris
tcttttcgcttcatcccaatagtga

SEQ ID NO: 186808 - DNA, 25 bp, Canis familiaris
tctttctggcttagatcctacttga

SEQ ID NO: 186809 - DNA, 25 bp, Canis familiaris
tctttctctctaatgacctatttca

SEQ ID NO: 186810 - DNA, 25 bp, Canis familiaris
tcttatccttctacttcaatttcgt

SEQ ID NO: 186811 - DNA, 25 bp, Canis familiaris
tctttctattctattgtatttcatc

SEQ ID NO: 186812 - DNA, 25 bp, Canis familiaris
tcttccttatctatttatccaccaa

SEQ ID NO: 186813 - DNA, 25 bp, Canis familiaris
tcttgccttatctttttttattact

SEQ ID NO: 186814 - DNA, 25 bp, Canis familiaris
tcttggctacaattgttaccttttt

SEQ ID NO: 186815 - DNA, 25 bp, Canis familiaris
tcttttaacattccgatttctttat

SEQ ID NO: 186816 - DNA, 25 bp, Canis familiaris
tctttctcaccactctggattacta

SEQ ID NO: 186817 - DNA, 25 bp, Canis familiaris
tctattatcaccacttattgccatg

SEQ ID NO: 186818 - DNA, 25 bp, Canis familiaris
tctttgtcgacaacgtgcagtgcca

SEQ ID NO: 186819 - DNA, 25 bp, Canis familiaris
tctttgtcaacaacgtcattccacc

SEQ ID NO: 186820 - DNA, 25 bp, Canis familiaris
tcttggtaccagtgtgttgcctcaa

SEQ ID NO: 186821 - DNA, 25 bp, Canis familiaris
tcttggtataactgtgtacccagca

SEQ ID NO: 186822 - DNA, 25 bp, Canis familiaris
tcatttgttttgtttaacccacatt

SEQ ID NO: 186823 - DNA, 25 bp, Canis familiaris
tcttttgtgttccatcgaacccact

SEQ ID NO: 186824 - DNA, 25 bp, Canis familiaris
tcttttgttcatgtggaatgcagat

SEQ ID NO: 186825 - DNA, 25 bp, Canis familiaris
tcttttccttgactcaaatgagaat

SEQ ID NO: 186826 - DNA, 25 bp, Canis familiaris
tctttctgccttatcatctgcacag

SEQ ID NO: 186827 - DNA, 25 bp, Canis familiaris
tctttatcagctacactctctacag

SEQ ID NO: 186828 - DNA, 25 bp, Canis familiaris
tcagtggatcagcactccggaagac

SEQ ID NO: 186829 - DNA, 25 bp, Canis familiaris
tcagatgccttacgtcaaggaatga

SEQ ID NO: 186830 - DNA, 25 bp, Canis familiaris
tcttgccctggagcaaggatatcaa

SEQ ID NO: 186831 - DNA, 25 bp, Canis familiaris
tcttccctgaacctgagggaaacca

SEQ ID NO: 186832 - DNA, 25 bp, Canis familiaris
tcttccctggacctgagtgaaaccc

SEQ ID NO: 186833 - DNA, 25 bp, Canis familiaris
tcttcccttctcttggaaaacacat

SEQ ID NO: 186834 - DNA, 25 bp, Canis familiaris
tcttcccctctcttggacaggagag

SEQ ID NO: 186835 - DNA, 25 bp, Canis familiaris
tcttcccattcctgatctgcagggg

SEQ ID NO: 186836 - DNA, 25 bp, Canis familiaris
tcttggacccctgtctgaggggccg

SEQ ID NO: 186837 - DNA, 25 bp, Canis familiaris
tcagtgaaccgggctttcaggtggc

SEQ ID NO: 186838 - DNA, 25 bp, Canis familiaris
tcaggaaatgcgaccttttccggcc

SEQ ID NO: 186839 - DNA, 25 bp, Canis familiaris
tcaggaaataggggagattcaagtc

SEQ ID NO: 186840 - DNA, 25 bp, Canis familiaris
tcattggttcagagggaggcgagtc

SEQ ID NO: 186841 - DNA, 25 bp, Canis familiaris
tcattggccctaaggtgaccgggga

SEQ ID NO: 186842 - DNA, 25 bp, Canis familiaris
tcattgggcctccgggtccggaggg

SEQ ID NO: 186843 - DNA, 25 bp, Canis familiaris
tcatcagggcccaagtttcgtgggg

SEQ ID NO: 186844 - DNA, 25 bp, Canis familiaris
tactgggcccagtttcatggtgtga

SEQ ID NO: 186845 - DNA, 25 bp, Canis familiaris
tacgggaaacttagctgcaatgtga

SEQ ID NO: 186846 - DNA, 25 bp, Canis familiaris
tcaccagaccattccgcttcaaggc

SEQ ID NO: 186847 - DNA, 25 bp, Canis familiaris
tactaatactttctctcaatttttc

SEQ ID NO: 186848 - DNA, 25 bp, Canis familiaris
tcttattactttctccttgtctaat

SEQ ID NO: 186849 - DNA, 25 bp, Canis familiaris
tctttttttattcccctgtgatgaa

SEQ ID NO: 186850 - DNA, 25 bp, Canis familiaris
tctatttatttattgtcttcctgta

SEQ ID NO: 186851 - DNA, 25 bp, Canis familiaris
tcttcgattctgtatagttctttgt

SEQ ID NO: 186852 - DNA, 25 bp, Canis familiaris
tcttgcggtttgaacttgcttggcc

SEQ ID NO: 186853 - DNA, 25 bp, Canis familiaris
tctttgtgatttaagcagtggctgg

SEQ ID NO: 186854 - DNA, 25 bp, Canis familiaris
tcttctgcaatatctgggcggcggt

SEQ ID NO: 186855 - DNA, 25 bp, Canis familiaris
tcatttagaaatcggaggtgtggat

SEQ ID NO: 186856 - DNA, 25 bp, Canis familiaris
tctttgaaatatggtgtgtgtgtgt

SEQ ID NO: 186857 - DNA, 25 bp, Canis familiaris
tctttgaggttttatgtgtgtgtgt

SEQ ID NO: 186858 - DNA, 25 bp, Canis familiaris
tcatcttggagtttccttggttgca

SEQ ID NO: 186859 - DNA, 25 bp, Canis familiaris
tcttttatgatttccttgggagctc

SEQ ID NO: 186860 - DNA, 25 bp, Canis familiaris
tcttgtatgagtttccttgggagct

SEQ ID NO: 186861 - DNA, 25 bp, Canis familiaris
tcttgactgccctttgcttgggaat

SEQ ID NO: 186862 - DNA, 25 bp, Canis familiaris
tcttgttgtcccttctgttggaatg

SEQ ID NO: 186863 - DNA, 25 bp, Canis familiaris
tcttttgctcccactggtcaattat

SEQ ID NO: 186864 - DNA, 25 bp, Canis familiaris
tcttttgccgccaccaaagttgata

SEQ ID NO: 186865 - DNA, 25 bp, Canis familiaris
tctttatcccaaaccaatgaaataa

SEQ ID NO: 186866 - DNA, 25 bp, Canis familiaris
tcttcgtatcaatcccatagcaaat

SEQ ID NO: 186867 - DNA, 25 bp, Canis familiaris
tcttttcatctgtccccattggaag

SEQ ID NO: 186868 - DNA, 25 bp, Canis familiaris
tcttggctttgacacctgtggacag

SEQ ID NO: 186869 - DNA, 25 bp, Canis familiaris
tcttgagccggctccaggtgtgaga

SEQ ID NO: 186870 - DNA, 25 bp, Canis familiaris
tctttccgtgcttccacgtggagaa

SEQ ID NO: 186871 - DNA, 25 bp, Canis familiaris
tcatttccggtctccaagagaaaaa

SEQ ID NO: 186872 - DNA, 25 bp, Canis familiaris
tcatttcctggtatgacaatgaata

SEQ ID NO: 186873 - DNA, 25 bp, Canis familiaris
tcatttcctggtatgacaacgaatt

SEQ ID NO: 186874 - DNA, 25 bp, Canis familiaris
tcatttcctggtatgacaacgaatt

SEQ ID NO: 186875 - DNA, 25 bp, Canis familiaris
tcatattctctgttaaaaaccaaac

SEQ ID NO: 186876 - DNA, 25 bp, Canis familiaris
tcacttctttggggaatctaaaaca

SEQ ID NO: 186877 - DNA, 25 bp, Canis familiaris
tcacttggttgggggtgaccaaaag

SEQ ID NO: 186878 - DNA, 25 bp, Canis familiaris
tcacaactttggcgggggaactggg

SEQ ID NO: 186879 - DNA, 25 bp, Canis familiaris
tcatctttgtggtgggagggcccgg

SEQ ID NO: 186880 - DNA, 25 bp, Canis familiaris
tatttgtgtggagtgcggcaaaggt

SEQ ID NO: 186881 - DNA, 25 bp, Canis familiaris
tctttctggacccgcacaacaggtc

SEQ ID NO: 186882 - DNA, 25 bp, Canis familiaris
tcttttggacgctagacccagacct

SEQ ID NO: 186883 - DNA, 25 bp, Canis familiaris
tcttcgtggacctgagccacggcgg

SEQ ID NO: 186884 - DNA, 25 bp, Canis familiaris
tctttctgtgcagcatgctggctcc

SEQ ID NO: 186885 - DNA, 25 bp, Canis familiaris
tctttgtgaggctattgctctccct

SEQ ID NO: 186886 - DNA, 25 bp, Canis familiaris
tctttggtgctgtgtttccctatga

SEQ ID NO: 186887 - DNA, 25 bp, Canis familiaris
tcttattttttgatttcactataac

SEQ ID NO: 186888 - DNA, 25 bp, Canis familiaris
tctttttggcctgtattcctcaagc

SEQ ID NO: 186889 - DNA, 25 bp, Canis familiaris
tcttcttctggcttttttggtcaaa

SEQ ID NO: 186890 - DNA, 25 bp, Canis familiaris
tctttcctgctgctgttttgtaaaa

SEQ ID NO: 186891 - DNA, 25 bp, Canis familiaris
tcttcccgtttggttgagattgaaa

SEQ ID NO: 186892 - DNA, 25 bp, Canis familiaris
tcttcctccttgcttgctaaataaa

SEQ ID NO: 186893 - DNA, 25 bp, Canis familiaris
tcttccttcttcctttagtcagaag

SEQ ID NO: 186894 - DNA, 25 bp, Canis familiaris
tcttccttctctctttaatgtatat

SEQ ID NO: 186895 - DNA, 25 bp, Canis familiaris
tcattcccttccaaataaagtaatt

SEQ ID NO: 186896 - DNA, 25 bp, Canis familiaris
tcttcctttacttataaggtcatta

SEQ ID NO: 186897 - DNA, 25 bp, Canis familiaris
tcttccctaaagttcatccgttata

SEQ ID NO: 186898 - DNA, 25 bp, Canis familiaris
tcttccctccaatccatgggattca

SEQ ID NO: 186899 - DNA, 25 bp, Canis familiaris
tcttcccacagacacactggatctg

SEQ ID NO: 186900 - DNA, 25 bp, Canis familiaris
tcttcctacacacactatatgcaca

SEQ ID NO: 186901 - DNA, 25 bp, Canis familiaris
tcttcgtgatctgccagcttggcaa

SEQ ID NO: 186902 - DNA, 25 bp, Canis familiaris
tctttctgtgtgtccctcatgaata

SEQ ID NO: 186903 - DNA, 25 bp, Canis familiaris
tctttcttatgttcccacgatattg

SEQ ID NO: 186904 - DNA, 25 bp, Canis familiaris
tcacgcctgtaatcccagcactttg

SEQ ID NO: 186905 - DNA, 25 bp, Canis familiaris
tcatcctgggaatccaagtcctcta

SEQ ID NO: 186906 - DNA, 25 bp, Canis familiaris
tcatcctgggactccaggattgcac

SEQ ID NO: 186907 - DNA, 25 bp, Canis familiaris
tcatccgggacttctacaacccgct

SEQ ID NO: 186908 - DNA, 25 bp, Canis familiaris
tcttcaaagactttgcagcccccac

SEQ ID NO: 186909 - DNA, 25 bp, Canis familiaris
tcttaaggcctgttgcagtcctacc

SEQ ID NO: 186910 - DNA, 25 bp, Canis familiaris
tcttgaaggccaccagaatcaccac

SEQ ID NO: 186911 - DNA, 25 bp, Canis familiaris
tcttcagggctacaaatctcctcag

SEQ ID NO: 186912 - DNA, 25 bp, Canis familiaris
tcttcaacgtgtttcacttgtccag

SEQ ID NO: 186913 - DNA, 25 bp, Canis familiaris
tcttaaggtgtgaagccctctccag

SEQ ID NO: 186914 - DNA, 25 bp, Canis familiaris
tcttaaggtgacctgagaccccagc

SEQ ID NO: 186915 - DNA, 25 bp, Canis familiaris
tctttagttgacagcagtacgcctg

SEQ ID NO: 186916 - DNA, 25 bp, Canis familiaris
tctttgagattggcccaggccccat

SEQ ID NO: 186917 - DNA, 25 bp, Canis familiaris
tcttctaaagagcccatggaccctg

SEQ ID NO: 186918 - DNA, 25 bp, Canis familiaris
tcttccacgagatcctggagaccgc

SEQ ID NO: 186919 - DNA, 25 bp, Canis familiaris
tcagtcacttcgtcaacgggaccag

SEQ ID NO: 186920 - DNA, 25 bp, Canis familiaris
tcttcatcctcaccaagcgggaagt

SEQ ID NO: 186921 - DNA, 25 bp, Canis familiaris
tcttgcacacagcacaatgccgggc

SEQ ID NO: 186922 - DNA, 25 bp, Canis familiaris
tcttaccaggagctgctacaggcag

SEQ ID NO: 186923 - DNA, 25 bp, Canis familiaris
tcttttcaacagcctctcacaggga

SEQ ID NO: 186924 - DNA, 25 bp, Canis familiaris
tcttttgctccagtgttacaggaaa

SEQ ID NO: 186925 - DNA, 25 bp, Canis familiaris
tcttttctcgcagatatcgtgggaa

SEQ ID NO: 186926 - DNA, 25 bp, Canis familiaris
tcttgttccggttgatagtgcaggg

SEQ ID NO: 186927 - DNA, 25 bp, Canis familiaris
tcttttcgttcttatcactgcggag

SEQ ID NO: 186928 - DNA, 25 bp, Canis familiaris
tcttcttcagtttcaagtggctgga

SEQ ID NO: 186929 - DNA, 25 bp, Canis familiaris
tcttctatgcatagttcaccttctc

SEQ ID NO: 186930 - DNA, 25 bp, Canis familiaris
tcttcaacatttacacaaccgctta

SEQ ID NO: 186931 - DNA, 25 bp, Canis familiaris
tcttcccttttggatcgtcagtttc

SEQ ID NO: 186932 - DNA, 25 bp, Canis familiaris
tctttccttttggtctttgtttctg

SEQ ID NO: 186933 - DNA, 25 bp, Canis familiaris
tctttcttttcaaattacttttctg

SEQ ID NO: 186934 - DNA, 25 bp, Canis familiaris
tctttccttacaagttcctctattg

SEQ ID NO: 186935 - DNA, 25 bp, Canis familiaris
tctttactaatcatttcagtttttt

SEQ ID NO: 186936 - DNA, 25 bp, Canis familiaris
tcttccctcaacatttcctaggttt

SEQ ID NO: 186937 - DNA, 25 bp, Canis familiaris
tcttcctctcatcattttcctaagg

SEQ ID NO: 186938 - DNA, 25 bp, Canis familiaris
tctttcttccagttttccattcaag

SEQ ID NO: 186939 - DNA, 25 bp, Canis familiaris
tctttcttcctgttttttctaatgc

SEQ ID NO: 186940 - DNA, 25 bp, Canis familiaris
tctttctgttctttcatttttttca

SEQ ID NO: 186941 - DNA, 25 bp, Canis familiaris
tctttatctttgttcttctgtttat

SEQ ID NO: 186942 - DNA, 25 bp, Canis familiaris
tcatttttcttttccagtttctcaa

SEQ ID NO: 186943 - DNA, 25 bp, Canis familiaris
tctttttgcttttctgtgttttcta

SEQ ID NO: 186944 - DNA, 25 bp, Canis familiaris
tctttttcttatcttctatttcttt

SEQ ID NO: 186945 - DNA, 25 bp, Canis familiaris
tcatctgtttttcagaccttttttt

SEQ ID NO: 186946 - DNA, 25 bp, Canis familiaris
tctttttttctagcatctttttctt

SEQ ID NO: 186947 - DNA, 25 bp, Canis familiaris
tctttttttctacgatctattctat

SEQ ID NO: 186948 - DNA, 25 bp, Canis familiaris
tcttttgctctttaagtcttctgga

SEQ ID NO: 186949 - DNA, 25 bp, Canis familiaris
tcttaagtctcttgaagtcctcact

SEQ ID NO: 186950 - DNA, 25 bp, Canis familiaris
tctttaccatctttacatctcatca

SEQ ID NO: 186951 - DNA, 25 bp, Canis familiaris
tcttatactcattttacccttcaac

SEQ ID NO: 186952 - DNA, 25 bp, Canis familiaris
tcttataccaagaccctgctttcaa

SEQ ID NO: 186953 - DNA, 25 bp, Canis familiaris
tctttacggcaggcacgtgttccag

SEQ ID NO: 186954 - DNA, 25 bp, Canis familiaris
tcttgacacttagccgctgtctcgc

SEQ ID NO: 186955 - DNA, 25 bp, Canis familiaris
tcttggtttcagctctggtcacgat

SEQ ID NO: 186956 - DNA, 25 bp, Canis familiaris
tcttggctgtcttgttcgagtcaag

SEQ ID NO: 186957 - DNA, 25 bp, Canis familiaris
tcttgtgcttttgactggatctatg

SEQ ID NO: 186958 - DNA, 25 bp, Canis familiaris
tcttgtctttgtcacatggctttct

SEQ ID NO: 186959 - DNA, 25 bp, Canis familiaris
tcttgacttctttagcatgcattgt

SEQ ID NO: 186960 - DNA, 25 bp, Canis familiaris
tcttccttcgctcagtttgttggga

SEQ ID NO: 186961 - DNA, 25 bp, Canis familiaris
tcttcgtccgtttgttgaaagggca

SEQ ID NO: 186962 - DNA, 25 bp, Canis familiaris
tcttttccagtttctcaagaaggaa

SEQ ID NO: 186963 - DNA, 25 bp, Canis familiaris
tcttcctccagttttcaacacagtt

SEQ ID NO: 186964 - DNA, 25 bp, Canis familiaris
tcttccccagcatttccaaatgcag

SEQ ID NO: 186965 - DNA, 25 bp, Canis familiaris
tcattcctcctattactgaagtcag

SEQ ID NO: 186966 - DNA, 25 bp, Canis familiaris
tcattccccttctttagagtagcat

SEQ ID NO: 186967 - DNA, 25 bp, Canis familiaris
tcttccccattgctctatgaaactg

SEQ ID NO: 186968 - DNA, 25 bp, Canis familiaris
tcttcttctacctttctgaaatctc

SEQ ID NO: 186969 - DNA, 25 bp, Canis familiaris
tcttgcttcacaaccttctgtaaca

SEQ ID NO: 186970 - DNA, 25 bp, Canis familiaris
tcttggctacttgctctttggacaa

SEQ ID NO: 186971 - DNA, 25 bp, Canis familiaris
tctttctcttgtgctcattacagaa

SEQ ID NO: 186972 - DNA, 25 bp, Canis familiaris
tctttctggagggtcataacaagca

SEQ ID NO: 186973 - DNA, 25 bp, Canis familiaris
tcttcttgggtcgcaatacatgtac

SEQ ID NO: 186974 - DNA, 25 bp, Canis familiaris
tcttcagtgggtatcttatgcttcc

SEQ ID NO: 186975 - DNA, 25 bp, Canis familiaris
tcaccagaggtggtttttggtcccg

SEQ ID NO: 186976 - DNA, 25 bp, Canis familiaris
tcaccggcttttgtattgttctctt

SEQ ID NO: 186977 - DNA, 25 bp, Canis familiaris
tcttgggttgttgtgcttctttccc

SEQ ID NO: 186978 - DNA, 25 bp, Canis familiaris
tcttagttttgtttgcactctttgc

SEQ ID NO: 186979 - DNA, 25 bp, Canis familiaris
tctttttatcgcatcagaagcattt

SEQ ID NO: 186980 - DNA, 25 bp, Canis familiaris
tcttcctttactactgaaaattaca

SEQ ID NO: 186981 - DNA, 25 bp, Canis familiaris
tcttccttctaccctgaaactaatt

SEQ ID NO: 186982 - DNA, 25 bp, Canis familiaris
tcttcttttccactcgataactatg

SEQ ID NO: 186983 - DNA, 25 bp, Canis familiaris
tctttttcccaaccatgatttataa

SEQ ID NO: 186984 - DNA, 25 bp, Canis familiaris
tctttttcccaccatgatgttataa

SEQ ID NO: 186985 - DNA, 25 bp, Canis familiaris
tctttctctcactcacataaataaa

SEQ ID NO: 186986 - DNA, 25 bp, Canis familiaris
tctttcactgcagcccaagacagga

SEQ ID NO: 186987 - DNA, 25 bp, Canis familiaris
tcttccaccaactctaggcatggag

SEQ ID NO: 186988 - DNA, 25 bp, Canis familiaris
tcttccccgaggacatttctgtgca

SEQ ID NO: 186989 - DNA, 25 bp, Canis familiaris
tcttcagccacctttatttttgatt

SEQ ID NO: 186990 - DNA, 25 bp, Canis familiaris
tcttggccactctttatgctataat

SEQ ID NO: 186991 - DNA, 25 bp, Canis familiaris
tcttgtgcgcacacttgatgaaggt

SEQ ID NO: 186992 - DNA, 25 bp, Canis familiaris
tcttggtgccttttgtgtgatgcgc

SEQ ID NO: 186993 - DNA, 25 bp, Canis familiaris
tcttatgtgttttgttgcagctcca

SEQ ID NO: 186994 - DNA, 25 bp, Canis familiaris
tcttcattggtttcttagtctcaca

SEQ ID NO: 186995 - DNA, 25 bp, Canis familiaris
tcttctcaccttttggagtaccact

SEQ ID NO: 186996 - DNA, 25 bp, Canis familiaris
tcttggagcctttaggacataccca

SEQ ID NO: 186997 - DNA, 25 bp, Canis familiaris
tcttaacctattaaaatatcccaat

SEQ ID NO: 186998 - DNA, 25 bp, Canis familiaris
tcttacccgtgacaaatgtgctcca

SEQ ID NO: 186999 - DNA, 25 bp, Canis familiaris
tcttagcaccgtgtattttgccgcc

SEQ ID NO: 187000 - DNA, 25 bp, Canis familiaris
tcttaggcctttattgttccatctc

SEQ ID NO: 187001 - DNA, 25 bp, Canis familiaris
tcttagtcgttatttgggtccctga

SEQ ID NO: 187002 - DNA, 25 bp, Canis familiaris
tcttaatcgattttttccatcccaa

SEQ ID NO: 187003 - DNA, 25 bp, Canis familiaris
tcttaatcacttttttttcttagat

SEQ ID NO: 187004 - DNA, 25 bp, Canis familiaris
tcttaattggtctttcttaattgaa

SEQ ID NO: 187005 - DNA, 25 bp, Canis familiaris
tcttggttggcttttcttaattggt

SEQ ID NO: 187006 - DNA, 25 bp, Canis familiaris
tcttgggcggtttctgcttagatgg

SEQ ID NO: 187007 - DNA, 25 bp, Canis familiaris
tcttgaataggaaatctgcttaata

SEQ ID NO: 187008 - DNA, 25 bp, Canis familiaris
tcttcagttcagaattcctccagga

SEQ ID NO: 187009 - DNA, 25 bp, Canis familiaris
tcttcttctacaagtctcaccagga

SEQ ID NO: 187010 - DNA, 25 bp, Canis familiaris
taagcttcacaaaggtaccaaagtt

SEQ ID NO: 187011 - DNA, 25 bp, Canis familiaris
taagtccccaggttagaaagagtct

SEQ ID NO: 187012 - DNA, 25 bp, Canis familiaris
taattccccaaataaaatgttcatt

SEQ ID NO: 187013 - DNA, 25 bp, Canis familiaris
ttaacccccaggcaacttttcatat

SEQ ID NO: 187014 - DNA, 25 bp, Canis familiaris
ttcaggcccccagggaagttgctta

SEQ ID NO: 187015 - DNA, 25 bp, Canis familiaris
tcatcacccgactcggaagttcttc

SEQ ID NO: 187016 - DNA, 25 bp, Canis familiaris
tcacacacttaccccagggtcaggt

SEQ ID NO: 187017 - DNA, 25 bp, Canis familiaris
tcagcccgtttggccagaactcggg

SEQ ID NO: 187018 - DNA, 25 bp, Canis familiaris
tcagggatgcttggccttgaacgcc

SEQ ID NO: 187019 - DNA, 25 bp, Canis familiaris
tcagcgtgtgcctaccctacgccgg

SEQ ID NO: 187020 - DNA, 25 bp, Canis familiaris
tcacggtctcaagcgtgaccatccc

SEQ ID NO: 187021 - DNA, 25 bp, Canis familiaris
tcatcggcgtgctgcgggatcagca

SEQ ID NO: 187022 - DNA, 25 bp, Canis familiaris
tcttcagtgtgctctgggtggacct

SEQ ID NO: 187023 - DNA, 25 bp, Canis familiaris
tcatctcctgtgcgtggacgtgact

SEQ ID NO: 187024 - DNA, 25 bp, Canis familiaris
tcttactccagcctggcagcctggc

SEQ ID NO: 187025 - DNA, 25 bp, Canis familiaris
tcttcttccgtgtggcagcattgac

SEQ ID NO: 187026 - DNA, 25 bp, Canis familiaris
tcttctttctgggggacttgatttt

SEQ ID NO: 187027 - DNA, 25 bp, Canis familiaris
tcaactttcttggaaggccttggtt

SEQ ID NO: 187028 - DNA, 25 bp, Canis familiaris
tcagcgatttcctggatggccttgg

SEQ ID NO: 187029 - DNA, 25 bp, Canis familiaris
tcatgccagcttgagatgtttgcct

SEQ ID NO: 187030 - DNA, 25 bp, Canis familiaris
tcatgccagccttctgattatccta

SEQ ID NO: 187031 - DNA, 25 bp, Canis familiaris
tcagtccgtgtttgattccattcca

SEQ ID NO: 187032 - DNA, 25 bp, Canis familiaris
tcttccagctttagcataccactaa

SEQ ID NO: 187033 - DNA, 25 bp, Canis familiaris
tcttcccttctttcactagatagtc

SEQ ID NO: 187034 - DNA, 25 bp, Canis familiaris
tctttactttcttcatgctcagaca

SEQ ID NO: 187035 - DNA, 25 bp, Canis familiaris
tctttttattcttctatataccgga

SEQ ID NO: 187036 - DNA, 25 bp, Canis familiaris
tcatctgtttttgtctatacaccat

SEQ ID NO: 187037 - DNA, 25 bp, Canis familiaris
tcttgttttgacccttgacatctag

SEQ ID NO: 187038 - DNA, 25 bp, Canis familiaris
tcttgttttgagccttaacatctag

SEQ ID NO: 187039 - DNA, 25 bp, Canis familiaris
tcttctattcggcctatccagacga

SEQ ID NO: 187040 - DNA, 25 bp, Canis familiaris
tcttctacgcgactttcgctactga

SEQ ID NO: 187041 - DNA, 25 bp, Canis familiaris
tcttcaagcgcgtggtgcgcagcct

SEQ ID NO: 187042 - DNA, 25 bp, Canis familiaris
tcttcaactggctgggctacgccaa

SEQ ID NO: 187043 - DNA, 25 bp, Canis familiaris
tcttctactacagcgtgctacctaa

SEQ ID NO: 187044 - DNA, 25 bp, Canis familiaris
tcttgcaggtagcccgtggacaaaa

SEQ ID NO: 187045 - DNA, 25 bp, Canis familiaris
tcttcaggctgacctgtgctaaaag

SEQ ID NO: 187046 - DNA, 25 bp, Canis familiaris
tcttcaggagacgttttgcaatcat

SEQ ID NO: 187047 - DNA, 25 bp, Canis familiaris
tcttgaggaactgtctgctctgcac

SEQ ID NO: 187048 - DNA, 25 bp, Canis familiaris
tcttcatgcgtgtctctgtatttac

SEQ ID NO: 187049 - DNA, 25 bp, Canis familiaris
tcttccctgtccaataaatagctgc

SEQ ID NO: 187050 - DNA, 25 bp, Canis familiaris
tcttgcacgctgaccaaaaacgcca

SEQ ID NO: 187051 - DNA, 25 bp, Canis familiaris
tcttcttgtgtcctgaaaagccccc

SEQ ID NO: 187052 - DNA, 25 bp, Canis familiaris
tatttggagctccctaaaggccacc

SEQ ID NO: 187053 - DNA, 25 bp, Canis familiaris
taattgggctccgcaaaggccgcat

SEQ ID NO: 187054 - DNA, 25 bp, Canis familiaris
tcatattgagtctccccaaacacca

SEQ ID NO: 187055 - DNA, 25 bp, Canis familiaris
tcattacaatctcctactaaaaaaa

SEQ ID NO: 187056 - DNA, 25 bp, Canis familiaris
tcttgctcagttctcccagaagaaa

SEQ ID NO: 187057 - DNA, 25 bp, Canis familiaris
tcttttgcttcttcccaagaggaca

SEQ ID NO: 187058 - DNA, 25 bp, Canis familiaris
tcttttgcttctccccagagaacat

SEQ ID NO: 187059 - DNA, 25 bp, Canis familiaris
tcttttgcttctccccagagaacat

SEQ ID NO: 187060 - DNA, 25 bp, Canis familiaris
tcttttgcttctccccagagaacat

SEQ ID NO: 187061 - DNA, 25 bp, Canis familiaris
tcttgttgcttctcccaatgagaac

SEQ ID NO: 187062 - DNA, 25 bp, Canis familiaris
tcttggtctcgctctcacaataaga

SEQ ID NO: 187063 - DNA, 25 bp, Canis familiaris
tcatgtgctttttttcaaataaaat

SEQ ID NO: 187064 - DNA, 25 bp, Canis familiaris
tcttttcttgactcaaatgaaatat

SEQ ID NO: 187065 - DNA, 25 bp, Canis familiaris
tcttttccgacttcagaacaactta

SEQ ID NO: 187066 - DNA, 25 bp, Canis familiaris
tcttgttccccatcagaatttccga

SEQ ID NO: 187067 - DNA, 25 bp, Canis familiaris
tcttctcccccatgaggaacttaaa

SEQ ID NO: 187068 - DNA, 25 bp, Canis familiaris
tcttctcacctgccacagaggagat

SEQ ID NO: 187069 - DNA, 25 bp, Canis familiaris
tcttctctcctgtagggcggatacg

SEQ ID NO: 187070 - DNA, 25 bp, Canis familiaris
tcttcattcctgagcgggcaagggc

SEQ ID NO: 187071 - DNA, 25 bp, Canis familiaris
tcttcttctcagagccattcacaga

SEQ ID NO: 187072 - DNA, 25 bp, Canis familiaris
tcttcttccgatgccttgacaaggc

SEQ ID NO: 187073 - DNA, 25 bp, Canis familiaris
tcttcctggccaacgtggtcaaggc

SEQ ID NO: 187074 - DNA, 25 bp, Canis familiaris
tcttctgcttcctcagctggaaagg

SEQ ID NO: 187075 - DNA, 25 bp, Canis familiaris
tcttgccttgtcttcagtagctaat

SEQ ID NO: 187076 - DNA, 25 bp, Canis familiaris
tcttcacctggctaggctatctcaa

SEQ ID NO: 187077 - DNA, 25 bp, Canis familiaris
tcttcactcttctacctatataact

SEQ ID NO: 187078 - DNA, 25 bp, Canis familiaris
tcattactccattaccattattttt

SEQ ID NO: 187079 - DNA, 25 bp, Canis familiaris
tcattcctacttacctttattactt

SEQ ID NO: 187080 - DNA, 25 bp, Canis familiaris
tcttcccagcttgctctttagattc

SEQ ID NO: 187081 - DNA, 25 bp, Canis familiaris
tcttcctcccataatttctaattct

SEQ ID NO: 187082 - DNA, 25 bp, Canis familiaris
tcttcctgcccagagactgatttat

SEQ ID NO: 187083 - DNA, 25 bp, Canis familiaris
tcttggccccatcagccatgaaact

SEQ ID NO: 187084 - DNA, 25 bp, Canis familiaris
tcttgtcctgcatgaagcccaaagc

SEQ ID NO: 187085 - DNA, 25 bp, Canis familiaris
tcttgtccatcacagagctgcacac

SEQ ID NO: 187086 - DNA, 25 bp, Canis familiaris
tcattgtggccgccagaccaacgtg

SEQ ID NO: 187087 - DNA, 25 bp, Canis familiaris
tcattctggccacggaggccacgtc

SEQ ID NO: 187088 - DNA, 25 bp, Canis familiaris
tcatcctcagcctggagcagcaagt

SEQ ID NO: 187089 - DNA, 25 bp, Canis familiaris
tcatcgtgacgttgggtacagaata

SEQ ID NO: 187090 - DNA, 25 bp, Canis familiaris
tcatcagaatctgtcggccaaaagc

SEQ ID NO: 187091 - DNA, 25 bp, Canis familiaris
tcatcacctgtcatcaaggaaatgc

SEQ ID NO: 187092 - DNA, 25 bp, Canis familiaris
tcatcatccaacaccgggaagaccc

SEQ ID NO: 187093 - DNA, 25 bp, Canis familiaris
tcatcacacaaaacgatagcttaag

SEQ ID NO: 187094 - DNA, 25 bp, Canis familiaris
tcataccacgaactctacatctata

SEQ ID NO: 187095 - DNA, 25 bp, Canis familiaris
tcttccacggcagctatatatctgg

SEQ ID NO: 187096 - DNA, 25 bp, Canis familiaris
ttgaaaaggaactatctacagatgt

SEQ ID NO: 187097 - DNA, 25 bp, Canis familiaris
tatgaaaaagtaaactatcctttgg

SEQ ID NO: 187098 - DNA, 25 bp, Canis familiaris
tcttttacacttaaccacctttcag

SEQ ID NO: 187099 - DNA, 25 bp, Canis familiaris
tcttgttaccagaaacccattttag

SEQ ID NO: 187100 - DNA, 25 bp, Canis familiaris
tcttttgagccagtccacctgaatt

SEQ ID NO: 187101 - DNA, 25 bp, Canis familiaris
tcttgttaactgtccaccgaatgcg

SEQ ID NO: 187102 - DNA, 25 bp, Canis familiaris
tcttctacccattgcccaagaatgc

SEQ ID NO: 187103 - DNA, 25 bp, Canis familiaris
tcttatcaggccatgctccaaagtc

SEQ ID NO: 187104 - DNA, 25 bp, Canis familiaris
tcattaaagcacaagcccctggtct

SEQ ID NO: 187105 - DNA, 25 bp, Canis familiaris
taataaagctcgtccttcacgtgtc

SEQ ID NO: 187106 - DNA, 25 bp, Canis familiaris
tcacgacaaccgtctgcttcacggt

SEQ ID NO: 187107 - DNA, 25 bp, Canis familiaris
tcagggcaagcccaatctttcagga

SEQ ID NO: 187108 - DNA, 25 bp, Canis familiaris
tcttaaccgataccttgagcccaag

SEQ ID NO: 187109 - DNA, 25 bp, Canis familiaris
tcttaggctcaggcggcttgaccta

SEQ ID NO: 187110 - DNA, 25 bp, Canis familiaris
tcataatggtcaccctgggagccca

SEQ ID NO: 187111 - DNA, 25 bp, Canis familiaris
tcttgcagttcttcctgtagatccc

SEQ ID NO: 187112 - DNA, 25 bp, Canis familiaris
tcttcagctcttccagggagaccag

SEQ ID NO: 187113 - DNA, 25 bp, Canis familiaris
tcttcagcattacatgcctgatgcc

SEQ ID NO: 187114 - DNA, 25 bp, Canis familiaris
tcttcatcttgacatccatggaatc

SEQ ID NO: 187115 - DNA, 25 bp, Canis familiaris
tcattatgcatttgactccatgtga

SEQ ID NO: 187116 - DNA, 25 bp, Canis familiaris
tcttcagattcagcgtcatgatgat

SEQ ID NO: 187117 - DNA, 25 bp, Canis familiaris
tcatctgagagaatggctgataatg

SEQ ID NO: 187118 - DNA, 25 bp, Canis familiaris
tcatcttgaattcttaagtgccaat

SEQ ID NO: 187119 - DNA, 25 bp, Canis familiaris
tcattataatcatcgtccaggccac

SEQ ID NO: 187120 - DNA, 25 bp, Canis familiaris
tcttgaacatcctgagtgctggccc

SEQ ID NO: 187121 - DNA, 25 bp, Canis familiaris
tcttggaatctctctgcattagcca

SEQ ID NO: 187122 - DNA, 25 bp, Canis familiaris
tcttggcagagccgactgcttttcc

SEQ ID NO: 187123 - DNA, 25 bp, Canis familiaris
tcttgagcacagcatggacattctg

SEQ ID NO: 187124 - DNA, 25 bp, Canis familiaris
tcattggctgagaactacattttaa

SEQ ID NO: 187125 - DNA, 25 bp, Canis familiaris
tcattgacctcaactacatggtcta

SEQ ID NO: 187126 - DNA, 25 bp, Canis familiaris
tcttagcctctggacacatccatta

SEQ ID NO: 187127 - DNA, 25 bp, Canis familiaris
tcatttggctctgaccacaggtacc

SEQ ID NO: 187128 - DNA, 25 bp, Canis familiaris
tcttcttgattggattcatgagtgg

SEQ ID NO: 187129 - DNA, 25 bp, Canis familiaris
tcttcattttgcgtacagctcttgc

SEQ ID NO: 187130 - DNA, 25 bp, Canis familiaris
tcttcttatctcttacagtgttctt

SEQ ID NO: 187131 - DNA, 25 bp, Canis familiaris
tcttttgcaattaacgtcttttccg

SEQ ID NO: 187132 - DNA, 25 bp, Canis familiaris
ttttaacatttacactcttttcagt

SEQ ID NO: 187133 - DNA, 25 bp, Canis familiaris
taatactaattttctaccttcccag

SEQ ID NO: 187134 - DNA, 25 bp, Canis familiaris
taattgcccatggtttaacatcctc

SEQ ID NO: 187135 - DNA, 25 bp, Canis familiaris
tcaattcttggactttcaaccctgc

SEQ ID NO: 187136 - DNA, 25 bp, Canis familiaris
tcaacctttagtggtctcaaactca

SEQ ID NO: 187137 - DNA, 25 bp, Canis familiaris
tcatacttttcttcgtccataaata

SEQ ID NO: 187138 - DNA, 25 bp, Canis familiaris
tcatagtttcccttgttcagaatta

SEQ ID NO: 187139 - DNA, 25 bp, Canis familiaris
tcatttgggcccatattgcgccgta

SEQ ID NO: 187140 - DNA, 25 bp, Canis familiaris
tcatttgggcccaatttgccgctaa

SEQ ID NO: 187141 - DNA, 25 bp, Canis familiaris
tcatgttgggactttatatcggtaa

SEQ ID NO: 187142 - DNA, 25 bp, Canis familiaris
tcttgtcgcgagctgctgatacgga

SEQ ID NO: 187143 - DNA, 25 bp, Canis familiaris
tcttcaggcggtagctgattctgga

SEQ ID NO: 187144 - DNA, 25 bp, Canis familiaris
tcttcaggcggtagctgattctgga

SEQ ID NO: 187145 - DNA, 25 bp, Canis familiaris
tcttcaggccctgcatgtgcaaaga

SEQ ID NO: 187146 - DNA, 25 bp, Canis familiaris
tcttcgtcttgtccttcaatgagca

SEQ ID NO: 187147 - DNA, 25 bp, Canis familiaris
tcttcattttgactgttctgtagca

SEQ ID NO: 187148 - DNA, 25 bp, Canis familiaris
tcttgcaatttcctgcctcataagc

SEQ ID NO: 187149 - DNA, 25 bp, Canis familiaris
tcttcttttcatccctgaattgctc

SEQ ID NO: 187150 - DNA, 25 bp, Canis familiaris
tcttctttctcacctcatagatggt

SEQ ID NO: 187151 - DNA, 25 bp, Canis familiaris
tcttctcagcatcacccttgatgtt

SEQ ID NO: 187152 - DNA, 25 bp, Canis familiaris
tcttgctcagcacagcttcactgtg

SEQ ID NO: 187153 - DNA, 25 bp, Canis familiaris
tcttgcatggagcaatctcgcagtg

SEQ ID NO: 187154 - DNA, 25 bp, Canis familiaris
tcttcaccagctgtgcggcagtata

SEQ ID NO: 187155 - DNA, 25 bp, Canis familiaris
tcttctcacactgttccctatgaag

SEQ ID NO: 187156 - DNA, 25 bp, Canis familiaris
tcttctcaacacgtatgctcctaag

SEQ ID NO: 187157 - DNA, 25 bp, Canis familiaris
tcttgctcagcaacttgaccacaaa

SEQ ID NO: 187158 - DNA, 25 bp, Canis familiaris
tcatctctcaggtctcatttcaaaa

SEQ ID NO: 187159 - DNA, 25 bp, Canis familiaris
tcatcagcttcgtccagtacaaaca

SEQ ID NO: 187160 - DNA, 25 bp, Canis familiaris
tcatcgttccccataattccagaaa

SEQ ID NO: 187161 - DNA, 25 bp, Canis familiaris
tcttgtgtaccaaatactcccatga

SEQ ID NO: 187162 - DNA, 25 bp, Canis familiaris
tcttgtaaccaagtcaacactcaca

SEQ ID NO: 187163 - DNA, 25 bp, Canis familiaris
tcttgttcaaagaccatgcacctgc

SEQ ID NO: 187164 - DNA, 25 bp, Canis familiaris
tcttcccagagattccagactctca

SEQ ID NO: 187165 - DNA, 25 bp, Canis familiaris
tcttgtccaggtccgaagctcagac

SEQ ID NO: 187166 - DNA, 25 bp, Canis familiaris
tcttgatcactccctcaaaggcaga

SEQ ID NO: 187167 - DNA, 25 bp, Canis familiaris
tcattactgtgaagccaactggaga

SEQ ID NO: 187168 - DNA, 25 bp, Canis familiaris
tcttcatctgggtcctacgggagta

SEQ ID NO: 187169 - DNA, 25 bp, Canis familiaris
tcttatctcgagtgccacagttact

SEQ ID NO: 187170 - DNA, 25 bp, Canis familiaris
tcatgtaccgagtgctcctttaggc

SEQ ID NO: 187171 - DNA, 25 bp, Canis familiaris
tcagtatggggctctgactttcgtg

SEQ ID NO: 187172 - DNA, 25 bp, Canis familiaris
tcagtgatttatcaccaccttcggc

SEQ ID NO: 187173 - DNA, 25 bp, Canis familiaris
tcaggaatgtcaccaagtccatccc

SEQ ID NO: 187174 - DNA, 25 bp, Canis familiaris
tcaggcttgtaatacccttcacgtg

SEQ ID NO: 187175 - DNA, 25 bp, Canis familiaris
tcatgcctttacttactgtctttac

SEQ ID NO: 187176 - DNA, 25 bp, Canis familiaris
tcatgcctttacttactgtctttac

SEQ ID NO: 187177 - DNA, 25 bp, Canis familiaris
tcatgcctttacttactgtctttac

SEQ ID NO: 187178 - DNA, 25 bp, Canis familiaris
taacttaacccagattttatttatg

SEQ ID NO: 187179 - DNA, 25 bp, Canis familiaris
tacacttggacagccgggtttttca

SEQ ID NO: 187180 - DNA, 25 bp, Canis familiaris
tcatctttggaaatgggggcttttt

SEQ ID NO: 187181 - DNA, 25 bp, Canis familiaris
tcatctttttagagccgacttcctc

SEQ ID NO: 187182 - DNA, 25 bp, Canis familiaris
tcattttttggttgtccagttccct

SEQ ID NO: 187183 - DNA, 25 bp, Canis familiaris
tcagttctttgacttgggggtccct

SEQ ID NO: 187184 - DNA, 25 bp, Canis familiaris
tcagtggtccaataaggggctcccg

SEQ ID NO: 187185 - DNA, 25 bp, Canis familiaris
tcaggcttccctcagggagcctgct

SEQ ID NO: 187186 - DNA, 25 bp, Canis familiaris
tcttcctccctggagaagagctatg

SEQ ID NO: 187187 - DNA, 25 bp, Canis familiaris
tcttccgccctaacgagactgtggg

SEQ ID NO: 187188 - DNA, 25 bp, Canis familiaris
tcttccaacctgaactggctggggc

SEQ ID NO: 187189 - DNA, 25 bp, Canis familiaris
tcactccaggcccatactacatggg

SEQ ID NO: 187190 - DNA, 25 bp, Canis familiaris
tcttggcaactgaattctagcattg

SEQ ID NO: 187191 - DNA, 25 bp, Canis familiaris
tcttgcgtcactaagtacagctctg

SEQ ID NO: 187192 - DNA, 25 bp, Canis familiaris
tcttcgccactcaggaagtgctgtc

SEQ ID NO: 187193 - DNA, 25 bp, Canis familiaris
tcttgttcctttggcacatcgatgt

SEQ ID NO: 187194 - DNA, 25 bp, Canis familiaris
tcttctttttctggctgctcagtat

SEQ ID NO: 187195 - DNA, 25 bp, Canis familiaris
tcattctcttagtgactctagtcat

SEQ ID NO: 187196 - DNA, 25 bp, Canis familiaris
tcttctcttgtggttgttagatcta

SEQ ID NO: 187197 - DNA, 25 bp, Canis familiaris
tcttactcagtctgcttcttattca

SEQ ID NO: 187198 - DNA, 25 bp, Canis familiaris
tcttctcccatctgtgtcttataga

SEQ ID NO: 187199 - DNA, 25 bp, Canis familiaris
tcttccctccacatgcattttagaa

SEQ ID NO: 187200 - DNA, 25 bp, Canis familiaris
tcttctcctacctgcattttgcaga

SEQ ID NO: 187201 - DNA, 25 bp, Canis familiaris
tcttctcctacacatctttataatc

SEQ ID NO: 187202 - DNA, 25 bp, Canis familiaris
tcttctcctcgacaatcttgcaaga

SEQ ID NO: 187203 - DNA, 25 bp, Canis familiaris
tcttccctacatcattctagcacag

SEQ ID NO: 187204 - DNA, 25 bp, Canis familiaris
tcttccctccatcctgatgtagagg

SEQ ID NO: 187205 - DNA, 25 bp, Canis familiaris
tcttctctgcccaacatcttaatgg

SEQ ID NO: 187206 - DNA, 25 bp, Canis familiaris
tcttctcgggcatcattggccagcg

SEQ ID NO: 187207 - DNA, 25 bp, Canis familiaris
tcatcagtcggagactcatctcgac

SEQ ID NO: 187208 - DNA, 25 bp, Canis familiaris
tcatcctagagattgagtgatctta

SEQ ID NO: 187209 - DNA, 25 bp, Canis familiaris
tcatcgattaactggctctgtgtat

SEQ ID NO: 187210 - DNA, 25 bp, Canis familiaris
tcattcttgagtgatcgctcggtca

SEQ ID NO: 187211 - DNA, 25 bp, Canis familiaris
tcattctcttgcacctgcttggtga

SEQ ID NO: 187212 - DNA, 25 bp, Canis familiaris
tcttctcttgttacgactgcctaac

SEQ ID NO: 187213 - DNA, 25 bp, Canis familiaris
ttttaagttactgtcctatgcctcc

SEQ ID NO: 187214 - DNA, 25 bp, Canis familiaris
ttttaggttactctggccaatccct

SEQ ID NO: 187215 - DNA, 25 bp, Canis familiaris
tattaaggaaaccgtcgccaaccat

SEQ ID NO: 187216 - DNA, 25 bp, Canis familiaris
tattcaatggaagcgcgggtatacg

SEQ ID NO: 187217 - DNA, 25 bp, Canis familiaris
tcttccgagaaggactgggaaccag

SEQ ID NO: 187218 - DNA, 25 bp, Canis familiaris
tcttgcctggacctgaggggaacca

SEQ ID NO: 187219 - DNA, 25 bp, Canis familiaris
tcttgcccagaccaggggaccagta

SEQ ID NO: 187220 - DNA, 25 bp, Canis familiaris
tcttcccacaagggggacatggatc

SEQ ID NO: 187221 - DNA, 25 bp, Canis familiaris
tcttgcccagccaggggacagtata

SEQ ID NO: 187222 - DNA, 25 bp, Canis familiaris
tcttgcccagccaggggacagtata

SEQ ID NO: 187223 - DNA, 25 bp, Canis familiaris
tcttgcccagccaggggacagtata

SEQ ID NO: 187224 - DNA, 25 bp, Canis familiaris
tcttcgccagaccggtgtcaggtct

SEQ ID NO: 187225 - DNA, 25 bp, Canis familiaris
tcttccttgcagtggggctgttcat

SEQ ID NO: 187226 - DNA, 25 bp, Canis familiaris
tcttctgctactttgggtcttgaca

SEQ ID NO: 187227 - DNA, 25 bp, Canis familiaris
tcttcgatcctgtgtcagcttttga

SEQ ID NO: 187228 - DNA, 25 bp, Canis familiaris
tcatctcggttgtgtacccattgca

SEQ ID NO: 187229 - DNA, 25 bp, Canis familiaris
tcattaggctttgatgaaccatcag

SEQ ID NO: 187230 - DNA, 25 bp, Canis familiaris
tcatctaggaactggtgatccatac

SEQ ID NO: 187231 - DNA, 25 bp, Canis familiaris
tcaccacagaaagccttaccactac

SEQ ID NO: 187232 - DNA, 25 bp, Canis familiaris
tcttccatgagacactttaccagaa

SEQ ID NO: 187233 - DNA, 25 bp, Canis familiaris
tcttggcatgtgttatttatcctca

SEQ ID NO: 187234 - DNA, 25 bp, Canis familiaris
tcttgttgcatcttttctacttcat

SEQ ID NO: 187235 - DNA, 25 bp, Canis familiaris
tcttctgttcttatctactctgagg

SEQ ID NO: 187236 - DNA, 25 bp, Canis familiaris
tcttccttctgggtgctacatggaa

SEQ ID NO: 187237 - DNA, 25 bp, Canis familiaris
tcttcgttcagggtgtcatctggga

SEQ ID NO: 187238 - DNA, 25 bp, Canis familiaris
tcttctgatgtccgtgttcgtgagg

SEQ ID NO: 187239 - DNA, 25 bp, Canis familiaris
tcttgcagttggctgtcttggcacg

SEQ ID NO: 187240 - DNA, 25 bp, Canis familiaris
tcataagttggggtgctttctcgtc

SEQ ID NO: 187241 - DNA, 25 bp, Canis familiaris
tcatatcaggtccttgtctactctc

SEQ ID NO: 187242 - DNA, 25 bp, Canis familiaris
tcattaggtcttctgctatctgctt

SEQ ID NO: 187243 - DNA, 25 bp, Canis familiaris
tcttaaatgttcttgtctggctgtt

SEQ ID NO: 187244 - DNA, 25 bp, Canis familiaris
tcatcgagaatgtggcgtcgctctg

SEQ ID NO: 187245 - DNA, 25 bp, Canis familiaris
tcataggagctttggctcccctggg

SEQ ID NO: 187246 - DNA, 25 bp, Canis familiaris
tcaaggagttccgccacaaagtccg

SEQ ID NO: 187247 - DNA, 25 bp, Canis familiaris
tcaggtggttaagggactgggtccg

SEQ ID NO: 187248 - DNA, 25 bp, Canis familiaris
tcaggctggttgtgggacgcacttg

SEQ ID NO: 187249 - DNA, 25 bp, Canis familiaris
tcagctcctttgtggccaagcttta

SEQ ID NO: 187250 - DNA, 25 bp, Canis familiaris
tcactcctgttaacgtcgtgttgga

SEQ ID NO: 187251 - DNA, 25 bp, Canis familiaris
tcagttcgtatacccggtgcttgta

SEQ ID NO: 187252 - DNA, 25 bp, Canis familiaris
tcaattgtgtaacccgagttggaac

SEQ ID NO: 187253 - DNA, 25 bp, Canis familiaris
tcattggtgtgtgtccgtttgcgta

SEQ ID NO: 187254 - DNA, 25 bp, Canis familiaris
tcttgggtgatggccggtcagtgcc

SEQ ID NO: 187255 - DNA, 25 bp, Canis familiaris
tcttgggcaatgggggccaggccag

SEQ ID NO: 187256 - DNA, 25 bp, Canis familiaris
tcttggagcaggagcgggcaacggt

SEQ ID NO: 187257 - DNA, 25 bp, Canis familiaris
tcttggagcaggagcgggcttcggt

SEQ ID NO: 187258 - DNA, 25 bp, Canis familiaris
tcttggagagcgggtgggcggaggg

SEQ ID NO: 187259 - DNA, 25 bp, Canis familiaris
tcttgctggaatcgctgtctgggga

SEQ ID NO: 187260 - DNA, 25 bp, Canis familiaris
tcttcccatatgccgtcagggtgac

SEQ ID NO: 187261 - DNA, 25 bp, Canis familiaris
tcttgcccattttggaggcggcaca

SEQ ID NO: 187262 - DNA, 25 bp, Canis familiaris
tcttcaccactgtcgagactctgga

SEQ ID NO: 187263 - DNA, 25 bp, Canis familiaris
tcttctccattgtgcatacttgggg

SEQ ID NO: 187264 - DNA, 25 bp, Canis familiaris
tcttcccactatagatcctttaggg

SEQ ID NO: 187265 - DNA, 25 bp, Canis familiaris
tcatacccctattgtcacctaaggg

SEQ ID NO: 187266 - DNA, 25 bp, Canis familiaris
tcatcaccaccatgggaccaagggg

SEQ ID NO: 187267 - DNA, 25 bp, Canis familiaris
tactctgatctatgaggcaggaaag

SEQ ID NO: 187268 - DNA, 25 bp, Canis familiaris
tcagtcatttcatgcaggggccgag

SEQ ID NO: 187269 - DNA, 25 bp, Canis familiaris
tcttcattcatatcaacctcacgac

SEQ ID NO: 187270 - DNA, 25 bp, Canis familiaris
tcatatcttcaaaacaatcccaatc

SEQ ID NO: 187271 - DNA, 25 bp, Canis familiaris
tcttcattcataaacagctgaccca

SEQ ID NO: 187272 - DNA, 25 bp, Canis familiaris
tcttcaggatcaggacactgccctc

SEQ ID NO: 187273 - DNA, 25 bp, Canis familiaris
tcttcagagatcggataccaatcct

SEQ ID NO: 187274 - DNA, 25 bp, Canis familiaris
tcttggagatctggaaagattacgg

SEQ ID NO: 187275 - DNA, 25 bp, Canis familiaris
tcttggtgtctggggaactccggag

SEQ ID NO: 187276 - DNA, 25 bp, Canis familiaris
tcttggtgtcttgctgagaccctgc

SEQ ID NO: 187277 - DNA, 25 bp, Canis familiaris
tcttctgtgctgttcctgtaagttt

SEQ ID NO: 187278 - DNA, 25 bp, Canis familiaris
tcttcagtgagattccatgggatgt

SEQ ID NO: 187279 - DNA, 25 bp, Canis familiaris
tcttcctcatagtcagctgggttta

SEQ ID NO: 187280 - DNA, 25 bp, Canis familiaris
tcttcccatagccgcagggtgactt

SEQ ID NO: 187281 - DNA, 25 bp, Canis familiaris
tcttctcacatggcgatcagggggt

SEQ ID NO: 187282 - DNA, 25 bp, Canis familiaris
tcttcctcagcaagtcattaaggtc

SEQ ID NO: 187283 - DNA, 25 bp, Canis familiaris
tcttcatcttgaattcttaagtgcc

SEQ ID NO: 187284 - DNA, 25 bp, Canis familiaris
tcttcatcctatagatacccgacca

SEQ ID NO: 187285 - DNA, 25 bp, Canis familiaris
tcttcagctattagaacccagtaga

SEQ ID NO: 187286 - DNA, 25 bp, Canis familiaris
tcatgagcgtttaaacccagaagcc

SEQ ID NO: 187287 - DNA, 25 bp, Canis familiaris
tcatgggtgtacaataccaagtcaa

SEQ ID NO: 187288 - DNA, 25 bp, Canis familiaris
tcaggttcttcagttaaggtccaga

SEQ ID NO: 187289 - DNA, 25 bp, Canis familiaris
tagcgttcgaacgcactgatttcga

SEQ ID NO: 187290 - DNA, 25 bp, Canis familiaris
tcagttccgagagatcatcgttctc

SEQ ID NO: 187291 - DNA, 25 bp, Canis familiaris
tcagcttacccagagatctaggcct

SEQ ID NO: 187292 - DNA, 25 bp, Canis familiaris
tcagttgactctaatagacccccct

SEQ ID NO: 187293 - DNA, 25 bp, Canis familiaris
tcttctgagccttgttacacactcc

SEQ ID NO: 187294 - DNA, 25 bp, Canis familiaris
tcttcatgacacttgctctaaacga

SEQ ID NO: 187295 - DNA, 25 bp, Canis familiaris
tcttgcatgtcagctacataaacag

SEQ ID NO: 187296 - DNA, 25 bp, Canis familiaris
tcatcgatgtacggtcaaaccagtc

SEQ ID NO: 187297 - DNA, 25 bp, Canis familiaris
tcatcaaaggggaatgataccattc

SEQ ID NO: 187298 - DNA, 25 bp, Canis familiaris
tcacatatagcaccgcacttaccat

SEQ ID NO: 187299 - DNA, 25 bp, Canis familiaris
tcatcctatcaaccatttacctgag

SEQ ID NO: 187300 - DNA, 25 bp, Canis familiaris
tcatatgctatttgtctttccctga

SEQ ID NO: 187301 - DNA, 25 bp, Canis familiaris
tcattaattcatattgccctgcgcc

SEQ ID NO: 187302 - DNA, 25 bp, Canis familiaris
tcatccactgttattaactgcccta

SEQ ID NO: 187303 - DNA, 25 bp, Canis familiaris
tcatccactgaccttctcaaaacag

SEQ ID NO: 187304 - DNA, 25 bp, Canis familiaris
tcatctatgatgacttatccaaaca

SEQ ID NO: 187305 - DNA, 25 bp, Canis familiaris
tcatctttttctaacactgagcatg

SEQ ID NO: 187306 - DNA, 25 bp, Canis familiaris
tcatctcgtttcttacactgtcaga

SEQ ID NO: 187307 - DNA, 25 bp, Canis familiaris
tcataggttctttgccctgggttta

SEQ ID NO: 187308 - DNA, 25 bp, Canis familiaris
tcaaggcttgcctcaccaaggtttg

SEQ ID NO: 187309 - DNA, 25 bp, Canis familiaris
tcatagagctctgcaccgacatttt

SEQ ID NO: 187310 - DNA, 25 bp, Canis familiaris
tcataatcagcatcacggacagtcc

SEQ ID NO: 187311 - DNA, 25 bp, Canis familiaris
tcatagaccagcacaaagccttccc

SEQ ID NO: 187312 - DNA, 25 bp, Canis familiaris
tcatatgaggactcaactccccatc

SEQ ID NO: 187313 - DNA, 25 bp, Canis familiaris
tcataggtacagaccacgtgcccat

SEQ ID NO: 187314 - DNA, 25 bp, Canis familiaris
tcattggaccaaagcagcagctccc

SEQ ID NO: 187315 - DNA, 25 bp, Canis familiaris
tcttggatcaatggggcagtcatta

SEQ ID NO: 187316 - DNA, 25 bp, Canis familiaris
tcttctgccttgcgaggttctagtt

SEQ ID NO: 187317 - DNA, 25 bp, Canis familiaris
tcttcttctttgctggttttttgga

SEQ ID NO: 187318 - DNA, 25 bp, Canis familiaris
tcttctctctttatttctttattag

SEQ ID NO: 187319 - DNA, 25 bp, Canis familiaris
tcttcttttctgttcctttattgta

SEQ ID NO: 187320 - DNA, 25 bp, Canis familiaris
tcttctttggcagggccttttctgt

SEQ ID NO: 187321 - DNA, 25 bp, Canis familiaris
tcttctttggcatggctctttgtgt

SEQ ID NO: 187322 - DNA, 25 bp, Canis familiaris
tcttctttggcagcgccattgtcat

SEQ ID NO: 187323 - DNA, 25 bp, Canis familiaris
tcttcttctgaagctgccatatcat

SEQ ID NO: 187324 - DNA, 25 bp, Canis familiaris
tcttcttcgaagtatgtcttcagtg

SEQ ID NO: 187325 - DNA, 25 bp, Canis familiaris
tcattctgttgatattgtttcggca

SEQ ID NO: 187326 - DNA, 25 bp, Canis familiaris
tcatcttgatttaacctcttcggag

SEQ ID NO: 187327 - DNA, 25 bp, Canis familiaris
tcatcctgaatgacaacctcaatca

SEQ ID NO: 187328 - DNA, 25 bp, Canis familiaris
tcaccataagaagcctacatagaag

SEQ ID NO: 187329 - DNA, 25 bp, Canis familiaris
tcatgccagaaataccaactcagac

SEQ ID NO: 187330 - DNA, 25 bp, Canis familiaris
tcatcgagactacatcaaacacaaa

SEQ ID NO: 187331 - DNA, 25 bp, Canis familiaris
tcatctggcacaccactacaacaga

SEQ ID NO: 187332 - DNA, 25 bp, Canis familiaris
tcattgctgcgatcatgtccaagga

SEQ ID NO: 187333 - DNA, 25 bp, Canis familiaris
tcatcagctctgtgtccagcaggga

SEQ ID NO: 187334 - DNA, 25 bp, Canis familiaris
tcatagcgcgcttgctggacatcga

SEQ ID NO: 187335 - DNA, 25 bp, Canis familiaris
tcatctaggatacttgccagcgagc

SEQ ID NO: 187336 - DNA, 25 bp, Canis familiaris
tcatctatggatggatactggttgt

SEQ ID NO: 187337 - DNA, 25 bp, Canis familiaris
tcattttcccatgctgatgtgttca

SEQ ID NO: 187338 - DNA, 25 bp, Canis familiaris
tcattaaccctgtcagatctctgaa

SEQ ID NO: 187339 - DNA, 25 bp, Canis familiaris
tcatttactctggatctgtctctgt

SEQ ID NO: 187340 - DNA, 25 bp, Canis familiaris
tcagtccggtggttgttcgatgtcg

SEQ ID NO: 187341 - DNA, 25 bp, Canis familiaris
tcagctgcggcggagggattaatgt

SEQ ID NO: 187342 - DNA, 25 bp, Canis familiaris
tcagcacgttgctgtcgattaagac

SEQ ID NO: 187343 - DNA, 25 bp, Canis familiaris
tcagcccaatgaggatcttctaaga

SEQ ID NO: 187344 - DNA, 25 bp, Canis familiaris
tcaggctacaggtcacagttgaaga

SEQ ID NO: 187345 - DNA, 25 bp, Canis familiaris
tcaggaaacacctagttaaagttca

SEQ ID NO: 187346 - DNA, 25 bp, Canis familiaris
ttaatgaaacgctgttcagaaacca

SEQ ID NO: 187347 - DNA, 25 bp, Canis familiaris
taatgaaaccctcttcagaaaccag

SEQ ID NO: 187348 - DNA, 25 bp, Canis familiaris
tatgtaaaccttcattcaaacccaa

SEQ ID NO: 187349 - DNA, 25 bp, Canis familiaris
tcagggtattcttagtataaaccac

SEQ ID NO: 187350 - DNA, 25 bp, Canis familiaris
tagccttacctatttgtttaaccag

SEQ ID NO: 187351 - DNA, 25 bp, Canis familiaris
tcaacgaacctctgagtttcctcca

SEQ ID NO: 187352 - DNA, 25 bp, Canis familiaris
tcattaaccctcatagatgtcccca

SEQ ID NO: 187353 - DNA, 25 bp, Canis familiaris
tcttgacccccagagtgtagatgct

SEQ ID NO: 187354 - DNA, 25 bp, Canis familiaris
tcttggtccccaaattgtggtcctt

SEQ ID NO: 187355 - DNA, 25 bp, Canis familiaris
tcataagtccccactgttggtcttt

SEQ ID NO: 187356 - DNA, 25 bp, Canis familiaris
tcagggatccctaaatttcctcttt

SEQ ID NO: 187357 - DNA, 25 bp, Canis familiaris
tcagggacctcacatatttctttct

SEQ ID NO: 187358 - DNA, 25 bp, Canis familiaris
tcagctaaacctcacattgctttgt

SEQ ID NO: 187359 - DNA, 25 bp, Canis familiaris
tcaggacgacgctgtcatttttcgc

SEQ ID NO: 187360 - DNA, 25 bp, Canis familiaris
tcaggacatgactacattctctttt

SEQ ID NO: 187361 - DNA, 25 bp, Canis familiaris
tcagatatgggttcactccttcctt

SEQ ID NO: 187362 - DNA, 25 bp, Canis familiaris
tcagaggaggtcagctgtcttcact

SEQ ID NO: 187363 - DNA, 25 bp, Canis familiaris
tcatggtcaggaagggtttagggga

SEQ ID NO: 187364 - DNA, 25 bp, Canis familiaris
tcttctcggaagggccacttgggcc

SEQ ID NO: 187365 - DNA, 25 bp, Canis familiaris
tcttcctgaaggtgcccatggggca

SEQ ID NO: 187366 - DNA, 25 bp, Canis familiaris
tcttccggaggagtacctagtgagc

SEQ ID NO: 187367 - DNA, 25 bp, Canis familiaris
tcttccaggagcgagatccctccaa

SEQ ID NO: 187368 - DNA, 25 bp, Canis familiaris
tcttggaggagggctctgccccaga

SEQ ID NO: 187369 - DNA, 25 bp, Canis familiaris
tcttcggcaggggttcccaggacaa

SEQ ID NO: 187370 - DNA, 25 bp, Canis familiaris
tcttccccactgattccagcagtga

SEQ ID NO: 187371 - DNA, 25 bp, Canis familiaris
tcttggcgcagaggtttccgcgctg

SEQ ID NO: 187372 - DNA, 25 bp, Canis familiaris
tcttgggaaaggagcactgatgatg

SEQ ID NO: 187373 - DNA, 25 bp, Canis familiaris
tcttcggggagaagagccgaatgta

SEQ ID NO: 187374 - DNA, 25 bp, Canis familiaris
tcatggccggattaaaccaaaaaag

SEQ ID NO: 187375 - DNA, 25 bp, Canis familiaris
tcatggggtggggaagcaagaaaaa

SEQ ID NO: 187376 - DNA, 25 bp, Canis familiaris
tcatgaagctggccccggaaagaac

SEQ ID NO: 187377 - DNA, 25 bp, Canis familiaris
tcagttggcccctggcagaaggacg

SEQ ID NO: 187378 - DNA, 25 bp, Canis familiaris
tcagaccaacccaggcagaaggctc

SEQ ID NO: 187379 - DNA, 25 bp, Canis familiaris
tcttcccactccaggatgaggcctg

SEQ ID NO: 187380 - DNA, 25 bp, Canis familiaris
tcttcctatccagcaggcaggtggc

SEQ ID NO: 187381 - DNA, 25 bp, Canis familiaris
tcttccatcctgtgtggcatggtgg

SEQ ID NO: 187382 - DNA, 25 bp, Canis familiaris
tcttccaccattatctgctagattg

SEQ ID NO: 187383 - DNA, 25 bp, Canis familiaris
tcttctacaactacctgtcacattt

SEQ ID NO: 187384 - DNA, 25 bp, Canis familiaris
tcttcccaacttccaatgatctttc

SEQ ID NO: 187385 - DNA, 25 bp, Canis familiaris
tcttccatgaagctactgagtttta

SEQ ID NO: 187386 - DNA, 25 bp, Canis familiaris
tcttccatctatcaactggcattcc

SEQ ID NO: 187387 - DNA, 25 bp, Canis familiaris
tcttcgcctatatatctgctcttgg

SEQ ID NO: 187388 - DNA, 25 bp, Canis familiaris
tcttctctgatttgaatggttgggg

SEQ ID NO: 187389 - DNA, 25 bp, Canis familiaris
tcttctctactccacatgtattgta

SEQ ID NO: 187390 - DNA, 25 bp, Canis familiaris
tcttcccacccattctatatatata

SEQ ID NO: 187391 - DNA, 25 bp, Canis familiaris
tcttctcacccttctcataagataa

SEQ ID NO: 187392 - DNA, 25 bp, Canis familiaris
tcttccaccaacgtcatgcgatgaa

SEQ ID NO: 187393 - DNA, 25 bp, Canis familiaris
tcttcctggagggtcatcagcagca

SEQ ID NO: 187394 - DNA, 25 bp, Canis familiaris
tcttccgcgagttggctgaggagaa

SEQ ID NO: 187395 - DNA, 25 bp, Canis familiaris
tcttcctctagtacctgggtgagct

SEQ ID NO: 187396 - DNA, 25 bp, Canis familiaris
tcttccttcagcatcctgttgagga

SEQ ID NO: 187397 - DNA, 25 bp, Canis familiaris
tcttccttcatcacctgattgcaga

SEQ ID NO: 187398 - DNA, 25 bp, Canis familiaris
tcttccattcttccctggtgaaaat

SEQ ID NO: 187399 - DNA, 25 bp, Canis familiaris
tcattccctttgcctgtggtgcaaa

SEQ ID NO: 187400 - DNA, 25 bp, Canis familiaris
tcatcacccttttctgggtccaaag

SEQ ID NO: 187401 - DNA, 25 bp, Canis familiaris
tcatcactcctttggtagagcccac

SEQ ID NO: 187402 - DNA, 25 bp, Canis familiaris
tcatatttctattttacatcaaaga

SEQ ID NO: 187403 - DNA, 25 bp, Canis familiaris
tcattttatctcactggcttaagac

SEQ ID NO: 187404 - DNA, 25 bp, Canis familiaris
tcattttatctcactggcttaagac

SEQ ID NO: 187405 - DNA, 25 bp, Canis familiaris
tcttgttctctccacggtgtgaatg

SEQ ID NO: 187406 - DNA, 25 bp, Canis familiaris
tcttgcgggctctacgagtgtggag

SEQ ID NO: 187407 - DNA, 25 bp, Canis familiaris
tcttgggagcctttgaatggactga

SEQ ID NO: 187408 - DNA, 25 bp, Canis familiaris
tcttgggatcctgggactgagcccc

SEQ ID NO: 187409 - DNA, 25 bp, Canis familiaris
tcttgccgtgactggataggacccc

SEQ ID NO: 187410 - DNA, 25 bp, Canis familiaris
tcatccgcggagccaaaagcgaccc

SEQ ID NO: 187411 - DNA, 25 bp, Canis familiaris
tcatctccaactccaaagaccagac

SEQ ID NO: 187412 - DNA, 25 bp, Canis familiaris
tcttccaattcctatgctatccaga

SEQ ID NO: 187413 - DNA, 25 bp, Canis familiaris
tcagtgcacgacgacgtcgcaccag

SEQ ID NO: 187414 - DNA, 25 bp, Canis familiaris
tcatgccactgaatacgttgaaaaa

SEQ ID NO: 187415 - DNA, 25 bp, Canis familiaris
tcttgatgctttactgtgatgcaaa

SEQ ID NO: 187416 - DNA, 25 bp, Canis familiaris
tcatcgtggcttgctgggccagaac

SEQ ID NO: 187417 - DNA, 25 bp, Canis familiaris
tcatctgtgagctccatggaccaag

SEQ ID NO: 187418 - DNA, 25 bp, Canis familiaris
tcatctgcggcagctacgacagcaa

SEQ ID NO: 187419 - DNA, 25 bp, Canis familiaris
tcattgctcctcctgagcgcaagta

SEQ ID NO: 187420 - DNA, 25 bp, Canis familiaris
tcttgctgtctcttggctgcagaat

SEQ ID NO: 187421 - DNA, 25 bp, Canis familiaris
tcatctgcttgtccatctgtgaaat

SEQ ID NO: 187422 - DNA, 25 bp, Canis familiaris
tcatgcagctgtacagcgctcggca

SEQ ID NO: 187423 - DNA, 25 bp, Canis familiaris
tcatcagaatcccagcctatcagac

SEQ ID NO: 187424 - DNA, 25 bp, Canis familiaris
tcatcaggacgtgcctacaggtgcc

SEQ ID NO: 187425 - DNA, 25 bp, Canis familiaris
tcactgcccgtcgcgacgggacaag

SEQ ID NO: 187426 - DNA, 25 bp, Canis familiaris
tcatctccgagggccgggggaagac

SEQ ID NO: 187427 - DNA, 25 bp, Canis familiaris
tcatctctagccccgtgggggataa

SEQ ID NO: 187428 - DNA, 25 bp, Canis familiaris
tcaccttccggggggcgcggaagtg

SEQ ID NO: 187429 - DNA, 25 bp, Canis familiaris
tcaccgttacgggtcgtggtaggtg

SEQ ID NO: 187430 - DNA, 25 bp, Canis familiaris
tcatccgcttgatgcgcgtggcggt

SEQ ID NO: 187431 - DNA, 25 bp, Canis familiaris
tcttcgtgcagatggcggtgctggt

SEQ ID NO: 187432 - DNA, 25 bp, Canis familiaris
tcttcctggagctgatggccgagct

SEQ ID NO: 187433 - DNA, 25 bp, Canis familiaris
tcattctctgggtaaatggccagta

SEQ ID NO: 187434 - DNA, 25 bp, Canis familiaris
tcatcgccgaggtcaaggcccagta

SEQ ID NO: 187435 - DNA, 25 bp, Canis familiaris
tcatcgccatcaagccggacggcgt

SEQ ID NO: 187436 - DNA, 25 bp, Canis familiaris
tcttgctcatcttcgtgtgacgacg

SEQ ID NO: 187437 - DNA, 25 bp, Canis familiaris
tcttgcatcatttccttgaggtcat

SEQ ID NO: 187438 - DNA, 25 bp, Canis familiaris
tcttgccaagtcctgtgtgtgtgtg

SEQ ID NO: 187439 - DNA, 25 bp, Canis familiaris
tcttccaagctccaggacagcagtc

SEQ ID NO: 187440 - DNA, 25 bp, Canis familiaris
tcattacacacccgtggcatcagac

SEQ ID NO: 187441 - DNA, 25 bp, Canis familiaris
tcttggcacacacggggacacagca

SEQ ID NO: 187442 - DNA, 25 bp, Canis familiaris
tcattgcacccaagggctatgccgc

SEQ ID NO: 187443 - DNA, 25 bp, Canis familiaris
tcatcactccacactgactatggcc

SEQ ID NO: 187444 - DNA, 25 bp, Canis familiaris
tcattttcactttcctatgctgcaa

SEQ ID NO: 187445 - DNA, 25 bp, Canis familiaris
tcatgcagtatctatttcccagcga

SEQ ID NO: 187446 - DNA, 25 bp, Canis familiaris
tcatagttgccaaccagcacacggt

SEQ ID NO: 187447 - DNA, 25 bp, Canis familiaris
tcatatgctctcgaaagatcctttt

SEQ ID NO: 187448 - DNA, 25 bp, Canis familiaris
tcattactcccatatcatcctagtg

SEQ ID NO: 187449 - DNA, 25 bp, Canis familiaris
tcattattcctcgtgaacccattag

SEQ ID NO: 187450 - DNA, 25 bp, Canis familiaris
tcttcctaatttctcgctcttgaga

SEQ ID NO: 187451 - DNA, 25 bp, Canis familiaris
tcttcctggcacatttctacttgga

SEQ ID NO: 187452 - DNA, 25 bp, Canis familiaris
tcagtcctccaaattttgccttaca

SEQ ID NO: 187453 - DNA, 25 bp, Canis familiaris
tagtcttggaacttcttttaaagat

SEQ ID NO: 187454 - DNA, 25 bp, Canis familiaris
taggttgagaagttttgtacagaga

SEQ ID NO: 187455 - DNA, 25 bp, Canis familiaris
tcatgtttgaaaccttttattgaac

SEQ ID NO: 187456 - DNA, 25 bp, Canis familiaris
tcattgttgtaccaccttacatgaa

SEQ ID NO: 187457 - DNA, 25 bp, Canis familiaris
taatattgtaggcccctacggcctc

SEQ ID NO: 187458 - DNA, 25 bp, Canis familiaris
tcagagtaaagtccctatacgcccc

SEQ ID NO: 187459 - DNA, 25 bp, Canis familiaris
tcagagggaacagcctatctccccg

SEQ ID NO: 187460 - DNA, 25 bp, Canis familiaris
tcagggtggtgtgtccacaccccga

SEQ ID NO: 187461 - DNA, 25 bp, Canis familiaris
tcatgtttgagaccttcaacacccc

SEQ ID NO: 187462 - DNA, 25 bp, Canis familiaris
tcatgtctgtgcgcactgtctaagc

SEQ ID NO: 187463 - DNA, 25 bp, Canis familiaris
tcattcttcccatgtctgaaaggta

SEQ ID NO: 187464 - DNA, 25 bp, Canis familiaris
tcatccttcacttgagtctgctgaa

SEQ ID NO: 187465 - DNA, 25 bp, Canis familiaris
tcatccctgacaaagcctgataacg

SEQ ID NO: 187466 - DNA, 25 bp, Canis familiaris
tcatcggtgcctatactgtaacaat

SEQ ID NO: 187467 - DNA, 25 bp, Canis familiaris
tcacgaggtgggtccggaacattcc

SEQ ID NO: 187468 - DNA, 25 bp, Canis familiaris
tcactgaagggacccagtcccttcc

SEQ ID NO: 187469 - DNA, 25 bp, Canis familiaris
tcacattcggggcccgtacgttcac

SEQ ID NO: 187470 - DNA, 25 bp, Canis familiaris
tcatcaccagggcgcaggtactgtc

SEQ ID NO: 187471 - DNA, 25 bp, Canis familiaris
tcatcccaggtgtagaagtattctc

SEQ ID NO: 187472 - DNA, 25 bp, Canis familiaris
tcatgcccaagtcaacatgggtctg

SEQ ID NO: 187473 - DNA, 25 bp, Canis familiaris
tcacagctcaagtacacctgggcgc

SEQ ID NO: 187474 - DNA, 25 bp, Canis familiaris
tcacggacggacctcgtgggaaaat

SEQ ID NO: 187475 - DNA, 25 bp, Canis familiaris
tcaggaagggccccactgggaggaa

SEQ ID NO: 187476 - DNA, 25 bp, Canis familiaris
tcaggacccggacacgggtggccat

SEQ ID NO: 187477 - DNA, 25 bp, Canis familiaris
tcaggaaaaggagacgcggggtcac

SEQ ID NO: 187478 - DNA, 25 bp, Canis familiaris
tcaggaaggaggggtgccgggtgcc

SEQ ID NO: 187479 - DNA, 25 bp, Canis familiaris
tcatttggaggggagccgctgggac

SEQ ID NO: 187480 - DNA, 25 bp, Canis familiaris
tcatcggggagccggccagatgagg

SEQ ID NO: 187481 - DNA, 25 bp, Canis familiaris
tcacgctgggagcgggggaagggac

SEQ ID NO: 187482 - DNA, 25 bp, Canis familiaris
tcaccagggacctgtggggggtgtc

SEQ ID NO: 187483 - DNA, 25 bp, Canis familiaris
tcacggggaacacggagccttggtg

SEQ ID NO: 187484 - DNA, 25 bp, Canis familiaris
tcaccagggaaccagtctcagcctg

SEQ ID NO: 187485 - DNA, 25 bp, Canis familiaris
tcatccagtgacacggtcaccctga

SEQ ID NO: 187486 - DNA, 25 bp, Canis familiaris
tcattcacttcctggtcaaatccat

SEQ ID NO: 187487 - DNA, 25 bp, Canis familiaris
tcatcccattcctgagtgacactga

SEQ ID NO: 187488 - DNA, 25 bp, Canis familiaris
tcatctctcatatctcaagtgagtc

SEQ ID NO: 187489 - DNA, 25 bp, Canis familiaris
tcatcatctgcaactccatcattga

SEQ ID NO: 187490 - DNA, 25 bp, Canis familiaris
tcatcactgcagcatttctctgact

SEQ ID NO: 187491 - DNA, 25 bp, Canis familiaris
tcatcactctggattcgctgaagtt

SEQ ID NO: 187492 - DNA, 25 bp, Canis familiaris
tcataatctgccaatcatcgccaag

SEQ ID NO: 187493 - DNA, 25 bp, Canis familiaris
tcatattcagcccatcacgctgtgg

SEQ ID NO: 187494 - DNA, 25 bp, Canis familiaris
tcatattcagcccatcacgctgtgg

SEQ ID NO: 187495 - DNA, 25 bp, Canis familiaris
tcagattgagtcctaccagtgggcc

SEQ ID NO: 187496 - DNA, 25 bp, Canis familiaris
tagagctaatacatgccgacgggcg

SEQ ID NO: 187497 - DNA, 25 bp, Canis familiaris
tagagctaatacatgccgacgggcg

SEQ ID NO: 187498 - DNA, 25 bp, Canis familiaris
taagcccaatatcccaaagggcggc

SEQ ID NO: 187499 - DNA, 25 bp, Canis familiaris
tcaaccagcaacacaaggggaatgg

SEQ ID NO: 187500 - DNA, 25 bp, Canis familiaris
tcatcctagccaacctactggaaat

SEQ ID NO: 187501 - DNA, 25 bp, Canis familiaris
tcatcctcccacctattatgtaaat

SEQ ID NO: 187502 - DNA, 25 bp, Canis familiaris
tcatccttaccctttagatgtattt

SEQ ID NO: 187503 - DNA, 25 bp, Canis familiaris
tcattggtaccaagttagtatctat

SEQ ID NO: 187504 - DNA, 25 bp, Canis familiaris
tcatttgtatccaaggtgctgaatc

SEQ ID NO: 187505 - DNA, 25 bp, Canis familiaris
tcattagctttcaagggctctcaca

SEQ ID NO: 187506 - DNA, 25 bp, Canis familiaris
tcattagctattaggacactataga

SEQ ID NO: 187507 - DNA, 25 bp, Canis familiaris
tcaggacttttgcaactgttgaccc

SEQ ID NO: 187508 - DNA, 25 bp, Canis familiaris
taagacttcctacactgggatccct

SEQ ID NO: 187509 - DNA, 25 bp, Canis familiaris
tacgttctactactcagtggggtcc

SEQ ID NO: 187510 - DNA, 25 bp, Canis familiaris
taagcttctgtatgtggtaatttcc

SEQ ID NO: 187511 - DNA, 25 bp, Canis familiaris
tcatacctttatcttgtagccttcc

SEQ ID NO: 187512 - DNA, 25 bp, Canis familiaris
tcatacattctcatacatttacctt

SEQ ID NO: 187513 - DNA, 25 bp, Canis familiaris
tcatacattctcatacatttacctt

SEQ ID NO: 187514 - DNA, 25 bp, Canis familiaris
tcatttttagttttttccattatat

SEQ ID NO: 187515 - DNA, 25 bp, Canis familiaris
tcttgttttctttggtcccactata

SEQ ID NO: 187516 - DNA, 25 bp, Canis familiaris
tcattccttctgggggtcccaaatg

SEQ ID NO: 187517 - DNA, 25 bp, Canis familiaris
tattttgttggttttcggaactgag

SEQ ID NO: 187518 - DNA, 25 bp, Canis familiaris
tattttgttgttttcggaactgagg

SEQ ID NO: 187519 - DNA, 25 bp, Canis familiaris
tcattttatgttttccggcaaggat

SEQ ID NO: 187520 - DNA, 25 bp, Canis familiaris
tcttgtttgattatgccccaatgga

SEQ ID NO: 187521 - DNA, 25 bp, Canis familiaris
ttcccattgacgacgacccagggca

SEQ ID NO: 187522 - DNA, 25 bp, Canis familiaris
tcttccactgaggtctgacccggag

SEQ ID NO: 187523 - DNA, 25 bp, Canis familiaris
tcatccgcctgggatatgaccccat

SEQ ID NO: 187524 - DNA, 25 bp, Canis familiaris
tcattcgttgtgacagcaacccctt

SEQ ID NO: 187525 - DNA, 25 bp, Canis familiaris
tcatctcaattttcacaacaaacct

SEQ ID NO: 187526 - DNA, 25 bp, Canis familiaris
tcaaattgcgggtcaacataatcct

SEQ ID NO: 187527 - DNA, 25 bp, Canis familiaris
tcagccatctggcagtacctaacct

SEQ ID NO: 187528 - DNA, 25 bp, Canis familiaris
tcatcaccggtggtacttttcctta

SEQ ID NO: 187529 - DNA, 25 bp, Canis familiaris
tcattcctgagtgtgctttttcctc

SEQ ID NO: 187530 - DNA, 25 bp, Canis familiaris
tcttcctggcttgctgtgtttgtat

SEQ ID NO: 187531 - DNA, 25 bp, Canis familiaris
tcttcctgcgctacagatgttcatg

SEQ ID NO: 187532 - DNA, 25 bp, Canis familiaris
tcttgcctctgcttcaggttatttt

SEQ ID NO: 187533 - DNA, 25 bp, Canis familiaris
tcttgcctccttccagaaatatgtc

SEQ ID NO: 187534 - DNA, 25 bp, Canis familiaris
tcttcctcctttttaataggggcag

SEQ ID NO: 187535 - DNA, 25 bp, Canis familiaris
tcatccccactaagtttaagggcca

SEQ ID NO: 187536 - DNA, 25 bp, Canis familiaris
tcatcacccctgaagaccggggagc

SEQ ID NO: 187537 - DNA, 25 bp, Canis familiaris
tcatcaacccgaaagcctggacagc

SEQ ID NO: 187538 - DNA, 25 bp, Canis familiaris
tcatgaacccataagtcctgacacc

SEQ ID NO: 187539 - DNA, 25 bp, Canis familiaris
tcatgttcgattccgccattgacaa

SEQ ID NO: 187540 - DNA, 25 bp, Canis familiaris
tcatggacgtgtcagcacattaagg

SEQ ID NO: 187541 - DNA, 25 bp, Canis familiaris
tcatgttccttgtagccctaagtga

SEQ ID NO: 187542 - DNA, 25 bp, Canis familiaris
tcagtctactaatccttaattacca

SEQ ID NO: 187543 - DNA, 25 bp, Canis familiaris
tcagtccctgaatcctatgaacctc

SEQ ID NO: 187544 - DNA, 25 bp, Canis familiaris
tcatacagggaagcctgagaagccc

SEQ ID NO: 187545 - DNA, 25 bp, Canis familiaris
tcataccaggacacttacaacccca

SEQ ID NO: 187546 - DNA, 25 bp, Canis familiaris
taaccactgtatgtaaccaaccctt

SEQ ID NO: 187547 - DNA, 25 bp, Canis familiaris
taaccggctaattataccaggccct

SEQ ID NO: 187548 - DNA, 25 bp, Canis familiaris
taacctggtaattattcccattgcc

SEQ ID NO: 187549 - DNA, 25 bp, Canis familiaris
taacgttataaaaatcccaatgccg

SEQ ID NO: 187550 - DNA, 25 bp, Canis familiaris
taaccattatggctttcccaatccg

SEQ ID NO: 187551 - DNA, 25 bp, Canis familiaris
tcatagacttatttttctctcccag

SEQ ID NO: 187552 - DNA, 25 bp, Canis familiaris
tcatgtaggctttttagttcccaaa

SEQ ID NO: 187553 - DNA, 25 bp, Canis familiaris
tcattatagtctcttcatttccctt

SEQ ID NO: 187554 - DNA, 25 bp, Canis familiaris
tcatcgtgagggcttgctggccatc

SEQ ID NO: 187555 - DNA, 25 bp, Canis familiaris
tcatttaaggaggcgctggcaagcc

SEQ ID NO: 187556 - DNA, 25 bp, Canis familiaris
tcatgatctatacgcaaccggaacc

SEQ ID NO: 187557 - DNA, 25 bp, Canis familiaris
tcatgatctatacgcaaccggaacc

SEQ ID NO: 187558 - DNA, 25 bp, Canis familiaris
tcatcagtcctgccgaacggaacct

SEQ ID NO: 187559 - DNA, 25 bp, Canis familiaris
tcatcagtcactggggacagctccc

SEQ ID NO: 187560 - DNA, 25 bp, Canis familiaris
tcatcagccacaggaggacctcgtg

SEQ ID NO: 187561 - DNA, 25 bp, Canis familiaris
tcatcaactgctgcgttccaagtgt

SEQ ID NO: 187562 - DNA, 25 bp, Canis familiaris
tcataatccgacgatgtagaagggt

SEQ ID NO: 187563 - DNA, 25 bp, Canis familiaris
tcatctatcacgggtaaacaagagt

SEQ ID NO: 187564 - DNA, 25 bp, Canis familiaris
tcatcttcaccttcctaaaagtgcc

SEQ ID NO: 187565 - DNA, 25 bp, Canis familiaris
tttgtcatcgttccaaaccgtgtct

SEQ ID NO: 187566 - DNA, 25 bp, Canis familiaris
tcttgcttcttgtaaaagcccgatc

SEQ ID NO: 187567 - DNA, 25 bp, Canis familiaris
tcttgctggatttaaaccaccacct

SEQ ID NO: 187568 - DNA, 25 bp, Canis familiaris
tcttgattgatttaacaacgcccga

SEQ ID NO: 187569 - DNA, 25 bp, Canis familiaris
tcttgctctgattataatgcccgtg

SEQ ID NO: 187570 - DNA, 25 bp, Canis familiaris
tcttgccctctgtaatgacttgtgt

SEQ ID NO: 187571 - DNA, 25 bp, Canis familiaris
tcatatgcccttcaacagctgaatg

SEQ ID NO: 187572 - DNA, 25 bp, Canis familiaris
tcagtcccttaattcagtgcacatc

SEQ ID NO: 187573 - DNA, 25 bp, Canis familiaris
tcattcaccagtcattgcagtcacc

SEQ ID NO: 187574 - DNA, 25 bp, Canis familiaris
tcattcccacatctgcatggtagcc

SEQ ID NO: 187575 - DNA, 25 bp, Canis familiaris
tcattctcgcattgggatggatccc

SEQ ID NO: 187576 - DNA, 25 bp, Canis familiaris
tcatcttccacgatttatcagccaa

SEQ ID NO: 187577 - DNA, 25 bp, Canis familiaris
tcatttcatcccaattattcaacaa

SEQ ID NO: 187578 - DNA, 25 bp, Canis familiaris
tcattgtcatctcctactatttcat

SEQ ID NO: 187579 - DNA, 25 bp, Canis familiaris
tcatatgtatcttctaattttcttg

SEQ ID NO: 187580 - DNA, 25 bp, Canis familiaris
tcatggaatagatagattgtttaga

SEQ ID NO: 187581 - DNA, 25 bp, Canis familiaris
tcatgtccaaaatgttgatctatta

SEQ ID NO: 187582 - DNA, 25 bp, Canis familiaris
tcattactcaattctgtttctatat

SEQ ID NO: 187583 - DNA, 25 bp, Canis familiaris
tcttggctgctattcgttcgtatgc

SEQ ID NO: 187584 - DNA, 25 bp, Canis familiaris
tcattggcttttcgttggtgctggg

SEQ ID NO: 187585 - DNA, 25 bp, Canis familiaris
tcatttttcttttgggtgtgtgtgt

SEQ ID NO: 187586 - DNA, 25 bp, Canis familiaris
tcattctgtctcattggggctttta

SEQ ID NO: 187587 - DNA, 25 bp, Canis familiaris
tcttgcgtctcttagggatgttcca

SEQ ID NO: 187588 - DNA, 25 bp, Canis familiaris
tcttggctcctattggggtcatcac

SEQ ID NO: 187589 - DNA, 25 bp, Canis familiaris
tcttggcctttcagagttgctacaa

SEQ ID NO: 187590 - DNA, 25 bp, Canis familiaris
tcattttcttacactttgctataaa

SEQ ID NO: 187591 - DNA, 25 bp, Canis familiaris
tcattttgcgtacagctcttgctaa

SEQ ID NO: 187592 - DNA, 25 bp, Canis familiaris
tcatttcaagtaccacctcctaata

SEQ ID NO: 187593 - DNA, 25 bp, Canis familiaris
tcatttcaatacccactctcataat

SEQ ID NO: 187594 - DNA, 25 bp, Canis familiaris
tcattggcaattactattcatctga

SEQ ID NO: 187595 - DNA, 25 bp, Canis familiaris
tcttgtgcactatctactatctcac

SEQ ID NO: 187596 - DNA, 25 bp, Canis familiaris
tcttggcccatatttctgattcctt

SEQ ID NO: 187597 - DNA, 25 bp, Canis familiaris
tcattgcagctaataaagctgatag

SEQ ID NO: 187598 - DNA, 25 bp, Canis familiaris
tcattgagctctacgctgagttcag

SEQ ID NO: 187599 - DNA, 25 bp, Canis familiaris
tcatacgtgtaccagagttctctcc

SEQ ID NO: 187600 - DNA, 25 bp, Canis familiaris
tcattttgtcaggtgccatttcttc

SEQ ID NO: 187601 - DNA, 25 bp, Canis familiaris
tcatcattctggggcgctattttgc

SEQ ID NO: 187602 - DNA, 25 bp, Canis familiaris
tcattccggcaacggtcctgatgca

SEQ ID NO: 187603 - DNA, 25 bp, Canis familiaris
tcattcctggaatatgtgctcttca

SEQ ID NO: 187604 - DNA, 25 bp, Canis familiaris
tcattcctgttacctgcatatctta

SEQ ID NO: 187605 - DNA, 25 bp, Canis familiaris
tcattcctgcctaatctcatcagag

SEQ ID NO: 187606 - DNA, 25 bp, Canis familiaris
tcattcctgaccttcttctgaaaag

SEQ ID NO: 187607 - DNA, 25 bp, Canis familiaris
tcatggcctaacactttgaagagag

SEQ ID NO: 187608 - DNA, 25 bp, Canis familiaris
tcatggcctagtgacctgtcatgga

SEQ ID NO: 187609 - DNA, 25 bp, Canis familiaris
tcattcccagtggcttgtcttggag

SEQ ID NO: 187610 - DNA, 25 bp, Canis familiaris
tcatttcggggcatgcactttgtca

SEQ ID NO: 187611 - DNA, 25 bp, Canis familiaris
tcatctgtcggactctttctttgta

SEQ ID NO: 187612 - DNA, 25 bp, Canis familiaris
tcatcagccggattttgttattgat

SEQ ID NO: 187613 - DNA, 25 bp, Canis familiaris
tcatcagccggattttgttattgat

SEQ ID NO: 187614 - DNA, 25 bp, Canis familiaris
tcatctgccctggtttttagtcttt

SEQ ID NO: 187615 - DNA, 25 bp, Canis familiaris
tcatcatgaggtactttttcctttt

SEQ ID NO: 187616 - DNA, 25 bp, Canis familiaris
tcagggtttcttatgcccttcattc

SEQ ID NO: 187617 - DNA, 25 bp, Canis familiaris
tcttggtttctgtgcaggccttgat

SEQ ID NO: 187618 - DNA, 25 bp, Canis familiaris
tcttgcttttggcgcccacagtgat

SEQ ID NO: 187619 - DNA, 25 bp, Canis familiaris
tcatccctttggcagtctgacaggg

SEQ ID NO: 187620 - DNA, 25 bp, Canis familiaris
tcatgacttttgcaggttacacagt

SEQ ID NO: 187621 - DNA, 25 bp, Canis familiaris
tcatgttttttccatgtgtacctgt

SEQ ID NO: 187622 - DNA, 25 bp, Canis familiaris
tcatttgcttttctgaagtctctgt

SEQ ID NO: 187623 - DNA, 25 bp, Canis familiaris
tcatcttttcttttacagttctgca

SEQ ID NO: 187624 - DNA, 25 bp, Canis familiaris
tcatctttcctttgaaaccttggcc

SEQ ID NO: 187625 - DNA, 25 bp, Canis familiaris
tcatgatttcctaaagtacctggca

SEQ ID NO: 187626 - DNA, 25 bp, Canis familiaris
tcatttatcctaaccaaactgccca

SEQ ID NO: 187627 - DNA, 25 bp, Canis familiaris
tcatgatttccacaccaatttccat

SEQ ID NO: 187628 - DNA, 25 bp, Canis familiaris
tcatggtcccaggacccttctgagt

SEQ ID NO: 187629 - DNA, 25 bp, Canis familiaris
tcaggccccaggactagcctggaag

SEQ ID NO: 187630 - DNA, 25 bp, Canis familiaris
tcacggaccagtacttcgggaagac

SEQ ID NO: 187631 - DNA, 25 bp, Canis familiaris
tcttggccagcacttttcgggaata

SEQ ID NO: 187632 - DNA, 25 bp, Canis familiaris
tcattagggcattttctcgtgtgaa

SEQ ID NO: 187633 - DNA, 25 bp, Canis familiaris
tcatcgacgtcttttcataaccaca

SEQ ID NO: 187634 - DNA, 25 bp, Canis familiaris
tcatcgaccctgatattgtactccc

SEQ ID NO: 187635 - DNA, 25 bp, Canis familiaris
tcatggaaccagatcctggacccct

SEQ ID NO: 187636 - DNA, 25 bp, Canis familiaris
tcagaaacacagacaggggaggcct

SEQ ID NO: 187637 - DNA, 25 bp, Canis familiaris
tcagccgataaacaggaagtgcctc

SEQ ID NO: 187638 - DNA, 25 bp, Canis familiaris
tcactcgtaattcacgttctgcctt

SEQ ID NO: 187639 - DNA, 25 bp, Canis familiaris
tactggaccaattaagtttgccttg

SEQ ID NO: 187640 - DNA, 25 bp, Canis familiaris
tcataaagccgtttattcttccttg

SEQ ID NO: 187641 - DNA, 25 bp, Canis familiaris
tcatctaaccgtttatctcctcata

SEQ ID NO: 187642 - DNA, 25 bp, Canis familiaris
tcatatcagactatacttccccaag

SEQ ID NO: 187643 - DNA, 25 bp, Canis familiaris
tcataaactgtctcttctttctgca

SEQ ID NO: 187644 - DNA, 25 bp, Canis familiaris
tcttgataccatttgcttttgtctc

SEQ ID NO: 187645 - DNA, 25 bp, Canis familiaris
tcttgtacgtgatgtctttgagctc

SEQ ID NO: 187646 - DNA, 25 bp, Canis familiaris
tcttgtggcctgtttgctttgagtg

SEQ ID NO: 187647 - DNA, 25 bp, Canis familiaris
tcttgttcctgcttttctgagggga

SEQ ID NO: 187648 - DNA, 25 bp, Canis familiaris
tcttgttccgatactctctgagaag

SEQ ID NO: 187649 - DNA, 25 bp, Canis familiaris
tcattcttcccatctcatgtaagag

SEQ ID NO: 187650 - DNA, 25 bp, Canis familiaris
tcatttttcacatgctaaagctggc

SEQ ID NO: 187651 - DNA, 25 bp, Canis familiaris
tagttcagtctcagtaaagtaccat

SEQ ID NO: 187652 - DNA, 25 bp, Canis familiaris
taggccccctggcaaagttcaagga

SEQ ID NO: 187653 - DNA, 25 bp, Canis familiaris
tcatgcacccccaggagaatttaat

SEQ ID NO: 187654 - DNA, 25 bp, Canis familiaris
tcatacctccctggaagatttctga

SEQ ID NO: 187655 - DNA, 25 bp, Canis familiaris
tcatacctaaatccgagcacctcga

SEQ ID NO: 187656 - DNA, 25 bp, Canis familiaris
tcatgacgtagatacttgacctgtt

SEQ ID NO: 187657 - DNA, 25 bp, Canis familiaris
tcatgaagccaggaactctgtacgt

SEQ ID NO: 187658 - DNA, 25 bp, Canis familiaris
tcagaagccaagaccacttcctgtt

SEQ ID NO: 187659 - DNA, 25 bp, Canis familiaris
tcaggaccagaaggggatccttttt

SEQ ID NO: 187660 - DNA, 25 bp, Canis familiaris
tcaggcaatagatggggggcatcct

SEQ ID NO: 187661 - DNA, 25 bp, Canis familiaris
tcatgcagaccgggggatcggccac

SEQ ID NO: 187662 - DNA, 25 bp, Canis familiaris
tcatcatggccgtgggcatcacgac

SEQ ID NO: 187663 - DNA, 25 bp, Canis familiaris
tcttggcactgaggacggcacgagc

SEQ ID NO: 187664 - DNA, 25 bp, Canis familiaris
tcttggagcagaggcgggccgagct

SEQ ID NO: 187665 - DNA, 25 bp, Canis familiaris
tcatttgtatacctggagcccactg

SEQ ID NO: 187666 - DNA, 25 bp, Canis familiaris
tcattgcattcccctgtgggacacg

SEQ ID NO: 187667 - DNA, 25 bp, Canis familiaris
tcatgagcttcccagggtggcagca

SEQ ID NO: 187668 - DNA, 25 bp, Canis familiaris
tcatgtcttctccatgtgtacctgt

SEQ ID NO: 187669 - DNA, 25 bp, Canis familiaris
tcatgtcttctccatgtgtacctgt

SEQ ID NO: 187670 - DNA, 25 bp, Canis familiaris
tcaccatggtcattgtgctcacatc

SEQ ID NO: 187671 - DNA, 25 bp, Canis familiaris
tcaacatagtgtcctgaacatcagt

SEQ ID NO: 187672 - DNA, 25 bp, Canis familiaris
tcatccacagtggctctaagcatac

SEQ ID NO: 187673 - DNA, 25 bp, Canis familiaris
tcatccaaatgacctaattaccgtt

SEQ ID NO: 187674 - DNA, 25 bp, Canis familiaris
tcatccgactggtggtatacggata

SEQ ID NO: 187675 - DNA, 25 bp, Canis familiaris
tcatccaagtggaggttcctacaga

SEQ ID NO: 187676 - DNA, 25 bp, Canis familiaris
tcatctacagtgcaaggtacctcag

SEQ ID NO: 187677 - DNA, 25 bp, Canis familiaris
tcattgacactgatttgtacacaga

SEQ ID NO: 187678 - DNA, 25 bp, Canis familiaris
tcatctgcttcatgtgttttcaaga

SEQ ID NO: 187679 - DNA, 25 bp, Canis familiaris
tcatcactggacttcttcttcaata

SEQ ID NO: 187680 - DNA, 25 bp, Canis familiaris
tcatcctgcggcgttatcttcaaaa

SEQ ID NO: 187681 - DNA, 25 bp, Canis familiaris
tcatgcctcaccttttttaactagg

SEQ ID NO: 187682 - DNA, 25 bp, Canis familiaris
tcatcccagccaggtgtttgataat

SEQ ID NO: 187683 - DNA, 25 bp, Canis familiaris
tcatctaagctaggtgtctccatta

SEQ ID NO: 187684 - DNA, 25 bp, Canis familiaris
tcatctgggtacctgtgtcactgtt

SEQ ID NO: 187685 - DNA, 25 bp, Canis familiaris
tcttgggaacttaccatctgtctct

SEQ ID NO: 187686 - DNA, 25 bp, Canis familiaris
tcttgtgagaacttttctccccatc

SEQ ID NO: 187687 - DNA, 25 bp, Canis familiaris
tcatcaggggaccatttcccccatc

SEQ ID NO: 187688 - DNA, 25 bp, Canis familiaris
tcatcaaggtgacaccatcctccaa

SEQ ID NO: 187689 - DNA, 25 bp, Canis familiaris
tcatcgtggatgaactccaccccac

SEQ ID NO: 187690 - DNA, 25 bp, Canis familiaris
tcagcatcggagatttgacccctcg

SEQ ID NO: 187691 - DNA, 25 bp, Canis familiaris
tcactggggttccagaccccacagg

SEQ ID NO: 187692 - DNA, 25 bp, Canis familiaris
tcagtgggacaaagcaaccctacac

SEQ ID NO: 187693 - DNA, 25 bp, Canis familiaris
tcagtacgactataacccagaccta

SEQ ID NO: 187694 - DNA, 25 bp, Canis familiaris
tcatcgtcgacagagacacccagag

SEQ ID NO: 187695 - DNA, 25 bp, Canis familiaris
tcatcagtcaacaattggaccccaa

SEQ ID NO: 187696 - DNA, 25 bp, Canis familiaris
tcatctgtcaatgattttgccccct

SEQ ID NO: 187697 - DNA, 25 bp, Canis familiaris
tcatcttcaaaatggggactcctta

SEQ ID NO: 187698 - DNA, 25 bp, Canis familiaris
tcatctacatcgaggaggcgcaccc

SEQ ID NO: 187699 - DNA, 25 bp, Canis familiaris
tcattgatgtggtgggcgcacccct

SEQ ID NO: 187700 - DNA, 25 bp, Canis familiaris
tcattggtgcaggggcaccagcccc

SEQ ID NO: 187701 - DNA, 25 bp, Canis familiaris
tcttggtcagacctgaactcttcag

SEQ ID NO: 187702 - DNA, 25 bp, Canis familiaris
tcattatgtcattcgtccaacttga

SEQ ID NO: 187703 - DNA, 25 bp, Canis familiaris
tcatgctgtataactgtaaaatctg

SEQ ID NO: 187704 - DNA, 25 bp, Canis familiaris
tcatgtgttttcaagaagagaagta

SEQ ID NO: 187705 - DNA, 25 bp, Canis familiaris
tcatgttctgcaccaaagggaagat

SEQ ID NO: 187706 - DNA, 25 bp, Canis familiaris
tcatcatcttcatcgatgaggtgga

SEQ ID NO: 187707 - DNA, 25 bp, Canis familiaris
tcatcatctacatcgaggaggcgca

SEQ ID NO: 187708 - DNA, 25 bp, Canis familiaris
tcatcgctgacctggtggtgggact

SEQ ID NO: 187709 - DNA, 25 bp, Canis familiaris
tcaggctgcccaggggtgtgggtga

SEQ ID NO: 187710 - DNA, 25 bp, Canis familiaris
tcaggccacctggggcttacagtac

SEQ ID NO: 187711 - DNA, 25 bp, Canis familiaris
tcattacccgctgggctggagaaca

SEQ ID NO: 187712 - DNA, 25 bp, Canis familiaris
tcatcctgcccgacgagggccaaat

SEQ ID NO: 187713 - DNA, 25 bp, Canis familiaris
tcatctctttccatgggccaataaa

SEQ ID NO: 187714 - DNA, 25 bp, Canis familiaris
tcatctcctactctgggcaatcaaa

SEQ ID NO: 187715 - DNA, 25 bp, Canis familiaris
tcatcctggacctgggcaacaacat

SEQ ID NO: 187716 - DNA, 25 bp, Canis familiaris
tcatccatttcctctatgcagacaa

SEQ ID NO: 187717 - DNA, 25 bp, Canis familiaris
tcatccaatacatacactcacatag

SEQ ID NO: 187718 - DNA, 25 bp, Canis familiaris
tcatccctcagattacatccatcta

SEQ ID NO: 187719 - DNA, 25 bp, Canis familiaris
tcatccagtccactaacgcttagtt

SEQ ID NO: 187720 - DNA, 25 bp, Canis familiaris
tcatccttccaaaatggcgtattta

SEQ ID NO: 187721 - DNA, 25 bp, Canis familiaris
tcatccttcccaaatggctgtattt

SEQ ID NO: 187722 - DNA, 25 bp, Canis familiaris
tcattcttcctctgaggctctggtg

SEQ ID NO: 187723 - DNA, 25 bp, Canis familiaris
tcatacctgggctgatggcctgggc

SEQ ID NO: 187724 - DNA, 25 bp, Canis familiaris
tcatgctgacgtggcctgatggcct

SEQ ID NO: 187725 - DNA, 25 bp, Canis familiaris
tcagctgcagcggcagccagatgcc

SEQ ID NO: 187726 - DNA, 25 bp, Canis familiaris
tcagtctggccagagatccacggga

SEQ ID NO: 187727 - DNA, 25 bp, Canis familiaris
tcatgtggacacgacgttccgggac

SEQ ID NO: 187728 - DNA, 25 bp, Canis familiaris
tcatcgagtgccacggccgtgggac

SEQ ID NO: 187729 - DNA, 25 bp, Canis familiaris
tcatcagagtacccggtgggctggc

SEQ ID NO: 187730 - DNA, 25 bp, Canis familiaris
tcatcaagaactcctggctggctga

SEQ ID NO: 187731 - DNA, 25 bp, Canis familiaris
tcatcacagcattttcttctaagaa

SEQ ID NO: 187732 - DNA, 25 bp, Canis familiaris
tcatcacacacgcagttctcaagaa

SEQ ID NO: 187733 - DNA, 25 bp, Canis familiaris
tcatatgccacgctgtccataatca

SEQ ID NO: 187734 - DNA, 25 bp, Canis familiaris
tcatgaaccggttccatcactaggt

SEQ ID NO: 187735 - DNA, 25 bp, Canis familiaris
tcatgaaactggaataagcgctttg

SEQ ID NO: 187736 - DNA, 25 bp, Canis familiaris
tcaggaatctgagatctcgactttt

SEQ ID NO: 187737 - DNA, 25 bp, Canis familiaris
tcaggcaattccactcaacttttga

SEQ ID NO: 187738 - DNA, 25 bp, Canis familiaris
tcagagcatctgaccagtgccaagt

SEQ ID NO: 187739 - DNA, 25 bp, Canis familiaris
tcatgacttatgacagctgccacct

SEQ ID NO: 187740 - DNA, 25 bp, Canis familiaris
tcatactttagccactaccatgcag

SEQ ID NO: 187741 - DNA, 25 bp, Canis familiaris
tcatactcagtttccgccatctcag

SEQ ID NO: 187742 - DNA, 25 bp, Canis familiaris
tcatcagcaagtactcacccttaga

SEQ ID NO: 187743 - DNA, 25 bp, Canis familiaris
tcatgccagcagcttgagccactta

SEQ ID NO: 187744 - DNA, 25 bp, Canis familiaris
tcatcaagcagttggaccagaaggc

SEQ ID NO: 187745 - DNA, 25 bp, Canis familiaris
tcacgatgcattccgaccgggagga

SEQ ID NO: 187746 - DNA, 25 bp, Canis familiaris
tcaggcacagtcctggtatctggga

SEQ ID NO: 187747 - DNA, 25 bp, Canis familiaris
tcaggactgccgactgttcagggct

SEQ ID NO: 187748 - DNA, 25 bp, Canis familiaris
tcatggatccatcagctcttgggtc

SEQ ID NO: 187749 - DNA, 25 bp, Canis familiaris
tcattgacgtgctcatctgtggttc

SEQ ID NO: 187750 - DNA, 25 bp, Canis familiaris
tcattacaggcagcagcaggcgtcc

SEQ ID NO: 187751 - DNA, 25 bp, Canis familiaris
tcatctacgccatcatcggcttgga

SEQ ID NO: 187752 - DNA, 25 bp, Canis familiaris
tcatctcttcactacttcgtcgaga

SEQ ID NO: 187753 - DNA, 25 bp, Canis familiaris
tcatctttgcatgtccatttctgga

SEQ ID NO: 187754 - DNA, 25 bp, Canis familiaris
tcattgtgttcatcagcacctgctg

SEQ ID NO: 187755 - DNA, 25 bp, Canis familiaris
taattgatgccaggctgccctgatc

SEQ ID NO: 187756 - DNA, 25 bp, Canis familiaris
tcatctggtcaagcatctgcctatc

SEQ ID NO: 187757 - DNA, 25 bp, Canis familiaris
tcatcattgcattaatcctgtccta

SEQ ID NO: 187758 - DNA, 25 bp, Canis familiaris
tcatctatgcattcactggcttctc

SEQ ID NO: 187759 - DNA, 25 bp, Canis familiaris
tcatttatgacacagcagcatctct

SEQ ID NO: 187760 - DNA, 25 bp, Canis familiaris
tcatctggagacctacgcatcttga

SEQ ID NO: 187761 - DNA, 25 bp, Canis familiaris
tcatcgaggcaccatcacacggatg

SEQ ID NO: 187762 - DNA, 25 bp, Canis familiaris
tcattcgtgcacccatgcaagtgtg

SEQ ID NO: 187763 - DNA, 25 bp, Canis familiaris
tcatacgatctcactaatatgtggg

SEQ ID NO: 187764 - DNA, 25 bp, Canis familiaris
tcagtggcactctcaagtttgcgtg

SEQ ID NO: 187765 - DNA, 25 bp, Canis familiaris
tcagggcccttcagacaggggctcc

SEQ ID NO: 187766 - DNA, 25 bp, Canis familiaris
tcagaggccttggctggctgaggtg

SEQ ID NO: 187767 - DNA, 25 bp, Canis familiaris
tcatatgtccctcctagctagtgag

SEQ ID NO: 187768 - DNA, 25 bp, Canis familiaris
tcatttccgctcggtctgatgctga

SEQ ID NO: 187769 - DNA, 25 bp, Canis familiaris
tcatggtaccttgtctgagctgttc

SEQ ID NO: 187770 - DNA, 25 bp, Canis familiaris
tcatgttaccaaggacatgactctg

SEQ ID NO: 187771 - DNA, 25 bp, Canis familiaris
tcataattacacttactgacctgtt

SEQ ID NO: 187772 - DNA, 25 bp, Canis familiaris
tcattggtcaagctagctcgcctgt

SEQ ID NO: 187773 - DNA, 25 bp, Canis familiaris
tcagtgttaaagcagtctccttctt

SEQ ID NO: 187774 - DNA, 25 bp, Canis familiaris
tcactttcttagctggtcctatttt

SEQ ID NO: 187775 - DNA, 25 bp, Canis familiaris
tcagttccttatctaccaaattctc

SEQ ID NO: 187776 - DNA, 25 bp, Canis familiaris
tcaggcttgtttctccctgatttca

SEQ ID NO: 187777 - DNA, 25 bp, Canis familiaris
tcattgtttattttcttctttctag

SEQ ID NO: 187778 - DNA, 25 bp, Canis familiaris
tcaggttctaattcacaggctttct

SEQ ID NO: 187779 - DNA, 25 bp, Canis familiaris
tcatgggggaaacttggctgtctct

SEQ ID NO: 187780 - DNA, 25 bp, Canis familiaris
tcagggtgtgagtactgccggtctt

SEQ ID NO: 187781 - DNA, 25 bp, Canis familiaris
tcaggggctttgatatcaggtttca

SEQ ID NO: 187782 - DNA, 25 bp, Canis familiaris
tcagtcgtcgttcaatcttgttcca

SEQ ID NO: 187783 - DNA, 25 bp, Canis familiaris
tcatgtcaggcgttaaactgtcagt

SEQ ID NO: 187784 - DNA, 25 bp, Canis familiaris
tcatgaaggcagtgcttactaggta

SEQ ID NO: 187785 - DNA, 25 bp, Canis familiaris
tcatctgagggagcttcacttggac

SEQ ID NO: 187786 - DNA, 25 bp, Canis familiaris
tcagtgaaagaaaggccattatgca

SEQ ID NO: 187787 - DNA, 25 bp, Canis familiaris
tcacgctaagaaagtccccagcttc

SEQ ID NO: 187788 - DNA, 25 bp, Canis familiaris
tcacctgggtagatggcaacgtctc

SEQ ID NO: 187789 - DNA, 25 bp, Canis familiaris
tcattctgggctatctgggggtgat

SEQ ID NO: 187790 - DNA, 25 bp, Canis familiaris
tcatcactgggttttttgtgccttt

SEQ ID NO: 187791 - DNA, 25 bp, Canis familiaris
tcattctgtaggtttctgctctgcc

SEQ ID NO: 187792 - DNA, 25 bp, Canis familiaris
tcattttgcaggtttggctgtggca

SEQ ID NO: 187793 - DNA, 25 bp, Canis familiaris
tcatttccaatgtttctgctgtgtg

SEQ ID NO: 187794 - DNA, 25 bp, Canis familiaris
tcagttaagcatttgactcgtggtt

SEQ ID NO: 187795 - DNA, 25 bp, Canis familiaris
tcatcttaactattaccgtaattcc

SEQ ID NO: 187796 - DNA, 25 bp, Canis familiaris
tcatctccgttgaaactcctaatac

SEQ ID NO: 187797 - DNA, 25 bp, Canis familiaris
tcatacttgttgctatctccttgca

SEQ ID NO: 187798 - DNA, 25 bp, Canis familiaris
tcatccaatttccttccacattagg

SEQ ID NO: 187799 - DNA, 25 bp, Canis familiaris
tcatctttctgttgttccaattctg

SEQ ID NO: 187800 - DNA, 25 bp, Canis familiaris
tcatctatgttctgttcacaatctc

SEQ ID NO: 187801 - DNA, 25 bp, Canis familiaris
tcattctgtgtcttttcagccttca

SEQ ID NO: 187802 - DNA, 25 bp, Canis familiaris
tcatatgctactgtttcagactcta

SEQ ID NO: 187803 - DNA, 25 bp, Canis familiaris
tcatcgatcctgttcctgaacatct

SEQ ID NO: 187804 - DNA, 25 bp, Canis familiaris
tcatctgtcgcatttccaggaacac

SEQ ID NO: 187805 - DNA, 25 bp, Canis familiaris
tcatcttctgccaccaagcatgaca

SEQ ID NO: 187806 - DNA, 25 bp, Canis familiaris
tcatctcttggtgcacacacgacaa

SEQ ID NO: 187807 - DNA, 25 bp, Canis familiaris
tcatctttggctacacaaggacagg

SEQ ID NO: 187808 - DNA, 25 bp, Canis familiaris
tcagatcatctgcctaacaagaact

SEQ ID NO: 187809 - DNA, 25 bp, Canis familiaris
tcagtgatgggttgacagaagcatt

SEQ ID NO: 187810 - DNA, 25 bp, Canis familiaris
tcagaaggggtgtccaactgtccgc

SEQ ID NO: 187811 - DNA, 25 bp, Canis familiaris
tcagggggggaggtctctgacccct

SEQ ID NO: 187812 - DNA, 25 bp, Canis familiaris
tcaggggatggagaccctggccttc

SEQ ID NO: 187813 - DNA, 25 bp, Canis familiaris
tcaggttgaggggcagccctggcct

SEQ ID NO: 187814 - DNA, 25 bp, Canis familiaris
tcagtgttctgggaaccctggcagt

SEQ ID NO: 187815 - DNA, 25 bp, Canis familiaris
tcagtgatttgtcctactcctgtgt

SEQ ID NO: 187816 - DNA, 25 bp, Canis familiaris
tcagtaggtaccgacctttgtttct

SEQ ID NO: 187817 - DNA, 25 bp, Canis familiaris
tcaagggtgaccaacctttgttcct

SEQ ID NO: 187818 - DNA, 25 bp, Canis familiaris
tcatggggctgaacttttgtttttc

SEQ ID NO: 187819 - DNA, 25 bp, Canis familiaris
tcagtcctgtagttttattttgttt

SEQ ID NO: 187820 - DNA, 25 bp, Canis familiaris
tcagaagtaggctttgttttttcct

SEQ ID NO: 187821 - DNA, 25 bp, Canis familiaris
tcagaagttgcctttgtggggtttt

SEQ ID NO: 187822 - DNA, 25 bp, Canis familiaris
tagaaggtcagcaaagggtgggttt

SEQ ID NO: 187823 - DNA, 25 bp, Canis familiaris
taactggccctgaggctgtgggggt

SEQ ID NO: 187824 - DNA, 25 bp, Canis familiaris
taattcccctttgagttaggcttag

SEQ ID NO: 187825 - DNA, 25 bp, Canis familiaris
taatttccttttcaagtttgctctt

SEQ ID NO: 187826 - DNA, 25 bp, Canis familiaris
taatttcccttatacagtgtcttca

SEQ ID NO: 187827 - DNA, 25 bp, Canis familiaris
taattctggccttgaaaaagatttg

SEQ ID NO: 187828 - DNA, 25 bp, Canis familiaris
taatttggggttagaatcagctttt

SEQ ID NO: 187829 - DNA, 25 bp, Canis familiaris
tcattacgagtggttaagttgtttt

SEQ ID NO: 187830 - DNA, 25 bp, Canis familiaris
tcattccagcttcctgctaagtttc

SEQ ID NO: 187831 - DNA, 25 bp, Canis familiaris
tcataccaatgtcgtctactattta

SEQ ID NO: 187832 - DNA, 25 bp, Canis familiaris
tcatcagcccggctgtgactactgc

SEQ ID NO: 187833 - DNA, 25 bp, Canis familiaris
tcatactttgtggtgtcactcctgc

SEQ ID NO: 187834 - DNA, 25 bp, Canis familiaris
tcatacttctgtcttctaactcaaa

SEQ ID NO: 187835 - DNA, 25 bp, Canis familiaris
tcattttcagtcttttattctcata

SEQ ID NO: 187836 - DNA, 25 bp, Canis familiaris
tcatttttgctttcatttatacata

SEQ ID NO: 187837 - DNA, 25 bp, Canis familiaris
tcatctgtcttgtgactttaactga

SEQ ID NO: 187838 - DNA, 25 bp, Canis familiaris
tcatctctttgtaactctttgtctc

SEQ ID NO: 187839 - DNA, 25 bp, Canis familiaris
tcattatcattgtgacccattcccc

SEQ ID NO: 187840 - DNA, 25 bp, Canis familiaris
tcatatatcttgtgcactatctact

SEQ ID NO: 187841 - DNA, 25 bp, Canis familiaris
tcattgacattgcgcccatggacat

SEQ ID NO: 187842 - DNA, 25 bp, Canis familiaris
tcattgacattgcgcccatggacat

SEQ ID NO: 187843 - DNA, 25 bp, Canis familiaris
tcattacgagcgcgctcaggcactg

SEQ ID NO: 187844 - DNA, 25 bp, Canis familiaris
tcatgtgatcggggacctgtgccag

SEQ ID NO: 187845 - DNA, 25 bp, Canis familiaris
tcatcatgatgtgggggctctgctc

SEQ ID NO: 187846 - DNA, 25 bp, Canis familiaris
tcatcattggccaagcaggcagctc

SEQ ID NO: 187847 - DNA, 25 bp, Canis familiaris
tcatcagagccacatcagtcacttt

SEQ ID NO: 187848 - DNA, 25 bp, Canis familiaris
tcagcaatgccacagaatcagcgtt

SEQ ID NO: 187849 - DNA, 25 bp, Canis familiaris
tcagcatgtctccagcacagctggg

SEQ ID NO: 187850 - DNA, 25 bp, Canis familiaris
tcatgattccgattcctgagggaaa

SEQ ID NO: 187851 - DNA, 25 bp, Canis familiaris
tcagtgtccaaagccagacccagaa

SEQ ID NO: 187852 - DNA, 25 bp, Canis familiaris
tcaggtcacaatcctcggagtccta

SEQ ID NO: 187853 - DNA, 25 bp, Canis familiaris
tcagggccaacctgaaggccccact

SEQ ID NO: 187854 - DNA, 25 bp, Canis familiaris
tcaccaagaacccgaaggaccctgg

SEQ ID NO: 187855 - DNA, 25 bp, Canis familiaris
tcacccagaacccggacaagttcgc

SEQ ID NO: 187856 - DNA, 25 bp, Canis familiaris
tcaggcctggcacctgggacaaatc

SEQ ID NO: 187857 - DNA, 25 bp, Canis familiaris
tcaggtctggtttctggaagtcact

SEQ ID NO: 187858 - DNA, 25 bp, Canis familiaris
tcatccaaggttccggagctgtcca

SEQ ID NO: 187859 - DNA, 25 bp, Canis familiaris
tcaccaagtttggctggcctctgga

SEQ ID NO: 187860 - DNA, 25 bp, Canis familiaris
tcaccaaaagatcgggcctcgtacc

SEQ ID NO: 187861 - DNA, 25 bp, Canis familiaris
tcaccaccaagcttggggacttcac

SEQ ID NO: 187862 - DNA, 25 bp, Canis familiaris
tcacctgcgaagctaagtactttcg

SEQ ID NO: 187863 - DNA, 25 bp, Canis familiaris
tcagcgcctacaactacagaactta

SEQ ID NO: 187864 - DNA, 25 bp, Canis familiaris
tcatcgactacatctgggacctgga

SEQ ID NO: 187865 - DNA, 25 bp, Canis familiaris
tcatcggttctaagcggcaccttga

SEQ ID NO: 187866 - DNA, 25 bp, Canis familiaris
tcatcgacagttaagagcaccccat

SEQ ID NO: 187867 - DNA, 25 bp, Canis familiaris
tcatcaaagcccagagaagccacat

SEQ ID NO: 187868 - DNA, 25 bp, Canis familiaris
tcataagagccctggtgaccacaca

SEQ ID NO: 187869 - DNA, 25 bp, Canis familiaris
tcatcgaagcccagcttacccgatg

SEQ ID NO: 187870 - DNA, 25 bp, Canis familiaris
tcatcgaaacctactacatcccaaa

SEQ ID NO: 187871 - DNA, 25 bp, Canis familiaris
tcataaataccctttcacttgcaaa

SEQ ID NO: 187872 - DNA, 25 bp, Canis familiaris
tcataaacaccatcctcgagctaga

SEQ ID NO: 187873 - DNA, 25 bp, Canis familiaris
tcatcaaaactatactgccactcac

SEQ ID NO: 187874 - DNA, 25 bp, Canis familiaris
tcatctgtaataatctacccacata

SEQ ID NO: 187875 - DNA, 25 bp, Canis familiaris
tcatttacacagatatccatgcctg

SEQ ID NO: 187876 - DNA, 25 bp, Canis familiaris
tcatctgtgaccgtgctaacagccg

SEQ ID NO: 187877 - DNA, 25 bp, Canis familiaris
tcatctggacatcgtctcgcaatgc

SEQ ID NO: 187878 - DNA, 25 bp, Canis familiaris
tcatttgacatgggccacttgttgc

SEQ ID NO: 187879 - DNA, 25 bp, Canis familiaris
tcatccaacatgtgcccttgcattt

SEQ ID NO: 187880 - DNA, 25 bp, Canis familiaris
tcattcaatgacttcctttgctctg

SEQ ID NO: 187881 - DNA, 25 bp, Canis familiaris
tcatgaacaggctatccttcggctg

SEQ ID NO: 187882 - DNA, 25 bp, Canis familiaris
tcaggtaggcgtgcttcatcctgct

SEQ ID NO: 187883 - DNA, 25 bp, Canis familiaris
tcaggggtctggactttgcctggta

SEQ ID NO: 187884 - DNA, 25 bp, Canis familiaris
tcagggggtccagaagccagctgta

SEQ ID NO: 187885 - DNA, 25 bp, Canis familiaris
tcaggagcggggtcagaggccctta

SEQ ID NO: 187886 - DNA, 25 bp, Canis familiaris
tcagtcacggtgaacgctgattcct

SEQ ID NO: 187887 - DNA, 25 bp, Canis familiaris
tcagtcattgggaaatgccgccctt

SEQ ID NO: 187888 - DNA, 25 bp, Canis familiaris
tcactcaatatgcaacttcccgcgt

SEQ ID NO: 187889 - DNA, 25 bp, Canis familiaris
tcatctgggtgaacactcccgggtg

SEQ ID NO: 187890 - DNA, 25 bp, Canis familiaris
tcagacaggtaatctccgaggggag

SEQ ID NO: 187891 - DNA, 25 bp, Canis familiaris
tatgatcggtctgacctgggggggc

SEQ ID NO: 187892 - DNA, 25 bp, Canis familiaris
tcagtagagtccactctgggggtgg

SEQ ID NO: 187893 - DNA, 25 bp, Canis familiaris
tcagggtgccaaacggggtgggttg

SEQ ID NO: 187894 - DNA, 25 bp, Canis familiaris
tcagaggggaatcgtgggcctgcgg

SEQ ID NO: 187895 - DNA, 25 bp, Canis familiaris
tcagaggagaggccagggtcggtcg

SEQ ID NO: 187896 - DNA, 25 bp, Canis familiaris
tcatgggagacacaggcggggggag

SEQ ID NO: 187897 - DNA, 25 bp, Canis familiaris
tcagggaccagccctgtgggggtgg

SEQ ID NO: 187898 - DNA, 25 bp, Canis familiaris
tcagctggaaaggaggggggatttg

SEQ ID NO: 187899 - DNA, 25 bp, Canis familiaris
tcaggggcatgatcaggggggcatc

SEQ ID NO: 187900 - DNA, 25 bp, Canis familiaris
tcaggtactgcagcaaggtgcgccc

SEQ ID NO: 187901 - DNA, 25 bp, Canis familiaris
tcaggtccaggcaaaggatcgcccc

SEQ ID NO: 187902 - DNA, 25 bp, Canis familiaris
tcagggccggaggaggatgtccccg

SEQ ID NO: 187903 - DNA, 25 bp, Canis familiaris
tcagggcacccggtatcatttaccg

SEQ ID NO: 187904 - DNA, 25 bp, Canis familiaris
tcaggacacaccgggacctgaacac

SEQ ID NO: 187905 - DNA, 25 bp, Canis familiaris
tcagttatacaagggacaagaggga

SEQ ID NO: 187906 - DNA, 25 bp, Canis familiaris
tcaggattgaaaggacttccaggga

SEQ ID NO: 187907 - DNA, 25 bp, Canis familiaris
tcagagcatttgcaaaattctcagg

SEQ ID NO: 187908 - DNA, 25 bp, Canis familiaris
tcaggctcatttcaagacccaggta

SEQ ID NO: 187909 - DNA, 25 bp, Canis familiaris
tcaggcctgcattgaacagtcccgt

SEQ ID NO: 187910 - DNA, 25 bp, Canis familiaris
tcagaggatgcaaaatctcaaccgg

SEQ ID NO: 187911 - DNA, 25 bp, Canis familiaris
tcagggagaacagcgacccgtggcc

SEQ ID NO: 187912 - DNA, 25 bp, Canis familiaris
tcagggcataatcccagagccccgg

SEQ ID NO: 187913 - DNA, 25 bp, Canis familiaris
tcaggtcatctatcggaacgctcgg

SEQ ID NO: 187914 - DNA, 25 bp, Canis familiaris
tcaggccgttagctgaacccggcat

SEQ ID NO: 187915 - DNA, 25 bp, Canis familiaris
tcacctgggtagtggaaacgtgctg

SEQ ID NO: 187916 - DNA, 25 bp, Canis familiaris
tcagccggagtatctgggacaacca

SEQ ID NO: 187917 - DNA, 25 bp, Canis familiaris
tcagcacttttccctggagcaaaca

SEQ ID NO: 187918 - DNA, 25 bp, Canis familiaris
tcaacaccattccctcgggaacgac

SEQ ID NO: 187919 - DNA, 25 bp, Canis familiaris
tcagaatcccgcccaggcggaacga

SEQ ID NO: 187920 - DNA, 25 bp, Canis familiaris
tcataattgcgggctttggaaactg

SEQ ID NO: 187921 - DNA, 25 bp, Canis familiaris
tcaactaggagctgcttgggattct

SEQ ID NO: 187922 - DNA, 25 bp, Canis familiaris
tcacaccaggcatggttttcttccg

SEQ ID NO: 187923 - DNA, 25 bp, Canis familiaris
tcatcacacggctgtgcttgtctgt

SEQ ID NO: 187924 - DNA, 25 bp, Canis familiaris
tcagatacgcctgtgcaagctcatg

SEQ ID NO: 187925 - DNA, 25 bp, Canis familiaris
tcagatactgtagttgaaccaacct

SEQ ID NO: 187926 - DNA, 25 bp, Canis familiaris
tcagcattggcttgatttaaaagtt

SEQ ID NO: 187927 - DNA, 25 bp, Canis familiaris
tcagtgttgtagtttgcagaaatat

SEQ ID NO: 187928 - DNA, 25 bp, Canis familiaris
tcagtggcattagtcattagagaaa

SEQ ID NO: 187929 - DNA, 25 bp, Canis familiaris
tcaggtgactacattttaataaatc

SEQ ID NO: 187930 - DNA, 25 bp, Canis familiaris
tcagggacatccatagctttcaaaa

SEQ ID NO: 187931 - DNA, 25 bp, Canis familiaris
tcagaagtgaccatgccatttccag

SEQ ID NO: 187932 - DNA, 25 bp, Canis familiaris
tcagggcatgatcccggagttccag

SEQ ID NO: 187933 - DNA, 25 bp, Canis familiaris
tcatagacaagccccggatcatcga

SEQ ID NO: 187934 - DNA, 25 bp, Canis familiaris
tcatatggatacccactggactcca

SEQ ID NO: 187935 - DNA, 25 bp, Canis familiaris
tcataggctgaccttgcagtcacca

SEQ ID NO: 187936 - DNA, 25 bp, Canis familiaris
tcatagagtgacgtgtcgccaggcc

SEQ ID NO: 187937 - DNA, 25 bp, Canis familiaris
tcatgtgatctgggacctgccaggc

SEQ ID NO: 187938 - DNA, 25 bp, Canis familiaris
tcatgtgtcatggtgtccttgctgc

SEQ ID NO: 187939 - DNA, 25 bp, Canis familiaris
tcatgtgtctgagtgtgtgtggggg

SEQ ID NO: 187940 - DNA, 25 bp, Canis familiaris
tcatggcttgtatttgcgggtgctt

SEQ ID NO: 187941 - DNA, 25 bp, Canis familiaris
tcatccgtgatgattccaggcttca

SEQ ID NO: 187942 - DNA, 25 bp, Canis familiaris
tcatctttgatgaaactccgtaaaa

SEQ ID NO: 187943 - DNA, 25 bp, Canis familiaris
tcatcttgtgttcatctcctataaa

SEQ ID NO: 187944 - DNA, 25 bp, Canis familiaris
tcatgctatggcttcactagcctta

SEQ ID NO: 187945 - DNA, 25 bp, Canis familiaris
tcagaagtcactacaagcagcattg

SEQ ID NO: 187946 - DNA, 25 bp, Canis familiaris
tcagatcagatgcacagaaccaagc

SEQ ID NO: 187947 - DNA, 25 bp, Canis familiaris
tcagcaatgcatcctgcaccaccaa

SEQ ID NO: 187948 - DNA, 25 bp, Canis familiaris
tcatgagatgagggcacagtacaat

SEQ ID NO: 187949 - DNA, 25 bp, Canis familiaris
tcataggcatggccatcataagggg

SEQ ID NO: 187950 - DNA, 25 bp, Canis familiaris
tcataggcatgcccatcataatggg

SEQ ID NO: 187951 - DNA, 25 bp, Canis familiaris
tcatgagatgcttcccaattgctgg

SEQ ID NO: 187952 - DNA, 25 bp, Canis familiaris
tcatcagttcccggcattgtgaagc

SEQ ID NO: 187953 - DNA, 25 bp, Canis familiaris
tcatcgatgatcacagagctgggaa

SEQ ID NO: 187954 - DNA, 25 bp, Canis familiaris
tcatgcgtggcagagaggggacagg

SEQ ID NO: 187955 - DNA, 25 bp, Canis familiaris
tcagtgtgtctgcaggggctaggga

SEQ ID NO: 187956 - DNA, 25 bp, Canis familiaris
tcaggctgacggcttcgaatgtgga

SEQ ID NO: 187957 - DNA, 25 bp, Canis familiaris
tcagggcttgggcatcgagatcatt

SEQ ID NO: 187958 - DNA, 25 bp, Canis familiaris
tcatgactttggtgatcagaatcag

SEQ ID NO: 187959 - DNA, 25 bp, Canis familiaris
tcatgacgtgtgtgtgttcaacggg

SEQ ID NO: 187960 - DNA, 25 bp, Canis familiaris
tcatcactgtggtgttctccaagtc

SEQ ID NO: 187961 - DNA, 25 bp, Canis familiaris
tcatggcactggtgttacccaacta

SEQ ID NO: 187962 - DNA, 25 bp, Canis familiaris
tcatgagccctggtgttatctccaa

SEQ ID NO: 187963 - DNA, 25 bp, Canis familiaris
tcagagcttcgaggtttcgtcagga

SEQ ID NO: 187964 - DNA, 25 bp, Canis familiaris
tcatcgcttcagactacgggtggga

SEQ ID NO: 187965 - DNA, 25 bp, Canis familiaris
tcacggtcatgacatcagggtcctg

SEQ ID NO: 187966 - DNA, 25 bp, Canis familiaris
tcacgaggtgaaatcacagttttga

SEQ ID NO: 187967 - DNA, 25 bp, Canis familiaris
tcatcgacgagaacccagagctgtt

SEQ ID NO: 187968 - DNA, 25 bp, Canis familiaris
tcatcgacgaataccatgcagccac

SEQ ID NO: 187969 - DNA, 25 bp, Canis familiaris
tcatcaagctgaattgcccctcaga

SEQ ID NO: 187970 - DNA, 25 bp, Canis familiaris
tcatagctctgaaaccatctcacag

SEQ ID NO: 187971 - DNA, 25 bp, Canis familiaris
tcatcagctttaatcctctgccaga

SEQ ID NO: 187972 - DNA, 25 bp, Canis familiaris
tcatcagctccttgcatttctgcaa

SEQ ID NO: 187973 - DNA, 25 bp, Canis familiaris
tcatgcgaccatacattctcagaag

SEQ ID NO: 187974 - DNA, 25 bp, Canis familiaris
tcatccatgacaactttggcattgt

SEQ ID NO: 187975 - DNA, 25 bp, Canis familiaris
tcatggagaaacacagatgctctta

SEQ ID NO: 187976 - DNA, 25 bp, Canis familiaris
tcatggaaccacgctgtccatgcta

SEQ ID NO: 187977 - DNA, 25 bp, Canis familiaris
tcatgactaaccttctgtctctgga

SEQ ID NO: 187978 - DNA, 25 bp, Canis familiaris
tcatgaaccaggtgtgccgcgagca

SEQ ID NO: 187979 - DNA, 25 bp, Canis familiaris
tcatgcaaccacagggccgtgtgtg

SEQ ID NO: 187980 - DNA, 25 bp, Canis familiaris
tcagcaacagttggaggtctttgtg

SEQ ID NO: 187981 - DNA, 25 bp, Canis familiaris
tcagaatcactaatggaacttttaa

SEQ ID NO: 187982 - DNA, 25 bp, Canis familiaris
tcaggatacctaggaccgtgcacaa

SEQ ID NO: 187983 - DNA, 25 bp, Canis familiaris
tcaggctacccggattcattgcctc

SEQ ID NO: 187984 - DNA, 25 bp, Canis familiaris
tcaggttgccttgttcttggcacgc

SEQ ID NO: 187985 - DNA, 25 bp, Canis familiaris
tcagttgccccaggcttttgaacag

SEQ ID NO: 187986 - DNA, 25 bp, Canis familiaris
tcagtaaaccttgcttggacatcag

SEQ ID NO: 187987 - DNA, 25 bp, Canis familiaris
tcagtaggtcctccgttggacccac

SEQ ID NO: 187988 - DNA, 25 bp, Canis familiaris
tcagtcacggcctcgttggaaacga

SEQ ID NO: 187989 - DNA, 25 bp, Canis familiaris
tcagaagggcctttggggtcaccca

SEQ ID NO: 187990 - DNA, 25 bp, Canis familiaris
tcaaaggacacatctggggacccag

SEQ ID NO: 187991 - DNA, 25 bp, Canis familiaris
tcaacaggaccaccaggggcactga

SEQ ID NO: 187992 - DNA, 25 bp, Canis familiaris
tcagactgacccctcggggacatac

SEQ ID NO: 187993 - DNA, 25 bp, Canis familiaris
tcagagaacccacacaggggcacct

SEQ ID NO: 187994 - DNA, 25 bp, Canis familiaris
tcaggcaacccctaatggacctgca

SEQ ID NO: 187995 - DNA, 25 bp, Canis familiaris
tcaggcagcagtgcctttgggcctt

SEQ ID NO: 187996 - DNA, 25 bp, Canis familiaris
tcaggaggtccctctgatgctcctg

SEQ ID NO: 187997 - DNA, 25 bp, Canis familiaris
tcagcagaggttacgacttcgcagc

SEQ ID NO: 187998 - DNA, 25 bp, Canis familiaris
tcagcgacatcttagcagacttcaa

SEQ ID NO: 187999 - DNA, 25 bp, Canis familiaris
tcaggaggctgctctgagctcacaa

SEQ ID NO: 188000 - DNA, 25 bp, Canis familiaris
tcatgaggcggttgctgcagcccaa

SEQ ID NO: 188001 - DNA, 25 bp, Canis familiaris
tcatgaggcgacaggtcttcaaatt

SEQ ID NO: 188002 - DNA, 25 bp, Canis familiaris
tcatgggctgaaaggtcctaccccc

SEQ ID NO: 188003 - DNA, 25 bp, Canis familiaris
tcaggtctatcaaggtccttactga

SEQ ID NO: 188004 - DNA, 25 bp, Canis familiaris
tcaggatgtgcctgtgtccctagga

SEQ ID NO: 188005 - DNA, 25 bp, Canis familiaris
tcagtgaagccattttcacctttgt

SEQ ID NO: 188006 - DNA, 25 bp, Canis familiaris
tcaggaaccttctattgctccagtg

SEQ ID NO: 188007 - DNA, 25 bp, Canis familiaris
tcagagcgagcagactttgcccagg

SEQ ID NO: 188008 - DNA, 25 bp, Canis familiaris
tcatcgcgccaaattttgcgctcgg

SEQ ID NO: 188009 - DNA, 25 bp, Canis familiaris
tcatcgcgccaaattttgcgctcgg

SEQ ID NO: 188010 - DNA, 25 bp, Canis familiaris
tcatctgcctcattttgggcctgga

SEQ ID NO: 188011 - DNA, 25 bp, Canis familiaris
tttgcgctagggtggaaggatggaa

SEQ ID NO: 188012 - DNA, 25 bp, Canis familiaris
tttgctggaatgctaagttggagga

SEQ ID NO: 188013 - DNA, 25 bp, Canis familiaris
tcaggcagtggtctaagttggtgga

SEQ ID NO: 188014 - DNA, 25 bp, Canis familiaris
tcaggctcggtgggcaaggctggga

SEQ ID NO: 188015 - DNA, 25 bp, Canis familiaris
tcaggtcgtgatcttagggttgtaa

SEQ ID NO: 188016 - DNA, 25 bp, Canis familiaris
tcagaccctcatttccgggggtcgt

SEQ ID NO: 188017 - DNA, 25 bp, Canis familiaris
tcataccccatcttcggtgattcga

SEQ ID NO: 188018 - DNA, 25 bp, Canis familiaris
tcataaccctcctaggggtgcgttt

SEQ ID NO: 188019 - DNA, 25 bp, Canis familiaris
tcatgtccctctgttggcaggggtg

SEQ ID NO: 188020 - DNA, 25 bp, Canis familiaris
tcatgtcatccagcttttgccaagt

SEQ ID NO: 188021 - DNA, 25 bp, Canis familiaris
tcatgtctcacggtcttttctgagt

SEQ ID NO: 188022 - DNA, 25 bp, Canis familiaris
tcatctctgcagctttgggtgtgat

SEQ ID NO: 188023 - DNA, 25 bp, Canis familiaris
tcatctcctggcattcagttgtcat

SEQ ID NO: 188024 - DNA, 25 bp, Canis familiaris
tcatccctggctaagagttccccag

SEQ ID NO: 188025 - DNA, 25 bp, Canis familiaris
tcatccctcctaaagtgtcactgga

SEQ ID NO: 188026 - DNA, 25 bp, Canis familiaris
tcatgctctgctgctgagaagccca

SEQ ID NO: 188027 - DNA, 25 bp, Canis familiaris
tcatgctgcagcactgtgagagtta

SEQ ID NO: 188028 - DNA, 25 bp, Canis familiaris
tcatgctccaacttctgacttagtg

SEQ ID NO: 188029 - DNA, 25 bp, Canis familiaris
tcatcaccacacgcacttatcagga

SEQ ID NO: 188030 - DNA, 25 bp, Canis familiaris
tcatgaccacagtccatgccatcac

SEQ ID NO: 188031 - DNA, 25 bp, Canis familiaris
tcatcatccaagtcctcatcaaggc

SEQ ID NO: 188032 - DNA, 25 bp, Canis familiaris
tcatctccagctgccagagcaagag

SEQ ID NO: 188033 - DNA, 25 bp, Canis familiaris
tcatggcctcttgctggcaaaggtt

SEQ ID NO: 188034 - DNA, 25 bp, Canis familiaris
tcatctggtctttctggatacaggg

SEQ ID NO: 188035 - DNA, 25 bp, Canis familiaris
tcatctttctcccgtggagcagtgg

SEQ ID NO: 188036 - DNA, 25 bp, Canis familiaris
tcatcgtcctcagctgctgtggaga

SEQ ID NO: 188037 - DNA, 25 bp, Canis familiaris
tcatcaccctctggctgtggtggaa

SEQ ID NO: 188038 - DNA, 25 bp, Canis familiaris
tcatcaactctccgctgggtgggag

SEQ ID NO: 188039 - DNA, 25 bp, Canis familiaris
tcatcaccctgtcggtggtgggggg

SEQ ID NO: 188040 - DNA, 25 bp, Canis familiaris
tatagcgactataggggaaaggggc

SEQ ID NO: 188041 - DNA, 25 bp, Canis familiaris
taaggacttatgcctgaaatgaaga

SEQ ID NO: 188042 - DNA, 25 bp, Canis familiaris
taaggctttatttaggttagagatt

SEQ ID NO: 188043 - DNA, 25 bp, Canis familiaris
tagaggctttgatggacgaaatgga

SEQ ID NO: 188044 - DNA, 25 bp, Canis familiaris
tcagaggttctgacttggctaaagg

SEQ ID NO: 188045 - DNA, 25 bp, Canis familiaris
tcagaggtcccttagagagcaacag

SEQ ID NO: 188046 - DNA, 25 bp, Canis familiaris
tcatggggctccagacaatctcaca

SEQ ID NO: 188047 - DNA, 25 bp, Canis familiaris
tcatgggcgttaagagcacccaccc

SEQ ID NO: 188048 - DNA, 25 bp, Canis familiaris
tcatggtcgtgtgaattcccactcc

SEQ ID NO: 188049 - DNA, 25 bp, Canis familiaris
tcatgatgactttccaattggccct

SEQ ID NO: 188050 - DNA, 25 bp, Canis familiaris
tcatcatcactatccaacatttctc

SEQ ID NO: 188051 - DNA, 25 bp, Canis familiaris
tcagatcactgatcacctgcattcc

SEQ ID NO: 188052 - DNA, 25 bp, Canis familiaris
tcatgacttgattccctctcaaaga

SEQ ID NO: 188053 - DNA, 25 bp, Canis familiaris
tcataattcactgatctatcaacag

SEQ ID NO: 188054 - DNA, 25 bp, Canis familiaris
tcataattactggcgctgagcccca

SEQ ID NO: 188055 - DNA, 25 bp, Canis familiaris
tcatcacataaggtcttgccaccca

SEQ ID NO: 188056 - DNA, 25 bp, Canis familiaris
tcatcaacatgctttctgtacatcc

SEQ ID NO: 188057 - DNA, 25 bp, Canis familiaris
tcagcataatgccttcagggttccc

SEQ ID NO: 188058 - DNA, 25 bp, Canis familiaris
tcatcatcgatggttgcttggtgtc

SEQ ID NO: 188059 - DNA, 25 bp, Canis familiaris
tcatctgtgcattaactctggtgtg

SEQ ID NO: 188060 - DNA, 25 bp, Canis familiaris
tcatggagatgaaggccgtgtgcgt

SEQ ID NO: 188061 - DNA, 25 bp, Canis familiaris
tcatgcacaaacgagcccagaggct

SEQ ID NO: 188062 - DNA, 25 bp, Canis familiaris
tcagctaaatccccatagaggccac

SEQ ID NO: 188063 - DNA, 25 bp, Canis familiaris
tcatctacacccgcatcaggggagg

SEQ ID NO: 188064 - DNA, 25 bp, Canis familiaris
tcatcccaaccttccctgagaaggg

SEQ ID NO: 188065 - DNA, 25 bp, Canis familiaris
tcatcccagactgctccatggagag

SEQ ID NO: 188066 - DNA, 25 bp, Canis familiaris
tcatgcccgactgggtacgcaaggt

SEQ ID NO: 188067 - DNA, 25 bp, Canis familiaris
taccagtatcctggatatcgcgggt

SEQ ID NO: 188068 - DNA, 25 bp, Canis familiaris
tcatcgagctgtgtggatatggtgc

SEQ ID NO: 188069 - DNA, 25 bp, Canis familiaris
tcatcaggctcccgagctgatttcg

SEQ ID NO: 188070 - DNA, 25 bp, Canis familiaris
tcatcagcaccaggcggcattattg

SEQ ID NO: 188071 - DNA, 25 bp, Canis familiaris
tcatcatgaccagaagcttgacgca

SEQ ID NO: 188072 - DNA, 25 bp, Canis familiaris
tcatcatgaccagaagcttgacgca

SEQ ID NO: 188073 - DNA, 25 bp, Canis familiaris
tcatctgcaccgccaagactgagtg

SEQ ID NO: 188074 - DNA, 25 bp, Canis familiaris
tcatcctctctgcaatactggcatc

SEQ ID NO: 188075 - DNA, 25 bp, Canis familiaris
tcatcaccattggcaatgagcggtt

SEQ ID NO: 188076 - DNA, 25 bp, Canis familiaris
tcatcccagatggctgtggggtcaa

SEQ ID NO: 188077 - DNA, 25 bp, Canis familiaris
tcatcccagatggctgtggggtcaa

SEQ ID NO: 188078 - DNA, 25 bp, Canis familiaris
tcatgcaccagggcagggaaccaac

SEQ ID NO: 188079 - DNA, 25 bp, Canis familiaris
tcatcagcgcgcaagagggcagacc

SEQ ID NO: 188080 - DNA, 25 bp, Canis familiaris
tcatctcagcacaagggacgacgag

SEQ ID NO: 188081 - DNA, 25 bp, Canis familiaris
tcatcctgacaaagctgataacgca

SEQ ID NO: 188082 - DNA, 25 bp, Canis familiaris
tcatcctgtcaaatatagcaagcag

SEQ ID NO: 188083 - DNA, 25 bp, Canis familiaris
tcatccttcaaaatatagcacagca

SEQ ID NO: 188084 - DNA, 25 bp, Canis familiaris
tcatcatttccatgctacagccaga

SEQ ID NO: 188085 - DNA, 25 bp, Canis familiaris
tcagatattgccaacgatgccctac

SEQ ID NO: 188086 - DNA, 25 bp, Canis familiaris
tcagatattgccaacgatgccctac

SEQ ID NO: 188087 - DNA, 25 bp, Canis familiaris
tcagatttgccatccaaaccacgac

SEQ ID NO: 188088 - DNA, 25 bp, Canis familiaris
tcagttttcatttcgacaaaccagc

SEQ ID NO: 188089 - DNA, 25 bp, Canis familiaris
tcagattatgtcctttgaccacgga

SEQ ID NO: 188090 - DNA, 25 bp, Canis familiaris
tcagttttagtggcatcccctgtga

SEQ ID NO: 188091 - DNA, 25 bp, Canis familiaris
tcagtggttgagtgtgtgcccttgg

SEQ ID NO: 188092 - DNA, 25 bp, Canis familiaris
tcatgggggaggtggcttcttggac

SEQ ID NO: 188093 - DNA, 25 bp, Canis familiaris
tcatgggggaggtggcttcttggac

SEQ ID NO: 188094 - DNA, 25 bp, Canis familiaris
tcatgctggggtgacgtcattctgt

SEQ ID NO: 188095 - DNA, 25 bp, Canis familiaris
tcaccggtgatggaccaatctgcgc

SEQ ID NO: 188096 - DNA, 25 bp, Canis familiaris
tcaccatggaccgcgaagtgcgcaa

SEQ ID NO: 188097 - DNA, 25 bp, Canis familiaris
tcatccatggataccagcgggtcct

SEQ ID NO: 188098 - DNA, 25 bp, Canis familiaris
tcagcctgctaagcaggggcccctc

SEQ ID NO: 188099 - DNA, 25 bp, Canis familiaris
tcatccttagagtcattggtacctg

SEQ ID NO: 188100 - DNA, 25 bp, Canis familiaris
tcatccttgagctcttgaggacccc

SEQ ID NO: 188101 - DNA, 25 bp, Canis familiaris
tcagtttagctctgtagaaacccag

SEQ ID NO: 188102 - DNA, 25 bp, Canis familiaris
tcatcttctacctgttggtgacctc

SEQ ID NO: 188103 - DNA, 25 bp, Canis familiaris
tcatcctctaacttcttcttgagct

SEQ ID NO: 188104 - DNA, 25 bp, Canis familiaris
tcatccctcactttttctgtgacat

SEQ ID NO: 188105 - DNA, 25 bp, Canis familiaris
tcaccatccgatttattgctataat

SEQ ID NO: 188106 - DNA, 25 bp, Canis familiaris
tcagtgctctcatattaattaatat

SEQ ID NO: 188107 - DNA, 25 bp, Canis familiaris
tcatgatctcatggaattgtttaga

SEQ ID NO: 188108 - DNA, 25 bp, Canis familiaris
tcatgccactggaattctttacccc

SEQ ID NO: 188109 - DNA, 25 bp, Canis familiaris
tcatcccttgaagtcttctatcctt

SEQ ID NO: 188110 - DNA, 25 bp, Canis familiaris
tcatcccctgaaatcaacctcaatt

SEQ ID NO: 188111 - DNA, 25 bp, Canis familiaris
tcatccccgcaaccaataatgcaca

SEQ ID NO: 188112 - DNA, 25 bp, Canis familiaris
tcatctcccaaacgccacagagatg

SEQ ID NO: 188113 - DNA, 25 bp, Canis familiaris
tcatccgggtcacccagcaggtgaa

SEQ ID NO: 188114 - DNA, 25 bp, Canis familiaris
tcatccaggtgaggcccaggtggga

SEQ ID NO: 188115 - DNA, 25 bp, Canis familiaris
tcatgtgagggtgcccaggggagcc

SEQ ID NO: 188116 - DNA, 25 bp, Canis familiaris
tcatggaagcgaacctcagcggaga

SEQ ID NO: 188117 - DNA, 25 bp, Canis familiaris
tcaggaagcgcacgtagccggtgac

SEQ ID NO: 188118 - DNA, 25 bp, Canis familiaris
tcaggcaagcgaagcgaccgactac

SEQ ID NO: 188119 - DNA, 25 bp, Canis familiaris
tcaggcacggagaccagcggtctaa

SEQ ID NO: 188120 - DNA, 25 bp, Canis familiaris
tcaggcacaagcaacctgggcttgg

SEQ ID NO: 188121 - DNA, 25 bp, Canis familiaris
tcaggacggcaaagcgacgcctgcg

SEQ ID NO: 188122 - DNA, 25 bp, Canis familiaris
tcatcggcggcgaggagctgccgcg

SEQ ID NO: 188123 - DNA, 25 bp, Canis familiaris
tcatcgtcggtccgggctgccacga

SEQ ID NO: 188124 - DNA, 25 bp, Canis familiaris
tcatggtctggtcgagttctctaaa

SEQ ID NO: 188125 - DNA, 25 bp, Canis familiaris
tcatgcccatcgaggtgtacttcaa

SEQ ID NO: 188126 - DNA, 25 bp, Canis familiaris
tcagacccgccgacgttttaagatt

SEQ ID NO: 188127 - DNA, 25 bp, Canis familiaris
tcagtccgcgtcagtattttaaatg

SEQ ID NO: 188128 - DNA, 25 bp, Canis familiaris
tcatctgcatcccttttttttaaag

SEQ ID NO: 188129 - DNA, 25 bp, Canis familiaris
tcatctcactcaccctggtgtgatt

SEQ ID NO: 188130 - DNA, 25 bp, Canis familiaris
tcatccctgcatccactggtgctgc

SEQ ID NO: 188131 - DNA, 25 bp, Canis familiaris
tcatcccatgatgagtgggctgcag

SEQ ID NO: 188132 - DNA, 25 bp, Canis familiaris
tcatcctcgtggtggagtcagccta

SEQ ID NO: 188133 - DNA, 25 bp, Canis familiaris
tcatcctggtggtggcagctgtgac

SEQ ID NO: 188134 - DNA, 25 bp, Canis familiaris
tcatgcctggagcctcaggggctga

SEQ ID NO: 188135 - DNA, 25 bp, Canis familiaris
tcatccagagcatctcctgggctga

SEQ ID NO: 188136 - DNA, 25 bp, Canis familiaris
tcacgcggcaccacttgaagaagcg

SEQ ID NO: 188137 - DNA, 25 bp, Canis familiaris
tcaccggccctggcaaggagtactg

SEQ ID NO: 188138 - DNA, 25 bp, Canis familiaris
tcatcctggccctcaagtgagtcac

SEQ ID NO: 188139 - DNA, 25 bp, Canis familiaris
tcaccttcctcatctggtggacagc

SEQ ID NO: 188140 - DNA, 25 bp, Canis familiaris
tcagcctgtcctacatggtgggtat

SEQ ID NO: 188141 - DNA, 25 bp, Canis familiaris
tcaggctttctttttgggtattgga

SEQ ID NO: 188142 - DNA, 25 bp, Canis familiaris
tcagaggttttctttggcctttcaa

SEQ ID NO: 188143 - DNA, 25 bp, Canis familiaris
tcagggtaattccttccagtcatta

SEQ ID NO: 188144 - DNA, 25 bp, Canis familiaris
tcagggttatctgcattctcagcca

SEQ ID NO: 188145 - DNA, 25 bp, Canis familiaris
tcaggacttttgtaatctcatagct

SEQ ID NO: 188146 - DNA, 25 bp, Canis familiaris
tcaggacggttcttttctagatttc

SEQ ID NO: 188147 - DNA, 25 bp, Canis familiaris
tcaggtcgttcttgtcgttttttcg

SEQ ID NO: 188148 - DNA, 25 bp, Canis familiaris
tcatgttcactttctgggtttcttt

SEQ ID NO: 188149 - DNA, 25 bp, Canis familiaris
taatgacctttgggctttcatcctt

SEQ ID NO: 188150 - DNA, 25 bp, Canis familiaris
taatagccattgggtttgttccttt

SEQ ID NO: 188151 - DNA, 25 bp, Canis familiaris
tcaaatctttgtatttcctcctttt

SEQ ID NO: 188152 - DNA, 25 bp, Canis familiaris
tcagactttgtggtttaccctcttt

SEQ ID NO: 188153 - DNA, 25 bp, Canis familiaris
tcagacttcttctcagagacccact

SEQ ID NO: 188154 - DNA, 25 bp, Canis familiaris
tcatcctgtttgcgcagcagatcca

SEQ ID NO: 188155 - DNA, 25 bp, Canis familiaris
tcatcgtgctgttttcacgaccaac

SEQ ID NO: 188156 - DNA, 25 bp, Canis familiaris
tcatcgtgcgtgtttcgtgagttac

SEQ ID NO: 188157 - DNA, 25 bp, Canis familiaris
tcatgcggcctatttctgttttaaa

SEQ ID NO: 188158 - DNA, 25 bp, Canis familiaris
tcatgaggcctttttgcccttgtga

SEQ ID NO: 188159 - DNA, 25 bp, Canis familiaris
tcatgcccaagttttcacctgtggc

SEQ ID NO: 188160 - DNA, 25 bp, Canis familiaris
tcatgtccaaggattggccgcttgt

SEQ ID NO: 188161 - DNA, 25 bp, Canis familiaris
tcatgcccaaggggtcgttgcgtgt

SEQ ID NO: 188162 - DNA, 25 bp, Canis familiaris
tcagtccaggaggggacctgctggc

SEQ ID NO: 188163 - DNA, 25 bp, Canis familiaris
tcagctaacgcttccagaccgcggc

SEQ ID NO: 188164 - DNA, 25 bp, Canis familiaris
tcatgaagactgaagcccccagcag

SEQ ID NO: 188165 - DNA, 25 bp, Canis familiaris
tcatgaaggctggcctccagcccac

SEQ ID NO: 188166 - DNA, 25 bp, Canis familiaris
tcatgcaagatcttcgtgaacgccc

SEQ ID NO: 188167 - DNA, 25 bp, Canis familiaris
tcatgagaagagtcggtcgccccga

SEQ ID NO: 188168 - DNA, 25 bp, Canis familiaris
tcatgacaagacccgtttccttcat

SEQ ID NO: 188169 - DNA, 25 bp, Canis familiaris
tcagaagtcacggcgtttcttccac

SEQ ID NO: 188170 - DNA, 25 bp, Canis familiaris
tcatgggtgcattctggtttttctt

SEQ ID NO: 188171 - DNA, 25 bp, Canis familiaris
tcatgtggtttctagccttttctgc

SEQ ID NO: 188172 - DNA, 25 bp, Canis familiaris
tcagtttttcctaattttctgacca

SEQ ID NO: 188173 - DNA, 25 bp, Canis familiaris
tcatctgttttatttatttttccca

SEQ ID NO: 188174 - DNA, 25 bp, Canis familiaris
tacttcctagtatattttccccaga

SEQ ID NO: 188175 - DNA, 25 bp, Canis familiaris
taattccggtaatttaatccaagtg

SEQ ID NO: 188176 - DNA, 25 bp, Canis familiaris
taacacccttcctgtaatccaatta

SEQ ID NO: 188177 - DNA, 25 bp, Canis familiaris
tcacccccttcctgatatttattat

SEQ ID NO: 188178 - DNA, 25 bp, Canis familiaris
tcaggccctttctaagtgttttcta

SEQ ID NO: 188179 - DNA, 25 bp, Canis familiaris
tcatccccttctgagagttgaatgt

SEQ ID NO: 188180 - DNA, 25 bp, Canis familiaris
tcaccccatcttcaggtagactacc

SEQ ID NO: 188181 - DNA, 25 bp, Canis familiaris
tcaactcgttgtacggtaacccagt

SEQ ID NO: 188182 - DNA, 25 bp, Canis familiaris
tcaccttggtgaatttgttaccggt

SEQ ID NO: 188183 - DNA, 25 bp, Canis familiaris
tcaccagggctgcttttaactctgg

SEQ ID NO: 188184 - DNA, 25 bp, Canis familiaris
tcagccatgggacttttttcatatt

SEQ ID NO: 188185 - DNA, 25 bp, Canis familiaris
tcatgccagggtactgtttctcact

SEQ ID NO: 188186 - DNA, 25 bp, Canis familiaris
tcacaagggaaggtttccaccttgg

SEQ ID NO: 188187 - DNA, 25 bp, Canis familiaris
ttcagagggggcacttccaagggga

SEQ ID NO: 188188 - DNA, 25 bp, Canis familiaris
tcacgaaggtggttttcccagggcg

SEQ ID NO: 188189 - DNA, 25 bp, Canis familiaris
tcaggactttggattggtccgcctc

SEQ ID NO: 188190 - DNA, 25 bp, Canis familiaris
tcaggattttgagatctggccccac

SEQ ID NO: 188191 - DNA, 25 bp, Canis familiaris
tcagtgtatttttttggtcctcatt

SEQ ID NO: 188192 - DNA, 25 bp, Canis familiaris
tcagtgtagtttttattgcattctt

SEQ ID NO: 188193 - DNA, 25 bp, Canis familiaris
tcagttatggttcctttggtcgctc

SEQ ID NO: 188194 - DNA, 25 bp, Canis familiaris
tcagttctgctgctgtcttttttgc

SEQ ID NO: 188195 - DNA, 25 bp, Canis familiaris
tcatgatttcatgggtcctgggttg

SEQ ID NO: 188196 - DNA, 25 bp, Canis familiaris
tcatgatcccgaggccctaggattg

SEQ ID NO: 188197 - DNA, 25 bp, Canis familiaris
tcatggcagccaggtgacaccaggt

SEQ ID NO: 188198 - DNA, 25 bp, Canis familiaris
tcaggcagagcacagagccggcggg

SEQ ID NO: 188199 - DNA, 25 bp, Canis familiaris
tcatgaagatcctgaccgagcgtgg

SEQ ID NO: 188200 - DNA, 25 bp, Canis familiaris
tcatgaagatcctgaccgagcgtgg

SEQ ID NO: 188201 - DNA, 25 bp, Canis familiaris
tcagaattcctcaaacaggcctggt

SEQ ID NO: 188202 - DNA, 25 bp, Canis familiaris
tcagactttctgaactcccaaggtt

SEQ ID NO: 188203 - DNA, 25 bp, Canis familiaris
tcagagcttcgggagtccgaaggtt

SEQ ID NO: 188204 - DNA, 25 bp, Canis familiaris
tcagatgttcggttctacgatgggt

SEQ ID NO: 188205 - DNA, 25 bp, Canis familiaris
tcagagtgcggttcttatcgagggt

SEQ ID NO: 188206 - DNA, 25 bp, Canis familiaris
tcagatggtggtcaacacggggctt

SEQ ID NO: 188207 - DNA, 25 bp, Canis familiaris
tcagctgttgttaaagcctgggagt

SEQ ID NO: 188208 - DNA, 25 bp, Canis familiaris
tagtccgtttaagctggttgctcct

SEQ ID NO: 188209 - DNA, 25 bp, Canis familiaris
tcagatccgtccctgatttggttgt

SEQ ID NO: 188210 - DNA, 25 bp, Canis familiaris
tcagagcccactctaggctggttgg

SEQ ID NO: 188211 - DNA, 25 bp, Canis familiaris
tcagcgcagccacttttgggggtaa

SEQ ID NO: 188212 - DNA, 25 bp, Canis familiaris
tcagctggccagctgggcagtggtt

SEQ ID NO: 188213 - DNA, 25 bp, Canis familiaris
tcatgccagccaggatggggagccc

SEQ ID NO: 188214 - DNA, 25 bp, Canis familiaris
tcactaccatagttttacccctaag

SEQ ID NO: 188215 - DNA, 25 bp, Canis familiaris
tcatgctgtccatgcttttcaacca

SEQ ID NO: 188216 - DNA, 25 bp, Canis familiaris
tcatgcatggcgctgcttattaccc

SEQ ID NO: 188217 - DNA, 25 bp, Canis familiaris
tcatgattgtcacctactttctcac

SEQ ID NO: 188218 - DNA, 25 bp, Canis familiaris
tcatgatggtaactatctcgtccct

SEQ ID NO: 188219 - DNA, 25 bp, Canis familiaris
tcatgtgggccacatcttatcttct

SEQ ID NO: 188220 - DNA, 25 bp, Canis familiaris
tcatggggccacattttccatctaa

SEQ ID NO: 188221 - DNA, 25 bp, Canis familiaris
tcatggaagccattcggttcctgta

SEQ ID NO: 188222 - DNA, 25 bp, Canis familiaris
tcaggggccagctgagagtcctgga

SEQ ID NO: 188223 - DNA, 25 bp, Canis familiaris
tcaggttgcaggtggctgacctcga

SEQ ID NO: 188224 - DNA, 25 bp, Canis familiaris
tcagtggacactttggctacttcca

SEQ ID NO: 188225 - DNA, 25 bp, Canis familiaris
tcagtggccacattttggttatcga

SEQ ID NO: 188226 - DNA, 25 bp, Canis familiaris
tcagttgccacttgtcggttctatg

SEQ ID NO: 188227 - DNA, 25 bp, Canis familiaris
tcagtgtccttactggagccacttc

SEQ ID NO: 188228 - DNA, 25 bp, Canis familiaris
tcagtgctctgcttaagattccctc

SEQ ID NO: 188229 - DNA, 25 bp, Canis familiaris
tcatggtctctttggaccactccat

SEQ ID NO: 188230 - DNA, 25 bp, Canis familiaris
tcacgtcaggaaccacgacatccat

SEQ ID NO: 188231 - DNA, 25 bp, Canis familiaris
tcagttaggacactctctttccagg

SEQ ID NO: 188232 - DNA, 25 bp, Canis familiaris
tcagttgggagtctgcgtctccctc

SEQ ID NO: 188233 - DNA, 25 bp, Canis familiaris
tcagtggagagtcttcttctccctc

SEQ ID NO: 188234 - DNA, 25 bp, Canis familiaris
tcagtgatggcacatttttcccttc

SEQ ID NO: 188235 - DNA, 25 bp, Canis familiaris
tcatgtgaggcatctgtggatagac

SEQ ID NO: 188236 - DNA, 25 bp, Canis familiaris
tcatggcatgtaatctggctgataa

SEQ ID NO: 188237 - DNA, 25 bp, Canis familiaris
tcagacatgtgaacctgcatgatat

SEQ ID NO: 188238 - DNA, 25 bp, Canis familiaris
tcagcaatgctgaaaatgaatttct

SEQ ID NO: 188239 - DNA, 25 bp, Canis familiaris
tcatgctgtcggcacatagttctcg

SEQ ID NO: 188240 - DNA, 25 bp, Canis familiaris
tcatcgtcgtggtcaacatcttcat

SEQ ID NO: 188241 - DNA, 25 bp, Canis familiaris
tcatcctcagtaccaaatctccaaa

SEQ ID NO: 188242 - DNA, 25 bp, Canis familiaris
tcatcctccttggaagattctgaga

SEQ ID NO: 188243 - DNA, 25 bp, Canis familiaris
tcatgtccacctgaggggctgtacc

SEQ ID NO: 188244 - DNA, 25 bp, Canis familiaris
tcatgtcccactgcagaggggctgg

SEQ ID NO: 188245 - DNA, 25 bp, Canis familiaris
tcatgccctgccccaaatgggaggg

SEQ ID NO: 188246 - DNA, 25 bp, Canis familiaris
tcatccctgagctgaacgggaagct

SEQ ID NO: 188247 - DNA, 25 bp, Canis familiaris
tcatccctgagtctgacggggatgc

SEQ ID NO: 188248 - DNA, 25 bp, Canis familiaris
tcatcccttgtgcccatgggggagt

SEQ ID NO: 188249 - DNA, 25 bp, Canis familiaris
tcagctccttttctgaaaggaggaa

SEQ ID NO: 188250 - DNA, 25 bp, Canis familiaris
tcatgcctctttctcgtaagtacga

SEQ ID NO: 188251 - DNA, 25 bp, Canis familiaris
tcatgctccttcattctgttagtag

SEQ ID NO: 188252 - DNA, 25 bp, Canis familiaris
tcagtctctccattcttgtcaagga

SEQ ID NO: 188253 - DNA, 25 bp, Canis familiaris
tcaggcccgcttgcttaaggataga

SEQ ID NO: 188254 - DNA, 25 bp, Canis familiaris
tcaggacacactagttaaagttcaa

SEQ ID NO: 188255 - DNA, 25 bp, Canis familiaris
tcaggtcctccacttggacgttata

SEQ ID NO: 188256 - DNA, 25 bp, Canis familiaris
tatagtgtcaaacttggtagagtaa

SEQ ID NO: 188257 - DNA, 25 bp, Canis familiaris
tcatcgctgtaattgcgtggttgac

SEQ ID NO: 188258 - DNA, 25 bp, Canis familiaris
tcatgtcttgaatgctgctggcttc

SEQ ID NO: 188259 - DNA, 25 bp, Canis familiaris
tcagttgtgaatgctgcgtcctgtc

SEQ ID NO: 188260 - DNA, 25 bp, Canis familiaris
tcatggactgtaaccgtgccttcag

SEQ ID NO: 188261 - DNA, 25 bp, Canis familiaris
tcagatactatcatacgtgctttta

SEQ ID NO: 188262 - DNA, 25 bp, Canis familiaris
tcagatgtatgacttggggttttaa

SEQ ID NO: 188263 - DNA, 25 bp, Canis familiaris
tcagatttcctgggtcgaatcctca

SEQ ID NO: 188264 - DNA, 25 bp, Canis familiaris
tcaggtatcctggagcctagaccac

SEQ ID NO: 188265 - DNA, 25 bp, Canis familiaris
tcagaggtgacggagcccaactcct

SEQ ID NO: 188266 - DNA, 25 bp, Canis familiaris
tcagggtgacgatcccattgctgac

SEQ ID NO: 188267 - DNA, 25 bp, Canis familiaris
tcagggctacaaatctcctcaggac

SEQ ID NO: 188268 - DNA, 25 bp, Canis familiaris
tcaggccccagaatagctcctggac

SEQ ID NO: 188269 - DNA, 25 bp, Canis familiaris
tcatggccccagatatcctaggaat

SEQ ID NO: 188270 - DNA, 25 bp, Canis familiaris
tcaaaggccagcatatccgggacac

SEQ ID NO: 188271 - DNA, 25 bp, Canis familiaris
tcaaaggccagcatatccgggacac

SEQ ID NO: 188272 - DNA, 25 bp, Canis familiaris
tcagagggtgcggtaccttggactc

SEQ ID NO: 188273 - DNA, 25 bp, Canis familiaris
tcaggagttggcatactcttgcccc

SEQ ID NO: 188274 - DNA, 25 bp, Canis familiaris
tcaaacataggtaaggcctgccgtc

SEQ ID NO: 188275 - DNA, 25 bp, Canis familiaris
tcatccacagggagaggccccgtgt

SEQ ID NO: 188276 - DNA, 25 bp, Canis familiaris
tcactgccagtggggaagccccttc

SEQ ID NO: 188277 - DNA, 25 bp, Canis familiaris
tcaggcctccagggaagccttttgc

SEQ ID NO: 188278 - DNA, 25 bp, Canis familiaris
tcaggcagcccagcaaacctgtgtg

SEQ ID NO: 188279 - DNA, 25 bp, Canis familiaris
tcaggcaaccaggaacccttgaggg

SEQ ID NO: 188280 - DNA, 25 bp, Canis familiaris
tcagtcaacccttaccgcattgaag

SEQ ID NO: 188281 - DNA, 25 bp, Canis familiaris
tcaggaacgcctcgatacgctggaa

SEQ ID NO: 188282 - DNA, 25 bp, Canis familiaris
tcaggaatcgtgttggtagggaaga

SEQ ID NO: 188283 - DNA, 25 bp, Canis familiaris
tcaggccagcgtttggggggccaga

SEQ ID NO: 188284 - DNA, 25 bp, Canis familiaris
tcaatcttctgtgtggtggggccaa

SEQ ID NO: 188285 - DNA, 25 bp, Canis familiaris
tcatgaatttgtttgcctgggccca

SEQ ID NO: 188286 - DNA, 25 bp, Canis familiaris
tcaggatctttgttcctgctcgcaa

SEQ ID NO: 188287 - DNA, 25 bp, Canis familiaris
tcatggttgaccttatctctccaga

SEQ ID NO: 188288 - DNA, 25 bp, Canis familiaris
tcaggagtagcctctgtctcctggg

SEQ ID NO: 188289 - DNA, 25 bp, Canis familiaris
tcagattgtacctgtgctcacgggc

SEQ ID NO: 188290 - DNA, 25 bp, Canis familiaris
tcagtggttcgaggtgcttcgtggc

SEQ ID NO: 188291 - DNA, 25 bp, Canis familiaris
tcatgaagtgtcgccgcttcgtgga

SEQ ID NO: 188292 - DNA, 25 bp, Canis familiaris
tcagaacttccctacttctgtgcaa

SEQ ID NO: 188293 - DNA, 25 bp, Canis familiaris
tcaggacttcctggacagactctct

SEQ ID NO: 188294 - DNA, 25 bp, Canis familiaris
tcagggtgatggggacagcagctct

SEQ ID NO: 188295 - DNA, 25 bp, Canis familiaris
tcaggtgcttgggcacctggttccc

SEQ ID NO: 188296 - DNA, 25 bp, Canis familiaris
tcagtgtgccaggtcaccatggttt

SEQ ID NO: 188297 - DNA, 25 bp, Canis familiaris
tcaggctcaaactgccttttttttt

SEQ ID NO: 188298 - DNA, 25 bp, Canis familiaris
tcaggtgtacacggcgttgtttcta

SEQ ID NO: 188299 - DNA, 25 bp, Canis familiaris
tcaggaccagatccacgttgttctc

SEQ ID NO: 188300 - DNA, 25 bp, Canis familiaris
tcagagactcgaaggcggtgggccc

SEQ ID NO: 188301 - DNA, 25 bp, Canis familiaris
tcaggacgtgcagggcggaggagac

SEQ ID NO: 188302 - DNA, 25 bp, Canis familiaris
tcagggtgtgcaggcggagcagcca

SEQ ID NO: 188303 - DNA, 25 bp, Canis familiaris
tcagcagtatgtgcgggactccaga

SEQ ID NO: 188304 - DNA, 25 bp, Canis familiaris
tcagagcatcatcaaggagcaccac

SEQ ID NO: 188305 - DNA, 25 bp, Canis familiaris
tcatggctgattcaggacccatcta

SEQ ID NO: 188306 - DNA, 25 bp, Canis familiaris
tcatgaggagaggggaaccatgctg

SEQ ID NO: 188307 - DNA, 25 bp, Canis familiaris
tcatgtgcatggtgcggaacctgct

SEQ ID NO: 188308 - DNA, 25 bp, Canis familiaris
tcatgccagcgaatggtgacctctt

SEQ ID NO: 188309 - DNA, 25 bp, Canis familiaris
tcatccaggctctgtgaggcttttc

SEQ ID NO: 188310 - DNA, 25 bp, Canis familiaris
tcatccatgaccgaagagacatttt

SEQ ID NO: 188311 - DNA, 25 bp, Canis familiaris
tcatccagacttgaaccatggccat

SEQ ID NO: 188312 - DNA, 25 bp, Canis familiaris
tcagcagaactagaattaccacaga

SEQ ID NO: 188313 - DNA, 25 bp, Canis familiaris
tcatgcaaatgcagtccttacccgt

SEQ ID NO: 188314 - DNA, 25 bp, Canis familiaris
tcaggaagcgaagctgtgacccgtc

SEQ ID NO: 188315 - DNA, 25 bp, Canis familiaris
tcatggacagcggggtgctaccact

SEQ ID NO: 188316 - DNA, 25 bp, Canis familiaris
tcagagccagtggctggtcttccat

SEQ ID NO: 188317 - DNA, 25 bp, Canis familiaris
taatccatggcacttgtccatctgc

SEQ ID NO: 188318 - DNA, 25 bp, Canis familiaris
tcaggccatgaccatatcactcatc

SEQ ID NO: 188319 - DNA, 25 bp, Canis familiaris
tcagactcagtaatatcctgccctc

SEQ ID NO: 188320 - DNA, 25 bp, Canis familiaris
tcatgcattaggcttgcctgctctt

SEQ ID NO: 188321 - DNA, 25 bp, Canis familiaris
tcatgaatagcaccaatgtccttat

SEQ ID NO: 188322 - DNA, 25 bp, Canis familiaris
tcagcagaatgcccagataagtttg

SEQ ID NO: 188323 - DNA, 25 bp, Canis familiaris
taagaatagaagaaagtggtgttgg

SEQ ID NO: 188324 - DNA, 25 bp, Canis familiaris
tcaggaataaagacacttggttttt

SEQ ID NO: 188325 - DNA, 25 bp, Canis familiaris
tcaggtgaaaagacttgattttttg

SEQ ID NO: 188326 - DNA, 25 bp, Canis familiaris
tcacggtaacgtctgtctagcattt

SEQ ID NO: 188327 - DNA, 25 bp, Canis familiaris
tcacggtttagtcttctgacagatg

SEQ ID NO: 188328 - DNA, 25 bp, Canis familiaris
tcacggggactgcatttctcacaga

SEQ ID NO: 188329 - DNA, 25 bp, Canis familiaris
tcacctgaggtcaggagttcaagac

SEQ ID NO: 188330 - DNA, 25 bp, Canis familiaris
tcacttctggacccagaccttagcc

SEQ ID NO: 188331 - DNA, 25 bp, Canis familiaris
tcagtgcttggctccaactctagac

SEQ ID NO: 188332 - DNA, 25 bp, Canis familiaris
tcactcttgggcccaagcccagagg

SEQ ID NO: 188333 - DNA, 25 bp, Canis familiaris
tcagccctgggtaaatgcccataaa

SEQ ID NO: 188334 - DNA, 25 bp, Canis familiaris
tcagctccaagaaaactccctacga

SEQ ID NO: 188335 - DNA, 25 bp, Canis familiaris
tcatggccaagaccaaggccctcct

SEQ ID NO: 188336 - DNA, 25 bp, Canis familiaris
tcagctgccaaaggaaacctcgccc

SEQ ID NO: 188337 - DNA, 25 bp, Canis familiaris
tcatggccgtgcggaacacgtactc

SEQ ID NO: 188338 - DNA, 25 bp, Canis familiaris
tcatggccgtgcggaacacgtactc

SEQ ID NO: 188339 - DNA, 25 bp, Canis familiaris
tcagcggagcaggcccaacgattct

SEQ ID NO: 188340 - DNA, 25 bp, Canis familiaris
tcaggagcaaactcatccagcttcc

SEQ ID NO: 188341 - DNA, 25 bp, Canis familiaris
tcaggctcaaacttcacaagctttc

SEQ ID NO: 188342 - DNA, 25 bp, Canis familiaris
tcagtcacacagtcgtgaaacagtt

SEQ ID NO: 188343 - DNA, 25 bp, Canis familiaris
cccagagacccgaggatccagtgtg

SEQ ID NO: 188344 - DNA, 25 bp, Canis familiaris
tcatgaccagctgaggctacgcata

SEQ ID NO: 188345 - DNA, 25 bp, Canis familiaris
tcatgtctccagatggaacgcatca

SEQ ID NO: 188346 - DNA, 25 bp, Canis familiaris
tcagcttccagcacggacaggacat

SEQ ID NO: 188347 - DNA, 25 bp, Canis familiaris
tcaggacccggctgcaaggtcagac

SEQ ID NO: 188348 - DNA, 25 bp, Canis familiaris
tcaggacccgccttgaatgacgtga

SEQ ID NO: 188349 - DNA, 25 bp, Canis familiaris
tcatgataacccccgaatacagacc

SEQ ID NO: 188350 - DNA, 25 bp, Canis familiaris
tcagctcgagccatccagaagaaaa

SEQ ID NO: 188351 - DNA, 25 bp, Canis familiaris
tcagcagccgctcaacagaggagaa

SEQ ID NO: 188352 - DNA, 25 bp, Canis familiaris
tcagcctcatctccaggagggaacc

SEQ ID NO: 188353 - DNA, 25 bp, Canis familiaris
tcaccatcttccaggagcgagaccc

SEQ ID NO: 188354 - DNA, 25 bp, Canis familiaris
tcaccatcttccaggagcgagatcc

SEQ ID NO: 188355 - DNA, 25 bp, Canis familiaris
tcagtatttcagggtccgcatgtcc

SEQ ID NO: 188356 - DNA, 25 bp, Canis familiaris
tcaggagttgacagtctctgcgtcc

SEQ ID NO: 188357 - DNA, 25 bp, Canis familiaris
tcagggatgctcatggcctctgaac

SEQ ID NO: 188358 - DNA, 25 bp, Canis familiaris
tcatgaggctccaggccatcgagga

SEQ ID NO: 188359 - DNA, 25 bp, Canis familiaris
tcatgagcttcgtcaacctcgtgga

SEQ ID NO: 188360 - DNA, 25 bp, Canis familiaris
tcagagcttcgtgactcgcgatgtt

SEQ ID NO: 188361 - DNA, 25 bp, Canis familiaris
tcagactttgtcattgtgctggccc

SEQ ID NO: 188362 - DNA, 25 bp, Canis familiaris
tcagactggcagacactctgtcggg

SEQ ID NO: 188363 - DNA, 25 bp, Canis familiaris
tcatgacagatggccaccatggcag

SEQ ID NO: 188364 - DNA, 25 bp, Canis familiaris
tcatgaagagcatctcgctgctgcg

SEQ ID NO: 188365 - DNA, 25 bp, Canis familiaris
tcagaagagcatccatcggcacctg

SEQ ID NO: 188366 - DNA, 25 bp, Canis familiaris
tcatgtatgtgtccattggccttgg

SEQ ID NO: 188367 - DNA, 25 bp, Canis familiaris
tcatgagtggctacctgggctattg

SEQ ID NO: 188368 - DNA, 25 bp, Canis familiaris
tcatgggagccgccaggtggcattg

SEQ ID NO: 188369 - DNA, 25 bp, Canis familiaris
tcatggagtccgccaagagccagga

SEQ ID NO: 188370 - DNA, 25 bp, Canis familiaris
tcatgcataacttgaaagagccatg

SEQ ID NO: 188371 - DNA, 25 bp, Canis familiaris
tcatgctccacttagcaaccacatt

SEQ ID NO: 188372 - DNA, 25 bp, Canis familiaris
tcagatctcacatagcaccgtctga

SEQ ID NO: 188373 - DNA, 25 bp, Canis familiaris
tcagttacgagaggcctgcgctgca

SEQ ID NO: 188374 - DNA, 25 bp, Canis familiaris
tcatggtacaggtgctcgtctgctt

SEQ ID NO: 188375 - DNA, 25 bp, Canis familiaris
tcatggccatttgtctacttgctta

SEQ ID NO: 188376 - DNA, 25 bp, Canis familiaris
tcagtaatttcgccttctgatctta

SEQ ID NO: 188377 - DNA, 25 bp, Canis familiaris
tcagtgatgatttggcctacttcct

SEQ ID NO: 188378 - DNA, 25 bp, Canis familiaris
tcagttgattggggctggcctcacc

SEQ ID NO: 188379 - DNA, 25 bp, Canis familiaris
tcagtggaccgaaggctctctccac

SEQ ID NO: 188380 - DNA, 25 bp, Canis familiaris
tcatgtaaattgacgtctcccgcat

SEQ ID NO: 188381 - DNA, 25 bp, Canis familiaris
tcatgcaacagcaattcagctcccc

SEQ ID NO: 188382 - DNA, 25 bp, Canis familiaris
tcagcacagcaccactagcagctgc

SEQ ID NO: 188383 - DNA, 25 bp, Canis familiaris
tcacgatgacatcgctgcatgcctg

SEQ ID NO: 188384 - DNA, 25 bp, Canis familiaris
tcacgggagtctggctatgctggga

SEQ ID NO: 188385 - DNA, 25 bp, Canis familiaris
tcagaggacagagtctgctttgggg

SEQ ID NO: 188386 - DNA, 25 bp, Canis familiaris
tcatgggcaaggacgtctcggacga

SEQ ID NO: 188387 - DNA, 25 bp, Canis familiaris
tcaggctccaggaagcatcgggacc

SEQ ID NO: 188388 - DNA, 25 bp, Canis familiaris
tcaggccagctgccaagcatgggga

SEQ ID NO: 188389 - DNA, 25 bp, Canis familiaris
tcaggtcggtcacctggctgtggat

SEQ ID NO: 188390 - DNA, 25 bp, Canis familiaris
tcacctctggaccttgggggaagaa

SEQ ID NO: 188391 - DNA, 25 bp, Canis familiaris
tcacgtatacacctattatgggaaa

SEQ ID NO: 188392 - DNA, 25 bp, Canis familiaris
tcatggctgataacccatcctggga

SEQ ID NO: 188393 - DNA, 25 bp, Canis familiaris
tcatgttgataggctgcacatcctg

SEQ ID NO: 188394 - DNA, 25 bp, Canis familiaris
tcaggtgatccagtccatgcctgtc

SEQ ID NO: 188395 - DNA, 25 bp, Canis familiaris
tcaagtgcatgcagctgactgactt

SEQ ID NO: 188396 - DNA, 25 bp, Canis familiaris
tcaaatgcatcaccatccgatttat

SEQ ID NO: 188397 - DNA, 25 bp, Canis familiaris
tcagcagcaacaaccgcgattctca

SEQ ID NO: 188398 - DNA, 25 bp, Canis familiaris
tcagcggtatccaacgatgtcacgt

SEQ ID NO: 188399 - DNA, 25 bp, Canis familiaris
tcaggagtatcgccagaaagcacgc

SEQ ID NO: 188400 - DNA, 25 bp, Canis familiaris
tcagacagctgaggccaaaagaggc

SEQ ID NO: 188401 - DNA, 25 bp, Canis familiaris
tcagaaaccatggaaacagaggatg

SEQ ID NO: 188402 - DNA, 25 bp, Canis familiaris
tcaggagattagtaagtcagaggga

SEQ ID NO: 188403 - DNA, 25 bp, Canis familiaris
tcagaagttttctgccatggaggca

SEQ ID NO: 188404 - DNA, 25 bp, Canis familiaris
tcagaggttctatcagctgcggggc

SEQ ID NO: 188405 - DNA, 25 bp, Canis familiaris
tcaggagtcccagcatctgttgagg

SEQ ID NO: 188406 - DNA, 25 bp, Canis familiaris
tcacgtgacccagactgagccggga

SEQ ID NO: 188407 - DNA, 25 bp, Canis familiaris
tcacgtgacccagactgagccggga

SEQ ID NO: 188408 - DNA, 25 bp, Canis familiaris
tcacgtgacccagactgagccggga

SEQ ID NO: 188409 - DNA, 25 bp, Canis familiaris
tcacgtgacccagactgagccggga

SEQ ID NO: 188410 - DNA, 25 bp, Canis familiaris
tcacgtgacccagactgagccggga

SEQ ID NO: 188411 - DNA, 25 bp, Canis familiaris
tcaggtggctccggaatggccagga

SEQ ID NO: 188412 - DNA, 25 bp, Canis familiaris
taggttgttaggtatgttaaaagat

SEQ ID NO: 188413 - DNA, 25 bp, Canis familiaris
tcaggtggtttgaatttaaaaggtg

SEQ ID NO: 188414 - DNA, 25 bp, Canis familiaris
tcaggtggttttgatttaaaggtgg

SEQ ID NO: 188415 - DNA, 25 bp, Canis familiaris
tcatggtgtgaattccgtttaaaga

SEQ ID NO: 188416 - DNA, 25 bp, Canis familiaris
tcaggtgtggcattccactttcata

SEQ ID NO: 188417 - DNA, 25 bp, Canis familiaris
tcagcggtggaacctctgtagaaca

SEQ ID NO: 188418 - DNA, 25 bp, Canis familiaris
tcagctggtacaaacctggccatag

SEQ ID NO: 188419 - DNA, 25 bp, Canis familiaris
tcagtggtgacaagagcctcgagct

SEQ ID NO: 188420 - DNA, 25 bp, Canis familiaris
tcatgtggtgagagccacacccttc

SEQ ID NO: 188421 - DNA, 25 bp, Canis familiaris
tcagtggtggacctgacctgccgtc

SEQ ID NO: 188422 - DNA, 25 bp, Canis familiaris
tcagtagtagaactgtacttagtct

SEQ ID NO: 188423 - DNA, 25 bp, Canis familiaris
tcaggagtagacctctccttggcct

SEQ ID NO: 188424 - DNA, 25 bp, Canis familiaris
tcagtggtagagcgcttgcctagca

SEQ ID NO: 188425 - DNA, 25 bp, Canis familiaris
tcagctcttaacatgcattgcccac

SEQ ID NO: 188426 - DNA, 25 bp, Canis familiaris
tcacctatggatatcttgccacaga

SEQ ID NO: 188427 - DNA, 25 bp, Canis familiaris
tcagtcttgtctttgcttcgagaga

SEQ ID NO: 188428 - DNA, 25 bp, Canis familiaris
tcatgactcgttctgtaggagagat

SEQ ID NO: 188429 - DNA, 25 bp, Canis familiaris
tcatgactagtgatgctgataggaa

SEQ ID NO: 188430 - DNA, 25 bp, Canis familiaris
tcatgtcttatgtctgcttttgcta

SEQ ID NO: 188431 - DNA, 25 bp, Canis familiaris
tcagtcattccttcattttcattgc

SEQ ID NO: 188432 - DNA, 25 bp, Canis familiaris
tcaggtgatccagtgttgtccattc

SEQ ID NO: 188433 - DNA, 25 bp, Canis familiaris
tcagcagtgaacttgtcagccaatt

SEQ ID NO: 188434 - DNA, 25 bp, Canis familiaris
tcagcaggctgttggaagccaagaa

SEQ ID NO: 188435 - DNA, 25 bp, Canis familiaris
tcagcaggtgccggaaccactgaga

SEQ ID NO: 188436 - DNA, 25 bp, Canis familiaris
tcagggtgccgaggactccagaagg

SEQ ID NO: 188437 - DNA, 25 bp, Canis familiaris
tcagtcgtgcaccggccaaagactg

SEQ ID NO: 188438 - DNA, 25 bp, Canis familiaris
tcaggagtatcgcccgaaatgcact

SEQ ID NO: 188439 - DNA, 25 bp, Canis familiaris
tcagaggatactcttgaaccacata

SEQ ID NO: 188440 - DNA, 25 bp, Canis familiaris
tcagggacatcttgttgagctcctc

SEQ ID NO: 188441 - DNA, 25 bp, Canis familiaris
tcagggaagttgccatactcctctg

SEQ ID NO: 188442 - DNA, 25 bp, Canis familiaris
tcatgggaatgaagaagtctctcct

SEQ ID NO: 188443 - DNA, 25 bp, Canis familiaris
tcatgggcattgggccagcctatgc

SEQ ID NO: 188444 - DNA, 25 bp, Canis familiaris
tcagtggcattgaatccagctctcc

SEQ ID NO: 188445 - DNA, 25 bp, Canis familiaris
tcaggcgggatagcacctggctggg

SEQ ID NO: 188446 - DNA, 25 bp, Canis familiaris
tcagtcggagactcatctcgacggg

SEQ ID NO: 188447 - DNA, 25 bp, Canis familiaris
tcagtcggaatggcgctcagcagat

SEQ ID NO: 188448 - DNA, 25 bp, Canis familiaris
tcagatctgggaggcctcagtgctg

SEQ ID NO: 188449 - DNA, 25 bp, Canis familiaris
tcagtagggggaaagcttggggtag

SEQ ID NO: 188450 - DNA, 25 bp, Canis familiaris
tcagctggggggagggctgtgcggc

SEQ ID NO: 188451 - DNA, 25 bp, Canis familiaris
tcagctgggagggggggtgtccctg

SEQ ID NO: 188452 - DNA, 25 bp, Canis familiaris
tcaggctgaaggtggcgtctgtcct

SEQ ID NO: 188453 - DNA, 25 bp, Canis familiaris
tcagcctaagagtggctctctgcct

SEQ ID NO: 188454 - DNA, 25 bp, Canis familiaris
tcaggctcagtgcacgagctttctc

SEQ ID NO: 188455 - DNA, 25 bp, Canis familiaris
tcaggccagtggttatgcgcttagg

SEQ ID NO: 188456 - DNA, 25 bp, Canis familiaris
tcatggcctgtgtttatcctgtacc

SEQ ID NO: 188457 - DNA, 25 bp, Canis familiaris
tcaggcttgtgatttgctctctttt

SEQ ID NO: 188458 - DNA, 25 bp, Canis familiaris
tcaggcttgctgattttttcatttt

SEQ ID NO: 188459 - DNA, 25 bp, Canis familiaris
tcaggacactgttctttatctcttg

SEQ ID NO: 188460 - DNA, 25 bp, Canis familiaris
tcagggactggtatccgctcagaga

SEQ ID NO: 188461 - DNA, 25 bp, Canis familiaris
taagggcggtttccacatgggaggt

SEQ ID NO: 188462 - DNA, 25 bp, Canis familiaris
tcagagtgctgggtttctacgaggg

SEQ ID NO: 188463 - DNA, 25 bp, Canis familiaris
tcagagttccggttctaccgaggtc

SEQ ID NO: 188464 - DNA, 25 bp, Canis familiaris
taaactttgtggttactggagccgc

SEQ ID NO: 188465 - DNA, 25 bp, Canis familiaris
taatacccgggtaaatagagcctgg

SEQ ID NO: 188466 - DNA, 25 bp, Canis familiaris
tactactcaggggaaaaagagcctt

SEQ ID NO: 188467 - DNA, 25 bp, Canis familiaris
tcactactgtttaagaaaaggtctt

SEQ ID NO: 188468 - DNA, 25 bp, Canis familiaris
tcagtccccttaacaaattggcttt

SEQ ID NO: 188469 - DNA, 25 bp, Canis familiaris
tcaggaacttggatacaattggcgt

SEQ ID NO: 188470 - DNA, 25 bp, Canis familiaris
tcaggccaagttatacaaatagagt

SEQ ID NO: 188471 - DNA, 25 bp, Canis familiaris
tcacccaagcttctacgacgagctg

SEQ ID NO: 188472 - DNA, 25 bp, Canis familiaris
tcaggccaagttcttcgcctgcatc

SEQ ID NO: 188473 - DNA, 25 bp, Canis familiaris
tcaggctgaaggaagtatcgccgcc

SEQ ID NO: 188474 - DNA, 25 bp, Canis familiaris
tcaggctgaagggaatatgcaccgc

SEQ ID NO: 188475 - DNA, 25 bp, Canis familiaris
tcaggcttctgagcagtcagcaccc

SEQ ID NO: 188476 - DNA, 25 bp, Canis familiaris
tcagagcttcagagcaggccttgct

SEQ ID NO: 188477 - DNA, 25 bp, Canis familiaris
tcagtgcactggaggagccactctc

SEQ ID NO: 188478 - DNA, 25 bp, Canis familiaris
tcaggagctgggccaggcccactca

SEQ ID NO: 188479 - DNA, 25 bp, Canis familiaris
tcagctagcttgcactgggagcacc

SEQ ID NO: 188480 - DNA, 25 bp, Canis familiaris
tcagaacatctggcagccctaggcc

SEQ ID NO: 188481 - DNA, 25 bp, Canis familiaris
tcagaacagggccctcgggtaaatt

SEQ ID NO: 188482 - DNA, 25 bp, Canis familiaris
tcagtgaggggcccccaagggtttg

SEQ ID NO: 188483 - DNA, 25 bp, Canis familiaris
tcaggaggggcgctgcatatcaggg

SEQ ID NO: 188484 - DNA, 25 bp, Canis familiaris
tcagctgatcgcccgtgtagaaggc

SEQ ID NO: 188485 - DNA, 25 bp, Canis familiaris
tcagcactcggtcgggaagcaggtt

SEQ ID NO: 188486 - DNA, 25 bp, Canis familiaris
tcagcaccggggactacagcattgg

SEQ ID NO: 188487 - DNA, 25 bp, Canis familiaris
tcagagcccggattccagacaatgg

SEQ ID NO: 188488 - DNA, 25 bp, Canis familiaris
tcagacaccgagctccaggaaatgt

SEQ ID NO: 188489 - DNA, 25 bp, Canis familiaris
tcaggagcctggcaccagagtccag

SEQ ID NO: 188490 - DNA, 25 bp, Canis familiaris
tcagagagccaacagccgttgccaa

SEQ ID NO: 188491 - DNA, 25 bp, Canis familiaris
tcatgggccaagtcggcaggtgcca

SEQ ID NO: 188492 - DNA, 25 bp, Canis familiaris
tcatgggcacaaccgagattggaac

SEQ ID NO: 188493 - DNA, 25 bp, Canis familiaris
tcaggccacagaccgagaagagaat

SEQ ID NO: 188494 - DNA, 25 bp, Canis familiaris
tcaggacagcaactgggccagcaaa

SEQ ID NO: 188495 - DNA, 25 bp, Canis familiaris
tcaggcagctagttgtcgcccaaac

SEQ ID NO: 188496 - DNA, 25 bp, Canis familiaris
tcagagcactagttccctattgacc

SEQ ID NO: 188497 - DNA, 25 bp, Canis familiaris
tcagcccagagttccttgattgacc

SEQ ID NO: 188498 - DNA, 25 bp, Canis familiaris
tcaccacaggttgaagcatttagcc

SEQ ID NO: 188499 - DNA, 25 bp, Canis familiaris
tcacctcaccctgaagattttctca

SEQ ID NO: 188500 - DNA, 25 bp, Canis familiaris
tcagcccgcaccaaaacatttttgc

SEQ ID NO: 188501 - DNA, 25 bp, Canis familiaris
tcacccctccttaaaatcttagtca

SEQ ID NO: 188502 - DNA, 25 bp, Canis familiaris
tcaccctcttaccaaaacttgagcc

SEQ ID NO: 188503 - DNA, 25 bp, Canis familiaris
tcaaagttctgtccgacacctaggc

SEQ ID NO: 188504 - DNA, 25 bp, Canis familiaris
tcaacgatacctcagatccagtacc

SEQ ID NO: 188505 - DNA, 25 bp, Canis familiaris
tcagactacacctctgtcatcacta

SEQ ID NO: 188506 - DNA, 25 bp, Canis familiaris
tcagagaaaccttgcttaacatcca

SEQ ID NO: 188507 - DNA, 25 bp, Canis familiaris
tcagaaaccccggtcactaagatac

SEQ ID NO: 188508 - DNA, 25 bp, Canis familiaris
tcagaaacccccttgccaagtaagg

SEQ ID NO: 188509 - DNA, 25 bp, Canis familiaris
tcagaaaactccaatgtccaaaaaa

SEQ ID NO: 188510 - DNA, 25 bp, Canis familiaris
taacaaccctaaatgcggaagaaat

SEQ ID NO: 188511 - DNA, 25 bp, Canis familiaris
tcagacgacaccaaatccggacgca

SEQ ID NO: 188512 - DNA, 25 bp, Canis familiaris
tcagagctcatctcttatccaacac

SEQ ID NO: 188513 - DNA, 25 bp, Canis familiaris
tcaggcttcctggtgtcatcaggct

SEQ ID NO: 188514 - DNA, 25 bp, Canis familiaris
tcagtgttcactcttgcacagcgag

SEQ ID NO: 188515 - DNA, 25 bp, Canis familiaris
tcatgtggacactttgctcagggca

SEQ ID NO: 188516 - DNA, 25 bp, Canis familiaris
tcatggtgagtcatcgctcaggaga

SEQ ID NO: 188517 - DNA, 25 bp, Canis familiaris
tcagagaaggcttcctcctgcatga

SEQ ID NO: 188518 - DNA, 25 bp, Canis familiaris
tcagagataggccctgctcatgcca

SEQ ID NO: 188519 - DNA, 25 bp, Canis familiaris
tcaggatgtggcaactcttctcatt

SEQ ID NO: 188520 - DNA, 25 bp, Canis familiaris
tcagaggtgacagctcttctgcttt

SEQ ID NO: 188521 - DNA, 25 bp, Canis familiaris
tcatggaccacagcatttctgcctt

SEQ ID NO: 188522 - DNA, 25 bp, Canis familiaris
tcatggacactgtcacagtcctgcc

SEQ ID NO: 188523 - DNA, 25 bp, Canis familiaris
tcatggactctggggatggcgtcac

SEQ ID NO: 188524 - DNA, 25 bp, Canis familiaris
tcagtactccttcgtgtgagacacc

SEQ ID NO: 188525 - DNA, 25 bp, Canis familiaris
tcagctgtctctgtggcatggagca

SEQ ID NO: 188526 - DNA, 25 bp, Canis familiaris
tcagctgctcacagaactgcgactc

SEQ ID NO: 188527 - DNA, 25 bp, Canis familiaris
tcagctgctagagctcactgagccc

SEQ ID NO: 188528 - DNA, 25 bp, Canis familiaris
tcagatgcgaggccttctggccaag

SEQ ID NO: 188529 - DNA, 25 bp, Canis familiaris
tcaggcgatgtgcttgctggcagcc

SEQ ID NO: 188530 - DNA, 25 bp, Canis familiaris
tcaggcgatgtgctttatggcaggc

SEQ ID NO: 188531 - DNA, 25 bp, Canis familiaris
tcagggtgttgtttgtggcaggggc

SEQ ID NO: 188532 - DNA, 25 bp, Canis familiaris
tcaggagggtatttggtcagagggg

SEQ ID NO: 188533 - DNA, 25 bp, Canis familiaris
tcagtggagggtggggtggaggggg

SEQ ID NO: 188534 - DNA, 25 bp, Canis familiaris
tcaggagccaggaggggcgaggctt

SEQ ID NO: 188535 - DNA, 25 bp, Canis familiaris
tcagagacaaggactttggtttttg

SEQ ID NO: 188536 - DNA, 25 bp, Canis familiaris
tcacgaaggagaaggaggatgtttt

SEQ ID NO: 188537 - DNA, 25 bp, Canis familiaris
tcaccaaggcgcagcgcgacgtcat

SEQ ID NO: 188538 - DNA, 25 bp, Canis familiaris
tcaacaggggctctggatcagctgc

SEQ ID NO: 188539 - DNA, 25 bp, Canis familiaris
tcaggaggggggagtcagccccttc

SEQ ID NO: 188540 - DNA, 25 bp, Canis familiaris
tcaggacgccgggatgtgtgacccc

SEQ ID NO: 188541 - DNA, 25 bp, Canis familiaris
tcaggcactgcaccggagtgtgctt

SEQ ID NO: 188542 - DNA, 25 bp, Canis familiaris
tcaggaccatccgcatgagcatgta

SEQ ID NO: 188543 - DNA, 25 bp, Canis familiaris
tcaggccctacatagacaatacagt

SEQ ID NO: 188544 - DNA, 25 bp, Canis familiaris
tcagtgctccaagataataaaaatg

SEQ ID NO: 188545 - DNA, 25 bp, Canis familiaris
tcaggctcccaatgaattcaaacca

SEQ ID NO: 188546 - DNA, 25 bp, Canis familiaris
tcagtccatccctgaaatcacacac

SEQ ID NO: 188547 - DNA, 25 bp, Canis familiaris
tcagcccccatcatgatggtccaga

SEQ ID NO: 188548 - DNA, 25 bp, Canis familiaris
tcagcacgactccgagcatttcgtg

SEQ ID NO: 188549 - DNA, 25 bp, Canis familiaris
tcagcactagcctggctttccaggc

SEQ ID NO: 188550 - DNA, 25 bp, Canis familiaris
tcatggcccacatggcctccaagga

SEQ ID NO: 188551 - DNA, 25 bp, Canis familiaris
tcatggcctacatggcctccaagga

SEQ ID NO: 188552 - DNA, 25 bp, Canis familiaris
tcaggcctactgggccaagcaaggg

SEQ ID NO: 188553 - DNA, 25 bp, Canis familiaris
tcacaggctaacacgcaacaagggt

SEQ ID NO: 188554 - DNA, 25 bp, Canis familiaris
tcacggccagtcgccaaaactagca

SEQ ID NO: 188555 - DNA, 25 bp, Canis familiaris
tcacctcacagttcccataaattca

SEQ ID NO: 188556 - DNA, 25 bp, Canis familiaris
tcagtcacaggtcccctaaattcta

SEQ ID NO: 188557 - DNA, 25 bp, Canis familiaris
tcagacaaacccaccaggattgtga

SEQ ID NO: 188558 - DNA, 25 bp, Canis familiaris
tcagaaagatgcccctttggacgtg

SEQ ID NO: 188559 - DNA, 25 bp, Canis familiaris
tcaggaaaggacggttgccacgctt

SEQ ID NO: 188560 - DNA, 25 bp, Canis familiaris
tcaggaagagccagcttgctgcccc

SEQ ID NO: 188561 - DNA, 25 bp, Canis familiaris
tcagcaagagaactgtttgtgcaac

SEQ ID NO: 188562 - DNA, 25 bp, Canis familiaris
tcagcatctgtgtcatctttttacc

SEQ ID NO: 188563 - DNA, 25 bp, Canis familiaris
tcagcattgctgtccatctgaggcc

SEQ ID NO: 188564 - DNA, 25 bp, Canis familiaris
tcagcattacatgcctgatgcccca

SEQ ID NO: 188565 - DNA, 25 bp, Canis familiaris
tcagtggacatgccttgatggacac

SEQ ID NO: 188566 - DNA, 25 bp, Canis familiaris
tcagggacatccttctgcgagaagg

SEQ ID NO: 188567 - DNA, 25 bp, Canis familiaris
tcagcttattactatccggacagag

SEQ ID NO: 188568 - DNA, 25 bp, Canis familiaris
tcagcttgactgatcttctggacaa

SEQ ID NO: 188569 - DNA, 25 bp, Canis familiaris
tcagtgggcagttctgccttccaaa

SEQ ID NO: 188570 - DNA, 25 bp, Canis familiaris
tcaggggcattgtcaatctcttcca

SEQ ID NO: 188571 - DNA, 25 bp, Canis familiaris
tcagggcagatttcacttttccaac

SEQ ID NO: 188572 - DNA, 25 bp, Canis familiaris
tcagggcgactacctgtgtgtccag

SEQ ID NO: 188573 - DNA, 25 bp, Canis familiaris
tcagggtgacttccctggtcaccga

SEQ ID NO: 188574 - DNA, 25 bp, Canis familiaris
tcagagaggacttctccggtgagcc

SEQ ID NO: 188575 - DNA, 25 bp, Canis familiaris
tcagcagggaatagccaggcgatgg

SEQ ID NO: 188576 - DNA, 25 bp, Canis familiaris
tcagaggctggcttgctctgtgcag

SEQ ID NO: 188577 - DNA, 25 bp, Canis familiaris
tcagagatgctacttgctggcgagc

SEQ ID NO: 188578 - DNA, 25 bp, Canis familiaris
tcaggcctacattgtggggctcctc

SEQ ID NO: 188579 - DNA, 25 bp, Canis familiaris
tcagggcttctctgtgggtgccctg

SEQ ID NO: 188580 - DNA, 25 bp, Canis familiaris
tcagggctgtacttgtcgggagctc

SEQ ID NO: 188581 - DNA, 25 bp, Canis familiaris
tcagtggagacatgtgctcgctgga

SEQ ID NO: 188582 - DNA, 25 bp, Canis familiaris
tcagggaaatgctgtgtcatgtgca

SEQ ID NO: 188583 - DNA, 25 bp, Canis familiaris
tcagagaaaatgtggcacagcatac

SEQ ID NO: 188584 - DNA, 25 bp, Canis familiaris
tcaggagaagagtacacacacacac

SEQ ID NO: 188585 - DNA, 25 bp, Canis familiaris
tcagggaggtgcgacacacacacac

SEQ ID NO: 188586 - DNA, 25 bp, Canis familiaris
tcaggaggcgtcggctgcaaatgca

SEQ ID NO: 188587 - DNA, 25 bp, Canis familiaris
tcagtgagacgggcgctggcaagca

SEQ ID NO: 188588 - DNA, 25 bp, Canis familiaris
tcagtgctgaggcctggggcagagc

SEQ ID NO: 188589 - DNA, 25 bp, Canis familiaris
tcagtgcagtggtcccagatgctgg

SEQ ID NO: 188590 - DNA, 25 bp, Canis familiaris
tcaggcttggatccgcatatgaaga

SEQ ID NO: 188591 - DNA, 25 bp, Canis familiaris
tcaggtggaacggcttgaaaggaca

SEQ ID NO: 188592 - DNA, 25 bp, Canis familiaris
tcaggttagggagtgggataggaag

SEQ ID NO: 188593 - DNA, 25 bp, Canis familiaris
tcaggctggagggaggggatggaga

SEQ ID NO: 188594 - DNA, 25 bp, Canis familiaris
tcaggcatggcagggctgggaaagg

SEQ ID NO: 188595 - DNA, 25 bp, Canis familiaris
tcaggctgctgaggatcgaggagac

SEQ ID NO: 188596 - DNA, 25 bp, Canis familiaris
tcaggctctgtgctcagcatggagt

SEQ ID NO: 188597 - DNA, 25 bp, Canis familiaris
tcaggcattggtggtcatggcagcc

SEQ ID NO: 188598 - DNA, 25 bp, Canis familiaris
tcagcgctgattaagttggcacaca

SEQ ID NO: 188599 - DNA, 25 bp, Canis familiaris
tcagagccattgaactggtcacaaa

SEQ ID NO: 188600 - DNA, 25 bp, Canis familiaris
tcaggcaattcaactgttctcctca

SEQ ID NO: 188601 - DNA, 25 bp, Canis familiaris
tcaggcgttaaactgtcagtcgaac

SEQ ID NO: 188602 - DNA, 25 bp, Canis familiaris
tcagggtcaggaggcttcagggaga

SEQ ID NO: 188603 - DNA, 25 bp, Canis familiaris
tcagggctcaggctggttgtgggac

SEQ ID NO: 188604 - DNA, 25 bp, Canis familiaris
tcagggagaacaccgtattggagac

SEQ ID NO: 188605 - DNA, 25 bp, Canis familiaris
tcagagaagacatccgcaagggaga

SEQ ID NO: 188606 - DNA, 25 bp, Canis familiaris
tcacagaagaagacatagacatggc

SEQ ID NO: 188607 - DNA, 25 bp, Canis familiaris
tcagcaggctgatgaataagctctg

SEQ ID NO: 188608 - DNA, 25 bp, Canis familiaris
tcacgcagctgcctgaagaagcaca

SEQ ID NO: 188609 - DNA, 25 bp, Canis familiaris
tcaccagtggtgcagcagccacagg

SEQ ID NO: 188610 - DNA, 25 bp, Canis familiaris
tcaccattgttgctcccagtggaaa

SEQ ID NO: 188611 - DNA, 25 bp, Canis familiaris
tcagccattttgtatccaacagcac

SEQ ID NO: 188612 - DNA, 25 bp, Canis familiaris
tcacctacatttatgcaacagcctc

SEQ ID NO: 188613 - DNA, 25 bp, Canis familiaris
tcagttgacattgtcgcccatggac

SEQ ID NO: 188614 - DNA, 25 bp, Canis familiaris
tcagttgagacctacccacatggac

SEQ ID NO: 188615 - DNA, 25 bp, Canis familiaris
tcagcttcaacacagctcgtctgga

SEQ ID NO: 188616 - DNA, 25 bp, Canis familiaris
tcagttcacctgtgccttgatgcaa

SEQ ID NO: 188617 - DNA, 25 bp, Canis familiaris
tcagggcctcttagtcattgatgat

SEQ ID NO: 188618 - DNA, 25 bp, Canis familiaris
tcagaggtcctttggcttatttttc

SEQ ID NO: 188619 - DNA, 25 bp, Canis familiaris
tcagaattcctataactttttccct

SEQ ID NO: 188620 - DNA, 25 bp, Canis familiaris
tcaggattcctattacgcgtatgtt

SEQ ID NO: 188621 - DNA, 25 bp, Canis familiaris
tcaggattccaacattgctctctgt

SEQ ID NO: 188622 - DNA, 25 bp, Canis familiaris
tcacgatcccaacatctttggtccc

SEQ ID NO: 188623 - DNA, 25 bp, Canis familiaris
tcaagacccaagatttttacaccct

SEQ ID NO: 188624 - DNA, 25 bp, Canis familiaris
tcagaacccactttttattagctcc

SEQ ID NO: 188625 - DNA, 25 bp, Canis familiaris
tcagaaaccagttggctctagctac

SEQ ID NO: 188626 - DNA, 25 bp, Canis familiaris
tcagtcaaccagaaggttacatata

SEQ ID NO: 188627 - DNA, 25 bp, Canis familiaris
tcagctcaaccaaatggttcgtaca

SEQ ID NO: 188628 - DNA, 25 bp, Canis familiaris
tcagtgagacctcagctttcatgcc

SEQ ID NO: 188629 - DNA, 25 bp, Canis familiaris
tcaggagagcctctgggcaatgcgc

SEQ ID NO: 188630 - DNA, 25 bp, Canis familiaris
tcagaggacgctctgcggagggcca

SEQ ID NO: 188631 - DNA, 25 bp, Canis familiaris
tcaggagaagctgagcacgcagggc

SEQ ID NO: 188632 - DNA, 25 bp, Canis familiaris
tcagcgagaacggcgagcgccgccc

SEQ ID NO: 188633 - DNA, 25 bp, Canis familiaris
tcagagcaggaccgggtctcacacc

SEQ ID NO: 188634 - DNA, 25 bp, Canis familiaris
tcagaaaccacacggtgtctcctca

SEQ ID NO: 188635 - DNA, 25 bp, Canis familiaris
tcagaagaccaaacaggctggcccc

SEQ ID NO: 188636 - DNA, 25 bp, Canis familiaris
tcagacagacacagtcagcctgcac

SEQ ID NO: 188637 - DNA, 25 bp, Canis familiaris
tcagggtcacatgatcagtcacgca

SEQ ID NO: 188638 - DNA, 25 bp, Canis familiaris
tcaggtgtatgatatcttccatgca

SEQ ID NO: 188639 - DNA, 25 bp, Canis familiaris
tcagttgtgatgtgtttccagaatc

SEQ ID NO: 188640 - DNA, 25 bp, Canis familiaris
tcagctctggtactgcttaccaaga

SEQ ID NO: 188641 - DNA, 25 bp, Canis familiaris
tcagctataatctgttactattgac

SEQ ID NO: 188642 - DNA, 25 bp, Canis familiaris
tcagctttcctggtaactactgcac

SEQ ID NO: 188643 - DNA, 25 bp, Canis familiaris
tcagtttgccttttgactgtctcac

SEQ ID NO: 188644 - DNA, 25 bp, Canis familiaris
tcaggattactggattgtttctcaa

SEQ ID NO: 188645 - DNA, 25 bp, Canis familiaris
tcagtgttactgccacatatgttaa

SEQ ID NO: 188646 - DNA, 25 bp, Canis familiaris
tcagtgttgctgaccacaagtgtga

SEQ ID NO: 188647 - DNA, 25 bp, Canis familiaris
tcagtggttgatttagcagtgctaa

SEQ ID NO: 188648 - DNA, 25 bp, Canis familiaris
tcactggcctgtttgaaggtgcaga

SEQ ID NO: 188649 - DNA, 25 bp, Canis familiaris
tcagcggcacgttagaggagggtat

SEQ ID NO: 188650 - DNA, 25 bp, Canis familiaris
tcagcccggatctgggcatccggat

SEQ ID NO: 188651 - DNA, 25 bp, Canis familiaris
tcagcccggtgctttactaggcgac

SEQ ID NO: 188652 - DNA, 25 bp, Canis familiaris
tcagctccggtgcacaagcgggtag

SEQ ID NO: 188653 - DNA, 25 bp, Canis familiaris
tcacgtctggggtctaggagggata

SEQ ID NO: 188654 - DNA, 25 bp, Canis familiaris
tcacgtcctgaactccagggctgga

SEQ ID NO: 188655 - DNA, 25 bp, Canis familiaris
tcacccctacagtggaggtcgcaga

SEQ ID NO: 188656 - DNA, 25 bp, Canis familiaris
tcaccgtccccaagcagaggttggg

SEQ ID NO: 188657 - DNA, 25 bp, Canis familiaris
tcacctgctccctcaggaggggcat

SEQ ID NO: 188658 - DNA, 25 bp, Canis familiaris
tcagcatggtccagtcctgggtgga

SEQ ID NO: 188659 - DNA, 25 bp, Canis familiaris
tcagattacctgcttctttgctgga

SEQ ID NO: 188660 - DNA, 25 bp, Canis familiaris
tcagttgtcctcagttgttgctggg

SEQ ID NO: 188661 - DNA, 25 bp, Canis familiaris
tcagtcccagctgtgacgttgtggc

SEQ ID NO: 188662 - DNA, 25 bp, Canis familiaris
tcactccttgttaacgtcgttgttg

SEQ ID NO: 188663 - DNA, 25 bp, Canis familiaris
tcaccgtgtctatatactcgctgtt

SEQ ID NO: 188664 - DNA, 25 bp, Canis familiaris
tcacccgactgctgtagtcgttttc

SEQ ID NO: 188665 - DNA, 25 bp, Canis familiaris
tcagccccaggctggttgtttttac

SEQ ID NO: 188666 - DNA, 25 bp, Canis familiaris
tcagcccacagcgttggactagttg

SEQ ID NO: 188667 - DNA, 25 bp, Canis familiaris
tcagccaggcacgattgttcaagta

SEQ ID NO: 188668 - DNA, 25 bp, Canis familiaris
tcagccagctgagcagtcttcaatc

SEQ ID NO: 188669 - DNA, 25 bp, Canis familiaris
tacacacgagtcctgctgcataata

SEQ ID NO: 188670 - DNA, 25 bp, Canis familiaris
tcactcaagattgtcagcaatgcat

SEQ ID NO: 188671 - DNA, 25 bp, Canis familiaris
tcaccaactctgccttgcagacttg

SEQ ID NO: 188672 - DNA, 25 bp, Canis familiaris
tcacgcgttccgggagactaggagg

SEQ ID NO: 188673 - DNA, 25 bp, Canis familiaris
tcagcccattcccagtaactgaggt

SEQ ID NO: 188674 - DNA, 25 bp, Canis familiaris
tcaccttatctggctgtacacgagt

SEQ ID NO: 188675 - DNA, 25 bp, Canis familiaris
tcacccatactggcttccaaatttc

SEQ ID NO: 188676 - DNA, 25 bp, Canis familiaris
tcaaaatttgctgtccttggttcct

SEQ ID NO: 188677 - DNA, 25 bp, Canis familiaris
tcaaactttgatgtagggccttcct

SEQ ID NO: 188678 - DNA, 25 bp, Canis familiaris
taatacagttggggaggggggcaca

SEQ ID NO: 188679 - DNA, 25 bp, Canis familiaris
tacattcagttgtcttggaggaagt

SEQ ID NO: 188680 - DNA, 25 bp, Canis familiaris
taattctttgactggcctgaagcgc

SEQ ID NO: 188681 - DNA, 25 bp, Canis familiaris
taattcgtcgacaggtccacatcgg

SEQ ID NO: 188682 - DNA, 25 bp, Canis familiaris
tacaccattcggggttaatcattgg

SEQ ID NO: 188683 - DNA, 25 bp, Canis familiaris
tcaaccttggtcagaaatacagatg

SEQ ID NO: 188684 - DNA, 25 bp, Canis familiaris
tacacggaggttaaataacaagcta

SEQ ID NO: 188685 - DNA, 25 bp, Canis familiaris
tcaacacgggctttttacaaaccat

SEQ ID NO: 188686 - DNA, 25 bp, Canis familiaris
tcagattcctgacactttacacaca

SEQ ID NO: 188687 - DNA, 25 bp, Canis familiaris
tcagtcaactaccacttgaacccac

SEQ ID NO: 188688 - DNA, 25 bp, Canis familiaris
tcagtcaaacaggccttggagctcc

SEQ ID NO: 188689 - DNA, 25 bp, Canis familiaris
tcagatcacagacagccttcgtctc

SEQ ID NO: 188690 - DNA, 25 bp, Canis familiaris
tcagtccagatgaacttctcagccc

SEQ ID NO: 188691 - DNA, 25 bp, Canis familiaris
tcagttgctgtccagcttctagtgc

SEQ ID NO: 188692 - DNA, 25 bp, Canis familiaris
tcagtttccgccatctcagtcatca

SEQ ID NO: 188693 - DNA, 25 bp, Canis familiaris
tcagtattcagcatctgtccactcc

SEQ ID NO: 188694 - DNA, 25 bp, Canis familiaris
tcagctggcgcagttgcttcaactg

SEQ ID NO: 188695 - DNA, 25 bp, Canis familiaris
tcaggagctgctgctgctacagctg

SEQ ID NO: 188696 - DNA, 25 bp, Canis familiaris
tcagctgactgcggttttgtgtcct

SEQ ID NO: 188697 - DNA, 25 bp, Canis familiaris
tcagcttgtactgcctggtgtgtct

SEQ ID NO: 188698 - DNA, 25 bp, Canis familiaris
tcagtggtggcagcagcggtggcta

SEQ ID NO: 188699 - DNA, 25 bp, Canis familiaris
tcagtggtgagcaacctggggctgc

SEQ ID NO: 188700 - DNA, 25 bp, Canis familiaris
tcagctgccgagcagccagggctgg

SEQ ID NO: 188701 - DNA, 25 bp, Canis familiaris
tcagctgcactactaccaggggtac

SEQ ID NO: 188702 - DNA, 25 bp, Canis familiaris
tcacctaagctaacatttggtagac

SEQ ID NO: 188703 - DNA, 25 bp, Canis familiaris
tcacccaagtcaccaatcggatcag

SEQ ID NO: 188704 - DNA, 25 bp, Canis familiaris
tcacggcaaattcaacggcacagtc

SEQ ID NO: 188705 - DNA, 25 bp, Canis familiaris
tcacggcaaattcaacggcacagtc

SEQ ID NO: 188706 - DNA, 25 bp, Canis familiaris
tcacgagaccctcacatgggcagag

SEQ ID NO: 188707 - DNA, 25 bp, Canis familiaris
tcaccgaagcgtacgcagcgacaga

SEQ ID NO: 188708 - DNA, 25 bp, Canis familiaris
tcaccccctggagagcagtagctcc

SEQ ID NO: 188709 - DNA, 25 bp, Canis familiaris
tcagcctgcccagcaaagacttgca

SEQ ID NO: 188710 - DNA, 25 bp, Canis familiaris
tcaccagcccaaaggatacttgtac

SEQ ID NO: 188711 - DNA, 25 bp, Canis familiaris
tcaccccgaaccgaagcttgtatac

SEQ ID NO: 188712 - DNA, 25 bp, Canis familiaris
tcaacactcaaagacccttttagcc

SEQ ID NO: 188713 - DNA, 25 bp, Canis familiaris
tcaaaccactacggctcattcttgt

SEQ ID NO: 188714 - DNA, 25 bp, Canis familiaris
tcagtacggtccggttgatgtttcc

SEQ ID NO: 188715 - DNA, 25 bp, Canis familiaris
tcagacctgagtttctgttgatttg

SEQ ID NO: 188716 - DNA, 25 bp, Canis familiaris
tcagcccttgcgatcatggaaaatg

SEQ ID NO: 188717 - DNA, 25 bp, Canis familiaris
tcagaccccaggccatggagagaag

SEQ ID NO: 188718 - DNA, 25 bp, Canis familiaris
tcagtggctccaggcgcaaagggag

SEQ ID NO: 188719 - DNA, 25 bp, Canis familiaris
tactgagctctctggaagacaaagg

SEQ ID NO: 188720 - DNA, 25 bp, Canis familiaris
tcactggctccatattaaaaaatga

SEQ ID NO: 188721 - DNA, 25 bp, Canis familiaris
taagttccacgacagataacaatga

SEQ ID NO: 188722 - DNA, 25 bp, Canis familiaris
taatttccctgaacgtagaaatttg

SEQ ID NO: 188723 - DNA, 25 bp, Canis familiaris
tcaacttcctcctctgtaaaacggg

SEQ ID NO: 188724 - DNA, 25 bp, Canis familiaris
tcagatctgtccgtcgatcgtatta

SEQ ID NO: 188725 - DNA, 25 bp, Canis familiaris
tcagtcatgctgccccagaagaaaa

SEQ ID NO: 188726 - DNA, 25 bp, Canis familiaris
tcagctcttgtcttcataaaaaaaa

SEQ ID NO: 188727 - DNA, 25 bp, Canis familiaris
tcagctttgggaccagaaatccata

SEQ ID NO: 188728 - DNA, 25 bp, Canis familiaris
tcagtgttggagccaagccacacca

SEQ ID NO: 188729 - DNA, 25 bp, Canis familiaris
tcagaggtagatccacacactccca

SEQ ID NO: 188730 - DNA, 25 bp, Canis familiaris
tcagagtgaagacgctcagctccca

SEQ ID NO: 188731 - DNA, 25 bp, Canis familiaris
tcagtcggtgacgatcagaccctgg

SEQ ID NO: 188732 - DNA, 25 bp, Canis familiaris
tcagggcgtgatcccagagttctgg

SEQ ID NO: 188733 - DNA, 25 bp, Canis familiaris
tcaggtgcaggtcagcacgttgctg

SEQ ID NO: 188734 - DNA, 25 bp, Canis familiaris
tcagagatcggataccaatcctgcc

SEQ ID NO: 188735 - DNA, 25 bp, Canis familiaris
tcagcaacgagatcatccagaccct

SEQ ID NO: 188736 - DNA, 25 bp, Canis familiaris
tcagctactagaccccagggggatc

SEQ ID NO: 188737 - DNA, 25 bp, Canis familiaris
tcaccaccaaggacgaggggacata

SEQ ID NO: 188738 - DNA, 25 bp, Canis familiaris
tcaccaccacagctgagagggaaat

SEQ ID NO: 188739 - DNA, 25 bp, Canis familiaris
tcagctcaccacccgaagagatgaa

SEQ ID NO: 188740 - DNA, 25 bp, Canis familiaris
tcactcaatcctcaaaacagcccta

SEQ ID NO: 188741 - DNA, 25 bp, Canis familiaris
tcaccaacgctttcaaacgattttt

SEQ ID NO: 188742 - DNA, 25 bp, Canis familiaris
tcaccaacaaattctattctttcgg

SEQ ID NO: 188743 - DNA, 25 bp, Canis familiaris
tcaccaactgtatgttctcttcgct

SEQ ID NO: 188744 - DNA, 25 bp, Canis familiaris
tcagcccataaatatgttttcgtgt

SEQ ID NO: 188745 - DNA, 25 bp, Canis familiaris
tcagccaataaatatgttctcgtgt

SEQ ID NO: 188746 - DNA, 25 bp, Canis familiaris
tcagccacaaaaagggaatcctgtc

SEQ ID NO: 188747 - DNA, 25 bp, Canis familiaris
tcaccacacgtacgggtacggtccg

SEQ ID NO: 188748 - DNA, 25 bp, Canis familiaris
tacaaccgtgaacatcaaccgtccg

SEQ ID NO: 188749 - DNA, 25 bp, Canis familiaris
tcaccaccggaactataacttctcg

SEQ ID NO: 188750 - DNA, 25 bp, Canis familiaris
tcaccctcagtgtgtaaggcttctg

SEQ ID NO: 188751 - DNA, 25 bp, Canis familiaris
tcactgacactgtggccacgtgttt

SEQ ID NO: 188752 - DNA, 25 bp, Canis familiaris
tcacttgcgctgtggacaccgagaa

SEQ ID NO: 188753 - DNA, 25 bp, Canis familiaris
tcaggtgcagcttcgtgtcaccatg

SEQ ID NO: 188754 - DNA, 25 bp, Canis familiaris
tcagtgtggttgccttgcacgatga

SEQ ID NO: 188755 - DNA, 25 bp, Canis familiaris
tcactgctagggctctgcactgaat

SEQ ID NO: 188756 - DNA, 25 bp, Canis familiaris
tactctactgaggtggtcgaatcgt

SEQ ID NO: 188757 - DNA, 25 bp, Canis familiaris
tatctcaacggcctcggcaattgtt

SEQ ID NO: 188758 - DNA, 25 bp, Canis familiaris
tatctcaacggcctcggcaattgtt

SEQ ID NO: 188759 - DNA, 25 bp, Canis familiaris
tcacgacatcgtgtctgagccttct

SEQ ID NO: 188760 - DNA, 25 bp, Canis familiaris
tcacgcgcaggtgacggccttagat

SEQ ID NO: 188761 - DNA, 25 bp, Canis familiaris
tcaccacggtcgagacctacacagt

SEQ ID NO: 188762 - DNA, 25 bp, Canis familiaris
tcagccccgtggagttcaacaaggt

SEQ ID NO: 188763 - DNA, 25 bp, Canis familiaris
tacccacgatttgcttcaacaggga

SEQ ID NO: 188764 - DNA, 25 bp, Canis familiaris
tcacgccacacgtttttcaacacga

SEQ ID NO: 188765 - DNA, 25 bp, Canis familiaris
tcagatggccagctttttaaaagga

SEQ ID NO: 188766 - DNA, 25 bp, Canis familiaris
tcagtctgccgcctttgttataaaa

SEQ ID NO: 188767 - DNA, 25 bp, Canis familiaris
tcagatcatcggtagaatgttctag

SEQ ID NO: 188768 - DNA, 25 bp, Canis familiaris
tcagtcatcgtgtaggcagcttgga

SEQ ID NO: 188769 - DNA, 25 bp, Canis familiaris
tcagttctgctgctggaccatgagc

SEQ ID NO: 188770 - DNA, 25 bp, Canis familiaris
tcagatgtctgtcatggctcctaat

SEQ ID NO: 188771 - DNA, 25 bp, Canis familiaris
taatgcttgatgcaggatctgaact

SEQ ID NO: 188772 - DNA, 25 bp, Canis familiaris
tcaccattacaggccatgctgagac

SEQ ID NO: 188773 - DNA, 25 bp, Canis familiaris
tcacctgagcaggccacatggcaag

SEQ ID NO: 188774 - DNA, 25 bp, Canis familiaris
tcaccgaatacttcagcatgcacac

SEQ ID NO: 188775 - DNA, 25 bp, Canis familiaris
tcacctggtgactcatgatgctcgc

SEQ ID NO: 188776 - DNA, 25 bp, Canis familiaris
tcagccagggcctcaatcatggtaa

SEQ ID NO: 188777 - DNA, 25 bp, Canis familiaris
tcaccacggccataattgatgacaa

SEQ ID NO: 188778 - DNA, 25 bp, Canis familiaris
tcagccctgccaactacattgataa

SEQ ID NO: 188779 - DNA, 25 bp, Canis familiaris
tcaccccaaatcggcatgtcagaga

SEQ ID NO: 188780 - DNA, 25 bp, Canis familiaris
taccgcctaatctttggacgaccac

SEQ ID NO: 188781 - DNA, 25 bp, Canis familiaris
taacgtctagacctttgtccggaca

SEQ ID NO: 188782 - DNA, 25 bp, Canis familiaris
taacgtgctactatcccacgtaacc

SEQ ID NO: 188783 - DNA, 25 bp, Canis familiaris
tcaacagttttgagacccgcttatc

SEQ ID NO: 188784 - DNA, 25 bp, Canis familiaris
tcaaaattttttctgtcactgtaac

SEQ ID NO: 188785 - DNA, 25 bp, Canis familiaris
tcaccccttttgtgttccttaggtg

SEQ ID NO: 188786 - DNA, 25 bp, Canis familiaris
tcagccccattttttgttcttactg

SEQ ID NO: 188787 - DNA, 25 bp, Canis familiaris
tcagtcctatttgtttatgctttgg

SEQ ID NO: 188788 - DNA, 25 bp, Canis familiaris
tcagtcctaactgttctgtctggcc

SEQ ID NO: 188789 - DNA, 25 bp, Canis familiaris
tcagtcctacaagatttgtccctct

SEQ ID NO: 188790 - DNA, 25 bp, Canis familiaris
tcactatactaaagattttcccttg

SEQ ID NO: 188791 - DNA, 25 bp, Canis familiaris
tcagctcattattaaacttacccat

SEQ ID NO: 188792 - DNA, 25 bp, Canis familiaris
tcacctttaaactctgaagccataa

SEQ ID NO: 188793 - DNA, 25 bp, Canis familiaris
tcaccttatacctaacagaatggct

SEQ ID NO: 188794 - DNA, 25 bp, Canis familiaris
tcacgcctgctagaaaggggacttg

SEQ ID NO: 188795 - DNA, 25 bp, Canis familiaris
tcagcgtctctgacaaaacgggcct

SEQ ID NO: 188796 - DNA, 25 bp, Canis familiaris
tcagaactctatctacctggatgcc

SEQ ID NO: 188797 - DNA, 25 bp, Canis familiaris
tcagagaccaatcctacacagtccc

SEQ ID NO: 188798 - DNA, 25 bp, Canis familiaris
tcagaaatcaagcctgtcacattgc

SEQ ID NO: 188799 - DNA, 25 bp, Canis familiaris
tcagaaatcaagcctgtcacattgc

SEQ ID NO: 188800 - DNA, 25 bp, Canis familiaris
tcagaaacgggtcacatctcttccc

SEQ ID NO: 188801 - DNA, 25 bp, Canis familiaris
tcaaaacggcgccgaacatgttgct

SEQ ID NO: 188802 - DNA, 25 bp, Canis familiaris
tcagaaagcggcgtccaagtggccc

SEQ ID NO: 188803 - DNA, 25 bp, Canis familiaris
tcagtaaggtgccttcaagctcctc

SEQ ID NO: 188804 - DNA, 25 bp, Canis familiaris
tcagcaaaagtcatgtaacatcccg

SEQ ID NO: 188805 - DNA, 25 bp, Canis familiaris
tcagtgaaaattctgctacaccgca

SEQ ID NO: 188806 - DNA, 25 bp, Canis familiaris
tcagagaaaacctgcactcctggca

SEQ ID NO: 188807 - DNA, 25 bp, Canis familiaris
tcagacataagagattcattcgtgc

SEQ ID NO: 188808 - DNA, 25 bp, Canis familiaris
tcaagagcaaaggcacgcttcgagc

SEQ ID NO: 188809 - DNA, 25 bp, Canis familiaris
tcaaggccaaagccctacgtgcctt

SEQ ID NO: 188810 - DNA, 25 bp, Canis familiaris
tcagtgtaaaagtctgcttcttcct

SEQ ID NO: 188811 - DNA, 25 bp, Canis familiaris
tcagatgtccatttgttgcttgtac

SEQ ID NO: 188812 - DNA, 25 bp, Canis familiaris
tcactgtcagtgttgttgtttcccc

SEQ ID NO: 188813 - DNA, 25 bp, Canis familiaris
tagctacggtggagttgggccctta

SEQ ID NO: 188814 - DNA, 25 bp, Canis familiaris
tacatcaccgggtcagttggggcca

SEQ ID NO: 188815 - DNA, 25 bp, Canis familiaris
taatcctgggcttcattgggggttt

SEQ ID NO: 188816 - DNA, 25 bp, Canis familiaris
taatccgggtccaggtggcttaggc

SEQ ID NO: 188817 - DNA, 25 bp, Canis familiaris
taccacggcgtcaatgggggcttac

SEQ ID NO: 188818 - DNA, 25 bp, Canis familiaris
tcacttctgccttcggggcaggctt

SEQ ID NO: 188819 - DNA, 25 bp, Canis familiaris
tcaccatctgactgctggctggtag

SEQ ID NO: 188820 - DNA, 25 bp, Canis familiaris
tcaccctacggtcctttggactatg

SEQ ID NO: 188821 - DNA, 25 bp, Canis familiaris
tcaccttacggaaatattatactag

SEQ ID NO: 188822 - DNA, 25 bp, Canis familiaris
tcacgttaattgattttctaatatt

SEQ ID NO: 188823 - DNA, 25 bp, Canis familiaris
tcacttgtccttacgtttctgaaac

SEQ ID NO: 188824 - DNA, 25 bp, Canis familiaris
tcagcaggtcccacagttaacaaga

SEQ ID NO: 188825 - DNA, 25 bp, Canis familiaris
tcacgcgttccggaactagaaggac

SEQ ID NO: 188826 - DNA, 25 bp, Canis familiaris
tcacgaggtgtcggttttaacgagg

SEQ ID NO: 188827 - DNA, 25 bp, Canis familiaris
tcacgatcggtgggttcttcagact

SEQ ID NO: 188828 - DNA, 25 bp, Canis familiaris
tacgatttcgatggtcttctgagac

SEQ ID NO: 188829 - DNA, 25 bp, Canis familiaris
tcagctttgcatcatgagtcttgta

SEQ ID NO: 188830 - DNA, 25 bp, Canis familiaris
tcagctcagtagccaagttgatgat

SEQ ID NO: 188831 - DNA, 25 bp, Canis familiaris
tcagcatcatgtatgtaggtgtgac

SEQ ID NO: 188832 - DNA, 25 bp, Canis familiaris
tcagctcactgcttggaggggacct

SEQ ID NO: 188833 - DNA, 25 bp, Canis familiaris
tcagtcctgctgagagattggggtt

SEQ ID NO: 188834 - DNA, 25 bp, Canis familiaris
tcagtccctgcacaatcgggtttgc

SEQ ID NO: 188835 - DNA, 25 bp, Canis familiaris
tcaatcccggaactccaggattacc

SEQ ID NO: 188836 - DNA, 25 bp, Canis familiaris
tcaataccggagatcatgcaagctg

SEQ ID NO: 188837 - DNA, 25 bp, Canis familiaris
tcagaacccggttcatgctaggaca

SEQ ID NO: 188838 - DNA, 25 bp, Canis familiaris
tcagaagcctcggggttgtgggccg

SEQ ID NO: 188839 - DNA, 25 bp, Canis familiaris
tcaccagtcctggggaggctgggac

SEQ ID NO: 188840 - DNA, 25 bp, Canis familiaris
tcaccatacctcaagtcgtgctgtg

SEQ ID NO: 188841 - DNA, 25 bp, Canis familiaris
tcacataactcaaagccgcttggtc

SEQ ID NO: 188842 - DNA, 25 bp, Canis familiaris
tcagatgattcaagacgcccacagg

SEQ ID NO: 188843 - DNA, 25 bp, Canis familiaris
tcagcagttgcatgtctgccttcag

SEQ ID NO: 188844 - DNA, 25 bp, Canis familiaris
tcagcgcctgaagctgcttgacgcg

SEQ ID NO: 188845 - DNA, 25 bp, Canis familiaris
tcagccctatgacttcattggaggc

SEQ ID NO: 188846 - DNA, 25 bp, Canis familiaris
tcagctgccttgtttaccgagctga

SEQ ID NO: 188847 - DNA, 25 bp, Canis familiaris
tcagctcactaaatgtctcctgacc

SEQ ID NO: 188848 - DNA, 25 bp, Canis familiaris
tcagacccagggactcctggtctga

SEQ ID NO: 188849 - DNA, 25 bp, Canis familiaris
tcagcaaccgtgttcttgcgggctg

SEQ ID NO: 188850 - DNA, 25 bp, Canis familiaris
tcacaacacaggtgcctgggtggct

SEQ ID NO: 188851 - DNA, 25 bp, Canis familiaris
tcaccatcacaggggaggagcccga

SEQ ID NO: 188852 - DNA, 25 bp, Canis familiaris
tcagcaacctggaggaagccaagaa

SEQ ID NO: 188853 - DNA, 25 bp, Canis familiaris
tcagctacagggtgaccagcgcaag

SEQ ID NO: 188854 - DNA, 25 bp, Canis familiaris
tcagaggaggagtattccaccaaag

SEQ ID NO: 188855 - DNA, 25 bp, Canis familiaris
tcagagtacaagatatcccccacac

SEQ ID NO: 188856 - DNA, 25 bp, Canis familiaris
tcagtgtgagaactgtgacccccca

SEQ ID NO: 188857 - DNA, 25 bp, Canis familiaris
tcagctgtatattagtgacaccttc

SEQ ID NO: 188858 - DNA, 25 bp, Canis familiaris
tcacgtgattaagaccctactccaa

SEQ ID NO: 188859 - DNA, 25 bp, Canis familiaris
tcaccaagtcaaaaccagtctctac

SEQ ID NO: 188860 - DNA, 25 bp, Canis familiaris
tcacgccaacgagagccgattctac

SEQ ID NO: 188861 - DNA, 25 bp, Canis familiaris
tcacccaccagagcggctggggagc

SEQ ID NO: 188862 - DNA, 25 bp, Canis familiaris
tcacctacacgctgcggcagcgggc

SEQ ID NO: 188863 - DNA, 25 bp, Canis familiaris
tcacttacacgcccggacgggaaat

SEQ ID NO: 188864 - DNA, 25 bp, Canis familiaris
tcacttcaacggctgaggtttgaga

SEQ ID NO: 188865 - DNA, 25 bp, Canis familiaris
tcactgtccacggcttacgagttaa

SEQ ID NO: 188866 - DNA, 25 bp, Canis familiaris
tcactgttcccggaagcacagctaa

SEQ ID NO: 188867 - DNA, 25 bp, Canis familiaris
tcagtgatgcccgggcagacagctc

SEQ ID NO: 188868 - DNA, 25 bp, Canis familiaris
tcagtgcccctgggagagcatctgc

SEQ ID NO: 188869 - DNA, 25 bp, Canis familiaris
tcagcttcagccaggtgtctgctgc

SEQ ID NO: 188870 - DNA, 25 bp, Canis familiaris
tcagcttgagtcaggttccctgctc

SEQ ID NO: 188871 - DNA, 25 bp, Canis familiaris
tcagctaagagtctgcttgtccctc

SEQ ID NO: 188872 - DNA, 25 bp, Canis familiaris
tcagtgaagcgtgtgtgtgtccccg

SEQ ID NO: 188873 - DNA, 25 bp, Canis familiaris
tcacttcacaatgatgtttccccga

SEQ ID NO: 188874 - DNA, 25 bp, Canis familiaris
tcacacccattcagtttactcctga

SEQ ID NO: 188875 - DNA, 25 bp, Canis familiaris
tcagcagtttttagatttaccttac

SEQ ID NO: 188876 - DNA, 25 bp, Canis familiaris
tcagcctcttatcagatgtgttccc

SEQ ID NO: 188877 - DNA, 25 bp, Canis familiaris
tcagccattgttcctggttctgacc

SEQ ID NO: 188878 - DNA, 25 bp, Canis familiaris
tcagctctgttcactactactactg

SEQ ID NO: 188879 - DNA, 25 bp, Canis familiaris
tcagcactttgagcatttacttagc

SEQ ID NO: 188880 - DNA, 25 bp, Canis familiaris
tcacctttgcggattcctggaggga

SEQ ID NO: 188881 - DNA, 25 bp, Canis familiaris
tcaccttgttgggtaccccagcaag

SEQ ID NO: 188882 - DNA, 25 bp, Canis familiaris
tcaccttgttctagtaggccgcgag

SEQ ID NO: 188883 - DNA, 25 bp, Canis familiaris
tcaccctgaagtgctgggctctggg

SEQ ID NO: 188884 - DNA, 25 bp, Canis familiaris
tcacccgatacgtcctggtcggtga

SEQ ID NO: 188885 - DNA, 25 bp, Canis familiaris
tcagccccagggtcgcttgttgggg

SEQ ID NO: 188886 - DNA, 25 bp, Canis familiaris
tcagccccagggtcgcttgttgggg

SEQ ID NO: 188887 - DNA, 25 bp, Canis familiaris
tcagttccagagactcggggtgggg

SEQ ID NO: 188888 - DNA, 25 bp, Canis familiaris
tcagtcttatgcttctgggggctgg

SEQ ID NO: 188889 - DNA, 25 bp, Canis familiaris
tcagatcttgatctccaggtcgtga

SEQ ID NO: 188890 - DNA, 25 bp, Canis familiaris
tcagtctatgtattcctatgcttta

SEQ ID NO: 188891 - DNA, 25 bp, Canis familiaris
tcagatccagtttccttgtctgtaa

SEQ ID NO: 188892 - DNA, 25 bp, Canis familiaris
tcagattacctttctaacttggact

SEQ ID NO: 188893 - DNA, 25 bp, Canis familiaris
tatgttttgccttcaaacgttacgg

SEQ ID NO: 188894 - DNA, 25 bp, Canis familiaris
taaacttacccatgacgttgaattg

SEQ ID NO: 188895 - DNA, 25 bp, Canis familiaris
tacaccttaccctgtaatggttggg

SEQ ID NO: 188896 - DNA, 25 bp, Canis familiaris
tcaaccttgacccagggtaggacgg

SEQ ID NO: 188897 - DNA, 25 bp, Canis familiaris
taattgtggcacttggggcgaggac

SEQ ID NO: 188898 - DNA, 25 bp, Canis familiaris
ttctttgagaccaagtgccgggacc

SEQ ID NO: 188899 - DNA, 25 bp, Canis familiaris
tttctagaccaatggccctggaaca

SEQ ID NO: 188900 - DNA, 25 bp, Canis familiaris
taatctagaaactgttctggaaaca

SEQ ID NO: 188901 - DNA, 25 bp, Canis familiaris
taactacaatacttaccggtcaagg

SEQ ID NO: 188902 - DNA, 25 bp, Canis familiaris
tcacctgcaaatgttgactctggaa

SEQ ID NO: 188903 - DNA, 25 bp, Canis familiaris
tcagcctgcagagttgtcatgcctt

SEQ ID NO: 188904 - DNA, 25 bp, Canis familiaris
tcagcactgctgagtttgcagctgt

SEQ ID NO: 188905 - DNA, 25 bp, Canis familiaris
tcagcgctgctgaactgcgtcatgt

SEQ ID NO: 188906 - DNA, 25 bp, Canis familiaris
tcagctgcttgcactcttatatctc

SEQ ID NO: 188907 - DNA, 25 bp, Canis familiaris
tcagctgcagttttcttcatctctg

SEQ ID NO: 188908 - DNA, 25 bp, Canis familiaris
tcactagattttgccaactgccaat

SEQ ID NO: 188909 - DNA, 25 bp, Canis familiaris
tcaccaccatgagtaccaagtccaa

SEQ ID NO: 188910 - DNA, 25 bp, Canis familiaris
tcaccagttgaatccagttccacca

SEQ ID NO: 188911 - DNA, 25 bp, Canis familiaris
tcaccagtataattaatacccccag

SEQ ID NO: 188912 - DNA, 25 bp, Canis familiaris
tcagccttattttattcccatcaat

SEQ ID NO: 188913 - DNA, 25 bp, Canis familiaris
tcactctttcttttgagcccacaat

SEQ ID NO: 188914 - DNA, 25 bp, Canis familiaris
tcacagttgccatgtagaccccttg

SEQ ID NO: 188915 - DNA, 25 bp, Canis familiaris
tacaactgccgttgaaccaccaggt

SEQ ID NO: 188916 - DNA, 25 bp, Canis familiaris
tacccccgaggatccaaatgttcca

SEQ ID NO: 188917 - DNA, 25 bp, Canis familiaris
taaaaccggaaatcatttggtcaag

SEQ ID NO: 188918 - DNA, 25 bp, Canis familiaris
tacttaccaggagcaacttatgtgt

SEQ ID NO: 188919 - DNA, 25 bp, Canis familiaris
tttaagcccaggcagcattttggtc

SEQ ID NO: 188920 - DNA, 25 bp, Canis familiaris
ttctaagccaggcaccattcgtggg

SEQ ID NO: 188921 - DNA, 25 bp, Canis familiaris
tttcaggccgggaacctgggtgctg

SEQ ID NO: 188922 - DNA, 25 bp, Canis familiaris
ttactaccatgctgaagtccggctt

SEQ ID NO: 188923 - DNA, 25 bp, Canis familiaris
tcaaaaattgagtcacgtccgacta

SEQ ID NO: 188924 - DNA, 25 bp, Canis familiaris
tcagagaacttggctaggtccccac

SEQ ID NO: 188925 - DNA, 25 bp, Canis familiaris
tcagaaagttcctcagctcaaccaa

SEQ ID NO: 188926 - DNA, 25 bp, Canis familiaris
tcagaaactgtcacatctgctcgcc

SEQ ID NO: 188927 - DNA, 25 bp, Canis familiaris
tcagtagcttctactatctgctctc

SEQ ID NO: 188928 - DNA, 25 bp, Canis familiaris
tcagctcaggtcacaatggtctcaa

SEQ ID NO: 188929 - DNA, 25 bp, Canis familiaris
tcagctcctgtcaacaagagccttt

SEQ ID NO: 188930 - DNA, 25 bp, Canis familiaris
tcaacactatctgcacgacctgtga

SEQ ID NO: 188931 - DNA, 25 bp, Canis familiaris
tcagagctctatcgtccgagcttcg

SEQ ID NO: 188932 - DNA, 25 bp, Canis familiaris
tcagagcctcatggattgccagcct

SEQ ID NO: 188933 - DNA, 25 bp, Canis familiaris
tcagactatctggactgccaatgtt

SEQ ID NO: 188934 - DNA, 25 bp, Canis familiaris
tcagcctcctgatgcacagatctgt

SEQ ID NO: 188935 - DNA, 25 bp, Canis familiaris
tcagcccagcagaagcattatcttt

SEQ ID NO: 188936 - DNA, 25 bp, Canis familiaris
tcagctctatgacccagaatcttct

SEQ ID NO: 188937 - DNA, 25 bp, Canis familiaris
tcagctctcaaatcatacactttat

SEQ ID NO: 188938 - DNA, 25 bp, Canis familiaris
tcagctgctaaatcacagacttgag

SEQ ID NO: 188939 - DNA, 25 bp, Canis familiaris
tcacttcaacaacgcaaccagagac

SEQ ID NO: 188940 - DNA, 25 bp, Canis familiaris
tcaccatttgaactgcaaccactga

SEQ ID NO: 188941 - DNA, 25 bp, Canis familiaris
tcacctatatagcagcaatccccat

SEQ ID NO: 188942 - DNA, 25 bp, Canis familiaris
tcaccttatagcagcatcccatcat

SEQ ID NO: 188943 - DNA, 25 bp, Canis familiaris
tcacctgatagcaagcaatcccatc

SEQ ID NO: 188944 - DNA, 25 bp, Canis familiaris
tcaccgaggcagtaatcctgccata

SEQ ID NO: 188945 - DNA, 25 bp, Canis familiaris
tcagccatggatggtgttcccttca

SEQ ID NO: 188946 - DNA, 25 bp, Canis familiaris
tcagctcaagctgtgaagtcctcca

SEQ ID NO: 188947 - DNA, 25 bp, Canis familiaris
tcagctacacctagatagacgttaa

SEQ ID NO: 188948 - DNA, 25 bp, Canis familiaris
tcacctgacattcaaattttaattt

SEQ ID NO: 188949 - DNA, 25 bp, Canis familiaris
tcacctgacttgcaaaactcacctc

SEQ ID NO: 188950 - DNA, 25 bp, Canis familiaris
tcaccagacactgaacaggcccagt

SEQ ID NO: 188951 - DNA, 25 bp, Canis familiaris
tcaccacaacgtcacagagagtctg

SEQ ID NO: 188952 - DNA, 25 bp, Canis familiaris
tcacccacaggtctcagaggtttct

SEQ ID NO: 188953 - DNA, 25 bp, Canis familiaris
tcagcccatcagcggcacagagggt

SEQ ID NO: 188954 - DNA, 25 bp, Canis familiaris
tcagcgcgcaagagggcagaccgat

SEQ ID NO: 188955 - DNA, 25 bp, Canis familiaris
tcagctccaggctatctggcaacca

SEQ ID NO: 188956 - DNA, 25 bp, Canis familiaris
tcagctgccttggtatcagctaccc

SEQ ID NO: 188957 - DNA, 25 bp, Canis familiaris
tcagctgaagtggttcgctgcctca

SEQ ID NO: 188958 - DNA, 25 bp, Canis familiaris
tcagcatgaattgtcttgtggcata

SEQ ID NO: 188959 - DNA, 25 bp, Canis familiaris
tcacatattcatctcttgccaaata

SEQ ID NO: 188960 - DNA, 25 bp, Canis familiaris
tcactaatattgactacaaattaac

SEQ ID NO: 188961 - DNA, 25 bp, Canis familiaris
tcagtatttgtaatgagaatgattt

SEQ ID NO: 188962 - DNA, 25 bp, Canis familiaris
tcagtttatatgtatattatgttta

SEQ ID NO: 188963 - DNA, 25 bp, Canis familiaris
tcagctgttataattttcccttaag

SEQ ID NO: 188964 - DNA, 25 bp, Canis familiaris
tcactggttttaatcccaagaaaat

SEQ ID NO: 188965 - DNA, 25 bp, Canis familiaris
tcacgctggtgaagaccccaaagca

SEQ ID NO: 188966 - DNA, 25 bp, Canis familiaris
tcacgggctgctgtcttacaagaga

SEQ ID NO: 188967 - DNA, 25 bp, Canis familiaris
tcacctggtctctgctattcagaaa

SEQ ID NO: 188968 - DNA, 25 bp, Canis familiaris
tcactgtgcgtgtcggcttatcatg

SEQ ID NO: 188969 - DNA, 25 bp, Canis familiaris
tcactgagcgtctgcctcatgataa

SEQ ID NO: 188970 - DNA, 25 bp, Canis familiaris
tcactgcaggacttccaagctcagc

SEQ ID NO: 188971 - DNA, 25 bp, Canis familiaris
tcacgcctgcaggtgccaaacagaa

SEQ ID NO: 188972 - DNA, 25 bp, Canis familiaris
tcagcgccagaggccaatccgaata

SEQ ID NO: 188973 - DNA, 25 bp, Canis familiaris
tcagagccgacaccagacgtgatta

SEQ ID NO: 188974 - DNA, 25 bp, Canis familiaris
tcagatgcacagaaccaagcagtca

SEQ ID NO: 188975 - DNA, 25 bp, Canis familiaris
tcagatcttgtgtccaagcacccac

SEQ ID NO: 188976 - DNA, 25 bp, Canis familiaris
tcagcctctgaggccaaaccaactc

SEQ ID NO: 188977 - DNA, 25 bp, Canis familiaris
tcacgctgctgaggccaaagccaga

SEQ ID NO: 188978 - DNA, 25 bp, Canis familiaris
tcactgctgcaggagacacccagga

SEQ ID NO: 188979 - DNA, 25 bp, Canis familiaris
tcactgcgcacaatagacccgctga

SEQ ID NO: 188980 - DNA, 25 bp, Canis familiaris
tcagatcgccaaagtgggccagata

SEQ ID NO: 188981 - DNA, 25 bp, Canis familiaris
tcagctcccattgcatgggccatgt

SEQ ID NO: 188982 - DNA, 25 bp, Canis familiaris
tcagctccctgcacgaggcgcatga

SEQ ID NO: 188983 - DNA, 25 bp, Canis familiaris
tcagcccacatcatcgaggagctca

SEQ ID NO: 188984 - DNA, 25 bp, Canis familiaris
tcagttccttctgggacagctcaga

SEQ ID NO: 188985 - DNA, 25 bp, Canis familiaris
tcagacctccgtggaactgctgaga

SEQ ID NO: 188986 - DNA, 25 bp, Canis familiaris
taaccgccgatattactgcaggaca

SEQ ID NO: 188987 - DNA, 25 bp, Canis familiaris
tcagaccacccaactattctggcac

SEQ ID NO: 188988 - DNA, 25 bp, Canis familiaris
tcagcaccatcctcctagaagagac

SEQ ID NO: 188989 - DNA, 25 bp, Canis familiaris
tcagcaggtgccacctctaaggcat

SEQ ID NO: 188990 - DNA, 25 bp, Canis familiaris
tcagcatgcgaacacctctatagga

SEQ ID NO: 188991 - DNA, 25 bp, Canis familiaris
taaggataaatctatgctgcaggct

SEQ ID NO: 188992 - DNA, 25 bp, Canis familiaris
taacagttaatctccgagttcccgc

SEQ ID NO: 188993 - DNA, 25 bp, Canis familiaris
tcaaatttttcccagcgagttccta

SEQ ID NO: 188994 - DNA, 25 bp, Canis familiaris
tcagaagcttttacccgagtgtcgc

SEQ ID NO: 188995 - DNA, 25 bp, Canis familiaris
tcagagactgtttgtgtcacaattg

SEQ ID NO: 188996 - DNA, 25 bp, Canis familiaris
tcagcagtgttttctgctgcaaagt

SEQ ID NO: 188997 - DNA, 25 bp, Canis familiaris
tcagactttctgactgcccaatgtt

SEQ ID NO: 188998 - DNA, 25 bp, Canis familiaris
tcagagctgtcgcaggatacctgtt

SEQ ID NO: 188999 - DNA, 25 bp, Canis familiaris
tcagactggagctggtgcagggcct

SEQ ID NO: 189000 - DNA, 25 bp, Canis familiaris
tcagacttgcactggctggtggtgc

SEQ ID NO: 189001 - DNA, 25 bp, Canis familiaris
tcagagcctgcagctggggctgagg

SEQ ID NO: 189002 - DNA, 25 bp, Canis familiaris
tcagcagcctggcctggctggatga

SEQ ID NO: 189003 - DNA, 25 bp, Canis familiaris
tcagcaggcttgcctgcctggttgt

SEQ ID NO: 189004 - DNA, 25 bp, Canis familiaris
tcagcagttgagctcagtggttgag

SEQ ID NO: 189005 - DNA, 25 bp, Canis familiaris
tcagactgtgaggctctgggcttgg

SEQ ID NO: 189006 - DNA, 25 bp, Canis familiaris
tcagagcgtggggaggagcctggcc

SEQ ID NO: 189007 - DNA, 25 bp, Canis familiaris
tcacgcagctgggcaactgcgcctg

SEQ ID NO: 189008 - DNA, 25 bp, Canis familiaris
tcacctagggactagcatgcactgc

SEQ ID NO: 189009 - DNA, 25 bp, Canis familiaris
tcaccgagtgtgtcaagcagatctg

SEQ ID NO: 189010 - DNA, 25 bp, Canis familiaris
tcacatcagagtccacacaggcctg

SEQ ID NO: 189011 - DNA, 25 bp, Canis familiaris
tcagcaggagtggacacagtacatg

SEQ ID NO: 189012 - DNA, 25 bp, Canis familiaris
tcacagtggctggactcatcgattc

SEQ ID NO: 189013 - DNA, 25 bp, Canis familiaris
tcagcagtggctccactgtggccac

SEQ ID NO: 189014 - DNA, 25 bp, Canis familiaris
tcacttggaccagttggctgcactt

SEQ ID NO: 189015 - DNA, 25 bp, Canis familiaris
tcactaagaccgctgagccacttgg

SEQ ID NO: 189016 - DNA, 25 bp, Canis familiaris
tcacggagatcgccgtgagccacac

SEQ ID NO: 189017 - DNA, 25 bp, Canis familiaris
tcacgtggacatgcgtgtctgccca

SEQ ID NO: 189018 - DNA, 25 bp, Canis familiaris
tcacttggagctgggttcactctgc

SEQ ID NO: 189019 - DNA, 25 bp, Canis familiaris
tcagctttgatttggtccaccagta

SEQ ID NO: 189020 - DNA, 25 bp, Canis familiaris
tcaccattgggatgtctctctcaaa

SEQ ID NO: 189021 - DNA, 25 bp, Canis familiaris
tcacgatatgggtcctcatcttcca

SEQ ID NO: 189022 - DNA, 25 bp, Canis familiaris
tcactccaggtggtccagatcaggt

SEQ ID NO: 189023 - DNA, 25 bp, Canis familiaris
tcacccaggctggctctgaggtgtc

SEQ ID NO: 189024 - DNA, 25 bp, Canis familiaris
tcagcccaggtggtggccgagatgc

SEQ ID NO: 189025 - DNA, 25 bp, Canis familiaris
tcactgcctttggtgtccagaagcc

SEQ ID NO: 189026 - DNA, 25 bp, Canis familiaris
tcacgcccttgaggatccatggagc

SEQ ID NO: 189027 - DNA, 25 bp, Canis familiaris
tcagcctcagtctcgattctggatt

SEQ ID NO: 189028 - DNA, 25 bp, Canis familiaris
tcagcttcttcaggcggtagctgat

SEQ ID NO: 189029 - DNA, 25 bp, Canis familiaris
tcactctgtccagggtgcacagtgt

SEQ ID NO: 189030 - DNA, 25 bp, Canis familiaris
tcactctcccagccataagcatgtg

SEQ ID NO: 189031 - DNA, 25 bp, Canis familiaris
tcagcgctgcccatagcaagatgtc

SEQ ID NO: 189032 - DNA, 25 bp, Canis familiaris
tcagcagccaccactcatgaaggct

SEQ ID NO: 189033 - DNA, 25 bp, Canis familiaris
tcacctcataccatcagaatggcta

SEQ ID NO: 189034 - DNA, 25 bp, Canis familiaris
tcacttcatccgactcgtgatcgtc

SEQ ID NO: 189035 - DNA, 25 bp, Canis familiaris
tcagctcacacagaccttttgattt

SEQ ID NO: 189036 - DNA, 25 bp, Canis familiaris
tcagctccaggcctgttttatggtt

SEQ ID NO: 189037 - DNA, 25 bp, Canis familiaris
tcagctcctgtccttgattgaattg

SEQ ID NO: 189038 - DNA, 25 bp, Canis familiaris
tcagcccattctccatgttgaggtg

SEQ ID NO: 189039 - DNA, 25 bp, Canis familiaris
tcaccagggctgccatttgcagtgg

SEQ ID NO: 189040 - DNA, 25 bp, Canis familiaris
tcacctgcagttggatgttcgtgcc

SEQ ID NO: 189041 - DNA, 25 bp, Canis familiaris
tcactcaagtatggccttagccccc

SEQ ID NO: 189042 - DNA, 25 bp, Canis familiaris
tcagacaaccatctcttggactcca

SEQ ID NO: 189043 - DNA, 25 bp, Canis familiaris
tcagacaacttgatctttggggcaa

SEQ ID NO: 189044 - DNA, 25 bp, Canis familiaris
tcagccacgtttttctggaggagca

SEQ ID NO: 189045 - DNA, 25 bp, Canis familiaris
tcagccgcttttacttgggagagaa

SEQ ID NO: 189046 - DNA, 25 bp, Canis familiaris
tcacctgcctccacttaggcaaagg

SEQ ID NO: 189047 - DNA, 25 bp, Canis familiaris
tcagcctgccctgccatagggcaga

SEQ ID NO: 189048 - DNA, 25 bp, Canis familiaris
tcacgtgctgccaccaagcaggcag

SEQ ID NO: 189049 - DNA, 25 bp, Canis familiaris
tcacacttgctcccgaagcacgggt

SEQ ID NO: 189050 - DNA, 25 bp, Canis familiaris
tcagcttctcctctgaagctctgga

SEQ ID NO: 189051 - DNA, 25 bp, Canis familiaris
tcacattagccgtgtagccttgaat

SEQ ID NO: 189052 - DNA, 25 bp, Canis familiaris
tcacgggattgatgctaactgtaaa

SEQ ID NO: 189053 - DNA, 25 bp, Canis familiaris
tcacggtatctatctgaacttcctc

SEQ ID NO: 189054 - DNA, 25 bp, Canis familiaris
tcacgtgttatatttctaatcctac

SEQ ID NO: 189055 - DNA, 25 bp, Canis familiaris
tcaccgctggaattttgatgaccta

SEQ ID NO: 189056 - DNA, 25 bp, Canis familiaris
tcagccgtgtatttttgtgccagca

SEQ ID NO: 189057 - DNA, 25 bp, Canis familiaris
tcagcatttgttttctgtgtgtgtg

SEQ ID NO: 189058 - DNA, 25 bp, Canis familiaris
tcagcatagggtacttggtggctca

SEQ ID NO: 189059 - DNA, 25 bp, Canis familiaris
tcagcaagcaggagtacgatgagtc

SEQ ID NO: 189060 - DNA, 25 bp, Canis familiaris
tcagcatcacggacagtccgtgtct

SEQ ID NO: 189061 - DNA, 25 bp, Canis familiaris
tcagcagagggagggcccttctacc

SEQ ID NO: 189062 - DNA, 25 bp, Canis familiaris
tcagagacggggaggctctcgatcc

SEQ ID NO: 189063 - DNA, 25 bp, Canis familiaris
tcagagccagggggtggctcctctg

SEQ ID NO: 189064 - DNA, 25 bp, Canis familiaris
tcagcctgggatcagggcttctctg

SEQ ID NO: 189065 - DNA, 25 bp, Canis familiaris
tcagccgggctgggcaggtgaacgt

SEQ ID NO: 189066 - DNA, 25 bp, Canis familiaris
tcagccggtgccaagctgggacgag

SEQ ID NO: 189067 - DNA, 25 bp, Canis familiaris
tcaccgtctgtggcagctgggaaga

SEQ ID NO: 189068 - DNA, 25 bp, Canis familiaris
tcacggttgtcttgggtgcacaggc

SEQ ID NO: 189069 - DNA, 25 bp, Canis familiaris
tcaccttcctttctgatcatagagc

SEQ ID NO: 189070 - DNA, 25 bp, Canis familiaris
tcagcgttcagcattcttgtcaagt

SEQ ID NO: 189071 - DNA, 25 bp, Canis familiaris
tcacagtcccgtgttgctatttcgg

SEQ ID NO: 189072 - DNA, 25 bp, Canis familiaris
tcacctaccctgctggttttatgga

SEQ ID NO: 189073 - DNA, 25 bp, Canis familiaris
tcacccacgcgctggggggtgtgga

SEQ ID NO: 189074 - DNA, 25 bp, Canis familiaris
tcaccagtcgtctggctcaagggtg

SEQ ID NO: 189075 - DNA, 25 bp, Canis familiaris
tcaccggctggatttgctccagggg

SEQ ID NO: 189076 - DNA, 25 bp, Canis familiaris
tcacggtaggaaactccaggtcaga

SEQ ID NO: 189077 - DNA, 25 bp, Canis familiaris
tcagaattatggtttcccgttcaga

SEQ ID NO: 189078 - DNA, 25 bp, Canis familiaris
tcagaattctggaatccccgctgat

SEQ ID NO: 189079 - DNA, 25 bp, Canis familiaris
tcagagccaatgttactccctgtgt

SEQ ID NO: 189080 - DNA, 25 bp, Canis familiaris
tcagaccaatgatgccttcatgccc

SEQ ID NO: 189081 - DNA, 25 bp, Canis familiaris
tcagcattgaagtcagccttgtccg

SEQ ID NO: 189082 - DNA, 25 bp, Canis familiaris
tcagcatggagtttccttgctcctc

SEQ ID NO: 189083 - DNA, 25 bp, Canis familiaris
tcacagggacagttcactccttggc

SEQ ID NO: 189084 - DNA, 25 bp, Canis familiaris
tcacctgggtgagcctgtgcagggc

SEQ ID NO: 189085 - DNA, 25 bp, Canis familiaris
tcaccatcatggactcccaaggggc

SEQ ID NO: 189086 - DNA, 25 bp, Canis familiaris
tacccgaactgcatcaggcgtggca

SEQ ID NO: 189087 - DNA, 25 bp, Canis familiaris
tcaccctcacccacagatggggagt

SEQ ID NO: 189088 - DNA, 25 bp, Canis familiaris
tcacccccacacatcttggggcagg

SEQ ID NO: 189089 - DNA, 25 bp, Canis familiaris
tcagcccttgggggtggtgggaggc

SEQ ID NO: 189090 - DNA, 25 bp, Canis familiaris
tcagagcctggggtggtggcgggga

SEQ ID NO: 189091 - DNA, 25 bp, Canis familiaris
tcacagcctagggctggccaaggtg

SEQ ID NO: 189092 - DNA, 25 bp, Canis familiaris
tcactctcgaggttgagccctcgga

SEQ ID NO: 189093 - DNA, 25 bp, Canis familiaris
tcaccccagataatgagccctttgg

SEQ ID NO: 189094 - DNA, 25 bp, Canis familiaris
tcagccccagatttgatgtacaact

SEQ ID NO: 189095 - DNA, 25 bp, Canis familiaris
tcagacactcagtgtgatctcccct

SEQ ID NO: 189096 - DNA, 25 bp, Canis familiaris
tcagcacactcattctttttttctt

SEQ ID NO: 189097 - DNA, 25 bp, Canis familiaris
tcagcaaccttgtctgttatttaga

SEQ ID NO: 189098 - DNA, 25 bp, Canis familiaris
tcagcatagccttttctgtatttaa

SEQ ID NO: 189099 - DNA, 25 bp, Canis familiaris
tcagcaggcagcgcttctggagttt

SEQ ID NO: 189100 - DNA, 25 bp, Canis familiaris
tcagccttgccctttgagagtattg

SEQ ID NO: 189101 - DNA, 25 bp, Canis familiaris
tcagcagttccctactgaagactgg

SEQ ID NO: 189102 - DNA, 25 bp, Canis familiaris
tcagcagttccttttataatgggtt

SEQ ID NO: 189103 - DNA, 25 bp, Canis familiaris
tcacgttccatttcatctcaatagg

SEQ ID NO: 189104 - DNA, 25 bp, Canis familiaris
taatattcactatcttgactaggtt

SEQ ID NO: 189105 - DNA, 25 bp, Canis familiaris
taattacgtcccaatcttcaggttt

SEQ ID NO: 189106 - DNA, 25 bp, Canis familiaris
taatctcaactatgaacttcaggtt

SEQ ID NO: 189107 - DNA, 25 bp, Canis familiaris
tcaaatcaactatcagaagtctggc

SEQ ID NO: 189108 - DNA, 25 bp, Canis familiaris
ttcaaaatgccttagtactcgaaag

SEQ ID NO: 189109 - DNA, 25 bp, Canis familiaris
taaacaacctggctgactgcaaaaa

SEQ ID NO: 189110 - DNA, 25 bp, Canis familiaris
taagataaccagtcctttcaaagtt

SEQ ID NO: 189111 - DNA, 25 bp, Canis familiaris
tcacagggaccaatcccttaaattt

SEQ ID NO: 189112 - DNA, 25 bp, Canis familiaris
tcacacaaaacgatagcttaagaat

SEQ ID NO: 189113 - DNA, 25 bp, Canis familiaris
tcagccttatacctgtagttaccct

SEQ ID NO: 189114 - DNA, 25 bp, Canis familiaris
tcagacttatagtgcctgctttccc

SEQ ID NO: 189115 - DNA, 25 bp, Canis familiaris
tcagacataaagctgcctcttctct

SEQ ID NO: 189116 - DNA, 25 bp, Canis familiaris
tcagaacagaagccatgcgtctccc

SEQ ID NO: 189117 - DNA, 25 bp, Canis familiaris
tcagaagctgatggacaggcctccc

SEQ ID NO: 189118 - DNA, 25 bp, Canis familiaris
tcagaacgcagccagtgggaccatc

SEQ ID NO: 189119 - DNA, 25 bp, Canis familiaris
ttgaaccgtcggtgagcgtcgatca

SEQ ID NO: 189120 - DNA, 25 bp, Canis familiaris
taaggccgttgccaggactacgtag

SEQ ID NO: 189121 - DNA, 25 bp, Canis familiaris
tcacgagacgctcgtgggtcgccgt

SEQ ID NO: 189122 - DNA, 25 bp, Canis familiaris
tcaccaacccggggatggcacgtgg

SEQ ID NO: 189123 - DNA, 25 bp, Canis familiaris
tcagcaaagccctgagtcagcgcac

SEQ ID NO: 189124 - DNA, 25 bp, Canis familiaris
tcagcaaagtctggcgagatgaaca

SEQ ID NO: 189125 - DNA, 25 bp, Canis familiaris
tcagacaccttacggatacacttgg

SEQ ID NO: 189126 - DNA, 25 bp, Canis familiaris
tcagcacccttcagagagcacaagt

SEQ ID NO: 189127 - DNA, 25 bp, Canis familiaris
tcacccctgtgctcaagcaatcatt

SEQ ID NO: 189128 - DNA, 25 bp, Canis familiaris
tcaccatccatgacccgagagattg

SEQ ID NO: 189129 - DNA, 25 bp, Canis familiaris
tcacccacagaggaagagcaggagc

SEQ ID NO: 189130 - DNA, 25 bp, Canis familiaris
tcaccaaggagcgctgactgtgagg

SEQ ID NO: 189131 - DNA, 25 bp, Canis familiaris
tcaccaactgggacgacatggagaa

SEQ ID NO: 189132 - DNA, 25 bp, Canis familiaris
tcaccggcgtggacgagagcgacta

SEQ ID NO: 189133 - DNA, 25 bp, Canis familiaris
tcaccgaaagagagcgcctatctca

SEQ ID NO: 189134 - DNA, 25 bp, Canis familiaris
tcaccagaaggtacagtgacttcca

SEQ ID NO: 189135 - DNA, 25 bp, Canis familiaris
tcagcctgaaagactaggaccctca

SEQ ID NO: 189136 - DNA, 25 bp, Canis familiaris
tcacacggtaataaggagcccaaca

SEQ ID NO: 189137 - DNA, 25 bp, Canis familiaris
tcaaacgtaatttctgaccttcagg

SEQ ID NO: 189138 - DNA, 25 bp, Canis familiaris
tcacagccctaaaattcatccttcc

SEQ ID NO: 189139 - DNA, 25 bp, Canis familiaris
tcaccaccagaaaataacacagcat

SEQ ID NO: 189140 - DNA, 25 bp, Canis familiaris
tcaccaccgagagaaacacctgggt

SEQ ID NO: 189141 - DNA, 25 bp, Canis familiaris
tcaaagtctgcttcaaaaacccggt

SEQ ID NO: 189142 - DNA, 25 bp, Canis familiaris
tcaaagctcactttaaaccctgcct

SEQ ID NO: 189143 - DNA, 25 bp, Canis familiaris
taacaaatgtaatgtaacccctgcc

SEQ ID NO: 189144 - DNA, 25 bp, Canis familiaris
taaccaagcatctgttaaaccctcc

SEQ ID NO: 189145 - DNA, 25 bp, Canis familiaris
ttaagaacacagcgtgaaacgtgcc

SEQ ID NO: 189146 - DNA, 25 bp, Canis familiaris
taataggccctgtcgggaacggctc

SEQ ID NO: 189147 - DNA, 25 bp, Canis familiaris
tcaatacccctgccagttaaattct

SEQ ID NO: 189148 - DNA, 25 bp, Canis familiaris
tcaacaacccactttcaaacttctt

SEQ ID NO: 189149 - DNA, 25 bp, Canis familiaris
tcaccaacctctaactgcagaactg

SEQ ID NO: 189150 - DNA, 25 bp, Canis familiaris
tcaccacacgcacttatcaggaacg

SEQ ID NO: 189151 - DNA, 25 bp, Canis familiaris
tcacacctgacttttcaggatgcac

SEQ ID NO: 189152 - DNA, 25 bp, Canis familiaris
tcacatcgtgccccatgtaagacag

SEQ ID NO: 189153 - DNA, 25 bp, Canis familiaris
tcacagctgagcgttcttcagcgcc

SEQ ID NO: 189154 - DNA, 25 bp, Canis familiaris
tcagcagcagactcctgtcaggagc

SEQ ID NO: 189155 - DNA, 25 bp, Canis familiaris
tcagcaagcagggccggagcgagga

SEQ ID NO: 189156 - DNA, 25 bp, Canis familiaris
tcagcaacatcggccgcaaggacta

SEQ ID NO: 189157 - DNA, 25 bp, Canis familiaris
tcacccaggtggccaaggcctacca

SEQ ID NO: 189158 - DNA, 25 bp, Canis familiaris
tcaacaagttcgaccaatcctacca

SEQ ID NO: 189159 - DNA, 25 bp, Canis familiaris
tcaaccagcatcagtccatcatgcc

SEQ ID NO: 189160 - DNA, 25 bp, Canis familiaris
tcagcatatcctgagatgccacgcc

SEQ ID NO: 189161 - DNA, 25 bp, Canis familiaris
tcagcaagcgccatggatcacgcca

SEQ ID NO: 189162 - DNA, 25 bp, Canis familiaris
tcagccagtgccagggtcagcataa

SEQ ID NO: 189163 - DNA, 25 bp, Canis familiaris
tcacctgtgcctggacctagaatga

SEQ ID NO: 189164 - DNA, 25 bp, Canis familiaris
tcacgtggcctggcctgtcaagtaa

SEQ ID NO: 189165 - DNA, 25 bp, Canis familiaris
tcactgggtctggcctgtagtttga

SEQ ID NO: 189166 - DNA, 25 bp, Canis familiaris
taccaggagctggcccataattagt

SEQ ID NO: 189167 - DNA, 25 bp, Canis familiaris
tcaccagtgactccagctcagaata

SEQ ID NO: 189168 - DNA, 25 bp, Canis familiaris
tcaccatgtgacctgcactggaaga

SEQ ID NO: 189169 - DNA, 25 bp, Canis familiaris
tcagctcactggggcctggagcaga

SEQ ID NO: 189170 - DNA, 25 bp, Canis familiaris
tcactgcacagcggtccggaagacg

SEQ ID NO: 189171 - DNA, 25 bp, Canis familiaris
tcactggacggattcaggaggccgg

SEQ ID NO: 189172 - DNA, 25 bp, Canis familiaris
tcaaagacggtggggggctcgtggc

SEQ ID NO: 189173 - DNA, 25 bp, Canis familiaris
tcaaagtctgttctggcggcattgt

SEQ ID NO: 189174 - DNA, 25 bp, Canis familiaris
tcagaagatgccctttgacgtgttg

SEQ ID NO: 189175 - DNA, 25 bp, Canis familiaris
tcagaagaggcgctacgcgtgcact

SEQ ID NO: 189176 - DNA, 25 bp, Canis familiaris
tcagaaggagcctttgcgggcactc

SEQ ID NO: 189177 - DNA, 25 bp, Canis familiaris
tcagaaggatgtgttagggcccccc

SEQ ID NO: 189178 - DNA, 25 bp, Canis familiaris
tcagaaggattcctatgtgggcgac

SEQ ID NO: 189179 - DNA, 25 bp, Canis familiaris
tcacttggtctccatgaggtgttga

SEQ ID NO: 189180 - DNA, 25 bp, Canis familiaris
tcactgggctccatgtgacttctga

SEQ ID NO: 189181 - DNA, 25 bp, Canis familiaris
tcacgggctccaaacacattaactg

SEQ ID NO: 189182 - DNA, 25 bp, Canis familiaris
tcacatggaccacacacaagtacac

SEQ ID NO: 189183 - DNA, 25 bp, Canis familiaris
tcacatagcccggtcacatttataa

SEQ ID NO: 189184 - DNA, 25 bp, Canis familiaris
tcagccagctccagtacaatgttca

SEQ ID NO: 189185 - DNA, 25 bp, Canis familiaris
tcagctcagcccactatcaataata

SEQ ID NO: 189186 - DNA, 25 bp, Canis familiaris
tcagccacccgagattgagcaataa

SEQ ID NO: 189187 - DNA, 25 bp, Canis familiaris
tcacattcacacgcgattgcgcaat

SEQ ID NO: 189188 - DNA, 25 bp, Canis familiaris
tcacattcacacgcgattgcgcaat

SEQ ID NO: 189189 - DNA, 25 bp, Canis familiaris
tcacattatggcaggtctgtaacct

SEQ ID NO: 189190 - DNA, 25 bp, Canis familiaris
tcactcttagtgagctttaaaccta

SEQ ID NO: 189191 - DNA, 25 bp, Canis familiaris
tcactactattatccacataaaccc

SEQ ID NO: 189192 - DNA, 25 bp, Canis familiaris
tcacaagctttctcccaagcattca

SEQ ID NO: 189193 - DNA, 25 bp, Canis familiaris
tcacaactggttgctctgaaagtaa

SEQ ID NO: 189194 - DNA, 25 bp, Canis familiaris
tcagccctgggcaaccattaatcta

SEQ ID NO: 189195 - DNA, 25 bp, Canis familiaris
tcagccaggaacacctagtgatata

SEQ ID NO: 189196 - DNA, 25 bp, Canis familiaris
tcagcgagagaaaaccttgtgccta

SEQ ID NO: 189197 - DNA, 25 bp, Canis familiaris
tcagccagaatgcacaccttgctca

SEQ ID NO: 189198 - DNA, 25 bp, Canis familiaris
tcagcagagaatctgctgctccctc

SEQ ID NO: 189199 - DNA, 25 bp, Canis familiaris
tcagcagagagtctgcctctctcac

SEQ ID NO: 189200 - DNA, 25 bp, Canis familiaris
tcagcagagagccaagtttctcctt

SEQ ID NO: 189201 - DNA, 25 bp, Canis familiaris
tcagcagaggccctgtcattgctgc

SEQ ID NO: 189202 - DNA, 25 bp, Canis familiaris
tcagctagccaacctcaatgctgcc

SEQ ID NO: 189203 - DNA, 25 bp, Canis familiaris
tcagcttccgcacacagctgtgagc

SEQ ID NO: 189204 - DNA, 25 bp, Canis familiaris
tcagcaacccagctgcagtaactgg

SEQ ID NO: 189205 - DNA, 25 bp, Canis familiaris
tcagccacctctcgttacaatcgag

SEQ ID NO: 189206 - DNA, 25 bp, Canis familiaris
tcaccatggcttcttctgatatcca

SEQ ID NO: 189207 - DNA, 25 bp, Canis familiaris
tcactagagcttgtcctgagtcaga

SEQ ID NO: 189208 - DNA, 25 bp, Canis familiaris
tcacggccatcatcttctgtgtagc

SEQ ID NO: 189209 - DNA, 25 bp, Canis familiaris
tcactggcttaagactgcttacaaa

SEQ ID NO: 189210 - DNA, 25 bp, Canis familiaris
tcactggcttaagactgcttacaaa

SEQ ID NO: 189211 - DNA, 25 bp, Canis familiaris
tcaagactgtaaggcatgggttcaa

SEQ ID NO: 189212 - DNA, 25 bp, Canis familiaris
tcagcaggctgacaaggtggtacaa

SEQ ID NO: 189213 - DNA, 25 bp, Canis familiaris
tcagcaggctgacagggcggagggc

SEQ ID NO: 189214 - DNA, 25 bp, Canis familiaris
tcagcagagctgggaggtggggaga

SEQ ID NO: 189215 - DNA, 25 bp, Canis familiaris
tcagcagactcgcccaggagaggaa

SEQ ID NO: 189216 - DNA, 25 bp, Canis familiaris
tcactactctcacctggaactaaag

SEQ ID NO: 189217 - DNA, 25 bp, Canis familiaris
tcacttttgcagattgggtaacaca

SEQ ID NO: 189218 - DNA, 25 bp, Canis familiaris
tcacttcgctcgagtgggacaccga

SEQ ID NO: 189219 - DNA, 25 bp, Canis familiaris
tcactggcccagagcggtggcctaa

SEQ ID NO: 189220 - DNA, 25 bp, Canis familiaris
taatggctaatcatagggacccaga

SEQ ID NO: 189221 - DNA, 25 bp, Canis familiaris
taatggcgtaatcatagggaccaga

SEQ ID NO: 189222 - DNA, 25 bp, Canis familiaris
tcacaaggggctcaagggcaccgac

SEQ ID NO: 189223 - DNA, 25 bp, Canis familiaris
tcactctgggtgctaagggctgcca

SEQ ID NO: 189224 - DNA, 25 bp, Canis familiaris
tcagctctggagggctcaggggcca

SEQ ID NO: 189225 - DNA, 25 bp, Canis familiaris
tcagcttaagccctatggagaaact

SEQ ID NO: 189226 - DNA, 25 bp, Canis familiaris
tcagcttcaaggctggtgaagtcct

SEQ ID NO: 189227 - DNA, 25 bp, Canis familiaris
tcacctctcaggctggtgctggatc

SEQ ID NO: 189228 - DNA, 25 bp, Canis familiaris
tcaccttgaagtgcacgctggaccc

SEQ ID NO: 189229 - DNA, 25 bp, Canis familiaris
tcaccttgaccttccttgacaagaa

SEQ ID NO: 189230 - DNA, 25 bp, Canis familiaris
tcaccctgacctgtctggtcaaaga

SEQ ID NO: 189231 - DNA, 25 bp, Canis familiaris
tcaccctgtcccagctggacaaata

SEQ ID NO: 189232 - DNA, 25 bp, Canis familiaris
tcaccctaccctggggagcagagga

SEQ ID NO: 189233 - DNA, 25 bp, Canis familiaris
tcacccgtcttcaggtggcagggtc

SEQ ID NO: 189234 - DNA, 25 bp, Canis familiaris
tcactctcttcttcaggcgatgtgc

SEQ ID NO: 189235 - DNA, 25 bp, Canis familiaris
tcacctctggcatggagctgcaggc

SEQ ID NO: 189236 - DNA, 25 bp, Canis familiaris
tcaccaagctgctactgacgaggct

SEQ ID NO: 189237 - DNA, 25 bp, Canis familiaris
tcacctacatgatcgcacacatcac

SEQ ID NO: 189238 - DNA, 25 bp, Canis familiaris
tcagccacattatcagccaactcta

SEQ ID NO: 189239 - DNA, 25 bp, Canis familiaris
tcactcttttcaagccatagtatga

SEQ ID NO: 189240 - DNA, 25 bp, Canis familiaris
tcacccttgtcaagccactgttgag

SEQ ID NO: 189241 - DNA, 25 bp, Canis familiaris
tcacccctgccaaagagtggtgaga

SEQ ID NO: 189242 - DNA, 25 bp, Canis familiaris
tcactgccacccagaagactgtgga

SEQ ID NO: 189243 - DNA, 25 bp, Canis familiaris
tcactgccacccagaagactgtgga

SEQ ID NO: 189244 - DNA, 25 bp, Canis familiaris
tcacgcacgaggggagcaccgtgga

SEQ ID NO: 189245 - DNA, 25 bp, Canis familiaris
tcaccacgtgtgggaacttgtttct

SEQ ID NO: 189246 - DNA, 25 bp, Canis familiaris
tcacctgccttggcaagcctatttt

SEQ ID NO: 189247 - DNA, 25 bp, Canis familiaris
tcacctctggctgcaaactgatttt

SEQ ID NO: 189248 - DNA, 25 bp, Canis familiaris
tcacacttcctggaaaccgttcaga

SEQ ID NO: 189249 - DNA, 25 bp, Canis familiaris
tcaacttcttgccaaaccactacta

SEQ ID NO: 189250 - DNA, 25 bp, Canis familiaris
tcaacttaactcttcaaccattcaa

SEQ ID NO: 189251 - DNA, 25 bp, Canis familiaris
tcacacttcaaatccgactcaagac

SEQ ID NO: 189252 - DNA, 25 bp, Canis familiaris
tcactcattcaccaacgacctaatg

SEQ ID NO: 189253 - DNA, 25 bp, Canis familiaris
tcaccgtcacagtcacagagtctta

SEQ ID NO: 189254 - DNA, 25 bp, Canis familiaris
tcacctggccaggccatatgtccca

SEQ ID NO: 189255 - DNA, 25 bp, Canis familiaris
tcaacttgccgcaatgccttacaca

SEQ ID NO: 189256 - DNA, 25 bp, Canis familiaris
tttctggtcgcgagattaactattc

SEQ ID NO: 189257 - DNA, 25 bp, Canis familiaris
taattggtccaatgcttaattaacc

SEQ ID NO: 189258 - DNA, 25 bp, Canis familiaris
tcacttcttccaaacccaattagac

SEQ ID NO: 189259 - DNA, 25 bp, Canis familiaris
tcacttcttccaaactaccatttaa

SEQ ID NO: 189260 - DNA, 25 bp, Canis familiaris
tcacctttccagtattttatttcac

SEQ ID NO: 189261 - DNA, 25 bp, Canis familiaris
tcacctttcaggattcaatgtttgt

SEQ ID NO: 189262 - DNA, 25 bp, Canis familiaris
tcaccctcaccgatgaacagtttct

SEQ ID NO: 189263 - DNA, 25 bp, Canis familiaris
tcaaccccgatttagtcgtatctct

SEQ ID NO: 189264 - DNA, 25 bp, Canis familiaris
tcacagccaccagttatcattcagt

SEQ ID NO: 189265 - DNA, 25 bp, Canis familiaris
tcaccatcaggagctacttcgtaca

SEQ ID NO: 189266 - DNA, 25 bp, Canis familiaris
tcaccatcacctgctctttagtgac

SEQ ID NO: 189267 - DNA, 25 bp, Canis familiaris
tcaccatcacgtacctgcaggagac

SEQ ID NO: 189268 - DNA, 25 bp, Canis familiaris
tcactctccttcacagcaggaagcc

SEQ ID NO: 189269 - DNA, 25 bp, Canis familiaris
tcactagatagtcccggcgatagcc

SEQ ID NO: 189270 - DNA, 25 bp, Canis familiaris
tcactgagctgaggggggcctactc

SEQ ID NO: 189271 - DNA, 25 bp, Canis familiaris
tcactgggacggtgtcatcgactct

SEQ ID NO: 189272 - DNA, 25 bp, Canis familiaris
tcactggtcactggtatgttccctg

SEQ ID NO: 189273 - DNA, 25 bp, Canis familiaris
tcacgcccacatgttgtgggccccc

SEQ ID NO: 189274 - DNA, 25 bp, Canis familiaris
tcaccaggcctggttgatggacctc

SEQ ID NO: 189275 - DNA, 25 bp, Canis familiaris
tcagccaggacagatgctacggcct

SEQ ID NO: 189276 - DNA, 25 bp, Canis familiaris
tcagcgaggacctgtaccaccgctg

SEQ ID NO: 189277 - DNA, 25 bp, Canis familiaris
tcacggtgtacgaataccacaggcc

SEQ ID NO: 189278 - DNA, 25 bp, Canis familiaris
tcagctgagcttgtgtaccccagca

SEQ ID NO: 189279 - DNA, 25 bp, Canis familiaris
tcactgagtggcaagtgcagccccc

SEQ ID NO: 189280 - DNA, 25 bp, Canis familiaris
tcactgatgatgacacagcatgacc

SEQ ID NO: 189281 - DNA, 25 bp, Canis familiaris
taatatttcacgaaccaggtcaccc

SEQ ID NO: 189282 - DNA, 25 bp, Canis familiaris
tcaaattgtcttctcgagttcagcc

SEQ ID NO: 189283 - DNA, 25 bp, Canis familiaris
tcactaccttctcgtgtgtgtaacc

SEQ ID NO: 189284 - DNA, 25 bp, Canis familiaris
tcactgcactctgggacgtttaccc

SEQ ID NO: 189285 - DNA, 25 bp, Canis familiaris
tcacgacccagaagcagtcgttccc

SEQ ID NO: 189286 - DNA, 25 bp, Canis familiaris
tcacgaccaagaagcagccgatcaa

SEQ ID NO: 189287 - DNA, 25 bp, Canis familiaris
tcacgcccgcgaagcgtagacgatc

SEQ ID NO: 189288 - DNA, 25 bp, Canis familiaris
tcacaccggagaacagctatgaccc

SEQ ID NO: 189289 - DNA, 25 bp, Canis familiaris
tcacccaggctactatgctgtaccc

SEQ ID NO: 189290 - DNA, 25 bp, Canis familiaris
tcacccagttagaacttggtctcag

SEQ ID NO: 189291 - DNA, 25 bp, Canis familiaris
tcaccccctatgaattcgagtgtca

SEQ ID NO: 189292 - DNA, 25 bp, Canis familiaris
tcagcccccaagaatgggtgcagtg

SEQ ID NO: 189293 - DNA, 25 bp, Canis familiaris
tcactccccacaaagaggcaggctc

SEQ ID NO: 189294 - DNA, 25 bp, Canis familiaris
tcactcactcgcgacataaaaggat

SEQ ID NO: 189295 - DNA, 25 bp, Canis familiaris
tcactccttccccaaaaggttgtcg

SEQ ID NO: 189296 - DNA, 25 bp, Canis familiaris
tcaccctctcctcaataagacgtgg

SEQ ID NO: 189297 - DNA, 25 bp, Canis familiaris
tcaccactatttcatattctctcgg

SEQ ID NO: 189298 - DNA, 25 bp, Canis familiaris
tcagctccttttctgtttcttgatg

SEQ ID NO: 189299 - DNA, 25 bp, Canis familiaris
tcactcctccgttgtgtgttttgca

SEQ ID NO: 189300 - DNA, 25 bp, Canis familiaris
tcactttggactgctgcttttctga

SEQ ID NO: 189301 - DNA, 25 bp, Canis familiaris
tcagctttgctaaccagtcttttca

SEQ ID NO: 189302 - DNA, 25 bp, Canis familiaris
tcactttgttggccattctggttct

SEQ ID NO: 189303 - DNA, 25 bp, Canis familiaris
tcaccatggtttcatttgttttgtt

SEQ ID NO: 189304 - DNA, 25 bp, Canis familiaris
tcacctcacagtagtttggtttttc

SEQ ID NO: 189305 - DNA, 25 bp, Canis familiaris
tcacacccctagatctggtcgttta

SEQ ID NO: 189306 - DNA, 25 bp, Canis familiaris
tcacacagccaaattcttgaatcag

SEQ ID NO: 189307 - DNA, 25 bp, Canis familiaris
tcaacggaccctctgttcagggagc

SEQ ID NO: 189308 - DNA, 25 bp, Canis familiaris
tcaacggactttccaatgttcgtac

SEQ ID NO: 189309 - DNA, 25 bp, Canis familiaris
tcaaccgatcggtccaacttctgat

SEQ ID NO: 189310 - DNA, 25 bp, Canis familiaris
taacgtgtaggtgccactcctgtag

SEQ ID NO: 189311 - DNA, 25 bp, Canis familiaris
tcaaccgtcgggaccaacactatat

SEQ ID NO: 189312 - DNA, 25 bp, Canis familiaris
tcaaaactcgggaccaacatgttct

SEQ ID NO: 189313 - DNA, 25 bp, Canis familiaris
tcaaaacactgttgtcagagaagtt

SEQ ID NO: 189314 - DNA, 25 bp, Canis familiaris
tcacaagccctgaaatggataattc

SEQ ID NO: 189315 - DNA, 25 bp, Canis familiaris
tcaaagccctgacttacccatttga

SEQ ID NO: 189316 - DNA, 25 bp, Canis familiaris
tacaatccctggggagcctttacca

SEQ ID NO: 189317 - DNA, 25 bp, Canis familiaris
tcacaacccgaggagggcggcttgc

SEQ ID NO: 189318 - DNA, 25 bp, Canis familiaris
tcaaccccaactgtgacgagctggc

SEQ ID NO: 189319 - DNA, 25 bp, Canis familiaris
taaccaccacgcaggacgatcatat

SEQ ID NO: 189320 - DNA, 25 bp, Canis familiaris
taaccacgctaaccgtaatcaacca

SEQ ID NO: 189321 - DNA, 25 bp, Canis familiaris
tcaaccatgggatccattactaagc

SEQ ID NO: 189322 - DNA, 25 bp, Canis familiaris
tcaaccgggttctagtacaaagtcg

SEQ ID NO: 189323 - DNA, 25 bp, Canis familiaris
tcaacgggacttttccaaaatgtcg

SEQ ID NO: 189324 - DNA, 25 bp, Canis familiaris
tcactcggcgggtttcacgaacagt

SEQ ID NO: 189325 - DNA, 25 bp, Canis familiaris
tcacagggcagaggtttacagtaca

SEQ ID NO: 189326 - DNA, 25 bp, Canis familiaris
tacagggaactgctggaagctgaga

SEQ ID NO: 189327 - DNA, 25 bp, Canis familiaris
tcaccgaaaaggatgcagagctgga

SEQ ID NO: 189328 - DNA, 25 bp, Canis familiaris
tcacctgcaagatctgtgtgcggca

SEQ ID NO: 189329 - DNA, 25 bp, Canis familiaris
tcacggcatagtgctgctcatcgta

SEQ ID NO: 189330 - DNA, 25 bp, Canis familiaris
tcacgtgtcaggctcatctcgtgtt

SEQ ID NO: 189331 - DNA, 25 bp, Canis familiaris
tcacctggcaggcaatccagtctcc

SEQ ID NO: 189332 - DNA, 25 bp, Canis familiaris
tcaccagagcagcgttctagtcctc

SEQ ID NO: 189333 - DNA, 25 bp, Canis familiaris
tcaccgagcgcggctacagcttcac

SEQ ID NO: 189334 - DNA, 25 bp, Canis familiaris
tcactggcatggccttccgtgtccc

SEQ ID NO: 189335 - DNA, 25 bp, Canis familiaris
tcactggcatggccttccgtgttcc

SEQ ID NO: 189336 - DNA, 25 bp, Canis familiaris
tcacaatgctggctatccgggtgct

SEQ ID NO: 189337 - DNA, 25 bp, Canis familiaris
tcaaactggtccagcgggtgctcgt

SEQ ID NO: 189338 - DNA, 25 bp, Canis familiaris
tcaaactcagatgcttcgggggcca

SEQ ID NO: 189339 - DNA, 25 bp, Canis familiaris
tcaccagtagctgcaaccggttgcc

SEQ ID NO: 189340 - DNA, 25 bp, Canis familiaris
tcactctaagtgtagaccccttcgt

SEQ ID NO: 189341 - DNA, 25 bp, Canis familiaris
tcagctgcggagtactaccgccttc

SEQ ID NO: 189342 - DNA, 25 bp, Canis familiaris
tcagcggagcaaactccggcctgca

SEQ ID NO: 189343 - DNA, 25 bp, Canis familiaris
tcacgaggacattttcgggctcaca

SEQ ID NO: 189344 - DNA, 25 bp, Canis familiaris
tcacgggcttttggcaggactgaga

SEQ ID NO: 189345 - DNA, 25 bp, Canis familiaris
tcaccacacttttcgcaggacatgg

SEQ ID NO: 189346 - DNA, 25 bp, Canis familiaris
tcacctcccagcaaccaggaaggtt

SEQ ID NO: 189347 - DNA, 25 bp, Canis familiaris
tcactcctcaacaaaacccaaatta

SEQ ID NO: 189348 - DNA, 25 bp, Canis familiaris
tcacttccagactaaaccagagtat

SEQ ID NO: 189349 - DNA, 25 bp, Canis familiaris
tacttccaaacagacctgatttctt

SEQ ID NO: 189350 - DNA, 25 bp, Canis familiaris
taaactgcaaagtaaggtattttct

SEQ ID NO: 189351 - DNA, 25 bp, Canis familiaris
tcaaaccattgataaatttttataa

SEQ ID NO: 189352 - DNA, 25 bp, Canis familiaris
tcactacttatcccagaattttctg

SEQ ID NO: 189353 - DNA, 25 bp, Canis familiaris
tcaccacaattactctgtattttca

SEQ ID NO: 189354 - DNA, 25 bp, Canis familiaris
tcaccaacaccactttttctattta

SEQ ID NO: 189355 - DNA, 25 bp, Canis familiaris
tcaaaccaccccttcggatttgaag

SEQ ID NO: 189356 - DNA, 25 bp, Canis familiaris
tcaccaacccccttagagtgttaga

SEQ ID NO: 189357 - DNA, 25 bp, Canis familiaris
tcactgcaaccaacacgggagcttg

SEQ ID NO: 189358 - DNA, 25 bp, Canis familiaris
tcaatgtgatccgcctggtagctgg

SEQ ID NO: 189359 - DNA, 25 bp, Canis familiaris
tcacatggccacctcttgttaaaga

SEQ ID NO: 189360 - DNA, 25 bp, Canis familiaris
tcaattccacctctttcaacaaatt

SEQ ID NO: 189361 - DNA, 25 bp, Canis familiaris
tcacttgcccttcactgtcaaaaaa

SEQ ID NO: 189362 - DNA, 25 bp, Canis familiaris
tcaattggccttggacttcgaagca

SEQ ID NO: 189363 - DNA, 25 bp, Canis familiaris
taatcatggcatgtaatctggctga

SEQ ID NO: 189364 - DNA, 25 bp, Canis familiaris
taatcagtgctctcatattaattaa

SEQ ID NO: 189365 - DNA, 25 bp, Canis familiaris
taatatcatggctctaaaattaaat

SEQ ID NO: 189366 - DNA, 25 bp, Canis familiaris
tcaatccggaactaacaattaaaca

SEQ ID NO: 189367 - DNA, 25 bp, Canis familiaris
tcaaaagaaaccaaccttctcaaca

SEQ ID NO: 189368 - DNA, 25 bp, Canis familiaris
taaaaaagacgactgcccacttaat

SEQ ID NO: 189369 - DNA, 25 bp, Canis familiaris
taatcacagaatcctattccccttt

SEQ ID NO: 189370 - DNA, 25 bp, Canis familiaris
tcacccagaagccaagttccacttc

SEQ ID NO: 189371 - DNA, 25 bp, Canis familiaris
tcacctcaggggtacttcttttgaa

SEQ ID NO: 189372 - DNA, 25 bp, Canis familiaris
tcaacctgaaggaactttattttag

SEQ ID NO: 189373 - DNA, 25 bp, Canis familiaris
tcaagacgaagacccctcttttagg

SEQ ID NO: 189374 - DNA, 25 bp, Canis familiaris
tcacagagtaaccacccattcattg

SEQ ID NO: 189375 - DNA, 25 bp, Canis familiaris
tcacgcagcgagaactgcccactat

SEQ ID NO: 189376 - DNA, 25 bp, Canis familiaris
tcacggcaatggtctgctttctgta

SEQ ID NO: 189377 - DNA, 25 bp, Canis familiaris
tcacggcaatgcggctgcactggtg

SEQ ID NO: 189378 - DNA, 25 bp, Canis familiaris
tcaccgagcacgcacagctggtgca

SEQ ID NO: 189379 - DNA, 25 bp, Canis familiaris
tcacctcagctagcacaggggcttt

SEQ ID NO: 189380 - DNA, 25 bp, Canis familiaris
tcaccacgctcggacattagtcttc

SEQ ID NO: 189381 - DNA, 25 bp, Canis familiaris
tcaccaacattggagtatactcgtg

SEQ ID NO: 189382 - DNA, 25 bp, Canis familiaris
tcaccaacactgtgatactcacgac

SEQ ID NO: 189383 - DNA, 25 bp, Canis familiaris
tcaccaatcacacttcaaatccgac

SEQ ID NO: 189384 - DNA, 25 bp, Canis familiaris
tcacgatatagaccatatttccccc

SEQ ID NO: 189385 - DNA, 25 bp, Canis familiaris
tcacaactgatgactcaatctgtac

SEQ ID NO: 189386 - DNA, 25 bp, Canis familiaris
tcaaactgcattccacatattattt

SEQ ID NO: 189387 - DNA, 25 bp, Canis familiaris
tcaacccagtccctatctgagttac

SEQ ID NO: 189388 - DNA, 25 bp, Canis familiaris
tcaccccttccactagaagattctc

SEQ ID NO: 189389 - DNA, 25 bp, Canis familiaris
tcaccataccatgaccagaagttat

SEQ ID NO: 189390 - DNA, 25 bp, Canis familiaris
tcaactcaccaaaacaaatgtcaac

SEQ ID NO: 189391 - DNA, 25 bp, Canis familiaris
tcaaatcactactacccagaaaacc

SEQ ID NO: 189392 - DNA, 25 bp, Canis familiaris
tcaaatcactactacccagaaaacc

SEQ ID NO: 189393 - DNA, 25 bp, Canis familiaris
tcagccatacccttccaaaaaatta

SEQ ID NO: 189394 - DNA, 25 bp, Canis familiaris
tacttacctcttacaaaaagtatag

SEQ ID NO: 189395 - DNA, 25 bp, Canis familiaris
tatttacctgtaaccctagactcta

SEQ ID NO: 189396 - DNA, 25 bp, Canis familiaris
tacccccagttcacctagatattaa

SEQ ID NO: 189397 - DNA, 25 bp, Canis familiaris
tcacccaccttaaacctacatttga

SEQ ID NO: 189398 - DNA, 25 bp, Canis familiaris
tcacaccaacataaatccccacgtg

SEQ ID NO: 189399 - DNA, 25 bp, Canis familiaris
tcaccgagatctataccgcttggga

SEQ ID NO: 189400 - DNA, 25 bp, Canis familiaris
tcacccagtgtgaagcaccagcttg

SEQ ID NO: 189401 - DNA, 25 bp, Canis familiaris
tcacctgcagtgattcctagtttgg

SEQ ID NO: 189402 - DNA, 25 bp, Canis familiaris
tcacccagtggttgcgcatagtagg

SEQ ID NO: 189403 - DNA, 25 bp, Canis familiaris
tcagccaagggttgatgcatctaag

SEQ ID NO: 189404 - DNA, 25 bp, Canis familiaris
tcagcctggccagtttgctgctgaa

SEQ ID NO: 189405 - DNA, 25 bp, Canis familiaris
tcagccagcctgtgtggctgctgcg

SEQ ID NO: 189406 - DNA, 25 bp, Canis familiaris
tcaccagagctgcaggtctgctggg

SEQ ID NO: 189407 - DNA, 25 bp, Canis familiaris
tcacgcagcgtggaggtcagagagg

SEQ ID NO: 189408 - DNA, 25 bp, Canis familiaris
tcaacatcagctacaggctcaggaa

SEQ ID NO: 189409 - DNA, 25 bp, Canis familiaris
tcaagcctcatgtcaggctctgcac

SEQ ID NO: 189410 - DNA, 25 bp, Canis familiaris
tcacacctcatagtgggctctgcac

SEQ ID NO: 189411 - DNA, 25 bp, Canis familiaris
tcacctcgcaagcatgttcatgaaa

SEQ ID NO: 189412 - DNA, 25 bp, Canis familiaris
tcactccctcagcagcatggtgaca

SEQ ID NO: 189413 - DNA, 25 bp, Canis familiaris
tcaccctcatgacatcatagatgac

SEQ ID NO: 189414 - DNA, 25 bp, Canis familiaris
tcactgcctcaacctcaaggacaaa

SEQ ID NO: 189415 - DNA, 25 bp, Canis familiaris
tcactgccaagaaccacctaaaaaa

SEQ ID NO: 189416 - DNA, 25 bp, Canis familiaris
tcactgctcaggacccagatcgata

SEQ ID NO: 189417 - DNA, 25 bp, Canis familiaris
tcactgctcagcaacctggaggaag

SEQ ID NO: 189418 - DNA, 25 bp, Canis familiaris
tcagccggagaccatggtgagaggc

SEQ ID NO: 189419 - DNA, 25 bp, Canis familiaris
tcacacggctaccagtgtatgctcc

SEQ ID NO: 189420 - DNA, 25 bp, Canis familiaris
tcaccgtctacggtgctgctttgct

SEQ ID NO: 189421 - DNA, 25 bp, Canis familiaris
tcaccgtcttcaaggcctaactaga

SEQ ID NO: 189422 - DNA, 25 bp, Canis familiaris
ttacgatttgtgatgccttaccgat

SEQ ID NO: 189423 - DNA, 25 bp, Canis familiaris
tcaaccttttgactcctatttctag

SEQ ID NO: 189424 - DNA, 25 bp, Canis familiaris
tcacacgttttcctttttactagtg

SEQ ID NO: 189425 - DNA, 25 bp, Canis familiaris
tcacctttattctttttcttctaag

SEQ ID NO: 189426 - DNA, 25 bp, Canis familiaris
tcaccctgacttttttctttcatta

SEQ ID NO: 189427 - DNA, 25 bp, Canis familiaris
tcacttcatactcctgtttttttct

SEQ ID NO: 189428 - DNA, 25 bp, Canis familiaris
tcacttctgttagtgttctttccca

SEQ ID NO: 189429 - DNA, 25 bp, Canis familiaris
tcacttctttttattgttctacctg

SEQ ID NO: 189430 - DNA, 25 bp, Canis familiaris
tcacttttttttttgactattcact

SEQ ID NO: 189431 - DNA, 25 bp, Canis familiaris
tcactatttttaaagcgcaatttcc

SEQ ID NO: 189432 - DNA, 25 bp, Canis familiaris
tactcagttgtagaaagattttgcc

SEQ ID NO: 189433 - DNA, 25 bp, Canis familiaris
tactcaggggaaaaagagcctttcg

SEQ ID NO: 189434 - DNA, 25 bp, Canis familiaris
tcacacggctctgaacaagggtttc

SEQ ID NO: 189435 - DNA, 25 bp, Canis familiaris
tcaaccacccacaaagaggcgtttc

SEQ ID NO: 189436 - DNA, 25 bp, Canis familiaris
taatcaaaccgatcaaggctgcttt

SEQ ID NO: 189437 - DNA, 25 bp, Canis familiaris
taaaaagcctggtcaacacgttggt

SEQ ID NO: 189438 - DNA, 25 bp, Canis familiaris
tcaaacaagcctatacacagtttgg

SEQ ID NO: 189439 - DNA, 25 bp, Canis familiaris
tcacacacacccaagtaccagattt

SEQ ID NO: 189440 - DNA, 25 bp, Canis familiaris
tcaacaattccaactagccgtttaa

SEQ ID NO: 189441 - DNA, 25 bp, Canis familiaris
tcaaaatcttcggtcagttttctga

SEQ ID NO: 189442 - DNA, 25 bp, Canis familiaris
ttaaataatggttagattcccaggt

SEQ ID NO: 189443 - DNA, 25 bp, Canis familiaris
tcaaaaaaattattattctcctggt

SEQ ID NO: 189444 - DNA, 25 bp, Canis familiaris
taaaataactttctgcttactgggg

SEQ ID NO: 189445 - DNA, 25 bp, Canis familiaris
tcaaatcaaccttttgggctcgggg

SEQ ID NO: 189446 - DNA, 25 bp, Canis familiaris
tcaacacaactcacatcttatcggg

SEQ ID NO: 189447 - DNA, 25 bp, Canis familiaris
tcaacaggcaccagctctttgggta

SEQ ID NO: 189448 - DNA, 25 bp, Canis familiaris
tcacataggaccacttttgccacta

SEQ ID NO: 189449 - DNA, 25 bp, Canis familiaris
tcacactgtatcttccttttgcagc

SEQ ID NO: 189450 - DNA, 25 bp, Canis familiaris
tcactgtgccacttactgttactgc

SEQ ID NO: 189451 - DNA, 25 bp, Canis familiaris
tcactatgcagccatttcgttagcg

SEQ ID NO: 189452 - DNA, 25 bp, Canis familiaris
tcaccacactgcttccaggtatggg

SEQ ID NO: 189453 - DNA, 25 bp, Canis familiaris
tcaccacgctgctcacagtggtagg

SEQ ID NO: 189454 - DNA, 25 bp, Canis familiaris
tcaccacctcaccacagtggaggca

SEQ ID NO: 189455 - DNA, 25 bp, Canis familiaris
tcaccagcgtcagagtggcgggctg

SEQ ID NO: 189456 - DNA, 25 bp, Canis familiaris
tcacctggactgcagggtctggctc

SEQ ID NO: 189457 - DNA, 25 bp, Canis familiaris
tcaccgcagagccgaggcagtgttg

SEQ ID NO: 189458 - DNA, 25 bp, Canis familiaris
tcacaccaaggtcctgcctttgtta

SEQ ID NO: 189459 - DNA, 25 bp, Canis familiaris
tcacatcttcagctctcttttaatt

SEQ ID NO: 189460 - DNA, 25 bp, Canis familiaris
tcaccttcagtttcatttttttcca

SEQ ID NO: 189461 - DNA, 25 bp, Canis familiaris
tcacgttcagctttcagtttatcca

SEQ ID NO: 189462 - DNA, 25 bp, Canis familiaris
tcaccttcactcctcagtaaatcag

SEQ ID NO: 189463 - DNA, 25 bp, Canis familiaris
tcaactatcatcctgaaacaaaatg

SEQ ID NO: 189464 - DNA, 25 bp, Canis familiaris
tcaaaatgacccactcaataagagt

SEQ ID NO: 189465 - DNA, 25 bp, Canis familiaris
tcaaagaacctgtctctgcagtaga

SEQ ID NO: 189466 - DNA, 25 bp, Canis familiaris
tcaccagaactcaactctactagca

SEQ ID NO: 189467 - DNA, 25 bp, Canis familiaris
tcactaatcatctaaactactcact

SEQ ID NO: 189468 - DNA, 25 bp, Canis familiaris
tcacttcccacatcactaattctgg

SEQ ID NO: 189469 - DNA, 25 bp, Canis familiaris
tcacattcgaacttgcctacactcg

SEQ ID NO: 189470 - DNA, 25 bp, Canis familiaris
tcactcatcgggtattctgacctct

SEQ ID NO: 189471 - DNA, 25 bp, Canis familiaris
tcacccggagtcactgattttgcca

SEQ ID NO: 189472 - DNA, 25 bp, Canis familiaris
tcacccgtggtcaccatggtaggca

SEQ ID NO: 189473 - DNA, 25 bp, Canis familiaris
tcacaacctcgacacctggtagtgt

SEQ ID NO: 189474 - DNA, 25 bp, Canis familiaris
tcacaatcctcggagtcctagggtc

SEQ ID NO: 189475 - DNA, 25 bp, Canis familiaris
tcaaacccgggaagctgaggctcca

SEQ ID NO: 189476 - DNA, 25 bp, Canis familiaris
tcaaaccttgggtgtgctgtgcccc

SEQ ID NO: 189477 - DNA, 25 bp, Canis familiaris
tcaacgtcggacgacgggtcacccg

SEQ ID NO: 189478 - DNA, 25 bp, Canis familiaris
tcaacaatccgagttcgggctccca

SEQ ID NO: 189479 - DNA, 25 bp, Canis familiaris
tcacaagactgtgatccgtggcccc

SEQ ID NO: 189480 - DNA, 25 bp, Canis familiaris
tcacaagtgcatcatagccgctcca

SEQ ID NO: 189481 - DNA, 25 bp, Canis familiaris
tcacaagttaattgcctcctggtgt

SEQ ID NO: 189482 - DNA, 25 bp, Canis familiaris
tcacacttccaatttcttcggttca

SEQ ID NO: 189483 - DNA, 25 bp, Canis familiaris
tcacctctcatagctacttctgtgt

SEQ ID NO: 189484 - DNA, 25 bp, Canis familiaris
tcaccagctctgtcttagctttgta

SEQ ID NO: 189485 - DNA, 25 bp, Canis familiaris
tcacgagcatcattttcctctttga

SEQ ID NO: 189486 - DNA, 25 bp, Canis familiaris
tcaccagagcggatccttctatgag

SEQ ID NO: 189487 - DNA, 25 bp, Canis familiaris
tcaaagcaggccacctgatgccagg

SEQ ID NO: 189488 - DNA, 25 bp, Canis familiaris
tcaaagcagggtgctcttcctggct

SEQ ID NO: 189489 - DNA, 25 bp, Canis familiaris
tattacgaggtcccagtccgtgacc

SEQ ID NO: 189490 - DNA, 25 bp, Canis familiaris
tactacagagtgtggactcccggct

SEQ ID NO: 189491 - DNA, 25 bp, Canis familiaris
tcactaagcggataaccctgccact

SEQ ID NO: 189492 - DNA, 25 bp, Canis familiaris
tcaagaaggctgtaaatgccaagaa

SEQ ID NO: 189493 - DNA, 25 bp, Canis familiaris
tcaacaacctgtttattcaaaggaa

SEQ ID NO: 189494 - DNA, 25 bp, Canis familiaris
tcaaataactttacttgcctaacat

SEQ ID NO: 189495 - DNA, 25 bp, Canis familiaris
tcaaatcaacatatttcctcttccc

SEQ ID NO: 189496 - DNA, 25 bp, Canis familiaris
tcaaataattttccccaaatctcca

SEQ ID NO: 189497 - DNA, 25 bp, Canis familiaris
tcaaaagaaagtcctcccaagttag

SEQ ID NO: 189498 - DNA, 25 bp, Canis familiaris
tcaacataaaaccccctgcaatatc

SEQ ID NO: 189499 - DNA, 25 bp, Canis familiaris
taaacccagaagaccctacatactc

SEQ ID NO: 189500 - DNA, 25 bp, Canis familiaris
tacaacggaaatgccaccacaaccc

SEQ ID NO: 189501 - DNA, 25 bp, Canis familiaris
tatgtatagaaatcccccgaactcc

SEQ ID NO: 189502 - DNA, 25 bp, Canis familiaris
tatttcaaactactcccttaagctg

SEQ ID NO: 189503 - DNA, 25 bp, Canis familiaris
tcactctaaactttccctgttcaga

SEQ ID NO: 189504 - DNA, 25 bp, Canis familiaris
tcaatgtttactctacccgtagtgt

SEQ ID NO: 189505 - DNA, 25 bp, Canis familiaris
tcaagtttcctcaaagcctttttct

SEQ ID NO: 189506 - DNA, 25 bp, Canis familiaris
tcacaccattcagtataagcttttg

SEQ ID NO: 189507 - DNA, 25 bp, Canis familiaris
tcacccagtgaattggagcatttta

SEQ ID NO: 189508 - DNA, 25 bp, Canis familiaris
tcacttgcaggatttggtctcttta

SEQ ID NO: 189509 - DNA, 25 bp, Canis familiaris
tcacttgcagtctttggttcctata

SEQ ID NO: 189510 - DNA, 25 bp, Canis familiaris
tcaccatgtgcctgtggttctcaaa

SEQ ID NO: 189511 - DNA, 25 bp, Canis familiaris
tcaccatgttcatgggcttcctggg

SEQ ID NO: 189512 - DNA, 25 bp, Canis familiaris
tcacacgttgtaggtgtaactgtca

SEQ ID NO: 189513 - DNA, 25 bp, Canis familiaris
tcacacgttgtaggtttaacttgtc

SEQ ID NO: 189514 - DNA, 25 bp, Canis familiaris
tcacactttgtgtgtcccaacttga

SEQ ID NO: 189515 - DNA, 25 bp, Canis familiaris
tcaactttcgatggtagtcgccgtg

SEQ ID NO: 189516 - DNA, 25 bp, Canis familiaris
tcaacatttcttctcgtcgatagtg

SEQ ID NO: 189517 - DNA, 25 bp, Canis familiaris
tatccattaagtccttactgatagg

SEQ ID NO: 189518 - DNA, 25 bp, Canis familiaris
tcacctggaggacctgtactggatg

SEQ ID NO: 189519 - DNA, 25 bp, Canis familiaris
tcacgttggagtcggaagcgcctgc

SEQ ID NO: 189520 - DNA, 25 bp, Canis familiaris
tcaccttcgagtagagagtcccgcc

SEQ ID NO: 189521 - DNA, 25 bp, Canis familiaris
tcacccattgagagaatgaccccaa

SEQ ID NO: 189522 - DNA, 25 bp, Canis familiaris
tcacactcagtagaaatcccccaaa

SEQ ID NO: 189523 - DNA, 25 bp, Canis familiaris
tcacccagtgacagatatcccaaga

SEQ ID NO: 189524 - DNA, 25 bp, Canis familiaris
tcacccagggcatggacatccagtg

SEQ ID NO: 189525 - DNA, 25 bp, Canis familiaris
tcaagaccagcctggccaacatggt

SEQ ID NO: 189526 - DNA, 25 bp, Canis familiaris
tcaaagcaggcctgagccgcctgga

SEQ ID NO: 189527 - DNA, 25 bp, Canis familiaris
tcaaagcaggcccgagccgcctgga

SEQ ID NO: 189528 - DNA, 25 bp, Canis familiaris
tcaacactgacccagatcacagctg

SEQ ID NO: 189529 - DNA, 25 bp, Canis familiaris
tcacccagaactccattgcagctga

SEQ ID NO: 189530 - DNA, 25 bp, Canis familiaris
tcacttgcagcaccttcgtagctga

SEQ ID NO: 189531 - DNA, 25 bp, Canis familiaris
tcacttccgctcttcatatactgaa

SEQ ID NO: 189532 - DNA, 25 bp, Canis familiaris
tcaaatcccagctcttactgttaag

SEQ ID NO: 189533 - DNA, 25 bp, Canis familiaris
tcaaacccaaccctactgtatttgt

SEQ ID NO: 189534 - DNA, 25 bp, Canis familiaris
tcaaacctgccctactggtgttact

SEQ ID NO: 189535 - DNA, 25 bp, Canis familiaris
tcaacctccgcttcctggggaagct

SEQ ID NO: 189536 - DNA, 25 bp, Canis familiaris
tcaacctaccttgctgactatggtc

SEQ ID NO: 189537 - DNA, 25 bp, Canis familiaris
tcaccctgaccgagtgactctggtc

SEQ ID NO: 189538 - DNA, 25 bp, Canis familiaris
tcaaccccacgaatttcctggacga

SEQ ID NO: 189539 - DNA, 25 bp, Canis familiaris
tcaacctctaccatgtccgggagga

SEQ ID NO: 189540 - DNA, 25 bp, Canis familiaris
tcaaccctgatctctacctggagaa

SEQ ID NO: 189541 - DNA, 25 bp, Canis familiaris
tcacccctgttcgatcaactggtag

SEQ ID NO: 189542 - DNA, 25 bp, Canis familiaris
tcacccctgttttccatcaggagat

SEQ ID NO: 189543 - DNA, 25 bp, Canis familiaris
tcactccctattttctgaagaaact

SEQ ID NO: 189544 - DNA, 25 bp, Canis familiaris
tcacgctcagtggctttctaaaacc

SEQ ID NO: 189545 - DNA, 25 bp, Canis familiaris
tcacgttctgcctttgcttcagaac

SEQ ID NO: 189546 - DNA, 25 bp, Canis familiaris
tcacgtatcgcgtgatctccgacac

SEQ ID NO: 189547 - DNA, 25 bp, Canis familiaris
tcacaaatcagttcagatcccccac

SEQ ID NO: 189548 - DNA, 25 bp, Canis familiaris
tcacaagacatggacaatagacacc

SEQ ID NO: 189549 - DNA, 25 bp, Canis familiaris
tcacaagcacaataaacaaccccag

SEQ ID NO: 189550 - DNA, 25 bp, Canis familiaris
tcaaaccattaaagagccacccctg

SEQ ID NO: 189551 - DNA, 25 bp, Canis familiaris
tcacctgccatctgaaggtcactcc

SEQ ID NO: 189552 - DNA, 25 bp, Canis familiaris
tcaactctgcaaagacgttcgcatc

SEQ ID NO: 189553 - DNA, 25 bp, Canis familiaris
tcacaactgttgaagctggtccaca

SEQ ID NO: 189554 - DNA, 25 bp, Canis familiaris
tcacgcccttgatcatgttctgaac

SEQ ID NO: 189555 - DNA, 25 bp, Canis familiaris
tcacgcccggagtagaagcgcatac

SEQ ID NO: 189556 - DNA, 25 bp, Canis familiaris
tcacccctgatgcaagaccgaagag

SEQ ID NO: 189557 - DNA, 25 bp, Canis familiaris
tcaccccactggggacacctgggtg

SEQ ID NO: 189558 - DNA, 25 bp, Canis familiaris
tttccagtcgggaaacctgtcgtgc

SEQ ID NO: 189559 - DNA, 25 bp, Canis familiaris
tttccttagggttcacctttgctgt

SEQ ID NO: 189560 - DNA, 25 bp, Canis familiaris
ttaccttagaagaacccagcgttat

SEQ ID NO: 189561 - DNA, 25 bp, Canis familiaris
ttccttttggacatcccggggatgg

SEQ ID NO: 189562 - DNA, 25 bp, Canis familiaris
ttgggtttacctgcccgtagacaag

SEQ ID NO: 189563 - DNA, 25 bp, Canis familiaris
ttggaattctacctacctaccaaca

SEQ ID NO: 189564 - DNA, 25 bp, Canis familiaris
tttaagtctaaatgccccacaatcc

SEQ ID NO: 189565 - DNA, 25 bp, Canis familiaris
ttaactgttaaatgcgctaccccac

SEQ ID NO: 189566 - DNA, 25 bp, Canis familiaris
ttgacggtataatgccctaaacgat

SEQ ID NO: 189567 - DNA, 25 bp, Canis familiaris
taactccttaaagccttaactctgg

SEQ ID NO: 189568 - DNA, 25 bp, Canis familiaris
taaacaccttgggagcctaaatttg

SEQ ID NO: 189569 - DNA, 25 bp, Canis familiaris
taactaccttgggggctggaacatt

SEQ ID NO: 189570 - DNA, 25 bp, Canis familiaris
taactactcattctgggtacatacc

SEQ ID NO: 189571 - DNA, 25 bp, Canis familiaris
taactaccaaccaaggtccaaggct

SEQ ID NO: 189572 - DNA, 25 bp, Canis familiaris
tcaagtacacagcccaagagtccaa

SEQ ID NO: 189573 - DNA, 25 bp, Canis familiaris
tcacctccagagacgaacagtctgc

SEQ ID NO: 189574 - DNA, 25 bp, Canis familiaris
tcacatccgggcagaggcagtctgt

SEQ ID NO: 189575 - DNA, 25 bp, Canis familiaris
tcactcagccggagaccatggtgag

SEQ ID NO: 189576 - DNA, 25 bp, Canis familiaris
tcactcagtagagtccactctgggg

SEQ ID NO: 189577 - DNA, 25 bp, Canis familiaris
tcaccggaaggccctcagggccgtg

SEQ ID NO: 189578 - DNA, 25 bp, Canis familiaris
tcaccggagcgggagccagagagac

SEQ ID NO: 189579 - DNA, 25 bp, Canis familiaris
tcacctgaacggaacctaggtcctc

SEQ ID NO: 189580 - DNA, 25 bp, Canis familiaris
tcacctgaacgggacccaggtccct

SEQ ID NO: 189581 - DNA, 25 bp, Canis familiaris
tcacttaatacagcacccagtgctc

SEQ ID NO: 189582 - DNA, 25 bp, Canis familiaris
tcactggagtgagaaccctctctct

SEQ ID NO: 189583 - DNA, 25 bp, Canis familiaris
tacttggtagtagaacgtcctttgg

SEQ ID NO: 189584 - DNA, 25 bp, Canis familiaris
taataattagtagaccttccctcca

SEQ ID NO: 189585 - DNA, 25 bp, Canis familiaris
tcaaagacctgtcaaccttcaaccg

SEQ ID NO: 189586 - DNA, 25 bp, Canis familiaris
tcaagagactctctccaccttatga

SEQ ID NO: 189587 - DNA, 25 bp, Canis familiaris
tcaaggaatctgtcccacagcttcc

SEQ ID NO: 189588 - DNA, 25 bp, Canis familiaris
tcacagagaaccactcacactgcac

SEQ ID NO: 189589 - DNA, 25 bp, Canis familiaris
tcacgcaagaacgctcagacacaca

SEQ ID NO: 189590 - DNA, 25 bp, Canis familiaris
tcacctgatggacgcaccaggcaac

SEQ ID NO: 189591 - DNA, 25 bp, Canis familiaris
tcactttggacgcgcggcacagtga

SEQ ID NO: 189592 - DNA, 25 bp, Canis familiaris
tcacgttggccagggcaactgcgaa

SEQ ID NO: 189593 - DNA, 25 bp, Canis familiaris
tcacctctggcccaggagactgacc

SEQ ID NO: 189594 - DNA, 25 bp, Canis familiaris
tcacgcagctgtctgaagaagccac

SEQ ID NO: 189595 - DNA, 25 bp, Canis familiaris
tcactgcctgagctgaagggctgcc

SEQ ID NO: 189596 - DNA, 25 bp, Canis familiaris
tcacagctcgtgctcttgagtatcc

SEQ ID NO: 189597 - DNA, 25 bp, Canis familiaris
tcacaagcagtgctcttgtgcccca

SEQ ID NO: 189598 - DNA, 25 bp, Canis familiaris
tcacttgagatttctttgcctgcct

SEQ ID NO: 189599 - DNA, 25 bp, Canis familiaris
tcacttgtggttctacattcctggt

SEQ ID NO: 189600 - DNA, 25 bp, Canis familiaris
tcactttgtgtgttgaaattcttta

SEQ ID NO: 189601 - DNA, 25 bp, Canis familiaris
tcacagtttgcttttatcttcctaa

SEQ ID NO: 189602 - DNA, 25 bp, Canis familiaris
tcacatgttcttgtttcccatgcta

SEQ ID NO: 189603 - DNA, 25 bp, Canis familiaris
tcactgtttcttaattcccattgct

SEQ ID NO: 189604 - DNA, 25 bp, Canis familiaris
tcacgttctgctcacatttcgttat

SEQ ID NO: 189605 - DNA, 25 bp, Canis familiaris
tcaagaggtgcaaacttccagttat

SEQ ID NO: 189606 - DNA, 25 bp, Canis familiaris
tcacaggcttcactgactcagccag

SEQ ID NO: 189607 - DNA, 25 bp, Canis familiaris
tcacagagattcagagcacattcaa

SEQ ID NO: 189608 - DNA, 25 bp, Canis familiaris
tcacagtgattcccgcagaatcgac

SEQ ID NO: 189609 - DNA, 25 bp, Canis familiaris
tcaccgtcatcaaccagacacagaa

SEQ ID NO: 189610 - DNA, 25 bp, Canis familiaris
tcaccccatcacacaatcaaggata

SEQ ID NO: 189611 - DNA, 25 bp, Canis familiaris
tagacacgatacagaaaggagattc

SEQ ID NO: 189612 - DNA, 25 bp, Canis familiaris
taaacgtaaaggtatgcagcaggtc

SEQ ID NO: 189613 - DNA, 25 bp, Canis familiaris
tcacttagtaaatggctcagcaggg

SEQ ID NO: 189614 - DNA, 25 bp, Canis familiaris
tcacttagcagagcaccctcaaggc

SEQ ID NO: 189615 - DNA, 25 bp, Canis familiaris
taatttaggctaacactcaatggtg

SEQ ID NO: 189616 - DNA, 25 bp, Canis familiaris
taattgctgggctcaccattgcatg

SEQ ID NO: 189617 - DNA, 25 bp, Canis familiaris
tcacttctcgtgtacaccttgtgga

SEQ ID NO: 189618 - DNA, 25 bp, Canis familiaris
tcacgtctaatttgcaccttctgga

SEQ ID NO: 189619 - DNA, 25 bp, Canis familiaris
tcactgatatacttaagccttgttg

SEQ ID NO: 189620 - DNA, 25 bp, Canis familiaris
tcactgaagcatttggattctctta

SEQ ID NO: 189621 - DNA, 25 bp, Canis familiaris
tcacagaagctctggcactgctgct

SEQ ID NO: 189622 - DNA, 25 bp, Canis familiaris
taagtgccgtaccagcatatgctga

SEQ ID NO: 189623 - DNA, 25 bp, Canis familiaris
taattccgataacgaacgagactct

SEQ ID NO: 189624 - DNA, 25 bp, Canis familiaris
taattccgataacgaacgagactct

SEQ ID NO: 189625 - DNA, 25 bp, Canis familiaris
taattcgccaaaccattataccttc

SEQ ID NO: 189626 - DNA, 25 bp, Canis familiaris
tcaatcccctattccattaaacttt

SEQ ID NO: 189627 - DNA, 25 bp, Canis familiaris
tcaacgatgttatctccaaggactt

SEQ ID NO: 189628 - DNA, 25 bp, Canis familiaris
tcaacagaagtatctctctaggctt

SEQ ID NO: 189629 - DNA, 25 bp, Canis familiaris
tcacctggagtctctctgcaagatc

SEQ ID NO: 189630 - DNA, 25 bp, Canis familiaris
tcacgggggatttccaagtctccac

SEQ ID NO: 189631 - DNA, 25 bp, Canis familiaris
tcacggggagcccaacaagtgtcct

SEQ ID NO: 189632 - DNA, 25 bp, Canis familiaris
tcaagaggggcctgccaaggtggct

SEQ ID NO: 189633 - DNA, 25 bp, Canis familiaris
tcacaggtgatggcggagcccgggg

SEQ ID NO: 189634 - DNA, 25 bp, Canis familiaris
tcactggttggggctgtcacaggtg

SEQ ID NO: 189635 - DNA, 25 bp, Canis familiaris
tcactggttttctggcacgttccag

SEQ ID NO: 189636 - DNA, 25 bp, Canis familiaris
tcacgtttgtgtgcatggccttgtc

SEQ ID NO: 189637 - DNA, 25 bp, Canis familiaris
tcaaagagggagtctggccgtgcac

SEQ ID NO: 189638 - DNA, 25 bp, Canis familiaris
tcaaagggaatccggctgaggcaca

SEQ ID NO: 189639 - DNA, 25 bp, Canis familiaris
tcacagagtgggttgcggtgggcac

SEQ ID NO: 189640 - DNA, 25 bp, Canis familiaris
tcactcagctggccggggtggaggc

SEQ ID NO: 189641 - DNA, 25 bp, Canis familiaris
tcacgtcgcagcgcgtggtggacgt

SEQ ID NO: 189642 - DNA, 25 bp, Canis familiaris
tcactggtggctgtgttgtggactt

SEQ ID NO: 189643 - DNA, 25 bp, Canis familiaris
tcacaggtgctggctgctttggtag

SEQ ID NO: 189644 - DNA, 25 bp, Canis familiaris
tcaagaatgctggacgtcggctggc

SEQ ID NO: 189645 - DNA, 25 bp, Canis familiaris
tcacagatttgcccagtctgtcttg

SEQ ID NO: 189646 - DNA, 25 bp, Canis familiaris
tcacaatgtggccgaggactttgat

SEQ ID NO: 189647 - DNA, 25 bp, Canis familiaris
tcacaagggatggggactttatact

SEQ ID NO: 189648 - DNA, 25 bp, Canis familiaris
tcacagagggagccccatcatttcc

SEQ ID NO: 189649 - DNA, 25 bp, Canis familiaris
tcaagggacacgccttcttgtactg

SEQ ID NO: 189650 - DNA, 25 bp, Canis familiaris
tcacagtggccccacgattttacgc

SEQ ID NO: 189651 - DNA, 25 bp, Canis familiaris
tcaaaggctccgagacttactccag

SEQ ID NO: 189652 - DNA, 25 bp, Canis familiaris
tcaaagcccccttcctaagataggt

SEQ ID NO: 189653 - DNA, 25 bp, Canis familiaris
tcaaaccatcacaccagaacaaagg

SEQ ID NO: 189654 - DNA, 25 bp, Canis familiaris
tcaaagcccagagaagccacataga

SEQ ID NO: 189655 - DNA, 25 bp, Canis familiaris
tcaaaggcagatcccattgctcctg

SEQ ID NO: 189656 - DNA, 25 bp, Canis familiaris
tcaaatgggaaatttctgctcagga

SEQ ID NO: 189657 - DNA, 25 bp, Canis familiaris
tcacattgcagctaagtttcccgta

SEQ ID NO: 189658 - DNA, 25 bp, Canis familiaris
tcaagacatgtaacttttcctggaa

SEQ ID NO: 189659 - DNA, 25 bp, Canis familiaris
tcacaaatcattgcacttttcagga

SEQ ID NO: 189660 - DNA, 25 bp, Canis familiaris
tcaaaagctggctctctgtatgcag

SEQ ID NO: 189661 - DNA, 25 bp, Canis familiaris
tcaaactgcgagccctgacagacag

SEQ ID NO: 189662 - DNA, 25 bp, Canis familiaris
taatcacgcgatgttgactgcacag

SEQ ID NO: 189663 - DNA, 25 bp, Canis familiaris
tcacacacctgtgatgtgactgtgt

SEQ ID NO: 189664 - DNA, 25 bp, Canis familiaris
tcacacccactgacatgtacattca

SEQ ID NO: 189665 - DNA, 25 bp, Canis familiaris
tcaccgaacatgactgtctctccat

SEQ ID NO: 189666 - DNA, 25 bp, Canis familiaris
tcacgctgaatatatgaccacgctc

SEQ ID NO: 189667 - DNA, 25 bp, Canis familiaris
tcactggttcatcagagccgcagat

SEQ ID NO: 189668 - DNA, 25 bp, Canis familiaris
tcactgtggtctcacagctctggca

SEQ ID NO: 189669 - DNA, 25 bp, Canis familiaris
tcacgtgcttctgagctgctgtgga

SEQ ID NO: 189670 - DNA, 25 bp, Canis familiaris
tcacgtcgatgctgtgtgcatgctg

SEQ ID NO: 189671 - DNA, 25 bp, Canis familiaris
tcactatcatgacgtgtgtgtgttc

SEQ ID NO: 189672 - DNA, 25 bp, Canis familiaris
tcactatctacagttggtctcttcc

SEQ ID NO: 189673 - DNA, 25 bp, Canis familiaris
tcaatccaatcattcggttcgtcct

SEQ ID NO: 189674 - DNA, 25 bp, Canis familiaris
tactccagactgtgtttgcagcata

SEQ ID NO: 189675 - DNA, 25 bp, Canis familiaris
tcactcctcctaggttatcacattc

SEQ ID NO: 189676 - DNA, 25 bp, Canis familiaris
tcaccctgtcgaatgtggatgcact

SEQ ID NO: 189677 - DNA, 25 bp, Canis familiaris
tcacagactgtctaatgttgcagaa

SEQ ID NO: 189678 - DNA, 25 bp, Canis familiaris
tcacatacttgctaatgttctgtca

SEQ ID NO: 189679 - DNA, 25 bp, Canis familiaris
tcactcatgttgtagacctcagctc

SEQ ID NO: 189680 - DNA, 25 bp, Canis familiaris
tcacatttggaattcctccctaaat

SEQ ID NO: 189681 - DNA, 25 bp, Canis familiaris
tcaaatcttgtatttctcctttaca

SEQ ID NO: 189682 - DNA, 25 bp, Canis familiaris
tcaagcctatgtttttaccttacta

SEQ ID NO: 189683 - DNA, 25 bp, Canis familiaris
taacttatatttctacctgcgactc

SEQ ID NO: 189684 - DNA, 25 bp, Canis familiaris
taactttagttcccagcctgaacct

SEQ ID NO: 189685 - DNA, 25 bp, Canis familiaris
tcaactttaacctacatgcacagag

SEQ ID NO: 189686 - DNA, 25 bp, Canis familiaris
tcactgctgttatcaccaatgccta

SEQ ID NO: 189687 - DNA, 25 bp, Canis familiaris
tcacagcttcttacaccaatgggga

SEQ ID NO: 189688 - DNA, 25 bp, Canis familiaris
tcacatgttcttgttgcaagtagaa

SEQ ID NO: 189689 - DNA, 25 bp, Canis familiaris
taattgccatcggatttcagtatga

SEQ ID NO: 189690 - DNA, 25 bp, Canis familiaris
taattccctaatttccatctagttt

SEQ ID NO: 189691 - DNA, 25 bp, Canis familiaris
taatttcccaactgactccaagtct

SEQ ID NO: 189692 - DNA, 25 bp, Canis familiaris
taatattctgctgagccgactccta

SEQ ID NO: 189693 - DNA, 25 bp, Canis familiaris
tcactattttggcctctgtgatcct

SEQ ID NO: 189694 - DNA, 25 bp, Canis familiaris
tcacttttgtagcccattgctcagg

SEQ ID NO: 189695 - DNA, 25 bp, Canis familiaris
tcacttctgtgaggcgccttgaaga

SEQ ID NO: 189696 - DNA, 25 bp, Canis familiaris
tcacaatgatgtttccccgagagag

SEQ ID NO: 189697 - DNA, 25 bp, Canis familiaris
tcacagtggttgatgccttacatga

SEQ ID NO: 189698 - DNA, 25 bp, Canis familiaris
tcacatgttcctatcctgtcaatat

SEQ ID NO: 189699 - DNA, 25 bp, Canis familiaris
tcacatgtgtgggagtcttgtcatt

SEQ ID NO: 189700 - DNA, 25 bp, Canis familiaris
tcaagtgtaaggtttgccctttcta

SEQ ID NO: 189701 - DNA, 25 bp, Canis familiaris
tcaagtgtaatccaatacccatgtg

SEQ ID NO: 189702 - DNA, 25 bp, Canis familiaris
tcacaggtcgatgaaattccagttt

SEQ ID NO: 189703 - DNA, 25 bp, Canis familiaris
tcactggccgccagaagatccacat

SEQ ID NO: 189704 - DNA, 25 bp, Canis familiaris
tcacttcctcaaacaggcacacaca

SEQ ID NO: 189705 - DNA, 25 bp, Canis familiaris
tcactctgcctggtccagtgacaag

SEQ ID NO: 189706 - DNA, 25 bp, Canis familiaris
tcactgctgccttttggtgtcaagc

SEQ ID NO: 189707 - DNA, 25 bp, Canis familiaris
tcacttgcctgcttttatgtgcacc

SEQ ID NO: 189708 - DNA, 25 bp, Canis familiaris
tcaagtcccattacgtggcacctga

SEQ ID NO: 189709 - DNA, 25 bp, Canis familiaris
tcaagtgcccctactatgagattat

SEQ ID NO: 189710 - DNA, 25 bp, Canis familiaris
taattcccctccagaattgtcggag

SEQ ID NO: 189711 - DNA, 25 bp, Canis familiaris
tcaacacccccgaggttgtcagagt

SEQ ID NO: 189712 - DNA, 25 bp, Canis familiaris
tcaaaccacttggtgtttggtcggg

SEQ ID NO: 189713 - DNA, 25 bp, Canis familiaris
tcaaaacattttcgttcgttcgttg

SEQ ID NO: 189714 - DNA, 25 bp, Canis familiaris
tcaaaaatcctatcttcgcttctgt

SEQ ID NO: 189715 - DNA, 25 bp, Canis familiaris
tcaaatggtacttcgtcccaatcga

SEQ ID NO: 189716 - DNA, 25 bp, Canis familiaris
tcaagaggacatgtctccccattta

SEQ ID NO: 189717 - DNA, 25 bp, Canis familiaris
tcaagccaacaatttccaccatttt

SEQ ID NO: 189718 - DNA, 25 bp, Canis familiaris
tcaacacaatggagtcgctcctgta

SEQ ID NO: 189719 - DNA, 25 bp, Canis familiaris
tcacagctaatgcatctgtctctcc

SEQ ID NO: 189720 - DNA, 25 bp, Canis familiaris
tcacatgcgtggatctttctcgtca

SEQ ID NO: 189721 - DNA, 25 bp, Canis familiaris
tcacatggctgaagtcttcccttcc

SEQ ID NO: 189722 - DNA, 25 bp, Canis familiaris
tcacaagtttgactacttcttcccc

SEQ ID NO: 189723 - DNA, 25 bp, Canis familiaris
tcacaagattgtttgtccctgggcc

SEQ ID NO: 189724 - DNA, 25 bp, Canis familiaris
tcacaaccattctattcttcggcgc

SEQ ID NO: 189725 - DNA, 25 bp, Canis familiaris
tcacaaccattctattcttcggcgc

SEQ ID NO: 189726 - DNA, 25 bp, Canis familiaris
tcacgcccctcacttattgatggga

SEQ ID NO: 189727 - DNA, 25 bp, Canis familiaris
tcacactctctcagctttagtggag

SEQ ID NO: 189728 - DNA, 25 bp, Canis familiaris
tcaacatctgtcggtgttggccgtg

SEQ ID NO: 189729 - DNA, 25 bp, Canis familiaris
tcaacatctgttgggggagatggag

SEQ ID NO: 189730 - DNA, 25 bp, Canis familiaris
tcaactccagggtgacagatgccgc

SEQ ID NO: 189731 - DNA, 25 bp, Canis familiaris
taactccatgggttggcacggggct

SEQ ID NO: 189732 - DNA, 25 bp, Canis familiaris
tcaacccgctggtgtacgtgatcgt

SEQ ID NO: 189733 - DNA, 25 bp, Canis familiaris
tcaaatcgagcccatgagtacccac

SEQ ID NO: 189734 - DNA, 25 bp, Canis familiaris
tcacatacacactcatgacttccca

SEQ ID NO: 189735 - DNA, 25 bp, Canis familiaris
taatatgcacacatcagcactgatt

SEQ ID NO: 189736 - DNA, 25 bp, Canis familiaris
tcacactcacatatgcacctgactt

SEQ ID NO: 189737 - DNA, 25 bp, Canis familiaris
tcacacaacatgacgccccagttga

SEQ ID NO: 189738 - DNA, 25 bp, Canis familiaris
tcaacagggacactccacatgggag

SEQ ID NO: 189739 - DNA, 25 bp, Canis familiaris
tcaaatcccagcaaccacatggtgg

SEQ ID NO: 189740 - DNA, 25 bp, Canis familiaris
tcaagtccccaaccacctggggaca

SEQ ID NO: 189741 - DNA, 25 bp, Canis familiaris
tcaagtcccataaggctcccatggg

SEQ ID NO: 189742 - DNA, 25 bp, Canis familiaris
tcaagtccctgatggcctcagagga

SEQ ID NO: 189743 - DNA, 25 bp, Canis familiaris
tcaagtccttgaaaactctcagtgt

SEQ ID NO: 189744 - DNA, 25 bp, Canis familiaris
tcaaatgacttagccacccaggagc

SEQ ID NO: 189745 - DNA, 25 bp, Canis familiaris
tcaagcatgagttacaagcaaactg

SEQ ID NO: 189746 - DNA, 25 bp, Canis familiaris
tcaaagccataaagaaaatgctgta

SEQ ID NO: 189747 - DNA, 25 bp, Canis familiaris
tcaaaaaattggtagaacttaatat

SEQ ID NO: 189748 - DNA, 25 bp, Canis familiaris
tcaaaaaaatgggcagtttctcctt

SEQ ID NO: 189749 - DNA, 25 bp, Canis familiaris
tcaagaacagactcccttttcctgc

SEQ ID NO: 189750 - DNA, 25 bp, Canis familiaris
taagcccagtcgtccaattttactg

SEQ ID NO: 189751 - DNA, 25 bp, Canis familiaris
taatcccataggtcttgttgcttcc

SEQ ID NO: 189752 - DNA, 25 bp, Canis familiaris
tcaattcctaattcttttggccaag

SEQ ID NO: 189753 - DNA, 25 bp, Canis familiaris
tcaatagcccaaaaactttcgaaat

SEQ ID NO: 189754 - DNA, 25 bp, Canis familiaris
tcaaagcccaaattactcattccta

SEQ ID NO: 189755 - DNA, 25 bp, Canis familiaris
tagaacccgaactcttatcctgaaa

SEQ ID NO: 189756 - DNA, 25 bp, Canis familiaris
tcaaacccgggtgattaccgacaat

SEQ ID NO: 189757 - DNA, 25 bp, Canis familiaris
tcaaagccccggaaaggcaagtgaa

SEQ ID NO: 189758 - DNA, 25 bp, Canis familiaris
taaagcccccaagatgcgacgtaga

SEQ ID NO: 189759 - DNA, 25 bp, Canis familiaris
taaagcccccaagatgcgacgtaga

SEQ ID NO: 189760 - DNA, 25 bp, Canis familiaris
taaagcccccaagatgcgacgtaga

SEQ ID NO: 189761 - DNA, 25 bp, Canis familiaris
taaagcccccaagatgcgacgtaga

SEQ ID NO: 189762 - DNA, 25 bp, Canis familiaris
tcactaacccgaagcgacgacacgg

SEQ ID NO: 189763 - DNA, 25 bp, Canis familiaris
tcaagaaccacgtgaactccctggg

SEQ ID NO: 189764 - DNA, 25 bp, Canis familiaris
tcaagccgtacgtgaactaccgcgt

SEQ ID NO: 189765 - DNA, 25 bp, Canis familiaris
tcacagccctgggggcaactcaggc

SEQ ID NO: 189766 - DNA, 25 bp, Canis familiaris
tcacagtcctgtcacgaagcacatg

SEQ ID NO: 189767 - DNA, 25 bp, Canis familiaris
tcacaggccgtgcacggtgcaggtg

SEQ ID NO: 189768 - DNA, 25 bp, Canis familiaris
tcacaggcgcggctcctgtggaagg

SEQ ID NO: 189769 - DNA, 25 bp, Canis familiaris
tcaacggccgggccgtggaagccta

SEQ ID NO: 189770 - DNA, 25 bp, Canis familiaris
taagggggactgccgggaagctatt

SEQ ID NO: 189771 - DNA, 25 bp, Canis familiaris
tacgggggatgtcggtgatggggtt

SEQ ID NO: 189772 - DNA, 25 bp, Canis familiaris
tacacggaggtgtcgggtgaagatg

SEQ ID NO: 189773 - DNA, 25 bp, Canis familiaris
tcaataaaagtgtcgagaggtcaaa

SEQ ID NO: 189774 - DNA, 25 bp, Canis familiaris
tcaaaattgagctctaggcccaaaa

SEQ ID NO: 189775 - DNA, 25 bp, Canis familiaris
tcaaatttaatacaccccagcaacc

SEQ ID NO: 189776 - DNA, 25 bp, Canis familiaris
tcacaacttcaaattccactctagc

SEQ ID NO: 189777 - DNA, 25 bp, Canis familiaris
tcacacacagtattttcacagccct

SEQ ID NO: 189778 - DNA, 25 bp, Canis familiaris
tcacaatcaaaagagcaagcccaga

SEQ ID NO: 189779 - DNA, 25 bp, Canis familiaris
tcacacattgactcggagatcccga

SEQ ID NO: 189780 - DNA, 25 bp, Canis familiaris
tcaagtgtactcacgacacccagca

SEQ ID NO: 189781 - DNA, 25 bp, Canis familiaris
tacttgaaccatgagacaccctacc

SEQ ID NO: 189782 - DNA, 25 bp, Canis familiaris
tactatgaagccagcattaccctca

SEQ ID NO: 189783 - DNA, 25 bp, Canis familiaris
taataaatcctagtgctacccgtta

SEQ ID NO: 189784 - DNA, 25 bp, Canis familiaris
taataaacctcaggaactgcccctt

SEQ ID NO: 189785 - DNA, 25 bp, Canis familiaris
taatacaacacgccggactgactct

SEQ ID NO: 189786 - DNA, 25 bp, Canis familiaris
tcaacaagacaccggacaaacacta

SEQ ID NO: 189787 - DNA, 25 bp, Canis familiaris
tcaatcgaacactttagcagaaact

SEQ ID NO: 189788 - DNA, 25 bp, Canis familiaris
tcacacagtccctcagcaaaaacta

SEQ ID NO: 189789 - DNA, 25 bp, Canis familiaris
tcaacagtcacgcttgagaacccga

SEQ ID NO: 189790 - DNA, 25 bp, Canis familiaris
tcaaagtgcctgcgtgaactcggcc

SEQ ID NO: 189791 - DNA, 25 bp, Canis familiaris
tcaacagtgcccaagagacgggtgg

SEQ ID NO: 189792 - DNA, 25 bp, Canis familiaris
tcacacaatcccacgggagggcaca

SEQ ID NO: 189793 - DNA, 25 bp, Canis familiaris
taaataccctccagagggatcccct

SEQ ID NO: 189794 - DNA, 25 bp, Canis familiaris
tcaaataccccagactgcacagacc

SEQ ID NO: 189795 - DNA, 25 bp, Canis familiaris
tcaacgacgggctgtggcacatgaa

SEQ ID NO: 189796 - DNA, 25 bp, Canis familiaris
tcaactactaggtcttgccatcaac

SEQ ID NO: 189797 - DNA, 25 bp, Canis familiaris
tcacagcatctcaagagtcctgccc

SEQ ID NO: 189798 - DNA, 25 bp, Canis familiaris
tcacaactatgacgtctctgacctc

SEQ ID NO: 189799 - DNA, 25 bp, Canis familiaris
tcaacagctctgtgtccaggctttt

SEQ ID NO: 189800 - DNA, 25 bp, Canis familiaris
tcaacagctgtttaaagtctttgta

SEQ ID NO: 189801 - DNA, 25 bp, Canis familiaris
tcaacatgctggtgaaggtgaaagg

SEQ ID NO: 189802 - DNA, 25 bp, Canis familiaris
tcaaagggggaaaggccaaggctgg

SEQ ID NO: 189803 - DNA, 25 bp, Canis familiaris
tcacagggccagcactaggcccggc

SEQ ID NO: 189804 - DNA, 25 bp, Canis familiaris
tacacgggagttcaggcccagtgct

SEQ ID NO: 189805 - DNA, 25 bp, Canis familiaris
taaccgaagttccaggaccaatcca

SEQ ID NO: 189806 - DNA, 25 bp, Canis familiaris
tcaacaggaagtaccggggcctcca

SEQ ID NO: 189807 - DNA, 25 bp, Canis familiaris
tcaacctggagaaccgggcggaacg

SEQ ID NO: 189808 - DNA, 25 bp, Canis familiaris
tcaaccgggatcttgggacgggcct

SEQ ID NO: 189809 - DNA, 25 bp, Canis familiaris
tcaagtcaggaggccggagatcggg

SEQ ID NO: 189810 - DNA, 25 bp, Canis familiaris
tcaaggagggtcctcgcgtcagtgt

SEQ ID NO: 189811 - DNA, 25 bp, Canis familiaris
tcaaaggggaccctgctgtcttctg

SEQ ID NO: 189812 - DNA, 25 bp, Canis familiaris
tcacaaccggatttgccagttgttt

SEQ ID NO: 189813 - DNA, 25 bp, Canis familiaris
tcaacgccaagtttgccgtggagct

SEQ ID NO: 189814 - DNA, 25 bp, Canis familiaris
tcaactgcccagatgccggtgggct

SEQ ID NO: 189815 - DNA, 25 bp, Canis familiaris
tcaaggccttggtcttggtgggtct

SEQ ID NO: 189816 - DNA, 25 bp, Canis familiaris
tcaagggttcgatttccggagtagg

SEQ ID NO: 189817 - DNA, 25 bp, Canis familiaris
tcaagcggtgtctacattcggggca

SEQ ID NO: 189818 - DNA, 25 bp, Canis familiaris
tactcggctttggcatgactgtggc

SEQ ID NO: 189819 - DNA, 25 bp, Canis familiaris
tcactttttctgtgacattggcccc

SEQ ID NO: 189820 - DNA, 25 bp, Canis familiaris
tcactgtgttccaacgacatgtccc

SEQ ID NO: 189821 - DNA, 25 bp, Canis familiaris
tcaaatgtctccatcgcacatatcc

SEQ ID NO: 189822 - DNA, 25 bp, Canis familiaris
tcaattgtcactgtcatcagaatct

SEQ ID NO: 189823 - DNA, 25 bp, Canis familiaris
tcaattgtcactgtcatcagaatct

SEQ ID NO: 189824 - DNA, 25 bp, Canis familiaris
tcaaagctaatgatcacggatatga

SEQ ID NO: 189825 - DNA, 25 bp, Canis familiaris
tcaacagtctagacaccaggtgaca

SEQ ID NO: 189826 - DNA, 25 bp, Canis familiaris
tcaaagtcattgcccacggcaaaga

SEQ ID NO: 189827 - DNA, 25 bp, Canis familiaris
taatattgttgctttcctaaattcc

SEQ ID NO: 189828 - DNA, 25 bp, Canis familiaris
taatttagtgtttctctccgacacg

SEQ ID NO: 189829 - DNA, 25 bp, Canis familiaris
tcaattccgggttcgacagagacac

SEQ ID NO: 189830 - DNA, 25 bp, Canis familiaris
tcaaccctggggccgaaagagcaaa

SEQ ID NO: 189831 - DNA, 25 bp, Canis familiaris
tcaaactcccctcctgaaaatgaaa

SEQ ID NO: 189832 - DNA, 25 bp, Canis familiaris
tcaacttctctgttactaaatctaa

SEQ ID NO: 189833 - DNA, 25 bp, Canis familiaris
tcaactcctggctgcctgtaattta

SEQ ID NO: 189834 - DNA, 25 bp, Canis familiaris
tcaaccgggaagcctgtgatgactt

SEQ ID NO: 189835 - DNA, 25 bp, Canis familiaris
tcaaccagttaaccctgttcattct

SEQ ID NO: 189836 - DNA, 25 bp, Canis familiaris
tcacaacgtgggaccctgtttctct

SEQ ID NO: 189837 - DNA, 25 bp, Canis familiaris
tcaacaagtggtggacttttttctt

SEQ ID NO: 189838 - DNA, 25 bp, Canis familiaris
tcaaaacatactcttctcttgtctt

SEQ ID NO: 189839 - DNA, 25 bp, Canis familiaris
tcaaaagcaccggctttgctcacct

SEQ ID NO: 189840 - DNA, 25 bp, Canis familiaris
tcacaagaccacacttggctctcgt

SEQ ID NO: 189841 - DNA, 25 bp, Canis familiaris
tcacatatcccagactgggtccgct

SEQ ID NO: 189842 - DNA, 25 bp, Canis familiaris
tcaaatcccgttggacagtccgtaa

SEQ ID NO: 189843 - DNA, 25 bp, Canis familiaris
tcaaacctctttcagcaatgccttg

SEQ ID NO: 189844 - DNA, 25 bp, Canis familiaris
tcaaaactcggtgatcatagttgat

SEQ ID NO: 189845 - DNA, 25 bp, Canis familiaris
tcacaagacttgctcctctaggcag

SEQ ID NO: 189846 - DNA, 25 bp, Canis familiaris
tcacaagacctgatggttgggtgct

SEQ ID NO: 189847 - DNA, 25 bp, Canis familiaris
tcactcatacctagctgtttgtgga

SEQ ID NO: 189848 - DNA, 25 bp, Canis familiaris
tcactctcattctatctgtcttaaa

SEQ ID NO: 189849 - DNA, 25 bp, Canis familiaris
tcaagctcaatctacgttgttacaa

SEQ ID NO: 189850 - DNA, 25 bp, Canis familiaris
tcaacatcagattcagagttttcca

SEQ ID NO: 189851 - DNA, 25 bp, Canis familiaris
taaccccacaggctttgccatttgt

SEQ ID NO: 189852 - DNA, 25 bp, Canis familiaris
taaacccctgattttggaatttgat

SEQ ID NO: 189853 - DNA, 25 bp, Canis familiaris
tcaagtgcccccagctatggaaatt

SEQ ID NO: 189854 - DNA, 25 bp, Canis familiaris
tcactgtctccagcaagccaagaaa

SEQ ID NO: 189855 - DNA, 25 bp, Canis familiaris
tcacttcctccccaaatatgaacaa

SEQ ID NO: 189856 - DNA, 25 bp, Canis familiaris
tcacttcttccataaaaaatcacaa

SEQ ID NO: 189857 - DNA, 25 bp, Canis familiaris
tcacaggccacctcaaagacctaaa

SEQ ID NO: 189858 - DNA, 25 bp, Canis familiaris
tcacacccacacgtagattgtccat

SEQ ID NO: 189859 - DNA, 25 bp, Canis familiaris
tcaacccaagattaagttccttccg

SEQ ID NO: 189860 - DNA, 25 bp, Canis familiaris
tcaaccacaggaaaggtccccgtca

SEQ ID NO: 189861 - DNA, 25 bp, Canis familiaris
tcaacttgaggaaggggccctctga

SEQ ID NO: 189862 - DNA, 25 bp, Canis familiaris
tcaagccgagaaccggggctgtcga

SEQ ID NO: 189863 - DNA, 25 bp, Canis familiaris
tcaaccggaatcttggacgagccta

SEQ ID NO: 189864 - DNA, 25 bp, Canis familiaris
tcaatgccgagagggtcggcggcct

SEQ ID NO: 189865 - DNA, 25 bp, Canis familiaris
tcaatccacagggagccagggtcct

SEQ ID NO: 189866 - DNA, 25 bp, Canis familiaris
tcaacccatggtccaagtgcaggcc

SEQ ID NO: 189867 - DNA, 25 bp, Canis familiaris
tcaatgccccagagcggtgggcaaa

SEQ ID NO: 189868 - DNA, 25 bp, Canis familiaris
tcaaactcctctgggtggggaaagg

SEQ ID NO: 189869 - DNA, 25 bp, Canis familiaris
tcaagatgtcccaggtcctgggaag

SEQ ID NO: 189870 - DNA, 25 bp, Canis familiaris
tcaaggacacccaggccatgaagga

SEQ ID NO: 189871 - DNA, 25 bp, Canis familiaris
tcaactcggctctggcccagaagga

SEQ ID NO: 189872 - DNA, 25 bp, Canis familiaris
tcactcgggctatggagcccacggc

SEQ ID NO: 189873 - DNA, 25 bp, Canis familiaris
tcacacgtggtatgagggtccgggg

SEQ ID NO: 189874 - DNA, 25 bp, Canis familiaris
tcactattggcaacgagcggttccg

SEQ ID NO: 189875 - DNA, 25 bp, Canis familiaris
taatttgccaaccatcaccttgggg

SEQ ID NO: 189876 - DNA, 25 bp, Canis familiaris
taataagaacccacctctaggattt

SEQ ID NO: 189877 - DNA, 25 bp, Canis familiaris
taataaggcactctccgttagtttt

SEQ ID NO: 189878 - DNA, 25 bp, Canis familiaris
taacaagtcacgttcctatgtcctc

SEQ ID NO: 189879 - DNA, 25 bp, Canis familiaris
tcaaatacatccctaatcgtggccc

SEQ ID NO: 189880 - DNA, 25 bp, Canis familiaris
tcaaatacatccctaatcgtggccc

SEQ ID NO: 189881 - DNA, 25 bp, Canis familiaris
tcacaggacccggaacactggagcc

SEQ ID NO: 189882 - DNA, 25 bp, Canis familiaris
tcacagggcacaggggagggaggcc

SEQ ID NO: 189883 - DNA, 25 bp, Canis familiaris
tcacagggcttggaggggggtggtg

SEQ ID NO: 189884 - DNA, 25 bp, Canis familiaris
tcaatgggtctgaagtggtggatgc

SEQ ID NO: 189885 - DNA, 25 bp, Canis familiaris
tcaagcttgtctcacaggtgggcct

SEQ ID NO: 189886 - DNA, 25 bp, Canis familiaris
tcaagtattttgtaggttgctcctg

SEQ ID NO: 189887 - DNA, 25 bp, Canis familiaris
tcaagtccatgttaaactttcctta

SEQ ID NO: 189888 - DNA, 25 bp, Canis familiaris
tcaagattttccttactgttcctca

SEQ ID NO: 189889 - DNA, 25 bp, Canis familiaris
tcaaatttaacatcagcttcagctt

SEQ ID NO: 189890 - DNA, 25 bp, Canis familiaris
tcactatgttcagcatctgccttca

SEQ ID NO: 189891 - DNA, 25 bp, Canis familiaris
tcactcgttcatgcataacttgaaa

SEQ ID NO: 189892 - DNA, 25 bp, Canis familiaris
tcactctgccaagctaacttcatca

SEQ ID NO: 189893 - DNA, 25 bp, Canis familiaris
tcactcttcaagatcaccttcacat

SEQ ID NO: 189894 - DNA, 25 bp, Canis familiaris
tcaacttctagcagcagctcctttg

SEQ ID NO: 189895 - DNA, 25 bp, Canis familiaris
tcacactattccagactcttctatt

SEQ ID NO: 189896 - DNA, 25 bp, Canis familiaris
tcacactttccagacactgactctt

SEQ ID NO: 189897 - DNA, 25 bp, Canis familiaris
taatcttatccagaagtaccctaac

SEQ ID NO: 189898 - DNA, 25 bp, Canis familiaris
tcaactttccaaaatgtccacatcc

SEQ ID NO: 189899 - DNA, 25 bp, Canis familiaris
tcaactttgccaattaactaatctt

SEQ ID NO: 189900 - DNA, 25 bp, Canis familiaris
tcaaatttgcctgtgtacttttttt

SEQ ID NO: 189901 - DNA, 25 bp, Canis familiaris
taatttggccttcgttctatttttg

SEQ ID NO: 189902 - DNA, 25 bp, Canis familiaris
taatatttccttctttaccttacat

SEQ ID NO: 189903 - DNA, 25 bp, Canis familiaris
taatatatgtccagttttcccttta

SEQ ID NO: 189904 - DNA, 25 bp, Canis familiaris
tcaaatatcttcctttttacacttt

SEQ ID NO: 189905 - DNA, 25 bp, Canis familiaris
tcaaatgtcttcctataaatgccag

SEQ ID NO: 189906 - DNA, 25 bp, Canis familiaris
taagttctgtttgcaaatggcagca

SEQ ID NO: 189907 - DNA, 25 bp, Canis familiaris
taatttcatgttatacaggagagcc

SEQ ID NO: 189908 - DNA, 25 bp, Canis familiaris
taattaccggttgcatgtgggcctc

SEQ ID NO: 189909 - DNA, 25 bp, Canis familiaris
tcaattcaccgggaatctggcgtcc

SEQ ID NO: 189910 - DNA, 25 bp, Canis familiaris
tcaagttccctggacattggcccag

SEQ ID NO: 189911 - DNA, 25 bp, Canis familiaris
tcaaacctcttgcacaaggctctcc

SEQ ID NO: 189912 - DNA, 25 bp, Canis familiaris
tcacaagtcctaaacacagaccact

SEQ ID NO: 189913 - DNA, 25 bp, Canis familiaris
tcaacatggacctattccaaccaca

SEQ ID NO: 189914 - DNA, 25 bp, Canis familiaris
tcaaaggctccttgtcaagcccaca

SEQ ID NO: 189915 - DNA, 25 bp, Canis familiaris
tcaaaggccactcctaggccagacc

SEQ ID NO: 189916 - DNA, 25 bp, Canis familiaris
tcaaagctgcgcagcaccaagccaa

SEQ ID NO: 189917 - DNA, 25 bp, Canis familiaris
taattggctgcatgcccacagcctg

SEQ ID NO: 189918 - DNA, 25 bp, Canis familiaris
tcaatgttcatgaagcacaccaagg

SEQ ID NO: 189919 - DNA, 25 bp, Canis familiaris
taatttattagagcccgtgaccttc

SEQ ID NO: 189920 - DNA, 25 bp, Canis familiaris
taacttactacctcatgttgcacct

SEQ ID NO: 189921 - DNA, 25 bp, Canis familiaris
tcaaagtcctcagcctatattcacc

SEQ ID NO: 189922 - DNA, 25 bp, Canis familiaris
tcaaagacccagactgcttcaaccc

SEQ ID NO: 189923 - DNA, 25 bp, Canis familiaris
tcaagattcccagtctcttggaccc

SEQ ID NO: 189924 - DNA, 25 bp, Canis familiaris
tcaagactaaatgcactctggacac

SEQ ID NO: 189925 - DNA, 25 bp, Canis familiaris
tcacagactcaggaccaattgcgtc

SEQ ID NO: 189926 - DNA, 25 bp, Canis familiaris
tcacatgaccttgacagttgcctcc

SEQ ID NO: 189927 - DNA, 25 bp, Canis familiaris
tcaaagcacttttctgtggcctctt

SEQ ID NO: 189928 - DNA, 25 bp, Canis familiaris
tcaaggactttgacttctggctttc

SEQ ID NO: 189929 - DNA, 25 bp, Canis familiaris
taaggaccaaggaccggatttcaag

SEQ ID NO: 189930 - DNA, 25 bp, Canis familiaris
tcaaggactgaactgatcggcgagt

SEQ ID NO: 189931 - DNA, 25 bp, Canis familiaris
tcaaggacgatgcgatgtatgtggc

SEQ ID NO: 189932 - DNA, 25 bp, Canis familiaris
tcaaggacacagcggattttcatgg

SEQ ID NO: 189933 - DNA, 25 bp, Canis familiaris
tcaaggtgcacctggttctgtgggt

SEQ ID NO: 189934 - DNA, 25 bp, Canis familiaris
tcaatggatccgtgaaatctgaggg

SEQ ID NO: 189935 - DNA, 25 bp, Canis familiaris
tcaagagcatctgaaattttgtttg

SEQ ID NO: 189936 - DNA, 25 bp, Canis familiaris
tcaaacctctgcaatagttctttaa

SEQ ID NO: 189937 - DNA, 25 bp, Canis familiaris
tcaacacactgctcagcgtctttta

SEQ ID NO: 189938 - DNA, 25 bp, Canis familiaris
tcaacctctatgccagtgtgtttct

SEQ ID NO: 189939 - DNA, 25 bp, Canis familiaris
tcaacttctttcctgttctattatg

SEQ ID NO: 189940 - DNA, 25 bp, Canis familiaris
tcaactttttacatcgatgcatata

SEQ ID NO: 189941 - DNA, 25 bp, Canis familiaris
tcaagttttcttatcctgtgtttag

SEQ ID NO: 189942 - DNA, 25 bp, Canis familiaris
tcaagtaagttgatccctttttaga

SEQ ID NO: 189943 - DNA, 25 bp, Canis familiaris
tcaagtaagtttttggtgcccatta

SEQ ID NO: 189944 - DNA, 25 bp, Canis familiaris
tcaagggaatttttagatcatcttt

SEQ ID NO: 189945 - DNA, 25 bp, Canis familiaris
tcaaggtgcctttttttcacgttcg

SEQ ID NO: 189946 - DNA, 25 bp, Canis familiaris
tcaaggatgtttttctttatttttg

SEQ ID NO: 189947 - DNA, 25 bp, Canis familiaris
tcaaggctgtgaattctgtactaat

SEQ ID NO: 189948 - DNA, 25 bp, Canis familiaris
tcacatggagctgcattgctgccct

SEQ ID NO: 189949 - DNA, 25 bp, Canis familiaris
tcaatgggcaggctgtgcacgctga

SEQ ID NO: 189950 - DNA, 25 bp, Canis familiaris
tcaagcagtcagcagcaggcaccaa

SEQ ID NO: 189951 - DNA, 25 bp, Canis familiaris
tcaaagatcagctgctggccgccaa

SEQ ID NO: 189952 - DNA, 25 bp, Canis familiaris
tcacacagcccatgtacgcatgcac

SEQ ID NO: 189953 - DNA, 25 bp, Canis familiaris
tcaacacccctgtggtgcacttgga

SEQ ID NO: 189954 - DNA, 25 bp, Canis familiaris
taattcccctgatggacctgggcaa

SEQ ID NO: 189955 - DNA, 25 bp, Canis familiaris
taattccacagctctgagaccttgg

SEQ ID NO: 189956 - DNA, 25 bp, Canis familiaris
ttacatccccaagggacgttgcgtc

SEQ ID NO: 189957 - DNA, 25 bp, Canis familiaris
tatttcaccaacgggacggagcggg

SEQ ID NO: 189958 - DNA, 25 bp, Canis familiaris
tatttcaccaacgggacggagcggg

SEQ ID NO: 189959 - DNA, 25 bp, Canis familiaris
tatttcaccaacgggacggagcggg

SEQ ID NO: 189960 - DNA, 25 bp, Canis familiaris
ttttaacctcccacttgatggggat

SEQ ID NO: 189961 - DNA, 25 bp, Canis familiaris
taataatacctctccctttggggat

SEQ ID NO: 189962 - DNA, 25 bp, Canis familiaris
tacgaaatcgtacaccgtaggggat

SEQ ID NO: 189963 - DNA, 25 bp, Canis familiaris
tacacaaaaggactaccgattccgg

SEQ ID NO: 189964 - DNA, 25 bp, Canis familiaris
taacaaaagtggttcaagtaccgtg

SEQ ID NO: 189965 - DNA, 25 bp, Canis familiaris
tagctccaaattgtgccacgtggcc

SEQ ID NO: 189966 - DNA, 25 bp, Canis familiaris
tacactgaaatcaagtccaaaggcc

SEQ ID NO: 189967 - DNA, 25 bp, Canis familiaris
taattaaaagagttctatacgcacc

SEQ ID NO: 189968 - DNA, 25 bp, Canis familiaris
taattcaaggaatttcttaacttct

SEQ ID NO: 189969 - DNA, 25 bp, Canis familiaris
tcaaaccagtgaacttctcgacctt

SEQ ID NO: 189970 - DNA, 25 bp, Canis familiaris
tcaaacaagatggatttccccctcc

SEQ ID NO: 189971 - DNA, 25 bp, Canis familiaris
tcacacaaaatccaatacccaaatc

SEQ ID NO: 189972 - DNA, 25 bp, Canis familiaris
taatagcaaatcagaacttctaatc

SEQ ID NO: 189973 - DNA, 25 bp, Canis familiaris
taataaaagatccagcactttttcc

SEQ ID NO: 189974 - DNA, 25 bp, Canis familiaris
taatacatcgagtaacatctgtatc

SEQ ID NO: 189975 - DNA, 25 bp, Canis familiaris
tcacaacacccttactgctgtgtgc

SEQ ID NO: 189976 - DNA, 25 bp, Canis familiaris
tcaaacgacccattcttttgcagtc

SEQ ID NO: 189977 - DNA, 25 bp, Canis familiaris
tcaaaatgacccccacttgtgtgac

SEQ ID NO: 189978 - DNA, 25 bp, Canis familiaris
tcaataagacggacccttcttgtgg

SEQ ID NO: 189979 - DNA, 25 bp, Canis familiaris
tcaaaagagtagaaccaccttattt

SEQ ID NO: 189980 - DNA, 25 bp, Canis familiaris
taggaaccttgcaaaccctgtagtt

SEQ ID NO: 189981 - DNA, 25 bp, Canis familiaris
tatggaaattaatccccttcagtaa

SEQ ID NO: 189982 - DNA, 25 bp, Canis familiaris
taggagagttacagaccgttttcaa

SEQ ID NO: 189983 - DNA, 25 bp, Canis familiaris
taagagacacccagggaattttaag

SEQ ID NO: 189984 - DNA, 25 bp, Canis familiaris
tcaacgaccgtcaagcacgaacttt

SEQ ID NO: 189985 - DNA, 25 bp, Canis familiaris
taaaagccggcttaccaatcttcta

SEQ ID NO: 189986 - DNA, 25 bp, Canis familiaris
tcaatccccggttgaccaagtttga

SEQ ID NO: 189987 - DNA, 25 bp, Canis familiaris
tcaattccctaagtaccaggtttgt

SEQ ID NO: 189988 - DNA, 25 bp, Canis familiaris
taataccccaaggacctgtttgtct

SEQ ID NO: 189989 - DNA, 25 bp, Canis familiaris
taataccattcacagactttttttt

SEQ ID NO: 189990 - DNA, 25 bp, Canis familiaris
taaactgtacagtgtctttttttgt

SEQ ID NO: 189991 - DNA, 25 bp, Canis familiaris
taaacggaccattgatttttgactt

SEQ ID NO: 189992 - DNA, 25 bp, Canis familiaris
tcaaaagcaccagtttttttcctct

SEQ ID NO: 189993 - DNA, 25 bp, Canis familiaris
tcaaaaaccaccagtcttttctctg

SEQ ID NO: 189994 - DNA, 25 bp, Canis familiaris
tcaaaaaccccatttatttctctca

SEQ ID NO: 189995 - DNA, 25 bp, Canis familiaris
tcaataaggacccagtttttgccat

SEQ ID NO: 189996 - DNA, 25 bp, Canis familiaris
taatgttgaacccgtgtattcccta

SEQ ID NO: 189997 - DNA, 25 bp, Canis familiaris
tcaatgttaaccactcaattcacac

SEQ ID NO: 189998 - DNA, 25 bp, Canis familiaris
taattgtatgactagaccaactcca

SEQ ID NO: 189999 - DNA, 25 bp, Canis familiaris
tcacattctacgtagtcgaaccgcc

SEQ ID NO: 190000 - DNA, 25 bp, Canis familiaris
tcaacctcactgcagaaatacccac

SEQ ID NO: 190001 - DNA, 25 bp, Canis familiaris
taatcactcctgcaaagactaccat

SEQ ID NO: 190002 - DNA, 25 bp, Canis familiaris
taatcagattcaaaacccgacccgg

SEQ ID NO: 190003 - DNA, 25 bp, Canis familiaris
taatctgagctatgaatcccaaccc

SEQ ID NO: 190004 - DNA, 25 bp, Canis familiaris
taatccagagaaacttccaagtccc

SEQ ID NO: 190005 - DNA, 25 bp, Canis familiaris
taattatgagaacccccaactctcc

SEQ ID NO: 190006 - DNA, 25 bp, Canis familiaris
tcaactgaacaactcttccaactta

SEQ ID NO: 190007 - DNA, 25 bp, Canis familiaris
tcaaaagacaagtccaccacctgta

SEQ ID NO: 190008 - DNA, 25 bp, Canis familiaris
tcaacggaaatgtccttccttgtat

SEQ ID NO: 190009 - DNA, 25 bp, Canis familiaris
tcaacgggaagcccatcaccatctt

SEQ ID NO: 190010 - DNA, 25 bp, Canis familiaris
tcaacgggaagtccatctccatctt

SEQ ID NO: 190011 - DNA, 25 bp, Canis familiaris
tcaacgagaagatcctgctcctgca

SEQ ID NO: 190012 - DNA, 25 bp, Canis familiaris
tcacagggaagaagcgcgtcctctg

SEQ ID NO: 190013 - DNA, 25 bp, Canis familiaris
tcacagccgaggacggcgctcgttg

SEQ ID NO: 190014 - DNA, 25 bp, Canis familiaris
tcaagctcagggatggcccgttgct

SEQ ID NO: 190015 - DNA, 25 bp, Canis familiaris
tcacagccaggacctgagtctgtgt

SEQ ID NO: 190016 - DNA, 25 bp, Canis familiaris
tcaagccagcagcgctacatcgctt

SEQ ID NO: 190017 - DNA, 25 bp, Canis familiaris
tcaaccagcacctggacgtcttcta

SEQ ID NO: 190018 - DNA, 25 bp, Canis familiaris
tcacagtagccctaggtttcttctt

SEQ ID NO: 190019 - DNA, 25 bp, Canis familiaris
tcacagaagcctgagcctatttccc

SEQ ID NO: 190020 - DNA, 25 bp, Canis familiaris
tcacaggtcctgggaaatttgctca

SEQ ID NO: 190021 - DNA, 25 bp, Canis familiaris
tcacacgtctcgttgtcatttctgt

SEQ ID NO: 190022 - DNA, 25 bp, Canis familiaris
tcacagctgtcacaatctttctttc

SEQ ID NO: 190023 - DNA, 25 bp, Canis familiaris
tcacatgtcatattttttttttcac

SEQ ID NO: 190024 - DNA, 25 bp, Canis familiaris
taatttcaatttattttccttccat

SEQ ID NO: 190025 - DNA, 25 bp, Canis familiaris
taatttccatctagtttaattttca

SEQ ID NO: 190026 - DNA, 25 bp, Canis familiaris
taatttgacatcagtgttaattctg

SEQ ID NO: 190027 - DNA, 25 bp, Canis familiaris
taactagtctcttggaaaatgtcag

SEQ ID NO: 190028 - DNA, 25 bp, Canis familiaris
tcaaccaatccctagccaagagaag

SEQ ID NO: 190029 - DNA, 25 bp, Canis familiaris
tcaaccaaccactccataatataac

SEQ ID NO: 190030 - DNA, 25 bp, Canis familiaris
tcaaccaagacaccgggacaaacac

SEQ ID NO: 190031 - DNA, 25 bp, Canis familiaris
taatctcgtaattcgggaccgacac

SEQ ID NO: 190032 - DNA, 25 bp, Canis familiaris
taattactacttcgaggcccatgac

SEQ ID NO: 190033 - DNA, 25 bp, Canis familiaris
taattgaatttgtctgaagcccata

SEQ ID NO: 190034 - DNA, 25 bp, Canis familiaris
tagcttaatttgcctaagtaaaact

SEQ ID NO: 190035 - DNA, 25 bp, Canis familiaris
tacttaacttcacaccttaaagccg

SEQ ID NO: 190036 - DNA, 25 bp, Canis familiaris
taataaacctactccattcctgagc

SEQ ID NO: 190037 - DNA, 25 bp, Canis familiaris
tcaaaagactctaaactcactcact

SEQ ID NO: 190038 - DNA, 25 bp, Canis familiaris
tcaaacagattcccatgacctcttc

SEQ ID NO: 190039 - DNA, 25 bp, Canis familiaris
tcaaacgctgttctgtgaatcctcc

SEQ ID NO: 190040 - DNA, 25 bp, Canis familiaris
tcaacccatgttctatttcagtgcc

SEQ ID NO: 190041 - DNA, 25 bp, Canis familiaris
taaccctgcctattgtttaggtcct

SEQ ID NO: 190042 - DNA, 25 bp, Canis familiaris
tcaaggcctcctgtctgtacagggc

SEQ ID NO: 190043 - DNA, 25 bp, Canis familiaris
tcaaacactatcgagtccacacggg

SEQ ID NO: 190044 - DNA, 25 bp, Canis familiaris
tcaagcatgccttcgagatcatcca

SEQ ID NO: 190045 - DNA, 25 bp, Canis familiaris
tcaagcatgccttcgagatcatcca

SEQ ID NO: 190046 - DNA, 25 bp, Canis familiaris
tcaagcatgccttcgagatcatcca

SEQ ID NO: 190047 - DNA, 25 bp, Canis familiaris
tcaagcatgccttcgagatcatcca

SEQ ID NO: 190048 - DNA, 25 bp, Canis familiaris
tcaagcatgccttcgagatcatcca

SEQ ID NO: 190049 - DNA, 25 bp, Canis familiaris
tcaagctggtaagtgatatgctcac

SEQ ID NO: 190050 - DNA, 25 bp, Canis familiaris
tcacacgcgattgcgcaatgccata

SEQ ID NO: 190051 - DNA, 25 bp, Canis familiaris
tcacagccgcttgacaatgcagatc

SEQ ID NO: 190052 - DNA, 25 bp, Canis familiaris
tcacatgggttggataatcacacaa

SEQ ID NO: 190053 - DNA, 25 bp, Canis familiaris
taatccatattggcagaacgaaaac

SEQ ID NO: 190054 - DNA, 25 bp, Canis familiaris
tcacaccacagcccgagactgaaaa

SEQ ID NO: 190055 - DNA, 25 bp, Canis familiaris
tcaagctccagcctcgagatgtaaa

SEQ ID NO: 190056 - DNA, 25 bp, Canis familiaris
tcaagcatcggcctgaggtggaccc

SEQ ID NO: 190057 - DNA, 25 bp, Canis familiaris
tcaaatgcaggccaagggctcttcc

SEQ ID NO: 190058 - DNA, 25 bp, Canis familiaris
tcaatccagccaaggggctcttcca

SEQ ID NO: 190059 - DNA, 25 bp, Canis familiaris
taatctggtcagtgggctattctag

SEQ ID NO: 190060 - DNA, 25 bp, Canis familiaris
taattgattagaatgtgcgttaccg

SEQ ID NO: 190061 - DNA, 25 bp, Canis familiaris
taattcttaatttgtttgtcctgtt

SEQ ID NO: 190062 - DNA, 25 bp, Canis familiaris
tcaatgacttttaaattggtttgta

SEQ ID NO: 190063 - DNA, 25 bp, Canis familiaris
tcaagaattttatccgttttgtatt

SEQ ID NO: 190064 - DNA, 25 bp, Canis familiaris
tcaaattgtttttctcttttcttat

SEQ ID NO: 190065 - DNA, 25 bp, Canis familiaris
tcaaatgctttttgttctatttttt

SEQ ID NO: 190066 - DNA, 25 bp, Canis familiaris
tcaatatcgttttccactttctgtg

SEQ ID NO: 190067 - DNA, 25 bp, Canis familiaris
tcaatagttgtttccttcctttgtt

SEQ ID NO: 190068 - DNA, 25 bp, Canis familiaris
tcaatttattttccttccatttaat

SEQ ID NO: 190069 - DNA, 25 bp, Canis familiaris
taggattttttggaagactttgaag

SEQ ID NO: 190070 - DNA, 25 bp, Canis familiaris
taagggttaaaatccattctgaagg

SEQ ID NO: 190071 - DNA, 25 bp, Canis familiaris
taatgggttcaatcgaacactttag

SEQ ID NO: 190072 - DNA, 25 bp, Canis familiaris
taagcgctttgaaaagaaatttgtc

SEQ ID NO: 190073 - DNA, 25 bp, Canis familiaris
taatcggtatcagaagaattgtttc

SEQ ID NO: 190074 - DNA, 25 bp, Canis familiaris
taacctttaggccagatttgtattt

SEQ ID NO: 190075 - DNA, 25 bp, Canis familiaris
taagtttccaggcctagttgttttg

SEQ ID NO: 190076 - DNA, 25 bp, Canis familiaris
taagactccgccgcaagttgtcttt

SEQ ID NO: 190077 - DNA, 25 bp, Canis familiaris
taaattccccatcacagtttttgta

SEQ ID NO: 190078 - DNA, 25 bp, Canis familiaris
taaatttcttctcaccttttggagt

SEQ ID NO: 190079 - DNA, 25 bp, Canis familiaris
taatatttccctttgctttagtagg

SEQ ID NO: 190080 - DNA, 25 bp, Canis familiaris
taatttcctgactttgctttggcaa

SEQ ID NO: 190081 - DNA, 25 bp, Canis familiaris
taatatagactgtgtatgtttacaa

SEQ ID NO: 190082 - DNA, 25 bp, Canis familiaris
taataatgaatctgtgtgtgtgcat

SEQ ID NO: 190083 - DNA, 25 bp, Canis familiaris
taataaacaccgagtggacaccgga

SEQ ID NO: 190084 - DNA, 25 bp, Canis familiaris
taatgaaacgctgttcagaaaccag

SEQ ID NO: 190085 - DNA, 25 bp, Canis familiaris
tcaaacaacccacttctaaaccatg

SEQ ID NO: 190086 - DNA, 25 bp, Canis familiaris
tcaaaactcccactattataccaaa

SEQ ID NO: 190087 - DNA, 25 bp, Canis familiaris
tcaaacttcacaagctttctcccaa

SEQ ID NO: 190088 - DNA, 25 bp, Canis familiaris
tcaacctgtagaagctcgttcgcac

SEQ ID NO: 190089 - DNA, 25 bp, Canis familiaris
tcaactctcgagtgtctgctatcgc

SEQ ID NO: 190090 - DNA, 25 bp, Canis familiaris
tcaagtccagttttgtgctcagctc

SEQ ID NO: 190091 - DNA, 25 bp, Canis familiaris
tcaaggctactagtcagtgcttccc

SEQ ID NO: 190092 - DNA, 25 bp, Canis familiaris
tcaacccagtcccaggatgtgtcac

SEQ ID NO: 190093 - DNA, 25 bp, Canis familiaris
tcacactgcgcacccaggaggtgac

SEQ ID NO: 190094 - DNA, 25 bp, Canis familiaris
tcacagctgcgaccaagggacgtgc

SEQ ID NO: 190095 - DNA, 25 bp, Canis familiaris
tcacagccagcaccacagggctgca

SEQ ID NO: 190096 - DNA, 25 bp, Canis familiaris
tcacactcagcagtgacctgcgtga

SEQ ID NO: 190097 - DNA, 25 bp, Canis familiaris
tcaaccagcatgaacctggctggag

SEQ ID NO: 190098 - DNA, 25 bp, Canis familiaris
tacccagagcactctttggtttctg

SEQ ID NO: 190099 - DNA, 25 bp, Canis familiaris
taactcaaagccgcttggtccactg

SEQ ID NO: 190100 - DNA, 25 bp, Canis familiaris
tcaactcatcattccctttggtaga

SEQ ID NO: 190101 - DNA, 25 bp, Canis familiaris
tcaactatcgatgactatctgacca

SEQ ID NO: 190102 - DNA, 25 bp, Canis familiaris
tcaacgataacgactccgatacaca

SEQ ID NO: 190103 - DNA, 25 bp, Canis familiaris
tcaaaatgaacaacctccacacaca

SEQ ID NO: 190104 - DNA, 25 bp, Canis familiaris
tcaaaatatagcacagcagtcaaca

SEQ ID NO: 190105 - DNA, 25 bp, Canis familiaris
tcaaaatctagccagagcccttcac

SEQ ID NO: 190106 - DNA, 25 bp, Canis familiaris
tcaatcgtttagcatctgccttcag

SEQ ID NO: 190107 - DNA, 25 bp, Canis familiaris
tcaatgaggtaacgtctcccctgac

SEQ ID NO: 190108 - DNA, 25 bp, Canis familiaris
tcaaattttaggtctccctcacaca

SEQ ID NO: 190109 - DNA, 25 bp, Canis familiaris
tcaaatattttttactgctcttcag

SEQ ID NO: 190110 - DNA, 25 bp, Canis familiaris
tcaactacatggtttacatgttcca

SEQ ID NO: 190111 - DNA, 25 bp, Canis familiaris
tcaactacatggtctacatgttcca

SEQ ID NO: 190112 - DNA, 25 bp, Canis familiaris
tcaacccatatctaacacttgccac

SEQ ID NO: 190113 - DNA, 25 bp, Canis familiaris
tcaacttccatggaatcctgcgcct

SEQ ID NO: 190114 - DNA, 25 bp, Canis familiaris
tcaagaccaatgggacctctgcact

SEQ ID NO: 190115 - DNA, 25 bp, Canis familiaris
tcaaagctcagtgagacccagccca

SEQ ID NO: 190116 - DNA, 25 bp, Canis familiaris
tcaacagaagctgtgcagccagggc

SEQ ID NO: 190117 - DNA, 25 bp, Canis familiaris
tcaaatgaatgaaccgcctggcgct

SEQ ID NO: 190118 - DNA, 25 bp, Canis familiaris
tcaaatgaatgagctctctctccct

SEQ ID NO: 190119 - DNA, 25 bp, Canis familiaris
taatatgagtcatcttcttcgaagt

SEQ ID NO: 190120 - DNA, 25 bp, Canis familiaris
taattttgcaactcatatcatgggt

SEQ ID NO: 190121 - DNA, 25 bp, Canis familiaris
tcaagtcgactttaagcataggtgt

SEQ ID NO: 190122 - DNA, 25 bp, Canis familiaris
tcaagcccctttaacattttgcttt

SEQ ID NO: 190123 - DNA, 25 bp, Canis familiaris
tcaagatccaagtttttttgtttgt

SEQ ID NO: 190124 - DNA, 25 bp, Canis familiaris
tcaacatggttggattttttggggg

SEQ ID NO: 190125 - DNA, 25 bp, Canis familiaris
tcaaaggggttcaagtttggcttcg

SEQ ID NO: 190126 - DNA, 25 bp, Canis familiaris
tcaacggcggttaactggtggtata

SEQ ID NO: 190127 - DNA, 25 bp, Canis familiaris
tcaaggagggggtgatggtggcaaa

SEQ ID NO: 190128 - DNA, 25 bp, Canis familiaris
tcaacagtgggggtggtacggacta

SEQ ID NO: 190129 - DNA, 25 bp, Canis familiaris
tcaacaacggccggaatccgcagac

SEQ ID NO: 190130 - DNA, 25 bp, Canis familiaris
tcaaaagcgtgccacgataccctcc

SEQ ID NO: 190131 - DNA, 25 bp, Canis familiaris
tcaaagacctgttctgattctcctc

SEQ ID NO: 190132 - DNA, 25 bp, Canis familiaris
tcacaaactgcttactgttctccgt

SEQ ID NO: 190133 - DNA, 25 bp, Canis familiaris
tcaaatactcttggttcctgccact

SEQ ID NO: 190134 - DNA, 25 bp, Canis familiaris
tcaagtgaacatatgttttcaacat

SEQ ID NO: 190135 - DNA, 25 bp, Canis familiaris
tcaagaggaatgactgtttatgcca

SEQ ID NO: 190136 - DNA, 25 bp, Canis familiaris
tcacacatgggttctggtttccttg

SEQ ID NO: 190137 - DNA, 25 bp, Canis familiaris
tcaaatgggaccggattgcccctgc

SEQ ID NO: 190138 - DNA, 25 bp, Canis familiaris
tcaaaggaagccgcagagccagcca

SEQ ID NO: 190139 - DNA, 25 bp, Canis familiaris
tcaaataaagccacacacgcgcaca

SEQ ID NO: 190140 - DNA, 25 bp, Canis familiaris
tcaattaaagaaaccctgtgcaaaa

SEQ ID NO: 190141 - DNA, 25 bp, Canis familiaris
tcaattaaagaaaccctgtgccaaa

SEQ ID NO: 190142 - DNA, 25 bp, Canis familiaris
taattattaaaccccaggacaatat

SEQ ID NO: 190143 - DNA, 25 bp, Canis familiaris
tcaattttgtagtccccacgaatta

SEQ ID NO: 190144 - DNA, 25 bp, Canis familiaris
taattgttagactgcccacttctga

SEQ ID NO: 190145 - DNA, 25 bp, Canis familiaris
taatttctaaatgtgccctctggga

SEQ ID NO: 190146 - DNA, 25 bp, Canis familiaris
taatttgaactagggacacctgggt

SEQ ID NO: 190147 - DNA, 25 bp, Canis familiaris
taagtaactcttgggcagcccgggt

SEQ ID NO: 190148 - DNA, 25 bp, Canis familiaris
taatttacacttggacagccgggtt

SEQ ID NO: 190149 - DNA, 25 bp, Canis familiaris
taatttatccacggcactccgcgag

SEQ ID NO: 190150 - DNA, 25 bp, Canis familiaris
tcaatttacgactgcctatcgggat

SEQ ID NO: 190151 - DNA, 25 bp, Canis familiaris
tcaatttacgactgcctatcgggat

SEQ ID NO: 190152 - DNA, 25 bp, Canis familiaris
tcaagttaaggatctctatagtgga

SEQ ID NO: 190153 - DNA, 25 bp, Canis familiaris
tcaagttcttgatttctttccagga

SEQ ID NO: 190154 - DNA, 25 bp, Canis familiaris
tcaagttcttgattacaggtatagt

SEQ ID NO: 190155 - DNA, 25 bp, Canis familiaris
taatttttgctctactggtgtcatg

SEQ ID NO: 190156 - DNA, 25 bp, Canis familiaris
taacttagctgcacgtggttggtca

SEQ ID NO: 190157 - DNA, 25 bp, Canis familiaris
taatttgtgcagttctgttttgagt

SEQ ID NO: 190158 - DNA, 25 bp, Canis familiaris
tcaatggggcagtcattagatttga

SEQ ID NO: 190159 - DNA, 25 bp, Canis familiaris
tcaagagggggcaagagcacttaat

SEQ ID NO: 190160 - DNA, 25 bp, Canis familiaris
tcaagcaggggccaagtgcgcccca

SEQ ID NO: 190161 - DNA, 25 bp, Canis familiaris
tcaagcaggctgactacgtgcccag

SEQ ID NO: 190162 - DNA, 25 bp, Canis familiaris
tcaagcgaggactagggctccagca

SEQ ID NO: 190163 - DNA, 25 bp, Canis familiaris
tcaaaggcatcctgggctacactga

SEQ ID NO: 190164 - DNA, 25 bp, Canis familiaris
tcaaggtgcacctgggcgacaacaa

SEQ ID NO: 190165 - DNA, 25 bp, Canis familiaris
tcaagggccacgggagcaagcgtca

SEQ ID NO: 190166 - DNA, 25 bp, Canis familiaris
tcaagatggccaagatgtgtcaagg

SEQ ID NO: 190167 - DNA, 25 bp, Canis familiaris
tcaagatccatcctgaggctcagag

SEQ ID NO: 190168 - DNA, 25 bp, Canis familiaris
tcaagtacacctgggcgccagtgac

SEQ ID NO: 190169 - DNA, 25 bp, Canis familiaris
tcaatttcccatgatctcagcagga

SEQ ID NO: 190170 - DNA, 25 bp, Canis familiaris
tcaaagccttcagcactcaggagct

SEQ ID NO: 190171 - DNA, 25 bp, Canis familiaris
tcaacaccccagccatgtatgtggc

SEQ ID NO: 190172 - DNA, 25 bp, Canis familiaris
taatatcctctcccatgtagtttca

SEQ ID NO: 190173 - DNA, 25 bp, Canis familiaris
taattccacttctaggtgtgtacct

SEQ ID NO: 190174 - DNA, 25 bp, Canis familiaris
tcaactccacatcctcagggtgaac

SEQ ID NO: 190175 - DNA, 25 bp, Canis familiaris
tcaagccgagctctgcgggtaagcc

SEQ ID NO: 190176 - DNA, 25 bp, Canis familiaris
tcaaccaagggtcgttctagcagcc

SEQ ID NO: 190177 - DNA, 25 bp, Canis familiaris
taacccgggtacttgctagaggaca

SEQ ID NO: 190178 - DNA, 25 bp, Canis familiaris
tcaaccgctgggtgccggaaggacg

SEQ ID NO: 190179 - DNA, 25 bp, Canis familiaris
tcaatcccgggaccccggggtcatg

SEQ ID NO: 190180 - DNA, 25 bp, Canis familiaris
tcaagccccggagccaaagctgggg

SEQ ID NO: 190181 - DNA, 25 bp, Canis familiaris
tcaaccctttactacacaatctagg

SEQ ID NO: 190182 - DNA, 25 bp, Canis familiaris
tcaaccactttaccactagcagtca

SEQ ID NO: 190183 - DNA, 25 bp, Canis familiaris
tcaaacaattataccaccagatgca

SEQ ID NO: 190184 - DNA, 25 bp, Canis familiaris
tcaaaaatctctcgtgaccagcagc

SEQ ID NO: 190185 - DNA, 25 bp, Canis familiaris
tcaagaaggtctatgcctctcagcg

SEQ ID NO: 190186 - DNA, 25 bp, Canis familiaris
taagaaggacacaagccccgggaag

SEQ ID NO: 190187 - DNA, 25 bp, Canis familiaris
taaaattccaaaagccactgagggg

SEQ ID NO: 190188 - DNA, 25 bp, Canis familiaris
tacaacaagtaaagtgcccgacggg

SEQ ID NO: 190189 - DNA, 25 bp, Canis familiaris
taatactcctggagggcctagctgc

SEQ ID NO: 190190 - DNA, 25 bp, Canis familiaris
tcaacttcctggagcaggccttcga

SEQ ID NO: 190191 - DNA, 25 bp, Canis familiaris
tcaagtcattttgggagcccctcta

SEQ ID NO: 190192 - DNA, 25 bp, Canis familiaris
tcaaactgtttcggagctctcatgc

SEQ ID NO: 190193 - DNA, 25 bp, Canis familiaris
tcaagacacttggcggctgatccat

SEQ ID NO: 190194 - DNA, 25 bp, Canis familiaris
tcaactctcttagatgctatccaag

SEQ ID NO: 190195 - DNA, 25 bp, Canis familiaris
tcaaatccttggaacgatctgcagg

SEQ ID NO: 190196 - DNA, 25 bp, Canis familiaris
tcaacatccattgttctatctccgg

SEQ ID NO: 190197 - DNA, 25 bp, Canis familiaris
taatcaccaattgtatactgtccca

SEQ ID NO: 190198 - DNA, 25 bp, Canis familiaris
taacacttaatggtcaccgaccccg

SEQ ID NO: 190199 - DNA, 25 bp, Canis familiaris
taatctttcttggtaacaaccggag

SEQ ID NO: 190200 - DNA, 25 bp, Canis familiaris
tacgtttcccggacaaactcaggat

SEQ ID NO: 190201 - DNA, 25 bp, Canis familiaris
tacgggctcccggaacaatacgtga

SEQ ID NO: 190202 - DNA, 25 bp, Canis familiaris
tttggtatccccagacattacagat

SEQ ID NO: 190203 - DNA, 25 bp, Canis familiaris
ttaggtattacaaggaactccgcaa

SEQ ID NO: 190204 - DNA, 25 bp, Canis familiaris
tttcgtgattagaaggtacccctat

SEQ ID NO: 190205 - DNA, 25 bp, Canis familiaris
taatcctttaaacttaatgccactt

SEQ ID NO: 190206 - DNA, 25 bp, Canis familiaris
taatggttttacctcaaatcagaaa

SEQ ID NO: 190207 - DNA, 25 bp, Canis familiaris
taatgtttttcccacaacccagaat

SEQ ID NO: 190208 - DNA, 25 bp, Canis familiaris
tcaagtgctttaacgaaacctcaga

SEQ ID NO: 190209 - DNA, 25 bp, Canis familiaris
tcaagtgctttttccgtgacctata

SEQ ID NO: 190210 - DNA, 25 bp, Canis familiaris
tcaagttcaaggcccaggagacccg

SEQ ID NO: 190211 - DNA, 25 bp, Canis familiaris
tcaaggttaggagatggagccccac

SEQ ID NO: 190212 - DNA, 25 bp, Canis familiaris
tcaaggtgggaagggagattcaccc

SEQ ID NO: 190213 - DNA, 25 bp, Canis familiaris
tcaaggtggtacgcctgaagcctac

SEQ ID NO: 190214 - DNA, 25 bp, Canis familiaris
taaggagggtctacctgaggcctag

SEQ ID NO: 190215 - DNA, 25 bp, Canis familiaris
taagggaatgaaaattaagcctggt

SEQ ID NO: 190216 - DNA, 25 bp, Canis familiaris
taatggcgagcatctacaaaccctg

SEQ ID NO: 190217 - DNA, 25 bp, Canis familiaris
taatggcaacaacaagacccttgga

SEQ ID NO: 190218 - DNA, 25 bp, Canis familiaris
taatcaggaaggcgacccctttgct

SEQ ID NO: 190219 - DNA, 25 bp, Canis familiaris
tattcctaaggctccagggctagtc

SEQ ID NO: 190220 - DNA, 25 bp, Canis familiaris
ttaggattacgttccgcgtcgatgt

SEQ ID NO: 190221 - DNA, 25 bp, Canis familiaris
taagggaaggattactggtccagtt

SEQ ID NO: 190222 - DNA, 25 bp, Canis familiaris
taatggaataggaccgcggttctat

SEQ ID NO: 190223 - DNA, 25 bp, Canis familiaris
tcaaggaaagcgtaacgtttgaaca

SEQ ID NO: 190224 - DNA, 25 bp, Canis familiaris
tcaagaaacccttttccttgaagca

SEQ ID NO: 190225 - DNA, 25 bp, Canis familiaris
tcaagaagacttcagtcccctaggc

SEQ ID NO: 190226 - DNA, 25 bp, Canis familiaris
tcaaaagttgcctggtctccttggc

SEQ ID NO: 190227 - DNA, 25 bp, Canis familiaris
tcaacaagggccagggatccgtgtc

SEQ ID NO: 190228 - DNA, 25 bp, Canis familiaris
tcaacagaggtgtcccggaccgtga

SEQ ID NO: 190229 - DNA, 25 bp, Canis familiaris
tcaattgaggaaccacttgaccggg

SEQ ID NO: 190230 - DNA, 25 bp, Canis familiaris
taattgggaaccggaggccaatggt

SEQ ID NO: 190231 - DNA, 25 bp, Canis familiaris
taatctgataacgagggggcacaat

SEQ ID NO: 190232 - DNA, 25 bp, Canis familiaris
ttgcggctaaccgggggccaaatga

SEQ ID NO: 190233 - DNA, 25 bp, Canis familiaris
ttatgtgccggggcaggcggccaaa

SEQ ID NO: 190234 - DNA, 25 bp, Canis familiaris
tcaagtgccgtggccaagcgggcaa

SEQ ID NO: 190235 - DNA, 25 bp, Canis familiaris
tcaactgactgtgctacccaggcac

SEQ ID NO: 190236 - DNA, 25 bp, Canis familiaris
tcaatcatactcagtttccgccatc

SEQ ID NO: 190237 - DNA, 25 bp, Canis familiaris
taatctattccgactatgacccatc

SEQ ID NO: 190238 - DNA, 25 bp, Canis familiaris
taattatgtactccagaactgttca

SEQ ID NO: 190239 - DNA, 25 bp, Canis familiaris
taatttgtcaggccaaccttcacac

SEQ ID NO: 190240 - DNA, 25 bp, Canis familiaris
taatttcctggttaccacacaaaca

SEQ ID NO: 190241 - DNA, 25 bp, Canis familiaris
taattacctgtgtttcaaccttgac

SEQ ID NO: 190242 - DNA, 25 bp, Canis familiaris
taaatacctggtgctaacgtcccat

SEQ ID NO: 190243 - DNA, 25 bp, Canis familiaris
taaatagtcggttctaggcctttca

SEQ ID NO: 190244 - DNA, 25 bp, Canis familiaris
tcaaaaggctggcctctcaggggtc

SEQ ID NO: 190245 - DNA, 25 bp, Canis familiaris
tcaaacggcttgaatctcagaagag

SEQ ID NO: 190246 - DNA, 25 bp, Canis familiaris
tcaagatttttcattcatcaagctg

SEQ ID NO: 190247 - DNA, 25 bp, Canis familiaris
taatttctctccattccaaggagct

SEQ ID NO: 190248 - DNA, 25 bp, Canis familiaris
tcaatctcgtctttgctccaaagga

SEQ ID NO: 190249 - DNA, 25 bp, Canis familiaris
tcaaccgactgggtcacccaggcac

SEQ ID NO: 190250 - DNA, 25 bp, Canis familiaris
taacacgtcgaatacctacgcctga

SEQ ID NO: 190251 - DNA, 25 bp, Canis familiaris
taatcacgtaaaaaccacacgagga

SEQ ID NO: 190252 - DNA, 25 bp, Canis familiaris
taattgaggaaaagccccagccgga

SEQ ID NO: 190253 - DNA, 25 bp, Canis familiaris
taatttggattgacagccccggtgg

SEQ ID NO: 190254 - DNA, 25 bp, Canis familiaris
taattcatggtttcagccttcaaga

SEQ ID NO: 190255 - DNA, 25 bp, Canis familiaris
tcaacttctgagatccacttctgga

SEQ ID NO: 190256 - DNA, 25 bp, Canis familiaris
tcaagtggctgagtatacattttaa

SEQ ID NO: 190257 - DNA, 25 bp, Canis familiaris
tcaagattgtcagcaatgcatcctg

SEQ ID NO: 190258 - DNA, 25 bp, Canis familiaris
tcaagctaccagcatgacatcactg

SEQ ID NO: 190259 - DNA, 25 bp, Canis familiaris
tcaagcagactccgtgcctgctatg

SEQ ID NO: 190260 - DNA, 25 bp, Canis familiaris
tcaagaggccataggctcagctgtg

SEQ ID NO: 190261 - DNA, 25 bp, Canis familiaris
tcaaacccagcaaccacatggtagc

SEQ ID NO: 190262 - DNA, 25 bp, Canis familiaris
tcaatatccccaaggactctgagac

SEQ ID NO: 190263 - DNA, 25 bp, Canis familiaris
tcaatacccatgaatagcctatgaa

SEQ ID NO: 190264 - DNA, 25 bp, Canis familiaris
tcaacccctgtgtatgtgctgtaca

SEQ ID NO: 190265 - DNA, 25 bp, Canis familiaris
tcaacgcacactccaacatcttgaa

SEQ ID NO: 190266 - DNA, 25 bp, Canis familiaris
tcaagagactcaccacgagtatgag

SEQ ID NO: 190267 - DNA, 25 bp, Canis familiaris
tcaagtggctgccccggaatgatct

SEQ ID NO: 190268 - DNA, 25 bp, Canis familiaris
tcaagtgagtcatctcaggtgagac

SEQ ID NO: 190269 - DNA, 25 bp, Canis familiaris
tcaaggagtcgctgaggctgtaccc

SEQ ID NO: 190270 - DNA, 25 bp, Canis familiaris
tcaaggtgtccacaggcaagatccc

SEQ ID NO: 190271 - DNA, 25 bp, Canis familiaris
tcaaggtgtccacaggcaagatccc

SEQ ID NO: 190272 - DNA, 25 bp, Canis familiaris
taatggtgtaagactgctcacagat

SEQ ID NO: 190273 - DNA, 25 bp, Canis familiaris
tcaagggttcagatggagcagttaa

SEQ ID NO: 190274 - DNA, 25 bp, Canis familiaris
tcaagtttgtaaatgtcctttcaag

SEQ ID NO: 190275 - DNA, 25 bp, Canis familiaris
tcaactccttaaacattctttccac

SEQ ID NO: 190276 - DNA, 25 bp, Canis familiaris
tcaaccttgaaaacgtttctccact

SEQ ID NO: 190277 - DNA, 25 bp, Canis familiaris
tcaatggcgtgatacggttgactca

SEQ ID NO: 190278 - DNA, 25 bp, Canis familiaris
taatccggagcgtgatattactgct

SEQ ID NO: 190279 - DNA, 25 bp, Canis familiaris
taatctaacctgtgaatttcgtgag

SEQ ID NO: 190280 - DNA, 25 bp, Canis familiaris
taatctggacttctggttacttatg

SEQ ID NO: 190281 - DNA, 25 bp, Canis familiaris
taattgtgacctctgtgtacctggc

SEQ ID NO: 190282 - DNA, 25 bp, Canis familiaris
tcaatgggatctacctgtggcccgg

SEQ ID NO: 190283 - DNA, 25 bp, Canis familiaris
tcaagaaggtgagatctgccccggt

SEQ ID NO: 190284 - DNA, 25 bp, Canis familiaris
tcaagacggtgcgggtgcccgaggt

SEQ ID NO: 190285 - DNA, 25 bp, Canis familiaris
tcaacactggtggggagccttcgag

SEQ ID NO: 190286 - DNA, 25 bp, Canis familiaris
tcaaagccgtgcacgagcagcttgc

SEQ ID NO: 190287 - DNA, 25 bp, Canis familiaris
taatagccccctgggatgcattaaa

SEQ ID NO: 190288 - DNA, 25 bp, Canis familiaris
taagtgccccagacaggattaacaa

SEQ ID NO: 190289 - DNA, 25 bp, Canis familiaris
taaaggcaccgaaggcttaagtagg

SEQ ID NO: 190290 - DNA, 25 bp, Canis familiaris
taaaggccccgtggtaatgaccagg

SEQ ID NO: 190291 - DNA, 25 bp, Canis familiaris
taaacggcacgggactagtacaagg

SEQ ID NO: 190292 - DNA, 25 bp, Canis familiaris
taattccgcagccgcggctcaataa

SEQ ID NO: 190293 - DNA, 25 bp, Canis familiaris
taagtctgagtcccagtccaaaaat

SEQ ID NO: 190294 - DNA, 25 bp, Canis familiaris
taattctggcaggacctcaccaaaa

SEQ ID NO: 190295 - DNA, 25 bp, Canis familiaris
tcaattcttcacgtcgtcacatcga

SEQ ID NO: 190296 - DNA, 25 bp, Canis familiaris
taataatctattcagtcacatggga

SEQ ID NO: 190297 - DNA, 25 bp, Canis familiaris
taataaatttacttgctcagcgtga

SEQ ID NO: 190298 - DNA, 25 bp, Canis familiaris
tcaagtaccagagcctgctgaccaa

SEQ ID NO: 190299 - DNA, 25 bp, Canis familiaris
taagataccaaccgtcttctcagaa

SEQ ID NO: 190300 - DNA, 25 bp, Canis familiaris
taagcataccagagtgaccccaaga

SEQ ID NO: 190301 - DNA, 25 bp, Canis familiaris
tcaacaaccagcagttcctggcagg

SEQ ID NO: 190302 - DNA, 25 bp, Canis familiaris
tcaacaaccaactatatcctgccag

SEQ ID NO: 190303 - DNA, 25 bp, Canis familiaris
tcaagctagccagtctttctgtcca

SEQ ID NO: 190304 - DNA, 25 bp, Canis familiaris
taactacatgcagtctgaccgcttc

SEQ ID NO: 190305 - DNA, 25 bp, Canis familiaris
taatctgatataactgaccatgcat

SEQ ID NO: 190306 - DNA, 25 bp, Canis familiaris
taatctgcaatcgactgtctcctga

SEQ ID NO: 190307 - DNA, 25 bp, Canis familiaris
tcaacggaccaagctgcgatgcagt

SEQ ID NO: 190308 - DNA, 25 bp, Canis familiaris
tcaacaagaaagacctgctggagga

SEQ ID NO: 190309 - DNA, 25 bp, Canis familiaris
tcaacgtgagggctgctctcgagga

SEQ ID NO: 190310 - DNA, 25 bp, Canis familiaris
tcaacattctggcgagttcgacaga

SEQ ID NO: 190311 - DNA, 25 bp, Canis familiaris
tcaacaagttgccgatgtccgtcgc

SEQ ID NO: 190312 - DNA, 25 bp, Canis familiaris
tcaaccagtgttttgctcctgaacc

SEQ ID NO: 190313 - DNA, 25 bp, Canis familiaris
tcaactcagctctatctgactccaa

SEQ ID NO: 190314 - DNA, 25 bp, Canis familiaris
tcaagtcatgatctcagagtcacaa

SEQ ID NO: 190315 - DNA, 25 bp, Canis familiaris
tcaagtcatgatcctagcgtcctgg

SEQ ID NO: 190316 - DNA, 25 bp, Canis familiaris
tcaagatagatcaaattccctcaga

SEQ ID NO: 190317 - DNA, 25 bp, Canis familiaris
tcaatatatttattatctcattcag

SEQ ID NO: 190318 - DNA, 25 bp, Canis familiaris
tcaatttcataattcactgatctat

SEQ ID NO: 190319 - DNA, 25 bp, Canis familiaris
tcaacaccattattcatcagactca

SEQ ID NO: 190320 - DNA, 25 bp, Canis familiaris
tcaatcatctctcatatctcaagtg

SEQ ID NO: 190321 - DNA, 25 bp, Canis familiaris
tcaagcatctgcatgtttgcgccga

SEQ ID NO: 190322 - DNA, 25 bp, Canis familiaris
tcaatgattgattgtctcctggccg

SEQ ID NO: 190323 - DNA, 25 bp, Canis familiaris
taatattcatctactccggacagga

SEQ ID NO: 190324 - DNA, 25 bp, Canis familiaris
taatgttatccaactccatgaagtt

SEQ ID NO: 190325 - DNA, 25 bp, Canis familiaris
taatgttatctccaccagcatcaga

SEQ ID NO: 190326 - DNA, 25 bp, Canis familiaris
taatgcctgttccgatcaccagaac

SEQ ID NO: 190327 - DNA, 25 bp, Canis familiaris
tactactatggctatggatctcgat

SEQ ID NO: 190328 - DNA, 25 bp, Canis familiaris
taatatttggcaatgcagtccactg

SEQ ID NO: 190329 - DNA, 25 bp, Canis familiaris
taatgtttgcgcctaactcgcgctt

SEQ ID NO: 190330 - DNA, 25 bp, Canis familiaris
taatatttggccatgcagtccacct

SEQ ID NO: 190331 - DNA, 25 bp, Canis familiaris
taattcatgtgtgctccgatctact

SEQ ID NO: 190332 - DNA, 25 bp, Canis familiaris
taatatcactggctccatattaaaa

SEQ ID NO: 190333 - DNA, 25 bp, Canis familiaris
taatatcatgagccgccacattctg

SEQ ID NO: 190334 - DNA, 25 bp, Canis familiaris
tcaagatcattgctcctcctgagcg

SEQ ID NO: 190335 - DNA, 25 bp, Canis familiaris
tcaatgtcaggctttcctcggagac

SEQ ID NO: 190336 - DNA, 25 bp, Canis familiaris
tcaatgtcaggctttcctcggagac

SEQ ID NO: 190337 - DNA, 25 bp, Canis familiaris
tcaagtaggctgatgccctgactcc

SEQ ID NO: 190338 - DNA, 25 bp, Canis familiaris
tcaagtgaggtgtgcacccctttca

SEQ ID NO: 190339 - DNA, 25 bp, Canis familiaris
tcaagtggagagcagccccaggtct

SEQ ID NO: 190340 - DNA, 25 bp, Canis familiaris
tcaaggtgacaccatcctccaagat

SEQ ID NO: 190341 - DNA, 25 bp, Canis familiaris
tcaaggcccatctatgttgtaacat

SEQ ID NO: 190342 - DNA, 25 bp, Canis familiaris
tcaagtccctcttgtggcataacct

SEQ ID NO: 190343 - DNA, 25 bp, Canis familiaris
tcaaggcctttttggctgataccat

SEQ ID NO: 190344 - DNA, 25 bp, Canis familiaris
taagggcctcttagcctgtaaagtc

SEQ ID NO: 190345 - DNA, 25 bp, Canis familiaris
taaggcctacttacaagactaactt

SEQ ID NO: 190346 - DNA, 25 bp, Canis familiaris
taagacccatttcaggaccatcgtt

SEQ ID NO: 190347 - DNA, 25 bp, Canis familiaris
taagatcacacagttggcagagtca

SEQ ID NO: 190348 - DNA, 25 bp, Canis familiaris
tcaatgacaactttgtcaagctcat

SEQ ID NO: 190349 - DNA, 25 bp, Canis familiaris
tcaatcacatccacgtagactcagt

SEQ ID NO: 190350 - DNA, 25 bp, Canis familiaris
tcaatacctgcacagctacctgact

SEQ ID NO: 190351 - DNA, 25 bp, Canis familiaris
tcaagaacatccagtccctgacttc

SEQ ID NO: 190352 - DNA, 25 bp, Canis familiaris
tcaacaaatcccagtctctgaccaa

SEQ ID NO: 190353 - DNA, 25 bp, Canis familiaris
tcaacggatactacgtcttgaccga

SEQ ID NO: 190354 - DNA, 25 bp, Canis familiaris
taattggcaagcatctacctaccct

SEQ ID NO: 190355 - DNA, 25 bp, Canis familiaris
taagacccatgcattaacgaccaat

SEQ ID NO: 190356 - DNA, 25 bp, Canis familiaris
taagaccaagccgtattccaaagtc

SEQ ID NO: 190357 - DNA, 25 bp, Canis familiaris
tcaagcccaatgagtttgccagcca

SEQ ID NO: 190358 - DNA, 25 bp, Canis familiaris
tcaagcatcatctagttcttctcca

SEQ ID NO: 190359 - DNA, 25 bp, Canis familiaris
taatcatgtcatagctgtctcctgt

SEQ ID NO: 190360 - DNA, 25 bp, Canis familiaris
taacatgtttcgaacgttaccacct

SEQ ID NO: 190361 - DNA, 25 bp, Canis familiaris
taacttttcatgagcccaaaccgtg

SEQ ID NO: 190362 - DNA, 25 bp, Canis familiaris
tcaactttcataaagcccaccatcc

SEQ ID NO: 190363 - DNA, 25 bp, Canis familiaris
taatacttctacaatgaccccatgc

SEQ ID NO: 190364 - DNA, 25 bp, Canis familiaris
tcaacacttccattgtgactccgat

SEQ ID NO: 190365 - DNA, 25 bp, Canis familiaris
tcaacatgctttctgtacatcctca

SEQ ID NO: 190366 - DNA, 25 bp, Canis familiaris
tcaagctcatttcctggtatgacaa

SEQ ID NO: 190367 - DNA, 25 bp, Canis familiaris
tcaagctccttttggggaaatggag

SEQ ID NO: 190368 - DNA, 25 bp, Canis familiaris
tcaagtcctggaggcgggagtcggg

SEQ ID NO: 190369 - DNA, 25 bp, Canis familiaris
tcaagccctgggctgaaaggcgggc

SEQ ID NO: 190370 - DNA, 25 bp, Canis familiaris
tcaagcctcgcatgcgtgataacga

SEQ ID NO: 190371 - DNA, 25 bp, Canis familiaris
taatctctcggattaataaggcaca

SEQ ID NO: 190372 - DNA, 25 bp, Canis familiaris
taatgctaagggaaccaagccaatt

SEQ ID NO: 190373 - DNA, 25 bp, Canis familiaris
taatgctgaaggggaccactctttc

SEQ ID NO: 190374 - DNA, 25 bp, Canis familiaris
taaggaaggagaacccctgggctct

SEQ ID NO: 190375 - DNA, 25 bp, Canis familiaris
gagaagggagttccacggcatgaag

SEQ ID NO: 190376 - DNA, 25 bp, Canis familiaris
taattatagtcttatccggttggat

SEQ ID NO: 190377 - DNA, 25 bp, Canis familiaris
taagttgagttattgtaggtgagta

SEQ ID NO: 190378 - DNA, 25 bp, Canis familiaris
taagcattggagcacctagcggtta

SEQ ID NO: 190379 - DNA, 25 bp, Canis familiaris
tataacttggttgctagggtaaaat

SEQ ID NO: 190380 - DNA, 25 bp, Canis familiaris
taagacatttgttgcccagggataa

SEQ ID NO: 190381 - DNA, 25 bp, Canis familiaris
taaccacttgaatccagaagttaag

SEQ ID NO: 190382 - DNA, 25 bp, Canis familiaris
ttacccattatcaccgcaagtatcc

SEQ ID NO: 190383 - DNA, 25 bp, Canis familiaris
ttcaccggtgacacgaactttcctt

SEQ ID NO: 190384 - DNA, 25 bp, Canis familiaris
ttacctggaacccataacttgattc

SEQ ID NO: 190385 - DNA, 25 bp, Canis familiaris
ttcacctaaaagcaaagtgtaccca

SEQ ID NO: 190386 - DNA, 25 bp, Canis familiaris
ttagcgtactgctgcctaagttacc

SEQ ID NO: 190387 - DNA, 25 bp, Canis familiaris
taatggtccatcaacccaacttacc

SEQ ID NO: 190388 - DNA, 25 bp, Canis familiaris
taaggtcaactactatgtatattac

SEQ ID NO: 190389 - DNA, 25 bp, Canis familiaris
taaggttactgaccagtgcctgtcc

SEQ ID NO: 190390 - DNA, 25 bp, Canis familiaris
tcaaggtctttactatatcctcccg

SEQ ID NO: 190391 - DNA, 25 bp, Canis familiaris
tcaatctttcgtttaactcttccgt

SEQ ID NO: 190392 - DNA, 25 bp, Canis familiaris
tcaagatgcttcatttcacctgctt

SEQ ID NO: 190393 - DNA, 25 bp, Canis familiaris
tcaagagtctcttttattctcctaa

SEQ ID NO: 190394 - DNA, 25 bp, Canis familiaris
taagggctttttcattcctaagtct

SEQ ID NO: 190395 - DNA, 25 bp, Canis familiaris
taattggtcttttatattccctagt

SEQ ID NO: 190396 - DNA, 25 bp, Canis familiaris
tagctaggctgtccgttattaccat

SEQ ID NO: 190397 - DNA, 25 bp, Canis familiaris
taaaggcgtaagttttcccagaatg

SEQ ID NO: 190398 - DNA, 25 bp, Canis familiaris
taaagggtatatctgggactatggg

SEQ ID NO: 190399 - DNA, 25 bp, Canis familiaris
tataagggctaaactgagaactaaa

SEQ ID NO: 190400 - DNA, 25 bp, Canis familiaris
taatgaaggccaccgctggaacaaa

SEQ ID NO: 190401 - DNA, 25 bp, Canis familiaris
tatgccaagtacacccgtacaggac

SEQ ID NO: 190402 - DNA, 25 bp, Canis familiaris
tttgctagaacagagacgtaaggac

SEQ ID NO: 190403 - DNA, 25 bp, Canis familiaris
tatggggaacataaaagtaggcaaa

SEQ ID NO: 190404 - DNA, 25 bp, Canis familiaris
tatggggggccaataagaaggaaga

SEQ ID NO: 190405 - DNA, 25 bp, Canis familiaris
tagatggggtctcagaaaggacaaa

SEQ ID NO: 190406 - DNA, 25 bp, Canis familiaris
taagggttttcactaggtgcaacta

SEQ ID NO: 190407 - DNA, 25 bp, Canis familiaris
taatctttctgttttaggtgaacta

SEQ ID NO: 190408 - DNA, 25 bp, Canis familiaris
taggtttgggatttgagggacaatt

SEQ ID NO: 190409 - DNA, 25 bp, Canis familiaris
tagtttgggggctcagatggacaag

SEQ ID NO: 190410 - DNA, 25 bp, Canis familiaris
taatcttggtggtgtcagtggactg

SEQ ID NO: 190411 - DNA, 25 bp, Canis familiaris
taatagtggtggatgctaggcccgg

SEQ ID NO: 190412 - DNA, 25 bp, Canis familiaris
taatgcagacggcttgctcagtgct

SEQ ID NO: 190413 - DNA, 25 bp, Canis familiaris
taactactagcaaggccaggccagc

SEQ ID NO: 190414 - DNA, 25 bp, Canis familiaris
taagccttgcaatgtgacaggtagc

SEQ ID NO: 190415 - DNA, 25 bp, Canis familiaris
tcaacctgggcatgtgcaacctcaa

SEQ ID NO: 190416 - DNA, 25 bp, Canis familiaris
tcaagtctgcttcaatgcatcccta

SEQ ID NO: 190417 - DNA, 25 bp, Canis familiaris
tcaacatctggtaccagcactccgc

SEQ ID NO: 190418 - DNA, 25 bp, Canis familiaris
tcaacttggctaaagcctgccaccg

SEQ ID NO: 190419 - DNA, 25 bp, Canis familiaris
tcaactgaggctcaaccatgccacc

SEQ ID NO: 190420 - DNA, 25 bp, Canis familiaris
tcaattgaggttttccagccatcga

SEQ ID NO: 190421 - DNA, 25 bp, Canis familiaris
tcaagtgcaggatcttctcggccta

SEQ ID NO: 190422 - DNA, 25 bp, Canis familiaris
tcaatgacgagtcctctctcgtccg

SEQ ID NO: 190423 - DNA, 25 bp, Canis familiaris
tcaatgcatcaattaccgtccatcc

SEQ ID NO: 190424 - DNA, 25 bp, Canis familiaris
tcaactcaaatattctgtccttcct

SEQ ID NO: 190425 - DNA, 25 bp, Canis familiaris
tcaacttcaatattcttacactact

SEQ ID NO: 190426 - DNA, 25 bp, Canis familiaris
tcaacgctcaaagcttaacaacaag

SEQ ID NO: 190427 - DNA, 25 bp, Canis familiaris
tcaatgcctaaaccttaaacccatt

SEQ ID NO: 190428 - DNA, 25 bp, Canis familiaris
tcaaggctgaaagggaaaccgccta

SEQ ID NO: 190429 - DNA, 25 bp, Canis familiaris
tcaaggggacttggacatcacctgt

SEQ ID NO: 190430 - DNA, 25 bp, Canis familiaris
tcaagcgggcctactacaacggcat

SEQ ID NO: 190431 - DNA, 25 bp, Canis familiaris
taaggagtctcttctcaagggtgcc

SEQ ID NO: 190432 - DNA, 25 bp, Canis familiaris
tcaagagacacccaccacggtgtcc

SEQ ID NO: 190433 - DNA, 25 bp, Canis familiaris
tcaaggaagcggccgaggccttcct

SEQ ID NO: 190434 - DNA, 25 bp, Canis familiaris
tcaactgaggaggactgtggccccc

SEQ ID NO: 190435 - DNA, 25 bp, Canis familiaris
tcaagctggaggacttggtgccccc

SEQ ID NO: 190436 - DNA, 25 bp, Canis familiaris
tcaagagtgagacccatggctccct

SEQ ID NO: 190437 - DNA, 25 bp, Canis familiaris
tcaagagatagaccccctctgtgca

SEQ ID NO: 190438 - DNA, 25 bp, Canis familiaris
taatcagtcagtacaacctttggca

SEQ ID NO: 190439 - DNA, 25 bp, Canis familiaris
taatacgggtgctacctgttgggcc

SEQ ID NO: 190440 - DNA, 25 bp, Canis familiaris
taatcatgcgggtgacttgctcgtg

SEQ ID NO: 190441 - DNA, 25 bp, Canis familiaris
taatatggggcccacattcctctgt

SEQ ID NO: 190442 - DNA, 25 bp, Canis familiaris
taatgaaggcgacgtgcttccctgt

SEQ ID NO: 190443 - DNA, 25 bp, Canis familiaris
tcaaggaggagctggcttacctgcg

SEQ ID NO: 190444 - DNA, 25 bp, Canis familiaris
tcaagagggagctggccgggcagcg

SEQ ID NO: 190445 - DNA, 25 bp, Canis familiaris
tcaagggtgaacagcgggccagcga

SEQ ID NO: 190446 - DNA, 25 bp, Canis familiaris
tcaaggggaaggccaggctggggcg

SEQ ID NO: 190447 - DNA, 25 bp, Canis familiaris
tcaaggggaaggccaggctggggcg

SEQ ID NO: 190448 - DNA, 25 bp, Canis familiaris
tcaaggggaaggccaggctggggcg

SEQ ID NO: 190449 - DNA, 25 bp, Canis familiaris
tcaagtgaggaaccgacgccggctg

SEQ ID NO: 190450 - DNA, 25 bp, Canis familiaris
tcaactagtgacacccagctctgtc

SEQ ID NO: 190451 - DNA, 25 bp, Canis familiaris
tcaagtgggacttcaccagttcctc

SEQ ID NO: 190452 - DNA, 25 bp, Canis familiaris
tcaagttgggtttctgagtcctgcc

SEQ ID NO: 190453 - DNA, 25 bp, Canis familiaris
tcaactttgtgaaactggtcttcta

SEQ ID NO: 190454 - DNA, 25 bp, Canis familiaris
tcaacgtgtgctgtaggttcttcta

SEQ ID NO: 190455 - DNA, 25 bp, Canis familiaris
tcaaggctgtgtgtaccgtgtgtat

SEQ ID NO: 190456 - DNA, 25 bp, Canis familiaris
tcaagcaggttccacactcagtgtg

SEQ ID NO: 190457 - DNA, 25 bp, Canis familiaris
taatagtcattccaaatatgagatg

SEQ ID NO: 190458 - DNA, 25 bp, Canis familiaris
taatagtattaccatatgatccagt

SEQ ID NO: 190459 - DNA, 25 bp, Canis familiaris
tcaacgtgatcttcatctaaacagt

SEQ ID NO: 190460 - DNA, 25 bp, Canis familiaris
taatcatttgcctatctatgaacaa

SEQ ID NO: 190461 - DNA, 25 bp, Canis familiaris
tcaattctagcttctctgcattaaa

SEQ ID NO: 190462 - DNA, 25 bp, Canis familiaris
tcaagtgctcagtaacccgaaagtg

SEQ ID NO: 190463 - DNA, 25 bp, Canis familiaris
tcaagtgtgcgaggaacgcggaaga

SEQ ID NO: 190464 - DNA, 25 bp, Canis familiaris
tcaaggtcattgcacacggcaaaga

SEQ ID NO: 190465 - DNA, 25 bp, Canis familiaris
tcaagtgttctccactgggtaatgt

SEQ ID NO: 190466 - DNA, 25 bp, Canis familiaris
tcaagtttctgccttgtgcttcgac

SEQ ID NO: 190467 - DNA, 25 bp, Canis familiaris
tcaaccatcctcatttctttgatcc

SEQ ID NO: 190468 - DNA, 25 bp, Canis familiaris
tcaatccacccaaggtgtttgataa

SEQ ID NO: 190469 - DNA, 25 bp, Canis familiaris
tcaacccccatcacatctttgtgaa

SEQ ID NO: 190470 - DNA, 25 bp, Canis familiaris
tcaacggccttcacatttctgtata

SEQ ID NO: 190471 - DNA, 25 bp, Canis familiaris
tcaacctggcctgtattgtctattt

SEQ ID NO: 190472 - DNA, 25 bp, Canis familiaris
tcaaccgctggtgccagggcttgtt

SEQ ID NO: 190473 - DNA, 25 bp, Canis familiaris
tcaaccagtggtggactttttctcc

SEQ ID NO: 190474 - DNA, 25 bp, Canis familiaris
tcaacctgggttttcatttgttcac

SEQ ID NO: 190475 - DNA, 25 bp, Canis familiaris
taatcctgggatcgtatttttatat

SEQ ID NO: 190476 - DNA, 25 bp, Canis familiaris
taatccattaccctttattttattg

SEQ ID NO: 190477 - DNA, 25 bp, Canis familiaris
taattctctagcagccttttttttt

SEQ ID NO: 190478 - DNA, 25 bp, Canis familiaris
taatttccaggacgctttgttctct

SEQ ID NO: 190479 - DNA, 25 bp, Canis familiaris
taatttccatggccggtggcttttc

SEQ ID NO: 190480 - DNA, 25 bp, Canis familiaris
taatgtccctttgttggcattgtcc

SEQ ID NO: 190481 - DNA, 25 bp, Canis familiaris
taatccgtttatgtgatgtgtattc

SEQ ID NO: 190482 - DNA, 25 bp, Canis familiaris
taatccagttttatttttgtaccag

SEQ ID NO: 190483 - DNA, 25 bp, Canis familiaris
taatcaggttgtaacttatgttgaa

SEQ ID NO: 190484 - DNA, 25 bp, Canis familiaris
taataaagttatgcattcagttaaa

SEQ ID NO: 190485 - DNA, 25 bp, Canis familiaris
taatcaagtgttattttttcaaatg

SEQ ID NO: 190486 - DNA, 25 bp, Canis familiaris
taatcaactttgatgcttacaaaaa

SEQ ID NO: 190487 - DNA, 25 bp, Canis familiaris
taataactttgtgaatccaaaccaa

SEQ ID NO: 190488 - DNA, 25 bp, Canis familiaris
taataaaatttatcttccactgaaa

SEQ ID NO: 190489 - DNA, 25 bp, Canis familiaris
taataaaatttgttcttgtctctaa

SEQ ID NO: 190490 - DNA, 25 bp, Canis familiaris
taataaaactgtcttgggtttctct

SEQ ID NO: 190491 - DNA, 25 bp, Canis familiaris
taataaaaccctctggtattcctat

SEQ ID NO: 190492 - DNA, 25 bp, Canis familiaris
taagaaaatcccccaactataatgt

SEQ ID NO: 190493 - DNA, 25 bp, Canis familiaris
taataacaaccctaaatgcggaaga

SEQ ID NO: 190494 - DNA, 25 bp, Canis familiaris
taatattccccaaataagcacagaa

SEQ ID NO: 190495 - DNA, 25 bp, Canis familiaris
taattccgcccaaaaagcaccgaga

SEQ ID NO: 190496 - DNA, 25 bp, Canis familiaris
taatttccaccaaaaatcctctaag

SEQ ID NO: 190497 - DNA, 25 bp, Canis familiaris
taattctccaattaaaggccctggg

SEQ ID NO: 190498 - DNA, 25 bp, Canis familiaris
tcaattacagaaaaccaggtccatg

SEQ ID NO: 190499 - DNA, 25 bp, Canis familiaris
tcaagttcaggacacgatggtatgc

SEQ ID NO: 190500 - DNA, 25 bp, Canis familiaris
tcaagtccaggacacattagtctcc

SEQ ID NO: 190501 - DNA, 25 bp, Canis familiaris
tcaagacgggtgcacacagcagatc

SEQ ID NO: 190502 - DNA, 25 bp, Canis familiaris
tcaagactgcatctaacaccaacca

SEQ ID NO: 190503 - DNA, 25 bp, Canis familiaris
tcaacctgcaggaacacacacggcg

SEQ ID NO: 190504 - DNA, 25 bp, Canis familiaris
tcaaccagcagggcacatcttctac

SEQ ID NO: 190505 - DNA, 25 bp, Canis familiaris
taatcatccaggggctggtgaagcc

SEQ ID NO: 190506 - DNA, 25 bp, Canis familiaris
taatcatctctcgtgggtgtgggcg

SEQ ID NO: 190507 - DNA, 25 bp, Canis familiaris
tcaagccaccctggtgtgtgctggg

SEQ ID NO: 190508 - DNA, 25 bp, Canis familiaris
tcaaggatggcctgttgcgtgggga

SEQ ID NO: 190509 - DNA, 25 bp, Canis familiaris
tcaaggatggcctggtccatgggga

SEQ ID NO: 190510 - DNA, 25 bp, Canis familiaris
taagagaggttgggaccgggctggg

SEQ ID NO: 190511 - DNA, 25 bp, Canis familiaris
tactcgggtgaaagaacgggtcgtg

SEQ ID NO: 190512 - DNA, 25 bp, Canis familiaris
tactcagggttttggggtggtggct

SEQ ID NO: 190513 - DNA, 25 bp, Canis familiaris
taatggtggtttggtgtcgtgggga

SEQ ID NO: 190514 - DNA, 25 bp, Canis familiaris
taattgtttctgatggtctttgggc

SEQ ID NO: 190515 - DNA, 25 bp, Canis familiaris
taattggtttttggcttttgttcat

SEQ ID NO: 190516 - DNA, 25 bp, Canis familiaris
taatcgaggggtgctgctttttcct

SEQ ID NO: 190517 - DNA, 25 bp, Canis familiaris
tcaataaaacgtgcttttctctctt

SEQ ID NO: 190518 - DNA, 25 bp, Canis familiaris
tcaataaaacgtgcttttctctctt

SEQ ID NO: 190519 - DNA, 25 bp, Canis familiaris
tcaatataactcctcaggctcttcc

SEQ ID NO: 190520 - DNA, 25 bp, Canis familiaris
tcaaggacccagtcaagcacttctc

SEQ ID NO: 190521 - DNA, 25 bp, Canis familiaris
tcaaggttccaggaacagccctctc

SEQ ID NO: 190522 - DNA, 25 bp, Canis familiaris
tcaagggtgtaggggccaccttctc

SEQ ID NO: 190523 - DNA, 25 bp, Canis familiaris
tcaaggtgtttgatgggatcccacc

SEQ ID NO: 190524 - DNA, 25 bp, Canis familiaris
taaggagtactgtgggataccctgt

SEQ ID NO: 190525 - DNA, 25 bp, Canis familiaris
taaggcctactgaggccaacgcctg

SEQ ID NO: 190526 - DNA, 25 bp, Canis familiaris
taatatttcacgatggcctaccaat

SEQ ID NO: 190527 - DNA, 25 bp, Canis familiaris
taattttcaggaagacccaatccag

SEQ ID NO: 190528 - DNA, 25 bp, Canis familiaris
taaaattcagacacacccaaaaggg

SEQ ID NO: 190529 - DNA, 25 bp, Canis familiaris
taataatctgagtcttcatccaaga

SEQ ID NO: 190530 - DNA, 25 bp, Canis familiaris
taatatatctcagtcttcctacaca

SEQ ID NO: 190531 - DNA, 25 bp, Canis familiaris
taattatctgtgattccttgccttc

SEQ ID NO: 190532 - DNA, 25 bp, Canis familiaris
taattattggctctacattcctcat

SEQ ID NO: 190533 - DNA, 25 bp, Canis familiaris
taattattggctctacattcctcat

SEQ ID NO: 190534 - DNA, 25 bp, Canis familiaris
taattattggctctacattcctcat

SEQ ID NO: 190535 - DNA, 25 bp, Canis familiaris
taattattggctctacattcctcat

SEQ ID NO: 190536 - DNA, 25 bp, Canis familiaris
taattattggctctacattcctcat

SEQ ID NO: 190537 - DNA, 25 bp, Canis familiaris
taattattggctctacattcctcat

SEQ ID NO: 190538 - DNA, 25 bp, Canis familiaris
taattattggctctacattcctcat

SEQ ID NO: 190539 - DNA, 25 bp, Canis familiaris
taattattggctctacattcctcat

SEQ ID NO: 190540 - DNA, 25 bp, Canis familiaris
taattattggctctacattcctcat

SEQ ID NO: 190541 - DNA, 25 bp, Canis familiaris
taattattttcgtaggtactcattt

SEQ ID NO: 190542 - DNA, 25 bp, Canis familiaris
taagtattttgtcaaccatcctttt

SEQ ID NO: 190543 - DNA, 25 bp, Canis familiaris
taattttatttcaccctactgtctt

SEQ ID NO: 190544 - DNA, 25 bp, Canis familiaris
taattttttttctgtctactgtaag

SEQ ID NO: 190545 - DNA, 25 bp, Canis familiaris
taatttctttttcttaagccagaag

SEQ ID NO: 190546 - DNA, 25 bp, Canis familiaris
taatttccttttttgctaagcccag

SEQ ID NO: 190547 - DNA, 25 bp, Canis familiaris
tcaagttcacttgctattttacccc

SEQ ID NO: 190548 - DNA, 25 bp, Canis familiaris
tcaagttacctggctgtctatcttc

SEQ ID NO: 190549 - DNA, 25 bp, Canis familiaris
tcaagtctcttttgttctgtgcttc

SEQ ID NO: 190550 - DNA, 25 bp, Canis familiaris
tcaagtatttgatatcctgtccaca

SEQ ID NO: 190551 - DNA, 25 bp, Canis familiaris
tcaatgttttgcagtcttggcccag

SEQ ID NO: 190552 - DNA, 25 bp, Canis familiaris
tcaagttcttctcttgtactacatg

SEQ ID NO: 190553 - DNA, 25 bp, Canis familiaris
tcaagtgtttctctttgttcacgcg

SEQ ID NO: 190554 - DNA, 25 bp, Canis familiaris
taacgtattggcccattttatggta

SEQ ID NO: 190555 - DNA, 25 bp, Canis familiaris
taatcggtatcccctattcttcgat

SEQ ID NO: 190556 - DNA, 25 bp, Canis familiaris
taatcttgcttagtcctgttttcag

SEQ ID NO: 190557 - DNA, 25 bp, Canis familiaris
taattttataacttgcttttctcct

SEQ ID NO: 190558 - DNA, 25 bp, Canis familiaris
taatcattcatttactttgggcccc

SEQ ID NO: 190559 - DNA, 25 bp, Canis familiaris
taattccatcttacgttcaactcct

SEQ ID NO: 190560 - DNA, 25 bp, Canis familiaris
taattccactttcttctgtatcttt

SEQ ID NO: 190561 - DNA, 25 bp, Canis familiaris
taattccttttctttggatcacaat

SEQ ID NO: 190562 - DNA, 25 bp, Canis familiaris
taattccttcatccattgatggaca

SEQ ID NO: 190563 - DNA, 25 bp, Canis familiaris
taatctccattcagcaatgactaat

SEQ ID NO: 190564 - DNA, 25 bp, Canis familiaris
taattcttctcataaatcattcatc

SEQ ID NO: 190565 - DNA, 25 bp, Canis familiaris
taatcttcttcataggcatgcccat

SEQ ID NO: 190566 - DNA, 25 bp, Canis familiaris
taacgacaatcatcttctggccatt

SEQ ID NO: 190567 - DNA, 25 bp, Canis familiaris
tcaaggaacacagctctctggcttt

SEQ ID NO: 190568 - DNA, 25 bp, Canis familiaris
tcaaggaaagaggttctggactccc

SEQ ID NO: 190569 - DNA, 25 bp, Canis familiaris
taatctgaaataggatttggaccct

SEQ ID NO: 190570 - DNA, 25 bp, Canis familiaris
taccataaatacctttgtacctgtt

SEQ ID NO: 190571 - DNA, 25 bp, Canis familiaris
tacgttaaacgttcatttcaggtct

SEQ ID NO: 190572 - DNA, 25 bp, Canis familiaris
tactgtgtacaatatgtattaaggt

SEQ ID NO: 190573 - DNA, 25 bp, Canis familiaris
tactggcaaccaagattctgttagg

SEQ ID NO: 190574 - DNA, 25 bp, Canis familiaris
taaggaccactttctcagttaggaa

SEQ ID NO: 190575 - DNA, 25 bp, Canis familiaris
taatagcccacttcccaattttgga

SEQ ID NO: 190576 - DNA, 25 bp, Canis familiaris
taattcccatcccttactttaggat

SEQ ID NO: 190577 - DNA, 25 bp, Canis familiaris
taaatcaagttccttccatttccgt

SEQ ID NO: 190578 - DNA, 25 bp, Canis familiaris
taattcggttcacttccaaaagcct

SEQ ID NO: 190579 - DNA, 25 bp, Canis familiaris
taatggggttccaccaattaactgg

SEQ ID NO: 190580 - DNA, 25 bp, Canis familiaris
tagggaagttaccccaacacttctg

SEQ ID NO: 190581 - DNA, 25 bp, Canis familiaris
taggaaagttaccccaacacttctg

SEQ ID NO: 190582 - DNA, 25 bp, Canis familiaris
taggaaagttaccccaacacttctg

SEQ ID NO: 190583 - DNA, 25 bp, Canis familiaris
taggaaagttaccccaacacttctg

SEQ ID NO: 190584 - DNA, 25 bp, Canis familiaris
taggaaagttaccccaacacttctg

SEQ ID NO: 190585 - DNA, 25 bp, Canis familiaris
tatgaaattatttccaaaacagttt

SEQ ID NO: 190586 - DNA, 25 bp, Canis familiaris
taaaatgacagttcgaatacacaaa

SEQ ID NO: 190587 - DNA, 25 bp, Canis familiaris
taataaacatgtctgaagtcaaaaa

SEQ ID NO: 190588 - DNA, 25 bp, Canis familiaris
taataaagctgatagaggtcaaaaa

SEQ ID NO: 190589 - DNA, 25 bp, Canis familiaris
taaaggcagcagtggctcggtaaaa

SEQ ID NO: 190590 - DNA, 25 bp, Canis familiaris
taaagcgcaatttcccggctaaata

SEQ ID NO: 190591 - DNA, 25 bp, Canis familiaris
taatagccatatttccagagccaaa

SEQ ID NO: 190592 - DNA, 25 bp, Canis familiaris
tcaagtcctgcttagccagagccaa

SEQ ID NO: 190593 - DNA, 25 bp, Canis familiaris
tcaagatactcgacagcaaggccct

SEQ ID NO: 190594 - DNA, 25 bp, Canis familiaris
tcaaggcaccatccaagggctttgt

SEQ ID NO: 190595 - DNA, 25 bp, Canis familiaris
tcaaggactccgggtgggtttctgg

SEQ ID NO: 190596 - DNA, 25 bp, Canis familiaris
tcaaggctttcgggggagccccgtg

SEQ ID NO: 190597 - DNA, 25 bp, Canis familiaris
tatgggatttccggaagaccacccg

SEQ ID NO: 190598 - DNA, 25 bp, Canis familiaris
taggggcttaaggaggtctaccagg

SEQ ID NO: 190599 - DNA, 25 bp, Canis familiaris
ttgggggctagagacctaaccgcct

SEQ ID NO: 190600 - DNA, 25 bp, Canis familiaris
taggagggaccagaccaataccgtt

SEQ ID NO: 190601 - DNA, 25 bp, Canis familiaris
taacggggcacacacacagtaccta

SEQ ID NO: 190602 - DNA, 25 bp, Canis familiaris
taaagagggcccgcaagaaccgatt

SEQ ID NO: 190603 - DNA, 25 bp, Canis familiaris
tacacgggagatctccacgaaccgc

SEQ ID NO: 190604 - DNA, 25 bp, Canis familiaris
taatcgagaagtcttcagtccgccc

SEQ ID NO: 190605 - DNA, 25 bp, Canis familiaris
tcaatgggacgtctctcaggtcccc

SEQ ID NO: 190606 - DNA, 25 bp, Canis familiaris
taatggaggcggatccggcaccaac

SEQ ID NO: 190607 - DNA, 25 bp, Canis familiaris
tcaaggttgtggatctgctggctcc

SEQ ID NO: 190608 - DNA, 25 bp, Canis familiaris
tcaaggaagtggctcttcactccgc

SEQ ID NO: 190609 - DNA, 25 bp, Canis familiaris
tcaaggatagtcctattacccccaa

SEQ ID NO: 190610 - DNA, 25 bp, Canis familiaris
taaggacacacgtgtaactgcccca

SEQ ID NO: 190611 - DNA, 25 bp, Canis familiaris
tacacaacgacacaggaaccttcta

SEQ ID NO: 190612 - DNA, 25 bp, Canis familiaris
taatgaactggaaagggaccctcaa

SEQ ID NO: 190613 - DNA, 25 bp, Canis familiaris
ttagaaggcttaaggcggcctacag

SEQ ID NO: 190614 - DNA, 25 bp, Canis familiaris
tcaagaaggcctatgtggaggctaa

SEQ ID NO: 190615 - DNA, 25 bp, Canis familiaris
tcaagaaggcctatgtggaggccaa

SEQ ID NO: 190616 - DNA, 25 bp, Canis familiaris
taataagacctttcctaagtcaact

SEQ ID NO: 190617 - DNA, 25 bp, Canis familiaris
taatagatggctttacctcgtctca

SEQ ID NO: 190618 - DNA, 25 bp, Canis familiaris
taataggccttttcacgctttatgt

SEQ ID NO: 190619 - DNA, 25 bp, Canis familiaris
taattgcttttttcctgtgcttatt

SEQ ID NO: 190620 - DNA, 25 bp, Canis familiaris
taaggttttcttccttcttcatgga

SEQ ID NO: 190621 - DNA, 25 bp, Canis familiaris
taatccctcgttagttgattttgga

SEQ ID NO: 190622 - DNA, 25 bp, Canis familiaris
taaccccggacagtcgatccagggt

SEQ ID NO: 190623 - DNA, 25 bp, Canis familiaris
taatccaggggaaaggcccaggctg

SEQ ID NO: 190624 - DNA, 25 bp, Canis familiaris
tacccagtcggaacaggcaaaccct

SEQ ID NO: 190625 - DNA, 25 bp, Canis familiaris
taatcctgtcggaaagaaggacgaa

SEQ ID NO: 190626 - DNA, 25 bp, Canis familiaris
taaccgtcacctctaagtgaagacc

SEQ ID NO: 190627 - DNA, 25 bp, Canis familiaris
taagccgtgtccagaatttaaacct

SEQ ID NO: 190628 - DNA, 25 bp, Canis familiaris
taagccggaccagggtttagttgag

SEQ ID NO: 190629 - DNA, 25 bp, Canis familiaris
taagttgaaacggttaattgattag

SEQ ID NO: 190630 - DNA, 25 bp, Canis familiaris
taatttttcacgttaacatagttag

SEQ ID NO: 190631 - DNA, 25 bp, Canis familiaris
taagtttccccagttactagtattg

SEQ ID NO: 190632 - DNA, 25 bp, Canis familiaris
taactttgcccctggattatgtata

SEQ ID NO: 190633 - DNA, 25 bp, Canis familiaris
taatctcttgactgataagttggtt

SEQ ID NO: 190634 - DNA, 25 bp, Canis familiaris
taatccctttaatcaatatggcttt

SEQ ID NO: 190635 - DNA, 25 bp, Canis familiaris
taattccacattaaccaacttcttc

SEQ ID NO: 190636 - DNA, 25 bp, Canis familiaris
taatttacttacccaaatctcttct

SEQ ID NO: 190637 - DNA, 25 bp, Canis familiaris
taattgtttggaactaaaccatgtc

SEQ ID NO: 190638 - DNA, 25 bp, Canis familiaris
taattttatgggcccaaacctaatg

SEQ ID NO: 190639 - DNA, 25 bp, Canis familiaris
taattttatggacaatccacctata

SEQ ID NO: 190640 - DNA, 25 bp, Canis familiaris
taattcttaaatcagtcccagcatt

SEQ ID NO: 190641 - DNA, 25 bp, Canis familiaris
taattttaatactactccgcaccta

SEQ ID NO: 190642 - DNA, 25 bp, Canis familiaris
tacttcattagattcacaaccaacc

SEQ ID NO: 190643 - DNA, 25 bp, Canis familiaris
taatacatattttcacgcacaaccc

SEQ ID NO: 190644 - DNA, 25 bp, Canis familiaris
taataaaatctgttcccaggcccaa

SEQ ID NO: 190645 - DNA, 25 bp, Canis familiaris
taataaagattcacccagctccaca

SEQ ID NO: 190646 - DNA, 25 bp, Canis familiaris
tcaaggcaagattcagacccaccga

SEQ ID NO: 190647 - DNA, 25 bp, Canis familiaris
tcaaggatatgcacagaccacccag

SEQ ID NO: 190648 - DNA, 25 bp, Canis familiaris
tcaaggagctgcaaatgccctctct

SEQ ID NO: 190649 - DNA, 25 bp, Canis familiaris
tcaagggtgtggagccttttcagca

SEQ ID NO: 190650 - DNA, 25 bp, Canis familiaris
tcaagaggtgtcaggaccttgctta

SEQ ID NO: 190651 - DNA, 25 bp, Canis familiaris
tcaagatggtgtccggggctggagc

SEQ ID NO: 190652 - DNA, 25 bp, Canis familiaris
tcaagatctgctcttggaacgtgga

SEQ ID NO: 190653 - DNA, 25 bp, Canis familiaris
tcaagtcatgatctctgagggtgtg

SEQ ID NO: 190654 - DNA, 25 bp, Canis familiaris
tcaagtggcatgcactgcagggcat

SEQ ID NO: 190655 - DNA, 25 bp, Canis familiaris
tcaagtagcatccacagcgttgtcg

SEQ ID NO: 190656 - DNA, 25 bp, Canis familiaris
tcaagtgagcacccaggaactcctg

SEQ ID NO: 190657 - DNA, 25 bp, Canis familiaris
tcaagtgagcccagagtacttctcc

SEQ ID NO: 190658 - DNA, 25 bp, Canis familiaris
taaggtctggcaaagtttttccctg

SEQ ID NO: 190659 - DNA, 25 bp, Canis familiaris
taagccttggaatgttttgttttag

SEQ ID NO: 190660 - DNA, 25 bp, Canis familiaris
tcaatgccattgaaacagtttgtgt

SEQ ID NO: 190661 - DNA, 25 bp, Canis familiaris
taatccattataaattgggtctaaa

SEQ ID NO: 190662 - DNA, 25 bp, Canis familiaris
taattctaataaatttactctataa

SEQ ID NO: 190663 - DNA, 25 bp, Canis familiaris
taattgccattatcttcaagtcttg

SEQ ID NO: 190664 - DNA, 25 bp, Canis familiaris
taatgtaccgcatcttccagtttac

SEQ ID NO: 190665 - DNA, 25 bp, Canis familiaris
taattagcccatcatatcatcactg

SEQ ID NO: 190666 - DNA, 25 bp, Canis familiaris
taataagcagccacaatcacatcca

SEQ ID NO: 190667 - DNA, 25 bp, Canis familiaris
taatgacacagccaacactcacaat

SEQ ID NO: 190668 - DNA, 25 bp, Canis familiaris
taatcacacagctgatgcgcttcca

SEQ ID NO: 190669 - DNA, 25 bp, Canis familiaris
tcaatcaacaacaatggtctacgac

SEQ ID NO: 190670 - DNA, 25 bp, Canis familiaris
taatgcccacacaggtctaagttat

SEQ ID NO: 190671 - DNA, 25 bp, Canis familiaris
taatcagtaatcaggaacaaattca

SEQ ID NO: 190672 - DNA, 25 bp, Canis familiaris
taatcagcacacagtggaacacaaa

SEQ ID NO: 190673 - DNA, 25 bp, Canis familiaris
tactgccaacttgtgccctagaaac

SEQ ID NO: 190674 - DNA, 25 bp, Canis familiaris
taataagaccggacctctacaagcc

SEQ ID NO: 190675 - DNA, 25 bp, Canis familiaris
taataaacgcgctcagtaatccaga

SEQ ID NO: 190676 - DNA, 25 bp, Canis familiaris
taataaattcagtgtgtagcttcaa

SEQ ID NO: 190677 - DNA, 25 bp, Canis familiaris
taattaagtggtggtgttctttaag

SEQ ID NO: 190678 - DNA, 25 bp, Canis familiaris
taatttctgttgtagtgttttgtat

SEQ ID NO: 190679 - DNA, 25 bp, Canis familiaris
taattctctgttactgttctttttt

SEQ ID NO: 190680 - DNA, 25 bp, Canis familiaris
taattcctttctctgttcagctgtt

SEQ ID NO: 190681 - DNA, 25 bp, Canis familiaris
taattcctttctctgttcagctgtt

SEQ ID NO: 190682 - DNA, 25 bp, Canis familiaris
tcaatgtcaatttcccattccagct

SEQ ID NO: 190683 - DNA, 25 bp, Canis familiaris
tcaaggaataccgctccaagctcat

SEQ ID NO: 190684 - DNA, 25 bp, Canis familiaris
tcaaggaataccgctccaagctcat

SEQ ID NO: 190685 - DNA, 25 bp, Canis familiaris
tcaaggaataccgctccaagctcat

SEQ ID NO: 190686 - DNA, 25 bp, Canis familiaris
tcaaggacttgtactccacaggctc

SEQ ID NO: 190687 - DNA, 25 bp, Canis familiaris
tcaagtgagctttctgtctacaccc

SEQ ID NO: 190688 - DNA, 25 bp, Canis familiaris
taatgagagctaaccttagctgctt

SEQ ID NO: 190689 - DNA, 25 bp, Canis familiaris
tactggagttacattcgttgaaggc

SEQ ID NO: 190690 - DNA, 25 bp, Canis familiaris
tacttgagattattttgaactaaac

SEQ ID NO: 190691 - DNA, 25 bp, Canis familiaris
tactgtcagtaatattgcaataaac

SEQ ID NO: 190692 - DNA, 25 bp, Canis familiaris
tactgtagagtatgtgtaaacaagc

SEQ ID NO: 190693 - DNA, 25 bp, Canis familiaris
taatgtgaactacggctataaaagc

SEQ ID NO: 190694 - DNA, 25 bp, Canis familiaris
taatcttactgaggactgtacaaac

SEQ ID NO: 190695 - DNA, 25 bp, Canis familiaris
taatctggacccggctgtacatgaa

SEQ ID NO: 190696 - DNA, 25 bp, Canis familiaris
taactgccccaggggctccagaacc

SEQ ID NO: 190697 - DNA, 25 bp, Canis familiaris
taatctgcccagagagtgcaccagc

SEQ ID NO: 190698 - DNA, 25 bp, Canis familiaris
taattctcgcaaatgggacatctcg

SEQ ID NO: 190699 - DNA, 25 bp, Canis familiaris
taatcccagagatggaactccgttt

SEQ ID NO: 190700 - DNA, 25 bp, Canis familiaris
taatttcagacaataaacacccttt

SEQ ID NO: 190701 - DNA, 25 bp, Canis familiaris
ttatcagatcaaaaccaacccggtc

SEQ ID NO: 190702 - DNA, 25 bp, Canis familiaris
taataatcagttttaccctctcgtc

SEQ ID NO: 190703 - DNA, 25 bp, Canis familiaris
tacacgttttgagtacccactggtc

SEQ ID NO: 190704 - DNA, 25 bp, Canis familiaris
taattttcttatgagccccatgatg

SEQ ID NO: 190705 - DNA, 25 bp, Canis familiaris
taattttgatttgcatgtccttgat

SEQ ID NO: 190706 - DNA, 25 bp, Canis familiaris
taatttacatctttcagaccttata

SEQ ID NO: 190707 - DNA, 25 bp, Canis familiaris
taataatgactttccaacctgattg

SEQ ID NO: 190708 - DNA, 25 bp, Canis familiaris
tcaatatagagcacccagaccatgg

SEQ ID NO: 190709 - DNA, 25 bp, Canis familiaris
taatgaaggacctcgaccagtgccg

SEQ ID NO: 190710 - DNA, 25 bp, Canis familiaris
tacagaagggccggtgaaaatggag

SEQ ID NO: 190711 - DNA, 25 bp, Canis familiaris
tacgacggtcctgtgtacgaggtgc

SEQ ID NO: 190712 - DNA, 25 bp, Canis familiaris
taccacgcgtccactatgacgagga

SEQ ID NO: 190713 - DNA, 25 bp, Canis familiaris
taaccggtacggagcattatgtgac

SEQ ID NO: 190714 - DNA, 25 bp, Canis familiaris
taacctgcaatgtggatctgttttc

SEQ ID NO: 190715 - DNA, 25 bp, Canis familiaris
taacctgccatttgctgtcagcatt

SEQ ID NO: 190716 - DNA, 25 bp, Canis familiaris
taatattgaattgggcacagcatgt

SEQ ID NO: 190717 - DNA, 25 bp, Canis familiaris
taatattgaacctatacatgtgtat

SEQ ID NO: 190718 - DNA, 25 bp, Canis familiaris
tactattgattgccctaattttagg

SEQ ID NO: 190719 - DNA, 25 bp, Canis familiaris
taatctcattggacttatttttagg

SEQ ID NO: 190720 - DNA, 25 bp, Canis familiaris
taatcaatcatgtactttagtttaa

SEQ ID NO: 190721 - DNA, 25 bp, Canis familiaris
taatgaccgacacgttggttgaaac

SEQ ID NO: 190722 - DNA, 25 bp, Canis familiaris
taatgaacagaaacttgggcaaaga

SEQ ID NO: 190723 - DNA, 25 bp, Canis familiaris
taatattagacaaccagtagacaaa

SEQ ID NO: 190724 - DNA, 25 bp, Canis familiaris
taatattacaccgcgctagtctaca

SEQ ID NO: 190725 - DNA, 25 bp, Canis familiaris
taatttgacaacgttccagctgctc

SEQ ID NO: 190726 - DNA, 25 bp, Canis familiaris
tcaataggagagacagccatcccac

SEQ ID NO: 190727 - DNA, 25 bp, Canis familiaris
tcaagtgtgagaactgcctcctgcg

SEQ ID NO: 190728 - DNA, 25 bp, Canis familiaris
tcaaggctcgaaagctgtccagcgc

SEQ ID NO: 190729 - DNA, 25 bp, Canis familiaris
tcaaggtgctgaaccgtgcacgccc

SEQ ID NO: 190730 - DNA, 25 bp, Canis familiaris
tcaaggctgagaacgggaagcttgt

SEQ ID NO: 190731 - DNA, 25 bp, Canis familiaris
tcaaggccgagaatgggaagcttgt

SEQ ID NO: 190732 - DNA, 25 bp, Canis familiaris
tcaatggcctggcgggacagctgtg

SEQ ID NO: 190733 - DNA, 25 bp, Canis familiaris
tcaaggccctggagcagatgctgct

SEQ ID NO: 190734 - DNA, 25 bp, Canis familiaris
tcaaggcctatggcttcagctgcga

SEQ ID NO: 190735 - DNA, 25 bp, Canis familiaris
tcaaggctcatgtagcctcgctgga

SEQ ID NO: 190736 - DNA, 25 bp, Canis familiaris
taagcatctcagttttgggccaatt

SEQ ID NO: 190737 - DNA, 25 bp, Canis familiaris
taagctctagacacggtggataggg

SEQ ID NO: 190738 - DNA, 25 bp, Canis familiaris
taatctataatgacctattgcctag

SEQ ID NO: 190739 - DNA, 25 bp, Canis familiaris
taactactgtgaactattgaagaat

SEQ ID NO: 190740 - DNA, 25 bp, Canis familiaris
taacatgaaggctagtgtcagaaaa

SEQ ID NO: 190741 - DNA, 25 bp, Canis familiaris
taatacaagatcaatgttcagcaaa

SEQ ID NO: 190742 - DNA, 25 bp, Canis familiaris
taatacaagcatcttatccaacaag

SEQ ID NO: 190743 - DNA, 25 bp, Canis familiaris
tcaataaacaggctgccatccccag

SEQ ID NO: 190744 - DNA, 25 bp, Canis familiaris
taataatataagcatgccctcccat

SEQ ID NO: 190745 - DNA, 25 bp, Canis familiaris
taattaatagaccacagccccatac

SEQ ID NO: 190746 - DNA, 25 bp, Canis familiaris
taatgctaattaagaccccatcata

SEQ ID NO: 190747 - DNA, 25 bp, Canis familiaris
taatcacaattatacgcgctctcga

SEQ ID NO: 190748 - DNA, 25 bp, Canis familiaris
taataaagtgcactaccatccctga

SEQ ID NO: 190749 - DNA, 25 bp, Canis familiaris
taatcaagatgtgctactttgccta

SEQ ID NO: 190750 - DNA, 25 bp, Canis familiaris
taatcacgttgccatagtctttccc

SEQ ID NO: 190751 - DNA, 25 bp, Canis familiaris
taatactttggtttcatttctcctt

SEQ ID NO: 190752 - DNA, 25 bp, Canis familiaris
taagtctttgggttcctatatcttt

SEQ ID NO: 190753 - DNA, 25 bp, Canis familiaris
taattgcttgtggggtcccctctta

SEQ ID NO: 190754 - DNA, 25 bp, Canis familiaris
tcaatagaggatcgggcccccttaa

SEQ ID NO: 190755 - DNA, 25 bp, Canis familiaris
taatcaggagtcggagaccctctta

SEQ ID NO: 190756 - DNA, 25 bp, Canis familiaris
tcaatcgtagtcatcagtcctttct

SEQ ID NO: 190757 - DNA, 25 bp, Canis familiaris
taatctgtagcatgcatcattcctt

SEQ ID NO: 190758 - DNA, 25 bp, Canis familiaris
taatctgtggcaacctatctctgta

SEQ ID NO: 190759 - DNA, 25 bp, Canis familiaris
taatctgtctgcttcaaacataggt

SEQ ID NO: 190760 - DNA, 25 bp, Canis familiaris
taatgctggccattttaaaggggtt

SEQ ID NO: 190761 - DNA, 25 bp, Canis familiaris
taagtgccctattctaatttggtgg

SEQ ID NO: 190762 - DNA, 25 bp, Canis familiaris
tacgtggccgaacagtttgggtgga

SEQ ID NO: 190763 - DNA, 25 bp, Canis familiaris
tacgtgggccgaacattttgggtgg

SEQ ID NO: 190764 - DNA, 25 bp, Canis familiaris
tacggggaccttatttgggcaaatg

SEQ ID NO: 190765 - DNA, 25 bp, Canis familiaris
taatggggaagcttttgttggccca

SEQ ID NO: 190766 - DNA, 25 bp, Canis familiaris
taattgggtgacttctttctgtcct

SEQ ID NO: 190767 - DNA, 25 bp, Canis familiaris
taattaagcgtcttccttcagctca

SEQ ID NO: 190768 - DNA, 25 bp, Canis familiaris
taattacgagctttcacaagcctcg

SEQ ID NO: 190769 - DNA, 25 bp, Canis familiaris
taagtcacggtaaatacgccctggt

SEQ ID NO: 190770 - DNA, 25 bp, Canis familiaris
taattactttcatatatcgccgttg

SEQ ID NO: 190771 - DNA, 25 bp, Canis familiaris
taattactttaaattctccagcctc

SEQ ID NO: 190772 - DNA, 25 bp, Canis familiaris
taatcataatttcatttccccctgt

SEQ ID NO: 190773 - DNA, 25 bp, Canis familiaris
taatagctatttttttcaccacctt

SEQ ID NO: 190774 - DNA, 25 bp, Canis familiaris
taatgactcattagcttttcccaag

SEQ ID NO: 190775 - DNA, 25 bp, Canis familiaris
tcaatgattggtaccttctccatcc

SEQ ID NO: 190776 - DNA, 25 bp, Canis familiaris
taattagaggtcgagttcctgctcc

SEQ ID NO: 190777 - DNA, 25 bp, Canis familiaris
taatttatggatcctgtctcctgcc

SEQ ID NO: 190778 - DNA, 25 bp, Canis familiaris
taatatttggggaccctgctccttg

SEQ ID NO: 190779 - DNA, 25 bp, Canis familiaris
taatgatttgaggcgtctccttcca

SEQ ID NO: 190780 - DNA, 25 bp, Canis familiaris
taatatattcctgtgtctcgtctac

SEQ ID NO: 190781 - DNA, 25 bp, Canis familiaris
taattttcttgtactccctatactc

SEQ ID NO: 190782 - DNA, 25 bp, Canis familiaris
tcaattttcatgatcccaccttact

SEQ ID NO: 190783 - DNA, 25 bp, Canis familiaris
tcaatcttcttgatcccgcattatt

SEQ ID NO: 190784 - DNA, 25 bp, Canis familiaris
taatttatgtgttcccagagtttct

SEQ ID NO: 190785 - DNA, 25 bp, Canis familiaris
taacgaatgtttctatgaatcatct

SEQ ID NO: 190786 - DNA, 25 bp, Canis familiaris
taattggaattacctgtgcacagca

SEQ ID NO: 190787 - DNA, 25 bp, Canis familiaris
taattaaaatctctggccaaatccc

SEQ ID NO: 190788 - DNA, 25 bp, Canis familiaris
taaggaaggtctctggccaacatcc

SEQ ID NO: 190789 - DNA, 25 bp, Canis familiaris
taaggccgcgttggggtgaggccct

SEQ ID NO: 190790 - DNA, 25 bp, Canis familiaris
tcaaggccagcacataggggagatg

SEQ ID NO: 190791 - DNA, 25 bp, Canis familiaris
taaggaccttaagtgggcaatgggc

SEQ ID NO: 190792 - DNA, 25 bp, Canis familiaris
taaggcactttgcacagggcctggc

SEQ ID NO: 190793 - DNA, 25 bp, Canis familiaris
taaatacttgggacagaggttgctg

SEQ ID NO: 190794 - DNA, 25 bp, Canis familiaris
taagtaccgggaggacctgtctgca

SEQ ID NO: 190795 - DNA, 25 bp, Canis familiaris
taagggccaggccaagttgtgttaa

SEQ ID NO: 190796 - DNA, 25 bp, Canis familiaris
taaggtgtcggtggagttctgctcg

SEQ ID NO: 190797 - DNA, 25 bp, Canis familiaris
taagggtcacagcaaatccatccag

SEQ ID NO: 190798 - DNA, 25 bp, Canis familiaris
taataggtgccacaacattgcagaa

SEQ ID NO: 190799 - DNA, 25 bp, Canis familiaris
tcaaggcggaaggaaatgtcagatt

SEQ ID NO: 190800 - DNA, 25 bp, Canis familiaris
tcaaggcggaaaagtgcttctgagc

SEQ ID NO: 190801 - DNA, 25 bp, Canis familiaris
taatggggtaattctgcttcttcta

SEQ ID NO: 190802 - DNA, 25 bp, Canis familiaris
taattctggtgtttagccttatcta

SEQ ID NO: 190803 - DNA, 25 bp, Canis familiaris
taatgtctgactgtaaactggttac

SEQ ID NO: 190804 - DNA, 25 bp, Canis familiaris
taagtctctctttaaacgtgttccg

SEQ ID NO: 190805 - DNA, 25 bp, Canis familiaris
taactcctcaataaaaaggggcctg

SEQ ID NO: 190806 - DNA, 25 bp, Canis familiaris
taaccccctggttcacaggagaggc

SEQ ID NO: 190807 - DNA, 25 bp, Canis familiaris
tacacccccaagatacggagacatc

SEQ ID NO: 190808 - DNA, 25 bp, Canis familiaris
tatactacccaccccatgggagaaa

SEQ ID NO: 190809 - DNA, 25 bp, Canis familiaris
taatcaaaccacctcctgtggagcc

SEQ ID NO: 190810 - DNA, 25 bp, Canis familiaris
taatcagaaccagctgcttgacttg

SEQ ID NO: 190811 - DNA, 25 bp, Canis familiaris
tcaatgacgccgtcactgtggtcct

SEQ ID NO: 190812 - DNA, 25 bp, Canis familiaris
taatgttgcctgtcacgggcattgt

SEQ ID NO: 190813 - DNA, 25 bp, Canis familiaris
taatttcatctatctggccttttgc

SEQ ID NO: 190814 - DNA, 25 bp, Canis familiaris
taataattcaggtgagccttttcct

SEQ ID NO: 190815 - DNA, 25 bp, Canis familiaris
taataattaggccagggcttttaat

SEQ ID NO: 190816 - DNA, 25 bp, Canis familiaris
tcaataaaggagagcggttcttaaa

SEQ ID NO: 190817 - DNA, 25 bp, Canis familiaris
taatcacaagggatggggactttat

SEQ ID NO: 190818 - DNA, 25 bp, Canis familiaris
tacaaaagggacttcgatacggaat

SEQ ID NO: 190819 - DNA, 25 bp, Canis familiaris
tacggaggtggtcctcgtacgggag

SEQ ID NO: 190820 - DNA, 25 bp, Canis familiaris
taactgagggggacacttgacggga

SEQ ID NO: 190821 - DNA, 25 bp, Canis familiaris
taaatgcatcggaggcttaaggagg

SEQ ID NO: 190822 - DNA, 25 bp, Canis familiaris
taaattatggctggggtgggggagg

SEQ ID NO: 190823 - DNA, 25 bp, Canis familiaris
taaggagatgctggctggctgtggg

SEQ ID NO: 190824 - DNA, 25 bp, Canis familiaris
taagagggctacctctgtggcgggt

SEQ ID NO: 190825 - DNA, 25 bp, Canis familiaris
tacaacaagctagctattagagggt

SEQ ID NO: 190826 - DNA, 25 bp, Canis familiaris
tacatacaaaaattgcattagagca

SEQ ID NO: 190827 - DNA, 25 bp, Canis familiaris
taatatctatataattcatgtggaa

SEQ ID NO: 190828 - DNA, 25 bp, Canis familiaris
taatttcatctccttcatggtcatt

SEQ ID NO: 190829 - DNA, 25 bp, Canis familiaris
taattattcctcttgctggtcacta

SEQ ID NO: 190830 - DNA, 25 bp, Canis familiaris
taatttgtgccttgctggtgtgctt

SEQ ID NO: 190831 - DNA, 25 bp, Canis familiaris
tcaatgatttgcctgtggggcgctc

SEQ ID NO: 190832 - DNA, 25 bp, Canis familiaris
tcaatcatttcttctgtgaggcccc

SEQ ID NO: 190833 - DNA, 25 bp, Canis familiaris
tcaatccacgtggctgtcagatccc

SEQ ID NO: 190834 - DNA, 25 bp, Canis familiaris
tcaatgtcacgtcattcgtgccgcc

SEQ ID NO: 190835 - DNA, 25 bp, Canis familiaris
tcaatccactgactttttggtcacc

SEQ ID NO: 190836 - DNA, 25 bp, Canis familiaris
taatgcccgagtactttgaacccta

SEQ ID NO: 190837 - DNA, 25 bp, Canis familiaris
taatctcgggatatttagacccttt

SEQ ID NO: 190838 - DNA, 25 bp, Canis familiaris
taaccttttttatgcagacccgtct

SEQ ID NO: 190839 - DNA, 25 bp, Canis familiaris
taaccttgatttgactcttccgtgt

SEQ ID NO: 190840 - DNA, 25 bp, Canis familiaris
taaccttcaccttttctataagttg

SEQ ID NO: 190841 - DNA, 25 bp, Canis familiaris
tacacctaatccacgccttaattat

SEQ ID NO: 190842 - DNA, 25 bp, Canis familiaris
tagacgtataccacgctaacctgta

SEQ ID NO: 190843 - DNA, 25 bp, Canis familiaris
taatggttcggggcgctacagcctt

SEQ ID NO: 190844 - DNA, 25 bp, Canis familiaris
taatggtatctgtacctcccaacac

SEQ ID NO: 190845 - DNA, 25 bp, Canis familiaris
tcaatgcagccaagatcatccgcca

SEQ ID NO: 190846 - DNA, 25 bp, Canis familiaris
taagcagccattagcatctactcag

SEQ ID NO: 190847 - DNA, 25 bp, Canis familiaris
taaggctttaacagctcccttttct

SEQ ID NO: 190848 - DNA, 25 bp, Canis familiaris
taatggtgttaggacccgccttatt

SEQ ID NO: 190849 - DNA, 25 bp, Canis familiaris
taaggttgttggtgaagctctttga

SEQ ID NO: 190850 - DNA, 25 bp, Canis familiaris
taagaggtttactgtagctgcccga

SEQ ID NO: 190851 - DNA, 25 bp, Canis familiaris
taaagggttacgagatcgccgtgcc

SEQ ID NO: 190852 - DNA, 25 bp, Canis familiaris
taatgggaggtctgagttccctgtg

SEQ ID NO: 190853 - DNA, 25 bp, Canis familiaris
taaggagggacttaattccgcttca

SEQ ID NO: 190854 - DNA, 25 bp, Canis familiaris
taagggggaggtcatctgcacccca

SEQ ID NO: 190855 - DNA, 25 bp, Canis familiaris
taaggaaatgggacaatctccccga

SEQ ID NO: 190856 - DNA, 25 bp, Canis familiaris
taaggaaaggagcagccgccatgtc

SEQ ID NO: 190857 - DNA, 25 bp, Canis familiaris
taaggctgaaggctgcctgggtggc

SEQ ID NO: 190858 - DNA, 25 bp, Canis familiaris
taaggcagaccgcacacgggtcatg

SEQ ID NO: 190859 - DNA, 25 bp, Canis familiaris
taagttgattcgtacctgggtctga

SEQ ID NO: 190860 - DNA, 25 bp, Canis familiaris
taagttaactgctcctggctttaat

SEQ ID NO: 190861 - DNA, 25 bp, Canis familiaris
taaggtaacatcagccatttttaga

SEQ ID NO: 190862 - DNA, 25 bp, Canis familiaris
taaggaaactccagctcttccggaa

SEQ ID NO: 190863 - DNA, 25 bp, Canis familiaris
taatggaaactgattgcccttctgc

SEQ ID NO: 190864 - DNA, 25 bp, Canis familiaris
taagcttgaaatgttctccctggcg

SEQ ID NO: 190865 - DNA, 25 bp, Canis familiaris
taatcaggaaggttcttcggttggt

SEQ ID NO: 190866 - DNA, 25 bp, Canis familiaris
taagatggttgccctttcaggtggg

SEQ ID NO: 190867 - DNA, 25 bp, Canis familiaris
taagggcttctgatttcggtatagg

SEQ ID NO: 190868 - DNA, 25 bp, Canis familiaris
taatctgggaataccctcggttcga

SEQ ID NO: 190869 - DNA, 25 bp, Canis familiaris
taatgggagccaaccctgcagttac

SEQ ID NO: 190870 - DNA, 25 bp, Canis familiaris
ttaggcatgaccacggagatgtcta

SEQ ID NO: 190871 - DNA, 25 bp, Canis familiaris
taaggcacagccagtatgagacact

SEQ ID NO: 190872 - DNA, 25 bp, Canis familiaris
taaggacctcgacagagcgactcgt

SEQ ID NO: 190873 - DNA, 25 bp, Canis familiaris
taaggaggtcccgggagacctgtgc

SEQ ID NO: 190874 - DNA, 25 bp, Canis familiaris
taatttcgtcccttaagacatcgtt

SEQ ID NO: 190875 - DNA, 25 bp, Canis familiaris
taatttcctcctgtaaccattgttg

SEQ ID NO: 190876 - DNA, 25 bp, Canis familiaris
taagttcctcccctaaggatctaat

SEQ ID NO: 190877 - DNA, 25 bp, Canis familiaris
taagttgttaccatatctcgtgctc

SEQ ID NO: 190878 - DNA, 25 bp, Canis familiaris
taagttttggctcctagcagcctgt

SEQ ID NO: 190879 - DNA, 25 bp, Canis familiaris
taagattctggtgtttggcctcttc

SEQ ID NO: 190880 - DNA, 25 bp, Canis familiaris
taagattctttttgtaagccctagg

SEQ ID NO: 190881 - DNA, 25 bp, Canis familiaris
taattatttattttgcaagcctcgt

SEQ ID NO: 190882 - DNA, 25 bp, Canis familiaris
taatttgggttgttgaacctgctcc

SEQ ID NO: 190883 - DNA, 25 bp, Canis familiaris
taatttggcttctattggacctttt

SEQ ID NO: 190884 - DNA, 25 bp, Canis familiaris
taatttggtggctttttgacatttt

SEQ ID NO: 190885 - DNA, 25 bp, Canis familiaris
taatttgtctcgttttctgggttgt

SEQ ID NO: 190886 - DNA, 25 bp, Canis familiaris
taatatcgttggtcttcctggtgct

SEQ ID NO: 190887 - DNA, 25 bp, Canis familiaris
taatatctggggttcctctgcagga

SEQ ID NO: 190888 - DNA, 25 bp, Canis familiaris
taataatgggtgtatcctgctctat

SEQ ID NO: 190889 - DNA, 25 bp, Canis familiaris
taatacagtgtttctacctctcatt

SEQ ID NO: 190890 - DNA, 25 bp, Canis familiaris
taataatgtagttcagacctcttct

SEQ ID NO: 190891 - DNA, 25 bp, Canis familiaris
taatactgaagtcctggctcctttt

SEQ ID NO: 190892 - DNA, 25 bp, Canis familiaris
taatatcatgagctggtggtccaag

SEQ ID NO: 190893 - DNA, 25 bp, Canis familiaris
taattattttggtcatgatctcagg

SEQ ID NO: 190894 - DNA, 25 bp, Canis familiaris
taagtagtcttttcatgctctagga

SEQ ID NO: 190895 - DNA, 25 bp, Canis familiaris
taagctgattcactgttccctagtt

SEQ ID NO: 190896 - DNA, 25 bp, Canis familiaris
taagctgattcaaatccttggaacg

SEQ ID NO: 190897 - DNA, 25 bp, Canis familiaris
taagctttcaggtcatgctgttggg

SEQ ID NO: 190898 - DNA, 25 bp, Canis familiaris
taagggacaggagctgcttggcccc

SEQ ID NO: 190899 - DNA, 25 bp, Canis familiaris
taaggtgtgacaccctgctttgtgc

SEQ ID NO: 190900 - DNA, 25 bp, Canis familiaris
taatgacttggaccgcgttgctgac

SEQ ID NO: 190901 - DNA, 25 bp, Canis familiaris
taatgagcttggtcgcaggcttctg

SEQ ID NO: 190902 - DNA, 25 bp, Canis familiaris
taaggctggtgtaatggctttggct

SEQ ID NO: 190903 - DNA, 25 bp, Canis familiaris
taacctccatctcaacattgggatt

SEQ ID NO: 190904 - DNA, 25 bp, Canis familiaris
taagccgagactcaactggggtcac

SEQ ID NO: 190905 - DNA, 25 bp, Canis familiaris
taaggcggagcgcaagcggctgcgc

SEQ ID NO: 190906 - DNA, 25 bp, Canis familiaris
taagcagggcggccaagtgcggcaa

SEQ ID NO: 190907 - DNA, 25 bp, Canis familiaris
taatgggacccttgcaatgcggaat

SEQ ID NO: 190908 - DNA, 25 bp, Canis familiaris
taagggtccgatggcccaggacatg

SEQ ID NO: 190909 - DNA, 25 bp, Canis familiaris
taatgacattccagacccaggtctc

SEQ ID NO: 190910 - DNA, 25 bp, Canis familiaris
taataattctcctatccaagtggta

SEQ ID NO: 190911 - DNA, 25 bp, Canis familiaris
taagtagtctcgtagccacgttgaa

SEQ ID NO: 190912 - DNA, 25 bp, Canis familiaris
taagtgcagttaggtgctcggccca

SEQ ID NO: 190913 - DNA, 25 bp, Canis familiaris
taagttggtaagattggcccctaag

SEQ ID NO: 190914 - DNA, 25 bp, Canis familiaris
taatttggaaatgtttgccccctga

SEQ ID NO: 190915 - DNA, 25 bp, Canis familiaris
taatgctcggaatattttgttcaac

SEQ ID NO: 190916 - DNA, 25 bp, Canis familiaris
taatgtcgagtatattttcagccca

SEQ ID NO: 190917 - DNA, 25 bp, Canis familiaris
taatcttggtatttttctcacgtaa

SEQ ID NO: 190918 - DNA, 25 bp, Canis familiaris
taatcgtgactattattgctccatc

SEQ ID NO: 190919 - DNA, 25 bp, Canis familiaris
taatgcagacaccctattgctaccc

SEQ ID NO: 190920 - DNA, 25 bp, Canis familiaris
taatgcagccaccacgaatggccgc

SEQ ID NO: 190921 - DNA, 25 bp, Canis familiaris
taatgccaaccctaatggggggatt

SEQ ID NO: 190922 - DNA, 25 bp, Canis familiaris
taagcagaaacagaatacagtgggt

SEQ ID NO: 190923 - DNA, 25 bp, Canis familiaris
taagccaggaaacatccttctggta

SEQ ID NO: 190924 - DNA, 25 bp, Canis familiaris
taaccaggagtacgtgcgcttcgac

SEQ ID NO: 190925 - DNA, 25 bp, Canis familiaris
tataccagtgacttggggctaacca

SEQ ID NO: 190926 - DNA, 25 bp, Canis familiaris
taaggctgctccttaagcctaacca

SEQ ID NO: 190927 - DNA, 25 bp, Canis familiaris
taaggactccatgaacctgggctaa

SEQ ID NO: 190928 - DNA, 25 bp, Canis familiaris
taaggcccctaaaccagatggccca

SEQ ID NO: 190929 - DNA, 25 bp, Canis familiaris
taaggggctctgatcctaggccccc

SEQ ID NO: 190930 - DNA, 25 bp, Canis familiaris
taagctctgggcacgtataaccccc

SEQ ID NO: 190931 - DNA, 25 bp, Canis familiaris
taagctctgtctgtcctaaatacct

SEQ ID NO: 190932 - DNA, 25 bp, Canis familiaris
taatgttgtctcaccataacacaaa

SEQ ID NO: 190933 - DNA, 25 bp, Canis familiaris
taatacttcatcatccatgccacta

SEQ ID NO: 190934 - DNA, 25 bp, Canis familiaris
taatccttcttacagcacacagagc

SEQ ID NO: 190935 - DNA, 25 bp, Canis familiaris
taaccaattggaccagatacgatga

SEQ ID NO: 190936 - DNA, 25 bp, Canis familiaris
taatggatgccttagcttagcccag

SEQ ID NO: 190937 - DNA, 25 bp, Canis familiaris
taattagccctgcttaatctatgta

SEQ ID NO: 190938 - DNA, 25 bp, Canis familiaris
taatatagcccacttgctactctca

SEQ ID NO: 190939 - DNA, 25 bp, Canis familiaris
taataaaccacttctgagcctcaaa

SEQ ID NO: 190940 - DNA, 25 bp, Canis familiaris
taataatacactctctagctccatc

SEQ ID NO: 190941 - DNA, 25 bp, Canis familiaris
taatgtatacctgtcttgtggaaga

SEQ ID NO: 190942 - DNA, 25 bp, Canis familiaris
taagttagatcgctcccaggagaga

SEQ ID NO: 190943 - DNA, 25 bp, Canis familiaris
taaggtcaaccgtgccatgtaagat

SEQ ID NO: 190944 - DNA, 25 bp, Canis familiaris
taatcccaaccttcccaattggaat

SEQ ID NO: 190945 - DNA, 25 bp, Canis familiaris
taagctgctaaaaccccatgttggc

SEQ ID NO: 190946 - DNA, 25 bp, Canis familiaris
taagctcatcagagtacccggtggg

SEQ ID NO: 190947 - DNA, 25 bp, Canis familiaris
taagctcatcagagtacccggtggg

SEQ ID NO: 190948 - DNA, 25 bp, Canis familiaris
taccttgggggaccgggatggtgag

SEQ ID NO: 190949 - DNA, 25 bp, Canis familiaris
tacaaaggggtatcgggctgcctgc

SEQ ID NO: 190950 - DNA, 25 bp, Canis familiaris
taaggaggtttcttcgggagctctc

SEQ ID NO: 190951 - DNA, 25 bp, Canis familiaris
taacctgggtctgtgaggggctctc

SEQ ID NO: 190952 - DNA, 25 bp, Canis familiaris
taattgctgtcacttgttgggggcc

SEQ ID NO: 190953 - DNA, 25 bp, Canis familiaris
taatgtctgtcctatggaggtgagg

SEQ ID NO: 190954 - DNA, 25 bp, Canis familiaris
taatggcattcaccaggacctgcag

SEQ ID NO: 190955 - DNA, 25 bp, Canis familiaris
taatgccgctgaccagtcacggatg

SEQ ID NO: 190956 - DNA, 25 bp, Canis familiaris
taatccgtaacaccacatggaccaa

SEQ ID NO: 190957 - DNA, 25 bp, Canis familiaris
taatccgtaacaccaatgacaaagg

SEQ ID NO: 190958 - DNA, 25 bp, Canis familiaris
taatctctgctgaaactcagtgcaa

SEQ ID NO: 190959 - DNA, 25 bp, Canis familiaris
taatctctgctttagctctctgaag

SEQ ID NO: 190960 - DNA, 25 bp, Canis familiaris
taacctgctttgctgggacagacta

SEQ ID NO: 190961 - DNA, 25 bp, Canis familiaris
taatcctccttcattgagtcattat

SEQ ID NO: 190962 - DNA, 25 bp, Canis familiaris
taatcccacttcccatggaatggtt

SEQ ID NO: 190963 - DNA, 25 bp, Canis familiaris
taatgctgccctaaacatggagagc

SEQ ID NO: 190964 - DNA, 25 bp, Canis familiaris
taatgccctctagtgataaggacac

SEQ ID NO: 190965 - DNA, 25 bp, Canis familiaris
tagaccataggctattagggacact

SEQ ID NO: 190966 - DNA, 25 bp, Canis familiaris
taataaatggcctttgggtagctaa

SEQ ID NO: 190967 - DNA, 25 bp, Canis familiaris
tagtatacggcctttctggagttaa

SEQ ID NO: 190968 - DNA, 25 bp, Canis familiaris
taataccaggcctcctggtctctgt

SEQ ID NO: 190969 - DNA, 25 bp, Canis familiaris
taatatccagtggctcctcgaacta

SEQ ID NO: 190970 - DNA, 25 bp, Canis familiaris
taattcctgtgggctcttggtgttt

SEQ ID NO: 190971 - DNA, 25 bp, Canis familiaris
taattcttgtggtcactttgtgttt

SEQ ID NO: 190972 - DNA, 25 bp, Canis familiaris
taatgtcaggtgctcatcttgcctt

SEQ ID NO: 190973 - DNA, 25 bp, Canis familiaris
taattaggctgccttgttgcttctg

SEQ ID NO: 190974 - DNA, 25 bp, Canis familiaris
taattaggctccacactcagtgcag

SEQ ID NO: 190975 - DNA, 25 bp, Canis familiaris
taatagcagtgtctacctcaggcag

SEQ ID NO: 190976 - DNA, 25 bp, Canis familiaris
tactagaagtggaaccctggggccg

SEQ ID NO: 190977 - DNA, 25 bp, Canis familiaris
tacgagtagggtgtcctcgagggcc

SEQ ID NO: 190978 - DNA, 25 bp, Canis familiaris
taatgggagggtgtccaggctgggc

SEQ ID NO: 190979 - DNA, 25 bp, Canis familiaris
taagggggagtcgttctggtgtgcc

SEQ ID NO: 190980 - DNA, 25 bp, Canis familiaris
taaatgttcggttgtttggtgaggg

SEQ ID NO: 190981 - DNA, 25 bp, Canis familiaris
taaggtctcgtttttcagagctaga

SEQ ID NO: 190982 - DNA, 25 bp, Canis familiaris
taaggtttgctttcctgacagatta

SEQ ID NO: 190983 - DNA, 25 bp, Canis familiaris
taaggtttcttatgtgatattttaa

SEQ ID NO: 190984 - DNA, 25 bp, Canis familiaris
taatttttttaagttcctctctgag

SEQ ID NO: 190985 - DNA, 25 bp, Canis familiaris
taatttccattgaccaattctccct

SEQ ID NO: 190986 - DNA, 25 bp, Canis familiaris
taattactctgtgcctcaatttcct

SEQ ID NO: 190987 - DNA, 25 bp, Canis familiaris
taattacttggcgtctacacttcct

SEQ ID NO: 190988 - DNA, 25 bp, Canis familiaris
taattatctttgcctgcacacacca

SEQ ID NO: 190989 - DNA, 25 bp, Canis familiaris
taagtagcttctgtggcagcacctt

SEQ ID NO: 190990 - DNA, 25 bp, Canis familiaris
taatgggttctctggcacaacctat

SEQ ID NO: 190991 - DNA, 25 bp, Canis familiaris
taagggatttatcaccatgcctcga

SEQ ID NO: 190992 - DNA, 25 bp, Canis familiaris
taatgtggacgtgaaccagcaccca

SEQ ID NO: 190993 - DNA, 25 bp, Canis familiaris
taatggccaaggccaaccaaaccct

SEQ ID NO: 190994 - DNA, 25 bp, Canis familiaris
taaggccgagtgccatttcaccaac

SEQ ID NO: 190995 - DNA, 25 bp, Canis familiaris
taaggccgagtgccatttcaccaac

SEQ ID NO: 190996 - DNA, 25 bp, Canis familiaris
taagtgcacaggtgccttacaccac

SEQ ID NO: 190997 - DNA, 25 bp, Canis familiaris
taagtacaggctgctgctctaaaag

SEQ ID NO: 190998 - DNA, 25 bp, Canis familiaris
taagtggaatctttcgtaatacacc

SEQ ID NO: 190999 - DNA, 25 bp, Canis familiaris
taattttatctcccctattatcacc

SEQ ID NO: 191000 - DNA, 25 bp, Canis familiaris
taatgtttatcacacctttctctca

SEQ ID NO: 191001 - DNA, 25 bp, Canis familiaris
taatgtcttccacaggttcatccat

SEQ ID NO: 191002 - DNA, 25 bp, Canis familiaris
taagcacttctaccgaaaaccttct

SEQ ID NO: 191003 - DNA, 25 bp, Canis familiaris
taatcatctatttgttaaaacctgt

SEQ ID NO: 191004 - DNA, 25 bp, Canis familiaris
taatctctctttttttagaacttgg

SEQ ID NO: 191005 - DNA, 25 bp, Canis familiaris
taagccttccactgttagagatttg

SEQ ID NO: 191006 - DNA, 25 bp, Canis familiaris
taacctctaacccctgctgagaggg

SEQ ID NO: 191007 - DNA, 25 bp, Canis familiaris
taagccccaagcctgctagtaaggg

SEQ ID NO: 191008 - DNA, 25 bp, Canis familiaris
taagcctcgacacgtgtaacacgtg

SEQ ID NO: 191009 - DNA, 25 bp, Canis familiaris
taagcatcccccaattaattccatg

SEQ ID NO: 191010 - DNA, 25 bp, Canis familiaris
taatcaccaccaatctaattctcac

SEQ ID NO: 191011 - DNA, 25 bp, Canis familiaris
taatcccaccaatcaactatacact

SEQ ID NO: 191012 - DNA, 25 bp, Canis familiaris
taacccaaccaattacttgagagct

SEQ ID NO: 191013 - DNA, 25 bp, Canis familiaris
taaccaaatctgctcaaattgcggg

SEQ ID NO: 191014 - DNA, 25 bp, Canis familiaris
taagccatttcctcactgatttgtg

SEQ ID NO: 191015 - DNA, 25 bp, Canis familiaris
taagcaattttattagtgttactga

SEQ ID NO: 191016 - DNA, 25 bp, Canis familiaris
taagcaattcaatgttttggacaac

SEQ ID NO: 191017 - DNA, 25 bp, Canis familiaris
taatcagattgctgtgttctttaga

SEQ ID NO: 191018 - DNA, 25 bp, Canis familiaris
taatcatatttcttgtttttggaca

SEQ ID NO: 191019 - DNA, 25 bp, Canis familiaris
taatcactttaaataccttggcata

SEQ ID NO: 191020 - DNA, 25 bp, Canis familiaris
taatcccttcattacaacggagaaa

SEQ ID NO: 191021 - DNA, 25 bp, Canis familiaris
taagccctggtccaaacgctgggaa

SEQ ID NO: 191022 - DNA, 25 bp, Canis familiaris
taacccctagcctaacaatgggcaa

SEQ ID NO: 191023 - DNA, 25 bp, Canis familiaris
tagacccacccttggaaatggccat

SEQ ID NO: 191024 - DNA, 25 bp, Canis familiaris
taacccaagccaacagaaagccctc

SEQ ID NO: 191025 - DNA, 25 bp, Canis familiaris
taagggcaggtttctcaacacccct

SEQ ID NO: 191026 - DNA, 25 bp, Canis familiaris
tatagggacagtcacgaacccacct

SEQ ID NO: 191027 - DNA, 25 bp, Canis familiaris
taagggcacagtcacgatgcacctg

SEQ ID NO: 191028 - DNA, 25 bp, Canis familiaris
taaggtccagtgacctacctgcatc

SEQ ID NO: 191029 - DNA, 25 bp, Canis familiaris
taatgttactgtatgctacctctcc

SEQ ID NO: 191030 - DNA, 25 bp, Canis familiaris
taagtatttgtcagcatccttttgc

SEQ ID NO: 191031 - DNA, 25 bp, Canis familiaris
taagttctcttttatccttgtgtct

SEQ ID NO: 191032 - DNA, 25 bp, Canis familiaris
taaggcaatttttgcatcccccttt

SEQ ID NO: 191033 - DNA, 25 bp, Canis familiaris
taagtggatttaactctccccaggt

SEQ ID NO: 191034 - DNA, 25 bp, Canis familiaris
taatgggttccaaccattcctcatc

SEQ ID NO: 191035 - DNA, 25 bp, Canis familiaris
taataggaattgaccttaccatcac

SEQ ID NO: 191036 - DNA, 25 bp, Canis familiaris
taaataacttccctaggcacatgcc

SEQ ID NO: 191037 - DNA, 25 bp, Canis familiaris
taagaaaatctctggatgaacatgc

SEQ ID NO: 191038 - DNA, 25 bp, Canis familiaris
taaggaacctcaactggacacagca

SEQ ID NO: 191039 - DNA, 25 bp, Canis familiaris
taatgcacatgccctaactgctaca

SEQ ID NO: 191040 - DNA, 25 bp, Canis familiaris
taatcatcagggaaacacatatcaa

SEQ ID NO: 191041 - DNA, 25 bp, Canis familiaris
taacttgcgcagaaaacaagatgag

SEQ ID NO: 191042 - DNA, 25 bp, Canis familiaris
taagtgtccgacaatagatgaatgg

SEQ ID NO: 191043 - DNA, 25 bp, Canis familiaris
taagttgccgtgggagaagggatta

SEQ ID NO: 191044 - DNA, 25 bp, Canis familiaris
taagtactcggccaagacgggtctc

SEQ ID NO: 191045 - DNA, 25 bp, Canis familiaris
taagtgtcctaccaaagtggtcctc

SEQ ID NO: 191046 - DNA, 25 bp, Canis familiaris
taagtccctcagcaaggggccaagc

SEQ ID NO: 191047 - DNA, 25 bp, Canis familiaris
taaggccctgggaggattgtgtagg

SEQ ID NO: 191048 - DNA, 25 bp, Canis familiaris
taaggcctttggctgtgtgggtggc

SEQ ID NO: 191049 - DNA, 25 bp, Canis familiaris
taaggttgttgttcttgtgttgttg

SEQ ID NO: 191050 - DNA, 25 bp, Canis familiaris
taagggtgggtttgatgtgcgcgta

SEQ ID NO: 191051 - DNA, 25 bp, Canis familiaris
taacggagggtgcatcggctcgtaa

SEQ ID NO: 191052 - DNA, 25 bp, Canis familiaris
taagcatgctggcgggatctggtcg

SEQ ID NO: 191053 - DNA, 25 bp, Canis familiaris
tacacagcatggccagaggacaccc

SEQ ID NO: 191054 - DNA, 25 bp, Canis familiaris
taatcatgcagctggactgtcaccc

SEQ ID NO: 191055 - DNA, 25 bp, Canis familiaris
taatcagagctgcagccgtcactag

SEQ ID NO: 191056 - DNA, 25 bp, Canis familiaris
taatatccgtggctgtcatctcatg

SEQ ID NO: 191057 - DNA, 25 bp, Canis familiaris
taactccaggagcttgaccataata

SEQ ID NO: 191058 - DNA, 25 bp, Canis familiaris
taacttcaggagcctcggcctggaa

SEQ ID NO: 191059 - DNA, 25 bp, Canis familiaris
taagcttcgctgtgtcggagcttga

SEQ ID NO: 191060 - DNA, 25 bp, Canis familiaris
taagtctgggcttgcccaagctcca

SEQ ID NO: 191061 - DNA, 25 bp, Canis familiaris
taagagatgaggcgcaccaagcacg

SEQ ID NO: 191062 - DNA, 25 bp, Canis familiaris
taagattagaggccatcaccacacg

SEQ ID NO: 191063 - DNA, 25 bp, Canis familiaris
taagtggaattccatcaccaccacc

SEQ ID NO: 191064 - DNA, 25 bp, Canis familiaris
taatggaacataaatacacacacac

SEQ ID NO: 191065 - DNA, 25 bp, Canis familiaris
taaggaaaaacttgaagccaccata

SEQ ID NO: 191066 - DNA, 25 bp, Canis familiaris
taatgggaaaccccaggccatgcct

SEQ ID NO: 191067 - DNA, 25 bp, Canis familiaris
taagggagcttctccagagccaggc

SEQ ID NO: 191068 - DNA, 25 bp, Canis familiaris
taaggtggcgtcccatagactgaag

SEQ ID NO: 191069 - DNA, 25 bp, Canis familiaris
taaggctggctgtggtagacggcat

SEQ ID NO: 191070 - DNA, 25 bp, Canis familiaris
taaggatgactctggtcagagatac

SEQ ID NO: 191071 - DNA, 25 bp, Canis familiaris
taaggcaacgaggtgatgatcagta

SEQ ID NO: 191072 - DNA, 25 bp, Canis familiaris
taacgaacgagactctggcatgcta

SEQ ID NO: 191073 - DNA, 25 bp, Canis familiaris
taatctggtgtgacattctggatgt

SEQ ID NO: 191074 - DNA, 25 bp, Canis familiaris
taatctcagtggactcttggcttct

SEQ ID NO: 191075 - DNA, 25 bp, Canis familiaris
taatcaggatggactcccagcttca

SEQ ID NO: 191076 - DNA, 25 bp, Canis familiaris
taatgcagtgcacatgttcccatct

SEQ ID NO: 191077 - DNA, 25 bp, Canis familiaris
taatgactgctggagctgtcgcgtg

SEQ ID NO: 191078 - DNA, 25 bp, Canis familiaris
taatggtgtggggctcctagctgat

SEQ ID NO: 191079 - DNA, 25 bp, Canis familiaris
taatgttttgtggcctctgtatgtg

SEQ ID NO: 191080 - DNA, 25 bp, Canis familiaris
taataactagtgtctctctgtgtgg

SEQ ID NO: 191081 - DNA, 25 bp, Canis familiaris
taatcacctatctactctatttctg

SEQ ID NO: 191082 - DNA, 25 bp, Canis familiaris
taatacctactaggtccatccatgt

SEQ ID NO: 191083 - DNA, 25 bp, Canis familiaris
taactgcaataaactggccccatgt

SEQ ID NO: 191084 - DNA, 25 bp, Canis familiaris
taactaaaaaagggcacctgctact

SEQ ID NO: 191085 - DNA, 25 bp, Canis familiaris
taactcctagggaggcccttggctt

SEQ ID NO: 191086 - DNA, 25 bp, Canis familiaris
taaagcctgaggggggtgcctggga

SEQ ID NO: 191087 - DNA, 25 bp, Canis familiaris
taaggccatgcataggggtccgatg

SEQ ID NO: 191088 - DNA, 25 bp, Canis familiaris
taagctttgcagtaggtcgtccagg

SEQ ID NO: 191089 - DNA, 25 bp, Canis familiaris
taacgtgtaattcctgcatgtccag

SEQ ID NO: 191090 - DNA, 25 bp, Canis familiaris
taatgcttggaattttgatgtctca

SEQ ID NO: 191091 - DNA, 25 bp, Canis familiaris
taatatctgtgtctgtctgttctaa

SEQ ID NO: 191092 - DNA, 25 bp, Canis familiaris
taacctgtctcacgacggtctaaac

SEQ ID NO: 191093 - DNA, 25 bp, Canis familiaris
taaattctctagtagccgtgctaaa

SEQ ID NO: 191094 - DNA, 25 bp, Canis familiaris
taaggaatcttgttccgtctgaaac

SEQ ID NO: 191095 - DNA, 25 bp, Canis familiaris
taaggacacatagacaagttgacaa

SEQ ID NO: 191096 - DNA, 25 bp, Canis familiaris
taagcccatcaagaaagtcatggtg

SEQ ID NO: 191097 - DNA, 25 bp, Canis familiaris
taaggatgcacaacacaaaccaggt

SEQ ID NO: 191098 - DNA, 25 bp, Canis familiaris
taatggctgccatgctcaagaccaa

SEQ ID NO: 191099 - DNA, 25 bp, Canis familiaris
taatgatcaccatgccatctgtaaa

SEQ ID NO: 191100 - DNA, 25 bp, Canis familiaris
taatgtccaaatggctagctacata

SEQ ID NO: 191101 - DNA, 25 bp, Canis familiaris
taatgggcaaagactatggatcgag

SEQ ID NO: 191102 - DNA, 25 bp, Canis familiaris
taagggcatctaaccagggctgcag

SEQ ID NO: 191103 - DNA, 25 bp, Canis familiaris
taagggcttcattcctggttgtgtc

SEQ ID NO: 191104 - DNA, 25 bp, Canis familiaris
taatggttacttgctcgtgcgttgc

SEQ ID NO: 191105 - DNA, 25 bp, Canis familiaris
taacgttcctgagcacgtctgtagc

SEQ ID NO: 191106 - DNA, 25 bp, Canis familiaris
taatcatgttatcagccctttgttg

SEQ ID NO: 191107 - DNA, 25 bp, Canis familiaris
taatgatgttattaccgccctgtta

SEQ ID NO: 191108 - DNA, 25 bp, Canis familiaris
taagttgccatctaatacccgttat

SEQ ID NO: 191109 - DNA, 25 bp, Canis familiaris
taagtcctcattctaccacatgtta

SEQ ID NO: 191110 - DNA, 25 bp, Canis familiaris
taatccctctacctaaacatgttta

SEQ ID NO: 191111 - DNA, 25 bp, Canis familiaris
taatagcctttaataaagccattta

SEQ ID NO: 191112 - DNA, 25 bp, Canis familiaris
taatactatttatgacaccgttaaa

SEQ ID NO: 191113 - DNA, 25 bp, Canis familiaris
taatcactttttttatctctttaga

SEQ ID NO: 191114 - DNA, 25 bp, Canis familiaris
taatatcctttcttcattttttcca

SEQ ID NO: 191115 - DNA, 25 bp, Canis familiaris
taatatattttctaatgcttcttca

SEQ ID NO: 191116 - DNA, 25 bp, Canis familiaris
taatatttttcttgcacttcttttt

SEQ ID NO: 191117 - DNA, 25 bp, Canis familiaris
taatcattggtgtcggcttcctttt

SEQ ID NO: 191118 - DNA, 25 bp, Canis familiaris
taatcttgactcttggtttcttatt

SEQ ID NO: 191119 - DNA, 25 bp, Canis familiaris
taatctcttctcttgtgtatttttg

SEQ ID NO: 191120 - DNA, 25 bp, Canis familiaris
taagtattgctgcttggtttttttt

SEQ ID NO: 191121 - DNA, 25 bp, Canis familiaris
taagttgggactgagcttttctttt

SEQ ID NO: 191122 - DNA, 25 bp, Canis familiaris
ttatacaaggacacactttcctttt

SEQ ID NO: 191123 - DNA, 25 bp, Canis familiaris
tttaaaggggctctcccatctttat

SEQ ID NO: 191124 - DNA, 25 bp, Canis familiaris
taatatcaaggagctcctgcccact

SEQ ID NO: 191125 - DNA, 25 bp, Canis familiaris
taatacactctagttccatccacac

SEQ ID NO: 191126 - DNA, 25 bp, Canis familiaris
taataccctttaggtccatccatgt

SEQ ID NO: 191127 - DNA, 25 bp, Canis familiaris
taataccctttagtttcatccacat

SEQ ID NO: 191128 - DNA, 25 bp, Canis familiaris
taataacctttttctgtcttcaaca

SEQ ID NO: 191129 - DNA, 25 bp, Canis familiaris
taatcaacctaaatttggtgttcaa

SEQ ID NO: 191130 - DNA, 25 bp, Canis familiaris
taatcataatcatcctttttttaaa

SEQ ID NO: 191131 - DNA, 25 bp, Canis familiaris
taatgtaaatctcttactttataaa

SEQ ID NO: 191132 - DNA, 25 bp, Canis familiaris
taatatgacaatgacttactttcaa

SEQ ID NO: 191133 - DNA, 25 bp, Canis familiaris
taatctgccagacactataccttca

SEQ ID NO: 191134 - DNA, 25 bp, Canis familiaris
taatcctcagtctactaatccttaa

SEQ ID NO: 191135 - DNA, 25 bp, Canis familiaris
taagatctagcctcaaatgcccaga

SEQ ID NO: 191136 - DNA, 25 bp, Canis familiaris
taagtctcagaatacaacctcacac

SEQ ID NO: 191137 - DNA, 25 bp, Canis familiaris
taagtcccattaagcagaccggcat

SEQ ID NO: 191138 - DNA, 25 bp, Canis familiaris
taagtccctggagatgtaatgcaca

SEQ ID NO: 191139 - DNA, 25 bp, Canis familiaris
taagcacgtgggaaatgcaacatgt

SEQ ID NO: 191140 - DNA, 25 bp, Canis familiaris
taagaatatgggaaacactagtcac

SEQ ID NO: 191141 - DNA, 25 bp, Canis familiaris
taagatatggttaaaaatgtgcgct

SEQ ID NO: 191142 - DNA, 25 bp, Canis familiaris
taagtatgagtctatcatccctgac

SEQ ID NO: 191143 - DNA, 25 bp, Canis familiaris
taatgtctggtgtcatgcagcctgc

SEQ ID NO: 191144 - DNA, 25 bp, Canis familiaris
taatgctgctgtacctcagtctgaa

SEQ ID NO: 191145 - DNA, 25 bp, Canis familiaris
taagcctgctcaggccaggctgcac

SEQ ID NO: 191146 - DNA, 25 bp, Canis familiaris
taaggcccagcaggggctggccaac

SEQ ID NO: 191147 - DNA, 25 bp, Canis familiaris
taaggtgcggcagggtctggggagc

SEQ ID NO: 191148 - DNA, 25 bp, Canis familiaris
taacatgtgggtgggtcctgggagg

SEQ ID NO: 191149 - DNA, 25 bp, Canis familiaris
taactgggtggtcaccgtggctgtg

SEQ ID NO: 191150 - DNA, 25 bp, Canis familiaris
taaccgtgggtacacgtgcgtgtgt

SEQ ID NO: 191151 - DNA, 25 bp, Canis familiaris
taagccgtggttggcctttggtggt

SEQ ID NO: 191152 - DNA, 25 bp, Canis familiaris
taaggtgctttcgttttttgtgagt

SEQ ID NO: 191153 - DNA, 25 bp, Canis familiaris
taatgttggttttttttctgatagt

SEQ ID NO: 191154 - DNA, 25 bp, Canis familiaris
taaggacgtttctttgttcgatctt

SEQ ID NO: 191155 - DNA, 25 bp, Canis familiaris
taaggacttccttttgttcttcaag

SEQ ID NO: 191156 - DNA, 25 bp, Canis familiaris
taatgaagctacgtttctttcttta

SEQ ID NO: 191157 - DNA, 25 bp, Canis familiaris
taatagtatactgacatctttctgt

SEQ ID NO: 191158 - DNA, 25 bp, Canis familiaris
taacctctacatgtacatctacttc

SEQ ID NO: 191159 - DNA, 25 bp, Canis familiaris
taatgttctccatttacacttctca

SEQ ID NO: 191160 - DNA, 25 bp, Canis familiaris
taagcatttccaggtagccatccta

SEQ ID NO: 191161 - DNA, 25 bp, Canis familiaris
taagcttttatatagcaaccattgc

SEQ ID NO: 191162 - DNA, 25 bp, Canis familiaris
taagggttactaaagccctggctct

SEQ ID NO: 191163 - DNA, 25 bp, Canis familiaris
taagggttcctagatcgcacaggct

SEQ ID NO: 191164 - DNA, 25 bp, Canis familiaris
taaggacttctttttctgaccagta

SEQ ID NO: 191165 - DNA, 25 bp, Canis familiaris
taaggtctttcttttctaactatga

SEQ ID NO: 191166 - DNA, 25 bp, Canis familiaris
taaggtttcatcttcctctgagaac

SEQ ID NO: 191167 - DNA, 25 bp, Canis familiaris
taagaattctcacttcttctgccaa

SEQ ID NO: 191168 - DNA, 25 bp, Canis familiaris
taatctcattctctttcgatgtcaa

SEQ ID NO: 191169 - DNA, 25 bp, Canis familiaris
taatgccacttactttgctgcttga

SEQ ID NO: 191170 - DNA, 25 bp, Canis familiaris
taaggcagctcacctttgtgctgaa

SEQ ID NO: 191171 - DNA, 25 bp, Canis familiaris
taagtgagtcatctaggtagacccc

SEQ ID NO: 191172 - DNA, 25 bp, Canis familiaris
taaggattgcattcatatttacaca

SEQ ID NO: 191173 - DNA, 25 bp, Canis familiaris
taagtgtctgcttcagcttggggca

SEQ ID NO: 191174 - DNA, 25 bp, Canis familiaris
taaggctgcagtacacataggggtg

SEQ ID NO: 191175 - DNA, 25 bp, Canis familiaris
taacctgcctgcaaccaaggggagg

SEQ ID NO: 191176 - DNA, 25 bp, Canis familiaris
taacctgccgcgtcggtggcaggga

SEQ ID NO: 191177 - DNA, 25 bp, Canis familiaris
taagcctttggacactggcacagcc

SEQ ID NO: 191178 - DNA, 25 bp, Canis familiaris
taagttggtggatacacgaccccgg

SEQ ID NO: 191179 - DNA, 25 bp, Canis familiaris
taagttggtggctcagggatgctca

SEQ ID NO: 191180 - DNA, 25 bp, Canis familiaris
taagattagggaccaaggacatatg

SEQ ID NO: 191181 - DNA, 25 bp, Canis familiaris
taagacttgaggtttcggaattgag

SEQ ID NO: 191182 - DNA, 25 bp, Canis familiaris
taaggattcagggtctcgttataga

SEQ ID NO: 191183 - DNA, 25 bp, Canis familiaris
taaggggcgcgtttggttatgaaag

SEQ ID NO: 191184 - DNA, 25 bp, Canis familiaris
taatgttgacggctttgtgattgat

SEQ ID NO: 191185 - DNA, 25 bp, Canis familiaris
taatccttctggctgcattggttac

SEQ ID NO: 191186 - DNA, 25 bp, Canis familiaris
taatcttattctctgtgtatgtgta

SEQ ID NO: 191187 - DNA, 25 bp, Canis familiaris
taatctgtatttccgtgtgtgtgtg

SEQ ID NO: 191188 - DNA, 25 bp, Canis familiaris
taatgatgctttatctgggtctgga

SEQ ID NO: 191189 - DNA, 25 bp, Canis familiaris
taatgtgctttacgcgaggttccag

SEQ ID NO: 191190 - DNA, 25 bp, Canis familiaris
taaggtcattatcctggagtcccag

SEQ ID NO: 191191 - DNA, 25 bp, Canis familiaris
taaggtcatttcttggggtgcctcg

SEQ ID NO: 191192 - DNA, 25 bp, Canis familiaris
taaggccatttccttcgttatcaca

SEQ ID NO: 191193 - DNA, 25 bp, Canis familiaris
taatgggatttgcctcttttgactc

SEQ ID NO: 191194 - DNA, 25 bp, Canis familiaris
taatgcgttgtttgtgtgttttcca

SEQ ID NO: 191195 - DNA, 25 bp, Canis familiaris
taatggttgctccagttcttctact

SEQ ID NO: 191196 - DNA, 25 bp, Canis familiaris
taatgtgttctgcagttatttcccc

SEQ ID NO: 191197 - DNA, 25 bp, Canis familiaris
taatgttcttgtttgctcttttcac

SEQ ID NO: 191198 - DNA, 25 bp, Canis familiaris
taatctccttaatggctttatgcta

SEQ ID NO: 191199 - DNA, 25 bp, Canis familiaris
taatcctctacctggttttgtgacc

SEQ ID NO: 191200 - DNA, 25 bp, Canis familiaris
taatcccaactcttggcttatggta

SEQ ID NO: 191201 - DNA, 25 bp, Canis familiaris
taatctccaatttgcatactttgct

SEQ ID NO: 191202 - DNA, 25 bp, Canis familiaris
taatcccaagttcccaattgcactg

SEQ ID NO: 191203 - DNA, 25 bp, Canis familiaris
taatcctcacagtataccagcaaat

SEQ ID NO: 191204 - DNA, 25 bp, Canis familiaris
taatccaccagcttgattcacggct

SEQ ID NO: 191205 - DNA, 25 bp, Canis familiaris
taataactggattattcccctctgc

SEQ ID NO: 191206 - DNA, 25 bp, Canis familiaris
taataaatggtctatttcttttcaa

SEQ ID NO: 191207 - DNA, 25 bp, Canis familiaris
taataaagcgtcttttttccaccag

SEQ ID NO: 191208 - DNA, 25 bp, Canis familiaris
taagtagggacttttattccatcct

SEQ ID NO: 191209 - DNA, 25 bp, Canis familiaris
taagctgcaggcgacaacttcgtcc

SEQ ID NO: 191210 - DNA, 25 bp, Canis familiaris
taaggcaagcctcagtttgctcagc

SEQ ID NO: 191211 - DNA, 25 bp, Canis familiaris
taaggcagcaccctgatatttgtcc

SEQ ID NO: 191212 - DNA, 25 bp, Canis familiaris
taatccagaaccactttgtagatga

SEQ ID NO: 191213 - DNA, 25 bp, Canis familiaris
taatccaacctagcacttttgatga

SEQ ID NO: 191214 - DNA, 25 bp, Canis familiaris
taatccccttaatttttctatcaat

SEQ ID NO: 191215 - DNA, 25 bp, Canis familiaris
taacccttaccttttaatatctgtg

SEQ ID NO: 191216 - DNA, 25 bp, Canis familiaris
taatccctatcacctattttacata

SEQ ID NO: 191217 - DNA, 25 bp, Canis familiaris
taatccccatgcacatacttttcag

SEQ ID NO: 191218 - DNA, 25 bp, Canis familiaris
taatccagtagctgatactcttata

SEQ ID NO: 191219 - DNA, 25 bp, Canis familiaris
taatccaaaaagtcgcttgccatca

SEQ ID NO: 191220 - DNA, 25 bp, Canis familiaris
tagatccaagaatgacctgtctcag

SEQ ID NO: 191221 - DNA, 25 bp, Canis familiaris
taatccgagtacccactgagctatt

SEQ ID NO: 191222 - DNA, 25 bp, Canis familiaris
taatcacggtgtaccctttattttg

SEQ ID NO: 191223 - DNA, 25 bp, Canis familiaris
taacccgtggacccaaaaatgtgct

SEQ ID NO: 191224 - DNA, 25 bp, Canis familiaris
taatccccgggaccaaatcgagttg

SEQ ID NO: 191225 - DNA, 25 bp, Canis familiaris
taacccacggaaatacctgcgcagt

SEQ ID NO: 191226 - DNA, 25 bp, Canis familiaris
taatctcaacgaacataaccaccac

SEQ ID NO: 191227 - DNA, 25 bp, Canis familiaris
tacacatgcacacaaaaccaaccaa

SEQ ID NO: 191228 - DNA, 25 bp, Canis familiaris
taaccagcaaaatgacccaccaatg

SEQ ID NO: 191229 - DNA, 25 bp, Canis familiaris
tacaccagaaagagaaaagcaccag

SEQ ID NO: 191230 - DNA, 25 bp, Canis familiaris
taaacatggaacagcaaccacacgc

SEQ ID NO: 191231 - DNA, 25 bp, Canis familiaris
tagcaaagggacagaagcccccgcc

SEQ ID NO: 191232 - DNA, 25 bp, Canis familiaris
tagaccgtcgacagaacctattcgc

SEQ ID NO: 191233 - DNA, 25 bp, Canis familiaris
taagcacttacctggtggctttcgc

SEQ ID NO: 191234 - DNA, 25 bp, Canis familiaris
taagcagttcccggggacttgcttc

SEQ ID NO: 191235 - DNA, 25 bp, Canis familiaris
taagagatgtttcccaggacttttg

SEQ ID NO: 191236 - DNA, 25 bp, Canis familiaris
taagagagtgttcccaggacttttg

SEQ ID NO: 191237 - DNA, 25 bp, Canis familiaris
ttgggggtagccttggaattaatgg

SEQ ID NO: 191238 - DNA, 25 bp, Canis familiaris
ttgggaaggacctggaactccacct

SEQ ID NO: 191239 - DNA, 25 bp, Canis familiaris
taagggaggtcgcgagacatccccc

SEQ ID NO: 191240 - DNA, 25 bp, Canis familiaris
taaggggagatccctaacgtccagg

SEQ ID NO: 191241 - DNA, 25 bp, Canis familiaris
tacgtgaggaatcccaagggcccgg

SEQ ID NO: 191242 - DNA, 25 bp, Canis familiaris
tacagagaggcactacccaaaccct

SEQ ID NO: 191243 - DNA, 25 bp, Canis familiaris
taaggacagctgaagcccaggagcc

SEQ ID NO: 191244 - DNA, 25 bp, Canis familiaris
taatgggcagccaatccacgctgag

SEQ ID NO: 191245 - DNA, 25 bp, Canis familiaris
taagagccagggtctgccgatagta

SEQ ID NO: 191246 - DNA, 25 bp, Canis familiaris
taaggccaggccttctaatttcaaa

SEQ ID NO: 191247 - DNA, 25 bp, Canis familiaris
taagaaggtgcctttaactccacaa

SEQ ID NO: 191248 - DNA, 25 bp, Canis familiaris
taaggaggtgccttctacctccacc

SEQ ID NO: 191249 - DNA, 25 bp, Canis familiaris
taaggccttgactactagacctacc

SEQ ID NO: 191250 - DNA, 25 bp, Canis familiaris
taaggccttcacaaggagacccctc

SEQ ID NO: 191251 - DNA, 25 bp, Canis familiaris
taagtagttccacagaggcccaatc

SEQ ID NO: 191252 - DNA, 25 bp, Canis familiaris
taacgcgtacaacaaggtccacatc

SEQ ID NO: 191253 - DNA, 25 bp, Canis familiaris
taatcacaggactggggaggccgcc

SEQ ID NO: 191254 - DNA, 25 bp, Canis familiaris
taatcccagcactttgggaggccga

SEQ ID NO: 191255 - DNA, 25 bp, Canis familiaris
taatcccagctactcgggaggctga

SEQ ID NO: 191256 - DNA, 25 bp, Canis familiaris
taagcactcactttagggaactggc

SEQ ID NO: 191257 - DNA, 25 bp, Canis familiaris
taagtccttttatcgtatcaggaag

SEQ ID NO: 191258 - DNA, 25 bp, Canis familiaris
taaggcaaatttggtctttaaggag

SEQ ID NO: 191259 - DNA, 25 bp, Canis familiaris
taaccgtttctgctttaactgtagg

SEQ ID NO: 191260 - DNA, 25 bp, Canis familiaris
taaccctccgatcttttgcaggggg

SEQ ID NO: 191261 - DNA, 25 bp, Canis familiaris
taaccccaggacatttcaacggaag

SEQ ID NO: 191262 - DNA, 25 bp, Canis familiaris
taaccccggagaaggacaatcagac

SEQ ID NO: 191263 - DNA, 25 bp, Canis familiaris
taagccccgggaaatggatacaagt

SEQ ID NO: 191264 - DNA, 25 bp, Canis familiaris
taagcccaccggagtaggatcagag

SEQ ID NO: 191265 - DNA, 25 bp, Canis familiaris
taagccgagctcgctttagtgaacc

SEQ ID NO: 191266 - DNA, 25 bp, Canis familiaris
taagccaggctcccattaattagta

SEQ ID NO: 191267 - DNA, 25 bp, Canis familiaris
taagcagggcactcctaagctagct

SEQ ID NO: 191268 - DNA, 25 bp, Canis familiaris
taagtgagtcattaagtcacagcta

SEQ ID NO: 191269 - DNA, 25 bp, Canis familiaris
taagtagctctctggtagccttggt

SEQ ID NO: 191270 - DNA, 25 bp, Canis familiaris
taagtatgtgcctcgggccattctg

SEQ ID NO: 191271 - DNA, 25 bp, Canis familiaris
taagtattacccacagacatatatg

SEQ ID NO: 191272 - DNA, 25 bp, Canis familiaris
taagcttgcttccaaaagatcattg

SEQ ID NO: 191273 - DNA, 25 bp, Canis familiaris
taagttctctccaaaagagctcatc

SEQ ID NO: 191274 - DNA, 25 bp, Canis familiaris
taatgcttccttaaaatcctcactt

SEQ ID NO: 191275 - DNA, 25 bp, Canis familiaris
taatctctactgcagaattcccctt

SEQ ID NO: 191276 - DNA, 25 bp, Canis familiaris
taatccttgtgccagagtaaccctt

SEQ ID NO: 191277 - DNA, 25 bp, Canis familiaris
taatcctgcttgagggacccttgtt

SEQ ID NO: 191278 - DNA, 25 bp, Canis familiaris
taatcctgcttttctggaacttcct

SEQ ID NO: 191279 - DNA, 25 bp, Canis familiaris
taatctcatttttaacatatcttcc

SEQ ID NO: 191280 - DNA, 25 bp, Canis familiaris
taatgatcacggatatgacaacttc

SEQ ID NO: 191281 - DNA, 25 bp, Canis familiaris
taagagacgtgaatctggacagatc

SEQ ID NO: 191282 - DNA, 25 bp, Canis familiaris
taatgagtctttggacgccagatgc

SEQ ID NO: 191283 - DNA, 25 bp, Canis familiaris
taagaagctctgtgtcctcaatgcc

SEQ ID NO: 191284 - DNA, 25 bp, Canis familiaris
taagaagctttgcacgccttcacag

SEQ ID NO: 191285 - DNA, 25 bp, Canis familiaris
taagaggctcttggacagacccaca

SEQ ID NO: 191286 - DNA, 25 bp, Canis familiaris
taaggcctgctaggcacacactaac

SEQ ID NO: 191287 - DNA, 25 bp, Canis familiaris
taaggtcttgaggcacccttatcac

SEQ ID NO: 191288 - DNA, 25 bp, Canis familiaris
taagggttgggaggcgcttgtcacc

SEQ ID NO: 191289 - DNA, 25 bp, Canis familiaris
taaggtgttggccatggggatccct

SEQ ID NO: 191290 - DNA, 25 bp, Canis familiaris
taagtgtctttattggagtgatagc

SEQ ID NO: 191291 - DNA, 25 bp, Canis familiaris
taagtgctttaaatggaggtacggg

SEQ ID NO: 191292 - DNA, 25 bp, Canis familiaris
taaggctgttatgtggagtgtatcc

SEQ ID NO: 191293 - DNA, 25 bp, Canis familiaris
taagggcatccaattggatcctttc

SEQ ID NO: 191294 - DNA, 25 bp, Canis familiaris
taagtggcatccagcagtgcccagg

SEQ ID NO: 191295 - DNA, 25 bp, Canis familiaris
taagatggctccagcaggttctgca

SEQ ID NO: 191296 - DNA, 25 bp, Canis familiaris
taagggctctgcactgaatggctga

SEQ ID NO: 191297 - DNA, 25 bp, Canis familiaris
taaggtagctctactggttgctgcc

SEQ ID NO: 191298 - DNA, 25 bp, Canis familiaris
taagattggctctagctggtttccc

SEQ ID NO: 191299 - DNA, 25 bp, Canis familiaris
taagtgtattgatgctggttccccc

SEQ ID NO: 191300 - DNA, 25 bp, Canis familiaris
taagtgctaagctgttttctgtcct

SEQ ID NO: 191301 - DNA, 25 bp, Canis familiaris
taagctcaaatcacttttttcagta

SEQ ID NO: 191302 - DNA, 25 bp, Canis familiaris
taatctgaacacaagttttcattga

SEQ ID NO: 191303 - DNA, 25 bp, Canis familiaris
taatgtggccacagatcttaatcta

SEQ ID NO: 191304 - DNA, 25 bp, Canis familiaris
taactggccacatactgcaacctaa

SEQ ID NO: 191305 - DNA, 25 bp, Canis familiaris
taatcccccaaaacaacactgaaag

SEQ ID NO: 191306 - DNA, 25 bp, Canis familiaris
tagtacccgaagaatgaacccgaag

SEQ ID NO: 191307 - DNA, 25 bp, Canis familiaris
taaaccccaatgtcaatagcccaaa

SEQ ID NO: 191308 - DNA, 25 bp, Canis familiaris
taatgccccacaataaaaccaaaca

SEQ ID NO: 191309 - DNA, 25 bp, Canis familiaris
taagccttacaggagcaaaaaagaa

SEQ ID NO: 191310 - DNA, 25 bp, Canis familiaris
taaccctcgagcgtgcaacaaacag

SEQ ID NO: 191311 - DNA, 25 bp, Canis familiaris
taagcgccactacatggacggacag

SEQ ID NO: 191312 - DNA, 25 bp, Canis familiaris
taacccactacttggcatcctaagc

SEQ ID NO: 191313 - DNA, 25 bp, Canis familiaris
taacccacggattgggcccaagact

SEQ ID NO: 191314 - DNA, 25 bp, Canis familiaris
taatccatcattaattgggtccaaa

SEQ ID NO: 191315 - DNA, 25 bp, Canis familiaris
taatctaattagccattgttccaaa

SEQ ID NO: 191316 - DNA, 25 bp, Canis familiaris
taatctttctatactttcccaataa

SEQ ID NO: 191317 - DNA, 25 bp, Canis familiaris
taatgatttcgatcttatctttaag

SEQ ID NO: 191318 - DNA, 25 bp, Canis familiaris
taagaccttaactatattttcaatt

SEQ ID NO: 191319 - DNA, 25 bp, Canis familiaris
taagtcctaaagtcatttactcaca

SEQ ID NO: 191320 - DNA, 25 bp, Canis familiaris
taatgtccaagcacctttgactagg

SEQ ID NO: 191321 - DNA, 25 bp, Canis familiaris
taatgtccaagctcccatagcgtat

SEQ ID NO: 191322 - DNA, 25 bp, Canis familiaris
taagtacaaccagctcatgagaatt

SEQ ID NO: 191323 - DNA, 25 bp, Canis familiaris
taatgtaagaacactctgaatctct

SEQ ID NO: 191324 - DNA, 25 bp, Canis familiaris
taatgtcactgatatacttaagcct

SEQ ID NO: 191325 - DNA, 25 bp, Canis familiaris
taatgtcacttgctattaccagccg

SEQ ID NO: 191326 - DNA, 25 bp, Canis familiaris
taatgacactttttctcaacctctg

SEQ ID NO: 191327 - DNA, 25 bp, Canis familiaris
taatggctgcttgttcatcgtacct

SEQ ID NO: 191328 - DNA, 25 bp, Canis familiaris
taatggctatatggtgtcaaattta

SEQ ID NO: 191329 - DNA, 25 bp, Canis familiaris
taatgagtgtattctgtgcaatttt

SEQ ID NO: 191330 - DNA, 25 bp, Canis familiaris
taatgagctgtcctaatctttcctg

SEQ ID NO: 191331 - DNA, 25 bp, Canis familiaris
taatgtttcaattagcattgtcagt

SEQ ID NO: 191332 - DNA, 25 bp, Canis familiaris
taatgcgtctcacacatattctaca

SEQ ID NO: 191333 - DNA, 25 bp, Canis familiaris
taatctgttcacccacgatctagag

SEQ ID NO: 191334 - DNA, 25 bp, Canis familiaris
taacctggagcccagcagcttacag

SEQ ID NO: 191335 - DNA, 25 bp, Canis familiaris
taatcgtcaggcagagcatcgtata

SEQ ID NO: 191336 - DNA, 25 bp, Canis familiaris
taacgcgtgcacatgagcacccata

SEQ ID NO: 191337 - DNA, 25 bp, Canis familiaris
taaggagagagcaatggaaccatca

SEQ ID NO: 191338 - DNA, 25 bp, Canis familiaris
taagttagacctcaaccagtttcct

SEQ ID NO: 191339 - DNA, 25 bp, Canis familiaris
taagattaagccctaacccgcttct

SEQ ID NO: 191340 - DNA, 25 bp, Canis familiaris
taaggataagctctactcccactac

SEQ ID NO: 191341 - DNA, 25 bp, Canis familiaris
taaggtaagtcctacaccatgcctc

SEQ ID NO: 191342 - DNA, 25 bp, Canis familiaris
taagggtaactgtccccattcatct

SEQ ID NO: 191343 - DNA, 25 bp, Canis familiaris
taagggtgcagggcccaacatttca

SEQ ID NO: 191344 - DNA, 25 bp, Canis familiaris
taaggggatcctgacactcttgaca

SEQ ID NO: 191345 - DNA, 25 bp, Canis familiaris
taagaggaccctgaactgggccaga

SEQ ID NO: 191346 - DNA, 25 bp, Canis familiaris
tagcaagtgatcccatccaacgaac

SEQ ID NO: 191347 - DNA, 25 bp, Canis familiaris
taatggtgctcaccagccgacaaac

SEQ ID NO: 191348 - DNA, 25 bp, Canis familiaris
taatcgtctcatgagcattaaaagc

SEQ ID NO: 191349 - DNA, 25 bp, Canis familiaris
taatgctcctctgcagttactcaag

SEQ ID NO: 191350 - DNA, 25 bp, Canis familiaris
taaccactgtcactgttagcctgag

SEQ ID NO: 191351 - DNA, 25 bp, Canis familiaris
taactcgtctgactatccgccgagt

SEQ ID NO: 191352 - DNA, 25 bp, Canis familiaris
taacgcgttcgcagttgcagcgatt

SEQ ID NO: 191353 - DNA, 25 bp, Canis familiaris
taaggctgattccctttgcagtcac

SEQ ID NO: 191354 - DNA, 25 bp, Canis familiaris
taaggctgttcattttctgctgtca

SEQ ID NO: 191355 - DNA, 25 bp, Canis familiaris
taagctgctccttataactgctctg

SEQ ID NO: 191356 - DNA, 25 bp, Canis familiaris
taatgtgtctcatacaaatgtctat

SEQ ID NO: 191357 - DNA, 25 bp, Canis familiaris
taatgttcatagttgggattccata

SEQ ID NO: 191358 - DNA, 25 bp, Canis familiaris
taatgttcatgtgtgagccattcac

SEQ ID NO: 191359 - DNA, 25 bp, Canis familiaris
taatgaatctgtgtgtgtgcatatg

SEQ ID NO: 191360 - DNA, 25 bp, Canis familiaris
taagcagatctgctcctgtgatggc

SEQ ID NO: 191361 - DNA, 25 bp, Canis familiaris
taagcagtatgcttgccacttggtc

SEQ ID NO: 191362 - DNA, 25 bp, Canis familiaris
taatgcattacaggcccctttgcag

SEQ ID NO: 191363 - DNA, 25 bp, Canis familiaris
taatgttatgcaacctccttctgat

SEQ ID NO: 191364 - DNA, 25 bp, Canis familiaris
taatgtattgcactcaccacttgcc

SEQ ID NO: 191365 - DNA, 25 bp, Canis familiaris
taatgattctcaatctgcacccatg

SEQ ID NO: 191366 - DNA, 25 bp, Canis familiaris
taatgatgaagaatgcagcccagca

SEQ ID NO: 191367 - DNA, 25 bp, Canis familiaris
taatgagccattagcacccagcttg

SEQ ID NO: 191368 - DNA, 25 bp, Canis familiaris
taagagcgaatgccacccatgagag

SEQ ID NO: 191369 - DNA, 25 bp, Canis familiaris
taagcatcgatgtgacccttgcagg

SEQ ID NO: 191370 - DNA, 25 bp, Canis familiaris
taaatcgtcgtgccgttgatcgtga

SEQ ID NO: 191371 - DNA, 25 bp, Canis familiaris
taacaagtgcggccagttgcgcctg

SEQ ID NO: 191372 - DNA, 25 bp, Canis familiaris
taacaagtgcggccagttgcgcctg

SEQ ID NO: 191373 - DNA, 25 bp, Canis familiaris
taaccatatgggcctccaggctgct

SEQ ID NO: 191374 - DNA, 25 bp, Canis familiaris
taacactgcagtgaacctggcatgc

SEQ ID NO: 191375 - DNA, 25 bp, Canis familiaris
taagcctgcaggtcaatcgcggact

SEQ ID NO: 191376 - DNA, 25 bp, Canis familiaris
taaggctcacagtcagctcatctga

SEQ ID NO: 191377 - DNA, 25 bp, Canis familiaris
taatggcaaatgtatctattgagaa

SEQ ID NO: 191378 - DNA, 25 bp, Canis familiaris
taatccaggagccatttgatgagac

SEQ ID NO: 191379 - DNA, 25 bp, Canis familiaris
taaccaggagcgcctgggaggccag

SEQ ID NO: 191380 - DNA, 25 bp, Canis familiaris
taaccagagatcctgcttcgacagc

SEQ ID NO: 191381 - DNA, 25 bp, Canis familiaris
taatgtcatgattcctgtttgccca

SEQ ID NO: 191382 - DNA, 25 bp, Canis familiaris
taatgatcatgtttttgttttcctc

SEQ ID NO: 191383 - DNA, 25 bp, Canis familiaris
taatgatcttcttttctgttccttt

SEQ ID NO: 191384 - DNA, 25 bp, Canis familiaris
taagctcccttgttgaattcctatt

SEQ ID NO: 191385 - DNA, 25 bp, Canis familiaris
taagcatcacatgaattcaattctc

SEQ ID NO: 191386 - DNA, 25 bp, Canis familiaris
taagccatgcatgtctaagtacgca

SEQ ID NO: 191387 - DNA, 25 bp, Canis familiaris
taagccatgcatgtctaagtacgca

SEQ ID NO: 191388 - DNA, 25 bp, Canis familiaris
taagccatgcatgtctaagtacgca

SEQ ID NO: 191389 - DNA, 25 bp, Canis familiaris
taatgccatctacctgaaaacagtg

SEQ ID NO: 191390 - DNA, 25 bp, Canis familiaris
taagcagtctacctgagggcacact

SEQ ID NO: 191391 - DNA, 25 bp, Canis familiaris
taatggtcttcattggttgccactc

SEQ ID NO: 191392 - DNA, 25 bp, Canis familiaris
taaggatgctggctggcttgtactc

SEQ ID NO: 191393 - DNA, 25 bp, Canis familiaris
taatggaagactctgctttgcagct

SEQ ID NO: 191394 - DNA, 25 bp, Canis familiaris
taatgagaatgatttctcacttgtg

SEQ ID NO: 191395 - DNA, 25 bp, Canis familiaris
taatgaggatgctctctctatctct

SEQ ID NO: 191396 - DNA, 25 bp, Canis familiaris
taatgagcgagctctcatctctctg

SEQ ID NO: 191397 - DNA, 25 bp, Canis familiaris
taatgatgcccactaactgctctgt

SEQ ID NO: 191398 - DNA, 25 bp, Canis familiaris
taatggcaaatttatctcctgtgga

SEQ ID NO: 191399 - DNA, 25 bp, Canis familiaris
taaccaaatttattgctctttgaag

SEQ ID NO: 191400 - DNA, 25 bp, Canis familiaris
taaccagatagtctcatgactagtg

SEQ ID NO: 191401 - DNA, 25 bp, Canis familiaris
taaccagctttagcagaatatgcgt

SEQ ID NO: 191402 - DNA, 25 bp, Canis familiaris
taaggagtattagggtcattggtta

SEQ ID NO: 191403 - DNA, 25 bp, Canis familiaris
taaggttgtgtccgtgtcttggtta

SEQ ID NO: 191404 - DNA, 25 bp, Canis familiaris
taaggggtgtcaccattcagtggcc

SEQ ID NO: 191405 - DNA, 25 bp, Canis familiaris
taaggagggtccctccaatcatgcc

SEQ ID NO: 191406 - DNA, 25 bp, Canis familiaris
taaggaagagcatgtcccaccaggc

SEQ ID NO: 191407 - DNA, 25 bp, Canis familiaris
taaggacagagatgtgcccagctcc

SEQ ID NO: 191408 - DNA, 25 bp, Canis familiaris
taaggagaagctgtgctacgtcgcc

SEQ ID NO: 191409 - DNA, 25 bp, Canis familiaris
taatgtgagaactttgctggcccgt

SEQ ID NO: 191410 - DNA, 25 bp, Canis familiaris
taatgataaatgtgcctggccgcct

SEQ ID NO: 191411 - DNA, 25 bp, Canis familiaris
taatgaattactacctgtgtccctc

SEQ ID NO: 191412 - DNA, 25 bp, Canis familiaris
taatgcaatttttcctgttctcaac

SEQ ID NO: 191413 - DNA, 25 bp, Canis familiaris
taatgatatttgttctttttccaga

SEQ ID NO: 191414 - DNA, 25 bp, Canis familiaris
taatccatgtgtttctttattctca

SEQ ID NO: 191415 - DNA, 25 bp, Canis familiaris
taatgctctatggttgctgttttta

SEQ ID NO: 191416 - DNA, 25 bp, Canis familiaris
taatgctgttatgttttgttttttt

SEQ ID NO: 191417 - DNA, 25 bp, Canis familiaris
taagtgttcatgtttttggtccttc

SEQ ID NO: 191418 - DNA, 25 bp, Canis familiaris
taagactctcattcaatttggtttg

SEQ ID NO: 191419 - DNA, 25 bp, Canis familiaris
taatgatcctttgatgttcctttgg

SEQ ID NO: 191420 - DNA, 25 bp, Canis familiaris
taatgatttattgctgtgtctcttc

SEQ ID NO: 191421 - DNA, 25 bp, Canis familiaris
taatgcatttgtaagctggtctcca

SEQ ID NO: 191422 - DNA, 25 bp, Canis familiaris
taagatgcttgtgaccctgcatcct

SEQ ID NO: 191423 - DNA, 25 bp, Canis familiaris
taaggctctgtttgactatgtctct

SEQ ID NO: 191424 - DNA, 25 bp, Canis familiaris
taagctgtgctgtgagcctaatccc

SEQ ID NO: 191425 - DNA, 25 bp, Canis familiaris
taatgcctgtaaagccgagagcccc

SEQ ID NO: 191426 - DNA, 25 bp, Canis familiaris
taaggaggcatttgcctggactccc

SEQ ID NO: 191427 - DNA, 25 bp, Canis familiaris
taaggggccagactgcatggaccct

SEQ ID NO: 191428 - DNA, 25 bp, Canis familiaris
taagggcagcctcagtggatgctcc

SEQ ID NO: 191429 - DNA, 25 bp, Canis familiaris
taagcggcatttcaatgcgccttcc

SEQ ID NO: 191430 - DNA, 25 bp, Canis familiaris
taatgaggaattctgggcccttgcg

SEQ ID NO: 191431 - DNA, 25 bp, Canis familiaris
taagggaatctgggaggtcctgggc

SEQ ID NO: 191432 - DNA, 25 bp, Canis familiaris
taacgagactgtgggggacttgcgg

SEQ ID NO: 191433 - DNA, 25 bp, Canis familiaris
taaggagactgtggggtctcgggcc

SEQ ID NO: 191434 - DNA, 25 bp, Canis familiaris
taagagagtcttggggcagccgtga

SEQ ID NO: 191435 - DNA, 25 bp, Canis familiaris
taaggcagacttatgtacaagtgac

SEQ ID NO: 191436 - DNA, 25 bp, Canis familiaris
taaggcagaccttttcatcataaaa

SEQ ID NO: 191437 - DNA, 25 bp, Canis familiaris
taaggcttgccatatatttcaaaat

SEQ ID NO: 191438 - DNA, 25 bp, Canis familiaris
taaggctctgttgaacttccagcaa

SEQ ID NO: 191439 - DNA, 25 bp, Canis familiaris
taagcagctgtgaaaatcccccaca

SEQ ID NO: 191440 - DNA, 25 bp, Canis familiaris
taagattgtgtatttcctcatttca

SEQ ID NO: 191441 - DNA, 25 bp, Canis familiaris
taagttttatgtccactattattaa

SEQ ID NO: 191442 - DNA, 25 bp, Canis familiaris
taagttttagtggatcagattttta

SEQ ID NO: 191443 - DNA, 25 bp, Canis familiaris
taacttctaaaggacaacttttatg

SEQ ID NO: 191444 - DNA, 25 bp, Canis familiaris
taacacctaaggcaaaactttatgg

SEQ ID NO: 191445 - DNA, 25 bp, Canis familiaris
taaaccccaggacaatatatgatta

SEQ ID NO: 191446 - DNA, 25 bp, Canis familiaris
taacccccaggaccatatgatgatt

SEQ ID NO: 191447 - DNA, 25 bp, Canis familiaris
taactccccaacacttagtctttgt

SEQ ID NO: 191448 - DNA, 25 bp, Canis familiaris
taaccaaccaccagtagttcatttt

SEQ ID NO: 191449 - DNA, 25 bp, Canis familiaris
taacgcaacgccttcgaggttttgg

SEQ ID NO: 191450 - DNA, 25 bp, Canis familiaris
taaccagtccctcgggacggtggtg

SEQ ID NO: 191451 - DNA, 25 bp, Canis familiaris
tagtttgtctcctgggactggggga

SEQ ID NO: 191452 - DNA, 25 bp, Canis familiaris
tatttttcccttgaacctgggcgag

SEQ ID NO: 191453 - DNA, 25 bp, Canis familiaris
tagttttgccctgggggcctatagc

SEQ ID NO: 191454 - DNA, 25 bp, Canis familiaris
tagttttgggtgggtgtcagtcgtc

SEQ ID NO: 191455 - DNA, 25 bp, Canis familiaris
ttgttcttggtgtttgggcaaagtc

SEQ ID NO: 191456 - DNA, 25 bp, Canis familiaris
tagtgaccaggttttcaggaaagga

SEQ ID NO: 191457 - DNA, 25 bp, Canis familiaris
taggaccgtagaacccagacgggca

SEQ ID NO: 191458 - DNA, 25 bp, Canis familiaris
tataaccgggaaaccaattggctga

SEQ ID NO: 191459 - DNA, 25 bp, Canis familiaris
taaatccggaaccaccaagctggga

SEQ ID NO: 191460 - DNA, 25 bp, Canis familiaris
taaacgcggccaggaacgcgggagt

SEQ ID NO: 191461 - DNA, 25 bp, Canis familiaris
taaataggactagactcgggggatc

SEQ ID NO: 191462 - DNA, 25 bp, Canis familiaris
taaataggaaggcaaaggggatgtc

SEQ ID NO: 191463 - DNA, 25 bp, Canis familiaris
taagagggcagactcccaaggtggc

SEQ ID NO: 191464 - DNA, 25 bp, Canis familiaris
tacaatggacaattaccggcagtgg

SEQ ID NO: 191465 - DNA, 25 bp, Canis familiaris
taagcagatacaaaactcggagcag

SEQ ID NO: 191466 - DNA, 25 bp, Canis familiaris
taaggatacctatgtcagatgactg

SEQ ID NO: 191467 - DNA, 25 bp, Canis familiaris
taatgagaccctaatgtatgtaaga

SEQ ID NO: 191468 - DNA, 25 bp, Canis familiaris
taatggacaccttctgtgtgctcac

SEQ ID NO: 191469 - DNA, 25 bp, Canis familiaris
taagcgagtgacatctgtgcagccc

SEQ ID NO: 191470 - DNA, 25 bp, Canis familiaris
taaggactgaattctgtggcccagc

SEQ ID NO: 191471 - DNA, 25 bp, Canis familiaris
taagtggctgagccagggtcccatg

SEQ ID NO: 191472 - DNA, 25 bp, Canis familiaris
taaggggtggcagggacccctcgtg

SEQ ID NO: 191473 - DNA, 25 bp, Canis familiaris
taggctcggggagaactcgaccggc

SEQ ID NO: 191474 - DNA, 25 bp, Canis familiaris
taccttagtgtagaaccatgtcctg

SEQ ID NO: 191475 - DNA, 25 bp, Canis familiaris
taccctgagtcttcttaactgggtg

SEQ ID NO: 191476 - DNA, 25 bp, Canis familiaris
taagactggtttgaaactagggatg

SEQ ID NO: 191477 - DNA, 25 bp, Canis familiaris
taagaccggttgaaaactagggatg

SEQ ID NO: 191478 - DNA, 25 bp, Canis familiaris
taacagccgtttccccaaaggaatg

SEQ ID NO: 191479 - DNA, 25 bp, Canis familiaris
taagattcctacttcccaaagtttg

SEQ ID NO: 191480 - DNA, 25 bp, Canis familiaris
taaaatcctccgacgacgaagcttt

SEQ ID NO: 191481 - DNA, 25 bp, Canis familiaris
taacgttctcggaagtgtacagctt

SEQ ID NO: 191482 - DNA, 25 bp, Canis familiaris
taaggaatctcgatattataatctc

SEQ ID NO: 191483 - DNA, 25 bp, Canis familiaris
taagagccgcctattccaggatttc

SEQ ID NO: 191484 - DNA, 25 bp, Canis familiaris
taagagctgcaggtgtttccggaga

SEQ ID NO: 191485 - DNA, 25 bp, Canis familiaris
taaggctctggaattctcaaggctg

SEQ ID NO: 191486 - DNA, 25 bp, Canis familiaris
taatggacttaactctcactggcat

SEQ ID NO: 191487 - DNA, 25 bp, Canis familiaris
taatggactagattccagccatcct

SEQ ID NO: 191488 - DNA, 25 bp, Canis familiaris
taaggacctgatgccacatgatttg

SEQ ID NO: 191489 - DNA, 25 bp, Canis familiaris
taagagacttggactccagacccct

SEQ ID NO: 191490 - DNA, 25 bp, Canis familiaris
taagagacctgaactgggccgactg

SEQ ID NO: 191491 - DNA, 25 bp, Canis familiaris
taaggacagctgatggggccgttct

SEQ ID NO: 191492 - DNA, 25 bp, Canis familiaris
taaggacacatggagggaggcctct

SEQ ID NO: 191493 - DNA, 25 bp, Canis familiaris
taaggacacatgcggttacctctcc

SEQ ID NO: 191494 - DNA, 25 bp, Canis familiaris
taaggcccaggaggaacgcggcttc

SEQ ID NO: 191495 - DNA, 25 bp, Canis familiaris
taaccccaggaggcacctgggccgc

SEQ ID NO: 191496 - DNA, 25 bp, Canis familiaris
taaggccaagaatcatccgggtcgc

SEQ ID NO: 191497 - DNA, 25 bp, Canis familiaris
taagtcgtagaccacatcctgagtt

SEQ ID NO: 191498 - DNA, 25 bp, Canis familiaris
taagtcccagagccgattcgatgtt

SEQ ID NO: 191499 - DNA, 25 bp, Canis familiaris
taagatatccagtccgtgacgattg

SEQ ID NO: 191500 - DNA, 25 bp, Canis familiaris
taagagtccagctcttgctgctgtt

SEQ ID NO: 191501 - DNA, 25 bp, Canis familiaris
taatggatatccttctttctgcttt

SEQ ID NO: 191502 - DNA, 25 bp, Canis familiaris
taatgtataagcttctcttccctgt

SEQ ID NO: 191503 - DNA, 25 bp, Canis familiaris
taagctaaatgattctcttgctcca

SEQ ID NO: 191504 - DNA, 25 bp, Canis familiaris
taatgtatttgagtccttgtcctaa

SEQ ID NO: 191505 - DNA, 25 bp, Canis familiaris
taaggtgtttctgtgtgcccatata

SEQ ID NO: 191506 - DNA, 25 bp, Canis familiaris
taagggtgttcggttgcgtgcatgt

SEQ ID NO: 191507 - DNA, 25 bp, Canis familiaris
taacggatggtgctttggtgagtct

SEQ ID NO: 191508 - DNA, 25 bp, Canis familiaris
taagggggtaccctgagtggttctg

SEQ ID NO: 191509 - DNA, 25 bp, Canis familiaris
taagggagggagtcggttgctgttc

SEQ ID NO: 191510 - DNA, 25 bp, Canis familiaris
taaggaagggagctgcctacttgcc

SEQ ID NO: 191511 - DNA, 25 bp, Canis familiaris
taaggacgcggacttgtatacctcc

SEQ ID NO: 191512 - DNA, 25 bp, Canis familiaris
taagggcccaattctttgaccaatc

SEQ ID NO: 191513 - DNA, 25 bp, Canis familiaris
taaggacgccagtcgtcttggctta

SEQ ID NO: 191514 - DNA, 25 bp, Canis familiaris
taagcctcccagtctgtggtggtat

SEQ ID NO: 191515 - DNA, 25 bp, Canis familiaris
taacctcatttgtcttggggtgttt

SEQ ID NO: 191516 - DNA, 25 bp, Canis familiaris
taagcttatttgttctgcgatggtg

SEQ ID NO: 191517 - DNA, 25 bp, Canis familiaris
taagcttttctgcttctgtgagagc

SEQ ID NO: 191518 - DNA, 25 bp, Canis familiaris
taagcccttatgatgatttaggcaa

SEQ ID NO: 191519 - DNA, 25 bp, Canis familiaris
taagctgtattttgagttatgggca

SEQ ID NO: 191520 - DNA, 25 bp, Canis familiaris
taaccttttagagatgcagcttgca

SEQ ID NO: 191521 - DNA, 25 bp, Canis familiaris
taacctttctaggaaggcttctttg

SEQ ID NO: 191522 - DNA, 25 bp, Canis familiaris
taacgtgtattattctttttccttg

SEQ ID NO: 191523 - DNA, 25 bp, Canis familiaris
taactttgtcaatgctttttccttc

SEQ ID NO: 191524 - DNA, 25 bp, Canis familiaris
taagtttctaacgttctatctcctt

SEQ ID NO: 191525 - DNA, 25 bp, Canis familiaris
taagttagcgcaggcttctatgttc

SEQ ID NO: 191526 - DNA, 25 bp, Canis familiaris
taagagtaggcagtttcttcacttc

SEQ ID NO: 191527 - DNA, 25 bp, Canis familiaris
taagcagtacctttgtctgtcctct

SEQ ID NO: 191528 - DNA, 25 bp, Canis familiaris
taacagcaaactactgtcatttatg

SEQ ID NO: 191529 - DNA, 25 bp, Canis familiaris
taacagcaaactactgtcatttatg

SEQ ID NO: 191530 - DNA, 25 bp, Canis familiaris
taaccagagagctgctgtgcttatt

SEQ ID NO: 191531 - DNA, 25 bp, Canis familiaris
taaccaaagttgctgtctagtacat

SEQ ID NO: 191532 - DNA, 25 bp, Canis familiaris
tataccagggtacatccatcgaaat

SEQ ID NO: 191533 - DNA, 25 bp, Canis familiaris
taactggtggtaaatcctagagcta

SEQ ID NO: 191534 - DNA, 25 bp, Canis familiaris
taagctggtagaagccatccggacc

SEQ ID NO: 191535 - DNA, 25 bp, Canis familiaris
taagctggtagaagccatccggacc

SEQ ID NO: 191536 - DNA, 25 bp, Canis familiaris
taagctggtagaagccatccggacc

SEQ ID NO: 191537 - DNA, 25 bp, Canis familiaris
taagctggtagaagccatccggacc

SEQ ID NO: 191538 - DNA, 25 bp, Canis familiaris
taagctggatggagccagccttccc

SEQ ID NO: 191539 - DNA, 25 bp, Canis familiaris
taagcgctgaggattccaactgacc

SEQ ID NO: 191540 - DNA, 25 bp, Canis familiaris
taagcctgggtttcttatgttgccg

SEQ ID NO: 191541 - DNA, 25 bp, Canis familiaris
taaacggagttttcttgggagagag

SEQ ID NO: 191542 - DNA, 25 bp, Canis familiaris
taaccggatttaacctgtagagata

SEQ ID NO: 191543 - DNA, 25 bp, Canis familiaris
taaccgggtcgaggcactgacggac

SEQ ID NO: 191544 - DNA, 25 bp, Canis familiaris
taacgtggggaaggactgccgagac

SEQ ID NO: 191545 - DNA, 25 bp, Canis familiaris
tactgggtggcgcggaagcccatga

SEQ ID NO: 191546 - DNA, 25 bp, Canis familiaris
tactgggcgacgagggccaaagcaa

SEQ ID NO: 191547 - DNA, 25 bp, Canis familiaris
tacgagtcccggggaggccataaga

SEQ ID NO: 191548 - DNA, 25 bp, Canis familiaris
taagaatagccccctagaccataaa

SEQ ID NO: 191549 - DNA, 25 bp, Canis familiaris
taagcaaacccaaataccctaatga

SEQ ID NO: 191550 - DNA, 25 bp, Canis familiaris
taagctacccaaacccactatagta

SEQ ID NO: 191551 - DNA, 25 bp, Canis familiaris
taacaaccaccaaccaagttccata

SEQ ID NO: 191552 - DNA, 25 bp, Canis familiaris
taaaaaaacacacacttctccttga

SEQ ID NO: 191553 - DNA, 25 bp, Canis familiaris
taagccataaacgaaagtttgacta

SEQ ID NO: 191554 - DNA, 25 bp, Canis familiaris
taaccaccaaatcgacgttgtcctc

SEQ ID NO: 191555 - DNA, 25 bp, Canis familiaris
taaccagcctgctttgggtcttgtt

SEQ ID NO: 191556 - DNA, 25 bp, Canis familiaris
tacaccatcctttttgcgtttggga

SEQ ID NO: 191557 - DNA, 25 bp, Canis familiaris
taagcccctgtgtttcagtgttgta

SEQ ID NO: 191558 - DNA, 25 bp, Canis familiaris
taagctccctaggactcacttgagt

SEQ ID NO: 191559 - DNA, 25 bp, Canis familiaris
taactactcatacagtgcagcggga

SEQ ID NO: 191560 - DNA, 25 bp, Canis familiaris
taagatccttcacaggcacgtgcat

SEQ ID NO: 191561 - DNA, 25 bp, Canis familiaris
taagcaagcttttgaggctctgtga

SEQ ID NO: 191562 - DNA, 25 bp, Canis familiaris
taagcatagtaaagagatgccattc

SEQ ID NO: 191563 - DNA, 25 bp, Canis familiaris
tacacacatgcatactgagaccagt

SEQ ID NO: 191564 - DNA, 25 bp, Canis familiaris
taacccatagatgtgaccattgacc

SEQ ID NO: 191565 - DNA, 25 bp, Canis familiaris
taaccactgagtgtactcattggag

SEQ ID NO: 191566 - DNA, 25 bp, Canis familiaris
taagcacctctgtgtacgctgtgga

SEQ ID NO: 191567 - DNA, 25 bp, Canis familiaris
taaggaggctttcaccatcatggac

SEQ ID NO: 191568 - DNA, 25 bp, Canis familiaris
taagggtgctcccttacacattcac

SEQ ID NO: 191569 - DNA, 25 bp, Canis familiaris
taagtggtgcccctaatctagtgac

SEQ ID NO: 191570 - DNA, 25 bp, Canis familiaris
taaggagtcactgctacatcccatg

SEQ ID NO: 191571 - DNA, 25 bp, Canis familiaris
taaggagtcaatcctgcatccacag

SEQ ID NO: 191572 - DNA, 25 bp, Canis familiaris
taagcgcagatctatgtcccagaag

SEQ ID NO: 191573 - DNA, 25 bp, Canis familiaris
taagccaacatttgacctgacagga

SEQ ID NO: 191574 - DNA, 25 bp, Canis familiaris
taaggtgctcatgatgccacgtcag

SEQ ID NO: 191575 - DNA, 25 bp, Canis familiaris
taaggcttccaggccacgaaagtta

SEQ ID NO: 191576 - DNA, 25 bp, Canis familiaris
tacaagctgtaacccacgtaactta

SEQ ID NO: 191577 - DNA, 25 bp, Canis familiaris
taaaggaaacccacaccattcttct

SEQ ID NO: 191578 - DNA, 25 bp, Canis familiaris
taacgaaactcctgagccttttcct

SEQ ID NO: 191579 - DNA, 25 bp, Canis familiaris
taaggaaaacccagctttcttcgct

SEQ ID NO: 191580 - DNA, 25 bp, Canis familiaris
taagggcacaaccagccctgtgtca

SEQ ID NO: 191581 - DNA, 25 bp, Canis familiaris
taagagtaaccagccagcttgccag

SEQ ID NO: 191582 - DNA, 25 bp, Canis familiaris
taacctgcaaccaaccagtctggga

SEQ ID NO: 191583 - DNA, 25 bp, Canis familiaris
taaccccaactttctgtctggtact

SEQ ID NO: 191584 - DNA, 25 bp, Canis familiaris
taagccttaagttttgcctggttat

SEQ ID NO: 191585 - DNA, 25 bp, Canis familiaris
taagctgttgaacaccacgggtaat

SEQ ID NO: 191586 - DNA, 25 bp, Canis familiaris
taccagggaacacccacgggagtag

SEQ ID NO: 191587 - DNA, 25 bp, Canis familiaris
tacaagggaaactaccaggctcatg

SEQ ID NO: 191588 - DNA, 25 bp, Canis familiaris
taaagagaggatctaccaggggccc

SEQ ID NO: 191589 - DNA, 25 bp, Canis familiaris
taagacggtgatgataccctgggcc

SEQ ID NO: 191590 - DNA, 25 bp, Canis familiaris
taaacaggcagaatgatcccacggc

SEQ ID NO: 191591 - DNA, 25 bp, Canis familiaris
taagggagcagaaggctgcccggag

SEQ ID NO: 191592 - DNA, 25 bp, Canis familiaris
taagggacaagactgccctctcggt

SEQ ID NO: 191593 - DNA, 25 bp, Canis familiaris
taagggagctggagccacatctcat

SEQ ID NO: 191594 - DNA, 25 bp, Canis familiaris
taacgacatgtcgtggtctcatccg

SEQ ID NO: 191595 - DNA, 25 bp, Canis familiaris
taacccatacttcgttatccacgag

SEQ ID NO: 191596 - DNA, 25 bp, Canis familiaris
taacattaagttccttcacctctga

SEQ ID NO: 191597 - DNA, 25 bp, Canis familiaris
taacctgattgaagtttaccttgtg

SEQ ID NO: 191598 - DNA, 25 bp, Canis familiaris
tagactctttatggttataacctga

SEQ ID NO: 191599 - DNA, 25 bp, Canis familiaris
taagccttattctctgaaacgtgga

SEQ ID NO: 191600 - DNA, 25 bp, Canis familiaris
taaccttcttatactaataggcctt

SEQ ID NO: 191601 - DNA, 25 bp, Canis familiaris
taaccaacttctaatgatacatgtg

SEQ ID NO: 191602 - DNA, 25 bp, Canis familiaris
taagcccactgatacaatgcgaatg

SEQ ID NO: 191603 - DNA, 25 bp, Canis familiaris
taagcccaggaaaccatcagcacag

SEQ ID NO: 191604 - DNA, 25 bp, Canis familiaris
tacgaccaggacaaactctacggct

SEQ ID NO: 191605 - DNA, 25 bp, Canis familiaris
tactatccggacagagtcaacttct

SEQ ID NO: 191606 - DNA, 25 bp, Canis familiaris
taaaccggtctggttcagattttgt

SEQ ID NO: 191607 - DNA, 25 bp, Canis familiaris
taagaccgttcacctacagaagcac

SEQ ID NO: 191608 - DNA, 25 bp, Canis familiaris
taaccacgaatccctaatgttgagc

SEQ ID NO: 191609 - DNA, 25 bp, Canis familiaris
taactaccgaacctatatgattgca

SEQ ID NO: 191610 - DNA, 25 bp, Canis familiaris
taagccctgcagaacttgagaacca

SEQ ID NO: 191611 - DNA, 25 bp, Canis familiaris
taagacttgcgtttgctggatcagc

SEQ ID NO: 191612 - DNA, 25 bp, Canis familiaris
taagcaagctgcggttgtggaagag

SEQ ID NO: 191613 - DNA, 25 bp, Canis familiaris
taagagtcatccctagaagagagag

SEQ ID NO: 191614 - DNA, 25 bp, Canis familiaris
tatatgaccacgctcacccgcatga

SEQ ID NO: 191615 - DNA, 25 bp, Canis familiaris
taagaccacgagaccccatgggtcc

SEQ ID NO: 191616 - DNA, 25 bp, Canis familiaris
taaaccagtgttgatcctaggtccc

SEQ ID NO: 191617 - DNA, 25 bp, Canis familiaris
taaaccagtattcaagcttcttccc

SEQ ID NO: 191618 - DNA, 25 bp, Canis familiaris
taaggttgcgttaaagtgtcttcct

SEQ ID NO: 191619 - DNA, 25 bp, Canis familiaris
taagtgttggttcagaggctctccc

SEQ ID NO: 191620 - DNA, 25 bp, Canis familiaris
taaggtggtcttcctgaagttctcc

SEQ ID NO: 191621 - DNA, 25 bp, Canis familiaris
taagcgttgtcttgagtaaattctc

SEQ ID NO: 191622 - DNA, 25 bp, Canis familiaris
taaggcttgctttattgccttcctc

SEQ ID NO: 191623 - DNA, 25 bp, Canis familiaris
taagtccgttgtaatcctggctctc

SEQ ID NO: 191624 - DNA, 25 bp, Canis familiaris
taagttgcgtttaatccgtaccatt

SEQ ID NO: 191625 - DNA, 25 bp, Canis familiaris
taagcttgcgttgattaagtccctg

SEQ ID NO: 191626 - DNA, 25 bp, Canis familiaris
taagccactttgaagaaaatccctg

SEQ ID NO: 191627 - DNA, 25 bp, Canis familiaris
taagtaatcctaaacacacacacac

SEQ ID NO: 191628 - DNA, 25 bp, Canis familiaris
taaggtttcacagtacacacacaca

SEQ ID NO: 191629 - DNA, 25 bp, Canis familiaris
taagcagattgtgtaacatccccca

SEQ ID NO: 191630 - DNA, 25 bp, Canis familiaris
taagcagtacaagaaggcccacctg

SEQ ID NO: 191631 - DNA, 25 bp, Canis familiaris
taagccataaagcacatgcgccctc

SEQ ID NO: 191632 - DNA, 25 bp, Canis familiaris
taagccaagaaaaagaggcctcaaa

SEQ ID NO: 191633 - DNA, 25 bp, Canis familiaris
taagccgtcgtaaacggcactctaa

SEQ ID NO: 191634 - DNA, 25 bp, Canis familiaris
taagccccgactgatagactcatct

SEQ ID NO: 191635 - DNA, 25 bp, Canis familiaris
taagtccaggatcccaagaccatga

SEQ ID NO: 191636 - DNA, 25 bp, Canis familiaris
taagtcagcagaatcccacttccaa

SEQ ID NO: 191637 - DNA, 25 bp, Canis familiaris
taagtatcatttccacacttgccca

SEQ ID NO: 191638 - DNA, 25 bp, Canis familiaris
taagcttctgtatcaacttgcccga

SEQ ID NO: 191639 - DNA, 25 bp, Canis familiaris
taagtccctagaaggcttgtcccta

SEQ ID NO: 191640 - DNA, 25 bp, Canis familiaris
taagtcctataaacctgaactccta

SEQ ID NO: 191641 - DNA, 25 bp, Canis familiaris
taacactatatttccctgaaccact

SEQ ID NO: 191642 - DNA, 25 bp, Canis familiaris
taaaatatttacgcttcaccttaca

SEQ ID NO: 191643 - DNA, 25 bp, Canis familiaris
taaaattctgtagcgggctgtttaa

SEQ ID NO: 191644 - DNA, 25 bp, Canis familiaris
taaaatgctcttgtcctaggtagta

SEQ ID NO: 191645 - DNA, 25 bp, Canis familiaris
taagcactttgtgacccacgtgtgt

SEQ ID NO: 191646 - DNA, 25 bp, Canis familiaris
taacctatggtttggctacgatgtg

SEQ ID NO: 191647 - DNA, 25 bp, Canis familiaris
taacacctggttttcaaatagttca

SEQ ID NO: 191648 - DNA, 25 bp, Canis familiaris
taacccagtcttttctcaaatgtca

SEQ ID NO: 191649 - DNA, 25 bp, Canis familiaris
taactccagttcagttcttagcctc

SEQ ID NO: 191650 - DNA, 25 bp, Canis familiaris
taactccagtgcctgattttctcag

SEQ ID NO: 191651 - DNA, 25 bp, Canis familiaris
taactgcacagtcagcttccattca

SEQ ID NO: 191652 - DNA, 25 bp, Canis familiaris
taagtcacagctaatgcataccatt

SEQ ID NO: 191653 - DNA, 25 bp, Canis familiaris
taagtcatatttacaagtcataatt

SEQ ID NO: 191654 - DNA, 25 bp, Canis familiaris
taaggatattttgagttacattaaa

SEQ ID NO: 191655 - DNA, 25 bp, Canis familiaris
taaggatattttgattaccattaaa

SEQ ID NO: 191656 - DNA, 25 bp, Canis familiaris
taacgtttttcatttgacccaagat

SEQ ID NO: 191657 - DNA, 25 bp, Canis familiaris
taacagttttgtctctttgccagta

SEQ ID NO: 191658 - DNA, 25 bp, Canis familiaris
taaactttttaacattctttatctg

SEQ ID NO: 191659 - DNA, 25 bp, Canis familiaris
taaatgctttcataaccccatttta

SEQ ID NO: 191660 - DNA, 25 bp, Canis familiaris
taaatgtacataagaccaacctagt

SEQ ID NO: 191661 - DNA, 25 bp, Canis familiaris
taacttacactatacaacctgaaag

SEQ ID NO: 191662 - DNA, 25 bp, Canis familiaris
taactccacacctcacaacgtgtta

SEQ ID NO: 191663 - DNA, 25 bp, Canis familiaris
taaccaccacctcatcaatgacttt

SEQ ID NO: 191664 - DNA, 25 bp, Canis familiaris
taaggacctggtctcaactcttttc

SEQ ID NO: 191665 - DNA, 25 bp, Canis familiaris
taaggaccacagaactatacctttt

SEQ ID NO: 191666 - DNA, 25 bp, Canis familiaris
taagccaaccagagacataccatat

SEQ ID NO: 191667 - DNA, 25 bp, Canis familiaris
taacctaccaataaaaccatcgcct

SEQ ID NO: 191668 - DNA, 25 bp, Canis familiaris
taaaaaccttaatttgctctggcct

SEQ ID NO: 191669 - DNA, 25 bp, Canis familiaris
taaaatcccccaatacttgttgcct

SEQ ID NO: 191670 - DNA, 25 bp, Canis familiaris
taaaagctttccaaactctgtttag

SEQ ID NO: 191671 - DNA, 25 bp, Canis familiaris
taagaagtttcacctttccagtatt

SEQ ID NO: 191672 - DNA, 25 bp, Canis familiaris
taagagggtcatcaccttccagttg

SEQ ID NO: 191673 - DNA, 25 bp, Canis familiaris
taagagggaactcctttccagcctc

SEQ ID NO: 191674 - DNA, 25 bp, Canis familiaris
taagggagaagcccaggaccagcct

SEQ ID NO: 191675 - DNA, 25 bp, Canis familiaris
tacagttgaaacccacagacaccac

SEQ ID NO: 191676 - DNA, 25 bp, Canis familiaris
tacagttacctcacacggaacagga

SEQ ID NO: 191677 - DNA, 25 bp, Canis familiaris
taagtctacctatccctgtagaaaa

SEQ ID NO: 191678 - DNA, 25 bp, Canis familiaris
taaatatgtgctgaacccttaaaaa

SEQ ID NO: 191679 - DNA, 25 bp, Canis familiaris
taaccagtgctgcttccgtatgaat

SEQ ID NO: 191680 - DNA, 25 bp, Canis familiaris
taaaacgctgcagacggtaggaccc

SEQ ID NO: 191681 - DNA, 25 bp, Canis familiaris
taagaacctactgcattggggtccc

SEQ ID NO: 191682 - DNA, 25 bp, Canis familiaris
taagtccttactgataggggcacct

SEQ ID NO: 191683 - DNA, 25 bp, Canis familiaris
taactgccttttgggtcaggtccct

SEQ ID NO: 191684 - DNA, 25 bp, Canis familiaris
taaccctctctaagggaacccagct

SEQ ID NO: 191685 - DNA, 25 bp, Canis familiaris
taaccccctgagagtaacatcctgg

SEQ ID NO: 191686 - DNA, 25 bp, Canis familiaris
taaccccttgtgaattgggccctgt

SEQ ID NO: 191687 - DNA, 25 bp, Canis familiaris
taagttgcctttagtcttggtcctg

SEQ ID NO: 191688 - DNA, 25 bp, Canis familiaris
taagagggcttttgtgttggtgttg

SEQ ID NO: 191689 - DNA, 25 bp, Canis familiaris
taaggtggcttagctttgctttgta

SEQ ID NO: 191690 - DNA, 25 bp, Canis familiaris
taagcgttgttaggttttcgtgtca

SEQ ID NO: 191691 - DNA, 25 bp, Canis familiaris
taacaatgctctcaggactttcgtg

SEQ ID NO: 191692 - DNA, 25 bp, Canis familiaris
taactgagcctcaggacctttgctc

SEQ ID NO: 191693 - DNA, 25 bp, Canis familiaris
taacaagccggggtccttggctttg

SEQ ID NO: 191694 - DNA, 25 bp, Canis familiaris
taacaccaaggctttcctctggttc

SEQ ID NO: 191695 - DNA, 25 bp, Canis familiaris
taactgcgaagagctgatccctgag

SEQ ID NO: 191696 - DNA, 25 bp, Canis familiaris
taagtgtgatgcggactgtctccgg

SEQ ID NO: 191697 - DNA, 25 bp, Canis familiaris
taagtgccacgggtgtgtgccttga

SEQ ID NO: 191698 - DNA, 25 bp, Canis familiaris
tacagtcaaggctttggtccggaga

SEQ ID NO: 191699 - DNA, 25 bp, Canis familiaris
taagcataactgtttattacacgag

SEQ ID NO: 191700 - DNA, 25 bp, Canis familiaris
taagcattcaatgttttgacacata

SEQ ID NO: 191701 - DNA, 25 bp, Canis familiaris
taagattcattattggtggaccaca

SEQ ID NO: 191702 - DNA, 25 bp, Canis familiaris
taagactttatttacgagccatcag

SEQ ID NO: 191703 - DNA, 25 bp, Canis familiaris
taaggatttaattaaggccacgcta

SEQ ID NO: 191704 - DNA, 25 bp, Canis familiaris
taacgatttcacaccaggaacagct

SEQ ID NO: 191705 - DNA, 25 bp, Canis familiaris
taaccatttcacaccggagaacagc

SEQ ID NO: 191706 - DNA, 25 bp, Canis familiaris
taagtccctggtcccgagagagaag

SEQ ID NO: 191707 - DNA, 25 bp, Canis familiaris
taaccccggggagaagcaggaggca

SEQ ID NO: 191708 - DNA, 25 bp, Canis familiaris
taacccctggggacggagactgagg

SEQ ID NO: 191709 - DNA, 25 bp, Canis familiaris
taagcccagaagggtggggaggagg

SEQ ID NO: 191710 - DNA, 25 bp, Canis familiaris
taacccaggcaggcggcgggtggag

SEQ ID NO: 191711 - DNA, 25 bp, Canis familiaris
taaaccaggagcatgcgcgggggga

SEQ ID NO: 191712 - DNA, 25 bp, Canis familiaris
tagaacgactggagggcgcgtgggg

SEQ ID NO: 191713 - DNA, 25 bp, Canis familiaris
taacaggacaggtccccgttgggag

SEQ ID NO: 191714 - DNA, 25 bp, Canis familiaris
taacaagcacgtgccacgctggtgg

SEQ ID NO: 191715 - DNA, 25 bp, Canis familiaris
taagaagcatgctgcctatgcctgg

SEQ ID NO: 191716 - DNA, 25 bp, Canis familiaris
taagcacgtgcattccttcatatgg

SEQ ID NO: 191717 - DNA, 25 bp, Canis familiaris
taaccgtgcttctttcatgtcaggc

SEQ ID NO: 191718 - DNA, 25 bp, Canis familiaris
taagccctttgctcctggaggtaac

SEQ ID NO: 191719 - DNA, 25 bp, Canis familiaris
taaaacttatcctctggacccagac

SEQ ID NO: 191720 - DNA, 25 bp, Canis familiaris
taaaatctaatacatctaaggcaaa

SEQ ID NO: 191721 - DNA, 25 bp, Canis familiaris
taacacctacacgttcaaggaataa

SEQ ID NO: 191722 - DNA, 25 bp, Canis familiaris
taagcctaaccaatctcacaaagta

SEQ ID NO: 191723 - DNA, 25 bp, Canis familiaris
taactcaatgcgcattctcacacac

SEQ ID NO: 191724 - DNA, 25 bp, Canis familiaris
taagagcctcagcagcttgacagcc

SEQ ID NO: 191725 - DNA, 25 bp, Canis familiaris
taagacctcagagtgttgtcccacc

SEQ ID NO: 191726 - DNA, 25 bp, Canis familiaris
taagtattcacattgttgtacaacc

SEQ ID NO: 191727 - DNA, 25 bp, Canis familiaris
taagatgttctttgcctgctactag

SEQ ID NO: 191728 - DNA, 25 bp, Canis familiaris
taagctttctttctgcatacatgca

SEQ ID NO: 191729 - DNA, 25 bp, Canis familiaris
taagttttcttgtccatgcctggga

SEQ ID NO: 191730 - DNA, 25 bp, Canis familiaris
taagtcttgtcttgagctctgcatt

SEQ ID NO: 191731 - DNA, 25 bp, Canis familiaris
taagttctgcacagatgcctgctgc

SEQ ID NO: 191732 - DNA, 25 bp, Canis familiaris
taagttgcagcctgtgccagctgag

SEQ ID NO: 191733 - DNA, 25 bp, Canis familiaris
taagtctgaccatacatcactgtga

SEQ ID NO: 191734 - DNA, 25 bp, Canis familiaris
taagtcgcaccaggatccatgagct

SEQ ID NO: 191735 - DNA, 25 bp, Canis familiaris
taagtcagaacacagattcagctct

SEQ ID NO: 191736 - DNA, 25 bp, Canis familiaris
taagttgagcaattagatttcacta

SEQ ID NO: 191737 - DNA, 25 bp, Canis familiaris
taagctgtacaatcgtttcatcatt

SEQ ID NO: 191738 - DNA, 25 bp, Canis familiaris
taagtggccacattctgttttcttt

SEQ ID NO: 191739 - DNA, 25 bp, Canis familiaris
taagtgtgccatttgctagtattac

SEQ ID NO: 191740 - DNA, 25 bp, Canis familiaris
taagctgtgcctgggctagtctgta

SEQ ID NO: 191741 - DNA, 25 bp, Canis familiaris
tacacagtgacccactcaattccag

SEQ ID NO: 191742 - DNA, 25 bp, Canis familiaris
taacaatacaggactctttcgaggc

SEQ ID NO: 191743 - DNA, 25 bp, Canis familiaris
taacaatacaggactctttcgaggc

SEQ ID NO: 191744 - DNA, 25 bp, Canis familiaris
taaccaacaagcagctgcttcctcc

SEQ ID NO: 191745 - DNA, 25 bp, Canis familiaris
taagtgataaccacgtttctcctcc

SEQ ID NO: 191746 - DNA, 25 bp, Canis familiaris
taagctatacccaatttaattccat

SEQ ID NO: 191747 - DNA, 25 bp, Canis familiaris
taactttggtttgtaattccacatt

SEQ ID NO: 191748 - DNA, 25 bp, Canis familiaris
taacgctctcgtttcgaactttaat

SEQ ID NO: 191749 - DNA, 25 bp, Canis familiaris
taagactctttatttgtactctata

SEQ ID NO: 191750 - DNA, 25 bp, Canis familiaris
taagtcttttgattttagctttata

SEQ ID NO: 191751 - DNA, 25 bp, Canis familiaris
taaccttatgctaatacttgcttta

SEQ ID NO: 191752 - DNA, 25 bp, Canis familiaris
taagcctttatttccttgtttcacg

SEQ ID NO: 191753 - DNA, 25 bp, Canis familiaris
taagcattttacacgttcttttcct

SEQ ID NO: 191754 - DNA, 25 bp, Canis familiaris
taagattcactaccatagttttacc

SEQ ID NO: 191755 - DNA, 25 bp, Canis familiaris
taagttaataattcagctcctgtca

SEQ ID NO: 191756 - DNA, 25 bp, Canis familiaris
taacgtaaaattgtgcttatatgta

SEQ ID NO: 191757 - DNA, 25 bp, Canis familiaris
taacgaacaacagcaacgtcttgaa

SEQ ID NO: 191758 - DNA, 25 bp, Canis familiaris
taacgtacagtatatttgtctgcta

SEQ ID NO: 191759 - DNA, 25 bp, Canis familiaris
tagcacggggtacattctgtctgcc

SEQ ID NO: 191760 - DNA, 25 bp, Canis familiaris
ttcaaggaggtacgactggtccccg

SEQ ID NO: 191761 - DNA, 25 bp, Canis familiaris
ttaaggaggaagtcccgactgccca

SEQ ID NO: 191762 - DNA, 25 bp, Canis familiaris
tacaaaaggggccccgagcagccca

SEQ ID NO: 191763 - DNA, 25 bp, Canis familiaris
tacaaaaggggtcaccaagccgctg

SEQ ID NO: 191764 - DNA, 25 bp, Canis familiaris
taaaaaaagggcggctccctctgct

SEQ ID NO: 191765 - DNA, 25 bp, Canis familiaris
taaaaccatagtccttacccaggca

SEQ ID NO: 191766 - DNA, 25 bp, Canis familiaris
taaagaccaggtcatcgactttgag

SEQ ID NO: 191767 - DNA, 25 bp, Canis familiaris
taagaacccttgttgctggtcttgg

SEQ ID NO: 191768 - DNA, 25 bp, Canis familiaris
taagaagaatccctttggcctagtg

SEQ ID NO: 191769 - DNA, 25 bp, Canis familiaris
taagaaaatctgctttgccccttgg

SEQ ID NO: 191770 - DNA, 25 bp, Canis familiaris
taaaagtacttttgtgcctgtttgt

SEQ ID NO: 191771 - DNA, 25 bp, Canis familiaris
taagatttgaccttaatttgttctt

SEQ ID NO: 191772 - DNA, 25 bp, Canis familiaris
taagattcattccttaatgcttgga

SEQ ID NO: 191773 - DNA, 25 bp, Canis familiaris
taagatgtgcattcctttctgcttg

SEQ ID NO: 191774 - DNA, 25 bp, Canis familiaris
taagtgtgcattagttgtgtctccc

SEQ ID NO: 191775 - DNA, 25 bp, Canis familiaris
taagtctgccatattgcagtccccc

SEQ ID NO: 191776 - DNA, 25 bp, Canis familiaris
taagtaccaggtcatgtccatccct

SEQ ID NO: 191777 - DNA, 25 bp, Canis familiaris
taagaacacagcgtgaaacgtgccc

SEQ ID NO: 191778 - DNA, 25 bp, Canis familiaris
taagcaaatccgtgtactttccctt

SEQ ID NO: 191779 - DNA, 25 bp, Canis familiaris
taaaagtatctgtgtgtttcccctc

SEQ ID NO: 191780 - DNA, 25 bp, Canis familiaris
taaaacaatccatgtttaccctatc

SEQ ID NO: 191781 - DNA, 25 bp, Canis familiaris
taaaagaagccatgccgctagcctt

SEQ ID NO: 191782 - DNA, 25 bp, Canis familiaris
taagaggaacttggccttccctgag

SEQ ID NO: 191783 - DNA, 25 bp, Canis familiaris
taagaagtagctaagtctcccctgg

SEQ ID NO: 191784 - DNA, 25 bp, Canis familiaris
taaaagtgcatgtgatgtttccagt

SEQ ID NO: 191785 - DNA, 25 bp, Canis familiaris
taaatcagatgcaacgagtcctggt

SEQ ID NO: 191786 - DNA, 25 bp, Canis familiaris
taagctatcgatgctggtcctggct

SEQ ID NO: 191787 - DNA, 25 bp, Canis familiaris
taagtgatggtgacaggccccagct

SEQ ID NO: 191788 - DNA, 25 bp, Canis familiaris
taagtagaggagggcgctccccact

SEQ ID NO: 191789 - DNA, 25 bp, Canis familiaris
taacaatgggcaaaggcctccggtt

SEQ ID NO: 191790 - DNA, 25 bp, Canis familiaris
taacttgggccagccttggttgctt

SEQ ID NO: 191791 - DNA, 25 bp, Canis familiaris
taactggagtactcctctccttgtt

SEQ ID NO: 191792 - DNA, 25 bp, Canis familiaris
taagatatggctttttcctcctttt

SEQ ID NO: 191793 - DNA, 25 bp, Canis familiaris
taagtgtatgtttcttccttcttta

SEQ ID NO: 191794 - DNA, 25 bp, Canis familiaris
taagtgcagattcgtttccttctct

SEQ ID NO: 191795 - DNA, 25 bp, Canis familiaris
taagtcaatagcccactgcattttt

SEQ ID NO: 191796 - DNA, 25 bp, Canis familiaris
taacttgtcctgcactgcatttctt

SEQ ID NO: 191797 - DNA, 25 bp, Canis familiaris
taagttgtagctcttgcttctttct

SEQ ID NO: 191798 - DNA, 25 bp, Canis familiaris
taagtattggctctacattcctcat

SEQ ID NO: 191799 - DNA, 25 bp, Canis familiaris
taagctttcctgatgagcattctaa

SEQ ID NO: 191800 - DNA, 25 bp, Canis familiaris
taactattctgccttgagcttctca

SEQ ID NO: 191801 - DNA, 25 bp, Canis familiaris
taactggtctccttacattccattg

SEQ ID NO: 191802 - DNA, 25 bp, Canis familiaris
taagctggccctttacatccaataa

SEQ ID NO: 191803 - DNA, 25 bp, Canis familiaris
taagttccctctttgtcctataata

SEQ ID NO: 191804 - DNA, 25 bp, Canis familiaris
taagttttccttactccaattatga

SEQ ID NO: 191805 - DNA, 25 bp, Canis familiaris
taagtatttccagtgatctcccatt

SEQ ID NO: 191806 - DNA, 25 bp, Canis familiaris
tagcaaatttgctggtgccataatt

SEQ ID NO: 191807 - DNA, 25 bp, Canis familiaris
taacaatttgccctgtgtcaacctt

SEQ ID NO: 191808 - DNA, 25 bp, Canis familiaris
taagtacattgactcttgttcacct

SEQ ID NO: 191809 - DNA, 25 bp, Canis familiaris
taagatgcaggtgctctgggtgccc

SEQ ID NO: 191810 - DNA, 25 bp, Canis familiaris
taagatgattgccctttcagtggac

SEQ ID NO: 191811 - DNA, 25 bp, Canis familiaris
tacactgtctgccctggtagatggg

SEQ ID NO: 191812 - DNA, 25 bp, Canis familiaris
taactgtcatgtccctgaggggtgc

SEQ ID NO: 191813 - DNA, 25 bp, Canis familiaris
taacttctctgaaagggggagcagg

SEQ ID NO: 191814 - DNA, 25 bp, Canis familiaris
tagacgactcggacggcgagggcca

SEQ ID NO: 191815 - DNA, 25 bp, Canis familiaris
taacgtgtgcgagtgcgacgggggc

SEQ ID NO: 191816 - DNA, 25 bp, Canis familiaris
taactggatcgacaacaggagccgc

SEQ ID NO: 191817 - DNA, 25 bp, Canis familiaris
tatagggtttgggtaggaggccgtg

SEQ ID NO: 191818 - DNA, 25 bp, Canis familiaris
ttagtggagggtgtggggggttgtg

SEQ ID NO: 191819 - DNA, 25 bp, Canis familiaris
taagtctcagggtccaggggaggtt

SEQ ID NO: 191820 - DNA, 25 bp, Canis familiaris
taagctgcttgcagctccaggggac

SEQ ID NO: 191821 - DNA, 25 bp, Canis familiaris
taagcggctgcggaactggttgacg

SEQ ID NO: 191822 - DNA, 25 bp, Canis familiaris
tacatgggatgggtcgggttggcct

SEQ ID NO: 191823 - DNA, 25 bp, Canis familiaris
tacagccagggcctgggctggtacc

SEQ ID NO: 191824 - DNA, 25 bp, Canis familiaris
taagccacttccggtccagtggcac

SEQ ID NO: 191825 - DNA, 25 bp, Canis familiaris
taactgccttgtgggtcaggtccct

SEQ ID NO: 191826 - DNA, 25 bp, Canis familiaris
taactgccttgtgggtcaggtccct

SEQ ID NO: 191827 - DNA, 25 bp, Canis familiaris
taactgccttgtgggtcaggtccct

SEQ ID NO: 191828 - DNA, 25 bp, Canis familiaris
taactgccttgtgggtcaggtccct

SEQ ID NO: 191829 - DNA, 25 bp, Canis familiaris
taactgccttgtgggtcaggtccct

SEQ ID NO: 191830 - DNA, 25 bp, Canis familiaris
taactgccttgtgggtcaggtccct

SEQ ID NO: 191831 - DNA, 25 bp, Canis familiaris
taacgactcggtgttgcgtgacctg

SEQ ID NO: 191832 - DNA, 25 bp, Canis familiaris
taacgagggggagtgtgcgtcaccg

SEQ ID NO: 191833 - DNA, 25 bp, Canis familiaris
taaccgggggcaatggaccacccat

SEQ ID NO: 191834 - DNA, 25 bp, Canis familiaris
taactggcggggaatttccacccat

SEQ ID NO: 191835 - DNA, 25 bp, Canis familiaris
taactcctgggagctttacagcagc

SEQ ID NO: 191836 - DNA, 25 bp, Canis familiaris
taacctcggtcgatattggccagca

SEQ ID NO: 191837 - DNA, 25 bp, Canis familiaris
taagccctggtggggattacttgaa

SEQ ID NO: 191838 - DNA, 25 bp, Canis familiaris
taagcccgttctgggtttcttggat

SEQ ID NO: 191839 - DNA, 25 bp, Canis familiaris
taacccagtgcactgaggttttcgt

SEQ ID NO: 191840 - DNA, 25 bp, Canis familiaris
taaatacagttggacgtttatcgtc

SEQ ID NO: 191841 - DNA, 25 bp, Canis familiaris
taaccgcagcagaacacgtcatttc

SEQ ID NO: 191842 - DNA, 25 bp, Canis familiaris
taaccacagcagactcactattttc

SEQ ID NO: 191843 - DNA, 25 bp, Canis familiaris
tactaacggacagctttcctgccga

SEQ ID NO: 191844 - DNA, 25 bp, Canis familiaris
tagtaaaggtccggttccaggctca

SEQ ID NO: 191845 - DNA, 25 bp, Canis familiaris
tatgaaacaggggcttttccacctc

SEQ ID NO: 191846 - DNA, 25 bp, Canis familiaris
taaaatagggctaatgctacccacc

SEQ ID NO: 191847 - DNA, 25 bp, Canis familiaris
taaccacaacattatttcacccacc

SEQ ID NO: 191848 - DNA, 25 bp, Canis familiaris
taaccacacactggttcatcgctca

SEQ ID NO: 191849 - DNA, 25 bp, Canis familiaris
taagccacatccagattcttgaccc

SEQ ID NO: 191850 - DNA, 25 bp, Canis familiaris
taagccaatcaaaaatttcccattt

SEQ ID NO: 191851 - DNA, 25 bp, Canis familiaris
taaccaatctctaaactactccatc

SEQ ID NO: 191852 - DNA, 25 bp, Canis familiaris
taaccagctctataatctttccatt

SEQ ID NO: 191853 - DNA, 25 bp, Canis familiaris
taaccgcctagcaaattattctcct

SEQ ID NO: 191854 - DNA, 25 bp, Canis familiaris
taacccttagcctatattttcacta

SEQ ID NO: 191855 - DNA, 25 bp, Canis familiaris
tacaccaattaaaaatctttcccag

SEQ ID NO: 191856 - DNA, 25 bp, Canis familiaris
taaccagatggctgtttccttccaa

SEQ ID NO: 191857 - DNA, 25 bp, Canis familiaris
taaccagatggctgtttccttccaa

SEQ ID NO: 191858 - DNA, 25 bp, Canis familiaris
taaccagcaggaatgccttaccctc

SEQ ID NO: 191859 - DNA, 25 bp, Canis familiaris
taaccagagataggccccataccct

SEQ ID NO: 191860 - DNA, 25 bp, Canis familiaris
taaccgagaaggccccatcattttt

SEQ ID NO: 191861 - DNA, 25 bp, Canis familiaris
taacgcccaatgggcccaacttggg

SEQ ID NO: 191862 - DNA, 25 bp, Canis familiaris
taacccctaaagcccaactgtatgg

SEQ ID NO: 191863 - DNA, 25 bp, Canis familiaris
taaccgaccaaatgctgccttgttt

SEQ ID NO: 191864 - DNA, 25 bp, Canis familiaris
taaccggaacaatgatgccctgcgc

SEQ ID NO: 191865 - DNA, 25 bp, Canis familiaris
taacctgcgtatctaactgctcgcc

SEQ ID NO: 191866 - DNA, 25 bp, Canis familiaris
taacctggaacttacacatactgca

SEQ ID NO: 191867 - DNA, 25 bp, Canis familiaris
taaccagtaagcaattcaatccgga

SEQ ID NO: 191868 - DNA, 25 bp, Canis familiaris
taacaagtatttagtgaaccggcaa

SEQ ID NO: 191869 - DNA, 25 bp, Canis familiaris
taacaggtctttcagaccttggccc

SEQ ID NO: 191870 - DNA, 25 bp, Canis familiaris
taaaggtctcaataacccattcacc

SEQ ID NO: 191871 - DNA, 25 bp, Canis familiaris
taaaagttaaagcacaccctcactc

SEQ ID NO: 191872 - DNA, 25 bp, Canis familiaris
taaaacctacaacatattcctctcc

SEQ ID NO: 191873 - DNA, 25 bp, Canis familiaris
taaaggcttggctgttttccgtgcc

SEQ ID NO: 191874 - DNA, 25 bp, Canis familiaris
tacaaactccagtgggactccgtgc

SEQ ID NO: 191875 - DNA, 25 bp, Canis familiaris
tacaaaaatagcggctggacccggg

SEQ ID NO: 191876 - DNA, 25 bp, Canis familiaris
tatgtaaagaaccgggatccctggg

SEQ ID NO: 191877 - DNA, 25 bp, Canis familiaris
taccagaagaccagggtcccatttc

SEQ ID NO: 191878 - DNA, 25 bp, Canis familiaris
tacctaggtgcctggcaaacccttg

SEQ ID NO: 191879 - DNA, 25 bp, Canis familiaris
taccatacgccgggaaaggccactt

SEQ ID NO: 191880 - DNA, 25 bp, Canis familiaris
tacgcacggccggtacagtgaaact

SEQ ID NO: 191881 - DNA, 25 bp, Canis familiaris
ttaccgcagccgctatcaggacggc

SEQ ID NO: 191882 - DNA, 25 bp, Canis familiaris
taacgccacgctgtcaagtgaagac

SEQ ID NO: 191883 - DNA, 25 bp, Canis familiaris
ttcaagtccggcctcaagtacaaga

SEQ ID NO: 191884 - DNA, 25 bp, Canis familiaris
taccgcacgggcacaagttcaagtt

SEQ ID NO: 191885 - DNA, 25 bp, Canis familiaris
tatccaaaggtcccaaactataatt

SEQ ID NO: 191886 - DNA, 25 bp, Canis familiaris
ttcacaaaggtaccaaagtttcatt

SEQ ID NO: 191887 - DNA, 25 bp, Canis familiaris
ttaaaaatgtcacaaaggtgctgct

SEQ ID NO: 191888 - DNA, 25 bp, Canis familiaris
taaagtccattctgagaaggagcct

SEQ ID NO: 191889 - DNA, 25 bp, Canis familiaris
tataaggaattctgggggcccccat

SEQ ID NO: 191890 - DNA, 25 bp, Canis familiaris
taaaggtaaatgtgggcctcctcca

SEQ ID NO: 191891 - DNA, 25 bp, Canis familiaris
taagagagtacatgtgggggcacct

SEQ ID NO: 191892 - DNA, 25 bp, Canis familiaris
taagctgttggaaggggggcactca

SEQ ID NO: 191893 - DNA, 25 bp, Canis familiaris
taacctgtggataagggaagcccca

SEQ ID NO: 191894 - DNA, 25 bp, Canis familiaris
taacacccgacagtgggaacctccg

SEQ ID NO: 191895 - DNA, 25 bp, Canis familiaris
taccctgccgtagaggtaccacaag

SEQ ID NO: 191896 - DNA, 25 bp, Canis familiaris
taaaaaattacgcgttgccacaagg

SEQ ID NO: 191897 - DNA, 25 bp, Canis familiaris
taaaaatttctgggctgttcctggg

SEQ ID NO: 191898 - DNA, 25 bp, Canis familiaris
taagacttattcatttttccaggga

SEQ ID NO: 191899 - DNA, 25 bp, Canis familiaris
ttaaaggagtctcttcttcggggca

SEQ ID NO: 191900 - DNA, 25 bp, Canis familiaris
taaaactgcaggcttcttttgggtc

SEQ ID NO: 191901 - DNA, 25 bp, Canis familiaris
taggcctcagggctttattttagtc

SEQ ID NO: 191902 - DNA, 25 bp, Canis familiaris
taagcagcacagtgtttgttttctg

SEQ ID NO: 191903 - DNA, 25 bp, Canis familiaris
taagaatagccaccctgtttccata

SEQ ID NO: 191904 - DNA, 25 bp, Canis familiaris
taagaatcgtcatccttcattttat

SEQ ID NO: 191905 - DNA, 25 bp, Canis familiaris
taaaattcacatcccatacacttct

SEQ ID NO: 191906 - DNA, 25 bp, Canis familiaris
taagaaatcacagcctatactcccg

SEQ ID NO: 191907 - DNA, 25 bp, Canis familiaris
taagagacctaggctttcctcagcc

SEQ ID NO: 191908 - DNA, 25 bp, Canis familiaris
taagagaggccggtgatgctccttc

SEQ ID NO: 191909 - DNA, 25 bp, Canis familiaris
taagatgattccgattgtccctgta

SEQ ID NO: 191910 - DNA, 25 bp, Canis familiaris
taagatgattccgattgtccctgta

SEQ ID NO: 191911 - DNA, 25 bp, Canis familiaris
taactactacgttgacaccgctgtg

SEQ ID NO: 191912 - DNA, 25 bp, Canis familiaris
taactactacgttgacaccgctgtg

SEQ ID NO: 191913 - DNA, 25 bp, Canis familiaris
tagatcttctgtacttaaccctgga

SEQ ID NO: 191914 - DNA, 25 bp, Canis familiaris
taacttgatgttataaccccttaat

SEQ ID NO: 191915 - DNA, 25 bp, Canis familiaris
taagcccttttttatcactgcctta

SEQ ID NO: 191916 - DNA, 25 bp, Canis familiaris
taaccctgtgtgtttacttactgta

SEQ ID NO: 191917 - DNA, 25 bp, Canis familiaris
taactgcctctttttaatcttttga

SEQ ID NO: 191918 - DNA, 25 bp, Canis familiaris
tataaattggtttaagtctttctga

SEQ ID NO: 191919 - DNA, 25 bp, Canis familiaris
ttaaacctgttctaagtgtacttgt

SEQ ID NO: 191920 - DNA, 25 bp, Canis familiaris
ttaactccttaagaggtctgtgttg

SEQ ID NO: 191921 - DNA, 25 bp, Canis familiaris
ttaaccttttgtgatccttggtgta

SEQ ID NO: 191922 - DNA, 25 bp, Canis familiaris
taaacaatttttcagccttgggtga

SEQ ID NO: 191923 - DNA, 25 bp, Canis familiaris
taacaaacttttcagcctcattttt

SEQ ID NO: 191924 - DNA, 25 bp, Canis familiaris
taagaaacatttgccaccttctctt

SEQ ID NO: 191925 - DNA, 25 bp, Canis familiaris
taagagtagttttgctcaccttcct

SEQ ID NO: 191926 - DNA, 25 bp, Canis familiaris
taagacaggatactagctcccttcc

SEQ ID NO: 191927 - DNA, 25 bp, Canis familiaris
taagagcggtggaatgcttccccct

SEQ ID NO: 191928 - DNA, 25 bp, Canis familiaris
taagactggctgattctgttctcct

SEQ ID NO: 191929 - DNA, 25 bp, Canis familiaris
taagatgttgctattattattcagc

SEQ ID NO: 191930 - DNA, 25 bp, Canis familiaris
taagagcttgttctgttttccgtca

SEQ ID NO: 191931 - DNA, 25 bp, Canis familiaris
taagagcttaagttattttccctca

SEQ ID NO: 191932 - DNA, 25 bp, Canis familiaris
taagatgtcttctttttttcttcct

SEQ ID NO: 191933 - DNA, 25 bp, Canis familiaris
taagatgtccttcatgttttctcac

SEQ ID NO: 191934 - DNA, 25 bp, Canis familiaris
taagaatactggcctgaatgttata

SEQ ID NO: 191935 - DNA, 25 bp, Canis familiaris
taacctactgacctcagattctaag

SEQ ID NO: 191936 - DNA, 25 bp, Canis familiaris
taaccattggccccagttgtggagc

SEQ ID NO: 191937 - DNA, 25 bp, Canis familiaris
taactcttccaccgagtctggtaga

SEQ ID NO: 191938 - DNA, 25 bp, Canis familiaris
taactgtgtcccgtgcgttagtaat

SEQ ID NO: 191939 - DNA, 25 bp, Canis familiaris
taactgcttatccagctgtcttcag

SEQ ID NO: 191940 - DNA, 25 bp, Canis familiaris
taagctaggcctgtgtcttcagcaa

SEQ ID NO: 191941 - DNA, 25 bp, Canis familiaris
taagcttgtactgggatcaagccat

SEQ ID NO: 191942 - DNA, 25 bp, Canis familiaris
taacctgtgactcagtctactcacc

SEQ ID NO: 191943 - DNA, 25 bp, Canis familiaris
taacctgggcaaacatctgagctcc

SEQ ID NO: 191944 - DNA, 25 bp, Canis familiaris
taacctggtaacaatggcctcctca

SEQ ID NO: 191945 - DNA, 25 bp, Canis familiaris
taagactggctagcatcaggcccca

SEQ ID NO: 191946 - DNA, 25 bp, Canis familiaris
taagacctcatcaacaagggctcta

SEQ ID NO: 191947 - DNA, 25 bp, Canis familiaris
taagcaggcccatccaggaatctca

SEQ ID NO: 191948 - DNA, 25 bp, Canis familiaris
taagcagcggcaaaccaggcagttc

SEQ ID NO: 191949 - DNA, 25 bp, Canis familiaris
taagccggcttggacagccagtgcc

SEQ ID NO: 191950 - DNA, 25 bp, Canis familiaris
taaccacagccttgatcagctctgg

SEQ ID NO: 191951 - DNA, 25 bp, Canis familiaris
taaacaagccattgcagcggcattt

SEQ ID NO: 191952 - DNA, 25 bp, Canis familiaris
taaaaaccacacgaggattatatag

SEQ ID NO: 191953 - DNA, 25 bp, Canis familiaris
tagaaaactacctgggaaagcataa

SEQ ID NO: 191954 - DNA, 25 bp, Canis familiaris
taactaacaacctttcccaagcata

SEQ ID NO: 191955 - DNA, 25 bp, Canis familiaris
tacatatataaaaccccctctaata

SEQ ID NO: 191956 - DNA, 25 bp, Canis familiaris
taagagctaaggtagcccctccaat

SEQ ID NO: 191957 - DNA, 25 bp, Canis familiaris
taagacaaacgaaccagccaacaca

SEQ ID NO: 191958 - DNA, 25 bp, Canis familiaris
taagaaagattgaccgcccaacatg

SEQ ID NO: 191959 - DNA, 25 bp, Canis familiaris
taagaccttggatccccaaataaat

SEQ ID NO: 191960 - DNA, 25 bp, Canis familiaris
taaaccttggttctcaaaatcaatt

SEQ ID NO: 191961 - DNA, 25 bp, Canis familiaris
taaccacaatgcattcgtaaaacct

SEQ ID NO: 191962 - DNA, 25 bp, Canis familiaris
taagcctcaatgacttttacatacc

SEQ ID NO: 191963 - DNA, 25 bp, Canis familiaris
taaccagattgtcttttcagaccga

SEQ ID NO: 191964 - DNA, 25 bp, Canis familiaris
taagacaatatctatttcttccacc

SEQ ID NO: 191965 - DNA, 25 bp, Canis familiaris
taagcactgttctcttttgcacagc

SEQ ID NO: 191966 - DNA, 25 bp, Canis familiaris
taagactgttatgtttctattgctt

SEQ ID NO: 191967 - DNA, 25 bp, Canis familiaris
taagaatgtattttccctgtttgaa

SEQ ID NO: 191968 - DNA, 25 bp, Canis familiaris
taagaattcagctttcattttttta

SEQ ID NO: 191969 - DNA, 25 bp, Canis familiaris
taagaatctgcaattcgcacgtttc

SEQ ID NO: 191970 - DNA, 25 bp, Canis familiaris
taagagacacataagtgcactgctt

SEQ ID NO: 191971 - DNA, 25 bp, Canis familiaris
taaagacctcgaatcatgtgcaata

SEQ ID NO: 191972 - DNA, 25 bp, Canis familiaris
tacaatgatgaccgccaagtgaaga

SEQ ID NO: 191973 - DNA, 25 bp, Canis familiaris
taagctggaaggtcactggaataat

SEQ ID NO: 191974 - DNA, 25 bp, Canis familiaris
taagctggaactttcacagaatcaa

SEQ ID NO: 191975 - DNA, 25 bp, Canis familiaris
taacgcgaactagtgcgaatcacca

SEQ ID NO: 191976 - DNA, 25 bp, Canis familiaris
taagcggatatcagggacatccata

SEQ ID NO: 191977 - DNA, 25 bp, Canis familiaris
taagacgaatctgtatggcacctgg

SEQ ID NO: 191978 - DNA, 25 bp, Canis familiaris
taagaagacactggctaccacactc

SEQ ID NO: 191979 - DNA, 25 bp, Canis familiaris
taaaataacctccatctcaacattg

SEQ ID NO: 191980 - DNA, 25 bp, Canis familiaris
taagaagcaacaacctctcctcttc

SEQ ID NO: 191981 - DNA, 25 bp, Canis familiaris
taagaacgacccgttcatctttccg

SEQ ID NO: 191982 - DNA, 25 bp, Canis familiaris
taaaaagaccccatatccaacacca

SEQ ID NO: 191983 - DNA, 25 bp, Canis familiaris
taaatgcaaaccactacaaacccaa

SEQ ID NO: 191984 - DNA, 25 bp, Canis familiaris
taaaaaattttcacatacagcccat

SEQ ID NO: 191985 - DNA, 25 bp, Canis familiaris
taaaaccaactccaccataaactat

SEQ ID NO: 191986 - DNA, 25 bp, Canis familiaris
taaactccaccaaacgaagacactt

SEQ ID NO: 191987 - DNA, 25 bp, Canis familiaris
taaacccccaaattgcagaagtctt

SEQ ID NO: 191988 - DNA, 25 bp, Canis familiaris
taactccgtcaccaaagctgacctt

SEQ ID NO: 191989 - DNA, 25 bp, Canis familiaris
taagctcggtcagacaagccacggt

SEQ ID NO: 191990 - DNA, 25 bp, Canis familiaris
taactgggttctacaaggacgattt

SEQ ID NO: 191991 - DNA, 25 bp, Canis familiaris
taagctcggctaattcaagacacta

SEQ ID NO: 191992 - DNA, 25 bp, Canis familiaris
taactgtggtaattctagagctaat

SEQ ID NO: 191993 - DNA, 25 bp, Canis familiaris
taactgtggtaattctagagctaat

SEQ ID NO: 191994 - DNA, 25 bp, Canis familiaris
taagctggctgtcctgaaatactac

SEQ ID NO: 191995 - DNA, 25 bp, Canis familiaris
taagctggctgtcctgaaatactac

SEQ ID NO: 191996 - DNA, 25 bp, Canis familiaris
taagctggctgtcctgaaatactac

SEQ ID NO: 191997 - DNA, 25 bp, Canis familiaris
taagcatcctgtgtgaatgtattaa

SEQ ID NO: 191998 - DNA, 25 bp, Canis familiaris
taagcagccttgatacattagccct

SEQ ID NO: 191999 - DNA, 25 bp, Canis familiaris
taagcagaacatcaccattaccaca

SEQ ID NO: 192000 - DNA, 25 bp, Canis familiaris
ttagccaactccacattacgacgaa

SEQ ID NO: 192001 - DNA, 25 bp, Canis familiaris
taacacacaccctcttactagtggt

SEQ ID NO: 192002 - DNA, 25 bp, Canis familiaris
taaactactccatctttcggttgat

SEQ ID NO: 192003 - DNA, 25 bp, Canis familiaris
taaactgactgttcctttccaggtc

SEQ ID NO: 192004 - DNA, 25 bp, Canis familiaris
taaagtgccagtagccctaaagggt

SEQ ID NO: 192005 - DNA, 25 bp, Canis familiaris
taaagctccttcaggcagaaacgga

SEQ ID NO: 192006 - DNA, 25 bp, Canis familiaris
tacaacctgttcaccaagtaccgga

SEQ ID NO: 192007 - DNA, 25 bp, Canis familiaris
taaaccatagtgacccagactggcc

SEQ ID NO: 192008 - DNA, 25 bp, Canis familiaris
taaacctgtctgcccttggggcagc

SEQ ID NO: 192009 - DNA, 25 bp, Canis familiaris
taacctctgcacccagtatggggcg

SEQ ID NO: 192010 - DNA, 25 bp, Canis familiaris
taacctgtgcttgcatgtgggtcgg

SEQ ID NO: 192011 - DNA, 25 bp, Canis familiaris
taacgctattgcgatatgatggttc

SEQ ID NO: 192012 - DNA, 25 bp, Canis familiaris
taacagtgttcgtcatcaggtccaa

SEQ ID NO: 192013 - DNA, 25 bp, Canis familiaris
taacgtgattcaaccagggcctata

SEQ ID NO: 192014 - DNA, 25 bp, Canis familiaris
taaatgcgcattacgacgggctaac

SEQ ID NO: 192015 - DNA, 25 bp, Canis familiaris
tacaaccagtccctctggcagaaac

SEQ ID NO: 192016 - DNA, 25 bp, Canis familiaris
taacaaagcctcccagagcaggacc

SEQ ID NO: 192017 - DNA, 25 bp, Canis familiaris
taacaaacactccaggggaccctgt

SEQ ID NO: 192018 - DNA, 25 bp, Canis familiaris
taagcacagacactaaggcagcaac

SEQ ID NO: 192019 - DNA, 25 bp, Canis familiaris
taagcatgcgaccttgtgtaccact

SEQ ID NO: 192020 - DNA, 25 bp, Canis familiaris
taagctgcaggcagtggttctccca

SEQ ID NO: 192021 - DNA, 25 bp, Canis familiaris
taactgcagtaaatgctcttctccc

SEQ ID NO: 192022 - DNA, 25 bp, Canis familiaris
taagccagcttactgcttatctccc

SEQ ID NO: 192023 - DNA, 25 bp, Canis familiaris
taagccacataaatcgagtctgacg

SEQ ID NO: 192024 - DNA, 25 bp, Canis familiaris
taagcacacattccccagtgctgca

SEQ ID NO: 192025 - DNA, 25 bp, Canis familiaris
taaccagcattctccgctgttggac

SEQ ID NO: 192026 - DNA, 25 bp, Canis familiaris
taagccagggcttccttttggacat

SEQ ID NO: 192027 - DNA, 25 bp, Canis familiaris
taagccaagagaaactttgctggaa

SEQ ID NO: 192028 - DNA, 25 bp, Canis familiaris
taagcagaagcataacttctctgaa

SEQ ID NO: 192029 - DNA, 25 bp, Canis familiaris
taagaaggctaatatttctctttta

SEQ ID NO: 192030 - DNA, 25 bp, Canis familiaris
taaaagttgacatatattagctata

SEQ ID NO: 192031 - DNA, 25 bp, Canis familiaris
taaaactgataaacttctagtcaag

SEQ ID NO: 192032 - DNA, 25 bp, Canis familiaris
taaaactatatttgcatccgagaca

SEQ ID NO: 192033 - DNA, 25 bp, Canis familiaris
taacagctgctcaacttcaccagaa

SEQ ID NO: 192034 - DNA, 25 bp, Canis familiaris
taacctacacatttgcagcgcaaac

SEQ ID NO: 192035 - DNA, 25 bp, Canis familiaris
taacccaagcataacatgctgcaga

SEQ ID NO: 192036 - DNA, 25 bp, Canis familiaris
ttagcccaaactgatgccaagaaaa

SEQ ID NO: 192037 - DNA, 25 bp, Canis familiaris
taagcaccaaactacatacattgta

SEQ ID NO: 192038 - DNA, 25 bp, Canis familiaris
taagcaccaaccccacaaagtgaca

SEQ ID NO: 192039 - DNA, 25 bp, Canis familiaris
taaagagaagcccccaactggaaga

SEQ ID NO: 192040 - DNA, 25 bp, Canis familiaris
taaaagtccctaacctgtggacaga

SEQ ID NO: 192041 - DNA, 25 bp, Canis familiaris
taagaagtaccgagccttgaggcta

SEQ ID NO: 192042 - DNA, 25 bp, Canis familiaris
taagaatgtacccgaccttgaggct

SEQ ID NO: 192043 - DNA, 25 bp, Canis familiaris
taagaagtacccgatccttgaggct

SEQ ID NO: 192044 - DNA, 25 bp, Canis familiaris
tacgaaaggcccaactttgctggct

SEQ ID NO: 192045 - DNA, 25 bp, Canis familiaris
tacagaaccccagtaccagcctggg

SEQ ID NO: 192046 - DNA, 25 bp, Canis familiaris
tacaggaacgcagctccagagaccg

SEQ ID NO: 192047 - DNA, 25 bp, Canis familiaris
taaaaagccaccgtgctgagcagcc

SEQ ID NO: 192048 - DNA, 25 bp, Canis familiaris
taacaaaccccagtgctgacttgct

SEQ ID NO: 192049 - DNA, 25 bp, Canis familiaris
taagcacaaggcagcccgagctttc

SEQ ID NO: 192050 - DNA, 25 bp, Canis familiaris
taagcaaagaccccgtgctctattc

SEQ ID NO: 192051 - DNA, 25 bp, Canis familiaris
taagctaaacatagccctttatcta

SEQ ID NO: 192052 - DNA, 25 bp, Canis familiaris
taacttcagaaggcctcatttataa

SEQ ID NO: 192053 - DNA, 25 bp, Canis familiaris
taaccatgctaatgtctatgcttta

SEQ ID NO: 192054 - DNA, 25 bp, Canis familiaris
taactcctatgattgtatgctactt

SEQ ID NO: 192055 - DNA, 25 bp, Canis familiaris
taaccgctcagagttgtgtccagct

SEQ ID NO: 192056 - DNA, 25 bp, Canis familiaris
taacctgtctgaaatgtaccatctt

SEQ ID NO: 192057 - DNA, 25 bp, Canis familiaris
taagctttgcttcatgctacctttg

SEQ ID NO: 192058 - DNA, 25 bp, Canis familiaris
taacttcctttactacatcagctcg

SEQ ID NO: 192059 - DNA, 25 bp, Canis familiaris
taaatatctgcttctgtgaaatacc

SEQ ID NO: 192060 - DNA, 25 bp, Canis familiaris
taacttcgttcgccaggcagagctc

SEQ ID NO: 192061 - DNA, 25 bp, Canis familiaris
taacttcacttagcagagcaccctc

SEQ ID NO: 192062 - DNA, 25 bp, Canis familiaris
taacttgactccacagagctgctcc

SEQ ID NO: 192063 - DNA, 25 bp, Canis familiaris
taacctgtcctaaagactgctagcc

SEQ ID NO: 192064 - DNA, 25 bp, Canis familiaris
taacctgtgtgttacgactatcccg

SEQ ID NO: 192065 - DNA, 25 bp, Canis familiaris
taagcctggtgaggccgagcagcac

SEQ ID NO: 192066 - DNA, 25 bp, Canis familiaris
taagcagctggcagagccgcaggca

SEQ ID NO: 192067 - DNA, 25 bp, Canis familiaris
taagcagcctgattgatcaccgggt

SEQ ID NO: 192068 - DNA, 25 bp, Canis familiaris
taagccacaaatacctggtgctgtc

SEQ ID NO: 192069 - DNA, 25 bp, Canis familiaris
taagccaacaaccatggggctgcca

SEQ ID NO: 192070 - DNA, 25 bp, Canis familiaris
taacacagaaaccattctcgtccca

SEQ ID NO: 192071 - DNA, 25 bp, Canis familiaris
taaaagaaattctccatgtgcgccc

SEQ ID NO: 192072 - DNA, 25 bp, Canis familiaris
taaaaataattctctcaggtccaaa

SEQ ID NO: 192073 - DNA, 25 bp, Canis familiaris
taaaagatttactgccgtctgaaaa

SEQ ID NO: 192074 - DNA, 25 bp, Canis familiaris
taaagaattccctgactgctaaaaa

SEQ ID NO: 192075 - DNA, 25 bp, Canis familiaris
taaagtattccctgtcttaaatgaa

SEQ ID NO: 192076 - DNA, 25 bp, Canis familiaris
taaccttattccatgttgaaaaatt

SEQ ID NO: 192077 - DNA, 25 bp, Canis familiaris
taacacatgtaacccgtatgaaaac

SEQ ID NO: 192078 - DNA, 25 bp, Canis familiaris
tacacacagtctccaacttctgaaa

SEQ ID NO: 192079 - DNA, 25 bp, Canis familiaris
taacacctatgtccatttgtcaata

SEQ ID NO: 192080 - DNA, 25 bp, Canis familiaris
taacctgtatgctcttttgatacat

SEQ ID NO: 192081 - DNA, 25 bp, Canis familiaris
taaacagaatcaggctccctgctga

SEQ ID NO: 192082 - DNA, 25 bp, Canis familiaris
taaagcactgacactggccatgatc

SEQ ID NO: 192083 - DNA, 25 bp, Canis familiaris
taagccagccacactagacatgaca

SEQ ID NO: 192084 - DNA, 25 bp, Canis familiaris
taaccagcgctgatcttgcaaagca

SEQ ID NO: 192085 - DNA, 25 bp, Canis familiaris
taactgcagcttggtcttgaaatat

SEQ ID NO: 192086 - DNA, 25 bp, Canis familiaris
taacatgccaacccctgaatgattt

SEQ ID NO: 192087 - DNA, 25 bp, Canis familiaris
taacaccaactgatagcaattttta

SEQ ID NO: 192088 - DNA, 25 bp, Canis familiaris
taaaccaactgttctcagagtttta

SEQ ID NO: 192089 - DNA, 25 bp, Canis familiaris
tatttcccactgacctaaactttga

SEQ ID NO: 192090 - DNA, 25 bp, Canis familiaris
tacttcccacgtgtacatacctgtg

SEQ ID NO: 192091 - DNA, 25 bp, Canis familiaris
ttttcggccagtggtagccgcgtgg

SEQ ID NO: 192092 - DNA, 25 bp, Canis familiaris
tttttggccattgttctccggccag

SEQ ID NO: 192093 - DNA, 25 bp, Canis familiaris
tttcttgggaatgtgtgccggaata

SEQ ID NO: 192094 - DNA, 25 bp, Canis familiaris
tttatcgggttgattgccgaagtga

SEQ ID NO: 192095 - DNA, 25 bp, Canis familiaris
tatttgcctttttttgcacgggtga

SEQ ID NO: 192096 - DNA, 25 bp, Canis familiaris
tataaccttattttaaatgtgggag

SEQ ID NO: 192097 - DNA, 25 bp, Canis familiaris
taaaccattgtttcttcaattggga

SEQ ID NO: 192098 - DNA, 25 bp, Canis familiaris
taaacctacttgtggcgaatggata

SEQ ID NO: 192099 - DNA, 25 bp, Canis familiaris
taaacttccactgatggggcaggta

SEQ ID NO: 192100 - DNA, 25 bp, Canis familiaris
taaatttaagggaagaggcacagaa

SEQ ID NO: 192101 - DNA, 25 bp, Canis familiaris
taaatgtaaatgcgtagatggaagg

SEQ ID NO: 192102 - DNA, 25 bp, Canis familiaris
taaagtacgtctgtagcgggatggt

SEQ ID NO: 192103 - DNA, 25 bp, Canis familiaris
taaaattctgctacctcactgggat

SEQ ID NO: 192104 - DNA, 25 bp, Canis familiaris
taaactctgcactaatccaatgagg

SEQ ID NO: 192105 - DNA, 25 bp, Canis familiaris
taaacatctgcctgaggttaggagg

SEQ ID NO: 192106 - DNA, 25 bp, Canis familiaris
taactgcatcccttcattgtgctaa

SEQ ID NO: 192107 - DNA, 25 bp, Canis familiaris
taactgctccaccacttgtggaacc

SEQ ID NO: 192108 - DNA, 25 bp, Canis familiaris
taactggctgagccactggggtacc

SEQ ID NO: 192109 - DNA, 25 bp, Canis familiaris
taactgttgcagtgctgggcctagc

SEQ ID NO: 192110 - DNA, 25 bp, Canis familiaris
taacctctgtgaggctggtgtcccc

SEQ ID NO: 192111 - DNA, 25 bp, Canis familiaris
taacactctggagtttttccctgcc

SEQ ID NO: 192112 - DNA, 25 bp, Canis familiaris
taactttgagaactctatgcccccg

SEQ ID NO: 192113 - DNA, 25 bp, Canis familiaris
taaccatggaggacttgacccctgc

SEQ ID NO: 192114 - DNA, 25 bp, Canis familiaris
taaccatggaggacttgacccctgc

SEQ ID NO: 192115 - DNA, 25 bp, Canis familiaris
taaactgcgtggatcagacaccccc

SEQ ID NO: 192116 - DNA, 25 bp, Canis familiaris
taacagctcctggcttctaagctac

SEQ ID NO: 192117 - DNA, 25 bp, Canis familiaris
taactcagcctactttatagcataa

SEQ ID NO: 192118 - DNA, 25 bp, Canis familiaris
taacagacctacattattgaacaat

SEQ ID NO: 192119 - DNA, 25 bp, Canis familiaris
taacaatccttgcttgcttgacctt

SEQ ID NO: 192120 - DNA, 25 bp, Canis familiaris
taaaaatcatagctatgttactgct

SEQ ID NO: 192121 - DNA, 25 bp, Canis familiaris
taaagtacatgacacccaacagctc

SEQ ID NO: 192122 - DNA, 25 bp, Canis familiaris
taaactgacggatctcacgagtccc

SEQ ID NO: 192123 - DNA, 25 bp, Canis familiaris
taacctactgaaccactcaggtccc

SEQ ID NO: 192124 - DNA, 25 bp, Canis familiaris
taagccacctaggccctaggcatcc

SEQ ID NO: 192125 - DNA, 25 bp, Canis familiaris
taacagaccagacacagctcaggct

SEQ ID NO: 192126 - DNA, 25 bp, Canis familiaris
taaagaccagagctcgattcgatgt

SEQ ID NO: 192127 - DNA, 25 bp, Canis familiaris
taaaattcggtgccgatgcccgagc

SEQ ID NO: 192128 - DNA, 25 bp, Canis familiaris
taaaatgccgaacggggcgctgacc

SEQ ID NO: 192129 - DNA, 25 bp, Canis familiaris
taacaatcacccaagggccgaggcc

SEQ ID NO: 192130 - DNA, 25 bp, Canis familiaris
taaaagcggctgggtggccaaggcc

SEQ ID NO: 192131 - DNA, 25 bp, Canis familiaris
taaaagccctgggttgactttgcct

SEQ ID NO: 192132 - DNA, 25 bp, Canis familiaris
taaacagcctcatagtggacgttag

SEQ ID NO: 192133 - DNA, 25 bp, Canis familiaris
taaactcattaacgtgtattttcac

SEQ ID NO: 192134 - DNA, 25 bp, Canis familiaris
taaaccttaacccatactttcagca

SEQ ID NO: 192135 - DNA, 25 bp, Canis familiaris
taaaacttaccatcacactctttcc

SEQ ID NO: 192136 - DNA, 25 bp, Canis familiaris
taaaattagacctctctgtctttga

SEQ ID NO: 192137 - DNA, 25 bp, Canis familiaris
taaaagtatgttcacagtttgtaga

SEQ ID NO: 192138 - DNA, 25 bp, Canis familiaris
taaaagttgtcctcgttttcgattg

SEQ ID NO: 192139 - DNA, 25 bp, Canis familiaris
taacaagggttctcttctttcagct

SEQ ID NO: 192140 - DNA, 25 bp, Canis familiaris
taaagaagggtcccattcctgttat

SEQ ID NO: 192141 - DNA, 25 bp, Canis familiaris
taagctgaaatggctccttttttta

SEQ ID NO: 192142 - DNA, 25 bp, Canis familiaris
taaccaactgctgcctttttaaaat

SEQ ID NO: 192143 - DNA, 25 bp, Canis familiaris
taaaccctcactgtctttttagcaa

SEQ ID NO: 192144 - DNA, 25 bp, Canis familiaris
taacccctttcactatttcttatat

SEQ ID NO: 192145 - DNA, 25 bp, Canis familiaris
taacccaggttggtttctgctttca

SEQ ID NO: 192146 - DNA, 25 bp, Canis familiaris
taaccagcaggttctcttttctttg

SEQ ID NO: 192147 - DNA, 25 bp, Canis familiaris
taacctgcagttaccttctgttttt

SEQ ID NO: 192148 - DNA, 25 bp, Canis familiaris
taaccatacctgacttttctggttt

SEQ ID NO: 192149 - DNA, 25 bp, Canis familiaris
taaccaccgatgacttttcaaatcc

SEQ ID NO: 192150 - DNA, 25 bp, Canis familiaris
taaagcccgattattgttagactaa

SEQ ID NO: 192151 - DNA, 25 bp, Canis familiaris
taaaaccttctgatttgtagccaaa

SEQ ID NO: 192152 - DNA, 25 bp, Canis familiaris
taacaacgcctggccttgttactct

SEQ ID NO: 192153 - DNA, 25 bp, Canis familiaris
taacgatcttctgctttgttcatac

SEQ ID NO: 192154 - DNA, 25 bp, Canis familiaris
taactctatttaattctgaatgcaa

SEQ ID NO: 192155 - DNA, 25 bp, Canis familiaris
taacctttcatacctcaataaacaa

SEQ ID NO: 192156 - DNA, 25 bp, Canis familiaris
taacctttagttgcctaacatgaaa

SEQ ID NO: 192157 - DNA, 25 bp, Canis familiaris
taacctttttctgtcttcaacaaat

SEQ ID NO: 192158 - DNA, 25 bp, Canis familiaris
taaattccttttttgcccaattcag

SEQ ID NO: 192159 - DNA, 25 bp, Canis familiaris
taaatattcctctgaagtcccttct

SEQ ID NO: 192160 - DNA, 25 bp, Canis familiaris
taaaattgcaacaagggaccctttg

SEQ ID NO: 192161 - DNA, 25 bp, Canis familiaris
taaagttctactggtaggaccctat

SEQ ID NO: 192162 - DNA, 25 bp, Canis familiaris
taaacattcaaaccttcgacccatt

SEQ ID NO: 192163 - DNA, 25 bp, Canis familiaris
taaaatatcaccccttgaagccttt

SEQ ID NO: 192164 - DNA, 25 bp, Canis familiaris
tagaatttaccacagttactttaga

SEQ ID NO: 192165 - DNA, 25 bp, Canis familiaris
taaagttcaccatagtaccttaaag

SEQ ID NO: 192166 - DNA, 25 bp, Canis familiaris
taaaccaccgatgagtacacttgca

SEQ ID NO: 192167 - DNA, 25 bp, Canis familiaris
taaaaccaggtccctgtactctgca

SEQ ID NO: 192168 - DNA, 25 bp, Canis familiaris
taaaggccacgttccgtatatctga

SEQ ID NO: 192169 - DNA, 25 bp, Canis familiaris
taacatttactatcgcttagtctgt

SEQ ID NO: 192170 - DNA, 25 bp, Canis familiaris
taactggattctacctttcttcgta

SEQ ID NO: 192171 - DNA, 25 bp, Canis familiaris
taactgaggttgtcctcttactccc

SEQ ID NO: 192172 - DNA, 25 bp, Canis familiaris
taacagagggctgcccctactcaga

SEQ ID NO: 192173 - DNA, 25 bp, Canis familiaris
taaaatggacttgccaggtgctcaa

SEQ ID NO: 192174 - DNA, 25 bp, Canis familiaris
taaattggccctggcaaatggctag

SEQ ID NO: 192175 - DNA, 25 bp, Canis familiaris
taaatgtggctatctgtgaatggta

SEQ ID NO: 192176 - DNA, 25 bp, Canis familiaris
taactgtggtattctagagctttac

SEQ ID NO: 192177 - DNA, 25 bp, Canis familiaris
taacgggtcatttacactatccacg

SEQ ID NO: 192178 - DNA, 25 bp, Canis familiaris
taaccggttttatattcatcatctc

SEQ ID NO: 192179 - DNA, 25 bp, Canis familiaris
taaacctttttatctgaacactaga

SEQ ID NO: 192180 - DNA, 25 bp, Canis familiaris
taaccctttatatttctgaacttcg

SEQ ID NO: 192181 - DNA, 25 bp, Canis familiaris
taagccctaggaaattctaccactt

SEQ ID NO: 192182 - DNA, 25 bp, Canis familiaris
taaccctggcgaaagtcccatcaag

SEQ ID NO: 192183 - DNA, 25 bp, Canis familiaris
tacggttgggaaggtctaatataag

SEQ ID NO: 192184 - DNA, 25 bp, Canis familiaris
tacgggtgggaggttctataataag

SEQ ID NO: 192185 - DNA, 25 bp, Canis familiaris
tacaaggacgggttatttcaaagtg

SEQ ID NO: 192186 - DNA, 25 bp, Canis familiaris
taaaggagccgtcactcttcaacag

SEQ ID NO: 192187 - DNA, 25 bp, Canis familiaris
taaagccaacttgacttagtacagt

SEQ ID NO: 192188 - DNA, 25 bp, Canis familiaris
taactgcaaacttaatttcttacaa

SEQ ID NO: 192189 - DNA, 25 bp, Canis familiaris
taacaaagctcttaagttgctttta

SEQ ID NO: 192190 - DNA, 25 bp, Canis familiaris
taaaaagcccgatgctgttttctcg

SEQ ID NO: 192191 - DNA, 25 bp, Canis familiaris
taaataaatagccaacttttgtcta

SEQ ID NO: 192192 - DNA, 25 bp, Canis familiaris
taactacttacatagccttcttcta

SEQ ID NO: 192193 - DNA, 25 bp, Canis familiaris
tagttactttttgctttcttctgag

SEQ ID NO: 192194 - DNA, 25 bp, Canis familiaris
taaccaatttttactttctgtctag

SEQ ID NO: 192195 - DNA, 25 bp, Canis familiaris
taagccactttcatatttcctatat

SEQ ID NO: 192196 - DNA, 25 bp, Canis familiaris
tacaggccttcctgtttacttatag

SEQ ID NO: 192197 - DNA, 25 bp, Canis familiaris
tacaccttgtgcacgttgtacgttc

SEQ ID NO: 192198 - DNA, 25 bp, Canis familiaris
taaccttggcttttctcaggctttc

SEQ ID NO: 192199 - DNA, 25 bp, Canis familiaris
taaactctgcccagtatccagggtc

SEQ ID NO: 192200 - DNA, 25 bp, Canis familiaris
taacacgagaccggcgcacaagggt

SEQ ID NO: 192201 - DNA, 25 bp, Canis familiaris
taaagtgaacttggcaccctgggtt

SEQ ID NO: 192202 - DNA, 25 bp, Canis familiaris
taaacaaccctggatccacggtgtt

SEQ ID NO: 192203 - DNA, 25 bp, Canis familiaris
taaaatcctgttcatctgcacggtt

SEQ ID NO: 192204 - DNA, 25 bp, Canis familiaris
tatgaattccgaagtaccgggttca

SEQ ID NO: 192205 - DNA, 25 bp, Canis familiaris
taacattcagacagtacgcagtgga

SEQ ID NO: 192206 - DNA, 25 bp, Canis familiaris
taaatagcagcaccagtaagaggga

SEQ ID NO: 192207 - DNA, 25 bp, Canis familiaris
taaaacatggccttaacagagaaaa

SEQ ID NO: 192208 - DNA, 25 bp, Canis familiaris
taaagacatggccctgacatcagag

SEQ ID NO: 192209 - DNA, 25 bp, Canis familiaris
tacattcacggccctgtgctaagta

SEQ ID NO: 192210 - DNA, 25 bp, Canis familiaris
taaccgcaagcgtcctgctaatgag

SEQ ID NO: 192211 - DNA, 25 bp, Canis familiaris
taaccctgcatttcctggacatgga

SEQ ID NO: 192212 - DNA, 25 bp, Canis familiaris
tacaggggctcttcaagctttgcag

SEQ ID NO: 192213 - DNA, 25 bp, Canis familiaris
taacggagcatctgcaactctgggc

SEQ ID NO: 192214 - DNA, 25 bp, Canis familiaris
taaagttcacatgcaactctggaaa

SEQ ID NO: 192215 - DNA, 25 bp, Canis familiaris
taaaggacaaccacctggaacttct

SEQ ID NO: 192216 - DNA, 25 bp, Canis familiaris
taaagactaaacacctctgattttt

SEQ ID NO: 192217 - DNA, 25 bp, Canis familiaris
taaagaaaacacgctttttccagtg

SEQ ID NO: 192218 - DNA, 25 bp, Canis familiaris
tacaaggaattctcccgtttccacg

SEQ ID NO: 192219 - DNA, 25 bp, Canis familiaris
taactgtgatatagcaacccttccc

SEQ ID NO: 192220 - DNA, 25 bp, Canis familiaris
taacttgaaacaagcccccatctct

SEQ ID NO: 192221 - DNA, 25 bp, Canis familiaris
taaattcagaactgccgccttcttt

SEQ ID NO: 192222 - DNA, 25 bp, Canis familiaris
taaattatattctctcccttgttac

SEQ ID NO: 192223 - DNA, 25 bp, Canis familiaris
taacagatatattaaccacgtttta

SEQ ID NO: 192224 - DNA, 25 bp, Canis familiaris
taaagcacaaataacccgttgttag

SEQ ID NO: 192225 - DNA, 25 bp, Canis familiaris
taaacacgaaccaccgacatcggag

SEQ ID NO: 192226 - DNA, 25 bp, Canis familiaris
taaaccagtagtgtccccatgaagt

SEQ ID NO: 192227 - DNA, 25 bp, Canis familiaris
taaaccaggcatgtcccctgaggag

SEQ ID NO: 192228 - DNA, 25 bp, Canis familiaris
taaaacctatcatgccacactgggc

SEQ ID NO: 192229 - DNA, 25 bp, Canis familiaris
taaaagctcttctaggtatctgaga

SEQ ID NO: 192230 - DNA, 25 bp, Canis familiaris
taacaggtctgtgatgcccttagat

SEQ ID NO: 192231 - DNA, 25 bp, Canis familiaris
taacaggtctgtgatgcccttagat

SEQ ID NO: 192232 - DNA, 25 bp, Canis familiaris
taacatggtgccacatgccctgaag

SEQ ID NO: 192233 - DNA, 25 bp, Canis familiaris
taaatgtctagcacagcgcctggac

SEQ ID NO: 192234 - DNA, 25 bp, Canis familiaris
taaaagcattctcactgcacagccc

SEQ ID NO: 192235 - DNA, 25 bp, Canis familiaris
taaaagcacataatttcaaccccaa

SEQ ID NO: 192236 - DNA, 25 bp, Canis familiaris
tagacacaaaatttaccaccgtaat

SEQ ID NO: 192237 - DNA, 25 bp, Canis familiaris
tagacctaaccacgctaaccgtaat

SEQ ID NO: 192238 - DNA, 25 bp, Canis familiaris
taaccttgacctctaacctgtgatt

SEQ ID NO: 192239 - DNA, 25 bp, Canis familiaris
taacacattacctctgaactgtccc

SEQ ID NO: 192240 - DNA, 25 bp, Canis familiaris
tacacacttaactgtagtttccaca

SEQ ID NO: 192241 - DNA, 25 bp, Canis familiaris
taaccctgagacactagcggtccac

SEQ ID NO: 192242 - DNA, 25 bp, Canis familiaris
taaccagttgtcactgggcctccta

SEQ ID NO: 192243 - DNA, 25 bp, Canis familiaris
taaaagatggcctgggcagcctcct

SEQ ID NO: 192244 - DNA, 25 bp, Canis familiaris
taaactgggcactgggcaatctttg

SEQ ID NO: 192245 - DNA, 25 bp, Canis familiaris
taaacttgggccctgccaattaatg

SEQ ID NO: 192246 - DNA, 25 bp, Canis familiaris
taaacctggcaggtctgttttaatt

SEQ ID NO: 192247 - DNA, 25 bp, Canis familiaris
taaaccacgaaagtgactttataat

SEQ ID NO: 192248 - DNA, 25 bp, Canis familiaris
tacaactccgaaaaggccccaatat

SEQ ID NO: 192249 - DNA, 25 bp, Canis familiaris
taaactcgcgaaaagcctaggtata

SEQ ID NO: 192250 - DNA, 25 bp, Canis familiaris
taaaacgctgaagacctaggctaca

SEQ ID NO: 192251 - DNA, 25 bp, Canis familiaris
taaaacctcctcacgaaggctacta

SEQ ID NO: 192252 - DNA, 25 bp, Canis familiaris
taaaaaccatccaacggcttctact

SEQ ID NO: 192253 - DNA, 25 bp, Canis familiaris
taaaaacctgcaacacaaccttact

SEQ ID NO: 192254 - DNA, 25 bp, Canis familiaris
taaacagactcggaaccttcctgac

SEQ ID NO: 192255 - DNA, 25 bp, Canis familiaris
taacaggcaccagaagacttcccac

SEQ ID NO: 192256 - DNA, 25 bp, Canis familiaris
taacaacaccctggtagttccacaa

SEQ ID NO: 192257 - DNA, 25 bp, Canis familiaris
taaccgagactcggggattctccac

SEQ ID NO: 192258 - DNA, 25 bp, Canis familiaris
taaccaggcctctgagactttctca

SEQ ID NO: 192259 - DNA, 25 bp, Canis familiaris
taacaaggttgctggtcatcctctg

SEQ ID NO: 192260 - DNA, 25 bp, Canis familiaris
taacaatggtcgtttccatcctcag

SEQ ID NO: 192261 - DNA, 25 bp, Canis familiaris
taaaatggctagttcatacatctac

SEQ ID NO: 192262 - DNA, 25 bp, Canis familiaris
taaaatgctgtaaccaacttatcta

SEQ ID NO: 192263 - DNA, 25 bp, Canis familiaris
taaccagctgttcagaaccttctga

SEQ ID NO: 192264 - DNA, 25 bp, Canis familiaris
taaccactatgtgcaaacacttgta

SEQ ID NO: 192265 - DNA, 25 bp, Canis familiaris
taaccctctgttgacacacacgaaa

SEQ ID NO: 192266 - DNA, 25 bp, Canis familiaris
taacctgcttccggaacacaaaaga

SEQ ID NO: 192267 - DNA, 25 bp, Canis familiaris
taaccaggtcttaacagcacaaact

SEQ ID NO: 192268 - DNA, 25 bp, Canis familiaris
taaccttgccatcaacagcacacga

SEQ ID NO: 192269 - DNA, 25 bp, Canis familiaris
taacactgagccttcaaggcccgac

SEQ ID NO: 192270 - DNA, 25 bp, Canis familiaris
taaccaggatctccagatggctcac

SEQ ID NO: 192271 - DNA, 25 bp, Canis familiaris
taaccagtggttccatagctgcacc

SEQ ID NO: 192272 - DNA, 25 bp, Canis familiaris
taacacctggattttggctaccggg

SEQ ID NO: 192273 - DNA, 25 bp, Canis familiaris
taacaccttgcattactggtcatgc

SEQ ID NO: 192274 - DNA, 25 bp, Canis familiaris
taacatcgtggcagcctgagtcgcc

SEQ ID NO: 192275 - DNA, 25 bp, Canis familiaris
taactgggtatcgctgagcatcccc

SEQ ID NO: 192276 - DNA, 25 bp, Canis familiaris
taactggctttaacaggtcccagcc

SEQ ID NO: 192277 - DNA, 25 bp, Canis familiaris
taacgtcttgtgaagggacatcctg

SEQ ID NO: 192278 - DNA, 25 bp, Canis familiaris
taaagctctgaggaagggaaactga

SEQ ID NO: 192279 - DNA, 25 bp, Canis familiaris
taaacctgagtctgggatacccttt

SEQ ID NO: 192280 - DNA, 25 bp, Canis familiaris
taaaacgttctgtgtaacctccatt

SEQ ID NO: 192281 - DNA, 25 bp, Canis familiaris
taaacttgtttaggtgaaccattca

SEQ ID NO: 192282 - DNA, 25 bp, Canis familiaris
taaaccatttctcagtggaccaaaa

SEQ ID NO: 192283 - DNA, 25 bp, Canis familiaris
taacacattttctttggaattcaaa

SEQ ID NO: 192284 - DNA, 25 bp, Canis familiaris
taacctattgttttcccattctaat

SEQ ID NO: 192285 - DNA, 25 bp, Canis familiaris
taaccctgtgttttctacttcacca

SEQ ID NO: 192286 - DNA, 25 bp, Canis familiaris
taactactgttttgtaagcctccaa

SEQ ID NO: 192287 - DNA, 25 bp, Canis familiaris
taacttctgttatgaagacctccca

SEQ ID NO: 192288 - DNA, 25 bp, Canis familiaris
taacacctgttattccaactgcacc

SEQ ID NO: 192289 - DNA, 25 bp, Canis familiaris
taacaagtttttggcccaatcccat

SEQ ID NO: 192290 - DNA, 25 bp, Canis familiaris
taaaagagtttgtacccacctacag

SEQ ID NO: 192291 - DNA, 25 bp, Canis familiaris
taaaacagtttatccccttcctgat

SEQ ID NO: 192292 - DNA, 25 bp, Canis familiaris
taaaaattcttacctcatcctttag

SEQ ID NO: 192293 - DNA, 25 bp, Canis familiaris
taaaataatttcattctgctcccta

SEQ ID NO: 192294 - DNA, 25 bp, Canis familiaris
taaaagatttacattcccccacttg

SEQ ID NO: 192295 - DNA, 25 bp, Canis familiaris
taacaaatctagttttacccctcat

SEQ ID NO: 192296 - DNA, 25 bp, Canis familiaris
taaccatactttatgtacctttata

SEQ ID NO: 192297 - DNA, 25 bp, Canis familiaris
taaccatttcttaatttctttcttg

SEQ ID NO: 192298 - DNA, 25 bp, Canis familiaris
taaaatttgtttcaactcctcctgc

SEQ ID NO: 192299 - DNA, 25 bp, Canis familiaris
taaactgtttttcagacgctcgtcc

SEQ ID NO: 192300 - DNA, 25 bp, Canis familiaris
taaactacctttagaatcccagatt

SEQ ID NO: 192301 - DNA, 25 bp, Canis familiaris
taaacacacctctggaatcctttgt

SEQ ID NO: 192302 - DNA, 25 bp, Canis familiaris
taaaatatcccaattgaaactctta

SEQ ID NO: 192303 - DNA, 25 bp, Canis familiaris
taaaaactcctcctagaagctatct

SEQ ID NO: 192304 - DNA, 25 bp, Canis familiaris
taaagcagactgtatgggagaaata

SEQ ID NO: 192305 - DNA, 25 bp, Canis familiaris
taacctgcactcgaagtgagaccca

SEQ ID NO: 192306 - DNA, 25 bp, Canis familiaris
taacccactctgtggaagcgctcag

SEQ ID NO: 192307 - DNA, 25 bp, Canis familiaris
taaaccactgcttaagtccagtccc

SEQ ID NO: 192308 - DNA, 25 bp, Canis familiaris
tacaaagccactgtattgcctgtcc

SEQ ID NO: 192309 - DNA, 25 bp, Canis familiaris
taaaatgcacctgttgactctctga

SEQ ID NO: 192310 - DNA, 25 bp, Canis familiaris
taaacaagccgatgtgcctgctgct

SEQ ID NO: 192311 - DNA, 25 bp, Canis familiaris
taaacatcagctgcacatctgcttc

SEQ ID NO: 192312 - DNA, 25 bp, Canis familiaris
taaactgagcgtcacggtggacccc

SEQ ID NO: 192313 - DNA, 25 bp, Canis familiaris
taaactggcagtctgtgggccacac

SEQ ID NO: 192314 - DNA, 25 bp, Canis familiaris
taaaatgatcctctctggtgaccac

SEQ ID NO: 192315 - DNA, 25 bp, Canis familiaris
taaaatgatcctctcccttcaaaaa

SEQ ID NO: 192316 - DNA, 25 bp, Canis familiaris
taaaaatgcactcgttccttaaagg

SEQ ID NO: 192317 - DNA, 25 bp, Canis familiaris
taaacacttgctcgtcctttaaagg

SEQ ID NO: 192318 - DNA, 25 bp, Canis familiaris
tactaactagccctccgaagacggg

SEQ ID NO: 192319 - DNA, 25 bp, Canis familiaris
tacaaactatacatccgggaaccag

SEQ ID NO: 192320 - DNA, 25 bp, Canis familiaris
taaaagttagtttcagggcagcccg

SEQ ID NO: 192321 - DNA, 25 bp, Canis familiaris
tagaaaggtttctaggggcagcccg

SEQ ID NO: 192322 - DNA, 25 bp, Canis familiaris
taaaaactgctttaggggatccctg

SEQ ID NO: 192323 - DNA, 25 bp, Canis familiaris
taaaccacctttttgggcatccaag

SEQ ID NO: 192324 - DNA, 25 bp, Canis familiaris
taactcgccctttattggtgactta

SEQ ID NO: 192325 - DNA, 25 bp, Canis familiaris
taaatggcccttgtgctgggactta

SEQ ID NO: 192326 - DNA, 25 bp, Canis familiaris
taaatggtatttttggggttcatag

SEQ ID NO: 192327 - DNA, 25 bp, Canis familiaris
taaaggttgtgtattcgactctaaa

SEQ ID NO: 192328 - DNA, 25 bp, Canis familiaris
taaatgtgttgtcattgtcgccctt

SEQ ID NO: 192329 - DNA, 25 bp, Canis familiaris
taactgtaggcaaactttccacttt

SEQ ID NO: 192330 - DNA, 25 bp, Canis familiaris
taactgtcaggctcaactaccatct

SEQ ID NO: 192331 - DNA, 25 bp, Canis familiaris
taacagtgcaggctaacccgttttg

SEQ ID NO: 192332 - DNA, 25 bp, Canis familiaris
taaagggggaaacgcactggttctg

SEQ ID NO: 192333 - DNA, 25 bp, Canis familiaris
taacgggtgctgctactgcacgggt

SEQ ID NO: 192334 - DNA, 25 bp, Canis familiaris
taacgacacctactacgcacagggt

SEQ ID NO: 192335 - DNA, 25 bp, Canis familiaris
tacagcgaccggttatggcccgggt

SEQ ID NO: 192336 - DNA, 25 bp, Canis familiaris
tactggaaacgctgattcccgggct

SEQ ID NO: 192337 - DNA, 25 bp, Canis familiaris
tactcgaaccagcgtccgaagacgt

SEQ ID NO: 192338 - DNA, 25 bp, Canis familiaris
taaagaaccaagccctgctgacaac

SEQ ID NO: 192339 - DNA, 25 bp, Canis familiaris
taacagtaacaacgggctaccagtt

SEQ ID NO: 192340 - DNA, 25 bp, Canis familiaris
taaagttgatagagtgcctgacaca

SEQ ID NO: 192341 - DNA, 25 bp, Canis familiaris
taaacattgtagacgagcgtaaaaa

SEQ ID NO: 192342 - DNA, 25 bp, Canis familiaris
taaactggatagaagactgggagaa

SEQ ID NO: 192343 - DNA, 25 bp, Canis familiaris
taacctgtatcaaaccaggggatca

SEQ ID NO: 192344 - DNA, 25 bp, Canis familiaris
taactctatctctgaccaggtggta

SEQ ID NO: 192345 - DNA, 25 bp, Canis familiaris
taactcgttgatgaccggtgatgcg

SEQ ID NO: 192346 - DNA, 25 bp, Canis familiaris
taacaccattgattgctccggtctc

SEQ ID NO: 192347 - DNA, 25 bp, Canis familiaris
taacccagcggtccagaggttctgg

SEQ ID NO: 192348 - DNA, 25 bp, Canis familiaris
taactcacggggcaatgactggcgg

SEQ ID NO: 192349 - DNA, 25 bp, Canis familiaris
taaagccggtgtgagtcctggtggt

SEQ ID NO: 192350 - DNA, 25 bp, Canis familiaris
taaagggctttaagcgcctgcggga

SEQ ID NO: 192351 - DNA, 25 bp, Canis familiaris
taactggtttttaggcctgtggagg

SEQ ID NO: 192352 - DNA, 25 bp, Canis familiaris
taaaggtttccttgtgctctggtga

SEQ ID NO: 192353 - DNA, 25 bp, Canis familiaris
taaagcagtataactctacgggaga

SEQ ID NO: 192354 - DNA, 25 bp, Canis familiaris
taaaagctatattctgtactactga

SEQ ID NO: 192355 - DNA, 25 bp, Canis familiaris
taaaaggaatcagttctggccatga

SEQ ID NO: 192356 - DNA, 25 bp, Canis familiaris
taaaccggtcgcctctggcagcgaa

SEQ ID NO: 192357 - DNA, 25 bp, Canis familiaris
taaacactggatcacctggaaataa

SEQ ID NO: 192358 - DNA, 25 bp, Canis familiaris
taaaactgtaaaactcctagatgaa

SEQ ID NO: 192359 - DNA, 25 bp, Canis familiaris
taaagcctaaagtaccacaaatgca

SEQ ID NO: 192360 - DNA, 25 bp, Canis familiaris
taaagcttaccgttgccaaaacagg

SEQ ID NO: 192361 - DNA, 25 bp, Canis familiaris
taaacgattggtttctccaacacgg

SEQ ID NO: 192362 - DNA, 25 bp, Canis familiaris
taacacttgggttttatacacctgt

SEQ ID NO: 192363 - DNA, 25 bp, Canis familiaris
taactttaggtttaacagcactgtt

SEQ ID NO: 192364 - DNA, 25 bp, Canis familiaris
taacatgttaattttggaagacttt

SEQ ID NO: 192365 - DNA, 25 bp, Canis familiaris
tacacttgtttttatggaaactagg

SEQ ID NO: 192366 - DNA, 25 bp, Canis familiaris
taacttggctttcctggccaaccaa

SEQ ID NO: 192367 - DNA, 25 bp, Canis familiaris
taacttttttggcagctcaatagga

SEQ ID NO: 192368 - DNA, 25 bp, Canis familiaris
taactttttcataggcttaacattg

SEQ ID NO: 192369 - DNA, 25 bp, Canis familiaris
taacactttgacctccttcaaattt

SEQ ID NO: 192370 - DNA, 25 bp, Canis familiaris
taaattcatggccccacttcaaagc

SEQ ID NO: 192371 - DNA, 25 bp, Canis familiaris
taaacgatcctagagcatgtgcata

SEQ ID NO: 192372 - DNA, 25 bp, Canis familiaris
taaacgacccggtcgctgcattgac

SEQ ID NO: 192373 - DNA, 25 bp, Canis familiaris
taaccgcaccgcgtgcaaggttttc

SEQ ID NO: 192374 - DNA, 25 bp, Canis familiaris
taaagcgccccgaaactgttgttgc

SEQ ID NO: 192375 - DNA, 25 bp, Canis familiaris
taactggtccctacatagtcttttc

SEQ ID NO: 192376 - DNA, 25 bp, Canis familiaris
taactcttccgtatttgtatctttt

SEQ ID NO: 192377 - DNA, 25 bp, Canis familiaris
taactttgcagttttgtttcactat

SEQ ID NO: 192378 - DNA, 25 bp, Canis familiaris
taacattccattgtatgcttatacc

SEQ ID NO: 192379 - DNA, 25 bp, Canis familiaris
taaatacgcataattcagatttcgg

SEQ ID NO: 192380 - DNA, 25 bp, Canis familiaris
taaaaccctttcctatattggccag

SEQ ID NO: 192381 - DNA, 25 bp, Canis familiaris
taaaagacgcttttttattgctgcc

SEQ ID NO: 192382 - DNA, 25 bp, Canis familiaris
taaccgaagttctgtctactgatgc

SEQ ID NO: 192383 - DNA, 25 bp, Canis familiaris
taacttgagggagtcgtctactttt

SEQ ID NO: 192384 - DNA, 25 bp, Canis familiaris
taacttagcctctttgtgctcactt

SEQ ID NO: 192385 - DNA, 25 bp, Canis familiaris
taacataggctctgtttctcacttc

SEQ ID NO: 192386 - DNA, 25 bp, Canis familiaris
taacacaggcgctactggactcttt

SEQ ID NO: 192387 - DNA, 25 bp, Canis familiaris
tacacttgggcatctgtttctgagt

SEQ ID NO: 192388 - DNA, 25 bp, Canis familiaris
taacttttaaatattctgatgtact

SEQ ID NO: 192389 - DNA, 25 bp, Canis familiaris
taactctcttaaatgaaacgtgctc

SEQ ID NO: 192390 - DNA, 25 bp, Canis familiaris
taactttatattacagaacctgtcc

SEQ ID NO: 192391 - DNA, 25 bp, Canis familiaris
taactctattaaacgactccttatc

SEQ ID NO: 192392 - DNA, 25 bp, Canis familiaris
taaagtacaaactgactagtgtcac

SEQ ID NO: 192393 - DNA, 25 bp, Canis familiaris
taaattcaaaaaactgctggtgcca

SEQ ID NO: 192394 - DNA, 25 bp, Canis familiaris
taaattgaaaatgaacttggctgaa

SEQ ID NO: 192395 - DNA, 25 bp, Canis familiaris
taaagtgaaaaccaagcccagctaa

SEQ ID NO: 192396 - DNA, 25 bp, Canis familiaris
taacagtaatcaagagaagacagca

SEQ ID NO: 192397 - DNA, 25 bp, Canis familiaris
taacagtcatgtggagatgaaactg

SEQ ID NO: 192398 - DNA, 25 bp, Canis familiaris
taaaggcaatgggagaacccctcga

SEQ ID NO: 192399 - DNA, 25 bp, Canis familiaris
tacaaggcataacataacaccatta

SEQ ID NO: 192400 - DNA, 25 bp, Canis familiaris
taacagagcatcacagtagcgccca

SEQ ID NO: 192401 - DNA, 25 bp, Canis familiaris
tacagccagggtggtgaggcccagc

SEQ ID NO: 192402 - DNA, 25 bp, Canis familiaris
tacacaagacagaggtggcccccat

SEQ ID NO: 192403 - DNA, 25 bp, Canis familiaris
taccaggactttgtagccccaaggt

SEQ ID NO: 192404 - DNA, 25 bp, Canis familiaris
taaagtcacttagatcaccccagag

SEQ ID NO: 192405 - DNA, 25 bp, Canis familiaris
taaacccttaaattgctgtcaaagc

SEQ ID NO: 192406 - DNA, 25 bp, Canis familiaris
taaacaccttccaaaggctgccacc

SEQ ID NO: 192407 - DNA, 25 bp, Canis familiaris
taacacacacctcataggtccactc

SEQ ID NO: 192408 - DNA, 25 bp, Canis familiaris
taacaacaactattctgggcccata

SEQ ID NO: 192409 - DNA, 25 bp, Canis familiaris
taaacaaactattgcgggtgacttt

SEQ ID NO: 192410 - DNA, 25 bp, Canis familiaris
taaacacagaccactggatgtgagt

SEQ ID NO: 192411 - DNA, 25 bp, Canis familiaris
taaagagccacccctggtgatagcc

SEQ ID NO: 192412 - DNA, 25 bp, Canis familiaris
taaagatgtacccctggagaccgat

SEQ ID NO: 192413 - DNA, 25 bp, Canis familiaris
taaagatgatactccaggtctgcca

SEQ ID NO: 192414 - DNA, 25 bp, Canis familiaris
taacaagaacagttgcagcctctcc

SEQ ID NO: 192415 - DNA, 25 bp, Canis familiaris
taaaacaatgacttagccctccaac

SEQ ID NO: 192416 - DNA, 25 bp, Canis familiaris
taaaacaaaacaaaccacacacaca

SEQ ID NO: 192417 - DNA, 25 bp, Canis familiaris
taaaaaccaataaaactgccacaca

SEQ ID NO: 192418 - DNA, 25 bp, Canis familiaris
taaatcaatcaccaaaaacctccca

SEQ ID NO: 192419 - DNA, 25 bp, Canis familiaris
taaagcaaacgcaaagaagcaccct

SEQ ID NO: 192420 - DNA, 25 bp, Canis familiaris
taaagaagacgtggtacacacacac

SEQ ID NO: 192421 - DNA, 25 bp, Canis familiaris
taaagggcactgagtccatcccgtt

SEQ ID NO: 192422 - DNA, 25 bp, Canis familiaris
taaagacctgtatgtcctccggtat

SEQ ID NO: 192423 - DNA, 25 bp, Canis familiaris
taaacacactattgggcctgcacgg

SEQ ID NO: 192424 - DNA, 25 bp, Canis familiaris
taaaccagtttgtggtgcacactgt

SEQ ID NO: 192425 - DNA, 25 bp, Canis familiaris
taaatcacagttatggctccctctg

SEQ ID NO: 192426 - DNA, 25 bp, Canis familiaris
taaaacagtgagctggctccccgtg

SEQ ID NO: 192427 - DNA, 25 bp, Canis familiaris
taaaatgaggtgctgcagcccctgg

SEQ ID NO: 192428 - DNA, 25 bp, Canis familiaris
taactggagggactgctccacctgt

SEQ ID NO: 192429 - DNA, 25 bp, Canis familiaris
taaaggcaggaaccccacagactgt

SEQ ID NO: 192430 - DNA, 25 bp, Canis familiaris
taaacggtgaacctccactttgtat

SEQ ID NO: 192431 - DNA, 25 bp, Canis familiaris
taaaagtagtgatttcccttgttat

SEQ ID NO: 192432 - DNA, 25 bp, Canis familiaris
taaaattggaattctcccttctgtt

SEQ ID NO: 192433 - DNA, 25 bp, Canis familiaris
taaaataaataatcgctctcatctt

SEQ ID NO: 192434 - DNA, 25 bp, Canis familiaris
taactatgtaatatgtccttcttta

SEQ ID NO: 192435 - DNA, 25 bp, Canis familiaris
taacttggtttagtcctgatgttgg

SEQ ID NO: 192436 - DNA, 25 bp, Canis familiaris
taacttttgtgatttccggtctcgg

SEQ ID NO: 192437 - DNA, 25 bp, Canis familiaris
taacttctagtgtaggactggttca

SEQ ID NO: 192438 - DNA, 25 bp, Canis familiaris
taactcttgacttaggacatggcca

SEQ ID NO: 192439 - DNA, 25 bp, Canis familiaris
taacatcttgatctatttcctccat

SEQ ID NO: 192440 - DNA, 25 bp, Canis familiaris
taacatttgatcctttaccaccata

SEQ ID NO: 192441 - DNA, 25 bp, Canis familiaris
taactttacctttctctgattcata

SEQ ID NO: 192442 - DNA, 25 bp, Canis familiaris
taacttatctcctgtcagctttcag

SEQ ID NO: 192443 - DNA, 25 bp, Canis familiaris
taacgatttcctcgtatctcttctg

SEQ ID NO: 192444 - DNA, 25 bp, Canis familiaris
taaatgattgtccggtagccttcgc

SEQ ID NO: 192445 - DNA, 25 bp, Canis familiaris
taaagaatggccctgttcctttgtt

SEQ ID NO: 192446 - DNA, 25 bp, Canis familiaris
taaaagatggcctgtttctcctgtt

SEQ ID NO: 192447 - DNA, 25 bp, Canis familiaris
taaatgagggccgtgacattcccgt

SEQ ID NO: 192448 - DNA, 25 bp, Canis familiaris
taaagattacccgatatgtccccta

SEQ ID NO: 192449 - DNA, 25 bp, Canis familiaris
taacagattccctcatgataacccc

SEQ ID NO: 192450 - DNA, 25 bp, Canis familiaris
taacttatttcacagatactccccc

SEQ ID NO: 192451 - DNA, 25 bp, Canis familiaris
taactatttagagggtgattccacc

SEQ ID NO: 192452 - DNA, 25 bp, Canis familiaris
taacttctaagatttgtaattcctc

SEQ ID NO: 192453 - DNA, 25 bp, Canis familiaris
taactgtctaaattaggagtccctt

SEQ ID NO: 192454 - DNA, 25 bp, Canis familiaris
taacttgctcgaaatgggaacccta

SEQ ID NO: 192455 - DNA, 25 bp, Canis familiaris
taaaggacttaaagatgaaccctgt

SEQ ID NO: 192456 - DNA, 25 bp, Canis familiaris
taaatgcggggacagtaaagcctta

SEQ ID NO: 192457 - DNA, 25 bp, Canis familiaris
taaaggctgggactcaggtaacttt

SEQ ID NO: 192458 - DNA, 25 bp, Canis familiaris
tagggctggaagaatcaggctgaga

SEQ ID NO: 192459 - DNA, 25 bp, Canis familiaris
tacagagatggataacaggttaatg

SEQ ID NO: 192460 - DNA, 25 bp, Canis familiaris
tacatgtgttctccaacaagttaac

SEQ ID NO: 192461 - DNA, 25 bp, Canis familiaris
taccctttgcctggaggagtcaagc

SEQ ID NO: 192462 - DNA, 25 bp, Canis familiaris
tacacacctgtgccgcgtgatagta

SEQ ID NO: 192463 - DNA, 25 bp, Canis familiaris
tacagcccagttagcaggcagtgct

SEQ ID NO: 192464 - DNA, 25 bp, Canis familiaris
tacagcgccagagtgctgacgcctt

SEQ ID NO: 192465 - DNA, 25 bp, Canis familiaris
tacacccagaggccagtgcatgcat

SEQ ID NO: 192466 - DNA, 25 bp, Canis familiaris
taaacctggctctgacatgcattag

SEQ ID NO: 192467 - DNA, 25 bp, Canis familiaris
taaacttagctggagagatgatatc

SEQ ID NO: 192468 - DNA, 25 bp, Canis familiaris
taaacattgggggtgcatgtatcct

SEQ ID NO: 192469 - DNA, 25 bp, Canis familiaris
taacagttgcgccagttacatctcc

SEQ ID NO: 192470 - DNA, 25 bp, Canis familiaris
taacatgtagggcatctttctcccc

SEQ ID NO: 192471 - DNA, 25 bp, Canis familiaris
taaaaggtcagggctctgttcccac

SEQ ID NO: 192472 - DNA, 25 bp, Canis familiaris
taaaaggatcgaggtatttcccatc

SEQ ID NO: 192473 - DNA, 25 bp, Canis familiaris
taaaggtgttacctcttgtcctacg

SEQ ID NO: 192474 - DNA, 25 bp, Canis familiaris
taaagttggatagtggttatgacta

SEQ ID NO: 192475 - DNA, 25 bp, Canis familiaris
taaaattgattatggggatggctat

SEQ ID NO: 192476 - DNA, 25 bp, Canis familiaris
taaaatattttccgtgggtctatct

SEQ ID NO: 192477 - DNA, 25 bp, Canis familiaris
taaaaatccttgcctgtgttttcct

SEQ ID NO: 192478 - DNA, 25 bp, Canis familiaris
taaaaagtttcacgtcttggtgcct

SEQ ID NO: 192479 - DNA, 25 bp, Canis familiaris
taacaatagtttccctttgctggtt

SEQ ID NO: 192480 - DNA, 25 bp, Canis familiaris
taacaaagtgttactcttattaata

SEQ ID NO: 192481 - DNA, 25 bp, Canis familiaris
taaaacaggcttcatttattaataa

SEQ ID NO: 192482 - DNA, 25 bp, Canis familiaris
taaaagcaggcttccattttctttt

SEQ ID NO: 192483 - DNA, 25 bp, Canis familiaris
taaaagcagcctcacagtctcatgc

SEQ ID NO: 192484 - DNA, 25 bp, Canis familiaris
taaaaagcctcagcatgcccagtag

SEQ ID NO: 192485 - DNA, 25 bp, Canis familiaris
taaatacccatcactgtcaagctac

SEQ ID NO: 192486 - DNA, 25 bp, Canis familiaris
taactactcttcatttactgcttct

SEQ ID NO: 192487 - DNA, 25 bp, Canis familiaris
tacccacatcttattttgccaggct

SEQ ID NO: 192488 - DNA, 25 bp, Canis familiaris
taactcaatttcataattcactgat

SEQ ID NO: 192489 - DNA, 25 bp, Canis familiaris
taacttattttgtagcttcctcact

SEQ ID NO: 192490 - DNA, 25 bp, Canis familiaris
taacatttttttactccgccaatat

SEQ ID NO: 192491 - DNA, 25 bp, Canis familiaris
taacttcccttaattctcttcagaa

SEQ ID NO: 192492 - DNA, 25 bp, Canis familiaris
taaagtctttgccaaatccttcaga

SEQ ID NO: 192493 - DNA, 25 bp, Canis familiaris
taaagcttctactaatatcaattct

SEQ ID NO: 192494 - DNA, 25 bp, Canis familiaris
taaaggagtccactatgtcaaatct

SEQ ID NO: 192495 - DNA, 25 bp, Canis familiaris
taaaatggcccagttgtcattcttc

SEQ ID NO: 192496 - DNA, 25 bp, Canis familiaris
taaagtcggtcatttctattcccaa

SEQ ID NO: 192497 - DNA, 25 bp, Canis familiaris
tagaagcccgtatttatcacccagc

SEQ ID NO: 192498 - DNA, 25 bp, Canis familiaris
tagaagcgcatacgcatgactacat

SEQ ID NO: 192499 - DNA, 25 bp, Canis familiaris
tacacagcagcaagactacatgaaa

SEQ ID NO: 192500 - DNA, 25 bp, Canis familiaris
taacacccagacactgacagagctg

SEQ ID NO: 192501 - DNA, 25 bp, Canis familiaris
taacacaggaacaactgccggtgat

SEQ ID NO: 192502 - DNA, 25 bp, Canis familiaris
taaaagagaaatccccctctgatcc

SEQ ID NO: 192503 - DNA, 25 bp, Canis familiaris
taaacgtgatcatttcgccttcaga

SEQ ID NO: 192504 - DNA, 25 bp, Canis familiaris
taaacgatgacctgtcctaccagat

SEQ ID NO: 192505 - DNA, 25 bp, Canis familiaris
taaaagattccaaccttcaccagta

SEQ ID NO: 192506 - DNA, 25 bp, Canis familiaris
taaaagtatctaactgctctcccct

SEQ ID NO: 192507 - DNA, 25 bp, Canis familiaris
taacaatgtcacataacacccagcc

SEQ ID NO: 192508 - DNA, 25 bp, Canis familiaris
taacaagccatcaaaatcacaccca

SEQ ID NO: 192509 - DNA, 25 bp, Canis familiaris
ttacaggccaaatcaaaccacctcc

SEQ ID NO: 192510 - DNA, 25 bp, Canis familiaris
taaaggcctaaccaatcactcacca

SEQ ID NO: 192511 - DNA, 25 bp, Canis familiaris
taaagggtgcacagagtactccgag

SEQ ID NO: 192512 - DNA, 25 bp, Canis familiaris
taaaaatgtcacaaaggtgctgctt

SEQ ID NO: 192513 - DNA, 25 bp, Canis familiaris
taaaagactcatccaggggcacctg

SEQ ID NO: 192514 - DNA, 25 bp, Canis familiaris
taaagcagacgtgagggatccctgg

SEQ ID NO: 192515 - DNA, 25 bp, Canis familiaris
taaaagcacaccggggatgccctgg

SEQ ID NO: 192516 - DNA, 25 bp, Canis familiaris
taaaagccattcggggacacactgc

SEQ ID NO: 192517 - DNA, 25 bp, Canis familiaris
taaaactctccagggcggaggccca

SEQ ID NO: 192518 - DNA, 25 bp, Canis familiaris
tacgaacgctccggggagcggccgg

SEQ ID NO: 192519 - DNA, 25 bp, Canis familiaris
taaaatcgctcggggagggcagctc

SEQ ID NO: 192520 - DNA, 25 bp, Canis familiaris
tacaagccccgcgtggggacatcat

SEQ ID NO: 192521 - DNA, 25 bp, Canis familiaris
taaagccccacgacaaggatgccaa

SEQ ID NO: 192522 - DNA, 25 bp, Canis familiaris
taaagccttgaccacaagggcccgg

SEQ ID NO: 192523 - DNA, 25 bp, Canis familiaris
taaacacctactcagaaagcccggg

SEQ ID NO: 192524 - DNA, 25 bp, Canis familiaris
taaaactctcaacaacgacctgggt

SEQ ID NO: 192525 - DNA, 25 bp, Canis familiaris
taaaaccattaggaacagactcggg

SEQ ID NO: 192526 - DNA, 25 bp, Canis familiaris
taaataccttgagagtcgggcagta

SEQ ID NO: 192527 - DNA, 25 bp, Canis familiaris
taaaactgcttcagagcctgggcct

SEQ ID NO: 192528 - DNA, 25 bp, Canis familiaris
taaaagcgtggcagccgggcgcttc

SEQ ID NO: 192529 - DNA, 25 bp, Canis familiaris
taaaaggtgccacgcctagagactc

SEQ ID NO: 192530 - DNA, 25 bp, Canis familiaris
taaagacggccacggtgggcaccga

SEQ ID NO: 192531 - DNA, 25 bp, Canis familiaris
taaagctgggacctggtgtgacccg

SEQ ID NO: 192532 - DNA, 25 bp, Canis familiaris
taacacggacacctggagtactcca

SEQ ID NO: 192533 - DNA, 25 bp, Canis familiaris
taccgggagtccttggtagtccaag

SEQ ID NO: 192534 - DNA, 25 bp, Canis familiaris
taaaggtaatccatggttgtgccac

SEQ ID NO: 192535 - DNA, 25 bp, Canis familiaris
taaagggaatccagactgtcctgcc

SEQ ID NO: 192536 - DNA, 25 bp, Canis familiaris
taaaaggacatctttactcccagcc

SEQ ID NO: 192537 - DNA, 25 bp, Canis familiaris
taaaaagcctctatacatactaacc

SEQ ID NO: 192538 - DNA, 25 bp, Canis familiaris
taaaaagccttttcctgatctcaaa

SEQ ID NO: 192539 - DNA, 25 bp, Canis familiaris
taaactagggttttctacatagaat

SEQ ID NO: 192540 - DNA, 25 bp, Canis familiaris
taaacgagggatttcctttagagat

SEQ ID NO: 192541 - DNA, 25 bp, Canis familiaris
taaatccagggaaaccgataaatga

SEQ ID NO: 192542 - DNA, 25 bp, Canis familiaris
taaagccaggaaaactcctactatt

SEQ ID NO: 192543 - DNA, 25 bp, Canis familiaris
taaactcaaccgtcattcgtacttc

SEQ ID NO: 192544 - DNA, 25 bp, Canis familiaris
taaacaaaccaaatcgaattcttct

SEQ ID NO: 192545 - DNA, 25 bp, Canis familiaris
taaagaaatcagcaagccccctatt

SEQ ID NO: 192546 - DNA, 25 bp, Canis familiaris
taaaaatacacgggcccctgcttga

SEQ ID NO: 192547 - DNA, 25 bp, Canis familiaris
taaagttccagggtcccacttctgg

SEQ ID NO: 192548 - DNA, 25 bp, Canis familiaris
taaagttccagtgtcagcctataaa

SEQ ID NO: 192549 - DNA, 25 bp, Canis familiaris
taaagacctcttgacacctgaaaaa

SEQ ID NO: 192550 - DNA, 25 bp, Canis familiaris
taaatacctgccgagaacccaaaag

SEQ ID NO: 192551 - DNA, 25 bp, Canis familiaris
taacattctctgcaggtatccacat

SEQ ID NO: 192552 - DNA, 25 bp, Canis familiaris
taacttgcgtaatagctctgcactg

SEQ ID NO: 192553 - DNA, 25 bp, Canis familiaris
taactccgtcacgtactctgacatt

SEQ ID NO: 192554 - DNA, 25 bp, Canis familiaris
taactcggtatccctacttcattag

SEQ ID NO: 192555 - DNA, 25 bp, Canis familiaris
taactctcgtgttttagcccattag

SEQ ID NO: 192556 - DNA, 25 bp, Canis familiaris
taactcatttattaatgacccagta

SEQ ID NO: 192557 - DNA, 25 bp, Canis familiaris
taaaacttttacactgccagtattc

SEQ ID NO: 192558 - DNA, 25 bp, Canis familiaris
taaaactattgcacctgccctgatt

SEQ ID NO: 192559 - DNA, 25 bp, Canis familiaris
taacaacattatcttcccacatacc

SEQ ID NO: 192560 - DNA, 25 bp, Canis familiaris
taacagatcattagatgcctcccca

SEQ ID NO: 192561 - DNA, 25 bp, Canis familiaris
taacagcacaattgatctcctctcc

SEQ ID NO: 192562 - DNA, 25 bp, Canis familiaris
taacaaatatgtttgcctcgccacg

SEQ ID NO: 192563 - DNA, 25 bp, Canis familiaris
taacagaagaattcccatcccctga

SEQ ID NO: 192564 - DNA, 25 bp, Canis familiaris
tacaaggaaagatcctgcccctgtt

SEQ ID NO: 192565 - DNA, 25 bp, Canis familiaris
taaaggaaatgagcctccaccacct

SEQ ID NO: 192566 - DNA, 25 bp, Canis familiaris
taaagcagaagctgcttcccacccg

SEQ ID NO: 192567 - DNA, 25 bp, Canis familiaris
taaaatgcaggctttactccacacc

SEQ ID NO: 192568 - DNA, 25 bp, Canis familiaris
taaagggcagcacaacatccaccct

SEQ ID NO: 192569 - DNA, 25 bp, Canis familiaris
taaatggtacggaactcctcctctg

SEQ ID NO: 192570 - DNA, 25 bp, Canis familiaris
tacaagtttggtcactactttctcc

SEQ ID NO: 192571 - DNA, 25 bp, Canis familiaris
taaagtcttggctttgctacttcct

SEQ ID NO: 192572 - DNA, 25 bp, Canis familiaris
taaacttgggagtcctattcatact

SEQ ID NO: 192573 - DNA, 25 bp, Canis familiaris
taaacataagggtgcatatatattt

SEQ ID NO: 192574 - DNA, 25 bp, Canis familiaris
taaacaataggccaccccatgatat

SEQ ID NO: 192575 - DNA, 25 bp, Canis familiaris
taaagagaagcccacatcccaatga

SEQ ID NO: 192576 - DNA, 25 bp, Canis familiaris
taaatgtgtaccaccccaatgtgct

SEQ ID NO: 192577 - DNA, 25 bp, Canis familiaris
taaatgtctaccagtcttacggtcc

SEQ ID NO: 192578 - DNA, 25 bp, Canis familiaris
taaaggccaccacttctacaggggc

SEQ ID NO: 192579 - DNA, 25 bp, Canis familiaris
tacaatgggcatcagttatacaagg

SEQ ID NO: 192580 - DNA, 25 bp, Canis familiaris
taacttggaccagtttactccagta

SEQ ID NO: 192581 - DNA, 25 bp, Canis familiaris
taacttggaggccccaattccatta

SEQ ID NO: 192582 - DNA, 25 bp, Canis familiaris
taacatctaagggctcagagactca

SEQ ID NO: 192583 - DNA, 25 bp, Canis familiaris
tagaactgaagcactcggacgtcgg

SEQ ID NO: 192584 - DNA, 25 bp, Canis familiaris
taggcctgagactccagttcgtggc

SEQ ID NO: 192585 - DNA, 25 bp, Canis familiaris
tagtccaggctcgttcgtgaagtgg

SEQ ID NO: 192586 - DNA, 25 bp, Canis familiaris
tacgtaggatcctttggaagggcaa

SEQ ID NO: 192587 - DNA, 25 bp, Canis familiaris
tagattcggtcgttctggaaaagaa

SEQ ID NO: 192588 - DNA, 25 bp, Canis familiaris
taaacaggctccgtcgccagaaaaa

SEQ ID NO: 192589 - DNA, 25 bp, Canis familiaris
taaaatgcagcttcccaccaaaaaa

SEQ ID NO: 192590 - DNA, 25 bp, Canis familiaris
taaactccccatcagcagcaaaaaa

SEQ ID NO: 192591 - DNA, 25 bp, Canis familiaris
taacaccacaactgaagtaaaacaa

SEQ ID NO: 192592 - DNA, 25 bp, Canis familiaris
taaataaacatctgactctaaaaaa

SEQ ID NO: 192593 - DNA, 25 bp, Canis familiaris
taaatctaaatctttcctggaataa

SEQ ID NO: 192594 - DNA, 25 bp, Canis familiaris
taaagctaaaaaatgtctgaaacta

SEQ ID NO: 192595 - DNA, 25 bp, Canis familiaris
taaatgccaagaaagatgctgtgat

SEQ ID NO: 192596 - DNA, 25 bp, Canis familiaris
taaagccaaatatgtgttcaatcat

SEQ ID NO: 192597 - DNA, 25 bp, Canis familiaris
taaagcactactttgttcctgacac

SEQ ID NO: 192598 - DNA, 25 bp, Canis familiaris
taaacttcctttgttgtcaactttg

SEQ ID NO: 192599 - DNA, 25 bp, Canis familiaris
taaacctccttgttttagacacact

SEQ ID NO: 192600 - DNA, 25 bp, Canis familiaris
taaactcttgctggatttaaaccac

SEQ ID NO: 192601 - DNA, 25 bp, Canis familiaris
taaacactgtgctctttaaacttct

SEQ ID NO: 192602 - DNA, 25 bp, Canis familiaris
taaaactgctcttttttacaccttg

SEQ ID NO: 192603 - DNA, 25 bp, Canis familiaris
taaagcattcctttctttaattttg

SEQ ID NO: 192604 - DNA, 25 bp, Canis familiaris
taaacatttgctcattatttttttt

SEQ ID NO: 192605 - DNA, 25 bp, Canis familiaris
taaaatctgttttgccctttattcg

SEQ ID NO: 192606 - DNA, 25 bp, Canis familiaris
taacaatcttaccatcccttattta

SEQ ID NO: 192607 - DNA, 25 bp, Canis familiaris
taacaacttcctaaccatatatttt

SEQ ID NO: 192608 - DNA, 25 bp, Canis familiaris
taaaaccacacgctcctatattttc

SEQ ID NO: 192609 - DNA, 25 bp, Canis familiaris
taaatatccacagggtccacctttc

SEQ ID NO: 192610 - DNA, 25 bp, Canis familiaris
taaattccaggccagcccaacttac

SEQ ID NO: 192611 - DNA, 25 bp, Canis familiaris
taaactgtagcgaccccagactgta

SEQ ID NO: 192612 - DNA, 25 bp, Canis familiaris
taacagttactagtttctgacttga

SEQ ID NO: 192613 - DNA, 25 bp, Canis familiaris
tataaggcatacaggtctaaccata

SEQ ID NO: 192614 - DNA, 25 bp, Canis familiaris
taaagctgatagaggtcaaaaaaaa

SEQ ID NO: 192615 - DNA, 25 bp, Canis familiaris
taaagagttcctagtcacagcaaag

SEQ ID NO: 192616 - DNA, 25 bp, Canis familiaris
taaaagtcatctttgctctcaaaag

SEQ ID NO: 192617 - DNA, 25 bp, Canis familiaris
taaagaacatctgggctctctagca

SEQ ID NO: 192618 - DNA, 25 bp, Canis familiaris
taaaacaccttggcatttgggtctt

SEQ ID NO: 192619 - DNA, 25 bp, Canis familiaris
taaaatgcactcttcctttggtggc

SEQ ID NO: 192620 - DNA, 25 bp, Canis familiaris
taaaatgctgtcttcctttctagtc

SEQ ID NO: 192621 - DNA, 25 bp, Canis familiaris
taaattgatatccctctttaagtta

SEQ ID NO: 192622 - DNA, 25 bp, Canis familiaris
taaactgagtcacctctcttggagc

SEQ ID NO: 192623 - DNA, 25 bp, Canis familiaris
taaactggctatcctgttagaagca

SEQ ID NO: 192624 - DNA, 25 bp, Canis familiaris
taaacgcgctcagtaatccagaaga

SEQ ID NO: 192625 - DNA, 25 bp, Canis familiaris
tacaaggcccagcaaagcagagata

SEQ ID NO: 192626 - DNA, 25 bp, Canis familiaris
taaagtccacaataggctgcaataa

SEQ ID NO: 192627 - DNA, 25 bp, Canis familiaris
taaacggcagcttcaagggccaaaa

SEQ ID NO: 192628 - DNA, 25 bp, Canis familiaris
taacactggttgtctatagggaaaa

SEQ ID NO: 192629 - DNA, 25 bp, Canis familiaris
taaactgaatattcactaggaaaaa

SEQ ID NO: 192630 - DNA, 25 bp, Canis familiaris
taaacgtgaaatttggagtaatata

SEQ ID NO: 192631 - DNA, 25 bp, Canis familiaris
taaaatgttcatttcaaagtaatta

SEQ ID NO: 192632 - DNA, 25 bp, Canis familiaris
taaacaattcttagcatatggtaaa

SEQ ID NO: 192633 - DNA, 25 bp, Canis familiaris
taaaaattcatactgcattactaca

SEQ ID NO: 192634 - DNA, 25 bp, Canis familiaris
taaaacatcttccacatctcattac

SEQ ID NO: 192635 - DNA, 25 bp, Canis familiaris
taacatgacctctagactttctcac

SEQ ID NO: 192636 - DNA, 25 bp, Canis familiaris
taacatgagcttctggctccttcct

SEQ ID NO: 192637 - DNA, 25 bp, Canis familiaris
taacagggtggtggctacctgctct

SEQ ID NO: 192638 - DNA, 25 bp, Canis familiaris
tacatgctgaagtgcggcttcctgc

SEQ ID NO: 192639 - DNA, 25 bp, Canis familiaris
tacatctataaccggagtagctgct

SEQ ID NO: 192640 - DNA, 25 bp, Canis familiaris
taacaggactctcgggctgaggctg

SEQ ID NO: 192641 - DNA, 25 bp, Canis familiaris
taacagcgacttcacagcatgtcct

SEQ ID NO: 192642 - DNA, 25 bp, Canis familiaris
taaaatggcttcttccatgctcact

SEQ ID NO: 192643 - DNA, 25 bp, Canis familiaris
taaagatgtgctattccagtggaag

SEQ ID NO: 192644 - DNA, 25 bp, Canis familiaris
taaagatgtgttcctccatggtacc

SEQ ID NO: 192645 - DNA, 25 bp, Canis familiaris
taaaatctgtgtcatcctgcatcca

SEQ ID NO: 192646 - DNA, 25 bp, Canis familiaris
taaaatctgtggcctcaaattgtag

SEQ ID NO: 192647 - DNA, 25 bp, Canis familiaris
taaaatcactggcatgttgttggag

SEQ ID NO: 192648 - DNA, 25 bp, Canis familiaris
taacagtgctttctgcttcttgggt

SEQ ID NO: 192649 - DNA, 25 bp, Canis familiaris
taaagtcttctacctggctttgggg

SEQ ID NO: 192650 - DNA, 25 bp, Canis familiaris
tacacagtcttcagggttcttggga

SEQ ID NO: 192651 - DNA, 25 bp, Canis familiaris
taacagtttatcccagtattttagt

SEQ ID NO: 192652 - DNA, 25 bp, Canis familiaris
taaagctttagcacagtacctgaca

SEQ ID NO: 192653 - DNA, 25 bp, Canis familiaris
taaagctcataaggccgcgaccaaa

SEQ ID NO: 192654 - DNA, 25 bp, Canis familiaris
taaagccacaggagaggatcgagta

SEQ ID NO: 192655 - DNA, 25 bp, Canis familiaris
taaaccaaggctcgggagctggccg

SEQ ID NO: 192656 - DNA, 25 bp, Canis familiaris
taggaccaagggatccagcgggcat

SEQ ID NO: 192657 - DNA, 25 bp, Canis familiaris
taaacaacacgggtccagcagtcga

SEQ ID NO: 192658 - DNA, 25 bp, Canis familiaris
taaaaacacgagcacctggcactgg

SEQ ID NO: 192659 - DNA, 25 bp, Canis familiaris
taaataccctggccatcgtgccagc

SEQ ID NO: 192660 - DNA, 25 bp, Canis familiaris
taacacatccttggcaatatctcca

SEQ ID NO: 192661 - DNA, 25 bp, Canis familiaris
taaaatctctggccaaatcccactt

SEQ ID NO: 192662 - DNA, 25 bp, Canis familiaris
taaaacactggtcctgtgtctccta

SEQ ID NO: 192663 - DNA, 25 bp, Canis familiaris
taacaagcctggtctatctgttccc

SEQ ID NO: 192664 - DNA, 25 bp, Canis familiaris
taaaacctggtttctgtcctgcaga

SEQ ID NO: 192665 - DNA, 25 bp, Canis familiaris
taaagcaccagggctttcgcgtgaa

SEQ ID NO: 192666 - DNA, 25 bp, Canis familiaris
taaagccaagaagttatccagtacc

SEQ ID NO: 192667 - DNA, 25 bp, Canis familiaris
taaacccgaactctatctgataacc

SEQ ID NO: 192668 - DNA, 25 bp, Canis familiaris
taaaaccgagaacttgtcaggaaat

SEQ ID NO: 192669 - DNA, 25 bp, Canis familiaris
taacaccccaggcttgctagaaaac

SEQ ID NO: 192670 - DNA, 25 bp, Canis familiaris
taaacctgacagcaattctatgaaa

SEQ ID NO: 192671 - DNA, 25 bp, Canis familiaris
taaagcctaacaccattctaataaa

SEQ ID NO: 192672 - DNA, 25 bp, Canis familiaris
taacaccatcctaccttcgaaaata

SEQ ID NO: 192673 - DNA, 25 bp, Canis familiaris
taaacacacacttgcacttcaaaca

SEQ ID NO: 192674 - DNA, 25 bp, Canis familiaris
taaagaccacttcatgtacaaccaa

SEQ ID NO: 192675 - DNA, 25 bp, Canis familiaris
taaaacgagggctatctccattcca

SEQ ID NO: 192676 - DNA, 25 bp, Canis familiaris
taaaactaggcctatctccattcca

SEQ ID NO: 192677 - DNA, 25 bp, Canis familiaris
taaaaaatgtcagtttcctgtacaa

SEQ ID NO: 192678 - DNA, 25 bp, Canis familiaris
taaagaacctacttactctcataaa

SEQ ID NO: 192679 - DNA, 25 bp, Canis familiaris
taaagaaccaacctgctcttctgaa

SEQ ID NO: 192680 - DNA, 25 bp, Canis familiaris
taaagaaacaacactctctcaggcc

SEQ ID NO: 192681 - DNA, 25 bp, Canis familiaris
taaaaaacccattttgtcagcagcc

SEQ ID NO: 192682 - DNA, 25 bp, Canis familiaris
taaaaaagcccatgtttgccagggg

SEQ ID NO: 192683 - DNA, 25 bp, Canis familiaris
taaaaaaccagctaaatctcctgga

SEQ ID NO: 192684 - DNA, 25 bp, Canis familiaris
taaaaaatcacctcaaacttacata

SEQ ID NO: 192685 - DNA, 25 bp, Canis familiaris
taaataataccctcagaaaaacgtg

SEQ ID NO: 192686 - DNA, 25 bp, Canis familiaris
taaatagattcccaacgaaagccct

SEQ ID NO: 192687 - DNA, 25 bp, Canis familiaris
taaatcaaacccccgaggtgactct

SEQ ID NO: 192688 - DNA, 25 bp, Canis familiaris
taaaaatgacccccacttgtgtgac

SEQ ID NO: 192689 - DNA, 25 bp, Canis familiaris
taaaaatgacccccacttgtgtgac

SEQ ID NO: 192690 - DNA, 25 bp, Canis familiaris
taaaaatgacccccacttgtgtgac

SEQ ID NO: 192691 - DNA, 25 bp, Canis familiaris
taaaagtgccgggccagcttggggt

SEQ ID NO: 192692 - DNA, 25 bp, Canis familiaris
taaaactctgggggcacttgggtgg

SEQ ID NO: 192693 - DNA, 25 bp, Canis familiaris
taaacatccaggggcccctgggtgg

SEQ ID NO: 192694 - DNA, 25 bp, Canis familiaris
ttaacacgtgtcaccaccttggtgg

SEQ ID NO: 192695 - DNA, 25 bp, Canis familiaris
taaatcaggcttaaccctttatggg

SEQ ID NO: 192696 - DNA, 25 bp, Canis familiaris
taaataccttcaaccctacagatgg

SEQ ID NO: 192697 - DNA, 25 bp, Canis familiaris
taaaactctccatcacgaactagcc

SEQ ID NO: 192698 - DNA, 25 bp, Canis familiaris
tacaggtctacctcaagaagcaaga

SEQ ID NO: 192699 - DNA, 25 bp, Canis familiaris
tacgtttatctctcagaaatggaaa

SEQ ID NO: 192700 - DNA, 25 bp, Canis familiaris
tacagtttcgtaccaactatctaaa

SEQ ID NO: 192701 - DNA, 25 bp, Canis familiaris
taacacttcgtacgcaatgcttcta

SEQ ID NO: 192702 - DNA, 25 bp, Canis familiaris
taacacgctcgtggtcaactttcac

SEQ ID NO: 192703 - DNA, 25 bp, Canis familiaris
taacacgacgggaagaattgctctc

SEQ ID NO: 192704 - DNA, 25 bp, Canis familiaris
taacactggcgaagtccaaggtttt

SEQ ID NO: 192705 - DNA, 25 bp, Canis familiaris
taaactcgtcacccacgaggtcttt

SEQ ID NO: 192706 - DNA, 25 bp, Canis familiaris
taaaccatgtcacccaaggtgactt

SEQ ID NO: 192707 - DNA, 25 bp, Canis familiaris
taaacccaacccaagtgtgacattc

SEQ ID NO: 192708 - DNA, 25 bp, Canis familiaris
taaactacaaccctttggactctgc

SEQ ID NO: 192709 - DNA, 25 bp, Canis familiaris
taaaaatcccactttctggacccag

SEQ ID NO: 192710 - DNA, 25 bp, Canis familiaris
taaaagtcttacactaggacctgtg

SEQ ID NO: 192711 - DNA, 25 bp, Canis familiaris
taaaagtcttagcacctggacctcc

SEQ ID NO: 192712 - DNA, 25 bp, Canis familiaris
taaaagtttatccctttatcagcca

SEQ ID NO: 192713 - DNA, 25 bp, Canis familiaris
taaatgagttcgattgtcttacaga

SEQ ID NO: 192714 - DNA, 25 bp, Canis familiaris
taaaatgtgcccatgatgtcgaaaa

SEQ ID NO: 192715 - DNA, 25 bp, Canis familiaris
taaaattgtatgctttcagaataaa

SEQ ID NO: 192716 - DNA, 25 bp, Canis familiaris
taaacatggtggattctcagcaaaa

SEQ ID NO: 192717 - DNA, 25 bp, Canis familiaris
taacactttggaattctgctattta

SEQ ID NO: 192718 - DNA, 25 bp, Canis familiaris
taacactgtgtgcttttgtatggaa

SEQ ID NO: 192719 - DNA, 25 bp, Canis familiaris
taacactgtcaccaccttggtggaa

SEQ ID NO: 192720 - DNA, 25 bp, Canis familiaris
taaactgatccacactcggtgcaga

SEQ ID NO: 192721 - DNA, 25 bp, Canis familiaris
taaagctgccgcagacgctggtgca

SEQ ID NO: 192722 - DNA, 25 bp, Canis familiaris
taaactcagcaaagtctggcgtgat

SEQ ID NO: 192723 - DNA, 25 bp, Canis familiaris
tacatccacagctgcgacgggtgat

SEQ ID NO: 192724 - DNA, 25 bp, Canis familiaris
tacagcctccatggagccggatggc

SEQ ID NO: 192725 - DNA, 25 bp, Canis familiaris
tacagcccagcgatcactggagcct

SEQ ID NO: 192726 - DNA, 25 bp, Canis familiaris
tacgcccaacagacatcaggcacct

SEQ ID NO: 192727 - DNA, 25 bp, Canis familiaris
taccaacagcaccatcaaggcacgt

SEQ ID NO: 192728 - DNA, 25 bp, Canis familiaris
tacataccatccagaaggacgtcca

SEQ ID NO: 192729 - DNA, 25 bp, Canis familiaris
taaactactcatcataatacttcta

SEQ ID NO: 192730 - DNA, 25 bp, Canis familiaris
tacgttgttcatcattaatcgacta

SEQ ID NO: 192731 - DNA, 25 bp, Canis familiaris
tacgattgccatagccattcacagc

SEQ ID NO: 192732 - DNA, 25 bp, Canis familiaris
taaattggaagcgaggcctcccagg

SEQ ID NO: 192733 - DNA, 25 bp, Canis familiaris
taaatgggaactatcccccatgggt

SEQ ID NO: 192734 - DNA, 25 bp, Canis familiaris
taaaaaattctgatgcccccatggg

SEQ ID NO: 192735 - DNA, 25 bp, Canis familiaris
tagaactaaactaccctcaacaggg

SEQ ID NO: 192736 - DNA, 25 bp, Canis familiaris
taaacaaactgtaccactaattcat

SEQ ID NO: 192737 - DNA, 25 bp, Canis familiaris
tacaacatcaagctgcccgtaggtt

SEQ ID NO: 192738 - DNA, 25 bp, Canis familiaris
tacggacaagagctacatgaagggt

SEQ ID NO: 192739 - DNA, 25 bp, Canis familiaris
tacgaggaacagccgccatacgggt

SEQ ID NO: 192740 - DNA, 25 bp, Canis familiaris
tacagaggtaatccgtttggcttga

SEQ ID NO: 192741 - DNA, 25 bp, Canis familiaris
taaactgtaatttgtgtgctgggta

SEQ ID NO: 192742 - DNA, 25 bp, Canis familiaris
taaactgtactattggtgtcatgga

SEQ ID NO: 192743 - DNA, 25 bp, Canis familiaris
tacaacggacacgtgggtctgggcg

SEQ ID NO: 192744 - DNA, 25 bp, Canis familiaris
tacacacaggtattgggggcggggg

SEQ ID NO: 192745 - DNA, 25 bp, Canis familiaris
tacaccaccccaggcgtggtggggg

SEQ ID NO: 192746 - DNA, 25 bp, Canis familiaris
tacactacccacccaggagtgaggg

SEQ ID NO: 192747 - DNA, 25 bp, Canis familiaris
taaatgaccaaacctgtggggcagg

SEQ ID NO: 192748 - DNA, 25 bp, Canis familiaris
taaaaccagaacctgctgctacggg

SEQ ID NO: 192749 - DNA, 25 bp, Canis familiaris
taaacttcaaatgtctgtccctggc

SEQ ID NO: 192750 - DNA, 25 bp, Canis familiaris
taaatcttaaaggtctcacccccag

SEQ ID NO: 192751 - DNA, 25 bp, Canis familiaris
taaatcttagcaagtgtcaccacac

SEQ ID NO: 192752 - DNA, 25 bp, Canis familiaris
tacacatttagggttgcctgccacc

SEQ ID NO: 192753 - DNA, 25 bp, Canis familiaris
tacaagtccagggtcaactccaccc

SEQ ID NO: 192754 - DNA, 25 bp, Canis familiaris
taaatgaccagggctcaaccccttg

SEQ ID NO: 192755 - DNA, 25 bp, Canis familiaris
tacaataccaagtcaagattcccgg

SEQ ID NO: 192756 - DNA, 25 bp, Canis familiaris
taaaatccaactttgaatcccctgg

SEQ ID NO: 192757 - DNA, 25 bp, Canis familiaris
taaaatcacaagggatttccccatt

SEQ ID NO: 192758 - DNA, 25 bp, Canis familiaris
taaataacatggggttctggctcct

SEQ ID NO: 192759 - DNA, 25 bp, Canis familiaris
taaaatacagcgttttcaccctcaa

SEQ ID NO: 192760 - DNA, 25 bp, Canis familiaris
taaaatatccaattcttcaacttaa

SEQ ID NO: 192761 - DNA, 25 bp, Canis familiaris
taaaagcctcaattcctgcaacatc

SEQ ID NO: 192762 - DNA, 25 bp, Canis familiaris
taaacacgcaagatactcaccacct

SEQ ID NO: 192763 - DNA, 25 bp, Canis familiaris
taaaaccacaatcagacaccactct

SEQ ID NO: 192764 - DNA, 25 bp, Canis familiaris
taaaaccactggggatcttgcctgt

SEQ ID NO: 192765 - DNA, 25 bp, Canis familiaris
taaagacaacgacgccatcgtccga

SEQ ID NO: 192766 - DNA, 25 bp, Canis familiaris
taaagaccacaaaccactgctctga

SEQ ID NO: 192767 - DNA, 25 bp, Canis familiaris
tacaaacccaatcgctacttcaagt

SEQ ID NO: 192768 - DNA, 25 bp, Canis familiaris
tacaagtcccaaggttgccgactct

SEQ ID NO: 192769 - DNA, 25 bp, Canis familiaris
taaaatcctctaagttggcaactga

SEQ ID NO: 192770 - DNA, 25 bp, Canis familiaris
taaaatacttaacttgcacaccaaa

SEQ ID NO: 192771 - DNA, 25 bp, Canis familiaris
taaaaaaccacacctacacctgaga

SEQ ID NO: 192772 - DNA, 25 bp, Canis familiaris
taaacaccaaaccctgacttctata

SEQ ID NO: 192773 - DNA, 25 bp, Canis familiaris
taaacaataaaccctactgctgata

SEQ ID NO: 192774 - DNA, 25 bp, Canis familiaris
taaaaataacacgactctttgcata

SEQ ID NO: 192775 - DNA, 25 bp, Canis familiaris
taaagaaaggacggcctaccaagca

SEQ ID NO: 192776 - DNA, 25 bp, Canis familiaris
taaaaatttgacacctgcccatatc

SEQ ID NO: 192777 - DNA, 25 bp, Canis familiaris
taaaaatggtgtcagcctcctaacc

SEQ ID NO: 192778 - DNA, 25 bp, Canis familiaris
taaaaatggtgtcagcctcctaacc

SEQ ID NO: 192779 - DNA, 25 bp, Canis familiaris
taaaattgtggtctctctcttctac

SEQ ID NO: 192780 - DNA, 25 bp, Canis familiaris
taaaattgctcaccattcttcttca

SEQ ID NO: 192781 - DNA, 25 bp, Canis familiaris
taaaatggcctctgtcttctatacc

SEQ ID NO: 192782 - DNA, 25 bp, Canis familiaris
taaaatgcccagtgattctctctag

SEQ ID NO: 192783 - DNA, 25 bp, Canis familiaris
taaacagctccatctgtttccttta

SEQ ID NO: 192784 - DNA, 25 bp, Canis familiaris
taaacatggccattctttccaaatt

SEQ ID NO: 192785 - DNA, 25 bp, Canis familiaris
taaacatgatggtcccttccacttt

SEQ ID NO: 192786 - DNA, 25 bp, Canis familiaris
taaaattgttccgtcttctttcatt

SEQ ID NO: 192787 - DNA, 25 bp, Canis familiaris
taaaatctcttctctttcagtatga

SEQ ID NO: 192788 - DNA, 25 bp, Canis familiaris
taaacactttcttcttatcgaatgt

SEQ ID NO: 192789 - DNA, 25 bp, Canis familiaris
taaacacctttcctattggaaatat

SEQ ID NO: 192790 - DNA, 25 bp, Canis familiaris
taaacagcctttaattggtcacaaa

SEQ ID NO: 192791 - DNA, 25 bp, Canis familiaris
taaaatgccttgctgttgtccaaaa

SEQ ID NO: 192792 - DNA, 25 bp, Canis familiaris
taaatgtggccttttctgtgtcaaa

SEQ ID NO: 192793 - DNA, 25 bp, Canis familiaris
taaagtgggcatttgtcctccaaaa

SEQ ID NO: 192794 - DNA, 25 bp, Canis familiaris
taaaggtggattgacattccaaaaa

SEQ ID NO: 192795 - DNA, 25 bp, Canis familiaris
taaagttatttgtccatctccaaaa

SEQ ID NO: 192796 - DNA, 25 bp, Canis familiaris
taaacttcttatttacccaaatgag

SEQ ID NO: 192797 - DNA, 25 bp, Canis familiaris
taaattttggtaatccccactatga

SEQ ID NO: 192798 - DNA, 25 bp, Canis familiaris
taaaattttctagtttcccttgcag

SEQ ID NO: 192799 - DNA, 25 bp, Canis familiaris
taaattttttagtttactctacatg

SEQ ID NO: 192800 - DNA, 25 bp, Canis familiaris
taaaatttttgccttttgtgccctg

SEQ ID NO: 192801 - DNA, 25 bp, Canis familiaris
taaaaatgtcctcttgttgtccttc

SEQ ID NO: 192802 - DNA, 25 bp, Canis familiaris
taaaagaatcacttttgttatccaa

SEQ ID NO: 192803 - DNA, 25 bp, Canis familiaris
taaaagatccagcactttttccata

SEQ ID NO: 192804 - DNA, 25 bp, Canis familiaris
taaaagagccaaccatttcccaatg

SEQ ID NO: 192805 - DNA, 25 bp, Canis familiaris
taaagcagaccatgaccttaccaac

SEQ ID NO: 192806 - DNA, 25 bp, Canis familiaris
taaaggccgcagtggcctgacctac

SEQ ID NO: 192807 - DNA, 25 bp, Canis familiaris
taaaccacaccatggcttagactcc

SEQ ID NO: 192808 - DNA, 25 bp, Canis familiaris
taaagaatcccatgctcttctgact

SEQ ID NO: 192809 - DNA, 25 bp, Canis familiaris
taaaatgatccttagtctcttgccc

SEQ ID NO: 192810 - DNA, 25 bp, Canis familiaris
taaagcagatcagtgcatcttcctt

SEQ ID NO: 192811 - DNA, 25 bp, Canis familiaris
taaacagaactgtctccacattcca

SEQ ID NO: 192812 - DNA, 25 bp, Canis familiaris
taaaatgaatcatgctcctcaccca

SEQ ID NO: 192813 - DNA, 25 bp, Canis familiaris
taaaagcatcaattcctgccacatc

SEQ ID NO: 192814 - DNA, 25 bp, Canis familiaris
taaaggcgccattcactggctcagt

SEQ ID NO: 192815 - DNA, 25 bp, Canis familiaris
ttaaggggcttcaggtcagtcgaca

SEQ ID NO: 192816 - DNA, 25 bp, Canis familiaris
tacaaggggttggggtctgtccact

SEQ ID NO: 192817 - DNA, 25 bp, Canis familiaris
taaaggtggttctaactgcctcttt

SEQ ID NO: 192818 - DNA, 25 bp, Canis familiaris
taaaggggttaaatctgacattcta

SEQ ID NO: 192819 - DNA, 25 bp, Canis familiaris
taaaggaggtctcatatgctctcga

SEQ ID NO: 192820 - DNA, 25 bp, Canis familiaris
taaaaggtgtgtgtctcctctgacg

SEQ ID NO: 192821 - DNA, 25 bp, Canis familiaris
taaaacgtgcttttctctcttgaaa

SEQ ID NO: 192822 - DNA, 25 bp, Canis familiaris
taaactttcttgttcctattatgaa

SEQ ID NO: 192823 - DNA, 25 bp, Canis familiaris
taaagaatttctgcatttatttgaa

SEQ ID NO: 192824 - DNA, 25 bp, Canis familiaris
taaacaactcttgcaatctaaccaa

SEQ ID NO: 192825 - DNA, 25 bp, Canis familiaris
taaaacccatatgaaaagacacaaa

SEQ ID NO: 192826 - DNA, 25 bp, Canis familiaris
taaacactgactaccaatacaacaa

SEQ ID NO: 192827 - DNA, 25 bp, Canis familiaris
taaaaatcactttcaaacaccaata

SEQ ID NO: 192828 - DNA, 25 bp, Canis familiaris
taaataacacttaagccccggatat

SEQ ID NO: 192829 - DNA, 25 bp, Canis familiaris
taaaaacaattgatcccctgccttt

SEQ ID NO: 192830 - DNA, 25 bp, Canis familiaris
taaataaataatgccctcgctccct

SEQ ID NO: 192831 - DNA, 25 bp, Canis familiaris
taaatcaattttgccaccaccttct

SEQ ID NO: 192832 - DNA, 25 bp, Canis familiaris
taaagacattttctcactcctgttt

SEQ ID NO: 192833 - DNA, 25 bp, Canis familiaris
taaaaagttagcttctctctctttt

SEQ ID NO: 192834 - DNA, 25 bp, Canis familiaris
taaacttttactatgtatctttcat

SEQ ID NO: 192835 - DNA, 25 bp, Canis familiaris
taaacttttaactgcttcttgtaga

SEQ ID NO: 192836 - DNA, 25 bp, Canis familiaris
taaagttttatttcgcatgacttta

SEQ ID NO: 192837 - DNA, 25 bp, Canis familiaris
taaatactgttgtggcgaagtttca

SEQ ID NO: 192838 - DNA, 25 bp, Canis familiaris
taaaaatttgccttcagagggttga

SEQ ID NO: 192839 - DNA, 25 bp, Canis familiaris
tacaacttttgggatccgggttgtg

SEQ ID NO: 192840 - DNA, 25 bp, Canis familiaris
tacaaatttccgcatggggtaatcg

SEQ ID NO: 192841 - DNA, 25 bp, Canis familiaris
taaattttctaggtgaggtttatgt

SEQ ID NO: 192842 - DNA, 25 bp, Canis familiaris
tatgaattcttctcgtgacttttaa

SEQ ID NO: 192843 - DNA, 25 bp, Canis familiaris
taaatttgatcagctgtcattctct

SEQ ID NO: 192844 - DNA, 25 bp, Canis familiaris
taaattacattgccttttgtccatt

SEQ ID NO: 192845 - DNA, 25 bp, Canis familiaris
taaattatttcacatagtcatccat

SEQ ID NO: 192846 - DNA, 25 bp, Canis familiaris
tacaagttttgccctgtgtaccttt

SEQ ID NO: 192847 - DNA, 25 bp, Canis familiaris
tacaacttgtggtctctgtgggtca

SEQ ID NO: 192848 - DNA, 25 bp, Canis familiaris
taaacctgagagtcctgctggcaac

SEQ ID NO: 192849 - DNA, 25 bp, Canis familiaris
taaatagctgcaagaccgtgtcaag

SEQ ID NO: 192850 - DNA, 25 bp, Canis familiaris
taaactggcactggccatcttcgtg

SEQ ID NO: 192851 - DNA, 25 bp, Canis familiaris
taaacagtatcacaatctatcatgt

SEQ ID NO: 192852 - DNA, 25 bp, Canis familiaris
tacatagagtagtcaaattcataga

SEQ ID NO: 192853 - DNA, 25 bp, Canis familiaris
taaagcgtagtctgtctccatgagg

SEQ ID NO: 192854 - DNA, 25 bp, Canis familiaris
taaaagtagacacatgcccagcctg

SEQ ID NO: 192855 - DNA, 25 bp, Canis familiaris
taaaagtggatccagaccctgtctt

SEQ ID NO: 192856 - DNA, 25 bp, Canis familiaris
taaaggaagccactaccgcgtgttc

SEQ ID NO: 192857 - DNA, 25 bp, Canis familiaris
taaagtgaaccacgcagtcctggct

SEQ ID NO: 192858 - DNA, 25 bp, Canis familiaris
taaaggaatgccggcgtcttctgtt

SEQ ID NO: 192859 - DNA, 25 bp, Canis familiaris
taaagaaacggtcgcgcttctgctt

SEQ ID NO: 192860 - DNA, 25 bp, Canis familiaris
taaagaactagtacccttggctctc

SEQ ID NO: 192861 - DNA, 25 bp, Canis familiaris
taaagcaactgccataccacttgtg

SEQ ID NO: 192862 - DNA, 25 bp, Canis familiaris
taaagaccaagcaatcccatgtgat

SEQ ID NO: 192863 - DNA, 25 bp, Canis familiaris
taaagagccaggctcccgttttctg

SEQ ID NO: 192864 - DNA, 25 bp, Canis familiaris
taaacgtcggtcatacgttctcctg

SEQ ID NO: 192865 - DNA, 25 bp, Canis familiaris
taaagcgtagctctttcgtttccga

SEQ ID NO: 192866 - DNA, 25 bp, Canis familiaris
taaacactacatccttcttatttcc

SEQ ID NO: 192867 - DNA, 25 bp, Canis familiaris
taaacacaatctcatgtcagttata

SEQ ID NO: 192868 - DNA, 25 bp, Canis familiaris
taaaagcctcataatgtcatcatta

SEQ ID NO: 192869 - DNA, 25 bp, Canis familiaris
taaatggtctcaatgatcctccgaa

SEQ ID NO: 192870 - DNA, 25 bp, Canis familiaris
taaagagtctgcgtgtcggctcgta

SEQ ID NO: 192871 - DNA, 25 bp, Canis familiaris
taaatgacttgctgagcgtcccatg

SEQ ID NO: 192872 - DNA, 25 bp, Canis familiaris
taaatacattcaggtccctccattc

SEQ ID NO: 192873 - DNA, 25 bp, Canis familiaris
taaaaaccactttcatcatccatac

SEQ ID NO: 192874 - DNA, 25 bp, Canis familiaris
tacagaatttcctttctcccaaagt

SEQ ID NO: 192875 - DNA, 25 bp, Canis familiaris
tatagacttacctttagccctaaag

SEQ ID NO: 192876 - DNA, 25 bp, Canis familiaris
tacccttaactttagccctatgcat

SEQ ID NO: 192877 - DNA, 25 bp, Canis familiaris
tacccttaactttagccctatgcat

SEQ ID NO: 192878 - DNA, 25 bp, Canis familiaris
tacccttaactttagccctatgcat

SEQ ID NO: 192879 - DNA, 25 bp, Canis familiaris
tacccttaactttagccctatgcat

SEQ ID NO: 192880 - DNA, 25 bp, Canis familiaris
tacccttaactttagccctatgcat

SEQ ID NO: 192881 - DNA, 25 bp, Canis familiaris
tacccttaactttagccctatgcat

SEQ ID NO: 192882 - DNA, 25 bp, Canis familiaris
tacccttaactttagccctatgcat

SEQ ID NO: 192883 - DNA, 25 bp, Canis familiaris
tacccttaactttagccctatgcat

SEQ ID NO: 192884 - DNA, 25 bp, Canis familiaris
tacatcccaaaccttgtacctagct

SEQ ID NO: 192885 - DNA, 25 bp, Canis familiaris
tacaccccagacctttgatttgaga

SEQ ID NO: 192886 - DNA, 25 bp, Canis familiaris
taaagtcctgatccgtgtgcatttg

SEQ ID NO: 192887 - DNA, 25 bp, Canis familiaris
taaagctcgtagttggatcttggga

SEQ ID NO: 192888 - DNA, 25 bp, Canis familiaris
taggaccacttttgccactatggga

SEQ ID NO: 192889 - DNA, 25 bp, Canis familiaris
tacgaacgcttttcctcgaggtgta

SEQ ID NO: 192890 - DNA, 25 bp, Canis familiaris
taaaacagcttcttttgttggttat

SEQ ID NO: 192891 - DNA, 25 bp, Canis familiaris
taaaaccatgtcttcaatttatttc

SEQ ID NO: 192892 - DNA, 25 bp, Canis familiaris
taaagactcttcatccttttattcc

SEQ ID NO: 192893 - DNA, 25 bp, Canis familiaris
taaagaggccacatccacttttacc

SEQ ID NO: 192894 - DNA, 25 bp, Canis familiaris
taaaagcccctgatacttcttaaca

SEQ ID NO: 192895 - DNA, 25 bp, Canis familiaris
taaacgatacctctgatcttcctaa

SEQ ID NO: 192896 - DNA, 25 bp, Canis familiaris
taaaggtccctgcagagtatgtgta

SEQ ID NO: 192897 - DNA, 25 bp, Canis familiaris
taaagaggccctgggggatgctcca

SEQ ID NO: 192898 - DNA, 25 bp, Canis familiaris
taaacgatgccgaccggcgatgcgg

SEQ ID NO: 192899 - DNA, 25 bp, Canis familiaris
taaaggaatcgaagccggtgcggct

SEQ ID NO: 192900 - DNA, 25 bp, Canis familiaris
tacaagtctgtctaaccggtctggt

SEQ ID NO: 192901 - DNA, 25 bp, Canis familiaris
taaagtcttctagctctttcgtgtc

SEQ ID NO: 192902 - DNA, 25 bp, Canis familiaris
taaatctctttcaaacatttcagtt

SEQ ID NO: 192903 - DNA, 25 bp, Canis familiaris
taaatccactgaaaacaaacttagg

SEQ ID NO: 192904 - DNA, 25 bp, Canis familiaris
taaagccaccaccagccaaataata

SEQ ID NO: 192905 - DNA, 25 bp, Canis familiaris
taaaggcacctcgatgccagcaaaa

SEQ ID NO: 192906 - DNA, 25 bp, Canis familiaris
taaacacacttctgccagcacaatg

SEQ ID NO: 192907 - DNA, 25 bp, Canis familiaris
taaactcactcactagcagagccac

SEQ ID NO: 192908 - DNA, 25 bp, Canis familiaris
taaagcagcagttgccagcacagcc

SEQ ID NO: 192909 - DNA, 25 bp, Canis familiaris
taaacaatggatgtcacacacacac

SEQ ID NO: 192910 - DNA, 25 bp, Canis familiaris
taaacacttatattgcgcctacact

SEQ ID NO: 192911 - DNA, 25 bp, Canis familiaris
taaacctgtgaatgggtcccacgca

SEQ ID NO: 192912 - DNA, 25 bp, Canis familiaris
taaatccaggaaccggatcccctat

SEQ ID NO: 192913 - DNA, 25 bp, Canis familiaris
taaatggcaggactgggggccctct

SEQ ID NO: 192914 - DNA, 25 bp, Canis familiaris
taaatggggaatttctctcgctctc

SEQ ID NO: 192915 - DNA, 25 bp, Canis familiaris
taaatggagggcagtgacattgcct

SEQ ID NO: 192916 - DNA, 25 bp, Canis familiaris
taaagaagacgctcgcagatacact

SEQ ID NO: 192917 - DNA, 25 bp, Canis familiaris
taaaaatggctctcgggcacatctg

SEQ ID NO: 192918 - DNA, 25 bp, Canis familiaris
tacaataaggtactggggccctagt

SEQ ID NO: 192919 - DNA, 25 bp, Canis familiaris
taaaaaggcctcagtgacccataaa

SEQ ID NO: 192920 - DNA, 25 bp, Canis familiaris
taaacagaattcttgtgtgacctca

SEQ ID NO: 192921 - DNA, 25 bp, Canis familiaris
taaacacattctgattctacttcaa

SEQ ID NO: 192922 - DNA, 25 bp, Canis familiaris
taaaacattgtggttgactccccaa

SEQ ID NO: 192923 - DNA, 25 bp, Canis familiaris
taaaactggtttatcttctcccaca

SEQ ID NO: 192924 - DNA, 25 bp, Canis familiaris
tactaattttaagagcattccccca

SEQ ID NO: 192925 - DNA, 25 bp, Canis familiaris
taaatattttagctaactctcccca

SEQ ID NO: 192926 - DNA, 25 bp, Canis familiaris
taaatacttaaacctactgctcctc

SEQ ID NO: 192927 - DNA, 25 bp, Canis familiaris
taaatagttaatggccggatttgct

SEQ ID NO: 192928 - DNA, 25 bp, Canis familiaris
tacacagagttatcagacgttattt

SEQ ID NO: 192929 - DNA, 25 bp, Canis familiaris
taaacacgtcaatgacctttcttta

SEQ ID NO: 192930 - DNA, 25 bp, Canis familiaris
taaacagctggctatttcccttctt

SEQ ID NO: 192931 - DNA, 25 bp, Canis familiaris
taaacagcgatgtgtttccttcctc

SEQ ID NO: 192932 - DNA, 25 bp, Canis familiaris
taaacatgtagtttttcctccactc

SEQ ID NO: 192933 - DNA, 25 bp, Canis familiaris
taaatcaaagtaattctttccttct

SEQ ID NO: 192934 - DNA, 25 bp, Canis familiaris
taaattactgactccatttccttta

SEQ ID NO: 192935 - DNA, 25 bp, Canis familiaris
taaatgtttacttccttttcttatg

SEQ ID NO: 192936 - DNA, 25 bp, Canis familiaris
taaactttgattttcttcctttgtg

SEQ ID NO: 192937 - DNA, 25 bp, Canis familiaris
taaacttattgttgatctaggctct

SEQ ID NO: 192938 - DNA, 25 bp, Canis familiaris
taaactcttgtttagaatgctgtct

SEQ ID NO: 192939 - DNA, 25 bp, Canis familiaris
taaacctcttattagcaccttatat

SEQ ID NO: 192940 - DNA, 25 bp, Canis familiaris
taaacattctttccacacttcttat

SEQ ID NO: 192941 - DNA, 25 bp, Canis familiaris
taaacatctctcaccaacaaattct

SEQ ID NO: 192942 - DNA, 25 bp, Canis familiaris
taaacatgtctgaagtcaaaaaaaa

SEQ ID NO: 192943 - DNA, 25 bp, Canis familiaris
taaagcgcttgtttgcagataaaaa

SEQ ID NO: 192944 - DNA, 25 bp, Canis familiaris
taaagtgtgtatggtggaaagagaa

SEQ ID NO: 192945 - DNA, 25 bp, Canis familiaris
taaagctgtctgaagcggacaagct

SEQ ID NO: 192946 - DNA, 25 bp, Canis familiaris
taaagcttcagagctagagctagta

SEQ ID NO: 192947 - DNA, 25 bp, Canis familiaris
taaagcatgcttttctaggccagga

SEQ ID NO: 192948 - DNA, 25 bp, Canis familiaris
taaagctcgcatttctgatgcccgt

SEQ ID NO: 192949 - DNA, 25 bp, Canis familiaris
taaatgccagcatttctgtgcctct

SEQ ID NO: 192950 - DNA, 25 bp, Canis familiaris
taaagctcaggatgaggccttcgcc

SEQ ID NO: 192951 - DNA, 25 bp, Canis familiaris
tacagggcagcctgcaggttaccca

SEQ ID NO: 192952 - DNA, 25 bp, Canis familiaris
tagctagctactttgcaggttacct

SEQ ID NO: 192953 - DNA, 25 bp, Canis familiaris
taaatgctccattatgaggtcatac

SEQ ID NO: 192954 - DNA, 25 bp, Canis familiaris
taaatctccatctgaaatgctgcta

SEQ ID NO: 192955 - DNA, 25 bp, Canis familiaris
taaatcaatcattcctccatctgta

SEQ ID NO: 192956 - DNA, 25 bp, Canis familiaris
tacagaatgtacgactcactatata

SEQ ID NO: 192957 - DNA, 25 bp, Canis familiaris
tacaaagtattctgcctatcagtcc

SEQ ID NO: 192958 - DNA, 25 bp, Canis familiaris
taaagagtttctcgcgtgcaagccc

SEQ ID NO: 192959 - DNA, 25 bp, Canis familiaris
tagcacggttctacggggagaccct

SEQ ID NO: 192960 - DNA, 25 bp, Canis familiaris
tacagggcttttcaggggtcctgct

SEQ ID NO: 192961 - DNA, 25 bp, Canis familiaris
taaagcctcttgtgggggccaagga

SEQ ID NO: 192962 - DNA, 25 bp, Canis familiaris
tacaaggcctactgcgtggggcaac

SEQ ID NO: 192963 - DNA, 25 bp, Canis familiaris
tagcaaggccaagttcgccggcaga

SEQ ID NO: 192964 - DNA, 25 bp, Canis familiaris
tagcaaggccaagttcgccggcaga

SEQ ID NO: 192965 - DNA, 25 bp, Canis familiaris
taaagttcaggcatcgctggcagcg

SEQ ID NO: 192966 - DNA, 25 bp, Canis familiaris
taaagtgcacctctagctgcagcac

SEQ ID NO: 192967 - DNA, 25 bp, Canis familiaris
taaagctcaccttctaatcacatcc

SEQ ID NO: 192968 - DNA, 25 bp, Canis familiaris
tacaatgctacggacagagaccccc

SEQ ID NO: 192969 - DNA, 25 bp, Canis familiaris
taaacgaggctgacaaactccgctc

SEQ ID NO: 192970 - DNA, 25 bp, Canis familiaris
taaatctggggccaaatcctactcc

SEQ ID NO: 192971 - DNA, 25 bp, Canis familiaris
taaagggccgtgccaacctgaggcc

SEQ ID NO: 192972 - DNA, 25 bp, Canis familiaris
taccgggccgagacagacacaggga

SEQ ID NO: 192973 - DNA, 25 bp, Canis familiaris
tacgggagccagtactacaacgggc

SEQ ID NO: 192974 - DNA, 25 bp, Canis familiaris
tacgtaagccgtcgtaaacggcact

SEQ ID NO: 192975 - DNA, 25 bp, Canis familiaris
tacactgtaccgggtaaaacagact

SEQ ID NO: 192976 - DNA, 25 bp, Canis familiaris
tacccgaccgaggaccaagacagtt

SEQ ID NO: 192977 - DNA, 25 bp, Canis familiaris
taccctacaggggcccttagagcct

SEQ ID NO: 192978 - DNA, 25 bp, Canis familiaris
tacactttaattcccacttaagcct

SEQ ID NO: 192979 - DNA, 25 bp, Canis familiaris
taccatggtagaatccggttttgcc

SEQ ID NO: 192980 - DNA, 25 bp, Canis familiaris
taaatggtaaggggcgttgtgtcct

SEQ ID NO: 192981 - DNA, 25 bp, Canis familiaris
tacaatggctagcaggcaccttagt

SEQ ID NO: 192982 - DNA, 25 bp, Canis familiaris
tacagtgagaactgacccttcagga

SEQ ID NO: 192983 - DNA, 25 bp, Canis familiaris
tacagctcggcaaagaccctgtcga

SEQ ID NO: 192984 - DNA, 25 bp, Canis familiaris
tacactgctatggaataccgctggc

SEQ ID NO: 192985 - DNA, 25 bp, Canis familiaris
tagacatccagaagtgaccacaggc

SEQ ID NO: 192986 - DNA, 25 bp, Canis familiaris
taaatccatgctaggccaaagtgcc

SEQ ID NO: 192987 - DNA, 25 bp, Canis familiaris
taaaccgatatggccacacagtgga

SEQ ID NO: 192988 - DNA, 25 bp, Canis familiaris
taaatccgtatgtcaccacagctac

SEQ ID NO: 192989 - DNA, 25 bp, Canis familiaris
taaagtctgttgaaatgcaccatga

SEQ ID NO: 192990 - DNA, 25 bp, Canis familiaris
taaagtcttagcatgaccctcacgc

SEQ ID NO: 192991 - DNA, 25 bp, Canis familiaris
taaatgattttgctacctcagccgg

SEQ ID NO: 192992 - DNA, 25 bp, Canis familiaris
taaatcatttatcctacctgaccct

SEQ ID NO: 192993 - DNA, 25 bp, Canis familiaris
tacaacatgatcatccgacgctact

SEQ ID NO: 192994 - DNA, 25 bp, Canis familiaris
taaagcagaactgcagcacccacca

SEQ ID NO: 192995 - DNA, 25 bp, Canis familiaris
taaaggctgattgcagcactcccac

SEQ ID NO: 192996 - DNA, 25 bp, Canis familiaris
taaagtgctattggcaactcctaaa

SEQ ID NO: 192997 - DNA, 25 bp, Canis familiaris
taaaggcttctcaaactgcaaaaaa

SEQ ID NO: 192998 - DNA, 25 bp, Canis familiaris
taaagccttctggaatctgaaaaaa

SEQ ID NO: 192999 - DNA, 25 bp, Canis familiaris
tacactgccttgtctacatctgaaa

SEQ ID NO: 193000 - DNA, 25 bp, Canis familiaris
tacacacacttaggacattaaaaac

SEQ ID NO: 193001 - DNA, 25 bp, Canis familiaris
taaattgcttcagatctaaaaaaca

SEQ ID NO: 193002 - DNA, 25 bp, Canis familiaris
taaatgttactcctctatgcaaaaa

SEQ ID NO: 193003 - DNA, 25 bp, Canis familiaris
taaagatatattccttgtcaaaaaa

SEQ ID NO: 193004 - DNA, 25 bp, Canis familiaris
taaagtgttttcagagcattaaaaa

SEQ ID NO: 193005 - DNA, 25 bp, Canis familiaris
taaagtctttcttgggtgacatgaa

SEQ ID NO: 193006 - DNA, 25 bp, Canis familiaris
taaattttctattcggtcaatgatt

SEQ ID NO: 193007 - DNA, 25 bp, Canis familiaris
taaatttgactcacgctgtccactt

SEQ ID NO: 193008 - DNA, 25 bp, Canis familiaris
taaatttgactaccctgtccatagc

SEQ ID NO: 193009 - DNA, 25 bp, Canis familiaris
taaacttgtcaagcacagtccaggc

SEQ ID NO: 193010 - DNA, 25 bp, Canis familiaris
taaactgattccagacagcatcggg

SEQ ID NO: 193011 - DNA, 25 bp, Canis familiaris
tacaggctttccagggcagccttgt

SEQ ID NO: 193012 - DNA, 25 bp, Canis familiaris
taaagcttgtctgtgggcgcttgtc

SEQ ID NO: 193013 - DNA, 25 bp, Canis familiaris
taaacttgttcttcatggcctgtgt

SEQ ID NO: 193014 - DNA, 25 bp, Canis familiaris
taaacatttgtttctggctttcctt

SEQ ID NO: 193015 - DNA, 25 bp, Canis familiaris
taaatttagccattacctttcctga

SEQ ID NO: 193016 - DNA, 25 bp, Canis familiaris
taaattccagtctaactcttcgctt

SEQ ID NO: 193017 - DNA, 25 bp, Canis familiaris
taaatcccagtatccatctctagta

SEQ ID NO: 193018 - DNA, 25 bp, Canis familiaris
taaacccagtattctcattaacctc

SEQ ID NO: 193019 - DNA, 25 bp, Canis familiaris
taaaccacagttacagtttcaccca

SEQ ID NO: 193020 - DNA, 25 bp, Canis familiaris
taaacccagtgcttggcttctcaac

SEQ ID NO: 193021 - DNA, 25 bp, Canis familiaris
taaactggagtgtgtgctgcctttc

SEQ ID NO: 193022 - DNA, 25 bp, Canis familiaris
taaactgagtccggtgtccattcct

SEQ ID NO: 193023 - DNA, 25 bp, Canis familiaris
ttgcattagagcacggagtccgtcc

SEQ ID NO: 193024 - DNA, 25 bp, Canis familiaris
tacacaagacactggagcttctgtc

SEQ ID NO: 193025 - DNA, 25 bp, Canis familiaris
tacagtaatccacttccttcgtagt

SEQ ID NO: 193026 - DNA, 25 bp, Canis familiaris
tacacaaaacacactcttcgtggaa

SEQ ID NO: 193027 - DNA, 25 bp, Canis familiaris
taaagcatattactctacccgtgga

SEQ ID NO: 193028 - DNA, 25 bp, Canis familiaris
taaagctattatctccctcttgtga

SEQ ID NO: 193029 - DNA, 25 bp, Canis familiaris
taaattcattagtccacctcatctt

SEQ ID NO: 193030 - DNA, 25 bp, Canis familiaris
taaatctaaatatacatctcactgg

SEQ ID NO: 193031 - DNA, 25 bp, Canis familiaris
taaactcatcaactatattcatacg

SEQ ID NO: 193032 - DNA, 25 bp, Canis familiaris
tacacacatatatcttgcttcaagg

SEQ ID NO: 193033 - DNA, 25 bp, Canis familiaris
tacaaaaacactaattccaagggat

SEQ ID NO: 193034 - DNA, 25 bp, Canis familiaris
tacaaagaacataaatacacggagg

SEQ ID NO: 193035 - DNA, 25 bp, Canis familiaris
tacacatacatgagggtacacggag

SEQ ID NO: 193036 - DNA, 25 bp, Canis familiaris
tagcaaaagattccagagaaagaca

SEQ ID NO: 193037 - DNA, 25 bp, Canis familiaris
taaagaaatcgcaagaacataataa

SEQ ID NO: 193038 - DNA, 25 bp, Canis familiaris
taaagaactcctgcaactcaacaac

SEQ ID NO: 193039 - DNA, 25 bp, Canis familiaris
taaagaaggtcgccaagctcaaaaa

SEQ ID NO: 193040 - DNA, 25 bp, Canis familiaris
taaagaggtgtcctaggctccaaaa

SEQ ID NO: 193041 - DNA, 25 bp, Canis familiaris
taaagagagcagacctaccatccaa

SEQ ID NO: 193042 - DNA, 25 bp, Canis familiaris
tacaaaagtgcttctacctccttag

SEQ ID NO: 193043 - DNA, 25 bp, Canis familiaris
taaacactgcttttactgtcactta

SEQ ID NO: 193044 - DNA, 25 bp, Canis familiaris
taaagcctgtaactacttgtgcgta

SEQ ID NO: 193045 - DNA, 25 bp, Canis familiaris
tacaacctggtcctcacttggtata

SEQ ID NO: 193046 - DNA, 25 bp, Canis familiaris
tacacacctggtctactaagcctac

SEQ ID NO: 193047 - DNA, 25 bp, Canis familiaris
ttcaacgtgaactcgtaggccggcc

SEQ ID NO: 193048 - DNA, 25 bp, Canis familiaris
tacaacggaacagtccgggccggtg

SEQ ID NO: 193049 - DNA, 25 bp, Canis familiaris
tacaagcggaaggccggggtgccgt

SEQ ID NO: 193050 - DNA, 25 bp, Canis familiaris
taaagtgtaaagcctggggtgccta

SEQ ID NO: 193051 - DNA, 25 bp, Canis familiaris
taaagttctaggccggatggtccac

SEQ ID NO: 193052 - DNA, 25 bp, Canis familiaris
taaagtttaagtcctgtgttctact

SEQ ID NO: 193053 - DNA, 25 bp, Canis familiaris
taaagtattcgtttctgtgtttcac

SEQ ID NO: 193054 - DNA, 25 bp, Canis familiaris
taaagctaccagtttcttcacttcc

SEQ ID NO: 193055 - DNA, 25 bp, Canis familiaris
taaactgatacttgcttcttccttc

SEQ ID NO: 193056 - DNA, 25 bp, Canis familiaris
tagaactgtgacacttcccaatcca

SEQ ID NO: 193057 - DNA, 25 bp, Canis familiaris
tacaactgtgaggcctatgtccacc

SEQ ID NO: 193058 - DNA, 25 bp, Canis familiaris
tacaaccggtgtgattctcacccct

SEQ ID NO: 193059 - DNA, 25 bp, Canis familiaris
taaagcctggttgtgtccaatccca

SEQ ID NO: 193060 - DNA, 25 bp, Canis familiaris
tacaaccgattatttgtcccactcc

SEQ ID NO: 193061 - DNA, 25 bp, Canis familiaris
tacaaacgagtttgtccccagtcag

SEQ ID NO: 193062 - DNA, 25 bp, Canis familiaris
taaactggattttgtcccacacttt

SEQ ID NO: 193063 - DNA, 25 bp, Canis familiaris
tacagtctggaaatgggtccctttc

SEQ ID NO: 193064 - DNA, 25 bp, Canis familiaris
tacgggtgaacactggtctctggtt

SEQ ID NO: 193065 - DNA, 25 bp, Canis familiaris
tacaggaaaacagggtgccagtggt

SEQ ID NO: 193066 - DNA, 25 bp, Canis familiaris
tacatggaagagtagctccccgttc

SEQ ID NO: 193067 - DNA, 25 bp, Canis familiaris
taaagaatgcagagagcccccttca

SEQ ID NO: 193068 - DNA, 25 bp, Canis familiaris
tacagaatgggaaagcccctttaat

SEQ ID NO: 193069 - DNA, 25 bp, Canis familiaris
tacagaggtggaaatcccccacttt

SEQ ID NO: 193070 - DNA, 25 bp, Canis familiaris
tacagaagcggtccattccgtacgt

SEQ ID NO: 193071 - DNA, 25 bp, Canis familiaris
tactagacaatcccatatccttact

SEQ ID NO: 193072 - DNA, 25 bp, Canis familiaris
tacggatttcagtttcctgtcactc

SEQ ID NO: 193073 - DNA, 25 bp, Canis familiaris
tactctagttaacttcactatagaa

SEQ ID NO: 193074 - DNA, 25 bp, Canis familiaris
tactctagttaacttaacacaacag

SEQ ID NO: 193075 - DNA, 25 bp, Canis familiaris
tttctactgtaacaaaagctaaatt

SEQ ID NO: 193076 - DNA, 25 bp, Canis familiaris
ttcctcctaaaacataagctaactt

SEQ ID NO: 193077 - DNA, 25 bp, Canis familiaris
tacttgtctacaacagattaacgaa

SEQ ID NO: 193078 - DNA, 25 bp, Canis familiaris
tagagttgctaggaagttacacaga

SEQ ID NO: 193079 - DNA, 25 bp, Canis familiaris
tatgagctttcagaggtcccttaga

SEQ ID NO: 193080 - DNA, 25 bp, Canis familiaris
tacagctgttattaggttgcctccg

SEQ ID NO: 193081 - DNA, 25 bp, Canis familiaris
tacactgaggaccaggttgtctcct

SEQ ID NO: 193082 - DNA, 25 bp, Canis familiaris
taaataggagcgacgttgtacaaac

SEQ ID NO: 193083 - DNA, 25 bp, Canis familiaris
tatggggtaggtcctcgtcgaaact

SEQ ID NO: 193084 - DNA, 25 bp, Canis familiaris
tttgggcttgggacttgggtaacat

SEQ ID NO: 193085 - DNA, 25 bp, Canis familiaris
tttgggtgggcgctctataaagaac

SEQ ID NO: 193086 - DNA, 25 bp, Canis familiaris
ttagtaatgggcccatgttgtaagt

SEQ ID NO: 193087 - DNA, 25 bp, Canis familiaris
ttagtaacccagtgttggccacctt

SEQ ID NO: 193088 - DNA, 25 bp, Canis familiaris
ttcgtttatacgtttcgtccacacg

SEQ ID NO: 193089 - DNA, 25 bp, Canis familiaris
ttcgtttatacgtgacctccaaggt

SEQ ID NO: 193090 - DNA, 25 bp, Canis familiaris
tacttcctaaggtctgaggcccaag

SEQ ID NO: 193091 - DNA, 25 bp, Canis familiaris
tactttttcgagtggatccccaact

SEQ ID NO: 193092 - DNA, 25 bp, Canis familiaris
tactttcacttattttaaccctgag

SEQ ID NO: 193093 - DNA, 25 bp, Canis familiaris
tacagttagattctttccacccaga

SEQ ID NO: 193094 - DNA, 25 bp, Canis familiaris
tacagcttagttcttagtctcacct

SEQ ID NO: 193095 - DNA, 25 bp, Canis familiaris
tacacctttgggtctgagtacccag

SEQ ID NO: 193096 - DNA, 25 bp, Canis familiaris
tacggtgggcgttaggtactccagc

SEQ ID NO: 193097 - DNA, 25 bp, Canis familiaris
tactgcgattgcggtacggtaccca

SEQ ID NO: 193098 - DNA, 25 bp, Canis familiaris
tacttttccctgacaggtccacaca

SEQ ID NO: 193099 - DNA, 25 bp, Canis familiaris
tacacctaccctaatggatgcctta

SEQ ID NO: 193100 - DNA, 25 bp, Canis familiaris
taccccactactcatcaagtctaac

SEQ ID NO: 193101 - DNA, 25 bp, Canis familiaris
tatcccccgagtcaaaggcttattt

SEQ ID NO: 193102 - DNA, 25 bp, Canis familiaris
tacccccacagtcacgggtgttgac

SEQ ID NO: 193103 - DNA, 25 bp, Canis familiaris
tacatccccaagggacgttgcgtct

SEQ ID NO: 193104 - DNA, 25 bp, Canis familiaris
tacaacctaaatgtccttggattga

SEQ ID NO: 193105 - DNA, 25 bp, Canis familiaris
taaacctcaaataaatgcttcctta

SEQ ID NO: 193106 - DNA, 25 bp, Canis familiaris
taaaccagaaccagagctacctcta

SEQ ID NO: 193107 - DNA, 25 bp, Canis familiaris
taaactaaccacgtgacttcctgta

SEQ ID NO: 193108 - DNA, 25 bp, Canis familiaris
taaagtaggctagctagctctcccc

SEQ ID NO: 193109 - DNA, 25 bp, Canis familiaris
taaagttgcacttgttcacctacca

SEQ ID NO: 193110 - DNA, 25 bp, Canis familiaris
taaaggtacatacttcactcatgaa

SEQ ID NO: 193111 - DNA, 25 bp, Canis familiaris
taaagactttacgtcctcatcacac

SEQ ID NO: 193112 - DNA, 25 bp, Canis familiaris
taaagcatctttgggatcctctcag

SEQ ID NO: 193113 - DNA, 25 bp, Canis familiaris
taaagatttgatagagtcactctct

SEQ ID NO: 193114 - DNA, 25 bp, Canis familiaris
taaagcattttccacctgtgcttct

SEQ ID NO: 193115 - DNA, 25 bp, Canis familiaris
taaactgagttcctcttgttttgga

SEQ ID NO: 193116 - DNA, 25 bp, Canis familiaris
taaactcgattcactttcatttcaa

SEQ ID NO: 193117 - DNA, 25 bp, Canis familiaris
taaagtcgtttacttgcttgtatcc

SEQ ID NO: 193118 - DNA, 25 bp, Canis familiaris
taaagtcagctgaacctctcctgtt

SEQ ID NO: 193119 - DNA, 25 bp, Canis familiaris
taaatacatcgaatccttaagttaa

SEQ ID NO: 193120 - DNA, 25 bp, Canis familiaris
taaatagcctgtgcctcttgtttac

SEQ ID NO: 193121 - DNA, 25 bp, Canis familiaris
taaatactcagtgttctgttttttt

SEQ ID NO: 193122 - DNA, 25 bp, Canis familiaris
taaacctgcaaagttctgctctgtt

SEQ ID NO: 193123 - DNA, 25 bp, Canis familiaris
taaacctcaagcttgctgcttcaga

SEQ ID NO: 193124 - DNA, 25 bp, Canis familiaris
taaatccatccgtgtcattgcaaat

SEQ ID NO: 193125 - DNA, 25 bp, Canis familiaris
taaaccatccttgtaagccactgtc

SEQ ID NO: 193126 - DNA, 25 bp, Canis familiaris
taaaccatgtttaaaagctcatcat

SEQ ID NO: 193127 - DNA, 25 bp, Canis familiaris
taaaccattccatatttgctcatcc

SEQ ID NO: 193128 - DNA, 25 bp, Canis familiaris
taaacctgtaattttcttctccatt

SEQ ID NO: 193129 - DNA, 25 bp, Canis familiaris
taaagcacttcctcttctttaattt

SEQ ID NO: 193130 - DNA, 25 bp, Canis familiaris
taaaggctgtccaagcatttttaaa

SEQ ID NO: 193131 - DNA, 25 bp, Canis familiaris
taaaggcttcttaattctcttctaa

SEQ ID NO: 193132 - DNA, 25 bp, Canis familiaris
taaagagctattatattcattgtgc

SEQ ID NO: 193133 - DNA, 25 bp, Canis familiaris
taaagcatgtattttattcattcta

SEQ ID NO: 193134 - DNA, 25 bp, Canis familiaris
taaagcagttttttgtattcttcta

SEQ ID NO: 193135 - DNA, 25 bp, Canis familiaris
taaatgcagcctttattgtacccct

SEQ ID NO: 193136 - DNA, 25 bp, Canis familiaris
taaagagcattgttaagtattcgca

SEQ ID NO: 193137 - DNA, 25 bp, Canis familiaris
tacaagtatttttaggactcacatt

SEQ ID NO: 193138 - DNA, 25 bp, Canis familiaris
taaatcctttaacgaggatccattg

SEQ ID NO: 193139 - DNA, 25 bp, Canis familiaris
taaatggcggtacctgggtgtcata

SEQ ID NO: 193140 - DNA, 25 bp, Canis familiaris
taaataggggtgtctgggtgtctca

SEQ ID NO: 193141 - DNA, 25 bp, Canis familiaris
taaatagtgttttccacgtgccaac

SEQ ID NO: 193142 - DNA, 25 bp, Canis familiaris
taaactgtttcttgccactgttaaa

SEQ ID NO: 193143 - DNA, 25 bp, Canis familiaris
tagaaggacttttcccatttaacat

SEQ ID NO: 193144 - DNA, 25 bp, Canis familiaris
taaaggtgcttttctcctttcttgt

SEQ ID NO: 193145 - DNA, 25 bp, Canis familiaris
tacaaagtctgttggtcccttttct

SEQ ID NO: 193146 - DNA, 25 bp, Canis familiaris
tacagcaagctcacggtccgaaata

SEQ ID NO: 193147 - DNA, 25 bp, Canis familiaris
tacacacacacaactgggaatcaac

SEQ ID NO: 193148 - DNA, 25 bp, Canis familiaris
tacacaaccacctggagagccacaa

SEQ ID NO: 193149 - DNA, 25 bp, Canis familiaris
tacacaggggcctgggagccagggt

SEQ ID NO: 193150 - DNA, 25 bp, Canis familiaris
taaatgaagggctggtctgctcgtc

SEQ ID NO: 193151 - DNA, 25 bp, Canis familiaris
taaaggaggagctggccctgtgtca

SEQ ID NO: 193152 - DNA, 25 bp, Canis familiaris
taaaggaggagatggcccggcacct

SEQ ID NO: 193153 - DNA, 25 bp, Canis familiaris
tacaaggggctgtgagtgccggctc

SEQ ID NO: 193154 - DNA, 25 bp, Canis familiaris
tacaagagcctttggggccatcctg

SEQ ID NO: 193155 - DNA, 25 bp, Canis familiaris
taaagactctcatctggtttcctgc

SEQ ID NO: 193156 - DNA, 25 bp, Canis familiaris
taaatctctgtctctgagttcccat

SEQ ID NO: 193157 - DNA, 25 bp, Canis familiaris
tacaaatgtgtgctctggttaccta

SEQ ID NO: 193158 - DNA, 25 bp, Canis familiaris
tacagcagttctcttggaatccgtc

SEQ ID NO: 193159 - DNA, 25 bp, Canis familiaris
tacagcagttaccctgcaactctgc

SEQ ID NO: 193160 - DNA, 25 bp, Canis familiaris
tactacagtgtgcccgaagctctga

SEQ ID NO: 193161 - DNA, 25 bp, Canis familiaris
tacactcaattgccaggaagatctg

SEQ ID NO: 193162 - DNA, 25 bp, Canis familiaris
tacaatctcatttcagtgcaagggt

SEQ ID NO: 193163 - DNA, 25 bp, Canis familiaris
tacagtctcactcatctaaagcatt

SEQ ID NO: 193164 - DNA, 25 bp, Canis familiaris
tacgtaccttcttatgtagttacgg

SEQ ID NO: 193165 - DNA, 25 bp, Canis familiaris
tacttgacttctctagtccttagtc

SEQ ID NO: 193166 - DNA, 25 bp, Canis familiaris
tacttgaggattttttccccagctc

SEQ ID NO: 193167 - DNA, 25 bp, Canis familiaris
tacttaggtctaccgtaccaacgtg

SEQ ID NO: 193168 - DNA, 25 bp, Canis familiaris
tatcctctaaaaaagtaccccgcag

SEQ ID NO: 193169 - DNA, 25 bp, Canis familiaris
tacccattaaaaggatgaccccgca

SEQ ID NO: 193170 - DNA, 25 bp, Canis familiaris
taccgaagacaatggggtgcccgac

SEQ ID NO: 193171 - DNA, 25 bp, Canis familiaris
tacaagaagagagaggggccacgag

SEQ ID NO: 193172 - DNA, 25 bp, Canis familiaris
tacaaccaaactgggtggtcctgac

SEQ ID NO: 193173 - DNA, 25 bp, Canis familiaris
tacagaacaaacaacttttcctaga

SEQ ID NO: 193174 - DNA, 25 bp, Canis familiaris
taaataaaatatacttccccagaag

SEQ ID NO: 193175 - DNA, 25 bp, Canis familiaris
taaatataactttcttccctcaaca

SEQ ID NO: 193176 - DNA, 25 bp, Canis familiaris
taaatatgaactttcgttccctcaa

SEQ ID NO: 193177 - DNA, 25 bp, Canis familiaris
taaatacagccttccactttactaa

SEQ ID NO: 193178 - DNA, 25 bp, Canis familiaris
taaaccagacccagctcttacataa

SEQ ID NO: 193179 - DNA, 25 bp, Canis familiaris
taaaccaggcctgtctctgtatcta

SEQ ID NO: 193180 - DNA, 25 bp, Canis familiaris
taaaccaggaatcctctctttctcc

SEQ ID NO: 193181 - DNA, 25 bp, Canis familiaris
taaaccatacctgctacttatcttc

SEQ ID NO: 193182 - DNA, 25 bp, Canis familiaris
taaaccaacccaatcgaattcttct

SEQ ID NO: 193183 - DNA, 25 bp, Canis familiaris
taaaccaaataaatccaaggcttcg

SEQ ID NO: 193184 - DNA, 25 bp, Canis familiaris
taaagtcacaatcccatccatgagg

SEQ ID NO: 193185 - DNA, 25 bp, Canis familiaris
taaatgtccgattcttgatctcagg

SEQ ID NO: 193186 - DNA, 25 bp, Canis familiaris
taaagtcagccagcggactctgcag

SEQ ID NO: 193187 - DNA, 25 bp, Canis familiaris
taaagtcatctctcgaatccagctg

SEQ ID NO: 193188 - DNA, 25 bp, Canis familiaris
taaagtgccatccactgagaccgaa

SEQ ID NO: 193189 - DNA, 25 bp, Canis familiaris
taaagtccagtgtctcatgaccaaa

SEQ ID NO: 193190 - DNA, 25 bp, Canis familiaris
taaagtgcatgcttgtattatccaa

SEQ ID NO: 193191 - DNA, 25 bp, Canis familiaris
tacaagacagcatgcttcctcgcaa

SEQ ID NO: 193192 - DNA, 25 bp, Canis familiaris
taaaggcagaagctcatcacgcaga

SEQ ID NO: 193193 - DNA, 25 bp, Canis familiaris
taaaccattgtgcatctactagagt

SEQ ID NO: 193194 - DNA, 25 bp, Canis familiaris
taaagcacattacattactcacaaa

SEQ ID NO: 193195 - DNA, 25 bp, Canis familiaris
taaatacttgtatttacccaagatt

SEQ ID NO: 193196 - DNA, 25 bp, Canis familiaris
taaatactactctttccagccaaat

SEQ ID NO: 193197 - DNA, 25 bp, Canis familiaris
taaatcttagtgttccacagcaaaa

SEQ ID NO: 193198 - DNA, 25 bp, Canis familiaris
taaatttttgcattcacgccatcaa

SEQ ID NO: 193199 - DNA, 25 bp, Canis familiaris
taaatgcctttgatatttcatgcaa

SEQ ID NO: 193200 - DNA, 25 bp, Canis familiaris
taaatccagcttccgatctttgaca

SEQ ID NO: 193201 - DNA, 25 bp, Canis familiaris
tacaattggttgaccctcatcggac

SEQ ID NO: 193202 - DNA, 25 bp, Canis familiaris
taaatctgtcgtaaactctccacac

SEQ ID NO: 193203 - DNA, 25 bp, Canis familiaris
taaattgccactgaaacacccatcc

SEQ ID NO: 193204 - DNA, 25 bp, Canis familiaris
taaatgtggaaggcaaaacctacca

SEQ ID NO: 193205 - DNA, 25 bp, Canis familiaris
taaaggcggcactaaaccctgagcc

SEQ ID NO: 193206 - DNA, 25 bp, Canis familiaris
taaaggggcagagactcccgcaggc

SEQ ID NO: 193207 - DNA, 25 bp, Canis familiaris
taaatgttgtcgggttccgcgggca

SEQ ID NO: 193208 - DNA, 25 bp, Canis familiaris
taaagtggtcggtttccgtgtacag

SEQ ID NO: 193209 - DNA, 25 bp, Canis familiaris
taaagttctcggttgtgactggaaa

SEQ ID NO: 193210 - DNA, 25 bp, Canis familiaris
taaagtatgctcggttcttctcaca

SEQ ID NO: 193211 - DNA, 25 bp, Canis familiaris
taaagcactgcttggcttcatatcc

SEQ ID NO: 193212 - DNA, 25 bp, Canis familiaris
taaagagctgctgcactcctactat

SEQ ID NO: 193213 - DNA, 25 bp, Canis familiaris
taaagtggtacagtcctgtcaaaaa

SEQ ID NO: 193214 - DNA, 25 bp, Canis familiaris
taaaggttacaagcctgcacaataa

SEQ ID NO: 193215 - DNA, 25 bp, Canis familiaris
taaagagttaccggcttccagagaa

SEQ ID NO: 193216 - DNA, 25 bp, Canis familiaris
taccggtataccaagctaacgaaga

SEQ ID NO: 193217 - DNA, 25 bp, Canis familiaris
tacactgggaaagactacatttact

SEQ ID NO: 193218 - DNA, 25 bp, Canis familiaris
tacacatggggctcctaagtttaca

SEQ ID NO: 193219 - DNA, 25 bp, Canis familiaris
tacacatgggggctcctaggtttac

SEQ ID NO: 193220 - DNA, 25 bp, Canis familiaris
taaatgtggggcctcaggggaacca

SEQ ID NO: 193221 - DNA, 25 bp, Canis familiaris
tacaaggagggcctgcagggcagcc

SEQ ID NO: 193222 - DNA, 25 bp, Canis familiaris
tacagcgtagggctaggtcacctct

SEQ ID NO: 193223 - DNA, 25 bp, Canis familiaris
tactgcctgatgaggtcggactcct

SEQ ID NO: 193224 - DNA, 25 bp, Canis familiaris
tagcgccgtacgggggaagccaagt

SEQ ID NO: 193225 - DNA, 25 bp, Canis familiaris
tactttggactgggccacaacctaa

SEQ ID NO: 193226 - DNA, 25 bp, Canis familiaris
tactccctggtgggcgctaacgaaa

SEQ ID NO: 193227 - DNA, 25 bp, Canis familiaris
ttcattgactggagccagtaaaaaa

SEQ ID NO: 193228 - DNA, 25 bp, Canis familiaris
tacatggcctccaaggagtaagaaa

SEQ ID NO: 193229 - DNA, 25 bp, Canis familiaris
tactacccgccagagatataaaaaa

SEQ ID NO: 193230 - DNA, 25 bp, Canis familiaris
tactccaaccccaagacacaaagga

SEQ ID NO: 193231 - DNA, 25 bp, Canis familiaris
tactctaaccagccgcaacgtaaaa

SEQ ID NO: 193232 - DNA, 25 bp, Canis familiaris
tacttaactggggagtgggagacta

SEQ ID NO: 193233 - DNA, 25 bp, Canis familiaris
tacttaccacagagagggagaagaa

SEQ ID NO: 193234 - DNA, 25 bp, Canis familiaris
tacttgggacagaggttgctgaact

SEQ ID NO: 193235 - DNA, 25 bp, Canis familiaris
tagttactgcctacggcctaaactt

SEQ ID NO: 193236 - DNA, 25 bp, Canis familiaris
taggtccccttgtgtctcaaggttt

SEQ ID NO: 193237 - DNA, 25 bp, Canis familiaris
taggtcctccgttttcgataggaat

SEQ ID NO: 193238 - DNA, 25 bp, Canis familiaris
tacagtgcacccctctatttatagg

SEQ ID NO: 193239 - DNA, 25 bp, Canis familiaris
taaatcaccttcctttttggctgga

SEQ ID NO: 193240 - DNA, 25 bp, Canis familiaris
taaatcacttcttctttctttttgc

SEQ ID NO: 193241 - DNA, 25 bp, Canis familiaris
taaattctactataactttttcata

SEQ ID NO: 193242 - DNA, 25 bp, Canis familiaris
taaatctgtcctgtaaaatttttat

SEQ ID NO: 193243 - DNA, 25 bp, Canis familiaris
taaatttccttatggaatctgtttt

SEQ ID NO: 193244 - DNA, 25 bp, Canis familiaris
taaatttcttgtacacaaattgttt

SEQ ID NO: 193245 - DNA, 25 bp, Canis familiaris
taaatttcttgtacaaaatgtgttt

SEQ ID NO: 193246 - DNA, 25 bp, Canis familiaris
taaattccttgtttacttgtttgat

SEQ ID NO: 193247 - DNA, 25 bp, Canis familiaris
taaataaatctttttgttgttgttg

SEQ ID NO: 193248 - DNA, 25 bp, Canis familiaris
taaatgaaagtttttgcgtgtttct

SEQ ID NO: 193249 - DNA, 25 bp, Canis familiaris
taaatgatcaagctactccagtgtt

SEQ ID NO: 193250 - DNA, 25 bp, Canis familiaris
taaagttcagctaattgcctgttta

SEQ ID NO: 193251 - DNA, 25 bp, Canis familiaris
taaagtctttatttgcttcatttca

SEQ ID NO: 193252 - DNA, 25 bp, Canis familiaris
taaagtatctgtattgcattaaata

SEQ ID NO: 193253 - DNA, 25 bp, Canis familiaris
taaagttgcttgcctgctgttaaat

SEQ ID NO: 193254 - DNA, 25 bp, Canis familiaris
taaagttgctcgccagttaacagct

SEQ ID NO: 193255 - DNA, 25 bp, Canis familiaris
taaagcttcactccatgtgctctac

SEQ ID NO: 193256 - DNA, 25 bp, Canis familiaris
taaagtgtactgcttcttactggtg

SEQ ID NO: 193257 - DNA, 25 bp, Canis familiaris
taaagggtctgggatttgtcggtgc

SEQ ID NO: 193258 - DNA, 25 bp, Canis familiaris
taaagggtcaggtttggacaggcca

SEQ ID NO: 193259 - DNA, 25 bp, Canis familiaris
taaatgggtaggttttcaccttcag

SEQ ID NO: 193260 - DNA, 25 bp, Canis familiaris
taaagtggtcaaggtcctcacccaa

SEQ ID NO: 193261 - DNA, 25 bp, Canis familiaris
tacaaggcgtcagcgttcacattca

SEQ ID NO: 193262 - DNA, 25 bp, Canis familiaris
taaatggctgccatgctgttactac

SEQ ID NO: 193263 - DNA, 25 bp, Canis familiaris
taaaggccacttcctatatctgatt

SEQ ID NO: 193264 - DNA, 25 bp, Canis familiaris
taaagatgccacagactttcagaaa

SEQ ID NO: 193265 - DNA, 25 bp, Canis familiaris
tacaacggcatcagccttttcaata

SEQ ID NO: 193266 - DNA, 25 bp, Canis familiaris
tacagcacccttgcctttaagatga

SEQ ID NO: 193267 - DNA, 25 bp, Canis familiaris
tacaagcccttacctgttaatgcca

SEQ ID NO: 193268 - DNA, 25 bp, Canis familiaris
tactaccgacttactggtattccaa

SEQ ID NO: 193269 - DNA, 25 bp, Canis familiaris
tactaatttgcatttgggttgttaa

SEQ ID NO: 193270 - DNA, 25 bp, Canis familiaris
tatgtaattttatgcaagttgacta

SEQ ID NO: 193271 - DNA, 25 bp, Canis familiaris
tactgagttttattgcaaagttcca

SEQ ID NO: 193272 - DNA, 25 bp, Canis familiaris
tatagtttttaaatgaaataccaat

SEQ ID NO: 193273 - DNA, 25 bp, Canis familiaris
tacatttctttcaaaaacagaccat

SEQ ID NO: 193274 - DNA, 25 bp, Canis familiaris
tacttggttttataacatacatgtc

SEQ ID NO: 193275 - DNA, 25 bp, Canis familiaris
tacgggaggtccctaacatccatta

SEQ ID NO: 193276 - DNA, 25 bp, Canis familiaris
tactgcatggagagccccaagacct

SEQ ID NO: 193277 - DNA, 25 bp, Canis familiaris
tacattgggatggccccaaccttca

SEQ ID NO: 193278 - DNA, 25 bp, Canis familiaris
taaaggagttcaccagcacacctgt

SEQ ID NO: 193279 - DNA, 25 bp, Canis familiaris
taaaggacatgttctctgcaggacc

SEQ ID NO: 193280 - DNA, 25 bp, Canis familiaris
taaatgcaacattttcctaatcccc

SEQ ID NO: 193281 - DNA, 25 bp, Canis familiaris
taaatgcacagactatctcctagcc

SEQ ID NO: 193282 - DNA, 25 bp, Canis familiaris
taaagatgctgacttgcctgctact

SEQ ID NO: 193283 - DNA, 25 bp, Canis familiaris
taaagactgtgtagctctgctcact

SEQ ID NO: 193284 - DNA, 25 bp, Canis familiaris
tacaggagctggaagccttcaccga

SEQ ID NO: 193285 - DNA, 25 bp, Canis familiaris
tacagaactctgctcagttccagct

SEQ ID NO: 193286 - DNA, 25 bp, Canis familiaris
tacagaacagctccaggttctacgt

SEQ ID NO: 193287 - DNA, 25 bp, Canis familiaris
tacagcaaagatcgcagggccgggc

SEQ ID NO: 193288 - DNA, 25 bp, Canis familiaris
tacacagatgttcgcagaggccttc

SEQ ID NO: 193289 - DNA, 25 bp, Canis familiaris
tacacagattgacctactccttgaa

SEQ ID NO: 193290 - DNA, 25 bp, Canis familiaris
taaatgttacctggcactatgtata

SEQ ID NO: 193291 - DNA, 25 bp, Canis familiaris
taaatgttaggcgctctgaccacat

SEQ ID NO: 193292 - DNA, 25 bp, Canis familiaris
tacagtgattctgcgggcgaccaag

SEQ ID NO: 193293 - DNA, 25 bp, Canis familiaris
tacagcgttcaggcacggagaccag

SEQ ID NO: 193294 - DNA, 25 bp, Canis familiaris
tacggcctggtggcggaggccgggg

SEQ ID NO: 193295 - DNA, 25 bp, Canis familiaris
tacagccctgggggattagcctggc

SEQ ID NO: 193296 - DNA, 25 bp, Canis familiaris
taggtgccgggaatgaccgcggtac

SEQ ID NO: 193297 - DNA, 25 bp, Canis familiaris
tagatgtccggggctgcacgcgcgc

SEQ ID NO: 193298 - DNA, 25 bp, Canis familiaris
tacagacacgagatgctaccggcca

SEQ ID NO: 193299 - DNA, 25 bp, Canis familiaris
tacagacactttggcaaggccccag

SEQ ID NO: 193300 - DNA, 25 bp, Canis familiaris
tacagacactttggcaaggccccag

SEQ ID NO: 193301 - DNA, 25 bp, Canis familiaris
tacagactcttatatagagacccac

SEQ ID NO: 193302 - DNA, 25 bp, Canis familiaris
tacacctctttatagatgctgtcta

SEQ ID NO: 193303 - DNA, 25 bp, Canis familiaris
tacacatgccttgcagagagggttc

SEQ ID NO: 193304 - DNA, 25 bp, Canis familiaris
tacacacatctaacagttgggatta

SEQ ID NO: 193305 - DNA, 25 bp, Canis familiaris
tacacacacatgcaactgggaccaa

SEQ ID NO: 193306 - DNA, 25 bp, Canis familiaris
tacaccctcgtattgttgtcacaaa

SEQ ID NO: 193307 - DNA, 25 bp, Canis familiaris
tacaccactgcctttggtaactaaa

SEQ ID NO: 193308 - DNA, 25 bp, Canis familiaris
tacattcccgtttgtataaaataca

SEQ ID NO: 193309 - DNA, 25 bp, Canis familiaris
tacattccaccaaaatataattaaa

SEQ ID NO: 193310 - DNA, 25 bp, Canis familiaris
taaatcctcctcaaataaaccaata

SEQ ID NO: 193311 - DNA, 25 bp, Canis familiaris
taaatgcttgccaaaattccaaaaa

SEQ ID NO: 193312 - DNA, 25 bp, Canis familiaris
taaagttcttacatctagcaaaaaa

SEQ ID NO: 193313 - DNA, 25 bp, Canis familiaris
taaattccttacacatacacatatg

SEQ ID NO: 193314 - DNA, 25 bp, Canis familiaris
taaatatatattcacctagcaacat

SEQ ID NO: 193315 - DNA, 25 bp, Canis familiaris
tacactttatttttctacagacaca

SEQ ID NO: 193316 - DNA, 25 bp, Canis familiaris
tacaccattatttactcccagagtt

SEQ ID NO: 193317 - DNA, 25 bp, Canis familiaris
tacacatatgtataaattcccttaa

SEQ ID NO: 193318 - DNA, 25 bp, Canis familiaris
tacacttgttaaaatatcttgtcat

SEQ ID NO: 193319 - DNA, 25 bp, Canis familiaris
tacacttgaacctaaatcttggcag

SEQ ID NO: 193320 - DNA, 25 bp, Canis familiaris
tacacagatgaagaaaacctcaagg

SEQ ID NO: 193321 - DNA, 25 bp, Canis familiaris
tacaccagacacggaaacgccggga

SEQ ID NO: 193322 - DNA, 25 bp, Canis familiaris
tacaccaaacccaaaggccagttgc

SEQ ID NO: 193323 - DNA, 25 bp, Canis familiaris
tacatccaaacccaaagaccgttag

SEQ ID NO: 193324 - DNA, 25 bp, Canis familiaris
taccaaaaactaaccccagatcctg

SEQ ID NO: 193325 - DNA, 25 bp, Canis familiaris
tacccaaaacccataggagtcctgt

SEQ ID NO: 193326 - DNA, 25 bp, Canis familiaris
taccttacctcccaataaagtcctg

SEQ ID NO: 193327 - DNA, 25 bp, Canis familiaris
tacacttatccccacaaatacagaa

SEQ ID NO: 193328 - DNA, 25 bp, Canis familiaris
tacacgagtccccactggggcagta

SEQ ID NO: 193329 - DNA, 25 bp, Canis familiaris
tagaccgtctcccattaaggagaat

SEQ ID NO: 193330 - DNA, 25 bp, Canis familiaris
tacccctcacgaattaaggacgatc

SEQ ID NO: 193331 - DNA, 25 bp, Canis familiaris
tacacccctcgtggtaaagacgacg

SEQ ID NO: 193332 - DNA, 25 bp, Canis familiaris
tacaagccgttgggccaaaagcgaa

SEQ ID NO: 193333 - DNA, 25 bp, Canis familiaris
tacaacgccttacccaaacacagga

SEQ ID NO: 193334 - DNA, 25 bp, Canis familiaris
taaagacctctatgccaacacagtg

SEQ ID NO: 193335 - DNA, 25 bp, Canis familiaris
taaatgtctctaaactcaaccgtca

SEQ ID NO: 193336 - DNA, 25 bp, Canis familiaris
taaatgttttcaacccagacctcac

SEQ ID NO: 193337 - DNA, 25 bp, Canis familiaris
tacagaggttccacctggatcgtca

SEQ ID NO: 193338 - DNA, 25 bp, Canis familiaris
tacagacaggtcgtggcctagagga

SEQ ID NO: 193339 - DNA, 25 bp, Canis familiaris
tacagtatgccggttccactgagga

SEQ ID NO: 193340 - DNA, 25 bp, Canis familiaris
tacaccactcgctggcaacgattga

SEQ ID NO: 193341 - DNA, 25 bp, Canis familiaris
tacaccccgtgttgcatttttattg

SEQ ID NO: 193342 - DNA, 25 bp, Canis familiaris
tacaccccgtgttctcataataaag

SEQ ID NO: 193343 - DNA, 25 bp, Canis familiaris
tacaccagactgccataaaaaagaa

SEQ ID NO: 193344 - DNA, 25 bp, Canis familiaris
tacaccatacagatacaaccggcaa

SEQ ID NO: 193345 - DNA, 25 bp, Canis familiaris
tacaccatacacaaagataaactca

SEQ ID NO: 193346 - DNA, 25 bp, Canis familiaris
tacaatatccagaaagagtccacct

SEQ ID NO: 193347 - DNA, 25 bp, Canis familiaris
tacaaaacgtaacttcaggcctcac

SEQ ID NO: 193348 - DNA, 25 bp, Canis familiaris
tacaaaacagcaaagattacccctt

SEQ ID NO: 193349 - DNA, 25 bp, Canis familiaris
taccgaaaccgtatacgtcctgctc

SEQ ID NO: 193350 - DNA, 25 bp, Canis familiaris
taccggttttggataagtcccagag

SEQ ID NO: 193351 - DNA, 25 bp, Canis familiaris
tacctgaattttggactttcaccct

SEQ ID NO: 193352 - DNA, 25 bp, Canis familiaris
tacaagtttcttgcagtttccacgg

SEQ ID NO: 193353 - DNA, 25 bp, Canis familiaris
taaagtgtttgtgtgatctctctcc

SEQ ID NO: 193354 - DNA, 25 bp, Canis familiaris
taaatttgtttttgatccatatgac

SEQ ID NO: 193355 - DNA, 25 bp, Canis familiaris
taaattagggtatttcacttgcagc

SEQ ID NO: 193356 - DNA, 25 bp, Canis familiaris
taaattgtcgtttctgttctatggc

SEQ ID NO: 193357 - DNA, 25 bp, Canis familiaris
taaatcttctgtcttcggtcatgta

SEQ ID NO: 193358 - DNA, 25 bp, Canis familiaris
taaatcttctgtcttcggtcatgta

SEQ ID NO: 193359 - DNA, 25 bp, Canis familiaris
taaattccttctaggcagtgagcct

SEQ ID NO: 193360 - DNA, 25 bp, Canis familiaris
tacagaatcctttatcctggctgcc

SEQ ID NO: 193361 - DNA, 25 bp, Canis familiaris
tacagcaaccgggtggtgggacctc

SEQ ID NO: 193362 - DNA, 25 bp, Canis familiaris
tacagcaaccgggtggtggacctca

SEQ ID NO: 193363 - DNA, 25 bp, Canis familiaris
tacagaccgtgaaagcggggcctca

SEQ ID NO: 193364 - DNA, 25 bp, Canis familiaris
tacatagcatcagaaacgggtcaca

SEQ ID NO: 193365 - DNA, 25 bp, Canis familiaris
tacagagcacagagtcggcgggaga

SEQ ID NO: 193366 - DNA, 25 bp, Canis familiaris
tacggcgcacggtgaggggagctaa

SEQ ID NO: 193367 - DNA, 25 bp, Canis familiaris
tacgtctgactgaggacgggttaaa

SEQ ID NO: 193368 - DNA, 25 bp, Canis familiaris
tactgcctacagggagtcgggcgct

SEQ ID NO: 193369 - DNA, 25 bp, Canis familiaris
tactgctctaccgacatgtcaaggc

SEQ ID NO: 193370 - DNA, 25 bp, Canis familiaris
tagatgcatcattgcagccctggga

SEQ ID NO: 193371 - DNA, 25 bp, Canis familiaris
taaatgctagagacctgggccctga

SEQ ID NO: 193372 - DNA, 25 bp, Canis familiaris
taaatcattgtctttgtggcctctg

SEQ ID NO: 193373 - DNA, 25 bp, Canis familiaris
taaatgcatttcattcaagccccgg

SEQ ID NO: 193374 - DNA, 25 bp, Canis familiaris
tacaaatacctgttcaagtcccctg

SEQ ID NO: 193375 - DNA, 25 bp, Canis familiaris
tacaaataccgtagcacctcaactc

SEQ ID NO: 193376 - DNA, 25 bp, Canis familiaris
tacacataacacgagcgcctacaac

SEQ ID NO: 193377 - DNA, 25 bp, Canis familiaris
tacagaataatgaccgcctacacac

SEQ ID NO: 193378 - DNA, 25 bp, Canis familiaris
tacaggtcaaggccgcttgctgacc

SEQ ID NO: 193379 - DNA, 25 bp, Canis familiaris
tacttgtctagagtgcctagcagat

SEQ ID NO: 193380 - DNA, 25 bp, Canis familiaris
tacatttctatagttaagttggttt

SEQ ID NO: 193381 - DNA, 25 bp, Canis familiaris
tacatgttgtcatccaaggctgggt

SEQ ID NO: 193382 - DNA, 25 bp, Canis familiaris
tacaagagcttgaccaatgactggg

SEQ ID NO: 193383 - DNA, 25 bp, Canis familiaris
tacaagggagtatcatgagcgtgct

SEQ ID NO: 193384 - DNA, 25 bp, Canis familiaris
tacaagccgcaaaggcagcaggcta

SEQ ID NO: 193385 - DNA, 25 bp, Canis familiaris
taaattcagcaaagtctggcgagat

SEQ ID NO: 193386 - DNA, 25 bp, Canis familiaris
taaatgtctccaagcacatgattag

SEQ ID NO: 193387 - DNA, 25 bp, Canis familiaris
tacattgcttcctgcactgcatata

SEQ ID NO: 193388 - DNA, 25 bp, Canis familiaris
tacactatatcctgctctgcattaa

SEQ ID NO: 193389 - DNA, 25 bp, Canis familiaris
tacacagatatccatgcctgtttta

SEQ ID NO: 193390 - DNA, 25 bp, Canis familiaris
tacaagttcgtggcacacttggaca

SEQ ID NO: 193391 - DNA, 25 bp, Canis familiaris
taaaggatctggttcctgactgagc

SEQ ID NO: 193392 - DNA, 25 bp, Canis familiaris
taaaggactggcaactcctgctgcc

SEQ ID NO: 193393 - DNA, 25 bp, Canis familiaris
taaaggacagcagcaagccttccca

SEQ ID NO: 193394 - DNA, 25 bp, Canis familiaris
tactacgacaaccaggacttccctg

SEQ ID NO: 193395 - DNA, 25 bp, Canis familiaris
tacataccacacagggcctttgtct

SEQ ID NO: 193396 - DNA, 25 bp, Canis familiaris
taaatcccagatggcgggggtgtct

SEQ ID NO: 193397 - DNA, 25 bp, Canis familiaris
taaattccagatgaagtcctttttt

SEQ ID NO: 193398 - DNA, 25 bp, Canis familiaris
taaatatctacataactcctttgtt

SEQ ID NO: 193399 - DNA, 25 bp, Canis familiaris
taaatccccaaatccactcttgtaa

SEQ ID NO: 193400 - DNA, 25 bp, Canis familiaris
taaatccccaaattcaaatctgttt

SEQ ID NO: 193401 - DNA, 25 bp, Canis familiaris
tacacaacctccaattaaaatcttt

SEQ ID NO: 193402 - DNA, 25 bp, Canis familiaris
tacacaatctccccaaaactgatcc

SEQ ID NO: 193403 - DNA, 25 bp, Canis familiaris
tagcaataccacgtgccaaagtgat

SEQ ID NO: 193404 - DNA, 25 bp, Canis familiaris
tacagcttccacagactaaggatta

SEQ ID NO: 193405 - DNA, 25 bp, Canis familiaris
tacagcattcccagtgctgacctca

SEQ ID NO: 193406 - DNA, 25 bp, Canis familiaris
tagcatttctagagggcccgaggct

SEQ ID NO: 193407 - DNA, 25 bp, Canis familiaris
tacatggtgcatgtggggcccgatt

SEQ ID NO: 193408 - DNA, 25 bp, Canis familiaris
tacaagatagtgtggggcgcggacc

SEQ ID NO: 193409 - DNA, 25 bp, Canis familiaris
taccaacaggccctgggccagggtc

SEQ ID NO: 193410 - DNA, 25 bp, Canis familiaris
tacccacaatcccaagggaaggcca

SEQ ID NO: 193411 - DNA, 25 bp, Canis familiaris
tacccaccaccctactatgtaggca

SEQ ID NO: 193412 - DNA, 25 bp, Canis familiaris
tacaatcctcacccaactattaaaa

SEQ ID NO: 193413 - DNA, 25 bp, Canis familiaris
tacaaaccaaaccacttggctaaag

SEQ ID NO: 193414 - DNA, 25 bp, Canis familiaris
taaatactaacactgacctggaaaa

SEQ ID NO: 193415 - DNA, 25 bp, Canis familiaris
taaatacacagacatcacccagaaa

SEQ ID NO: 193416 - DNA, 25 bp, Canis familiaris
tacatctacgaatatcacacccaag

SEQ ID NO: 193417 - DNA, 25 bp, Canis familiaris
tacactgacttgagaccagttgaat

SEQ ID NO: 193418 - DNA, 25 bp, Canis familiaris
tacttttccaggaccgtgtgaatcc

SEQ ID NO: 193419 - DNA, 25 bp, Canis familiaris
tactaattctcgcaaatgggacatc

SEQ ID NO: 193420 - DNA, 25 bp, Canis familiaris
tacggaaccgtaaattgtgtctcaa

SEQ ID NO: 193421 - DNA, 25 bp, Canis familiaris
tacttgaaaatggtccttgccctca

SEQ ID NO: 193422 - DNA, 25 bp, Canis familiaris
tactgtcaacagactttttgccaaa

SEQ ID NO: 193423 - DNA, 25 bp, Canis familiaris
tacttaacaacatatgggcctctct

SEQ ID NO: 193424 - DNA, 25 bp, Canis familiaris
tacaattacaaccctaagctcttct

SEQ ID NO: 193425 - DNA, 25 bp, Canis familiaris
tacattttctacccaagaacatttc

SEQ ID NO: 193426 - DNA, 25 bp, Canis familiaris
taaattttgtgaccatagaggattt

SEQ ID NO: 193427 - DNA, 25 bp, Canis familiaris
taaatcttctgtcccttgtagttct

SEQ ID NO: 193428 - DNA, 25 bp, Canis familiaris
tacacaccgcattttgtttcagttt

SEQ ID NO: 193429 - DNA, 25 bp, Canis familiaris
tacacattccttgcatattataatc

SEQ ID NO: 193430 - DNA, 25 bp, Canis familiaris
tacagttccattccagtgtctaata

SEQ ID NO: 193431 - DNA, 25 bp, Canis familiaris
tacagcagccctagcacagtgattc

SEQ ID NO: 193432 - DNA, 25 bp, Canis familiaris
tacgcagtcaatacacgtcttcact

SEQ ID NO: 193433 - DNA, 25 bp, Canis familiaris
tacagatgcttatacttttcactag

SEQ ID NO: 193434 - DNA, 25 bp, Canis familiaris
tacacttttaatgatttacaggctg

SEQ ID NO: 193435 - DNA, 25 bp, Canis familiaris
tagctttttaagttgctccctttgt

SEQ ID NO: 193436 - DNA, 25 bp, Canis familiaris
tactattttttctaatctcccttgt

SEQ ID NO: 193437 - DNA, 25 bp, Canis familiaris
tactttttttcacataatcttccct

SEQ ID NO: 193438 - DNA, 25 bp, Canis familiaris
tacgtctgtttaccgtaatgctcct

SEQ ID NO: 193439 - DNA, 25 bp, Canis familiaris
tacattttcttgtggtcgtgtcacc

SEQ ID NO: 193440 - DNA, 25 bp, Canis familiaris
taaattgtcttgctgttttgtaaaa

SEQ ID NO: 193441 - DNA, 25 bp, Canis familiaris
taaatgttctgactgtttttgtaaa

SEQ ID NO: 193442 - DNA, 25 bp, Canis familiaris
taaatgcgactttattattttcaag

SEQ ID NO: 193443 - DNA, 25 bp, Canis familiaris
taaatcgccaacaatatacttccaa

SEQ ID NO: 193444 - DNA, 25 bp, Canis familiaris
taaatggcccagaggattgtcccca

SEQ ID NO: 193445 - DNA, 25 bp, Canis familiaris
taaaggccgcagagtgtggtgcccg

SEQ ID NO: 193446 - DNA, 25 bp, Canis familiaris
tacaaccacctcagtggtgtgccca

SEQ ID NO: 193447 - DNA, 25 bp, Canis familiaris
tacagaaaaccaggtccatgtcccc

SEQ ID NO: 193448 - DNA, 25 bp, Canis familiaris
tacagtaaattcttggccactcttt

SEQ ID NO: 193449 - DNA, 25 bp, Canis familiaris
tacacttgattatttcccactctag

SEQ ID NO: 193450 - DNA, 25 bp, Canis familiaris
taaatcatgaatacgtctcctccca

SEQ ID NO: 193451 - DNA, 25 bp, Canis familiaris
taaatcagtaattctatgcccgcca

SEQ ID NO: 193452 - DNA, 25 bp, Canis familiaris
tacaatcctgagaatctggccaccc

SEQ ID NO: 193453 - DNA, 25 bp, Canis familiaris
tacaatcctggcagcctggacttca

SEQ ID NO: 193454 - DNA, 25 bp, Canis familiaris
tacagggctggaaccgggcattgac

SEQ ID NO: 193455 - DNA, 25 bp, Canis familiaris
taaaggcagtgaactctcccatttc

SEQ ID NO: 193456 - DNA, 25 bp, Canis familiaris
taaaggagctgttttttcatttcaa

SEQ ID NO: 193457 - DNA, 25 bp, Canis familiaris
tacaaggacgatttgggtcttcatc

SEQ ID NO: 193458 - DNA, 25 bp, Canis familiaris
tacatgaagggtaacgtgccgtcac

SEQ ID NO: 193459 - DNA, 25 bp, Canis familiaris
tacgcaactggtcaccagcggtacc

SEQ ID NO: 193460 - DNA, 25 bp, Canis familiaris
tacaaatttgtccccaaggtcatcc

SEQ ID NO: 193461 - DNA, 25 bp, Canis familiaris
tttccatttgtaccaaatagttaga

SEQ ID NO: 193462 - DNA, 25 bp, Canis familiaris
tatccctttggacaaaactgtcgtc

SEQ ID NO: 193463 - DNA, 25 bp, Canis familiaris
taccctatggtacaaaaggactacg

SEQ ID NO: 193464 - DNA, 25 bp, Canis familiaris
tacgtatcggtatgaacaaaactac

SEQ ID NO: 193465 - DNA, 25 bp, Canis familiaris
tacaatacagcctctaacaaaacta

SEQ ID NO: 193466 - DNA, 25 bp, Canis familiaris
taaatatgtccttcttacgttacat

SEQ ID NO: 193467 - DNA, 25 bp, Canis familiaris
taaatattgcgctaattcccttgcc

SEQ ID NO: 193468 - DNA, 25 bp, Canis familiaris
tacattaaggtaacccctggctttg

SEQ ID NO: 193469 - DNA, 25 bp, Canis familiaris
tacaatacagattcaacccacgcac

SEQ ID NO: 193470 - DNA, 25 bp, Canis familiaris
taaatacgatgaatactgacccacc

SEQ ID NO: 193471 - DNA, 25 bp, Canis familiaris
taaatactgtaacacacctcaccaa

SEQ ID NO: 193472 - DNA, 25 bp, Canis familiaris
tacagaacgtaacacacttgcccta

SEQ ID NO: 193473 - DNA, 25 bp, Canis familiaris
tacaaacagtcaatgcaaaggtgct

SEQ ID NO: 193474 - DNA, 25 bp, Canis familiaris
tacaaaccttctgcagcggtcttaa

SEQ ID NO: 193475 - DNA, 25 bp, Canis familiaris
taaatacgtatgactcagtgagttt

SEQ ID NO: 193476 - DNA, 25 bp, Canis familiaris
tacaataattcatctcacgagtctt

SEQ ID NO: 193477 - DNA, 25 bp, Canis familiaris
taaatcaatctctctatgccatgtg

SEQ ID NO: 193478 - DNA, 25 bp, Canis familiaris
tacacatttcctccttggatgatgt

SEQ ID NO: 193479 - DNA, 25 bp, Canis familiaris
tacacattctcctcttagggcgtat

SEQ ID NO: 193480 - DNA, 25 bp, Canis familiaris
taaattcttaagctcaggtgcaata

SEQ ID NO: 193481 - DNA, 25 bp, Canis familiaris
taaatttctacagcatccctctagc

SEQ ID NO: 193482 - DNA, 25 bp, Canis familiaris
tactcattttaagctccgagccacc

SEQ ID NO: 193483 - DNA, 25 bp, Canis familiaris
tactttattaggaccagggcgccca

SEQ ID NO: 193484 - DNA, 25 bp, Canis familiaris
tactcttgttagtttggtacccttg

SEQ ID NO: 193485 - DNA, 25 bp, Canis familiaris
tacctggtcaaccactttaccacta

SEQ ID NO: 193486 - DNA, 25 bp, Canis familiaris
tactgggatcaagccatgattacaa

SEQ ID NO: 193487 - DNA, 25 bp, Canis familiaris
tactgtgcgaaggactcgttcaaca

SEQ ID NO: 193488 - DNA, 25 bp, Canis familiaris
tacagaaggcggtcaccttcgtcct

SEQ ID NO: 193489 - DNA, 25 bp, Canis familiaris
tacaagtccaagtaccttcagctca

SEQ ID NO: 193490 - DNA, 25 bp, Canis familiaris
tacaaggctaactaacctcaccacc

SEQ ID NO: 193491 - DNA, 25 bp, Canis familiaris
taaaggcttcatcagatcccaggtc

SEQ ID NO: 193492 - DNA, 25 bp, Canis familiaris
tacaaggccctaggagcccaggatc

SEQ ID NO: 193493 - DNA, 25 bp, Canis familiaris
tacaagttccatagggcacctggct

SEQ ID NO: 193494 - DNA, 25 bp, Canis familiaris
taaatgtgtctgtggactccgtgct

SEQ ID NO: 193495 - DNA, 25 bp, Canis familiaris
taaattcatcactgggctcacttct

SEQ ID NO: 193496 - DNA, 25 bp, Canis familiaris
taaatgcctccgggtgaacttgctg

SEQ ID NO: 193497 - DNA, 25 bp, Canis familiaris
taaatccgggggagactggctgggt

SEQ ID NO: 193498 - DNA, 25 bp, Canis familiaris
taaatcggaggggttgcttggtggc

SEQ ID NO: 193499 - DNA, 25 bp, Canis familiaris
tatacacggtggcttccttttacca

SEQ ID NO: 193500 - DNA, 25 bp, Canis familiaris
tacaaccggcagcttccttgttgaa

SEQ ID NO: 193501 - DNA, 25 bp, Canis familiaris
tacaacacgaacgatctccttcatc

SEQ ID NO: 193502 - DNA, 25 bp, Canis familiaris
taaatacaggaccctcagcagaatc

SEQ ID NO: 193503 - DNA, 25 bp, Canis familiaris
tacaaagctggcttgtctcgcaggt

SEQ ID NO: 193504 - DNA, 25 bp, Canis familiaris
tacatcaagtactgtgcccgaggtc

SEQ ID NO: 193505 - DNA, 25 bp, Canis familiaris
tacagccagttctctgagcctgggg

SEQ ID NO: 193506 - DNA, 25 bp, Canis familiaris
tacaaagtctcatgctggtctgtcc

SEQ ID NO: 193507 - DNA, 25 bp, Canis familiaris
tacaaattgcattagtttctttaga

SEQ ID NO: 193508 - DNA, 25 bp, Canis familiaris
tacatagttgctctgtcttgctttc

SEQ ID NO: 193509 - DNA, 25 bp, Canis familiaris
tacagaactgggctcttttctctat

SEQ ID NO: 193510 - DNA, 25 bp, Canis familiaris
tacagagacagctggccttttttct

SEQ ID NO: 193511 - DNA, 25 bp, Canis familiaris
tagataagcacgtcgactttcctgt

SEQ ID NO: 193512 - DNA, 25 bp, Canis familiaris
taaatagcatgagccttgtccctgt

SEQ ID NO: 193513 - DNA, 25 bp, Canis familiaris
taaatagctcactttgggcccagta

SEQ ID NO: 193514 - DNA, 25 bp, Canis familiaris
taaataccatctattcacccactaa

SEQ ID NO: 193515 - DNA, 25 bp, Canis familiaris
taaatagatcctaataaacccatta

SEQ ID NO: 193516 - DNA, 25 bp, Canis familiaris
taaatttccgcttacataactctta

SEQ ID NO: 193517 - DNA, 25 bp, Canis familiaris
taaattgtttcttcttgacactccc

SEQ ID NO: 193518 - DNA, 25 bp, Canis familiaris
tacaattatttttcataccccatcc

SEQ ID NO: 193519 - DNA, 25 bp, Canis familiaris
taaattattttgtcatcctaccctt

SEQ ID NO: 193520 - DNA, 25 bp, Canis familiaris
taaatttagttcttcctgttgtctt

SEQ ID NO: 193521 - DNA, 25 bp, Canis familiaris
taaatttactcttttgtggatgtgt

SEQ ID NO: 193522 - DNA, 25 bp, Canis familiaris
tacaccttaccttgtatgggtggga

SEQ ID NO: 193523 - DNA, 25 bp, Canis familiaris
tacacctctaccctgtaatgattgg

SEQ ID NO: 193524 - DNA, 25 bp, Canis familiaris
tacacctctttacgtatatgatgtg

SEQ ID NO: 193525 - DNA, 25 bp, Canis familiaris
tacacctctttacgtatatgatgtg

SEQ ID NO: 193526 - DNA, 25 bp, Canis familiaris
tacacccctcagcagtcattagaga

SEQ ID NO: 193527 - DNA, 25 bp, Canis familiaris
tacagcccgctatgacctgaaggga

SEQ ID NO: 193528 - DNA, 25 bp, Canis familiaris
tagctcccgtacaccggagcggaaa

SEQ ID NO: 193529 - DNA, 25 bp, Canis familiaris
tacatcccctccaggcaggggggaa

SEQ ID NO: 193530 - DNA, 25 bp, Canis familiaris
tactaccttgccatccagatgttgg

SEQ ID NO: 193531 - DNA, 25 bp, Canis familiaris
tactatcagtacatgatcaaacttc

SEQ ID NO: 193532 - DNA, 25 bp, Canis familiaris
tacacaagctacagcctcaatatta

SEQ ID NO: 193533 - DNA, 25 bp, Canis familiaris
taaatagaactatctgcattatcta

SEQ ID NO: 193534 - DNA, 25 bp, Canis familiaris
taaatgcgacacctttcagctgaaa

SEQ ID NO: 193535 - DNA, 25 bp, Canis familiaris
tacattgggcccaggcagctgaacc

SEQ ID NO: 193536 - DNA, 25 bp, Canis familiaris
tacaggaagcccttggcactgatag

SEQ ID NO: 193537 - DNA, 25 bp, Canis familiaris
tacaggaatgggtctctctgcttgc

SEQ ID NO: 193538 - DNA, 25 bp, Canis familiaris
tacacatgtagtgactgcctcttgc

SEQ ID NO: 193539 - DNA, 25 bp, Canis familiaris
taaatgacttcttgcaccatcttgc

SEQ ID NO: 193540 - DNA, 25 bp, Canis familiaris
taaatactatctttctctgtctgca

SEQ ID NO: 193541 - DNA, 25 bp, Canis familiaris
taaataattgctactctcatccctt

SEQ ID NO: 193542 - DNA, 25 bp, Canis familiaris
taaatcgatagcaacccactgccat

SEQ ID NO: 193543 - DNA, 25 bp, Canis familiaris
taaatgaatcagttcgccacccaat

SEQ ID NO: 193544 - DNA, 25 bp, Canis familiaris
taaatatatatgcctgcccatccat

SEQ ID NO: 193545 - DNA, 25 bp, Canis familiaris
taaatatacatgccacacacaccag

SEQ ID NO: 193546 - DNA, 25 bp, Canis familiaris
tacacacatatgtgccacacacaca

SEQ ID NO: 193547 - DNA, 25 bp, Canis familiaris
tacatacatatgtagcacacacaca

SEQ ID NO: 193548 - DNA, 25 bp, Canis familiaris
tacaatctcatttcacatgcataca

SEQ ID NO: 193549 - DNA, 25 bp, Canis familiaris
tactatcacatatacatgaagcctt

SEQ ID NO: 193550 - DNA, 25 bp, Canis familiaris
tacatgatcgcacacatcacaggcc

SEQ ID NO: 193551 - DNA, 25 bp, Canis familiaris
tacagaatgctgcagtacagggctc

SEQ ID NO: 193552 - DNA, 25 bp, Canis familiaris
tacgcatttgcgtctacagctatgt

SEQ ID NO: 193553 - DNA, 25 bp, Canis familiaris
tacagatcttgcgccaggacatgac

SEQ ID NO: 193554 - DNA, 25 bp, Canis familiaris
tacaagttcttcgagcagatgcaga

SEQ ID NO: 193555 - DNA, 25 bp, Canis familiaris
tacacagtgtggccaatcagtgtga

SEQ ID NO: 193556 - DNA, 25 bp, Canis familiaris
tacacggtggtggagtcaggcccgg

SEQ ID NO: 193557 - DNA, 25 bp, Canis familiaris
tacacaagatggactttagacccaa

SEQ ID NO: 193558 - DNA, 25 bp, Canis familiaris
tacacagaggtcctcggagacccca

SEQ ID NO: 193559 - DNA, 25 bp, Canis familiaris
tacaaagtgtcactcctgtacctca

SEQ ID NO: 193560 - DNA, 25 bp, Canis familiaris
tacacaaaattatctgatcctgcca

SEQ ID NO: 193561 - DNA, 25 bp, Canis familiaris
tacaaaacgttctgactggtattta

SEQ ID NO: 193562 - DNA, 25 bp, Canis familiaris
tacaaattttcctgtcttgcttcac

SEQ ID NO: 193563 - DNA, 25 bp, Canis familiaris
tacaacttcttcaggaatgtttgac

SEQ ID NO: 193564 - DNA, 25 bp, Canis familiaris
tacaatctacttcgggttcttccac

SEQ ID NO: 193565 - DNA, 25 bp, Canis familiaris
tacaatctccttaggcgtatatttt

SEQ ID NO: 193566 - DNA, 25 bp, Canis familiaris
tacacatattttttgagttgttctt

SEQ ID NO: 193567 - DNA, 25 bp, Canis familiaris
tacagtcaattatccagtgttggtt

SEQ ID NO: 193568 - DNA, 25 bp, Canis familiaris
tacagtgctgttagaccttttggct

SEQ ID NO: 193569 - DNA, 25 bp, Canis familiaris
tacagagggtccatcctttttttct

SEQ ID NO: 193570 - DNA, 25 bp, Canis familiaris
tacaaggggtcttcttacttctctt

SEQ ID NO: 193571 - DNA, 25 bp, Canis familiaris
tacagggagagccttttaccctgca

SEQ ID NO: 193572 - DNA, 25 bp, Canis familiaris
taaattgacccatttctatctctct

SEQ ID NO: 193573 - DNA, 25 bp, Canis familiaris
taaatatgactcctttttctatccc

SEQ ID NO: 193574 - DNA, 25 bp, Canis familiaris
taaataatgatctttctttttcctt

SEQ ID NO: 193575 - DNA, 25 bp, Canis familiaris
tacatattaatccttatttttactg

SEQ ID NO: 193576 - DNA, 25 bp, Canis familiaris
tacagattttcctacatgatttttc

SEQ ID NO: 193577 - DNA, 25 bp, Canis familiaris
tacacttaatcttactgcttcttgc

SEQ ID NO: 193578 - DNA, 25 bp, Canis familiaris
taaattcaattttcagctgtactgt

SEQ ID NO: 193579 - DNA, 25 bp, Canis familiaris
taggttcgattgcccagtgtcaagt

SEQ ID NO: 193580 - DNA, 25 bp, Canis familiaris
taggttctttcgtgtgtaggtctct

SEQ ID NO: 193581 - DNA, 25 bp, Canis familiaris
tagggactttccagtgcagaggccc

SEQ ID NO: 193582 - DNA, 25 bp, Canis familiaris
tacaggacttctgttcgagggccct

SEQ ID NO: 193583 - DNA, 25 bp, Canis familiaris
tacaggtttctggcccagacggacc

SEQ ID NO: 193584 - DNA, 25 bp, Canis familiaris
tactcctttgatggccgagacgtga

SEQ ID NO: 193585 - DNA, 25 bp, Canis familiaris
tacatagcttttctctgcagcacga

SEQ ID NO: 193586 - DNA, 25 bp, Canis familiaris
tacatacttttccatttgcaatcag

SEQ ID NO: 193587 - DNA, 25 bp, Canis familiaris
tacaacttgttccatgtgtctccat

SEQ ID NO: 193588 - DNA, 25 bp, Canis familiaris
tacaactggagaaatggcatcatta

SEQ ID NO: 193589 - DNA, 25 bp, Canis familiaris
tacaatgctgcctacaatcgctatt

SEQ ID NO: 193590 - DNA, 25 bp, Canis familiaris
tacaatgctgcctacaatcgctatt

SEQ ID NO: 193591 - DNA, 25 bp, Canis familiaris
tacaatgctgcctacaatcgctatt

SEQ ID NO: 193592 - DNA, 25 bp, Canis familiaris
tacgatgctcatcacgggtgttaaa

SEQ ID NO: 193593 - DNA, 25 bp, Canis familiaris
tacgtccattccacagttgtaaatg

SEQ ID NO: 193594 - DNA, 25 bp, Canis familiaris
tacggtcttgacgcaacttacaata

SEQ ID NO: 193595 - DNA, 25 bp, Canis familiaris
tacaaggcttgatcactttctacaa

SEQ ID NO: 193596 - DNA, 25 bp, Canis familiaris
tacaagtgtttatgttcatcttaca

SEQ ID NO: 193597 - DNA, 25 bp, Canis familiaris
tacagagtttgtttttccttgatgg

SEQ ID NO: 193598 - DNA, 25 bp, Canis familiaris
tactgtgtttgtttaccgtgggctg

SEQ ID NO: 193599 - DNA, 25 bp, Canis familiaris
tacggcttttaatgcgggagctgcg

SEQ ID NO: 193600 - DNA, 25 bp, Canis familiaris
tacgagcggtatttcggagccggca

SEQ ID NO: 193601 - DNA, 25 bp, Canis familiaris
tacgtgcgcctttctgccggacgcg

SEQ ID NO: 193602 - DNA, 25 bp, Canis familiaris
tacgatgccctgggctacgtgacgc

SEQ ID NO: 193603 - DNA, 25 bp, Canis familiaris
taaatagccatggcctaaggcatcg

SEQ ID NO: 193604 - DNA, 25 bp, Canis familiaris
tacttctccagggctaaggcacaac

SEQ ID NO: 193605 - DNA, 25 bp, Canis familiaris
tactaccaattggctttggcaaaac

SEQ ID NO: 193606 - DNA, 25 bp, Canis familiaris
tactagtcaataagctggtccaaga

SEQ ID NO: 193607 - DNA, 25 bp, Canis familiaris
tacaggctaggctgtgatacacaaa

SEQ ID NO: 193608 - DNA, 25 bp, Canis familiaris
taaattctgtgcctgagaaccacct

SEQ ID NO: 193609 - DNA, 25 bp, Canis familiaris
tacatgtacttcttggaaccaggct

SEQ ID NO: 193610 - DNA, 25 bp, Canis familiaris
tacaccagattgtggaactcagcca

SEQ ID NO: 193611 - DNA, 25 bp, Canis familiaris
tacacctcaggtagaacactcacag

SEQ ID NO: 193612 - DNA, 25 bp, Canis familiaris
tacacttcagtgcaagtcttgtcag

SEQ ID NO: 193613 - DNA, 25 bp, Canis familiaris
tacacttcatgccaaagcctatcac

SEQ ID NO: 193614 - DNA, 25 bp, Canis familiaris
tacaattccacaacaactcagcatc

SEQ ID NO: 193615 - DNA, 25 bp, Canis familiaris
tacactccatacacaaacagctata

SEQ ID NO: 193616 - DNA, 25 bp, Canis familiaris
tacacattattttcaaatgcccaca

SEQ ID NO: 193617 - DNA, 25 bp, Canis familiaris
tacacattttcttcaacgtctagtt

SEQ ID NO: 193618 - DNA, 25 bp, Canis familiaris
tacacttttatgtcccttttgtact

SEQ ID NO: 193619 - DNA, 25 bp, Canis familiaris
tactttttggacactactttcacat

SEQ ID NO: 193620 - DNA, 25 bp, Canis familiaris
tactttttacttcccagttatgatt

SEQ ID NO: 193621 - DNA, 25 bp, Canis familiaris
tactttctctaaaaccttacattat

SEQ ID NO: 193622 - DNA, 25 bp, Canis familiaris
tacttctcaccatgcaaccatatca

SEQ ID NO: 193623 - DNA, 25 bp, Canis familiaris
tacatactcacttaaacacatagca

SEQ ID NO: 193624 - DNA, 25 bp, Canis familiaris
tactgggactaatcatcaacgacga

SEQ ID NO: 193625 - DNA, 25 bp, Canis familiaris
tacagtggaccatgagctcaactaa

SEQ ID NO: 193626 - DNA, 25 bp, Canis familiaris
tacactggggcagggccatcactaa

SEQ ID NO: 193627 - DNA, 25 bp, Canis familiaris
tacagggctggctggctcagcctat

SEQ ID NO: 193628 - DNA, 25 bp, Canis familiaris
tacaagcctgagtgttctgctgcca

SEQ ID NO: 193629 - DNA, 25 bp, Canis familiaris
tacaagagcagcattgatctcttcc

SEQ ID NO: 193630 - DNA, 25 bp, Canis familiaris
tacttgagcagaagattcacttgac

SEQ ID NO: 193631 - DNA, 25 bp, Canis familiaris
tacagatgacatctatctacatgta

SEQ ID NO: 193632 - DNA, 25 bp, Canis familiaris
tacacagcatctctgttcactctga

SEQ ID NO: 193633 - DNA, 25 bp, Canis familiaris
tacagcctgcatctatgatcagccc

SEQ ID NO: 193634 - DNA, 25 bp, Canis familiaris
tacagactatgatggctcacctcta

SEQ ID NO: 193635 - DNA, 25 bp, Canis familiaris
tacacacatagctgtgactcctgtc

SEQ ID NO: 193636 - DNA, 25 bp, Canis familiaris
tacagacaactttgaatctgctgtt

SEQ ID NO: 193637 - DNA, 25 bp, Canis familiaris
tacaacatttcactgatcctgcttc

SEQ ID NO: 193638 - DNA, 25 bp, Canis familiaris
tacacacatctctagcttcaagttt

SEQ ID NO: 193639 - DNA, 25 bp, Canis familiaris
tacatccatctgtctgtcatctgaa

SEQ ID NO: 193640 - DNA, 25 bp, Canis familiaris
tacaaatctgattgccatctaaaga

SEQ ID NO: 193641 - DNA, 25 bp, Canis familiaris
tacagactctgttgccttgaatata

SEQ ID NO: 193642 - DNA, 25 bp, Canis familiaris
tacaaactcatgtccttgagcatta

SEQ ID NO: 193643 - DNA, 25 bp, Canis familiaris
tacagagcctagtcagatcgcgtta

SEQ ID NO: 193644 - DNA, 25 bp, Canis familiaris
tacatattctcgtcatgcttgcagt

SEQ ID NO: 193645 - DNA, 25 bp, Canis familiaris
tacatacactgccacttctcagatc

SEQ ID NO: 193646 - DNA, 25 bp, Canis familiaris
tacagactctcacatattcaaccca

SEQ ID NO: 193647 - DNA, 25 bp, Canis familiaris
tacaagcctcttgtcatcaacagcc

SEQ ID NO: 193648 - DNA, 25 bp, Canis familiaris
tacagaccttcgttgcacaggcaga

SEQ ID NO: 193649 - DNA, 25 bp, Canis familiaris
tacgcagcccatcctggagggcagc

SEQ ID NO: 193650 - DNA, 25 bp, Canis familiaris
tacagaggccgcgtggaggctgctt

SEQ ID NO: 193651 - DNA, 25 bp, Canis familiaris
tacaagaccatcgtcatgggcgcct

SEQ ID NO: 193652 - DNA, 25 bp, Canis familiaris
tacacaactgcttaagctggcccac

SEQ ID NO: 193653 - DNA, 25 bp, Canis familiaris
tacacagactggcagaccgtctctc

SEQ ID NO: 193654 - DNA, 25 bp, Canis familiaris
tacactgactggctcagcgtgtgcc

SEQ ID NO: 193655 - DNA, 25 bp, Canis familiaris
tacactgactggctcagcgtgtgcc

SEQ ID NO: 193656 - DNA, 25 bp, Canis familiaris
tacactcctcgtgaggctggatctc

SEQ ID NO: 193657 - DNA, 25 bp, Canis familiaris
tacacccaactggcaagattatccc

SEQ ID NO: 193658 - DNA, 25 bp, Canis familiaris
tacacccaagcgggagttgttcaac

SEQ ID NO: 193659 - DNA, 25 bp, Canis familiaris
tacacgccagaggtcaggggttcag

SEQ ID NO: 193660 - DNA, 25 bp, Canis familiaris
tacaagccagtggccggggtgttcc

SEQ ID NO: 193661 - DNA, 25 bp, Canis familiaris
tacaatcagagtgccggttcttacg

SEQ ID NO: 193662 - DNA, 25 bp, Canis familiaris
tacaccgagctacaacttcttactt

SEQ ID NO: 193663 - DNA, 25 bp, Canis familiaris
tacacacacgtacaccatttttatt

SEQ ID NO: 193664 - DNA, 25 bp, Canis familiaris
tacaccacctcctctatttggtaga

SEQ ID NO: 193665 - DNA, 25 bp, Canis familiaris
tacagtcctcgatactattcgctta

SEQ ID NO: 193666 - DNA, 25 bp, Canis familiaris
tacaggtgtaattaaagtccttagt

SEQ ID NO: 193667 - DNA, 25 bp, Canis familiaris
tacgtggtatagtaagccctcttag

SEQ ID NO: 193668 - DNA, 25 bp, Canis familiaris
tacagttgttgattatagcctccct

SEQ ID NO: 193669 - DNA, 25 bp, Canis familiaris
tacagggtgctttagatgacgtctc

SEQ ID NO: 193670 - DNA, 25 bp, Canis familiaris
tacacgcttttgtgatggagtgctg

SEQ ID NO: 193671 - DNA, 25 bp, Canis familiaris
tacacgtacttgtatgagctccctg

SEQ ID NO: 193672 - DNA, 25 bp, Canis familiaris
tacattggcctttaacagctcctgg

SEQ ID NO: 193673 - DNA, 25 bp, Canis familiaris
tacactacagttgctacagcctggc

SEQ ID NO: 193674 - DNA, 25 bp, Canis familiaris
tacacacacagcatttagcccaggg

SEQ ID NO: 193675 - DNA, 25 bp, Canis familiaris
tacacaccagctatcaagaccactt

SEQ ID NO: 193676 - DNA, 25 bp, Canis familiaris
tacacacagagctgtgaaagctcaa

SEQ ID NO: 193677 - DNA, 25 bp, Canis familiaris
tactcagggcagttatatagataaa

SEQ ID NO: 193678 - DNA, 25 bp, Canis familiaris
taccgtaggataatttgaccacaac

SEQ ID NO: 193679 - DNA, 25 bp, Canis familiaris
tacatcgaaccattctttgacccac

SEQ ID NO: 193680 - DNA, 25 bp, Canis familiaris
tacaaaaccaattcttcacactacg

SEQ ID NO: 193681 - DNA, 25 bp, Canis familiaris
tacttacttaattttgcagcagcta

SEQ ID NO: 193682 - DNA, 25 bp, Canis familiaris
tacacttcattgtctttcttggctg

SEQ ID NO: 193683 - DNA, 25 bp, Canis familiaris
tacaatcgtttcatcattcggcgtg

SEQ ID NO: 193684 - DNA, 25 bp, Canis familiaris
tacaatcctgttttgctccgaagta

SEQ ID NO: 193685 - DNA, 25 bp, Canis familiaris
tacacaccttcaatgtctagcagaa

SEQ ID NO: 193686 - DNA, 25 bp, Canis familiaris
tacatccgctatgacctgctagaga

SEQ ID NO: 193687 - DNA, 25 bp, Canis familiaris
tacacggagagcgactctggcgagc

SEQ ID NO: 193688 - DNA, 25 bp, Canis familiaris
tacaaggacacagcactctggcagc

SEQ ID NO: 193689 - DNA, 25 bp, Canis familiaris
tactagaaacatccctggctcaggc

SEQ ID NO: 193690 - DNA, 25 bp, Canis familiaris
tactaaatcactgcttgttctctct

SEQ ID NO: 193691 - DNA, 25 bp, Canis familiaris
tacacatatatatttccattttgat

SEQ ID NO: 193692 - DNA, 25 bp, Canis familiaris
tacacagaataatacatttgtcatt

SEQ ID NO: 193693 - DNA, 25 bp, Canis familiaris
tacagcttataaaacgttgcacatt

SEQ ID NO: 193694 - DNA, 25 bp, Canis familiaris
tacttggtgacaaaccccaatgtac

SEQ ID NO: 193695 - DNA, 25 bp, Canis familiaris
tactggagtagctcccccaaattgt

SEQ ID NO: 193696 - DNA, 25 bp, Canis familiaris
taccaggttctagctgccaaacggt

SEQ ID NO: 193697 - DNA, 25 bp, Canis familiaris
tacagagggtgcaattctgctcaaa

SEQ ID NO: 193698 - DNA, 25 bp, Canis familiaris
tacaatgcaagacttgttgccaata

SEQ ID NO: 193699 - DNA, 25 bp, Canis familiaris
tacaggtaggttgtcagcataagct

SEQ ID NO: 193700 - DNA, 25 bp, Canis familiaris
tacaggtttttgttcccaactgact

SEQ ID NO: 193701 - DNA, 25 bp, Canis familiaris
tatcagggttttgccccatttgctt

SEQ ID NO: 193702 - DNA, 25 bp, Canis familiaris
tactgggctttttgggccttggttg

SEQ ID NO: 193703 - DNA, 25 bp, Canis familiaris
tacagggaattgaaggccccggtgg

SEQ ID NO: 193704 - DNA, 25 bp, Canis familiaris
tacggagaattaattaccaggtggg

SEQ ID NO: 193705 - DNA, 25 bp, Canis familiaris
tacgtacacgtgcgtacaccgtgcg

SEQ ID NO: 193706 - DNA, 25 bp, Canis familiaris
tacagtatatctcgtgtgtacacac

SEQ ID NO: 193707 - DNA, 25 bp, Canis familiaris
tacagaactgtcctgttgaccaccg

SEQ ID NO: 193708 - DNA, 25 bp, Canis familiaris
tacaacacgccggactgactctggc

SEQ ID NO: 193709 - DNA, 25 bp, Canis familiaris
tacaacgcgagcggacccgcttgtg

SEQ ID NO: 193710 - DNA, 25 bp, Canis familiaris
tacaagctactgggacccgttctgc

SEQ ID NO: 193711 - DNA, 25 bp, Canis familiaris
tacatactgactcaagcctcgttta

SEQ ID NO: 193712 - DNA, 25 bp, Canis familiaris
tacacacaggcacaatgtctccctt

SEQ ID NO: 193713 - DNA, 25 bp, Canis familiaris
tacatccctgcatagacttccagtg

SEQ ID NO: 193714 - DNA, 25 bp, Canis familiaris
tacactcctagaagcacttctcagc

SEQ ID NO: 193715 - DNA, 25 bp, Canis familiaris
tagatcatcctagtaaagttccgag

SEQ ID NO: 193716 - DNA, 25 bp, Canis familiaris
tacatccactccaaaagttacactg

SEQ ID NO: 193717 - DNA, 25 bp, Canis familiaris
tacaccgtccgaacactgtcaagga

SEQ ID NO: 193718 - DNA, 25 bp, Canis familiaris
tacaccaattcgaatccgtcatatt

SEQ ID NO: 193719 - DNA, 25 bp, Canis familiaris
tacacacaaacactggctttcttta

SEQ ID NO: 193720 - DNA, 25 bp, Canis familiaris
tatgaacaaaggtgcttttttccct

SEQ ID NO: 193721 - DNA, 25 bp, Canis familiaris
ttactaaaggccgcttggtgaccct

SEQ ID NO: 193722 - DNA, 25 bp, Canis familiaris
ttaataaatggcctttgggtagcta

SEQ ID NO: 193723 - DNA, 25 bp, Canis familiaris
ttttaattggatctcgggaatgacc

SEQ ID NO: 193724 - DNA, 25 bp, Canis familiaris
ttcactaaggttgttggtgaagctc

SEQ ID NO: 193725 - DNA, 25 bp, Canis familiaris
ttagtaatttacacttggacagccg

SEQ ID NO: 193726 - DNA, 25 bp, Canis familiaris
tttgtgtttggacacttgggccctg

SEQ ID NO: 193727 - DNA, 25 bp, Canis familiaris
tataggtttataaaattgggccaca

SEQ ID NO: 193728 - DNA, 25 bp, Canis familiaris
tacagtctttaataattgcctgaca

SEQ ID NO: 193729 - DNA, 25 bp, Canis familiaris
tactttattaagccaaatctctaaa

SEQ ID NO: 193730 - DNA, 25 bp, Canis familiaris
tacttttcaaacttaatgccaacaa

SEQ ID NO: 193731 - DNA, 25 bp, Canis familiaris
tacttttccaacttaatgcccacac

SEQ ID NO: 193732 - DNA, 25 bp, Canis familiaris
tacagtgttccttttcagtatccca

SEQ ID NO: 193733 - DNA, 25 bp, Canis familiaris
tacgtgctacctttcaagcttacca

SEQ ID NO: 193734 - DNA, 25 bp, Canis familiaris
tacgttacagcctttacttagccct

SEQ ID NO: 193735 - DNA, 25 bp, Canis familiaris
taccaaggaccacttccttaccatt

SEQ ID NO: 193736 - DNA, 25 bp, Canis familiaris
tacactaggccacttttttcaccat

SEQ ID NO: 193737 - DNA, 25 bp, Canis familiaris
tacttcaacccttattcattaccat

SEQ ID NO: 193738 - DNA, 25 bp, Canis familiaris
tacattcaaacgcttatccattcca

SEQ ID NO: 193739 - DNA, 25 bp, Canis familiaris
tacagccacttctgttctatttcca

SEQ ID NO: 193740 - DNA, 25 bp, Canis familiaris
tacaccagtcctggtgtcttttcct

SEQ ID NO: 193741 - DNA, 25 bp, Canis familiaris
tactcggaccgatatcttctgtacc

SEQ ID NO: 193742 - DNA, 25 bp, Canis familiaris
tacttggtccaatgtcttattactt

SEQ ID NO: 193743 - DNA, 25 bp, Canis familiaris
tacattgtcccctgtggtattgtct

SEQ ID NO: 193744 - DNA, 25 bp, Canis familiaris
tacatcactccggacgggtttttct

SEQ ID NO: 193745 - DNA, 25 bp, Canis familiaris
tacacagcctcagacctgagtttct

SEQ ID NO: 193746 - DNA, 25 bp, Canis familiaris
tacagcgcaacagcagcctgcagct

SEQ ID NO: 193747 - DNA, 25 bp, Canis familiaris
tacatggcctcacaggcatcagctg

SEQ ID NO: 193748 - DNA, 25 bp, Canis familiaris
tacatggtgccgccagagatctcta

SEQ ID NO: 193749 - DNA, 25 bp, Canis familiaris
tacagggcacattatactcatctca

SEQ ID NO: 193750 - DNA, 25 bp, Canis familiaris
tacaggatgtcttcaacctgctgcc

SEQ ID NO: 193751 - DNA, 25 bp, Canis familiaris
tacacagagctcttagagcttcgcc

SEQ ID NO: 193752 - DNA, 25 bp, Canis familiaris
tacagatgatgttccgatgtctccc

SEQ ID NO: 193753 - DNA, 25 bp, Canis familiaris
tacagcatggtccatcagtgctcat

SEQ ID NO: 193754 - DNA, 25 bp, Canis familiaris
tacagcattggcaaatggtataatt

SEQ ID NO: 193755 - DNA, 25 bp, Canis familiaris
tacacatctagcagtcagttcttgt

SEQ ID NO: 193756 - DNA, 25 bp, Canis familiaris
tacacatctagcagtcagttcttgt

SEQ ID NO: 193757 - DNA, 25 bp, Canis familiaris
tacacatcagacagtcctacaggct

SEQ ID NO: 193758 - DNA, 25 bp, Canis familiaris
tacacattttggacctacaactctt

SEQ ID NO: 193759 - DNA, 25 bp, Canis familiaris
tacacttttgtatttttattcttat

SEQ ID NO: 193760 - DNA, 25 bp, Canis familiaris
tacaatcctctttttagctttatat

SEQ ID NO: 193761 - DNA, 25 bp, Canis familiaris
tacaatgcactctggtatatttcta

SEQ ID NO: 193762 - DNA, 25 bp, Canis familiaris
tacagatcagtattggtttattaat

SEQ ID NO: 193763 - DNA, 25 bp, Canis familiaris
tacacaccttcttgtcttttgaatc

SEQ ID NO: 193764 - DNA, 25 bp, Canis familiaris
tacaacatctttttctcatttacca

SEQ ID NO: 193765 - DNA, 25 bp, Canis familiaris
tacaacctctttattcatctagcca

SEQ ID NO: 193766 - DNA, 25 bp, Canis familiaris
tacacctactttatccattttgcct

SEQ ID NO: 193767 - DNA, 25 bp, Canis familiaris
tacacagctaccgtttttttgtttg

SEQ ID NO: 193768 - DNA, 25 bp, Canis familiaris
taccgattccggaatagttcttttg

SEQ ID NO: 193769 - DNA, 25 bp, Canis familiaris
tactcgttccggtttatatttcaat

SEQ ID NO: 193770 - DNA, 25 bp, Canis familiaris
tacatactactctcctttatttcag

SEQ ID NO: 193771 - DNA, 25 bp, Canis familiaris
tactcactaccatgctctgggttag

SEQ ID NO: 193772 - DNA, 25 bp, Canis familiaris
tactacgagtgctacgcggacatct

SEQ ID NO: 193773 - DNA, 25 bp, Canis familiaris
tacttggactattcagggagctgca

SEQ ID NO: 193774 - DNA, 25 bp, Canis familiaris
tacttggactattcagggagtcgca

SEQ ID NO: 193775 - DNA, 25 bp, Canis familiaris
tacttggactattcagggagtcgca

SEQ ID NO: 193776 - DNA, 25 bp, Canis familiaris
tacttagtcattcagaggaggccat

SEQ ID NO: 193777 - DNA, 25 bp, Canis familiaris
tactccagtggcccagggggaatgc

SEQ ID NO: 193778 - DNA, 25 bp, Canis familiaris
tacagcctggaggctcggggggctt

SEQ ID NO: 193779 - DNA, 25 bp, Canis familiaris
tattggtggtcgggtaggtggttca

SEQ ID NO: 193780 - DNA, 25 bp, Canis familiaris
tagggtggtgacagctaccgggaca

SEQ ID NO: 193781 - DNA, 25 bp, Canis familiaris
taggggttgtcatgccccagagttc

SEQ ID NO: 193782 - DNA, 25 bp, Canis familiaris
taccggtgtgattaccccgtattca

SEQ ID NO: 193783 - DNA, 25 bp, Canis familiaris
tacactgttggatggacccggttgc

SEQ ID NO: 193784 - DNA, 25 bp, Canis familiaris
tacactccgctggggacccagttag

SEQ ID NO: 193785 - DNA, 25 bp, Canis familiaris
tacagtcctcggggagtccgttgaa

SEQ ID NO: 193786 - DNA, 25 bp, Canis familiaris
tacttctccgagggggacgactaca

SEQ ID NO: 193787 - DNA, 25 bp, Canis familiaris
tactcttgccccagggactagacaa

SEQ ID NO: 193788 - DNA, 25 bp, Canis familiaris
tacaccccacaccggtgagggaaat

SEQ ID NO: 193789 - DNA, 25 bp, Canis familiaris
tacagcttggaacccgtcaggagaa

SEQ ID NO: 193790 - DNA, 25 bp, Canis familiaris
tacaaggagcgcacctgtcagcgag

SEQ ID NO: 193791 - DNA, 25 bp, Canis familiaris
tacaggggcgcacaggccaggatgt

SEQ ID NO: 193792 - DNA, 25 bp, Canis familiaris
tacaggggctcggatgggccctgtc

SEQ ID NO: 193793 - DNA, 25 bp, Canis familiaris
tacagggccctggtgaagagccgat

SEQ ID NO: 193794 - DNA, 25 bp, Canis familiaris
tacagtgcactgcctggttgatacc

SEQ ID NO: 193795 - DNA, 25 bp, Canis familiaris
tacaggcagctgtggctggaccatg

SEQ ID NO: 193796 - DNA, 25 bp, Canis familiaris
tacaccggtgacctgtgaccagggc

SEQ ID NO: 193797 - DNA, 25 bp, Canis familiaris
tacagcttcaggcacggagccagcg

SEQ ID NO: 193798 - DNA, 25 bp, Canis familiaris
tacagcttcaggcacggagccagcg

SEQ ID NO: 193799 - DNA, 25 bp, Canis familiaris
tacagcacttagcaaatgaggcatg

SEQ ID NO: 193800 - DNA, 25 bp, Canis familiaris
tacagctctctgtggtatgggcagg

SEQ ID NO: 193801 - DNA, 25 bp, Canis familiaris
tacgtcatcatgggcctatggagga

SEQ ID NO: 193802 - DNA, 25 bp, Canis familiaris
tactgtcaaattctatgggcgtgca

SEQ ID NO: 193803 - DNA, 25 bp, Canis familiaris
tacttatatttttaggagcgtgcaa

SEQ ID NO: 193804 - DNA, 25 bp, Canis familiaris
tacttgtagttgggatgggccttgt

SEQ ID NO: 193805 - DNA, 25 bp, Canis familiaris
tactgtgggttggaatggaccagac

SEQ ID NO: 193806 - DNA, 25 bp, Canis familiaris
tacttgggttcattctgttcaggac

SEQ ID NO: 193807 - DNA, 25 bp, Canis familiaris
tactcgtgcgtacacgttattagcc

SEQ ID NO: 193808 - DNA, 25 bp, Canis familiaris
tactcgtcgcgagaggatcttcacc

SEQ ID NO: 193809 - DNA, 25 bp, Canis familiaris
tactttcaatgaacaggttcccctc

SEQ ID NO: 193810 - DNA, 25 bp, Canis familiaris
tactttaaagtcagtgtctctcccc

SEQ ID NO: 193811 - DNA, 25 bp, Canis familiaris
tacacatgttataccattttttccc

SEQ ID NO: 193812 - DNA, 25 bp, Canis familiaris
tacacaggtaattctgttttgccaa

SEQ ID NO: 193813 - DNA, 25 bp, Canis familiaris
tacacagcgaagtttttttctcaga

SEQ ID NO: 193814 - DNA, 25 bp, Canis familiaris
tacacctcaagcttttattcatcct

SEQ ID NO: 193815 - DNA, 25 bp, Canis familiaris
tactcatgcatccactcatttattc

SEQ ID NO: 193816 - DNA, 25 bp, Canis familiaris
tactaacgaccaacatttgctaatg

SEQ ID NO: 193817 - DNA, 25 bp, Canis familiaris
tactgaaaccaattctttgccgatg

SEQ ID NO: 193818 - DNA, 25 bp, Canis familiaris
tactaaacaaattcttactttccag

SEQ ID NO: 193819 - DNA, 25 bp, Canis familiaris
tactaaaccaacttatatttccaat

SEQ ID NO: 193820 - DNA, 25 bp, Canis familiaris
tacagaaatccgatattataatctc

SEQ ID NO: 193821 - DNA, 25 bp, Canis familiaris
tacagaattactcatttaaggtctt

SEQ ID NO: 193822 - DNA, 25 bp, Canis familiaris
tagaaattcattcaactagaggttt

SEQ ID NO: 193823 - DNA, 25 bp, Canis familiaris
taggatttcctaaaaagcggtcttg

SEQ ID NO: 193824 - DNA, 25 bp, Canis familiaris
tatgtgctttccataggaccacgtt

SEQ ID NO: 193825 - DNA, 25 bp, Canis familiaris
taggtagtccagtcaaatcccgttg

SEQ ID NO: 193826 - DNA, 25 bp, Canis familiaris
tactttcccagatgaatcccaggtg

SEQ ID NO: 193827 - DNA, 25 bp, Canis familiaris
tactttgaaagactttcccagccgc

SEQ ID NO: 193828 - DNA, 25 bp, Canis familiaris
tacatttccaagcttatcatcagag

SEQ ID NO: 193829 - DNA, 25 bp, Canis familiaris
tactgttgaaaggtggcattcataa

SEQ ID NO: 193830 - DNA, 25 bp, Canis familiaris
tactatacaagggtgctggtgcaga

SEQ ID NO: 193831 - DNA, 25 bp, Canis familiaris
tacacctacggctttatgctgcaga

SEQ ID NO: 193832 - DNA, 25 bp, Canis familiaris
tacagccagcaccaactttgctgcc

SEQ ID NO: 193833 - DNA, 25 bp, Canis familiaris
tactccgccgagtctatgtggactt

SEQ ID NO: 193834 - DNA, 25 bp, Canis familiaris
tacttgattctgatctacggacttt

SEQ ID NO: 193835 - DNA, 25 bp, Canis familiaris
tacattttctgcagctgtccaggca

SEQ ID NO: 193836 - DNA, 25 bp, Canis familiaris
tacattcgtcttattgctgcagtga

SEQ ID NO: 193837 - DNA, 25 bp, Canis familiaris
tactttatgttgatgctggttgcta

SEQ ID NO: 193838 - DNA, 25 bp, Canis familiaris
tacttatagttgtcttgcagttaaa

SEQ ID NO: 193839 - DNA, 25 bp, Canis familiaris
tactttacatgttcccttaagcaaa

SEQ ID NO: 193840 - DNA, 25 bp, Canis familiaris
tacatatgtatgctaacccaaaaaa

SEQ ID NO: 193841 - DNA, 25 bp, Canis familiaris
tacaaaagttaaccagaggaccaag

SEQ ID NO: 193842 - DNA, 25 bp, Canis familiaris
tactaaagttaaaaatgtcacaaag

SEQ ID NO: 193843 - DNA, 25 bp, Canis familiaris
tacttcacgggaaccaaatgccaaa

SEQ ID NO: 193844 - DNA, 25 bp, Canis familiaris
tagttccgggaaacaccagccaact

SEQ ID NO: 193845 - DNA, 25 bp, Canis familiaris
taggtcggggagacttcgaccggcg

SEQ ID NO: 193846 - DNA, 25 bp, Canis familiaris
tagcccgggggaattggggcgagag

SEQ ID NO: 193847 - DNA, 25 bp, Canis familiaris
taggtcggtgggaggttggagggag

SEQ ID NO: 193848 - DNA, 25 bp, Canis familiaris
taggacggtgggagtctcctagggc

SEQ ID NO: 193849 - DNA, 25 bp, Canis familiaris
tacgacgggggctagaactctgagg

SEQ ID NO: 193850 - DNA, 25 bp, Canis familiaris
tacaggctggtgccagacaaagctt

SEQ ID NO: 193851 - DNA, 25 bp, Canis familiaris
tacagaccgctgtcatgccaaacgg

SEQ ID NO: 193852 - DNA, 25 bp, Canis familiaris
tacacagatcaggacggcaaagcga

SEQ ID NO: 193853 - DNA, 25 bp, Canis familiaris
taccagaaaatcccaaggagaacta

SEQ ID NO: 193854 - DNA, 25 bp, Canis familiaris
taccggaatacaccggaaaatctat

SEQ ID NO: 193855 - DNA, 25 bp, Canis familiaris
tacacgcaaaaaccaggatttatcg

SEQ ID NO: 193856 - DNA, 25 bp, Canis familiaris
tacctagaagaaccagcgtttatta

SEQ ID NO: 193857 - DNA, 25 bp, Canis familiaris
tacctagctaggctgtccgttatta

SEQ ID NO: 193858 - DNA, 25 bp, Canis familiaris
tacctcctcgtgtgaccagttagga

SEQ ID NO: 193859 - DNA, 25 bp, Canis familiaris
tatcatgtccaagtgaggcccaggt

SEQ ID NO: 193860 - DNA, 25 bp, Canis familiaris
tacatggctcagtcaagtgggcggc

SEQ ID NO: 193861 - DNA, 25 bp, Canis familiaris
tactgagctgctttggtggggacta

SEQ ID NO: 193862 - DNA, 25 bp, Canis familiaris
taccctgtaatgattgggagccagc

SEQ ID NO: 193863 - DNA, 25 bp, Canis familiaris
tactcctgagaaaatggaggcccag

SEQ ID NO: 193864 - DNA, 25 bp, Canis familiaris
tacgcctgggatgacggctaccaga

SEQ ID NO: 193865 - DNA, 25 bp, Canis familiaris
tactccagggtctcagatgctttgg

SEQ ID NO: 193866 - DNA, 25 bp, Canis familiaris
tacaccccggagaactgttgatggc

SEQ ID NO: 193867 - DNA, 25 bp, Canis familiaris
tacacacccgtgcacaactggagga

SEQ ID NO: 193868 - DNA, 25 bp, Canis familiaris
tactcatcccgtgcacaactatgga

SEQ ID NO: 193869 - DNA, 25 bp, Canis familiaris
tactcatcccgggatcatgacgctg

SEQ ID NO: 193870 - DNA, 25 bp, Canis familiaris
tactccacgtgggccaaggtggggc

SEQ ID NO: 193871 - DNA, 25 bp, Canis familiaris
tacttgccagtacccagggatgtgg

SEQ ID NO: 193872 - DNA, 25 bp, Canis familiaris
taccttcggcccgaggtgtgatcct

SEQ ID NO: 193873 - DNA, 25 bp, Canis familiaris
tactctgtcgtgaggggctgtgacc

SEQ ID NO: 193874 - DNA, 25 bp, Canis familiaris
tacctgcacggtcggggtgtggatt

SEQ ID NO: 193875 - DNA, 25 bp, Canis familiaris
tagagtccactctgggggtggatag

SEQ ID NO: 193876 - DNA, 25 bp, Canis familiaris
tacagtcgccctggcggtggaggtg

SEQ ID NO: 193877 - DNA, 25 bp, Canis familiaris
tacacgccacaagcgctggtagggg

SEQ ID NO: 193878 - DNA, 25 bp, Canis familiaris
tacatcagccagatccttggctcgg

SEQ ID NO: 193879 - DNA, 25 bp, Canis familiaris
tactcaggcattgaccagcctcagg

SEQ ID NO: 193880 - DNA, 25 bp, Canis familiaris
taccaggccacgtctgaggtgctgg

SEQ ID NO: 193881 - DNA, 25 bp, Canis familiaris
tactccgtgccgtgagggtgtggac

SEQ ID NO: 193882 - DNA, 25 bp, Canis familiaris
tactacggccttgggatgcctgggt

SEQ ID NO: 193883 - DNA, 25 bp, Canis familiaris
tacatacactcctcgtgaggctgga

SEQ ID NO: 193884 - DNA, 25 bp, Canis familiaris
tacaccctcctttatgacacagtga

SEQ ID NO: 193885 - DNA, 25 bp, Canis familiaris
tacatccttccctctgaagggcttc

SEQ ID NO: 193886 - DNA, 25 bp, Canis familiaris
tacacttgggccactcacagggtgt

SEQ ID NO: 193887 - DNA, 25 bp, Canis familiaris
tacctttgcaggctctacaggcgtg

SEQ ID NO: 193888 - DNA, 25 bp, Canis familiaris
tacttggtcagcactctagagccgg

SEQ ID NO: 193889 - DNA, 25 bp, Canis familiaris
tagctgtgagtctttcctaaacggc

SEQ ID NO: 193890 - DNA, 25 bp, Canis familiaris
tagcgtggtcgttcggaatcgcctt

SEQ ID NO: 193891 - DNA, 25 bp, Canis familiaris
tacgggccagtcctgagaacagtcc

SEQ ID NO: 193892 - DNA, 25 bp, Canis familiaris
tagccggtcggccaataaaggcacc

SEQ ID NO: 193893 - DNA, 25 bp, Canis familiaris
tacagcggtcgggagttagaggaaa

SEQ ID NO: 193894 - DNA, 25 bp, Canis familiaris
tacagcggtcgggaggtagagggaa

SEQ ID NO: 193895 - DNA, 25 bp, Canis familiaris
tacagccggcggcggcgaagcaggt

SEQ ID NO: 193896 - DNA, 25 bp, Canis familiaris
taccgaggggcctactaccaggcct

SEQ ID NO: 193897 - DNA, 25 bp, Canis familiaris
taccggggggccggaacgtgtcatg

SEQ ID NO: 193898 - DNA, 25 bp, Canis familiaris
taccggggttcacactacggcatgt

SEQ ID NO: 193899 - DNA, 25 bp, Canis familiaris
taccggtttccaaactactgtgcac

SEQ ID NO: 193900 - DNA, 25 bp, Canis familiaris
tacactggttgtcatggatattttg

SEQ ID NO: 193901 - DNA, 25 bp, Canis familiaris
tacagtgtgtctcttggttcatctt

SEQ ID NO: 193902 - DNA, 25 bp, Canis familiaris
tacagtgtgatgaccctcgtaagca

SEQ ID NO: 193903 - DNA, 25 bp, Canis familiaris
tacatgtgtggcatttcagaagaga

SEQ ID NO: 193904 - DNA, 25 bp, Canis familiaris
tacaggctgtggttatgcccaagat

SEQ ID NO: 193905 - DNA, 25 bp, Canis familiaris
tactggctgctgcttagtcaaagag

SEQ ID NO: 193906 - DNA, 25 bp, Canis familiaris
tactgtcccctttgcttatatggtt

SEQ ID NO: 193907 - DNA, 25 bp, Canis familiaris
tacatttccttttctattaggtgaa

SEQ ID NO: 193908 - DNA, 25 bp, Canis familiaris
tacatacttctaacataattcggaa

SEQ ID NO: 193909 - DNA, 25 bp, Canis familiaris
tacatgcatgcatctatacaaatgg

SEQ ID NO: 193910 - DNA, 25 bp, Canis familiaris
tacactagtgcaatcacaacagagt

SEQ ID NO: 193911 - DNA, 25 bp, Canis familiaris
tacagtagcatcatcgaactacata

SEQ ID NO: 193912 - DNA, 25 bp, Canis familiaris
tacactgagctgtttgaaccactat

SEQ ID NO: 193913 - DNA, 25 bp, Canis familiaris
tacactgtgcagtttctaacctcta

SEQ ID NO: 193914 - DNA, 25 bp, Canis familiaris
tacacttgagtaataaacagcttca

SEQ ID NO: 193915 - DNA, 25 bp, Canis familiaris
tacatcttggctgaggcccagttcc

SEQ ID NO: 193916 - DNA, 25 bp, Canis familiaris
tactagtggtccacaccattctgtt

SEQ ID NO: 193917 - DNA, 25 bp, Canis familiaris
tactgggaagccacacaggtctcgt

SEQ ID NO: 193918 - DNA, 25 bp, Canis familiaris
tacagggaacggtcagcaggtcccc

SEQ ID NO: 193919 - DNA, 25 bp, Canis familiaris
tacgggaaaaaggcgcagccccact

SEQ ID NO: 193920 - DNA, 25 bp, Canis familiaris
tacggggggaagaccacacactaca

SEQ ID NO: 193921 - DNA, 25 bp, Canis familiaris
tacagggtgtggtgatccacccccc

SEQ ID NO: 193922 - DNA, 25 bp, Canis familiaris
tacagatgacggttccatcgacgcc

SEQ ID NO: 193923 - DNA, 25 bp, Canis familiaris
tacgtgccgcggaaatgctccgcca

SEQ ID NO: 193924 - DNA, 25 bp, Canis familiaris
tacccctcaggagggtcacaggcac

SEQ ID NO: 193925 - DNA, 25 bp, Canis familiaris
tacacagaatcgggcggtcgggccg

SEQ ID NO: 193926 - DNA, 25 bp, Canis familiaris
tacagcgagtcggggagccgcatgg

SEQ ID NO: 193927 - DNA, 25 bp, Canis familiaris
tactggagtgcgtgagcctggtgga

SEQ ID NO: 193928 - DNA, 25 bp, Canis familiaris
tactaggcgagatcagacatgggaa

SEQ ID NO: 193929 - DNA, 25 bp, Canis familiaris
tactctgggcagttcccgaggacaa

SEQ ID NO: 193930 - DNA, 25 bp, Canis familiaris
tacttgggcgagtctcagggcaacc

SEQ ID NO: 193931 - DNA, 25 bp, Canis familiaris
tactgactgatccacgtcagggcca

SEQ ID NO: 193932 - DNA, 25 bp, Canis familiaris
tactcacattcacacgcgattgcgc

SEQ ID NO: 193933 - DNA, 25 bp, Canis familiaris
tacttcctgaagcgcatttctgcat

SEQ ID NO: 193934 - DNA, 25 bp, Canis familiaris
tacattctcagaagatggttcggca

SEQ ID NO: 193935 - DNA, 25 bp, Canis familiaris
tactactcaaggtcagtctgagctg

SEQ ID NO: 193936 - DNA, 25 bp, Canis familiaris
tacagactaagttcacatggtgtta

SEQ ID NO: 193937 - DNA, 25 bp, Canis familiaris
tacagactttgatatgtgtgtgtgt

SEQ ID NO: 193938 - DNA, 25 bp, Canis familiaris
tacaggctggttccaggtgctgctc

SEQ ID NO: 193939 - DNA, 25 bp, Canis familiaris
tacagcgtgttattaggtgcctccc

SEQ ID NO: 193940 - DNA, 25 bp, Canis familiaris
tacactggtgttacagggcctgtct

SEQ ID NO: 193941 - DNA, 25 bp, Canis familiaris
tacactactattaactaggcttcga

SEQ ID NO: 193942 - DNA, 25 bp, Canis familiaris
tacacttccattagttacgtctctt

SEQ ID NO: 193943 - DNA, 25 bp, Canis familiaris
tacactccaattagtaaagacaaat

SEQ ID NO: 193944 - DNA, 25 bp, Canis familiaris
tacactcaaattagtaaagaccaat

SEQ ID NO: 193945 - DNA, 25 bp, Canis familiaris
tacactcacaacactagacaaccaa

SEQ ID NO: 193946 - DNA, 25 bp, Canis familiaris
tacaccccagcaaccgaagaagaaa

SEQ ID NO: 193947 - DNA, 25 bp, Canis familiaris
tacagcacccccagctggaaagaca

SEQ ID NO: 193948 - DNA, 25 bp, Canis familiaris
tacacttccctccgctgaagaagaa

SEQ ID NO: 193949 - DNA, 25 bp, Canis familiaris
tacactttccccatgccatgaaaaa

SEQ ID NO: 193950 - DNA, 25 bp, Canis familiaris
tactttacccagttcagctgaataa

SEQ ID NO: 193951 - DNA, 25 bp, Canis familiaris
tacatttacacatctagcagtcagt

SEQ ID NO: 193952 - DNA, 25 bp, Canis familiaris
tacatgtaaatctccgcgacagaga

SEQ ID NO: 193953 - DNA, 25 bp, Canis familiaris
tactttgcagcttaccccaagagat

SEQ ID NO: 193954 - DNA, 25 bp, Canis familiaris
tacacttccatgaacatcccaatga

SEQ ID NO: 193955 - DNA, 25 bp, Canis familiaris
tacactggccagaccagcaaccaga

SEQ ID NO: 193956 - DNA, 25 bp, Canis familiaris
tacacttgcctcttagaacacacat

SEQ ID NO: 193957 - DNA, 25 bp, Canis familiaris
tacactctcgtctcaagtcacatat

SEQ ID NO: 193958 - DNA, 25 bp, Canis familiaris
tacgtgcacgcgcacacaaacacac

SEQ ID NO: 193959 - DNA, 25 bp, Canis familiaris
tacagacaactcaacaccaaacaca

SEQ ID NO: 193960 - DNA, 25 bp, Canis familiaris
tacagtctgaccacagcactgaccg

SEQ ID NO: 193961 - DNA, 25 bp, Canis familiaris
tacttccacgcggagccatgaacgt

SEQ ID NO: 193962 - DNA, 25 bp, Canis familiaris
tacgcctgaagcctacacgaaagtt

SEQ ID NO: 193963 - DNA, 25 bp, Canis familiaris
tacgcctgaagcctacacgaaagtt

SEQ ID NO: 193964 - DNA, 25 bp, Canis familiaris
tacgcctgaagcctacacgaaagtt

SEQ ID NO: 193965 - DNA, 25 bp, Canis familiaris
tacgcctgaagcctacacgaaagtt

SEQ ID NO: 193966 - DNA, 25 bp, Canis familiaris
tacgcctgaagcctacacgaaagtt

SEQ ID NO: 193967 - DNA, 25 bp, Canis familiaris
tactcacgacacccagcagagaatg

SEQ ID NO: 193968 - DNA, 25 bp, Canis familiaris
tactacagacgaccacgcagtggac

SEQ ID NO: 193969 - DNA, 25 bp, Canis familiaris
tacaccaggctcaacaggccatgga

SEQ ID NO: 193970 - DNA, 25 bp, Canis familiaris
tacaccatgagccaccagagctctg

SEQ ID NO: 193971 - DNA, 25 bp, Canis familiaris
tactccgtgcagtcggacatctgga

SEQ ID NO: 193972 - DNA, 25 bp, Canis familiaris
tacagcgcaagtccgattctctaga

SEQ ID NO: 193973 - DNA, 25 bp, Canis familiaris
tacatgtggcggtcaatcttcttag

SEQ ID NO: 193974 - DNA, 25 bp, Canis familiaris
tacagctgggtgtgactccagtaaa

SEQ ID NO: 193975 - DNA, 25 bp, Canis familiaris
tacagggtgatatctccatagttat

SEQ ID NO: 193976 - DNA, 25 bp, Canis familiaris
tacatggatgtttctgcttctagct

SEQ ID NO: 193977 - DNA, 25 bp, Canis familiaris
tacatggtgtacttttcagcctcca

SEQ ID NO: 193978 - DNA, 25 bp, Canis familiaris
tacatcgcggacatgtgtaccttcc

SEQ ID NO: 193979 - DNA, 25 bp, Canis familiaris
taccgggaccttgaccttaatagca

SEQ ID NO: 193980 - DNA, 25 bp, Canis familiaris
tacccggactttacttctaatgact

SEQ ID NO: 193981 - DNA, 25 bp, Canis familiaris
tacccaaaatgcaccttgtaaactc

SEQ ID NO: 193982 - DNA, 25 bp, Canis familiaris
tacaccaaagtgtacatctattaca

SEQ ID NO: 193983 - DNA, 25 bp, Canis familiaris
tacccatgacgttgaattgaacctg

SEQ ID NO: 193984 - DNA, 25 bp, Canis familiaris
tacgtatagagttgccttgtacctg

SEQ ID NO: 193985 - DNA, 25 bp, Canis familiaris
tacagtaagtgtactcttcatcccc

SEQ ID NO: 193986 - DNA, 25 bp, Canis familiaris
tacgagaaagactctgtcatccccc

SEQ ID NO: 193987 - DNA, 25 bp, Canis familiaris
tacggaaagtctctgtactccttca

SEQ ID NO: 193988 - DNA, 25 bp, Canis familiaris
tacggaatagttcgttttgatcgta

SEQ ID NO: 193989 - DNA, 25 bp, Canis familiaris
tacggataggttcttttgtatcgta

SEQ ID NO: 193990 - DNA, 25 bp, Canis familiaris
tactttgggactcgtttttgcacac

SEQ ID NO: 193991 - DNA, 25 bp, Canis familiaris
tagcccagggccatggtttgctgac

SEQ ID NO: 193992 - DNA, 25 bp, Canis familiaris
tacattcagagtgctgggtttctac

SEQ ID NO: 193993 - DNA, 25 bp, Canis familiaris
tactctaggggtcagtgtcctgctc

SEQ ID NO: 193994 - DNA, 25 bp, Canis familiaris
tactcttcggtttagttcttcactc

SEQ ID NO: 193995 - DNA, 25 bp, Canis familiaris
tactgtcctgactcaattctttcat

SEQ ID NO: 193996 - DNA, 25 bp, Canis familiaris
tacttcttactgtttcctttatgca

SEQ ID NO: 193997 - DNA, 25 bp, Canis familiaris
tacatttcctattttcgcattttca

SEQ ID NO: 193998 - DNA, 25 bp, Canis familiaris
tacagatttttttcctgctattcca

SEQ ID NO: 193999 - DNA, 25 bp, Canis familiaris
tacagaactttcctcttcaaacagc

SEQ ID NO: 194000 - DNA, 25 bp, Canis familiaris
tacaggatttgtttcttaagtccct

SEQ ID NO: 194001 - DNA, 25 bp, Canis familiaris
tacatggcttttgaccacaacctcc

SEQ ID NO: 194002 - DNA, 25 bp, Canis familiaris
tacttgctctttggacaaaacacat

SEQ ID NO: 194003 - DNA, 25 bp, Canis familiaris
tacattgccttttgtccattaatca

SEQ ID NO: 194004 - DNA, 25 bp, Canis familiaris
tactggctttttaccctgaacaagg

SEQ ID NO: 194005 - DNA, 25 bp, Canis familiaris
tactttgttcttaccctaatccaat

SEQ ID NO: 194006 - DNA, 25 bp, Canis familiaris
tacttcttacgaaaacttgagccaa

SEQ ID NO: 194007 - DNA, 25 bp, Canis familiaris
tacttcatagaccacaacaccaaaa

SEQ ID NO: 194008 - DNA, 25 bp, Canis familiaris
taccctagaccaggctggcctagca

SEQ ID NO: 194009 - DNA, 25 bp, Canis familiaris
tacccggttcagcctggctcggcaa

SEQ ID NO: 194010 - DNA, 25 bp, Canis familiaris
tactcttgttccaactgtcctggaa

SEQ ID NO: 194011 - DNA, 25 bp, Canis familiaris
tactattttatttcagacctaagca

SEQ ID NO: 194012 - DNA, 25 bp, Canis familiaris
tagcttttgacttctccaccaaagt

SEQ ID NO: 194013 - DNA, 25 bp, Canis familiaris
tacttgtctcctttgccaatcaaat

SEQ ID NO: 194014 - DNA, 25 bp, Canis familiaris
tacatgttcatctcttgccaaataa

SEQ ID NO: 194015 - DNA, 25 bp, Canis familiaris
tacatttcaatttcagcctgattaa

SEQ ID NO: 194016 - DNA, 25 bp, Canis familiaris
tactgttcaatgggcaccgttcacg

SEQ ID NO: 194017 - DNA, 25 bp, Canis familiaris
tactttcattgccagcctaattacc

SEQ ID NO: 194018 - DNA, 25 bp, Canis familiaris
tactatcctatttcctatattccca

SEQ ID NO: 194019 - DNA, 25 bp, Canis familiaris
tactatcgctcttacctagggcggc

SEQ ID NO: 194020 - DNA, 25 bp, Canis familiaris
tactatggtcttccacaagcgtgcg

SEQ ID NO: 194021 - DNA, 25 bp, Canis familiaris
tacctgggtgtcccaacgtggctaa

SEQ ID NO: 194022 - DNA, 25 bp, Canis familiaris
tacacggggttaccagagtcactat

SEQ ID NO: 194023 - DNA, 25 bp, Canis familiaris
tacccggattttccagggatcacat

SEQ ID NO: 194024 - DNA, 25 bp, Canis familiaris
taccccgtcccatgaggagacgcac

SEQ ID NO: 194025 - DNA, 25 bp, Canis familiaris
tacctctcagtagaaaggctaacca

SEQ ID NO: 194026 - DNA, 25 bp, Canis familiaris
tacacccacactgttagctgctaac

SEQ ID NO: 194027 - DNA, 25 bp, Canis familiaris
tacacggacctgctgtcggtcatag

SEQ ID NO: 194028 - DNA, 25 bp, Canis familiaris
taccggtcgatgcaacgagtgatga

SEQ ID NO: 194029 - DNA, 25 bp, Canis familiaris
tacggcgactggccaagcgaggagg

SEQ ID NO: 194030 - DNA, 25 bp, Canis familiaris
tactgggcagctcccacattagtgg

SEQ ID NO: 194031 - DNA, 25 bp, Canis familiaris
tactcagtagtcccaagtgagttgc

SEQ ID NO: 194032 - DNA, 25 bp, Canis familiaris
tactcggagaccaggtgcagttccc

SEQ ID NO: 194033 - DNA, 25 bp, Canis familiaris
tactacacctccaggatgcagttcc

SEQ ID NO: 194034 - DNA, 25 bp, Canis familiaris
tacttccccagccgggaatgtcgtc

SEQ ID NO: 194035 - DNA, 25 bp, Canis familiaris
tacctacctacctggttgatcctgc

SEQ ID NO: 194036 - DNA, 25 bp, Canis familiaris
tagcctacctacaaaagggaccact

SEQ ID NO: 194037 - DNA, 25 bp, Canis familiaris
tacaccaccaacaaaatggtctttt

SEQ ID NO: 194038 - DNA, 25 bp, Canis familiaris
tacattccaccacaaatgtactctt

SEQ ID NO: 194039 - DNA, 25 bp, Canis familiaris
tactttaaccactgagaactctttt

SEQ ID NO: 194040 - DNA, 25 bp, Canis familiaris
tactttcttccctgatagatgcatc

SEQ ID NO: 194041 - DNA, 25 bp, Canis familiaris
tactttcctccttattagacattta

SEQ ID NO: 194042 - DNA, 25 bp, Canis familiaris
tactgttcctacttatgtaccaaaa

SEQ ID NO: 194043 - DNA, 25 bp, Canis familiaris
tacagattcctgtttatatcccaat

SEQ ID NO: 194044 - DNA, 25 bp, Canis familiaris
tactttgcattgtaagttgcccaat

SEQ ID NO: 194045 - DNA, 25 bp, Canis familiaris
tactcttgctcgtgagggccaatct

SEQ ID NO: 194046 - DNA, 25 bp, Canis familiaris
tacttgtgccagtgtgggccagacc

SEQ ID NO: 194047 - DNA, 25 bp, Canis familiaris
tacgttcaagggtgaccaacctttg

SEQ ID NO: 194048 - DNA, 25 bp, Canis familiaris
taccgcatactgcagagggccaacc

SEQ ID NO: 194049 - DNA, 25 bp, Canis familiaris
tactgacacgtgccgaagtccaacc

SEQ ID NO: 194050 - DNA, 25 bp, Canis familiaris
tactcatcactttggaatggctgaa

SEQ ID NO: 194051 - DNA, 25 bp, Canis familiaris
tacattacctcggacatgtcatggt

SEQ ID NO: 194052 - DNA, 25 bp, Canis familiaris
tacattcccaccaatagtgcatgga

SEQ ID NO: 194053 - DNA, 25 bp, Canis familiaris
tacagtccgcagggcatcagtgcta

SEQ ID NO: 194054 - DNA, 25 bp, Canis familiaris
tactgcccgcaaagctcgcgctaca

SEQ ID NO: 194055 - DNA, 25 bp, Canis familiaris
tacacctgaggaagtccagtaatat

SEQ ID NO: 194056 - DNA, 25 bp, Canis familiaris
tacatcactgggcgcctcaaagaat

SEQ ID NO: 194057 - DNA, 25 bp, Canis familiaris
taccagcttgccgcgtattagaaca

SEQ ID NO: 194058 - DNA, 25 bp, Canis familiaris
tacggatacatggctcgtttagtaa

SEQ ID NO: 194059 - DNA, 25 bp, Canis familiaris
tactggataactgtggtattctaga

SEQ ID NO: 194060 - DNA, 25 bp, Canis familiaris
tacttaaattttgtgaccatagagg

SEQ ID NO: 194061 - DNA, 25 bp, Canis familiaris
tacttaagagacttggagcaccagg

SEQ ID NO: 194062 - DNA, 25 bp, Canis familiaris
tactttatgtactgtagagtatgtg

SEQ ID NO: 194063 - DNA, 25 bp, Canis familiaris
tacttgtttccaactcaaaatctgt

SEQ ID NO: 194064 - DNA, 25 bp, Canis familiaris
tacgtggtttccctaagatgtcgat

SEQ ID NO: 194065 - DNA, 25 bp, Canis familiaris
tacatgctgtgtttcctttgggttt

SEQ ID NO: 194066 - DNA, 25 bp, Canis familiaris
tactagtttttgttctgtcgtttca

SEQ ID NO: 194067 - DNA, 25 bp, Canis familiaris
tacataggtttcttattactttctc

SEQ ID NO: 194068 - DNA, 25 bp, Canis familiaris
tacatttgttctttgactcgtttcc

SEQ ID NO: 194069 - DNA, 25 bp, Canis familiaris
tacatgttgtccaaatccctttttt

SEQ ID NO: 194070 - DNA, 25 bp, Canis familiaris
tacatccattcctattctttttttt

SEQ ID NO: 194071 - DNA, 25 bp, Canis familiaris
tacttcttggaaactttacttgtgg

SEQ ID NO: 194072 - DNA, 25 bp, Canis familiaris
tactggtttgtttattctacggttg

SEQ ID NO: 194073 - DNA, 25 bp, Canis familiaris
tactgtattttgtgtgttacgttta

SEQ ID NO: 194074 - DNA, 25 bp, Canis familiaris
tacttatttctgttttaccctgatt

SEQ ID NO: 194075 - DNA, 25 bp, Canis familiaris
tacagtctttttcttatcttctatt

SEQ ID NO: 194076 - DNA, 25 bp, Canis familiaris
tacttcatggtttggttatcttgtt

SEQ ID NO: 194077 - DNA, 25 bp, Canis familiaris
tacttttctttgattagttgtcagc

SEQ ID NO: 194078 - DNA, 25 bp, Canis familiaris
tacggtttattggtttgtctgaaga

SEQ ID NO: 194079 - DNA, 25 bp, Canis familiaris
tacatcgtttcctttcatttctaaa

SEQ ID NO: 194080 - DNA, 25 bp, Canis familiaris
tacagagctgttgcattctttttaa

SEQ ID NO: 194081 - DNA, 25 bp, Canis familiaris
tacagcctacaaccatctttttgaa

SEQ ID NO: 194082 - DNA, 25 bp, Canis familiaris
tacctctacctgccagtattcattg

SEQ ID NO: 194083 - DNA, 25 bp, Canis familiaris
tacatcgtgacctgtgtgattatgc

SEQ ID NO: 194084 - DNA, 25 bp, Canis familiaris
tactgggagccactgttgctttccc

SEQ ID NO: 194085 - DNA, 25 bp, Canis familiaris
tacttggaatttctcacatctcacc

SEQ ID NO: 194086 - DNA, 25 bp, Canis familiaris
tacttggactattacctcactcatt

SEQ ID NO: 194087 - DNA, 25 bp, Canis familiaris
tacttggactattacctcactcatt

SEQ ID NO: 194088 - DNA, 25 bp, Canis familiaris
tacatttacttgtcacacctcttta

SEQ ID NO: 194089 - DNA, 25 bp, Canis familiaris
tacatgagtactaaccacacctgct

SEQ ID NO: 194090 - DNA, 25 bp, Canis familiaris
tacagtgctaaaatcgagtctcctc

SEQ ID NO: 194091 - DNA, 25 bp, Canis familiaris
tacagatgtcacggtcaggttttca

SEQ ID NO: 194092 - DNA, 25 bp, Canis familiaris
tacaggtgctcctcaagttcttgac

SEQ ID NO: 194093 - DNA, 25 bp, Canis familiaris
tacagggccagaacttcttcctgca

SEQ ID NO: 194094 - DNA, 25 bp, Canis familiaris
tacggtcatctggactttgatcttg

SEQ ID NO: 194095 - DNA, 25 bp, Canis familiaris
tacagcgtgacggacttggtgttct

SEQ ID NO: 194096 - DNA, 25 bp, Canis familiaris
tacaggaaccagtgctggagtccat

SEQ ID NO: 194097 - DNA, 25 bp, Canis familiaris
tactggaacttctctgggttctcgc

SEQ ID NO: 194098 - DNA, 25 bp, Canis familiaris
tactcctacttcgggagcggtaccg

SEQ ID NO: 194099 - DNA, 25 bp, Canis familiaris
tactcctgacttgggggttgctgac

SEQ ID NO: 194100 - DNA, 25 bp, Canis familiaris
tacatccttcttttaaattgtcctt

SEQ ID NO: 194101 - DNA, 25 bp, Canis familiaris
tacagccttttttagcaaaacttca

SEQ ID NO: 194102 - DNA, 25 bp, Canis familiaris
tacagccttcactgctaacaaaccc

SEQ ID NO: 194103 - DNA, 25 bp, Canis familiaris
tacgactcctcaagctatacagacc

SEQ ID NO: 194104 - DNA, 25 bp, Canis familiaris
tactaatctcttactatccgattga

SEQ ID NO: 194105 - DNA, 25 bp, Canis familiaris
tactcaattcctatcaccactatgg

SEQ ID NO: 194106 - DNA, 25 bp, Canis familiaris
tacatatttggcatatctccctggc

SEQ ID NO: 194107 - DNA, 25 bp, Canis familiaris
tacatggtggtggtatctccgctga

SEQ ID NO: 194108 - DNA, 25 bp, Canis familiaris
tacatggcgtgtgctcacgcgtgca

SEQ ID NO: 194109 - DNA, 25 bp, Canis familiaris
tacagcagcggaagtggctggtcag

SEQ ID NO: 194110 - DNA, 25 bp, Canis familiaris
tacaggcaggtgctggcattgttgc

SEQ ID NO: 194111 - DNA, 25 bp, Canis familiaris
tacatggaggcgcgcgagggcatgc

SEQ ID NO: 194112 - DNA, 25 bp, Canis familiaris
tacaggaggcccagagctgactgac

SEQ ID NO: 194113 - DNA, 25 bp, Canis familiaris
tacaggaccctcagcagaatctgga

SEQ ID NO: 194114 - DNA, 25 bp, Canis familiaris
tacattgcaccctaggaagatctgg

SEQ ID NO: 194115 - DNA, 25 bp, Canis familiaris
tacagagcctgcgaagggccttgtc

SEQ ID NO: 194116 - DNA, 25 bp, Canis familiaris
tacagagcctgccaagctgggagtt

SEQ ID NO: 194117 - DNA, 25 bp, Canis familiaris
tactgaccctaatttggatggctat

SEQ ID NO: 194118 - DNA, 25 bp, Canis familiaris
tacagtccctaagtgttgggtgttt

SEQ ID NO: 194119 - DNA, 25 bp, Canis familiaris
tacttcctgtaacttgcgggggttg

SEQ ID NO: 194120 - DNA, 25 bp, Canis familiaris
tacatcctcctaaactgggtgggct

SEQ ID NO: 194121 - DNA, 25 bp, Canis familiaris
tactctttgctaggacctggttggc

SEQ ID NO: 194122 - DNA, 25 bp, Canis familiaris
tactttttaggattgtgattaggtc

SEQ ID NO: 194123 - DNA, 25 bp, Canis familiaris
tacttttgaagcgattctttaagac

SEQ ID NO: 194124 - DNA, 25 bp, Canis familiaris
tacttcttgagatattgcttagcat

SEQ ID NO: 194125 - DNA, 25 bp, Canis familiaris
tactctccatgactaactgtgtaag

SEQ ID NO: 194126 - DNA, 25 bp, Canis familiaris
tacataacgcgttccgtgaaagtca

SEQ ID NO: 194127 - DNA, 25 bp, Canis familiaris
tattttccatgttcccagaattcct

SEQ ID NO: 194128 - DNA, 25 bp, Canis familiaris
tattacccaaacagcagaactcctc

SEQ ID NO: 194129 - DNA, 25 bp, Canis familiaris
ttaaagccacccacagtggccagct

SEQ ID NO: 194130 - DNA, 25 bp, Canis familiaris
tacgaacctttcccaatggccaata

SEQ ID NO: 194131 - DNA, 25 bp, Canis familiaris
tataaccttttaccacgaccaatat

SEQ ID NO: 194132 - DNA, 25 bp, Canis familiaris
ttatagccaatacaaccgggcaaga

SEQ ID NO: 194133 - DNA, 25 bp, Canis familiaris
tttacgcaatagcgacgcgctggcg

SEQ ID NO: 194134 - DNA, 25 bp, Canis familiaris
tactacagcatcagggcctgcctgt

SEQ ID NO: 194135 - DNA, 25 bp, Canis familiaris
tacagtcagttggggctgtgcctgg

SEQ ID NO: 194136 - DNA, 25 bp, Canis familiaris
tactgacggagggtgttgcctggtg

SEQ ID NO: 194137 - DNA, 25 bp, Canis familiaris
tacatccctagggataccctgggtg

SEQ ID NO: 194138 - DNA, 25 bp, Canis familiaris
tactcctcaagggtgtcctgtgggg

SEQ ID NO: 194139 - DNA, 25 bp, Canis familiaris
tacatccgcaagaccaggcctgatg

SEQ ID NO: 194140 - DNA, 25 bp, Canis familiaris
tacagaccagagaccaagcaagaga

SEQ ID NO: 194141 - DNA, 25 bp, Canis familiaris
tacgagaaggcaggaacaggatgca

SEQ ID NO: 194142 - DNA, 25 bp, Canis familiaris
tactgctggggaagacacctgtcac

SEQ ID NO: 194143 - DNA, 25 bp, Canis familiaris
tacgctgatgcccatggggactggc

SEQ ID NO: 194144 - DNA, 25 bp, Canis familiaris
tacagttctccagtgggacgtccgt

SEQ ID NO: 194145 - DNA, 25 bp, Canis familiaris
tacgtgttccaatagacttccagct

SEQ ID NO: 194146 - DNA, 25 bp, Canis familiaris
tactgtttccagttgaatggttggc

SEQ ID NO: 194147 - DNA, 25 bp, Canis familiaris
tacttttgccacatgaactctttcc

SEQ ID NO: 194148 - DNA, 25 bp, Canis familiaris
tactgtaaagggtaattgtttcctg

SEQ ID NO: 194149 - DNA, 25 bp, Canis familiaris
tagcatgtaacctgtaatattattt

SEQ ID NO: 194150 - DNA, 25 bp, Canis familiaris
tacttaaatacgcataattcagatt

SEQ ID NO: 194151 - DNA, 25 bp, Canis familiaris
tacttacacaacgtgatattatcac

SEQ ID NO: 194152 - DNA, 25 bp, Canis familiaris
tacttaaatttttgcattcacgcca

SEQ ID NO: 194153 - DNA, 25 bp, Canis familiaris
tacagtatatttttagcatccccta

SEQ ID NO: 194154 - DNA, 25 bp, Canis familiaris
tactctaatcccttagcatcagctc

SEQ ID NO: 194155 - DNA, 25 bp, Canis familiaris
tactttctcccttcatatgagctac

SEQ ID NO: 194156 - DNA, 25 bp, Canis familiaris
tactatttctacttcatatgaggac

SEQ ID NO: 194157 - DNA, 25 bp, Canis familiaris
tacagtatcttatatcacacagaga

SEQ ID NO: 194158 - DNA, 25 bp, Canis familiaris
tacattatctgttctacctcggtgt

SEQ ID NO: 194159 - DNA, 25 bp, Canis familiaris
tacatatacataactgctctttggt

SEQ ID NO: 194160 - DNA, 25 bp, Canis familiaris
tactgtacgcatactcactacggta

SEQ ID NO: 194161 - DNA, 25 bp, Canis familiaris
tacatacctgtgaccactcttggga

SEQ ID NO: 194162 - DNA, 25 bp, Canis familiaris
tactacctgaatgacctggagcgca

SEQ ID NO: 194163 - DNA, 25 bp, Canis familiaris
tactaccttatattgcctaaccact

SEQ ID NO: 194164 - DNA, 25 bp, Canis familiaris
tactactattagacatgccttacag

SEQ ID NO: 194165 - DNA, 25 bp, Canis familiaris
tactacctcatgttgcaccttaaac

SEQ ID NO: 194166 - DNA, 25 bp, Canis familiaris
tacttcaccatgatactctttcaga

SEQ ID NO: 194167 - DNA, 25 bp, Canis familiaris
tacttcccagttatgatttggatag

SEQ ID NO: 194168 - DNA, 25 bp, Canis familiaris
tactatcccagttatcctttgtgtt

SEQ ID NO: 194169 - DNA, 25 bp, Canis familiaris
tacttcaccctgtgcaatgtggtca

SEQ ID NO: 194170 - DNA, 25 bp, Canis familiaris
tacttcatccctgtcatctgatggg

SEQ ID NO: 194171 - DNA, 25 bp, Canis familiaris
tacagtatatttgtctgctattctg

SEQ ID NO: 194172 - DNA, 25 bp, Canis familiaris
tacaggaagtcccttgccatcctaa

SEQ ID NO: 194173 - DNA, 25 bp, Canis familiaris
tacagtcaagtctgctgtgcggcct

SEQ ID NO: 194174 - DNA, 25 bp, Canis familiaris
tacagtacagcctttgtgctggaaa

SEQ ID NO: 194175 - DNA, 25 bp, Canis familiaris
tacagtaatgtcttttgcattggga

SEQ ID NO: 194176 - DNA, 25 bp, Canis familiaris
tacagtggctgtattctgctcgtgg

SEQ ID NO: 194177 - DNA, 25 bp, Canis familiaris
tacagtgccgtcaactcacttgggt

SEQ ID NO: 194178 - DNA, 25 bp, Canis familiaris
tacagtccaatctagtccattaggc

SEQ ID NO: 194179 - DNA, 25 bp, Canis familiaris
tatcccgcaactttactgaactcag

SEQ ID NO: 194180 - DNA, 25 bp, Canis familiaris
tactacgatgactactgaccaacca

SEQ ID NO: 194181 - DNA, 25 bp, Canis familiaris
tactatgcatataaacggcccctgg

SEQ ID NO: 194182 - DNA, 25 bp, Canis familiaris
tacttgtatatacctggcctctgat

SEQ ID NO: 194183 - DNA, 25 bp, Canis familiaris
tacttgttgacaactggccgcttac

SEQ ID NO: 194184 - DNA, 25 bp, Canis familiaris
tacatttcagactcagtccacttcc

SEQ ID NO: 194185 - DNA, 25 bp, Canis familiaris
tacttgctgcaagtacattcctcct

SEQ ID NO: 194186 - DNA, 25 bp, Canis familiaris
tacattcatgtagcaagtcctctcc

SEQ ID NO: 194187 - DNA, 25 bp, Canis familiaris
tacattctctggtgaacactctctc

SEQ ID NO: 194188 - DNA, 25 bp, Canis familiaris
tacatgctctctggacagatctccc

SEQ ID NO: 194189 - DNA, 25 bp, Canis familiaris
tacatgccatatgcacataccacct

SEQ ID NO: 194190 - DNA, 25 bp, Canis familiaris
tacatgcgtagccacagacctggtc

SEQ ID NO: 194191 - DNA, 25 bp, Canis familiaris
tacaggcagagcccagcactgagag

SEQ ID NO: 194192 - DNA, 25 bp, Canis familiaris
tacaggggcgattgctgcgatgctg

SEQ ID NO: 194193 - DNA, 25 bp, Canis familiaris
tacatgtgtggccaaatcagtgtga

SEQ ID NO: 194194 - DNA, 25 bp, Canis familiaris
tacgtggtgcgaaatcattggtggc

SEQ ID NO: 194195 - DNA, 25 bp, Canis familiaris
tactctgtgtggattgggggctcca

SEQ ID NO: 194196 - DNA, 25 bp, Canis familiaris
tactagattgggttgaggaccacca

SEQ ID NO: 194197 - DNA, 25 bp, Canis familiaris
tactggcaattgctcgagtacccac

SEQ ID NO: 194198 - DNA, 25 bp, Canis familiaris
tactagcacaattcaaggatatcct

SEQ ID NO: 194199 - DNA, 25 bp, Canis familiaris
tacaggacactttcaggaatgtgtg

SEQ ID NO: 194200 - DNA, 25 bp, Canis familiaris
taccagaattcttcctgacatttga

SEQ ID NO: 194201 - DNA, 25 bp, Canis familiaris
tacgaatgactttctcgattttatg

SEQ ID NO: 194202 - DNA, 25 bp, Canis familiaris
tacgagatcacgtttgtattttcaa

SEQ ID NO: 194203 - DNA, 25 bp, Canis familiaris
tactgtgtccagtttgcttttaaaa

SEQ ID NO: 194204 - DNA, 25 bp, Canis familiaris
tacatctgtaattcattcttttcca

SEQ ID NO: 194205 - DNA, 25 bp, Canis familiaris
tacatcaccatactttctttttgac

SEQ ID NO: 194206 - DNA, 25 bp, Canis familiaris
tactgatcagctctactcttttgga

SEQ ID NO: 194207 - DNA, 25 bp, Canis familiaris
tacagtggcttatcttttttatttt

SEQ ID NO: 194208 - DNA, 25 bp, Canis familiaris
tacagggctgtttttttccagtcct

SEQ ID NO: 194209 - DNA, 25 bp, Canis familiaris
tacagggatgctgtttttccattct

SEQ ID NO: 194210 - DNA, 25 bp, Canis familiaris
tacagggactcttttatttctttct

SEQ ID NO: 194211 - DNA, 25 bp, Canis familiaris
tacgttgacttttttttctactctg

SEQ ID NO: 194212 - DNA, 25 bp, Canis familiaris
tacagtttaatttttttcacaatcg

SEQ ID NO: 194213 - DNA, 25 bp, Canis familiaris
tacagtttcctttgttttaagcatt

SEQ ID NO: 194214 - DNA, 25 bp, Canis familiaris
tacagtttccatttatttgtattaa

SEQ ID NO: 194215 - DNA, 25 bp, Canis familiaris
tacatggttccaaattttcttcaaa

SEQ ID NO: 194216 - DNA, 25 bp, Canis familiaris
tacttgtttattatttcccatcggc

SEQ ID NO: 194217 - DNA, 25 bp, Canis familiaris
tacagtgttgatttaccattccccg

SEQ ID NO: 194218 - DNA, 25 bp, Canis familiaris
tacggttgtatttacttcccacatc

SEQ ID NO: 194219 - DNA, 25 bp, Canis familiaris
taccagtttatttattctactagcc

SEQ ID NO: 194220 - DNA, 25 bp, Canis familiaris
tactacgttcatctatttctctatc

SEQ ID NO: 194221 - DNA, 25 bp, Canis familiaris
tactacgttcatctatttctctatc

SEQ ID NO: 194222 - DNA, 25 bp, Canis familiaris
tactacgttcatctatttctctatc

SEQ ID NO: 194223 - DNA, 25 bp, Canis familiaris
tacatacttgttatattctcttgat

SEQ ID NO: 194224 - DNA, 25 bp, Canis familiaris
tactctgccgtgtgctattttagtg

SEQ ID NO: 194225 - DNA, 25 bp, Canis familiaris
tacttgccgctatgttgttctcaat

SEQ ID NO: 194226 - DNA, 25 bp, Canis familiaris
tactcaggctgttatttttctcaat

SEQ ID NO: 194227 - DNA, 25 bp, Canis familiaris
tactacgcaatattttattctctca

SEQ ID NO: 194228 - DNA, 25 bp, Canis familiaris
tactactcatcattcttcacatatt

SEQ ID NO: 194229 - DNA, 25 bp, Canis familiaris
tactcctggcaatatcagcatagat

SEQ ID NO: 194230 - DNA, 25 bp, Canis familiaris
tacgcctggcactgttgacatgtag

SEQ ID NO: 194231 - DNA, 25 bp, Canis familiaris
tactgtttactttctgatcgataga

SEQ ID NO: 194232 - DNA, 25 bp, Canis familiaris
tactttcttgcttacttctatagca

SEQ ID NO: 194233 - DNA, 25 bp, Canis familiaris
tactattctttcttcttgcacataa

SEQ ID NO: 194234 - DNA, 25 bp, Canis familiaris
tacttttattttttgcctaacagct

SEQ ID NO: 194235 - DNA, 25 bp, Canis familiaris
tacttcttttagctgtttaactttg

SEQ ID NO: 194236 - DNA, 25 bp, Canis familiaris
tacggctttctgggttgtaaacatg

SEQ ID NO: 194237 - DNA, 25 bp, Canis familiaris
tacgggttgcggaagctggaagcct

SEQ ID NO: 194238 - DNA, 25 bp, Canis familiaris
taggggagggttctggcaacctgag

SEQ ID NO: 194239 - DNA, 25 bp, Canis familiaris
taggaaaaagggccgaccacctgca

SEQ ID NO: 194240 - DNA, 25 bp, Canis familiaris
tagccccaaaggcagctgcaggcac

SEQ ID NO: 194241 - DNA, 25 bp, Canis familiaris
tactacagcaaacggcctggatccc

SEQ ID NO: 194242 - DNA, 25 bp, Canis familiaris
tactcgcagcaaggccgatttgtcc

SEQ ID NO: 194243 - DNA, 25 bp, Canis familiaris
tactccatcaaggcgctggtgcaga

SEQ ID NO: 194244 - DNA, 25 bp, Canis familiaris
taccctcacaggactgggctgcaaa

SEQ ID NO: 194245 - DNA, 25 bp, Canis familiaris
tactctctgaagcgtgataccagaa

SEQ ID NO: 194246 - DNA, 25 bp, Canis familiaris
tacattgctcagtggttcccaggac

SEQ ID NO: 194247 - DNA, 25 bp, Canis familiaris
tacatcttgcagtcaggattcctag

SEQ ID NO: 194248 - DNA, 25 bp, Canis familiaris
tactctagaggcttttactgatggc

SEQ ID NO: 194249 - DNA, 25 bp, Canis familiaris
tactttgagagctttaatgatgacc

SEQ ID NO: 194250 - DNA, 25 bp, Canis familiaris
tactgtgatagtttagaaatatccc

SEQ ID NO: 194251 - DNA, 25 bp, Canis familiaris
tacagtgtattctcagccatgacat

SEQ ID NO: 194252 - DNA, 25 bp, Canis familiaris
tacagtgaattcttccatctggcaa

SEQ ID NO: 194253 - DNA, 25 bp, Canis familiaris
tacagtgaaactgcgaatggctcat

SEQ ID NO: 194254 - DNA, 25 bp, Canis familiaris
tacgtacgagctgctgcagtcctac

SEQ ID NO: 194255 - DNA, 25 bp, Canis familiaris
tacttactggctgtgagtcctcaat

SEQ ID NO: 194256 - DNA, 25 bp, Canis familiaris
tacattacatttctgactttgaata

SEQ ID NO: 194257 - DNA, 25 bp, Canis familiaris
tactattctcttcctgactttaaaa

SEQ ID NO: 194258 - DNA, 25 bp, Canis familiaris
tacttcttcttcgatgttgtttaca

SEQ ID NO: 194259 - DNA, 25 bp, Canis familiaris
tactacttctctatatttttactta

SEQ ID NO: 194260 - DNA, 25 bp, Canis familiaris
tactaccgtttattttactgacttg

SEQ ID NO: 194261 - DNA, 25 bp, Canis familiaris
tactaccaatctaacacttgagtga

SEQ ID NO: 194262 - DNA, 25 bp, Canis familiaris
tactagccattcataaccgcaaggg

SEQ ID NO: 194263 - DNA, 25 bp, Canis familiaris
tacatcgtcgtacaacactgaaggg

SEQ ID NO: 194264 - DNA, 25 bp, Canis familiaris
tactcgcgggagaaacaccacggac

SEQ ID NO: 194265 - DNA, 25 bp, Canis familiaris
tacatccgtggcagcaagatccgct

SEQ ID NO: 194266 - DNA, 25 bp, Canis familiaris
tacataggtgtgagctacccgctgc

SEQ ID NO: 194267 - DNA, 25 bp, Canis familiaris
tacgagggctatgctctccctcacg

SEQ ID NO: 194268 - DNA, 25 bp, Canis familiaris
tacggggcatcaggtcttgcgattc

SEQ ID NO: 194269 - DNA, 25 bp, Canis familiaris
tacaggtctgattcttctgctcttt

SEQ ID NO: 194270 - DNA, 25 bp, Canis familiaris
tacaggctgctgttttcacatcctt

SEQ ID NO: 194271 - DNA, 25 bp, Canis familiaris
tacatcagtgctcatatgctccacc

SEQ ID NO: 194272 - DNA, 25 bp, Canis familiaris
tacatcctctcaaatgctaactcct

SEQ ID NO: 194273 - DNA, 25 bp, Canis familiaris
tactccccaatttaaactcttcaag

SEQ ID NO: 194274 - DNA, 25 bp, Canis familiaris
tactatcccagtaaggcagagttta

SEQ ID NO: 194275 - DNA, 25 bp, Canis familiaris
tactatcactccaggggtgtctcta

SEQ ID NO: 194276 - DNA, 25 bp, Canis familiaris
tacgagacctgcaggaggcgttctg

SEQ ID NO: 194277 - DNA, 25 bp, Canis familiaris
tacggacttttgacatgtcgctatg

SEQ ID NO: 194278 - DNA, 25 bp, Canis familiaris
tacggactgattcgactgtcctctt

SEQ ID NO: 194279 - DNA, 25 bp, Canis familiaris
tacaggacagctctgatctacctca

SEQ ID NO: 194280 - DNA, 25 bp, Canis familiaris
tacgagatccagtctgtgtacctga

SEQ ID NO: 194281 - DNA, 25 bp, Canis familiaris
tactgagcacccctgatgaagtgga

SEQ ID NO: 194282 - DNA, 25 bp, Canis familiaris
tagctgtgagccccatcaatagttt

SEQ ID NO: 194283 - DNA, 25 bp, Canis familiaris
tagctgatgggtgcatgcatgctca

SEQ ID NO: 194284 - DNA, 25 bp, Canis familiaris
tacgtggcagcaggctgaccatcct

SEQ ID NO: 194285 - DNA, 25 bp, Canis familiaris
tacgtgggatctcatcagctcacag

SEQ ID NO: 194286 - DNA, 25 bp, Canis familiaris
tactgggctatcaagctggctacga

SEQ ID NO: 194287 - DNA, 25 bp, Canis familiaris
tactgtggcttcctggtggcataaa

SEQ ID NO: 194288 - DNA, 25 bp, Canis familiaris
tacttgatgacgtctggtggcacca

SEQ ID NO: 194289 - DNA, 25 bp, Canis familiaris
tactctgagcctcgctcagctgagc

SEQ ID NO: 194290 - DNA, 25 bp, Canis familiaris
tacatctacatacgcaactacacac

SEQ ID NO: 194291 - DNA, 25 bp, Canis familiaris
tacatgcaactaaatacacacacac

SEQ ID NO: 194292 - DNA, 25 bp, Canis familiaris
tacatgccctagatcagaccaacat

SEQ ID NO: 194293 - DNA, 25 bp, Canis familiaris
tacaggactcattgtcagcctagaa

SEQ ID NO: 194294 - DNA, 25 bp, Canis familiaris
tacctactccacaagcctagaagct

SEQ ID NO: 194295 - DNA, 25 bp, Canis familiaris
tacttccccaacgtctagaacttgg

SEQ ID NO: 194296 - DNA, 25 bp, Canis familiaris
tacttccagccaaacctcaaaatat

SEQ ID NO: 194297 - DNA, 25 bp, Canis familiaris
tactcctcacctggcaactaaaact

SEQ ID NO: 194298 - DNA, 25 bp, Canis familiaris
tactcccctccataaaataatccac

SEQ ID NO: 194299 - DNA, 25 bp, Canis familiaris
tacgcccgtagcagagaactaatcg

SEQ ID NO: 194300 - DNA, 25 bp, Canis familiaris
tacatcccgggcataaatctcgtcc

SEQ ID NO: 194301 - DNA, 25 bp, Canis familiaris
taccccgaggattcaaatgtttcac

SEQ ID NO: 194302 - DNA, 25 bp, Canis familiaris
tacccaattcgaaccagtttacagc

SEQ ID NO: 194303 - DNA, 25 bp, Canis familiaris
tacccctctaaaggcaccgaaggct

SEQ ID NO: 194304 - DNA, 25 bp, Canis familiaris
tacatcccttaagatcagcccaaac

SEQ ID NO: 194305 - DNA, 25 bp, Canis familiaris
tacatttttggggagcgccctgagg

SEQ ID NO: 194306 - DNA, 25 bp, Canis familiaris
tacatgttttggctacaccctgaac

SEQ ID NO: 194307 - DNA, 25 bp, Canis familiaris
tacgtggtgggccgaaccggaagca

SEQ ID NO: 194308 - DNA, 25 bp, Canis familiaris
tacatgggcttggccgaagagctgg

SEQ ID NO: 194309 - DNA, 25 bp, Canis familiaris
tacaggcttctgccctgaaggcctg

SEQ ID NO: 194310 - DNA, 25 bp, Canis familiaris
tacatggccctgtgaaaagcctgtc

SEQ ID NO: 194311 - DNA, 25 bp, Canis familiaris
tacgtggcactttagaaactttcct

SEQ ID NO: 194312 - DNA, 25 bp, Canis familiaris
tactttcacttttaaaatgcctgtt

SEQ ID NO: 194313 - DNA, 25 bp, Canis familiaris
tactttccttgttacactgatctct

SEQ ID NO: 194314 - DNA, 25 bp, Canis familiaris
tacttctagactaacaactgatttt

SEQ ID NO: 194315 - DNA, 25 bp, Canis familiaris
tacttgttatgcatataaatatttt

SEQ ID NO: 194316 - DNA, 25 bp, Canis familiaris
tacgtgtttcatataatttctttta

SEQ ID NO: 194317 - DNA, 25 bp, Canis familiaris
tacgtgctcaagggttttacttctt

SEQ ID NO: 194318 - DNA, 25 bp, Canis familiaris
tactggccccatggcctgaagactt

SEQ ID NO: 194319 - DNA, 25 bp, Canis familiaris
tacttccttcattgcctgaagccta

SEQ ID NO: 194320 - DNA, 25 bp, Canis familiaris
tactttcttgcatgattgcagaggt

SEQ ID NO: 194321 - DNA, 25 bp, Canis familiaris
tagcatttcttataaggcaggtcta

SEQ ID NO: 194322 - DNA, 25 bp, Canis familiaris
tacatttctttaaaggccaatgtga

SEQ ID NO: 194323 - DNA, 25 bp, Canis familiaris
tacattcctttttaacccattcagt

SEQ ID NO: 194324 - DNA, 25 bp, Canis familiaris
tacattcacttcacttaaccatttg

SEQ ID NO: 194325 - DNA, 25 bp, Canis familiaris
tacatctagtgtatcatatggccca

SEQ ID NO: 194326 - DNA, 25 bp, Canis familiaris
tactcagagtccacaagggccacag

SEQ ID NO: 194327 - DNA, 25 bp, Canis familiaris
tactgcgagagccatgccaaggcgc

SEQ ID NO: 194328 - DNA, 25 bp, Canis familiaris
tacatgagaagcccccatgggccct

SEQ ID NO: 194329 - DNA, 25 bp, Canis familiaris
tacatgaaggcacggcctttccctg

SEQ ID NO: 194330 - DNA, 25 bp, Canis familiaris
tacatggtgaaaagccttgtgccaa

SEQ ID NO: 194331 - DNA, 25 bp, Canis familiaris
tactgcggaaattcttgtgcgcaca

SEQ ID NO: 194332 - DNA, 25 bp, Canis familiaris
tactatgaataactctatgcccaca

SEQ ID NO: 194333 - DNA, 25 bp, Canis familiaris
tactgtgatatatacctcccaaaat

SEQ ID NO: 194334 - DNA, 25 bp, Canis familiaris
tactcgagtttctttcaccaaaatt

SEQ ID NO: 194335 - DNA, 25 bp, Canis familiaris
tactaggtgtattttcccgagcctt

SEQ ID NO: 194336 - DNA, 25 bp, Canis familiaris
tacatatggaggtttgtcccttttt

SEQ ID NO: 194337 - DNA, 25 bp, Canis familiaris
tacatatgtgcatatttccactttt

SEQ ID NO: 194338 - DNA, 25 bp, Canis familiaris
tacgatgtctcagtttcccgtaacc

SEQ ID NO: 194339 - DNA, 25 bp, Canis familiaris
tacgatcgctatgttgccatctgta

SEQ ID NO: 194340 - DNA, 25 bp, Canis familiaris
tactagcagctgttttgcctcttga

SEQ ID NO: 194341 - DNA, 25 bp, Canis familiaris
tactggctggcatttatcctcttaa

SEQ ID NO: 194342 - DNA, 25 bp, Canis familiaris
tacggtgaatgtttgctccatgaga

SEQ ID NO: 194343 - DNA, 25 bp, Canis familiaris
tacgtagacttcgtgctacaggccc

SEQ ID NO: 194344 - DNA, 25 bp, Canis familiaris
tacttacatttaggattcaccacca

SEQ ID NO: 194345 - DNA, 25 bp, Canis familiaris
tacttacattaggattcacaccacc

SEQ ID NO: 194346 - DNA, 25 bp, Canis familiaris
tactatacactggccttacccagga

SEQ ID NO: 194347 - DNA, 25 bp, Canis familiaris
tacttaactcctgagccaccaggca

SEQ ID NO: 194348 - DNA, 25 bp, Canis familiaris
tactaatactgcctcaggctgcctc

SEQ ID NO: 194349 - DNA, 25 bp, Canis familiaris
tacatacatactcctctgttcatct

SEQ ID NO: 194350 - DNA, 25 bp, Canis familiaris
tacataagacttccttctcagcttt

SEQ ID NO: 194351 - DNA, 25 bp, Canis familiaris
tacatataattctgcctctgcttat

SEQ ID NO: 194352 - DNA, 25 bp, Canis familiaris
tacattacattctccttgattgttc

SEQ ID NO: 194353 - DNA, 25 bp, Canis familiaris
tacatctttctctcattgtgattcc

SEQ ID NO: 194354 - DNA, 25 bp, Canis familiaris
tacatcctctctctcatttataata

SEQ ID NO: 194355 - DNA, 25 bp, Canis familiaris
tactcacctcgtcgctattaaagca

SEQ ID NO: 194356 - DNA, 25 bp, Canis familiaris
tacatcacctggggactggacatca

SEQ ID NO: 194357 - DNA, 25 bp, Canis familiaris
tacatcacctaccggctggtgcagt

SEQ ID NO: 194358 - DNA, 25 bp, Canis familiaris
tactcacacagagctggtggtggct

SEQ ID NO: 194359 - DNA, 25 bp, Canis familiaris
taccccagagcccctggggcatggg

SEQ ID NO: 194360 - DNA, 25 bp, Canis familiaris
tacccacgatgggctctggggggct

SEQ ID NO: 194361 - DNA, 25 bp, Canis familiaris
tacccaagggatgtgctggagtgtg

SEQ ID NO: 194362 - DNA, 25 bp, Canis familiaris
tagaccaagtctaccctgggtggag

SEQ ID NO: 194363 - DNA, 25 bp, Canis familiaris
tagacacccttttctttggggcagg

SEQ ID NO: 194364 - DNA, 25 bp, Canis familiaris
taccatcttcttttctttggggact

SEQ ID NO: 194365 - DNA, 25 bp, Canis familiaris
tacgacttctaatacctggtgtggc

SEQ ID NO: 194366 - DNA, 25 bp, Canis familiaris
tactacctgctaacaaccggggaag

SEQ ID NO: 194367 - DNA, 25 bp, Canis familiaris
tactacttcttacgtcgggtcgtag

SEQ ID NO: 194368 - DNA, 25 bp, Canis familiaris
tactattccagtgccttggctgtag

SEQ ID NO: 194369 - DNA, 25 bp, Canis familiaris
tacatatttcagacctttccttacc

SEQ ID NO: 194370 - DNA, 25 bp, Canis familiaris
tacatactaaatctctctccttttt

SEQ ID NO: 194371 - DNA, 25 bp, Canis familiaris
tacgacttaatcatccctttttgtt

SEQ ID NO: 194372 - DNA, 25 bp, Canis familiaris
tacgttgtaatcacatcccttttct

SEQ ID NO: 194373 - DNA, 25 bp, Canis familiaris
tactggacctaaggtccctttgtgc

SEQ ID NO: 194374 - DNA, 25 bp, Canis familiaris
taccgatactactcttttttgtcca

SEQ ID NO: 194375 - DNA, 25 bp, Canis familiaris
tactcctactcgtttcgatttttca

SEQ ID NO: 194376 - DNA, 25 bp, Canis familiaris
tatcccgaacggtggctcatttaga

SEQ ID NO: 194377 - DNA, 25 bp, Canis familiaris
tactcacgggagccgggcttttagg

SEQ ID NO: 194378 - DNA, 25 bp, Canis familiaris
tactccaggttcgtggttgttctca

SEQ ID NO: 194379 - DNA, 25 bp, Canis familiaris
tactcactggttatgtcttcttcct

SEQ ID NO: 194380 - DNA, 25 bp, Canis familiaris
tagctacaggtagagtcttttcctc

SEQ ID NO: 194381 - DNA, 25 bp, Canis familiaris
tactaagggcagcttcttttcctgt

SEQ ID NO: 194382 - DNA, 25 bp, Canis familiaris
tacataagccaaccactcttttttt

SEQ ID NO: 194383 - DNA, 25 bp, Canis familiaris
tactgggtcaacggtctttgtcttt

SEQ ID NO: 194384 - DNA, 25 bp, Canis familiaris
tacgcgccccaggggctttgtctgt

SEQ ID NO: 194385 - DNA, 25 bp, Canis familiaris
tacggccccatgaagaactacctga

SEQ ID NO: 194386 - DNA, 25 bp, Canis familiaris
tacgaggacgcgggcaactacatca

SEQ ID NO: 194387 - DNA, 25 bp, Canis familiaris
tacgggatggcccagccatcaacta

SEQ ID NO: 194388 - DNA, 25 bp, Canis familiaris
tactgggagatccaagccatcacac

SEQ ID NO: 194389 - DNA, 25 bp, Canis familiaris
tactagcaatatcaagcctcgccgt

SEQ ID NO: 194390 - DNA, 25 bp, Canis familiaris
tacatacactcacatagtcacaccc

SEQ ID NO: 194391 - DNA, 25 bp, Canis familiaris
tacatcaactcctaattataccccc

SEQ ID NO: 194392 - DNA, 25 bp, Canis familiaris
tactgcttctgtgaaaataccccct

SEQ ID NO: 194393 - DNA, 25 bp, Canis familiaris
tactcctttggaaaatttctccttg

SEQ ID NO: 194394 - DNA, 25 bp, Canis familiaris
tactcttttggaaatttgcctcttt

SEQ ID NO: 194395 - DNA, 25 bp, Canis familiaris
taccctaattatactaagcaccttt

SEQ ID NO: 194396 - DNA, 25 bp, Canis familiaris
tactcgttataattctagaacttta

SEQ ID NO: 194397 - DNA, 25 bp, Canis familiaris
tacgtgatcttttttgtacaattta

SEQ ID NO: 194398 - DNA, 25 bp, Canis familiaris
tacttcaccattctttactgttata

SEQ ID NO: 194399 - DNA, 25 bp, Canis familiaris
tactctactcgtgtttttgttctac

SEQ ID NO: 194400 - DNA, 25 bp, Canis familiaris
tactcgaatcctggtttcttgcttt

SEQ ID NO: 194401 - DNA, 25 bp, Canis familiaris
tactcatgatatcctgttcttctcc

SEQ ID NO: 194402 - DNA, 25 bp, Canis familiaris
tactatatgcatcagaactgttcac

SEQ ID NO: 194403 - DNA, 25 bp, Canis familiaris
tactattttatgttcatttcacccc

SEQ ID NO: 194404 - DNA, 25 bp, Canis familiaris
tactttttttgtttgtatcattcct

SEQ ID NO: 194405 - DNA, 25 bp, Canis familiaris
tacttttttgtgcttgtttgcctcc

SEQ ID NO: 194406 - DNA, 25 bp, Canis familiaris
tacctttttggtatctgttctctgc

SEQ ID NO: 194407 - DNA, 25 bp, Canis familiaris
tacttgttttcagttttcatttcga

SEQ ID NO: 194408 - DNA, 25 bp, Canis familiaris
tacattgtaactttcttctctttta

SEQ ID NO: 194409 - DNA, 25 bp, Canis familiaris
tacatatataaattgtcttgctgtt

SEQ ID NO: 194410 - DNA, 25 bp, Canis familiaris
tacatataaggtctgcctctgcgtg

SEQ ID NO: 194411 - DNA, 25 bp, Canis familiaris
tacattagtggacttgcacctctct

SEQ ID NO: 194412 - DNA, 25 bp, Canis familiaris
tacttggtgctacggcagcgatctt

SEQ ID NO: 194413 - DNA, 25 bp, Canis familiaris
tagcctgaggcgggacatggtcgta

SEQ ID NO: 194414 - DNA, 25 bp, Canis familiaris
tagcctaggccgcgggacggataac

SEQ ID NO: 194415 - DNA, 25 bp, Canis familiaris
tagcctaggccgcgggacggataac

SEQ ID NO: 194416 - DNA, 25 bp, Canis familiaris
tagcctaggccgcgggacggataac

SEQ ID NO: 194417 - DNA, 25 bp, Canis familiaris
tagcctaggccgcgggacggataac

SEQ ID NO: 194418 - DNA, 25 bp, Canis familiaris
tagcctaggccgcgggacggataac

SEQ ID NO: 194419 - DNA, 25 bp, Canis familiaris
tagcctaggccgcgggacggataac

SEQ ID NO: 194420 - DNA, 25 bp, Canis familiaris
tagcctaggccgcgggacggataac

SEQ ID NO: 194421 - DNA, 25 bp, Canis familiaris
tagcctaggccgcgggacggataac

SEQ ID NO: 194422 - DNA, 25 bp, Canis familiaris
tagcctaggccgcgggacggataac

SEQ ID NO: 194423 - DNA, 25 bp, Canis familiaris
tagcctaggccgcgggacggataac

SEQ ID NO: 194424 - DNA, 25 bp, Canis familiaris
tagcctaggccgcgggacggataac

SEQ ID NO: 194425 - DNA, 25 bp, Canis familiaris
tagcctaggccgcgggacggataac

SEQ ID NO: 194426 - DNA, 25 bp, Canis familiaris
tagcctaggccgcgggacggataac

SEQ ID NO: 194427 - DNA, 25 bp, Canis familiaris
tagcctaggccgcgggacggataac

SEQ ID NO: 194428 - DNA, 25 bp, Canis familiaris
tagcctaggccgcgggacggataac

SEQ ID NO: 194429 - DNA, 25 bp, Canis familiaris
tagcctaggccgcgggacggataac

SEQ ID NO: 194430 - DNA, 25 bp, Canis familiaris
tagcctaggccgcgggacggataac

SEQ ID NO: 194431 - DNA, 25 bp, Canis familiaris
taccgataccgggaggacctgatgg

SEQ ID NO: 194432 - DNA, 25 bp, Canis familiaris
tactgcgcaatcccggaaaccatga

SEQ ID NO: 194433 - DNA, 25 bp, Canis familiaris
tactctggtggcggtgaaatcttgc

SEQ ID NO: 194434 - DNA, 25 bp, Canis familiaris
tactgccggtgaggctgaaacgctg

SEQ ID NO: 194435 - DNA, 25 bp, Canis familiaris
tactgccggtgaggctgaaacgctg

SEQ ID NO: 194436 - DNA, 25 bp, Canis familiaris
tactgcctgggaggttaccacagcg

SEQ ID NO: 194437 - DNA, 25 bp, Canis familiaris
tactactagatgtctttaggcagca

SEQ ID NO: 194438 - DNA, 25 bp, Canis familiaris
tactatctcagggctttctgggcac

SEQ ID NO: 194439 - DNA, 25 bp, Canis familiaris
tactttcgccacttgtcggagaatg

SEQ ID NO: 194440 - DNA, 25 bp, Canis familiaris
tactattcccaccatggggagcgaa

SEQ ID NO: 194441 - DNA, 25 bp, Canis familiaris
tactatatcctctcactgtggggaa

SEQ ID NO: 194442 - DNA, 25 bp, Canis familiaris
tactttcctcttgctgtgggatggg

SEQ ID NO: 194443 - DNA, 25 bp, Canis familiaris
tactttgctgccgtagctggacagg

SEQ ID NO: 194444 - DNA, 25 bp, Canis familiaris
tacgtgcttcccaagctgtacgtga

SEQ ID NO: 194445 - DNA, 25 bp, Canis familiaris
tactttccccagcctgtgaagtagc

SEQ ID NO: 194446 - DNA, 25 bp, Canis familiaris
tactttctgggccctgattagtcca

SEQ ID NO: 194447 - DNA, 25 bp, Canis familiaris
tactttctatagccctattcactta

SEQ ID NO: 194448 - DNA, 25 bp, Canis familiaris
tatgtttaatagcttttccttccgg

SEQ ID NO: 194449 - DNA, 25 bp, Canis familiaris
tacatttattggcattttctttctc

SEQ ID NO: 194450 - DNA, 25 bp, Canis familiaris
tactgtatttggctttttctttaat

SEQ ID NO: 194451 - DNA, 25 bp, Canis familiaris
tacgtgtttggtcttgcttcttgta

SEQ ID NO: 194452 - DNA, 25 bp, Canis familiaris
tacttgtcattgttcctttgtttgt

SEQ ID NO: 194453 - DNA, 25 bp, Canis familiaris
tactcatttgagttccttccatttg

SEQ ID NO: 194454 - DNA, 25 bp, Canis familiaris
tactactgtgaattcctctctttta

SEQ ID NO: 194455 - DNA, 25 bp, Canis familiaris
tactactatcaaccccatttctgga

SEQ ID NO: 194456 - DNA, 25 bp, Canis familiaris
tacgaatatcacacccaagtctatc

SEQ ID NO: 194457 - DNA, 25 bp, Canis familiaris
tactacatcaactcctaattatacc

SEQ ID NO: 194458 - DNA, 25 bp, Canis familiaris
taccctatccacgctaattattacc

SEQ ID NO: 194459 - DNA, 25 bp, Canis familiaris
tactgtttcccgtgctttagtatcc

SEQ ID NO: 194460 - DNA, 25 bp, Canis familiaris
tacttgttgccctgtgctttagtat

SEQ ID NO: 194461 - DNA, 25 bp, Canis familiaris
tttgtgttgcgtgttgcttggggtt

SEQ ID NO: 194462 - DNA, 25 bp, Canis familiaris
tttgtggggtgttactcgagggctt

SEQ ID NO: 194463 - DNA, 25 bp, Canis familiaris
tttgctgaggggcagaccccggtgg

SEQ ID NO: 194464 - DNA, 25 bp, Canis familiaris
tacttggaggaggtgatgccccggg

SEQ ID NO: 194465 - DNA, 25 bp, Canis familiaris
tactgttgggagacttccttctggg

SEQ ID NO: 194466 - DNA, 25 bp, Canis familiaris
tacttgtcgggagctcctagctgta

SEQ ID NO: 194467 - DNA, 25 bp, Canis familiaris
tacattgtggggctcctctaggaag

SEQ ID NO: 194468 - DNA, 25 bp, Canis familiaris
tacttctgagggctgcgctggagaa

SEQ ID NO: 194469 - DNA, 25 bp, Canis familiaris
tactctctgggcgctgttgtaagat

SEQ ID NO: 194470 - DNA, 25 bp, Canis familiaris
tagctccttggaactttggtggttt

SEQ ID NO: 194471 - DNA, 25 bp, Canis familiaris
tacttctgtataactttgggcaatt

SEQ ID NO: 194472 - DNA, 25 bp, Canis familiaris
tacttccttttcttatggaggattt

SEQ ID NO: 194473 - DNA, 25 bp, Canis familiaris
tacattccgttttgctccgaagtat

SEQ ID NO: 194474 - DNA, 25 bp, Canis familiaris
tacattcctgttttgctccgaagta

SEQ ID NO: 194475 - DNA, 25 bp, Canis familiaris
tacattcctgttttgctccgaagta

SEQ ID NO: 194476 - DNA, 25 bp, Canis familiaris
tacttttttttgtaagatgagatga

SEQ ID NO: 194477 - DNA, 25 bp, Canis familiaris
tactttttttcatacgacacatcgt

SEQ ID NO: 194478 - DNA, 25 bp, Canis familiaris
tactttcttttctccttcagagact

SEQ ID NO: 194479 - DNA, 25 bp, Canis familiaris
tactcatttttttggaatgtaaaag

SEQ ID NO: 194480 - DNA, 25 bp, Canis familiaris
taccaatttttgcaagttagatcta

SEQ ID NO: 194481 - DNA, 25 bp, Canis familiaris
taccaaccttgggtcacttttctag

SEQ ID NO: 194482 - DNA, 25 bp, Canis familiaris
tactaacggggatcagtgttctctg

SEQ ID NO: 194483 - DNA, 25 bp, Canis familiaris
tagtaacctgggtccagggcctcgg

SEQ ID NO: 194484 - DNA, 25 bp, Canis familiaris
tagaaacccggcaaagggtggcagg

SEQ ID NO: 194485 - DNA, 25 bp, Canis familiaris
tactggtcccccaagaaggtggcag

SEQ ID NO: 194486 - DNA, 25 bp, Canis familiaris
tacgagggtcctgagactggtggcc

SEQ ID NO: 194487 - DNA, 25 bp, Canis familiaris
tactggcggctcgggaggaggtcgc

SEQ ID NO: 194488 - DNA, 25 bp, Canis familiaris
tacgagctgcctgacggccaggtca

SEQ ID NO: 194489 - DNA, 25 bp, Canis familiaris
tactgtgcacctgagtgtcccaggc

SEQ ID NO: 194490 - DNA, 25 bp, Canis familiaris
tactgtgcccacaagagaaccagaa

SEQ ID NO: 194491 - DNA, 25 bp, Canis familiaris
tactgtgaacacctggaagcaaaat

SEQ ID NO: 194492 - DNA, 25 bp, Canis familiaris
tactggaactttaactgcaaatgtg

SEQ ID NO: 194493 - DNA, 25 bp, Canis familiaris
tactggaaataactactgtgaacta

SEQ ID NO: 194494 - DNA, 25 bp, Canis familiaris
tactgtgcgaaagatccgtggacta

SEQ ID NO: 194495 - DNA, 25 bp, Canis familiaris
tacggcgctaaggatgactctggtc

SEQ ID NO: 194496 - DNA, 25 bp, Canis familiaris
tacttgcctagtgctactcgttatg

SEQ ID NO: 194497 - DNA, 25 bp, Canis familiaris
tacttgactagtaaactcaggtgga

SEQ ID NO: 194498 - DNA, 25 bp, Canis familiaris
tactctgatctagcattcccatgga

SEQ ID NO: 194499 - DNA, 25 bp, Canis familiaris
tactgctgtgtaccaagccagggaa

SEQ ID NO: 194500 - DNA, 25 bp, Canis familiaris
taccatggtgatccacggggtgacg

SEQ ID NO: 194501 - DNA, 25 bp, Canis familiaris
tagccctggtgattctggtactagc

SEQ ID NO: 194502 - DNA, 25 bp, Canis familiaris
tacccggtcatgcggcaacatacga

SEQ ID NO: 194503 - DNA, 25 bp, Canis familiaris
tacccaggtgtgcggacccatggga

SEQ ID NO: 194504 - DNA, 25 bp, Canis familiaris
tactccaactggggaattccgtgta

SEQ ID NO: 194505 - DNA, 25 bp, Canis familiaris
tactacctctggacgatactcacgc

SEQ ID NO: 194506 - DNA, 25 bp, Canis familiaris
tactatcgcttagtctgtgccatgc

SEQ ID NO: 194507 - DNA, 25 bp, Canis familiaris
tacttcgatctagttgcagcgcaac

SEQ ID NO: 194508 - DNA, 25 bp, Canis familiaris
tacttcatggctttctcagcaggaa

SEQ ID NO: 194509 - DNA, 25 bp, Canis familiaris
tactctgctgctgagctccagcagt

SEQ ID NO: 194510 - DNA, 25 bp, Canis familiaris
tacctgtctccagtctagagtcttc

SEQ ID NO: 194511 - DNA, 25 bp, Canis familiaris
tacgtgattggcctagggctgcttc

SEQ ID NO: 194512 - DNA, 25 bp, Canis familiaris
tacggaatgtctgagggtgcactat

SEQ ID NO: 194513 - DNA, 25 bp, Canis familiaris
tacggaatgctccggggtcatgctc

SEQ ID NO: 194514 - DNA, 25 bp, Canis familiaris
tactgtgttcctcggtgtgtatgtt

SEQ ID NO: 194515 - DNA, 25 bp, Canis familiaris
tactcttggcgacgcggcagttggt

SEQ ID NO: 194516 - DNA, 25 bp, Canis familiaris
tactctagtgtttgctggtgttggt

SEQ ID NO: 194517 - DNA, 25 bp, Canis familiaris
tactcattgttcaataatggtgggt

SEQ ID NO: 194518 - DNA, 25 bp, Canis familiaris
tactacttcatctcaatctggcggt

SEQ ID NO: 194519 - DNA, 25 bp, Canis familiaris
tactcacccctacattcagggtcac

SEQ ID NO: 194520 - DNA, 25 bp, Canis familiaris
tactaacccttggtggacggatgac

SEQ ID NO: 194521 - DNA, 25 bp, Canis familiaris
tagataaaccttcgtaacttctgcc

SEQ ID NO: 194522 - DNA, 25 bp, Canis familiaris
tagctcaaacctaaggcaccgtttc

SEQ ID NO: 194523 - DNA, 25 bp, Canis familiaris
tactctaggcctatggccaggtctt

SEQ ID NO: 194524 - DNA, 25 bp, Canis familiaris
tactccaggaaagacacagactcat

SEQ ID NO: 194525 - DNA, 25 bp, Canis familiaris
tacttcttactcaccacaagctgat

SEQ ID NO: 194526 - DNA, 25 bp, Canis familiaris
tacttttggtatccccagacattac

SEQ ID NO: 194527 - DNA, 25 bp, Canis familiaris
tacttattgagaatcccacaccgtt

SEQ ID NO: 194528 - DNA, 25 bp, Canis familiaris
tactctatatatgtcccaacacgta

SEQ ID NO: 194529 - DNA, 25 bp, Canis familiaris
tatcattagaagcatgccagaacag

SEQ ID NO: 194530 - DNA, 25 bp, Canis familiaris
tagatcttagcacaccaatagggga

SEQ ID NO: 194531 - DNA, 25 bp, Canis familiaris
tataattatcgctattccaacggga

SEQ ID NO: 194532 - DNA, 25 bp, Canis familiaris
ttacatttctgactttgaataggta

SEQ ID NO: 194533 - DNA, 25 bp, Canis familiaris
ttactctggtatatggaaaggttcc

SEQ ID NO: 194534 - DNA, 25 bp, Canis familiaris
tacccgtgtttaagtacaggatttg

SEQ ID NO: 194535 - DNA, 25 bp, Canis familiaris
tacccctgttgtacgcaaaggcttt

SEQ ID NO: 194536 - DNA, 25 bp, Canis familiaris
tacctccttttaaaacagtcggcat

SEQ ID NO: 194537 - DNA, 25 bp, Canis familiaris
tatcccctttccttaacatggggca

SEQ ID NO: 194538 - DNA, 25 bp, Canis familiaris
tacccagtcagtgcattttagggat

SEQ ID NO: 194539 - DNA, 25 bp, Canis familiaris
taccctgatcgtgtggactatgttg

SEQ ID NO: 194540 - DNA, 25 bp, Canis familiaris
tactccttcagtacggtgctagtgg

SEQ ID NO: 194541 - DNA, 25 bp, Canis familiaris
tactcactgtatttctggtaagttc

SEQ ID NO: 194542 - DNA, 25 bp, Canis familiaris
tagctgcccattgttgaaatggttc

SEQ ID NO: 194543 - DNA, 25 bp, Canis familiaris
tagcggtcctgacgtgcaaatcggt

SEQ ID NO: 194544 - DNA, 25 bp, Canis familiaris
tactttcctgcactgacgattactg

SEQ ID NO: 194545 - DNA, 25 bp, Canis familiaris
tactttgcagctgtgatcgtgttgt

SEQ ID NO: 194546 - DNA, 25 bp, Canis familiaris
tactcttcatctatgtgctttctgc

SEQ ID NO: 194547 - DNA, 25 bp, Canis familiaris
tactcttgcctatgggatgctcagc

SEQ ID NO: 194548 - DNA, 25 bp, Canis familiaris
tactctccctgcttcaggagtcagt

SEQ ID NO: 194549 - DNA, 25 bp, Canis familiaris
tactatatcctgggcacgaccatgc

SEQ ID NO: 194550 - DNA, 25 bp, Canis familiaris
tactgtacactcggcactgaattga

SEQ ID NO: 194551 - DNA, 25 bp, Canis familiaris
tactttccatctgatatgcatttag

SEQ ID NO: 194552 - DNA, 25 bp, Canis familiaris
tactttgccatctgaattgacttga

SEQ ID NO: 194553 - DNA, 25 bp, Canis familiaris
tacttctgccatcatgaatccactc

SEQ ID NO: 194554 - DNA, 25 bp, Canis familiaris
tactgttgtcataaactcctgtcat

SEQ ID NO: 194555 - DNA, 25 bp, Canis familiaris
tactgcaggatctactccctggtca

SEQ ID NO: 194556 - DNA, 25 bp, Canis familiaris
tacgaagagcaactgcaccgctgtg

SEQ ID NO: 194557 - DNA, 25 bp, Canis familiaris
tacgaggagaacgacgaccccgaga

SEQ ID NO: 194558 - DNA, 25 bp, Canis familiaris
tacgggacaagcgacgactgctctt

SEQ ID NO: 194559 - DNA, 25 bp, Canis familiaris
taccggtcacagaaggaccctcggc

SEQ ID NO: 194560 - DNA, 25 bp, Canis familiaris
tacgggtgacagacctgaggcccag

SEQ ID NO: 194561 - DNA, 25 bp, Canis familiaris
tacgtggggcctctgatggcaggac

SEQ ID NO: 194562 - DNA, 25 bp, Canis familiaris
tacgtgccggacccggcagcaggag

SEQ ID NO: 194563 - DNA, 25 bp, Canis familiaris
tacgtgaaagatgcctgccggatgc

SEQ ID NO: 194564 - DNA, 25 bp, Canis familiaris
tacctcatgaagatcctgaccgagc

SEQ ID NO: 194565 - DNA, 25 bp, Canis familiaris
tacctcatgaagatcctcacggagc

SEQ ID NO: 194566 - DNA, 25 bp, Canis familiaris
tagcctcagaatgccactgatgggg

SEQ ID NO: 194567 - DNA, 25 bp, Canis familiaris
tacctgcaggagaccacgctggcag

SEQ ID NO: 194568 - DNA, 25 bp, Canis familiaris
tactcggagcaggacacagggcaga

SEQ ID NO: 194569 - DNA, 25 bp, Canis familiaris
tatctacgacatgaacgcggccaac

SEQ ID NO: 194570 - DNA, 25 bp, Canis familiaris
tactacaacagatcgcagttgccaa

SEQ ID NO: 194571 - DNA, 25 bp, Canis familiaris
tactgtctccaatcggtatctcaag

SEQ ID NO: 194572 - DNA, 25 bp, Canis familiaris
tactctgctcactgggttttcaagc

SEQ ID NO: 194573 - DNA, 25 bp, Canis familiaris
tactcccaatggggttggctcatcc

SEQ ID NO: 194574 - DNA, 25 bp, Canis familiaris
tacgcctaaattgttgatttcctta

SEQ ID NO: 194575 - DNA, 25 bp, Canis familiaris
tacgcctatagatattatatgtgta

SEQ ID NO: 194576 - DNA, 25 bp, Canis familiaris
tacgccagagtaacatatatgattg

SEQ ID NO: 194577 - DNA, 25 bp, Canis familiaris
tacgtgaactgaaatgagcatgcat

SEQ ID NO: 194578 - DNA, 25 bp, Canis familiaris
tacgagaacttgacagaggctctgc

SEQ ID NO: 194579 - DNA, 25 bp, Canis familiaris
tacgtgaacgtgacgctggtgcttg

SEQ ID NO: 194580 - DNA, 25 bp, Canis familiaris
tacgtgatccggactctgttgtcca

SEQ ID NO: 194581 - DNA, 25 bp, Canis familiaris
tactgatatccgagtccttatgcta

SEQ ID NO: 194582 - DNA, 25 bp, Canis familiaris
tacgtcatccaatgtccatgtatcc

SEQ ID NO: 194583 - DNA, 25 bp, Canis familiaris
tacgtcacaaactccaatactgctt

SEQ ID NO: 194584 - DNA, 25 bp, Canis familiaris
tactatgcaacatgttccacaacta

SEQ ID NO: 194585 - DNA, 25 bp, Canis familiaris
tactagaaaagttctccataccctc

SEQ ID NO: 194586 - DNA, 25 bp, Canis familiaris
tattaagccaaatctctaaagactc

SEQ ID NO: 194587 - DNA, 25 bp, Canis familiaris
ttaaatagctacccctcaaagacct

SEQ ID NO: 194588 - DNA, 25 bp, Canis familiaris
ttgcaagggcccgcccaattgactt

SEQ ID NO: 194589 - DNA, 25 bp, Canis familiaris
tagaatcgagccacccaaaaacgtc

SEQ ID NO: 194590 - DNA, 25 bp, Canis familiaris
tacctcaaccttggtcagaaataca

SEQ ID NO: 194591 - DNA, 25 bp, Canis familiaris
tactcgccccagagccatgaaaata

SEQ ID NO: 194592 - DNA, 25 bp, Canis familiaris
tactgcagccgggacaccaaaacga

SEQ ID NO: 194593 - DNA, 25 bp, Canis familiaris
tactcagaggagcaccgccgaagga

SEQ ID NO: 194594 - DNA, 25 bp, Canis familiaris
taccctggaagcccactaaaggcac

SEQ ID NO: 194595 - DNA, 25 bp, Canis familiaris
taccctggacaccttgtactattcc

SEQ ID NO: 194596 - DNA, 25 bp, Canis familiaris
taccgctggccagtctgggacaact

SEQ ID NO: 194597 - DNA, 25 bp, Canis familiaris
taccctttcgacctggagaacatca

SEQ ID NO: 194598 - DNA, 25 bp, Canis familiaris
tacctgtacactgacttgagaccag

SEQ ID NO: 194599 - DNA, 25 bp, Canis familiaris
tactctgtagacgatagcttgagca

SEQ ID NO: 194600 - DNA, 25 bp, Canis familiaris
tactctacaaagacacatgatctga

SEQ ID NO: 194601 - DNA, 25 bp, Canis familiaris
tactcccacacaagacaatggacca

SEQ ID NO: 194602 - DNA, 25 bp, Canis familiaris
tagcaccctgagggaagggcccaag

SEQ ID NO: 194603 - DNA, 25 bp, Canis familiaris
tacccctggggtttgtatgccaagg

SEQ ID NO: 194604 - DNA, 25 bp, Canis familiaris
tacccaaaggtttttagatctctga

SEQ ID NO: 194605 - DNA, 25 bp, Canis familiaris
tacctccaaggttggctaactcttt

SEQ ID NO: 194606 - DNA, 25 bp, Canis familiaris
tactcccaaggttacaggacaccat

SEQ ID NO: 194607 - DNA, 25 bp, Canis familiaris
tactccctggtgcaagacagatccc

SEQ ID NO: 194608 - DNA, 25 bp, Canis familiaris
tactcctcggtacgagccagtggct

SEQ ID NO: 194609 - DNA, 25 bp, Canis familiaris
tactccttgcagaagggccagtgca

SEQ ID NO: 194610 - DNA, 25 bp, Canis familiaris
tactcccatgtgtgtgtgccaggac

SEQ ID NO: 194611 - DNA, 25 bp, Canis familiaris
tactggcaggggcattccagggccc

SEQ ID NO: 194612 - DNA, 25 bp, Canis familiaris
tactaaggcgaggtgtccaggccca

SEQ ID NO: 194613 - DNA, 25 bp, Canis familiaris
tactggggtgaggattcacaaccaa

SEQ ID NO: 194614 - DNA, 25 bp, Canis familiaris
tactgaaggtaccctcagcaaccta

SEQ ID NO: 194615 - DNA, 25 bp, Canis familiaris
tagctttggtacctcaacacgccaa

SEQ ID NO: 194616 - DNA, 25 bp, Canis familiaris
tactcgggaacttatactcgccata

SEQ ID NO: 194617 - DNA, 25 bp, Canis familiaris
taccggggcacttaacaccaaggag

SEQ ID NO: 194618 - DNA, 25 bp, Canis familiaris
ttcccgggataagaagccaaaagtg

SEQ ID NO: 194619 - DNA, 25 bp, Canis familiaris
tttccgagggtacagtgctaaaatc

SEQ ID NO: 194620 - DNA, 25 bp, Canis familiaris
ttcccaaggggcacctgtcaaaacg

SEQ ID NO: 194621 - DNA, 25 bp, Canis familiaris
ttcccggggaccactgttaataatg

SEQ ID NO: 194622 - DNA, 25 bp, Canis familiaris
tacccggggaccaggcattgttgaa

SEQ ID NO: 194623 - DNA, 25 bp, Canis familiaris
tacgtgctgggttactcgagtttta

SEQ ID NO: 194624 - DNA, 25 bp, Canis familiaris
tactctggggttgctgctgatggtg

SEQ ID NO: 194625 - DNA, 25 bp, Canis familiaris
tactgtggcaggctctatcttgcag

SEQ ID NO: 194626 - DNA, 25 bp, Canis familiaris
tactgtgtgctgagcgcttttctga

SEQ ID NO: 194627 - DNA, 25 bp, Canis familiaris
tactgtgactgtgttctatttgtta

SEQ ID NO: 194628 - DNA, 25 bp, Canis familiaris
tactcgtctgtgtttttcctgtaaa

SEQ ID NO: 194629 - DNA, 25 bp, Canis familiaris
tacgcagttttctttggctttacga

SEQ ID NO: 194630 - DNA, 25 bp, Canis familiaris
tactgataattgtctcttgtcttta

SEQ ID NO: 194631 - DNA, 25 bp, Canis familiaris
tactatatgttgatcttgccttctt

SEQ ID NO: 194632 - DNA, 25 bp, Canis familiaris
tactttgcgagttttccttatttcg

SEQ ID NO: 194633 - DNA, 25 bp, Canis familiaris
tactttctgacttttctttatcctt

SEQ ID NO: 194634 - DNA, 25 bp, Canis familiaris
tactttctattttatctgtttctta

SEQ ID NO: 194635 - DNA, 25 bp, Canis familiaris
tactttctagtttatcttgctgatt

SEQ ID NO: 194636 - DNA, 25 bp, Canis familiaris
tactattcattgttaatttgttctc

SEQ ID NO: 194637 - DNA, 25 bp, Canis familiaris
tactctatcttttagcattaatatc

SEQ ID NO: 194638 - DNA, 25 bp, Canis familiaris
tactaatctttattctctaattctt

SEQ ID NO: 194639 - DNA, 25 bp, Canis familiaris
tactgctactttgtctgctatattc

SEQ ID NO: 194640 - DNA, 25 bp, Canis familiaris
tactgtttgatgtcttctcttactc

SEQ ID NO: 194641 - DNA, 25 bp, Canis familiaris
tactgtgctttggttcctctagcaa

SEQ ID NO: 194642 - DNA, 25 bp, Canis familiaris
tactgtttgttgtctcctatgaggt

SEQ ID NO: 194643 - DNA, 25 bp, Canis familiaris
tactgctttttgtgcacttggagga

SEQ ID NO: 194644 - DNA, 25 bp, Canis familiaris
tactctttacgatacttgagcagaa

SEQ ID NO: 194645 - DNA, 25 bp, Canis familiaris
tactgtcttaaacactggctcaaat

SEQ ID NO: 194646 - DNA, 25 bp, Canis familiaris
tactgttgtaaaggtctctctccaa

SEQ ID NO: 194647 - DNA, 25 bp, Canis familiaris
tactctctatgaactagtttcccaa

SEQ ID NO: 194648 - DNA, 25 bp, Canis familiaris
tactcataatgatttacttccctaa

SEQ ID NO: 194649 - DNA, 25 bp, Canis familiaris
tactgctatattatttagcctgtta

SEQ ID NO: 194650 - DNA, 25 bp, Canis familiaris
tactctgctacacttattagccttt

SEQ ID NO: 194651 - DNA, 25 bp, Canis familiaris
tactgtccactcttgattaacctgt

SEQ ID NO: 194652 - DNA, 25 bp, Canis familiaris
tacgtccgccactatattatcgcta

SEQ ID NO: 194653 - DNA, 25 bp, Canis familiaris
tacgtctctgctcttcagtacaatc

SEQ ID NO: 194654 - DNA, 25 bp, Canis familiaris
tactgtctcctgctatattgactca

SEQ ID NO: 194655 - DNA, 25 bp, Canis familiaris
tactgattcttttgatttactacta

SEQ ID NO: 194656 - DNA, 25 bp, Canis familiaris
tacgaccttatgcttgatagttcta

SEQ ID NO: 194657 - DNA, 25 bp, Canis familiaris
taccaccttttcatgaagtttaatc

SEQ ID NO: 194658 - DNA, 25 bp, Canis familiaris
tactcccttgtgaagtaagtttact

SEQ ID NO: 194659 - DNA, 25 bp, Canis familiaris
tactaccgttcttgcaaagtagttt

SEQ ID NO: 194660 - DNA, 25 bp, Canis familiaris
tactacggtttttactgtattgtgt

SEQ ID NO: 194661 - DNA, 25 bp, Canis familiaris
tactcacgtgtttgtgtacatgtac

SEQ ID NO: 194662 - DNA, 25 bp, Canis familiaris
taccctttgcttctactgtacgtaa

SEQ ID NO: 194663 - DNA, 25 bp, Canis familiaris
tacctcccttctaaactgtactgta

SEQ ID NO: 194664 - DNA, 25 bp, Canis familiaris
tacccccctgtaaatgatgtaccca

SEQ ID NO: 194665 - DNA, 25 bp, Canis familiaris
tacccacacctggaggcaagtccac

SEQ ID NO: 194666 - DNA, 25 bp, Canis familiaris
tacccaaagtaaagatcacctgatc

SEQ ID NO: 194667 - DNA, 25 bp, Canis familiaris
tactcgcaaagtactacagcaagta

SEQ ID NO: 194668 - DNA, 25 bp, Canis familiaris
tactcaatttgcaactatctgaagt

SEQ ID NO: 194669 - DNA, 25 bp, Canis familiaris
tactcacatttcatattgtctcttt

SEQ ID NO: 194670 - DNA, 25 bp, Canis familiaris
tactctgttatcagtctgtacttac

SEQ ID NO: 194671 - DNA, 25 bp, Canis familiaris
tactctgagtaccttctgatagcca

SEQ ID NO: 194672 - DNA, 25 bp, Canis familiaris
tactctaccaagtttgacactataa

SEQ ID NO: 194673 - DNA, 25 bp, Canis familiaris
tactctaccatgaatataaaaacta

SEQ ID NO: 194674 - DNA, 25 bp, Canis familiaris
tacctacatctacatacgcaactac

SEQ ID NO: 194675 - DNA, 25 bp, Canis familiaris
taccccttagtaagtgcctctagct

SEQ ID NO: 194676 - DNA, 25 bp, Canis familiaris
tactcctcttgtgaagtgaagtgtt

SEQ ID NO: 194677 - DNA, 25 bp, Canis familiaris
tactccctttcctatagattgtttt

SEQ ID NO: 194678 - DNA, 25 bp, Canis familiaris
tactcacgtttccaaattctttatt

SEQ ID NO: 194679 - DNA, 25 bp, Canis familiaris
tactcaggtcttccagagtcctttc

SEQ ID NO: 194680 - DNA, 25 bp, Canis familiaris
tactgtgtctttcagatcttcgcct

SEQ ID NO: 194681 - DNA, 25 bp, Canis familiaris
tactggtcttgtcttttccttagaa

SEQ ID NO: 194682 - DNA, 25 bp, Canis familiaris
tactggttcttttttatcctgtcaa

SEQ ID NO: 194683 - DNA, 25 bp, Canis familiaris
tacgcgtttttcatctgcacgggaa

SEQ ID NO: 194684 - DNA, 25 bp, Canis familiaris
tactggtgtcttcaccaccatggag

SEQ ID NO: 194685 - DNA, 25 bp, Canis familiaris
tacgactacactgaccaccagaact

SEQ ID NO: 194686 - DNA, 25 bp, Canis familiaris
tacgaagactcagaccttgcagcat

SEQ ID NO: 194687 - DNA, 25 bp, Canis familiaris
tacggcaactcagcacactaacact

SEQ ID NO: 194688 - DNA, 25 bp, Canis familiaris
tactggcaatgcttccacagcgtaa

SEQ ID NO: 194689 - DNA, 25 bp, Canis familiaris
tactgcttcagctccacggagaaga

SEQ ID NO: 194690 - DNA, 25 bp, Canis familiaris
tactgttcagccatcacaaaaatga

SEQ ID NO: 194691 - DNA, 25 bp, Canis familiaris
tactgtcactgccttccaaaaagca

SEQ ID NO: 194692 - DNA, 25 bp, Canis familiaris
tactgctagcgcgaccgcaacaaac

SEQ ID NO: 194693 - DNA, 25 bp, Canis familiaris
tactccagcacttcctgtcataaaa

SEQ ID NO: 194694 - DNA, 25 bp, Canis familiaris
tactcagctcttgtcttcataaaaa

SEQ ID NO: 194695 - DNA, 25 bp, Canis familiaris
taccaggggcgtcttaataaatacg

SEQ ID NO: 194696 - DNA, 25 bp, Canis familiaris
taccggttcgctataaaccaaagct

SEQ ID NO: 194697 - DNA, 25 bp, Canis familiaris
tacctgtttcccattaactcatgta

SEQ ID NO: 194698 - DNA, 25 bp, Canis familiaris
tacctgttatttccccaaatcagtg

SEQ ID NO: 194699 - DNA, 25 bp, Canis familiaris
tacccagaattacccccagaatggt

SEQ ID NO: 194700 - DNA, 25 bp, Canis familiaris
tacctaatattcatgccccagtgtg

SEQ ID NO: 194701 - DNA, 25 bp, Canis familiaris
tagttagattctcagctcggaggta

SEQ ID NO: 194702 - DNA, 25 bp, Canis familiaris
tagttagattccagctcggagtaat

SEQ ID NO: 194703 - DNA, 25 bp, Canis familiaris
tactaactactcattctgggtacat

SEQ ID NO: 194704 - DNA, 25 bp, Canis familiaris
tactaaattctactactgggttata

SEQ ID NO: 194705 - DNA, 25 bp, Canis familiaris
tactgatagtttttattgggtctgt

SEQ ID NO: 194706 - DNA, 25 bp, Canis familiaris
tactgttgttatttctctggtgttt

SEQ ID NO: 194707 - DNA, 25 bp, Canis familiaris
tactcttttgccgttgttgtgttta

SEQ ID NO: 194708 - DNA, 25 bp, Canis familiaris
taccgacttcgcgttgtctatgtgt

SEQ ID NO: 194709 - DNA, 25 bp, Canis familiaris
tacccctggagcgtgtgtttgacta

SEQ ID NO: 194710 - DNA, 25 bp, Canis familiaris
taccggggatcttgctacttgaaag

SEQ ID NO: 194711 - DNA, 25 bp, Canis familiaris
taccgggacactggctttaggaatc

SEQ ID NO: 194712 - DNA, 25 bp, Canis familiaris
tagactgaagactggtttccgcctg

SEQ ID NO: 194713 - DNA, 25 bp, Canis familiaris
taccatgaatggtgtatttccccta

SEQ ID NO: 194714 - DNA, 25 bp, Canis familiaris
tactctgagcaggaagtgacttctt

SEQ ID NO: 194715 - DNA, 25 bp, Canis familiaris
tactcatagcagttttgtctccttc

SEQ ID NO: 194716 - DNA, 25 bp, Canis familiaris
tactgggagttttttatgcttgcat

SEQ ID NO: 194717 - DNA, 25 bp, Canis familiaris
tacgtagatttttattgttgtgcaa

SEQ ID NO: 194718 - DNA, 25 bp, Canis familiaris
tacgtgcaggatctggttactgtgc

SEQ ID NO: 194719 - DNA, 25 bp, Canis familiaris
tactcctggatggggctcatggtgt

SEQ ID NO: 194720 - DNA, 25 bp, Canis familiaris
tactgcctgacttgggctcagtggt

SEQ ID NO: 194721 - DNA, 25 bp, Canis familiaris
taccctgagctgatggtcgcttcta

SEQ ID NO: 194722 - DNA, 25 bp, Canis familiaris
tactgttatgctatgtgtccatttc

SEQ ID NO: 194723 - DNA, 25 bp, Canis familiaris
tactcttagcacatttcaataaaat

SEQ ID NO: 194724 - DNA, 25 bp, Canis familiaris
tactcttcagaagcttggcatcatg

SEQ ID NO: 194725 - DNA, 25 bp, Canis familiaris
tactgctctggctcctagcaccatg

SEQ ID NO: 194726 - DNA, 25 bp, Canis familiaris
tactgcctatcttatatagcccatg

SEQ ID NO: 194727 - DNA, 25 bp, Canis familiaris
tactcatgtacttatacctgcctgg

SEQ ID NO: 194728 - DNA, 25 bp, Canis familiaris
tactctaacttatcgttcgtgctct

SEQ ID NO: 194729 - DNA, 25 bp, Canis familiaris
tactgcttcctttaagttttctaag

SEQ ID NO: 194730 - DNA, 25 bp, Canis familiaris
tactcttggccttcaagttggttct

SEQ ID NO: 194731 - DNA, 25 bp, Canis familiaris
tagtctgggagtctcgttgacttta

SEQ ID NO: 194732 - DNA, 25 bp, Canis familiaris
tatcctggggacaaccttatctgtt

SEQ ID NO: 194733 - DNA, 25 bp, Canis familiaris
tactgtggcagagctactgttttct

SEQ ID NO: 194734 - DNA, 25 bp, Canis familiaris
tactgctccagaaattgcggttcct

SEQ ID NO: 194735 - DNA, 25 bp, Canis familiaris
tactgtcaagaagcctgggtcctct

SEQ ID NO: 194736 - DNA, 25 bp, Canis familiaris
tagtgttcaatagcaagggtccccc

SEQ ID NO: 194737 - DNA, 25 bp, Canis familiaris
taggaagaccctgaggttcgacacc

SEQ ID NO: 194738 - DNA, 25 bp, Canis familiaris
tacgaaaccaccgaagattgccctt

SEQ ID NO: 194739 - DNA, 25 bp, Canis familiaris
tactgaaagccctaaaacatcctcc

SEQ ID NO: 194740 - DNA, 25 bp, Canis familiaris
tactggatcccactgagaaactcac

SEQ ID NO: 194741 - DNA, 25 bp, Canis familiaris
tacgagtgactactgagccaaccac

SEQ ID NO: 194742 - DNA, 25 bp, Canis familiaris
tacgaaatttttccaccacatgcac

SEQ ID NO: 194743 - DNA, 25 bp, Canis familiaris
tactgaaaatctgctgacacccatc

SEQ ID NO: 194744 - DNA, 25 bp, Canis familiaris
tacgagtagactactgagcccacca

SEQ ID NO: 194745 - DNA, 25 bp, Canis familiaris
tacgaggagactcatgctcggcacc

SEQ ID NO: 194746 - DNA, 25 bp, Canis familiaris
tactggcgtgccagaccaggatcct

SEQ ID NO: 194747 - DNA, 25 bp, Canis familiaris
tactgactgtgacttacacaggagc

SEQ ID NO: 194748 - DNA, 25 bp, Canis familiaris
tactgtcggaggcgcatcgatgacc

SEQ ID NO: 194749 - DNA, 25 bp, Canis familiaris
tactctcaggagggaccagcaacag

SEQ ID NO: 194750 - DNA, 25 bp, Canis familiaris
tattctgcaactgtagccatgacca

SEQ ID NO: 194751 - DNA, 25 bp, Canis familiaris
tacctgcaacgaaatgcccacagca

SEQ ID NO: 194752 - DNA, 25 bp, Canis familiaris
tactctgccactgaccaagacgcag

SEQ ID NO: 194753 - DNA, 25 bp, Canis familiaris
tactgatccgctgagccagcgacca

SEQ ID NO: 194754 - DNA, 25 bp, Canis familiaris
tactgacctgtgccactcgagatga

SEQ ID NO: 194755 - DNA, 25 bp, Canis familiaris
tactgaatctgaatactgaactgag

SEQ ID NO: 194756 - DNA, 25 bp, Canis familiaris
tactgcttagttttaactggtttga

SEQ ID NO: 194757 - DNA, 25 bp, Canis familiaris
tactgctaagtctgtcagggggtgt

SEQ ID NO: 194758 - DNA, 25 bp, Canis familiaris
tactcgtactctgtcgtgaggggct

SEQ ID NO: 194759 - DNA, 25 bp, Canis familiaris
taccgttttggggcatgggggcatc

SEQ ID NO: 194760 - DNA, 25 bp, Canis familiaris
taccgattggatggtttagtgaggc

SEQ ID NO: 194761 - DNA, 25 bp, Canis familiaris
taccgattggatggtttagtgaggc

SEQ ID NO: 194762 - DNA, 25 bp, Canis familiaris
tacggtctggatgcactgtactgac

SEQ ID NO: 194763 - DNA, 25 bp, Canis familiaris
tacgaccaggataagctctacggct

SEQ ID NO: 194764 - DNA, 25 bp, Canis familiaris
ttagagacgattacaagcggaggcg

SEQ ID NO: 194765 - DNA, 25 bp, Canis familiaris
ttaagtccttactgataggggcacc

SEQ ID NO: 194766 - DNA, 25 bp, Canis familiaris
tataaataaaactgtaggccgccac

SEQ ID NO: 194767 - DNA, 25 bp, Canis familiaris
tatagaaaaccctggagactccacc

SEQ ID NO: 194768 - DNA, 25 bp, Canis familiaris
ttaaagaagccctgaaacctgccca

SEQ ID NO: 194769 - DNA, 25 bp, Canis familiaris
ttaaattccctgtgaaaccgagaat

SEQ ID NO: 194770 - DNA, 25 bp, Canis familiaris
ttaaacattttgtgagcgtctcagg

SEQ ID NO: 194771 - DNA, 25 bp, Canis familiaris
ttaaaggctttgtgcgcgaccttca

SEQ ID NO: 194772 - DNA, 25 bp, Canis familiaris
ttaaataccgagagccagaccccgt

SEQ ID NO: 194773 - DNA, 25 bp, Canis familiaris
tagaacgttcgaggtctaacgcccg

SEQ ID NO: 194774 - DNA, 25 bp, Canis familiaris
taggacaggtcctggtcaacgggct

SEQ ID NO: 194775 - DNA, 25 bp, Canis familiaris
tacgacatgaacgcggccaacgtgg

SEQ ID NO: 194776 - DNA, 25 bp, Canis familiaris
tacggtaacccagtgcactgaggtt

SEQ ID NO: 194777 - DNA, 25 bp, Canis familiaris
tacggtatttcctccagagtatacg

SEQ ID NO: 194778 - DNA, 25 bp, Canis familiaris
tacgagggggccaccagagttaggg

SEQ ID NO: 194779 - DNA, 25 bp, Canis familiaris
tacgtcaggagaccaaccaagctaa

SEQ ID NO: 194780 - DNA, 25 bp, Canis familiaris
tacgtcaggagaccacaaagctcaa

SEQ ID NO: 194781 - DNA, 25 bp, Canis familiaris
tactctcagtaggccaaacgctcag

SEQ ID NO: 194782 - DNA, 25 bp, Canis familiaris
tacccagctggactgaaggcctcag

SEQ ID NO: 194783 - DNA, 25 bp, Canis familiaris
tacggggtgattgagagcttcgcgg

SEQ ID NO: 194784 - DNA, 25 bp, Canis familiaris
tacggtgcctattctagagcttgga

SEQ ID NO: 194785 - DNA, 25 bp, Canis familiaris
taccttccttcttgagactcggatc

SEQ ID NO: 194786 - DNA, 25 bp, Canis familiaris
tactctgaccatttaaactgtgtgt

SEQ ID NO: 194787 - DNA, 25 bp, Canis familiaris
tactgtgactccgtaaactgtacta

SEQ ID NO: 194788 - DNA, 25 bp, Canis familiaris
tactgataccctagaaacttccaac

SEQ ID NO: 194789 - DNA, 25 bp, Canis familiaris
tactgaactcaacctagtttccaac

SEQ ID NO: 194790 - DNA, 25 bp, Canis familiaris
tacccaccagttcagattaccatac

SEQ ID NO: 194791 - DNA, 25 bp, Canis familiaris
taccccatttgtcaattatgcctca

SEQ ID NO: 194792 - DNA, 25 bp, Canis familiaris
tactctctcatcttgttaactgtcc

SEQ ID NO: 194793 - DNA, 25 bp, Canis familiaris
tactcttcttatatcaaatgtctca

SEQ ID NO: 194794 - DNA, 25 bp, Canis familiaris
tactctgacttaccccagagtgcat

SEQ ID NO: 194795 - DNA, 25 bp, Canis familiaris
tactcattctttgcctcagtggcaa

SEQ ID NO: 194796 - DNA, 25 bp, Canis familiaris
tactcatggctttctaccagctgga

SEQ ID NO: 194797 - DNA, 25 bp, Canis familiaris
taccatgcctgtttgccaagctggc

SEQ ID NO: 194798 - DNA, 25 bp, Canis familiaris
tactgctcctgtgtgccaagggtag

SEQ ID NO: 194799 - DNA, 25 bp, Canis familiaris
tactctgtcttggttaatgggtatt

SEQ ID NO: 194800 - DNA, 25 bp, Canis familiaris
taccttttaatatctgtgtctgtct

SEQ ID NO: 194801 - DNA, 25 bp, Canis familiaris
tacctctttaaataccttatctaca

SEQ ID NO: 194802 - DNA, 25 bp, Canis familiaris
taccctgattcatacatttttttaa

SEQ ID NO: 194803 - DNA, 25 bp, Canis familiaris
tactgagctgccaaaactttttata

SEQ ID NO: 194804 - DNA, 25 bp, Canis familiaris
tacgactccaagtattttcaccctt

SEQ ID NO: 194805 - DNA, 25 bp, Canis familiaris
tactgatcccggttattttccttgc

SEQ ID NO: 194806 - DNA, 25 bp, Canis familiaris
tactgtcccagtctcatatttttgc

SEQ ID NO: 194807 - DNA, 25 bp, Canis familiaris
tacgtcccagtggtatgaggtgtgg

SEQ ID NO: 194808 - DNA, 25 bp, Canis familiaris
tagcgtcccaggcctgatagaagcg

SEQ ID NO: 194809 - DNA, 25 bp, Canis familiaris
tacgtccatcgtctgatcagattga

SEQ ID NO: 194810 - DNA, 25 bp, Canis familiaris
tactgtccagggcattgcagatgat

SEQ ID NO: 194811 - DNA, 25 bp, Canis familiaris
tacgtccgagagtgtgcagctggct

SEQ ID NO: 194812 - DNA, 25 bp, Canis familiaris
tacggcctggacttctatgtggtgc

SEQ ID NO: 194813 - DNA, 25 bp, Canis familiaris
tacggcctggacttctatgtggtgc

SEQ ID NO: 194814 - DNA, 25 bp, Canis familiaris
tacggcctggacttctatgtggtgc

SEQ ID NO: 194815 - DNA, 25 bp, Canis familiaris
tacgagcctgaaaacttcttgtgta

SEQ ID NO: 194816 - DNA, 25 bp, Canis familiaris
tacgtgcccacaaggcttttgctgc

SEQ ID NO: 194817 - DNA, 25 bp, Canis familiaris
tacctggagccaagtttttgtcccg

SEQ ID NO: 194818 - DNA, 25 bp, Canis familiaris
tacgcagggccaagttcaagttcac

SEQ ID NO: 194819 - DNA, 25 bp, Canis familiaris
taccggtgccaatgacacccatacc

SEQ ID NO: 194820 - DNA, 25 bp, Canis familiaris
tacggagcccatttgaggcccataa

SEQ ID NO: 194821 - DNA, 25 bp, Canis familiaris
tacgtgaccatcattgatgccccag

SEQ ID NO: 194822 - DNA, 25 bp, Canis familiaris
tagcagttcaacttctgtgacgcca

SEQ ID NO: 194823 - DNA, 25 bp, Canis familiaris
tacgtgtgcatgatctcctacgcac

SEQ ID NO: 194824 - DNA, 25 bp, Canis familiaris
tactgataatgttctcactaaccat

SEQ ID NO: 194825 - DNA, 25 bp, Canis familiaris
tactgaaatgtgcctcgcaactgtt

SEQ ID NO: 194826 - DNA, 25 bp, Canis familiaris
tacgcaatagcgacgcgctggcgtt

SEQ ID NO: 194827 - DNA, 25 bp, Canis familiaris
tactgactcagcctctgggatggat

SEQ ID NO: 194828 - DNA, 25 bp, Canis familiaris
tagctagtcatggtgcagggctcca

SEQ ID NO: 194829 - DNA, 25 bp, Canis familiaris
tactgatgctgcagaacgcgctgac

SEQ ID NO: 194830 - DNA, 25 bp, Canis familiaris
tacctgtgtcagtcacgcatgtgag

SEQ ID NO: 194831 - DNA, 25 bp, Canis familiaris
tacgtgtacgacgtcatgtggtccc

SEQ ID NO: 194832 - DNA, 25 bp, Canis familiaris
tacgctggacgacgtcattcagacc

SEQ ID NO: 194833 - DNA, 25 bp, Canis familiaris
tacgctggccagagttcatatacca

SEQ ID NO: 194834 - DNA, 25 bp, Canis familiaris
tacctgccttgcagtgacttccgaa

SEQ ID NO: 194835 - DNA, 25 bp, Canis familiaris
tactctgccctggtggaattcccag

SEQ ID NO: 194836 - DNA, 25 bp, Canis familiaris
tactctcactttacgagattccatc

SEQ ID NO: 194837 - DNA, 25 bp, Canis familiaris
tacctactatatccgaaatcttgcc

SEQ ID NO: 194838 - DNA, 25 bp, Canis familiaris
tacgctttctatatacaacttgcca

SEQ ID NO: 194839 - DNA, 25 bp, Canis familiaris
tacggtgattatataaactagcctg

SEQ ID NO: 194840 - DNA, 25 bp, Canis familiaris
tactgggtatgtttttaaagcctgt

SEQ ID NO: 194841 - DNA, 25 bp, Canis familiaris
tactgacctcagattctaagaacct

SEQ ID NO: 194842 - DNA, 25 bp, Canis familiaris
tagctgcttccagattttagacccc

SEQ ID NO: 194843 - DNA, 25 bp, Canis familiaris
tactgtttcatcttttttgttccct

SEQ ID NO: 194844 - DNA, 25 bp, Canis familiaris
tactcctctgcctactttttaaagt

SEQ ID NO: 194845 - DNA, 25 bp, Canis familiaris
tactcctctgttttctttttaatgt

SEQ ID NO: 194846 - DNA, 25 bp, Canis familiaris
tactccttgatctttgtcttttgtc

SEQ ID NO: 194847 - DNA, 25 bp, Canis familiaris
taccgtaatcacatttttatatctg

SEQ ID NO: 194848 - DNA, 25 bp, Canis familiaris
tacggatctaccttgtttgtatagc

SEQ ID NO: 194849 - DNA, 25 bp, Canis familiaris
tactggtcccactgttttagatctt

SEQ ID NO: 194850 - DNA, 25 bp, Canis familiaris
tacgtgtcaccccgttattcacgtt

SEQ ID NO: 194851 - DNA, 25 bp, Canis familiaris
tacgtgtaccagagttctctccact

SEQ ID NO: 194852 - DNA, 25 bp, Canis familiaris
tactggtacagctgtgttttgcccg

SEQ ID NO: 194853 - DNA, 25 bp, Canis familiaris
tactggctctacttgttgttcggcc

SEQ ID NO: 194854 - DNA, 25 bp, Canis familiaris
tactgtttgcatctgaatgttctgt

SEQ ID NO: 194855 - DNA, 25 bp, Canis familiaris
tactgtgtgttcacaatctgcctta

SEQ ID NO: 194856 - DNA, 25 bp, Canis familiaris
tacgaatttcagtagtgttcttcaa

SEQ ID NO: 194857 - DNA, 25 bp, Canis familiaris
tacgattttatttatttattcaaca

SEQ ID NO: 194858 - DNA, 25 bp, Canis familiaris
tacgtttgatttttttgctttggca

SEQ ID NO: 194859 - DNA, 25 bp, Canis familiaris
tactgtttttattatattgtcatat

SEQ ID NO: 194860 - DNA, 25 bp, Canis familiaris
tactgtttctgtttatttcattttc

SEQ ID NO: 194861 - DNA, 25 bp, Canis familiaris
tacgatttgtgttttttgtttatag

SEQ ID NO: 194862 - DNA, 25 bp, Canis familiaris
tacgagtggttaagttgttttaatg

SEQ ID NO: 194863 - DNA, 25 bp, Canis familiaris
tacgcaggtttaaggcttgatttta

SEQ ID NO: 194864 - DNA, 25 bp, Canis familiaris
taccgacatttttggttagttgtat

SEQ ID NO: 194865 - DNA, 25 bp, Canis familiaris
tacccaaatcaatggttattcttca

SEQ ID NO: 194866 - DNA, 25 bp, Canis familiaris
tatccccaaatttagctttttctca

SEQ ID NO: 194867 - DNA, 25 bp, Canis familiaris
taccccatgaactggttgtcttcct

SEQ ID NO: 194868 - DNA, 25 bp, Canis familiaris
tactcctgaactttggggtttcctg

SEQ ID NO: 194869 - DNA, 25 bp, Canis familiaris
taccggagactgttgggttaaactg

SEQ ID NO: 194870 - DNA, 25 bp, Canis familiaris
taccgttggttgttgtccgaaattg

SEQ ID NO: 194871 - DNA, 25 bp, Canis familiaris
tactccttgggtttctaataaaatg

SEQ ID NO: 194872 - DNA, 25 bp, Canis familiaris
tacccttaggtatcatttaacagtt

SEQ ID NO: 194873 - DNA, 25 bp, Canis familiaris
taccttgcttttgttttaaggtctg

SEQ ID NO: 194874 - DNA, 25 bp, Canis familiaris
taccttgcccgctgtgtttaaggct

SEQ ID NO: 194875 - DNA, 25 bp, Canis familiaris
taccattgcctctgtggtaacacag

SEQ ID NO: 194876 - DNA, 25 bp, Canis familiaris
tacgatggactgcgtggtgcctaca

SEQ ID NO: 194877 - DNA, 25 bp, Canis familiaris
tacgcaatgaagcgggacctcaccc

SEQ ID NO: 194878 - DNA, 25 bp, Canis familiaris
tacccaggaatatagacccactttc

SEQ ID NO: 194879 - DNA, 25 bp, Canis familiaris
taccaagtgcacaaaggttcccctt

SEQ ID NO: 194880 - DNA, 25 bp, Canis familiaris
tacccagctgcagagtgattttccc

SEQ ID NO: 194881 - DNA, 25 bp, Canis familiaris
tacccaatcagcactgactcttcca

SEQ ID NO: 194882 - DNA, 25 bp, Canis familiaris
tacccaatgcagtttggctttttaa

SEQ ID NO: 194883 - DNA, 25 bp, Canis familiaris
tacctcaagaggaatgactgtttat

SEQ ID NO: 194884 - DNA, 25 bp, Canis familiaris
tactgctctgcaggcttaacttttt

SEQ ID NO: 194885 - DNA, 25 bp, Canis familiaris
tagcgcttgagccggaacaggttct

SEQ ID NO: 194886 - DNA, 25 bp, Canis familiaris
tacgcactgggaggaactggatgac

SEQ ID NO: 194887 - DNA, 25 bp, Canis familiaris
tagctcctgggatgtacttgtacgc

SEQ ID NO: 194888 - DNA, 25 bp, Canis familiaris
tagctgccaaggctaacttctacct

SEQ ID NO: 194889 - DNA, 25 bp, Canis familiaris
tactggcactgggtagagtttgatc

SEQ ID NO: 194890 - DNA, 25 bp, Canis familiaris
tacggcagtgtgtttacatgtcaga

SEQ ID NO: 194891 - DNA, 25 bp, Canis familiaris
tactgcatagtgtcatttacatgta

SEQ ID NO: 194892 - DNA, 25 bp, Canis familiaris
tactgatttctaattgacttcatat

SEQ ID NO: 194893 - DNA, 25 bp, Canis familiaris
tacgtataccacatgcagctttgag

SEQ ID NO: 194894 - DNA, 25 bp, Canis familiaris
tacgacttcccaggagcagcttgac

SEQ ID NO: 194895 - DNA, 25 bp, Canis familiaris
tactgacctgtcctaggcagctatc

SEQ ID NO: 194896 - DNA, 25 bp, Canis familiaris
tactggcctgttcaggagattagta

SEQ ID NO: 194897 - DNA, 25 bp, Canis familiaris
tactcctctgacgaatgggtatatt

SEQ ID NO: 194898 - DNA, 25 bp, Canis familiaris
taccccccagaaatggtaatttgag

SEQ ID NO: 194899 - DNA, 25 bp, Canis familiaris
tacccacagacatatatgagtaatc

SEQ ID NO: 194900 - DNA, 25 bp, Canis familiaris
tactgcccagagtataatctctaga

SEQ ID NO: 194901 - DNA, 25 bp, Canis familiaris
tactgctcgcagtaattcacactgg

SEQ ID NO: 194902 - DNA, 25 bp, Canis familiaris
tactgcggcagatctatacacacaa

SEQ ID NO: 194903 - DNA, 25 bp, Canis familiaris
taccggataactgaccgcactttcc

SEQ ID NO: 194904 - DNA, 25 bp, Canis familiaris
taccgggtgccagactggactgctt

SEQ ID NO: 194905 - DNA, 25 bp, Canis familiaris
taccagggcccaggattcaggcatc

SEQ ID NO: 194906 - DNA, 25 bp, Canis familiaris
tacccagagcccagcatcagggtgc

SEQ ID NO: 194907 - DNA, 25 bp, Canis familiaris
tacccaggcacccaaattggctgaa

SEQ ID NO: 194908 - DNA, 25 bp, Canis familiaris
tacccaggcatcccaaagtcttatt

SEQ ID NO: 194909 - DNA, 25 bp, Canis familiaris
tacccctgatatcccaatgaatcta

SEQ ID NO: 194910 - DNA, 25 bp, Canis familiaris
taccaacgtgatacataggatacat

SEQ ID NO: 194911 - DNA, 25 bp, Canis familiaris
taccccgatgcatatactacctgga

SEQ ID NO: 194912 - DNA, 25 bp, Canis familiaris
taccctaaagagaatctaccatgta

SEQ ID NO: 194913 - DNA, 25 bp, Canis familiaris
tacccgatctagtgttagcctcata

SEQ ID NO: 194914 - DNA, 25 bp, Canis familiaris
tactccacagtttgggctgggctca

SEQ ID NO: 194915 - DNA, 25 bp, Canis familiaris
tactccagcaatatgaagcgtgtct

SEQ ID NO: 194916 - DNA, 25 bp, Canis familiaris
tactgcctgcacattgactgggatc

SEQ ID NO: 194917 - DNA, 25 bp, Canis familiaris
taccgccacattgactgtgctgcta

SEQ ID NO: 194918 - DNA, 25 bp, Canis familiaris
tactgtgcatctcaggactggccta

SEQ ID NO: 194919 - DNA, 25 bp, Canis familiaris
tactgtgatcccgatgattggcttt

SEQ ID NO: 194920 - DNA, 25 bp, Canis familiaris
tactgtcagctggtctgatgggttt

SEQ ID NO: 194921 - DNA, 25 bp, Canis familiaris
tactgtcaattctatatgtgctgtt

SEQ ID NO: 194922 - DNA, 25 bp, Canis familiaris
tactgtgcacataactgattcattt

SEQ ID NO: 194923 - DNA, 25 bp, Canis familiaris
tactggcctgatgtgatccatccac

SEQ ID NO: 194924 - DNA, 25 bp, Canis familiaris
tactgggatagcagatgcctctcaa

SEQ ID NO: 194925 - DNA, 25 bp, Canis familiaris
tactgccagcattgctggggcccca

SEQ ID NO: 194926 - DNA, 25 bp, Canis familiaris
tactggagcaggcgaggacccaagg

SEQ ID NO: 194927 - DNA, 25 bp, Canis familiaris
tactgcgagcaccttgagtgagccc

SEQ ID NO: 194928 - DNA, 25 bp, Canis familiaris
tacggcgacgagaagctgagcccct

SEQ ID NO: 194929 - DNA, 25 bp, Canis familiaris
tacggcagagggattgcacccatct

SEQ ID NO: 194930 - DNA, 25 bp, Canis familiaris
tactgtcaaaggctctccagactct

SEQ ID NO: 194931 - DNA, 25 bp, Canis familiaris
tactgtccaatgatgttgccaagtc

SEQ ID NO: 194932 - DNA, 25 bp, Canis familiaris
tactgtcctcacagtgtctggcact

SEQ ID NO: 194933 - DNA, 25 bp, Canis familiaris
tactgtctttcatggctgtggagcc

SEQ ID NO: 194934 - DNA, 25 bp, Canis familiaris
tactgtctcctctgagcttggaaaa

SEQ ID NO: 194935 - DNA, 25 bp, Canis familiaris
tacgtcgccctggacttcgagcaag

SEQ ID NO: 194936 - DNA, 25 bp, Canis familiaris
tacctcccagtggacatttgacaat

SEQ ID NO: 194937 - DNA, 25 bp, Canis familiaris
tacctccctgctgtcaaaatcaaag

SEQ ID NO: 194938 - DNA, 25 bp, Canis familiaris
tactgcccaggtgctaaatctccaa

SEQ ID NO: 194939 - DNA, 25 bp, Canis familiaris
taccctaaggtgacaaacttcaagt

SEQ ID NO: 194940 - DNA, 25 bp, Canis familiaris
ttccctgaacgtagaaatttggagt

SEQ ID NO: 194941 - DNA, 25 bp, Canis familiaris
tagccctggcaaaaaccaatttagt

SEQ ID NO: 194942 - DNA, 25 bp, Canis familiaris
tagacacaggaaacaacaacaacaa

SEQ ID NO: 194943 - DNA, 25 bp, Canis familiaris
tagcaaatgtaaccaagtacccaga

SEQ ID NO: 194944 - DNA, 25 bp, Canis familiaris
tagaattgtaagttcctcccctaag

SEQ ID NO: 194945 - DNA, 25 bp, Canis familiaris
tagatatttagacacctcccgaaac

SEQ ID NO: 194946 - DNA, 25 bp, Canis familiaris
tagacgttagagtaatgcacgcagg

SEQ ID NO: 194947 - DNA, 25 bp, Canis familiaris
tatgggtctaagtctacagtggctg

SEQ ID NO: 194948 - DNA, 25 bp, Canis familiaris
tatgggtctaagtctacagtggctg

SEQ ID NO: 194949 - DNA, 25 bp, Canis familiaris
tagggaccaaaggacaaggtggaca

SEQ ID NO: 194950 - DNA, 25 bp, Canis familiaris
tagggacacaaaggaccaggtctgg

SEQ ID NO: 194951 - DNA, 25 bp, Canis familiaris
tagggacactaaaggacagtttgac

SEQ ID NO: 194952 - DNA, 25 bp, Canis familiaris
tactgtaacaaaagctaaatttggg

SEQ ID NO: 194953 - DNA, 25 bp, Canis familiaris
tactgtaaacactttttaattggtg

SEQ ID NO: 194954 - DNA, 25 bp, Canis familiaris
tacggaatccacttttctttgggtg

SEQ ID NO: 194955 - DNA, 25 bp, Canis familiaris
tactggtaacactttttctttcttg

SEQ ID NO: 194956 - DNA, 25 bp, Canis familiaris
tacgttcaatattttcatctctttc

SEQ ID NO: 194957 - DNA, 25 bp, Canis familiaris
tactgggcattatttctactttgtc

SEQ ID NO: 194958 - DNA, 25 bp, Canis familiaris
tactgtggtttaagccacctagtct

SEQ ID NO: 194959 - DNA, 25 bp, Canis familiaris
tacgtgcgctgcagaacccaaagtt

SEQ ID NO: 194960 - DNA, 25 bp, Canis familiaris
tacgtgagcgtataatcccaagatc

SEQ ID NO: 194961 - DNA, 25 bp, Canis familiaris
tactggatggtttatctcccgagct

SEQ ID NO: 194962 - DNA, 25 bp, Canis familiaris
tactgtaagtttttccctatatttg

SEQ ID NO: 194963 - DNA, 25 bp, Canis familiaris
tacctaagtagttatcatcctctga

SEQ ID NO: 194964 - DNA, 25 bp, Canis familiaris
tacctatggtggctacttccgagac

SEQ ID NO: 194965 - DNA, 25 bp, Canis familiaris
taccttattgtgcttcacctcagga

SEQ ID NO: 194966 - DNA, 25 bp, Canis familiaris
tacgcaacgtggatgtacctaccaa

SEQ ID NO: 194967 - DNA, 25 bp, Canis familiaris
tacgaaccggaacttgcggccgaca

SEQ ID NO: 194968 - DNA, 25 bp, Canis familiaris
tactgctaacaggatagcttgcggc

SEQ ID NO: 194969 - DNA, 25 bp, Canis familiaris
tacgccaacacggtgctgtctggcg

SEQ ID NO: 194970 - DNA, 25 bp, Canis familiaris
tagccatcacacaggttgccggctt

SEQ ID NO: 194971 - DNA, 25 bp, Canis familiaris
taccatcatcacagattctcgagca

SEQ ID NO: 194972 - DNA, 25 bp, Canis familiaris
tacctgtcacttattccatcatgtc

SEQ ID NO: 194973 - DNA, 25 bp, Canis familiaris
tacctgtcacttattccatcatgtc

SEQ ID NO: 194974 - DNA, 25 bp, Canis familiaris
tacgctggaaaaagtgcgcgatgcc

SEQ ID NO: 194975 - DNA, 25 bp, Canis familiaris
tacctggagaaaagccaccacgctc

SEQ ID NO: 194976 - DNA, 25 bp, Canis familiaris
tactgcagtagtatggaccccagcc

SEQ ID NO: 194977 - DNA, 25 bp, Canis familiaris
tacgagtcaatgctcaacaccgtgc

SEQ ID NO: 194978 - DNA, 25 bp, Canis familiaris
tacggtggatgacaacctgggctcc

SEQ ID NO: 194979 - DNA, 25 bp, Canis familiaris
tacggatggacacttacctggaccc

SEQ ID NO: 194980 - DNA, 25 bp, Canis familiaris
tacggtgacaaacttctcaggacca

SEQ ID NO: 194981 - DNA, 25 bp, Canis familiaris
tagctgggaccaccttataggccga

SEQ ID NO: 194982 - DNA, 25 bp, Canis familiaris
tactgttgatccttcttaagtccat

SEQ ID NO: 194983 - DNA, 25 bp, Canis familiaris
tataataaacatgtctgaagtcaaa

SEQ ID NO: 194984 - DNA, 25 bp, Canis familiaris
tatatagaacaaccccgactcaaca

SEQ ID NO: 194985 - DNA, 25 bp, Canis familiaris
tataaaataacctccatctcaacat

SEQ ID NO: 194986 - DNA, 25 bp, Canis familiaris
tatccaacaaaactatccttcaaaa

SEQ ID NO: 194987 - DNA, 25 bp, Canis familiaris
tacccacaggagtctactcttcaac

SEQ ID NO: 194988 - DNA, 25 bp, Canis familiaris
tacccagcagattgtcttcctttat

SEQ ID NO: 194989 - DNA, 25 bp, Canis familiaris
taccgacaacagtatctttgctttt

SEQ ID NO: 194990 - DNA, 25 bp, Canis familiaris
tagccgaagccagccattgtatttt

SEQ ID NO: 194991 - DNA, 25 bp, Canis familiaris
taggcagaccacacctggggtctag

SEQ ID NO: 194992 - DNA, 25 bp, Canis familiaris
tacgagattccatcttgtgggattt

SEQ ID NO: 194993 - DNA, 25 bp, Canis familiaris
taccaccccatgctttcaaagatat

SEQ ID NO: 194994 - DNA, 25 bp, Canis familiaris
taccactctgccactttacaaaaac

SEQ ID NO: 194995 - DNA, 25 bp, Canis familiaris
tacccttgcctcagttagctagatc

SEQ ID NO: 194996 - DNA, 25 bp, Canis familiaris
tagactctaccctcagtcaggacat

SEQ ID NO: 194997 - DNA, 25 bp, Canis familiaris
tagccctgacccttatgactaaatc

SEQ ID NO: 194998 - DNA, 25 bp, Canis familiaris
tacccatagcctcttcactaaaaaa

SEQ ID NO: 194999 - DNA, 25 bp, Canis familiaris
taccctacccactcattaatataaa

SEQ ID NO: 195000 - DNA, 25 bp, Canis familiaris
tacccattccccagtgtgatttagg

SEQ ID NO: 195001 - DNA, 25 bp, Canis familiaris
tacgccaacacggggctgtttgggg

SEQ ID NO: 195002 - DNA, 25 bp, Canis familiaris
taccctacgcaacctgttttagagg

SEQ ID NO: 195003 - DNA, 25 bp, Canis familiaris
tattcctcttaaccccttagaagtg

SEQ ID NO: 195004 - DNA, 25 bp, Canis familiaris
tagttctttaagacacctaacagga

SEQ ID NO: 195005 - DNA, 25 bp, Canis familiaris
taccctttaataacctgaatcctag

SEQ ID NO: 195006 - DNA, 25 bp, Canis familiaris
taccctatacttaatttcagacgct

SEQ ID NO: 195007 - DNA, 25 bp, Canis familiaris
taccctaagttatgtgccgaccgaa

SEQ ID NO: 195008 - DNA, 25 bp, Canis familiaris
tacctctaagtctgagtccagtcaa

SEQ ID NO: 195009 - DNA, 25 bp, Canis familiaris
tacgcctaaatctgcaatctatcta

SEQ ID NO: 195010 - DNA, 25 bp, Canis familiaris
taggcctaaatcccatttttagttg

SEQ ID NO: 195011 - DNA, 25 bp, Canis familiaris
tagacccggtacgttttgtagtgct

SEQ ID NO: 195012 - DNA, 25 bp, Canis familiaris
taccctcctgaagacatctttggtc

SEQ ID NO: 195013 - DNA, 25 bp, Canis familiaris
taccctcctcaataacttgcttaac

SEQ ID NO: 195014 - DNA, 25 bp, Canis familiaris
tacccataaatataccttgcattaa

SEQ ID NO: 195015 - DNA, 25 bp, Canis familiaris
taccctaatgagatcagccctgtta

SEQ ID NO: 195016 - DNA, 25 bp, Canis familiaris
taccctaaactcagtgcctgtgctc

SEQ ID NO: 195017 - DNA, 25 bp, Canis familiaris
taccttattggccgtggcctggcac

SEQ ID NO: 195018 - DNA, 25 bp, Canis familiaris
tagcttttagggcatctgccttccg

SEQ ID NO: 195019 - DNA, 25 bp, Canis familiaris
tagtttacagggatcttgattgcct

SEQ ID NO: 195020 - DNA, 25 bp, Canis familiaris
tagacttcaagccgatttttccttt

SEQ ID NO: 195021 - DNA, 25 bp, Canis familiaris
tagtcttcccaagtttttactgtag

SEQ ID NO: 195022 - DNA, 25 bp, Canis familiaris
taccctcactaaggttttcctcaag

SEQ ID NO: 195023 - DNA, 25 bp, Canis familiaris
taggtctcctaatagttaggccagg

SEQ ID NO: 195024 - DNA, 25 bp, Canis familiaris
taggtaaccgatgccttaatgaagg

SEQ ID NO: 195025 - DNA, 25 bp, Canis familiaris
tactgtacagcctgccctagaatga

SEQ ID NO: 195026 - DNA, 25 bp, Canis familiaris
tactggcacagccggtgcctcaagt

SEQ ID NO: 195027 - DNA, 25 bp, Canis familiaris
tacgacagcagagtagatgcgctaa

SEQ ID NO: 195028 - DNA, 25 bp, Canis familiaris
taccacgaactctacatctatatga

SEQ ID NO: 195029 - DNA, 25 bp, Canis familiaris
taccagcgggcaagacatctgacca

SEQ ID NO: 195030 - DNA, 25 bp, Canis familiaris
tacgagtgtgattaacctgactccc

SEQ ID NO: 195031 - DNA, 25 bp, Canis familiaris
tactgtgatgtgagatccccagccc

SEQ ID NO: 195032 - DNA, 25 bp, Canis familiaris
tagtggtttagaacccaggcctctt

SEQ ID NO: 195033 - DNA, 25 bp, Canis familiaris
tagaggttttacttacggactcatt

SEQ ID NO: 195034 - DNA, 25 bp, Canis familiaris
tagcccttaaactataagtgacctt

SEQ ID NO: 195035 - DNA, 25 bp, Canis familiaris
taccagtttcttttagaatacctgt

SEQ ID NO: 195036 - DNA, 25 bp, Canis familiaris
taccactttttagatgcttgaccat

SEQ ID NO: 195037 - DNA, 25 bp, Canis familiaris
tacccgtttgttgctcactgcaaca

SEQ ID NO: 195038 - DNA, 25 bp, Canis familiaris
tacccgtttgttgctgcactgcaac

SEQ ID NO: 195039 - DNA, 25 bp, Canis familiaris
taccacggcaatgtgacgctgctgc

SEQ ID NO: 195040 - DNA, 25 bp, Canis familiaris
tacccatgctaaaatcactgccgct

SEQ ID NO: 195041 - DNA, 25 bp, Canis familiaris
tacccttcagaggtatccttgctcc

SEQ ID NO: 195042 - DNA, 25 bp, Canis familiaris
tagcttgcttaacggagcacttccc

SEQ ID NO: 195043 - DNA, 25 bp, Canis familiaris
tagcttgctgaatattggcctcctc

SEQ ID NO: 195044 - DNA, 25 bp, Canis familiaris
tagcggcagaacgaggggcttcccg

SEQ ID NO: 195045 - DNA, 25 bp, Canis familiaris
taggggaaaagctggtacgcctgca

SEQ ID NO: 195046 - DNA, 25 bp, Canis familiaris
tagggaaaaactggttatctgggag

SEQ ID NO: 195047 - DNA, 25 bp, Canis familiaris
tagaagtagaaagttatttggggat

SEQ ID NO: 195048 - DNA, 25 bp, Canis familiaris
taggaacggtaaatttctgtgggag

SEQ ID NO: 195049 - DNA, 25 bp, Canis familiaris
tacggagtgggagttggtgctgggg

SEQ ID NO: 195050 - DNA, 25 bp, Canis familiaris
tacgtgcagttgggctctggatgcg

SEQ ID NO: 195051 - DNA, 25 bp, Canis familiaris
tacccagtgctgaagtatggctgcc

SEQ ID NO: 195052 - DNA, 25 bp, Canis familiaris
tacccgtgacaaaatgtgctccatg

SEQ ID NO: 195053 - DNA, 25 bp, Canis familiaris
tacccgaagtaatttgccacatgtt

SEQ ID NO: 195054 - DNA, 25 bp, Canis familiaris
tacccagctaccattgcttcaattg

SEQ ID NO: 195055 - DNA, 25 bp, Canis familiaris
tacccactccacaggttcctgtgag

SEQ ID NO: 195056 - DNA, 25 bp, Canis familiaris
taccaagttactttgaatcctgggt

SEQ ID NO: 195057 - DNA, 25 bp, Canis familiaris
tagcccgttacttataattctcgca

SEQ ID NO: 195058 - DNA, 25 bp, Canis familiaris
tacccattaaagttacatcttcacg

SEQ ID NO: 195059 - DNA, 25 bp, Canis familiaris
tatcgcaattgacggaaactttgac

SEQ ID NO: 195060 - DNA, 25 bp, Canis familiaris
taccatgcttgctgtaagattttga

SEQ ID NO: 195061 - DNA, 25 bp, Canis familiaris
tacgccttgctcagtggcattgtct

SEQ ID NO: 195062 - DNA, 25 bp, Canis familiaris
taccctggttgggccatatgctatc

SEQ ID NO: 195063 - DNA, 25 bp, Canis familiaris
taccacgatgtcaaggccatgcgga

SEQ ID NO: 195064 - DNA, 25 bp, Canis familiaris
tagcccaggcgcaagtgccgtaaag

SEQ ID NO: 195065 - DNA, 25 bp, Canis familiaris
tagcccggccaaggacactgatggg

SEQ ID NO: 195066 - DNA, 25 bp, Canis familiaris
tagccatcgtgggctcggacatgca

SEQ ID NO: 195067 - DNA, 25 bp, Canis familiaris
tagcacacctgggccaaaggaggga

SEQ ID NO: 195068 - DNA, 25 bp, Canis familiaris
tagctctcttgggcaggggagggga

SEQ ID NO: 195069 - DNA, 25 bp, Canis familiaris
tactgtgatcccggagggcaggcgg

SEQ ID NO: 195070 - DNA, 25 bp, Canis familiaris
tacgatgtgatcgtgctggggaccg

SEQ ID NO: 195071 - DNA, 25 bp, Canis familiaris
tagctgagtgtcccgcggggcccga

SEQ ID NO: 195072 - DNA, 25 bp, Canis familiaris
tagcggatgtactcgaacgcctggc

SEQ ID NO: 195073 - DNA, 25 bp, Canis familiaris
tacggatgtatgtgcgtgtccacgg

SEQ ID NO: 195074 - DNA, 25 bp, Canis familiaris
tacggttgcaaactgctgaccacgc

SEQ ID NO: 195075 - DNA, 25 bp, Canis familiaris
tacggttcaagagttggctgccctt

SEQ ID NO: 195076 - DNA, 25 bp, Canis familiaris
tacggttgattgcttgtgtgctccc

SEQ ID NO: 195077 - DNA, 25 bp, Canis familiaris
ttaattgtgattcctcgggctcgtt

SEQ ID NO: 195078 - DNA, 25 bp, Canis familiaris
tatcagagtcgtggttcgggcctta

SEQ ID NO: 195079 - DNA, 25 bp, Canis familiaris
tatcaagatggtgtccggggctgga

SEQ ID NO: 195080 - DNA, 25 bp, Canis familiaris
tagcggctcagtgatccgtgggtgg

SEQ ID NO: 195081 - DNA, 25 bp, Canis familiaris
tagctgtgccggttcagaggggggt

SEQ ID NO: 195082 - DNA, 25 bp, Canis familiaris
tacgtccagtggtatgagtgtggga

SEQ ID NO: 195083 - DNA, 25 bp, Canis familiaris
tacctccaaggtagcgctggtgtac

SEQ ID NO: 195084 - DNA, 25 bp, Canis familiaris
tacctacaaggttcgctacactaac

SEQ ID NO: 195085 - DNA, 25 bp, Canis familiaris
tacctacaaggccttcatgtgcatc

SEQ ID NO: 195086 - DNA, 25 bp, Canis familiaris
tagctgccccagaaattcattctca

SEQ ID NO: 195087 - DNA, 25 bp, Canis familiaris
taggatcctgcgaacacaatttttg

SEQ ID NO: 195088 - DNA, 25 bp, Canis familiaris
tacgatcacgtatacacctattatg

SEQ ID NO: 195089 - DNA, 25 bp, Canis familiaris
tacccagcagtttgacacatctttt

SEQ ID NO: 195090 - DNA, 25 bp, Canis familiaris
tacctctggctattataatcttttc

SEQ ID NO: 195091 - DNA, 25 bp, Canis familiaris
tatcctccgtgattcaaacctagta

SEQ ID NO: 195092 - DNA, 25 bp, Canis familiaris
tacccctgataacaacttagtataa

SEQ ID NO: 195093 - DNA, 25 bp, Canis familiaris
tacccctgaaactaataatactcta

SEQ ID NO: 195094 - DNA, 25 bp, Canis familiaris
taccctctaaactcagactgtctgt

SEQ ID NO: 195095 - DNA, 25 bp, Canis familiaris
tacggctctcaaacttaaattcatg

SEQ ID NO: 195096 - DNA, 25 bp, Canis familiaris
taccctgccaatcgctgtgagaatg

SEQ ID NO: 195097 - DNA, 25 bp, Canis familiaris
tagctgcctgatccacgtggagaag

SEQ ID NO: 195098 - DNA, 25 bp, Canis familiaris
tagtcttagcccctggtataggtcc

SEQ ID NO: 195099 - DNA, 25 bp, Canis familiaris
tattttccccgggagtagcgttctg

SEQ ID NO: 195100 - DNA, 25 bp, Canis familiaris
tatttttgccggggtctggcttttg

SEQ ID NO: 195101 - DNA, 25 bp, Canis familiaris
tatggtttagggagcctgccctgct

SEQ ID NO: 195102 - DNA, 25 bp, Canis familiaris
ttggaacttggcagagcgagcccct

SEQ ID NO: 195103 - DNA, 25 bp, Canis familiaris
ttggacaaatggagctctactcatg

SEQ ID NO: 195104 - DNA, 25 bp, Canis familiaris
taggacaatctagttctctaacgat

SEQ ID NO: 195105 - DNA, 25 bp, Canis familiaris
tacgttttaatgttgcttcagtgat

SEQ ID NO: 195106 - DNA, 25 bp, Canis familiaris
tacgttttgttcaggtcagtgatgt

SEQ ID NO: 195107 - DNA, 25 bp, Canis familiaris
taccttgggttttgtgtgcgtgtgt

SEQ ID NO: 195108 - DNA, 25 bp, Canis familiaris
taccctgggttctgaggggtgtggg

SEQ ID NO: 195109 - DNA, 25 bp, Canis familiaris
tagccttttacctggtgggagggag

SEQ ID NO: 195110 - DNA, 25 bp, Canis familiaris
tagccgttggctaccgggaggacgg

SEQ ID NO: 195111 - DNA, 25 bp, Canis familiaris
taccactggtgaccaccgggtgacg

SEQ ID NO: 195112 - DNA, 25 bp, Canis familiaris
taccccgtgaccatgcagagggacc

SEQ ID NO: 195113 - DNA, 25 bp, Canis familiaris
taccccggccagatcacggagaaca

SEQ ID NO: 195114 - DNA, 25 bp, Canis familiaris
taccccataggcaccacgatgaaga

SEQ ID NO: 195115 - DNA, 25 bp, Canis familiaris
taccccatacgtcaactgtcagatg

SEQ ID NO: 195116 - DNA, 25 bp, Canis familiaris
tacccctattgtcacctaagggctt

SEQ ID NO: 195117 - DNA, 25 bp, Canis familiaris
tagccactttttcccatctgaaggg

SEQ ID NO: 195118 - DNA, 25 bp, Canis familiaris
tagcccttttcacaactggtgcagc

SEQ ID NO: 195119 - DNA, 25 bp, Canis familiaris
tacgccgctttctgacactttcact

SEQ ID NO: 195120 - DNA, 25 bp, Canis familiaris
taccacacttatttatagtttaccg

SEQ ID NO: 195121 - DNA, 25 bp, Canis familiaris
tacccactctcataatagttctctc

SEQ ID NO: 195122 - DNA, 25 bp, Canis familiaris
taccacctcgcattaaaagcgttca

SEQ ID NO: 195123 - DNA, 25 bp, Canis familiaris
taccaccgccagcacagaaggagta

SEQ ID NO: 195124 - DNA, 25 bp, Canis familiaris
taccactgcagcccccaaaggggct

SEQ ID NO: 195125 - DNA, 25 bp, Canis familiaris
taccagcgcgcctggaacagggagg

SEQ ID NO: 195126 - DNA, 25 bp, Canis familiaris
taccagcgcccctggacagggaggg

SEQ ID NO: 195127 - DNA, 25 bp, Canis familiaris
tacctgccctacttcgagaagtgag

SEQ ID NO: 195128 - DNA, 25 bp, Canis familiaris
tacctctcctcagctagcaaggtga

SEQ ID NO: 195129 - DNA, 25 bp, Canis familiaris
tacctctccccacagaggggcaaga

SEQ ID NO: 195130 - DNA, 25 bp, Canis familiaris
tacctcctcctctgcagggagggtg

SEQ ID NO: 195131 - DNA, 25 bp, Canis familiaris
tacctagctccctgaggaactgtat

SEQ ID NO: 195132 - DNA, 25 bp, Canis familiaris
tacccagatccctcgaagcagagta

SEQ ID NO: 195133 - DNA, 25 bp, Canis familiaris
taccgcgtctactgcatgatgggag

SEQ ID NO: 195134 - DNA, 25 bp, Canis familiaris
tagccgcagctgctcgagcagtgag

SEQ ID NO: 195135 - DNA, 25 bp, Canis familiaris
tacctagcgttctacagcagaggct

SEQ ID NO: 195136 - DNA, 25 bp, Canis familiaris
tacccatgcttcctacaagtgcaat

SEQ ID NO: 195137 - DNA, 25 bp, Canis familiaris
taccgcagctaggaataatggaata

SEQ ID NO: 195138 - DNA, 25 bp, Canis familiaris
taccaactgggacgacatggagaag

SEQ ID NO: 195139 - DNA, 25 bp, Canis familiaris
taccctctgcggaagtatgcggtca

SEQ ID NO: 195140 - DNA, 25 bp, Canis familiaris
tacccctgttgtatctcgtgtagaa

SEQ ID NO: 195141 - DNA, 25 bp, Canis familiaris
tatcgtccgttgatgttccgtagga

SEQ ID NO: 195142 - DNA, 25 bp, Canis familiaris
tatccccagtaactgttccctggta

SEQ ID NO: 195143 - DNA, 25 bp, Canis familiaris
taccccatgataccgattggcacgt

SEQ ID NO: 195144 - DNA, 25 bp, Canis familiaris
taccccatgataccgattggcacca

SEQ ID NO: 195145 - DNA, 25 bp, Canis familiaris
taccccatgataccgattggcacca

SEQ ID NO: 195146 - DNA, 25 bp, Canis familiaris
taccacacagactctgcttggaccc

SEQ ID NO: 195147 - DNA, 25 bp, Canis familiaris
tacccccaacacgattggatctcca

SEQ ID NO: 195148 - DNA, 25 bp, Canis familiaris
tacccccgtcatgatagtatctcta

SEQ ID NO: 195149 - DNA, 25 bp, Canis familiaris
tacctccccttcgagaatatttaag

SEQ ID NO: 195150 - DNA, 25 bp, Canis familiaris
tacgactgcctatcgggatatttta

SEQ ID NO: 195151 - DNA, 25 bp, Canis familiaris
tacgattgcgtcgctggggtttttt

SEQ ID NO: 195152 - DNA, 25 bp, Canis familiaris
tacgttttccagaggcggtttgtgc

SEQ ID NO: 195153 - DNA, 25 bp, Canis familiaris
tagcctttaccagaacgtgtttgac

SEQ ID NO: 195154 - DNA, 25 bp, Canis familiaris
tagcctgtttgtaccaacttttggg

SEQ ID NO: 195155 - DNA, 25 bp, Canis familiaris
tacctttcatgtccaaaatgttgat

SEQ ID NO: 195156 - DNA, 25 bp, Canis familiaris
tagctccttcaggtcaaagacgtct

SEQ ID NO: 195157 - DNA, 25 bp, Canis familiaris
tagctcaccggtccagaagaggcct

SEQ ID NO: 195158 - DNA, 25 bp, Canis familiaris
taccccgagcttggacgatgtggct

SEQ ID NO: 195159 - DNA, 25 bp, Canis familiaris
taccccacatttgactgtcttgcat

SEQ ID NO: 195160 - DNA, 25 bp, Canis familiaris
tacccacgattttagcgtcttgtat

SEQ ID NO: 195161 - DNA, 25 bp, Canis familiaris
tacccaggcttttagacctttatct

SEQ ID NO: 195162 - DNA, 25 bp, Canis familiaris
taccacgtgggacagacctttgacc

SEQ ID NO: 195163 - DNA, 25 bp, Canis familiaris
taccatcagttgtagagccacgctt

SEQ ID NO: 195164 - DNA, 25 bp, Canis familiaris
tagccatatttgggagaaagataaa

SEQ ID NO: 195165 - DNA, 25 bp, Canis familiaris
tagccatttagggacactaaaggac

SEQ ID NO: 195166 - DNA, 25 bp, Canis familiaris
tagctttaactccaccaaaattact

SEQ ID NO: 195167 - DNA, 25 bp, Canis familiaris
tagtatatctacgaaccaaaacctc

SEQ ID NO: 195168 - DNA, 25 bp, Canis familiaris
tagtgtttgaccccatggaagaccc

SEQ ID NO: 195169 - DNA, 25 bp, Canis familiaris
tataaattggcccctataagaagcc

SEQ ID NO: 195170 - DNA, 25 bp, Canis familiaris
ttgaagttgggggctgaaaggtgtc

SEQ ID NO: 195171 - DNA, 25 bp, Canis familiaris
tagacattgtggggtctcagaagag

SEQ ID NO: 195172 - DNA, 25 bp, Canis familiaris
tagactttgcagtatgcccagaagc

SEQ ID NO: 195173 - DNA, 25 bp, Canis familiaris
tagatccctgagaagtaaaagccaa

SEQ ID NO: 195174 - DNA, 25 bp, Canis familiaris
tacccctagcaagaaaactaaatcg

SEQ ID NO: 195175 - DNA, 25 bp, Canis familiaris
taccccttcaacctacaattagaat

SEQ ID NO: 195176 - DNA, 25 bp, Canis familiaris
tacgccacttcctctataagtcaaa

SEQ ID NO: 195177 - DNA, 25 bp, Canis familiaris
taccctgtgtcctccaataaagcac

SEQ ID NO: 195178 - DNA, 25 bp, Canis familiaris
taccctctctttaccaattagcagg

SEQ ID NO: 195179 - DNA, 25 bp, Canis familiaris
taccctctatattgttcaataggag

SEQ ID NO: 195180 - DNA, 25 bp, Canis familiaris
taccgctcagtatttgtaatgagaa

SEQ ID NO: 195181 - DNA, 25 bp, Canis familiaris
taccgctggctggggctagatgagg

SEQ ID NO: 195182 - DNA, 25 bp, Canis familiaris
tacgtgcgcgccatgcgtgagatga

SEQ ID NO: 195183 - DNA, 25 bp, Canis familiaris
tagcctggcagcctctagtgctgaa

SEQ ID NO: 195184 - DNA, 25 bp, Canis familiaris
tacctccagctccggttacaaaaag

SEQ ID NO: 195185 - DNA, 25 bp, Canis familiaris
taccccctccaacttaagagtacag

SEQ ID NO: 195186 - DNA, 25 bp, Canis familiaris
taccccatctcctgatctgaaggga

SEQ ID NO: 195187 - DNA, 25 bp, Canis familiaris
taccccatcttctaggccaagaagg

SEQ ID NO: 195188 - DNA, 25 bp, Canis familiaris
taccaccagtacaaggccaagagga

SEQ ID NO: 195189 - DNA, 25 bp, Canis familiaris
taccctgcagcaacagagtcctgaa

SEQ ID NO: 195190 - DNA, 25 bp, Canis familiaris
taccagtgcacaactgcagtgacat

SEQ ID NO: 195191 - DNA, 25 bp, Canis familiaris
tacctgtgccacttgaatgtcattt

SEQ ID NO: 195192 - DNA, 25 bp, Canis familiaris
tacctgtgcctggaacattgctttc

SEQ ID NO: 195193 - DNA, 25 bp, Canis familiaris
taccagtaatgccagccattggttc

SEQ ID NO: 195194 - DNA, 25 bp, Canis familiaris
tagctaggctgaaggcacacggttc

SEQ ID NO: 195195 - DNA, 25 bp, Canis familiaris
tagcgggtaatgccacgggttgcac

SEQ ID NO: 195196 - DNA, 25 bp, Canis familiaris
tacgtggcaagtgcctgtgttccac

SEQ ID NO: 195197 - DNA, 25 bp, Canis familiaris
tacggggaggatcctggcttctccc

SEQ ID NO: 195198 - DNA, 25 bp, Canis familiaris
tacggtggagagggcacgtgtcccc

SEQ ID NO: 195199 - DNA, 25 bp, Canis familiaris
tagctttggggctcaggtggccccc

SEQ ID NO: 195200 - DNA, 25 bp, Canis familiaris
tacgtgtgggactgagtcggcggcc

SEQ ID NO: 195201 - DNA, 25 bp, Canis familiaris
tacgaggacggcgaggccgaggccg

SEQ ID NO: 195202 - DNA, 25 bp, Canis familiaris
tacgagatgggggagtgcacgcggg

SEQ ID NO: 195203 - DNA, 25 bp, Canis familiaris
tacgcgtgatgggtgggagggcagg

SEQ ID NO: 195204 - DNA, 25 bp, Canis familiaris
tacctggatcaggcttcggggagcg

SEQ ID NO: 195205 - DNA, 25 bp, Canis familiaris
tacctgcgaggtcacggtggacggg

SEQ ID NO: 195206 - DNA, 25 bp, Canis familiaris
taccccagctatctcgggagactgg

SEQ ID NO: 195207 - DNA, 25 bp, Canis familiaris
taccccatctcaaattcaggaactg

SEQ ID NO: 195208 - DNA, 25 bp, Canis familiaris
taccccatggtaagcatcaaaacat

SEQ ID NO: 195209 - DNA, 25 bp, Canis familiaris
tacccacttagaagatcaaagtatt

SEQ ID NO: 195210 - DNA, 25 bp, Canis familiaris
taccttcctaagcctcaagagttct

SEQ ID NO: 195211 - DNA, 25 bp, Canis familiaris
tacctccctggggcttagctgttat

SEQ ID NO: 195212 - DNA, 25 bp, Canis familiaris
tacgactcgatgtggatttgtgttt

SEQ ID NO: 195213 - DNA, 25 bp, Canis familiaris
tacccactgtgtcagtttctgttct

SEQ ID NO: 195214 - DNA, 25 bp, Canis familiaris
tacccactgttaagttggtggctca

SEQ ID NO: 195215 - DNA, 25 bp, Canis familiaris
tagcctactttaacgctttagccat

SEQ ID NO: 195216 - DNA, 25 bp, Canis familiaris
taccttcctaaccagctgttcagaa

SEQ ID NO: 195217 - DNA, 25 bp, Canis familiaris
taccttacggacaagagctacatga

SEQ ID NO: 195218 - DNA, 25 bp, Canis familiaris
taccatatcccgatagagtccaacc

SEQ ID NO: 195219 - DNA, 25 bp, Canis familiaris
taccattgccccaaaagccaaaaat

SEQ ID NO: 195220 - DNA, 25 bp, Canis familiaris
tacccacagcccaaacgcttagaga

SEQ ID NO: 195221 - DNA, 25 bp, Canis familiaris
tacccatcagcacaacctgtacagt

SEQ ID NO: 195222 - DNA, 25 bp, Canis familiaris
tagcccatagcaactgaccattacc

SEQ ID NO: 195223 - DNA, 25 bp, Canis familiaris
tacctaaaactatctctatgcacag

SEQ ID NO: 195224 - DNA, 25 bp, Canis familiaris
taccaaaagagttcactgaaggcaa

SEQ ID NO: 195225 - DNA, 25 bp, Canis familiaris
tagcctgaacagagccacagaagga

SEQ ID NO: 195226 - DNA, 25 bp, Canis familiaris
taccagtacaggccccagaatgagg

SEQ ID NO: 195227 - DNA, 25 bp, Canis familiaris
ttactgggactgccaccaaactggc

SEQ ID NO: 195228 - DNA, 25 bp, Canis familiaris
tatcacgggactttccagaatgtcg

SEQ ID NO: 195229 - DNA, 25 bp, Canis familiaris
taccagaggacttacggaagaatca

SEQ ID NO: 195230 - DNA, 25 bp, Canis familiaris
taccgatcgacttcactaaagacaa

SEQ ID NO: 195231 - DNA, 25 bp, Canis familiaris
taccgtgctcatgacacccgaaaaa

SEQ ID NO: 195232 - DNA, 25 bp, Canis familiaris
tagccatttaaatccactgaaaaca

SEQ ID NO: 195233 - DNA, 25 bp, Canis familiaris
tagccctcaaattactgtccaaacc

SEQ ID NO: 195234 - DNA, 25 bp, Canis familiaris
tacctgcccctttgtgggcaaacta

SEQ ID NO: 195235 - DNA, 25 bp, Canis familiaris
tacctcacgtcgaagtgggagaccc

SEQ ID NO: 195236 - DNA, 25 bp, Canis familiaris
tacctaccctgaagtggcttgacaa

SEQ ID NO: 195237 - DNA, 25 bp, Canis familiaris
tacctgtcgaccaggcacctgaaag

SEQ ID NO: 195238 - DNA, 25 bp, Canis familiaris
taccgacgacggcagacttctaacg

SEQ ID NO: 195239 - DNA, 25 bp, Canis familiaris
taccccagcaagcagaactcactac

SEQ ID NO: 195240 - DNA, 25 bp, Canis familiaris
taccaaaaggaattagatcactaca

SEQ ID NO: 195241 - DNA, 25 bp, Canis familiaris
taccaaatgatgagaaagcttccaa

SEQ ID NO: 195242 - DNA, 25 bp, Canis familiaris
taccaaaagggaaaagatcactaca

SEQ ID NO: 195243 - DNA, 25 bp, Canis familiaris
tagcctaagggttaaaatccattct

SEQ ID NO: 195244 - DNA, 25 bp, Canis familiaris
tacccacactggtaaaaagcacacc

SEQ ID NO: 195245 - DNA, 25 bp, Canis familiaris
tacctgatacggtgctaacccacct

SEQ ID NO: 195246 - DNA, 25 bp, Canis familiaris
taccgtagccgggtaacagctattt

SEQ ID NO: 195247 - DNA, 25 bp, Canis familiaris
taccgtcagctcccaggacagagct

SEQ ID NO: 195248 - DNA, 25 bp, Canis familiaris
tagctgcagccaggccagaggcaag

SEQ ID NO: 195249 - DNA, 25 bp, Canis familiaris
taccagcagcaaggcagagccaccc

SEQ ID NO: 195250 - DNA, 25 bp, Canis familiaris
taccaggcgggcagtgcccgctcgg

SEQ ID NO: 195251 - DNA, 25 bp, Canis familiaris
taccccagggctgtgatctcctggt

SEQ ID NO: 195252 - DNA, 25 bp, Canis familiaris
tacgtgaagggtgtgtcccgtgtcc

SEQ ID NO: 195253 - DNA, 25 bp, Canis familiaris
tacgtaagcaggctggtaccggtcc

SEQ ID NO: 195254 - DNA, 25 bp, Canis familiaris
tacgttgtgcagctatttacctatt

SEQ ID NO: 195255 - DNA, 25 bp, Canis familiaris
taccaggcataacatttcaccatta

SEQ ID NO: 195256 - DNA, 25 bp, Canis familiaris
taccgtctacttatgtatccatcca

SEQ ID NO: 195257 - DNA, 25 bp, Canis familiaris
tacgcgttctttatttctcaacacc

SEQ ID NO: 195258 - DNA, 25 bp, Canis familiaris
taccagcctgcttttttgtacaaac

SEQ ID NO: 195259 - DNA, 25 bp, Canis familiaris
tagccccctgggatgcattaaaatt

SEQ ID NO: 195260 - DNA, 25 bp, Canis familiaris
tacccctgggaattgctgtagtttt

SEQ ID NO: 195261 - DNA, 25 bp, Canis familiaris
tatccctgggggttgcagcttttta

SEQ ID NO: 195262 - DNA, 25 bp, Canis familiaris
taccctgggtggtgcagcagtttgg

SEQ ID NO: 195263 - DNA, 25 bp, Canis familiaris
tacctgatgggtgtgcgagagctct

SEQ ID NO: 195264 - DNA, 25 bp, Canis familiaris
tacctgtgtggtggggatgactgaa

SEQ ID NO: 195265 - DNA, 25 bp, Canis familiaris
tacctggggtgtgtgcatgcatatg

SEQ ID NO: 195266 - DNA, 25 bp, Canis familiaris
tacctggggagttggcccatttcct

SEQ ID NO: 195267 - DNA, 25 bp, Canis familiaris
tacctggtgtatgagtgcccctatt

SEQ ID NO: 195268 - DNA, 25 bp, Canis familiaris
tacgcttgtatatatgttccctctc

SEQ ID NO: 195269 - DNA, 25 bp, Canis familiaris
tacgattgtgttttgtatcctgata

SEQ ID NO: 195270 - DNA, 25 bp, Canis familiaris
tacctattgttactgctatttcatg

SEQ ID NO: 195271 - DNA, 25 bp, Canis familiaris
tacctttcatctttgcatttaaaag

SEQ ID NO: 195272 - DNA, 25 bp, Canis familiaris
tacctttcatgtctgttaagagcga

SEQ ID NO: 195273 - DNA, 25 bp, Canis familiaris
tacccttatgtgttgtgcttctgac

SEQ ID NO: 195274 - DNA, 25 bp, Canis familiaris
taccctactgttttgatttgatcct

SEQ ID NO: 195275 - DNA, 25 bp, Canis familiaris
taccttactggttttatggagcttt

SEQ ID NO: 195276 - DNA, 25 bp, Canis familiaris
taccgatacccttgcttatggtttt

SEQ ID NO: 195277 - DNA, 25 bp, Canis familiaris
taccacaatcccacttatttcttta

SEQ ID NO: 195278 - DNA, 25 bp, Canis familiaris
taccaacaacactctttttgaaaca

SEQ ID NO: 195279 - DNA, 25 bp, Canis familiaris
tagcctggaacctcacgtttaaata

SEQ ID NO: 195280 - DNA, 25 bp, Canis familiaris
taggcttcagacaccggtttcaaaa

SEQ ID NO: 195281 - DNA, 25 bp, Canis familiaris
tagcctgtaactacctattacccaa

SEQ ID NO: 195282 - DNA, 25 bp, Canis familiaris
taccgtacgctctagaaatgtccca

SEQ ID NO: 195283 - DNA, 25 bp, Canis familiaris
tacctgtaggcagaaccagccctca

SEQ ID NO: 195284 - DNA, 25 bp, Canis familiaris
tacctgtaagaccaagccgtattcc

SEQ ID NO: 195285 - DNA, 25 bp, Canis familiaris
taccttgaagaccaactgtccttcc

SEQ ID NO: 195286 - DNA, 25 bp, Canis familiaris
tacctataagcagtcacttcccatt

SEQ ID NO: 195287 - DNA, 25 bp, Canis familiaris
taccaacaaccttgtcatcgctcat

SEQ ID NO: 195288 - DNA, 25 bp, Canis familiaris
taccccaaccttacgcgttagagag

SEQ ID NO: 195289 - DNA, 25 bp, Canis familiaris
taggaccaacaaacaaccttgaaag

SEQ ID NO: 195290 - DNA, 25 bp, Canis familiaris
tacgaccgccaaaatatgccttcaa

SEQ ID NO: 195291 - DNA, 25 bp, Canis familiaris
tagccacggagataattcctatcat

SEQ ID NO: 195292 - DNA, 25 bp, Canis familiaris
tacgacgagctgctgcagttcctac

SEQ ID NO: 195293 - DNA, 25 bp, Canis familiaris
taccttgacatcctggttcttacct

SEQ ID NO: 195294 - DNA, 25 bp, Canis familiaris
taccgtaactatctactttcttctc

SEQ ID NO: 195295 - DNA, 25 bp, Canis familiaris
taccttaggcttttaccttctgtct

SEQ ID NO: 195296 - DNA, 25 bp, Canis familiaris
taccgtatagtttttctcttctgtt

SEQ ID NO: 195297 - DNA, 25 bp, Canis familiaris
taccggttgttattatccagtttat

SEQ ID NO: 195298 - DNA, 25 bp, Canis familiaris
taccctttttgtctctgcaatttta

SEQ ID NO: 195299 - DNA, 25 bp, Canis familiaris
taccctgtgttcttttgataatttt

SEQ ID NO: 195300 - DNA, 25 bp, Canis familiaris
tacccagtggcattttatttttgtt

SEQ ID NO: 195301 - DNA, 25 bp, Canis familiaris
taccacactactctatatttcttta

SEQ ID NO: 195302 - DNA, 25 bp, Canis familiaris
tacccctgtgtttatcttgtcattt

SEQ ID NO: 195303 - DNA, 25 bp, Canis familiaris
tagccccttgctttacaatgtcatc

SEQ ID NO: 195304 - DNA, 25 bp, Canis familiaris
taccctcttgcctattcatatcaag

SEQ ID NO: 195305 - DNA, 25 bp, Canis familiaris
taccgcattgtggctgctcacaaca

SEQ ID NO: 195306 - DNA, 25 bp, Canis familiaris
tagccagtttgccatgctcacataa

SEQ ID NO: 195307 - DNA, 25 bp, Canis familiaris
taccaatgtctgcagttacaatggt

SEQ ID NO: 195308 - DNA, 25 bp, Canis familiaris
tacctgtgtctcttgtgtacacaga

SEQ ID NO: 195309 - DNA, 25 bp, Canis familiaris
taccatgaggctgttagcaccgcac

SEQ ID NO: 195310 - DNA, 25 bp, Canis familiaris
tacctagacctagagcccacagaaa

SEQ ID NO: 195311 - DNA, 25 bp, Canis familiaris
tacctaccagaaaatcccaaggaga

SEQ ID NO: 195312 - DNA, 25 bp, Canis familiaris
tacctacctggaaaacccagtcagc

SEQ ID NO: 195313 - DNA, 25 bp, Canis familiaris
tacctcccaaataaacctcttgcac

SEQ ID NO: 195314 - DNA, 25 bp, Canis familiaris
taccgacaataatcaagcccatgga

SEQ ID NO: 195315 - DNA, 25 bp, Canis familiaris
taccgagcattatgacattcccaaa

SEQ ID NO: 195316 - DNA, 25 bp, Canis familiaris
taccaggccttgcaaacctaagacc

SEQ ID NO: 195317 - DNA, 25 bp, Canis familiaris
taccagagtcttctcaacctttgca

SEQ ID NO: 195318 - DNA, 25 bp, Canis familiaris
taccgtttgtgtaacacccttgcat

SEQ ID NO: 195319 - DNA, 25 bp, Canis familiaris
tacccttctgaggccaaacctggat

SEQ ID NO: 195320 - DNA, 25 bp, Canis familiaris
taccgattcatagactggactggga

SEQ ID NO: 195321 - DNA, 25 bp, Canis familiaris
tacgccaataaatcctcagctggga

SEQ ID NO: 195322 - DNA, 25 bp, Canis familiaris
tacgagcataatacatacccagagg

SEQ ID NO: 195323 - DNA, 25 bp, Canis familiaris
tacgcagatgactgaactcccagga

SEQ ID NO: 195324 - DNA, 25 bp, Canis familiaris
tacgcaatactgtacatgtttagga

SEQ ID NO: 195325 - DNA, 25 bp, Canis familiaris
tacccaacttaattgcttcgagcat

SEQ ID NO: 195326 - DNA, 25 bp, Canis familiaris
tacgcgcaagcccagaagcttcgga

SEQ ID NO: 195327 - DNA, 25 bp, Canis familiaris
tacctctagctccacaagtatgcgc

SEQ ID NO: 195328 - DNA, 25 bp, Canis familiaris
tacgctctagtataaatgtgaccct

SEQ ID NO: 195329 - DNA, 25 bp, Canis familiaris
taccatcttgtataatttgagcaca

SEQ ID NO: 195330 - DNA, 25 bp, Canis familiaris
taccattgttaccaaaataacgcca

SEQ ID NO: 195331 - DNA, 25 bp, Canis familiaris
taccttctgtaaaaataaaatcgat

SEQ ID NO: 195332 - DNA, 25 bp, Canis familiaris
taccttctttttttaatatcattct

SEQ ID NO: 195333 - DNA, 25 bp, Canis familiaris
tacctaggttttcttatttatattg

SEQ ID NO: 195334 - DNA, 25 bp, Canis familiaris
tacctagtgtcttctttgtacctaa

SEQ ID NO: 195335 - DNA, 25 bp, Canis familiaris
tacctatgctttcttcttaactgga

SEQ ID NO: 195336 - DNA, 25 bp, Canis familiaris
taccttctgcttgccctggaaagga

SEQ ID NO: 195337 - DNA, 25 bp, Canis familiaris
tacccatgctttccccatgaaaaga

SEQ ID NO: 195338 - DNA, 25 bp, Canis familiaris
tacccacttgtcacgccaaatgaag

SEQ ID NO: 195339 - DNA, 25 bp, Canis familiaris
tacccctttctctttgcaaggacag

SEQ ID NO: 195340 - DNA, 25 bp, Canis familiaris
tagcccctctttgctggaatggaca

SEQ ID NO: 195341 - DNA, 25 bp, Canis familiaris
tagccccctttctgggtgaatgatg

SEQ ID NO: 195342 - DNA, 25 bp, Canis familiaris
tagccccctttgtggttgatttttg

SEQ ID NO: 195343 - DNA, 25 bp, Canis familiaris
taccggcttttgatagggatttttg

SEQ ID NO: 195344 - DNA, 25 bp, Canis familiaris
tagccgctgtttaattagggtactg

SEQ ID NO: 195345 - DNA, 25 bp, Canis familiaris
tagccctggatttttgagtgtgtgt

SEQ ID NO: 195346 - DNA, 25 bp, Canis familiaris
tagcccctatgttttatcttggtat

SEQ ID NO: 195347 - DNA, 25 bp, Canis familiaris
tagcccactctgttttttatactgt

SEQ ID NO: 195348 - DNA, 25 bp, Canis familiaris
tacccacgctgtgttgtctttttca

SEQ ID NO: 195349 - DNA, 25 bp, Canis familiaris
tacccccagatgtcgtttttattca

SEQ ID NO: 195350 - DNA, 25 bp, Canis familiaris
tagactaacaactgattttcataat

SEQ ID NO: 195351 - DNA, 25 bp, Canis familiaris
tataatgaataatggttgctatgag

SEQ ID NO: 195352 - DNA, 25 bp, Canis familiaris
tatgttgaaagaatcgtcgctaagc

SEQ ID NO: 195353 - DNA, 25 bp, Canis familiaris
tagctatgaatatggcgcccaatac

SEQ ID NO: 195354 - DNA, 25 bp, Canis familiaris
tagctattgagcatgtggcccatta

SEQ ID NO: 195355 - DNA, 25 bp, Canis familiaris
tagcgtacacattgtccatctgcat

SEQ ID NO: 195356 - DNA, 25 bp, Canis familiaris
tatggggaatttcttcatcccggcc

SEQ ID NO: 195357 - DNA, 25 bp, Canis familiaris
taccggttgtagttttcagccaggc

SEQ ID NO: 195358 - DNA, 25 bp, Canis familiaris
tagcgacgttgcaagtctgcttcct

SEQ ID NO: 195359 - DNA, 25 bp, Canis familiaris
tacgacgttgcttggtgtcagctgc

SEQ ID NO: 195360 - DNA, 25 bp, Canis familiaris
taccattgatggttgttccagcagc

SEQ ID NO: 195361 - DNA, 25 bp, Canis familiaris
tagctttagctgttgtgtccacaaa

SEQ ID NO: 195362 - DNA, 25 bp, Canis familiaris
tagcttcattgtcctttgtctacat

SEQ ID NO: 195363 - DNA, 25 bp, Canis familiaris
tagccatccttgtcacagtgttact

SEQ ID NO: 195364 - DNA, 25 bp, Canis familiaris
tagccaccttcgacagacattattg

SEQ ID NO: 195365 - DNA, 25 bp, Canis familiaris
tacgcattctatatcaacttgccaa

SEQ ID NO: 195366 - DNA, 25 bp, Canis familiaris
taccattacatctcaaattcctttt

SEQ ID NO: 195367 - DNA, 25 bp, Canis familiaris
tagccttcccaaaagttgcctttgt

SEQ ID NO: 195368 - DNA, 25 bp, Canis familiaris
tagcctttgctatgaacttattttt

SEQ ID NO: 195369 - DNA, 25 bp, Canis familiaris
tagcctgggtatcttcttatttatt

SEQ ID NO: 195370 - DNA, 25 bp, Canis familiaris
tacctggggtctagctgtttttgat

SEQ ID NO: 195371 - DNA, 25 bp, Canis familiaris
tagattgaggggtagctgggtggct

SEQ ID NO: 195372 - DNA, 25 bp, Canis familiaris
tagtataagaagtggtgtgtgtgtg

SEQ ID NO: 195373 - DNA, 25 bp, Canis familiaris
ttttgtaaagggcggctgctgttcc

SEQ ID NO: 195374 - DNA, 25 bp, Canis familiaris
tttgattaaaaactggctccggctt

SEQ ID NO: 195375 - DNA, 25 bp, Canis familiaris
tagggagaaagctgggctccgggtc

SEQ ID NO: 195376 - DNA, 25 bp, Canis familiaris
taggcagggacactgtaggccggtg

SEQ ID NO: 195377 - DNA, 25 bp, Canis familiaris
tagaggggacggaggtcatcctggc

SEQ ID NO: 195378 - DNA, 25 bp, Canis familiaris
tagctggagtggcggtggttccgga

SEQ ID NO: 195379 - DNA, 25 bp, Canis familiaris
taccggatacagggtgcagtccctc

SEQ ID NO: 195380 - DNA, 25 bp, Canis familiaris
taccgagcttcgttatgcagttttt

SEQ ID NO: 195381 - DNA, 25 bp, Canis familiaris
taccgagtgctcctttaggcgtata

SEQ ID NO: 195382 - DNA, 25 bp, Canis familiaris
tagccaaagcacaattacaggttaa

SEQ ID NO: 195383 - DNA, 25 bp, Canis familiaris
tatcaaataactttacttgcctaac

SEQ ID NO: 195384 - DNA, 25 bp, Canis familiaris
taccaagtactacacaatccctacc

SEQ ID NO: 195385 - DNA, 25 bp, Canis familiaris
tacccaggagcttccagaagcccca

SEQ ID NO: 195386 - DNA, 25 bp, Canis familiaris
taccacggagcagagcagcaagccc

SEQ ID NO: 195387 - DNA, 25 bp, Canis familiaris
tacccgtatgcctagagatcgagcg

SEQ ID NO: 195388 - DNA, 25 bp, Canis familiaris
taccacgctcatttagacatcgagc

SEQ ID NO: 195389 - DNA, 25 bp, Canis familiaris
taccacacacaataggcgtcagcgt

SEQ ID NO: 195390 - DNA, 25 bp, Canis familiaris
taccaacatcatcagcggttcaggc

SEQ ID NO: 195391 - DNA, 25 bp, Canis familiaris
tacgcatactcactacggtagctac

SEQ ID NO: 195392 - DNA, 25 bp, Canis familiaris
tacgcacgcagcacgcgaggagttc

SEQ ID NO: 195393 - DNA, 25 bp, Canis familiaris
tagagcacgcgcaacactagacgtc

SEQ ID NO: 195394 - DNA, 25 bp, Canis familiaris
tagactcctgcctttgaacggcgtt

SEQ ID NO: 195395 - DNA, 25 bp, Canis familiaris
tacctgcacgcctgtgaaggggtct

SEQ ID NO: 195396 - DNA, 25 bp, Canis familiaris
tacgccgcccatggtatagggggtc

SEQ ID NO: 195397 - DNA, 25 bp, Canis familiaris
tagcggtccctggtgtgatggggga

SEQ ID NO: 195398 - DNA, 25 bp, Canis familiaris
taccagctcccctgtgggaagcaga

SEQ ID NO: 195399 - DNA, 25 bp, Canis familiaris
taccgatacttctctgtagaagacc

SEQ ID NO: 195400 - DNA, 25 bp, Canis familiaris
tacctcacagaggcgccttaaaact

SEQ ID NO: 195401 - DNA, 25 bp, Canis familiaris
tacctacaggtccctctatcaggga

SEQ ID NO: 195402 - DNA, 25 bp, Canis familiaris
taccgtccggaattcccgggatgca

SEQ ID NO: 195403 - DNA, 25 bp, Canis familiaris
taccgtccggaattcccgggatctg

SEQ ID NO: 195404 - DNA, 25 bp, Canis familiaris
taccaggacggattttacggttctg

SEQ ID NO: 195405 - DNA, 25 bp, Canis familiaris
taggagggggaaacattcgtactct

SEQ ID NO: 195406 - DNA, 25 bp, Canis familiaris
tagggttggggcacattgaccaccc

SEQ ID NO: 195407 - DNA, 25 bp, Canis familiaris
tttgggtggggagaagatccaggaa

SEQ ID NO: 195408 - DNA, 25 bp, Canis familiaris
tttggttttgggatactcacggagc

SEQ ID NO: 195409 - DNA, 25 bp, Canis familiaris
tttgggccttttgtcaatacgtcaa

SEQ ID NO: 195410 - DNA, 25 bp, Canis familiaris
ttaaaccccaatgtcaatagcccaa

SEQ ID NO: 195411 - DNA, 25 bp, Canis familiaris
tataaactccccgttaattccatct

SEQ ID NO: 195412 - DNA, 25 bp, Canis familiaris
tttcaagtcccctttaacgcgacat

SEQ ID NO: 195413 - DNA, 25 bp, Canis familiaris
tttcgaaccccctgaaagatgtcat

SEQ ID NO: 195414 - DNA, 25 bp, Canis familiaris
tatccgaacccctggcagaagttgt

SEQ ID NO: 195415 - DNA, 25 bp, Canis familiaris
taccggaccccaggagggactggag

SEQ ID NO: 195416 - DNA, 25 bp, Canis familiaris
taccagaattccccttcggactgga

SEQ ID NO: 195417 - DNA, 25 bp, Canis familiaris
taccaattattcccgtcctgaaata

SEQ ID NO: 195418 - DNA, 25 bp, Canis familiaris
taccatttaatgccatctacctgaa

SEQ ID NO: 195419 - DNA, 25 bp, Canis familiaris
taccgcttgcaagctgtacctgagc

SEQ ID NO: 195420 - DNA, 25 bp, Canis familiaris
tacccaagcacaacatggtgacgag

SEQ ID NO: 195421 - DNA, 25 bp, Canis familiaris
tacccaggacattcatggatattcc

SEQ ID NO: 195422 - DNA, 25 bp, Canis familiaris
tacccaccacattgtagcaatccca

SEQ ID NO: 195423 - DNA, 25 bp, Canis familiaris
tagcggcactttttacagcatcagc

SEQ ID NO: 195424 - DNA, 25 bp, Canis familiaris
tagcctcagcccaaataacagcagc

SEQ ID NO: 195425 - DNA, 25 bp, Canis familiaris
taccatacagcctctaaccaaacta

SEQ ID NO: 195426 - DNA, 25 bp, Canis familiaris
taggcatcaaattttaaccccctag

SEQ ID NO: 195427 - DNA, 25 bp, Canis familiaris
taggatcaactacctgcaaacccac

SEQ ID NO: 195428 - DNA, 25 bp, Canis familiaris
taccacagttagtagcacttcccac

SEQ ID NO: 195429 - DNA, 25 bp, Canis familiaris
tagccaagcattttaagttcagaac

SEQ ID NO: 195430 - DNA, 25 bp, Canis familiaris
tagcctcagcgtctaagtggagacc

SEQ ID NO: 195431 - DNA, 25 bp, Canis familiaris
tacccatggctttcaaggtgagctc

SEQ ID NO: 195432 - DNA, 25 bp, Canis familiaris
taccgaggggacctgtgtgagatcg

SEQ ID NO: 195433 - DNA, 25 bp, Canis familiaris
tagccacggggaacgatgctggccg

SEQ ID NO: 195434 - DNA, 25 bp, Canis familiaris
tagccagggcggcactgactgaagt

SEQ ID NO: 195435 - DNA, 25 bp, Canis familiaris
tagaacatccgtcacgacgattcta

SEQ ID NO: 195436 - DNA, 25 bp, Canis familiaris
taggtacgcgtctcagatcgtggga

SEQ ID NO: 195437 - DNA, 25 bp, Canis familiaris
taccgactggccttcagatcatgtg

SEQ ID NO: 195438 - DNA, 25 bp, Canis familiaris
taccaacttcctggcaccatgagta

SEQ ID NO: 195439 - DNA, 25 bp, Canis familiaris
tacccatttatttgcccatttatta

SEQ ID NO: 195440 - DNA, 25 bp, Canis familiaris
tagcccataataacagcacctttca

SEQ ID NO: 195441 - DNA, 25 bp, Canis familiaris
tatcccgatataacactgcctttaa

SEQ ID NO: 195442 - DNA, 25 bp, Canis familiaris
tacccggcagtaattcctctgtaac

SEQ ID NO: 195443 - DNA, 25 bp, Canis familiaris
tacctcctaggagtttctttgcaaa

SEQ ID NO: 195444 - DNA, 25 bp, Canis familiaris
tacctcctctctatattttctaaat

SEQ ID NO: 195445 - DNA, 25 bp, Canis familiaris
taccatccctttacttacactataa

SEQ ID NO: 195446 - DNA, 25 bp, Canis familiaris
taccacccttggatgtagatctata

SEQ ID NO: 195447 - DNA, 25 bp, Canis familiaris
taccctcactgttttggcaacttag

SEQ ID NO: 195448 - DNA, 25 bp, Canis familiaris
tacccatcagctcttgtggagacta

SEQ ID NO: 195449 - DNA, 25 bp, Canis familiaris
tacctcacaggcatgttgtgagaat

SEQ ID NO: 195450 - DNA, 25 bp, Canis familiaris
tagccgtcaggctttatgtgatgga

SEQ ID NO: 195451 - DNA, 25 bp, Canis familiaris
taccgtcatctggttttggctgcac

SEQ ID NO: 195452 - DNA, 25 bp, Canis familiaris
taccttcagcagtttctgagggcca

SEQ ID NO: 195453 - DNA, 25 bp, Canis familiaris
tacccatcagagtcgtctggagtgt

SEQ ID NO: 195454 - DNA, 25 bp, Canis familiaris
tacccagccagcacctgtgagtgct

SEQ ID NO: 195455 - DNA, 25 bp, Canis familiaris
tagcccagcctaccttatatgtgct

SEQ ID NO: 195456 - DNA, 25 bp, Canis familiaris
tagccagcccgatttctcaatgctg

SEQ ID NO: 195457 - DNA, 25 bp, Canis familiaris
taccaagctgcgcttctgcagactg

SEQ ID NO: 195458 - DNA, 25 bp, Canis familiaris
tagccaagtcatcatcctgaagtga

SEQ ID NO: 195459 - DNA, 25 bp, Canis familiaris
tagccaacactcctcatctgaggga

SEQ ID NO: 195460 - DNA, 25 bp, Canis familiaris
tagccatgactattatttcaggtag

SEQ ID NO: 195461 - DNA, 25 bp, Canis familiaris
tagccagacttcttggctcaggctc

SEQ ID NO: 195462 - DNA, 25 bp, Canis familiaris
tacctgcactgttcagactcagaca

SEQ ID NO: 195463 - DNA, 25 bp, Canis familiaris
tacctgcacattccagacatcatca

SEQ ID NO: 195464 - DNA, 25 bp, Canis familiaris
taccatagatctacagagtctgcat

SEQ ID NO: 195465 - DNA, 25 bp, Canis familiaris
taccaacatcatgcgagtgctcagc

SEQ ID NO: 195466 - DNA, 25 bp, Canis familiaris
tagccaatcacgccaagtgcatcgt

SEQ ID NO: 195467 - DNA, 25 bp, Canis familiaris
tacctgcatgcccagcaagtggagt

SEQ ID NO: 195468 - DNA, 25 bp, Canis familiaris
taccagcagccccaagtgcagtggg

SEQ ID NO: 195469 - DNA, 25 bp, Canis familiaris
taccgcatcttcaagattgcccggg

SEQ ID NO: 195470 - DNA, 25 bp, Canis familiaris
taccctcactcaagtatggccttag

SEQ ID NO: 195471 - DNA, 25 bp, Canis familiaris
tacctctgcctgtgagtggggtcac

SEQ ID NO: 195472 - DNA, 25 bp, Canis familiaris
taccttgtctggagaggacctcccc

SEQ ID NO: 195473 - DNA, 25 bp, Canis familiaris
tagccactccggaggtgacctccgt

SEQ ID NO: 195474 - DNA, 25 bp, Canis familiaris
tagccagctgcctgagtgtgtggcc

SEQ ID NO: 195475 - DNA, 25 bp, Canis familiaris
taccacagcgtgaagcaggggccca

SEQ ID NO: 195476 - DNA, 25 bp, Canis familiaris
taccatggcaatcaaggccgcctga

SEQ ID NO: 195477 - DNA, 25 bp, Canis familiaris
tacctggcattgtatcgtgggccga

SEQ ID NO: 195478 - DNA, 25 bp, Canis familiaris
taccaggtgtttctggcccaaggca

SEQ ID NO: 195479 - DNA, 25 bp, Canis familiaris
tagataggttttttggccccattga

SEQ ID NO: 195480 - DNA, 25 bp, Canis familiaris
tagataccttttgtgacgacgtcca

SEQ ID NO: 195481 - DNA, 25 bp, Canis familiaris
tagttacttttttacagatttgccg

SEQ ID NO: 195482 - DNA, 25 bp, Canis familiaris
tagtcagactttctattcgtattaa

SEQ ID NO: 195483 - DNA, 25 bp, Canis familiaris
taccaggcttgtctttttcttattg

SEQ ID NO: 195484 - DNA, 25 bp, Canis familiaris
taccaagtaatatcctttcttcatt

SEQ ID NO: 195485 - DNA, 25 bp, Canis familiaris
taccacacatcacagaccgtttact

SEQ ID NO: 195486 - DNA, 25 bp, Canis familiaris
tagccaaacccggacagtttatcca

SEQ ID NO: 195487 - DNA, 25 bp, Canis familiaris
taccaataccagggacttcttttcg

SEQ ID NO: 195488 - DNA, 25 bp, Canis familiaris
taccagaacaggtgtcctgcttttt

SEQ ID NO: 195489 - DNA, 25 bp, Canis familiaris
tagcccttcaagtggttctggattt

SEQ ID NO: 195490 - DNA, 25 bp, Canis familiaris
tacctttcgactcatgttgctggag

SEQ ID NO: 195491 - DNA, 25 bp, Canis familiaris
tagcgctgttagctgtagttctgga

SEQ ID NO: 195492 - DNA, 25 bp, Canis familiaris
tagccttctggacgatgagagggga

SEQ ID NO: 195493 - DNA, 25 bp, Canis familiaris
tagatcttgtccacataaggtcaga

SEQ ID NO: 195494 - DNA, 25 bp, Canis familiaris
taggctcttccacaccatagtaaaa

SEQ ID NO: 195495 - DNA, 25 bp, Canis familiaris
tagcctttgccatactctggttaca

SEQ ID NO: 195496 - DNA, 25 bp, Canis familiaris
tagcctcatatgatatacttcagct

SEQ ID NO: 195497 - DNA, 25 bp, Canis familiaris
tagctccttgctaaattctaatgca

SEQ ID NO: 195498 - DNA, 25 bp, Canis familiaris
tacccattcttcactgtagagctgt

SEQ ID NO: 195499 - DNA, 25 bp, Canis familiaris
tagcccagtttaaatttacagtcct

SEQ ID NO: 195500 - DNA, 25 bp, Canis familiaris
tagaaagtctattgtgtttacccca

SEQ ID NO: 195501 - DNA, 25 bp, Canis familiaris
tagaagtgtttctttcttaagccct

SEQ ID NO: 195502 - DNA, 25 bp, Canis familiaris
tatgagggcatttccttttaaaagg

SEQ ID NO: 195503 - DNA, 25 bp, Canis familiaris
taggggaatctagtcgtttgaagtt

SEQ ID NO: 195504 - DNA, 25 bp, Canis familiaris
taggccgaacaaaagtcttaacttg

SEQ ID NO: 195505 - DNA, 25 bp, Canis familiaris
taggggtccaattcgtctatttttg

SEQ ID NO: 195506 - DNA, 25 bp, Canis familiaris
tagggggtatcgttggtgtcatctt

SEQ ID NO: 195507 - DNA, 25 bp, Canis familiaris
tagaagggattggggggtatttctg

SEQ ID NO: 195508 - DNA, 25 bp, Canis familiaris
tagaatgggatgttggggacccctt

SEQ ID NO: 195509 - DNA, 25 bp, Canis familiaris
taccgtgaggacggtgtgacccctt

SEQ ID NO: 195510 - DNA, 25 bp, Canis familiaris
tacccggggccaaatgacacccata

SEQ ID NO: 195511 - DNA, 25 bp, Canis familiaris
tacccggagtcccagatagacccga

SEQ ID NO: 195512 - DNA, 25 bp, Canis familiaris
taccgggcgctcaggaaacacaggc

SEQ ID NO: 195513 - DNA, 25 bp, Canis familiaris
tttctggcctccagtgccaaagggc

SEQ ID NO: 195514 - DNA, 25 bp, Canis familiaris
ttatggggctcgaggccctcaagtc

SEQ ID NO: 195515 - DNA, 25 bp, Canis familiaris
ttcaagctttggcggacgctacgcc

SEQ ID NO: 195516 - DNA, 25 bp, Canis familiaris
tatcgagcggggcaagacgtacctg

SEQ ID NO: 195517 - DNA, 25 bp, Canis familiaris
taccgggaggacggcatcaggacct

SEQ ID NO: 195518 - DNA, 25 bp, Canis familiaris
taccgggacatacgctgcgaggacc

SEQ ID NO: 195519 - DNA, 25 bp, Canis familiaris
tagcacgaaactaattcgaggcccc

SEQ ID NO: 195520 - DNA, 25 bp, Canis familiaris
tagccaaatcctcttcagagtcctc

SEQ ID NO: 195521 - DNA, 25 bp, Canis familiaris
taccaaagtctcctacgattctcgt

SEQ ID NO: 195522 - DNA, 25 bp, Canis familiaris
tacctgtagcttcaggcagatttgc

SEQ ID NO: 195523 - DNA, 25 bp, Canis familiaris
taccatgtagtgtgaccgtttctcc

SEQ ID NO: 195524 - DNA, 25 bp, Canis familiaris
taccatgattgaggcagtcctgtta

SEQ ID NO: 195525 - DNA, 25 bp, Canis familiaris
taccagtcagaggcagtacacacta

SEQ ID NO: 195526 - DNA, 25 bp, Canis familiaris
tagccaccagaggtgcagtccctag

SEQ ID NO: 195527 - DNA, 25 bp, Canis familiaris
tagcccacaggcttgcaagctttag

SEQ ID NO: 195528 - DNA, 25 bp, Canis familiaris
tagcaccatgaagatcaagatcatt

SEQ ID NO: 195529 - DNA, 25 bp, Canis familiaris
tagcctaggtcttatgcacatgcat

SEQ ID NO: 195530 - DNA, 25 bp, Canis familiaris
tacctatggtgctttgcctttaaac

SEQ ID NO: 195531 - DNA, 25 bp, Canis familiaris
tacctatgaggcattgactcagaaa

SEQ ID NO: 195532 - DNA, 25 bp, Canis familiaris
tacctgtgacgcaggcacggtgaga

SEQ ID NO: 195533 - DNA, 25 bp, Canis familiaris
tatcagggaagatgtgccgcctcta

SEQ ID NO: 195534 - DNA, 25 bp, Canis familiaris
tatgcatggtggtggagccgtcaat

SEQ ID NO: 195535 - DNA, 25 bp, Canis familiaris
tagcacaggcgctgtcagccagtga

SEQ ID NO: 195536 - DNA, 25 bp, Canis familiaris
tagcgagtgagtagaagctgcagta

SEQ ID NO: 195537 - DNA, 25 bp, Canis familiaris
tagctgggtgtccaactggctaacc

SEQ ID NO: 195538 - DNA, 25 bp, Canis familiaris
tagctgctggttggtagtgatcgga

SEQ ID NO: 195539 - DNA, 25 bp, Canis familiaris
tagcagttgctaagattattgatca

SEQ ID NO: 195540 - DNA, 25 bp, Canis familiaris
tagccctgcttaatctatgtacaga

SEQ ID NO: 195541 - DNA, 25 bp, Canis familiaris
tagccctgatagattatgcacaaca

SEQ ID NO: 195542 - DNA, 25 bp, Canis familiaris
taccgcgcacagaaggagcgcgact

SEQ ID NO: 195543 - DNA, 25 bp, Canis familiaris
taccagcccagctgtacagcagact

SEQ ID NO: 195544 - DNA, 25 bp, Canis familiaris
taccagcccctgttcatgaaaattt

SEQ ID NO: 195545 - DNA, 25 bp, Canis familiaris
taccctcttcatcacaaaaatcttt

SEQ ID NO: 195546 - DNA, 25 bp, Canis familiaris
tagcccagttcccacaaaaacatct

SEQ ID NO: 195547 - DNA, 25 bp, Canis familiaris
tagccaggtccatctcaaaaccagg

SEQ ID NO: 195548 - DNA, 25 bp, Canis familiaris
tagccaaagtcatccatgaccactt

SEQ ID NO: 195549 - DNA, 25 bp, Canis familiaris
taccaacccaactatatcagacttt

SEQ ID NO: 195550 - DNA, 25 bp, Canis familiaris
taccatatcctaaatttgcactctt

SEQ ID NO: 195551 - DNA, 25 bp, Canis familiaris
tacctggcgctacaattggcctgca

SEQ ID NO: 195552 - DNA, 25 bp, Canis familiaris
tacctgggccccaaggagttcaaga

SEQ ID NO: 195553 - DNA, 25 bp, Canis familiaris
taccccttccaccaggatgattaag

SEQ ID NO: 195554 - DNA, 25 bp, Canis familiaris
taccaccatgtacccaggcattgct

SEQ ID NO: 195555 - DNA, 25 bp, Canis familiaris
taccatggcaagtgccaggctgatg

SEQ ID NO: 195556 - DNA, 25 bp, Canis familiaris
taccatgtggttggctcagcctgtc

SEQ ID NO: 195557 - DNA, 25 bp, Canis familiaris
taccattggccatgtatccttctaa

SEQ ID NO: 195558 - DNA, 25 bp, Canis familiaris
tacctgggcacatgtgagccctctt

SEQ ID NO: 195559 - DNA, 25 bp, Canis familiaris
tacctgtagtagtgagactctcttc

SEQ ID NO: 195560 - DNA, 25 bp, Canis familiaris
taccgtttatcctgatttttcacta

SEQ ID NO: 195561 - DNA, 25 bp, Canis familiaris
tagcgggctgttttaatattttact

SEQ ID NO: 195562 - DNA, 25 bp, Canis familiaris
tagcggtgttctttgaggctctttc

SEQ ID NO: 195563 - DNA, 25 bp, Canis familiaris
tacctgatgttgccaagcggccttt

SEQ ID NO: 195564 - DNA, 25 bp, Canis familiaris
tacctgaagggcttgctggcccatc

SEQ ID NO: 195565 - DNA, 25 bp, Canis familiaris
taccatcaaagtctggagcctgccc

SEQ ID NO: 195566 - DNA, 25 bp, Canis familiaris
taccatcaccaggatgtggaccccc

SEQ ID NO: 195567 - DNA, 25 bp, Canis familiaris
tagccacaagatggtgttgtccccg

SEQ ID NO: 195568 - DNA, 25 bp, Canis familiaris
tagccatccaggctgtgctgtccct

SEQ ID NO: 195569 - DNA, 25 bp, Canis familiaris
tagcataacatggcctggttcaagt

SEQ ID NO: 195570 - DNA, 25 bp, Canis familiaris
tagcatttcagcccttttgcaagcc

SEQ ID NO: 195571 - DNA, 25 bp, Canis familiaris
tagcaagtctggcctcgtgggaggc

SEQ ID NO: 195572 - DNA, 25 bp, Canis familiaris
tagaaatcggaggtgtggatgctct

SEQ ID NO: 195573 - DNA, 25 bp, Canis familiaris
tagaaatcggaggtgtggatgctct

SEQ ID NO: 195574 - DNA, 25 bp, Canis familiaris
tagacccagcagaagtataatcttt

SEQ ID NO: 195575 - DNA, 25 bp, Canis familiaris
tacccccagctcctgggatcatttg

SEQ ID NO: 195576 - DNA, 25 bp, Canis familiaris
tacccctgactggctgggtcattgg

SEQ ID NO: 195577 - DNA, 25 bp, Canis familiaris
tacccgtgcctgtgggtcaacgtgt

SEQ ID NO: 195578 - DNA, 25 bp, Canis familiaris
tagcccaagccctggaggatcgggt

SEQ ID NO: 195579 - DNA, 25 bp, Canis familiaris
tagcccaaaccaaccgagtcgggtg

SEQ ID NO: 195580 - DNA, 25 bp, Canis familiaris
tagcaccagagagcccaaggtcaag

SEQ ID NO: 195581 - DNA, 25 bp, Canis familiaris
tagccataacagggccaatcctcca

SEQ ID NO: 195582 - DNA, 25 bp, Canis familiaris
tagccagaaaggactcctgcttcca

SEQ ID NO: 195583 - DNA, 25 bp, Canis familiaris
taccagacataagatgctcgcccca

SEQ ID NO: 195584 - DNA, 25 bp, Canis familiaris
taccggctgagagatgctcacctca

SEQ ID NO: 195585 - DNA, 25 bp, Canis familiaris
tagccggcgaacattcacacagaca

SEQ ID NO: 195586 - DNA, 25 bp, Canis familiaris
taccggcatgcattacgtctcataa

SEQ ID NO: 195587 - DNA, 25 bp, Canis familiaris
taccgaagttgatgcctctgataag

SEQ ID NO: 195588 - DNA, 25 bp, Canis familiaris
tacctgaaaacatccctctaagaca

SEQ ID NO: 195589 - DNA, 25 bp, Canis familiaris
tacctataaaattggcaggctaata

SEQ ID NO: 195590 - DNA, 25 bp, Canis familiaris
tacctaacagaatggctagtatcaa

SEQ ID NO: 195591 - DNA, 25 bp, Canis familiaris
taccgaaggaaaaccttgtgctagg

SEQ ID NO: 195592 - DNA, 25 bp, Canis familiaris
tagcaaaacccaaaccattgttagg

SEQ ID NO: 195593 - DNA, 25 bp, Canis familiaris
taccaaaagcagccaaccatctttc

SEQ ID NO: 195594 - DNA, 25 bp, Canis familiaris
tagccaccaacacatgaaccgtttg

SEQ ID NO: 195595 - DNA, 25 bp, Canis familiaris
tagctacctataaaacacctgttca

SEQ ID NO: 195596 - DNA, 25 bp, Canis familiaris
tagcatgtttataaataccactttt

SEQ ID NO: 195597 - DNA, 25 bp, Canis familiaris
tagcagtttttgacaccgaacctta

SEQ ID NO: 195598 - DNA, 25 bp, Canis familiaris
tagcagtcttttaatcccagcaaca

SEQ ID NO: 195599 - DNA, 25 bp, Canis familiaris
tagcgtatgttggttctcccagagc

SEQ ID NO: 195600 - DNA, 25 bp, Canis familiaris
tagcttatgttttgttccacacctg

SEQ ID NO: 195601 - DNA, 25 bp, Canis familiaris
tagtttgaccattgaacaacctagg

SEQ ID NO: 195602 - DNA, 25 bp, Canis familiaris
tagctttaccaggaaatcccgaggc

SEQ ID NO: 195603 - DNA, 25 bp, Canis familiaris
tagcctcttcacttaaatcccagag

SEQ ID NO: 195604 - DNA, 25 bp, Canis familiaris
taccatttgccttttatcccaaagt

SEQ ID NO: 195605 - DNA, 25 bp, Canis familiaris
taccaaatgccttgtttcctgttat

SEQ ID NO: 195606 - DNA, 25 bp, Canis familiaris
tagccgaagccttgtgtgtctttta

SEQ ID NO: 195607 - DNA, 25 bp, Canis familiaris
tagccacaagcccaatgcgacattt

SEQ ID NO: 195608 - DNA, 25 bp, Canis familiaris
taccaatctctccaatgccagaatt

SEQ ID NO: 195609 - DNA, 25 bp, Canis familiaris
tacctcttccagctgcagcatggaa

SEQ ID NO: 195610 - DNA, 25 bp, Canis familiaris
taccttctctcgagcagctgtgatg

SEQ ID NO: 195611 - DNA, 25 bp, Canis familiaris
taccattctcacattggcttcagtc

SEQ ID NO: 195612 - DNA, 25 bp, Canis familiaris
tacctttccattaaccactggccta

SEQ ID NO: 195613 - DNA, 25 bp, Canis familiaris
taccttctctgaaaactgccaggcc

SEQ ID NO: 195614 - DNA, 25 bp, Canis familiaris
taccttctctgtttatatccacacc

SEQ ID NO: 195615 - DNA, 25 bp, Canis familiaris
taccgtacactttacacacacacac

SEQ ID NO: 195616 - DNA, 25 bp, Canis familiaris
tagccagtaaatatacactaccttt

SEQ ID NO: 195617 - DNA, 25 bp, Canis familiaris
tagggggaatgttacctcgtcttca

SEQ ID NO: 195618 - DNA, 25 bp, Canis familiaris
tagggaggattgctttccttaaagt

SEQ ID NO: 195619 - DNA, 25 bp, Canis familiaris
tagttagccactggatcttccttca

SEQ ID NO: 195620 - DNA, 25 bp, Canis familiaris
tagcttaatccaactttccttcaaa

SEQ ID NO: 195621 - DNA, 25 bp, Canis familiaris
tagctagacccttttacctataaag

SEQ ID NO: 195622 - DNA, 25 bp, Canis familiaris
tagaagacccatgtttcctggaccg

SEQ ID NO: 195623 - DNA, 25 bp, Canis familiaris
tagaagtacaaggtttcactagctt

SEQ ID NO: 195624 - DNA, 25 bp, Canis familiaris
tataattaagaacctctcctggcct

SEQ ID NO: 195625 - DNA, 25 bp, Canis familiaris
tagaagaaaagtccctcctggtcag

SEQ ID NO: 195626 - DNA, 25 bp, Canis familiaris
tagagaagcacgatcaacccttcca

SEQ ID NO: 195627 - DNA, 25 bp, Canis familiaris
tagagaagaagagaatctgttccac

SEQ ID NO: 195628 - DNA, 25 bp, Canis familiaris
tagccagcatgataccaatcgtact

SEQ ID NO: 195629 - DNA, 25 bp, Canis familiaris
tagctagcataaactctctggtcag

SEQ ID NO: 195630 - DNA, 25 bp, Canis familiaris
tagcagaattgaacacattggccca

SEQ ID NO: 195631 - DNA, 25 bp, Canis familiaris
tagcaaacatcaaaatgctggacct

SEQ ID NO: 195632 - DNA, 25 bp, Canis familiaris
tagaagcattcctcgttgaccttta

SEQ ID NO: 195633 - DNA, 25 bp, Canis familiaris
taggctcttcctgggattactcagt

SEQ ID NO: 195634 - DNA, 25 bp, Canis familiaris
tatcgcctttccactgtattgaatg

SEQ ID NO: 195635 - DNA, 25 bp, Canis familiaris
taccttgtctgccattttgcttaat

SEQ ID NO: 195636 - DNA, 25 bp, Canis familiaris
tacctacctgcaacactgtcttaaa

SEQ ID NO: 195637 - DNA, 25 bp, Canis familiaris
taccttcctgccaacatatctgata

SEQ ID NO: 195638 - DNA, 25 bp, Canis familiaris
tacctcccaccctatttgtaatggg

SEQ ID NO: 195639 - DNA, 25 bp, Canis familiaris
tagtccccaccaccattttatgggg

SEQ ID NO: 195640 - DNA, 25 bp, Canis familiaris
tacctcccaccacgttattgataag

SEQ ID NO: 195641 - DNA, 25 bp, Canis familiaris
tagcttccctgccaagattttgtta

SEQ ID NO: 195642 - DNA, 25 bp, Canis familiaris
tagctccttccacaatttatacata

SEQ ID NO: 195643 - DNA, 25 bp, Canis familiaris
tagcttctctctagaaatgcctgaa

SEQ ID NO: 195644 - DNA, 25 bp, Canis familiaris
tagagtcctatttatattcgaacga

SEQ ID NO: 195645 - DNA, 25 bp, Canis familiaris
tagacccttttaagtgctacctgaa

SEQ ID NO: 195646 - DNA, 25 bp, Canis familiaris
tagaacctagctcacagttacctca

SEQ ID NO: 195647 - DNA, 25 bp, Canis familiaris
tagaactctttctacaatttccaga

SEQ ID NO: 195648 - DNA, 25 bp, Canis familiaris
tagaagattttcagctgttcccaat

SEQ ID NO: 195649 - DNA, 25 bp, Canis familiaris
tagaagggttcccttttctccatat

SEQ ID NO: 195650 - DNA, 25 bp, Canis familiaris
tagtagggcatttcccgttattctt

SEQ ID NO: 195651 - DNA, 25 bp, Canis familiaris
tagtgacggaccctccagggaatct

SEQ ID NO: 195652 - DNA, 25 bp, Canis familiaris
tagataacaacccccagggcttctt

SEQ ID NO: 195653 - DNA, 25 bp, Canis familiaris
tagtgccacaaacttgccagtggta

SEQ ID NO: 195654 - DNA, 25 bp, Canis familiaris
tatgacccaaactctatgctggtgg

SEQ ID NO: 195655 - DNA, 25 bp, Canis familiaris
tagacgccgtcctgatagcggctgc

SEQ ID NO: 195656 - DNA, 25 bp, Canis familiaris
tatgtctccagttcaagttcagttg

SEQ ID NO: 195657 - DNA, 25 bp, Canis familiaris
tagcatttcagtgcccttcagtgag

SEQ ID NO: 195658 - DNA, 25 bp, Canis familiaris
tagatttgttcgggctacctgactt

SEQ ID NO: 195659 - DNA, 25 bp, Canis familiaris
tagttttcctgaagccacttgagca

SEQ ID NO: 195660 - DNA, 25 bp, Canis familiaris
tagtttcctcacagtaatgtcacat

SEQ ID NO: 195661 - DNA, 25 bp, Canis familiaris
tagaatcgcgctcaggcgtggtcac

SEQ ID NO: 195662 - DNA, 25 bp, Canis familiaris
tagaatacactgtggcttttatcta

SEQ ID NO: 195663 - DNA, 25 bp, Canis familiaris
tagaaatcctagcactttatcccaa

SEQ ID NO: 195664 - DNA, 25 bp, Canis familiaris
tagtattcctagctcacgattttcc

SEQ ID NO: 195665 - DNA, 25 bp, Canis familiaris
tagcagattccccagtgagcagatt

SEQ ID NO: 195666 - DNA, 25 bp, Canis familiaris
tagccacacgaccaggactgtacta

SEQ ID NO: 195667 - DNA, 25 bp, Canis familiaris
taccacctggtggtgatcgtcctca

SEQ ID NO: 195668 - DNA, 25 bp, Canis familiaris
taccacttgtgggtgacatcaacca

SEQ ID NO: 195669 - DNA, 25 bp, Canis familiaris
taccaatttgaactccgaagccacc

SEQ ID NO: 195670 - DNA, 25 bp, Canis familiaris
taccagtttaagcccgagtgccatt

SEQ ID NO: 195671 - DNA, 25 bp, Canis familiaris
ttcacttttaagacaaagccccttg

SEQ ID NO: 195672 - DNA, 25 bp, Canis familiaris
tatctctttgaaaaaaacccgtatg

SEQ ID NO: 195673 - DNA, 25 bp, Canis familiaris
tagcctttaatttctaacctcttag

SEQ ID NO: 195674 - DNA, 25 bp, Canis familiaris
tacctattgaatgaaaccctctgat

SEQ ID NO: 195675 - DNA, 25 bp, Canis familiaris
taccatatgcataaaacaacccttt

SEQ ID NO: 195676 - DNA, 25 bp, Canis familiaris
taccaagatgtttacacctcccttt

SEQ ID NO: 195677 - DNA, 25 bp, Canis familiaris
taccatcagtgatttacacccaccc

SEQ ID NO: 195678 - DNA, 25 bp, Canis familiaris
tagcctcagctgctgacatcagccc

SEQ ID NO: 195679 - DNA, 25 bp, Canis familiaris
tagcgtcatctgtgagacacctagc

SEQ ID NO: 195680 - DNA, 25 bp, Canis familiaris
tagcagttgcagtgccagacttgga

SEQ ID NO: 195681 - DNA, 25 bp, Canis familiaris
tagaattgactgacttactgggatt

SEQ ID NO: 195682 - DNA, 25 bp, Canis familiaris
tagcagtgtttcatagacttggctt

SEQ ID NO: 195683 - DNA, 25 bp, Canis familiaris
tagggtactaccaaccaggctttat

SEQ ID NO: 195684 - DNA, 25 bp, Canis familiaris
taggttactactctactttgttcac

SEQ ID NO: 195685 - DNA, 25 bp, Canis familiaris
tagtttcagcatttgcctacctggt

SEQ ID NO: 195686 - DNA, 25 bp, Canis familiaris
tagagttagttttattcttgctggg

SEQ ID NO: 195687 - DNA, 25 bp, Canis familiaris
tagaggtcttattttgtcgttgagg

SEQ ID NO: 195688 - DNA, 25 bp, Canis familiaris
tagcttgtgttatttatgttggggg

SEQ ID NO: 195689 - DNA, 25 bp, Canis familiaris
tagtagggttactagtcccgttgtg

SEQ ID NO: 195690 - DNA, 25 bp, Canis familiaris
tagtaggtttactagtcccgtgtgg

SEQ ID NO: 195691 - DNA, 25 bp, Canis familiaris
tagtaggcgtgtagagtacccgtgt

SEQ ID NO: 195692 - DNA, 25 bp, Canis familiaris
tagaagtaggctatgtccccaggtg

SEQ ID NO: 195693 - DNA, 25 bp, Canis familiaris
tagaagcttcttttgtatcccaggt

SEQ ID NO: 195694 - DNA, 25 bp, Canis familiaris
tagcacatctgtttcaagtttctca

SEQ ID NO: 195695 - DNA, 25 bp, Canis familiaris
tagctgatcttgtttttttccctca

SEQ ID NO: 195696 - DNA, 25 bp, Canis familiaris
taccatatatctttgttttcttcca

SEQ ID NO: 195697 - DNA, 25 bp, Canis familiaris
taccttatatttgctcattttaaac

SEQ ID NO: 195698 - DNA, 25 bp, Canis familiaris
taccatattatttcactcataagtg

SEQ ID NO: 195699 - DNA, 25 bp, Canis familiaris
taccatattatttcattcatacttg

SEQ ID NO: 195700 - DNA, 25 bp, Canis familiaris
taccacattttgaattcttcagtgt

SEQ ID NO: 195701 - DNA, 25 bp, Canis familiaris
taccagcctttgaatggcctgggct

SEQ ID NO: 195702 - DNA, 25 bp, Canis familiaris
taccaatgccctagctagcctggga

SEQ ID NO: 195703 - DNA, 25 bp, Canis familiaris
taccaaggcctcatcatgcacatgg

SEQ ID NO: 195704 - DNA, 25 bp, Canis familiaris
taccatagagtcccgtccatggggt

SEQ ID NO: 195705 - DNA, 25 bp, Canis familiaris
taggcaaaggcgggagcacctgggt

SEQ ID NO: 195706 - DNA, 25 bp, Canis familiaris
tagctcgaagagcaaggcgccaggg

SEQ ID NO: 195707 - DNA, 25 bp, Canis familiaris
tagctgaagaactggtgcgagctgg

SEQ ID NO: 195708 - DNA, 25 bp, Canis familiaris
tagctgaagaactggtgcgagctgg

SEQ ID NO: 195709 - DNA, 25 bp, Canis familiaris
tagctgtagatatcaggtgcttctg

SEQ ID NO: 195710 - DNA, 25 bp, Canis familiaris
tagctgctcatttacattagtgtgt

SEQ ID NO: 195711 - DNA, 25 bp, Canis familiaris
tagtgcaattgtaactggattgaag

SEQ ID NO: 195712 - DNA, 25 bp, Canis familiaris
tagtcaatctgtacatccaaatgca

SEQ ID NO: 195713 - DNA, 25 bp, Canis familiaris
tagagccattgcaatgcatcaataa

SEQ ID NO: 195714 - DNA, 25 bp, Canis familiaris
tagcactgcatgtgctgctgcatat

SEQ ID NO: 195715 - DNA, 25 bp, Canis familiaris
tagagctgagctgctgtctcgattc

SEQ ID NO: 195716 - DNA, 25 bp, Canis familiaris
tagcagatgggccttctacatcctt

SEQ ID NO: 195717 - DNA, 25 bp, Canis familiaris
tagctgatgatccgaataactacct

SEQ ID NO: 195718 - DNA, 25 bp, Canis familiaris
tagctatacatacatacctcacctc

SEQ ID NO: 195719 - DNA, 25 bp, Canis familiaris
tagctatgcctaaaacctggcctcc

SEQ ID NO: 195720 - DNA, 25 bp, Canis familiaris
tagagatggctatggtcgtgatcgt

SEQ ID NO: 195721 - DNA, 25 bp, Canis familiaris
tagcagtgactctggtccttgctta

SEQ ID NO: 195722 - DNA, 25 bp, Canis familiaris
tagagtacccgtgttggctctaacc

SEQ ID NO: 195723 - DNA, 25 bp, Canis familiaris
tagacccctcgtgtaggctggaaac

SEQ ID NO: 195724 - DNA, 25 bp, Canis familiaris
tagacccccctgttgcaggtagaaa

SEQ ID NO: 195725 - DNA, 25 bp, Canis familiaris
tagggccacacacaagggttaacaa

SEQ ID NO: 195726 - DNA, 25 bp, Canis familiaris
tataacacactacaactggttcagt

SEQ ID NO: 195727 - DNA, 25 bp, Canis familiaris
ttaaatgtgctgtgtaaagttagtc

SEQ ID NO: 195728 - DNA, 25 bp, Canis familiaris
ttacaggtgtaattaaagtccttag

SEQ ID NO: 195729 - DNA, 25 bp, Canis familiaris
ttgacggtcagaactaaggccctta

SEQ ID NO: 195730 - DNA, 25 bp, Canis familiaris
ttagggccacacacaagggttaaca

SEQ ID NO: 195731 - DNA, 25 bp, Canis familiaris
tttgtggccccacaaggaaattcct

SEQ ID NO: 195732 - DNA, 25 bp, Canis familiaris
tttatggcccctcaaattatcttct

SEQ ID NO: 195733 - DNA, 25 bp, Canis familiaris
tagctagtcccccaaaattatttat

SEQ ID NO: 195734 - DNA, 25 bp, Canis familiaris
tagctcaacccaatggtaaattttt

SEQ ID NO: 195735 - DNA, 25 bp, Canis familiaris
tagccccctcagttgtagaatgtct

SEQ ID NO: 195736 - DNA, 25 bp, Canis familiaris
tagtccccacgaattaacagttact

SEQ ID NO: 195737 - DNA, 25 bp, Canis familiaris
tagtacccctgataacaacttagta

SEQ ID NO: 195738 - DNA, 25 bp, Canis familiaris
tttgtacccaggagacaccttcggt

SEQ ID NO: 195739 - DNA, 25 bp, Canis familiaris
tttgtactactggtccagctgcctt

SEQ ID NO: 195740 - DNA, 25 bp, Canis familiaris
tagttactatgggttcgctgctcct

SEQ ID NO: 195741 - DNA, 25 bp, Canis familiaris
tagcctcagtaggctggctcagggc

SEQ ID NO: 195742 - DNA, 25 bp, Canis familiaris
tagcaccaatagacttgctcaacac

SEQ ID NO: 195743 - DNA, 25 bp, Canis familiaris
tagcctcagatttctctgacttcct

SEQ ID NO: 195744 - DNA, 25 bp, Canis familiaris
tagccttgctttttactgttgttga

SEQ ID NO: 195745 - DNA, 25 bp, Canis familiaris
tagccttctgagctttctgggtgga

SEQ ID NO: 195746 - DNA, 25 bp, Canis familiaris
taccttccagcgtttgctctggggt

SEQ ID NO: 195747 - DNA, 25 bp, Canis familiaris
taccatttgccgtcatttctgggag

SEQ ID NO: 195748 - DNA, 25 bp, Canis familiaris
taccatctgtgtcttctctttggaa

SEQ ID NO: 195749 - DNA, 25 bp, Canis familiaris
tagcctgctaggtattcctgcttgg

SEQ ID NO: 195750 - DNA, 25 bp, Canis familiaris
tagccgccagggacttatcttggcc

SEQ ID NO: 195751 - DNA, 25 bp, Canis familiaris
tagctagcctgggacttatttggcc

SEQ ID NO: 195752 - DNA, 25 bp, Canis familiaris
tagccacttagcgctgatacttgga

SEQ ID NO: 195753 - DNA, 25 bp, Canis familiaris
tagcccctactcctgaacttggggg

SEQ ID NO: 195754 - DNA, 25 bp, Canis familiaris
tagcccctactcctgaacttggggg

SEQ ID NO: 195755 - DNA, 25 bp, Canis familiaris
tagcccctactcctgaacttggggg

SEQ ID NO: 195756 - DNA, 25 bp, Canis familiaris
tagcccctactcctgaacttggggg

SEQ ID NO: 195757 - DNA, 25 bp, Canis familiaris
tagcccctactcctgaacttggggt

SEQ ID NO: 195758 - DNA, 25 bp, Canis familiaris
tagcccatccactgcagacagttga

SEQ ID NO: 195759 - DNA, 25 bp, Canis familiaris
taccaatgccctagcagcacgggac

SEQ ID NO: 195760 - DNA, 25 bp, Canis familiaris
taccacaggcactgcgacgaggttg

SEQ ID NO: 195761 - DNA, 25 bp, Canis familiaris
taccaagagctcggctgaggacctt

SEQ ID NO: 195762 - DNA, 25 bp, Canis familiaris
taccttacagcccagaggactctga

SEQ ID NO: 195763 - DNA, 25 bp, Canis familiaris
tagccctacactgagaacacctaaa

SEQ ID NO: 195764 - DNA, 25 bp, Canis familiaris
tagccctcacctgaagacaagctca

SEQ ID NO: 195765 - DNA, 25 bp, Canis familiaris
tagaccttcgtcgaagcatcacgcc

SEQ ID NO: 195766 - DNA, 25 bp, Canis familiaris
tagagctccttaccaagctcattcc

SEQ ID NO: 195767 - DNA, 25 bp, Canis familiaris
tagacttcattcaaaactatcttta

SEQ ID NO: 195768 - DNA, 25 bp, Canis familiaris
tagatcccatttagaacattgtgct

SEQ ID NO: 195769 - DNA, 25 bp, Canis familiaris
tagaccgattttcactgacctgttt

SEQ ID NO: 195770 - DNA, 25 bp, Canis familiaris
tagacgcagattagtttaacggctt

SEQ ID NO: 195771 - DNA, 25 bp, Canis familiaris
taccaggctttcttctaaagtgctt

SEQ ID NO: 195772 - DNA, 25 bp, Canis familiaris
tagcacccgttctgatagaactttc

SEQ ID NO: 195773 - DNA, 25 bp, Canis familiaris
tagcccactttcttcagggaatcct

SEQ ID NO: 195774 - DNA, 25 bp, Canis familiaris
taggccctaattaaggtgaacacct

SEQ ID NO: 195775 - DNA, 25 bp, Canis familiaris
taggcccccggagaagcagaaccga

SEQ ID NO: 195776 - DNA, 25 bp, Canis familiaris
tagaccccggaggccggcagaaagg

SEQ ID NO: 195777 - DNA, 25 bp, Canis familiaris
tagcacctcctggaggtcaggccct

SEQ ID NO: 195778 - DNA, 25 bp, Canis familiaris
tagctccacctggagtgctgacgac

SEQ ID NO: 195779 - DNA, 25 bp, Canis familiaris
tagcgacgcgctggcgttacagcgc

SEQ ID NO: 195780 - DNA, 25 bp, Canis familiaris
tagccacagagttcatatatcccgc

SEQ ID NO: 195781 - DNA, 25 bp, Canis familiaris
tagcacaagatgcttgagacccaga

SEQ ID NO: 195782 - DNA, 25 bp, Canis familiaris
tagacttggcctcgagactgaacaa

SEQ ID NO: 195783 - DNA, 25 bp, Canis familiaris
tagacagtgcagatggcaattcata

SEQ ID NO: 195784 - DNA, 25 bp, Canis familiaris
tagaccacgacgtcacatctgcaaa

SEQ ID NO: 195785 - DNA, 25 bp, Canis familiaris
tagaacacaacctcatagctaattc

SEQ ID NO: 195786 - DNA, 25 bp, Canis familiaris
tagaccccatcctcagagattctga

SEQ ID NO: 195787 - DNA, 25 bp, Canis familiaris
tagaacccgcacacagattcttcta

SEQ ID NO: 195788 - DNA, 25 bp, Canis familiaris
tagaaggacccccgagtttgatagt

SEQ ID NO: 195789 - DNA, 25 bp, Canis familiaris
tagaatttcccctggtttactatag

SEQ ID NO: 195790 - DNA, 25 bp, Canis familiaris
tagtttaaccctgcctattgtttag

SEQ ID NO: 195791 - DNA, 25 bp, Canis familiaris
tagtgttaacccgcctaattgtgtt

SEQ ID NO: 195792 - DNA, 25 bp, Canis familiaris
taggtaattcccctccagaattgtc

SEQ ID NO: 195793 - DNA, 25 bp, Canis familiaris
taggtatagctctcccaactatgtc

SEQ ID NO: 195794 - DNA, 25 bp, Canis familiaris
tagagactcctatccaaactgtatc

SEQ ID NO: 195795 - DNA, 25 bp, Canis familiaris
tagaaattgctctgccaacaactaa

SEQ ID NO: 195796 - DNA, 25 bp, Canis familiaris
tagaattgctgtcccctacagatgt

SEQ ID NO: 195797 - DNA, 25 bp, Canis familiaris
tagaattatattccctgcacttccg

SEQ ID NO: 195798 - DNA, 25 bp, Canis familiaris
tagaagtattcctccctttggaact

SEQ ID NO: 195799 - DNA, 25 bp, Canis familiaris
tagacaattacctaccctgtttatt

SEQ ID NO: 195800 - DNA, 25 bp, Canis familiaris
tagacagagtagggccgcacctttt

SEQ ID NO: 195801 - DNA, 25 bp, Canis familiaris
tagacagcgtcacaacactgctctt

SEQ ID NO: 195802 - DNA, 25 bp, Canis familiaris
tagcgctgctttcaaagcctcttgc

SEQ ID NO: 195803 - DNA, 25 bp, Canis familiaris
tagtcgtttagaacacctcgtcaac

SEQ ID NO: 195804 - DNA, 25 bp, Canis familiaris
tagttgtgttagggccgcccacaac

SEQ ID NO: 195805 - DNA, 25 bp, Canis familiaris
tagttggcttaaaagcagccaccaa

SEQ ID NO: 195806 - DNA, 25 bp, Canis familiaris
tagtttcgtggaaaagcctcaccgg

SEQ ID NO: 195807 - DNA, 25 bp, Canis familiaris
tatgttccgtcggttaccttacatg

SEQ ID NO: 195808 - DNA, 25 bp, Canis familiaris
tagtatgggtcggtctagtccgtcg

SEQ ID NO: 195809 - DNA, 25 bp, Canis familiaris
tagtggggtcaggcccgtgaagttg

SEQ ID NO: 195810 - DNA, 25 bp, Canis familiaris
tagtctgtgttctcccaggggaaaa

SEQ ID NO: 195811 - DNA, 25 bp, Canis familiaris
tagttggcgacatgcccagggacaa

SEQ ID NO: 195812 - DNA, 25 bp, Canis familiaris
tagaatgcccaatcggaggagaagg

SEQ ID NO: 195813 - DNA, 25 bp, Canis familiaris
taggtaaccaaccgagctagccagg

SEQ ID NO: 195814 - DNA, 25 bp, Canis familiaris
tttgaagcttaaccgactgagccac

SEQ ID NO: 195815 - DNA, 25 bp, Canis familiaris
tttgggcatccaaggctcaaaccac

SEQ ID NO: 195816 - DNA, 25 bp, Canis familiaris
ttctgaggaatctccgaaaaccggg

SEQ ID NO: 195817 - DNA, 25 bp, Canis familiaris
taccaggccattttggaaaagccct

SEQ ID NO: 195818 - DNA, 25 bp, Canis familiaris
tagctcgttctttgggagaaaccca

SEQ ID NO: 195819 - DNA, 25 bp, Canis familiaris
tagccgattggcagaggagcagaca

SEQ ID NO: 195820 - DNA, 25 bp, Canis familiaris
tagccctagccaatcagctggctga

SEQ ID NO: 195821 - DNA, 25 bp, Canis familiaris
tagcctctggcatctcagtgagaac

SEQ ID NO: 195822 - DNA, 25 bp, Canis familiaris
tagcgctgtccttcttggagtacag

SEQ ID NO: 195823 - DNA, 25 bp, Canis familiaris
tagccagctccctatttataacact

SEQ ID NO: 195824 - DNA, 25 bp, Canis familiaris
tagacacccctacttaaggcctaat

SEQ ID NO: 195825 - DNA, 25 bp, Canis familiaris
tagactaccagcccttaagacctaa

SEQ ID NO: 195826 - DNA, 25 bp, Canis familiaris
tagaccaatggccctggaacagcct

SEQ ID NO: 195827 - DNA, 25 bp, Canis familiaris
tagactatgaggctgcgaaggcaga

SEQ ID NO: 195828 - DNA, 25 bp, Canis familiaris
tagccattagtgacactatagacag

SEQ ID NO: 195829 - DNA, 25 bp, Canis familiaris
taccattgtgtgtcctatttgcttt

SEQ ID NO: 195830 - DNA, 25 bp, Canis familiaris
taccatattggtcactttggcttat

SEQ ID NO: 195831 - DNA, 25 bp, Canis familiaris
taccatctttgtcactttgtgctct

SEQ ID NO: 195832 - DNA, 25 bp, Canis familiaris
tagccatcttcttggacacgtatcc

SEQ ID NO: 195833 - DNA, 25 bp, Canis familiaris
tagccctgttgcagaggcagttcga

SEQ ID NO: 195834 - DNA, 25 bp, Canis familiaris
tagcccggtgctcgggtgttctatg

SEQ ID NO: 195835 - DNA, 25 bp, Canis familiaris
tagcagccggtgacggcggagttcc

SEQ ID NO: 195836 - DNA, 25 bp, Canis familiaris
tagagactgggacccgggtccctgg

SEQ ID NO: 195837 - DNA, 25 bp, Canis familiaris
tagacacagggaaccggcggtctcg

SEQ ID NO: 195838 - DNA, 25 bp, Canis familiaris
tagaggagggaagcagtgactggtc

SEQ ID NO: 195839 - DNA, 25 bp, Canis familiaris
tatgggcagaggcaggggcaagcat

SEQ ID NO: 195840 - DNA, 25 bp, Canis familiaris
tatggagaggggccgggagcgtcgg

SEQ ID NO: 195841 - DNA, 25 bp, Canis familiaris
tagggagggtcccggagcaggagat

SEQ ID NO: 195842 - DNA, 25 bp, Canis familiaris
tagcgggaaggaccggagggagcca

SEQ ID NO: 195843 - DNA, 25 bp, Canis familiaris
tagcccggcggaccaggaaggcatg

SEQ ID NO: 195844 - DNA, 25 bp, Canis familiaris
tagacctgggggcctgtgagatgtg

SEQ ID NO: 195845 - DNA, 25 bp, Canis familiaris
tagccccacttccacatgtggaatg

SEQ ID NO: 195846 - DNA, 25 bp, Canis familiaris
tagcacccagcttgtgtgcattgga

SEQ ID NO: 195847 - DNA, 25 bp, Canis familiaris
tagcacctgcatgtgctgtgcatat

SEQ ID NO: 195848 - DNA, 25 bp, Canis familiaris
tatgcagctcttccatctggctgct

SEQ ID NO: 195849 - DNA, 25 bp, Canis familiaris
tagcagctctccttctgagagccct

SEQ ID NO: 195850 - DNA, 25 bp, Canis familiaris
tagcagctgtagtagttgtggcctt

SEQ ID NO: 195851 - DNA, 25 bp, Canis familiaris
tagcctatcagctaattctctgact

SEQ ID NO: 195852 - DNA, 25 bp, Canis familiaris
tagttacaggagtttcgagcttcac

SEQ ID NO: 195853 - DNA, 25 bp, Canis familiaris
tagcttactggtatagtagcctcta

SEQ ID NO: 195854 - DNA, 25 bp, Canis familiaris
tagttccgatgcagaagctaccctt

SEQ ID NO: 195855 - DNA, 25 bp, Canis familiaris
tatgttcgggataactgccaccctt

SEQ ID NO: 195856 - DNA, 25 bp, Canis familiaris
tagaactgtagtaaaagcccctgat

SEQ ID NO: 195857 - DNA, 25 bp, Canis familiaris
tagaatctaacttaaacctactatt

SEQ ID NO: 195858 - DNA, 25 bp, Canis familiaris
tagacttttctttaacattgaccaa

SEQ ID NO: 195859 - DNA, 25 bp, Canis familiaris
tagacttaccctaatttatgaacaa

SEQ ID NO: 195860 - DNA, 25 bp, Canis familiaris
tagacccagcacgtgttcttgaaac

SEQ ID NO: 195861 - DNA, 25 bp, Canis familiaris
tagcctcaagcacctggattctaga

SEQ ID NO: 195862 - DNA, 25 bp, Canis familiaris
tagctgtaatcacctatgtttaaaa

SEQ ID NO: 195863 - DNA, 25 bp, Canis familiaris
tagcagaaactgacccttgataaag

SEQ ID NO: 195864 - DNA, 25 bp, Canis familiaris
tagacgaccgatgctgccagaaaag

SEQ ID NO: 195865 - DNA, 25 bp, Canis familiaris
tagacggtactaggcacaaataagc

SEQ ID NO: 195866 - DNA, 25 bp, Canis familiaris
tagaaggtggtcccaccaatccgtc

SEQ ID NO: 195867 - DNA, 25 bp, Canis familiaris
tatgaagggactcttccaacctggt

SEQ ID NO: 195868 - DNA, 25 bp, Canis familiaris
tagagagaggacctccaccaaccta

SEQ ID NO: 195869 - DNA, 25 bp, Canis familiaris
tagaaggcgaccacccatatgacat

SEQ ID NO: 195870 - DNA, 25 bp, Canis familiaris
tagaagatcaaaaacccaagcaaat

SEQ ID NO: 195871 - DNA, 25 bp, Canis familiaris
tagatatacaaacactaccaccagt

SEQ ID NO: 195872 - DNA, 25 bp, Canis familiaris
tagaagacaactctgtacctcaagt

SEQ ID NO: 195873 - DNA, 25 bp, Canis familiaris
tagcaaacaccgtgagtccgatggt

SEQ ID NO: 195874 - DNA, 25 bp, Canis familiaris
tagaagacaccggggaccgatccag

SEQ ID NO: 195875 - DNA, 25 bp, Canis familiaris
tagaagacaccggggaccgatccag

SEQ ID NO: 195876 - DNA, 25 bp, Canis familiaris
tagaagacaccggggaccgatccag

SEQ ID NO: 195877 - DNA, 25 bp, Canis familiaris
tagccagaagacaagggaccctcgc

SEQ ID NO: 195878 - DNA, 25 bp, Canis familiaris
tagccagaaactaatcgagccccct

SEQ ID NO: 195879 - DNA, 25 bp, Canis familiaris
taccacaagcctaatcaactaccca

SEQ ID NO: 195880 - DNA, 25 bp, Canis familiaris
taccaaaccttacacagaaccactt

SEQ ID NO: 195881 - DNA, 25 bp, Canis familiaris
tagcctaaccttgagaatgataccc

SEQ ID NO: 195882 - DNA, 25 bp, Canis familiaris
tagcctacagctgggaaaaatcacc

SEQ ID NO: 195883 - DNA, 25 bp, Canis familiaris
tagccttatctagaatataacaccg

SEQ ID NO: 195884 - DNA, 25 bp, Canis familiaris
tagcaatgttcctcaatacacctcc

SEQ ID NO: 195885 - DNA, 25 bp, Canis familiaris
tagcaattagcctcagttcagatct

SEQ ID NO: 195886 - DNA, 25 bp, Canis familiaris
tagctgttcagcagggtaagcatct

SEQ ID NO: 195887 - DNA, 25 bp, Canis familiaris
tagctggccacaaggcccagagctc

SEQ ID NO: 195888 - DNA, 25 bp, Canis familiaris
tagtccgccagagggccagagcggc

SEQ ID NO: 195889 - DNA, 25 bp, Canis familiaris
tagactggccacagggcacattcgc

SEQ ID NO: 195890 - DNA, 25 bp, Canis familiaris
tatgactgggtgagggccctaggcc

SEQ ID NO: 195891 - DNA, 25 bp, Canis familiaris
taggttagggatggggcctaggcca

SEQ ID NO: 195892 - DNA, 25 bp, Canis familiaris
taggtcttgaggtggagcctcctgg

SEQ ID NO: 195893 - DNA, 25 bp, Canis familiaris
tagagtaatgcacgcaggttcccct

SEQ ID NO: 195894 - DNA, 25 bp, Canis familiaris
tagaagatgaagccgagtctcccca

SEQ ID NO: 195895 - DNA, 25 bp, Canis familiaris
tagaagggagttttcttccctcaca

SEQ ID NO: 195896 - DNA, 25 bp, Canis familiaris
tagaagtgccttttacttccaacac

SEQ ID NO: 195897 - DNA, 25 bp, Canis familiaris
tagaagtgccatttcccttcgaaac

SEQ ID NO: 195898 - DNA, 25 bp, Canis familiaris
tagcaggtgccttatttttggtttt

SEQ ID NO: 195899 - DNA, 25 bp, Canis familiaris
tagcctgctcctatttttttttaag

SEQ ID NO: 195900 - DNA, 25 bp, Canis familiaris
tagcatcctttagttttagttttag

SEQ ID NO: 195901 - DNA, 25 bp, Canis familiaris
tagctgcgattttttttacattcat

SEQ ID NO: 195902 - DNA, 25 bp, Canis familiaris
tagctatgaattttttttctaacct

SEQ ID NO: 195903 - DNA, 25 bp, Canis familiaris
tagcaatgagatggtgttttctatc

SEQ ID NO: 195904 - DNA, 25 bp, Canis familiaris
tagagtactgcactgtagtctccat

SEQ ID NO: 195905 - DNA, 25 bp, Canis familiaris
tagatgcatcctgggtgagctctgc

SEQ ID NO: 195906 - DNA, 25 bp, Canis familiaris
tagctgtgtggccaggcagtctgct

SEQ ID NO: 195907 - DNA, 25 bp, Canis familiaris
tagctcagtggtagagcgcttgcct

SEQ ID NO: 195908 - DNA, 25 bp, Canis familiaris
tagcctgtgggtggtgattgccttt

SEQ ID NO: 195909 - DNA, 25 bp, Canis familiaris
tagcctgggaagtctgcatcttctc

SEQ ID NO: 195910 - DNA, 25 bp, Canis familiaris
tagcctggtgcaggcttgcttccca

SEQ ID NO: 195911 - DNA, 25 bp, Canis familiaris
tagacgctgagatgctggtgtaaca

SEQ ID NO: 195912 - DNA, 25 bp, Canis familiaris
tagcacgaggcttcatatttacaac

SEQ ID NO: 195913 - DNA, 25 bp, Canis familiaris
tagccctgaccttatttgacaaagt

SEQ ID NO: 195914 - DNA, 25 bp, Canis familiaris
tagctccttcgttctctgatgagga

SEQ ID NO: 195915 - DNA, 25 bp, Canis familiaris
tagacacttcgccatctgtacagtg

SEQ ID NO: 195916 - DNA, 25 bp, Canis familiaris
tagcaccttcaggctagttcctgtc

SEQ ID NO: 195917 - DNA, 25 bp, Canis familiaris
tagccatgtatagctttggttctca

SEQ ID NO: 195918 - DNA, 25 bp, Canis familiaris
taggagtaacctctagttcttaaga

SEQ ID NO: 195919 - DNA, 25 bp, Canis familiaris
taggagtaacctctagttcttaaga

SEQ ID NO: 195920 - DNA, 25 bp, Canis familiaris
taggagtaacctctagttcttaaga

SEQ ID NO: 195921 - DNA, 25 bp, Canis familiaris
taggaccaatcccttaacctgtggg

SEQ ID NO: 195922 - DNA, 25 bp, Canis familiaris
tagagtccaactcttatcctcttgg

SEQ ID NO: 195923 - DNA, 25 bp, Canis familiaris
tagagggatacctttcttccttgca

SEQ ID NO: 195924 - DNA, 25 bp, Canis familiaris
taggtagaagcctctggttttcgcc

SEQ ID NO: 195925 - DNA, 25 bp, Canis familiaris
tagctgcaagaagcctctgttgtgt

SEQ ID NO: 195926 - DNA, 25 bp, Canis familiaris
tagcaagcgcaaggccctgggttcg

SEQ ID NO: 195927 - DNA, 25 bp, Canis familiaris
tagaagccaggggccattgcgacca

SEQ ID NO: 195928 - DNA, 25 bp, Canis familiaris
tagaagacgtggttcttcctctctg

SEQ ID NO: 195929 - DNA, 25 bp, Canis familiaris
tagagaccgaggacagtcccctatc

SEQ ID NO: 195930 - DNA, 25 bp, Canis familiaris
tagagccggatggtgactcaccgcc

SEQ ID NO: 195931 - DNA, 25 bp, Canis familiaris
taccactggcatcgtgatggactcc

SEQ ID NO: 195932 - DNA, 25 bp, Canis familiaris
taccactggcatcgtgatggactcc

SEQ ID NO: 195933 - DNA, 25 bp, Canis familiaris
taccagatggcttgtgaaatccccc

SEQ ID NO: 195934 - DNA, 25 bp, Canis familiaris
taccagtgttttaacatcctctctt

SEQ ID NO: 195935 - DNA, 25 bp, Canis familiaris
taccaggtttatagtaactcctcat

SEQ ID NO: 195936 - DNA, 25 bp, Canis familiaris
tagccaggcttctatttcataccct

SEQ ID NO: 195937 - DNA, 25 bp, Canis familiaris
tagccaggcttctatttcataccct

SEQ ID NO: 195938 - DNA, 25 bp, Canis familiaris
tagccaggcttctatttcataccct

SEQ ID NO: 195939 - DNA, 25 bp, Canis familiaris
tagccaggcttctatttcataccct

SEQ ID NO: 195940 - DNA, 25 bp, Canis familiaris
tagccaggcttctatttcataccct

SEQ ID NO: 195941 - DNA, 25 bp, Canis familiaris
tagccaggcttctatttcataccct

SEQ ID NO: 195942 - DNA, 25 bp, Canis familiaris
tagccaggcttctatttcataccct

SEQ ID NO: 195943 - DNA, 25 bp, Canis familiaris
tagccaggcttctatttcataccct

SEQ ID NO: 195944 - DNA, 25 bp, Canis familiaris
tagccaggcttctatttcataccct

SEQ ID NO: 195945 - DNA, 25 bp, Canis familiaris
tagccaggcttctatttcataccct

SEQ ID NO: 195946 - DNA, 25 bp, Canis familiaris
tagccaggcttctatttcataccct

SEQ ID NO: 195947 - DNA, 25 bp, Canis familiaris
tagccaggcttctatttcataccct

SEQ ID NO: 195948 - DNA, 25 bp, Canis familiaris
tagcaaggaagccatatacatcact

SEQ ID NO: 195949 - DNA, 25 bp, Canis familiaris
tagaaaaagcccaaatccttcctga

SEQ ID NO: 195950 - DNA, 25 bp, Canis familiaris
tagagtaaacgggacccttcaagat

SEQ ID NO: 195951 - DNA, 25 bp, Canis familiaris
tagggaacacggtagatcctttggt

SEQ ID NO: 195952 - DNA, 25 bp, Canis familiaris
tagaggaaatttgaaccagttggaa

SEQ ID NO: 195953 - DNA, 25 bp, Canis familiaris
tatcgggaatataccaacctgggga

SEQ ID NO: 195954 - DNA, 25 bp, Canis familiaris
tatgtgaattatacccaacctggga

SEQ ID NO: 195955 - DNA, 25 bp, Canis familiaris
tagctagttcatggctccaatcctt

SEQ ID NO: 195956 - DNA, 25 bp, Canis familiaris
tagaatctttgttccaacctttgtt

SEQ ID NO: 195957 - DNA, 25 bp, Canis familiaris
tagacactttattaaagcacttttt

SEQ ID NO: 195958 - DNA, 25 bp, Canis familiaris
tagccaattctaaaagcagccatct

SEQ ID NO: 195959 - DNA, 25 bp, Canis familiaris
tagccagaactttaaacctctcaga

SEQ ID NO: 195960 - DNA, 25 bp, Canis familiaris
tagccaaactatgaaagcagcccaa

SEQ ID NO: 195961 - DNA, 25 bp, Canis familiaris
tagcagcaatatttacaaaagccaa

SEQ ID NO: 195962 - DNA, 25 bp, Canis familiaris
tagcagcaatgtctacaatggccaa

SEQ ID NO: 195963 - DNA, 25 bp, Canis familiaris
tagcacgagataatacattttcatt

SEQ ID NO: 195964 - DNA, 25 bp, Canis familiaris
tagccacagacctagcattgtacat

SEQ ID NO: 195965 - DNA, 25 bp, Canis familiaris
taggcaggcacttggcggaactgga

SEQ ID NO: 195966 - DNA, 25 bp, Canis familiaris
taggcccttgggggatcttgaaccg

SEQ ID NO: 195967 - DNA, 25 bp, Canis familiaris
tagacttttgggggtgttgccacgg

SEQ ID NO: 195968 - DNA, 25 bp, Canis familiaris
tagatcttgtggtgggcagttcccc

SEQ ID NO: 195969 - DNA, 25 bp, Canis familiaris
tagctcttctgtgatggtacatccc

SEQ ID NO: 195970 - DNA, 25 bp, Canis familiaris
tagcttctctgtttcattaacttca

SEQ ID NO: 195971 - DNA, 25 bp, Canis familiaris
tagcttttgtattcagaagtctaat

SEQ ID NO: 195972 - DNA, 25 bp, Canis familiaris
tagccattgttttataaccacagta

SEQ ID NO: 195973 - DNA, 25 bp, Canis familiaris
tagccattcttttattttaacattt

SEQ ID NO: 195974 - DNA, 25 bp, Canis familiaris
tagctcttatttttcttatgttttt

SEQ ID NO: 195975 - DNA, 25 bp, Canis familiaris
tagctgcatttttttctgatgacta

SEQ ID NO: 195976 - DNA, 25 bp, Canis familiaris
tagccatacttgttttgatgtctat

SEQ ID NO: 195977 - DNA, 25 bp, Canis familiaris
tagccattttgattcctgtttgatt

SEQ ID NO: 195978 - DNA, 25 bp, Canis familiaris
tagccctttcaagtcatgtcgtgtt

SEQ ID NO: 195979 - DNA, 25 bp, Canis familiaris
tagcccttggcaccattgtgaggtt

SEQ ID NO: 195980 - DNA, 25 bp, Canis familiaris
tagcaccctcgggttggtggtttct

SEQ ID NO: 195981 - DNA, 25 bp, Canis familiaris
tagaccctctgatctatggggtgta

SEQ ID NO: 195982 - DNA, 25 bp, Canis familiaris
tagccagcctaattgttagttttga

SEQ ID NO: 195983 - DNA, 25 bp, Canis familiaris
tagcgacccatactttttttctgaa

SEQ ID NO: 195984 - DNA, 25 bp, Canis familiaris
tagaacccaagtttctccttcaaat

SEQ ID NO: 195985 - DNA, 25 bp, Canis familiaris
tagacacccagagactgtctcccaa

SEQ ID NO: 195986 - DNA, 25 bp, Canis familiaris
tagacccttgagtattgtgcctcca

SEQ ID NO: 195987 - DNA, 25 bp, Canis familiaris
tagcccccatgatatgattttccaa

SEQ ID NO: 195988 - DNA, 25 bp, Canis familiaris
tagcccctcagagcgtctaattaat

SEQ ID NO: 195989 - DNA, 25 bp, Canis familiaris
tagcccccagagagtgtcagatgaa

SEQ ID NO: 195990 - DNA, 25 bp, Canis familiaris
tagcctgcccagtggtgtgacaatc

SEQ ID NO: 195991 - DNA, 25 bp, Canis familiaris
tagactgtactgtagcaggtcacaa

SEQ ID NO: 195992 - DNA, 25 bp, Canis familiaris
tagacatggactcaagtgcccttgt

SEQ ID NO: 195993 - DNA, 25 bp, Canis familiaris
tagggtatctaccagcatcccttgt

SEQ ID NO: 195994 - DNA, 25 bp, Canis familiaris
tttggttcataagctctacctgccg

SEQ ID NO: 195995 - DNA, 25 bp, Canis familiaris
tttggtcctgaatcttacccagagc

SEQ ID NO: 195996 - DNA, 25 bp, Canis familiaris
tattgcaacctatagttatgcccga

SEQ ID NO: 195997 - DNA, 25 bp, Canis familiaris
tagctgatactttaggtcttgaccg

SEQ ID NO: 195998 - DNA, 25 bp, Canis familiaris
tagctacctctttgtttatgcacca

SEQ ID NO: 195999 - DNA, 25 bp, Canis familiaris
tagcaactactttaattacactcaa

SEQ ID NO: 196000 - DNA, 25 bp, Canis familiaris
tagaactactctttgattcaacaac

SEQ ID NO: 196001 - DNA, 25 bp, Canis familiaris
taggcactgttctcagtctgcaaag

SEQ ID NO: 196002 - DNA, 25 bp, Canis familiaris
tagcagcacgttcgtcgactggtag

SEQ ID NO: 196003 - DNA, 25 bp, Canis familiaris
tagcagcacgtcgttcgactgggta

SEQ ID NO: 196004 - DNA, 25 bp, Canis familiaris
tagactctgtctggggattctggct

SEQ ID NO: 196005 - DNA, 25 bp, Canis familiaris
ttgacattccggaaatttggatcga

SEQ ID NO: 196006 - DNA, 25 bp, Canis familiaris
tagcacattccccacatgatttgaa

SEQ ID NO: 196007 - DNA, 25 bp, Canis familiaris
tagcatctactcagggcagttatat

SEQ ID NO: 196008 - DNA, 25 bp, Canis familiaris
tagcatttctagtcttggttttaga

SEQ ID NO: 196009 - DNA, 25 bp, Canis familiaris
tagcattcctagactccggttttat

SEQ ID NO: 196010 - DNA, 25 bp, Canis familiaris
tattgacactagcaccaggtttggt

SEQ ID NO: 196011 - DNA, 25 bp, Canis familiaris
tttgtcgtagcgtgtgttttggtcc

SEQ ID NO: 196012 - DNA, 25 bp, Canis familiaris
tatagttaagagtctgtttcctggt

SEQ ID NO: 196013 - DNA, 25 bp, Canis familiaris
tagagtggaaaggtgttgcccggtc

SEQ ID NO: 196014 - DNA, 25 bp, Canis familiaris
tagagggggagcttgtgggacagtg

SEQ ID NO: 196015 - DNA, 25 bp, Canis familiaris
taggggtgctgagttcgagttcgta

SEQ ID NO: 196016 - DNA, 25 bp, Canis familiaris
tagctgggctggttgtcatggctac

SEQ ID NO: 196017 - DNA, 25 bp, Canis familiaris
tagcggcagatgaacccgagcgacc

SEQ ID NO: 196018 - DNA, 25 bp, Canis familiaris
tagcagagcagctccctcgctgcga

SEQ ID NO: 196019 - DNA, 25 bp, Canis familiaris
tagcaaagcattcctcttcgaacct

SEQ ID NO: 196020 - DNA, 25 bp, Canis familiaris
tagcaaacatgtgcctttggcccag

SEQ ID NO: 196021 - DNA, 25 bp, Canis familiaris
tagcatagggttcctgggtggctca

SEQ ID NO: 196022 - DNA, 25 bp, Canis familiaris
tagcagaggtttccggagattccgc

SEQ ID NO: 196023 - DNA, 25 bp, Canis familiaris
taggagggctagacaggagaccccc

SEQ ID NO: 196024 - DNA, 25 bp, Canis familiaris
tagctggggtggcaggaatctcctc

SEQ ID NO: 196025 - DNA, 25 bp, Canis familiaris
tagctaatggctccaaaaccacctc

SEQ ID NO: 196026 - DNA, 25 bp, Canis familiaris
tagcaagttattgagacacccctcc

SEQ ID NO: 196027 - DNA, 25 bp, Canis familiaris
tagcaagatattcaaactcccctac

SEQ ID NO: 196028 - DNA, 25 bp, Canis familiaris
tagcaaagtcatgaaacatcccgtc

SEQ ID NO: 196029 - DNA, 25 bp, Canis familiaris
tagcaaagtctgaacggctaccgcc

SEQ ID NO: 196030 - DNA, 25 bp, Canis familiaris
tagcattcggcaaagcaggccaccc

SEQ ID NO: 196031 - DNA, 25 bp, Canis familiaris
tagcatcatcggactacattgacac

SEQ ID NO: 196032 - DNA, 25 bp, Canis familiaris
tagcccagtggctcactgatctggc

SEQ ID NO: 196033 - DNA, 25 bp, Canis familiaris
tagcccactagagactgcctgtgtt

SEQ ID NO: 196034 - DNA, 25 bp, Canis familiaris
tagaacctggagggatgcctgggtg

SEQ ID NO: 196035 - DNA, 25 bp, Canis familiaris
tatgaaacttcgctgttctgggctt

SEQ ID NO: 196036 - DNA, 25 bp, Canis familiaris
tagagggcccgaggcttctgggcca

SEQ ID NO: 196037 - DNA, 25 bp, Canis familiaris
ttgggtacgtgcagcattacggcct

SEQ ID NO: 196038 - DNA, 25 bp, Canis familiaris
tatgggtagggctctgaccaagctt

SEQ ID NO: 196039 - DNA, 25 bp, Canis familiaris
ttggtaaggctctgattccagacgt

SEQ ID NO: 196040 - DNA, 25 bp, Canis familiaris
tagagaaccttatctgtcagcagcc

SEQ ID NO: 196041 - DNA, 25 bp, Canis familiaris
tagcagaaactaaatcgagccccct

SEQ ID NO: 196042 - DNA, 25 bp, Canis familiaris
taggggacgaaataccgggctccag

SEQ ID NO: 196043 - DNA, 25 bp, Canis familiaris
tagggtacgaaagacaggaggactc

SEQ ID NO: 196044 - DNA, 25 bp, Canis familiaris
tagggtttcttatatgagtaggtcc

SEQ ID NO: 196045 - DNA, 25 bp, Canis familiaris
tagggttggtttcattgttagtact

SEQ ID NO: 196046 - DNA, 25 bp, Canis familiaris
tagggttatttcttatttacagtag

SEQ ID NO: 196047 - DNA, 25 bp, Canis familiaris
tagttgttttccttagtttcagcct

SEQ ID NO: 196048 - DNA, 25 bp, Canis familiaris
tagactttcttggttctgttaccct

SEQ ID NO: 196049 - DNA, 25 bp, Canis familiaris
tagaatcttctgagcttgtttcccc

SEQ ID NO: 196050 - DNA, 25 bp, Canis familiaris
tagagaccatctgtccttaactcgc

SEQ ID NO: 196051 - DNA, 25 bp, Canis familiaris
tagagaatcactgttccttccgtgt

SEQ ID NO: 196052 - DNA, 25 bp, Canis familiaris
tagagagaccccaggggcacggctt

SEQ ID NO: 196053 - DNA, 25 bp, Canis familiaris
tagaacaccctcaggggctcagggg

SEQ ID NO: 196054 - DNA, 25 bp, Canis familiaris
tagacctccccaggtaggctgaggg

SEQ ID NO: 196055 - DNA, 25 bp, Canis familiaris
tagaccccaccaatttgtgcgagtt

SEQ ID NO: 196056 - DNA, 25 bp, Canis familiaris
tagaatcctcacggtgacggcgagc

SEQ ID NO: 196057 - DNA, 25 bp, Canis familiaris
tagaatcgcatcactgttaccagag

SEQ ID NO: 196058 - DNA, 25 bp, Canis familiaris
tagcaatgtgaaccgcttcaccggg

SEQ ID NO: 196059 - DNA, 25 bp, Canis familiaris
tagcagaggacaccatgcgggcttg

SEQ ID NO: 196060 - DNA, 25 bp, Canis familiaris
tagcaagcagacccaggcaggtccc

SEQ ID NO: 196061 - DNA, 25 bp, Canis familiaris
tagcaaagcactcgatcgcaagtcc

SEQ ID NO: 196062 - DNA, 25 bp, Canis familiaris
tagctctacactcatcaaacatcag

SEQ ID NO: 196063 - DNA, 25 bp, Canis familiaris
tagccatgacatccttcacaagctc

SEQ ID NO: 196064 - DNA, 25 bp, Canis familiaris
tagcctgagcaagtctctaagccaa

SEQ ID NO: 196065 - DNA, 25 bp, Canis familiaris
tagcagtgacattccctgagagctc

SEQ ID NO: 196066 - DNA, 25 bp, Canis familiaris
tagcaagcagtccacctgagagctc

SEQ ID NO: 196067 - DNA, 25 bp, Canis familiaris
tagacaagtcacattgcgatccgca

SEQ ID NO: 196068 - DNA, 25 bp, Canis familiaris
tagagctaactcattgtacccaacc

SEQ ID NO: 196069 - DNA, 25 bp, Canis familiaris
tagagctataccactgagagacccc

SEQ ID NO: 196070 - DNA, 25 bp, Canis familiaris
tagcagcgaggtcactgtgagtccc

SEQ ID NO: 196071 - DNA, 25 bp, Canis familiaris
tagctagggtacaactggctctccg

SEQ ID NO: 196072 - DNA, 25 bp, Canis familiaris
tagctgaggaggagactgctcgccc

SEQ ID NO: 196073 - DNA, 25 bp, Canis familiaris
tagcgagtgggtgacagcggcagac

SEQ ID NO: 196074 - DNA, 25 bp, Canis familiaris
tagagaatgggtccaacggctgctg

SEQ ID NO: 196075 - DNA, 25 bp, Canis familiaris
tagtcaatagggaaagctctggctg

SEQ ID NO: 196076 - DNA, 25 bp, Canis familiaris
taggaaaccagactcagctcgtgta

SEQ ID NO: 196077 - DNA, 25 bp, Canis familiaris
tagcgtaatcacaagaccgcagtta

SEQ ID NO: 196078 - DNA, 25 bp, Canis familiaris
tagcagtaatacactcgcggttcac

SEQ ID NO: 196079 - DNA, 25 bp, Canis familiaris
tagcagccagatatgagtcagccct

SEQ ID NO: 196080 - DNA, 25 bp, Canis familiaris
tagcgccagagaatagcctccgcgt

SEQ ID NO: 196081 - DNA, 25 bp, Canis familiaris
tagctcctatattacagttctggtg

SEQ ID NO: 196082 - DNA, 25 bp, Canis familiaris
tagcttcaatattacggttggcttt

SEQ ID NO: 196083 - DNA, 25 bp, Canis familiaris
tagctgtcaatttcctggtgtcctt

SEQ ID NO: 196084 - DNA, 25 bp, Canis familiaris
tagcagtccacgtcgtagtggcctc

SEQ ID NO: 196085 - DNA, 25 bp, Canis familiaris
tagagatacaagagtagtgtggctg

SEQ ID NO: 196086 - DNA, 25 bp, Canis familiaris
taggacaaaggtggtgttggtgaac

SEQ ID NO: 196087 - DNA, 25 bp, Canis familiaris
taggaaccaggtgtgtacaaaaaag

SEQ ID NO: 196088 - DNA, 25 bp, Canis familiaris
taggagaccagtgttgtgacgcaaa

SEQ ID NO: 196089 - DNA, 25 bp, Canis familiaris
tagaatatcaccggtttgcccaagc

SEQ ID NO: 196090 - DNA, 25 bp, Canis familiaris
tagcaggacactggtgctttgccgc

SEQ ID NO: 196091 - DNA, 25 bp, Canis familiaris
tagcaggacactggtgctttgccgc

SEQ ID NO: 196092 - DNA, 25 bp, Canis familiaris
tagcaggacactggtgctttgccgc

SEQ ID NO: 196093 - DNA, 25 bp, Canis familiaris
tagcaggacactggtgctttgccgc

SEQ ID NO: 196094 - DNA, 25 bp, Canis familiaris
tagcaggacactggtgctttgccgc

SEQ ID NO: 196095 - DNA, 25 bp, Canis familiaris
tagcaggacactggtgctttgccgc

SEQ ID NO: 196096 - DNA, 25 bp, Canis familiaris
tagcaggacactggtgctttgccgc

SEQ ID NO: 196097 - DNA, 25 bp, Canis familiaris
tagcaggacactggtgctttgccgc

SEQ ID NO: 196098 - DNA, 25 bp, Canis familiaris
tagcaggacactggtgctttgccgc

SEQ ID NO: 196099 - DNA, 25 bp, Canis familiaris
tagcaggacactggtgctttgccgc

SEQ ID NO: 196100 - DNA, 25 bp, Canis familiaris
tagcaggacactggtgctttgccgc

SEQ ID NO: 196101 - DNA, 25 bp, Canis familiaris
tagcaggacactggtgctttgccgc

SEQ ID NO: 196102 - DNA, 25 bp, Canis familiaris
tagcaggacactggtgctttgccgc

SEQ ID NO: 196103 - DNA, 25 bp, Canis familiaris
tagcaggacactggtgctttgccgc

SEQ ID NO: 196104 - DNA, 25 bp, Canis familiaris
tagcaggacactggtgctttccgca

SEQ ID NO: 196105 - DNA, 25 bp, Canis familiaris
tagctggcagacgtgggcctggaca

SEQ ID NO: 196106 - DNA, 25 bp, Canis familiaris
tagcctgagcccggtgcaggagaga

SEQ ID NO: 196107 - DNA, 25 bp, Canis familiaris
tagactcagccctgtgcggaggggc

SEQ ID NO: 196108 - DNA, 25 bp, Canis familiaris
tagacccagctctgtagaggccagg

SEQ ID NO: 196109 - DNA, 25 bp, Canis familiaris
tagttccactgaagccgggactggt

SEQ ID NO: 196110 - DNA, 25 bp, Canis familiaris
tagtctctaacccctgggacagggg

SEQ ID NO: 196111 - DNA, 25 bp, Canis familiaris
tagacctaaacggggatgcctgggg

SEQ ID NO: 196112 - DNA, 25 bp, Canis familiaris
tagaatctcagcaaggggactcctt

SEQ ID NO: 196113 - DNA, 25 bp, Canis familiaris
tagcgcatccagggaagggtccgcc

SEQ ID NO: 196114 - DNA, 25 bp, Canis familiaris
tagtctgcagcgggaaggttcacac

SEQ ID NO: 196115 - DNA, 25 bp, Canis familiaris
tagttcgacaagacggggcaccggt

SEQ ID NO: 196116 - DNA, 25 bp, Canis familiaris
tagacggacaagaagcgggcactgc

SEQ ID NO: 196117 - DNA, 25 bp, Canis familiaris
tagcaggtgccaagaagggccctct

SEQ ID NO: 196118 - DNA, 25 bp, Canis familiaris
tagcaatggcattcgaaggcgcccc

SEQ ID NO: 196119 - DNA, 25 bp, Canis familiaris
tagagtaattggacggcgcagccac

SEQ ID NO: 196120 - DNA, 25 bp, Canis familiaris
tagaagagttggctgcatctgccca

SEQ ID NO: 196121 - DNA, 25 bp, Canis familiaris
tagaagagttggcttagtcccctcc

SEQ ID NO: 196122 - DNA, 25 bp, Canis familiaris
tagaaatggtccaattagtttcctt

SEQ ID NO: 196123 - DNA, 25 bp, Canis familiaris
tagaacatttacacttttctccttt

SEQ ID NO: 196124 - DNA, 25 bp, Canis familiaris
tagaagtttactcccttttcaactg

SEQ ID NO: 196125 - DNA, 25 bp, Canis familiaris
tagtagaagggcaccccttcctctg

SEQ ID NO: 196126 - DNA, 25 bp, Canis familiaris
tagtaaacacgtaacctcattcctt

SEQ ID NO: 196127 - DNA, 25 bp, Canis familiaris
tagacaaacacaattaccatatagt

SEQ ID NO: 196128 - DNA, 25 bp, Canis familiaris
tagacatagccattagtgacactat

SEQ ID NO: 196129 - DNA, 25 bp, Canis familiaris
tagactactagaagctcacctcatc

SEQ ID NO: 196130 - DNA, 25 bp, Canis familiaris
tagacttctggaactcagggatcct

SEQ ID NO: 196131 - DNA, 25 bp, Canis familiaris
tagaaatcgtgttctcggcttcaca

SEQ ID NO: 196132 - DNA, 25 bp, Canis familiaris
tagaatccggttttgccagtacatc

SEQ ID NO: 196133 - DNA, 25 bp, Canis familiaris
tagaatcttggtgctccatcgttca

SEQ ID NO: 196134 - DNA, 25 bp, Canis familiaris
tagaatcattgttgtaccaccttac

SEQ ID NO: 196135 - DNA, 25 bp, Canis familiaris
tagcctcattttcacctatgtgctt

SEQ ID NO: 196136 - DNA, 25 bp, Canis familiaris
tagcccttattctacttacactact

SEQ ID NO: 196137 - DNA, 25 bp, Canis familiaris
tagcccttacattcttttaaaatct

SEQ ID NO: 196138 - DNA, 25 bp, Canis familiaris
taggacgtaaccatttaaaattcag

SEQ ID NO: 196139 - DNA, 25 bp, Canis familiaris
tagtgcaggtcctcactttaatcct

SEQ ID NO: 196140 - DNA, 25 bp, Canis familiaris
tagatgaggcatgcccctcttgaga

SEQ ID NO: 196141 - DNA, 25 bp, Canis familiaris
tagaaagatgcatctcttctagaat

SEQ ID NO: 196142 - DNA, 25 bp, Canis familiaris
taggaaaacctctgtcaccatttct

SEQ ID NO: 196143 - DNA, 25 bp, Canis familiaris
tatgaggaacccaggtaccatttct

SEQ ID NO: 196144 - DNA, 25 bp, Canis familiaris
tagtagaggccctggattcctttgt

SEQ ID NO: 196145 - DNA, 25 bp, Canis familiaris
tagaaggggccctagctattttctg

SEQ ID NO: 196146 - DNA, 25 bp, Canis familiaris
tagagggggccggatttgttgttgt

SEQ ID NO: 196147 - DNA, 25 bp, Canis familiaris
taggggtccactgatttgtcggttt

SEQ ID NO: 196148 - DNA, 25 bp, Canis familiaris
taggagggcctttcatatggttggt

SEQ ID NO: 196149 - DNA, 25 bp, Canis familiaris
tagcggggctttggagatgagtctg

SEQ ID NO: 196150 - DNA, 25 bp, Canis familiaris
tatggggaatttgggctaactaagg

SEQ ID NO: 196151 - DNA, 25 bp, Canis familiaris
taggggaactttactccaggcaagg

SEQ ID NO: 196152 - DNA, 25 bp, Canis familiaris
taggagggcccgagtcacggaattt

SEQ ID NO: 196153 - DNA, 25 bp, Canis familiaris
taggagggcctctggtacgataacc

SEQ ID NO: 196154 - DNA, 25 bp, Canis familiaris
ttggagggtgactggaaggtaccca

SEQ ID NO: 196155 - DNA, 25 bp, Canis familiaris
tagaggggtattgttaggtgttcca

SEQ ID NO: 196156 - DNA, 25 bp, Canis familiaris
tagagagggtattggctgtagagtc

SEQ ID NO: 196157 - DNA, 25 bp, Canis familiaris
tagagaggcagttgtccgttagcgt

SEQ ID NO: 196158 - DNA, 25 bp, Canis familiaris
tagcatgaaagttgtcccttctctt

SEQ ID NO: 196159 - DNA, 25 bp, Canis familiaris
tagaaaagattcttccttctctctt

SEQ ID NO: 196160 - DNA, 25 bp, Canis familiaris
tagaaaagcttccatcagcatttta

SEQ ID NO: 196161 - DNA, 25 bp, Canis familiaris
tagaggtagctagacactttttttt

SEQ ID NO: 196162 - DNA, 25 bp, Canis familiaris
tagagagctagctagccccttatac

SEQ ID NO: 196163 - DNA, 25 bp, Canis familiaris
tagactgggatacccactcattacc

SEQ ID NO: 196164 - DNA, 25 bp, Canis familiaris
tagacctggagcccacagtcattga

SEQ ID NO: 196165 - DNA, 25 bp, Canis familiaris
tagacctggagcccacagtcattga

SEQ ID NO: 196166 - DNA, 25 bp, Canis familiaris
tagacctggagcccacagtcattga

SEQ ID NO: 196167 - DNA, 25 bp, Canis familiaris
tagacctggagcccacagtcattga

SEQ ID NO: 196168 - DNA, 25 bp, Canis familiaris
tagactcttgagaacctccttagat

SEQ ID NO: 196169 - DNA, 25 bp, Canis familiaris
tatgccttggtgtacttccggaaag

SEQ ID NO: 196170 - DNA, 25 bp, Canis familiaris
tagggatgagggccttccgtgagaa

SEQ ID NO: 196171 - DNA, 25 bp, Canis familiaris
tagcggaacagtcttgcgtctgggc

SEQ ID NO: 196172 - DNA, 25 bp, Canis familiaris
tagctggctaggggttgcgtcaggc

SEQ ID NO: 196173 - DNA, 25 bp, Canis familiaris
tagctgctccaggtgtgcttgcagt

SEQ ID NO: 196174 - DNA, 25 bp, Canis familiaris
tagctgactgcaggtggcgctgcac

SEQ ID NO: 196175 - DNA, 25 bp, Canis familiaris
tagctgcaggattctggcattgtgc

SEQ ID NO: 196176 - DNA, 25 bp, Canis familiaris
tagctcgcgtgtcggattgacgttc

SEQ ID NO: 196177 - DNA, 25 bp, Canis familiaris
tagcgatcgctgccaggatatacgt

SEQ ID NO: 196178 - DNA, 25 bp, Canis familiaris
taggatcatcagccaaatataacat

SEQ ID NO: 196179 - DNA, 25 bp, Canis familiaris
tagagcatgctcctgattttcaaag

SEQ ID NO: 196180 - DNA, 25 bp, Canis familiaris
tagagtctccagatttccaacctaa

SEQ ID NO: 196181 - DNA, 25 bp, Canis familiaris
tatgtgtgcatctgtattaccaacc

SEQ ID NO: 196182 - DNA, 25 bp, Canis familiaris
tagttgactggcaaacaccaaactt

SEQ ID NO: 196183 - DNA, 25 bp, Canis familiaris
tatttgttacaaaaaaggactatcg

SEQ ID NO: 196184 - DNA, 25 bp, Canis familiaris
tagttgtttccaaaaaagccctcag

SEQ ID NO: 196185 - DNA, 25 bp, Canis familiaris
tagagagttgccgaccaaaagcccc

SEQ ID NO: 196186 - DNA, 25 bp, Canis familiaris
tagagtaattccccagtaagccctc

SEQ ID NO: 196187 - DNA, 25 bp, Canis familiaris
tagcatttacccacatgtacctgtc

SEQ ID NO: 196188 - DNA, 25 bp, Canis familiaris
tagcatattcctaccctgtgaagtt

SEQ ID NO: 196189 - DNA, 25 bp, Canis familiaris
tagtttgactatgccttacctttgt

SEQ ID NO: 196190 - DNA, 25 bp, Canis familiaris
tagtttccttcctaggacttgttgt

SEQ ID NO: 196191 - DNA, 25 bp, Canis familiaris
tattctccctcccaaggaaggtgtg

SEQ ID NO: 196192 - DNA, 25 bp, Canis familiaris
tatacccttcccaagaaattgattg

SEQ ID NO: 196193 - DNA, 25 bp, Canis familiaris
tagaccaaccccgagacataatatt

SEQ ID NO: 196194 - DNA, 25 bp, Canis familiaris
tagagttacaaccagagccacacaa

SEQ ID NO: 196195 - DNA, 25 bp, Canis familiaris
tagcgtatgtccaggagctctgcac

SEQ ID NO: 196196 - DNA, 25 bp, Canis familiaris
tagcactttctcaagggctctgtca

SEQ ID NO: 196197 - DNA, 25 bp, Canis familiaris
tagatctgtaccgggcgatgctgag

SEQ ID NO: 196198 - DNA, 25 bp, Canis familiaris
tagaggtttccggcgatgctgatgt

SEQ ID NO: 196199 - DNA, 25 bp, Canis familiaris
tagggctacctagatctgctgattt

SEQ ID NO: 196200 - DNA, 25 bp, Canis familiaris
tagggcattttctcgtgtgaatgat

SEQ ID NO: 196201 - DNA, 25 bp, Canis familiaris
tagtcctttggatgggtaatattga

SEQ ID NO: 196202 - DNA, 25 bp, Canis familiaris
tagaccttgaggatgggccagcata

SEQ ID NO: 196203 - DNA, 25 bp, Canis familiaris
tagcagccttgtggcaccaggccac

SEQ ID NO: 196204 - DNA, 25 bp, Canis familiaris
tagatgtcttatctcgagtgccaca

SEQ ID NO: 196205 - DNA, 25 bp, Canis familiaris
tagagttccaggatagtctgccgtc

SEQ ID NO: 196206 - DNA, 25 bp, Canis familiaris
tagaattcacagaacttgtcccatg

SEQ ID NO: 196207 - DNA, 25 bp, Canis familiaris
tagagactgccagtactttccttgg

SEQ ID NO: 196208 - DNA, 25 bp, Canis familiaris
tagtcacatccagtgcagctttgca

SEQ ID NO: 196209 - DNA, 25 bp, Canis familiaris
tagaagcgccagcgcttccaaggcc

SEQ ID NO: 196210 - DNA, 25 bp, Canis familiaris
tagaagaggcagcccttctttgtcc

SEQ ID NO: 196211 - DNA, 25 bp, Canis familiaris
tagacaggcgtgtccttgttgttcg

SEQ ID NO: 196212 - DNA, 25 bp, Canis familiaris
tagtcccaccaggtgtgttgtccgc

SEQ ID NO: 196213 - DNA, 25 bp, Canis familiaris
tagctctgcagctcaggttgttgct

SEQ ID NO: 196214 - DNA, 25 bp, Canis familiaris
tagctcctgctaacgtgtattattt

SEQ ID NO: 196215 - DNA, 25 bp, Canis familiaris
tagcccttcattgttttctcttggc

SEQ ID NO: 196216 - DNA, 25 bp, Canis familiaris
tagctcctgaatcgtttcttctgct

SEQ ID NO: 196217 - DNA, 25 bp, Canis familiaris
tagcttctaactattcttgctctca

SEQ ID NO: 196218 - DNA, 25 bp, Canis familiaris
tagcattcgtttttcttggtgccac

SEQ ID NO: 196219 - DNA, 25 bp, Canis familiaris
tagatatgcgtgatcctctgtgagc

SEQ ID NO: 196220 - DNA, 25 bp, Canis familiaris
tagctgagaatggatcctctagagt

SEQ ID NO: 196221 - DNA, 25 bp, Canis familiaris
tagctgagtctggcattcgctacac

SEQ ID NO: 196222 - DNA, 25 bp, Canis familiaris
tagctgggcatgtacctgctaccag

SEQ ID NO: 196223 - DNA, 25 bp, Canis familiaris
tagcatgtggacacctctatccacc

SEQ ID NO: 196224 - DNA, 25 bp, Canis familiaris
tagacatggacaaggctctcttata

SEQ ID NO: 196225 - DNA, 25 bp, Canis familiaris
tagtcataatgcttgccactcttta

SEQ ID NO: 196226 - DNA, 25 bp, Canis familiaris
tagctctatcactagccctaactat

SEQ ID NO: 196227 - DNA, 25 bp, Canis familiaris
tagcatctctcctaactggacttaa

SEQ ID NO: 196228 - DNA, 25 bp, Canis familiaris
tagactctgccacagctggttgtaa

SEQ ID NO: 196229 - DNA, 25 bp, Canis familiaris
taggtaccgctagtggcctgtatat

SEQ ID NO: 196230 - DNA, 25 bp, Canis familiaris
tagaaacacctagtctccatttatt

SEQ ID NO: 196231 - DNA, 25 bp, Canis familiaris
tagcaaaattcatgcatctacattt

SEQ ID NO: 196232 - DNA, 25 bp, Canis familiaris
tagcaaccattgcagtatactcttg

SEQ ID NO: 196233 - DNA, 25 bp, Canis familiaris
tagactccgtgccatattactttgt

SEQ ID NO: 196234 - DNA, 25 bp, Canis familiaris
tagactcatcaacatgttgcccttg

SEQ ID NO: 196235 - DNA, 25 bp, Canis familiaris
tagacttcttgattgtccgtctctg

SEQ ID NO: 196236 - DNA, 25 bp, Canis familiaris
tagcttactttacccagttcagctg

SEQ ID NO: 196237 - DNA, 25 bp, Canis familiaris
tagtaacttgcctaccgatatagga

SEQ ID NO: 196238 - DNA, 25 bp, Canis familiaris
tagtaactatgcgtgtcctgctaca

SEQ ID NO: 196239 - DNA, 25 bp, Canis familiaris
tagtacactccaggtttttcaatta

SEQ ID NO: 196240 - DNA, 25 bp, Canis familiaris
taggaattccaccttcttaaattgg

SEQ ID NO: 196241 - DNA, 25 bp, Canis familiaris
taggacttcaaactcgttccacgta

SEQ ID NO: 196242 - DNA, 25 bp, Canis familiaris
taggcattaaatattgtttacgttt

SEQ ID NO: 196243 - DNA, 25 bp, Canis familiaris
tagagttaagaagctgttgtacatt

SEQ ID NO: 196244 - DNA, 25 bp, Canis familiaris
tagcatttaatcacctttatacata

SEQ ID NO: 196245 - DNA, 25 bp, Canis familiaris
tagcttcaacaaccatctcgtaaca

SEQ ID NO: 196246 - DNA, 25 bp, Canis familiaris
tagcattagccatgacatccttcac

SEQ ID NO: 196247 - DNA, 25 bp, Canis familiaris
tagcttctgctctaaagctctctcc

SEQ ID NO: 196248 - DNA, 25 bp, Canis familiaris
tagcttctgctatgatattcttatg

SEQ ID NO: 196249 - DNA, 25 bp, Canis familiaris
tagtatttatagtgctttcatttgc

SEQ ID NO: 196250 - DNA, 25 bp, Canis familiaris
tagtgacgttagttttcctgcattc

SEQ ID NO: 196251 - DNA, 25 bp, Canis familiaris
tagtacagttaatatccttgccccc

SEQ ID NO: 196252 - DNA, 25 bp, Canis familiaris
tagaatctttaaacatcctacccac

SEQ ID NO: 196253 - DNA, 25 bp, Canis familiaris
tagtttaccaaatccatgacgccac

SEQ ID NO: 196254 - DNA, 25 bp, Canis familiaris
tagagtgaccattaaacctgaccct

SEQ ID NO: 196255 - DNA, 25 bp, Canis familiaris
tagaggacaaagcatccctgaccct

SEQ ID NO: 196256 - DNA, 25 bp, Canis familiaris
tatcggagaaggagtcctccacctc

SEQ ID NO: 196257 - DNA, 25 bp, Canis familiaris
tatagggaggagtattgcccccccg

SEQ ID NO: 196258 - DNA, 25 bp, Canis familiaris
tagaggatagggtcttgtccgccca

SEQ ID NO: 196259 - DNA, 25 bp, Canis familiaris
tagaaatcgccaagtagtccccaaa

SEQ ID NO: 196260 - DNA, 25 bp, Canis familiaris
tagcaaatcccaatcattgtcctcc

SEQ ID NO: 196261 - DNA, 25 bp, Canis familiaris
tagacattcaacatctgctttctct

SEQ ID NO: 196262 - DNA, 25 bp, Canis familiaris
tagacaataagcatagttcccataa

SEQ ID NO: 196263 - DNA, 25 bp, Canis familiaris
tagacactaagattactctgccctg

SEQ ID NO: 196264 - DNA, 25 bp, Canis familiaris
tagacacgagcattccatttgtcct

SEQ ID NO: 196265 - DNA, 25 bp, Canis familiaris
tagacatcgatatttttctctccca

SEQ ID NO: 196266 - DNA, 25 bp, Canis familiaris
tagatagcagtctttcttcatttat

SEQ ID NO: 196267 - DNA, 25 bp, Canis familiaris
tagcaagcttgatttttatgttagc

SEQ ID NO: 196268 - DNA, 25 bp, Canis familiaris
tagaacttaaataccatgatttgta

SEQ ID NO: 196269 - DNA, 25 bp, Canis familiaris
tagaaattcccaactctaccattac

SEQ ID NO: 196270 - DNA, 25 bp, Canis familiaris
tagaagtgtcccagcttacctgtga

SEQ ID NO: 196271 - DNA, 25 bp, Canis familiaris
tagagattgtccgccataacctggt

SEQ ID NO: 196272 - DNA, 25 bp, Canis familiaris
taggactttcaccactagactctag

SEQ ID NO: 196273 - DNA, 25 bp, Canis familiaris
tagaactgttcactcattagtaaag

SEQ ID NO: 196274 - DNA, 25 bp, Canis familiaris
tagaaatgcttgctactggtcaaaa

SEQ ID NO: 196275 - DNA, 25 bp, Canis familiaris
tagcaagctcctctacagaatccat

SEQ ID NO: 196276 - DNA, 25 bp, Canis familiaris
tagtctctccatctatcagaactca

SEQ ID NO: 196277 - DNA, 25 bp, Canis familiaris
tagctgccctagatggggtctcaga

SEQ ID NO: 196278 - DNA, 25 bp, Canis familiaris
tagctgccctagaggggctcagaaa

SEQ ID NO: 196279 - DNA, 25 bp, Canis familiaris
tagctccaccacagaagtcctgaaa

SEQ ID NO: 196280 - DNA, 25 bp, Canis familiaris
tagctatcacccagcagaggtcaca

SEQ ID NO: 196281 - DNA, 25 bp, Canis familiaris
tagattctcagctcggaggtaattt

SEQ ID NO: 196282 - DNA, 25 bp, Canis familiaris
tagtttcccttgcagttatgtttcc

SEQ ID NO: 196283 - DNA, 25 bp, Canis familiaris
tagctgttcccattgggctcattct

SEQ ID NO: 196284 - DNA, 25 bp, Canis familiaris
tagctttcaagctggtgctctggtt

SEQ ID NO: 196285 - DNA, 25 bp, Canis familiaris
tagctttctaccccatttgatgtga

SEQ ID NO: 196286 - DNA, 25 bp, Canis familiaris
tagctttctgaccccatattgtaat

SEQ ID NO: 196287 - DNA, 25 bp, Canis familiaris
tagattattcctcccatttgatcca

SEQ ID NO: 196288 - DNA, 25 bp, Canis familiaris
tagtgaataagatccctctattaaa

SEQ ID NO: 196289 - DNA, 25 bp, Canis familiaris
tagataattaaactcctctctgcca

SEQ ID NO: 196290 - DNA, 25 bp, Canis familiaris
tagaaaattaacctcagccgccata

SEQ ID NO: 196291 - DNA, 25 bp, Canis familiaris
tagagaaacaactgccagcctccat

SEQ ID NO: 196292 - DNA, 25 bp, Canis familiaris
tagaggtaagacagcacccaccatg

SEQ ID NO: 196293 - DNA, 25 bp, Canis familiaris
tagagggggcaaggcacctcacttc

SEQ ID NO: 196294 - DNA, 25 bp, Canis familiaris
tagagttgcagtgagtgccaccctg

SEQ ID NO: 196295 - DNA, 25 bp, Canis familiaris
tagaattgagtccggctgctttaga

SEQ ID NO: 196296 - DNA, 25 bp, Canis familiaris
tagaattcattccttgtgtttaaag

SEQ ID NO: 196297 - DNA, 25 bp, Canis familiaris
tagaatttctcttttggtatatcaa

SEQ ID NO: 196298 - DNA, 25 bp, Canis familiaris
tagaatgtcctttcccagatatcca

SEQ ID NO: 196299 - DNA, 25 bp, Canis familiaris
tagaattcgctgttgccctaattca

SEQ ID NO: 196300 - DNA, 25 bp, Canis familiaris
tagtacctgtcaagccgttattcat

SEQ ID NO: 196301 - DNA, 25 bp, Canis familiaris
tagatccctgacaagcacgtttacc

SEQ ID NO: 196302 - DNA, 25 bp, Canis familiaris
tagttgtctgccagaattgttccca

SEQ ID NO: 196303 - DNA, 25 bp, Canis familiaris
tagtttccacgatgctggttcacca

SEQ ID NO: 196304 - DNA, 25 bp, Canis familiaris
tagggactacgatgtggtttcaaat

SEQ ID NO: 196305 - DNA, 25 bp, Canis familiaris
taggccagggcttttaatttcaata

SEQ ID NO: 196306 - DNA, 25 bp, Canis familiaris
tagaccaggtctcctataattccac

SEQ ID NO: 196307 - DNA, 25 bp, Canis familiaris
tagacacagattccaaatacgttac

SEQ ID NO: 196308 - DNA, 25 bp, Canis familiaris
tagacatgcagagtctcaggccctg

SEQ ID NO: 196309 - DNA, 25 bp, Canis familiaris
tagacagactcctaggtcacatcca

SEQ ID NO: 196310 - DNA, 25 bp, Canis familiaris
tagactgacttatctgtatatccat

SEQ ID NO: 196311 - DNA, 25 bp, Canis familiaris
tagaccagcctatagccaagcctat

SEQ ID NO: 196312 - DNA, 25 bp, Canis familiaris
tagactactgtgttgaaagagcctt

SEQ ID NO: 196313 - DNA, 25 bp, Canis familiaris
tagaatttgtgctgaaacctgtttc

SEQ ID NO: 196314 - DNA, 25 bp, Canis familiaris
tagagtttggggtagagcctgggcc

SEQ ID NO: 196315 - DNA, 25 bp, Canis familiaris
tagagtctgtacacaacccggagag

SEQ ID NO: 196316 - DNA, 25 bp, Canis familiaris
tagactagtgtctgaaccgtggggc

SEQ ID NO: 196317 - DNA, 25 bp, Canis familiaris
tagactgaaagctgcaacctatggc

SEQ ID NO: 196318 - DNA, 25 bp, Canis familiaris
tagcacgagagacttcatacctccc

SEQ ID NO: 196319 - DNA, 25 bp, Canis familiaris
tagacagtaagcatctcagccatcc

SEQ ID NO: 196320 - DNA, 25 bp, Canis familiaris
tagacagtaacttcaagctttatga

SEQ ID NO: 196321 - DNA, 25 bp, Canis familiaris
tagtagtacatcaaagagttacatg

SEQ ID NO: 196322 - DNA, 25 bp, Canis familiaris
tagaggtgaatatcgagttagtaat

SEQ ID NO: 196323 - DNA, 25 bp, Canis familiaris
tagttgtagataacggctccggtat

SEQ ID NO: 196324 - DNA, 25 bp, Canis familiaris
tagactttgttactgatcccggtta

SEQ ID NO: 196325 - DNA, 25 bp, Canis familiaris
tagattatttatacttcgagggtgt

SEQ ID NO: 196326 - DNA, 25 bp, Canis familiaris
tagctctttctcgattccgtgggtg

SEQ ID NO: 196327 - DNA, 25 bp, Canis familiaris
taggctttggctctacgtaggatga

SEQ ID NO: 196328 - DNA, 25 bp, Canis familiaris
taggttttctttctttgcgagctga

SEQ ID NO: 196329 - DNA, 25 bp, Canis familiaris
taggacgtttttctgttctcttatt

SEQ ID NO: 196330 - DNA, 25 bp, Canis familiaris
taggggtttttatgcttatcttttg

SEQ ID NO: 196331 - DNA, 25 bp, Canis familiaris
tagcttggtcttatttcttattgta

SEQ ID NO: 196332 - DNA, 25 bp, Canis familiaris
tagtttggcttgctgtttctaggtg

SEQ ID NO: 196333 - DNA, 25 bp, Canis familiaris
tagcttctactttctgtttcttggc

SEQ ID NO: 196334 - DNA, 25 bp, Canis familiaris
tagcttccgtatttcttctttggct

SEQ ID NO: 196335 - DNA, 25 bp, Canis familiaris
tagcattgctagctgttctctcttt

SEQ ID NO: 196336 - DNA, 25 bp, Canis familiaris
tagcattaaatgtgttctcttgttg

SEQ ID NO: 196337 - DNA, 25 bp, Canis familiaris
tagcagtatattttttcctctttga

SEQ ID NO: 196338 - DNA, 25 bp, Canis familiaris
tagcatttgcttttaaccattgtta

SEQ ID NO: 196339 - DNA, 25 bp, Canis familiaris
tagaaggctgtgtatagtccatttc

SEQ ID NO: 196340 - DNA, 25 bp, Canis familiaris
tatggtttggtataccttcttcctg

SEQ ID NO: 196341 - DNA, 25 bp, Canis familiaris
taggcattgtggtgtacctggttcc

SEQ ID NO: 196342 - DNA, 25 bp, Canis familiaris
tagcagtgggttgtgtcctggtgtc

SEQ ID NO: 196343 - DNA, 25 bp, Canis familiaris
tagcagagggagtgcagcccggggc

SEQ ID NO: 196344 - DNA, 25 bp, Canis familiaris
tagcagtgaatgatacagcccaggg

SEQ ID NO: 196345 - DNA, 25 bp, Canis familiaris
tagatagtagacaatctcccacggc

SEQ ID NO: 196346 - DNA, 25 bp, Canis familiaris
tagatttctagaatccccagggcgc

SEQ ID NO: 196347 - DNA, 25 bp, Canis familiaris
tagatgtttaacggcccaagccctt

SEQ ID NO: 196348 - DNA, 25 bp, Canis familiaris
tagatgtccttaggtgggctgaccc

SEQ ID NO: 196349 - DNA, 25 bp, Canis familiaris
tagcagtagctgtggctgggtgcac

SEQ ID NO: 196350 - DNA, 25 bp, Canis familiaris
tagatgtacagattgggccagtgca

SEQ ID NO: 196351 - DNA, 25 bp, Canis familiaris
tagaggcatcagcagctgcgtcctc

SEQ ID NO: 196352 - DNA, 25 bp, Canis familiaris
tagaggcatcgagtgctctgtcctt

SEQ ID NO: 196353 - DNA, 25 bp, Canis familiaris
tagagcgaggcagtgctctcctggt

SEQ ID NO: 196354 - DNA, 25 bp, Canis familiaris
tagagcatggacctcattctctggg

SEQ ID NO: 196355 - DNA, 25 bp, Canis familiaris
tagaataagcccacctgcagcttct

SEQ ID NO: 196356 - DNA, 25 bp, Canis familiaris
tagagaatacacgtcctcttgcttc

SEQ ID NO: 196357 - DNA, 25 bp, Canis familiaris
tagttgctacatgacagccacgttc

SEQ ID NO: 196358 - DNA, 25 bp, Canis familiaris
tagatgttactggacatcacctttt

SEQ ID NO: 196359 - DNA, 25 bp, Canis familiaris
tagctttgcctggagcttcatcttt

SEQ ID NO: 196360 - DNA, 25 bp, Canis familiaris
tagtatctgccttagttcaggtcct

SEQ ID NO: 196361 - DNA, 25 bp, Canis familiaris
taggccccatgattttaggtcacga

SEQ ID NO: 196362 - DNA, 25 bp, Canis familiaris
taggcgacccacttttgtgaaccaa

SEQ ID NO: 196363 - DNA, 25 bp, Canis familiaris
tagggaccaaggacatatggaatcc

SEQ ID NO: 196364 - DNA, 25 bp, Canis familiaris
tagaggaccaagcggctgtcagtct

SEQ ID NO: 196365 - DNA, 25 bp, Canis familiaris
tagaaactccaggggctggcttttt

SEQ ID NO: 196366 - DNA, 25 bp, Canis familiaris
tagaggactcgtgtgtggcgtcttt

SEQ ID NO: 196367 - DNA, 25 bp, Canis familiaris
tagaccattctgtgggaggatactt

SEQ ID NO: 196368 - DNA, 25 bp, Canis familiaris
tagacctgtctgctacgggtttgta

SEQ ID NO: 196369 - DNA, 25 bp, Canis familiaris
tagattgcatttcttaggtgtttta

SEQ ID NO: 196370 - DNA, 25 bp, Canis familiaris
tagcttcttctcggtcaagtttcat

SEQ ID NO: 196371 - DNA, 25 bp, Canis familiaris
tagcattgctttcgtgtaaattatg

SEQ ID NO: 196372 - DNA, 25 bp, Canis familiaris
tagcttctatcaggtgttaacatct

SEQ ID NO: 196373 - DNA, 25 bp, Canis familiaris
tagcttgcggcagttttacacacac

SEQ ID NO: 196374 - DNA, 25 bp, Canis familiaris
tagcttctctgcattaaacacacac

SEQ ID NO: 196375 - DNA, 25 bp, Canis familiaris
tagcttcccttaaatacacacatat

SEQ ID NO: 196376 - DNA, 25 bp, Canis familiaris
tagttgtgccagcaccaacacacct

SEQ ID NO: 196377 - DNA, 25 bp, Canis familiaris
tagttgtgccagcaccaacacacct

SEQ ID NO: 196378 - DNA, 25 bp, Canis familiaris
tatgttttaggcctaaatcccattt

SEQ ID NO: 196379 - DNA, 25 bp, Canis familiaris
tagttatatcacccgaagtcctcgt

SEQ ID NO: 196380 - DNA, 25 bp, Canis familiaris
tagcattatatcctctagatccatc

SEQ ID NO: 196381 - DNA, 25 bp, Canis familiaris
tagatgtacacatctggctcctcac

SEQ ID NO: 196382 - DNA, 25 bp, Canis familiaris
tagaatcagctctgcattcatcctc

SEQ ID NO: 196383 - DNA, 25 bp, Canis familiaris
tagagagagctctgcatgtcaccac

SEQ ID NO: 196384 - DNA, 25 bp, Canis familiaris
tagagatgtggcgactatacccctg

SEQ ID NO: 196385 - DNA, 25 bp, Canis familiaris
tagagatgtggtcccaatggcccga

SEQ ID NO: 196386 - DNA, 25 bp, Canis familiaris
tagcttggtggaactcacctgccga

SEQ ID NO: 196387 - DNA, 25 bp, Canis familiaris
tagtctgagggcagccatccacgta

SEQ ID NO: 196388 - DNA, 25 bp, Canis familiaris
tagattcgggcaagtctaccactac

SEQ ID NO: 196389 - DNA, 25 bp, Canis familiaris
tagcaatccttaagatcttcgcctc

SEQ ID NO: 196390 - DNA, 25 bp, Canis familiaris
tagcaatcattgccacagacctcgc

SEQ ID NO: 196391 - DNA, 25 bp, Canis familiaris
tagcatattctggcaacatcccacc

SEQ ID NO: 196392 - DNA, 25 bp, Canis familiaris
tagattttgccaactgccaatcatg

SEQ ID NO: 196393 - DNA, 25 bp, Canis familiaris
tagatggacccaggtggcaacattt

SEQ ID NO: 196394 - DNA, 25 bp, Canis familiaris
tagaggtcggtggggatcctgttgg

SEQ ID NO: 196395 - DNA, 25 bp, Canis familiaris
tagggtctgagtcgggaggccggtt

SEQ ID NO: 196396 - DNA, 25 bp, Canis familiaris
tagtgcgtctgattccggaacggta

SEQ ID NO: 196397 - DNA, 25 bp, Canis familiaris
taggtgatcgacttcgtcaacgtcc

SEQ ID NO: 196398 - DNA, 25 bp, Canis familiaris
tagaaatccatcagagtaacgctca

SEQ ID NO: 196399 - DNA, 25 bp, Canis familiaris
tagaagaccttgcctggaactctct

SEQ ID NO: 196400 - DNA, 25 bp, Canis familiaris
tagcaagaacctgtggatgccctgc

SEQ ID NO: 196401 - DNA, 25 bp, Canis familiaris
tagaagagacgctgtcaggccactg

SEQ ID NO: 196402 - DNA, 25 bp, Canis familiaris
tagaaggtgcctgctactgcacacg

SEQ ID NO: 196403 - DNA, 25 bp, Canis familiaris
tagaaggtgccacgtgactaacctg

SEQ ID NO: 196404 - DNA, 25 bp, Canis familiaris
tagaaggagccatctagctagcccg

SEQ ID NO: 196405 - DNA, 25 bp, Canis familiaris
tagaatatgccttacagactcccac

SEQ ID NO: 196406 - DNA, 25 bp, Canis familiaris
tagaaagctctacaacatcgctgct

SEQ ID NO: 196407 - DNA, 25 bp, Canis familiaris
tagaaatgtttgttaccgctccaga

SEQ ID NO: 196408 - DNA, 25 bp, Canis familiaris
tagaggattttgttttactccaaat

SEQ ID NO: 196409 - DNA, 25 bp, Canis familiaris
taggcggtataattttaacgctatt

SEQ ID NO: 196410 - DNA, 25 bp, Canis familiaris
taggcccaataataaaacagtgttt

SEQ ID NO: 196411 - DNA, 25 bp, Canis familiaris
tagtgtcaccaatccagtaaagctt

SEQ ID NO: 196412 - DNA, 25 bp, Canis familiaris
tatttactgaatttagggacgcctg

SEQ ID NO: 196413 - DNA, 25 bp, Canis familiaris
ttttaatagtttctggagacaatct

SEQ ID NO: 196414 - DNA, 25 bp, Canis familiaris
ttttaattctggccttgaaaaagat

SEQ ID NO: 196415 - DNA, 25 bp, Canis familiaris
tattttccccagattactgaaggtc

SEQ ID NO: 196416 - DNA, 25 bp, Canis familiaris
tagggcccccagatgatacataggt

SEQ ID NO: 196417 - DNA, 25 bp, Canis familiaris
tagagacctctccaaggacgcaagg

SEQ ID NO: 196418 - DNA, 25 bp, Canis familiaris
tagatcaccattcaagatcccagag

SEQ ID NO: 196419 - DNA, 25 bp, Canis familiaris
tagaccacttgtgtcatcccaagca

SEQ ID NO: 196420 - DNA, 25 bp, Canis familiaris
tagatcaagtttgtacgtaagcagg

SEQ ID NO: 196421 - DNA, 25 bp, Canis familiaris
tagatcacagacttgcgatacccaa

SEQ ID NO: 196422 - DNA, 25 bp, Canis familiaris
tagaccatacatacgatcagcaaaa

SEQ ID NO: 196423 - DNA, 25 bp, Canis familiaris
tagaaatgaaacccgaataaggagg

SEQ ID NO: 196424 - DNA, 25 bp, Canis familiaris
tagaaatgaacccccgattaaggag

SEQ ID NO: 196425 - DNA, 25 bp, Canis familiaris
tagaacgacacctcctgttattata

SEQ ID NO: 196426 - DNA, 25 bp, Canis familiaris
tagaaatgaccctcctttgttgaaa

SEQ ID NO: 196427 - DNA, 25 bp, Canis familiaris
tagaagaacccagcgttatgtacat

SEQ ID NO: 196428 - DNA, 25 bp, Canis familiaris
tagaaaactctccctgtatcttact

SEQ ID NO: 196429 - DNA, 25 bp, Canis familiaris
tagaaatacggcctctttttaccat

SEQ ID NO: 196430 - DNA, 25 bp, Canis familiaris
tagggatagtccctttgttttcctg

SEQ ID NO: 196431 - DNA, 25 bp, Canis familiaris
tagaagatagtttttggtatgtttt

SEQ ID NO: 196432 - DNA, 25 bp, Canis familiaris
tagagagcactgttttaagtattcc

SEQ ID NO: 196433 - DNA, 25 bp, Canis familiaris
tagaaattgtttccagagggtgcct

SEQ ID NO: 196434 - DNA, 25 bp, Canis familiaris
tagaattttgttcccaaggtctcct

SEQ ID NO: 196435 - DNA, 25 bp, Canis familiaris
tagcaatgttgtatcccacgttggc

SEQ ID NO: 196436 - DNA, 25 bp, Canis familiaris
tagcaatgtttcacacacgcttcat

SEQ ID NO: 196437 - DNA, 25 bp, Canis familiaris
tagaatgctctttacatctccttta

SEQ ID NO: 196438 - DNA, 25 bp, Canis familiaris
tagataggtcttacatccccatata

SEQ ID NO: 196439 - DNA, 25 bp, Canis familiaris
tagaagccatatttacctgcctaca

SEQ ID NO: 196440 - DNA, 25 bp, Canis familiaris
tagaaccagttttatgctcctcaga

SEQ ID NO: 196441 - DNA, 25 bp, Canis familiaris
tagtatgtagcttttgtgtcattcg

SEQ ID NO: 196442 - DNA, 25 bp, Canis familiaris
tagattgtactgttctgtgctcaga

SEQ ID NO: 196443 - DNA, 25 bp, Canis familiaris
tagttgacacttaagtatcagacaa

SEQ ID NO: 196444 - DNA, 25 bp, Canis familiaris
tagttatcctttagaaccaaatcgt

SEQ ID NO: 196445 - DNA, 25 bp, Canis familiaris
tatgttagcctatggaaaaatattg

SEQ ID NO: 196446 - DNA, 25 bp, Canis familiaris
tagtaaggcctaggaatcaccatgt

SEQ ID NO: 196447 - DNA, 25 bp, Canis familiaris
tagataggagaaaccaaccaatttt

SEQ ID NO: 196448 - DNA, 25 bp, Canis familiaris
tagaaggtaaatcgccaacaatata

SEQ ID NO: 196449 - DNA, 25 bp, Canis familiaris
taggccctaaatctatcactaaaaa

SEQ ID NO: 196450 - DNA, 25 bp, Canis familiaris
taggctcccaaatctaagcaagtaa

SEQ ID NO: 196451 - DNA, 25 bp, Canis familiaris
taggctacaaaataactctgattag

SEQ ID NO: 196452 - DNA, 25 bp, Canis familiaris
tttctgaaaacataaccagcccatg

SEQ ID NO: 196453 - DNA, 25 bp, Canis familiaris
tttaagaaatctgacccaccaaggt

SEQ ID NO: 196454 - DNA, 25 bp, Canis familiaris
tagtaagaaaaccaggccctccagg

SEQ ID NO: 196455 - DNA, 25 bp, Canis familiaris
ttttaaacagaggggccaccacaag

SEQ ID NO: 196456 - DNA, 25 bp, Canis familiaris
tttctaaatccatggaggacctcca

SEQ ID NO: 196457 - DNA, 25 bp, Canis familiaris
tttcgccgactgaggaggaatccca

SEQ ID NO: 196458 - DNA, 25 bp, Canis familiaris
tttcgggacgagaggtgccatccgc

SEQ ID NO: 196459 - DNA, 25 bp, Canis familiaris
tagaggaggacctggggtcacccag

SEQ ID NO: 196460 - DNA, 25 bp, Canis familiaris
agactggtggtggtggtccaccctc

SEQ ID NO: 196461 - DNA, 25 bp, Canis familiaris
tagagggaccatttgggggcagcca

SEQ ID NO: 196462 - DNA, 25 bp, Canis familiaris
tagaaaactgcgctgggggccaaca

SEQ ID NO: 196463 - DNA, 25 bp, Canis familiaris
tagagacacctggcgcgatggaacc

SEQ ID NO: 196464 - DNA, 25 bp, Canis familiaris
tagatgactgtccccgaggagatgc

SEQ ID NO: 196465 - DNA, 25 bp, Canis familiaris
tagagatccagccagacgaaggtgc

SEQ ID NO: 196466 - DNA, 25 bp, Canis familiaris
tagagtggagcctactgaaagaaag

SEQ ID NO: 196467 - DNA, 25 bp, Canis familiaris
tagagggtgctattcttctgagaaa

SEQ ID NO: 196468 - DNA, 25 bp, Canis familiaris
tagatggtgtgtgtgatttataata

SEQ ID NO: 196469 - DNA, 25 bp, Canis familiaris
tagatggctttggtcacttggggca

SEQ ID NO: 196470 - DNA, 25 bp, Canis familiaris
tagagcctttccaatccggagctca

SEQ ID NO: 196471 - DNA, 25 bp, Canis familiaris
taggcgtgtacggtgggaggtcata

SEQ ID NO: 196472 - DNA, 25 bp, Canis familiaris
tagagaggtccgggctgggagctat

SEQ ID NO: 196473 - DNA, 25 bp, Canis familiaris
tagtagtgtctgctgggggaggggt

SEQ ID NO: 196474 - DNA, 25 bp, Canis familiaris
ttctacgccacaggggggggtggtg

SEQ ID NO: 196475 - DNA, 25 bp, Canis familiaris
tttacgccaacacggggctgtttgg

SEQ ID NO: 196476 - DNA, 25 bp, Canis familiaris
ttgtcggcggaatcaggggttcgga

SEQ ID NO: 196477 - DNA, 25 bp, Canis familiaris
ttggagggtaagaggggtggcggcg

SEQ ID NO: 196478 - DNA, 25 bp, Canis familiaris
taggagggtaaaagggctggacgag

SEQ ID NO: 196479 - DNA, 25 bp, Canis familiaris
tagggggtgaagttaagctgctaaa

SEQ ID NO: 196480 - DNA, 25 bp, Canis familiaris
tagggacctagtttgaaggccatta

SEQ ID NO: 196481 - DNA, 25 bp, Canis familiaris
tagaagccacggaattgctaagtat

SEQ ID NO: 196482 - DNA, 25 bp, Canis familiaris
tagaggccaaggatgctgctgaatg

SEQ ID NO: 196483 - DNA, 25 bp, Canis familiaris
tagcagctgccaactggtgatgcca

SEQ ID NO: 196484 - DNA, 25 bp, Canis familiaris
tagagcatgcgactcttggtctcag

SEQ ID NO: 196485 - DNA, 25 bp, Canis familiaris
tagagctctagctttgacttcctgt

SEQ ID NO: 196486 - DNA, 25 bp, Canis familiaris
tagaacatacatcagagctcctcgt

SEQ ID NO: 196487 - DNA, 25 bp, Canis familiaris
tagcaatcattattacagcccctct

SEQ ID NO: 196488 - DNA, 25 bp, Canis familiaris
tagacttagagttcagtcccctttg

SEQ ID NO: 196489 - DNA, 25 bp, Canis familiaris
tagtttagaaatatccccacgtgtc

SEQ ID NO: 196490 - DNA, 25 bp, Canis familiaris
tagttagatggttttcggtccaatt

SEQ ID NO: 196491 - DNA, 25 bp, Canis familiaris
tagattagtggttgcctcaggctgg

SEQ ID NO: 196492 - DNA, 25 bp, Canis familiaris
tagtttgtggttctgcaggttgtgc

SEQ ID NO: 196493 - DNA, 25 bp, Canis familiaris
tagatcttctggattgctccgtttc

SEQ ID NO: 196494 - DNA, 25 bp, Canis familiaris
tagactttgccttttaccttgtctt

SEQ ID NO: 196495 - DNA, 25 bp, Canis familiaris
tagttttccttgaattgcacccttt

SEQ ID NO: 196496 - DNA, 25 bp, Canis familiaris
tagtttttttacattcacccactgg

SEQ ID NO: 196497 - DNA, 25 bp, Canis familiaris
tagatttaaatttcttccaaactca

SEQ ID NO: 196498 - DNA, 25 bp, Canis familiaris
tagggaaagtattttctaagaccag

SEQ ID NO: 196499 - DNA, 25 bp, Canis familiaris
tagtgtcacatacttagttctaaac

SEQ ID NO: 196500 - DNA, 25 bp, Canis familiaris
tagttaatgcaaaattctgtaatca

SEQ ID NO: 196501 - DNA, 25 bp, Canis familiaris
tagaaaatgcccattctctcacaca

SEQ ID NO: 196502 - DNA, 25 bp, Canis familiaris
tagaagacaccgggaccgatccagc

SEQ ID NO: 196503 - DNA, 25 bp, Canis familiaris
tagaagacaccgggaccgatccagc

SEQ ID NO: 196504 - DNA, 25 bp, Canis familiaris
tagaagacaccgggaccgatccagc

SEQ ID NO: 196505 - DNA, 25 bp, Canis familiaris
tagaagacaccgggaccgatccagc

SEQ ID NO: 196506 - DNA, 25 bp, Canis familiaris
tagaagacaccgggaccgatccagc

SEQ ID NO: 196507 - DNA, 25 bp, Canis familiaris
tagaagacaccgggaccgatccagc

SEQ ID NO: 196508 - DNA, 25 bp, Canis familiaris
tagaagacaccgggaccgatccagc

SEQ ID NO: 196509 - DNA, 25 bp, Canis familiaris
tagaagacaccgggaccgatccagc

SEQ ID NO: 196510 - DNA, 25 bp, Canis familiaris
tagaagacaccgggaccgatccagc

SEQ ID NO: 196511 - DNA, 25 bp, Canis familiaris
tagaagacaccgggaccgatccagc

SEQ ID NO: 196512 - DNA, 25 bp, Canis familiaris
tagaagacaccgggaccgatccagc

SEQ ID NO: 196513 - DNA, 25 bp, Canis familiaris
tagaagacaccgggaccgatccagc

SEQ ID NO: 196514 - DNA, 25 bp, Canis familiaris
tagaagacaccgggaccgatccagc

SEQ ID NO: 196515 - DNA, 25 bp, Canis familiaris
tagaagacaccgggaccgatccagc

SEQ ID NO: 196516 - DNA, 25 bp, Canis familiaris
tagaagacaccgggaccgatccagc

SEQ ID NO: 196517 - DNA, 25 bp, Canis familiaris
tagaagacaccgggaccgatccagc

SEQ ID NO: 196518 - DNA, 25 bp, Canis familiaris
tagttcaaccgtggaaagatgccaa

SEQ ID NO: 196519 - DNA, 25 bp, Canis familiaris
tagtctaatcccaggcaagtgccag

SEQ ID NO: 196520 - DNA, 25 bp, Canis familiaris
tagtctaatcaggtttgggcatcaa

SEQ ID NO: 196521 - DNA, 25 bp, Canis familiaris
tagatgtgtatcagctttgggacca

SEQ ID NO: 196522 - DNA, 25 bp, Canis familiaris
tagagctctatccgttagttggcca

SEQ ID NO: 196523 - DNA, 25 bp, Canis familiaris
tagagcatctacctttgtctaggcc

SEQ ID NO: 196524 - DNA, 25 bp, Canis familiaris
tagagatccacctcttcagatgcca

SEQ ID NO: 196525 - DNA, 25 bp, Canis familiaris
tagaatccaccaggcgtgcagatgg

SEQ ID NO: 196526 - DNA, 25 bp, Canis familiaris
tagacaccaccatgcgtggaggccg

SEQ ID NO: 196527 - DNA, 25 bp, Canis familiaris
tagatcctcctctgaattgagcctc

SEQ ID NO: 196528 - DNA, 25 bp, Canis familiaris
tagactccctgctgagggcagaatc

SEQ ID NO: 196529 - DNA, 25 bp, Canis familiaris
tagagtccctgataggtgccgagca

SEQ ID NO: 196530 - DNA, 25 bp, Canis familiaris
tagagcacccggagggctcatagcc

SEQ ID NO: 196531 - DNA, 25 bp, Canis familiaris
tagatgccacgcaggtgggctacgc

SEQ ID NO: 196532 - DNA, 25 bp, Canis familiaris
tagatggacagcagcggctggggcg

SEQ ID NO: 196533 - DNA, 25 bp, Canis familiaris
tagatggacagcagcggctgggcgc

SEQ ID NO: 196534 - DNA, 25 bp, Canis familiaris
tagataacctcgggccgatcgcacg

SEQ ID NO: 196535 - DNA, 25 bp, Canis familiaris
tagataacctcgggccgatcgcacg

SEQ ID NO: 196536 - DNA, 25 bp, Canis familiaris
tagataatcctcgggctcgtatctg

SEQ ID NO: 196537 - DNA, 25 bp, Canis familiaris
tagaaggtctcagggcttgttttcc

SEQ ID NO: 196538 - DNA, 25 bp, Canis familiaris
tagagagcctttgttgttcatttcc

SEQ ID NO: 196539 - DNA, 25 bp, Canis familiaris
tagagagctttgtgtttcagtttgc

SEQ ID NO: 196540 - DNA, 25 bp, Canis familiaris
tagaagctttgtttttcattgtccc

SEQ ID NO: 196541 - DNA, 25 bp, Canis familiaris
tagaagctttgcttttcatttcccc

SEQ ID NO: 196542 - DNA, 25 bp, Canis familiaris
tagaagctttgttttcatttcccct

SEQ ID NO: 196543 - DNA, 25 bp, Canis familiaris
tagaagctttgttttcatttgcccc

SEQ ID NO: 196544 - DNA, 25 bp, Canis familiaris
tagaaggtggacttgtcccagccgc

SEQ ID NO: 196545 - DNA, 25 bp, Canis familiaris
tagtctgtatcgtagtgtaccgccg

SEQ ID NO: 196546 - DNA, 25 bp, Canis familiaris
tagttgatactttgttacccttaga

SEQ ID NO: 196547 - DNA, 25 bp, Canis familiaris
tagaggtatgtatgttacgccgtta

SEQ ID NO: 196548 - DNA, 25 bp, Canis familiaris
tagagtgttgtctgtgctgacctca

SEQ ID NO: 196549 - DNA, 25 bp, Canis familiaris
tagatcctctgtacgacgagaccat

SEQ ID NO: 196550 - DNA, 25 bp, Canis familiaris
tagagcgccgtcaagaccaatgcca

SEQ ID NO: 196551 - DNA, 25 bp, Canis familiaris
tagaccgacatctagacaagtcaca

SEQ ID NO: 196552 - DNA, 25 bp, Canis familiaris
tagagcctgaccttcctggtcagca

SEQ ID NO: 196553 - DNA, 25 bp, Canis familiaris
tagagacacccagtttggctgaaag

SEQ ID NO: 196554 - DNA, 25 bp, Canis familiaris
tagaacgtcaccttgttctagtagg

SEQ ID NO: 196555 - DNA, 25 bp, Canis familiaris
tagactcctcccgtttgaagatagg

SEQ ID NO: 196556 - DNA, 25 bp, Canis familiaris
tagactcttcattcgttgtgacagc

SEQ ID NO: 196557 - DNA, 25 bp, Canis familiaris
tagactgttatcttgttggccctat

SEQ ID NO: 196558 - DNA, 25 bp, Canis familiaris
tagaattctagcttgttttcctccg

SEQ ID NO: 196559 - DNA, 25 bp, Canis familiaris
tagaactcttaaattcttcctttga

SEQ ID NO: 196560 - DNA, 25 bp, Canis familiaris
tagttgccattatttcctaccttat

SEQ ID NO: 196561 - DNA, 25 bp, Canis familiaris
tagtggtataaattggcccctataa

SEQ ID NO: 196562 - DNA, 25 bp, Canis familiaris
tagagtgaaaaacagcgcccttcct

SEQ ID NO: 196563 - DNA, 25 bp, Canis familiaris
tatggctggaaacaagtccctgtag

SEQ ID NO: 196564 - DNA, 25 bp, Canis familiaris
ttgcctgggagacaagtccctcggc

SEQ ID NO: 196565 - DNA, 25 bp, Canis familiaris
tagaaggggccagcagtgccctcga

SEQ ID NO: 196566 - DNA, 25 bp, Canis familiaris
tagacgagggtgaccattccctccc

SEQ ID NO: 196567 - DNA, 25 bp, Canis familiaris
tagaggagcggtaggaatcccctcc

SEQ ID NO: 196568 - DNA, 25 bp, Canis familiaris
tagaggaggcgatggtgacccggac

SEQ ID NO: 196569 - DNA, 25 bp, Canis familiaris
tagagcctgggaggggtcaactcgc

SEQ ID NO: 196570 - DNA, 25 bp, Canis familiaris
tagagaagtgcgtgggccaggcctc

SEQ ID NO: 196571 - DNA, 25 bp, Canis familiaris
tagagaagtggggggaattcaaagc

SEQ ID NO: 196572 - DNA, 25 bp, Canis familiaris
tatataagtttgtggttcccaagcc

SEQ ID NO: 196573 - DNA, 25 bp, Canis familiaris
tagggactgttgaggttctgggggc

SEQ ID NO: 196574 - DNA, 25 bp, Canis familiaris
taggtgacttagatacttggcagga

SEQ ID NO: 196575 - DNA, 25 bp, Canis familiaris
taggtgacctaactacttacactaa

SEQ ID NO: 196576 - DNA, 25 bp, Canis familiaris
tagaggatccaacctatcttaagaa

SEQ ID NO: 196577 - DNA, 25 bp, Canis familiaris
tagggatggccacagattttaagtc

SEQ ID NO: 196578 - DNA, 25 bp, Canis familiaris
tagaagaggccccctctgtgtaagt

SEQ ID NO: 196579 - DNA, 25 bp, Canis familiaris
tagaagaggtcacggccttggagca

SEQ ID NO: 196580 - DNA, 25 bp, Canis familiaris
tagactcggtgctggacgtggtgag

SEQ ID NO: 196581 - DNA, 25 bp, Canis familiaris
tagacatcaaggtggcagcagggga

SEQ ID NO: 196582 - DNA, 25 bp, Canis familiaris
tagaccaagggggcagctggcctta

SEQ ID NO: 196583 - DNA, 25 bp, Canis familiaris
tagtaactgctgaagaccggcctta

SEQ ID NO: 196584 - DNA, 25 bp, Canis familiaris
tagaatgtgctgttaaccctgccgt

SEQ ID NO: 196585 - DNA, 25 bp, Canis familiaris
tagaaggctatcaatccctcagcac

SEQ ID NO: 196586 - DNA, 25 bp, Canis familiaris
tagaagagtctcaatctcgtgcctc

SEQ ID NO: 196587 - DNA, 25 bp, Canis familiaris
tagaaggtcatgaactccaacccca

SEQ ID NO: 196588 - DNA, 25 bp, Canis familiaris
tagaaggaagtagccacctcatcca

SEQ ID NO: 196589 - DNA, 25 bp, Canis familiaris
tatggaggagaccatccgacgtcat

SEQ ID NO: 196590 - DNA, 25 bp, Canis familiaris
tagatgaggaagccacggtccctga

SEQ ID NO: 196591 - DNA, 25 bp, Canis familiaris
tagtggtcaaggggtacccagggag

SEQ ID NO: 196592 - DNA, 25 bp, Canis familiaris
tagggtctgggggcaacaccaggtc

SEQ ID NO: 196593 - DNA, 25 bp, Canis familiaris
tagtagtcatgccaggccaactaca

SEQ ID NO: 196594 - DNA, 25 bp, Canis familiaris
tagtagtctctcactgaattccttg

SEQ ID NO: 196595 - DNA, 25 bp, Canis familiaris
tagtacctctctgtaagggcctggt

SEQ ID NO: 196596 - DNA, 25 bp, Canis familiaris
tagttccctcaaaacagtgggtcct

SEQ ID NO: 196597 - DNA, 25 bp, Canis familiaris
tagttgcccctaaacgggcacccag

SEQ ID NO: 196598 - DNA, 25 bp, Canis familiaris
tagttcccgtatcaaaggcaccgtg

SEQ ID NO: 196599 - DNA, 25 bp, Canis familiaris
tagaacctggttcaagggccatcaa

SEQ ID NO: 196600 - DNA, 25 bp, Canis familiaris
tagagacctggatcaaggcccacat

SEQ ID NO: 196601 - DNA, 25 bp, Canis familiaris
tagtcacaattgtacaactcccatc

SEQ ID NO: 196602 - DNA, 25 bp, Canis familiaris
tagtcaaacccactattaccatagt

SEQ ID NO: 196603 - DNA, 25 bp, Canis familiaris
tagtagtagcccctgatgctgatgc

SEQ ID NO: 196604 - DNA, 25 bp, Canis familiaris
tagatattgcaccctatgatgttgg

SEQ ID NO: 196605 - DNA, 25 bp, Canis familiaris
tagatattgcaccctatgatgttgg

SEQ ID NO: 196606 - DNA, 25 bp, Canis familiaris
tagatcttgccgctgtggatgttgg

SEQ ID NO: 196607 - DNA, 25 bp, Canis familiaris
tagtctctcgagcagtggtgacagg

SEQ ID NO: 196608 - DNA, 25 bp, Canis familiaris
tagttctctcatcagcgggagggag

SEQ ID NO: 196609 - DNA, 25 bp, Canis familiaris
tagttatatatattctgaagggaac

SEQ ID NO: 196610 - DNA, 25 bp, Canis familiaris
tagtttgaattacttgagcttgaaa

SEQ ID NO: 196611 - DNA, 25 bp, Canis familiaris
tagtcattacttgtgtatgcttatt

SEQ ID NO: 196612 - DNA, 25 bp, Canis familiaris
tagactcttattgacattgttgttt

SEQ ID NO: 196613 - DNA, 25 bp, Canis familiaris
tagactgtcgcataatttttgtttt

SEQ ID NO: 196614 - DNA, 25 bp, Canis familiaris
taggtgccgctacagtttttattta

SEQ ID NO: 196615 - DNA, 25 bp, Canis familiaris
tagaagccctagtgttttttctgta

SEQ ID NO: 196616 - DNA, 25 bp, Canis familiaris
tagacccctcagtgtagttgtagcg

SEQ ID NO: 196617 - DNA, 25 bp, Canis familiaris
tagacccccaggcctggatgagtat

SEQ ID NO: 196618 - DNA, 25 bp, Canis familiaris
tagacacccacagcatcggagagaa

SEQ ID NO: 196619 - DNA, 25 bp, Canis familiaris
tagaccctgcaagcctgtggaggcc

SEQ ID NO: 196620 - DNA, 25 bp, Canis familiaris
tagaccgggacggtgtgggcgatgc

SEQ ID NO: 196621 - DNA, 25 bp, Canis familiaris
tagagtcagaggtcctttggcttat

SEQ ID NO: 196622 - DNA, 25 bp, Canis familiaris
tagactggggtggcttactgctgtt

SEQ ID NO: 196623 - DNA, 25 bp, Canis familiaris
taggctccatgacctgttgacggtc

SEQ ID NO: 196624 - DNA, 25 bp, Canis familiaris
tagagactatgtcgctttcctgagc

SEQ ID NO: 196625 - DNA, 25 bp, Canis familiaris
tagaaaagctctccatgtgcctgtc

SEQ ID NO: 196626 - DNA, 25 bp, Canis familiaris
tagaaaatctcatctctgctctggg

SEQ ID NO: 196627 - DNA, 25 bp, Canis familiaris
tatgaagaaccaacgtgccgcggga

SEQ ID NO: 196628 - DNA, 25 bp, Canis familiaris
tagagtgttcaaagcaggcccgagc

SEQ ID NO: 196629 - DNA, 25 bp, Canis familiaris
tagagtgttcaaagcaggcccgagc

SEQ ID NO: 196630 - DNA, 25 bp, Canis familiaris
tagagtgttcaaagcaggcccgagc

SEQ ID NO: 196631 - DNA, 25 bp, Canis familiaris
tagagtgttcaaagcaggcccgagc

SEQ ID NO: 196632 - DNA, 25 bp, Canis familiaris
tatggcttccaaaatgcgctcttag

SEQ ID NO: 196633 - DNA, 25 bp, Canis familiaris
tagagttccattgtgcctactaaaa

SEQ ID NO: 196634 - DNA, 25 bp, Canis familiaris
tagttcctctgtgacccatttagaa

SEQ ID NO: 196635 - DNA, 25 bp, Canis familiaris
tagttagcgcgtacccttttagaag

SEQ ID NO: 196636 - DNA, 25 bp, Canis familiaris
tagtatcctagtcctcctagaatga

SEQ ID NO: 196637 - DNA, 25 bp, Canis familiaris
tagtagcctactagtagtacatcaa

SEQ ID NO: 196638 - DNA, 25 bp, Canis familiaris
tagtaagtgcctctagctcaacacc

SEQ ID NO: 196639 - DNA, 25 bp, Canis familiaris
tagtcagaggtcctgtatccaaccc

SEQ ID NO: 196640 - DNA, 25 bp, Canis familiaris
tagtgaggccctcggatcggccccg

SEQ ID NO: 196641 - DNA, 25 bp, Canis familiaris
taggaggccgttttgcggcactacc

SEQ ID NO: 196642 - DNA, 25 bp, Canis familiaris
taggaggccggtgatgtctgacaaa

SEQ ID NO: 196643 - DNA, 25 bp, Canis familiaris
tagagccgcccattaatcttgatca

SEQ ID NO: 196644 - DNA, 25 bp, Canis familiaris
tagacccacacatcacatttgcatg

SEQ ID NO: 196645 - DNA, 25 bp, Canis familiaris
tagacacccagatggcatgtgatta

SEQ ID NO: 196646 - DNA, 25 bp, Canis familiaris
tagacagcttcatgaggaggttctc

SEQ ID NO: 196647 - DNA, 25 bp, Canis familiaris
tagaccattcttgcgaggatacttt

SEQ ID NO: 196648 - DNA, 25 bp, Canis familiaris
ttcgatcttcataacggacaaactg

SEQ ID NO: 196649 - DNA, 25 bp, Canis familiaris
ttggtttgagctacggaacccttcg

SEQ ID NO: 196650 - DNA, 25 bp, Canis familiaris
tagtgcggtggcatctaaaccctgt

SEQ ID NO: 196651 - DNA, 25 bp, Canis familiaris
taggcgggggttacagaccgcctcg

SEQ ID NO: 196652 - DNA, 25 bp, Canis familiaris
tagtcggggaacttcgatccagctc

SEQ ID NO: 196653 - DNA, 25 bp, Canis familiaris
tagtctggcacttccttggactact

SEQ ID NO: 196654 - DNA, 25 bp, Canis familiaris
tagtaagcagtgtttctggccccta

SEQ ID NO: 196655 - DNA, 25 bp, Canis familiaris
tagtaacagttcgcttcgtccatga

SEQ ID NO: 196656 - DNA, 25 bp, Canis familiaris
tagaaacaattcctcctgttccaac

SEQ ID NO: 196657 - DNA, 25 bp, Canis familiaris
tagagaaacagtcctcttcttccat

SEQ ID NO: 196658 - DNA, 25 bp, Canis familiaris
tagaaaatagatgcctctcgcctga

SEQ ID NO: 196659 - DNA, 25 bp, Canis familiaris
tagagagagtggtactctgccccta

SEQ ID NO: 196660 - DNA, 25 bp, Canis familiaris
tagagaggtgaattcgccaaacata

SEQ ID NO: 196661 - DNA, 25 bp, Canis familiaris
tagagagtgaggttcgccgggatct

SEQ ID NO: 196662 - DNA, 25 bp, Canis familiaris
tagaggtgggtactgcctgagcttt

SEQ ID NO: 196663 - DNA, 25 bp, Canis familiaris
tagaaatggttcagtctgcagcccc

SEQ ID NO: 196664 - DNA, 25 bp, Canis familiaris
tagaaatgctgtgttgtccgcttgc

SEQ ID NO: 196665 - DNA, 25 bp, Canis familiaris
tagaacatgcttaaatctgttgctt

SEQ ID NO: 196666 - DNA, 25 bp, Canis familiaris
tagagacatctgggacttcctgcgt

SEQ ID NO: 196667 - DNA, 25 bp, Canis familiaris
tagaacattctgtatctgtccctgt

SEQ ID NO: 196668 - DNA, 25 bp, Canis familiaris
tatgaacacgtatctgtccactggt

SEQ ID NO: 196669 - DNA, 25 bp, Canis familiaris
tagtgagccgtatcgatgccactgg

SEQ ID NO: 196670 - DNA, 25 bp, Canis familiaris
tagtccaaggaagatccctggtgtc

SEQ ID NO: 196671 - DNA, 25 bp, Canis familiaris
tagtccctggttgcataccgagtgc

SEQ ID NO: 196672 - DNA, 25 bp, Canis familiaris
tagtctcctggttgcctacgggaga

SEQ ID NO: 196673 - DNA, 25 bp, Canis familiaris
tagtagcagctgtggcctttgggaa

SEQ ID NO: 196674 - DNA, 25 bp, Canis familiaris
tagtggcccagggcctgttctggga

SEQ ID NO: 196675 - DNA, 25 bp, Canis familiaris
tagtgtgtaacgccgtattctggaa

SEQ ID NO: 196676 - DNA, 25 bp, Canis familiaris
tatggattaacgccagcaactcggc

SEQ ID NO: 196677 - DNA, 25 bp, Canis familiaris
taggctaagcgtcagctttcggctc

SEQ ID NO: 196678 - DNA, 25 bp, Canis familiaris
tagagaatcacaccagccggagctc

SEQ ID NO: 196679 - DNA, 25 bp, Canis familiaris
tagaaagcagcagcagacaggcccc

SEQ ID NO: 196680 - DNA, 25 bp, Canis familiaris
tagtgacagcaaggggaccgccagc

SEQ ID NO: 196681 - DNA, 25 bp, Canis familiaris
tagggcccagagaacctggctgcag

SEQ ID NO: 196682 - DNA, 25 bp, Canis familiaris
tagtcgccgtgcctaccatggtgac

SEQ ID NO: 196683 - DNA, 25 bp, Canis familiaris
tagtggcctgtggctaccaggtcta

SEQ ID NO: 196684 - DNA, 25 bp, Canis familiaris
tatgggccttttaatcaggcttaca

SEQ ID NO: 196685 - DNA, 25 bp, Canis familiaris
taggtggttttactgagctgttccc

SEQ ID NO: 196686 - DNA, 25 bp, Canis familiaris
tagggaagagttctgatctgtacct

SEQ ID NO: 196687 - DNA, 25 bp, Canis familiaris
taggtttcagttcatttaatcccca

SEQ ID NO: 196688 - DNA, 25 bp, Canis familiaris
taggttttgattccatggctcttcc

SEQ ID NO: 196689 - DNA, 25 bp, Canis familiaris
tagagttttattcctgtgtcctttt

SEQ ID NO: 196690 - DNA, 25 bp, Canis familiaris
tagagtttatctacacggctccttc

SEQ ID NO: 196691 - DNA, 25 bp, Canis familiaris
tagggtacctactggtcactattta

SEQ ID NO: 196692 - DNA, 25 bp, Canis familiaris
taggtctccctattgtggtactgat

SEQ ID NO: 196693 - DNA, 25 bp, Canis familiaris
taggtctccctattgtggtactgat

SEQ ID NO: 196694 - DNA, 25 bp, Canis familiaris
tatgtgttcgcctactgatgtgcca

SEQ ID NO: 196695 - DNA, 25 bp, Canis familiaris
tagtagtccatatgtcagtccacgg

SEQ ID NO: 196696 - DNA, 25 bp, Canis familiaris
tagtagatgtagtgtgcttccagag

SEQ ID NO: 196697 - DNA, 25 bp, Canis familiaris
tagacgatccagtggttcctgtgaa

SEQ ID NO: 196698 - DNA, 25 bp, Canis familiaris
tagaggaccaggtgtccactggtac

SEQ ID NO: 196699 - DNA, 25 bp, Canis familiaris
tagacggggagctgctcaaccgcta

SEQ ID NO: 196700 - DNA, 25 bp, Canis familiaris
tagacgaagggctgatcacgcggca

SEQ ID NO: 196701 - DNA, 25 bp, Canis familiaris
tagacgaggatgaggcacagccgga

SEQ ID NO: 196702 - DNA, 25 bp, Canis familiaris
tagacgatctatacagagaggggaa

SEQ ID NO: 196703 - DNA, 25 bp, Canis familiaris
tagacagatctgcctgtgagggcct

SEQ ID NO: 196704 - DNA, 25 bp, Canis familiaris
tagagcagcataggcacggggctcc

SEQ ID NO: 196705 - DNA, 25 bp, Canis familiaris
taggcctgggcctaggatgttcagg

SEQ ID NO: 196706 - DNA, 25 bp, Canis familiaris
taggctttggcagtggtcatttcag

SEQ ID NO: 196707 - DNA, 25 bp, Canis familiaris
tagacttcgagcaggagatggccac

SEQ ID NO: 196708 - DNA, 25 bp, Canis familiaris
tagacactcgtcactggtgtgccac

SEQ ID NO: 196709 - DNA, 25 bp, Canis familiaris
tagtcagggtctttgcagattccaa

SEQ ID NO: 196710 - DNA, 25 bp, Canis familiaris
tagtagtggatcgaccgtcaccatc

SEQ ID NO: 196711 - DNA, 25 bp, Canis familiaris
tagtcacaggtggaccgagccagac

SEQ ID NO: 196712 - DNA, 25 bp, Canis familiaris
tagacacagagtgtcagcccctatg

SEQ ID NO: 196713 - DNA, 25 bp, Canis familiaris
tagtaatgcaggtatctctccctag

SEQ ID NO: 196714 - DNA, 25 bp, Canis familiaris
tagtcaagggacgtgctgccttaac

SEQ ID NO: 196715 - DNA, 25 bp, Canis familiaris
tagtaaaagtccgcagctgtgaaca

SEQ ID NO: 196716 - DNA, 25 bp, Canis familiaris
tagtaaaaccccctgagatgacacc

SEQ ID NO: 196717 - DNA, 25 bp, Canis familiaris
tagagaagaatccccccaagattgc

SEQ ID NO: 196718 - DNA, 25 bp, Canis familiaris
tagagaagaatccatcaccacggct

SEQ ID NO: 196719 - DNA, 25 bp, Canis familiaris
tagacacatggacacgccacatggc

SEQ ID NO: 196720 - DNA, 25 bp, Canis familiaris
tagagatctgtgagacgctcctttc

SEQ ID NO: 196721 - DNA, 25 bp, Canis familiaris
tagaggctgtgttgccaggactctt

SEQ ID NO: 196722 - DNA, 25 bp, Canis familiaris
tagagctctatatcacgagaccctc

SEQ ID NO: 196723 - DNA, 25 bp, Canis familiaris
tagactccatgtctgggatgacctc

SEQ ID NO: 196724 - DNA, 25 bp, Canis familiaris
tagtgctcacttcggggtgtttcat

SEQ ID NO: 196725 - DNA, 25 bp, Canis familiaris
tatggccccttgggaggactttgca

SEQ ID NO: 196726 - DNA, 25 bp, Canis familiaris
tattgcaaacggggggactatgtca

SEQ ID NO: 196727 - DNA, 25 bp, Canis familiaris
tttgattccgcgggggagggcacat

SEQ ID NO: 196728 - DNA, 25 bp, Canis familiaris
tttggggcgggagagcaggtcagct

SEQ ID NO: 196729 - DNA, 25 bp, Canis familiaris
tatttgggcggaagaccggtcaggc

SEQ ID NO: 196730 - DNA, 25 bp, Canis familiaris
tatgttgggggaaaatgcactgaat

SEQ ID NO: 196731 - DNA, 25 bp, Canis familiaris
tagtctgctgggctgaaatcctcac

SEQ ID NO: 196732 - DNA, 25 bp, Canis familiaris
tagtcatgtcgtgtctatatcctac

SEQ ID NO: 196733 - DNA, 25 bp, Canis familiaris
tagtatttgtttcctatctcaagaa

SEQ ID NO: 196734 - DNA, 25 bp, Canis familiaris
tagtatttggtgaccttcttgccca

SEQ ID NO: 196735 - DNA, 25 bp, Canis familiaris
tagtatttagccagtgcacttccca

SEQ ID NO: 196736 - DNA, 25 bp, Canis familiaris
tagtatcaggtgctggtctctttcc

SEQ ID NO: 196737 - DNA, 25 bp, Canis familiaris
tagtaggggcaggtctttctgtgca

SEQ ID NO: 196738 - DNA, 25 bp, Canis familiaris
tagtaggagacactcgtcgtctgtc

SEQ ID NO: 196739 - DNA, 25 bp, Canis familiaris
tagtaggaatgtctgaagcctgcct

SEQ ID NO: 196740 - DNA, 25 bp, Canis familiaris
tagtcggagttgtagaagcaggcct

SEQ ID NO: 196741 - DNA, 25 bp, Canis familiaris
tagtgggagccttggaccagtgtgt

SEQ ID NO: 196742 - DNA, 25 bp, Canis familiaris
taggggcaccattgaaatcttgagt

SEQ ID NO: 196743 - DNA, 25 bp, Canis familiaris
taggggcacctgagtagtagagttg

SEQ ID NO: 196744 - DNA, 25 bp, Canis familiaris
tagggagacctgaggggccaaggcc

SEQ ID NO: 196745 - DNA, 25 bp, Canis familiaris
tagtcgagacccagggggagtccac

SEQ ID NO: 196746 - DNA, 25 bp, Canis familiaris
tagtaggagcccagagagacgcttt

SEQ ID NO: 196747 - DNA, 25 bp, Canis familiaris
tagttggcagacatcggagcccctg

SEQ ID NO: 196748 - DNA, 25 bp, Canis familiaris
tagactgggatccctggaggacctg

SEQ ID NO: 196749 - DNA, 25 bp, Canis familiaris
tatacttggacacccggtggccgtt

SEQ ID NO: 196750 - DNA, 25 bp, Canis familiaris
tagatttgttaaggggtcagccatt

SEQ ID NO: 196751 - DNA, 25 bp, Canis familiaris
tagttatgccatgagctgggtccgc

SEQ ID NO: 196752 - DNA, 25 bp, Canis familiaris
tagttgcaccacggtgtggtctgcc

SEQ ID NO: 196753 - DNA, 25 bp, Canis familiaris
tagattgaaaccccaggtctgccat

SEQ ID NO: 196754 - DNA, 25 bp, Canis familiaris
tagattggatacctatgaggcattg

SEQ ID NO: 196755 - DNA, 25 bp, Canis familiaris
tatgctgttggaggctatgatggac

SEQ ID NO: 196756 - DNA, 25 bp, Canis familiaris
tatgcagcttggaatgctatctgag

SEQ ID NO: 196757 - DNA, 25 bp, Canis familiaris
tagagttgatcttgtcatctgagac

SEQ ID NO: 196758 - DNA, 25 bp, Canis familiaris
tagacattatttcatcggacctccc

SEQ ID NO: 196759 - DNA, 25 bp, Canis familiaris
tagacaggtttgttcggaattttct

SEQ ID NO: 196760 - DNA, 25 bp, Canis familiaris
tagaggtttttatgccaatttttat

SEQ ID NO: 196761 - DNA, 25 bp, Canis familiaris
tagggtttttttctcattgtaatat

SEQ ID NO: 196762 - DNA, 25 bp, Canis familiaris
tagggtttattttgcttatttacag

SEQ ID NO: 196763 - DNA, 25 bp, Canis familiaris
tagttttgtttacctgcttttagat

SEQ ID NO: 196764 - DNA, 25 bp, Canis familiaris
tagttttgactgtatcctgttttta

SEQ ID NO: 196765 - DNA, 25 bp, Canis familiaris
tagttggatagcaccttgattaatt

SEQ ID NO: 196766 - DNA, 25 bp, Canis familiaris
tagattggacgtgctttatcggctc

SEQ ID NO: 196767 - DNA, 25 bp, Canis familiaris
tagatcagttttgctttcatcccat

SEQ ID NO: 196768 - DNA, 25 bp, Canis familiaris
tagtagtcttgaaccaggacccaaa

SEQ ID NO: 196769 - DNA, 25 bp, Canis familiaris
tagtttctgttccccagaaccacaa

SEQ ID NO: 196770 - DNA, 25 bp, Canis familiaris
tagtttcagaaatacagcaacccat

SEQ ID NO: 196771 - DNA, 25 bp, Canis familiaris
tagttagcagaagaccagccttaca

SEQ ID NO: 196772 - DNA, 25 bp, Canis familiaris
tagaccttgcaagaccacttctaca

SEQ ID NO: 196773 - DNA, 25 bp, Canis familiaris
tagaccatttgtccaccatttttaa

SEQ ID NO: 196774 - DNA, 25 bp, Canis familiaris
tagagcactttatacctttctccta

SEQ ID NO: 196775 - DNA, 25 bp, Canis familiaris
tagagaccctattatctctctctct

SEQ ID NO: 196776 - DNA, 25 bp, Canis familiaris
taggcccagaatgttctttctaccc

SEQ ID NO: 196777 - DNA, 25 bp, Canis familiaris
tagatccccaatatttttcataccc

SEQ ID NO: 196778 - DNA, 25 bp, Canis familiaris
tagtccctaagaattctcattgcat

SEQ ID NO: 196779 - DNA, 25 bp, Canis familiaris
tagatactctcacatctttcatttt

SEQ ID NO: 196780 - DNA, 25 bp, Canis familiaris
tagaggatcatatagtatttgtctt

SEQ ID NO: 196781 - DNA, 25 bp, Canis familiaris
tagattattaaaagcatgtggtctt

SEQ ID NO: 196782 - DNA, 25 bp, Canis familiaris
tagttcatgttaatagtggggcttt

SEQ ID NO: 196783 - DNA, 25 bp, Canis familiaris
tagttgtttccttgttcggctattt

SEQ ID NO: 196784 - DNA, 25 bp, Canis familiaris
tagtgcttttgggtgttttgttttg

SEQ ID NO: 196785 - DNA, 25 bp, Canis familiaris
tagtgtgtgttacttttgctttttt

SEQ ID NO: 196786 - DNA, 25 bp, Canis familiaris
tagatcttgctttcttttgttcatt

SEQ ID NO: 196787 - DNA, 25 bp, Canis familiaris
tagtctgtttttcagtggtctctcc

SEQ ID NO: 196788 - DNA, 25 bp, Canis familiaris
tttagctattttcttaatccctcca

SEQ ID NO: 196789 - DNA, 25 bp, Canis familiaris
tagtagtgaacttttataccccatt

SEQ ID NO: 196790 - DNA, 25 bp, Canis familiaris
tagtaggtacttttaagatcccact

SEQ ID NO: 196791 - DNA, 25 bp, Canis familiaris
taggacctacctttgaaaggccaat

SEQ ID NO: 196792 - DNA, 25 bp, Canis familiaris
tagtgcacgtaacaggcaaccgcca

SEQ ID NO: 196793 - DNA, 25 bp, Canis familiaris
tagtcctggaaccaggcctggggcc

SEQ ID NO: 196794 - DNA, 25 bp, Canis familiaris
tagttgggagacaggccgaggcacc

SEQ ID NO: 196795 - DNA, 25 bp, Canis familiaris
tagggagaaacccgcaaggaccctg

SEQ ID NO: 196796 - DNA, 25 bp, Canis familiaris
tagagggaacaggtcacgaggcccc

SEQ ID NO: 196797 - DNA, 25 bp, Canis familiaris
tagaggggcaagttcactgttcaca

SEQ ID NO: 196798 - DNA, 25 bp, Canis familiaris
tagagtatgcagcaggtcctttcgc

SEQ ID NO: 196799 - DNA, 25 bp, Canis familiaris
tagagtatgcagcaggtcctttcgc

SEQ ID NO: 196800 - DNA, 25 bp, Canis familiaris
tagagtatgcagcaggtcctttcgc

SEQ ID NO: 196801 - DNA, 25 bp, Canis familiaris
tagtgtgagcagcaagtagccccgc

SEQ ID NO: 196802 - DNA, 25 bp, Canis familiaris
taggtggaaaaggacctccgaggtg

SEQ ID NO: 196803 - DNA, 25 bp, Canis familiaris
tagagttcagaatggtgccccgagg

SEQ ID NO: 196804 - DNA, 25 bp, Canis familiaris
taggatatgagatcctggccctctg

SEQ ID NO: 196805 - DNA, 25 bp, Canis familiaris
tagagttgtgaggaccagctgccct

SEQ ID NO: 196806 - DNA, 25 bp, Canis familiaris
tagagccattaggatccatctcctc

SEQ ID NO: 196807 - DNA, 25 bp, Canis familiaris
tagggcatggtggactcattctaca

SEQ ID NO: 196808 - DNA, 25 bp, Canis familiaris
taggtgatggttgtaaaaagttagt

SEQ ID NO: 196809 - DNA, 25 bp, Canis familiaris
tagggcaggtctctaaaccagtcca

SEQ ID NO: 196810 - DNA, 25 bp, Canis familiaris
taggggggcatccgaaacacaggaa

SEQ ID NO: 196811 - DNA, 25 bp, Canis familiaris
ttgggacggataacaaatccaggaa

SEQ ID NO: 196812 - DNA, 25 bp, Canis familiaris
tagggaacgtgagctaataaggaaa

SEQ ID NO: 196813 - DNA, 25 bp, Canis familiaris
taggagtacttggaagggaaagaag

SEQ ID NO: 196814 - DNA, 25 bp, Canis familiaris
taggggacttggtgctggacagctg

SEQ ID NO: 196815 - DNA, 25 bp, Canis familiaris
tagggtagcctgtatattataactt

SEQ ID NO: 196816 - DNA, 25 bp, Canis familiaris
tagggggccaccattgatattcttt

SEQ ID NO: 196817 - DNA, 25 bp, Canis familiaris
taggggggactggttgatgttctca

SEQ ID NO: 196818 - DNA, 25 bp, Canis familiaris
tagtccacaggactcctagtttcca

SEQ ID NO: 196819 - DNA, 25 bp, Canis familiaris
tagtccaaggtcttgtcgttgtccc

SEQ ID NO: 196820 - DNA, 25 bp, Canis familiaris
tagtagcaaggggtgtccttccctg

SEQ ID NO: 196821 - DNA, 25 bp, Canis familiaris
tagttgcctgggagacaagtccctc

SEQ ID NO: 196822 - DNA, 25 bp, Canis familiaris
tattacctgggtcgacgaagccccg

SEQ ID NO: 196823 - DNA, 25 bp, Canis familiaris
taggacctgggaacaagcaagcccc

SEQ ID NO: 196824 - DNA, 25 bp, Canis familiaris
taggggagcttaacaagaaccgcca

SEQ ID NO: 196825 - DNA, 25 bp, Canis familiaris
tagtggggcccaaaggaacagtgcc

SEQ ID NO: 196826 - DNA, 25 bp, Canis familiaris
tagttggggcccagagagatgcatg

SEQ ID NO: 196827 - DNA, 25 bp, Canis familiaris
tagttgttggaccacgtggcatctg

SEQ ID NO: 196828 - DNA, 25 bp, Canis familiaris
tagtccttggcctcaaggctctgga

SEQ ID NO: 196829 - DNA, 25 bp, Canis familiaris
tagttccgtgcttcaaagtgtttga

SEQ ID NO: 196830 - DNA, 25 bp, Canis familiaris
tagtctccttgacctacagtttaga

SEQ ID NO: 196831 - DNA, 25 bp, Canis familiaris
tagtcccactgcgttaaaattagat

SEQ ID NO: 196832 - DNA, 25 bp, Canis familiaris
tagatcccccacgcatgaagaaaat

SEQ ID NO: 196833 - DNA, 25 bp, Canis familiaris
tagagagtccccaccaagaagatga

SEQ ID NO: 196834 - DNA, 25 bp, Canis familiaris
tagagaactccttggcagaagtcaa

SEQ ID NO: 196835 - DNA, 25 bp, Canis familiaris
tagggtctccttggcagttggatct

SEQ ID NO: 196836 - DNA, 25 bp, Canis familiaris
tagggtctccttggcagttggatct

SEQ ID NO: 196837 - DNA, 25 bp, Canis familiaris
tagtgggcacctaccagttgttcat

SEQ ID NO: 196838 - DNA, 25 bp, Canis familiaris
tagtgcccaccttaatgtatgttac

SEQ ID NO: 196839 - DNA, 25 bp, Canis familiaris
taggcaccacgtaagaaaattagct

SEQ ID NO: 196840 - DNA, 25 bp, Canis familiaris
taggcctctcgcgaaacagaatcta

SEQ ID NO: 196841 - DNA, 25 bp, Canis familiaris
taggcgtttgcaggaatgtcatatc

SEQ ID NO: 196842 - DNA, 25 bp, Canis familiaris
tagtgatgcatcttcagccagagct

SEQ ID NO: 196843 - DNA, 25 bp, Canis familiaris
tagtattcctagacatgagcttgat

SEQ ID NO: 196844 - DNA, 25 bp, Canis familiaris
tagatctctcgccgccaatgcttgt

SEQ ID NO: 196845 - DNA, 25 bp, Canis familiaris
tagagcctgtgactctcaatctctg

SEQ ID NO: 196846 - DNA, 25 bp, Canis familiaris
tagtgcctctgactgtggagctcat

SEQ ID NO: 196847 - DNA, 25 bp, Canis familiaris
tagatcgcagcgagggagctgctct

SEQ ID NO: 196848 - DNA, 25 bp, Canis familiaris
tagagaaggtgtctactctgctcca

SEQ ID NO: 196849 - DNA, 25 bp, Canis familiaris
tagagagaggggctgctgtccccag

SEQ ID NO: 196850 - DNA, 25 bp, Canis familiaris
tagattaattgtctgctgtccccaa

SEQ ID NO: 196851 - DNA, 25 bp, Canis familiaris
tagattagattcggtcgttctggaa

SEQ ID NO: 196852 - DNA, 25 bp, Canis familiaris
tagttggcttctgtttctaggtgag

SEQ ID NO: 196853 - DNA, 25 bp, Canis familiaris
tagatttttcttttgttcatgtgga

SEQ ID NO: 196854 - DNA, 25 bp, Canis familiaris
tagtctatcttttttgctttcgggc

SEQ ID NO: 196855 - DNA, 25 bp, Canis familiaris
tagttttttgtttgcttacatgagc

SEQ ID NO: 196856 - DNA, 25 bp, Canis familiaris
tagtttatttgttcatcctacctgc

SEQ ID NO: 196857 - DNA, 25 bp, Canis familiaris
tagtactttctgtacttcatccctc

SEQ ID NO: 196858 - DNA, 25 bp, Canis familiaris
taggagctttcttttctactcccta

SEQ ID NO: 196859 - DNA, 25 bp, Canis familiaris
tatcgagtgattttttttccccgca

SEQ ID NO: 196860 - DNA, 25 bp, Canis familiaris
taggggcattgaagttcactcccac

SEQ ID NO: 196861 - DNA, 25 bp, Canis familiaris
tagataggacttccttgactccacc

SEQ ID NO: 196862 - DNA, 25 bp, Canis familiaris
tagtagagcactatctttacacata

SEQ ID NO: 196863 - DNA, 25 bp, Canis familiaris
tatgatatgaactttcttccctcga

SEQ ID NO: 196864 - DNA, 25 bp, Canis familiaris
tagattgagccttctcttacagcgt

SEQ ID NO: 196865 - DNA, 25 bp, Canis familiaris
tagatgtcacggtcttgggcaggtc

SEQ ID NO: 196866 - DNA, 25 bp, Canis familiaris
tagagttctgttttctgtgaggtca

SEQ ID NO: 196867 - DNA, 25 bp, Canis familiaris
tagagttccatttcctatgtatgta

SEQ ID NO: 196868 - DNA, 25 bp, Canis familiaris
tagaggacgctttcctatggtccac

SEQ ID NO: 196869 - DNA, 25 bp, Canis familiaris
tagaggagagtatccattttcagat

SEQ ID NO: 196870 - DNA, 25 bp, Canis familiaris
tagaggcagtgttggcagcatttta

SEQ ID NO: 196871 - DNA, 25 bp, Canis familiaris
tagaggcagtacagactattgtctc

SEQ ID NO: 196872 - DNA, 25 bp, Canis familiaris
tagagctcttaccttttttgctcca

SEQ ID NO: 196873 - DNA, 25 bp, Canis familiaris
tagagctgttatcattctttccacc

SEQ ID NO: 196874 - DNA, 25 bp, Canis familiaris
tagttgttatgttgtcaccctgacc

SEQ ID NO: 196875 - DNA, 25 bp, Canis familiaris
tagttgtatttaatcaccacatcac

SEQ ID NO: 196876 - DNA, 25 bp, Canis familiaris
tagattgatatttcatatactataa

SEQ ID NO: 196877 - DNA, 25 bp, Canis familiaris
tagatagatgcattatagttagtaa

SEQ ID NO: 196878 - DNA, 25 bp, Canis familiaris
tagaggatcacgatgttagctgaag

SEQ ID NO: 196879 - DNA, 25 bp, Canis familiaris
tagtggtcatcgacgttggccaacg

SEQ ID NO: 196880 - DNA, 25 bp, Canis familiaris
taggtgtcattgagtgtgggtacaa

SEQ ID NO: 196881 - DNA, 25 bp, Canis familiaris
tagtgtgatttgagcgttggattgt

SEQ ID NO: 196882 - DNA, 25 bp, Canis familiaris
tagttttaccctactgatgatgtgt

SEQ ID NO: 196883 - DNA, 25 bp, Canis familiaris
tagttataccacaatccaggattat

SEQ ID NO: 196884 - DNA, 25 bp, Canis familiaris
tagttttcaagcttccggttagaat

SEQ ID NO: 196885 - DNA, 25 bp, Canis familiaris
tagtctcttaatcttcgctttgaaa

SEQ ID NO: 196886 - DNA, 25 bp, Canis familiaris
tagtatttcgaatttcctaatgagc

SEQ ID NO: 196887 - DNA, 25 bp, Canis familiaris
tagtattcattgactttcctttccc

SEQ ID NO: 196888 - DNA, 25 bp, Canis familiaris
tagattccattcttttgctcttttc

SEQ ID NO: 196889 - DNA, 25 bp, Canis familiaris
tagtcataattcttgttccgtttta

SEQ ID NO: 196890 - DNA, 25 bp, Canis familiaris
tagtctcagagttttatttgtttaa

SEQ ID NO: 196891 - DNA, 25 bp, Canis familiaris
taggttggctctctagtatgactaa

SEQ ID NO: 196892 - DNA, 25 bp, Canis familiaris
taggaggacttcttcatgccataat

SEQ ID NO: 196893 - DNA, 25 bp, Canis familiaris
tagagacagacaagtatcagccata

SEQ ID NO: 196894 - DNA, 25 bp, Canis familiaris
taggacagtcatagtctgccttaaa

SEQ ID NO: 196895 - DNA, 25 bp, Canis familiaris
tagggaggtatgaggcagataaagc

SEQ ID NO: 196896 - DNA, 25 bp, Canis familiaris
tagggaaggcacaaggcaccagacc

SEQ ID NO: 196897 - DNA, 25 bp, Canis familiaris
tagtggggagcaccatggaccccca

SEQ ID NO: 196898 - DNA, 25 bp, Canis familiaris
tagtggaggcctccatggagcttct

SEQ ID NO: 196899 - DNA, 25 bp, Canis familiaris
tagttggagcgctgctggcagcctt

SEQ ID NO: 196900 - DNA, 25 bp, Canis familiaris
tagggctacagctgctgtggcctct

SEQ ID NO: 196901 - DNA, 25 bp, Canis familiaris
tagaggcagaaggtcctcgctctct

SEQ ID NO: 196902 - DNA, 25 bp, Canis familiaris
tagaggctcaagggcgttgtgcctt

SEQ ID NO: 196903 - DNA, 25 bp, Canis familiaris
tagagtgccaaacagttctgctcgt

SEQ ID NO: 196904 - DNA, 25 bp, Canis familiaris
tagtgtccatgaggtcgttcgatcg

SEQ ID NO: 196905 - DNA, 25 bp, Canis familiaris
tagttctgatgaggtctgttctttc

SEQ ID NO: 196906 - DNA, 25 bp, Canis familiaris
tagtctctatgatgattaagtttct

SEQ ID NO: 196907 - DNA, 25 bp, Canis familiaris
tagttgctcacatattcatctcttg

SEQ ID NO: 196908 - DNA, 25 bp, Canis familiaris
tagtgtctgacattcattcattcat

SEQ ID NO: 196909 - DNA, 25 bp, Canis familiaris
tagatatctatgtctctgtctccac

SEQ ID NO: 196910 - DNA, 25 bp, Canis familiaris
tagtgactatatattgcgccagctc

SEQ ID NO: 196911 - DNA, 25 bp, Canis familiaris
tagtagctatgaatatggcgcccaa

SEQ ID NO: 196912 - DNA, 25 bp, Canis familiaris
tagtcagttgttttggcaggcagta

SEQ ID NO: 196913 - DNA, 25 bp, Canis familiaris
tagttcctgcttttgtgcaacttct

SEQ ID NO: 196914 - DNA, 25 bp, Canis familiaris
tagttgctggcatttcaggaaattg

SEQ ID NO: 196915 - DNA, 25 bp, Canis familiaris
tagtctggcgagttagttgaatttg

SEQ ID NO: 196916 - DNA, 25 bp, Canis familiaris
taggggctgaattactatgaagttg

SEQ ID NO: 196917 - DNA, 25 bp, Canis familiaris
tagggccgaatgtaagatgctttta

SEQ ID NO: 196918 - DNA, 25 bp, Canis familiaris
tagtacctcacatcagagtgttggt

SEQ ID NO: 196919 - DNA, 25 bp, Canis familiaris
taggcccaccagctgagtgtttgtt

SEQ ID NO: 196920 - DNA, 25 bp, Canis familiaris
tagaggccactttgggtttttctga

SEQ ID NO: 196921 - DNA, 25 bp, Canis familiaris
tagaggccatctgaggtgtgttctc

SEQ ID NO: 196922 - DNA, 25 bp, Canis familiaris
tagttctacatgaaagtgtgcttgc

SEQ ID NO: 196923 - DNA, 25 bp, Canis familiaris
tagtcttgacagattggtctcctat

SEQ ID NO: 196924 - DNA, 25 bp, Canis familiaris
tagtctcatgactagtgatgctgat

SEQ ID NO: 196925 - DNA, 25 bp, Canis familiaris
tagatgtatctcctgaagcatattt

SEQ ID NO: 196926 - DNA, 25 bp, Canis familiaris
tagaggatcttgcaagcattattta

SEQ ID NO: 196927 - DNA, 25 bp, Canis familiaris
tagggattttacctctttcatcaac

SEQ ID NO: 196928 - DNA, 25 bp, Canis familiaris
tagggctcttaatcctttcagaaca

SEQ ID NO: 196929 - DNA, 25 bp, Canis familiaris
taggaggtaacttccctctcgacta

SEQ ID NO: 196930 - DNA, 25 bp, Canis familiaris
tagagagttataccacccttttcat

SEQ ID NO: 196931 - DNA, 25 bp, Canis familiaris
tagaggtctgtacacctcagctttc

SEQ ID NO: 196932 - DNA, 25 bp, Canis familiaris
tagaggatctctcatatgccacgct

SEQ ID NO: 196933 - DNA, 25 bp, Canis familiaris
tagaggatctccatatagccatata

SEQ ID NO: 196934 - DNA, 25 bp, Canis familiaris
tagaggcactactttatgaccatga

SEQ ID NO: 196935 - DNA, 25 bp, Canis familiaris
tagatgtcgtcctggagaccaacct

SEQ ID NO: 196936 - DNA, 25 bp, Canis familiaris
tagatgtgctgtcccgggcacagaa

SEQ ID NO: 196937 - DNA, 25 bp, Canis familiaris
tagatcctgtgaacgggcaaataac

SEQ ID NO: 196938 - DNA, 25 bp, Canis familiaris
tattcctggttcctggcctaaagtt

SEQ ID NO: 196939 - DNA, 25 bp, Canis familiaris
tatacccttccgagcattaaatgtc

SEQ ID NO: 196940 - DNA, 25 bp, Canis familiaris
ttcccttggtcgcgcagtataatcc

SEQ ID NO: 196941 - DNA, 25 bp, Canis familiaris
tttcggggttcagggcatataatac

SEQ ID NO: 196942 - DNA, 25 bp, Canis familiaris
tatacggctgttgcagcaggctttc

SEQ ID NO: 196943 - DNA, 25 bp, Canis familiaris
tatactaggtttcctcctgttacct

SEQ ID NO: 196944 - DNA, 25 bp, Canis familiaris
tagagatagggtttccacttcccca

SEQ ID NO: 196945 - DNA, 25 bp, Canis familiaris
taggaagggcccttgaagctgtccc

SEQ ID NO: 196946 - DNA, 25 bp, Canis familiaris
tatggatcagcttctcctctgaagc

SEQ ID NO: 196947 - DNA, 25 bp, Canis familiaris
tagagatttacccctgaatgccaat

SEQ ID NO: 196948 - DNA, 25 bp, Canis familiaris
tagagaggttccctgtgcgatctaa

SEQ ID NO: 196949 - DNA, 25 bp, Canis familiaris
tagatgaggcctgccagttggctca

SEQ ID NO: 196950 - DNA, 25 bp, Canis familiaris
tagatagggtgctgagtgaggtctc

SEQ ID NO: 196951 - DNA, 25 bp, Canis familiaris
tagtcagggctcaaagctcggggct

SEQ ID NO: 196952 - DNA, 25 bp, Canis familiaris
taggaggagctgagacgggggggcc

SEQ ID NO: 196953 - DNA, 25 bp, Canis familiaris
taggaggagtcggaagcgcgggcga

SEQ ID NO: 196954 - DNA, 25 bp, Canis familiaris
tagaggaaggcgggtctcggagctg

SEQ ID NO: 196955 - DNA, 25 bp, Canis familiaris
tagggaaggggggcacagggtgact

SEQ ID NO: 196956 - DNA, 25 bp, Canis familiaris
tatgtaaaggggtccctcgggcagc

SEQ ID NO: 196957 - DNA, 25 bp, Canis familiaris
tatggagaagggaaccccgcggtag

SEQ ID NO: 196958 - DNA, 25 bp, Canis familiaris
taggagaaactttgccctgccttaa

SEQ ID NO: 196959 - DNA, 25 bp, Canis familiaris
tagggatgcatagatagtttgacat

SEQ ID NO: 196960 - DNA, 25 bp, Canis familiaris
tagggatgaatatagtgtgttactg

SEQ ID NO: 196961 - DNA, 25 bp, Canis familiaris
tagggggatagttctccctactgcc

SEQ ID NO: 196962 - DNA, 25 bp, Canis familiaris
taggagggatagggccccaggtgct

SEQ ID NO: 196963 - DNA, 25 bp, Canis familiaris
tagatgagggttgcacccgtgggct

SEQ ID NO: 196964 - DNA, 25 bp, Canis familiaris
tagtccaggtctaagcctcttgagg

SEQ ID NO: 196965 - DNA, 25 bp, Canis familiaris
tagtccagggctgtgcagccggggc

SEQ ID NO: 196966 - DNA, 25 bp, Canis familiaris
taggtcgtggctgtgtggggaatct

SEQ ID NO: 196967 - DNA, 25 bp, Canis familiaris
taggatgctggggttgggggtacac

SEQ ID NO: 196968 - DNA, 25 bp, Canis familiaris
tagggtcggcgttgaggactggtcc

SEQ ID NO: 196969 - DNA, 25 bp, Canis familiaris
tagggatcgggttgtgggtctgtta

SEQ ID NO: 196970 - DNA, 25 bp, Canis familiaris
taggaccgcggttctattttgttgg

SEQ ID NO: 196971 - DNA, 25 bp, Canis familiaris
taggaccgcggttctattttgttgg

SEQ ID NO: 196972 - DNA, 25 bp, Canis familiaris
taggaccgcggttctattttgttgg

SEQ ID NO: 196973 - DNA, 25 bp, Canis familiaris
taggaccgcggttctattttgttgg

SEQ ID NO: 196974 - DNA, 25 bp, Canis familiaris
taggaccgcggttctattttgttgt

SEQ ID NO: 196975 - DNA, 25 bp, Canis familiaris
tagttcgtgtgtttctttttgattt

SEQ ID NO: 196976 - DNA, 25 bp, Canis familiaris
tagtactgtatttggctttttcttt

SEQ ID NO: 196977 - DNA, 25 bp, Canis familiaris
tagtaggcatcaattggatcctttc

SEQ ID NO: 196978 - DNA, 25 bp, Canis familiaris
tagagggctcctgggagcactcact

SEQ ID NO: 196979 - DNA, 25 bp, Canis familiaris
tagatgggtagctgtgcagactgag

SEQ ID NO: 196980 - DNA, 25 bp, Canis familiaris
tagaggagtcagtcgtgcgcatctg

SEQ ID NO: 196981 - DNA, 25 bp, Canis familiaris
tagagtggatggtgcacctctgtgg

SEQ ID NO: 196982 - DNA, 25 bp, Canis familiaris
tagagggtgattccacctcgatggt

SEQ ID NO: 196983 - DNA, 25 bp, Canis familiaris
tagagtgggatgactccaccctcag

SEQ ID NO: 196984 - DNA, 25 bp, Canis familiaris
taggttgggtatacccactcgcgtg

SEQ ID NO: 196985 - DNA, 25 bp, Canis familiaris
taggtttcagtaagcccaacagcct

SEQ ID NO: 196986 - DNA, 25 bp, Canis familiaris
tagttggtcggcaaccagccaacct

SEQ ID NO: 196987 - DNA, 25 bp, Canis familiaris
taggggtcggcaccaggagaatcct

SEQ ID NO: 196988 - DNA, 25 bp, Canis familiaris
tagtgtggcttatggactgaggtcc

SEQ ID NO: 196989 - DNA, 25 bp, Canis familiaris
taggtggctgcttgcaaggctgttt

SEQ ID NO: 196990 - DNA, 25 bp, Canis familiaris
tagtgtggatattcttgagcgtctc

SEQ ID NO: 196991 - DNA, 25 bp, Canis familiaris
tagagtgtgctcagcttgactgcct

SEQ ID NO: 196992 - DNA, 25 bp, Canis familiaris
taggatgtgctcttctatcagctca

SEQ ID NO: 196993 - DNA, 25 bp, Canis familiaris
taggatatgcctcaacactgactgc

SEQ ID NO: 196994 - DNA, 25 bp, Canis familiaris
taggcaaactttccactttgctcca

SEQ ID NO: 196995 - DNA, 25 bp, Canis familiaris
tagtgtgaactcttactcttttctc

SEQ ID NO: 196996 - DNA, 25 bp, Canis familiaris
tagtgtagacttgtactttaccctt

SEQ ID NO: 196997 - DNA, 25 bp, Canis familiaris
tagtgatagcatctttaccttgtcc

SEQ ID NO: 196998 - DNA, 25 bp, Canis familiaris
taggaaggcgtttgtctctttccgg

SEQ ID NO: 196999 - DNA, 25 bp, Canis familiaris
tatggggaggttaatgactttgggg

SEQ ID NO: 197000 - DNA, 25 bp, Canis familiaris
taggggaggttttgatgggaggtgt

SEQ ID NO: 197001 - DNA, 25 bp, Canis familiaris
tagtgggctggactgtcttgggacg

SEQ ID NO: 197002 - DNA, 25 bp, Canis familiaris
tagtgacgctcggtcgtagtggacg

SEQ ID NO: 197003 - DNA, 25 bp, Canis familiaris
tagtatcgctctggtcggggaaggt

SEQ ID NO: 197004 - DNA, 25 bp, Canis familiaris
tttgacctccttctgggactggtca

SEQ ID NO: 197005 - DNA, 25 bp, Canis familiaris
tttacctcttcgctgtggtcaggta

SEQ ID NO: 197006 - DNA, 25 bp, Canis familiaris
ttggacctcagtggggtgggcttgc

SEQ ID NO: 197007 - DNA, 25 bp, Canis familiaris
taggacctatctttggaggccatta

SEQ ID NO: 197008 - DNA, 25 bp, Canis familiaris
taggacatatgactgccaaaggcca

SEQ ID NO: 197009 - DNA, 25 bp, Canis familiaris
taggcacttttggccagaagctcta

SEQ ID NO: 197010 - DNA, 25 bp, Canis familiaris
taggcctatttaggtgacactatag

SEQ ID NO: 197011 - DNA, 25 bp, Canis familiaris
taggcctatttaggtgacactatag

SEQ ID NO: 197012 - DNA, 25 bp, Canis familiaris
taggcctatttaggtgacactatag

SEQ ID NO: 197013 - DNA, 25 bp, Canis familiaris
taggcctatttaggtgacactatag

SEQ ID NO: 197014 - DNA, 25 bp, Canis familiaris
tagggcctaataagtgacactatag

SEQ ID NO: 197015 - DNA, 25 bp, Canis familiaris
tagtgtgcttcagaggtaacgactg

SEQ ID NO: 197016 - DNA, 25 bp, Canis familiaris
tagtattgtggctgttaagcacctg

SEQ ID NO: 197017 - DNA, 25 bp, Canis familiaris
tagttatgtcctgtaaagccctgtc

SEQ ID NO: 197018 - DNA, 25 bp, Canis familiaris
tagtgaagtcgtcatatgaacccag

SEQ ID NO: 197019 - DNA, 25 bp, Canis familiaris
tagtaaaaccgttgacactccgaca

SEQ ID NO: 197020 - DNA, 25 bp, Canis familiaris
tagataaggtcccaatgtcctccag

SEQ ID NO: 197021 - DNA, 25 bp, Canis familiaris
tagataatgtcccatgaagccctcg

SEQ ID NO: 197022 - DNA, 25 bp, Canis familiaris
tagatagagttctgccaccagctca

SEQ ID NO: 197023 - DNA, 25 bp, Canis familiaris
tagatagaagatgcccatgacccag

SEQ ID NO: 197024 - DNA, 25 bp, Canis familiaris
tagattggagcaagctgccatgccc

SEQ ID NO: 197025 - DNA, 25 bp, Canis familiaris
tagtttgagagcaatgccatcacct

SEQ ID NO: 197026 - DNA, 25 bp, Canis familiaris
tagattccagtcatctcatcatcca

SEQ ID NO: 197027 - DNA, 25 bp, Canis familiaris
tagttccactggttacatctcactt

SEQ ID NO: 197028 - DNA, 25 bp, Canis familiaris
tatcaatccctgcattgagctccat

SEQ ID NO: 197029 - DNA, 25 bp, Canis familiaris
tatcaactttcgatggtagtcgccg

SEQ ID NO: 197030 - DNA, 25 bp, Canis familiaris
taggcctttcaactgactagatcca

SEQ ID NO: 197031 - DNA, 25 bp, Canis familiaris
tagggattatacatgaagaagtttt

SEQ ID NO: 197032 - DNA, 25 bp, Canis familiaris
tagggccttgcagggaaatgttttt

SEQ ID NO: 197033 - DNA, 25 bp, Canis familiaris
taggcctctagttggttttttcatt

SEQ ID NO: 197034 - DNA, 25 bp, Canis familiaris
taggcgtttgttaggttgcgttatt

SEQ ID NO: 197035 - DNA, 25 bp, Canis familiaris
taggctttgttacactggcgtttgt

SEQ ID NO: 197036 - DNA, 25 bp, Canis familiaris
tagttttttaagtctctcgtagtgt

SEQ ID NO: 197037 - DNA, 25 bp, Canis familiaris
tagtattctttgtgaccctgtttct

SEQ ID NO: 197038 - DNA, 25 bp, Canis familiaris
tagtttcttttctgtcactgaaaat

SEQ ID NO: 197039 - DNA, 25 bp, Canis familiaris
tagttgtgaatgactccgtcctgct

SEQ ID NO: 197040 - DNA, 25 bp, Canis familiaris
tagtgggagtggaccagttcctggt

SEQ ID NO: 197041 - DNA, 25 bp, Canis familiaris
tagatggaaggaaaagttcccgccg

SEQ ID NO: 197042 - DNA, 25 bp, Canis familiaris
tagatgggagaacccagttgcccgc

SEQ ID NO: 197043 - DNA, 25 bp, Canis familiaris
tagatggtagatggccaactccccc

SEQ ID NO: 197044 - DNA, 25 bp, Canis familiaris
tagaggcgttcagtcataatcccac

SEQ ID NO: 197045 - DNA, 25 bp, Canis familiaris
taggctcttctaaaaatcccacttt

SEQ ID NO: 197046 - DNA, 25 bp, Canis familiaris
taggtgtctctaaataaactattaa

SEQ ID NO: 197047 - DNA, 25 bp, Canis familiaris
tagggagcctaccaaaagccagctt

SEQ ID NO: 197048 - DNA, 25 bp, Canis familiaris
taggcccctaaaagaagaagctctg

SEQ ID NO: 197049 - DNA, 25 bp, Canis familiaris
taggctaccaaccacacaaaatgtc

SEQ ID NO: 197050 - DNA, 25 bp, Canis familiaris
tagtctactaacagccaaaggccca

SEQ ID NO: 197051 - DNA, 25 bp, Canis familiaris
tatgtttctcaaagggaaaaccact

SEQ ID NO: 197052 - DNA, 25 bp, Canis familiaris
tattttctccgggtgacaaaaagat

SEQ ID NO: 197053 - DNA, 25 bp, Canis familiaris
tattttctgagccgggaaaggaaca

SEQ ID NO: 197054 - DNA, 25 bp, Canis familiaris
ttttctttgacgacggaaggaagag

SEQ ID NO: 197055 - DNA, 25 bp, Canis familiaris
ttttccagtgaaccggaccagaact

SEQ ID NO: 197056 - DNA, 25 bp, Canis familiaris
ttgcttccgggagttgaaccaggtt

SEQ ID NO: 197057 - DNA, 25 bp, Canis familiaris
ttcttacgttacatggaaaagtgta

SEQ ID NO: 197058 - DNA, 25 bp, Canis familiaris
ttttatagctgctcttggaaacggc

SEQ ID NO: 197059 - DNA, 25 bp, Canis familiaris
tagtctacctcagcttgtaaaccct

SEQ ID NO: 197060 - DNA, 25 bp, Canis familiaris
taggataactctacttgaaaactta

SEQ ID NO: 197061 - DNA, 25 bp, Canis familiaris
taggcggacttggggaaacctgaag

SEQ ID NO: 197062 - DNA, 25 bp, Canis familiaris
ttggtggcacctgaagtaaactaag

SEQ ID NO: 197063 - DNA, 25 bp, Canis familiaris
tatgggcacccccaactaatattca

SEQ ID NO: 197064 - DNA, 25 bp, Canis familiaris
tatggaaggccctgcattccatttc

SEQ ID NO: 197065 - DNA, 25 bp, Canis familiaris
taggccaggcccagatagccaaacg

SEQ ID NO: 197066 - DNA, 25 bp, Canis familiaris
taggaagcctccagaacctgaacgg

SEQ ID NO: 197067 - DNA, 25 bp, Canis familiaris
tatggaatccctatccacctaatct

SEQ ID NO: 197068 - DNA, 25 bp, Canis familiaris
taggaatactcagtttccctatttc

SEQ ID NO: 197069 - DNA, 25 bp, Canis familiaris
tagtattactctgatccccatttta

SEQ ID NO: 197070 - DNA, 25 bp, Canis familiaris
tagtgtgtccttgttacaactccca

SEQ ID NO: 197071 - DNA, 25 bp, Canis familiaris
tagtgcaatcccttttaaaatacca

SEQ ID NO: 197072 - DNA, 25 bp, Canis familiaris
tagggtgccgatttccaaggaacct

SEQ ID NO: 197073 - DNA, 25 bp, Canis familiaris
taggagagacgtaacccagctggac

SEQ ID NO: 197074 - DNA, 25 bp, Canis familiaris
tagggcatgatcctgacacccaagg

SEQ ID NO: 197075 - DNA, 25 bp, Canis familiaris
tagatggccatctataagccaagaa

SEQ ID NO: 197076 - DNA, 25 bp, Canis familiaris
tagatgagccacttcatatgaccac

SEQ ID NO: 197077 - DNA, 25 bp, Canis familiaris
tagtgacccatatatgactgacttg

SEQ ID NO: 197078 - DNA, 25 bp, Canis familiaris
tagtcacacaattaaatcatgtctt

SEQ ID NO: 197079 - DNA, 25 bp, Canis familiaris
tagtaaatactgccaactccttctc

SEQ ID NO: 197080 - DNA, 25 bp, Canis familiaris
tagtataatatccctagcccaacac

SEQ ID NO: 197081 - DNA, 25 bp, Canis familiaris
tagtctagactagcactgcccaaca

SEQ ID NO: 197082 - DNA, 25 bp, Canis familiaris
tagttcatgtttttccatccaaatt

SEQ ID NO: 197083 - DNA, 25 bp, Canis familiaris
tagttcatgtttttcaatcaaaatt

SEQ ID NO: 197084 - DNA, 25 bp, Canis familiaris
tagttcgttctcggcatcaaacatg

SEQ ID NO: 197085 - DNA, 25 bp, Canis familiaris
tagtaggttatcgctcacatatctt

SEQ ID NO: 197086 - DNA, 25 bp, Canis familiaris
taggaagttaccccaacacttctgc

SEQ ID NO: 197087 - DNA, 25 bp, Canis familiaris
taggaagaacacgctcaccgttagc

SEQ ID NO: 197088 - DNA, 25 bp, Canis familiaris
tagggagaccactttaccacagtca

SEQ ID NO: 197089 - DNA, 25 bp, Canis familiaris
taggtggcaaccagctaccacctca

SEQ ID NO: 197090 - DNA, 25 bp, Canis familiaris
taggtaaagccaagaagcccgcaca

SEQ ID NO: 197091 - DNA, 25 bp, Canis familiaris
tatgttaatagcgcaacccacgcca

SEQ ID NO: 197092 - DNA, 25 bp, Canis familiaris
tagatcgtggacgcatatcccaccc

SEQ ID NO: 197093 - DNA, 25 bp, Canis familiaris
tttgagtggacagcttccgactcct

SEQ ID NO: 197094 - DNA, 25 bp, Canis familiaris
tttcttggaaacttccgagaccaga

SEQ ID NO: 197095 - DNA, 25 bp, Canis familiaris
tttcgggaagaccttcttacgctca

SEQ ID NO: 197096 - DNA, 25 bp, Canis familiaris
ttgtcgggaagttgtttcggcctgc

SEQ ID NO: 197097 - DNA, 25 bp, Canis familiaris
tatgtatgggttctgttgtcccctc

SEQ ID NO: 197098 - DNA, 25 bp, Canis familiaris
tagtcatagcgtttgtttgttcccc

SEQ ID NO: 197099 - DNA, 25 bp, Canis familiaris
tagtctggaggcttgtttggggccc

SEQ ID NO: 197100 - DNA, 25 bp, Canis familiaris
tagtggggctgctagtggggggcct

SEQ ID NO: 197101 - DNA, 25 bp, Canis familiaris
tagtggcccacctgaggagggctct

SEQ ID NO: 197102 - DNA, 25 bp, Canis familiaris
tagatcgctcccaggagagaggcac

SEQ ID NO: 197103 - DNA, 25 bp, Canis familiaris
tagtccctgctgggctgagaaggca

SEQ ID NO: 197104 - DNA, 25 bp, Canis familiaris
taggcctgggcatcgatgaagatga

SEQ ID NO: 197105 - DNA, 25 bp, Canis familiaris
taggctgggctttggatgagtgaaa

SEQ ID NO: 197106 - DNA, 25 bp, Canis familiaris
taggcattcctgagaaattgaaagt

SEQ ID NO: 197107 - DNA, 25 bp, Canis familiaris
taggctgtcctagtaagttgcacta

SEQ ID NO: 197108 - DNA, 25 bp, Canis familiaris
tagtgatgtcctcatctacctggta

SEQ ID NO: 197109 - DNA, 25 bp, Canis familiaris
taggatgccctgggttcttggtatt

SEQ ID NO: 197110 - DNA, 25 bp, Canis familiaris
tagggcctcaagggcttgggtttat

SEQ ID NO: 197111 - DNA, 25 bp, Canis familiaris
tagtcttcttcagggcttgggttaa

SEQ ID NO: 197112 - DNA, 25 bp, Canis familiaris
tagttcttccagggcagtggtgttg

SEQ ID NO: 197113 - DNA, 25 bp, Canis familiaris
tattatttccgcagacgagggtcaa

SEQ ID NO: 197114 - DNA, 25 bp, Canis familiaris
tatacattcgggcagcggggtgtca

SEQ ID NO: 197115 - DNA, 25 bp, Canis familiaris
tatacttgccgaaagatggagggaa

SEQ ID NO: 197116 - DNA, 25 bp, Canis familiaris
tagtgctttggaagaaggagtgaaa

SEQ ID NO: 197117 - DNA, 25 bp, Canis familiaris
taggctttagaggaccgcaggtaac

SEQ ID NO: 197118 - DNA, 25 bp, Canis familiaris
tatggtatttggaagtagggtaaga

SEQ ID NO: 197119 - DNA, 25 bp, Canis familiaris
tatggcctttgtgagcggtaccaag

SEQ ID NO: 197120 - DNA, 25 bp, Canis familiaris
tatccgaaaggttcatgttaccaag

SEQ ID NO: 197121 - DNA, 25 bp, Canis familiaris
tatcagccaagggttgatgcatcta

SEQ ID NO: 197122 - DNA, 25 bp, Canis familiaris
tatcagcgaagtcatggttggcata

SEQ ID NO: 197123 - DNA, 25 bp, Canis familiaris
tatgcctataactgtttggtcttga

SEQ ID NO: 197124 - DNA, 25 bp, Canis familiaris
tagttatactcatgttcttgccttg

SEQ ID NO: 197125 - DNA, 25 bp, Canis familiaris
tagttcattagatcactcactcctt

SEQ ID NO: 197126 - DNA, 25 bp, Canis familiaris
tagtatttgggccaatccgccattt

SEQ ID NO: 197127 - DNA, 25 bp, Canis familiaris
tagtctttactatttcacccatttg

SEQ ID NO: 197128 - DNA, 25 bp, Canis familiaris
tagattttcccatttctacttttct

SEQ ID NO: 197129 - DNA, 25 bp, Canis familiaris
tagattccaccttcaacattttttt

SEQ ID NO: 197130 - DNA, 25 bp, Canis familiaris
tagtttcctctctaaatttttccat

SEQ ID NO: 197131 - DNA, 25 bp, Canis familiaris
tagttttcctttccatttgaaccat

SEQ ID NO: 197132 - DNA, 25 bp, Canis familiaris
tagttttcgcttttgcttttgtctt

SEQ ID NO: 197133 - DNA, 25 bp, Canis familiaris
tagttttctctattcgtttcatttt

SEQ ID NO: 197134 - DNA, 25 bp, Canis familiaris
tagtttctctttacgtaggttcttg

SEQ ID NO: 197135 - DNA, 25 bp, Canis familiaris
tagttttcttttaagatcagttact

SEQ ID NO: 197136 - DNA, 25 bp, Canis familiaris
taggatttttttaatgcaagtaaca

SEQ ID NO: 197137 - DNA, 25 bp, Canis familiaris
tagtatctcttcttatctctaaata

SEQ ID NO: 197138 - DNA, 25 bp, Canis familiaris
tagttctcttttatcgtatcagtaa

SEQ ID NO: 197139 - DNA, 25 bp, Canis familiaris
tagtgccttgtttttatgtacagtt

SEQ ID NO: 197140 - DNA, 25 bp, Canis familiaris
tagtcagcttctctatcacactaca

SEQ ID NO: 197141 - DNA, 25 bp, Canis familiaris
tagtatcttcttcagcacatgctca

SEQ ID NO: 197142 - DNA, 25 bp, Canis familiaris
tagatactggctaccacatcgcaaa

SEQ ID NO: 197143 - DNA, 25 bp, Canis familiaris
tagtcatgccaggccaactacaaag

SEQ ID NO: 197144 - DNA, 25 bp, Canis familiaris
tagtctgcctctgccagtagataaa

SEQ ID NO: 197145 - DNA, 25 bp, Canis familiaris
tagtcccatcgcatggtggatgaag

SEQ ID NO: 197146 - DNA, 25 bp, Canis familiaris
tagattccagcggggtggacacgca

SEQ ID NO: 197147 - DNA, 25 bp, Canis familiaris
tagtgcttcagccctggggaacacc

SEQ ID NO: 197148 - DNA, 25 bp, Canis familiaris
tagatttgctggcctgtcgcagaac

SEQ ID NO: 197149 - DNA, 25 bp, Canis familiaris
tagatttatggccatgccccaggcc

SEQ ID NO: 197150 - DNA, 25 bp, Canis familiaris
tagttagtgtgccagcgacacggcc

SEQ ID NO: 197151 - DNA, 25 bp, Canis familiaris
tagttggtgatgattgccctggcag

SEQ ID NO: 197152 - DNA, 25 bp, Canis familiaris
tagttgctgtgtctgctcaggcatt

SEQ ID NO: 197153 - DNA, 25 bp, Canis familiaris
tagttgttgttaccagatgctgcga

SEQ ID NO: 197154 - DNA, 25 bp, Canis familiaris
tatgggttcctctcagagcgagcag

SEQ ID NO: 197155 - DNA, 25 bp, Canis familiaris
tatacagttacctcacacggaacag

SEQ ID NO: 197156 - DNA, 25 bp, Canis familiaris
tatacctggccgagccactggatta

SEQ ID NO: 197157 - DNA, 25 bp, Canis familiaris
ttacttagccactagaaaggatgaa

SEQ ID NO: 197158 - DNA, 25 bp, Canis familiaris
tatacgaacgactgaagaattgaca

SEQ ID NO: 197159 - DNA, 25 bp, Canis familiaris
tatacgtttggctgaactatgtcaa

SEQ ID NO: 197160 - DNA, 25 bp, Canis familiaris
tatcctctttggccagaattttcag

SEQ ID NO: 197161 - DNA, 25 bp, Canis familiaris
tatcgtcgtgtgtggattcatcctc

SEQ ID NO: 197162 - DNA, 25 bp, Canis familiaris
ttcaggattgaaaggacttccaggg

SEQ ID NO: 197163 - DNA, 25 bp, Canis familiaris
ttaagctgtaacaggtggccagtcc

SEQ ID NO: 197164 - DNA, 25 bp, Canis familiaris
ttaatggaagaacctgtggccagaa

SEQ ID NO: 197165 - DNA, 25 bp, Canis familiaris
tatgtagggcagcggtgggcctcta

SEQ ID NO: 197166 - DNA, 25 bp, Canis familiaris
taggagaggcccagtgctggcctcc

SEQ ID NO: 197167 - DNA, 25 bp, Canis familiaris
taggaaatggacactgtgccccacc

SEQ ID NO: 197168 - DNA, 25 bp, Canis familiaris
taggaaaggaccactgctctagacc

SEQ ID NO: 197169 - DNA, 25 bp, Canis familiaris
tataaccagtacgtacgcttcgaca

SEQ ID NO: 197170 - DNA, 25 bp, Canis familiaris
tatgaccagggagggacgcgtccca

SEQ ID NO: 197171 - DNA, 25 bp, Canis familiaris
taggctaatggagggaggtgtccca

SEQ ID NO: 197172 - DNA, 25 bp, Canis familiaris
tagggaaggtgctgccttccccagt

SEQ ID NO: 197173 - DNA, 25 bp, Canis familiaris
tagtggacgggctgtgtcactccac

SEQ ID NO: 197174 - DNA, 25 bp, Canis familiaris
tagttacgtctcttgttctgtcata

SEQ ID NO: 197175 - DNA, 25 bp, Canis familiaris
tagtcttggtcctgatctttctttt

SEQ ID NO: 197176 - DNA, 25 bp, Canis familiaris
tagttatagtccaggcttctatttc

SEQ ID NO: 197177 - DNA, 25 bp, Canis familiaris
tagttatttccttagtcctacttca

SEQ ID NO: 197178 - DNA, 25 bp, Canis familiaris
tagtcatttcttcctaacctactta

SEQ ID NO: 197179 - DNA, 25 bp, Canis familiaris
taggctgttcttctaaccaaactaa

SEQ ID NO: 197180 - DNA, 25 bp, Canis familiaris
taggagattcttctcgaccatacgc

SEQ ID NO: 197181 - DNA, 25 bp, Canis familiaris
tagggattatctcttgactaccccg

SEQ ID NO: 197182 - DNA, 25 bp, Canis familiaris
taggggtgaaccttccacaccccag

SEQ ID NO: 197183 - DNA, 25 bp, Canis familiaris
taggctgttgaacattccacattca

SEQ ID NO: 197184 - DNA, 25 bp, Canis familiaris
taggtgtttactttccacagctaga

SEQ ID NO: 197185 - DNA, 25 bp, Canis familiaris
tagtgtgtttcacgcatatccacgc

SEQ ID NO: 197186 - DNA, 25 bp, Canis familiaris
taggctgttgtctgttcacattcac

SEQ ID NO: 197187 - DNA, 25 bp, Canis familiaris
tagtgctgggtctgattaatccgga

SEQ ID NO: 197188 - DNA, 25 bp, Canis familiaris
tagtgtggtgtggtgtgtagatgac

SEQ ID NO: 197189 - DNA, 25 bp, Canis familiaris
taggcagctgtggggtgctagtcct

SEQ ID NO: 197190 - DNA, 25 bp, Canis familiaris
taggcactagctggtatctgggcac

SEQ ID NO: 197191 - DNA, 25 bp, Canis familiaris
tagtgactaccatactggccagcac

SEQ ID NO: 197192 - DNA, 25 bp, Canis familiaris
tagtgataatcctcatttctcatga

SEQ ID NO: 197193 - DNA, 25 bp, Canis familiaris
tagtttcatccacatctttgcaaat

SEQ ID NO: 197194 - DNA, 25 bp, Canis familiaris
tagtctttcagactgtctttggaat

SEQ ID NO: 197195 - DNA, 25 bp, Canis familiaris
tagtgctttcatagctgtttcctag

SEQ ID NO: 197196 - DNA, 25 bp, Canis familiaris
tagtcttaaactctgatcacatcac

SEQ ID NO: 197197 - DNA, 25 bp, Canis familiaris
tagtctccaaatattgctccactgc

SEQ ID NO: 197198 - DNA, 25 bp, Canis familiaris
tagtgtctacgaaatcgtacaccgt

SEQ ID NO: 197199 - DNA, 25 bp, Canis familiaris
tatgtttaggaaatggcaccactgg

SEQ ID NO: 197200 - DNA, 25 bp, Canis familiaris
tagttgatgggttttgctcccttcc

SEQ ID NO: 197201 - DNA, 25 bp, Canis familiaris
tagtattgaagttctatgtcccccc

SEQ ID NO: 197202 - DNA, 25 bp, Canis familiaris
tatgttttagttaagccacgctccc

SEQ ID NO: 197203 - DNA, 25 bp, Canis familiaris
tattttgcctttaagtacactcgta

SEQ ID NO: 197204 - DNA, 25 bp, Canis familiaris
tagttaactgtacaggacactttca

SEQ ID NO: 197205 - DNA, 25 bp, Canis familiaris
tagggaactgaagcgggcaccatcc

SEQ ID NO: 197206 - DNA, 25 bp, Canis familiaris
tatgtggagggaaggggccccagcc

SEQ ID NO: 197207 - DNA, 25 bp, Canis familiaris
tatgtggatggggggctccaaccag

SEQ ID NO: 197208 - DNA, 25 bp, Canis familiaris
tagggaggcttgcagcctagtcctg

SEQ ID NO: 197209 - DNA, 25 bp, Canis familiaris
taggtaggtctgcagcaaagccccc

SEQ ID NO: 197210 - DNA, 25 bp, Canis familiaris
tatgttcagtgttggggtaccccct

SEQ ID NO: 197211 - DNA, 25 bp, Canis familiaris
tagtccaggttgtttgcaacccctt

SEQ ID NO: 197212 - DNA, 25 bp, Canis familiaris
tagtacagcttggtttgacccactc

SEQ ID NO: 197213 - DNA, 25 bp, Canis familiaris
tagtacacctgagtaatacccccac

SEQ ID NO: 197214 - DNA, 25 bp, Canis familiaris
tagtgaacctgaaaattctgtatca

SEQ ID NO: 197215 - DNA, 25 bp, Canis familiaris
tagtagacccaccaggtcctatcac

SEQ ID NO: 197216 - DNA, 25 bp, Canis familiaris
taggaaccagaccagctattctacc

SEQ ID NO: 197217 - DNA, 25 bp, Canis familiaris
tatggggggagccggtttgagtcca

SEQ ID NO: 197218 - DNA, 25 bp, Canis familiaris
tatggggagggggtgctgttcttcc

SEQ ID NO: 197219 - DNA, 25 bp, Canis familiaris
tatgaacgcaggcggtctggggtcg

SEQ ID NO: 197220 - DNA, 25 bp, Canis familiaris
tatgaacgagcctccttgagtccaa

SEQ ID NO: 197221 - DNA, 25 bp, Canis familiaris
tagtagcagaggtgccctggctgcc

SEQ ID NO: 197222 - DNA, 25 bp, Canis familiaris
tagtacatgagtttcctcctggctt

SEQ ID NO: 197223 - DNA, 25 bp, Canis familiaris
tagtaagcatgcacccacttggtca

SEQ ID NO: 197224 - DNA, 25 bp, Canis familiaris
tagtcaagtccctcttgtggcataa

SEQ ID NO: 197225 - DNA, 25 bp, Canis familiaris
tatggggtcttcttttgggtactga

SEQ ID NO: 197226 - DNA, 25 bp, Canis familiaris
taggggacatgtcttaggctctgcc

SEQ ID NO: 197227 - DNA, 25 bp, Canis familiaris
taggagcgaatcccttgggcaatcc

SEQ ID NO: 197228 - DNA, 25 bp, Canis familiaris
tagtgagcagaccccaagtgaaacc

SEQ ID NO: 197229 - DNA, 25 bp, Canis familiaris
ttatgggaaccctggcaaactgcaa

SEQ ID NO: 197230 - DNA, 25 bp, Canis familiaris
tttggagagcaagcccaaacacgta

SEQ ID NO: 197231 - DNA, 25 bp, Canis familiaris
tagggaagaaggcctccaaagcgag

SEQ ID NO: 197232 - DNA, 25 bp, Canis familiaris
tagggaagcacatggcaccatccac

SEQ ID NO: 197233 - DNA, 25 bp, Canis familiaris
tagggaacaccagtgacgggcagcg

SEQ ID NO: 197234 - DNA, 25 bp, Canis familiaris
tagggactcctggcattcgggagcc

SEQ ID NO: 197235 - DNA, 25 bp, Canis familiaris
tagggaccctggacggagtcccagg

SEQ ID NO: 197236 - DNA, 25 bp, Canis familiaris
tatgggcatgccagagggggtcccg

SEQ ID NO: 197237 - DNA, 25 bp, Canis familiaris
tagggacgtcgacaaggaccacgat

SEQ ID NO: 197238 - DNA, 25 bp, Canis familiaris
taggaacaccaaaaagcgatgctct

SEQ ID NO: 197239 - DNA, 25 bp, Canis familiaris
tagtcaactctgcaaagacgttcgc

SEQ ID NO: 197240 - DNA, 25 bp, Canis familiaris
tagtatacactgcaaaacaccctct

SEQ ID NO: 197241 - DNA, 25 bp, Canis familiaris
tagtaaagtcatcaagccagccctc

SEQ ID NO: 197242 - DNA, 25 bp, Canis familiaris
tagtataacactcaggccacactca

SEQ ID NO: 197243 - DNA, 25 bp, Canis familiaris
tagtgcatagtcatctgggtcaccc

SEQ ID NO: 197244 - DNA, 25 bp, Canis familiaris
taggtactcatgttgagaggccccc

SEQ ID NO: 197245 - DNA, 25 bp, Canis familiaris
tatgagcatcaccgtgtccatggca

SEQ ID NO: 197246 - DNA, 25 bp, Canis familiaris
tagtcatcgctattaccatggtgat

SEQ ID NO: 197247 - DNA, 25 bp, Canis familiaris
tagtcatcgctattaccatggtgat

SEQ ID NO: 197248 - DNA, 25 bp, Canis familiaris
tagtcatcgctattaccatggtgat

SEQ ID NO: 197249 - DNA, 25 bp, Canis familiaris
tagtctctctcgtaatatagtgtat

SEQ ID NO: 197250 - DNA, 25 bp, Canis familiaris
tagtcacctatgtaatgccctgtaa

SEQ ID NO: 197251 - DNA, 25 bp, Canis familiaris
tagtctcttatttcgtcctgtaaat

SEQ ID NO: 197252 - DNA, 25 bp, Canis familiaris
tagttctttttttctgctttaatct

SEQ ID NO: 197253 - DNA, 25 bp, Canis familiaris
tagtacattcctaattccttaaact

SEQ ID NO: 197254 - DNA, 25 bp, Canis familiaris
tagtattgtacaacttctttacaca

SEQ ID NO: 197255 - DNA, 25 bp, Canis familiaris
tagtttgtgacacgtatgcttccca

SEQ ID NO: 197256 - DNA, 25 bp, Canis familiaris
tagtcttgaagccctcatttagaca

SEQ ID NO: 197257 - DNA, 25 bp, Canis familiaris
tagtctcgtgggacacgggagacac

SEQ ID NO: 197258 - DNA, 25 bp, Canis familiaris
tatcccgtgggtcctgtgaaattgc

SEQ ID NO: 197259 - DNA, 25 bp, Canis familiaris
tatcctcgtgggccttgaacgtgta

SEQ ID NO: 197260 - DNA, 25 bp, Canis familiaris
tatcctaggaggccttactccgtac

SEQ ID NO: 197261 - DNA, 25 bp, Canis familiaris
tatctccggagatccgaccgggacc

SEQ ID NO: 197262 - DNA, 25 bp, Canis familiaris
tatcaacgtgtgggcagccccggtg

SEQ ID NO: 197263 - DNA, 25 bp, Canis familiaris
tatcaaatggtgtggagcccaaagg

SEQ ID NO: 197264 - DNA, 25 bp, Canis familiaris
ttcaggacattgtgtaccccgagga

SEQ ID NO: 197265 - DNA, 25 bp, Canis familiaris
tatcagcgaccgagacccggtggga

SEQ ID NO: 197266 - DNA, 25 bp, Canis familiaris
ttgcctaccaggaagcccaggagtt

SEQ ID NO: 197267 - DNA, 25 bp, Canis familiaris
ttctgtaccagaaggcccggacaaa

SEQ ID NO: 197268 - DNA, 25 bp, Canis familiaris
tatctttgccagttggagtgctgga

SEQ ID NO: 197269 - DNA, 25 bp, Canis familiaris
tagtcatgctgatattgggtctgga

SEQ ID NO: 197270 - DNA, 25 bp, Canis familiaris
tagtccgagggttggtcttgaagga

SEQ ID NO: 197271 - DNA, 25 bp, Canis familiaris
tagtctcgacgtctgctgttatgaa

SEQ ID NO: 197272 - DNA, 25 bp, Canis familiaris
tagtctccagagttgtctttatatg

SEQ ID NO: 197273 - DNA, 25 bp, Canis familiaris
tagtctgtgcgtttccgtttatgaa

SEQ ID NO: 197274 - DNA, 25 bp, Canis familiaris
tatggattcgtgttccgtagtaaat

SEQ ID NO: 197275 - DNA, 25 bp, Canis familiaris
taggattctttctcagctactgaac

SEQ ID NO: 197276 - DNA, 25 bp, Canis familiaris
tagtcattcttcagtacttctaccc

SEQ ID NO: 197277 - DNA, 25 bp, Canis familiaris
tagtgcttctgatcgtactccaaaa

SEQ ID NO: 197278 - DNA, 25 bp, Canis familiaris
tatggatacccactggactccaaaa

SEQ ID NO: 197279 - DNA, 25 bp, Canis familiaris
tatgtaacccataaagctccctagt

SEQ ID NO: 197280 - DNA, 25 bp, Canis familiaris
tagtgaaccggtcagatcgcctgga

SEQ ID NO: 197281 - DNA, 25 bp, Canis familiaris
taggtacacggcttagatcctcctg

SEQ ID NO: 197282 - DNA, 25 bp, Canis familiaris
taggtcccagaaaattcctgcctgc

SEQ ID NO: 197283 - DNA, 25 bp, Canis familiaris
tagtgacctagatgactttctcctc

SEQ ID NO: 197284 - DNA, 25 bp, Canis familiaris
tatcatacctttgggtctcttcacc

SEQ ID NO: 197285 - DNA, 25 bp, Canis familiaris
tatatcgatctcttcggacggacct

SEQ ID NO: 197286 - DNA, 25 bp, Canis familiaris
tatgagatcctctcacgggagacct

SEQ ID NO: 197287 - DNA, 25 bp, Canis familiaris
tatgttttcccacgaggagaacggc

SEQ ID NO: 197288 - DNA, 25 bp, Canis familiaris
taggtgtgacccatgagaagcaacg

SEQ ID NO: 197289 - DNA, 25 bp, Canis familiaris
tagggggagcacttagcagagccac

SEQ ID NO: 197290 - DNA, 25 bp, Canis familiaris
tagggagctgaggcctttagccacc

SEQ ID NO: 197291 - DNA, 25 bp, Canis familiaris
tagggagccgcaccttgtcatgtac

SEQ ID NO: 197292 - DNA, 25 bp, Canis familiaris
tagggagccgcaccttgtcatgtac

SEQ ID NO: 197293 - DNA, 25 bp, Canis familiaris
tagtctgacctacttttctgtaaga

SEQ ID NO: 197294 - DNA, 25 bp, Canis familiaris
tagtggaacttattgttattacaag

SEQ ID NO: 197295 - DNA, 25 bp, Canis familiaris
tagtgtaactatttttgtcaccata

SEQ ID NO: 197296 - DNA, 25 bp, Canis familiaris
taggagaaatagttttgcctgccat

SEQ ID NO: 197297 - DNA, 25 bp, Canis familiaris
tagggcaaagaggtctctcctcctt

SEQ ID NO: 197298 - DNA, 25 bp, Canis familiaris
tagggagcatcacgtgtcctactcc

SEQ ID NO: 197299 - DNA, 25 bp, Canis familiaris
tagggcactgagactctccatgagg

SEQ ID NO: 197300 - DNA, 25 bp, Canis familiaris
tagtgctatgggtatctctcagatg

SEQ ID NO: 197301 - DNA, 25 bp, Canis familiaris
tagtgcgacgtcttctcttgatgac

SEQ ID NO: 197302 - DNA, 25 bp, Canis familiaris
tagtagactgtagtgtgcttcagag

SEQ ID NO: 197303 - DNA, 25 bp, Canis familiaris
tagtctacttatgtgcatgctagca

SEQ ID NO: 197304 - DNA, 25 bp, Canis familiaris
tagtgatcactttcttgcactgtga

SEQ ID NO: 197305 - DNA, 25 bp, Canis familiaris
tagtgacaagctctgctgaccatgc

SEQ ID NO: 197306 - DNA, 25 bp, Canis familiaris
tagtagaagctgttgtctcacacaa

SEQ ID NO: 197307 - DNA, 25 bp, Canis familiaris
tatgatgagccacaagttcataaga

SEQ ID NO: 197308 - DNA, 25 bp, Canis familiaris
tagtcatccatgtaagcatagcata

SEQ ID NO: 197309 - DNA, 25 bp, Canis familiaris
tagtctctagtatatagacatcgta

SEQ ID NO: 197310 - DNA, 25 bp, Canis familiaris
tagtgccagttctgagaaacagtca

SEQ ID NO: 197311 - DNA, 25 bp, Canis familiaris
tagtccattaggcaagatggggcaa

SEQ ID NO: 197312 - DNA, 25 bp, Canis familiaris
tagggtctaggggcagtggctggca

SEQ ID NO: 197313 - DNA, 25 bp, Canis familiaris
tagtggatcagcctgggagggggcc

SEQ ID NO: 197314 - DNA, 25 bp, Canis familiaris
taggcactcagtcacagaaggggtt

SEQ ID NO: 197315 - DNA, 25 bp, Canis familiaris
taggatcaagtctcacgttgggctt

SEQ ID NO: 197316 - DNA, 25 bp, Canis familiaris
tagtgtgccaggtatcatcctcacc

SEQ ID NO: 197317 - DNA, 25 bp, Canis familiaris
taggggagcagaaagcagcgccccc

SEQ ID NO: 197318 - DNA, 25 bp, Canis familiaris
tagggagaacagagaccaccgcctg

SEQ ID NO: 197319 - DNA, 25 bp, Canis familiaris
tagggcagagaacaggccacctctt

SEQ ID NO: 197320 - DNA, 25 bp, Canis familiaris
tagggccagacagaatgccatcctg

SEQ ID NO: 197321 - DNA, 25 bp, Canis familiaris
taggtccacaccaaatggtcctgcc

SEQ ID NO: 197322 - DNA, 25 bp, Canis familiaris
tagggcaacccactgaggtcgtgaa

SEQ ID NO: 197323 - DNA, 25 bp, Canis familiaris
tagggaagtctcttgagctgtcttt

SEQ ID NO: 197324 - DNA, 25 bp, Canis familiaris
tagggcaacctgtcaggcattcctc

SEQ ID NO: 197325 - DNA, 25 bp, Canis familiaris
taggctaccgcttgcaagctgtacc

SEQ ID NO: 197326 - DNA, 25 bp, Canis familiaris
tagtggcaccacaagccaagtcacc

SEQ ID NO: 197327 - DNA, 25 bp, Canis familiaris
tagtggtctcacactcagaggctca

SEQ ID NO: 197328 - DNA, 25 bp, Canis familiaris
taggtcactgccaagcatcagggcc

SEQ ID NO: 197329 - DNA, 25 bp, Canis familiaris
taggatgagttccacatcaggctcc

SEQ ID NO: 197330 - DNA, 25 bp, Canis familiaris
taggtggtgtcatcttggtcagcaa

SEQ ID NO: 197331 - DNA, 25 bp, Canis familiaris
tagtctgggccattcattgcgatac

SEQ ID NO: 197332 - DNA, 25 bp, Canis familiaris
tagtctctaccattctcatatgaag

SEQ ID NO: 197333 - DNA, 25 bp, Canis familiaris
tatggagtgatcccctcattacagg

SEQ ID NO: 197334 - DNA, 25 bp, Canis familiaris
taggtgtgctcaggtccaaacagtg

SEQ ID NO: 197335 - DNA, 25 bp, Canis familiaris
taggggccatagaccatacatacga

SEQ ID NO: 197336 - DNA, 25 bp, Canis familiaris
taggcgaccagtaccagacagtgaa

SEQ ID NO: 197337 - DNA, 25 bp, Canis familiaris
taggagggcggaccagacaggcgct

SEQ ID NO: 197338 - DNA, 25 bp, Canis familiaris
taggaggacgatagggacatggtgc

SEQ ID NO: 197339 - DNA, 25 bp, Canis familiaris
tatgtcggaagtagaggatcgggct

SEQ ID NO: 197340 - DNA, 25 bp, Canis familiaris
tatgaggcgaactatgggaggggaa

SEQ ID NO: 197341 - DNA, 25 bp, Canis familiaris
tatccagctggaggaggagaggcgg

SEQ ID NO: 197342 - DNA, 25 bp, Canis familiaris
tatccagtggtcctggtgatggccc

SEQ ID NO: 197343 - DNA, 25 bp, Canis familiaris
tattcaggtacgtcttctggtgccg

SEQ ID NO: 197344 - DNA, 25 bp, Canis familiaris
tagtcagtttcactcattctgtctc

SEQ ID NO: 197345 - DNA, 25 bp, Canis familiaris
tagtgtttaaccttctgttccactt

SEQ ID NO: 197346 - DNA, 25 bp, Canis familiaris
tagtcctggaatccattctgttcca

SEQ ID NO: 197347 - DNA, 25 bp, Canis familiaris
tagtcaatgtttccttgtgttccaa

SEQ ID NO: 197348 - DNA, 25 bp, Canis familiaris
tagtcagtggctactgcctgtgtgt

SEQ ID NO: 197349 - DNA, 25 bp, Canis familiaris
tagtcgagcgtgacgcgctgtctag

SEQ ID NO: 197350 - DNA, 25 bp, Canis familiaris
tagtctgatggggcacaggctctct

SEQ ID NO: 197351 - DNA, 25 bp, Canis familiaris
tagtctgattgggtaatgctgctcc

SEQ ID NO: 197352 - DNA, 25 bp, Canis familiaris
tagtcatgaaggatcacagccccac

SEQ ID NO: 197353 - DNA, 25 bp, Canis familiaris
tagtcgaagaattccgtccgctgac

SEQ ID NO: 197354 - DNA, 25 bp, Canis familiaris
tagtccaaaacctttgggatgcagc

SEQ ID NO: 197355 - DNA, 25 bp, Canis familiaris
taggctagaataccacttgcagtgt

SEQ ID NO: 197356 - DNA, 25 bp, Canis familiaris
tatggctgggattgccctagctggg

SEQ ID NO: 197357 - DNA, 25 bp, Canis familiaris
tatggctgtggaaacgcaaatggac

SEQ ID NO: 197358 - DNA, 25 bp, Canis familiaris
tatggcaggcgcaaactcgattttc

SEQ ID NO: 197359 - DNA, 25 bp, Canis familiaris
taggcgggcaaacagatctcttaga

SEQ ID NO: 197360 - DNA, 25 bp, Canis familiaris
taggtggcaaaccgagaccttaccg

SEQ ID NO: 197361 - DNA, 25 bp, Canis familiaris
tatcgtccaaactgaaactgtactc

SEQ ID NO: 197362 - DNA, 25 bp, Canis familiaris
tatttccagaacggagtcctactct

SEQ ID NO: 197363 - DNA, 25 bp, Canis familiaris
tagtggccaaacgggttcggctctt

SEQ ID NO: 197364 - DNA, 25 bp, Canis familiaris
tatgagcctcaaaccggggaagcct

SEQ ID NO: 197365 - DNA, 25 bp, Canis familiaris
tatgtaccactgccctggaggaggc

SEQ ID NO: 197366 - DNA, 25 bp, Canis familiaris
tatccagccaccggaggagggagcc

SEQ ID NO: 197367 - DNA, 25 bp, Canis familiaris
tatcccgccgccaagagggcgaggt

SEQ ID NO: 197368 - DNA, 25 bp, Canis familiaris
tatgcctcgggtaaactccgggtat

SEQ ID NO: 197369 - DNA, 25 bp, Canis familiaris
taggcgtagtattaacccgaggcgt

SEQ ID NO: 197370 - DNA, 25 bp, Canis familiaris
taggcactcaattttacgcacgggg

SEQ ID NO: 197371 - DNA, 25 bp, Canis familiaris
tatggcactgaattcttaacctatt

SEQ ID NO: 197372 - DNA, 25 bp, Canis familiaris
tatcgtataaattgtaacctcagtt

SEQ ID NO: 197373 - DNA, 25 bp, Canis familiaris
taggttaagttttagctctcacttt

SEQ ID NO: 197374 - DNA, 25 bp, Canis familiaris
taggatctgaaggtttctgcctccg

SEQ ID NO: 197375 - DNA, 25 bp, Canis familiaris
tagtactgaatgcctactctgctct

SEQ ID NO: 197376 - DNA, 25 bp, Canis familiaris
tttgagctgattctcagccctcgat

SEQ ID NO: 197377 - DNA, 25 bp, Canis familiaris
tatgctgaaattctagccccaggac

SEQ ID NO: 197378 - DNA, 25 bp, Canis familiaris
tatgcttttctgataaaagaggcag

SEQ ID NO: 197379 - DNA, 25 bp, Canis familiaris
taggcttgtttttaagagtgccagt

SEQ ID NO: 197380 - DNA, 25 bp, Canis familiaris
taggatgtgttttttaagatactgt

SEQ ID NO: 197381 - DNA, 25 bp, Canis familiaris
tagggtgattattttctaaggttgg

SEQ ID NO: 197382 - DNA, 25 bp, Canis familiaris
tatggagtttctttttggggtgagg

SEQ ID NO: 197383 - DNA, 25 bp, Canis familiaris
taggcacaattaattagggggtgaa

SEQ ID NO: 197384 - DNA, 25 bp, Canis familiaris
taggaacatctttagaggtgggttt

SEQ ID NO: 197385 - DNA, 25 bp, Canis familiaris
taggaacatgttttgctttggtttt

SEQ ID NO: 197386 - DNA, 25 bp, Canis familiaris
tatagagggtcaggtttgggttttg

SEQ ID NO: 197387 - DNA, 25 bp, Canis familiaris
ttaggggccagactcttgggcacgt

SEQ ID NO: 197388 - DNA, 25 bp, Canis familiaris
ttcagtggcccagcctttagggcta

SEQ ID NO: 197389 - DNA, 25 bp, Canis familiaris
ttactggtcccagcttgtagttctt

SEQ ID NO: 197390 - DNA, 25 bp, Canis familiaris
tttcggtcctggtcatactatctag

SEQ ID NO: 197391 - DNA, 25 bp, Canis familiaris
ttataagttagcgcaggcttctatg

SEQ ID NO: 197392 - DNA, 25 bp, Canis familiaris
tagtgaaggtaggtaagcagttata

SEQ ID NO: 197393 - DNA, 25 bp, Canis familiaris
tagtgtaggtaggtgaccagagctt

SEQ ID NO: 197394 - DNA, 25 bp, Canis familiaris
taggtcaggtgcgttatctcagctt

SEQ ID NO: 197395 - DNA, 25 bp, Canis familiaris
taggtcaggtgcgttatctcagctt

SEQ ID NO: 197396 - DNA, 25 bp, Canis familiaris
tagtctagtttattcttcacttctc

SEQ ID NO: 197397 - DNA, 25 bp, Canis familiaris
tagtcttgtttaatcttacattttt

SEQ ID NO: 197398 - DNA, 25 bp, Canis familiaris
taggcttgttcttctcatatcaact

SEQ ID NO: 197399 - DNA, 25 bp, Canis familiaris
taggcatttccattccatttactgt

SEQ ID NO: 197400 - DNA, 25 bp, Canis familiaris
taggcagtggaatacgcctgactgg

SEQ ID NO: 197401 - DNA, 25 bp, Canis familiaris
tagggttactagtcccgttgtggag

SEQ ID NO: 197402 - DNA, 25 bp, Canis familiaris
taggtttactagtcccgtgtggagc

SEQ ID NO: 197403 - DNA, 25 bp, Canis familiaris
tagtggtgtacttggcctcactgat

SEQ ID NO: 197404 - DNA, 25 bp, Canis familiaris
tagtgggctagcagttttctgaact

SEQ ID NO: 197405 - DNA, 25 bp, Canis familiaris
tagtcagtctttggtcttatcttac

SEQ ID NO: 197406 - DNA, 25 bp, Canis familiaris
tagtcaccttcatctgtgtacttag

SEQ ID NO: 197407 - DNA, 25 bp, Canis familiaris
tagtgaccagtcttcgttagcaata

SEQ ID NO: 197408 - DNA, 25 bp, Canis familiaris
taggaccgacttatctgtgacaggc

SEQ ID NO: 197409 - DNA, 25 bp, Canis familiaris
taggaaaacatctcctgctgtccac

SEQ ID NO: 197410 - DNA, 25 bp, Canis familiaris
tataggaaaggctccacttgcctgc

SEQ ID NO: 197411 - DNA, 25 bp, Canis familiaris
tatgggatttgaccccaggatcctg

SEQ ID NO: 197412 - DNA, 25 bp, Canis familiaris
tagggcatgggaacaccaggcctac

SEQ ID NO: 197413 - DNA, 25 bp, Canis familiaris
tagtggtgactgacacatccaggcg

SEQ ID NO: 197414 - DNA, 25 bp, Canis familiaris
tagtggaagctgcctgtctgcatgt

SEQ ID NO: 197415 - DNA, 25 bp, Canis familiaris
tagtggacagtattgtgtgtgtgtg

SEQ ID NO: 197416 - DNA, 25 bp, Canis familiaris
tagtctccacttatatgtgttcagt

SEQ ID NO: 197417 - DNA, 25 bp, Canis familiaris
tagtcatccggtactttgatctctg

SEQ ID NO: 197418 - DNA, 25 bp, Canis familiaris
tagtgttcgagaccttttgctctgt

SEQ ID NO: 197419 - DNA, 25 bp, Canis familiaris
tagtgtcgcgggactttgtgatgag

SEQ ID NO: 197420 - DNA, 25 bp, Canis familiaris
tagtggtgcgtgcatcttgggacag

SEQ ID NO: 197421 - DNA, 25 bp, Canis familiaris
tagggggtgcagctatgggcgctgt

SEQ ID NO: 197422 - DNA, 25 bp, Canis familiaris
tatggacatggatggttaacggctt

SEQ ID NO: 197423 - DNA, 25 bp, Canis familiaris
taggactgagtaccttctactttta

SEQ ID NO: 197424 - DNA, 25 bp, Canis familiaris
tagtcactgtttctgtcttctttaa

SEQ ID NO: 197425 - DNA, 25 bp, Canis familiaris
tagtcacctattttcagttctgttt

SEQ ID NO: 197426 - DNA, 25 bp, Canis familiaris
tattacctatttacggtttgcccat

SEQ ID NO: 197427 - DNA, 25 bp, Canis familiaris
tataactttttacagcttcacacgc

SEQ ID NO: 197428 - DNA, 25 bp, Canis familiaris
tagtaattactgaaccctcatcctc

SEQ ID NO: 197429 - DNA, 25 bp, Canis familiaris
tagtgagataaccaaccgaacccca

SEQ ID NO: 197430 - DNA, 25 bp, Canis familiaris
tagtgaggatttacaccaaacccaa

SEQ ID NO: 197431 - DNA, 25 bp, Canis familiaris
tagtcggtgtgaacccaaggctgcg

SEQ ID NO: 197432 - DNA, 25 bp, Canis familiaris
tatacgtgaggaatcccaagggccc

SEQ ID NO: 197433 - DNA, 25 bp, Canis familiaris
tatcacgtgaaggcccaacggtctc

SEQ ID NO: 197434 - DNA, 25 bp, Canis familiaris
tatcacgtgaaggcccaacggtctc

SEQ ID NO: 197435 - DNA, 25 bp, Canis familiaris
ttacggggtccctggatgacctggt

SEQ ID NO: 197436 - DNA, 25 bp, Canis familiaris
tatagggtggttcccgggacagtcg

SEQ ID NO: 197437 - DNA, 25 bp, Canis familiaris
taggaggggtaggctctgggcaacc

SEQ ID NO: 197438 - DNA, 25 bp, Canis familiaris
tagtgtgggaaactgcctggggacg

SEQ ID NO: 197439 - DNA, 25 bp, Canis familiaris
tatgtgagaaaatgtactggtagac

SEQ ID NO: 197440 - DNA, 25 bp, Canis familiaris
tagtgagtccaatgtatgctttaga

SEQ ID NO: 197441 - DNA, 25 bp, Canis familiaris
tagtggtccaaagttgtccgcaggt

SEQ ID NO: 197442 - DNA, 25 bp, Canis familiaris
tagtggtggcaagcaggatcctggg

SEQ ID NO: 197443 - DNA, 25 bp, Canis familiaris
tagggggccatggatgttcccagtg

SEQ ID NO: 197444 - DNA, 25 bp, Canis familiaris
ttggccgtgatcgaagattccccga

SEQ ID NO: 197445 - DNA, 25 bp, Canis familiaris
tagtgccaggttgcagattgcctca

SEQ ID NO: 197446 - DNA, 25 bp, Canis familiaris
taggccagagttggaactgccacag

SEQ ID NO: 197447 - DNA, 25 bp, Canis familiaris
tagggcacagtggtacagcccgcac

SEQ ID NO: 197448 - DNA, 25 bp, Canis familiaris
tagggagcagccctacctaggagca

SEQ ID NO: 197449 - DNA, 25 bp, Canis familiaris
tagtggagatctgtggcacgagaag

SEQ ID NO: 197450 - DNA, 25 bp, Canis familiaris
tatgggagactgtggcaaagaaggc

SEQ ID NO: 197451 - DNA, 25 bp, Canis familiaris
tatgggaccttgcagtaataatgat

SEQ ID NO: 197452 - DNA, 25 bp, Canis familiaris
tattggaactatgactaagacatca

SEQ ID NO: 197453 - DNA, 25 bp, Canis familiaris
tagggatagtatgagccaataataa

SEQ ID NO: 197454 - DNA, 25 bp, Canis familiaris
tagggctactacaacttaacatcca

SEQ ID NO: 197455 - DNA, 25 bp, Canis familiaris
taggccttctacctgtaatactcca

SEQ ID NO: 197456 - DNA, 25 bp, Canis familiaris
taggcctcattagagcttggtctcc

SEQ ID NO: 197457 - DNA, 25 bp, Canis familiaris
taggcccagcattagaggttgtctc

SEQ ID NO: 197458 - DNA, 25 bp, Canis familiaris
tagtggtagctgtaaggttattctc

SEQ ID NO: 197459 - DNA, 25 bp, Canis familiaris
tagggggggaatctgctatcactca

SEQ ID NO: 197460 - DNA, 25 bp, Canis familiaris
taggaggcggagttggagcgacacc

SEQ ID NO: 197461 - DNA, 25 bp, Canis familiaris
tagggagctgggggccagcacagcc

SEQ ID NO: 197462 - DNA, 25 bp, Canis familiaris
tagggagaccaggagccacacagga

SEQ ID NO: 197463 - DNA, 25 bp, Canis familiaris
taggaggaccgaagcaggccaggca

SEQ ID NO: 197464 - DNA, 25 bp, Canis familiaris
taggagttgccgtagaggcgcagcc

SEQ ID NO: 197465 - DNA, 25 bp, Canis familiaris
taggtgtcagccgggcagaggcagc

SEQ ID NO: 197466 - DNA, 25 bp, Canis familiaris
tagggtagcaagggaggcactgcgg

SEQ ID NO: 197467 - DNA, 25 bp, Canis familiaris
tatgaggtgtgcagggggagctggg

SEQ ID NO: 197468 - DNA, 25 bp, Canis familiaris
tatcgacttcttgtgcaagacggag

SEQ ID NO: 197469 - DNA, 25 bp, Canis familiaris
tatctacctcctgagaagaaataga

SEQ ID NO: 197470 - DNA, 25 bp, Canis familiaris
tatattccccttccacagaaatgta

SEQ ID NO: 197471 - DNA, 25 bp, Canis familiaris
taggaacccttccacaagactgaag

SEQ ID NO: 197472 - DNA, 25 bp, Canis familiaris
ttggaactccttgcaaaacgtcggt

SEQ ID NO: 197473 - DNA, 25 bp, Canis familiaris
tatggcacactagttacaaaacagt

SEQ ID NO: 197474 - DNA, 25 bp, Canis familiaris
taggcagcagcttttaatacagggt

SEQ ID NO: 197475 - DNA, 25 bp, Canis familiaris
taggcggctttttagacatactttc

SEQ ID NO: 197476 - DNA, 25 bp, Canis familiaris
taggcccacattaaatacattttcc

SEQ ID NO: 197477 - DNA, 25 bp, Canis familiaris
taggactcacattaactcacattta

SEQ ID NO: 197478 - DNA, 25 bp, Canis familiaris
taggaacaatgccaacctgcttcta

SEQ ID NO: 197479 - DNA, 25 bp, Canis familiaris
taggttatcgctcacatatcttcga

SEQ ID NO: 197480 - DNA, 25 bp, Canis familiaris
taggatttactgtaataatgtctgt

SEQ ID NO: 197481 - DNA, 25 bp, Canis familiaris
tagggttgactgtagaatttctttt

SEQ ID NO: 197482 - DNA, 25 bp, Canis familiaris
taggcctgctagggatgaattgtct

SEQ ID NO: 197483 - DNA, 25 bp, Canis familiaris
taggcctcacatgtggcctcatgct

SEQ ID NO: 197484 - DNA, 25 bp, Canis familiaris
taggcatccgtggtggacactgatc

SEQ ID NO: 197485 - DNA, 25 bp, Canis familiaris
tagtgcagccttgggatgcagcctg

SEQ ID NO: 197486 - DNA, 25 bp, Canis familiaris
tagtgcaaccctgggaggctgctga

SEQ ID NO: 197487 - DNA, 25 bp, Canis familiaris
taggcaacacgcggggtggttacgg

SEQ ID NO: 197488 - DNA, 25 bp, Canis familiaris
taggaacgtgctggtggggtctggc

SEQ ID NO: 197489 - DNA, 25 bp, Canis familiaris
taggaagcttgacgtgctttgtcga

SEQ ID NO: 197490 - DNA, 25 bp, Canis familiaris
taggaagttgatctctttccaatga

SEQ ID NO: 197491 - DNA, 25 bp, Canis familiaris
taggaagtggcttttgtcctctcaa

SEQ ID NO: 197492 - DNA, 25 bp, Canis familiaris
taggcattgtggttactgtttccag

SEQ ID NO: 197493 - DNA, 25 bp, Canis familiaris
taggattttgtttcctcttaagcct

SEQ ID NO: 197494 - DNA, 25 bp, Canis familiaris
taggatcgtttatctcgcttacagg

SEQ ID NO: 197495 - DNA, 25 bp, Canis familiaris
taggatcgtttatctcgcttacagc

SEQ ID NO: 197496 - DNA, 25 bp, Canis familiaris
taggacggttgtttcgtatactcaa

SEQ ID NO: 197497 - DNA, 25 bp, Canis familiaris
taggacgtttgtttttcagttcgag

SEQ ID NO: 197498 - DNA, 25 bp, Canis familiaris
tatggacacttttgttctcctttcg

SEQ ID NO: 197499 - DNA, 25 bp, Canis familiaris
tatggagaagttatgtgacctaccc

SEQ ID NO: 197500 - DNA, 25 bp, Canis familiaris
tagtgcgacatggtttggagcccca

SEQ ID NO: 197501 - DNA, 25 bp, Canis familiaris
tatgtggcccagtttgaagcctccg

SEQ ID NO: 197502 - DNA, 25 bp, Canis familiaris
tatgggagccagccctaaactccat

SEQ ID NO: 197503 - DNA, 25 bp, Canis familiaris
taggtaaatgccctcagaagcctct

SEQ ID NO: 197504 - DNA, 25 bp, Canis familiaris
taggtaattcccacatagtctcagc

SEQ ID NO: 197505 - DNA, 25 bp, Canis familiaris
taggtccttaccactaatgctagaa

SEQ ID NO: 197506 - DNA, 25 bp, Canis familiaris
tagggcactgtaggccctactccag

SEQ ID NO: 197507 - DNA, 25 bp, Canis familiaris
tagggattgctatgccagccattgc

SEQ ID NO: 197508 - DNA, 25 bp, Canis familiaris
tagggggctcagcaatctcagtgga

SEQ ID NO: 197509 - DNA, 25 bp, Canis familiaris
taggggttcaggaatcatcgtgccg

SEQ ID NO: 197510 - DNA, 25 bp, Canis familiaris
tagggaccctgctttcatagatgcc

SEQ ID NO: 197511 - DNA, 25 bp, Canis familiaris
taggcgtccctatttgtgtgctgcc

SEQ ID NO: 197512 - DNA, 25 bp, Canis familiaris
tagtggctttcttttgtgtctgaca

SEQ ID NO: 197513 - DNA, 25 bp, Canis familiaris
tttggcattgtggaagggctcatga

SEQ ID NO: 197514 - DNA, 25 bp, Canis familiaris
tatgtggcattataatatcctctac

SEQ ID NO: 197515 - DNA, 25 bp, Canis familiaris
tagggatgttccaatagcctctcac

SEQ ID NO: 197516 - DNA, 25 bp, Canis familiaris
taggatcatcgtcctaatctctcta

SEQ ID NO: 197517 - DNA, 25 bp, Canis familiaris
tagtgcttcagtcctataccgatat

SEQ ID NO: 197518 - DNA, 25 bp, Canis familiaris
tagtggtcatattctgtacctgtaa

SEQ ID NO: 197519 - DNA, 25 bp, Canis familiaris
tagtcgttttcagtacattgtaggg

SEQ ID NO: 197520 - DNA, 25 bp, Canis familiaris
tatgcttttttggccaggtgtgggg

SEQ ID NO: 197521 - DNA, 25 bp, Canis familiaris
tatgacttctccatgtcaggtcggc

SEQ ID NO: 197522 - DNA, 25 bp, Canis familiaris
tatacgtctcgagttcgtgcagggc

SEQ ID NO: 197523 - DNA, 25 bp, Canis familiaris
tatgaccttgagatcacggcctgag

SEQ ID NO: 197524 - DNA, 25 bp, Canis familiaris
tatgaatttacagcattggcaaatg

SEQ ID NO: 197525 - DNA, 25 bp, Canis familiaris
tatgaatgcataacctatttctagg

SEQ ID NO: 197526 - DNA, 25 bp, Canis familiaris
tatgtatagattgcatttcttaggt

SEQ ID NO: 197527 - DNA, 25 bp, Canis familiaris
tatgaccaattctatttcttcccta

SEQ ID NO: 197528 - DNA, 25 bp, Canis familiaris
tatgtcctggtattttgtttcctaa

SEQ ID NO: 197529 - DNA, 25 bp, Canis familiaris
tatgccctggtacaagttggaaaca

SEQ ID NO: 197530 - DNA, 25 bp, Canis familiaris
tatgcacttttataagtttagagag

SEQ ID NO: 197531 - DNA, 25 bp, Canis familiaris
taggataattatgcaagtctttgta

SEQ ID NO: 197532 - DNA, 25 bp, Canis familiaris
taggataatttgtgcctgccattgt

SEQ ID NO: 197533 - DNA, 25 bp, Canis familiaris
taggtggacttctccatgccataat

SEQ ID NO: 197534 - DNA, 25 bp, Canis familiaris
taggtgggctttttcacatcagagt

SEQ ID NO: 197535 - DNA, 25 bp, Canis familiaris
taggtgaggctttgtctcctcagga

SEQ ID NO: 197536 - DNA, 25 bp, Canis familiaris
tagtgtgggctagtgtggctcatgc

SEQ ID NO: 197537 - DNA, 25 bp, Canis familiaris
tagggagagtcaggtgcacgctgct

SEQ ID NO: 197538 - DNA, 25 bp, Canis familiaris
taggatgaagccttgctcaggccgg

SEQ ID NO: 197539 - DNA, 25 bp, Canis familiaris
taggtgaggtgcttccagattgctg

SEQ ID NO: 197540 - DNA, 25 bp, Canis familiaris
tatgttaaatgttcacgtctgtgta

SEQ ID NO: 197541 - DNA, 25 bp, Canis familiaris
tatggttcaatttacgactgcctat

SEQ ID NO: 197542 - DNA, 25 bp, Canis familiaris
tatgtcttatatttactgagggcta

SEQ ID NO: 197543 - DNA, 25 bp, Canis familiaris
tttctttggcagtatgtagggattc

SEQ ID NO: 197544 - DNA, 25 bp, Canis familiaris
tatcttgttggttctgaggggtctt

SEQ ID NO: 197545 - DNA, 25 bp, Canis familiaris
taggtgctttacttgggtggtctca

SEQ ID NO: 197546 - DNA, 25 bp, Canis familiaris
taggtcttgacatcttttttcttga

SEQ ID NO: 197547 - DNA, 25 bp, Canis familiaris
tagtgctcattgggtttatcgtctt

SEQ ID NO: 197548 - DNA, 25 bp, Canis familiaris
tagtggctgtgacgattgtgatcct

SEQ ID NO: 197549 - DNA, 25 bp, Canis familiaris
tagggctctgcactgaatggctgac

SEQ ID NO: 197550 - DNA, 25 bp, Canis familiaris
tagggctctgcactgaatggctgac

SEQ ID NO: 197551 - DNA, 25 bp, Canis familiaris
tagggctctgcactgaatggctgac

SEQ ID NO: 197552 - DNA, 25 bp, Canis familiaris
tagggctctgcactgaatggctgac

SEQ ID NO: 197553 - DNA, 25 bp, Canis familiaris
tagggctctgcactgaatggctgac

SEQ ID NO: 197554 - DNA, 25 bp, Canis familiaris
tagggctctgcactgaatggctgac

SEQ ID NO: 197555 - DNA, 25 bp, Canis familiaris
tagggctctgcactgaatggctgac

SEQ ID NO: 197556 - DNA, 25 bp, Canis familiaris
tagggctctgcactgaatggctgac

SEQ ID NO: 197557 - DNA, 25 bp, Canis familiaris
tagggctctgcactgaatggctgac

SEQ ID NO: 197558 - DNA, 25 bp, Canis familiaris
tagggctctgcactgaatggctgac

SEQ ID NO: 197559 - DNA, 25 bp, Canis familiaris
tagggctgcatcttgtagggccttg

SEQ ID NO: 197560 - DNA, 25 bp, Canis familiaris
taggggcagcttagagggccagcca

SEQ ID NO: 197561 - DNA, 25 bp, Canis familiaris
tatgtgaggcagctgtggtgtcccc

SEQ ID NO: 197562 - DNA, 25 bp, Canis familiaris
tatgtgcaggagaaggatgatgatg

SEQ ID NO: 197563 - DNA, 25 bp, Canis familiaris
tatgccaggcaccaggatacaatga

SEQ ID NO: 197564 - DNA, 25 bp, Canis familiaris
tatcggccctgagatctcagctgca

SEQ ID NO: 197565 - DNA, 25 bp, Canis familiaris
tagggcaccaaaactcactctagtt

SEQ ID NO: 197566 - DNA, 25 bp, Canis familiaris
tatgggcccaaacctaatgttggaa

SEQ ID NO: 197567 - DNA, 25 bp, Canis familiaris
tatggaccaaataccctgttgggta

SEQ ID NO: 197568 - DNA, 25 bp, Canis familiaris
ttcaactgccaattccactagtagg

SEQ ID NO: 197569 - DNA, 25 bp, Canis familiaris
tatcatagtgtctacgaaatcgtac

SEQ ID NO: 197570 - DNA, 25 bp, Canis familiaris
tatatcagtgcttagaatggggcta

SEQ ID NO: 197571 - DNA, 25 bp, Canis familiaris
tatgtagctcattagaagccaggat

SEQ ID NO: 197572 - DNA, 25 bp, Canis familiaris
tatggagcacaaagccagccacggt

SEQ ID NO: 197573 - DNA, 25 bp, Canis familiaris
tagtgagcactagtccaccacaaat

SEQ ID NO: 197574 - DNA, 25 bp, Canis familiaris
tagtgaataattcctctcagctata

SEQ ID NO: 197575 - DNA, 25 bp, Canis familiaris
tagtgtatcatatggcccagttacg

SEQ ID NO: 197576 - DNA, 25 bp, Canis familiaris
tatgttcataaattccacgggacga

SEQ ID NO: 197577 - DNA, 25 bp, Canis familiaris
tatgtccgaagcagctcctgggaag

SEQ ID NO: 197578 - DNA, 25 bp, Canis familiaris
tatgctcccgcgagacggtggatct

SEQ ID NO: 197579 - DNA, 25 bp, Canis familiaris
tattcccgggatcagagaagacatc

SEQ ID NO: 197580 - DNA, 25 bp, Canis familiaris
tatacccagttcctagagctaacgg

SEQ ID NO: 197581 - DNA, 25 bp, Canis familiaris
tatacccggttcagcctggctcggc

SEQ ID NO: 197582 - DNA, 25 bp, Canis familiaris
tataacgcaggtacctacttggccc

SEQ ID NO: 197583 - DNA, 25 bp, Canis familiaris
tatacccaggcccaggttaggccct

SEQ ID NO: 197584 - DNA, 25 bp, Canis familiaris
tataagccatcccgaagttggtccc

SEQ ID NO: 197585 - DNA, 25 bp, Canis familiaris
tatgaactttgccatacagtcgccc

SEQ ID NO: 197586 - DNA, 25 bp, Canis familiaris
tatgaagcagtacacaggcacccct

SEQ ID NO: 197587 - DNA, 25 bp, Canis familiaris
tatagacgtctgcaaggtgcctcct

SEQ ID NO: 197588 - DNA, 25 bp, Canis familiaris
tagtgagccctgcagaggctggtcc

SEQ ID NO: 197589 - DNA, 25 bp, Canis familiaris
tatgtcacttgcccagaggcggtgg

SEQ ID NO: 197590 - DNA, 25 bp, Canis familiaris
tatcgaattcggcacgagctgggtg

SEQ ID NO: 197591 - DNA, 25 bp, Canis familiaris
tatcgaaggggaccgcgttggctaa

SEQ ID NO: 197592 - DNA, 25 bp, Canis familiaris
taggaagggcaaccggtggtctcag

SEQ ID NO: 197593 - DNA, 25 bp, Canis familiaris
taggaagcaggatctccgctggtgt

SEQ ID NO: 197594 - DNA, 25 bp, Canis familiaris
taggagagggcatgtctgccggggg

SEQ ID NO: 197595 - DNA, 25 bp, Canis familiaris
tagggaagagtgtttgccggggtgg

SEQ ID NO: 197596 - DNA, 25 bp, Canis familiaris
tagggaaagctgttcgcctgcaggt

SEQ ID NO: 197597 - DNA, 25 bp, Canis familiaris
tagggtcagatgctttttgcggtca

SEQ ID NO: 197598 - DNA, 25 bp, Canis familiaris
tagggatgcactctggttttctcca

SEQ ID NO: 197599 - DNA, 25 bp, Canis familiaris
taggagtctctcgtggtttgtctct

SEQ ID NO: 197600 - DNA, 25 bp, Canis familiaris
taggtggctatgtctggttccatca

SEQ ID NO: 197601 - DNA, 25 bp, Canis familiaris
taggagtggcagtctgtttcctggt

SEQ ID NO: 197602 - DNA, 25 bp, Canis familiaris
taggagtgtggttggtgtcctttca

SEQ ID NO: 197603 - DNA, 25 bp, Canis familiaris
taggcactgggtcaggtctgcattg

SEQ ID NO: 197604 - DNA, 25 bp, Canis familiaris
taggattggagcccagagcggactg

SEQ ID NO: 197605 - DNA, 25 bp, Canis familiaris
taggcatcggacccgagaggagccc

SEQ ID NO: 197606 - DNA, 25 bp, Canis familiaris
taggatcttgaccttgaagcccgtc

SEQ ID NO: 197607 - DNA, 25 bp, Canis familiaris
taggtcattgtgctgtgggcaccgc

SEQ ID NO: 197608 - DNA, 25 bp, Canis familiaris
taggtcactgtgctgtcaggcaacc

SEQ ID NO: 197609 - DNA, 25 bp, Canis familiaris
tatgggcagcagagttatggaacct

SEQ ID NO: 197610 - DNA, 25 bp, Canis familiaris
tatggatgcacgacgacttgatgaa

SEQ ID NO: 197611 - DNA, 25 bp, Canis familiaris
tatcaggcacagtctacttaccagg

SEQ ID NO: 197612 - DNA, 25 bp, Canis familiaris
tagggctcagcagtggtttcctgga

SEQ ID NO: 197613 - DNA, 25 bp, Canis familiaris
tagggacagctatatgctacctgga

SEQ ID NO: 197614 - DNA, 25 bp, Canis familiaris
taggagattttgtgctgacttgtgt

SEQ ID NO: 197615 - DNA, 25 bp, Canis familiaris
taggagaatgtctcgctgcttttgc

SEQ ID NO: 197616 - DNA, 25 bp, Canis familiaris
taggaagatggctgcagccccattc

SEQ ID NO: 197617 - DNA, 25 bp, Canis familiaris
taggagagattggtgtccctcttcg

SEQ ID NO: 197618 - DNA, 25 bp, Canis familiaris
taggagaatatggtgtcctctcgga

SEQ ID NO: 197619 - DNA, 25 bp, Canis familiaris
taggggtatgcagctccctgatggg

SEQ ID NO: 197620 - DNA, 25 bp, Canis familiaris
taggggctcagatgcccccagatgg

SEQ ID NO: 197621 - DNA, 25 bp, Canis familiaris
taggggtagctgtcttcacccatga

SEQ ID NO: 197622 - DNA, 25 bp, Canis familiaris
tagggttatgctttatactctctgc

SEQ ID NO: 197623 - DNA, 25 bp, Canis familiaris
taggttccaggctttcagcttagca

SEQ ID NO: 197624 - DNA, 25 bp, Canis familiaris
taggttccatccatctactaaaatt

SEQ ID NO: 197625 - DNA, 25 bp, Canis familiaris
taggttttgccagctagcgagaact

SEQ ID NO: 197626 - DNA, 25 bp, Canis familiaris
taggctcccttaggatacggacctg

SEQ ID NO: 197627 - DNA, 25 bp, Canis familiaris
taggtgcccttaggacagttgtcca

SEQ ID NO: 197628 - DNA, 25 bp, Canis familiaris
tatggttcctttggtcgctcgctcc

SEQ ID NO: 197629 - DNA, 25 bp, Canis familiaris
tatggttcctttggtcgctcgctcc

SEQ ID NO: 197630 - DNA, 25 bp, Canis familiaris
tagtgtgtgtgcattcgatcagccc

SEQ ID NO: 197631 - DNA, 25 bp, Canis familiaris
taggttgtcctagatcatgagcccg

SEQ ID NO: 197632 - DNA, 25 bp, Canis familiaris
taggttgtcctatacaactctcctc

SEQ ID NO: 197633 - DNA, 25 bp, Canis familiaris
taggtttctctatggattcttttca

SEQ ID NO: 197634 - DNA, 25 bp, Canis familiaris
taggttgccttttagttttgttgat

SEQ ID NO: 197635 - DNA, 25 bp, Canis familiaris
taggttgtttactagctttgcctgg

SEQ ID NO: 197636 - DNA, 25 bp, Canis familiaris
taggttgtattttactctatgtatg

SEQ ID NO: 197637 - DNA, 25 bp, Canis familiaris
taggttagtttgttgattcgtgatg

SEQ ID NO: 197638 - DNA, 25 bp, Canis familiaris
taggatgtagtcttgtagttctgta

SEQ ID NO: 197639 - DNA, 25 bp, Canis familiaris
taggcattatgtttgtcttctttta

SEQ ID NO: 197640 - DNA, 25 bp, Canis familiaris
taggcatctaattttcttcctggga

SEQ ID NO: 197641 - DNA, 25 bp, Canis familiaris
taggatggcaaagttctggactggg

SEQ ID NO: 197642 - DNA, 25 bp, Canis familiaris
taggcatggccatcataaggggggg

SEQ ID NO: 197643 - DNA, 25 bp, Canis familiaris
taggaccacgaccacgtgggcggga

SEQ ID NO: 197644 - DNA, 25 bp, Canis familiaris
taggaccaaggcccaggggatgctg

SEQ ID NO: 197645 - DNA, 25 bp, Canis familiaris
taggcaccaaggccgtgtggcctgc

SEQ ID NO: 197646 - DNA, 25 bp, Canis familiaris
taggacccatggtctgtttcacact

SEQ ID NO: 197647 - DNA, 25 bp, Canis familiaris
taggatgtccaggttacttatatac

SEQ ID NO: 197648 - DNA, 25 bp, Canis familiaris
taggtgctccacttacattataatc

SEQ ID NO: 197649 - DNA, 25 bp, Canis familiaris
taggtccaactgtccattcatggtg

SEQ ID NO: 197650 - DNA, 25 bp, Canis familiaris
tatgagtcctgagtcctatcttggg

SEQ ID NO: 197651 - DNA, 25 bp, Canis familiaris
tatggtcctgacgaacatcaaggaa

SEQ ID NO: 197652 - DNA, 25 bp, Canis familiaris
tatggtcctgacgaagatgaaggaa

SEQ ID NO: 197653 - DNA, 25 bp, Canis familiaris
tatggtcttgccaaaatgaaagaaa

SEQ ID NO: 197654 - DNA, 25 bp, Canis familiaris
taggtgcttctcagccaaaggcaag

SEQ ID NO: 197655 - DNA, 25 bp, Canis familiaris
tatgtggaatcttcgccaacccaat

SEQ ID NO: 197656 - DNA, 25 bp, Canis familiaris
tatgtctgcagataggttacccgat

SEQ ID NO: 197657 - DNA, 25 bp, Canis familiaris
tatgtgcttgcatcaggctaggcct

SEQ ID NO: 197658 - DNA, 25 bp, Canis familiaris
tatgatgatggcagcggaaatgact

SEQ ID NO: 197659 - DNA, 25 bp, Canis familiaris
tatgatgatggcagcggaaatgact

SEQ ID NO: 197660 - DNA, 25 bp, Canis familiaris
tatgagaggtccctgaatcgcctga

SEQ ID NO: 197661 - DNA, 25 bp, Canis familiaris
tatggcaggcacacagaaagctcta

SEQ ID NO: 197662 - DNA, 25 bp, Canis familiaris
taggctgccagcagcagaaccctgt

SEQ ID NO: 197663 - DNA, 25 bp, Canis familiaris
tatgagctcaaccgggaagcctgtg

SEQ ID NO: 197664 - DNA, 25 bp, Canis familiaris
tatgagctcaaccgggaagcctgtg

SEQ ID NO: 197665 - DNA, 25 bp, Canis familiaris
tatgaccctccgcagaagactgctg

SEQ ID NO: 197666 - DNA, 25 bp, Canis familiaris
tatgattccacccatggcaaattcc

SEQ ID NO: 197667 - DNA, 25 bp, Canis familiaris
tatgcagggagctgtgggaagtcca

SEQ ID NO: 197668 - DNA, 25 bp, Canis familiaris
tatgctgcctcctagggaaaatcca

SEQ ID NO: 197669 - DNA, 25 bp, Canis familiaris
tattctccctactgaaggatgcgac

SEQ ID NO: 197670 - DNA, 25 bp, Canis familiaris
taggccctctaccgaagtgggctcc

SEQ ID NO: 197671 - DNA, 25 bp, Canis familiaris
taggccttgtaataaggggctctaa

SEQ ID NO: 197672 - DNA, 25 bp, Canis familiaris
tatgtggttttaaaaggtgtgctta

SEQ ID NO: 197673 - DNA, 25 bp, Canis familiaris
taggagttttgcaggaggctttgta

SEQ ID NO: 197674 - DNA, 25 bp, Canis familiaris
taggatgttttcaaggttcattcat

SEQ ID NO: 197675 - DNA, 25 bp, Canis familiaris
taggattcttgtcagagctccacct

SEQ ID NO: 197676 - DNA, 25 bp, Canis familiaris
taggtgtctttgtcaagctaatgat

SEQ ID NO: 197677 - DNA, 25 bp, Canis familiaris
taggtgtcattttcactgtacatag

SEQ ID NO: 197678 - DNA, 25 bp, Canis familiaris
taggtgacagttccttgctgatgct

SEQ ID NO: 197679 - DNA, 25 bp, Canis familiaris
tatgtggacagcaccaatctggccc

SEQ ID NO: 197680 - DNA, 25 bp, Canis familiaris
tagggaagaagccagactgcgccca

SEQ ID NO: 197681 - DNA, 25 bp, Canis familiaris
taggagaagggccacagctcctcct

SEQ ID NO: 197682 - DNA, 25 bp, Canis familiaris
taggggagcggttcagctccctcag

SEQ ID NO: 197683 - DNA, 25 bp, Canis familiaris
taggggagctgtctagctcactctc

SEQ ID NO: 197684 - DNA, 25 bp, Canis familiaris
taggtggcagcttttgaaactctct

SEQ ID NO: 197685 - DNA, 25 bp, Canis familiaris
tatgtgggcgttttaaaactccagc

SEQ ID NO: 197686 - DNA, 25 bp, Canis familiaris
tatggccaggttactgaaaacccca

SEQ ID NO: 197687 - DNA, 25 bp, Canis familiaris
tatgcccaggcctgcagaatgaagc

SEQ ID NO: 197688 - DNA, 25 bp, Canis familiaris
tatgccagacagctccagcaagcaa

SEQ ID NO: 197689 - DNA, 25 bp, Canis familiaris
tatgcatacacattatacacacaca

SEQ ID NO: 197690 - DNA, 25 bp, Canis familiaris
tatcgtgctcactagacagcacacc

SEQ ID NO: 197691 - DNA, 25 bp, Canis familiaris
tatccattcatctactgatgagcac

SEQ ID NO: 197692 - DNA, 25 bp, Canis familiaris
tattcttgtcatgtgtggaggggtg

SEQ ID NO: 197693 - DNA, 25 bp, Canis familiaris
tattgcactactgtgatcccggagg

SEQ ID NO: 197694 - DNA, 25 bp, Canis familiaris
tatggttactttgctgccgtagctg

SEQ ID NO: 197695 - DNA, 25 bp, Canis familiaris
tatagtaacttgcctaccgatatag

SEQ ID NO: 197696 - DNA, 25 bp, Canis familiaris
tatttaacacggcctccgagatact

SEQ ID NO: 197697 - DNA, 25 bp, Canis familiaris
tatgttaaccaccttaaagtacacg

SEQ ID NO: 197698 - DNA, 25 bp, Canis familiaris
ttgtgtaaaaccctataaactaatg

SEQ ID NO: 197699 - DNA, 25 bp, Canis familiaris
tttgcttaaaccctggagaaccaat

SEQ ID NO: 197700 - DNA, 25 bp, Canis familiaris
ttcttccccctggttggaaccaatg

SEQ ID NO: 197701 - DNA, 25 bp, Canis familiaris
ttgcgacccctgtgttaaaccaata

SEQ ID NO: 197702 - DNA, 25 bp, Canis familiaris
ttgcttccaccgtgttaccaaagga

SEQ ID NO: 197703 - DNA, 25 bp, Canis familiaris
ttccaactccgtgtttctctaagga

SEQ ID NO: 197704 - DNA, 25 bp, Canis familiaris
tatccaacccttgttttaatacact

SEQ ID NO: 197705 - DNA, 25 bp, Canis familiaris
tttaatgcccaaaagtacaaatact

SEQ ID NO: 197706 - DNA, 25 bp, Canis familiaris
tataactcccaaaaccattaattct

SEQ ID NO: 197707 - DNA, 25 bp, Canis familiaris
tatatattacacccaacctaattaa

SEQ ID NO: 197708 - DNA, 25 bp, Canis familiaris
ttatattatggaccgaaattaataa

SEQ ID NO: 197709 - DNA, 25 bp, Canis familiaris
tatgtctatcatgaacttaaaaaaa

SEQ ID NO: 197710 - DNA, 25 bp, Canis familiaris
taggcccacatcacttcaaaaaccc

SEQ ID NO: 197711 - DNA, 25 bp, Canis familiaris
taggcgtccactgctgtcagaggac

SEQ ID NO: 197712 - DNA, 25 bp, Canis familiaris
taggcgctatcaaggcccaaggact

SEQ ID NO: 197713 - DNA, 25 bp, Canis familiaris
tataactaccatccctcaaggtctt

SEQ ID NO: 197714 - DNA, 25 bp, Canis familiaris
tataactaccatccctcaaggtctt

SEQ ID NO: 197715 - DNA, 25 bp, Canis familiaris
tatgcccttcaacagctgaatggtc

SEQ ID NO: 197716 - DNA, 25 bp, Canis familiaris
tatggccctacacaggcagtgtgct

SEQ ID NO: 197717 - DNA, 25 bp, Canis familiaris
taggtcttcatcctaactggcagtt

SEQ ID NO: 197718 - DNA, 25 bp, Canis familiaris
taggtatagtcagcaggcgcgcaat

SEQ ID NO: 197719 - DNA, 25 bp, Canis familiaris
tatcctgaaccatcaggcccaatca

SEQ ID NO: 197720 - DNA, 25 bp, Canis familiaris
tatgcaagaacccactgagcccaaa

SEQ ID NO: 197721 - DNA, 25 bp, Canis familiaris
tatgcatacatgcctagcacatagt

SEQ ID NO: 197722 - DNA, 25 bp, Canis familiaris
tatgcttgcatgacagatactggct

SEQ ID NO: 197723 - DNA, 25 bp, Canis familiaris
ttcgaattcagatccgcttggttcc

SEQ ID NO: 197724 - DNA, 25 bp, Canis familiaris
ttcgagcgatcataccctcgagttc

SEQ ID NO: 197725 - DNA, 25 bp, Canis familiaris
tatggatggaattttccaaggttcc

SEQ ID NO: 197726 - DNA, 25 bp, Canis familiaris
taggcaggagaatttcccacggtcc

SEQ ID NO: 197727 - DNA, 25 bp, Canis familiaris
taggagtgtgcaccatactcccagg

SEQ ID NO: 197728 - DNA, 25 bp, Canis familiaris
taggcacttttctagattctcaggt

SEQ ID NO: 197729 - DNA, 25 bp, Canis familiaris
taggcaatctattcaacactctcag

SEQ ID NO: 197730 - DNA, 25 bp, Canis familiaris
tatgtcagtgccaaaagccttcagg

SEQ ID NO: 197731 - DNA, 25 bp, Canis familiaris
tattcagtacaatctccttaggcgt

SEQ ID NO: 197732 - DNA, 25 bp, Canis familiaris
tattgctgaaaatccctttccctga

SEQ ID NO: 197733 - DNA, 25 bp, Canis familiaris
tttggaaataaccacttctccctca

SEQ ID NO: 197734 - DNA, 25 bp, Canis familiaris
tttgcgaacaaacaggatttgccaa

SEQ ID NO: 197735 - DNA, 25 bp, Canis familiaris
ttgttacaaaaaaggactatcgata

SEQ ID NO: 197736 - DNA, 25 bp, Canis familiaris
ttttgtcaaaataaggaattccatt

SEQ ID NO: 197737 - DNA, 25 bp, Canis familiaris
tttaccagaagaccagggtcccatt

SEQ ID NO: 197738 - DNA, 25 bp, Canis familiaris
tttccgagatcatgcgacgtgtttc

SEQ ID NO: 197739 - DNA, 25 bp, Canis familiaris
tattctggtacaagcggcgggtccg

SEQ ID NO: 197740 - DNA, 25 bp, Canis familiaris
tatgttcgtggcagctgcaggggcc

SEQ ID NO: 197741 - DNA, 25 bp, Canis familiaris
tatgttgcttccacatcagtgagga

SEQ ID NO: 197742 - DNA, 25 bp, Canis familiaris
tatgcttcttggatcaatggggcag

SEQ ID NO: 197743 - DNA, 25 bp, Canis familiaris
tatgcttcttgcgcaacgcgggaga

SEQ ID NO: 197744 - DNA, 25 bp, Canis familiaris
tatcaatcttcccaagtctggaaag

SEQ ID NO: 197745 - DNA, 25 bp, Canis familiaris
tatcactttcccgagtttaaaacat

SEQ ID NO: 197746 - DNA, 25 bp, Canis familiaris
tatcacttgtctcccggttgaataa

SEQ ID NO: 197747 - DNA, 25 bp, Canis familiaris
tatgcaatctgtcaccctttgatgt

SEQ ID NO: 197748 - DNA, 25 bp, Canis familiaris
tatcgtcgatactctgtagctgtgt

SEQ ID NO: 197749 - DNA, 25 bp, Canis familiaris
tatttcgtaagccatgtcagtgcat

SEQ ID NO: 197750 - DNA, 25 bp, Canis familiaris
tatgtatctgatgaaggacctgtat

SEQ ID NO: 197751 - DNA, 25 bp, Canis familiaris
tatgctcagcttcagaagagccttg

SEQ ID NO: 197752 - DNA, 25 bp, Canis familiaris
tatccgcctgctataagcctggtga

SEQ ID NO: 197753 - DNA, 25 bp, Canis familiaris
ttagcaccactttaagccgagggca

SEQ ID NO: 197754 - DNA, 25 bp, Canis familiaris
tatagctcccgtacaccggagcgga

SEQ ID NO: 197755 - DNA, 25 bp, Canis familiaris
taggccaccagattacctgggctgg

SEQ ID NO: 197756 - DNA, 25 bp, Canis familiaris
tatgggatctggttagctctgggtg

SEQ ID NO: 197757 - DNA, 25 bp, Canis familiaris
tatggagtctggtcctgtgagggct

SEQ ID NO: 197758 - DNA, 25 bp, Canis familiaris
tatccattatagtccgtgtacctgt

SEQ ID NO: 197759 - DNA, 25 bp, Canis familiaris
tatcagctgatcgcccgtgtagaag

SEQ ID NO: 197760 - DNA, 25 bp, Canis familiaris
tatcagctgatcgcccgtgtagaag

SEQ ID NO: 197761 - DNA, 25 bp, Canis familiaris
tatcagctgatcgcccgtgtagaag

SEQ ID NO: 197762 - DNA, 25 bp, Canis familiaris
tataggaaccaggtgtgtacaaaaa

SEQ ID NO: 197763 - DNA, 25 bp, Canis familiaris
tataagcttcacaaaggtaccaaag

SEQ ID NO: 197764 - DNA, 25 bp, Canis familiaris
tatgaagattacgggactgcagcga

SEQ ID NO: 197765 - DNA, 25 bp, Canis familiaris
tataggagtacataactgctgcgtt

SEQ ID NO: 197766 - DNA, 25 bp, Canis familiaris
tatggttaaaaatgtgcgctgtttt

SEQ ID NO: 197767 - DNA, 25 bp, Canis familiaris
tagggtagacaattggttcctttct

SEQ ID NO: 197768 - DNA, 25 bp, Canis familiaris
taggagtcccacttgtgtttttcca

SEQ ID NO: 197769 - DNA, 25 bp, Canis familiaris
tatggagttccttttgaatttccct

SEQ ID NO: 197770 - DNA, 25 bp, Canis familiaris
tatgagttccttgatttttgtccca

SEQ ID NO: 197771 - DNA, 25 bp, Canis familiaris
tatagatttttatctttccttacct

SEQ ID NO: 197772 - DNA, 25 bp, Canis familiaris
tatttggtattctccaaccttttct

SEQ ID NO: 197773 - DNA, 25 bp, Canis familiaris
taggctggtgtttttgcaccctttt

SEQ ID NO: 197774 - DNA, 25 bp, Canis familiaris
taggctttgctttattacaacttat

SEQ ID NO: 197775 - DNA, 25 bp, Canis familiaris
taggcatccctttatttcagagctt

SEQ ID NO: 197776 - DNA, 25 bp, Canis familiaris
tatggtcgacgtagtttcgatcatt

SEQ ID NO: 197777 - DNA, 25 bp, Canis familiaris
taggtcacatttattatgttcacat

SEQ ID NO: 197778 - DNA, 25 bp, Canis familiaris
taggcacctttgacccatggtctta

SEQ ID NO: 197779 - DNA, 25 bp, Canis familiaris
tattactcgtgcgtacacgttatta

SEQ ID NO: 197780 - DNA, 25 bp, Canis familiaris
ttaaaggctgtccaagcatttttaa

SEQ ID NO: 197781 - DNA, 25 bp, Canis familiaris
tataaaagctgggaagccttttcta

SEQ ID NO: 197782 - DNA, 25 bp, Canis familiaris
tatttggagccggaggcacttgttt

SEQ ID NO: 197783 - DNA, 25 bp, Canis familiaris
tttcgacgcggggagagcatctact

SEQ ID NO: 197784 - DNA, 25 bp, Canis familiaris
tatggtgacagtggggatggctata

SEQ ID NO: 197785 - DNA, 25 bp, Canis familiaris
tatcagtacgtcggcaatggaagaa

SEQ ID NO: 197786 - DNA, 25 bp, Canis familiaris
tatcagtacgtcggcaatggaagaa

SEQ ID NO: 197787 - DNA, 25 bp, Canis familiaris
tatccatattgctgcaaatggcaag

SEQ ID NO: 197788 - DNA, 25 bp, Canis familiaris
tattctgatctgtgcagggcctggc

SEQ ID NO: 197789 - DNA, 25 bp, Canis familiaris
tatccatgatctgggggcccggaga

SEQ ID NO: 197790 - DNA, 25 bp, Canis familiaris
tatcctggattgggccagcctaaat

SEQ ID NO: 197791 - DNA, 25 bp, Canis familiaris
tatcaaggttgccgatcagcctgca

SEQ ID NO: 197792 - DNA, 25 bp, Canis familiaris
tatcaaggttgccgatcagcctgca

SEQ ID NO: 197793 - DNA, 25 bp, Canis familiaris
tatccaggttccctaccagagaagc

SEQ ID NO: 197794 - DNA, 25 bp, Canis familiaris
tatcccgagctcggttccggaatac

SEQ ID NO: 197795 - DNA, 25 bp, Canis familiaris
tatccaacaccgaaaccgtttgacg

SEQ ID NO: 197796 - DNA, 25 bp, Canis familiaris
tatccaaaactaagaccctcctgac

SEQ ID NO: 197797 - DNA, 25 bp, Canis familiaris
tatcagatcaaaaccaacccggtga

SEQ ID NO: 197798 - DNA, 25 bp, Canis familiaris
tatcctgcagtaaccgaatccgtgg

SEQ ID NO: 197799 - DNA, 25 bp, Canis familiaris
tatcccgtcaaaggattccgtttct

SEQ ID NO: 197800 - DNA, 25 bp, Canis familiaris
tatccttgtaaatatcttcaaagtt

SEQ ID NO: 197801 - DNA, 25 bp, Canis familiaris
tatgcactgtgtgagtagtttcgaa

SEQ ID NO: 197802 - DNA, 25 bp, Canis familiaris
ttattggaaagtacatattgaaaaa

SEQ ID NO: 197803 - DNA, 25 bp, Canis familiaris
tatgcttggccatggttgtccaata

SEQ ID NO: 197804 - DNA, 25 bp, Canis familiaris
tatgttcgccactgatttagccaca

SEQ ID NO: 197805 - DNA, 25 bp, Canis familiaris
tatgttccataaactctaacaccac

SEQ ID NO: 197806 - DNA, 25 bp, Canis familiaris
taggtaagcaacgctagcaccgcag

SEQ ID NO: 197807 - DNA, 25 bp, Canis familiaris
taggacaaatatctccagcaccggt

SEQ ID NO: 197808 - DNA, 25 bp, Canis familiaris
tatggcacaagctttgtcacagccc

SEQ ID NO: 197809 - DNA, 25 bp, Canis familiaris
taggctgaaggcagcgacgcaccac

SEQ ID NO: 197810 - DNA, 25 bp, Canis familiaris
taggcatgacagtgggcaccatccc

SEQ ID NO: 197811 - DNA, 25 bp, Canis familiaris
tatgctgagacgaggccagccacgc

SEQ ID NO: 197812 - DNA, 25 bp, Canis familiaris
tatgtggatcagatggatgcagaca

SEQ ID NO: 197813 - DNA, 25 bp, Canis familiaris
tatgtggtctgaatagcaagtttac

SEQ ID NO: 197814 - DNA, 25 bp, Canis familiaris
tatgggctctatgtgcaggttccct

SEQ ID NO: 197815 - DNA, 25 bp, Canis familiaris
tatgggtattttcggtctctttgac

SEQ ID NO: 197816 - DNA, 25 bp, Canis familiaris
taggcctatttatggtgacactata

SEQ ID NO: 197817 - DNA, 25 bp, Canis familiaris
taggcctctttgtataggtcccata

SEQ ID NO: 197818 - DNA, 25 bp, Canis familiaris
tatggcctgttccaattgctgctaa

SEQ ID NO: 197819 - DNA, 25 bp, Canis familiaris
tatgtgacttattatatgtgtaaac

SEQ ID NO: 197820 - DNA, 25 bp, Canis familiaris
tatgctagattgttattttcccccc

SEQ ID NO: 197821 - DNA, 25 bp, Canis familiaris
tatgcaatattcttacttctcgtca

SEQ ID NO: 197822 - DNA, 25 bp, Canis familiaris
tatgacaatgacttactttcaaatg

SEQ ID NO: 197823 - DNA, 25 bp, Canis familiaris
tatggacatgatcaacctccaccac

SEQ ID NO: 197824 - DNA, 25 bp, Canis familiaris
tatggagaggaaaaccaaccacctt

SEQ ID NO: 197825 - DNA, 25 bp, Canis familiaris
tatggcagcggatgagaccaccacc

SEQ ID NO: 197826 - DNA, 25 bp, Canis familiaris
tatggcacgggatagcatcacatga

SEQ ID NO: 197827 - DNA, 25 bp, Canis familiaris
taggcaagcgggtctctgacatact

SEQ ID NO: 197828 - DNA, 25 bp, Canis familiaris
taggcaagagcgaaccgtctcacag

SEQ ID NO: 197829 - DNA, 25 bp, Canis familiaris
taggaagagcagttagcgcaccacc

SEQ ID NO: 197830 - DNA, 25 bp, Canis familiaris
tatggaaggcgcttcaccatcaaga

SEQ ID NO: 197831 - DNA, 25 bp, Canis familiaris
taggattggatttcacgctgccagg

SEQ ID NO: 197832 - DNA, 25 bp, Canis familiaris
tatggtcgtgatcgtgactattcag

SEQ ID NO: 197833 - DNA, 25 bp, Canis familiaris
tatcgtcctgagcgttttcatcgcc

SEQ ID NO: 197834 - DNA, 25 bp, Canis familiaris
tatcgtttggcatgtgtttctcacc

SEQ ID NO: 197835 - DNA, 25 bp, Canis familiaris
tatggtctcaaatcatttctcaccc

SEQ ID NO: 197836 - DNA, 25 bp, Canis familiaris
tatgtgtttcaatatctttcccggt

SEQ ID NO: 197837 - DNA, 25 bp, Canis familiaris
tatgttttcaagttcccaagggcag

SEQ ID NO: 197838 - DNA, 25 bp, Canis familiaris
tatgattttaactttggcccaggga

SEQ ID NO: 197839 - DNA, 25 bp, Canis familiaris
tatgattgattacctcatctggccc

SEQ ID NO: 197840 - DNA, 25 bp, Canis familiaris
tatgattgattacctcatctggccc

SEQ ID NO: 197841 - DNA, 25 bp, Canis familiaris
tatgatcgtgtctgcttcgaagcat

SEQ ID NO: 197842 - DNA, 25 bp, Canis familiaris
tatgttttcctggtctggagcattt

SEQ ID NO: 197843 - DNA, 25 bp, Canis familiaris
tatgtttacctcactggtgcattta

SEQ ID NO: 197844 - DNA, 25 bp, Canis familiaris
tatgtttacataccccagtcaggaa

SEQ ID NO: 197845 - DNA, 25 bp, Canis familiaris
tatgtttaataccgcctattccagg

SEQ ID NO: 197846 - DNA, 25 bp, Canis familiaris
tatgttaaactctgactctgtccaa

SEQ ID NO: 197847 - DNA, 25 bp, Canis familiaris
tatgattagaatccatacccctccc

SEQ ID NO: 197848 - DNA, 25 bp, Canis familiaris
tatcctgaagtagtacttccccctt

SEQ ID NO: 197849 - DNA, 25 bp, Canis familiaris
tatcctgaccctgaagtaccccatt

SEQ ID NO: 197850 - DNA, 25 bp, Canis familiaris
tatcaaagccctcaaggaaccacca

SEQ ID NO: 197851 - DNA, 25 bp, Canis familiaris
tatataacccctgtgaaacacccct

SEQ ID NO: 197852 - DNA, 25 bp, Canis familiaris
tattaacaccttgggatcttaccgc

SEQ ID NO: 197853 - DNA, 25 bp, Canis familiaris
tatgtataccattagaagttctacc

SEQ ID NO: 197854 - DNA, 25 bp, Canis familiaris
tataagaccaaaagagttctccctc

SEQ ID NO: 197855 - DNA, 25 bp, Canis familiaris
tataatgccctaaacgatgtccacc

SEQ ID NO: 197856 - DNA, 25 bp, Canis familiaris
tatgagaaactgagccgtggcctac

SEQ ID NO: 197857 - DNA, 25 bp, Canis familiaris
tatggacagcacgggggttcctgac

SEQ ID NO: 197858 - DNA, 25 bp, Canis familiaris
tatcgaatccctgccgttagcgact

SEQ ID NO: 197859 - DNA, 25 bp, Canis familiaris
tattaattatgctgcccttagggcc

SEQ ID NO: 197860 - DNA, 25 bp, Canis familiaris
tatctaattctgtcttgctttcggt

SEQ ID NO: 197861 - DNA, 25 bp, Canis familiaris
tatctagagctcacatctctgtccg

SEQ ID NO: 197862 - DNA, 25 bp, Canis familiaris
tatctcgagctacaggctgttccca

SEQ ID NO: 197863 - DNA, 25 bp, Canis familiaris
tatccgagctgaccggtttggaggg

SEQ ID NO: 197864 - DNA, 25 bp, Canis familiaris
tatccaaggtgctgaatcttggagg

SEQ ID NO: 197865 - DNA, 25 bp, Canis familiaris
tatgacctggttgcagtctgtgaga

SEQ ID NO: 197866 - DNA, 25 bp, Canis familiaris
tatgacgctgggcacgttgagtgaa

SEQ ID NO: 197867 - DNA, 25 bp, Canis familiaris
ttgcctgggacctggggtgaaaact

SEQ ID NO: 197868 - DNA, 25 bp, Canis familiaris
tatcttggacccctgagagggaaaa

SEQ ID NO: 197869 - DNA, 25 bp, Canis familiaris
tatcttggaccactgagaggaaaaa

SEQ ID NO: 197870 - DNA, 25 bp, Canis familiaris
tatccagggcagctagaaacaacta

SEQ ID NO: 197871 - DNA, 25 bp, Canis familiaris
tatccaggccacattgaagtcaggt

SEQ ID NO: 197872 - DNA, 25 bp, Canis familiaris
tattgagacctcgttccaggtggcc

SEQ ID NO: 197873 - DNA, 25 bp, Canis familiaris
tattaaggccatgcataggggtccg

SEQ ID NO: 197874 - DNA, 25 bp, Canis familiaris
tatataagcttcacaaaggtaccaa

SEQ ID NO: 197875 - DNA, 25 bp, Canis familiaris
tatacaactccgaaaaggccccaat

SEQ ID NO: 197876 - DNA, 25 bp, Canis familiaris
tatacaacttcgaaaaggacctaat

SEQ ID NO: 197877 - DNA, 25 bp, Canis familiaris
tatccaaatgtgaaaccaaacctaa

SEQ ID NO: 197878 - DNA, 25 bp, Canis familiaris
tatgcagaaaggaaacacacacaca

SEQ ID NO: 197879 - DNA, 25 bp, Canis familiaris
tatcatgaaaccacacacgtcactc

SEQ ID NO: 197880 - DNA, 25 bp, Canis familiaris
tatggaacctggccaactgccagct

SEQ ID NO: 197881 - DNA, 25 bp, Canis familiaris
tatggaagccatagccaagccctat

SEQ ID NO: 197882 - DNA, 25 bp, Canis familiaris
tatggaggcctgaaaatgccccacc

SEQ ID NO: 197883 - DNA, 25 bp, Canis familiaris
tatggacacctggatgacccagcca

SEQ ID NO: 197884 - DNA, 25 bp, Canis familiaris
tatggacactcacaccatgtcatcc

SEQ ID NO: 197885 - DNA, 25 bp, Canis familiaris
tatgcaccagtaaagatcatgtctt

SEQ ID NO: 197886 - DNA, 25 bp, Canis familiaris
tatgcacatcgtctacagctgggta

SEQ ID NO: 197887 - DNA, 25 bp, Canis familiaris
ttctcatcctgctgattctgtggta

SEQ ID NO: 197888 - DNA, 25 bp, Canis familiaris
tatcttgctcctggtagtgcgttac

SEQ ID NO: 197889 - DNA, 25 bp, Canis familiaris
tatttgacaaggatggcgatggaac

SEQ ID NO: 197890 - DNA, 25 bp, Canis familiaris
tatggtacagaaatgctcacagatg

SEQ ID NO: 197891 - DNA, 25 bp, Canis familiaris
tatggaaggacttgcatccagcttc

SEQ ID NO: 197892 - DNA, 25 bp, Canis familiaris
tatgctgaaaacagcccagtcccac

SEQ ID NO: 197893 - DNA, 25 bp, Canis familiaris
tatggaagagacacctctgacccgt

SEQ ID NO: 197894 - DNA, 25 bp, Canis familiaris
taggaagaagcatcttctttctagg

SEQ ID NO: 197895 - DNA, 25 bp, Canis familiaris
ttgtaagggcccattgttgcgccag

SEQ ID NO: 197896 - DNA, 25 bp, Canis familiaris
tattcaacggctctttggctctaaa

SEQ ID NO: 197897 - DNA, 25 bp, Canis familiaris
tatgctcaatagccgttttgcccaa

SEQ ID NO: 197898 - DNA, 25 bp, Canis familiaris
tatgacttgatgccactttgtccca

SEQ ID NO: 197899 - DNA, 25 bp, Canis familiaris
tatccttgggaccagctgatccagg

SEQ ID NO: 197900 - DNA, 25 bp, Canis familiaris
tatcctcgggagcagctccgggtgt

SEQ ID NO: 197901 - DNA, 25 bp, Canis familiaris
tatcaccagggggactcgggactgt

SEQ ID NO: 197902 - DNA, 25 bp, Canis familiaris
tatcccaattggttcaaggccctta

SEQ ID NO: 197903 - DNA, 25 bp, Canis familiaris
tatgcccacttgtgaccagagacca

SEQ ID NO: 197904 - DNA, 25 bp, Canis familiaris
tatcaccatctttggaacacgaagt

SEQ ID NO: 197905 - DNA, 25 bp, Canis familiaris
tatgctgttttgtgaacctgtagaa

SEQ ID NO: 197906 - DNA, 25 bp, Canis familiaris
tatgcttgagttgctaactctggaa

SEQ ID NO: 197907 - DNA, 25 bp, Canis familiaris
tatgcttgattatgctggatccagg

SEQ ID NO: 197908 - DNA, 25 bp, Canis familiaris
tatgctgtattcagtaggctcagta

SEQ ID NO: 197909 - DNA, 25 bp, Canis familiaris
tatgctcataactgatgtggctgga

SEQ ID NO: 197910 - DNA, 25 bp, Canis familiaris
tatgtcctacgtggcagtggcagca

SEQ ID NO: 197911 - DNA, 25 bp, Canis familiaris
tatgccagtcactctcaattcatca

SEQ ID NO: 197912 - DNA, 25 bp, Canis familiaris
tatccttcagaaaccactatgcaca

SEQ ID NO: 197913 - DNA, 25 bp, Canis familiaris
tatccttccctgggagctgagctca

SEQ ID NO: 197914 - DNA, 25 bp, Canis familiaris
tatccatctcgggcaatgactttca

SEQ ID NO: 197915 - DNA, 25 bp, Canis familiaris
tatcgatctcgattcaaatccaaca

SEQ ID NO: 197916 - DNA, 25 bp, Canis familiaris
tatggactccagccatagtcccaca

SEQ ID NO: 197917 - DNA, 25 bp, Canis familiaris
tatggagcaccaactgtatgcccca

SEQ ID NO: 197918 - DNA, 25 bp, Canis familiaris
tatggaacctatggacagcccactg

SEQ ID NO: 197919 - DNA, 25 bp, Canis familiaris
taggccacgtcaaatcaggcctcct

SEQ ID NO: 197920 - DNA, 25 bp, Canis familiaris
taggctccttgtatctggcctacat

SEQ ID NO: 197921 - DNA, 25 bp, Canis familiaris
tatggccctgttaatctgatcttca

SEQ ID NO: 197922 - DNA, 25 bp, Canis familiaris
tatgcagtcctgtggtctacttgga

SEQ ID NO: 197923 - DNA, 25 bp, Canis familiaris
tatgattactaccagcgtcactatg

SEQ ID NO: 197924 - DNA, 25 bp, Canis familiaris
tatgaaatctaccatgtgtcagaga

SEQ ID NO: 197925 - DNA, 25 bp, Canis familiaris
tatgggcctgacaagtgcctgcaac

SEQ ID NO: 197926 - DNA, 25 bp, Canis familiaris
tatggagcccacggctccaagcaca

SEQ ID NO: 197927 - DNA, 25 bp, Canis familiaris
tatgtggacgaggcctccaagaagg

SEQ ID NO: 197928 - DNA, 25 bp, Canis familiaris
tatgggaggactgtggccagagaag

SEQ ID NO: 197929 - DNA, 25 bp, Canis familiaris
tatgggggagctgggaccgtatcct

SEQ ID NO: 197930 - DNA, 25 bp, Canis familiaris
tatcgtgagaacatgtaccgctacc

SEQ ID NO: 197931 - DNA, 25 bp, Canis familiaris
tatgcctgacaaggggcaccagcta

SEQ ID NO: 197932 - DNA, 25 bp, Canis familiaris
tatggcgcagatgcaggggccctat

SEQ ID NO: 197933 - DNA, 25 bp, Canis familiaris
tatgcggagtgccatggtgtcatct

SEQ ID NO: 197934 - DNA, 25 bp, Canis familiaris
tatgggcaggcattgttgcacctcc

SEQ ID NO: 197935 - DNA, 25 bp, Canis familiaris
taggaggccaggatcacactgccac

SEQ ID NO: 197936 - DNA, 25 bp, Canis familiaris
tatgacggcctggattacatcaccc

SEQ ID NO: 197937 - DNA, 25 bp, Canis familiaris
tatagctgggcaggcagctcctgca

SEQ ID NO: 197938 - DNA, 25 bp, Canis familiaris
tatgatgtgtgtgccatctgcctgg

SEQ ID NO: 197939 - DNA, 25 bp, Canis familiaris
tatgggctgtctacactgctatgga

SEQ ID NO: 197940 - DNA, 25 bp, Canis familiaris
tatgtggtgtatatccttcagaaaa

SEQ ID NO: 197941 - DNA, 25 bp, Canis familiaris
tatgctggtgcttagactgcttctg

SEQ ID NO: 197942 - DNA, 25 bp, Canis familiaris
tatgtgtctgtgttcatctgtatgt

SEQ ID NO: 197943 - DNA, 25 bp, Canis familiaris
taggccagcaatgcttgtagtgctc

SEQ ID NO: 197944 - DNA, 25 bp, Canis familiaris
taggcagccactgatctgctttctg

SEQ ID NO: 197945 - DNA, 25 bp, Canis familiaris
tataagctagcggttgccttctgtt

SEQ ID NO: 197946 - DNA, 25 bp, Canis familiaris
tatccacgacgtctccatatgcgtg

SEQ ID NO: 197947 - DNA, 25 bp, Canis familiaris
tatctccaaagacatccagacagat

SEQ ID NO: 197948 - DNA, 25 bp, Canis familiaris
tatcccagattacagcataaaacaa

SEQ ID NO: 197949 - DNA, 25 bp, Canis familiaris
tatccacaggcataatattacaaaa

SEQ ID NO: 197950 - DNA, 25 bp, Canis familiaris
tatgcccttctgtccaagtacaaag

SEQ ID NO: 197951 - DNA, 25 bp, Canis familiaris
tatacctcacgtcgaagtgggagac

SEQ ID NO: 197952 - DNA, 25 bp, Canis familiaris
tatcgtctcggtcggaggcggagtt

SEQ ID NO: 197953 - DNA, 25 bp, Canis familiaris
tatggtccaggttgccttcggagat

SEQ ID NO: 197954 - DNA, 25 bp, Canis familiaris
tatggctacgtgaccatctccaagg

SEQ ID NO: 197955 - DNA, 25 bp, Canis familiaris
taggccacagcaactctgggccagc

SEQ ID NO: 197956 - DNA, 25 bp, Canis familiaris
tatgacaacgaatttggctacagca

SEQ ID NO: 197957 - DNA, 25 bp, Canis familiaris
tatgacaccgactctggaatctgcc

SEQ ID NO: 197958 - DNA, 25 bp, Canis familiaris
taggccaggagcccattggattcac

SEQ ID NO: 197959 - DNA, 25 bp, Canis familiaris
taggctatggacctcatgtgcagat

SEQ ID NO: 197960 - DNA, 25 bp, Canis familiaris
taggccagtgaccagcatggatgcc

SEQ ID NO: 197961 - DNA, 25 bp, Canis familiaris
taggcagcgcgagcagtggcatact

SEQ ID NO: 197962 - DNA, 25 bp, Canis familiaris
taggcagcagctaaccagcctactc

SEQ ID NO: 197963 - DNA, 25 bp, Canis familiaris
tatggagcccgatcacaagactgca

SEQ ID NO: 197964 - DNA, 25 bp, Canis familiaris
taggatcccagatcatcctatccgc

SEQ ID NO: 197965 - DNA, 25 bp, Canis familiaris
taggagtgccagccaatggaaccgc

SEQ ID NO: 197966 - DNA, 25 bp, Canis familiaris
tatggcggcacaccaagagccaggc

SEQ ID NO: 197967 - DNA, 25 bp, Canis familiaris
taggctgagcccataaccagctcta

SEQ ID NO: 197968 - DNA, 25 bp, Canis familiaris
taggctgtcctaccatacagcctct

SEQ ID NO: 197969 - DNA, 25 bp, Canis familiaris
taggcagttccgtctaagatctcta

SEQ ID NO: 197970 - DNA, 25 bp, Canis familiaris
taggcatcttcccactatagatcct

SEQ ID NO: 197971 - DNA, 25 bp, Canis familiaris
tatggactgtcctatgctgaaatct

SEQ ID NO: 197972 - DNA, 25 bp, Canis familiaris
tatcgaggtgccttgctcagtatgc

SEQ ID NO: 197973 - DNA, 25 bp, Canis familiaris
tatcggggtcattgccaatgatatg

SEQ ID NO: 197974 - DNA, 25 bp, Canis familiaris
tatcgggttgattgccgaagtgaag

SEQ ID NO: 197975 - DNA, 25 bp, Canis familiaris
ttcgaggaggggccccgtgagaact

SEQ ID NO: 197976 - DNA, 25 bp, Canis familiaris
taggaggaggtgctcccgtgaacca

SEQ ID NO: 197977 - DNA, 25 bp, Canis familiaris
ttggggatggtggtgctacgggtcc

SEQ ID NO: 197978 - DNA, 25 bp, Canis familiaris
tatgctggcggggcgaggaagggtc

SEQ ID NO: 197979 - DNA, 25 bp, Canis familiaris
tatggtggtggcctggtgatgggga

SEQ ID NO: 197980 - DNA, 25 bp, Canis familiaris
tatggtggtgccctgggataggcca

SEQ ID NO: 197981 - DNA, 25 bp, Canis familiaris
tatggagggcctacttgtgggacat

SEQ ID NO: 197982 - DNA, 25 bp, Canis familiaris
taggaggtgtctactacttagccca

SEQ ID NO: 197983 - DNA, 25 bp, Canis familiaris
taggagcgcttaacttccttacaca

SEQ ID NO: 197984 - DNA, 25 bp, Canis familiaris
taggacgtgatttcgttctgtacca

SEQ ID NO: 197985 - DNA, 25 bp, Canis familiaris
tatggatagatgtttcagtttttca

SEQ ID NO: 197986 - DNA, 25 bp, Canis familiaris
tatggtcctgtttcagatgtgtgtt

SEQ ID NO: 197987 - DNA, 25 bp, Canis familiaris
tatgtgacactttggttgatgtagt

SEQ ID NO: 197988 - DNA, 25 bp, Canis familiaris
tatgtgtcactttttttaattcctt

SEQ ID NO: 197989 - DNA, 25 bp, Canis familiaris
tatgttgcaatttttttcctaactt

SEQ ID NO: 197990 - DNA, 25 bp, Canis familiaris
tatgttgaatcttgataacccaaaa

SEQ ID NO: 197991 - DNA, 25 bp, Canis familiaris
tattgctgaatacacccccaagaac

SEQ ID NO: 197992 - DNA, 25 bp, Canis familiaris
tatgtgtgataacacctctcgcgag

SEQ ID NO: 197993 - DNA, 25 bp, Canis familiaris
tatgatgtgatgcaggaccccgagt

SEQ ID NO: 197994 - DNA, 25 bp, Canis familiaris
tatcattagggaaccccagcagggg

SEQ ID NO: 197995 - DNA, 25 bp, Canis familiaris
tatcatctaggaatactggccagcg

SEQ ID NO: 197996 - DNA, 25 bp, Canis familiaris
tatgcctcaggcaacctggggctta

SEQ ID NO: 197997 - DNA, 25 bp, Canis familiaris
tatgactgccgagcactgaggggtc

SEQ ID NO: 197998 - DNA, 25 bp, Canis familiaris
tatgactgccgagcactgaggggtc

SEQ ID NO: 197999 - DNA, 25 bp, Canis familiaris
tatgggcccaccaattgggcttccg

SEQ ID NO: 198000 - DNA, 25 bp, Canis familiaris
tatgggccagtagcatggggcttcc

SEQ ID NO: 198001 - DNA, 25 bp, Canis familiaris
tatggcgacacatcggggtcgtccg

SEQ ID NO: 198002 - DNA, 25 bp, Canis familiaris
taggctaaacacccggtttgcttct

SEQ ID NO: 198003 - DNA, 25 bp, Canis familiaris
taggagcataaacccgagttgtttt

SEQ ID NO: 198004 - DNA, 25 bp, Canis familiaris
tataaatacccccagatgtcgtttt

SEQ ID NO: 198005 - DNA, 25 bp, Canis familiaris
tattaacaccaatcgatgtcggttg

SEQ ID NO: 198006 - DNA, 25 bp, Canis familiaris
tatccaacccagtgtttcgtgctat

SEQ ID NO: 198007 - DNA, 25 bp, Canis familiaris
tatcctatttaatgtattcggcttt

SEQ ID NO: 198008 - DNA, 25 bp, Canis familiaris
tatcctttctattttgtatcgtcgt

SEQ ID NO: 198009 - DNA, 25 bp, Canis familiaris
taggctttactattttatgcttatg

SEQ ID NO: 198010 - DNA, 25 bp, Canis familiaris
tatgtgcatttataatagctatttt

SEQ ID NO: 198011 - DNA, 25 bp, Canis familiaris
tatgttttcaagttactgtgtttat

SEQ ID NO: 198012 - DNA, 25 bp, Canis familiaris
tatgcttagtagtttcacgtgctta

SEQ ID NO: 198013 - DNA, 25 bp, Canis familiaris
tatctacgtatgtatatatatgcat

SEQ ID NO: 198014 - DNA, 25 bp, Canis familiaris
tatgtacctgtgcttatatccgatc

SEQ ID NO: 198015 - DNA, 25 bp, Canis familiaris
tatgtacattaccttgaactcaaac

SEQ ID NO: 198016 - DNA, 25 bp, Canis familiaris
tatgaactttcgttccctcaacatt

SEQ ID NO: 198017 - DNA, 25 bp, Canis familiaris
tatgagttctctgtaccctgagtct

SEQ ID NO: 198018 - DNA, 25 bp, Canis familiaris
tatagcttactttacccagttcagc

SEQ ID NO: 198019 - DNA, 25 bp, Canis familiaris
tatgagtcttttttccaatggtgag

SEQ ID NO: 198020 - DNA, 25 bp, Canis familiaris
tatgagaatttttgttccatgattg

SEQ ID NO: 198021 - DNA, 25 bp, Canis familiaris
tatggatatctcattgctttcagat

SEQ ID NO: 198022 - DNA, 25 bp, Canis familiaris
tatggctcatcactttttgcccaat

SEQ ID NO: 198023 - DNA, 25 bp, Canis familiaris
taggcatatcatctctagccttcct

SEQ ID NO: 198024 - DNA, 25 bp, Canis familiaris
tatgagaacgagctagccttcctga

SEQ ID NO: 198025 - DNA, 25 bp, Canis familiaris
tatgaacacagagatgcagctgctg

SEQ ID NO: 198026 - DNA, 25 bp, Canis familiaris
tatgctgaaaaccatcactgctgcc

SEQ ID NO: 198027 - DNA, 25 bp, Canis familiaris
ttgccgattcaccagcacttgctcg

SEQ ID NO: 198028 - DNA, 25 bp, Canis familiaris
tatgctggaacctcacttcttatta

SEQ ID NO: 198029 - DNA, 25 bp, Canis familiaris
tatgatggaaaacagtgtcattctg

SEQ ID NO: 198030 - DNA, 25 bp, Canis familiaris
tatgatgggcactcccttattgcgt

SEQ ID NO: 198031 - DNA, 25 bp, Canis familiaris
tatgtcggagcttctcccgatgagt

SEQ ID NO: 198032 - DNA, 25 bp, Canis familiaris
tatgaccagagggctgcccgtgggg

SEQ ID NO: 198033 - DNA, 25 bp, Canis familiaris
taggctagaggcctcttctgggatc

SEQ ID NO: 198034 - DNA, 25 bp, Canis familiaris
taggcacagtggttctttggttaga

SEQ ID NO: 198035 - DNA, 25 bp, Canis familiaris
tatggactggactaatttgtttttc

SEQ ID NO: 198036 - DNA, 25 bp, Canis familiaris
tatggcaatttccagccttgttttc

SEQ ID NO: 198037 - DNA, 25 bp, Canis familiaris
tatgatcacttttaccacgtttatt

SEQ ID NO: 198038 - DNA, 25 bp, Canis familiaris
tatgctactattaaccccaactttc

SEQ ID NO: 198039 - DNA, 25 bp, Canis familiaris
ttaatgttctaaacccaactgtggg

SEQ ID NO: 198040 - DNA, 25 bp, Canis familiaris
ttatagcttcaatattacggttggc

SEQ ID NO: 198041 - DNA, 25 bp, Canis familiaris
tatatggttcaatttttcaggttaa

SEQ ID NO: 198042 - DNA, 25 bp, Canis familiaris
tataagttaattggtttgtatgaga

SEQ ID NO: 198043 - DNA, 25 bp, Canis familiaris
tatgaagtccgttgatgttgttgta

SEQ ID NO: 198044 - DNA, 25 bp, Canis familiaris
tatgcatagccatacttgttttgat

SEQ ID NO: 198045 - DNA, 25 bp, Canis familiaris
tatgatgaccatgcactcgttagaa

SEQ ID NO: 198046 - DNA, 25 bp, Canis familiaris
tatggagccagccttctttgatgac

SEQ ID NO: 198047 - DNA, 25 bp, Canis familiaris
tatggacccatcatttctagtctcc

SEQ ID NO: 198048 - DNA, 25 bp, Canis familiaris
tatagcaggatctctttcgaggccc

SEQ ID NO: 198049 - DNA, 25 bp, Canis familiaris
tataaaatctgtgactctgaggccg

SEQ ID NO: 198050 - DNA, 25 bp, Canis familiaris
tatagttagttcccacataggcaca

SEQ ID NO: 198051 - DNA, 25 bp, Canis familiaris
tatgagttcagcatgacccgggaga

SEQ ID NO: 198052 - DNA, 25 bp, Canis familiaris
tatcggaactaggctcggggagaac

SEQ ID NO: 198053 - DNA, 25 bp, Canis familiaris
tatgcggacgtgtgtcgcgtggaga

SEQ ID NO: 198054 - DNA, 25 bp, Canis familiaris
tatcggccaggatcgtggggaggtt

SEQ ID NO: 198055 - DNA, 25 bp, Canis familiaris
tttggccggaggctggaccggatcg

SEQ ID NO: 198056 - DNA, 25 bp, Canis familiaris
tttgtgctcggacgggggactgtcc

SEQ ID NO: 198057 - DNA, 25 bp, Canis familiaris
tatggtctcgaggtggggagcacgt

SEQ ID NO: 198058 - DNA, 25 bp, Canis familiaris
tatggcttggtggatgggctggtca

SEQ ID NO: 198059 - DNA, 25 bp, Canis familiaris
tatgggggtgcttgggtagctcagt

SEQ ID NO: 198060 - DNA, 25 bp, Canis familiaris
taggccgagatgggtgcgtacaagt

SEQ ID NO: 198061 - DNA, 25 bp, Canis familiaris
tatggcacgagtgctccgcaaacgt

SEQ ID NO: 198062 - DNA, 25 bp, Canis familiaris
tatgccctgagtgtaggctaccgcc

SEQ ID NO: 198063 - DNA, 25 bp, Canis familiaris
tatcaccggttttggcattctggga

SEQ ID NO: 198064 - DNA, 25 bp, Canis familiaris
tatccctttttgaagtttgtggaca

SEQ ID NO: 198065 - DNA, 25 bp, Canis familiaris
tatcccctttttttgttgctaagca

SEQ ID NO: 198066 - DNA, 25 bp, Canis familiaris
tatctccctttaaattcaactactg

SEQ ID NO: 198067 - DNA, 25 bp, Canis familiaris
tatctagcttttgagtctcaactaa

SEQ ID NO: 198068 - DNA, 25 bp, Canis familiaris
tatctagctttgtgagtctcaacaa

SEQ ID NO: 198069 - DNA, 25 bp, Canis familiaris
tatgctaccctgttggtgctgacga

SEQ ID NO: 198070 - DNA, 25 bp, Canis familiaris
tatgccctcacttagcctggagtga

SEQ ID NO: 198071 - DNA, 25 bp, Canis familiaris
tatccctacttacattaggattcac

SEQ ID NO: 198072 - DNA, 25 bp, Canis familiaris
ttagcctaattcacatctgggatat

SEQ ID NO: 198073 - DNA, 25 bp, Canis familiaris
tttcctggttccctggggagattca

SEQ ID NO: 198074 - DNA, 25 bp, Canis familiaris
ttttcgaggatcccttggagggtca

SEQ ID NO: 198075 - DNA, 25 bp, Canis familiaris
tttcggggataccctgggtggtgca

SEQ ID NO: 198076 - DNA, 25 bp, Canis familiaris
tatgattggggacccctggggggct

SEQ ID NO: 198077 - DNA, 25 bp, Canis familiaris
tatgttgggggcagtggggggcctc

SEQ ID NO: 198078 - DNA, 25 bp, Canis familiaris
ttgtagggactgagttaccggcctc

SEQ ID NO: 198079 - DNA, 25 bp, Canis familiaris
tatgtggtggactgtttggcctggg

SEQ ID NO: 198080 - DNA, 25 bp, Canis familiaris
tttagttgacagcagtacgcctggg

SEQ ID NO: 198081 - DNA, 25 bp, Canis familiaris
tatgtggttaatctggacccggctg

SEQ ID NO: 198082 - DNA, 25 bp, Canis familiaris
tatgggcctaaaaggtccctagtgt

SEQ ID NO: 198083 - DNA, 25 bp, Canis familiaris
tatagatcctttaggggcaccatga

SEQ ID NO: 198084 - DNA, 25 bp, Canis familiaris
tatgagccctgtacagagacccgag

SEQ ID NO: 198085 - DNA, 25 bp, Canis familiaris
tatggctcactgtaagcaaccaaaa

SEQ ID NO: 198086 - DNA, 25 bp, Canis familiaris
tatcccatagattaacccagaagaa

SEQ ID NO: 198087 - DNA, 25 bp, Canis familiaris
tatccgttagttggccacagaggtc

SEQ ID NO: 198088 - DNA, 25 bp, Canis familiaris
taggctttatgtttgcccactgggc

SEQ ID NO: 198089 - DNA, 25 bp, Canis familiaris
tatgagctttggtgagcccaggacc

SEQ ID NO: 198090 - DNA, 25 bp, Canis familiaris
tatgttgtagtaggagcccagagag

SEQ ID NO: 198091 - DNA, 25 bp, Canis familiaris
tatggtgggttcaaggcaatcaggc

SEQ ID NO: 198092 - DNA, 25 bp, Canis familiaris
tatggtgtagttacggagatcctaa

SEQ ID NO: 198093 - DNA, 25 bp, Canis familiaris
tatggtgtcctctcggaatgactgc

SEQ ID NO: 198094 - DNA, 25 bp, Canis familiaris
tatggcttcccaaatgcaaaattcc

SEQ ID NO: 198095 - DNA, 25 bp, Canis familiaris
tatggctccctaaccagtaatcacc

SEQ ID NO: 198096 - DNA, 25 bp, Canis familiaris
tatagatccctgagaagtaaaagcc

SEQ ID NO: 198097 - DNA, 25 bp, Canis familiaris
tataatggggctagaattaataacc

SEQ ID NO: 198098 - DNA, 25 bp, Canis familiaris
tatgaaagggatgaggacaacaacc

SEQ ID NO: 198099 - DNA, 25 bp, Canis familiaris
tatatagggagctagggcacacaat

SEQ ID NO: 198100 - DNA, 25 bp, Canis familiaris
tttaagggccagcagccaccatagt

SEQ ID NO: 198101 - DNA, 25 bp, Canis familiaris
tatgctcaagcctcaggactgacct

SEQ ID NO: 198102 - DNA, 25 bp, Canis familiaris
tatccaacccacttatgtgacctta

SEQ ID NO: 198103 - DNA, 25 bp, Canis familiaris
tatcctggcccacatcattgaagct

SEQ ID NO: 198104 - DNA, 25 bp, Canis familiaris
tatccgggcggcttagcgcagagat

SEQ ID NO: 198105 - DNA, 25 bp, Canis familiaris
tatctgaggcgcagcttggcagcaa

SEQ ID NO: 198106 - DNA, 25 bp, Canis familiaris
tatgtgccaggcacagtgccatgaa

SEQ ID NO: 198107 - DNA, 25 bp, Canis familiaris
tatgtgcgcgtcaacaggtaacact

SEQ ID NO: 198108 - DNA, 25 bp, Canis familiaris
tatgtctgtgccatctgaaccaagc

SEQ ID NO: 198109 - DNA, 25 bp, Canis familiaris
tttctgtgctacctgaagacatagt

SEQ ID NO: 198110 - DNA, 25 bp, Canis familiaris
tttctgagcatacctggaaaatgct

SEQ ID NO: 198111 - DNA, 25 bp, Canis familiaris
tatgtcagacaagttcagtaaagct

SEQ ID NO: 198112 - DNA, 25 bp, Canis familiaris
tatgccacagaagttgcttgccgat

SEQ ID NO: 198113 - DNA, 25 bp, Canis familiaris
tatgatcacagttggtcttgccttc

SEQ ID NO: 198114 - DNA, 25 bp, Canis familiaris
tatgcatagctttctgtttccttaa

SEQ ID NO: 198115 - DNA, 25 bp, Canis familiaris
tatgatgagtgaatcgtcctccctt

SEQ ID NO: 198116 - DNA, 25 bp, Canis familiaris
tatgtaggtatgcatgtgccgcctg

SEQ ID NO: 198117 - DNA, 25 bp, Canis familiaris
tatgtttctatgttggcctgtcttg

SEQ ID NO: 198118 - DNA, 25 bp, Canis familiaris
tatgtttcctgagggactatttatt

SEQ ID NO: 198119 - DNA, 25 bp, Canis familiaris
tatgctttcagaataaattattttt

SEQ ID NO: 198120 - DNA, 25 bp, Canis familiaris
tatgctcctgcatcaagaattggtt

SEQ ID NO: 198121 - DNA, 25 bp, Canis familiaris
tatcatcctcagtctagaaccagat

SEQ ID NO: 198122 - DNA, 25 bp, Canis familiaris
tatgatccatgaaccagaacctcac

SEQ ID NO: 198123 - DNA, 25 bp, Canis familiaris
tatgtcagctcatccagagatgccc

SEQ ID NO: 198124 - DNA, 25 bp, Canis familiaris
tatgagagctcaggctgcaggccct

SEQ ID NO: 198125 - DNA, 25 bp, Canis familiaris
tatgaattcacctacgagcgtacgc

SEQ ID NO: 198126 - DNA, 25 bp, Canis familiaris
tatggtccactttcagggtactgta

SEQ ID NO: 198127 - DNA, 25 bp, Canis familiaris
tatggattcttttcagcccattctt

SEQ ID NO: 198128 - DNA, 25 bp, Canis familiaris
tatggaattttatcccttcattaac

SEQ ID NO: 198129 - DNA, 25 bp, Canis familiaris
tatggaatgtaatcccggtcattaa

SEQ ID NO: 198130 - DNA, 25 bp, Canis familiaris
tattcaagtaccgctcaggtattgt

SEQ ID NO: 198131 - DNA, 25 bp, Canis familiaris
tataaatgttcctccttgtactgct

SEQ ID NO: 198132 - DNA, 25 bp, Canis familiaris
tatttatggctacacctttactccg

SEQ ID NO: 198133 - DNA, 25 bp, Canis familiaris
tatgttcatttgtaagtttttccac

SEQ ID NO: 198134 - DNA, 25 bp, Canis familiaris
ttgttactgtgatagtttagaaata

SEQ ID NO: 198135 - DNA, 25 bp, Canis familiaris
tatggtagcttttacttttttatga

SEQ ID NO: 198136 - DNA, 25 bp, Canis familiaris
tatgttcctattctttctgttttga

SEQ ID NO: 198137 - DNA, 25 bp, Canis familiaris
tatgtgacctttgtcgtcttttctc

SEQ ID NO: 198138 - DNA, 25 bp, Canis familiaris
tatgtatttctttgtggtttttatt

SEQ ID NO: 198139 - DNA, 25 bp, Canis familiaris
tatttgcgcccagggggtttacact

SEQ ID NO: 198140 - DNA, 25 bp, Canis familiaris
tttgtgcctcacagggagcttttcc

SEQ ID NO: 198141 - DNA, 25 bp, Canis familiaris
tttgtcctcagccgggtttactaat

SEQ ID NO: 198142 - DNA, 25 bp, Canis familiaris
tatgtctaccttctgtttcaactac

SEQ ID NO: 198143 - DNA, 25 bp, Canis familiaris
tatacccttagcctgtttagtctga

SEQ ID NO: 198144 - DNA, 25 bp, Canis familiaris
tataccacttagctactatactcgc

SEQ ID NO: 198145 - DNA, 25 bp, Canis familiaris
tataacatttcatccagcaaactgg

SEQ ID NO: 198146 - DNA, 25 bp, Canis familiaris
tatgcccgtgtcaaccacaacaagt

SEQ ID NO: 198147 - DNA, 25 bp, Canis familiaris
tatctccgtgtcacgctcaactgaa

SEQ ID NO: 198148 - DNA, 25 bp, Canis familiaris
tatcattccttcaaataaagtaatt

SEQ ID NO: 198149 - DNA, 25 bp, Canis familiaris
tatgaaccagtttgtagaatgtcgt

SEQ ID NO: 198150 - DNA, 25 bp, Canis familiaris
tatgaatccttttgtgagcagttag

SEQ ID NO: 198151 - DNA, 25 bp, Canis familiaris
tatccccatatgcttggcagttatt

SEQ ID NO: 198152 - DNA, 25 bp, Canis familiaris
tatcccacattactgggtggtcact

SEQ ID NO: 198153 - DNA, 25 bp, Canis familiaris
tatccagaatttcacagctcttcct

SEQ ID NO: 198154 - DNA, 25 bp, Canis familiaris
tatccaagttggtcccatctatcca

SEQ ID NO: 198155 - DNA, 25 bp, Canis familiaris
tatccaattggactactatttatca

SEQ ID NO: 198156 - DNA, 25 bp, Canis familiaris
ttccgtcggactttttcgtcataga

SEQ ID NO: 198157 - DNA, 25 bp, Canis familiaris
tatcccttggaccttttcatattaa

SEQ ID NO: 198158 - DNA, 25 bp, Canis familiaris
tatgcctttggtgctcttgttttta

SEQ ID NO: 198159 - DNA, 25 bp, Canis familiaris
tatgacatttgactgcttcctggat

SEQ ID NO: 198160 - DNA, 25 bp, Canis familiaris
tatggctgctatagtcttcccagtt

SEQ ID NO: 198161 - DNA, 25 bp, Canis familiaris
tatccttatttctccagcagtactt

SEQ ID NO: 198162 - DNA, 25 bp, Canis familiaris
tatagtttttataccagcaagtttt

SEQ ID NO: 198163 - DNA, 25 bp, Canis familiaris
tatagctcttgcattttcctgggtt

SEQ ID NO: 198164 - DNA, 25 bp, Canis familiaris
tatgtacttgtattttgcacgtggt

SEQ ID NO: 198165 - DNA, 25 bp, Canis familiaris
tatgtacttgtaaattctttgcagt

SEQ ID NO: 198166 - DNA, 25 bp, Canis familiaris
tattagtgtaaatcttttggtggaa

SEQ ID NO: 198167 - DNA, 25 bp, Canis familiaris
tattgttgtaaatacttgggacaga

SEQ ID NO: 198168 - DNA, 25 bp, Canis familiaris
tatcccttacaatagcttggagcca

SEQ ID NO: 198169 - DNA, 25 bp, Canis familiaris
tatccactgatactgctaactcggg

SEQ ID NO: 198170 - DNA, 25 bp, Canis familiaris
tatctattgcatctgtaactgtcac

SEQ ID NO: 198171 - DNA, 25 bp, Canis familiaris
tatcgttctcttaaagtgccagtgt

SEQ ID NO: 198172 - DNA, 25 bp, Canis familiaris
tatgtcatttcttgtgggcaccagt

SEQ ID NO: 198173 - DNA, 25 bp, Canis familiaris
tatgtcatgggttgtcccctagtca

SEQ ID NO: 198174 - DNA, 25 bp, Canis familiaris
tatgatctactgaactcaacctagt

SEQ ID NO: 198175 - DNA, 25 bp, Canis familiaris
tatgatatatgcccacttgcacctt

SEQ ID NO: 198176 - DNA, 25 bp, Canis familiaris
tatggagatggcgagttcaccgtcc

SEQ ID NO: 198177 - DNA, 25 bp, Canis familiaris
tatggtgatagttttcatgccccct

SEQ ID NO: 198178 - DNA, 25 bp, Canis familiaris
tatgttatttgattagctccctcct

SEQ ID NO: 198179 - DNA, 25 bp, Canis familiaris
tatgatctattttattgctccctta

SEQ ID NO: 198180 - DNA, 25 bp, Canis familiaris
tatgtcttttaaatctactctctcc

SEQ ID NO: 198181 - DNA, 25 bp, Canis familiaris
tatgctgttaaaattgtacctgttc

SEQ ID NO: 198182 - DNA, 25 bp, Canis familiaris
tatgctttttgaattaacgttctcg

SEQ ID NO: 198183 - DNA, 25 bp, Canis familiaris
tatgttgttttactacctggttcac

SEQ ID NO: 198184 - DNA, 25 bp, Canis familiaris
tatggttttctacttcgtttcgagg

SEQ ID NO: 198185 - DNA, 25 bp, Canis familiaris
tatggatcatctctacttctgtatt

SEQ ID NO: 198186 - DNA, 25 bp, Canis familiaris
tatgtgacagggcccttctgagata

SEQ ID NO: 198187 - DNA, 25 bp, Canis familiaris
tatgtagcagctctccttctgagag

SEQ ID NO: 198188 - DNA, 25 bp, Canis familiaris
tatgttgctctagacttcgagcagg

SEQ ID NO: 198189 - DNA, 25 bp, Canis familiaris
tttccctacttctatggaagggact

SEQ ID NO: 198190 - DNA, 25 bp, Canis familiaris
ttggcccttttctgggggaagtgag

SEQ ID NO: 198191 - DNA, 25 bp, Canis familiaris
ttgcccagcttcattaagggggtgg

SEQ ID NO: 198192 - DNA, 25 bp, Canis familiaris
ttcaccggtgcctttaggggagctg

SEQ ID NO: 198193 - DNA, 25 bp, Canis familiaris
tatccctttgcctggtcatgttggc

SEQ ID NO: 198194 - DNA, 25 bp, Canis familiaris
tatccagcttcatctaggtggtcat

SEQ ID NO: 198195 - DNA, 25 bp, Canis familiaris
tatggcagcttctacatacgaatta

SEQ ID NO: 198196 - DNA, 25 bp, Canis familiaris
tatgagccatcttctcagacgcata

SEQ ID NO: 198197 - DNA, 25 bp, Canis familiaris
tatgaacatccattcgggcaagttt

SEQ ID NO: 198198 - DNA, 25 bp, Canis familiaris
ttattgccagcttgctggctagttt

SEQ ID NO: 198199 - DNA, 25 bp, Canis familiaris
tttagctgcagcggctgcgctgcca

SEQ ID NO: 198200 - DNA, 25 bp, Canis familiaris
tatctcagatgctctgtgctctcgt

SEQ ID NO: 198201 - DNA, 25 bp, Canis familiaris
tatccagtcatttttctgcgcttca

SEQ ID NO: 198202 - DNA, 25 bp, Canis familiaris
tatccaggctgtgctatccctgtac

SEQ ID NO: 198203 - DNA, 25 bp, Canis familiaris
tataaggcataattttcactgttct

SEQ ID NO: 198204 - DNA, 25 bp, Canis familiaris
tatcaaggcccatatccacatgttg

SEQ ID NO: 198205 - DNA, 25 bp, Canis familiaris
tatccagccccattgatcgctggct

SEQ ID NO: 198206 - DNA, 25 bp, Canis familiaris
tatgccactccaaaaccatggcctt

SEQ ID NO: 198207 - DNA, 25 bp, Canis familiaris
tatacagctccaacaactgtgcctc

SEQ ID NO: 198208 - DNA, 25 bp, Canis familiaris
tatgacaactcactcaagattgtca

SEQ ID NO: 198209 - DNA, 25 bp, Canis familiaris
tatgacaactcactcaagattgtca

SEQ ID NO: 198210 - DNA, 25 bp, Canis familiaris
tatgacaacagcctcaagatcatca

SEQ ID NO: 198211 - DNA, 25 bp, Canis familiaris
tatggaccatcactcggtgcatcag

SEQ ID NO: 198212 - DNA, 25 bp, Canis familiaris
tatgtgaccatgccctgcacatatc

SEQ ID NO: 198213 - DNA, 25 bp, Canis familiaris
tatgatgaccatctcagcatgtgat

SEQ ID NO: 198214 - DNA, 25 bp, Canis familiaris
tatgctgccaacgtgagcgtgattg

SEQ ID NO: 198215 - DNA, 25 bp, Canis familiaris
tatgtccagcctggagcccattgga

SEQ ID NO: 198216 - DNA, 25 bp, Canis familiaris
tatgtgcctcctgagaaattcgtct

SEQ ID NO: 198217 - DNA, 25 bp, Canis familiaris
tatccccctggagaatctgagcatc

SEQ ID NO: 198218 - DNA, 25 bp, Canis familiaris
tatccccgtcgttttctgagactaa

SEQ ID NO: 198219 - DNA, 25 bp, Canis familiaris
tatccacccagctttgttctggaaa

SEQ ID NO: 198220 - DNA, 25 bp, Canis familiaris
ttcaatagcctatttggtcttggca

SEQ ID NO: 198221 - DNA, 25 bp, Canis familiaris
tataaaccggtcgcctctggcagcg

SEQ ID NO: 198222 - DNA, 25 bp, Canis familiaris
tataaaccaaagctccttggccctt

SEQ ID NO: 198223 - DNA, 25 bp, Canis familiaris
tataaacccgagagcctgtgacctc

SEQ ID NO: 198224 - DNA, 25 bp, Canis familiaris
tataagagaccccaagcggtcctct

SEQ ID NO: 198225 - DNA, 25 bp, Canis familiaris
tataaggacctctttgctgcctttt

SEQ ID NO: 198226 - DNA, 25 bp, Canis familiaris
tatctcgagcaggtcgtggctggct

SEQ ID NO: 198227 - DNA, 25 bp, Canis familiaris
tatctagtgcatctcgaggcgggaa

SEQ ID NO: 198228 - DNA, 25 bp, Canis familiaris
tatacagttgcccgagggggacacc

SEQ ID NO: 198229 - DNA, 25 bp, Canis familiaris
tataattttcgccaccgagggacct

SEQ ID NO: 198230 - DNA, 25 bp, Canis familiaris
tataaggtgccagcctctggggacc

SEQ ID NO: 198231 - DNA, 25 bp, Canis familiaris
tttaggggccaagctggggtcacgt

SEQ ID NO: 198232 - DNA, 25 bp, Canis familiaris
tatggggagacctaaccgggtcctg

SEQ ID NO: 198233 - DNA, 25 bp, Canis familiaris
tatcggtgaacggggccgtggtcct

SEQ ID NO: 198234 - DNA, 25 bp, Canis familiaris
ttcggaaacctgtgaccgtgtcggc

SEQ ID NO: 198235 - DNA, 25 bp, Canis familiaris
ttcggaagaccttgtaacggttcag

SEQ ID NO: 198236 - DNA, 25 bp, Canis familiaris
ttggaattcccttgtaaccagtaag

SEQ ID NO: 198237 - DNA, 25 bp, Canis familiaris
tatgtgatattccctgttaaccttc

SEQ ID NO: 198238 - DNA, 25 bp, Canis familiaris
tatgtgtgcattgactttgtaccaa

SEQ ID NO: 198239 - DNA, 25 bp, Canis familiaris
tatgtggtccatgctttgtgatata

SEQ ID NO: 198240 - DNA, 25 bp, Canis familiaris
tatggagagtctgtgtgcgttatga

SEQ ID NO: 198241 - DNA, 25 bp, Canis familiaris
tatggaagtgctgttgctggtgctg

SEQ ID NO: 198242 - DNA, 25 bp, Canis familiaris
tatatagagtttgagctgaagcttc

SEQ ID NO: 198243 - DNA, 25 bp, Canis familiaris
tatacacagtttggaggaaaacgtc

SEQ ID NO: 198244 - DNA, 25 bp, Canis familiaris
tatagcacgtttttggtaaagtcct

SEQ ID NO: 198245 - DNA, 25 bp, Canis familiaris
tatactcgggttcggtaaggacagt

SEQ ID NO: 198246 - DNA, 25 bp, Canis familiaris
tatagctggggcttgggggcaggcc

SEQ ID NO: 198247 - DNA, 25 bp, Canis familiaris
tatgcgaggtgcctttgggaagccc

SEQ ID NO: 198248 - DNA, 25 bp, Canis familiaris
tatgcgaggtgcctttgggaagccc

SEQ ID NO: 198249 - DNA, 25 bp, Canis familiaris
tatctggccttttgctggaaacgcc

SEQ ID NO: 198250 - DNA, 25 bp, Canis familiaris
tatctggccaacagtgggaccatca

SEQ ID NO: 198251 - DNA, 25 bp, Canis familiaris
tatctggtcacaaacgtggcccaga

SEQ ID NO: 198252 - DNA, 25 bp, Canis familiaris
tatcgcagccaaaagagctgaacca

SEQ ID NO: 198253 - DNA, 25 bp, Canis familiaris
tatccatgccaaacggtcacaagta

SEQ ID NO: 198254 - DNA, 25 bp, Canis familiaris
tatcctccagttagtgttgccagta

SEQ ID NO: 198255 - DNA, 25 bp, Canis familiaris
tatgcttgacctatctgggccagta

SEQ ID NO: 198256 - DNA, 25 bp, Canis familiaris
tatgcttgacctatctgggccagta

SEQ ID NO: 198257 - DNA, 25 bp, Canis familiaris
tatgctgggcttcatcattggccaa

SEQ ID NO: 198258 - DNA, 25 bp, Canis familiaris
tatctggtcttattacctgccacag

SEQ ID NO: 198259 - DNA, 25 bp, Canis familiaris
tatgggtttgcagtacctgctccca

SEQ ID NO: 198260 - DNA, 25 bp, Canis familiaris
tatggtgtttgcgtctttcatccgc

SEQ ID NO: 198261 - DNA, 25 bp, Canis familiaris
tatggatattttaattgcttcccgt

SEQ ID NO: 198262 - DNA, 25 bp, Canis familiaris
tatgcgatattttagtcttgtccaa

SEQ ID NO: 198263 - DNA, 25 bp, Canis familiaris
tatgcgtatattaagtttctgcagt

SEQ ID NO: 198264 - DNA, 25 bp, Canis familiaris
tatgaattagttagatgtttgtggg

SEQ ID NO: 198265 - DNA, 25 bp, Canis familiaris
tataatattcgtgtgtctgtgtgtg

SEQ ID NO: 198266 - DNA, 25 bp, Canis familiaris
tatgactttcttcctgagcgggtgt

SEQ ID NO: 198267 - DNA, 25 bp, Canis familiaris
tatgcattttcttcacagcgcacgt

SEQ ID NO: 198268 - DNA, 25 bp, Canis familiaris
tatgaagtgctggaccactgctcct

SEQ ID NO: 198269 - DNA, 25 bp, Canis familiaris
tatgaggtgtggaccacaattcctg

SEQ ID NO: 198270 - DNA, 25 bp, Canis familiaris
tatgagtgtgggaccacaattcctg

SEQ ID NO: 198271 - DNA, 25 bp, Canis familiaris
tatgggtactgcggaaattcttgtg

SEQ ID NO: 198272 - DNA, 25 bp, Canis familiaris
tatgggtctcatgtatacttttgga

SEQ ID NO: 198273 - DNA, 25 bp, Canis familiaris
tatggtagtcagttttgtatttaga

SEQ ID NO: 198274 - DNA, 25 bp, Canis familiaris
tatggtgcactttttcgctatttaa

SEQ ID NO: 198275 - DNA, 25 bp, Canis familiaris
tatggtgtcattgtatcctattata

SEQ ID NO: 198276 - DNA, 25 bp, Canis familiaris
tatgcgttcttaatagactactgta

SEQ ID NO: 198277 - DNA, 25 bp, Canis familiaris
tatgctttcatgtattgggtcacac

SEQ ID NO: 198278 - DNA, 25 bp, Canis familiaris
tatgctccttggtgtggtcactgta

SEQ ID NO: 198279 - DNA, 25 bp, Canis familiaris
tatgccctataaatgtcttcagtgt

SEQ ID NO: 198280 - DNA, 25 bp, Canis familiaris
ttcttcaaaatcaatatggcggcta

SEQ ID NO: 198281 - DNA, 25 bp, Canis familiaris
tatcccatacccaaatgggcagcta

SEQ ID NO: 198282 - DNA, 25 bp, Canis familiaris
tatccaccacaaccaatgggaccag

SEQ ID NO: 198283 - DNA, 25 bp, Canis familiaris
tatccccaagagaccggaaccacaa

SEQ ID NO: 198284 - DNA, 25 bp, Canis familiaris
tatccccaagtgactcttaatcctc

SEQ ID NO: 198285 - DNA, 25 bp, Canis familiaris
tatgccatgcctaggtgctgttacc

SEQ ID NO: 198286 - DNA, 25 bp, Canis familiaris
tatgcctgtctggcactgctgttat

SEQ ID NO: 198287 - DNA, 25 bp, Canis familiaris
tatgctctgtcccaggatgtttgta

SEQ ID NO: 198288 - DNA, 25 bp, Canis familiaris
tatcctggaccacgagtgtcttgca

SEQ ID NO: 198289 - DNA, 25 bp, Canis familiaris
tatcctgttctctggcttatagcag

SEQ ID NO: 198290 - DNA, 25 bp, Canis familiaris
tataattctgcctctgcttatacgg

SEQ ID NO: 198291 - DNA, 25 bp, Canis familiaris
tataatctctcctccatgaatggca

SEQ ID NO: 198292 - DNA, 25 bp, Canis familiaris
tatgactctctgctcgtcaaggtca

SEQ ID NO: 198293 - DNA, 25 bp, Canis familiaris
tatgagctgcctgacggccaagtca

SEQ ID NO: 198294 - DNA, 25 bp, Canis familiaris
tatgactgccatgagttccaccaga

SEQ ID NO: 198295 - DNA, 25 bp, Canis familiaris
tatccatgcgcagagtctagcaccc

SEQ ID NO: 198296 - DNA, 25 bp, Canis familiaris
tatggtgtcaaggtccagcatccca

SEQ ID NO: 198297 - DNA, 25 bp, Canis familiaris
tatcgtggaaggactcatgaccaca

SEQ ID NO: 198298 - DNA, 25 bp, Canis familiaris
tatgtgggagagggctctggctcac

SEQ ID NO: 198299 - DNA, 25 bp, Canis familiaris
tatgctgtacccggcattcagctca

SEQ ID NO: 198300 - DNA, 25 bp, Canis familiaris
tatcgctagcgatgccattcctaat

SEQ ID NO: 198301 - DNA, 25 bp, Canis familiaris
tatcctgagccatgtaaccaacttc

SEQ ID NO: 198302 - DNA, 25 bp, Canis familiaris
tatctatggcccgtgaggcccatct

SEQ ID NO: 198303 - DNA, 25 bp, Canis familiaris
tatctctatccgggatactgcctcc

SEQ ID NO: 198304 - DNA, 25 bp, Canis familiaris
tatcctaatcctagatcgctctacc

SEQ ID NO: 198305 - DNA, 25 bp, Canis familiaris
tatcccagctgcaaggacagtcgaa

SEQ ID NO: 198306 - DNA, 25 bp, Canis familiaris
tatctgggcgcagcgacagtcgaca

SEQ ID NO: 198307 - DNA, 25 bp, Canis familiaris
tatacggtcgcctacaggtgatgaa

SEQ ID NO: 198308 - DNA, 25 bp, Canis familiaris
tatacggccctgtaaagtggcagca

SEQ ID NO: 198309 - DNA, 25 bp, Canis familiaris
tatcggcggccagaaagtcaccatg

SEQ ID NO: 198310 - DNA, 25 bp, Canis familiaris
tatgcttgctgggcccaagcagtcc

SEQ ID NO: 198311 - DNA, 25 bp, Canis familiaris
tatgtactgagattcctacaggtaa

SEQ ID NO: 198312 - DNA, 25 bp, Canis familiaris
tatgttggagaatctttggtctgat

SEQ ID NO: 198313 - DNA, 25 bp, Canis familiaris
tatgttggggcttctgatttcacct

SEQ ID NO: 198314 - DNA, 25 bp, Canis familiaris
tatgtctcttcacactgattctcat

SEQ ID NO: 198315 - DNA, 25 bp, Canis familiaris
tatgtccttcttacgttacatggaa

SEQ ID NO: 198316 - DNA, 25 bp, Canis familiaris
tatggtttcttcggttcatcatgga

SEQ ID NO: 198317 - DNA, 25 bp, Canis familiaris
tatattctccagaccaggcctctgg

SEQ ID NO: 198318 - DNA, 25 bp, Canis familiaris
tatgattccataactgacccgtagt

SEQ ID NO: 198319 - DNA, 25 bp, Canis familiaris
tatgttcaatatgtacttttcagta

SEQ ID NO: 198320 - DNA, 25 bp, Canis familiaris
tatgcttaggttatgattttcaggt

SEQ ID NO: 198321 - DNA, 25 bp, Canis familiaris
tatctggggctcctgttttttagct

SEQ ID NO: 198322 - DNA, 25 bp, Canis familiaris
tatctcctagcccttaaattctgtc

SEQ ID NO: 198323 - DNA, 25 bp, Canis familiaris
tatgatcctcagactattaattact

SEQ ID NO: 198324 - DNA, 25 bp, Canis familiaris
tatgccactctgatttacttactcc

SEQ ID NO: 198325 - DNA, 25 bp, Canis familiaris
tatacacggatttcaacttcaccca

SEQ ID NO: 198326 - DNA, 25 bp, Canis familiaris
tataagtggtttgcaactccccttt

SEQ ID NO: 198327 - DNA, 25 bp, Canis familiaris
tatcaatttgtttgtcagacacctc

SEQ ID NO: 198328 - DNA, 25 bp, Canis familiaris
tatcctatctttgtagaactctata

SEQ ID NO: 198329 - DNA, 25 bp, Canis familiaris
tatcctctccaagacaaccttgatg

SEQ ID NO: 198330 - DNA, 25 bp, Canis familiaris
tatcctccccaagttgagctttgat

SEQ ID NO: 198331 - DNA, 25 bp, Canis familiaris
tatccacaccacaatttgcggtcta

SEQ ID NO: 198332 - DNA, 25 bp, Canis familiaris
tatactctcctcatttggggcaata

SEQ ID NO: 198333 - DNA, 25 bp, Canis familiaris
ttagtgtcacttgttggcggtttgc

SEQ ID NO: 198334 - DNA, 25 bp, Canis familiaris
tatagttcaggggtcgtcgtgttcg

SEQ ID NO: 198335 - DNA, 25 bp, Canis familiaris
tatatttcaggtttctttggttggg

SEQ ID NO: 198336 - DNA, 25 bp, Canis familiaris
tatctttaggatttttggtgaatga

SEQ ID NO: 198337 - DNA, 25 bp, Canis familiaris
tatctcttaggcatatattcaaaat

SEQ ID NO: 198338 - DNA, 25 bp, Canis familiaris
tattcactcaagactaaaagctaaa

SEQ ID NO: 198339 - DNA, 25 bp, Canis familiaris
ttacccaagatttaaagcagttgat

SEQ ID NO: 198340 - DNA, 25 bp, Canis familiaris
tttcctgaaattatcaaggtagatt

SEQ ID NO: 198341 - DNA, 25 bp, Canis familiaris
ttatccacccttataatgggaattc

SEQ ID NO: 198342 - DNA, 25 bp, Canis familiaris
tatacacaccctgatttttgaaaat

SEQ ID NO: 198343 - DNA, 25 bp, Canis familiaris
tattaccccattggttttgtagata

SEQ ID NO: 198344 - DNA, 25 bp, Canis familiaris
tataactgctccaccacttgtggaa

SEQ ID NO: 198345 - DNA, 25 bp, Canis familiaris
tatacactatacaaccagttctagg

SEQ ID NO: 198346 - DNA, 25 bp, Canis familiaris
tattactatgaatccagaattacag

SEQ ID NO: 198347 - DNA, 25 bp, Canis familiaris
tatgccctgctaaaccaaataaagt

SEQ ID NO: 198348 - DNA, 25 bp, Canis familiaris
tatgccccaaaccctaaatgaagca

SEQ ID NO: 198349 - DNA, 25 bp, Canis familiaris
tatccttcaaccctctcaaatggaa

SEQ ID NO: 198350 - DNA, 25 bp, Canis familiaris
tatgccttcaagctgtcctgtagca

SEQ ID NO: 198351 - DNA, 25 bp, Canis familiaris
tatccttgtgtttgctcactgtgtc

SEQ ID NO: 198352 - DNA, 25 bp, Canis familiaris
tatccaatagccaattcctggttta

SEQ ID NO: 198353 - DNA, 25 bp, Canis familiaris
ttcccaatgttaatccggtaatcca

SEQ ID NO: 198354 - DNA, 25 bp, Canis familiaris
tatcccatctgacgaaccggtgtat

SEQ ID NO: 198355 - DNA, 25 bp, Canis familiaris
tataacattcatcgaacctggcagt

SEQ ID NO: 198356 - DNA, 25 bp, Canis familiaris
tataacatatcttaccctacaaccc

SEQ ID NO: 198357 - DNA, 25 bp, Canis familiaris
tatattaacttccctgctaacatcc

SEQ ID NO: 198358 - DNA, 25 bp, Canis familiaris
tatgcattaatcccttcgttaaccg

SEQ ID NO: 198359 - DNA, 25 bp, Canis familiaris
tatgtaatatgtccttctttaccct

SEQ ID NO: 198360 - DNA, 25 bp, Canis familiaris
tatgcatatgacatgttcccttacc

SEQ ID NO: 198361 - DNA, 25 bp, Canis familiaris
tatgacagattacgtcccttatcct

SEQ ID NO: 198362 - DNA, 25 bp, Canis familiaris
tatgcatagttagagccctttccac

SEQ ID NO: 198363 - DNA, 25 bp, Canis familiaris
tatgtgggtatgacacaccgttccc

SEQ ID NO: 198364 - DNA, 25 bp, Canis familiaris
tatgctgggagaagacccctctccc

SEQ ID NO: 198365 - DNA, 25 bp, Canis familiaris
tatcggggaagatccaccactatcc

SEQ ID NO: 198366 - DNA, 25 bp, Canis familiaris
tatctacagcagtgtttcccagtat

SEQ ID NO: 198367 - DNA, 25 bp, Canis familiaris
tatgtacacatgcttgattcccact

SEQ ID NO: 198368 - DNA, 25 bp, Canis familiaris
tatgttcacatactattctcttcct

SEQ ID NO: 198369 - DNA, 25 bp, Canis familiaris
tatgttatcattattcctacctgga

SEQ ID NO: 198370 - DNA, 25 bp, Canis familiaris
tatgtctttttttcctaattactca

SEQ ID NO: 198371 - DNA, 25 bp, Canis familiaris
tatcttggtctcttttctaatttta

SEQ ID NO: 198372 - DNA, 25 bp, Canis familiaris
tttgggatccaaagaaaattttcat

SEQ ID NO: 198373 - DNA, 25 bp, Canis familiaris
tttagacccagcagaagtataatct

SEQ ID NO: 198374 - DNA, 25 bp, Canis familiaris
tatctgaaccccagcaaaatttcac

SEQ ID NO: 198375 - DNA, 25 bp, Canis familiaris
tatctaagcacacaccaaggttcca

SEQ ID NO: 198376 - DNA, 25 bp, Canis familiaris
tatctcaagactctgccggtgatgt

SEQ ID NO: 198377 - DNA, 25 bp, Canis familiaris
tatgccttgaatcctgacgttttcc

SEQ ID NO: 198378 - DNA, 25 bp, Canis familiaris
tatgccttgtgctttagagctttac

SEQ ID NO: 198379 - DNA, 25 bp, Canis familiaris
tatgatttgtcattctcaagatatt

SEQ ID NO: 198380 - DNA, 25 bp, Canis familiaris
tatgcatctttaacccagatacata

SEQ ID NO: 198381 - DNA, 25 bp, Canis familiaris
tatgcattctatatgtcaacaccta

SEQ ID NO: 198382 - DNA, 25 bp, Canis familiaris
tatgctttcatgctgtataactgta

SEQ ID NO: 198383 - DNA, 25 bp, Canis familiaris
tatgctttcatgctggtaactggaa

SEQ ID NO: 198384 - DNA, 25 bp, Canis familiaris
tatgctttatttggcttgtcgtgaa

SEQ ID NO: 198385 - DNA, 25 bp, Canis familiaris
tatgcttttattcctatgtactgat

SEQ ID NO: 198386 - DNA, 25 bp, Canis familiaris
tatgtgtactcattctcttacctga

SEQ ID NO: 198387 - DNA, 25 bp, Canis familiaris
tatctcatccttactcagtactgca

SEQ ID NO: 198388 - DNA, 25 bp, Canis familiaris
tatgctatccttccacagaacatcc

SEQ ID NO: 198389 - DNA, 25 bp, Canis familiaris
tatgcttgagtctccagagtctctc

SEQ ID NO: 198390 - DNA, 25 bp, Canis familiaris
tatcctcagtctggccagagatcca

SEQ ID NO: 198391 - DNA, 25 bp, Canis familiaris
tatactcaatttcagcgatgctatt

SEQ ID NO: 198392 - DNA, 25 bp, Canis familiaris
tatacttactattcggagcatgagc

SEQ ID NO: 198393 - DNA, 25 bp, Canis familiaris
tataatctaccttgcccaggagata

SEQ ID NO: 198394 - DNA, 25 bp, Canis familiaris
tatacaacacattaccatcgggatc

SEQ ID NO: 198395 - DNA, 25 bp, Canis familiaris
tatacagacttgccccatggggcca

SEQ ID NO: 198396 - DNA, 25 bp, Canis familiaris
tatacatagtaacccatggcctctc

SEQ ID NO: 198397 - DNA, 25 bp, Canis familiaris
tataaaaattgcccttgccccaagg

SEQ ID NO: 198398 - DNA, 25 bp, Canis familiaris
ttaaacaacattctcttaaccagtg

SEQ ID NO: 198399 - DNA, 25 bp, Canis familiaris
tatacagacacactctttgttgaac

SEQ ID NO: 198400 - DNA, 25 bp, Canis familiaris
ttagaacacatttttttcaaagtct

SEQ ID NO: 198401 - DNA, 25 bp, Canis familiaris
ttaactccagtttggttgagaaact

SEQ ID NO: 198402 - DNA, 25 bp, Canis familiaris
ttaaccaagcttgtgttgaagaggt

SEQ ID NO: 198403 - DNA, 25 bp, Canis familiaris
tataaccccttaatcttggtggtgt

SEQ ID NO: 198404 - DNA, 25 bp, Canis familiaris
tatctttaccaatttccgatggggt

SEQ ID NO: 198405 - DNA, 25 bp, Canis familiaris
tatgtttaccaaatttcagtttcct

SEQ ID NO: 198406 - DNA, 25 bp, Canis familiaris
tatgttcttactaattttttgtctt

SEQ ID NO: 198407 - DNA, 25 bp, Canis familiaris
tatgtagcttactctttttttcctt

SEQ ID NO: 198408 - DNA, 25 bp, Canis familiaris
tatgaaatgctaccctttttgtctc

SEQ ID NO: 198409 - DNA, 25 bp, Canis familiaris
tatgagaggtgcccctcttatcgtc

SEQ ID NO: 198410 - DNA, 25 bp, Canis familiaris
tatgaatgcagtttcgtctttcctc

SEQ ID NO: 198411 - DNA, 25 bp, Canis familiaris
tataaggcttctgtgtttctccttc

SEQ ID NO: 198412 - DNA, 25 bp, Canis familiaris
tatgatagtctttttttacttttat

SEQ ID NO: 198413 - DNA, 25 bp, Canis familiaris
tatgtttctctaaatgtttttcttt

SEQ ID NO: 198414 - DNA, 25 bp, Canis familiaris
tatgtttccatatgctcttttctta

SEQ ID NO: 198415 - DNA, 25 bp, Canis familiaris
tatcttacttattctttttcttagg

SEQ ID NO: 198416 - DNA, 25 bp, Canis familiaris
tatgtcgactttttctctggtcttt

SEQ ID NO: 198417 - DNA, 25 bp, Canis familiaris
tatgataccttttattcgttcttga

SEQ ID NO: 198418 - DNA, 25 bp, Canis familiaris
tatacatcccattaaacgttctcta

SEQ ID NO: 198419 - DNA, 25 bp, Canis familiaris
tatagaacccgaactcttatcctga

SEQ ID NO: 198420 - DNA, 25 bp, Canis familiaris
tataggagaccgaaccctttgctgt

SEQ ID NO: 198421 - DNA, 25 bp, Canis familiaris
tttggagccggaggcacttgttttt

SEQ ID NO: 198422 - DNA, 25 bp, Canis familiaris
tatataaccgtgggtcttcttaact

SEQ ID NO: 198423 - DNA, 25 bp, Canis familiaris
tataacaacggtttcttctacaaca

SEQ ID NO: 198424 - DNA, 25 bp, Canis familiaris
tatcacacaatatctttcttaaata

SEQ ID NO: 198425 - DNA, 25 bp, Canis familiaris
tatgccacagctctgctctatttat

SEQ ID NO: 198426 - DNA, 25 bp, Canis familiaris
tatcccagctgattgcattgtccac

SEQ ID NO: 198427 - DNA, 25 bp, Canis familiaris
tatgcggatgctcagcagtacgcca

SEQ ID NO: 198428 - DNA, 25 bp, Canis familiaris
tatcctgcagtgcacaggacagcct

SEQ ID NO: 198429 - DNA, 25 bp, Canis familiaris
tatcctgcacgcggaggatgacccg

SEQ ID NO: 198430 - DNA, 25 bp, Canis familiaris
tatccacagccagctggagcacctg

SEQ ID NO: 198431 - DNA, 25 bp, Canis familiaris
tatgtcatcagtggccaggaccagc

SEQ ID NO: 198432 - DNA, 25 bp, Canis familiaris
tatgaccagtgtccagcagtggctg

SEQ ID NO: 198433 - DNA, 25 bp, Canis familiaris
tatcccagccaccagcaaggctgtc

SEQ ID NO: 198434 - DNA, 25 bp, Canis familiaris
tatccagataaccacgcacgctgat

SEQ ID NO: 198435 - DNA, 25 bp, Canis familiaris
tattaatgaaggcgacgtgcttccc

SEQ ID NO: 198436 - DNA, 25 bp, Canis familiaris
tataccatagagatgcgaaccttcc

SEQ ID NO: 198437 - DNA, 25 bp, Canis familiaris
tatgacctcgaaagtcactcccatc

SEQ ID NO: 198438 - DNA, 25 bp, Canis familiaris
tatgcacctctatgttcattaccgc

SEQ ID NO: 198439 - DNA, 25 bp, Canis familiaris
tatgaccggaagtctgctttctacc

SEQ ID NO: 198440 - DNA, 25 bp, Canis familiaris
tataccagtaaattctgttgaaccc

SEQ ID NO: 198441 - DNA, 25 bp, Canis familiaris
tataccctattgttttattcaccac

SEQ ID NO: 198442 - DNA, 25 bp, Canis familiaris
tatgttcacttatttcttattcccc

SEQ ID NO: 198443 - DNA, 25 bp, Canis familiaris
tatgcttgtttatttttaccacctt

SEQ ID NO: 198444 - DNA, 25 bp, Canis familiaris
tatgcttgtctcaaagattaagcca

SEQ ID NO: 198445 - DNA, 25 bp, Canis familiaris
tatgcttggaaattgttcacagaca

SEQ ID NO: 198446 - DNA, 25 bp, Canis familiaris
tatgtataaaattgtccatcactat

SEQ ID NO: 198447 - DNA, 25 bp, Canis familiaris
tatgtatgcatatcggttccctatc

SEQ ID NO: 198448 - DNA, 25 bp, Canis familiaris
tatccacaaacgctgtcccttgtgt

SEQ ID NO: 198449 - DNA, 25 bp, Canis familiaris
tatccaaaacggtcgatcgctcttg

SEQ ID NO: 198450 - DNA, 25 bp, Canis familiaris
tatgccgtcagggtgacttccctgg

SEQ ID NO: 198451 - DNA, 25 bp, Canis familiaris
tatgtactcagaggtgacttatttg

SEQ ID NO: 198452 - DNA, 25 bp, Canis familiaris
tatgtacgcagtgtgcttttccttg

SEQ ID NO: 198453 - DNA, 25 bp, Canis familiaris
tataaaagtattcctttgcgttgaa

SEQ ID NO: 198454 - DNA, 25 bp, Canis familiaris
tataccaagttttttgccgagtatt

SEQ ID NO: 198455 - DNA, 25 bp, Canis familiaris
tatagcctttttttggtcccattgt

SEQ ID NO: 198456 - DNA, 25 bp, Canis familiaris
tatcccctttttatgataaactttg

SEQ ID NO: 198457 - DNA, 25 bp, Canis familiaris
tatacacctattatgggaaaatttt

SEQ ID NO: 198458 - DNA, 25 bp, Canis familiaris
tataccttattttgttagaatcatt

SEQ ID NO: 198459 - DNA, 25 bp, Canis familiaris
tataaagttttatatacacacacat

SEQ ID NO: 198460 - DNA, 25 bp, Canis familiaris
tatgataagccttttttcccagcct

SEQ ID NO: 198461 - DNA, 25 bp, Canis familiaris
tttaatgtccattcttagccaagct

SEQ ID NO: 198462 - DNA, 25 bp, Canis familiaris
tttcattggccaaggcaaccaaccc

SEQ ID NO: 198463 - DNA, 25 bp, Canis familiaris
tttcattgactatggccaggacccc

SEQ ID NO: 198464 - DNA, 25 bp, Canis familiaris
tttgccgagtaccagccagaactgt

SEQ ID NO: 198465 - DNA, 25 bp, Canis familiaris
ttcgacgagccccgctaatatatgg

SEQ ID NO: 198466 - DNA, 25 bp, Canis familiaris
tatagccaagcttccgtcaataagg

SEQ ID NO: 198467 - DNA, 25 bp, Canis familiaris
tataaaagccagccttaaaactgtt

SEQ ID NO: 198468 - DNA, 25 bp, Canis familiaris
tataaaagtcccccacaagacagtt

SEQ ID NO: 198469 - DNA, 25 bp, Canis familiaris
ttaggtaattcccctccagaattgt

SEQ ID NO: 198470 - DNA, 25 bp, Canis familiaris
ttacgtggtctggagccctcaaaat

SEQ ID NO: 198471 - DNA, 25 bp, Canis familiaris
ttttatcgtgcctacaacccaaatg

SEQ ID NO: 198472 - DNA, 25 bp, Canis familiaris
tatcctatttcctatattcccaatt

SEQ ID NO: 198473 - DNA, 25 bp, Canis familiaris
tatgtatcttatgcaatttccctat

SEQ ID NO: 198474 - DNA, 25 bp, Canis familiaris
tatgtttttatcatttccttactga

SEQ ID NO: 198475 - DNA, 25 bp, Canis familiaris
tatgttttgttgatgcctcttgtcc

SEQ ID NO: 198476 - DNA, 25 bp, Canis familiaris
tatgcctttgggcatgcttttcgcc

SEQ ID NO: 198477 - DNA, 25 bp, Canis familiaris
tatgtttgtgtgcttgttttcctgg

SEQ ID NO: 198478 - DNA, 25 bp, Canis familiaris
tatgtttgatatgttgtagtctctc

SEQ ID NO: 198479 - DNA, 25 bp, Canis familiaris
tatgtttgcattccattgtcctgct

SEQ ID NO: 198480 - DNA, 25 bp, Canis familiaris
tatttggcaatgcagtccactgata

SEQ ID NO: 198481 - DNA, 25 bp, Canis familiaris
tatgttggcctgtcttgctaagata

SEQ ID NO: 198482 - DNA, 25 bp, Canis familiaris
tatgttagtgctttcatgccaagaa

SEQ ID NO: 198483 - DNA, 25 bp, Canis familiaris
tatgtttgtgcttgtgtgctcctga

SEQ ID NO: 198484 - DNA, 25 bp, Canis familiaris
tatcatcttagttcatggtcatcta

SEQ ID NO: 198485 - DNA, 25 bp, Canis familiaris
tatcatctcatttaagactcacaac

SEQ ID NO: 198486 - DNA, 25 bp, Canis familiaris
tatccttgtaacttctgagctgacc

SEQ ID NO: 198487 - DNA, 25 bp, Canis familiaris
tatccgttgccaatccagaggaccc

SEQ ID NO: 198488 - DNA, 25 bp, Canis familiaris
tatccttcgccagcatcatcaggaa

SEQ ID NO: 198489 - DNA, 25 bp, Canis familiaris
tatttccccaaatcagtgcaaacta

SEQ ID NO: 198490 - DNA, 25 bp, Canis familiaris
tattcccaccatggggagcgaaaaa

SEQ ID NO: 198491 - DNA, 25 bp, Canis familiaris
tattatccacgcaggaggcagctcg

SEQ ID NO: 198492 - DNA, 25 bp, Canis familiaris
tatcataccccaatgagcagggccc

SEQ ID NO: 198493 - DNA, 25 bp, Canis familiaris
tatgaagccctcagacgaggccgct

SEQ ID NO: 198494 - DNA, 25 bp, Canis familiaris
cccaactcactgacctaagctttgt

SEQ ID NO: 198495 - DNA, 25 bp, Canis familiaris
tatgcaacctgcgtatcggagtcgg

SEQ ID NO: 198496 - DNA, 25 bp, Canis familiaris
tatgctccccctttggagtatgctg

SEQ ID NO: 198497 - DNA, 25 bp, Canis familiaris
tatccccctgcatggggtacgtcca

SEQ ID NO: 198498 - DNA, 25 bp, Canis familiaris
tatgcccaccatttctagtgtaatt

SEQ ID NO: 198499 - DNA, 25 bp, Canis familiaris
tatctgccccagaactgatgttttt

SEQ ID NO: 198500 - DNA, 25 bp, Canis familiaris
tatgccccaatggaaagtctttgtg

SEQ ID NO: 198501 - DNA, 25 bp, Canis familiaris
tatgacacccagggtcgctttctgt

SEQ ID NO: 198502 - DNA, 25 bp, Canis familiaris
tatgaccacctgatggacttcctgg

SEQ ID NO: 198503 - DNA, 25 bp, Canis familiaris
tatgaaaacttcaagcacctcctgc

SEQ ID NO: 198504 - DNA, 25 bp, Canis familiaris
tataaacactgtaccaagctttgca

SEQ ID NO: 198505 - DNA, 25 bp, Canis familiaris
tatgctgaaagatattcccttatca

SEQ ID NO: 198506 - DNA, 25 bp, Canis familiaris
tatgacacaggtcttccacgagatc

SEQ ID NO: 198507 - DNA, 25 bp, Canis familiaris
tatacatgggatatatccagggaaa

SEQ ID NO: 198508 - DNA, 25 bp, Canis familiaris
tatctgcatggtgtatctaaaaaaa

SEQ ID NO: 198509 - DNA, 25 bp, Canis familiaris
tatcactggctccatattaaaaaat

SEQ ID NO: 198510 - DNA, 25 bp, Canis familiaris
tatacgccccgctatacaagggata

SEQ ID NO: 198511 - DNA, 25 bp, Canis familiaris
tatctcccactcgcatagcatagcg

SEQ ID NO: 198512 - DNA, 25 bp, Canis familiaris
tatccactccattacataaagccaa

SEQ ID NO: 198513 - DNA, 25 bp, Canis familiaris
tatcagccctcctcaatgaggccaa

SEQ ID NO: 198514 - DNA, 25 bp, Canis familiaris
tatcagccctcctcaatgaggccaa

SEQ ID NO: 198515 - DNA, 25 bp, Canis familiaris
tatcccagtctcttaggaggtcaga

SEQ ID NO: 198516 - DNA, 25 bp, Canis familiaris
tatcctaggcatttaagacaacaga

SEQ ID NO: 198517 - DNA, 25 bp, Canis familiaris
tatcacaagtcctaaacacagacca

SEQ ID NO: 198518 - DNA, 25 bp, Canis familiaris
tatcagagaacctatcaaaccccca

SEQ ID NO: 198519 - DNA, 25 bp, Canis familiaris
tatgcaggactttcctaacccatct

SEQ ID NO: 198520 - DNA, 25 bp, Canis familiaris
tatgaggtccagttcctaaccagct

SEQ ID NO: 198521 - DNA, 25 bp, Canis familiaris
tatgaataccagttattcacaccag

SEQ ID NO: 198522 - DNA, 25 bp, Canis familiaris
tatgagacactcttttacacactct

SEQ ID NO: 198523 - DNA, 25 bp, Canis familiaris
tatcatcacagctctttaagcttca

SEQ ID NO: 198524 - DNA, 25 bp, Canis familiaris
tatgatgtcacacctttaacttaag

SEQ ID NO: 198525 - DNA, 25 bp, Canis familiaris
tattctcagcatacttttgaaggaa

SEQ ID NO: 198526 - DNA, 25 bp, Canis familiaris
tatttcgtacgtttgagttgacatg

SEQ ID NO: 198527 - DNA, 25 bp, Canis familiaris
tatgttctgcaaggtctgggttaat

SEQ ID NO: 198528 - DNA, 25 bp, Canis familiaris
tatgcttactctgtcttggttaatg

SEQ ID NO: 198529 - DNA, 25 bp, Canis familiaris
tatgatctctttgtctggatgcatt

SEQ ID NO: 198530 - DNA, 25 bp, Canis familiaris
tatgatcctctgtttcgtattctta

SEQ ID NO: 198531 - DNA, 25 bp, Canis familiaris
tatgctggatcaacttcctaattgg

SEQ ID NO: 198532 - DNA, 25 bp, Canis familiaris
tatgctgggaacatcccatttcctg

SEQ ID NO: 198533 - DNA, 25 bp, Canis familiaris
tatcttggagatgcccggttgtcgt

SEQ ID NO: 198534 - DNA, 25 bp, Canis familiaris
tatatctgggctgcctgggtagctc

SEQ ID NO: 198535 - DNA, 25 bp, Canis familiaris
tatattagcactgtggggtacccac

SEQ ID NO: 198536 - DNA, 25 bp, Canis familiaris
tatacttcattccaggggctcatcc

SEQ ID NO: 198537 - DNA, 25 bp, Canis familiaris
tatatctccatttcatggtggtcca

SEQ ID NO: 198538 - DNA, 25 bp, Canis familiaris
tatgattcgatgctctagccgtagc

SEQ ID NO: 198539 - DNA, 25 bp, Canis familiaris
tatgactcggggaacacgcgacacc

SEQ ID NO: 198540 - DNA, 25 bp, Canis familiaris
ttatcccgggtatgggcaccggcac

SEQ ID NO: 198541 - DNA, 25 bp, Canis familiaris
ttagccccggtatcatggccaagga

SEQ ID NO: 198542 - DNA, 25 bp, Canis familiaris
tatcagccagccagtcaccatggct

SEQ ID NO: 198543 - DNA, 25 bp, Canis familiaris
tatcagtcagtcctctacaattgtg

SEQ ID NO: 198544 - DNA, 25 bp, Canis familiaris
ttcgtcgatcatcctgactacgtca

SEQ ID NO: 198545 - DNA, 25 bp, Canis familiaris
tatcgtgaaatttgactgtcagcta

SEQ ID NO: 198546 - DNA, 25 bp, Canis familiaris
tatccagcaacatttgggccagcta

SEQ ID NO: 198547 - DNA, 25 bp, Canis familiaris
tatccataccatatggggcagctac

SEQ ID NO: 198548 - DNA, 25 bp, Canis familiaris
tatgaatctacagttgggtgtcaac

SEQ ID NO: 198549 - DNA, 25 bp, Canis familiaris
tatgacatctacatccctgtgcata

SEQ ID NO: 198550 - DNA, 25 bp, Canis familiaris
tatgatctggcaatcccacttctga

SEQ ID NO: 198551 - DNA, 25 bp, Canis familiaris
tatgcattctgctccaacagtgtgc

SEQ ID NO: 198552 - DNA, 25 bp, Canis familiaris
tatcctcatgcgaccatacattctc

SEQ ID NO: 198553 - DNA, 25 bp, Canis familiaris
tatgcctctctactcagaatatcca

SEQ ID NO: 198554 - DNA, 25 bp, Canis familiaris
tatgcactcctatatttattgcagc

SEQ ID NO: 198555 - DNA, 25 bp, Canis familiaris
tatgaagccctcatttatctctgca

SEQ ID NO: 198556 - DNA, 25 bp, Canis familiaris
tatgaatccctacataacgcgttcc

SEQ ID NO: 198557 - DNA, 25 bp, Canis familiaris
tatgattccctattacaagccgttg

SEQ ID NO: 198558 - DNA, 25 bp, Canis familiaris
tatgaaccttttgcagaccattgtg

SEQ ID NO: 198559 - DNA, 25 bp, Canis familiaris
tatgacccatatatgccgatgcctt

SEQ ID NO: 198560 - DNA, 25 bp, Canis familiaris
tatgccaccatcaatggctctgtcc

SEQ ID NO: 198561 - DNA, 25 bp, Canis familiaris
tatccaccagcactactgctgcatc

SEQ ID NO: 198562 - DNA, 25 bp, Canis familiaris
tatcaagcttgccaactgtcgcata

SEQ ID NO: 198563 - DNA, 25 bp, Canis familiaris
tatgaagtgttattctgtgctgcaa

SEQ ID NO: 198564 - DNA, 25 bp, Canis familiaris
tataaggtctgcctctgcgtgaaag

SEQ ID NO: 198565 - DNA, 25 bp, Canis familiaris
tataggaatctccgctacagccaag

SEQ ID NO: 198566 - DNA, 25 bp, Canis familiaris
tattgaagaaatcctggcagccaga

SEQ ID NO: 198567 - DNA, 25 bp, Canis familiaris
tatagagtaattccccagtaagccc

SEQ ID NO: 198568 - DNA, 25 bp, Canis familiaris
ttcaagaaactcctccacttagcac

SEQ ID NO: 198569 - DNA, 25 bp, Canis familiaris
tatcacggaacagatcccctgaacc

SEQ ID NO: 198570 - DNA, 25 bp, Canis familiaris
tatgcagtggagcagtacccctgga

SEQ ID NO: 198571 - DNA, 25 bp, Canis familiaris
tatgcagtcggctagatacttcaat

SEQ ID NO: 198572 - DNA, 25 bp, Canis familiaris
tatgcagcgggcttatttctctcat

SEQ ID NO: 198573 - DNA, 25 bp, Canis familiaris
tatgcagcatggggtttttattatt

SEQ ID NO: 198574 - DNA, 25 bp, Canis familiaris
tatactggcaagcttttctatttta

SEQ ID NO: 198575 - DNA, 25 bp, Canis familiaris
tatccgtaagcaatattttcagtta

SEQ ID NO: 198576 - DNA, 25 bp, Canis familiaris
tatgcatctgtatgatatactcgaa

SEQ ID NO: 198577 - DNA, 25 bp, Canis familiaris
tatgatcttcatttctactctagaa

SEQ ID NO: 198578 - DNA, 25 bp, Canis familiaris
tatctcattcatttctggctttgta

SEQ ID NO: 198579 - DNA, 25 bp, Canis familiaris
tatcacttgctgtagatggcttatt

SEQ ID NO: 198580 - DNA, 25 bp, Canis familiaris
tatatatctctgtagcacagttgat

SEQ ID NO: 198581 - DNA, 25 bp, Canis familiaris
tataccatttgccacagttgttcca

SEQ ID NO: 198582 - DNA, 25 bp, Canis familiaris
tatacactactgggatatttatcca

SEQ ID NO: 198583 - DNA, 25 bp, Canis familiaris
tatacctcactatgttctttgaata

SEQ ID NO: 198584 - DNA, 25 bp, Canis familiaris
tatccactactatgttcttgtcaaa

SEQ ID NO: 198585 - DNA, 25 bp, Canis familiaris
tatctccaaccattttcattcacaa

SEQ ID NO: 198586 - DNA, 25 bp, Canis familiaris
tatgctcaagtattttctcaatcaa

SEQ ID NO: 198587 - DNA, 25 bp, Canis familiaris
tatccacctatcacttcagatcaac

SEQ ID NO: 198588 - DNA, 25 bp, Canis familiaris
tatccctttgatattcatagcaaca

SEQ ID NO: 198589 - DNA, 25 bp, Canis familiaris
tataactgtttggttttcagcagca

SEQ ID NO: 198590 - DNA, 25 bp, Canis familiaris
tatcaacggttggtcgtgtgccagc

SEQ ID NO: 198591 - DNA, 25 bp, Canis familiaris
tatctatcgagttacctttgccaca

SEQ ID NO: 198592 - DNA, 25 bp, Canis familiaris
tatcctccatgctcgctttgaagaa

SEQ ID NO: 198593 - DNA, 25 bp, Canis familiaris
tatgctcccgcaaccagagatggaa

SEQ ID NO: 198594 - DNA, 25 bp, Canis familiaris
tatatcctgccagctcggagtataa

SEQ ID NO: 198595 - DNA, 25 bp, Canis familiaris
tataatctgcacgttcggaatctaa

SEQ ID NO: 198596 - DNA, 25 bp, Canis familiaris
tatactcaaatttcagcgaagctaa

SEQ ID NO: 198597 - DNA, 25 bp, Canis familiaris
tatcctcaatgacttcgcttatctc

SEQ ID NO: 198598 - DNA, 25 bp, Canis familiaris
tatgccacaagttcatgcgcttcat

SEQ ID NO: 198599 - DNA, 25 bp, Canis familiaris
tatcaagtcatgttcatgccctgat

SEQ ID NO: 198600 - DNA, 25 bp, Canis familiaris
tatacagtgtattctcagccatgac

SEQ ID NO: 198601 - DNA, 25 bp, Canis familiaris
tataatcccaatgcacactgacagt

SEQ ID NO: 198602 - DNA, 25 bp, Canis familiaris
tataacctcaaggcattccacctgc

SEQ ID NO: 198603 - DNA, 25 bp, Canis familiaris
tattacctcaactatactactccca

SEQ ID NO: 198604 - DNA, 25 bp, Canis familiaris
tatagttccaaaggagccaccacca

SEQ ID NO: 198605 - DNA, 25 bp, Canis familiaris
tatagattcaccatatgaccctctc

SEQ ID NO: 198606 - DNA, 25 bp, Canis familiaris
tatactacctgaaataccgtctcct

SEQ ID NO: 198607 - DNA, 25 bp, Canis familiaris
tatactacctggaataccgtctcct

SEQ ID NO: 198608 - DNA, 25 bp, Canis familiaris
tatgactattctgttttcttcttat

SEQ ID NO: 198609 - DNA, 25 bp, Canis familiaris
tatgcactttgttcttttctttcga

SEQ ID NO: 198610 - DNA, 25 bp, Canis familiaris
tatgaatctattttttttcttgcta

SEQ ID NO: 198611 - DNA, 25 bp, Canis familiaris
tatgaagtgacttttctgtttcttt

SEQ ID NO: 198612 - DNA, 25 bp, Canis familiaris
tatgaagttcttaccaatattttgt

SEQ ID NO: 198613 - DNA, 25 bp, Canis familiaris
tatagaggtcgtggccaccttgttg

SEQ ID NO: 198614 - DNA, 25 bp, Canis familiaris
tatagcatggatggggatccctggg

SEQ ID NO: 198615 - DNA, 25 bp, Canis familiaris
tatgaaggtgggagccctgcaggcc

SEQ ID NO: 198616 - DNA, 25 bp, Canis familiaris
tataaaggcgcgaggccggcgctgc

SEQ ID NO: 198617 - DNA, 25 bp, Canis familiaris
tttggaggccgcaagtgcctcgggc

SEQ ID NO: 198618 - DNA, 25 bp, Canis familiaris
tttggacccattgggaccgagccca

SEQ ID NO: 198619 - DNA, 25 bp, Canis familiaris
tttgggaccactttgacctgaccaa

SEQ ID NO: 198620 - DNA, 25 bp, Canis familiaris
tttgggtttcttaccattaccacat

SEQ ID NO: 198621 - DNA, 25 bp, Canis familiaris
tatccggttacacttgccattttaa

SEQ ID NO: 198622 - DNA, 25 bp, Canis familiaris
tatgcccgtgtattttcacatttaa

SEQ ID NO: 198623 - DNA, 25 bp, Canis familiaris
tatccaatggtattataaatgttta

SEQ ID NO: 198624 - DNA, 25 bp, Canis familiaris
tatcctcagttatctagttgttgtt

SEQ ID NO: 198625 - DNA, 25 bp, Canis familiaris
ttcgcatcagttcactcggttagat

SEQ ID NO: 198626 - DNA, 25 bp, Canis familiaris
tatcgatcagcttgtctgtcgggtc

SEQ ID NO: 198627 - DNA, 25 bp, Canis familiaris
tatgctgtgcacatgtgctcttgtg

SEQ ID NO: 198628 - DNA, 25 bp, Canis familiaris
tatcttgcatgcatctgtctggtca

SEQ ID NO: 198629 - DNA, 25 bp, Canis familiaris
tattgggcttcttgggctacgtgat

SEQ ID NO: 198630 - DNA, 25 bp, Canis familiaris
tatagggttggatgtgtctcactga

SEQ ID NO: 198631 - DNA, 25 bp, Canis familiaris
tataggatttatttgctgcttttga

SEQ ID NO: 198632 - DNA, 25 bp, Canis familiaris
tataggcaagttttcctggttacca

SEQ ID NO: 198633 - DNA, 25 bp, Canis familiaris
tataagcacatgtctttggcgcggt

SEQ ID NO: 198634 - DNA, 25 bp, Canis familiaris
tatacgaggatccattgtgaggtca

SEQ ID NO: 198635 - DNA, 25 bp, Canis familiaris
tatccgcctcaccattgctgaggaa

SEQ ID NO: 198636 - DNA, 25 bp, Canis familiaris
tatccgcctcaccattgctgaggaa

SEQ ID NO: 198637 - DNA, 25 bp, Canis familiaris
tatcccctcacacatggtatgcaat

SEQ ID NO: 198638 - DNA, 25 bp, Canis familiaris
tatcactacaaacatggtgtcatca

SEQ ID NO: 198639 - DNA, 25 bp, Canis familiaris
tatgcctaaatacttctgttccctc

SEQ ID NO: 198640 - DNA, 25 bp, Canis familiaris
tatcctaatgcatatgttttaccat

SEQ ID NO: 198641 - DNA, 25 bp, Canis familiaris
tatcccattatttttagtacctcat

SEQ ID NO: 198642 - DNA, 25 bp, Canis familiaris
tatcccttttaacatgacacctatt

SEQ ID NO: 198643 - DNA, 25 bp, Canis familiaris
tatactcctttaacgataaccttga

SEQ ID NO: 198644 - DNA, 25 bp, Canis familiaris
tatacccgtgtaaagatcttcccca

SEQ ID NO: 198645 - DNA, 25 bp, Canis familiaris
tataccaagtttaactgttcccctg

SEQ ID NO: 198646 - DNA, 25 bp, Canis familiaris
tatcgccaggtaaaacttcccttgg

SEQ ID NO: 198647 - DNA, 25 bp, Canis familiaris
tatccttggttttattatccctttg

SEQ ID NO: 198648 - DNA, 25 bp, Canis familiaris
tatcctttgttttgcattaaccatc

SEQ ID NO: 198649 - DNA, 25 bp, Canis familiaris
tatgctcttttgatacatttacctt

SEQ ID NO: 198650 - DNA, 25 bp, Canis familiaris
tatgcttattaaaacacttcctcca

SEQ ID NO: 198651 - DNA, 25 bp, Canis familiaris
tatgcattcttcatgaatacttttg

SEQ ID NO: 198652 - DNA, 25 bp, Canis familiaris
tatgcttcttcttataaatttgtat

SEQ ID NO: 198653 - DNA, 25 bp, Canis familiaris
tatctttttttattactatgtacaa

SEQ ID NO: 198654 - DNA, 25 bp, Canis familiaris
tatgaatttttttatccattactaa

SEQ ID NO: 198655 - DNA, 25 bp, Canis familiaris
tatgacatgttgccttacccattat

SEQ ID NO: 198656 - DNA, 25 bp, Canis familiaris
tatgcctgctagtttagcttcttta

SEQ ID NO: 198657 - DNA, 25 bp, Canis familiaris
tatgcactttgtttactctttatac

SEQ ID NO: 198658 - DNA, 25 bp, Canis familiaris
tatgctttctgatgtgtgtttctta

SEQ ID NO: 198659 - DNA, 25 bp, Canis familiaris
tatgctttctgctctgttgtttgtt

SEQ ID NO: 198660 - DNA, 25 bp, Canis familiaris
tatgcttctctccctttgaataatt

SEQ ID NO: 198661 - DNA, 25 bp, Canis familiaris
tatgcttccaagtctttgtgtcaca

SEQ ID NO: 198662 - DNA, 25 bp, Canis familiaris
tatcgtccagagtcttccattacat

SEQ ID NO: 198663 - DNA, 25 bp, Canis familiaris
tatcgtctcatttctaatctatagt

SEQ ID NO: 198664 - DNA, 25 bp, Canis familiaris
tatcagttctacttagcatctctca

SEQ ID NO: 198665 - DNA, 25 bp, Canis familiaris
tatcctcattatttacatcctcaga

SEQ ID NO: 198666 - DNA, 25 bp, Canis familiaris
tatcccatatattttcacctcattt

SEQ ID NO: 198667 - DNA, 25 bp, Canis familiaris
tatgaatctgcaaattcgcaccttt

SEQ ID NO: 198668 - DNA, 25 bp, Canis familiaris
tatgaaatatcatctcctccttcta

SEQ ID NO: 198669 - DNA, 25 bp, Canis familiaris
tatagataacatctccgccatcttc

SEQ ID NO: 198670 - DNA, 25 bp, Canis familiaris
tatagccagagtctgccatgcgcat

SEQ ID NO: 198671 - DNA, 25 bp, Canis familiaris
tttgcacatgggctgctatggtgat

SEQ ID NO: 198672 - DNA, 25 bp, Canis familiaris
tatacaatggtgctctattctgttg

SEQ ID NO: 198673 - DNA, 25 bp, Canis familiaris
ttataatgtcatcttttttttccgg

SEQ ID NO: 198674 - DNA, 25 bp, Canis familiaris
tataaatctcaccttttgttttcgt

SEQ ID NO: 198675 - DNA, 25 bp, Canis familiaris
tataactgtcaacatgttttctttg

SEQ ID NO: 198676 - DNA, 25 bp, Canis familiaris
ttctgaattaatctgtcccctttct

SEQ ID NO: 198677 - DNA, 25 bp, Canis familiaris
tttaaattctttgccacctatgttt

SEQ ID NO: 198678 - DNA, 25 bp, Canis familiaris
tataaatttaacgccaacttctatt

SEQ ID NO: 198679 - DNA, 25 bp, Canis familiaris
ttacggttacaccttaccttgtatg

SEQ ID NO: 198680 - DNA, 25 bp, Canis familiaris
tatacggatatacccctttttatag

SEQ ID NO: 198681 - DNA, 25 bp, Canis familiaris
tataaggaattcgttatctttaaag

SEQ ID NO: 198682 - DNA, 25 bp, Canis familiaris
tataaattgtcttgctgttttgtaa

SEQ ID NO: 198683 - DNA, 25 bp, Canis familiaris
tataaaattgtatgctttcagaata

SEQ ID NO: 198684 - DNA, 25 bp, Canis familiaris
tataaaactgctgtttaccaaacca

SEQ ID NO: 198685 - DNA, 25 bp, Canis familiaris
tataaatcatccttttctaccaaaa

SEQ ID NO: 198686 - DNA, 25 bp, Canis familiaris
tatagagtacatattcattcaacaa

SEQ ID NO: 198687 - DNA, 25 bp, Canis familiaris
tatagaggtcttcagcttggccaag

SEQ ID NO: 198688 - DNA, 25 bp, Canis familiaris
tatactggtattctgcttcccattg

SEQ ID NO: 198689 - DNA, 25 bp, Canis familiaris
tatagatggtgcttgtcatcgcccc

SEQ ID NO: 198690 - DNA, 25 bp, Canis familiaris
tatcatgagggagttccgctcgggc

SEQ ID NO: 198691 - DNA, 25 bp, Canis familiaris
tattggggaacttcatccggatgac

SEQ ID NO: 198692 - DNA, 25 bp, Canis familiaris
ttgtggggtaattgtgggtggaggg

SEQ ID NO: 198693 - DNA, 25 bp, Canis familiaris
tttggccgggatctgggtcaggggc

SEQ ID NO: 198694 - DNA, 25 bp, Canis familiaris
tttggccgggaagggcttgcttggg

SEQ ID NO: 198695 - DNA, 25 bp, Canis familiaris
tttggtcgggcagccgcacactatg

SEQ ID NO: 198696 - DNA, 25 bp, Canis familiaris
tatctggggagacggtgctacctat

SEQ ID NO: 198697 - DNA, 25 bp, Canis familiaris
ttctcggggaactgtacctcattgc

SEQ ID NO: 198698 - DNA, 25 bp, Canis familiaris
tatcgccgggaagggccaaccatta

SEQ ID NO: 198699 - DNA, 25 bp, Canis familiaris
tatccacgggcacgggaaaccacac

SEQ ID NO: 198700 - DNA, 25 bp, Canis familiaris
ttccacggagtcctggaatcccact

SEQ ID NO: 198701 - DNA, 25 bp, Canis familiaris
tatccctggatgtcttccaatctct

SEQ ID NO: 198702 - DNA, 25 bp, Canis familiaris
tataccatgtctttacccattcatc

SEQ ID NO: 198703 - DNA, 25 bp, Canis familiaris
tataccatgatcacatacagtttgt

SEQ ID NO: 198704 - DNA, 25 bp, Canis familiaris
tattcctgctcttagatagttctgg

SEQ ID NO: 198705 - DNA, 25 bp, Canis familiaris
tattcccttgaccattggctctgaa

SEQ ID NO: 198706 - DNA, 25 bp, Canis familiaris
tatcacccctgaagaatccatataa

SEQ ID NO: 198707 - DNA, 25 bp, Canis familiaris
tatcattgctccaaatattatcaat

SEQ ID NO: 198708 - DNA, 25 bp, Canis familiaris
tatcgctctcaacttcttacatgag

SEQ ID NO: 198709 - DNA, 25 bp, Canis familiaris
tatccctcaactacctgaaggccga

SEQ ID NO: 198710 - DNA, 25 bp, Canis familiaris
tattcctcaacgtcacttacgacaa

SEQ ID NO: 198711 - DNA, 25 bp, Canis familiaris
tatcatcctaagcatccttttactt

SEQ ID NO: 198712 - DNA, 25 bp, Canis familiaris
tatgctctcgaaagatccttttgct

SEQ ID NO: 198713 - DNA, 25 bp, Canis familiaris
tatctctgccaaaaccctttgtttt

SEQ ID NO: 198714 - DNA, 25 bp, Canis familiaris
ttttccctaacagcaactggtttat

SEQ ID NO: 198715 - DNA, 25 bp, Canis familiaris
ttttggccccacaatcaacgggact

SEQ ID NO: 198716 - DNA, 25 bp, Canis familiaris
tttatggggctatgtcaaatgggca

SEQ ID NO: 198717 - DNA, 25 bp, Canis familiaris
tttagatgggcctttgggaggtgat

SEQ ID NO: 198718 - DNA, 25 bp, Canis familiaris
ttctagaacgactggagggcgcgtg

SEQ ID NO: 198719 - DNA, 25 bp, Canis familiaris
ttcggccactacttggagttcgggc

SEQ ID NO: 198720 - DNA, 25 bp, Canis familiaris
ttcgggttcacaggggccctgaggc

SEQ ID NO: 198721 - DNA, 25 bp, Canis familiaris
tttgaggtccagggggcccatgagt

SEQ ID NO: 198722 - DNA, 25 bp, Canis familiaris
tttggtatcgtggaaggactcatga

SEQ ID NO: 198723 - DNA, 25 bp, Canis familiaris
tattgaaatcgttgaagcgagagaa

SEQ ID NO: 198724 - DNA, 25 bp, Canis familiaris
tatagaagatcaaaaacccaagcaa

SEQ ID NO: 198725 - DNA, 25 bp, Canis familiaris
tataaactactcagacccacagcta

SEQ ID NO: 198726 - DNA, 25 bp, Canis familiaris
tataatttactgctcatcccatacc

SEQ ID NO: 198727 - DNA, 25 bp, Canis familiaris
tataatgttcgtcacccacagacca

SEQ ID NO: 198728 - DNA, 25 bp, Canis familiaris
tatagctgtgggttgactccagaac

SEQ ID NO: 198729 - DNA, 25 bp, Canis familiaris
ttagagtggcacttaccctggacac

SEQ ID NO: 198730 - DNA, 25 bp, Canis familiaris
ttaggtggtggctctactggcaaag

SEQ ID NO: 198731 - DNA, 25 bp, Canis familiaris
ttaggatggtagctgccgctgacca

SEQ ID NO: 198732 - DNA, 25 bp, Canis familiaris
tatcggtcttagctcacacgagcct

SEQ ID NO: 198733 - DNA, 25 bp, Canis familiaris
tataggtcctagctcacacgagccc

SEQ ID NO: 198734 - DNA, 25 bp, Canis familiaris
tatagctgtcctttgtgaacttttc

SEQ ID NO: 198735 - DNA, 25 bp, Canis familiaris
tatactgggcattcttgatacttga

SEQ ID NO: 198736 - DNA, 25 bp, Canis familiaris
tatatcgggttcttaactccttcac

SEQ ID NO: 198737 - DNA, 25 bp, Canis familiaris
ttcacggtccctaaaatccatactt

SEQ ID NO: 198738 - DNA, 25 bp, Canis familiaris
ttaggggacactatagaccaagttt

SEQ ID NO: 198739 - DNA, 25 bp, Canis familiaris
tttagggacacaaaggaccaggtct

SEQ ID NO: 198740 - DNA, 25 bp, Canis familiaris
tttagggagaaagtgttaccacact

SEQ ID NO: 198741 - DNA, 25 bp, Canis familiaris
tataaggtgcctcactgtgtaccca

SEQ ID NO: 198742 - DNA, 25 bp, Canis familiaris
tataggccgaccaggtggagccaca

SEQ ID NO: 198743 - DNA, 25 bp, Canis familiaris
tattggccctggtggtacagccagc

SEQ ID NO: 198744 - DNA, 25 bp, Canis familiaris
tattgcgccgctagaggtgaaattc

SEQ ID NO: 198745 - DNA, 25 bp, Canis familiaris
tattgcgccgctagaggtgaaattc

SEQ ID NO: 198746 - DNA, 25 bp, Canis familiaris
tttggggctcagcagagaaatcact

SEQ ID NO: 198747 - DNA, 25 bp, Canis familiaris
tttgggccccggcactaatgtgaac

SEQ ID NO: 198748 - DNA, 25 bp, Canis familiaris
tttggaagagcctgccctaggttac

SEQ ID NO: 198749 - DNA, 25 bp, Canis familiaris
ttctagaaactctttcagaacttta

SEQ ID NO: 198750 - DNA, 25 bp, Canis familiaris
tatttctaacttttctgaattttag

SEQ ID NO: 198751 - DNA, 25 bp, Canis familiaris
tatgctgctctgtacatttgtctgc

SEQ ID NO: 198752 - DNA, 25 bp, Canis familiaris
tatgctgctatgaactttgacctga

SEQ ID NO: 198753 - DNA, 25 bp, Canis familiaris
tatgctgttgagtcattgtcctcta

SEQ ID NO: 198754 - DNA, 25 bp, Canis familiaris
tatgcgatggagtctgtgtttctca

SEQ ID NO: 198755 - DNA, 25 bp, Canis familiaris
tatgctgcaggcttttttggctctt

SEQ ID NO: 198756 - DNA, 25 bp, Canis familiaris
tatctagtgcctgtttcgtgctttt

SEQ ID NO: 198757 - DNA, 25 bp, Canis familiaris
tatctagtccatggtctctttttcc

SEQ ID NO: 198758 - DNA, 25 bp, Canis familiaris
tatccagtgccagatacgatgtttt

SEQ ID NO: 198759 - DNA, 25 bp, Canis familiaris
tatcccatgcaagagagtagtttca

SEQ ID NO: 198760 - DNA, 25 bp, Canis familiaris
tatacatctgcatccatgagtaata

SEQ ID NO: 198761 - DNA, 25 bp, Canis familiaris
tatatctggacacacagctcactca

SEQ ID NO: 198762 - DNA, 25 bp, Canis familiaris
tatacgatgcacctgatgcaccaca

SEQ ID NO: 198763 - DNA, 25 bp, Canis familiaris
tataatgacaccaatctgccataaa

SEQ ID NO: 198764 - DNA, 25 bp, Canis familiaris
tatagaaagctaatcatggcatgta

SEQ ID NO: 198765 - DNA, 25 bp, Canis familiaris
tatagagaggtaatcgcgacatata

SEQ ID NO: 198766 - DNA, 25 bp, Canis familiaris
tatagtaggttatcgctcacatatc

SEQ ID NO: 198767 - DNA, 25 bp, Canis familiaris
tataggaggatatggcccactgatt

SEQ ID NO: 198768 - DNA, 25 bp, Canis familiaris
tatatccggagctgtcccagtacat

SEQ ID NO: 198769 - DNA, 25 bp, Canis familiaris
tttccggtgggatctcagattcctc

SEQ ID NO: 198770 - DNA, 25 bp, Canis familiaris
tttcgtgggggaccgcagaatgtct

SEQ ID NO: 198771 - DNA, 25 bp, Canis familiaris
tttccatgggacgagttcaagttac

SEQ ID NO: 198772 - DNA, 25 bp, Canis familiaris
tttccacggaccactctattttaat

SEQ ID NO: 198773 - DNA, 25 bp, Canis familiaris
tattcaacctgagcaaaattttttt

SEQ ID NO: 198774 - DNA, 25 bp, Canis familiaris
tttatagtctaggaaaatattttct

SEQ ID NO: 198775 - DNA, 25 bp, Canis familiaris
tttacagttacctcatttttcccat

SEQ ID NO: 198776 - DNA, 25 bp, Canis familiaris
tataaagtttcctcttttttatctg

SEQ ID NO: 198777 - DNA, 25 bp, Canis familiaris
ttgaggtccccctctattttgtatt

SEQ ID NO: 198778 - DNA, 25 bp, Canis familiaris
tatagttccccgtgttttctaacat

SEQ ID NO: 198779 - DNA, 25 bp, Canis familiaris
tttgtgtcccggtgttttatggaag

SEQ ID NO: 198780 - DNA, 25 bp, Canis familiaris
tttgtgaccatagaggatttaaaaa

SEQ ID NO: 198781 - DNA, 25 bp, Canis familiaris
tatttaccataacctgttcattaat

SEQ ID NO: 198782 - DNA, 25 bp, Canis familiaris
tatctttccaagttcatgttttcat

SEQ ID NO: 198783 - DNA, 25 bp, Canis familiaris
tatacattttcagatcagcttttca

SEQ ID NO: 198784 - DNA, 25 bp, Canis familiaris
tatccttttgacatcccttatcata

SEQ ID NO: 198785 - DNA, 25 bp, Canis familiaris
tatccctttatcagccaccaaaaaa

SEQ ID NO: 198786 - DNA, 25 bp, Canis familiaris
tatccttttatgacaaacaaacaaa

SEQ ID NO: 198787 - DNA, 25 bp, Canis familiaris
tatcatcttctctgaaaaacactaa

SEQ ID NO: 198788 - DNA, 25 bp, Canis familiaris
tatacttcttacgaaaacttgagcc

SEQ ID NO: 198789 - DNA, 25 bp, Canis familiaris
tatcatgttttaaaaggtgttggca

SEQ ID NO: 198790 - DNA, 25 bp, Canis familiaris
tatcatttaccggagggttctgtga

SEQ ID NO: 198791 - DNA, 25 bp, Canis familiaris
tatccggacacaggatgccgttcgc

SEQ ID NO: 198792 - DNA, 25 bp, Canis familiaris
tatccaggcatccaggagctctttc

SEQ ID NO: 198793 - DNA, 25 bp, Canis familiaris
tatccaggctgcctattctctttgt

SEQ ID NO: 198794 - DNA, 25 bp, Canis familiaris
tatccggcacataattcctttttac

SEQ ID NO: 198795 - DNA, 25 bp, Canis familiaris
tatccagcagactttctttcttttc

SEQ ID NO: 198796 - DNA, 25 bp, Canis familiaris
tatcgcatcagaagcatttttcttt

SEQ ID NO: 198797 - DNA, 25 bp, Canis familiaris
tatctgatcgatggtgtcccttttt

SEQ ID NO: 198798 - DNA, 25 bp, Canis familiaris
tatcattcatatttcatccctttta

SEQ ID NO: 198799 - DNA, 25 bp, Canis familiaris
tatatgtttaatacccggacaatat

SEQ ID NO: 198800 - DNA, 25 bp, Canis familiaris
tttgtgttatgatccaagccaaaag

SEQ ID NO: 198801 - DNA, 25 bp, Canis familiaris
tatctctttatgttgtccgccaata

SEQ ID NO: 198802 - DNA, 25 bp, Canis familiaris
tttctattgtgtgtcccgagggagc

SEQ ID NO: 198803 - DNA, 25 bp, Canis familiaris
tttgtctcctatgagtcctgggggc

SEQ ID NO: 198804 - DNA, 25 bp, Canis familiaris
tatttcccgctggaccaattgccag

SEQ ID NO: 198805 - DNA, 25 bp, Canis familiaris
tttgatcctagggaccctggacgga

SEQ ID NO: 198806 - DNA, 25 bp, Canis familiaris
ttttttaggagaaaccgcctgccag

SEQ ID NO: 198807 - DNA, 25 bp, Canis familiaris
tatacttgtaggtaagcccgttcaa

SEQ ID NO: 198808 - DNA, 25 bp, Canis familiaris
tatatcctctgagtgctaacccttt

SEQ ID NO: 198809 - DNA, 25 bp, Canis familiaris
tatcttcgctgtgtaacccgttagt

SEQ ID NO: 198810 - DNA, 25 bp, Canis familiaris
tatctcttgattgtaaacccttagc

SEQ ID NO: 198811 - DNA, 25 bp, Canis familiaris
tatctcagaataaccaaaccctcat

SEQ ID NO: 198812 - DNA, 25 bp, Canis familiaris
tatagataatgtcccatgaagccct

SEQ ID NO: 198813 - DNA, 25 bp, Canis familiaris
tataaatatccccaattgcactcgt

SEQ ID NO: 198814 - DNA, 25 bp, Canis familiaris
tattaatggccaacaatctcgctcc

SEQ ID NO: 198815 - DNA, 25 bp, Canis familiaris
tttaatggaagactctgctttgcag

SEQ ID NO: 198816 - DNA, 25 bp, Canis familiaris
tatcttctggggctctggctctcac

SEQ ID NO: 198817 - DNA, 25 bp, Canis familiaris
tatcattgttggattctgacctgcc

SEQ ID NO: 198818 - DNA, 25 bp, Canis familiaris
tatcttttttcaactatcatttccg

SEQ ID NO: 198819 - DNA, 25 bp, Canis familiaris
tatctgttatttatccaatttttcc

SEQ ID NO: 198820 - DNA, 25 bp, Canis familiaris
tatctgttatttatccatttttccc

SEQ ID NO: 198821 - DNA, 25 bp, Canis familiaris
tatctgttatttatccatttttccc

SEQ ID NO: 198822 - DNA, 25 bp, Canis familiaris
tatctgttatttatccatttttccc

SEQ ID NO: 198823 - DNA, 25 bp, Canis familiaris
tatctgttatttatccatttttccc

SEQ ID NO: 198824 - DNA, 25 bp, Canis familiaris
tttggtgttccaggcttttgcagtc

SEQ ID NO: 198825 - DNA, 25 bp, Canis familiaris
tttgggttcaccacattctgactac

SEQ ID NO: 198826 - DNA, 25 bp, Canis familiaris
ttgtaggtgtaactgtcactggact

SEQ ID NO: 198827 - DNA, 25 bp, Canis familiaris
tatatctactaaacgacactgtgac

SEQ ID NO: 198828 - DNA, 25 bp, Canis familiaris
tattctcactattacggacgatgca

SEQ ID NO: 198829 - DNA, 25 bp, Canis familiaris
tataccagcgatgacgagacgcgcc

SEQ ID NO: 198830 - DNA, 25 bp, Canis familiaris
tatctccaggtgcacgtacggtggg

SEQ ID NO: 198831 - DNA, 25 bp, Canis familiaris
tatctgtccttgcacaggggtgtgg

SEQ ID NO: 198832 - DNA, 25 bp, Canis familiaris
tatctgatcttttcacggaagtggc

SEQ ID NO: 198833 - DNA, 25 bp, Canis familiaris
tatcggtttaccagagcagagactc

SEQ ID NO: 198834 - DNA, 25 bp, Canis familiaris
ttcagtgttaacgggaaggtttctg

SEQ ID NO: 198835 - DNA, 25 bp, Canis familiaris
ttacattcgaacgggcaagtgttgg

SEQ ID NO: 198836 - DNA, 25 bp, Canis familiaris
ttagatctctgcacggtcaagtctg

SEQ ID NO: 198837 - DNA, 25 bp, Canis familiaris
tatagagctagccacggtgcagcct

SEQ ID NO: 198838 - DNA, 25 bp, Canis familiaris
tatacctagcgctgtgacatgctcc

SEQ ID NO: 198839 - DNA, 25 bp, Canis familiaris
tatacaccagacgtgtgctacccac

SEQ ID NO: 198840 - DNA, 25 bp, Canis familiaris
tatatcatccagtttatccgacacc

SEQ ID NO: 198841 - DNA, 25 bp, Canis familiaris
tatatccggatcaccctgatcctct

SEQ ID NO: 198842 - DNA, 25 bp, Canis familiaris
tattactggtgcattcctgagtctc

SEQ ID NO: 198843 - DNA, 25 bp, Canis familiaris
tatagggggtcttcatgcagcagtt

SEQ ID NO: 198844 - DNA, 25 bp, Canis familiaris
tataagggattggctcacacagtta

SEQ ID NO: 198845 - DNA, 25 bp, Canis familiaris
tatacagatggatgccgcctcgttt

SEQ ID NO: 198846 - DNA, 25 bp, Canis familiaris
tatagcgtgatgtaactgccaggtt

SEQ ID NO: 198847 - DNA, 25 bp, Canis familiaris
tatagccttgagaactgccctttta

SEQ ID NO: 198848 - DNA, 25 bp, Canis familiaris
tatactcttggaatctctctgcatt

SEQ ID NO: 198849 - DNA, 25 bp, Canis familiaris
tatagcctctagttccattcatgtt

SEQ ID NO: 198850 - DNA, 25 bp, Canis familiaris
tataccacattacctgcaacagtct

SEQ ID NO: 198851 - DNA, 25 bp, Canis familiaris
tatacccatcctcgatgaaggtgta

SEQ ID NO: 198852 - DNA, 25 bp, Canis familiaris
tatactccacctccatagatgtttt

SEQ ID NO: 198853 - DNA, 25 bp, Canis familiaris
tattacgtctctctggatgtctgtg

SEQ ID NO: 198854 - DNA, 25 bp, Canis familiaris
tatcttcaacttcttgttctggctc

SEQ ID NO: 198855 - DNA, 25 bp, Canis familiaris
tatcctccctcaatcttttgggcta

SEQ ID NO: 198856 - DNA, 25 bp, Canis familiaris
tatcccctgatcagctctctgggga

SEQ ID NO: 198857 - DNA, 25 bp, Canis familiaris
tataacctacacatttgcagcgcaa

SEQ ID NO: 198858 - DNA, 25 bp, Canis familiaris
tatatacgtccactgttgtctcgaa

SEQ ID NO: 198859 - DNA, 25 bp, Canis familiaris
tttagtcccaggcgtctctgaattg

SEQ ID NO: 198860 - DNA, 25 bp, Canis familiaris
ttacaaccttggcccatccataatt

SEQ ID NO: 198861 - DNA, 25 bp, Canis familiaris
tataaacctgggtctctcactactt

SEQ ID NO: 198862 - DNA, 25 bp, Canis familiaris
tataaaacatctcactacatccact

SEQ ID NO: 198863 - DNA, 25 bp, Canis familiaris
tataataaacatcctcaccaccatt

SEQ ID NO: 198864 - DNA, 25 bp, Canis familiaris
tataatagacattcttgcgccacca

SEQ ID NO: 198865 - DNA, 25 bp, Canis familiaris
tataatggtcttatgcccaccacac

SEQ ID NO: 198866 - DNA, 25 bp, Canis familiaris
tataatgtgtccagtccagacctcc

SEQ ID NO: 198867 - DNA, 25 bp, Canis familiaris
ttggatgttcgtgccggaactgctc

SEQ ID NO: 198868 - DNA, 25 bp, Canis familiaris
ttagagttggcctctgtaacctggt

SEQ ID NO: 198869 - DNA, 25 bp, Canis familiaris
tttgggtgtccatccaaagccagtg

SEQ ID NO: 198870 - DNA, 25 bp, Canis familiaris
tattgagggcccttacaagtctaag

SEQ ID NO: 198871 - DNA, 25 bp, Canis familiaris
tattgggacacctcagcagtatcta

SEQ ID NO: 198872 - DNA, 25 bp, Canis familiaris
tatctggtaaccttgctgtgctgtc

SEQ ID NO: 198873 - DNA, 25 bp, Canis familiaris
tatctggctagacctctatgactct

SEQ ID NO: 198874 - DNA, 25 bp, Canis familiaris
tatctgatgtgatgcctgttgagtc

SEQ ID NO: 198875 - DNA, 25 bp, Canis familiaris
tatctgatgtgatgcctgttgagtc

SEQ ID NO: 198876 - DNA, 25 bp, Canis familiaris
tatctgtgtggtgctttgctacctg

SEQ ID NO: 198877 - DNA, 25 bp, Canis familiaris
tatctgctatgggactattgctgtg

SEQ ID NO: 198878 - DNA, 25 bp, Canis familiaris
tattgccgagttatttgggggcccg

SEQ ID NO: 198879 - DNA, 25 bp, Canis familiaris
tttgtcaggcccaggtggtggtcac

SEQ ID NO: 198880 - DNA, 25 bp, Canis familiaris
tttgcacaggtgccaaggggaggcg

SEQ ID NO: 198881 - DNA, 25 bp, Canis familiaris
tttgtgagcgtctcaggggagccgt

SEQ ID NO: 198882 - DNA, 25 bp, Canis familiaris
tttctgggtctaccggaacctgaat

SEQ ID NO: 198883 - DNA, 25 bp, Canis familiaris
tatattgggtttcgccgaatggcga

SEQ ID NO: 198884 - DNA, 25 bp, Canis familiaris
tttggggtggtggcttgacaggggc

SEQ ID NO: 198885 - DNA, 25 bp, Canis familiaris
ttctcaggggtgggtggttggtgga

SEQ ID NO: 198886 - DNA, 25 bp, Canis familiaris
ttcgaggtcgtggaggtcctgggag

SEQ ID NO: 198887 - DNA, 25 bp, Canis familiaris
tttgggtattggagtcctggggcat

SEQ ID NO: 198888 - DNA, 25 bp, Canis familiaris
ttcgggttcaggaggacgcggactc

SEQ ID NO: 198889 - DNA, 25 bp, Canis familiaris
ttcggtgtttacaaggaagggaatg

SEQ ID NO: 198890 - DNA, 25 bp, Canis familiaris
tatcctgctgtttatcatgggtgag

SEQ ID NO: 198891 - DNA, 25 bp, Canis familiaris
tatccatggcctcagcaacgtgaag

SEQ ID NO: 198892 - DNA, 25 bp, Canis familiaris
tatctctactgcctatgaacatgga

SEQ ID NO: 198893 - DNA, 25 bp, Canis familiaris
tatcttcattccatctgcagctgga

SEQ ID NO: 198894 - DNA, 25 bp, Canis familiaris
tatcatctcctccttctagtgagat

SEQ ID NO: 198895 - DNA, 25 bp, Canis familiaris
tatcattgtcttcagctcttcagta

SEQ ID NO: 198896 - DNA, 25 bp, Canis familiaris
tatctgttcttccagctgctattga

SEQ ID NO: 198897 - DNA, 25 bp, Canis familiaris
tatcttctctacatcgtattatgga

SEQ ID NO: 198898 - DNA, 25 bp, Canis familiaris
tatcttatctgtctctgtagttcca

SEQ ID NO: 198899 - DNA, 25 bp, Canis familiaris
tatctttgatatttgcagttgttgc

SEQ ID NO: 198900 - DNA, 25 bp, Canis familiaris
tatttgtaatttgttgttcctaaga

SEQ ID NO: 198901 - DNA, 25 bp, Canis familiaris
tatagtaattttgtgtttttaatgt

SEQ ID NO: 198902 - DNA, 25 bp, Canis familiaris
tatagttgttttggtagcatctggt

SEQ ID NO: 198903 - DNA, 25 bp, Canis familiaris
tatagtatgtttctgaggtctggta

SEQ ID NO: 198904 - DNA, 25 bp, Canis familiaris
tatagattgcatttcttaggtgttt

SEQ ID NO: 198905 - DNA, 25 bp, Canis familiaris
tatctgtagcattgactaaacgttt

SEQ ID NO: 198906 - DNA, 25 bp, Canis familiaris
tatctgtgacagaacctaactgctt

SEQ ID NO: 198907 - DNA, 25 bp, Canis familiaris
tatctgggtggtcccaactggctag

SEQ ID NO: 198908 - DNA, 25 bp, Canis familiaris
tatctggggtgtcccaatctggcta

SEQ ID NO: 198909 - DNA, 25 bp, Canis familiaris
tttgggagtgctgcccacatgggga

SEQ ID NO: 198910 - DNA, 25 bp, Canis familiaris
tttggtaatccccactatgaggaac

SEQ ID NO: 198911 - DNA, 25 bp, Canis familiaris
tattagctcataccctttatttaac

SEQ ID NO: 198912 - DNA, 25 bp, Canis familiaris
tatctagttattctctctttgctga

SEQ ID NO: 198913 - DNA, 25 bp, Canis familiaris
tatctgcatgtctattttccattag

SEQ ID NO: 198914 - DNA, 25 bp, Canis familiaris
tatctgtgtctgtctgttctaagtg

SEQ ID NO: 198915 - DNA, 25 bp, Canis familiaris
tatcttgtatgtggttgcttatcta

SEQ ID NO: 198916 - DNA, 25 bp, Canis familiaris
tatctattcatgtactctgcccatt

SEQ ID NO: 198917 - DNA, 25 bp, Canis familiaris
tatcctgcttgaacttgaccagtgt

SEQ ID NO: 198918 - DNA, 25 bp, Canis familiaris
tatcacctgtatacctagcgctgtg

SEQ ID NO: 198919 - DNA, 25 bp, Canis familiaris
tatccatcagataacctcaggttgc

SEQ ID NO: 198920 - DNA, 25 bp, Canis familiaris
tttgcatcagattcaccggtgtgtg

SEQ ID NO: 198921 - DNA, 25 bp, Canis familiaris
tatacataaacgccacgtctgtgcc

SEQ ID NO: 198922 - DNA, 25 bp, Canis familiaris
ttaaaaagcgttcctgctgtccttt

SEQ ID NO: 198923 - DNA, 25 bp, Canis familiaris
ttttaaacggtcaatgatgtcctta

SEQ ID NO: 198924 - DNA, 25 bp, Canis familiaris
ttttacccggccaatagttgcctct

SEQ ID NO: 198925 - DNA, 25 bp, Canis familiaris
tttgctttacgtggtctagttccct

SEQ ID NO: 198926 - DNA, 25 bp, Canis familiaris
tttgtaaacgctgtgtatttcccct

SEQ ID NO: 198927 - DNA, 25 bp, Canis familiaris
tatatgttgaacggttattgattag

SEQ ID NO: 198928 - DNA, 25 bp, Canis familiaris
tatattatggaccgaaattaataac

SEQ ID NO: 198929 - DNA, 25 bp, Canis familiaris
tatagttatgcccgacatgaccact

SEQ ID NO: 198930 - DNA, 25 bp, Canis familiaris
tatagtcttctctgtaagacacttt

SEQ ID NO: 198931 - DNA, 25 bp, Canis familiaris
tatattttgcccgttagaagagaat

SEQ ID NO: 198932 - DNA, 25 bp, Canis familiaris
tatactgtgtaactgcttaaagaat

SEQ ID NO: 198933 - DNA, 25 bp, Canis familiaris
tatactctatgccctgctaaaccaa

SEQ ID NO: 198934 - DNA, 25 bp, Canis familiaris
tatcctctagaggctgctacacata

SEQ ID NO: 198935 - DNA, 25 bp, Canis familiaris
tatcctctggaaggctcacagccac

SEQ ID NO: 198936 - DNA, 25 bp, Canis familiaris
tatctgtgtgagatggctttccccc

SEQ ID NO: 198937 - DNA, 25 bp, Canis familiaris
tatctttgttatccttactcacttc

SEQ ID NO: 198938 - DNA, 25 bp, Canis familiaris
tatcctttagtatttcctcatcttc

SEQ ID NO: 198939 - DNA, 25 bp, Canis familiaris
tatctcttgggagttagccctctcc

SEQ ID NO: 198940 - DNA, 25 bp, Canis familiaris
tatctgtatggggtgcacagccctt

SEQ ID NO: 198941 - DNA, 25 bp, Canis familiaris
tatcctatggagtgatcccctcatt

SEQ ID NO: 198942 - DNA, 25 bp, Canis familiaris
tatctcttaggctgtcgccttgcat

SEQ ID NO: 198943 - DNA, 25 bp, Canis familiaris
tatctgcttaggtctactcttgtct

SEQ ID NO: 198944 - DNA, 25 bp, Canis familiaris
tatctgatgtaacctacctaactca

SEQ ID NO: 198945 - DNA, 25 bp, Canis familiaris
tatcttccacagtctacaccagact

SEQ ID NO: 198946 - DNA, 25 bp, Canis familiaris
tattttccagtttcagggatgcatc

SEQ ID NO: 198947 - DNA, 25 bp, Canis familiaris
tattctgaggccctacaggtgactc

SEQ ID NO: 198948 - DNA, 25 bp, Canis familiaris
tatttgaagcctcagtcaggcccct

SEQ ID NO: 198949 - DNA, 25 bp, Canis familiaris
tatttgatatgttccgtcggttacc

SEQ ID NO: 198950 - DNA, 25 bp, Canis familiaris
tatttgcaaggacgcctgctggttc

SEQ ID NO: 198951 - DNA, 25 bp, Canis familiaris
tatttaaggtgccctgcttgtactc

SEQ ID NO: 198952 - DNA, 25 bp, Canis familiaris
tatttgtcaaccccgatttagtcgt

SEQ ID NO: 198953 - DNA, 25 bp, Canis familiaris
tatttggaaccttgttttggacagt

SEQ ID NO: 198954 - DNA, 25 bp, Canis familiaris
ttgggaacaccctttcctggaagag

SEQ ID NO: 198955 - DNA, 25 bp, Canis familiaris
tttgtgcccaccagtacctggtgaa

SEQ ID NO: 198956 - DNA, 25 bp, Canis familiaris
tattcccttccgcaacattggagat

SEQ ID NO: 198957 - DNA, 25 bp, Canis familiaris
tataccattcccacatttataggat

SEQ ID NO: 198958 - DNA, 25 bp, Canis familiaris
tatacctggcctctgatatttaagt

SEQ ID NO: 198959 - DNA, 25 bp, Canis familiaris
ttaggggcctgttgtttaagactgg

SEQ ID NO: 198960 - DNA, 25 bp, Canis familiaris
tttgcgtggccgctgatcggaaacg

SEQ ID NO: 198961 - DNA, 25 bp, Canis familiaris
tatatcgtgcagtcgggatcgtgaa

SEQ ID NO: 198962 - DNA, 25 bp, Canis familiaris
tatacagacactttgaatatgctaa

SEQ ID NO: 198963 - DNA, 25 bp, Canis familiaris
tatagatatccatccaaatgctgca

SEQ ID NO: 198964 - DNA, 25 bp, Canis familiaris
tatcaaactgcattccacatattat

SEQ ID NO: 198965 - DNA, 25 bp, Canis familiaris
tatcaactggcattccactatatta

SEQ ID NO: 198966 - DNA, 25 bp, Canis familiaris
tatcacctttatcactatatctgta

SEQ ID NO: 198967 - DNA, 25 bp, Canis familiaris
tataccaagctatcctatgccttca

SEQ ID NO: 198968 - DNA, 25 bp, Canis familiaris
tatcaggaagtaattttccttgcag

SEQ ID NO: 198969 - DNA, 25 bp, Canis familiaris
tatatgcataatgaatttccgtgta

SEQ ID NO: 198970 - DNA, 25 bp, Canis familiaris
tatacattatgcacatttcagggaa

SEQ ID NO: 198971 - DNA, 25 bp, Canis familiaris
tataatgtgtgattctttctggaga

SEQ ID NO: 198972 - DNA, 25 bp, Canis familiaris
tatactgtgatttctctactggcga

SEQ ID NO: 198973 - DNA, 25 bp, Canis familiaris
tatacttgagcttccatacttaaaa

SEQ ID NO: 198974 - DNA, 25 bp, Canis familiaris
tatactatagatattccttgacaaa

SEQ ID NO: 198975 - DNA, 25 bp, Canis familiaris
tatactcaagctgtctgcttcagaa

SEQ ID NO: 198976 - DNA, 25 bp, Canis familiaris
tataccagacatttctttatgcatg

SEQ ID NO: 198977 - DNA, 25 bp, Canis familiaris
tatttcatggattttttagagggac

SEQ ID NO: 198978 - DNA, 25 bp, Canis familiaris
tatcttgtggtaggtatcttgggta

SEQ ID NO: 198979 - DNA, 25 bp, Canis familiaris
tatcttgcaggttttatttggtgaa

SEQ ID NO: 198980 - DNA, 25 bp, Canis familiaris
tatctcggtgttcatattatattta

SEQ ID NO: 198981 - DNA, 25 bp, Canis familiaris
tatctcgtgctctttattttttaat

SEQ ID NO: 198982 - DNA, 25 bp, Canis familiaris
tatcacagtgccttaaatctcttta

SEQ ID NO: 198983 - DNA, 25 bp, Canis familiaris
tatacgtccattccacagttgtaaa

SEQ ID NO: 198984 - DNA, 25 bp, Canis familiaris
tttggtccatagtcacacatcgtta

SEQ ID NO: 198985 - DNA, 25 bp, Canis familiaris
tatttggtcatcaaccacctttctg

SEQ ID NO: 198986 - DNA, 25 bp, Canis familiaris
tatattcgtaacatgccacttttgc

SEQ ID NO: 198987 - DNA, 25 bp, Canis familiaris
tatttcgtaacgtctatcataggtc

SEQ ID NO: 198988 - DNA, 25 bp, Canis familiaris
tatatgtcgaagggtcctctagcct

SEQ ID NO: 198989 - DNA, 25 bp, Canis familiaris
tatactcagttgggtccctgaccca

SEQ ID NO: 198990 - DNA, 25 bp, Canis familiaris
tatatctcacttcatgtccattgct

SEQ ID NO: 198991 - DNA, 25 bp, Canis familiaris
tattctacttaaccctacatacacc

SEQ ID NO: 198992 - DNA, 25 bp, Canis familiaris
tatttcagttaccatccccatagaa

SEQ ID NO: 198993 - DNA, 25 bp, Canis familiaris
tattcaagtctcaagactgcccagt

SEQ ID NO: 198994 - DNA, 25 bp, Canis familiaris
tattcaagtctctggacctcaagcc

SEQ ID NO: 198995 - DNA, 25 bp, Canis familiaris
tattagggttgggcagttgaaccaa

SEQ ID NO: 198996 - DNA, 25 bp, Canis familiaris
tttcggagctgggggttaacactgt

SEQ ID NO: 198997 - DNA, 25 bp, Canis familiaris
tttccacagtggtagtttacatttt

SEQ ID NO: 198998 - DNA, 25 bp, Canis familiaris
tatttgctgcgggtagctttttttt

SEQ ID NO: 198999 - DNA, 25 bp, Canis familiaris
tatactccgacacatctctatttgt

SEQ ID NO: 199000 - DNA, 25 bp, Canis familiaris
tataatttgaaattcctgatgtatt

SEQ ID NO: 199001 - DNA, 25 bp, Canis familiaris
tttatttaaaatctcttcctcctca

SEQ ID NO: 199002 - DNA, 25 bp, Canis familiaris
tataatttaaaacctctcctggcct

SEQ ID NO: 199003 - DNA, 25 bp, Canis familiaris
tattagttaaatacctgacctaggt

SEQ ID NO: 199004 - DNA, 25 bp, Canis familiaris
taacataagttatcccactgggttt

SEQ ID NO: 199005 - DNA, 25 bp, Canis familiaris
tattaaattaacaggcaagctggcc

SEQ ID NO: 199006 - DNA, 25 bp, Canis familiaris
tattatggattattcttggacagag

SEQ ID NO: 199007 - DNA, 25 bp, Canis familiaris
tatatattatttgctttaccgggaa

SEQ ID NO: 199008 - DNA, 25 bp, Canis familiaris
tataatattttttttacttgtgtag

SEQ ID NO: 199009 - DNA, 25 bp, Canis familiaris
tattcagaattcgttttagctttat

SEQ ID NO: 199010 - DNA, 25 bp, Canis familiaris
ttcggaaccagctgtgggttttcta

SEQ ID NO: 199011 - DNA, 25 bp, Canis familiaris
ttaagtcgctagtggggttgcccga

SEQ ID NO: 199012 - DNA, 25 bp, Canis familiaris
tataagccctggtggggattacttg

SEQ ID NO: 199013 - DNA, 25 bp, Canis familiaris
tattgtgcccggtgtgggtacttca

SEQ ID NO: 199014 - DNA, 25 bp, Canis familiaris
tattcccagcggatgggttgtgttc

SEQ ID NO: 199015 - DNA, 25 bp, Canis familiaris
tattctctacggagccttttgtcca

SEQ ID NO: 199016 - DNA, 25 bp, Canis familiaris
tattactacgggaccttcacagtta

SEQ ID NO: 199017 - DNA, 25 bp, Canis familiaris
tttttaaggtaacatcacttatcat

SEQ ID NO: 199018 - DNA, 25 bp, Canis familiaris
tttgttctaggtccactaaactaca

SEQ ID NO: 199019 - DNA, 25 bp, Canis familiaris
ttgtgccttaggagactggaaattt

SEQ ID NO: 199020 - DNA, 25 bp, Canis familiaris
ttatgttccctgagacgtaaaattt

SEQ ID NO: 199021 - DNA, 25 bp, Canis familiaris
tattttcccgtttctgtagaagcct

SEQ ID NO: 199022 - DNA, 25 bp, Canis familiaris
tatttccacactattttaacttcag

SEQ ID NO: 199023 - DNA, 25 bp, Canis familiaris
tatttttcactttcctatataccta

SEQ ID NO: 199024 - DNA, 25 bp, Canis familiaris
tatttgactaatatttcactaccta

SEQ ID NO: 199025 - DNA, 25 bp, Canis familiaris
tatttacctgattttatccccactt

SEQ ID NO: 199026 - DNA, 25 bp, Canis familiaris
tatttaattgccaggtcccacactt

SEQ ID NO: 199027 - DNA, 25 bp, Canis familiaris
tatatatattctgaagggaaccact

SEQ ID NO: 199028 - DNA, 25 bp, Canis familiaris
tataatatttcccacagaaagccct

SEQ ID NO: 199029 - DNA, 25 bp, Canis familiaris
tatattaattcacgagagacagaga

SEQ ID NO: 199030 - DNA, 25 bp, Canis familiaris
tatatttactcacgagagacacaga

SEQ ID NO: 199031 - DNA, 25 bp, Canis familiaris
tattatactgcctgagatagccaga

SEQ ID NO: 199032 - DNA, 25 bp, Canis familiaris
tataatagcccgtgcttgacacatt

SEQ ID NO: 199033 - DNA, 25 bp, Canis familiaris
tatacataccacgggcttacactat

SEQ ID NO: 199034 - DNA, 25 bp, Canis familiaris
tatacttaaagcactgatacacatt

SEQ ID NO: 199035 - DNA, 25 bp, Canis familiaris
tataattaaacactttctccttatt

SEQ ID NO: 199036 - DNA, 25 bp, Canis familiaris
tataacataacttggttcccctctg

SEQ ID NO: 199037 - DNA, 25 bp, Canis familiaris
tatcagaataagttccttctccctt

SEQ ID NO: 199038 - DNA, 25 bp, Canis familiaris
ttcaacaatttgtcttgtccccgtt

SEQ ID NO: 199039 - DNA, 25 bp, Canis familiaris
ttaaaatatgggggctctggaggtt

SEQ ID NO: 199040 - DNA, 25 bp, Canis familiaris
tataaaaatttttctctgggagttg

SEQ ID NO: 199041 - DNA, 25 bp, Canis familiaris
tatacaaagctttatttagggggtg

SEQ ID NO: 199042 - DNA, 25 bp, Canis familiaris
tatcagcggacgtcactttaggggg

SEQ ID NO: 199043 - DNA, 25 bp, Canis familiaris
ttagcttactaacttgtatctggga

SEQ ID NO: 199044 - DNA, 25 bp, Canis familiaris
tattgcgtttaccttaattggaagg

SEQ ID NO: 199045 - DNA, 25 bp, Canis familiaris
tattcattttacgttactggtcccg

SEQ ID NO: 199046 - DNA, 25 bp, Canis familiaris
tatcacgtgttatatttctaatcct

SEQ ID NO: 199047 - DNA, 25 bp, Canis familiaris
tataatggctcctcattttgcttcc

SEQ ID NO: 199048 - DNA, 25 bp, Canis familiaris
tatactgacatctttctgtgttttc

SEQ ID NO: 199049 - DNA, 25 bp, Canis familiaris
tataatgtcatcttttttttccggg

SEQ ID NO: 199050 - DNA, 25 bp, Canis familiaris
tatcactgttttttttacttctgga

SEQ ID NO: 199051 - DNA, 25 bp, Canis familiaris
tatcactttcttttctagttccttg

SEQ ID NO: 199052 - DNA, 25 bp, Canis familiaris
tattataacttaacgtgttcctttg

SEQ ID NO: 199053 - DNA, 25 bp, Canis familiaris
tatctgaacttccagaccgttcctt

SEQ ID NO: 199054 - DNA, 25 bp, Canis familiaris
tatctgaacttccagaccgttcctt

SEQ ID NO: 199055 - DNA, 25 bp, Canis familiaris
tatctaacttgaaacctgactgctt

SEQ ID NO: 199056 - DNA, 25 bp, Canis familiaris
tatatacatcctaaaccatccctta

SEQ ID NO: 199057 - DNA, 25 bp, Canis familiaris
tttgaaccaataacagcaccgtcta

SEQ ID NO: 199058 - DNA, 25 bp, Canis familiaris
tttggcaacaataactggagagtgc

SEQ ID NO: 199059 - DNA, 25 bp, Canis familiaris
tttggctacagaacagctccaggtt

SEQ ID NO: 199060 - DNA, 25 bp, Canis familiaris
ttgatgtaaagactaccgatggtta

SEQ ID NO: 199061 - DNA, 25 bp, Canis familiaris
tatattaaagttgctgcagttaaaa

SEQ ID NO: 199062 - DNA, 25 bp, Canis familiaris
tttataaaattgtatgctttcagaa

SEQ ID NO: 199063 - DNA, 25 bp, Canis familiaris
tattatacatcattgtaatctatgt

SEQ ID NO: 199064 - DNA, 25 bp, Canis familiaris
tatcttcactgatttcacctgcatg

SEQ ID NO: 199065 - DNA, 25 bp, Canis familiaris
tatcattgcagctaataaagctgat

SEQ ID NO: 199066 - DNA, 25 bp, Canis familiaris
ttatagcatcataatctgacaatga

SEQ ID NO: 199067 - DNA, 25 bp, Canis familiaris
ttatcacactgcctcagatgcataa

SEQ ID NO: 199068 - DNA, 25 bp, Canis familiaris
tattgccactcacctgagaacagcc

SEQ ID NO: 199069 - DNA, 25 bp, Canis familiaris
tatatggagctctcaggcacacacc

SEQ ID NO: 199070 - DNA, 25 bp, Canis familiaris
tataagctgcgtgcaggcaccggct

SEQ ID NO: 199071 - DNA, 25 bp, Canis familiaris
tatacacacagaacacacacctact

SEQ ID NO: 199072 - DNA, 25 bp, Canis familiaris
tatctagaatataacaccgcttctg

SEQ ID NO: 199073 - DNA, 25 bp, Canis familiaris
tatctaaaacaaatgcccttccccg

SEQ ID NO: 199074 - DNA, 25 bp, Canis familiaris
tattgaaagaggaacccttgccccg

SEQ ID NO: 199075 - DNA, 25 bp, Canis familiaris
tataaatgggacaacttcttgccct

SEQ ID NO: 199076 - DNA, 25 bp, Canis familiaris
tataatatgtaccattcttcccgcc

SEQ ID NO: 199077 - DNA, 25 bp, Canis familiaris
tatagaatctgttacttctctcccc

SEQ ID NO: 199078 - DNA, 25 bp, Canis familiaris
tatagactgttatcttgttggccct

SEQ ID NO: 199079 - DNA, 25 bp, Canis familiaris
tatatgttattctcatttagtgccc

SEQ ID NO: 199080 - DNA, 25 bp, Canis familiaris
tattttattcggacctcattggccc

SEQ ID NO: 199081 - DNA, 25 bp, Canis familiaris
tatattaattgcctggctctccaga

SEQ ID NO: 199082 - DNA, 25 bp, Canis familiaris
tatattctaatgctgtctaaaacac

SEQ ID NO: 199083 - DNA, 25 bp, Canis familiaris
tatcttctacagcttctgtcactca

SEQ ID NO: 199084 - DNA, 25 bp, Canis familiaris
tatctttgacaacttcctcatcacc

SEQ ID NO: 199085 - DNA, 25 bp, Canis familiaris
tattcttcaccgttggacatgccca

SEQ ID NO: 199086 - DNA, 25 bp, Canis familiaris
tattaatcacgcgatgttgactgca

SEQ ID NO: 199087 - DNA, 25 bp, Canis familiaris
tataaacacgggaccactgccaagg

SEQ ID NO: 199088 - DNA, 25 bp, Canis familiaris
tttaaagccctgtggctccaagcct

SEQ ID NO: 199089 - DNA, 25 bp, Canis familiaris
tttaaggaccttctcttcaacacct

SEQ ID NO: 199090 - DNA, 25 bp, Canis familiaris
tttgaaggactcattctttcctccc

SEQ ID NO: 199091 - DNA, 25 bp, Canis familiaris
tattaatggatttttatttcctccg

SEQ ID NO: 199092 - DNA, 25 bp, Canis familiaris
tataaatggtatttttggggttcat

SEQ ID NO: 199093 - DNA, 25 bp, Canis familiaris
tatttatggatttttggggactatt

SEQ ID NO: 199094 - DNA, 25 bp, Canis familiaris
tatttatgaatttttgggactattt

SEQ ID NO: 199095 - DNA, 25 bp, Canis familiaris
tataactggctttcttgggattttt

SEQ ID NO: 199096 - DNA, 25 bp, Canis familiaris
tataatctcccttccattaattctt

SEQ ID NO: 199097 - DNA, 25 bp, Canis familiaris
tataatcctcttaacatttgtcttt

SEQ ID NO: 199098 - DNA, 25 bp, Canis familiaris
tatatagccgccaattagtttcctt

SEQ ID NO: 199099 - DNA, 25 bp, Canis familiaris
tatcatagcactcctactaatctcc

SEQ ID NO: 199100 - DNA, 25 bp, Canis familiaris
tatcagtcctgacttttattcccat

SEQ ID NO: 199101 - DNA, 25 bp, Canis familiaris
tatagttctcatagtgtaattacac

SEQ ID NO: 199102 - DNA, 25 bp, Canis familiaris
tatagctgggcaatggttactactc

SEQ ID NO: 199103 - DNA, 25 bp, Canis familiaris
tatagctcttgcttggagaacccat

SEQ ID NO: 199104 - DNA, 25 bp, Canis familiaris
tatagccttgtccgggaatccagca

SEQ ID NO: 199105 - DNA, 25 bp, Canis familiaris
tattccattgacaggagaccaatca

SEQ ID NO: 199106 - DNA, 25 bp, Canis familiaris
tatataatgctgaaggggaccactc

SEQ ID NO: 199107 - DNA, 25 bp, Canis familiaris
tataagtctcaaccgacccaacatg

SEQ ID NO: 199108 - DNA, 25 bp, Canis familiaris
tataggtgatacagccctccatact

SEQ ID NO: 199109 - DNA, 25 bp, Canis familiaris
tatatcgtggacaacaccccatgca

SEQ ID NO: 199110 - DNA, 25 bp, Canis familiaris
tatacctgtgcaaacaatctcaaga

SEQ ID NO: 199111 - DNA, 25 bp, Canis familiaris
tataatcttttcaaatctctataaa

SEQ ID NO: 199112 - DNA, 25 bp, Canis familiaris
tatatggtttctcttctctttaatg

SEQ ID NO: 199113 - DNA, 25 bp, Canis familiaris
tatatggcatttttccagttttact

SEQ ID NO: 199114 - DNA, 25 bp, Canis familiaris
tatcttgttaacacagtttctacta

SEQ ID NO: 199115 - DNA, 25 bp, Canis familiaris
tatcttttgttcaaagttcttccca

SEQ ID NO: 199116 - DNA, 25 bp, Canis familiaris
tatttcatagtttcagagttttcaa

SEQ ID NO: 199117 - DNA, 25 bp, Canis familiaris
tatattgtagtgtcaacatttttaa

SEQ ID NO: 199118 - DNA, 25 bp, Canis familiaris
tattttctcgaaaacattttgaaca

SEQ ID NO: 199119 - DNA, 25 bp, Canis familiaris
ttttttccataattactacagggca

SEQ ID NO: 199120 - DNA, 25 bp, Canis familiaris
tatttttcttaacacatcaagggta

SEQ ID NO: 199121 - DNA, 25 bp, Canis familiaris
tattttccttaactacaaaggcaca

SEQ ID NO: 199122 - DNA, 25 bp, Canis familiaris
tatcttttcttcttgctgaaaataa

SEQ ID NO: 199123 - DNA, 25 bp, Canis familiaris
tatcttccttgtctgcatccaaaga

SEQ ID NO: 199124 - DNA, 25 bp, Canis familiaris
tatctccttctgcatatctcaaaag

SEQ ID NO: 199125 - DNA, 25 bp, Canis familiaris
tatcatccttcattctcctagaaac

SEQ ID NO: 199126 - DNA, 25 bp, Canis familiaris
tataccttctccaagccagaaacca

SEQ ID NO: 199127 - DNA, 25 bp, Canis familiaris
tatttcttcgccactcaggaagtgc

SEQ ID NO: 199128 - DNA, 25 bp, Canis familiaris
tatttctctccagcctggctgaatt

SEQ ID NO: 199129 - DNA, 25 bp, Canis familiaris
tatctttttcccaatgtgctgttaa

SEQ ID NO: 199130 - DNA, 25 bp, Canis familiaris
tatcttcatttctggttggactgca

SEQ ID NO: 199131 - DNA, 25 bp, Canis familiaris
tattgccagcttgctggctagtttc

SEQ ID NO: 199132 - DNA, 25 bp, Canis familiaris
tatatgaggcttgctcctatggctc

SEQ ID NO: 199133 - DNA, 25 bp, Canis familiaris
tatcatggccctggccgtatgtctc

SEQ ID NO: 199134 - DNA, 25 bp, Canis familiaris
tatcatggtccccggggtccatgaa

SEQ ID NO: 199135 - DNA, 25 bp, Canis familiaris
tatagacctgcccggggggagacaa

SEQ ID NO: 199136 - DNA, 25 bp, Canis familiaris
tatagcctgggaccatgggggacca

SEQ ID NO: 199137 - DNA, 25 bp, Canis familiaris
tatagggagaggcctgtggcggcgg

SEQ ID NO: 199138 - DNA, 25 bp, Canis familiaris
ttgagtggaagttcggtcgtcgggg

SEQ ID NO: 199139 - DNA, 25 bp, Canis familiaris
ttgtagtgacgctcggtcgtagtgg

SEQ ID NO: 199140 - DNA, 25 bp, Canis familiaris
tattcagcttggtgaagtcgccagg

SEQ ID NO: 199141 - DNA, 25 bp, Canis familiaris
tataccattgtttaagatctcctgt

SEQ ID NO: 199142 - DNA, 25 bp, Canis familiaris
tataaaagtgtatggtgtctatgtg

SEQ ID NO: 199143 - DNA, 25 bp, Canis familiaris
tatataaaattatcagcttcctgga

SEQ ID NO: 199144 - DNA, 25 bp, Canis familiaris
tataaaaatcttggccattattcaa

SEQ ID NO: 199145 - DNA, 25 bp, Canis familiaris
tatacagagcatttgttgccatctg

SEQ ID NO: 199146 - DNA, 25 bp, Canis familiaris
tatacacctcatgctagcctcatga

SEQ ID NO: 199147 - DNA, 25 bp, Canis familiaris
tataatgccttgttgtgcctcaata

SEQ ID NO: 199148 - DNA, 25 bp, Canis familiaris
tataagcctgcattgctgttccgtg

SEQ ID NO: 199149 - DNA, 25 bp, Canis familiaris
tattgaccgcattgccatacctgat

SEQ ID NO: 199150 - DNA, 25 bp, Canis familiaris
tatatagggatagtatgagccaata

SEQ ID NO: 199151 - DNA, 25 bp, Canis familiaris
tataacatgttatttcagaccataa

SEQ ID NO: 199152 - DNA, 25 bp, Canis familiaris
tataactgtgtacccagcacctagc

SEQ ID NO: 199153 - DNA, 25 bp, Canis familiaris
tattacatggcttcccagacttgga

SEQ ID NO: 199154 - DNA, 25 bp, Canis familiaris
tatattatcgctaatccaacgggag

SEQ ID NO: 199155 - DNA, 25 bp, Canis familiaris
tatagtagcagtatccaccgtgaac

SEQ ID NO: 199156 - DNA, 25 bp, Canis familiaris
tatagtaaaagcacagtcctgaaaa

SEQ ID NO: 199157 - DNA, 25 bp, Canis familiaris
tatagctaaatacacattcctttca

SEQ ID NO: 199158 - DNA, 25 bp, Canis familiaris
tatagctgaaatttattaagccatc

SEQ ID NO: 199159 - DNA, 25 bp, Canis familiaris
tatttgcccatttattagacgatct

SEQ ID NO: 199160 - DNA, 25 bp, Canis familiaris
tattccaagcattctttcaactaca

SEQ ID NO: 199161 - DNA, 25 bp, Canis familiaris
tatttaaaagttacatccattgata

SEQ ID NO: 199162 - DNA, 25 bp, Canis familiaris
tatttagtactttcaaccatagctg

SEQ ID NO: 199163 - DNA, 25 bp, Canis familiaris
tatttactgtttccaaccatatata

SEQ ID NO: 199164 - DNA, 25 bp, Canis familiaris
tatttagtgctgcctctctaacttt

SEQ ID NO: 199165 - DNA, 25 bp, Canis familiaris
tatattaacatcctttttctttttg

SEQ ID NO: 199166 - DNA, 25 bp, Canis familiaris
tatcataactgcttctttttttttt

SEQ ID NO: 199167 - DNA, 25 bp, Canis familiaris
tatatacctcctctctatattttct

SEQ ID NO: 199168 - DNA, 25 bp, Canis familiaris
tatatcactgtgctttttacctacc

SEQ ID NO: 199169 - DNA, 25 bp, Canis familiaris
tatatgatgtggctttaatacgtga

SEQ ID NO: 199170 - DNA, 25 bp, Canis familiaris
tattttggagttcaatacatctatg

SEQ ID NO: 199171 - DNA, 25 bp, Canis familiaris
tatttttgactaccgtgacctatcc

SEQ ID NO: 199172 - DNA, 25 bp, Canis familiaris
tattttgttccaccagtaccttggt

SEQ ID NO: 199173 - DNA, 25 bp, Canis familiaris
tattttggcccaatataacacacca

SEQ ID NO: 199174 - DNA, 25 bp, Canis familiaris
tatatcttgtgcactatctactatc

SEQ ID NO: 199175 - DNA, 25 bp, Canis familiaris
tatatcttctctctgactaatctgc

SEQ ID NO: 199176 - DNA, 25 bp, Canis familiaris
tataatcctcagtctactaatcctt

SEQ ID NO: 199177 - DNA, 25 bp, Canis familiaris
tataatcgtcgactacacttccatt

SEQ ID NO: 199178 - DNA, 25 bp, Canis familiaris
tattccgtctgaatacatgttcact

SEQ ID NO: 199179 - DNA, 25 bp, Canis familiaris
tatacactcctattattgttacaag

SEQ ID NO: 199180 - DNA, 25 bp, Canis familiaris
tatagccatctattgattttgtaaa

SEQ ID NO: 199181 - DNA, 25 bp, Canis familiaris
tatcatgccattttatatttcctaa

SEQ ID NO: 199182 - DNA, 25 bp, Canis familiaris
tatcattctgtcattatattctaat

SEQ ID NO: 199183 - DNA, 25 bp, Canis familiaris
tatatgatctcctttatttaaaaaa

SEQ ID NO: 199184 - DNA, 25 bp, Canis familiaris
tatttcccttattttgatttaatca

SEQ ID NO: 199185 - DNA, 25 bp, Canis familiaris
tatttccgtttgtgtcactaaaagg

SEQ ID NO: 199186 - DNA, 25 bp, Canis familiaris
tatatttccgtttgtgtcactaaaa

SEQ ID NO: 199187 - DNA, 25 bp, Canis familiaris
tatagtttcttttctgtcactgaaa

SEQ ID NO: 199188 - DNA, 25 bp, Canis familiaris
tatatattcaataccctaccgaaac

SEQ ID NO: 199189 - DNA, 25 bp, Canis familiaris
tatcttgtgcactatctactatctc

SEQ ID NO: 199190 - DNA, 25 bp, Canis familiaris
tatcactgatgctttcacactattt

SEQ ID NO: 199191 - DNA, 25 bp, Canis familiaris
tatcactgatcatctaactactcac

SEQ ID NO: 199192 - DNA, 25 bp, Canis familiaris
tatcacttagtttattttcacctga

SEQ ID NO: 199193 - DNA, 25 bp, Canis familiaris
tatcacctttttattcttcatgctg

SEQ ID NO: 199194 - DNA, 25 bp, Canis familiaris
ttacctgagtttagagtgcttgcgt

SEQ ID NO: 199195 - DNA, 25 bp, Canis familiaris
ttatcctgaaccatcaggcccaatc

SEQ ID NO: 199196 - DNA, 25 bp, Canis familiaris
tttagcagaacgcttggcacgcttt

SEQ ID NO: 199197 - DNA, 25 bp, Canis familiaris
tttaccataccagtcagatccgtta

SEQ ID NO: 199198 - DNA, 25 bp, Canis familiaris
tttgaccactcttcagagatcggat

SEQ ID NO: 199199 - DNA, 25 bp, Canis familiaris
tattgactacagtatccaattggta

SEQ ID NO: 199200 - DNA, 25 bp, Canis familiaris
tattatccaatgcattctagaggta

SEQ ID NO: 199201 - DNA, 25 bp, Canis familiaris
tattaccttggatcgcgatgatgtg

SEQ ID NO: 199202 - DNA, 25 bp, Canis familiaris
tattactttggatctcgatgatgtg

SEQ ID NO: 199203 - DNA, 25 bp, Canis familiaris
tattaagatatccagtccgtgacga

SEQ ID NO: 199204 - DNA, 25 bp, Canis familiaris
tattaggttatggtccgcggaacat

SEQ ID NO: 199205 - DNA, 25 bp, Canis familiaris
tatacaggataatttcccggacaaa

SEQ ID NO: 199206 - DNA, 25 bp, Canis familiaris
tatatatgtccgtttcccttacata

SEQ ID NO: 199207 - DNA, 25 bp, Canis familiaris
tatatagtgctctattaccctctca

SEQ ID NO: 199208 - DNA, 25 bp, Canis familiaris
tataattgcatctgaattccctcct

SEQ ID NO: 199209 - DNA, 25 bp, Canis familiaris
tataatgctgaaggggaccactctt

SEQ ID NO: 199210 - DNA, 25 bp, Canis familiaris
tatcatctggaaagtctaccctctt

SEQ ID NO: 199211 - DNA, 25 bp, Canis familiaris
tatcatgctctttatttactttctt

SEQ ID NO: 199212 - DNA, 25 bp, Canis familiaris
tatacttatctattctactcttctc

SEQ ID NO: 199213 - DNA, 25 bp, Canis familiaris
tatactgtatcaatgtctatttttt

SEQ ID NO: 199214 - DNA, 25 bp, Canis familiaris
tatcacttgtcaatcacttcctgtt

SEQ ID NO: 199215 - DNA, 25 bp, Canis familiaris
tatcattttctatattccttatgct

SEQ ID NO: 199216 - DNA, 25 bp, Canis familiaris
tatattttcctaggtaatttgctta

SEQ ID NO: 199217 - DNA, 25 bp, Canis familiaris
tattgtccctaagctaatttcgtcc

SEQ ID NO: 199218 - DNA, 25 bp, Canis familiaris
tatcatgctccaaatatttaaatat

SEQ ID NO: 199219 - DNA, 25 bp, Canis familiaris
tatatctatcatgtttcttaatcta

SEQ ID NO: 199220 - DNA, 25 bp, Canis familiaris
tatttatcatactgttactatctac

SEQ ID NO: 199221 - DNA, 25 bp, Canis familiaris
tattctcaattctgtatttatcaac

SEQ ID NO: 199222 - DNA, 25 bp, Canis familiaris
tatttctccctgttgcattttcaac

SEQ ID NO: 199223 - DNA, 25 bp, Canis familiaris
tattatatgccctaatttattaatc

SEQ ID NO: 199224 - DNA, 25 bp, Canis familiaris
tattacacccaacctaattaacaat

SEQ ID NO: 199225 - DNA, 25 bp, Canis familiaris
tatttcctatattcccaattactaa

SEQ ID NO: 199226 - DNA, 25 bp, Canis familiaris
tattctctttgagccctactattga

SEQ ID NO: 199227 - DNA, 25 bp, Canis familiaris
tatatacggggccccttctgatagc

SEQ ID NO: 199228 - DNA, 25 bp, Canis familiaris
tataacctggagccccattcaataa

SEQ ID NO: 199229 - DNA, 25 bp, Canis familiaris
tataaccagagatcctgcttcgaca

SEQ ID NO: 199230 - DNA, 25 bp, Canis familiaris
tatacataatttagcattctcatac

SEQ ID NO: 199231 - DNA, 25 bp, Canis familiaris
tataccaacatttgatatgctaaaa

SEQ ID NO: 199232 - DNA, 25 bp, Canis familiaris
tataccaccagatgcaacatacata

SEQ ID NO: 199233 - DNA, 25 bp, Canis familiaris
tatagccctcgaggctcacagacaa

SEQ ID NO: 199234 - DNA, 25 bp, Canis familiaris
tatacagcctcattacctcaggcaa

SEQ ID NO: 199235 - DNA, 25 bp, Canis familiaris
tataccacatcaatgcctctaggat

SEQ ID NO: 199236 - DNA, 25 bp, Canis familiaris
tatcagacaccaggctgcctactgg

SEQ ID NO: 199237 - DNA, 25 bp, Canis familiaris
tatagtgctctaggcagctccattg

SEQ ID NO: 199238 - DNA, 25 bp, Canis familiaris
tatagttaactgccatgccatacca

SEQ ID NO: 199239 - DNA, 25 bp, Canis familiaris
tataacgacctgctgcagaacccgc

SEQ ID NO: 199240 - DNA, 25 bp, Canis familiaris
tataactgacaccttcaaaccccag

SEQ ID NO: 199241 - DNA, 25 bp, Canis familiaris
tatacattataacaacaaccccaaa

SEQ ID NO: 199242 - DNA, 25 bp, Canis familiaris
tatacatactaaccaataaccccac

SEQ ID NO: 199243 - DNA, 25 bp, Canis familiaris
tatactaccatcttcacatcaaacc

SEQ ID NO: 199244 - DNA, 25 bp, Canis familiaris
tataccccatttacatcaatggaca

SEQ ID NO: 199245 - DNA, 25 bp, Canis familiaris
tattcccccactagacataggtcac

SEQ ID NO: 199246 - DNA, 25 bp, Canis familiaris
tattacctctcataacatagttgcc

SEQ ID NO: 199247 - DNA, 25 bp, Canis familiaris
tatttttctcaaccagtaactgcac

SEQ ID NO: 199248 - DNA, 25 bp, Canis familiaris
tatttttctaagtgtaacctcagta

SEQ ID NO: 199249 - DNA, 25 bp, Canis familiaris
tatatatttctttgttttactgtac

SEQ ID NO: 199250 - DNA, 25 bp, Canis familiaris
tatactcttttatcatggtactgta

SEQ ID NO: 199251 - DNA, 25 bp, Canis familiaris
tatactttttattcaaaatctctac

SEQ ID NO: 199252 - DNA, 25 bp, Canis familiaris
tatacagtctttagctaaacttcta

SEQ ID NO: 199253 - DNA, 25 bp, Canis familiaris
tattcagtctttattcaatctcgga

SEQ ID NO: 199254 - DNA, 25 bp, Canis familiaris
tattcaacccaagtgcctattgcgg

SEQ ID NO: 199255 - DNA, 25 bp, Canis familiaris
tttgcagaaccaggttcttgcgcgt

SEQ ID NO: 199256 - DNA, 25 bp, Canis familiaris
ttaggaacccgtggctcggggctag

SEQ ID NO: 199257 - DNA, 25 bp, Canis familiaris
ttgggggaccgggatggtgaggctc

SEQ ID NO: 199258 - DNA, 25 bp, Canis familiaris
tttggagttgccgggtggctacgtc

SEQ ID NO: 199259 - DNA, 25 bp, Canis familiaris
tttgaggttgcgggcagtttcctcc

SEQ ID NO: 199260 - DNA, 25 bp, Canis familiaris
tatagttttagctcggatttctcca

SEQ ID NO: 199261 - DNA, 25 bp, Canis familiaris
tataattttgacttggattctttcc

SEQ ID NO: 199262 - DNA, 25 bp, Canis familiaris
tataatgtttgcagtaggttttttt

SEQ ID NO: 199263 - DNA, 25 bp, Canis familiaris
ttatataaagtacagccttttttct

SEQ ID NO: 199264 - DNA, 25 bp, Canis familiaris
tatataaagagttgtgcgccgagtt

SEQ ID NO: 199265 - DNA, 25 bp, Canis familiaris
tatagatatggcctgtgtgctgctc

SEQ ID NO: 199266 - DNA, 25 bp, Canis familiaris
tattctatgtactatgatgtgctta

SEQ ID NO: 199267 - DNA, 25 bp, Canis familiaris
tatttgggatcttgtgtgctctgtc

SEQ ID NO: 199268 - DNA, 25 bp, Canis familiaris
tatatgggtgtggtgttgccgtcag

SEQ ID NO: 199269 - DNA, 25 bp, Canis familiaris
tatatgggtcttggttgcctcttaa

SEQ ID NO: 199270 - DNA, 25 bp, Canis familiaris
tatatgatgacctttgctccgttta

SEQ ID NO: 199271 - DNA, 25 bp, Canis familiaris
ttgggcacagacgttcacgttttct

SEQ ID NO: 199272 - DNA, 25 bp, Canis familiaris
ttgatggaaaagttgaaggcttctc

SEQ ID NO: 199273 - DNA, 25 bp, Canis familiaris
tttggtacctgattgaagtttcctt

SEQ ID NO: 199274 - DNA, 25 bp, Canis familiaris
tttgcggacctatagattcattctt

SEQ ID NO: 199275 - DNA, 25 bp, Canis familiaris
tttccttcctgacagaggccacatt

SEQ ID NO: 199276 - DNA, 25 bp, Canis familiaris
tatagcctaccaaccgtgtacacta

SEQ ID NO: 199277 - DNA, 25 bp, Canis familiaris
tatagccaaagtaccgtgctcccat

SEQ ID NO: 199278 - DNA, 25 bp, Canis familiaris
ttcagtaggcctacaaaacctgatg

SEQ ID NO: 199279 - DNA, 25 bp, Canis familiaris
tatattcaactcacaaacactccat

SEQ ID NO: 199280 - DNA, 25 bp, Canis familiaris
tattgctgcaactggcaaacctgcc

SEQ ID NO: 199281 - DNA, 25 bp, Canis familiaris
tatagccaagcctataacctgctgc

SEQ ID NO: 199282 - DNA, 25 bp, Canis familiaris
tattgccaccctgaacgtgtgcatt

SEQ ID NO: 199283 - DNA, 25 bp, Canis familiaris
tatttccccaggtacgtgctagtga

SEQ ID NO: 199284 - DNA, 25 bp, Canis familiaris
tattttcccagtaatctgtgcgtta

SEQ ID NO: 199285 - DNA, 25 bp, Canis familiaris
tatttaactgactattcttggtgta

SEQ ID NO: 199286 - DNA, 25 bp, Canis familiaris
tattttgaatgatgagccttcgtgc

SEQ ID NO: 199287 - DNA, 25 bp, Canis familiaris
tatttgtactatcagccttgtggca

SEQ ID NO: 199288 - DNA, 25 bp, Canis familiaris
tattatttcattcatacttggaatt

SEQ ID NO: 199289 - DNA, 25 bp, Canis familiaris
tatttttctgtgcatacgcttgatt

SEQ ID NO: 199290 - DNA, 25 bp, Canis familiaris
tatatatttctgtttaccattttaa

SEQ ID NO: 199291 - DNA, 25 bp, Canis familiaris
tatatttctgtatccccagtcttag

SEQ ID NO: 199292 - DNA, 25 bp, Canis familiaris
tatatttagttctacctcctttcag

SEQ ID NO: 199293 - DNA, 25 bp, Canis familiaris
tatatgttatttcacttttatggca

SEQ ID NO: 199294 - DNA, 25 bp, Canis familiaris
tatagcttttgtaccttttttgcag

SEQ ID NO: 199295 - DNA, 25 bp, Canis familiaris
tatagctgatttgccattttactta

SEQ ID NO: 199296 - DNA, 25 bp, Canis familiaris
tttgcgttcccatcgtaacttaaag

SEQ ID NO: 199297 - DNA, 25 bp, Canis familiaris
tttgctaagcccaggaaagttaacg

SEQ ID NO: 199298 - DNA, 25 bp, Canis familiaris
tattgtaagccctggactgagttta

SEQ ID NO: 199299 - DNA, 25 bp, Canis familiaris
tattctaccccttgtgacaggtgtg

SEQ ID NO: 199300 - DNA, 25 bp, Canis familiaris
tatttaccactcatgcaacactgct

SEQ ID NO: 199301 - DNA, 25 bp, Canis familiaris
tattcaaaagtcaccacatctgtaa

SEQ ID NO: 199302 - DNA, 25 bp, Canis familiaris
tattcatatgttatcccccttaaga

SEQ ID NO: 199303 - DNA, 25 bp, Canis familiaris
tattatacttattcccaaccatggg

SEQ ID NO: 199304 - DNA, 25 bp, Canis familiaris
tatttaaaatatgccaccacgtgtc

SEQ ID NO: 199305 - DNA, 25 bp, Canis familiaris
tatttataaatatcccccagtgtcc

SEQ ID NO: 199306 - DNA, 25 bp, Canis familiaris
tatatatatttataccccacgctgc

SEQ ID NO: 199307 - DNA, 25 bp, Canis familiaris
tatatcctattttcaatccgcactt

SEQ ID NO: 199308 - DNA, 25 bp, Canis familiaris
tatttcattgttttactcccttgtg

SEQ ID NO: 199309 - DNA, 25 bp, Canis familiaris
tattcatattttgtactttctgtta

SEQ ID NO: 199310 - DNA, 25 bp, Canis familiaris
tatatcttccttgtgattttttttc

SEQ ID NO: 199311 - DNA, 25 bp, Canis familiaris
tataactcaatatcacttttttttt

SEQ ID NO: 199312 - DNA, 25 bp, Canis familiaris
tataactttgcaacttcttttttat

SEQ ID NO: 199313 - DNA, 25 bp, Canis familiaris
tataacacattcatttccttttttt

SEQ ID NO: 199314 - DNA, 25 bp, Canis familiaris
tatataatttttatcctatcctttc

SEQ ID NO: 199315 - DNA, 25 bp, Canis familiaris
tatacattttttatttccacatttt

SEQ ID NO: 199316 - DNA, 25 bp, Canis familiaris
tatacctatttgttttgtacacata

SEQ ID NO: 199317 - DNA, 25 bp, Canis familiaris
tatacagaatttcctttctcccaaa

SEQ ID NO: 199318 - DNA, 25 bp, Canis familiaris
tataaactgctttctttcttccaat

SEQ ID NO: 199319 - DNA, 25 bp, Canis familiaris
tatataactctttcatgcttccagc

SEQ ID NO: 199320 - DNA, 25 bp, Canis familiaris
tataaatctgttttgcattcccctt

SEQ ID NO: 199321 - DNA, 25 bp, Canis familiaris
tataaatccaatttttccccttgat

SEQ ID NO: 199322 - DNA, 25 bp, Canis familiaris
tatttatccaatttttcccaagtat

SEQ ID NO: 199323 - DNA, 25 bp, Canis familiaris
tattttgaaacactttgcccaacta

SEQ ID NO: 199324 - DNA, 25 bp, Canis familiaris
tataccaaaaattttcctcatatta

SEQ ID NO: 199325 - DNA, 25 bp, Canis familiaris
tataccagaaattttatcccacaga

SEQ ID NO: 199326 - DNA, 25 bp, Canis familiaris
tatatccatggatttacattcctgg

SEQ ID NO: 199327 - DNA, 25 bp, Canis familiaris
tattgtgagaggagacttcgatgag

SEQ ID NO: 199328 - DNA, 25 bp, Canis familiaris
tttgctgagttgaggctggcggggg

SEQ ID NO: 199329 - DNA, 25 bp, Canis familiaris
tttgtgagctggcggtctgaggggc

SEQ ID NO: 199330 - DNA, 25 bp, Canis familiaris
ttttgggggggctggtgctaggagg

SEQ ID NO: 199331 - DNA, 25 bp, Canis familiaris
tttctagagggcccgaggcttctgg

SEQ ID NO: 199332 - DNA, 25 bp, Canis familiaris
tatttggagggcgtccaggccctgc

SEQ ID NO: 199333 - DNA, 25 bp, Canis familiaris
tattgggggaccacagagcccatgg

SEQ ID NO: 199334 - DNA, 25 bp, Canis familiaris
tttgcgcgggcaactgtgcatgact

SEQ ID NO: 199335 - DNA, 25 bp, Canis familiaris
tatttgcgtaccctggatactttca

SEQ ID NO: 199336 - DNA, 25 bp, Canis familiaris
tttggtgtactcctagataatcctc

SEQ ID NO: 199337 - DNA, 25 bp, Canis familiaris
tattgcacgtatccttaaaaagcct

SEQ ID NO: 199338 - DNA, 25 bp, Canis familiaris
tatactcttcagccttattaaatgc

SEQ ID NO: 199339 - DNA, 25 bp, Canis familiaris
tatacagttctgccattatgatgaa

SEQ ID NO: 199340 - DNA, 25 bp, Canis familiaris
tattcactactgcttattgcacagc

SEQ ID NO: 199341 - DNA, 25 bp, Canis familiaris
tattcctttctgtatatgtgagtga

SEQ ID NO: 199342 - DNA, 25 bp, Canis familiaris
tattcgccttgttacattcaatgca

SEQ ID NO: 199343 - DNA, 25 bp, Canis familiaris
tatatcgcatgacatatacttcaag

SEQ ID NO: 199344 - DNA, 25 bp, Canis familiaris
tatacctaaatctctatgcagtgtg

SEQ ID NO: 199345 - DNA, 25 bp, Canis familiaris
tattggctcaactaatctacttgga

SEQ ID NO: 199346 - DNA, 25 bp, Canis familiaris
ttatgatgtaaataccaggtagcaa

SEQ ID NO: 199347 - DNA, 25 bp, Canis familiaris
tttgcctgaattaaccaggtaggat

SEQ ID NO: 199348 - DNA, 25 bp, Canis familiaris
tatttaggttgagctccgtaggtta

SEQ ID NO: 199349 - DNA, 25 bp, Canis familiaris
tattttttctgatctcctttgttta

SEQ ID NO: 199350 - DNA, 25 bp, Canis familiaris
tatatccgatttcatccctttttaa

SEQ ID NO: 199351 - DNA, 25 bp, Canis familiaris
tattgcgcgaataacattccattgt

SEQ ID NO: 199352 - DNA, 25 bp, Canis familiaris
tttcagcgagcaaggcattaacgag

SEQ ID NO: 199353 - DNA, 25 bp, Canis familiaris
tttaccagcgcgcctggaacaggga

SEQ ID NO: 199354 - DNA, 25 bp, Canis familiaris
tttgatgtcacctctggaaaggagt

SEQ ID NO: 199355 - DNA, 25 bp, Canis familiaris
tttgatgcaccccgttcaaagagtt

SEQ ID NO: 199356 - DNA, 25 bp, Canis familiaris
tttggcacccgacaaatgggttggg

SEQ ID NO: 199357 - DNA, 25 bp, Canis familiaris
tttggcaacccaaaaatgcacgggg

SEQ ID NO: 199358 - DNA, 25 bp, Canis familiaris
tattcaaagcccaacagaagcctgt

SEQ ID NO: 199359 - DNA, 25 bp, Canis familiaris
tattgacattgcgcccatggacata

SEQ ID NO: 199360 - DNA, 25 bp, Canis familiaris
tattagctgtgagccccatcaatag

SEQ ID NO: 199361 - DNA, 25 bp, Canis familiaris
tattacttgagccccctcaatagtt

SEQ ID NO: 199362 - DNA, 25 bp, Canis familiaris
tattatttatcctcctagacgtctc

SEQ ID NO: 199363 - DNA, 25 bp, Canis familiaris
tatttgattagggtcctgcccaccc

SEQ ID NO: 199364 - DNA, 25 bp, Canis familiaris
tatattctaattgatcccagccacc

SEQ ID NO: 199365 - DNA, 25 bp, Canis familiaris
tattgtcatgaactatatccgtaac

SEQ ID NO: 199366 - DNA, 25 bp, Canis familiaris
tttgtctgagcagcattctcagtga

SEQ ID NO: 199367 - DNA, 25 bp, Canis familiaris
tttgctgctagagttgtcaagagag

SEQ ID NO: 199368 - DNA, 25 bp, Canis familiaris
tattgggcgcctggtcaccagggct

SEQ ID NO: 199369 - DNA, 25 bp, Canis familiaris
tattgggcgcctggtcaccagggct

SEQ ID NO: 199370 - DNA, 25 bp, Canis familiaris
tattgggccaagcccagaagtggtc

SEQ ID NO: 199371 - DNA, 25 bp, Canis familiaris
tattggggcagccccaatggcgcag

SEQ ID NO: 199372 - DNA, 25 bp, Canis familiaris
tattcagggagtcgcaaatgccctc

SEQ ID NO: 199373 - DNA, 25 bp, Canis familiaris
tatttggtgtctccagagctgtcca

SEQ ID NO: 199374 - DNA, 25 bp, Canis familiaris
tattttttcccatctttcaggtgta

SEQ ID NO: 199375 - DNA, 25 bp, Canis familiaris
tattttgatacctcagtttcggttt

SEQ ID NO: 199376 - DNA, 25 bp, Canis familiaris
ttttgtagcacctgtttacacgttt

SEQ ID NO: 199377 - DNA, 25 bp, Canis familiaris
tattaggacccaatgtgttacccgt

SEQ ID NO: 199378 - DNA, 25 bp, Canis familiaris
tattgggaggcctgagttccctttg

SEQ ID NO: 199379 - DNA, 25 bp, Canis familiaris
ttctgaggggtgtgggtccccaggg

SEQ ID NO: 199380 - DNA, 25 bp, Canis familiaris
tatttggaaggcaggtgtcccgcag

SEQ ID NO: 199381 - DNA, 25 bp, Canis familiaris
ttttggagagtgagctggagacgga

SEQ ID NO: 199382 - DNA, 25 bp, Canis familiaris
tttcagtgaggtggaggtggagccc

SEQ ID NO: 199383 - DNA, 25 bp, Canis familiaris
tttggtgcaggttgagcgttggaag

SEQ ID NO: 199384 - DNA, 25 bp, Canis familiaris
tattgtgggttaacatttaggttgg

SEQ ID NO: 199385 - DNA, 25 bp, Canis familiaris
tatttgggcatcataactttttatt

SEQ ID NO: 199386 - DNA, 25 bp, Canis familiaris
tattaagccatcctatttttttata

SEQ ID NO: 199387 - DNA, 25 bp, Canis familiaris
tttgggacttcattttttgtatata

SEQ ID NO: 199388 - DNA, 25 bp, Canis familiaris
tatttgggcttgtttctcaggttta

SEQ ID NO: 199389 - DNA, 25 bp, Canis familiaris
tattaagagctttcctctctggttc

SEQ ID NO: 199390 - DNA, 25 bp, Canis familiaris
tataaacagtctttgtctcctttcc

SEQ ID NO: 199391 - DNA, 25 bp, Canis familiaris
tataaacaatcccttactctttcca

SEQ ID NO: 199392 - DNA, 25 bp, Canis familiaris
tattaaaccctttagtctttgctca

SEQ ID NO: 199393 - DNA, 25 bp, Canis familiaris
tattaaaccttttagtcttcgctca

SEQ ID NO: 199394 - DNA, 25 bp, Canis familiaris
tattattaccctgatagtctatgca

SEQ ID NO: 199395 - DNA, 25 bp, Canis familiaris
tatatatgtcacaccattcagtata

SEQ ID NO: 199396 - DNA, 25 bp, Canis familiaris
tattgcagtcccgaatgtagcgtgt

SEQ ID NO: 199397 - DNA, 25 bp, Canis familiaris
tattcagtctggtatctgtactctg

SEQ ID NO: 199398 - DNA, 25 bp, Canis familiaris
tatataggtgtgttcagttttttga

SEQ ID NO: 199399 - DNA, 25 bp, Canis familiaris
tattaaggtggttgttgttgttgtt

SEQ ID NO: 199400 - DNA, 25 bp, Canis familiaris
tatataaattgtcttgctgttttgt

SEQ ID NO: 199401 - DNA, 25 bp, Canis familiaris
tatataaatatatctacgtatgtat

SEQ ID NO: 199402 - DNA, 25 bp, Canis familiaris
tattgaaaatcagttccatgaattt

SEQ ID NO: 199403 - DNA, 25 bp, Canis familiaris
ttatgaaaatatcaaccatgttgtg

SEQ ID NO: 199404 - DNA, 25 bp, Canis familiaris
tttagtaatcgtgtccgtgtgtgtg

SEQ ID NO: 199405 - DNA, 25 bp, Canis familiaris
tattcgtaatctcagctcctggttt

SEQ ID NO: 199406 - DNA, 25 bp, Canis familiaris
tttacatcagatgccagtttggttt

SEQ ID NO: 199407 - DNA, 25 bp, Canis familiaris
tatatactcatttccctttgttttc

SEQ ID NO: 199408 - DNA, 25 bp, Canis familiaris
tatagatagcattcccttttttttt

SEQ ID NO: 199409 - DNA, 25 bp, Canis familiaris
tatagatagcattcccttttttttt

SEQ ID NO: 199410 - DNA, 25 bp, Canis familiaris
tatattactactgcatcttcctttt

SEQ ID NO: 199411 - DNA, 25 bp, Canis familiaris
tatatttgcatatacattcccttta

SEQ ID NO: 199412 - DNA, 25 bp, Canis familiaris
tatattgacaagaaatggcctttta

SEQ ID NO: 199413 - DNA, 25 bp, Canis familiaris
tatttgacaaagttcagcctttttt

SEQ ID NO: 199414 - DNA, 25 bp, Canis familiaris
tttacacaaagatacactttcaaaa

SEQ ID NO: 199415 - DNA, 25 bp, Canis familiaris
ttttcaggaaaatcccttccatatt

SEQ ID NO: 199416 - DNA, 25 bp, Canis familiaris
tatttcttaaaccacctattcgtat

SEQ ID NO: 199417 - DNA, 25 bp, Canis familiaris
tatatttaaagaccccattgctcct

SEQ ID NO: 199418 - DNA, 25 bp, Canis familiaris
tatttgtaaagcaaccaccttcctt

SEQ ID NO: 199419 - DNA, 25 bp, Canis familiaris
tattgttagaacacagcccacacct

SEQ ID NO: 199420 - DNA, 25 bp, Canis familiaris
tttgttaatggccaaggccaaccaa

SEQ ID NO: 199421 - DNA, 25 bp, Canis familiaris
tttttcattggccaaggcaaccaac

SEQ ID NO: 199422 - DNA, 25 bp, Canis familiaris
tattttcatttgtaaggagttccct

SEQ ID NO: 199423 - DNA, 25 bp, Canis familiaris
tatacttctttgtgaggctattgct

SEQ ID NO: 199424 - DNA, 25 bp, Canis familiaris
tatattaattcttgtgggctttgtg

SEQ ID NO: 199425 - DNA, 25 bp, Canis familiaris
tattctgagaccaagtcggctttct

SEQ ID NO: 199426 - DNA, 25 bp, Canis familiaris
tattcatgtaccgagtgctccttta

SEQ ID NO: 199427 - DNA, 25 bp, Canis familiaris
tattctgtgcacatttgtactttga

SEQ ID NO: 199428 - DNA, 25 bp, Canis familiaris
tatttggaattattgctatcactta

SEQ ID NO: 199429 - DNA, 25 bp, Canis familiaris
tatttggaatttttatagcttactt

SEQ ID NO: 199430 - DNA, 25 bp, Canis familiaris
tatattattttttttacatgtaggt

SEQ ID NO: 199431 - DNA, 25 bp, Canis familiaris
tatattttacttttttattgctggt

SEQ ID NO: 199432 - DNA, 25 bp, Canis familiaris
tattttgtcaaccatcctttttggt

SEQ ID NO: 199433 - DNA, 25 bp, Canis familiaris
tattttatgagctcccattttctgg

SEQ ID NO: 199434 - DNA, 25 bp, Canis familiaris
tattttctgagctcgagatcctata

SEQ ID NO: 199435 - DNA, 25 bp, Canis familiaris
tattttcgtgcatttgtgagccaaa

SEQ ID NO: 199436 - DNA, 25 bp, Canis familiaris
tatttttgtgcctgtatcatagata

SEQ ID NO: 199437 - DNA, 25 bp, Canis familiaris
ttctttcttgccccaactgggaggg

SEQ ID NO: 199438 - DNA, 25 bp, Canis familiaris
tattgtccgggctcagaatgggcgg

SEQ ID NO: 199439 - DNA, 25 bp, Canis familiaris
tattctccaggtcacgacggtgggt

SEQ ID NO: 199440 - DNA, 25 bp, Canis familiaris
tattttatgagtaagtgcccagggg

SEQ ID NO: 199441 - DNA, 25 bp, Canis familiaris
tatttttattattgcaaccggttag

SEQ ID NO: 199442 - DNA, 25 bp, Canis familiaris
tatttcttgttaaccaagggcttag

SEQ ID NO: 199443 - DNA, 25 bp, Canis familiaris
tattccttttgttcttacggtacag

SEQ ID NO: 199444 - DNA, 25 bp, Canis familiaris
tattccagtttatttcctcgttaag

SEQ ID NO: 199445 - DNA, 25 bp, Canis familiaris
tatatccgtatctatctacccgtat

SEQ ID NO: 199446 - DNA, 25 bp, Canis familiaris
tatatatcgtaccacaacactccta

SEQ ID NO: 199447 - DNA, 25 bp, Canis familiaris
tatactttaccagagcagcatccca

SEQ ID NO: 199448 - DNA, 25 bp, Canis familiaris
tattcatttcacaaaagcattcttc

SEQ ID NO: 199449 - DNA, 25 bp, Canis familiaris
tttaattgccaagtagtattctgtt

SEQ ID NO: 199450 - DNA, 25 bp, Canis familiaris
aatcctccaagcctttgggagtctt

SEQ ID NO: 199451 - DNA, 25 bp, Canis familiaris
ttatcttgggggtcggcgggcgact

SEQ ID NO: 199452 - DNA, 25 bp, Canis familiaris
ttcctcggtagatcgatcgggccac

SEQ ID NO: 199453 - DNA, 25 bp, Canis familiaris
ttccctttcatgtgggggggcacct

SEQ ID NO: 199454 - DNA, 25 bp, Canis familiaris
tttccttgtctgtaaaatggggaca

SEQ ID NO: 199455 - DNA, 25 bp, Canis familiaris
tttccctcccatgagcaaggggcca

SEQ ID NO: 199456 - DNA, 25 bp, Canis familiaris
tatttttcccatgtgtctttggcct

SEQ ID NO: 199457 - DNA, 25 bp, Canis familiaris
tatttgaatctttgttccgtttcct

SEQ ID NO: 199458 - DNA, 25 bp, Canis familiaris
tatttaattgtacgtcagcctctta

SEQ ID NO: 199459 - DNA, 25 bp, Canis familiaris
tttggtttgaagcacctcatcctgt

SEQ ID NO: 199460 - DNA, 25 bp, Canis familiaris
ttgtgggttaatccgttctactgtt

SEQ ID NO: 199461 - DNA, 25 bp, Canis familiaris
ttgtagtgttaacccgcctaattgt

SEQ ID NO: 199462 - DNA, 25 bp, Canis familiaris
ttggtcctataacccgcagtgaatg

SEQ ID NO: 199463 - DNA, 25 bp, Canis familiaris
tatttccgaatattcacacaggcta

SEQ ID NO: 199464 - DNA, 25 bp, Canis familiaris
tattctggagaatgccaacgtgctg

SEQ ID NO: 199465 - DNA, 25 bp, Canis familiaris
tattcatttgtatccaaggtgctga

SEQ ID NO: 199466 - DNA, 25 bp, Canis familiaris
tattcatttgtatccaaggtgctga

SEQ ID NO: 199467 - DNA, 25 bp, Canis familiaris
tttggcttataacacagcagatgct

SEQ ID NO: 199468 - DNA, 25 bp, Canis familiaris
tttggttgtgaactaaaggctgaca

SEQ ID NO: 199469 - DNA, 25 bp, Canis familiaris
tttgagaggtaattacatagtgtaa

SEQ ID NO: 199470 - DNA, 25 bp, Canis familiaris
tttgatgtggtcagtacacagttaa

SEQ ID NO: 199471 - DNA, 25 bp, Canis familiaris
tattaatgcagtaagttcagaaaac

SEQ ID NO: 199472 - DNA, 25 bp, Canis familiaris
tatatttgcagtcagctctcagtcc

SEQ ID NO: 199473 - DNA, 25 bp, Canis familiaris
tatatcttcaggcgcgcggtctggc

SEQ ID NO: 199474 - DNA, 25 bp, Canis familiaris
tatttaatgcagcggcagcggcggc

SEQ ID NO: 199475 - DNA, 25 bp, Canis familiaris
tattttatgcactggcagcggcggc

SEQ ID NO: 199476 - DNA, 25 bp, Canis familiaris
tatttatacatctgcatccatgagt

SEQ ID NO: 199477 - DNA, 25 bp, Canis familiaris
tatttgtgtatgtgtctcatgaatg

SEQ ID NO: 199478 - DNA, 25 bp, Canis familiaris
tatttgtgtaatttctctgagtatt

SEQ ID NO: 199479 - DNA, 25 bp, Canis familiaris
tatactcttactttcctagttttct

SEQ ID NO: 199480 - DNA, 25 bp, Canis familiaris
tattactgcttcctttaagttttct

SEQ ID NO: 199481 - DNA, 25 bp, Canis familiaris
tattcacgttaaaatactttatttg

SEQ ID NO: 199482 - DNA, 25 bp, Canis familiaris
tattcccttagacacagttattgat

SEQ ID NO: 199483 - DNA, 25 bp, Canis familiaris
tattccttagagttatagtcctgta

SEQ ID NO: 199484 - DNA, 25 bp, Canis familiaris
tatacctcttaattatttccttatt

SEQ ID NO: 199485 - DNA, 25 bp, Canis familiaris
tatacctcctctctatattttctaa

SEQ ID NO: 199486 - DNA, 25 bp, Canis familiaris
tataccccctgggtcattctattta

SEQ ID NO: 199487 - DNA, 25 bp, Canis familiaris
tatagcccacctggagtttctatcg

SEQ ID NO: 199488 - DNA, 25 bp, Canis familiaris
tttgcccactgtgagttacttgcgc

SEQ ID NO: 199489 - DNA, 25 bp, Canis familiaris
tattggcaacgagcgctttcgctgc

SEQ ID NO: 199490 - DNA, 25 bp, Canis familiaris
tttgatggtgtggactcgccggaac

SEQ ID NO: 199491 - DNA, 25 bp, Canis familiaris
tttagtagtcatgtcccggattctt

SEQ ID NO: 199492 - DNA, 25 bp, Canis familiaris
tttattcagtaaatcccatcggtct

SEQ ID NO: 199493 - DNA, 25 bp, Canis familiaris
tttgacccgagaggcccacggtcaa

SEQ ID NO: 199494 - DNA, 25 bp, Canis familiaris
tttgtcgaaggctctgaccgggcaa

SEQ ID NO: 199495 - DNA, 25 bp, Canis familiaris
tatttcgaaggtcgttcccgagaca

SEQ ID NO: 199496 - DNA, 25 bp, Canis familiaris
tatttagagagagttttgcccgcgc

SEQ ID NO: 199497 - DNA, 25 bp, Canis familiaris
tatactcataatctgtttgcccctc

SEQ ID NO: 199498 - DNA, 25 bp, Canis familiaris
tatagcttataactgcttccacccc

SEQ ID NO: 199499 - DNA, 25 bp, Canis familiaris
tatagcttataactgcttccaccct

SEQ ID NO: 199500 - DNA, 25 bp, Canis familiaris
tatagtgtgttactgtttcccgtgc

SEQ ID NO: 199501 - DNA, 25 bp, Canis familiaris
tattgattttccagttgcacctgcg

SEQ ID NO: 199502 - DNA, 25 bp, Canis familiaris
tatttggttccatctgacatcactg

SEQ ID NO: 199503 - DNA, 25 bp, Canis familiaris
tatttgcttcatgccacttatcact

SEQ ID NO: 199504 - DNA, 25 bp, Canis familiaris
tatatatatataatctcccttccat

SEQ ID NO: 199505 - DNA, 25 bp, Canis familiaris
tatttattattatccatatccatta

SEQ ID NO: 199506 - DNA, 25 bp, Canis familiaris
tattttttgctcatcagctggccag

SEQ ID NO: 199507 - DNA, 25 bp, Canis familiaris
tattttctcatggcagtctgttgga

SEQ ID NO: 199508 - DNA, 25 bp, Canis familiaris
tatttgttcatggcagtgtctgaga

SEQ ID NO: 199509 - DNA, 25 bp, Canis familiaris
tattctgattatagctgtgtcattg

SEQ ID NO: 199510 - DNA, 25 bp, Canis familiaris
tattgctgctggtcatctgtatgtg

SEQ ID NO: 199511 - DNA, 25 bp, Canis familiaris
tatatgtcttgcctcatgtgtctgt

SEQ ID NO: 199512 - DNA, 25 bp, Canis familiaris
tattgatcttcactcaggtcttgat

SEQ ID NO: 199513 - DNA, 25 bp, Canis familiaris
tattttccatgcatggatcttaccc

SEQ ID NO: 199514 - DNA, 25 bp, Canis familiaris
tattttgaatctaggctcttactcc

SEQ ID NO: 199515 - DNA, 25 bp, Canis familiaris
tatatttagcgcaggctctctattt

SEQ ID NO: 199516 - DNA, 25 bp, Canis familiaris
tattttcagtgtttcttgacattta

SEQ ID NO: 199517 - DNA, 25 bp, Canis familiaris
tatttactgtgttttgtaacttctg

SEQ ID NO: 199518 - DNA, 25 bp, Canis familiaris
tttgaactctgttcttgggtcgtct

SEQ ID NO: 199519 - DNA, 25 bp, Canis familiaris
tttggactagttgagcagtgtctgc

SEQ ID NO: 199520 - DNA, 25 bp, Canis familiaris
tttggggagtgtgagcctagctcag

SEQ ID NO: 199521 - DNA, 25 bp, Canis familiaris
tttggtggggtcaaggtcactaaat

SEQ ID NO: 199522 - DNA, 25 bp, Canis familiaris
tttgtgctggggttgttggcctgaa

SEQ ID NO: 199523 - DNA, 25 bp, Canis familiaris
tattctggtcgggctttgaggctga

SEQ ID NO: 199524 - DNA, 25 bp, Canis familiaris
tttctggccgggtttgtttgcaaag

SEQ ID NO: 199525 - DNA, 25 bp, Canis familiaris
tttgggatccgggttgtgtacatca

SEQ ID NO: 199526 - DNA, 25 bp, Canis familiaris
tatttttcccctatgtaactcacga

SEQ ID NO: 199527 - DNA, 25 bp, Canis familiaris
tatttttgtcccgtctgtgatttat

SEQ ID NO: 199528 - DNA, 25 bp, Canis familiaris
tattcttgttcgaccgttgtttgtc

SEQ ID NO: 199529 - DNA, 25 bp, Canis familiaris
tatttgtgtttgtctgtgttgtttg

SEQ ID NO: 199530 - DNA, 25 bp, Canis familiaris
tatttgatgttttcgttttctccca

SEQ ID NO: 199531 - DNA, 25 bp, Canis familiaris
tatttgatgctttgtttcctgctct

SEQ ID NO: 199532 - DNA, 25 bp, Canis familiaris
tatttgtttgggtgatgctccttca

SEQ ID NO: 199533 - DNA, 25 bp, Canis familiaris
tttggtttcggctgttaattaagtg

SEQ ID NO: 199534 - DNA, 25 bp, Canis familiaris
tattggtttcaggggtagaatttag

SEQ ID NO: 199535 - DNA, 25 bp, Canis familiaris
tattgagctttagggttatttctta

SEQ ID NO: 199536 - DNA, 25 bp, Canis familiaris
tattacttaatttgcttgtttctat

SEQ ID NO: 199537 - DNA, 25 bp, Canis familiaris
tattagatctaaaagccctttcttc

SEQ ID NO: 199538 - DNA, 25 bp, Canis familiaris
tattacacaataactccctatctcc

SEQ ID NO: 199539 - DNA, 25 bp, Canis familiaris
tatatcaccctgaactttctgtcac

SEQ ID NO: 199540 - DNA, 25 bp, Canis familiaris
tattatccctgtatattgcatgaat

SEQ ID NO: 199541 - DNA, 25 bp, Canis familiaris
tattcaccctatacgacataactga

SEQ ID NO: 199542 - DNA, 25 bp, Canis familiaris
tattccacacccggagtcaagctga

SEQ ID NO: 199543 - DNA, 25 bp, Canis familiaris
tattctcaacacctcttgtaactaa

SEQ ID NO: 199544 - DNA, 25 bp, Canis familiaris
tattctttcctcttttaatcataaa

SEQ ID NO: 199545 - DNA, 25 bp, Canis familiaris
tattctttcactatcccatagatta

SEQ ID NO: 199546 - DNA, 25 bp, Canis familiaris
tttgtattactatccactgtgtata

SEQ ID NO: 199547 - DNA, 25 bp, Canis familiaris
tatttttctctttcaactgctttct

SEQ ID NO: 199548 - DNA, 25 bp, Canis familiaris
tattttctgtatttaccgtagccgg

SEQ ID NO: 199549 - DNA, 25 bp, Canis familiaris
tattgctttgtctatgtttcggatg

SEQ ID NO: 199550 - DNA, 25 bp, Canis familiaris
tattttgcagtctgactctctggca

SEQ ID NO: 199551 - DNA, 25 bp, Canis familiaris
tattaacatctctgacttctgtcct

SEQ ID NO: 199552 - DNA, 25 bp, Canis familiaris
tattcccatctccaagctattgtgg

SEQ ID NO: 199553 - DNA, 25 bp, Canis familiaris
tattctcacatcccatagcagatct

SEQ ID NO: 199554 - DNA, 25 bp, Canis familiaris
tttccaccccattgaacggtcaaat

SEQ ID NO: 199555 - DNA, 25 bp, Canis familiaris
ttatcccccgagtcaaaggcttatt

SEQ ID NO: 199556 - DNA, 25 bp, Canis familiaris
tttcttcccggacaaacatttactg

SEQ ID NO: 199557 - DNA, 25 bp, Canis familiaris
tttttatcccaacaaccaatctcac

SEQ ID NO: 199558 - DNA, 25 bp, Canis familiaris
tatttttacctacaattataccgct

SEQ ID NO: 199559 - DNA, 25 bp, Canis familiaris
tattttttcctactgacatttcaag

SEQ ID NO: 199560 - DNA, 25 bp, Canis familiaris
tattttttcgtaactttcatcaaga

SEQ ID NO: 199561 - DNA, 25 bp, Canis familiaris
tatttttcctgtgcttttgctgata

SEQ ID NO: 199562 - DNA, 25 bp, Canis familiaris
tatattttccattgtctttctcttc

SEQ ID NO: 199563 - DNA, 25 bp, Canis familiaris
tatatttgctcctgctgttgttgct

SEQ ID NO: 199564 - DNA, 25 bp, Canis familiaris
tatatctatgtattgtctttgttcc

SEQ ID NO: 199565 - DNA, 25 bp, Canis familiaris
tatatctatttcgcatttgacccac

SEQ ID NO: 199566 - DNA, 25 bp, Canis familiaris
tttcataattcactgatctatcaac

SEQ ID NO: 199567 - DNA, 25 bp, Canis familiaris
tattcattcatgaaagacacacaga

SEQ ID NO: 199568 - DNA, 25 bp, Canis familiaris
tatattgtcagaaaacaccaggcct

SEQ ID NO: 199569 - DNA, 25 bp, Canis familiaris
tatattgtaaaccagacccagctct

SEQ ID NO: 199570 - DNA, 25 bp, Canis familiaris
tatagtgtaaatacccccactctgc

SEQ ID NO: 199571 - DNA, 25 bp, Canis familiaris
tatatgtttaataccgcctattcca

SEQ ID NO: 199572 - DNA, 25 bp, Canis familiaris
tatttaaaatatccccagtgtccac

SEQ ID NO: 199573 - DNA, 25 bp, Canis familiaris
tatttaaaatatccccagtgtccac

SEQ ID NO: 199574 - DNA, 25 bp, Canis familiaris
tatatttatagaacaccccgtcctc

SEQ ID NO: 199575 - DNA, 25 bp, Canis familiaris
tatatttccagaaacctgccttcct

SEQ ID NO: 199576 - DNA, 25 bp, Canis familiaris
tattcatttaatgacttgccctcct

SEQ ID NO: 199577 - DNA, 25 bp, Canis familiaris
tatttcattaattacttcttctttg

SEQ ID NO: 199578 - DNA, 25 bp, Canis familiaris
tatttatgtatttactttttcttca

SEQ ID NO: 199579 - DNA, 25 bp, Canis familiaris
tatattaggcttttcttttctctta

SEQ ID NO: 199580 - DNA, 25 bp, Canis familiaris
tattcgagggtatcatcttcctcct

SEQ ID NO: 199581 - DNA, 25 bp, Canis familiaris
tttgggtcgtatctctgttctcaaa

SEQ ID NO: 199582 - DNA, 25 bp, Canis familiaris
tttggagggggctctctttctgaaa

SEQ ID NO: 199583 - DNA, 25 bp, Canis familiaris
tatatgccagggggatccccttcca

SEQ ID NO: 199584 - DNA, 25 bp, Canis familiaris
tattccaggtgtgacgccttttcag

SEQ ID NO: 199585 - DNA, 25 bp, Canis familiaris
tattcgagaggtgccctttgggaga

SEQ ID NO: 199586 - DNA, 25 bp, Canis familiaris
tatttaacagtggtcccctgggaag

SEQ ID NO: 199587 - DNA, 25 bp, Canis familiaris
tttctaccattgttggacctgggaa

SEQ ID NO: 199588 - DNA, 25 bp, Canis familiaris
tattcatacctatgtacacttgggt

SEQ ID NO: 199589 - DNA, 25 bp, Canis familiaris
tattcaactgcttttggctcttggg

SEQ ID NO: 199590 - DNA, 25 bp, Canis familiaris
tatttcacatttttcaggttgggta

SEQ ID NO: 199591 - DNA, 25 bp, Canis familiaris
tttgtggtgttctctggcttaagga

SEQ ID NO: 199592 - DNA, 25 bp, Canis familiaris
tttgtgttgatattcctggctgtga

SEQ ID NO: 199593 - DNA, 25 bp, Canis familiaris
tttgggcagaagtcctcgtgctgag

SEQ ID NO: 199594 - DNA, 25 bp, Canis familiaris
tatttgagcacttactctgggccag

SEQ ID NO: 199595 - DNA, 25 bp, Canis familiaris
tattatgacctgtgctgcttggggc

SEQ ID NO: 199596 - DNA, 25 bp, Canis familiaris
tattcactgattcactgttctcgat

SEQ ID NO: 199597 - DNA, 25 bp, Canis familiaris
tattcgctattaccagtagccaatc

SEQ ID NO: 199598 - DNA, 25 bp, Canis familiaris
tattgagtattatcaaaccattgat

SEQ ID NO: 199599 - DNA, 25 bp, Canis familiaris
tttgcaaatttgtcgaaggctctga

SEQ ID NO: 199600 - DNA, 25 bp, Canis familiaris
tttagaatcttctgcaaagtcaaag

SEQ ID NO: 199601 - DNA, 25 bp, Canis familiaris
tattatgttgcgtcttgccaagctc

SEQ ID NO: 199602 - DNA, 25 bp, Canis familiaris
tattatttccacttgctatcatgtc

SEQ ID NO: 199603 - DNA, 25 bp, Canis familiaris
tattttccccattttctgtagttca

SEQ ID NO: 199604 - DNA, 25 bp, Canis familiaris
tatttctccctcattttggacaata

SEQ ID NO: 199605 - DNA, 25 bp, Canis familiaris
tattttgcctgcccttttcagaatt

SEQ ID NO: 199606 - DNA, 25 bp, Canis familiaris
tatttagcgcaggctctctatttca

SEQ ID NO: 199607 - DNA, 25 bp, Canis familiaris
tattatcagccatacactattgtca

SEQ ID NO: 199608 - DNA, 25 bp, Canis familiaris
tattgtgacacatcccattgctggc

SEQ ID NO: 199609 - DNA, 25 bp, Canis familiaris
tatagtgcaactacttttgtgtaaa

SEQ ID NO: 199610 - DNA, 25 bp, Canis familiaris
tatatgccacctacttttgctttta

SEQ ID NO: 199611 - DNA, 25 bp, Canis familiaris
tattgcgccgcgctgttgtttatat

SEQ ID NO: 199612 - DNA, 25 bp, Canis familiaris
tattcagccagattatgtactttat

SEQ ID NO: 199613 - DNA, 25 bp, Canis familiaris
tatatagacaactgtacatctgtac

SEQ ID NO: 199614 - DNA, 25 bp, Canis familiaris
ttaggtccagcagctacatttacac

SEQ ID NO: 199615 - DNA, 25 bp, Canis familiaris
tttgtatggccaactcactcttaaa

SEQ ID NO: 199616 - DNA, 25 bp, Canis familiaris
tattttggcctcgccattttcagaa

SEQ ID NO: 199617 - DNA, 25 bp, Canis familiaris
tatttctgtgccttgcagtttttcc

SEQ ID NO: 199618 - DNA, 25 bp, Canis familiaris
tatttcgtctctaaagtttccagct

SEQ ID NO: 199619 - DNA, 25 bp, Canis familiaris
tatttcgttgctgtattttctcttc

SEQ ID NO: 199620 - DNA, 25 bp, Canis familiaris
tattctctttgtgtttcttaccttt

SEQ ID NO: 199621 - DNA, 25 bp, Canis familiaris
tattctctttgtcttctactaggca

SEQ ID NO: 199622 - DNA, 25 bp, Canis familiaris
tattcatggtttcgattccggagag

SEQ ID NO: 199623 - DNA, 25 bp, Canis familiaris
tattcacgagttagtgtccggacct

SEQ ID NO: 199624 - DNA, 25 bp, Canis familiaris
tattacgactcagtgtgtccctact

SEQ ID NO: 199625 - DNA, 25 bp, Canis familiaris
tattaggaccagggcgcccatacaa

SEQ ID NO: 199626 - DNA, 25 bp, Canis familiaris
tattcgggccgaggctgccaagatc

SEQ ID NO: 199627 - DNA, 25 bp, Canis familiaris
tattcttcccaaggcaccaagcctt

SEQ ID NO: 199628 - DNA, 25 bp, Canis familiaris
tattttcactcctacaccaggtttt

SEQ ID NO: 199629 - DNA, 25 bp, Canis familiaris
tattttagcaccaacctacttctgt

SEQ ID NO: 199630 - DNA, 25 bp, Canis familiaris
tattttatgcccaatccagaaactt

SEQ ID NO: 199631 - DNA, 25 bp, Canis familiaris
tatttaagtgccatcacacacacac

SEQ ID NO: 199632 - DNA, 25 bp, Canis familiaris
tatttatcagcacaatacaccccgg

SEQ ID NO: 199633 - DNA, 25 bp, Canis familiaris
tttatcagatcaaaaccaacccggt

SEQ ID NO: 199634 - DNA, 25 bp, Canis familiaris
tttggtactttgtccagacccaggt

SEQ ID NO: 199635 - DNA, 25 bp, Canis familiaris
tttgggtctaggtcagagcccgcac

SEQ ID NO: 199636 - DNA, 25 bp, Canis familiaris
tttgggttattgcccaggcactgcc

SEQ ID NO: 199637 - DNA, 25 bp, Canis familiaris
tattgagtttttcatgggccaccga

SEQ ID NO: 199638 - DNA, 25 bp, Canis familiaris
tatatattttttccttatcccactg

SEQ ID NO: 199639 - DNA, 25 bp, Canis familiaris
tattaaatgctcaccttttctacat

SEQ ID NO: 199640 - DNA, 25 bp, Canis familiaris
tatttaaccttattgtggtcattat

SEQ ID NO: 199641 - DNA, 25 bp, Canis familiaris
tattgggacctctttgggtattttg

SEQ ID NO: 199642 - DNA, 25 bp, Canis familiaris
tattgtggtcaggaaagggtttttg

SEQ ID NO: 199643 - DNA, 25 bp, Canis familiaris
tattgctggtcaaaccgggttttct

SEQ ID NO: 199644 - DNA, 25 bp, Canis familiaris
tttgtgccctttccagggttatcct

SEQ ID NO: 199645 - DNA, 25 bp, Canis familiaris
tatttgcccttgtggttggtgagcc

SEQ ID NO: 199646 - DNA, 25 bp, Canis familiaris
tatttggcggtggtcgtgtggtgtg

SEQ ID NO: 199647 - DNA, 25 bp, Canis familiaris
tttggaggataggtcaggtgcgtta

SEQ ID NO: 199648 - DNA, 25 bp, Canis familiaris
tttggaagaaggacagccttgtgcc

SEQ ID NO: 199649 - DNA, 25 bp, Canis familiaris
tttgcccagaagcacaccaagaagg

SEQ ID NO: 199650 - DNA, 25 bp, Canis familiaris
tttccaccatggcacccaagaaagc

SEQ ID NO: 199651 - DNA, 25 bp, Canis familiaris
tattccccagcgataccaggaaact

SEQ ID NO: 199652 - DNA, 25 bp, Canis familiaris
tatttcccacgagtcctggacaaac

SEQ ID NO: 199653 - DNA, 25 bp, Canis familiaris
tatttgccacagcacatcactggaa

SEQ ID NO: 199654 - DNA, 25 bp, Canis familiaris
tatttgcctgagtgccctagcagat

SEQ ID NO: 199655 - DNA, 25 bp, Canis familiaris
tatttagctcagactgccctacagt

SEQ ID NO: 199656 - DNA, 25 bp, Canis familiaris
tatttatgatagagctcgtgccgaa

SEQ ID NO: 199657 - DNA, 25 bp, Canis familiaris
tttaattacaccagcatcgcgaagg

SEQ ID NO: 199658 - DNA, 25 bp, Canis familiaris
tatatactattcccaccatggggag

SEQ ID NO: 199659 - DNA, 25 bp, Canis familiaris
tattgaattgggcacagcatgtggg

SEQ ID NO: 199660 - DNA, 25 bp, Canis familiaris
tattatttgccagtgaacagtacgt

SEQ ID NO: 199661 - DNA, 25 bp, Canis familiaris
tatttttgccattaccagtcagagg

SEQ ID NO: 199662 - DNA, 25 bp, Canis familiaris
tatttctctctcataaagcccagtt

SEQ ID NO: 199663 - DNA, 25 bp, Canis familiaris
tatttagcccaccaaagaccttgtt

SEQ ID NO: 199664 - DNA, 25 bp, Canis familiaris
tatttagctctcctacaaacctttt

SEQ ID NO: 199665 - DNA, 25 bp, Canis familiaris
tatttcctaccttattactttattg

SEQ ID NO: 199666 - DNA, 25 bp, Canis familiaris
tttggccatttttatgtaccttttg

SEQ ID NO: 199667 - DNA, 25 bp, Canis familiaris
tataggccattttccatgtcacctt

SEQ ID NO: 199668 - DNA, 25 bp, Canis familiaris
tattggtgacttaccagctacctct

SEQ ID NO: 199669 - DNA, 25 bp, Canis familiaris
tattggagattcttcgcttcacatc

SEQ ID NO: 199670 - DNA, 25 bp, Canis familiaris
ttagggatatattctgcgtttggta

SEQ ID NO: 199671 - DNA, 25 bp, Canis familiaris
tttgggtatcacttggttgggggtg

SEQ ID NO: 199672 - DNA, 25 bp, Canis familiaris
tattgggaacacgtttcagggcggc

SEQ ID NO: 199673 - DNA, 25 bp, Canis familiaris
ttcgtgtaccctgtatcagggtggc

SEQ ID NO: 199674 - DNA, 25 bp, Canis familiaris
tttgtttccttggtagagtagtggt

SEQ ID NO: 199675 - DNA, 25 bp, Canis familiaris
tttctatttttgtaaagggcggctg

SEQ ID NO: 199676 - DNA, 25 bp, Canis familiaris
tttctttttaaatcacgacacttgg

SEQ ID NO: 199677 - DNA, 25 bp, Canis familiaris
tattttctttaagaacccatcttca

SEQ ID NO: 199678 - DNA, 25 bp, Canis familiaris
tatttatgctttgttaatcccttta

SEQ ID NO: 199679 - DNA, 25 bp, Canis familiaris
tattttccttttgagttcctatgct

SEQ ID NO: 199680 - DNA, 25 bp, Canis familiaris
tattttccttcgttactgttctggg

SEQ ID NO: 199681 - DNA, 25 bp, Canis familiaris
tatttccctgtcgtctagtttagga

SEQ ID NO: 199682 - DNA, 25 bp, Canis familiaris
tattttccctcctttgttgtgggag

SEQ ID NO: 199683 - DNA, 25 bp, Canis familiaris
tatttgacctctgaattactggggg

SEQ ID NO: 199684 - DNA, 25 bp, Canis familiaris
tattataagcctggaatttcccccg

SEQ ID NO: 199685 - DNA, 25 bp, Canis familiaris
tttaaagtctggatgtggcccctct

SEQ ID NO: 199686 - DNA, 25 bp, Canis familiaris
tttattacttggagccccatccaat

SEQ ID NO: 199687 - DNA, 25 bp, Canis familiaris
ttagattactttgaccctcttactt

SEQ ID NO: 199688 - DNA, 25 bp, Canis familiaris
tttgttgtcgttgtcgttttgtctt

SEQ ID NO: 199689 - DNA, 25 bp, Canis familiaris
tttggtcggttttcgttgttgtcag

SEQ ID NO: 199690 - DNA, 25 bp, Canis familiaris
tttgtgacgacgtccacgggttggc

SEQ ID NO: 199691 - DNA, 25 bp, Canis familiaris
ttttgaagactctccgggtgatccc

SEQ ID NO: 199692 - DNA, 25 bp, Canis familiaris
ttttcaattcacacccgggatagcc

SEQ ID NO: 199693 - DNA, 25 bp, Canis familiaris
tttcctaacagagcaccgggacgga

SEQ ID NO: 199694 - DNA, 25 bp, Canis familiaris
tttaggagtcggcatcggggagcgg

SEQ ID NO: 199695 - DNA, 25 bp, Canis familiaris
tttagagagagggaaggggcagagg

SEQ ID NO: 199696 - DNA, 25 bp, Canis familiaris
tttcataaatccgaacgatggtagg

SEQ ID NO: 199697 - DNA, 25 bp, Canis familiaris
tattgatacatgaccaaccagatgg

SEQ ID NO: 199698 - DNA, 25 bp, Canis familiaris
tattgatagctgacgtgctgcagga

SEQ ID NO: 199699 - DNA, 25 bp, Canis familiaris
tattgatggctgtggcaaaaaggca

SEQ ID NO: 199700 - DNA, 25 bp, Canis familiaris
tttgagcgcagcccagaagatccag

SEQ ID NO: 199701 - DNA, 25 bp, Canis familiaris
tttgtcagcaggaagaagcagtaga

SEQ ID NO: 199702 - DNA, 25 bp, Canis familiaris
tatttaatgatttgtcgctgaggcc

SEQ ID NO: 199703 - DNA, 25 bp, Canis familiaris
tatttaatgttctacttgcctgcct

SEQ ID NO: 199704 - DNA, 25 bp, Canis familiaris
tatttgcagcatgctcgacttcacc

SEQ ID NO: 199705 - DNA, 25 bp, Canis familiaris
tatttgcagcacctaatcatttcct

SEQ ID NO: 199706 - DNA, 25 bp, Canis familiaris
tattgctgtgcacgaaatgagttcc

SEQ ID NO: 199707 - DNA, 25 bp, Canis familiaris
tattgtctatcgttcatgtgcttgt

SEQ ID NO: 199708 - DNA, 25 bp, Canis familiaris
tatatgttgatcttgccttctttgg

SEQ ID NO: 199709 - DNA, 25 bp, Canis familiaris
tattgtcgatcaatggttctccgtc

SEQ ID NO: 199710 - DNA, 25 bp, Canis familiaris
tatatgcatcagaactgttcacatc

SEQ ID NO: 199711 - DNA, 25 bp, Canis familiaris
tatatgcatcagtctcgttgttcta

SEQ ID NO: 199712 - DNA, 25 bp, Canis familiaris
tattcatgcaaccagctttctctca

SEQ ID NO: 199713 - DNA, 25 bp, Canis familiaris
tattctaaacacctctgctcagagc

SEQ ID NO: 199714 - DNA, 25 bp, Canis familiaris
tattcacaattacctgctgtcgctc

SEQ ID NO: 199715 - DNA, 25 bp, Canis familiaris
tattctccaggaggatgccctgcta

SEQ ID NO: 199716 - DNA, 25 bp, Canis familiaris
tttctgctcgggtcatgacctcagg

SEQ ID NO: 199717 - DNA, 25 bp, Canis familiaris
tattctccttagtgacccacgagtt

SEQ ID NO: 199718 - DNA, 25 bp, Canis familiaris
tattgatccttatgaacttcccttt

SEQ ID NO: 199719 - DNA, 25 bp, Canis familiaris
tattattttggctaaatttcacttt

SEQ ID NO: 199720 - DNA, 25 bp, Canis familiaris
tatttttgggcatctttcttcttat

SEQ ID NO: 199721 - DNA, 25 bp, Canis familiaris
tattcacctgagccaaatttttttt

SEQ ID NO: 199722 - DNA, 25 bp, Canis familiaris
tattccctttcactattttttatat

SEQ ID NO: 199723 - DNA, 25 bp, Canis familiaris
tattctcgctttatgtttttggtta

SEQ ID NO: 199724 - DNA, 25 bp, Canis familiaris
tatttgacttctatagctttttttt

SEQ ID NO: 199725 - DNA, 25 bp, Canis familiaris
tatttggttattacatcttattttt

SEQ ID NO: 199726 - DNA, 25 bp, Canis familiaris
tatttgaggatatattctgtcgttt

SEQ ID NO: 199727 - DNA, 25 bp, Canis familiaris
tatttgactgaggcctacttcgttt

SEQ ID NO: 199728 - DNA, 25 bp, Canis familiaris
tattgggctgaagtctttctcgctt

SEQ ID NO: 199729 - DNA, 25 bp, Canis familiaris
tatattgggaattctcttctcacct

SEQ ID NO: 199730 - DNA, 25 bp, Canis familiaris
tattcatgtgggggtttctattctg

SEQ ID NO: 199731 - DNA, 25 bp, Canis familiaris
tatattgctgggggttgctcccctg

SEQ ID NO: 199732 - DNA, 25 bp, Canis familiaris
ttttcgaggtggagcatatcccgga

SEQ ID NO: 199733 - DNA, 25 bp, Canis familiaris
tttgaaaagcagctcagcttccccc

SEQ ID NO: 199734 - DNA, 25 bp, Canis familiaris
tattagtagtcagctagtccacccg

SEQ ID NO: 199735 - DNA, 25 bp, Canis familiaris
tattggcctataactagtccccagg

SEQ ID NO: 199736 - DNA, 25 bp, Canis familiaris
tattccctgaaagttgctcccaaag

SEQ ID NO: 199737 - DNA, 25 bp, Canis familiaris
tattctctggcaaagacgatcccaa

SEQ ID NO: 199738 - DNA, 25 bp, Canis familiaris
tatattcttgcaatacacacacaca

SEQ ID NO: 199739 - DNA, 25 bp, Canis familiaris
tattacttatatcaacaccaaacta

SEQ ID NO: 199740 - DNA, 25 bp, Canis familiaris
tttagtttagtaacactccaagagt

SEQ ID NO: 199741 - DNA, 25 bp, Canis familiaris
tattgagtctcaagaaaggcccaaa

SEQ ID NO: 199742 - DNA, 25 bp, Canis familiaris
tatatagacgcaccaaagccctcac

SEQ ID NO: 199743 - DNA, 25 bp, Canis familiaris
tatattctctggcaaagacgatccc

SEQ ID NO: 199744 - DNA, 25 bp, Canis familiaris
tatttctctggccagaagacaccac

SEQ ID NO: 199745 - DNA, 25 bp, Canis familiaris
tatttctttgacccaatctcacatc

SEQ ID NO: 199746 - DNA, 25 bp, Canis familiaris
tatttccctaataaactcctcaact

SEQ ID NO: 199747 - DNA, 25 bp, Canis familiaris
tatttttcttaaacactaccacagt

SEQ ID NO: 199748 - DNA, 25 bp, Canis familiaris
tatttgtatttatttccagacccat

SEQ ID NO: 199749 - DNA, 25 bp, Canis familiaris
tattttatatctatgttcaaactat

SEQ ID NO: 199750 - DNA, 25 bp, Canis familiaris
tattatttatgtattgtcaccctga

SEQ ID NO: 199751 - DNA, 25 bp, Canis familiaris
tattttatttattttcagggctgag

SEQ ID NO: 199752 - DNA, 25 bp, Canis familiaris
tattttatgtttacttcaagggcca

SEQ ID NO: 199753 - DNA, 25 bp, Canis familiaris
tattggttgtttccctagagagccc

SEQ ID NO: 199754 - DNA, 25 bp, Canis familiaris
tttggactttctcccacaaaagcca

SEQ ID NO: 199755 - DNA, 25 bp, Canis familiaris
tttgtatcattccttcaaataaagt

SEQ ID NO: 199756 - DNA, 25 bp, Canis familiaris
tttgttttccctaacagcaactggt

SEQ ID NO: 199757 - DNA, 25 bp, Canis familiaris
tttttttcccaatcagaatgtgttt

SEQ ID NO: 199758 - DNA, 25 bp, Canis familiaris
tattttttaacctggacatgcatta

SEQ ID NO: 199759 - DNA, 25 bp, Canis familiaris
ttttatttttgcagggagtgttaag

SEQ ID NO: 199760 - DNA, 25 bp, Canis familiaris
tatttactttccatctgatatgcat

SEQ ID NO: 199761 - DNA, 25 bp, Canis familiaris
tatttcctctctacctctattgagg

SEQ ID NO: 199762 - DNA, 25 bp, Canis familiaris
tattgtcacctaagggcttctgatt

SEQ ID NO: 199763 - DNA, 25 bp, Canis familiaris
tttgaactcaatgggcagcttcgat

SEQ ID NO: 199764 - DNA, 25 bp, Canis familiaris
tttgagtctaatgcacgttctaaca

SEQ ID NO: 199765 - DNA, 25 bp, Canis familiaris
tttggtcatacgtatcggtatgaac

SEQ ID NO: 199766 - DNA, 25 bp, Canis familiaris
tttggataagggtgtgtgaagaatt

SEQ ID NO: 199767 - DNA, 25 bp, Canis familiaris
ttgtgttaagaccgggataagggct

SEQ ID NO: 199768 - DNA, 25 bp, Canis familiaris
tttcttcaagactgggccacggggc

SEQ ID NO: 199769 - DNA, 25 bp, Canis familiaris
ttatgttagcgtggggtcccgtggg

SEQ ID NO: 199770 - DNA, 25 bp, Canis familiaris
ttagtgggcattgggctgccccgga

SEQ ID NO: 199771 - DNA, 25 bp, Canis familiaris
tattggaaatgctggtgctcccgga

SEQ ID NO: 199772 - DNA, 25 bp, Canis familiaris
tattaaagcatctggcttacaccca

SEQ ID NO: 199773 - DNA, 25 bp, Canis familiaris
tattcagagcacagtgatgttagac

SEQ ID NO: 199774 - DNA, 25 bp, Canis familiaris
tattccacacatttggactgcatca

SEQ ID NO: 199775 - DNA, 25 bp, Canis familiaris
tttggcatcccaatggcactcatat

SEQ ID NO: 199776 - DNA, 25 bp, Canis familiaris
tttggcaccacactgatcatgctgc

SEQ ID NO: 199777 - DNA, 25 bp, Canis familiaris
tttgaccgcatcctgagcagcaaga

SEQ ID NO: 199778 - DNA, 25 bp, Canis familiaris
ttatcatccagacctatgcatgcgg

SEQ ID NO: 199779 - DNA, 25 bp, Canis familiaris
tattcacgtgtgtctagctgcagga

SEQ ID NO: 199780 - DNA, 25 bp, Canis familiaris
tattcgtgctggtccatcgtgagta

SEQ ID NO: 199781 - DNA, 25 bp, Canis familiaris
tttggatgcatcgtccagcagctga

SEQ ID NO: 199782 - DNA, 25 bp, Canis familiaris
tttggcaatgcagtccactgatagt

SEQ ID NO: 199783 - DNA, 25 bp, Canis familiaris
tttgtgaatgcctctcagagcctgt

SEQ ID NO: 199784 - DNA, 25 bp, Canis familiaris
tttggataagtcccagagccgattc

SEQ ID NO: 199785 - DNA, 25 bp, Canis familiaris
tttggaaactgactagtgccgttaa

SEQ ID NO: 199786 - DNA, 25 bp, Canis familiaris
tttggaaactgactactgccgctaa

SEQ ID NO: 199787 - DNA, 25 bp, Canis familiaris
tttgtaccagtattagtgacctaag

SEQ ID NO: 199788 - DNA, 25 bp, Canis familiaris
tttgtagcagcatatttaactctaa

SEQ ID NO: 199789 - DNA, 25 bp, Canis familiaris
tttgttcagatacttaagcacttta

SEQ ID NO: 199790 - DNA, 25 bp, Canis familiaris
tattgttgctaactttacctttctc

SEQ ID NO: 199791 - DNA, 25 bp, Canis familiaris
tatttattatttttagcctgtcatt

SEQ ID NO: 199792 - DNA, 25 bp, Canis familiaris
tattttatgttccctgagacgtaaa

SEQ ID NO: 199793 - DNA, 25 bp, Canis familiaris
tatttctcctaccctgtagctgtaa

SEQ ID NO: 199794 - DNA, 25 bp, Canis familiaris
tttgaccctgaccttaacgtgaatt

SEQ ID NO: 199795 - DNA, 25 bp, Canis familiaris
tttaccactgagcgtagtccgttta

SEQ ID NO: 199796 - DNA, 25 bp, Canis familiaris
tttgtctggtggaggaaccgcattt

SEQ ID NO: 199797 - DNA, 25 bp, Canis familiaris
tttctctgggagttgaattccagct

SEQ ID NO: 199798 - DNA, 25 bp, Canis familiaris
tattctggggtgcaggttctgccat

SEQ ID NO: 199799 - DNA, 25 bp, Canis familiaris
tatttgggtctcgaggtagctgtct

SEQ ID NO: 199800 - DNA, 25 bp, Canis familiaris
tatttaggtccagcagctacattta

SEQ ID NO: 199801 - DNA, 25 bp, Canis familiaris
tattttggacatgccaataaatgta

SEQ ID NO: 199802 - DNA, 25 bp, Canis familiaris
tattcttggccatccaattccattc

SEQ ID NO: 199803 - DNA, 25 bp, Canis familiaris
tattcttggtttcttcatccatctc

SEQ ID NO: 199804 - DNA, 25 bp, Canis familiaris
tattttcctttgttgttaactcgct

SEQ ID NO: 199805 - DNA, 25 bp, Canis familiaris
tatttacctttcatgttcacaatca

SEQ ID NO: 199806 - DNA, 25 bp, Canis familiaris
tattaacgcgttcgcagttgcagcg

SEQ ID NO: 199807 - DNA, 25 bp, Canis familiaris
tattgcacacaggtaacagctatga

SEQ ID NO: 199808 - DNA, 25 bp, Canis familiaris
tatttccttgctgctcattgtagag

SEQ ID NO: 199809 - DNA, 25 bp, Canis familiaris
tatttttcatctatttaaacccatt

SEQ ID NO: 199810 - DNA, 25 bp, Canis familiaris
tattagattctatttgtttcccctc

SEQ ID NO: 199811 - DNA, 25 bp, Canis familiaris
tattttgattattgacttgtccccc

SEQ ID NO: 199812 - DNA, 25 bp, Canis familiaris
tattttatttagcctgcttctccct

SEQ ID NO: 199813 - DNA, 25 bp, Canis familiaris
tatttttattctgcatgttcttcct

SEQ ID NO: 199814 - DNA, 25 bp, Canis familiaris
tattttctgattcgcctatgtctat

SEQ ID NO: 199815 - DNA, 25 bp, Canis familiaris
tttgtactattgtcactagctctat

SEQ ID NO: 199816 - DNA, 25 bp, Canis familiaris
tatttatgaattccagtactctcca

SEQ ID NO: 199817 - DNA, 25 bp, Canis familiaris
tattttcagaataagtacttccata

SEQ ID NO: 199818 - DNA, 25 bp, Canis familiaris
ttttctcagaatttgtagtaggcaa

SEQ ID NO: 199819 - DNA, 25 bp, Canis familiaris
tattattctgttttctcatttccaa

SEQ ID NO: 199820 - DNA, 25 bp, Canis familiaris
tattccatcatgttattcgtttcac

SEQ ID NO: 199821 - DNA, 25 bp, Canis familiaris
tattgctctatgttcattctggtta

SEQ ID NO: 199822 - DNA, 25 bp, Canis familiaris
tattcagtattaacttgggtattct

SEQ ID NO: 199823 - DNA, 25 bp, Canis familiaris
tattatatatctgactttggtttag

SEQ ID NO: 199824 - DNA, 25 bp, Canis familiaris
tttaccctgcaacttgggctttcag

SEQ ID NO: 199825 - DNA, 25 bp, Canis familiaris
tattaccactaacatggtgtcatca

SEQ ID NO: 199826 - DNA, 25 bp, Canis familiaris
tatttcccgtgagatgttgcagcaa

SEQ ID NO: 199827 - DNA, 25 bp, Canis familiaris
tatttcccctgccagattggcggag

SEQ ID NO: 199828 - DNA, 25 bp, Canis familiaris
tttgctttctccaaatatggggagg

SEQ ID NO: 199829 - DNA, 25 bp, Canis familiaris
tttaaattcagcaaagtctggcgag

SEQ ID NO: 199830 - DNA, 25 bp, Canis familiaris
tttagagtcccaattgtaggaagaa

SEQ ID NO: 199831 - DNA, 25 bp, Canis familiaris
tttagagttcaccttacggaaatat

SEQ ID NO: 199832 - DNA, 25 bp, Canis familiaris
ttatatggttgcatttacgccaata

SEQ ID NO: 199833 - DNA, 25 bp, Canis familiaris
tattaggtgtgggcctactccaaaa

SEQ ID NO: 199834 - DNA, 25 bp, Canis familiaris
tattgtctgtaggctcactcagccc

SEQ ID NO: 199835 - DNA, 25 bp, Canis familiaris
tatttctggagttcatcccagctcc

SEQ ID NO: 199836 - DNA, 25 bp, Canis familiaris
tatttaggggccaaccatgcccacc

SEQ ID NO: 199837 - DNA, 25 bp, Canis familiaris
tatttaggcttgctaccatcctttc

SEQ ID NO: 199838 - DNA, 25 bp, Canis familiaris
tattataccttcctaatctcacttt

SEQ ID NO: 199839 - DNA, 25 bp, Canis familiaris
tatttgaccttgcctaattcctaaa

SEQ ID NO: 199840 - DNA, 25 bp, Canis familiaris
tatttgagacattcaccataaccta

SEQ ID NO: 199841 - DNA, 25 bp, Canis familiaris
tattttatcattacaataattctat

SEQ ID NO: 199842 - DNA, 25 bp, Canis familiaris
tattttcatgaatcaaacatttttt

SEQ ID NO: 199843 - DNA, 25 bp, Canis familiaris
tatttctcttaacctactttttgct

SEQ ID NO: 199844 - DNA, 25 bp, Canis familiaris
tattccacttaacctacaagtgaat

SEQ ID NO: 199845 - DNA, 25 bp, Canis familiaris
tattttcttaaactaaagcatgtat

SEQ ID NO: 199846 - DNA, 25 bp, Canis familiaris
tatttctttcacaagccaaactgct

SEQ ID NO: 199847 - DNA, 25 bp, Canis familiaris
tattcctgttcaacgctaaatccat

SEQ ID NO: 199848 - DNA, 25 bp, Canis familiaris
tattgccattaaactgttaatacta

SEQ ID NO: 199849 - DNA, 25 bp, Canis familiaris
ttatgacatgcacacccttttgaca

SEQ ID NO: 199850 - DNA, 25 bp, Canis familiaris
tttccagcccaggcacttttggaca

SEQ ID NO: 199851 - DNA, 25 bp, Canis familiaris
tttcagcagctgacagccctcttag

SEQ ID NO: 199852 - DNA, 25 bp, Canis familiaris
tttggatattagccccttatcagat

SEQ ID NO: 199853 - DNA, 25 bp, Canis familiaris
tttggaataagccccagtcagccag

SEQ ID NO: 199854 - DNA, 25 bp, Canis familiaris
tattggggagtgccagccaacaccg

SEQ ID NO: 199855 - DNA, 25 bp, Canis familiaris
tttgatcgggatccaccttcagaag

SEQ ID NO: 199856 - DNA, 25 bp, Canis familiaris
tatttaagacattgcattttccact

SEQ ID NO: 199857 - DNA, 25 bp, Canis familiaris
tattcaataaatgctcttccctttc

SEQ ID NO: 199858 - DNA, 25 bp, Canis familiaris
tattaccagaatctcttcaccctgt

SEQ ID NO: 199859 - DNA, 25 bp, Canis familiaris
tttggccgtgactacaatgcaccgt

SEQ ID NO: 199860 - DNA, 25 bp, Canis familiaris
tttggagtgtgaaacctgcccaggt

SEQ ID NO: 199861 - DNA, 25 bp, Canis familiaris
tttggagtcatacatgctatgcgat

SEQ ID NO: 199862 - DNA, 25 bp, Canis familiaris
tattacctcatacgcagctcatctt

SEQ ID NO: 199863 - DNA, 25 bp, Canis familiaris
tattctcgccaactgatatcatctg

SEQ ID NO: 199864 - DNA, 25 bp, Canis familiaris
tatttcatgctagtgcctcacatcg

SEQ ID NO: 199865 - DNA, 25 bp, Canis familiaris
tattgtgctcattgtactaacgtgc

SEQ ID NO: 199866 - DNA, 25 bp, Canis familiaris
tattgatggctacgtctacacctgg

SEQ ID NO: 199867 - DNA, 25 bp, Canis familiaris
tttcaggctcaactctacagcttct

SEQ ID NO: 199868 - DNA, 25 bp, Canis familiaris
tattagaccaagacgatcactcctc

SEQ ID NO: 199869 - DNA, 25 bp, Canis familiaris
tttggaccatatacagacacactct

SEQ ID NO: 199870 - DNA, 25 bp, Canis familiaris
tttggccagcatctttcaactgtcc

SEQ ID NO: 199871 - DNA, 25 bp, Canis familiaris
tttggcctgcaaatgcttaaatgtt

SEQ ID NO: 199872 - DNA, 25 bp, Canis familiaris
tttggcccaaataaatgaatgttcc

SEQ ID NO: 199873 - DNA, 25 bp, Canis familiaris
tttgttacaaaaaaggactatcgat

SEQ ID NO: 199874 - DNA, 25 bp, Canis familiaris
ttttttgtagaagagcccccagata

SEQ ID NO: 199875 - DNA, 25 bp, Canis familiaris
tattttttacaagtccaggttcaat

SEQ ID NO: 199876 - DNA, 25 bp, Canis familiaris
tatttttttccagggccgatgtcct

SEQ ID NO: 199877 - DNA, 25 bp, Canis familiaris
tatttttatttctgcctctcatgat

SEQ ID NO: 199878 - DNA, 25 bp, Canis familiaris
tattttcttttctctctctagaacc

SEQ ID NO: 199879 - DNA, 25 bp, Canis familiaris
tattttcagttttccttttgtgcac

SEQ ID NO: 199880 - DNA, 25 bp, Canis familiaris
tatttacctatcagccactattggg

SEQ ID NO: 199881 - DNA, 25 bp, Canis familiaris
tattgagcaactactggccactacg

SEQ ID NO: 199882 - DNA, 25 bp, Canis familiaris
tttgagaacaactgagcacgccggc

SEQ ID NO: 199883 - DNA, 25 bp, Canis familiaris
tttgttgcaagactgggacgcgcgg

SEQ ID NO: 199884 - DNA, 25 bp, Canis familiaris
tattgtacagaacggggcatgcgcc

SEQ ID NO: 199885 - DNA, 25 bp, Canis familiaris
tattgggccaggccggagctgaccc

SEQ ID NO: 199886 - DNA, 25 bp, Canis familiaris
tattatcccaggaggaggccctccc

SEQ ID NO: 199887 - DNA, 25 bp, Canis familiaris
tattttctcggtcctgaatctcacc

SEQ ID NO: 199888 - DNA, 25 bp, Canis familiaris
tatttttctggtcgggtcattgctc

SEQ ID NO: 199889 - DNA, 25 bp, Canis familiaris
tattgttttgggggagctttttatg

SEQ ID NO: 199890 - DNA, 25 bp, Canis familiaris
tatttttggggggcagtagatgtta

SEQ ID NO: 199891 - DNA, 25 bp, Canis familiaris
tattgttctgcgagtgcctgtacac

SEQ ID NO: 199892 - DNA, 25 bp, Canis familiaris
tttgtgtgtggcggcgactaagctc

SEQ ID NO: 199893 - DNA, 25 bp, Canis familiaris
tttgctgggagcacaaccaggcagc

SEQ ID NO: 199894 - DNA, 25 bp, Canis familiaris
tttgcattgggaaaagcctgtcagt

SEQ ID NO: 199895 - DNA, 25 bp, Canis familiaris
tttggggtttgatgcatctgctcag

SEQ ID NO: 199896 - DNA, 25 bp, Canis familiaris
tattgatgggcatttgggctgcttc

SEQ ID NO: 199897 - DNA, 25 bp, Canis familiaris
tttgtggaccttagacagttttaca

SEQ ID NO: 199898 - DNA, 25 bp, Canis familiaris
tttggtgcaagctaaactttttaag

SEQ ID NO: 199899 - DNA, 25 bp, Canis familiaris
tttgaggaactgtcgactcttctcc

SEQ ID NO: 199900 - DNA, 25 bp, Canis familiaris
tttggtgacaaaggggcttcctctg

SEQ ID NO: 199901 - DNA, 25 bp, Canis familiaris
tttcctagagtggggagcctccctg

SEQ ID NO: 199902 - DNA, 25 bp, Canis familiaris
tattgcctaagggggaatctccccg

SEQ ID NO: 199903 - DNA, 25 bp, Canis familiaris
ttagcgctaacctaggaaccgccgc

SEQ ID NO: 199904 - DNA, 25 bp, Canis familiaris
tttggtgaaccacaaaccagccctg

SEQ ID NO: 199905 - DNA, 25 bp, Canis familiaris
tttgggaacttgggatccccacgtg

SEQ ID NO: 199906 - DNA, 25 bp, Canis familiaris
tttggtgccctttaaccaccagagg

SEQ ID NO: 199907 - DNA, 25 bp, Canis familiaris
tttgtaaccctgtaaaatacatagg

SEQ ID NO: 199908 - DNA, 25 bp, Canis familiaris
tttctaaccccaggacatttcaacg

SEQ ID NO: 199909 - DNA, 25 bp, Canis familiaris
tattctaacccagagcatttcctac

SEQ ID NO: 199910 - DNA, 25 bp, Canis familiaris
tattataaacaaatcctttcttact

SEQ ID NO: 199911 - DNA, 25 bp, Canis familiaris
ttaagaaaaaatgctttgttgaaca

SEQ ID NO: 199912 - DNA, 25 bp, Canis familiaris
ttttataaaattgtatgctttcaga

SEQ ID NO: 199913 - DNA, 25 bp, Canis familiaris
tttgtgaaattcatcctttttagga

SEQ ID NO: 199914 - DNA, 25 bp, Canis familiaris
tattcttcaattgtggttttctaaa

SEQ ID NO: 199915 - DNA, 25 bp, Canis familiaris
tattcttacttggtattttctctac

SEQ ID NO: 199916 - DNA, 25 bp, Canis familiaris
tattttatcctgtattcttgtttga

SEQ ID NO: 199917 - DNA, 25 bp, Canis familiaris
tattgtctttagttgtcctgtttca

SEQ ID NO: 199918 - DNA, 25 bp, Canis familiaris
tttgtttgttgaatgatgcatcatc

SEQ ID NO: 199919 - DNA, 25 bp, Canis familiaris
tattttgtgttgtgtgtatcctgta

SEQ ID NO: 199920 - DNA, 25 bp, Canis familiaris
tattttgttttcaagtgcacattct

SEQ ID NO: 199921 - DNA, 25 bp, Canis familiaris
tatttttttcctttgcattcatctc

SEQ ID NO: 199922 - DNA, 25 bp, Canis familiaris
tatttattatattctgtttttctac

SEQ ID NO: 199923 - DNA, 25 bp, Canis familiaris
tttcgactattgcgtttgttcaact

SEQ ID NO: 199924 - DNA, 25 bp, Canis familiaris
tttcacttttgcagattgggtaaca

SEQ ID NO: 199925 - DNA, 25 bp, Canis familiaris
tttggcttcttcggtacaggtacca

SEQ ID NO: 199926 - DNA, 25 bp, Canis familiaris
tttggttctcggattccaggcacta

SEQ ID NO: 199927 - DNA, 25 bp, Canis familiaris
tttggtgcacctcgatttgggggaa

SEQ ID NO: 199928 - DNA, 25 bp, Canis familiaris
tttgtgacaactggtgtattgaggc

SEQ ID NO: 199929 - DNA, 25 bp, Canis familiaris
tattttcaatttctgcatcatggga

SEQ ID NO: 199930 - DNA, 25 bp, Canis familiaris
tatttatcaccttccccaggagaaa

SEQ ID NO: 199931 - DNA, 25 bp, Canis familiaris
tattcttcactatcccaaaagataa

SEQ ID NO: 199932 - DNA, 25 bp, Canis familiaris
tattttatgattcccacaaacaaaa

SEQ ID NO: 199933 - DNA, 25 bp, Canis familiaris
tatttattcaacacacacacacaca

SEQ ID NO: 199934 - DNA, 25 bp, Canis familiaris
tttatatattaatcaccacacaacg

SEQ ID NO: 199935 - DNA, 25 bp, Canis familiaris
tattttatttattacgcacactaca

SEQ ID NO: 199936 - DNA, 25 bp, Canis familiaris
tattttatttattacgcacactaca

SEQ ID NO: 199937 - DNA, 25 bp, Canis familiaris
tattttattttttctcatcactttt

SEQ ID NO: 199938 - DNA, 25 bp, Canis familiaris
tatttatcgtgtctagtctattttt

SEQ ID NO: 199939 - DNA, 25 bp, Canis familiaris
tattttcaatgacttcttatttttt

SEQ ID NO: 199940 - DNA, 25 bp, Canis familiaris
tattttcttagtgtttctcttctct

SEQ ID NO: 199941 - DNA, 25 bp, Canis familiaris
tattttcttgtttctattgctctct

SEQ ID NO: 199942 - DNA, 25 bp, Canis familiaris
tatttttcctttacatttctgcctt

SEQ ID NO: 199943 - DNA, 25 bp, Canis familiaris
tattttgtctgtttgactttccagt

SEQ ID NO: 199944 - DNA, 25 bp, Canis familiaris
tattatttcttgtagttgtctcaaa

SEQ ID NO: 199945 - DNA, 25 bp, Canis familiaris
tattttgtattgtattgtcctaagt

SEQ ID NO: 199946 - DNA, 25 bp, Canis familiaris
tattcattgttaatttgttctcata

SEQ ID NO: 199947 - DNA, 25 bp, Canis familiaris
tattcagttccgctcagtatctgta

SEQ ID NO: 199948 - DNA, 25 bp, Canis familiaris
tattcagagtcctctcttgatttta

SEQ ID NO: 199949 - DNA, 25 bp, Canis familiaris
tttgaggtcaagttctgattatttg

SEQ ID NO: 199950 - DNA, 25 bp, Canis familiaris
tttgggtcagagctttttcctgccc

SEQ ID NO: 199951 - DNA, 25 bp, Canis familiaris
tttgggtatagcttaatttccacta

SEQ ID NO: 199952 - DNA, 25 bp, Canis familiaris
tattaagtacactttgatacccaaa

SEQ ID NO: 199953 - DNA, 25 bp, Canis familiaris
tttccagtaacttctatccacacag

SEQ ID NO: 199954 - DNA, 25 bp, Canis familiaris
tttcacagtcacatcatgttccgcc

SEQ ID NO: 199955 - DNA, 25 bp, Canis familiaris
tttctgaagcactgagttcccacgg

SEQ ID NO: 199956 - DNA, 25 bp, Canis familiaris
tttctgaaacagtaggtcctcttga

SEQ ID NO: 199957 - DNA, 25 bp, Canis familiaris
tttgtagcccagtgttaaattgtac

SEQ ID NO: 199958 - DNA, 25 bp, Canis familiaris
tttggagcccgtggtggaggccggg

SEQ ID NO: 199959 - DNA, 25 bp, Canis familiaris
tttgggacacttgtgggcctgaggg

SEQ ID NO: 199960 - DNA, 25 bp, Canis familiaris
ttttgcctagttcatgttgccaagc

SEQ ID NO: 199961 - DNA, 25 bp, Canis familiaris
tttgggctggtccagatggtccacc

SEQ ID NO: 199962 - DNA, 25 bp, Canis familiaris
tttgggctgccagtcactgtggccc

SEQ ID NO: 199963 - DNA, 25 bp, Canis familiaris
tttggaggccgcggctgtgattttt

SEQ ID NO: 199964 - DNA, 25 bp, Canis familiaris
tttaagacggcggcagtggttccca

SEQ ID NO: 199965 - DNA, 25 bp, Canis familiaris
tttccaggggccatgtggtaccact

SEQ ID NO: 199966 - DNA, 25 bp, Canis familiaris
tttgcctggggctgtggaaaccagc

SEQ ID NO: 199967 - DNA, 25 bp, Canis familiaris
tttgccttggaacctgagttactca

SEQ ID NO: 199968 - DNA, 25 bp, Canis familiaris
tattccacggagtcctggaatccca

SEQ ID NO: 199969 - DNA, 25 bp, Canis familiaris
tattacctggcttcttacagacacc

SEQ ID NO: 199970 - DNA, 25 bp, Canis familiaris
tattcagcctatggatctggtcaga

SEQ ID NO: 199971 - DNA, 25 bp, Canis familiaris
tattcatcctgtttcatgctgtacg

SEQ ID NO: 199972 - DNA, 25 bp, Canis familiaris
ttatctctatgttttcgatagttgg

SEQ ID NO: 199973 - DNA, 25 bp, Canis familiaris
tattgcctatggcttcacaaccggg

SEQ ID NO: 199974 - DNA, 25 bp, Canis familiaris
tttggcttggtcttcacaggccgat

SEQ ID NO: 199975 - DNA, 25 bp, Canis familiaris
tattggtttctaacacaggactggt

SEQ ID NO: 199976 - DNA, 25 bp, Canis familiaris
tattggcttttatactcgcattggt

SEQ ID NO: 199977 - DNA, 25 bp, Canis familiaris
tattggtatcgtttaatctttttct

SEQ ID NO: 199978 - DNA, 25 bp, Canis familiaris
tatttatgaatttgtaactttttat

SEQ ID NO: 199979 - DNA, 25 bp, Canis familiaris
tattctgcagaacttgtcaaatctt

SEQ ID NO: 199980 - DNA, 25 bp, Canis familiaris
tattctgctgcatcgaaacatacta

SEQ ID NO: 199981 - DNA, 25 bp, Canis familiaris
tattggctcatataaggcatggata

SEQ ID NO: 199982 - DNA, 25 bp, Canis familiaris
tttgaccttaacctgtccaagaaag

SEQ ID NO: 199983 - DNA, 25 bp, Canis familiaris
tttgaccttaaggcagttactgaag

SEQ ID NO: 199984 - DNA, 25 bp, Canis familiaris
tttgactcgatcttgggtgatacgg

SEQ ID NO: 199985 - DNA, 25 bp, Canis familiaris
tttgaccaactcttcagagaacgga

SEQ ID NO: 199986 - DNA, 25 bp, Canis familiaris
tttgagaaacgccacaagaacatgt

SEQ ID NO: 199987 - DNA, 25 bp, Canis familiaris
tttaaagcccagcccagaacgtgtt

SEQ ID NO: 199988 - DNA, 25 bp, Canis familiaris
ttaactggctaccaccaaacgtctc

SEQ ID NO: 199989 - DNA, 25 bp, Canis familiaris
ttctgactgactgtaccaaacctct

SEQ ID NO: 199990 - DNA, 25 bp, Canis familiaris
tttgacttctccaccaaagtaccta

SEQ ID NO: 199991 - DNA, 25 bp, Canis familiaris
tttgtctttggcaccacactgatca

SEQ ID NO: 199992 - DNA, 25 bp, Canis familiaris
tattccttttgagccagcacatcac

SEQ ID NO: 199993 - DNA, 25 bp, Canis familiaris
tattcctgctttcaccaggtccaaa

SEQ ID NO: 199994 - DNA, 25 bp, Canis familiaris
tattgcccttggaacacatggtgcc

SEQ ID NO: 199995 - DNA, 25 bp, Canis familiaris
tttgccttgagagtagcaagtgacc

SEQ ID NO: 199996 - DNA, 25 bp, Canis familiaris
tttggttagctgtgcggatggcctc

SEQ ID NO: 199997 - DNA, 25 bp, Canis familiaris
tttgctgctgccctaggggatggca

SEQ ID NO: 199998 - DNA, 25 bp, Canis familiaris
tttggccactgtaggatggcaagca

SEQ ID NO: 199999 - DNA, 25 bp, Canis familiaris
tttggccgcagaaggtgagcccacg

SEQ ID NO: 200000 - DNA, 25 bp, Canis familiaris
tttgtgcttggtggctgtagcctcc

SEQ ID NO: 200001 - DNA, 25 bp, Canis familiaris
tttggcaccattggcattctggccc

SEQ ID NO: 200002 - DNA, 25 bp, Canis familiaris
tttgacccttgacatctagctcaac

SEQ ID NO: 200003 - DNA, 25 bp, Canis familiaris
tttgaatcctgtcccttgattaagc

SEQ ID NO: 200004 - DNA, 25 bp, Canis familiaris
tttggacccatttcttgttacagct

SEQ ID NO: 200005 - DNA, 25 bp, Canis familiaris
tttggaaggcttttcttctccactt

SEQ ID NO: 200006 - DNA, 25 bp, Canis familiaris
ttcgtgaaaattgtggtctcctcgg

SEQ ID NO: 200007 - DNA, 25 bp, Canis familiaris
tttggagaaataggtggtcacaccc

SEQ ID NO: 200008 - DNA, 25 bp, Canis familiaris
tttggtagaatctttgttccaacct

SEQ ID NO: 200009 - DNA, 25 bp, Canis familiaris
tttgggcaggattttcccctagaat

SEQ ID NO: 200010 - DNA, 25 bp, Canis familiaris
tttgggggacacatgtccccggatt

SEQ ID NO: 200011 - DNA, 25 bp, Canis familiaris
tttggtgggtacagggctggctggc

SEQ ID NO: 200012 - DNA, 25 bp, Canis familiaris
ttctggtgttgtcccggaggttggg

SEQ ID NO: 200013 - DNA, 25 bp, Canis familiaris
tttgtttgtgtcccggtgttttatg

SEQ ID NO: 200014 - DNA, 25 bp, Canis familiaris
tattgtttgcctataagttcttgat

SEQ ID NO: 200015 - DNA, 25 bp, Canis familiaris
tttgagtctcaactaaagtacctat

SEQ ID NO: 200016 - DNA, 25 bp, Canis familiaris
tttgcagtcccgtatctggtttcta

SEQ ID NO: 200017 - DNA, 25 bp, Canis familiaris
tttgggcccagggaggttgctcaag

SEQ ID NO: 200018 - DNA, 25 bp, Canis familiaris
tttagggtacctgggtggctcagtg

SEQ ID NO: 200019 - DNA, 25 bp, Canis familiaris
tttagggtacctgggtggctcagtg

SEQ ID NO: 200020 - DNA, 25 bp, Canis familiaris
tattaggggccctggtttagctcaa

SEQ ID NO: 200021 - DNA, 25 bp, Canis familiaris
tttaggggacttcagctttcctcag

SEQ ID NO: 200022 - DNA, 25 bp, Canis familiaris
tattccgtggactatgaactttctt

SEQ ID NO: 200023 - DNA, 25 bp, Canis familiaris
tattccgctggatataagtctctca

SEQ ID NO: 200024 - DNA, 25 bp, Canis familiaris
tattctccagagtatccaggtccat

SEQ ID NO: 200025 - DNA, 25 bp, Canis familiaris
tattcttcagatttcataggtacat

SEQ ID NO: 200026 - DNA, 25 bp, Canis familiaris
tattctttgctctactaggccagcc

SEQ ID NO: 200027 - DNA, 25 bp, Canis familiaris
tattatttgctagtctgtggcataa

SEQ ID NO: 200028 - DNA, 25 bp, Canis familiaris
tattatgtatctatcagctgtttat

SEQ ID NO: 200029 - DNA, 25 bp, Canis familiaris
tattagatacatactcattacttga

SEQ ID NO: 200030 - DNA, 25 bp, Canis familiaris
tattgaatgaatgcctatgtctctg

SEQ ID NO: 200031 - DNA, 25 bp, Canis familiaris
tattaatccactccatgagtttttg

SEQ ID NO: 200032 - DNA, 25 bp, Canis familiaris
tttgaagcaactcatcgattgattt

SEQ ID NO: 200033 - DNA, 25 bp, Canis familiaris
tttggcagcaatttacgtgttatgt

SEQ ID NO: 200034 - DNA, 25 bp, Canis familiaris
tattagcaataagttccgtcgatga

SEQ ID NO: 200035 - DNA, 25 bp, Canis familiaris
tattatgtatattttctttcgattt

SEQ ID NO: 200036 - DNA, 25 bp, Canis familiaris
tattctctagtatttctcgtcgctt

SEQ ID NO: 200037 - DNA, 25 bp, Canis familiaris
tattcaccgagatcttcgggctgct

SEQ ID NO: 200038 - DNA, 25 bp, Canis familiaris
tattcccatgacccgccgggcagct

SEQ ID NO: 200039 - DNA, 25 bp, Canis familiaris
tattccgagcacttcccggaacttt

SEQ ID NO: 200040 - DNA, 25 bp, Canis familiaris
tattcatgcccctcctggagaattt

SEQ ID NO: 200041 - DNA, 25 bp, Canis familiaris
tattcagcccatcacgctgtggttt

SEQ ID NO: 200042 - DNA, 25 bp, Canis familiaris
tttcagtctcattccctagtatttg

SEQ ID NO: 200043 - DNA, 25 bp, Canis familiaris
tttctagtaacccaagcttttctat

SEQ ID NO: 200044 - DNA, 25 bp, Canis familiaris
tttccctaacagcaactggtttatt

SEQ ID NO: 200045 - DNA, 25 bp, Canis familiaris
tttccccaagagcaacccataaatt

SEQ ID NO: 200046 - DNA, 25 bp, Canis familiaris
tttgccctacaagaacccagagttt

SEQ ID NO: 200047 - DNA, 25 bp, Canis familiaris
ttaccctaattatactaagcacttt

SEQ ID NO: 200048 - DNA, 25 bp, Canis familiaris
tttccttcttttcagtaaactctag

SEQ ID NO: 200049 - DNA, 25 bp, Canis familiaris
tttccttgcattttaacaaacgtca

SEQ ID NO: 200050 - DNA, 25 bp, Canis familiaris
tttcacttgttacaaccacacgcct

SEQ ID NO: 200051 - DNA, 25 bp, Canis familiaris
ttagttatttagcacgctccaccac

SEQ ID NO: 200052 - DNA, 25 bp, Canis familiaris
tttgttgtttgtcgactcgtacctc

SEQ ID NO: 200053 - DNA, 25 bp, Canis familiaris
tttgtgtggcggagagtccggcctc

SEQ ID NO: 200054 - DNA, 25 bp, Canis familiaris
tattatctgaggtgggtcttggtct

SEQ ID NO: 200055 - DNA, 25 bp, Canis familiaris
tattcttggtgttgggctttgtcct

SEQ ID NO: 200056 - DNA, 25 bp, Canis familiaris
tattattttttgggtcttgacactg

SEQ ID NO: 200057 - DNA, 25 bp, Canis familiaris
tattattgtttctgtgttggtccta

SEQ ID NO: 200058 - DNA, 25 bp, Canis familiaris
tattcattttggtgtactgttactc

SEQ ID NO: 200059 - DNA, 25 bp, Canis familiaris
tattcaggttcttagttctttttcg

SEQ ID NO: 200060 - DNA, 25 bp, Canis familiaris
tattagtttttcgttctgttatctc

SEQ ID NO: 200061 - DNA, 25 bp, Canis familiaris
tattattttcttctttattgaccaa

SEQ ID NO: 200062 - DNA, 25 bp, Canis familiaris
tattgcattttccttttttttccat

SEQ ID NO: 200063 - DNA, 25 bp, Canis familiaris
tattgcttttccctatttggttatt

SEQ ID NO: 200064 - DNA, 25 bp, Canis familiaris
tttccttacctatttcagatccttc

SEQ ID NO: 200065 - DNA, 25 bp, Canis familiaris
tttcctgaccataagattccacgct

SEQ ID NO: 200066 - DNA, 25 bp, Canis familiaris
tattcttatccaaagcattcacaga

SEQ ID NO: 200067 - DNA, 25 bp, Canis familiaris
tttgttagccactatcatttagagt

SEQ ID NO: 200068 - DNA, 25 bp, Canis familiaris
tttgttagttgcatcttccgaagaa

SEQ ID NO: 200069 - DNA, 25 bp, Canis familiaris
tattgaccgttgtttccctgtaggt

SEQ ID NO: 200070 - DNA, 25 bp, Canis familiaris
tattaccggtttgccagagtcggac

SEQ ID NO: 200071 - DNA, 25 bp, Canis familiaris
tttagtaagtttgtcaggcattgga

SEQ ID NO: 200072 - DNA, 25 bp, Canis familiaris
ttttgtcacgtttcgaaggttgtgg

SEQ ID NO: 200073 - DNA, 25 bp, Canis familiaris
tattctttgttttcgaccgttgttg

SEQ ID NO: 200074 - DNA, 25 bp, Canis familiaris
tttgtggccttttagacttttgttg

SEQ ID NO: 200075 - DNA, 25 bp, Canis familiaris
tttggggctgattagaacctggaat

SEQ ID NO: 200076 - DNA, 25 bp, Canis familiaris
tttgggctacttttaatcatggaat

SEQ ID NO: 200077 - DNA, 25 bp, Canis familiaris
tttgtttgcacccaatcaacggact

SEQ ID NO: 200078 - DNA, 25 bp, Canis familiaris
tttgtgtgtaccgcacaactgtcct

SEQ ID NO: 200079 - DNA, 25 bp, Canis familiaris
tttggattccacataaccatctgcc

SEQ ID NO: 200080 - DNA, 25 bp, Canis familiaris
tttggcattccagatggtagcacag

SEQ ID NO: 200081 - DNA, 25 bp, Canis familiaris
tttgtgtccgcagagctctgagcac

SEQ ID NO: 200082 - DNA, 25 bp, Canis familiaris
tttgtctcaccggcacttagaggaa

SEQ ID NO: 200083 - DNA, 25 bp, Canis familiaris
tttccttccgtgacgggaggagcag

SEQ ID NO: 200084 - DNA, 25 bp, Canis familiaris
tttccttccctgtctaccaggatga

SEQ ID NO: 200085 - DNA, 25 bp, Canis familiaris
tattcctctcccataaccaggacaa

SEQ ID NO: 200086 - DNA, 25 bp, Canis familiaris
tattcctctcgccttaattattagt

SEQ ID NO: 200087 - DNA, 25 bp, Canis familiaris
tattggttcgatctctactttcact

SEQ ID NO: 200088 - DNA, 25 bp, Canis familiaris
tattaaatggatctccagcctatgc

SEQ ID NO: 200089 - DNA, 25 bp, Canis familiaris
tattagaaggtcgccgctatagcca

SEQ ID NO: 200090 - DNA, 25 bp, Canis familiaris
tattggacataaagcccccaaccag

SEQ ID NO: 200091 - DNA, 25 bp, Canis familiaris
tattggcaaaaggctccccaaggtt

SEQ ID NO: 200092 - DNA, 25 bp, Canis familiaris
tttgtacaatgatgaccgccaagtg

SEQ ID NO: 200093 - DNA, 25 bp, Canis familiaris
tattatggcaaacagccctcacata

SEQ ID NO: 200094 - DNA, 25 bp, Canis familiaris
tttgtggatgaatatgatcctacaa

SEQ ID NO: 200095 - DNA, 25 bp, Canis familiaris
ttagcgagagtagaatttgactata

SEQ ID NO: 200096 - DNA, 25 bp, Canis familiaris
tattcaaagtacccatatctgacaa

SEQ ID NO: 200097 - DNA, 25 bp, Canis familiaris
tattcgttatacggaagatgatgaa

SEQ ID NO: 200098 - DNA, 25 bp, Canis familiaris
tattgcagtttgattgacatgtaaa

SEQ ID NO: 200099 - DNA, 25 bp, Canis familiaris
tttgcctttgtccaacatttcatcc

SEQ ID NO: 200100 - DNA, 25 bp, Canis familiaris
tttggttttcagcagcatcttacac

SEQ ID NO: 200101 - DNA, 25 bp, Canis familiaris
tttggtttctcggagttttgcaccg

SEQ ID NO: 200102 - DNA, 25 bp, Canis familiaris
tttgttagtctcctaattcttccct

SEQ ID NO: 200103 - DNA, 25 bp, Canis familiaris
tttgcgtagtccttgataatcacca

SEQ ID NO: 200104 - DNA, 25 bp, Canis familiaris
tattcgtaacctcgtggatcgccaa

SEQ ID NO: 200105 - DNA, 25 bp, Canis familiaris
tattgtgttcacacggagtccacac

SEQ ID NO: 200106 - DNA, 25 bp, Canis familiaris
tttgtttacaacagtgtgcatacac

SEQ ID NO: 200107 - DNA, 25 bp, Canis familiaris
tttgctgtttcatccggattagcac

SEQ ID NO: 200108 - DNA, 25 bp, Canis familiaris
tttgttgttaactcgctgggcattc

SEQ ID NO: 200109 - DNA, 25 bp, Canis familiaris
ttattttcctactctgggtgttcct

SEQ ID NO: 200110 - DNA, 25 bp, Canis familiaris
tattctttcttttttggagcttctt

SEQ ID NO: 200111 - DNA, 25 bp, Canis familiaris
tttcccttttttatagtatctatca

SEQ ID NO: 200112 - DNA, 25 bp, Canis familiaris
tttcccggctaaatataaatggtat

SEQ ID NO: 200113 - DNA, 25 bp, Canis familiaris
tttggccaagaattttaacattgta

SEQ ID NO: 200114 - DNA, 25 bp, Canis familiaris
tttggccttaaaattcttctgtgaa

SEQ ID NO: 200115 - DNA, 25 bp, Canis familiaris
tctctcacttagcccatagtttaca

SEQ ID NO: 200116 - DNA, 25 bp, Canis familiaris
tttgagccattagagagcctaatta

SEQ ID NO: 200117 - DNA, 25 bp, Canis familiaris
tttgcagccaaatatacagtaatca

SEQ ID NO: 200118 - DNA, 25 bp, Canis familiaris
tattcagcccataaatatgttttcg

SEQ ID NO: 200119 - DNA, 25 bp, Canis familiaris
tttgcagccgctggacaatgttcct

SEQ ID NO: 200120 - DNA, 25 bp, Canis familiaris
tttgaacagcgcttcagatttctca

SEQ ID NO: 200121 - DNA, 25 bp, Canis familiaris
tttgtggtctgagtgcagatcctta

SEQ ID NO: 200122 - DNA, 25 bp, Canis familiaris
tattgggtcggtgactcttactacc

SEQ ID NO: 200123 - DNA, 25 bp, Canis familiaris
tttgagggggttttgctttcttgct

SEQ ID NO: 200124 - DNA, 25 bp, Canis familiaris
tttatgggggtttgtgcccttcgct

SEQ ID NO: 200125 - DNA, 25 bp, Canis familiaris
tttcagggaggaccagtcccgtcag

SEQ ID NO: 200126 - DNA, 25 bp, Canis familiaris
tttcgaggtggagcatatcccggag

SEQ ID NO: 200127 - DNA, 25 bp, Canis familiaris
ttgaccggaggaacttcatccgtgg

SEQ ID NO: 200128 - DNA, 25 bp, Canis familiaris
tttccggatggatcttttcgggctt

SEQ ID NO: 200129 - DNA, 25 bp, Canis familiaris
tattcccagacgccctttgtagggc

SEQ ID NO: 200130 - DNA, 25 bp, Canis familiaris
tattcccacaggcgcctgtgtgggc

SEQ ID NO: 200131 - DNA, 25 bp, Canis familiaris
tattcctaaagggcctgatgatgcg

SEQ ID NO: 200132 - DNA, 25 bp, Canis familiaris
tattctcttaaggggcttcaggtca

SEQ ID NO: 200133 - DNA, 25 bp, Canis familiaris
tattgcatttcaaaggaccccgtcc

SEQ ID NO: 200134 - DNA, 25 bp, Canis familiaris
tattgttgccatcaatgaccccttc

SEQ ID NO: 200135 - DNA, 25 bp, Canis familiaris
tattctgtgatctcacaacctcctt

SEQ ID NO: 200136 - DNA, 25 bp, Canis familiaris
tattcttttgactattctctcctat

SEQ ID NO: 200137 - DNA, 25 bp, Canis familiaris
tattctttagcaaactctttctgta

SEQ ID NO: 200138 - DNA, 25 bp, Canis familiaris
tattctctttgctgtcgtcatttta

SEQ ID NO: 200139 - DNA, 25 bp, Canis familiaris
tattctttctacgggatctgttttg

SEQ ID NO: 200140 - DNA, 25 bp, Canis familiaris
tattgttttgactgcctttttttgt

SEQ ID NO: 200141 - DNA, 25 bp, Canis familiaris
tattgcttaatgttctgcctttttc

SEQ ID NO: 200142 - DNA, 25 bp, Canis familiaris
tattgcactgaactgtcttttttgt

SEQ ID NO: 200143 - DNA, 25 bp, Canis familiaris
tattaatcatacttgtttttgtgca

SEQ ID NO: 200144 - DNA, 25 bp, Canis familiaris
tattaatctgcttcatggcttttta

SEQ ID NO: 200145 - DNA, 25 bp, Canis familiaris
tattaaatcatttggcttatttgaa

SEQ ID NO: 200146 - DNA, 25 bp, Canis familiaris
tattggtcactttggcttataacaa

SEQ ID NO: 200147 - DNA, 25 bp, Canis familiaris
tttgaggagctctggtctataactg

SEQ ID NO: 200148 - DNA, 25 bp, Canis familiaris
tttatggagtctggtggtacacgtt

SEQ ID NO: 200149 - DNA, 25 bp, Canis familiaris
tttgtagcacctgtttacacgtttt

SEQ ID NO: 200150 - DNA, 25 bp, Canis familiaris
tttgtagtctgtgcgtttccgttta

SEQ ID NO: 200151 - DNA, 25 bp, Canis familiaris
tttgtacctgttctttccatttggc

SEQ ID NO: 200152 - DNA, 25 bp, Canis familiaris
tttccaccaggtcgttgtcgtttgg

SEQ ID NO: 200153 - DNA, 25 bp, Canis familiaris
tttcgatgccaggtgcaatctactg

SEQ ID NO: 200154 - DNA, 25 bp, Canis familiaris
tttgccatggcagctgcctgtatct

SEQ ID NO: 200155 - DNA, 25 bp, Canis familiaris
tattgccaggctgctagtctatctt

SEQ ID NO: 200156 - DNA, 25 bp, Canis familiaris
tattgccagggtgagagtatttgaa

SEQ ID NO: 200157 - DNA, 25 bp, Canis familiaris
tttgccgctggatgggctattaaca

SEQ ID NO: 200158 - DNA, 25 bp, Canis familiaris
tttccgtctccagtagtttaccagg

SEQ ID NO: 200159 - DNA, 25 bp, Canis familiaris
tttccacctcggtgtgtgtccgagc

SEQ ID NO: 200160 - DNA, 25 bp, Canis familiaris
tttcctcttggatggatgagtccgc

SEQ ID NO: 200161 - DNA, 25 bp, Canis familiaris
tattctttctgggggatatattcct

SEQ ID NO: 200162 - DNA, 25 bp, Canis familiaris
tattctctttttctgattaatcctc

SEQ ID NO: 200163 - DNA, 25 bp, Canis familiaris
tttgagttttctttgcttgcattcc

SEQ ID NO: 200164 - DNA, 25 bp, Canis familiaris
tttgattctttttacgctgattcca

SEQ ID NO: 200165 - DNA, 25 bp, Canis familiaris
tttgtagttttttcctattcctgat

SEQ ID NO: 200166 - DNA, 25 bp, Canis familiaris
tttgggttatttccactttctgcat

SEQ ID NO: 200167 - DNA, 25 bp, Canis familiaris
tattcagaattgttttagcttttat

SEQ ID NO: 200168 - DNA, 25 bp, Canis familiaris
tattaaattgatggtcttttttctt

SEQ ID NO: 200169 - DNA, 25 bp, Canis familiaris
tattaactctgatttcttttttctt

SEQ ID NO: 200170 - DNA, 25 bp, Canis familiaris
tattgtaccatgttatctttcctcc

SEQ ID NO: 200171 - DNA, 25 bp, Canis familiaris
tattctactctctgtctctataatt

SEQ ID NO: 200172 - DNA, 25 bp, Canis familiaris
tattctagtgatttcttgtgtaagt

SEQ ID NO: 200173 - DNA, 25 bp, Canis familiaris
tattcttcagatttcttttaaacta

SEQ ID NO: 200174 - DNA, 25 bp, Canis familiaris
tattctccagttcttgtctcataga

SEQ ID NO: 200175 - DNA, 25 bp, Canis familiaris
tattctcggtcccatctactaaaaa

SEQ ID NO: 200176 - DNA, 25 bp, Canis familiaris
tattcctgaccaccattttacaaaa

SEQ ID NO: 200177 - DNA, 25 bp, Canis familiaris
tattgtctacctcaacctacaaagg

SEQ ID NO: 200178 - DNA, 25 bp, Canis familiaris
tttgtgtcgagtcagatccttaata

SEQ ID NO: 200179 - DNA, 25 bp, Canis familiaris
tattgtttggctccacatgagcttt

SEQ ID NO: 200180 - DNA, 25 bp, Canis familiaris
ttttcttggtcgtcattcgttccga

SEQ ID NO: 200181 - DNA, 25 bp, Canis familiaris
tttgtcttgcccatttcgtgacatc

SEQ ID NO: 200182 - DNA, 25 bp, Canis familiaris
tttggcttctccaagttctgaactt

SEQ ID NO: 200183 - DNA, 25 bp, Canis familiaris
tattgttttcacacttctggcatct

SEQ ID NO: 200184 - DNA, 25 bp, Canis familiaris
tattgtctactcttacttcattatt

SEQ ID NO: 200185 - DNA, 25 bp, Canis familiaris
tattgcttattcttgcactgtcatt

SEQ ID NO: 200186 - DNA, 25 bp, Canis familiaris
tattgtatatctcctgaagccagtt

SEQ ID NO: 200187 - DNA, 25 bp, Canis familiaris
tattctcatatctcaaacaagtctg

SEQ ID NO: 200188 - DNA, 25 bp, Canis familiaris
tttcctattttaaaagtctgcgtca

SEQ ID NO: 200189 - DNA, 25 bp, Canis familiaris
tttcctgactttagacaagcctcct

SEQ ID NO: 200190 - DNA, 25 bp, Canis familiaris
tattcaatatttgcccaaaccctct

SEQ ID NO: 200191 - DNA, 25 bp, Canis familiaris
tattaatatatgtccagttttccct

SEQ ID NO: 200192 - DNA, 25 bp, Canis familiaris
tattgagagcaatgtctttcttcca

SEQ ID NO: 200193 - DNA, 25 bp, Canis familiaris
tattccagcaagttgcttcctctgc

SEQ ID NO: 200194 - DNA, 25 bp, Canis familiaris
tattctatgcaactagttctcctcc

SEQ ID NO: 200195 - DNA, 25 bp, Canis familiaris
tattctctcaaatgctattctccca

SEQ ID NO: 200196 - DNA, 25 bp, Canis familiaris
tattcttcaaatggctttacccttc

SEQ ID NO: 200197 - DNA, 25 bp, Canis familiaris
tattctttttccttggactgtcttc

SEQ ID NO: 200198 - DNA, 25 bp, Canis familiaris
tattctacattttccattcacgttt

SEQ ID NO: 200199 - DNA, 25 bp, Canis familiaris
tattcttctctttagacgacctctt

SEQ ID NO: 200200 - DNA, 25 bp, Canis familiaris
tattctcctttgtacagagtcactt

SEQ ID NO: 200201 - DNA, 25 bp, Canis familiaris
tattcttccttgtaagaatccttta

SEQ ID NO: 200202 - DNA, 25 bp, Canis familiaris
tttggcccttggagaatcattttca

SEQ ID NO: 200203 - DNA, 25 bp, Canis familiaris
tttacttttgtcaggttttagcatt

SEQ ID NO: 200204 - DNA, 25 bp, Canis familiaris
tttaatctttctatactttcccaat

SEQ ID NO: 200205 - DNA, 25 bp, Canis familiaris
tttgaacagattccctgacgttccc

SEQ ID NO: 200206 - DNA, 25 bp, Canis familiaris
tttgagaagatctccttgccttgcc

SEQ ID NO: 200207 - DNA, 25 bp, Canis familiaris
tattgaaaagataccattgccccaa

SEQ ID NO: 200208 - DNA, 25 bp, Canis familiaris
tattgtccaagttatatggcccaca

SEQ ID NO: 200209 - DNA, 25 bp, Canis familiaris
tttgtcacaggatttagggcccact

SEQ ID NO: 200210 - DNA, 25 bp, Canis familiaris
tttgtgactgttgtcagcgagcccc

SEQ ID NO: 200211 - DNA, 25 bp, Canis familiaris
tttgatcaggttttcatcggcctcc

SEQ ID NO: 200212 - DNA, 25 bp, Canis familiaris
tttgcaatgctgtcataaccgtcct

SEQ ID NO: 200213 - DNA, 25 bp, Canis familiaris
ttcgaaggacaatctttctctggcc

SEQ ID NO: 200214 - DNA, 25 bp, Canis familiaris
tttaatggcaaatgtatctattgag

SEQ ID NO: 200215 - DNA, 25 bp, Canis familiaris
tttccaggataacgctgtctttgat

SEQ ID NO: 200216 - DNA, 25 bp, Canis familiaris
tattggaggttgctgcgtctttcac

SEQ ID NO: 200217 - DNA, 25 bp, Canis familiaris
tttgaggagagtcgtgccgttcaca

SEQ ID NO: 200218 - DNA, 25 bp, Canis familiaris
tttggggatgtctccagcttagtcc

SEQ ID NO: 200219 - DNA, 25 bp, Canis familiaris
tttgcttggttctgcaacctggtgc

SEQ ID NO: 200220 - DNA, 25 bp, Canis familiaris
tttgcctttgtctgaactatgggtc

SEQ ID NO: 200221 - DNA, 25 bp, Canis familiaris
tattcctgggactgtgctgttgggt

SEQ ID NO: 200222 - DNA, 25 bp, Canis familiaris
tattccctggaacctggtatcgagt

SEQ ID NO: 200223 - DNA, 25 bp, Canis familiaris
tattctcgcttaacacgcggtaagt

SEQ ID NO: 200224 - DNA, 25 bp, Canis familiaris
tattctctgcttaagatccttgggg

SEQ ID NO: 200225 - DNA, 25 bp, Canis familiaris
tttgtgcctaaagccattgggtgtg

SEQ ID NO: 200226 - DNA, 25 bp, Canis familiaris
tttacattgagaatcccaggcgggg

SEQ ID NO: 200227 - DNA, 25 bp, Canis familiaris
tttcaagctcagagcccagggtgcc

SEQ ID NO: 200228 - DNA, 25 bp, Canis familiaris
tattgagaccagagccctggagccc

SEQ ID NO: 200229 - DNA, 25 bp, Canis familiaris
tattcagcagactccctctgtatgt

SEQ ID NO: 200230 - DNA, 25 bp, Canis familiaris
tattcaaagccctgtgctgctggac

SEQ ID NO: 200231 - DNA, 25 bp, Canis familiaris
tattcacccatcagagtctcttatc

SEQ ID NO: 200232 - DNA, 25 bp, Canis familiaris
tattgagcaaatctagttctgtaaa

SEQ ID NO: 200233 - DNA, 25 bp, Canis familiaris
tttacatagtaccaggtcttgagaa

SEQ ID NO: 200234 - DNA, 25 bp, Canis familiaris
tttgaccagttcccgtttgagcggc

SEQ ID NO: 200235 - DNA, 25 bp, Canis familiaris
ttatcaggctttccctgtgggggac

SEQ ID NO: 200236 - DNA, 25 bp, Canis familiaris
tttgcaattttgactctaatgggga

SEQ ID NO: 200237 - DNA, 25 bp, Canis familiaris
tattctatttttgtgcttggagcca

SEQ ID NO: 200238 - DNA, 25 bp, Canis familiaris
tattctgtcttcatcttttgggcta

SEQ ID NO: 200239 - DNA, 25 bp, Canis familiaris
tattctggcaccactttctaatgtg

SEQ ID NO: 200240 - DNA, 25 bp, Canis familiaris
ttttgagcacctactgttctggcag

SEQ ID NO: 200241 - DNA, 25 bp, Canis familiaris
ttcactggccccattattggccctg

SEQ ID NO: 200242 - DNA, 25 bp, Canis familiaris
tattctggcaccattgctttggccc

SEQ ID NO: 200243 - DNA, 25 bp, Canis familiaris
tattctctacacattgttctgtgtt

SEQ ID NO: 200244 - DNA, 25 bp, Canis familiaris
tattctctacacattttctttttta

SEQ ID NO: 200245 - DNA, 25 bp, Canis familiaris
tattgactaaaattttatttctctc

SEQ ID NO: 200246 - DNA, 25 bp, Canis familiaris
tttgactcaaaacttatttatcctg

SEQ ID NO: 200247 - DNA, 25 bp, Canis familiaris
tttggccaaccacttatttaatcta

SEQ ID NO: 200248 - DNA, 25 bp, Canis familiaris
ttagtcccaccgaacttctgagatt

SEQ ID NO: 200249 - DNA, 25 bp, Canis familiaris
tttgttccaccagtaccttggtgaa

SEQ ID NO: 200250 - DNA, 25 bp, Canis familiaris
tttgttggatgtctactttcctgaa

SEQ ID NO: 200251 - DNA, 25 bp, Canis familiaris
tttgactgtgaacttacttccctgc

SEQ ID NO: 200252 - DNA, 25 bp, Canis familiaris
tattcatctgtacatttcttcaccc

SEQ ID NO: 200253 - DNA, 25 bp, Canis familiaris
tattgcttattgcatcctcttaccc

SEQ ID NO: 200254 - DNA, 25 bp, Canis familiaris
tttgcttattagatgtttacccggt

SEQ ID NO: 200255 - DNA, 25 bp, Canis familiaris
tttcttttcgttcttatcactgcgg

SEQ ID NO: 200256 - DNA, 25 bp, Canis familiaris
tattctttttttccgcaatagttgg

SEQ ID NO: 200257 - DNA, 25 bp, Canis familiaris
tattccttttctggaccaaaattgg

SEQ ID NO: 200258 - DNA, 25 bp, Canis familiaris
tattctttctagccgagtacgccaa

SEQ ID NO: 200259 - DNA, 25 bp, Canis familiaris
tattctttctagcagagtacgcaaa

SEQ ID NO: 200260 - DNA, 25 bp, Canis familiaris
tttctgtgctgctggaggcttggac

SEQ ID NO: 200261 - DNA, 25 bp, Canis familiaris
tttgtgtgctgccagctggactcag

SEQ ID NO: 200262 - DNA, 25 bp, Canis familiaris
tttggtgctgtattggccgagaggt

SEQ ID NO: 200263 - DNA, 25 bp, Canis familiaris
tttggtgtcttctaccaggatgcct

SEQ ID NO: 200264 - DNA, 25 bp, Canis familiaris
tttggaactctatgccagtgatcct

SEQ ID NO: 200265 - DNA, 25 bp, Canis familiaris
tttgtaactggcctcacagctgtca

SEQ ID NO: 200266 - DNA, 25 bp, Canis familiaris
tttgtaagcagacctccagctctga

SEQ ID NO: 200267 - DNA, 25 bp, Canis familiaris
tttgtcacataaattcccctggttg

SEQ ID NO: 200268 - DNA, 25 bp, Canis familiaris
tttgttacaaatttccgcatggggt

SEQ ID NO: 200269 - DNA, 25 bp, Canis familiaris
tttgtacaaataaacctgcggcagg

SEQ ID NO: 200270 - DNA, 25 bp, Canis familiaris
tttccaaacaaatcctgcctcagga

SEQ ID NO: 200271 - DNA, 25 bp, Canis familiaris
ttggccaagttaaaggtcccaggtg

SEQ ID NO: 200272 - DNA, 25 bp, Canis familiaris
ttggtcaattttgtagtccccacga

SEQ ID NO: 200273 - DNA, 25 bp, Canis familiaris
tattgataattctcttagtccccat

SEQ ID NO: 200274 - DNA, 25 bp, Canis familiaris
tattggcaattgtttctagttcttt

SEQ ID NO: 200275 - DNA, 25 bp, Canis familiaris
tattgtacatgtgatttttttttcc

SEQ ID NO: 200276 - DNA, 25 bp, Canis familiaris
tattggcctgtttctttggtttgta

SEQ ID NO: 200277 - DNA, 25 bp, Canis familiaris
tttgtcctgtttcttagtttataag

SEQ ID NO: 200278 - DNA, 25 bp, Canis familiaris
tttgtccttttagctttttccaatg

SEQ ID NO: 200279 - DNA, 25 bp, Canis familiaris
tttgtgcgttttacctttgagccca

SEQ ID NO: 200280 - DNA, 25 bp, Canis familiaris
tttgaggtttcctctttggtgcgat

SEQ ID NO: 200281 - DNA, 25 bp, Canis familiaris
tttgggctgcttccataatttggct

SEQ ID NO: 200282 - DNA, 25 bp, Canis familiaris
tttggggctgaggccagtcatgggc

SEQ ID NO: 200283 - DNA, 25 bp, Canis familiaris
tattggggctaggcatgggctgggg

SEQ ID NO: 200284 - DNA, 25 bp, Canis familiaris
tattggccgtggcctggcacctgtg

SEQ ID NO: 200285 - DNA, 25 bp, Canis familiaris
tttggccttggcttgaagccatata

SEQ ID NO: 200286 - DNA, 25 bp, Canis familiaris
tttccatctcggtggcaccatacaa

SEQ ID NO: 200287 - DNA, 25 bp, Canis familiaris
tattctccacggttatacctcttaa

SEQ ID NO: 200288 - DNA, 25 bp, Canis familiaris
ttattccacgggtagggttctgaag

SEQ ID NO: 200289 - DNA, 25 bp, Canis familiaris
ttattctccgggtgctgatctttat

SEQ ID NO: 200290 - DNA, 25 bp, Canis familiaris
ttttaaggtgcctgctgccattaac

SEQ ID NO: 200291 - DNA, 25 bp, Canis familiaris
tttgtaaggcacgctgctcctgtaa

SEQ ID NO: 200292 - DNA, 25 bp, Canis familiaris
tttgaagagccacacgctggttgaa

SEQ ID NO: 200293 - DNA, 25 bp, Canis familiaris
tttgacaagcacaccctgggaaaca

SEQ ID NO: 200294 - DNA, 25 bp, Canis familiaris
tattgaaagtcagccctcgacacaa

SEQ ID NO: 200295 - DNA, 25 bp, Canis familiaris
tttgtgacttctgaccggagcaaga

SEQ ID NO: 200296 - DNA, 25 bp, Canis familiaris
tttcgatcttcataacggacaaact

SEQ ID NO: 200297 - DNA, 25 bp, Canis familiaris
tttccaaccaaacctgcaacaacac

SEQ ID NO: 200298 - DNA, 25 bp, Canis familiaris
tattcccccagatccagatgactga

SEQ ID NO: 200299 - DNA, 25 bp, Canis familiaris
tttctgcatccccagcagcaagaac

SEQ ID NO: 200300 - DNA, 25 bp, Canis familiaris
tttgcattcagcatggactcgacca

SEQ ID NO: 200301 - DNA, 25 bp, Canis familiaris
tttgcagtcagcatggccactaact

SEQ ID NO: 200302 - DNA, 25 bp, Canis familiaris
tttgagcgacatggtggcactgaac

SEQ ID NO: 200303 - DNA, 25 bp, Canis familiaris
tttggcgagcatctgcagaccacag

SEQ ID NO: 200304 - DNA, 25 bp, Canis familiaris
tttgggagctcttctggccaaatcc

SEQ ID NO: 200305 - DNA, 25 bp, Canis familiaris
tttgtggactgtttggcccagtggc

SEQ ID NO: 200306 - DNA, 25 bp, Canis familiaris
tttgggagctctgtgatcaccgtga

SEQ ID NO: 200307 - DNA, 25 bp, Canis familiaris
tttggtgtggtcggatgagcgcgtg

SEQ ID NO: 200308 - DNA, 25 bp, Canis familiaris
tttggtgtcctcccatgggatggga

SEQ ID NO: 200309 - DNA, 25 bp, Canis familiaris
tttgttgtcctggggtggatggggt

SEQ ID NO: 200310 - DNA, 25 bp, Canis familiaris
tttgtctttctgtgtctgacatgtt

SEQ ID NO: 200311 - DNA, 25 bp, Canis familiaris
tttgtttttcagttcgagtgctctc

SEQ ID NO: 200312 - DNA, 25 bp, Canis familiaris
tttgtgattttttttcagctccctt

SEQ ID NO: 200313 - DNA, 25 bp, Canis familiaris
tttggtcctattttaatgctctttg

SEQ ID NO: 200314 - DNA, 25 bp, Canis familiaris
tttgcgtgtttcttaaagatttatt

SEQ ID NO: 200315 - DNA, 25 bp, Canis familiaris
tttgggtttcctttatatatagaca

SEQ ID NO: 200316 - DNA, 25 bp, Canis familiaris
tttgtagtccccacgaattaacagt

SEQ ID NO: 200317 - DNA, 25 bp, Canis familiaris
tttgtagaccccaccaatttgtgcg

SEQ ID NO: 200318 - DNA, 25 bp, Canis familiaris
tttgaaagcacccacccttttgtgc

SEQ ID NO: 200319 - DNA, 25 bp, Canis familiaris
tttaaatcctcttgttcttttggct

SEQ ID NO: 200320 - DNA, 25 bp, Canis familiaris
tttacaattttgtgtcttatttatg

SEQ ID NO: 200321 - DNA, 25 bp, Canis familiaris
tttgacagtttggctaccttctttt

SEQ ID NO: 200322 - DNA, 25 bp, Canis familiaris
tttgcacgtatgaattacatcccta

SEQ ID NO: 200323 - DNA, 25 bp, Canis familiaris
tttgcctgtgttttacacctttgcc

SEQ ID NO: 200324 - DNA, 25 bp, Canis familiaris
tttccctttccatacgattggcgga

SEQ ID NO: 200325 - DNA, 25 bp, Canis familiaris
tttccggacccattcaagtttgaag

SEQ ID NO: 200326 - DNA, 25 bp, Canis familiaris
tttccaaacccctgaggtctcagag

SEQ ID NO: 200327 - DNA, 25 bp, Canis familiaris
tttccaacagccccttggggtcgat

SEQ ID NO: 200328 - DNA, 25 bp, Canis familiaris
ttatcaaggccctcctggaagtggt

SEQ ID NO: 200329 - DNA, 25 bp, Canis familiaris
tttccaggctacgtcgggatcaagg

SEQ ID NO: 200330 - DNA, 25 bp, Canis familiaris
ttttaggtcctcagaccactagccc

SEQ ID NO: 200331 - DNA, 25 bp, Canis familiaris
tttgtggagtccaggagccagtccc

SEQ ID NO: 200332 - DNA, 25 bp, Canis familiaris
tttgcttggatggttcgggactccc

SEQ ID NO: 200333 - DNA, 25 bp, Canis familiaris
tttgctggtgaggtcgaggcggcca

SEQ ID NO: 200334 - DNA, 25 bp, Canis familiaris
tttgtggaggctcctagggctcacc

SEQ ID NO: 200335 - DNA, 25 bp, Canis familiaris
tttgcgaggttcgtgcaggatctgc

SEQ ID NO: 200336 - DNA, 25 bp, Canis familiaris
tttgggcatcttttcaggcctgaca

SEQ ID NO: 200337 - DNA, 25 bp, Canis familiaris
tttgattcattttgcaattcctgta

SEQ ID NO: 200338 - DNA, 25 bp, Canis familiaris
tttgtaacttctgattccttcatcc

SEQ ID NO: 200339 - DNA, 25 bp, Canis familiaris
tttgtaagaccggactccttctgtc

SEQ ID NO: 200340 - DNA, 25 bp, Canis familiaris
tttgacagaagcggaactctcttct

SEQ ID NO: 200341 - DNA, 25 bp, Canis familiaris
tattgcccaagcagacacactcact

SEQ ID NO: 200342 - DNA, 25 bp, Canis familiaris
tttgcgccgagcatgcgcagagccc

SEQ ID NO: 200343 - DNA, 25 bp, Canis familiaris
tttgactcatgctttgccagagccc

SEQ ID NO: 200344 - DNA, 25 bp, Canis familiaris
tattgactctgctgcatcatctcac

SEQ ID NO: 200345 - DNA, 25 bp, Canis familiaris
tttgcactgctcagaatctccaagg

SEQ ID NO: 200346 - DNA, 25 bp, Canis familiaris
tttggctgatcaatccacccaaggt

SEQ ID NO: 200347 - DNA, 25 bp, Canis familiaris
tattgaataatttccccagagagcc

SEQ ID NO: 200348 - DNA, 25 bp, Canis familiaris
tattgaataagtctctctccaggca

SEQ ID NO: 200349 - DNA, 25 bp, Canis familiaris
tttgaaaaggcgctctccagtgtca

SEQ ID NO: 200350 - DNA, 25 bp, Canis familiaris
tttgacaaaagccagctaccgcgtc

SEQ ID NO: 200351 - DNA, 25 bp, Canis familiaris
ttatgccaacaacgtgctatccgga

SEQ ID NO: 200352 - DNA, 25 bp, Canis familiaris
ttatgtcagccatatgctccatcca

SEQ ID NO: 200353 - DNA, 25 bp, Canis familiaris
tattctgagctcaagagccctgccc

SEQ ID NO: 200354 - DNA, 25 bp, Canis familiaris
tttgcatgactactaccaatctctc

SEQ ID NO: 200355 - DNA, 25 bp, Canis familiaris
tttgagtatgaatctgcaaattcgc

SEQ ID NO: 200356 - DNA, 25 bp, Canis familiaris
tttgcttgatgttacatgcaagact

SEQ ID NO: 200357 - DNA, 25 bp, Canis familiaris
tttgctttacaaatctaacttaaat

SEQ ID NO: 200358 - DNA, 25 bp, Canis familiaris
tattgttttcatttttatcttaatt

SEQ ID NO: 200359 - DNA, 25 bp, Canis familiaris
tattcctgtgtccttttgtttgaga

SEQ ID NO: 200360 - DNA, 25 bp, Canis familiaris
tattcctctgtagtgtatctattta

SEQ ID NO: 200361 - DNA, 25 bp, Canis familiaris
tattcgttagcggttcttattcgac

SEQ ID NO: 200362 - DNA, 25 bp, Canis familiaris
tttgccaagaatgttttcattaatc

SEQ ID NO: 200363 - DNA, 25 bp, Canis familiaris
tttccaaaaccacgatgtccttatc

SEQ ID NO: 200364 - DNA, 25 bp, Canis familiaris
tttgccaaaacgtgttcgcggtgtc

SEQ ID NO: 200365 - DNA, 25 bp, Canis familiaris
ttggcccaaaactacttggccttgg

SEQ ID NO: 200366 - DNA, 25 bp, Canis familiaris
ttatgcccagggactgacttaccat

SEQ ID NO: 200367 - DNA, 25 bp, Canis familiaris
ttatgacacggggctgcaggaacac

SEQ ID NO: 200368 - DNA, 25 bp, Canis familiaris
tttacacgggcctgagcacccggaa

SEQ ID NO: 200369 - DNA, 25 bp, Canis familiaris
tttgaacggaggtacagcaccctgc

SEQ ID NO: 200370 - DNA, 25 bp, Canis familiaris
tttcaacggtgcgaacgtccggcag

SEQ ID NO: 200371 - DNA, 25 bp, Canis familiaris
tttgactggcctgaagcgcccaaga

SEQ ID NO: 200372 - DNA, 25 bp, Canis familiaris
tttgcagctggcctgtttgctgctc

SEQ ID NO: 200373 - DNA, 25 bp, Canis familiaris
tattgcagcaggctggttcccagca

SEQ ID NO: 200374 - DNA, 25 bp, Canis familiaris
tattccttggtgaattcccacatgg

SEQ ID NO: 200375 - DNA, 25 bp, Canis familiaris
tattcctctattgttcctaatgctc

SEQ ID NO: 200376 - DNA, 25 bp, Canis familiaris
tattcctctttaatcccattatgaa

SEQ ID NO: 200377 - DNA, 25 bp, Canis familiaris
tattccgtctgtaacgccacttaga

SEQ ID NO: 200378 - DNA, 25 bp, Canis familiaris
tattcgagtcttcagaccacccaac

SEQ ID NO: 200379 - DNA, 25 bp, Canis familiaris
tttctgactcgacaatccaccagac

SEQ ID NO: 200380 - DNA, 25 bp, Canis familiaris
tttgcagattgggtaacacaggaac

SEQ ID NO: 200381 - DNA, 25 bp, Canis familiaris
tttgcagcttgcggcggaatcacag

SEQ ID NO: 200382 - DNA, 25 bp, Canis familiaris
tttgagctcacgggtgacttctgcc

SEQ ID NO: 200383 - DNA, 25 bp, Canis familiaris
tattgagctttgtgctgcatcttca

SEQ ID NO: 200384 - DNA, 25 bp, Canis familiaris
tttgagttgtgccaggagcccaagc

SEQ ID NO: 200385 - DNA, 25 bp, Canis familiaris
tttggtttcatgcctgagacactca

SEQ ID NO: 200386 - DNA, 25 bp, Canis familiaris
tattggtctctatttatgcccatca

SEQ ID NO: 200387 - DNA, 25 bp, Canis familiaris
tattgtttttttggccacagcacat

SEQ ID NO: 200388 - DNA, 25 bp, Canis familiaris
tttggcttatttttccacaaaaatg

SEQ ID NO: 200389 - DNA, 25 bp, Canis familiaris
tttgtcattcatgctgtcccacaaa

SEQ ID NO: 200390 - DNA, 25 bp, Canis familiaris
tttgtgaattccctcccagaattgc

SEQ ID NO: 200391 - DNA, 25 bp, Canis familiaris
tttgtgtcttcccacaccatatata

SEQ ID NO: 200392 - DNA, 25 bp, Canis familiaris
tttgttttcctcaaccagcatgatt

SEQ ID NO: 200393 - DNA, 25 bp, Canis familiaris
tttgttttgttcccacgacatttgt

SEQ ID NO: 200394 - DNA, 25 bp, Canis familiaris
tttgttttgttcttacggtgcctat

SEQ ID NO: 200395 - DNA, 25 bp, Canis familiaris
tttgtgtttgtttggggcaatgtta

SEQ ID NO: 200396 - DNA, 25 bp, Canis familiaris
tttggctttttctttaatagattga

SEQ ID NO: 200397 - DNA, 25 bp, Canis familiaris
tattgtactcttttgttttagtgga

SEQ ID NO: 200398 - DNA, 25 bp, Canis familiaris
tttcaacttgattttctgactagtg

SEQ ID NO: 200399 - DNA, 25 bp, Canis familiaris
tttcaactatttgtctttcctggcc

SEQ ID NO: 200400 - DNA, 25 bp, Canis familiaris
tttgttacatttgtgcttctgccta

SEQ ID NO: 200401 - DNA, 25 bp, Canis familiaris
tttgctgtaatccataggcagtctg

SEQ ID NO: 200402 - DNA, 25 bp, Canis familiaris
tttgctgatacaggtaggatgggaa

SEQ ID NO: 200403 - DNA, 25 bp, Canis familiaris
tttgggcccagtaggatgggaagac

SEQ ID NO: 200404 - DNA, 25 bp, Canis familiaris
tttcggcccacaaggaggcggacca

SEQ ID NO: 200405 - DNA, 25 bp, Canis familiaris
tttgggagcacccaggaggccctaa

SEQ ID NO: 200406 - DNA, 25 bp, Canis familiaris
tttgggatgacccgacagccaggga

SEQ ID NO: 200407 - DNA, 25 bp, Canis familiaris
tttggaaaccatcgagcggctgcag

SEQ ID NO: 200408 - DNA, 25 bp, Canis familiaris
tattgagaagactgggtggctcagc

SEQ ID NO: 200409 - DNA, 25 bp, Canis familiaris
tattgagcagagttggggaagtccc

SEQ ID NO: 200410 - DNA, 25 bp, Canis familiaris
tattgccaatgacggtgctccagac

SEQ ID NO: 200411 - DNA, 25 bp, Canis familiaris
tattccatattcaagtctcaagact

SEQ ID NO: 200412 - DNA, 25 bp, Canis familiaris
tattccaaatgcactctctacacaa

SEQ ID NO: 200413 - DNA, 25 bp, Canis familiaris
tttgataatgccacgcatctacaac

SEQ ID NO: 200414 - DNA, 25 bp, Canis familiaris
tttgtcaatgtcccacttagaaagt

SEQ ID NO: 200415 - DNA, 25 bp, Canis familiaris
tttacaggtgcagtcaccgaaagag

SEQ ID NO: 200416 - DNA, 25 bp, Canis familiaris
tttccagctctagtccctaatagcc

SEQ ID NO: 200417 - DNA, 25 bp, Canis familiaris
tttgcccattgaccagataaataga

SEQ ID NO: 200418 - DNA, 25 bp, Canis familiaris
tttgagccattgcccatcacaaatc

SEQ ID NO: 200419 - DNA, 25 bp, Canis familiaris
tttgtgcctgtgcagattgcaatag

SEQ ID NO: 200420 - DNA, 25 bp, Canis familiaris
tttgtgctcagtgcagtctgcttga

SEQ ID NO: 200421 - DNA, 25 bp, Canis familiaris
tttggtccaccaatcgtcatgagga

SEQ ID NO: 200422 - DNA, 25 bp, Canis familiaris
tttggttgacttcagtctatggcaa

SEQ ID NO: 200423 - DNA, 25 bp, Canis familiaris
tattggactcactttagtttggatt

SEQ ID NO: 200424 - DNA, 25 bp, Canis familiaris
tattccactcaattttgttatttat

SEQ ID NO: 200425 - DNA, 25 bp, Canis familiaris
tattgtcaccacatttgtatataaa

SEQ ID NO: 200426 - DNA, 25 bp, Canis familiaris
tattgtcatctatgttctgttcaca

SEQ ID NO: 200427 - DNA, 25 bp, Canis familiaris
tttgctcaatattgtttggctatgc

SEQ ID NO: 200428 - DNA, 25 bp, Canis familiaris
tattgtccagtgtttagcagctatg

SEQ ID NO: 200429 - DNA, 25 bp, Canis familiaris
tttgctccgtttacagcagggtttg

SEQ ID NO: 200430 - DNA, 25 bp, Canis familiaris
tttccacctgggagaggagtttgat

SEQ ID NO: 200431 - DNA, 25 bp, Canis familiaris
tttccacggagggccagaagttttg

SEQ ID NO: 200432 - DNA, 25 bp, Canis familiaris
tttctacgaggtgggcacagctttt

SEQ ID NO: 200433 - DNA, 25 bp, Canis familiaris
tttccggagagtttgccatgctgtg

SEQ ID NO: 200434 - DNA, 25 bp, Canis familiaris
tttggggatgatgcgcccatctgga

SEQ ID NO: 200435 - DNA, 25 bp, Canis familiaris
tttggggataaagggcagcatggag

SEQ ID NO: 200436 - DNA, 25 bp, Canis familiaris
tattgccatggatacagcaggaatg

SEQ ID NO: 200437 - DNA, 25 bp, Canis familiaris
tttgtcatggtaatgcatcgtaaga

SEQ ID NO: 200438 - DNA, 25 bp, Canis familiaris
tttgttggctgatgctcgttcttta

SEQ ID NO: 200439 - DNA, 25 bp, Canis familiaris
tttcttggtcaccactgtatcctgg

SEQ ID NO: 200440 - DNA, 25 bp, Canis familiaris
tttcctggtatgacaatgaatacgg

SEQ ID NO: 200441 - DNA, 25 bp, Canis familiaris
ttgtccatggttgcattaactaata

SEQ ID NO: 200442 - DNA, 25 bp, Canis familiaris
tttccaggttgttttaccaacacat

SEQ ID NO: 200443 - DNA, 25 bp, Canis familiaris
tttgccaactctcttttgccaaata

SEQ ID NO: 200444 - DNA, 25 bp, Canis familiaris
tttcaaattcccctgggcagccaaa

SEQ ID NO: 200445 - DNA, 25 bp, Canis familiaris
tttccttagccccaggaaccaagat

SEQ ID NO: 200446 - DNA, 25 bp, Canis familiaris
tttccctccccttataagtgaaatg

SEQ ID NO: 200447 - DNA, 25 bp, Canis familiaris
tttcttctcctcttttacaaggacg

SEQ ID NO: 200448 - DNA, 25 bp, Canis familiaris
tttacttcttgtttgggccaggagg

SEQ ID NO: 200449 - DNA, 25 bp, Canis familiaris
tttacctcttgctgtggtaggtagt

SEQ ID NO: 200450 - DNA, 25 bp, Canis familiaris
tttaccttgtgtcgggaaaaatgtg

SEQ ID NO: 200451 - DNA, 25 bp, Canis familiaris
ttgtactcataactggggaagaccg

SEQ ID NO: 200452 - DNA, 25 bp, Canis familiaris
ttgtccctaacctggtggagcttat

SEQ ID NO: 200453 - DNA, 25 bp, Canis familiaris
tttccactaatgcctttgtaacctg

SEQ ID NO: 200454 - DNA, 25 bp, Canis familiaris
tttcaactgaaccctaaagacactg

SEQ ID NO: 200455 - DNA, 25 bp, Canis familiaris
ttgtaactaagctgtctacgcccat

SEQ ID NO: 200456 - DNA, 25 bp, Canis familiaris
ttataataaacatgtctgaagtcaa

SEQ ID NO: 200457 - DNA, 25 bp, Canis familiaris
tttatcattaacacttgaagtaata

SEQ ID NO: 200458 - DNA, 25 bp, Canis familiaris
tttctctttgtctgttgtagtacta

SEQ ID NO: 200459 - DNA, 25 bp, Canis familiaris
tttgctttttgctctggtgaaactc

SEQ ID NO: 200460 - DNA, 25 bp, Canis familiaris
ttccattgtttctctagagaacagt

SEQ ID NO: 200461 - DNA, 25 bp, Canis familiaris
ttcacttggctgtagtttgagaact

SEQ ID NO: 200462 - DNA, 25 bp, Canis familiaris
tttatctggcatggaggtgggaact

SEQ ID NO: 200463 - DNA, 25 bp, Canis familiaris
tttggcagtgataaggtgagggtct

SEQ ID NO: 200464 - DNA, 25 bp, Canis familiaris
tttgtgcagcgatgaggatggagga

SEQ ID NO: 200465 - DNA, 25 bp, Canis familiaris
ttttgccgcctgggatggggagggg

SEQ ID NO: 200466 - DNA, 25 bp, Canis familiaris
tttccctgccttggggtgtggggag

SEQ ID NO: 200467 - DNA, 25 bp, Canis familiaris
tttcccagttcatggcgttcgagga

SEQ ID NO: 200468 - DNA, 25 bp, Canis familiaris
tttcctactgtgagtccgtctggga

SEQ ID NO: 200469 - DNA, 25 bp, Canis familiaris
tttcctttgggagcacgtcgatatt

SEQ ID NO: 200470 - DNA, 25 bp, Canis familiaris
tttcaggttgggtatactttgtttg

SEQ ID NO: 200471 - DNA, 25 bp, Canis familiaris
tttcagggtgggtcatgttctcatg

SEQ ID NO: 200472 - DNA, 25 bp, Canis familiaris
tttgcacagtggcgacttctccact

SEQ ID NO: 200473 - DNA, 25 bp, Canis familiaris
tttgggctggtgcatcttcatatac

SEQ ID NO: 200474 - DNA, 25 bp, Canis familiaris
tttggcctgctgccctattaaagcc

SEQ ID NO: 200475 - DNA, 25 bp, Canis familiaris
tttgcccagggcgtatcgaggcacc

SEQ ID NO: 200476 - DNA, 25 bp, Canis familiaris
tttgccacgggcttcagtggccatg

SEQ ID NO: 200477 - DNA, 25 bp, Canis familiaris
tttggcacttgggctcgtgttataa

SEQ ID NO: 200478 - DNA, 25 bp, Canis familiaris
tttgggatctgtcccgtctctataa

SEQ ID NO: 200479 - DNA, 25 bp, Canis familiaris
tttgggagcaatcgcctgttcagta

SEQ ID NO: 200480 - DNA, 25 bp, Canis familiaris
tttggataggatcccagatcatcct

SEQ ID NO: 200481 - DNA, 25 bp, Canis familiaris
tttggttcaagggcaactcatattt

SEQ ID NO: 200482 - DNA, 25 bp, Canis familiaris
tattggctgtcttgaggaaccttta

SEQ ID NO: 200483 - DNA, 25 bp, Canis familiaris
tttcgcttttgtgctacctttgaat

SEQ ID NO: 200484 - DNA, 25 bp, Canis familiaris
tttagtttgtagattccatttggta

SEQ ID NO: 200485 - DNA, 25 bp, Canis familiaris
tttcctttagagataactatttgga

SEQ ID NO: 200486 - DNA, 25 bp, Canis familiaris
tttgccttatgaagttgtaattttt

SEQ ID NO: 200487 - DNA, 25 bp, Canis familiaris
tttcctgttaggtttatactctcat

SEQ ID NO: 200488 - DNA, 25 bp, Canis familiaris
tttcaagttgggtttctgagtcctg

SEQ ID NO: 200489 - DNA, 25 bp, Canis familiaris
tttcaattctagcttctctgcatta

SEQ ID NO: 200490 - DNA, 25 bp, Canis familiaris
tttaattgctgacatgcctcctatc

SEQ ID NO: 200491 - DNA, 25 bp, Canis familiaris
tttgccattagggatgtcccagtca

SEQ ID NO: 200492 - DNA, 25 bp, Canis familiaris
tttgtagacctggagcccacagtca

SEQ ID NO: 200493 - DNA, 25 bp, Canis familiaris
tttgtcaacctctacactacatggc

SEQ ID NO: 200494 - DNA, 25 bp, Canis familiaris
tttgtcaaagtggccattacctcct

SEQ ID NO: 200495 - DNA, 25 bp, Canis familiaris
tttgaaaggctgtcctttgcctctt

SEQ ID NO: 200496 - DNA, 25 bp, Canis familiaris
tttgacacgttgttcttgtccctta

SEQ ID NO: 200497 - DNA, 25 bp, Canis familiaris
tttgacaggtgatttctagctccaa

SEQ ID NO: 200498 - DNA, 25 bp, Canis familiaris
tttgagagcttgacctcacagccca

SEQ ID NO: 200499 - DNA, 25 bp, Canis familiaris
tttgagacttggctccagcatcact

SEQ ID NO: 200500 - DNA, 25 bp, Canis familiaris
tttgacatcttgacgtccatctacc

SEQ ID NO: 200501 - DNA, 25 bp, Canis familiaris
tttgaatgccgaagttactgacgag

SEQ ID NO: 200502 - DNA, 25 bp, Canis familiaris
tttgaagccgctgcatgatattgac

SEQ ID NO: 200503 - DNA, 25 bp, Canis familiaris
tttgacctcagctacctcattaaat

SEQ ID NO: 200504 - DNA, 25 bp, Canis familiaris
tttgcaccataagcccagtacagta

SEQ ID NO: 200505 - DNA, 25 bp, Canis familiaris
tttcccaggaggcacagctgactga

SEQ ID NO: 200506 - DNA, 25 bp, Canis familiaris
tttgaaagggtgccactgctgccca

SEQ ID NO: 200507 - DNA, 25 bp, Canis familiaris
tttgaaatttgtaacctggctctgg

SEQ ID NO: 200508 - DNA, 25 bp, Canis familiaris
ttgggagcctttatcgtgtgctggc

SEQ ID NO: 200509 - DNA, 25 bp, Canis familiaris
tttgggacctttactgtgcagctcc

SEQ ID NO: 200510 - DNA, 25 bp, Canis familiaris
ttatgggcccatttatctcggaccc

SEQ ID NO: 200511 - DNA, 25 bp, Canis familiaris
tttgggcccaaatttggcgcatacc

SEQ ID NO: 200512 - DNA, 25 bp, Canis familiaris
tttcggttaaatttgcgcagcccct

SEQ ID NO: 200513 - DNA, 25 bp, Canis familiaris
tttgattattgacacttcgacccct

SEQ ID NO: 200514 - DNA, 25 bp, Canis familiaris
tttgattattgacacttcgacccct

SEQ ID NO: 200515 - DNA, 25 bp, Canis familiaris
ttttatgttgaatcttgataaccca

SEQ ID NO: 200516 - DNA, 25 bp, Canis familiaris
tttgttgttgttacatctttccacc

SEQ ID NO: 200517 - DNA, 25 bp, Canis familiaris
tttgttgttttgaacttcctccact

SEQ ID NO: 200518 - DNA, 25 bp, Canis familiaris
tttgctttttctgcgcttcagtaac

SEQ ID NO: 200519 - DNA, 25 bp, Canis familiaris
tattgtgaagtactccctaactgaa

SEQ ID NO: 200520 - DNA, 25 bp, Canis familiaris
tattgtgataatattgcctatgcaa

SEQ ID NO: 200521 - DNA, 25 bp, Canis familiaris
tattgtgaagtgactaccacacaca

SEQ ID NO: 200522 - DNA, 25 bp, Canis familiaris
tattgtacgagcattgaaagatcca

SEQ ID NO: 200523 - DNA, 25 bp, Canis familiaris
tttggactagcacttctacagcacc

SEQ ID NO: 200524 - DNA, 25 bp, Canis familiaris
tttaactatggtcggaccccagctc

SEQ ID NO: 200525 - DNA, 25 bp, Canis familiaris
tttaatcttgtgtggacctctttct

SEQ ID NO: 200526 - DNA, 25 bp, Canis familiaris
tttaagtgtggctgatgacccttcc

SEQ ID NO: 200527 - DNA, 25 bp, Canis familiaris
tttgttgattcgtgatgactgcctt

SEQ ID NO: 200528 - DNA, 25 bp, Canis familiaris
tttgattgtgggctgtcacccttgg

SEQ ID NO: 200529 - DNA, 25 bp, Canis familiaris
tttgtatctgcagggtttgccactt

SEQ ID NO: 200530 - DNA, 25 bp, Canis familiaris
tttgatgactgagtagtattccact

SEQ ID NO: 200531 - DNA, 25 bp, Canis familiaris
tttggtgctgcctgctagtgcacac

SEQ ID NO: 200532 - DNA, 25 bp, Canis familiaris
tttggggccatcctgggatgagctt

SEQ ID NO: 200533 - DNA, 25 bp, Canis familiaris
tttgggatgctcagtgggctgcttt

SEQ ID NO: 200534 - DNA, 25 bp, Canis familiaris
tattgtgtgtgtgtgtgcgtgtgtg

SEQ ID NO: 200535 - DNA, 25 bp, Canis familiaris
tattgtgtgtcgtgtgtatgtgtgt

SEQ ID NO: 200536 - DNA, 25 bp, Canis familiaris
ttaggtggaaatagttgtggatgta

SEQ ID NO: 200537 - DNA, 25 bp, Canis familiaris
tttggtgtgatgtttgactcggatt

SEQ ID NO: 200538 - DNA, 25 bp, Canis familiaris
tattgtgtcaggttctggccgtttc

SEQ ID NO: 200539 - DNA, 25 bp, Canis familiaris
tttgtacagagctgttccgtcctgc

SEQ ID NO: 200540 - DNA, 25 bp, Canis familiaris
tttgttcaagatcttcactgctcct

SEQ ID NO: 200541 - DNA, 25 bp, Canis familiaris
tttgctgctaaagaatccttcccca

SEQ ID NO: 200542 - DNA, 25 bp, Canis familiaris
tttgacgcacaagaaacatcccacc

SEQ ID NO: 200543 - DNA, 25 bp, Canis familiaris
tttggcccaatataacacaccagaa

SEQ ID NO: 200544 - DNA, 25 bp, Canis familiaris
tttccccacattgttacacctgata

SEQ ID NO: 200545 - DNA, 25 bp, Canis familiaris
tttaacccacatgttctgtcctggt

SEQ ID NO: 200546 - DNA, 25 bp, Canis familiaris
ttttaaatcccaattctgtcccgat

SEQ ID NO: 200547 - DNA, 25 bp, Canis familiaris
tttaaagcacccattctgtactact

SEQ ID NO: 200548 - DNA, 25 bp, Canis familiaris
ttaaataacaccatcctaccttcga

SEQ ID NO: 200549 - DNA, 25 bp, Canis familiaris
ttaaggaaaccagaccgttgacgat

SEQ ID NO: 200550 - DNA, 25 bp, Canis familiaris
ttaggttaacccgacctgttgcatc

SEQ ID NO: 200551 - DNA, 25 bp, Canis familiaris
tttgggtaaccgcctcaattggcct

SEQ ID NO: 200552 - DNA, 25 bp, Canis familiaris
tttggttatatctgtttttggctgt

SEQ ID NO: 200553 - DNA, 25 bp, Canis familiaris
tttgttcttcacagattttcttttt

SEQ ID NO: 200554 - DNA, 25 bp, Canis familiaris
tttggttgtcaaatgatcctttatt

SEQ ID NO: 200555 - DNA, 25 bp, Canis familiaris
tttggatctttaactgcctggttct

SEQ ID NO: 200556 - DNA, 25 bp, Canis familiaris
tttggtctcttatctgacagcgctg

SEQ ID NO: 200557 - DNA, 25 bp, Canis familiaris
ttttgtctgcttccagtaacctgta

SEQ ID NO: 200558 - DNA, 25 bp, Canis familiaris
tttgatgttgttctaaagcctctga

SEQ ID NO: 200559 - DNA, 25 bp, Canis familiaris
tttgtttgtttttatgaccatgcca

SEQ ID NO: 200560 - DNA, 25 bp, Canis familiaris
tttgctttcttgataggagatctgc

SEQ ID NO: 200561 - DNA, 25 bp, Canis familiaris
tttgtagtcattgctacccctcaat

SEQ ID NO: 200562 - DNA, 25 bp, Canis familiaris
tttgttgcatactctttcacccaaa

SEQ ID NO: 200563 - DNA, 25 bp, Canis familiaris
tttgtcatattctctgttaaaaacc

SEQ ID NO: 200564 - DNA, 25 bp, Canis familiaris
tttgccatactctggttacaggaga

SEQ ID NO: 200565 - DNA, 25 bp, Canis familiaris
tttgcgtcagcttccttttagagga

SEQ ID NO: 200566 - DNA, 25 bp, Canis familiaris
tttgtgaccgacgtgatttagccga

SEQ ID NO: 200567 - DNA, 25 bp, Canis familiaris
tttggactgctgcttttctgagctc

SEQ ID NO: 200568 - DNA, 25 bp, Canis familiaris
tttggtcgtggtgcttctggacatc

SEQ ID NO: 200569 - DNA, 25 bp, Canis familiaris
ttcgttcctgtgtccttaggactca

SEQ ID NO: 200570 - DNA, 25 bp, Canis familiaris
tttgcctctttgtcacgtagtatat

SEQ ID NO: 200571 - DNA, 25 bp, Canis familiaris
tttgtcttttaacctagatgctaga

SEQ ID NO: 200572 - DNA, 25 bp, Canis familiaris
tttgttattgatatctcggatacaa

SEQ ID NO: 200573 - DNA, 25 bp, Canis familiaris
tttgtttgtatcattccttcaaata

SEQ ID NO: 200574 - DNA, 25 bp, Canis familiaris
tttgtcatatttctctcgttaaaaa

SEQ ID NO: 200575 - DNA, 25 bp, Canis familiaris
tttgtctatttctccttgtattttc

SEQ ID NO: 200576 - DNA, 25 bp, Canis familiaris
tttgtgtttgtctgtgttgtttgtt

SEQ ID NO: 200577 - DNA, 25 bp, Canis familiaris
tttgtggtatgtctgtttctctttt

SEQ ID NO: 200578 - DNA, 25 bp, Canis familiaris
tttgtttttgttcttcttttcattg

SEQ ID NO: 200579 - DNA, 25 bp, Canis familiaris
tttgtttgttctatttcttcattca

SEQ ID NO: 200580 - DNA, 25 bp, Canis familiaris
tttggtgtctttattgttgccgtcc

SEQ ID NO: 200581 - DNA, 25 bp, Canis familiaris
tttgggccttttgtattgcactctt

SEQ ID NO: 200582 - DNA, 25 bp, Canis familiaris
tttggctctttaaaaatgtcaagtt

SEQ ID NO: 200583 - DNA, 25 bp, Canis familiaris
tttggtttcctttgggctcaagtga

SEQ ID NO: 200584 - DNA, 25 bp, Canis familiaris
tttggtgattccttttcctcagagg

SEQ ID NO: 200585 - DNA, 25 bp, Canis familiaris
tttagtatcctagtcctcctagaat

SEQ ID NO: 200586 - DNA, 25 bp, Canis familiaris
tttcaggcatcctactactttatca

SEQ ID NO: 200587 - DNA, 25 bp, Canis familiaris
tttaggcattcagctttcttcaggc

SEQ ID NO: 200588 - DNA, 25 bp, Canis familiaris
tttcaggctgtaggtgtccttctgt

SEQ ID NO: 200589 - DNA, 25 bp, Canis familiaris
tttggtgccattggtttcttctggg

SEQ ID NO: 200590 - DNA, 25 bp, Canis familiaris
tttggcctacattctttattctgcg

SEQ ID NO: 200591 - DNA, 25 bp, Canis familiaris
tttggcaccactttatatgttcctg

SEQ ID NO: 200592 - DNA, 25 bp, Canis familiaris
tttggcctcactttttgttttcaag

SEQ ID NO: 200593 - DNA, 25 bp, Canis familiaris
tttccacagacttgtattttttagg

SEQ ID NO: 200594 - DNA, 25 bp, Canis familiaris
tttcctcaacaccatgattccttta

SEQ ID NO: 200595 - DNA, 25 bp, Canis familiaris
tttgctaccaagatgattgccttat

SEQ ID NO: 200596 - DNA, 25 bp, Canis familiaris
tttggaacacgaagtgtgtctcatt

SEQ ID NO: 200597 - DNA, 25 bp, Canis familiaris
tttgtgaacatcctcgtggagctct

SEQ ID NO: 200598 - DNA, 25 bp, Canis familiaris
ttatgtgaatgatctctctgaatcc

SEQ ID NO: 200599 - DNA, 25 bp, Canis familiaris
tttgatgattagtccactgttcccc

SEQ ID NO: 200600 - DNA, 25 bp, Canis familiaris
tttgaggctagacacttccactcac

SEQ ID NO: 200601 - DNA, 25 bp, Canis familiaris
tttgagagcccacacttcacatgga

SEQ ID NO: 200602 - DNA, 25 bp, Canis familiaris
tttgggccagaatcatgacctagca

SEQ ID NO: 200603 - DNA, 25 bp, Canis familiaris
tttcggccactgaaagaactacaga

SEQ ID NO: 200604 - DNA, 25 bp, Canis familiaris
tttccggacagaacgtccagtcaac

SEQ ID NO: 200605 - DNA, 25 bp, Canis familiaris
tttccgggagaactagatcctcaaa

SEQ ID NO: 200606 - DNA, 25 bp, Canis familiaris
ttatcctaggaaaatcgtgcaaaga

SEQ ID NO: 200607 - DNA, 25 bp, Canis familiaris
tttgcccaggctacttttgaagcga

SEQ ID NO: 200608 - DNA, 25 bp, Canis familiaris
tttgctccagacctcgttctggaca

SEQ ID NO: 200609 - DNA, 25 bp, Canis familiaris
tttgtcctgtcattctgttcaggcc

SEQ ID NO: 200610 - DNA, 25 bp, Canis familiaris
ttttctctgacatcttccatggtag

SEQ ID NO: 200611 - DNA, 25 bp, Canis familiaris
tttgctcttgattactccgggaagt

SEQ ID NO: 200612 - DNA, 25 bp, Canis familiaris
tttcctctggacttcctggggaggt

SEQ ID NO: 200613 - DNA, 25 bp, Canis familiaris
tttcgtcttgacgtcgtgggtggtt

SEQ ID NO: 200614 - DNA, 25 bp, Canis familiaris
tttagcttatacacaggatgcctgg

SEQ ID NO: 200615 - DNA, 25 bp, Canis familiaris
tttggctcaaagatcatgtgattct

SEQ ID NO: 200616 - DNA, 25 bp, Canis familiaris
tttggaaaagtgtctatgtttattt

SEQ ID NO: 200617 - DNA, 25 bp, Canis familiaris
tttggcaaaactgctctgtgctttc

SEQ ID NO: 200618 - DNA, 25 bp, Canis familiaris
tttgcagcagaacaggcctggctcc

SEQ ID NO: 200619 - DNA, 25 bp, Canis familiaris
tttgagctgcaaaagctgccaggat

SEQ ID NO: 200620 - DNA, 25 bp, Canis familiaris
tttggtgccagatcatgcctgtcac

SEQ ID NO: 200621 - DNA, 25 bp, Canis familiaris
tttggtccaagaactcttcagtgaa

SEQ ID NO: 200622 - DNA, 25 bp, Canis familiaris
tttggtccaggttctgttctgatga

SEQ ID NO: 200623 - DNA, 25 bp, Canis familiaris
tttggtcctggcacaattctcaggg

SEQ ID NO: 200624 - DNA, 25 bp, Canis familiaris
tttgaggcccactaacattctcacg

SEQ ID NO: 200625 - DNA, 25 bp, Canis familiaris
tttaggcacccagaatgaccagcgt

SEQ ID NO: 200626 - DNA, 25 bp, Canis familiaris
tttacgcccgaatgagagctccgtc

SEQ ID NO: 200627 - DNA, 25 bp, Canis familiaris
tttacggcgctaaggatgactctgg

SEQ ID NO: 200628 - DNA, 25 bp, Canis familiaris
tttgagcgccttgtggacatcatct

SEQ ID NO: 200629 - DNA, 25 bp, Canis familiaris
tttgagccctggttgtacaagactt

SEQ ID NO: 200630 - DNA, 25 bp, Canis familiaris
tttcgccacttatgtaaagctttca

SEQ ID NO: 200631 - DNA, 25 bp, Canis familiaris
tttctccttgtgcttaaagttcatc

SEQ ID NO: 200632 - DNA, 25 bp, Canis familiaris
tttcctctttttataaggccacaag

SEQ ID NO: 200633 - DNA, 25 bp, Canis familiaris
ttcccacgtttggacaagagcccca

SEQ ID NO: 200634 - DNA, 25 bp, Canis familiaris
ttccttttgttgggacattccacct

SEQ ID NO: 200635 - DNA, 25 bp, Canis familiaris
ttcacctcgtgttgttgacttcaac

SEQ ID NO: 200636 - DNA, 25 bp, Canis familiaris
tttgatgtcctttggtactatgccc

SEQ ID NO: 200637 - DNA, 25 bp, Canis familiaris
tttgtgtcctaaattactctgccgt

SEQ ID NO: 200638 - DNA, 25 bp, Canis familiaris
tttgtgtgttacgtttatctctcag

SEQ ID NO: 200639 - DNA, 25 bp, Canis familiaris
tttgtgctgtgaacgttttctgcca

SEQ ID NO: 200640 - DNA, 25 bp, Canis familiaris
tttgggctcagcatgtttgccatcc

SEQ ID NO: 200641 - DNA, 25 bp, Canis familiaris
tttctgatccagatctttcctcagc

SEQ ID NO: 200642 - DNA, 25 bp, Canis familiaris
tttctcatgccaactttcttctagc

SEQ ID NO: 200643 - DNA, 25 bp, Canis familiaris
tttgtcattgccatttcttgctacc

SEQ ID NO: 200644 - DNA, 25 bp, Canis familiaris
tttgtacatgtcagtgtgtgagtca

SEQ ID NO: 200645 - DNA, 25 bp, Canis familiaris
tttgagactgtccacgttgtgccat

SEQ ID NO: 200646 - DNA, 25 bp, Canis familiaris
tttgcaatcatgaaccggttccatc

SEQ ID NO: 200647 - DNA, 25 bp, Canis familiaris
tttgcattagtttctgtttccacgc

SEQ ID NO: 200648 - DNA, 25 bp, Canis familiaris
tttgcatttctaacatgttcccagg

SEQ ID NO: 200649 - DNA, 25 bp, Canis familiaris
tttgtattccatctttccttggttc

SEQ ID NO: 200650 - DNA, 25 bp, Canis familiaris
ttttagtaatcgtgtccgtgtgtgt

SEQ ID NO: 200651 - DNA, 25 bp, Canis familiaris
tttgtttatttgtgtttgtctgtgt

SEQ ID NO: 200652 - DNA, 25 bp, Canis familiaris
tttgtgttttgtttatttgtgtttg

SEQ ID NO: 200653 - DNA, 25 bp, Canis familiaris
tttggattctttaaatatatgttat

SEQ ID NO: 200654 - DNA, 25 bp, Canis familiaris
tttgcagcttctttaaccagtctta

SEQ ID NO: 200655 - DNA, 25 bp, Canis familiaris
ttctctgggtatgaaccattctaag

SEQ ID NO: 200656 - DNA, 25 bp, Canis familiaris
ttttgagggtgctcccttcggagct

SEQ ID NO: 200657 - DNA, 25 bp, Canis familiaris
ttttaggagaaaccgcctgccagac

SEQ ID NO: 200658 - DNA, 25 bp, Canis familiaris
ttcttaggaaactcgtcttctgccc

SEQ ID NO: 200659 - DNA, 25 bp, Canis familiaris
ttcctgggaagagcctgcttttccc

SEQ ID NO: 200660 - DNA, 25 bp, Canis familiaris
ttctccggaaagacctcgttgtccg

SEQ ID NO: 200661 - DNA, 25 bp, Canis familiaris
tttcctgggaagagcctgcttttcc

SEQ ID NO: 200662 - DNA, 25 bp, Canis familiaris
ttttcggaactgaggccatgattaa

SEQ ID NO: 200663 - DNA, 25 bp, Canis familiaris
ttttcggaactgaggccatgattaa

SEQ ID NO: 200664 - DNA, 25 bp, Canis familiaris
tttgtcgacaacgtgcagtgccacc

SEQ ID NO: 200665 - DNA, 25 bp, Canis familiaris
tttgatggcacatccgatggctcct

SEQ ID NO: 200666 - DNA, 25 bp, Canis familiaris
tttgatgacacccacagtgactctc

SEQ ID NO: 200667 - DNA, 25 bp, Canis familiaris
tttagaatgccaccaatactctcga

SEQ ID NO: 200668 - DNA, 25 bp, Canis familiaris
tttgacaatgtccctatagctcgag

SEQ ID NO: 200669 - DNA, 25 bp, Canis familiaris
tttgcaccagcttggcttacttgac

SEQ ID NO: 200670 - DNA, 25 bp, Canis familiaris
tttgctcacacatggaactcagttc

SEQ ID NO: 200671 - DNA, 25 bp, Canis familiaris
tttgtatcaaaaacactcattatat

SEQ ID NO: 200672 - DNA, 25 bp, Canis familiaris
tttgtaacccagtatccatgtatga

SEQ ID NO: 200673 - DNA, 25 bp, Canis familiaris
tttgtcaagctcatttcctggtatg

SEQ ID NO: 200674 - DNA, 25 bp, Canis familiaris
tttgtcaagctcatttcctggtatg

SEQ ID NO: 200675 - DNA, 25 bp, Canis familiaris
tttgtagagtttttcctggctgtgg

SEQ ID NO: 200676 - DNA, 25 bp, Canis familiaris
tttgcttgagttaatgttcctgtgc

SEQ ID NO: 200677 - DNA, 25 bp, Canis familiaris
tttcctgcaggaaatgccacgtgta

SEQ ID NO: 200678 - DNA, 25 bp, Canis familiaris
tttgcctgccaatactcggtgtaaa

SEQ ID NO: 200679 - DNA, 25 bp, Canis familiaris
tttgggccagcaccctggggaataa

SEQ ID NO: 200680 - DNA, 25 bp, Canis familiaris
tttgttcctgaccctgcagggatat

SEQ ID NO: 200681 - DNA, 25 bp, Canis familiaris
tttgttctctgactctaagtagcac

SEQ ID NO: 200682 - DNA, 25 bp, Canis familiaris
tttgtttcagcagcattactacacc

SEQ ID NO: 200683 - DNA, 25 bp, Canis familiaris
tttgttctaagtttacataccacag

SEQ ID NO: 200684 - DNA, 25 bp, Canis familiaris
tttgctgctccaagtaaacctccaa

SEQ ID NO: 200685 - DNA, 25 bp, Canis familiaris
tttgcgctccaacaagatgaaagaa

SEQ ID NO: 200686 - DNA, 25 bp, Canis familiaris
tttgcagctcccttcaggattcaat

SEQ ID NO: 200687 - DNA, 25 bp, Canis familiaris
tttgcagctttcttgtgtatacacc

SEQ ID NO: 200688 - DNA, 25 bp, Canis familiaris
tttgcctttattcgaaaacccatgc

SEQ ID NO: 200689 - DNA, 25 bp, Canis familiaris
tttgtttctattagacacacacaca

SEQ ID NO: 200690 - DNA, 25 bp, Canis familiaris
tttgttcttgtgtatgacacctgca

SEQ ID NO: 200691 - DNA, 25 bp, Canis familiaris
tttgttctgtgtttggaagctggca

SEQ ID NO: 200692 - DNA, 25 bp, Canis familiaris
tttgtgttgtgtgtggagggggtga

SEQ ID NO: 200693 - DNA, 25 bp, Canis familiaris
tttgggcgcggcgtgagggggagga

SEQ ID NO: 200694 - DNA, 25 bp, Canis familiaris
tttgagggggcgccgtcggaaggat

SEQ ID NO: 200695 - DNA, 25 bp, Canis familiaris
tttgaggatcctgggctgtctggaa

SEQ ID NO: 200696 - DNA, 25 bp, Canis familiaris
ttagggtttcaggttctgtgaaccg

SEQ ID NO: 200697 - DNA, 25 bp, Canis familiaris
tttgtgggtgtaggtctctgtgttc

SEQ ID NO: 200698 - DNA, 25 bp, Canis familiaris
tttgttgttgttcttgcatggttca

SEQ ID NO: 200699 - DNA, 25 bp, Canis familiaris
tttgtgtctctgtgtgtctagtttc

SEQ ID NO: 200700 - DNA, 25 bp, Canis familiaris
tttgttctctgctgtgtgtatgtgt

SEQ ID NO: 200701 - DNA, 25 bp, Canis familiaris
tttgtttctccagtgtttagttgca

SEQ ID NO: 200702 - DNA, 25 bp, Canis familiaris
tttgttttccattttctgttccaca

SEQ ID NO: 200703 - DNA, 25 bp, Canis familiaris
tttggtggtagcttcttttcccaga

SEQ ID NO: 200704 - DNA, 25 bp, Canis familiaris
tttgtgttgcgatttcttctagccc

SEQ ID NO: 200705 - DNA, 25 bp, Canis familiaris
tttgcttactgatagcttgctagct

SEQ ID NO: 200706 - DNA, 25 bp, Canis familiaris
tttgtgtcctgtttgcttcttgaat

SEQ ID NO: 200707 - DNA, 25 bp, Canis familiaris
ttttcccagtttctcttgtaacttg

SEQ ID NO: 200708 - DNA, 25 bp, Canis familiaris
tttccccactttctactataaatct

SEQ ID NO: 200709 - DNA, 25 bp, Canis familiaris
tttgcacccactatttatgtctgaa

SEQ ID NO: 200710 - DNA, 25 bp, Canis familiaris
tttccatccacttccaatttcgtga

SEQ ID NO: 200711 - DNA, 25 bp, Canis familiaris
ttctcttcgccttaaattcgggtgt

SEQ ID NO: 200712 - DNA, 25 bp, Canis familiaris
tttttccctaaagctttcagagtat

SEQ ID NO: 200713 - DNA, 25 bp, Canis familiaris
tttccccgaaagcaaattactgtat

SEQ ID NO: 200714 - DNA, 25 bp, Canis familiaris
tttccctcacgatagaatattaact

SEQ ID NO: 200715 - DNA, 25 bp, Canis familiaris
tttgtgttgcacattaaaactcaac

SEQ ID NO: 200716 - DNA, 25 bp, Canis familiaris
tttgtttcagcaggccaaacctaca

SEQ ID NO: 200717 - DNA, 25 bp, Canis familiaris
tttgtttccctgtaactctcataaa

SEQ ID NO: 200718 - DNA, 25 bp, Canis familiaris
tttgtttctcctaatgatcgtcatg

SEQ ID NO: 200719 - DNA, 25 bp, Canis familiaris
tttgtcttctcccttgtggatgcaa

SEQ ID NO: 200720 - DNA, 25 bp, Canis familiaris
tttgtacctcgcctgcaggagatga

SEQ ID NO: 200721 - DNA, 25 bp, Canis familiaris
tttgtactcttgcgcgaaatacccc

SEQ ID NO: 200722 - DNA, 25 bp, Canis familiaris
tttgcccgttggcctgaaaagccta

SEQ ID NO: 200723 - DNA, 25 bp, Canis familiaris
tttcctcggtgaaataaagagatct

SEQ ID NO: 200724 - DNA, 25 bp, Canis familiaris
tttctcttgagctttattaaatact

SEQ ID NO: 200725 - DNA, 25 bp, Canis familiaris
tttctttggggttggcaatctgagc

SEQ ID NO: 200726 - DNA, 25 bp, Canis familiaris
ttcttaggaggtcaggcaatgggct

SEQ ID NO: 200727 - DNA, 25 bp, Canis familiaris
tttaaggaggcgctggcaagcccga

SEQ ID NO: 200728 - DNA, 25 bp, Canis familiaris
tttaattggagcgcccaacccaaca

SEQ ID NO: 200729 - DNA, 25 bp, Canis familiaris
tttgaaacagacgcccaacaggacc

SEQ ID NO: 200730 - DNA, 25 bp, Canis familiaris
tttgaacaagcctcccggagtgcca

SEQ ID NO: 200731 - DNA, 25 bp, Canis familiaris
tttcaacagacctcaccaagatgcc

SEQ ID NO: 200732 - DNA, 25 bp, Canis familiaris
tttagtcaacaacaccaacgtcacc

SEQ ID NO: 200733 - DNA, 25 bp, Canis familiaris
ttgggagaccaacactctagagtac

SEQ ID NO: 200734 - DNA, 25 bp, Canis familiaris
tttagaagccaaggcattctaagta

SEQ ID NO: 200735 - DNA, 25 bp, Canis familiaris
ttttatcattaacacttgaagtaat

SEQ ID NO: 200736 - DNA, 25 bp, Canis familiaris
tttgcttattgatgtagcgtgatag

SEQ ID NO: 200737 - DNA, 25 bp, Canis familiaris
tttgtgtttgatagttcctgctgtg

SEQ ID NO: 200738 - DNA, 25 bp, Canis familiaris
tttaatcggttgttccatgctgtgg

SEQ ID NO: 200739 - DNA, 25 bp, Canis familiaris
tttgttcttgttctccatgttggaa

SEQ ID NO: 200740 - DNA, 25 bp, Canis familiaris
tttgattttcttcctttgtgtgtga

SEQ ID NO: 200741 - DNA, 25 bp, Canis familiaris
tttgcatttgatatctgtttggagt

SEQ ID NO: 200742 - DNA, 25 bp, Canis familiaris
ttctgcactggtactgcgctgaagg

SEQ ID NO: 200743 - DNA, 25 bp, Canis familiaris
tttgagctgctgacctgggatgagg

SEQ ID NO: 200744 - DNA, 25 bp, Canis familiaris
tttgcttgttccggacatgaggaca

SEQ ID NO: 200745 - DNA, 25 bp, Canis familiaris
tttcttttccccgtgaggattgcag

SEQ ID NO: 200746 - DNA, 25 bp, Canis familiaris
tttcttttccctccagtgaattcag

SEQ ID NO: 200747 - DNA, 25 bp, Canis familiaris
tttgctgttccgacccggagtgtaa

SEQ ID NO: 200748 - DNA, 25 bp, Canis familiaris
tttcttgtccttgcctggagtttac

SEQ ID NO: 200749 - DNA, 25 bp, Canis familiaris
tttccttttgtgtgcctcaggttac

SEQ ID NO: 200750 - DNA, 25 bp, Canis familiaris
tttctaattctttccactaggtaat

SEQ ID NO: 200751 - DNA, 25 bp, Canis familiaris
ttcttactttaccccaactgtgtat

SEQ ID NO: 200752 - DNA, 25 bp, Canis familiaris
tttccacttttcttccaattctgaa

SEQ ID NO: 200753 - DNA, 25 bp, Canis familiaris
tttgcaccctttttcaagtacaaag

SEQ ID NO: 200754 - DNA, 25 bp, Canis familiaris
tttcccagcttcttgtgcaaaacga

SEQ ID NO: 200755 - DNA, 25 bp, Canis familiaris
tttgccaactactattaccagacag

SEQ ID NO: 200756 - DNA, 25 bp, Canis familiaris
tttgccctattcttttctagcagag

SEQ ID NO: 200757 - DNA, 25 bp, Canis familiaris
tttgtccctctgtttttcagcaatc

SEQ ID NO: 200758 - DNA, 25 bp, Canis familiaris
tttgtacccatgtaagtctaccacc

SEQ ID NO: 200759 - DNA, 25 bp, Canis familiaris
tttgtccccacgaagttgcataacc

SEQ ID NO: 200760 - DNA, 25 bp, Canis familiaris
tttgtcccccacgagttataataca

SEQ ID NO: 200761 - DNA, 25 bp, Canis familiaris
tttgcctacttccacagcgtaagta

SEQ ID NO: 200762 - DNA, 25 bp, Canis familiaris
tttgctccagtgttacaggaaaaca

SEQ ID NO: 200763 - DNA, 25 bp, Canis familiaris
tttgtcccttgctacaaggaaccac

SEQ ID NO: 200764 - DNA, 25 bp, Canis familiaris
tttgcttccttatggcagaaactac

SEQ ID NO: 200765 - DNA, 25 bp, Canis familiaris
tttgctttctggggctgccataaat

SEQ ID NO: 200766 - DNA, 25 bp, Canis familiaris
tttcctgtctgtcattccaaaataa

SEQ ID NO: 200767 - DNA, 25 bp, Canis familiaris
ttcccttcatttctcccaaaagatg

SEQ ID NO: 200768 - DNA, 25 bp, Canis familiaris
tttctcccaaaggtcactcaaaagg

SEQ ID NO: 200769 - DNA, 25 bp, Canis familiaris
tttgcttcacaatgaccttattaag

SEQ ID NO: 200770 - DNA, 25 bp, Canis familiaris
tttgcactaaagttcctgtgattta

SEQ ID NO: 200771 - DNA, 25 bp, Canis familiaris
tttgctataaaaatcttggccatta

SEQ ID NO: 200772 - DNA, 25 bp, Canis familiaris
tttgaaaagaaatttgtccttgaag

SEQ ID NO: 200773 - DNA, 25 bp, Canis familiaris
tttgttcatcaaaaacttccattaa

SEQ ID NO: 200774 - DNA, 25 bp, Canis familiaris
tttgctctaataagacctttcctaa

SEQ ID NO: 200775 - DNA, 25 bp, Canis familiaris
tttgatccgaaggacctcttcgtgg

SEQ ID NO: 200776 - DNA, 25 bp, Canis familiaris
tttcccaaagtggcctctttgtcta

SEQ ID NO: 200777 - DNA, 25 bp, Canis familiaris
tttactgaaaaccctctttatgtgt

SEQ ID NO: 200778 - DNA, 25 bp, Canis familiaris
tttactgaaaaccctctttatgtgt

SEQ ID NO: 200779 - DNA, 25 bp, Canis familiaris
tttactgaaaaccctctttatgtgt

SEQ ID NO: 200780 - DNA, 25 bp, Canis familiaris
tttactgaaaaccctctttatgtgt

SEQ ID NO: 200781 - DNA, 25 bp, Canis familiaris
tttactgaaaaccctctttatgtgt

SEQ ID NO: 200782 - DNA, 25 bp, Canis familiaris
tttactgaaaaccctctttatgtgt

SEQ ID NO: 200783 - DNA, 25 bp, Canis familiaris
tttcagtaaaaccactttagacact

SEQ ID NO: 200784 - DNA, 25 bp, Canis familiaris
tttgcagataagtaccagcccatag

SEQ ID NO: 200785 - DNA, 25 bp, Canis familiaris
tttgttagatgttcctctcactagc

SEQ ID NO: 200786 - DNA, 25 bp, Canis familiaris
tttttgagatcaaactccctaccct

SEQ ID NO: 200787 - DNA, 25 bp, Canis familiaris
ttttaagaatagccccctagaccat

SEQ ID NO: 200788 - DNA, 25 bp, Canis familiaris
tttcttacaataaccgtgctaacct

SEQ ID NO: 200789 - DNA, 25 bp, Canis familiaris
ttttcaacacaaaccttgtaggtca

SEQ ID NO: 200790 - DNA, 25 bp, Canis familiaris
ttgttaataaatggcctttgggtag

SEQ ID NO: 200791 - DNA, 25 bp, Canis familiaris
tttctgtgagagtatccctttggcg

SEQ ID NO: 200792 - DNA, 25 bp, Canis familiaris
tttcctaggaatgcactttttttca

SEQ ID NO: 200793 - DNA, 25 bp, Canis familiaris
tttccatatggaccgatttctttat

SEQ ID NO: 200794 - DNA, 25 bp, Canis familiaris
tttaccggaccgttgtatctgatag

SEQ ID NO: 200795 - DNA, 25 bp, Canis familiaris
tttcctcggaagcctttacagaaca

SEQ ID NO: 200796 - DNA, 25 bp, Canis familiaris
tttaccccaagagtttataagcacg

SEQ ID NO: 200797 - DNA, 25 bp, Canis familiaris
tttcccaccagagcgtggaacccgt

SEQ ID NO: 200798 - DNA, 25 bp, Canis familiaris
tttccccagaggggctggactcagg

SEQ ID NO: 200799 - DNA, 25 bp, Canis familiaris
tttcctgccaacggtgcgaacacag

SEQ ID NO: 200800 - DNA, 25 bp, Canis familiaris
tttccttcaactgggtaacaccaca

SEQ ID NO: 200801 - DNA, 25 bp, Canis familiaris
tttcctgccaactataggaccccaa

SEQ ID NO: 200802 - DNA, 25 bp, Canis familiaris
tttcctcacagtttaggccttgacc

SEQ ID NO: 200803 - DNA, 25 bp, Canis familiaris
tttgactaggtgtgagccacgtctc

SEQ ID NO: 200804 - DNA, 25 bp, Canis familiaris
tttgcctgggtgtggccatggtgat

SEQ ID NO: 200805 - DNA, 25 bp, Canis familiaris
tttctgccgggatggccaagtgctg

SEQ ID NO: 200806 - DNA, 25 bp, Canis familiaris
tttcgacacgcgtgtgaccgtgctg

SEQ ID NO: 200807 - DNA, 25 bp, Canis familiaris
tttcagaccaagttgtcccttgcct

SEQ ID NO: 200808 - DNA, 25 bp, Canis familiaris
tttgtaccaatgtttttctgctcct

SEQ ID NO: 200809 - DNA, 25 bp, Canis familiaris
tttgtagtctcacattttcttctct

SEQ ID NO: 200810 - DNA, 25 bp, Canis familiaris
tttgatatgttccgtcggttacctt

SEQ ID NO: 200811 - DNA, 25 bp, Canis familiaris
tttgattttcattttggctaaccat

SEQ ID NO: 200812 - DNA, 25 bp, Canis familiaris
tttgttcatttgtccatggtaccga

SEQ ID NO: 200813 - DNA, 25 bp, Canis familiaris
tttgtgtgtttgcattggtagggta

SEQ ID NO: 200814 - DNA, 25 bp, Canis familiaris
tttgtgttctctggcatttgctgag

SEQ ID NO: 200815 - DNA, 25 bp, Canis familiaris
tttgtcatacctgtcatatctgaga

SEQ ID NO: 200816 - DNA, 25 bp, Canis familiaris
tttgcgctcggtgcgatactgatga

SEQ ID NO: 200817 - DNA, 25 bp, Canis familiaris
tttgtctcgtgggaaactgatttac

SEQ ID NO: 200818 - DNA, 25 bp, Canis familiaris
tttgctcctggaggtaactttctcc

SEQ ID NO: 200819 - DNA, 25 bp, Canis familiaris
tttctccagccaaacaacttttaca

SEQ ID NO: 200820 - DNA, 25 bp, Canis familiaris
tttccacaccagagatatcttttat

SEQ ID NO: 200821 - DNA, 25 bp, Canis familiaris
tttcccccagctctgatgggactga

SEQ ID NO: 200822 - DNA, 25 bp, Canis familiaris
tttcccaggactcctgggtggctca

SEQ ID NO: 200823 - DNA, 25 bp, Canis familiaris
tttccgcaggattcgctgagtctgt

SEQ ID NO: 200824 - DNA, 25 bp, Canis familiaris
tttccaagggatggtcctcttcacc

SEQ ID NO: 200825 - DNA, 25 bp, Canis familiaris
tttccaagagtcaggccttctctgc

SEQ ID NO: 200826 - DNA, 25 bp, Canis familiaris
ttgtccaaggtatggaaccctgcaa

SEQ ID NO: 200827 - DNA, 25 bp, Canis familiaris
ttgtccaatcgtctggaacctacga

SEQ ID NO: 200828 - DNA, 25 bp, Canis familiaris
tttccacatcggcagtcaaaccctg

SEQ ID NO: 200829 - DNA, 25 bp, Canis familiaris
tttccatcataagcagtaaacccta

SEQ ID NO: 200830 - DNA, 25 bp, Canis familiaris
ttttctgaaaacataaccagcccat

SEQ ID NO: 200831 - DNA, 25 bp, Canis familiaris
tttgcttgaaaagacaaaggaccta

SEQ ID NO: 200832 - DNA, 25 bp, Canis familiaris
tttctggaacccttaaagagatcct

SEQ ID NO: 200833 - DNA, 25 bp, Canis familiaris
ttattggaactatgactaagacatc

SEQ ID NO: 200834 - DNA, 25 bp, Canis familiaris
tttttaaataaacatctgactctaa

SEQ ID NO: 200835 - DNA, 25 bp, Canis familiaris
ttactttattaagccaaatctctaa

SEQ ID NO: 200836 - DNA, 25 bp, Canis familiaris
ttcgttctgttatctcccaaattaa

SEQ ID NO: 200837 - DNA, 25 bp, Canis familiaris
tttgattttccatccctactattga

SEQ ID NO: 200838 - DNA, 25 bp, Canis familiaris
tttgctttttaaattccacatacga

SEQ ID NO: 200839 - DNA, 25 bp, Canis familiaris
tttgtctgcttttttattccattta

SEQ ID NO: 200840 - DNA, 25 bp, Canis familiaris
tttgtctgcctcattctaaaattta

SEQ ID NO: 200841 - DNA, 25 bp, Canis familiaris
tttgaccaatgttctttaaagtata

SEQ ID NO: 200842 - DNA, 25 bp, Canis familiaris
tttgactttcaactttaacctacat

SEQ ID NO: 200843 - DNA, 25 bp, Canis familiaris
tttgacagtacatgtttaacaccac

SEQ ID NO: 200844 - DNA, 25 bp, Canis familiaris
tttgaagatacaactttcccccaca

SEQ ID NO: 200845 - DNA, 25 bp, Canis familiaris
tttaaataatctctacaccccaaca

SEQ ID NO: 200846 - DNA, 25 bp, Canis familiaris
ttttcagggactctatgcaccccaa

SEQ ID NO: 200847 - DNA, 25 bp, Canis familiaris
tttcgcagggacatcattaccccct

SEQ ID NO: 200848 - DNA, 25 bp, Canis familiaris
tttaatggacctggacaacccacct

SEQ ID NO: 200849 - DNA, 25 bp, Canis familiaris
tttagaggaccaagccaaccacaca

SEQ ID NO: 200850 - DNA, 25 bp, Canis familiaris
tttaaaacatcaaccctctgcaact

SEQ ID NO: 200851 - DNA, 25 bp, Canis familiaris
tttgaagattgacactcaccttatc

SEQ ID NO: 200852 - DNA, 25 bp, Canis familiaris
tttgattgagagtccaccaacttat

SEQ ID NO: 200853 - DNA, 25 bp, Canis familiaris
ttttctgtgagatccctgcagttct

SEQ ID NO: 200854 - DNA, 25 bp, Canis familiaris
tttgtatgttgttttctgctttctc

SEQ ID NO: 200855 - DNA, 25 bp, Canis familiaris
tttgaagtagcttattctgattata

SEQ ID NO: 200856 - DNA, 25 bp, Canis familiaris
tttgaagcatcacatatcttttaat

SEQ ID NO: 200857 - DNA, 25 bp, Canis familiaris
ttatgtcagatacccgttcttagtg

SEQ ID NO: 200858 - DNA, 25 bp, Canis familiaris
tttgccattttcctgtatcttaaga

SEQ ID NO: 200859 - DNA, 25 bp, Canis familiaris
tttgccattcttctgtttatagtgg

SEQ ID NO: 200860 - DNA, 25 bp, Canis familiaris
tttgctcttgtttgcttttataatt

SEQ ID NO: 200861 - DNA, 25 bp, Canis familiaris
tttgcccttttgcccattaataatg

SEQ ID NO: 200862 - DNA, 25 bp, Canis familiaris
tttatggctgtcttgcccttcaaaa

SEQ ID NO: 200863 - DNA, 25 bp, Canis familiaris
tttctggctgctggaggctttgaca

SEQ ID NO: 200864 - DNA, 25 bp, Canis familiaris
tttagcttgtggagttctggaggac

SEQ ID NO: 200865 - DNA, 25 bp, Canis familiaris
ttctagttactgggttgggaggcca

SEQ ID NO: 200866 - DNA, 25 bp, Canis familiaris
tttgagttccctgactggcgaatgc

SEQ ID NO: 200867 - DNA, 25 bp, Canis familiaris
tttaggtccgctgtctgaatgaaag

SEQ ID NO: 200868 - DNA, 25 bp, Canis familiaris
ttctggaacccgggtgcaaggccag

SEQ ID NO: 200869 - DNA, 25 bp, Canis familiaris
ttttaccccagagtacacaggccag

SEQ ID NO: 200870 - DNA, 25 bp, Canis familiaris
tttctttcacttagtacgtggcaag

SEQ ID NO: 200871 - DNA, 25 bp, Canis familiaris
tttagtaatttacacttggacagcc

SEQ ID NO: 200872 - DNA, 25 bp, Canis familiaris
tttaccagtcttggcaacttggaaa

SEQ ID NO: 200873 - DNA, 25 bp, Canis familiaris
tttatccagcttgcctacgggagat

SEQ ID NO: 200874 - DNA, 25 bp, Canis familiaris
tttgctgacctctccaacatggaga

SEQ ID NO: 200875 - DNA, 25 bp, Canis familiaris
tttgttccatcttctctacatgagg

SEQ ID NO: 200876 - DNA, 25 bp, Canis familiaris
tttgttctctctgttgtcagtgtgt

SEQ ID NO: 200877 - DNA, 25 bp, Canis familiaris
tttgttccactggctgcggatttta

SEQ ID NO: 200878 - DNA, 25 bp, Canis familiaris
tttgtatccaaggtgctgaatcttg

SEQ ID NO: 200879 - DNA, 25 bp, Canis familiaris
tttcgaccaacttctaatatgtagc

SEQ ID NO: 200880 - DNA, 25 bp, Canis familiaris
tttcgtcccacagcttagtgtacaa

SEQ ID NO: 200881 - DNA, 25 bp, Canis familiaris
ttaccccctatgtcttcaggtacca

SEQ ID NO: 200882 - DNA, 25 bp, Canis familiaris
tttccaaacttagtctcggtccttg

SEQ ID NO: 200883 - DNA, 25 bp, Canis familiaris
tttcccaattgttttcgttcttgtg

SEQ ID NO: 200884 - DNA, 25 bp, Canis familiaris
tttcccaactctgtccgtgttggtt

SEQ ID NO: 200885 - DNA, 25 bp, Canis familiaris
tttgcccaactcacccagtgaattg

SEQ ID NO: 200886 - DNA, 25 bp, Canis familiaris
tttcccgaccttggcttgtgaattt

SEQ ID NO: 200887 - DNA, 25 bp, Canis familiaris
tttcccacaccacacatttgtatgc

SEQ ID NO: 200888 - DNA, 25 bp, Canis familiaris
tttccccaagagcaaatttctagaa

SEQ ID NO: 200889 - DNA, 25 bp, Canis familiaris
tttccccaaataacaatttctagag

SEQ ID NO: 200890 - DNA, 25 bp, Canis familiaris
tttgccttacatactagcctttcca

SEQ ID NO: 200891 - DNA, 25 bp, Canis familiaris
tttgccttaaagtattttctccaat

SEQ ID NO: 200892 - DNA, 25 bp, Canis familiaris
tttccttgagaacacttttaccaga

SEQ ID NO: 200893 - DNA, 25 bp, Canis familiaris
tttccccgtatctctttatactgga

SEQ ID NO: 200894 - DNA, 25 bp, Canis familiaris
tttcctccgtttctctgtatattgg

SEQ ID NO: 200895 - DNA, 25 bp, Canis familiaris
tttcctctttcttacctaaattgtg

SEQ ID NO: 200896 - DNA, 25 bp, Canis familiaris
tttcctttgttttaccaaatagatg

SEQ ID NO: 200897 - DNA, 25 bp, Canis familiaris
tttgcctttcttagaatccaagaac

SEQ ID NO: 200898 - DNA, 25 bp, Canis familiaris
tttcgttcatcttaggtcgggacca

SEQ ID NO: 200899 - DNA, 25 bp, Canis familiaris
tttcgatcctcgtcaggtgcaggtc

SEQ ID NO: 200900 - DNA, 25 bp, Canis familiaris
tttcgatcctcgtcaggtgcaggtc

SEQ ID NO: 200901 - DNA, 25 bp, Canis familiaris
tttcgtgcgtgcacagagctgggta

SEQ ID NO: 200902 - DNA, 25 bp, Canis familiaris
tttgcggactgtgaagctgggctgt

SEQ ID NO: 200903 - DNA, 25 bp, Canis familiaris
tttgcaggaagagcacagcggtccg

SEQ ID NO: 200904 - DNA, 25 bp, Canis familiaris
tttgagagcaatgccatcacctgta

SEQ ID NO: 200905 - DNA, 25 bp, Canis familiaris
tttgctgacaccatcaagcagctga

SEQ ID NO: 200906 - DNA, 25 bp, Canis familiaris
tttgcaacactgcatcacatcccat

SEQ ID NO: 200907 - DNA, 25 bp, Canis familiaris
tttacagagctgacatgacacccac

SEQ ID NO: 200908 - DNA, 25 bp, Canis familiaris
tttccagctggtgacactctactgc

SEQ ID NO: 200909 - DNA, 25 bp, Canis familiaris
tttccactgtgtcaccaattctaga

SEQ ID NO: 200910 - DNA, 25 bp, Canis familiaris
tttgccatttttcccaagtcagtga

SEQ ID NO: 200911 - DNA, 25 bp, Canis familiaris
tttgtatattttccaactccattat

SEQ ID NO: 200912 - DNA, 25 bp, Canis familiaris
tttccaattatctcaacttctttcc

SEQ ID NO: 200913 - DNA, 25 bp, Canis familiaris
tttgttttagcatcacctttttcct

SEQ ID NO: 200914 - DNA, 25 bp, Canis familiaris
tttgtatttaattctctcacttttg

SEQ ID NO: 200915 - DNA, 25 bp, Canis familiaris
tttgatatgttgtagtctctcactt

SEQ ID NO: 200916 - DNA, 25 bp, Canis familiaris
tttgatatttatttcctgctactga

SEQ ID NO: 200917 - DNA, 25 bp, Canis familiaris
tttgattttattcgcaccattgcgg

SEQ ID NO: 200918 - DNA, 25 bp, Canis familiaris
tttgatcttttcccactcttagaaa

SEQ ID NO: 200919 - DNA, 25 bp, Canis familiaris
tttgaccatcttgctcacgttgaaa

SEQ ID NO: 200920 - DNA, 25 bp, Canis familiaris
tttgatcctctaactacgtaatgaa

SEQ ID NO: 200921 - DNA, 25 bp, Canis familiaris
tttgagccccacatcaggtgtagag

SEQ ID NO: 200922 - DNA, 25 bp, Canis familiaris
tttctgccctgacgtaagtctggag

SEQ ID NO: 200923 - DNA, 25 bp, Canis familiaris
tttcctccggcggacagctgcttac

SEQ ID NO: 200924 - DNA, 25 bp, Canis familiaris
tttgccgcctggatggcctattaca

SEQ ID NO: 200925 - DNA, 25 bp, Canis familiaris
tttgcctccttgatacagtttgtag

SEQ ID NO: 200926 - DNA, 25 bp, Canis familiaris
tttccagcctggaccaactggtgga

SEQ ID NO: 200927 - DNA, 25 bp, Canis familiaris
tttccccgggagcccggtggcatag

SEQ ID NO: 200928 - DNA, 25 bp, Canis familiaris
tttctcccagggctcctgttgaaag

SEQ ID NO: 200929 - DNA, 25 bp, Canis familiaris
tttgtaccggtgtctcggatcgaga

SEQ ID NO: 200930 - DNA, 25 bp, Canis familiaris
tttgtacgttcttcttggatgggcc

SEQ ID NO: 200931 - DNA, 25 bp, Canis familiaris
tttgtaggtccttgtctggaaatga

SEQ ID NO: 200932 - DNA, 25 bp, Canis familiaris
tttgtacgcccatttctcagaaata

SEQ ID NO: 200933 - DNA, 25 bp, Canis familiaris
tttgaaccccatttcatgctgtcag

SEQ ID NO: 200934 - DNA, 25 bp, Canis familiaris
tttatactcaaatttcagcgaagct

SEQ ID NO: 200935 - DNA, 25 bp, Canis familiaris
tttcaacacgtattacaaaagtcca

SEQ ID NO: 200936 - DNA, 25 bp, Canis familiaris
tttctcccggtttcacatacgattg

SEQ ID NO: 200937 - DNA, 25 bp, Canis familiaris
tttctcacccaggaaatcaaccctg

SEQ ID NO: 200938 - DNA, 25 bp, Canis familiaris
tttcaataccggagatcatgcaagc

SEQ ID NO: 200939 - DNA, 25 bp, Canis familiaris
tttgcaggccctgttgatagtagcc

SEQ ID NO: 200940 - DNA, 25 bp, Canis familiaris
tttcaagcccatgtcataaccctta

SEQ ID NO: 200941 - DNA, 25 bp, Canis familiaris
tttccagccaatcagcatcatcatc

SEQ ID NO: 200942 - DNA, 25 bp, Canis familiaris
tttccatagagactcagccctcaac

SEQ ID NO: 200943 - DNA, 25 bp, Canis familiaris
ttacctaatccactggcagctgcag

SEQ ID NO: 200944 - DNA, 25 bp, Canis familiaris
tttccgactccacgaacgcagtggg

SEQ ID NO: 200945 - DNA, 25 bp, Canis familiaris
tttcctcttctccgagaccggagga

SEQ ID NO: 200946 - DNA, 25 bp, Canis familiaris
tttttcaagacccactccagggaga

SEQ ID NO: 200947 - DNA, 25 bp, Canis familiaris
ttccttaaccgctgccgcagcgtgg

SEQ ID NO: 200948 - DNA, 25 bp, Canis familiaris
tttcttatacggtcgcctacaggtg

SEQ ID NO: 200949 - DNA, 25 bp, Canis familiaris
tttcattaatcaagaacgaaagtcg

SEQ ID NO: 200950 - DNA, 25 bp, Canis familiaris
tttcttcatctacgaaccaaaccgc

SEQ ID NO: 200951 - DNA, 25 bp, Canis familiaris
tttttcttgactaataaatattctg

SEQ ID NO: 200952 - DNA, 25 bp, Canis familiaris
ttggttttgaccttaacatctagct

SEQ ID NO: 200953 - DNA, 25 bp, Canis familiaris
ttggttttaccctgatttagtctat

SEQ ID NO: 200954 - DNA, 25 bp, Canis familiaris
ttttttttcctctcatatttactat

SEQ ID NO: 200955 - DNA, 25 bp, Canis familiaris
ttttttttcctctcatatttactat

SEQ ID NO: 200956 - DNA, 25 bp, Canis familiaris
tttgtattttccaggccctgtcact

SEQ ID NO: 200957 - DNA, 25 bp, Canis familiaris
tttttttctccaagactaccagtct

SEQ ID NO: 200958 - DNA, 25 bp, Canis familiaris
ttttcgtatcattaagtcggtagtc

SEQ ID NO: 200959 - DNA, 25 bp, Canis familiaris
ttttcagtttcacaatcacagtatt

SEQ ID NO: 200960 - DNA, 25 bp, Canis familiaris
ttcatgctccttcagaaacagacta

SEQ ID NO: 200961 - DNA, 25 bp, Canis familiaris
tttgcccatttattagacgatctat

SEQ ID NO: 200962 - DNA, 25 bp, Canis familiaris
tttccacttaacaatacagtgctta

SEQ ID NO: 200963 - DNA, 25 bp, Canis familiaris
ttccccctgggcaacaaagctatga

SEQ ID NO: 200964 - DNA, 25 bp, Canis familiaris
tttcctccagagtatacgagagctt

SEQ ID NO: 200965 - DNA, 25 bp, Canis familiaris
tttccctcagggtactgggttctct

SEQ ID NO: 200966 - DNA, 25 bp, Canis familiaris
tttccaatgcaacacctggttttgt

SEQ ID NO: 200967 - DNA, 25 bp, Canis familiaris
tttccagatctcatccgggtttctg

SEQ ID NO: 200968 - DNA, 25 bp, Canis familiaris
tttacaatctccgatggggtatacg

SEQ ID NO: 200969 - DNA, 25 bp, Canis familiaris
tttataagccctggtggggattact

SEQ ID NO: 200970 - DNA, 25 bp, Canis familiaris
tttttctgctcctgggggtgtaggg

SEQ ID NO: 200971 - DNA, 25 bp, Canis familiaris
ttatctcctagcccgggggaattgg

SEQ ID NO: 200972 - DNA, 25 bp, Canis familiaris
ttatctctggactctagcggtacac

SEQ ID NO: 200973 - DNA, 25 bp, Canis familiaris
tttccggcatcgccgaggaggccaa

SEQ ID NO: 200974 - DNA, 25 bp, Canis familiaris
tttccgcttgggtcagaatggacaa

SEQ ID NO: 200975 - DNA, 25 bp, Canis familiaris
tttctctcttactcagattggataa

SEQ ID NO: 200976 - DNA, 25 bp, Canis familiaris
tttctcctgtcactcgacatggtta

SEQ ID NO: 200977 - DNA, 25 bp, Canis familiaris
tttccacatgtacctgagtcgctgg

SEQ ID NO: 200978 - DNA, 25 bp, Canis familiaris
tttgcacacagtttgtacttgctca

SEQ ID NO: 200979 - DNA, 25 bp, Canis familiaris
tttgcctcagtgtttgactctagca

SEQ ID NO: 200980 - DNA, 25 bp, Canis familiaris
tttccactgcatgtagttgctagca

SEQ ID NO: 200981 - DNA, 25 bp, Canis familiaris
tttcccgcacgtacgatgctacaac

SEQ ID NO: 200982 - DNA, 25 bp, Canis familiaris
tttctcccacgttcattgcaaaagc

SEQ ID NO: 200983 - DNA, 25 bp, Canis familiaris
tttcctcctctgacagccaaaacag

SEQ ID NO: 200984 - DNA, 25 bp, Canis familiaris
tttcctgctgcttcacagctcagaa

SEQ ID NO: 200985 - DNA, 25 bp, Canis familiaris
tttgctgctctgtaagcctctgaag

SEQ ID NO: 200986 - DNA, 25 bp, Canis familiaris
tttgcctcttgggctctggagagtg

SEQ ID NO: 200987 - DNA, 25 bp, Canis familiaris
tttcccgtggctgctgagacaatta

SEQ ID NO: 200988 - DNA, 25 bp, Canis familiaris
tttcctgcctggacactgaactggt

SEQ ID NO: 200989 - DNA, 25 bp, Canis familiaris
tttccaccctgccatcgaagatggt

SEQ ID NO: 200990 - DNA, 25 bp, Canis familiaris
tttcatcaccttggctccaaaggga

SEQ ID NO: 200991 - DNA, 25 bp, Canis familiaris
tttctacctgcgactcacatatagc

SEQ ID NO: 200992 - DNA, 25 bp, Canis familiaris
tttctgattctctccaacatcatgc

SEQ ID NO: 200993 - DNA, 25 bp, Canis familiaris
tttgagtgatcctccaacttcattt

SEQ ID NO: 200994 - DNA, 25 bp, Canis familiaris
tttaatgtgccaaacaagtctaata

SEQ ID NO: 200995 - DNA, 25 bp, Canis familiaris
tttgaatgcccaacccattattata

SEQ ID NO: 200996 - DNA, 25 bp, Canis familiaris
tttgaacttcaaccattatatatat

SEQ ID NO: 200997 - DNA, 25 bp, Canis familiaris
tttgaactgttaaatctttgcataa

SEQ ID NO: 200998 - DNA, 25 bp, Canis familiaris
tttgccactgtaatcttcttttcca

SEQ ID NO: 200999 - DNA, 25 bp, Canis familiaris
tttccttgaagctttcttcttgcga

SEQ ID NO: 201000 - DNA, 25 bp, Canis familiaris
tttccaggaatttctctttttgaga

SEQ ID NO: 201001 - DNA, 25 bp, Canis familiaris
tttccagaactcattttgtttacat

SEQ ID NO: 201002 - DNA, 25 bp, Canis familiaris
tttccagaacctattgtatggatct

SEQ ID NO: 201003 - DNA, 25 bp, Canis familiaris
tttccatgcaacactcatattgagg

SEQ ID NO: 201004 - DNA, 25 bp, Canis familiaris
tttgcttcaccatatcatttacaga

SEQ ID NO: 201005 - DNA, 25 bp, Canis familiaris
tttgccatctcctacacatgggaaa

SEQ ID NO: 201006 - DNA, 25 bp, Canis familiaris
tttgcacatcacgtacctggtaagg

SEQ ID NO: 201007 - DNA, 25 bp, Canis familiaris
tttaaccagctgacctggggcacgc

SEQ ID NO: 201008 - DNA, 25 bp, Canis familiaris
tttaacgaggatccattggagggca

SEQ ID NO: 201009 - DNA, 25 bp, Canis familiaris
tttaactgctcctcctggcaggaga

SEQ ID NO: 201010 - DNA, 25 bp, Canis familiaris
tttaatgcagcggcatcgtcggcag

SEQ ID NO: 201011 - DNA, 25 bp, Canis familiaris
tttgaatgatgagccttcgtgcccc

SEQ ID NO: 201012 - DNA, 25 bp, Canis familiaris
tttgaatgatgagccttcgtgcccc

SEQ ID NO: 201013 - DNA, 25 bp, Canis familiaris
tttgaagtgaccttcttcatcaccc

SEQ ID NO: 201014 - DNA, 25 bp, Canis familiaris
tttcaagctaccttcatgtcactgc

SEQ ID NO: 201015 - DNA, 25 bp, Canis familiaris
tttcacagtacataagccatctttg

SEQ ID NO: 201016 - DNA, 25 bp, Canis familiaris
tttccaacacattattgccctttag

SEQ ID NO: 201017 - DNA, 25 bp, Canis familiaris
tttgcacaaccatttgacacccatg

SEQ ID NO: 201018 - DNA, 25 bp, Canis familiaris
tttgcataatgtctgtgccactcct

SEQ ID NO: 201019 - DNA, 25 bp, Canis familiaris
tttgctgtcattccagtacatcacc

SEQ ID NO: 201020 - DNA, 25 bp, Canis familiaris
tttgttgcatccatgttcacctgca

SEQ ID NO: 201021 - DNA, 25 bp, Canis familiaris
tttgattcatgaattctctcccagg

SEQ ID NO: 201022 - DNA, 25 bp, Canis familiaris
tttgagcgcgagagtctcccagaga

SEQ ID NO: 201023 - DNA, 25 bp, Canis familiaris
tttgagtgctggaagctataacgat

SEQ ID NO: 201024 - DNA, 25 bp, Canis familiaris
tttgcttcgctgaatatatacaggt

SEQ ID NO: 201025 - DNA, 25 bp, Canis familiaris
tttgcttcctgtttgtgccaatgta

SEQ ID NO: 201026 - DNA, 25 bp, Canis familiaris
tttgcgtacagctcttgctaataaa

SEQ ID NO: 201027 - DNA, 25 bp, Canis familiaris
tttagtgacagctgtgcccagaaaa

SEQ ID NO: 201028 - DNA, 25 bp, Canis familiaris
tttaacacagctcatagccaaataa

SEQ ID NO: 201029 - DNA, 25 bp, Canis familiaris
tttactcacgagagacacagagaaa

SEQ ID NO: 201030 - DNA, 25 bp, Canis familiaris
tttaccgccagatgaaatcgaacag

SEQ ID NO: 201031 - DNA, 25 bp, Canis familiaris
tttacttctctataaaggctacatg

SEQ ID NO: 201032 - DNA, 25 bp, Canis familiaris
tttgactgttgtgaataaggctgca

SEQ ID NO: 201033 - DNA, 25 bp, Canis familiaris
tttccttctgctgcaaaagccgtgt

SEQ ID NO: 201034 - DNA, 25 bp, Canis familiaris
tttccttctttcaatcatactcagt

SEQ ID NO: 201035 - DNA, 25 bp, Canis familiaris
tttgccttcgtgttattacctcgga

SEQ ID NO: 201036 - DNA, 25 bp, Canis familiaris
tttccattctgttttggcacctcaa

SEQ ID NO: 201037 - DNA, 25 bp, Canis familiaris
tttcaagttgtgttctgcagtccca

SEQ ID NO: 201038 - DNA, 25 bp, Canis familiaris
tttccaccagtgtttgcgtgctgac

SEQ ID NO: 201039 - DNA, 25 bp, Canis familiaris
tttccaccagctctgatctgttact

SEQ ID NO: 201040 - DNA, 25 bp, Canis familiaris
tttaacacactcctttgctggtgct

SEQ ID NO: 201041 - DNA, 25 bp, Canis familiaris
tttaatatcctcgtgtgcgtggctg

SEQ ID NO: 201042 - DNA, 25 bp, Canis familiaris
tttctcttccacgagggctggtggc

SEQ ID NO: 201043 - DNA, 25 bp, Canis familiaris
tttgctttgcacttaggatgctccg

SEQ ID NO: 201044 - DNA, 25 bp, Canis familiaris
tttctgggctcctgaatgctcaaga

SEQ ID NO: 201045 - DNA, 25 bp, Canis familiaris
tttcccagctactggctgccagaaa

SEQ ID NO: 201046 - DNA, 25 bp, Canis familiaris
tttctcagagcttcgggagtccgaa

SEQ ID NO: 201047 - DNA, 25 bp, Canis familiaris
tttgacgacttctgggggccataaa

SEQ ID NO: 201048 - DNA, 25 bp, Canis familiaris
tttacagttggcttttggaccataa

SEQ ID NO: 201049 - DNA, 25 bp, Canis familiaris
tttcccttggggatggaatgcataa

SEQ ID NO: 201050 - DNA, 25 bp, Canis familiaris
tttgccacttgaagtttggcacaac

SEQ ID NO: 201051 - DNA, 25 bp, Canis familiaris
tttgcaacatgaatagacttagaag

SEQ ID NO: 201052 - DNA, 25 bp, Canis familiaris
tttgccatcaaagatctgtgcagac

SEQ ID NO: 201053 - DNA, 25 bp, Canis familiaris
tttctcatcaaaagcaagtgcaaag

SEQ ID NO: 201054 - DNA, 25 bp, Canis familiaris
tttccagccccagatgtcaatagtg

SEQ ID NO: 201055 - DNA, 25 bp, Canis familiaris
tttcataatccgacgatgtagaagg

SEQ ID NO: 201056 - DNA, 25 bp, Canis familiaris
tttcagatatcgtctctattcaaag

SEQ ID NO: 201057 - DNA, 25 bp, Canis familiaris
tttgcagctattgcactagtcattt

SEQ ID NO: 201058 - DNA, 25 bp, Canis familiaris
tttgcagcctcttcatgtcagctgt

SEQ ID NO: 201059 - DNA, 25 bp, Canis familiaris
tttgaccatctgtagttgctatggg

SEQ ID NO: 201060 - DNA, 25 bp, Canis familiaris
tttgactcttgctcctgctaggagc

SEQ ID NO: 201061 - DNA, 25 bp, Canis familiaris
tttgcccattgctccatgttggaca

SEQ ID NO: 201062 - DNA, 25 bp, Canis familiaris
tttcccactaccttgctatgtgacc

SEQ ID NO: 201063 - DNA, 25 bp, Canis familiaris
ttttccgtaatcttgctaatgacta

SEQ ID NO: 201064 - DNA, 25 bp, Canis familiaris
tttccacgtcttctgcttagacata

SEQ ID NO: 201065 - DNA, 25 bp, Canis familiaris
tttcccctctatttcttcaagacaa

SEQ ID NO: 201066 - DNA, 25 bp, Canis familiaris
tttctccgttttgcttgcaaggaaa

SEQ ID NO: 201067 - DNA, 25 bp, Canis familiaris
tttccctgttgttggtacggctgga

SEQ ID NO: 201068 - DNA, 25 bp, Canis familiaris
tttccctggtctagttaggttggat

SEQ ID NO: 201069 - DNA, 25 bp, Canis familiaris
ttatcctccggcaacttgggttgtt

SEQ ID NO: 201070 - DNA, 25 bp, Canis familiaris
tttcctcttggttatttgcagttgt

SEQ ID NO: 201071 - DNA, 25 bp, Canis familiaris
tttcctcaaggtagtctatgccctt

SEQ ID NO: 201072 - DNA, 25 bp, Canis familiaris
tttctccaatggtccctgagtttct

SEQ ID NO: 201073 - DNA, 25 bp, Canis familiaris
tttcaccaaggagcgctgactgtga

SEQ ID NO: 201074 - DNA, 25 bp, Canis familiaris
tttcccgggatggcgagagcagaga

SEQ ID NO: 201075 - DNA, 25 bp, Canis familiaris
ttttcatggggtggggaagcaagaa

SEQ ID NO: 201076 - DNA, 25 bp, Canis familiaris
tttcttggcgcacctgggttgaaat

SEQ ID NO: 201077 - DNA, 25 bp, Canis familiaris
tttcattggcactacctaattggaa

SEQ ID NO: 201078 - DNA, 25 bp, Canis familiaris
tttaatagtcattccaaatatgaga

SEQ ID NO: 201079 - DNA, 25 bp, Canis familiaris
tttaatagtcattccaaatatgaga

SEQ ID NO: 201080 - DNA, 25 bp, Canis familiaris
tttaatggtctacagcactatgcaa

SEQ ID NO: 201081 - DNA, 25 bp, Canis familiaris
tttccaggtcttcagcagattcaaa

SEQ ID NO: 201082 - DNA, 25 bp, Canis familiaris
tttccaatatttcagaggcatacca

SEQ ID NO: 201083 - DNA, 25 bp, Canis familiaris
tttgccaaataactaggacccaaat

SEQ ID NO: 201084 - DNA, 25 bp, Canis familiaris
tttgccataaaattttacctcacaa

SEQ ID NO: 201085 - DNA, 25 bp, Canis familiaris
tttgctacaccattatttactccca

SEQ ID NO: 201086 - DNA, 25 bp, Canis familiaris
tttcaagacctctttgaaccccatg

SEQ ID NO: 201087 - DNA, 25 bp, Canis familiaris
ttaaacacttcgggaaccctgctgt

SEQ ID NO: 201088 - DNA, 25 bp, Canis familiaris
ttagaagcttttgggaagccctttg

SEQ ID NO: 201089 - DNA, 25 bp, Canis familiaris
tttgaagattttgtggactcctcgg

SEQ ID NO: 201090 - DNA, 25 bp, Canis familiaris
tttgcacgttttcgggcaaccttag

SEQ ID NO: 201091 - DNA, 25 bp, Canis familiaris
tttccgttgctttaggtatccgtga

SEQ ID NO: 201092 - DNA, 25 bp, Canis familiaris
tttcccttttgttaatattctgtgt

SEQ ID NO: 201093 - DNA, 25 bp, Canis familiaris
tttcctcttccacatgaatacctgg

SEQ ID NO: 201094 - DNA, 25 bp, Canis familiaris
tttcacattaaaagaaacacctgtg

SEQ ID NO: 201095 - DNA, 25 bp, Canis familiaris
tttccttgcaaaactaaaatctgtg

SEQ ID NO: 201096 - DNA, 25 bp, Canis familiaris
tttgcactattacacttgaaaattg

SEQ ID NO: 201097 - DNA, 25 bp, Canis familiaris
tttcatgctgtataactgtaaaatc

SEQ ID NO: 201098 - DNA, 25 bp, Canis familiaris
ttaagctgtagtgatctggatggaa

SEQ ID NO: 201099 - DNA, 25 bp, Canis familiaris
ttaccagtagcatcatcggactaca

SEQ ID NO: 201100 - DNA, 25 bp, Canis familiaris
tttgccatgctgtggcacggagccc

SEQ ID NO: 201101 - DNA, 25 bp, Canis familiaris
tttgccaggctgggcaggggctggt

SEQ ID NO: 201102 - DNA, 25 bp, Canis familiaris
tttgccagctggactgcaggcgact

SEQ ID NO: 201103 - DNA, 25 bp, Canis familiaris
tttgccgcataggtagagtgctgta

SEQ ID NO: 201104 - DNA, 25 bp, Canis familiaris
tttcctcatcaggtgtggctggtca

SEQ ID NO: 201105 - DNA, 25 bp, Canis familiaris
tttcctcatcaggtgtggctggtca

SEQ ID NO: 201106 - DNA, 25 bp, Canis familiaris
tttcctgcaaggagctgtctgacag

SEQ ID NO: 201107 - DNA, 25 bp, Canis familiaris
tttcctgaagccacttgagcacgtg

SEQ ID NO: 201108 - DNA, 25 bp, Canis familiaris
tttcacccgactgctgtagtcgttt

SEQ ID NO: 201109 - DNA, 25 bp, Canis familiaris
tttcccctgttgccaggaatccttt

SEQ ID NO: 201110 - DNA, 25 bp, Canis familiaris
tttccccgagcttcggatcatcagc

SEQ ID NO: 201111 - DNA, 25 bp, Canis familiaris
tttcctgggaattctgtgatcatca

SEQ ID NO: 201112 - DNA, 25 bp, Canis familiaris
tttccttggccctttgagcaataaa

SEQ ID NO: 201113 - DNA, 25 bp, Canis familiaris
tttcctcaggcctactgggccaagc

SEQ ID NO: 201114 - DNA, 25 bp, Canis familiaris
tttgccgcgactgtctggggagaca

SEQ ID NO: 201115 - DNA, 25 bp, Canis familiaris
tttctggagacgctctgacggttca

SEQ ID NO: 201116 - DNA, 25 bp, Canis familiaris
tttgctgggagacatcaaccttaca

SEQ ID NO: 201117 - DNA, 25 bp, Canis familiaris
tttctgggaagccacagccccaaga

SEQ ID NO: 201118 - DNA, 25 bp, Canis familiaris
tttctgatgaaagcacgacacctgt

SEQ ID NO: 201119 - DNA, 25 bp, Canis familiaris
tttgctgtgacaacggcagaaccca

SEQ ID NO: 201120 - DNA, 25 bp, Canis familiaris
tttgctgtgcgcagtgggaagtaca

SEQ ID NO: 201121 - DNA, 25 bp, Canis familiaris
tttgctgatgctgctgtggaaccta

SEQ ID NO: 201122 - DNA, 25 bp, Canis familiaris
tttgctgacctgctgggatccagat

SEQ ID NO: 201123 - DNA, 25 bp, Canis familiaris
tttgctgttcgggacatgaggcaga

SEQ ID NO: 201124 - DNA, 25 bp, Canis familiaris
tttgctgttcgtgacatgagacaga

SEQ ID NO: 201125 - DNA, 25 bp, Canis familiaris
tttgctgttcgtgactctgatgacc

SEQ ID NO: 201126 - DNA, 25 bp, Canis familiaris
tttgctggggctggacttgcagtca

SEQ ID NO: 201127 - DNA, 25 bp, Canis familiaris
tttcggggcatgcactttgtcagta

SEQ ID NO: 201128 - DNA, 25 bp, Canis familiaris
tttcactcggagcacctgtgtgcac

SEQ ID NO: 201129 - DNA, 25 bp, Canis familiaris
tttcctccagcggatcacagagtac

SEQ ID NO: 201130 - DNA, 25 bp, Canis familiaris
tttgcactgaacgatatcccggagc

SEQ ID NO: 201131 - DNA, 25 bp, Canis familiaris
tttgctaagcagccaatcactttgg

SEQ ID NO: 201132 - DNA, 25 bp, Canis familiaris
tttgcacttttacctgtacagacag

SEQ ID NO: 201133 - DNA, 25 bp, Canis familiaris
tttacttttcgtattcacctgacct

SEQ ID NO: 201134 - DNA, 25 bp, Canis familiaris
tttgcatttatttgtctttccccat

SEQ ID NO: 201135 - DNA, 25 bp, Canis familiaris
tttcataaatagtccttgtcccctt

SEQ ID NO: 201136 - DNA, 25 bp, Canis familiaris
tttcctaatggctgtttcgcctcat

SEQ ID NO: 201137 - DNA, 25 bp, Canis familiaris
tttccacatttatttttctttcatg

SEQ ID NO: 201138 - DNA, 25 bp, Canis familiaris
tttgaactggtctttcattctttct

SEQ ID NO: 201139 - DNA, 25 bp, Canis familiaris
ttagcaacgtgtcttgactgcctgt

SEQ ID NO: 201140 - DNA, 25 bp, Canis familiaris
tttgcaagcgttcttctgagccttg

SEQ ID NO: 201141 - DNA, 25 bp, Canis familiaris
tttgacaaagatcctctctgacctt

SEQ ID NO: 201142 - DNA, 25 bp, Canis familiaris
tttgcatatgtaatccatcctgtac

SEQ ID NO: 201143 - DNA, 25 bp, Canis familiaris
tttccatatattggccctgctaaaa

SEQ ID NO: 201144 - DNA, 25 bp, Canis familiaris
tttccaaggtgcttcctgctgagta

SEQ ID NO: 201145 - DNA, 25 bp, Canis familiaris
tttgccaagtgtcatccttctttgg

SEQ ID NO: 201146 - DNA, 25 bp, Canis familiaris
tttgcaaagtgtttctccttggtgg

SEQ ID NO: 201147 - DNA, 25 bp, Canis familiaris
tttgaaagcactttcacctctggcc

SEQ ID NO: 201148 - DNA, 25 bp, Canis familiaris
tttatatagcaaattccctgggagc

SEQ ID NO: 201149 - DNA, 25 bp, Canis familiaris
tttcatctgcacaaatccccaggaa

SEQ ID NO: 201150 - DNA, 25 bp, Canis familiaris
tttccaggctaaacccaggcacagc

SEQ ID NO: 201151 - DNA, 25 bp, Canis familiaris
tttcagggccaacctgaaggcccca

SEQ ID NO: 201152 - DNA, 25 bp, Canis familiaris
ttataaataaaactgtaggccgcca

SEQ ID NO: 201153 - DNA, 25 bp, Canis familiaris
ttaaatttagaactgtgggccacca

SEQ ID NO: 201154 - DNA, 25 bp, Canis familiaris
tttaacttggaccttacccatccag

SEQ ID NO: 201155 - DNA, 25 bp, Canis familiaris
tttgaacttgaaatcttgaccctaa

SEQ ID NO: 201156 - DNA, 25 bp, Canis familiaris
tttgcatccttatttctgtatcgtc

SEQ ID NO: 201157 - DNA, 25 bp, Canis familiaris
tttgcatggggatttctgtaactca

SEQ ID NO: 201158 - DNA, 25 bp, Canis familiaris
tttctggtggtcttctgtctaaagg

SEQ ID NO: 201159 - DNA, 25 bp, Canis familiaris
tttctagatgtgtctcctgaggcaa

SEQ ID NO: 201160 - DNA, 25 bp, Canis familiaris
tttgctcacaggtctcttaatcaca

SEQ ID NO: 201161 - DNA, 25 bp, Canis familiaris
tttcgccatggactcctcaagatca

SEQ ID NO: 201162 - DNA, 25 bp, Canis familiaris
tttccctggactggtgcaagcagcc

SEQ ID NO: 201163 - DNA, 25 bp, Canis familiaris
tttcttctggaagctgccacaacgt

SEQ ID NO: 201164 - DNA, 25 bp, Canis familiaris
tttgcatttggaaggcgggcctcgt

SEQ ID NO: 201165 - DNA, 25 bp, Canis familiaris
tttgcttgtaacactgggttttatc

SEQ ID NO: 201166 - DNA, 25 bp, Canis familiaris
tttgcttgttacagttccttttctc

SEQ ID NO: 201167 - DNA, 25 bp, Canis familiaris
tttgcttgttttcttcatgccttta

SEQ ID NO: 201168 - DNA, 25 bp, Canis familiaris
tttctggatttactcatcctgcctt

SEQ ID NO: 201169 - DNA, 25 bp, Canis familiaris
tttctgtggataagctcccaccgct

SEQ ID NO: 201170 - DNA, 25 bp, Canis familiaris
tttatgtgtgatccttggccaccgt

SEQ ID NO: 201171 - DNA, 25 bp, Canis familiaris
tttcagagacatcctgctgcgagag

SEQ ID NO: 201172 - DNA, 25 bp, Canis familiaris
tttgcaggcaagcagctggaagatg

SEQ ID NO: 201173 - DNA, 25 bp, Canis familiaris
tttgcagtggcaaagtggagattgt

SEQ ID NO: 201174 - DNA, 25 bp, Canis familiaris
tttgcatgtggaccactgtcttatt

SEQ ID NO: 201175 - DNA, 25 bp, Canis familiaris
tttgcattgcgagttgtttgtagtt

SEQ ID NO: 201176 - DNA, 25 bp, Canis familiaris
tttgcttgcagagtggcttcctggc

SEQ ID NO: 201177 - DNA, 25 bp, Canis familiaris
tttctggaacatacttcactctgcc

SEQ ID NO: 201178 - DNA, 25 bp, Canis familiaris
tttctggaggcagtgctgtgccctc

SEQ ID NO: 201179 - DNA, 25 bp, Canis familiaris
tttgctctgagtggacaatcccctc

SEQ ID NO: 201180 - DNA, 25 bp, Canis familiaris
tttcctcagatagaactccagctcc

SEQ ID NO: 201181 - DNA, 25 bp, Canis familiaris
tttccgctataagaccaagcatcct

SEQ ID NO: 201182 - DNA, 25 bp, Canis familiaris
tttacccaaaaagaagcacctgagt

SEQ ID NO: 201183 - DNA, 25 bp, Canis familiaris
ttataccaacaatttctgaagcctc

SEQ ID NO: 201184 - DNA, 25 bp, Canis familiaris
tttaacaatcaattccaaccaccca

SEQ ID NO: 201185 - DNA, 25 bp, Canis familiaris
tttcaaaggccattttccacagccc

SEQ ID NO: 201186 - DNA, 25 bp, Canis familiaris
ttatcaaaactcttatctggccaac

SEQ ID NO: 201187 - DNA, 25 bp, Canis familiaris
ttaaaaagactttcagggatccctg

SEQ ID NO: 201188 - DNA, 25 bp, Canis familiaris
ttaaaaaagccaccgcgtacatcct

SEQ ID NO: 201189 - DNA, 25 bp, Canis familiaris
tttttagaagccacggaattgctaa

SEQ ID NO: 201190 - DNA, 25 bp, Canis familiaris
ttctggggacaccttcggattggaa

SEQ ID NO: 201191 - DNA, 25 bp, Canis familiaris
tttttgatgaccttgatcggttgga

SEQ ID NO: 201192 - DNA, 25 bp, Canis familiaris
tttactgagatttatatgagattta

SEQ ID NO: 201193 - DNA, 25 bp, Canis familiaris
tttactgtagtgtatgctgcattta

SEQ ID NO: 201194 - DNA, 25 bp, Canis familiaris
tttactttgctattgtgccctactc

SEQ ID NO: 201195 - DNA, 25 bp, Canis familiaris
ttatacttccaatgtacctagcata

SEQ ID NO: 201196 - DNA, 25 bp, Canis familiaris
tttacttcacgtttatatgctacag

SEQ ID NO: 201197 - DNA, 25 bp, Canis familiaris
tttccttttttttgcagctgacagc

SEQ ID NO: 201198 - DNA, 25 bp, Canis familiaris
tttcttttgttcatgtggaatgcag

SEQ ID NO: 201199 - DNA, 25 bp, Canis familiaris
tttcattttcccaccgttgcagaaa

SEQ ID NO: 201200 - DNA, 25 bp, Canis familiaris
tttgctttaaccagcatgccttcta

SEQ ID NO: 201201 - DNA, 25 bp, Canis familiaris
tttgctgttagcacttgagctccct

SEQ ID NO: 201202 - DNA, 25 bp, Canis familiaris
tttgctgcttagagctgttgcccaa

SEQ ID NO: 201203 - DNA, 25 bp, Canis familiaris
tttctccatagtgctttgcctgttg

SEQ ID NO: 201204 - DNA, 25 bp, Canis familiaris
tttctcctcagaagccattgtgcag

SEQ ID NO: 201205 - DNA, 25 bp, Canis familiaris
tttccccatgattgttttcagttaa

SEQ ID NO: 201206 - DNA, 25 bp, Canis familiaris
tttcctccatcttgttttagtgcac

SEQ ID NO: 201207 - DNA, 25 bp, Canis familiaris
tttcctcctctacttctatgagaca

SEQ ID NO: 201208 - DNA, 25 bp, Canis familiaris
tttgctcacctctaccgtaatgata

SEQ ID NO: 201209 - DNA, 25 bp, Canis familiaris
tttgctcacctctaccgtaatgata

SEQ ID NO: 201210 - DNA, 25 bp, Canis familiaris
tttgctcacctctactgtaatgata

SEQ ID NO: 201211 - DNA, 25 bp, Canis familiaris
tttgctcctatccgttcaatacaaa

SEQ ID NO: 201212 - DNA, 25 bp, Canis familiaris
tttgctgcctacttttgccttataa

SEQ ID NO: 201213 - DNA, 25 bp, Canis familiaris
tttgctctttccattctattctaaa

SEQ ID NO: 201214 - DNA, 25 bp, Canis familiaris
tttgcttttctgtgttttctaattt

SEQ ID NO: 201215 - DNA, 25 bp, Canis familiaris
tttgcttgtttgtttttggcttctt

SEQ ID NO: 201216 - DNA, 25 bp, Canis familiaris
tttgcttcgtctattttgtgttggt

SEQ ID NO: 201217 - DNA, 25 bp, Canis familiaris
tttgcttctgtcttttgttggggta

SEQ ID NO: 201218 - DNA, 25 bp, Canis familiaris
tttgccctttgtctgtgtgggtgtt

SEQ ID NO: 201219 - DNA, 25 bp, Canis familiaris
tttgcccaattttcttgttactgtt

SEQ ID NO: 201220 - DNA, 25 bp, Canis familiaris
tttccactttgtccattttactgtt

SEQ ID NO: 201221 - DNA, 25 bp, Canis familiaris
tttgccctttgtctctctatagggt

SEQ ID NO: 201222 - DNA, 25 bp, Canis familiaris
tttgccaatttttatccttagggat

SEQ ID NO: 201223 - DNA, 25 bp, Canis familiaris
tttctaagtttttgccctattgaag

SEQ ID NO: 201224 - DNA, 25 bp, Canis familiaris
tttgcatacatttttactctttaaa

SEQ ID NO: 201225 - DNA, 25 bp, Canis familiaris
tttgcatacatttttctttgtttaa

SEQ ID NO: 201226 - DNA, 25 bp, Canis familiaris
tttgcattattgtgtcatttttcta

SEQ ID NO: 201227 - DNA, 25 bp, Canis familiaris
tttgcttcggtcctatgtttgtgct

SEQ ID NO: 201228 - DNA, 25 bp, Canis familiaris
tttgcttccgtctttttttgtgagt

SEQ ID NO: 201229 - DNA, 25 bp, Canis familiaris
tttcttctcttcttttctagtaggt

SEQ ID NO: 201230 - DNA, 25 bp, Canis familiaris
tttctgcctttctgtttttcatgga

SEQ ID NO: 201231 - DNA, 25 bp, Canis familiaris
tttccctcacttccatttttgtgga

SEQ ID NO: 201232 - DNA, 25 bp, Canis familiaris
tttcccctcattattcttttgcaaa

SEQ ID NO: 201233 - DNA, 25 bp, Canis familiaris
tttgcccctttaattgtgtctcatc

SEQ ID NO: 201234 - DNA, 25 bp, Canis familiaris
tttgccaactgtactttcattctag

SEQ ID NO: 201235 - DNA, 25 bp, Canis familiaris
tttccaaattgccatgttctctcta

SEQ ID NO: 201236 - DNA, 25 bp, Canis familiaris
ttatctgcagattcatgtcattgtt

SEQ ID NO: 201237 - DNA, 25 bp, Canis familiaris
tttcagcatgaattgtcttgtggca

SEQ ID NO: 201238 - DNA, 25 bp, Canis familiaris
tttcagtgaacgtcctgtctcagtg

SEQ ID NO: 201239 - DNA, 25 bp, Canis familiaris
ttatcaggaacgcctcgatacgctg

SEQ ID NO: 201240 - DNA, 25 bp, Canis familiaris
tttcctgcaaggcctgcagtacctc

SEQ ID NO: 201241 - DNA, 25 bp, Canis familiaris
tttcctgaagctgccagaactcatc

SEQ ID NO: 201242 - DNA, 25 bp, Canis familiaris
tttaatggactgacgctggccttca

SEQ ID NO: 201243 - DNA, 25 bp, Canis familiaris
tttaatgcgggagctgcgatttaca

SEQ ID NO: 201244 - DNA, 25 bp, Canis familiaris
tttacattggacaccggtttcataa

SEQ ID NO: 201245 - DNA, 25 bp, Canis familiaris
tttcaattggtttccgataacctag

SEQ ID NO: 201246 - DNA, 25 bp, Canis familiaris
tttcaattgaggaaccacttgaccg

SEQ ID NO: 201247 - DNA, 25 bp, Canis familiaris
tttcaacgatggatccattggaggg

SEQ ID NO: 201248 - DNA, 25 bp, Canis familiaris
tttccctgtgaactctcagctggag

SEQ ID NO: 201249 - DNA, 25 bp, Canis familiaris
tttccgtgttggtctcattgtgata

SEQ ID NO: 201250 - DNA, 25 bp, Canis familiaris
tttgccttgttggtgcttgtggtga

SEQ ID NO: 201251 - DNA, 25 bp, Canis familiaris
tttcctgctgcatatctgttgggga

SEQ ID NO: 201252 - DNA, 25 bp, Canis familiaris
tttcctctgcacacaatgtggccgc

SEQ ID NO: 201253 - DNA, 25 bp, Canis familiaris
tttccctgagaaactgtgctgcctc

SEQ ID NO: 201254 - DNA, 25 bp, Canis familiaris
tttccagctggatttttctccatag

SEQ ID NO: 201255 - DNA, 25 bp, Canis familiaris
tttgccagcaatgtctctttctaat

SEQ ID NO: 201256 - DNA, 25 bp, Canis familiaris
tttcctgcaatttctatttcataca

SEQ ID NO: 201257 - DNA, 25 bp, Canis familiaris
tttcctgcaatttctatttcataca

SEQ ID NO: 201258 - DNA, 25 bp, Canis familiaris
tttctctgccagtatctaattctaa

SEQ ID NO: 201259 - DNA, 25 bp, Canis familiaris
tttcccagaggatcaattgtcaagt

SEQ ID NO: 201260 - DNA, 25 bp, Canis familiaris
ttatcccacgaaaggtctccaagtc

SEQ ID NO: 201261 - DNA, 25 bp, Canis familiaris
tttcccacaggcaaagcctccagga

SEQ ID NO: 201262 - DNA, 25 bp, Canis familiaris
ttcactggaccgaaacaccttggaa

SEQ ID NO: 201263 - DNA, 25 bp, Canis familiaris
ttagttaccgaatcaacttcgtgaa

SEQ ID NO: 201264 - DNA, 25 bp, Canis familiaris
ttagttgacccataaagttccaggg

SEQ ID NO: 201265 - DNA, 25 bp, Canis familiaris
ttttctacccaagaacatttcacga

SEQ ID NO: 201266 - DNA, 25 bp, Canis familiaris
ttttctaaaaaggactattatcagt

SEQ ID NO: 201267 - DNA, 25 bp, Canis familiaris
tttcactaatattgactacaaatta

SEQ ID NO: 201268 - DNA, 25 bp, Canis familiaris
tttgcccaaagccacatacacacat

SEQ ID NO: 201269 - DNA, 25 bp, Canis familiaris
tttcccagagtgcattccagatcat

SEQ ID NO: 201270 - DNA, 25 bp, Canis familiaris
tttcccaagtgttttcagtcgtgca

SEQ ID NO: 201271 - DNA, 25 bp, Canis familiaris
ttcttccaagttctccagaccgaga

SEQ ID NO: 201272 - DNA, 25 bp, Canis familiaris
ttttccaggcttctccagtaacgat

SEQ ID NO: 201273 - DNA, 25 bp, Canis familiaris
ttccccaggaattaccagttactat

SEQ ID NO: 201274 - DNA, 25 bp, Canis familiaris
ttccccgaatatgaacttctccttc

SEQ ID NO: 201275 - DNA, 25 bp, Canis familiaris
ttcctttcaaagccaacttctcagt

SEQ ID NO: 201276 - DNA, 25 bp, Canis familiaris
tttcttgttacacaactgctccagc

SEQ ID NO: 201277 - DNA, 25 bp, Canis familiaris
tttctgtgttacatctacttccatg

SEQ ID NO: 201278 - DNA, 25 bp, Canis familiaris
tttgcctttgacatttcttttggaa

SEQ ID NO: 201279 - DNA, 25 bp, Canis familiaris
tttgcctcttgatgttatttcttta

SEQ ID NO: 201280 - DNA, 25 bp, Canis familiaris
tttcctccataatttttgatttcta

SEQ ID NO: 201281 - DNA, 25 bp, Canis familiaris
tttcctctcatatttactatgtatt

SEQ ID NO: 201282 - DNA, 25 bp, Canis familiaris
tttccttttttgtctatgaagttgc

SEQ ID NO: 201283 - DNA, 25 bp, Canis familiaris
tttccttttttgtctatgaagttgc

SEQ ID NO: 201284 - DNA, 25 bp, Canis familiaris
tttcctttttctggcattgcctttt

SEQ ID NO: 201285 - DNA, 25 bp, Canis familiaris
tttcctttctttttatctcattgag

SEQ ID NO: 201286 - DNA, 25 bp, Canis familiaris
tttcctgttcatacatttgtgctgc

SEQ ID NO: 201287 - DNA, 25 bp, Canis familiaris
tttccatttgctccatttgcacttg

SEQ ID NO: 201288 - DNA, 25 bp, Canis familiaris
tttctatgtgttgcaaagcctgtga

SEQ ID NO: 201289 - DNA, 25 bp, Canis familiaris
tttctttggcttgtgactctgtggc

SEQ ID NO: 201290 - DNA, 25 bp, Canis familiaris
tttcgttgatgatttcgtctctgtg

SEQ ID NO: 201291 - DNA, 25 bp, Canis familiaris
tttctgttcttttctgttcatgtgc

SEQ ID NO: 201292 - DNA, 25 bp, Canis familiaris
tttccttcttgttatctcattgagc

SEQ ID NO: 201293 - DNA, 25 bp, Canis familiaris
tttccccctgtttctcatatataag

SEQ ID NO: 201294 - DNA, 25 bp, Canis familiaris
tttccttcgtgcttactttctaagt

SEQ ID NO: 201295 - DNA, 25 bp, Canis familiaris
tttcctatagctgtcctttgtgaac

SEQ ID NO: 201296 - DNA, 25 bp, Canis familiaris
tttccaatacccactgttgtctaat

SEQ ID NO: 201297 - DNA, 25 bp, Canis familiaris
ttttattcccacaaaaatgtctaat

SEQ ID NO: 201298 - DNA, 25 bp, Canis familiaris
tttctttcgacgtaagacttgtaca

SEQ ID NO: 201299 - DNA, 25 bp, Canis familiaris
tttgctcttctaaaagggtctttca

SEQ ID NO: 201300 - DNA, 25 bp, Canis familiaris
ttttcaactactggtcggtcttaca

SEQ ID NO: 201301 - DNA, 25 bp, Canis familiaris
tttctcaggacggttctggtttata

SEQ ID NO: 201302 - DNA, 25 bp, Canis familiaris
tttccgatgactcttgtgcgtgtaa

SEQ ID NO: 201303 - DNA, 25 bp, Canis familiaris
tttcctgctggtctgtggagctgta

SEQ ID NO: 201304 - DNA, 25 bp, Canis familiaris
tttcgctctggtgaatgcatgttct

SEQ ID NO: 201305 - DNA, 25 bp, Canis familiaris
tttatgcctgggccataactgctca

SEQ ID NO: 201306 - DNA, 25 bp, Canis familiaris
tttcatgcaagtgcctaacatcgca

SEQ ID NO: 201307 - DNA, 25 bp, Canis familiaris
tttcatgccagtgcctaacatcgca

SEQ ID NO: 201308 - DNA, 25 bp, Canis familiaris
tttctccaatactaatatatctgca

SEQ ID NO: 201309 - DNA, 25 bp, Canis familiaris
tttcttaaactaaagcatgtatttt

SEQ ID NO: 201310 - DNA, 25 bp, Canis familiaris
tttttatcgcatcagaagcattttt

SEQ ID NO: 201311 - DNA, 25 bp, Canis familiaris
tttaaaggctgtccaagcattttta

SEQ ID NO: 201312 - DNA, 25 bp, Canis familiaris
tttacagaagttaccaggtttatag

SEQ ID NO: 201313 - DNA, 25 bp, Canis familiaris
tttaagtatttcagcaggatctgct

SEQ ID NO: 201314 - DNA, 25 bp, Canis familiaris
tttacagcgtgttattaggtgcctc

SEQ ID NO: 201315 - DNA, 25 bp, Canis familiaris
tttagcagtgttaacttggtgtgtt

SEQ ID NO: 201316 - DNA, 25 bp, Canis familiaris
tttcggctgttaattctggtttttg

SEQ ID NO: 201317 - DNA, 25 bp, Canis familiaris
tttcaggctttctttttgggtattg

SEQ ID NO: 201318 - DNA, 25 bp, Canis familiaris
tttctgtgcgttcttgcttggattg

SEQ ID NO: 201319 - DNA, 25 bp, Canis familiaris
tttgctgttgtcatcttgtttggta

SEQ ID NO: 201320 - DNA, 25 bp, Canis familiaris
tttctgattgtttctaattctacta

SEQ ID NO: 201321 - DNA, 25 bp, Canis familiaris
tttcttttttcataattcctacaca

SEQ ID NO: 201322 - DNA, 25 bp, Canis familiaris
tttctcttccagcaaatttaaacgc

SEQ ID NO: 201323 - DNA, 25 bp, Canis familiaris
tttccattcaagcaactgttatctg

SEQ ID NO: 201324 - DNA, 25 bp, Canis familiaris
tttctgcacccacggaggttttggt

SEQ ID NO: 201325 - DNA, 25 bp, Canis familiaris
tttcccccacgtaggtccatgtggg

SEQ ID NO: 201326 - DNA, 25 bp, Canis familiaris
tttgcccccctgaaggtggtaagca

SEQ ID NO: 201327 - DNA, 25 bp, Canis familiaris
tttctccaccacagagggaaacaca

SEQ ID NO: 201328 - DNA, 25 bp, Canis familiaris
tttgcccaatccttgcagagaaaac

SEQ ID NO: 201329 - DNA, 25 bp, Canis familiaris
tttcctcttccagtcaacaaaacgg

SEQ ID NO: 201330 - DNA, 25 bp, Canis familiaris
tttgcgtctttctcccagagagaca

SEQ ID NO: 201331 - DNA, 25 bp, Canis familiaris
tttagtccttcatcttcgttggcaa

SEQ ID NO: 201332 - DNA, 25 bp, Canis familiaris
ttaagtccttttatcgtatcaggaa

SEQ ID NO: 201333 - DNA, 25 bp, Canis familiaris
tttagggtttgtctcattactggaa

SEQ ID NO: 201334 - DNA, 25 bp, Canis familiaris
ttatggggttaccgtttgccctgag

SEQ ID NO: 201335 - DNA, 25 bp, Canis familiaris
tttaaagttaatgtctagcccagag

SEQ ID NO: 201336 - DNA, 25 bp, Canis familiaris
ttttctgactcttggggtacccagg

SEQ ID NO: 201337 - DNA, 25 bp, Canis familiaris
tttttaattggtgttacctcaggat

SEQ ID NO: 201338 - DNA, 25 bp, Canis familiaris
tttttttaagatgataaccaagaga

SEQ ID NO: 201339 - DNA, 25 bp, Canis familiaris
tttttttaattggatctcgggaatg

SEQ ID NO: 201340 - DNA, 25 bp, Canis familiaris
tttttttaatggtttgttggcagca

SEQ ID NO: 201341 - DNA, 25 bp, Canis familiaris
tttcgtttaattttggatctctaga

SEQ ID NO: 201342 - DNA, 25 bp, Canis familiaris
tttcctttaatctgttcatccatca

SEQ ID NO: 201343 - DNA, 25 bp, Canis familiaris
tttcctatctaaatcgttccttaat

SEQ ID NO: 201344 - DNA, 25 bp, Canis familiaris
tttcggactattgcgctttgttcaa

SEQ ID NO: 201345 - DNA, 25 bp, Canis familiaris
tttgcccctttgggtttttcagatg

SEQ ID NO: 201346 - DNA, 25 bp, Canis familiaris
tttccctccactgctgttaattagt

SEQ ID NO: 201347 - DNA, 25 bp, Canis familiaris
tttcctctccactttttttgatatc

SEQ ID NO: 201348 - DNA, 25 bp, Canis familiaris
tttccccgacaacgtctgatcgata

SEQ ID NO: 201349 - DNA, 25 bp, Canis familiaris
tttcaccccaaaacatctcctgaat

SEQ ID NO: 201350 - DNA, 25 bp, Canis familiaris
tttctccccagaatacactttcaag

SEQ ID NO: 201351 - DNA, 25 bp, Canis familiaris
tttctcccacaaaagccagttactg

SEQ ID NO: 201352 - DNA, 25 bp, Canis familiaris
tttcgcgccccaagagcaagaatac

SEQ ID NO: 201353 - DNA, 25 bp, Canis familiaris
tttcagctcccctggcaataataat

SEQ ID NO: 201354 - DNA, 25 bp, Canis familiaris
tttccagcccactgccaataaacaa

SEQ ID NO: 201355 - DNA, 25 bp, Canis familiaris
tttccccctgcttgccaaaaaaatg

SEQ ID NO: 201356 - DNA, 25 bp, Canis familiaris
tttcctttgcctcccagagagatga

SEQ ID NO: 201357 - DNA, 25 bp, Canis familiaris
tttgcctttcctctccaagaggaca

SEQ ID NO: 201358 - DNA, 25 bp, Canis familiaris
ttttttccaccacccaatgggactg

SEQ ID NO: 201359 - DNA, 25 bp, Canis familiaris
ttttttccagaacctcagtggtcca

SEQ ID NO: 201360 - DNA, 25 bp, Canis familiaris
tttcccccaggacgaaagagtctca

SEQ ID NO: 201361 - DNA, 25 bp, Canis familiaris
tttccccaagaccaaactgaggctg

SEQ ID NO: 201362 - DNA, 25 bp, Canis familiaris
tttccccaagggttgaatgttgcta

SEQ ID NO: 201363 - DNA, 25 bp, Canis familiaris
tttctccaacaggggtgatataatc

SEQ ID NO: 201364 - DNA, 25 bp, Canis familiaris
tttctccgacaggggtgatatgatc

SEQ ID NO: 201365 - DNA, 25 bp, Canis familiaris
tttcccgagaggctgacaatgttaa

SEQ ID NO: 201366 - DNA, 25 bp, Canis familiaris
tttccctgaaagtgcccatctaata

SEQ ID NO: 201367 - DNA, 25 bp, Canis familiaris
tttacctaattaccgccaataatca

SEQ ID NO: 201368 - DNA, 25 bp, Canis familiaris
tttaattaactccaccagaaacata

SEQ ID NO: 201369 - DNA, 25 bp, Canis familiaris
tttaaattcactgcaccacaatcca

SEQ ID NO: 201370 - DNA, 25 bp, Canis familiaris
tttctaagtcaaccaccgactccaa

SEQ ID NO: 201371 - DNA, 25 bp, Canis familiaris
ttttaaataaacatctgactctaaa

SEQ ID NO: 201372 - DNA, 25 bp, Canis familiaris
tttaaactacaacttctgaatctta

SEQ ID NO: 201373 - DNA, 25 bp, Canis familiaris
tttaccttacagaccattattggga

SEQ ID NO: 201374 - DNA, 25 bp, Canis familiaris
tttccctctgatttccagctttggg

SEQ ID NO: 201375 - DNA, 25 bp, Canis familiaris
tttaaccagcattctccgctgttgg

SEQ ID NO: 201376 - DNA, 25 bp, Canis familiaris
tttcacaccagttacccagtgctga

SEQ ID NO: 201377 - DNA, 25 bp, Canis familiaris
tttaaacgttgaccctgatgctaag

SEQ ID NO: 201378 - DNA, 25 bp, Canis familiaris
tttaaactttcgcccagatgcctag

SEQ ID NO: 201379 - DNA, 25 bp, Canis familiaris
ttataaagatttttggagctgcact

SEQ ID NO: 201380 - DNA, 25 bp, Canis familiaris
ttcaaaggcccctggagtgactgtc

SEQ ID NO: 201381 - DNA, 25 bp, Canis familiaris
tttaaggcaactgggtggctcaatt

SEQ ID NO: 201382 - DNA, 25 bp, Canis familiaris
tttagaagccacggaattgctaagt

SEQ ID NO: 201383 - DNA, 25 bp, Canis familiaris
tttatggatccatgagagacagaga

SEQ ID NO: 201384 - DNA, 25 bp, Canis familiaris
tttctgtgacactctggagagagca

SEQ ID NO: 201385 - DNA, 25 bp, Canis familiaris
ttctttacatcggcggggacgggag

SEQ ID NO: 201386 - DNA, 25 bp, Canis familiaris
tttccttgccccagtggattgtgta

SEQ ID NO: 201387 - DNA, 25 bp, Canis familiaris
tttccctccctatcttgaggtgtac

SEQ ID NO: 201388 - DNA, 25 bp, Canis familiaris
tttcgacccttttcgtgaggtgtag

SEQ ID NO: 201389 - DNA, 25 bp, Canis familiaris
tttctactcctctgacgaatgggta

SEQ ID NO: 201390 - DNA, 25 bp, Canis familiaris
tttccttctctctccgaagagtgta

SEQ ID NO: 201391 - DNA, 25 bp, Canis familiaris
tttcctcacttctccaaggatgtgg

SEQ ID NO: 201392 - DNA, 25 bp, Canis familiaris
tttcctcaattcttaaatctttggg

SEQ ID NO: 201393 - DNA, 25 bp, Canis familiaris
tttcctcaattcaattcaattccgg

SEQ ID NO: 201394 - DNA, 25 bp, Canis familiaris
tttcgatcaattccttatttgccaa

SEQ ID NO: 201395 - DNA, 25 bp, Canis familiaris
tttcgagactcgctcagttagccaa

SEQ ID NO: 201396 - DNA, 25 bp, Canis familiaris
tttcgagcctggccatagttagaaa

SEQ ID NO: 201397 - DNA, 25 bp, Canis familiaris
tttcccctaccttgttcagaagagt

SEQ ID NO: 201398 - DNA, 25 bp, Canis familiaris
ttttcccctgcagtggttaagagta

SEQ ID NO: 201399 - DNA, 25 bp, Canis familiaris
tttcacccatctcggaattccaggt

SEQ ID NO: 201400 - DNA, 25 bp, Canis familiaris
tttccccactctagagttccaagat

SEQ ID NO: 201401 - DNA, 25 bp, Canis familiaris
tttccccaatgtagggttcaccctg

SEQ ID NO: 201402 - DNA, 25 bp, Canis familiaris
tttccctctgcattagggtttctca

SEQ ID NO: 201403 - DNA, 25 bp, Canis familiaris
tttccttatggaatctgttttcttt

SEQ ID NO: 201404 - DNA, 25 bp, Canis familiaris
tttccttcttcaagattttctcttt

SEQ ID NO: 201405 - DNA, 25 bp, Canis familiaris
tttcccatctttgtttactgcattt

SEQ ID NO: 201406 - DNA, 25 bp, Canis familiaris
tttcccactcttgtttcacatgtaa

SEQ ID NO: 201407 - DNA, 25 bp, Canis familiaris
tttcaccaccataggttctacctca

SEQ ID NO: 201408 - DNA, 25 bp, Canis familiaris
tttaccacctgaaacttgctgcttc

SEQ ID NO: 201409 - DNA, 25 bp, Canis familiaris
tttaccaacatgcccacagatcaat

SEQ ID NO: 201410 - DNA, 25 bp, Canis familiaris
tttacacaatgcacacaagacctta

SEQ ID NO: 201411 - DNA, 25 bp, Canis familiaris
ttttacaagagggcaggacctgctt

SEQ ID NO: 201412 - DNA, 25 bp, Canis familiaris
tttcccaaacagaccagacctttag

SEQ ID NO: 201413 - DNA, 25 bp, Canis familiaris
tttcccgtatggaccagaccgtgga

SEQ ID NO: 201414 - DNA, 25 bp, Canis familiaris
tttccccagtgttcgagacctggca

SEQ ID NO: 201415 - DNA, 25 bp, Canis familiaris
tttcgcctcttgttctagacggagc

SEQ ID NO: 201416 - DNA, 25 bp, Canis familiaris
tttctctcctcgtgctagacgaatg

SEQ ID NO: 201417 - DNA, 25 bp, Canis familiaris
tttcctcgccgtacatagatcttaa

SEQ ID NO: 201418 - DNA, 25 bp, Canis familiaris
tttctccagaactactcgtgcttta

SEQ ID NO: 201419 - DNA, 25 bp, Canis familiaris
ttccggcagaacgcatccactttca

SEQ ID NO: 201420 - DNA, 25 bp, Canis familiaris
tttccggcagaacgcatccactttc

SEQ ID NO: 201421 - DNA, 25 bp, Canis familiaris
tttccattcaaaggcactctctgtg

SEQ ID NO: 201422 - DNA, 25 bp, Canis familiaris
ttctctttcaagacgagccctacta

SEQ ID NO: 201423 - DNA, 25 bp, Canis familiaris
tttcttctagggcactcttactgag

SEQ ID NO: 201424 - DNA, 25 bp, Canis familiaris
ttttctaagaggaccctgaactggg

SEQ ID NO: 201425 - DNA, 25 bp, Canis familiaris
ttttaacgagggtcctgaagctggt

SEQ ID NO: 201426 - DNA, 25 bp, Canis familiaris
ttttgagacgtcagcaccggacttt

SEQ ID NO: 201427 - DNA, 25 bp, Canis familiaris
ttcttggtttctgggctttaactct

SEQ ID NO: 201428 - DNA, 25 bp, Canis familiaris
tttctaatcttctgcctatctaatt

SEQ ID NO: 201429 - DNA, 25 bp, Canis familiaris
tttctgacactttcacttttgcaga

SEQ ID NO: 201430 - DNA, 25 bp, Canis familiaris
tttctatactgtggcctgtttccgt

SEQ ID NO: 201431 - DNA, 25 bp, Canis familiaris
tttccatcctgtggtttttctaatg

SEQ ID NO: 201432 - DNA, 25 bp, Canis familiaris
tttccaggaggccttttcactgttt

SEQ ID NO: 201433 - DNA, 25 bp, Canis familiaris
tttccagtgaaatattatccttgtt

SEQ ID NO: 201434 - DNA, 25 bp, Canis familiaris
tttactgtaaatgtttcactttcct

SEQ ID NO: 201435 - DNA, 25 bp, Canis familiaris
tttccttaaactgagatcaccccct

SEQ ID NO: 201436 - DNA, 25 bp, Canis familiaris
ttccctgtgaaaccgagaatcccat

SEQ ID NO: 201437 - DNA, 25 bp, Canis familiaris
tttctttccaactgcagcagtccca

SEQ ID NO: 201438 - DNA, 25 bp, Canis familiaris
tttcatattctctcggcgacattcc

SEQ ID NO: 201439 - DNA, 25 bp, Canis familiaris
tttcctctccaagaggacaatcatc

SEQ ID NO: 201440 - DNA, 25 bp, Canis familiaris
tttccttccacattaggcagataca

SEQ ID NO: 201441 - DNA, 25 bp, Canis familiaris
tttcctacctcttgggagaatcagc

SEQ ID NO: 201442 - DNA, 25 bp, Canis familiaris
tttcctacctcatgggggtgtctgt

SEQ ID NO: 201443 - DNA, 25 bp, Canis familiaris
tttctccagccctaggatggggtgg

SEQ ID NO: 201444 - DNA, 25 bp, Canis familiaris
tttcccctgccagggtgtgaggtgc

SEQ ID NO: 201445 - DNA, 25 bp, Canis familiaris
tttccacgccagggtctgtgtgggc

SEQ ID NO: 201446 - DNA, 25 bp, Canis familiaris
tttccatcctcggttgtgttgttgc

SEQ ID NO: 201447 - DNA, 25 bp, Canis familiaris
tttctctcctcagtggtgtttgctg

SEQ ID NO: 201448 - DNA, 25 bp, Canis familiaris
tttactcctgctggcttgtattgag

SEQ ID NO: 201449 - DNA, 25 bp, Canis familiaris
tttacacctctccaatgtgttgacc

SEQ ID NO: 201450 - DNA, 25 bp, Canis familiaris
tttcccttctgagcatttattccaa

SEQ ID NO: 201451 - DNA, 25 bp, Canis familiaris
tttctgtcttgttaattttccccat

SEQ ID NO: 201452 - DNA, 25 bp, Canis familiaris
tttcagtgttgcatttttgcccacc

SEQ ID NO: 201453 - DNA, 25 bp, Canis familiaris
tttctgtgtcacattcttatgccct

SEQ ID NO: 201454 - DNA, 25 bp, Canis familiaris
tttctgatttccctgatttccagct

SEQ ID NO: 201455 - DNA, 25 bp, Canis familiaris
tttctgctttcaccagtcatccaaa

SEQ ID NO: 201456 - DNA, 25 bp, Canis familiaris
tttctgttgtgacagacacctcaca

SEQ ID NO: 201457 - DNA, 25 bp, Canis familiaris
tttcatctctgtgctacagacctcc

SEQ ID NO: 201458 - DNA, 25 bp, Canis familiaris
tttcatctcggctttgagactttat

SEQ ID NO: 201459 - DNA, 25 bp, Canis familiaris
tttattcggctctgagttgacccca

SEQ ID NO: 201460 - DNA, 25 bp, Canis familiaris
ttttttggccaggtgtggggcctca

SEQ ID NO: 201461 - DNA, 25 bp, Canis familiaris
tttattcgtgtacttgaggggccca

SEQ ID NO: 201462 - DNA, 25 bp, Canis familiaris
tttagtggtcttctggagttctcgc

SEQ ID NO: 201463 - DNA, 25 bp, Canis familiaris
tttcatgctggtgacctggcgttgt

SEQ ID NO: 201464 - DNA, 25 bp, Canis familiaris
tttcttttctagcctgcactttgat

SEQ ID NO: 201465 - DNA, 25 bp, Canis familiaris
tttctagacttgtgctgatcgtgct

SEQ ID NO: 201466 - DNA, 25 bp, Canis familiaris
tttcttgaattctgtgccattgcca

SEQ ID NO: 201467 - DNA, 25 bp, Canis familiaris
tttcgtttctctttgacttccaata

SEQ ID NO: 201468 - DNA, 25 bp, Canis familiaris
tttcgctgggttttatctctctcga

SEQ ID NO: 201469 - DNA, 25 bp, Canis familiaris
tttctgtgggttgtcatcaagcagt

SEQ ID NO: 201470 - DNA, 25 bp, Canis familiaris
ttaggttggttccttcaacaggcct

SEQ ID NO: 201471 - DNA, 25 bp, Canis familiaris
ttaattagagttggttaagcaaccg

SEQ ID NO: 201472 - DNA, 25 bp, Canis familiaris
tttttagactgtattaagaaacacg

SEQ ID NO: 201473 - DNA, 25 bp, Canis familiaris
tttcttacactttgctataaaaatc

SEQ ID NO: 201474 - DNA, 25 bp, Canis familiaris
tttcctgggctcacctcaaaaatat

SEQ ID NO: 201475 - DNA, 25 bp, Canis familiaris
ttccctggtctaaccttactcagta

SEQ ID NO: 201476 - DNA, 25 bp, Canis familiaris
tttcctgtcgtaacactaactagcc

SEQ ID NO: 201477 - DNA, 25 bp, Canis familiaris
tttctcctcttaacaaatactatga

SEQ ID NO: 201478 - DNA, 25 bp, Canis familiaris
tttctccactttaaaaaattatgca

SEQ ID NO: 201479 - DNA, 25 bp, Canis familiaris
ttttccactttatatcaagagttgt

SEQ ID NO: 201480 - DNA, 25 bp, Canis familiaris
tttctccccttattgtcaagtgttt

SEQ ID NO: 201481 - DNA, 25 bp, Canis familiaris
tttctcccctctttctaagagacct

SEQ ID NO: 201482 - DNA, 25 bp, Canis familiaris
tttccaggcctattttcagttccct

SEQ ID NO: 201483 - DNA, 25 bp, Canis familiaris
ttttgcaggccttgttgatagtatg

SEQ ID NO: 201484 - DNA, 25 bp, Canis familiaris
ttttagcttgtggatcttcagattg

SEQ ID NO: 201485 - DNA, 25 bp, Canis familiaris
ttttgtggtggcatcctatgttccg

SEQ ID NO: 201486 - DNA, 25 bp, Canis familiaris
ttttggataggatcccagatcatcc

SEQ ID NO: 201487 - DNA, 25 bp, Canis familiaris
tttagtgaaaatccctcatccaccc

SEQ ID NO: 201488 - DNA, 25 bp, Canis familiaris
tttacagaacacatcccaatcacct

SEQ ID NO: 201489 - DNA, 25 bp, Canis familiaris
ttcgacaaaaccaacaaatcttatt

SEQ ID NO: 201490 - DNA, 25 bp, Canis familiaris
tttacgtacaccactacatgctcta

SEQ ID NO: 201491 - DNA, 25 bp, Canis familiaris
tttacttaaatacgcataattcaga

SEQ ID NO: 201492 - DNA, 25 bp, Canis familiaris
tttcacttaatcaccctttcaacga

SEQ ID NO: 201493 - DNA, 25 bp, Canis familiaris
tttacctgaataacgccattaatca

SEQ ID NO: 201494 - DNA, 25 bp, Canis familiaris
tttccctgcctaagcctttgaatta

SEQ ID NO: 201495 - DNA, 25 bp, Canis familiaris
ttttactaccatagcctttttgtat

SEQ ID NO: 201496 - DNA, 25 bp, Canis familiaris
tttaatcttgcccacctttttgtgg

SEQ ID NO: 201497 - DNA, 25 bp, Canis familiaris
tttccatctctctgactttttttgg

SEQ ID NO: 201498 - DNA, 25 bp, Canis familiaris
tttcctctctgtggcagtttcatat

SEQ ID NO: 201499 - DNA, 25 bp, Canis familiaris
tttccctcttgctgtctgatgataa

SEQ ID NO: 201500 - DNA, 25 bp, Canis familiaris
tttcccattcattccctacatagaa

SEQ ID NO: 201501 - DNA, 25 bp, Canis familiaris
tttcagcctctcaagccaaaatatg

SEQ ID NO: 201502 - DNA, 25 bp, Canis familiaris
tttagccttgctcggcaagtagatg

SEQ ID NO: 201503 - DNA, 25 bp, Canis familiaris
tttagttttgcaccttgtcagatgt

SEQ ID NO: 201504 - DNA, 25 bp, Canis familiaris
tttcatgttcttaccggtcggatag

SEQ ID NO: 201505 - DNA, 25 bp, Canis familiaris
tttcagttcttgccccgaaggcata

SEQ ID NO: 201506 - DNA, 25 bp, Canis familiaris
tttagattccaccgtggaaggaaag

SEQ ID NO: 201507 - DNA, 25 bp, Canis familiaris
tttaacgccacgctgtcaagtgaag

SEQ ID NO: 201508 - DNA, 25 bp, Canis familiaris
tttacccgcactcttcaaagcagcg

SEQ ID NO: 201509 - DNA, 25 bp, Canis familiaris
tttacgcccttctttcacataagag

SEQ ID NO: 201510 - DNA, 25 bp, Canis familiaris
tttacgccgctttctgacactttca

SEQ ID NO: 201511 - DNA, 25 bp, Canis familiaris
tttctccagcttaacttcacttagc

SEQ ID NO: 201512 - DNA, 25 bp, Canis familiaris
tttcctcggtacctgtcacagagag

SEQ ID NO: 201513 - DNA, 25 bp, Canis familiaris
tttaccctgtcccgacacaggaggt

SEQ ID NO: 201514 - DNA, 25 bp, Canis familiaris
tttacccgtccagtgcacagacggc

SEQ ID NO: 201515 - DNA, 25 bp, Canis familiaris
ttgttaccaactgggacgacatgga

SEQ ID NO: 201516 - DNA, 25 bp, Canis familiaris
tttatcaccatctttggaacacgaa

SEQ ID NO: 201517 - DNA, 25 bp, Canis familiaris
tttactctgcaccaggctaaactga

SEQ ID NO: 201518 - DNA, 25 bp, Canis familiaris
tttccttctctgttctgaagtctga

SEQ ID NO: 201519 - DNA, 25 bp, Canis familiaris
tttctacgctctcactacagtatga

SEQ ID NO: 201520 - DNA, 25 bp, Canis familiaris
tttccgccatctcagtcatcagggt

SEQ ID NO: 201521 - DNA, 25 bp, Canis familiaris
tttccgacatatcttctggggctct

SEQ ID NO: 201522 - DNA, 25 bp, Canis familiaris
ttatcccaccatttcgggagtcatt

SEQ ID NO: 201523 - DNA, 25 bp, Canis familiaris
tttcttagcacatttcttaggatta

SEQ ID NO: 201524 - DNA, 25 bp, Canis familiaris
tttcacaaccacacttatggaatgt

SEQ ID NO: 201525 - DNA, 25 bp, Canis familiaris
tttcctccaccaactttgagcaagg

SEQ ID NO: 201526 - DNA, 25 bp, Canis familiaris
tttccctccctaatttatcaagaga

SEQ ID NO: 201527 - DNA, 25 bp, Canis familiaris
ttttccccctagcaagtcattaaca

SEQ ID NO: 201528 - DNA, 25 bp, Canis familiaris
tttatcccccttagaggttgtagag

SEQ ID NO: 201529 - DNA, 25 bp, Canis familiaris
ttttgtccccaatgggcttgccaaa

SEQ ID NO: 201530 - DNA, 25 bp, Canis familiaris
tttttctcaacctctgtttggaata

SEQ ID NO: 201531 - DNA, 25 bp, Canis familiaris
tttcttctaataatccgttcgtaag

SEQ ID NO: 201532 - DNA, 25 bp, Canis familiaris
tttcttctaatttgtcgtttgttca

SEQ ID NO: 201533 - DNA, 25 bp, Canis familiaris
tttctttatatttccgtttgtgtca

SEQ ID NO: 201534 - DNA, 25 bp, Canis familiaris
tttctatattttcatcgtcttttca

SEQ ID NO: 201535 - DNA, 25 bp, Canis familiaris
tttaatcttattcacccattttatt

SEQ ID NO: 201536 - DNA, 25 bp, Canis familiaris
tttcttcctataaacctgcctttag

SEQ ID NO: 201537 - DNA, 25 bp, Canis familiaris
tttccctcattaatatctgcctttg

SEQ ID NO: 201538 - DNA, 25 bp, Canis familiaris
tttcatcttcacaaaaatgccattt

SEQ ID NO: 201539 - DNA, 25 bp, Canis familiaris
tttctcccccacaagagctgatatt

SEQ ID NO: 201540 - DNA, 25 bp, Canis familiaris
tttctccccaccgaggatgacatta

SEQ ID NO: 201541 - DNA, 25 bp, Canis familiaris
tttcttcgccactcaggaagtgctg

SEQ ID NO: 201542 - DNA, 25 bp, Canis familiaris
tttactgagcccttcacggatactc

SEQ ID NO: 201543 - DNA, 25 bp, Canis familiaris
tttcactcaccttcaccagagattt

SEQ ID NO: 201544 - DNA, 25 bp, Canis familiaris
tttaaacgtgcagccagcagcatgc

SEQ ID NO: 201545 - DNA, 25 bp, Canis familiaris
tttaaagcttcagctgcctcatctg

SEQ ID NO: 201546 - DNA, 25 bp, Canis familiaris
tttatcacagtgagcatcccttcgt

SEQ ID NO: 201547 - DNA, 25 bp, Canis familiaris
tttagagggtgattccacctcgatg

SEQ ID NO: 201548 - DNA, 25 bp, Canis familiaris
tttacagacgttacctcactcaatc

SEQ ID NO: 201549 - DNA, 25 bp, Canis familiaris
ttggaggcgcagtttcgaaccaacg

SEQ ID NO: 201550 - DNA, 25 bp, Canis familiaris
tttagggagaacagagaccaccgcc

SEQ ID NO: 201551 - DNA, 25 bp, Canis familiaris
tttttaggagactgccaccattccc

SEQ ID NO: 201552 - DNA, 25 bp, Canis familiaris
ttatttaaaagtagcaccactttca

SEQ ID NO: 201553 - DNA, 25 bp, Canis familiaris
ttttcatttgaagtatcccctttat

SEQ ID NO: 201554 - DNA, 25 bp, Canis familiaris
ttttttttgactacctacctatatg

SEQ ID NO: 201555 - DNA, 25 bp, Canis familiaris
ttttttttaatacctcagtgctgca

SEQ ID NO: 201556 - DNA, 25 bp, Canis familiaris
tttatttcttaatttcagaggcaac

SEQ ID NO: 201557 - DNA, 25 bp, Canis familiaris
tttatgcttttaatttgctaaacaa

SEQ ID NO: 201558 - DNA, 25 bp, Canis familiaris
ttttcatctatcacgggtaaacaag

SEQ ID NO: 201559 - DNA, 25 bp, Canis familiaris
ttttatacccccatttcaacaagag

SEQ ID NO: 201560 - DNA, 25 bp, Canis familiaris
tttcttccatcctacaagttcgaca

SEQ ID NO: 201561 - DNA, 25 bp, Canis familiaris
tttccccattcagcaccttgaatat

SEQ ID NO: 201562 - DNA, 25 bp, Canis familiaris
tttccccattcattcccgatggaat

SEQ ID NO: 201563 - DNA, 25 bp, Canis familiaris
tttccccattctcactggtgtgagg

SEQ ID NO: 201564 - DNA, 25 bp, Canis familiaris
tttccccatctgtaacctggatcag

SEQ ID NO: 201565 - DNA, 25 bp, Canis familiaris
tttcccacatcataccgctgtgtag

SEQ ID NO: 201566 - DNA, 25 bp, Canis familiaris
tttcccctgaaagcctgtgcaagga

SEQ ID NO: 201567 - DNA, 25 bp, Canis familiaris
tttcccctaagatcctggcaaaggg

SEQ ID NO: 201568 - DNA, 25 bp, Canis familiaris
tttcccctacgatcacgtatacacc

SEQ ID NO: 201569 - DNA, 25 bp, Canis familiaris
tttctccgtgaccaaaatgtaaccg

SEQ ID NO: 201570 - DNA, 25 bp, Canis familiaris
tttcccggcaagttaagacgaatct

SEQ ID NO: 201571 - DNA, 25 bp, Canis familiaris
ttttaccgccagatgaaatcgaaca

SEQ ID NO: 201572 - DNA, 25 bp, Canis familiaris
ttttactcccaaccagaacaggcaa

SEQ ID NO: 201573 - DNA, 25 bp, Canis familiaris
ttttaacctaagcccgaaggcagat

SEQ ID NO: 201574 - DNA, 25 bp, Canis familiaris
ttttggcccaattccctaaattgat

SEQ ID NO: 201575 - DNA, 25 bp, Canis familiaris
tttcttgcttccaccaaaacttgtg

SEQ ID NO: 201576 - DNA, 25 bp, Canis familiaris
tttcattcattcgctcaacaaacgt

SEQ ID NO: 201577 - DNA, 25 bp, Canis familiaris
tttctgtttctcttgcagcaaagac

SEQ ID NO: 201578 - DNA, 25 bp, Canis familiaris
tttcttccagctttagcataccact

SEQ ID NO: 201579 - DNA, 25 bp, Canis familiaris
tttctcaccagatggtctcactacc

SEQ ID NO: 201580 - DNA, 25 bp, Canis familiaris
tttaacgaagggccatccaaccatc

SEQ ID NO: 201581 - DNA, 25 bp, Canis familiaris
tttcccgatcagagctaccaactct

SEQ ID NO: 201582 - DNA, 25 bp, Canis familiaris
tttccctgtaaaaaccatagcattt

SEQ ID NO: 201583 - DNA, 25 bp, Canis familiaris
tttccctttcaaaacttcacagaat

SEQ ID NO: 201584 - DNA, 25 bp, Canis familiaris
tttcccgggaaactcttcagcaaca

SEQ ID NO: 201585 - DNA, 25 bp, Canis familiaris
tttcccagagggagctctaagcagt

SEQ ID NO: 201586 - DNA, 25 bp, Canis familiaris
tttagtcaagggacctggcaaggta

SEQ ID NO: 201587 - DNA, 25 bp, Canis familiaris
tttaataccaggaacccagcggctc

SEQ ID NO: 201588 - DNA, 25 bp, Canis familiaris
tttaaatccaggtacccatcaccct

SEQ ID NO: 201589 - DNA, 25 bp, Canis familiaris
tttaaactcaagtatcccagctccc

SEQ ID NO: 201590 - DNA, 25 bp, Canis familiaris
tttaacctgaagtctctcgtcgacc

SEQ ID NO: 201591 - DNA, 25 bp, Canis familiaris
tttaactgcagaaaccgcctctggc

SEQ ID NO: 201592 - DNA, 25 bp, Canis familiaris
tttagctcaggtcccgggcttgagc

SEQ ID NO: 201593 - DNA, 25 bp, Canis familiaris
tttactgttgatccctggacttaga

SEQ ID NO: 201594 - DNA, 25 bp, Canis familiaris
tttacttttaacctactctgtacat

SEQ ID NO: 201595 - DNA, 25 bp, Canis familiaris
tttacttttatatgtcccctatttg

SEQ ID NO: 201596 - DNA, 25 bp, Canis familiaris
tttacttgagtaacagtcccattta

SEQ ID NO: 201597 - DNA, 25 bp, Canis familiaris
tttcccagtgtcaaaatgcccattt

SEQ ID NO: 201598 - DNA, 25 bp, Canis familiaris
tttactcatcgtgaagatcccttac

SEQ ID NO: 201599 - DNA, 25 bp, Canis familiaris
tttactatggtggatcagcccttgt

SEQ ID NO: 201600 - DNA, 25 bp, Canis familiaris
tttacaccgaacaagccagcatctg

SEQ ID NO: 201601 - DNA, 25 bp, Canis familiaris
tttacacttgcagctaatatcattg

SEQ ID NO: 201602 - DNA, 25 bp, Canis familiaris
tttaccttgcaaatgattcatcctt

SEQ ID NO: 201603 - DNA, 25 bp, Canis familiaris
tttaccttgcatttactttcttggc

SEQ ID NO: 201604 - DNA, 25 bp, Canis familiaris
ttttccttgcatgacaggtctctgt

SEQ ID NO: 201605 - DNA, 25 bp, Canis familiaris
ttttccttgccacaggtgttagcca

SEQ ID NO: 201606 - DNA, 25 bp, Canis familiaris
ttttctcttccacgagggctggtgg

SEQ ID NO: 201607 - DNA, 25 bp, Canis familiaris
ttttctttcctggatagggaattct

SEQ ID NO: 201608 - DNA, 25 bp, Canis familiaris
ttttttctccacctaggaatttgag

SEQ ID NO: 201609 - DNA, 25 bp, Canis familiaris
ttttacatccccaagggacgttgcg

SEQ ID NO: 201610 - DNA, 25 bp, Canis familiaris
ttttcacgacattcttgggatagtt

SEQ ID NO: 201611 - DNA, 25 bp, Canis familiaris
ttttccattcatctgtgggtggaca

SEQ ID NO: 201612 - DNA, 25 bp, Canis familiaris
ttttccttatgtactcagaggtgac

SEQ ID NO: 201613 - DNA, 25 bp, Canis familiaris
ttttgtgttatgatcaaagccataa

SEQ ID NO: 201614 - DNA, 25 bp, Canis familiaris
tttctgtgtgagacccaaggagaaa

SEQ ID NO: 201615 - DNA, 25 bp, Canis familiaris
ttatctgttggtgtgaagggtctat

SEQ ID NO: 201616 - DNA, 25 bp, Canis familiaris
tttcttcttcattctaagggcttat

SEQ ID NO: 201617 - DNA, 25 bp, Canis familiaris
tttcttgcagtttccacggactata

SEQ ID NO: 201618 - DNA, 25 bp, Canis familiaris
tttcaatgccagtggccgtgcctat

SEQ ID NO: 201619 - DNA, 25 bp, Canis familiaris
tttctgtctcagtaggcctggagta

SEQ ID NO: 201620 - DNA, 25 bp, Canis familiaris
tttcttctcaccttttggagtacca

SEQ ID NO: 201621 - DNA, 25 bp, Canis familiaris
ttttgtgtgcctctttagaatcagc

SEQ ID NO: 201622 - DNA, 25 bp, Canis familiaris
tttctgtggccacccaaaagtcacc

SEQ ID NO: 201623 - DNA, 25 bp, Canis familiaris
tttctttgcacaacacctacgatcc

SEQ ID NO: 201624 - DNA, 25 bp, Canis familiaris
tttcttgctgccactcttacagaat

SEQ ID NO: 201625 - DNA, 25 bp, Canis familiaris
tttttgtgtgcctctttagaatcag

SEQ ID NO: 201626 - DNA, 25 bp, Canis familiaris
tttctggcattgccttttttgacat

SEQ ID NO: 201627 - DNA, 25 bp, Canis familiaris
tttctgcctgtgcctgtttatgagg

SEQ ID NO: 201628 - DNA, 25 bp, Canis familiaris
tttcttctggctggtgtccatgagg

SEQ ID NO: 201629 - DNA, 25 bp, Canis familiaris
tttctttgttggccctgggctggtt

SEQ ID NO: 201630 - DNA, 25 bp, Canis familiaris
ttttttcgggtgctgcttgtacttg

SEQ ID NO: 201631 - DNA, 25 bp, Canis familiaris
ttattttcagagccttcctggttct

SEQ ID NO: 201632 - DNA, 25 bp, Canis familiaris
tttctgtgtcaatctttcattttca

SEQ ID NO: 201633 - DNA, 25 bp, Canis familiaris
tttctggtgactgtccttttgcaca

SEQ ID NO: 201634 - DNA, 25 bp, Canis familiaris
tttacggaccgttgtatttgatagg

SEQ ID NO: 201635 - DNA, 25 bp, Canis familiaris
tttatgcggtgcgagcctttttgta

SEQ ID NO: 201636 - DNA, 25 bp, Canis familiaris
tttcagccatgtggcatctcctttt

SEQ ID NO: 201637 - DNA, 25 bp, Canis familiaris
tttcccttggcttcatcttatattg

SEQ ID NO: 201638 - DNA, 25 bp, Canis familiaris
tttccgctaggttagtttgttgatt

SEQ ID NO: 201639 - DNA, 25 bp, Canis familiaris
tttcggtacctttttagattgacat

SEQ ID NO: 201640 - DNA, 25 bp, Canis familiaris
tttcgaatacccatttatttgccca

SEQ ID NO: 201641 - DNA, 25 bp, Canis familiaris
tttcagaatagccctgtaaatttgc

SEQ ID NO: 201642 - DNA, 25 bp, Canis familiaris
tttcaatacagccacatgcttaatg

SEQ ID NO: 201643 - DNA, 25 bp, Canis familiaris
tttcacatacagcccatgcttaatg

SEQ ID NO: 201644 - DNA, 25 bp, Canis familiaris
ttcacactgagccgtcacttatgag

SEQ ID NO: 201645 - DNA, 25 bp, Canis familiaris
tttcattctgcgctcagtcttgagg

SEQ ID NO: 201646 - DNA, 25 bp, Canis familiaris
tttcttctgctgtggattccagtgt

SEQ ID NO: 201647 - DNA, 25 bp, Canis familiaris
ttttcattgcatcagagtcccagtg

SEQ ID NO: 201648 - DNA, 25 bp, Canis familiaris
tttacatagatgtgcctaccatgga

SEQ ID NO: 201649 - DNA, 25 bp, Canis familiaris
tttacatgcatgtttgttaccaaaa

SEQ ID NO: 201650 - DNA, 25 bp, Canis familiaris
tttacactaatctttactgcgcatt

SEQ ID NO: 201651 - DNA, 25 bp, Canis familiaris
tttagactgttcattggccatgcct

SEQ ID NO: 201652 - DNA, 25 bp, Canis familiaris
tttagactcaatattgccacccact

SEQ ID NO: 201653 - DNA, 25 bp, Canis familiaris
tttaagactattttcaacgtagcgg

SEQ ID NO: 201654 - DNA, 25 bp, Canis familiaris
tttaaatctatttcccattgtaagg

SEQ ID NO: 201655 - DNA, 25 bp, Canis familiaris
tttacacatgctttatagccacgga

SEQ ID NO: 201656 - DNA, 25 bp, Canis familiaris
tttcgcactgcggttgcacgcagga

SEQ ID NO: 201657 - DNA, 25 bp, Canis familiaris
tttctgccatggatgtcacacgtgc

SEQ ID NO: 201658 - DNA, 25 bp, Canis familiaris
tttctgaatggtagtctgccgctgc

SEQ ID NO: 201659 - DNA, 25 bp, Canis familiaris
tttctgattccttgttcaacagcat

SEQ ID NO: 201660 - DNA, 25 bp, Canis familiaris
tttctttctttttcacatcagtact

SEQ ID NO: 201661 - DNA, 25 bp, Canis familiaris
ttttgttttccctaacagcaactgg

SEQ ID NO: 201662 - DNA, 25 bp, Canis familiaris
tttattctgtgttgccataacagta

SEQ ID NO: 201663 - DNA, 25 bp, Canis familiaris
tttatactttggtcatcacagacaa

SEQ ID NO: 201664 - DNA, 25 bp, Canis familiaris
tttcatacacgcagacacacacaca

SEQ ID NO: 201665 - DNA, 25 bp, Canis familiaris
ttatctcagcagccattgaaccaga

SEQ ID NO: 201666 - DNA, 25 bp, Canis familiaris
tttctacccttgcaccagagtatga

SEQ ID NO: 201667 - DNA, 25 bp, Canis familiaris
tttcattccttttgatggctgagtg

SEQ ID NO: 201668 - DNA, 25 bp, Canis familiaris
ttgtcattactgaaaatttaggagc

SEQ ID NO: 201669 - DNA, 25 bp, Canis familiaris
tttaaattgacctaataatggacca

SEQ ID NO: 201670 - DNA, 25 bp, Canis familiaris
tttagatctctgaccatagttttac

SEQ ID NO: 201671 - DNA, 25 bp, Canis familiaris
tttagctgcatccctcaaattttga

SEQ ID NO: 201672 - DNA, 25 bp, Canis familiaris
tttacagtgcccttcaattctctga

SEQ ID NO: 201673 - DNA, 25 bp, Canis familiaris
tttacgtccgcactataatatcgtt

SEQ ID NO: 201674 - DNA, 25 bp, Canis familiaris
tttactgtcccgttcaggacttttg

SEQ ID NO: 201675 - DNA, 25 bp, Canis familiaris
tttaagtactcgttctgtgccattt

SEQ ID NO: 201676 - DNA, 25 bp, Canis familiaris
tttacgcacatcagttcttctactt

SEQ ID NO: 201677 - DNA, 25 bp, Canis familiaris
tttcacagtcgggtgtttctcactg

SEQ ID NO: 201678 - DNA, 25 bp, Canis familiaris
tttcatcagccggattttgttattg

SEQ ID NO: 201679 - DNA, 25 bp, Canis familiaris
tttctcagagcttatttttttgttt

SEQ ID NO: 201680 - DNA, 25 bp, Canis familiaris
tttctcagtaacattttcttctctc

SEQ ID NO: 201681 - DNA, 25 bp, Canis familiaris
tttctaaaaatacatcctctctctc

SEQ ID NO: 201682 - DNA, 25 bp, Canis familiaris
ttttgttgacaatgaatccacttcc

SEQ ID NO: 201683 - DNA, 25 bp, Canis familiaris
ttttcatcatggtaagtgtgccctt

SEQ ID NO: 201684 - DNA, 25 bp, Canis familiaris
tttatccagctattgggaccctctt

SEQ ID NO: 201685 - DNA, 25 bp, Canis familiaris
tttagccctctcggtgcaaggattt

SEQ ID NO: 201686 - DNA, 25 bp, Canis familiaris
tttacctttgccagagagccttgta

SEQ ID NO: 201687 - DNA, 25 bp, Canis familiaris
tttacctttgagcccagtggtttat

SEQ ID NO: 201688 - DNA, 25 bp, Canis familiaris
tttcccttctgagagcagctgcagc

SEQ ID NO: 201689 - DNA, 25 bp, Canis familiaris
tttccctgttcagagcatcacatga

SEQ ID NO: 201690 - DNA, 25 bp, Canis familiaris
tttctccctttggctgatcaatcca

SEQ ID NO: 201691 - DNA, 25 bp, Canis familiaris
ttattcccattgccaggtacttcat

SEQ ID NO: 201692 - DNA, 25 bp, Canis familiaris
ttattctggcctgcagttacttcgt

SEQ ID NO: 201693 - DNA, 25 bp, Canis familiaris
tttcatctgtgcccaaattactttg

SEQ ID NO: 201694 - DNA, 25 bp, Canis familiaris
tttctctgtctgactcatttcattt

SEQ ID NO: 201695 - DNA, 25 bp, Canis familiaris
tttctttccaatcttatttcctact

SEQ ID NO: 201696 - DNA, 25 bp, Canis familiaris
tttcttccaattctttattcttaat

SEQ ID NO: 201697 - DNA, 25 bp, Canis familiaris
tttctctcaaaattttcttactcta

SEQ ID NO: 201698 - DNA, 25 bp, Canis familiaris
tttcttctgaattcggttataccca

SEQ ID NO: 201699 - DNA, 25 bp, Canis familiaris
tttctgttgtcttcagtgttctgac

SEQ ID NO: 201700 - DNA, 25 bp, Canis familiaris
tttctgtttgtgttgttctctgacc

SEQ ID NO: 201701 - DNA, 25 bp, Canis familiaris
ttatcagttttctgctcctgagacc

SEQ ID NO: 201702 - DNA, 25 bp, Canis familiaris
tttcagcttttctccattaacattt

SEQ ID NO: 201703 - DNA, 25 bp, Canis familiaris
tttactttccatctgatatgcattt

SEQ ID NO: 201704 - DNA, 25 bp, Canis familiaris
tttaccctccattcgtatacttgaa

SEQ ID NO: 201705 - DNA, 25 bp, Canis familiaris
tttacctctaccattcaagtttcag

SEQ ID NO: 201706 - DNA, 25 bp, Canis familiaris
tttactccccttgtacagtattctg

SEQ ID NO: 201707 - DNA, 25 bp, Canis familiaris
tttcttcctcctttttgtaatattg

SEQ ID NO: 201708 - DNA, 25 bp, Canis familiaris
tttctttctcacctctttgaaatta

SEQ ID NO: 201709 - DNA, 25 bp, Canis familiaris
tttcacttgccagttgtttcaacaa

SEQ ID NO: 201710 - DNA, 25 bp, Canis familiaris
tttctctcctccttgattgtatgaa

SEQ ID NO: 201711 - DNA, 25 bp, Canis familiaris
tttctcaccccaggatgtattggtc

SEQ ID NO: 201712 - DNA, 25 bp, Canis familiaris
tttctctccctcaggaatctgagat

SEQ ID NO: 201713 - DNA, 25 bp, Canis familiaris
tttctcttctggaggaacagcagag

SEQ ID NO: 201714 - DNA, 25 bp, Canis familiaris
tttctttctggttgctgagtgatca

SEQ ID NO: 201715 - DNA, 25 bp, Canis familiaris
tttcatttcctgttctgagatatta

SEQ ID NO: 201716 - DNA, 25 bp, Canis familiaris
tttcatcattcggcgtgcgaattaa

SEQ ID NO: 201717 - DNA, 25 bp, Canis familiaris
tttctctgccggctgtgaagtaata

SEQ ID NO: 201718 - DNA, 25 bp, Canis familiaris
tttctccccgtgacaaagcataaat

SEQ ID NO: 201719 - DNA, 25 bp, Canis familiaris
tttacaccctctacaatggtacgaa

SEQ ID NO: 201720 - DNA, 25 bp, Canis familiaris
tttacacctttccatcaagatgcac

SEQ ID NO: 201721 - DNA, 25 bp, Canis familiaris
tttagcccattagtccaagctccat

SEQ ID NO: 201722 - DNA, 25 bp, Canis familiaris
tttcagcaggccaaacctacaccat

SEQ ID NO: 201723 - DNA, 25 bp, Canis familiaris
tttcagcaagccttacctacaacca

SEQ ID NO: 201724 - DNA, 25 bp, Canis familiaris
ttttagaccattacttgacatcccc

SEQ ID NO: 201725 - DNA, 25 bp, Canis familiaris
tttcatcacccaattcatcaaaccc

SEQ ID NO: 201726 - DNA, 25 bp, Canis familiaris
tttaatctccttagactgatgtccc

SEQ ID NO: 201727 - DNA, 25 bp, Canis familiaris
tttaatctttgtgcctgaatctctc

SEQ ID NO: 201728 - DNA, 25 bp, Canis familiaris
ttatacctcttaaccgataccttga

SEQ ID NO: 201729 - DNA, 25 bp, Canis familiaris
ttttctgatttagaggaatccttga

SEQ ID NO: 201730 - DNA, 25 bp, Canis familiaris
tttctttcttgataggaatctgctt

SEQ ID NO: 201731 - DNA, 25 bp, Canis familiaris
tttcttccctggaatggcacactcc

SEQ ID NO: 201732 - DNA, 25 bp, Canis familiaris
tttctccctgtaacatggccaacta

SEQ ID NO: 201733 - DNA, 25 bp, Canis familiaris
ttttcctctgaaactaccactgtat

SEQ ID NO: 201734 - DNA, 25 bp, Canis familiaris
tttatctctagatgactgtccccga

SEQ ID NO: 201735 - DNA, 25 bp, Canis familiaris
tttacttcaaagtgtgctgacctgt

SEQ ID NO: 201736 - DNA, 25 bp, Canis familiaris
tttagcaagaacctgtggatgccct

SEQ ID NO: 201737 - DNA, 25 bp, Canis familiaris
ttaccagaagaccagggtcccattt

SEQ ID NO: 201738 - DNA, 25 bp, Canis familiaris
tttcgagcaaaccaaggtcatcgca

SEQ ID NO: 201739 - DNA, 25 bp, Canis familiaris
tttctctgcccatcaaggaatctga

SEQ ID NO: 201740 - DNA, 25 bp, Canis familiaris
tttctctccattccaaggagcttag

SEQ ID NO: 201741 - DNA, 25 bp, Canis familiaris
tttctatctcttcccaggacattaa

SEQ ID NO: 201742 - DNA, 25 bp, Canis familiaris
tttctgtcctctcctcaggaaaatc

SEQ ID NO: 201743 - DNA, 25 bp, Canis familiaris
tttctttctctgtctcacatgaata

SEQ ID NO: 201744 - DNA, 25 bp, Canis familiaris
tttctctgtatctctcctggataaa

SEQ ID NO: 201745 - DNA, 25 bp, Canis familiaris
tttcactgacacaccttggcatgaa

SEQ ID NO: 201746 - DNA, 25 bp, Canis familiaris
tttcattcacatgggccttgcgaga

SEQ ID NO: 201747 - DNA, 25 bp, Canis familiaris
tttagctgccatggggactgcacgc

SEQ ID NO: 201748 - DNA, 25 bp, Canis familiaris
tttagatggtcgcacaggacagcaa

SEQ ID NO: 201749 - DNA, 25 bp, Canis familiaris
ttgtcggggacaccagtgacgcaga

SEQ ID NO: 201750 - DNA, 25 bp, Canis familiaris
tttattatggacctcctgagcaata

SEQ ID NO: 201751 - DNA, 25 bp, Canis familiaris
ttctctgggcgacatttggcatcta

SEQ ID NO: 201752 - DNA, 25 bp, Canis familiaris
tttctgggccagctcttgtatatag

SEQ ID NO: 201753 - DNA, 25 bp, Canis familiaris
tttctgggccccacagtagatacca

SEQ ID NO: 201754 - DNA, 25 bp, Canis familiaris
ttttgggctaccaggacaggctcca

SEQ ID NO: 201755 - DNA, 25 bp, Canis familiaris
ttttgtgggaccaccgatacctcaa

SEQ ID NO: 201756 - DNA, 25 bp, Canis familiaris
tttattggggcacccccaagctgct

SEQ ID NO: 201757 - DNA, 25 bp, Canis familiaris
tttctggggccaccccacaaatggg

SEQ ID NO: 201758 - DNA, 25 bp, Canis familiaris
tttctggtagttccccataacatgc

SEQ ID NO: 201759 - DNA, 25 bp, Canis familiaris
tttttgtagattgcagactcatttc

SEQ ID NO: 201760 - DNA, 25 bp, Canis familiaris
ttttcgctcggtgaatacatgttgc

SEQ ID NO: 201761 - DNA, 25 bp, Canis familiaris
ttttcgctctggtgaatgcatgttc

SEQ ID NO: 201762 - DNA, 25 bp, Canis familiaris
ttatttgccggctgttgttggcctc

SEQ ID NO: 201763 - DNA, 25 bp, Canis familiaris
ttgatttacggcgctaaggatgact

SEQ ID NO: 201764 - DNA, 25 bp, Canis familiaris
ttatttcacctggccataaacttcc

SEQ ID NO: 201765 - DNA, 25 bp, Canis familiaris
ttatattgcgcctacactagtgaat

SEQ ID NO: 201766 - DNA, 25 bp, Canis familiaris
tttatctcccattcactatgtgcta

SEQ ID NO: 201767 - DNA, 25 bp, Canis familiaris
tttctcttcagccacatcttgtgta

SEQ ID NO: 201768 - DNA, 25 bp, Canis familiaris
ttgttgcagtaccagatccatcgga

SEQ ID NO: 201769 - DNA, 25 bp, Canis familiaris
ttttcaggagcgccacagataggat

SEQ ID NO: 201770 - DNA, 25 bp, Canis familiaris
ttttcaatgttattttaaccatgta

SEQ ID NO: 201771 - DNA, 25 bp, Canis familiaris
tttacttacttacttgaaccatgag

SEQ ID NO: 201772 - DNA, 25 bp, Canis familiaris
tttacacaactttttccacgacata

SEQ ID NO: 201773 - DNA, 25 bp, Canis familiaris
tttatcaaacgaacttccccagcat

SEQ ID NO: 201774 - DNA, 25 bp, Canis familiaris
tttatcaactggagttgccccacct

SEQ ID NO: 201775 - DNA, 25 bp, Canis familiaris
tttagcaactgcgttttttcccagc

SEQ ID NO: 201776 - DNA, 25 bp, Canis familiaris
tttaagcaggcgtttatttctgcag

SEQ ID NO: 201777 - DNA, 25 bp, Canis familiaris
tttaagcagggcctttcacctaggg

SEQ ID NO: 201778 - DNA, 25 bp, Canis familiaris
tttcacagcagaggttttccctccc

SEQ ID NO: 201779 - DNA, 25 bp, Canis familiaris
tttaaaggtgcttcttctcctgtct

SEQ ID NO: 201780 - DNA, 25 bp, Canis familiaris
tttagagtttcttgacttcctgcca

SEQ ID NO: 201781 - DNA, 25 bp, Canis familiaris
tttacagaatacagactctaggtca

SEQ ID NO: 201782 - DNA, 25 bp, Canis familiaris
tttcacaaatggcagacttgaagat

SEQ ID NO: 201783 - DNA, 25 bp, Canis familiaris
tttcacctgcttcagactctgagga

SEQ ID NO: 201784 - DNA, 25 bp, Canis familiaris
tttcaagagttcacctgctgctggg

SEQ ID NO: 201785 - DNA, 25 bp, Canis familiaris
tttcaagtcctcacggtctgacagc

SEQ ID NO: 201786 - DNA, 25 bp, Canis familiaris
tttagatgtcgtatccggagagagc

SEQ ID NO: 201787 - DNA, 25 bp, Canis familiaris
tttcatgattccgattcctgaggga

SEQ ID NO: 201788 - DNA, 25 bp, Canis familiaris
tttcacatacctttccgaggagtga

SEQ ID NO: 201789 - DNA, 25 bp, Canis familiaris
tttctggacccatcggggacgacga

SEQ ID NO: 201790 - DNA, 25 bp, Canis familiaris
ttagctaagcccgcggggacggata

SEQ ID NO: 201791 - DNA, 25 bp, Canis familiaris
ttactaactcctagggaggcccttg

SEQ ID NO: 201792 - DNA, 25 bp, Canis familiaris
ttaataatttaaggccaggccttct

SEQ ID NO: 201793 - DNA, 25 bp, Canis familiaris
tttacacttctatgaccaggcctta

SEQ ID NO: 201794 - DNA, 25 bp, Canis familiaris
ttttccattctacaccatggtaaaa

SEQ ID NO: 201795 - DNA, 25 bp, Canis familiaris
ttttccatatgaactcatgccagtt

SEQ ID NO: 201796 - DNA, 25 bp, Canis familiaris
tttctcagattgtcacatcaccaaa

SEQ ID NO: 201797 - DNA, 25 bp, Canis familiaris
tttctagttacaatcgccacatcag

SEQ ID NO: 201798 - DNA, 25 bp, Canis familiaris
tttcatttcagatttcccatcatca

SEQ ID NO: 201799 - DNA, 25 bp, Canis familiaris
tttcttcttgctaatgccaccaaat

SEQ ID NO: 201800 - DNA, 25 bp, Canis familiaris
ttgcttcaaggcaaaggcaccaaac

SEQ ID NO: 201801 - DNA, 25 bp, Canis familiaris
ttttcattggccaaggcaaccaacc

SEQ ID NO: 201802 - DNA, 25 bp, Canis familiaris
tttcttctggcaaaggaggctcccc

SEQ ID NO: 201803 - DNA, 25 bp, Canis familiaris
tttttctcagcaagggggcttctag

SEQ ID NO: 201804 - DNA, 25 bp, Canis familiaris
tttttctggcattgccttttttgac

SEQ ID NO: 201805 - DNA, 25 bp, Canis familiaris
tttttcagtcagtgtcttttgctaa

SEQ ID NO: 201806 - DNA, 25 bp, Canis familiaris
tttctgtcattggaagctcttcttt

SEQ ID NO: 201807 - DNA, 25 bp, Canis familiaris
tttcttttggagttgcttgctttca

SEQ ID NO: 201808 - DNA, 25 bp, Canis familiaris
tttttgtttgtatcattccttcaaa

SEQ ID NO: 201809 - DNA, 25 bp, Canis familiaris
tttcttgatttcaacatcttccccc

SEQ ID NO: 201810 - DNA, 25 bp, Canis familiaris
ttatagtgatttgcagtaccccctc

SEQ ID NO: 201811 - DNA, 25 bp, Canis familiaris
tttagtggtttcttagcctctctta

SEQ ID NO: 201812 - DNA, 25 bp, Canis familiaris
tttagatggtggcagttccctctgt

SEQ ID NO: 201813 - DNA, 25 bp, Canis familiaris
tttaggttctgtaattgcccactgt

SEQ ID NO: 201814 - DNA, 25 bp, Canis familiaris
tttatgtgtacggttctgcggcatt

SEQ ID NO: 201815 - DNA, 25 bp, Canis familiaris
tttatgtggacacagtcgctgccct

SEQ ID NO: 201816 - DNA, 25 bp, Canis familiaris
tttatgggagactgtccctccttca

SEQ ID NO: 201817 - DNA, 25 bp, Canis familiaris
tttctctgggggcacaactgccctc

SEQ ID NO: 201818 - DNA, 25 bp, Canis familiaris
tttctacggttgcaaactgctgacc

SEQ ID NO: 201819 - DNA, 25 bp, Canis familiaris
tttctacggttgcaaactgctgacc

SEQ ID NO: 201820 - DNA, 25 bp, Canis familiaris
tttaatcacgtaaaaaccacacgag

SEQ ID NO: 201821 - DNA, 25 bp, Canis familiaris
tttacctattgaatgaaaccctctg

SEQ ID NO: 201822 - DNA, 25 bp, Canis familiaris
tttctatctattatacaacctcccc

SEQ ID NO: 201823 - DNA, 25 bp, Canis familiaris
tttctcattcgtatatccgtccaac

SEQ ID NO: 201824 - DNA, 25 bp, Canis familiaris
tttctaaactgcattcctgtgccca

SEQ ID NO: 201825 - DNA, 25 bp, Canis familiaris
ttggaaaaccatactcctggtccca

SEQ ID NO: 201826 - DNA, 25 bp, Canis familiaris
tttataaacctggccctgtatccca

SEQ ID NO: 201827 - DNA, 25 bp, Canis familiaris
tttttaagcagggcctttcacctag

SEQ ID NO: 201828 - DNA, 25 bp, Canis familiaris
tttttgaagacagccataaccacag

SEQ ID NO: 201829 - DNA, 25 bp, Canis familiaris
tttattgacccaccagtggcaccga

SEQ ID NO: 201830 - DNA, 25 bp, Canis familiaris
ttttgctggtcccacagatctgacc

SEQ ID NO: 201831 - DNA, 25 bp, Canis familiaris
tttacatgttccaatatgattccac

SEQ ID NO: 201832 - DNA, 25 bp, Canis familiaris
tttattccatccctatgaatctccc

SEQ ID NO: 201833 - DNA, 25 bp, Canis familiaris
tttaatctatccctgtgaccatgac

SEQ ID NO: 201834 - DNA, 25 bp, Canis familiaris
tttaatctatcccttttaacatgac

SEQ ID NO: 201835 - DNA, 25 bp, Canis familiaris
tttcttcaacccttattttcatgca

SEQ ID NO: 201836 - DNA, 25 bp, Canis familiaris
tttcttggttccttgatgctttaaa

SEQ ID NO: 201837 - DNA, 25 bp, Canis familiaris
tttctttttcgctttcaattgtata

SEQ ID NO: 201838 - DNA, 25 bp, Canis familiaris
tttttttggcgcttgactcaggatt

SEQ ID NO: 201839 - DNA, 25 bp, Canis familiaris
tttcttgaatggccttaccagcgcc

SEQ ID NO: 201840 - DNA, 25 bp, Canis familiaris
tttcttcaagctcttctggcagcga

SEQ ID NO: 201841 - DNA, 25 bp, Canis familiaris
tttcttatagctttgcctgtgtctc

SEQ ID NO: 201842 - DNA, 25 bp, Canis familiaris
tttcttatagtgttcttgtctggct

SEQ ID NO: 201843 - DNA, 25 bp, Canis familiaris
tttaatgttgtctgtcttctgtgct

SEQ ID NO: 201844 - DNA, 25 bp, Canis familiaris
tttaactgtgatcatgtcttctcca

SEQ ID NO: 201845 - DNA, 25 bp, Canis familiaris
tttaactgtgatcatgtcttctcca

SEQ ID NO: 201846 - DNA, 25 bp, Canis familiaris
tttctcactgttctatctttccagc

SEQ ID NO: 201847 - DNA, 25 bp, Canis familiaris
tttctgactcctgtgattgacttac

SEQ ID NO: 201848 - DNA, 25 bp, Canis familiaris
tttctgcctcctatataattccaca

SEQ ID NO: 201849 - DNA, 25 bp, Canis familiaris
tttctcctatctacttaattcttca

SEQ ID NO: 201850 - DNA, 25 bp, Canis familiaris
tttctccccttgatacttatataat

SEQ ID NO: 201851 - DNA, 25 bp, Canis familiaris
tttcaattcccaaatatcttttatt

SEQ ID NO: 201852 - DNA, 25 bp, Canis familiaris
tttcaacttctcacaatcttatttt

SEQ ID NO: 201853 - DNA, 25 bp, Canis familiaris
tttctcttttccatatttatttttg

SEQ ID NO: 201854 - DNA, 25 bp, Canis familiaris
tttctccttttcttgatactaactc

SEQ ID NO: 201855 - DNA, 25 bp, Canis familiaris
tttctcctttcttgtcattgctgaa

SEQ ID NO: 201856 - DNA, 25 bp, Canis familiaris
tttctgctttaggttcttgctcaga

SEQ ID NO: 201857 - DNA, 25 bp, Canis familiaris
tttctgctttgtgtcaattctaaga

SEQ ID NO: 201858 - DNA, 25 bp, Canis familiaris
tttcatcgacttgcccattttagaa

SEQ ID NO: 201859 - DNA, 25 bp, Canis familiaris
tttcatctttctgccatctatttgg

SEQ ID NO: 201860 - DNA, 25 bp, Canis familiaris
tttctatttctcggattccctggga

SEQ ID NO: 201861 - DNA, 25 bp, Canis familiaris
tttcaactgtcctgaccctttagaa

SEQ ID NO: 201862 - DNA, 25 bp, Canis familiaris
tttcaactcccttacaccatgtaaa

SEQ ID NO: 201863 - DNA, 25 bp, Canis familiaris
tttcaactattttccctctggagaa

SEQ ID NO: 201864 - DNA, 25 bp, Canis familiaris
tttacatgtttttcttttggcagca

SEQ ID NO: 201865 - DNA, 25 bp, Canis familiaris
tttcttgggtcttttttggcacatg

SEQ ID NO: 201866 - DNA, 25 bp, Canis familiaris
tttctcttgctgtcttttttgggac

SEQ ID NO: 201867 - DNA, 25 bp, Canis familiaris
ttctcactctggtcctttttaagtt

SEQ ID NO: 201868 - DNA, 25 bp, Canis familiaris
tttctttcaccaatgttttacagtt

SEQ ID NO: 201869 - DNA, 25 bp, Canis familiaris
tttctttacctattttctaatgtca

SEQ ID NO: 201870 - DNA, 25 bp, Canis familiaris
tttctttctttagttcctgtattct

SEQ ID NO: 201871 - DNA, 25 bp, Canis familiaris
tttctttcttaattatattctttct

SEQ ID NO: 201872 - DNA, 25 bp, Canis familiaris
tttctcttttatgatttccttggga

SEQ ID NO: 201873 - DNA, 25 bp, Canis familiaris
tttctcttgtatgagtttccttggg

SEQ ID NO: 201874 - DNA, 25 bp, Canis familiaris
tttcacttgtgttcagtgctctcgc

SEQ ID NO: 201875 - DNA, 25 bp, Canis familiaris
tttactatcgcttagtctgtgccat

SEQ ID NO: 201876 - DNA, 25 bp, Canis familiaris
tttagttgcgtggctgcgcaggcct

SEQ ID NO: 201877 - DNA, 25 bp, Canis familiaris
tttaatgatttgtcgctgaggccat

SEQ ID NO: 201878 - DNA, 25 bp, Canis familiaris
tttcatcatgcatttgcccagaccc

SEQ ID NO: 201879 - DNA, 25 bp, Canis familiaris
tttcttgactatgccaagcccatcc

SEQ ID NO: 201880 - DNA, 25 bp, Canis familiaris
tttttgagctactcagaggccccac

SEQ ID NO: 201881 - DNA, 25 bp, Canis familiaris
tttataggtgccacaggtcgtccac

SEQ ID NO: 201882 - DNA, 25 bp, Canis familiaris
ttgtaagttgcctgggttttcctag

SEQ ID NO: 201883 - DNA, 25 bp, Canis familiaris
tttcacgtttgctgggtttttctgg

SEQ ID NO: 201884 - DNA, 25 bp, Canis familiaris
tttctcggagtctcgggtcttccga

SEQ ID NO: 201885 - DNA, 25 bp, Canis familiaris
tttctcggtgctttttggtttctcg

SEQ ID NO: 201886 - DNA, 25 bp, Canis familiaris
tttctccctaagacttggtttcttg

SEQ ID NO: 201887 - DNA, 25 bp, Canis familiaris
tttaccctactgatgatgtgttgtt

SEQ ID NO: 201888 - DNA, 25 bp, Canis familiaris
tttaaccttcttagttttgagatca

SEQ ID NO: 201889 - DNA, 25 bp, Canis familiaris
tttcttgcctttctgattttagtca

SEQ ID NO: 201890 - DNA, 25 bp, Canis familiaris
tttctctctttttttctttcaatat

SEQ ID NO: 201891 - DNA, 25 bp, Canis familiaris
tttacctttttatcgcctcaatgag

SEQ ID NO: 201892 - DNA, 25 bp, Canis familiaris
tttatccttgttaaactcctgaggg

SEQ ID NO: 201893 - DNA, 25 bp, Canis familiaris
tttagtcattttgacccctgaggcc

SEQ ID NO: 201894 - DNA, 25 bp, Canis familiaris
tttcagaccttggtacctgtgctgg

SEQ ID NO: 201895 - DNA, 25 bp, Canis familiaris
tttaacctgctgaatacaactctgg

SEQ ID NO: 201896 - DNA, 25 bp, Canis familiaris
ttatacgactggatacacacgcgca

SEQ ID NO: 201897 - DNA, 25 bp, Canis familiaris
tttacacgaggacacagcagcccaa

SEQ ID NO: 201898 - DNA, 25 bp, Canis familiaris
tttaccggacatatccaccaacacc

SEQ ID NO: 201899 - DNA, 25 bp, Canis familiaris
tttctctcattgtgattccaccata

SEQ ID NO: 201900 - DNA, 25 bp, Canis familiaris
tttctctcattctcaaattccattc

SEQ ID NO: 201901 - DNA, 25 bp, Canis familiaris
tttcttcatttctaagtcacctctc

SEQ ID NO: 201902 - DNA, 25 bp, Canis familiaris
tttcttactggcaggtagttgctca

SEQ ID NO: 201903 - DNA, 25 bp, Canis familiaris
tttttactgccacgaaactgtccat

SEQ ID NO: 201904 - DNA, 25 bp, Canis familiaris
tttttgcactaaaaaccttctctgt

SEQ ID NO: 201905 - DNA, 25 bp, Canis familiaris
tttatccttaaaatacacttccatg

SEQ ID NO: 201906 - DNA, 25 bp, Canis familiaris
tttctctgcgtaaaattcaccctca

SEQ ID NO: 201907 - DNA, 25 bp, Canis familiaris
tttcttcgctatcaaacacaccaca

SEQ ID NO: 201908 - DNA, 25 bp, Canis familiaris
tttcttacacaagctacagcctcaa

SEQ ID NO: 201909 - DNA, 25 bp, Canis familiaris
tttttaaagccatttcactgctaaa

SEQ ID NO: 201910 - DNA, 25 bp, Canis familiaris
ttttccagcacacgctactcggaaa

SEQ ID NO: 201911 - DNA, 25 bp, Canis familiaris
ttttgccgctggactacgcggtcat

SEQ ID NO: 201912 - DNA, 25 bp, Canis familiaris
ttaaccttcgatgacagcggtctcc

SEQ ID NO: 201913 - DNA, 25 bp, Canis familiaris
ttaaaatatgccaccacgtgtccac

SEQ ID NO: 201914 - DNA, 25 bp, Canis familiaris
tttaaaatatgccaccacgtgtcca

SEQ ID NO: 201915 - DNA, 25 bp, Canis familiaris
tttataaatacatccaccttccact

SEQ ID NO: 201916 - DNA, 25 bp, Canis familiaris
ttttatcagtaatcctgctctccgt

SEQ ID NO: 201917 - DNA, 25 bp, Canis familiaris
ttttaatgtaagtctgagtctttgt

SEQ ID NO: 201918 - DNA, 25 bp, Canis familiaris
tttaatgctctatggttgctgtttt

SEQ ID NO: 201919 - DNA, 25 bp, Canis familiaris
tttaatctgttatgctttgttcttc

SEQ ID NO: 201920 - DNA, 25 bp, Canis familiaris
tttcaagccttttgtcttttataca

SEQ ID NO: 201921 - DNA, 25 bp, Canis familiaris
tttcaagttttcccttttgtgcact

SEQ ID NO: 201922 - DNA, 25 bp, Canis familiaris
tttcactttttaccttgtttgctct

SEQ ID NO: 201923 - DNA, 25 bp, Canis familiaris
tttcattttcttacactttgctata

SEQ ID NO: 201924 - DNA, 25 bp, Canis familiaris
tttcttgttttatgttgtgcttatg

SEQ ID NO: 201925 - DNA, 25 bp, Canis familiaris
tttcttgcttgttttggctgcgtca

SEQ ID NO: 201926 - DNA, 25 bp, Canis familiaris
tttcttgctctatcattctgtttca

SEQ ID NO: 201927 - DNA, 25 bp, Canis familiaris
tttctttctaacatccatgcttaca

SEQ ID NO: 201928 - DNA, 25 bp, Canis familiaris
tttcttcttcagtcacatcctggga

SEQ ID NO: 201929 - DNA, 25 bp, Canis familiaris
tttcttcttcagtcacatcctggga

SEQ ID NO: 201930 - DNA, 25 bp, Canis familiaris
tttcattctgattgtcctctttgga

SEQ ID NO: 201931 - DNA, 25 bp, Canis familiaris
tttttgctaatgtcatccttctgaa

SEQ ID NO: 201932 - DNA, 25 bp, Canis familiaris
tttctttatgcatgctatcttctaa

SEQ ID NO: 201933 - DNA, 25 bp, Canis familiaris
tttcagtattgctgtacgatataaa

SEQ ID NO: 201934 - DNA, 25 bp, Canis familiaris
ttaagaagtccgtacgaatacaaat

SEQ ID NO: 201935 - DNA, 25 bp, Canis familiaris
ttttgtagtccccacgaattaacag

SEQ ID NO: 201936 - DNA, 25 bp, Canis familiaris
ttttggagtaccactggattaataa

SEQ ID NO: 201937 - DNA, 25 bp, Canis familiaris
ttagttggctaaccactggcttatt

SEQ ID NO: 201938 - DNA, 25 bp, Canis familiaris
ttggggtcgaatcgacggttgattc

SEQ ID NO: 201939 - DNA, 25 bp, Canis familiaris
ttttgggtcgatcgacggttgattc

SEQ ID NO: 201940 - DNA, 25 bp, Canis familiaris
ttagctgggtcctttcgagtttgtt

SEQ ID NO: 201941 - DNA, 25 bp, Canis familiaris
ttactccttctgttttgagttttgt

SEQ ID NO: 201942 - DNA, 25 bp, Canis familiaris
ttagcccttgcctgctatgattttt

SEQ ID NO: 201943 - DNA, 25 bp, Canis familiaris
ttacccttctggcaagatcttggct

SEQ ID NO: 201944 - DNA, 25 bp, Canis familiaris
ttatccccaagctgaactgcgtgtt

SEQ ID NO: 201945 - DNA, 25 bp, Canis familiaris
ttattggcaacacaaaccggatttc

SEQ ID NO: 201946 - DNA, 25 bp, Canis familiaris
ttagcgccacaaatgaaatgccggt

SEQ ID NO: 201947 - DNA, 25 bp, Canis familiaris
ttaggtctcctttgaagctctgaag

SEQ ID NO: 201948 - DNA, 25 bp, Canis familiaris
ttaggatcacccagaagacttagtc

SEQ ID NO: 201949 - DNA, 25 bp, Canis familiaris
ttaagaccctatgtggactctgacc

SEQ ID NO: 201950 - DNA, 25 bp, Canis familiaris
tttagagccctatggtttctcacat

SEQ ID NO: 201951 - DNA, 25 bp, Canis familiaris
ttataagccctggtggggattactt

SEQ ID NO: 201952 - DNA, 25 bp, Canis familiaris
tttactacctgcatggggttcacta

SEQ ID NO: 201953 - DNA, 25 bp, Canis familiaris
tttactttcagaatgctgggttaaa

SEQ ID NO: 201954 - DNA, 25 bp, Canis familiaris
ttcgacatattctaatttgggtata

SEQ ID NO: 201955 - DNA, 25 bp, Canis familiaris
ttaccaatcttccttaggcgtatat

SEQ ID NO: 201956 - DNA, 25 bp, Canis familiaris
ttaccatgtgttgttccggaattta

SEQ ID NO: 201957 - DNA, 25 bp, Canis familiaris
tttctagattctgttccgtgcacat

SEQ ID NO: 201958 - DNA, 25 bp, Canis familiaris
tttctagatcttagtctcagttaaa

SEQ ID NO: 201959 - DNA, 25 bp, Canis familiaris
tttctttctttgctgatttcactca

SEQ ID NO: 201960 - DNA, 25 bp, Canis familiaris
tttctttttgggtattggagtcctg

SEQ ID NO: 201961 - DNA, 25 bp, Canis familiaris
tttctttcctgtgtttgtattcctg

SEQ ID NO: 201962 - DNA, 25 bp, Canis familiaris
tttttaccagctttcttgctttctc

SEQ ID NO: 201963 - DNA, 25 bp, Canis familiaris
tttaccaacagcttttatctttcaa

SEQ ID NO: 201964 - DNA, 25 bp, Canis familiaris
ttttctacaggcttgatatttttca

SEQ ID NO: 201965 - DNA, 25 bp, Canis familiaris
ttttccagcccaatgtttgtactcc

SEQ ID NO: 201966 - DNA, 25 bp, Canis familiaris
tttttacccagtctgaaaccctgcg

SEQ ID NO: 201967 - DNA, 25 bp, Canis familiaris
tttttttccagtcctcaaatgcaca

SEQ ID NO: 201968 - DNA, 25 bp, Canis familiaris
ttacctttactacccgaagcaattg

SEQ ID NO: 201969 - DNA, 25 bp, Canis familiaris
tttactttaataccgtgaacacgtg

SEQ ID NO: 201970 - DNA, 25 bp, Canis familiaris
tttacatttaattttggctaccagg

SEQ ID NO: 201971 - DNA, 25 bp, Canis familiaris
tttcactttttctttggttgcggag

SEQ ID NO: 201972 - DNA, 25 bp, Canis familiaris
tttactttgtacttgtgtttgctta

SEQ ID NO: 201973 - DNA, 25 bp, Canis familiaris
tttacctgaataacttttgtcttca

SEQ ID NO: 201974 - DNA, 25 bp, Canis familiaris
tttttgccactaaccttagtattca

SEQ ID NO: 201975 - DNA, 25 bp, Canis familiaris
tttttccctccatcattaaatccaa

SEQ ID NO: 201976 - DNA, 25 bp, Canis familiaris
tttttaattcaatgttaaccactca

SEQ ID NO: 201977 - DNA, 25 bp, Canis familiaris
ttgtgtttttaatgtttagaagtat

SEQ ID NO: 201978 - DNA, 25 bp, Canis familiaris
tttttttggattctttaaatatatg

SEQ ID NO: 201979 - DNA, 25 bp, Canis familiaris
ttttttccaactctttcaataaatg

SEQ ID NO: 201980 - DNA, 25 bp, Canis familiaris
tttcttttctactgcttaccattaa

SEQ ID NO: 201981 - DNA, 25 bp, Canis familiaris
tttcttttcatatttttccacttga

SEQ ID NO: 201982 - DNA, 25 bp, Canis familiaris
tttcttttgacatctttctctttag

SEQ ID NO: 201983 - DNA, 25 bp, Canis familiaris
ttgtttcctccatctggttttaagt

SEQ ID NO: 201984 - DNA, 25 bp, Canis familiaris
ttatcacctccctggtgttttacct

SEQ ID NO: 201985 - DNA, 25 bp, Canis familiaris
tttctttcctgctgctgttttgtaa

SEQ ID NO: 201986 - DNA, 25 bp, Canis familiaris
tttattctgtcctgtgttcacgtaa

SEQ ID NO: 201987 - DNA, 25 bp, Canis familiaris
tttattcatatatcaggggcactta

SEQ ID NO: 201988 - DNA, 25 bp, Canis familiaris
tttcttctttctgggggacttgatt

SEQ ID NO: 201989 - DNA, 25 bp, Canis familiaris
tttttttacgctctggtgccgttga

SEQ ID NO: 201990 - DNA, 25 bp, Canis familiaris
tttttttcctttattgggcatctca

SEQ ID NO: 201991 - DNA, 25 bp, Canis familiaris
ttttctttccttgataggggaatct

SEQ ID NO: 201992 - DNA, 25 bp, Canis familiaris
tttttctttcttgaataggaaatct

SEQ ID NO: 201993 - DNA, 25 bp, Canis familiaris
tttcttcacttcttccataaaaaat

SEQ ID NO: 201994 - DNA, 25 bp, Canis familiaris
tttcttatcttcacagcatcgagct

SEQ ID NO: 201995 - DNA, 25 bp, Canis familiaris
tttcttatttctgccatctactgga

SEQ ID NO: 201996 - DNA, 25 bp, Canis familiaris
ttatgcttttttggccaggtgtggg

SEQ ID NO: 201997 - DNA, 25 bp, Canis familiaris
ttgcagtatttaaagccgtggccgt

SEQ ID NO: 201998 - DNA, 25 bp, Canis familiaris
ttcagatcaaaagagccgggggcta

SEQ ID NO: 201999 - DNA, 25 bp, Canis familiaris
ttcagaaacgaagcacaagtggtgt

SEQ ID NO: 202000 - DNA, 25 bp, Canis familiaris
ttcgtacgctacgccaatggtttat

SEQ ID NO: 202001 - DNA, 25 bp, Canis familiaris
ttaccgagcccaggccagggatttt

SEQ ID NO: 202002 - DNA, 25 bp, Canis familiaris
tttacagtcccaatgccagagtgat

SEQ ID NO: 202003 - DNA, 25 bp, Canis familiaris
tttacatgtgtggcatttcagaaga

SEQ ID NO: 202004 - DNA, 25 bp, Canis familiaris
tttacagcattggcaaatggtataa

SEQ ID NO: 202005 - DNA, 25 bp, Canis familiaris
tttacagatatgacttggggacaca

SEQ ID NO: 202006 - DNA, 25 bp, Canis familiaris
tttacagccaccttggactgaccag

SEQ ID NO: 202007 - DNA, 25 bp, Canis familiaris
tttacacatcacgtgtggattgaaa

SEQ ID NO: 202008 - DNA, 25 bp, Canis familiaris
tttacatgccaccgggtgataggcc

SEQ ID NO: 202009 - DNA, 25 bp, Canis familiaris
tttacagacacagagggcaagccgc

SEQ ID NO: 202010 - DNA, 25 bp, Canis familiaris
tttaaaccagtagtgtccccatgaa

SEQ ID NO: 202011 - DNA, 25 bp, Canis familiaris
tttaattccagcttctgttccttgg

SEQ ID NO: 202012 - DNA, 25 bp, Canis familiaris
tttacaccaagcttccaaccttggg

SEQ ID NO: 202013 - DNA, 25 bp, Canis familiaris
tttaagccaatgacaactgaccctg

SEQ ID NO: 202014 - DNA, 25 bp, Canis familiaris
tttataccattgacatcgctgacac

SEQ ID NO: 202015 - DNA, 25 bp, Canis familiaris
tttaaccatgatacacgctgctctc

SEQ ID NO: 202016 - DNA, 25 bp, Canis familiaris
tttcaatgactttcatgcctctctc

SEQ ID NO: 202017 - DNA, 25 bp, Canis familiaris
tttagagacatttctcccatctctc

SEQ ID NO: 202018 - DNA, 25 bp, Canis familiaris
tttaaggatcccagcgactacgtgc

SEQ ID NO: 202019 - DNA, 25 bp, Canis familiaris
tttaaggaaccacagtctccgtgcc

SEQ ID NO: 202020 - DNA, 25 bp, Canis familiaris
tttaagagaaccgctttccagtgcc

SEQ ID NO: 202021 - DNA, 25 bp, Canis familiaris
ttcaattgaggaaccacttgaccgg

SEQ ID NO: 202022 - DNA, 25 bp, Canis familiaris
ttctcgagaagcaccaaataacgga

SEQ ID NO: 202023 - DNA, 25 bp, Canis familiaris
ttcaatggaagcgcgggtatacggc

SEQ ID NO: 202024 - DNA, 25 bp, Canis familiaris
ttcattcgagcgctccgggaaggag

SEQ ID NO: 202025 - DNA, 25 bp, Canis familiaris
ttgatcctagggaccctggacggag

SEQ ID NO: 202026 - DNA, 25 bp, Canis familiaris
ttatttctcggtgcctggaaggaca

SEQ ID NO: 202027 - DNA, 25 bp, Canis familiaris
tttcaactcggcccctggtgaaaat

SEQ ID NO: 202028 - DNA, 25 bp, Canis familiaris
ttatcgttcgtgctctcacgggaat

SEQ ID NO: 202029 - DNA, 25 bp, Canis familiaris
ttttgctccagtgttacaggaaaac

SEQ ID NO: 202030 - DNA, 25 bp, Canis familiaris
tttttccagtcctcaaatgcacaca

SEQ ID NO: 202031 - DNA, 25 bp, Canis familiaris
tttcttctaggtttacataccacag

SEQ ID NO: 202032 - DNA, 25 bp, Canis familiaris
ttacttccaggtttggtctcaccaa

SEQ ID NO: 202033 - DNA, 25 bp, Canis familiaris
tttcttccagtgaatgggtccctcc

SEQ ID NO: 202034 - DNA, 25 bp, Canis familiaris
tttttccgaagctggatcttctccc

SEQ ID NO: 202035 - DNA, 25 bp, Canis familiaris
tttttgcctaccttggtagcccact

SEQ ID NO: 202036 - DNA, 25 bp, Canis familiaris
tttttcagttcctgactacccacat

SEQ ID NO: 202037 - DNA, 25 bp, Canis familiaris
ttttgtcaacctgggaaacaccaca

SEQ ID NO: 202038 - DNA, 25 bp, Canis familiaris
ttttataacctggagccccattcaa

SEQ ID NO: 202039 - DNA, 25 bp, Canis familiaris
tttttaagcacttgggcgtcagcaa

SEQ ID NO: 202040 - DNA, 25 bp, Canis familiaris
ttgttttctcactagaaggttgcaa

SEQ ID NO: 202041 - DNA, 25 bp, Canis familiaris
tttagtttcactttcgagatcgcag

SEQ ID NO: 202042 - DNA, 25 bp, Canis familiaris
tttagtgtttctttggatctccaca

SEQ ID NO: 202043 - DNA, 25 bp, Canis familiaris
tttaagcatttttctccatgaccca

SEQ ID NO: 202044 - DNA, 25 bp, Canis familiaris
tttacactgtttctgcagctactcc

SEQ ID NO: 202045 - DNA, 25 bp, Canis familiaris
tttatccttttgtggctgaaccctt

SEQ ID NO: 202046 - DNA, 25 bp, Canis familiaris
tttaccttttctattgtactcgaat

SEQ ID NO: 202047 - DNA, 25 bp, Canis familiaris
ttttacttacttacttgaaccatga

SEQ ID NO: 202048 - DNA, 25 bp, Canis familiaris
ttttacgttctccatgttgacattc

SEQ ID NO: 202049 - DNA, 25 bp, Canis familiaris
ttttacgctattacagggcctccga

SEQ ID NO: 202050 - DNA, 25 bp, Canis familiaris
ttcacccctttgcagggcctagaga

SEQ ID NO: 202051 - DNA, 25 bp, Canis familiaris
ttcagccccttagaagcaccagagg

SEQ ID NO: 202052 - DNA, 25 bp, Canis familiaris
ttctgggccctagcaggagtcaagg

SEQ ID NO: 202053 - DNA, 25 bp, Canis familiaris
ttaggagccctaagttggatcataa

SEQ ID NO: 202054 - DNA, 25 bp, Canis familiaris
ttttacccatcatgttagccaagat

SEQ ID NO: 202055 - DNA, 25 bp, Canis familiaris
ttttctctcctgtggtaccgaatta

SEQ ID NO: 202056 - DNA, 25 bp, Canis familiaris
tttactcacctctgtggatcacgac

SEQ ID NO: 202057 - DNA, 25 bp, Canis familiaris
tttttgcgcaactgtggacactatc

SEQ ID NO: 202058 - DNA, 25 bp, Canis familiaris
tttttgccgatctgaccatcaagtc

SEQ ID NO: 202059 - DNA, 25 bp, Canis familiaris
tttttcacaatccgagtgccggctc

SEQ ID NO: 202060 - DNA, 25 bp, Canis familiaris
tttcttgcagaaaacaaggctggag

SEQ ID NO: 202061 - DNA, 25 bp, Canis familiaris
tttcattcagcataataccctccag

SEQ ID NO: 202062 - DNA, 25 bp, Canis familiaris
tttattgaaacattacctgccttgc

SEQ ID NO: 202063 - DNA, 25 bp, Canis familiaris
ttattcaaatacttccgggctggga

SEQ ID NO: 202064 - DNA, 25 bp, Canis familiaris
ttttacacattctccgatggggtat

SEQ ID NO: 202065 - DNA, 25 bp, Canis familiaris
ttttcagctttctccagttaatgta

SEQ ID NO: 202066 - DNA, 25 bp, Canis familiaris
ttcttacctttagcaaaacagtctc

SEQ ID NO: 202067 - DNA, 25 bp, Canis familiaris
tttataccctttgtgtataactctc

SEQ ID NO: 202068 - DNA, 25 bp, Canis familiaris
tttataccttatgcttttcccatca

SEQ ID NO: 202069 - DNA, 25 bp, Canis familiaris
tttcactccttgttattttttcatg

SEQ ID NO: 202070 - DNA, 25 bp, Canis familiaris
tttactgctgcaggtttttttctct

SEQ ID NO: 202071 - DNA, 25 bp, Canis familiaris
tttattggcctgtttctttggtttg

SEQ ID NO: 202072 - DNA, 25 bp, Canis familiaris
tttcttggcactatggttctctgtt

SEQ ID NO: 202073 - DNA, 25 bp, Canis familiaris
tttcttggagctgctgttgctaccc

SEQ ID NO: 202074 - DNA, 25 bp, Canis familiaris
tttcttgtagctcttatatatccct

SEQ ID NO: 202075 - DNA, 25 bp, Canis familiaris
tttttgtgactgcattccagggcct

SEQ ID NO: 202076 - DNA, 25 bp, Canis familiaris
tttatgaaggtgcctaccacgtcct

SEQ ID NO: 202077 - DNA, 25 bp, Canis familiaris
tttcatggcatggatcttacccgtg

SEQ ID NO: 202078 - DNA, 25 bp, Canis familiaris
ttatgatgtcatcgttacagccggc

SEQ ID NO: 202079 - DNA, 25 bp, Canis familiaris
ttatgtgccactctagcgaaggccc

SEQ ID NO: 202080 - DNA, 25 bp, Canis familiaris
ttggagccaccttcgaagagggccc

SEQ ID NO: 202081 - DNA, 25 bp, Canis familiaris
tttcagccccaaggcctggggactc

SEQ ID NO: 202082 - DNA, 25 bp, Canis familiaris
tttcagttagcctgccatggtaccc

SEQ ID NO: 202083 - DNA, 25 bp, Canis familiaris
tttagttacaccttatgggcccgtg

SEQ ID NO: 202084 - DNA, 25 bp, Canis familiaris
tttacttctcaggcctatggtgtcc

SEQ ID NO: 202085 - DNA, 25 bp, Canis familiaris
tttacctcatcagaagcagtggctc

SEQ ID NO: 202086 - DNA, 25 bp, Canis familiaris
tttacacccaggtagaggcagtgcc

SEQ ID NO: 202087 - DNA, 25 bp, Canis familiaris
tttacaagccgcaaaggcagcaggc

SEQ ID NO: 202088 - DNA, 25 bp, Canis familiaris
ttttcacgccgaccggcacatgatc

SEQ ID NO: 202089 - DNA, 25 bp, Canis familiaris
ttattccccgaagtcagaagctccc

SEQ ID NO: 202090 - DNA, 25 bp, Canis familiaris
ttttccctcagaacttagactcctt

SEQ ID NO: 202091 - DNA, 25 bp, Canis familiaris
tttattctccacggttatacctctt

SEQ ID NO: 202092 - DNA, 25 bp, Canis familiaris
tttatgttgatctgtgtttctccca

SEQ ID NO: 202093 - DNA, 25 bp, Canis familiaris
tttattgtgtttgtcattagcctga

SEQ ID NO: 202094 - DNA, 25 bp, Canis familiaris
tttatgtgatgtgtattccattccg

SEQ ID NO: 202095 - DNA, 25 bp, Canis familiaris
tttattgagtgcctgttccatgcca

SEQ ID NO: 202096 - DNA, 25 bp, Canis familiaris
tttatccagcatcctttatctgtgg

SEQ ID NO: 202097 - DNA, 25 bp, Canis familiaris
tttattcgcaccattgcggtcgcgc

SEQ ID NO: 202098 - DNA, 25 bp, Canis familiaris
ttttattcgcaccattgcggtcgcg

SEQ ID NO: 202099 - DNA, 25 bp, Canis familiaris
tttttgttgcaggtgtgcgtgccgg

SEQ ID NO: 202100 - DNA, 25 bp, Canis familiaris
tttagtgccgcagcttcggctgtag

SEQ ID NO: 202101 - DNA, 25 bp, Canis familiaris
tttatctcctgtacttcaggcatgt

SEQ ID NO: 202102 - DNA, 25 bp, Canis familiaris
tttttgtcttacctgcagatattaa

SEQ ID NO: 202103 - DNA, 25 bp, Canis familiaris
ttttcgtcattacctgtgcttggga

SEQ ID NO: 202104 - DNA, 25 bp, Canis familiaris
tttttggataagggtgtgtgaagaa

SEQ ID NO: 202105 - DNA, 25 bp, Canis familiaris
ttttttgtaatatgtgttaaatcac

SEQ ID NO: 202106 - DNA, 25 bp, Canis familiaris
ttcctttggttgagtttacgacagc

SEQ ID NO: 202107 - DNA, 25 bp, Canis familiaris
ttttgtgtggttttgtttagtggag

SEQ ID NO: 202108 - DNA, 25 bp, Canis familiaris
ttttttggtccttttcttacagatg

SEQ ID NO: 202109 - DNA, 25 bp, Canis familiaris
tttttgggcctcagttctctcaaaa

SEQ ID NO: 202110 - DNA, 25 bp, Canis familiaris
tttttgcccctgattctgttaagga

SEQ ID NO: 202111 - DNA, 25 bp, Canis familiaris
tttttacccagttatcttaagatgc

SEQ ID NO: 202112 - DNA, 25 bp, Canis familiaris
tttttatcctcgaattcccaagtga

SEQ ID NO: 202113 - DNA, 25 bp, Canis familiaris
tttagtatccttatcctcctagatg

SEQ ID NO: 202114 - DNA, 25 bp, Canis familiaris
ttatatatgtccgtttcccttacat

SEQ ID NO: 202115 - DNA, 25 bp, Canis familiaris
ttttcaatccgcactttcctaattg

SEQ ID NO: 202116 - DNA, 25 bp, Canis familiaris
ttttccattcgcactgtaacataaa

SEQ ID NO: 202117 - DNA, 25 bp, Canis familiaris
ttttccattccattggattcacatt

SEQ ID NO: 202118 - DNA, 25 bp, Canis familiaris
ttttctgaccagtattatgtaattt

SEQ ID NO: 202119 - DNA, 25 bp, Canis familiaris
ttttggcctcgccattttcagaatt

SEQ ID NO: 202120 - DNA, 25 bp, Canis familiaris
ttttgggctcggctttcaatgactt

SEQ ID NO: 202121 - DNA, 25 bp, Canis familiaris
ttttgagccctggttgtacaagact

SEQ ID NO: 202122 - DNA, 25 bp, Canis familiaris
ttttgtgaccatcttgtccatcagc

SEQ ID NO: 202123 - DNA, 25 bp, Canis familiaris
ttttgcgacgtgcttgttagaccca

SEQ ID NO: 202124 - DNA, 25 bp, Canis familiaris
ttttcgtcattgcgttatattccca

SEQ ID NO: 202125 - DNA, 25 bp, Canis familiaris
ttttctccatagtacttattaccac

SEQ ID NO: 202126 - DNA, 25 bp, Canis familiaris
tttacattatacgctgctattcccc

SEQ ID NO: 202127 - DNA, 25 bp, Canis familiaris
tttacaaaagcccacattcctctgc

SEQ ID NO: 202128 - DNA, 25 bp, Canis familiaris
tttacatgtaagaccgcactctctc

SEQ ID NO: 202129 - DNA, 25 bp, Canis familiaris
tttacattcattatctcatccatcc

SEQ ID NO: 202130 - DNA, 25 bp, Canis familiaris
tttagcatttaattctctcctccta

SEQ ID NO: 202131 - DNA, 25 bp, Canis familiaris
tttagcaataagttccccccatgaa

SEQ ID NO: 202132 - DNA, 25 bp, Canis familiaris
tttagttcagtgttgacctcctcat

SEQ ID NO: 202133 - DNA, 25 bp, Canis familiaris
tttacttagcatactggcccactat

SEQ ID NO: 202134 - DNA, 25 bp, Canis familiaris
ttttcatttgacatgggccacttgt

SEQ ID NO: 202135 - DNA, 25 bp, Canis familiaris
ttttcatttcccctggtattgtctt

SEQ ID NO: 202136 - DNA, 25 bp, Canis familiaris
ttttattgctgctcgtggctatcgt

SEQ ID NO: 202137 - DNA, 25 bp, Canis familiaris
tttcacattctctggtgtcatacac

SEQ ID NO: 202138 - DNA, 25 bp, Canis familiaris
tttcacttcatctgagcctcaggac

SEQ ID NO: 202139 - DNA, 25 bp, Canis familiaris
tttactctccacactgctaggacga

SEQ ID NO: 202140 - DNA, 25 bp, Canis familiaris
tttactctcctcacccatagaggac

SEQ ID NO: 202141 - DNA, 25 bp, Canis familiaris
tttagctttactccccaataggaat

SEQ ID NO: 202142 - DNA, 25 bp, Canis familiaris
tttactatctagtctctatcattga

SEQ ID NO: 202143 - DNA, 25 bp, Canis familiaris
tttagtcacttgccatctcatttac

SEQ ID NO: 202144 - DNA, 25 bp, Canis familiaris
tttagccactaccatgcagcatata

SEQ ID NO: 202145 - DNA, 25 bp, Canis familiaris
tttatgcacacttcctgaggctgag

SEQ ID NO: 202146 - DNA, 25 bp, Canis familiaris
tttaccgtctccaagtgcagcagga

SEQ ID NO: 202147 - DNA, 25 bp, Canis familiaris
tttatccctctggccgatcatggga

SEQ ID NO: 202148 - DNA, 25 bp, Canis familiaris
ttttccctctggagaagttctactc

SEQ ID NO: 202149 - DNA, 25 bp, Canis familiaris
tttttcctcttactgtagtttgact

SEQ ID NO: 202150 - DNA, 25 bp, Canis familiaris
ttttcaccctattgcagctaaatgg

SEQ ID NO: 202151 - DNA, 25 bp, Canis familiaris
tttagcaccactttaagccgagggc

SEQ ID NO: 202152 - DNA, 25 bp, Canis familiaris
tttagcgccactttcaatccagggc

SEQ ID NO: 202153 - DNA, 25 bp, Canis familiaris
tttacggcaatatcatcaccacacg

SEQ ID NO: 202154 - DNA, 25 bp, Canis familiaris
tttatcccacagtatacacacacac

SEQ ID NO: 202155 - DNA, 25 bp, Canis familiaris
ttttcgcccagtggcacaaacctgc

SEQ ID NO: 202156 - DNA, 25 bp, Canis familiaris
ttttcgttcagcaggcaaggccagc

SEQ ID NO: 202157 - DNA, 25 bp, Canis familiaris
tttcaagtttgcaccactgaccagg

SEQ ID NO: 202158 - DNA, 25 bp, Canis familiaris
tttacagctttcaccaccagctgca

SEQ ID NO: 202159 - DNA, 25 bp, Canis familiaris
tttatcgttatcacaaggcagccct

SEQ ID NO: 202160 - DNA, 25 bp, Canis familiaris
ttattccttatttagagggcctcta

SEQ ID NO: 202161 - DNA, 25 bp, Canis familiaris
ttttctggaatttaaggtgttgcat

SEQ ID NO: 202162 - DNA, 25 bp, Canis familiaris
tttttggacagtttacttgttgaga

SEQ ID NO: 202163 - DNA, 25 bp, Canis familiaris
ttttcgtacgtatattaatcatgga

SEQ ID NO: 202164 - DNA, 25 bp, Canis familiaris
ttttcttcacgtttcttaaaggcat

SEQ ID NO: 202165 - DNA, 25 bp, Canis familiaris
ttggatcttccgtttgttaataaag

SEQ ID NO: 202166 - DNA, 25 bp, Canis familiaris
ttatatttccgtttgtgtcactaaa

SEQ ID NO: 202167 - DNA, 25 bp, Canis familiaris
ttatcatttcccaacggtttcgatg

SEQ ID NO: 202168 - DNA, 25 bp, Canis familiaris
ttactttccttctggcatttggacc

SEQ ID NO: 202169 - DNA, 25 bp, Canis familiaris
ttttttcctttagaaatggcatcca

SEQ ID NO: 202170 - DNA, 25 bp, Canis familiaris
ttttttgtttaaaagcaaggcatgc

SEQ ID NO: 202171 - DNA, 25 bp, Canis familiaris
ttctctttatttgttactaggtgta

SEQ ID NO: 202172 - DNA, 25 bp, Canis familiaris
tttatttatttcctcccgagtggag

SEQ ID NO: 202173 - DNA, 25 bp, Canis familiaris
ttttattcctttacccatagattag

SEQ ID NO: 202174 - DNA, 25 bp, Canis familiaris
tttttcctcttaaaccagtgttgat

SEQ ID NO: 202175 - DNA, 25 bp, Canis familiaris
tttttccatcccagtcgttagtgat

SEQ ID NO: 202176 - DNA, 25 bp, Canis familiaris
ttttaccattccagtcatttttgtg

SEQ ID NO: 202177 - DNA, 25 bp, Canis familiaris
ttttcccaaccacgtatccataggt

SEQ ID NO: 202178 - DNA, 25 bp, Canis familiaris
tttttccctccatgaacacatggag

SEQ ID NO: 202179 - DNA, 25 bp, Canis familiaris
tttttccccagcaaagacctcatgg

SEQ ID NO: 202180 - DNA, 25 bp, Canis familiaris
ttttctctgcccatcaaggaatctg

SEQ ID NO: 202181 - DNA, 25 bp, Canis familiaris
ttttaccctactgatgatgtgttgt

SEQ ID NO: 202182 - DNA, 25 bp, Canis familiaris
tttaaaccttgcttagtctgtcctt

SEQ ID NO: 202183 - DNA, 25 bp, Canis familiaris
tttaacaaccctgattctctgactt

SEQ ID NO: 202184 - DNA, 25 bp, Canis familiaris
tttatcacaagctccttgaatctac

SEQ ID NO: 202185 - DNA, 25 bp, Canis familiaris
tttagcgcaggctctctatttcata

SEQ ID NO: 202186 - DNA, 25 bp, Canis familiaris
tttagccacggcttctatttcatac

SEQ ID NO: 202187 - DNA, 25 bp, Canis familiaris
tttagccacggcttctatttcatac

SEQ ID NO: 202188 - DNA, 25 bp, Canis familiaris
tttagaagtggcctctactccaaca

SEQ ID NO: 202189 - DNA, 25 bp, Canis familiaris
tttagaaggtgcctgctactgcaca

SEQ ID NO: 202190 - DNA, 25 bp, Canis familiaris
ttttctatggtcctgtactgccaga

SEQ ID NO: 202191 - DNA, 25 bp, Canis familiaris
ttttctatgcaaaggtgattccgag

SEQ ID NO: 202192 - DNA, 25 bp, Canis familiaris
ttttttaagggttctgcatcgtgga

SEQ ID NO: 202193 - DNA, 25 bp, Canis familiaris
ttttttaaggtcaactactatgtat

SEQ ID NO: 202194 - DNA, 25 bp, Canis familiaris
tttattccaatgttaatccaaactt

SEQ ID NO: 202195 - DNA, 25 bp, Canis familiaris
ttttgctgccaaaccataaaaactg

SEQ ID NO: 202196 - DNA, 25 bp, Canis familiaris
tttatcccaaaccaatgaaataaag

SEQ ID NO: 202197 - DNA, 25 bp, Canis familiaris
ttttctagaaactttggtacacaag

SEQ ID NO: 202198 - DNA, 25 bp, Canis familiaris
tttttactacactttggtctcaaat

SEQ ID NO: 202199 - DNA, 25 bp, Canis familiaris
ttttatcattacacttgagtaataa

SEQ ID NO: 202200 - DNA, 25 bp, Canis familiaris
ttttatcaattcaactagagctaga

SEQ ID NO: 202201 - DNA, 25 bp, Canis familiaris
ttgtccacaacggcaaagagtaggg

SEQ ID NO: 202202 - DNA, 25 bp, Canis familiaris
ttttacaagccgcaaaggcagcagg

SEQ ID NO: 202203 - DNA, 25 bp, Canis familiaris
ttttgacaagcctccaaaaggagat

SEQ ID NO: 202204 - DNA, 25 bp, Canis familiaris
ttttacaactcatccgactggtggt

SEQ ID NO: 202205 - DNA, 25 bp, Canis familiaris
ttttgctaaccaccccataggaggg

SEQ ID NO: 202206 - DNA, 25 bp, Canis familiaris
tttatgtagaactcccaattactgg

SEQ ID NO: 202207 - DNA, 25 bp, Canis familiaris
ttttcaagcaatcaacaagttcacg

SEQ ID NO: 202208 - DNA, 25 bp, Canis familiaris
ttctctgccaagataacataggaca

SEQ ID NO: 202209 - DNA, 25 bp, Canis familiaris
ttctgagcccagaaaatccgggaac

SEQ ID NO: 202210 - DNA, 25 bp, Canis familiaris
ttcgtcccgctaactctggggaaca

SEQ ID NO: 202211 - DNA, 25 bp, Canis familiaris
ttttccccatacgggggtgacacat

SEQ ID NO: 202212 - DNA, 25 bp, Canis familiaris
ttttaccagaagaccagggtcccat

SEQ ID NO: 202213 - DNA, 25 bp, Canis familiaris
tttttcattgtattccagggtccca

SEQ ID NO: 202214 - DNA, 25 bp, Canis familiaris
tttttatcttttaagggagccagca

SEQ ID NO: 202215 - DNA, 25 bp, Canis familiaris
ttttttcattggccaaggcaaccaa

SEQ ID NO: 202216 - DNA, 25 bp, Canis familiaris
ttattttttgagagaaggcccaact

SEQ ID NO: 202217 - DNA, 25 bp, Canis familiaris
ttttttaaagcatcacgtcaccgtt

SEQ ID NO: 202218 - DNA, 25 bp, Canis familiaris
ttttggctaaactcacagccaccct

SEQ ID NO: 202219 - DNA, 25 bp, Canis familiaris
tttttctacagagggccagcacacc

SEQ ID NO: 202220 - DNA, 25 bp, Canis familiaris
ttttgcctttggtgtcacaaccttc

SEQ ID NO: 202221 - DNA, 25 bp, Canis familiaris
ttttactttgtgcggccattactcc

SEQ ID NO: 202222 - DNA, 25 bp, Canis familiaris
ttttacttgtatcttcctgaactca

SEQ ID NO: 202223 - DNA, 25 bp, Canis familiaris
tttatatgcttgctgacttcttaac

SEQ ID NO: 202224 - DNA, 25 bp, Canis familiaris
tttaatgctaggcaccacgtaagaa

SEQ ID NO: 202225 - DNA, 25 bp, Canis familiaris
ttgtaactagcagaccacgtactcc

SEQ ID NO: 202226 - DNA, 25 bp, Canis familiaris
tttaagttgactacctctgtactcc

SEQ ID NO: 202227 - DNA, 25 bp, Canis familiaris
tttaaagtggtcacatcgaacccca

SEQ ID NO: 202228 - DNA, 25 bp, Canis familiaris
tttaaaggagtcatctacccaccca

SEQ ID NO: 202229 - DNA, 25 bp, Canis familiaris
ttttacggcaatatcatcaccacac

SEQ ID NO: 202230 - DNA, 25 bp, Canis familiaris
ttttgaatggtctgccatcacggcc

SEQ ID NO: 202231 - DNA, 25 bp, Canis familiaris
tttaaatgtgatacccatagcttcc

SEQ ID NO: 202232 - DNA, 25 bp, Canis familiaris
tttactattgttcctatcacttcct

SEQ ID NO: 202233 - DNA, 25 bp, Canis familiaris
tttactttatattttcactgacctt

SEQ ID NO: 202234 - DNA, 25 bp, Canis familiaris
tttacctttattcatcactatcctt

SEQ ID NO: 202235 - DNA, 25 bp, Canis familiaris
tttaccacattttgaattcttcagt

SEQ ID NO: 202236 - DNA, 25 bp, Canis familiaris
tttacatcagtacttaactctttga

SEQ ID NO: 202237 - DNA, 25 bp, Canis familiaris
ttatacttgctgtttaggctcttat

SEQ ID NO: 202238 - DNA, 25 bp, Canis familiaris
tttactttggtaatgtgcctttgat

SEQ ID NO: 202239 - DNA, 25 bp, Canis familiaris
tttactttggtcctatttcttgcac

SEQ ID NO: 202240 - DNA, 25 bp, Canis familiaris
ttaggtttggctgtgttctttccct

SEQ ID NO: 202241 - DNA, 25 bp, Canis familiaris
ttaggtctactcacatttttctccc

SEQ ID NO: 202242 - DNA, 25 bp, Canis familiaris
tttttgtcactcaacattctgtttc

SEQ ID NO: 202243 - DNA, 25 bp, Canis familiaris
ttttttttcaacactcttacatccg

SEQ ID NO: 202244 - DNA, 25 bp, Canis familiaris
ttttctgtttattgaacctgccgcc

SEQ ID NO: 202245 - DNA, 25 bp, Canis familiaris
ttttctatgtttacataccccagtc

SEQ ID NO: 202246 - DNA, 25 bp, Canis familiaris
ttttctgtctttgcaaacccttcag

SEQ ID NO: 202247 - DNA, 25 bp, Canis familiaris
tttttttcttcatgcaaccgttgag

SEQ ID NO: 202248 - DNA, 25 bp, Canis familiaris
ttttaagtttcatgactgtcgtttt

SEQ ID NO: 202249 - DNA, 25 bp, Canis familiaris
tttttctctttatgggctactttct

SEQ ID NO: 202250 - DNA, 25 bp, Canis familiaris
ttttcttctttctgggggacttgat

SEQ ID NO: 202251 - DNA, 25 bp, Canis familiaris
ttcttttttgtctgagggtcaccca

SEQ ID NO: 202252 - DNA, 25 bp, Canis familiaris
tttttttatgtccaagtgcccacgt

SEQ ID NO: 202253 - DNA, 25 bp, Canis familiaris
tttttcttgttcacaatctgctcaa

SEQ ID NO: 202254 - DNA, 25 bp, Canis familiaris
tttttgttttccctaacagcaactg

SEQ ID NO: 202255 - DNA, 25 bp, Canis familiaris
tttatttgttacccttgactacact

SEQ ID NO: 202256 - DNA, 25 bp, Canis familiaris
tttttcgtcatagacctaccatccc

SEQ ID NO: 202257 - DNA, 25 bp, Canis familiaris
ttttctctgaaagacctatctgtac

SEQ ID NO: 202258 - DNA, 25 bp, Canis familiaris
ttttttcattaataggcactaacca

SEQ ID NO: 202259 - DNA, 25 bp, Canis familiaris
tttttacttaaatacgcataattca

SEQ ID NO: 202260 - DNA, 25 bp, Canis familiaris
ttttctactgtaacaaaagctaaat

SEQ ID NO: 202261 - DNA, 25 bp, Canis familiaris
tttacttcgagcaccaaactcacat

SEQ ID NO: 202262 - DNA, 25 bp, Canis familiaris
ttttttgccagcttccaaaccaata

SEQ ID NO: 202263 - DNA, 25 bp, Canis familiaris
ttttgttctggattacgtaggacta

SEQ ID NO: 202264 - DNA, 25 bp, Canis familiaris
ttttatttggagacagggagagcac

SEQ ID NO: 202265 - DNA, 25 bp, Canis familiaris
ttttttctcgagtcatcagtgggcc

SEQ ID NO: 202266 - DNA, 25 bp, Canis familiaris
tttttttatgggtcactgaggcctt

SEQ ID NO: 202267 - DNA, 25 bp, Canis familiaris
tttatggctctgtggtgtggggttt

SEQ ID NO: 202268 - DNA, 25 bp, Canis familiaris
tttatcttatgctggtgtgtgtgtg

SEQ ID NO: 202269 - DNA, 25 bp, Canis familiaris
ttttttcatgcaaggttgtttttat

SEQ ID NO: 202270 - DNA, 25 bp, Canis familiaris
ttttcttaactggattgattttggc

SEQ ID NO: 202271 - DNA, 25 bp, Canis familiaris
ttgcttgaataatgttttttggagg

SEQ ID NO: 202272 - DNA, 25 bp, Canis familiaris
ttttgcagaattcgttttttgaagg

SEQ ID NO: 202273 - DNA, 25 bp, Canis familiaris
ttattccagttcattttgtttaaat

SEQ ID NO: 202274 - DNA, 25 bp, Canis familiaris
ttaccctttcctgtgtgttttatct

SEQ ID NO: 202275 - DNA, 25 bp, Canis familiaris
ttacccgtaccagtattttgattat

SEQ ID NO: 202276 - DNA, 25 bp, Canis familiaris
ttaccctttagatgtatttgaggat

SEQ ID NO: 202277 - DNA, 25 bp, Canis familiaris
ttacctcttgctgtggtaggtagta

SEQ ID NO: 202278 - DNA, 25 bp, Canis familiaris
ttagcttctttattgggaggtaggg

SEQ ID NO: 202279 - DNA, 25 bp, Canis familiaris
ttcagttgctttttggggtaatttg

SEQ ID NO: 202280 - DNA, 25 bp, Canis familiaris
ttagggcaggctctggggttttgtg

SEQ ID NO: 202281 - DNA, 25 bp, Canis familiaris
ttaggcgacggcagagcgggagcct

SEQ ID NO: 202282 - DNA, 25 bp, Canis familiaris
ttaccgtgggcaactctgtggacca

SEQ ID NO: 202283 - DNA, 25 bp, Canis familiaris
ttattcggcgtgacgcatcgcgtgg

SEQ ID NO: 202284 - DNA, 25 bp, Canis familiaris
ttttcctggcattagatcctctggt

SEQ ID NO: 202285 - DNA, 25 bp, Canis familiaris
ttatctgtcattaaattccctgtgt

SEQ ID NO: 202286 - DNA, 25 bp, Canis familiaris
ttcttgtttgattatgccccaatgg

SEQ ID NO: 202287 - DNA, 25 bp, Canis familiaris
ttttgctgtgtgtagatgctcaaca

SEQ ID NO: 202288 - DNA, 25 bp, Canis familiaris
ttttctgctgcaaagtctgcgtcct

SEQ ID NO: 202289 - DNA, 25 bp, Canis familiaris
ttttctgtgaattttggtctcctga

SEQ ID NO: 202290 - DNA, 25 bp, Canis familiaris
tttacttcaattatcagtgtcccaa

SEQ ID NO: 202291 - DNA, 25 bp, Canis familiaris
tttacttgcctaacatgcaattacc

SEQ ID NO: 202292 - DNA, 25 bp, Canis familiaris
tttataatccctacagcagctttcc

SEQ ID NO: 202293 - DNA, 25 bp, Canis familiaris
ttttaatgatttacaggctggtgcc

SEQ ID NO: 202294 - DNA, 25 bp, Canis familiaris
ttatgaaaactgtgcaattgtgtgc

SEQ ID NO: 202295 - DNA, 25 bp, Canis familiaris
ttatagcataagggaccatagtgtc

SEQ ID NO: 202296 - DNA, 25 bp, Canis familiaris
ttctcgcaaatgggacatctcgatg

SEQ ID NO: 202297 - DNA, 25 bp, Canis familiaris
ttttgagaatctgactgcatcaagg

SEQ ID NO: 202298 - DNA, 25 bp, Canis familiaris
tttttaatgtgctaccaatatggtg

SEQ ID NO: 202299 - DNA, 25 bp, Canis familiaris
tttttttgtaactaaatgcgcatgg

SEQ ID NO: 202300 - DNA, 25 bp, Canis familiaris
ttttttttccctcaaggatggcctg

SEQ ID NO: 202301 - DNA, 25 bp, Canis familiaris
ttttcttctgtcaccaaaagaggtc

SEQ ID NO: 202302 - DNA, 25 bp, Canis familiaris
ttttcatggccatacactaataagg

SEQ ID NO: 202303 - DNA, 25 bp, Canis familiaris
tttttgcccattgaccagataaata

SEQ ID NO: 202304 - DNA, 25 bp, Canis familiaris
tttttcccttggggatggaatgcat

SEQ ID NO: 202305 - DNA, 25 bp, Canis familiaris
tttttcccattgaggcattttattt

SEQ ID NO: 202306 - DNA, 25 bp, Canis familiaris
tttttactcttgatttacttcttgt

SEQ ID NO: 202307 - DNA, 25 bp, Canis familiaris
tttttattttatttatggtagtcag

SEQ ID NO: 202308 - DNA, 25 bp, Canis familiaris
ttttttaatttcttgatttcaacat

SEQ ID NO: 202309 - DNA, 25 bp, Canis familiaris
tttatttttttatttcattgacact

SEQ ID NO: 202310 - DNA, 25 bp, Canis familiaris
tttagccattttgtttcttgcaccc

SEQ ID NO: 202311 - DNA, 25 bp, Canis familiaris
tttaggatcttttgtttctagtgtc

SEQ ID NO: 202312 - DNA, 25 bp, Canis familiaris
tttactgtattttgtgtgttacgtt

SEQ ID NO: 202313 - DNA, 25 bp, Canis familiaris
tttactttttaatctacactgttag

SEQ ID NO: 202314 - DNA, 25 bp, Canis familiaris
tttacctatttattccagtcatctg

SEQ ID NO: 202315 - DNA, 25 bp, Canis familiaris
tttacttatcttttccctcagtagt

SEQ ID NO: 202316 - DNA, 25 bp, Canis familiaris
tttacttataagttcactctatgta

SEQ ID NO: 202317 - DNA, 25 bp, Canis familiaris
tttactgtgatattataccattgtt

SEQ ID NO: 202318 - DNA, 25 bp, Canis familiaris
ttttcagggacgtagcacttgctta

SEQ ID NO: 202319 - DNA, 25 bp, Canis familiaris
ttttaggggctctgcacctggaatg

SEQ ID NO: 202320 - DNA, 25 bp, Canis familiaris
tttttggagccaaacacctgctgtt

SEQ ID NO: 202321 - DNA, 25 bp, Canis familiaris
ttgtttcgaggaaacgcgccggttg

SEQ ID NO: 202322 - DNA, 25 bp, Canis familiaris
tttattccaggtgtgacgccttttc

SEQ ID NO: 202323 - DNA, 25 bp, Canis familiaris
tttattccagtgccgttcagttttt

SEQ ID NO: 202324 - DNA, 25 bp, Canis familiaris
ttttcatctcggctttgagacttta

SEQ ID NO: 202325 - DNA, 25 bp, Canis familiaris
tttactgctctgcaggcttaacttt

SEQ ID NO: 202326 - DNA, 25 bp, Canis familiaris
tttactcttagactgcctcaatcat

SEQ ID NO: 202327 - DNA, 25 bp, Canis familiaris
tttacatcgataactcagctcctag

SEQ ID NO: 202328 - DNA, 25 bp, Canis familiaris
tttagctgctgttcttcagctccga

SEQ ID NO: 202329 - DNA, 25 bp, Canis familiaris
tttaggcttatcgatgagctaccat

SEQ ID NO: 202330 - DNA, 25 bp, Canis familiaris
tttatgctgcctgttagctatcctc

SEQ ID NO: 202331 - DNA, 25 bp, Canis familiaris
tttatctcactggcttaagactgct

SEQ ID NO: 202332 - DNA, 25 bp, Canis familiaris
tttatctcactggcttaagactgct

SEQ ID NO: 202333 - DNA, 25 bp, Canis familiaris
tttacccctcattatgagcctctga

SEQ ID NO: 202334 - DNA, 25 bp, Canis familiaris
ttttccccttaatgccattgaacct

SEQ ID NO: 202335 - DNA, 25 bp, Canis familiaris
ttttccccagaaaagcctgaggatg

SEQ ID NO: 202336 - DNA, 25 bp, Canis familiaris
tttaccaaattctggcctaggcatg

SEQ ID NO: 202337 - DNA, 25 bp, Canis familiaris
ttagaccgaattctgcacctcggct

SEQ ID NO: 202338 - DNA, 25 bp, Canis familiaris
ttagtcctacattttgatcttcaga

SEQ ID NO: 202339 - DNA, 25 bp, Canis familiaris
ttattcctacatatcattctacaat

SEQ ID NO: 202340 - DNA, 25 bp, Canis familiaris
ttatcactctttctcgatctaaaat

SEQ ID NO: 202341 - DNA, 25 bp, Canis familiaris
tttttcttccttcgattgctgaaat

SEQ ID NO: 202342 - DNA, 25 bp, Canis familiaris
tttttcctccttctatgcttataaa

SEQ ID NO: 202343 - DNA, 25 bp, Canis familiaris
ttttgttttcttcttcagtttcaag

SEQ ID NO: 202344 - DNA, 25 bp, Canis familiaris
ttttcttaccttcatttgcttttat

SEQ ID NO: 202345 - DNA, 25 bp, Canis familiaris
ttttcttccactcattattttttct

SEQ ID NO: 202346 - DNA, 25 bp, Canis familiaris
tttatgtgttactttttttgatatt

SEQ ID NO: 202347 - DNA, 25 bp, Canis familiaris
tttagtgattccttacttacatata

SEQ ID NO: 202348 - DNA, 25 bp, Canis familiaris
tttattgttcactaactcaagcaaa

SEQ ID NO: 202349 - DNA, 25 bp, Canis familiaris
tttttctatcagtaattcaatggga

SEQ ID NO: 202350 - DNA, 25 bp, Canis familiaris
tttatttacattcaacataggcaga

SEQ ID NO: 202351 - DNA, 25 bp, Canis familiaris
ttttttccatatgaactcatgccag

SEQ ID NO: 202352 - DNA, 25 bp, Canis familiaris
ttttttccagtcctcaaatgcacac

SEQ ID NO: 202353 - DNA, 25 bp, Canis familiaris
tttatttctgcagggctgaaagcac

SEQ ID NO: 202354 - DNA, 25 bp, Canis familiaris
ttttttctcacagtgtgagaccagc

SEQ ID NO: 202355 - DNA, 25 bp, Canis familiaris
ttttctgagcatacctggaaaatgc

SEQ ID NO: 202356 - DNA, 25 bp, Canis familiaris
ttatgctctggctctctcaaataaa

SEQ ID NO: 202357 - DNA, 25 bp, Canis familiaris
ttttctggcctctataaccaaaaat

SEQ ID NO: 202358 - DNA, 25 bp, Canis familiaris
ttttcctgtatcttaagatgctaag

SEQ ID NO: 202359 - DNA, 25 bp, Canis familiaris
ttttccatgcattatctaaagctat

SEQ ID NO: 202360 - DNA, 25 bp, Canis familiaris
tttatgcaatgcacatctttgaatg

SEQ ID NO: 202361 - DNA, 25 bp, Canis familiaris
ttttgaagcgattctttaagacctt

SEQ ID NO: 202362 - DNA, 25 bp, Canis familiaris
tttatagcagcattttttacaacct

SEQ ID NO: 202363 - DNA, 25 bp, Canis familiaris
ttttagcgtattttccaacctcagt

SEQ ID NO: 202364 - DNA, 25 bp, Canis familiaris
tttttttatttcctcagacttctct

SEQ ID NO: 202365 - DNA, 25 bp, Canis familiaris
tttactttattaagccaaatctcta

SEQ ID NO: 202366 - DNA, 25 bp, Canis familiaris
tttagccttttaagaattgttctca

SEQ ID NO: 202367 - DNA, 25 bp, Canis familiaris
ttttcccatttaaaatagctcctat

SEQ ID NO: 202368 - DNA, 25 bp, Canis familiaris
ttttcccttccacagatagctttat

SEQ ID NO: 202369 - DNA, 25 bp, Canis familiaris
ttttgcccttggtgagaactcttgg

SEQ ID NO: 202370 - DNA, 25 bp, Canis familiaris
ttttccgttgctttaggtatccgtg

SEQ ID NO: 202371 - DNA, 25 bp, Canis familiaris
ttttccgtatgatctactgaactca

SEQ ID NO: 202372 - DNA, 25 bp, Canis familiaris
ttttccgtactgcagagcttacaca

SEQ ID NO: 202373 - DNA, 25 bp, Canis familiaris
tttatcctctagaggctgctacaca

SEQ ID NO: 202374 - DNA, 25 bp, Canis familiaris
tttatctccgtgtgtgcatgtgacc

SEQ ID NO: 202375 - DNA, 25 bp, Canis familiaris
ttttcagcaacccagctgcagtaac

SEQ ID NO: 202376 - DNA, 25 bp, Canis familiaris
ttgacggtattccagtgcactaaca

SEQ ID NO: 202377 - DNA, 25 bp, Canis familiaris
ttatctggtcattcaaatcactaag

SEQ ID NO: 202378 - DNA, 25 bp, Canis familiaris
ttttgtgtcttatttatggaatgat

SEQ ID NO: 202379 - DNA, 25 bp, Canis familiaris
tttttgtctccttttggtattcaca

SEQ ID NO: 202380 - DNA, 25 bp, Canis familiaris
ttatttgtcccctgtacataatccc

SEQ ID NO: 202381 - DNA, 25 bp, Canis familiaris
tttttctccccaaatcattacatcc

SEQ ID NO: 202382 - DNA, 25 bp, Canis familiaris
ttttatttagccactgctctctacc

SEQ ID NO: 202383 - DNA, 25 bp, Canis familiaris
ttttgtagtacccagtgcttctgcc

SEQ ID NO: 202384 - DNA, 25 bp, Canis familiaris
ttttgtcgcatccaccagtgtatca

SEQ ID NO: 202385 - DNA, 25 bp, Canis familiaris
ttttgctctgttgcgagtgtcgcct

SEQ ID NO: 202386 - DNA, 25 bp, Canis familiaris
ttattcacgagtgtgaggacgcctc

SEQ ID NO: 202387 - DNA, 25 bp, Canis familiaris
ttgtggaggaatatgaggacgaact

SEQ ID NO: 202388 - DNA, 25 bp, Canis familiaris
tttagtggagatctgtggcacgaga

SEQ ID NO: 202389 - DNA, 25 bp, Canis familiaris
tttaggacagtcatgtctgcttaaa

SEQ ID NO: 202390 - DNA, 25 bp, Canis familiaris
ttgatgcggaagccgttgcgcttga

SEQ ID NO: 202391 - DNA, 25 bp, Canis familiaris
ttttgggtgcagctgctggcttgca

SEQ ID NO: 202392 - DNA, 25 bp, Canis familiaris
ttttggagctgcactgacacatctg

SEQ ID NO: 202393 - DNA, 25 bp, Canis familiaris
ttttggatcacttctactcattact

SEQ ID NO: 202394 - DNA, 25 bp, Canis familiaris
ttttgtatcgtcgtgcctataacct

SEQ ID NO: 202395 - DNA, 25 bp, Canis familiaris
ttcacgtacgtcctccgataaattt

SEQ ID NO: 202396 - DNA, 25 bp, Canis familiaris
ttagtgtgaccctctcgacaaattt

SEQ ID NO: 202397 - DNA, 25 bp, Canis familiaris
ttttgtgtcacctccagaaagtatt

SEQ ID NO: 202398 - DNA, 25 bp, Canis familiaris
ttttgcattcacgccatcaaatggt

SEQ ID NO: 202399 - DNA, 25 bp, Canis familiaris
tttttccaggccctcagattttggg

SEQ ID NO: 202400 - DNA, 25 bp, Canis familiaris
tttttgaaggccgtgcagttcctcc

SEQ ID NO: 202401 - DNA, 25 bp, Canis familiaris
tttttaatgagcccactttcttgcc

SEQ ID NO: 202402 - DNA, 25 bp, Canis familiaris
tttttattggcttcctttctatcct

SEQ ID NO: 202403 - DNA, 25 bp, Canis familiaris
tttattttgcctttgttttccacat

SEQ ID NO: 202404 - DNA, 25 bp, Canis familiaris
tttatattatcccactgctattatt

SEQ ID NO: 202405 - DNA, 25 bp, Canis familiaris
ttttagtctgcccaagctgattcct

SEQ ID NO: 202406 - DNA, 25 bp, Canis familiaris
ttttagccatgccgggtgtccgtaa

SEQ ID NO: 202407 - DNA, 25 bp, Canis familiaris
ttttcaggatgcacaagtgtccgta

SEQ ID NO: 202408 - DNA, 25 bp, Canis familiaris
ttttcttcacttctgttaacctcaa

SEQ ID NO: 202409 - DNA, 25 bp, Canis familiaris
tttagttactgtatcttaccccact

SEQ ID NO: 202410 - DNA, 25 bp, Canis familiaris
tttatgttacgtatgtttatccttc

SEQ ID NO: 202411 - DNA, 25 bp, Canis familiaris
tttttctcagcgtgtaagttccctc

SEQ ID NO: 202412 - DNA, 25 bp, Canis familiaris
ttttaatcagcctgttggtctccca

SEQ ID NO: 202413 - DNA, 25 bp, Canis familiaris
ttttctaagccatggggctgcctcc

SEQ ID NO: 202414 - DNA, 25 bp, Canis familiaris
ttttgctggggatgtggagtctttc

SEQ ID NO: 202415 - DNA, 25 bp, Canis familiaris
ttttcagatggtcgagttttttttg

SEQ ID NO: 202416 - DNA, 25 bp, Canis familiaris
ttttaggccttttttcagtcttctg

SEQ ID NO: 202417 - DNA, 25 bp, Canis familiaris
ttttacacttttcttacttctgcag

SEQ ID NO: 202418 - DNA, 25 bp, Canis familiaris
tttatgcccttcttatttatttcta

SEQ ID NO: 202419 - DNA, 25 bp, Canis familiaris
tttatccattacaataatttctatt

SEQ ID NO: 202420 - DNA, 25 bp, Canis familiaris
tttagccttatctagaatataacac

SEQ ID NO: 202421 - DNA, 25 bp, Canis familiaris
ttttgcctcttgcagacttgggacc

SEQ ID NO: 202422 - DNA, 25 bp, Canis familiaris
ttttccttctccgctgtgggaggag

SEQ ID NO: 202423 - DNA, 25 bp, Canis familiaris
ttttcctccctgatggtgacgagtt

SEQ ID NO: 202424 - DNA, 25 bp, Canis familiaris
tttttcatcttctctggcgacagtt

SEQ ID NO: 202425 - DNA, 25 bp, Canis familiaris
ttatttacttctggctggggggatg

SEQ ID NO: 202426 - DNA, 25 bp, Canis familiaris
tttatgctacttgctcggagggcta

SEQ ID NO: 202427 - DNA, 25 bp, Canis familiaris
ttttgtttctgcacggagcgagctg

SEQ ID NO: 202428 - DNA, 25 bp, Canis familiaris
tttttttcatcctgggagccaggaa

SEQ ID NO: 202429 - DNA, 25 bp, Canis familiaris
tttttttcactgtggaatccacgat

SEQ ID NO: 202430 - DNA, 25 bp, Canis familiaris
tttttttcacaatcgagggcgctat

SEQ ID NO: 202431 - DNA, 25 bp, Canis familiaris
tttattttccaaaccaggtcccatg

SEQ ID NO: 202432 - DNA, 25 bp, Canis familiaris
tttttttcccgatcagagctaccaa

SEQ ID NO: 202433 - DNA, 25 bp, Canis familiaris
tttttgatccttcgatgtcggctct

SEQ ID NO: 202434 - DNA, 25 bp, Canis familiaris
tttttaccattgccagctactgctt

SEQ ID NO: 202435 - DNA, 25 bp, Canis familiaris
ttttgaagcaactcatcgattgatt

SEQ ID NO: 202436 - DNA, 25 bp, Canis familiaris
tttttgaagcaactcatcgattgat

SEQ ID NO: 202437 - DNA, 25 bp, Canis familiaris
ttttcgttgcagatcacgccatgat

SEQ ID NO: 202438 - DNA, 25 bp, Canis familiaris
ttttctgggcagattccacgtgtcc

SEQ ID NO: 202439 - DNA, 25 bp, Canis familiaris
ttttcatgggacacatccaccagct

SEQ ID NO: 202440 - DNA, 25 bp, Canis familiaris
ttttcttggaccaagcacaccccgg

SEQ ID NO: 202441 - DNA, 25 bp, Canis familiaris
tttatgttagctccaagcggacccg

SEQ ID NO: 202442 - DNA, 25 bp, Canis familiaris
ttttcattggcggcaccgagaccac

SEQ ID NO: 202443 - DNA, 25 bp, Canis familiaris
ttttttagcagttcctgaggcccac

SEQ ID NO: 202444 - DNA, 25 bp, Canis familiaris
tttttctgagggctctgttgctccc

SEQ ID NO: 202445 - DNA, 25 bp, Canis familiaris
tttttcgatgggcactgaggctcct

SEQ ID NO: 202446 - DNA, 25 bp, Canis familiaris
tttttttggtgaccttggctctgct

SEQ ID NO: 202447 - DNA, 25 bp, Canis familiaris
tttttttgattggctccttcatctt

SEQ ID NO: 202448 - DNA, 25 bp, Canis familiaris
tttttttgattggctccttcatctt

SEQ ID NO: 202449 - DNA, 25 bp, Canis familiaris
ttttggtctggtttctttcacttag

SEQ ID NO: 202450 - DNA, 25 bp, Canis familiaris
tttatggctcctaagtgcttctcac

SEQ ID NO: 202451 - DNA, 25 bp, Canis familiaris
tttatgctttgctcagattcctaca

SEQ ID NO: 202452 - DNA, 25 bp, Canis familiaris
tttattgtttgcagattcctcatca

SEQ ID NO: 202453 - DNA, 25 bp, Canis familiaris
tttttgatttgctgctccatctcaa

SEQ ID NO: 202454 - DNA, 25 bp, Canis familiaris
ttttggatgggctttccccatttct

SEQ ID NO: 202455 - DNA, 25 bp, Canis familiaris
ttattgttgggatttacgccttctt

SEQ ID NO: 202456 - DNA, 25 bp, Canis familiaris
ttttttggtctcataccttgtccag

SEQ ID NO: 202457 - DNA, 25 bp, Canis familiaris
ttttacggttctgacctctatggcg

SEQ ID NO: 202458 - DNA, 25 bp, Canis familiaris
ttttacggtttattcctatcagcgg

SEQ ID NO: 202459 - DNA, 25 bp, Canis familiaris
tttatcacgtgttatatttctaatc

SEQ ID NO: 202460 - DNA, 25 bp, Canis familiaris
tttatctgcttttattctacttacc

SEQ ID NO: 202461 - DNA, 25 bp, Canis familiaris
tttattcatgtgatttctttccccc

SEQ ID NO: 202462 - DNA, 25 bp, Canis familiaris
ttttccatgttgagatttcccctcc

SEQ ID NO: 202463 - DNA, 25 bp, Canis familiaris
tttttatgtccatagtttccctctt

SEQ ID NO: 202464 - DNA, 25 bp, Canis familiaris
ttatttaagcctcagtttctccctt

SEQ ID NO: 202465 - DNA, 25 bp, Canis familiaris
ttttgataaccacagttttcagtcc

SEQ ID NO: 202466 - DNA, 25 bp, Canis familiaris
ttttagaagccacggaattgctaag

SEQ ID NO: 202467 - DNA, 25 bp, Canis familiaris
tttatggagacctgtggcacgagaa

SEQ ID NO: 202468 - DNA, 25 bp, Canis familiaris
tttttggccctcctgtggcagagaa

SEQ ID NO: 202469 - DNA, 25 bp, Canis familiaris
ttttctgtgcaggcttcttctgagc

SEQ ID NO: 202470 - DNA, 25 bp, Canis familiaris
ttttttgcatgcgtagctttatcat

SEQ ID NO: 202471 - DNA, 25 bp, Canis familiaris
tttaggctagcctgcttgtattaag

SEQ ID NO: 202472 - DNA, 25 bp, Canis familiaris
ttaatggctgaccctgttgttaagg

SEQ ID NO: 202473 - DNA, 25 bp, Canis familiaris
ttttggagccgggttggtacagcag

SEQ ID NO: 202474 - DNA, 25 bp, Canis familiaris
tttttgggcggcatgttgtccacag

SEQ ID NO: 202475 - DNA, 25 bp, Canis familiaris
tttttactcccttttgatgccataa

SEQ ID NO: 202476 - DNA, 25 bp, Canis familiaris
ttttctgattcgcctatgtctatcc

SEQ ID NO: 202477 - DNA, 25 bp, Canis familiaris
ttttctagtctgctgtgatccattt

SEQ ID NO: 202478 - DNA, 25 bp, Canis familiaris
tttttaattggttgttgctagtgta

SEQ ID NO: 202479 - DNA, 25 bp, Canis familiaris
ttatttatttggggctctctgggtg

SEQ ID NO: 202480 - DNA, 25 bp, Canis familiaris
tttttatgttgttatccttggatgt

SEQ ID NO: 202481 - DNA, 25 bp, Canis familiaris
tttatttgtgtttgtctgtgttgtt

SEQ ID NO: 202482 - DNA, 25 bp, Canis familiaris
ttttctctgtttcgttttgtggtgt

SEQ ID NO: 202483 - DNA, 25 bp, Canis familiaris
tttttctggctgctcagtatttgag

SEQ ID NO: 202484 - DNA, 25 bp, Canis familiaris
ttttactgcctgcaactttctgtgc

SEQ ID NO: 202485 - DNA, 25 bp, Canis familiaris
tttttccctgctatgtgtcttgtga

SEQ ID NO: 202486 - DNA, 25 bp, Canis familiaris
tttttgctacttttgctgttttatt

SEQ ID NO: 202487 - DNA, 25 bp, Canis familiaris
tttttgcttttctgtgttttctaat

SEQ ID NO: 202488 - DNA, 25 bp, Canis familiaris
ttttccttttgtcatttctactaat

SEQ ID NO: 202489 - DNA, 25 bp, Canis familiaris
ttttcactggcaattggatctttac

SEQ ID NO: 202490 - DNA, 25 bp, Canis familiaris
ttttagcgactctttatcttctttc

SEQ ID NO: 202491 - DNA, 25 bp, Canis familiaris
tttatactgccatatttttttttct

SEQ ID NO: 202492 - DNA, 25 bp, Canis familiaris
ttttagctctctcatttttttcttt

SEQ ID NO: 202493 - DNA, 25 bp, Canis familiaris
tttttcttttcagtttgctattcct

SEQ ID NO: 202494 - DNA, 25 bp, Canis familiaris
tttttctcttcttcctgttattggt

SEQ ID NO: 202495 - DNA, 25 bp, Canis familiaris
tttttccagatttcccatataaggg

SEQ ID NO: 202496 - DNA, 25 bp, Canis familiaris
tttttcgtgtcttcctctaacaaga

SEQ ID NO: 202497 - DNA, 25 bp, Canis familiaris
ttttctggtgtcgccttcaccagtg

SEQ ID NO: 202498 - DNA, 25 bp, Canis familiaris
ttttttgattcagcttgtcccaggc

SEQ ID NO: 202499 - DNA, 25 bp, Canis familiaris
tttttcatgatgtcctcaagtccca

SEQ ID NO: 202500 - DNA, 25 bp, Canis familiaris
tttatatcctgctatcttttcacca

SEQ ID NO: 202501 - DNA, 25 bp, Canis familiaris
tttatacttcattgctccttcagga

SEQ ID NO: 202502 - DNA, 25 bp, Canis familiaris
tttataattcattcccagcacaggg

SEQ ID NO: 202503 - DNA, 25 bp, Canis familiaris
ttttagtccacatccatctcggagt

SEQ ID NO: 202504 - DNA, 25 bp, Canis familiaris
ttcttagtcaacacccactggagtt

SEQ ID NO: 202505 - DNA, 25 bp, Canis familiaris
ttatccggaaccgcatcctggagat

SEQ ID NO: 202506 - DNA, 25 bp, Canis familiaris
ttattctggggtgcctccgaagata

SEQ ID NO: 202507 - DNA, 25 bp, Canis familiaris
ttttttaattccttcatccattgat

SEQ ID NO: 202508 - DNA, 25 bp, Canis familiaris
tttttataattccttcactctttct

SEQ ID NO: 202509 - DNA, 25 bp, Canis familiaris
ttttcttatcttctatttctttctc

SEQ ID NO: 202510 - DNA, 25 bp, Canis familiaris
ttttatctatttctttctccttgac

SEQ ID NO: 202511 - DNA, 25 bp, Canis familiaris
tttttagatattttgttccacattg

SEQ ID NO: 202512 - DNA, 25 bp, Canis familiaris
ttttgtgagcagttaggctcccaaa

SEQ ID NO: 202513 - DNA, 25 bp, Canis familiaris
ttttgaacatttacctgcccataaa

SEQ ID NO: 202514 - DNA, 25 bp, Canis familiaris
tttagatacactgtctcatgcctct

SEQ ID NO: 202515 - DNA, 25 bp, Canis familiaris
tttatgtgaacttgctcctgcacct

SEQ ID NO: 202516 - DNA, 25 bp, Canis familiaris
tttatcataggttcatcctgccctc

SEQ ID NO: 202517 - DNA, 25 bp, Canis familiaris
tttataagagattctcctgtctatt

SEQ ID NO: 202518 - DNA, 25 bp, Canis familiaris
ttttctagacatctcgtgtgtgtta

SEQ ID NO: 202519 - DNA, 25 bp, Canis familiaris
ttttcttggcactgggttgattcat

SEQ ID NO: 202520 - DNA, 25 bp, Canis familiaris
ttttgtttcctggggttgtatcacg

SEQ ID NO: 202521 - DNA, 25 bp, Canis familiaris
ttaaggtccttggtgccttgctaac

SEQ ID NO: 202522 - DNA, 25 bp, Canis familiaris
tttaggttgttcttgccttgttgcc

SEQ ID NO: 202523 - DNA, 25 bp, Canis familiaris
tttaggttgtgaattccctctctcc

SEQ ID NO: 202524 - DNA, 25 bp, Canis familiaris
tttatggattcgatgtcccttcctc

SEQ ID NO: 202525 - DNA, 25 bp, Canis familiaris
tttatcgttcgttttacttgtatct

SEQ ID NO: 202526 - DNA, 25 bp, Canis familiaris
ttctgggttcgttggaatttttgca

SEQ ID NO: 202527 - DNA, 25 bp, Canis familiaris
ttcttggcttggcgggtttttgccg

SEQ ID NO: 202528 - DNA, 25 bp, Canis familiaris
ttttagctttctctggtttctgtgc

SEQ ID NO: 202529 - DNA, 25 bp, Canis familiaris
ttttagtattttggggcacctggct

SEQ ID NO: 202530 - DNA, 25 bp, Canis familiaris
tttatttatttggggctctctgggt

SEQ ID NO: 202531 - DNA, 25 bp, Canis familiaris
tttttttgaatgtagcccctgggca

SEQ ID NO: 202532 - DNA, 25 bp, Canis familiaris
ttttattttgtgaatcccctgacca

SEQ ID NO: 202533 - DNA, 25 bp, Canis familiaris
tttatttatctgcatatagccctga

SEQ ID NO: 202534 - DNA, 25 bp, Canis familiaris
tttatagtaggttatcgctcacata

SEQ ID NO: 202535 - DNA, 25 bp, Canis familiaris
ttttgaccacgagagagccacagag

SEQ ID NO: 202536 - DNA, 25 bp, Canis familiaris
tttaggccgacagacccaagagctc

SEQ ID NO: 202537 - DNA, 25 bp, Canis familiaris
ttttcccgatcagagctaccaactc

SEQ ID NO: 202538 - DNA, 25 bp, Canis familiaris
ttttcctccacatggtactacttaa

SEQ ID NO: 202539 - DNA, 25 bp, Canis familiaris
tttttttgtcaatgtcccacttaga

SEQ ID NO: 202540 - DNA, 25 bp, Canis familiaris
ttttttcctcaatgtcagtagctct

SEQ ID NO: 202541 - DNA, 25 bp, Canis familiaris
ttttgcttcccacagtattatgact

SEQ ID NO: 202542 - DNA, 25 bp, Canis familiaris
ttttcagtcaaaccaaagttacata

SEQ ID NO: 202543 - DNA, 25 bp, Canis familiaris
ttttgagtctcaactaaagtaccta

SEQ ID NO: 202544 - DNA, 25 bp, Canis familiaris
ttttcatttcgacaaaccagcactg

SEQ ID NO: 202545 - DNA, 25 bp, Canis familiaris
tttttcggtgatcaaacctcagccc

SEQ ID NO: 202546 - DNA, 25 bp, Canis familiaris
ttactaccttgacaaccgtcgacca

SEQ ID NO: 202547 - DNA, 25 bp, Canis familiaris
tttttccttaaattcctgcttgaag

SEQ ID NO: 202548 - DNA, 25 bp, Canis familiaris
ttttacctcaaatcctctgtgataa

SEQ ID NO: 202549 - DNA, 25 bp, Canis familiaris
ttttacctgaataacgccattaatc

SEQ ID NO: 202550 - DNA, 25 bp, Canis familiaris
ttattccaggtgtgacgccttttca

SEQ ID NO: 202551 - DNA, 25 bp, Canis familiaris
ttttaattgtatccaccctatttca

SEQ ID NO: 202552 - DNA, 25 bp, Canis familiaris
tttataatattcaccccatcctgta

SEQ ID NO: 202553 - DNA, 25 bp, Canis familiaris
ttttgaagaagcacccctctttcat

SEQ ID NO: 202554 - DNA, 25 bp, Canis familiaris
ttttactgaaaaccctctttatgtg

SEQ ID NO: 202555 - DNA, 25 bp, Canis familiaris
ttttactgaaaaccctctttatgtg

SEQ ID NO: 202556 - DNA, 25 bp, Canis familiaris
ttttactgaaaaccctctttatgtg

SEQ ID NO: 202557 - DNA, 25 bp, Canis familiaris
ttttactgaaaaccctctttatgtg

SEQ ID NO: 202558 - DNA, 25 bp, Canis familiaris
tttataccataagcccattttgtta

SEQ ID NO: 202559 - DNA, 25 bp, Canis familiaris
ttattcccaaagccccagttttgat

SEQ ID NO: 202560 - DNA, 25 bp, Canis familiaris
ttattcttaaatccgtcgtcgtctc

SEQ ID NO: 202561 - DNA, 25 bp, Canis familiaris
tttttaatcttctgtctgttgtctc

SEQ ID NO: 202562 - DNA, 25 bp, Canis familiaris
tttagtgtttaacgtctgttctcat

SEQ ID NO: 202563 - DNA, 25 bp, Canis familiaris
ttttgtttgaaagttgcttgtccat

SEQ ID NO: 202564 - DNA, 25 bp, Canis familiaris
tttttcctaatgacttctggatcca

SEQ ID NO: 202565 - DNA, 25 bp, Canis familiaris
ttttttctagatcttctacccacac

SEQ ID NO: 202566 - DNA, 25 bp, Canis familiaris
tttttttgccactgttaccaacaca

SEQ ID NO: 202567 - DNA, 25 bp, Canis familiaris
ttctttttaatctccaaacaaccag

SEQ ID NO: 202568 - DNA, 25 bp, Canis familiaris
ttattttatgattcccacaaacaaa

SEQ ID NO: 202569 - DNA, 25 bp, Canis familiaris
tttttgtcaatgtcccacttagaaa

SEQ ID NO: 202570 - DNA, 25 bp, Canis familiaris
ttttttcaagacccagttcaagagc

SEQ ID NO: 202571 - DNA, 25 bp, Canis familiaris
ttatttttcgacccatttcacacag

SEQ ID NO: 202572 - DNA, 25 bp, Canis familiaris
ttttgccttcctgctctttaagcag

SEQ ID NO: 202573 - DNA, 25 bp, Canis familiaris
ttttccgtgccatttcttgttacac

SEQ ID NO: 202574 - DNA, 25 bp, Canis familiaris
ttttggcgctactttgcagggaacc

SEQ ID NO: 202575 - DNA, 25 bp, Canis familiaris
ttttctggtcagctcagtgggaacc

SEQ ID NO: 202576 - DNA, 25 bp, Canis familiaris
ttcttgcctggacctgaggggaacc

SEQ ID NO: 202577 - DNA, 25 bp, Canis familiaris
ttcatagaatggtattggcggggat

SEQ ID NO: 202578 - DNA, 25 bp, Canis familiaris
ttatatgaattctactctggaggga

SEQ ID NO: 202579 - DNA, 25 bp, Canis familiaris
ttaaggattccacttggaaggaaag

SEQ ID NO: 202580 - DNA, 25 bp, Canis familiaris
ttagagtggtgcctgggtgaagggg

SEQ ID NO: 202581 - DNA, 25 bp, Canis familiaris
ttcagcctcgtccgggaacagggct

SEQ ID NO: 202582 - DNA, 25 bp, Canis familiaris
ttacccgcttcggggatcacgtgtt

SEQ ID NO: 202583 - DNA, 25 bp, Canis familiaris
ttaatgcgagttggggagggggtat

SEQ ID NO: 202584 - DNA, 25 bp, Canis familiaris
ttaatgcaagacactaatgggggga

SEQ ID NO: 202585 - DNA, 25 bp, Canis familiaris
ttatacactcacacaaaacgcgggg

SEQ ID NO: 202586 - DNA, 25 bp, Canis familiaris
ttaaatccgccatgataccctgggg

SEQ ID NO: 202587 - DNA, 25 bp, Canis familiaris
ttataaccggatttaacctgtagag

SEQ ID NO: 202588 - DNA, 25 bp, Canis familiaris
ttttcagccagtcattaaaactagg

SEQ ID NO: 202589 - DNA, 25 bp, Canis familiaris
ttttgcccgttagaagagaatagag

SEQ ID NO: 202590 - DNA, 25 bp, Canis familiaris
ttttccctttcataagattttgcac

SEQ ID NO: 202591 - DNA, 25 bp, Canis familiaris
tttataccttaatagagtcttccaa

SEQ ID NO: 202592 - DNA, 25 bp, Canis familiaris
tttatcctttaaaatgtgtccatag

SEQ ID NO: 202593 - DNA, 25 bp, Canis familiaris
ttttcactttctaaatgacccatac

SEQ ID NO: 202594 - DNA, 25 bp, Canis familiaris
ttttactttattaagccaaatctct

SEQ ID NO: 202595 - DNA, 25 bp, Canis familiaris
tttatagcttactttacccagttca

SEQ ID NO: 202596 - DNA, 25 bp, Canis familiaris
tttatagcatttttgtacctcaggt

SEQ ID NO: 202597 - DNA, 25 bp, Canis familiaris
tttatactcattctttgcctcagtg

SEQ ID NO: 202598 - DNA, 25 bp, Canis familiaris
tttatccatttcttttgctctgtgt

SEQ ID NO: 202599 - DNA, 25 bp, Canis familiaris
ttttccttttgagttcctatgcttc

SEQ ID NO: 202600 - DNA, 25 bp, Canis familiaris
ttttcccttggaattccttgattgt

SEQ ID NO: 202601 - DNA, 25 bp, Canis familiaris
tttatccctcttagcatgtgtttat

SEQ ID NO: 202602 - DNA, 25 bp, Canis familiaris
tttatcgcatcagaagcatttttct

SEQ ID NO: 202603 - DNA, 25 bp, Canis familiaris
tttatgccacaccaagtcttctgat

SEQ ID NO: 202604 - DNA, 25 bp, Canis familiaris
ttttacagcatcggatcctcatgga

SEQ ID NO: 202605 - DNA, 25 bp, Canis familiaris
ttttaaaccgatgctctgtgccact

SEQ ID NO: 202606 - DNA, 25 bp, Canis familiaris
ttttcactatccgtagtgcggctcc

SEQ ID NO: 202607 - DNA, 25 bp, Canis familiaris
tttatcatttccctactggctgtac

SEQ ID NO: 202608 - DNA, 25 bp, Canis familiaris
tttattttccttttgagttcctatg

SEQ ID NO: 202609 - DNA, 25 bp, Canis familiaris
tttttttgcactaatgctggtttta

SEQ ID NO: 202610 - DNA, 25 bp, Canis familiaris
ttttctatttccactgtttttatga

SEQ ID NO: 202611 - DNA, 25 bp, Canis familiaris
ttttctagatttgacatttttcctg

SEQ ID NO: 202612 - DNA, 25 bp, Canis familiaris
ttttatcgcatcagaagcatttttc

SEQ ID NO: 202613 - DNA, 25 bp, Canis familiaris
ttttcttctctctaagcttacttta

SEQ ID NO: 202614 - DNA, 25 bp, Canis familiaris
tttttctcttcagtaataacagtta

SEQ ID NO: 202615 - DNA, 25 bp, Canis familiaris
tttttttctcagtaaaccactctga

SEQ ID NO: 202616 - DNA, 25 bp, Canis familiaris
tttttattaccttagaccagcttat

SEQ ID NO: 202617 - DNA, 25 bp, Canis familiaris
ttattttaacctgtggtcagttgaa

SEQ ID NO: 202618 - DNA, 25 bp, Canis familiaris
ttttttaaccaaagttgctgtctag

SEQ ID NO: 202619 - DNA, 25 bp, Canis familiaris
tttttttaccaacgtggctgctcca

SEQ ID NO: 202620 - DNA, 25 bp, Canis familiaris
tttttcttcaccttgttagttccag

SEQ ID NO: 202621 - DNA, 25 bp, Canis familiaris
tttttgcccacctttctaattagat

SEQ ID NO: 202622 - DNA, 25 bp, Canis familiaris
ttctaccccacctcattaattggct

SEQ ID NO: 202623 - DNA, 25 bp, Canis familiaris
ttttcccctccttttagatgggcat

SEQ ID NO: 202624 - DNA, 25 bp, Canis familiaris
ttttagccccatccttctgggggca

SEQ ID NO: 202625 - DNA, 25 bp, Canis familiaris
ttttatcaccaccctggctggggaa

SEQ ID NO: 202626 - DNA, 25 bp, Canis familiaris
ttttatcctagccgcgggcggaata

SEQ ID NO: 202627 - DNA, 25 bp, Canis familiaris
tttttcccaggctgctggtgccaat

SEQ ID NO: 202628 - DNA, 25 bp, Canis familiaris
tttttcccaccatgatgttataata

SEQ ID NO: 202629 - DNA, 25 bp, Canis familiaris
ttttccctccctaatttatcaagag

SEQ ID NO: 202630 - DNA, 25 bp, Canis familiaris
tttttccttcctacctaaagagatg

SEQ ID NO: 202631 - DNA, 25 bp, Canis familiaris
tttttcctgctctcaccaaagaagt

SEQ ID NO: 202632 - DNA, 25 bp, Canis familiaris
ttttaactgcattttcctaggaact

SEQ ID NO: 202633 - DNA, 25 bp, Canis familiaris
ttttattccatcctgtgcctaggga

SEQ ID NO: 202634 - DNA, 25 bp, Canis familiaris
ttatatgattcctggtacctgggta

SEQ ID NO: 202635 - DNA, 25 bp, Canis familiaris
ttatatatatatttttgccggggtc

SEQ ID NO: 202636 - DNA, 25 bp, Canis familiaris
ttttatctacattttggtggggtca

SEQ ID NO: 202637 - DNA, 25 bp, Canis familiaris
ttctgtactaatttccatggccggt

SEQ ID NO: 202638 - DNA, 25 bp, Canis familiaris
ttatggacgtattcccagggtgttc

SEQ ID NO: 202639 - DNA, 25 bp, Canis familiaris
ttaggaggttttgcagaggctttgt

SEQ ID NO: 202640 - DNA, 25 bp, Canis familiaris
ttctaagtgttaatcctgtggtttt

SEQ ID NO: 202641 - DNA, 25 bp, Canis familiaris
ttctccggtttgccctgggatatta

SEQ ID NO: 202642 - DNA, 25 bp, Canis familiaris
ttacccgtccatcactgtatgattt

SEQ ID NO: 202643 - DNA, 25 bp, Canis familiaris
ttacaagagtcccggccatgatcat

SEQ ID NO: 202644 - DNA, 25 bp, Canis familiaris
ttaaaactgccacctgctagcacat

SEQ ID NO: 202645 - DNA, 25 bp, Canis familiaris
tttataatagcccgtgcttgacaca

SEQ ID NO: 202646 - DNA, 25 bp, Canis familiaris
ttagaatgccagtcggagcttacac

SEQ ID NO: 202647 - DNA, 25 bp, Canis familiaris
ttatagcagcgttcggaggccaggc

SEQ ID NO: 202648 - DNA, 25 bp, Canis familiaris
ttagagcacggagtccgtccagttg

SEQ ID NO: 202649 - DNA, 25 bp, Canis familiaris
ttagagcacggagtccgtccagttg

SEQ ID NO: 202650 - DNA, 25 bp, Canis familiaris
ttagtctcggagatcccaagttggt

SEQ ID NO: 202651 - DNA, 25 bp, Canis familiaris
tttatactgtatgtgcccaagcttt

SEQ ID NO: 202652 - DNA, 25 bp, Canis familiaris
tttatagttcatttgcccttctttt

SEQ ID NO: 202653 - DNA, 25 bp, Canis familiaris
ttttcagtatatgatctcctttatt

SEQ ID NO: 202654 - DNA, 25 bp, Canis familiaris
tttatttatatacctcctctctata

SEQ ID NO: 202655 - DNA, 25 bp, Canis familiaris
tttatatatatttctctctctgtct

SEQ ID NO: 202656 - DNA, 25 bp, Canis familiaris
tttatttattttgccagtcttcctc

SEQ ID NO: 202657 - DNA, 25 bp, Canis familiaris
ttacaattactggcccgcgtttaca

SEQ ID NO: 202658 - DNA, 25 bp, Canis familiaris
ttagaagggtccccaccttagatca

SEQ ID NO: 202659 - DNA, 25 bp, Canis familiaris
ttaggagggtccaactcgttcaaga

SEQ ID NO: 202660 - DNA, 25 bp, Canis familiaris
ttccgagggccaaaacgtatcatca

SEQ ID NO: 202661 - DNA, 25 bp, Canis familiaris
ttcactggggcccggaagtcagccc

SEQ ID NO: 202662 - DNA, 25 bp, Canis familiaris
ttcacaggggcccggggaagtacag

SEQ ID NO: 202663 - DNA, 25 bp, Canis familiaris
ttgaacttgaccagtgtgaaaaaaa

SEQ ID NO: 202664 - DNA, 25 bp, Canis familiaris
ttaacctgtggtcagttgaaacaaa

SEQ ID NO: 202665 - DNA, 25 bp, Canis familiaris
ttctaccgtgggtaatgtggaaaca

SEQ ID NO: 202666 - DNA, 25 bp, Canis familiaris
ttatccctttgctaatagggcaaac

SEQ ID NO: 202667 - DNA, 25 bp, Canis familiaris
ttttgttattgatatctcggataca

SEQ ID NO: 202668 - DNA, 25 bp, Canis familiaris
ttttgttattgatatctcggataca

SEQ ID NO: 202669 - DNA, 25 bp, Canis familiaris
ttttcttatctgcttctgtttacaa

SEQ ID NO: 202670 - DNA, 25 bp, Canis familiaris
tttatatatatttttggttgtccaa

SEQ ID NO: 202671 - DNA, 25 bp, Canis familiaris
ttttgagacattttgtggacgtaca

SEQ ID NO: 202672 - DNA, 25 bp, Canis familiaris
ttttaccagtacttggagccatcca

SEQ ID NO: 202673 - DNA, 25 bp, Canis familiaris
tttatactcatgcatgcttgcgtgc

SEQ ID NO: 202674 - DNA, 25 bp, Canis familiaris
tttatacatctgcatccatgagtaa

SEQ ID NO: 202675 - DNA, 25 bp, Canis familiaris
ttcattcaatctctccggaaagccc

SEQ ID NO: 202676 - DNA, 25 bp, Canis familiaris
ttttaactcgtgcgtgactatctcg

SEQ ID NO: 202677 - DNA, 25 bp, Canis familiaris
ttttcacaatcgagggcgctatata

SEQ ID NO: 202678 - DNA, 25 bp, Canis familiaris
ttttccatctccagcaagcttataa

SEQ ID NO: 202679 - DNA, 25 bp, Canis familiaris
tttttatcctctagaggctgctaca

SEQ ID NO: 202680 - DNA, 25 bp, Canis familiaris
tttttactgctctgcaggcttaact

SEQ ID NO: 202681 - DNA, 25 bp, Canis familiaris
tttttcactgtatggttgtcaatcg

SEQ ID NO: 202682 - DNA, 25 bp, Canis familiaris
ttttgatccgattacgttctccact

SEQ ID NO: 202683 - DNA, 25 bp, Canis familiaris
ttttacctgaccagttataccccag

SEQ ID NO: 202684 - DNA, 25 bp, Canis familiaris
ttttatcctgttatgtttatcccta

SEQ ID NO: 202685 - DNA, 25 bp, Canis familiaris
tttttcctttctttttatctcattg

SEQ ID NO: 202686 - DNA, 25 bp, Canis familiaris
ttttcccttctttatgttaagctgg

SEQ ID NO: 202687 - DNA, 25 bp, Canis familiaris
ttttcctccttttggctgtatagca

SEQ ID NO: 202688 - DNA, 25 bp, Canis familiaris
ttttctcccttcctaggctatgaag

SEQ ID NO: 202689 - DNA, 25 bp, Canis familiaris
ttctctctttgttcctgggctaaag

SEQ ID NO: 202690 - DNA, 25 bp, Canis familiaris
ttttctgtcacagcctggactcaaa

SEQ ID NO: 202691 - DNA, 25 bp, Canis familiaris
ttttctgttgttgctgtggtctaat

SEQ ID NO: 202692 - DNA, 25 bp, Canis familiaris
ttttggacgtcagcggtgtctgttc

SEQ ID NO: 202693 - DNA, 25 bp, Canis familiaris
tttttccctcaaggatggcctgttg

SEQ ID NO: 202694 - DNA, 25 bp, Canis familiaris
tttttccccatagcatgttctgttg

SEQ ID NO: 202695 - DNA, 25 bp, Canis familiaris
tttttccatccaatccattatctca

SEQ ID NO: 202696 - DNA, 25 bp, Canis familiaris
ttttatgccattacaactctccaca

SEQ ID NO: 202697 - DNA, 25 bp, Canis familiaris
tttttcaaatgcaaactcccactca

SEQ ID NO: 202698 - DNA, 25 bp, Canis familiaris
tttttgcaccatcacaacccaatac

SEQ ID NO: 202699 - DNA, 25 bp, Canis familiaris
tttttcaccatttgtacctcaataa

SEQ ID NO: 202700 - DNA, 25 bp, Canis familiaris
tttttgaacatttacctgcccataa

SEQ ID NO: 202701 - DNA, 25 bp, Canis familiaris
ttttcgttcttatcactgcggagaa

SEQ ID NO: 202702 - DNA, 25 bp, Canis familiaris
tttttcttcttattgcttggggcga

SEQ ID NO: 202703 - DNA, 25 bp, Canis familiaris
tttttcttttgttcatgtggaatgc

SEQ ID NO: 202704 - DNA, 25 bp, Canis familiaris
ttttctgttttacatgtgaacttcc

SEQ ID NO: 202705 - DNA, 25 bp, Canis familiaris
tttttattctttccagtaacctgct

SEQ ID NO: 202706 - DNA, 25 bp, Canis familiaris
ttttatactttcctactaactctcg

SEQ ID NO: 202707 - DNA, 25 bp, Canis familiaris
tttttcctgttcatacatttgtgct

SEQ ID NO: 202708 - DNA, 25 bp, Canis familiaris
ttttataacttcttcaccttcagct

SEQ ID NO: 202709 - DNA, 25 bp, Canis familiaris
ttttgacaacatggcttctcctttg

SEQ ID NO: 202710 - DNA, 25 bp, Canis familiaris
ttttagcaaattctgtcctctctgt

SEQ ID NO: 202711 - DNA, 25 bp, Canis familiaris
ttttcagactttctgactgcccaat

SEQ ID NO: 202712 - DNA, 25 bp, Canis familiaris
ttatctagtttttctaggcccaata

SEQ ID NO: 202713 - DNA, 25 bp, Canis familiaris
tttttgtgtatttctccgtgaccaa

SEQ ID NO: 202714 - DNA, 25 bp, Canis familiaris
ttttaggagttagtccttgaccact

SEQ ID NO: 202715 - DNA, 25 bp, Canis familiaris
ttttaaggatattgtcctcccccat

SEQ ID NO: 202716 - DNA, 25 bp, Canis familiaris
ttttaaggcaaaccatccccaacat

SEQ ID NO: 202717 - DNA, 25 bp, Canis familiaris
ttttaagccaaaccaacagcctctt

SEQ ID NO: 202718 - DNA, 25 bp, Canis familiaris
ttgtgttaccataagccaacggacc

SEQ ID NO: 202719 - DNA, 25 bp, Canis familiaris
ttgattgacccaacccaaaggacct

SEQ ID NO: 202720 - DNA, 25 bp, Canis familiaris
ttatccacgcaaaccacaaggaccc

SEQ ID NO: 202721 - DNA, 25 bp, Canis familiaris
ttgactaatcacccaaaagccaccc

SEQ ID NO: 202722 - DNA, 25 bp, Canis familiaris
ttggaagtacccattaggcacccca

SEQ ID NO: 202723 - DNA, 25 bp, Canis familiaris
ttagaaccacccagctagggatccc

SEQ ID NO: 202724 - DNA, 25 bp, Canis familiaris
ttatcaaccggggagtacgcgtgcc

SEQ ID NO: 202725 - DNA, 25 bp, Canis familiaris
ttataaagccgggagaaggcaggcg

SEQ ID NO: 202726 - DNA, 25 bp, Canis familiaris
ttataaaccggtcgcctctggcagc

SEQ ID NO: 202727 - DNA, 25 bp, Canis familiaris
ttaaaacttcagagccttgtccttt

SEQ ID NO: 202728 - DNA, 25 bp, Canis familiaris
ttttaggttagctcctgtgtccttt

SEQ ID NO: 202729 - DNA, 25 bp, Canis familiaris
ttttgggaacacgctttgcgccttt

SEQ ID NO: 202730 - DNA, 25 bp, Canis familiaris
ttattgggaacccattttccacctg

SEQ ID NO: 202731 - DNA, 25 bp, Canis familiaris
ttatttggatttctttctcacctct

SEQ ID NO: 202732 - DNA, 25 bp, Canis familiaris
tttttgtgatgttggtctcccactc

SEQ ID NO: 202733 - DNA, 25 bp, Canis familiaris
ttttgtggtgtatttcccgagctca

SEQ ID NO: 202734 - DNA, 25 bp, Canis familiaris
ttttccaggttgttgcatccaggat

SEQ ID NO: 202735 - DNA, 25 bp, Canis familiaris
ttttgcgcatgacagcgtcaccagg

SEQ ID NO: 202736 - DNA, 25 bp, Canis familiaris
ttttgcagctgacagcttgtgcgcg

SEQ ID NO: 202737 - DNA, 25 bp, Canis familiaris
ttttgcgtagcatcgtgtgctgccc

SEQ ID NO: 202738 - DNA, 25 bp, Canis familiaris
ttcctggcgtcatcaggcttgagct

SEQ ID NO: 202739 - DNA, 25 bp, Canis familiaris
ttctctccggattgagggggcttgt

SEQ ID NO: 202740 - DNA, 25 bp, Canis familiaris
ttctccccaaagctggtggtttttg

SEQ ID NO: 202741 - DNA, 25 bp, Canis familiaris
ttttgcccaaagatgagtttttatt

SEQ ID NO: 202742 - DNA, 25 bp, Canis familiaris
ttttcccatttgttggtctgattta

SEQ ID NO: 202743 - DNA, 25 bp, Canis familiaris
ttttccacatttttattcacattta

SEQ ID NO: 202744 - DNA, 25 bp, Canis familiaris
tttttcccttttatctcactgataa

SEQ ID NO: 202745 - DNA, 25 bp, Canis familiaris
tttttccttttttttgcagctgaca

SEQ ID NO: 202746 - DNA, 25 bp, Canis familiaris
ttttttttttttttcatgctgccat

SEQ ID NO: 202747 - DNA, 25 bp, Canis familiaris
tttttctgctttaggttcttgctca

SEQ ID NO: 202748 - DNA, 25 bp, Canis familiaris
ttttctgtttcattgggtgtatcca

SEQ ID NO: 202749 - DNA, 25 bp, Canis familiaris
tttttgctttcttgataggagatct

SEQ ID NO: 202750 - DNA, 25 bp, Canis familiaris
tttttttcctcttctgaggtctgaa

SEQ ID NO: 202751 - DNA, 25 bp, Canis familiaris
tttttttcactttagacagtctgag

SEQ ID NO: 202752 - DNA, 25 bp, Canis familiaris
tttttttcctgttcatacatttgtg

SEQ ID NO: 202753 - DNA, 25 bp, Canis familiaris
tttttttcacatgtcatttttgatt

SEQ ID NO: 202754 - DNA, 25 bp, Canis familiaris
tttttttcctgctcatgtactaatt

SEQ ID NO: 202755 - DNA, 25 bp, Canis familiaris
tttttctgtcctcacttagcattat

SEQ ID NO: 202756 - DNA, 25 bp, Canis familiaris
ttttgtcttccgatcgtacatttat

SEQ ID NO: 202757 - DNA, 25 bp, Canis familiaris
ttttgtcttccgatctacactttat

SEQ ID NO: 202758 - DNA, 25 bp, Canis familiaris
ttttacttacggactcatttaaatg

SEQ ID NO: 202759 - DNA, 25 bp, Canis familiaris
ttttatctcttccctttattacaag

SEQ ID NO: 202760 - DNA, 25 bp, Canis familiaris
tttttctcttccattttctgcagaa

SEQ ID NO: 202761 - DNA, 25 bp, Canis familiaris
ttttctcattgtctttttgcatcag

SEQ ID NO: 202762 - DNA, 25 bp, Canis familiaris
ttttctgctttaggttcttgctcag

SEQ ID NO: 202763 - DNA, 25 bp, Canis familiaris
ttttctcaaccagtgttttgctcct

SEQ ID NO: 202764 - DNA, 25 bp, Canis familiaris
ttatatccaaaccgtctttctccgg

SEQ ID NO: 202765 - DNA, 25 bp, Canis familiaris
ttttaaagacctttgcctgtctcgg

SEQ ID NO: 202766 - DNA, 25 bp, Canis familiaris
ttttagaaacctgtctctgtccaca

SEQ ID NO: 202767 - DNA, 25 bp, Canis familiaris
ttttaaatatttgtctgctgtagtc

SEQ ID NO: 202768 - DNA, 25 bp, Canis familiaris
ttttaaaagtatcctctctcgagag

SEQ ID NO: 202769 - DNA, 25 bp, Canis familiaris
ttttaagaaaattcctctgccaaga

SEQ ID NO: 202770 - DNA, 25 bp, Canis familiaris
ttttcagaataagtacttccataag

SEQ ID NO: 202771 - DNA, 25 bp, Canis familiaris
ttttctgaatatttgccttactgcc

SEQ ID NO: 202772 - DNA, 25 bp, Canis familiaris
ttttctgctttttgcactgtaccta

SEQ ID NO: 202773 - DNA, 25 bp, Canis familiaris
ttttatgcttttaatcatgaaagtt

SEQ ID NO: 202774 - DNA, 25 bp, Canis familiaris
ttttacttgtgtagacagattgcag

SEQ ID NO: 202775 - DNA, 25 bp, Canis familiaris
ttttgcaccgtaatagcagcaatcc

SEQ ID NO: 202776 - DNA, 25 bp, Canis familiaris
ttaggcagctctaacacatccagtc

SEQ ID NO: 202777 - DNA, 25 bp, Canis familiaris
ttttgagccttttaccagctccagc

SEQ ID NO: 202778 - DNA, 25 bp, Canis familiaris
ttttgtgttttgtcccacaccaatc

SEQ ID NO: 202779 - DNA, 25 bp, Canis familiaris
ttttggctttctccccaagagaaca

SEQ ID NO: 202780 - DNA, 25 bp, Canis familiaris
ttttgcagttggctcccagtgagga

SEQ ID NO: 202781 - DNA, 25 bp, Canis familiaris
ttagtcgtgtggctgcctcattagc

SEQ ID NO: 202782 - DNA, 25 bp, Canis familiaris
ttatgtcgatcggcgtgactatccc

SEQ ID NO: 202783 - DNA, 25 bp, Canis familiaris
ttttgtcaactcctgagctatcctc

SEQ ID NO: 202784 - DNA, 25 bp, Canis familiaris
ttttgtccacatgggcagtcagcct

SEQ ID NO: 202785 - DNA, 25 bp, Canis familiaris
tttttctctctcctgcagtatgagt

SEQ ID NO: 202786 - DNA, 25 bp, Canis familiaris
tttttctctctctgagttttgatac

SEQ ID NO: 202787 - DNA, 25 bp, Canis familiaris
tttttccccagaggtttgtctactg

SEQ ID NO: 202788 - DNA, 25 bp, Canis familiaris
ttttcccccaaagtatcatgtgtga

SEQ ID NO: 202789 - DNA, 25 bp, Canis familiaris
ttttctcccaaggcacttctgagga

SEQ ID NO: 202790 - DNA, 25 bp, Canis familiaris
ttttgtctcaccggcacttagagga

SEQ ID NO: 202791 - DNA, 25 bp, Canis familiaris
tttttctcagagtagccttcaaggc

SEQ ID NO: 202792 - DNA, 25 bp, Canis familiaris
ttttaccagagggcagcactgcata

SEQ ID NO: 202793 - DNA, 25 bp, Canis familiaris
ttttgaggaaggggactgggataag

SEQ ID NO: 202794 - DNA, 25 bp, Canis familiaris
ttttgggagccggggtggtacatca

SEQ ID NO: 202795 - DNA, 25 bp, Canis familiaris
ttttggggtctgacaggtgggcctg

SEQ ID NO: 202796 - DNA, 25 bp, Canis familiaris
ttgatggtgtggttaccgggggtgt

SEQ ID NO: 202797 - DNA, 25 bp, Canis familiaris
ttttgtgcgggatcctggggttgac

SEQ ID NO: 202798 - DNA, 25 bp, Canis familiaris
ttatttggtagttctctgtacgtta

SEQ ID NO: 202799 - DNA, 25 bp, Canis familiaris
ttattcttgtctcagcttttgggta

SEQ ID NO: 202800 - DNA, 25 bp, Canis familiaris
tttttagcatttagtcttttgagga

SEQ ID NO: 202801 - DNA, 25 bp, Canis familiaris
tttttagtgttgcccttgctgtgta

SEQ ID NO: 202802 - DNA, 25 bp, Canis familiaris
ttttaactgggcccctggccataat

SEQ ID NO: 202803 - DNA, 25 bp, Canis familiaris
ttttaaccttgcccttgactataca

SEQ ID NO: 202804 - DNA, 25 bp, Canis familiaris
ttttcaaccagttccctggcttcaa

SEQ ID NO: 202805 - DNA, 25 bp, Canis familiaris
ttattaacgcagaccccattttact

SEQ ID NO: 202806 - DNA, 25 bp, Canis familiaris
tttttcatccagacacttcaattta

SEQ ID NO: 202807 - DNA, 25 bp, Canis familiaris
tttttttgcattcctgataagtgta

SEQ ID NO: 202808 - DNA, 25 bp, Canis familiaris
tttttcttcattgctgataggtgtt

SEQ ID NO: 202809 - DNA, 25 bp, Canis familiaris
tttttttttttgtgcgtgtgtggca

SEQ ID NO: 202810 - DNA, 25 bp, Canis familiaris
tttttttttttgtgcgtgtgtggca

SEQ ID NO: 202811 - DNA, 25 bp, Canis familiaris
ttttttctttttgccatggggacag

SEQ ID NO: 202812 - DNA, 25 bp, Canis familiaris
ttttagtctttttctccaggtgtga

SEQ ID NO: 202813 - DNA, 25 bp, Canis familiaris
ttttttatttattgtacgagtgcga

SEQ ID NO: 202814 - DNA, 25 bp, Canis familiaris
ttttcccatttttgtaccaggcttg

SEQ ID NO: 202815 - DNA, 25 bp, Canis familiaris
ttttcctaaggttgtcccaagtatg

SEQ ID NO: 202816 - DNA, 25 bp, Canis familiaris
ttttctaaaggccaggtccatcagt

SEQ ID NO: 202817 - DNA, 25 bp, Canis familiaris
ttttctctaactcagaaacatcagt

SEQ ID NO: 202818 - DNA, 25 bp, Canis familiaris
ttttgcctcaaataaagaacatggt

SEQ ID NO: 202819 - DNA, 25 bp, Canis familiaris
ttttccccatacttaatatatcagg

SEQ ID NO: 202820 - DNA, 25 bp, Canis familiaris
ttttctacctatttaattacattat

SEQ ID NO: 202821 - DNA, 25 bp, Canis familiaris
tttttcactctcaggatttattttt

SEQ ID NO: 202822 - DNA, 25 bp, Canis familiaris
tttttctctctctcgtatatttttt

SEQ ID NO: 202823 - DNA, 25 bp, Canis familiaris
tttttctttccccatttgatatctt

SEQ ID NO: 202824 - DNA, 25 bp, Canis familiaris
ttattactttcctgtttctgactct

SEQ ID NO: 202825 - DNA, 25 bp, Canis familiaris
tttttcttatcttctatttctttct

SEQ ID NO: 202826 - DNA, 25 bp, Canis familiaris
tttttctttgcaggcgtttctttct

SEQ ID NO: 202827 - DNA, 25 bp, Canis familiaris
ttttcattttggggttctttatcat

SEQ ID NO: 202828 - DNA, 25 bp, Canis familiaris
ttttcagtttccatttgctttcatt

SEQ ID NO: 202829 - DNA, 25 bp, Canis familiaris
ttattcgtttcacatttccttttgc

SEQ ID NO: 202830 - DNA, 25 bp, Canis familiaris
ttattcctagtactttattcttggt

SEQ ID NO: 202831 - DNA, 25 bp, Canis familiaris
ttttcattgcagagtttttccatgt

SEQ ID NO: 202832 - DNA, 25 bp, Canis familiaris
ttttcctcaaagtttataagcagtt

SEQ ID NO: 202833 - DNA, 25 bp, Canis familiaris
ttttccatcccagttccaagagagg

SEQ ID NO: 202834 - DNA, 25 bp, Canis familiaris
ttaccctcccacccagaaggaggca

SEQ ID NO: 202835 - DNA, 25 bp, Canis familiaris
ttaacgtgtccatccgacggatcac

SEQ ID NO: 202836 - DNA, 25 bp, Canis familiaris
ttaacttcccaagggatgcccacac

SEQ ID NO: 202837 - DNA, 25 bp, Canis familiaris
ttaagcaactgtcacggagcaccaa

SEQ ID NO: 202838 - DNA, 25 bp, Canis familiaris
ttagtcaacttgcaccagagcggtg

SEQ ID NO: 202839 - DNA, 25 bp, Canis familiaris
ttttcaagtcaggctctcaagtttt

SEQ ID NO: 202840 - DNA, 25 bp, Canis familiaris
ttttccagactcttctcaaggctgt

SEQ ID NO: 202841 - DNA, 25 bp, Canis familiaris
ttttcgcaagctgatgtacaccgtc

SEQ ID NO: 202842 - DNA, 25 bp, Canis familiaris
ttttgctgaagctcactaactcctt

SEQ ID NO: 202843 - DNA, 25 bp, Canis familiaris
ttttggaagctatgcccacttttgt

SEQ ID NO: 202844 - DNA, 25 bp, Canis familiaris
tttttactctcttccaaattttgtg

SEQ ID NO: 202845 - DNA, 25 bp, Canis familiaris
ttatgttacattgttaaatttttgt

SEQ ID NO: 202846 - DNA, 25 bp, Canis familiaris
ttcactataatttctctaaaaccta

SEQ ID NO: 202847 - DNA, 25 bp, Canis familiaris
ttcactaatattgactacaaattaa

SEQ ID NO: 202848 - DNA, 25 bp, Canis familiaris
ttagctaaacttctaaatgtcagaa

SEQ ID NO: 202849 - DNA, 25 bp, Canis familiaris
ttatctttacctctgggtggcagca

SEQ ID NO: 202850 - DNA, 25 bp, Canis familiaris
ttatctttaactcctgcatggccac

SEQ ID NO: 202851 - DNA, 25 bp, Canis familiaris
ttatcttctatatcttcaggcgcgc

SEQ ID NO: 202852 - DNA, 25 bp, Canis familiaris
ttgtttctgcataggtggcggggcc

SEQ ID NO: 202853 - DNA, 25 bp, Canis familiaris
ttttttgatctggtgcgtgtggccc

SEQ ID NO: 202854 - DNA, 25 bp, Canis familiaris
ttattttcctcagggctaggctcca

SEQ ID NO: 202855 - DNA, 25 bp, Canis familiaris
ttatttacaatagctaaggcataga

SEQ ID NO: 202856 - DNA, 25 bp, Canis familiaris
ttatgtctccaaaccacggatgcaa

SEQ ID NO: 202857 - DNA, 25 bp, Canis familiaris
ttttgcatgaaaacagcccgccaac

SEQ ID NO: 202858 - DNA, 25 bp, Canis familiaris
ttttcacaaaaaccctgcaaacaat

SEQ ID NO: 202859 - DNA, 25 bp, Canis familiaris
ttttccatatattggccctgctaaa

SEQ ID NO: 202860 - DNA, 25 bp, Canis familiaris
ttttgccttttgtacttgtaaacat

SEQ ID NO: 202861 - DNA, 25 bp, Canis familiaris
ttttcctctacttagttttcagaat

SEQ ID NO: 202862 - DNA, 25 bp, Canis familiaris
ttttttcaactttatttatatgtat

SEQ ID NO: 202863 - DNA, 25 bp, Canis familiaris
ttttttaatggcaaatgtatctatt

SEQ ID NO: 202864 - DNA, 25 bp, Canis familiaris
ttttttgaattgaactgcttctgaa

SEQ ID NO: 202865 - DNA, 25 bp, Canis familiaris
ttgtcaaatgggatactctgtgtaa

SEQ ID NO: 202866 - DNA, 25 bp, Canis familiaris
ttatggtatgtgggtatcttgtgta

SEQ ID NO: 202867 - DNA, 25 bp, Canis familiaris
ttttgcacgtggctgtgttgtccag

SEQ ID NO: 202868 - DNA, 25 bp, Canis familiaris
ttttgcaagttcagtggctggcccg

SEQ ID NO: 202869 - DNA, 25 bp, Canis familiaris
ttttcaggattccctgtcactcagc

SEQ ID NO: 202870 - DNA, 25 bp, Canis familiaris
ttttctgtgacctcagtcaccgcag

SEQ ID NO: 202871 - DNA, 25 bp, Canis familiaris
ttttcttgactatgcaaagccatca

SEQ ID NO: 202872 - DNA, 25 bp, Canis familiaris
ttttgccgactgttgcataaccata

SEQ ID NO: 202873 - DNA, 25 bp, Canis familiaris
ttttgccaagtcttcaactcttcat

SEQ ID NO: 202874 - DNA, 25 bp, Canis familiaris
ttttccaatggctttacagaacttc

SEQ ID NO: 202875 - DNA, 25 bp, Canis familiaris
ttttctgcctggtttccaattttga

SEQ ID NO: 202876 - DNA, 25 bp, Canis familiaris
ttttcatgcttatttgtgttttttg

SEQ ID NO: 202877 - DNA, 25 bp, Canis familiaris
ttttctgttcttgttctttgttgtt

SEQ ID NO: 202878 - DNA, 25 bp, Canis familiaris
ttttttactttttctgctttgtgct

SEQ ID NO: 202879 - DNA, 25 bp, Canis familiaris
ttttttcctcctatttttgatgcta

SEQ ID NO: 202880 - DNA, 25 bp, Canis familiaris
ttttttcccctcctgtggatgaagt

SEQ ID NO: 202881 - DNA, 25 bp, Canis familiaris
tttttttccccactatgcttaatat

SEQ ID NO: 202882 - DNA, 25 bp, Canis familiaris
tttttttactatatatgctccataa

SEQ ID NO: 202883 - DNA, 25 bp, Canis familiaris
ttttttgtttgtatcattccttcaa

SEQ ID NO: 202884 - DNA, 25 bp, Canis familiaris
tttttttgtttgtatcattccttca

SEQ ID NO: 202885 - DNA, 25 bp, Canis familiaris
ttttgttgttttaaatccctctgct

SEQ ID NO: 202886 - DNA, 25 bp, Canis familiaris
ttttgtaccttaacacttattcttg

SEQ ID NO: 202887 - DNA, 25 bp, Canis familiaris
ttttggaactctatgccagtgatcc

SEQ ID NO: 202888 - DNA, 25 bp, Canis familiaris
ttttctctactctttgctaggacct

SEQ ID NO: 202889 - DNA, 25 bp, Canis familiaris
ttttctcctcttaattcatggaccc

SEQ ID NO: 202890 - DNA, 25 bp, Canis familiaris
ttttcacttttaattgtcgaccgat

SEQ ID NO: 202891 - DNA, 25 bp, Canis familiaris
ttttaccttcttttctctgacaaga

SEQ ID NO: 202892 - DNA, 25 bp, Canis familiaris
ttttttttctctcttctggcagata

SEQ ID NO: 202893 - DNA, 25 bp, Canis familiaris
ttttcttttccagtttctcaagaag

SEQ ID NO: 202894 - DNA, 25 bp, Canis familiaris
ttttcatgtcttccaaaatcttaga

SEQ ID NO: 202895 - DNA, 25 bp, Canis familiaris
ttttctctgagcaccaactttgatg

SEQ ID NO: 202896 - DNA, 25 bp, Canis familiaris
ttttctgcctcatgacaacttttgt

SEQ ID NO: 202897 - DNA, 25 bp, Canis familiaris
ttttcgagcctatcagactgttgtc

SEQ ID NO: 202898 - DNA, 25 bp, Canis familiaris
ttattagaccgatcaacttcttgaa

SEQ ID NO: 202899 - DNA, 25 bp, Canis familiaris
ttttatgaactgaaccacccttgga

SEQ ID NO: 202900 - DNA, 25 bp, Canis familiaris
ttttgtgatcacaagaccaccccat

SEQ ID NO: 202901 - DNA, 25 bp, Canis familiaris
ttttgtatccaacagcacaacccgt

SEQ ID NO: 202902 - DNA, 25 bp, Canis familiaris
ttgttgtttaacctgaaagcctatt

SEQ ID NO: 202903 - DNA, 25 bp, Canis familiaris
tttttttaatggcaaatgtatctat

SEQ ID NO: 202904 - DNA, 25 bp, Canis familiaris
tttttttacagaccacatgactttt

SEQ ID NO: 202905 - DNA, 25 bp, Canis familiaris
ttaatttgctaaacaaatgcctttt

SEQ ID NO: 202906 - DNA, 25 bp, Canis familiaris
ttaattttcagaagggatcccaatt

SEQ ID NO: 202907 - DNA, 25 bp, Canis familiaris
tttttttcagtatatgatctccttt

SEQ ID NO: 202908 - DNA, 25 bp, Canis familiaris
ttttcttttgtttctgcatcattcc

SEQ ID NO: 202909 - DNA, 25 bp, Canis familiaris
ttttccttttgtagtctgatctcac

SEQ ID NO: 202910 - DNA, 25 bp, Canis familiaris
ttttgagttttgtagagtattgcca

SEQ ID NO: 202911 - DNA, 25 bp, Canis familiaris
ttacggtctactttcagtagtcgaa

SEQ ID NO: 202912 - DNA, 25 bp, Canis familiaris
ttaggcgactgttttcttagttaca

SEQ ID NO: 202913 - DNA, 25 bp, Canis familiaris
ttactggactaatggcttttatcta

SEQ ID NO: 202914 - DNA, 25 bp, Canis familiaris
ttacggctgctttggggttttcatt

SEQ ID NO: 202915 - DNA, 25 bp, Canis familiaris
ttatcctgccttgggggtttttgca

SEQ ID NO: 202916 - DNA, 25 bp, Canis familiaris
ttagcactactttggtagcttttac

SEQ ID NO: 202917 - DNA, 25 bp, Canis familiaris
ttatgcctaatgtaagctgactttt

SEQ ID NO: 202918 - DNA, 25 bp, Canis familiaris
ttagcgccacgtgtgggtgctctta

SEQ ID NO: 202919 - DNA, 25 bp, Canis familiaris
ttaggcgatgagtcctgcaggggct

SEQ ID NO: 202920 - DNA, 25 bp, Canis familiaris
ttagctcagtggtagagcgcttgcc

SEQ ID NO: 202921 - DNA, 25 bp, Canis familiaris
ttatgctgggcgttgagtcctttca

SEQ ID NO: 202922 - DNA, 25 bp, Canis familiaris
ttatctgggccatggatgcccctca

SEQ ID NO: 202923 - DNA, 25 bp, Canis familiaris
ttatctggggctcagtctctagcct

SEQ ID NO: 202924 - DNA, 25 bp, Canis familiaris
ttattggggcaggatcccttctgct

SEQ ID NO: 202925 - DNA, 25 bp, Canis familiaris
ttattgggcttcaaccattccctca

SEQ ID NO: 202926 - DNA, 25 bp, Canis familiaris
ttttcaagctctcaaaatcctgcta

SEQ ID NO: 202927 - DNA, 25 bp, Canis familiaris
ttgtttacctaagaatcactgctat

SEQ ID NO: 202928 - DNA, 25 bp, Canis familiaris
ttttctacggttgcaaactgctgac

SEQ ID NO: 202929 - DNA, 25 bp, Canis familiaris
tttttttctttggcataaatgcgac

SEQ ID NO: 202930 - DNA, 25 bp, Canis familiaris
ttttttctctcttactcagattgga

SEQ ID NO: 202931 - DNA, 25 bp, Canis familiaris
ttttattgcttctcttgcaaggcta

SEQ ID NO: 202932 - DNA, 25 bp, Canis familiaris
ttttacacttgaccttgaaggtaca

SEQ ID NO: 202933 - DNA, 25 bp, Canis familiaris
ttttctcacctgcacttagaggaaa

SEQ ID NO: 202934 - DNA, 25 bp, Canis familiaris
ttttgcagcatcaggactttgggaa

SEQ ID NO: 202935 - DNA, 25 bp, Canis familiaris
ttttatgagcacagactttcaagaa

SEQ ID NO: 202936 - DNA, 25 bp, Canis familiaris
ttttgtgtatctgtctttctagcat

SEQ ID NO: 202937 - DNA, 25 bp, Canis familiaris
ttttttcatgctgccatttgtaata

SEQ ID NO: 202938 - DNA, 25 bp, Canis familiaris
ttttctggcattgccttttttgaca

SEQ ID NO: 202939 - DNA, 25 bp, Canis familiaris
ttttcttcatgttcctcattttaga

SEQ ID NO: 202940 - DNA, 25 bp, Canis familiaris
ttttcttctgacaccactttagcaa

SEQ ID NO: 202941 - DNA, 25 bp, Canis familiaris
ttttttctcacctgcacttagagga

SEQ ID NO: 202942 - DNA, 25 bp, Canis familiaris
ttttttgctccttcagcacgtaata

SEQ ID NO: 202943 - DNA, 25 bp, Canis familiaris
ttttttgccttgttcatatgtgatt

SEQ ID NO: 202944 - DNA, 25 bp, Canis familiaris
ttttttctcttgtttctggtgttgg

SEQ ID NO: 202945 - DNA, 25 bp, Canis familiaris
ttttcccttttaatctgttattgag

SEQ ID NO: 202946 - DNA, 25 bp, Canis familiaris
ttttgtttttctatgtgttaagcca

SEQ ID NO: 202947 - DNA, 25 bp, Canis familiaris
ttttgtttcttggtgttgttatggc

SEQ ID NO: 202948 - DNA, 25 bp, Canis familiaris
ttattgttcttgacccttttatgcc

SEQ ID NO: 202949 - DNA, 25 bp, Canis familiaris
ttttattctttcatttgctctgctg

SEQ ID NO: 202950 - DNA, 25 bp, Canis familiaris
ttattttatttttggctgctcgggt

SEQ ID NO: 202951 - DNA, 25 bp, Canis familiaris
ttttttttttcatgctgccatttgt

SEQ ID NO: 202952 - DNA, 25 bp, Canis familiaris
ttttgtttctgcttaagtgtattta

SEQ ID NO: 202953 - DNA, 25 bp, Canis familiaris
ttcactgtttcctcaaggtagtcta

SEQ ID NO: 202954 - DNA, 25 bp, Canis familiaris
ttcacaggttcctccagttatggca

SEQ ID NO: 202955 - DNA, 25 bp, Canis familiaris
ttatccgtatccaccagatgttgtc

SEQ ID NO: 202956 - DNA, 25 bp, Canis familiaris
ttttgtgttccaagccagcttttct

SEQ ID NO: 202957 - DNA, 25 bp, Canis familiaris
ttttggtcctctaccagctttgagg

SEQ ID NO: 202958 - DNA, 25 bp, Canis familiaris
ttttttacacatagcccttagaggg

SEQ ID NO: 202959 - DNA, 25 bp, Canis familiaris
ttatatttaaataccctccagaggg

SEQ ID NO: 202960 - DNA, 25 bp, Canis familiaris
ttataattctaattcccctaatgga

SEQ ID NO: 202961 - DNA, 25 bp, Canis familiaris
ttatatttaattacccctttctgat

SEQ ID NO: 202962 - DNA, 25 bp, Canis familiaris
ttcttttcaggctaaccaaatttgt

SEQ ID NO: 202963 - DNA, 25 bp, Canis familiaris
ttctctatatcaggggactaatatt

SEQ ID NO: 202964 - DNA, 25 bp, Canis familiaris
ttttatattcttggcctcacagatt

SEQ ID NO: 202965 - DNA, 25 bp, Canis familiaris
ttttatatatttactcacgagagac

SEQ ID NO: 202966 - DNA, 25 bp, Canis familiaris
ttttgagtgtagttcacgctgaaag

SEQ ID NO: 202967 - DNA, 25 bp, Canis familiaris
ttatctacgtattaagtctcacata

SEQ ID NO: 202968 - DNA, 25 bp, Canis familiaris
ttttcactcttatacttccatttta

SEQ ID NO: 202969 - DNA, 25 bp, Canis familiaris
ttttcatctctttaatcttcaaccc

SEQ ID NO: 202970 - DNA, 25 bp, Canis familiaris
ttttccagcatttatacctgtcccc

SEQ ID NO: 202971 - DNA, 25 bp, Canis familiaris
ttttctcatctgttaagccttctgg

SEQ ID NO: 202972 - DNA, 25 bp, Canis familiaris
ttatgcctcccaggaacctattgga

SEQ ID NO: 202973 - DNA, 25 bp, Canis familiaris
ttaggcccaagccaccagtttgtaa

SEQ ID NO: 202974 - DNA, 25 bp, Canis familiaris
ttattagccaaccccagttctatca

SEQ ID NO: 202975 - DNA, 25 bp, Canis familiaris
ttaaacagaacccccttctggcaga

SEQ ID NO: 202976 - DNA, 25 bp, Canis familiaris
ttaataacaaccctaaatgcggaag

SEQ ID NO: 202977 - DNA, 25 bp, Canis familiaris
ttattaaccacctaacacaccaaag

SEQ ID NO: 202978 - DNA, 25 bp, Canis familiaris
ttattcccaatgctacacaaccaga

SEQ ID NO: 202979 - DNA, 25 bp, Canis familiaris
ttttctcttatgcttactgaccaat

SEQ ID NO: 202980 - DNA, 25 bp, Canis familiaris
ttttcttgctatttgttttccacat

SEQ ID NO: 202981 - DNA, 25 bp, Canis familiaris
ttttcttcattttgtgtatctttca

SEQ ID NO: 202982 - DNA, 25 bp, Canis familiaris
ttttcttgttctttagtctcttaat

SEQ ID NO: 202983 - DNA, 25 bp, Canis familiaris
ttttctttactaatcatttcagttt

SEQ ID NO: 202984 - DNA, 25 bp, Canis familiaris
ttttttgttctggataatatcgtgt

SEQ ID NO: 202985 - DNA, 25 bp, Canis familiaris
ttttcttttttctttgatcaggttg

SEQ ID NO: 202986 - DNA, 25 bp, Canis familiaris
ttattctttttttccgcaatagttg

SEQ ID NO: 202987 - DNA, 25 bp, Canis familiaris
ttataacttttttgtacgtagctgt

SEQ ID NO: 202988 - DNA, 25 bp, Canis familiaris
ttttttcccttttactgtcagctgg

SEQ ID NO: 202989 - DNA, 25 bp, Canis familiaris
ttttttccttcttgttatctcattg

SEQ ID NO: 202990 - DNA, 25 bp, Canis familiaris
ttttcttccctctgtatcattaagt

SEQ ID NO: 202991 - DNA, 25 bp, Canis familiaris
ttttcctccacctaggacatgtaag

SEQ ID NO: 202992 - DNA, 25 bp, Canis familiaris
ttttcctccactgataccatgtaat

SEQ ID NO: 202993 - DNA, 25 bp, Canis familiaris
ttttccctccatgaacacatggaga

SEQ ID NO: 202994 - DNA, 25 bp, Canis familiaris
ttatcctggcccaacagcaccagga

SEQ ID NO: 202995 - DNA, 25 bp, Canis familiaris
ttatcctggcccaacagcaccagga

SEQ ID NO: 202996 - DNA, 25 bp, Canis familiaris
ttattcttagaaaacacacatgtga

SEQ ID NO: 202997 - DNA, 25 bp, Canis familiaris
ttttcttaaactaaagcatgtattt

SEQ ID NO: 202998 - DNA, 25 bp, Canis familiaris
ttttcactatcatctgtaattgcaa

SEQ ID NO: 202999 - DNA, 25 bp, Canis familiaris
ttttatcgcatctacattattacaa

SEQ ID NO: 203000 - DNA, 25 bp, Canis familiaris
ttttatacatctgttatgccactaa

SEQ ID NO: 203001 - DNA, 25 bp, Canis familiaris
ttttcagccatttttaccacgatag

SEQ ID NO: 203002 - DNA, 25 bp, Canis familiaris
ttttccttttttttgcagctgacag

SEQ ID NO: 203003 - DNA, 25 bp, Canis familiaris
ttattcctgatatttttaagataga

SEQ ID NO: 203004 - DNA, 25 bp, Canis familiaris
ttttctctgagattttttgatgctt

SEQ ID NO: 203005 - DNA, 25 bp, Canis familiaris
ttttctcctgatatgttcatgtggt

SEQ ID NO: 203006 - DNA, 25 bp, Canis familiaris
ttttctctcctgactgttcaagatt

SEQ ID NO: 203007 - DNA, 25 bp, Canis familiaris
ttttctccctggcttcatagatgat

SEQ ID NO: 203008 - DNA, 25 bp, Canis familiaris
ttttctccgctgtgtatgtacatga

SEQ ID NO: 203009 - DNA, 25 bp, Canis familiaris
ttttcccttggggatggaatgcata

SEQ ID NO: 203010 - DNA, 25 bp, Canis familiaris
ttttccctgtgtgaagtgacataat

SEQ ID NO: 203011 - DNA, 25 bp, Canis familiaris
ttttccctctgtgtcagtgtgcaga

SEQ ID NO: 203012 - DNA, 25 bp, Canis familiaris
ttttcatccttggtggctgttgcag

SEQ ID NO: 203013 - DNA, 25 bp, Canis familiaris
ttatctcacagatttgtgggtcaga

SEQ ID NO: 203014 - DNA, 25 bp, Canis familiaris
ttattcgcgaactatagctgtcaga

SEQ ID NO: 203015 - DNA, 25 bp, Canis familiaris
ttatctggctgtacacgagtatcga

SEQ ID NO: 203016 - DNA, 25 bp, Canis familiaris
ttatccgatgtagaattcagcagag

SEQ ID NO: 203017 - DNA, 25 bp, Canis familiaris
ttatcacttgtccatagttcacatt

SEQ ID NO: 203018 - DNA, 25 bp, Canis familiaris
ttatacctgctcccagtgtgataac

SEQ ID NO: 203019 - DNA, 25 bp, Canis familiaris
ttttcactctcgccagagacatcaa

SEQ ID NO: 203020 - DNA, 25 bp, Canis familiaris
ttttctccatctgcgactgtgcaaa

SEQ ID NO: 203021 - DNA, 25 bp, Canis familiaris
ttttgtgcctgtgcagattgcaata

SEQ ID NO: 203022 - DNA, 25 bp, Canis familiaris
ttttgctcacaggtctcttaatcac

SEQ ID NO: 203023 - DNA, 25 bp, Canis familiaris
ttttgctatgtgcctcctgagaaat

SEQ ID NO: 203024 - DNA, 25 bp, Canis familiaris
ttatttaggtccagcagctacattt

SEQ ID NO: 203025 - DNA, 25 bp, Canis familiaris
ttgattcaaggtctcgactccatcc

SEQ ID NO: 203026 - DNA, 25 bp, Canis familiaris
ttattctgggattgtgggcactcat

SEQ ID NO: 203027 - DNA, 25 bp, Canis familiaris
ttatatggggatggttccactagaa

SEQ ID NO: 203028 - DNA, 25 bp, Canis familiaris
ttatgcatgggagccttcctataaa

SEQ ID NO: 203029 - DNA, 25 bp, Canis familiaris
ttatgtggaggccctgcatgcctat

SEQ ID NO: 203030 - DNA, 25 bp, Canis familiaris
ttttgacatctgtgctgcatcctga

SEQ ID NO: 203031 - DNA, 25 bp, Canis familiaris
ttttgatatctgttcatactgctga

SEQ ID NO: 203032 - DNA, 25 bp, Canis familiaris
ttttgctatctgtgttacgactcga

SEQ ID NO: 203033 - DNA, 25 bp, Canis familiaris
ttttgctctcagctttacttctcaa

SEQ ID NO: 203034 - DNA, 25 bp, Canis familiaris
ttttgcttcaccagtattcattaca

SEQ ID NO: 203035 - DNA, 25 bp, Canis familiaris
ttttctgtcctcacttagcattata

SEQ ID NO: 203036 - DNA, 25 bp, Canis familiaris
ttcttgggcaccttctagacattta

SEQ ID NO: 203037 - DNA, 25 bp, Canis familiaris
ttcttgacaaaacctaacttgcgca

SEQ ID NO: 203038 - DNA, 25 bp, Canis familiaris
ttttgacacaaaccaacctcgtgcc

SEQ ID NO: 203039 - DNA, 25 bp, Canis familiaris
ttttgagtcaaaccattccattatt

SEQ ID NO: 203040 - DNA, 25 bp, Canis familiaris
ttttgtgtgcatgcctcactttttc

SEQ ID NO: 203041 - DNA, 25 bp, Canis familiaris
ttttgcttcatggttatttttccca

SEQ ID NO: 203042 - DNA, 25 bp, Canis familiaris
ttttgagatcatctaccttttccct

SEQ ID NO: 203043 - DNA, 25 bp, Canis familiaris
ttttagatccgatgtctgtttccgc

SEQ ID NO: 203044 - DNA, 25 bp, Canis familiaris
ttttaatatctgtgtctgtctgttc

SEQ ID NO: 203045 - DNA, 25 bp, Canis familiaris
ttttaggtgctgttcttgtctgctg

SEQ ID NO: 203046 - DNA, 25 bp, Canis familiaris
ttttgttcacattgcatttaagttt

SEQ ID NO: 203047 - DNA, 25 bp, Canis familiaris
ttcagagttccaaaataaaaattag

SEQ ID NO: 203048 - DNA, 25 bp, Canis familiaris
ttgaagtaactgctaaaccacatgt

SEQ ID NO: 203049 - DNA, 25 bp, Canis familiaris
ttaagctacactatcgacgacctgg

SEQ ID NO: 203050 - DNA, 25 bp, Canis familiaris
ttagtattcgtacccacgaggcggc

SEQ ID NO: 203051 - DNA, 25 bp, Canis familiaris
ttttcatttgtctggggaggcggcg

SEQ ID NO: 203052 - DNA, 25 bp, Canis familiaris
ttttctgtggctgaggggatgtccc

SEQ ID NO: 203053 - DNA, 25 bp, Canis familiaris
ttttagtggggaggctcacttcctc

SEQ ID NO: 203054 - DNA, 25 bp, Canis familiaris
ttttggggggaacttgctatcactc

SEQ ID NO: 203055 - DNA, 25 bp, Canis familiaris
ttttgggtgttatctgttcttctct

SEQ ID NO: 203056 - DNA, 25 bp, Canis familiaris
ttttggttgtttgtttttgctgatt

SEQ ID NO: 203057 - DNA, 25 bp, Canis familiaris
ttttggtttctattgtctttagtat

SEQ ID NO: 203058 - DNA, 25 bp, Canis familiaris
ttttgcctttcctctctgaaatgta

SEQ ID NO: 203059 - DNA, 25 bp, Canis familiaris
ttttcttttctctctctagaaccag

SEQ ID NO: 203060 - DNA, 25 bp, Canis familiaris
ttttcttttctcccttgactataga

SEQ ID NO: 203061 - DNA, 25 bp, Canis familiaris
ttttcttccctggacctgagtgaaa

SEQ ID NO: 203062 - DNA, 25 bp, Canis familiaris
ttctttatcccaaaccaatgaaata

SEQ ID NO: 203063 - DNA, 25 bp, Canis familiaris
ttatttatcccaacaccgagctaag

SEQ ID NO: 203064 - DNA, 25 bp, Canis familiaris
ttttgcttcctaactgcctgaaata

SEQ ID NO: 203065 - DNA, 25 bp, Canis familiaris
ttttgttctttccagcctgtagtta

SEQ ID NO: 203066 - DNA, 25 bp, Canis familiaris
ttattttctcattatcggcgtacct

SEQ ID NO: 203067 - DNA, 25 bp, Canis familiaris
ttattcttcccaattggcaatacct

SEQ ID NO: 203068 - DNA, 25 bp, Canis familiaris
ttcattttttcttctggaaaccctg

SEQ ID NO: 203069 - DNA, 25 bp, Canis familiaris
ttttgtttccattctaagaaacact

SEQ ID NO: 203070 - DNA, 25 bp, Canis familiaris
ttttgtttcagcagccaaccaacac

SEQ ID NO: 203071 - DNA, 25 bp, Canis familiaris
ttttctatcccaagccaaccaagag

SEQ ID NO: 203072 - DNA, 25 bp, Canis familiaris
ttttctaccataagtgacacccaat

SEQ ID NO: 203073 - DNA, 25 bp, Canis familiaris
ttatggctaataattctcccccaaa

SEQ ID NO: 203074 - DNA, 25 bp, Canis familiaris
ttatcgataacattttccgcttcac

SEQ ID NO: 203075 - DNA, 25 bp, Canis familiaris
ttattgggcacagttttccttccac

SEQ ID NO: 203076 - DNA, 25 bp, Canis familiaris
ttgattaggaagtgaccccccactt

SEQ ID NO: 203077 - DNA, 25 bp, Canis familiaris
ttattctggaagtgcaaccctccca

SEQ ID NO: 203078 - DNA, 25 bp, Canis familiaris
ttattcgagtgaccgagaccgcggc

SEQ ID NO: 203079 - DNA, 25 bp, Canis familiaris
ttcatactgatttcaccgagggccc

SEQ ID NO: 203080 - DNA, 25 bp, Canis familiaris
ttatacatgttaccccatcaggcag

SEQ ID NO: 203081 - DNA, 25 bp, Canis familiaris
ttttcttatgagccccatgatggaa

SEQ ID NO: 203082 - DNA, 25 bp, Canis familiaris
ttttctgtaaggtgcatgtctatca

SEQ ID NO: 203083 - DNA, 25 bp, Canis familiaris
ttttctgttctggaatctgtgctga

SEQ ID NO: 203084 - DNA, 25 bp, Canis familiaris
ttttctgtttgtttcttctgttttg

SEQ ID NO: 203085 - DNA, 25 bp, Canis familiaris
ttttctgtatcaacttcgtctttat

SEQ ID NO: 203086 - DNA, 25 bp, Canis familiaris
ttttcattatggattcagttttttt

SEQ ID NO: 203087 - DNA, 25 bp, Canis familiaris
ttttccttctgaattcacttatttc

SEQ ID NO: 203088 - DNA, 25 bp, Canis familiaris
ttttctgatcttttgtcacttctct

SEQ ID NO: 203089 - DNA, 25 bp, Canis familiaris
ttttcaactctttcctcattgtata

SEQ ID NO: 203090 - DNA, 25 bp, Canis familiaris
ttttcaacttcaaccttgtgtaaag

SEQ ID NO: 203091 - DNA, 25 bp, Canis familiaris
ttgtaaatttcaactttcttggaag

SEQ ID NO: 203092 - DNA, 25 bp, Canis familiaris
ttatggaattgttcacctggtttga

SEQ ID NO: 203093 - DNA, 25 bp, Canis familiaris
ttagtaattgtttcttgcgtctctt

SEQ ID NO: 203094 - DNA, 25 bp, Canis familiaris
ttttgaattgccacttcatgccttc

SEQ ID NO: 203095 - DNA, 25 bp, Canis familiaris
ttttgactgttgtctttcaccttgc

SEQ ID NO: 203096 - DNA, 25 bp, Canis familiaris
ttattaaatacactttccccatgcc

SEQ ID NO: 203097 - DNA, 25 bp, Canis familiaris
ttttacagtatgcttctaccaggcc

SEQ ID NO: 203098 - DNA, 25 bp, Canis familiaris
ttttctggttttactaccatagcct

SEQ ID NO: 203099 - DNA, 25 bp, Canis familiaris
ttttcggtgtgtatttgcctgtcct

SEQ ID NO: 203100 - DNA, 25 bp, Canis familiaris
ttttgagtgtgtgtctttgcctccc

SEQ ID NO: 203101 - DNA, 25 bp, Canis familiaris
ttttggtgttgtttctgacagcccc

SEQ ID NO: 203102 - DNA, 25 bp, Canis familiaris
ttttaaacagtatttgccacctctc

SEQ ID NO: 203103 - DNA, 25 bp, Canis familiaris
ttttgaaaccgatttgtccctgtgc

SEQ ID NO: 203104 - DNA, 25 bp, Canis familiaris
ttttaaaccagtagtgtccccatga

SEQ ID NO: 203105 - DNA, 25 bp, Canis familiaris
ttttgtacgcccatttctcagaaat

SEQ ID NO: 203106 - DNA, 25 bp, Canis familiaris
ttttcgtcttctcattgtcacagaa

SEQ ID NO: 203107 - DNA, 25 bp, Canis familiaris
ttttcagtctttttctctcacataa

SEQ ID NO: 203108 - DNA, 25 bp, Canis familiaris
ttttctcttgtgagtcctgcatcat

SEQ ID NO: 203109 - DNA, 25 bp, Canis familiaris
ttttcctggatgacagctattgcaa

SEQ ID NO: 203110 - DNA, 25 bp, Canis familiaris
ttttcctgagtgtctctcatgtata

SEQ ID NO: 203111 - DNA, 25 bp, Canis familiaris
ttttccgatgtgttcttctgtgagg

SEQ ID NO: 203112 - DNA, 25 bp, Canis familiaris
ttttcatcggctggtttcttgggca

SEQ ID NO: 203113 - DNA, 25 bp, Canis familiaris
ttttgctcgtctgtatctttgtaaa

SEQ ID NO: 203114 - DNA, 25 bp, Canis familiaris
ttattcttgtctgattcctttttac

SEQ ID NO: 203115 - DNA, 25 bp, Canis familiaris
ttttcatatttctttcctttctgtg

SEQ ID NO: 203116 - DNA, 25 bp, Canis familiaris
ttttcatatttctgtcctgttctgt

SEQ ID NO: 203117 - DNA, 25 bp, Canis familiaris
ttttcattttcttacactttgctat

SEQ ID NO: 203118 - DNA, 25 bp, Canis familiaris
ttttgtttctgttgccatttgtgta

SEQ ID NO: 203119 - DNA, 25 bp, Canis familiaris
ttttgggtgcttggccatatggctg

SEQ ID NO: 203120 - DNA, 25 bp, Canis familiaris
ttttctgttgttggccattggggta

SEQ ID NO: 203121 - DNA, 25 bp, Canis familiaris
ttttctgattcttgcttttggggga

SEQ ID NO: 203122 - DNA, 25 bp, Canis familiaris
ttttcgacctcactactttggatgg

SEQ ID NO: 203123 - DNA, 25 bp, Canis familiaris
ttatgggcaccctatagtttgtata

SEQ ID NO: 203124 - DNA, 25 bp, Canis familiaris
ttatgtagactgtataagattataa

SEQ ID NO: 203125 - DNA, 25 bp, Canis familiaris
ttattagtctgcttaagtcatttaa

SEQ ID NO: 203126 - DNA, 25 bp, Canis familiaris
ttatccagcattgtaattagttacc

SEQ ID NO: 203127 - DNA, 25 bp, Canis familiaris
ttttcagtacttttgtatttagcca

SEQ ID NO: 203128 - DNA, 25 bp, Canis familiaris
ttttcagtgttttccattctttcca

SEQ ID NO: 203129 - DNA, 25 bp, Canis familiaris
ttttcaagttttcattctctgtcaa

SEQ ID NO: 203130 - DNA, 25 bp, Canis familiaris
ttttcaattatttctatttttctag

SEQ ID NO: 203131 - DNA, 25 bp, Canis familiaris
ttttctactatttcagtttatccta

SEQ ID NO: 203132 - DNA, 25 bp, Canis familiaris
ttttctagttcgccgtatgctatcg

SEQ ID NO: 203133 - DNA, 25 bp, Canis familiaris
ttttctcggtcttctgttattgcag

SEQ ID NO: 203134 - DNA, 25 bp, Canis familiaris
ttttctcagtgtaagtgcatttcta

SEQ ID NO: 203135 - DNA, 25 bp, Canis familiaris
ttttgcctgatggtggcctttctca

SEQ ID NO: 203136 - DNA, 25 bp, Canis familiaris
ttttcacatgaggtcccattctccg

SEQ ID NO: 203137 - DNA, 25 bp, Canis familiaris
ttatttcatggcactcctgtcacac

SEQ ID NO: 203138 - DNA, 25 bp, Canis familiaris
ttatctctcaccagctttgagccat

SEQ ID NO: 203139 - DNA, 25 bp, Canis familiaris
ttcatcgctcacagacttggactaa

SEQ ID NO: 203140 - DNA, 25 bp, Canis familiaris
ttatttcactagcccggcagctgac

SEQ ID NO: 203141 - DNA, 25 bp, Canis familiaris
ttttccatacagccatccagactga

SEQ ID NO: 203142 - DNA, 25 bp, Canis familiaris
ttatttgaagagcccctgcacacag

SEQ ID NO: 203143 - DNA, 25 bp, Canis familiaris
ttatatgtaacaccccccaaatgaa

SEQ ID NO: 203144 - DNA, 25 bp, Canis familiaris
ttattcatgagaggcccccgaaaaa

SEQ ID NO: 203145 - DNA, 25 bp, Canis familiaris
ttgtaaggagcattgcccctataaa

SEQ ID NO: 203146 - DNA, 25 bp, Canis familiaris
ttttgtgagagaatgacccatctaa

SEQ ID NO: 203147 - DNA, 25 bp, Canis familiaris
ttttctcagtaaaccactctgattt

SEQ ID NO: 203148 - DNA, 25 bp, Canis familiaris
ttttcaattctagcttctctgcatt

SEQ ID NO: 203149 - DNA, 25 bp, Canis familiaris
ttttcacaatcttcacttatccttt

SEQ ID NO: 203150 - DNA, 25 bp, Canis familiaris
ttatgtccaatacactctgcatccg

SEQ ID NO: 203151 - DNA, 25 bp, Canis familiaris
ttatgttcaaatcagcgcagccact

SEQ ID NO: 203152 - DNA, 25 bp, Canis familiaris
ttattctaaataactgactcagcta

SEQ ID NO: 203153 - DNA, 25 bp, Canis familiaris
ttattgtacaatactctcctcaggt

SEQ ID NO: 203154 - DNA, 25 bp, Canis familiaris
ttcagaataagtacttccataagta

SEQ ID NO: 203155 - DNA, 25 bp, Canis familiaris
ttctgaacaccatcctgctattagt

SEQ ID NO: 203156 - DNA, 25 bp, Canis familiaris
ttcgaatcattctccaacttactaa

SEQ ID NO: 203157 - DNA, 25 bp, Canis familiaris
ttctaaatggcctgcccttgaccaa

SEQ ID NO: 203158 - DNA, 25 bp, Canis familiaris
ttcttttaacttgggcttggccaag

SEQ ID NO: 203159 - DNA, 25 bp, Canis familiaris
ttttgttcaacccttgttggaagat

SEQ ID NO: 203160 - DNA, 25 bp, Canis familiaris
ttttcctaactccctggtagacgat

SEQ ID NO: 203161 - DNA, 25 bp, Canis familiaris
ttttccggagtctgtgtgggacctt

SEQ ID NO: 203162 - DNA, 25 bp, Canis familiaris
ttttcggctagttgcgttgcagccc

SEQ ID NO: 203163 - DNA, 25 bp, Canis familiaris
ttatatccgccaggagcgtctgcac

SEQ ID NO: 203164 - DNA, 25 bp, Canis familiaris
ttagccctccaaccagtctgagaaa

SEQ ID NO: 203165 - DNA, 25 bp, Canis familiaris
ttaggcgctcacaggcaggtaccaa

SEQ ID NO: 203166 - DNA, 25 bp, Canis familiaris
ttagtagcacagcgggagtcccatg

SEQ ID NO: 203167 - DNA, 25 bp, Canis familiaris
ttagcaagaacctgtggatgccctg

SEQ ID NO: 203168 - DNA, 25 bp, Canis familiaris
ttagcaagtttgtgggatccctggg

SEQ ID NO: 203169 - DNA, 25 bp, Canis familiaris
ttagcgattttatcaggcccctgaa

SEQ ID NO: 203170 - DNA, 25 bp, Canis familiaris
ttaggttgttagtcagccttgccct

SEQ ID NO: 203171 - DNA, 25 bp, Canis familiaris
ttaggtgggggatgactcggactcg

SEQ ID NO: 203172 - DNA, 25 bp, Canis familiaris
ttgggggaggtgatcctccagacgg

SEQ ID NO: 203173 - DNA, 25 bp, Canis familiaris
ttacggtaagtcacgctccaagggc

SEQ ID NO: 203174 - DNA, 25 bp, Canis familiaris
ttacaggaaaacagggtgccagtgg

SEQ ID NO: 203175 - DNA, 25 bp, Canis familiaris
ttatcgggagataccgggtccactg

SEQ ID NO: 203176 - DNA, 25 bp, Canis familiaris
ttttggtgacacacgtgaaccctgc

SEQ ID NO: 203177 - DNA, 25 bp, Canis familiaris
ttattggatggtctcggtacccacg

SEQ ID NO: 203178 - DNA, 25 bp, Canis familiaris
ttacagtgaggtcttggggtgcccg

SEQ ID NO: 203179 - DNA, 25 bp, Canis familiaris
ttttggacgcgagaggtggtgccct

SEQ ID NO: 203180 - DNA, 25 bp, Canis familiaris
ttttggacggtcagggtgtctgttc

SEQ ID NO: 203181 - DNA, 25 bp, Canis familiaris
ttttggtcggacaagaggctccctc

SEQ ID NO: 203182 - DNA, 25 bp, Canis familiaris
ttttgccctggctaaaaccagcccg

SEQ ID NO: 203183 - DNA, 25 bp, Canis familiaris
ttttccctggtcatacagccacaaa

SEQ ID NO: 203184 - DNA, 25 bp, Canis familiaris
ttagcccctggtaatcacctatcta

SEQ ID NO: 203185 - DNA, 25 bp, Canis familiaris
ttattctcctggggcagcactttta

SEQ ID NO: 203186 - DNA, 25 bp, Canis familiaris
ttacttccatccccagtttattaat

SEQ ID NO: 203187 - DNA, 25 bp, Canis familiaris
ttattctcctacctaaactctaaat

SEQ ID NO: 203188 - DNA, 25 bp, Canis familiaris
ttattctctaaccaaacctcttaca

SEQ ID NO: 203189 - DNA, 25 bp, Canis familiaris
ttattgctgctatcttagacactaa

SEQ ID NO: 203190 - DNA, 25 bp, Canis familiaris
ttataactgagactgccatgatcct

SEQ ID NO: 203191 - DNA, 25 bp, Canis familiaris
ttacagaagcggtccattccgtacg

SEQ ID NO: 203192 - DNA, 25 bp, Canis familiaris
ttagactataggcccttcgtctcac

SEQ ID NO: 203193 - DNA, 25 bp, Canis familiaris
ttagtataagggattggctcacaca

SEQ ID NO: 203194 - DNA, 25 bp, Canis familiaris
ttatgtaccaggcactattccacac

SEQ ID NO: 203195 - DNA, 25 bp, Canis familiaris
ttattacctgagaagatctacccca

SEQ ID NO: 203196 - DNA, 25 bp, Canis familiaris
ttaaatagcatagagcccaccccac

SEQ ID NO: 203197 - DNA, 25 bp, Canis familiaris
ttaacaacatatgggcctctctttc

SEQ ID NO: 203198 - DNA, 25 bp, Canis familiaris
ttgaatgcacaagatacctcccttc

SEQ ID NO: 203199 - DNA, 25 bp, Canis familiaris
ttggctgcagaataaaacccatttc

SEQ ID NO: 203200 - DNA, 25 bp, Canis familiaris
ttatctagaatataacaccgcttct

SEQ ID NO: 203201 - DNA, 25 bp, Canis familiaris
ttgttcacaaaataacgctgtttaa

SEQ ID NO: 203202 - DNA, 25 bp, Canis familiaris
ttttccaacacattattgcccttta

SEQ ID NO: 203203 - DNA, 25 bp, Canis familiaris
ttttctccaaattattctgctcttt

SEQ ID NO: 203204 - DNA, 25 bp, Canis familiaris
ttttctccagaaaagtcttcagcaa

SEQ ID NO: 203205 - DNA, 25 bp, Canis familiaris
ttttcccacaataattcctacagca

SEQ ID NO: 203206 - DNA, 25 bp, Canis familiaris
ttttccaaatatattcatatccgca

SEQ ID NO: 203207 - DNA, 25 bp, Canis familiaris
ttgtccagagaatagtccttaccac

SEQ ID NO: 203208 - DNA, 25 bp, Canis familiaris
ttaccgaattaacccattaatgaca

SEQ ID NO: 203209 - DNA, 25 bp, Canis familiaris
ttaccaacttgacccctataatgag

SEQ ID NO: 203210 - DNA, 25 bp, Canis familiaris
ttactcaattctgtttctatatagc

SEQ ID NO: 203211 - DNA, 25 bp, Canis familiaris
ttttgcaattgctttttctatataa

SEQ ID NO: 203212 - DNA, 25 bp, Canis familiaris
ttttgcagctgcccttttgtaagaa

SEQ ID NO: 203213 - DNA, 25 bp, Canis familiaris
ttttctcccctctttgctaagagac

SEQ ID NO: 203214 - DNA, 25 bp, Canis familiaris
ttatcttcacccctattgtagagaa

SEQ ID NO: 203215 - DNA, 25 bp, Canis familiaris
ttaccacaccgacgttgtagcagct

SEQ ID NO: 203216 - DNA, 25 bp, Canis familiaris
ttatcccatcccaggagtcatgcag

SEQ ID NO: 203217 - DNA, 25 bp, Canis familiaris
ttacatgccattcctgggggctgct

SEQ ID NO: 203218 - DNA, 25 bp, Canis familiaris
ttgccggattcaatggggaattgga

SEQ ID NO: 203219 - DNA, 25 bp, Canis familiaris
ttatctggcatggaggtgggaactg

SEQ ID NO: 203220 - DNA, 25 bp, Canis familiaris
ttactactgaaagggagatactgcc

SEQ ID NO: 203221 - DNA, 25 bp, Canis familiaris
ttaaccaggcatagggagtacccca

SEQ ID NO: 203222 - DNA, 25 bp, Canis familiaris
ttacgccaagctgactttgaggccc

SEQ ID NO: 203223 - DNA, 25 bp, Canis familiaris
ttatgcccaactgtctaggtgtgcc

SEQ ID NO: 203224 - DNA, 25 bp, Canis familiaris
ttaggccaatgggcttacgtttcaa

SEQ ID NO: 203225 - DNA, 25 bp, Canis familiaris
ttaggccagggcttttaatttcaat

SEQ ID NO: 203226 - DNA, 25 bp, Canis familiaris
ttaaggccaggccttctaatttcaa

SEQ ID NO: 203227 - DNA, 25 bp, Canis familiaris
ttaggtccaggccattctcaaataa

SEQ ID NO: 203228 - DNA, 25 bp, Canis familiaris
ttatgccccaaaccctaaatgaagc

SEQ ID NO: 203229 - DNA, 25 bp, Canis familiaris
ttacaaccagaacccgagattccac

SEQ ID NO: 203230 - DNA, 25 bp, Canis familiaris
ttattactctgatacctcaactccc

SEQ ID NO: 203231 - DNA, 25 bp, Canis familiaris
ttattgtcctattaattaccctcct

SEQ ID NO: 203232 - DNA, 25 bp, Canis familiaris
ttttgactttcagcatttccactca

SEQ ID NO: 203233 - DNA, 25 bp, Canis familiaris
ttaatgaccttcacaggcccattca

SEQ ID NO: 203234 - DNA, 25 bp, Canis familiaris
ttatgaaccagtgtcagtcccattc

SEQ ID NO: 203235 - DNA, 25 bp, Canis familiaris
ttaaaccagtagtgtccccatgaag

SEQ ID NO: 203236 - DNA, 25 bp, Canis familiaris
ttaacccagtactttccgttcatga

SEQ ID NO: 203237 - DNA, 25 bp, Canis familiaris
ttgaaccccaattttgcctgtatct

SEQ ID NO: 203238 - DNA, 25 bp, Canis familiaris
ttacccccagtgaatacccgattgg

SEQ ID NO: 203239 - DNA, 25 bp, Canis familiaris
ttaatccccaggcataacgcttata

SEQ ID NO: 203240 - DNA, 25 bp, Canis familiaris
ttaatcctcacagagaccccattga

SEQ ID NO: 203241 - DNA, 25 bp, Canis familiaris
ttagcataccactaagatttctagg

SEQ ID NO: 203242 - DNA, 25 bp, Canis familiaris
ttgactgatccacaaacttgcagga

SEQ ID NO: 203243 - DNA, 25 bp, Canis familiaris
ttgcacagaccacctagcctaggtc

SEQ ID NO: 203244 - DNA, 25 bp, Canis familiaris
ttattactgcccttgccatgggtca

SEQ ID NO: 203245 - DNA, 25 bp, Canis familiaris
ttttgcattccgttgcagctgagcg

SEQ ID NO: 203246 - DNA, 25 bp, Canis familiaris
ttatccattgctcgttggctagcta

SEQ ID NO: 203247 - DNA, 25 bp, Canis familiaris
ttaccatggtgccttgcgcagagta

SEQ ID NO: 203248 - DNA, 25 bp, Canis familiaris
ttatccacggcactccgcgagctgt

SEQ ID NO: 203249 - DNA, 25 bp, Canis familiaris
ttatcccaggcactcacaatataga

SEQ ID NO: 203250 - DNA, 25 bp, Canis familiaris
ttgacgccgacggccacatcaagtt

SEQ ID NO: 203251 - DNA, 25 bp, Canis familiaris
ttcggcctgctcccgaattatttgg

SEQ ID NO: 203252 - DNA, 25 bp, Canis familiaris
ttgaggttgcccttgaactacttta

SEQ ID NO: 203253 - DNA, 25 bp, Canis familiaris
ttgaggttgccttggaactacttaa

SEQ ID NO: 203254 - DNA, 25 bp, Canis familiaris
ttaggttcgctataagtgccagtaa

SEQ ID NO: 203255 - DNA, 25 bp, Canis familiaris
ttaggcttcgcctttttgtcaataa

SEQ ID NO: 203256 - DNA, 25 bp, Canis familiaris
ttatgtcattcgtccaacttgaaaa

SEQ ID NO: 203257 - DNA, 25 bp, Canis familiaris
ttatatcttccaccaactctaggca

SEQ ID NO: 203258 - DNA, 25 bp, Canis familiaris
ttgatatacttcccaatggcctggc

SEQ ID NO: 203259 - DNA, 25 bp, Canis familiaris
ttcacaattacccaagtgcctgtcg

SEQ ID NO: 203260 - DNA, 25 bp, Canis familiaris
ttatatttagcgcaggctctctatt

SEQ ID NO: 203261 - DNA, 25 bp, Canis familiaris
ttatctctaagtccacgctatctat

SEQ ID NO: 203262 - DNA, 25 bp, Canis familiaris
ttatctcttagtcagctctttcaac

SEQ ID NO: 203263 - DNA, 25 bp, Canis familiaris
ttattttgaatctaggctcttactc

SEQ ID NO: 203264 - DNA, 25 bp, Canis familiaris
ttattttgcatatgggtgtgtggtg

SEQ ID NO: 203265 - DNA, 25 bp, Canis familiaris
ttatctcctctttgagggaatggaa

SEQ ID NO: 203266 - DNA, 25 bp, Canis familiaris
ttatgcccatcatgcagtggctgta

SEQ ID NO: 203267 - DNA, 25 bp, Canis familiaris
ttatccactcatcagctgatggaca

SEQ ID NO: 203268 - DNA, 25 bp, Canis familiaris
ttctcatcgctgttgacttgccaac

SEQ ID NO: 203269 - DNA, 25 bp, Canis familiaris
ttatatctcggtctgtccaactgtc

SEQ ID NO: 203270 - DNA, 25 bp, Canis familiaris
ttagattggagtcttcccttgtcct

SEQ ID NO: 203271 - DNA, 25 bp, Canis familiaris
ttagttgacagcagtacgcctgggc

SEQ ID NO: 203272 - DNA, 25 bp, Canis familiaris
ttaggctgtcagcagggggctgccc

SEQ ID NO: 203273 - DNA, 25 bp, Canis familiaris
ttatcctctcaggctgggggctgaa

SEQ ID NO: 203274 - DNA, 25 bp, Canis familiaris
ttagcctgtgcagtgcttgcggtta

SEQ ID NO: 203275 - DNA, 25 bp, Canis familiaris
ttagctcactcagtgctggcactgc

SEQ ID NO: 203276 - DNA, 25 bp, Canis familiaris
ttagctacgcagatgtcctgggctc

SEQ ID NO: 203277 - DNA, 25 bp, Canis familiaris
ttagctccgagcgtgatcctggagt

SEQ ID NO: 203278 - DNA, 25 bp, Canis familiaris
ttagcaccgcgcaattcacgggttc

SEQ ID NO: 203279 - DNA, 25 bp, Canis familiaris
ttaccaagcgtttccgggcataata

SEQ ID NO: 203280 - DNA, 25 bp, Canis familiaris
ttaccaagttgatccagtgtgtcct

SEQ ID NO: 203281 - DNA, 25 bp, Canis familiaris
ttcagaagagttaaccattgctggc

SEQ ID NO: 203282 - DNA, 25 bp, Canis familiaris
ttcgagaagtcgcgccttcgatcaa

SEQ ID NO: 203283 - DNA, 25 bp, Canis familiaris
ttcatgaggcgacaggtcttcaaat

SEQ ID NO: 203284 - DNA, 25 bp, Canis familiaris
ttcatgaggcgacaggtcttcaaat

SEQ ID NO: 203285 - DNA, 25 bp, Canis familiaris
ttatcaggcaccaggcactatcaac

SEQ ID NO: 203286 - DNA, 25 bp, Canis familiaris
ttatgcagtgcagtctgcctgacgc

SEQ ID NO: 203287 - DNA, 25 bp, Canis familiaris
ttagcttgcaatgacatgactccag

SEQ ID NO: 203288 - DNA, 25 bp, Canis familiaris
ttagcctctgaggagtcacatccgc

SEQ ID NO: 203289 - DNA, 25 bp, Canis familiaris
ttagccttgtcatgacagctgcgcc

SEQ ID NO: 203290 - DNA, 25 bp, Canis familiaris
ttaggctggctaaatcctcccaggt

SEQ ID NO: 203291 - DNA, 25 bp, Canis familiaris
ttatgagcgcctacgatgcgctccc

SEQ ID NO: 203292 - DNA, 25 bp, Canis familiaris
ttatagtcctacaacctgttctggc

SEQ ID NO: 203293 - DNA, 25 bp, Canis familiaris
ttatgattcaattcaccctctttgg

SEQ ID NO: 203294 - DNA, 25 bp, Canis familiaris
ttatcatttatcttcccgattcatt

SEQ ID NO: 203295 - DNA, 25 bp, Canis familiaris
ttacgtctacttgtccatgtcttat

SEQ ID NO: 203296 - DNA, 25 bp, Canis familiaris
ttacgtctacttgtccatgtcttat

SEQ ID NO: 203297 - DNA, 25 bp, Canis familiaris
ttacggatgaccatgttcagttcct

SEQ ID NO: 203298 - DNA, 25 bp, Canis familiaris
ttagccgggctcaagttcggtctca

SEQ ID NO: 203299 - DNA, 25 bp, Canis familiaris
ttagcacggtctccagactcggagc

SEQ ID NO: 203300 - DNA, 25 bp, Canis familiaris
ttagcagcgcggagagaggggtgaa

SEQ ID NO: 203301 - DNA, 25 bp, Canis familiaris
ttaagtgggcaatgggcgaagagca

SEQ ID NO: 203302 - DNA, 25 bp, Canis familiaris
ttatggctgtggcaaaggcaaaaga

SEQ ID NO: 203303 - DNA, 25 bp, Canis familiaris
ttacagcattggcaaatggtataat

SEQ ID NO: 203304 - DNA, 25 bp, Canis familiaris
ttacagcacttggcacaatggtata

SEQ ID NO: 203305 - DNA, 25 bp, Canis familiaris
ttatctgatcctgccaattggctaa

SEQ ID NO: 203306 - DNA, 25 bp, Canis familiaris
ttttgcttcatttcaatattctcaa

SEQ ID NO: 203307 - DNA, 25 bp, Canis familiaris
ttttgtgtactatatatgtcagaat

SEQ ID NO: 203308 - DNA, 25 bp, Canis familiaris
ttttgctttcttgataggagatctg

SEQ ID NO: 203309 - DNA, 25 bp, Canis familiaris
ttatgcatgagaactctaaaggagt

SEQ ID NO: 203310 - DNA, 25 bp, Canis familiaris
ttatatatattctgaagggaaccac

SEQ ID NO: 203311 - DNA, 25 bp, Canis familiaris
ttataatatttcccacagaaagccc

SEQ ID NO: 203312 - DNA, 25 bp, Canis familiaris
ttgaataatttccccagagagccct

SEQ ID NO: 203313 - DNA, 25 bp, Canis familiaris
ttatataatgctgaaggggaccact

SEQ ID NO: 203314 - DNA, 25 bp, Canis familiaris
ttactactgccttaggaggcccctg

SEQ ID NO: 203315 - DNA, 25 bp, Canis familiaris
ttagcaaccagccaaggagccatcc

SEQ ID NO: 203316 - DNA, 25 bp, Canis familiaris
ttatcaacatcatattcagcccatc

SEQ ID NO: 203317 - DNA, 25 bp, Canis familiaris
ttatctagcattgtatcaccctctt

SEQ ID NO: 203318 - DNA, 25 bp, Canis familiaris
ttttggatgctgctaagccctttct

SEQ ID NO: 203319 - DNA, 25 bp, Canis familiaris
ttctggaacggaagtgccctcagtc

SEQ ID NO: 203320 - DNA, 25 bp, Canis familiaris
ttttgtactatgaaggccctcacca

SEQ ID NO: 203321 - DNA, 25 bp, Canis familiaris
ttatgttacttttgtgcctccacaa

SEQ ID NO: 203322 - DNA, 25 bp, Canis familiaris
ttatttactttccatctgatatgca

SEQ ID NO: 203323 - DNA, 25 bp, Canis familiaris
ttacattacatttctgactttgaat

SEQ ID NO: 203324 - DNA, 25 bp, Canis familiaris
ttacattgccttttgtccattaatc

SEQ ID NO: 203325 - DNA, 25 bp, Canis familiaris
ttatgtggccatgtcttcactctaa

SEQ ID NO: 203326 - DNA, 25 bp, Canis familiaris
ttagtttcattgactctccctataa

SEQ ID NO: 203327 - DNA, 25 bp, Canis familiaris
ttatcaactcatttccttcgttcaa

SEQ ID NO: 203328 - DNA, 25 bp, Canis familiaris
ttatacagtcacacactttgtccca

SEQ ID NO: 203329 - DNA, 25 bp, Canis familiaris
ttatcaccaagcacctttttccata

SEQ ID NO: 203330 - DNA, 25 bp, Canis familiaris
ttcaccgaagttgcttttccactga

SEQ ID NO: 203331 - DNA, 25 bp, Canis familiaris
ttaccacaatttcccatttccaggt

SEQ ID NO: 203332 - DNA, 25 bp, Canis familiaris
ttaccacattttgaattcttcagtg

SEQ ID NO: 203333 - DNA, 25 bp, Canis familiaris
ttaccccgtcacgtgcattttaggg

SEQ ID NO: 203334 - DNA, 25 bp, Canis familiaris
ttatactccgtttgtcattttccta

SEQ ID NO: 203335 - DNA, 25 bp, Canis familiaris
ttatttcttacttttttgatactag

SEQ ID NO: 203336 - DNA, 25 bp, Canis familiaris
ttttgtttactttatcactaacaga

SEQ ID NO: 203337 - DNA, 25 bp, Canis familiaris
ttttgtattcatacatatacacaca

SEQ ID NO: 203338 - DNA, 25 bp, Canis familiaris
ttttgtgcagtcacttctcaatcca

SEQ ID NO: 203339 - DNA, 25 bp, Canis familiaris
ttattggctgtcacttccacaacaa

SEQ ID NO: 203340 - DNA, 25 bp, Canis familiaris
ttattgagcttcatcatgaccagaa

SEQ ID NO: 203341 - DNA, 25 bp, Canis familiaris
ttactgactttggtaccagttggcc

SEQ ID NO: 203342 - DNA, 25 bp, Canis familiaris
ttagggcttttgcccctgaatggct

SEQ ID NO: 203343 - DNA, 25 bp, Canis familiaris
ttaggtttttttcctgccaatgctg

SEQ ID NO: 203344 - DNA, 25 bp, Canis familiaris
ttaggcattctatctttgctcaaat

SEQ ID NO: 203345 - DNA, 25 bp, Canis familiaris
ttcgccttctctgcttaattcagta

SEQ ID NO: 203346 - DNA, 25 bp, Canis familiaris
ttagttttctccttaatgcctatca

SEQ ID NO: 203347 - DNA, 25 bp, Canis familiaris
ttagaaattctatttaagtcattaa

SEQ ID NO: 203348 - DNA, 25 bp, Canis familiaris
ttatgctacttttttccgatttgaa

SEQ ID NO: 203349 - DNA, 25 bp, Canis familiaris
ttcgctcagtttgttgggagcgtga

SEQ ID NO: 203350 - DNA, 25 bp, Canis familiaris
ttcactggttatgcggcggatccga

SEQ ID NO: 203351 - DNA, 25 bp, Canis familiaris
ttagtggcttctgcggagaccgaaa

SEQ ID NO: 203352 - DNA, 25 bp, Canis familiaris
ttttggttcctcctgtagaagaaag

SEQ ID NO: 203353 - DNA, 25 bp, Canis familiaris
ttttgagatctcttcacttacacac

SEQ ID NO: 203354 - DNA, 25 bp, Canis familiaris
ttataagacttatcctacagcccaa

SEQ ID NO: 203355 - DNA, 25 bp, Canis familiaris
ttattgaacctatctcctaccgaaa

SEQ ID NO: 203356 - DNA, 25 bp, Canis familiaris
ttattaacataatcctcgtccagaa

SEQ ID NO: 203357 - DNA, 25 bp, Canis familiaris
ttattcccatgacccgccgggcagc

SEQ ID NO: 203358 - DNA, 25 bp, Canis familiaris
ttcaacttcgtcccacctgggagaa

SEQ ID NO: 203359 - DNA, 25 bp, Canis familiaris
ttactttccccatccgtgagataat

SEQ ID NO: 203360 - DNA, 25 bp, Canis familiaris
ttattggtcccctccaggatataaa

SEQ ID NO: 203361 - DNA, 25 bp, Canis familiaris
ttatagtcccctgcctaggataaaa

SEQ ID NO: 203362 - DNA, 25 bp, Canis familiaris
ttatatgctcccgcaaccagagatg

SEQ ID NO: 203363 - DNA, 25 bp, Canis familiaris
ttatcagtaccagccagccaaggcc

SEQ ID NO: 203364 - DNA, 25 bp, Canis familiaris
ttatagaacttttccccaggactcg

SEQ ID NO: 203365 - DNA, 25 bp, Canis familiaris
ttataaatattccaccccgtggcca

SEQ ID NO: 203366 - DNA, 25 bp, Canis familiaris
ttagaaaattcgaagccccggcttg

SEQ ID NO: 203367 - DNA, 25 bp, Canis familiaris
ttagggagaacagagaccaccgcct

SEQ ID NO: 203368 - DNA, 25 bp, Canis familiaris
ttaggggaagccaagatctgaggac

SEQ ID NO: 203369 - DNA, 25 bp, Canis familiaris
ttaatgggagaccttgttggccaaa

SEQ ID NO: 203370 - DNA, 25 bp, Canis familiaris
ttaagtgggcccttttgaccacact

SEQ ID NO: 203371 - DNA, 25 bp, Canis familiaris
ttaaggagtgccctttactcgcaca

SEQ ID NO: 203372 - DNA, 25 bp, Canis familiaris
ttaacgaggatccattggagggcaa

SEQ ID NO: 203373 - DNA, 25 bp, Canis familiaris
ttaacatgaaggattgtggcaggaa

SEQ ID NO: 203374 - DNA, 25 bp, Canis familiaris
ttatagagaaagagtgtgcagtggt

SEQ ID NO: 203375 - DNA, 25 bp, Canis familiaris
ttttggaacactggctcggcatggt

SEQ ID NO: 203376 - DNA, 25 bp, Canis familiaris
ttttggagtcaccatcgtgtgcatg

SEQ ID NO: 203377 - DNA, 25 bp, Canis familiaris
ttttggcgcccacagtgatgatgtc

SEQ ID NO: 203378 - DNA, 25 bp, Canis familiaris
ttttggcctgtttgatgtatgtgtg

SEQ ID NO: 203379 - DNA, 25 bp, Canis familiaris
ttttggcctgtttgatgtatgtgtg

SEQ ID NO: 203380 - DNA, 25 bp, Canis familiaris
ttttggccttataatgctattcgca

SEQ ID NO: 203381 - DNA, 25 bp, Canis familiaris
ttttccctgtatattatgttcatgt

SEQ ID NO: 203382 - DNA, 25 bp, Canis familiaris
ttttcctgttgtgtttgttgctgta

SEQ ID NO: 203383 - DNA, 25 bp, Canis familiaris
ttttgttttgtgccttaaagtgtag

SEQ ID NO: 203384 - DNA, 25 bp, Canis familiaris
ttttgtgtttcttttaaattgaatg

SEQ ID NO: 203385 - DNA, 25 bp, Canis familiaris
ttttgtgtgttacgtttatctctca

SEQ ID NO: 203386 - DNA, 25 bp, Canis familiaris
ttacagtgtatttagttgtttccaa

SEQ ID NO: 203387 - DNA, 25 bp, Canis familiaris
ttaggcgtgttgtaaagcttgtcaa

SEQ ID NO: 203388 - DNA, 25 bp, Canis familiaris
ttatgtgatggagtgaaagatttct

SEQ ID NO: 203389 - DNA, 25 bp, Canis familiaris
ttatttgtgcaccatgaaacttgtt

SEQ ID NO: 203390 - DNA, 25 bp, Canis familiaris
ttatttctgcccccagacattgtga

SEQ ID NO: 203391 - DNA, 25 bp, Canis familiaris
ttttgacaccctgctgcacatggga

SEQ ID NO: 203392 - DNA, 25 bp, Canis familiaris
ttttgacaacttcatcagctgcctg

SEQ ID NO: 203393 - DNA, 25 bp, Canis familiaris
ttttgactactttcacactggctgc

SEQ ID NO: 203394 - DNA, 25 bp, Canis familiaris
ttttcctgtctttcatctcagggct

SEQ ID NO: 203395 - DNA, 25 bp, Canis familiaris
ttttgctctttttaccagctttctt

SEQ ID NO: 203396 - DNA, 25 bp, Canis familiaris
ttatgtcctcgtaacccagttagaa

SEQ ID NO: 203397 - DNA, 25 bp, Canis familiaris
ttattcctctttaatcccattatga

SEQ ID NO: 203398 - DNA, 25 bp, Canis familiaris
ttatacctttccaacacccatatat

SEQ ID NO: 203399 - DNA, 25 bp, Canis familiaris
ttatactctacatatgacaacctaa

SEQ ID NO: 203400 - DNA, 25 bp, Canis familiaris
ttataccattcaaagttctcctaga

SEQ ID NO: 203401 - DNA, 25 bp, Canis familiaris
ttatatcgcttcatgcagtccttct

SEQ ID NO: 203402 - DNA, 25 bp, Canis familiaris
ttatacagatatggactgcccttct

SEQ ID NO: 203403 - DNA, 25 bp, Canis familiaris
ttattcagacaacctgctgcctgtt

SEQ ID NO: 203404 - DNA, 25 bp, Canis familiaris
ttattcaaacacccatgcagttata

SEQ ID NO: 203405 - DNA, 25 bp, Canis familiaris
ttgttcaaaaggttgcaatgcctaa

SEQ ID NO: 203406 - DNA, 25 bp, Canis familiaris
ttttgccaaaaaatgcttgactcaa

SEQ ID NO: 203407 - DNA, 25 bp, Canis familiaris
ttctgttcaataaagttttactatg

SEQ ID NO: 203408 - DNA, 25 bp, Canis familiaris
ttatgcccaataaagtttgccatta

SEQ ID NO: 203409 - DNA, 25 bp, Canis familiaris
ttttccagcaaaagtttccttaatg

SEQ ID NO: 203410 - DNA, 25 bp, Canis familiaris
ttttcctgataaacattttcttgaa

SEQ ID NO: 203411 - DNA, 25 bp, Canis familiaris
ttttgccttaaatttccatatctga

SEQ ID NO: 203412 - DNA, 25 bp, Canis familiaris
ttttgcctttagtcagatcctcagc

SEQ ID NO: 203413 - DNA, 25 bp, Canis familiaris
ttttgcctcctcaagcagataccca

SEQ ID NO: 203414 - DNA, 25 bp, Canis familiaris
ttaggcagtcttgagcactacctcc

SEQ ID NO: 203415 - DNA, 25 bp, Canis familiaris
ttatgccccttgaaactaatcctgt

SEQ ID NO: 203416 - DNA, 25 bp, Canis familiaris
ttattcccttgctactttactgata

SEQ ID NO: 203417 - DNA, 25 bp, Canis familiaris
ttattaccccattcatctaaagtta

SEQ ID NO: 203418 - DNA, 25 bp, Canis familiaris
ttattaagccaaatctctaaagact

SEQ ID NO: 203419 - DNA, 25 bp, Canis familiaris
ttatgataagcgcattttccaagcc

SEQ ID NO: 203420 - DNA, 25 bp, Canis familiaris
ttatggatatctcattgctttcaga

SEQ ID NO: 203421 - DNA, 25 bp, Canis familiaris
ttcgtgagttacaacagtccagaaa

SEQ ID NO: 203422 - DNA, 25 bp, Canis familiaris
ttagtgacttgtagactgtggcaaa

SEQ ID NO: 203423 - DNA, 25 bp, Canis familiaris
ttagtgctctgtcctgggttgaata

SEQ ID NO: 203424 - DNA, 25 bp, Canis familiaris
ttaggatcttacaaagttgcagtta

SEQ ID NO: 203425 - DNA, 25 bp, Canis familiaris
ttagtgaccaccaaggtatggccat

SEQ ID NO: 203426 - DNA, 25 bp, Canis familiaris
ttcacgaccaacacttatggaatgt

SEQ ID NO: 203427 - DNA, 25 bp, Canis familiaris
ttacagaccattgccctatggacct

SEQ ID NO: 203428 - DNA, 25 bp, Canis familiaris
ttagaacatattccccttgtttctc

SEQ ID NO: 203429 - DNA, 25 bp, Canis familiaris
ttagatttctggccccttgattgga

SEQ ID NO: 203430 - DNA, 25 bp, Canis familiaris
ttagtgcaactggtgcccttgaagg

SEQ ID NO: 203431 - DNA, 25 bp, Canis familiaris
ttagtgcagatcgggcgctactggt

SEQ ID NO: 203432 - DNA, 25 bp, Canis familiaris
ttatgtgtgagcggccagtaggcag

SEQ ID NO: 203433 - DNA, 25 bp, Canis familiaris
ttttgtgggcagcagccagtaggct

SEQ ID NO: 203434 - DNA, 25 bp, Canis familiaris
ttttggtgccagtgccatggggcta

SEQ ID NO: 203435 - DNA, 25 bp, Canis familiaris
ttgttagggcagtactcgcaaagta

SEQ ID NO: 203436 - DNA, 25 bp, Canis familiaris
ttatattgggcagacctcaaaacac

SEQ ID NO: 203437 - DNA, 25 bp, Canis familiaris
ttatattgggatgacctgaagagaa

SEQ ID NO: 203438 - DNA, 25 bp, Canis familiaris
ttatgttatgtgtcttcctgtaaga

SEQ ID NO: 203439 - DNA, 25 bp, Canis familiaris
ttcagttggtgttaccgttcatgac

SEQ ID NO: 203440 - DNA, 25 bp, Canis familiaris
ttattagttggtccacgtcctgagc

SEQ ID NO: 203441 - DNA, 25 bp, Canis familiaris
ttattgatgatcgttccggtccggt

SEQ ID NO: 203442 - DNA, 25 bp, Canis familiaris
ttatagcatatcctgcatccttctc

SEQ ID NO: 203443 - DNA, 25 bp, Canis familiaris
ttatcgcatcagaagcatttttctt

SEQ ID NO: 203444 - DNA, 25 bp, Canis familiaris
ttttgctgcagacctctttgatgtt

SEQ ID NO: 203445 - DNA, 25 bp, Canis familiaris
ttttgcatcaggactttgtattgag

SEQ ID NO: 203446 - DNA, 25 bp, Canis familiaris
ttatgtgtgcattgactttgtacca

SEQ ID NO: 203447 - DNA, 25 bp, Canis familiaris
ttatgctgctcattgatcgttccac

SEQ ID NO: 203448 - DNA, 25 bp, Canis familiaris
ttattctagatctttctgccactta

SEQ ID NO: 203449 - DNA, 25 bp, Canis familiaris
ttatttacatacatcccctgtcatg

SEQ ID NO: 203450 - DNA, 25 bp, Canis familiaris
ttattgtgacattatacccctgctt

SEQ ID NO: 203451 - DNA, 25 bp, Canis familiaris
ttatatatacatatctcctcctgcc

SEQ ID NO: 203452 - DNA, 25 bp, Canis familiaris
ttatttaaaatctcttcctcctcag

SEQ ID NO: 203453 - DNA, 25 bp, Canis familiaris
ttatctccaaaagacattccacgta

SEQ ID NO: 203454 - DNA, 25 bp, Canis familiaris
ttcttcgggaacgcatttcatcgtg

SEQ ID NO: 203455 - DNA, 25 bp, Canis familiaris
ttctcttgggcctcaaattctcagg

SEQ ID NO: 203456 - DNA, 25 bp, Canis familiaris
ttactttcccagatgaatcccaggt

SEQ ID NO: 203457 - DNA, 25 bp, Canis familiaris
ttgaattacccaactaagttctggt

SEQ ID NO: 203458 - DNA, 25 bp, Canis familiaris
ttatttacccaaatgagcttttgtt

SEQ ID NO: 203459 - DNA, 25 bp, Canis familiaris
ttcaacccacgcacaagttttgtta

SEQ ID NO: 203460 - DNA, 25 bp, Canis familiaris
ttataaccatgccaacagtgtcttt

SEQ ID NO: 203461 - DNA, 25 bp, Canis familiaris
ttatcagacctgaacctgtcttcct

SEQ ID NO: 203462 - DNA, 25 bp, Canis familiaris
ttatcagacattccctggtgttcct

SEQ ID NO: 203463 - DNA, 25 bp, Canis familiaris
ttataatttagccagggtttctatt

SEQ ID NO: 203464 - DNA, 25 bp, Canis familiaris
ttattttctacagtggttttatact

SEQ ID NO: 203465 - DNA, 25 bp, Canis familiaris
ttattttgtccctgttggttcacca

SEQ ID NO: 203466 - DNA, 25 bp, Canis familiaris
ttcacatttttcaggttgggtatac

SEQ ID NO: 203467 - DNA, 25 bp, Canis familiaris
ttatgaagtttcaccttgcagggaa

SEQ ID NO: 203468 - DNA, 25 bp, Canis familiaris
ttatatactattcccaccatgggga

SEQ ID NO: 203469 - DNA, 25 bp, Canis familiaris
ttgattttattcgcaccattgcggt

SEQ ID NO: 203470 - DNA, 25 bp, Canis familiaris
ttaattcttacacactactcgagtt

SEQ ID NO: 203471 - DNA, 25 bp, Canis familiaris
ttacctttgccacagctaacgaatc

SEQ ID NO: 203472 - DNA, 25 bp, Canis familiaris
ttaccttcccaccaatacaaattag

SEQ ID NO: 203473 - DNA, 25 bp, Canis familiaris
ttacggagatcctaaaaacaaacag

SEQ ID NO: 203474 - DNA, 25 bp, Canis familiaris
ttacccaaggccaaacataaacacg

SEQ ID NO: 203475 - DNA, 25 bp, Canis familiaris
ttaccaactgggacgacatggagaa

SEQ ID NO: 203476 - DNA, 25 bp, Canis familiaris
ttacccactgggaccaactggcaaa

SEQ ID NO: 203477 - DNA, 25 bp, Canis familiaris
ttaccgcacgggcacaagttcaagt

SEQ ID NO: 203478 - DNA, 25 bp, Canis familiaris
ttaccgactgtgccatgacaaggaa

SEQ ID NO: 203479 - DNA, 25 bp, Canis familiaris
ttagttgactggcaaacaccaaact

SEQ ID NO: 203480 - DNA, 25 bp, Canis familiaris
ttgagtatgaatctgcaaattcgca

SEQ ID NO: 203481 - DNA, 25 bp, Canis familiaris
ttattgctgcaactggcaaacctgc

SEQ ID NO: 203482 - DNA, 25 bp, Canis familiaris
ttatgtccaaggccaaacttcaact

SEQ ID NO: 203483 - DNA, 25 bp, Canis familiaris
ttcagttaagtgcctaagattctat

SEQ ID NO: 203484 - DNA, 25 bp, Canis familiaris
ttataatgagaccctaatgtatgta

SEQ ID NO: 203485 - DNA, 25 bp, Canis familiaris
ttataatcagaccctcagagcaact

SEQ ID NO: 203486 - DNA, 25 bp, Canis familiaris
ttatgattaatgctgtccatgacat

SEQ ID NO: 203487 - DNA, 25 bp, Canis familiaris
ttatattgccatattcttgaattga

SEQ ID NO: 203488 - DNA, 25 bp, Canis familiaris
ttatcttggcatgtctctggccttt

SEQ ID NO: 203489 - DNA, 25 bp, Canis familiaris
ttatcgtcagatgtctctgctgctc

SEQ ID NO: 203490 - DNA, 25 bp, Canis familiaris
ttatcaggatgagcttctcgtgggc

SEQ ID NO: 203491 - DNA, 25 bp, Canis familiaris
ttttgtctgagcttttctctgggct

SEQ ID NO: 203492 - DNA, 25 bp, Canis familiaris
ttatttctactttgtcatgctggac

SEQ ID NO: 203493 - DNA, 25 bp, Canis familiaris
ttcatttgttttctctgggccagag

SEQ ID NO: 203494 - DNA, 25 bp, Canis familiaris
ttagggcattttctcgtgtgaatga

SEQ ID NO: 203495 - DNA, 25 bp, Canis familiaris
ttacggcttttaatgcgggagctgc

SEQ ID NO: 203496 - DNA, 25 bp, Canis familiaris
ttcaaggcttaatctcagggaccaa

SEQ ID NO: 203497 - DNA, 25 bp, Canis familiaris
ttaacgttaacctgcgtgaccattg

SEQ ID NO: 203498 - DNA, 25 bp, Canis familiaris
ttaactttccaaatcggtactcatt

SEQ ID NO: 203499 - DNA, 25 bp, Canis familiaris
ttaacttctgaatactgagctacaa

SEQ ID NO: 203500 - DNA, 25 bp, Canis familiaris
ttaacttctgaaatactattcattg

SEQ ID NO: 203501 - DNA, 25 bp, Canis familiaris
ttagatttttcttttgttcatgtgg

SEQ ID NO: 203502 - DNA, 25 bp, Canis familiaris
ttatgtttctattgcttttgtatgg

SEQ ID NO: 203503 - DNA, 25 bp, Canis familiaris
ttatgcactgtgtggctttgggtgg

SEQ ID NO: 203504 - DNA, 25 bp, Canis familiaris
ttagcagttgctcacatgtcttggg

SEQ ID NO: 203505 - DNA, 25 bp, Canis familiaris
ttgcggtttgaacttgcttggccgg

SEQ ID NO: 203506 - DNA, 25 bp, Canis familiaris
ttaggttttcacagctgctggcccg

SEQ ID NO: 203507 - DNA, 25 bp, Canis familiaris
ttaggtcttctcgtttgataggccc

SEQ ID NO: 203508 - DNA, 25 bp, Canis familiaris
ttatggctcttccgtggtatgtggc

SEQ ID NO: 203509 - DNA, 25 bp, Canis familiaris
ttatgtgtaccggtttgcatgtgcc

SEQ ID NO: 203510 - DNA, 25 bp, Canis familiaris
ttaggccagcaatgcttgtagtgct

SEQ ID NO: 203511 - DNA, 25 bp, Canis familiaris
ttacctcagcaattgtaggctttct

SEQ ID NO: 203512 - DNA, 25 bp, Canis familiaris
ttacgcacggatccatagccgtact

SEQ ID NO: 203513 - DNA, 25 bp, Canis familiaris
ttatccacgagaacttctcagcatc

SEQ ID NO: 203514 - DNA, 25 bp, Canis familiaris
ttaccacccagagtgctctgcacag

SEQ ID NO: 203515 - DNA, 25 bp, Canis familiaris
ttaccattcctgtagtcctcatatt

SEQ ID NO: 203516 - DNA, 25 bp, Canis familiaris
ttatcctacctgctgtggtgtttgt

SEQ ID NO: 203517 - DNA, 25 bp, Canis familiaris
ttaggctccttggtgtttgtttgct

SEQ ID NO: 203518 - DNA, 25 bp, Canis familiaris
ttagtgtccttgtgcagtgtgttcc

SEQ ID NO: 203519 - DNA, 25 bp, Canis familiaris
ttcagttcccgctcagtatgtttaa

SEQ ID NO: 203520 - DNA, 25 bp, Canis familiaris
ttatttcagggctcagattgtctct

SEQ ID NO: 203521 - DNA, 25 bp, Canis familiaris
ttatttggtgcctgcaacttccttt

SEQ ID NO: 203522 - DNA, 25 bp, Canis familiaris
ttttggtgtgcgtgacatttgccct

SEQ ID NO: 203523 - DNA, 25 bp, Canis familiaris
ttttgttttggttcttctgccactt

SEQ ID NO: 203524 - DNA, 25 bp, Canis familiaris
ttttgtttttgttcacatgttaact

SEQ ID NO: 203525 - DNA, 25 bp, Canis familiaris
ttttgttattttaccattctcacat

SEQ ID NO: 203526 - DNA, 25 bp, Canis familiaris
ttaacttttttcagtggccacattt

SEQ ID NO: 203527 - DNA, 25 bp, Canis familiaris
ttacctgaacttccacggcaggcac

SEQ ID NO: 203528 - DNA, 25 bp, Canis familiaris
ttattggaacttactcctgctggcc

SEQ ID NO: 203529 - DNA, 25 bp, Canis familiaris
ttttggacatttttctctgcttcct

SEQ ID NO: 203530 - DNA, 25 bp, Canis familiaris
ttttgtttttcattctgccttcaat

SEQ ID NO: 203531 - DNA, 25 bp, Canis familiaris
ttttgtttgtatcattccttcaaat

SEQ ID NO: 203532 - DNA, 25 bp, Canis familiaris
ttatttttttacaacacttagacat

SEQ ID NO: 203533 - DNA, 25 bp, Canis familiaris
ttattttcattctacagacctggaa

SEQ ID NO: 203534 - DNA, 25 bp, Canis familiaris
ttatttcctctcatatacacatgca

SEQ ID NO: 203535 - DNA, 25 bp, Canis familiaris
ttatatagctgcctcttatcaagat

SEQ ID NO: 203536 - DNA, 25 bp, Canis familiaris
ttataagcatcaccgctgtaagcga

SEQ ID NO: 203537 - DNA, 25 bp, Canis familiaris
ttagaaccagcccgtggacgattgg

SEQ ID NO: 203538 - DNA, 25 bp, Canis familiaris
ttaaaaaccttttgccatgtatgag

SEQ ID NO: 203539 - DNA, 25 bp, Canis familiaris
ttacgaactcctaggagcccttcgc

SEQ ID NO: 203540 - DNA, 25 bp, Canis familiaris
ttaagcagaatttgggactccttgg

SEQ ID NO: 203541 - DNA, 25 bp, Canis familiaris
ttatatcagtgtaatgggcccattt

SEQ ID NO: 203542 - DNA, 25 bp, Canis familiaris
ttatatatatgttacggcctcacgt

SEQ ID NO: 203543 - DNA, 25 bp, Canis familiaris
ttatgtaatgccttgtgccttccgt

SEQ ID NO: 203544 - DNA, 25 bp, Canis familiaris
ttattaatccagtgacttccctctt

SEQ ID NO: 203545 - DNA, 25 bp, Canis familiaris
ttatgtttccaggaaccccacttca

SEQ ID NO: 203546 - DNA, 25 bp, Canis familiaris
ttattttctgatgtcagcctctcct

SEQ ID NO: 203547 - DNA, 25 bp, Canis familiaris
ttattttttactttctatcctgaga

SEQ ID NO: 203548 - DNA, 25 bp, Canis familiaris
ttattatttttatcctactctcaca

SEQ ID NO: 203549 - DNA, 25 bp, Canis familiaris
ttacgtattttatcttatcttccaa

SEQ ID NO: 203550 - DNA, 25 bp, Canis familiaris
ttaagtagttaattctttctccaga

SEQ ID NO: 203551 - DNA, 25 bp, Canis familiaris
ttaggtactataatggtttccaaga

SEQ ID NO: 203552 - DNA, 25 bp, Canis familiaris
ttagctgcctcttaaggtgttatca

SEQ ID NO: 203553 - DNA, 25 bp, Canis familiaris
ttatgctgttcttctggattgttta

SEQ ID NO: 203554 - DNA, 25 bp, Canis familiaris
ttatgcatttcctttcatctgtttc

SEQ ID NO: 203555 - DNA, 25 bp, Canis familiaris
ttatgtatgtatgtatcttctttcc

SEQ ID NO: 203556 - DNA, 25 bp, Canis familiaris
ttatgtgactttcttgtgtttccct

SEQ ID NO: 203557 - DNA, 25 bp, Canis familiaris
ttaagagttacctgggttgccaagc

SEQ ID NO: 203558 - DNA, 25 bp, Canis familiaris
ttaacagcttacatagggctccccc

SEQ ID NO: 203559 - DNA, 25 bp, Canis familiaris
ttcaacactaaaaaagccccgcctg

SEQ ID NO: 203560 - DNA, 25 bp, Canis familiaris
ttcaaaagccaaataacccctcctg

SEQ ID NO: 203561 - DNA, 25 bp, Canis familiaris
ttataaaacaaatatctctcccttt

SEQ ID NO: 203562 - DNA, 25 bp, Canis familiaris
ttattcaagaaccataccttccttc

SEQ ID NO: 203563 - DNA, 25 bp, Canis familiaris
ttatgttattcagtatccctaccct

SEQ ID NO: 203564 - DNA, 25 bp, Canis familiaris
ttatgttcaaatgatgcctctgccc

SEQ ID NO: 203565 - DNA, 25 bp, Canis familiaris
ttattgtagaacgaccacagcccct

SEQ ID NO: 203566 - DNA, 25 bp, Canis familiaris
ttatggtcagtcttcccatacaccc

SEQ ID NO: 203567 - DNA, 25 bp, Canis familiaris
ttatgttcatgtttactgtaactac

SEQ ID NO: 203568 - DNA, 25 bp, Canis familiaris
ttatttatatcttacattagccttc

SEQ ID NO: 203569 - DNA, 25 bp, Canis familiaris
ttaggttatctctctttgcaatggc

SEQ ID NO: 203570 - DNA, 25 bp, Canis familiaris
ttaaatctttcagcttccaatgccg

SEQ ID NO: 203571 - DNA, 25 bp, Canis familiaris
ttgaacaatggagccttccaaggga

SEQ ID NO: 203572 - DNA, 25 bp, Canis familiaris
ttgaaaatggagcccttccaaggga

SEQ ID NO: 203573 - DNA, 25 bp, Canis familiaris
ttgaaaaggccggcccacaggaaag

SEQ ID NO: 203574 - DNA, 25 bp, Canis familiaris
ttaattgggcctgccaatattgtaa

SEQ ID NO: 203575 - DNA, 25 bp, Canis familiaris
ttatctgggtggtcccaactggcta

SEQ ID NO: 203576 - DNA, 25 bp, Canis familiaris
ttatctggggtgtcccaatctggct

SEQ ID NO: 203577 - DNA, 25 bp, Canis familiaris
ttttggtgggcatcgttctgtgtcc

SEQ ID NO: 203578 - DNA, 25 bp, Canis familiaris
ttttgtgtgggccttggtgctattc

SEQ ID NO: 203579 - DNA, 25 bp, Canis familiaris
ttctcttgggggactgcgatttaag

SEQ ID NO: 203580 - DNA, 25 bp, Canis familiaris
ttcacttgggttacctgcgttaaag

SEQ ID NO: 203581 - DNA, 25 bp, Canis familiaris
ttatttggtgtgtatagcggtttaa

SEQ ID NO: 203582 - DNA, 25 bp, Canis familiaris
ttctttggctttgatgacggtgtaa

SEQ ID NO: 203583 - DNA, 25 bp, Canis familiaris
ttttggtctttgtttctggttatag

SEQ ID NO: 203584 - DNA, 25 bp, Canis familiaris
ttattgcctttttattcaagcttaa

SEQ ID NO: 203585 - DNA, 25 bp, Canis familiaris
ttatggcacttaattatctcggtta

SEQ ID NO: 203586 - DNA, 25 bp, Canis familiaris
ttatgagactcttgattccctgggt

SEQ ID NO: 203587 - DNA, 25 bp, Canis familiaris
ttatctgacctgttactcaagtcgt

SEQ ID NO: 203588 - DNA, 25 bp, Canis familiaris
ttagatgtccggggctgcacgcgcg

SEQ ID NO: 203589 - DNA, 25 bp, Canis familiaris
ttagagtgctcacttactacctctg

SEQ ID NO: 203590 - DNA, 25 bp, Canis familiaris
ttacagctcctggtattactgcctg

SEQ ID NO: 203591 - DNA, 25 bp, Canis familiaris
ttatctgcacaagtgtttcaacctg

SEQ ID NO: 203592 - DNA, 25 bp, Canis familiaris
ttacgaatccgtatcagatcgctgg

SEQ ID NO: 203593 - DNA, 25 bp, Canis familiaris
ttaagcgtccagttcttgacctcag

SEQ ID NO: 203594 - DNA, 25 bp, Canis familiaris
ttaaggccaactgcattgactccac

SEQ ID NO: 203595 - DNA, 25 bp, Canis familiaris
ttacacgtaattattggctctacat

SEQ ID NO: 203596 - DNA, 25 bp, Canis familiaris
ttatcatttatatatcttcctcaat

SEQ ID NO: 203597 - DNA, 25 bp, Canis familiaris
ttatctaattaacttcatctctcat

SEQ ID NO: 203598 - DNA, 25 bp, Canis familiaris
ttattggactgaactctctgcgcca

SEQ ID NO: 203599 - DNA, 25 bp, Canis familiaris
ttatattgaatattctcattgccaa

SEQ ID NO: 203600 - DNA, 25 bp, Canis familiaris
ttatatctcaagtatgccattccag

SEQ ID NO: 203601 - DNA, 25 bp, Canis familiaris
ttatttcaaggacatcttcagcttc

SEQ ID NO: 203602 - DNA, 25 bp, Canis familiaris
ttatttatactgttgctcttagctt

SEQ ID NO: 203603 - DNA, 25 bp, Canis familiaris
ttattgaataatttccccagagagc

SEQ ID NO: 203604 - DNA, 25 bp, Canis familiaris
ttatgtagttaattgacccagaaga

SEQ ID NO: 203605 - DNA, 25 bp, Canis familiaris
ttaccagttacatcaggcctgaacc

SEQ ID NO: 203606 - DNA, 25 bp, Canis familiaris
ttagtcgattatgaaccccaaccgg

SEQ ID NO: 203607 - DNA, 25 bp, Canis familiaris
ttaatcagattcaaaacccgacccg

SEQ ID NO: 203608 - DNA, 25 bp, Canis familiaris
ttatctacattatagactcccccca

SEQ ID NO: 203609 - DNA, 25 bp, Canis familiaris
ttatacacttatttatgtcccgccc

SEQ ID NO: 203610 - DNA, 25 bp, Canis familiaris
ttatacactttgtaagattgacgcc

SEQ ID NO: 203611 - DNA, 25 bp, Canis familiaris
ttatacctcttaaaaatgcagcatg

SEQ ID NO: 203612 - DNA, 25 bp, Canis familiaris
ttatagtccttaaacgttgctgaac

SEQ ID NO: 203613 - DNA, 25 bp, Canis familiaris
ttatcatgttttttcccttgtacca

SEQ ID NO: 203614 - DNA, 25 bp, Canis familiaris
ttatcacttgtaccatccacttgtg

SEQ ID NO: 203615 - DNA, 25 bp, Canis familiaris
ttacatctagtacccaacattgaca

SEQ ID NO: 203616 - DNA, 25 bp, Canis familiaris
ttacatccaaaccaatactagccat

SEQ ID NO: 203617 - DNA, 25 bp, Canis familiaris
ttaatcccaaccatactacatcaac

SEQ ID NO: 203618 - DNA, 25 bp, Canis familiaris
ttatctgccccagagacactaccaa

SEQ ID NO: 203619 - DNA, 25 bp, Canis familiaris
ttacccccaagaacaatttcacacg

SEQ ID NO: 203620 - DNA, 25 bp, Canis familiaris
ttatctccactattactaaattcaa

SEQ ID NO: 203621 - DNA, 25 bp, Canis familiaris
ttatcctactctcacaaatgtcatc

SEQ ID NO: 203622 - DNA, 25 bp, Canis familiaris
ttaccttctttgccaatcatgactt

SEQ ID NO: 203623 - DNA, 25 bp, Canis familiaris
ttatcgtcctctaacaccatatgtt

SEQ ID NO: 203624 - DNA, 25 bp, Canis familiaris
ttatttgcttctaaaacacagtttt

SEQ ID NO: 203625 - DNA, 25 bp, Canis familiaris
ttcgctcggtttcagcaacgtttgt

SEQ ID NO: 203626 - DNA, 25 bp, Canis familiaris
ttggggacttctgagcacacgtccg

SEQ ID NO: 203627 - DNA, 25 bp, Canis familiaris
ttagggacactaaaggacagtttga

SEQ ID NO: 203628 - DNA, 25 bp, Canis familiaris
ttaggggcactatggacagagttgt

SEQ ID NO: 203629 - DNA, 25 bp, Canis familiaris
ttacaagccgcaaaggcagcaggct

SEQ ID NO: 203630 - DNA, 25 bp, Canis familiaris
ttcaatcagcaccacgaggacagcg

SEQ ID NO: 203631 - DNA, 25 bp, Canis familiaris
ttatatccctcccagaagatgcttc

SEQ ID NO: 203632 - DNA, 25 bp, Canis familiaris
ttatacctccacagatgcagactcc

SEQ ID NO: 203633 - DNA, 25 bp, Canis familiaris
ttatgcacgatctctcctgcatact

SEQ ID NO: 203634 - DNA, 25 bp, Canis familiaris
ttatgacatgtcagccactcaaatg

SEQ ID NO: 203635 - DNA, 25 bp, Canis familiaris
ttatccataaaccctaagcatctta

SEQ ID NO: 203636 - DNA, 25 bp, Canis familiaris
ttattcaataaccctacatcaccaa

SEQ ID NO: 203637 - DNA, 25 bp, Canis familiaris
ttatcttctgaaacgtacacctcaa

SEQ ID NO: 203638 - DNA, 25 bp, Canis familiaris
ttattttgcaatcctgggccagcta

SEQ ID NO: 203639 - DNA, 25 bp, Canis familiaris
ttattagtcataactgtagcaacaa

SEQ ID NO: 203640 - DNA, 25 bp, Canis familiaris
ttttggtctttttgatgcatcctaa

SEQ ID NO: 203641 - DNA, 25 bp, Canis familiaris
ttattggcattttctttctcctaaa

SEQ ID NO: 203642 - DNA, 25 bp, Canis familiaris
ttatggctgcatttttgtcttgctt

SEQ ID NO: 203643 - DNA, 25 bp, Canis familiaris
ttattctctgtgtatgtgtacgctt

SEQ ID NO: 203644 - DNA, 25 bp, Canis familiaris
ttatctctgttggtctgctgaccct

SEQ ID NO: 203645 - DNA, 25 bp, Canis familiaris
ttatctctggcttggtttccacata

SEQ ID NO: 203646 - DNA, 25 bp, Canis familiaris
ttagcctggctgtggtctgggcata

SEQ ID NO: 203647 - DNA, 25 bp, Canis familiaris
ttatggccctggttagctggagcat

SEQ ID NO: 203648 - DNA, 25 bp, Canis familiaris
ttagcccctggctatcttggaaagc

SEQ ID NO: 203649 - DNA, 25 bp, Canis familiaris
ttagtgcccggctggtggcagtgac

SEQ ID NO: 203650 - DNA, 25 bp, Canis familiaris
ttagtgatccggtgtctggagctga

SEQ ID NO: 203651 - DNA, 25 bp, Canis familiaris
ttagactctttgtgttgggagcaga

SEQ ID NO: 203652 - DNA, 25 bp, Canis familiaris
ttatcacgctttcattttcagagga

SEQ ID NO: 203653 - DNA, 25 bp, Canis familiaris
ttaccctcttcctattccaggaaag

SEQ ID NO: 203654 - DNA, 25 bp, Canis familiaris
ttacccttctcatagctccagggac

SEQ ID NO: 203655 - DNA, 25 bp, Canis familiaris
ttacctcttcccaaatctcaggttt

SEQ ID NO: 203656 - DNA, 25 bp, Canis familiaris
ttatcctgattcccagattccacgt

SEQ ID NO: 203657 - DNA, 25 bp, Canis familiaris
ttatcacaattctgcagacctcgag

SEQ ID NO: 203658 - DNA, 25 bp, Canis familiaris
ttatcaccatctttggaacacgaag

SEQ ID NO: 203659 - DNA, 25 bp, Canis familiaris
ttagcgccagtgtagaatgtcacga

SEQ ID NO: 203660 - DNA, 25 bp, Canis familiaris
ttatcccactgctattattagacac

SEQ ID NO: 203661 - DNA, 25 bp, Canis familiaris
ttacctcagctcctttaaaatgcat

SEQ ID NO: 203662 - DNA, 25 bp, Canis familiaris
ttatacaacctcttctcgattatga

SEQ ID NO: 203663 - DNA, 25 bp, Canis familiaris
ttataaagtcacaatcccatccatg

SEQ ID NO: 203664 - DNA, 25 bp, Canis familiaris
ttagaaggtatattcgccaccatat

SEQ ID NO: 203665 - DNA, 25 bp, Canis familiaris
ttcgatgggccatacctaacaagaa

SEQ ID NO: 203666 - DNA, 25 bp, Canis familiaris
ttagtcaggccatagctttccaagc

SEQ ID NO: 203667 - DNA, 25 bp, Canis familiaris
ttagccaggcttctagtttcatacc

SEQ ID NO: 203668 - DNA, 25 bp, Canis familiaris
ttatgccatggtattagtagagtcc

SEQ ID NO: 203669 - DNA, 25 bp, Canis familiaris
ttaggattgtcaattcagctaagct

SEQ ID NO: 203670 - DNA, 25 bp, Canis familiaris
ttgaacatggcattgttaccaactg

SEQ ID NO: 203671 - DNA, 25 bp, Canis familiaris
ttagactgcatgttcttccacaatc

SEQ ID NO: 203672 - DNA, 25 bp, Canis familiaris
ttatatgtgatagtctgtcctccct

SEQ ID NO: 203673 - DNA, 25 bp, Canis familiaris
ttatattgtggccttcatgtccctt

SEQ ID NO: 203674 - DNA, 25 bp, Canis familiaris
ttatcctgtagccattatcccaatt

SEQ ID NO: 203675 - DNA, 25 bp, Canis familiaris
ttattctgtcaaatgctatttccat

SEQ ID NO: 203676 - DNA, 25 bp, Canis familiaris
ttatcaggccagaagttttctctgt

SEQ ID NO: 203677 - DNA, 25 bp, Canis familiaris
ttatatgagcccaagccattcctgt

SEQ ID NO: 203678 - DNA, 25 bp, Canis familiaris
ttagatgagcctacgaacctctgct

SEQ ID NO: 203679 - DNA, 25 bp, Canis familiaris
ttatgtgcacctttgtaactgtccg

SEQ ID NO: 203680 - DNA, 25 bp, Canis familiaris
ttatggaactgctgagccactgtcc

SEQ ID NO: 203681 - DNA, 25 bp, Canis familiaris
ttatgcgaatgtcacaggcagcccc

SEQ ID NO: 203682 - DNA, 25 bp, Canis familiaris
ttagctaagtctgttgaggcctgca

SEQ ID NO: 203683 - DNA, 25 bp, Canis familiaris
ttagctaaatgtggtctttgccgac

SEQ ID NO: 203684 - DNA, 25 bp, Canis familiaris
ttagctcccagcagcttctagagac

SEQ ID NO: 203685 - DNA, 25 bp, Canis familiaris
ttacccccttattgttcagaatacg

SEQ ID NO: 203686 - DNA, 25 bp, Canis familiaris
ttcagaacccttcaatccagacaac

SEQ ID NO: 203687 - DNA, 25 bp, Canis familiaris
ttataccccttgtagcacgagacac

SEQ ID NO: 203688 - DNA, 25 bp, Canis familiaris
ttaccaaccgtgaagcacaagaccg

SEQ ID NO: 203689 - DNA, 25 bp, Canis familiaris
ttaccagcgcgcctggaacagggag

SEQ ID NO: 203690 - DNA, 25 bp, Canis familiaris
ttaccgctggccgacaggaggccga

SEQ ID NO: 203691 - DNA, 25 bp, Canis familiaris
ttacgccccggaaggaggcacgcta

SEQ ID NO: 203692 - DNA, 25 bp, Canis familiaris
ttacatcgccctgaacgaggacctg

SEQ ID NO: 203693 - DNA, 25 bp, Canis familiaris
ttagcagagccaacaaaggggtccg

SEQ ID NO: 203694 - DNA, 25 bp, Canis familiaris
ttcaagtggagacaaagtagttcta

SEQ ID NO: 203695 - DNA, 25 bp, Canis familiaris
ttctcagtgggacaaagcaacccta

SEQ ID NO: 203696 - DNA, 25 bp, Canis familiaris
ttcctggtatgacaatgaatacggc

SEQ ID NO: 203697 - DNA, 25 bp, Canis familiaris
ttccatcatgtttccaagtaaaggc

SEQ ID NO: 203698 - DNA, 25 bp, Canis familiaris
ttaattgtttggaactaaaccatgt

SEQ ID NO: 203699 - DNA, 25 bp, Canis familiaris
ttaattgttttgccttggacctctg

SEQ ID NO: 203700 - DNA, 25 bp, Canis familiaris
ttaattattttctttgagggtctga

SEQ ID NO: 203701 - DNA, 25 bp, Canis familiaris
ttaagtatttttgaaagaacagaca

SEQ ID NO: 203702 - DNA, 25 bp, Canis familiaris
ttaactttcttccaccacagaactt

SEQ ID NO: 203703 - DNA, 25 bp, Canis familiaris
ttcaatttccttgggcccatcagaa

SEQ ID NO: 203704 - DNA, 25 bp, Canis familiaris
ttatatttcccctagccaacagaat

SEQ ID NO: 203705 - DNA, 25 bp, Canis familiaris
ttatatttcccttagaccagatctt

SEQ ID NO: 203706 - DNA, 25 bp, Canis familiaris
ttatttttcctctacaatcaatgtg

SEQ ID NO: 203707 - DNA, 25 bp, Canis familiaris
ttatctgctttccctccaataaaat

SEQ ID NO: 203708 - DNA, 25 bp, Canis familiaris
ttatctgcctgtctcttttcaaaaa

SEQ ID NO: 203709 - DNA, 25 bp, Canis familiaris
ttatctcctgacatcatggaccaca

SEQ ID NO: 203710 - DNA, 25 bp, Canis familiaris
ttatatccagctacagcggaccacc

SEQ ID NO: 203711 - DNA, 25 bp, Canis familiaris
ttattccagatcatttactctcctc

SEQ ID NO: 203712 - DNA, 25 bp, Canis familiaris
ttataccaagtatttaccacactaa

SEQ ID NO: 203713 - DNA, 25 bp, Canis familiaris
ttaacgaagcactatttccactaat

SEQ ID NO: 203714 - DNA, 25 bp, Canis familiaris
ttaacggtcaacacttccttcagta

SEQ ID NO: 203715 - DNA, 25 bp, Canis familiaris
ttaacagttaacacctcctgtctaa

SEQ ID NO: 203716 - DNA, 25 bp, Canis familiaris
ttaactgactgagctacttcggtgc

SEQ ID NO: 203717 - DNA, 25 bp, Canis familiaris
ttaattgactgacatggcttcccac

SEQ ID NO: 203718 - DNA, 25 bp, Canis familiaris
ttgtttgattgggatccttccctcc

SEQ ID NO: 203719 - DNA, 25 bp, Canis familiaris
ttgttgatttgggactctgaccccc

SEQ ID NO: 203720 - DNA, 25 bp, Canis familiaris
ttgaagttctgggcaccagtccacc

SEQ ID NO: 203721 - DNA, 25 bp, Canis familiaris
ttatcagttcatctgcccagactca

SEQ ID NO: 203722 - DNA, 25 bp, Canis familiaris
ttatagtggctggtgccatctgcct

SEQ ID NO: 203723 - DNA, 25 bp, Canis familiaris
ttatgggtgctgagcttcgccatgt

SEQ ID NO: 203724 - DNA, 25 bp, Canis familiaris
ttagcgactgcgacgttcgatcttg

SEQ ID NO: 203725 - DNA, 25 bp, Canis familiaris
ttactcagcgtgatgctctcagcat

SEQ ID NO: 203726 - DNA, 25 bp, Canis familiaris
ttatcaacatttactctaatccctt

SEQ ID NO: 203727 - DNA, 25 bp, Canis familiaris
ttatctatatttctattacgcctat

SEQ ID NO: 203728 - DNA, 25 bp, Canis familiaris
ttattatttttttctccagacttat

SEQ ID NO: 203729 - DNA, 25 bp, Canis familiaris
ttgtaaacttcttgttaagactgtt

SEQ ID NO: 203730 - DNA, 25 bp, Canis familiaris
ttataaacttttcattagatttctt

SEQ ID NO: 203731 - DNA, 25 bp, Canis familiaris
ttataaacttttcctttcatctgcc

SEQ ID NO: 203732 - DNA, 25 bp, Canis familiaris
ttataaactatttctttcctctcct

SEQ ID NO: 203733 - DNA, 25 bp, Canis familiaris
ttaaacctcatcaattttccttgcc

SEQ ID NO: 203734 - DNA, 25 bp, Canis familiaris
ttaccacactcaacagtttaccagc

SEQ ID NO: 203735 - DNA, 25 bp, Canis familiaris
ttagcacacggacctgtttcctaca

SEQ ID NO: 203736 - DNA, 25 bp, Canis familiaris
ttggaagtgggggtctcccatacct

SEQ ID NO: 203737 - DNA, 25 bp, Canis familiaris
ttagaagggtgggttcgcctcttgc

SEQ ID NO: 203738 - DNA, 25 bp, Canis familiaris
ttctcggtggggattctccttatcc

SEQ ID NO: 203739 - DNA, 25 bp, Canis familiaris
ttatcgtgttttaattgccctttgc

SEQ ID NO: 203740 - DNA, 25 bp, Canis familiaris
ttattatctatttgttctccctttc

SEQ ID NO: 203741 - DNA, 25 bp, Canis familiaris
ttaatatctgacatttcccccagtg

SEQ ID NO: 203742 - DNA, 25 bp, Canis familiaris
ttaataaaccgtggcccccagatga

SEQ ID NO: 203743 - DNA, 25 bp, Canis familiaris
ttaaaacccctcatcccaatagatt

SEQ ID NO: 203744 - DNA, 25 bp, Canis familiaris
ttagaatagcccatatgtaccaaaa

SEQ ID NO: 203745 - DNA, 25 bp, Canis familiaris
ttaggaaccgttacttacagagcaa

SEQ ID NO: 203746 - DNA, 25 bp, Canis familiaris
ttagtgaaccgtcagatcgcctgga

SEQ ID NO: 203747 - DNA, 25 bp, Canis familiaris
ttcagctaacgcttccagaccgcgg

SEQ ID NO: 203748 - DNA, 25 bp, Canis familiaris
ttcacacaacctgccaacctagttg

SEQ ID NO: 203749 - DNA, 25 bp, Canis familiaris
ttacacaaggcagctgtaccggtcc

SEQ ID NO: 203750 - DNA, 25 bp, Canis familiaris
ttacttcaggacgttcgccaggatc

SEQ ID NO: 203751 - DNA, 25 bp, Canis familiaris
ttagattcggtcgttctggaaaaga

SEQ ID NO: 203752 - DNA, 25 bp, Canis familiaris
ttagaccttgtcgctcggagaaacc

SEQ ID NO: 203753 - DNA, 25 bp, Canis familiaris
ttaagtttctccactggggcaactc

SEQ ID NO: 203754 - DNA, 25 bp, Canis familiaris
ttaactttttatgctggggcagccc

SEQ ID NO: 203755 - DNA, 25 bp, Canis familiaris
ttaacatttgtcaatgaacatgggg

SEQ ID NO: 203756 - DNA, 25 bp, Canis familiaris
ttaacatttgtcaatgaacatgggg

SEQ ID NO: 203757 - DNA, 25 bp, Canis familiaris
ttgaaggatctggcttaagggagga

SEQ ID NO: 203758 - DNA, 25 bp, Canis familiaris
ttgcaagcgtgcttttcgggggcga

SEQ ID NO: 203759 - DNA, 25 bp, Canis familiaris
ttgaggcggattcttcctggggaag

SEQ ID NO: 203760 - DNA, 25 bp, Canis familiaris
ttaaaggcatctgcttccgggagga

SEQ ID NO: 203761 - DNA, 25 bp, Canis familiaris
ttcatccggcacgactttttggtcg

SEQ ID NO: 203762 - DNA, 25 bp, Canis familiaris
ttatccctctgctactgattttggt

SEQ ID NO: 203763 - DNA, 25 bp, Canis familiaris
ttcatccagtcctactttgtgtctg

SEQ ID NO: 203764 - DNA, 25 bp, Canis familiaris
ttatccaacctaatgcttatgtaga

SEQ ID NO: 203765 - DNA, 25 bp, Canis familiaris
ttatgcactgcaggctttttattaa

SEQ ID NO: 203766 - DNA, 25 bp, Canis familiaris
ttagagcatcaggcagttcgaattg

SEQ ID NO: 203767 - DNA, 25 bp, Canis familiaris
ttaggacagtcattcttaattttaa

SEQ ID NO: 203768 - DNA, 25 bp, Canis familiaris
ttatgtatattctatctatggattt

SEQ ID NO: 203769 - DNA, 25 bp, Canis familiaris
ttagttatcttagtagtttcatgct

SEQ ID NO: 203770 - DNA, 25 bp, Canis familiaris
ttagttgacttacctgaatgccctg

SEQ ID NO: 203771 - DNA, 25 bp, Canis familiaris
ttagatctacgtcacataaccctgg

SEQ ID NO: 203772 - DNA, 25 bp, Canis familiaris
ttagatcatacctgcaataccctct

SEQ ID NO: 203773 - DNA, 25 bp, Canis familiaris
ttcagatcagacgagtggcaaacct

SEQ ID NO: 203774 - DNA, 25 bp, Canis familiaris
ttactcaagtagccagaaacctccc

SEQ ID NO: 203775 - DNA, 25 bp, Canis familiaris
ttaccaagtagcccaaatccaaata

SEQ ID NO: 203776 - DNA, 25 bp, Canis familiaris
ttagccacaatagccaaactataga

SEQ ID NO: 203777 - DNA, 25 bp, Canis familiaris
ttcatccacacaacaccaggactta

SEQ ID NO: 203778 - DNA, 25 bp, Canis familiaris
ttacatccacaactgccagcaagct

SEQ ID NO: 203779 - DNA, 25 bp, Canis familiaris
ttatctccaaagacatccagacaga

SEQ ID NO: 203780 - DNA, 25 bp, Canis familiaris
ttatcccaggaaaccagcactcagt

SEQ ID NO: 203781 - DNA, 25 bp, Canis familiaris
ttgtcccggcaagcgccgatgagat

SEQ ID NO: 203782 - DNA, 25 bp, Canis familiaris
ttgatccggggaccccggcatcatc

SEQ ID NO: 203783 - DNA, 25 bp, Canis familiaris
ttgtcggggaaccccagctacaggg

SEQ ID NO: 203784 - DNA, 25 bp, Canis familiaris
ttcccagggaaccccaggacaactg

SEQ ID NO: 203785 - DNA, 25 bp, Canis familiaris
ttacctggcggatcctgccaaattt

SEQ ID NO: 203786 - DNA, 25 bp, Canis familiaris
ttatcctgtcctactttgcacaaat

SEQ ID NO: 203787 - DNA, 25 bp, Canis familiaris
ttatccagtcctttgttcacactat

SEQ ID NO: 203788 - DNA, 25 bp, Canis familiaris
ttacagccgccttatttacatcttt

SEQ ID NO: 203789 - DNA, 25 bp, Canis familiaris
ttagcagtcttcttactttcatctc

SEQ ID NO: 203790 - DNA, 25 bp, Canis familiaris
ttacggtactaactgatgtcatgca

SEQ ID NO: 203791 - DNA, 25 bp, Canis familiaris
ttacggatgtaattctgtgtatctt

SEQ ID NO: 203792 - DNA, 25 bp, Canis familiaris
ttagggattctatttccattttatt

SEQ ID NO: 203793 - DNA, 25 bp, Canis familiaris
ttagcggtaaatccttattttgagt

SEQ ID NO: 203794 - DNA, 25 bp, Canis familiaris
ttcggattaagtccttttatcgtat

SEQ ID NO: 203795 - DNA, 25 bp, Canis familiaris
ttcggactaggctcccttaggatac

SEQ ID NO: 203796 - DNA, 25 bp, Canis familiaris
ttaaacattagctcccttacctatc

SEQ ID NO: 203797 - DNA, 25 bp, Canis familiaris
ttaaatgttagcagactttcccgtc

SEQ ID NO: 203798 - DNA, 25 bp, Canis familiaris
ttaaagtacctttctgtttgcctga

SEQ ID NO: 203799 - DNA, 25 bp, Canis familiaris
ttaaccaaggtttgtgtttgaagag

SEQ ID NO: 203800 - DNA, 25 bp, Canis familiaris
ttaacccagaggtgatttccaagcc

SEQ ID NO: 203801 - DNA, 25 bp, Canis familiaris
ttataccccaggtagactgtccacg

SEQ ID NO: 203802 - DNA, 25 bp, Canis familiaris
ttaaccccggagaaggacaatcaga

SEQ ID NO: 203803 - DNA, 25 bp, Canis familiaris
ttagcaccctgagggaagggcccaa

SEQ ID NO: 203804 - DNA, 25 bp, Canis familiaris
ttactctgggagtgaaggtccagga

SEQ ID NO: 203805 - DNA, 25 bp, Canis familiaris
ttaccttgtatgggtgggaccaggc

SEQ ID NO: 203806 - DNA, 25 bp, Canis familiaris
ttagcatttctagagggcccgaggc

SEQ ID NO: 203807 - DNA, 25 bp, Canis familiaris
ttagagtgttcaaagcaggcccgag

SEQ ID NO: 203808 - DNA, 25 bp, Canis familiaris
ttatggtgtactgggagtgccggcg

SEQ ID NO: 203809 - DNA, 25 bp, Canis familiaris
ttaggatttctggcgagtccgcgct

SEQ ID NO: 203810 - DNA, 25 bp, Canis familiaris
ttaggggatctcggagtcccgctga

SEQ ID NO: 203811 - DNA, 25 bp, Canis familiaris
ttagggttcgtcaagtccccagagt

SEQ ID NO: 203812 - DNA, 25 bp, Canis familiaris
ttcagtggttagcctagtccctggt

SEQ ID NO: 203813 - DNA, 25 bp, Canis familiaris
ttaaggtaggtctgtccctgtgtgt

SEQ ID NO: 203814 - DNA, 25 bp, Canis familiaris
ttgagggttaggtggcctccttgct

SEQ ID NO: 203815 - DNA, 25 bp, Canis familiaris
ttaggtttgaggttagccccactct

SEQ ID NO: 203816 - DNA, 25 bp, Canis familiaris
ttcacagtttggtttaccctcattc

SEQ ID NO: 203817 - DNA, 25 bp, Canis familiaris
ttcacgttcggtttcagtacttcta

SEQ ID NO: 203818 - DNA, 25 bp, Canis familiaris
ttcacgtgtcgccatttggggcttt

SEQ ID NO: 203819 - DNA, 25 bp, Canis familiaris
ttcaaggtgggaacagggcctcctc

SEQ ID NO: 203820 - DNA, 25 bp, Canis familiaris
ttcaaggtgggaagggagattcacc

SEQ ID NO: 203821 - DNA, 25 bp, Canis familiaris
ttacccgctgggctggagaacatcc

SEQ ID NO: 203822 - DNA, 25 bp, Canis familiaris
ttaccctgctgtgttccatgggtcg

SEQ ID NO: 203823 - DNA, 25 bp, Canis familiaris
ttaccactatggaatctacagggat

SEQ ID NO: 203824 - DNA, 25 bp, Canis familiaris
ttaccactatcgcacgtctaatgta

SEQ ID NO: 203825 - DNA, 25 bp, Canis familiaris
ttaccgtctcggaagtctcgttaga

SEQ ID NO: 203826 - DNA, 25 bp, Canis familiaris
ttacctggaaggggtcctgtctcag

SEQ ID NO: 203827 - DNA, 25 bp, Canis familiaris
ttatttggagccggaggcacttgtt

SEQ ID NO: 203828 - DNA, 25 bp, Canis familiaris
ttaattgtgggggagagccttattc

SEQ ID NO: 203829 - DNA, 25 bp, Canis familiaris
ttacggcctggacggagcctgtgat

SEQ ID NO: 203830 - DNA, 25 bp, Canis familiaris
ttaccaggctgcccaagggtgctgt

SEQ ID NO: 203831 - DNA, 25 bp, Canis familiaris
ttacgcagcctgagcactcgggctg

SEQ ID NO: 203832 - DNA, 25 bp, Canis familiaris
ttcacgcgccgaaacttggctgact

SEQ ID NO: 203833 - DNA, 25 bp, Canis familiaris
ttcacgcgccgaaacttggctgact

SEQ ID NO: 203834 - DNA, 25 bp, Canis familiaris
ttaccatccgaaacttgtccagtcc

SEQ ID NO: 203835 - DNA, 25 bp, Canis familiaris
ttatcaaccgaaactttcctccagc

SEQ ID NO: 203836 - DNA, 25 bp, Canis familiaris
ttacagagggaaacccatttccaga

SEQ ID NO: 203837 - DNA, 25 bp, Canis familiaris
ttacggggaagaccatcactctcga

SEQ ID NO: 203838 - DNA, 25 bp, Canis familiaris
ttacggtgatgacacctggctccca

SEQ ID NO: 203839 - DNA, 25 bp, Canis familiaris
ttaggggtgcagggcaagcctcctg

SEQ ID NO: 203840 - DNA, 25 bp, Canis familiaris
ttagggggctatcacacctttggag

SEQ ID NO: 203841 - DNA, 25 bp, Canis familiaris
ttagtactggtaaacaggctttagt

SEQ ID NO: 203842 - DNA, 25 bp, Canis familiaris
ttaggtcgtctaaatcctctattag

SEQ ID NO: 203843 - DNA, 25 bp, Canis familiaris
ttaggtcactgattttcttctttaa

SEQ ID NO: 203844 - DNA, 25 bp, Canis familiaris
ttagattcagcacatttttacttat

SEQ ID NO: 203845 - DNA, 25 bp, Canis familiaris
ttaggaagcacttatctttaccaat

SEQ ID NO: 203846 - DNA, 25 bp, Canis familiaris
ttaccaatgcacttgttttacccaa

SEQ ID NO: 203847 - DNA, 25 bp, Canis familiaris
ttaccaagaaggatccccaggaaca

SEQ ID NO: 203848 - DNA, 25 bp, Canis familiaris
ttgacccagaagacctccttcagga

SEQ ID NO: 203849 - DNA, 25 bp, Canis familiaris
ttaacccgatgactgtgccttagga

SEQ ID NO: 203850 - DNA, 25 bp, Canis familiaris
ttatgaacctgagggtccttgagaa

SEQ ID NO: 203851 - DNA, 25 bp, Canis familiaris
ttataacactttgatggtggagaca

SEQ ID NO: 203852 - DNA, 25 bp, Canis familiaris
ttataaaattgtatgctttcagaat

SEQ ID NO: 203853 - DNA, 25 bp, Canis familiaris
ttataaacactgtgctctttaaact

SEQ ID NO: 203854 - DNA, 25 bp, Canis familiaris
ttatctaaactgtccacttttcaac

SEQ ID NO: 203855 - DNA, 25 bp, Canis familiaris
ttactacaaaggggctctctctcaa

SEQ ID NO: 203856 - DNA, 25 bp, Canis familiaris
ttcaccagagactgaggtttctagg

SEQ ID NO: 203857 - DNA, 25 bp, Canis familiaris
ttaagagctgaccgatggttatttg

SEQ ID NO: 203858 - DNA, 25 bp, Canis familiaris
ttacagagctgagaggggatccttg

SEQ ID NO: 203859 - DNA, 25 bp, Canis familiaris
ttcaaggctgaaagggaaaccgcct

SEQ ID NO: 203860 - DNA, 25 bp, Canis familiaris
ttcacagggaacgggggactggcct

SEQ ID NO: 203861 - DNA, 25 bp, Canis familiaris
ttaaagagatcctggggactgccca

SEQ ID NO: 203862 - DNA, 25 bp, Canis familiaris
ttaaagagatcctggggactgccca

SEQ ID NO: 203863 - DNA, 25 bp, Canis familiaris
ttaggaaggatctcgcggaacccaa

SEQ ID NO: 203864 - DNA, 25 bp, Canis familiaris
ttcggaatcgccttccgagacacct

SEQ ID NO: 203865 - DNA, 25 bp, Canis familiaris
ttcaggggtgacaaccagaaagcgt

SEQ ID NO: 203866 - DNA, 25 bp, Canis familiaris
ttagcgtgtctgaataaccaaagca

SEQ ID NO: 203867 - DNA, 25 bp, Canis familiaris
ttatcgtccgaagcagcagcaacca

SEQ ID NO: 203868 - DNA, 25 bp, Canis familiaris
ttcagggccgtagcgtgaacccggc

SEQ ID NO: 203869 - DNA, 25 bp, Canis familiaris
ttcaggctcctgaacaggtgaactg

SEQ ID NO: 203870 - DNA, 25 bp, Canis familiaris
ttagtgccatcactcaacgtgaaca

SEQ ID NO: 203871 - DNA, 25 bp, Canis familiaris
ttagtgccatcactctatcgtgtca

SEQ ID NO: 203872 - DNA, 25 bp, Canis familiaris
ttagtaatcctgtatcgctgcctag

SEQ ID NO: 203873 - DNA, 25 bp, Canis familiaris
ttatgaatcagccgctggggcctgg

SEQ ID NO: 203874 - DNA, 25 bp, Canis familiaris
ttagaaatcggaggtgtggatgctc

SEQ ID NO: 203875 - DNA, 25 bp, Canis familiaris
ttaaacaccttggctgggattcctt

SEQ ID NO: 203876 - DNA, 25 bp, Canis familiaris
ttaaagctcctttgttggcagccac

SEQ ID NO: 203877 - DNA, 25 bp, Canis familiaris
ttagtccaccgcagtagtcaacaaa

SEQ ID NO: 203878 - DNA, 25 bp, Canis familiaris
ttagcacccctcaaggactaatata

SEQ ID NO: 203879 - DNA, 25 bp, Canis familiaris
ttacccgtctgcagtactctgagaa

SEQ ID NO: 203880 - DNA, 25 bp, Canis familiaris
ttacccacgtgaggctcttctggaa

SEQ ID NO: 203881 - DNA, 25 bp, Canis familiaris
ttagcctcgctgtagagacttctgt

SEQ ID NO: 203882 - DNA, 25 bp, Canis familiaris
ttaccccgaacagcttcgtgctgtc

SEQ ID NO: 203883 - DNA, 25 bp, Canis familiaris
ttaccccaacatccactgacgggtg

SEQ ID NO: 203884 - DNA, 25 bp, Canis familiaris
ttaactcctacagcctgacagggta

SEQ ID NO: 203885 - DNA, 25 bp, Canis familiaris
ttacatccacaatggcgctgacgag

SEQ ID NO: 203886 - DNA, 25 bp, Canis familiaris
ttacgccaacacggtgctgtctggc

SEQ ID NO: 203887 - DNA, 25 bp, Canis familiaris
ttacaggcacatctcaggctgactg

SEQ ID NO: 203888 - DNA, 25 bp, Canis familiaris
ttacagcgcaacagcagcctgcagc

SEQ ID NO: 203889 - DNA, 25 bp, Canis familiaris
ttactccagcctggcagcctggccg

SEQ ID NO: 203890 - DNA, 25 bp, Canis familiaris
ttacatcaccctgagcgaggacctg

SEQ ID NO: 203891 - DNA, 25 bp, Canis familiaris
ttacttccactctgggtactcattc

SEQ ID NO: 203892 - DNA, 25 bp, Canis familiaris
ttaccttactaagtgagtcttatac

SEQ ID NO: 203893 - DNA, 25 bp, Canis familiaris
ttcagccttgcctaaacagttatta

SEQ ID NO: 203894 - DNA, 25 bp, Canis familiaris
ttacacattccttacaaatagagta

SEQ ID NO: 203895 - DNA, 25 bp, Canis familiaris
ttacacatagccaccacacaattgt

SEQ ID NO: 203896 - DNA, 25 bp, Canis familiaris
ttatcaatatggaaacatccttcct

SEQ ID NO: 203897 - DNA, 25 bp, Canis familiaris
ttaaatcaggcctagactcttcccg

SEQ ID NO: 203898 - DNA, 25 bp, Canis familiaris
ttcaggaaggcagtccactctttcc

SEQ ID NO: 203899 - DNA, 25 bp, Canis familiaris
ttaaacagagagtgcccatctatgt

SEQ ID NO: 203900 - DNA, 25 bp, Canis familiaris
ttagatccaggatccccatatggaa

SEQ ID NO: 203901 - DNA, 25 bp, Canis familiaris
ttaattcaggcatcaagccaattct

SEQ ID NO: 203902 - DNA, 25 bp, Canis familiaris
ttaattatgccagaagggatgggtg

SEQ ID NO: 203903 - DNA, 25 bp, Canis familiaris
ttaatcctgtcggaaagaaggacga

SEQ ID NO: 203904 - DNA, 25 bp, Canis familiaris
ttaccctgacccacgaagtcacaga

SEQ ID NO: 203905 - DNA, 25 bp, Canis familiaris
ttaccacttcccaattgaattccca

SEQ ID NO: 203906 - DNA, 25 bp, Canis familiaris
ttccccgagggcaactagattacca

SEQ ID NO: 203907 - DNA, 25 bp, Canis familiaris
ttcaccctgggggactcatgatgct

SEQ ID NO: 203908 - DNA, 25 bp, Canis familiaris
ttacaatatggatggattctgatgg

SEQ ID NO: 203909 - DNA, 25 bp, Canis familiaris
ttcagcttatcagagtgacctagtg

SEQ ID NO: 203910 - DNA, 25 bp, Canis familiaris
ttagcttgtcctagaacctgttgcc

SEQ ID NO: 203911 - DNA, 25 bp, Canis familiaris
ttatggttcctttggtcgctcgctc

SEQ ID NO: 203912 - DNA, 25 bp, Canis familiaris
ttaggtgcccttaggacagttgtcc

SEQ ID NO: 203913 - DNA, 25 bp, Canis familiaris
ttaggctccacactcagtgcagagc

SEQ ID NO: 203914 - DNA, 25 bp, Canis familiaris
ttagcgctaggccgcgggagcggta

SEQ ID NO: 203915 - DNA, 25 bp, Canis familiaris
ttagcagtcagagcggccaagcggt

SEQ ID NO: 203916 - DNA, 25 bp, Canis familiaris
ttaagccaactcaccaagctgggaa

SEQ ID NO: 203917 - DNA, 25 bp, Canis familiaris
ttactgcaaaccactcgacgtcaaa

SEQ ID NO: 203918 - DNA, 25 bp, Canis familiaris
ttatccaaacatcttcggatcctaa

SEQ ID NO: 203919 - DNA, 25 bp, Canis familiaris
ttaccgagtcatcatcttagtccga

SEQ ID NO: 203920 - DNA, 25 bp, Canis familiaris
ttcagggatgtccagatcggggaca

SEQ ID NO: 203921 - DNA, 25 bp, Canis familiaris
ttagtggagatctgtggcacgagaa

SEQ ID NO: 203922 - DNA, 25 bp, Canis familiaris
ttagggatcaaagacagcgcagaga

SEQ ID NO: 203923 - DNA, 25 bp, Canis familiaris
ttagggccacaaagactgcacacag

SEQ ID NO: 203924 - DNA, 25 bp, Canis familiaris
ttatggctccctctgagtgacaagg

SEQ ID NO: 203925 - DNA, 25 bp, Canis familiaris
ttacctcttctactgcattgaaagg

SEQ ID NO: 203926 - DNA, 25 bp, Canis familiaris
ttatcctctattttgatgttacatt

SEQ ID NO: 203927 - DNA, 25 bp, Canis familiaris
ttatcctgcttaatagttagacatt

SEQ ID NO: 203928 - DNA, 25 bp, Canis familiaris
ttatcagccttactaattaccttgt

SEQ ID NO: 203929 - DNA, 25 bp, Canis familiaris
ttaagcccttagtagtcacctgtat

SEQ ID NO: 203930 - DNA, 25 bp, Canis familiaris
ttaactcctagatagtcccgtgtgg

SEQ ID NO: 203931 - DNA, 25 bp, Canis familiaris
ttaatccctaattgatttttctggg

SEQ ID NO: 203932 - DNA, 25 bp, Canis familiaris
ttatctcctatattttttttctcag

SEQ ID NO: 203933 - DNA, 25 bp, Canis familiaris
ttaattcataatttttttctctgga

SEQ ID NO: 203934 - DNA, 25 bp, Canis familiaris
ttagaactacattcttttctccttg

SEQ ID NO: 203935 - DNA, 25 bp, Canis familiaris
ttcaaactaacctattctggcctta

SEQ ID NO: 203936 - DNA, 25 bp, Canis familiaris
ttaaagtttctctttgggccatgtt

SEQ ID NO: 203937 - DNA, 25 bp, Canis familiaris
ttaaatgttcatgcacttagtaagc

SEQ ID NO: 203938 - DNA, 25 bp, Canis familiaris
ttacctgtactcccaatagtggcaa

SEQ ID NO: 203939 - DNA, 25 bp, Canis familiaris
ttcacaatgggctttcaataggagc

SEQ ID NO: 203940 - DNA, 25 bp, Canis familiaris
ttatgtttgtttccattacgagcat

SEQ ID NO: 203941 - DNA, 25 bp, Canis familiaris
ttactttgtataacctactgacctc

SEQ ID NO: 203942 - DNA, 25 bp, Canis familiaris
ttacatgactacaccttttgaccca

SEQ ID NO: 203943 - DNA, 25 bp, Canis familiaris
ttaagacattcctgtgtttaaacac

SEQ ID NO: 203944 - DNA, 25 bp, Canis familiaris
ttcaatgcaattctcaagtctttaa

SEQ ID NO: 203945 - DNA, 25 bp, Canis familiaris
ttactggatccctaaagcatttaag

SEQ ID NO: 203946 - DNA, 25 bp, Canis familiaris
ttacatgttcccttaagcaaattga

SEQ ID NO: 203947 - DNA, 25 bp, Canis familiaris
ttatcattaacacttgaagtaataa

SEQ ID NO: 203948 - DNA, 25 bp, Canis familiaris
ttatgattattccttgtctgtactt

SEQ ID NO: 203949 - DNA, 25 bp, Canis familiaris
ttatctattctactcttctctagtc

SEQ ID NO: 203950 - DNA, 25 bp, Canis familiaris
ttagtagtcttggtcatctctagcc

SEQ ID NO: 203951 - DNA, 25 bp, Canis familiaris
ttagaaatctgggtgccaccagccc

SEQ ID NO: 203952 - DNA, 25 bp, Canis familiaris
ttacagcaagtcgtggctaacccct

SEQ ID NO: 203953 - DNA, 25 bp, Canis familiaris
ttagcaaaccctaatcaatcccctt

SEQ ID NO: 203954 - DNA, 25 bp, Canis familiaris
ttagaaatgccctgaagtctcccat

SEQ ID NO: 203955 - DNA, 25 bp, Canis familiaris
ttaggactgccctaattactcctca

SEQ ID NO: 203956 - DNA, 25 bp, Canis familiaris
ttacggatggggtttactcctgctg

SEQ ID NO: 203957 - DNA, 25 bp, Canis familiaris
ttaaaatggtgtcttcctcgcttct

SEQ ID NO: 203958 - DNA, 25 bp, Canis familiaris
ttagaaacaagtgttcccctcatct

SEQ ID NO: 203959 - DNA, 25 bp, Canis familiaris
ttagggaaatgtggtccctcctcct

SEQ ID NO: 203960 - DNA, 25 bp, Canis familiaris
ttaggtaataacgtctgcatcttct

SEQ ID NO: 203961 - DNA, 25 bp, Canis familiaris
ttagagtcctaattgctgtgctttt

SEQ ID NO: 203962 - DNA, 25 bp, Canis familiaris
ttaactcctcagaagcttgcttact

SEQ ID NO: 203963 - DNA, 25 bp, Canis familiaris
ttagttcccagaactcgctgtactg

SEQ ID NO: 203964 - DNA, 25 bp, Canis familiaris
ttagtatcctagtcctcctagaatg

SEQ ID NO: 203965 - DNA, 25 bp, Canis familiaris
ttaaacctgaggctcctgtgcctga

SEQ ID NO: 203966 - DNA, 25 bp, Canis familiaris
ttaagcaagctgcggttgtggaaga

SEQ ID NO: 203967 - DNA, 25 bp, Canis familiaris
ttacacatattctcgatatgggtaa

SEQ ID NO: 203968 - DNA, 25 bp, Canis familiaris
ttaccagttttccaatggctttaca

SEQ ID NO: 203969 - DNA, 25 bp, Canis familiaris
ttaccagattttagctttgtattta

SEQ ID NO: 203970 - DNA, 25 bp, Canis familiaris
ttaccagcttttacagttccttttg

SEQ ID NO: 203971 - DNA, 25 bp, Canis familiaris
ttaccagtctataccatgctactca

SEQ ID NO: 203972 - DNA, 25 bp, Canis familiaris
ttaccatctcgatgcctatattccc

SEQ ID NO: 203973 - DNA, 25 bp, Canis familiaris
ttagtatctttccaaatcttcgcct

SEQ ID NO: 203974 - DNA, 25 bp, Canis familiaris
ttcagtctttacttaacctgcccta

SEQ ID NO: 203975 - DNA, 25 bp, Canis familiaris
ttaagctttatcttcaacctacccg

SEQ ID NO: 203976 - DNA, 25 bp, Canis familiaris
ttaggttttctttgagcacacccct

SEQ ID NO: 203977 - DNA, 25 bp, Canis familiaris
ttagtgtccttccatctggagcaac

SEQ ID NO: 203978 - DNA, 25 bp, Canis familiaris
ttagctgatcttccgtcgcaaagac

SEQ ID NO: 203979 - DNA, 25 bp, Canis familiaris
ttagcgatcccggtcggaaatgctg

SEQ ID NO: 203980 - DNA, 25 bp, Canis familiaris
ttagagcacctttctgcggaaggcg

SEQ ID NO: 203981 - DNA, 25 bp, Canis familiaris
ttagatgtcgtatccggagagagct

SEQ ID NO: 203982 - DNA, 25 bp, Canis familiaris
ttagatgtcctgatccttcaaagca

SEQ ID NO: 203983 - DNA, 25 bp, Canis familiaris
ttagatgctcctgctctttggatag

SEQ ID NO: 203984 - DNA, 25 bp, Canis familiaris
ttagctttgctccttctagtgcaag

SEQ ID NO: 203985 - DNA, 25 bp, Canis familiaris
ttagaatggtctcgccatcagctct

SEQ ID NO: 203986 - DNA, 25 bp, Canis familiaris
ttaacagtcctgaccatcagctgat

SEQ ID NO: 203987 - DNA, 25 bp, Canis familiaris
ttaagcgttctgaccggagaccttt

SEQ ID NO: 203988 - DNA, 25 bp, Canis familiaris
ttagatgcgttcgacgcggggcagc

SEQ ID NO: 203989 - DNA, 25 bp, Canis familiaris
ttagctgagtgtcccgcggggcccg

SEQ ID NO: 203990 - DNA, 25 bp, Canis familiaris
ttactagttcccgtgtggacgcttt

SEQ ID NO: 203991 - DNA, 25 bp, Canis familiaris
ttagtgaggtcaccctgtagcagcc

SEQ ID NO: 203992 - DNA, 25 bp, Canis familiaris
ttagagaagtacccatttctgcgcc

SEQ ID NO: 203993 - DNA, 25 bp, Canis familiaris
ttatggagaagagcctcctcgcggc

SEQ ID NO: 203994 - DNA, 25 bp, Canis familiaris
ttaggaacagagcacatctccccag

SEQ ID NO: 203995 - DNA, 25 bp, Canis familiaris
ttaaacacagagacctgccacgacg

SEQ ID NO: 203996 - DNA, 25 bp, Canis familiaris
ttgaaagtcagccctcgacacaagg

SEQ ID NO: 203997 - DNA, 25 bp, Canis familiaris
ttacacggccatgctgagaccaagc

SEQ ID NO: 203998 - DNA, 25 bp, Canis familiaris
ttcaacaagacaccggacaaacact

SEQ ID NO: 203999 - DNA, 25 bp, Canis familiaris
ttagaaggcaccagcccagaaccac

SEQ ID NO: 204000 - DNA, 25 bp, Canis familiaris
ttaaatggcaaccgcatcgcgttcg

SEQ ID NO: 204001 - DNA, 25 bp, Canis familiaris
ttacagtgacaaaagcatgccgtgg

SEQ ID NO: 204002 - DNA, 25 bp, Canis familiaris
ttagctgtactaaaacacgagagga

SEQ ID NO: 204003 - DNA, 25 bp, Canis familiaris
ttagtatttaaaccagccgatgcaa

SEQ ID NO: 204004 - DNA, 25 bp, Canis familiaris
ttagtactgatcttttcccaatgct

SEQ ID NO: 204005 - DNA, 25 bp, Canis familiaris
ttaggagtgtccattaccaggcctc

SEQ ID NO: 204006 - DNA, 25 bp, Canis familiaris
ttagaaggggctctactcaacacct

SEQ ID NO: 204007 - DNA, 25 bp, Canis familiaris
ttagtaagtgcctctagctcaacac

SEQ ID NO: 204008 - DNA, 25 bp, Canis familiaris
ttagaaggtgcctgctactgcacac

SEQ ID NO: 204009 - DNA, 25 bp, Canis familiaris
ttaagggatgccgctagagccgggc

SEQ ID NO: 204010 - DNA, 25 bp, Canis familiaris
ttagagcggcccgccaggagggaga

SEQ ID NO: 204011 - DNA, 25 bp, Canis familiaris
ttaggcggcacctcaaggagcagca

SEQ ID NO: 204012 - DNA, 25 bp, Canis familiaris
ttacggacacactatgaagcggcag

SEQ ID NO: 204013 - DNA, 25 bp, Canis familiaris
ttacggcagccgcatgactggtggt

SEQ ID NO: 204014 - DNA, 25 bp, Canis familiaris
ttatcgggccctggaggaggcgcta

SEQ ID NO: 204015 - DNA, 25 bp, Canis familiaris
ttactggctcccagcaggcagagac

SEQ ID NO: 204016 - DNA, 25 bp, Canis familiaris
ttcacacccttcaagcaggctgtga

SEQ ID NO: 204017 - DNA, 25 bp, Canis familiaris
ttaccctcattctcagcaatctggg

SEQ ID NO: 204018 - DNA, 25 bp, Canis familiaris
ttaccccattatccatcaattcgaa

SEQ ID NO: 204019 - DNA, 25 bp, Canis familiaris
ttaccccatacgtcaactgtcagat

SEQ ID NO: 204020 - DNA, 25 bp, Canis familiaris
ttacccaaagcacctgtgtgtgtgt

SEQ ID NO: 204021 - DNA, 25 bp, Canis familiaris
ttactcccagagttctttctttgat

SEQ ID NO: 204022 - DNA, 25 bp, Canis familiaris
ttacctaagtcatcttatatttgaa

SEQ ID NO: 204023 - DNA, 25 bp, Canis familiaris
ttatcctgggttttctacttataca

SEQ ID NO: 204024 - DNA, 25 bp, Canis familiaris
ttatgtgctggctttattttttaaa

SEQ ID NO: 204025 - DNA, 25 bp, Canis familiaris
ttaggtctgattatttctttagcaa

SEQ ID NO: 204026 - DNA, 25 bp, Canis familiaris
ttagtattgtacaacttctttacac

SEQ ID NO: 204027 - DNA, 25 bp, Canis familiaris
ttagatactgaaacagtccttaatc

SEQ ID NO: 204028 - DNA, 25 bp, Canis familiaris
ttaatacatgaacagcctttgccaa

SEQ ID NO: 204029 - DNA, 25 bp, Canis familiaris
ttaaatgtgagaacaccttaggaag

SEQ ID NO: 204030 - DNA, 25 bp, Canis familiaris
ttaaatgtaaatgcgtagatggaag

SEQ ID NO: 204031 - DNA, 25 bp, Canis familiaris
ttaaattttgtgaccatagaggatt

SEQ ID NO: 204032 - DNA, 25 bp, Canis familiaris
ttagacagttttacacaaggcagct

SEQ ID NO: 204033 - DNA, 25 bp, Canis familiaris
ttcaacgttttagcaagtcattctt

SEQ ID NO: 204034 - DNA, 25 bp, Canis familiaris
ttaacgtctttgagaagctgtgtcc

SEQ ID NO: 204035 - DNA, 25 bp, Canis familiaris
ttacgccgctttctgacactttcac

SEQ ID NO: 204036 - DNA, 25 bp, Canis familiaris
ttacctgtgtttcaaccttgaccca

SEQ ID NO: 204037 - DNA, 25 bp, Canis familiaris
ttagcctgtcattttaattcttgaa

SEQ ID NO: 204038 - DNA, 25 bp, Canis familiaris
ttatgcctttagatgttgctttaga

SEQ ID NO: 204039 - DNA, 25 bp, Canis familiaris
ttatgtgttatatgtttgctttcta

SEQ ID NO: 204040 - DNA, 25 bp, Canis familiaris
ttacgaataaaaatactgttgctga

SEQ ID NO: 204041 - DNA, 25 bp, Canis familiaris
ttctgccaaaaaggtacttctggaa

SEQ ID NO: 204042 - DNA, 25 bp, Canis familiaris
ttgtttaacacggtaccttatacat

SEQ ID NO: 204043 - DNA, 25 bp, Canis familiaris
ttggacgacacgggatccgctgtaa

SEQ ID NO: 204044 - DNA, 25 bp, Canis familiaris
ttgggccaaagcgtatcaggagtta

SEQ ID NO: 204045 - DNA, 25 bp, Canis familiaris
ttgggctaagtggtcccggactaca

SEQ ID NO: 204046 - DNA, 25 bp, Canis familiaris
ttacctgataaggtcccagcgccta

SEQ ID NO: 204047 - DNA, 25 bp, Canis familiaris
ttatccagagaccaaggccaggcct

SEQ ID NO: 204048 - DNA, 25 bp, Canis familiaris
ttatccaataactgaccatgtccta

SEQ ID NO: 204049 - DNA, 25 bp, Canis familiaris
ttacccatataattgaagattcact

SEQ ID NO: 204050 - DNA, 25 bp, Canis familiaris
ttgacccgtaatccaaattccgatc

SEQ ID NO: 204051 - DNA, 25 bp, Canis familiaris
ttagtccccatcacaatattccaac

SEQ ID NO: 204052 - DNA, 25 bp, Canis familiaris
ttaacaggccacagaaagtcccacg

SEQ ID NO: 204053 - DNA, 25 bp, Canis familiaris
ttaactcctagtaaaagtccgcagc

SEQ ID NO: 204054 - DNA, 25 bp, Canis familiaris
ttaccttgttgaaatttgccccagt

SEQ ID NO: 204055 - DNA, 25 bp, Canis familiaris
ttactgtagttaacatcactccctc

SEQ ID NO: 204056 - DNA, 25 bp, Canis familiaris
ttactgtcatgtaaccaactccctt

SEQ ID NO: 204057 - DNA, 25 bp, Canis familiaris
ttacttagttgcgttacacccttcg

SEQ ID NO: 204058 - DNA, 25 bp, Canis familiaris
ttagttatgttcttgctttacccca

SEQ ID NO: 204059 - DNA, 25 bp, Canis familiaris
ttagtgttttgctatgattctaagc

SEQ ID NO: 204060 - DNA, 25 bp, Canis familiaris
ttagctttatcgtatgactcacata

SEQ ID NO: 204061 - DNA, 25 bp, Canis familiaris
ttaccttgcatcctgtttcagctac

SEQ ID NO: 204062 - DNA, 25 bp, Canis familiaris
ttagctctttggtcttttgcagtct

SEQ ID NO: 204063 - DNA, 25 bp, Canis familiaris
ttagagagctttgtgtttcagtttg

SEQ ID NO: 204064 - DNA, 25 bp, Canis familiaris
ttagcaagcttgatttttatgttag

SEQ ID NO: 204065 - DNA, 25 bp, Canis familiaris
ttacacagtctgttttttaatctat

SEQ ID NO: 204066 - DNA, 25 bp, Canis familiaris
ttaacactattgaattgtacactta

SEQ ID NO: 204067 - DNA, 25 bp, Canis familiaris
ttgaaccgttacgttatgcacagta

SEQ ID NO: 204068 - DNA, 25 bp, Canis familiaris
ttatggccatttacgtattgcaagt

SEQ ID NO: 204069 - DNA, 25 bp, Canis familiaris
ttatgtctcttctacagttgtggtt

SEQ ID NO: 204070 - DNA, 25 bp, Canis familiaris
ttaatgtgctaccaatatggtgagt

SEQ ID NO: 204071 - DNA, 25 bp, Canis familiaris
ttagtgtgtatccaaccattagtta

SEQ ID NO: 204072 - DNA, 25 bp, Canis familiaris
ttagatgcggtgcacccaaggtgta

SEQ ID NO: 204073 - DNA, 25 bp, Canis familiaris
ttacacgttctaccccagtgagtga

SEQ ID NO: 204074 - DNA, 25 bp, Canis familiaris
ttaagtgtgacttcaaccaggggaa

SEQ ID NO: 204075 - DNA, 25 bp, Canis familiaris
ttaagagttttcttgccaaggccag

SEQ ID NO: 204076 - DNA, 25 bp, Canis familiaris
ttaggagatctgttcatcccacggc

SEQ ID NO: 204077 - DNA, 25 bp, Canis familiaris
ttagtcaactggaaaccgctggccc

SEQ ID NO: 204078 - DNA, 25 bp, Canis familiaris
ttagtttagtatacaccctcaggcc

SEQ ID NO: 204079 - DNA, 25 bp, Canis familiaris
ttatgttgcatacttccagcttctc

SEQ ID NO: 204080 - DNA, 25 bp, Canis familiaris
ttatgattgagcagctcctcgtgcc

SEQ ID NO: 204081 - DNA, 25 bp, Canis familiaris
ttagtgagcagcagctccatcctgt

SEQ ID NO: 204082 - DNA, 25 bp, Canis familiaris
ttatgtagcagctctccttctgaga

SEQ ID NO: 204083 - DNA, 25 bp, Canis familiaris
ttagtcatgcacttgttttgagaga

SEQ ID NO: 204084 - DNA, 25 bp, Canis familiaris
ttgaagatgcacagctggttgaatt

SEQ ID NO: 204085 - DNA, 25 bp, Canis familiaris
ttgatggcacaaacggtagactgtt

SEQ ID NO: 204086 - DNA, 25 bp, Canis familiaris
ttagactcagaccaggctagcctta

SEQ ID NO: 204087 - DNA, 25 bp, Canis familiaris
ttagggacaccaggctggctcagtc

SEQ ID NO: 204088 - DNA, 25 bp, Canis familiaris
ttaggagacctcagtgctgctctct

SEQ ID NO: 204089 - DNA, 25 bp, Canis familiaris
ttagtgagacctaccttctttcatg

SEQ ID NO: 204090 - DNA, 25 bp, Canis familiaris
ttacttcagagcatccttctcttca

SEQ ID NO: 204091 - DNA, 25 bp, Canis familiaris
ttacttcaagggccatcatcttatc

SEQ ID NO: 204092 - DNA, 25 bp, Canis familiaris
ttactctgaagggcatcatgcatct

SEQ ID NO: 204093 - DNA, 25 bp, Canis familiaris
ttactgctatgagacaatccattgt

SEQ ID NO: 204094 - DNA, 25 bp, Canis familiaris
ttactgcaagcagcacttttttgtg

SEQ ID NO: 204095 - DNA, 25 bp, Canis familiaris
ttaattcagatggacttgttgtggg

SEQ ID NO: 204096 - DNA, 25 bp, Canis familiaris
ttaaaactgcaatttgtgtgtgtgt

SEQ ID NO: 204097 - DNA, 25 bp, Canis familiaris
ttaaatcctcagctgccagggtctt

SEQ ID NO: 204098 - DNA, 25 bp, Canis familiaris
ttacaatcggacctgccagtgcttt

SEQ ID NO: 204099 - DNA, 25 bp, Canis familiaris
ttaaacggcgagcacatgttgttgc

SEQ ID NO: 204100 - DNA, 25 bp, Canis familiaris
ttaccagggggcgctgtgtgatctg

SEQ ID NO: 204101 - DNA, 25 bp, Canis familiaris
ttagcctggaggcggttcgactatc

SEQ ID NO: 204102 - DNA, 25 bp, Canis familiaris
ttacttgttgccctgtgctttagta

SEQ ID NO: 204103 - DNA, 25 bp, Canis familiaris
ttactgtttcccgtgctttagtatc

SEQ ID NO: 204104 - DNA, 25 bp, Canis familiaris
ttcctttaccctgtttggctgatgg

SEQ ID NO: 204105 - DNA, 25 bp, Canis familiaris
ttactttttccggatctacctgaag

SEQ ID NO: 204106 - DNA, 25 bp, Canis familiaris
ttagacttcttttcttatccctgaa

SEQ ID NO: 204107 - DNA, 25 bp, Canis familiaris
ttgagttttgtctctctagtcctaa

SEQ ID NO: 204108 - DNA, 25 bp, Canis familiaris
ttagcatttttctcattcagtcctt

SEQ ID NO: 204109 - DNA, 25 bp, Canis familiaris
ttaccttttcatacagacacccttt

SEQ ID NO: 204110 - DNA, 25 bp, Canis familiaris
ttaacttccctgaaatcactgcctt

SEQ ID NO: 204111 - DNA, 25 bp, Canis familiaris
ttaacgtctcttaaacaatcactaa

SEQ ID NO: 204112 - DNA, 25 bp, Canis familiaris
ttaactcaatttcataattcactga

SEQ ID NO: 204113 - DNA, 25 bp, Canis familiaris
ttacacacgtgttcctaattattga

SEQ ID NO: 204114 - DNA, 25 bp, Canis familiaris
ttactgccaggttactatatgtctt

SEQ ID NO: 204115 - DNA, 25 bp, Canis familiaris
ttagctgctcgggaacgcaagcgtt

SEQ ID NO: 204116 - DNA, 25 bp, Canis familiaris
ttagctgctgccttactcgaagaaa

SEQ ID NO: 204117 - DNA, 25 bp, Canis familiaris
ttagctctgacgtcaccgagcacaa

SEQ ID NO: 204118 - DNA, 25 bp, Canis familiaris
ttatgtttcatgcccagcaacacca

SEQ ID NO: 204119 - DNA, 25 bp, Canis familiaris
ttatgtatctcttgcactacacctc

SEQ ID NO: 204120 - DNA, 25 bp, Canis familiaris
ttatgtcatcgatcctgaaccttgc

SEQ ID NO: 204121 - DNA, 25 bp, Canis familiaris
ttcatcagtcgattcctaagtcctc

SEQ ID NO: 204122 - DNA, 25 bp, Canis familiaris
ttccgtatgatctactgaactcaac

SEQ ID NO: 204123 - DNA, 25 bp, Canis familiaris
ttaagatcagtcgactggactcaga

SEQ ID NO: 204124 - DNA, 25 bp, Canis familiaris
ttagagatcaaccacaaccacaaat

SEQ ID NO: 204125 - DNA, 25 bp, Canis familiaris
ttacagtcatcccatccggaaagaa

SEQ ID NO: 204126 - DNA, 25 bp, Canis familiaris
ttaagatatccagtccgtgacgatt

SEQ ID NO: 204127 - DNA, 25 bp, Canis familiaris
ttacatgatagaccccctgtctgtt

SEQ ID NO: 204128 - DNA, 25 bp, Canis familiaris
ttactgtaccccatggatgcttgat

SEQ ID NO: 204129 - DNA, 25 bp, Canis familiaris
ttagctgggccgtgttgatgtgaat

SEQ ID NO: 204130 - DNA, 25 bp, Canis familiaris
ttagttagcactttgtatcattata

SEQ ID NO: 204131 - DNA, 25 bp, Canis familiaris
ttagattagtattttgtcagttcaa

SEQ ID NO: 204132 - DNA, 25 bp, Canis familiaris
ttgatgagtaattctttccagttct

SEQ ID NO: 204133 - DNA, 25 bp, Canis familiaris
ttaggtgtgctgtgattccatgttt

SEQ ID NO: 204134 - DNA, 25 bp, Canis familiaris
ttagagtcgatgtgttttgtactag

SEQ ID NO: 204135 - DNA, 25 bp, Canis familiaris
ttaactcctggtgctttgtactact

SEQ ID NO: 204136 - DNA, 25 bp, Canis familiaris
ttaagccttggacctgttgttttgc

SEQ ID NO: 204137 - DNA, 25 bp, Canis familiaris
ttaagtttgtggcctgtttactcct

SEQ ID NO: 204138 - DNA, 25 bp, Canis familiaris
ttacctctcatgcgtgttttacttt

SEQ ID NO: 204139 - DNA, 25 bp, Canis familiaris
ttagctttgcagcttttgcctttct

SEQ ID NO: 204140 - DNA, 25 bp, Canis familiaris
ttagtttgcagtcctgtgtgcttcc

SEQ ID NO: 204141 - DNA, 25 bp, Canis familiaris
ttagaggctgagggcgtgtgcttgg

SEQ ID NO: 204142 - DNA, 25 bp, Canis familiaris
ttagaggctgagggcgtgtgcttgg

SEQ ID NO: 204143 - DNA, 25 bp, Canis familiaris
ttagaggcggcatgcttgctgccat

SEQ ID NO: 204144 - DNA, 25 bp, Canis familiaris
ttagaggcatgtgggtggcgcagtc

SEQ ID NO: 204145 - DNA, 25 bp, Canis familiaris
ttagggcactggctctgagcgtgct

SEQ ID NO: 204146 - DNA, 25 bp, Canis familiaris
ttatgggcctgccagtctgagtttc

SEQ ID NO: 204147 - DNA, 25 bp, Canis familiaris
ttacgtccgccactatattatcgct

SEQ ID NO: 204148 - DNA, 25 bp, Canis familiaris
ttaggatctcatcacttttgcctgt

SEQ ID NO: 204149 - DNA, 25 bp, Canis familiaris
ttacttccagtcatatgcttgcctt

SEQ ID NO: 204150 - DNA, 25 bp, Canis familiaris
ttacacacagcgagttcctgcttct

SEQ ID NO: 204151 - DNA, 25 bp, Canis familiaris
ttaaccagcattctccgctgttgga

SEQ ID NO: 204152 - DNA, 25 bp, Canis familiaris
ttacccacatatgctcctgagctta

SEQ ID NO: 204153 - DNA, 25 bp, Canis familiaris
ttaccttctcaggcattcgagcatt

SEQ ID NO: 204154 - DNA, 25 bp, Canis familiaris
ttcaccttccggaccaagaattgta

SEQ ID NO: 204155 - DNA, 25 bp, Canis familiaris
ttaccagcccaaataaagtttgtat

SEQ ID NO: 204156 - DNA, 25 bp, Canis familiaris
ttaaagcccagaaaccagttactct

SEQ ID NO: 204157 - DNA, 25 bp, Canis familiaris
ttagaatgccacttaaccgttctcc

SEQ ID NO: 204158 - DNA, 25 bp, Canis familiaris
ttagaattcacagaacttgtcccat

SEQ ID NO: 204159 - DNA, 25 bp, Canis familiaris
ttacagtggctaataacctgtccta

SEQ ID NO: 204160 - DNA, 25 bp, Canis familiaris
ttactgtggcttgtagcattcctcc

SEQ ID NO: 204161 - DNA, 25 bp, Canis familiaris
ttagctttgtatttaattctctcac

SEQ ID NO: 204162 - DNA, 25 bp, Canis familiaris
ttagtttctttaatcattcttaaca

SEQ ID NO: 204163 - DNA, 25 bp, Canis familiaris
ttagctttacttttcctcttataat

SEQ ID NO: 204164 - DNA, 25 bp, Canis familiaris
ttaacttaattattcaggccctaat

SEQ ID NO: 204165 - DNA, 25 bp, Canis familiaris
ttcaactttcttggaaggccttggt

SEQ ID NO: 204166 - DNA, 25 bp, Canis familiaris
ttaagtttttagtggtgtgtgtgtg

SEQ ID NO: 204167 - DNA, 25 bp, Canis familiaris
ttaaagtcttctacctggctttggg

SEQ ID NO: 204168 - DNA, 25 bp, Canis familiaris
ttaatatgttctttgacgacttacc

SEQ ID NO: 204169 - DNA, 25 bp, Canis familiaris
ttaaatttgccagtagccgcattaa

SEQ ID NO: 204170 - DNA, 25 bp, Canis familiaris
ttaggatttctaaaacgatctagca

SEQ ID NO: 204171 - DNA, 25 bp, Canis familiaris
ttaagtccattaagaaccatgtgaa

SEQ ID NO: 204172 - DNA, 25 bp, Canis familiaris
ttcaattccctaagtaccaggtttg

SEQ ID NO: 204173 - DNA, 25 bp, Canis familiaris
ttaattgcccttccatagccaagtt

SEQ ID NO: 204174 - DNA, 25 bp, Canis familiaris
ttaatagcatccacctgacacaact

SEQ ID NO: 204175 - DNA, 25 bp, Canis familiaris
ttacaacaccaactctaaccacttg

SEQ ID NO: 204176 - DNA, 25 bp, Canis familiaris
ttaacacaacagtcttacacgcatt

SEQ ID NO: 204177 - DNA, 25 bp, Canis familiaris
ttaaagcatcacgtggtacccagtc

SEQ ID NO: 204178 - DNA, 25 bp, Canis familiaris
ttcaacagacacttggacaccctta

SEQ ID NO: 204179 - DNA, 25 bp, Canis familiaris
ttaatctgaagatggacccctttgt

SEQ ID NO: 204180 - DNA, 25 bp, Canis familiaris
ttaaggaaaaggccccaagtgctgg

SEQ ID NO: 204181 - DNA, 25 bp, Canis familiaris
ttagggacacaaaggaccaggtctg

SEQ ID NO: 204182 - DNA, 25 bp, Canis familiaris
ttacaggcccaaggaagctcggtct

SEQ ID NO: 204183 - DNA, 25 bp, Canis familiaris
ttaaatctccagtgacacccttctt

SEQ ID NO: 204184 - DNA, 25 bp, Canis familiaris
ttaacacttactgggcacttctttg

SEQ ID NO: 204185 - DNA, 25 bp, Canis familiaris
ttaaacccattcttcatcatttttg

SEQ ID NO: 204186 - DNA, 25 bp, Canis familiaris
ttactttgccctttattgcttctta

SEQ ID NO: 204187 - DNA, 25 bp, Canis familiaris
ttactttgttgttgaatatgctttg

SEQ ID NO: 204188 - DNA, 25 bp, Canis familiaris
ttactttgtgtttacttatacatga

SEQ ID NO: 204189 - DNA, 25 bp, Canis familiaris
ttaccatatgtgtattcccttcaaa

SEQ ID NO: 204190 - DNA, 25 bp, Canis familiaris
ttagactaagctacctgccttcaaa

SEQ ID NO: 204191 - DNA, 25 bp, Canis familiaris
ttacctcaagcgactcatacgacca

SEQ ID NO: 204192 - DNA, 25 bp, Canis familiaris
ttaagtcacagctaatgcataccat

SEQ ID NO: 204193 - DNA, 25 bp, Canis familiaris
ttaagagccctgtatctacctgtac

SEQ ID NO: 204194 - DNA, 25 bp, Canis familiaris
ttagagagcctttgttgttcatttc

SEQ ID NO: 204195 - DNA, 25 bp, Canis familiaris
ttaggagctttatttggtgcattaa

SEQ ID NO: 204196 - DNA, 25 bp, Canis familiaris
ttagggcactgttagatttgttgaa

SEQ ID NO: 204197 - DNA, 25 bp, Canis familiaris
ttagaccaccatgcagtttcctgca

SEQ ID NO: 204198 - DNA, 25 bp, Canis familiaris
ttaactaacaacctttcccaagcat

SEQ ID NO: 204199 - DNA, 25 bp, Canis familiaris
ttaaaatcacaagggatttccccat

SEQ ID NO: 204200 - DNA, 25 bp, Canis familiaris
ttcaataaaacgtgcttttctctct

SEQ ID NO: 204201 - DNA, 25 bp, Canis familiaris
ttcaataaaacgtgcttttctctct

SEQ ID NO: 204202 - DNA, 25 bp, Canis familiaris
ttcaacctaaaatgattccttactc

SEQ ID NO: 204203 - DNA, 25 bp, Canis familiaris
ttaagtcttaaatgatgccctcccc

SEQ ID NO: 204204 - DNA, 25 bp, Canis familiaris
ttaagtcctaagctgagccctgtgc

SEQ ID NO: 204205 - DNA, 25 bp, Canis familiaris
ttagcgtggcgaggaagaccctggc

SEQ ID NO: 204206 - DNA, 25 bp, Canis familiaris
ttaccgaaggaaaaccttgtgctag

SEQ ID NO: 204207 - DNA, 25 bp, Canis familiaris
ttgactggatagataaaccttcgta

SEQ ID NO: 204208 - DNA, 25 bp, Canis familiaris
ttagttgtagtttaaccctgcctat

SEQ ID NO: 204209 - DNA, 25 bp, Canis familiaris
ttaccgtagcttttatccctgctat

SEQ ID NO: 204210 - DNA, 25 bp, Canis familiaris
ttacaggaagtcccttgccatccta

SEQ ID NO: 204211 - DNA, 25 bp, Canis familiaris
ttacacagaaccacttcagatggct

SEQ ID NO: 204212 - DNA, 25 bp, Canis familiaris
ttaaagcggctcatcccagatggct

SEQ ID NO: 204213 - DNA, 25 bp, Canis familiaris
ttaaggctctggaattctcaaggct

SEQ ID NO: 204214 - DNA, 25 bp, Canis familiaris
ttacatgtgtggcatttcagaagag

SEQ ID NO: 204215 - DNA, 25 bp, Canis familiaris
ttagctggtggactcttggaaggga

SEQ ID NO: 204216 - DNA, 25 bp, Canis familiaris
ttagcttgtggagttctggaggact

SEQ ID NO: 204217 - DNA, 25 bp, Canis familiaris
ttagcggatggcggactggatgtgg

SEQ ID NO: 204218 - DNA, 25 bp, Canis familiaris
ttaggtgggtgggcggatggatgga

SEQ ID NO: 204219 - DNA, 25 bp, Canis familiaris
ttaagttggtggctcagggatgctc

SEQ ID NO: 204220 - DNA, 25 bp, Canis familiaris
ttacctgggtgtcccaacgtggcta

SEQ ID NO: 204221 - DNA, 25 bp, Canis familiaris
ttacctggtttggtgccgagtgtct

SEQ ID NO: 204222 - DNA, 25 bp, Canis familiaris
ttcaccgtctttgtgcagggcatga

SEQ ID NO: 204223 - DNA, 25 bp, Canis familiaris
ttcaaactcttctctgaggtgtaaa

SEQ ID NO: 204224 - DNA, 25 bp, Canis familiaris
ttacaactctcctctagggcgtata

SEQ ID NO: 204225 - DNA, 25 bp, Canis familiaris
ttacatactctgataccattctggt

SEQ ID NO: 204226 - DNA, 25 bp, Canis familiaris
ttagcatttcgtatcagcacatctg

SEQ ID NO: 204227 - DNA, 25 bp, Canis familiaris
ttacattgataacaccctgctgcat

SEQ ID NO: 204228 - DNA, 25 bp, Canis familiaris
ttaagttcagcattactctccgcat

SEQ ID NO: 204229 - DNA, 25 bp, Canis familiaris
ttagagttcagacttcccactcaca

SEQ ID NO: 204230 - DNA, 25 bp, Canis familiaris
ttacatttaaattcccacgtcagac

SEQ ID NO: 204231 - DNA, 25 bp, Canis familiaris
ttaccttaaaggccatatcgctcca

SEQ ID NO: 204232 - DNA, 25 bp, Canis familiaris
ttaaccgaagcacgaattccccatt

SEQ ID NO: 204233 - DNA, 25 bp, Canis familiaris
ttagcacggaacctagtcttctcca

SEQ ID NO: 204234 - DNA, 25 bp, Canis familiaris
ttagatcttgagagctcctttccca

SEQ ID NO: 204235 - DNA, 25 bp, Canis familiaris
ttagatttgtagacgtcttatcacg

SEQ ID NO: 204236 - DNA, 25 bp, Canis familiaris
ttaatgaaggcgacgtgcttccctg

SEQ ID NO: 204237 - DNA, 25 bp, Canis familiaris
ttaatatatgtccagttttcccttt

SEQ ID NO: 204238 - DNA, 25 bp, Canis familiaris
ttaactatgtaatatgtccttcttt

SEQ ID NO: 204239 - DNA, 25 bp, Canis familiaris
ttaccctgattacatggctctagct

SEQ ID NO: 204240 - DNA, 25 bp, Canis familiaris
ttaccctactgatgatgtgttgttg

SEQ ID NO: 204241 - DNA, 25 bp, Canis familiaris
ttaccaccactgttgacggggagat

SEQ ID NO: 204242 - DNA, 25 bp, Canis familiaris
ttaacagaccagatgcacccgaaat

SEQ ID NO: 204243 - DNA, 25 bp, Canis familiaris
ttcaccgtccagagcaccactggac

SEQ ID NO: 204244 - DNA, 25 bp, Canis familiaris
ttcaccaaggaggacctcactgaga

SEQ ID NO: 204245 - DNA, 25 bp, Canis familiaris
ttacatcgagacggaccccgcaaac

SEQ ID NO: 204246 - DNA, 25 bp, Canis familiaris
ttacaagtgaatgcaaatcccaaca

SEQ ID NO: 204247 - DNA, 25 bp, Canis familiaris
ttcacccagaatttgaacactcaac

SEQ ID NO: 204248 - DNA, 25 bp, Canis familiaris
ttaagccacaatttaactccacacc

SEQ ID NO: 204249 - DNA, 25 bp, Canis familiaris
ttaatcctcagtttacagtatcctt

SEQ ID NO: 204250 - DNA, 25 bp, Canis familiaris
ttaatcccattatgaatgtgcctct

SEQ ID NO: 204251 - DNA, 25 bp, Canis familiaris
ttaatcccttcattgaaccggagac

SEQ ID NO: 204252 - DNA, 25 bp, Canis familiaris
ttaatcccttcattgtacaggaggg

SEQ ID NO: 204253 - DNA, 25 bp, Canis familiaris
ttaactggctctgtgtatagctgag

SEQ ID NO: 204254 - DNA, 25 bp, Canis familiaris
ttacactgccttgtctacatctgaa

SEQ ID NO: 204255 - DNA, 25 bp, Canis familiaris
ttcaacgcgcttattcacttacaac

SEQ ID NO: 204256 - DNA, 25 bp, Canis familiaris
ttcagtccctttccatgacttacaa

SEQ ID NO: 204257 - DNA, 25 bp, Canis familiaris
ttcagcgccctcaaacaactgtatc

SEQ ID NO: 204258 - DNA, 25 bp, Canis familiaris
ttcatcccctaataactttcagtaa

SEQ ID NO: 204259 - DNA, 25 bp, Canis familiaris
ttctccaacaagttaacttttctca

SEQ ID NO: 204260 - DNA, 25 bp, Canis familiaris
ttcctcaatgaatgtaaaatttgta

SEQ ID NO: 204261 - DNA, 25 bp, Canis familiaris
ttaccacgattattaaaatttgtat

SEQ ID NO: 204262 - DNA, 25 bp, Canis familiaris
ttacgctttctatatacaacttgcc

SEQ ID NO: 204263 - DNA, 25 bp, Canis familiaris
ttcctcgttaagttaccacctgact

SEQ ID NO: 204264 - DNA, 25 bp, Canis familiaris
ttcctggttaattaaatcctcagac

SEQ ID NO: 204265 - DNA, 25 bp, Canis familiaris
ttccggcagagctccaaagcctaga

SEQ ID NO: 204266 - DNA, 25 bp, Canis familiaris
ttcagggaactgccaaataggtcga

SEQ ID NO: 204267 - DNA, 25 bp, Canis familiaris
ttcaaggacactcagttaagcatct

SEQ ID NO: 204268 - DNA, 25 bp, Canis familiaris
ttacaggcacccgaggcaacaagct

SEQ ID NO: 204269 - DNA, 25 bp, Canis familiaris
ttagagacgcgccgcggaaccacat

SEQ ID NO: 204270 - DNA, 25 bp, Canis familiaris
ttaagccctggctgtgaactcagca

SEQ ID NO: 204271 - DNA, 25 bp, Canis familiaris
ttgaaccctcaaccatagactgcaa

SEQ ID NO: 204272 - DNA, 25 bp, Canis familiaris
ttgaaccttctgtcgccaaagcaga

SEQ ID NO: 204273 - DNA, 25 bp, Canis familiaris
ttaacacttcactgctccagaggac

SEQ ID NO: 204274 - DNA, 25 bp, Canis familiaris
ttagacactacctccaagatgaaac

SEQ ID NO: 204275 - DNA, 25 bp, Canis familiaris
ttaacgccacgctgtcaagtgaaga

SEQ ID NO: 204276 - DNA, 25 bp, Canis familiaris
ttactccagacccagagcaggtgaa

SEQ ID NO: 204277 - DNA, 25 bp, Canis familiaris
ttacccacaatcctggaggtcagca

SEQ ID NO: 204278 - DNA, 25 bp, Canis familiaris
ttacccacagacatatatgagtaat

SEQ ID NO: 204279 - DNA, 25 bp, Canis familiaris
ttacccattcccttacagaacacaa

SEQ ID NO: 204280 - DNA, 25 bp, Canis familiaris
ttcaggccatatgtttactcagact

SEQ ID NO: 204281 - DNA, 25 bp, Canis familiaris
ttagcctcatggttttagcatcagt

SEQ ID NO: 204282 - DNA, 25 bp, Canis familiaris
ttactgctctggctcctagcaccat

SEQ ID NO: 204283 - DNA, 25 bp, Canis familiaris
ttactatgcggacttcataacacca

SEQ ID NO: 204284 - DNA, 25 bp, Canis familiaris
ttccaagggaatgtagaagctctcc

SEQ ID NO: 204285 - DNA, 25 bp, Canis familiaris
ttcaataccggagatcatgcaagct

SEQ ID NO: 204286 - DNA, 25 bp, Canis familiaris
ttcataatccgacgatgtagaaggg

SEQ ID NO: 204287 - DNA, 25 bp, Canis familiaris
ttcagagtccgatgtgtagccagtg

SEQ ID NO: 204288 - DNA, 25 bp, Canis familiaris
ttagtgccctgttgctgtaggcgtg

SEQ ID NO: 204289 - DNA, 25 bp, Canis familiaris
ttagctctccttgtgtgggcagagt

SEQ ID NO: 204290 - DNA, 25 bp, Canis familiaris
ttagcaatttgtcagatgtggcaga

SEQ ID NO: 204291 - DNA, 25 bp, Canis familiaris
ttaccatctatgcccaagtccagaa

SEQ ID NO: 204292 - DNA, 25 bp, Canis familiaris
ttcactctactgtaaagtccatgat

SEQ ID NO: 204293 - DNA, 25 bp, Canis familiaris
ttacctacttagaactgctcaatta

SEQ ID NO: 204294 - DNA, 25 bp, Canis familiaris
ttacctactcttggccttcaagttg

SEQ ID NO: 204295 - DNA, 25 bp, Canis familiaris
ttaccttcttttgcccagagtgtag

SEQ ID NO: 204296 - DNA, 25 bp, Canis familiaris
ttacaccctttagcacaccaggaca

SEQ ID NO: 204297 - DNA, 25 bp, Canis familiaris
ttaacaccatatagcaaccccaaga

SEQ ID NO: 204298 - DNA, 25 bp, Canis familiaris
ttaaacctcagggaacacagcacga

SEQ ID NO: 204299 - DNA, 25 bp, Canis familiaris
ttaaactgtcagtcgaacaagtcat

SEQ ID NO: 204300 - DNA, 25 bp, Canis familiaris
ttaaaactatacccactcagtattt

SEQ ID NO: 204301 - DNA, 25 bp, Canis familiaris
ttagaagactaaaccctcctcatga

SEQ ID NO: 204302 - DNA, 25 bp, Canis familiaris
ttaaagcagttatttcccctctgac

SEQ ID NO: 204303 - DNA, 25 bp, Canis familiaris
ttaaggaactgtaactgccccagca

SEQ ID NO: 204304 - DNA, 25 bp, Canis familiaris
ttagagcgagcaagaacaccccgcc

SEQ ID NO: 204305 - DNA, 25 bp, Canis familiaris
ttagaaaccagtggcaccccacatc

SEQ ID NO: 204306 - DNA, 25 bp, Canis familiaris
ttagaagtgcctgctactcgacacc

SEQ ID NO: 204307 - DNA, 25 bp, Canis familiaris
ttagaagtgcctctactcaacacct

SEQ ID NO: 204308 - DNA, 25 bp, Canis familiaris
ttagaagtgcctctactcaacacct

SEQ ID NO: 204309 - DNA, 25 bp, Canis familiaris
ttagaagtgcctctactcaacacct

SEQ ID NO: 204310 - DNA, 25 bp, Canis familiaris
ttagaagtgcctctatctctacacc

SEQ ID NO: 204311 - DNA, 25 bp, Canis familiaris
ttagctttgctccttacttagcacc

SEQ ID NO: 204312 - DNA, 25 bp, Canis familiaris
ttacgatgctgtgttatcattaacc

SEQ ID NO: 204313 - DNA, 25 bp, Canis familiaris
ttactgtgatagtttagaaatatcc

SEQ ID NO: 204314 - DNA, 25 bp, Canis familiaris
ttacatcgtgagtggcaagagacat

SEQ ID NO: 204315 - DNA, 25 bp, Canis familiaris
ttacatcgatgcatataaagggaat

SEQ ID NO: 204316 - DNA, 25 bp, Canis familiaris
ttacatagcatcagaaacgggtcac

SEQ ID NO: 204317 - DNA, 25 bp, Canis familiaris
ttcaaatatctcatcaacgggtcct

SEQ ID NO: 204318 - DNA, 25 bp, Canis familiaris
ttcagcagaactgtccatgccgacc

SEQ ID NO: 204319 - DNA, 25 bp, Canis familiaris
ttcacgtcaggaaccacgacatcca

SEQ ID NO: 204320 - DNA, 25 bp, Canis familiaris
ttacttaggcttcctctggatcatc

SEQ ID NO: 204321 - DNA, 25 bp, Canis familiaris
ttcaccacagggctcttggactgcc

SEQ ID NO: 204322 - DNA, 25 bp, Canis familiaris
ttagccagcgagtagcacctaggag

SEQ ID NO: 204323 - DNA, 25 bp, Canis familiaris
ttaacaggttcccactgaagccacc

SEQ ID NO: 204324 - DNA, 25 bp, Canis familiaris
ttaaagtcatgccaggccgtaccct

SEQ ID NO: 204325 - DNA, 25 bp, Canis familiaris
ttaacacttgtcaccgataactcgg

SEQ ID NO: 204326 - DNA, 25 bp, Canis familiaris
ttaccaccttcttctgtgaaaccgg

SEQ ID NO: 204327 - DNA, 25 bp, Canis familiaris
ttagcgccccctttatgagaggtgc

SEQ ID NO: 204328 - DNA, 25 bp, Canis familiaris
ttagccctccctttggaagctggag

SEQ ID NO: 204329 - DNA, 25 bp, Canis familiaris
ttcagtcccctttgtgtgaggtggg

SEQ ID NO: 204330 - DNA, 25 bp, Canis familiaris
ttcaagcccccctattaggtgtggg

SEQ ID NO: 204331 - DNA, 25 bp, Canis familiaris
ttaagcccaccggagtaggatcaga

SEQ ID NO: 204332 - DNA, 25 bp, Canis familiaris
ttaacccatcttgcaggacgacatt

SEQ ID NO: 204333 - DNA, 25 bp, Canis familiaris
ttctgaccgtcgactagcgcaaaca

SEQ ID NO: 204334 - DNA, 25 bp, Canis familiaris
ttctcgggttttgggaaaagcacat

SEQ ID NO: 204335 - DNA, 25 bp, Canis familiaris
ttctcagggttacagataaaagtcc

SEQ ID NO: 204336 - DNA, 25 bp, Canis familiaris
ttctggggtcgcggagataaaaact

SEQ ID NO: 204337 - DNA, 25 bp, Canis familiaris
ttcaaccttggccagcaaaaaaaca

SEQ ID NO: 204338 - DNA, 25 bp, Canis familiaris
ttaatccacataccactaaaggcta

SEQ ID NO: 204339 - DNA, 25 bp, Canis familiaris
ttaagccaaatctctaaagactcaa

SEQ ID NO: 204340 - DNA, 25 bp, Canis familiaris
ttaagcttcacatccaaaaactatt

SEQ ID NO: 204341 - DNA, 25 bp, Canis familiaris
ttacctacagcattcctctaaaatt

SEQ ID NO: 204342 - DNA, 25 bp, Canis familiaris
ttaccaaccacttgaccaacaattt

SEQ ID NO: 204343 - DNA, 25 bp, Canis familiaris
ttacaacacccatgacacagaaagt

SEQ ID NO: 204344 - DNA, 25 bp, Canis familiaris
ttactataatccaagaattacagct

SEQ ID NO: 204345 - DNA, 25 bp, Canis familiaris
ttactcttatgctccagatgtacag

SEQ ID NO: 204346 - DNA, 25 bp, Canis familiaris
ttacttctcttccctattacagaaa

SEQ ID NO: 204347 - DNA, 25 bp, Canis familiaris
ttactactactcatcattcttcaca

SEQ ID NO: 204348 - DNA, 25 bp, Canis familiaris
ttcattcctttcagccatcgtcctt

SEQ ID NO: 204349 - DNA, 25 bp, Canis familiaris
ttctcccagtccagtaattcctgta

SEQ ID NO: 204350 - DNA, 25 bp, Canis familiaris
ttctcccacaaaagccagttactgt

SEQ ID NO: 204351 - DNA, 25 bp, Canis familiaris
ttcgcccacaaaattagccaagttc

SEQ ID NO: 204352 - DNA, 25 bp, Canis familiaris
ttcgcatcccaaatctaaccggtat

SEQ ID NO: 204353 - DNA, 25 bp, Canis familiaris
ttagaagccaagactggcccggcct

SEQ ID NO: 204354 - DNA, 25 bp, Canis familiaris
ttaaagccgtggccgtgcagggctt

SEQ ID NO: 204355 - DNA, 25 bp, Canis familiaris
ttaatatccgggcctgctgagttgc

SEQ ID NO: 204356 - DNA, 25 bp, Canis familiaris
ttaaatccaggtctgcattggcccc

SEQ ID NO: 204357 - DNA, 25 bp, Canis familiaris
ttagaaccatgcttttcagggcagc

SEQ ID NO: 204358 - DNA, 25 bp, Canis familiaris
ttagaagccagaccctcaggcagca

SEQ ID NO: 204359 - DNA, 25 bp, Canis familiaris
ttagcaagccagtatcctctacaac

SEQ ID NO: 204360 - DNA, 25 bp, Canis familiaris
ttagcaagtcattatgccatttaat

SEQ ID NO: 204361 - DNA, 25 bp, Canis familiaris
ttagcagtgtcagtggcctttatct

SEQ ID NO: 204362 - DNA, 25 bp, Canis familiaris
ttagcattgtcagtatgattgtgat

SEQ ID NO: 204363 - DNA, 25 bp, Canis familiaris
ttagctcaggccttgtctgtgtgga

SEQ ID NO: 204364 - DNA, 25 bp, Canis familiaris
ttagaagagccaggttcttgccaca

SEQ ID NO: 204365 - DNA, 25 bp, Canis familiaris
ttacaagcagcctggaattccactt

SEQ ID NO: 204366 - DNA, 25 bp, Canis familiaris
ttacacaggccttgaacaccgactt

SEQ ID NO: 204367 - DNA, 25 bp, Canis familiaris
ttagcaaacctgcaagcaccagcca

SEQ ID NO: 204368 - DNA, 25 bp, Canis familiaris
ttagccaaccagccaaacacagcaa

SEQ ID NO: 204369 - DNA, 25 bp, Canis familiaris
ttactagccggcgaacattcacaca

SEQ ID NO: 204370 - DNA, 25 bp, Canis familiaris
ttacttgctctaccaagcattaaac

SEQ ID NO: 204371 - DNA, 25 bp, Canis familiaris
ttaatacccaaatgcatctgaaacc

SEQ ID NO: 204372 - DNA, 25 bp, Canis familiaris
ttaaacctccactctgctaaaaaat

SEQ ID NO: 204373 - DNA, 25 bp, Canis familiaris
ttaaagcctaacttcatgtgaataa

SEQ ID NO: 204374 - DNA, 25 bp, Canis familiaris
ttagaagccaaggcattctaagtat

SEQ ID NO: 204375 - DNA, 25 bp, Canis familiaris
ttagaagccacggaattgctaagta

SEQ ID NO: 204376 - DNA, 25 bp, Canis familiaris
ttcaccctcccgattgctaatgtga

SEQ ID NO: 204377 - DNA, 25 bp, Canis familiaris
ttacccatgcctgggttgctccaat

SEQ ID NO: 204378 - DNA, 25 bp, Canis familiaris
ttacacgctggtgttcttcacttca

SEQ ID NO: 204379 - DNA, 25 bp, Canis familiaris
ttaccggagatgcctcttttctcta

SEQ ID NO: 204380 - DNA, 25 bp, Canis familiaris
ttaatgcgggagctgcgatttacac

SEQ ID NO: 204381 - DNA, 25 bp, Canis familiaris
ttcacgatggcccttggcatttaac

SEQ ID NO: 204382 - DNA, 25 bp, Canis familiaris
ttagctcataccctttatttaacaa

SEQ ID NO: 204383 - DNA, 25 bp, Canis familiaris
ttaacatgacacctatttgttgaag

SEQ ID NO: 204384 - DNA, 25 bp, Canis familiaris
ttaacgacctgtttctctgggagca

SEQ ID NO: 204385 - DNA, 25 bp, Canis familiaris
ttacccaccatgcccatgttgggga

SEQ ID NO: 204386 - DNA, 25 bp, Canis familiaris
ttaaccacctctctgatgggggacc

SEQ ID NO: 204387 - DNA, 25 bp, Canis familiaris
ttacaccactccccagagaggatta

SEQ ID NO: 204388 - DNA, 25 bp, Canis familiaris
ttacacatctcccttaggcggtata

SEQ ID NO: 204389 - DNA, 25 bp, Canis familiaris
ttaaatctcccccctggaaatcaat

SEQ ID NO: 204390 - DNA, 25 bp, Canis familiaris
ttaaaccttccctttgcacataaat

SEQ ID NO: 204391 - DNA, 25 bp, Canis familiaris
ttacacctttccacttgctgaaaag

SEQ ID NO: 204392 - DNA, 25 bp, Canis familiaris
ttaactttattttctagtaaatgca

SEQ ID NO: 204393 - DNA, 25 bp, Canis familiaris
ttaactttttattgcctaatgtata

SEQ ID NO: 204394 - DNA, 25 bp, Canis familiaris
ttaaagttctttacctcaaggattg

SEQ ID NO: 204395 - DNA, 25 bp, Canis familiaris
ttaaaggtgcttttctcctttcttg

SEQ ID NO: 204396 - DNA, 25 bp, Canis familiaris
ttaagattttttctgccgttctctg

SEQ ID NO: 204397 - DNA, 25 bp, Canis familiaris
ttctagttatttcccctggggtctg

SEQ ID NO: 204398 - DNA, 25 bp, Canis familiaris
ttaacttctttgctctcggtgaggc

SEQ ID NO: 204399 - DNA, 25 bp, Canis familiaris
ttcactctcatcactggtttggtag

SEQ ID NO: 204400 - DNA, 25 bp, Canis familiaris
ttcagcctttccagtctttgtaact

SEQ ID NO: 204401 - DNA, 25 bp, Canis familiaris
ttcactttatgggggtttgtgccct

SEQ ID NO: 204402 - DNA, 25 bp, Canis familiaris
ttcacaatattctgggtttggaccc

SEQ ID NO: 204403 - DNA, 25 bp, Canis familiaris
ttacatacaatcttgtgtgtgtgtg

SEQ ID NO: 204404 - DNA, 25 bp, Canis familiaris
ttactgatcattgtgctggctgctt

SEQ ID NO: 204405 - DNA, 25 bp, Canis familiaris
ttagctgcacgtggttggtcagtaa

SEQ ID NO: 204406 - DNA, 25 bp, Canis familiaris
ttcagctcaagtctttgtagtcctc

SEQ ID NO: 204407 - DNA, 25 bp, Canis familiaris
ttagctattgtgttctttgttccct

SEQ ID NO: 204408 - DNA, 25 bp, Canis familiaris
ttaatatctgtgtctgtctgttcta

SEQ ID NO: 204409 - DNA, 25 bp, Canis familiaris
ttaaattgtcttcctcatatctcca

SEQ ID NO: 204410 - DNA, 25 bp, Canis familiaris
ttcaaactgtaacccttcttcaagg

SEQ ID NO: 204411 - DNA, 25 bp, Canis familiaris
ttcagtagtcgaagccgttcaccaa

SEQ ID NO: 204412 - DNA, 25 bp, Canis familiaris
ttaaaggctgaggccttgtccccac

SEQ ID NO: 204413 - DNA, 25 bp, Canis familiaris
ttaagtggtacatctggctctccca

SEQ ID NO: 204414 - DNA, 25 bp, Canis familiaris
ttaactggtacatctccacatctac

SEQ ID NO: 204415 - DNA, 25 bp, Canis familiaris
ttaactcagaacacacaatcctatc

SEQ ID NO: 204416 - DNA, 25 bp, Canis familiaris
ttagctctgctgtgaaacaactttc

SEQ ID NO: 204417 - DNA, 25 bp, Canis familiaris
ttactttggggctcacacttacgaa

SEQ ID NO: 204418 - DNA, 25 bp, Canis familiaris
ttactttggaagtgccctcttggca

SEQ ID NO: 204419 - DNA, 25 bp, Canis familiaris
ttactggggagatcagccctggcat

SEQ ID NO: 204420 - DNA, 25 bp, Canis familiaris
ttaagaaggaattcaccccactggg

SEQ ID NO: 204421 - DNA, 25 bp, Canis familiaris
ttcttaagaaaatgcccacctgagg

SEQ ID NO: 204422 - DNA, 25 bp, Canis familiaris
ttcccaaggaaaggccaaccaggcg

SEQ ID NO: 204423 - DNA, 25 bp, Canis familiaris
ttagcctcagagaaacccaaccaag

SEQ ID NO: 204424 - DNA, 25 bp, Canis familiaris
ttagctgctctagaattcccataaa

SEQ ID NO: 204425 - DNA, 25 bp, Canis familiaris
ttagctcctgaaaatctctgccaag

SEQ ID NO: 204426 - DNA, 25 bp, Canis familiaris
ttagccctgcttaatctatgtacag

SEQ ID NO: 204427 - DNA, 25 bp, Canis familiaris
ttagccctgctaaactatgtacacg

SEQ ID NO: 204428 - DNA, 25 bp, Canis familiaris
ttagccttatctagaatataacacc

SEQ ID NO: 204429 - DNA, 25 bp, Canis familiaris
ttcagctttaaggacatttacattc

SEQ ID NO: 204430 - DNA, 25 bp, Canis familiaris
ttgagctttagggttatttcttatt

SEQ ID NO: 204431 - DNA, 25 bp, Canis familiaris
ttacttgaagcctattttgtctaat

SEQ ID NO: 204432 - DNA, 25 bp, Canis familiaris
ttacctgaagtttttgttagaattg

SEQ ID NO: 204433 - DNA, 25 bp, Canis familiaris
ttacttacggactcatttaaatgta

SEQ ID NO: 204434 - DNA, 25 bp, Canis familiaris
ttagctttccaactttttagaatat

SEQ ID NO: 204435 - DNA, 25 bp, Canis familiaris
ttaccttgtagcctttcttaatatg

SEQ ID NO: 204436 - DNA, 25 bp, Canis familiaris
ttactcttatcactcttctttttag

SEQ ID NO: 204437 - DNA, 25 bp, Canis familiaris
ttacctctattctttgttttgccat

SEQ ID NO: 204438 - DNA, 25 bp, Canis familiaris
ttacctcttttctttgtgtagacac

SEQ ID NO: 204439 - DNA, 25 bp, Canis familiaris
ttagcccctcttggaaattcaccac

SEQ ID NO: 204440 - DNA, 25 bp, Canis familiaris
ttagcacccctggccaaggtcatcc

SEQ ID NO: 204441 - DNA, 25 bp, Canis familiaris
ttagcacccctggccaaggtcatcc

SEQ ID NO: 204442 - DNA, 25 bp, Canis familiaris
ttaactgccgctctgaaggacacca

SEQ ID NO: 204443 - DNA, 25 bp, Canis familiaris
ttacccacgttttgaagagccagcc

SEQ ID NO: 204444 - DNA, 25 bp, Canis familiaris
ttacccacacttttcagagagctca

SEQ ID NO: 204445 - DNA, 25 bp, Canis familiaris
ttctcattagcacttaccgagccca

SEQ ID NO: 204446 - DNA, 25 bp, Canis familiaris
ttctgaattgcacaacacatcccca

SEQ ID NO: 204447 - DNA, 25 bp, Canis familiaris
ttcgacagtgcacaaaaacgccatt

SEQ ID NO: 204448 - DNA, 25 bp, Canis familiaris
ttcatgaagggcgcgacccgcgaat

SEQ ID NO: 204449 - DNA, 25 bp, Canis familiaris
ttcaggccgtatgctgacccggcct

SEQ ID NO: 204450 - DNA, 25 bp, Canis familiaris
ttcagcgccaggcgcgaattcggcc

SEQ ID NO: 204451 - DNA, 25 bp, Canis familiaris
ttacccaggagttattctcggcttt

SEQ ID NO: 204452 - DNA, 25 bp, Canis familiaris
ttacccggcagtaattcctctgtaa

SEQ ID NO: 204453 - DNA, 25 bp, Canis familiaris
ttaccacgtgggacagacctttgac

SEQ ID NO: 204454 - DNA, 25 bp, Canis familiaris
ttcaccctggaaagctgaccttgga

SEQ ID NO: 204455 - DNA, 25 bp, Canis familiaris
ttgaccgtccagagtgagcccggaa

SEQ ID NO: 204456 - DNA, 25 bp, Canis familiaris
ttacctggccaggaggaggacgaag

SEQ ID NO: 204457 - DNA, 25 bp, Canis familiaris
ttgattctgggcggaagaaaggcaa

SEQ ID NO: 204458 - DNA, 25 bp, Canis familiaris
ttgcaagaggaggagagagaaagga

SEQ ID NO: 204459 - DNA, 25 bp, Canis familiaris
ttagcaccgcaggtgtagagaaggc

SEQ ID NO: 204460 - DNA, 25 bp, Canis familiaris
ttagcccgcagccttgggaagtcac

SEQ ID NO: 204461 - DNA, 25 bp, Canis familiaris
ttagccctgcatccttacagaggta

SEQ ID NO: 204462 - DNA, 25 bp, Canis familiaris
ttaccactgagtgtgccgtgcgtga

SEQ ID NO: 204463 - DNA, 25 bp, Canis familiaris
ttacgcaatagcgacgcgctggcgt

SEQ ID NO: 204464 - DNA, 25 bp, Canis familiaris
ttgaccaaaagcagctgtccgtccg

SEQ ID NO: 204465 - DNA, 25 bp, Canis familiaris
ttactttagagcactggccagaccc

SEQ ID NO: 204466 - DNA, 25 bp, Canis familiaris
ttaattgtatccatgggccagactg

SEQ ID NO: 204467 - DNA, 25 bp, Canis familiaris
ttaactgtcaacaggcagcctgggt

SEQ ID NO: 204468 - DNA, 25 bp, Canis familiaris
ttaacatggcccgggagctggcagg

SEQ ID NO: 204469 - DNA, 25 bp, Canis familiaris
ttgcaactggcctggccgcaacagc

SEQ ID NO: 204470 - DNA, 25 bp, Canis familiaris
ttcagtcggaatggcgctcagcaga

SEQ ID NO: 204471 - DNA, 25 bp, Canis familiaris
ttcgggcgggtggcatcatggacga

SEQ ID NO: 204472 - DNA, 25 bp, Canis familiaris
ttgggacccggtggatccacgaacg

SEQ ID NO: 204473 - DNA, 25 bp, Canis familiaris
ttggagaccctgttggactacgtac

SEQ ID NO: 204474 - DNA, 25 bp, Canis familiaris
ttcaggaccctgtgagtctacctta

SEQ ID NO: 204475 - DNA, 25 bp, Canis familiaris
ttcaaccttctggaggtcaccctaa

SEQ ID NO: 204476 - DNA, 25 bp, Canis familiaris
ttcaaattacaggaccaagccctaa

SEQ ID NO: 204477 - DNA, 25 bp, Canis familiaris
ttcaaagtccaggtcacggtccaga

SEQ ID NO: 204478 - DNA, 25 bp, Canis familiaris
ttacagggcacagggcacaggtcac

SEQ ID NO: 204479 - DNA, 25 bp, Canis familiaris
ttacatggctcttcaggccaggtcc

SEQ ID NO: 204480 - DNA, 25 bp, Canis familiaris
ttactttgttcaggctgcagcttcc

SEQ ID NO: 204481 - DNA, 25 bp, Canis familiaris
ttacctattaacttagcttctctgt

SEQ ID NO: 204482 - DNA, 25 bp, Canis familiaris
ttacctataaagtttcttctaagat

SEQ ID NO: 204483 - DNA, 25 bp, Canis familiaris
ttaaaatctaactttctgtctccaa

SEQ ID NO: 204484 - DNA, 25 bp, Canis familiaris
ttaaattctcaaatatactccccaa

SEQ ID NO: 204485 - DNA, 25 bp, Canis familiaris
ttaactatccaagatgtctccagac

SEQ ID NO: 204486 - DNA, 25 bp, Canis familiaris
ttaaatatcacatcagtggtgctca

SEQ ID NO: 204487 - DNA, 25 bp, Canis familiaris
ttaagtgagcagcaaggggcttgaa

SEQ ID NO: 204488 - DNA, 25 bp, Canis familiaris
ttaaggacatggcgggcctgctgaa

SEQ ID NO: 204489 - DNA, 25 bp, Canis familiaris
ttaagaggctgtcaggtcccaggca

SEQ ID NO: 204490 - DNA, 25 bp, Canis familiaris
ttaagattcttggtcctctctagga

SEQ ID NO: 204491 - DNA, 25 bp, Canis familiaris
ttaatgtcagttgtcttctctcgaa

SEQ ID NO: 204492 - DNA, 25 bp, Canis familiaris
ttaatggcaaatgtatctattgaga

SEQ ID NO: 204493 - DNA, 25 bp, Canis familiaris
ttacttctaatgacttcaactatga

SEQ ID NO: 204494 - DNA, 25 bp, Canis familiaris
ttcacttgagactcattaccctgat

SEQ ID NO: 204495 - DNA, 25 bp, Canis familiaris
ttaagggacacctttgctgctcttg

SEQ ID NO: 204496 - DNA, 25 bp, Canis familiaris
ttaagagtgaaattacgatccgtgc

SEQ ID NO: 204497 - DNA, 25 bp, Canis familiaris
ttaatggtgaacacacttcctctcc

SEQ ID NO: 204498 - DNA, 25 bp, Canis familiaris
ttaatgggtgatgccctttcggcca

SEQ ID NO: 204499 - DNA, 25 bp, Canis familiaris
ttcaagggttccggcatttctgagt

SEQ ID NO: 204500 - DNA, 25 bp, Canis familiaris
ttgatagtggttggtggttgttggt

SEQ ID NO: 204501 - DNA, 25 bp, Canis familiaris
ttcatggtcatggtggtagtggtag

SEQ ID NO: 204502 - DNA, 25 bp, Canis familiaris
ttctcgtcatgcttgcagtactaga

SEQ ID NO: 204503 - DNA, 25 bp, Canis familiaris
ttcagcgatagctctacactcatca

SEQ ID NO: 204504 - DNA, 25 bp, Canis familiaris
ttagctgatgacaaattgcccacca

SEQ ID NO: 204505 - DNA, 25 bp, Canis familiaris
ttcagcgaagctaattccagaaaac

SEQ ID NO: 204506 - DNA, 25 bp, Canis familiaris
ttcacggatctggtccctgagaaac

SEQ ID NO: 204507 - DNA, 25 bp, Canis familiaris
ttcagggagctggtctgtctagcac

SEQ ID NO: 204508 - DNA, 25 bp, Canis familiaris
ttcagggacatgagcaccgagcgca

SEQ ID NO: 204509 - DNA, 25 bp, Canis familiaris
ttcgctgaaaggcatcggtgccacg

SEQ ID NO: 204510 - DNA, 25 bp, Canis familiaris
ttcgctaatcggtatcgtgcccaac

SEQ ID NO: 204511 - DNA, 25 bp, Canis familiaris
ttctgaaaggtgggcggcatccggc

SEQ ID NO: 204512 - DNA, 25 bp, Canis familiaris
ttctggaagtgatgcgtggctgccc

SEQ ID NO: 204513 - DNA, 25 bp, Canis familiaris
ttcataaagctgtgtgtccttccct

SEQ ID NO: 204514 - DNA, 25 bp, Canis familiaris
ttcaaaggccattttccacagccct

SEQ ID NO: 204515 - DNA, 25 bp, Canis familiaris
ttaagagatgccatgtgtccaccca

SEQ ID NO: 204516 - DNA, 25 bp, Canis familiaris
ttaatgattccacttgtctctacct

SEQ ID NO: 204517 - DNA, 25 bp, Canis familiaris
ttaatgtttactagtcttattcaga

SEQ ID NO: 204518 - DNA, 25 bp, Canis familiaris
ttacattttaatagtttctggagac

SEQ ID NO: 204519 - DNA, 25 bp, Canis familiaris
ttacatttctgtaggttgttctgga

SEQ ID NO: 204520 - DNA, 25 bp, Canis familiaris
ttaatctcctgtaattggtatctta

SEQ ID NO: 204521 - DNA, 25 bp, Canis familiaris
ttaagcacctgcccttggttcaggt

SEQ ID NO: 204522 - DNA, 25 bp, Canis familiaris
ttaaccctagccctgtgtatatgac

SEQ ID NO: 204523 - DNA, 25 bp, Canis familiaris
ttaaccctacccattgatcatttca

SEQ ID NO: 204524 - DNA, 25 bp, Canis familiaris
ttactaccatagcctttttgtatta

SEQ ID NO: 204525 - DNA, 25 bp, Canis familiaris
ttaacgcctaggccttttgtgtcta

SEQ ID NO: 204526 - DNA, 25 bp, Canis familiaris
ttaactggtaatcgcctttgcttgc

SEQ ID NO: 204527 - DNA, 25 bp, Canis familiaris
ttactaggttcacctttctgctgtg

SEQ ID NO: 204528 - DNA, 25 bp, Canis familiaris
ttactgatttctctctgttgtctgt

SEQ ID NO: 204529 - DNA, 25 bp, Canis familiaris
ttactgacttcctggtgttcttgct

SEQ ID NO: 204530 - DNA, 25 bp, Canis familiaris
ttacggaacccactgagtttctgct

SEQ ID NO: 204531 - DNA, 25 bp, Canis familiaris
ttcttcgaccccagagttacatatt

SEQ ID NO: 204532 - DNA, 25 bp, Canis familiaris
ttctactgtaacaaaagctaaattt

SEQ ID NO: 204533 - DNA, 25 bp, Canis familiaris
ttctactggcctccagaccaggagt

SEQ ID NO: 204534 - DNA, 25 bp, Canis familiaris
ttctgcgatgcagcaccagaccatg

SEQ ID NO: 204535 - DNA, 25 bp, Canis familiaris
ttcaggcgcatggtgagcagacgat

SEQ ID NO: 204536 - DNA, 25 bp, Canis familiaris
ttcagggcggcgccaattgcatcat

SEQ ID NO: 204537 - DNA, 25 bp, Canis familiaris
ttaaggctggcaacaactctctgag

SEQ ID NO: 204538 - DNA, 25 bp, Canis familiaris
ttacaggctagactgtcctctgcat

SEQ ID NO: 204539 - DNA, 25 bp, Canis familiaris
ttactggcaggtagttgctcacata

SEQ ID NO: 204540 - DNA, 25 bp, Canis familiaris
ttcacggatgcacatttgtcctatg

SEQ ID NO: 204541 - DNA, 25 bp, Canis familiaris
ttacatggtgacctttgacctcgca

SEQ ID NO: 204542 - DNA, 25 bp, Canis familiaris
ttacatggttttttgacccgcagga

SEQ ID NO: 204543 - DNA, 25 bp, Canis familiaris
ttacaagctttagttgggcaccaaa

SEQ ID NO: 204544 - DNA, 25 bp, Canis familiaris
ttcgtcactgaaagttgggacccaa

SEQ ID NO: 204545 - DNA, 25 bp, Canis familiaris
ttcaccacggaagatgcggtaccag

SEQ ID NO: 204546 - DNA, 25 bp, Canis familiaris
ttacctatgtaagatcgcttcagcc

SEQ ID NO: 204547 - DNA, 25 bp, Canis familiaris
ttactgtagtattcttgcctaaggc

SEQ ID NO: 204548 - DNA, 25 bp, Canis familiaris
ttacttactattaagcctggagctt

SEQ ID NO: 204549 - DNA, 25 bp, Canis familiaris
ttacttacatataacccccagtgct

SEQ ID NO: 204550 - DNA, 25 bp, Canis familiaris
ttggttaatttatatcagccatgtc

SEQ ID NO: 204551 - DNA, 25 bp, Canis familiaris
ttgttctagacaatcctaacctgat

SEQ ID NO: 204552 - DNA, 25 bp, Canis familiaris
ttaacaagcctgagccacagcctga

SEQ ID NO: 204553 - DNA, 25 bp, Canis familiaris
ttcagaaacacgagccgagcctgtc

SEQ ID NO: 204554 - DNA, 25 bp, Canis familiaris
ttcaaggaaggcagccggccactaa

SEQ ID NO: 204555 - DNA, 25 bp, Canis familiaris
ttcaaccaagacaccgggacaaaca

SEQ ID NO: 204556 - DNA, 25 bp, Canis familiaris
ttccccaatagcgccaaggcaaaga

SEQ ID NO: 204557 - DNA, 25 bp, Canis familiaris
ttcccaaacagctccaagctcggag

SEQ ID NO: 204558 - DNA, 25 bp, Canis familiaris
ttcctaaccagctaccagagtatgt

SEQ ID NO: 204559 - DNA, 25 bp, Canis familiaris
ttactaataagcatcctgtgtgaat

SEQ ID NO: 204560 - DNA, 25 bp, Canis familiaris
ttcactttaagttgccaggagacag

SEQ ID NO: 204561 - DNA, 25 bp, Canis familiaris
ttcctggctaagattaggacaagac

SEQ ID NO: 204562 - DNA, 25 bp, Canis familiaris
ttgccggctttgctgttggaaaggg

SEQ ID NO: 204563 - DNA, 25 bp, Canis familiaris
ttcacgtcttagcttccgaacgttt

SEQ ID NO: 204564 - DNA, 25 bp, Canis familiaris
ttacattctaacgtgcatccgaccc

SEQ ID NO: 204565 - DNA, 25 bp, Canis familiaris
ttacatcttgaaggccaccagaatc

SEQ ID NO: 204566 - DNA, 25 bp, Canis familiaris
ttaccactagcagtcaacaatgaac

SEQ ID NO: 204567 - DNA, 25 bp, Canis familiaris
ttaccaccatcaacaagctagagag

SEQ ID NO: 204568 - DNA, 25 bp, Canis familiaris
ttaccacagcctaaaccggagtcaa

SEQ ID NO: 204569 - DNA, 25 bp, Canis familiaris
ttaataagaaatcagccgtagctaa

SEQ ID NO: 204570 - DNA, 25 bp, Canis familiaris
ttaaataaacatctgactctaaaaa

SEQ ID NO: 204571 - DNA, 25 bp, Canis familiaris
ttacaataaaggctgtctctttaaa

SEQ ID NO: 204572 - DNA, 25 bp, Canis familiaris
ttaaagatgaaccctgttaatctaa

SEQ ID NO: 204573 - DNA, 25 bp, Canis familiaris
ttaacactaaccttcttatactaat

SEQ ID NO: 204574 - DNA, 25 bp, Canis familiaris
ttaaatgtttccttttctactgata

SEQ ID NO: 204575 - DNA, 25 bp, Canis familiaris
ttaaatgtgttctcttgttgcaaaa

SEQ ID NO: 204576 - DNA, 25 bp, Canis familiaris
ttaaatgtggccttttctgtgtcaa

SEQ ID NO: 204577 - DNA, 25 bp, Canis familiaris
ttacaagggcacttggatccaccca

SEQ ID NO: 204578 - DNA, 25 bp, Canis familiaris
ttaccagggttgatatccaccagcc

SEQ ID NO: 204579 - DNA, 25 bp, Canis familiaris
ttactcattgggtggacactccgcc

SEQ ID NO: 204580 - DNA, 25 bp, Canis familiaris
ttaccattttgtccatgacttcccc

SEQ ID NO: 204581 - DNA, 25 bp, Canis familiaris
ttaaatactgtgccctggcctaacc

SEQ ID NO: 204582 - DNA, 25 bp, Canis familiaris
ttgaacaacaggtgggtgctgaacc

SEQ ID NO: 204583 - DNA, 25 bp, Canis familiaris
ttcaacaggaagtggcaggtggaca

SEQ ID NO: 204584 - DNA, 25 bp, Canis familiaris
ttcaaggtgacgtggccaaggacaa

SEQ ID NO: 204585 - DNA, 25 bp, Canis familiaris
ttcaagaacacgcgcaccaacgaga

SEQ ID NO: 204586 - DNA, 25 bp, Canis familiaris
ttcagaaaccagttggctctagcta

SEQ ID NO: 204587 - DNA, 25 bp, Canis familiaris
ttcaactaccagttgctctctgggc

SEQ ID NO: 204588 - DNA, 25 bp, Canis familiaris
ttaacaatccaaatgctcctcaggc

SEQ ID NO: 204589 - DNA, 25 bp, Canis familiaris
ttaaccatcttggtgtcctcagggc

SEQ ID NO: 204590 - DNA, 25 bp, Canis familiaris
ttaagcctttgctgaagccagcctc

SEQ ID NO: 204591 - DNA, 25 bp, Canis familiaris
ttaactcaccgctgaatatcacccc

SEQ ID NO: 204592 - DNA, 25 bp, Canis familiaris
ttcaattcccaaaagtgatccacgt

SEQ ID NO: 204593 - DNA, 25 bp, Canis familiaris
ttcactatcccatagattaacccag

SEQ ID NO: 204594 - DNA, 25 bp, Canis familiaris
ttcacttgagcggggtggattgccc

SEQ ID NO: 204595 - DNA, 25 bp, Canis familiaris
ttcagcttcaaggctggtgaagtcc

SEQ ID NO: 204596 - DNA, 25 bp, Canis familiaris
ttcgccataaagcaggaaacccccg

SEQ ID NO: 204597 - DNA, 25 bp, Canis familiaris
ttggacagaaagtggcccacgccct

SEQ ID NO: 204598 - DNA, 25 bp, Canis familiaris
ttacacagaaaacggtgcctcctcc

SEQ ID NO: 204599 - DNA, 25 bp, Canis familiaris
ttaacagaaacgtgcctgaccttcg

SEQ ID NO: 204600 - DNA, 25 bp, Canis familiaris
ttaaagcaaacgtcacctgctccct

SEQ ID NO: 204601 - DNA, 25 bp, Canis familiaris
ttaagagaacaactgccctgtccgt

SEQ ID NO: 204602 - DNA, 25 bp, Canis familiaris
ttacgatgacaaacagccctaccag

SEQ ID NO: 204603 - DNA, 25 bp, Canis familiaris
ttgaagagacaaacgagcccccaga

SEQ ID NO: 204604 - DNA, 25 bp, Canis familiaris
ttaagaggcactgcgtgcccgcaca

SEQ ID NO: 204605 - DNA, 25 bp, Canis familiaris
ttaacctactacggcttgagcaccc

SEQ ID NO: 204606 - DNA, 25 bp, Canis familiaris
ttacctgtacactgacttgagacca

SEQ ID NO: 204607 - DNA, 25 bp, Canis familiaris
ttacctgtacactgacttgagacca

SEQ ID NO: 204608 - DNA, 25 bp, Canis familiaris
ttaccatttctttcacttgcagtct

SEQ ID NO: 204609 - DNA, 25 bp, Canis familiaris
ttcaccagtatcgccaggtgcacct

SEQ ID NO: 204610 - DNA, 25 bp, Canis familiaris
ttcacacagttgatgctcggtctct

SEQ ID NO: 204611 - DNA, 25 bp, Canis familiaris
ttacacagtatttgctgcctccatc

SEQ ID NO: 204612 - DNA, 25 bp, Canis familiaris
ttactgcatacatagctcctctcaa

SEQ ID NO: 204613 - DNA, 25 bp, Canis familiaris
ttaaatatgcaaactccacccatcc

SEQ ID NO: 204614 - DNA, 25 bp, Canis familiaris
ttaaatatcacaagtacacctcccc

SEQ ID NO: 204615 - DNA, 25 bp, Canis familiaris
ttcagaaacccgacaagcaaccacc

SEQ ID NO: 204616 - DNA, 25 bp, Canis familiaris
ttacataccccagtcaggaagtccc

SEQ ID NO: 204617 - DNA, 25 bp, Canis familiaris
ttgccaagccctgtcggagatgatc

SEQ ID NO: 204618 - DNA, 25 bp, Canis familiaris
ttccaagaccctgcggggtggtgga

SEQ ID NO: 204619 - DNA, 25 bp, Canis familiaris
ttcctgtaacttgcgggggttgctg

SEQ ID NO: 204620 - DNA, 25 bp, Canis familiaris
ttacatgtgaacttccatggccggt

SEQ ID NO: 204621 - DNA, 25 bp, Canis familiaris
ttacattgcccttcctgttggagat

SEQ ID NO: 204622 - DNA, 25 bp, Canis familiaris
ttactggtccagttcattctgtgag

SEQ ID NO: 204623 - DNA, 25 bp, Canis familiaris
ttaagtgtctgccttcatttggggt

SEQ ID NO: 204624 - DNA, 25 bp, Canis familiaris
ttgaaattcttttctgccttgggtc

SEQ ID NO: 204625 - DNA, 25 bp, Canis familiaris
ttactattcttgttcccttatgtgt

SEQ ID NO: 204626 - DNA, 25 bp, Canis familiaris
ttactattgattttgcccttggagc

SEQ ID NO: 204627 - DNA, 25 bp, Canis familiaris
ttactagatgtgctgtcccgggcac

SEQ ID NO: 204628 - DNA, 25 bp, Canis familiaris
ttactagaccaactcctcagagcca

SEQ ID NO: 204629 - DNA, 25 bp, Canis familiaris
ttactcttctagcctggtcaggcca

SEQ ID NO: 204630 - DNA, 25 bp, Canis familiaris
ttacgcataaaccggctacgccgtg

SEQ ID NO: 204631 - DNA, 25 bp, Canis familiaris
ttacgcataaaccggctacgccgtg

SEQ ID NO: 204632 - DNA, 25 bp, Canis familiaris
ttaagcaacaaccaggctcaccacg

SEQ ID NO: 204633 - DNA, 25 bp, Canis familiaris
ttaagacataagtagggcagccccg

SEQ ID NO: 204634 - DNA, 25 bp, Canis familiaris
ttgaaagcaatccaggggcgccagg

SEQ ID NO: 204635 - DNA, 25 bp, Canis familiaris
ttcaaagcagctctggaggccacag

SEQ ID NO: 204636 - DNA, 25 bp, Canis familiaris
ttctatggcaacaagcgagaccaag

SEQ ID NO: 204637 - DNA, 25 bp, Canis familiaris
ttcaaggagacacgggccagcgagc

SEQ ID NO: 204638 - DNA, 25 bp, Canis familiaris
ttcaagcagaagctggcgcccttgg

SEQ ID NO: 204639 - DNA, 25 bp, Canis familiaris
ttcaacagaagctgtgctgccacgg

SEQ ID NO: 204640 - DNA, 25 bp, Canis familiaris
ttcactctactattggtgcccagga

SEQ ID NO: 204641 - DNA, 25 bp, Canis familiaris
ttccctgataagcagccccggaaga

SEQ ID NO: 204642 - DNA, 25 bp, Canis familiaris
ttaccctgatacgagcccggtgaag

SEQ ID NO: 204643 - DNA, 25 bp, Canis familiaris
ttaccctgaacgagccaaggtgaaa

SEQ ID NO: 204644 - DNA, 25 bp, Canis familiaris
ttcagacccaactggccaagtggca

SEQ ID NO: 204645 - DNA, 25 bp, Canis familiaris
ttaacccatacaaggcaatacactc

SEQ ID NO: 204646 - DNA, 25 bp, Canis familiaris
ttaacctcatccctcagattacatc

SEQ ID NO: 204647 - DNA, 25 bp, Canis familiaris
ttaataatcaccccatttactcacg

SEQ ID NO: 204648 - DNA, 25 bp, Canis familiaris
ttaacattccgcccatatgtttccg

SEQ ID NO: 204649 - DNA, 25 bp, Canis familiaris
ttaagactccgccgcaagttgtctt

SEQ ID NO: 204650 - DNA, 25 bp, Canis familiaris
ttaatggtagcagtggcaactggtt

SEQ ID NO: 204651 - DNA, 25 bp, Canis familiaris
ttaatggtaaatggccttgtgtata

SEQ ID NO: 204652 - DNA, 25 bp, Canis familiaris
ttacggtatttcctccagagtatac

SEQ ID NO: 204653 - DNA, 25 bp, Canis familiaris
ttacatgttcatctcttgccaaata

SEQ ID NO: 204654 - DNA, 25 bp, Canis familiaris
ttaagtgtctgttctggactgataa

SEQ ID NO: 204655 - DNA, 25 bp, Canis familiaris
ttcacgcttttctgtgactgtagaa

SEQ ID NO: 204656 - DNA, 25 bp, Canis familiaris
ttcagccatttttaccacgatagca

SEQ ID NO: 204657 - DNA, 25 bp, Canis familiaris
ttcaacctattataagctgtacatc

SEQ ID NO: 204658 - DNA, 25 bp, Canis familiaris
ttaaccaaatgttcggtcataatca

SEQ ID NO: 204659 - DNA, 25 bp, Canis familiaris
ttacccatagattaggtgtctctaa

SEQ ID NO: 204660 - DNA, 25 bp, Canis familiaris
ttactcctcagtcagtgctgtctat

SEQ ID NO: 204661 - DNA, 25 bp, Canis familiaris
ttacatcgtagatcattgtccttaa

SEQ ID NO: 204662 - DNA, 25 bp, Canis familiaris
ttacatcgtagatcattgtccttaa

SEQ ID NO: 204663 - DNA, 25 bp, Canis familiaris
ttcagacttatttgtgataccttaa

SEQ ID NO: 204664 - DNA, 25 bp, Canis familiaris
ttcaccctgttctaacaccttgaga

SEQ ID NO: 204665 - DNA, 25 bp, Canis familiaris
ttcaacctggtttacacgcgtgact

SEQ ID NO: 204666 - DNA, 25 bp, Canis familiaris
ttaaagcatgaattccctcggtttt

SEQ ID NO: 204667 - DNA, 25 bp, Canis familiaris
ttaaagcgcaatttcccggctaaat

SEQ ID NO: 204668 - DNA, 25 bp, Canis familiaris
ttcaaggcacaatcccttggctaaa

SEQ ID NO: 204669 - DNA, 25 bp, Canis familiaris
ttaaggatcttagctctctggtgga

SEQ ID NO: 204670 - DNA, 25 bp, Canis familiaris
ttacaggtttgagctcgtgccgaca

SEQ ID NO: 204671 - DNA, 25 bp, Canis familiaris
ttacaggagttggcctgggccctgc

SEQ ID NO: 204672 - DNA, 25 bp, Canis familiaris
ttacggagtgtggtcagagcccttc

SEQ ID NO: 204673 - DNA, 25 bp, Canis familiaris
ttacggacatctttcaaaccttcac

SEQ ID NO: 204674 - DNA, 25 bp, Canis familiaris
ttacttgaaccatgagacaccctac

SEQ ID NO: 204675 - DNA, 25 bp, Canis familiaris
ttacttgtattttcagatactccta

SEQ ID NO: 204676 - DNA, 25 bp, Canis familiaris
ttacacttttgttctatactccgac

SEQ ID NO: 204677 - DNA, 25 bp, Canis familiaris
ttacttacttattttatacacacac

SEQ ID NO: 204678 - DNA, 25 bp, Canis familiaris
ttccttacttacatataacccccag

SEQ ID NO: 204679 - DNA, 25 bp, Canis familiaris
ttccttcaaaacaggttcccaatca

SEQ ID NO: 204680 - DNA, 25 bp, Canis familiaris
ttctttaagagaaccgctttccagt

SEQ ID NO: 204681 - DNA, 25 bp, Canis familiaris
ttcaattaaagaaaccctgtgcaat

SEQ ID NO: 204682 - DNA, 25 bp, Canis familiaris
ttcagttaaaggaaccaatgtgcca

SEQ ID NO: 204683 - DNA, 25 bp, Canis familiaris
ttcaggagctagtgacccaagtcaa

SEQ ID NO: 204684 - DNA, 25 bp, Canis familiaris
ttcagggtacagctcccaagtgcca

SEQ ID NO: 204685 - DNA, 25 bp, Canis familiaris
ttcattggtccaagcccagaggtgg

SEQ ID NO: 204686 - DNA, 25 bp, Canis familiaris
ttcttggatcaatggggcagtcatt

SEQ ID NO: 204687 - DNA, 25 bp, Canis familiaris
ttcgttctctgatgaggatgcccct

SEQ ID NO: 204688 - DNA, 25 bp, Canis familiaris
ttcaggtctgtgtgatagaacttta

SEQ ID NO: 204689 - DNA, 25 bp, Canis familiaris
ttcaggtctaagcataatactctct

SEQ ID NO: 204690 - DNA, 25 bp, Canis familiaris
ttcaggcttccatatatatcaccct

SEQ ID NO: 204691 - DNA, 25 bp, Canis familiaris
ttaagtgtccatgtaacactccccc

SEQ ID NO: 204692 - DNA, 25 bp, Canis familiaris
ttaatgctgtcagttttttccccaa

SEQ ID NO: 204693 - DNA, 25 bp, Canis familiaris
ttacatgctgagcactcttgttccc

SEQ ID NO: 204694 - DNA, 25 bp, Canis familiaris
ttcactctgatgcaagcttttccca

SEQ ID NO: 204695 - DNA, 25 bp, Canis familiaris
ttacttgtgttactttccccaattg

SEQ ID NO: 204696 - DNA, 25 bp, Canis familiaris
ttacatttttacctacacacacaca

SEQ ID NO: 204697 - DNA, 25 bp, Canis familiaris
ttaatcttgctttgcgttcaataaa

SEQ ID NO: 204698 - DNA, 25 bp, Canis familiaris
ttaatcttgctcttgcgttcacata

SEQ ID NO: 204699 - DNA, 25 bp, Canis familiaris
ttcacacttctgttgagttgcctac

SEQ ID NO: 204700 - DNA, 25 bp, Canis familiaris
ttcacacttcgagagcattcaaact

SEQ ID NO: 204701 - DNA, 25 bp, Canis familiaris
ttcacaattggatagctgcacaaga

SEQ ID NO: 204702 - DNA, 25 bp, Canis familiaris
ttaacgctgctcaagactccacaga

SEQ ID NO: 204703 - DNA, 25 bp, Canis familiaris
ttaactgctgtaatcacatctgtaa

SEQ ID NO: 204704 - DNA, 25 bp, Canis familiaris
ttcaagctgcttgtcactgatggaa

SEQ ID NO: 204705 - DNA, 25 bp, Canis familiaris
ttcagacgcaattccttgagcgaga

SEQ ID NO: 204706 - DNA, 25 bp, Canis familiaris
ttcatgaccaatctctgtgactcgc

SEQ ID NO: 204707 - DNA, 25 bp, Canis familiaris
ttcagtcctataccgatatctggct

SEQ ID NO: 204708 - DNA, 25 bp, Canis familiaris
ttaatagtcattccaaatatgagat

SEQ ID NO: 204709 - DNA, 25 bp, Canis familiaris
ttaatgcagctaaactcaaatcagt

SEQ ID NO: 204710 - DNA, 25 bp, Canis familiaris
ttcagaggcatataactgaggcgtg

SEQ ID NO: 204711 - DNA, 25 bp, Canis familiaris
ttcaaggcatcatggactccctgtt

SEQ ID NO: 204712 - DNA, 25 bp, Canis familiaris
ttcaaggcaaaggcaccaaacttag

SEQ ID NO: 204713 - DNA, 25 bp, Canis familiaris
ttgactggcaaacaccaaacttcat

SEQ ID NO: 204714 - DNA, 25 bp, Canis familiaris
ttacggcaatatcatcaccacacgc

SEQ ID NO: 204715 - DNA, 25 bp, Canis familiaris
ttaagcagcacatgaaacccacgcc

SEQ ID NO: 204716 - DNA, 25 bp, Canis familiaris
ttaacataacattaaccctccctct

SEQ ID NO: 204717 - DNA, 25 bp, Canis familiaris
ttaaccaacatctgagcaccttgcc

SEQ ID NO: 204718 - DNA, 25 bp, Canis familiaris
ttaactcaactgttaccctctgtgt

SEQ ID NO: 204719 - DNA, 25 bp, Canis familiaris
ttaatccaagtgttgtccccagtat

SEQ ID NO: 204720 - DNA, 25 bp, Canis familiaris
ttactgccagggctgtgcctacaaa

SEQ ID NO: 204721 - DNA, 25 bp, Canis familiaris
ttaatcacgcgatgttgactgcaca

SEQ ID NO: 204722 - DNA, 25 bp, Canis familiaris
ttaactagttgcctctatctcaatg

SEQ ID NO: 204723 - DNA, 25 bp, Canis familiaris
ttcaggccacttggactagctcgat

SEQ ID NO: 204724 - DNA, 25 bp, Canis familiaris
ttaacacacatgtcgagctagccca

SEQ ID NO: 204725 - DNA, 25 bp, Canis familiaris
ttacacatcacatgcagcgatatgc

SEQ ID NO: 204726 - DNA, 25 bp, Canis familiaris
ttactttccatctgatatgcattta

SEQ ID NO: 204727 - DNA, 25 bp, Canis familiaris
ttaagtgtgcctaaatgaattttgc

SEQ ID NO: 204728 - DNA, 25 bp, Canis familiaris
ttaactggcctgccaataattgtaa

SEQ ID NO: 204729 - DNA, 25 bp, Canis familiaris
ttaattgtgtctcatcagcaacatg

SEQ ID NO: 204730 - DNA, 25 bp, Canis familiaris
ttaattgtgtgttctgcagcctcat

SEQ ID NO: 204731 - DNA, 25 bp, Canis familiaris
ttaattgtgtctgctgtccacacca

SEQ ID NO: 204732 - DNA, 25 bp, Canis familiaris
ttacttgtgactctaccacatcctg

SEQ ID NO: 204733 - DNA, 25 bp, Canis familiaris
ttactttgatcagtttgcctctcac

SEQ ID NO: 204734 - DNA, 25 bp, Canis familiaris
ttacataaatccatagtctctagcc

SEQ ID NO: 204735 - DNA, 25 bp, Canis familiaris
ttaaacatatctgtggccttcgcct

SEQ ID NO: 204736 - DNA, 25 bp, Canis familiaris
ttcaattctcttctgacaatctcgc

SEQ ID NO: 204737 - DNA, 25 bp, Canis familiaris
ttacattctcggcgatcggtcgttt

SEQ ID NO: 204738 - DNA, 25 bp, Canis familiaris
ttacatcggcggggacgggaggctt

SEQ ID NO: 204739 - DNA, 25 bp, Canis familiaris
ttcacacggcgtaggggggacacat

SEQ ID NO: 204740 - DNA, 25 bp, Canis familiaris
ttcctaggcgtcccggggaggatca

SEQ ID NO: 204741 - DNA, 25 bp, Canis familiaris
ttcctgtaggtcccgccatagggac

SEQ ID NO: 204742 - DNA, 25 bp, Canis familiaris
ttggcttagaccctatccttgaaac

SEQ ID NO: 204743 - DNA, 25 bp, Canis familiaris
ttgtcttggtcccgcacataattaa

SEQ ID NO: 204744 - DNA, 25 bp, Canis familiaris
ttgtatgctttcagaataaattatt

SEQ ID NO: 204745 - DNA, 25 bp, Canis familiaris
ttaagttccaggcatcttcttttcc

SEQ ID NO: 204746 - DNA, 25 bp, Canis familiaris
ttctagttccccactagtcttatcc

SEQ ID NO: 204747 - DNA, 25 bp, Canis familiaris
ttcaacttcccttcggagttcatat

SEQ ID NO: 204748 - DNA, 25 bp, Canis familiaris
ttcaagccccacactgggttctaca

SEQ ID NO: 204749 - DNA, 25 bp, Canis familiaris
ttgcaaggccgcagctgggccttca

SEQ ID NO: 204750 - DNA, 25 bp, Canis familiaris
ttcagacccagcacgaggctgtatg

SEQ ID NO: 204751 - DNA, 25 bp, Canis familiaris
ttcacacccactaggatagctttaa

SEQ ID NO: 204752 - DNA, 25 bp, Canis familiaris
ttcatcaccggcttagggtttcaac

SEQ ID NO: 204753 - DNA, 25 bp, Canis familiaris
ttcccgaggcaaaccgttgtcagac

SEQ ID NO: 204754 - DNA, 25 bp, Canis familiaris
ttcaccgaggcctccatgatgatgt

SEQ ID NO: 204755 - DNA, 25 bp, Canis familiaris
ttcatgcagtggcccacaccaaagt

SEQ ID NO: 204756 - DNA, 25 bp, Canis familiaris
ttcatgcagtgcctggaatcctcac

SEQ ID NO: 204757 - DNA, 25 bp, Canis familiaris
ttctgagatggcggtaccatgccct

SEQ ID NO: 204758 - DNA, 25 bp, Canis familiaris
ttcttgagcggcctgaagcgccaga

SEQ ID NO: 204759 - DNA, 25 bp, Canis familiaris
ttgtatgactagaccaactccaata

SEQ ID NO: 204760 - DNA, 25 bp, Canis familiaris
ttgggactctgtgctgagcccatga

SEQ ID NO: 204761 - DNA, 25 bp, Canis familiaris
ttaaacatcttcctggtgcatcaaa

SEQ ID NO: 204762 - DNA, 25 bp, Canis familiaris
ttaagacatcattcaggccccaaac

SEQ ID NO: 204763 - DNA, 25 bp, Canis familiaris
ttaagagcaacaacagccccacaac

SEQ ID NO: 204764 - DNA, 25 bp, Canis familiaris
ttacaggacacaaccaccagcaaca

SEQ ID NO: 204765 - DNA, 25 bp, Canis familiaris
ttcacagagaaacacacccgactcc

SEQ ID NO: 204766 - DNA, 25 bp, Canis familiaris
ttacagaaaaccaggtccatgtccc

SEQ ID NO: 204767 - DNA, 25 bp, Canis familiaris
ttcactggagaacttgggtctcatt

SEQ ID NO: 204768 - DNA, 25 bp, Canis familiaris
ttaatggcagaccttgcggccacgt

SEQ ID NO: 204769 - DNA, 25 bp, Canis familiaris
ttacatggcagtggttcccagacct

SEQ ID NO: 204770 - DNA, 25 bp, Canis familiaris
ttaattgcctggctctccagattcc

SEQ ID NO: 204771 - DNA, 25 bp, Canis familiaris
ttgaagggtggtcgaccgagtctcc

SEQ ID NO: 204772 - DNA, 25 bp, Canis familiaris
ttacattgtgtgtgtgtccggtttc

SEQ ID NO: 204773 - DNA, 25 bp, Canis familiaris
ttaagttatgcttggtcctgggttt

SEQ ID NO: 204774 - DNA, 25 bp, Canis familiaris
ttaaaattctccctttgcatgtttt

SEQ ID NO: 204775 - DNA, 25 bp, Canis familiaris
ttaacttgttcagctattcttttta

SEQ ID NO: 204776 - DNA, 25 bp, Canis familiaris
ttacaatctttggctttctttcttt

SEQ ID NO: 204777 - DNA, 25 bp, Canis familiaris
ttactgctgctgctgtttttttttt

SEQ ID NO: 204778 - DNA, 25 bp, Canis familiaris
ttactgttggtgttgttgccgctgt

SEQ ID NO: 204779 - DNA, 25 bp, Canis familiaris
ttgaatgctggtggttctatccctt

SEQ ID NO: 204780 - DNA, 25 bp, Canis familiaris
ttacatgctgtgagcgatttcccat

SEQ ID NO: 204781 - DNA, 25 bp, Canis familiaris
ttccgctgagagctgcatttcacac

SEQ ID NO: 204782 - DNA, 25 bp, Canis familiaris
ttctacaatgagctgcgtgtggctc

SEQ ID NO: 204783 - DNA, 25 bp, Canis familiaris
ttctaccgaagtggagtggcagctc

SEQ ID NO: 204784 - DNA, 25 bp, Canis familiaris
ttctagccctggagggagctctcgg

SEQ ID NO: 204785 - DNA, 25 bp, Canis familiaris
ttcaccccgtgaataaactctctgg

SEQ ID NO: 204786 - DNA, 25 bp, Canis familiaris
ttactactactactactactactac

SEQ ID NO: 204787 - DNA, 25 bp, Canis familiaris
ttactactactgttgatcttccctt

SEQ ID NO: 204788 - DNA, 25 bp, Canis familiaris
ttaatgccttctgtgatctggcctc

SEQ ID NO: 204789 - DNA, 25 bp, Canis familiaris
ttcatagcctttgtagcttggtggg

SEQ ID NO: 204790 - DNA, 25 bp, Canis familiaris
ttcaaagctaatgatcacggatatg

SEQ ID NO: 204791 - DNA, 25 bp, Canis familiaris
ttcacactgtaacctccaggactgt

SEQ ID NO: 204792 - DNA, 25 bp, Canis familiaris
ttcaagcttttgctccagtacctaa

SEQ ID NO: 204793 - DNA, 25 bp, Canis familiaris
ttcaacttcttgctttatactctaa

SEQ ID NO: 204794 - DNA, 25 bp, Canis familiaris
ttaactgtcctgcttactttatata

SEQ ID NO: 204795 - DNA, 25 bp, Canis familiaris
ttaaataccatttcccatattaaat

SEQ ID NO: 204796 - DNA, 25 bp, Canis familiaris
ttaaatcccacgtatcttcttcaca

SEQ ID NO: 204797 - DNA, 25 bp, Canis familiaris
ttcaaatcctcattaacctttctag

SEQ ID NO: 204798 - DNA, 25 bp, Canis familiaris
ttaattttctaagcagtctgtctat

SEQ ID NO: 204799 - DNA, 25 bp, Canis familiaris
ttgaattttgtatataatcgtcttt

SEQ ID NO: 204800 - DNA, 25 bp, Canis familiaris
ttacatttttacaagattacatttt

SEQ ID NO: 204801 - DNA, 25 bp, Canis familiaris
ttgactttttacaccttgtttctgt

SEQ ID NO: 204802 - DNA, 25 bp, Canis familiaris
ttactatttctttatccctgtttat

SEQ ID NO: 204803 - DNA, 25 bp, Canis familiaris
ttaaatgttcttgtctggctgttgc

SEQ ID NO: 204804 - DNA, 25 bp, Canis familiaris
ttaaatgttcttgtctggctgttgc

SEQ ID NO: 204805 - DNA, 25 bp, Canis familiaris
ttaaatgttcttgtctggctgttgc

SEQ ID NO: 204806 - DNA, 25 bp, Canis familiaris
ttaaatgttcttgtctggctgttgc

SEQ ID NO: 204807 - DNA, 25 bp, Canis familiaris
ttaaatgttcttgtctggctgttgc

SEQ ID NO: 204808 - DNA, 25 bp, Canis familiaris
ttaaatgttcttgtctggctgttgc

SEQ ID NO: 204809 - DNA, 25 bp, Canis familiaris
ttaaatgttcttgtctggctgttgc

SEQ ID NO: 204810 - DNA, 25 bp, Canis familiaris
ttaaatgttcttgtctggctgttgc

SEQ ID NO: 204811 - DNA, 25 bp, Canis familiaris
ttaaatgttcttgtctggctgttgc

SEQ ID NO: 204812 - DNA, 25 bp, Canis familiaris
ttaaatgtttatgctgtggctgata

SEQ ID NO: 204813 - DNA, 25 bp, Canis familiaris
ttcaagtgtttcatctgtcgccaga

SEQ ID NO: 204814 - DNA, 25 bp, Canis familiaris
ttcaagcttggcagtcattaccaga

SEQ ID NO: 204815 - DNA, 25 bp, Canis familiaris
ttcttttgagccttttaccagctcc

SEQ ID NO: 204816 - DNA, 25 bp, Canis familiaris
ttctttaggcctttccacaactagg

SEQ ID NO: 204817 - DNA, 25 bp, Canis familiaris
ttcttagggcttttgcccctgaatg

SEQ ID NO: 204818 - DNA, 25 bp, Canis familiaris
ttcttgggagcaagatttcccccag

SEQ ID NO: 204819 - DNA, 25 bp, Canis familiaris
ttcttgtgggaaattccccgcgctt

SEQ ID NO: 204820 - DNA, 25 bp, Canis familiaris
ttctcgggagaagggccctggagct

SEQ ID NO: 204821 - DNA, 25 bp, Canis familiaris
ttctcaacggaagggcctcaacctt

SEQ ID NO: 204822 - DNA, 25 bp, Canis familiaris
ttcaagacgaaatacccatttttct

SEQ ID NO: 204823 - DNA, 25 bp, Canis familiaris
ttcacagaccaatacccatttttct

SEQ ID NO: 204824 - DNA, 25 bp, Canis familiaris
ttcacaactgacacaactgtttttc

SEQ ID NO: 204825 - DNA, 25 bp, Canis familiaris
ttcaatgggaagcaacttttggcaa

SEQ ID NO: 204826 - DNA, 25 bp, Canis familiaris
ttcagtgaagtaaacagtatttgga

SEQ ID NO: 204827 - DNA, 25 bp, Canis familiaris
ttcattaaaataccaccttccagca

SEQ ID NO: 204828 - DNA, 25 bp, Canis familiaris
ttgaggaaattgtgccctgtcagaa

SEQ ID NO: 204829 - DNA, 25 bp, Canis familiaris
ttcactgccaagggtccctgtcaga

SEQ ID NO: 204830 - DNA, 25 bp, Canis familiaris
ttcagggcaagaggctcaagttaca

SEQ ID NO: 204831 - DNA, 25 bp, Canis familiaris
ttaaggacacatagacaagttgaca

SEQ ID NO: 204832 - DNA, 25 bp, Canis familiaris
ttcgaggtttcgtcaggatctgcac

SEQ ID NO: 204833 - DNA, 25 bp, Canis familiaris
ttcgaggtgcttcgtggcaatctga

SEQ ID NO: 204834 - DNA, 25 bp, Canis familiaris
ttcggggctgtcagggcttagggag

SEQ ID NO: 204835 - DNA, 25 bp, Canis familiaris
ttcgtcttcgaccgggtttggtgag

SEQ ID NO: 204836 - DNA, 25 bp, Canis familiaris
ttcttgttcgaccgttgtttgtcac

SEQ ID NO: 204837 - DNA, 25 bp, Canis familiaris
ttcttttccccacatttgttcataa

SEQ ID NO: 204838 - DNA, 25 bp, Canis familiaris
ttctaaaagccctgtgatttgaaaa

SEQ ID NO: 204839 - DNA, 25 bp, Canis familiaris
ttcgaaaacccattaatttgccaat

SEQ ID NO: 204840 - DNA, 25 bp, Canis familiaris
ttcaggcaaacccaaaatgtattaa

SEQ ID NO: 204841 - DNA, 25 bp, Canis familiaris
ttcagttcaacccaaatctcttgta

SEQ ID NO: 204842 - DNA, 25 bp, Canis familiaris
ttcacatgtcaacaaaggctcctga

SEQ ID NO: 204843 - DNA, 25 bp, Canis familiaris
ttcagaacatgagcagaagagtcct

SEQ ID NO: 204844 - DNA, 25 bp, Canis familiaris
ttcagaccatgaacagtgaccccgg

SEQ ID NO: 204845 - DNA, 25 bp, Canis familiaris
ttcagcaccatcagctatagcaccc

SEQ ID NO: 204846 - DNA, 25 bp, Canis familiaris
ttcacaatctcaatgcctaaacctt

SEQ ID NO: 204847 - DNA, 25 bp, Canis familiaris
ttaaattattgccctatccgctcta

SEQ ID NO: 204848 - DNA, 25 bp, Canis familiaris
ttaaaattgtccgttccatctgtga

SEQ ID NO: 204849 - DNA, 25 bp, Canis familiaris
ttacaagttttccttccagcattgc

SEQ ID NO: 204850 - DNA, 25 bp, Canis familiaris
ttcacaagctttctcccaagcattc

SEQ ID NO: 204851 - DNA, 25 bp, Canis familiaris
ttcaaagctcaatatcccatcaacc

SEQ ID NO: 204852 - DNA, 25 bp, Canis familiaris
ttctgggctgtgaagaccccaactc

SEQ ID NO: 204853 - DNA, 25 bp, Canis familiaris
ttgtgctggcttgtactgggaacgc

SEQ ID NO: 204854 - DNA, 25 bp, Canis familiaris
ttgtctacatggttcctggggtgcc

SEQ ID NO: 204855 - DNA, 25 bp, Canis familiaris
ttgagtactggccccaagaggatcc

SEQ ID NO: 204856 - DNA, 25 bp, Canis familiaris
ttcaggacggccccaatgaggatgg

SEQ ID NO: 204857 - DNA, 25 bp, Canis familiaris
ttcagagacggccgtgtcgtggggc

SEQ ID NO: 204858 - DNA, 25 bp, Canis familiaris
ttcagacttgggagacgaggtggct

SEQ ID NO: 204859 - DNA, 25 bp, Canis familiaris
ttgtagctcgggtcgaccaagggga

SEQ ID NO: 204860 - DNA, 25 bp, Canis familiaris
ttacagccggcggcggcgaagcagg

SEQ ID NO: 204861 - DNA, 25 bp, Canis familiaris
ttaaagcgtgcggcgggaagatgag

SEQ ID NO: 204862 - DNA, 25 bp, Canis familiaris
ttcacagagttccctggagcaggag

SEQ ID NO: 204863 - DNA, 25 bp, Canis familiaris
ttcagatgagttgtccaatctcgag

SEQ ID NO: 204864 - DNA, 25 bp, Canis familiaris
ttcaattgttgcttctgacactcga

SEQ ID NO: 204865 - DNA, 25 bp, Canis familiaris
ttcacttgtggacgctaagcctgac

SEQ ID NO: 204866 - DNA, 25 bp, Canis familiaris
ttaacactggacctacacacacaca

SEQ ID NO: 204867 - DNA, 25 bp, Canis familiaris
ttaataaagagtaacacacacacac

SEQ ID NO: 204868 - DNA, 25 bp, Canis familiaris
ttacatatgttggaccagccccatc

SEQ ID NO: 204869 - DNA, 25 bp, Canis familiaris
ttgatgcagtttgaccacaacgccg

SEQ ID NO: 204870 - DNA, 25 bp, Canis familiaris
ttcagactcttaaccacatagcctc

SEQ ID NO: 204871 - DNA, 25 bp, Canis familiaris
ttcaagctcttctggcagcgattct

SEQ ID NO: 204872 - DNA, 25 bp, Canis familiaris
ttaatcttcatctgttctgttctct

SEQ ID NO: 204873 - DNA, 25 bp, Canis familiaris
ttaatatttcactttctgtcctcta

SEQ ID NO: 204874 - DNA, 25 bp, Canis familiaris
ttcaggatttcctgtgttccttcac

SEQ ID NO: 204875 - DNA, 25 bp, Canis familiaris
ttaagtttccaattttgcattccgt

SEQ ID NO: 204876 - DNA, 25 bp, Canis familiaris
ttaaattgtcttttgttctctccgt

SEQ ID NO: 204877 - DNA, 25 bp, Canis familiaris
ttcaaacgatttttgttccatcggc

SEQ ID NO: 204878 - DNA, 25 bp, Canis familiaris
ttcacccgttgaagtttcctttcat

SEQ ID NO: 204879 - DNA, 25 bp, Canis familiaris
ttcacccgactgctgtagtcgtttt

SEQ ID NO: 204880 - DNA, 25 bp, Canis familiaris
ttcacctgccctcagtcaagggttt

SEQ ID NO: 204881 - DNA, 25 bp, Canis familiaris
ttcacccacctgaaaccaggcactt

SEQ ID NO: 204882 - DNA, 25 bp, Canis familiaris
ttcaccacaaggaaacaaggctatg

SEQ ID NO: 204883 - DNA, 25 bp, Canis familiaris
ttcaccagggtggagacaagtgcca

SEQ ID NO: 204884 - DNA, 25 bp, Canis familiaris
ttcagcaagggacaacaaagctcag

SEQ ID NO: 204885 - DNA, 25 bp, Canis familiaris
ttcacaagagaacacccatcactgg

SEQ ID NO: 204886 - DNA, 25 bp, Canis familiaris
ttcaataggagagacagccatccca

SEQ ID NO: 204887 - DNA, 25 bp, Canis familiaris
ttaaagtgaaaaccaagcccagcta

SEQ ID NO: 204888 - DNA, 25 bp, Canis familiaris
ttcaaagtcaacatggcaggcccct

SEQ ID NO: 204889 - DNA, 25 bp, Canis familiaris
ttcaaagccaacttctcagttactt

SEQ ID NO: 204890 - DNA, 25 bp, Canis familiaris
ttcaacctacacaaccatgttcttt

SEQ ID NO: 204891 - DNA, 25 bp, Canis familiaris
ttcagacctacacaggttccatcgt

SEQ ID NO: 204892 - DNA, 25 bp, Canis familiaris
ttcaacttacatccaaaccaatact

SEQ ID NO: 204893 - DNA, 25 bp, Canis familiaris
ttaacctaagactcccaatcatctc

SEQ ID NO: 204894 - DNA, 25 bp, Canis familiaris
ttaactcttatatagcccaacacgc

SEQ ID NO: 204895 - DNA, 25 bp, Canis familiaris
ttaaccttaatatgcccaaccagca

SEQ ID NO: 204896 - DNA, 25 bp, Canis familiaris
ttgacacctctgagtaccaaaccaa

SEQ ID NO: 204897 - DNA, 25 bp, Canis familiaris
ttgatcccttgtgttaaataccttc

SEQ ID NO: 204898 - DNA, 25 bp, Canis familiaris
ttgtttcggttttaaattccatgat

SEQ ID NO: 204899 - DNA, 25 bp, Canis familiaris
ttgattcacgagatttaaacccgtt

SEQ ID NO: 204900 - DNA, 25 bp, Canis familiaris
ttgttcccgttaagaaacctgcagg

SEQ ID NO: 204901 - DNA, 25 bp, Canis familiaris
ttgcattcctcgatgggaaccctgc

SEQ ID NO: 204902 - DNA, 25 bp, Canis familiaris
ttcaagccctgaatggtaacccaca

SEQ ID NO: 204903 - DNA, 25 bp, Canis familiaris
ttcagggtcatgagttaggcctcac

SEQ ID NO: 204904 - DNA, 25 bp, Canis familiaris
ttcagtggggacgctgaggccacgc

SEQ ID NO: 204905 - DNA, 25 bp, Canis familiaris
ttcagggggtcatctgggacatcca

SEQ ID NO: 204906 - DNA, 25 bp, Canis familiaris
ttcagatggagccacatccgggact

SEQ ID NO: 204907 - DNA, 25 bp, Canis familiaris
ttcaggtcagcctcagggctggcac

SEQ ID NO: 204908 - DNA, 25 bp, Canis familiaris
ttcagaacatgatcaagggcgtgac

SEQ ID NO: 204909 - DNA, 25 bp, Canis familiaris
ttcagtaaatactagctgctgctta

SEQ ID NO: 204910 - DNA, 25 bp, Canis familiaris
ttcagcatacgtagctgcagcccca

SEQ ID NO: 204911 - DNA, 25 bp, Canis familiaris
ttcagcccgatggccagatgccaag

SEQ ID NO: 204912 - DNA, 25 bp, Canis familiaris
ttcagcccgatggccagatgccaag

SEQ ID NO: 204913 - DNA, 25 bp, Canis familiaris
ttaaccacagcgcatgcatgccagg

SEQ ID NO: 204914 - DNA, 25 bp, Canis familiaris
ttgagacgcaagctctggctgggtc

SEQ ID NO: 204915 - DNA, 25 bp, Canis familiaris
ttgaacgtcgagttgttggtgccgc

SEQ ID NO: 204916 - DNA, 25 bp, Canis familiaris
ttaacctcagagatgatgtggtgaa

SEQ ID NO: 204917 - DNA, 25 bp, Canis familiaris
ttacacctccaccttgttgatgaac

SEQ ID NO: 204918 - DNA, 25 bp, Canis familiaris
ttcacagttaacgttcttgtcagca

SEQ ID NO: 204919 - DNA, 25 bp, Canis familiaris
ttgagcgttcaacttttgattacac

SEQ ID NO: 204920 - DNA, 25 bp, Canis familiaris
ttggtgttgatagccttgatccgag

SEQ ID NO: 204921 - DNA, 25 bp, Canis familiaris
ttgagcttaagatacttaccgagca

SEQ ID NO: 204922 - DNA, 25 bp, Canis familiaris
ttccttacagaataatgaccgccta

SEQ ID NO: 204923 - DNA, 25 bp, Canis familiaris
ttccctactgaagactggagcgctc

SEQ ID NO: 204924 - DNA, 25 bp, Canis familiaris
ttcaccccgagggagatggcttccc

SEQ ID NO: 204925 - DNA, 25 bp, Canis familiaris
ttcacctgccagctggagaacttcc

SEQ ID NO: 204926 - DNA, 25 bp, Canis familiaris
ttcagtctgccacaggaaccaatta

SEQ ID NO: 204927 - DNA, 25 bp, Canis familiaris
ttcgctattaccagtagccaatcga

SEQ ID NO: 204928 - DNA, 25 bp, Canis familiaris
ttgagccactatgtcggagaaacga

SEQ ID NO: 204929 - DNA, 25 bp, Canis familiaris
ttcacacagcttctatggaaaacag

SEQ ID NO: 204930 - DNA, 25 bp, Canis familiaris
ttcagcccctgcatcatggaaataa

SEQ ID NO: 204931 - DNA, 25 bp, Canis familiaris
ttcacccttcattatcgtcgaattt

SEQ ID NO: 204932 - DNA, 25 bp, Canis familiaris
ttcacccattttccagtaacttcta

SEQ ID NO: 204933 - DNA, 25 bp, Canis familiaris
ttccccctacttctaatttgctgaa

SEQ ID NO: 204934 - DNA, 25 bp, Canis familiaris
ttcctccttttacaaaattgtacat

SEQ ID NO: 204935 - DNA, 25 bp, Canis familiaris
ttctcccttcttccaacaaaagtat

SEQ ID NO: 204936 - DNA, 25 bp, Canis familiaris
ttccggttcttccaaataaatgtca

SEQ ID NO: 204937 - DNA, 25 bp, Canis familiaris
ttcacaggttccagggacggatggc

SEQ ID NO: 204938 - DNA, 25 bp, Canis familiaris
ttcaggccttccagtacacggatga

SEQ ID NO: 204939 - DNA, 25 bp, Canis familiaris
ttcagaagtttcagatccatcggga

SEQ ID NO: 204940 - DNA, 25 bp, Canis familiaris
ttggagaggtatatacccgtgagag

SEQ ID NO: 204941 - DNA, 25 bp, Canis familiaris
ttaagtggattatcaccctcgcagg

SEQ ID NO: 204942 - DNA, 25 bp, Canis familiaris
ttaagtgacctgaacccagcatcgc

SEQ ID NO: 204943 - DNA, 25 bp, Canis familiaris
ttaagtcactcagtgcaccacactc

SEQ ID NO: 204944 - DNA, 25 bp, Canis familiaris
ttaactgcctcatcagccaacaagg

SEQ ID NO: 204945 - DNA, 25 bp, Canis familiaris
ttaacacagctcatagccaaataaa

SEQ ID NO: 204946 - DNA, 25 bp, Canis familiaris
ttaacctgcctttcgaaccaagaag

SEQ ID NO: 204947 - DNA, 25 bp, Canis familiaris
ttaagcctcttttgccaaccataaa

SEQ ID NO: 204948 - DNA, 25 bp, Canis familiaris
ttaagtcttttatttcactcagtaa

SEQ ID NO: 204949 - DNA, 25 bp, Canis familiaris
ttaattctatcctatattagcaaaa

SEQ ID NO: 204950 - DNA, 25 bp, Canis familiaris
ttacaatttcttaatatcatcaaaa

SEQ ID NO: 204951 - DNA, 25 bp, Canis familiaris
ttcacatgtggaaattataccaaca

SEQ ID NO: 204952 - DNA, 25 bp, Canis familiaris
ttaagtggacacctgcagtgccaac

SEQ ID NO: 204953 - DNA, 25 bp, Canis familiaris
ttcaatctgagaaggcagcaggctc

SEQ ID NO: 204954 - DNA, 25 bp, Canis familiaris
ttcacacagatgagggcatggggct

SEQ ID NO: 204955 - DNA, 25 bp, Canis familiaris
ttcactgaatctttgggctgggcta

SEQ ID NO: 204956 - DNA, 25 bp, Canis familiaris
ttcagcagaactttgcaggccggaa

SEQ ID NO: 204957 - DNA, 25 bp, Canis familiaris
ttctgcgagacctgcgggagcaaca

SEQ ID NO: 204958 - DNA, 25 bp, Canis familiaris
ttcagcaaagtctggcgagatgaac

SEQ ID NO: 204959 - DNA, 25 bp, Canis familiaris
ttcactacagtgtggcttgatagct

SEQ ID NO: 204960 - DNA, 25 bp, Canis familiaris
ttcactgctggccaacagtttcacc

SEQ ID NO: 204961 - DNA, 25 bp, Canis familiaris
ttcttgcggctcttcgaataaccaa

SEQ ID NO: 204962 - DNA, 25 bp, Canis familiaris
ttctggatgtactggacaaacacct

SEQ ID NO: 204963 - DNA, 25 bp, Canis familiaris
ttctgggtttgatgccaggacccta

SEQ ID NO: 204964 - DNA, 25 bp, Canis familiaris
ttctcgactttccccgagaagccaa

SEQ ID NO: 204965 - DNA, 25 bp, Canis familiaris
ttctaagttttgagaggcaagccaa

SEQ ID NO: 204966 - DNA, 25 bp, Canis familiaris
ttctacctttggaggattgaagcaa

SEQ ID NO: 204967 - DNA, 25 bp, Canis familiaris
ttctacgtggtgtatgtggaaaaca

SEQ ID NO: 204968 - DNA, 25 bp, Canis familiaris
ttctcacctgcacttagaggaaatg

SEQ ID NO: 204969 - DNA, 25 bp, Canis familiaris
ttctcgctccattctgaagtaaaga

SEQ ID NO: 204970 - DNA, 25 bp, Canis familiaris
ttctactacccgcactacgaggtgc

SEQ ID NO: 204971 - DNA, 25 bp, Canis familiaris
ttgctggcttccgtaacccagaagg

SEQ ID NO: 204972 - DNA, 25 bp, Canis familiaris
ttctgagcttcaggttgacattaaa

SEQ ID NO: 204973 - DNA, 25 bp, Canis familiaris
ttctagctgtccttggagaattaaa

SEQ ID NO: 204974 - DNA, 25 bp, Canis familiaris
ttctggctgttccatgggagaatat

SEQ ID NO: 204975 - DNA, 25 bp, Canis familiaris
ttcgtgcatttgtgagccaaagaaa

SEQ ID NO: 204976 - DNA, 25 bp, Canis familiaris
ttccttcttcgatgccaaagccaaa

SEQ ID NO: 204977 - DNA, 25 bp, Canis familiaris
ttcttcccactgtgccaaaaacaga

SEQ ID NO: 204978 - DNA, 25 bp, Canis familiaris
ttcatttcccaggccaaaaaaacag

SEQ ID NO: 204979 - DNA, 25 bp, Canis familiaris
ttaattccccaaataaaatgttcat

SEQ ID NO: 204980 - DNA, 25 bp, Canis familiaris
ttaattctggccttgaaaaagattt

SEQ ID NO: 204981 - DNA, 25 bp, Canis familiaris
ttcaagttgcccaatgacaagaaag

SEQ ID NO: 204982 - DNA, 25 bp, Canis familiaris
ttcacagttccctagccagaaacat

SEQ ID NO: 204983 - DNA, 25 bp, Canis familiaris
ttaagcattgctcctagcaagtaaa

SEQ ID NO: 204984 - DNA, 25 bp, Canis familiaris
ttaatatcactggctccatattaaa

SEQ ID NO: 204985 - DNA, 25 bp, Canis familiaris
ttcaattctagcttctctgcattaa

SEQ ID NO: 204986 - DNA, 25 bp, Canis familiaris
ttcaatatctcttgtcctttcaggc

SEQ ID NO: 204987 - DNA, 25 bp, Canis familiaris
ttcactgtttcgatcgtacagggga

SEQ ID NO: 204988 - DNA, 25 bp, Canis familiaris
ttcagtttatagctcgtagttggat

SEQ ID NO: 204989 - DNA, 25 bp, Canis familiaris
ttcactttcaagccttgtccggaga

SEQ ID NO: 204990 - DNA, 25 bp, Canis familiaris
ttcactttaaaaactccaggtcaga

SEQ ID NO: 204991 - DNA, 25 bp, Canis familiaris
ttcagatttacaacccccaggacaa

SEQ ID NO: 204992 - DNA, 25 bp, Canis familiaris
ttcagtcggagcacatccttcggaa

SEQ ID NO: 204993 - DNA, 25 bp, Canis familiaris
ttcattcaggatctactctaccagt

SEQ ID NO: 204994 - DNA, 25 bp, Canis familiaris
ttcttcatacatccataatctacag

SEQ ID NO: 204995 - DNA, 25 bp, Canis familiaris
ttcttaccaccatgttaactaatcc

SEQ ID NO: 204996 - DNA, 25 bp, Canis familiaris
ttcattaccatctccttaggcgtat

SEQ ID NO: 204997 - DNA, 25 bp, Canis familiaris
ttcattaccatctccttaggcgtat

SEQ ID NO: 204998 - DNA, 25 bp, Canis familiaris
ttcattaccatctccttaggcgtat

SEQ ID NO: 204999 - DNA, 25 bp, Canis familiaris
ttcattaccatctccttaggcgtat

SEQ ID NO: 205000 - DNA, 25 bp, Canis familiaris
ttcatcttcctcttcatcatgtagg

SEQ ID NO: 205001 - DNA, 25 bp, Canis familiaris
ttcagttcctcagtcctctgagcaa

SEQ ID NO: 205002 - DNA, 25 bp, Canis familiaris
ttgcatgtcataaccccactaggaa

SEQ ID NO: 205003 - DNA, 25 bp, Canis familiaris
ttgcatctgaagacatcagccacat

SEQ ID NO: 205004 - DNA, 25 bp, Canis familiaris
ttcacagatgtcctcagccatcatc

SEQ ID NO: 205005 - DNA, 25 bp, Canis familiaris
ttcagacttctgtcctcatgcatta

SEQ ID NO: 205006 - DNA, 25 bp, Canis familiaris
ttcagccatttctaccacgatagca

SEQ ID NO: 205007 - DNA, 25 bp, Canis familiaris
ttcacgaccgagtaccagatagcag

SEQ ID NO: 205008 - DNA, 25 bp, Canis familiaris
ttcacacacggaccattcttagcag

SEQ ID NO: 205009 - DNA, 25 bp, Canis familiaris
ttcaccaccagctgcatcagcttac

SEQ ID NO: 205010 - DNA, 25 bp, Canis familiaris
ttggcaactggctctcatgcagtac

SEQ ID NO: 205011 - DNA, 25 bp, Canis familiaris
ttggcaatgcagtccactgatagta

SEQ ID NO: 205012 - DNA, 25 bp, Canis familiaris
ttcacagagatatctctatatgaga

SEQ ID NO: 205013 - DNA, 25 bp, Canis familiaris
ttcaagagtcagcctcgttcgcaat

SEQ ID NO: 205014 - DNA, 25 bp, Canis familiaris
ttcatactgtcacctcttatccaga

SEQ ID NO: 205015 - DNA, 25 bp, Canis familiaris
ttcatccttaccagtggccaagcac

SEQ ID NO: 205016 - DNA, 25 bp, Canis familiaris
ttcagcacattgagtttcccaagct

SEQ ID NO: 205017 - DNA, 25 bp, Canis familiaris
ttcacacatagaggtgctctccgct

SEQ ID NO: 205018 - DNA, 25 bp, Canis familiaris
ttaagctgacagacccatctctgct

SEQ ID NO: 205019 - DNA, 25 bp, Canis familiaris
ttaagatgccaggtctccttgtgtc

SEQ ID NO: 205020 - DNA, 25 bp, Canis familiaris
ttgaagcccaagtctccttatttta

SEQ ID NO: 205021 - DNA, 25 bp, Canis familiaris
ttaaggccacgctaccttcttaaat

SEQ ID NO: 205022 - DNA, 25 bp, Canis familiaris
ttaagccacctctctctataaaaat

SEQ ID NO: 205023 - DNA, 25 bp, Canis familiaris
ttaacacacctgatcatttgtgaaa

SEQ ID NO: 205024 - DNA, 25 bp, Canis familiaris
ttaacatcccctttgactgctggaa

SEQ ID NO: 205025 - DNA, 25 bp, Canis familiaris
ttaaccccccatagatgtgctggct

SEQ ID NO: 205026 - DNA, 25 bp, Canis familiaris
ttaactcccctaatggtgtgtctac

SEQ ID NO: 205027 - DNA, 25 bp, Canis familiaris
ttaactgcccctgagttggtgctaa

SEQ ID NO: 205028 - DNA, 25 bp, Canis familiaris
ttaagtcccatttattatgtgttaa

SEQ ID NO: 205029 - DNA, 25 bp, Canis familiaris
ttaaacctttcttcactgtgtacaa

SEQ ID NO: 205030 - DNA, 25 bp, Canis familiaris
ttaagccagttttatccgtaagcaa

SEQ ID NO: 205031 - DNA, 25 bp, Canis familiaris
ttaactagtgtaattgtccaaagaa

SEQ ID NO: 205032 - DNA, 25 bp, Canis familiaris
ttaaaagtgaattctgcctcaaaaa

SEQ ID NO: 205033 - DNA, 25 bp, Canis familiaris
ttaataaatgtttcatttgatttaa

SEQ ID NO: 205034 - DNA, 25 bp, Canis familiaris
ttaataaatgtttcccttgttctat

SEQ ID NO: 205035 - DNA, 25 bp, Canis familiaris
ttccagaaaatgtcccctggtcctt

SEQ ID NO: 205036 - DNA, 25 bp, Canis familiaris
ttcaataaaatacctgtctggctcc

SEQ ID NO: 205037 - DNA, 25 bp, Canis familiaris
ttcatataagtgttccatttggtct

SEQ ID NO: 205038 - DNA, 25 bp, Canis familiaris
ttctggaagtcacttgctttgctgt

SEQ ID NO: 205039 - DNA, 25 bp, Canis familiaris
ttccagtgcagtttgtctttcttac

SEQ ID NO: 205040 - DNA, 25 bp, Canis familiaris
ttcaacaggtttggctttttcacca

SEQ ID NO: 205041 - DNA, 25 bp, Canis familiaris
ttcagcacggtgtagcagttgttaa

SEQ ID NO: 205042 - DNA, 25 bp, Canis familiaris
ttaatatgtgctccagatgatctga

SEQ ID NO: 205043 - DNA, 25 bp, Canis familiaris
ttaacagctgtccagtgttggtgat

SEQ ID NO: 205044 - DNA, 25 bp, Canis familiaris
ttaacagggccttgctgtgcttgca

SEQ ID NO: 205045 - DNA, 25 bp, Canis familiaris
ttcaggtgggctttgcaggttctca

SEQ ID NO: 205046 - DNA, 25 bp, Canis familiaris
ttaagtgatggactcttggtttcag

SEQ ID NO: 205047 - DNA, 25 bp, Canis familiaris
ttaaagaggattttgtgcctgtgca

SEQ ID NO: 205048 - DNA, 25 bp, Canis familiaris
ttaaagctgtgctttttgcctccat

SEQ ID NO: 205049 - DNA, 25 bp, Canis familiaris
ttaagagctctgtgacttccagcca

SEQ ID NO: 205050 - DNA, 25 bp, Canis familiaris
ttaagagcttgaccctttagccatc

SEQ ID NO: 205051 - DNA, 25 bp, Canis familiaris
ttaagatcggtgccctttatcttcc

SEQ ID NO: 205052 - DNA, 25 bp, Canis familiaris
ttaagatggtagccgctctatctcg

SEQ ID NO: 205053 - DNA, 25 bp, Canis familiaris
ttgaattagaagccgttgtctcccc

SEQ ID NO: 205054 - DNA, 25 bp, Canis familiaris
ttgacttctgaaagcctttgttcca

SEQ ID NO: 205055 - DNA, 25 bp, Canis familiaris
ttcactatagaaaccctgcttatta

SEQ ID NO: 205056 - DNA, 25 bp, Canis familiaris
ttcagcttctgaaaactccctttag

SEQ ID NO: 205057 - DNA, 25 bp, Canis familiaris
ttcagcgttgaacacttccttgctt

SEQ ID NO: 205058 - DNA, 25 bp, Canis familiaris
ttctactataggaacttctcgtttg

SEQ ID NO: 205059 - DNA, 25 bp, Canis familiaris
ttcaagctttgcgatacgcctacgc

SEQ ID NO: 205060 - DNA, 25 bp, Canis familiaris
ttgcaacatttggctacgcgtcgcc

SEQ ID NO: 205061 - DNA, 25 bp, Canis familiaris
ttcagactctcttatacggaccaca

SEQ ID NO: 205062 - DNA, 25 bp, Canis familiaris
ttctacacgaaaccggatccaacaa

SEQ ID NO: 205063 - DNA, 25 bp, Canis familiaris
ttcgaccgaacagagcgtccaacat

SEQ ID NO: 205064 - DNA, 25 bp, Canis familiaris
ttcagtcggatatcaacgtccctca

SEQ ID NO: 205065 - DNA, 25 bp, Canis familiaris
ttcgccgatgtatcaatagtgccaa

SEQ ID NO: 205066 - DNA, 25 bp, Canis familiaris
ttcactcatttggagaataatgtaa

SEQ ID NO: 205067 - DNA, 25 bp, Canis familiaris
ttcaatctttctcccatttgtcaag

SEQ ID NO: 205068 - DNA, 25 bp, Canis familiaris
ttcctattttcgcattttcaataaa

SEQ ID NO: 205069 - DNA, 25 bp, Canis familiaris
ttccttcctttgtgttcatttttat

SEQ ID NO: 205070 - DNA, 25 bp, Canis familiaris
ttctttagtttatactttgctttct

SEQ ID NO: 205071 - DNA, 25 bp, Canis familiaris
ttctttttgttctcctctggaatgt

SEQ ID NO: 205072 - DNA, 25 bp, Canis familiaris
ttggtagtactttttcctggagttg

SEQ ID NO: 205073 - DNA, 25 bp, Canis familiaris
ttcgaaggcctttcttcttttcttg

SEQ ID NO: 205074 - DNA, 25 bp, Canis familiaris
ttaactgactttttctctcttttgg

SEQ ID NO: 205075 - DNA, 25 bp, Canis familiaris
ttaactgcatcctttatctctattt

SEQ ID NO: 205076 - DNA, 25 bp, Canis familiaris
ttaattcatgtcttcccttgtgtac

SEQ ID NO: 205077 - DNA, 25 bp, Canis familiaris
ttaattcttttctccatgtcatcaa

SEQ ID NO: 205078 - DNA, 25 bp, Canis familiaris
ttaagttattacctccatgtctcca

SEQ ID NO: 205079 - DNA, 25 bp, Canis familiaris
ttcaggttgatgtgtcaccgtctcc

SEQ ID NO: 205080 - DNA, 25 bp, Canis familiaris
ttcggtctcagtcgtgcagggaccc

SEQ ID NO: 205081 - DNA, 25 bp, Canis familiaris
ttcaggacctcgggcaggtggcccg

SEQ ID NO: 205082 - DNA, 25 bp, Canis familiaris
ttcaccacccggaaggtgagccacc

SEQ ID NO: 205083 - DNA, 25 bp, Canis familiaris
ttcatccccggagagggtcacagcc

SEQ ID NO: 205084 - DNA, 25 bp, Canis familiaris
ttcaccccagtgagaggtcccatac

SEQ ID NO: 205085 - DNA, 25 bp, Canis familiaris
ttcagaaccaggacagggtgtgcca

SEQ ID NO: 205086 - DNA, 25 bp, Canis familiaris
ttcagaagcgggaagcacctgctcc

SEQ ID NO: 205087 - DNA, 25 bp, Canis familiaris
ttcagaagcgggaagcacctgctcc

SEQ ID NO: 205088 - DNA, 25 bp, Canis familiaris
ttcaatacagggccacagttcaccg

SEQ ID NO: 205089 - DNA, 25 bp, Canis familiaris
ttcgaagaggtgctcagctccaccg

SEQ ID NO: 205090 - DNA, 25 bp, Canis familiaris
ttcacggaggatgtgggccagctgc

SEQ ID NO: 205091 - DNA, 25 bp, Canis familiaris
ttcacaggggccctgaggccagggc

SEQ ID NO: 205092 - DNA, 25 bp, Canis familiaris
ttcacggcgggctggaggagggcaa

SEQ ID NO: 205093 - DNA, 25 bp, Canis familiaris
ttcatcggcctgggggatggcagcg

SEQ ID NO: 205094 - DNA, 25 bp, Canis familiaris
ttcattgagtgcagtggggcccggg

SEQ ID NO: 205095 - DNA, 25 bp, Canis familiaris
ttcagatgagtgccgctgcgtgagt

SEQ ID NO: 205096 - DNA, 25 bp, Canis familiaris
ttcagagaggcaccgagtacccttg

SEQ ID NO: 205097 - DNA, 25 bp, Canis familiaris
ttcaggggcagccaattccccagag

SEQ ID NO: 205098 - DNA, 25 bp, Canis familiaris
ttcaggatgcgctggttcacaccaa

SEQ ID NO: 205099 - DNA, 25 bp, Canis familiaris
ttcaccatatacctttcaacctaat

SEQ ID NO: 205100 - DNA, 25 bp, Canis familiaris
ttctctaaaggaatccaccacgagt

SEQ ID NO: 205101 - DNA, 25 bp, Canis familiaris
ttctccaaagctagggaacacggta

SEQ ID NO: 205102 - DNA, 25 bp, Canis familiaris
ttcccaaatcttacgaagccccata

SEQ ID NO: 205103 - DNA, 25 bp, Canis familiaris
ttctccaaggacaacagcaaaccca

SEQ ID NO: 205104 - DNA, 25 bp, Canis familiaris
ttcgttgaaggcacagaatcaccaa

SEQ ID NO: 205105 - DNA, 25 bp, Canis familiaris
ttctgttgaaggcccagaccggccg

SEQ ID NO: 205106 - DNA, 25 bp, Canis familiaris
ttcgtgggcaagcgcagaggcggaa

SEQ ID NO: 205107 - DNA, 25 bp, Canis familiaris
ttgcggtggcgatgacgacgacgac

SEQ ID NO: 205108 - DNA, 25 bp, Canis familiaris
ttcagggtgtccgctgacgacatga

SEQ ID NO: 205109 - DNA, 25 bp, Canis familiaris
ttcagggggcgactggagcggctga

SEQ ID NO: 205110 - DNA, 25 bp, Canis familiaris
ttcaggcgactggatctaggtggga

SEQ ID NO: 205111 - DNA, 25 bp, Canis familiaris
ttcaggcatcctgaccctgttgaac

SEQ ID NO: 205112 - DNA, 25 bp, Canis familiaris
ttcaggaggccgatctccttgacgc

SEQ ID NO: 205113 - DNA, 25 bp, Canis familiaris
ttcagagaccctgctcttaaacgca

SEQ ID NO: 205114 - DNA, 25 bp, Canis familiaris
ttcagaaatcctccccaaatacaaa

SEQ ID NO: 205115 - DNA, 25 bp, Canis familiaris
ttcagtcgtccacaccaagtgacac

SEQ ID NO: 205116 - DNA, 25 bp, Canis familiaris
ttcattcagagctagaactcagcag

SEQ ID NO: 205117 - DNA, 25 bp, Canis familiaris
ttaatagctgcttgtgcctacgtgg

SEQ ID NO: 205118 - DNA, 25 bp, Canis familiaris
ttaatggtcatgctgccgcaggatg

SEQ ID NO: 205119 - DNA, 25 bp, Canis familiaris
ttcacattacatcacacgcactgtc

SEQ ID NO: 205120 - DNA, 25 bp, Canis familiaris
ttcactcataatcagcatgcctcat

SEQ ID NO: 205121 - DNA, 25 bp, Canis familiaris
ttcagctcagttcatgatctcgggg

SEQ ID NO: 205122 - DNA, 25 bp, Canis familiaris
ttcaatcatctctcatatctcaagt

SEQ ID NO: 205123 - DNA, 25 bp, Canis familiaris
ttaacatcatcatcattcttactaa

SEQ ID NO: 205124 - DNA, 25 bp, Canis familiaris
ttaatttcatcacttgttatctcaa

SEQ ID NO: 205125 - DNA, 25 bp, Canis familiaris
ttaagtcattccatctttcactcag

SEQ ID NO: 205126 - DNA, 25 bp, Canis familiaris
ttaagtattccaaagtgatctatga

SEQ ID NO: 205127 - DNA, 25 bp, Canis familiaris
ttaagaatcttaagcagcctccaca

SEQ ID NO: 205128 - DNA, 25 bp, Canis familiaris
ttgacagttcttgggaggccttcac

SEQ ID NO: 205129 - DNA, 25 bp, Canis familiaris
ttgcaagtcagcatggggccctaac

SEQ ID NO: 205130 - DNA, 25 bp, Canis familiaris
ttcaagggaatgcctggccctgaaa

SEQ ID NO: 205131 - DNA, 25 bp, Canis familiaris
ttcttgaaaagccgtccctgagcaa

SEQ ID NO: 205132 - DNA, 25 bp, Canis familiaris
ttcatctacgaaccaaaccgcgaag

SEQ ID NO: 205133 - DNA, 25 bp, Canis familiaris
ttcactcggagaccaattcccatca

SEQ ID NO: 205134 - DNA, 25 bp, Canis familiaris
ttcactggtgataaggctctccctg

SEQ ID NO: 205135 - DNA, 25 bp, Canis familiaris
ttaatcgtgatggctggcctccagt

SEQ ID NO: 205136 - DNA, 25 bp, Canis familiaris
ttgttcgtgatggacggctctacgc

SEQ ID NO: 205137 - DNA, 25 bp, Canis familiaris
ttcatttgtatccaaggtgctgaat

SEQ ID NO: 205138 - DNA, 25 bp, Canis familiaris
ttcacaatgtggccgaggactttga

SEQ ID NO: 205139 - DNA, 25 bp, Canis familiaris
ttcagcaatgtgcttggcctctttc

SEQ ID NO: 205140 - DNA, 25 bp, Canis familiaris
ttctgctgattgatgatggcgtctt

SEQ ID NO: 205141 - DNA, 25 bp, Canis familiaris
ttcttgagtgatcgctcggtcaatg

SEQ ID NO: 205142 - DNA, 25 bp, Canis familiaris
ttctctgaaggcggcgctgtactct

SEQ ID NO: 205143 - DNA, 25 bp, Canis familiaris
ttgccgacggctccgtaactgtaga

SEQ ID NO: 205144 - DNA, 25 bp, Canis familiaris
ttccagaccttctgtaactcttgca

SEQ ID NO: 205145 - DNA, 25 bp, Canis familiaris
ttcacagaatcaaaatgtgaagctc

SEQ ID NO: 205146 - DNA, 25 bp, Canis familiaris
ttcagcgagactacagcagcggcac

SEQ ID NO: 205147 - DNA, 25 bp, Canis familiaris
ttcactatgacatttatgcaggcaa

SEQ ID NO: 205148 - DNA, 25 bp, Canis familiaris
ttcatgcataacttgaaagagccat

SEQ ID NO: 205149 - DNA, 25 bp, Canis familiaris
ttctgcattcattctggttggctca

SEQ ID NO: 205150 - DNA, 25 bp, Canis familiaris
ttcatgttattctgagatgtcatct

SEQ ID NO: 205151 - DNA, 25 bp, Canis familiaris
ttctgttccaataaagcttttacct

SEQ ID NO: 205152 - DNA, 25 bp, Canis familiaris
ttcagtctccaaaatcagccttcga

SEQ ID NO: 205153 - DNA, 25 bp, Canis familiaris
ttcgttcaggctttagccattcccc

SEQ ID NO: 205154 - DNA, 25 bp, Canis familiaris
ttcagtccgacttggatgcgttcca

SEQ ID NO: 205155 - DNA, 25 bp, Canis familiaris
ttcagtcttgtctttatcacttcca

SEQ ID NO: 205156 - DNA, 25 bp, Canis familiaris
ttcaacgtgtttcacttgtccaggg

SEQ ID NO: 205157 - DNA, 25 bp, Canis familiaris
ttcaatttgtttttctttcggagca

SEQ ID NO: 205158 - DNA, 25 bp, Canis familiaris
ttgaacttgtttttctttcccagca

SEQ ID NO: 205159 - DNA, 25 bp, Canis familiaris
ttaactccttacttgtttcactcag

SEQ ID NO: 205160 - DNA, 25 bp, Canis familiaris
ttaaccctttgcttgtttatttctg

SEQ ID NO: 205161 - DNA, 25 bp, Canis familiaris
ttaagacactttcttttccttctgc

SEQ ID NO: 205162 - DNA, 25 bp, Canis familiaris
ttcaataaattattttttccacttg

SEQ ID NO: 205163 - DNA, 25 bp, Canis familiaris
ttcaatactttatcttcattccctc

SEQ ID NO: 205164 - DNA, 25 bp, Canis familiaris
ttggaagctttagcccttcacactt

SEQ ID NO: 205165 - DNA, 25 bp, Canis familiaris
ttgtgggtatttgcctcattccatc

SEQ ID NO: 205166 - DNA, 25 bp, Canis familiaris
ttcggagaattcatccatcttcgct

SEQ ID NO: 205167 - DNA, 25 bp, Canis familiaris
ttcaggaccatcgttccgattctgt

SEQ ID NO: 205168 - DNA, 25 bp, Canis familiaris
ttcaggacaacctgcttgtgtcccc

SEQ ID NO: 205169 - DNA, 25 bp, Canis familiaris
ttcttggcaacccctagttgcctgg

SEQ ID NO: 205170 - DNA, 25 bp, Canis familiaris
ttcttaataacacaagtccctttat

SEQ ID NO: 205171 - DNA, 25 bp, Canis familiaris
ttcttcttccaacaagtgaactttt

SEQ ID NO: 205172 - DNA, 25 bp, Canis familiaris
ttctttcccagtcccgtgaaattgt

SEQ ID NO: 205173 - DNA, 25 bp, Canis familiaris
ttctctgctcccggaaccgaaatca

SEQ ID NO: 205174 - DNA, 25 bp, Canis familiaris
ttcctgaccacgtaacgcgaaacca

SEQ ID NO: 205175 - DNA, 25 bp, Canis familiaris
ttcacaggccagccaaaccctgaac

SEQ ID NO: 205176 - DNA, 25 bp, Canis familiaris
ttcatcagagccgcagataccaata

SEQ ID NO: 205177 - DNA, 25 bp, Canis familiaris
ttcacatgtgctcgctcagatacgc

SEQ ID NO: 205178 - DNA, 25 bp, Canis familiaris
ttcactgtgctggccatgatggact

SEQ ID NO: 205179 - DNA, 25 bp, Canis familiaris
ttcatctctgtattgcatttgcact

SEQ ID NO: 205180 - DNA, 25 bp, Canis familiaris
ttcacatcttgttgatagctccttc

SEQ ID NO: 205181 - DNA, 25 bp, Canis familiaris
ttcaccttttcatgttgtgtcccta

SEQ ID NO: 205182 - DNA, 25 bp, Canis familiaris
ttcccatttcttatggtaaacatat

SEQ ID NO: 205183 - DNA, 25 bp, Canis familiaris
ttcacttttgcagattgggtaacac

SEQ ID NO: 205184 - DNA, 25 bp, Canis familiaris
ttcattttccaacttacctaacatc

SEQ ID NO: 205185 - DNA, 25 bp, Canis familiaris
ttctggttccaatttctccaaccaa

SEQ ID NO: 205186 - DNA, 25 bp, Canis familiaris
ttctttcccaaaactcataacccag

SEQ ID NO: 205187 - DNA, 25 bp, Canis familiaris
ttctgttccaaatactaaagagcta

SEQ ID NO: 205188 - DNA, 25 bp, Canis familiaris
ttggttggaagaaaggagcaaggcg

SEQ ID NO: 205189 - DNA, 25 bp, Canis familiaris
ttggttaaagccttggagccaagcc

SEQ ID NO: 205190 - DNA, 25 bp, Canis familiaris
ttggtctaacaggtttccctgcacc

SEQ ID NO: 205191 - DNA, 25 bp, Canis familiaris
ttggtataactgtgtacccagcacc

SEQ ID NO: 205192 - DNA, 25 bp, Canis familiaris
ttcagtaaaatcttgtagcatccca

SEQ ID NO: 205193 - DNA, 25 bp, Canis familiaris
ttcaacaagcccttggagcagccca

SEQ ID NO: 205194 - DNA, 25 bp, Canis familiaris
ttcaaggaccgagtcgcagcatcca

SEQ ID NO: 205195 - DNA, 25 bp, Canis familiaris
ttctaggagtctgctccagtgcctt

SEQ ID NO: 205196 - DNA, 25 bp, Canis familiaris
ttcactaaccagatccaggcagcct

SEQ ID NO: 205197 - DNA, 25 bp, Canis familiaris
ttgacgaccgggtccagggctatac

SEQ ID NO: 205198 - DNA, 25 bp, Canis familiaris
ttcaggcacggagaccagcggtcta

SEQ ID NO: 205199 - DNA, 25 bp, Canis familiaris
ttcagcctgcggggaacgggcttgg

SEQ ID NO: 205200 - DNA, 25 bp, Canis familiaris
ttcacctgctgatggaattggacta

SEQ ID NO: 205201 - DNA, 25 bp, Canis familiaris
ttcacgtgcttatgtatggtattca

SEQ ID NO: 205202 - DNA, 25 bp, Canis familiaris
ttcacagctcattaccttagtggta

SEQ ID NO: 205203 - DNA, 25 bp, Canis familiaris
ttcaccaataacctctccatcgtga

SEQ ID NO: 205204 - DNA, 25 bp, Canis familiaris
ttcaccataagaagcctacatagaa

SEQ ID NO: 205205 - DNA, 25 bp, Canis familiaris
ttcaccaagtctccctatcaggaat

SEQ ID NO: 205206 - DNA, 25 bp, Canis familiaris
ttcaccaagtctccctatcaggaat

SEQ ID NO: 205207 - DNA, 25 bp, Canis familiaris
ttcaagcacgtcatccatatcaagg

SEQ ID NO: 205208 - DNA, 25 bp, Canis familiaris
ttcaagcacttgcatccacacgttt

SEQ ID NO: 205209 - DNA, 25 bp, Canis familiaris
ttcaaactttgtcgtcatgctctgt

SEQ ID NO: 205210 - DNA, 25 bp, Canis familiaris
ttaaccattttgctggattgttgta

SEQ ID NO: 205211 - DNA, 25 bp, Canis familiaris
ttaaccatactttatgtacctttat

SEQ ID NO: 205212 - DNA, 25 bp, Canis familiaris
ttaaccattttgtgttccttctaca

SEQ ID NO: 205213 - DNA, 25 bp, Canis familiaris
ttctacgtttttcttctattaatca

SEQ ID NO: 205214 - DNA, 25 bp, Canis familiaris
ttccagagttggcttatgttttagg

SEQ ID NO: 205215 - DNA, 25 bp, Canis familiaris
ttcacaagtggcctttctgcagttt

SEQ ID NO: 205216 - DNA, 25 bp, Canis familiaris
ttcaccatggtgtttgtcatcgcgt

SEQ ID NO: 205217 - DNA, 25 bp, Canis familiaris
ttccacatgaagcttttccgtgccc

SEQ ID NO: 205218 - DNA, 25 bp, Canis familiaris
ttcccagaagatgtaaccgcaccgc

SEQ ID NO: 205219 - DNA, 25 bp, Canis familiaris
ttcccataaattcaaacaacacctt

SEQ ID NO: 205220 - DNA, 25 bp, Canis familiaris
ttccagcaacaaattaaacaaacca

SEQ ID NO: 205221 - DNA, 25 bp, Canis familiaris
ttccaacaacaatttaagcaacgca

SEQ ID NO: 205222 - DNA, 25 bp, Canis familiaris
ttccaaggacaaacacagctaaggc

SEQ ID NO: 205223 - DNA, 25 bp, Canis familiaris
ttaattacaccagcatcgcgaaggc

SEQ ID NO: 205224 - DNA, 25 bp, Canis familiaris
ttaataagccaccctgctgctaagg

SEQ ID NO: 205225 - DNA, 25 bp, Canis familiaris
ttctttgagccacagcatctctaag

SEQ ID NO: 205226 - DNA, 25 bp, Canis familiaris
ttcttggcaggactacattccagtg

SEQ ID NO: 205227 - DNA, 25 bp, Canis familiaris
ttcttggactgaccgtctggcagtg

SEQ ID NO: 205228 - DNA, 25 bp, Canis familiaris
ttcaatgccactgcccacatggcag

SEQ ID NO: 205229 - DNA, 25 bp, Canis familiaris
ttaagccacccagatctggaccagc

SEQ ID NO: 205230 - DNA, 25 bp, Canis familiaris
ttctaaccccagaattgtgcaccct

SEQ ID NO: 205231 - DNA, 25 bp, Canis familiaris
ttcataacccaaaattagcatcatt

SEQ ID NO: 205232 - DNA, 25 bp, Canis familiaris
ttcataattcactgatctatcaaca

SEQ ID NO: 205233 - DNA, 25 bp, Canis familiaris
ttcagcacaccacatgtgtgacaga

SEQ ID NO: 205234 - DNA, 25 bp, Canis familiaris
ttcagcacactgcaggctcagaaga

SEQ ID NO: 205235 - DNA, 25 bp, Canis familiaris
ttcacacagctgcagagctgtctac

SEQ ID NO: 205236 - DNA, 25 bp, Canis familiaris
ttcacacaggaaacagctatgacca

SEQ ID NO: 205237 - DNA, 25 bp, Canis familiaris
ttcaccagccaaaggcacatgtcca

SEQ ID NO: 205238 - DNA, 25 bp, Canis familiaris
ttcctggccaaaggcaacatccctg

SEQ ID NO: 205239 - DNA, 25 bp, Canis familiaris
ttctgggtcaactcagagtccctgc

SEQ ID NO: 205240 - DNA, 25 bp, Canis familiaris
ttccaggtccaaccagagttccgac

SEQ ID NO: 205241 - DNA, 25 bp, Canis familiaris
ttcagagggccacagaggtgctccg

SEQ ID NO: 205242 - DNA, 25 bp, Canis familiaris
ttcacgatggccctcagtgacatcc

SEQ ID NO: 205243 - DNA, 25 bp, Canis familiaris
ttcaaagcgcctcgcgctgattctc

SEQ ID NO: 205244 - DNA, 25 bp, Canis familiaris
ttctaagaccatcgctgtcttccac

SEQ ID NO: 205245 - DNA, 25 bp, Canis familiaris
ttctgaatgaacccgacttccacag

SEQ ID NO: 205246 - DNA, 25 bp, Canis familiaris
ttcaaatattatcaactgtctcaac

SEQ ID NO: 205247 - DNA, 25 bp, Canis familiaris
ttcaaacatttctacatctctcatc

SEQ ID NO: 205248 - DNA, 25 bp, Canis familiaris
ttcacggcttctggaatttctgctc

SEQ ID NO: 205249 - DNA, 25 bp, Canis familiaris
ttcaccgatatgtacaatttctcta

SEQ ID NO: 205250 - DNA, 25 bp, Canis familiaris
ttcattgcgatactcacaactgtca

SEQ ID NO: 205251 - DNA, 25 bp, Canis familiaris
ttcttctatacccaactgtatcagt

SEQ ID NO: 205252 - DNA, 25 bp, Canis familiaris
ttcttttccatgttactgcattcag

SEQ ID NO: 205253 - DNA, 25 bp, Canis familiaris
ttccattcccagtgaacatccaacc

SEQ ID NO: 205254 - DNA, 25 bp, Canis familiaris
ttcagcttcccacatgagagccaca

SEQ ID NO: 205255 - DNA, 25 bp, Canis familiaris
ttcgtgtgcccattgatcaggagac

SEQ ID NO: 205256 - DNA, 25 bp, Canis familiaris
ttcttggtcctccactggagacttt

SEQ ID NO: 205257 - DNA, 25 bp, Canis familiaris
ttcattggaagcactagggatttgt

SEQ ID NO: 205258 - DNA, 25 bp, Canis familiaris
ttctctggaaccctacgggattctt

SEQ ID NO: 205259 - DNA, 25 bp, Canis familiaris
ttctctaaccctctgaggcgttctc

SEQ ID NO: 205260 - DNA, 25 bp, Canis familiaris
ttcttcaacccatgattttgcctct

SEQ ID NO: 205261 - DNA, 25 bp, Canis familiaris
ttcaacaactccttgatcttggcct

SEQ ID NO: 205262 - DNA, 25 bp, Canis familiaris
ttcacacagacagctagtcattagc

SEQ ID NO: 205263 - DNA, 25 bp, Canis familiaris
ttcacagaacacgatcctcttagga

SEQ ID NO: 205264 - DNA, 25 bp, Canis familiaris
ttcacaatcgagggcgctatatagg

SEQ ID NO: 205265 - DNA, 25 bp, Canis familiaris
ttcactgaccagggccggagcagga

SEQ ID NO: 205266 - DNA, 25 bp, Canis familiaris
ttcactgactccacgtttcaggcaa

SEQ ID NO: 205267 - DNA, 25 bp, Canis familiaris
ttcactgacctatctttacaccaat

SEQ ID NO: 205268 - DNA, 25 bp, Canis familiaris
ttcagcggcatttgtacgttcacca

SEQ ID NO: 205269 - DNA, 25 bp, Canis familiaris
ttcatgggatatttactcgtacttg

SEQ ID NO: 205270 - DNA, 25 bp, Canis familiaris
ttcatgagcgagaactacccgcccg

SEQ ID NO: 205271 - DNA, 25 bp, Canis familiaris
ttctaggttatggatgcccagcctc

SEQ ID NO: 205272 - DNA, 25 bp, Canis familiaris
ttcgggacatatggatacgccctcc

SEQ ID NO: 205273 - DNA, 25 bp, Canis familiaris
ttcattggccaaggcaaccaaccct

SEQ ID NO: 205274 - DNA, 25 bp, Canis familiaris
ttcatgtggccattgctctgacaac

SEQ ID NO: 205275 - DNA, 25 bp, Canis familiaris
ttcatgtgcagcgactgcggcctga

SEQ ID NO: 205276 - DNA, 25 bp, Canis familiaris
ttcagtgcagtggtggtcagctcag

SEQ ID NO: 205277 - DNA, 25 bp, Canis familiaris
ttcaatgacttatctgcatgcagca

SEQ ID NO: 205278 - DNA, 25 bp, Canis familiaris
ttcatagtcatttatggcagaccaa

SEQ ID NO: 205279 - DNA, 25 bp, Canis familiaris
ttctctgtctctgatcagagccgac

SEQ ID NO: 205280 - DNA, 25 bp, Canis familiaris
ttctctgactagcaatgtgacgatg

SEQ ID NO: 205281 - DNA, 25 bp, Canis familiaris
ttcttgcacgaggagttggcgggct

SEQ ID NO: 205282 - DNA, 25 bp, Canis familiaris
ttcttgccccaactgggagggtctc

SEQ ID NO: 205283 - DNA, 25 bp, Canis familiaris
ttcttcccagcctctggaaggtgct

SEQ ID NO: 205284 - DNA, 25 bp, Canis familiaris
ttctagcccccatcggtatgtgggg

SEQ ID NO: 205285 - DNA, 25 bp, Canis familiaris
ttctagttcccttcttgttatgtga

SEQ ID NO: 205286 - DNA, 25 bp, Canis familiaris
ttcagagattccctaactattattg

SEQ ID NO: 205287 - DNA, 25 bp, Canis familiaris
ttcagagttctgggactttgttcaa

SEQ ID NO: 205288 - DNA, 25 bp, Canis familiaris
ttcagggatcgccaggcgttttctg

SEQ ID NO: 205289 - DNA, 25 bp, Canis familiaris
ttcagtggtgccaccgtgagcttca

SEQ ID NO: 205290 - DNA, 25 bp, Canis familiaris
ttcagggttcatccatgctgtagca

SEQ ID NO: 205291 - DNA, 25 bp, Canis familiaris
ttcatatgtggccactctgctgtac

SEQ ID NO: 205292 - DNA, 25 bp, Canis familiaris
ttcatgagtggctacctgggctatt

SEQ ID NO: 205293 - DNA, 25 bp, Canis familiaris
ttctgtgtagtgtcctgaagaagct

SEQ ID NO: 205294 - DNA, 25 bp, Canis familiaris
ttctggtagttccccataacatgcc

SEQ ID NO: 205295 - DNA, 25 bp, Canis familiaris
ttctttagttgacagcagtacgcct

SEQ ID NO: 205296 - DNA, 25 bp, Canis familiaris
ttccttcgtagatgccactaactct

SEQ ID NO: 205297 - DNA, 25 bp, Canis familiaris
ttccttctgttgaaggcccagaccg

SEQ ID NO: 205298 - DNA, 25 bp, Canis familiaris
ttcacttctgggatgagctctctga

SEQ ID NO: 205299 - DNA, 25 bp, Canis familiaris
ttcacttgtggaatctgacctgccg

SEQ ID NO: 205300 - DNA, 25 bp, Canis familiaris
ttgcaatttgagaactggcgcccca

SEQ ID NO: 205301 - DNA, 25 bp, Canis familiaris
ttcatcactggagagtggggccaca

SEQ ID NO: 205302 - DNA, 25 bp, Canis familiaris
ttcaccatggaccgcgaagtgcgca

SEQ ID NO: 205303 - DNA, 25 bp, Canis familiaris
ttcacacattggcggatcacggaga

SEQ ID NO: 205304 - DNA, 25 bp, Canis familiaris
ttcaccaaggagcgctgactgtgag

SEQ ID NO: 205305 - DNA, 25 bp, Canis familiaris
ttcatcgatgagaaccctgagctgt

SEQ ID NO: 205306 - DNA, 25 bp, Canis familiaris
ttcactgatgggacacacaggtggg

SEQ ID NO: 205307 - DNA, 25 bp, Canis familiaris
ttcacgatggtgtccacccgtgtga

SEQ ID NO: 205308 - DNA, 25 bp, Canis familiaris
ttcacacaggagaaccacacagttg

SEQ ID NO: 205309 - DNA, 25 bp, Canis familiaris
ttcagccacgaacccagaagttttt

SEQ ID NO: 205310 - DNA, 25 bp, Canis familiaris
ttcaccaccttggccagaagttgtc

SEQ ID NO: 205311 - DNA, 25 bp, Canis familiaris
ttcttacttctcgtcaaatgtctat

SEQ ID NO: 205312 - DNA, 25 bp, Canis familiaris
ttctttacctaggcgcttgtctaag

SEQ ID NO: 205313 - DNA, 25 bp, Canis familiaris
ttctgttaccggggttcacactacg

SEQ ID NO: 205314 - DNA, 25 bp, Canis familiaris
ttcgagtacctttctgaaccacgac

SEQ ID NO: 205315 - DNA, 25 bp, Canis familiaris
ttcgagtattctctttgagccctac

SEQ ID NO: 205316 - DNA, 25 bp, Canis familiaris
ttctggtatttgacgttactgcccc

SEQ ID NO: 205317 - DNA, 25 bp, Canis familiaris
ttctgtgtatataacccgaaccctc

SEQ ID NO: 205318 - DNA, 25 bp, Canis familiaris
ttctgagtaataatgttcccccctc

SEQ ID NO: 205319 - DNA, 25 bp, Canis familiaris
ttcagtgtgagaactgtgacccccc

SEQ ID NO: 205320 - DNA, 25 bp, Canis familiaris
ttcaggaggaactggccacttgcca

SEQ ID NO: 205321 - DNA, 25 bp, Canis familiaris
ttcgtacagaactagccccgtgtaa

SEQ ID NO: 205322 - DNA, 25 bp, Canis familiaris
ttcgaaggcacgttccaacgtggaa

SEQ ID NO: 205323 - DNA, 25 bp, Canis familiaris
ttctattcggcctatccagacgagg

SEQ ID NO: 205324 - DNA, 25 bp, Canis familiaris
ttcttctgggaatcctgcagctgca

SEQ ID NO: 205325 - DNA, 25 bp, Canis familiaris
ttcttcatctgtcagactctcgtgc

SEQ ID NO: 205326 - DNA, 25 bp, Canis familiaris
ttcttcatgctggtcatgacccgaa

SEQ ID NO: 205327 - DNA, 25 bp, Canis familiaris
ttctttctgcgtggaccacctattc

SEQ ID NO: 205328 - DNA, 25 bp, Canis familiaris
ttctggtcgcgagattaactattca

SEQ ID NO: 205329 - DNA, 25 bp, Canis familiaris
ttcgtgtacgctgctataacttccc

SEQ ID NO: 205330 - DNA, 25 bp, Canis familiaris
ttcgtgctgtccagcttaactggcc

SEQ ID NO: 205331 - DNA, 25 bp, Canis familiaris
ttcgtgttctgcggcagtaagcccc

SEQ ID NO: 205332 - DNA, 25 bp, Canis familiaris
ttcatgggtcctgggttgagccact

SEQ ID NO: 205333 - DNA, 25 bp, Canis familiaris
ttcacttgtccaggggatgagcctc

SEQ ID NO: 205334 - DNA, 25 bp, Canis familiaris
ttcctgtggcaagaggagacaatcc

SEQ ID NO: 205335 - DNA, 25 bp, Canis familiaris
ttcctggcaggcacagtggacaccc

SEQ ID NO: 205336 - DNA, 25 bp, Canis familiaris
ttcttcgagactcgtgggccacaca

SEQ ID NO: 205337 - DNA, 25 bp, Canis familiaris
ttctatatcgaccgatgggtccctc

SEQ ID NO: 205338 - DNA, 25 bp, Canis familiaris
ttctatttaatgcagacccagccca

SEQ ID NO: 205339 - DNA, 25 bp, Canis familiaris
ttcatcatttaggacaccctcagcc

SEQ ID NO: 205340 - DNA, 25 bp, Canis familiaris
ttcattcttatggcaactccctggt

SEQ ID NO: 205341 - DNA, 25 bp, Canis familiaris
ttgcttctgaaatatctacctggga

SEQ ID NO: 205342 - DNA, 25 bp, Canis familiaris
ttcttgtgaacttttgtgcctcgga

SEQ ID NO: 205343 - DNA, 25 bp, Canis familiaris
ttctagctaaaaaatgatgccccag

SEQ ID NO: 205344 - DNA, 25 bp, Canis familiaris
ttcaaccaacattcactgcataccc

SEQ ID NO: 205345 - DNA, 25 bp, Canis familiaris
ttcacagccaaaccactgacattcc

SEQ ID NO: 205346 - DNA, 25 bp, Canis familiaris
ttcacacgcattttcacattcatta

SEQ ID NO: 205347 - DNA, 25 bp, Canis familiaris
ttcaccagctttacatacaatcttg

SEQ ID NO: 205348 - DNA, 25 bp, Canis familiaris
ttcaccctgttgacacacgattgtg

SEQ ID NO: 205349 - DNA, 25 bp, Canis familiaris
ttcatctatcagtggacactttggc

SEQ ID NO: 205350 - DNA, 25 bp, Canis familiaris
ttcacatatcatttaagcctttgtc

SEQ ID NO: 205351 - DNA, 25 bp, Canis familiaris
ttctgtacattgtaaccttctttac

SEQ ID NO: 205352 - DNA, 25 bp, Canis familiaris
ttcttcctaaggtcacttcctaaga

SEQ ID NO: 205353 - DNA, 25 bp, Canis familiaris
ttctacccaagaacatttcacgaat

SEQ ID NO: 205354 - DNA, 25 bp, Canis familiaris
ttcagcatcacccagaacatgttct

SEQ ID NO: 205355 - DNA, 25 bp, Canis familiaris
ttcaagcacacaccacgatttctac

SEQ ID NO: 205356 - DNA, 25 bp, Canis familiaris
ttcaaccgcatctctgtttctgagt

SEQ ID NO: 205357 - DNA, 25 bp, Canis familiaris
ttcaccctcattggtgtgtgtccgt

SEQ ID NO: 205358 - DNA, 25 bp, Canis familiaris
ttcactgcctacagatggcgtctca

SEQ ID NO: 205359 - DNA, 25 bp, Canis familiaris
ttcaccctcagcaagggcactcatc

SEQ ID NO: 205360 - DNA, 25 bp, Canis familiaris
ttcactctggtggcagggactcagc

SEQ ID NO: 205361 - DNA, 25 bp, Canis familiaris
ttcatatctcctgctggaaatcaga

SEQ ID NO: 205362 - DNA, 25 bp, Canis familiaris
ttcaagcacctcctggatacagctc

SEQ ID NO: 205363 - DNA, 25 bp, Canis familiaris
ttcacagacgtggctgctgatcatc

SEQ ID NO: 205364 - DNA, 25 bp, Canis familiaris
ttcatcactcagcctctggtatgca

SEQ ID NO: 205365 - DNA, 25 bp, Canis familiaris
ttctcactagtatttggtgaccttc

SEQ ID NO: 205366 - DNA, 25 bp, Canis familiaris
ttctactagccattatattcactgt

SEQ ID NO: 205367 - DNA, 25 bp, Canis familiaris
ttcatttacacagatatccatgcct

SEQ ID NO: 205368 - DNA, 25 bp, Canis familiaris
ttcatgttgctatcatgtacccctt

SEQ ID NO: 205369 - DNA, 25 bp, Canis familiaris
ttcatgcttgacacttaccacttac

SEQ ID NO: 205370 - DNA, 25 bp, Canis familiaris
ttcatctttgcatttaaaagctttc

SEQ ID NO: 205371 - DNA, 25 bp, Canis familiaris
ttcacttttaaatacactttcttct

SEQ ID NO: 205372 - DNA, 25 bp, Canis familiaris
ttcactatttttaaagcgcaatttc

SEQ ID NO: 205373 - DNA, 25 bp, Canis familiaris
ttcacatataattttaccgtctcca

SEQ ID NO: 205374 - DNA, 25 bp, Canis familiaris
ttcacatctatttttgtgccagtac

SEQ ID NO: 205375 - DNA, 25 bp, Canis familiaris
ttcactgtattgattcagccagtag

SEQ ID NO: 205376 - DNA, 25 bp, Canis familiaris
ttaattggtgttacctcaggatgct

SEQ ID NO: 205377 - DNA, 25 bp, Canis familiaris
ttgaactagtgttggcccgtgttgc

SEQ ID NO: 205378 - DNA, 25 bp, Canis familiaris
ttgacgggcatcagagccgggaggc

SEQ ID NO: 205379 - DNA, 25 bp, Canis familiaris
ttcacgtagctgaggccctggagga

SEQ ID NO: 205380 - DNA, 25 bp, Canis familiaris
ttcacttagcataatgtcctctgga

SEQ ID NO: 205381 - DNA, 25 bp, Canis familiaris
ttcactttgatttggccatgtcatg

SEQ ID NO: 205382 - DNA, 25 bp, Canis familiaris
ttcttcttgattggattcatgagtg

SEQ ID NO: 205383 - DNA, 25 bp, Canis familiaris
ttctttgggcttttctatgtttgtc

SEQ ID NO: 205384 - DNA, 25 bp, Canis familiaris
ttctttttctttgtatttgttcaag

SEQ ID NO: 205385 - DNA, 25 bp, Canis familiaris
ttctttgaatcctgtcccttgatta

SEQ ID NO: 205386 - DNA, 25 bp, Canis familiaris
ttctttgaacactccaggtttctcc

SEQ ID NO: 205387 - DNA, 25 bp, Canis familiaris
ttcttagaagctccctcagttcttc

SEQ ID NO: 205388 - DNA, 25 bp, Canis familiaris
ttcttaaagccttgctctgttctgc

SEQ ID NO: 205389 - DNA, 25 bp, Canis familiaris
ttcactgaccagctactttctatgc

SEQ ID NO: 205390 - DNA, 25 bp, Canis familiaris
ttcactatcccgagactcttatctc

SEQ ID NO: 205391 - DNA, 25 bp, Canis familiaris
ttcacttggccatagactctttttc

SEQ ID NO: 205392 - DNA, 25 bp, Canis familiaris
ttcatctcggctttgagactttata

SEQ ID NO: 205393 - DNA, 25 bp, Canis familiaris
ttcatcctggtggtggcagctgtga

SEQ ID NO: 205394 - DNA, 25 bp, Canis familiaris
ttctctgtggtggttagcgcatgac

SEQ ID NO: 205395 - DNA, 25 bp, Canis familiaris
ttcttgggggctaccatgtgccaca

SEQ ID NO: 205396 - DNA, 25 bp, Canis familiaris
ttcttgggtcgcaatacatgtacta

SEQ ID NO: 205397 - DNA, 25 bp, Canis familiaris
ttcttgggcttgtcaaatgtcagta

SEQ ID NO: 205398 - DNA, 25 bp, Canis familiaris
ttctgagttttgtcaaatgccatga

SEQ ID NO: 205399 - DNA, 25 bp, Canis familiaris
ttcatgaggcatattaaatgatctc

SEQ ID NO: 205400 - DNA, 25 bp, Canis familiaris
ttgcagtggcaaagtggagattgtt

SEQ ID NO: 205401 - DNA, 25 bp, Canis familiaris
ttcagtgtgacaattacgcattatt

SEQ ID NO: 205402 - DNA, 25 bp, Canis familiaris
ttcgaggacactcatccttgagctc

SEQ ID NO: 205403 - DNA, 25 bp, Canis familiaris
ttctgaagacttctcctcgaattta

SEQ ID NO: 205404 - DNA, 25 bp, Canis familiaris
ttctataactctctccatgtaaccc

SEQ ID NO: 205405 - DNA, 25 bp, Canis familiaris
ttctatgaatttttcctgctctcac

SEQ ID NO: 205406 - DNA, 25 bp, Canis familiaris
ttcaatgacacttgtcttagccaat

SEQ ID NO: 205407 - DNA, 25 bp, Canis familiaris
ttcaatgcacatttgtcctcacaca

SEQ ID NO: 205408 - DNA, 25 bp, Canis familiaris
ttcacatttttgtcactcaacattc

SEQ ID NO: 205409 - DNA, 25 bp, Canis familiaris
ttcactggttggagcctatattcct

SEQ ID NO: 205410 - DNA, 25 bp, Canis familiaris
ttcactggttggagcttatatgtct

SEQ ID NO: 205411 - DNA, 25 bp, Canis familiaris
ttcattggtttgggttctgggccca

SEQ ID NO: 205412 - DNA, 25 bp, Canis familiaris
ttcagagttattccctttggctgcc

SEQ ID NO: 205413 - DNA, 25 bp, Canis familiaris
ttcagactttgaatccttttctccg

SEQ ID NO: 205414 - DNA, 25 bp, Canis familiaris
ttcagatcatattgatctctttcct

SEQ ID NO: 205415 - DNA, 25 bp, Canis familiaris
ttcatgctgagatggctctcttcct

SEQ ID NO: 205416 - DNA, 25 bp, Canis familiaris
ttcagcttgtattgcctggtatgct

SEQ ID NO: 205417 - DNA, 25 bp, Canis familiaris
ttcacgctgtcttctgtgtgtgtgt

SEQ ID NO: 205418 - DNA, 25 bp, Canis familiaris
ttcacttgtcattttattgcttgct

SEQ ID NO: 205419 - DNA, 25 bp, Canis familiaris
ttcacttctcatgtgtttctcactg

SEQ ID NO: 205420 - DNA, 25 bp, Canis familiaris
ttcacactccatatgtgttcctctc

SEQ ID NO: 205421 - DNA, 25 bp, Canis familiaris
ttcacactccatatgtgttcctctc

SEQ ID NO: 205422 - DNA, 25 bp, Canis familiaris
ttgcatgaccgggtctattccctca

SEQ ID NO: 205423 - DNA, 25 bp, Canis familiaris
ttcatacccggactttacttctaat

SEQ ID NO: 205424 - DNA, 25 bp, Canis familiaris
ttcaagccttagttcattacgatct

SEQ ID NO: 205425 - DNA, 25 bp, Canis familiaris
ttcacatccttaatttcttctactg

SEQ ID NO: 205426 - DNA, 25 bp, Canis familiaris
ttcaattttcatttacattttgctg

SEQ ID NO: 205427 - DNA, 25 bp, Canis familiaris
ttcaagcttgttctccattttgtcc

SEQ ID NO: 205428 - DNA, 25 bp, Canis familiaris
ttcgagctgtaaagtccattctgag

SEQ ID NO: 205429 - DNA, 25 bp, Canis familiaris
ttcactcagtagagtccactctggg

SEQ ID NO: 205430 - DNA, 25 bp, Canis familiaris
ttcactacttgtgtgacactgtgtg

SEQ ID NO: 205431 - DNA, 25 bp, Canis familiaris
ttcacttcttgttttctagatgata

SEQ ID NO: 205432 - DNA, 25 bp, Canis familiaris
ttcacttttgtgccatttttgtaaa

SEQ ID NO: 205433 - DNA, 25 bp, Canis familiaris
ttcactttagcatacctatttacaa

SEQ ID NO: 205434 - DNA, 25 bp, Canis familiaris
ttcaatcataactccactttacaca

SEQ ID NO: 205435 - DNA, 25 bp, Canis familiaris
ttcaaatgaaactcctttataggct

SEQ ID NO: 205436 - DNA, 25 bp, Canis familiaris
ttcacttagccctggatttttgagt

SEQ ID NO: 205437 - DNA, 25 bp, Canis familiaris
ttccttacccaaagttcgtgctcag

SEQ ID NO: 205438 - DNA, 25 bp, Canis familiaris
ttctctttgaacattattgccttag

SEQ ID NO: 205439 - DNA, 25 bp, Canis familiaris
ttcactttgtggattttggtttggg

SEQ ID NO: 205440 - DNA, 25 bp, Canis familiaris
ttcacttctgtctcattactaggtt

SEQ ID NO: 205441 - DNA, 25 bp, Canis familiaris
ttcgttcgtcccttactaggtgtat

SEQ ID NO: 205442 - DNA, 25 bp, Canis familiaris
ttctcctggattgtcgactcgggta

SEQ ID NO: 205443 - DNA, 25 bp, Canis familiaris
ttgtcctcgttttcgattgggaaag

SEQ ID NO: 205444 - DNA, 25 bp, Canis familiaris
ttctactcctctgacgaatgggtat

SEQ ID NO: 205445 - DNA, 25 bp, Canis familiaris
ttctacaccaccaacaaaatggtct

SEQ ID NO: 205446 - DNA, 25 bp, Canis familiaris
ttcaagaccagcctggccaacatgg

SEQ ID NO: 205447 - DNA, 25 bp, Canis familiaris
ttcaatgactggctgttccctgtat

SEQ ID NO: 205448 - DNA, 25 bp, Canis familiaris
ttcagaggctggattctctccttct

SEQ ID NO: 205449 - DNA, 25 bp, Canis familiaris
ttcaaacgagatgtctctctctctc

SEQ ID NO: 205450 - DNA, 25 bp, Canis familiaris
ttcaaattgagtggtctgtccttca

SEQ ID NO: 205451 - DNA, 25 bp, Canis familiaris
ttcaaatgttgtgtcgtctgtcctg

SEQ ID NO: 205452 - DNA, 25 bp, Canis familiaris
ttcacaggttgcggctttctgtggg

SEQ ID NO: 205453 - DNA, 25 bp, Canis familiaris
ttctagtaatgtggctttctgtagc

SEQ ID NO: 205454 - DNA, 25 bp, Canis familiaris
ttctatgtcaagtccccatcatgat

SEQ ID NO: 205455 - DNA, 25 bp, Canis familiaris
ttcttgtgttgctctcagactgata

SEQ ID NO: 205456 - DNA, 25 bp, Canis familiaris
ttctagctgtttgcatcaaagaaaa

SEQ ID NO: 205457 - DNA, 25 bp, Canis familiaris
ttctagcttctctgcattaaacaca

SEQ ID NO: 205458 - DNA, 25 bp, Canis familiaris
ttctggaggctcccttgggacaagc

SEQ ID NO: 205459 - DNA, 25 bp, Canis familiaris
ttctgcagggccatttgtggtacct

SEQ ID NO: 205460 - DNA, 25 bp, Canis familiaris
ttcgcagacccaagtttactaattg

SEQ ID NO: 205461 - DNA, 25 bp, Canis familiaris
ttcctgaccacgctatttaaaatta

SEQ ID NO: 205462 - DNA, 25 bp, Canis familiaris
ttccccagacttaacttgaaattct

SEQ ID NO: 205463 - DNA, 25 bp, Canis familiaris
ttgctgtacgatataaattaaggac

SEQ ID NO: 205464 - DNA, 25 bp, Canis familiaris
ttctgttcactttaagttgccagga

SEQ ID NO: 205465 - DNA, 25 bp, Canis familiaris
ttctgtaacgcactaagttcttaga

SEQ ID NO: 205466 - DNA, 25 bp, Canis familiaris
ttggaaactgactagtgccgttaat

SEQ ID NO: 205467 - DNA, 25 bp, Canis familiaris
ttgaaccactcctgtgccgtaataa

SEQ ID NO: 205468 - DNA, 25 bp, Canis familiaris
ttgggccctgccaattaatgttaaa

SEQ ID NO: 205469 - DNA, 25 bp, Canis familiaris
ttgcgaggccctgtaatttggaaat

SEQ ID NO: 205470 - DNA, 25 bp, Canis familiaris
ttcaggtcccttttattatggctat

SEQ ID NO: 205471 - DNA, 25 bp, Canis familiaris
ttcagggcctcttagtcattgatga

SEQ ID NO: 205472 - DNA, 25 bp, Canis familiaris
ttcagttccgctcagtatctgtaaa

SEQ ID NO: 205473 - DNA, 25 bp, Canis familiaris
ttcgctctgacccaggtatagctca

SEQ ID NO: 205474 - DNA, 25 bp, Canis familiaris
ttcgttgacccagtgttaccatgtc

SEQ ID NO: 205475 - DNA, 25 bp, Canis familiaris
ttctgttaacccttgtatcctacta

SEQ ID NO: 205476 - DNA, 25 bp, Canis familiaris
ttctgttaaattcggccatcactag

SEQ ID NO: 205477 - DNA, 25 bp, Canis familiaris
ttctgcttaaccgggccatggaaaa

SEQ ID NO: 205478 - DNA, 25 bp, Canis familiaris
ttctcttaagccgaagtgagcgcct

SEQ ID NO: 205479 - DNA, 25 bp, Canis familiaris
ttcaccatacctcaagtcgtgctgt

SEQ ID NO: 205480 - DNA, 25 bp, Canis familiaris
ttcaccatacacaaaaatcactcaa

SEQ ID NO: 205481 - DNA, 25 bp, Canis familiaris
ttcaacatccacaaactcatccgtt

SEQ ID NO: 205482 - DNA, 25 bp, Canis familiaris
ttcaagactctcagagctccgcagt

SEQ ID NO: 205483 - DNA, 25 bp, Canis familiaris
ttcacaggcgctggggtgcccagcc

SEQ ID NO: 205484 - DNA, 25 bp, Canis familiaris
ttcacaaacaagtcgtccagcagcc

SEQ ID NO: 205485 - DNA, 25 bp, Canis familiaris
ttcatcatgaccagaagcttgacgc

SEQ ID NO: 205486 - DNA, 25 bp, Canis familiaris
ttcatgtaagctggaactttcacag

SEQ ID NO: 205487 - DNA, 25 bp, Canis familiaris
ttcatgcccactggttcttgatctt

SEQ ID NO: 205488 - DNA, 25 bp, Canis familiaris
ttcatccagacttcttgcctgaaat

SEQ ID NO: 205489 - DNA, 25 bp, Canis familiaris
ttcaccagccaagtacctctgagat

SEQ ID NO: 205490 - DNA, 25 bp, Canis familiaris
ttctcagcggagtttccctgaacca

SEQ ID NO: 205491 - DNA, 25 bp, Canis familiaris
ttccacggtgtaacccgaaggtatg

SEQ ID NO: 205492 - DNA, 25 bp, Canis familiaris
ttcactccgtttgccctagagggag

SEQ ID NO: 205493 - DNA, 25 bp, Canis familiaris
ttcagctcccttctctttataagga

SEQ ID NO: 205494 - DNA, 25 bp, Canis familiaris
ttcagtactcttcctatttgacaga

SEQ ID NO: 205495 - DNA, 25 bp, Canis familiaris
ttcaggagctgctttctgtttggcc

SEQ ID NO: 205496 - DNA, 25 bp, Canis familiaris
ttcttagtgcagtttgggggctccc

SEQ ID NO: 205497 - DNA, 25 bp, Canis familiaris
ttgtttgaccgtcggtgaggtccaa

SEQ ID NO: 205498 - DNA, 25 bp, Canis familiaris
ttctttgccggcctggtgaagtaca

SEQ ID NO: 205499 - DNA, 25 bp, Canis familiaris
ttctcattccttccgttgtatgtaa

SEQ ID NO: 205500 - DNA, 25 bp, Canis familiaris
ttcatatgtccctcgtgaggctgga

SEQ ID NO: 205501 - DNA, 25 bp, Canis familiaris
ttcaactcacagcctcggaactgaa

SEQ ID NO: 205502 - DNA, 25 bp, Canis familiaris
ttcacgctacaggtctagaacagca

SEQ ID NO: 205503 - DNA, 25 bp, Canis familiaris
ttcactctcaaagtctacagctcag

SEQ ID NO: 205504 - DNA, 25 bp, Canis familiaris
ttcacgctcaaagcttacacagccc

SEQ ID NO: 205505 - DNA, 25 bp, Canis familiaris
ttcacggataagttagcaccaccac

SEQ ID NO: 205506 - DNA, 25 bp, Canis familiaris
ttcaccgaatacttcagcatgcaca

SEQ ID NO: 205507 - DNA, 25 bp, Canis familiaris
ttcagcctgattaatgtggcacaac

SEQ ID NO: 205508 - DNA, 25 bp, Canis familiaris
ttcagcctgattaattggcacacag

SEQ ID NO: 205509 - DNA, 25 bp, Canis familiaris
ttcatccttgtccaagcagacaccc

SEQ ID NO: 205510 - DNA, 25 bp, Canis familiaris
ttcatcacttctgcagaactacccc

SEQ ID NO: 205511 - DNA, 25 bp, Canis familiaris
ttcacagattctggcaaatgcggcc

SEQ ID NO: 205512 - DNA, 25 bp, Canis familiaris
ttcaccattctccaggaggctccaa

SEQ ID NO: 205513 - DNA, 25 bp, Canis familiaris
ttcatcctccatgccaaggccaaac

SEQ ID NO: 205514 - DNA, 25 bp, Canis familiaris
ttcaacatccccaaggtgccataag

SEQ ID NO: 205515 - DNA, 25 bp, Canis familiaris
ttcaaccgtggaaagatgccaatgg

SEQ ID NO: 205516 - DNA, 25 bp, Canis familiaris
ttcaacacgaggggaggacctggaa

SEQ ID NO: 205517 - DNA, 25 bp, Canis familiaris
ttcaacccggggaagccctgtgatt

SEQ ID NO: 205518 - DNA, 25 bp, Canis familiaris
ttcacccactgggggatggactttt

SEQ ID NO: 205519 - DNA, 25 bp, Canis familiaris
ttcacgcccgcgaagcgtagacgat

SEQ ID NO: 205520 - DNA, 25 bp, Canis familiaris
ttcagccacccgagattgagcaata

SEQ ID NO: 205521 - DNA, 25 bp, Canis familiaris
ttcatccatccttgggcaatgccat

SEQ ID NO: 205522 - DNA, 25 bp, Canis familiaris
ttcactctgccttggacatgggctc

SEQ ID NO: 205523 - DNA, 25 bp, Canis familiaris
ttcatcttgcacactagctcgacat

SEQ ID NO: 205524 - DNA, 25 bp, Canis familiaris
ttctgctgcgagaacgacatcgaca

SEQ ID NO: 205525 - DNA, 25 bp, Canis familiaris
ttctctggagtaccagatgccacca

SEQ ID NO: 205526 - DNA, 25 bp, Canis familiaris
ttctctatgttatcagatgccccct

SEQ ID NO: 205527 - DNA, 25 bp, Canis familiaris
ttcttagtaaccttcaccattcatg

SEQ ID NO: 205528 - DNA, 25 bp, Canis familiaris
ttctagactaacaactgattttcat

SEQ ID NO: 205529 - DNA, 25 bp, Canis familiaris
ttcttgatcttaggaggttttgcag

SEQ ID NO: 205530 - DNA, 25 bp, Canis familiaris
ttcttacttagactttttggatgtg

SEQ ID NO: 205531 - DNA, 25 bp, Canis familiaris
ttcgttcttagtctttttcttgtat

SEQ ID NO: 205532 - DNA, 25 bp, Canis familiaris
ttcacttctaaatattattcctgtt

SEQ ID NO: 205533 - DNA, 25 bp, Canis familiaris
ttccttctaacatcgtcattctttg

SEQ ID NO: 205534 - DNA, 25 bp, Canis familiaris
ttgtccctaaagagtcccctgtggg

SEQ ID NO: 205535 - DNA, 25 bp, Canis familiaris
ttgttcatccaatgaagtcccgcct

SEQ ID NO: 205536 - DNA, 25 bp, Canis familiaris
ttcttgctcaaactggagtcccacc

SEQ ID NO: 205537 - DNA, 25 bp, Canis familiaris
ttcttggcaagctgttgttggcctc

SEQ ID NO: 205538 - DNA, 25 bp, Canis familiaris
ttcttggatactcctttcattgcct

SEQ ID NO: 205539 - DNA, 25 bp, Canis familiaris
ttctagctctactgttacattcctc

SEQ ID NO: 205540 - DNA, 25 bp, Canis familiaris
ttcatagtctaatagtcctttccga

SEQ ID NO: 205541 - DNA, 25 bp, Canis familiaris
ttcatacatctactaaatttttcca

SEQ ID NO: 205542 - DNA, 25 bp, Canis familiaris
ttctaatcaattttttcctatctaa

SEQ ID NO: 205543 - DNA, 25 bp, Canis familiaris
ttcaggtactttaattttattcaag

SEQ ID NO: 205544 - DNA, 25 bp, Canis familiaris
ttcagatggactaattttgtttatt

SEQ ID NO: 205545 - DNA, 25 bp, Canis familiaris
ttctgaggcaccttctttgacctca

SEQ ID NO: 205546 - DNA, 25 bp, Canis familiaris
ttcatagtcccactgttggtcttcg

SEQ ID NO: 205547 - DNA, 25 bp, Canis familiaris
ttcgtacctccatctggatttgcag

SEQ ID NO: 205548 - DNA, 25 bp, Canis familiaris
ttcagtacctctcacggagctgtga

SEQ ID NO: 205549 - DNA, 25 bp, Canis familiaris
ttcaccctcagacacgtacgtgatg

SEQ ID NO: 205550 - DNA, 25 bp, Canis familiaris
ttcacctccaagcaaggctctgtag

SEQ ID NO: 205551 - DNA, 25 bp, Canis familiaris
ttcaccaccatggagaaggctgggg

SEQ ID NO: 205552 - DNA, 25 bp, Canis familiaris
ttctcccaatggtggcgtgatggcc

SEQ ID NO: 205553 - DNA, 25 bp, Canis familiaris
ttctaccaagaccgatggtggcccc

SEQ ID NO: 205554 - DNA, 25 bp, Canis familiaris
ttgcaaccaacatagggaggctcac

SEQ ID NO: 205555 - DNA, 25 bp, Canis familiaris
ttcacaccacctccatggggagcta

SEQ ID NO: 205556 - DNA, 25 bp, Canis familiaris
ttcagcacctacgtcatggggcgta

SEQ ID NO: 205557 - DNA, 25 bp, Canis familiaris
ttcaccaccacagctgagagggaaa

SEQ ID NO: 205558 - DNA, 25 bp, Canis familiaris
ttcactgtcctacctcagaggtaca

SEQ ID NO: 205559 - DNA, 25 bp, Canis familiaris
ttcatgcttactacccaagtgggag

SEQ ID NO: 205560 - DNA, 25 bp, Canis familiaris
ttcctgctaccgacccaggaggact

SEQ ID NO: 205561 - DNA, 25 bp, Canis familiaris
ttcctgctaccgacccaggaggact

SEQ ID NO: 205562 - DNA, 25 bp, Canis familiaris
ttcgtgtaccggtcccagaagacct

SEQ ID NO: 205563 - DNA, 25 bp, Canis familiaris
ttcaggtgtccgggcgccaggacac

SEQ ID NO: 205564 - DNA, 25 bp, Canis familiaris
ttcaggtgtccgaagaagcccacat

SEQ ID NO: 205565 - DNA, 25 bp, Canis familiaris
ttcagtttcctgtagacaaacacaa

SEQ ID NO: 205566 - DNA, 25 bp, Canis familiaris
ttcagcttcacggtgatgaaaaacc

SEQ ID NO: 205567 - DNA, 25 bp, Canis familiaris
ttcagcttcacggtgatgaaaaacc

SEQ ID NO: 205568 - DNA, 25 bp, Canis familiaris
ttcagaccacggccatacaacaaca

SEQ ID NO: 205569 - DNA, 25 bp, Canis familiaris
ttcactccgactccaacgacaataa

SEQ ID NO: 205570 - DNA, 25 bp, Canis familiaris
ttcactccagaattccagaaaagaa

SEQ ID NO: 205571 - DNA, 25 bp, Canis familiaris
ttctttcagtaattaaaataacagc

SEQ ID NO: 205572 - DNA, 25 bp, Canis familiaris
ttctctttgtcctaaaaaacatctc

SEQ ID NO: 205573 - DNA, 25 bp, Canis familiaris
ttcacttcttccataaaaaatcaca

SEQ ID NO: 205574 - DNA, 25 bp, Canis familiaris
ttcacttttcttgaaagaactctag

SEQ ID NO: 205575 - DNA, 25 bp, Canis familiaris
ttcacttttcttttgtacatacttg

SEQ ID NO: 205576 - DNA, 25 bp, Canis familiaris
ttcacttttgctattacacttttaa

SEQ ID NO: 205577 - DNA, 25 bp, Canis familiaris
ttctagatttcctttacctttctgc

SEQ ID NO: 205578 - DNA, 25 bp, Canis familiaris
ttctgaatttctcttaccttgtcac

SEQ ID NO: 205579 - DNA, 25 bp, Canis familiaris
ttctcagactttctgaactcccaag

SEQ ID NO: 205580 - DNA, 25 bp, Canis familiaris
ttctcagatttttcatacgttccaa

SEQ ID NO: 205581 - DNA, 25 bp, Canis familiaris
ttctcaggtcatatcaccacattcc

SEQ ID NO: 205582 - DNA, 25 bp, Canis familiaris
ttctcaacaatcacctcacattagc

SEQ ID NO: 205583 - DNA, 25 bp, Canis familiaris
ttctcaacatgaccacccaagattc

SEQ ID NO: 205584 - DNA, 25 bp, Canis familiaris
ttctacccgtatcccaagattcaaa

SEQ ID NO: 205585 - DNA, 25 bp, Canis familiaris
ttctcccactttctagacttcaaga

SEQ ID NO: 205586 - DNA, 25 bp, Canis familiaris
ttcatcctcactgtttggcctaaaa

SEQ ID NO: 205587 - DNA, 25 bp, Canis familiaris
ttcatcctacaattattttccaaaa

SEQ ID NO: 205588 - DNA, 25 bp, Canis familiaris
ttcagcatacaatctttttccataa

SEQ ID NO: 205589 - DNA, 25 bp, Canis familiaris
ttcagcagccaagcatctattccca

SEQ ID NO: 205590 - DNA, 25 bp, Canis familiaris
ttcagagctcaagtcatgtgcagat

SEQ ID NO: 205591 - DNA, 25 bp, Canis familiaris
ttcagagctagaactcagcagtcta

SEQ ID NO: 205592 - DNA, 25 bp, Canis familiaris
ttcagagtagaagtgccatgttggc

SEQ ID NO: 205593 - DNA, 25 bp, Canis familiaris
ttcacgtagaagtccagatccagat

SEQ ID NO: 205594 - DNA, 25 bp, Canis familiaris
ttcatcctagaatcccatcacacta

SEQ ID NO: 205595 - DNA, 25 bp, Canis familiaris
ttcatgccactgaatacgttgaaaa

SEQ ID NO: 205596 - DNA, 25 bp, Canis familiaris
ttcagtagcagatgccgttcaaaag

SEQ ID NO: 205597 - DNA, 25 bp, Canis familiaris
ttcgtcacaagcctgcgttcaagaa

SEQ ID NO: 205598 - DNA, 25 bp, Canis familiaris
ttcttgtgcgcacacttgatgaagg

SEQ ID NO: 205599 - DNA, 25 bp, Canis familiaris
ttcttgtcccctcagaagacttaga

SEQ ID NO: 205600 - DNA, 25 bp, Canis familiaris
ttctttgcccctcagatacaatatt

SEQ ID NO: 205601 - DNA, 25 bp, Canis familiaris
ttctttgccttctaaaagccactta

SEQ ID NO: 205602 - DNA, 25 bp, Canis familiaris
ttctttcagcttctgcaaaccaccc

SEQ ID NO: 205603 - DNA, 25 bp, Canis familiaris
ttctagtcgttttcaaagcgcctcg

SEQ ID NO: 205604 - DNA, 25 bp, Canis familiaris
ttctacacgtttttggtcgcgtcgt

SEQ ID NO: 205605 - DNA, 25 bp, Canis familiaris
ttcttccatgttgttggctctggga

SEQ ID NO: 205606 - DNA, 25 bp, Canis familiaris
ttcagctcctggagtctgtgctcag

SEQ ID NO: 205607 - DNA, 25 bp, Canis familiaris
ttcgctcactcgcatgtcagtgaaa

SEQ ID NO: 205608 - DNA, 25 bp, Canis familiaris
ttcgccgtgtgccgtggtgaaacgg

SEQ ID NO: 205609 - DNA, 25 bp, Canis familiaris
ttccctattacctgtgcgtgatcgg

SEQ ID NO: 205610 - DNA, 25 bp, Canis familiaris
ttctggtttaccttttcttgtgaga

SEQ ID NO: 205611 - DNA, 25 bp, Canis familiaris
ttcttctttccgtttgtttgacaat

SEQ ID NO: 205612 - DNA, 25 bp, Canis familiaris
ttcttgcttcccttggagtactgta

SEQ ID NO: 205613 - DNA, 25 bp, Canis familiaris
ttcttcattccctggaaggctccat

SEQ ID NO: 205614 - DNA, 25 bp, Canis familiaris
ttctcttacccatggaaagcctgta

SEQ ID NO: 205615 - DNA, 25 bp, Canis familiaris
ttctcttcaaacaagaacaagccca

SEQ ID NO: 205616 - DNA, 25 bp, Canis familiaris
ttcattactaaccaaaacctgccaa

SEQ ID NO: 205617 - DNA, 25 bp, Canis familiaris
ttcttacgaccccagaactctaagc

SEQ ID NO: 205618 - DNA, 25 bp, Canis familiaris
ttctaaggaccacagaactatacct

SEQ ID NO: 205619 - DNA, 25 bp, Canis familiaris
ttctaacaacccctgttataacact

SEQ ID NO: 205620 - DNA, 25 bp, Canis familiaris
ttcccacataccagccttaaacaac

SEQ ID NO: 205621 - DNA, 25 bp, Canis familiaris
ttcagccctttcaaccattagagac

SEQ ID NO: 205622 - DNA, 25 bp, Canis familiaris
ttcatttcttcccacatctttgaac

SEQ ID NO: 205623 - DNA, 25 bp, Canis familiaris
ttctttcatgtcaggcgttaaactg

SEQ ID NO: 205624 - DNA, 25 bp, Canis familiaris
ttctttcattacccttcaaggtcta

SEQ ID NO: 205625 - DNA, 25 bp, Canis familiaris
ttctttagttctctatatcagggga

SEQ ID NO: 205626 - DNA, 25 bp, Canis familiaris
ttctattttgttgttttcggaactg

SEQ ID NO: 205627 - DNA, 25 bp, Canis familiaris
ttgcatattttgtgtttcctcggta

SEQ ID NO: 205628 - DNA, 25 bp, Canis familiaris
ttctcttgtatgagtttccttggga

SEQ ID NO: 205629 - DNA, 25 bp, Canis familiaris
ttggttttgtggatcccatagtgga

SEQ ID NO: 205630 - DNA, 25 bp, Canis familiaris
ttcagttctttccttctcgaaggag

SEQ ID NO: 205631 - DNA, 25 bp, Canis familiaris
ttcattctgtctgccatttggcacg

SEQ ID NO: 205632 - DNA, 25 bp, Canis familiaris
ttcatctcatgtcctcattttacac

SEQ ID NO: 205633 - DNA, 25 bp, Canis familiaris
ttcatctttcctgttctgacactaa

SEQ ID NO: 205634 - DNA, 25 bp, Canis familiaris
ttgacgttatccttttatgacaaac

SEQ ID NO: 205635 - DNA, 25 bp, Canis familiaris
ttcagtggttcattttgcttacaga

SEQ ID NO: 205636 - DNA, 25 bp, Canis familiaris
ttcttgagttagatgcacttgaagc

SEQ ID NO: 205637 - DNA, 25 bp, Canis familiaris
ttcttggctgatccatctgcatttg

SEQ ID NO: 205638 - DNA, 25 bp, Canis familiaris
ttctgtgtctgtactgctcattatg

SEQ ID NO: 205639 - DNA, 25 bp, Canis familiaris
ttcagctgtcatgacccattagaga

SEQ ID NO: 205640 - DNA, 25 bp, Canis familiaris
ttcatctgtgatgtctcctcgaagg

SEQ ID NO: 205641 - DNA, 25 bp, Canis familiaris
ttcatcatgatgtcgtgtgcttcta

SEQ ID NO: 205642 - DNA, 25 bp, Canis familiaris
ttcatctgcatgacttagctgttca

SEQ ID NO: 205643 - DNA, 25 bp, Canis familiaris
ttctcaaggctgtcgcttgctcaga

SEQ ID NO: 205644 - DNA, 25 bp, Canis familiaris
ttctcacagtatttctcctgctggc

SEQ ID NO: 205645 - DNA, 25 bp, Canis familiaris
ttctcaactaaagtacagtgtgcta

SEQ ID NO: 205646 - DNA, 25 bp, Canis familiaris
ttctatcagcaagactacagtagga

SEQ ID NO: 205647 - DNA, 25 bp, Canis familiaris
ttcacatagccgtgctcacagttgt

SEQ ID NO: 205648 - DNA, 25 bp, Canis familiaris
ttcacattctccatctcaagtatct

SEQ ID NO: 205649 - DNA, 25 bp, Canis familiaris
ttcactcatcatcctcaagcaagta

SEQ ID NO: 205650 - DNA, 25 bp, Canis familiaris
ttcacccagctccacagcaaaaaaa

SEQ ID NO: 205651 - DNA, 25 bp, Canis familiaris
ttcacccttcgccataaagcaggaa

SEQ ID NO: 205652 - DNA, 25 bp, Canis familiaris
ttcattgcctgcgccagaagacgga

SEQ ID NO: 205653 - DNA, 25 bp, Canis familiaris
ttcttcgtggccgagcaggtggggc

SEQ ID NO: 205654 - DNA, 25 bp, Canis familiaris
ttcatccgtggagcacacaggggcc

SEQ ID NO: 205655 - DNA, 25 bp, Canis familiaris
ttcatcctgaaagcacacacgggcc

SEQ ID NO: 205656 - DNA, 25 bp, Canis familiaris
ttcccatgaatacccaacgagaccg

SEQ ID NO: 205657 - DNA, 25 bp, Canis familiaris
ttccagatgctatcccgacagaaca

SEQ ID NO: 205658 - DNA, 25 bp, Canis familiaris
ttcggactactcccgttaagctggt

SEQ ID NO: 205659 - DNA, 25 bp, Canis familiaris
ttcttggcttcccaccttaattggg

SEQ ID NO: 205660 - DNA, 25 bp, Canis familiaris
ttctttgcctccaccattaaataca

SEQ ID NO: 205661 - DNA, 25 bp, Canis familiaris
ttcagtcagtctgctcccttaaaaa

SEQ ID NO: 205662 - DNA, 25 bp, Canis familiaris
ttcattctatccctcccaataaaaa

SEQ ID NO: 205663 - DNA, 25 bp, Canis familiaris
ttcatttcaccccccaaagagaagt

SEQ ID NO: 205664 - DNA, 25 bp, Canis familiaris
ttcatttccggtctccaagagaaaa

SEQ ID NO: 205665 - DNA, 25 bp, Canis familiaris
ttgagttccgttacgccaagatgcc

SEQ ID NO: 205666 - DNA, 25 bp, Canis familiaris
ttggaatcccttaaccagtaagcaa

SEQ ID NO: 205667 - DNA, 25 bp, Canis familiaris
ttgacaaccttttacctgccaaaag

SEQ ID NO: 205668 - DNA, 25 bp, Canis familiaris
ttgtgaacgttttttgatggaaaag

SEQ ID NO: 205669 - DNA, 25 bp, Canis familiaris
ttgtgaacaagaatttttaaactat

SEQ ID NO: 205670 - DNA, 25 bp, Canis familiaris
ttgtaagaagcacttttcccaaata

SEQ ID NO: 205671 - DNA, 25 bp, Canis familiaris
ttgaaaagaaatttgtccttgaagc

SEQ ID NO: 205672 - DNA, 25 bp, Canis familiaris
ttgaaaaagatttggccctggtaag

SEQ ID NO: 205673 - DNA, 25 bp, Canis familiaris
ttctaatacaatcctggcagcctgg

SEQ ID NO: 205674 - DNA, 25 bp, Canis familiaris
ttctacaacacgggggccgtgctgt

SEQ ID NO: 205675 - DNA, 25 bp, Canis familiaris
ttcttcaagcaactcggtactttta

SEQ ID NO: 205676 - DNA, 25 bp, Canis familiaris
ttctctcaagaattttatccgtttt

SEQ ID NO: 205677 - DNA, 25 bp, Canis familiaris
ttctcccgattgttcttcctatggg

SEQ ID NO: 205678 - DNA, 25 bp, Canis familiaris
ttctcacggtttatactcttacgat

SEQ ID NO: 205679 - DNA, 25 bp, Canis familiaris
ttctacgggatctgttttgtacatt

SEQ ID NO: 205680 - DNA, 25 bp, Canis familiaris
ttcgaatggcaacggttttgtccaa

SEQ ID NO: 205681 - DNA, 25 bp, Canis familiaris
cggaggagtgcgggatcctggacgg

SEQ ID NO: 205682 - DNA, 25 bp, Canis familiaris
ttcagcaagggcctggctgtgtgct

SEQ ID NO: 205683 - DNA, 25 bp, Canis familiaris
ttcagatcgtggctattggctctcg

SEQ ID NO: 205684 - DNA, 25 bp, Canis familiaris
ttcagtgttagtcttggtctccagt

SEQ ID NO: 205685 - DNA, 25 bp, Canis familiaris
ttcaggggagttgctggtcccaggc

SEQ ID NO: 205686 - DNA, 25 bp, Canis familiaris
ttcagagtgggtgtcttgtgtccga

SEQ ID NO: 205687 - DNA, 25 bp, Canis familiaris
ttcaggtctgtcactcttgttacat

SEQ ID NO: 205688 - DNA, 25 bp, Canis familiaris
ttcggattaccctattgattgacat

SEQ ID NO: 205689 - DNA, 25 bp, Canis familiaris
ttcagaataaaggtgttcattcctc

SEQ ID NO: 205690 - DNA, 25 bp, Canis familiaris
ttgcaactacaagggagctcaatca

SEQ ID NO: 205691 - DNA, 25 bp, Canis familiaris
ttcattctactaggtcattccataa

SEQ ID NO: 205692 - DNA, 25 bp, Canis familiaris
ttgcatttcttaggtgttttaattt

SEQ ID NO: 205693 - DNA, 25 bp, Canis familiaris
ttctttttcacgtggtatttgtctt

SEQ ID NO: 205694 - DNA, 25 bp, Canis familiaris
ttctttttatcctgttatttatcaa

SEQ ID NO: 205695 - DNA, 25 bp, Canis familiaris
ttctgatttaactttgttttcttca

SEQ ID NO: 205696 - DNA, 25 bp, Canis familiaris
ttcgtataaagtactgttctttcta

SEQ ID NO: 205697 - DNA, 25 bp, Canis familiaris
ttcagtatatgatctcctttattta

SEQ ID NO: 205698 - DNA, 25 bp, Canis familiaris
ttcagtattttctacataatatggt

SEQ ID NO: 205699 - DNA, 25 bp, Canis familiaris
ttcatgtatttcaaactactccctt

SEQ ID NO: 205700 - DNA, 25 bp, Canis familiaris
ttcattttaatatgccttccctctg

SEQ ID NO: 205701 - DNA, 25 bp, Canis familiaris
ttctaattaatcccacttcccatgg

SEQ ID NO: 205702 - DNA, 25 bp, Canis familiaris
ttcttaagattcctacttcccaaag

SEQ ID NO: 205703 - DNA, 25 bp, Canis familiaris
ttcttaggaattcatttctcagcaa

SEQ ID NO: 205704 - DNA, 25 bp, Canis familiaris
ttcttactatttgatatatatccct

SEQ ID NO: 205705 - DNA, 25 bp, Canis familiaris
ttgttgagcttctgacattccactt

SEQ ID NO: 205706 - DNA, 25 bp, Canis familiaris
ttctttttccagcattctacttgca

SEQ ID NO: 205707 - DNA, 25 bp, Canis familiaris
ttcttttcttagttttcaccatcat

SEQ ID NO: 205708 - DNA, 25 bp, Canis familiaris
ttcatcttatttcatttttccttcc

SEQ ID NO: 205709 - DNA, 25 bp, Canis familiaris
ttctcgttcttggacttcttttatt

SEQ ID NO: 205710 - DNA, 25 bp, Canis familiaris
ttcttttgactttttctttcatatt

SEQ ID NO: 205711 - DNA, 25 bp, Canis familiaris
ttcagtttgtttttattctgttttg

SEQ ID NO: 205712 - DNA, 25 bp, Canis familiaris
ttctgggttctttttgtctgacttt

SEQ ID NO: 205713 - DNA, 25 bp, Canis familiaris
ttcagggatctttttctcttactat

SEQ ID NO: 205714 - DNA, 25 bp, Canis familiaris
ttcacgtcttagtttctgcttttgt

SEQ ID NO: 205715 - DNA, 25 bp, Canis familiaris
ttcacggctttctcttgatactttt

SEQ ID NO: 205716 - DNA, 25 bp, Canis familiaris
ttccaactgttcactatttctgctt

SEQ ID NO: 205717 - DNA, 25 bp, Canis familiaris
ttctaactgggggcctgcaatctgt

SEQ ID NO: 205718 - DNA, 25 bp, Canis familiaris
ttctttcctggggatggaatcatgc

SEQ ID NO: 205719 - DNA, 25 bp, Canis familiaris
ttctttcttgaataggaaatctgct

SEQ ID NO: 205720 - DNA, 25 bp, Canis familiaris
ttcttttctttttctgcaaactggc

SEQ ID NO: 205721 - DNA, 25 bp, Canis familiaris
ttcattttctttatccggcacaatc

SEQ ID NO: 205722 - DNA, 25 bp, Canis familiaris
ttcaccttctgtttagactggcact

SEQ ID NO: 205723 - DNA, 25 bp, Canis familiaris
ttccggtcatgttaaagtgtcctga

SEQ ID NO: 205724 - DNA, 25 bp, Canis familiaris
ttcggcagctcgtgaaactgtccaa

SEQ ID NO: 205725 - DNA, 25 bp, Canis familiaris
ttcggaccaggtagattcgactcaa

SEQ ID NO: 205726 - DNA, 25 bp, Canis familiaris
ttcgaacgcactgatttcgaccagg

SEQ ID NO: 205727 - DNA, 25 bp, Canis familiaris
ttcgtccagcggcatgtgccgacca

SEQ ID NO: 205728 - DNA, 25 bp, Canis familiaris
ttcgatcctcgtcaggtgcaggtca

SEQ ID NO: 205729 - DNA, 25 bp, Canis familiaris
ttcgatcctggaccggatgcacgga

SEQ ID NO: 205730 - DNA, 25 bp, Canis familiaris
ttctgcactgggccgaggatgtcgg

SEQ ID NO: 205731 - DNA, 25 bp, Canis familiaris
ttctttggagcccaggatgccggca

SEQ ID NO: 205732 - DNA, 25 bp, Canis familiaris
ttctttggagcccaggatgccggca

SEQ ID NO: 205733 - DNA, 25 bp, Canis familiaris
gagtgtcagcgagatcagatgggtt

SEQ ID NO: 205734 - DNA, 25 bp, Canis familiaris
ttcggggagatccaggacctgctga

SEQ ID NO: 205735 - DNA, 25 bp, Canis familiaris
ttcagggggtccctcaacatcagat

SEQ ID NO: 205736 - DNA, 25 bp, Canis familiaris
ttcaggaggcgtcggctgcaaatgc

SEQ ID NO: 205737 - DNA, 25 bp, Canis familiaris
ttcacgatgcagcctgcttctgcaa

SEQ ID NO: 205738 - DNA, 25 bp, Canis familiaris
ttcttgcatgcatcgcttcgagacc

SEQ ID NO: 205739 - DNA, 25 bp, Canis familiaris
ttcttgcatgcatcgcttcgagacc

SEQ ID NO: 205740 - DNA, 25 bp, Canis familiaris
ttcttgcatgcatcgcttcgagacc

SEQ ID NO: 205741 - DNA, 25 bp, Canis familiaris
ttcttgcatgcatcgcttcgagacc

SEQ ID NO: 205742 - DNA, 25 bp, Canis familiaris
ttctgagcgatagcagcctgagccc

SEQ ID NO: 205743 - DNA, 25 bp, Canis familiaris
ttctggagcaggggctcagacccca

SEQ ID NO: 205744 - DNA, 25 bp, Canis familiaris
ttcttgaagaattgcttgccccgaa

SEQ ID NO: 205745 - DNA, 25 bp, Canis familiaris
ttgtgtatcgactcaaccgacgaga

SEQ ID NO: 205746 - DNA, 25 bp, Canis familiaris
ttctagagctaatacatgccgacgg

SEQ ID NO: 205747 - DNA, 25 bp, Canis familiaris
ttctggagttaaagaccggcttgaa

SEQ ID NO: 205748 - DNA, 25 bp, Canis familiaris
ttcaggagtttgtattacggctcaa

SEQ ID NO: 205749 - DNA, 25 bp, Canis familiaris
ttcatggatgtttcagttttagcta

SEQ ID NO: 205750 - DNA, 25 bp, Canis familiaris
ttctggtttcaggttctctaggcaa

SEQ ID NO: 205751 - DNA, 25 bp, Canis familiaris
ttcatggtcattgctttctccaaga

SEQ ID NO: 205752 - DNA, 25 bp, Canis familiaris
ttcaggtttggtttcagacatcgca

SEQ ID NO: 205753 - DNA, 25 bp, Canis familiaris
ttctgggtctggtttctgagtggcc

SEQ ID NO: 205754 - DNA, 25 bp, Canis familiaris
ttcatggggcggccatccagaggac

SEQ ID NO: 205755 - DNA, 25 bp, Canis familiaris
ttcatgatggtgagtcccgcggaga

SEQ ID NO: 205756 - DNA, 25 bp, Canis familiaris
ttcatgcagagggtggccgggtgga

SEQ ID NO: 205757 - DNA, 25 bp, Canis familiaris
ttcatgagaagcctggcctcactgg

SEQ ID NO: 205758 - DNA, 25 bp, Canis familiaris
ttcagacatcagtggcactctcaag

SEQ ID NO: 205759 - DNA, 25 bp, Canis familiaris
ttcagaatctgtgagcctctgcctg

SEQ ID NO: 205760 - DNA, 25 bp, Canis familiaris
ttgcagaattgcgttgccctgatgc

SEQ ID NO: 205761 - DNA, 25 bp, Canis familiaris
ttcagatcatctctttctctttgga

SEQ ID NO: 205762 - DNA, 25 bp, Canis familiaris
ttcatatcatatactttttattcaa

SEQ ID NO: 205763 - DNA, 25 bp, Canis familiaris
ttctattattctactcttgtataat

SEQ ID NO: 205764 - DNA, 25 bp, Canis familiaris
ttcatagtattcctcatcatcttct

SEQ ID NO: 205765 - DNA, 25 bp, Canis familiaris
ttcagaatatcttcttcactctcct

SEQ ID NO: 205766 - DNA, 25 bp, Canis familiaris
ttcgaatcctgacttacgatctcta

SEQ ID NO: 205767 - DNA, 25 bp, Canis familiaris
ttcttactctattgtacgtttacac

SEQ ID NO: 205768 - DNA, 25 bp, Canis familiaris
ttcccaacctggcacggttaccagg

SEQ ID NO: 205769 - DNA, 25 bp, Canis familiaris
ttcccaaccgagctcacgtaaatct

SEQ ID NO: 205770 - DNA, 25 bp, Canis familiaris
ttctccacgggaccatatcctaaat

SEQ ID NO: 205771 - DNA, 25 bp, Canis familiaris
ttcttccagggaccaatccctagaa

SEQ ID NO: 205772 - DNA, 25 bp, Canis familiaris
ttcttcggtggcaggtctcctgaga

SEQ ID NO: 205773 - DNA, 25 bp, Canis familiaris
ttcctcgaggcctggcctcactaga

SEQ ID NO: 205774 - DNA, 25 bp, Canis familiaris
ttcctcgaatgccaaggccgacagg

SEQ ID NO: 205775 - DNA, 25 bp, Canis familiaris
ttcttcgtcagccaaggggaacaga

SEQ ID NO: 205776 - DNA, 25 bp, Canis familiaris
ttcttcagtctgccacaggaaccaa

SEQ ID NO: 205777 - DNA, 25 bp, Canis familiaris
ttcattcctatgccgctggactaca

SEQ ID NO: 205778 - DNA, 25 bp, Canis familiaris
ttcattatctgttccttgcaatcaa

SEQ ID NO: 205779 - DNA, 25 bp, Canis familiaris
ttcatttctgattcaccgtcttgtt

SEQ ID NO: 205780 - DNA, 25 bp, Canis familiaris
ttcattttgtctgtagtcctttcta

SEQ ID NO: 205781 - DNA, 25 bp, Canis familiaris
ttctttttctggctgctcagtattt

SEQ ID NO: 205782 - DNA, 25 bp, Canis familiaris
ttcttttttgggtagcagtctctga

SEQ ID NO: 205783 - DNA, 25 bp, Canis familiaris
ttctctgcttttcagatatcgtctc

SEQ ID NO: 205784 - DNA, 25 bp, Canis familiaris
ttctgtgttttgcaagggctctggg

SEQ ID NO: 205785 - DNA, 25 bp, Canis familiaris
ttcttagtattgcatatagccctga

SEQ ID NO: 205786 - DNA, 25 bp, Canis familiaris
ttctctcacttttgagtaccatgga

SEQ ID NO: 205787 - DNA, 25 bp, Canis familiaris
ttcttatcatcttcaggtacaatct

SEQ ID NO: 205788 - DNA, 25 bp, Canis familiaris
ttcttgtagctctgagatgatccct

SEQ ID NO: 205789 - DNA, 25 bp, Canis familiaris
ttcttccagctttagcataccacta

SEQ ID NO: 205790 - DNA, 25 bp, Canis familiaris
ttcttccgctattcatgcaaccagc

SEQ ID NO: 205791 - DNA, 25 bp, Canis familiaris
ttcttcacgacattctgagcatccc

SEQ ID NO: 205792 - DNA, 25 bp, Canis familiaris
ttcatgtaggaattcgagcaaggca

SEQ ID NO: 205793 - DNA, 25 bp, Canis familiaris
ttcatgtcaggcgttaaactgtcag

SEQ ID NO: 205794 - DNA, 25 bp, Canis familiaris
ttcggcggctccatgaattggcaga

SEQ ID NO: 205795 - DNA, 25 bp, Canis familiaris
ttcggggccgcaaactacgaggcga

SEQ ID NO: 205796 - DNA, 25 bp, Canis familiaris
ttcagagtgctgggtttctacgagg

SEQ ID NO: 205797 - DNA, 25 bp, Canis familiaris
ttctgagcttgctcctttacgagct

SEQ ID NO: 205798 - DNA, 25 bp, Canis familiaris
ttctgacaatctaccttttcaaaca

SEQ ID NO: 205799 - DNA, 25 bp, Canis familiaris
ttcggccacaactttttcgacatga

SEQ ID NO: 205800 - DNA, 25 bp, Canis familiaris
ttcgggagaacaacttccgccgcaa

SEQ ID NO: 205801 - DNA, 25 bp, Canis familiaris
ttcgggtagacttcttacgtgcgca

SEQ ID NO: 205802 - DNA, 25 bp, Canis familiaris
ttcgaggtggagcatatcccggagg

SEQ ID NO: 205803 - DNA, 25 bp, Canis familiaris
ttctgggtggacaacaccacctcgg

SEQ ID NO: 205804 - DNA, 25 bp, Canis familiaris
ttctgggaaataacctcgcagtcag

SEQ ID NO: 205805 - DNA, 25 bp, Canis familiaris
ttctggagccaatttcctcggtgag

SEQ ID NO: 205806 - DNA, 25 bp, Canis familiaris
ttcaggaccacaatgctcttcgagg

SEQ ID NO: 205807 - DNA, 25 bp, Canis familiaris
ttcaggaccacagtgcctttttggg

SEQ ID NO: 205808 - DNA, 25 bp, Canis familiaris
ttcatgtaccgagtgctcctttagg

SEQ ID NO: 205809 - DNA, 25 bp, Canis familiaris
ttcatttcacgggctgccctggagg

SEQ ID NO: 205810 - DNA, 25 bp, Canis familiaris
ttcattacccgctgggctggagaac

SEQ ID NO: 205811 - DNA, 25 bp, Canis familiaris
ttcattaccgcctggggcagcagaa

SEQ ID NO: 205812 - DNA, 25 bp, Canis familiaris
ttctttttgccacagcggaggacac

SEQ ID NO: 205813 - DNA, 25 bp, Canis familiaris
ttctttctggaacacctgggagcac

SEQ ID NO: 205814 - DNA, 25 bp, Canis familiaris
ttcttgtcccagagagccgtggaga

SEQ ID NO: 205815 - DNA, 25 bp, Canis familiaris
ttcattccagcccaggcagacggga

SEQ ID NO: 205816 - DNA, 25 bp, Canis familiaris
ttcagcccagccctgtggaatgggg

SEQ ID NO: 205817 - DNA, 25 bp, Canis familiaris
ttcagcccatcacgctgtggtttga

SEQ ID NO: 205818 - DNA, 25 bp, Canis familiaris
ttcagcccataaatatgttttcgtg

SEQ ID NO: 205819 - DNA, 25 bp, Canis familiaris
ttcagcattcttttctgtttttgtt

SEQ ID NO: 205820 - DNA, 25 bp, Canis familiaris
ttcatgtcctgtttttgttacttgt

SEQ ID NO: 205821 - DNA, 25 bp, Canis familiaris
ttcatgtttgtttatttctccttat

SEQ ID NO: 205822 - DNA, 25 bp, Canis familiaris
ttcatttgactttttctatacttat

SEQ ID NO: 205823 - DNA, 25 bp, Canis familiaris
ttgcattaaccatctatcttagcat

SEQ ID NO: 205824 - DNA, 25 bp, Canis familiaris
ttcttacctaatccactggcagctg

SEQ ID NO: 205825 - DNA, 25 bp, Canis familiaris
ttcattcccttaaccatcatggtga

SEQ ID NO: 205826 - DNA, 25 bp, Canis familiaris
ttcttcccatttgccaagagggggg

SEQ ID NO: 205827 - DNA, 25 bp, Canis familiaris
ttcttcccaggtgccagggcagaga

SEQ ID NO: 205828 - DNA, 25 bp, Canis familiaris
ttccttcaaggtgggaagggagatt

SEQ ID NO: 205829 - DNA, 25 bp, Canis familiaris
ttctctctaaggagaatggcccagt

SEQ ID NO: 205830 - DNA, 25 bp, Canis familiaris
ttctttgactggcctgaagcgccca

SEQ ID NO: 205831 - DNA, 25 bp, Canis familiaris
ttcttcgactgggaggagcactaca

SEQ ID NO: 205832 - DNA, 25 bp, Canis familiaris
ttctatgggcgtgcagtggccccag

SEQ ID NO: 205833 - DNA, 25 bp, Canis familiaris
ttctcagggttcctggtggcaccaa

SEQ ID NO: 205834 - DNA, 25 bp, Canis familiaris
ttcagtggaggggctggctggacct

SEQ ID NO: 205835 - DNA, 25 bp, Canis familiaris
ttcgcggagttggagcgctggccgc

SEQ ID NO: 205836 - DNA, 25 bp, Canis familiaris
ttcaggccgtgtcaagctggcccag

SEQ ID NO: 205837 - DNA, 25 bp, Canis familiaris
ttctttctgtcacaagggcccagga

SEQ ID NO: 205838 - DNA, 25 bp, Canis familiaris
ttctcttcattacaagggtcatctg

SEQ ID NO: 205839 - DNA, 25 bp, Canis familiaris
ttcatcctttgaaacatggttgcta

SEQ ID NO: 205840 - DNA, 25 bp, Canis familiaris
ttgctccttaaaactaatgctgtca

SEQ ID NO: 205841 - DNA, 25 bp, Canis familiaris
ttcatttcgacaaaccagcactgta

SEQ ID NO: 205842 - DNA, 25 bp, Canis familiaris
ttctcttctgacagactcgacagag

SEQ ID NO: 205843 - DNA, 25 bp, Canis familiaris
ttctcagtcgtcacagtctggatat

SEQ ID NO: 205844 - DNA, 25 bp, Canis familiaris
ttctcgatcgatttcggtggctgac

SEQ ID NO: 205845 - DNA, 25 bp, Canis familiaris
ttcttgacgctctcatcgtggatga

SEQ ID NO: 205846 - DNA, 25 bp, Canis familiaris
ttcattgacctcaactacatggttt

SEQ ID NO: 205847 - DNA, 25 bp, Canis familiaris
ttcttgaccgcatctgtactgtatt

SEQ ID NO: 205848 - DNA, 25 bp, Canis familiaris
ttcttagccaattctgtgacgctgt

SEQ ID NO: 205849 - DNA, 25 bp, Canis familiaris
ttcttcgccactcaggaagtgctgt

SEQ ID NO: 205850 - DNA, 25 bp, Canis familiaris
ttcttcccattctggtttctgtaga

SEQ ID NO: 205851 - DNA, 25 bp, Canis familiaris
ttcttctgtattttcctttttggat

SEQ ID NO: 205852 - DNA, 25 bp, Canis familiaris
ttcgtcgtatgtttctatattttga

SEQ ID NO: 205853 - DNA, 25 bp, Canis familiaris
ttctgtttatatatttagttctacc

SEQ ID NO: 205854 - DNA, 25 bp, Canis familiaris
ttcattctttttttggactcttaca

SEQ ID NO: 205855 - DNA, 25 bp, Canis familiaris
ttcattttccttctggagactccca

SEQ ID NO: 205856 - DNA, 25 bp, Canis familiaris
ttcttttcaattctagcttctctgc

SEQ ID NO: 205857 - DNA, 25 bp, Canis familiaris
ttcttttatcctcttcttgttcaga

SEQ ID NO: 205858 - DNA, 25 bp, Canis familiaris
ttcccttatcctatatttgacccac

SEQ ID NO: 205859 - DNA, 25 bp, Canis familiaris
ttcccaaacccttattgagacagcc

SEQ ID NO: 205860 - DNA, 25 bp, Canis familiaris
ttccccataccccacaggggagact

SEQ ID NO: 205861 - DNA, 25 bp, Canis familiaris
ttccccaactctgacaaacggtctg

SEQ ID NO: 205862 - DNA, 25 bp, Canis familiaris
ttcccaaccgtttaaacagagatct

SEQ ID NO: 205863 - DNA, 25 bp, Canis familiaris
ttctcgcgaccgtacaaaaaccacg

SEQ ID NO: 205864 - DNA, 25 bp, Canis familiaris
ttctcggctcttgacacttagccgc

SEQ ID NO: 205865 - DNA, 25 bp, Canis familiaris
ttcttgcctcttgggccattactag

SEQ ID NO: 205866 - DNA, 25 bp, Canis familiaris
ttctcatgtgcttgttggccatgtc

SEQ ID NO: 205867 - DNA, 25 bp, Canis familiaris
ttctaggtattccagcattgctcca

SEQ ID NO: 205868 - DNA, 25 bp, Canis familiaris
ttctaactgtttccattctccaggc

SEQ ID NO: 205869 - DNA, 25 bp, Canis familiaris
ttctgaatcattccaacattataca

SEQ ID NO: 205870 - DNA, 25 bp, Canis familiaris
ttctttatatgcacacatacacaca

SEQ ID NO: 205871 - DNA, 25 bp, Canis familiaris
ttctccatacatcagtcacacacac

SEQ ID NO: 205872 - DNA, 25 bp, Canis familiaris
ttctcagccataaggcgcaacccac

SEQ ID NO: 205873 - DNA, 25 bp, Canis familiaris
ttctcagccatgacatgtgatcagt

SEQ ID NO: 205874 - DNA, 25 bp, Canis familiaris
ttctcacgcagcagcgacgtcatca

SEQ ID NO: 205875 - DNA, 25 bp, Canis familiaris
ttctgcacacgctggaaggccatgc

SEQ ID NO: 205876 - DNA, 25 bp, Canis familiaris
ttctgagctggaagagcaacccaca

SEQ ID NO: 205877 - DNA, 25 bp, Canis familiaris
ttctacgtgtactcatgcacgcaca

SEQ ID NO: 205878 - DNA, 25 bp, Canis familiaris
ttccacgagtacctcaactcacgga

SEQ ID NO: 205879 - DNA, 25 bp, Canis familiaris
ttcagggagctagctgaggccacgg

SEQ ID NO: 205880 - DNA, 25 bp, Canis familiaris
ttcggtgtgctgggcttggcccagg

SEQ ID NO: 205881 - DNA, 25 bp, Canis familiaris
ttctgggcatcgtgcatgtgaccca

SEQ ID NO: 205882 - DNA, 25 bp, Canis familiaris
ttctgcaggtcagtgtcttactcca

SEQ ID NO: 205883 - DNA, 25 bp, Canis familiaris
ttctgaaggatttttgtgcccattc

SEQ ID NO: 205884 - DNA, 25 bp, Canis familiaris
ttctggaggaattcctcgcacccac

SEQ ID NO: 205885 - DNA, 25 bp, Canis familiaris
ttcatggactttttctctatcccac

SEQ ID NO: 205886 - DNA, 25 bp, Canis familiaris
ttcatttcatttttcatctcttcta

SEQ ID NO: 205887 - DNA, 25 bp, Canis familiaris
ttcatcttctctccatttttgttaa

SEQ ID NO: 205888 - DNA, 25 bp, Canis familiaris
ttcttagcactgtcttttatattaa

SEQ ID NO: 205889 - DNA, 25 bp, Canis familiaris
ttcttcagcctttaattaatttttg

SEQ ID NO: 205890 - DNA, 25 bp, Canis familiaris
ttcttcagccctaaatcttcattgt

SEQ ID NO: 205891 - DNA, 25 bp, Canis familiaris
ttctttgccctgatacaccaggctc

SEQ ID NO: 205892 - DNA, 25 bp, Canis familiaris
ttctttccctgaaggagctacctcc

SEQ ID NO: 205893 - DNA, 25 bp, Canis familiaris
ttcttttcttatacggtcgcctaca

SEQ ID NO: 205894 - DNA, 25 bp, Canis familiaris
ttctcctttttgaaatgtggcctta

SEQ ID NO: 205895 - DNA, 25 bp, Canis familiaris
ttccctaactgcccaaggggctcag

SEQ ID NO: 205896 - DNA, 25 bp, Canis familiaris
ttccctaactgcccaaggggctcag

SEQ ID NO: 205897 - DNA, 25 bp, Canis familiaris
ttctctctaaccccagggtttcgca

SEQ ID NO: 205898 - DNA, 25 bp, Canis familiaris
ttctttgaacgctcagtttttctga

SEQ ID NO: 205899 - DNA, 25 bp, Canis familiaris
ttgtttgacccgtatgttttggcat

SEQ ID NO: 205900 - DNA, 25 bp, Canis familiaris
ttcttaagccctttgctcttggagt

SEQ ID NO: 205901 - DNA, 25 bp, Canis familiaris
ttctcaaaccccttctctatgaaat

SEQ ID NO: 205902 - DNA, 25 bp, Canis familiaris
ttctcacaccgagctgttatcatga

SEQ ID NO: 205903 - DNA, 25 bp, Canis familiaris
ttctccaccagcttctgtgtagaat

SEQ ID NO: 205904 - DNA, 25 bp, Canis familiaris
ttcatcccactctgctgttaagggc

SEQ ID NO: 205905 - DNA, 25 bp, Canis familiaris
ttctctccgctagctcttaacgaga

SEQ ID NO: 205906 - DNA, 25 bp, Canis familiaris
ttctctcatctttgaatctctaacc

SEQ ID NO: 205907 - DNA, 25 bp, Canis familiaris
ttcatctctgcctagtacttaactc

SEQ ID NO: 205908 - DNA, 25 bp, Canis familiaris
ttcatcatctcgtttactcttacaa

SEQ ID NO: 205909 - DNA, 25 bp, Canis familiaris
ttcatactctaaattctgcttccca

SEQ ID NO: 205910 - DNA, 25 bp, Canis familiaris
ttcagaccacagacaacctgctccc

SEQ ID NO: 205911 - DNA, 25 bp, Canis familiaris
ttcatacacacgtacacactcacac

SEQ ID NO: 205912 - DNA, 25 bp, Canis familiaris
ttctaactcgctcgaatctcagcaa

SEQ ID NO: 205913 - DNA, 25 bp, Canis familiaris
ttcttcagtcgccgacatgcagctc

SEQ ID NO: 205914 - DNA, 25 bp, Canis familiaris
ttcgtcgtcgtcgatctgagcatgc

SEQ ID NO: 205915 - DNA, 25 bp, Canis familiaris
ttcagtcttctgtcacatacatgat

SEQ ID NO: 205916 - DNA, 25 bp, Canis familiaris
ttctgcctcttgtactgcagcagct

SEQ ID NO: 205917 - DNA, 25 bp, Canis familiaris
ttctgcgtgctgaaatctgctccaa

SEQ ID NO: 205918 - DNA, 25 bp, Canis familiaris
ttctcaggtgagtcctgtccagctc

SEQ ID NO: 205919 - DNA, 25 bp, Canis familiaris
ttctgctggaggccaatccacaggc

SEQ ID NO: 205920 - DNA, 25 bp, Canis familiaris
ttcgtggtgtggatgcgcacggcgg

SEQ ID NO: 205921 - DNA, 25 bp, Canis familiaris
ttctggtttggaacgctggagcggg

SEQ ID NO: 205922 - DNA, 25 bp, Canis familiaris
ttgcggtacggtacccatgactggt

SEQ ID NO: 205923 - DNA, 25 bp, Canis familiaris
ttctgggatccagtccccaattagt

SEQ ID NO: 205924 - DNA, 25 bp, Canis familiaris
ttctggaatcgagtccctcattggg

SEQ ID NO: 205925 - DNA, 25 bp, Canis familiaris
ttcaggaactggaacctcttctctg

SEQ ID NO: 205926 - DNA, 25 bp, Canis familiaris
ttctgaggtcggttcgttgtctttc

SEQ ID NO: 205927 - DNA, 25 bp, Canis familiaris
ttctgtggtggctgttttgttttgt

SEQ ID NO: 205928 - DNA, 25 bp, Canis familiaris
ttctgggtatgcttctgttgtttgt

SEQ ID NO: 205929 - DNA, 25 bp, Canis familiaris
ttctgggtgcatttgcttgttttct

SEQ ID NO: 205930 - DNA, 25 bp, Canis familiaris
ttctgacaggcatgaggtgatatct

SEQ ID NO: 205931 - DNA, 25 bp, Canis familiaris
ttctgatattcataggcagatattt

SEQ ID NO: 205932 - DNA, 25 bp, Canis familiaris
ttctgattaatcctcgcaagtgaat

SEQ ID NO: 205933 - DNA, 25 bp, Canis familiaris
ttctcttatactgctcgcagtaatt

SEQ ID NO: 205934 - DNA, 25 bp, Canis familiaris
ttctgttcgagggccctgtaaattg

SEQ ID NO: 205935 - DNA, 25 bp, Canis familiaris
ttcgtttagtgagcctgtaggatcc

SEQ ID NO: 205936 - DNA, 25 bp, Canis familiaris
ttctttgtggtggtgtctgtctgga

SEQ ID NO: 205937 - DNA, 25 bp, Canis familiaris
ttctttgggctagtggcttgggata

SEQ ID NO: 205938 - DNA, 25 bp, Canis familiaris
ttctgtggtgttgctggttcttata

SEQ ID NO: 205939 - DNA, 25 bp, Canis familiaris
ttcttgggcactgtggtctgcagca

SEQ ID NO: 205940 - DNA, 25 bp, Canis familiaris
ttgttaggcctgggcttgctggacc

SEQ ID NO: 205941 - DNA, 25 bp, Canis familiaris
ttcgaacgggcaagtgttggacacc

SEQ ID NO: 205942 - DNA, 25 bp, Canis familiaris
ttcgacgcggacaaggtggtggaca

SEQ ID NO: 205943 - DNA, 25 bp, Canis familiaris
ttgcgatcaggccaccaagtctggc

SEQ ID NO: 205944 - DNA, 25 bp, Canis familiaris
ttctgctggatgccatcccaggttc

SEQ ID NO: 205945 - DNA, 25 bp, Canis familiaris
ttctggcggcaaacccgttgcgaaa

SEQ ID NO: 205946 - DNA, 25 bp, Canis familiaris
ttcgagtggcattcccactttctgg

SEQ ID NO: 205947 - DNA, 25 bp, Canis familiaris
ttcaggctcagtgcacgagctttct

SEQ ID NO: 205948 - DNA, 25 bp, Canis familiaris
ttcagtctcattccctagtatttgg

SEQ ID NO: 205949 - DNA, 25 bp, Canis familiaris
ttcgtctttcctcagtatactgcag

SEQ ID NO: 205950 - DNA, 25 bp, Canis familiaris
ttctgtttgcccacagtcaactcat

SEQ ID NO: 205951 - DNA, 25 bp, Canis familiaris
ttcttttccgtgcatgtgcacccag

SEQ ID NO: 205952 - DNA, 25 bp, Canis familiaris
ttctcttccattttgtggcatccca

SEQ ID NO: 205953 - DNA, 25 bp, Canis familiaris
ttctctacacatttttacctccatg

SEQ ID NO: 205954 - DNA, 25 bp, Canis familiaris
ttcttaattatatctacagctccac

SEQ ID NO: 205955 - DNA, 25 bp, Canis familiaris
ttcattaatttatatccactccatt

SEQ ID NO: 205956 - DNA, 25 bp, Canis familiaris
ttctacatatataaaaccccctcta

SEQ ID NO: 205957 - DNA, 25 bp, Canis familiaris
ttgcaagtgcaataaacccggcccg

SEQ ID NO: 205958 - DNA, 25 bp, Canis familiaris
ttcaggatattaagacacccggccc

SEQ ID NO: 205959 - DNA, 25 bp, Canis familiaris
ttcatggatagtaaaacctcgtgtc

SEQ ID NO: 205960 - DNA, 25 bp, Canis familiaris
ttcatggcatggatcttacccgtga

SEQ ID NO: 205961 - DNA, 25 bp, Canis familiaris
ttctcatgtggattcttacctcgga

SEQ ID NO: 205962 - DNA, 25 bp, Canis familiaris
ttccagtatgattctacccacggca

SEQ ID NO: 205963 - DNA, 25 bp, Canis familiaris
ttccaatatgattccacccatggca

SEQ ID NO: 205964 - DNA, 25 bp, Canis familiaris
ttctcaaatatactccccaaaaatg

SEQ ID NO: 205965 - DNA, 25 bp, Canis familiaris
ttctgaccacaacactacaaaaact

SEQ ID NO: 205966 - DNA, 25 bp, Canis familiaris
ttctactcctcacagctaaaacagc

SEQ ID NO: 205967 - DNA, 25 bp, Canis familiaris
ttgtggccccacaaggaaattcctt

SEQ ID NO: 205968 - DNA, 25 bp, Canis familiaris
ttctgaggtgccctaggaggcttcc

SEQ ID NO: 205969 - DNA, 25 bp, Canis familiaris
ttctgaggctagctcgagttgtccc

SEQ ID NO: 205970 - DNA, 25 bp, Canis familiaris
ttctgagagcccttggaggctgccc

SEQ ID NO: 205971 - DNA, 25 bp, Canis familiaris
ttgctgtaccaaatagggctcccca

SEQ ID NO: 205972 - DNA, 25 bp, Canis familiaris
ttctggcacacaattaggtatcccc

SEQ ID NO: 205973 - DNA, 25 bp, Canis familiaris
ttcgctgaagtttagtctaccctct

SEQ ID NO: 205974 - DNA, 25 bp, Canis familiaris
ttcggaagttcatgctgggcacctt

SEQ ID NO: 205975 - DNA, 25 bp, Canis familiaris
ttctggcaagatgcaggggaccctt

SEQ ID NO: 205976 - DNA, 25 bp, Canis familiaris
ttctttattccaggtgtgacgcctt

SEQ ID NO: 205977 - DNA, 25 bp, Canis familiaris
ttcatgtttttctgttgacgctcct

SEQ ID NO: 205978 - DNA, 25 bp, Canis familiaris
ttcttttgagtgtagttcacgctga

SEQ ID NO: 205979 - DNA, 25 bp, Canis familiaris
ttctcttgtgagatggttacctgga

SEQ ID NO: 205980 - DNA, 25 bp, Canis familiaris
ttctctgtggacattgttggcactg

SEQ ID NO: 205981 - DNA, 25 bp, Canis familiaris
ttctcttcacacatatttccacggt

SEQ ID NO: 205982 - DNA, 25 bp, Canis familiaris
ttcgcttccaagttctgtttggagg

SEQ ID NO: 205983 - DNA, 25 bp, Canis familiaris
ttctcattcaagctcactgtattag

SEQ ID NO: 205984 - DNA, 25 bp, Canis familiaris
ttcatcttcttttgcacttatttgg

SEQ ID NO: 205985 - DNA, 25 bp, Canis familiaris
ttcatcttcttttccttgttttaag

SEQ ID NO: 205986 - DNA, 25 bp, Canis familiaris
ttcttgtgttcattccactgtctta

SEQ ID NO: 205987 - DNA, 25 bp, Canis familiaris
ttctttggctgatccatcttgcact

SEQ ID NO: 205988 - DNA, 25 bp, Canis familiaris
ttcattttgcgtacagctcttgcta

SEQ ID NO: 205989 - DNA, 25 bp, Canis familiaris
ttcttgatatggaatcttgcttata

SEQ ID NO: 205990 - DNA, 25 bp, Canis familiaris
ttcttccatgagacactttaccaga

SEQ ID NO: 205991 - DNA, 25 bp, Canis familiaris
ttcttcccagaactctttacagtcc

SEQ ID NO: 205992 - DNA, 25 bp, Canis familiaris
ttcttactcaaatctttcttaccag

SEQ ID NO: 205993 - DNA, 25 bp, Canis familiaris
ttcattactcaattctgtttctata

SEQ ID NO: 205994 - DNA, 25 bp, Canis familiaris
ttcattgttaatttgttctcataaa

SEQ ID NO: 205995 - DNA, 25 bp, Canis familiaris
ttctttatcaatattatctcagtaa

SEQ ID NO: 205996 - DNA, 25 bp, Canis familiaris
ttctttatcaacattatctctctta

SEQ ID NO: 205997 - DNA, 25 bp, Canis familiaris
ttcttccaaaatatgctctgtccca

SEQ ID NO: 205998 - DNA, 25 bp, Canis familiaris
ttcttctgtgaaatcctgtctgtcc

SEQ ID NO: 205999 - DNA, 25 bp, Canis familiaris
ttctttctgtcctcattctgtacag

SEQ ID NO: 206000 - DNA, 25 bp, Canis familiaris
ttcattgtttctgggcctatgtcca

SEQ ID NO: 206001 - DNA, 25 bp, Canis familiaris
ttcatgtgtcttgtagctctaacta

SEQ ID NO: 206002 - DNA, 25 bp, Canis familiaris
ttcttgccgatcctgagtctgcaac

SEQ ID NO: 206003 - DNA, 25 bp, Canis familiaris
ttcttccacatcctgtggctgttct

SEQ ID NO: 206004 - DNA, 25 bp, Canis familiaris
ttcttccctccaatccatgggattc

SEQ ID NO: 206005 - DNA, 25 bp, Canis familiaris
ttcttgctccgcatgtcttgaggat

SEQ ID NO: 206006 - DNA, 25 bp, Canis familiaris
ttctgtcctatctgtcttgggttta

SEQ ID NO: 206007 - DNA, 25 bp, Canis familiaris
ttctgtaacatctctattttgttct

SEQ ID NO: 206008 - DNA, 25 bp, Canis familiaris
ttcattctttcttctactttgttca

SEQ ID NO: 206009 - DNA, 25 bp, Canis familiaris
ttcatttttgtaataacattttatt

SEQ ID NO: 206010 - DNA, 25 bp, Canis familiaris
ttctttctttttcagggattattat

SEQ ID NO: 206011 - DNA, 25 bp, Canis familiaris
ttcatattcatttgtatccaaggtg

SEQ ID NO: 206012 - DNA, 25 bp, Canis familiaris
ttcattgacattgtctctccatgga

SEQ ID NO: 206013 - DNA, 25 bp, Canis familiaris
ttcttgtcttcttctccacgagaag

SEQ ID NO: 206014 - DNA, 25 bp, Canis familiaris
ttctcactttctttccacaagtcat

SEQ ID NO: 206015 - DNA, 25 bp, Canis familiaris
ttcatacatttgtgctgcccgtgta

SEQ ID NO: 206016 - DNA, 25 bp, Canis familiaris
ttcatccatgttgtagccggtgtta

SEQ ID NO: 206017 - DNA, 25 bp, Canis familiaris
ttcatgtctgtttctactagggatt

SEQ ID NO: 206018 - DNA, 25 bp, Canis familiaris
ttcgtctggtttggctagggtctga

SEQ ID NO: 206019 - DNA, 25 bp, Canis familiaris
ttctgccttgctttggacagtggtc

SEQ ID NO: 206020 - DNA, 25 bp, Canis familiaris
ttctttttcatttgacatgggccac

SEQ ID NO: 206021 - DNA, 25 bp, Canis familiaris
ttctttttctttgcacaacacctac

SEQ ID NO: 206022 - DNA, 25 bp, Canis familiaris
ttcttgttttattcctatataccca

SEQ ID NO: 206023 - DNA, 25 bp, Canis familiaris
ttcatttttaaagccatttcactgc

SEQ ID NO: 206024 - DNA, 25 bp, Canis familiaris
ttctcttcgataaagcccgtgtcgc

SEQ ID NO: 206025 - DNA, 25 bp, Canis familiaris
ttcctgaactactgtcctgttctgc

SEQ ID NO: 206026 - DNA, 25 bp, Canis familiaris
ttcttgaaactctctggtttctgca

SEQ ID NO: 206027 - DNA, 25 bp, Canis familiaris
ttctcttaacctactttttgctgca

SEQ ID NO: 206028 - DNA, 25 bp, Canis familiaris
ttcttctgggcctggattttgctca

SEQ ID NO: 206029 - DNA, 25 bp, Canis familiaris
ttcttcattgctgataggtgtttta

SEQ ID NO: 206030 - DNA, 25 bp, Canis familiaris
ttcttgctctctgatgatgggttta

SEQ ID NO: 206031 - DNA, 25 bp, Canis familiaris
ttcttgctcctccgatggggtagga

SEQ ID NO: 206032 - DNA, 25 bp, Canis familiaris
ttcttgctagcttcttgcgacagaa

SEQ ID NO: 206033 - DNA, 25 bp, Canis familiaris
ttctgtctcagatttcccaagtaac

SEQ ID NO: 206034 - DNA, 25 bp, Canis familiaris
ttctgttgaggtccacctgatgcta

SEQ ID NO: 206035 - DNA, 25 bp, Canis familiaris
ttctttgcaagtctcctgatggtca

SEQ ID NO: 206036 - DNA, 25 bp, Canis familiaris
ttctttgcttcgctgaatatataca

SEQ ID NO: 206037 - DNA, 25 bp, Canis familiaris
ttctgtggcctctttggatctataa

SEQ ID NO: 206038 - DNA, 25 bp, Canis familiaris
ttcttgcagcctggtttctctgaaa

SEQ ID NO: 206039 - DNA, 25 bp, Canis familiaris
ttcttctgctcattgtgattcccat

SEQ ID NO: 206040 - DNA, 25 bp, Canis familiaris
ttctatgtgacatttctcttccatt

SEQ ID NO: 206041 - DNA, 25 bp, Canis familiaris
ttctgcatggactcaccattccaaa

SEQ ID NO: 206042 - DNA, 25 bp, Canis familiaris
ttctcatgaactcaccattccaacg

SEQ ID NO: 206043 - DNA, 25 bp, Canis familiaris
ttctgaagacatcagtcccctgacc

SEQ ID NO: 206044 - DNA, 25 bp, Canis familiaris
ttctcaaacatgagtctctccttcc

SEQ ID NO: 206045 - DNA, 25 bp, Canis familiaris
ttctaaatcagatcactcccacatc

SEQ ID NO: 206046 - DNA, 25 bp, Canis familiaris
ttctctttcagatcatctgcctaac

SEQ ID NO: 206047 - DNA, 25 bp, Canis familiaris
ttctccggcatgaactcccaaatgc

SEQ ID NO: 206048 - DNA, 25 bp, Canis familiaris
ttgcgccgccagaagcgcttcaagt

SEQ ID NO: 206049 - DNA, 25 bp, Canis familiaris
ttgccggtcaggtgtccaaggccaa

SEQ ID NO: 206050 - DNA, 25 bp, Canis familiaris
ttctgagggaggggtcctgggcaca

SEQ ID NO: 206051 - DNA, 25 bp, Canis familiaris
ttctgaaggatgtctgcccgggtac

SEQ ID NO: 206052 - DNA, 25 bp, Canis familiaris
ttccaagagatgtggccagggctgc

SEQ ID NO: 206053 - DNA, 25 bp, Canis familiaris
ttctgagcgagaggacccaggttcc

SEQ ID NO: 206054 - DNA, 25 bp, Canis familiaris
ttcgggagggacctgcagagctccg

SEQ ID NO: 206055 - DNA, 25 bp, Canis familiaris
ttctggagacgcgggctcagagtcc

SEQ ID NO: 206056 - DNA, 25 bp, Canis familiaris
ttcttgcaactcttggtcggtgttt

SEQ ID NO: 206057 - DNA, 25 bp, Canis familiaris
ttccgccaacagagtccgtgtgtgg

SEQ ID NO: 206058 - DNA, 25 bp, Canis familiaris
ttctgaccgacttttccagtgtgtg

SEQ ID NO: 206059 - DNA, 25 bp, Canis familiaris
ttcttccacactttcttggttctga

SEQ ID NO: 206060 - DNA, 25 bp, Canis familiaris
ttctctccagagcttttcaacttga

SEQ ID NO: 206061 - DNA, 25 bp, Canis familiaris
ttcatcagccggattttgttattga

SEQ ID NO: 206062 - DNA, 25 bp, Canis familiaris
ttcatcagccggattttgttattga

SEQ ID NO: 206063 - DNA, 25 bp, Canis familiaris
ttcatccatttgagttatctttgtg

SEQ ID NO: 206064 - DNA, 25 bp, Canis familiaris
ttctcctttttcttgattctagttc

SEQ ID NO: 206065 - DNA, 25 bp, Canis familiaris
ttctttatatttccgtttgtgtcac

SEQ ID NO: 206066 - DNA, 25 bp, Canis familiaris
ttcttctgtttatagtggctggtgc

SEQ ID NO: 206067 - DNA, 25 bp, Canis familiaris
ttcttctgtactaacctgtctggag

SEQ ID NO: 206068 - DNA, 25 bp, Canis familiaris
ttcttcctcagtatctctgttgtgg

SEQ ID NO: 206069 - DNA, 25 bp, Canis familiaris
ttcattcttcccatctcatgtaaga

SEQ ID NO: 206070 - DNA, 25 bp, Canis familiaris
ttctccttccccatctaaaagagtg

SEQ ID NO: 206071 - DNA, 25 bp, Canis familiaris
ttcggcttccctattatcttcaagg

SEQ ID NO: 206072 - DNA, 25 bp, Canis familiaris
ttctggcttccacacttttaactgg

SEQ ID NO: 206073 - DNA, 25 bp, Canis familiaris
ttcggatactacaccggtaagtggg

SEQ ID NO: 206074 - DNA, 25 bp, Canis familiaris
ttcggtacaccatccggtgattgtt

SEQ ID NO: 206075 - DNA, 25 bp, Canis familiaris
ttccctacccaagcactggagtttt

SEQ ID NO: 206076 - DNA, 25 bp, Canis familiaris
ttccctcgacatgttcctaggttgt

SEQ ID NO: 206077 - DNA, 25 bp, Canis familiaris
ttctcagttacttttttgaagttgg

SEQ ID NO: 206078 - DNA, 25 bp, Canis familiaris
ttctccaatagcccctgttaggttt

SEQ ID NO: 206079 - DNA, 25 bp, Canis familiaris
ttctccaaccccatgtcataattta

SEQ ID NO: 206080 - DNA, 25 bp, Canis familiaris
ttgcttcaaacctcataaaacttaa

SEQ ID NO: 206081 - DNA, 25 bp, Canis familiaris
ttgttccacttctcagattcaacct

SEQ ID NO: 206082 - DNA, 25 bp, Canis familiaris
ttcttccacttctgcagaatttcct

SEQ ID NO: 206083 - DNA, 25 bp, Canis familiaris
ttcatgctgcccatcaagcgaatat

SEQ ID NO: 206084 - DNA, 25 bp, Canis familiaris
ttctctgcccatcaaggaatctgag

SEQ ID NO: 206085 - DNA, 25 bp, Canis familiaris
ttctcagccttgcagataagtgtgg

SEQ ID NO: 206086 - DNA, 25 bp, Canis familiaris
ttctcaattgtgtgaaatgcattct

SEQ ID NO: 206087 - DNA, 25 bp, Canis familiaris
ttctcaatctggtctgaaccctcac

SEQ ID NO: 206088 - DNA, 25 bp, Canis familiaris
ttctttcatgagttaggtcttcctg

SEQ ID NO: 206089 - DNA, 25 bp, Canis familiaris
ttctttctggaaagctgactgccct

SEQ ID NO: 206090 - DNA, 25 bp, Canis familiaris
ttctttctggagttttctgggttgg

SEQ ID NO: 206091 - DNA, 25 bp, Canis familiaris
ttctcttgtaacttgcttctggtgt

SEQ ID NO: 206092 - DNA, 25 bp, Canis familiaris
ttctctttgaggggcacttgttgat

SEQ ID NO: 206093 - DNA, 25 bp, Canis familiaris
ttctctttgagccctactattgagt

SEQ ID NO: 206094 - DNA, 25 bp, Canis familiaris
ttcatcctctggccaaacaactgtg

SEQ ID NO: 206095 - DNA, 25 bp, Canis familiaris
ttcatcagcttccccaaaatattat

SEQ ID NO: 206096 - DNA, 25 bp, Canis familiaris
ttctctgcttatcccatacgtaata

SEQ ID NO: 206097 - DNA, 25 bp, Canis familiaris
ttctctgccggctgtgaagtaataa

SEQ ID NO: 206098 - DNA, 25 bp, Canis familiaris
ttctgtgcacaggtttataattata

SEQ ID NO: 206099 - DNA, 25 bp, Canis familiaris
ttctgtgcatacgcttgatttcaat

SEQ ID NO: 206100 - DNA, 25 bp, Canis familiaris
ttctctgcatcagcttctgtcttaa

SEQ ID NO: 206101 - DNA, 25 bp, Canis familiaris
ttcttgccgctttctgtcatataag

SEQ ID NO: 206102 - DNA, 25 bp, Canis familiaris
ttcttgccgctttctgtcatataag

SEQ ID NO: 206103 - DNA, 25 bp, Canis familiaris
ttctttccatatttatcttcgaaat

SEQ ID NO: 206104 - DNA, 25 bp, Canis familiaris
ttcatttcactacttttctccaaat

SEQ ID NO: 206105 - DNA, 25 bp, Canis familiaris
ttcatttcctctcttgtccaaaata

SEQ ID NO: 206106 - DNA, 25 bp, Canis familiaris
ttctttcccagaatttcagccaaaa

SEQ ID NO: 206107 - DNA, 25 bp, Canis familiaris
ttctttcccaatttttcataaatat

SEQ ID NO: 206108 - DNA, 25 bp, Canis familiaris
ttctttcccaatttttcataaatat

SEQ ID NO: 206109 - DNA, 25 bp, Canis familiaris
ttctttcccaatttttcataaatat

SEQ ID NO: 206110 - DNA, 25 bp, Canis familiaris
ttctttcccaatttttcataaatat

SEQ ID NO: 206111 - DNA, 25 bp, Canis familiaris
ttctttccccatttttcataaatat

SEQ ID NO: 206112 - DNA, 25 bp, Canis familiaris
ttctttccccatttttcataaatat

SEQ ID NO: 206113 - DNA, 25 bp, Canis familiaris
ttctttcctctaattttcaaccatt

SEQ ID NO: 206114 - DNA, 25 bp, Canis familiaris
ttctattctccagtggtttccatct

SEQ ID NO: 206115 - DNA, 25 bp, Canis familiaris
ttctgttgtccctgtctgggactca

SEQ ID NO: 206116 - DNA, 25 bp, Canis familiaris
ttctttttcctccacatggtactac

SEQ ID NO: 206117 - DNA, 25 bp, Canis familiaris
ttctctcttttggctactgttacta

SEQ ID NO: 206118 - DNA, 25 bp, Canis familiaris
ttctctattccttctaagcttaaaa

SEQ ID NO: 206119 - DNA, 25 bp, Canis familiaris
ttccttcccttaaacagctaacgtg

SEQ ID NO: 206120 - DNA, 25 bp, Canis familiaris
ttccttgccactaactcacaatttc

SEQ ID NO: 206121 - DNA, 25 bp, Canis familiaris
ttccggcgcataaagtcagcaaggt

SEQ ID NO: 206122 - DNA, 25 bp, Canis familiaris
ttcgctacactaacagctccacaga

SEQ ID NO: 206123 - DNA, 25 bp, Canis familiaris
ttctgaagcctctactgcatcaaag

SEQ ID NO: 206124 - DNA, 25 bp, Canis familiaris
ttctctaggctctacctgctaagcc

SEQ ID NO: 206125 - DNA, 25 bp, Canis familiaris
ttctgctagggcatctctctatagt

SEQ ID NO: 206126 - DNA, 25 bp, Canis familiaris
ttctctgaaccattctcttaagtca

SEQ ID NO: 206127 - DNA, 25 bp, Canis familiaris
ttctcgacccaattcatctaagcat

SEQ ID NO: 206128 - DNA, 25 bp, Canis familiaris
ttctcaacagctgttcccaagcaag

SEQ ID NO: 206129 - DNA, 25 bp, Canis familiaris
ttctcagaagctgatttaaaagagc

SEQ ID NO: 206130 - DNA, 25 bp, Canis familiaris
ttctcatgatcagtcttattaaagg

SEQ ID NO: 206131 - DNA, 25 bp, Canis familiaris
ttctcacatgcttctgtttatatgg

SEQ ID NO: 206132 - DNA, 25 bp, Canis familiaris
ttctcacgcttttgctcgaatggaa

SEQ ID NO: 206133 - DNA, 25 bp, Canis familiaris
ttcgaggcttctttcagtaggaccg

SEQ ID NO: 206134 - DNA, 25 bp, Canis familiaris
ttctgaagtacttaattaggccttc

SEQ ID NO: 206135 - DNA, 25 bp, Canis familiaris
ttctgtactactttgttagggcagt

SEQ ID NO: 206136 - DNA, 25 bp, Canis familiaris
ttctctttcactctgttaggactgc

SEQ ID NO: 206137 - DNA, 25 bp, Canis familiaris
ttctcttgctcctttttaatatgtg

SEQ ID NO: 206138 - DNA, 25 bp, Canis familiaris
ttctcttgcccattttggaggcggc

SEQ ID NO: 206139 - DNA, 25 bp, Canis familiaris
ttctcactcctgtttcagggtgggt

SEQ ID NO: 206140 - DNA, 25 bp, Canis familiaris
ttctggctcacgtgtcaggagggga

SEQ ID NO: 206141 - DNA, 25 bp, Canis familiaris
ttcggccacgagcttcgatggagga

SEQ ID NO: 206142 - DNA, 25 bp, Canis familiaris
ttccgaagcaaccttcctgcgaaag

SEQ ID NO: 206143 - DNA, 25 bp, Canis familiaris
ttccaggagcgagatccctccaaaa

SEQ ID NO: 206144 - DNA, 25 bp, Canis familiaris
ttctctggcaaagacgatcccaaat

SEQ ID NO: 206145 - DNA, 25 bp, Canis familiaris
ttctctgtaagagtacgcatcccct

SEQ ID NO: 206146 - DNA, 25 bp, Canis familiaris
ttcatcatggatatttctgctgccc

SEQ ID NO: 206147 - DNA, 25 bp, Canis familiaris
ttctcatgtatttctttgccattcc

SEQ ID NO: 206148 - DNA, 25 bp, Canis familiaris
ttctttgttctcaattccatctgca

SEQ ID NO: 206149 - DNA, 25 bp, Canis familiaris
ttcatttttctctatgtctgtgcca

SEQ ID NO: 206150 - DNA, 25 bp, Canis familiaris
ttctctatttcttgaactgtctgca

SEQ ID NO: 206151 - DNA, 25 bp, Canis familiaris
ttctatcatcccaaaactggataca

SEQ ID NO: 206152 - DNA, 25 bp, Canis familiaris
ttctgaaccacaataaatttacaaa

SEQ ID NO: 206153 - DNA, 25 bp, Canis familiaris
ttccaaccatatataattaattaca

SEQ ID NO: 206154 - DNA, 25 bp, Canis familiaris
ttcgacaccgtcttaacaaactcca

SEQ ID NO: 206155 - DNA, 25 bp, Canis familiaris
ttcgaactggggttaaccactgtca

SEQ ID NO: 206156 - DNA, 25 bp, Canis familiaris
ttgagccccggggtaaccagtgtca

SEQ ID NO: 206157 - DNA, 25 bp, Canis familiaris
ttggcgggggggtggtcagataaag

SEQ ID NO: 206158 - DNA, 25 bp, Canis familiaris
ttgggcccggggctgaagaagaaag

SEQ ID NO: 206159 - DNA, 25 bp, Canis familiaris
ttctacccggggctggtgaagtaca

SEQ ID NO: 206160 - DNA, 25 bp, Canis familiaris
ttctccccagggggggctggtatca

SEQ ID NO: 206161 - DNA, 25 bp, Canis familiaris
ttctaccgagggtcctgagctggtg

SEQ ID NO: 206162 - DNA, 25 bp, Canis familiaris
ttctacggggcatcaggtcttgcga

SEQ ID NO: 206163 - DNA, 25 bp, Canis familiaris
ttctacgttggatttctgtctttgt

SEQ ID NO: 206164 - DNA, 25 bp, Canis familiaris
ttcttctgttggtttgcaaccttag

SEQ ID NO: 206165 - DNA, 25 bp, Canis familiaris
ttctgttgttgccctggcagacatc

SEQ ID NO: 206166 - DNA, 25 bp, Canis familiaris
ttcttgctgttgccttggagttcac

SEQ ID NO: 206167 - DNA, 25 bp, Canis familiaris
ttcttctgctggcatgtggctttca

SEQ ID NO: 206168 - DNA, 25 bp, Canis familiaris
ttctgtccatctgttcgtattgcaa

SEQ ID NO: 206169 - DNA, 25 bp, Canis familiaris
ttctgttcatcgcttctgtatttat

SEQ ID NO: 206170 - DNA, 25 bp, Canis familiaris
ttctttctcaccccaggatgtattg

SEQ ID NO: 206171 - DNA, 25 bp, Canis familiaris
ttctcctcaacctcaacattttgga

SEQ ID NO: 206172 - DNA, 25 bp, Canis familiaris
ttcttcccaccagtgaacttttgaa

SEQ ID NO: 206173 - DNA, 25 bp, Canis familiaris
ttcttcccggacaaacatttactga

SEQ ID NO: 206174 - DNA, 25 bp, Canis familiaris
ttctacccaagagagccttaccagg

SEQ ID NO: 206175 - DNA, 25 bp, Canis familiaris
ttctccgtacagtggccttactacg

SEQ ID NO: 206176 - DNA, 25 bp, Canis familiaris
ttctcggtccagaggcttgatccta

SEQ ID NO: 206177 - DNA, 25 bp, Canis familiaris
ttctcggaccgaggacttcacaacc

SEQ ID NO: 206178 - DNA, 25 bp, Canis familiaris
ttctcggacctgaaatcttacaaca

SEQ ID NO: 206179 - DNA, 25 bp, Canis familiaris
ttctcagcagccgttaattgtacat

SEQ ID NO: 206180 - DNA, 25 bp, Canis familiaris
ttctaccctctatattgttcaatag

SEQ ID NO: 206181 - DNA, 25 bp, Canis familiaris
ttcttccctgttatctgcttaatag

SEQ ID NO: 206182 - DNA, 25 bp, Canis familiaris
ttcttgcctcttttttctattataa

SEQ ID NO: 206183 - DNA, 25 bp, Canis familiaris
ttcgacctccagttgttcatgttga

SEQ ID NO: 206184 - DNA, 25 bp, Canis familiaris
ttctattcccagtttttgttccatg

SEQ ID NO: 206185 - DNA, 25 bp, Canis familiaris
ttcttccactcattattttttcttt

SEQ ID NO: 206186 - DNA, 25 bp, Canis familiaris
ttcttatcctcatcaattctgctta

SEQ ID NO: 206187 - DNA, 25 bp, Canis familiaris
ttctttctctcagcacttgactaat

SEQ ID NO: 206188 - DNA, 25 bp, Canis familiaris
ttctctgagatgctggacttgactg

SEQ ID NO: 206189 - DNA, 25 bp, Canis familiaris
ttcctgcagctgcataactggatcg

SEQ ID NO: 206190 - DNA, 25 bp, Canis familiaris
ttctcgtcatggtcaacgtgatctt

SEQ ID NO: 206191 - DNA, 25 bp, Canis familiaris
ttctttagaatccagctttcatttc

SEQ ID NO: 206192 - DNA, 25 bp, Canis familiaris
ttcttccaaacttgtgttcttgcct

SEQ ID NO: 206193 - DNA, 25 bp, Canis familiaris
ttctagccaaccattttgcctgttt

SEQ ID NO: 206194 - DNA, 25 bp, Canis familiaris
ttctatctgcaacattaattcctct

SEQ ID NO: 206195 - DNA, 25 bp, Canis familiaris
ttctactccctcttaaatccataag

SEQ ID NO: 206196 - DNA, 25 bp, Canis familiaris
ttctcagctcccagcagaaacatct

SEQ ID NO: 206197 - DNA, 25 bp, Canis familiaris
ttctgagcatacctggaaaatgctt

SEQ ID NO: 206198 - DNA, 25 bp, Canis familiaris
ttctggaaagggtgaatgtttgccc

SEQ ID NO: 206199 - DNA, 25 bp, Canis familiaris
ttggtgacccgtcaaagtttcccag

SEQ ID NO: 206200 - DNA, 25 bp, Canis familiaris
ttgggtcctggtcagggtagtccct

SEQ ID NO: 206201 - DNA, 25 bp, Canis familiaris
ttcggtcgcgggcgtgaggaacccg

SEQ ID NO: 206202 - DNA, 25 bp, Canis familiaris
ttcggtctccgttgactacaacacc

SEQ ID NO: 206203 - DNA, 25 bp, Canis familiaris
ttcttcctctctaagactactaatc

SEQ ID NO: 206204 - DNA, 25 bp, Canis familiaris
ttcttcctgctctagttcaattact

SEQ ID NO: 206205 - DNA, 25 bp, Canis familiaris
ttcttcatctcatagctaaaatagc

SEQ ID NO: 206206 - DNA, 25 bp, Canis familiaris
ttctgaccacaatgatataaaacta

SEQ ID NO: 206207 - DNA, 25 bp, Canis familiaris
ttctctcacacgtgcaaaagaccaa

SEQ ID NO: 206208 - DNA, 25 bp, Canis familiaris
ttctatcctgtgtgccataataaaa

SEQ ID NO: 206209 - DNA, 25 bp, Canis familiaris
ttcttcacttcttccataaaaaatc

SEQ ID NO: 206210 - DNA, 25 bp, Canis familiaris
ttcttccttcgattgctgaaataaa

SEQ ID NO: 206211 - DNA, 25 bp, Canis familiaris
ttcttgcaccaagtccgaattgaaa

SEQ ID NO: 206212 - DNA, 25 bp, Canis familiaris
ttgttgatcctaaccaaagcagaaa

SEQ ID NO: 206213 - DNA, 25 bp, Canis familiaris
ttctcttcagcttctccagaacaga

SEQ ID NO: 206214 - DNA, 25 bp, Canis familiaris
ttctcttctttcctcagatcaatgt

SEQ ID NO: 206215 - DNA, 25 bp, Canis familiaris
ttctgttttgtgttaagcatcattt

SEQ ID NO: 206216 - DNA, 25 bp, Canis familiaris
ttctgttgtttgtttatctcttggc

SEQ ID NO: 206217 - DNA, 25 bp, Canis familiaris
ttcgtctttttaaatcccgctcaag

SEQ ID NO: 206218 - DNA, 25 bp, Canis familiaris
ttcgtcctgtaaatatagcccctca

SEQ ID NO: 206219 - DNA, 25 bp, Canis familiaris
ttctctactttaattgacatcccta

SEQ ID NO: 206220 - DNA, 25 bp, Canis familiaris
ttcttcctttgaaaatctcttgcaa

SEQ ID NO: 206221 - DNA, 25 bp, Canis familiaris
ttctcccatgttaaatactaatcct

SEQ ID NO: 206222 - DNA, 25 bp, Canis familiaris
ttcgtccatttgttacaaaactcac

SEQ ID NO: 206223 - DNA, 25 bp, Canis familiaris
ttctgcccatttctacagaaaccag

SEQ ID NO: 206224 - DNA, 25 bp, Canis familiaris
ttctgacaatctcgctaaaggacac

SEQ ID NO: 206225 - DNA, 25 bp, Canis familiaris
ttctatccctttgacactacacaat

SEQ ID NO: 206226 - DNA, 25 bp, Canis familiaris
ttctacccttctttcctaatgaaca

SEQ ID NO: 206227 - DNA, 25 bp, Canis familiaris
ttctcaccgaccagatcctaaggaa

SEQ ID NO: 206228 - DNA, 25 bp, Canis familiaris
ttctccctgacctgggttggacata

SEQ ID NO: 206229 - DNA, 25 bp, Canis familiaris
ttcattgccgacctggtggtggggc

SEQ ID NO: 206230 - DNA, 25 bp, Canis familiaris
ttctagagagacctgggggcctggc

SEQ ID NO: 206231 - DNA, 25 bp, Canis familiaris
ttctcaacaaccagcagttcctggc

SEQ ID NO: 206232 - DNA, 25 bp, Canis familiaris
ttctctccaaaagagctcatctctg

SEQ ID NO: 206233 - DNA, 25 bp, Canis familiaris
ttctcacccaaatatctcagagtga

SEQ ID NO: 206234 - DNA, 25 bp, Canis familiaris
ttccaacaaatgtcaactgtcagga

SEQ ID NO: 206235 - DNA, 25 bp, Canis familiaris
ttcggtcaattgtcactgtcatcag

SEQ ID NO: 206236 - DNA, 25 bp, Canis familiaris
ttctagttgctgggcatctctgtca

SEQ ID NO: 206237 - DNA, 25 bp, Canis familiaris
ttcttattgcttggtcctccattta

SEQ ID NO: 206238 - DNA, 25 bp, Canis familiaris
ttctttcgtttgtatcattccttcc

SEQ ID NO: 206239 - DNA, 25 bp, Canis familiaris
ttctttcgtttgtatcattccttca

SEQ ID NO: 206240 - DNA, 25 bp, Canis familiaris
ttctttcgtttgtatcattccttca

SEQ ID NO: 206241 - DNA, 25 bp, Canis familiaris
ttctttcgtttgtatcattccttca

SEQ ID NO: 206242 - DNA, 25 bp, Canis familiaris
ttctttcgtttgtatcattccttca

SEQ ID NO: 206243 - DNA, 25 bp, Canis familiaris
ttcttcccttttacatactgctgtc

SEQ ID NO: 206244 - DNA, 25 bp, Canis familiaris
ttcctcccgtgggtgctacagattt

SEQ ID NO: 206245 - DNA, 25 bp, Canis familiaris
ttctcccactgggcttgccaaaagt

SEQ ID NO: 206246 - DNA, 25 bp, Canis familiaris
ttgtcccactggggtccaaaaggct

SEQ ID NO: 206247 - DNA, 25 bp, Canis familiaris
ttgccccattaccttccaaggggct

SEQ ID NO: 206248 - DNA, 25 bp, Canis familiaris
ttcccgttaggaagccacagtggcc

SEQ ID NO: 206249 - DNA, 25 bp, Canis familiaris
ttcctctttcatcaagtgccttaca

SEQ ID NO: 206250 - DNA, 25 bp, Canis familiaris
ttctctgttcttcaagtccaggaca

SEQ ID NO: 206251 - DNA, 25 bp, Canis familiaris
ttcttgtttctcaaagacctcctca

SEQ ID NO: 206252 - DNA, 25 bp, Canis familiaris
ttctctgttcccaatgataaccact

SEQ ID NO: 206253 - DNA, 25 bp, Canis familiaris
ttctgtcttcaacaaataacacatt

SEQ ID NO: 206254 - DNA, 25 bp, Canis familiaris
ttctgcgcttcaataacacaaactg

SEQ ID NO: 206255 - DNA, 25 bp, Canis familiaris
ttctgctgcgacaataaaacctccc
